(19) United States
(12) Patent Application Publication
(10) Pub. No.: US 2019/0048337 A1
(43) Pub. Date: Feb. 14, 2019

(54) Crispr/Cas-Related Methods and Compositions for Treating Duchenne Muscular Dystrophy and Becker

(71) Applicant: EDITAS MEDICINE, INC., Cambridge, MA (US)

(72) Inventors: Patrick David Hsu, La Jolla, CA (US); Morgan Lee Maeder, Jamaica Plain, MA (US); Penrose Odonnell, Yarmouth, ME (US); Joshua C. Tycko, Cambridge, MA (US); Nicholas C. Huston, Lawrenceville, NJ (US)

(73) Assignee: EDITAS MEDICINE, INC., Cambridge, MA (US)

(21) Appl. No.: 15/732,190

(22) Filed: Sep. 29, 2017

Related U.S. Application Data
(63) Continuation of application No. PCT/US2016/025738, filed on Apr. 1, 2016.
(60) Provisional application No. 62/310,479, filed on Mar. 18, 2016.
(60) Provisional application No. 62/141,833, filed on Apr. 1, 2015.

(51) Int. Cl. C12N 15/11; C12N 9/22; C12N 15/90

(52) U.S. Cl. CPC C12N 15/11; C12N 9/22; C12N 2800/80; C12N 2310/20; C12N 15/907

(57) ABSTRACT

CRISPR/CAS-related compositions and methods for treatment of DMD, BMD, or DCM type 3B are described.

### CROSS-REFERENCES TO RELATED APPLICATIONS

[0001] This application is a Continuation of International Patent Application No. PCT/US2016/025738, filed Apr. 1, 2016, which claims priority to U.S. Provisional Application No. 62/141,833, filed Apr. 1, 2015, and U.S. Provisional Application No. 62/310,479, filed Mar. 18, 2016, the contents of each of which are hereby incorporated by reference in their entirety herein, and to each of which priority is claimed.

### SEQUENCE LISTING

[0002] The specification further incorporates by reference the Sequence Listing submitted herewith via EFS on Sep. 29, 2017. Pursuant to 37 C.F.R. § 1.52(e)(5), the Sequence Listing text file, identified as 084177.0153_ST25.txt, is 157,009,150 bytes and was created on Sep. 28, 2017. The entire contents of the Sequence Listing are hereby incorporated by reference. The Sequence Listing does not extend beyond the scope of the specification and thus does not contain new matter.

### FIELD OF INVENTION

[0003] The invention relates to CRISPR/CAS-related methods, compositions and genome-editing systems for editing of a target nucleic acid sequence, e.g., editing a DMD gene (e.g., human DMD gene), and applications thereof in connection with Duchenne Muscular Dystrophy (DMD), Becker Muscular Dystrophy (BMD) and dilated cardiomyopathy (DCM).

### BACKGROUND

[0004] Duchenne muscular dystrophy (DMD) is a severe, progressive inherited muscular dystrophy. Becker muscular dystrophy (BMD) is a moderately severe, progressive inherited muscular dystrophy. Dilated cardiomyopathy (DCM) type 3B (also called DMD-associated dilated cardiomyopathy or DCM3B) is a severe, progressive disease of cardiac muscle.

[0005] DMD, BMD and DCM type 3B result from mutations in the DMD gene. The DMD gene is located on the X chromosome at locus Xp21. The DMD gene is 2.2 megabases in length and comprises 79 exons (Roberts et al., Genomics 1993: 16:536-8). DMD gene encodes a dystrophin protein, which is over 3500 amino acids in length. Dystrophin is an essential structural protein expressed in muscle cells that connects the cytoskeleton to the extracellular matrix (Ervasti et al., Journal of Cell Biology 1993; 122(4): 809-823). In subjects with DMD, BMD and DCM type 3B, mutations in DMD gene lead to a lack of dystrophin expression that causes necrosis and eventual fibrosis of muscle tissue.

[0006] DMD is one of the most common fatal genetic disorders diagnosed in childhood. It affects 1 in 3500 boys worldwide (Drousiotou et al., Genetic Testing 1998; 2:55-60; Emery, Neuromuscular Disorders 1991; 1:19-29; Bradley et al., Seminars in Neonatology 1998; 3:27-34; Emery. “Duchenne Muscular Dystrophy” 2nd Ed. New York: Oxford University Press; 1988.). Annually, about 20,000 infants are diagnosed with the disease worldwide. BMD affects 3-6 in every 100,000 births. DMD, BMD and DCM type 3B mainly affect boys; female carriers are rarely affected.

[0007] There are a variety of mutations in the DMD gene that cause DMD, BMD and DCM type 3B. 70% of subjects with DMD or BMD have mutations in the region of exons 44-55, representing a mutational hotspot (Kunkel et al., Nature 1986; 322:73-75). This region corresponds to the rod domain of dystrophin. Nearly 30% of subjects with DMD or BMD have mutations in the region of exons 2-20 (Wapennar et al., Genomics 1998; 2:10-18). About 60% of the mutations in DMD gene are large deletions and 5% of the mutations are duplications (Bennett Ibid). Approximately 35% of the mutations are point mutations causing premature termination codons due to nonsense or frame-shift mutations. Mutations may also be aberrant splice acceptor sites or aberrant splice donor sites (White et al., American Journal of Human Genetics 2002; 71:365-374).

[0008] Subjects with DMD develop muscle weakness between ages 2 and 5 and lose the ability to walk in their teens, requiring the use of a wheelchair (Boland et al., Pediatric Neurology 1996; 14(1):7-12). Death most commonly occurs in the third decade due to dilated cardiomyopathy or respiratory failure (Sussman et al., American Academy of Orthopedic Surgery 2002; 10(2): 138-151). Subjects with BMD have a later onset of muscle weakness (or may have no muscle weakness). BMD causes death in most subjects in the mid-40s due to dilated cardiomyopathy.

[0009] Dilated cardiomyopathy affects subjects with DMD, BMD and DCM type 3B. Males present with dilated cardiomyopathy between age 20 and 40; females present later in life. After presentation, cardiomyopathy-related heart failure leads to rapid progression to death in males and death after approximately 10 years in females (Beggs, Circulation 1997; 95:2344-2347).

[0010] Currently, no treatments fully prevent the progression of disease and eventual death in DMD, BMD and DCM type 3B. Steroids slightly slow the progression of disease and time to loss of ambulation (Manzur et al., Cochrane Database of Systemic Reviews 2008; (1):CD003725.). Ventilatory support also provides some prolongation of life as smooth muscles of the diaphragm fail (Manzur et al., Archives of Diseases of Childhood 2008; 93(11):986-990; Villanova et al., American Journal of Physical Medicine and Rehabilitation 2014; 93(7):595-599). ACE inhibitors and beta-blockers can be administered to treat dilated cardiomyopathy, and may offer slight benefit in slowing the progression to heart failure (Colan, Circulation 2005; 112:2756-2758. Duboc et al., American Heart Journal 2007; 154:596-602).

[0011] Modern gene therapy approaches have faced significant barriers due to the size of the DMD gene; delivery of such a large gene has not proven feasible. Oligonucleotide-based exon skipping therapies are in development and may delay progression of disease. However, there are barriers to the long-term success of these approaches. These therapies are likely to require repeat administration annually or every several years to ensure continued presence of the exon skipping machinery (oligonucleotides and/or proteins) in muscle cells. The administration of exon skipping therapies or gene therapies requires multiple (e.g., once every 1-5 year basis) intramuscular (IM) injections of viral vectors to access muscle cells. All of these consequences of repeat administration threaten to compromise the efficacy of the therapy. Hence, there is a need for improved treatment of DMD, BMD and cardiomyopathy type 3B.

### SUMMARY OF THE INVENTION

[0012] The methods, genome-editing systems, and compositions discussed herein provide for treating or delaying the onset or progression of diseases of skeletal, cardiac and smooth muscle, e.g. disorders that affect skeletal muscle cells, cardiomyocytes, cardiac muscle cells and smooth muscle cells.

[0013] The methods, genome-editing systems, and compositions discussed herein provide for treating or delaying the onset or progression of Duchenne muscular dystrophy (DMD), Becker muscular dystrophy (BMD), dilated cardiomyopathy (DCM) type 3B, or a symptom associated thereof (e.g., dilated cardiomyopathy, e.g., DMD-associated dilated cardiomyopathy). DMD, BMD and DCM type 3B can be caused by a mutation in the DMD gene, e.g., a deletion, a duplication, a nonsense, a frameshift, or a splice site donor or splice site acceptor mutation in the DMD gene. The DMD gene is also known as: BMD; CMD3B; MRX85; DXS142; DXS164; DXS206; DXS230; DXS239; DXS268; DXS269; DXS270; or DXS272.

[0014] In certain embodiments, methods, genome-editing systems, and compositions discussed herein provide for altering a DMD target position in the DMD gene. In certain embodiments, the methods, genome-editing systems, and compositions described herein introduce one or more breaks near the site of the DMD target position in at least one allele of the DMD gene. Altering the DMD target position refers to: (1) break-induced deletion (e.g., NHEJ-mediated deletion) of genomic sequence including the DMD target position; or (2) break-induced introduction of an indel (e.g., NHEJ-mediated introduction of an indel) in close proximity to or including the DMD target position. Either approach can give rise to a dystrophin sequence that has correct reading frame.

[0015] In certain embodiments disclosed herein, the DMD gene can be altered by gene editing, e.g., using CRISPR-Cas9 mediated methods as described herein. Methods and compositions discussed herein provide for altering a DMD target position in the DMD gene. The alteration of the DMD gene can be mediated by any mechanism. Exemplary mechanisms that can be associated with the alteration of the DMD gene include, but are not limited to, non-homologous end joining (e.g., classical or alternative), microhomology-mediated end joining (MMEJ), SDSA (synthesis dependent strand annealing) or single strand annealing or single strand invasion.

[0016] In certain embodiments, a single strand break is introduced (e.g., positioned by one gRNA molecule) at or in close proximity to a DMD target position in the DMD gene. In certain embodiments, a single gRNA molecule (e.g., with a Cas9 nickase) is used to create a single strand break at or in close proximity to the DMD target position, e.g., the gRNA is configured such that the single strand break is positioned either upstream (e.g., within 500, 400, 300, 200, 100, 50, 25, or 10 bp upstream) or downstream (e.g., within 500, 400, 300, 200, 100, 50, 25, or 10 bp downstream) of the DMD target position. In certain embodiments, the break is positioned to avoid unwanted target chromosome elements, such as repeat elements, e.g., an Alu repeat.

[0017] In certain embodiments, a double strand break is introduced (e.g., positioned by one gRNA molecule) at or in close proximity to a DMD target position in the DMD gene. In certain embodiments, a single gRNA molecule (e.g., with a Cas9 nuclease other than a Cas9 nickase) is used to create a double strand break at or in close proximity to the DMD target position, e.g., the gRNA molecule is configured such that the double strand break is positioned either upstream (e.g., within 500, 400, 300, 200, 100, 50, 25, or 10 bp upstream) or downstream of (e.g., within 500, 400, 300, 200, 100, 50, 25, or 10 bp downstream) of a DMD target position. In certain embodiments, the break is positioned to avoid unwanted target chromosome elements, such as repeat elements, e.g., an Alu repeat.

[0018] In certain embodiments, two single strand breaks are introduced (e.g., positioned by two gRNA molecules) at or in close proximity to a DMD target position in the DMD gene. In certain embodiments, two gRNA molecules (e.g., with one or two Cas9 nickcases) are used to create two single strand breaks at or in close proximity to the DMD target position, e.g., the gRNAs molecules are configured such that both of the single strand breaks are positioned upstream (e.g., within 500, 400, 300, 200, 100, 50, 25, or 10 bp upstream) or downstream (e.g., within 500, 400, 300, 200, 100, 50, 25, or 10 bp downstream) of the DMD target position. In certain embodiments, two gRNA molecules (e.g., with two Cas9 nickcases) are used to create two single strand breaks at or in close proximity to the DMD target position, e.g., the gRNAs molecules are configured such that one single strand break is positioned upstream (e.g., within 500, 400, 300, 200, 100, 50, 25, or 10 bp upstream) and a second single strand break is positioned downstream (e.g., within 500, 400, 300, 200, 100, 50, 25, or 10 bp downstream) of the DMD target position. In certain embodiments, the breaks are positioned to avoid unwanted target chromosome elements, such as repeat elements, e.g., an Alu repeat.

[0019] In certain embodiments, two double strand breaks are introduced (e.g., positioned by two gRNA molecules) at or in close proximity to a DMD target position in the DMD gene. In certain embodiments, two gRNA molecules (e.g., with one or two Cas9 nucleases that are not Cas9 nickases) are used to create two double strand breaks to flank a DMD target position, e.g., the gRNA molecules are configured such that one double strand break is positioned upstream (e.g., within 500, 400, 300, 200, 100, 50, 25, or 10 bp upstream) and a second double strand break is positioned downstream (e.g., within 500, 400, 300, 200, 100, 50, 25, or 10 bp downstream) of the DMD target position. In certain embodiments, the breaks are positioned to avoid unwanted target chromosome elements, such as repeat elements, e.g., an Alu repeat.

[0020] In certain embodiments, one double strand break and two single strand breaks are introduced (e.g., positioned by three gRNA molecules) at or in close proximity to a DMD target position in the DMD gene. In certain embodiments, three gRNA molecules (e.g., with a Cas9 nuclease other than a Cas9 nickase and one or two Cas9 nickases) to create one double strand break and two single strand breaks to flank a DMD target position, e.g., the gRNA molecules are configured such that the double strand break is positioned upstream or downstream of (e.g., within 500, 400, 300, 200, 100, 50, 25, or 10 bp upstream or downstream) of the DMD target position, and the two single strand breaks are positioned at the opposite site, e.g., downstream or upstream (within 200 bp downstream or upstream), of the DMD target position. In certain embodiments, the breaks are positioned to avoid unwanted target chromosome elements, such as repeat elements, e.g., an Alu repeat.

[0021] In certain embodiments, four single strand breaks are introduced (e.g., positioned by four gRNA molecules) at or in close proximity to a DMD target position in the DMD gene. In certain embodiments, four gRNA molecule (e.g., with one or more Cas9 nickases are used to create four single strand breaks to flank a DMD target position in the DMD gene, e.g., the gRNA molecules are configured such that a first and second single strand breaks are positioned upstream (e.g., within 500, 400, 300, 200, 100, 50, 25, or 10 bp upstream) of the DMD target position, and a third and a fourth single stranded breaks are positioned downstream (e.g., within 500, 400, 300, 200, 100, 50, 25, or 10 bp downstream) of the DMD target position. In certain embodiments, the breaks are positioned to avoid unwanted target chromosome elements, such as repeat elements, e.g., an Alu repeat.

[0022] In certain embodiments, two or more (e.g., three or four) gRNA molecules are used with one Cas9 molecule. In certain embodiments, when two or more (e.g., three or four) gRNAs are used with two or more Cas9 molecules, at least one Cas9 molecule is from a different species than the other Cas9 molecule(s). For example, when two gRNA molecules are used with two Cas9 molecules, one Cas9 molecule can be from one species and the other Cas9 molecule can be from a different species. Both Cas9 species are used to generate a single or double-strand break, as desired.

[0023] When two or more gRNAs are used to position two or more cleavage events, e.g., double strand or single strand breaks, in a target nucleic acid, it is contemplated that the two or more cleavage events may be made by the same or different Cas9 proteins. For example, when two gRNAs are used to position two double strand breaks, a single Cas9 nuclease may be used to create both double strand breaks. When two or more gRNAs are used to position two or more single stranded breaks (single strand breaks), a single Cas9 nickase may be used to create the two or more single strand breaks. When two or more gRNAs are used to position at least one double strand break and at least one single strand break, two Cas9 proteins may be used, e.g., one Cas9 nuclease and one Cas9 nickase. It is contemplated that when two or more Cas9 proteins are used that the two or more Cas9 proteins may be delivered sequentially to control specificity of a double strand versus a single strand break at the desired position in the target nucleic acid.

[0024] In certain embodiments, the targeting domain of the first gRNA molecule and the targeting domain of the second gRNA molecule hybridize to the target domain through complementary base pairing to opposite strands of the target nucleic acid molecule. In certain embodiments, the gRNA molecule and the second gRNA molecule are configured such that the PAMs are oriented outward.

[0025] In certain embodiments, the targeting domain of a gRNA molecule is configured to avoid unwanted target chromosome elements, such as repeat elements, e.g., an Alu repeat, or the endogenous DMD splice sites, in the target domain. The gRNA molecule may be a first, second, third and/or fourth gRNA molecule.

[0026] In certain embodiments, the targeting domain of a gRNA molecule is configured to position a cleavage event sufficiently far from a preselected nucleotide, e.g., the nucleotide of a coding region, such that the nucleotide is not altered. In certain embodiments, the targeting domain of a gRNA molecule is configured to position an intronic cleavage event sufficiently far from an intron/exon border, or naturally occurring splice signal, to avoid alteration of the exonic sequence or unwanted splicing events. The gRNA molecule may be a first, second, third and/or fourth gRNA molecule, as described herein.

[0027] In certain embodiments, two or more gRNAs (e.g., a pair of gRNAs) are used to position breaks, e.g., two single stranded breaks or two double stranded breaks, or a combination of single strand and double strand breaks, e.g., to create one or more indels or deletions, in the DMD gene sequence, wherein the targeting domains of each gRNAs can comprise nucleotide sequences set forth in SEQ ID NOs:206-826366.

[0028] The presently disclosed subject matter provides for a gRNA molecule, e.g., an isolated or non-naturally occurring gRNA molecule, comprising a targeting domain which is complementary with a target domain from the DMD gene.

[0029] In certain embodiments, the targeting domain of the gRNA molecule is configured to target an exon of the DMD gene. In certain embodiments, the targeting domain of the gRNA molecule is configured to target exon 51 of the DMD gene. In certain embodiments, the targeting domain of the gRNA molecule is configured to target an intron of the DMD gene. In certain embodiments, the targeting domain of the gRNA molecule is configured to target intron 50 or intron 51 of the DMD gene. In certain embodiments, the targeting domain comprises a sequence that is identical to, or differs by no more than 1, no more than 2, no more than 3, no more than 4 or no more than 5 nucleotides from a nucleotide sequence selected from SEQ ID NOs: 206-826366. In certain embodiments, the targeting domain comprises or consists of a nucleotide sequence selected from SEQ ID NOs: 206-826366. In certain embodiments, the gRNA is a unimodular gRNA molecule. In certain embodiments, the gRNA is a chimeric gRNA molecule.

[0030] In certain embodiments, the targeting domain is 16 or more nucleotides in length. In certain embodiments, the targeting domain is 17 nucleotides in length. In certain embodiments, the targeting domain is 18 nucleotides in length. In certain embodiments, the targeting domain is 19 nucleotides in length. In certain embodiments, the targeting domain is 20 nucleotides in length. In certain embodiments, the targeting domain is 21 nucleotides in length. In certain embodiments, the targeting domain is 22 nucleotides in length. In certain embodiments, the targeting domain is 23 nucleotides in length. In certain embodiments, the targeting domain is 24 nucleotides in length. In certain embodiments, the targeting domain is 25 nucleotides in length. In certain embodiments, the targeting domain is 26 nucleotides in length.

[0031] In certain embodiments, the gRNA comprises from 5′ to 3′: a targeting domain (comprising a “core domain”, and optionally a “secondary domain”); a first complementarity domain; a linking domain; a second complementarity domain; a proximal domain; and a tail domain. In certain embodiments, the proximal domain and tail domain are taken together as a single domain.

[0032] In certain embodiments, the gRNA comprises a linking domain of no more than 25 nucleotides in length; a proximal and tail domain, that taken together, are at least 20, at least 30, or at least 40 nucleotides in length; and a targeting domain of 16, 17, 18, 19, 20, 21, 22, 23, 24, 25 or 26 nucleotides in length

[0033] A cleavage event, e.g., a double strand or single strand break, is generated by a Cas9 molecule. In certain embodiments, the Cas9 molecule forms a double strand break or a single strand break in a target nucleic acid (e.g., a nickase molecule). In certain embodiments, the Cas9 molecule catalyzes a double strand break.

[0034] In certain embodiments, the Cas9 molecule comprises HNH-like domain cleavage activity but has no, or no significant, N-terminal RuvC-like domain cleavage activity. In certain embodiments, the Cas9 molecule is an HNH-like domain nickase, e.g., the Cas9 molecule comprises a mutation at D10, e.g., D10A. In certain embodiments, the Cas9 molecule comprises N-terminal RuvC-like domain cleavage activity but has no, or no significant, HNH-like domain cleavage activity. In certain embodiments, the Cas9 molecule is an N-terminal RuvC-like domain nickase, e.g., the Cas9 molecule comprises a mutation at H840, e.g., H840A. In certain embodiments, the Cas9 molecule is an N-terminal RuvC-like domain nickase, e.g., the Cas9 molecule comprises a mutation at N863, e.g., the N863A mutation.

[0035] In certain embodiments, a single strand break is formed in the strand of the target nucleic acid to which the targeting domain of said gRNA is complementary. In certain embodiments, a single strand break is formed in the strand of the target nucleic acid other than the strand to which the targeting domain of said gRNA is complementary.

[0036] The presently disclosed subject matter also provides for a nucleic acid composition, e.g., an isolated or non-naturally occurring nucleic acid composition, e.g., DNA, that comprises (a) a first nucleotide sequence that encodes a first gRNA molecule comprising a targeting domain that is complementary with a target domain in DMD gene as disclosed herein.

[0037] In certain embodiments, the nucleic acid composition further comprises (b) a second nucleotide sequence that encodes a Cas9 molecule as described above. In certain embodiments, a nucleic acid composition further comprises (c) a third nucleotide sequence that encodes a second gRNA molecule comprising a targeting domain that is complementary to a second target domain of the DMD gene. The second gRNA molecule can be any one of the gRNAs described above. In certain embodiments, the targeting domain of said second gRNA comprises or consists of a sequence that is identical to, or differs by no more than 1, no more than 2, no more than 3, no more than 4 or no more than 5 nucleotides from a nucleotide sequence selected from SEQ ID NOs: 206-826366. In certain embodiments, the first gRNA molecule and the second gRNA molecule are selected from the group consisting of:

[0038] (a) a first gRNA molecule comprising a targeting domain that comprises a nucleotide sequence set forth in SEQ ID NO: 1977, and a second gRNA molecule comprising a targeting domain that comprises a nucleotide sequence set forth in SEQ ID NO: 2048;

[0039] (b) a first gRNA molecule comprising a targeting domain that comprises a nucleotide sequence set forth in SEQ ID NO: 18458, and a second gRNA molecule comprising a targeting domain that comprises a nucleotide sequence set forth in SEQ ID NO: 2048;

[0040] (c) a first gRNA molecule comprising a targeting domain that comprises a nucleotide sequence set forth in SEQ ID NO: 19199, and a second gRNA molecule comprising a targeting domain that comprises a nucleotide sequence set forth in SEQ ID NO: 18720;

[0041] (d) a first gRNA molecule comprising a targeting domain that comprises a nucleotide sequence set forth in SEQ ID NO: 4709, and a second gRNA molecule comprising a targeting domain that comprises a nucleotide sequence set forth in SEQ ID NO: 18720;

[0042] (e) a first gRNA molecule comprising a targeting domain that comprises a nucleotide sequence set forth in SEQ ID NO: 481, and a second gRNA molecule comprising a targeting domain that comprises a nucleotide sequence set forth in SEQ ID NO: 2048;

[0043] (f) a first gRNA molecule comprising a targeting domain that comprises a nucleotide sequence set forth in SEQ ID NO: 4709, and a second gRNA molecule comprising a targeting domain that comprises a nucleotide sequence set forth in SEQ ID NO: 22349;

[0044] (g) a first gRNA molecule comprising a targeting domain that comprises a nucleotide sequence set forth in SEQ ID NO: 5869, and a second gRNA molecule comprising a targeting domain that comprises a nucleotide sequence set forth in SEQ ID NO: 3536;

[0045] (h) a first gRNA molecule comprising a targeting domain that comprises a nucleotide sequence set forth in SEQ ID NO: 18752, and a second gRNA molecule comprising a targeting domain that comprises a nucleotide sequence set forth in SEQ ID NO: 17253;

[0046] (i) a first gRNA molecule comprising a targeting domain that comprises a nucleotide sequence set forth in SEQ ID NO: 20145, and a second gRNA molecule comprising a targeting domain that comprises a nucleotide sequence set forth in SEQ ID NO: 3536;

[0047] (j) a first gRNA molecule comprising a targeting domain that comprises a nucleotide sequence set forth in SEQ ID NO: 19187, and a second gRNA molecule comprising a targeting domain that comprises a nucleotide sequence set forth in SEQ ID NO: 7252;

[0048] (k) a first gRNA molecule comprising a targeting domain that comprises a nucleotide sequence set forth in SEQ ID NO: 18752, and a second gRNA molecule comprising a targeting domain that comprises a nucleotide sequence set forth in SEQ ID NO: 3536; and

[0049] (l) a first gRNA molecule comprising a targeting domain that comprises a nucleotide sequence set forth in SEQ ID NO: 19187; and a second gRNA molecule comprising a targeting domain that comprises a nucleotide sequence set forth in SEQ ID NO: 7419.

[0050] In certain embodiments, the first and second gRNA molecules are selected from the pairs of gRNA molecules listed in Table 15, i.e., selected from the group consisting of:

[0051] (a) a first gRNA molecule comprising a targeting domain that comprises a nucleotide sequence set forth in SEQ ID NO: 2048, and a second gRNA molecule comprising a targeting domain that comprises a nucleotide sequence selected from SEQ ID NOs: 1977, 18458, 481, 9997, 1499, 2121, 8709, 21570, 16467, and 23958;

[0052] (b) a first gRNA molecule comprising a targeting domain that comprises a nucleotide sequence set forth in SEQ ID NO: 19199, and a second gRNA molecule comprising a targeting domain that comprises a nucleotide sequence set forth in SEQ ID NO: 18720;

[0053] (c) a first gRNA molecule comprising a targeting domain that comprises a nucleotide sequence set forth in SEQ ID NO: 18720, SEQ ID NO: 22349 or SEQ ID NO: 10092, and a second gRNA molecule comprising a targeting domain that comprises a nucleotide sequence set forth in SEQ ID NO: 4709 or SEQ ID NO: 20303;

[0054] (d) a first gRNA molecule comprising a targeting domain that comprises a nucleotide sequence set forth in SEQ ID NO: 3536, and a second gRNA molecule comprising a targeting domain that comprises a nucleotide sequence selected from SEQ ID NOs: 5869, 20145, 18752, 20870, 9530, 18062, 4134, and 23958;

[0055] (e) a first gRNA molecule comprising a targeting domain that comprises a nucleotide sequence set forth in SEQ ID NO: 18458, and a second gRNA molecule comprising a targeting domain that comprises a nucleotide sequence set forth in SEQ ID NO: 9765;

[0056] (f) a first gRNA molecule comprising a targeting domain that comprises a nucleotide sequence set forth in SEQ ID NO: 18752, and a second gRNA molecule comprising a targeting domain that comprises a nucleotide sequence selected from SEQ ID NOs: 17253, 14607, 16967, 7419, 1744, and 8569;

[0057] (g) a first gRNA molecule comprising a targeting domain that comprises a nucleotide sequence set forth in SEQ ID NO: 19187, and a second gRNA molecule comprising a targeting domain that comprises a nucleotide sequence selected from SEQ ID NOs: 14695, 7252, 17253, 7419, 1744, 8569, and 9358;

[0058] (h) a first gRNA molecule comprising a targeting domain that comprises a nucleotide sequence set forth in SEQ ID NO: 20145, and a second gRNA molecule comprising a targeting domain that comprises a nucleotide sequence selected from SEQ ID NOs: 5614, 20764, 14607, 8569, and 7252;

[0059] (i) a first gRNA molecule comprising a targeting domain that comprises a nucleotide sequence set forth in SEQ ID NO: 1499, and a second gRNA molecule comprising a targeting domain that comprises a nucleotide sequence set forth in SEQ ID NO: 14296;

[0060] (i) a first gRNA molecule comprising a targeting domain that comprises a nucleotide sequence set forth in SEQ ID NO: 4134, and a second gRNA molecule comprising a targeting domain that comprises a nucleotide sequence selected from SEQ ID NOs: 20924, 4072, and 8569;

[0061] (k) a first gRNA molecule comprising a targeting domain that comprises a nucleotide sequence set forth in SEQ ID NO: 6209, and a second gRNA molecule comprising a targeting domain that comprises a nucleotide sequence selected from SEQ ID NOs: 14035, 13527, 21873, 14298, 7419, and 20924;

[0062] (l) a first gRNA molecule comprising a targeting domain that comprises a nucleotide sequence set forth in SEQ ID NO: 9346, and a second gRNA molecule comprising a targeting domain that comprises a nucleotide sequence selected from SEQ ID NOs: 7419, 20764, and 2769;

[0063] (m) a first gRNA molecule comprising a targeting domain that comprises a nucleotide sequence set forth in SEQ ID NO: 7649, and a second gRNA molecule comprising a targeting domain that comprises a nucleotide sequence selected from SEQ ID NOs: 16967, 1484, 20924, 4072, and 9496;

[0064] (n) a first gRNA molecule comprising a targeting domain that comprises a nucleotide sequence set forth in SEQ ID NO: 5869, and a second gRNA molecule comprising a targeting domain that comprises a nucleotide sequence selected from SEQ ID NOs: 8569, 13527, 1484, 5614, 4072, and 14695;

[0065] (o) a first gRNA molecule comprising a targeting domain that comprises a nucleotide sequence set forth in SEQ ID NO: 4165, and a second gRNA molecule comprising a targeting domain that comprises a nucleotide sequence selected from SEQ ID NOs: 7252, 1484, and 9279;

[0066] (p) a first gRNA molecule comprising a targeting domain that comprises a nucleotide sequence set forth in SEQ ID NO: 15622, and a second gRNA molecule comprising a targeting domain that comprises a nucleotide sequence set forth in SEQ ID NO: 17253;

[0067] (q) a first gRNA molecule comprising a targeting domain that comprises a nucleotide sequence set forth in SEQ ID NO: 18062, and a second gRNA molecule comprising a targeting domain that comprises a nucleotide sequence set forth in SEQ ID NO: 2769 or SEQ ID NO: 14035;

[0068] (r) a first gRNA molecule comprising a targeting domain that comprises a nucleotide sequence set forth in SEQ ID NO: 21131, and a second gRNA molecule comprising a targeting domain that comprises a nucleotide sequence set forth in SEQ ID NO: 13527 or SEQ ID NO: 13285;

[0069] (s) a first gRNA molecule comprising a targeting domain that comprises a nucleotide sequence set forth in SEQ ID NO: 20870, and a second gRNA molecule comprising a targeting domain that comprises a nucleotide sequence set forth in SEQ ID NO: 16967 or SEQ ID NO: 7252;

[0070] (t) a first gRNA molecule comprising a targeting domain that comprises a nucleotide sequence set forth in SEQ ID NO: 16235, and a second gRNA molecule comprising a targeting domain that comprises a nucleotide sequence set forth in SEQ ID NO: 10140;

[0071] (u) a first gRNA molecule comprising a targeting domain that comprises a nucleotide sequence set forth in SEQ ID NO: 15271, and a second gRNA molecule comprising a targeting domain that comprises a nucleotide sequence set forth in SEQ ID NO: 13518;

[0072] (v) a first gRNA molecule comprising a targeting domain that comprises a nucleotide sequence set forth in SEQ ID NO: 11675, and a second gRNA molecule comprising a targeting domain that comprises a nucleotide sequence selected from SEQ ID NOs: 2769, 1484, and 4072; and

[0073] (w) a first gRNA molecule comprising a targeting domain that comprises a nucleotide sequence set forth in SEQ ID NO: 23958, and a second gRNA molecule comprising a targeting domain that comprises a nucleotide sequence set forth in SEQ ID NO: 14035 or SEQ ID NO: 9496.

[0074] In certain embodiments, the nucleic acid composition further comprises a nucleotide sequence that encodes a third gRNA molecule comprising a targeting domain that is complementary to a third target domain of the DMD gene. In certain embodiments, the nucleic acid composition further comprises a nucleotide sequence that encodes a fourth gRNA molecule comprising a targeting domain that is complementary to a fourth target domain of the DMD gene. The targeting domains of the third and the fourth gRNA molecules can comprise nucleotide sequences set forth in SEQ ID NOs: 206-826366.

[0075] In certain embodiments, the second gRNA molecule provides a cleavage event, e.g., a double strand break or a single strand break, sufficiently close to a DMD target position to allow alteration, e.g., alteration associated with NHEJ, of the a DMD target position, either alone or in combination with the break positioned by the first gRNA molecule.

[0076] In certain embodiments, (a) and (b) are present on one nucleic acid molecule, e.g., one vector, e.g., one viral vector, e.g., one adeno-associated virus (AAV) vector. In certain embodiments, the nucleic acid molecule is an AAV vector. Exemplary AAV vectors that may be used in any of the described compositions and methods include an AAV2 vector, a modified AAV2 vector, an AAV3 vector, a modified AAV3 vector, an AAV6 vector, a modified AAV6 vector, an AAV8 vector and an AAV9 vector.

[0077] In certain embodiments, (a) is present on a first nucleic acid molecule, e.g. a first vector, e.g., a first viral vector, e.g., a first AAV vector; and (b) is present on a second nucleic acid molecule, e.g., a second vector, e.g., a second vector, e.g., a second AAV vector. The first and second nucleic acid molecules may be AAV vectors.

[0078] In certain embodiments, (a) and (c) are present on one nucleic acid molecule, e.g., one vector, e.g., one viral vector, e.g., one AAV vector. In certain embodiments, the nucleic acid molecule is an AAV vector. In certain embodiments, (a) and (c) are present on different vectors. For example, (a) is present on a first nucleic acid molecule, e.g. a first vector, e.g., a first viral vector, e.g., a first AAV vector; and (c) is present on a second nucleic acid molecule, e.g., a second vector, e.g., a second vector, e.g., a second AAV vector. In certain embodiments, the first and second nucleic acid molecules are AAV vectors.

[0079] In certain embodiments, (a), (b), and (c) are present on one nucleic acid molecule, e.g., one vector, e.g., one viral vector, e.g., one AAV vector. In certain embodiments, the nucleic acid molecule is an AAV vector. In certain embodiments, one of (a), (b), and (c) is present on a first nucleic acid molecule, e.g., a first vector, e.g., a first viral vector, e.g., a first AAV vector; and a second and third of (a), (b), and (c) is present on a second nucleic acid molecule, e.g., a second vector, e.g., a second vector, e.g., a second AAV vector. The first and second nucleic acid molecule can be AAV vectors.

[0080] In certain embodiments, (a) is present on a first nucleic acid molecule, e.g., a first vector, e.g., a first viral vector, a first AAV vector; and (b) and (c) are present on a second nucleic acid molecule, e.g., a second vector, e.g., a second vector, e.g., a second AAV vector.

[0081] In certain embodiments, (b) is present on a first nucleic acid molecule, e.g., a first vector, e.g., a first viral vector, e.g., a first AAV vector; and (a) and (c) are present on a second nucleic acid molecule, e.g., a second vector, e.g., a second vector, e.g., a second AAV vector.

[0082] In certain embodiments, (c) is present on a first nucleic acid molecule, e.g., a first vector, e.g., a first viral vector, e.g., a first AAV vector; and (b) and (a) are present on a second nucleic acid molecule, e.g., a second vector, e.g., a second vector, e.g., a second AAV vector.

[0083] In certain embodiments, the first and second nucleic acid molecules are AAV vectors.

[0084] In certain embodiments, (a), (b) and (c) are present together in a genome-editing system. In certain embodiments, each of (a), (b) and (c) are present on different nucleic acid molecules, e.g., different vectors, e.g., different viral vectors, e.g., different AAV vector. For example, (a) is present on a first nucleic acid molecule, (b) is present on a second nucleic acid molecule, and (c) is present on a third nucleic acid molecule. The first, second and third nucleic acid molecule can be AAV vectors.

[0085] In certain embodiments, when a third and/or fourth gRNA molecules are present, each of (a), (b), (c), the third and/or fourth gRNAs can be present on one nucleic acid molecule, e.g., one vector, e.g., one viral vector, e.g., an AAV vector. In certain embodiments, the nucleic acid molecule is an AAV vector. In certain embodiments, each of (a), (b), (c), the third and/or fourth gRNAs are present on the different nucleic acid molecules, e.g., different vectors, e.g., the different viral vectors, e.g., different AAV vectors. In certain embodiments, each of (a), (b), (c), the third and/or fourth gRNAs are present on more than one nucleic acid molecule, but fewer than five nucleic acid molecules, e.g., AAV vectors.

[0086] The nucleic acids composition described herein may comprise a promoter operably linked to the first nucleotide sequence that encodes the first gRNA molecule, e.g., a promoter described herein. The nucleic acid composition may further comprise a second promoter operably linked to the third nucleotide sequence that encodes the second gRNA molecule, e.g., a promoter described herein. In certain embodiment, the promoter and second promoter differ from one another. In certain embodiments, the promoter and second promoter are the same.

[0087] The nucleic acids composition described herein may further comprise a promoter operably linked to the second nucleotide sequence that encodes the Cas9 molecule, e.g., a promoter described herein.

[0088] In certain embodiments, disclosed herein is a composition comprising (a) a gRNA molecule comprising a targeting domain that is complementary with a target domain in the DMD gene, as described herein. In certain embodiments, the targeting domain comprises a nucleotide sequence selected from SEQ ID NOs: 206-826366. In certain embodiments, the composition further comprises (b) a Cas9 molecule, e.g., a Cas9 molecule as described herein. In certain embodiments, the composition further comprises (c) a second gRNA molecule, e.g., a second gRNA molecule as described herein.

[0089] The presently disclosed subject matter provides for a composition comprising (a) first gRNA molecule comprising a first targeting domain that is complementary with a target domain of the DMD gene, wherein the first targeting domain is 19 to 24 nucleotides in length; (b) a second gRNA molecule comprising a second targeting domain that is complementary with a target domain of the DMD gene, wherein the second targeting domain is 19 to 24 nucleotides in length; and (c) at least one Cas9 molecule that recognizes a PAM sequence set forth in NNGRRT (SEQ ID NO: 204) or NNGRRV (SEQ ID NO:205), wherein the composition is adapted for use in a genome-editing system to form first and second double strand breaks in first and second introns flanking exon 51 of the human DMD gene, respectively, thereby deleting a segment of the DMD gene comprising exon 51.

[0090] The presently disclosed subject matter also provides for a composition comprising at least one of:

[0091] (a) a first gRNA molecule comprising a targeting domain that comprises a nucleotide sequence set forth in SEQ ID NO: 1977, and a second gRNA molecule comprising a targeting domain that comprises a nucleotide sequence set forth in SEQ ID NO: 2048;

[0092] (b) a first gRNA molecule comprising a targeting domain that comprises a nucleotide sequence set forth in SEQ ID NO: 18458, and a second gRNA molecule comprising a targeting domain that comprises a nucleotide sequence set forth in SEQ ID NO: 2048;

[0093] (c) a first gRNA molecule comprising a targeting domain that comprises a nucleotide sequence set forth in SEQ ID NO: 19199, and a second gRNA molecule comprising a targeting domain that comprises a nucleotide sequence set forth in SEQ ID NO: 18720;

[0094] (d) a first gRNA molecule comprising a targeting domain that comprises a nucleotide sequence set forth in SEQ ID NO: 4709, and a second gRNA molecule comprising a targeting domain that comprises a nucleotide sequence set forth in SEQ ID NO: 18720;

[0095] (e) a first gRNA molecule comprising a targeting domain that comprises a nucleotide sequence set forth in SEQ ID NO: 481, and a second gRNA molecule comprising a targeting domain that comprises a nucleotide sequence set forth in SEQ ID NO: 2048;

[0096] (f) a first gRNA molecule comprising a targeting domain that comprises a nucleotide sequence set forth in SEQ ID NO: 4709, and a second gRNA molecule comprising a targeting domain that comprises a nucleotide sequence set forth in SEQ ID NO: 22349;

[0097] (g) a first gRNA molecule comprising a targeting domain that comprises a nucleotide sequence set forth in SEQ ID NO: 5869, and a second gRNA molecule comprising a targeting domain that comprises a nucleotide sequence set forth in SEQ ID NO: 3536;

[0098] (h) a first gRNA molecule comprising a targeting domain that comprises a nucleotide sequence set forth in SEQ ID NO: 18752, and a second gRNA molecule comprising a targeting domain that comprises a nucleotide sequence set forth in SEQ ID NO: 17253;

[0099] (i) a first gRNA molecule comprising a targeting domain that comprises a nucleotide sequence set forth in SEQ ID NO: 20145, and a second gRNA molecule comprising a targeting domain that comprises a nucleotide sequence set forth in SEQ ID NO: 3536;

[0100] (j) a first gRNA molecule comprising a targeting domain that comprises a nucleotide sequence set forth in SEQ ID NO: 19187, and a second gRNA molecule comprising a targeting domain that comprises a nucleotide sequence set forth in SEQ ID NO: 7252;

[0101] (k) a first gRNA molecule comprising a targeting domain that comprises a nucleotide sequence set forth in SEQ ID NO: 18752, and a second gRNA molecule comprising a targeting domain that comprises a nucleotide sequence set forth in SEQ ID NO: 3536; and

[0102] (l) a first gRNA molecule comprising a targeting domain that comprises a nucleotide sequence set forth in SEQ ID NO: 19187; and a second gRNA molecule comprising a targeting domain that comprises a nucleotide sequence set forth in SEQ ID NO: 7419.

[0103] In certain embodiments, the composition further comprises at least one Cas9 molecule. In certain embodiments, the at least one Cas9 molecule is an S. aureus Cas9 molecule. In certain embodiments, the at least one Cas9 molecule is a mutant S. aureus Cas9 molecule. In certain embodiments, the at least one Cas9 molecule recognizes a Protospacer Adjacent Motif (PAM) sequence set forth in NNGRRT (SEQ ID NO: 204) or NNGRRV (SEQ ID NO:205).

[0104] The presently disclosed subject matter further provides for a composition comprising one gRNA molecule comprising a targeting domain that is complementary with a target domain of the DMD gene, wherein the targeting domain comprises a nucleotide sequence selected from SEQ ID NOS: 206-826366. In certain embodiments, the composition comprises one, two, three, or four gRNA molecules. In certain embodiments, the composition further comprises a Cas9 molecule. In certain embodiments, the first and second gRNA molecules are selected from the gRNA pairs listed in Table 15, i.e., selected from the group consisting of:

[0105] (a) a first gRNA molecule comprising a targeting domain that comprises a nucleotide sequence set forth in SEQ ID NO: 2048, and a second gRNA molecule comprising a targeting domain that comprises a nucleotide sequence selected from SEQ ID NOs: 1977, 18458, 481, 9997, 1499, 2121, 8709, 21570, 16467, and 23958;

[0106] (b) a first gRNA molecule comprising a targeting domain that comprises a nucleotide sequence set forth in SEQ ID NO: 19199, and a second gRNA molecule comprising a targeting domain that comprises a nucleotide sequence set forth in SEQ ID NO: 18720;

[0107] (c) a first gRNA molecule comprising a targeting domain that comprises a nucleotide sequence set forth in SEQ ID NO: 18720, SEQ ID NO: 22349 or SEQ ID NO: 10092, and a second gRNA molecule comprising a targeting domain that comprises a nucleotide sequence set forth in SEQ ID NO: 4709 or SEQ ID NO: 20303;

[0108] (d) a first gRNA molecule comprising a targeting domain that comprises a nucleotide sequence set forth in SEQ ID NO: 3536, and a second gRNA molecule comprising a targeting domain that comprises a nucleotide sequence selected from SEQ ID NOs: 5869, 20145, 18752, 20870, 9530, 18062, 4134, and 23958;

[0109] (e) a first gRNA molecule comprising a targeting domain that comprises a nucleotide sequence set forth in SEQ ID NO: 18458, and a second gRNA molecule comprising a targeting domain that comprises a nucleotide sequence set forth in SEQ ID NO: 9765;

[0110] (f) a first gRNA molecule comprising a targeting domain that comprises a nucleotide sequence set forth in SEQ ID NO: 18752, and a second gRNA molecule comprising a targeting domain that comprises a nucleotide sequence selected from SEQ ID NOs: 17253, 14607, 16967, 7419, 1744, and 8569;

[0111] (g) a first gRNA molecule comprising a targeting domain that comprises a nucleotide sequence set forth in SEQ ID NO: 19187, and a second gRNA molecule comprising a targeting domain that comprises a nucleotide sequence selected from SEQ ID NOs: 14695, 7252, 17253, 7419, 1744, 8569, and 9358;

[0112] (h) a first gRNA molecule comprising a targeting domain that comprises a nucleotide sequence set forth in SEQ ID NO: 20145, and a second gRNA molecule comprising a targeting domain that comprises a nucleotide sequence selected from SEQ ID NOs: 5614, 20764, 14607, 8569, and 7252;

[0113] (i) a first gRNA molecule comprising a targeting domain that comprises a nucleotide sequence set forth in SEQ ID NO: 1499, and a second gRNA molecule comprising a targeting domain that comprises a nucleotide sequence set forth in SEQ ID NO: 14296;

[0114] (i) a first gRNA molecule comprising a targeting domain that comprises a nucleotide sequence set forth in SEQ ID NO: 4134, and a second gRNA molecule comprising a targeting domain that comprises a nucleotide sequence selected from SEQ ID NOs: 20924, 4072, and 8569;

[0115] (k) a first gRNA molecule comprising a targeting domain that comprises a nucleotide sequence set forth in SEQ ID NO: 6209, and a second gRNA molecule comprising a targeting domain that comprises a nucleotide sequence selected from SEQ ID NOs: 14035, 13527, 21873, 14298, 7419, and 20924;

[0116] (l) a first gRNA molecule comprising a targeting domain that comprises a nucleotide sequence set forth in SEQ ID NO: 9346, and a second gRNA molecule comprising a targeting domain that comprises a nucleotide sequence selected from SEQ ID NOs: 7419, 20764, and 2769;

[0117] (m) a first gRNA molecule comprising a targeting domain that comprises a nucleotide sequence set forth in SEQ ID NO: 7649, and a second gRNA molecule comprising a targeting domain that comprises a nucleotide sequence selected from SEQ ID NOs: 16967, 1484, 20924, 4072, and 9496;

[0118] (n) a first gRNA molecule comprising a targeting domain that comprises a nucleotide sequence set forth in SEQ ID NO: 5869, and a second gRNA molecule comprising a targeting domain that comprises a nucleotide sequence selected from SEQ ID NOs: 8569, 13527, 1484, 5614, 4072, and 14695;

[0119] (o) a first gRNA molecule comprising a targeting domain that comprises a nucleotide sequence set forth in SEQ ID NO: 4165, and a second gRNA molecule comprising a targeting domain that comprises a nucleotide sequence selected from SEQ ID NOs: 7252, 1484, and 9279;

[0120] (p) a first gRNA molecule comprising a targeting domain that comprises a nucleotide sequence set forth in SEQ ID NO: 15622, and a second gRNA molecule comprising a targeting domain that comprises a nucleotide sequence set forth in SEQ ID NO: 17253;

[0121] (q) a first gRNA molecule comprising a targeting domain that comprises a nucleotide sequence set forth in SEQ ID NO: 18062, and a second gRNA molecule comprising a targeting domain that comprises a nucleotide sequence set forth in SEQ ID NO: 2769 or SEQ ID NO: 14035;

[0122] (r) a first gRNA molecule comprising a targeting domain that comprises a nucleotide sequence set forth in SEQ ID NO: 21131, and a second gRNA molecule comprising a targeting domain that comprises a nucleotide sequence set forth in SEQ ID NO: 13527 or SEQ ID NO: 13285;

[0123] (s) a first gRNA molecule comprising a targeting domain that comprises a nucleotide sequence set forth in SEQ ID NO: 20870, and a second gRNA molecule comprising a targeting domain that comprises a nucleotide sequence set forth in SEQ ID NO: 16967 or SEQ ID NO: 7252;

[0124] (t) a first gRNA molecule comprising a targeting domain that comprises a nucleotide sequence set forth in SEQ ID NO: 16235, and a second gRNA molecule comprising a targeting domain that comprises a nucleotide sequence set forth in SEQ ID NO: 10140;

[0125] (u) a first gRNA molecule comprising a targeting domain that comprises a nucleotide sequence set forth in SEQ ID NO: 15271, and a second gRNA molecule comprising a targeting domain that comprises a nucleotide sequence set forth in SEQ ID NO: 13518;

[0126] (v) a first gRNA molecule comprising a targeting domain that comprises a nucleotide sequence set forth in SEQ ID NO: 11675, and a second gRNA molecule comprising a targeting domain that comprises a nucleotide sequence selected from SEQ ID NOs: 2769, 1484, and 4072; and

[0127] (w) a first gRNA molecule comprising a targeting domain that comprises a nucleotide sequence set forth in SEQ ID NO: 23958, and a second gRNA molecule comprising a targeting domain that comprises a nucleotide sequence set forth in SEQ ID NO: 14035 or SEQ ID NO: 9496.

[0128] In certain embodiments, the first and second gRNA molecules are selected from the group consisting of:

[0129] (a) a first gRNA molecule comprising a targeting domain that comprises a nucleotide sequence set forth in SEQ ID NO: 692257, and a second gRNA molecule comprising a targeting domain that comprises a nucleotide sequence set forth in SEQ ID NO: 692261, SEQ ID NO: 692262, SEQ ID NO: 692263, SEQ ID NO: 692264, SEQ ID NO: 692270, SEQ ID NO: 692271, or SEQ ID NO: 692272;

[0130] (b) a first gRNA molecule comprising a targeting domain that comprises a nucleotide sequence set forth in SEQ ID NO: 692258, and a second gRNA molecule comprising a targeting domain that comprises a nucleotide sequence set forth in SEQ ID NO: 692261, SEQ ID NO: 692262, SEQ ID NO: 692263, SEQ ID NO: 692264, SEQ ID NO: 692270, SEQ ID NO: 692271, or SEQ ID NO: 692272;

[0131] (c) a first gRNA molecule comprising a targeting domain that comprises a nucleotide sequence set forth in SEQ ID NO: 692260, and a second gRNA molecule comprising a targeting domain that comprises a nucleotide sequence set forth in SEQ ID NO: 692261, SEQ ID NO: 692262, SEQ ID NO: 692263, SEQ ID NO: 692264, SEQ ID NO: 692270, SEQ ID NO: 692271, or SEQ ID NO: 692272;

[0132] (d) a first gRNA molecule comprising a targeting domain that comprises a nucleotide sequence set forth in SEQ ID NO: 692253, and a second gRNA molecule comprising a targeting domain that comprises a nucleotide sequence set forth in SEQ ID NO: 692270, SEQ ID NO: 692271, or SEQ ID NO: 692272;

[0133] (e) a first gRNA molecule comprising a targeting domain that comprises a nucleotide sequence set forth in SEQ ID NO: 692254, and a second gRNA molecule comprising a targeting domain that comprises a nucleotide sequence set forth in SEQ ID NO: 692270, SEQ ID NO: 692271, or SEQ ID NO: 692272; and

[0134] (f) a first gRNA molecule comprising a targeting domain that comprises a nucleotide sequence set forth in SEQ ID NO: 692256, and a second gRNA molecule comprising a targeting domain that comprises a nucleotide sequence set forth in SEQ ID NO: 692270, SEQ ID NO: 692271, or SEQ ID NO: 692272.

[0135] Furthermore, the presently disclosed subject matter provides for a genome-editing system, comprising:

[0136] a first and a second gRNA, each gRNA having a targeting domain of 19 to 24 nucleotides in length and at least one Cas9 molecule that recognizes a PAM of either NNGRRT (SEQ ID NO:204) or NNGRRV (SEQ ID NO:205),

[0137] wherein the genome-editing system is configured to form a first and a second double strand break in a first and a second intron flanking exon 51 of the human DMD gene, respectively, thereby deleting a segment of the DMD gene comprising exon 51.

[0138] Also provided is a genome-editing system comprising: a gRNA pair selected from the group consisting of:

[0139] (a) a first gRNA molecule comprising a targeting domain that comprises a nucleotide sequence set forth in SEQ ID NO: 1977, and a second gRNA molecule comprising a targeting domain that comprises a nucleotide sequence set forth in SEQ ID NO: 2048;

[0140] (b) a first gRNA molecule comprising a targeting domain that comprises a nucleotide sequence set forth in SEQ ID NO: 18458, and a second gRNA molecule comprising a targeting domain that comprises a nucleotide sequence set forth in SEQ ID NO: 2048;

[0141] (c) a first gRNA molecule comprising a targeting domain that comprises a nucleotide sequence set forth in SEQ ID NO: 19199, and a second gRNA molecule comprising a targeting domain that comprises a nucleotide sequence set forth in SEQ ID NO: 18720;

[0142] (d) a first gRNA molecule comprising a targeting domain that comprises a nucleotide sequence set forth in SEQ ID NO: 4709, and a second gRNA molecule comprising a targeting domain that comprises a nucleotide sequence set forth in SEQ ID NO: 18720;

[0143] (e) a first gRNA molecule comprising a targeting domain that comprises a nucleotide sequence set forth in SEQ TD NO: 481, and a second gRNA molecule comprising a targeting domain that comprises a nucleotide sequence set forth in SEQ ID NO: 2048;

[0144] (f) a first gRNA molecule comprising a targeting domain that comprises a nucleotide sequence set forth in SEQ ID NO: 4709, and a second gRNA molecule comprising a targeting domain that comprises a nucleotide sequence set forth in SEQ ID NO: 22349;

[0145] (g) a first gRNA molecule comprising a targeting domain that comprises a nucleotide sequence set forth in SEQ ID NO: 5869, and a second gRNA molecule comprising a targeting domain that comprises a nucleotide sequence set forth in SEQ ID NO: 3536;

[0146] (h) a first gRNA molecule comprising a targeting domain that comprises a nucleotide sequence set forth in SEQ ID NO: 18752, and a second gRNA molecule comprising a targeting domain that comprises a nucleotide sequence set forth in SEQ ID NO: 17253;

[0147] (i) a first gRNA molecule comprising a targeting domain that comprises a nucleotide sequence set forth in SEQ ID NO: 20145, and a second gRNA molecule comprising a targeting domain that comprises a nucleotide sequence set forth in SEQ ID NO: 3536;

[0148] (j) a first gRNA molecule comprising a targeting domain that comprises a nucleotide sequence set forth in SEQ ID NO: 19187, and a second gRNA molecule comprising a targeting domain that comprises a nucleotide sequence set forth in SEQ ID NO: 7252;

[0149] (k) a first gRNA molecule comprising a targeting domain that comprises a nucleotide sequence set forth in SEQ ID NO: 18752, and a second gRNA molecule comprising a targeting domain that comprises a nucleotide sequence set forth in SEQ ID NO: 3536; and

[0150] (l) a first gRNA molecule comprising a targeting domain that comprises a nucleotide sequence set forth in SEQ ID NO: 19187; and a second gRNA molecule comprising a targeting domain that comprises a nucleotide sequence set forth in SEQ ID NO: 7419.

[0151] In certain embodiments, the genome-editing system further comprises at least one Cas9 molecule, e.g., an S aureus Cas9 molecule.

[0152] In certain embodiments, the first gRNA molecule, the at least one Cas9 molecule and the second gRNA molecule are present in the system as naked DNA. In certain embodiments, the first gRNA molecule, the at least one Cas9 molecule and the second gRNA molecule are present in the system in a nanoparticle. In certain embodiments, the first gRNA molecule, the at least one Cas9 molecule and the second gRNA molecule are present in the system in a cationic liposome. In certain embodiments, the first gRNA molecule, the at least one Cas9 molecule and the second gRNA molecule are present in the system in a biological non-viral delivery vehicle selected from the group consisting of: attenuated bacteria; engineered bacteriophages; mammalian virus-like particles; and biological liposomes. In certain embodiments, the nanoparticle, cationic liposome, or biological non-viral delivery vehicle comprises a targeting modification capable of increasing target cell uptake of the system.

[0153] In certain embodiments, the segment of the DMD gene deleted by the above-described compositions, or the above-described genome editing systems has a length of about 800-900, about 1500-2600, about 5200-5500, about 20,000-30,000, about 35,000-45,000, or about 60,000-72,000 base pairs. In certain embodiments, the segment has a length selected from the group consisting of 806 base pairs, 867 base pairs, 1,557 base pairs, 2,527 base pairs, 5,305 base pairs, 5,415 base pairs, 20,768 base pairs, 27,398 base pairs, 36,342 base pairs, 44,269 base pairs, 60,894 base pairs, and 71,832 base pairs.

[0154] Furthermore, the presently disclosed subject matter provides for use of the above-described compositions or the above-described genome editing systems in a medicament, e.g., a medicament for treating Duchenne muscular dystrophy, Becker muscular dystrophy (BMD), or Dilated Cardiomyopathy (DCM) Type 3B, or a medicament for modifying a DMD gene.

[0155] Additionally, the presently disclosed subject matter provides for a method of modifying a DMD gene of a cell, comprising administering to the cell the above-described composition or the above-described genome editing system. In certain embodiments, the modification comprises restoration of correct reading frame of the DMD gene. In certain embodiments, the cell comprises one or more mutation in the DMD gene. In certain embodiments, the one or more mutation is selected from the group consisting of a premature stop codon, disrupted reading frame, an aberrant splice acceptor site, and an aberrant splice donor site. In certain embodiments, the target domain is upstream or downstream of the one or more mutation. In certain embodiments, the modification comprises deletion of a premature stop codon, restoration of correct reading frame, modulation of splicing by disruption of a splice acceptor site or disruption of a splice donor sequence, or a combination thereof. In certain embodiments, the modification comprises deletion of exons 45-55 of the DMD gene. In certain embodiments, the modification comprises deletion of exon 51 of the DMD gene. In certain embodiments, the cell is from a subject suffering from Duchenne muscular dystrophy, BMD, or Dilated Cardiomyopathy (DCM) Type 3B. In certain embodiments, the cell is from a subject suffering from Duchenne muscular dystrophy.

[0156] Furthermore, presently disclosed subject matter provides for a method of treating Duchenne muscular dystrophy, BMD, or DCM Type 3B in a subject, comprising administering to the subject the above-described composition, or the above-described genome editing system.

[0157] Additionally, the presently disclosed subject matter provides for a vector comprising a polynucleotide encoding a first gRNA molecule and a second gRNA molecule, wherein the first gRNA molecule and the second gRNA molecule are selected from the group consisting of:

[0158] (a) a first gRNA molecule comprising a targeting domain that comprises a nucleotide sequence set forth in SEQ ID NO: 1977, and a second gRNA molecule comprising a targeting domain that comprises a nucleotide sequence set forth in SEQ ID NO: 2048;

[0159] (b) a first gRNA molecule comprising a targeting domain that comprises a nucleotide sequence set forth in SEQ ID NO: 18458, and a second gRNA molecule comprising a targeting domain that comprises a nucleotide sequence set forth in SEQ ID NO: 2048;

[0160] (c) a first gRNA molecule comprising a targeting domain that comprises a nucleotide sequence set forth in SEQ ID NO: 19199, and a second gRNA molecule comprising a targeting domain that comprises a nucleotide sequence set forth in SEQ ID NO: 18720;

[0161] (d) a first gRNA molecule comprising a targeting domain that comprises a nucleotide sequence set forth in SEQ ID NO: 4709, and a second gRNA molecule comprising a targeting domain that comprises a nucleotide sequence set forth in SEQ ID NO: 18720;

[0162] (e) a first gRNA molecule comprising a targeting domain that comprises a nucleotide sequence set forth in SEQ ID NO: 481, and a second gRNA molecule comprising a targeting domain that comprises a nucleotide sequence set forth in SEQ ID NO: 2048;

[0163] (f) a first gRNA molecule comprising a targeting domain that comprises a nucleotide sequence set forth in SEQ ID NO: 4709, and a second gRNA molecule comprising a targeting domain that comprises a nucleotide sequence set forth in SEQ ID NO: 22349;

[0164] (g) a first gRNA molecule comprising a targeting domain that comprises a nucleotide sequence set forth in SEQ ID NO: 5869, and a second gRNA molecule comprising a targeting domain that comprises a nucleotide sequence set forth in SEQ ID NO: 3536;

[0165] (h) a first gRNA molecule comprising a targeting domain that comprises a nucleotide sequence set forth in SEQ ID NO: 18752, and a second gRNA molecule comprising a targeting domain that comprises a nucleotide sequence set forth in SEQ ID NO: 17253;

[0166] (i) a first gRNA molecule comprising a targeting domain that comprises a nucleotide sequence set forth in SEQ ID NO: 20145, and a second gRNA molecule comprising a targeting domain that comprises a nucleotide sequence set forth in SEQ ID NO: 3536;

[0167] (j) a first gRNA molecule comprising a targeting domain that comprises a nucleotide sequence set forth in SEQ TD NO: 19187, and a second gRNA molecule comprising a targeting domain that comprises a nucleotide sequence set forth in SEQ ID NO: 7252;

[0168] (k) a first gRNA molecule comprising a targeting domain that comprises a nucleotide sequence set forth in SEQ ID NO: 18752, and a second gRNA molecule comprising a targeting domain that comprises a nucleotide sequence set forth in SEQ ID NO: 3536; and

[0169] (l) a first gRNA molecule comprising a targeting domain that comprises a nucleotide sequence set forth in SEQ ID NO: 19187; and a second gRNA molecule comprising a targeting domain that comprises a nucleotide sequence set forth in SEQ ID NO: 7419.

[0170] In certain embodiments, the vector is a viral vector. In certain embodiments, the vector is an adeno-associated virus (AAV) vector.

[0171] The presently disclosed subject matter further provides for a cell comprising the above-described composition, the above-described genome-editing system, or the above-described vector.

[0172] The presently disclosed subject matter further provides for a method of treating Duchenne muscular dystrophy in a subject, comprising administering to the subject an effective amount of the above-described composition.

[0173] In certain embodiments, the method further comprises contacting the cell with a third and/or fourth gRNA molecules. In certain embodiments, the method comprises contacting a cell from a subject suffering from or likely to develop DMD, BMD, or DCM type 3B. The cell may be from a subject having one or more mutation in the DMD gene. In certain embodiments, the cell being contacted in the disclosed method is a photoreceptor cell. The contacting is performed ex vivo and the contacted cell is returned to the subject's body after the contacting step. In certain embodiments, the contacting step is performed in vivo.

[0174] In certain embodiments, the method comprises acquiring knowledge of the presence of a DMD target position in said cell, prior to the contacting step. Acquiring knowledge of the presence of a DMD target position in the cell may be by sequencing the DMD gene, or a portion of the DMD gene.

[0175] In certain embodiments, the contacting step comprises contacting the cell with a nucleic acid composition, e.g., a vector, e.g., an AAV vector, that encodes at least one of the first gRNA, Cas9 and second gRNA as defined above. In certain embodiments, the contacting step comprises delivering to the cell a Cas9 molecule of and a nucleic acid which encodes the first gRNA, and optionally, the second gRNA, and further optionally, a third gRNA and/or fourth gRNA. In certain embodiments, contacting comprises contacting the cell with a nucleic acid, e.g., a vector, e.g., an AAV vector, e.g., an AAV2 vector, a modified AAV2 vector, an AAV3 vector, a modified AAV3 vector, an AAV6 vector, a modified AAV6 vector, an AAV8 vector or an AAV9 vector. In certain embodiments, contacting comprises delivering to said cell said Cas9 molecule, as a protein or an mRNA, and a nucleic acid which encodes and the first and the second gRNA molecules. In certain embodiments, contacting comprises delivering to said cell the Cas9 molecule as a protein or an mRNA, the first gRNA molecule as an RNA, and optionally the second gRNA molecule as an RNA. In certain embodiments, contacting comprises delivering to said cell the first gRNA molecule as an RNA, optionally the second gRNA molecule as an RNA, and a nucleic acid that encodes the Cas9 molecule. In certain embodiments, the first gRNA molecule, the Cas 9 molecule, and the second gRNA molecule are present together in a genome-editing system.

[0176] In certain embodiments, disclosed herein is a method of treating, or preventing a subject suffering from developing, DMD, BMD, or DCM type 3B, e.g., by altering the structure, e.g., sequence, of a target nucleic acid of the subject, comprising contacting the subject (or a cell from the subject) with: (a) a gRNA that targets the DMD gene, e.g., a gRNA disclosed herein; (b) a Cas9 molecule, e.g., a Cas9 molecule disclosed herein; and optionally, (c) a second gRNA that targets the DMD gene, e.g., a second gRNA disclosed herein, and further optionally, a third gRNA, and still further optionally, a fourth gRNA that target the DMD gene, e.g., a third and fourth gRNA disclosed herein. In certain embodiments, the contacting comprises contacting with (a) and (b). In certain embodiments, the contacting comprises contacting with (a), (b), and (c). In certain embodiments, the contacting comprises contacting with (a), (b), (c) and the third gRNA. In certain embodiments, contacting comprises contacting with (a), (b), (c), the third and the fourth gRNAs. The targeting domains of (a), (c), the third and/or fourth gRNAs can comprise a nucleotide sequence selected from SEQ ID NOs: 206-826366, or comprises a nucleotide sequence that differs by no more than 1, 2, 3, 4, or 5 nucleotides from the nucleotides sequences set forth in SEQ ID NOs: 206-826366.

[0177] In certain embodiments, said subject is suffering from, or likely to develop DMD, BMD, or DCM type 3B. In certain embodiments, said subject has one or more mutation at a DMD target position. In certain embodiments, the method comprises acquiring knowledge of the presence of one or more mutation at a DMD target position in said subject. In certain embodiments, the method comprises acquiring knowledge of the presence of one or more mutation a DMD target position in said subject by sequencing the DMD gene or a portion of the DMD gene.

[0178] In certain embodiments, the method comprises altering the DMD target position in the DMD gene.

[0179] In certain embodiments, a cell of said subject is contacted ex vivo with (a), (b) and optionally (c). In certain embodiments, said cell is returned to the subject's body. In certain embodiments, the method comprises the treatment comprises introducing a cell into said subject's body, wherein said cell subject is contacted ex vivo with (a), (b) and optionally (c). In certain embodiments, the method comprises said contacting is performed in vivo.

[0180] In certain embodiments, the method comprises injection directly into one or more muscle of the subject, e.g., skeletal muscles. In certain embodiments, the method comprises injection directly into cardiac muscle or smooth muscle of the subject. In certain embodiments, contacting comprises contacting the subject with a nucleic acid composition, e.g., a vector, e.g., an AAV vector, described herein, e.g., a nucleic acid that encodes at least one of (a), (b), and optionally (c).

[0181] In certain embodiments, the contacting comprises delivering to said subject said Cas9 molecule of (b), as a protein or mRNA, and a nucleic acid composition that encodes (a) and optionally (c). In certain embodiments, the contacting comprises delivering to said subject said Cas9 molecule of (b), as a protein or mRNA, said gRNA of (a), as an RNA, and optionally said second gRNA of (c), as an RNA. In certain embodiments, the contacting comprises delivering to said subject said gRNA of (a), as an RNA, optionally said second gRNA of (c), as an RNA, and a nucleic acid composition that encodes the Cas9 molecule of (b).

[0182] The presently disclosed subject matter further provides for a reaction mixture comprising a, gRNA, a nucleic acid composition, or a composition described herein, and a cell, e.g., a cell from a subject having, or likely to develop DMD, BMD, or DCM type 3B, or a subject having one or more mutation at a DMD target position.

[0183] The presently disclosed subject matter further provides for a kit comprising, (a) gRNA molecule described herein, or nucleic acid composition that encodes said gRNA, and one or more of the following: (b) a Cas9 molecule, e.g., a Cas9 molecule described herein, or a nucleic acid composition or mRNA that encodes the Cas9; (c) a second gRNA molecule, e.g., a second gRNA molecule described herein or a nucleic acid composition that encodes (c). In certain embodiments, the kit further comprises a third gRNA molecule or a nucleic acid composition that encodes thereof, and/or a fourth gRNA molecule or a nucleic acid composition that encodes thereof. In certain embodiments, the kit comprises a nucleic acid composition, e.g., an AAV vector, that encodes one or more of (a), (b), (c), the third and/or fourth gRNAs.

[0184] The presently disclosed subject matter further provides for a gRNA molecule, e.g., a gRNA molecule described herein, for use in treating, or delaying the onset or progression of, DMD, BMD, or DCM type 3B in a subject, e.g., in accordance with a method of treating, or delaying the onset or progression of, DMD, BMD, or DCM type 3B as described herein. In certain embodiments, the gRNA molecule in used in combination with a Cas9 molecule, e.g., a Cas9 molecule described herein. Additionally or alternatively, in certain embodiments, the gRNA molecule is used in combination with a second, third and/or fourth gRNA molecule, e.g., a second, third and/or fourth gRNA molecule described herein.

[0185] The presently disclosed subject matter further provides for use of a gRNA molecule, e.g., a gRNA molecule described herein, in the manufacture of a medicament for treating, or delaying the onset or progression of, DMD, BMD, or DCM type 3B in a subject, e.g., in accordance with a method of treating, or delaying the onset or progression of, DMD, BMD, or DCM type 3B as described herein. In certain embodiments, the medicament comprises a Cas9 molecule, e.g., a Cas9 molecule described herein. Additionally or alternatively, in certain embodiments, the medicament comprises a second, third and/or fourth gRNA molecule, e.g., a second, third and/or fourth gRNA molecule described herein.

[0186] Unless otherwise defined, all technical and scientific terms used herein have the same meaning as commonly understood by one of ordinary skill in the art to which this invention belongs. Although methods and materials similar or equivalent to those described herein can be used in the practice or testing of the present invention, suitable methods and materials are described below. All publications, patent applications, patents, and other references mentioned herein are incorporated by reference in their entirety. In addition, the materials, methods, and examples are illustrative only and not intended to be limiting.

[0187] Headings, including numeric and alphabetical headings and subheadings, are for organization and presentation and are not intended to be limiting.

[0188] Other features and advantages of the invention will be apparent from the detailed description, drawings, and from the claims.

### BRIEF DESCRIPTION OF THE DRAWINGS

[0189] FIGS. 1A-1I are representations of several exemplary gRNAs.

[0190] FIG. 1A depicts a modular gRNA molecule derived in part (or modeled on a sequence in part) from Streptococcus pyogenes (S. pyogenes) as a duplexed structure (SEQ ID NOs:39 and 40, respectively, in order of appearance);

[0191] FIG. 1B depicts a unimolecular gRNA molecule derived in part from S. pyogenes as a duplexed structure (SEQ ID NO:41);

[0192] FIG. 1C depicts a unimolecular gRNA molecule derived in part from S. pyogenes as a duplexed structure (SEQ ID NO:42);

[0193] FIG. 1D depicts a unimolecular gRNA molecule derived in part from S. pyogenes as a duplexed structure (SEQ ID NO:43);

[0194] FIG. 1E depicts a unimolecular gRNA molecule derived in part from S. pyogenes as a duplexed structure (SEQ ID NO:44);

[0195] FIG. 1F depicts a modular gRNA molecule derived in part from Streptococcus thermophilus (S. thermophilus) as a duplexed structure (SEQ ID NOs:45 and 46, respectively, in order of appearance);

[0196] FIG. 1G depicts an alignment of modular gRNA molecules of S. pyogenes and S. thermophilus (SEQ ID NOs:39, 45, 47, and 46, respectively, in order of appearance).

[0197] FIGS. 1H-1I depicts additional exemplary structures of unimolecular gRNA molecules.

[0198] FIG. 1H shows an exemplary structure of a unimolecular gRNA molecule derived in part from S. pyogenes as a duplexed structure (SEQ ID NO:42).

[0199] FIG. 1I shows an exemplary structure of a unimolecular gRNA molecule derived in part from S. aureus as a duplexed structure (SEQ ID NO:38).

[0200] FIGS. 2A-2G depict an alignment of Cas9 sequences (Chylinski 2013). The N-terminal RuvC-like domain is boxed and indicated with a “Y.” The other two RuvC-like domains are boxed and indicated with a “B.” The HNH-like domain is boxed and indicated by a “G.” Sm: S. mutans (SEQ ID NO:1); Sp: S. pyogenes (SEQ ID NO:2); St: S. thermophilus (SEQ ID NO:4); and Li: L. innocua (SEQ ID NO:5). “Motif” (SEQ ID NO:14) is a consensus sequence based on the four sequences. Residues conserved in all four sequences are indicated by single letter amino acid abbreviation; “*” indicates any amino acid found in the corresponding position of any of the four sequences; and “-” indicates absent.

[0201] FIGS. 3A-3B show an alignment of the N-terminal RuvC-like domain from the Cas9 molecules disclosed in Chylinski 2013 (SEQ ID NOs:52-95, 120-123). The last line of FIG. 3B identifies 4 highly conserved residues.

[0202] FIGS. 4A-4B show an alignment of the N-terminal RuvC-like domain from the Cas9 molecules disclosed in Chylinski 2013 with sequence outliers removed (SEQ ID NOs:52-123). The last line of FIG. 4B identifies 3 highly conserved residues.

[0203] FIGS. 5A-5C show an alignment of the HNH-like domain from the Cas9 molecules disclosed in Chylinski 2013 (SEQ ID NOs:124-198). The last line of FIG. 5C identifies conserved residues.

[0204] FIGS. 6A-6B show an alignment of the HNH-like domain from the Cas9 molecules disclosed in Chylinski 2013 with sequence outliers removed (SEQ ID NOs:124-141, 148, 149, 151-153, 162, 163, 166-174, 177-187, 194-198). The last line of FIG. 6B identifies 3 highly conserved residues.

[0205] FIG. 7 illustrates gRNA domain nomenclature using an exemplary gRNA sequence (SEQ ID NO:42).

[0206] FIGS. 8A and 8B provide schematic representations of the domain organization of S. pyogenes Cas9. FIG. 8A shows the organization of the Cas9 domains, including amino acid positions, in reference to the two lobes of Cas9 (recognition (REC) and nuclease (NUC) lobes). FIG. 8B shows the percent homology of each domain across 83 Cas9 orthologs.

[0207] FIG. 9A-9G show the results of Sanger sequencing of PCR products amplifying across the targeted deletion region in cells transfected with Cas9 and pairs gRNAs targeting the DMD gene. The gRNA pairs used are indicated as well as the targeted deletion region and the predicted deletion size. Sequence results are shown with the wildtype sequence first and deletion sequences below. Dashes indicate deletion of a given base and “ . . . ” represents the large missing deletion region. gRNA target sites are boxed and bases that are bold and underlined indicate insertions or an inversion. To the right of the sequence the total number of deleted and/or inserted bases is shown (Δ1740 means a deletion of 1740 bp) as well as the number of times that exact sequence was observed (×6 means that that exact sequence was observed 6 times).

[0208] FIG. 10A-10C depict exemplary exonic target position for modification of DMD deletion mutations.

[0209] FIG. 11A-11C depict exemplary exonic target position for modification of DMD duplication mutations.

[0210] FIG. 12A-12B depict exemplary exonic target position for modification of DMD point mutations.

[0211] FIG. 13 depicts am exemplary approach for selection of ectopic (e.g., non-contiguous) exons having the same reading frame.

[0212] FIG. 14 depicts principles of digital droplet PCR (“ddPCR”). ddPCR was used for a sensitive and quantitative assay for DMD Exon 51 deletion without bias for any particular gRNA pair or deletion length. Briefly, Taqman primer-probe sets (like those used in qPCR) are used to identify a genomic region of interest within a partitioned droplet. Each droplet most likely contains 0 or 1 copy of the PCR template, because the reaction is underloaded with gDNA (˜3000 copies) compared to the number of droplets (˜20,000). After amplification, droplets that contained 1 copy of template will fluoresce. The number of fluorescent droplets is counted by a BioRad droplet reader, and the number of positive droplets compared to total droplets is used to quantify the copy number of template in the original DNA sample. (image from BioRad).

[0213] FIG. 15 depicts the design of DMD Exon 51 Deletion ddPCR assay. The assay multiplexed 2 Taqman probes within each reaction well. For the wild-type allele, both the Exon 51 ‘deletion’ probe and the Exon 59 ‘control’ probe reference should bind and fluoresce in a 1:1 ratio of positive droplets. For any deletion alleles generated by the guide pairs screened, only the Exon 59 probe will fluoresce. The relative depletion of Exon 51 probe signal is used to quantify the deletion rate in the population of cells, according to the following formula: Deletion=1−(Exon 51 positive droplets/Exon 59 positive droplets).

[0214] FIGS. 16A-16D depict ddPCR assay validation and screen plate layout. (A) Samples from a female Exon 51 deletion carrier and a male exon 51 deletion patient, and both male and female Exon 51 non-deleted controls were quantified with ddPCR. (B) The two male samples were mixed in varying amounts to create a ladder of DMD deletion rates. Measured deletion rates by ddPCR correlated well with expected deletion rates. (C) The plate layout for paired gRNA screening by plasmid transfection. 30,000 HEK293T cells were plated in each well. Rows A-G were transfected with guide pairs of unknown deletion efficiency. H1-H6 were controls in duplicate: single gRNA, positive control paired gRNAs 1+9, and negative control gRNA plasmid backbone alone. The remaining wells H7-H12 were not transfected, but were used to run an internal standard curve with each plate for ddPCR. (D) An example of the internal standard curve in wells H7-H12, prepared similarly to FIG. 17B. The range was limited to 0-30% deletion for resolution in the dynamic range of the gRNA pairs tested in the screen.

[0215] FIGS. 17A and 17B depict Guide Set 1: Pilot study of DMD Exon 51 deletion by plasmid transfection of SaCas9. (A) 8 gRNA pairs, two single gRNAs (5, 12), the gRNA backbone alone (pJT002), and a non-targeting gRNA (pAF013VegF) were transfected into HEK293T cells alongside SaCas9. After 3 days, genomic DNA was extracted and deletion rates were quantified by ddPCR. Biological replicates were plotted separately to confirm consistency (n=4 technical replicates). (B) The experiment was repeated similarly except for genomic DNA was extracted both 3 and 6 days after transfection.

[0216] FIGS. 18A and 18B depict alternative SaCas9 promoters and codon optimizations. (A) Exon 51 deletion rates were compared with the same guide plasmids transfected and varied SaCas9 plasmids. pJT002 is the guide plasmid backbone alone. Guides 1+9+38+62 is a co-transfection of 4 guides, 25 ng each, an equivalent total mass to the other samples. (B) Table of SaCas9 plasmids used in the experiment.

[0217] FIG. 19 depicts effect adding a 5′ G to the gRNA on DNA cleavage efficiency. 5 single gRNA targeting DMD Exon 51 were co-transfected with SaCas9 with and without an additional 5′ G. For some, this additional 5′ G was matched in the genome. The negative control was not transfected with any DNA (‘No Tfx’).

[0218] FIG. 20 depicts Guide Set 2—NHP cross reactive gRNA pairs. The number of guide pairs corresponding to individual Z-scores computed for the guide pairs screened in Guide Set 2. The positive control (guides 1+9) and negative controls (Guide backbone only) have been plotted separately. Guide pairs with a Z score greater than or equal to 1.5 were carried forward for a follow-up Guide Hit Validation study.

[0219] FIG. 21 depicts comparison of NHP cross reactive guides with human-only guides. Histogram demonstrating the skewing of NHP cross-reactive guide pairs towards larger deletion sizes. Guide set 3 was designed to capture smaller deletion sizes, therefore requiring human-only gRNAs.

[0220] FIG. 22 depicts guide pairs from Guide Set 3 ranked by deletion efficiency, with positive (guide 1+9) and negative controls (backbone only) highlighted in yellow and red, respectively.

[0221] FIG. 23 depicts a heat map showing results of Guide Set 3, a guide set designed to capture guide pairs that result in smaller deletions.

[0222] FIG. 24 depicts Guide Set 3. 168 pairs of human targeting gRNAs were transfected into HEK293T and assayed by ddPCR for Exon 51 deletion. The Z score was calculated to quantify deviation from the mean for a given guide pair. The histogram reflects single biological samples (2 biological replicates per gRNA pair). Pairs with a Z score >1.5 were selected as hits for further study.

[0223] FIG. 25 depicts Guide hit validation. Guides from Guide Set 2 or 3 with Z scores passing the threshold of 1.5 were validated in a similar plasmid transfection with four biological replicates. Guide Set 4 was also included, alongside the positive control 1+9 and the backbone only negative control.

[0224] FIG. 26 depicts gRNAs pairs in Guide Sets 2 and 3 with passing Z scores (i.e., Z-score >1.5) alongside the 6 pairs from Guide Set 4.

### DETAILED DESCRIPTION

### 1. Definitions

[0225] As used herein, the term “about” or “approximately” means within an acceptable error range for the particular value as determined by one of ordinary skill in the art, which will depend in part on how the value is measured or determined, i.e., the limitations of the measurement system. For example, “about” can mean within 3 or more than 3 standard deviations, per the practice in the art. Alternatively, “about” can mean a range of up to 20%, preferably up to 10%, more preferably up to 5%, and more preferably still up to 1% of a given value. Alternatively, particularly with respect to biological systems or processes, the term can mean within an order of magnitude, preferably within 5-fold, and more preferably within 2-fold, of a value.

[0226] As used herein, a “genome-editing system” refers to a system that is capable of editing (e.g., modifying or altering) a target gene. In certain embodiments, the target gene is a DMD gene. In certain embodiments, the DMD gene is a human DMD gene. In certain embodiments, the genome editing system comprises a first gRNA molecule or a polynucleotide encoding thereof, and at least one Cas 9 molecule or polynucleotide(s) encoding thereof. In certain embodiments, the genome editing system comprises a second gRNA molecule or a polynucleotide encoding thereof. In certain embodiments, the genome-editing system is implemented in a cell or in an in vitro contact. In certain embodiments, the genome-editing system is used in a medicament, e.g., a medicament for modifying a DMD gene (e.g., a human DMD gene), or a medicament for treating Duchenne muscular dystrophy, Becker muscular dystrophy (BMD), or Dilated Cardiomyopathy (DCM) Type 3B.

[0227] “Domain” as used herein, is used to describe segments of a protein or nucleic acid. Unless otherwise indicated, a domain is not required to have any specific functional property. In certain embodiments, calculations of homology or sequence identity between two sequences (the terms are used interchangeably herein) are performed as follows. The sequences are aligned for optimal comparison purposes (e.g., gaps can be introduced in one or both of a first and a second amino acid or nucleic acid sequence for optimal alignment and non-homologous sequences can be disregarded for comparison purposes). The optimal alignment is determined as the best score using the GAP program in the GCG software package with a Blossum 62 scoring matrix with a gap penalty of 12, a gap extend penalty of 4, and a frame shift gap penalty of 5. The amino acid residues or nucleotides at corresponding amino acid positions or nucleotide positions are then compared. When a position in the first sequence is occupied by the same amino acid residue or nucleotide as the corresponding position in the second sequence, then the molecules are identical at that position. The percent identity between the two sequences is a function of the number of identical positions shared by the sequences.

[0228] “Polypeptide”, as used herein, refers to a polymer of amino acids having less than 100 amino acid residues. In certain embodiments, it has less than 50, 20, or 10 amino acid residues.

[0229] “Alt-HDR,” “alternative homology-directed repair,” or “alternative HDR” as used herein refers to the process of repairing DNA damage using a homologous nucleic acid (e.g., an endogenous homologous sequence, e.g., a sister chromatid, or an exogenous nucleic acid, e.g., a template nucleic acid). Alt-HDR is distinct from canonical HDR in that the process utilizes different pathways from canonical HDR, and can be inhibited by the canonical HDR mediators, RAD51 and BRCA2. Also, alt-HDR uses a single-stranded or nicked homologous nucleic acid for repair of the break.

[0230] “Canonical HDR” or “canonical homology-directed repair” as used herein refers to the process of repairing DNA damage using a homologous nucleic acid (e.g., an endogenous homologous sequence, e.g., a sister chromatid, or an exogenous nucleic acid, e.g., a template nucleic acid). Canonical HDR typically acts when there has been significant resection at the double strand break, forming at least one single stranded portion of DNA. In a normal cell, HDR typically involves a series of steps such as recognition of the break, stabilization of the break, resection, stabilization of single stranded DNA, formation of a DNA crossover intermediate, resolution of the crossover intermediate, and ligation. The process requires RAD51 and BRCA2, and the homologous nucleic acid is typically double-stranded.

[0231] Unless indicated otherwise, the term “HDR” as used herein encompasses both canonical HDR and alt-HDR.

[0232] “Non-homologous end joining” or “NHEJ” as used herein refers to ligation mediated repair and/or non-template mediated repair including canonical NHEJ (cNHEJ), alternative NHEJ (altNHEJ), microhomology-mediated end joining (MMEJ), single-strand annealing (SSA), and synthesis-dependent microhomology-mediated end joining (SD-MMEJ).

[0233] “Replacement” or “replaced” as used herein with reference to a modification of a molecule does not require a process limitation but merely indicates that the replacement entity is present.

[0234] “Subject” as used herein may mean either a human or non-human animal. The term includes, but is not limited to, mammals (e.g., humans, other primates, pigs, rodents (e.g., mice and rats or hamsters), rabbits, guinea pigs, cows, horses, cats, dogs, sheep, and goats). In certain embodiments, the subject is a human. In certain embodiments, the human is an infant, child, young adult, or adult. In certain embodiments, the subject is poultry. “Treat”, “treating” and “treatment”, as used herein, mean the treatment of a disease in a mammal, e.g., in a human, including (a) inhibiting the disease, i.e., arresting or preventing its development or progression; (b) relieving the disease, i.e., causing regression of the disease state; (c) relieving one or more symptoms of the disease; and (d) curing the disease.

[0235] “Prevent,” “preventing,” and “prevention” as used herein means the prevention of a disease in a mammal, e.g., in a human, including (a) avoiding or precluding the disease; (b) affecting the predisposition toward the disease; (c) preventing or delaying the onset of at least one symptom of the disease. “X” as used herein in the context of an amino acid sequence, refers to any amino acid (e.g., any of the twenty natural amino acids) unless otherwise specified. A “Cas9 molecule” or “Cas9 polypeptide” as used herein refers to a molecule or polypeptide, respectively, that can interact with a gRNA molecule and, in concert with the gRNA molecule, localize to a site comprising a target domain and, in certain embodiments, a PAM sequence. Cas9 molecules and Cas9 polypeptides include both naturally occurring Cas9 molecules and Cas9 polypeptides and engineered, altered, or modified Cas9 molecules or Cas9 polypeptides that differ, e.g., by at least one amino acid residue, from a reference sequence, e.g., the most similar naturally occurring Cas9 molecule.

[0236] A “reference molecule” as used herein refers to a molecule to which a modified or candidate molecule is compared. For example, a reference Cas9 molecule refers to a Cas9 molecule to which a modified or candidate Cas9 molecule is compared. Likewise, a reference gRNA refers to a gRNA molecule to which a modified or candidate gRNA molecule is compared. The modified or candidate molecule may be compared to the reference molecule on the basis of sequence (e.g., the modified or candidate molecule may have X % sequence identity or homology with the reference molecule) or activity (e.g., the modified or candidate molecule may have X % of the activity of the reference molecule). For example, where the reference molecule is a Cas9 molecule, a modified or candidate molecule may be characterized as having no more than 10% of the nuclease activity of the reference Cas9 molecule. Examples of reference Cas9 molecules include naturally occurring unmodified Cas9 molecules, e.g., a naturally occurring Cas9 molecule from S. pyogenes, S. aureus, S. thermophilus, or N. meningitidis. In certain embodiments, the reference Cas9 molecule is the naturally occurring Cas9 molecule having the closest sequence identity or homology with the modified or candidate Cas9 molecule to which it is being compared. In certain embodiments, the reference Cas9 molecule is a parental molecule having a naturally occurring or known sequence on which a mutation has been made to arrive at the modified or candidate Cas9 molecule.

[0237] “Target sequence” as used herein refers to a nucleic acid sequence comprising a DMD target position.

[0238] “DMD target position” as used herein refers to any of a DMD exonic target position or a DMD intra-exonic target position, as described herein. In certain embodiments, the DMD target position comprises exon 51 of the DMD gene (e.g., a human DMD gene).

[0239] “DMD exonic target position” or “DMD ETP,” as used herein, refers to a sequence comprising one or more exons of the DMD gene. Deletion of the DMD ETP optimizes a subject's DMD sequence, e.g., it increases the activity of the encoded dystrophin protein, or results in an improvement in the disease state of the subject. In certain embodiments, excision of the DMD ETP restores reading frame and removes a premature termination codon (PTC).

[0240] A DMD ETP can include one, or a plurality of exons. In certain embodiments, where the DMD ETP comprises a single exon, the exon can be referred to as “X,” or “exon X.” In certain embodiments, the DMD ETP comprises exon 51 of the DMD gene (e.g., human DMD gene). In certain embodiments, where the ETP comprises a plurality of exons, the 5′ exon can be referred to as “X,” or “exon X,” and the 3′ exon can be referred to as “Y,” or “exon Y.” If exons X and Y are not contiguous, the exons between them are included in the DMD ETP. In certain embodiments, the ETP comprises an exon having one or more mutation, including, but not limited to, a premature codon, a point mutation, a frameshift mutation (e.g., disrupted reading frame), a duplicated exon, an aberrant splice acceptor site, and an aberrant splice donor site. In certain embodiments, the DMD ETP flanks a mutation, e.g., a deletion mutation.

[0241] In certain embodiments, one or more gRNA molecules are used to position one or more cleavage events in an intron 5′ to the DMD ETP, an intron 3′ to the DMD ETP, or both.

[0242] In certain embodiments, a pair of gRNA molecules (two gRNA molecules) are used to mediate excision of the DMD ETP, wherein one gRNA molecule positions a cleavage event in an intron 5′ to the DMD ETP (e.g., the intron adjacent to the 5′ of the DMD ETP), and one gRNA molecule positions a cleavage event in an intron 3′ to the DMD ETP (e.g., the intron adjacent to the 3′ of the DMD ETP). In certain embodiments, in the case of the 5′ intron, the cleavage site is 5′ to a splice donor sequence. In certain embodiments, in the case of the 3′ intron, the cleavage site is 3′ to a splice acceptor sequence. In certain embodiments, the DMD ETP comprises exon 51 of the DMD gene (e.g., human DMD gene). In certain embodiments, a pair of gRNA molecules are used to mediate excision of exon 51 of the DMD gene (e.g., human DMD gene), wherein one gRNA molecule positions a cleavage event in intron 50 of the DMD gene, and one gRNA molecule positions a cleavage event in intron 51 of the DMD gene.

[0243] In certain embodiments, a pair of gRNA molecules (two gRNA molecules) are used to mediate excision of the DMD ETP, wherein one gRNA molecule positions a cleavage event in an intron 5′ to the DMD ETP (e.g., the intron adjacent to the 5′ of the DMD ETP), and one gRNA molecule positions a cleavage event in the DMD ETP. In certain embodiments, the DMD ETP comprises exon 51 of the DMD gene (e.g., human DMD gene). In certain embodiments, a pair of gRNA molecules are used to mediate excision of exon 51 of the DMD gene (e.g., human DMD gene), wherein one gRNA molecule positions a cleavage event in intron 50 of the DMD gene, and one gRNA molecule positions a cleavage event in exon 51 of the DMD gene.

[0244] In certain embodiments, a pair of gRNA molecules (two gRNA molecules) are used to mediate excision of the DMD ETP, wherein one gRNA molecule positions a cleavage event in the DMD ETP, and one gRNA molecule positions a cleavage event in an intron 3′ to the DMD ETP (e.g., the intron adjacent to the 3′ of the DMD ETP). In certain embodiments, the DMD ETP comprises exon 51 of the DMD gene (e.g., human DMD gene). In certain embodiments, a pair of gRNA molecules are used to mediate excision of exon 51 of the DMD gene (e.g., human DMD gene), wherein one gRNA molecule positions a cleavage event in exon 51 of the DMD gene, and one gRNA molecule positions a cleavage event in intron 51 of the DMD gene.

[0245] In certain embodiments, the first gRNA molecule and the second gRNA molecule are selected from the group consisting of:

[0246] (a) a first gRNA molecule comprising a targeting domain that comprises a nucleotide sequence set forth in SEQ ID NO: 1977, and a second gRNA molecule comprising a targeting domain that comprises a nucleotide sequence set forth in SEQ ID NO: 2048;

[0247] (b) a first gRNA molecule comprising a targeting domain that comprises a nucleotide sequence set forth in SEQ ID NO: 18458, and a second gRNA molecule comprising a targeting domain that comprises a nucleotide sequence set forth in SEQ ID NO: 2048;

[0248] (c) a first gRNA molecule comprising a targeting domain that comprises a nucleotide sequence set forth in SEQ ID NO: 19199, and a second gRNA molecule comprising a targeting domain that comprises a nucleotide sequence set forth in SEQ ID NO: 18720;

[0249] (d) a first gRNA molecule comprising a targeting domain that comprises a nucleotide sequence set forth in SEQ ID NO: 4709, and a second gRNA molecule comprising a targeting domain that comprises a nucleotide sequence set forth in SEQ ID NO: 18720;

[0250] (e) a first gRNA molecule comprising a targeting domain that comprises a nucleotide sequence set forth in SEQ ID NO: 481, and a second gRNA molecule comprising a targeting domain that comprises a nucleotide sequence set forth in SEQ ID NO: 2048;

[0251] (f) a first gRNA molecule comprising a targeting domain that comprises a nucleotide sequence set forth in SEQ ID NO: 4709, and a second gRNA molecule comprising a targeting domain that comprises a nucleotide sequence set forth in SEQ ID NO: 22349;

[0252] (g) a first gRNA molecule comprising a targeting domain that comprises a nucleotide sequence set forth in SEQ ID NO: 5869, and a second gRNA molecule comprising a targeting domain that comprises a nucleotide sequence set forth in SEQ ID NO: 3536;

[0253] (h) a first gRNA molecule comprising a targeting domain that comprises a nucleotide sequence set forth in SEQ ID NO: 18752, and a second gRNA molecule comprising a targeting domain that comprises a nucleotide sequence set forth in SEQ ID NO: 17253;

[0254] (i) a first gRNA molecule comprising a targeting domain that comprises a nucleotide sequence set forth in SEQ ID NO: 20145, and a second gRNA molecule comprising a targeting domain that comprises a nucleotide sequence set forth in SEQ ID NO: 3536;

[0255] (j) a first gRNA molecule comprising a targeting domain that comprises a nucleotide sequence set forth in SEQ ID NO: 19187, and a second gRNA molecule comprising a targeting domain that comprises a nucleotide sequence set forth in SEQ ID NO: 7252;

[0256] (k) a first gRNA molecule comprising a targeting domain that comprises a nucleotide sequence set forth in SEQ ID NO: 18752, and a second gRNA molecule comprising a targeting domain that comprises a nucleotide sequence set forth in SEQ ID NO: 3536; and

[0257] (l) a first gRNA molecule comprising a targeting domain that comprises a nucleotide sequence set forth in SEQ ID NO: 19187; and a second gRNA molecule comprising a targeting domain that comprises a nucleotide sequence set forth in SEQ ID NO: 7419.

[0258] In certain embodiments, the pair of gRNA molecules (two gRNA molecules) are selected from the gRNA pairs listed in Table 15, i.e., selected from the group consisting of:

[0259] (a) a first gRNA molecule comprising a targeting domain that comprises a nucleotide sequence set forth in SEQ ID NO: 2048, and a second gRNA molecule comprising a targeting domain that comprises a nucleotide sequence selected from SEQ ID NOs: 1977, 18458, 481, 9997, 1499, 2121, 8709, 21570, 16467, and 23958;

[0260] (b) a first gRNA molecule comprising a targeting domain that comprises a nucleotide sequence set forth in SEQ ID NO: 19199, and a second gRNA molecule comprising a targeting domain that comprises a nucleotide sequence set forth in SEQ ID NO: 18720;

[0261] (c) a first gRNA molecule comprising a targeting domain that comprises a nucleotide sequence set forth in SEQ ID NO: 18720, SEQ ID NO: 22349 or SEQ ID NO: 10092, and a second gRNA molecule comprising a targeting domain that comprises a nucleotide sequence set forth in SEQ ID NO: 4709 or SEQ ID NO: 20303;

[0262] (d) a first gRNA molecule comprising a targeting domain that comprises a nucleotide sequence set forth in SEQ ID NO: 3536, and a second gRNA molecule comprising a targeting domain that comprises a nucleotide sequence selected from SEQ ID NOs: 5869, 20145, 18752, 20870, 9530, 18062, 4134, and 23958;

[0263] (e) a first gRNA molecule comprising a targeting domain that comprises a nucleotide sequence set forth in SEQ ID NO: 18458, and a second gRNA molecule comprising a targeting domain that comprises a nucleotide sequence set forth in SEQ ID NO: 9765;

[0264] (f) a first gRNA molecule comprising a targeting domain that comprises a nucleotide sequence set forth in SEQ ID NO: 18752, and a second gRNA molecule comprising a targeting domain that comprises a nucleotide sequence selected from SEQ ID NOs: 17253, 14607, 16967, 7419, 1744, and 8569;

[0265] (g) a first gRNA molecule comprising a targeting domain that comprises a nucleotide sequence set forth in SEQ ID NO: 19187, and a second gRNA molecule comprising a targeting domain that comprises a nucleotide sequence selected from SEQ ID NOs: 14695, 7252, 17253, 7419, 1744, 8569, and 9358;

[0266] (h) a first gRNA molecule comprising a targeting domain that comprises a nucleotide sequence set forth in SEQ ID NO: 20145, and a second gRNA molecule comprising a targeting domain that comprises a nucleotide sequence selected from SEQ ID NOs: 5614, 20764, 14607, 8569, and 7252;

[0267] (i) a first gRNA molecule comprising a targeting domain that comprises a nucleotide sequence set forth in SEQ ID NO: 1499, and a second gRNA molecule comprising a targeting domain that comprises a nucleotide sequence set forth in SEQ ID NO: 14296;

[0268] (i) a first gRNA molecule comprising a targeting domain that comprises a nucleotide sequence set forth in SEQ ID NO: 4134, and a second gRNA molecule comprising a targeting domain that comprises a nucleotide sequence selected from SEQ ID NOs: 20924, 4072, and 8569;

[0269] (k) a first gRNA molecule comprising a targeting domain that comprises a nucleotide sequence set forth in SEQ ID NO: 6209, and a second gRNA molecule comprising a targeting domain that comprises a nucleotide sequence selected from SEQ ID NOs: 14035, 13527, 21873, 14298, 7419, and 20924;

[0270] (l) a first gRNA molecule comprising a targeting domain that comprises a nucleotide sequence set forth in SEQ ID NO: 9346, and a second gRNA molecule comprising a targeting domain that comprises a nucleotide sequence selected from SEQ ID NOs: 7419, 20764, and 2769;

[0271] (m) a first gRNA molecule comprising a targeting domain that comprises a nucleotide sequence set forth in SEQ ID NO: 7649, and a second gRNA molecule comprising a targeting domain that comprises a nucleotide sequence selected from SEQ ID NOs: 16967, 1484, 20924, 4072, and 9496;

[0272] (n) a first gRNA molecule comprising a targeting domain that comprises a nucleotide sequence set forth in SEQ ID NO: 5869, and a second gRNA molecule comprising a targeting domain that comprises a nucleotide sequence selected from SEQ ID NOs: 8569, 13527, 1484, 5614, 4072, and 14695;

[0273] (o) a first gRNA molecule comprising a targeting domain that comprises a nucleotide sequence set forth in SEQ ID NO: 4165, and a second gRNA molecule comprising a targeting domain that comprises a nucleotide sequence selected from SEQ ID NOs: 7252, 1484, and 9279;

[0274] (p) a first gRNA molecule comprising a targeting domain that comprises a nucleotide sequence set forth in SEQ ID NO: 15622, and a second gRNA molecule comprising a targeting domain that comprises a nucleotide sequence set forth in SEQ ID NO: 17253;

[0275] (q) a first gRNA molecule comprising a targeting domain that comprises a nucleotide sequence set forth in SEQ ID NO: 18062, and a second gRNA molecule comprising a targeting domain that comprises a nucleotide sequence set forth in SEQ ID NO: 2769 or SEQ ID NO: 14035;

[0276] (r) a first gRNA molecule comprising a targeting domain that comprises a nucleotide sequence set forth in SEQ ID NO: 21131, and a second gRNA molecule comprising a targeting domain that comprises a nucleotide sequence set forth in SEQ ID NO: 13527 or SEQ ID NO: 13285;

[0277] (s) a first gRNA molecule comprising a targeting domain that comprises a nucleotide sequence set forth in SEQ ID NO: 20870, and a second gRNA molecule comprising a targeting domain that comprises a nucleotide sequence set forth in SEQ ID NO: 16967 or SEQ ID NO: 7252;

[0278] (t) a first gRNA molecule comprising a targeting domain that comprises a nucleotide sequence set forth in SEQ ID NO: 16235, and a second gRNA molecule comprising a targeting domain that comprises a nucleotide sequence set forth in SEQ ID NO: 10140;

[0279] (u) a first gRNA molecule comprising a targeting domain that comprises a nucleotide sequence set forth in SEQ ID NO: 15271, and a second gRNA molecule comprising a targeting domain that comprises a nucleotide sequence set forth in SEQ ID NO: 13518;

[0280] (v) a first gRNA molecule comprising a targeting domain that comprises a nucleotide sequence set forth in SEQ ID NO: 11675, and a second gRNA molecule comprising a targeting domain that comprises a nucleotide sequence selected from SEQ ID NOs: 2769, 1484, and 4072; and

[0281] (w) a first gRNA molecule comprising a targeting domain that comprises a nucleotide sequence set forth in SEQ ID NO: 23958, and a second gRNA molecule comprising a targeting domain that comprises a nucleotide sequence set forth in SEQ ID NO: 14035 or SEQ ID NO: 9496.

[0282] In certain embodiments, the pair of gRNA molecules (two gRNA molecules) are selected from the gRNA pairs listed in Table 7 or Table 8. i.e., from the group consisting of:

[0283] (a) a first gRNA molecule comprising a targeting domain that comprises a nucleotide sequence set forth in SEQ ID NO: 692257, and a second gRNA molecule comprising a targeting domain that comprises a nucleotide sequence set forth in SEQ ID NO: 692261, SEQ ID NO: 692262, SEQ ID NO: 692263, SEQ ID NO: 692264, SEQ ID NO: 692270, SEQ ID NO: 692271, or SEQ ID NO: 692272;

[0284] (b) a first gRNA molecule comprising a targeting domain that comprises a nucleotide sequence set forth in SEQ ID NO: 692258, and a second gRNA molecule comprising a targeting domain that comprises a nucleotide sequence set forth in SEQ ID NO: 692261, SEQ ID NO: 692262, SEQ ID NO: 692263, SEQ ID NO: 692264, SEQ ID NO: 692270, SEQ ID NO: 692271, or SEQ ID NO: 692272;

[0285] (c) a first gRNA molecule comprising a targeting domain that comprises a nucleotide sequence set forth in SEQ ID NO: 692260, and a second gRNA molecule comprising a targeting domain that comprises a nucleotide sequence set forth in SEQ ID NO: 692261, SEQ ID NO: 692262, SEQ ID NO: 692263, SEQ ID NO: 692264, SEQ ID NO: 692270, SEQ ID NO: 692271, or SEQ ID NO: 692272;

[0286] (d) a first gRNA molecule comprising a targeting domain that comprises a nucleotide sequence set forth in SEQ ID NO: 692253, and a second gRNA molecule comprising a targeting domain that comprises a nucleotide sequence set forth in SEQ ID NO: 692270, SEQ ID NO: 692271, or SEQ ID NO: 692272;

[0287] (e) a first gRNA molecule comprising a targeting domain that comprises a nucleotide sequence set forth in SEQ ID NO: 692254, and a second gRNA molecule comprising a targeting domain that comprises a nucleotide sequence set forth in SEQ ID NO: 692270, SEQ ID NO: 692271, or SEQ ID NO: 692272; and

[0288] (f) a first gRNA molecule comprising a targeting domain that comprises a nucleotide sequence set forth in SEQ ID NO: 692256, and a second gRNA molecule comprising a targeting domain that comprises a nucleotide sequence set forth in SEQ ID NO: 692270, SEQ ID NO: 692271, or SEQ ID NO: 692272.

[0289] Excision of a DMD ETP can be used to modify or alter a DMD sequence having a deletion mutation. In certain embodiments, the DMD target sequence comprises a deletion of one or more dystrophin exons, e.g., resulting in ectopic exons, having different reading frames from one another, being placed adjacent to one another, giving rise to a PTC, typically in the first exon following the deletion. Excision of the DMD ETP results in restoration of the correct reading frame and removal of the PTC. FIG. 13 can be used to select ectopic (e.g., non-contiguous) exons having the same reading frame. In certain embodiments, the DMD ETP is configured so as to remove the minimal number of exons from the DMD sequence to restore the correct reading frame. In certain embodiments, the DMD ETP is configured so as to remove one or more specific exons from the DMD sequence such that the correct reading frame is restored and one or more preselected function domains are restored

[0290] In certain embodiments, the DMD ETP is contiguous with the subject's deletion mutation delPQ, e.g., 3′ to the deletion mutation. Excision of the DMD ETP results in the exon just 5′ to the deletion being contiguous with a remaining exon 3′ to the deletion having the same reading frame as the exon just 5′ to the deletion. In certain embodiments, the exon 3′ to the deletion is the first remaining exon 3′ to the deletion having the desired reading frame. See FIG. 10A. In FIG. 10A, the deleted exons of the subject's DMD gene are indicated by a curly bracket. The DMD ETP includes exons X and Y, adjacent to or contiguous with the deletion. Excision of X and Y places ectopic exons X−1 and Y+1 (which have the same reading frame) contiguous with one another, restoring the correct reading frame.

[0291] In certain embodiments, the DMD ETP is contiguous with the subject's deletion mutation, e.g., 5′ to the deletion mutation. Excision of the DMD ETP results in the exon just 3′ to the deletion being contiguous with a remaining exon 5′ to the deletion having the same reading frame as the exon just 3′ to the deletion. In certain embodiments, the exon 5′ to the deletion is the first remaining exon 5′ to the deletion having the desired reading frame. See FIG. 10B. In FIG. 10B, the deleted exons of the subject's DMD gene are indicated by a curly bracket. The DMD ETP includes exons X and Y, adjacent to or contiguous with the deletion. Excision of X and Y places ectopic exons X−1 and Y+1 (which have the same reading frame) contiguous with one another, restoring the correct reading frame.

[0292] In certain embodiments, the DMD ETP flanks the subject's deletion mutation and includes an exon 5′ to the deletion mutation and an exon 3′ to the deletion mutation. Excision of the DMD ETP results in a remaining exon 5′ to the deletion being contiguous with a remaining exon 3′ to the deletion having the same reading frame as the remaining exon 5′ to the deletion. In certain embodiments, the exon 5′ to the deletion is the first remaining exon 5′ to the deletion having the desired reading frame. In certain embodiments, the exon 3′ to the deletion is the first remaining exon 3′ to the deletion having the desired reading frame. In certain embodiments, the exon 5′ to the deletion is the first remaining exon 5′ to the deletion having the desired reading frame and the exon 3′ to the deletion is the first remaining exon 3′ to the deletion having the desired reading frame. See FIG. 10C. In FIG. 10C, the deleted exons of the subject's DMD gene are indicated by a curly bracket. The DMD ETP includes exons X and Y, adjacent to or contiguous with the deletion. Excision of X and Y places ectopic exons X−1 and Y+1 (which have the same reading frame) contiguous with one another, restoring the correct reading frame.

[0293] In certain embodiments, e.g., where the deletion mutation comprises a single exon, the exon can be referred to as “P,” or “exon P,” and the deletion mutation can be denoted delP. In certain embodiments, e.g., where the deletion mutation comprises a plurality of exons, the 5′ exon can be referred to as “P,” or “exon P,” and the 3′ exon can be referred to as “Q,” or “exon Q,” and the deletion mutation can be denoted delPQ. If exons P and Q are not contiguous, the exons between them are included in the deletion mutation.

[0294] Excision of a DMD ETP can be used to modify or alter a DMD sequence having a duplication mutation. In certain embodiments, the DMD target sequence comprises a duplication of one or more DMD exons, e.g., resulting in ectopic exons, having different reading frames from one another, being placed adjacent to one another, giving rise to a PTC, typically in the first duplicated exon. Excision of the DMD ETP results in restoration of the correct reading frame and removal of the PTC. FIG. 13 can be used to select ectopic (e.g., non-contiguous) exons having the same reading frame. In certain embodiments, the DMD ETP is configured so as to remove the minimal number of exons from the DMD sequence to restore the correct reading frame. In certain embodiments, the DMD ETP is configured so as to remove one or more specific exons from the DMD sequence such that the correct reading frame is restored and one or more preselected function domains are restored. In certain embodiments, the DMD ETP includes the subject's duplication mutation and an exon contiguous with the duplication, e.g., 3′ to the duplication. Excision of the DMD ETP results in the exon just 5′ to the duplication being contiguous with a remaining exon 3′ to the duplication having the same reading frame as the exon just 5′ to the duplication. In certain embodiments, the exon 3′ to the duplication is the first remaining exon 3′ to the duplication having the desired reading frame. See FIG. 11A. In FIG. 11A, the duplicated exons of the subject's DMD gene are indicated by a curly bracket. The DMD ETP includes exons X and Y, adjacent to or contiguous with the duplication. Excision of X, Y and the duplicated exons places ectopic exons X−1 and Y+1 (which have the same reading frame) contiguous with one another, restoring the correct reading frame.

[0295] In certain embodiments, the DMD ETP includes the subject's duplication mutation and an exon contiguous with the duplication, e.g., 5′ of the duplication. Excision of the DMD ETP results in the exon just 3′ of the duplication being contiguous with a remaining exon 5′ to the duplication having the same reading frame as the exon just 3′ to the duplication. In certain embodiments, the exon 5′ of the duplication is the first remaining exon 5′ of the duplication having the desired reading frame. See FIG. 11B. In FIG. 11B, the duplicated exons of the subject's DMD gene are indicated by a curly bracket. The DMD ETP includes exons X and Y, adjacent to or contiguous with the duplication. Excision of X, Y and the duplicated exons places ectopic exons X−1 and Y+1 (which have the same reading frame) contiguous with one another, restoring the correct reading frame.

[0296] In certain embodiments, the DMD ETP flanks the subject's duplication mutation and includes an exon 5′ to the duplication and an exon 3′ to the duplication. Excision of the DMD ETP results in a remaining exon 5′ to the duplication being contiguous with a remaining exon 3′ to the duplication having the same reading frame as the remaining exon 5′ to the duplication. In certain embodiments, the exon 5′ to the duplication is the first remaining exon 5′ to the duplication having the desired reading frame. In certain embodiments, the exon 3′ to the duplication is the first remaining exon 3′ to the duplication having the desired reading frame. In certain embodiments, the exon 5′ to the duplication is the first remaining exon 5′ to the duplication having the desired reading frame and the exon 3′ to the duplication is the first remaining exon 3′ to the duplication having the desired reading frame. See FIG. 11C. In FIG. 11C, the duplicated exons of the subject's DMD gene are indicated by a curly bracket. The DMD ETP includes exons X and Y, adjacent to or contiguous with the duplication. Excision of X, Y and the duplicated exons places ectopic exons X−1 and Y+1 (which have the same reading frame) contiguous with one another, restoring the correct reading frame.

[0297] Excision of a DMD ETP can be used to modify or alter a DMD sequence having a point mutation, e.g., a missense or nonsense mutation, or an indel mutation. In certain embodiments, the DMD ETP comprises an exon that has a missense mutation. In certain embodiments, the DMD ETP comprises an exon that has a nonsense mutation. In certain embodiments, the DMD ETP comprises an exon that has an indel mutation.

[0298] In certain embodiments, if excision of that exon results in now-contiguous ectopic exons (e.g., exons just 5′ and 3′ of the exon having the mutation that are now contiguous with one another) that have the correct reading frame, the DMD ETP can include only the exon having the mutation. See FIG. 12A. In FIG. 12A, the exon having the point mutation is indicated by a curly bracket. The DMD ETP includes exon X. Excision of X places ectopic exons X−1 and X+1 (which have the same reading frame) contiguous with one another, maintaining the correct reading frame.

[0299] In certain embodiments, if excision of that exon does not result in ectopic exons (e.g., exons just 5′ and 3′ of the exon having the mutation) that have the correct reading frame, additional exons, 3′, 5′ or both, can be included in the DMD ETP, such that after excision of the DMD ETP, the DMD gene sequence is in the correct reading frame. See FIG. 12B. In FIG. 12B, the exon having the point mutation is indicated by a curly bracket. The DMD ETP includes exons X and Y. X is the exon that has the point mutation or indel mutation. Excision of X and Y places ectopic exons X−1 and Y+1 (which have the same reading frame) contiguous with one another, maintaining or restoring the correct reading frame.

[0300] “DMD intra-exonic target position” or “DMD ITP,” as used herein, refers to any of a DMD intra-exonic point or indel target position, a DMD intra-exonic frameshift target position, or a DMD intra-exonic duplication target position, as described herein.

[0301] “DMD intra-exonic point or indel target position” or “DMD IPTP,” as used here, refers to a position in the DMD gene, within an exon, e.g., a point mutation, e.g., a missense or nonsense mutation, an indel mutation, a mutational hotspot, a sequence which, if frameshifted, would give rise to a premature termination codon. Alteration or modification of a DMD IPTP optimizes a subject's DMD sequence, e.g., it increases the activity of the encoded dystrophin protein, or results in an improvement in the disease state of the subject. In certain embodiments, the exon is exon 51 of the DMD gene (e.g., human DMD gene).

[0302] In certain embodiments, a gRNA molecule that positions a cleavage event at or in close proximity to the DMD IPTP, e.g., the point mutation, e.g., in or near a mutant codon, is used to alter or modify the DMD IPTP. In certain embodiments, the NHEJ mediated repair or resolution of the cleavage event results in alteration or modification of the DMD IPTP, e.g., the point mutation, e.g., the missense or nonsense mutation, or the indel mutation, e.g., by removal of the point mutation, e.g., the missense or nonsense mutation, or the indel mutation.

[0303] In certain embodiments, the DMD IPTP comprises a sequence which, if frameshifted, would give rise to a premature stop codon. The DMD IPTP can be excised by two cleavage events, which flank the sequence which, if frameshifted, would give rise to a premature stop codon.

[0304] In certain embodiments, a first gRNA molecule positions a cleavage event at or in close proximity to a first premature termination codon, e.g., 5′ of the first premature termination codon, and a second gRNA molecule positions a cleavage event at or in close proximity to a second premature termination codon, e.g., 3′ of the second premature termination codon. In certain embodiments, the first and second premature termination codons are in the same exon. In certain embodiments, the first and second premature termination codons are in exon 51 of human DMD gene. In certain embodiments, the first premature termination codon is the 5′-most termination codon in the exon. In certain embodiments, the second premature termination codon is the 3′-most termination codon in the exon. In certain embodiments, the first premature termination codon is the 5′-most termination codon, and the second premature termination codon is the 3′-most termination codon, in the same exon. In certain embodiments, NHEJ mediated deletion with two or more gRNAs of a sequence containing a mutational hotspot or a premature termination codon will excise the region containing the mutational hotspot or the premature termination codon, restoring the correct reading frame.

[0305] “DMD intra-exonic frame-shift target position” or “DMD IFTP,” as used herein, refers to a position in the DMD gene, within an exon, at which alteration or modification, e.g., insertion or deletion of one or two bases (or a multiple of 1 or 2 bases) restores correct reading frame and negates the effect of a frame shifting event. In certain embodiments, the frameshifting event is a deletion or duplication event that has created a frameshift in the DMD gene. Alteration or modification of a DMD IFTP optimizes a subject's DMD sequence, e.g., it increases the activity of the encoded dystrophin protein, or results in an improvement in the disease state of the subject. In certain embodiments, the exon is exon 51 of the DMD gene (e.g., human DMD gene).

[0306] In certain embodiments, a gRNA molecule that positions a cleavage event upstream or downstream of the frame shifting event is used to alter or modify the DMD IFTP. In certain embodiments, a gRNA molecule that positions a cleavage event upstream of a premature termination codon is used to alter or modify the DMD IFTP. In certain embodiments, the NHEJ mediated repair or resolution of the cleavage event results in restoring correct reading frame in at least some DMD sequences. In certain embodiments, two gRNA molecules are used to alter or modify the DMD IFTP, wherein one gRNA positions a cleavage event upstream of the frame shifting event, and one gRNA molecule positions a cleavage event downstream of the frame shifting event. In certain embodiment, the DMD IFTP is within exon 51 of the DMD gene (e.g., human DMD gene). In certain embodiments, two gRNA molecules are used to alter or modify a DMD IFTP within exon 51 of the DMD gene (e.g., human DMD gene), wherein one gRNA positions a cleavage event upstream of the frame shifting event, and one gRNA molecule positions a cleavage event downstream of the frame shifting event. In certain embodiments, one gRNA molecule targets intron 50 of the DMD gene, and one gRNA molecule targets intron 51 of the DMD gene. In certain embodiments, both two gRNA molecules target exon 51 of the DMD gene. In certain embodiments, one gRNA molecule targets intron 50 of the DMD gene, and one gRNA molecule targets exon 51 of the DMD gene. In certain embodiments, one gRNA molecule targets exon 51 of the DMD gene, and one gRNA molecule targets intron 51 of the DMD gene. In certain embodiments, the first gRNA molecule and the second gRNA molecule are selected from the group consisting of:

[0307] (a) a first gRNA molecule comprising a targeting domain that comprises a nucleotide sequence set forth in SEQ ID NO: 1977, and a second gRNA molecule comprising a targeting domain that comprises a nucleotide sequence set forth in SEQ ID NO: 2048;

[0308] (b) a first gRNA molecule comprising a targeting domain that comprises a nucleotide sequence set forth in SEQ ID NO: 18458, and a second gRNA molecule comprising a targeting domain that comprises a nucleotide sequence set forth in SEQ ID NO: 2048;

[0309] (c) a first gRNA molecule comprising a targeting domain that comprises a nucleotide sequence set forth in SEQ ID NO: 19199, and a second gRNA molecule comprising a targeting domain that comprises a nucleotide sequence set forth in SEQ ID NO: 18720;

[0310] (d) a first gRNA molecule comprising a targeting domain that comprises a nucleotide sequence set forth in SEQ ID NO: 4709, and a second gRNA molecule comprising a targeting domain that comprises a nucleotide sequence set forth in SEQ ID NO: 18720;

[0311] (e) a first gRNA molecule comprising a targeting domain that comprises a nucleotide sequence set forth in SEQ ID NO: 481, and a second gRNA molecule comprising a targeting domain that comprises a nucleotide sequence set forth in SEQ ID NO: 2048;

[0312] (f) a first gRNA molecule comprising a targeting domain that comprises a nucleotide sequence set forth in SEQ ID NO: 4709, and a second gRNA molecule comprising a targeting domain that comprises a nucleotide sequence set forth in SEQ ID NO: 22349;

[0313] (g) a first gRNA molecule comprising a targeting domain that comprises a nucleotide sequence set forth in SEQ ID NO: 5869, and a second gRNA molecule comprising a targeting domain that comprises a nucleotide sequence set forth in SEQ ID NO: 3536;

[0314] (h) a first gRNA molecule comprising a targeting domain that comprises a nucleotide sequence set forth in SEQ ID NO: 18752, and a second gRNA molecule comprising a targeting domain that comprises a nucleotide sequence set forth in SEQ ID NO: 17253;

[0315] (i) a first gRNA molecule comprising a targeting domain that comprises a nucleotide sequence set forth in SEQ ID NO: 20145, and a second gRNA molecule comprising a targeting domain that comprises a nucleotide sequence set forth in SEQ ID NO: 3536;

[0316] (j) a first gRNA molecule comprising a targeting domain that comprises a nucleotide sequence set forth in SEQ ID NO: 19187, and a second gRNA molecule comprising a targeting domain that comprises a nucleotide sequence set forth in SEQ ID NO: 7252;

[0317] (k) a first gRNA molecule comprising a targeting domain that comprises a nucleotide sequence set forth in SEQ ID NO: 18752, and a second gRNA molecule comprising a targeting domain that comprises a nucleotide sequence set forth in SEQ ID NO: 3536; and

[0318] (l) a first gRNA molecule comprising a targeting domain that comprises a nucleotide sequence set forth in SEQ ID NO: 19187; and a second gRNA molecule comprising a targeting domain that comprises a nucleotide sequence set forth in SEQ ID NO: 7419.

[0319] In certain embodiments, the pair of gRNA molecules (two gRNA molecules) are selected from the gRNA pairs listed in Table 15, i.e., the group consisting of:

[0320] (a) a first gRNA molecule comprising a targeting domain that comprises a nucleotide sequence set forth in SEQ ID NO: 2048, and a second gRNA molecule comprising a targeting domain that comprises a nucleotide sequence selected from SEQ ID NOs: 1977, 18458, 481, 9997, 1499, 2121, 8709, 21570, 16467, and 23958;

[0321] (b) a first gRNA molecule comprising a targeting domain that comprises a nucleotide sequence set forth in SEQ ID NO: 19199, and a second gRNA molecule comprising a targeting domain that comprises a nucleotide sequence set forth in SEQ ID NO: 18720;

[0322] (c) a first gRNA molecule comprising a targeting domain that comprises a nucleotide sequence set forth in SEQ ID NO: 18720, SEQ ID NO: 22349 or SEQ ID NO: 10092, and a second gRNA molecule comprising a targeting domain that comprises a nucleotide sequence set forth in SEQ ID NO: 4709 or SEQ ID NO: 20303;

[0323] (d) a first gRNA molecule comprising a targeting domain that comprises a nucleotide sequence set forth in SEQ ID NO: 3536, and a second gRNA molecule comprising a targeting domain that comprises a nucleotide sequence selected from SEQ ID NOs: 5869, 20145, 18752, 20870, 9530, 18062, 4134, and 23958;

[0324] (e) a first gRNA molecule comprising a targeting domain that comprises a nucleotide sequence set forth in SEQ ID NO: 18458, and a second gRNA molecule comprising a targeting domain that comprises a nucleotide sequence set forth in SEQ ID NO: 9765;

[0325] (f) a first gRNA molecule comprising a targeting domain that comprises a nucleotide sequence set forth in SEQ ID NO: 18752, and a second gRNA molecule comprising a targeting domain that comprises a nucleotide sequence selected from SEQ ID NOs: 17253, 14607, 16967, 7419, 1744, and 8569;

[0326] (g) a first gRNA molecule comprising a targeting domain that comprises a nucleotide sequence set forth in SEQ ID NO: 19187, and a second gRNA molecule comprising a targeting domain that comprises a nucleotide sequence selected from SEQ ID NOs: 14695, 7252, 17253, 7419, 1744, 8569, and 9358;

[0327] (h) a first gRNA molecule comprising a targeting domain that comprises a nucleotide sequence set forth in SEQ ID NO: 20145, and a second gRNA molecule comprising a targeting domain that comprises a nucleotide sequence selected from SEQ ID NOs: 5614, 20764, 14607, 8569, and 7252;

[0328] (i) a first gRNA molecule comprising a targeting domain that comprises a nucleotide sequence set forth in SEQ ID NO: 1499, and a second gRNA molecule comprising a targeting domain that comprises a nucleotide sequence set forth in SEQ ID NO: 14296;

[0329] (i) a first gRNA molecule comprising a targeting domain that comprises a nucleotide sequence set forth in SEQ ID NO: 4134, and a second gRNA molecule comprising a targeting domain that comprises a nucleotide sequence selected from SEQ ID NOs: 20924, 4072, and 8569;

[0330] (k) a first gRNA molecule comprising a targeting domain that comprises a nucleotide sequence set forth in SEQ ID NO: 6209, and a second gRNA molecule comprising a targeting domain that comprises a nucleotide sequence selected from SEQ ID NOs: 14035, 13527, 21873, 14298, 7419, and 20924;

[0331] (l) a first gRNA molecule comprising a targeting domain that comprises a nucleotide sequence set forth in SEQ ID NO: 9346, and a second gRNA molecule comprising a targeting domain that comprises a nucleotide sequence selected from SEQ ID NOs: 7419, 20764, and 2769;

[0332] (m) a first gRNA molecule comprising a targeting domain that comprises a nucleotide sequence set forth in SEQ ID NO: 7649, and a second gRNA molecule comprising a targeting domain that comprises a nucleotide sequence selected from SEQ ID NOs: 16967, 1484, 20924, 4072, and 9496;

[0333] (n) a first gRNA molecule comprising a targeting domain that comprises a nucleotide sequence set forth in SEQ ID NO: 5869, and a second gRNA molecule comprising a targeting domain that comprises a nucleotide sequence selected from SEQ ID NOs: 8569, 13527, 1484, 5614, 4072, and 14695;

[0334] (o) a first gRNA molecule comprising a targeting domain that comprises a nucleotide sequence set forth in SEQ ID NO: 4165, and a second gRNA molecule comprising a targeting domain that comprises a nucleotide sequence selected from SEQ ID NOs: 7252, 1484, and 9279;

[0335] (p) a first gRNA molecule comprising a targeting domain that comprises a nucleotide sequence set forth in SEQ ID NO: 15622, and a second gRNA molecule comprising a targeting domain that comprises a nucleotide sequence set forth in SEQ ID NO: 17253;

[0336] (q) a first gRNA molecule comprising a targeting domain that comprises a nucleotide sequence set forth in SEQ ID NO: 18062, and a second gRNA molecule comprising a targeting domain that comprises a nucleotide sequence set forth in SEQ ID NO: 2769 or SEQ ID NO: 14035;

[0337] (r) a first gRNA molecule comprising a targeting domain that comprises a nucleotide sequence set forth in SEQ ID NO: 21131, and a second gRNA molecule comprising a targeting domain that comprises a nucleotide sequence set forth in SEQ ID NO: 13527 or SEQ ID NO: 13285;

[0338] (s) a first gRNA molecule comprising a targeting domain that comprises a nucleotide sequence set forth in SEQ ID NO: 20870, and a second gRNA molecule comprising a targeting domain that comprises a nucleotide sequence set forth in SEQ ID NO: 16967 or SEQ ID NO: 7252;

[0339] (t) a first gRNA molecule comprising a targeting domain that comprises a nucleotide sequence set forth in SEQ ID NO: 16235, and a second gRNA molecule comprising a targeting domain that comprises a nucleotide sequence set forth in SEQ ID NO: 10140;

[0340] (u) a first gRNA molecule comprising a targeting domain that comprises a nucleotide sequence set forth in SEQ ID NO: 15271, and a second gRNA molecule comprising a targeting domain that comprises a nucleotide sequence set forth in SEQ ID NO: 13518;

[0341] (v) a first gRNA molecule comprising a targeting domain that comprises a nucleotide sequence set forth in SEQ ID NO: 11675, and a second gRNA molecule comprising a targeting domain that comprises a nucleotide sequence selected from SEQ ID NOs: 2769, 1484, and 4072; and

[0342] (w) a first gRNA molecule comprising a targeting domain that comprises a nucleotide sequence set forth in SEQ ID NO: 23958, and a second gRNA molecule comprising a targeting domain that comprises a nucleotide sequence set forth in SEQ ID NO: 14035 or SEQ ID NO: 9496.

[0343] In certain embodiments, the pair of gRNA molecules (two gRNA molecules) are selected from the gRNA pairs listed in Table 7 or Table 8, i.e., the group consisting of:

[0344] (a) a first gRNA molecule comprising a targeting domain that comprises a nucleotide sequence set forth in SEQ ID NO: 692257, and a second gRNA molecule comprising a targeting domain that comprises a nucleotide sequence set forth in SEQ ID NO: 692261, SEQ ID NO: 692262, SEQ ID NO: 692263, SEQ ID NO: 692264, SEQ ID NO: 692270, SEQ ID NO: 692271, or SEQ ID NO: 692272;

[0345] (b) a first gRNA molecule comprising a targeting domain that comprises a nucleotide sequence set forth in SEQ ID NO: 692258, and a second gRNA molecule comprising a targeting domain that comprises a nucleotide sequence set forth in SEQ ID NO: 692261, SEQ ID NO: 692262, SEQ ID NO: 692263, SEQ ID NO: 692264, SEQ ID NO: 692270, SEQ ID NO: 692271, or SEQ ID NO: 692272;

[0346] (c) a first gRNA molecule comprising a targeting domain that comprises a nucleotide sequence set forth in SEQ ID NO: 692260, and a second gRNA molecule comprising a targeting domain that comprises a nucleotide sequence set forth in SEQ ID NO: 692261, SEQ ID NO: 692262, SEQ ID NO: 692263, SEQ ID NO: 692264, SEQ ID NO: 692270, SEQ ID NO: 692271, or SEQ ID NO: 692272;

[0347] (d) a first gRNA molecule comprising a targeting domain that comprises a nucleotide sequence set forth in SEQ ID NO: 692253, and a second gRNA molecule comprising a targeting domain that comprises a nucleotide sequence set forth in SEQ ID NO: 692270, SEQ ID NO: 692271, or SEQ ID NO: 692272;

[0348] (e) a first gRNA molecule comprising a targeting domain that comprises a nucleotide sequence set forth in SEQ ID NO: 692254, and a second gRNA molecule comprising a targeting domain that comprises a nucleotide sequence set forth in SEQ ID NO: 692270, SEQ ID NO: 692271, or SEQ ID NO: 692272; and

[0349] (f) a first gRNA molecule comprising a targeting domain that comprises a nucleotide sequence set forth in SEQ ID NO: 692256, and a second gRNA molecule comprising a targeting domain that comprises a nucleotide sequence set forth in SEQ ID NO: 692270, SEQ ID NO: 692271, or SEQ ID NO: 692272.

[0350] “DMD intra-exonic duplication target position” or “DMD IDTP,” as used herein, refers to a region, within duplicated exons. Deletion of the DMD IDTP optimizes a subject's DMD sequence, e.g., it increases the activity of the encoded dystrophin protein, or results in an improvement in the disease state of the subject. In certain embodiments, excision of the DMD IDTP restores reading frame and removes a premature termination codon (PTC). In certain embodiments, excision of the DMD IDTP restores the RNA profile of dystrophin and improves the phenotype of DMD.

[0351] In certain embodiments, one or more gRNA molecules are used to position one or more cleavage events in a 5′ duplicated exon, a 3′ duplicated exon, or both. In certain embodiments, a single gRNA molecule is used to position a cleavage event in a 5′ duplicated exon and a cleavage event in a 3′ duplicated exon. In certain embodiments, a pair of gRNA molecules, one which positions a cleavage event in a 5′ duplicated exon, and one which positions a cleavage event in a 3′ duplicated exon, are used to mediate excision of the DMD IDTP. If the 5′ exon and the 3′ exon are not contiguous, the additional exon(s) between them can be included in the DMD IDTP.

### 2. Methods of Altering DMD Gene

[0352] The DMD gene encodes the protein dystrophin, an integral structural protein of muscle cells. Dystrophin is part of the dystrophin-associated glycoprotein complex (DCG) that connects the actin cytoskeleton to the extracellular matrix. Dystrophin plays an essential role in anchoring the DCG and facilitating muscle contraction. Mutations in the DMD gene have been shown to cause DMD, BMD, or DCM3B.

[0353] The DMD gene can produce different transcripts encoding various dystrophin isoforms, i.e. proteins of varying lengths comprising different segments of the basic dystrophin sequence. The dystrophin isoforms are encoded by different mRNAs, which can be generated by use of different and unique promoters, alternative splicing, or use of different polyA-addition signals.

[0354] In certain embodiments, the presently disclosed subject matter provides for a one-time treatment via a gene editing approach, which could be effective over a long time period (when compared with oligonucleotide therapies in development). Further, the one-time treatment would reduce inflammation and the requirement of multiple, repeat IM injections into already fragile muscle tissue (which is under inflammatory strain). In all, a one-time treatment for DMD, BMD and DCM type 3B would be superior to methods currently in development.

[0355] Methods described herein can, in certain embodiments, alter or modify the DMD gene in subjects with dystrophin mutations. Dystrophin mutations occur throughout the gene and include, but are not limited to, deletion, duplication, point (missense or nonsense), splice site (e.g., an aberrant splice acceptor site, or an aberrant splice donor site), and indel mutations, a premature stop codon, and disrupted reading frame. These mutations may all lead to premature truncation of the dystrophin protein. Premature truncation of the dystrophin protein generally leads to a severe DMD phenotype. In general, deletions that lead to out-of-frame reading of the dystrophin protein cause premature truncation of the DMD gene which can cause DMD in subjects. Mutations that cause deletions within the DMD gene which do not lead to out-of-frame reading of the dystrophin protein generally do not cause premature truncation. Subjects with in-frame deletion mutations generally have a milder phenotype, described as BMD.

[0356] Disclosed herein are compositions, genome-editing systems and methods for altering a DMD target position in the DMD gene. In certain embodiments, the compositions, genome-editing systems and methods introduce one or more breaks at or near a DMD target position in at least one allele of the DMD gene. In certain embodiments, the one or more breaks are repaired or resolved by NHEJ. During repair or resolution of the one or more breaks, a sequence can be inserted or deleted, which resulting in, e.g., removal of one or more exons (e.g., deletion of exon 51 (exon 51 skipping), deletion of exon 44-55, or deletion of any exon 2-20) leading to exon skipping and restoration of a functional or partially functional dystrophin protein; deletion of an insertion mutation that has caused early truncation of dystrophin or a mutant protein to restore the reading frame); deletion of a premature stop codon (e.g., in the case of a nonsense mutation); or deletion of a missense mutation and restoration of the reading frame. The mutations addressed by the methods described herein may be, but are not limited to, deletion, duplication, point (e.g., missense or nonsense), splice site (e.g., an aberrant splice acceptor site, or an aberrant splice donor site), and indel mutations, a premature stop codon, and disrupted reading frame.

[0357] There are many different dystrophin mutations that lead to common pathways of altered dystrophin expression. Subjects often have discrete, individual mutations that lead to common exonic deletions within the DMD gene. Many different mutations (often at different intronic locations) lead to the same deletion or duplication mutation, with the same location of truncation. Many subjects with different indel or point mutations may have premature truncation of the dystrophin protein at a common site within an exon or within a common exon. The methods described herein can target subsets of patients who have different mutations but can be treated with a common guide RNA(s).

[0358] Subjects can be genotyped via any of the following exemplary methods: multiplex polymerase chain reaction (PCR), Southern blot analysis, dosimetric PCR-based methods, multiplex amplifiable probe hybridization (MAPH), multiplex ligation-dependent probe amplification (MLPA), and multiplex single-strand conformational polymorphism analysis (SSCP), denaturing high-performance liquid phase chromatography (dHPLC), denaturing gradient gel-electrophoresis (DGGE), and single-condition amplification/internal primer (SCAIP) sequencing. RNA profiling may also be used to determine the dystrophin protein transcript in a subject. After analysis of an individual subject's mutation, a beneficial approach out of those described herein can be chosen. For example, a beneficial approach can be that which preserves the greatest amount of the dystrophin transcript, or the most important exons of the dystrophin transcript. Examples of certain mutations and associated approaches are detailed herein.

[0359] In certain embodiments, the compositions, genome-editing systems and methods disclosed herein restore the reading frame of the DMD gene by removing one or more exons to restore the reading frame of the DMD gene. In certain embodiments, the compositions, genome-editing systems and methods restore the reading frame of the DMD gene by removing a mutational hotspot. In certain embodiments, the compositions, genome-editing systems and methods restore the reading frame of the DMD gene by removing a segment of the DMD gene to avoid the read-through of a point or indel mutation. In certain embodiments, the compositions, genome-editing systems and methods restore the reading frame of the DMD gene by removing a segment of the DMD gene that is contiguous to a deletion mutation, e.g., a segment of the DMD gene is removed 5′ of a deletion mutation to restore the reading frame, e.g., a segment of the DMD gene is removed 3′ of a deletion mutation to restore the reading frame. In certain embodiments, the compositions, genome-editing systems and methods restore the reading frame of the DMD gene by removing a segment of the DMD gene to excise common point or indel mutations. In certain embodiments, the compositions, genome-editing systems and methods restore the reading frame of the DMD gene by removing a segment of the DMD gene to restore the reading frame of the DMD gene 5′ to a point mutation or indel mutation. In certain embodiments, the compositions, genome-editing systems and methods described herein lead to production of a mini-dystrophin or a dystrophin that is no longer prematurely truncated in any subject with a mutation that causes premature truncation of the DMD gene. In certain embodiments, the compositions, genome-editing systems and methods restore the reading frame of the DMD gene by removing an out-of-frame deletion or duplication mutation. In certain embodiments, in a subject with an in-frame duplication mutation, e.g., a duplication mutation that leads to a DMD phenotype due to post-transcriptional-translational mechanisms, the compositions, genome-editing systems and methods described herein remove a region of the DMD gene containing a duplication mutation and can lead to production of a mini-dystrophin or a dystrophin.

[0360] A mini-dystrophin is a dystrophin protein missing some internal segment of the protein. A truncated dystrophin protein is a dystrophin protein missing some length of the 3′ end of the protein. For example, in a subject with the deletion mutation del45-50, the subject produces a truncated dystrophin that is truncated in the coding region of exon 51. The truncated dystrophin protein contains the amino acids encoded by exons 1-44 plus a segment of exon 51 that is 5′ of the premature termination codon (PTC). In certain embodiments, a mini-dystrophin is produced in such a subject. For example, in a subject with del45-50 mutation, exonic deletion of exon 51 with intronic cleavage can result in a corrected mini-dystrophin transcript containing the amino acids encoded by exons 1-44 and 52-79. In certain embodiments, in a subject with a deletion mutation that involves exons X-50, e.g., in a subject with a del45-50 mutation, a del47-50 mutation, a del48-50 mutation, a del49-50 mutation, a del50 mutation, exonic deletion of exon 51 with intronic cleavage can result in a corrected mini-dystrophin transcript containing the amino acids encoded by exons 1-(X−1) and 52-79, e.g., in a subject with a del45-50 mutation, the corrected mini-dystrophin will include exons 1-44 and 52-79, e.g., in a subject with a del47-50 mutation, the corrected mini-dystrophin will include exons 1-46 and 52-79, e.g., in a subject with a del48-50 mutation, the corrected mini-dystrophin will include exons 1-47 and 52-79, e.g., in a subject with a del49-50 mutation, the corrected mini-dystrophin will include exons 1-48 and 52-79, e.g., in a subject with a del50 mutation the corrected mini-dystrophin will include exons 1-49 and 52-79. In certain embodiments, in a subject with a deletion mutation that involves exons 52-Y, e.g., in a subject with a del52 mutation, a del52-63 mutation, exonic deletion of exon 51 with intronic cleavage can result in a corrected mini-dystrophin transcript containing the amino acids encoded by exons 1-50 and (Y+1)-79, e.g., in a subject with a del52 mutation, the corrected mini-dystrophin will include exons 1-50 and 53-79, e.g., in a subject with a del52-63 mutation, the corrected mini-dystrophin will include exons 1-50 and 64-79.

[0361] In certain embodiments, the compositions, genome-editing systems and methods produce a functional or partially functional dystrophin protein, e.g., restore reading frame in a subject with an out-of-frame deletion or duplication mutation, and produce or generate an intact dystrophin or a mini-dystrophin. In certain embodiments, the compositions, genome-editing systems and methods restore or improve the dystrophin RNA profile in a subject with an in-frame deletion or duplication mutation, and produce or generate an intact dystrophin or a mini-dystrophin. In certain embodiments, the compositions, genome-editing systems and methods produce or generate a mini-dystrophin in a subject with a point or indel mutation.

[0362] In certain embodiments, the mini-dystrophin lacks exons X through Y, in a subject with delPQ, or lacking exon X in a subject with a point or indel mutation in exon X. In certain embodiments, this mini-dystrophin is more functional than a truncated dystrophin, e.g., that commonly found in a DMD patient. In certain embodiments, this mini-dystrophin is associated with a milder phenotype, e.g., that of BMD. In certain embodiments, the compositions, genome-editing systems and methods described herein can ameliorate the phenotype of subjects with DMD who have a mutation described herein, e.g., a deletion, missense nonsense, indel or duplication mutation. In certain embodiments, the subject is converted to a BMD phenotype or, to a phenotype that is milder than BMD, or to having no symptoms

[0363] Exemplary targeting approaches are described as follows.

[0364] 2.1 Excision of Exons 45-55 and with Intronic Cleavage Events

[0365] In certain embodiments, excision of exons 45-55 with intronic cleavage is expected to ameliorate the phenotype of up to 60% of DMD subjects (Aartsma-Rus et al., Human Mutation 2009; 30:293-299). For example, subjects found to have a mutation described as exon 44 deletion or del44 encounter a premature stop codon, due to an out-of-frame deletion, within exon 45 at position p.2113. In certain embodiments, excision of exons 45-55 will restore the reading frame of DMD in a subject with del44 mutation. Treated subjects will produce a mini-dystrophin missing only exons 44 through 55, rather than missing exons 44-79.

[0366] In certain embodiments, a subject with a deletion, e.g., del45-50, del47-50, del48-50, del49-50, del50, del52, del46-47, del46-48, del46-49, del46-51, del46-53, del46-55, del45, del45-54, del45-52, del46-52, del47-52, del48-52, del49-52, del50-52, del52, del47-54, del47-56, del51, del51-53, del51-55, or del53-55, can be treated with excision of exons 45 through exon 55. In certain embodiments, a subject with a duplication mutation, e.g., dup45, dup49-50, dup44-49, dup45-55, dup46-55, or dup53-54, can be treated with excision of exons 45 through exon 55. In certain embodiments, a subject with a point mutation, e.g., point mutation in exon 45, 46, 47, 48, 49, 50, 51, 52, 53, 54, or 55, can be treated with excision of exons 45 through exon 55. In certain embodiments, a subject with an indel mutation, e.g., indel mutation in exon 45 46, 47, 48, 49, 50, 51, 52, 53, 54, or 55, can be treated with excision of exons 45 through exon 55. In certain embodiments, a subject with a deletion mutation, e.g., any deletion mutation del(P-Q) such that P=1-54 and Q=44-55 and such that the deletion mutation puts DMD out of frame, can be treated with excision of exons 45 through exon 55. In certain embodiments, a subject with a duplication mutation, e.g., any duplication mutation dup(P-Q) such that P=44-55 and Q=45-55 and such that the duplication mutation puts DMD out of frame would restore DMD reading frame, can be treated with excision of exons 45 through exon 55. The subjects would be expected to have an improvement in their disease severity by the approaches described herein.

[0367] In certain embodiments, two presently disclosed gRNA molecules are used to delete exons 45-55 of the DMD gene (e.g., human DMD gene). In certain embodiments, the two gRNA molecules are selected from the group consisting of:

[0368] (a) a first gRNA molecule comprising a targeting domain that comprises a nucleotide sequence set forth in SEQ ID NO: 692253, and a second gRNA molecule comprising a targeting domain that comprises a nucleotide sequence set forth in SEQ ID NO: 692270, SEQ ID NO: 692271, or SEQ ID NO: 692272;

[0369] (b) a first gRNA molecule comprising a targeting domain that comprises a nucleotide sequence set forth in SEQ ID NO: 692254, and a second gRNA molecule comprising a targeting domain that comprises a nucleotide sequence set forth in SEQ ID NO: 692270, SEQ ID NO: 692271, or SEQ ID NO: 692272; and

[0370] (c) a first gRNA molecule comprising a targeting domain that comprises a nucleotide sequence set forth in SEQ ID NO: 692256, and a second gRNA molecule comprising a targeting domain that comprises a nucleotide sequence set forth in SEQ ID NO: 692270, SEQ ID NO: 692271, or SEQ ID NO: 692272.

[0371] 2.2 Excision of Exon 45 with Intronic Cleavage Events

[0372] In certain embodiments, excision of exon 45 with intronic cleavage is expected to ameliorate the phenotype of up to 11% of DMD subjects and up to 13% of DMD subjects with deletion mutations (Flanigan et al., Human Mutation 2009; 30:1657-1666. Aartsma-Rus et al., Human Mutation 2009; 30:293-299. DMD Mutation Database. Bladen et al., Human Mutation 2015; 36(2)). In certain embodiments, subjects found to have a mutation at exon 44, e.g., a deletion of exon 44, e.g. del44, encounter a premature stop codon, due to an out-of-frame deletion, within exon 45 at position p.2113.

[0373] In certain embodiments, a subject with a deletion mutation, e.g., del12-44, del18-44, del46-47, del46-48, del46-49, del46-51, del46-53, del46-55, can be treated with excision of exon 45 with intronic cleavage. In certain embodiments, excision of exon 45 causes the production of a min-dystrophin transcript without exon 45. In certain embodiments, a subject with a deletion mutation that would have the DMD reading frame restored by excision of exon 45 can be treated with excision of exon 45. In certain embodiments, a subject with a duplication mutation that would have the DMD reading frame restored by excision of exon 45 can be treated with excision of exon 45. In certain embodiments, a subject with a point mutation in exon 45 can be treated with cas9-mediated excision of exon 45. In certain embodiments, a subject with an indel mutation in exon 45 can be treated with excision of exon 45. The subjects would be expected to have an improvement in their disease severity by the approaches described herein.

[0374] 2.3 Excision of Exon 51 with Intronic Cleavage Events

[0375] In certain embodiments, Cas9-mediated excision of exon 51 with intronic cleavage ameliorates the phenotype of up to 17% of DMD subjects, and up to 21% of DMD subjects with deletion mutations (Flanigan et al., Human Mutation 2009; 30:1657-1666. Aartsma-Rus et al., Human Mutation 2009; 30:293-299. Bladen et al., Human Mutation 2015; 36(2)).

[0376] In certain embodiments, a subject with a deletion mutation, del45-50, del47-50, del48-50, del49-50, del50, del52, or del 52-63, is treated with excision of exon 51 of the DMD gene (e.g., human DMD gene). In certain embodiments, excision of exon 51 causes the production of a min-dystrophin transcript without exon 51. In certain embodiments, exon 51 excision causes the production of a mini-dystrophin, e.g., in a subject with a del45-50 mutation, the corrected mini-dystrophin will include exons 1-44 and 52-79, e.g., in a subject with a del47-50 mutation, the corrected mini-dystrophin will include exons 1-46 and 52-79, e.g., in a subject with a del48-50 mutation, the corrected mini-dystrophin will include exons 1-47 and 52-79, e.g., in a subject with a del49-50 mutation, the corrected mini-dystrophin will include exons 1-48 and 52-79, e.g., in a subject with a del50 mutation the corrected mini-dystrophin will include exons 1-49 and 52-79, e.g., in a subject with a del52 mutation, the corrected mini-dystrophin will include exons 1-50 and 53-79, e.g., in a subject with a del52-63 mutation, the corrected mini-dystrophin will include exons 1-50 and 64-79.

[0377] In certain embodiments, a subject with a deletion mutation that would have the DMD reading frame restored by excision of exon 51 can be treated with excision of exon 51. In certain embodiments, a subject with a duplication mutation that would have the DMD reading frame restored by excision of exon 51 can be treated with excision of exon 51. In certain embodiments, a subject with an indel mutation in exon 51 can be treated with excision of exon 51. The subjects can have an improvement in their disease severity by the approaches described herein.

[0378] In certain embodiments, two presently disclosed gRNA molecules (i.e., a first gRNA molecule and a second gRNA molecule) are used to delete exon 51 of the DMD gene (e.g., human DMD gene) (referred to as “exon 51 skipping” or “excision of exon 51”). In certain embodiments, the first gRNA molecule and the second gRNA molecule are selected from the group consisting of:

[0379] (a) a first gRNA molecule comprising a targeting domain that comprises a nucleotide sequence set forth in SEQ ID NO: 1977, and a second gRNA molecule comprising a targeting domain that comprises a nucleotide sequence set forth in SEQ ID NO: 2048;

[0380] (b) a first gRNA molecule comprising a targeting domain that comprises a nucleotide sequence set forth in SEQ ID NO: 18458, and a second gRNA molecule comprising a targeting domain that comprises a nucleotide sequence set forth in SEQ ID NO: 2048;

[0381] (c) a first gRNA molecule comprising a targeting domain that comprises a nucleotide sequence set forth in SEQ ID NO: 19199, and a second gRNA molecule comprising a targeting domain that comprises a nucleotide sequence set forth in SEQ ID NO: 18720;

[0382] (d) a first gRNA molecule comprising a targeting domain that comprises a nucleotide sequence set forth in SEQ ID NO: 4709, and a second gRNA molecule comprising a targeting domain that comprises a nucleotide sequence set forth in SEQ ID NO: 18720;

[0383] (e) a first gRNA molecule comprising a targeting domain that comprises a nucleotide sequence set forth in SEQ ID NO: 481, and a second gRNA molecule comprising a targeting domain that comprises a nucleotide sequence set forth in SEQ ID NO: 2048;

[0384] (f) a first gRNA molecule comprising a targeting domain that comprises a nucleotide sequence set forth in SEQ ID NO: 4709, and a second gRNA molecule comprising a targeting domain that comprises a nucleotide sequence set forth in SEQ ID NO: 22349;

[0385] (g) a first gRNA molecule comprising a targeting domain that comprises a nucleotide sequence set forth in SEQ ID NO: 5869, and a second gRNA molecule comprising a targeting domain that comprises a nucleotide sequence set forth in SEQ ID NO: 3536;

[0386] (h) a first gRNA molecule comprising a targeting domain that comprises a nucleotide sequence set forth in SEQ ID NO: 18752, and a second gRNA molecule comprising a targeting domain that comprises a nucleotide sequence set forth in SEQ ID NO: 17253;

[0387] (i) a first gRNA molecule comprising a targeting domain that comprises a nucleotide sequence set forth in SEQ ID NO: 20145, and a second gRNA molecule comprising a targeting domain that comprises a nucleotide sequence set forth in SEQ ID NO: 3536;

[0388] (j) a first gRNA molecule comprising a targeting domain that comprises a nucleotide sequence set forth in SEQ ID NO: 19187, and a second gRNA molecule comprising a targeting domain that comprises a nucleotide sequence set forth in SEQ ID NO: 7252;

[0389] (k) a first gRNA molecule comprising a targeting domain that comprises a nucleotide sequence set forth in SEQ ID NO: 18752, and a second gRNA molecule comprising a targeting domain that comprises a nucleotide sequence set forth in SEQ ID NO: 3536; and

[0390] (l) a first gRNA molecule comprising a targeting domain that comprises a nucleotide sequence set forth in SEQ ID NO: 19187; and a second gRNA molecule comprising a targeting domain that comprises a nucleotide sequence set forth in SEQ ID NO: 7419.

[0391] In certain embodiments, the two gRNA molecules are selected from the gRNA pairs listed in Table 15, i.e., those selected from the group consisting of:

[0392] (a) a first gRNA molecule comprising a targeting domain that comprises a nucleotide sequence set forth in SEQ ID NO: 2048, and a second gRNA molecule comprising a targeting domain that comprises a nucleotide sequence selected from SEQ ID NOs: 1977, 18458, 481, 9997, 1499, 2121, 8709, 21570, 16467, and 23958;

[0393] (b) a first gRNA molecule comprising a targeting domain that comprises a nucleotide sequence set forth in SEQ ID NO: 19199, and a second gRNA molecule comprising a targeting domain that comprises a nucleotide sequence set forth in SEQ ID NO: 18720;

[0394] (c) a first gRNA molecule comprising a targeting domain that comprises a nucleotide sequence set forth in SEQ ID NO: 18720, SEQ ID NO: 22349 or SEQ ID NO: 10092, and a second gRNA molecule comprising a targeting domain that comprises a nucleotide sequence set forth in SEQ ID NO: 4709 or SEQ ID NO: 20303;

[0395] (d) a first gRNA molecule comprising a targeting domain that comprises a nucleotide sequence set forth in SEQ ID NO: 3536, and a second gRNA molecule comprising a targeting domain that comprises a nucleotide sequence selected from SEQ ID NOs: 5869, 20145, 18752, 20870, 9530, 18062, 4134, and 23958;

[0396] (e) a first gRNA molecule comprising a targeting domain that comprises a nucleotide sequence set forth in SEQ ID NO: 18458, and a second gRNA molecule comprising a targeting domain that comprises a nucleotide sequence set forth in SEQ ID NO: 9765;

[0397] (f) a first gRNA molecule comprising a targeting domain that comprises a nucleotide sequence set forth in SEQ ID NO: 18752, and a second gRNA molecule comprising a targeting domain that comprises a nucleotide sequence selected from SEQ ID NOs: 17253, 14607, 16967, 7419, 1744, and 8569;

[0398] (g) a first gRNA molecule comprising a targeting domain that comprises a nucleotide sequence set forth in SEQ ID NO: 19187, and a second gRNA molecule comprising a targeting domain that comprises a nucleotide sequence selected from SEQ ID NOs: 14695, 7252, 17253, 7419, 1744, 8569, and 9358;

[0399] (h) a first gRNA molecule comprising a targeting domain that comprises a nucleotide sequence set forth in SEQ ID NO: 20145, and a second gRNA molecule comprising a targeting domain that comprises a nucleotide sequence selected from SEQ ID NOs: 5614, 20764, 14607, 8569, and 7252;

[0400] (i) a first gRNA molecule comprising a targeting domain that comprises a nucleotide sequence set forth in SEQ ID NO: 1499, and a second gRNA molecule comprising a targeting domain that comprises a nucleotide sequence set forth in SEQ ID NO: 14296;

[0401] (i) a first gRNA molecule comprising a targeting domain that comprises a nucleotide sequence set forth in SEQ ID NO: 4134, and a second gRNA molecule comprising a targeting domain that comprises a nucleotide sequence selected from SEQ ID NOs: 20924, 4072, and 8569;

[0402] (k) a first gRNA molecule comprising a targeting domain that comprises a nucleotide sequence set forth in SEQ ID NO: 6209, and a second gRNA molecule comprising a targeting domain that comprises a nucleotide sequence selected from SEQ ID NOs: 14035, 13527, 21873, 14298, 7419, and 20924;

[0403] (l) a first gRNA molecule comprising a targeting domain that comprises a nucleotide sequence set forth in SEQ ID NO: 9346, and a second gRNA molecule comprising a targeting domain that comprises a nucleotide sequence selected from SEQ ID NOs: 7419, 20764, and 2769;

[0404] (m) a first gRNA molecule comprising a targeting domain that comprises a nucleotide sequence set forth in SEQ ID NO: 7649, and a second gRNA molecule comprising a targeting domain that comprises a nucleotide sequence selected from SEQ ID NOs: 16967, 1484, 20924, 4072, and 9496;

[0405] (n) a first gRNA molecule comprising a targeting domain that comprises a nucleotide sequence set forth in SEQ ID NO: 5869, and a second gRNA molecule comprising a targeting domain that comprises a nucleotide sequence selected from SEQ ID NOs: 8569, 13527, 1484, 5614, 4072, and 14695;

[0406] (o) a first gRNA molecule comprising a targeting domain that comprises a nucleotide sequence set forth in SEQ ID NO: 4165, and a second gRNA molecule comprising a targeting domain that comprises a nucleotide sequence selected from SEQ ID NOs: 7252, 1484, and 9279;

[0407] (p) a first gRNA molecule comprising a targeting domain that comprises a nucleotide sequence set forth in SEQ ID NO: 15622, and a second gRNA molecule comprising a targeting domain that comprises a nucleotide sequence set forth in SEQ ID NO: 17253;

[0408] (q) a first gRNA molecule comprising a targeting domain that comprises a nucleotide sequence set forth in SEQ ID NO: 18062, and a second gRNA molecule comprising a targeting domain that comprises a nucleotide sequence set forth in SEQ ID NO: 2769 or SEQ ID NO: 14035;

[0409] (r) a first gRNA molecule comprising a targeting domain that comprises a nucleotide sequence set forth in SEQ ID NO: 21131, and a second gRNA molecule comprising a targeting domain that comprises a nucleotide sequence set forth in SEQ ID NO: 13527 or SEQ ID NO: 13285;

[0410] (s) a first gRNA molecule comprising a targeting domain that comprises a nucleotide sequence set forth in SEQ ID NO: 20870, and a second gRNA molecule comprising a targeting domain that comprises a nucleotide sequence set forth in SEQ ID NO: 16967 or SEQ ID NO: 7252;

[0411] (t) a first gRNA molecule comprising a targeting domain that comprises a nucleotide sequence set forth in SEQ ID NO: 16235, and a second gRNA molecule comprising a targeting domain that comprises a nucleotide sequence set forth in SEQ ID NO: 10140;

[0412] (u) a first gRNA molecule comprising a targeting domain that comprises a nucleotide sequence set forth in SEQ ID NO: 15271, and a second gRNA molecule comprising a targeting domain that comprises a nucleotide sequence set forth in SEQ ID NO: 13518;

[0413] (v) a first gRNA molecule comprising a targeting domain that comprises a nucleotide sequence set forth in SEQ ID NO: 11675, and a second gRNA molecule comprising a targeting domain that comprises a nucleotide sequence selected from SEQ ID NOs: 2769, 1484, and 4072; and

[0414] (w) a first gRNA molecule comprising a targeting domain that comprises a nucleotide sequence set forth in SEQ ID NO: 23958, and a second gRNA molecule comprising a targeting domain that comprises a nucleotide sequence set forth in SEQ ID NO: 14035 or SEQ ID NO: 9496.

[0415] In certain embodiments, the two gRNA molecules are selected from the group consisting of:

[0416] (a) a first gRNA molecule comprising a targeting domain that comprises a nucleotide sequence set forth in SEQ ID NO: 692257, and a second gRNA molecule comprising a targeting domain that comprises a nucleotide sequence set forth in SEQ ID NO: 692261, SEQ ID NO: 692262, SEQ ID NO: 692263, or SEQ ID NO: 692264;

[0417] (b) a first gRNA molecule comprising a targeting domain that comprises a nucleotide sequence set forth in SEQ ID NO: 692258, and a second gRNA molecule comprising a targeting domain that comprises a nucleotide sequence set forth in SEQ ID NO: 692261, SEQ ID NO: 692262, SEQ ID NO: 692263, or SEQ ID NO: 692264; and

[0418] (c) a first gRNA molecule comprising a targeting domain that comprises a nucleotide sequence set forth in SEQ ID NO: 692260, and a second gRNA molecule comprising a targeting domain that comprises a nucleotide sequence set forth in SEQ ID NO: 692261, SEQ ID NO: 692262, SEQ ID NO: 692263, or SEQ ID NO: 692264.

[0419] In certain embodiments, a S. pyogenes Cas 9 molecule mediates the exon 51 skipping or excision of exon 51. In certain embodiments, a S. aureus Cas 9 molecule mediates the exon 51 skipping or excision of exon 51.

[0420] 2.4 Excision of Exon 53 with Intronic Cleavage Events

[0421] In certain embodiments, Cas9 mediated excision of exon 53 with intronic cleavage is expected to ameliorate the phenotype of up to 10% of DMD subjects, and up to 15% of DMD subjects with deletion mutations (Flanigan et al., Human Mutation 2009; 30:1657-1666. Bladen et al., Human Mutation 2015; 36(2)).

[0422] In certain embodiments, a subject with a deletion mutation, e.g., del10-52, del45-52, del46-52, del47-52, del48-52, del49-52, del50-52, or del52, can be treated with excision of exon 53 with intronic cleavage. In certain embodiments, excision of exon 53 causes the production of a min-dystrophin transcript without exon 53. In certain embodiments, exon 53 excision causes the production of a mini-dystrophin, e.g., in a subject with a del10-52, del45-52, del46-52, del47-52, del48-52, del49-52, del50-52, or del52 mutation, the corrected mini-dystrophin will include, respectively, exons 1-9 and 54-79, exons 1-44 and 54-79, exons 1-45 and 54-79, exons 1-46 and 54-79, exons 1-47 and 54-79, exons 1-48 and 54-79, exons 1-49 and 54-79, exons 1-51 and 54-79. In certain embodiments, any subject with a deletion mutation that would have the DMD reading frame restored by excision of exon 53 can be treated with excision of exon 53. In certain embodiments, a subject with a duplication mutation that would have the DMD reading frame restored by excision of exon 53 can be treated with excision of exon 53. In certain embodiments, a subject with a point mutation in exon 53 can be treated with excision of exon 53. In certain embodiments, a subject an indel mutation in exon 53 can be treated with excision of exon 53. The subjects would be expected to have an improvement in their disease severity by the approach described herein.

[0423] 2.5 Excision of Exon 44 with Intronic Cleavage Events

[0424] In certain embodiments, excision of exon 44 with intronic cleavage is expected to ameliorate the phenotype of up to 7.8% of DMD subjects (Flanigan et al., Human Mutation 2009; 30:1657-1666. Aartsma-Rus et al., Human Mutation 2009; 30:293-299. Bladen et al., Human Mutation 2015; 36(2)).

[0425] In certain embodiments, a subject with a deletion mutation can be treated with excision of exon 44 with intronic cleavage, e.g., del14-43, del19-43, del30-43, del35-43, del36-43, del40-43, del42-43, del45, or del45-54. In certain embodiments, excision of exon 44 causes the production of a min-dystrophin transcript without exon 44. In certain embodiments, exon 44 excision causes the production of a mini-dystrophin, e.g., in a subject with a del14-43, del19-43, del30-43, del35-43, del36-43, del40-43, del42-43, del45, or del45-54 mutation, the corrected mini-dystrophin will include, respectively, exons 1-13 and 45-79, exons 1-18 and 45-79, exons 1-29 and 45-79, exons 1-34 and 45-79, exons 1-35 and 45-79, exons 1-39 and 45-79, exons 1-41 and 45-79, exons 1-43 and 46-79, exons 1-43 and 55-79. In certain embodiments, any subject with a deletion mutation that would have the DMD reading frame restored by excision of exon 44 can be treated with excision of exon 44. In certain embodiments, a subject with a duplication mutation that would have the DMD reading frame restored by excision of exon 44 can be treated with excision of exon 44. In certain embodiments, a subject with a point mutation in exon 44 can be treated with excision of exon 44. In certain embodiments, a subject with an indel mutation in exon 44 can be treated with excision of exon 44. The subjects would be expected to have an improvement in their disease severity by the approach described herein.

[0426] 2.6 Excision of Exon 46 with Intronic Cleavage Events

[0427] In certain embodiments, excision of exon 46 with intronic cleavage is expected to ameliorate the phenotype of up to 5.6% of DMD subjects (Flanigan et al., Human Mutation 2009; 30:1657-1666. Aartsma-Rus et al., Human Mutation 2009; 30:293-299. Bladen et al., Human Mutation 2015; 36(2)).

[0428] In certain embodiments, a subject with a deletion mutation, e.g., del21-45, del45, del47-54, or del47-56, can be treated with excision of exon 46 with intronic cleavage. In certain embodiments, excision of exon 46 causes the production of a min-dystrophin transcript without exon 46. In certain embodiments, exon 46 excision causes the production of a mini-dystrophin, e.g., in a subject with a del21-45, del45, del47-54, or del47-56 mutation, the corrected mini-dystrophin will include, respectively, exons 1-20 and 47-79, exons 1-44 and 47-79, exons 1-45 and 55-79, exons 1-45 and 57-79. In certain embodiments, a subject with a deletion mutation that would have the DMD reading frame restored by excision of exon 46 can be treated with excision of exon 46. In certain embodiments, a subject with a duplication mutation that would have the DMD reading frame restored by excision of exon 46 can be treated with excision of exon 46. In certain embodiments, a subject with a point mutation in exon 46 can be treated with excision of exon 46. In certain embodiments, a subject an indel mutation in exon 46 can be treated with excision of exon 46. The subjects would be expected to have an improvement in their disease severity by the approach described herein.

[0429] 2.7 Excision of Exon 50 with Intronic Cleavage Events

[0430] In certain embodiments, excision of exon 50 with intronic cleavage is expected to ameliorate the phenotype of up to 5.2% of DMD subjects (Flanigan et al., Human Mutation 2009; 30:1657-1666. Aartsma-Rus et al., Human Mutation 2009; 30:293-299. Bladen et al., Human Mutation 2015; 36(2)).

[0431] In certain embodiments, a subject with a deletion mutation, e.g., del51, del51-53, or del51-55, can be treated with excision of exon 50. In certain embodiments, excision of exon 50 causes the production of a min-dystrophin transcript without exon 50. In certain embodiments, exon 50 excision causes the production of a mini-dystrophin, e.g., in a subject with a del51, del51-53, or del51-55 mutation, the corrected mini-dystrophin will include, respectively, exons 1-49 and 52-79, exons 1-49 and 54-79, exons 1-49 and 56-79. In certain embodiments, a subject with a deletion mutation that would have the DMD reading frame restored by excision of exon 50 can be treated with excision of exon 50. In certain embodiments, a subject with a duplication mutation that would have the DMD reading frame restored by excision of exon 50 can be treated with excision of exon 50. In certain embodiments, a subject with a point mutation in exon 50 can be treated with excision of exon 50. In certain embodiments, a subject with an indel mutation in exon 50 can be treated with excision of exon 50. The subjects would be expected to have an improvement in their disease severity by the approach described herein.

[0432] 2.8 Excision of Exon 52 with Intronic Cleavage Events

[0433] In certain embodiments, Cas9 mediated excision of exon 52 with intronic cleavage is expected to ameliorate the phenotype of up to 5% of DMD subjects (Flanigan et al., Human Mutation 2009; 30:1657-1666. Aartsma-Rus et al., Human Mutation 2009; 30:293-299. Bladen et al., Human Mutation 2015; 36(2)).

[0434] In certain embodiments, a subject with a deletion mutation, e.g., del53-55, can be treated with excision of exon 52. In certain embodiments, excision of exon 52 causes the production of a min-dystrophin transcript without exon 52. In certain embodiments, exon 52 excision causes the production of a mini-dystrophin, e.g., in a subject with a del53-55 mutation, the corrected mini-dystrophin will include exons 1-51 and 56-79. In certain embodiments, a subject with a deletion mutation that would have the DMD reading frame restored by excision of exon 52 can be treated with excision of exon 52. In certain embodiments, a subject with a duplication mutation, e.g., dup52, that would have the DMD reading frame restored by excision of exon 52 can be treated with excision of exon 52. In certain embodiments, a subject with a point mutation in exon 52 can be treated with excision of exon 52. In certain embodiments, a subject an indel mutation in exon 52 can be treated with excision of exon 52. The subjects would be expected to have an improvement in their disease severity by the approach described herein.

[0435] 2.9 Excision of Exon 55 with Intronic Cleavage Events

[0436] In certain embodiments, excision of exon 55 with intronic cleavage is expected to ameliorate the phenotype of up to 4% of DMD subjects (Flanigan et al., Human Mutation 2009; 30:1657-1666. Aartsma-Rus et al., Human Mutation 2009; 30:293-299. Bladen et al., Human Mutation 2015; 36(2))

[0437] In certain embodiments, a subject with a deletion mutation, e.g., del54, can be treated with excision of exon 55. In certain embodiments, excision of exon 55 causes the production of a min-dystrophin transcript without exon 55. In certain embodiments, exon 55 excision causes the production of a mini-dystrophin, e.g., in a subject with a del54 mutation, the corrected mini-dystrophin will include exons 1-53 and 56-79. In certain embodiments, a subject with a deletion mutation that would have the DMD reading frame restored by excision of exon 55 can be treated with excision of exon 55. In certain embodiments, a subject with a duplication mutation that would have the DMD reading frame restored by excision of exon 55 can be treated with excision of exon 55. In certain embodiments, a subject with a point mutation in exon 55 can be treated with excision of exon 55. In certain embodiments, a subject an indel mutation in exon 55 can be treated with excision of exon 55. The subjects would be expected to have an improvement in their disease severity by the approach described herein.

[0438] 2.10 Excision of Exon 8 with Intronic Cleavage Events

[0439] In certain embodiments, Cas9 mediated excision of exon 8 with intronic cleavage is expected to ameliorate the phenotype of up to 5.2% of DMD subjects (Flanigan et al., Human Mutation 2009; 30:1657-1666. Aartsma-Rus et al., Human Mutation 2009; 30:293-299. Bladen et al., Human Mutation 2015; 36(2))

[0440] In certain embodiments, a subject with a deletion mutation, e.g., del3-7, del4-7, del5-7, or del6-7, can be treated with excision of exon 8. In certain embodiments, excision of exon 8 causes the production of a min-dystrophin transcript without exon 8. In certain embodiments, exon 8 excision causes the production of a mini-dystrophin, e.g., in a subject with a del3-7, del4-7, del5-7, or del6-7 mutation, the corrected mini-dystrophin will include, respectively, exons 1-2 and 9-79, exons 1-3 and 9-79, exons 1-4 and 9-79, exons 1-5 and 9-79. In certain embodiments, a subject with a deletion mutation that would have the DMD reading frame restored by excision of exon 8 can be treated with excision of exon 8. In certain embodiments, a subject with a duplication mutation that would have the DMD reading frame restored by excision of exon 8 can be treated with excision of exon 8. In certain embodiments, a subject with a point mutation in exon 8 can be treated with excision of exon 8. In certain embodiments, a subject an indel mutation in exon 8 can be treated with excision of exon 8. The subjects would be expected to have an improvement in their disease severity by the approach described herein.

[0441] 2.11 Excision of Exons 69-70 with Intronic Cleavage Events

[0442] In certain embodiments, Cas9 mediated excision of exons 69-70 with intronic cleavage is expected to ameliorate the phenotype of up to 6% of DMD subjects with nonsense or in/del mutations (Based on frequency of exon 70 nonsense mutations from Duchenne Muscular Dystrophy database).

[0443] In certain embodiments, a subject with a deletion mutation, e.g., del71-75, can be treated with excision of exons 69-70. In certain embodiments, excision of exons 69-70 causes the production of a min-dystrophin transcript without exons 69-70. In certain embodiments, excision of exons 69-70 causes the production of a mini-dystrophin, e.g., in a subject with a del71-75 mutation, the corrected mini-dystrophin will include exons 1-68 and 76-79. In certain embodiments, a subject with a deletion mutation, that would have the DMD reading frame restored by excision of exons 69-70 can be treated with excision of exons 69-70. In certain embodiments, a subject with a duplication mutation that would have the DMD reading frame restored by excision of exons 69-70 can be treated with excision of exons 69-70. In certain embodiments, a subject with a point mutation in exon 69 or exon 70, e.g., nonsense imitation c.10171C>T, nonsense mutation c.10141C>T, or nonsense mutation c.10108C>T, can be treated with excision of exons 69-70 with intronic cleavage. In certain embodiments, a subject with an indel mutation, e.g., an indel mutation in exon 69 or 70, can be treated with excision of exon 8. The subjects would be expected to have an improvement in their disease severity by the approach described herein.

[0444] 2.12 Excision of Exons 1-6 with Intronic Cleavage Events

[0445] In certain embodiments, Cas9 mediated excision of exons 1-6 with intronic cleavage is expected to ameliorate the phenotype of approximately 9% of DMD subjects who have nonsense or in/del mutations (based on frequency of nonsense mutations in exons 1-6 from Duchenne Muscular Dystrophy database).

[0446] In certain embodiments, a subject with a deletion mutation that would have the DMD reading frame restored by excision of exons 1-6 can be treated with excision of exons 1-6. In certain embodiments, excision of exons 1-6 causes the production of a min-dystrophin transcript without exons 1-6. In certain embodiments, a subject with an in-frame duplication mutation in any of exons 1, 2, 3, 4, 5 and/or 6 can be treated with excision of exons 1-6. In certain embodiments, an in-frame duplication mutation in exons 1, 2, 3, 4, 5 and/or 6 can cause post-transcriptional-translational modifications leading to a DMD phenotype. In certain embodiments, a subject with an out-of-frame duplication mutation, e.g., dup1, dup2, dup3, dup3-4, or dup3-6, that would have the DMD reading frame restored by excision of exons 1-6, can be treated with excision of exons 1-6. In certain embodiments, a subject with an in-frame duplication mutation, e.g., dup1, dup2, dup3, dup3-4, or dup3-6, that would have an improved or restored dystrophin RNA profile by excision of exons 1-6, can be treated with excision of exons 1-6.

[0447] In certain embodiments, a subject with a point mutation in exon 1, 2, 3, 4, 5, or 6 can be treated with excision of exons 1-6. In certain embodiments, a subject with an indel mutation in exon 1, 2, 3, 4, 5, or 6 can be treated with excision of exons 1-6. In certain embodiments, a subject with a nonsense mutation, e.g., nonsense mutation c.9G>A, nonsense mutation c.355C>T, nonsense mutation c.440C>G, nonsense mutation c.429G>A, nonsense mutation c.433C>T, or nonsense mutation c.457C>T, can be treated with excision of exons 1-6. The subjects would be expected to have an improvement in their disease severity by the approach described herein.

[0448] 2.13 Excision of Exons 6-8 with Intronic Cleavage Events

[0449] In certain embodiments, Cas9 mediated excision of exons 6-8 with intronic cleavage is expected to ameliorate the phenotype of approximately 6% of DMD subjects who have nonsense or in/del mutations (based on frequency of nonsense mutations in exons 6-8 from Duchenne Muscular Dystrophy database).

[0450] In certain embodiments, a subject with a deletion mutation that would have the DMD reading frame restored by excision of exons 6-8 can be treated with excision of exons 6-8. In certain embodiments, excision of exons 6-8 causes the production of a min-dystrophin transcript without exons 6-8. In certain embodiments, a subject with a duplication mutation that would have the DMD reading frame restored by excision of exons 6-8 can be treated with excision of exons 6-8. In certain embodiments, a subject with a point mutation in exon 6, 7, or 8, can be treated with excision of exons 6-8. In certain embodiments, a subject with a nonsense mutation, e.g., nonsense mutation c.440C>G, nonsense mutation c.429G>A, nonsense mutation c.433C>T, nonsense mutation c.457C>T, nonsense mutation c.568C>T, nonsense mutation c.565C>T, nonsense mutation c.583C>T, nonsense mutation c.583C>T, nonsense mutation c.799C>T, nonsense mutation c.709C>T, nonsense mutation c.745C>T, or nonsense mutation c.903C>G, can be treated with excision of exons 6-8. In certain embodiments, a subject with an indel mutation, e.g., an indel mutation in exon 6, 7, or 8, can be treated with excision of exons 6-8. Prior to treatment, these subjects produce a truncated dystrophin containing only exons 1-5, 1-6, 1-7, 1-8 or 1-9. After treatment, subjects with a point or indel mutation in exons 6-8 will produce a mini-dystrophin lacking exons 6-8 but containing exons 1-5 and 9-79. The subjects would be expected to have an improvement in their disease severity by the approach described herein.

[0451] 2.14 Excision of Exon 14 with Intronic Cleavage Events

[0452] In certain embodiments, excision of exon 14 with intronic cleavage is expected to ameliorate the phenotype of approximately 3% of DMD subjects who have point or indel mutations.

[0453] In certain embodiments, a subject with a deletion mutation, that would have the DMD reading frame restored by excision of exon 14, can be treated with excision of exon 14. In certain embodiments, excision of exon 14 causes the production of a min-dystrophin transcript without exon 14. In certain embodiments, a subject with a duplication mutation, that would have the DMD reading frame restored by excision of exon 14, can be treated with excision of exon 14. In certain embodiments, a subject with a point mutation in exon 14, e.g., nonsense mutation c.1663C>T, nonsense mutation c.1619G>A, nonsense mutation c.1702C>T, or nonsense mutation c.1702C>T, can be treated with excision of exon 14. In certain embodiments, a subject with an indel mutation in exon 14 can be treated with excision of exon 14. Prior to treatment, subjects with an indel or point/mutation in the DMD gene produce a truncated DMD transcript containing exons 1-14, with only some segment of exon 14. In any subjects with these mutations, excision of exon 14 will restore the reading frame of DMD. After treatment, subjects with a point mutation or indel mutation in exon 14 will produce a mini-dystrophin lacking exon 14 but containing exons 1-13 and 15-79. The subjects would be expected to have an improvement in their disease severity by the approach described herein.

[0454] 2.15 Excision of Exons 20-21 with Intronic Cleavage Events

[0455] In certain embodiments, excision of exons 20-21 is expected to ameliorate the phenotype of approximately 5% of DMD subjects who have nonsense or indel mutations.

[0456] In certain embodiments, a subject with a deletion mutation that would have the DMD reading frame restored by excision of exons 20-21 can be treated with excision of exons 20-21. In certain embodiments, excision of exons 20-21 causes the production of a min-dystrophin transcript without exons 20-21. In certain embodiments, a subject with a duplication mutation that would have the DMD reading frame restored by excision of exons 20-21 can be treated with excision of exons 20-21. In certain embodiments, a subject with a point mutation in exon 20 or exon 21 can be treated with excision of exons 20-21. In certain embodiments, a subject with nonsense mutation c.2435G>A, nonsense mutation c.2521C>T, nonsense mutation c.2485C>T, nonsense mutation c.2419C>T, nonsense mutation c.2479G>T, nonsense mutation c.2404A>T, nonsense mutation c.2416G>T, nonsense mutation c.2440G>T, nonsense mutation c.2611A>T, nonsense mutation c.2582C>G, nonsense mutation c.2758C>T, or nonsense mutation c.2788A>T, can be treated with excision of exons 20-21. In certain embodiments, a subject with an indel mutation in exon 20 or exon 21, can be treated with excision of exons 20-21. Prior to treatment, subjects with an indel or point mutation in exon 20 or 21 of the DMD gene produce a truncated dystrophin containing exons 1-20 or 1-21, respectively, with only some segment of exon 20 or exon 21, respectively. After treatment, subjects with a point or indel mutation in exons 20-21 will produce a mini-dystrophin lacking exons 20-21 but containing exons 1-19 and 22-79. In any subjects with these mutations, excision of exons 20-21 will restore the reading frame of DMD. The subjects would be expected to have an improvement in their disease severity by the approach described herein.

[0457] 2.16 Intra-Exonic Targeting Exon 45

[0458] In certain embodiments, modification of exon 45, e.g., 5′ of p.2113 in exon 45, e.g., by NHEJ, to restore reading frame will ameliorate the phenotype of up to 11% of DMD subjects and up to 13% of DMD subjects with deletion mutations (Flanigan et al., Human Mutation 2009; 30:1657-1666. Aartsma-Rus et al., Human Mutation 2009; 30:293-299. DMD Mutation Database. Bladen et al., Human Mutation 2015; 36(2)).

[0459] In certain embodiments, subjects found to have a mutation at exon 44, e.g., a deletion of exon 44, e.g. del44, encounter a premature stop codon, due to an out-of-frame deletion, within exon 45 at position p.2113. In certain embodiments, modification of exon 45, e.g., by NHEJ, will restore the reading frame of DMD. Subjects will produce a mini-dystrophin missing only exons 44 and 45, rather than missing exons 44-79. In certain embodiments, a subject with a deletion mutation, e.g., del12-44, del18-44, del46-47, del46-48, del46-49, del46-51, del46-53, or del46-55, can be treated with modification of exon 45, e.g., 5′ of p.2113. In certain embodiments, a subject with any mutation, e.g., a duplication mutation that would have the DMD reading frame restored by modification of exon 45 can be treated with modification of exon 45, e.g., 5′ of p.2113. In certain embodiments, a subject with a deletion mutation, e.g., del12-44, del18-44, del46-47, del46-48, del46-49, del46-51, del46-53, or del46-55, can be treated with NHEJ mediated modification of exon 45, e.g., 5′ of p.2113 and 3′ of p.2509. In certain embodiments, a subject with a point mutation, e.g. a point mutation in exon 45, can be treated with modification of exon 45, e.g., 5′ of mutation. In certain embodiments, a subject with an indel mutation, e.g. an indel mutation in exon 45, can be treated with modification of exon 45, e.g, 5′ of mutation. The subjects would be expected to have an improvement in their disease severity by the approach described herein.

[0460] 2.17 Intra-Exonic Targeting Exon 51

[0461] In certain embodiments, modification of exon 51, e.g., by NHEJ, to restore reading frame will ameliorate the phenotype of up to 17% of DMD subjects, and up to 21% of DMD subjects with deletion mutations. (Flanigan et al., Human Mutation 2009; 30:1657-1666. Aartsma-Rus et al., Human Mutation 2009; 30:293-299. Bladen et al., Human Mutation 2015; 36(2).)

[0462] In certain embodiments, a subject with a deletion mutation, e.g., del45-50, del47-50, del48-50, del49-50, del50, del52, or del 52-63, can be treated with modification of exon 51, e.g., 5′ of p.2445. In certain embodiments, modification of exon 51 will cause the production of a mini-dystrophin missing only exon 51, exons 45-51, exons 46-51, exons 47-51, exons 48-51, exons 49-51, exons 50-51, exons 51-52, or exons 51-63, rather than missing exons 45-79, exons 46-51, exons 47-79, exons 48-79, exons 49-79, exons 50-79, exons 51-79, orexons 52-79, respectively. In certain embodiments, a subject with any mutation, e.g., a duplication mutation that would have the DMD reading frame restored by modification of exon 51 can be treated with modification of exon 51, e.g., 5′ of p.2445. In certain embodiments, a subject with a point mutation, e.g. a point mutation in exon 51, can be treated with modification of exon 51, e.g., 5′ of point mutation. In certain embodiments, a subject with an indel mutation, e.g. an indel mutation in exon 51, can be treated with modification of exon 51, e.g., 5′ of indel mutation. The subjects would be expected to have an improvement in their disease severity by the approach described herein.

[0463] 2.18 Intra-Exonic Targeting Exon 53

[0464] In certain embodiments, modification exon 53, e.g. 5′ of premature termination codon in exon 53, e.g. 5′ of p.2554 of DMD, e.g., by NHEJ, to restore reading frame will ameliorate the phenotype of up to 10% of DMD subjects, and up to 15% of DMD subjects with deletion mutations. (Flanigan et al., Human Mutation 2009; 30:1657-1666. Bladen et al., Human Mutation 2015; 36(2)).

[0465] In certain embodiments, a subject with a deletion mutation, e.g., del10-52, del45-52, del46-52, del47-52, del48-52, del49-52, del50-52, or del52, can be treated with modification of exon 53, e.g. 5′ of p.2554. In certain embodiments, a subject with any mutation, e.g., a duplication mutation that would have the DMD reading frame restored by modification of exon 53 can be treated with modification of exon 53, e.g. 5′ of p.2554. In certain embodiments, a subject with a point mutation, e.g. a point mutation in exon 53 can be treated with modification of exon 53, e.g., 5′ of point mutation. In certain embodiments, a subject with an indel mutation, e.g. an indel mutation in exon 53, can be treated with modification of exon 53, e.g., 5′ of indel mutation. The subjects would be expected to have an improvement in their disease severity by the approach described herein.

[0466] 2.19 Intra-Exonic Targeting Exon 44

[0467] In certain embodiments, modification of exon 44, e.g. 5′ of premature termination codon in exon 44, e.g. 5′ of p.2099 of DMD, e.g., by NHEJ, to restore reading frame will ameliorate the phenotype of up to 7.8% of DMD subjects. (Flanigan et al., Human Mutation 2009; 30:1657-1666. Aartsma-Rus et al., Human Mutation 2009; 30:293-299. Bladen et al., Human Mutation 2015; 36(2).)

[0468] In certain embodiments, any subject with a deletion mutation, e.g., del14-43, del19-43, del30-43, del35-43, del36-43, del40-43, del42-43, del45, or del45-54, can be treated with modification of exon 44, e.g., 5′ of p.2099. In certain embodiments, any subject with any mutation, e.g., a duplication mutation that would have the DMD reading frame restored by modification of exon 44, can be treated with modification of exon 44, e.g., 5′ of the premature termination codon. In certain embodiments, a subject with a point mutation, e.g. a point mutation in exon 44 can be treated with modification of exon 44, e.g., 5′ of point mutation. In certain embodiments, a subject with an indel mutation, e.g. an indel mutation in exon 44, can be treated with modification of exon 44, e.g., 5′ of the indel mutation, e.g., 5′ of indel mutation. The subjects would be expected to have an improvement in their disease severity by the approach described herein.

[0469] 2.20 Intra-Exonic Targeting Exon 46

[0470] In certain embodiments, modification of exon 46, e.g. 5′ of premature termination codon in exon 46, e.g., by NHEJ, is expected to ameliorate the phenotype of up to 5.6% of DMD subjects (Flanigan et al., Human Mutation 2009; 30:1657-1666. Aartsma-Rus et al., Human Mutation 2009; 30:293-299. Bladen et al., Human Mutation 2015; 36(2)).

[0471] In certain embodiments, a subject with a deletion mutation, e.g., del21-45, del45, del47-54, or del47-56, can be treated with modification of exon 46, e.g., 5′ of p.2206. In certain embodiments, a subject with any mutation, e.g., a duplication mutation that would have the DMD reading frame restored by modification of exon 46, can be treated with modification of exon 46, 5′ of the premature termination codon, e.g., 5′ of p.2206. In certain embodiments, a subject with a point mutation, e.g. a point mutation in exon 46, can be treated with modification of exon 46, e.g., 5′ of point mutation. In certain embodiments, a subject with an indel mutation, e.g., an indel mutation in exon 46, can be treated with modification of exon 46, e.g., 5′ of indel mutation. The subjects would be expected to have an improvement in their disease severity by the approach described herein.

[0472] 2.21 Intra-Exonic Targeting Exon 50

[0473] In certain embodiments, modification of exon 50, e.g. 5′ of premature termination codon in exon 50, e.g., by NHEJ, is expected to ameliorate the phenotype of up to 5.2% of DMD subjects (Flanigan et al., Human Mutation 2009; 30:1657-1666. Aartsma-Rus et al., Human Mutation 2009; 30:293-299. Bladen et al., Human Mutation 2015; 36(2)).

[0474] In certain embodiments, a subject with a deletion mutation, e.g., del51, e.g., del51-53, e.g., del51-55, e.g., del53-55, e.g., del54, can be treated with modification of exon 50, IFTP at exon 50, e.g., 5′ of p.2403. In certain embodiments, a subject with any mutation, e.g., a duplication mutation that would have the DMD reading frame restored by modification of exon 50, can be treated with modification of exon 50, e.g., 5′ of the premature termination codon, e.g., 5′ of p.2403. In certain embodiments, a subject with a point mutation, e.g. a point mutation in exon 50, can be treated with modification of exon 50. In certain embodiments, a subject with an indel mutation, e.g. an indel mutation in exon 50, can be treated with modification of exon 50, e.g, 5′ of the indel mutation, e.g., at exon 50 5′ of indel mutation. The subjects would be expected to have an improvement in their disease severity by the approach described herein.

[0475] 2.22 Intra-Exonic Targeting Exon 52

[0476] In certain embodiments, modification of exon 52, e.g. 5′ of premature termination codon in exon 52, e.g., by NHEJ, is expected to ameliorate the phenotype of up to 5% of DMD subjects. (Flanigan et al., Human Mutation 2009; 30:1657-1666. Aartsma-Rus et al., Human Mutation 2009; 30:293-299. Bladen et al., Human Mutation 2015; 36(2))

[0477] In certain embodiments, a subject with a deletion mutation, e.g., del53-55, can be treated with modification of exon 52, e.g., 5′ of p.2537. In certain embodiments, a subject with any mutation, e.g., a duplication mutation that would have the DMD reading frame restored by modification of exon 52, can be treated with modification of exon 52, e.g., 5′ of the premature termination codon, e.g., 5′ of p.2537. In certain embodiments, a subject with a point mutation, e.g. a point mutation in exon 52, can be treated with modification of exon 52. In certain embodiments, a subject with an indel mutation, e.g. an indel mutation in exon 52, can be treated with modification of exon 52, e.g, 5′ of the indel mutation, e.g., at exon 50 5′ of indel mutation. The subjects would be expected to have an improvement in their disease severity by the approach described herein.

[0478] 2.23 Intra-Exonic Targeting Exon 55

[0479] In certain embodiments, modification of exon 55, e.g. 5′ of premature termination codon in exon 55, e.g., by NHEJ, is expected to ameliorate the phenotype of up to 4% of DMD subjects (Flanigan et al., Human Mutation 2009; 30:1657-1666. Aartsma-Rus et al., Human Mutation 2009; 30:293-299. Bladen et al., Human Mutation 2015; 36(2))

[0480] In certain embodiments, a subject with a deletion mutation, e.g., del54, can be treated with modification of exon 55, e.g., 5′ of p.2677. In certain embodiments, a subject with any mutation, e.g., a duplication mutation that would have the DMD reading frame restored by modification of exon 55, can be treated with modification of exon 55, e.g., 5′ of the premature termination codon, e.g., 5′ of p.2677. In certain embodiments, a subject with a point mutation, e.g. a point mutation in exon 55, can be treated with modification of exon 55. In certain embodiments, a subject with an indel mutation, e.g. an indel mutation in exon 55, can be treated with modification of exon 55, e.g., 5′ of the indel mutation. The subjects would be expected to have an improvement in their disease severity by the approach described herein.

[0481] 2.24 Intra-Exonic Targeting Exon 8

[0482] In certain embodiments, modification of exon 8, e.g. 5′ of premature termination codon in exon 8, e.g., by NHEJ, is expected to ameliorate the phenotype of up to 5.2% of DMD subjects (Flanigan et al., Human Mutation 2009; 30:1657-1666. Aartsma-Rus et al., Human Mutation 2009; 30:293-299. Bladen et al., Human Mutation 2015; 36(2)).

[0483] In certain embodiments, a subject with a deletion mutation, e.g., del3-7, del4-7, del5-7, or del6-7, can be treated with modification of exon 8, e.g., 5′ of p.229. In certain embodiments, a subject with any mutation, e.g., a duplication mutation that would have the DMD reading frame restored by modification of exon 8, can be treated with modification of exon 8, e.g., 5′ of the premature termination codon, e.g., 5′ of p.229. In certain embodiments, a subject with a point mutation, e.g. a point mutation in exon 8, can be treated with modification of exon 8. In certain embodiments, a subject with an indel mutation, e.g. an indel mutation in exon 8, can be treated with modification of exon 8, e.g., at exon 8 5′ of indel mutation. The subjects would be expected to have an improvement in their disease severity by the approach described herein.

[0484] 2.25 Intra-Exonic Targeting Exon 70

[0485] In certain embodiments, modification of exon 70, e.g., 5′ of premature termination codon in exon 70, e.g., by NHEJ, is expected to ameliorate the phenotype of up to 6% of DMD subjects with nonsense or in/del mutations. (Based on frequency of exon 70 nonsense mutations from Duchenne Muscular Dystrophy database)

[0486] In certain embodiments, any subject with a deletion mutation, e.g., del71-75, can be treated with modification of exon 70. In certain embodiments, any subject with any mutation, e.g., a duplication mutation that would have the DMD reading frame restored by modification of exon 70, can be treated with modification of exon 70, e.g., 5′ of the premature termination codon. In certain embodiments, any subject with a point mutation, e.g. a point mutation in exon 70, e.g., nonsense mutation c.10171C>T, e.g., nonsense mutation c.10141C>T, e.g., nonsense mutation c.10108C>T, can be treated with modification of exon 70. In certain embodiments, any subject with an indel mutation, e.g., and indel mutation in exon 70, can be treated with modification of exon 70, e.g, 5′ of the indel mutation. In subjects with these mutations, modification of exon 70 will restore the reading frame of DMD. After treatment, these subjects will produce a dystrophin with modifications in exon 70 but containing exons 1-68 and 71-79. The subjects would be expected to have an improvement in their disease severity by the approach described herein.

[0487] 2.26 Intra-Exonic Targeting Exon 1

[0488] In certain embodiments, modification of exon 1 e.g., 5′ of premature termination codon in exon 1, e.g., by NHEJ, is expected to ameliorate the phenotype of approximately 3% of DMD subjects who have nonsense or in/del mutations. (Based on frequency of nonsense mutations in exon 1 from Duchenne Muscular Dystrophy database)

[0489] In certain embodiments, any subject with any mutation, e.g., a deletion mutation that would have the DMD reading frame restored by modification of exon 1, can be treated with modification of exon 1, e.g., 5′ of the premature termination codon. In certain embodiments, any subject with a point mutation, e.g. a point mutation in exon 1, can be treated with modification of exon 1, e.g, at the position of point mutation. In certain embodiments, a subject with a nonsense mutation, can be treated with modification of exon 1, e.g, at the position of nonsense mutation. In certain embodiments, a subject with nonsense mutation c.9G>A, can be treated with modification of exon 1, e.g, at the position of nonsense mutation, e.g., at c.9. In certain embodiments, a subject with an indel mutation, e.g., an indel mutation in exon 1, can be treated with modification of exon 1, e.g, at the position of indel mutation. The subjects described herein would be expected to have an improvement in their disease severity by the approach described herein.

[0490] 2.27 Intra-Exonic Targeting Exon 6

[0491] In certain embodiments, modification of exon 6 e.g., 5′ of premature termination codon in exon 6, e.g., by NHEJ, is expected to ameliorate the phenotype of approximately 3% of DMD subjects who have nonsense or in/del mutations. (Based on frequency of nonsense mutations in exon 1 from Duchenne Muscular Dystrophy database)

[0492] In certain embodiments, any subject with any mutation, e.g., a deletion mutation that would have the DMD reading frame restored by modification of exon 6, can be treated with modification of exon 1, e.g., 5′ of the premature termination codon. In certain embodiments, any subject with any mutation, e.g., a duplication mutation, that would have the DMD reading frame restored by modification of exon 6, can be treated with modification of exon 6, e.g., 5′ of the premature termination codon. In certain embodiments, any subject with a point mutation, e.g. a point mutation in exon 6, can be treated with modification of exon 6, e.g, at the position of point mutation. In certain embodiments, a subject with a nonsense mutation can be treated with modification of exon 6, e.g, at the position of nonsense mutation. In certain embodiments, a subject with nonsense mutation c.355C>T can be treated with modification of exon 6, e.g, at the position of nonsense mutation, e.g., at c.355 in DMD. In certain embodiments, a subject with nonsense mutation c.440C>G can be treated with modification of exon 6, e.g, at the position of nonsense mutation, e.g., at c.440 in DMD. In certain embodiments, a subject with nonsense mutation c.429G>A can be treated with modification of exon 6, e.g, at the position of nonsense mutation, e.g., at c. c.429G>A in DMD. In certain embodiments, a subject with nonsense mutation c.433C>T can be treated with modification of exon 6, e.g, at the position of nonsense mutation, e.g., at c.433 in DMD. In certain embodiments, a subject with nonsense mutation c.457C>T can be treated with modification of exon 6, e.g, at the position of nonsense mutation, e.g., at c.457 in DMD. In certain embodiments, a subject with an indel mutation, e.g., an indel mutation in exon 6, can be treated with modification of exon 6, e.g, at the position of indel mutation in DMD. The subjects described herein would be expected to have an improvement in their disease severity by the approach described herein.

[0493] 2.28 Intra-Exonic Targeting Exon 14

[0494] In certain embodiments, modification of exon 14, e.g. 5′ of premature termination codon in exon 14, e.g., by NHEJ, is expected to ameliorate the phenotype of approximately 3% of DMD subjects who have nonsense or indel mutations. (Based on frequency of exon 14 nonsense mutations from Duchenne Muscular Dystrophy database)

[0495] In certain embodiments, any subject with any mutation, e.g., a deletion mutation that would have the DMD reading frame restored by modification of exon 14, can be treated with modification of exons 14. In certain embodiments, any subject with any mutation, e.g., a duplication mutation that would have the DMD reading frame restored by modification of exon 14, can be treated with modification of exon 14, e.g., 5′ of the premature termination codon. In certain embodiments, any subject with a point mutation, e.g. a point mutation in exon 14, e.g., nonsense mutation c.1663C>T, e.g., nonsense mutation c.1619G>A, e.g., nonsense mutation c.1702C>T, e.g., nonsense mutation c.1615C>T, can be treated with modification of exon 14. In certain embodiments, a subject with an indel mutation, e.g. an indel mutation in exon 14, can be treated with modification of exon 14, e.g, 5′ of the indel mutation. The subjects would be expected to have an improvement in their disease severity by the approach described herein.

[0496] 2.29 Intra-Exonic Targeting Exon 20

[0497] In certain embodiments, modification of exon 20, e.g., 5′ of premature termination codon in exon 21, e.g., by NHEJ, is expected to ameliorate the phenotype of approximately 5% of DMD subjects who have nonsense or in/del mutations. (Based on frequency of exon 20 nonsense mutations from Duchenne Muscular Dystrophy database)

[0498] In certain embodiments, any subject with any mutation, e.g., a deletion mutation that would have the DMD reading frame restored by modification of exon 20, can be treated with modification of exon 20. In certain embodiments, any subject with any mutation, e.g., a duplication mutation that would have the DMD reading frame restored by modification of exon 20, can be treated with modification of exons 20, e.g., 5′ of the premature termination codon. In certain embodiments, any subject with a point mutation, e.g. a point mutation in exon 20, can be treated with modification of exon 20. In certain embodiments, a subject with nonsense mutation c.2521C>T can be treated with modification of exon 20, e.g, at the position of nonsense mutation, e.g., at c.2521. In certain embodiments, a subject with nonsense mutation c.2485C>T can be treated with modification of exon 20, e.g, at the position of nonsense mutation, e.g., at c.2485. In certain embodiments, a subject with nonsense mutation c.2419C>T can be treated with modification of exon 20, e.g, at the position of nonsense mutation, e.g., at c.2419. In certain embodiments, a subject with c.2479G>T nonsense mutation can be treated with modification of exon 20, e.g, at the position of nonsense mutation, e.g., at c.2479. certain embodiments, a subject with nonsense mutation c.2404A>T can be treated with modification of exon 20, e.g, at the position of nonsense mutation, e.g., at c.2404. In certain embodiments, a subject with nonsense mutation c.2416G>T can be treated with modification of exon 20, e.g, at the position of nonsense mutation, e.g., at c.2416. In certain embodiments, a subject with nonsense mutation c.2440G>T can be treated with modification of exon 20, e.g, at the position of nonsense mutation, e.g., at c.2440. In certain embodiments, a subject with nonsense mutation c.2611A>T can be treated with modification of exon 20, e.g, at the position of nonsense mutation, e.g., at c.2611. In certain embodiments, a subject with nonsense mutation c.2582C>G can be treated with modification of exon 20, e.g, at the position of nonsense mutation, e.g., at c.2582. In certain embodiments, a subject with an indel mutation, e.g., an indel mutation in exon 20, can be treated with modification of exon 20, e.g, 5′ of the indel mutation, e.g., 5′ of indel mutation. The subjects would be expected to have an improvement in their disease severity by the approach described herein.

[0499] 2.30 Additional Exemplary Approaches

[0500] In certain embodiments, any subject with any mutation, e.g., a duplication mutation that would have the DMD reading frame restored by single-gRNA mediated NHEJ excision of an exon, can be treated with modification of that exon. In certain embodiments, any subject with dup2 can be treated with a single gRNA mediated NHEJ excision of one of two exon 2's in DMD. In certain embodiments, any subject with dup3-7 can be treated with a single gRNA mediated NHEJ excision of one of two exon 3-7 transcripts in DMD.

[0501] In certain embodiments, any subject with a point mutation, e.g. a point mutation in exon 34, can be treated with modification of exon 34. In certain embodiments, a subject with nonsense mutation c.4693C>T can be treated with modification of exon 34, e.g, at the position of nonsense mutation, e.g., at c.4693 in DMD. In certain embodiments, a subject with nonsense mutation c.4729C>T can be treated with modification of exon 34, e.g, at the position of nonsense mutation, e.g., at c.4729 in DMD. In certain embodiments, a subject with nonsense mutation c.4793C>A can be treated with modification of exon 34, e.g, at the position of nonsense mutation, e.g., at c.4793 in DMD. In certain embodiments, a subject with nonsense mutation c.4697T>A can be treated with modification of exon 34, e.g, at the position of nonsense mutation, e.g., at c.4697T in DMD.

[0502] In certain embodiments, any subject with a point mutation, e.g. a point mutation in exon 38, can be treated with modification of exon 38. In certain embodiments, a subject with nonsense mutation c.5371C>T can be treated with modification of exon 38, e.g, at the position of nonsense mutation, e.g., at c.5371 in DMD. In certain embodiments, a subject with nonsense mutation c.5404C>T can be treated with modification of exon 38, e.g, at the position of nonsense mutation, e.g., at c.5404 in DMD. In certain embodiments, a subject with nonsense mutation c.5398G>T can be treated with modification of exon 38, e.g, at the position of nonsense mutation, e.g., at c.5398 in DMD. In certain embodiments, a subject with nonsense mutation c.5344G>T can be treated with modification of exon 38, e.g, at the position of nonsense mutation, e.g., at c.5344 in DMD.

[0503] In certain embodiments, any subject with a point mutation, e.g. a point mutation in exon 41, can be treated with modification of exon 41. In certain embodiments, a subject with nonsense mutation c.5902A>T can be treated with modification of exon 41, e.g, at the position of nonsense mutation, e.g., at c.5902 in DMD. In certain embodiments, a subject with nonsense mutation c.5758C>T can be treated with modification of exon 41, e.g, at the position of nonsense mutation, e.g., at c.5758 in DMD. In certain embodiments, a subject with nonsense mutation c.5917C> can be treated with modification of exon 41, e.g, at the position of nonsense mutation, e.g., at c.5917 in DMD. In certain embodiments, a subject with nonsense mutation c.5758C>T can be treated with modification of exon 41, e.g, at the position of nonsense mutation, e.g., at c.5758 in DMD. In certain embodiments, a subject with nonsense mutation c.5800G>T can be treated with modification of exon 41, e.g, at the position of nonsense mutation, e.g., at c.5800 in DMD. In certain embodiments, a subject with nonsense mutation c.5899C>T can be treated with modification of exon 41, e.g, at the position of nonsense mutation, e.g., at c.5899 in DMD. In certain embodiments, a subject with nonsense mutation c.5752G>T can be treated with modification of exon 41, e.g, at the position of nonsense mutation, e.g., at c.5752 in DMD. In certain embodiments, a subject with nonsense mutation c.5867G>A can be treated with modification of exon 41, e.g, at the position of nonsense mutation, e.g., at c.5867 in DMD.

[0504] In certain embodiments, any subject with a point mutation, e.g. a point mutation in exon 59, can be treated with modification of exon 59. In certain embodiments, a subject with nonsense mutation c. 8775G>A can be treated with modification of exon 59, e.g, at the position of nonsense mutation, e.g., at c.8775 in DMD. In certain embodiments, a subject with nonsense mutation c.8713C>T can be treated with modification of exon 59, e.g, at the position of nonsense mutation, e.g., at c.8713 in DMD. In certain embodiments, a subject with nonsense mutation c.8680G>T can be treated with modification of exon 59, e.g, at the position of nonsense mutation, e.g., at c.8680 in DMD. In certain embodiments, a subject with nonsense mutation c.8872G>T can be treated with modification of exon 59, e.g, at the position of nonsense mutation, e.g., at c.8872 in DMD.

[0505] In certain embodiments, any subject with a point mutation, e.g. a point mutation in exon 47, can be treated with modification of exon 47, e.g, at site of point mutation. In certain embodiments, any subject with a point mutation, e.g. a point mutation in exon 48, can be treated with modification of exon 48, e.g, at site of point mutation. In certain embodiments, any subject with a point mutation, e.g. a point mutation in exon 49, can be treated with modification of exon 49, e.g, at site of point mutation. In certain embodiments, any subject with a point mutation, e.g. a point mutation in exon 54, can be treated with modification of exon 54, e.g, at site of point mutation.

[0506] In certain embodiments, any subject with any mutation, e.g., a deletion mutation that would have the DMD reading frame restored by modification of exon 47, can be treated with modification of exon 47, IFTP at exon 47 5′ of premature termination codon, e.g., 5′ of p.2257. In certain embodiments, any subject with any mutation, e.g., a deletion mutation that would have the DMD reading frame restored by modification of exon 48, can be treated with modification of exon 48, IFTP at exon 48 5′ of premature termination codon, e.g., 5′ of p.2316. In certain embodiments, any subject with any mutation, e.g., a deletion mutation that would have the DMD reading frame restored by modification of exon 49, can be treated with modification of exon 49, IFTP at exon 49 5′ of premature termination codon, e.g., 5′ of p. 2368. In certain embodiments, any subject with any mutation, e.g., a deletion mutation that would have the DMD reading frame restored by modification of exon 54, can be treated with modification of exon 54, IFTP at exon 54 5′ of premature termination codon, e.g., 5′ of p.2637.

### 3. Methods to Treat/Prevent DMD and BMD and Dilated Cardiomyopathy (DCM) Type 3B

[0507] Described herein are the compositions, genome-editing systems and methods for treating or preventing, e.g., delaying the onset or progression, of Duchenne muscular dystrophy (DMD), Becker muscular dystrophy (BMD), dilated cardiomyopathy (DCM) type 3B, or a symptom associated thereof (e.g., dilated cardiomyopathy, e.g., DMD-associated dilated cardiomyopathy). DMD, BMD and DCM type 3B can be caused by a mutation in the DMD gene, including, e.g., a duplication, a deletion, or a nonsense or frameshift mutation in the DMD gene. The disclosed compositions, genome-editing systems and methods alter the DMD gene by genome editing, e.g., using a guide RNA (gRNA) targeting a DMD target position and a Cas9 molecule.

[0508] In certain embodiments, restoring the DMD reading frame in myocytes, including skeletal, smooth and cardiac myocytes, or myoblasts, will generate mini-dystrophins or dystrophins with a slightly altered transcript. Mini-dystrophins or slightly altered dystrophins can be more functional than truncated dystrophins. In certain embodiments, the disease does not progress or has delayed progression compared to a subject who has not received the therapy. In certain embodiments, correction of dystrophin in myocytes or myoblasts will prevent the progression of skeletal, smooth and cardiac muscle disease in subjects with DMD and BMD. In certain embodiments, the disease is cured, does not progress or has delayed progression compared to a subject who has not received the therapy.

[0509] In certain embodiments, the compositions, genome-editing systems and methods described herein are used to treat a subject having DMD, BMD or DMD-associated cardiomyopathy. In certain embodiments, the compositions, genome-editing systems and methods described herein are used to prevent, or delay the onset or progression of, DMD, BMD or DMD-associated cardiomyopathy.

[0510] In certain embodiments, the treatment is initiated prior to onset of the disease. In certain embodiments, the treatment is initiated after onset of the disease. In certain embodiments, the treatment is initiated prior to onset of muscle weakness or the appearance of declining muscle function. In certain embodiments, the treatment is initiated at onset of muscle weakness or the appearance of declining muscle function. In certain embodiments, the treatment is initiated after onset of muscle weakness or the appearance of declining muscle function.

[0511] In certain embodiments, the treatment is initiated in utero, after birth, or prior to the age of 1, 2, 3, 4, 5, 6, 7, 8, 9, 10, 15, 20, 25, 30, 35, 40, or 50.

[0512] In certain embodiments, the treatment is initiated in a subject prior to the onset of elevated serum creatinine phosphokinase (CK) concentration. In certain embodiments, the treatment is initiated in a subject at the onset of elevated serum creatinine phosphokinase (CK) concentration. In certain embodiments, the treatment is initiated in a subject after the onset of elevated serum creatinine phosphokinase (CK) concentration.

[0513] In certain embodiments, the treatment is initiated in a subject prior to muscle a biopsy showing a change associated with DMD, BMD, and/or dilated cardiomyopathy. In certain embodiments, the treatment is initiated in a subject when a muscle biopsy shows a change associated with DMD, BMD, and/or dilated cardiomyopathy. In certain embodiments, the treatment is initiated in a subject after a muscle biopsy showing a change associate with DMD, BMD, and/or dilated cardiomyopathy. Exemplary changes associated with DMD, BMD, or dilated cardiomyopathy, as detected by muscle biopsy, include, but are not limited to, nonspecific dystrophic changes, e.g., variation in fiber size, foci of necrosis and regeneration, hyalinization, and, deposition of fat and connective tissue.

[0514] In certain embodiments, the treatment is initiated in a subject prior to an immunoassay showing a change associated with DMD, BMD, and/or dilated cardiomyopathy. In certain embodiments, the treatment is initiated in a subject when an immunoassay shows a change associated with DMD, BMD, and/or dilated cardiomyopathy. In certain embodiments, the treatment is initiated in a subject after an immunoassay showing a change associated with DMD, BMD, and/or dilated cardiomyopathy. Exemplary immunoassays include, but are not limited to, Western blot, immunostaining (e.g., immunohistochemistry), fluorescent immunoassay, and enzyme-linked immuno assay (ELISA). Exemplary changes associated with DMD, BMD, and/or dilated cardiomyopathy, as determined by an immunoassay, include, but are not limited to, reduced dystrophin quantity (e.g., on western blot), abnormal or undetectable dystrophin molecular weight (e.g., on western blot), absent or reduced intensity or patchy staining or mosaic pattern or dystrophin-negative fibers (e.g., on immunohistochemistry).

[0515] In certain embodiments, the treatment is initiated in a subject prior to, when, or after an electromyography (EMG) showing an activity associated with DMD, BMD, and/or dilated cardiomyopathy. Exemplary activities associated with or consistent with DMD, BMD, and/or dilated cardiomyopathy, include, but are not limited to, short-duration, low-amplitude, polyphasic, rapidly recruited motor unit potentials on EMG or no potentials on EMG. In certain embodiments, the treatment is initiated in a subject prior to, at, or after the onset of dilated cardiomyopathy, with or without presence of skeletal muscle disease. In certain embodiments, the treatment is initiated in a subject prior to, at, or after the onset of respiratory compromise or respiratory failure.

[0516] A subject's muscle weakness can be evaluated, e.g., prior to the treatment, during the treatment, or after the treatment, e.g., to monitor the progress of the treatment. In certain embodiments, the subject's muscle function is evaluated prior to treatment, e.g., to determine the need for treatment. In certain embodiments, the subject's muscle function is evaluated after treatment has been initiated, e.g., to access the effectiveness of the treatment. Muscle function can be evaluated, e.g., by one or more of: physical examination (noting scoliosis, muscle deformities, including contractures or heels and legs and/or abnormal fat and connective tissues in calf muscles), wheelchair dependency, six-minute walk test (6MWT), presence of dilated cardiomyopathy, echocardiography, cardiac function, pulmonary function tests (including forced vital capacity, forced expiratory volume, peak expiratory flow rate, maximal inspiratory pressure, maximal inspiratory pressure), CPK blood test, electromyography (EMG) nerve testing, muscle biopsy and quantification of dystrophin on western blot or immunohistochemistry.

[0517] In certain embodiments, a subject's muscle function may be assessed by measuring the subject's mobility, e.g., the subject's ability to perform activities of daily living, including ambulation, unassisted breathing.

[0518] In certain embodiments, the treatment is initiated in a subject who has tested positive for a mutation in the DMD gene, e.g., a mutation described herein, e.g., prior to disease onset, in the earliest stages of disease, or at time of disease onset. In certain embodiments, the mutation is tested by sequencing.

[0519] In certain embodiments, a subject has a family member that has been diagnosed with DMD, BMD, and/or dilated cardiomyopathy. For example, and the subject demonstrates a symptom or sign of the disease or has been found to have a mutation in the DMD gene. In certain embodiments, the subject has a family member that has been diagnosed with DMD, BMD, and/or dilated cardiomyopathy.

[0520] In certain embodiments, a cell (e.g., a skeletal muscle cell, a smooth muscle cell, a cardiac muscle cell, or a cardiomyocyte) from a subject suffering from or likely to develop DMD, BMD, and/or dilated cardiomyopathy is treated ex vivo. In certain embodiments, the cell is removed from the subject, altered as described herein, and introduced into, e.g., returned to, the subject.

[0521] In certain embodiments, a cell (e.g., a skeletal muscle cell, a smooth muscle cell, a cardiac muscle cell, or a cardiomyocyte) is altered to correct a mutation in the DMD gene, e.g., a mutation described herein, is introduced into the subject.

[0522] In certain embodiments, a population of cells (e.g., a population of muscle cells, e.g., a population of skeletal muscle cells, smooth muscle cells, cardiac muscle cells, cardiomyocytes, or a combination thereof) from a subject may be contacted ex vivo to alter a mutation in the DMD gene, e.g., a mutation described herein. In certain embodiments, such cells are introduced to the subject's body to treat or delay the onset or progression of DMD, BMD, DCM type 3B, or a symptom associated therefore (e.g., dilated cardiomyopathy, e.g., DMD-associated dilated cardiomyopathy). In certain embodiments, the method described herein comprises delivery of gRNA or other components described herein, e.g., a Cas9 molecule, by one or more AAV vectors.

### 4. Guide RNA (gRNA) Molecules

[0523] A gRNA molecule, as that term is used herein, refers to a nucleic acid that promotes the specific targeting or homing of a gRNA molecule/Cas9 molecule complex to a target nucleic acid. gRNA molecules can be unimolecular (having a single RNA molecule) (e.g., chimeric), or modular (comprising more than one, and typically two, separate RNA molecules). The gRNA molecules provided herein comprise a targeting domain comprising, consisting of, or consisting essentially of a nucleic acid sequence fully or partially complementary to a target domain. In certain embodiments, the gRNA molecule further comprises one or more additional domains, including for example a first complementarity domain, a linking domain, a second complementarity domain, a proximal domain, a tail domain, and a 5′ extension domain. Each of these domains is discussed in detail below. In certain embodiments, one or more of the domains in the gRNA molecule comprises an amino acid sequence identical to or sharing sequence homology with a naturally occurring sequence, e.g., from S. pyogenes, S. aureus, or S. thermophilus.

[0524] Several exemplary gRNA structures are provided in FIGS. 1A-1I. With regard to the three-dimensional form, or intra- or inter-strand interactions of an active form of a gRNA, regions of high complementarity are sometimes shown as duplexes in FIGS. 1A-1I and other depictions provided herein. FIG. 7 illustrates gRNA domain nomenclature using the gRNA sequence of SEQ ID NO:42, which contains one hairpin loop in the tracrRNA-derived region. In certain embodiments, a gRNA may contain more than one (e.g., two, three, or more) hairpin loops in this region (see, e.g., FIGS. 1H-1I).

[0525] In certain embodiments, a unimolecular, or chimeric, gRNA comprises, preferably from 5′ to 3′:
[0526] a targeting domain complementary to a target domain in a DMD gene (e.g., human DMD gene), e.g., a targeting domain comprising a nucleotide sequence selected from SEQ ID NOs: 206-826366;
[0527] a first complementarity domain;
[0528] a linking domain;
[0529] a second complementarity domain (which is complementary to the first complementarity domain);
[0530] a proximal domain; and
[0531] optionally, a tail domain.

[0532] In certain embodiments, a modular gRNA comprises:
[0533] a first strand comprising, preferably from 5′ to 3′:
   [0534] a targeting domain complementary to a target domain in a DMD gene (e.g., human DMD gene), e.g., a targeting domain comprising a nucleotide sequence selected from SEQ ID NOs: 206-826366; and
   [0535] a first complementarity domain; and
[0536] a second strand, comprising, preferably from 5′ to 3′:
   [0537] optionally, a 5′ extension domain;
   [0538] a second complementarity domain;
   [0539] a proximal domain; and
   [0540] optionally, a tail domain.

[0541] 4.1 Targeting Domain

[0542] The targeting domain (sometimes referred to alternatively as the guide sequence) comprises, consists of, or consists essentially of a nucleic acid sequence that is complementary or partially complementary to a target nucleic acid sequence in a DMD gene (e.g., human DMD gene). The nucleic acid sequence in a DMD gene to which all or a portion of the targeting domain is complementary or partially complementary is referred to herein as the target domain.

[0543] Methods for selecting targeting domains are known in the art (see, e.g., Fu 2014; Sternberg 2014). Examples of suitable targeting domains for use in the methods, compositions, and kits described herein comprise nucleotide sequences set forth in SEQ ID NOs: 206-826366.

[0544] The strand of the target nucleic acid comprising the target domain is referred to herein as the complementary strand because it is complementary to the targeting domain sequence. Since the targeting domain is part of a gRNA molecule, it comprises the base uracil (U) rather than thymine (T); conversely, any DNA molecule encoding the gRNA molecule will comprise thymine rather than uracil. In a targeting domain/target domain pair, the uracil bases in the targeting domain will pair with the adenine bases in the target domain. In certain embodiments, the degree of complementarity between the targeting domain and target domain is sufficient to allow targeting of a Cas9 molecule to the target nucleic acid.

[0545] In certain embodiments, the targeting domain comprises a core domain and an optional secondary domain. In certain of these embodiments, the core domain is located 3′ to the secondary domain, and in certain of these embodiments the core domain is located at or near the 3′ end of the targeting domain. In certain of these embodiments, the core domain consists of or consists essentially of about 8 to about 13 nucleotides at the 3′ end of the targeting domain. In certain embodiments, only the core domain is complementary or partially complementary to the corresponding portion of the target domain, and in certain of these embodiments the core domain is fully complementary to the corresponding portion of the target domain. In certain embodiments, the secondary domain is also complementary or partially complementary to a portion of the target domain. In certain embodiments, the core domain is complementary or partially complementary to a core domain target in the target domain, while the secondary domain is complementary or partially complementary to a secondary domain target in the target domain. In certain embodiments, the core domain and secondary domain have the same degree of complementarity with their respective corresponding portions of the target domain. In certain embodiments, the degree of complementarity between the core domain and its target and the degree of complementarity between the secondary domain and its target may differ. In certain of these embodiments, the core domain may have a higher degree of complementarity for its target than the secondary domain, whereas in other embodiments the secondary domain may have a higher degree of complementarity than the core domain.

[0546] In certain embodiments, the targeting domain and/or the core domain within the targeting domain is 3 to 100, 5 to 100, 10 to 100, or 20 to 100 nucleotides in length, and in certain of these embodiments the targeting domain or core domain is 3 to 15, 3 to 20, 5 to 20, 10 to 20, 15 to 20, 5 to 50, 10 to 50, or 20 to 50 nucleotides in length. In certain embodiments, the targeting domain and/or the core domain within the targeting domain is 6, 7, 8, 9, 10, 11, 12, 13, 14, 15, 16, 17, 18, 19, 20, 21, 22, 23, 24, 25, or 26 nucleotides in length. In certain embodiments, the targeting domain and/or the core domain within the targeting domain is 6+/−2, 7+/−2, 8+/−2, 9+/−2, 10+/−2, 10+/−4, 10+/−5, 11+/−2, 12+/−2, 13+/−2, 14+/−2, 15+/−2, or 16+/−2, 20+/−5, 30+/−5, 40+/−5, 50+/−5, 60+/−5, 70+/−5, 80+/−5, 90+/−5, or 100+/−5 nucleotides in length.

[0547] In certain embodiments wherein the targeting domain includes a core domain, the core domain is 3 to 20 nucleotides in length, and in certain of these embodiments the core domain 5 to 15 or 8 to 13 nucleotides in length. In certain embodiments wherein the targeting domain includes a secondary domain, the secondary domain is 0, 1, 2, 3, 4, 5, 6, 7, 8, 9, 10, 11, 12, 13, 14 or 15 nucleotides in length. In certain embodiments wherein the targeting domain comprises a core domain that is 8 to 13 nucleotides in length, the targeting domain is 26, 25, 24, 23, 22, 21, 20, 19, 18, 17, or 16 nucleotides in length, and the secondary domain is 13 to 18, 12 to 17, 11 to 16, 10 to 15, 9 to 14, 8 to 13, 7 to 12, 6 to 11, 5 to 10, 4 to 9, or 3 to 8 nucleotides in length, respectively.

[0548] In certain embodiments, the targeting domain is fully complementary to the target domain. Likewise, where the targeting domain comprises a core domain and/or a secondary domain, in certain embodiments one or both of the core domain and the secondary domain are fully complementary to the corresponding portions of the target domain. In certain embodiments, the targeting domain is partially complementary to the target domain, and in certain of these embodiments where the targeting domain comprises a core domain and/or a secondary domain, one or both of the core domain and the secondary domain are partially complementary to the corresponding portions of the target domain. In certain of these embodiments, the nucleic acid sequence of the targeting domain, or the core domain or targeting domain within the targeting domain, is at least about 80%, about 85%, about 90%, or about 95% complementary to the target domain or to the corresponding portion of the target domain. In certain embodiments, the targeting domain and/or the core or secondary domains within the targeting domain include one or more nucleotides that are not complementary with the target domain or a portion thereof, and in certain of these embodiments the targeting domain and/or the core or secondary domains within the targeting domain include 1, 2, 3, 4, 5, 6, 7, or 8 nucleotides that are not complementary with the target domain. In certain embodiments, the core domain includes 1, 2, 3, 4, or 5 nucleotides that are not complementary with the corresponding portion of the target domain. In certain embodiments wherein the targeting domain includes one or more nucleotides that are not complementary with the target domain, one or more of said non-complementary nucleotides are located within five nucleotides of the 5′ or 3′ end of the targeting domain. In certain of these embodiments, the targeting domain includes 1, 2, 3, 4, or 5 nucleotides within five nucleotides of its 5′ end, 3′ end, or both its 5′ and 3′ ends that are not complementary to the target domain. In certain embodiments wherein the targeting domain includes two or more nucleotides that are not complementary to the target domain, two or more of said non-complementary nucleotides are adjacent to one another, and in certain of these embodiments the two or more consecutive non-complementary nucleotides are located within five nucleotides of the 5′ or 3′ end of the targeting domain. In certain embodiments, the two or more consecutive non-complementary nucleotides are both located more than five nucleotides from the 5′ and 3′ ends of the targeting domain.

[0549] In certain embodiments, the targeting domain, core domain, and/or secondary domain do not comprise any modifications. In certain embodiments, the targeting domain, core domain, and/or secondary domain, or one or more nucleotides therein, have a modification, including but not limited to the modifications set forth below. In certain embodiments, one or more nucleotides of the targeting domain, core domain, and/or secondary domain may comprise a 2′ modification (e.g., a modification at the 2′ position on ribose), e.g., a 2-acetylation, e.g., a 2′ methylation. In certain embodiments, the backbone of the targeting domain can be modified with a phosphorothioate. In certain embodiments, modifications to one or more nucleotides of the targeting domain, core domain, and/or secondary domain render the targeting domain and/or the gRNA comprising the targeting domain less susceptible to degradation or more bio-compatible, e.g., less immunogenic. In certain embodiments, the targeting domain and/or the core or secondary domains include 1, 2, 3, 4, 5, 6, 7, or 8 or more modifications, and in certain of these embodiments the targeting domain and/or core or secondary domains include 1, 2, 3, or 4 modifications within five nucleotides of their respective 5′ ends and/or 1, 2, 3, or 4 modifications within five nucleotides of their respective 3′ ends. In certain embodiments, the targeting domain and/or the core or secondary domains comprise modifications at two or more consecutive nucleotides.

[0550] In certain embodiments wherein the targeting domain includes core and secondary domains, the core and secondary domains contain the same number of modifications. In certain of these embodiments, both domains are free of modifications. In other embodiments, the core domain includes more modifications than the secondary domain, or vice versa.

[0551] In certain embodiments, modifications to one or more nucleotides in the targeting domain, including in the core or secondary domains, are selected to not interfere with targeting efficacy, which can be evaluated by testing a candidate modification using a system as set forth below. gRNAs having a candidate targeting domain having a selected length, sequence, degree of complementarity, or degree of modification can be evaluated using a system as set forth below. The candidate targeting domain can be placed, either alone or with one or more other candidate changes in a gRNA molecule/Cas9 molecule system known to be functional with a selected target, and evaluated.

[0552] In certain embodiments, all of the modified nucleotides are complementary to and capable of hybridizing to corresponding nucleotides present in the target domain. In certain embodiments, 1, 2, 3, 4, 5, 6, 7 or 8 or more modified nucleotides are not complementary to or capable of hybridizing to corresponding nucleotides present in the target domain.

[0553] 4.2 First and Second Complementarity Domains

[0554] The first and second complementarity (sometimes referred to alternatively as the crRNA-derived hairpin sequence and tracrRNA-derived hairpin sequences, respectively) domains are fully or partially complementary to one another. In certain embodiments, the degree of complementarity is sufficient for the two domains to form a duplexed region under at least some physiological conditions. In certain embodiments, the degree of complementarity between the first and second complementarity domains, together with other properties of the gRNA, is sufficient to allow targeting of a Cas9 molecule to a target nucleic acid. Examples of first and second complementary domains are set forth in FIGS. 1A-1G.

[0555] In certain embodiments (see, e.g., FIGS. 1A-1B) the first and/or second complementarity domain includes one or more nucleotides that lack complementarity with the corresponding complementarity domain. In certain embodiments, the first and/or second complementarity domain includes 1, 2, 3, 4, 5, or 6 nucleotides that do not complement with the corresponding complementarity domain. For example, the second complementarity domain may contain 1, 2, 3, 4, 5, or 6 nucleotides that do not pair with corresponding nucleotides in the first complementarity domain. In certain embodiments, the nucleotides on the first or second complementarily domain that do not complement with the corresponding complementarity domain loop out from the duplex formed between the first and second complementarity domains. In certain of these embodiments, the unpaired loop-out is located on the second complementarity domain, and in certain of these embodiments the unpaired region begins 1, 2, 3, 4, 5, or 6 nucleotides from the 5′ end of the second complementarity domain.

[0556] In certain embodiments, the first complementarity domain is 5 to 30, 5 to 25, 7 to 25, 5 to 24, 5 to 23, 7 to 22, 5 to 22, 5 to 21, 5 to 20, 7 to 18, 7 to 15, 9 to 16, or 10 to 14 nucleotides in length, and in certain of these embodiments the first complementarity domain is 5, 6, 7, 8, 9, 10, 11, 12, 13, 14, 15, 16, 17, 18, 19, 20, 21, 22, 23, 24, or 25 nucleotides in length. In certain embodiments, the second complementarity domain is 5 to 27, 7 to 27, 7 to 25, 5 to 24, 5 to 23, 5 to 22, 5 to 21, 7 to 20, 5 to 20, 7 to 18, 7 to 17, 9 to 16, or 10 to 14 nucleotides in length, and in certain of these embodiments the second complementarity domain is 5, 6, 7, 8, 9, 10, 11, 12, 13, 14, 15, 16, 17, 18, 19, 20, 21, 22, 23, 24, 25, or 26 nucleotides in length. In certain embodiments, the first and second complementarity domains are each independently 6+/−2, 7+/−2, 8+/−2, 9+/−2, 10+/−2, 11+/−2, 12+/−2, 13+/−2, 14+/−2, 15+/−2, 16+/−2, 17+/−2, 18+/−2, 19+/−2, or 20+/−2, 21+/−2, 22+/−2, 23+/−2, or 24+/−2 nucleotides in length. In certain embodiments, the second complementarity domain is longer than the first complementarity domain, e.g., 2, 3, 4, 5, or 6 nucleotides longer.

[0557] In certain embodiments, the first and/or second complementarity domains each independently comprise three subdomains, which, in the 5′ to 3′ direction are: a 5′ subdomain, a central subdomain, and a 3′ subdomain. In certain embodiments, the 5′ subdomain and 3′ subdomain of the first complementarity domain are fully or partially complementary to the 3′ subdomain and 5′ subdomain, respectively, of the second complementarity domain.

[0558] In certain embodiments, the 5′ subdomain of the first complementarity domain is 4 to 9 nucleotides in length, and in certain of these embodiments the 5′ domain is 4, 5, 6, 7, 8, or 9 nucleotides in length. In certain embodiments, the 5′ subdomain of the second complementarity domain is 3 to 25, 4 to 22, 4 to 18, or 4 to 10 nucleotides in length, and in certain of these embodiments the 5′ domain is 3, 4, 5, 6, 7, 8, 9, 10, 11, 12, 13, 14, 15, 16, 17, 18, 19, 20, 21, 22, 23, 24, or 25 nucleotides in length. In certain embodiments, the central subdomain of the first complementarity domain is 1, 2, or 3 nucleotides in length. In certain embodiments, the central subdomain of the second complementarity domain is 1, 2, 3, 4, or 5 nucleotides in length. In certain embodiments, the 3′ subdomain of the first complementarity domain is 3 to 25, 4 to 22, 4 to 18, or 4 to 10 nucleotides in length, and in certain of these embodiments the 3′ subdomain is 3, 4, 5, 6, 7, 8, 9, 10, 11, 12, 13, 14, 15, 16, 17, 18, 19, 20, 21, 22, 23, 24, or 25 nucleotides in length. In certain embodiments, the 3′ subdomain of the second complementarity domain is 4 to 9, e.g., 4, 5, 6, 7, 8 or 9 nucleotides in length.

[0559] The first and/or second complementarity domains can share homology with, or be derived from, naturally occurring or reference first and/or second complementarity domain. In certain of these embodiments, the first and/or second complementarity domains have at least about 50%, about 60%, about 70%, about 80%, about 85%, about 90%, or about 95% homology with, or differ by no more than 1, 2, 3, 4, 5, or 6 nucleotides from, the naturally occurring or reference first and/or second complementarity domain. In certain of these embodiments, the first and/or second complementarity domains may have at least about 50%, about 60%, about 70%, about 80%, about 85%, about 90%, or about 95% homology with homology with a first and/or second complementarity domain from S. pyogenes or S. aureus.

[0560] In certain embodiments, the first and/or second complementarity domains do not comprise any modifications. In other embodiments, the first and/or second complementarity domains or one or more nucleotides therein have a modification, including but not limited to a modification set forth below. In certain embodiments, one or more nucleotides of the first and/or second complementarity domain may comprise a 2′ modification (e.g., a modification at the 2′ position on ribose), e.g., a 2-acetylation, e.g., a 2′ methylation. In certain embodiments, the backbone of the targeting domain can be modified with a phosphorothioate. In certain embodiments, modifications to one or more nucleotides of the first and/or second complementarity domain render the first and/or second complementarity domain and/or the gRNA comprising the first and/or second complementarity less susceptible to degradation or more bio-compatible, e.g., less immunogenic. In certain embodiments, the first and/or second complementarity domains each independently include 1, 2, 3, 4, 5, 6, 7, or 8 or more modifications, and in certain of these embodiments the first and/or second complementarity domains each independently include 1, 2, 3, or 4 modifications within five nucleotides of their respective 5′ ends, 3′ ends, or both their 5′ and 3′ ends. In certain embodiments, the first and/or second complementarity domains each independently contain no modifications within five nucleotides of their respective 5′ ends, 3′ ends, or both their 5′ and 3′ ends. In certain embodiments, one or both of the first and second complementarity domains comprise modifications at two or more consecutive nucleotides.

[0561] In certain embodiments, modifications to one or more nucleotides in the first and/or second complementarity domains are selected to not interfere with targeting efficacy, which can be evaluated by testing a candidate modification in a system as set forth below. gRNAs having a candidate first or second complementarity domain having a selected length, sequence, degree of complementarity, or degree of modification can be evaluated in a system as set forth below. The candidate complementarity domain can be placed, either alone or with one or more other candidate changes in a gRNA molecule/Cas9 molecule system known to be functional with a selected target, and evaluated.

[0562] In certain embodiments, the duplexed region formed by the first and second complementarity domains is, for example, 6, 7, 8, 9, 10, 11, 12, 13, 14, 15, 16, 17, 18, 19, 20, 21, or 22 bp in length, excluding any looped out or unpaired nucleotides.

[0563] In certain embodiments, the first and second complementarity domains, when duplexed, comprise 11 paired nucleotides (see, for e.g., gRNA of SEQ ID NO:48). In certain embodiments, the first and second complementarity domains, when duplexed, comprise 15 paired nucleotides (see, e.g., gRNA of SEQ ID NO:50). In certain embodiments, the first and second complementarity domains, when duplexed, comprise 16 paired nucleotides (see, e.g., gRNA of SEQ ID NO:51). In certain embodiments, the first and second complementarity domains, when duplexed, comprise 21 paired nucleotides (see, e.g., gRNA of SEQ ID NO:29).

[0564] In certain embodiments, one or more nucleotides are exchanged between the first and second complementarity domains to remove poly-U tracts. For example, nucleotides 23 and 48 or nucleotides 26 and 45 of the gRNA of SEQ ID NO:48 may be exchanged to generate the gRNA of SEQ ID NOs:49 or 31, respectively. Similarly, nucleotides 23 and 39 of the gRNA of SEQ ID NO:29 may be exchanged with nucleotides 50 and 68 to generate the gRNA of SEQ ID NO:30.

[0565] 4.3 Linking Domain

[0566] The linking domain is disposed between and serves to link the first and second complementarity domains in a unimolecular or chimeric gRNA. FIGS. 1B-1E provide examples of linking domains. In certain embodiments, part of the linking domain is from a crRNA-derived region, and another part is from a tracrRNA-derived region.

[0567] In certain embodiments, the linking domain links the first and second complementarity domains covalently. In certain of these embodiments, the linking domain consists of or comprises a covalent bond. In other embodiments, the linking domain links the first and second complementarity domains non-covalently. In certain embodiments, the linking domain is ten or fewer nucleotides in length, e.g., 1, 2, 3, 4, 5, 6, 7, 8, 9, or 10 nucleotides. In other embodiments, the linking domain is greater than 10 nucleotides in length, e.g., 11, 12, 13, 14, 15, 16, 17, 18, 19, 20, 21, 22, 23, 24, or 25 or more nucleotides. In certain embodiments, the linking domain is 2 to 50, 2 to 40, 2 to 30, 2 to 20, 2 to 10, 2 to 5, 10 to 100, 10 to 90, 10 to 80, 10 to 70, 10 to 60, 10 to 50, 10 to 40, 10 to 30, 10 to 20, 10 to 15, 20 to 100, 20 to 90, 20 to 80, 20 to 70, 20 to 60, 20 to 50, 20 to 40, 20 to 30, or 20 to 25 nucleotides in length. In certain embodiments, the linking domain is 10+/−5, 20+/−5, 20+/−10, 30+/−5, 30+/−10, 40+/−5, 40+/−10, 50+/−5, 50+/−10, 60+/−5, 60+/−10, 70+/−5, 70+/−10, 80+/−5, 80+/−10, 90+/−5, 90+/−10, 100+/−5, or 100+/−10 nucleotides in length.

[0568] In certain embodiments, the linking domain shares homology with, or is derived from, a naturally occurring sequence, e.g., the sequence of a tracrRNA that is 5′ to the second complementarity domain. In certain embodiments, the linking domain has at least about 50%, about 60%, about 70%, about 80%, about 90%, or about 95% homology with or differs by no more than 1, 2, 3, 4, 5, or 6 nucleotides from a linking domain disclosed herein, e.g., the linking domains of FIGS. 1B-1E.

[0569] In certain embodiments, the linking domain does not comprise any modifications. In other embodiments, the linking domain or one or more nucleotides therein have a modification, including but not limited to the modifications set forth below. In certain embodiments, one or more nucleotides of the linking domain may comprise a 2′ modification (e.g., a modification at the 2′ position on ribose), e.g., a 2-acetylation, e.g., a 2′ methylation. In certain embodiments, the backbone of the linking domain can be modified with a phosphorothioate. In certain embodiments, modifications to one or more nucleotides of the linking domain render the linking domain and/or the gRNA comprising the linking domain less susceptible to degradation or more bio-compatible, e.g., less immunogenic. In certain embodiments, the linking domain includes 1, 2, 3, 4, 5, 6, 7, or 8 or more modifications, and in certain of these embodiments the linking domain includes 1, 2, 3, or 4 modifications within five nucleotides of its 5′ and/or 3′ end. In certain embodiments, the linking domain comprises modifications at two or more consecutive nucleotides.

[0570] In certain embodiments, modifications to one or more nucleotides in the linking domain are selected to not interfere with targeting efficacy, which can be evaluated by testing a candidate modification in a system as set forth below. gRNAs having a candidate linking domain having a selected length, sequence, degree of complementarity, or degree of modification can be evaluated in a system as set forth below. The candidate linking domain can be placed, either alone or with one or more other candidate changes in a gRNA molecule/Cas9 molecule system known to be functional with a selected target, and evaluated.

[0571] In certain embodiments, the linking domain comprises a duplexed region, typically adjacent to or within 1, 2, or 3 nucleotides of the 3′ end of the first complementarity domain and/or the 5′ end of the second complementarity domain. In certain of these embodiments, the duplexed region of the linking region is 10+/−5, 15+/−5, 20+/−5, 20+/−10, or 30+/−5 bp in length. In certain embodiments, the duplexed region of the linking domain is 1, 2, 3, 4, 5, 6, 7, 8, 9, 10, 11, 12, 13, 14, or 15 bp in length. In certain embodiments, the sequences forming the duplexed region of the linking domain are fully complementarity. In other embodiments, one or both of the sequences forming the duplexed region contain one or more nucleotides (e.g., 1, 2, 3, 4, 5, 6, 7, or 8 nucleotides) that are not complementary with the other duplex sequence.

[0572] 4.4 5′ Extension Domain

[0573] In certain embodiments, a modular gRNA as disclosed herein comprises a 5′ extension domain, i.e., one or more additional nucleotides 5′ to the second complementarity domain (see, e.g., FIG. 1A). In certain embodiments, the 5′ extension domain is 2 to 10 or more, 2 to 9, 2 to 8, 2 to 7, 2 to 6, 2 to 5, or 2 to 4 nucleotides in length, and in certain of these embodiments the 5′ extension domain is 2, 3, 4, 5, 6, 7, 8, 9, or 10 or more nucleotides in length.

[0574] In certain embodiments, the 5′ extension domain nucleotides do not comprise modifications, e.g., modifications of the type provided below. However, in certain embodiments, the 5′ extension domain comprises one or more modifications, e.g., modifications that it render it less susceptible to degradation or more bio-compatible, e.g., less immunogenic. By way of example, the backbone of the 5′ extension domain can be modified with a phosphorothioate, or other modification(s) as set forth below. In certain embodiments, a nucleotide of the 5′ extension domain can comprise a 2′ modification (e.g., a modification at the 2′ position on ribose), e.g., a 2-acetylation, e.g., a 2′ methylation, or other modification(s) as set forth below.

[0575] In certain embodiments, the 5′ extension domain can comprise as many as 1, 2, 3, 4, 5, 6, 7, or 8 modifications. In certain embodiments, the 5′ extension domain comprises as many as 1, 2, 3, or 4 modifications within 5 nucleotides of its 5′ end, e.g., in a modular gRNA molecule. In certain embodiments, the 5′ extension domain comprises as many as 1, 2, 3, or 4 modifications within 5 nucleotides of its 3′ end, e.g., in a modular gRNA molecule.

[0576] In certain embodiments, the 5′ extension domain comprises modifications at two consecutive nucleotides, e.g., two consecutive nucleotides that are within 5 nucleotides of the 5′ end of the 5′ extension domain, within 5 nucleotides of the 3′ end of the 5′ extension domain, or more than 5 nucleotides away from one or both ends of the 5′ extension domain. In certain embodiments, no two consecutive nucleotides are modified within 5 nucleotides of the 5′ end of the 5′ extension domain, within 5 nucleotides of the 3′ end of the 5′ extension domain, or within a region that is more than 5 nucleotides away from one or both ends of the 5′ extension domain. In certain embodiments, no nucleotide is modified within 5 nucleotides of the 5′ end of the 5′ extension domain, within 5 nucleotides of the 3′ end of the 5′ extension domain, or within a region that is more than 5 nucleotides away from one or both ends of the 5′ extension domain.

[0577] Modifications in the 5′ extension domain can be selected so as to not interfere with gRNA molecule efficacy, which can be evaluated by testing a candidate modification in a system as set forth below. gRNAs having a candidate 5′ extension domain having a selected length, sequence, degree of complementarity, or degree of modification, can be evaluated in a system as set forth below. The candidate 5′ extension domain can be placed, either alone, or with one or more other candidate changes in a gRNA molecule/Cas9 molecule system known to be functional with a selected target and evaluated.

[0578] In certain embodiments, the 5′ extension domain has at least about 60%, about 70%, about 80%, about 85%, about 90%, or about 95% homology with, or differs by no more than 1, 2, 3, 4, 5, or 6 nucleotides from, a reference 5′ extension domain, e.g., a naturally occurring, e.g., an S. pyogenes, S. aureus, or S. thermophilus, 5′ extension domain, or a 5′ extension domain described herein, e.g., from FIGS. 1A-1G.

[0579] 4.5 Proximal Domain

[0580] FIGS. 1A-1G provide examples of proximal domains.

[0581] In certain embodiments, the proximal domain is 5 to 20 or more nucleotides in length, e.g., 5, 6, 7, 8, 9, 10, 11, 12, 13, 14, 15, 16, 17, 18, 19, 20, 21, 22, 23, 24, 25, or 26 nucleotides in length. In certain of these embodiments, the proximal domain is 6+/−2, 7+/−2, 8+/−2, 9+/−2, 10+/−2, 11+/−2, 12+/−2, 13+/−2, 14+/−2, 14+/−2, 16+/−2, 17+/−2, 18+/−2, 19+/−2, or 20+/−2 nucleotides in length. In certain embodiments, the proximal domain is 5 to 20, 7, to 18, 9 to 16, or 10 to 14 nucleotides in length.

[0582] In certain embodiments, the proximal domain can share homology with or be derived from a naturally occurring proximal domain. In certain of these embodiments, the proximal domain has at least about 50%, about 60%, about 70%, about 80%, about 85%, about 90%, or about 95% homology with or differs by no more than 1, 2, 3, 4, 5, or 6 nucleotides from a proximal domain disclosed herein, e.g., an S. pyogenes, S. aureus, or S. thermophilus proximal domain, including those set forth in FIGS. 1A-1G.

[0583] In certain embodiments, the proximal domain does not comprise any modifications. In other embodiments, the proximal domain or one or more nucleotides therein have a modification, including but not limited to the modifications set forth in herein. In certain embodiments, one or more nucleotides of the proximal domain may comprise a 2′ modification (e.g., a modification at the 2′ position on ribose), e.g., a 2-acetylation, e.g., a 2′ methylation. In certain embodiments, the backbone of the proximal domain can be modified with a phosphorothioate. In certain embodiments, modifications to one or more nucleotides of the proximal domain render the proximal domain and/or the gRNA comprising the proximal domain less susceptible to degradation or more bio-compatible, e.g., less immunogenic. In certain embodiments, the proximal domain includes 1, 2, 3, 4, 5, 6, 7, or 8 or more modifications, and in certain of these embodiments the proximal domain includes 1, 2, 3, or 4 modifications within five nucleotides of its 5′ and/or 3′ end. In certain embodiments, the proximal domain comprises modifications at two or more consecutive nucleotides.

[0584] In certain embodiments, modifications to one or more nucleotides in the proximal domain are selected to not interfere with targeting efficacy, which can be evaluated by testing a candidate modification in a system as set forth below. gRNAs having a candidate proximal domain having a selected length, sequence, degree of complementarity, or degree of modification can be evaluated in a system as set forth below. The candidate proximal domain can be placed, either alone or with one or more other candidate changes in a gRNA molecule/Cas9 molecule system known to be functional with a selected target, and evaluated.

[0585] 4.6 Tail Domain

[0586] A broad spectrum of tail domains are suitable for use in the gRNA molecules disclosed herein. FIGS. 1A and 1C-1G provide examples of such tail domains.

[0587] In certain embodiments, the tail domain is absent. In other embodiments, the tail domain is 1 to 100 or more nucleotides in length, e.g., 1, 2, 3, 4, 5, 6, 7, 8, 9, 10, 20, 30, 40, 50, 60, 70, 80, 90, or 100 nucleotides in length. In certain embodiments, the tail domain is 1 to 5, 1 to 10, 1 to 15, 1 to 20, 1 to 50, 10 to 100, 20 to 100, 10 to 90, 20 to 90, 10 to 80, 20 to 80, 10 to 70, 20 to 70, 10 to 60, 20 to 60, 10 to 50, 20 to 50, 10 to 40, 20 to 40, 10 to 30, 20 to 30, 20 to 25, 10 to 20, or 10 to 15 nucleotides in length. In certain embodiments, the tail domain is 5+/−5, 10+/−5, 20+/−10, 20+/−5, 25+/−10, 30+/−10, 30+/−5, 40+/−10, 40+/−5, 50+/−10, 50+/−5, 60+/−10, 60+/−5, 70+/−10, 70+/−5, 80+/−10, 80+/−5, 90+/−10, 90+/−5, 100+/−10, or 100+/−5 nucleotides in length,

[0588] In certain embodiments, the tail domain can share homology with or be derived from a naturally occurring tail domain or the 5′ end of a naturally occurring tail domain. In certain of these embodiments, the proximal domain has at least about 50%, about 60%, about 70%, about 80%, about 85%, about 90%, or about 95% homology with or differs by no more than 1, 2, 3, 4, 5, or 6 nucleotides from a naturally occurring tail domain disclosed herein, e.g., an S. pyogenes, S. aureus, or S. thermophilus tail domain, including those set forth in FIGS. 1A and 1C-1G.

[0589] In certain embodiments, the tail domain includes sequences that are complementary to each other and which, under at least some physiological conditions, form a duplexed region. In certain of these embodiments, the tail domain comprises a tail duplex domain which can form a tail duplexed region. In certain embodiments, the tail duplexed region is 3, 4, 5, 6, 7, 8, 9, 10, 11, or 12 bp in length. In certain embodiments, the tail domain comprises a single stranded domain 3′ to the tail duplex domain that does not form a duplex. In certain of these embodiments, the single stranded domain is 3 to 10 nucleotides in length, e.g., 3, 4, 5, 6, 7, 8, 9, 10, or 4 to 6 nucleotides in length.

[0590] In certain embodiments, the tail domain does not comprise any modifications. In other embodiments, the tail domain or one or more nucleotides therein have a modification, including but not limited to the modifications set forth herein. In certain embodiments, one or more nucleotides of the tail domain may comprise a 2′ modification (e.g., a modification at the 2′ position on ribose), e.g., a 2-acetylation, e.g., a 2′ methylation. In certain embodiments, the backbone of the tail domain can be modified with a phosphorothioate. In certain embodiments, modifications to one or more nucleotides of the tail domain render the tail domain and/or the gRNA comprising the tail domain less susceptible to degradation or more bio-compatible, e.g., less immunogenic. In certain embodiments, the tail domain includes 1, 2, 3, 4, 5, 6, 7, or 8 or more modifications, and in certain of these embodiments the tail domain includes 1, 2, 3, or 4 modifications within five nucleotides of its 5′ and/or 3′ end. In certain embodiments, the tail domain comprises modifications at two or more consecutive nucleotides.

[0591] In certain embodiments, modifications to one or more nucleotides in the tail domain are selected to not interfere with targeting efficacy, which can be evaluated by testing a candidate modification as set forth below. gRNAs having a candidate tail domain having a selected length, sequence, degree of complementarity, or degree of modification can be evaluated using a system as set forth below. The candidate tail domain can be placed, either alone or with one or more other candidate changes in a gRNA molecule/Cas9 molecule system known to be functional with a selected target, and evaluated.

[0592] In certain embodiments, the tail domain includes nucleotides at the 3′ end that are related to the method of in vitro or in vivo transcription. When a T7 promoter is used for in vitro transcription of the gRNA, these nucleotides may be any nucleotides present before the 3′ end of the DNA template. When a U6 promoter is used for in vivo transcription, these nucleotides may be the sequence UUUUUU. When an H1 promoter is used for transcription, these nucleotides may be the sequence UUUU. When alternate pol-III promoters are used, these nucleotides may be various numbers of uracil bases depending on, e.g., the termination signal of the pol-III promoter, or they may include alternate bases.

[0593] In certain embodiments, the proximal and tail domain taken together comprise, consist of, or consist essentially of the sequence set forth in SEQ ID NOs:32, 33, 34, 35, 36, or 37.

[0594] 4.7 Exemplary Unimolecular/Chimeric gRNAs

[0595] In certain embodiments, a gRNA as disclosed herein has the structure: 5′ [targeting domain]-[first complementarity domain]-[linking domain]-[second complementarity domain]-[proximal domain]-[tail domain]-3′, wherein:

[0596] the targeting domain comprises a core domain and optionally a secondary domain, and is 10 to 50 nucleotides in length;

[0597] the first complementarity domain is 5 to 25 nucleotides in length and, in certain embodiments has at least about 50%, about 60%, about 70%, about 80%, about 85%, about 90%, or about 95% homology with a reference first complementarity domain disclosed herein;

[0598] the linking domain is 1 to 5 nucleotides in length;

[0599] the second complementarity domain is 5 to 27 nucleotides in length and, in certain embodiments has at least about 50%, about 60%, about 70%, about 80%, about 85%, about 90%, or about 95% homology with a reference second complementarity domain disclosed herein;

[0600] the proximal domain is 5 to 20 nucleotides in length and, in certain embodiments has at least about 50%, about 60%, about 70%, about 80%, about 85%, about 90%, or about 95% homology with a reference proximal domain disclosed herein; and

[0601] the tail domain is absent or a nucleotide sequence is 1 to 50 nucleotides in length and, in certain embodiments has at least about 50%, about 60%, about 70%, about 80%, about 85%, about 90%, or about 95% homology with a reference tail domain disclosed herein.

[0602] In certain embodiments, a unimolecular gRNA as disclosed herein comprises, preferably from 5′ to 3′:
[0603] a targeting domain, e.g., comprising 10-50 nucleotides;
[0604] a first complementarity domain, e.g., comprising 15, 16, 17, 18, 19, 20, 21, 22, 23, 24, 25, or 26 nucleotides;
[0605] a linking domain;
[0606] a second complementarity domain;
[0607] a proximal domain; and
[0608] a tail domain,

[0609] wherein,
[0610] (a) the proximal and tail domain, when taken together, comprise at least 15, 18, 20, 25, 30, 31, 35, 40, 45, 49, 50, or 53 nucleotides;
[0611] (b) there are at least 15, 18, 20, 25, 30, 31, 35, 40, 45, 49, 50, or 53 nucleotides 3′ to the last nucleotide of the second complementarity domain; or
[0612] (c) there are at least 16, 19, 21, 26, 31, 32, 36, 41, 46, 50, 51, or 54 nucleotides 3′ to the last nucleotide of the second complementarity domain that is complementary to its corresponding nucleotide of the first complementarity domain.

[0613] In certain embodiments, the sequence from (a), (b), and/or (c) has at least about 50%, about 60%, about 70%, about 75%, about 60%, about 70%, about 80%, about 85%, about 90%, about 95%, or about 99% homology with the corresponding sequence of a naturally occurring gRNA, or with a gRNA described herein.

[0614] In certain embodiments, the proximal and tail domain, when taken together, comprise at least 15, 18, 20, 25, 30, 31, 35, 40, 45, 49, 50, or 53 nucleotides.

[0615] In certain embodiments, there are at least 15, 18, 20, 25, 30, 31, 35, 40, 45, 49, 50, or 53 nucleotides 3′ to the last nucleotide of the second complementarity domain.

[0616] In certain embodiments, there are at least 16, 19, 21, 26, 31, 32, 36, 41, 46, 50, 51, or 54 nucleotides 3′ to the last nucleotide of the second complementarity domain that are complementary to the corresponding nucleotides of the first complementarity domain.

[0617] In certain embodiments, the targeting domain consists of, consists essentially of, or comprises 16, 17, 18, 19, 20, 21, 22, 23, 24, 25, or 26 nucleotides (e.g., 16, 17, 18, 19, 20, 21, 22, 23, 24, 25, or 26 consecutive nucleotides) complementary or partially complementary to the target domain or a portion thereof, e.g., the targeting domain is 16, 17, 18, 19, 20, 21, 22, 23, 24, 25, or 26 nucleotides in length. In certain of these embodiments, the targeting domain is complementary to the target domain over the entire length of the targeting domain, the entire length of the target domain, or both.

[0618] In certain embodiments, a unimolecular or chimeric gRNA molecule disclosed herein (comprising a targeting domain, a first complementary domain, a linking domain, a second complementary domain, a proximal domain and, optionally, a tail domain) comprises the amino acid sequence set forth in SEQ ID NO:42, wherein the targeting domain is listed as 20 N's (residues 1-20) but may range in length from 16 to 26 nucleotides, and wherein the final six residues (residues 97-102) represent a termination signal for the U6 promoter buy may be absent or fewer in number. In certain embodiments, the unimolecular, or chimeric, gRNA molecule is a S. pyogenes gRNA molecule.

[0619] In certain embodiments, a unimolecular or chimeric gRNA molecule disclosed herein (comprising a targeting domain, a first complementary domain, a linking domain, a second complementary domain, a proximal domain and, optionally, a tail domain) comprises the amino acid sequence set forth in SEQ ID NO:38, wherein the targeting domain is listed as 20 Ns (residues 1-20) but may range in length from 16 to 26 nucleotides, and wherein the final six residues (residues 97-102) represent a termination signal for the U6 promoter but may be absent or fewer in number. In certain embodiments, the unimolecular or chimeric gRNA molecule is an S. aureus gRNA molecule.

[0620] The sequences and structures of exemplary chimeric gRNAs are also shown in FIGS. 1H-1I.

[0621] 4.8 Exemplary Modular gRNAs

[0622] In certain embodiments, a modular gRNA disclosed herein comprises:
[0623] a first strand comprising, preferably from 5′ to 3′;
   [0624] a targeting domain, e.g., comprising 15, 16, 17, 18, 19, 20, 21, 22, 23, 24, 25, or 26 nucleotides;
   [0625] a first complementarity domain; and
[0626] a second strand, comprising, preferably from 5′ to 3′:
   [0627] optionally a 5′ extension domain;
   [0628] a second complementarity domain;
   [0629] a proximal domain; and
   [0630] a tail domain,

[0631] wherein:
[0632] (a) the proximal and tail domain, when taken together, comprise at least 15, 18, 20, 25, 30, 31, 35, 40, 45, 49, 50, or 53 nucleotides;
[0633] (b) there are at least 15, 18, 20, 25, 30, 31, 35, 40, 45, 49, 50, or 53 nucleotides 3′ to the last nucleotide of the second complementarity domain; or
[0634] (c) there are at least 16, 19, 21, 26, 31, 32, 36, 41, 46, 50, 51, or 54 nucleotides 3′ to the last nucleotide of the second complementarity domain that is complementary to its corresponding nucleotide of the first complementarity domain.

[0635] In certain embodiments, the sequence from (a), (b), or (c), has at least about 50%, about 60%, about 70%, about 80%, about 85%, about 90%, about 95%, or about 99% homology with the corresponding sequence of a naturally occurring gRNA, or with a gRNA described herein.

[0636] In certain embodiments, the proximal and tail domain, when taken together, comprise at least 15, 18, 20, 25, 30, 31, 35, 40, 45, 49, 50, or 53 nucleotides.

[0637] In certain embodiments, there are at least 15, 18, 20, 25, 30, 31, 35, 40, 45, 49, 50, or 53 nucleotides 3′ to the last nucleotide of the second complementarity domain.

[0638] In certain embodiments, there are at least 16, 19, 21, 26, 31, 32, 36, 41, 46, 50, 51, or 54 nucleotides 3′ to the last nucleotide of the second complementarity domain that is complementary to its corresponding nucleotide of the first complementarity domain.

[0639] In certain embodiments, the targeting domain comprises, has, or consists of, 16, 17, 18, 19, 20, 21, 22, 23, 24, 25, or 26 nucleotides (e.g., 16, 17, 18, 19, 20, 21, 22, 23, 24, 25, or 26 consecutive nucleotides) having complementarity with the target domain, e.g., the targeting domain is 16, 17, 18, 19, 20, 21, 22, 23, 24, 25, or 26 nucleotides in length.

[0640] In certain embodiments, the targeting domain consists of, consists essentially of, or comprises 16, 17, 18, 19, 20, 21, 22, 23, 24, 25, or 26 nucleotides (e.g., 16, 17, 18, 19, 20, 21, 22, 23, 24, 25, or 26 consecutive nucleotides) complementary to the target domain or a portion thereof. In certain of these embodiments, the targeting domain is complementary to the target domain over the entire length of the targeting domain, the entire length of the target domain, or both.

[0641] In certain embodiments, the targeting domain comprises, has, or consists of, 16 nucleotides (e.g., 16 consecutive nucleotides) having complementarity with the target domain, e.g., the targeting domain is 16 nucleotides in length; and the proximal and tail domain, when taken together, comprise at least 15, 18, 20, 25, 30, 31, 35, 40, 45, 49, 50, or 53 nucleotides.

[0642] In certain embodiments, the targeting domain comprises, has, or consists of, 16 nucleotides (e.g., 16 consecutive nucleotides) having complementarity with the target domain, e.g., the targeting domain is 16 nucleotides in length; and there are at least 15, 18, 20, 25, 30, 31, 35, 40, 45, 49, 50, or 53 nucleotides 3′ to the last nucleotide of the second complementarity domain.

[0643] In certain embodiments, the targeting domain comprises, has, or consists of, 16 nucleotides (e.g., 16 consecutive nucleotides) having complementarity with the target domain, e.g., the targeting domain is 16 nucleotides in length; and there are at least 16, 19, 21, 26, 31, 32, 36, 41, 46, 50, 51, or 54 nucleotides 3′ to the last nucleotide of the second complementarity domain that is complementary to its corresponding nucleotide of the first complementarity domain.

[0644] In certain embodiments, the targeting domain has, or consists of, 17 nucleotides (e.g., 17 consecutive nucleotides) having complementarity with the target domain, e.g., the targeting domain is 17 nucleotides in length; and the proximal and tail domain, when taken together, comprise at least 15, 18, 20, 25, 30, 31, 35, 40, 45, 49, 50, or 53 nucleotides.

[0645] In certain embodiments, the targeting domain has, or consists of, 17 nucleotides (e.g., 17 consecutive nucleotides) having complementarity with the target domain, e.g., the targeting domain is 17 nucleotides in length; and there are at least 15, 18, 20, 25, 30, 31, 35, 40, 45, 49, 50, or 53 nucleotides 3′ to the last nucleotide of the second complementarity domain.

[0646] In certain embodiments, the targeting domain has, or consists of, 17 nucleotides (e.g., 17 consecutive nucleotides) having complementarity with the target domain, e.g., the targeting domain is 17 nucleotides in length; and there are at least 16, 19, 21, 26, 31, 32, 36, 41, 46, 50, 51, or 54 nucleotides 3′ to the last nucleotide of the second complementarity domain that is complementary to its corresponding nucleotide of the first complementarity domain.

[0647] In certain embodiments, the targeting domain has, or consists of, 18 nucleotides (e.g., 18 consecutive nucleotides) having complementarity with the target domain, e.g., the targeting domain is 18 nucleotides in length; and the proximal and tail domain, when taken together, comprise at least 15, 18, 20, 25, 30, 31, 35, 40, 45, 49, 50, or 53 nucleotides.

[0648] In certain embodiments, the targeting domain has, or consists of, 18 nucleotides (e.g., 18 consecutive nucleotides) having complementarity with the target domain, e.g., the targeting domain is 18 nucleotides in length; and there are at least 15, 18, 20, 25, 30, 31, 35, 40, 45, 49, 50, or 53 nucleotides 3′ to the last nucleotide of the second complementarity domain.

[0649] In certain embodiments, the targeting domain has, or consists of, 18 nucleotides (e.g., 18 consecutive nucleotides) having complementarity with the target domain, e.g., the targeting domain is 18 nucleotides in length; and there are at least 16, 19, 21, 26, 31, 32, 36, 41, 46, 50, 51, or 54 nucleotides 3′ to the last nucleotide of the second complementarity domain that is complementary to its corresponding nucleotide of the first complementarity domain.

[0650] In certain embodiments, the targeting domain comprises, has, or consists of, 19 nucleotides (e.g., 19 consecutive nucleotides) having complementarity with the target domain, e.g., the targeting domain is 19 nucleotides in length; and the proximal and tail domain, when taken together, comprise at least 15, 18, 20, 25, 30, 31, 35, 40, 45, 49, 50, or 53 nucleotides.

[0651] In certain embodiments, the targeting domain comprises, has, or consists of, 19 nucleotides (e.g., 19 consecutive nucleotides) having complementarity with the target domain, e.g., the targeting domain is 19 nucleotides in length; and there are at least 15, 18, 20, 25, 30, 31, 35, 40, 45, 49, 50, or 53 nucleotides 3′ to the last nucleotide of the second complementarity domain.

[0652] In certain embodiments, the targeting domain comprises, has, or consists of, 19 nucleotides (e.g., 19 consecutive nucleotides) having complementarity with the target domain, e.g., the targeting domain is 19 nucleotides in length; and there are at least 16, 19, 21, 26, 31, 32, 36, 41, 46, 50, 51, or 54 nucleotides 3′ to the last nucleotide of the second complementarity domain that is complementary to its corresponding nucleotide of the first complementarity domain.

[0653] In certain embodiments, the targeting domain comprises, has, or consists of, 20 nucleotides (e.g., 20 consecutive nucleotides) having complementarity with the target domain, e.g., the targeting domain is 20 nucleotides in length; and the proximal and tail domain, when taken together, comprise at least 15, 18, 20, 25, 30, 31, 35, 40, 45, 49, 50, or 53 nucleotides.

[0654] In certain embodiments, the targeting domain comprises, has, or consists of, 20 nucleotides (e.g., 20 consecutive nucleotides) having complementarity with the target domain, e.g., the targeting domain is 20 nucleotides in length; and there are at least 15, 18, 20, 25, 30, 31, 35, 40, 45, 49, 50, or 53 nucleotides 3′ to the last nucleotide of the second complementarity domain.

[0655] In certain embodiments, the targeting domain comprises, has, or consists of, 20 nucleotides (e.g., 20 consecutive nucleotides) having complementarity with the target domain, e.g., the targeting domain is 20 nucleotides in length; and there are at least 16, 19, 21, 26, 31, 32, 36, 41, 46, 50, 51, or 54 nucleotides 3′ to the last nucleotide of the second complementarity domain that is complementary to its corresponding nucleotide of the first complementarity domain.

[0656] In certain embodiments, the targeting domain comprises, has, or consists of, 21 nucleotides (e.g., 21 consecutive nucleotides) having complementarity with the target domain, e.g., the targeting domain is 21 nucleotides in length; and the proximal and tail domain, when taken together, comprise at least 15, 18, 20, 25, 30, 31, 35, 40, 45, 49, 50, or 53 nucleotides.

[0657] In certain embodiments, the targeting domain comprises, has, or consists of, 21 nucleotides (e.g., 21 consecutive nucleotides) having complementarity with the target domain, e.g., the targeting domain is 21 nucleotides in length; and there are at least 15, 18, 20, 25, 30, 31, 35, 40, 45, 49, 50, or 53 nucleotides 3′ to the last nucleotide of the second complementarity domain.

[0658] In certain embodiments, the targeting domain comprises, has, or consists of, 21 nucleotides (e.g., 21 consecutive nucleotides) having complementarity with the target domain, e.g., the targeting domain is 21 nucleotides in length; and there are at least 16, 19, 21, 26, 31, 32, 36, 41, 46, 50, 51, or 54 nucleotides 3′ to the last nucleotide of the second complementarity domain that is complementary to its corresponding nucleotide of the first complementarity domain.

[0659] In certain embodiments, the targeting domain comprises, has, or consists of, 22 nucleotides (e.g., 22 consecutive nucleotides) having complementarity with the target domain, e.g., the targeting domain is 22 nucleotides in length; and the proximal and tail domain, when taken together, comprise at least 15, 18, 20, 25, 30, 31, 35, 40, 45, 49, 50, or 53 nucleotides.

[0660] In certain embodiments, the targeting domain comprises, has, or consists of, 22 nucleotides (e.g., 22 consecutive nucleotides) having complementarity with the target domain, e.g., the targeting domain is 22 nucleotides in length; and there are at least 15, 18, 20, 25, 30, 31, 35, 40, 45, 49, 50, or 53 nucleotides 3′ to the last nucleotide of the second complementarity domain.

[0661] In certain embodiments, the targeting domain comprises, has, or consists of, 22 nucleotides (e.g., 22 consecutive nucleotides) having complementarity with the target domain, e.g., the targeting domain is 22 nucleotides in length; and there are at least 16, 19, 21, 26, 31, 32, 36, 41, 46, 50, 51, or 54 nucleotides 3′ to the last nucleotide of the second complementarity domain that is complementary to its corresponding nucleotide of the first complementarity domain.

[0662] In certain embodiments, the targeting domain comprises, has, or consists of, 23 nucleotides (e.g., 23 consecutive nucleotides) having complementarity with the target domain, e.g., the targeting domain is 23 nucleotides in length; and the proximal and tail domain, when taken together, comprise at least 15, 18, 20, 25, 30, 31, 35, 40, 45, 49, 50, or 53 nucleotides.

[0663] In certain embodiments, the targeting domain comprises, has, or consists of, 23 nucleotides (e.g., 23 consecutive nucleotides) having complementarity with the target domain, e.g., the targeting domain is 23 nucleotides in length; and there are at least 15, 18, 20, 25, 30, 31, 35, 40, 45, 49, 50, or 53 nucleotides 3′ to the last nucleotide of the second complementarity domain.

[0664] In certain embodiments, the targeting domain comprises, has, or consists of, 23 nucleotides (e.g., 23 consecutive nucleotides) having complementarity with the target domain, e.g., the targeting domain is 23 nucleotides in length; and there are at least 16, 19, 21, 26, 31, 32, 36, 41, 46, 50, 51, or 54 nucleotides 3′ to the last nucleotide of the second complementarity domain that is complementary to its corresponding nucleotide of the first complementarity domain.

[0665] In certain embodiments, the targeting domain comprises, has, or consists of, 24 nucleotides (e.g., 24 consecutive nucleotides) having complementarity with the target domain, e.g., the targeting domain is 24 nucleotides in length; and the proximal and tail domain, when taken together, comprise at least 15, 18, 20, 25, 30, 31, 35, 40, 45, 49, 50, or 53 nucleotides.

[0666] In certain embodiments, the targeting domain comprises, has, or consists of, 24 nucleotides (e.g., 24 consecutive nucleotides) having complementarity with the target domain, e.g., the targeting domain is 24 nucleotides in length; and there are at least 15, 18, 20, 25, 30, 31, 35, 40, 45, 49, 50, or 53 nucleotides 3′ to the last nucleotide of the second complementarity domain.

[0667] In certain embodiments, the targeting domain comprises, has, or consists of, 24 nucleotides (e.g., 24 consecutive nucleotides) having complementarity with the target domain, e.g., the targeting domain is 24 nucleotides in length; and there are at least 16, 19, 21, 26, 31, 32, 36, 41, 46, 50, 51, or 54 nucleotides 3′ to the last nucleotide of the second complementarity domain that is complementary to its corresponding nucleotide of the first complementarity domain.

[0668] In certain embodiments, the targeting domain comprises, has, or consists of, 25 nucleotides (e.g., 25 consecutive nucleotides) having complementarity with the target domain, e.g., the targeting domain is 25 nucleotides in length; and the proximal and tail domain, when taken together, comprise at least 15, 18, 20, 25, 30, 31, 35, 40, 45, 49, 50, or 53 nucleotides.

[0669] In certain embodiments, the targeting domain comprises, has, or consists of, 25 nucleotides (e.g., 25 consecutive nucleotides) having complementarity with the target domain, e.g., the targeting domain is 25 nucleotides in length; and there are at least 15, 18, 20, 25, 30, 31, 35, 40, 45, 49, 50, or 53 nucleotides 3′ to the last nucleotide of the second complementarity domain.

[0670] In certain embodiments, the targeting domain comprises, has, or consists of, 25 nucleotides (e.g., 25 consecutive nucleotides) having complementarity with the target domain, e.g., the targeting domain is 25 nucleotides in length; and there are at least 16, 19, 21, 26, 31, 32, 36, 41, 46, 50, 51, or 54 nucleotides 3′ to the last nucleotide of the second complementarity domain that is complementary to its corresponding nucleotide of the first complementarity domain.

[0671] In certain embodiments, the targeting domain comprises, has, or consists of, 26 nucleotides (e.g., 26 consecutive nucleotides) having complementarity with the target domain, e.g., the targeting domain is 26 nucleotides in length; and the proximal and tail domain, when taken together, comprise at least 15, 18, 20, 25, 30, 31, 35, 40, 45, 49, 50, or 53 nucleotides.

[0672] In certain embodiments, the targeting domain comprises, has, or consists of, 26 nucleotides (e.g., 26 consecutive nucleotides) having complementarity with the target domain, e.g., the targeting domain is 26 nucleotides in length; and there are at least 15, 18, 20, 25, 30, 31, 35, 40, 45, 49, 50, or 53 nucleotides 3′ to the last nucleotide of the second complementarity domain.

[0673] In certain embodiments, the targeting domain comprises, has, or consists of, 26 nucleotides (e.g., 26 consecutive nucleotides) having complementarity with the target domain, e.g., the targeting domain is 26 nucleotides in length; and there are at least 16, 19, 21, 26, 31, 32, 36, 41, 46, 50, 51, or 54 nucleotides 3′ to the last nucleotide of the second complementarity domain that is complementary to its corresponding nucleotide of the first complementarity domain.

[0674] 4.9 gRNA Delivery

[0675] In certain embodiments of the methods provided herein, the methods comprise delivery of one or more (e.g., two, three, or four) gRNA molecules as described herein. In certain of these embodiments, the gRNA molecules are delivered by intravenous injection, intramuscular injection, subcutaneous injection, or inhalation. In certain embodiments, the gRNA molecules are delivered with a Cas9 molecule in a genome-editing system.

### 5. Methods for Designing gRNAs

[0676] Methods for selecting, designing, and validating targeting domains for use in the gRNAs described herein are provided. Exemplary targeting domains for incorporation into gRNAs are also provided herein.

[0677] Methods for selection and validation of target sequences as well as off-target analyses have been described previously (see, e.g., Mali 2013; Hsu 2013; Fu 2014; Heigwer 2014; Bae 2014; Xiao 2014). For example, a software tool can be used to optimize the choice of potential targeting domains corresponding to a user's target sequence, e.g., to minimize total off-target activity across the genome. Off-target activity may be other than cleavage. For each possible targeting domain choice using S. pyogenes Cas9, the tool can identify all off-target sequences (preceding either NAG or NGG PAMs) across the genome that contain up to certain number (e.g., 1, 2, 3, 4, 5, 6, 7, 8, 9, or 10) of mismatched base-pairs. The cleavage efficiency at each off-target sequence can be predicted, e.g., using an experimentally-derived weighting scheme. Each possible targeting domain is then ranked according to its total predicted off-target cleavage; the top-ranked targeting domains represent those that are likely to have the greatest on-target cleavage and the least off-target cleavage. Other functions, e.g., automated reagent design for CRISPR construction, primer design for the on-target Surveyor assay, and primer design for high-throughput detection and quantification of off-target cleavage via next-gen sequencing, can also be included in the tool. Candidate targeting domains and gRNAs comprising those targeting domains can be functionally evaluated using methods known in the art and/or as set forth herein.

[0678] As a non-limiting example, targeting domains for use in gRNAs for use with S. pyogenes and S. aureus Cas9s were identified using a DNA sequence searching algorithm. 17-mer and 20-mer targeting domains were designed for S. pyogenes targets, while 18-mer, 19-mer, 20-mer, 21-mer, 22-mer, 23-mer, and 24-mer targeting domains were designed for S. aureus targets. gRNA design was carried out using custom gRNA design software based on the public tool cas-offinder (Bae 2014). This software scores guides after calculating their genome-wide off-target propensity. Typically matches ranging from perfect matches to 7 mismatches are considered for guides ranging in length from 17 to 24. Once the off-target sites are computationally determined, an aggregate score is calculated for each guide and summarized in a tabular output using a web-interface. In addition to identifying potential target sites adjacent to PAM sequences, the software also identifies all PAM adjacent sequences that differ by 1, 2, 3, or more than 3 nucleotides from the selected target sites. Genomic DNA sequences for each gene (e.g., DMD gene) were obtained from the UCSC Genome browser and sequences were screened for repeat elements using the publically available RepeatMasker program. RepeatMasker searches input DNA sequences for repeated elements and regions of low complexity. The output is a detailed annotation of the repeats present in a given query sequence.

[0679] Following identification, targeting domain were ranked into tiers based on their distance to the target site, their orthogonality, and presence of a 5′ G (based on identification of close matches in the human genome containing a relevant PAM, e.g., an NGG PAM for S. pyogenes, or an NNGRRT (SEQ ID NO:204) or NNGRRV (SEQ ID NO:205) PAM for S. aureus). Orthogonality refers to the number of sequences in the human genome that contain a minimum number of mismatches to the target sequence. A “high level of orthogonality” or “good orthogonality” may, for example, refer to 20-mer targeting domain that have no identical sequences in the human genome besides the intended target, nor any sequences that contain one or two mismatches in the target sequence. Targeting domains with good orthogonality are selected to minimize off-target DNA cleavage.

[0680] Targeting domains were identified for both single-gRNA nuclease cleavage and for a dual-gRNA paired “nickase” strategy. Criteria for selecting targeting domains and the determination of which targeting domains can be used for the dual-gRNA paired “nickase” strategy is based on two considerations:
[0681] (1) Targeting domain pairs should be oriented on the DNA such that PAMs are facing out and cutting with the D10A Cas9 nickase will result in 5′ overhangs; and
[0682] (2) An assumption that cleaving with dual nickase pairs will result in deletion of the entire intervening sequence at a reasonable frequency. However, cleaving with dual nickase pairs can also result in indel mutations at the site of only one of the gRNAs. Candidate pair members can be tested for how efficiently they remove the entire sequence versus causing indel mutations at the target site of one targeting domain.

[0683] 5.1 Targeting Domains for Use in Altering a DMD Target Position

[0684] Targeting domains for use in gRNAs for altering a DMD target position in conjunction with the methods disclosed herein were identified and ranked into 4 tiers for S. pyogenes and 5 tiers for S. aureus.

[0685] For S. pyogenes, tier 1 targeting domains were selected based on (1) the target site, e.g., an intron (e.g., intron 44, 45, 46, 47, 48, 49, 50, 51, 52, 53, 54, or 55), (2) a high level of orthogonality, and (3) the presence of 5′ G. Tier 2 targeting domains were selected based on (1) the target site, e.g., an intron (e.g., intron 44, 45, 46, 47, 48, 49, 50, 51, 52, 53, 54, or 55), and (2) a high level of orthogonality. Tier 3 targeting domains were selected based on (1) the target site, e.g., an intron (e.g., intron 44, 45, 46, 47, 48, 49, 50, 51, 52, 53, 54, or 55) site and (2) the presence of 5′ G. Tier 4 targeting domains were selected based on the target site, e.g., an intron (e.g., intron 44, 45, 46, 47, 48, 49, 50, 51, 52, 53, 54, or 55).

[0686] For S. aureus, tier 1 targeting domains were selected based on (1) the target site, e.g., an intron (e.g., intron 44, 45, 46, 47, 48, 49, 50, 51, 52, 53, 54, or 55), (2) a high level of orthogonality, (3) the presence of 5′ G, and (4) PAM having the sequence NNGRRT (SEQ ID NO:204). Tier 2 targeting domains were selected based on (1) the target site, e.g., an intron (e.g., intron 44, 45, 46, 47, 48, 49, 50, 51, 52, 53, 54, or 55), (2) a high level of orthogonality, and (3) PAM having the sequence NNGRRT (SEQ ID NO:204). Tier 3 targeting domains were selected based on (1) the target site, e.g., an intron (e.g., intron 44, 45, 46, 47, 48, 49, 50, 51, 52, 53, 54, or 55), (2) the presence of 5′ G, and (3) PAM having the sequence NNGRRT (SEQ ID NO:204). Tier 4 targeting domains were selected based on (1) the target site, e.g., an intron (e.g., intron 44, 45, 46, 47, 48, 49, 50, 51, 52, 53, 54, or 55), and (2) PAM having the sequence NNGRRT (SEQ ID NO:204). Tier 5 targeting domains were selected based on (1) the target site, e.g., an intron (e.g., intron 44, 45, 46, 47, 48, 49, 50, 51, 52, 53, 54, or 55), and (2) PAM having the sequence NNGRRV (SEQ ID NO:205).

[0687] Note that tiers are non-inclusive (each targeting domain is listed only once for the strategy). In certain instances, no targeting domain was identified based on the criteria of the particular tier. The identified targeting domains are summarized below in Table 1.

TABLE 1
Amino acid sequences of S. pyogenes
and S. aureus targeting domains

| | S. aureus | S. pyogenes |
|---|---|---|
| Tier 1 | SEQ ID NOs: | SEQ ID NOs: |
| | 206-23994 | 692253-694972 |
| Tier 2 | SEQ ID NOs: | SEQ ID NOs: |
| | 23995-127213 | 694973-703214 |
| Tier 3 | SEQ ID NOs: | SEQ ID NOs: |
| | 127214-134855 | 703215-727252 |
| Tier 4 | SEQ ID NOs: | SEQ ID NOs: |
| | 134856-167390 | 727253-826366 |
| Tier 5 | SEQ ID NOs: | Not applicable |
| | 167391-692252 | |

[0688] In certain embodiments, two or more (e.g., three or four) gRNA molecules are used with one Cas9 molecule. In certain embodiments, when two or more (e.g., three or four) gRNAs are used with two or more Cas9 molecules, at least one Cas9 molecule is from a different species than the other Cas9 molecule(s). For example, when two gRNA molecules are used with two Cas9 molecules, one Cas9 molecule can be from one species and the other Cas9 molecule can be from a different species. Both Cas9 species are used to generate a single or double-strand break, as desired.

[0689] Any of the targeting domains in the tables described herein can be used with a Cas9 molecule that generates a single strand break (e.g., S. pyogenes or S. aureus Cas9 nickase) or with a Cas9 molecule that generates a double strand break (e.g., S. pyogenes or S. aureus Cas9 nuclease).

[0690] In certain embodiments, two gRNAs are used with two Cas9 molecules, the two Cas9 molecules are from different species. Both Cas9 species can be used to generate a single or double-strand break, as desired.

[0691] Any upstream gRNA described herein can be paired with any downstream gRNA described herein. When an upstream gRNA designed for use with one species of Cas9 is paired with a downstream gRNA designed for use from a different species of Cas9, both Cas9 species are used to generate a single or double-strand break, as desired.

[0692] 5.2 Deletion Size

[0693] The presently disclosed genome-editing systems and compositions can generate deletions in the DMD gene, e.g., the human DMD gene. In certain embodiments, the genome-editing system is configured to form two double stand breaks (a first double strand break and a second double strand break) in two introns (a first intron and a second intron) flanking a target position of the DMD gene, thereby deleting a segment of the DMD gene comprising the DMD target position. The DMD target position can be a DMD exonic target position or a DMD intra-exonic target position. In certain embodiments, the DMD target position is a DMD exonic target position. Deletion of the DMD exonic target position can optimize the DMD sequence of a subject suffering from Duchenne muscular dystrophy, Becker muscular dystrophy (BMD), or Dilated Cardiomyopathy (DCM) Type 3B, e.g., it can increase the function or activity of the encoded dystrophin protein, or results in an improvement in the disease state of the subject. In certain embodiments, excision of the DMD exonic target position restores reading frame. The DMD exonic target position can comprise one or more exons of the DMD gene. In certain embodiments, the DMD target position comprises exon 51 of the DMD gene (e.g., a human DMD gene). In certain embodiments, the DMD target position comprises exons 45-55 of the DMD gene (e.g., a human DMD gene). In certain embodiments, the DMD target position comprises exons 51-55 of the DMD gene (e.g., a human DMD gene).

[0694] The deletion efficiency of the presently disclosed genome-editing systems and compositions can be related to the deletion size, i.e., the size of the segment deleted by the systems and compositions. In certain embodiments, the length or size of specific deletions is determined by the distance between the PAM sequences in the gene being targeted (e.g., a DMD gene). In certain embodiments, a specific deletion of a segment of the DMD gene, which is defined in terms of its length and a sequence it comprises (e.g., exon 51), is the result of breaks made adjacent to specific PAM sequences within the target gene (e.g., a DMD gene).

[0695] In certain embodiments, the deletion size is about 800-72,000 base pairs (bp), e.g., about 800-900, about 900-1000, about 1200-1400, about 1500-2600, about 2600-2700, about 3000-3300, about 5200-5500, about 20,000-30,000, about 35,000-45,000, or about 60,000-72,000. In certain embodiments, the deletion size is about 800-900, about 1500-2600, about 5200-5500, about 20,000-30,000, about 35,000-45,000, or about 60,000-72,000 bp. In certain embodiments, the deletion size is 806 base pairs, 867 base pairs, 1,557 base pairs, 2,527 base pairs, 5,305 base pairs, 5,415 base pairs, 20,768 base pairs, 27,398 base pairs, 36,342 base pairs, 44,269 base pairs, 60,894 base pairs, and 71,832 base pairs. In certain embodiments, the deletion size is about 900-1000, about 1200-1400, about 1500-2600, about 2600-2700 bp, or about 3000-3300. In certain embodiments, the deletion size is selected from the group consisting of 972 bp, 1723 bp, 893 bp, 2665 bp, 1326 bp, 2077 bp, 1247 bp, 3019 bp, 1589 bp, 2340 bp, 1852 bp, and 3282 bp. In certain embodiments, the deletion size is larger than about 150 kilobase pairs (kb), e.g., about 300-400 kb. In certain embodiments, the deletion size is about 300-400 kb. In certain embodiments, the deletion size is 341 kb. In certain embodiments, the deletion size is about 100-150 kb. In certain embodiments, the deletion size is 146,500 bp.

### 6. Cas9 Molecules

[0696] Cas9 molecules of a variety of species can be used in the methods and compositions described herein. While S. pyogenes and S. aureus Cas9 molecules are the subject of much of the disclosure herein, Cas9 molecules of, derived from, or based on the Cas9 proteins of other species listed herein can be used as well. These include, for example, Cas9 molecules from Acidovorax avenae, Actinobacillus pleuropneumoniae, Actinobacillus succinogenes, Actinobacillus suis, Actinomyces sp., cycliphilus denitrificans, Aminomonas paucivorans, Bacillus cereus, Bacillus smithii, Bacillus thuringiensis, Bacteroides sp., Blastopirellula marina, Bradyrhizobium sp., Brevibacillus laterosporus, Campylobacter coli, Campylobacter jejuni, Campylobacter lari, Candidatus Puniceispirillum, Clostridium cellulolyticum, Clostridium perfringens, Corynebacterium accolens, Corynebacterium diphtheria, Corynebacterium matruchotii, Dinoroseobacter shibae, Eubacterium dolichum, gamma proteobacterium, Gluconacetobacter diazotrophicus, Haemophilus parainfluenzae, Haemophilus sputorum, Helicobacter canadensis, Helicobacter cinaedi, Helicobacter mustelae, Ilyobacter polytropus, Kingella kingae, Lactobacillus crispatus, Listeria ivanovii, Listeria monocytogenes, Listeriaceae bacterium, Methylocystis sp., Methylosinus trichosporium, Mobiluncus mulieris, Neisseria bacilliformis, Neisseria cinerea, Neisseria flavescens, Neisseria lactamica, Neisseria sp., Neisseria wadsworthii, Nitrosomonas sp., Parvibaculum lavamentivorans, Pasteurella multocida, Phascolarctobacterium succinatutens, Ralstonia syzygii, Rhodopseudomonas palustris, Rhodovulum sp., Simonsiella muelleri, Sphingomonas sp., Sporolactobacillus vineae, Staphylococcus lugdunensis, Streptococcus sp., Subdoligranulum sp., Tistrella mobilis, Treponema sp., or Verminephrobacter eiseniae.

[0697] 6.1. Cas9 Domains

[0698] Crystal structures have been determined for two different naturally occurring bacterial Cas9 molecules (Jinek 2014) and for S. pyogenes Cas9 with a guide RNA (e.g., a synthetic fusion of crRNA and tracrRNA) (Nishimasu 2014; Anders 2014).

[0699] A naturally occurring Cas9 molecule comprises two lobes: a recognition (REC) lobe and a nuclease (NUC) lobe; each of which further comprise domains described herein. FIGS. 8A-8B provide a schematic of the organization of important Cas9 domains in the primary structure. The domain nomenclature and the numbering of the amino acid residues encompassed by each domain used throughout this disclosure is as described previously (Nishimasu 2014). The numbering of the amino acid residues is with reference to Cas9 from S. pyogenes.

[0700] The REC lobe comprises the arginine-rich bridge helix (BH), the REC1 domain, and the REC2 domain. The REC lobe does not share structural similarity with other known proteins, indicating that it is a Cas9-specific functional domain. The BH domain is a long a helix and arginine rich region and comprises amino acids 60-93 of the sequence of S. pyogenes Cas9. The REC1 domain is important for recognition of the repeat:anti-repeat duplex, e.g., of a gRNA or a tracrRNA, and is therefore critical for Cas9 activity by recognizing the target sequence. The REC1 domain comprises two REC1 motifs at amino acids 94 to 179 and 308 to 717 of the sequence of S. pyogenes Cas9. These two REC1 domains, though separated by the REC2 domain in the linear primary structure, assemble in the tertiary structure to form the REC1 domain. The REC2 domain, or parts thereof, may also play a role in the recognition of the repeat:anti-repeat duplex. The REC2 domain comprises amino acids 180-307 of the sequence of S. pyogenes Cas9.

[0701] The NUC lobe comprises the RuvC domain, the HNH domain, and the PAM-interacting (PI) domain. The RuvC domain shares structural similarity to retroviral integrase superfamily members and cleaves a single strand, e.g., the non-complementary strand of the target nucleic acid molecule. The RuvC domain is assembled from the three split RuvC motifs (RuvC I, RuvCII, and RuvCIII, which are often commonly referred to in the art as RuvCI domain, or N-terminal RuvC domain, RuvCII domain, and RuvCIII domain) at amino acids 1-59, 718-769, and 909-1098, respectively, of the sequence of S. pyogenes Cas9. Similar to the REC1 domain, the three RuvC motifs are linearly separated by other domains in the primary structure, however in the tertiary structure, the three RuvC motifs assemble and form the RuvC domain. The HNH domain shares structural similarity with HNH endonucleases and cleaves a single strand, e.g., the complementary strand of the target nucleic acid molecule. The HNH domain lies between the RuvC II-III motifs and comprises amino acids 775-908 of the sequence of S. pyogenes Cas9. The PI domain interacts with the PAM of the target nucleic acid molecule, and comprises amino acids 1099-1368 of the sequence of S. pyogenes Cas9.

[0702] 6.1.1 RuvC-Like Domain and HNH-Like Domain

[0703] In certain embodiments, a Cas9 molecule or Cas9 polypeptide comprises an HNH-like domain and a RuvC-like domain, and in certain of these embodiments cleavage activity is dependent on the RuvC-like domain and the HNH-like domain. A Cas9 molecule or Cas9 polypeptide can comprise one or more of a RuvC-like domain and an HNH-like domain. In certain embodiments, a Cas9 molecule or Cas9 polypeptide comprises a RuvC-like domain, e.g., a RuvC-like domain described below, and/or an HNH-like domain, e.g., an HNH-like domain described below.

### RuvC-Like Domains

[0704] In certain embodiments, a RuvC-like domain cleaves a single strand, e.g., the non-complementary strand of the target nucleic acid molecule. The Cas9 molecule or Cas9 polypeptide can include more than one RuvC-like domain (e.g., one, two, three or more RuvC-like domains). In certain embodiments, a RuvC-like domain is at least 5, 6, 7, 8 amino acids in length but not more than 20, 19, 18, 17, 16 or 15 amino acids in length. In certain embodiments, the Cas9 molecule or Cas9 polypeptide comprises an N-terminal RuvC-like domain of about 10 to 20 amino acids, e.g., about 15 amino acids in length.

[0705] 6.1.2 N-Terminal RuvC-Like Domains

[0706] Some naturally occurring Cas9 molecules comprise more than one RuvC-like domain with cleavage being dependent on the N-terminal RuvC-like domain. Accordingly, a Cas9 molecule or Cas9 polypeptide can comprise an N-terminal RuvC-like domain. Exemplary N-terminal RuvC-like domains are described below.

[0707] In certain embodiments, a Cas9 molecule or Cas9 polypeptide comprises an N-terminal RuvC-like domain comprising an amino acid sequence of Formula I:

(SEQ ID NO: 20)

D-X₁-G-X₂-X₃-X₄-X₅-G-X₆-X₇-X₈-X₉,

[0708] wherein,

[0709] X₁ is selected from I, V, M, L, and T (e.g., selected from I, V, and L);

[0710] X₂ is selected from T, I, V, S, N, Y, E, and L (e.g., selected from T, V, and I);

[0711] X₃ is selected from N, S, G, A, D, T, R, M, and F (e.g., A or N);

[0712] X₄ is selected from S, Y, N, and F (e.g., S);

[0713] X₅ is selected from V, I, L, C, T, and F (e.g., selected from V, I and L);

[0714] X₆ is selected from W, F, V, Y, S, and L (e.g., W);

[0715] X₇ is selected from A, S, C, V, and G (e.g., selected from A and S);

[0716] X₈ is selected from V, I, L, A, M, and H (e.g., selected from V, I, M and L); and

[0717] X₉ is selected from any amino acid or is absent (e.g., selected from T, V, I, L, Δ, F, S, A, Y, M, and R, or, e.g., selected from T, V, I, L, and Δ).

[0718] In certain embodiments, the N-terminal RuvC-like domain differs from a sequence of SEQ ID NO:20 by as many as 1 but no more than 2, 3, 4, or 5 residues.

[0719] In certain embodiments, the N-terminal RuvC-like domain is cleavage competent. In other embodiments, the N-terminal RuvC-like domain is cleavage incompetent.

[0720] In certain embodiments, a Cas9 molecule or Cas9 polypeptide comprises an N-terminal RuvC-like domain comprising an amino acid sequence of Formula II:

(SEQ ID NO: 21)

D-X₁-G-X₂-X₃-S-X₅-G-X₆-X₇-X₈-X₉,

[0721] wherein

[0722] X₁ is selected from I, V, M, L, and T (e.g., selected from I, V, and L);

[0723] X₂ is selected from T, I, V, S, N, Y, E, and L (e.g., selected from T, V, and I);

[0724] X₃ is selected from N, S, G, A, D, T, R, M and F (e.g., A or N);

[0725] X₅ is selected from V, I, L, C, T, and F (e.g., selected from V, I and L);

[0726] X₆ is selected from W, F, V, Y, S, and L (e.g., W);

[0727] X₇ is selected from A, S, C, V, and G (e.g., selected from A and S);

[0728] X₈ is selected from V, I, L, A, M, and H (e.g., selected from V, I, M and L); and

[0729] X₉ is selected from any amino acid or is absent (e.g., selected from T, V, I, L, Δ, F, S, A, Y, M, and R or selected from e.g., T, V, I, L, and Δ).

[0730] In certain embodiments, the N-terminal RuvC-like domain differs from a sequence of SEQ ID NO:21 by as many as 1 but not more than 2, 3, 4, or 5 residues.

[0731] In certain embodiments, the N-terminal RuvC-like domain comprises an amino acid sequence of Formula III:

(SEQ ID NO: 22)

D-I-G-X₂-X₃-S-V-G-W-A-X₈-X₉,

[0732] wherein

[0733] X₂ is selected from T, I, V, S, N, Y, E, and L (e.g., selected from T, V, and I);

[0734] X₃ is selected from N, S, G, A, D, T, R, M, and F (e.g., A or N);

[0735] X₈ is selected from V, I, L, A, M, and H (e.g., selected from V, I, M and L); and

[0736] X₉ is selected from any amino acid or is absent (e.g., selected from T, V, I, L, Δ, F, S, A, Y, M, and R or selected from e.g., T, V, I, L, and Δ).

[0737] In certain embodiments, the N-terminal RuvC-like domain differs from a sequence of SEQ ID NO:22 by as many as 1 but not more than, 2, 3, 4, or 5 residues.

[0738] In certain embodiments, the N-terminal RuvC-like domain comprises an amino acid sequence of Formula IV:

(SEQ ID NO: 23)

D-I-G-T-N-S-V-G-W-A-V-X,

[0739] wherein

[0740] X is a non-polar alkyl amino acid or a hydroxyl amino acid, e.g., X is selected from V, I, L, and T (e.g., the Cas9 molecule can comprise an N-terminal RuvC-like domain shown in FIGS. 2A-2G (depicted as Y)).

[0741] In certain embodiments, the N-terminal RuvC-like domain differs from a sequence of SEQ ID NO:23 by as many as 1 but not more than, 2, 3, 4, or 5 residues.

[0742] In certain embodiments, the N-terminal RuvC-like domain differs from a sequence of an N-terminal RuvC like domain disclosed herein, e.g., in FIGS. 3A-3B, as many as 1 but no more than 2, 3, 4, or 5 residues. In an embodiment, 1, 2, 3 or all of the highly conserved residues identified in FIGS. 3A-3B are present.

[0743] In certain embodiments, the N-terminal RuvC-like domain differs from a sequence of an N-terminal RuvC-like domain disclosed herein, e.g., in FIGS. 4A-4B, as many as 1 but no more than 2, 3, 4, or 5 residues. In an embodiment, 1, 2, or all of the highly conserved residues identified in FIGS. 4A-4B are present.

[0744] 6.1.3 Additional RuvC-Like Domains

[0745] In addition to the N-terminal RuvC-like domain, the Cas9 molecule or Cas9 polypeptide can comprise one or more additional RuvC-like domains. In certain embodiments, the Cas9 molecule or Cas9 polypeptide comprises two additional RuvC-like domains. In certain embodiments, the additional RuvC-like domain is at least 5 amino acids in length and, e.g., less than 15 amino acids in length, e.g., 5 to 10 amino acids in length, e.g., 8 amino acids in length.

[0746] An additional RuvC-like domain can comprise an amino acid sequence of Formula V:

(SEQ ID NO: 15)

I-X₁-X₂-E-X₃-A-R-E

[0747] wherein,

[0748] X₁ is V or H;

[0749] X₂ is I, L or V (e.g., I or V); and

[0750] X₃ is M or T.

[0751] In certain embodiments, the additional RuvC-like domain comprises an amino acid sequence of Formula VI:

(SEQ ID NO: 16)

I-V-X₂-E-M-A-R-E,

[0752] wherein

[0753] X₂ is I, L or V (e.g., I or V) (e.g., the Cas9 molecule or Cas9 polypeptide can comprise an additional RuvC-like domain shown in FIG. 2A-2G (depicted as B)).

[0754] An additional RuvC-like domain can comprise an amino acid sequence of Formula VII:

(SEQ ID NO: 17)

H-H-A-X₁-D-A-X₂-X₃,

[0755] wherein

[0756] X₁ is H or L;

[0757] X₂ is R or V; and

[0758] X₃ is E or V.

[0759] In certain embodiments, the additional RuvC-like domain comprises the amino acid sequence:

(SEQ ID NO: 18)

H-H-A-H-D-A-Y-L.

[0760] In certain embodiments, the additional RuvC-like domain differs from a sequence of SEQ ID NOs:15-18 by as many as 1 but not more than 2, 3, 4, or 5 residues.

[0761] In certain embodiments, the sequence flanking the N-terminal RuvC-like domain has the amino acid sequence of Formula VIII:

(SEQ ID NO: 19)

K-X₁′-Y-X₂′-X₃′-X₄′-Z-T-D-X₉′-Y,

[0762] wherein

[0763] X₁′ is selected from K and P;

[0764] X₂′ is selected from V, L, I, and F (e.g., V, I and L);

[0765] X₃′ is selected from G, A and S (e.g., G);

[0766] X₄′ is selected from L, I, V, and F (e.g., L);

[0767] X₉′ is selected from D, E, N, and Q; and

[0768] Z is an N-terminal RuvC-like domain, e.g., as described above, e.g., having 5 to 20 amino acids.

[0769] 6.1.4 HNH-Like Domains

[0770] In an embodiment, an HNH-like domain cleaves a single stranded complementary domain, e.g., a complementary strand of a double stranded nucleic acid molecule. In certain embodiments, an HNH-like domain is at least 15, 20, or 25 amino acids in length but not more than 40, 35, or 30 amino acids in length, e.g., 20 to 35 amino acids in length, e.g., 25 to 30 amino acids in length. Exemplary HNH-like domains are described below.

[0771] In certain embodiments, a Cas9 molecule or Cas9 polypeptide comprises an HNH-like domain having an amino acid sequence of Formula IX:

(SEQ ID NO: 25)

X₁-X₂-X₃-H-X₄-X₅-P-X₆-X₇-X₈-X⁹-X¹⁰-X¹¹-X¹²-X¹³-
X¹⁴-X¹⁵-N-X¹⁶-X¹⁷-X¹⁸-X¹⁹-X₂₀-X₂₁-X₂₂-X₂₃-N,

[0772] wherein

[0773] X₁ is selected from D, E, Q and N (e.g., D and E);

[0774] X² is selected from L, I, R, Q, V, M, and K;

[0775] X₃ is selected from D and E;

[0776] X₄ is selected from I, V, T, A, and L (e.g., A, I and V);

[0777] X₅ is selected from V, Y, I, L, F, and W (e.g., V, I and L);

[0778] X₆ is selected from Q, H, R, K, Y, I, L, F, and W;

[0779] X₇ is selected from S, A, D, T, and K (e.g., S and A);

[0780] X₈ is selected from F, L, V, K, Y, M, I, R, A, E, D, and Q (e.g., F);

[0781] X₉ is selected from L, R, T, I, V, S, C, Y, K, F, and G;

[0782] X₁₀ is selected from K, Q, Y, T, F, L, W, M, A, E, G, and S;

[0783] X₁₁ is selected from D, S, N, R, L, and T (e.g., D);

[0784] X₁₂ is selected from D, N and S;

[0785] X₁₃ is selected from S, A, T, G, and R (e.g., S);

[0786] X₁₄ is selected from I, L, F, S, R, Y, Q, W, D, K, and H (e.g., I, L and F);

[0787] X₁₅ is selected from D, S, I, N, E, A, H, F, L, Q, M, G, Y, and V;

[0788] X₁₆ is selected from K, L, R, M, T, and F (e.g., L, R and K);

[0789] X₁₇ is selected from V, L, I, A and T;

[0790] X₁₈ is selected from L, I, V, and A (e.g., L and I);

[0791] X₁₉ is selected from T, V, C, E, S, and A (e.g., T and V);

[0792] X₂₀ is selected from R, F, T, W, E, L, N, C, K, V, S, Q, I, Y, H, and A;

[0793] X₂₁ is selected from S, P, R, K, N, A, H, Q, G, and L;

[0794] X₂₂ is selected from D, G, T, N, S, K, A, I, E, L, Q, R, and Y; and

[0795] X₂₃ is selected from K, V, A, E, Y, I, C, L, S, T, G, K, M, D, and F.

[0796] In certain embodiments, a HNH-like domain differs from a sequence of SEQ ID NO:25 by at least one but not more than, 2, 3, 4, or 5 residues.

[0797] In certain embodiments, the HNH-like domain is cleavage competent. In certain embodiments, the HNH-like domain is cleavage incompetent.

[0798] In certain embodiments, a Cas9 molecule or Cas9 polypeptide comprises an HNH-like domain comprising an amino acid sequence of Formula X:

(SEQ ID NO: 26)

X₁-X₂-X₃-H-X₄-X₅-P-X₆-S-X₈-X₉-X₁₀-D-D-S-X₁₄-X₁₅-N-
K-V-L-X₁₉-X₂₀₋X₂₁-X₂₂-X₂₃-N,

[0799] wherein

[0800] X₁ is selected from D and E;

[0801] X₂ is selected from L, I, R, Q, V, M, and K;

[0802] X₃ is selected from D and E;

[0803] X₄ is selected from I, V, T, A, and L (e.g., A, I and V);

[0804] X₅ is selected from V, Y, I, L, F, and W (e.g., V, I and L);

[0805] X₆ is selected from Q, H, R, K, Y, I, L, F, and W;

[0806] X₈ is selected from F, L, V, K, Y, M, I, R, A, E, D, and Q (e.g., F);

[0807] X₉ is selected from L, R, T, I, V, S, C, Y, K, F, and G;

[0808] X₁₀ is selected from K, Q, Y, T, F, L, W, M, A, E, G, and S;

[0809] X₁₄ is selected from I, L, F, S, R, Y, Q, W, D, K and H (e.g., I, L and F);

[0810] X₁₅ is selected from D, S, I, N, E, A, H, F, L, Q, M, G, Y, and V;

[0811] X₁₉ is selected from T, V, C, E, S, and A (e.g., T and V);

[0812] X₂₀ is selected from R, F, T, W, E, L, N, C, K, V, S, Q, I, Y, H, and A;

[0813] X₂₁ is selected from S, P, R, K, N, A, H, Q, G, and L;

[0814] X₂₂ is selected from D, G, T, N, S, K, A, I, E, L, Q, R, and Y; and

[0815] X₂₃ is selected from K, V, A, E, Y, I, C, L, S, T, G, K, M, D, and F.

[0816] In certain embodiment, the HNH-like domain differs from a sequence of SEQ ID NO:26 by 1, 2, 3, 4, or 5 residues.

[0817] In certain embodiments, a Cas9 molecule or Cas9 polypeptide comprises an HNH-like domain comprising an amino acid sequence of Formula XI:

(SEQ ID NO: 27)

X₁-V-X₃-H-I-V-P-X₆-S-X₈-X₉-X₁₀-D-D-S-X₁₄-X₁₅-N-K-
V-L-T-X₂₀-X₂₁-X₂₂-X₂₃-N,

[0818] wherein

[0819] X₁ is selected from D and E;

[0820] X₃ is selected from D and E;

[0821] X₆ is selected from Q, H, R, K, Y, I, L, and W;

[0822] X₈ is selected from F, L, V, K, Y, M, I, R, A, E, D, and Q (e.g., F);

[0823] X₉ is selected from L, R, T, I, V, S, C, Y, K, F, and G;

[0824] X₁₀ is selected from K, Q, Y, T, F, L, W, M, A, E, G, and S;

[0825] X₁₄ is selected from I, L, F, S, R, Y, Q, W, D, K, and H (e.g., I, L and F);

[0826] X₁₅ is selected from D, S, I, N, E, A, H, F, L, Q, M, G, Y, and V;

[0827] X₂₀ is selected from R, F, T, W, E, L, N, C, K, V, S, Q, I, Y, H, and A;

[0828] X₂₁ is selected from S, P, R, K, N, A, H, Q, G, and L;

[0829] X₂₂ is selected from D, G, T, N, S, K, A, I, E, L, Q, R, and Y; and

[0830] X₂₃ is selected from K, V, A, E, Y, I, C, L, S, T, G, K, M, D, and F.

[0831] In certain embodiments, the HNH-like domain differs from a sequence of SEQ ID NO:27 by 1, 2, 3, 4, or 5 residues.

[0832] In certain embodiments, a Cas9 molecule or Cas9 polypeptide comprises an HNH-like domain having an amino acid sequence of Formula XII:

(SEQ ID NO: 28)

D-X₂-D-H-I-X₅-P-Q-X₇-F-X₉-X₁₀-D-X₁₂-S-I-D-N-X₁₆-
V-L-X₁₉-X₂₀-S-X₂₂-X₂₃-N,

[0833] wherein

[0834] X₂ is selected from I and V;

[0835] X₅ is selected from I and V;

[0836] X₇ is selected from A and S;

[0837] X₉ is selected from I and L;

[0838] X₁₀ is selected from K and T;

[0839] X₁₂ is selected from D and N;

[0840] X₁₆ is selected from R, K, and L;

[0841] X₁₉ is selected from T and V;

[0842] X₂₀ is selected from S, and R;

[0843] X₂₂ is selected from K, D, and A; and

[0844] X₂₃ is selected from E, K, G, and N (e.g., the Cas9 molecule or Cas9 polypeptide can comprise an HNH-like domain as described herein).

[0845] In certain embodiments, the HNH-like domain differs from a sequence of SEQ ID NO:28 by as many as 1 but no more than 2, 3, 4, or 5 residues.

[0846] In certain embodiments, a Cas9 molecule or Cas9 polypeptide comprises the amino acid sequence of Formula XIII:

(SEQ ID NO: 24)

L-Y-Y-L-Q-N-G-X₁′-D-M-Y-X₂′-X₃′-X₄′-X₅′-L-D-I-X₆′-
X₇′-L-S-X₈′-Y-Z-N-R-X₉′-K-X₁₀′-D-X₁₁′-V-P,

[0847] wherein

[0848] X₁′ is selected from K and R;

[0849] X₂′ is selected from V and T;

[0850] X₃′ is selected from G and D;

[0851] X₄′ is selected from E, Q and D;

[0852] X₅′ is selected from E and D;

[0853] X₆′ is selected from D, N, and H;

[0854] X₇′ is selected from Y, R, and N;

[0855] X₈′ is selected from Q, D, and N;

[0856] X₉′ is selected from G and E;

[0857] X₁₀′ is selected from S and G;

[0858] X₁₁′ is selected from D and N; and

[0859] Z is an HNH-like domain, e.g., as described above.

[0860] In certain embodiments, the Cas9 molecule or Cas9 polypeptide comprises an amino acid sequence that differs from a sequence of SEQ ID NO:24 by as many as 1 but not more than 2, 3, 4, or 5 residues.

[0861] In certain embodiments, the HNH-like domain differs from a sequence of an HNH-like domain disclosed herein, e.g., in FIGS. 5A-5C, by as many as 1 but not more than 2, 3, 4, or 5 residues. In certain embodiments, 1 or both of the highly conserved residues identified in FIGS. 5A-5C are present.

[0862] In certain embodiments, the HNH-like domain differs from a sequence of an HNH-like domain disclosed herein, e.g., in FIGS. 6A-6B, by as many as 1 but not more than 2, 3, 4, or 5 residues. In an embodiment, 1, 2, or all 3 of the highly conserved residues identified in FIGS. 6A-6B are present.

[0863] 6.2 Cas9 Activities

[0864] In certain embodiments, the Cas9 molecule or Cas9 polypeptide is capable of cleaving a target nucleic acid molecule. Typically wild-type Cas9 molecules cleave both strands of a target nucleic acid molecule. Cas9 molecules and Cas9 polypeptides can be engineered to alter nuclease cleavage (or other properties), e.g., to provide a Cas9 molecule or Cas9 polypeptide which is a nickase, or which lacks the ability to cleave target nucleic acid. A Cas9 molecule or Cas9 polypeptide that is capable of cleaving a target nucleic acid molecule is referred to herein as an eaCas9 (an enzymatically active Cas9) molecule or eaCas9 polypeptide.

[0865] In certain embodiments, an eaCas9 molecule or eaCas9 polypeptide comprises one or more of the following enzymatic activities:

[0866] a nickase activity, i.e., the ability to cleave a single strand, e.g., the non-complementary strand or the complementary strand, of a nucleic acid molecule;

[0867] a double stranded nuclease activity, i.e., the ability to cleave both strands of a double stranded nucleic acid and create a double stranded break, which in an embodiment is the presence of two nickase activities;

[0868] an endonuclease activity;

[0869] an exonuclease activity; and

[0870] a helicase activity, i.e., the ability to unwind the helical structure of a double stranded nucleic acid.

[0871] In certain embodiments, an enzymatically active Cas9 (“eaCas9”) molecule or eaCas9 polypeptide cleaves both DNA strands and results in a double stranded break. In certain embodiments, an eaCas9 molecule or eaCas9 polypeptide cleaves only one strand, e.g., the strand to which the gRNA hybridizes to, or the strand complementary to the strand the gRNA hybridizes with. In certain embodiments, an eaCas9 molecule or eaCas9 polypeptide comprises cleavage activity associated with an HNH domain. In certain embodiments, an eaCas9 molecule or eaCas9 polypeptide comprises cleavage activity associated with a RuvC domain. In certain embodiments, an eaCas9 molecule or eaCas9 polypeptide comprises cleavage activity associated with an HNH domain and cleavage activity associated with a RuvC domain. In certain embodiments, an eaCas9 molecule or eaCas9 polypeptide comprises an active, or cleavage competent, HNH domain and an inactive, or cleavage incompetent, RuvC domain. In certain embodiments, an eaCas9 molecule or eaCas9 polypeptide comprises an inactive, or cleavage incompetent, HNH domain and an active, or cleavage competent, RuvC domain.

[0872] 6.3 Targeting and PAMs

[0873] A Cas9 molecule or Cas9 polypeptide can interact with a gRNA molecule and, in concert with the gRNA molecule, localizes to a site which comprises a target domain, and in certain embodiments, a PAM sequence.

[0874] In certain embodiments, the ability of an eaCas9 molecule or eaCas9 polypeptide to interact with and cleave a target nucleic acid is PAM sequence dependent. A PAM sequence is a sequence in the target nucleic acid. In certain embodiments, cleavage of the target nucleic acid occurs upstream from the PAM sequence. eaCas9 molecules from different bacterial species can recognize different sequence motifs (e.g., PAM sequences). In certain embodiments, an eaCas9 molecule of S. pyogenes recognizes the sequence motif NGG and directs cleavage of a target nucleic acid sequence 1 to 10, e.g., 3 to 5, bp upstream from that sequence (see, e.g., Mali 2013). In certain embodiments, an eaCas9 molecule of S. thermophilus recognizes the sequence motif NGGNG (SEQ ID NO:199) and/or NNAGAAW (W=A or T) (SEQ ID NO:200) and directs cleavage of a target nucleic acid sequence 1 to 10, e.g., 3 to 5, bp upstream from these sequences (see, e.g., Horvath 2010; Deveau 2008). In certain embodiments, an eaCas9 molecule of S. mutans recognizes the sequence motif NGG and/or NAAR (R=A or G) (SEQ ID NO:201) and directs cleavage of a target nucleic acid sequence 1 to 10, e.g., 3 to 5 bp, upstream from this sequence (see, e.g., Deveau 2008). In certain embodiments, an eaCas9 molecule of S. aureus recognizes the sequence motif NNGRR (R=A or G) (SEQ ID NO:202) and directs cleavage of a target nucleic acid sequence 1 to 10, e.g., 3 to 5, bp upstream from that sequence. In certain embodiments, an eaCas9 molecule of S. aureus recognizes the sequence motif NNGRRN (R=A or G) (SEQ ID NO:203) and directs cleavage of a target nucleic acid sequence 1 to 10, e.g., 3 to 5, bp upstream from that sequence. In certain embodiments, an eaCas9 molecule of S. aureus recognizes the sequence motif NNGRRT (R=A or G) (SEQ ID NO:204) and directs cleavage of a target nucleic acid sequence 1 to 10, e.g., 3 to 5, bp upstream from that sequence. In certain embodiments, an eaCas9 molecule of S. aureus recognizes the sequence motif NNGRRV (R=A or G) (SEQ ID NO:205) and directs cleavage of a target nucleic acid sequence 1 to 10, e.g., 3 to 5, bp upstream from that sequence. The ability of a Cas9 molecule to recognize a PAM sequence can be determined, e.g., using a transformation assay as described previously (Jinek 2012). In the aforementioned embodiments, N can be any nucleotide residue, e.g., any of A, G, C, or T.

[0875] As is discussed herein, Cas9 molecules can be engineered to alter the PAM specificity of the Cas9 molecule.

[0876] Exemplary naturally occurring Cas9 molecules have been described previously (see, e.g., Chylinski 2013). Such Cas9 molecules include Cas9 molecules of a cluster 1 bacterial family, cluster 2 bacterial family, cluster 3 bacterial family, cluster 4 bacterial family, cluster 5 bacterial family, cluster 6 bacterial family, a cluster 7 bacterial family, a cluster 8 bacterial family, a cluster 9 bacterial family, a cluster 10 bacterial family, a cluster 11 bacterial family, a cluster 12 bacterial family, a cluster 13 bacterial family, a cluster 14 bacterial family, a cluster 15 bacterial family, a cluster 16 bacterial family, a cluster 17 bacterial family, a cluster 18 bacterial family, a cluster 19 bacterial family, a cluster 20 bacterial family, a cluster 21 bacterial family, a cluster 22 bacterial family, a cluster 23 bacterial family, a cluster 24 bacterial family, a cluster 25 bacterial family, a cluster 26 bacterial family, a cluster 27 bacterial family, a cluster 28 bacterial family, a cluster 29 bacterial family, a cluster 30 bacterial family, a cluster 31 bacterial family, a cluster 32 bacterial family, a cluster 33 bacterial family, a cluster 34 bacterial family, a cluster 35 bacterial family, a cluster 36 bacterial family, a cluster 37 bacterial family, a cluster 38 bacterial family, a cluster 39 bacterial family, a cluster 40 bacterial family, a cluster 41 bacterial family, a cluster 42 bacterial family, a cluster 43 bacterial family, a cluster 44 bacterial family, a cluster 45 bacterial family, a cluster 46 bacterial family, a cluster 47 bacterial family, a cluster 48 bacterial family, a cluster 49 bacterial family, a cluster 50 bacterial family, a cluster 51 bacterial family, a cluster 52 bacterial family, a cluster 53 bacterial family, a cluster 54 bacterial family, a cluster 55 bacterial family, a cluster 56 bacterial family, a cluster 57 bacterial family, a cluster 58 bacterial family, a cluster 59 bacterial family, a cluster 60 bacterial family, a cluster 61 bacterial family, a cluster 62 bacterial family, a cluster 63 bacterial family, a cluster 64 bacterial family, a cluster 65 bacterial family, a cluster 66 bacterial family, a cluster 67 bacterial family, a cluster 68 bacterial family, a cluster 69 bacterial family, a cluster 70 bacterial family, a cluster 71 bacterial family, a cluster 72 bacterial family, a cluster 73 bacterial family, a cluster 74 bacterial family, a cluster 75 bacterial family, a cluster 76 bacterial family, a cluster 77 bacterial family, or a cluster 78 bacterial family.

[0877] Exemplary naturally occurring Cas9 molecules include a Cas9 molecule of a cluster 1 bacterial family. Examples include a Cas9 molecule of: S. aureus, S. pyogenes (e.g., strain SF370, MGAS10270, MGAS10750, MGAS2096, MGAS315, MGAS5005, MGAS6180, MGAS9429, NZ131 and SSI-1), S. thermophilus (e.g., strain LMD-9), S. pseudoporcinus (e.g., strain SPIN 20026), S. mutans (e.g., strain UA159, NN2025), S. macacae (e.g., strain NCTC11558), S. gallolyticus (e.g., strain UCN34, ATCC BAA-2069), S. equines (e.g., strain ATCC 9812, MGCS 124), S. dysdalactiae (e.g., strain GGS 124), S. bovis (e.g., strain ATCC 700338), S. anginosus (e.g., strain F0211), S. agalactiae (e.g., strain NEM316, A909), Listeria monocytogenes (e.g., strain F6854), Listeria innocua (L. innocua, e.g., strain Clip11262), Enterococcus italicus (e.g., strain DSM 15952), or Enterococcus faecium (e.g., strain 1,231,408).

[0878] In certain embodiments, a Cas9 molecule or Cas9 polypeptide comprises an amino acid sequence:

[0879] having about 60%, about 65%, about 70%, about 75%, about 80%, about 85%, about 90%, about 95%, about 96%, about 97%, about 98% or about 99% homology with;

[0880] differs at no more than, about 2%, about 5%, about 10%, about 15%, about 20%, about 30%, or about 40% of the amino acid residues when compared with;

[0881] differs by at least 1, 2, 5, 10 or 20 amino acids, but by no more than 100, 80, 70, 60, 50, 40 or 30 amino acids from; or

[0882] identical to any Cas9 molecule sequence described herein, or to a naturally occurring Cas9 molecule sequence, e.g., a Cas9 molecule from a species listed herein (e.g., SEQ ID NOs:1, 2, 4-6, or 12) or described in Chylinski 2013. In certain embodiments, the Cas9 molecule or Cas9 polypeptide comprises one or more of the following activities: a nickase activity; a double stranded cleavage activity (e.g., an endonuclease and/or exonuclease activity); a helicase activity; or the ability, together with a gRNA molecule, to localize to a target nucleic acid.

[0883] In certain embodiments, a Cas9 molecule or Cas9 polypeptide comprises any of the amino acid sequence of the consensus sequence of FIGS. 2A-2G, wherein “*” indicates any amino acid found in the corresponding position in the amino acid sequence of a Cas9 molecule of S. pyogenes, S. thermophilus, S. mutans, or L. innocua, and “-” indicates absent. In certain embodiments, a Cas9 molecule or Cas9 polypeptide differs from the sequence of the consensus sequence disclosed in FIGS. 2A-2G by at least 1, but no more than 2, 3, 4, 5, 6, 7, 8, 9, or 10 amino acid residues. In certain embodiments, a Cas9 molecule or Cas9 polypeptide comprises the amino acid sequence of SEQ ID NO:2. In other embodiments, a Cas9 molecule or Cas9 polypeptide differs from the sequence of SEQ ID NO:2 by at least 1, but no more than 2, 3, 4, 5, 6, 7, 8, 9, or 10 amino acid residues.

[0884] A comparison of the sequence of a number of Cas9 molecules indicate that certain regions are conserved. These are identified below as:

[0885] region 1 (residues 1 to 180, or in the case of region 1′ residues 120 to 180) region 2 (residues 360 to 480);

[0886] region 3 (residues 660 to 720);

[0887] region 4 (residues 817 to 900); and

[0888] region 5 (residues 900 to 960).

[0889] In certain embodiments, a Cas9 molecule or Cas9 polypeptide comprises regions 1-5, together with sufficient additional Cas9 molecule sequence to provide a biologically active molecule, e.g., a Cas9 molecule having at least one activity described herein. In certain embodiments, each of regions 1-5, independently, have about 50%, about 60%, about 70%, about 80%, about 85%, about 90%, about 95%, about 96%, about 97%, about 98% or about 99% homology with the corresponding residues of a Cas9 molecule or Cas9 polypeptide described herein, e.g., a sequence from FIGS. 2A-2G.

[0890] In certain embodiments, a Cas9 molecule or Cas9 polypeptide comprises an amino acid sequence referred to as region 1:

[0891] having about 50%, about 60%, about 70%, about 80%, about 85%, about 90%, about 95%, about 96%, about 97%, about 98% or about 99% homology with amino acids 1-180 (the numbering is according to the motif sequence in FIG. 2; 52% of residues in the four Cas9 sequences in FIGS. 2A-2G are conserved) of the amino acid sequence of Cas9 of S. pyogenes;

[0892] differs by at least 1, 2, 5, 10 or 20 amino acids but by no more than 90, 80, 70, 60, 50, 40 or 30 amino acids from amino acids 1-180 of the amino acid sequence of Cas9 of S. pyogenes, S. thermophilus, S. mutans, or Listeria innocua; or

[0893] is identical to amino acids 1-180 of the amino acid sequence of Cas9 of S. pyogenes, S. thermophilus, S. mutans, or L. innocua.

[0894] In certain embodiments, a Cas9 molecule or Cas9 polypeptide comprises an amino acid sequence referred to as region 1′:

[0895] having about 55%, about 60%, about 65%, about 70%, about 75%, about 80%, about 85%, about 90%, about 95%, about 96%, about 97%, about 98% or about 99% homology with amino acids 120-180 (55% of residues in the four Cas9 sequences in FIG. 2 are conserved) of the amino acid sequence of Cas9 of S. pyogenes, S. thermophilus, S. mutans or L. innocua;

[0896] differs by at least 1, 2, or 5 amino acids but by no more than 35, 30, 25, 20 or 10 amino acids from amino acids 120-180 of the amino acid sequence of Cas9 of S. pyogenes, S. thermophilus, S. mutans, or L. innocua; or

[0897] is identical to amino acids 120-180 of the amino acid sequence of Cas9 of S. pyogenes, S. thermophilus, S. mutans, or L. innocua.

[0898] In certain embodiments, a Cas9 molecule or Cas9 polypeptide comprises an amino acid sequence referred to as region 2:

[0899] having about 50%, about 55%, about 60%, about 65%, about 70%, about 75%, about 80%, about 85%, about 90%, about 95%, about 96%, about 97%, about 98% or about 99% homology with amino acids 360-480 (52% of residues in the four Cas9 sequences in FIG. 2 are conserved) of the amino acid sequence of Cas9 of S. pyogenes, S. thermophilus, S. mutans, or L. innocua;

[0900] differs by at least 1, 2, or 5 amino acids but by no more than 35, 30, 25, 20 or 10 amino acids from amino acids 360-480 of the amino acid sequence of Cas9 of S. pyogenes, S. thermophilus, S. mutans, or L. innocua; or

[0901] is identical to amino acids 360-480 of the amino acid sequence of Cas9 of S. pyogenes, S. thermophilus, S. mutans, or L. innocua.

[0902] In certain embodiments, a Cas9 molecule or Cas9 polypeptide comprises an amino acid sequence referred to as region 3:

[0903] having about 55%, about 60%, about 65%, about 70%, about 75%, about 80%, about 85%, about 90%, about 95%, about 96%, about 97%, about 98%, or about 99% homology with amino acids 660-720 (56% of residues in the four Cas9 sequences in FIG. 2 are conserved) of the amino acid sequence of Cas9 of S. pyogenes, S. thermophilus, S. mutans or L. innocua;

[0904] differs by at least 1, 2, or 5 amino acids but by no more than 35, 30, 25, 20 or 10 amino acids from amino acids 660-720 of the amino acid sequence of Cas9 of S. pyogenes, S. thermophilus, S. mutans or L. innocua; or

[0905] is identical to amino acids 660-720 of the amino acid sequence of Cas9 of S. pyogenes, S. thermophilus, S. mutans or L. innocua.

[0906] In certain embodiments, a Cas9 molecule or Cas9 polypeptide comprises an amino acid sequence referred to as region 4:

[0907] having about 50%, about 55%, about 60%, about 65%, about 70%, about 75%, about 80%, about 85%, about 90%, about 95%, about 96%, about 97%, about 98%, or about 99% homology with amino acids 817-900 (55% of residues in the four Cas9 sequences in FIGS. 2A-2G are conserved) of the amino acid sequence of Cas9 of S. pyogenes, S. thermophilus, S. mutans, or L. innocua;

[0908] differs by at least 1, 2, or 5 amino acids but by no more than 35, 30, 25, 20 or 10 amino acids from amino acids 817-900 of the amino acid sequence of Cas9 of S. pyogenes, S. thermophilus, S. mutans, or L. innocua; or

[0909] is identical to amino acids 817-900 of the amino acid sequence of Cas9 of S. pyogenes, S. thermophilus, S. mutans, or L. innocua.

[0910] In certain embodiments, a Cas9 molecule or Cas9 polypeptide comprises an amino acid sequence referred to as region 5:

[0911] having about 50%, about 55%, about 60%, about 65%, about 70%, about 75%, about 80%, about 85%, about 90%, about 95%, about 96%, about 97%, about 98%, or about 99% homology with amino acids 900-960 (60% of residues in the four Cas9 sequences in FIGS. 2A-2G are conserved) of the amino acid sequence of Cas9 of S. pyogenes, S. thermophilus, S. mutans, or L. innocua;

[0912] differs by at least 1, 2, or 5 amino acids but by no more than 35, 30, 25, 20 or 10 amino acids from amino acids 900-960 of the amino acid sequence of Cas9 of S. pyogenes, S. thermophilus, S. mutans, or L. innocua; or

[0913] is identical to amino acids 900-960 of the amino acid sequence of Cas9 of S. pyogenes, S. thermophilus, S. mutans, or L. innocua.

[0914] 6.4 Engineered or Altered Cas9

[0915] Cas9 molecules and Cas9 polypeptides described herein can possess any of a number of properties, including nuclease activity (e.g., endonuclease and/or exonuclease activity); helicase activity; the ability to associate functionally with a gRNA molecule; and the ability to target (or localize to) a site on a nucleic acid (e.g., PAM recognition and specificity). In certain embodiments, a Cas9 molecule or Cas9 polypeptide can include all or a subset of these properties. In certain embodiments, a Cas9 molecule or Cas9 polypeptide has the ability to interact with a gRNA molecule and, in concert with the gRNA molecule, localize to a site in a nucleic acid. Other activities, e.g., PAM specificity, cleavage activity, or helicase activity can vary more widely in Cas9 molecules and Cas9 polypeptides.

[0916] Cas9 molecules include engineered Cas9 molecules and engineered Cas9 polypeptides (engineered, as used in this context, means merely that the Cas9 molecule or Cas9 polypeptide differs from a reference sequences, and implies no process or origin limitation). An engineered Cas9 molecule or Cas9 polypeptide can comprise altered enzymatic properties, e.g., altered nuclease activity, (as compared with a naturally occurring or other reference Cas9 molecule) or altered helicase activity. As discussed herein, an engineered Cas9 molecule or Cas9 polypeptide can have nickase activity (as opposed to double strand nuclease activity). In certain embodiments, an engineered Cas9 molecule or Cas9 polypeptide can have an alteration that alters its size, e.g., a deletion of amino acid sequence that reduces its size, e.g., without significant effect on one or more, or any Cas9 activity. In certain embodiments, an engineered Cas9 molecule or Cas9 polypeptide can comprise an alteration that affects PAM recognition. In certain embodiments, an engineered Cas9 molecule is altered to recognize a PAM sequence other than that recognized by the endogenous wild-type PI domain. In certain embodiments, a Cas9 molecule or Cas9 polypeptide can differ in sequence from a naturally occurring Cas9 molecule but not have significant alteration in one or more Cas9 activities.

[0917] Cas9 molecules or Cas9 polypeptides with desired properties can be made in a number of ways, e.g., by alteration of a parental, e.g., naturally occurring, Cas9 molecules or Cas9 polypeptides, to provide an altered Cas9 molecule or Cas9 polypeptide having a desired property. For example, one or more mutations or differences relative to a parental Cas9 molecule, e.g., a naturally occurring or engineered Cas9 molecule, can be introduced. Such mutations and differences comprise: substitutions (e.g., conservative substitutions or substitutions of non-essential amino acids); insertions; or deletions. In certain embodiments, a Cas9 molecule or Cas9 polypeptide can comprises one or more mutations or differences, e.g., at least 1, 2, 3, 4, 5, 10, 15, 20, 30, 40 or 50 mutations but less than 200, 100, or 80 mutations relative to a reference, e.g., a parental, Cas9 molecule.

[0918] In certain embodiments, a mutation or mutations do not have a substantial effect on a Cas9 activity, e.g. a Cas9 activity described herein. In certain embodiments, a mutation or mutations have a substantial effect on a Cas9 activity, e.g. a Cas9 activity described herein.

[0919] 6.5 Modified-Cleavage Cas9

[0920] In certain embodiments, a Cas9 molecule or Cas9 polypeptide comprises a cleavage property that differs from naturally occurring Cas9 molecules, e.g., that differs from the naturally occurring Cas9 molecule having the closest homology. For example, a Cas9 molecule or Cas9 polypeptide can differ from naturally occurring Cas9 molecules, e.g., a Cas9 molecule of S. pyogenes, as follows: its ability to modulate, e.g., decreased or increased, cleavage of a double stranded nucleic acid (endonuclease and/or exonuclease activity), e.g., as compared to a naturally occurring Cas9 molecule (e.g., a Cas9 molecule of S. pyogenes); its ability to modulate, e.g., decreased or increased, cleavage of a single strand of a nucleic acid, e.g., a non-complementary strand of a nucleic acid molecule or a complementary strand of a nucleic acid molecule (nickase activity), e.g., as compared to a naturally occurring Cas9 molecule (e.g., a Cas9 molecule of S. pyogenes); or the ability to cleave a nucleic acid molecule, e.g., a double stranded or single stranded nucleic acid molecule, can be eliminated.

[0921] In certain embodiments, an eaCas9 molecule or eaCas9 polypeptide comprises one or more of the following activities: cleavage activity associated with an N-terminal RuvC-like domain; cleavage activity associated with an HNH-like domain; cleavage activity associated with an HNH-like domain and cleavage activity associated with an N-terminal RuvC-like domain.

[0922] In certain embodiments, an eaCas9 molecule or eaCas9 polypeptide comprises an active, or cleavage competent, HNH-like domain (e.g., an HNH-like domain described herein, e.g., SEQ ID NOs:24-28) and an inactive, or cleavage incompetent, N-terminal RuvC-like domain. An exemplary inactive, or cleavage incompetent N-terminal RuvC-like domain can have a mutation of an aspartic acid in an N-terminal RuvC-like domain, e.g., an aspartic acid at position 9 of the consensus sequence disclosed in FIGS. 2A-2G or an aspartic acid at position 10 of SEQ ID NO:2, e.g., can be substituted with an alanine. In certain embodiments, the eaCas9 molecule or eaCas9 polypeptide differs from wild-type in the N-terminal RuvC-like domain and does not cleave the target nucleic acid, or cleaves with significantly less efficiency, e.g., less than about 20%, about 10%, about 5%, about 1% or about 0.1% of the cleavage activity of a reference Cas9 molecule, e.g., as measured by an assay described herein. The reference Cas9 molecule can by a naturally occurring unmodified Cas9 molecule, e.g., a naturally occurring Cas9 molecule such as a Cas9 molecule of S. pyogenes, S. aureus, or S. thermophilus. In certain embodiments, the reference Cas9 molecule is the naturally occurring Cas9 molecule having the closest sequence identity or homology.

[0923] In certain embodiments, an eaCas9 molecule or eaCas9 polypeptide comprises an inactive, or cleavage incompetent, HNH domain and an active, or cleavage competent, N-terminal RuvC-like domain (e.g., a RuvC-like domain described herein, e.g., SEQ ID NOs:15-23). Exemplary inactive, or cleavage incompetent HNH-like domains can have a mutation at one or more of: a histidine in an HNH-like domain, e.g., a histidine shown at position 856 of the consensus sequence disclosed in FIGS. 2A-2G, e.g., can be substituted with an alanine; and one or more asparagines in an HNH-like domain, e.g., an asparagine shown at position 870 of the consensus sequence disclosed in FIGS. 2A-2G and/or at position 879 of the consensus sequence disclosed in FIGS. 2A-2G, e.g., can be substituted with an alanine. In certain embodiments, the eaCas9 differs from wild-type in the HNH-like domain and does not cleave the target nucleic acid, or cleaves with significantly less efficiency, e.g., less than about 20%, about 10%, about 5%, about 1% or about 0.1% of the cleavage activity of a reference Cas9 molecule, e.g., as measured by an assay described herein. The reference Cas9 molecule can by a naturally occurring unmodified Cas9 molecule, e.g., a naturally occurring Cas9 molecule such as a Cas9 molecule of S. pyogenes, S. aureus, or S. thermophilus. In an embodiment, the reference Cas9 molecule is the naturally occurring Cas9 molecule having the closest sequence identity or homology.

[0924] In certain embodiments, exemplary Cas9 activities comprise one or more of PAM specificity, cleavage activity, and helicase activity. A mutation(s) can be present, e.g., in: one or more RuvC domains, e.g., an N-terminal RuvC domain; an HNH domain; a region outside the RuvC domains and the HNH domain. In certain embodiments, a mutation(s) is present in a RuvC domain. In certain embodiments, a mutation(s) is present in an HNH domain. In certain embodiments, mutations are present in both a RuvC domain and an HNH domain.

[0925] Exemplary mutations that may be made in the RuvC domain or HNH domain with reference to the S. pyogenes Cas9 sequence include: D10A, E762A, H840A, N854A, N863A and/or D986A. Exemplary mutations that may be made in the RuvC domain with reference to the S. aureus Cas9 sequence include N580A (see, e.g., SEQ ID NO:11).

[0926] Whether or not a particular sequence, e.g., a substitution, may affect one or more activity, such as targeting activity, cleavage activity, etc., can be evaluated or predicted, e.g., by evaluating whether the mutation is conservative. In certain embodiments, a “non-essential” amino acid residue, as used in the context of a Cas9 molecule, is a residue that can be altered from the wild-type sequence of a Cas9 molecule, e.g., a naturally occurring Cas9 molecule, e.g., an eaCas9 molecule, without abolishing or more preferably, without substantially altering a Cas9 activity (e.g., cleavage activity), whereas changing an “essential” amino acid residue results in a substantial loss of activity (e.g., cleavage activity).

[0927] In certain embodiments, a Cas9 molecule or Cas9 polypeptide comprises a cleavage property that differs from naturally occurring Cas9 molecules, e.g., that differs from the naturally occurring Cas9 molecule having the closest homology. For example, a Cas9 molecule can differ from naturally occurring Cas9 molecules, e.g., a Cas9 molecule of S aureus or S. pyogenes, as follows: its ability to modulate, e.g., decreased or increased, cleavage of a double stranded break (endonuclease and/or exonuclease activity), e.g., as compared to a naturally occurring Cas9 molecule (e.g., a Cas9 molecule of S aureus or S. pyogenes); its ability to modulate, e.g., decreased or increased, cleavage of a single strand of a nucleic acid, e.g., a non-complimentary strand of a nucleic acid molecule or a complementary strand of a nucleic acid molecule (nickase activity), e.g., as compared to a naturally occurring Cas9 molecule (e.g., a Cas9 molecule of S aureus or S. pyogenes); or the ability to cleave a nucleic acid molecule, e.g., a double stranded or single stranded nucleic acid molecule, can be eliminated. In certain embodiments, the nickase is S. aureus Cas9-derived nickase comprising the sequence of SEQ ID NO:10 (D10A) or SEQ ID NO:11 (N580A) (Friedland 2015).

[0928] In certain embodiments, the altered Cas9 molecule is an eaCas9 molecule comprising one or more of the following activities: cleavage activity associated with a RuvC domain; cleavage activity associated with an HNH domain; cleavage activity associated with an HNH domain and cleavage activity associated with a RuvC domain.

[0929] In certain embodiments, the altered Cas9 molecule or Cas9 polypeptide comprises a sequence in which:

[0930] the sequence corresponding to the fixed sequence of the consensus sequence disclosed in FIGS. 2A-2G differs at no more than about 1%, about 2%, about 3%, about 4%, about 5%, about 10%, about 15%, or about 20% of the fixed residues in the consensus sequence disclosed in FIGS. 2A-2G; and

[0931] the sequence corresponding to the residues identified by “*” in the consensus sequence disclosed in FIGS. 2A-2G differs at no more than about 1%, about 2%, about 3%, about 4%, about 5%, about 10%, about 15%, about 20%, about 25%, about 30%, about 35%, or about 40% of the “*” residues from the corresponding sequence of naturally occurring Cas9 molecule, e.g., an S. pyogenes, S. thermophilus, S. mutans, or L. innocua Cas9 molecule.

[0932] In certain embodiments, the altered Cas9 molecule or Cas9 polypeptide is an eaCas9 molecule or eaCas9 polypeptide comprising the amino acid sequence of S. pyogenes Cas9 disclosed in FIGS. 2A-2G with one or more amino acids that differ from the sequence of S. pyogenes (e.g., substitutions) at one or more residues (e.g., 2, 3, 5, 10, 15, 20, 30, 50, 70, 80, 90, 100, or 200 amino acid residues) represented by an “*” in the consensus sequence disclosed in FIGS. 2A-2G.

[0933] In certain embodiments, the altered Cas9 molecule or Cas9 polypeptide is an eaCas9 molecule or eaCas9 polypeptide comprising the amino acid sequence of S. thermophilus Cas9 disclosed in FIGS. 2A-2G with one or more amino acids that differ from the sequence of S. thermophilus (e.g., substitutions) at one or more residues (e.g., 2, 3, 5, 10, 15, 20, 30, 50, 70, 80, 90, 100, or 200 amino acid residues) represented by an “*” in the consensus sequence disclosed in FIGS. 2A-2G.

[0934] In certain embodiments, the altered Cas9 molecule or Cas9 polypeptide is an eaCas9 molecule or eaCas9 polypeptide comprising the amino acid sequence of S. mutans Cas9 disclosed in FIGS. 2A-2G with one or more amino acids that differ from the sequence of S. mutans (e.g., substitutions) at one or more residues (e.g., 2, 3, 5, 10, 15, 20, 30, 50, 70, 80, 90, 100, or 200 amino acid residues) represented by an “*” in the consensus sequence disclosed in FIGS. 2A-2G.

[0935] In certain embodiments, the altered Cas9 molecule or Cas9 polypeptide is an eaCas9 molecule or eaCas9 polypeptide comprising the amino acid sequence of L. innocua Cas9 disclosed in FIGS. 2A-2G with one or more amino acids that differ from the sequence of L. innocua (e.g., substitutions) at one or more residues (e.g., 2, 3, 5, 10, 15, 20, 30, 50, 70, 80, 90, 100, or 200 amino acid residues) represented by an “*” in the consensus sequence disclosed in FIGS. 2A-2G.

[0936] In certain embodiments, the altered Cas9 molecule or Cas9 polypeptide, e.g., an eaCas9 molecule or eaCas9 polypeptide, can be a fusion, e.g., of two of more different Cas9 molecules, e.g., of two or more naturally occurring Cas9 molecules of different species. For example, a fragment of a naturally occurring Cas9 molecule of one species can be fused to a fragment of a Cas9 molecule of a second species. As an example, a fragment of a Cas9 molecule of S. pyogenes comprising an N-terminal RuvC-like domain can be fused to a fragment of Cas9 molecule of a species other than S. pyogenes (e.g., S. thermophilus) comprising an HNH-like domain.

[0937] 6.6 Cas9 with Altered or No PAM Recognition

[0938] Naturally occurring Cas9 molecules can recognize specific PAM sequences, for example the PAM recognition sequences described above for, e.g., S. pyogenes, S. thermophilus, S. mutans, and S. aureus.

[0939] In certain embodiments, a Cas9 molecule or Cas9 polypeptide has the same PAM specificities as a naturally occurring Cas9 molecule. In certain embodiments, a Cas9 molecule or Cas9 polypeptide has a PAM specificity not associated with a naturally occurring Cas9 molecule, or a PAM specificity not associated with the naturally occurring Cas9 molecule to which it has the closest sequence homology. For example, a naturally occurring Cas9 molecule can be altered, e.g., to alter PAM recognition, e.g., to alter the PAM sequence that the Cas9 molecule or Cas9 polypeptide recognizes in order to decrease off-target sites and/or improve specificity; or eliminate a PAM recognition requirement. In certain embodiments, a Cas9 molecule or Cas9 polypeptide can be altered, e.g., to increase length of PAM recognition sequence and/or improve Cas9 specificity to high level of identity (e.g., about 98%, about 99% or about 100% match between gRNA and a PAM sequence), e.g., to decrease off-target sites and/or increase specificity. In certain embodiments, the length of the PAM recognition sequence is at least 4, 5, 6, 7, 8, 9, 10 or 15 amino acids in length. In certain embodiments, the Cas9 specificity requires at least about 90%, about 95%, about 96%, about 97%, about 98%, or about 99% homology between the gRNA and the PAM sequence. Cas9 molecules or Cas9 polypeptides that recognize different PAM sequences and/or have reduced off-target activity can be generated using directed evolution. Exemplary methods and systems that can be used for directed evolution of Cas9 molecules are described (see, e.g., Esvelt 2011). Candidate Cas9 molecules can be evaluated, e.g., by methods described below.

[0940] 6.7 Size-Optimized Cas9

[0941] Engineered Cas9 molecules and engineered Cas9 polypeptides described herein include a Cas9 molecule or Cas9 polypeptide comprising a deletion that reduces the size of the molecule while still retaining desired Cas9 properties, e.g., essentially native conformation, Cas9 nuclease activity, and/or target nucleic acid molecule recognition. Provided herein are Cas9 molecules or Cas9 polypeptides comprising one or more deletions and optionally one or more linkers, wherein a linker is disposed between the amino acid residues that flank the deletion. Methods for identifying suitable deletions in a reference Cas9 molecule, methods for generating Cas9 molecules with a deletion and a linker, and methods for using such Cas9 molecules will be apparent to one of ordinary skill in the art upon review of this document.

[0942] A Cas9 molecule, e.g., a S. aureus or S. pyogenes Cas9 molecule, having a deletion is smaller, e.g., has reduced number of amino acids, than the corresponding naturally-occurring Cas9 molecule. The smaller size of the Cas9 molecules allows increased flexibility for delivery methods, and thereby increases utility for genome-editing. A Cas9 molecule can comprise one or more deletions that do not substantially affect or decrease the activity of the resultant Cas9 molecules described herein. Activities that are retained in the Cas9 molecules comprising a deletion as described herein include one or more of the following:

[0943] a nickase activity, i.e., the ability to cleave a single strand, e.g., the non-complementary strand or the complementary strand, of a nucleic acid molecule; a double stranded nuclease activity, i.e., the ability to cleave both strands of a double stranded nucleic acid and create a double stranded break, which in an embodiment is the presence of two nickase activities;

[0944] an endonuclease activity;

[0945] an exonuclease activity;

[0946] a helicase activity, i.e., the ability to unwind the helical structure of a double stranded nucleic acid;

[0947] and recognition activity of a nucleic acid molecule, e.g., a target nucleic acid or a gRNA.

[0948] Activity of the Cas9 molecules described herein can be assessed using the activity assays described herein or in the art.

[0949] 6.8 Identifying Regions Suitable for Deletion

[0950] Suitable regions of Cas9 molecules for deletion can be identified by a variety of methods. Naturally-occurring orthologous Cas9 molecules from various bacterial species can be modeled onto the crystal structure of S. pyogenes Cas9 (Nishimasu 2014) to examine the level of conservation across the selected Cas9 orthologs with respect to the three-dimensional conformation of the protein. Less conserved or unconserved regions that are spatially located distant from regions involved in Cas9 activity, e.g., interface with the target nucleic acid molecule and/or gRNA, represent regions or domains are candidates for deletion without substantially affecting or decreasing Cas9 activity.

[0951] 6.9 Nucleic Acids Encoding Cas9 Molecules

[0952] Nucleic acids encoding the Cas9 molecules or Cas9 polypeptides, e.g., an eaCas9 molecule or eaCas9 polypeptides are provided herein. Exemplary nucleic acids encoding Cas9 molecules or Cas9 polypeptides have been described previously (see, e.g., Cong 2013; Wang 2013; Mali 2013; Jinek 2012).

[0953] In certain embodiments, a nucleic acid encoding a Cas9 molecule or Cas9 polypeptide can be a synthetic nucleic acid sequence. For example, the synthetic nucleic acid molecule can be chemically modified, e.g., as described herein. In certain embodiments, the Cas9 mRNA has one or more (e.g., all of the following properties: it is capped, polyadenylated, substituted with 5-methylcytidine and/or pseudouridine.

[0954] Additionally or alternatively, the synthetic nucleic acid sequence can be codon optimized, e.g., at least one non-common codon or less-common codon has been replaced by a common codon. For example, the synthetic nucleic acid can direct the synthesis of an optimized messenger mRNA, e.g., optimized for expression in a mammalian expression system, e.g., described herein.

[0955] Additionally or alternatively, a nucleic acid encoding a Cas9 molecule or Cas9 polypeptide may comprise a nuclear localization sequence (NLS). Nuclear localization sequences are known in the art.

[0956] An exemplary codon optimized nucleic acid sequence encoding a Cas9 molecule of S. pyogenes is set forth in SEQ ID NO:3. The corresponding amino acid sequence of an S. pyogenes Cas9 molecule is set forth in SEQ ID NO:2.

[0957] Exemplary codon optimized nucleic acid sequences encoding a Cas9 molecule of S. aureus are set forth in SEQ ID NOs:7-9, 826367, and 826368. An amino acid sequence of an S. aureus Cas9 molecule is set forth in SEQ ID NO:6.

[0958] If any of the above Cas9 sequences are fused with a peptide or polypeptide at the C-terminus, it is understood that the stop codon will be removed.

[0959] 6.10 Other Cas Molecules and Cas Polypeptides

[0960] Various types of Cas molecules or Cas polypeptides can be used to practice the inventions disclosed herein. In certain embodiments, Cas molecules of Type II Cas systems are used. In certain embodiments, Cas molecules of other Cas systems are used. For example, Type I or Type III Cas molecules may be used. Exemplary Cas molecules (and Cas systems) have been described previously (see, e.g., Haft 2005 and Makarova 2011). Exemplary Cas molecules (and Cas systems) are also shown in Table 2.

TABLE 2
Cas Systems

| | | | Structure of | Families (and | |
|---|---|---|---|---|---|
| Gene | System type | Name from | encoded protein | superfamily) of | |
| name^{‡} | or subtype | Haft 2005^{§} | (PDB accessions)^{¶} | encoded protein^{#}** | Representatives |
| cas1 | Type I | cas1 | 3GOD, 3LFX and | COG1518 | SERP2463, SPy1047 |
| | Type II | | 2YZS | | and ygbT |
| | Type III | | | | |
| cas2 | Type I | cas2 | 2IVY, 2I8E and | COG1343 and | SERP2462, SPy1048, |
| | Type II | | 3EXC | COG3512 | SPy1723 (N-terminal |
| | Type III | | | | domain) and ygbF |
| cas3′ | Type I^{‡‡} | cas3 | NA | COG1203 | APE1232 and ygcB |
| cas3″ | Subtype I-A | NA | NA | COG2254 | APE1231 and BH0336 |
| | Subtype I-B | | | | |
| cas4 | Subtype I-A | cas4 and csa1 | NA | COG1468 | APE1239 and BH0340 |
| | Subtype I-B | | | | |
| | Subtype I-C | | | | |
| | Subtype I-D | | | | |
| | Subtype II-B | | | | |
| cas5 | Subtype I-A | cas5a, cas5d, | 3KG4 | COG1688 (RAMP) | APE1234, BH0337, |
| | Subtype I-B | cas5e, cas5h, | | | devS and ygcI |
| | Subtype I-C | cas5p, cas5t | | | |
| | Subtype I-E | and cmx5 | | | |
| cas6 | Subtype I-A | cas6 and cmx6 | 3I4H | COG1583 and | PF1131 and slr7014 |
| | Subtype I-B | | | COG5551 (RAMP) | |
| | Subtype I-D | | | | |
| | Subtype III-A | | | | |
| | Subtype III-B | | | | |
| cas6e | Subtype I-E | cse3 | 1WJ9 | (RAMP) | ygcH |
| cas6f | Subtype I-F | csy4 | 2XLJ | (RAMP) | y1727 |
| cas7 | Subtype I-A | csa2, csd2, | NA | COG1857 and | devR and ygcJ |
| | Subtype I-B | cse4, csh2, | | COG3649 (RAMP) | |
| | Subtype I-C | csp1 and cst2 | | | |
| | Subtype I-E | | | | |
| cas8a1 | Subtype I-A^{‡‡} | cmx1, cst1, | NA | BH0338-like | LA3191^{§§} and PG2018^{§§} |
| | | csx8, csx13 | | | |
| | | and CXXC-CXXC | | | |
| cas8a2 | Subtype I-A^{‡‡} | csa4 and csx9 | NA | PH0918 | AF0070, AF1873, |
| | | | | | MJ0385, PF0637, |
| | | | | | PH0918 and SSO1401 |
| cas8b | Subtype I-B^{‡‡} | csh1 and | NA | BH0338-like | MTH1090 and TM1802 |
| | | TM1802 | | | |
| cas8c | Subtype I-C^{‡‡} | csd1 and csp2 | NA | BH0338-like | BH0338 |
| cas9 | Type II^{‡‡} | csn1 and csx12 | NA | COG3513 | FTN_0757 and SPy1046 |
| cas10 | Type III^{‡‡} | cmr2, csm1 | NA | COG1353 | MTH326, Rv2823c^{§§} |
| | | and csx11 | | | and TM1794^{§§} |
| cas10d | Subtype I-D^{‡‡} | csc3 | NA | COG1353 | slr7011 |
| csy1 | Subtype I-F^{‡‡} | csy1 | NA | y1724-like | y1724 |
| csy2 | Subtype I-F | csy2 | NA | (RAMP) | y1725 |
| csy3 | Subtype I-F | csy3 | NA | (RAMP) | y1726 |
| cse1 | Subtype I-E^{‡‡} | cse1 | NA | YgcL-like | ygcL |
| cse2 | Subtype I-E | cse2 | 2ZCA | YgcK-like | ygcK |
| csc1 | Subtype I-D | csc1 | NA | alr1563-like (RAMP) | alr1563 |
| csc2 | Subtype I-D | csc1 and csc2 | NA | COG1337 (RAMP) | slr7012 |
| csa5 | Subtype I-A | csa5 | NA | AF1870 | AF1870, MJ0380, |
| | | | | | PF0643 and SSO1398 |
| csn2 | Subtype II-A | csn2 | NA | SPy1049-like | SPy1049 |
| csm2 | Subtype III-A^{‡‡} | csm2 | NA | COG1421 | MTH1081 and |
| | | | | | SERP2460 |
| csm3 | Subtype III-A | csc2 and csm3 | NA | COG1337 (RAMP) | MTH1080 and |
| | | | | | SERP2459 |
| csm4 | Subtype III-A | csm4 | NA | COG1567 (RAMP) | MTH1079 and |
| | | | | | SERP2458 |
| csm5 | Subtype III-A | csm5 | NA | COG1332 (RAMP) | MTH1078 and |
| | | | | | SERP2457 |
| csm6 | Subtype III-A | APE2256 and | 2WTE | COG1517 | APE2256 and SSO1445 |
| | | csm6 | | | |
| cmr1 | Subtype III-B | cmr1 | NA | COG1367 (RAMP) | PF1130 |
| cmr3 | Subtype III-B | cmr3 | NA | COG1769 (RAMP) | PF1128 |
| cmr4 | Subtype III-B | cmr4 | NA | COG1336 (RAMP) | PF1126 |
| cmr5 | Subtype III-B^{‡‡} | cmr5 | 2ZOP and 2OEB | COG3337 | MTH324 and PF1125 |
| cmr6 | Subtype III-B | cmr6 | NA | COG1604 (RAMP) | PF1124 |
| csb1 | Subtype I-U | GSU0053 | NA | (RAMP) | Balac_1306 and |
| | | | | | GSU0053 |
| csb2 | Subtype I-U^{§§} | NA | NA | (RAMP) | Balac_1305 and |
| | | | | | GSU0054 |
| csb3 | Subtype I-U | NA | NA | (RAMP) | Balac_1303^{§§} |
| csx17 | Subtype I-U | NA | NA | NA | Btus_2683 |
| csx14 | Subtype I-U | NA | NA | NA | GSU0052 |
| csx10 | Subtype I-U | csx10 | NA | (RAMP) | Caur_2274 |
| csx16 | Subtype III-U | VVA1548 | NA | NA | VVA1548 |
| csaX | Subtype III-U | csaX | NA | NA | SSO1438 |
| csx3 | Subtype III-U | csx3 | NA | NA | AF1864 |
| csx1 | Subtype III-U | csa3, csx1, | 1XMX and 2I71 | COG1517 and | MJ1666, NE0113, |
| | | csx2, DXTHG, | | COG4006 | PF1127 and TM1812 |
| | | NE0113 and | | | |
| | | TIGR02710 | | | |
| csx15 | Unknown | NA | NA | TTE2665 | TTE2665 |
| csf1 | Type U | csf1 | NA | NA | AFE_1038 |
| csf2 | Type U | csf2 | NA | (RAMP) | AFE_1039 |
| csf3 | Type U | csf3 | NA | (RAMP) | AFE_1040 |
| csf4 | Type U | csf4 | NA | NA | AFE_1037 |

### 7. Functional Analysis of Candidate Molecules

[0961] Candidate Cas9 molecules, candidate gRNA molecules, candidate Cas9 molecule/gRNA molecule complexes, can be evaluated by art-known methods or as described herein. For example, exemplary methods for evaluating the endonuclease activity of Cas9 molecule have been described previously (Jinek 2012).

[0962] 7.1 Binding and Cleavage Assay: Testing Cas9 Endonuclease Activity

[0963] The ability of a Cas9 molecule/gRNA molecule complex to bind to and cleave a target nucleic acid can be evaluated in a plasmid cleavage assay. In this assay, synthetic or in vitro-transcribed gRNA molecule is pre-annealed prior to the reaction by heating to 95° C. and slowly cooling down to room temperature. Native or restriction digest-linearized plasmid DNA (300 ng (˜8 nM)) is incubated for 60 min at 37° C. with purified Cas9 protein molecule (50-500 nM) and gRNA (50-500 nM, 1:1) in a Cas9 plasmid cleavage buffer (20 mM HEPES pH 7.5, 150 mM KCl, 0.5 mM DTT, 0.1 mM EDTA) with or without 10 mM MgCl₂. The reactions are stopped with 5×DNA loading buffer (30% glycerol, 1.2% SDS, 250 mM EDTA), resolved by a 0.8 or 1% agarose gel electrophoresis and visualized by ethidium bromide staining. The resulting cleavage products indicate whether the Cas9 molecule cleaves both DNA strands, or only one of the two strands. For example, linear DNA products indicate the cleavage of both DNA strands. Nicked open circular products indicate that only one of the two strands is cleaved.

[0964] Alternatively, the ability of a Cas9 molecule/gRNA molecule complex to bind to and cleave a target nucleic acid can be evaluated in an oligonucleotide DNA cleavage assay. In this assay, DNA oligonucleotides (10 pmol) are radiolabeled by incubating with 5 units T4 polynucleotide kinase and ˜3-6 pmol (˜20-40 mCi) [γ-32P]-ATP in 1×T4 polynucleotide kinase reaction buffer at 37° C. for 30 min, in a 50 μL reaction. After heat inactivation (65° C. for 20 min), reactions are purified through a column to remove unincorporated label. Duplex substrates (100 nM) are generated by annealing labeled oligonucleotides with equimolar amounts of unlabeled complementary oligonucleotide at 95° C. for 3 min, followed by slow cooling to room temperature. For cleavage assays, gRNA molecules are annealed by heating to 95° C. for 30 s, followed by slow cooling to room temperature. Cas9 (500 nM final concentration) is pre-incubated with the annealed gRNA molecules (500 nM) in cleavage assay buffer (20 mM HEPES pH 7.5, 100 mM KCl, 5 mM MgCl2, 1 mM DTT, 5% glycerol) in a total volume of 9 μL. Reactions are initiated by the addition of 1 μL, target DNA (10 nM) and incubated for 1 h at 37° C. Reactions are quenched by the addition of 20 μL of loading dye (5 mM EDTA, 0.025% SDS, 5% glycerol in formamide) and heated to 95° C. for 5 min. Cleavage products are resolved on 12% denaturing polyacrylamide gels containing 7 M urea and visualized by phosphorimaging. The resulting cleavage products indicate that whether the complementary strand, the non-complementary strand, or both, are cleaved.

[0965] One or both of these assays can be used to evaluate the suitability of a candidate gRNA molecule or candidate Cas9 molecule.

[0966] 7.2 Binding Assay: Testing the Binding of Cas9 Molecule to Target DNA

[0967] Exemplary methods for evaluating the binding of Cas9 molecule to target DNA have been described previously, e.g., in Jinek et al., SCIENCE 2012; 337(6096):816-821.

[0968] For example, in an electrophoretic mobility shift assay, target DNA duplexes are formed by mixing of each strand (10 nmol) in deionized water, heating to 95° C. for 3 min and slow cooling to room temperature. All DNAs are purified on 8% native gels containing 1×TBE. DNA bands are visualized by UV shadowing, excised, and eluted by soaking gel pieces in DEPC-treated H₂O. Eluted DNA is ethanol precipitated and dissolved in DEPC-treated H₂O. DNA samples are 5′ end labeled with [γ-32P]-ATP using T4 polynucleotide kinase for 30 min at 37° C. Polynucleotide kinase is heat denatured at 65° C. for 20 min, and unincorporated radiolabel is removed using a column. Binding assays are performed in buffer containing 20 mM HEPES pH 7.5, 100 mM KCl, 5 mM MgCl₂, 1 mM DTT and 10% glycerol in a total volume of 10 μL. Cas9 protein molecule is programmed with equimolar amounts of pre-annealed gRNA molecule and titrated from 100 pM to 1 μM. Radiolabeled DNA is added to a final concentration of 20 pM. Samples are incubated for 1 h at 37° C. and resolved at 4° C. on an 8% native polyacrylamide gel containing 1×TBE and 5 mM MgCl₂. Gels are dried and DNA visualized by phosphorimaging.

[0969] 7.3 Differential Scanning Flourimetry (DSF)

[0970] The thermostability of Cas9-gRNA ribonucleoprotein (RNP) complexes can be measured via DSF. This technique measures the thermostability of a protein, which can increase under favorable conditions such as the addition of a binding RNA molecule, e.g., a gRNA.

[0971] The assay is performed using two different protocols, one to test the best stoichiometric ratio of gRNA:Cas9 protein and another to determine the best solution conditions for RNP formation.

[0972] To determine the best solution to form RNP complexes, a 2 uM solution of Cas9 in water+10×SYPRO Orange® (Life Technologies cat#S-6650) and dispensed into a 384 well plate. An equimolar amount of gRNA diluted in solutions with varied pH and salt is then added. After incubating at room temperature for 10′ and brief centrifugation to remove any bubbles, a Bio-Rad CFX384™ Real-Time System C1000 Touch™ Thermal Cycler with the Bio-Rad CFX Manager software is used to run a gradient from 20° C. to 90° C. with a 1° C. increase in temperature every 10 seconds.

[0973] The second assay consists of mixing various concentrations of gRNA with 2 uM Cas9 in optimal buffer from assay 1 above and incubating at RT for 10′ in a 384 well plate. An equal volume of optimal buffer+10×SYPRO Orange® (Life Technologies cat#S-6650) is added and the plate sealed with Microseal® B adhesive (MSB-1001). Following brief centrifugation to remove any bubbles, a Bio-Rad CFX384™ Real-Time System C1000 Touch™ Thermal Cycler with the Bio-Rad CFX Manager software is used to run a gradient from 20° C. to 90° C. with a 1° increase in temperature every 10 seconds.

### 8. Genome Editing Approaches

[0974] Described herein are compositions, genome-editing systems and methods for targeted alteration (e.g., knockout) of the DMD gene, e.g., one or both alleles of the DMD gene, e.g., using one or more of the approaches or pathways described herein, e.g., using NHEJ.

[0975] 8.1 NHEJ Approaches for Gene Targeting

[0976] In certain embodiments of the methods provided herein, NHEJ-mediated alteration is used to alter a DMD target position. As described herein, nuclease-induced non-homologous end-joining (NHEJ) can be used to target gene-specific knockouts. Nuclease-induced NHEJ can also be used to remove (e.g., delete) sequence insertions in a gene of interest.

[0977] In certain embodiments, the genomic alterations associated with the methods described herein rely on nuclease-induced NHEJ and the error-prone nature of the NHEJ repair pathway. NHEJ repairs a double-strand break in the DNA by joining together the two ends; however, generally, the original sequence is restored only if two compatible ends, exactly as they were formed by the double-strand break, are perfectly ligated. The DNA ends of the double-strand break are frequently the subject of enzymatic processing, resulting in the addition or removal of nucleotides, at one or both strands, prior to rejoining of the ends. This results in the presence of insertion and/or deletion (indel) mutations in the DNA sequence at the site of the NHEJ repair. Two-thirds of these mutations typically alter the reading frame and, therefore, produce a non-functional protein. Additionally, mutations that maintain the reading frame, but which insert or delete a significant amount of sequence, can destroy functionality of the protein. This is locus dependent as mutations in critical functional domains are likely less tolerable than mutations in non-critical regions of the protein. The indel mutations generated by NHEJ are unpredictable in nature; however, at a given break site certain indel sequences are favored and are over represented in the population, likely due to small regions of microhomology. The lengths of deletions can vary widely; they are most commonly in the 1-50 bp range, but can reach greater than 100-200 bp. Insertions tend to be shorter and often include short duplications of the sequence immediately surrounding the break site. However, it is possible to obtain large insertions, and in these cases, the inserted sequence has often been traced to other regions of the genome or to plasmid DNA present in the cells.

[0978] Because NHEJ is a mutagenic process, it can also be used to delete small sequence motifs (e.g., motifs less than or equal to 50 nucleotides in length) as long as the generation of a specific final sequence is not required. If a double-strand break is targeted near to a target sequence, the deletion mutations caused by the NHEJ repair often span, and therefore remove, the unwanted nucleotides. For the deletion of larger DNA segments, introducing two double-strand breaks, one on each side of the sequence, can result in NHEJ between the ends with removal of the entire intervening sequence. In this way, DNA segments as large as several hundred kilobases can be deleted. Both of these approaches can be used to delete specific DNA sequences; however, the error-prone nature of NHEJ may still produce indel mutations at the site of repair.

[0979] Both double strand cleaving eaCas9 molecules and single strand, or nickase, eaCas9 molecules can be used in the methods and compositions described herein to generate NHEJ-mediated indels. NHEJ-mediated indels targeted to the early coding region of a gene of interest can be used to knockout (i.e., eliminate expression of) a gene of interest. For example, early coding region of a gene of interest includes sequence immediately following a transcription start site, within a first exon of the coding sequence, or within 500 bp of the transcription start site (e.g., less than 500, 450, 400, 350, 300, 250, 200, 150, 100 or 50 bp).

[0980] 8.2 Placement of Double Strand or Single Strand Breaks Relative to the Target Position

[0981] In certain embodiments, in which a gRNA and Cas9 nuclease generate a double strand break for the purpose of inducing NHEJ-mediated indels, a gRNA, e.g., a unimolecular (or chimeric) or modular gRNA molecule, is configured to position one double-strand break in close proximity to a nucleotide of the target position. In certain embodiments, the cleavage site is between 0-30 bp away from the target position (e.g., less than 30, 25, 20, 15, 10, 9, 8, 7, 6, 5, 4, 3, 2 or 1 bp from the target position).

[0982] In certain embodiments, in which two gRNAs complexing with Cas9 nickases induce two single strand breaks for the purpose of inducing NHEJ-mediated indels, two gRNAs, e.g., independently, unimolecular (or chimeric) or modular gRNA, are configured to position two single-strand breaks to provide for NHEJ repair a nucleotide of the target position. In certain embodiments, the gRNAs are configured to position cuts at the same position, or within a few nucleotides of one another, on different strands, essentially mimicking a double strand break. In certain embodiments, the closer nick is between 0-30 bp away from the target position (e.g., less than 30, 25, 20, 15, 10, 9, 8, 7, 6, 5, 4, 3, 2 or 1 bp from the target position), and the two nicks are within 25-55 bp of each other (e.g., between 25 to 50, 25 to 45, 25 to 40, 25 to 35, 25 to 30, 50 to 55, 45 to 55, 40 to 55, 35 to 55, 30 to 55, 30 to 50, 35 to 50, 40 to 50, 45 to 50, 35 to 45, or 40 to 45 bp) and no more than 100 bp away from each other (e.g., no more than 90, 80, 70, 60, 50, 40, 30, 20 or 10 bp). In certain embodiments, the gRNAs are configured to place a single strand break on either side of a nucleotide of the target position.

[0983] Both double strand cleaving eaCas9 molecules and single strand, or nickase, eaCas9 molecules can be used in the methods and compositions described herein to generate breaks both sides of a target position. Double strand or paired single strand breaks may be generated on both sides of a target position to remove the nucleic acid sequence between the two cuts (e.g., the region between the two breaks in deleted). In one embodiment, two gRNAs, e.g., independently, unimolecular (or chimeric) or modular gRNA, are configured to position a double-strand break on both sides of a target position. In an alternate embodiment, three gRNAs, e.g., independently, unimolecular (or chimeric) or modular gRNA, are configured to position a double strand break (i.e., one gRNA complexes with a cas9 nuclease) and two single strand breaks or paired single stranded breaks (i.e., two gRNAs complex with Cas9 nickases) on either side of the target position. In certain embodiments, four gRNAs, e.g., independently, unimolecular (or chimeric) or modular gRNA, are configured to generate two pairs of single stranded breaks (i.e., two pairs of two gRNAs complex with Cas9 nickases) on either side of the target position. The double strand break(s) or the closer of the two single strand nicks in a pair will ideally be within 0-500 bp of the target position (e.g., no more than 450, 400, 350, 300, 250, 200, 150, 100, 50 or 25 bp from the target position). When nickases are used, the two nicks in a pair are within 25-55 bp of each other (e.g., between 25 to 50, 25 to 45, 25 to 40, 25 to 35, 25 to 30, 50 to 55, 45 to 55, 40 to 55, 35 to 55, 30 to 55, 30 to 50, 35 to 50, 40 to 50, 45 to 50, 35 to 45, or 40 to 45 bp) and no more than 100 bp away from each other (e.g., no more than 90, 80, 70, 60, 50, 40, 30, 20, or 10 bp).

[0984] 8.3 HDR Repair, HDR-Mediated Knock-in, and Template Nucleic Acids

[0985] In certain embodiments of the methods provided herein, HDR-mediated sequence alteration is used to alter the sequence of one or more nucleotides in a DMD gene using an exogenously provided template nucleic acid (also referred to herein as a donor construct). In certain embodiments, HDR-mediated alteration of a DMD target position occurs by HDR with an exogenously provided donor template or template nucleic acid. For example, the donor construct or template nucleic acid provides for alteration of a DMD target position. In certain embodiments, a plasmid donor is used as a template for homologous recombination. In certain embodiments, a single stranded donor template is used as a template for alteration of the DMD target position by alternate methods of HDR (e.g., single strand annealing) between the target sequence and the donor template. Donor template-effected alteration of a DMD target position depends on cleavage by a Cas9 molecule. Cleavage by Cas9 can comprise a double strand break or two single strand breaks.

[0986] In certain embodiments, HDR-mediated sequence alteration is used to alter the sequence of one or more nucleotides in a DMD gene without using an exogenously provided template nucleic acid. In certain embodiments, alteration of a DMD target position occurs by HDR with endogenous genomic donor sequence. For example, the endogenous genomic donor sequence provides for alteration of the DMD target position. In certain embodiments, the endogenous genomic donor sequence is located on the same chromosome as the target sequence. In certain embodiments, the endogenous genomic donor sequence is located on a different chromosome from the target sequence. Alteration of a DMD target position by endogenous genomic donor sequence depends on cleavage by a Cas9 molecule. Cleavage by Cas9 can comprise a double strand break or two single strand breaks.

[0987] In certain embodiments of the methods provided herein, HDR-mediated alteration is used to alter a single nucleotide in a DMD gene. These embodiments may utilize either one double-strand break or two single-strand breaks. In certain embodiments, a single nucleotide alteration is incorporated using (1) one double-strand break, (2) two single-strand breaks, (3) two double-strand breaks with a break occurring on each side of the target position, (4) one double-strand break and two single strand breaks with the double strand break and two single strand breaks occurring on each side of the target position, (5) four single-strand breaks with a pair of single-strand breaks occurring on each side of the target position, or (6) one single-strand break.

[0988] In certain embodiments wherein a single-stranded template nucleic acid is used, the target position can be altered by alternative HDR.

[0989] Donor template-effected alteration of a DMD target position depends on cleavage by a Cas9 molecule. Cleavage by Cas9 can comprise a nick, a double-strand break, or two single-strand breaks, e.g., one on each strand of the target nucleic acid. After introduction of the breaks on the target nucleic acid, resection occurs at the break ends resulting in single stranded overhanging DNA regions.

[0990] In canonical HDR, a double-stranded donor template is introduced, comprising homologous sequence to the target nucleic acid that will either be directly incorporated into the target nucleic acid or used as a template to change the sequence of the target nucleic acid. After resection at the break, repair can progress by different pathways, e.g., by the double Holliday junction model (or double-strand break repair, DSBR, pathway) or the synthesis-dependent strand annealing (SDSA) pathway. In the double Holliday junction model, strand invasion by the two single stranded overhangs of the target nucleic acid to the homologous sequences in the donor template occurs, resulting in the formation of an intermediate with two Holliday junctions. The junctions migrate as new DNA is synthesized from the ends of the invading strand to fill the gap resulting from the resection. The end of the newly synthesized DNA is ligated to the resected end, and the junctions are resolved, resulting in alteration of the target nucleic acid. Crossover with the donor template may occur upon resolution of the junctions. In the SDSA pathway, only one single stranded overhang invades the donor template and new DNA is synthesized from the end of the invading strand to fill the gap resulting from resection. The newly synthesized DNA then anneals to the remaining single stranded overhang, new DNA is synthesized to fill in the gap, and the strands are ligated to produce the altered DNA duplex.

[0991] In alternative HDR, a single strand donor template, e.g., template nucleic acid, is introduced. A nick, single strand break, or double strand break at the target nucleic acid, for altering a desired target position, is mediated by a Cas9 molecule, e.g., described herein, and resection at the break occurs to reveal single stranded overhangs. Incorporation of the sequence of the template nucleic acid to alter a DMD target position typically occurs by the SDSA pathway, as described above.

[0992] Additional details on template nucleic acids are provided in Section IV entitled “Template nucleic acids” in International Application PCT/US2014/057905.

[0993] In certain embodiments, double strand cleavage is effected by a Cas9 molecule having cleavage activity associated with an HNH-like domain and cleavage activity associated with a RuvC-like domain, e.g., an N-terminal RuvC-like domain, e.g., a wild-type Cas9. Such embodiments require only a single gRNA.

[0994] In certain embodiments, one single-strand break, or nick, is effected by a Cas9 molecule having nickase activity, e.g., a Cas9 nickase as described herein. A nicked target nucleic acid can be a substrate for alt-HDR.

[0995] In certain embodiments, two single-strand breaks, or nicks, are effected by a Cas9 molecule having nickase activity, e.g., cleavage activity associated with an HNH-like domain or cleavage activity associated with an N-terminal RuvC-like domain. Such embodiments usually require two gRNAs, one for placement of each single-strand break. In certain embodiments, the Cas9 molecule having nickase activity cleaves the strand to which the gRNA hybridizes, but not the strand that is complementary to the strand to which the gRNA hybridizes. In certain embodiments, the Cas9 molecule having nickase activity does not cleave the strand to which the gRNA hybridizes, but rather cleaves the strand that is complementary to the strand to which the gRNA hybridizes.

[0996] In certain embodiments, the nickase has HNH activity, e.g., a Cas9 molecule having the RuvC activity inactivated, e.g., a Cas9 molecule having a mutation at D10, e.g., the D10A mutation (see, e.g., SEQ ID NO:10). D10A inactivates RuvC; therefore, the Cas9 nickase has (only) HNH activity and will cut on the strand to which the gRNA hybridizes (e.g., the complementary strand, which does not have the NGG PAM on it). In certain embodiments, a Cas9 molecule having an H840, e.g., an H840A, mutation can be used as a nickase. H840A inactivates HNH; therefore, the Cas9 nickase has (only) RuvC activity and cuts on the non-complementary strand (e.g., the strand that has the NGG PAM and whose sequence is identical to the gRNA). In certain embodiments, a Cas9 molecule having an N863 mutation, e.g., the N863A mutation, mutation can be used as a nickase. N863A inactivates HNH therefore the Cas9 nickase has (only) RuvC activity and cuts on the non-complementary strand (the strand that has the NGG PAM and whose sequence is identical to the gRNA).

[0997] In certain embodiments, in which a nickase and two gRNAs are used to position two single strand nicks, one nick is on the + strand and one nick is on the − strand of the target nucleic acid. The PAMs can be outwardly facing. The gRNAs can be selected such that the gRNAs are separated by, from about 0-50, 0-100, or 0-200 nucleotides. In certain embodiments, there is no overlap between the target sequences that are complementary to the targeting domains of the two gRNAs. In certain embodiments, the gRNAs do not overlap and are separated by as much as 50, 100, or 200 nucleotides. In certain embodiments, the use of two gRNAs can increase specificity, e.g., by decreasing off-target binding (Ran 2013).

[0998] In certain embodiments, a single nick can be used to induce HDR, e.g., alt-HDR. It is contemplated herein that a single nick can be used to increase the ratio of HR to NHEJ at a given cleavage site. In certain embodiments, a single strand break is formed in the strand of the target nucleic acid to which the targeting domain of said gRNA is complementary. In certain embodiments, a single strand break is formed in the strand of the target nucleic acid other than the strand to which the targeting domain of said gRNA is complementary.

[0999] 8.4 Placement of Double Strand or Single Strand Breaks Relative to the Target Position

[1000] A double strand break or single strand break in one of the strands should be sufficiently close to a DMD target position that an alteration is produced in the desired region, e.g., exon 44, exon 45, exon 46, exon 47, exon 48, exon 49, exon 50, exon 51, exon 52, exon 53, exon 54, or exon 55 of the DMD gene. In certain embodiments, the distance is not more than 50, 100, 200, 300, 350 or 400 nucleotides. In certain embodiments, the break should be sufficiently close to target position such that the target position is within the region that is subject to exonuclease-mediated removal during end resection. If the distance between the DMD target position and a break is too great, the sequence desired to be altered may not be included in the end resection and, therefore, may not be altered, as donor sequence, either exogenously provided donor sequence or endogenous genomic donor sequence, in certain embodiments is only used to alter sequence within the end resection region.

[1001] In certain embodiments, the methods described herein introduce one or more breaks near a DMD target position. In certain of these embodiments, two or more breaks are introduced that flank a DMD target position. The two or more breaks remove (e.g., delete) a genomic sequence including a DMD target position. All methods described herein result in altering a DMD target position within a DMD gene.

[1002] In certain embodiments, the gRNA targeting domain is configured such that a cleavage event, e.g., a double strand or single strand break, is positioned within 1, 2, 3, 4, 5, 10, 15, 20, 25, 30, 35, 40, 45, 50, 60, 70, 80, 90, 100, 150, or 200 nucleotides of the region desired to be altered, e.g., a mutation. The break, e.g., a double strand or single strand break, can be positioned upstream or downstream of the region desired to be altered, e.g., a mutation. In certain embodiments, a break is positioned within the region desired to be altered, e.g., within a region defined by at least two mutant nucleotides. In certain embodiments, a break is positioned immediately adjacent to the region desired to be altered, e.g., immediately upstream or downstream of a mutation.

[1003] In certain embodiments, a single strand break is accompanied by an additional single strand break, positioned by a second gRNA molecule, as discussed below. For example, the targeting domains bind configured such that a cleavage event, e.g., the two single strand breaks, are positioned within 1, 2, 3, 4, 5, 10, 15, 20, 25, 30, 35, 40, 45, 50, 60, 70, 80, 90, 100, 150, or 200 nucleotides of a target position. In certain embodiments, the first and second gRNA molecules are configured such that, when guiding a Cas9 nickase, a single strand break will be accompanied by an additional single strand break, positioned by a second gRNA, sufficiently close to one another to result in alteration of the desired region. In certain embodiments, the first and second gRNA molecules are configured such that a single strand break positioned by said second gRNA is within 10, 20, 30, 40, or 50 nucleotides of the break positioned by said first gRNA molecule, e.g., when the Cas9 is a nickase. In certain embodiments, the two gRNA molecules are configured to position cuts at the same position, or within a few nucleotides of one another, on different strands, e.g., essentially mimicking a double strand break.

[1004] In certain embodiments in which a gRNA (unimolecular (or chimeric) or modular gRNA) and Cas9 nuclease induce a double strand break for the purpose of inducing HDR-mediated sequence alteration, the cleavage site is between 0-200 bp (e.g., 0 to 175, 0 to 150, 0 to 125, 0 to 100, 0 to 75, 0 to 50, 0 to 25, 25 to 200, 25 to 175, 25 to 150, 25 to 125, 25 to 100, 25 to 75, 25 to 50, 50 to 200, 50 to 175, 50 to 150, 50 to 125, 50 to 100, 50 to 75, 75 to 200, 75 to 175, 75 to 150, 75 to 125, 75 to 100 bp) away from the target position. In certain embodiments, the cleavage site is between 0-100 bp (e.g., 0 to 75, 0 to 50, 0 to 25, 25 to 100, 25 to 75, 25 to 50, 50 to 100, 50 to 75 or 75 to 100 bp) away from the target position.

[1005] In certain embodiments, one can promote HDR by using nickases to generate a break with overhangs. While not wishing to be bound by theory, the single stranded nature of the overhangs can enhance the cell's likelihood of repairing the break by HDR as opposed to, e.g., NHEJ.

[1006] Specifically, in some embodiments, HDR is promoted by selecting a first gRNA that targets a first nickase to a first target sequence, and a second gRNA that targets a second nickase to a second target sequence which is on the opposite DNA strand from the first target sequence and offset from the first nick.

[1007] In certain embodiments, the targeting domain of a gRNA molecule is configured to position a cleavage event sufficiently far from a preselected nucleotide that the nucleotide is not altered. In certain embodiments, the targeting domain of a gRNA molecule is configured to position an intronic cleavage event sufficiently far from an intron/exon border, or naturally occurring splice signal, to avoid alteration of the exonic sequence or unwanted splicing events. The gRNA molecule may be a first, second, third and/or fourth gRNA molecule, as described herein.

[1008] 8.5 Placement of a First Break and a Second Break Relative to Each Other

[1009] In certain embodiments, a double strand break can be accompanied by an additional double strand break, positioned by a second gRNA molecule, as is discussed below.

[1010] In certain embodiments, a double strand break can be accompanied by two additional single strand breaks, positioned by a second gRNA molecule and a third gRNA molecule.

[1011] In certain embodiments, a first and second single strand breaks can be accompanied by two additional single strand breaks positioned by a third gRNA molecule and a fourth gRNA molecule.

[1012] When two or more gRNAs are used to position two or more cleavage events, e.g., double strand or single strand breaks, in a target nucleic acid, it is contemplated that the two or more cleavage events may be made by the same or different Cas9 proteins. For example, when two gRNAs are used to position two double stranded breaks, a single Cas9 nuclease may be used to create both double stranded breaks. When two or more gRNAs are used to position two or more single stranded breaks (nicks), a single Cas9 nickase may be used to create the two or more nicks. When two or more gRNAs are used to position at least one double stranded break and at least one single stranded break, two Cas9 proteins may be used, e.g., one Cas9 nuclease and one Cas9 nickase. In certain embodiments, two or more Cas9 proteins are used, and the two or more Cas9 proteins may be delivered sequentially to control specificity of a double stranded versus a single stranded break at the desired position in the target nucleic acid.

[1013] In certain embodiments, the targeting domain of the first gRNA molecule and the targeting domain of the second gRNA molecules are complementary to opposite strands of the target nucleic acid molecule. In certain embodiments, the gRNA molecule and the second gRNA molecule are configured such that the PAMs are oriented outward.

[1014] In certain embodiments, two gRNA are selected to direct Cas9-mediated cleavage at two positions that are a preselected distance from each other. In certain embodiments, the two points of cleavage are on opposite strands of the target nucleic acid. In certain embodiments, the two cleavage points form a blunt ended break, and in other embodiments, they are offset so that the DNA ends comprise one or two overhangs (e.g., one or more 5′ overhangs and/or one or more 3′ overhangs). In certain embodiments, each cleavage event is a nick. In certain embodiments, the nicks are close enough together that they form a break that is recognized by the double stranded break machinery (as opposed to being recognized by, e.g., the SSBr machinery). In certain embodiments, the nicks are far enough apart that they create an overhang that is a substrate for HDR, i.e., the placement of the breaks mimics a DNA substrate that has experienced some resection. For instance, in certain embodiments the nicks are spaced to create an overhang that is a substrate for processive resection. In certain embodiments, the two breaks are spaced within 25-65 nucleotides of each other. The two breaks may be, e.g., about 25, 30, 35, 40, 45, 50, 55, 60, or 65 nucleotides of each other. The two breaks may be, e.g., at least about 25, 30, 35, 40, 45, 50, 55, 60, or 65 nucleotides of each other. The two breaks may be, e.g., at most about 30, 35, 40, 45, 50, 55, 60, or 65 nucleotides of each other. In certain embodiments, the two breaks are about 25-30, 30-35, 35-40, 40-45, 45-50, 50-55, 55-60, or 60-65 nucleotides of each other.

[1015] In certain embodiments, the break that mimics a resected break comprises a 3′ overhang (e.g., generated by a DSB and a nick, where the nick leaves a 3′ overhang), a 5′ overhang (e.g., generated by a DSB and a nick, where the nick leaves a 5′ overhang), a 3′ and a 5′ overhang (e.g., generated by three cuts), two 3′ overhangs (e.g., generated by two nicks that are offset from each other), or two 5′ overhangs (e.g., generated by two nicks that are offset from each other).

[1016] In certain embodiments in which two gRNAs (independently, unimolecular (or chimeric) or modular gRNA) complexing with Cas9 nickases induce two single strand breaks for the purpose of inducing HDR-mediated alteration, the closer nick is between 0-200 bp (e.g., 0 to 175, 0 to 150, 0 to 125, 0 to 100, 0 to 75, 0 to 50, 0 to 25, 25 to 200, 25 to 175, 25 to 150, 25 to 125, 25 to 100, 25 to 75, 25 to 50, 50 to 200, 50 to 175, 50 to 150, 50 to 125, 50 to 100, 50 to 75, 75 to 200, 75 to 175, 75 to 150, 75 to 125, or 75 to 100 bp) away from the target position and the two nicks will ideally be within 25-65 bp of each other (e.g., 25 to 50, 25 to 45, 25 to 40, 25 to 35, 25 to 30, 30 to 55, 30 to 50, 30 to 45, 30 to 40, 30 to 35, 35 to 55, 35 to 50, 35 to 45, 35 to 40, 40 to 55, 40 to 50, 40 to 45 bp, 45 to 50 bp, 50 to 55 bp, 55 to 60 bp, or 60 to 65 bp) and no more than 100 bp away from each other (e.g., no more than 90, 80, 70, 60, 50, 40, 30, 20, 10, or 5 bp away from each other). In certain embodiments, the cleavage site is between 0-100 bp (e.g., 0 to 75, 0 to 50, 0 to 25, 25 to 100, 25 to 75, 25 to 50, 50 to 100, 50 to 75, or 75 to 100 bp) away from the target position.

[1017] In certain embodiments, two gRNAs, e.g., independently, unimolecular (or chimeric) or modular gRNA, are configured to position a double-strand break on both sides of a target position. In certain embodiments, three gRNAs, e.g., independently, unimolecular (or chimeric) or modular gRNA, are configured to position a double strand break (i.e., one gRNA complexes with a cas9 nuclease) and two single strand breaks or paired single stranded breaks (i.e., two gRNAs complex with Cas9 nickases) on either side of the target position. In certain embodiments, four gRNAs, e.g., independently, unimolecular (or chimeric) or modular gRNA, are configured to generate two pairs of single stranded breaks (i.e., two pairs of two gRNAs complex with Cas9 nickases) on either side of the target position. The double strand break(s) or the closer of the two single strand nicks in a pair will ideally be within 0-500 bp of the target position (e.g., no more than 450, 400, 350, 300, 250, 200, 150, 100, 50 or 25 bp from the target position). When nickases are used, the two nicks in a pair are, in certain embodiments, within 25-65 bp of each other (e.g., between 25 to 55, 25 to 50, 25 to 45, 25 to 40, 25 to 35, 25 to 30, 50 to 55, 45 to 55, 40 to 55, 35 to 55, 30 to 55, 30 to 50, 35 to 50, 40 to 50, 45 to 50, 35 to 45, 40 to 45 bp, 45 to 50 bp, 50 to 55 bp, 55 to 60 bp, or 60 to 65 bp) and no more than 100 bp away from each other (e.g., no more than 90, 80, 70, 60, 50, 40, 30, or 20 or 10 bp).

[1018] When two gRNAs are used to target Cas9 molecules to breaks, different combinations of Cas9 molecules are envisioned. In certain embodiments, a first gRNA is used to target a first Cas9 molecule to a first target position, and a second gRNA is used to target a second Cas9 molecule to a second target position. In certain embodiments, the first Cas9 molecule creates a nick on the first strand of the target nucleic acid, and the second Cas9 molecule creates a nick on the opposite strand, resulting in a double stranded break (e.g., a blunt ended cut or a cut with overhangs).

[1019] Different combinations of nickases can be chosen to target one single stranded break to one strand and a second single stranded break to the opposite strand. When choosing a combination, one can take into account that there are nickases having one active RuvC-like domain, and nickases having one active HNH domain. In certain embodiments, a RuvC-like domain cleaves the non-complementary strand of the target nucleic acid molecule. In certain embodiments, an HNH-like domain cleaves a single stranded complementary domain, e.g., a complementary strand of a double stranded nucleic acid molecule. Generally, if both Cas9 molecules have the same active domain (e.g., both have an active RuvC domain or both have an active HNH domain), one will choose two gRNAs that bind to opposite strands of the target. In more detail, in some embodiments a first gRNA is complementary with a first strand of the target nucleic acid and binds a nickase having an active RuvC-like domain and causes that nickase to cleave the strand that is non-complementary to that first gRNA, i.e., a second strand of the target nucleic acid; and a second gRNA is complementary with a second strand of the target nucleic acid and binds a nickase having an active RuvC-like domain and causes that nickase to cleave the strand that is non-complementary to that second gRNA, i.e., the first strand of the target nucleic acid. Conversely, in some embodiments, a first gRNA is complementary with a first strand of the target nucleic acid and binds a nickase having an active HNH domain and causes that nickase to cleave the strand that is complementary to that first gRNA, i.e., a first strand of the target nucleic acid; and a second gRNA is complementary with a second strand of the target nucleic acid and binds a nickase having an active HNH domain and causes that nickase to cleave the strand that is complementary to that second gRNA, i.e., the second strand of the target nucleic acid. In another arrangement, if one Cas9 molecule has an active RuvC-like domain and the other Cas9 molecule has an active HNH domain, the gRNAs for both Cas9 molecules can be complementary to the same strand of the target nucleic acid, so that the Cas9 molecule with the active RuvC-like domain will cleave the non-complementary strand and the Cas9 molecule with the HNH domain will cleave the complementary strand, resulting in a double stranded break.

[1020] 8.6 Homology Arms of the Donor Template

[1021] A homology arm should extend at least as far as the region in which end resection may occur, e.g., in order to allow the resected single stranded overhang to find a complementary region within the donor template. The overall length could be limited by parameters such as plasmid size or viral packaging limits. In certain embodiments, a homology arm does not extend into repeated elements, e.g., Alu repeats or LINE repeats.

[1022] Exemplary homology arm lengths include at least 50, 100, 250, 500, 750, 1000, 2000, 3000, 4000, or 5000 nucleotides. In certain embodiments, the homology arm length is 50-100, 100-250, 250-500, 500-750, 750-1000, 1000-2000, 2000-3000, 3000-4000, or 4000-5000 nucleotides.

[1023] A template nucleic acid, as that term is used herein, refers to a nucleic acid sequence which can be used in conjunction with a Cas9 molecule and a gRNA molecule to alter the structure of a DMD target position. In certain embodiments, the DMD target position can be a site between two nucleotides, e.g., adjacent nucleotides, on the target nucleic acid into which one or more nucleotides is added. Alternatively, the DMD target position may comprise one or more nucleotides that are altered by a template nucleic acid.

[1024] In certain embodiments, the target nucleic acid is modified to have some or all of the sequence of the template nucleic acid, typically at or near cleavage site(s). In certain embodiments, the template nucleic acid is single stranded. In certain embodiments, the template nucleic acid is double stranded. In certain embodiments, the template nucleic acid is DNA, e.g., double stranded DNA. In certain embodiments, the template nucleic acid is single stranded DNA. In certain embodiments, the template nucleic acid is encoded on the same vector backbone, e.g. AAV genome, plasmid DNA, as the Cas9 and gRNA. In certain embodiments, the template nucleic acid is excised from a vector backbone in vivo, e.g., it is flanked by gRNA recognition sequences. In certain embodiments, the template nucleic acid comprises endogenous genomic sequence.

[1025] In certain embodiments, the template nucleic acid alters the structure of the target position by participating in an HDR event. In certain embodiments, the template nucleic acid alters the sequence of the target position. In certain embodiments, the template nucleic acid results in the incorporation of a modified, or non-naturally occurring base into the target nucleic acid.

[1026] Typically, the template sequence undergoes a breakage mediated or catalyzed recombination with the target sequence. In certain embodiments, the template nucleic acid includes sequence that corresponds to a site on the target sequence that is cleaved by an eaCas9 mediated cleavage event. In certain embodiments, the template nucleic acid includes sequence that corresponds to both a first site on the target sequence that is cleaved in a first Cas9 mediated event, and a second site on the target sequence that is cleaved in a second Cas9 mediated event.

[1027] A template nucleic acid having homology with a DMD target position in a DMD gene regulatory region can be used to alter the structure of the regulatory region.

[1028] A template nucleic acid typically comprises the following components:

[1029] [5′ homology arm]-[replacement sequence]-[3′ homology arm].

[1030] The homology arms provide for recombination into the chromosome, thus replacing the undesired element, e.g., a mutation or signature, with the replacement sequence. In certain embodiments, the homology arms flank the most distal cleavage sites.

[1031] In certain embodiments, the 3′ end of the 5′ homology arm is the position next to the 5′ end of the replacement sequence. In certain embodiments, the 5′ homology arm can extend at least 10, 20, 30, 40, 50, 100, 200, 300, 400, 500, 600, 700, 800, 900, 1000, 1500, 2000, 3000, 4000, or 5000 nucleotides 5′ from the 5′ end of the replacement sequence.

[1032] In certain embodiments, the 5′ end of the 3′ homology arm is the position next to the 3′ end of the replacement sequence. In an embodiment, the 3′ homology arm can extend at least 10, 20, 30, 40, 50, 100, 200, 300, 400, 500, 600, 700, 800, 900, 1000, 1500, 2000, 3000, 4000, or 5000 nucleotides 3′ from the 3′ end of the replacement sequence.

[1033] In certain embodiments, to alter one or more nucleotides at a DMD target position, the homology arms, e.g., the 5′ and 3′ homology arms, may each comprise about 1000 bp of sequence flanking the most distal gRNAs (e.g., 1000 bp of sequence on either side of the DMD target position).

[1034] In certain embodiments, one or both homology arms may be shortened to avoid including certain sequence repeat elements, e.g., Alu repeats or LINE elements. For example, a 5′ homology arm may be shortened to avoid a sequence repeat element. In certain embodiments, a 3′ homology arm may be shortened to avoid a sequence repeat element. In certain embodiments, both the 5′ and the 3′ homology arms may be shortened to avoid including certain sequence repeat elements.

[1035] In certain embodiments, template nucleic acids for altering the sequence of a DMD target position may be designed for use as a single-stranded oligonucleotide, e.g., a single-stranded oligodeoxynucleotide (ssODN). When using a ssODN, 5′ and 3′ homology arms may range up to about 200 bp in length, e.g., at least 25, 50, 75, 100, 125, 150, 175, or 200 bp in length. Longer homology arms are also contemplated for ssODNs as improvements in oligonucleotide synthesis continue to be made. In certain embodiments, a longer homology arm is made by a method other than chemical synthesis, e.g., by denaturing a long double stranded nucleic acid and purifying one of the strands, e.g., by affinity for a strand-specific sequence anchored to a solid substrate.

[1036] In certain embodiments, alt-HDR proceeds more efficiently when the template nucleic acid has extended homology 5′ to the nick (i.e., in the 5′ direction of the nicked strand). Accordingly, in certain embodiments, the template nucleic acid has a longer homology arm and a shorter homology arm, wherein the longer homology arm can anneal 5′ of the nick. In certain embodiments, the arm that can anneal 5′ to the nick is at least 25, 50, 75, 100, 125, 150, 175, or 200, 300, 400, 500, 600, 700, 800, 900, 1000, 1500, 2000, 3000, 4000, or 5000 nucleotides from the nick or the 5′ or 3′ end of the replacement sequence. In certain embodiments, the arm that can anneal 5′ to the nick is at least about 10%, about 20%, about 30%, about 40%, or about 50% longer than the arm that can anneal 3′ to the nick. In certain embodiments, the arm that can anneal 5′ to the nick is at least 2×, 3×, 4×, or 5× longer than the arm that can anneal 3′ to the nick. Depending on whether a ssDNA template can anneal to the intact strand or the nicked strand, the homology arm that anneals 5′ to the nick may be at the 5′ end of the ssDNA template or the 3′ end of the ssDNA template, respectively.

[1037] Similarly, in certain embodiments, the template nucleic acid has a 5′ homology arm, a replacement sequence, and a 3′ homology arm, such that the template nucleic acid has extended homology to the 5′ of the nick. For example, the 5′ homology arm and 3′ homology arm may be substantially the same length, but the replacement sequence may extend farther 5′ of the nick than 3′ of the nick. In certain embodiments, the replacement sequence extends at least about 10%, about 20%, about 30%, about 40%, about 50%, 2×, 3×, 4×, or 5× further to the 5′ end of the nick than the 3′ end of the nick.

[1038] In certain embodiments, alt-HDR proceeds more efficiently when the template nucleic acid is centered on the nick. Accordingly, in certain embodiments, the template nucleic acid has two homology arms that are essentially the same size. For instance, the first homology arm of a template nucleic acid may have a length that is within about 10%, about 9%, about 8%, about 7%, about 6%, about 5%, about 4%, about 3%, about 2%, or about 1% of the second homology arm of the template nucleic acid.

[1039] Similarly, in certain embodiments, the template nucleic acid has a 5′ homology arm, a replacement sequence, and a 3′ homology arm, such that the template nucleic acid extends substantially the same distance on either side of the nick. For example, the homology arms may have different lengths, but the replacement sequence may be selected to compensate for this. For example, the replacement sequence may extend further 5′ from the nick than it does 3′ of the nick, but the homology arm 5′ of the nick is shorter than the homology arm 3′ of the nick, to compensate. The converse is also possible, e.g., that the replacement sequence may extend further 3′ from the nick than it does 5′ of the nick, but the homology arm 3′ of the nick is shorter than the homology arm 5′ of the nick, to compensate.

[1040] 8.7 Template Nucleic Acids

[1041] In certain embodiments, the template nucleic acid is double stranded. In certain embodiments, the template nucleic acid is single stranded. In certain embodiments, the template nucleic acid comprises a single stranded portion and a double stranded portion. In certain embodiments, the template nucleic acid comprises about 50 to 100 bp, e.g., 55 to 95, 60 to 90, 65 to 85, or 70 to 80 bp, homology on either side of the nick and/or replacement sequence. In certain embodiments, the template nucleic acid comprises about 50, 55, 60, 65, 70, 75, 80, 85, 90, 95, or 100 bp homology 5′ of the nick or replacement sequence, 3′ of the nick or replacement sequence, or both 5′ and 3′ of the nick or replacement sequences.

[1042] In certain embodiments, the template nucleic acid comprises about 150 to 200 bp, e.g., 155 to 195, 160 to 190, 165 to 185, or 170 to 180 bp, homology 3′ of the nick and/or replacement sequence. In certain embodiments, the template nucleic acid comprises about 150, 155, 160, 165, 170, 175, 180, 185, 190, 195, or 200 bp homology 3′ of the nick or replacement sequence. In certain embodiments, the template nucleic acid comprises less than about 100, 90, 80, 70, 60, 50, 40, 30, 20, 15, or 10 bp homology 5′ of the nick or replacement sequence.

[1043] In certain embodiment, the template nucleic acid comprises about 150 to 200 bp, e.g., 155 to 195, 160 to 190, 165 to 185, or 170 to 180 bp, homology 5′ of the nick and/or replacement sequence. In certain embodiment, the template nucleic acid comprises about 150, 155, 160, 165, 170, 175, 180, 185, 190, 195, or 200 bp homology 5′ of the nick or replacement sequence. In certain embodiments, the template nucleic acid comprises less than about 100, 90, 80, 70, 60, 50, 40, 30, 20, 15, or 10 bp homology 3′ of the nick or replacement sequence.

[1044] In certain embodiments, the template nucleic acid comprises a nucleotide sequence, e.g., of one or more nucleotides, that will be added to or will template a change in the target nucleic acid. In other embodiments, the template nucleic acid comprises a nucleotide sequence that may be used to modify the target position.

[1045] The template nucleic acid may comprise a replacement sequence. In certain embodiments, the template nucleic acid comprises a 5′ homology arm. In certain embodiments, the template nucleic acid comprises a 3′ homology arm.

[1046] In certain embodiments, the template nucleic acid is linear double stranded DNA. The length may be, e.g., about 150-200 bp, e.g., about 150, 160, 170, 180, 190, or 200 bp. The length may be, e.g., at least 150, 160, 170, 180, 190, or 200 bp. In certain embodiments, the length is no greater than 150, 160, 170, 180, 190, or 200 bp. In certain embodiments, a double stranded template nucleic acid has a length of about 160 bp, e.g., about 155-165, 150-170, 140-180, 130-190, 120-200, 110-210, 100-220, 90-230, or 80-240 bp.

[1047] The template nucleic acid can be linear single stranded DNA. In certain embodiments, the template nucleic acid is (i) linear single stranded DNA that can anneal to the nicked strand of the target nucleic acid, (ii) linear single stranded DNA that can anneal to the intact strand of the target nucleic acid, (iii) linear single stranded DNA that can anneal to the plus strand of the target nucleic acid, (iv) linear single stranded DNA that can anneal to the minus strand of the target nucleic acid, or more than one of the preceding. The length may be, e.g., about 150-200 nucleotides, e.g., about 150, 160, 170, 180, 190, or 200 nucleotides. The length may be, e.g., at least 150, 160, 170, 180, 190, or 200 nucleotides. In certain embodiments, the length is no greater than 150, 160, 170, 180, 190, or 200 nucleotides. In certain embodiments, a single stranded template nucleic acid has a length of about 160 nucleotides, e.g., about 155-165, 150-170, 140-180, 130-190, 120-200, 110-210, 100-220, 90-230, or 80-240 nucleotides.

[1048] In certain embodiments, the template nucleic acid is circular double stranded DNA, e.g., a plasmid. In certain embodiments, the template nucleic acid comprises about 500 to 1000 bp of homology on either side of the replacement sequence and/or the nick. In certain embodiments, the template nucleic acid comprises about 300, 400, 500, 600, 700, 800, 900, 1000, 1500, or 2000 bp of homology 5′ of the nick or replacement sequence, 3′ of the nick or replacement sequence, or both 5′ and 3′ of the nick or replacement sequence. In certain embodiments, the template nucleic acid comprises at least 300, 400, 500, 600, 700, 800, 900, 1000, 1500, or 2000 bp of homology 5′ of the nick or replacement sequence, 3′ of the nick or replacement sequence, or both 5′ and 3′ of the nick or replacement sequence. In certain embodiments, the template nucleic acid comprises no more than 300, 400, 500, 600, 700, 800, 900, 1000, 1500, or 2000 bp of homology 5′ of the nick or replacement sequence, 3′ of the nick or replacement sequence, or both 5′ and 3′ of the nick or replacement sequence.

[1049] In certain embodiments, one or both homology arms may be shortened to avoid including certain sequence repeat elements, e.g., Alu repeats, LINE elements. For example, a 5′ homology arm may be shortened to avoid a sequence repeat element, while a 3′ homology arm may be shortened to avoid a sequence repeat element. In certain embodiments, both the 5′ and the 3′ homology arms may be shortened to avoid including certain sequence repeat elements.

[1050] In certain embodiments, the template nucleic acid is an adenovirus vector, e.g., an AAV vector, e.g., a ssDNA molecule of a length and sequence that allows it to be packaged in an AAV capsid. The vector may be, e.g., less than 5 kb and may contain an ITR sequence that promotes packaging into the capsid. The vector may be integration-deficient. In certain embodiments, the template nucleic acid comprises about 150 to 1000 nucleotides of homology on either side of the replacement sequence and/or the nick. In certain embodiments, the template nucleic acid comprises about 100, 150, 200, 300, 400, 500, 600, 700, 800, 900, 1000, 1500, or 2000 nucleotides 5′ of the nick or replacement sequence, 3′ of the nick or replacement sequence, or both 5′ and 3′ of the nick or replacement sequence. In certain embodiments, the template nucleic acid comprises at least 100, 150, 200, 300, 400, 500, 600, 700, 800, 900, 1000, 1500, or 2000 nucleotides 5′ of the nick or replacement sequence, 3′ of the nick or replacement sequence, or both 5′ and 3′ of the nick or replacement sequence. In certain embodiments, the template nucleic acid comprises at most 100, 150, 200, 300, 400, 500, 600, 700, 800, 900, 1000, 1500, or 2000 nucleotides 5′ of the nick or replacement sequence, 3′ of the nick or replacement sequence, or both 5′ and 3′ of the nick or replacement sequence.

[1051] In certain embodiments, the template nucleic acid is a lentiviral vector, e.g., an IDLV (integration deficiency lentivirus). In certain embodiments, the template nucleic acid comprises about 500 to 1000 bp of homology on either side of the replacement sequence and/or the nick. In some embodiments, the template nucleic acid comprises about 300, 400, 500, 600, 700, 800, 900, 1000, 1500, or 2000 bp of homology 5′ of the nick or replacement sequence, 3′ of the nick or replacement sequence, or both 5′ and 3′ of the nick or replacement sequence. In certain embodiments, the template nucleic acid comprises at least 300, 400, 500, 600, 700, 800, 900, 1000, 1500, or 2000 bp of homology 5′ of the nick or replacement sequence, 3′ of the nick or replacement sequence, or both 5′ and 3′ of the nick or replacement sequence. In certain embodiments, the template nucleic acid comprises no more than 300, 400, 500, 600, 700, 800, 900, 1000, 1500, or 2000 bp of homology 5′ of the nick or replacement sequence, 3′ of the nick or replacement sequence, or both 5′ and 3′ of the nick or replacement sequence.

[1052] In certain embodiments, the template nucleic acid comprises one or more mutations, e.g., silent mutations, that prevent Cas9 from recognizing and cleaving the template nucleic acid. The template nucleic acid may comprise, e.g., at least 1, 2, 3, 4, 5, 10, 20, or 30 silent mutations relative to the corresponding sequence in the genome of the cell to be altered. In certain embodiments, the template nucleic acid comprises at most 2, 3, 4, 5, 10, 20, 30, or 50 silent mutations relative to the corresponding sequence in the genome of the cell to be altered. In certain embodiments, the cDNA comprises one or more mutations, e.g., silent mutations that prevent Cas9 from recognizing and cleaving the template nucleic acid. The template nucleic acid may comprise, e.g., at least 1, 2, 3, 4, 5, 10, 20, or 30 silent mutations relative to the corresponding sequence in the genome of the cell to be altered. In certain embodiments, the template nucleic acid comprises at most 2, 3, 4, 5, 10, 20, 30, or 50 silent mutations relative to the corresponding sequence in the genome of the cell to be altered.

[1053] In certain embodiments, the 5′ and 3′ homology arms each comprise a length of sequence flanking the nucleotides corresponding to the replacement sequence. In certain embodiments, a template nucleic acid comprises a replacement sequence flanked by a 5′ homology arm and a 3′ homology arm each independently comprising 10 or more, 20 or more, 50 or more, 100 or more, 150 or more, 200 or more, 250 or more, 300 or more, 350 or more, 400 or more, 450 or more, 500 or more, 550 or more, 600 or more, 650 or more, 700 or more, 750 or more, 800 or more, 850 or more, 900 or more, 1000 or more, 1100 or more, 1200 or more, 1300 or more, 1400 or more, 1500 or more, 1600 or more, 1700 or more, 1800 or more, 1900 or more, or 2000 or more nucleotides. In certain embodiments, a template nucleic acid comprises a replacement sequence flanked by a 5′ homology arm and a 3′ homology arm each independently comprising at least 50, 100, or 150 nucleotides, but not long enough to include a repeated element. In certain embodiments, a template nucleic acid comprises a replacement sequence flanked by a 5′ homology arm and a 3′ homology arm each independently comprising 5 to 100, 10 to 150, or 20 to 150 nucleotides. In certain embodiments, the replacement sequence optionally comprises a promoter and/or polyA signal.

[1054] 8.8 Single-Strand Annealing

[1055] Single strand annealing (SSA) is another DNA repair process that repairs a double-strand break between two repeat sequences present in a target nucleic acid. Repeat sequences utilized by the SSA pathway are generally greater than 30 nucleotides in length. Resection at the break ends occurs to reveal repeat sequences on both strands of the target nucleic acid. After resection, single strand overhangs containing the repeat sequences are coated with RPA protein to prevent the repeats sequences from inappropriate annealing, e.g., to themselves. RAD52 binds to and each of the repeat sequences on the overhangs and aligns the sequences to enable the annealing of the complementary repeat sequences. After annealing, the single-strand flaps of the overhangs are cleaved. New DNA synthesis fills in any gaps, and ligation restores the DNA duplex. As a result of the processing, the DNA sequence between the two repeats is deleted. The length of the deletion can depend on many factors including the location of the two repeats utilized, and the pathway or processivity of the resection.

[1056] In contrast to HDR pathways, SSA does not require a template nucleic acid to alter a target nucleic acid sequence. Instead, the complementary repeat sequence is utilized.

[1057] 8.9 Other DNA Repair Pathways

[1058] 8.9.1 SSBR (Single Strand Break Repair)

[1059] Single-stranded breaks (SSB) in the genome are repaired by the SSBR pathway, which is a distinct mechanism from the DSB repair mechanisms discussed above. The SSBR pathway has four major stages: SSB detection, DNA end processing, DNA gap filling, and DNA ligation. A more detailed explanation is given in Caldecott 2008, and a summary is given here.

[1060] In the first stage, when a SSB forms, PARP1 and/or PARP2 recognize the break and recruit repair machinery. The binding and activity of PARP1 at DNA breaks is transient and it seems to accelerate SSBr by promoting the focal accumulation or stability of SSBr protein complexes at the lesion. Arguably the most important of these SSBr proteins is XRCC1, which functions as a molecular scaffold that interacts with, stabilizes, and stimulates multiple enzymatic components of the SSBr process including the protein responsible for cleaning the DNA 3′ and 5′ ends. For instance, XRCC1 interacts with several proteins (DNA polymerase beta, PNK, and three nucleases, APE1, APTX, and APLF) that promote end processing. APE1 has endonuclease activity. APLF exhibits endonuclease and 3′ to 5′ exonuclease activities. APTX has endonuclease and 3′ to 5′ exonuclease activity.

[1061] This end processing is an important stage of SSBR since the 3′- and/or 5′-termini of most, if not all, SSBs are ‘damaged.’ End processing generally involves restoring a damaged 3′-end to a hydroxylated state and and/or a damaged 5′ end to a phosphate moiety, so that the ends become ligation-competent. Enzymes that can process damaged 3′ termini include PNKP, APE1, and TDP1. Enzymes that can process damaged 5′ termini include PNKP, DNA polymerase beta, and APTX. LIG3 (DNA ligase III) can also participate in end processing. Once the ends are cleaned, gap filling can occur.

[1062] At the DNA gap filling stage, the proteins typically present are PARP1, DNA polymerase beta, XRCC1, FEN1 (flap endonuclease 1), DNA polymerase delta/epsilon, PCNA, and LIG1. There are two ways of gap filling, the short patch repair and the long patch repair. Short patch repair involves the insertion of a single nucleotide that is missing. At some SSBs, “gap filling” might continue displacing two or more nucleotides (displacement of up to 12 bases have been reported). FEN1 is an endonuclease that removes the displaced 5′-residues. Multiple DNA polymerases, including Polβ, are involved in the repair of SSBs, with the choice of DNA polymerase influenced by the source and type of SSB.

[1063] In the fourth stage, a DNA ligase such as LIG1 (Ligase I) or LIG3 (Ligase III) catalyzes joining of the ends. Short patch repair uses Ligase III and long patch repair uses Ligase I.

[1064] Sometimes, SSBR is replication-coupled. This pathway can involve one or more of CtIP, MRN, ERCC1, and FEN1. Additional factors that may promote SSBR include: aPARP, PARP1, PARP2, PARG, XRCC1, DNA polymerase b, DNA polymerase d, DNA polymerase e, PCNA, LIG1, PNK, PNKP, APE1, APTX, APLF, TDP1, LIG3, FEN1, Ct1P, MRN, and ERCC1.

[1065] 8.9.2 MMR (Mismatch Repair)

[1066] Cells contain three excision repair pathways: MMR, BER, and NER. The excision repair pathways have a common feature in that they typically recognize a lesion on one strand of the DNA, then exo/endonucleases remove the lesion and leave a 1-30 nucleotide gap that is sub-sequentially filled in by DNA polymerase and finally sealed with ligase. A more complete picture is given in Li, Cell Research (2008) 18:85-98, and a summary is provided here.

[1067] Mismatch repair (MMR) operates on mispaired DNA bases.

[1068] The MSH2/6 or MSH2/3 complexes both have ATPases activity that plays an important role in mismatch recognition and the initiation of repair. MSH2/6 preferentially recognizes base-base mismatches and identifies mispairs of 1 or 2 nucleotides, while MSH2/3 preferentially recognizes larger ID mispairs.

[1069] hMLH1 heterodimerizes with hPMS2 to form hMutL a which possesses an ATPase activity and is important for multiple steps of MMR. It possesses a PCNA/replication factor C (RFC)-dependent endonuclease activity which plays an important role in 3′ nick-directed MMR involving EXO1. (EXO1 is a participant in both HR and MMR.) It regulates termination of mismatch-provoked excision. Ligase I is the relevant ligase for this pathway. Additional factors that may promote MMR include: EXO1, MSH2, MSH3, MSH6, MLH1, PMS2, MLH3, DNA Pol d, RPA, HMGB1, RFC, and DNA ligase I.

[1070] 8.9.3 Base Excision Repair (BER)

[1071] The base excision repair (BER) pathway is active throughout the cell cycle; it is responsible primarily for removing small, non-helix-distorting base lesions from the genome. In contrast, the related Nucleotide Excision Repair pathway (discussed in the next section) repairs bulky helix-distorting lesions. A more detailed explanation is given in Caldecott, Nature Reviews Genetics 9, 619-631 (August 2008), and a summary is given here.

[1072] Upon DNA base damage, base excision repair (BER) is initiated and the process can be simplified into five major steps: (a) removal of the damaged DNA base; (b) incision of the subsequent a basic site; (c) clean-up of the DNA ends; (d) insertion of the desired nucleotide into the repair gap; and (e) ligation of the remaining nick in the DNA backbone. These last steps are similar to the SSBR.

[1073] In the first step, a damage-specific DNA glycosylase excises the damaged base through cleavage of the N-glycosidic bond linking the base to the sugar phosphate backbone. Then AP endonuclease-1 (APE1) or bifunctional DNA glycosylases with an associated lyase activity incised the phosphodiester backbone to create a DNA single strand break (SSB). The third step of BER involves cleaning-up of the DNA ends. The fourth step in BER is conducted by Polβ that adds a new complementary nucleotide into the repair gap and in the final step XRCC1/Ligase III seals the remaining nick in the DNA backbone. This completes the short-patch BER pathway in which the majority (˜80%) of damaged DNA bases are repaired. However, if the 5′ ends in step 3 are resistant to end processing activity, following one nucleotide insertion by Pol β there is then a polymerase switch to the replicative DNA polymerases, Pol δ/ε, which then add ˜2-8 more nucleotides into the DNA repair gap. This creates a 5′ flap structure, which is recognized and excised by flap endonuclease-1 (FEN-1) in association with the processivity factor proliferating cell nuclear antigen (PCNA). DNA ligase I then seals the remaining nick in the DNA backbone and completes long-patch BER. Additional factors that may promote the BER pathway include: DNA glycosylase, APE1, Polb, Pold, Pole, XRCC1, Ligase III, FEN-1, PCNA, RECQL4, WRN, MYH, PNKP, and APTX.

[1074] 8.9.4 Nucleotide Excision Repair (NER)

[1075] Nucleotide excision repair (NER) is an important excision mechanism that removes bulky helix-distorting lesions from DNA. Additional details about NER are given in Marteijn et al., Nature Reviews Molecular Cell Biology 15, 465-481 (2014), and a summary is given here. NER a broad pathway encompassing two smaller pathways: global genomic NER (GG-NER) and transcription coupled repair NER (TC-NER). GG-NER and TC-NER use different factors for recognizing DNA damage. However, they utilize the same machinery for lesion incision, repair, and ligation.

[1076] Once damage is recognized, the cell removes a short single-stranded DNA segment that contains the lesion. Endonucleases XPF/ERCC1 and XPG (encoded by ERCC5) remove the lesion by cutting the damaged strand on either side of the lesion, resulting in a single-strand gap of 22-30 nucleotides. Next, the cell performs DNA gap filling synthesis and ligation. Involved in this process are: PCNA, RFC, DNA Pol δ, DNA Pol ε or DNA Pol κ, and DNA ligase I or XRCC1/Ligase III. Replicating cells tend to use DNA pol ε and DNA ligase I, while non-replicating cells tend to use DNA Pol δ, DNA Pol κ, and the XRCC1/Ligase III complex to perform the ligation step.

[1077] NER can involve the following factors: XPA-G, POLH, XPF, ERCC1, XPA-G, and LIG1. Transcription-coupled NER (TC-NER) can involve the following factors: CSA, CSB, XPB, XPD, XPG, ERCC1, and TTDA. Additional factors that may promote the NER repair pathway include XPA-G, POLH, XPF, ERCC1, XPA-G, LIG1, CSA, CSB, XPA, XPB, XPC, XPD, XPF, XPG, TTDA, UVSSA, USP7, CETN2, RAD23B, UV-DDB, CAK subcomplex, RPA, and PCNA.

[1078] 8.9.5 Interstrand Crosslink (ICL)

[1079] A dedicated pathway called the ICL repair pathway repairs interstrand crosslinks. Interstrand crosslinks, or covalent crosslinks between bases in different DNA strand, can occur during replication or transcription. ICL repair involves the coordination of multiple repair processes, in particular, nucleolytic activity, translesion synthesis (TLS), and HDR. Nucleases are recruited to excise the ICL on either side of the crosslinked bases, while TLS and HDR are coordinated to repair the cut strands. ICL repair can involve the following factors: endonucleases, e.g., XPF and RAD51C, endonucleases such as RAD51, translesion polymerases, e.g., DNA polymerase zeta and Rev1), and the Fanconi anemia (FA) proteins, e.g., FancJ.

[1080] 8.9.6 Other Pathways

[1081] Several other DNA repair pathways exist in mammals.

[1082] Translesion synthesis (TLS) is a pathway for repairing a single stranded break left after a defective replication event and involves translesion polymerases, e.g., DNA polβ and Rev1.

[1083] Error-free postreplication repair (PRR) is another pathway for repairing a single stranded break left after a defective replication event.

[1084] 8.10 Examples of gRNAs in Genome Editing Methods

[1085] gRNA molecules as described herein can be used with Cas9 molecules that generate a double strand break or a single strand break to alter the sequence of a target nucleic acid, e.g., a target position or target genetic signature. gRNA molecules useful in these methods are described below.

[1086] In certain embodiments, the gRNA, e.g., a chimeric gRNA, is configured such that it comprises one or more of the following properties;

[1087] (a) it can position, e.g., when targeting a Cas9 molecule that makes double strand breaks, a double strand break (i) within 50, 100, 150, 200, 250, 300, 350, 400, 450, or 500 nucleotides of a target position, or (ii) sufficiently close that the target position is within the region of end resection;

[1088] (b) it has a targeting domain of at least 16 nucleotides, e.g., a targeting domain of (i) 16, (ii), 17, (iii) 18, (iv) 19, (v) 20, (vi) 21, (vii) 22, (viii) 23, (ix) 24, (x) 25, or (xi) 26 nucleotides; and

[1089] (c)(i) the proximal and tail domain, when taken together, comprise at least 15, 18, 20, 25, 30, 31, 35, 40, 45, 49, 50, or 53 nucleotides, e.g., at least 15, 18, 20, 25, 30, 31, 35, 40, 45, 49, 50, or 53 nucleotides from a naturally occurring S. pyogenes, or S. aureus tail and proximal domain, or a sequence that differs by no more than 1, 2, 3, 4, 5; 6, 7, 8, 9 or 10 nucleotides therefrom;

[1090] (c)(ii) there are at least 15, 18, 20, 25, 30, 31, 35, 40, 45, 49, 50, or 53 nucleotides 3′ to the last nucleotide of the second complementarity domain, e.g., at least 15, 18, 20, 25, 30, 31, 35, 40, 45, 49, 50, or 53 nucleotides from the corresponding sequence of a naturally occurring S. pyogenes, or S. aureus gRNA, or a sequence that differs by no more than 1, 2, 3, 4, 5; 6, 7, 8, 9 or 10 nucleotides therefrom;

[1091] (c)(iii) there are at least 16, 19, 21, 26, 31, 32, 36, 41, 46, 50, 51, or 54 nucleotides 3′ to the last nucleotide of the second complementarity domain that is complementary to its corresponding nucleotide of the first complementarity domain, e.g., at least 16, 19, 21, 26, 31, 32, 36, 41, 46, 50, 51, or 54 nucleotides from the corresponding sequence of a naturally occurring S. pyogenes, or S. aureus gRNA, or a sequence that differs by no more than 1, 2, 3, 4, 5; 6, 7, 8, 9 or 10 nucleotides therefrom;

[1092] (c)(iv) the tail domain is at least 10, 15, 20, 25, 30, 35 or 40 nucleotides in length, e.g., it comprises at least 10, 15, 20, 25, 30, 35 or 40 nucleotides from a naturally occurring S. pyogenes, or S. aureus tail domain, or a sequence that differs by no more than 1, 2, 3, 4, 5; 6, 7, 8, 9 or 10 nucleotides therefrom; or

[1093] (c)(v) the tail domain comprises 15, 20, 25, 30, 35, 40 nucleotides or all of the corresponding portions of a naturally occurring tail domain, e.g., a naturally occurring S. pyogenes, or S. aureus tail domain.

[1094] In certain embodiments, the gRNA is configured such that it comprises properties: a and b(i); a and b(ii); a and b(iii); a and b(iv); a and b(v); a and b(vi); a and b(vii); a and b(viii); a and b(ix); a and b(x); a and b(xi); a and c; a, b, and c; a(i), b(i), and c(i); a(i), b(i), and c(ii); a(i), b(ii), and c(i); a(i), b(ii), and c(ii); a(i), b(iii), and c(i); a(i), b(iii), and c(ii); a(i), b(iv), and c(i); a(i), b(iv), and c(ii); a(i), b(v), and c(i); a(i), b(v), and c(ii); a(i), b(vi), and c(i); a(i), b(vi), and c(ii); a(i), b(vii), and c(i); a(i), b(vii), and c(ii); a(i), b(viii), and c(i); a(i), b(viii), and c(ii); a(i), b(ix), and c(i); a(i), b(ix), and c(ii); a(i), b(x), and c(i); a(i), b(x), and c(ii); a(i), b(xi), or c(i); a(i), b(xi), and c(ii).

[1095] In certain embodiments, the gRNA, e.g., a chimeric gRNA, is configured such that it comprises one or more of the following properties;

[1096] (a) one or both of the gRNAs can position, e.g., when targeting a Cas9 molecule that makes single strand breaks, a single strand break within (i) 50, 100, 150, 200, 250, 300, 350, 400, 450, or 500 nucleotides of a target position, or (ii) sufficiently close that the target position is within the region of end resection;

[1097] (b) one or both have a targeting domain of at least 16 nucleotides, e.g., a targeting domain of (i) 16, (ii), 17, (iii) 18, (iv) 19, (v) 20, (vi) 21, (vii) 22, (viii) 23, (ix) 24, (x) 25, or (xi) 26 nucleotides; and

[1098] (c)(i) the proximal and tail domain, when taken together, comprise at least 15, 18, 20, 25, 30, 31, 35, 40, 45, 49, 50, or 53 nucleotides, e.g., at least 15, 18, 20, 25, 30, 31, 35, 40, 45, 49, 50, or 53 nucleotides from a naturally occurring S. pyogenes, or S. aureus tail and proximal domain, or a sequence that differs by no more than 1, 2, 3, 4, 5, 6, 7, 8, 9 or 10 nucleotides therefrom;

[1099] (c)(ii) there are at least 15, 18, 20, 25, 30, 31, 35, 40, 45, 49, 50, or 53 nucleotides 3′ to the last nucleotide of the second complementarity domain, e.g., at least 15, 18, 20, 25, 30, 31, 35, 40, 45, 49, 50, or 53 nucleotides from the corresponding sequence of a naturally occurring S. pyogenes, or S. aureus gRNA, or a sequence that differs by no more than 1, 2, 3, 4, 5; 6, 7, 8, 9 or 10 nucleotides therefrom;

[1100] (c)(iii) there are at least 16, 19, 21, 26, 31, 32, 36, 41, 46, 50, 51, or 54 nucleotides 3′ to the last nucleotide of the second complementarity domain that is complementary to its corresponding nucleotide of the first complementarity domain, e.g., at least 16, 19, 21, 26, 31, 32, 36, 41, 46, 50, 51, or 54 nucleotides from the corresponding sequence of a naturally occurring S. pyogenes, or S. aureus gRNA, or a sequence that differs by no more than 1, 2, 3, 4, 5; 6, 7, 8, 9 or 10 nucleotides therefrom;

[1101] (c)(iv) the tail domain is at least 10, 15, 20, 25, 30, 35 or 40 nucleotides in length, e.g., it comprises at least 10, 15, 20, 25, 30, 35 or 40 nucleotides from a naturally occurring S. pyogenes, or S. aureus tail domain, or a sequence that differs by no more than 1, 2, 3, 4, 5; 6, 7, 8, 9 or 10 nucleotides therefrom; or

[1102] (c)(v) the tail domain comprises 15, 20, 25, 30, 35, 40 nucleotides or all of the corresponding portions of a naturally occurring tail domain, e.g., a naturally occurring S. pyogenes, or S. aureus tail domain.

[1103] In certain embodiments, the gRNA is configured such that it comprises properties: a and b(i); a and b(ii); a and b(iii); a and b(iv); a and b(v); a and b(vi); a and b(vii); a and b(viii); a and b(ix); a and b(x); a and b(xi); a and c; a, b, and c; a(i), b(i), and c(i); a(i), b(i), and c(ii); a(i), b(ii), and c(i); a(i), b(ii), and c(ii); a(i), b(iii), and c(i); a(i), b(iii), and c(ii); a(i), b(iv), and c(i); a(i), b(iv), and c(ii); a(i), b(v), and c(i); a(i), b(v), and c(ii); a(i), b(vi), and c(i); a(i), b(vi), and c(ii); a(i), b(vii), and c(i); a(i), b(vii), and c(ii); a(i), b(viii), and c(i); a(i), b(viii), and c(ii); a(i), b(ix), and c(i); a(i), b(ix), and c(ii); a(i), b(x), and c(i); a(i), b(x), and c(ii); a(i), b(xi), and c(i); a(i), b(xi), and c(ii).

[1104] In certain embodiments, the gRNA is used with a Cas9 nickase molecule having HNH activity, e.g., a Cas9 molecule having the RuvC activity inactivated, e.g., a Cas9 molecule having a mutation at D10, e.g., the D10A mutation. In certain embodiments, the gRNA is used with a Cas9 nickase molecule having RuvC activity, e.g., a Cas9 molecule having the HNH activity inactivated, e.g., a Cas9 molecule having a mutation at 840, e.g., the H840A. In certain embodiments, the gRNAs are used with a Cas9 nickase molecule having RuvC activity, e.g., a Cas9 molecule having the HNH activity inactivated, e.g., a Cas9 molecule having a mutation at N863, e.g., the N863A mutation.

[1105] In certain embodiments, a pair of gRNAs, e.g., a pair of chimeric gRNAs, comprising a first and a second gRNA, is configured such that they comprises one or more of the following properties;

[1106] (a) one or both of the gRNAs can position, e.g., when targeting a Cas9 molecule that makes single strand breaks, a single strand break within (i) 50, 100, 150, 200, 250, 300, 350, 400, 450, or 500 nucleotides of a target position, or (ii) sufficiently close that the target position is within the region of end resection;

[1107] (b) one or both have a targeting domain of at least 16 nucleotides, e.g., a targeting domain of (i) 16, (ii), 17, (iii) 18, (iv) 19, (v) 20, (vi) 21, (vii) 22, (viii) 23, (ix) 24, (x) 25, or (xi) 26 nucleotides;

[1108] (c) (i) the proximal and tail domain, when taken together, comprise at least 15, 18, 20, 25, 30, 31, 35, 40, 45, 49, 50, or 53 nucleotides, e.g., at least 15, 18, 20, 25, 30, 31, 35, 40, 45, 49, 50, or 53 nucleotides from a naturally occurring S. pyogenes, or S. aureus tail and proximal domain, or a sequence that differs by no more than 1, 2, 3, 4, 5; 6, 7, 8, 9 or 10 nucleotides therefrom;

[1109] (c)(ii) there are at least 15, 18, 20, 25, 30, 31, 35, 40, 45, 49, 50, or 53 nucleotides 3′ to the last nucleotide of the second complementarity domain, e.g., at least 15, 18, 20, 25, 30, 31, 35, 40, 45, 49, 50, or 53 nucleotides from the corresponding sequence of a naturally occurring S. pyogenes, or S. aureus gRNA, or a sequence that differs by no more than 1, 2, 3, 4, 5; 6, 7, 8, 9 or 10 nucleotides therefrom;

[1110] (c)(iii) there are at least 16, 19, 21, 26, 31, 32, 36, 41, 46, 50, 51, or 54 nucleotides 3′ to the last nucleotide of the second complementarity domain that is complementary to its corresponding nucleotide of the first complementarity domain, e.g., at least 16, 19, 21, 26, 31, 32, 36, 41, 46, 50, 51, or 54 nucleotides from the corresponding sequence of a naturally occurring S. pyogenes, or S. aureus gRNA, or a sequence that differs by no more than 1, 2, 3, 4, 5; 6, 7, 8, 9 or 10 nucleotides therefrom;

[1111] (c)(iv) the tail domain is at least 10, 15, 20, 25, 30, 35 or 40 nucleotides in length, e.g., it comprises at least 10, 15, 20, 25, 30, 35 or 40 nucleotides from a naturally occurring S. pyogenes, or S. aureus tail domain; or, or a sequence that differs by no more than 1, 2, 3, 4, 5; 6, 7, 8, 9 or 10 nucleotides therefrom; or

[1112] (c)(v) the tail domain comprises 15, 20, 25, 30, 35, 40 nucleotides or all of the corresponding portions of a naturally occurring tail domain, e.g., a naturally occurring S. pyogenes, or S. aureus tail domain;

[1113] (d) the gRNAs are configured such that, when hybridized to target nucleic acid, they are separated by 0-50, 0-100, 0-200, at least 10, at least 20, at least 30 or at least 50 nucleotides;

[1114] (e) the breaks made by the first gRNA and second gRNA are on different strands; and

[1115] (f) the PAMs are facing outwards.

[1116] In certain embodiments, one or both of the gRNAs is configured such that it comprises properties: a and b(i); a and b(ii); a and b(iii); a and b(iv); a and b(v); a and b(vi); a and b(vii); a and b(viii); a and b(ix); a and b(x); a and b(xi); a and c; a, b, and c; a(i), b(i), and c(i); a(i), b(i), and c(ii); a(i), b(i), c, and d; a(i), b(i), c, and e; a(i), b(i), c, d, and e; a(i), b(ii), and c(i); a(i), b(ii), and c(ii); a(i), b(ii), c, and d; a(i), b(ii), c, and e; a(i), b(ii), c, d, and e; a(i), b(iii), and c(i); a(i), b(iii), and c(ii); a(i), b(iii), c, and d; a(i), b(iii), c, and e; a(i), b(iii), c, d, and e; a(i), b(iv), and c(i); a(i), b(iv), and c(ii); a(i), b(iv), c, and d; a(i), b(iv), c, and e; a(i), b(iv), c, d, and e; a(i), b(v), and c(i); a(i), b(v), and c(ii); a(i), b(v), c, and d; a(i), b(v), c, and e; a(i), b(v), c, d, and e; a(i), b(vi), and c(i); a(i), b(vi), and c(ii); a(i), b(vi), c, and d; a(i), b(vi), c, and e; a(i), b(vi), c, d, and e; a(i), b(vii), and c(i); a(i), b(vii), and c(ii); a(i), b(vii), c, and d; a(i), b(vii), c, and e; a(i), b(vii), c, d, and e; a(i), b(viii), and c(i); a(i), b(viii), and c(ii); a(i), b(viii), c, and d; a(i), b(viii), c, and e; a(i), b(viii), c, d, and e; a(i), b(ix), and c(i); a(i), b(ix), and c(ii); a(i), b(ix), c, and d; a(i), b(ix), c, and e; a(i), b(ix), c, d, and e; a(i), b(x), and c(i); a(i), b(x), and c(ii); a(i), b(x), c, and d; a(i), b(x), c, and e; a(i), b(x), c, d, and e; a(i), b(xi), and c(i); a(i), b(xi), and c(ii); a(i), b(xi), c, and d; a(i), b(xi), c, and e; a(i), b(xi), c, d, and e.

[1117] In certain embodiments, the gRNAs are used with a Cas9 nickase molecule having HNH activity, e.g., a Cas9 molecule having the RuvC activity inactivated, e.g., a Cas9 molecule having a mutation at D10, e.g., the D10A mutation. In certain embodiments, the gRNAs are used with a Cas9 nickase molecule having RuvC activity, e.g., a Cas9 molecule having the HNH activity inactivated, e.g., a Cas9 molecule having a mutation at H840, e.g., the H840A mutation. In certain embodiments, the gRNAs are used with a Cas9 nickase molecule having RuvC activity, e.g., a Cas9 molecule having the HNH activity inactivated, e.g., a Cas9 molecule having a mutation at N863, e.g., the N863A mutation.

### 9. Targets: Cells

[1118] Cas9 molecules and gRNA molecules, e.g., a Cas9 molecule/gRNA molecule complex, can be used to manipulate a cell, e.g., to edit a target nucleic acid, in a wide variety of cells.

[1119] In certain embodiments, a cell is manipulated by altering one or more editing (e.g., introducing a mutation in) a DMD gene, as described herein. In certain embodiments, the expression of DMD gene is modulated, e.g., in vivo. In certain embodiments, the expression of the DMD gene is modulated, e.g., ex vivo.

[1120] The Cas9 and gRNA molecules described herein can be delivered to a target cell. In certain embodiments, the target cell is a skeletal muscle cell, e.g., a red (slow) skeletal muscle cell, a white (fast) skeletal muscle cell or an intermediate skeletal muscle cell. In certain embodiments, the target cell is a cardiac muscle cell, e.g., a cardiomyocyte or a nodal cardiac muscle cell. In certain embodiments, the target cell is a smooth muscle cell. In certain embodiments, the target cell is a muscle satellite cell or muscle stem cell.

[1121] In certain embodiments, the target cell is manipulated ex vivo by altering a DMD target position, then the target cell is administered to the subject. Sources of target cells for ex vivo manipulation may include, for example, the subject's blood, bone marrow, or cord blood. Other sources of target cells for ex vivo manipulation may include, for example, heterologous donor blood, cord blood, or bone marrow. In certain embodiments, a skeletal muscle cell, e.g., a red (slow) skeletal muscle cell, a white (fast) skeletal muscle cell or an intermediate skeletal muscle cell is removed from the subject, the gene altered ex vivo, manipulated ex vivo as described above, and the cell is returned to the subject. In certain embodiments, a cardiac muscle cell, e.g., a cardiomyocyte or a nodal cardiac muscle cell is removed from the subject, manipulated ex vivo as described above, and the cell is returned to the subject. In certain embodiments, a smooth muscle cell is removed from the subject, manipulated ex vivo as described above, and the cell is returned to the subject. In certain embodiments, a muscle satellite cell or muscle stem cell is removed from the subject, manipulated ex vivo as described above, and the cell is returned to the subject.

[1122] In certain embodiments, the cells are induced pluripotent stem cells (iPS) cells or cells derived from iPS cells, e.g., iPS cells from the subject, modified to alter the gene and differentiated into myoblasts, muscle progenitor cells, muscle satellite cells, muscle stem cells, skeletal muscle cells, cardiac muscle cells or smooth muscle cells and transplanted into the subject.

[1123] In certain embodiments, the cells are targeted in vivo, e.g., by delivery of the components, e.g., a Cas9 molecule and one or more gRNA molecules, to the target cells. In certain embodiments, the target cells are myoblasts, muscle progenitor cells, muscle satellite cells, muscle stem cells, skeletal muscle cells, cardiac muscle cells, smooth muscle cells, or a combination thereof. In certain embodiments, AAV is used to deliver the components, e.g., a Cas9 molecule and a gRNA molecule, e.g., by transducing the target cells.

### 10. Delivery, Formulations and Routes of Administration

[1124] The components, e.g., a Cas9 molecule, one or more gRNA molecules (e.g., a Cas9 molecule/gRNA molecule complex), and a donor template nucleic acid, or all three, can be delivered, formulated, or administered in a variety of forms, see, e.g., Tables 3 and 4. In certain embodiments, the Cas9 molecule, one or more gRNA molecules (e.g., two gRNA molecules) are present together in a genome-editing system. In certain embodiments, one Cas9 molecule and two or more (e.g., 2, 3, 4, or more) different gRNA molecules are delivered, e.g., by an AAV vector. In certain embodiments, the sequence encoding the Cas9 molecule and the sequence(s) encoding the two or more (e.g., 2, 3, 4, or more) different gRNA molecules are present on the same nucleic acid molecule, e.g., an AAV vector. When a Cas9 or gRNA component is delivered encoded in DNA the DNA will typically include a control region, e.g., comprising a promoter, to effect expression. Useful promoters for Cas9 molecule sequences include CMV, EFS, EF-1a, MSCV, PGK, CAG, the Skeletal Alpha Actin promoter, the Muscle Creatine Kinase promoter, the Dystrophin promoter, the Alpha Myosin Heavy Chain promoter, and the Smooth Muscle Actin promoter. In certain embodiments, the promoter is a constitutive promoter. In certain embodiments, the promoter is a tissue specific promoter. Useful promoters for gRNAs include T7.H1, EF-1a, 7SK, U6, U1 and tRNA promoters. Promoters with similar or dissimilar strengths can be selected to tune the expression of components. Sequences encoding a Cas9 molecule can comprise a nuclear localization signal (NLS), e.g., an SV40 NLS. In certain embodiments, the sequence encoding a Cas9 molecule comprises at least two nuclear localization signals. In certain embodiments a promoter for a Cas9 molecule or a gRNA molecule can be, independently, inducible, tissue specific, or cell specific. Table 3 provides examples of how the components can be formulated, delivered, or administered.

TABLE 3
Elements

| | | Donor | |
|---|---|---|---|
| Cas9 | gRNA | Template | |
| Molecule(s) | Molecule(s) | Nucleic Acid | Comments |
| DNA | DNA | DNA | In certain embodiments, a Cas9 molecule, |
| | | | typically an eaCas9 molecule, and a gRNA are |
| | | | transcribed from DNA. In certain embodiments, |
| | | | they are encoded on separate molecules. In |
| | | | certain embodiments, the donor template is |
| | | | provided as a separate DNA molecule. |
| DNA | DNA | | In certain embodiments, a Cas9 molecule, |
| | | | typically an eaCas9 molecule, and a gRNA are |
| | | | transcribed from DNA. In this embodiment, they |
| | | | are encoded on separate molecules. In certain |
| | | | embodiments t, the donor template is provided on |
| | | | the same DNA molecule that encodes the gRNA. |
| DNA | | DNA | In certain embodiments, a Cas9 molecule, |
| | | | typically an eaCas9 molecule, and a gRNA are |
| | | | transcribed from DNA, here from a single |
| | | | molecule. In certain embodiments, the donor |
| | | | template is provided as a separate DNA |
| | | | molecule. |
| DNA | \|DNA \| | | In certain embodiments, a Cas9 molecule, |
| | | | typically an eaCas9 molecule, and a gRNA are |
| | | | transcribed from DNA. In certain embodiments, |
| | | | they are encoded on separate molecules. In |
| | | | certain embodiments, the donor template is |
| | | | provided on the same DNA molecule that |
| | | | encodes the Cas9. |
| DNA | RNA | DNA | In certain embodiments, a Cas9 molecule, |
| | | | typically an eaCas9 molecule, is transcribed from |
| | | | DNA, and a gRNA is provided as in vitro |
| | | | transcribed or synthesized RNA. In certain |
| | | | embodiments, the donor template is provided as a |
| | | | separate DNA molecule. |
| DNA | \|RNA \| | | In certain embodiments, a Cas9 molecule, |
| | | | typically an eaCas9 molecule, is transcribed from |
| | | | DNA, and a gRNA is provided as in vitro |
| | | | transcribed or synthesized RNA. In certain |
| | | | embodiments t, the donor template is provided on |
| | | | the same DNA molecule that encodes the Cas9. |
| mRNA | RNA | DNA | In certain embodiments, a Cas9 molecule, |
| | | | typically an eaCas9 molecule, is translated from |
| | | | in vitro transcribed mRNA, and a gRNA is |
| | | | provided as in vitro transcribed or synthesized |
| | | | RNA. In certain embodiments, the donor |
| | | | template is provided as a DNA molecule. |
| mRNA | DNA | DNA | In certain embodiments, a Cas9 molecule, |
| | | | typically an eaCas9 molecule, is translated from |
| | | | in vitro transcribed mRNA, and a gRNA is |
| | | | transcribed from DNA. In certain embodiments, |
| | | | the donor template is provided as a separate DNA |
| | | | molecule. |
| mRNA | DNA | | In certain embodiments, a Cas9 molecule, |
| | | | typically an eaCas9 molecule, is translated from |
| | | | in vitro transcribed mRNA, and a gRNA is |
| | | | transcribed from DNA. In certain embodiments, |
| | | | the donor template is provided on the same DNA |
| | | | molecule that encodes the gRNA. |
| Protein | DNA | DNA | In certain embodiments, a Cas9 molecule, |
| | | | typically an eaCas9 molecule, is provided as a |
| | | | protein, and a gRNA is transcribed from |
| | | | DNA. In certain embodiments, the donor |
| | | | template is provided as a separate DNA molecule. |
| Protein | DNA | | In certain embodiments, a Cas9 molecule, |
| | | | typically an eaCas9 molecule, is provided as a |
| | | | protein, and a gRNA is transcribed from |
| | | | DNA. In certain embodiments, the donor |
| | | | template is provided on the same DNA molecule |
| | | | that encodes the gRNA. |
| Protein | RNA | DNA | In certain embodiments, an eaCas9 molecule is |
| | | | provided as a protein, and a gRNA is provided as |
| | | | transcribed or synthesized RNA. In certain |
| | | | embodiments, the donor template is provided as a |
| | | | DNA molecule. |

Table 4 summarizes various delivery methods for the components of a Cas system, e.g., the Cas9 molecule component and the gRNA molecule component, as described herein.

TABLE 4

| | | Delivery | | | |
|---|---|---|---|---|---|
| | | into Non- | Duration | | Type of |
| | | Dividing | of | Genome | Molecule |
| Delivery Vector/Mode | | Cells | Expression | Integration | Delivered |
| Physical (e.g., electroporation, | | YES | Transient | NO | Nucleic Acids |
| particle gun, Calcium | | | | | and Proteins |
| Phosphate transfection, cell | | | | | |
| compression or squeezing) | | | | | |
| Viral | Retrovirus | NO | Stable | YES | RNA |
| | Lentivirus | YES | Stable | YES/NO with | RNA |
| | | | | modifications | |
| | Adenovirus | YES | Transient | NO | DNA |
| | Adeno- | YES | Stable | NO | DNA |
| | Associated Virus | | | | |
| | (AAV) | | | | |
| | Vaccinia Virus | YES | Very | NO | DNA |
| | | | Transient | | |
| | Herpes Simplex | YES | Stable | NO | DNA |
| | Virus | | | | |
| Non-Viral | Cationic | YES | Transient | Depends on | Nucleic Acids |
| | Liposomes | | | what is | and Proteins |
| | | | | delivered | |
| | Polymeric | YES | Transient | Depends on | Nucleic Acids |
| | Nanoparticles | | | what is | and Proteins |
| | | | | delivered | |
| Biological | Attenuated | YES | Transient | NO | Nucleic Acids |
| Non-Viral | Bacteria | | | | |
| Delivery | Engineered | YES | Transient | NO | Nucleic Acids |
| Vehicles | Bacteriophages | | | | |
| | Mammalian | YES | Transient | NO | Nucleic Acids |
| | Virus-like | | | | |
| | Particles | | | | |
| | Biological | YES | Transient | NO | Nucleic Acids |
| | liposomes: | | | | |
| | Erythrocyte | | | | |
| | Ghosts and | | | | |
| | Exosomes | | | | |

[1125] 10.1 DNA-Based Delivery of a Cas9 Molecule and/or One or More gRNA Molecules

[1126] Nucleic acid compositions encoding Cas9 molecules (e.g., eaCas9 molecules), gRNA molecules, a donor template nucleic acid, or any combination (e.g., two or all) thereof can be administered to subjects or delivered into cells by art-known methods or as described herein. For example, Cas9-encoding and/or gRNA-encoding DNA, as well as donor template nucleic acids can be delivered by, e.g., vectors (e.g., viral or non-viral vectors), non-vector based methods (e.g., using naked DNA or DNA complexes), or a combination thereof.

[1127] Nucleic acid compositions encoding Cas9 molecules (e.g., eaCas9 molecules) and/or gRNA molecules can be conjugated to molecules (e.g., N-acetylgalactosamine) promoting uptake by the target cells (e.g., hepatocytes). Donor template molecules can likewise be conjugated to molecules (e.g., N-acetylgalactosamine) promoting uptake by the target cells (e.g., hepatocytes).

[1128] In certain embodiments, the Cas9- and/or gRNA-encoding DNA is delivered by a vector (e.g., viral vector/virus or plasmid).

[1129] Vectors can comprise a sequence that encodes a Cas9 molecule and/or a gRNA molecule and/or a donor template with high homology to the region (e.g., target sequence) being targeted. In certain embodiments, the donor template comprises all or part of a target sequence. Exemplary donor templates are a repair template, e.g., a gene correction template, or a gene mutation template, e.g., point mutation (e.g., single nucleotide (nt) substitution) template). A vector can also comprise a sequence encoding a signal peptide (e.g., for nuclear localization, nucleolar localization, or mitochondrial localization), fused, e.g., to a Cas9 molecule sequence. For example, the vectors can comprise a nuclear localization sequence (e.g., from SV40) fused to the sequence encoding the Cas9 molecule.

[1130] One or more regulatory/control elements, e.g., promoters, enhancers, introns, polyadenylation signals, a Kozak consensus sequences, internal ribosome entry sites (IRES), a 2A sequence, and splice acceptor or donor can be included in the vectors. In certain embodiments, the promoter is recognized by RNA polymerase II (e.g., a CMV promoter). In certain embodiments, the promoter is recognized by RNA polymerase III (e.g., a U6 promoter). In certain embodiments, the promoter is a regulated promoter (e.g., inducible promoter). In certain embodiments, the promoter is a constitutive promoter. In certain embodiments, the promoter is a tissue specific promoter. In certain embodiments, the promoter is a viral promoter. In other embodiments, the promoter is a non-viral promoter.

[1131] In certain embodiments, the vector or delivery vehicle is a viral vector (e.g., for generation of recombinant viruses). In certain embodiments, the virus is a DNA virus (e.g., dsDNA or ssDNA virus). In certain embodiments, the virus is an RNA virus (e.g., an ssRNA virus). In certain embodiments, the virus infects dividing cells. In other embodiments, the virus infects non-dividing cells. Exemplary viral vectors/viruses include, e.g., retroviruses, lentiviruses, adenovirus, adeno-associated virus (AAV), vaccinia viruses, poxviruses, and herpes simplex viruses.

[1132] In certain embodiments, the virus infects dividing cells. In certain embodiments, the virus infects non-dividing cells. In certain embodiments, the virus infects both dividing and non-dividing cells. In certain embodiments, the virus can integrate into the host genome. In certain embodiments, the virus is engineered to have reduced immunity, e.g., in human. In certain embodiments, the virus is replication-competent. In other embodiments, the virus is replication-defective, e.g., having one or more coding regions for the genes necessary for additional rounds of virion replication and/or packaging replaced with other genes or deleted. In certain embodiments, the virus causes transient expression of the Cas9 molecule and/or the gRNA molecule. In other embodiments, the virus causes long-lasting, e.g., at least 1 week, 2 weeks, 1 month, 2 months, 3 months, 6 months, 9 months, 1 year, 2 years, or permanent expression, of the Cas9 molecule and/or the gRNA molecule. The packaging capacity of the viruses may vary, e.g., from at least about 4 kb to at least about 30 kb, e.g., at least about 5 kb, 10 kb, 15 kb, 20 kb, 25 kb, 30 kb, 35 kb, 40 kb, 45 kb, or 50 kb.

[1133] In certain embodiments, the viral vector recognizes a specific cell type or tissue. For example, the viral vector can be pseudotyped with a different/alternative viral envelope glycoprotein; engineered with a cell type-specific receptor (e.g., genetic modification(s) of one or more viral envelope glycoproteins to incorporate a targeting ligand such as a peptide ligand, a single chain antibody, or a growth factor); and/or engineered to have a molecular bridge with dual specificities with one end recognizing a viral glycoprotein and the other end recognizing a moiety of the target cell surface (e.g., a ligand-receptor, monoclonal antibody, avidin-biotin and chemical conjugation).

[1134] Exemplary viral vectors/viruses include, e.g., retroviruses, lentiviruses, adenovirus, adeno-associated virus (AAV), vaccinia viruses, poxviruses, and herpes simplex viruses.

[1135] In certain embodiments, the Cas9- and/or gRNA-encoding sequence is delivered by a recombinant retrovirus. In certain embodiments, the retrovirus (e.g., Moloney murine leukemia virus) comprises a reverse transcriptase, e.g., that allows integration into the host genome. In certain embodiments, the retrovirus is replication-competent. In other embodiments, the retrovirus is replication-defective, e.g., having one of more coding regions for the genes necessary for additional rounds of virion replication and packaging replaced with other genes, or deleted.

[1136] In certain embodiments, the Cas9- and/or gRNA-encoding nucleic acid sequence is delivered by a recombinant lentivirus. In certain embodiments, the donor template nucleic acid is delivered by a recombinant retrovirus. For example, the lentivirus is replication-defective, e.g., does not comprise one or more genes required for viral replication.

[1137] In certain embodiments, the Cas9- and/or gRNA-encoding nucleic acid sequence is delivered by a recombinant lentivirus. In certain embodiments, the donor template nucleic acid is delivered by a recombinant lentivirus. For example, the lentivirus is replication-defective, e.g., does not comprise one or more genes required for viral replication.

[1138] In certain embodiments, the Cas9- and/or gRNA-encoding nucleic acid sequence is delivered by a recombinant adenovirus. In certain embodiments, the donor template nucleic acid is delivered by a recombinant adenovirus. In certain embodiments, the adenovirus is engineered to have reduced immunity in human.

[1139] In certain embodiments, the Cas9- and/or gRNA-encoding nucleic acid sequence is delivered by a recombinant AAV. In certain embodiments, the donor template nucleic acid is delivered by a recombinant AAV. In certain embodiments, the AAV does not incorporate its genome into that of a host cell, e.g., a target cell as describe herein. In certain embodiments, the AAV can incorporate at least part of its genome into that of a host cell, e.g., a target cell as described herein. In certain embodiments, the AAV is a self-complementary adeno-associated virus (scAAV), e.g., a scAAV that packages both strands which anneal together to form double stranded DNA. AAV serotypes that may be used in the disclosed methods, include AAV1, AAV2, modified AAV2 (e.g., modifications at Y444F, Y500F, Y730F and/or S662V), AAV3, modified AAV3 (e.g., modifications at Y705F, Y731F and/or T492V), AAV4, AAV5, AAV6, modified AAV6 (e.g., modifications at S663V and/or T492V), AAV8, AAV 8.2, AAV9, AAV rh10, and pseudotyped AAV, such as AAV2/8, AAV2/5 and AAV2/6 can also be used in the disclosed methods. In certain embodiments, an AAV capsid that can be used in the methods described herein is a capsid sequence from serotype AAV1, AAV2, AAV3, AAV4, AAV5, AAV6, AAV7, AAV8, AAV9, AAV.rh8, AAV.rh10, AAV.rh32/33, AAV.rh43, AAV.rh64R1, or AAV7m8.

[1140] In certain embodiments, the Cas9- and/or gRNA-encoding nucleic acid sequence is delivered in a re-engineered AAV capsid, e.g., with about 50% or greater, e.g., about 60% or greater, about 70% or greater, about 80% or greater, about 90% or greater, or about 95% or greater, sequence homology with a capsid sequence from serotypes AAV1, AAV2, AAV3, AAV4, AAV5, AAV6, AAV7, AAV8, AAV9, AAV.rh8, AAV.rh10, AAV.rh32/33, AAV.rh43, or AAV.rh64R1.

[1141] In certain embodiments, the Cas9- and/or gRNA-encoding nucleic acid sequence is delivered by a chimeric AAV capsid. In certain embodiments, the donor template nucleic acid is delivered by a chimeric AAV capsid. Exemplary chimeric AAV capsids include, but are not limited to, AAV9i1, AAV2i8, AAV-DJ, AAV2G9, AAV2i8G9, or AAV8G9.

[1142] In certain embodiments, the AAV is a self-complementary adeno-associated virus (scAAV), e.g., a scAAV that packages both strands which anneal together to form double stranded DNA.

[1143] In certain embodiments, the Cas9- and/or gRNA-encoding DNA is delivered by a hybrid virus, e.g., a hybrid of one or more of the viruses described herein. In certain embodiments, the hybrid virus is hybrid of an AAV (e.g., of any AAV serotype), with a Bocavirus, B19 virus, porcine AAV, goose AAV, feline AAV, canine AAV, or MVM.

[1144] A packaging cell is used to form a virus particle that is capable of infecting a target cell. Exemplary packaging cells include 293 cells, which can package adenovirus, and ψ2 or PA317 cells, which can package retrovirus. A viral vector used in gene therapy is usually generated by a producer cell line that packages a nucleic acid vector into a viral particle. The vector typically contains the minimal viral sequences required for packaging and subsequent integration into a host or target cell (if applicable), with other viral sequences being replaced by an expression cassette encoding the protein to be expressed, e.g., Cas9. For example, an AAV vector used in gene therapy typically only possesses inverted terminal repeat (ITR) sequences from the AAV genome which are required for packaging and gene expression in the host or target cell. The missing viral functions can be supplied in trans by the packaging cell line and/or plasmid containing E2A, E4, and VA genes from adenovirus, and plasmid encoding Rep and Cap genes from AAV, as described in “Triple Transfection Protocol.” Henceforth, the viral DNA is packaged in a cell line, which contains a helper plasmid encoding the other AAV genes, namely rep and cap, but lacking ITR sequences. In certain embodiments, the viral DNA is packaged in a producer cell line, which contains E1A and/or E1B genes from adenovirus. The cell line is also infected with adenovirus as a helper. The helper virus (e.g., adenovirus or HSV) or helper plasmid promotes replication of the AAV vector and expression of AAV genes from the helper plasmid with ITRs. The helper plasmid is not packaged in significant amounts due to a lack of ITR sequences. Contamination with adenovirus can be reduced by, e.g., heat treatment to which adenovirus is more sensitive than AAV.

[1145] In certain embodiments, the viral vector is capable of cell type and/or tissue type recognition. For example, the viral vector can be pseudotyped with a different/alternative viral envelope glycoprotein; engineered with a cell type-specific receptor (e.g., genetic modification of the viral envelope glycoproteins to incorporate targeting ligands such as peptide ligands, single chain antibodies, or growth factors); and/or engineered to have a molecular bridge with dual specificities with one end recognizing a viral glycoprotein and the other end recognizing a moiety of the target cell surface (e.g., ligand-receptor, monoclonal antibody, avidin-biotin and chemical conjugation).

[1146] In certain embodiments, the viral vector achieves cell type specific expression. For example, a tissue-specific promoter can be constructed to restrict expression of the transgene (Cas9 and gRNA) to only the target cell. The specificity of the vector can also be mediated by microRNA-dependent control of transgene expression. In certain embodiments, the viral vector has increased efficiency of fusion of the viral vector and a target cell membrane. For example, a fusion protein such as fusion-competent hemagglutin (HA) can be incorporated to increase viral uptake into cells. In certain embodiments, the viral vector has the ability of nuclear localization. For example, a virus that requires the breakdown of the nuclear envelope (during cell division) and therefore will not infect a non-diving cell can be altered to incorporate a nuclear localization peptide in the matrix protein of the virus thereby enabling the transduction of non-proliferating cells.

[1147] In certain embodiments, the Cas9- and/or gRNA-encoding DNA is delivered by a non-vector based method (e.g., using naked DNA or DNA complexes). For example, the DNA can be delivered, e.g., by organically modified silica or silicate (Ormosil), electroporation, transient cell compression or squeezing (e.g., as described in Lee, et al., 2012, Nano Lett 12: 6322-27), gene gun, sonoporation, magnetofection, lipid-mediated transfection, dendrimers, inorganic nanoparticles, calcium phosphates, or a combination thereof.

[1148] In certain embodiments, delivery via electroporation comprises mixing the cells with the Cas9- and/or gRNA-encoding DNA in a cartridge, chamber or cuvette and applying one or more electrical impulses of defined duration and amplitude. In certain embodiments, delivery via electroporation is performed using a system in which cells are mixed with the Cas9- and/or gRNA-encoding DNA in a vessel connected to a device (e.g., a pump) which feeds the mixture into a cartridge, chamber or cuvette wherein one or more electrical impulses of defined duration and amplitude are applied, after which the cells are delivered to a second vessel.

[1149] In certain embodiments, the Cas9- and/or gRNA-encoding DNA is delivered by a combination of a vector and a non-vector based method. In certain embodiments, the donor template nucleic acid is delivered by a combination of a vector and a non-vector based method. For example, virosomes combine liposomes with an inactivated virus (e.g., HIV or influenza virus), which can result in more efficient gene transfer, e.g., in respiratory epithelial cells than either viral or liposomal methods alone.

[1150] In certain embodiments, the delivery vehicle is a non-viral vector. In certain embodiments, the non-viral vector is an inorganic nanoparticle. Exemplary inorganic nanoparticles include, e.g., magnetic nanoparticles (e.g., Fe₃MnO₂) and silica. The outer surface of the nanoparticle can be conjugated with a positively charged polymer (e.g., polyethylenimine, polylysine, polyserine) which allows for attachment (e.g., conjugation or entrapment) of payload. In certain embodiments, the non-viral vector is an organic nanoparticle (e.g., entrapment of the payload inside the nanoparticle). Exemplary organic nanoparticles include, e.g., SNALP liposomes that contain cationic lipids together with neutral helper lipids which are coated with polyethylene glycol (PEG) and protamine and nucleic acid complex coated with lipid coating. Exemplary lipids for gene transfer are shown below in Table 5.

TABLE 5
Lipids Used for Gene Transfer

| Lipid | Abbreviation | Feature |
|---|---|---|
| 1,2-Dioleoyl-sn-glycero-3-phosphatidylcholine | DOPC | Helper |
| 1,2-Dioleoyl-sn-glycero-3-phosphatidylethanolamine | DOPE | Helper |
| Cholesterol | | Helper |
| N-[1-(2,3-Dioleyloxy)propyl]N,N,N- | DOTMA | Cationic |
| trimethylammonium chloride | | |
| 1,2-Dioleoyloxy-3-trimethylammonium-propane | DOTAP | Cationic |
| Dioctadecylamidoglycylspermine | DOGS | Cationic |
| N-(3-Aminopropyl)-N,N-dimethyl-2,3- | GAP-DLRIE | Cationic |
| bis(dodecyloxy)-1-propanaminium bromide | | |
| Cetyltrimethylammonium bromide | CTAB | Cationic |
| 6-Lauroxyhexyl ornithinate | LHON | Cationic |
| 1-(2,3-Dioleoyloxypropyl)-2,4,6-trimethylpyridinium | 2Oc | Cationic |
| 2,3-Dioleyloxy-N-[2(sperminecarboxamido-ethyl]- | DOSPA | Cationic |
| N,N-dimethyl-1-propanaminium trifluoroacetate | | |
| 1,2-Dioleyl-3-trimethylammonium-propane | DOPA | Cationic |
| N-(2-Hydroxyethyl)-N,N-dimethyl-2,3- | MDRIE | Cationic |
| bis(tetradecyloxy)-1-propanaminium bromide | | |
| Dimyristooxypropyl dimethyl hydroxyethyl | DMRI | Cationic |
| ammonium bromide | | |
| 3β-[N-(N′,N′-Dimethylaminoethane)- | DC-Chol | Cationic |
| carbamoyl]cholesterol | | |
| Bis-guanidium-tren-cholesterol | BGTC | Cationic |
| 1,3-Diodeoxy-2-(6-carboxy-spermyl)-propylamide | DOSPER | Cationic |
| Dimethyloctadecylammonium bromide | DDAB | Cationic |
| Dioctadecylamidoglicylspermidin | DSL | Cationic |
| rac-[(2,3-Dioctadecyloxypropyl)(2-hydroxyethyl)]- | CLIP-1 | Cationic |
| dimethylammonium chloride | | |
| rac-[2(2,3-Dihexadecyloxypropyl- | CLIP-6 | Cationic |
| oxymethyloxy)ethyl]trimethylammonium bromide | | |
| Ethyldimyristoylphosphatidylcholine | EDMPC | Cationic |
| 1,2-Distearyloxy-N,N-dimethyl-3-aminopropane | DSDMA | Cationic |
| 1,2-Dimyristoyl-trimethylammonium propane | DMTAP | Cationic |
| O,O′-Dimyristyl-N-lysyl aspartate | DMKE | Cationic |
| 1,2-Distearoyl-sn-glycero-3-ethylphosphocholine | DSEPC | Cationic |
| N-Palmitoyl D-erythro-sphingosyl carbamoyl- | CCS | Cationic |
| spermine | | |
| N-t-Butyl-N0-tetradecyl-3- | diC14-amidine | Cationic |
| tetradecylaminopropionamidine | | |
| Octadecenolyoxy[ethyl-2-heptadecenyl-3 | DOTIM | Cationic |
| hydroxyethyl] imidazolinium chloride | | |
| N1-Cholesteryloxycarbonyl-3,7-diazanonane-1,9- | CDAN | Cationic |
| diamine | | |
| 2-(3-[Bis(3-amino-propyl)-amino]propylamino)-N- | RPR209120 | Cationic |
| ditetradecylcarbamoylme-ethyl-acetamide | | |
| 1,2-dilinoleyloxy-3-dimethylaminopropane | DLinDMA | Cationic |
| 2,2-dilinoleyl-4-dimethylaminoethyl-[1,3]- | DLin-KC2-DMA | Cationic |
| dioxolane | | |
| dilinoleyl-methyl-4-dimethylaminobutyrate | DLin-MC3-DMA | Cationic |

Exemplary polymers for gene transfer are shown below in Table 6.

TABLE 6
Polymers Used for Gene Transfer

| Polymer | Abbreviation |
|---|---|
| Poly(ethylene)glycol | PEG |
| Polyethylenimine | PEI |
| Dithiobis(succinimidylpropionate) | DSP |
| Dimethyl-3,3′-dithiobispropionimidate | DTBP |
| Poly(ethylene imine)biscarbamate | PEIC |
| Poly(L-lysine) | PLL |
| Histidine modified PLL | |
| Poly(N-vinylpyrrolidone) | PVP |
| Poly(propylenimine) | PPI |
| Poly(amidoamine) | PAMAM |
| Poly(amido ethylenimine) | SS-PAEI |
| Triethylenetetramine | TETA |
| Poly(β-aminoester) | |
| Poly(4-hydroxy-L-proline ester) | PHP |
| Poly(allylamine) | |
| Poly(α-[4-aminobutyl]-L-glycolic acid) | PAGA |
| Poly(D,L-lactic-co-glycolic acid) | PLGA |
| Poly(N-ethyl-4-vinylpyridinium bromide) | |
| Poly(phosphazene)s | PPZ |
| Poly(phosphoester)s | PPE |
| Poly(phosphoramidate)s | PPA |
| Poly(N-2-hydroxypropylmethacrylamide) | pHPMA |
| Poly (2-(dimethylamino)ethyl methacrylate) | pDMAEMA |
| Poly(2-aminoethyl propylene phosphate) | PPE-EA |
| Chitosan | |
| Galactosylated chitosan | |
| N-Dodacylated chitosan | |
| Histone | |
| Collagen | |
| Dextran-spermine | D-SPM |

[1151] In certain embodiments, the vehicle has targeting modifications to increase target cell update of nanoparticles and liposomes, e.g., cell specific antigens, monoclonal antibodies, single chain antibodies, aptamers, polymers, sugars (e.g., N-acetylgalactosamine (GalNAc)), and cell penetrating peptides. In certain embodiments, the vehicle uses fusogenic and endosome-destabilizing peptides/polymers. In certain embodiments, the vehicle undergoes acid-triggered conformational changes (e.g., to accelerate endosomal escape of the cargo). In certain embodiments, a stimuli-cleavable polymer is used, e.g., for release in a cellular compartment. For example, disulfide-based cationic polymers that are cleaved in the reducing cellular environment can be used.

[1152] In certain embodiments, the delivery vehicle is a biological non-viral delivery vehicle. In certain embodiments, the vehicle is an attenuated bacterium (e.g., naturally or artificially engineered to be invasive but attenuated to prevent pathogenesis and expressing the transgene (e.g., Listeria monocytogenes, certain Salmonella strains, Bifidobacterium longum, and modified Escherichia coli), bacteria having nutritional and tissue-specific tropism to target specific tissues, bacteria having modified surface proteins to alter target tissue specificity). In certain embodiments, the vehicle is a genetically modified bacteriophage (e.g., engineered phages having large packaging capacity, less immunogenic, containing mammalian plasmid maintenance sequences and having incorporated targeting ligands). In certain embodiments, the vehicle is a mammalian virus-like particle. For example, modified viral particles can be generated (e.g., by purification of the “empty” particles followed by ex vivo assembly of the virus with the desired cargo). The vehicle can also be engineered to incorporate targeting ligands to alter target tissue specificity. In certain embodiments, the vehicle is a biological liposome. For example, the biological liposome is a phospholipid-based particle derived from human cells (e.g., erythrocyte ghosts, which are red blood cells broken down into spherical structures derived from the subject (e.g., tissue targeting can be achieved by attachment of various tissue or cell-specific ligands), or secretory exosomes—subject (i.e., patient) derived membrane-bound nanovesicle (30-100 nm) of endocytic origin (e.g., can be produced from various cell types and can therefore be taken up by cells without the need of for targeting ligands).

[1153] In certain embodiments, one or more nucleic acid molecules (e.g., DNA molecules) other than the components of a Cas system, e.g., the Cas9 molecule component and/or the gRNA molecule component described herein, are delivered. In certain embodiments, the nucleic acid molecule is delivered at the same time as one or more of the components of the Cas system are delivered. In certain embodiments, the nucleic acid molecule is delivered before or after (e.g., less than about 30 minutes, 1 hour, 2 hours, 3 hours, 6 hours, 9 hours, 12 hours, 1 day, 2 days, 3 days, 1 week, 2 weeks, or 4 weeks) one or more of the components of the Cas system are delivered. In certain embodiments, the nucleic acid molecule is delivered by a different means than one or more of the components of the Cas system, e.g., the Cas9 molecule component and/or the gRNA molecule component, are delivered. The nucleic acid molecule can be delivered by any of the delivery methods described herein. For example, the nucleic acid molecule can be delivered by a viral vector, e.g., an integration-deficient lentivirus, and the Cas9 molecule component and/or the gRNA molecule component can be delivered by electroporation, e.g., such that the toxicity caused by nucleic acids (e.g., DNAs) can be reduced. In certain embodiments, the nucleic acid molecule encodes a therapeutic protein, e.g., a protein described herein. In certain embodiments, the nucleic acid molecule encodes an RNA molecule, e.g., an RNA molecule described herein.

[1154] 10.2 Delivery of RNA Encoding a Cas9 Molecule

[1155] RNA encoding Cas9 molecules (e.g., eaCas9 molecules) and/or gRNA molecules, can be delivered into cells, e.g., target cells described herein, by art-known methods or as described herein. For example, Cas9-encoding and/or gRNA-encoding RNA can be delivered, e.g., by microinjection, electroporation, transient cell compression or squeezing (e.g., as described in Lee, et al., Nano Lett 12: 6322-27), lipid-mediated transfection, peptide-mediated delivery, or a combination thereof. Cas9-encoding and/or gRNA-encoding RNA can be conjugated to molecules promoting uptake by the target cells (e.g., target cells described herein).

[1156] In certain embodiments, delivery via electroporation comprises mixing the cells with the RNA encoding Cas9 molecules and/or gRNA molecules with or without donor template nucleic acid molecules, in a cartridge, chamber or cuvette and applying one or more electrical impulses of defined duration and amplitude. In certain embodiments, delivery via electroporation is performed using a system in which cells are mixed with the RNA encoding Cas9 molecules and/or gRNA molecules, with or without donor template nucleic acid molecules in a vessel connected to a device (e.g., a pump) which feeds the mixture into a cartridge, chamber or cuvette wherein one or more electrical impulses of defined duration and amplitude are applied, after which the cells are delivered to a second vessel. Cas9-encoding and/or gRNA-encoding RNA can be conjugated to molecules to promote uptake by the target cells (e.g., target cells described herein).

[1157] 10.3 Delivery of Cas9

[1158] Cas9 molecules (e.g., eaCas9 molecules) can be delivered into cells by art-known methods or as described herein. For example, Cas9 protein molecules can be delivered, e.g., by microinjection, electroporation, transient cell compression or squeezing (e.g., as described in Lee, et al., Nano Lett 12: 6322-27), lipid-mediated transfection, peptide-mediated delivery, or a combination thereof. Delivery can be accompanied by DNA encoding a gRNA or by a gRNA. Cas9 protein can be conjugated to molecules promoting uptake by the target cells (e.g., target cells described herein).

[1159] In certain embodiments, delivery via electroporation comprises mixing the cells with the Cas9 molecules and/or gRNA molecules, with or without donor nucleic acid, in a cartridge, chamber or cuvette and applying one or more electrical impulses of defined duration and amplitude. In certain embodiments, delivery via electroporation is performed using a system in which cells are mixed with the RNA encoding Cas9 molecules and/or gRNA molecules, in a vessel connected to a device (e.g., a pump) which feeds the mixture into a cartridge, chamber or cuvette wherein one or more electrical impulses of defined duration and amplitude are applied, after which the cells are delivered to a second vessel. Cas9-encoding and/or gRNA-encoding RNA can be conjugated to molecules to promote uptake by the target cells (e.g., target cells described herein).

[1160] 10.4 Route of Administration

[1161] Systemic modes of administration include oral and parenteral routes. Parenteral routes include, by way of example, intravenous, intrarterial, intramuscular, intradermal, subcutaneous, intranasal, and intraperitoneal routes. Components administered systemically may be modified or formulated to target muscle cells, e.g., skeletal muscle cells, cardiac muscle cells or smooth muscle cells.

[1162] Local modes of administration include injection directly into one or more specific tissues, e.g., one or more muscles. In certain embodiments, local modes of administration include injection directly into one or more skeletal muscles. In certain embodiments, skeletal muscles include the following: abductor digiti minimi (foot), abductor digiti minimi (hand), abductor hallucis, abductor pollicis brevis, abductor pollicis longus, adductor brevis, adductor hallucis, adductor longus, adductor magnus, adductor pollicis, anconeus, articularis cubiti, articularis genu, aryepiglotticus, auricularis, biceps brachii, biceps femoris, brachialis, brachioradialis, buccinator, bulbospongiosus, constrictor of pharynx—inferior, constrictor of pharynx—middle, constrictor of pharynx—superior, coracobrachialis, corrugator supercilii, cremaster, cricothyroid, dartos, deep transverse perinei, deltoid, depressor anguli oris, depressor labii inferioris, diaphragm, digastric, digastric (anterior view), erector spinae—spinalis, erector spinae—iliocostalis, erector spinae—longissimus, extensor carpi radialis brevis, extensor carpi radialis longus, extensor carpi ulnaris, extensor digiti minimi (hand), extensor digitorum (hand), extensor digitorum brevis (foot), extensor digitorum longus (foot), extensor hallucis brevis, extensor hallucis longus, extensor indicis, extensor pollicis brevis, extensor pollicis longus, external oblique abdominis, flexor carpi radialis, flexor carpi ulnaris, flexor digiti minimi brevis (foot), flexor digiti minimi brevis (hand), flexor digitorum brevis, flexor digitorum longus (foot), flexor digitorum profundus, flexor digitorum superficialis, flexor hallucis brevis, flexor hallucis longus, flexor pollicis brevis, flexor pollicis longus, frontalis, gastrocnemius, gemellus inferior, gemellus superior, genioglossus, geniohyoid, gluteus maximus, gluteus medius, gluteus minimus, gracilis, hyoglossus, iliacus, inferior oblique, inferior rectus, infraspinatus, intercostals external, intercostals innermost, intercostals internal, internal oblique abdominis, interossei—dorsal of hand, interossei—dorsal of foot, interossei—palmar of hand, interossei—plantar of foot, interspinales, intertransversarii, intrinsic muscles of tongue, ishiocavernosus, lateral cricoarytenoid, lateral pterygoid, lateral rectus, latissimus dorsi, levator anguli oris, levator ani-coccygeus, levator ani-iliococcygeus, levator ani-pubococcygeus, levator ani-puborectalis, levator ani-pubovaginalis, levator labii superioris, levator labii superioris, alaeque nasi, levator palpebrae superioris, levator scapulae, levator veli palatini, levatores costarum, longus capitis, longus colli, lumbricals of foot, lumbricals of hand, masseter, medial pterygoid, medial rectus, mentalis, m. uvulae, mylohyoid, nasalis, oblique arytenoid, obliquus capitis inferior, obliquus capitis superior, obturator externus, obturator internus (A), obturator internus (B), omohyoid, opponens digiti minimi (hand), opponens pollicis, orbicularis oculi, orbicularis oris, palatoglossus, palatopharyngeus, palmaris brevis, palmaris longus, pectineus, pectoralis major, pectoralis minor, peroneus brevis, peroneus longus, peroneus tertius, piriformis (A), piriformis (B), plantaris, platysma, popliteus, posterior cricoarytenoid, procerus, pronator quadratus, pronator teres, psoas major, psoas minor, pyramidalis, quadratus femoris, quadratus lumborum, quadratus plantae, rectus abdominis, rectus capitus anterior, rectus capitus lateralis, rectus capitus posterior major, rectus capitus posterior minor, rectus femoris, rhomboid major, rhomboid minor, risorius, salpingopharyngeus, sartorius, scalenus anterior, scalenus medius, scalenus minimus, scalenus posterior, semimembranosus, semitendinosus, serratus anterior, serratus posterior inferior, serratus posterior superior, soleus, sphincter ani, sphincter urethrae, splenius capitis, splenius cervicis, stapedius, sternocleidomastoid, sternohyoid, sternothyroid, styloglossus, stylohyoid, stylohyoid (anterior view), stylopharyngeus, subclavius, subcostalis, subscapularis, superficial transverse perinei, superior oblique, superior rectus, supinator, supraspinatus, temporalis, temporoparietalis, tensor fasciae lata, tensor tympani, tensor veli palatini, teres major, teres minor, thyro-arytenoid & vocalis, thyro-epiglotticus, thyrohyoid, tibialis anterior, tibialis posterior, transverse arytenoid, transversospinalis—multifidus, transversospinalis—rotatores, transversospinalis—semispinalis, transversus abdominis, transversus thoracis, trapezius, triceps, vastus intermedius, vastus lateralis, vastus medialis, zygomaticus major, or zygomaticus minor.

[1163] In certain embodiments, local modes of administration include injection directly into cardiac muscle or smooth muscle.

[1164] In certain embodiments, significantly smaller amounts of the components (compared with systemic approaches) may exert an effect when administered locally (for example, intravitreally) compared to when administered systemically (for example, intravenously). Local modes of administration can reduce or eliminate the incidence of potentially toxic side effects that may occur when therapeutically effective amounts of a component are administered systemically.

[1165] Administration may be provided as a periodic bolus (for example, intravenously) or as continuous infusion from an internal reservoir or from an external reservoir (for example, from an intravenous bag or implantable pump). Components may be administered locally, for example, by continuous release from a sustained release drug delivery device immobilized within a muscle.

[1166] In addition, components may be formulated to permit release over a prolonged period of time. A release system can include a matrix of a biodegradable material or a material which releases the incorporated components by diffusion. The components can be homogeneously or heterogeneously distributed within the release system. A variety of release systems may be useful, however, the choice of the appropriate system will depend upon rate of release required by a particular application. Both non-degradable and degradable release systems can be used. Suitable release systems include polymers and polymeric matrices, non-polymeric matrices, or inorganic and organic excipients and diluents such as, but not limited to, calcium carbonate and sugar (for example, trehalose). Release systems may be natural or synthetic. However, synthetic release systems are preferred because generally they are more reliable, more reproducible and produce more defined release profiles. The release system material can be selected so that components having different molecular weights are released by diffusion through or degradation of the material.

[1167] Representative synthetic, biodegradable polymers include, for example: polyamides such as poly(amino acids) and poly(peptides); polyesters such as poly(lactic acid), poly(glycolic acid), poly(lactic-co-glycolic acid), and poly(caprolactone); poly(anhydrides); polyorthoesters; polycarbonates; and chemical derivatives thereof (substitutions, additions of chemical groups, for example, alkyl, alkylene, hydroxylations, oxidations, and other modifications routinely made by those skilled in the art), copolymers and mixtures thereof. Representative synthetic, non-degradable polymers include, for example: polyethers such as poly(ethylene oxide), poly(ethylene glycol), and poly(tetramethylene oxide); vinyl polymers-polyacrylates and polymethacrylates such as methyl, ethyl, other alkyl, hydroxyethyl methacrylate, acrylic and methacrylic acids, and others such as poly(vinyl alcohol), poly(vinyl pyrolidone), and poly(vinyl acetate); poly(urethanes); cellulose and its derivatives such as alkyl, hydroxyalkyl, ethers, esters, nitrocellulose, and various cellulose acetates; polysiloxanes; and any chemical derivatives thereof (substitutions, additions of chemical groups, for example, alkyl, alkylene, hydroxylations, oxidations, and other modifications routinely made by those skilled in the art), copolymers and mixtures thereof.

[1168] Poly(lactide-co-glycolide) microsphere can also be used for intraocular injection. Typically the microspheres are composed of a polymer of lactic acid and glycolic acid, which are structured to form hollow spheres. The spheres can be approximately 15-30 microns in diameter and can be loaded with components described herein.

[1169] 10.5 Bi-Modal or Differential Delivery of Components

[1170] Separate delivery of the components of a Cas system, e.g., the Cas9 molecule component and the gRNA molecule component, and more particularly, delivery of the components by differing modes, can enhance performance, e.g., by improving tissue specificity and safety.

[1171] In certain embodiments, the Cas9 molecule and the gRNA molecule are delivered by different modes, or as sometimes referred to herein as differential modes. Different or differential modes, as used herein, refer modes of delivery that confer different pharmacodynamic or pharmacokinetic properties on the subject component molecule, e.g., a Cas9 molecule, gRNA molecule, template nucleic acid, or payload. For example, the modes of delivery can result in different tissue distribution, different half-life, or different temporal distribution, e.g., in a selected compartment, tissue, or organ.

[1172] Some modes of delivery, e.g., delivery by a nucleic acid vector that persists in a cell, or in progeny of a cell, e.g., by autonomous replication or insertion into cellular nucleic acid, result in more persistent expression of and presence of a component. Examples include viral, e.g., AAV or lentivirus, delivery.

[1173] By way of example, the components, e.g., a Cas9 molecule and a gRNA molecule, can be delivered by modes that differ in terms of resulting half-life or persistent of the delivered component the body, or in a particular compartment, tissue or organ. In certain embodiments, a gRNA molecule can be delivered by such modes. The Cas9 molecule component can be delivered by a mode which results in less persistence or less exposure to the body or a particular compartment or tissue or organ.

[1174] More generally, in certain embodiments, a first mode of delivery is used to deliver a first component and a second mode of delivery is used to deliver a second component. The first mode of delivery confers a first pharmacodynamic or pharmacokinetic property. The first pharmacodynamic property can be, e.g., distribution, persistence, or exposure, of the component, or of a nucleic acid that encodes the component, in the body, a compartment, tissue or organ. The second mode of delivery confers a second pharmacodynamic or pharmacokinetic property. The second pharmacodynamic property can be, e.g., distribution, persistence, or exposure, of the component, or of a nucleic acid that encodes the component, in the body, a compartment, tissue or organ.

[1175] In certain embodiments, the first pharmacodynamic or pharmacokinetic property, e.g., distribution, persistence or exposure, is more limited than the second pharmacodynamic or pharmacokinetic property. In certain embodiments, the first mode of delivery is selected to optimize, e.g., minimize, a pharmacodynamic or pharmacokinetic property, e.g., distribution, persistence or exposure. In certain embodiments, the second mode of delivery is selected to optimize, e.g., maximize, a pharmacodynamic or pharmacokinetic property, e.g., distribution, persistence or exposure.

[1176] In certain embodiments, the first mode of delivery comprises the use of a relatively persistent element, e.g., a nucleic acid, e.g., a plasmid or viral vector, e.g., an AAV or lentivirus. As such vectors are relatively persistent product transcribed from them would be relatively persistent.

[1177] In certain embodiments, the second mode of delivery comprises a relatively transient element, e.g., an RNA or protein.

[1178] In certain embodiments, the first component comprises gRNA, and the delivery mode is relatively persistent, e.g., the gRNA is transcribed from a plasmid or viral vector, e.g., an AAV or lentivirus. Transcription of these genes would be of little physiological consequence because the genes do not encode for a protein product, and the gRNAs are incapable of acting in isolation. The second component, a Cas9 molecule, is delivered in a transient manner, for example as mRNA or as protein, ensuring that the full Cas9 molecule/gRNA molecule complex is only present and active for a short period of time.

[1179] Furthermore, the components can be delivered in different molecular form or with different delivery vectors that complement one another to enhance safety and tissue specificity.

[1180] Use of differential delivery modes can enhance performance, safety and efficacy. E.g., the likelihood of an eventual off-target modification can be reduced. Delivery of immunogenic components, e.g., Cas9 molecules, by less persistent modes can reduce immunogenicity, as peptides from the bacterially-derived Cas enzyme are displayed on the surface of the cell by MHC molecules. A two-part delivery system can alleviate these drawbacks.

[1181] Differential delivery modes can be used to deliver components to different, but overlapping target regions. The formation active complex is minimized outside the overlap of the target regions. Thus, in certain embodiments, a first component, e.g., a gRNA molecule is delivered by a first delivery mode that results in a first spatial, e.g., tissue, distribution. A second component, e.g., a Cas9 molecule is delivered by a second delivery mode that results in a second spatial, e.g., tissue, distribution. In certain embodiments the first mode comprises a first element selected from a liposome, nanoparticle, e.g., polymeric nanoparticle, and a nucleic acid, e.g., viral vector. The second mode comprises a second element selected from the group. In certain embodiments, the first mode of delivery comprises a first targeting element, e.g., a cell specific receptor or an antibody, and the second mode of delivery does not include that element. In embodiment, the second mode of delivery comprises a second targeting element, e.g., a second cell specific receptor or second antibody.

[1182] When the Cas9 molecule is delivered in a virus delivery vector, a liposome, or polymeric nanoparticle, there is the potential for delivery to and therapeutic activity in multiple tissues, when it may be desirable to only target a single tissue. A two-part delivery system can resolve this challenge and enhance tissue specificity. If the gRNA molecule and the Cas9 molecule are packaged in separated delivery vehicles with distinct but overlapping tissue tropism, the fully functional complex is only be formed in the tissue that is targeted by both vectors.

[1183] 10.6 Ex Vivo Delivery

[1184] A presently disclosed genome-editing system can be implemented in a cell or in an in vitro contact. In certain embodiments, each component of the genome-editing system described in Table 3 are introduced into a cell which is then introduced into a subject. Methods of introducing the components can include, e.g., any of the delivery methods described in Table 4.

### 11. Modified Nucleosides, Nucleotides, and Nucleic Acids

[1185] Modified nucleosides and modified nucleotides can be present in nucleic acids, e.g., particularly gRNA, but also other forms of RNA, e.g., mRNA, RNAi, or siRNA. As described herein, “nucleoside” is defined as a compound containing a five-carbon sugar molecule (a pentose or ribose) or derivative thereof, and an organic base, purine or pyrimidine, or a derivative thereof. As described herein, “nucleotide” is defined as a nucleoside further comprising a phosphate group.

[1186] Modified nucleosides and nucleotides can include one or more of:

[1187] (i) alteration, e.g., replacement, of one or both of the non-linking phosphate oxygens and/or of one or more of the linking phosphate oxygens in the phosphodiester backbone linkage;

[1188] (ii) alteration, e.g., replacement, of a constituent of the ribose sugar, e.g., of the 2′ hydroxyl on the ribose sugar;

[1189] (iii) wholesale replacement of the phosphate moiety with “dephospho” linkers;

[1190] (iv) modification or replacement of a naturally occurring nucleobase;

[1191] (v) replacement or modification of the ribose-phosphate backbone;

[1192] (vi) modification of the 3′ end or 5′ end of the oligonucleotide, e.g., removal, modification or replacement of a terminal phosphate group or conjugation of a moiety; and

[1193] (vii) modification of the sugar.

[1194] The modifications listed above can be combined to provide modified nucleosides and nucleotides that can have two, three, four, or more modifications. For example, a modified nucleoside or nucleotide can have a modified sugar and a modified nucleobase. In certain embodiments, every base of a gRNA is modified, e.g., all bases have a modified phosphate group, e.g., all are phosphorothioate groups. In certain embodiments, all, or substantially all, of the phosphate groups of a unimolecular or modular gRNA molecule are replaced with phosphorothioate groups.

[1195] In certain embodiments, modified nucleotides, e.g., nucleotides having modifications as described herein, can be incorporated into a nucleic acid, e.g., a “modified nucleic acid.” In certain embodiments, the modified nucleic acids comprise one, two, three or more modified nucleotides. In certain embodiments, at least 5% (e.g., at least about 5%, at least about 10%, at least about 15%, at least about 20%, at least about 25%, at least about 30%, at least about 35%, at least about 40%, at least about 45%, at least about 50%, at least about 55%, at least about 60%, at least about 65%, at least about 70%, at least about 75%, at least about 80%, at least about 85%, at least about 90%, at least about 95%, or about 100%) of the positions in a modified nucleic acid are a modified nucleotides.

[1196] Unmodified nucleic acids can be prone to degradation by, e.g., cellular nucleases. For example, nucleases can hydrolyze nucleic acid phosphodiester bonds. Accordingly, in certain embodiments, the modified nucleic acids described herein can contain one or more modified nucleosides or nucleotides, e.g., to introduce stability toward nucleases.

[1197] In certain embodiments, the modified nucleosides, modified nucleotides, and modified nucleic acids described herein can exhibit a reduced innate immune response when introduced into a population of cells, both in vivo and ex vivo. The term “innate immune response” includes a cellular response to exogenous nucleic acids, including single stranded nucleic acids, generally of viral or bacterial origin, which involves the induction of cytokine expression and release, particularly the interferons, and cell death. In certain embodiments, the modified nucleosides, modified nucleotides, and modified nucleic acids described herein can disrupt binding of a major groove interacting partner with the nucleic acid. In certain embodiments, the modified nucleosides, modified nucleotides, and modified nucleic acids described herein can exhibit a reduced innate immune response when introduced into a population of cells, both in vivo and ex vivo, and also disrupt binding of a major groove interacting partner with the nucleic acid.

[1198] 11.1 Definitions of Chemical Groups

[1199] As used herein, “alkyl” is meant to refer to a saturated hydrocarbon group which is straight-chained or branched. Example alkyl groups include methyl (Me), ethyl (Et), propyl (e.g., n-propyl and isopropyl), butyl (e.g., n-butyl, isobutyl, t-butyl), pentyl (e.g., n-pentyl, isopentyl, neopentyl), and the like. An alkyl group can contain from 1 to about 20, from 2 to about 20, from 1 to about 12, from 1 to about 8, from 1 to about 6, from 1 to about 4, or from 1 to about 3 carbon atoms.

[1200] As used herein, “aryl” refers to monocyclic or polycyclic (e.g., having 2, 3 or 4 fused rings) aromatic hydrocarbons such as, for example, phenyl, naphthyl, anthracenyl, phenanthrenyl, indanyl, indenyl, and the like. In certain embodiments, aryl groups have from 6 to about 20 carbon atoms.

[1201] As used herein, “alkenyl” refers to an aliphatic group containing at least one double bond.

[1202] As used herein, “alkynyl” refers to a straight or branched hydrocarbon chain containing 2-12 carbon atoms and characterized in having one or more triple bonds. Examples of alkynyl groups include, but are not limited to, ethynyl, propargyl, and 3-hexynyl.

[1203] As used herein, “arylalkyl” or “aralkyl” refers to an alkyl moiety in which an alkyl hydrogen atom is replaced by an aryl group. Aralkyl includes groups in which more than one hydrogen atom has been replaced by an aryl group. Examples of “arylalkyl” or “aralkyl” include benzyl, 2-phenylethyl, 3-phenylpropyl, 9-fluorenyl, benzhydryl, and trityl groups.

[1204] As used herein, “cycloalkyl” refers to a cyclic, bicyclic, tricyclic, or polycyclic non-aromatic hydrocarbon groups having 3 to 12 carbons. Examples of cycloalkyl moieties include, but are not limited to, cyclopropyl, cyclopentyl, and cyclohexyl.

[1205] As used herein, “heterocyclyl” refers to a monovalent radical of a heterocyclic ring system. Representative heterocyclyls include, without limitation, tetrahydrofuranyl, tetrahydrothienyl, pyrrolidinyl, pyrrolidonyl, piperidinyl, pyrrolinyl, piperazinyl, dioxanyl, dioxolanyl, diazepinyl, oxazepinyl, thiazepinyl, and morpholinyl.

[1206] As used herein, “heteroaryl” refers to a monovalent radical of a heteroaromatic ring system. Examples of heteroaryl moieties include, but are not limited to, imidazolyl, oxazolyl, thiazolyl, triazolyl, pyrrolyl, furanyl, indolyl, thiophenyl pyrazolyl, pyridinyl, pyrazinyl, pyridazinyl, pyrimidinyl, indolizinyl, purinyl, naphthyridinyl, quinolyl, and pteridinyl.

[1207] 11.2 Phosphate Backbone Modifications

[1208] 11.2.1 The Phosphate Group

[1209] In certain embodiments, the phosphate group of a modified nucleotide can be modified by replacing one or more of the oxygens with a different substituent. Further, the modified nucleotide, e.g., modified nucleotide present in a modified nucleic acid, can include the wholesale replacement of an unmodified phosphate moiety with a modified phosphate as described herein. In certain embodiments, the modification of the phosphate backbone can include alterations that result in either an uncharged linker or a charged linker with unsymmetrical charge distribution.

[1210] Examples of modified phosphate groups include phosphorothioate, phosphoroselenates, borano phosphates, borano phosphate esters, hydrogen phosphonates, phosphoroamidates, alkyl or aryl phosphonates and phosphotriesters. In certain embodiments, one of the non-bridging phosphate oxygen atoms in the phosphate backbone moiety can be replaced by any of the following groups: sulfur (S), selenium (Se), BR₃ (wherein R can be, e.g., hydrogen, alkyl, or aryl), C (e.g., an alkyl group, an aryl group, and the like), H, NR₂ (wherein R can be, e.g., hydrogen, alkyl, or aryl), or OR (wherein R can be, e.g., alkyl or aryl). The phosphorous atom in an unmodified phosphate group is achiral. However, replacement of one of the non-bridging oxygens with one of the above atoms or groups of atoms can render the phosphorous atom chiral; that is to say that a phosphorous atom in a phosphate group modified in this way is a stereogenic center. The stereogenic phosphorous atom can possess either the “R” configuration (herein Rp) or the “S” configuration (herein Sp).

[1211] Phosphorodithioates have both non-bridging oxygens replaced by sulfur. The phosphorus center in the phosphorodithioates is achiral which precludes the formation of oligoribonucleotide diastereomers. In certain embodiments, modifications to one or both non-bridging oxygens can also include the replacement of the non-bridging oxygens with a group independently selected from S, Se, B, C, H, N, and OR (R can be, e.g., alkyl or aryl).

[1212] The phosphate linker can also be modified by replacement of a bridging oxygen, (i.e., the oxygen that links the phosphate to the nucleoside), with nitrogen (bridged phosphoroamidates), sulfur (bridged phosphorothioates) and carbon (bridged methylenephosphonates). The replacement can occur at either linking oxygen or at both of the linking oxygens.

[1213] 11.2.2 Replacement of the Phosphate Group

[1214] The phosphate group can be replaced by non-phosphorus containing connectors. In certain embodiments, the charge phosphate group can be replaced by a neutral moiety.

[1215] Examples of moieties which can replace the phosphate group can include, without limitation, e.g., methyl phosphonate, hydroxylamino, siloxane, carbonate, carboxymethyl, carbamate, amide, thioether, ethylene oxide linker, sulfonate, sulfonamide, thioformacetal, formacetal, oxime, methyleneimino, methylenemethylimino, methylenehydrazo, methylenedimethylhydrazo and methyleneoxymethylimino.

[1216] 11.2.3 Replacement of the Ribophosphate Backbone

[1217] Scaffolds that can mimic nucleic acids can also be constructed wherein the phosphate linker and ribose sugar are replaced by nuclease resistant nucleoside or nucleotide surrogates. In certain embodiments, the nucleobases can be tethered by a surrogate backbone. Examples can include, without limitation, the morpholino, cyclobutyl, pyrrolidine and peptide nucleic acid (PNA) nucleoside surrogates.

[1218] 11.3 Sugar Modifications

[1219] The modified nucleosides and modified nucleotides can include one or more modifications to the sugar group. For example, the 2′ hydroxyl group (OH) can be modified or replaced with a number of different “oxy” or “deoxy” substituents. In certain embodiments, modifications to the 2′ hydroxyl group can enhance the stability of the nucleic acid since the hydroxyl can no longer be deprotonated to form a 2′-alkoxide ion. The 2′-alkoxide can catalyze degradation by intramolecular nucleophilic attack on the linker phosphorus atom.

[1220] Examples of “oxy”-2′ hydroxyl group modifications can include alkoxy or aryloxy (OR, wherein “R” can be, e.g., alkyl, cycloalkyl, aryl, aralkyl, heteroaryl or a sugar); polyethyleneglycols (PEG), O(CH₂CH₂O)ₙCH₂CH₂OR wherein R can be, e.g., H or optionally substituted alkyl, and n can be an integer from 0 to 20 (e.g., from 0 to 4, from 0 to 8, from 0 to 10, from 0 to 16, from 1 to 4, from 1 to 8, from 1 to 10, from 1 to 16, from 1 to 20, from 2 to 4, from 2 to 8, from 2 to 10, from 2 to 16, from 2 to 20, from 4 to 8, from 4 to 10, from 4 to 16, and from 4 to 20). In certain embodiments, the “oxy”-2′ hydroxyl group modification can include “locked” nucleic acids (LNA) in which the 2′ hydroxyl can be connected, e.g., by a C₁₋₆ alkylene or C₁₋₆ heteroalkylene bridge, to the 4′ carbon of the same ribose sugar, where exemplary bridges can include methylene, propylene, ether, or amino bridges; O-amino (wherein amino can be, e.g., NH₂; alkylamino, dialkylamino, heterocyclyl, arylamino, diarylamino, heteroarylamino, or diheteroarylamino, ethylenediamine, or polyamino) and aminoalkoxy, O(CH₂)ₙ-amino, (wherein amino can be, e.g., NH₂; alkylamino, dialkylamino, heterocyclyl, arylamino, diarylamino, heteroarylamino, or diheteroarylamino, ethylenediamine, or polyamino). In certain embodiments, the “oxy”-2′ hydroxyl group modification can include the methoxyethyl group (MOE), (OCH₂CH₂OCH₃, e.g., a PEG derivative).

[1221] “Deoxy” modifications can include hydrogen (i.e. deoxyribose sugars, e.g., at the overhang portions of partially ds RNA); halo (e.g., bromo, chloro, fluoro, or iodo); amino (wherein amino can be, e.g., NH₂; alkylamino, dialkylamino, heterocyclyl, arylamino, diarylamino, heteroarylamino, diheteroarylamino, or amino acid); NH(CH₂CH₂NH)ₙCH₂CH₂-amino (wherein amino can be, e.g., as described herein), —NHC(O)R (wherein R can be, e.g., alkyl, cycloalkyl, aryl, aralkyl, heteroaryl or sugar), cyano; mercapto; alkyl-thio-alkyl; thioalkoxy; and alkyl, cycloalkyl, aryl, alkenyl and alkynyl, which may be optionally substituted with e.g., an amino as described herein.

[1222] The sugar group can also contain one or more carbons that possess the opposite stereochemical configuration than that of the corresponding carbon in ribose. Thus, a modified nucleic acid can include nucleotides containing e.g., arabinose, as the sugar. The nucleotide “monomer” can have an alpha linkage at the 1′ position on the sugar, e.g., alpha-nucleosides. The modified nucleic acids can also include “abasic” sugars, which lack a nucleobase at C-1′. These abasic sugars can also be further modified at one or more of the constituent sugar atoms. The modified nucleic acids can also include one or more sugars that are in the L form, e.g. L-nucleosides. Generally, RNA includes the sugar group ribose, which is a 5-membered ring having an oxygen. Exemplary modified nucleosides and modified nucleotides can include, without limitation, replacement of the oxygen in ribose (e.g., with sulfur (S), selenium (Se), or alkylene, such as, e.g., methylene or ethylene); addition of a double bond (e.g., to replace ribose with cyclopentenyl or cyclohexenyl); ring contraction of ribose (e.g., to form a 4-membered ring of cyclobutane or oxetane); ring expansion of ribose (e.g., to form a 6- or 7-membered ring having an additional carbon or heteroatom, such as for example, anhydrohexitol, altritol, mannitol, cyclohexanyl, cyclohexenyl, and morpholino that also has a phosphoramidate backbone). In certain embodiments, the modified nucleotides can include multicyclic forms (e.g., tricyclo; and “unlocked” forms, such as glycol nucleic acid (GNA) (e.g., R-GNA or S-GNA, where ribose is replaced by glycol units attached to phosphodiester bonds), threose nucleic acid (TNA, where ribose is replaced with α-L-threofuranosyl-(3′→2′)).

[1223] 11.4 Modifications on the Nucleobase

[1224] The modified nucleosides and modified nucleotides described herein, which can be incorporated into a modified nucleic acid, can include a modified nucleobase. Examples of nucleobases include, but are not limited to, adenine (A), guanine (G), cytosine (C), and uracil (U). These nucleobases can be modified or wholly replaced to provide modified nucleosides and modified nucleotides that can be incorporated into modified nucleic acids. The nucleobase of the nucleotide can be independently selected from a purine, a pyrimidine, a purine or pyrimidine analog. In certain embodiments, the nucleobase can include, for example, naturally-occurring and synthetic derivatives of a base.

[1225] 11.4.1 Uracil

[1226] In certain embodiments, the modified nucleobase is a modified uracil. Exemplary nucleobases and nucleosides having a modified uracil include without limitation pseudouridine (yr), pyridin-4-one ribonucleoside, 5-aza-uridine, 6-aza-uridine, 2-thio-5-aza-uridine, 2-thio-uridine (s2U), 4-thio-uridine (s4U), 4-thio-pseudouridine, 2-thio-pseudouridine, 5-hydroxy-uridine (ho⁵U), 5-aminoallyl-uridine, 5-halo-uridine (e.g., 5-iodo-uridine or 5-bromo-uridine), 3-methyl-uridine (m³U), 5-methoxy-uridine (mo⁵U), uridine 5-oxyacetic acid (cmo⁵U), uridine 5-oxyacetic acid methyl ester (mcmo⁵U), 5-carboxymethyl-uridine (cm⁵U), 1-carboxymethyl-pseudouridine, 5-carboxyhydroxymethyl-uridine (chm⁵U), 5-carboxyhydroxymethyl-uridine methyl ester (mchm⁵U), 5-methoxycarbonylmethyl-uridine (mcm⁵U), 5-methoxycarbonylmethyl-2-thio-uridine (mcm⁵s2U), 5-aminomethyl-2-thio-uridine (nm⁵s2U), 5-methylaminomethyl-uridine (mnm⁵U), 5-methylaminomethyl-2-thio-uridine (mnm⁵s2U), 5-methylaminomethyl-2-seleno-uridine (mnm⁵se²U), 5-carbamoylmethyl-uridine (ncm⁵U), 5-carboxymethylaminomethyl-uridine (cmnm⁵U), 5-carboxymethylaminomethyl-2-thio-uridine (cmnm⁵s2U), 5-propynyl-uridine, 1-propynyl-pseudouridine, 5-taurinomethyl-uridine (τcm⁵U), 1-taurinomethyl-pseudouridine, 5-taurinomethyl-2-thio-uridine (τm⁵s2U), 1-taurinomethyl-4-thio-pseudouridine, 5-methyl-uridine (m⁵U, i.e., having the nucleobase deoxythymine), 1-methyl-pseudouridine (m¹ψ), 5-methyl-2-thio-uridine (m⁵s2U), 1-methyl-4-thio-pseudouridine (m¹s⁴ψ), 4-thio-1-methyl-pseudouridine, 3-methyl-pseudouridine (m³ψ), 2-thio-1-methyl-pseudouridine, 1-methyl-1-deaza-pseudouridine, 2-thio-1-methyl-1-deaza-pseudouridine, dihydrouridine (D), dihydropseudouridine, 5,6-dihydrouridine, 5-methyl-dihydrouridine (m⁵D), 2-thio-dihydrouridine, 2-thio-dihydropseudouridine, 2-methoxy-uridine, 2-methoxy-4-thio-uridine, 4-methoxy-pseudouridine, 4-methoxy-2-thio-pseudouridine, N1-methyl-pseudouridine, 3-(3-amino-3-carboxypropyl)uridine (acp³U), 1-methyl-3-(3-amino-3-carboxypropyl)pseudouridine (acp³ψ), 5-(isopentenylaminomethyl)uridine (inm⁵U), 5-(isopentenylaminomethyl)-2-thio-uridine (inm⁵s2U), α-thio-uridine, 2′-O-methyl-uridine (Urn), 5,2′-0-dimethyl-uridine (m⁵Um), 2′-O-methyl-pseudouridine (ψm), 2-thio-2′-O-methyl-uridine (s2Um), 5-methoxycarbonylmethyl-2′-O-methyl-uridine (mcm⁵Um), 5-carbamoylmethyl-2′-O-methyl-uridine (ncm⁵Um), 5-carboxymethylaminomethyl-2′-O-methyl-uridine (cmnm ⁵Um), 3,2′-O-dimethyl-uridine (m³Um), 5-(isopentenylaminomethyl)-2′-O-methyl-uridine ⁵Um), 1-thio-uridine, deoxythymidine, 2′-F-ara-uridine, 2′-F-uridine, 2′-OH-ara-uridine, 5-(2-carbomethoxyvinyl) uridine, 5-[3-(1-E-propenylamino)uridine, pyrazolo[3,4-d]pyrimidines, xanthine, and hypoxanthine.

[1227] 11.4.2 Cytosine

[1228] In certain embodiments, the modified nucleobase is a modified cytosine. Exemplary nucleobases and nucleosides having a modified cytosine include without limitation 5-aza-cytidine, 6-aza-cytidine, pseudoisocytidine, 3-methyl-cytidine (m³C), N4-acetyl-cytidine (act), 5-formyl-cytidine (f⁵C), N4-methyl-cytidine (m⁴C), 5-methyl-cytidine (m⁵C), 5-halo-cytidine (e.g., 5-iodo-cytidine), 5-hydroxymethyl-cytidine (hm⁵C), 1-methyl-pseudoisocytidine, pyrrolo-cytidine, pyrrolo-pseudoisocytidine, 2-thio-cytidine (s2C), 2-thio-5-methyl-cytidine, 4-thio-pseudoisocytidine, 4-thio-1-methyl-pseudoisocytidine, 4-thio-1-methyl-1-deaza-pseudoisocytidine, 1-methyl-1-deaza-pseudoisocytidine, zebularine, 5-aza-zebularine, 5-methyl-zebularine, 5-aza-2-thio-zebularine, 2-thio-zebularine, 2-methoxy-cytidine, 2-methoxy-5-methyl-cytidine, 4-methoxy-pseudoisocytidine, 4-methoxy-1-methyl-pseudoisocytidine, lysidine (k²C), α-thio-cytidine, 2′-O-methyl-cytidine (Cm), 5,2′-O-dimethyl-cytidine (m⁵Cm), N4-acetyl-2′-O-methyl-cytidine (ac⁴Cm), N4,2′-O-dimethyl-cytidine (m⁴Cm), 5-formyl-2′-O-methyl-cytidine (f⁵Cm), N4,N4,2′-O-trimethyl-cytidine (m⁴₂Cm), 1-thio-cytidine, 2′-F-ara-cytidine, 2′-F-cytidine, and 2′-OH-ara-cytidine.

[1229] 11.4.3 Adenine

[1230] In certain embodiments, the modified nucleobase is a modified adenine. Exemplary nucleobases and nucleosides having a modified adenine include without limitation 2-amino-purine, 2,6-diaminopurine, 2-amino-6-halo-purine (e.g., 2-amino-6-chloro-purine), 6-halo-purine (e.g., 6-chloro-purine), 2-amino-6-methyl-purine, 8-azido-adenosine, 7-deaza-adenine, 7-deaza-8-aza-adenine, 7-deaza-2-amino-purine, 7-deaza-8-aza-2-amino-purine, 7-deaza-2,6-diaminopurine, 7-deaza-8-aza-2,6-diaminopurine, 1-methyl-adenosine (m¹A), 2-methyl-adenine (m²A), N6-methyl-adenosine (m⁶A), 2-methylthio-N6-methyl-adenosine (ms2 m⁶A), N6-isopentenyl-adenosine (i⁶A), 2-methylthio-N6-isopentenyl-adenosine (ms²i⁶A), N6-(cis-hydroxyisopentenyl)adenosine (io⁶A), 2-methylthio-N6-(cis-hydroxyisopentenyl)adenosine (ms2io⁶A), N6-glycinylcarbamoyl-adenosine (g⁶A), N6-threonylcarbamoyl-adenosine (t⁶A), N6-methyl-N6-threonylcarbamoyl-adenosine (m⁶t⁶A), 2-methylthio-N6-threonylcarbamoyl-adenosine (ms²g⁶A), N6,N6-dimethyl-adenosine (m⁶₂A), N6-hydroxynorvalylcarbamoyl-adenosine (hn⁶A), 2-methylthio-N6-hydroxynorvalylcarbamoyl-adenosine (ms2hn⁶A), N6-acetyl-adenosine (ac⁶A), 7-methyl-adenine, 2-methylthio-adenine, 2-methoxy-adenine, α-thio-adenosine, 2′-O-methyl-adenosine (Am), N⁶,2′-O-dimethyl-adenosine (m⁶Am), N⁶-Methyl-2′-deoxyadenosine, N6,N6,2′-O-trimethyl-adenosine (m⁶₂Am), 1,2′-O-dimethyl-adenosine (m¹Am), 2′-O-ribosyladenosine (phosphate) (Ar(p)), 2-amino-N6-methyl-purine, 1-thio-adenosine, 8-azido-adenosine, 2′-F-ara-adenosine, 2′-F-adenosine, 2′-OH-ara-adenosine, and N6-(19-amino-pentaoxanonadecyl)-adenosine.

[1231] 11.4.4 Guanine

[1232] In certain embodiments, the modified nucleobase is a modified guanine. Exemplary nucleobases and nucleosides having a modified guanine include without limitation inosine (I), 1-methyl-inosine (m¹I), wyosine (imG), methylwyosine (mimG), 4-demethyl-wyosine (imG-14), isowyosine (imG2), wybutosine (yW), peroxywybutosine (o₂yW), hydroxywybutosine (OHyW), undermodified hydroxywybutosine (OHyW*), 7-deaza-guanosine, queuosine (Q), epoxyqueuosine (oQ), galactosyl-queuosine (galQ), mannosyl-queuosine (manQ), 7-cyano-7-deaza-guanosine (preQ₀), 7-aminomethyl-7-deaza-guanosine (preQ₁), archaeosine (G⁺), 7-deaza-8-aza-guanosine, 6-thio-guanosine, 6-thio-7-deaza-guanosine, 6-thio-7-deaza-8-aza-guanosine, 7-methyl-guanosine (m⁷G), 6-thio-7-methyl-guanosine, 7-methyl-inosine, 6-methoxy-guanosine, 1-methyl-guanosine (m′G), N2-methyl-guanosine (m²G), N2,N2-dimethyl-guanosine (m²₂G), N2,7-dimethyl-guanosine (m²,7G), N2,N2,7-dimethyl-guanosine (m²,2,7G), 8-oxo-guanosine, 7-methyl-8-oxo-guanosine, 1-meth thio-guanosine, N2-methyl-6-thio-guanosine, N2,N2-dimethyl-6-thio-guanosine, α-thio-guanosine, 2′-O-methyl-guanosine (Gm), N2-methyl-2′-O-methyl-guanosine (m²Gm), N2,N2-dimethyl-2′-O-methyl-guanosine (m²₂Gm), 1-methyl-2′-O-methyl-guanosine (m′Gm), N2,7-dimethyl-2′-O-methyl-guanosine (m²,7Gm), 2′-O-methyl-inosine (Im), 1,2′-O-dimethyl-inosine (m′Im), O⁶-phenyl-2′-deoxyinosine, 2′-O-ribosylguanosine (phosphate) (Gr(p)), 1-thio-guanosine, O⁶-methyl-guanosine, O⁶-Methyl-2′-deoxyguanosine, 2′-F-ara-guanosine, and 2′-F-guanosine.

[1233] 11.5 Exemplary Modified gRNAs

[1234] In certain embodiments, the modified nucleic acids can be modified gRNAs. It is to be understood that any of the gRNAs described herein can be modified in accordance with this section, including any gRNA that comprises a targeting domain of the gRNAs of SEQ ID NOS: 206-826366.

[1235] As discussed above, transiently expressed or delivered nucleic acids can be prone to degradation by, e.g., cellular nucleases. Accordingly, in certain embodiments, the modified gRNAs described herein can contain one or more modified nucleosides or nucleotides which introduce stability toward nucleases. In certain embodiments, the modified gRNAs described herein can exhibit a reduced innate immune response when introduced into a population of cells, particularly the cells of the present invention. As noted above, the term “innate immune response” includes a cellular response to exogenous nucleic acids, including single stranded nucleic acids, generally of viral or bacterial origin, which involves the induction of cytokine expression and release, particularly the interferons, and cell death.

[1236] While some of the exemplary modification discussed in this section may be included at any position within the gRNA sequence, in certain embodiments, a gRNA comprises a modification at or near its 5′ end (e.g., within 1-10, 1-5, or 1-2 nucleotides of its 5′ end). In certain embodiments, a gRNA comprises a modification at or near its 3′ end (e.g., within 1-10, 1-5, or 1-2 nucleotides of its 3′ end). In certain embodiments, a gRNA comprises both a modification at or near its 5′ end and a modification at or near its 3′ end.

[1237] In certain embodiments, the 5′ end of a gRNA is modified by the inclusion of a eukaryotic mRNA cap structure or cap analog (e.g., a G(5′)ppp(5′)G cap analog, a m7G(5′)ppp(5′)G cap analog, or a 3′-O-Me-m7G(5′)ppp(5′)G anti reverse cap analog (ARCA)). The cap or cap analog can be included during either chemical synthesis or in vitro transcription of the gRNA. In certain embodiments, an in vitro transcribed gRNA is modified by treatment with a phosphatase (e.g., calf intestinal alkaline phosphatase) to remove the 5′ triphosphate group.

[1238] In certain embodiments, the 3′ end of a gRNA is modified by the addition of one or more (e.g., 25-200) adenine (A) residues. The polyA tract can be contained in the nucleic acid (e.g., plasmid, PCR product, viral genome) encoding the gRNA, or can be added to the gRNA during chemical synthesis, or following in vitro transcription using a polyadenosine polymerase (e.g., E. coli Poly(A)Polymerase).

[1239] In certain embodiments, in vitro transcribed gRNA contains both a 5′ cap structure or cap analog and a 3′ polyA tract. In certain embodiments, an in vitro transcribed gRNA is modified by treatment with a phosphatase (e.g., calf intestinal alkaline phosphatase) to remove the 5′ triphosphate group and comprises a 3′ polyA tract.

[1240] In certain embodiments, gRNAs can be modified at a 3′ terminal U ribose. For example, the two terminal hydroxyl groups of the U ribose can be oxidized to aldehyde groups and a concomitant opening of the ribose ring to afford a modified nucleoside as shown below:

[chemical structure]

[1241] wherein “U” can be an unmodified or modified uridine.

[1242] In certain embodiments, the 3′ terminal U can be modified with a 2′3′ cyclic phosphate as shown below:

[chemical structure]

wherein “U” can be an unmodified or modified uridine.

[1243] In certain embodiments, the gRNA molecules may contain 3′ nucleotides which can be stabilized against degradation, e.g., by incorporating one or more of the modified nucleotides described herein. In this embodiment, e.g., uridines can be replaced with modified uridines, e.g., 5-(2-amino)propyl uridine, and 5-bromo uridine, or with any of the modified uridines described herein; adenosines, and guanosines can be replaced with modified adenosines, and guanosines, e.g., with modifications at the 8-position, e.g., 8-bromo guanosine, or with any of the modified adenosines, or guanosines described herein.

[1244] In certain embodiments, sugar-modified ribonucleotides can be incorporated into the gRNA, e.g., wherein the 2′ OH-group is replaced by a group selected from H, —OR, —R (wherein R can be, e.g., alkyl, cycloalkyl, aryl, aralkyl, heteroaryl or sugar), halo, —SH, —SR (wherein R can be, e.g., alkyl, cycloalkyl, aryl, aralkyl, heteroaryl or sugar), amino (wherein amino can be, e.g., NH₂; alkylamino, dialkylamino, heterocyclyl, arylamino, diarylamino, heteroarylamino, diheteroarylamino, or amino acid); or cyano (—CN). In certain embodiments, the phosphate backbone can be modified as described herein, e.g., with a phosphothioate group. In certain embodiments, one or more of the nucleotides of the gRNA can each independently be a modified or unmodified nucleotide including, but not limited to 2′-sugar modified, such as, 2′-O-methyl, 2′-O-methoxyethyl, or 2′-Fluoro modified including, e.g., 2′-F or 2′-O-methyl, adenosine (A), 2′-F or 2′-O-methyl, cytidine (C), 2′-F or 2′-O-methyl, uridine (U), 2′-F or 2′-O-methyl, thymidine (T), 2′-F or 2′-O-methyl, guanosine (G), 2′-O-methoxyethyl-5-methyluridine (Teo), 2′-O-methoxyethyladenosine (Aeo), 2′-O-methoxyethyl-5-methylcytidine (m5Ceo), and any combinations thereof.

[1245] In certain embodiments, a gRNA can include “locked” nucleic acids (LNA) in which the 2′ OH-group can be connected, e.g., by a C1-6 alkylene or C1-6 heteroalkylene bridge, to the 4′ carbon of the same ribose sugar, where exemplary bridges can include methylene, propylene, ether, or amino bridges; O-amino (wherein amino can be, e.g., NH₂; alkylamino, dialkylamino, heterocyclyl, arylamino, diarylamino, heteroarylamino, or diheteroarylamino, ethylenediamine, or polyamino) and aminoalkoxy or O(CH₂)ₙ-amino (wherein amino can be, e.g., NH₂; alkylamino, dialkylamino, heterocyclyl, arylamino, diarylamino, heteroarylamino, or diheteroarylamino, ethylenediamine, or polyamino).

[1246] In certain embodiments, a gRNA can include a modified nucleotide which is multicyclic (e.g., tricyclo; and “unlocked” forms, such as glycol nucleic acid (GNA) (e.g., R-GNA or S-GNA, where ribose is replaced by glycol units attached to phosphodiester bonds), or threose nucleic acid (TNA, where ribose is replaced with α-L-threofuranosyl-(3′→2′)).

[1247] Generally, gRNA molecules include the sugar group ribose, which is a 5-membered ring having an oxygen. Exemplary modified gRNAs can include, without limitation, replacement of the oxygen in ribose (e.g., with sulfur (S), selenium (Se), or alkylene, such as, e.g., methylene or ethylene); addition of a double bond (e.g., to replace ribose with cyclopentenyl or cyclohexenyl); ring contraction of ribose (e.g., to form a 4-membered ring of cyclobutane or oxetane); ring expansion of ribose (e.g., to form a 6- or 7-membered ring having an additional carbon or heteroatom, such as for example, anhydrohexitol, altritol, mannitol, cyclohexanyl, cyclohexenyl, and morpholino that also has a phosphoramidate backbone). Although the majority of sugar analog alterations are localized to the 2′ position, other sites are amenable to modification, including the 4′ position. In certain embodiments, a gRNA comprises a 4′-S, 4′-Se or a 4′-C-aminomethyl-2′-O-Me modification.

[1248] In certain embodiments, deaza nucleotides, e.g., 7-deaza-adenosine, can be incorporated into the gRNA. In certain embodiments, 0- and N-alkylated nucleotides, e.g., N6-methyl adenosine, can be incorporated into the gRNA. In certain embodiments, one or more or all of the nucleotides in a gRNA molecule are deoxynucleotides.

[1249] 11.6 miRNA Binding Sites

[1250] microRNAs (or miRNAs) are naturally occurring cellular 19-25 nucleotide long noncoding RNAs. They bind to nucleic acid molecules having an appropriate miRNA binding site, e.g., in the 3′ UTR of an mRNA, and down-regulate gene expression. In certain embodiments, this down regulation occurs by either reducing nucleic acid molecule stability or inhibiting translation. An RNA species disclosed herein, e.g., an mRNA encoding Cas9, can comprise an miRNA binding site, e.g., in its 3′UTR. The miRNA binding site can be selected to promote down regulation of expression is a selected cell type.

### EXAMPLES

[1251] The following Examples are merely illustrative and are not intended to limit the scope or content of the invention in any way.

### Example 1: Cloning and Initial Screening of gRNAs

[1252] The suitability of candidate gRNAs can be evaluated as described in this example. Although described for a chimeric gRNA, the approach can also be used to evaluate modular gRNAs.

[1253] Cloning gRNAs into Plasmid Vector

[1254] For each gRNA, a pair of overlapping oligonucleotides is designed and obtained.

[1255] Oligonucleotides are annealed and ligated into a digested vector backbone containing an upstream U6 promoter and the remaining sequence of a long chimeric gRNA. Plasmid is sequence-verified and prepped to generate sufficient amounts of transfection-quality DNA. Alternate promoters maybe used to drive in vivo transcription (e.g., H1 promoter) or for in vitro transcription (e.g., T7 promoter).

[1256] Cloning gRNAs in Linear dsDNA Molecule (STITCHR)

[1257] For each gRNA, a single oligonucleotide is designed and obtained. The U6 promoter and the gRNA scaffold (e.g. including everything except the targeting domain, e.g., including sequences derived from the crRNA and tracrRNA, e.g., including a first complementarity domain; a linking domain; a second complementarity domain; a proximal domain; and a tail domain) are separately PCR amplified and purified as dsDNA molecules. The gRNA-specific oligonucleotide is used in a PCR reaction to stitch together the U6 and the gRNA scaffold, linked by the targeting domain specified in the oligonucleotide. Resulting dsDNA molecule (STITCHR product) is purified for transfection. Alternate promoters may be used to drive in vivo transcription (e.g., H1 promoter) or for in vitro transcription (e.g., T7 promoter). Any gRNA scaffold may be used to create gRNAs compatible with Cas9s from any bacterial species.

[1258] Initial gRNA Screen

[1259] Each gRNA to be tested is transfected, along with a plasmid expressing Cas9 and a small amount of a GFP-expressing plasmid into human cells. In preliminary experiments, these cells can be immortalized human cell lines such as 293T, K562 or U2OS. Alternatively, primary human cells may be used. In this case, cells may be relevant to the eventual therapeutic cell target (for example, photoreceptor cells). The use of primary cells similar to the potential therapeutic target cell population may provide important information on gene targeting rates in the context of endogenous chromatin and gene expression.

[1260] Transfection may be performed using lipid transfection (such as Lipofectamine or Fugene) or by electroporation. Following transfection, GFP expression can be determined either by fluorescence microscopy or by flow cytometry to confirm consistent and high levels of transfection. These preliminary transfections can comprise different gRNAs and different targeting approaches (17-mers, 20-mers, nuclease, dual-nickase, etc.) to determine which gRNAs/combinations of gRNAs give the greatest activity.

[1261] Efficiency of cleavage with each gRNA may be assessed by measuring NHEJ-induced indel formation at the target locus by a T7E1-type assay or by sequencing. Alternatively, other mismatch-sensitive enzymes, such as Cell/Surveyor nuclease, may also be used.

[1262] For the T7E1 assay, PCR amplicons are approximately 500-700 bp with the intended cut site placed asymmetrically in the amplicon. Following amplification, purification and size-verification of PCR products, DNA is denatured and re-hybridized by heating to 95° C. and then slowly cooling. Hybridized PCR products are then digested with T7 Endonuclease I (or other mismatch-sensitive enzyme) which recognizes and cleaves non-perfectly matched DNA. If indels are present in the original template DNA, when the amplicons are denatured and re-annealed, this results in the hybridization of DNA strands harboring different indels and therefore lead to double-stranded DNA that is not perfectly matched. Digestion products may be visualized by gel electrophoresis or by capillary electrophoresis. The fraction of DNA that is cleaved (density of cleavage products divided by the density of cleaved and uncleaved) may be used to estimate a percent NHEJ using the following equation: % NHEJ=(1-(1-fraction cleaved)′). The T7E1 assay is sensitive down to about 2-5% NHEJ.

[1263] Sequencing may be used instead of, or in addition to, the T7E1 assay. For Sanger sequencing, purified PCR amplicons are cloned into a plasmid backbone, transformed, miniprepped and sequenced with a single primer. For large sequencing numbers, Sanger sequencing may be used for determining the exact nature of indels after determining the NHEJ rate by T7E1.

[1264] Sequencing may also be performed using next generation sequencing techniques. When using next generation sequencing, amplicons may be 300-500 bp with the intended cut site placed asymmetrically. Following PCR, next generation sequencing adapters and barcodes (for example Illumina multiplex adapters and indexes) may be added to the ends of the amplicon, e.g., for use in high throughput sequencing (for example on an Illumina MiSeq). This method allows for detection of very low NHEJ rates.

### Example 2: Assessment of Gene Targeting by NHEJ

[1265] The gRNAs that induce the greatest levels of NHEJ in initial tests can be selected for further evaluation of gene targeting efficiency. For example, cells may be derived from disease subjects, relevant cell lines, and/or animal models and, therefore, harbor the relevant mutation.

[1266] Following transfection (usually 2-3 days post-transfection,) genomic DNA may be isolated from a bulk population of transfected cells and PCR may be used to amplify the target region. Following PCR, gene targeting efficiency to generate the desired mutations (either knockout of a target gene or removal of a target sequence motif) may be determined by sequencing. For Sanger sequencing, PCR amplicons may be 500-700 bp long. For next generation sequencing, PCR amplicons may be 300-500 bp long. If the goal is to knockout gene function, sequencing may be used to assess what percent of alleles have undergone NHEJ-induced indels that result in a frameshift or large deletion or insertion that would be expected to destroy gene function. If the goal is to remove a specific sequence motif, sequencing may be used to assess what percent of alleles have undergone NHEJ-induced deletions that span this sequence.

### Example 3: Testing of gRNA Pairs Targeting the DMD Gene

[1267] Plasmid vectors encoding gRNAs targeting the DMD gene were transfected in pairs (125 ng each), along with 750 ng of a vector (pJDS246) encoding S. pyogenes Cas9 driven by a CMV promoter into 293 cells using Lipofectamine3000 (LifeTechnologies). Pairs of gRNAs are shown in Table 7 along with the targeted deletion region (either exon 51, exons 51-55 or exons 45-55) and the targeted deletion size. Two days post-transfection, genomic DNA was isolated from transfected cells and PCR was performed with primers to amplify across the predicted deletion. Amplicons of the expected sizes (see Table 7) indicate that the predicted deletion had occurred and these PCR products were cloned into a plasmid vector using the Zero-Blunt TOPO kit and sequenced by Sanger sequencing. Sequencing results are shown in FIG. 9. Sequencing revealed the expected deletion events with the predominant result being a clean joining of the two cut sites and loss of all intervening sequence. Indels characteristic of NHEJ were also frequently observed in addition to the predicted targeted deletion.

[1268] Table 7 shows pairs of gRNAs co-transfected with Cas9 into 293 cells. Left and Right gRNAs in the pair are indicated along with the region of deletion (exon 51, exons 51-55 or exons 45-55) and the predicted targeted deletion size. PCR primers used to assay the deletion are also shown and the expected PCR amplicon if the deletion has occurred is indicated.

TABLE 7

| | SEQ ID | | SEQ ID | | | | | |
|---|---|---|---|---|---|---|---|---|
| | NO. of the | | NO. of the | | | | | |
| | targeting | | targeting | | | | | Expected |
| Left | domain of | Right | domain of | | Deletion | | PCR | amplicon |
| gRNA | Left gRNA | gRNA | Right gRNA | Deletion | Size | | Primers | size (bp) |
| DMD-5 | 692257 | DMD-9 | 692261 | exon 51 | 972bp | | OME13 + 22 | 2709 |
| DMD-5 | 692257 | DMD-10 | 692262 | exon 51 | 1723bp | | OME13 + 22 | 1958 |
| DMD-5 | 692257 | DMD-11 | 692263 | exon 51 | 893bp | | OME13 + 22 | 2788 |
| DMD-5 | 692257 | DMD-12 | 692264 | exon 51 | 2665bp | | OME13 + 22 | 1016 |
| DMD-6 | 692258 | DMD-9 | 692261 | exon 51 | 1326bp | | OME13 + 22 | 2355 |
| DMD-6 | 692258 | DMD-10 | 692262 | exon 51 | 2077bp | | OME13 + 22 | 1604 |
| DMD-6 | 692258 | DMD-11 | 692263 | exon 51 | 1247bp | | OME13 + 22 | 2434 |
| DMD-6 | 692258 | DMD-12 | 692264 | exon 51 | 3019bp | | OME13 + 22 | 662 |
| DMD-8 | 692260 | DMD-9 | 692261 | exon 51 | 1589bp | | OME13 + 22 | 2092 |
| DMD-8 | 692260 | DMD-10 | 692262 | exon 51 | 2340bp | | OME13 + 22 | 1341 |
| DMD-8 | 692260 | DMD-11 | 692263 | exon 51 | 1852bp | | OME13 + 22 | 1829 |
| DMD-8 | 692260 | DMD-12 | 692264 | exon 51 | 3282bp | | OME13 + 22 | 399 |
| DMD-5 | 692257 | DMD-18 | 692270 | exon 51-55 | 146.5 | kb | OME13 + 28 | 1462 |
| DMD-5 | 692257 | DMD-19 | 692271 | exon 51-55 | 146.5 | kb | OME13 + 28 | 1337 |
| DMD-5 | 692257 | DMD-20 | 692272 | exon 51-55 | 146.5 | kb | OME13 + 28 | 1056 |
| DMD-6 | 692258 | DMD-18 | 692270 | exon 51-55 | 146.5 | kb | OME13 + 28 | 1108 |
| DMD-6 | 692258 | DMD-19 | 692271 | exon 51-55 | 146.5 | kb | OME13 + 28 | 983 |
| DMD-6 | 692258 | DMD-20 | 692272 | exon 51-55 | 146.5 | kb | OME13 + 28 | 702 |
| DMD-8 | 692260 | DMD-18 | 692270 | exon 51-55 | 146.5 | kb | OME13 + 28 | 845 |
| DMD-8 | 692260 | DMD-19 | 692271 | exon 51-55 | 146.5 | kb | OME13 + 28 | 720 |
| DMD-8 | 692260 | DMD-20 | 692272 | exon 51-55 | 146.5 | kb | OME13 + 28 | 439 |
| DMD-1 | 692253 | DMD-18 | 692270 | exon 45-55 | 341 | kb | OME9 + 28 | 721 |
| DMD-1 | 692253 | DMD-19 | 692271 | exon 45-55 | 341 | kb | OME9 + 28 | 596 |
| DMD-1 | 692253 | DMD-20 | 692272 | exon 45-55 | 341 | kb | OME9 + 28 | 315 |
| DMD-2 | 692254 | DMD-18 | 692270 | exon 45-55 | 341 | kb | OME9 + 28 | 652 |
| DMD-2 | 692254 | DMD-19 | 692271 | exon 45-55 | 341 | kb | OME9 + 28 | 527 |
| DMD-2 | 692254 | DMD-20 | 692272 | exon 45-55 | 341 | kb | OME9 + 28 | 246 |
| DMD-4 | 692256 | DMD-18 | 692270 | exon 45-55 | 341 | kb | OME9 + 28 | 1637 |
| DMD-4 | 692256 | DMD-19 | 692271 | exon 45-55 | 341 | kb | OME9 + 28 | 1512 |
| DMD-4 | 692256 | DMD-20 | 692272 | exon 45-55 | 341 | kb | OME9 + 28 | 1231 |

### Example 4: Dilution Cloning to Estimate Deletion Frequency

[1269] Plasmid vectors encoding pairs of gRNAs targeting the DMD gene were co transfected with pJDS246 into 293 cells as described above. Two days post-transfection cells were plated into 96-well plates at a density of either 10 cells per well (for exon 51 deletions) or 100 cells per well (for exons 45-55 deletions). Once wells reached confluency, genomic DNA was isolated from cells and PCR was performed across the targeted deletion region. Generation of an amplicon of the predicted deletion size indicates that at least one cell in that well was carrying an allele with the targeted deletion. Total numbers of wells assays and wells that were positive by the PCR assay are shown in Table 8. The most conservative estimate of the number of modified alleles assumes that only one allele of one cell in the well has undergone the deletion event and divides this number by the total possible number of alleles present in the population, assuming 2 alleles per cell. A binomial distribution is then used to calculate a conservative estimate of the % modification of the population (the % of the population that has undergone the targeted deletion). This number was calculated for the exon51 deletion samples. Experiments with fewer cells per well can also been performed to calculate % modification for the exon45-55 deletion samples.

[1270] Table 8 shows the results of dilution cloning of 293 cells transfected with pairs of gRNAs targeting the DMD gene and Cas9. The deletion region and deletion size are indicated for each gRNA pair. The # of cells per well and number of wells assayed are shown and the # positive wells indicates the number of wells that give a positive signal in the PCR assay. The “Conservative % modified alleles” indicates the most conservative estimate of the number of modified alleles.

TABLE 8

| | | | | | | | | | | % |
|---|---|---|---|---|---|---|---|---|---|---|
| | SEQ ID NO. | | SEQ ID NO. | | | | | | | Modified |
| Left | of targeting | Right | of targeting | | | # | | | Conserv. % | Based on |
| gRNA | domain of | gRNA | domain of | | Deletion | Cells/ | # | # Pos. | Modified | Binomial |
| Name | Left gRNA | Name | Right gRNA | Deletion | Size | Well | Wells | Wells | Alleles | Distr. |
| DMD-5 | 692257 | DMD-9 | 692261 | exon 51 | 972bp | 10 | 20 | 8 | 2.00 | 3.85 |
| DMD-5 | 692257 | DMD-10 | 692262 | exon 51 | 1723bp | 10 | 20 | 8 | 2.00 | 3.85 |
| DMD-6 | 692258 | DMD-9 | 692261 | exon 51 | 1326bp | 10 | 20 | 5 | 1.25 | 2.44 |
| DMD-6 | 692258 | DMD-10 | 692262 | exon 51 | 2077bp | 10 | 20 | 12 | 3.00 | 5.67 |
| DMD-8 | 692260 | DMD-11 | 692263 | exon 51 | 1852bp | 10 | 20 | 5 | 1.25 | 2.44 |
| DMD-8 | 692260 | DMD-12 | 692264 | exon 51 | 3282bp | 10 | 20 | 15 | 3.75 | 6.98 |
| DMD-1 | 692253 | DMD-18 | 692270 | exon 45-55 | 341 kb | 100 | 30 | 30 | 0.50 | |
| DMD-2 | 692254 | DMD-18 | 692270 | exon 45-55 | 341 kb | 100 | 30 | 28 | 0.47 | |
| DMD-4 | 692256 | DMD-19 | 692271 | exon 45-55 | 341 kb | 100 | 30 | 25 | 0.42 | |
| DMD-4 | 692256 | DMD-20 | 692272 | exon 45-55 | 341 kb | 100 | 26 | 22 | 0.42 | |

### Example 5: Quantification of Genomic Deletions by ddPCR

[1271] Droplet digital PCR (ddPCR) is a method for performing digital PCR in which a single PCR reaction is fractionated into approximately 20,000 droplets in a water-oil emulsion and PCR amplification occurs separately in individual droplets. PCR conditions are optimized for a concentration of DNA template such that each droplet contains either one or no template molecules. Assays are designed to perform amplification using BioRad EvaGreen Supermix PCR system with all amplicons ranging in size from 250-350 bp. Control assays are designed to amplify segments of the DMD gene at least 5 kb away from the gRNA target sites. Assays to detect targeted genomic deletion are designed such that amplification of an allele that has undergone deletion will yield a PCR product in the size range of 250-350 bp and amplification will not occur on a wildtype allele due to the increased distance between forward and reverse primers. PCR conditions are optimized on genomic DNA isolated from 293 cells that have been transfected with pairs of gRNAs and Cas9-expressing plasmid. Deletion assays are verified to generate no positive signal on genomic DNA isolated from unmodified cells. Assays may then be used to quantify genomic deletions on modified populations of the relevant cell type.

### Example 6—Screening S. Aureus CRISPR-Cas9 Paired-Guide RNAs for Efficient Targeted Deletion in DMD

### 1. Background

[1272] Most DMD patients have exonic deletions in the DMD gene that result in a frameshift and nonfunctional protein. In contrast, BMD patients carry a range of exonic deletions in DMD that do not disrupt the reading frame, leading to a much milder disease phenotype. Thus, multiplex CRISPR/Cas9 targeted deletions that restore the reading frame can convert DMD genotypes into BMD-like genotypes and potentially treat this disease. Previously, this strategy has been demonstrated in vitro with zinc finger nucleases, TALENs, and S. pyogenes Cas9 leading to restoration of dystrophin expression in DMD patient myoblasts. However, these genome-editing enzymes are limited by the difficulty of delivering large transgenes with viral vectors in vivo. Alternatively, the smaller Cas9 ortholog from S. aureus (SaCas9) can be packaged with paired gRNAs in an all-in-one AAV vector for in vivo gene therapy. Recently, three groups have demonstrated that AAV-SaCas9 can mediate targeted deletions in mdx mice and restore dystrophin expression (C. E. Nelson et al., Science 10.1126/science.aad5143 (2015); M. Tabebordbar et al., Science 10.1126/science.aad5177 (2015); C. Long et al., Science 10.1126/science.aad5725 (2015)).

### 2. Results

[1273] An efficiency screen to identify highly active paired gRNAs for targeted deletion of exon 51 of the DMD gene was conducted as a first step towards developing a genome editing therapeutic for DMD. A sensitive, digital droplet PCR (“ddPCR”) assay to quantify exon 51 deletion was validated with DMD patient samples (see FIGS. 16A and 16B). The ddPCR assay is a medium-throughput assay that quantifies Exon 51 deletion regardless of which gRNA pair was used. Four sets of Guide (gRNA) pairs for Exon 51 deletion were screened.

[1274] Guide Set 1 (see Table 9) was an initial pilot study of 15 gRNAs. This initial pilot study identified a gRNA pair (1+9) that mediated 18% Exon 51 deletion in HEK293T cells three days after transfection of plasmids (see FIG. 17B). No increase in deletion efficiency was observed six days post-transfection compared to three days post-transfection (see FIG. 17B). gRNA pair (1+9) was selected as a positive control for the following screening tests.

TABLE 9
Guide Set 1 (8 paris)

| gRNA | SEQ ID NO. of the nucleotide sequence comprised | | | | Specificity | Target |
|---|---|---|---|---|---|---|
| No. | in the gRNA targeting domain | PAM | Strand | Location | Score | Position |
| 1 | 19199 (SEQ ID NO: 826369 for the corresponding | CTGGGT′ | reverse | 29660464 | 36.36363636 | Intron 50 |
| | DNA) | | | | | |
| 2 | 11347 (SEQ ID NO: 826370 for the corresponding | AGGGAT′ | forward | 29660577 | 50 | Intron 50 |
| | DNA) | | | | | |
| 3 | 19416 (SEQ ID NO: 826371 for the corresponding | GTGGGT′ | reverse | 29660792 | 45.45454545 | Intron 50 |
| | DNA) | | | | | |
| 4 | 134147 (SEQ ID NO: 826372 for the corresponding | CTGAAT′ | reverse | 29660961 | 54.54545455 | Intron 50 |
| | DNA) | | | | | |
| 5 | 15089 (SEQ ID NO: 826373 for the corresponding | AGGAAT′ | reverse | 29665345 | 36.36363636 | Intron 50 |
| | DNA) | | | | | |
| 6 | 11169 (SEQ ID NO: 826374 for the corresponding | GTGAAT′ | forward | 29666297 | 27.27272727 | Intron 50 |
| | DNA) | | | | | |
| 7 | 1485 (SEQ ID NO: 826375 for the corresponding DNA) | AGGAGT′ | forward | 29678735 | 45.45454545 | Intron 50 |
| 8 | 9240 (SEQ ID NO: 826376 for the corresponding DNA) | TAGGAT′ | forward | 29681610 | 31.81818182 | Intron 50 |
| 9 | 18720 (SEQ ID NO: 826377 for the corresponding | GAGAGT′ | reverse | 29655049 | 50 | Intron 51 |
| | DNA) | | | | | |
| 10 | 12290 (SEQ ID NO: 826378 for the corresponding | ATGGAT′ | reverse | 29651942 | 18.18181818 | Intron 51 |
| | DNA) | | | | | |
| 11 | 11548 (SEQ ID NO: 826379 for the corresponding | AAGGGT′ | forward | 29651425 | 40.90909091 | Intron 51 |
| | DNA) | | | | | |
| 12 | 364 (SEQ ID NO: 826380 for the corresponding DNA) | TAGAAT′ | forward | 29649354 | 36.36363636 | Intron 51 |
| 13 | 20079 (SEQ ID NO: 826381 for the corresponding | GTGAAT′ | reverse | 29649147 | 45.45454545 | Intron 51 |
| | DNA) | | | | | |
| 14 | 21882 (SEQ ID NO: 826382 for the corresponding | GGGGAT′ | reverse | 29636772 | 36.36363636 | Intron 51 |
| | DNA) | | | | | |
| 15 | 3452 (SEQ ID NO: 826383 for the corresponding DNA) | AGGAAT′ | forward | 29635249 | 50 | Intron 51 |

[1275] SaCas9 codon optimization and promoter alternatives were tested with the ddPCR assay and guide pairs known to mediate Exon 51 deletion (see FIG. 18B). The CMV and EFS promoters were tested with 3 codon optimization of SaCas9. As shown in FIG. 18A, no alternatives performed significantly better than pAF003 plasmid which expresses SaCas9 from a CMV promoter, using the SaCas9 codon optimization described in Ran et al., Nature (2015 Apr. 9); 520(7546):186-91.

[1276] Of note, this experiment also included transfections of 4 guide RNAs, as opposed to the usual 2 guide RNAs. It was hypothesized that more guide RNAs could increase deletion efficiency by increasing the likelihood of simultaneous cuts in both targeted introns. Generally, 4 guide RNAs were similarly efficient to 2 guide RNAs.

[1277] To determine whether adding a guanine (G) nucleotide to the 5′ of the gRNA can increase the SaCas9 deletion efficiency, the indel rate mediated by certain single gRNAs targeting Exon 51 with or without a 5′ G was measured by targeted deep sequencing. Primers were designed for a ˜330 base pair amplicon of the Exon 51 genomic DNA. These PCR amplicons were sequenced on an Illumina MiSeq and 10,000 reads per sample (n=2) were analyzed for the presence or absence of indels within the amplicon.

[1278] As shown in FIG. 19, an added 5′ G increased SaCas9 deletion efficiency for most gRNAs. These single gRNAs (103-106, and 111) target within or very nearly in Exon 51 and were not used in guide pairs for targeted deletion of Exon 51 in the screen. Whether the added 5′ G was matched or mismatched in the genome did not have an apparent effect on the indel efficiency benefit. However, this may affect off-target editing considerations.

[1279] Guide Set 2 (see Table 10) was focused on human and non-human primate (NHP) cross-reactive gRNAs. From the set of 10,553 21-nt SaCas9 guides targeting human DMD introns 50 and 51, 53 gRNAs making 675 gRNAs pairs that met the following four filtering requirements were selected. The four filtering requirements were: 1) an endogenous 5′ G, 2) a 3′ T in the NNGRR(T) PAM, 3) cross-reactivity with the non-human primate (NHP) genome, and 4) no off-by-1 or off-by-2 mismatch sites in the human genome. These filters were selected to improve U6 promoter expression, improve SaCas9 cleavage/deletion efficiency, enable pre-clinical animal model studies, and minimize off-target editing concerns, respectively.

TABLE 10
Guide Set 2 (52 gRNAs, 675 pairs)

| | SEQ ID NO. of the | | | | | | |
|---|---|---|---|---|---|---|---|
| | nucleotide sequence | SEQ ID | | | | | |
| gRNA | comprised in the | NO. for | | | human | monkey | Target |
| No. | gRNA targeting domain | guidePAM | Strand | type | orthogonality | orthogonality | Position |
| 16 | 10140 (SEQ ID NO: | 826385 | Sense | sa21 | 2489 | 2600 | Intron50 |
| | 826384 for the | | | | | | |
| | corresponding DNA) | | | | | | |
| 17 | 4072 (SEQ ID NO: | 826387 | Sense | sa21 | 12527 | 6364 | Intron50 |
| | 826386 for the | | | | | | |
| | corresponding DNA) | | | | | | |
| 18 | 13527 (SEQ ID NO: | 826389 | Antisense | sa21 | 5293 | 3997 | Intron50 |
| | 826388 for the | | | | | | |
| | corresponding DNA) | | | | | | |
| 19 | 1744 (SEQ ID NO: | 826391 | Sense | sa21 | 5082 | 107534 | Intron50 |
| | 826390 for the | | | | | | |
| | corresponding DNA) | | | | | | |
| 20 | 17253 (SEQ ID NO: | 826393 | Antisense | sa21 | 5007 | 2167 | Intron50 |
| | 826392 for the | | | | | | |
| | corresponding DNA) | | | | | | |
| 21 | 20924 (SEQ ID NO: | 826395 | Antisense | sa21 | 3319 | 1677 | Intron50 |
| | 826394 for the | | | | | | |
| | corresponding DNA) | | | | | | |
| 22 | 9496 (SEQ ID NO: | 826397 | Sense | sa21 | 11107 | 8145 | Intron50 |
| | 826396 for the | | | | | | |
| | corresponding DNA) | | | | | | |
| 23 | 14035 (SEQ ID NO: | 826399 | Antisense | sa21 | 11480 | 43955 | Intron50 |
| | 826398 for the | | | | | | |
| | corresponding DNA) | | | | | | |
| 24 | 13285 (SEQ ID NO: | 826401 | Antisense | sa21 | 14740 | 10181 | Intron50 |
| | 826400 for the | | | | | | |
| | corresponding DNA) | | | | | | |
| 25 | 1484 (SEQ ID NO: | 826403 | Sense | sa21 | 12720 | 5016402 | Intron50 |
| | 826402 for the | | | | | | |
| | corresponding DNA) | | | | | | |
| 26 | 7419 (SEQ ID NO: | 826405 | Sense | sa21 | 6569 | 6272 | Intron50 |
| | 826404 for the | | | | | | |
| | corresponding DNA) | | | | | | |
| 27 | 9279 (SEQ ID NO: | 826407 | Sense | sa21 | 15927 | 10557 | Intron50 |
| | 826406 for the | | | | | | |
| | corresponding DNA) | | | | | | |
| 28 | 13228 (SEQ ID NO: | 826409 | Antisense | sa21 | 59359 | 46292 | Intron50 |
| | 826408 for the | | | | | | |
| | corresponding DNA) | | | | | | |
| 29 | 2769 (SEQ ID NO: | 826411 | Sense | sa21 | 6636 | 11045 | Intron50 |
| | 826410 for the | | | | | | |
| | corresponding DNA) | | | | | | |
| 30 | 5614 (SEQ ID NO: | 826413 | Sense | sa21 | 6388 | 5494 | Intron50 |
| | 826412 for the | | | | | | |
| | corresponding DNA) | | | | | | |
| 31 | 7252 (SEQ ID NO: | 826415 | Sense | sa21 | 9316 | 7635 | Intron50 |
| | 826414 for the | | | | | | |
| | corresponding DNA) | | | | | | |
| 32 | 21873 (SEQ ID NO: | 826417 | Antisense | sa21 | 5208 | 4030 | Intron50 |
| | 826416 for the | | | | | | |
| | corresponding DNA) | | | | | | |
| 33 | 20764 (SEQ ID NO: | 826419 | Antisense | sa21 | 25909 | 19154 | Intron50 |
| | 826418 for the | | | | | | |
| | corresponding DNA) | | | | | | |
| 34 | 14607 (SEQ ID NO: | 826421 | Antisense | sa21 | 5008 | 5985 | Intron50 |
| | 826420 for the | | | | | | |
| | corresponding DNA) | | | | | | |
| 35 | 13518 (SEQ ID NO: | 826423 | Antisense | sa21 | 39294 | 237187 | Intron50 |
| | 826422 for the | | | | | | |
| | corresponding DNA) | | | | | | |
| 36 | 18195 (SEQ ID NO: | 826425 | Antisense | sa21 | 11370 | 13731 | Intron50 |
| | 826424 for the | | | | | | |
| | corresponding DNA) | | | | | | |
| 37 | 16967 (SEQ ID NO: | 826427 | Antisense | sa21 | 5616 | 106854 | Intron50 |
| | 826426 for the | | | | | | |
| | corresponding DNA) | | | | | | |
| 38 | 3536 (SEQ ID NO: | 826429 | Sense | sa21 | 6553 | 8785 | Intron50 |
| | 826428 for the | | | | | | |
| | corresponding DNA) | | | | | | |
| 39 | 9358 (SEQ ID NO: | 826431 | Sense | sa21 | 7828 | 6500 | Intron50 |
| | 826430 for the | | | | | | |
| | corresponding DNA) | | | | | | |
| 40 | 14298 (SEQ ID NO: | 826433 | Antisense | sa21 | 4384 | 5129 | Intron50 |
| | 826432 for the | | | | | | |
| | corresponding DNA) | | | | | | |
| 41 | 8569 (SEQ ID NO: | 826435 | Sense | sa21 | 22175 | 19606 | Intron50 |
| | 826434 for the | | | | | | |
| | corresponding DNA) | | | | | | |
| 42 | 14695 (SEQ ID NO: | 826437 | Antisense | sa21 | 6361 | 4578 | Intron50 |
| | 826436 for the | | | | | | |
| | corresponding DNA) | | | | | | |
| 43 | 15271 (SEQ ID NO: | 826439 | Antisense | sa21 | 12809 | 12288 | Intron51 |
| | 826438 for the | | | | | | |
| | corresponding DNA) | | | | | | |
| 44 | 18625 (SEQ ID NO: | 826441 | Antisense | sa21 | 7969 | 7488 | Intron51 |
| | 826440 for the | | | | | | |
| | corresponding DNA) | | | | | | |
| 45 | 4049 (SEQ ID NO: | 826443 | Sense | sa21 | 33948 | 134818 | Intron51 |
| | 826442 for the | | | | | | |
| | corresponding DNA) | | | | | | |
| 46 | 20527 (SEQ ID NO: | 826445 | Antisense | sa21 | 9951 | 11542 | Intron51 |
| | 826444 for the | | | | | | |
| | corresponding DNA) | | | | | | |
| 47 | 16235 (SEQ ID NO: | 826447 | Antisense | sa21 | 20349 | 119541 | Intron51 |
| | 826446 for the | | | | | | |
| | corresponding DNA) | | | | | | |
| 48 | 7649 (SEQ ID NO: | 826449 | Sense | sa21 | 2624 | 3675 | Intron51 |
| | 826448 for the | | | | | | |
| | corresponding DNA) | | | | | | |
| 49 | 11675 (SEQ ID NO: | 826451 | Sense | sa21 | 35438 | 33867 | Intron51 |
| | 826450 for the | | | | | | |
| | corresponding DNA) | | | | | | |
| 50 | 9530 (SEQ ID NO: | 826453 | Sense | sa21 | 7779 | 5961 | Intron51 |
| | 826452 for the | | | | | | |
| | corresponding DNA) | | | | | | |
| 51 | 15622 (SEQ ID NO: | 826455 | Antisense | sa21 | 4358 | 6351 | Intron51 |
| | 826454 for the | | | | | | |
| | corresponding DNA) | | | | | | |
| 52 | 9102 (SEQ ID NO: | 826457 | Sense | sa21 | 83487 | 461195 | Intron51 |
| | 826456 for the | | | | | | |
| | corresponding DNA) | | | | | | |
| 53 | 20870 (SEQ ID NO: | 826459 | Antisense | sa21 | 7441 | 7169 | Intron51 |
| | 826458 for the | | | | | | |
| | corresponding DNA) | | | | | | |
| 54 | 19187 (SEQ ID NO: | 826461 | Antisense | sa21 | 3446 | 108272 | Intron51 |
| | 826460 for the | | | | | | |
| | corresponding DNA) | | | | | | |
| 55 | 18752 (SEQ ID NO: | 826463 | Antisense | sa21 | 10605 | 11171 | Intron51 |
| | 826462 for the | | | | | | |
| | corresponding DNA) | | | | | | |
| 56 | 9346 (SEQ ID NO: | 826465 | Sense | sa21 | 4093 | 2726 | Intron51 |
| | 826464 for the | | | | | | |
| | corresponding DNA) | | | | | | |
| 57 | 22573 (SEQ ID NO: | 826467 | Antisense | sa21 | 7273 | 9256 | Intron51 |
| | 826466 for the | | | | | | |
| | corresponding DNA) | | | | | | |
| 58 | 22786 (SEQ ID NO: | 826469 | Antisense | sa21 | 16194 | 11573 | Intron51 |
| | 826468 for the | | | | | | |
| | corresponding DNA) | | | | | | |
| 59 | 20145 (SEQ ID NO: | 826471 | Antisense | sa21 | 412 | 462 | Intron51 |
| | 826470 for the | | | | | | |
| | corresponding DNA) | | | | | | |
| 60 | 21131 (SEQ ID NO: | 826473 | Antisense | sa21 | 15140 | 16468 | Intron51 |
| | 826472 for the | | | | | | |
| | corresponding DNA) | | | | | | |
| 61 | 6209 (SEQ ID NO: | 826475 | Sense | sa21 | 19629 | 116142 | Intron51 |
| | 826474 for the | | | | | | |
| | corresponding DNA) | | | | | | |
| 62 | 5869 (SEQ ID NO: | 826477 | Sense | sa21 | 15699 | 17636 | Intron51 |
| | 826476 for the | | | | | | |
| | corresponding DNA) | | | | | | |
| 63 | 4324 (SEQ ID NO: | 826479 | Sense | sa21 | 10940 | 10655 | Intron51 |
| | 826478 for the | | | | | | |
| | corresponding DNA) | | | | | | |
| 64 | 4165 (SEQ ID NO: | 826481 | Sense | sa21 | 8627 | 6012 | Intron51 |
| | 826480 for the | | | | | | |
| | corresponding DNA) | | | | | | |
| 65 | 23958 (SEQ ID NO: | 826483 | Antisense | sa21 | 21343 | 23731 | Intron51 |
| | 826482 for the | | | | | | |
| | corresponding DNA) | | | | | | |
| 66 | 18062 (SEQ ID NO: | 826485 | Antisense | sa21 | 5927 | 9192 | Intron51 |
| | 826484 for the | | | | | | |
| | corresponding DNA) | | | | | | |
| 67 | 4134 (SEQ ID NO: | 826487 | Sense | sa21 | 11601 | 8050 | Intron51 |
| | 826486 for the | | | | | | |
| | corresponding DNA) | | | | | | |

[1280] The Z score was calculated for deletion efficiencies of the gRNA pairs in Guide Set 2, and the results are shown in FIG. 20. Hits were defined as gRNA pairs with a Z score >1.5 in at least one of two biological replicates, and are listed in Table 11.

TABLE 11
Guide Set 2

| Guide_R | Guide_L | Threshold Passed |
|---|---|---|
| 43 | 35 | Z Score 2 > 1.5 |
| 47 | 16 | Avg Z score > 1.5 |
| 48 | 17 | Z Score 2 > 1.5 |
| 48 | 21 | Avg Z score > 1.5 |
| 48 | 22 | Z Score 2 > 1.5 |
| 48 | 25 | Avg Z score > 1.5 |
| 48 | 37 | Z Score 2 > 1.5 |
| 49 | 17 | Z score 1 > 1.5 |
| 49 | 25 | Z Score 2 > 1.5 |
| 49 | 29 | Z Score 2 > 1.5 |
| 50 | 38 | Z score 1 > 1.5 |
| 51 | 20 | Avg Z score > 1.5 |
| 53 | 31 | Z Score 2 > 1.5 |
| 53 | 37 | Z Score 2 > 1.5 |
| 53 | 38 | Z score 1 > 1.5 |
| 54 | 19 | Z score 1 > 1.5 |
| 54 | 20 | Z score 1 > 1.5 |
| 54 | 26 | Avg Z score > 1.5 |
| 54 | 31 | Z score 1 > 1.5 |
| 54 | 39 | Z Score 2 > 1.5 |
| 54 | 41 | Z Score 2 > 1.5 |
| 54 | 42 | Avg Z score > 1.5 |
| 55 | 19 | Z Score 2 > 1.5 |
| 55 | 20 | Z Score 2 > 1.5 |
| 55 | 26 | Z Score 2 > 1.5 |
| 55 | 34 | Avg Z score > 1.5 |
| 55 | 37 | Z Score 2 > 1.5 |
| 55 | 38 | Z Score 2 > 1.5 |
| 55 | 41 | Z score 1 > 1.5 |
| 56 | 26 | Z score 1 > 1.5 |
| 56 | 29 | Z score 1 > 1.5 |
| 56 | 33 | Z score 1 > 1.5 |
| 59 | 30 | Z Score 2 > 1.5 |
| 59 | 31 | Z Score 2 > 1.5 |
| 59 | 33 | Avg Z score > 1.5 |
| 59 | 34 | Z Score 2 > 1.5 |
| 59 | 38 | Avg Z score > 1.5 |
| 59 | 41 | Z score 1 > 1.5 |
| 60 | 18 | Z score 1 > 1.5 |
| 60 | 24 | Z Score 2 > 1.5 |
| 61 | 18 | Z Score 2 > 1.5 |
| 61 | 21 | Z Score 2 > 1.5 |
| 61 | 23 | Z Score 2 > 1.5 |
| 61 | 26 | Avg Z score > 1.5 |
| 61 | 32 | Z score 1 > 1.5 |
| 61 | 40 | Z score 1 > 1.5 |
| 62 | 17 | Z score 1 > 1.5 |
| 62 | 18 | Z score 1 > 1.5 |
| 62 | 25 | Z score 1 > 1.5 |
| 62 | 30 | Avg Z score > 1.5 |
| 62 | 38 | Avg Z score > 1.5 |
| 62 | 41 | Z Score 2 > 1.5 |
| 62 | 42 | Avg Z score > 1.5 |
| 64 | 25 | Z Score 2 > 1.5 |
| 64 | 27 | Z score 1 > 1.5 |
| 64 | 31 | Z Score 2 > 1.5 |
| 65 | 22 | Z Score 2 > 1.5 |
| 65 | 23 | Z Score 2 > 1.5 |
| 65 | 38 | Z Score 2 > 1.5 |
| 66 | 23 | Z Score 2 > 1.5 |
| 66 | 29 | Z score 1 > 1.5 |
| 66 | 38 | Avg Z score > 1.5 |
| 67 | 17 | Avg Z score > 1.5 |
| 67 | 21 | Z Score 2 > 1.5 |
| 67 | 38 | Z Score 2 > 1.5 |
| 67 | 41 | Z Score 2 > 1.5 |
| 86 | 68 | Z Score 2 > 1.5 |
| 82 | 68 | Avg Z score > 1.5 |
| 85 | 68 | Avg Z score > 1.5 |
| 92 | 68 | Avg Z score > 1.5 |
| 91 | 68 | Z score 1 > 1.5 |
| 88 | 68 | Avg Z score > 1.5 |
| 89 | 68 | Z score 1 > 1.5 |
| 83 | 68 | Z score 1 > 1.5 |
| 84 | 68 | Z score 1 > 1.5 |
| 87 | 68 | Z Score 2 > 1.5 |
| 85 | 70 | Z score 1 > 1.5 |
| 82 | 71 | Z score 1 > 1.5 |

[1281] Notably, the NHP cross-reactivity requirement skewed the distribution of possible targeted deletion lengths towards larger sizes, all greater than about 12.4 kb (see FIG. 21). However, it was hypothesized that smaller deletions would generally be more efficiently generated.

[1282] In order to test smaller deletions, an additional 174 pairs of human-only gRNAs (Guide Set 3) were designed for deletion lengths of about 0.8 to about 14 kb. Among the 174 gRNA pairs, 168 pairs (Guide Set 3; see Table 12) had a deletion length of less than 14 kb, and 6 pairs (Guide Set 4; see Table 13) had a deletion length of less than 1.3 kb. The deletion efficiency of the gRNA pairs in Guide Set 3 was measured and ranked (see FIG. 22). A heatmap representation of the gRNA pairs' deletion efficiencies in Guide Set 3 are shown in FIG. 23. There was not a strong trend for increased deletion efficiency with decreased deletion size. The Z score was calculated for the gRNA pairs in Guide Set 3, and the results are shown in FIG. 24 and Table 14. As shown in FIG. 26, the gRNAs pairs in Guide Sets 2 and 3 with passing Z scores (i.e., Z-score >1.5) were included as hits for further validation, alongside the 6 pairs from Guide Set 4. In total, there were 85 pairs out of the original 857 pairs. The 85 pairs are shown in Table 15. The deletion efficiency of these 85 gRNA pairs was measured and ranked (see FIG. 25).

TABLE 12
Guide Set 3 (26 gRNAs, 168 pairs)

| | SEQ ID NO. of the | | | | | | | |
|---|---|---|---|---|---|---|---|---|
| | nucleotide sequence | SEQ ID | | | | | | |
| gRNA | comprised in the | NO. for | | | | Target | | |
| No. | gRNA targeting domain | guidePAM | Orientation | Type | Orthogonality | position | Position | Dist_from_5prime |
| 68 | 2048 (SEQ ID NO: | 826489 | Sense | sa21 | 4372 | Intron50 | 31793286 | 1209 |
| | 826488 for the | | | | | | | |
| | corresponding DNA) | | | | | | | |
| 69 | 22095 (SEQ ID NO: | 826491 | Antisense | sa21 | 1396 | Intron50 | 31793773 | 1696 |
| | 826490 for the | | | | | | | |
| | corresponding DNA) | | | | | | | |
| 70 | 14296 (SEQ ID NO: | 826493 | Antisense | sa21 | 16654 | Intron50 | 31794247 | 2170 |
| | 826492 for the | | | | | | | |
| | corresponding DNA) | | | | | | | |
| 71 | 9765 (SEQ ID NO: | 826495 | Sense | sa21 | 1808 | Intron50 | 31794947 | 2870 |
| | 826494 for the | | | | | | | |
| | corresponding DNA) | | | | | | | |
| 72 | 21671 (SEQ ID NO: | 826497 | Antisense | sa21 | 4341 | Intron50 | 31795173 | 3096 |
| | 826496 for the | | | | | | | |
| | corresponding DNA) | | | | | | | |
| 73 | 21821 (SEQ ID NO: | 826499 | Antisense | sa21 | 32770 | Intron50 | 31795494 | 3417 |
| | 826498 for the | | | | | | | |
| | corresponding DNA) | | | | | | | |
| 74 | 7978 (SEQ ID NO: | 826501 | Sense | sa21 | 28751 | Intron50 | 31796044 | 3967 |
| | 826500 for the | | | | | | | |
| | corresponding DNA) | | | | | | | |
| 75 | 23363 (SEQ ID NO: | 826503 | Antisense | sa21 | 20749 | Intron50 | 31796289 | 4212 |
| | 826502 for the | | | | | | | |
| | corresponding DNA) | | | | | | | |
| 76 | 11281 (SEQ ID NO: | 826505 | Sense | sa21 | 11956 | Intron50 | 31796453 | 4376 |
| | 826504 for the | | | | | | | |
| | corresponding DNA) | | | | | | | |
| 77 | 16781 (SEQ ID NO: | 826507 | Antisense | sa21 | 1580 | Intron50 | 31797199 | 5122 |
| | 826506 for the | | | | | | | |
| | corresponding DNA) | | | | | | | |
| 78 | 17243 (SEQ ID NO: | 826509 | Antisense | sa21 | 8081 | Intron50 | 31797264 | 5187 |
| | 826508 for the | | | | | | | |
| | corresponding DNA) | | | | | | | |
| 79 | 2624 (SEQ ID NO: | 826511 | Sense | sa21 | 8398 | Intron50 | 31797427 | 5350 |
| | 826510 for the | | | | | | | |
| | corresponding DNA) | | | | | | | |
| 80 | 7228 (SEQ ID NO: | 826513 | Sense | sa21 | 7001 | Intron50 | 31797482 | 5405 |
| | 826512 for the | | | | | | | |
| | corresponding DNA) | | | | | | | |
| 81 | 6807 (SEQ ID NO: | 826515 | Sense | sa21 | 15793 | Intron50 | 31797946 | 5869 |
| | 826514 for the | | | | | | | |
| | corresponding DNA) | | | | | | | |
| 82 | 18458 (SEQ ID NO: | 826517 | Antisense | sa21 | 26553 | Intron51 | 31791729 | 348 |
| | 826516 for the | | | | | | | |
| | corresponding DNA) | | | | | | | |
| 83 | 21570 (SEQ ID NO: | 826519 | Antisense | sa21 | 5075 | Intron51 | 31790998 | 1079 |
| | 826518 for the | | | | | | | |
| | corresponding DNA) | | | | | | | |
| 84 | 1977 (SEQ ID NO: | 826521 | Sense | sa21 | 5677 | Intron51 | 31790759 | 1318 |
| | 826520 for the | | | | | | | |
| | corresponding DNA) | | | | | | | |
| 85 | 1499 (SEQ ID NO: | 826523 | Sense | sa21 | 30791 | Intron51 | 31789043 | 3034 |
| | 826522 for the | | | | | | | |
| | corresponding DNA) | | | | | | | |
| 86 | 481 (SEQ ID NO: | 826525 | Sense | sa21 | 11009 | Intron51 | 31787981 | 4096 |
| | 826524 for the | | | | | | | |
| | corresponding DNA) | | | | | | | |
| 87 | 8709 (SEQ ID NO: | 826527 | Sense | sa21 | 8197 | Intron51 | 31787463 | 4614 |
| | 826526 for the | | | | | | | |
| | corresponding DNA) | | | | | | | |
| 88 | 16467 (SEQ ID NO: | 826529 | Antisense | sa21 | 2130 | Intron51 | 31787241 | 4836 |
| | 826528 for the | | | | | | | |
| | corresponding DNA) | | | | | | | |
| 89 | 23958 (SEQ ID NO: | 826531 | Antisense | sa21 | 21343 | Intron51 | 31787202 | 4875 |
| | 826530 for the | | | | | | | |
| | corresponding DNA) | | | | | | | |
| 90 | 819 (SEQ ID NO: | 826533 | Sense | sa21 | 13610 | Intron51 | 31785449 | 6628 |
| | 826532 for the | | | | | | | |
| | corresponding DNA) | | | | | | | |
| 91 | 9997 (SEQ ID NO: | 826535 | Sense | sa21 | 9860 | Intron51 | 31785417 | 6660 |
| | 826534 for the | | | | | | | |
| | corresponding DNA) | | | | | | | |
| 92 | 2121 (SEQ ID NO: | 826537 | Sense | sa21 | 10043 | Intron51 | 31785024 | 7053 |
| | 826536 for the | | | | | | | |
| | corresponding DNA) | | | | | | | |
| 93 | 21344 (SEQ ID NO: | 826539 | Antisense | sa21 | 7851 | Intron51 | 31784698 | 7379 |
| | 826538 for the | | | | | | | |
| | corresponding DNA) | | | | | | | |

TABLE 13
Guide Set 4 (5 gRNAs, 6 pairs)

| | SEQ ID NO. of the | | | | | Dist | |
|---|---|---|---|---|---|---|---|
| | nucleotide sequence | SEQ ID | | | | from | filtered |
| gRNA | comprised in the | NO. for | | Specificity | Target | 5prime | for only |
| No. | gRNA targeting domain | guidePAM | Strand | Score | Position | Exon51 | off by 3 |
| 94 | 4709 (SEQ ID NO: | 826541 | 1 | 38.1778946 | Intron50 | 956 | Yes |
| | 826540 for the | | | | | | |
| | corresponding DNA) | | | | | | |
| 95 | 20303 (SEQ ID NO: | 826543 | −1 | 14.790082 | Intron50 | 815 | Yes |
| | 826542 for the | | | | | | |
| | corresponding DNA) | | | | | | |
| 96 | 18720 (SEQ ID NO: | 826545 | −1 | 44.9087042 | Intron51 | 1762 | Yes |
| | 826544 for the | | | | | | |
| | corresponding DNA) | | | | | | |
| 97 | 22349 (SEQ ID NO: | 826547 | −1 | 44.3933051 | Intron51 | 1823 | Yes |
| | 826546 for the | | | | | | |
| | corresponding DNA) | | | | | | |
| 98 | 10092 (SEQ ID NO: | 826549 | 1 | 34.9840006 | Intron51 | 2083 | Yes |
| | 826548 for the | | | | | | |
| | corresponding DNA) | | | | | | |

TABLE 14
Guide Set 3
Hits

| Guide | Guide | Deletion | Deletion | Z | Z | |
|---|---|---|---|---|---|---|
| Num_R | Num_L | Efficiency_BR1 | Efficiency_BR2 | score_1_BR1 | Score_BR2 | Threshold Passed |
| 86 | 68 | 15.12 | 23.48 | 1.30 | 2.34 | Z Score 2 > 1.5 |
| 82 | 68 | 17.31 | 19.06 | 1.52 | 1.57 | Avg Z score > 1.5 |
| 85 | 68 | 17.02 | 22.64 | 1.60 | 2.19 | Avg Z score > 1.5 |
| 82 | 71 | 14.65 | 18.17 | 1.60 | 1.42 | Avg Z score > 1.5 |
| 92 | 68 | 16.81 | 21.34 | 2.00 | 1.97 | Avg Z score > 1.5 |
| 91 | 68 | 20.36 | 15.30 | 2.58 | 0.92 | Avg Z score > 1.5 |
| 88 | 68 | 27.63 | 18.98 | 3.54 | 1.56 | Avg Z score > 1.5 |
| 89 | 68 | 17.69 | 14.45 | 2.00 | 0.78 | Z score 1 > 1.5 |
| 83 | 68 | 18.82 | 10.81 | 1.81 | 0.15 | Z score 1 > 1.5 |
| 84 | 68 | 18.39 | 16.61 | 1.79 | 1.15 | Z score 1 > 1.5 |
| 85 | 70 | 14.76 | 11.13 | 1.69 | 0.20 | Z score 1 > 1.5 |
| 87 | 68 | 13.53 | 19.62 | 1.04 | 1.67 | Z Score 2 > 1.5 |

TABLE 15

| | | SEQ ID NO. of the |
|---|---|---|
| | | nucleotide sequence |
| Guide | gRNA | comprised in the gRNA |
| Pair | No. | targeting domain |
| 84 + 68 | 84 | 1977 |
| | 68 | 2048 |
| 82 + 68 | 82 | 18458 |
| | 68 | 2048 |
| 1,9 | 1 | 19199 |
| | 9 | 18720 |
| 86 + 68 | 86 | 481 |
| | 68 | 2048 |
| 94 + 96 | 94 | 4709 |
| | 96 | 18720 |
| 91 + 68 | 91 | 9997 |
| | 68 | 2048 |
| 85 + 68 | 85 | 1499 |
| | 68 | 2048 |
| 92 + 68 | 92 | 2121 |
| | 68 | 2048 |
| 94 + 97 | 94 | 4709 |
| | 97 | 22349 |
| 87 + 68 | 87 | 8709 |
| | 68 | 2048 |
| 94 + 98 | 94 | 4709 |
| | 98 | 10092 |
| 83 + 68 | 83 | 21570 |
| | 68 | 2048 |
| 62 + 38 | 62 | 5869 |
| | 38 | 3536 |
| 82 + 71 | 82 | 18458 |
| | 71 | 9765 |
| 55 + 20 | 55 | 18752 |
| | 20 | 17253 |
| 59 + 38 | 59 | 20145 |
| | 38 | 3536 |
| 54 + 31 | 54 | 19187 |
| | 31 | 7252 |
| 95 + 96 | 95 | 20303 |
| | 96 | 18720 |
| 55 + 38 | 55 | 18752 |
| | 38 | 3536 |
| 88 + 68 | 88 | 16467 |
| | 68 | 2048 |
| 55 + 34 | 55 | 18752 |
| | 34 | 14607 |
| 59 + 30 | 59 | 20145 |
| | 30 | 5614 |
| 95 + 98 | 95 | 20303 |
| | 98 | 10092 |
| 54 + 20 | 54 | 19187 |
| | 20 | 17253 |
| 85 + 70 | 85 | 1499 |
| | 70 | 14296 |
| 59 + 33 | 59 | 20145 |
| | 33 | 20764 |
| 59 + 34 | 59 | 20145 |
| | 34 | 14607 |
| 67 + 21 | 67 | 4134 |
| | 21 | 20924 |
| 55 + 37 | 55 | 18752 |
| | 37 | 16967 |
| 61 + 23 | 61 | 6209 |
| | 23 | 14035 |
| 61 + 18 | 61 | 6209 |
| | 18 | 13527 |
| 61 + 32 | 61 | 6209 |
| | 32 | 21873 |
| 56 + 26 | 56 | 9346 |
| | 26 | 7419 |
| 48 + 37 | 48 | 7649 |
| | 37 | 16967 |
| 54 + 42 | 54 | 19187 |
| | 42 | 14695 |
| 55 + 26 | 55 | 18752 |
| | 26 | 7419 |
| 55 + 19 | 55 | 18752 |
| | 19 | 1744 |
| 56 + 33 | 56 | 9346 |
| | 33 | 20764 |
| 56 + 29 | 56 | 9346 |
| | 29 | 2769 |
| 62 + 30 | 62 | 5869 |
| | 30 | 5614 |
| 51 + 20 | 51 | 15622 |
| | 20 | 17253 |
| 54 + 26 | 54 | 19187 |
| | 26 | 7419 |
| 66 + 29 | 66 | 18062 |
| | 29 | 2769 |
| 53 + 38 | 53 | 20870 |
| | 38 | 3536 |
| 48 + 25 | 48 | 7649 |
| | 25 | 1484 |
| 89 + 68 | 89 | 23958 |
| | 68 | 2048 |
| 60 + 18 | 60 | 21131 |
| | 18 | 13527 |
| 54 + 19 | 54 | 19187 |
| | 19 | 1744 |
| 62 + 17 | 62 | 5869 |
| | 17 | 4072 |
| 59 + 41 | 59 | 20145 |
| | 41 | 8569 |
| 50 + 38 | 50 | 9530 |
| | 38 | 3536 |
| 66 + 38 | 66 | 18062 |
| | 38 | 3536 |
| 61 + 40 | 61 | 6209 |
| | 40 | 14298 |
| 95 + 97 | 95 | 20303 |
| | 97 | 22349 |
| 62 + 41 | 62 | 5869 |
| | 41 | 8569 |
| 61 + 26 | 61 | 6209 |
| | 26 | 7419 |
| 54 + 41 | 54 | 19187 |
| | 41 | 8569 |
| 62 + 18 | 62 | 5869 |
| | 18 | 13527 |
| 59 + 31 | 59 | 20145 |
| | 31 | 7252 |
| 67 + 17 | 67 | 4134 |
| | 17 | 4072 |
| 64 + 31 | 64 | 4165 |
| | 31 | 7252 |
| 61 + 21 | 61 | 6209 |
| | 21 | 20924 |
| 53 + 37 | 53 | 20870 |
| | 37 | 16967 |
| 62 + 25 | 62 | 5869 |
| | 25 | 1484 |
| 64 + 25 | 64 | 4165 |
| | 25 | 1484 |
| 48 + 21 | 48 | 7649 |
| | 21 | 20924 |
| 53 + 31 | 53 | 20870 |
| | 31 | 7252 |
| 66 + 23 | 66 | 18062 |
| | 23 | 14035 |
| 67 + 38 | 67 | 4134 |
| | 38 | 3536 |
| 55 + 41 | 55 | 18752 |
| | 41 | 8569 |
| 67 + 41 | 67 | 4134 |
| | 41 | 8569 |
| 54 + 39 | 54 | 19187 |
| | 39 | 9358 |
| 48 + 17 | 48 | 7649 |
| | 17 | 4072 |
| 62 + 42 | 62 | 5869 |
| | 42 | 14695 |
| 65 + 38 | 65 | 23958 |
| | 38 | 3536 |
| 47 + 16 | 47 | 16235 |
| | 16 | 10140 |
| 60 + 24 | 60 | 21131 |
| | 24 | 13285 |
| 43 + 35 | 43 | 15271 |
| | 35 | 13518 |
| 49 + 25 | 49 | 11675 |
| | 25 | 1484 |
| 49 + 29 | 49 | 11675 |
| | 29 | 2769 |
| 64 + 27 | 64 | 4165 |
| | 27 | 9279 |
| 48 + 22 | 48 | 7649 |
| | 22 | 9496 |
| 65 + 23 | 65 | 23958 |
| | 23 | 14035 |
| 49 + 17 | 49 | 11675 |
| | 17 | 4072 |
| 65 + 22 | 65 | 23958 |
| | 22 | 9496 |

[1283] Interestingly, a few individual gRNAs consistently appeared among the top performing pairs, regardless their partner gRNAs. The top hit (gRNA pair 68+84), a human-only gRNA pair with a deletion size of about 2.3 kb, demonstrated a reproducible deletion efficiency of about 32%. The 6 best human-only guide pairs and the 6 best NHP cross-reactive guide pairs are listed in Table 16.

TABLE 16
Hu/NHP DMD Exon 51 Deleting gRNA pairs

| | | SEQ ID NO. of the | | Distance | Avg | Plate | Norm | |
|---|---|---|---|---|---|---|---|---|
| | | nucleotide sequence | | from 5′ | Del | Normalized | Stdev | Deletion |
| Guide | gRNA | comprised in the | | Exon 51 | Effy | Avg Del Eff | Del | Size |
| Pair | No. | gRNA targeting domain | Length | (bp) | (%) | (a.u.) | Eff | (bp) |
| 84 + 68 | 84 | 1977 | 21 | 1318 | 31.8 | 2.39 | 0.55 | 2527 |
| | 68 | 2048 | 21 | 1209 | | | | |
| 82 + 68 | 82 | 18458 | 21 | 348 | 28.92 | 2.09 | 0.5 | 1557 |
| | 68 | 2048 | 21 | 1209 | | | | |
| 1 + 9 | 1 | 19199 | 22 | 5104 | 27.87 | 2.04 | 0.31 | 5415 |
| | 9 | 18720 | 22 | 311 | | | | |
| 94 + 9 | 94 | 4709 | 22 | 495 | 26.66 | 2.01 | 0.56 | 806 |
| | 9 | 18720 | 22 | 311 | | | | |
| 86 + 68 | 86 | 481 | 21 | 4096 | 27.8 | 2 | 0.38 | 5305 |
| | 68 | 2048 | 21 | 1209 | | | | |
| 94 + 97 | 94 | 4709 | 22 | 495 | 25.4 | 1.85 | 0.52 | 867 |
| | 97 | 22349 | 22 | 372 | | | | |
| 62 + 38 | 62 | 5869 | 21 | 11283 | 22.23 | 1.64 | 0.28 | 20768 |
| | 38 | 3536 | 21 | 9485 | | | | |
| 55 + 20 | 55 | 18752 | 21 | 26857 | 21.02 | 1.56 | 0.33 | 44269 |
| | 20 | 17253 | 21 | 17421 | | | | |
| 59 + 38 | 59 | 20145 | 21 | 17913 | 20.15 | 1.51 | 0.37 | 27398 |
| | 38 | 3536 | 21 | 9485 | | | | |
| 54 + 31 | 54 | 19187 | 21 | 26522 | 19.83 | 1.43 | 0.48 | 71832 |
| | 31 | 7252 | 21 | 45310 | | | | |
| 55 + 38 | 55 | 18752 | 21 | 26857 | 18.44 | 1.32 | 0.32 | 36342 |
| | 38 | 3536 | 21 | 9485 | | | | |
| 54 + 26 | 54 | 19187 | 21 | 26522 | 13.37 | 0.95 | 0.11 | 60894 |
| | 26 | 7419 | 21 | 34372 | | | | |

### 3. Methods and Materials

[1284] ddPCR Assay

[1285] ddPCR is a sensitive assay for measuring the absolute concentration of a specific gene within a larger, mixed DNA pool. The assay relied first on the careful partitioning of single DNA templates of interest into separate droplets. Once correctly partitioned, PCR-mediated amplification of the DNA sequence of interest releases a fluorophore into solution, thereby freeing the fluorophore from a quenching molecular interaction. The “freed’ fluorophore was then able to fluoresce normally. The resultant fluorescent intensity, coupled with the careful partitioning of single DNA copies into separate droplets, allowed for the determination of the concentration of the original DNA template.

[1286] Multi-plexing the ddPCR reaction allowed for the simultaneous determination of the concentrations of two different regions of the DMD gene, Exon 51 (the target) and DMD Exon 59 (the reference). Because the genome editing strategy employed was designed to result in the deletion of Exon 51 while leaving Exon 59 unaffected, a comparison of the concentration of Exon 51 relative to the concentration of Exon 59 by ddPCR enabled the calculation of percentage of DMD loci in which Exon 51 was successfully excised, also know as the targeted deletion efficiency. The multiplexed FAM/VIC probe strategy for the ddPCR assay are illustrated in FIGS. 14 and 15.

[1287] For a full list of components used in the ddPCR assay, See Table 17.

TABLE 17

| | | |
|---|---|---|
| Qx200 Droplet Generator | Bio-Rad | 1864002 |
| Qx200 Droplet Reader | Bio-Rad | 1864003 |
| ALPS 25 Manual Heat Sealer | Thermo Fisher | AB-0384/110 |
| Agencort DNAdvance | Beckman Coulter | A48705 |
| Droplet Generation Oil for Probes | Bio-Rad | 1863005 |
| DG8 Cartridges | Bio-Rad | 1864008 |
| DG8 Gasket | Bio-Rad | 1864007 |
| DG8 Cartridge Holder | Bio-Rad | 1863051 |
| Pierceable Foil Heat Seal | Bio-Rad | 1814040 |
| 2x ddPCR Supermix for Probves | Bio-Rad | 1863010 |
| 2x ddPCR Buffer Control for Probes | Bio-Rad | 1863502 |
| 96-Well twin.tec ™ PCR Plates | Fisher | 951020362 |
| (Blue Skirted) | | |

[1288] At Exon 59, a “pre-designed Gene Expression assay”, i.e., Hs02563140_s1 with a VIC-MGB dye (Life Technologies), was used. At Exon 51, a Custom Taqman assay, i.e., DMDEx51_CCCSVXJ with a FAM-MGB dye (sequences are provided below), was made.

DMDEx51_CCCSVXJ_F:

[SEQ ID NO: 826550]

CCTGCTCTGGCAGATTTCAAC
DMDEx51_CCCSVXJ_R:

[SEQ ID NO: 826551]

ACCCACCATCACCCTCTGT
DMDEx51_CCCSVXJ_M FAM:

[SEQ ID NO: 826552]

AAAGCCAGTCGGTAAGTTCTGTC

[1289] First, the multiplexed Taqman ddPCR reaction master-mix was set up (protocol modified from BioRad, see Table 18). The primer/probe sets were delivered at a 20× concentration, immediately diluted to be at 10× concentration upon arrival, and stored in aliquots. Samples were set up in a 96-well plate with 1.2× excess volume (for 24 μl per well) to ensure consistent volume transfer to the droplet generation cartridge. The reactions were set up on an ice pack plate holder and covered from light to minimize fluorophore degradation and to maintain droplet integrity. See Table 18 below.

TABLE 18

| | | FINAL |
|---|---|---|
| | VOLUME PER | CONCEN- |
| COMPONENT | RXN ul (1.2×) | TRATION |
| 2× ddPCR Supermix for Probes | 10 (12) | 1× |
| 10× target primers/probe | 2 (2.4) | 900 mM/250 nM |
| (DMD EX51 VXJ FAM) | | |
| 10× reference primers/probe | 2 (2.4) | 900 mM/250 nM |
| (DMD EX59 VIC) | | |
| Sample DNA | 30 ng (36 ng) by | |
| | pico/nanodrop | |
| RNase-/DNase-free water | Variable | — |
| Total volume | 20 (24) | — |

[1290] 6 wells of every 96-well ddPCR plate were used for a “standard curve”. This “standard curve” was generated by mixing patient gDNA samples of known Exon51 deletion status at varying proportions. See FIGS. 16A-16D. DMD patient samples were acquired from Coriell Institute for Medical Research. Mixtures with expected Exon 51 deletion rates of 0%, 5%, 10%, 15%, 20%, and 30% were generated by mixing DNA from a male patient carrying a homozygous deletion of Exon 51 with that from a female homozygous for the wild-type allele. During data analysis, a linear regression on the “standard curve” was used to correct “observed” deletion rates to “true” deletion rates, correcting for any efficiency biasing of the PCR reaction towards Exon 51 target probe or the Exon 59 reference probe. See FIGS. 16C and 16D.

[1291] With the master mix transferred to a 96-well format, including the addition of relevant sample and control DNA, droplet generation began. DG8 cartridge was inserted into DG8 Cartridge Holders. 70 μl Droplet Generation Oil for Probes was added to the designated oil wells, followed by the addition of 20 μl of each sample to the adjacent sample wells. To empty sample wells was added 20 μl of ddPCR Buffer Control for Probes due to the fact that H₂O or other low salt concentration buffers, e.g., 0.1×EB buffer, could lead to failure in droplets generator. Samples wells were also checked to ensure no bubbles were generated during sample transfer, as bubbles interfere with droplet generation. Any bubbles formed were removed by hand with a P10 pipet tip.

[1292] Fully-loaded 8-well DG8 cartridge were affixed with a gasket, then loaded into the QX200 droplet generator. Droplet generation took approximately 2 minutes per DG8 Cartridge, or about 25 minutes for a full 96-well plate. The Qx200 droplet generator generated a sample size of 40 μl, with 16,000 to 20,000 droplets per reaction. In a critical step, the droplet mixture was transferred from the DG8 cartridge to a blue half-skirt 96-well PCR plate (Eppendorf), situated in the dark and on an ice pack plate holder, using slow and constant force. Careful aspiration and expulsion using a multi-channel P200 pipet ensured droplets remain intact. The above steps were repeated until all samples were partitioned into droplets and transferred to the blue half-skirt 96-well PCR plate. The plate was sealed at 180° C. for 3 second using a pre-heated PCR plate-sealer and pierceable foil seals. Once sealed, the plate was kept in the dark and on ice until it was loaded into the PCR machine. The PCR conditions are summarized below.
[1293] 95° C. for 10 minutes; 95° C. for 30 seconds, 60° C. for 1 minute; 72° C. for 15 seconds (45×); and 98° C. for 10 minutes
[1294] The cycling conditions was run at 50% ramp speed (2° C./s or slower)

[1295] After PCR cycling was complete, the droplets were read by a Qx200 Droplet reader (Bio-Rad). Raw data were first visually inspected to confirm the ddPCR assay cleanly separated “positive” droplets from “negative” droplets with positive droplets accounting for about 5-15% of the total droplets. Values above and below this range indicate under- and over-loading, respectively, of DNA into generated droplets, the consequence of which is inaccurate calculation of deletion efficiencies. Data points with positive droplet counts outside of this range, therefore, were discarded. Optimization was performed prior to the DMD screen, and a load of 30 ng of DNA per reaction was determined to result in the optimal positive droplet distribution.

[1296] Data was analyzed by first calculating deletion efficiencies for individual guide pairs:

Deletion Efficiency (%)=100*(1−([Exon51]/[Exon 59]))
[1297] [Exon51]=experimentally determined concentration of Exon 51
[1298] [Exon59]=experimentally determined concentration of Exon 59

[1299] These “observed” deletion efficiencies were converted to “true” deletion efficiencies using the standard curve and linear regression as described above. “Observed” deletion efficiencies for positive (guides pair 1,9) and negative controls (backbone, pJT002, transfected alone) were also converted to “true” deletion efficiencies and subsequently cross-referenced with previous experiments to verify the quality of the assay for that particular plate. Generally, guide pairs were sorted by “true” deletion efficiency to determine top performers.

[1300] Given the size of Guide Set 2 (675 guide pairs), “true” deletion efficiencies were converted into z-scores (See below) in an attempt to normalize for variability across plates, transfections, and ddPCR runs. Guide pairs with at least a z-score greater than 1.5 in at least one of the two experimental biological replicates were selected for a Guide Hit Validation experiment, with the intent of carrying through top performers while recapitulating, and thereby confirming, previously observed positive results.

### Z-Score

[1301] Z score normalizes for variability across plates, transfections, ddPCR runs.

$$Z = \frac{{X}_{i} - \overline{X}}{{S}_{x}}$$

$${X}_{i} = deletion efficiency$$

$$X = plate average$$

$${S}_{x} = plate SD$$

### INCORPORATION BY REFERENCE

[1302] All publications, patents, and patent applications mentioned herein are hereby incorporated by reference in their entirety as if each individual publication, patent or patent application was specifically and individually indicated to be incorporated by reference. In case of conflict, the present application, including any definitions herein, will control.

### EQUIVALENTS

[1303] Those skilled in the art will recognize, or be able to ascertain using no more than routine experimentation, many equivalents to the specific embodiments of the invention described herein. Such equivalents are intended to be encompassed by the following claims.

The application's sequence listing, which the Patent Office published only in electronic form, follows.

SEQUENCE LISTING (826649 sequences)

SEQ ID NO: 1 - protein, 1345 aa, Streptococcus mutans
  misc_feature (10)..(21): N-terminal RuvC-like domain
  misc_feature (759)..(766): RuvC-like domain
  misc_feature (837)..(863): HNH-like domain
  misc_feature (982)..(989): RuvC-like domain
MKKPYSIGLDIGTNSVGWAVVTDDYKVPAKKMKVLGNTDKSHIEKNLLGALLFDSGNTAEDRRLKRTARRRYTRRRNRILYLQEIFSEEMGKVDDSFFHRLEDSFLVTEDKRGERHPIFGNLEEEVKYHENFPTIYHLRQYLADNPEKVDLRLVYLALAHIIKFRGHFLIEGKFDTRNNDVQRLFQEFLAVYDNTFENSSLQEQNVQVEEILTDKISKSAKKDRVLKLFPNEKSNGRFAEFLKLIVGNQADFKKHFELEEKAPLQFSKDTYEEELEVLLAQIGDNYAELFLSAKKLYDSILLSGILTVTDVGTKAPLSASMIQRYNEHQMDLAQLKQFIRQKLSDKYNEVFSDVSKDGYAGYIDGKTNQEAFYKYLKGLLNKIEGSGYFLDKIEREDFLRKQRTFDNGSIPHQIHLQEMRAIIRRQAEFYPFLADNQDRIEKLLTFRIPYYVGPLARGKSDFAWLSRKSADKITPWNFDEIVDKESSAEAFINRMTNYDLYLPNQKVLPKHSLLYEKFTVYNELTKVKYKTEQGKTAFFDANMKQEIFDGVFKVYRKVTKDKLMDFLEKEFDEFRIVDLTGLDKENKVFNASYGTYHDLCKILDKDFLDNSKNEKILEDIVLTLTLFEDREMIRKRLENYSDLLTKEQVKKLERRHYTGWGRLSAELIHGIRNKESRKTILDYLIDDGNSNRNFMQLINDDALSFKEEIAKAQVIGETDNLNQVVSDIAGSPAIKKGILQSLKIVDELVKIMGHQPENIVVEMARENQFTNQGRRNSQQRLKGLTDSIKEFGSQILKEHPVENSQLQNDRLFLYYLQNGRDMYTGEELDIDYLSQYDIDHIIPQAFIKDNSIDNRVLTSSKENRGKSDDVPSKDVVRKMKSYWSKLLSAKLITQRKFDNLTKAERGGLTDDDKAGFIKRQLVETRQITKHVARILDERFNTETDENNKKIRQVKIVTLKSNLVSNFRKEFELYKVREINDYHHAHDAYLNAVIGKALLGVYPQLEPEFVYGDYPHFHGHKENKATAKKFFYSNIMNFFKKDDVRTDKNGEIIWKKDEHISNIKKVLSYPQVNIVKKVEEQTGGFSKESILPKGNSDKLIPRKTKKFYWDTKKYGGFDSPIVAYSILVIADIEKGKSKKLKTVKALVGVTIMEKMTFERDPVAFLERKGYRNVQEENIIKLPKYSLFKLENGRKRLLASARELQKGNEIVLPNHLGTLLYHAKNIHKVDEPKHLDYVDKHKDEFKELLDVVSNFSKKYTLAEGNLEKIKELYAQNNGEDLKELASSFINLLTFTAIGAPATFKFFDKNIDRKRYTSTTEILNATLIHQSITGLYETRIDLNKLGGD

SEQ ID NO: 2 - protein, 1368 aa, Streptococcus pyogenes [sequence omitted]

SEQ ID NO: 3 - DNA, 4107 bp, Streptococcus pyogenes
atggataaaaagtacagcatcgggctggacatcggtacaaactcagtggggtgggccgtgattacggacgagtacaaggtaccctccaaaaaatttaaagtgctgggtaacacggacagacactctataaagaaaaatcttattggagccttgctgttcgactcaggcgagacagccgaagccacaaggttgaagcggaccgccaggaggcggtataccaggagaaagaaccgcatatgctacctgcaagaaatcttcagtaacgagatggcaaaggttgacgatagctttttccatcgcctggaagaatcctttcttgttgaggaagacaagaagcacgaacggcaccccatctttggcaatattgtcgacgaagtggcatatcacgaaaagtacccgactatctaccacctcaggaagaagctggtggactctaccgataaggcggacctcagacttatttatttggcactcgcccacatgattaaatttagaggacatttcttgatcgagggcgacctgaacccggacaacagtgacgtcgataagctgttcatccaacttgtgcagacctacaatcaactgttcgaagaaaaccctataaatgcttcaggagtcgacgctaaagcaatcctgtccgcgcgcctctcaaaatctagaagacttgagaatctgattgctcagttgcccggggaaaagaaaaatggattgtttggcaacctgatcgccctcagtctcggactgaccccaaatttcaaaagtaacttcgacctggccgaagacgctaagctccagctgtccaaggacacatacgatgacgacctcgacaatctgctggcccagattggggatcagtacgccgatctctttttggcagcaaagaacctgtccgacgccatcctgttgagcgatatcttgagagtgaacaccgaaattactaaagcaccccttagcgcatctatgatcaagcggtacgacgagcatcatcaggatctgaccctgctgaaggctcttgtgaggcaacagctccccgaaaaatacaaggaaatcttctttgaccagagcaaaaacggctacgctggctatatagatggtggggccagtcaggaggaattctataaattcatcaagcccattctcgagaaaatggacggcacagaggagttgctggtcaaacttaacagggaggacctgctgcggaagcagcggacctttgacaacgggtctatcccccaccagattcatctgggcgaactgcacgcaatcctgaggaggcaggaggatttttatccttttcttaaagataaccgcgagaaaatagaaaagattcttacattcaggatcccgtactacgtgggacctctcgcccggggcaattcacggtttgcctggatgacaaggaagtcagaggagactattacaccttggaacttcgaagaagtggtggacaagggtgcatctgcccagtctttcatcgagcggatgacaaattttgacaagaacctccctaatgagaaggtgctgcccaaacattctctgctctacgagtactttaccgtctacaatgaactgactaaagtcaagtacgtcaccgagggaatgaggaagccggcattccttagtggagaacagaagaaggcgattgtagacctgttgttcaagaccaacaggaaggtgactgtgaagcaacttaaagaagactactttaagaagatcgaatgttttgacagtgtggaaatttcaggggttgaagaccgcttcaatgcgtcattggggacttaccatgatcttctcaagatcataaaggacaaagacttcctggacaacgaagaaaatgaggatattctcgaagacatcgtcctcaccctgaccctgttcgaagacagggaaatgatagaagagcgcttgaaaacctatgcccacctcttcgacgataaagttatgaagcagctgaagcgcaggagatacacaggatggggaagattgtcaaggaagctgatcaatggaattagggataaacagagtggcaagaccatactggatttcctcaaatctgatggcttcgccaataggaacttcatgcaactgattcacgatgactctcttaccttcaaggaggacattcaaaaggctcaggtgagcgggcagggagactcccttcatgaacacatcgcgaatttggcaggttcccccgctattaaaaagggcatccttcaaactgtcaaggtggtggatgaattggtcaaggtaatgggcagacataagccagaaaatattgtgatcgagatggcccgcgaaaaccagaccacacagaagggccagaaaaatagtagagagcggatgaagaggatcgaggagggcatcaaagagctgggatctcagattctcaaagaacaccccgtagaaaacacacagctgcagaacgaaaaattgtacttgtactatctgcagaacggcagagacatgtacgtcgaccaagaacttgatattaatagactgtccgactatgacgtagaccatatcgtgccccagtccttcctgaaggacgactccattgataacaaagtcttgacaagaagcgacaagaacaggggtaaaagtgataatgtgcctagcgaggaggtggtgaaaaaaatgaagaactactggcgacagctgcttaatgcaaagctcattacacaacggaagttcgataatctgacgaaagcagagagaggtggcttgtctgagttggacaaggcagggtttattaagcggcagctggtggaaactaggcagatcacaaagcacgtggcgcagattttggacagccggatgaacacaaaatacgacgaaaatgataaactgatacgagaggtcaaagttatcacgctgaaaagcaagctggtgtccgattttcggaaagacttccagttctacaaagttcgcgagattaataactaccatcatgctcacgatgcgtacctgaacgctgttgtcgggaccgccttgataaagaagtacccaaagctggaatccgagttcgtatacggggattacaaagtgtacgatgtgaggaaaatgatagccaagtccgagcaggagattggaaaggccacagctaagtacttcttttattctaacatcatgaatttttttaagacggaaattaccctggccaacggagagatcagaaagcggccccttatagagacaaatggtgaaacaggtgaaatcgtctgggataagggcagggatttcgctactgtgaggaaggtgctgagtatgccacaggtaaatatcgtgaaaaaaaccgaagtacagaccggaggattttccaaggaaagcattttgcctaaaagaaactcagacaagctcatcgcccgcaagaaagattgggaccctaagaaatacgggggatttgactcacccaccgtagcctattctgtgctggtggtagctaaggtggaaaaaggaaagtctaagaagctgaagtccgtgaaggaactcttgggaatcactatcatggaaagatcatcctttgaaaagaaccctatcgatttcctggaggctaagggttacaaggaggtcaagaaagacctcatcattaaactgccaaaatactctctcttcgagctggaaaatggcaggaagagaatgttggccagcgccggagagctgcaaaagggaaacgagcttgctctgccctccaaatatgttaattttctctatctcgcttcccactatgaaaagctgaaagggtctcccgaagataacgagcagaagcagctgttcgtcgaacagcacaagcactatctggatgaaataatcgaacaaataagcgagttcagcaaaagggttatcctggcggatgctaatttggacaaagtactgtctgcttataacaagcaccgggataagcctattagggaacaagccgagaatataattcacctctttacactcacgaatctcggagcccccgccgccttcaaatactttgatacgactatcgaccggaaacggtataccagtaccaaagaggtcctcgatgccaccctcatccaccagtcaattactggcctgtacgaaacacggatcgacctctctcaactgggcggcgactag

SEQ ID NO: 4 - protein, 1388 aa, Streptococcus thermophilus
  misc_feature (10)..(21): N-terminal RuvC-like domain
  misc_feature (760)..(767): RuvC-like domain
  misc_feature (844)..(870): HNH-like domain
  misc_feature (989)..(996): RuvC-like domain
MTKPYSIGLDIGTNSVGWAVTTDNYKVPSKKMKVLGNTSKKYIKKNLLGVLLFDSGITAEGRRLKRTARRRYTRRRNRILYLQEIFSTEMATLDDAFFQRLDDSFLVPDDKRDSKYPIFGNLVEEKAYHDEFPTIYHLRKYLADSTKKADLRLVYLALAHMIKYRGHFLIEGEFNSKNNDIQKNFQDFLDTYNAIFESDLSLENSKQLEEIVKDKISKLEKKDRILKLFPGEKNSGIFSEFLKLIVGNQADFRKCFNLDEKASLHFSKESYDEDLETLLGYIGDDYSDVFLKAKKLYDAILLSGFLTVTDNETEAPLSSAMIKRYNEHKEDLALLKEYIRNISLKTYNEVFKDDTKNGYAGYIDGKTNQEDFYVYLKKLLAEFEGADYFLEKIDREDFLRKQRTFDNGSIPYQIHLQEMRAILDKQAKFYPFLAKNKERIEKILTFRIPYYVGPLARGNSDFAWSIRKRNEKITPWNFEDVIDKESSAEAFINRMTSFDLYLPEEKVLPKHSLLYETFNVYNELTKVRFIAESMRDYQFLDSKQKKDIVRLYFKDKRKVTDKDIIEYLHAIYGYDGIELKGIEKQFNSSLSTYHDLLNIINDKEFLDDSSNEAIIEEIIHTLTIFEDREMIKQRLSKFENIFDKSVLKKLSRRHYTGWGKLSAKLINGIRDEKSGNTILDYLIDDGISNRNFMQLIHDDALSFKKKIQKAQIIGDEDKGNIKEVVKSLPGSPAIKKGILQSIKIVDELVKVMGGRKPESIVVEMARENQYTNQGKSNSQQRLKRLEKSLKELGSKILKENIPAKLSKIDNNALQNDRLYLYYLQNGKDMYTGDDLDIDRLSNYDIDHIIPQAFLKDNSIDNKVLVSSASNRGKSDDVPSLEVVKKRKTFWYQLLKSKLISQRKFDNLTKAERGGLSPEDKAGFIQRQLVETRQITKHVARLLDEKFNNKKDENNRAVRTVKIITLKSTLVSQFRKDFELYKVREINDFHHAHDAYLNAVVASALLKKYPKLEPEFVYGDYPKYNSFRERKSATEKVYFYSNIMNIFKKSISLADGRVIERPLIEVNEETGESVWNKESDLATVRRVLSYPQVNVVKKVEEQNHGLDRGKPKGLFNANLSSKPKPNSNENLVGAKEYLDPKKYGGYAGISNSFTVLVKGTIEKGAKKKITNVLEFQGISILDRINYRKDKLNFLLEKGYKDIELIIELPKYSLFELSDGSRRMLASILSTNNKRGEIHKGNQIFLSQKFVKLLYHAKRISNTINENHRKYVENHKKEFEELFYYILEFNENYVGAKKNGKLLNSAFQSWQNHSIDELCSSFIGPTGSERKGLFELTSRGSAADFEFLGVKIPRYRDYTPSSLLKDATLIHQSVTGLYETRIDLAKLGEG

SEQ ID NO: 5 - protein, 1334 aa, Listeria innocua
  misc_feature (10)..(21): N-terminal RuvC-like domain
  misc_feature (762)..(769): RuvC-like domain
  misc_feature (840)..(866): HNH-like domain
  misc_feature (985)..(992): RuvC-like domain
MKKPYTIGLDIGTNSVGWAVLTDQYDLVKRKMKIAGDSEKKQIKKNFWGVRLFDEGQTAADRRMARTARRRIERRRNRISYLQGIFAEEMSKTDANFFCRLSDSFYVDNEKRNSRHPFFATIEEEVEYHKNYPTIYHLREELVNSSEKADLRLVYLALAHIIKYRGNFLIEGALDTQNTSVDGIYKQFIQTYNQVFASGIEDGSLKKLEDNKDVAKILVEKVTRKEKLERILKLYPGEKSAGMFAQFISLIVGSKGNFQKPFDLIEKSDIECAKDSYEEDLESLLALIGDEYAELFVAAKNAYSAVVLSSIITVAETETNAKLSASMIERFDTHEEDLGELKAFIKLHLPKHYEEIFSNTEKHGYAGYIDGKTKQADFYKYMKMTLENIEGADYFIAKIEKENFLRKQRTFDNGAIPHQLHLEELEAILHQQAKYYPFLKENYDKIKSLVTFRIPYFVGPLANGQSEFAWLTRKADGEIRPWNIEEKVDFGKSAVDFIEKMTNKDTYLPKENVLPKHSLCYQKYLVYNELTKVRYINDQGKTSYFSGQEKEQIFNDLFKQKRKVKKKDLELFLRNMSHVESPTIEGLEDSFNSSYSTYHDLLKVGIKQEILDNPVNTEMLENIVKILTVFEDKRMIKEQLQQFSDVLDGVVLKKLERRHYTGWGRLSAKLLMGIRDKQSHLTILDYLMNDDGLNRNLMQLINDSNLSFKSIIEKEQVTTADKDIQSIVADLAGSPAIKKGILQSLKIVDELVSVMGYPPQTIVVEMARENQTTGKGKNNSRPRYKSLEKAIKEFGSQILKEHPTDNQELRNNRLYLYYLQNGKDMYTGQDLDIHNLSNYDIDHIVPQSFITDNSIDNLVLTSSAGNREKGDDVPPLEIVRKRKVFWEKLYQGNLMSKRKFDYLTKAERGGLTEADKARFIHRQLVETRQITKNVANILHQRFNYEKDDHGNTMKQVRIVTLKSALVSQFRKQFQLYKVRDVNDYHHAHDAYLNGVVANTLLKVYPQLEPEFVYGDYHQFDWFKANKATAKKQFYTNIMLFFAQKDRIIDENGEILWDKKYLDTVKKVMSYRQMNIVKKTEIQKGEFSKATIKPKGNSSKLIPRKTNWDPMKYGGLDSPNMAYAVVIEYAKGKNKLVFEKKIIRVTIMERKAFEKDEKAFLEEQGYRQPKVLAKLPKYTLYECEEGRRRMLASANEAQKGNQQVLPNHLVTLLHHAANCEVSDGKSLDYIESNREMFAELLAHVSEFAKRYTLAEANLNKINQLFEQNKEGDIKAIAQSFVDLMAFNAMGAPASFKFFETTIERKRYNNLKELLNSTIIYQSITGLYESRKRLDD

SEQ ID NO: 6 - protein, 1053 aa, Staphylococcus aureus
MKRNYILGLDIGITSVGYGIIDYETRDVIDAGVRLFKEANVENNEGRRSKRGARRLKRRRRHRIQRVKKLLFDYNLLTDHSELSGINPYEARVKGLSQKLSEEEFSAALLHLAKRRGVHNVNEVEEDTGNELSTKEQISRNSKALEEKYVAELQLERLKKDGEVRGSINRFKTSDYVKEAKQLLKVQKAYHQLDQSFIDTYIDLLETRRTYYEGPGEGSPFGWKDIKEWYEMLMGHCTYFPEELRSVKYAYNADLYNALNDLNNLVITRDENEKLEYYEKFQIIENVFKQKKKPTLKQIAKEILVNEEDIKGYRVTSTGKPEFTNLKVYHDIKDITARKEIIENAELLDQIAKILTIYQSSEDIQEELTNLNSELTQEEIEQISNLKGYTGTHNLSLKAINLILDELWHTNDNQIAIFNRLKLVPKKVDLSQQKEIPTTLVDDFILSPVVKRSFIQSIKVINAIIKKYGLPNDIIIELAREKNSKDAQKMINEMQKRNRQTNERIEEIIRTTGKENAKYLIEKIKLHDMQEGKCLYSLEAIPLEDLLNNPFNYEVDHIIPRSVSFDNSFNNKVLVKQEENSKKGNRTPFQYLSSSDSKISYETFKKHILNLAKGKGRISKTKKEYLLEERDINRFSVQKDFINRNLVDTRYATRGLMNLLRSYFRVNNLDVKVKSINGGFTSFLRRKWKFKKERNKGYKHHAEDALIIANADFIFKEWKKLDKAKKVMENQMFEEKQAESMPEIETEQEYKEIFITPHQIKHIKDFKDYKYSHRVDKKPNRELINDTLYSTRKDDKGNTLIVNNLNGLYDKDNDKLKKLINKSPEKLLMYHHDPQTYQKLKLIMEQYGDEKNPLYKYYEETGNYLTKYSKKDNGPVIKKIKYYGNKLNAHLDITDDYPNSRNKVVKLSLKPYRFDVYLDNGVYKFVTVKNLDVIKKENYYEVNSKCYEEAKKLKKISNQAEFIASFYNNDLIKINGELYRVIGVNNDLLNRIEVNMIDITYREYLENMNDKRPPRIIKTIASKTQSIKKYSTDILGNLYEVKSKKHPQIIKKG

SEQ ID NO: 7 - DNA, 3159 bp, Staphylococcus aureus
atgaaaaggaactacattctggggctggacatcgggattacaagcgtggggtatgggattattgactatgaaacaagggacgtgatcgacgcaggcgtcagactgttcaaggaggccaacgtggaaaacaatgagggacggagaagcaagaggggagccaggcgcctgaaacgacggagaaggcacagaatccagagggtgaagaaactgctgttcgattacaacctgctgaccgaccattctgagctgagtggaattaatccttatgaagccagggtgaaaggcctgagtcagaagctgtcagaggaagagttttccgcagctctgctgcacctggctaagcgccgaggagtgcataacgtcaatgaggtggaagaggacaccggcaacgagctgtctacaaaggaacagatctcacgcaatagcaaagctctggaagagaagtatgtcgcagagctgcagctggaacggctgaagaaagatggcgaggtgagagggtcaattaataggttcaagacaagcgactacgtcaaagaagccaagcagctgctgaaagtgcagaaggcttaccaccagctggatcagagcttcatcgatacttatatcgacctgctggagactcggagaacctactatgagggaccaggagaagggagccccttcggatggaaagacatcaaggaatggtacgagatgctgatgggacattgcacctattttccagaagagctgagaagcgtcaagtacgcttataacgcagatctgtacaacgccctgaatgacctgaacaacctggtcatcaccagggatgaaaacgagaaactggaatactatgagaagttccagatcatcgaaaacgtgtttaagcagaagaaaaagcctacactgaaacagattgctaaggagatcctggtcaacgaagaggacatcaagggctaccgggtgacaagcactggaaaaccagagttcaccaatctgaaagtgtatcacgatattaaggacatcacagcacggaaagaaatcattgagaacgccgaactgctggatcagattgctaagatcctgactatctaccagagctccgaggacatccaggaagagctgactaacctgaacagcgagctgacccaggaagagatcgaacagattagtaatctgaaggggtacaccggaacacacaacctgtccctgaaagctatcaatctgattctggatgagctgtggcatacaaacgacaatcagattgcaatctttaaccggctgaagctggtcccaaaaaaggtggacctgagtcagcagaaagagatcccaaccacactggtggacgatttcattctgtcacccgtggtcaagcggagcttcatccagagcatcaaagtgatcaacgccatcatcaagaagtacggcctgcccaatgatatcattatcgagctggctagggagaagaacagcaaggacgcacagaagatgatcaatgagatgcagaaacgaaaccggcagaccaatgaacgcattgaagagattatccgaactaccgggaaagagaacgcaaagtacctgattgaaaaaatcaagctgcacgatatgcaggagggaaagtgtctgtattctctggaggccatccccctggaggacctgctgaacaatccattcaactacgaggtcgatcatattatccccagaagcgtgtccttcgacaattcctttaacaacaaggtgctggtcaagcaggaagagaactctaaaaagggcaataggactcctttccagtacctgtctagttcagattccaagatctcttacgaaacctttaaaaagcacattctgaatctggccaaaggaaagggccgcatcagcaagaccaaaaaggagtacctgctggaagagcgggacatcaacagattctccgtccagaaggattttattaaccggaatctggtggacacaagatacgctactcgcggcctgatgaatctgctgcgatcctatttccgggtgaacaatctggatgtgaaagtcaagtccatcaacggcgggttcacatcttttctgaggcgcaaatggaagtttaaaaaggagcgcaacaaagggtacaagcaccatgccgaagatgctctgattatcgcaaatgccgacttcatctttaaggagtggaaaaagctggacaaagccaagaaagtgatggagaaccagatgttcgaagagaagcaggccgaatctatgcccgaaatcgagacagaacaggagtacaaggagattttcatcactcctcaccagatcaagcatatcaaggatttcaaggactacaagtactctcaccgggtggataaaaagcccaacagagagctgatcaatgacaccctgtatagtacaagaaaagacgataaggggaataccctgattgtgaacaatctgaacggactgtacgacaaagataatgacaagctgaaaaagctgatcaacaaaagtcccgagaagctgctgatgtaccaccatgatcctcagacatatcagaaactgaagctgattatggagcagtacggcgacgagaagaacccactgtataagtactatgaagagactgggaactacctgaccaagtatagcaaaaaggataatggccccgtgatcaagaagatcaagtactatgggaacaagctgaatgcccatctggacatcacagacgattaccctaacagtcgcaacaaggtggtcaagctgtcactgaagccatacagattcgatgtctatctggacaacggcgtgtataaatttgtgactgtcaagaatctggatgtcatcaaaaaggagaactactatgaagtgaatagcaagtgctacgaagaggctaaaaagctgaaaaagattagcaaccaggcagagttcatcgcctccttttacaacaacgacctgattaagatcaatggcgaactgtatagggtcatcggggtgaacaatgatctgctgaaccgcattgaagtgaatatgattgacatcacttaccgagagtatctggaaaacatgaatgataagcgcccccctcgaattatcaaaacaattgcctctaagactcagagtatcaaaaagtactcaaccgacattctgggaaacctgtatgaggtgaagagcaaaaagcaccctcagattatcaaaaagggc

SEQ ID NO: 8 - DNA, 3159 bp, Staphylococcus aureus
atgaagcggaactacatcctgggcctggacatcggcatcaccagcgtgggctacggcatcatcgactacgagacacgggacgtgatcgatgccggcgtgcggctgttcaaagaggccaacgtggaaaacaacgagggcaggcggagcaagagaggcgccagaaggctgaagcggcggaggcggcatagaatccagagagtgaagaagctgctgttcgactacaacctgctgaccgaccacagcgagctgagcggcatcaacccctacgaggccagagtgaagggcctgagccagaagctgagcgaggaagagttctctgccgccctgctgcacctggccaagagaagaggcgtgcacaacgtgaacgaggtggaagaggacaccggcaacgagctgtccaccaaagagcagatcagccggaacagcaaggccctggaagagaaatacgtggccgaactgcagctggaacggctgaagaaagacggcgaagtgcggggcagcatcaacagattcaagaccagcgactacgtgaaagaagccaaacagctgctgaaggtgcagaaggcctaccaccagctggaccagagcttcatcgacacctacatcgacctgctggaaacccggcggacctactatgagggacctggcgagggcagccccttcggctggaaggacatcaaagaatggtacgagatgctgatgggccactgcacctacttccccgaggaactgcggagcgtgaagtacgcctacaacgccgacctgtacaacgccctgaacgacctgaacaatctcgtgatcaccagggacgagaacgagaagctggaatattacgagaagttccagatcatcgagaacgtgttcaagcagaagaagaagcccaccctgaagcagatcgccaaagaaatcctcgtgaacgaagaggatattaagggctacagagtgaccagcaccggcaagcccgagttcaccaacctgaaggtgtaccacgacatcaaggacattaccgcccggaaagagattattgagaacgccgagctgctggatcagattgccaagatcctgaccatctaccagagcagcgaggacatccaggaagaactgaccaatctgaactccgagctgacccaggaagagatcgagcagatctctaatctgaagggctataccggcacccacaacctgagcctgaaggccatcaacctgatcctggacgagctgtggcacaccaacgacaaccagatcgctatcttcaaccggctgaagctggtgcccaagaaggtggacctgtcccagcagaaagagatccccaccaccctggtggacgacttcatcctgagccccgtcgtgaagagaagcttcatccagagcatcaaagtgatcaacgccatcatcaagaagtacggcctgcccaacgacatcattatcgagctggcccgcgagaagaactccaaggacgcccagaaaatgatcaacgagatgcagaagcggaaccggcagaccaacgagcggatcgaggaaatcatccggaccaccggcaaagagaacgccaagtacctgatcgagaagatcaagctgcacgacatgcaggaaggcaagtgcctgtacagcctggaagccatccctctggaagatctgctgaacaaccccttcaactatgaggtggaccacatcatccccagaagcgtgtccttcgacaacagcttcaacaacaaggtgctcgtgaagcaggaagaaaacagcaagaagggcaaccggaccccattccagtacctgagcagcagcgacagcaagatcagctacgaaaccttcaagaagcacatcctgaatctggccaagggcaagggcagaatcagcaagaccaagaaagagtatctgctggaagaacgggacatcaacaggttctccgtgcagaaagacttcatcaaccggaacctggtggataccagatacgccaccagaggcctgatgaacctgctgcggagctacttcagagtgaacaacctggacgtgaaagtgaagtccatcaatggcggcttcaccagctttctgcggcggaagtggaagtttaagaaagagcggaacaaggggtacaagcaccacgccgaggacgccctgatcattgccaacgccgatttcatcttcaaagagtggaagaaactggacaaggccaaaaaagtgatggaaaaccagatgttcgaggaaaagcaggccgagagcatgcccgagatcgaaaccgagcaggagtacaaagagatcttcatcaccccccaccagatcaagcacattaaggacttcaaggactacaagtacagccaccgggtggacaagaagcctaatagagagctgattaacgacaccctgtactccacccggaaggacgacaagggcaacaccctgatcgtgaacaatctgaacggcctgtacgacaaggacaatgacaagctgaaaaagctgatcaacaagagccccgaaaagctgctgatgtaccaccacgacccccagacctaccagaaactgaagctgattatggaacagtacggcgacgagaagaatcccctgtacaagtactacgaggaaaccgggaactacctgaccaagtactccaaaaaggacaacggccccgtgatcaagaagattaagtattacggcaacaaactgaacgcccatctggacatcaccgacgactaccccaacagcagaaacaaggtcgtgaagctgtccctgaagccctacagattcgacgtgtacctggacaatggcgtgtacaagttcgtgaccgtgaagaatctggatgtgatcaaaaaagaaaactactacgaagtgaatagcaagtgctatgaggaagctaagaagctgaagaagatcagcaaccaggccgagtttatcgcctccttctacaacaacgatctgatcaagatcaacggcgagctgtatagagtgatcggcgtgaacaacgacctgctgaaccggatcgaagtgaacatgatcgacatcacctaccgcgagtacctggaaaacatgaacgacaagaggccccccaggatcattaagacaatcgcctccaagacccagagcattaagaagtacagcacagacattctgggcaacctgtatgaagtgaaatctaagaagcaccctcagatcatcaaaaagggc

SEQ ID NO: 9 - DNA, 3159 bp, Staphylococcus aureus
atgaagcgcaactacatcctcggactggacatcggcattacctccgtgggatacggcatcatcgattacgaaactagggatgtgatcgacgctggagtcaggctgttcaaagaggcgaacgtggagaacaacgaggggcggcgctcaaagaggggggcccgccggctgaagcgccgccgcagacatagaatccagcgcgtgaagaagctgctgttcgactacaaccttctgaccgaccactccgaactttccggcatcaacccatatgaggctagagtgaagggattgtcccaaaagctgtccgaggaagagttctccgccgcgttgctccacctcgccaagcgcaggggagtgcacaatgtgaacgaagtggaagaagataccggaaacgagctgtccaccaaggagcagatcagccggaactccaaggccctggaagagaaatacgtggcggaactgcaactggagcggctgaagaaagacggagaagtgcgcggctcgatcaaccgcttcaagacctcggactacgtgaaggaggccaagcagctcctgaaagtgcaaaaggcctatcaccaacttgaccagtcctttatcgatacctacatcgatctgctcgagactcggcggacttactacgagggtccaggggagggctccccatttggttggaaggatattaaggagtggtacgaaatgctgatgggacactgcacatacttccctgaggagctgcggagcgtgaaatacgcatacaacgcagacctgtacaacgcgctgaacgacctgaacaatctcgtgatcacccgggacgagaacgaaaagctcgagtattacgaaaagttccagattattgagaacgtgttcaaacagaagaagaagccgacactgaagcagattgccaaggaaatcctcgtgaacgaagaggacatcaagggctatcgagtgacctcaacgggaaagccggagttcaccaatctgaaggtctaccacgacatcaaagacattaccgcccggaaggagatcattgagaacgcggagctgttggaccagattgcgaagattctgaccatctaccaatcctccgaggatattcaggaagaactcaccaacctcaacagcgaactgacccaggaggagatagagcaaatctccaacctgaagggctacaccggaactcataacctgagcctgaaggccatcaacttgatcctggacgagctgtggcacaccaacgataaccagatcgctattttcaatcggctgaagctggtccccaagaaagtggacctctcacaacaaaaggagatccctactacccttgtggacgatttcattctgtcccccgtggtcaagagaagcttcatacagtcaatcaaagtgatcaatgccattatcaagaaatacggtctgcccaacgacattatcattgagctcgcccgcgagaagaactcgaaggacgcccagaagatgattaacgaaatgcagaagaggaaccgacagactaacgaacggatcgaagaaatcatccggaccaccgggaaggaaaacgcgaagtacctgatcgaaaagatcaagctccatgacatgcaggaaggaaagtgtctgtactcgctggaggccattccgctggaggacttgctgaacaacccttttaactacgaagtggatcatatcattccgaggagcgtgtcattcgacaattccttcaacaacaaggtcctcgtgaagcaggaggaaaactcgaagaagggaaaccgcacgccgttccagtacctgagcagcagcgactccaagatttcctacgaaaccttcaagaagcacatcctcaacctggcaaaggggaagggtcgcatctccaagaccaagaaggaatatctgctggaagaaagagacatcaacagattctccgtgcaaaaggacttcatcaaccgcaacctcgtggatactagatacgctactcggggtctgatgaacctcctgagaagctactttagagtgaacaatctggacgtgaaggtcaagtcgattaacggaggtttcacctccttcctgcggcgcaagtggaagttcaagaaggaacggaacaagggctacaagcaccacgccgaggacgccctgatcattgccaacgccgacttcatcttcaaagaatggaagaaacttgacaaggctaagaaggtcatggaaaaccagatgttcgaagaaaagcaggccgagtctatgcctgaaatcgagactgaacaggagtacaaggaaatctttattacgccacaccagatcaaacacatcaaggatttcaaggattacaagtactcacatcgcgtggacaaaaagccgaacagggaactgatcaacgacaccctctactccacccggaaggatgacaaagggaataccctcatcgtcaacaaccttaacggcctgtacgacaaggacaacgataagctgaagaagctcattaacaagtcgcccgaaaagttgctgatgtaccaccacgaccctcagacttaccagaagctcaagctgatcatggagcagtatggggacgagaaaaacccgttgtacaagtactacgaagaaactgggaattatctgactaagtactccaagaaagataacggccccgtgattaagaagattaagtactacggcaacaagctgaacgcccatctggacatcaccgatgactaccctaattcccgcaacaaggtcgtcaagctgagcctcaagccctaccggtttgatgtgtaccttgacaatggagtgtacaagttcgtgactgtgaagaaccttgacgtgatcaagaaggagaactactacgaagtcaactccaagtgctacgaggaagcaaagaagttgaagaagatctcgaaccaggccgagttcattgcctccttctataacaacgacctgattaagatcaacggcgaactgtaccgcgtcattggcgtgaacaacgatctcctgaaccgcatcgaagtgaacatgatcgacatcacttaccgggaatacctggagaatatgaacgacaagcgcccgccccggatcattaagactatcgcctcaaagacccagtcgatcaagaagtacagcaccgacatcctgggcaacctgtacgaggtcaaatcgaagaagcacccccagatcatcaagaaggga

SEQ ID NO: 10 - DNA, 3159 bp, Staphylococcus aureus
atgaaaaggaactacattctggggctggccatcgggattacaagcgtggggtatgggattattgactatgaaacaagggacgtgatcgacgcaggcgtcagactgttcaaggaggccaacgtggaaaacaatgagggacggagaagcaagaggggagccaggcgcctgaaacgacggagaaggcacagaatccagagggtgaagaaactgctgttcgattacaacctgctgaccgaccattctgagctgagtggaattaatccttatgaagccagggtgaaaggcctgagtcagaagctgtcagaggaagagttttccgcagctctgctgcacctggctaagcgccgaggagtgcataacgtcaatgaggtggaagaggacaccggcaacgagctgtctacaaaggaacagatctcacgcaatagcaaagctctggaagagaagtatgtcgcagagctgcagctggaacggctgaagaaagatggcgaggtgagagggtcaattaataggttcaagacaagcgactacgtcaaagaagccaagcagctgctgaaagtgcagaaggcttaccaccagctggatcagagcttcatcgatacttatatcgacctgctggagactcggagaacctactatgagggaccaggagaagggagccccttcggatggaaagacatcaaggaatggtacgagatgctgatgggacattgcacctattttccagaagagctgagaagcgtcaagtacgcttataacgcagatctgtacaacgccctgaatgacctgaacaacctggtcatcaccagggatgaaaacgagaaactggaatactatgagaagttccagatcatcgaaaacgtgtttaagcagaagaaaaagcctacactgaaacagattgctaaggagatcctggtcaacgaagaggacatcaagggctaccgggtgacaagcactggaaaaccagagttcaccaatctgaaagtgtatcacgatattaaggacatcacagcacggaaagaaatcattgagaacgccgaactgctggatcagattgctaagatcctgactatctaccagagctccgaggacatccaggaagagctgactaacctgaacagcgagctgacccaggaagagatcgaacagattagtaatctgaaggggtacaccggaacacacaacctgtccctgaaagctatcaatctgattctggatgagctgtggcatacaaacgacaatcagattgcaatctttaaccggctgaagctggtcccaaaaaaggtggacctgagtcagcagaaagagatcccaaccacactggtggacgatttcattctgtcacccgtggtcaagcggagcttcatccagagcatcaaagtgatcaacgccatcatcaagaagtacggcctgcccaatgatatcattatcgagctggctagggagaagaacagcaaggacgcacagaagatgatcaatgagatgcagaaacgaaaccggcagaccaatgaacgcattgaagagattatccgaactaccgggaaagagaacgcaaagtacctgattgaaaaaatcaagctgcacgatatgcaggagggaaagtgtctgtattctctggaggccatccccctggaggacctgctgaacaatccattcaactacgaggtcgatcatattatccccagaagcgtgtccttcgacaattcctttaacaacaaggtgctggtcaagcaggaagagaactctaaaaagggcaataggactcctttccagtacctgtctagttcagattccaagatctcttacgaaacctttaaaaagcacattctgaatctggccaaaggaaagggccgcatcagcaagaccaaaaaggagtacctgctggaagagcgggacatcaacagattctccgtccagaaggattttattaaccggaatctggtggacacaagatacgctactcgcggcctgatgaatctgctgcgatcctatttccgggtgaacaatctggatgtgaaagtcaagtccatcaacggcgggttcacatcttttctgaggcgcaaatggaagtttaaaaaggagcgcaacaaagggtacaagcaccatgccgaagatgctctgattatcgcaaatgccgacttcatctttaaggagtggaaaaagctggacaaagccaagaaagtgatggagaaccagatgttcgaagagaagcaggccgaatctatgcccgaaatcgagacagaacaggagtacaaggagattttcatcactcctcaccagatcaagcatatcaaggatttcaaggactacaagtactctcaccgggtggataaaaagcccaacagagagctgatcaatgacaccctgtatagtacaagaaaagacgataaggggaataccctgattgtgaacaatctgaacggactgtacgacaaagataatgacaagctgaaaaagctgatcaacaaaagtcccgagaagctgctgatgtaccaccatgatcctcagacatatcagaaactgaagctgattatggagcagtacggcgacgagaagaacccactgtataagtactatgaagagactgggaactacctgaccaagtatagcaaaaaggataatggccccgtgatcaagaagatcaagtactatgggaacaagctgaatgcccatctggacatcacagacgattaccctaacagtcgcaacaaggtggtcaagctgtcactgaagccatacagattcgatgtctatctggacaacggcgtgtataaatttgtgactgtcaagaatctggatgtcatcaaaaaggagaactactatgaagtgaatagcaagtgctacgaagaggctaaaaagctgaaaaagattagcaaccaggcagagttcatcgcctccttttacaacaacgacctgattaagatcaatggcgaactgtatagggtcatcggggtgaacaatgatctgctgaaccgcattgaagtgaatatgattgacatcacttaccgagagtatctggaaaacatgaatgataagcgcccccctcgaattatcaaaacaattgcctctaagactcagagtatcaaaaagtactcaaccgacattctgggaaacctgtatgaggtgaagagcaaaaagcaccctcagattatcaaaaagggc

SEQ ID NO: 11 - DNA, 3159 bp, Staphylococcus aureus
atgaaaaggaactacattctggggctggacatcgggattacaagcgtggggtatgggattattgactatgaaacaagggacgtgatcgacgcaggcgtcagactgttcaaggaggccaacgtggaaaacaatgagggacggagaagcaagaggggagccaggcgcctgaaacgacggagaaggcacagaatccagagggtgaagaaactgctgttcgattacaacctgctgaccgaccattctgagctgagtggaattaatccttatgaagccagggtgaaaggcctgagtcagaagctgtcagaggaagagttttccgcagctctgctgcacctggctaagcgccgaggagtgcataacgtcaatgaggtggaagaggacaccggcaacgagctgtctacaaaggaacagatctcacgcaatagcaaagctctggaagagaagtatgtcgcagagctgcagctggaacggctgaagaaagatggcgaggtgagagggtcaattaataggttcaagacaagcgactacgtcaaagaagccaagcagctgctgaaagtgcagaaggcttaccaccagctggatcagagcttcatcgatacttatatcgacctgctggagactcggagaacctactatgagggaccaggagaagggagccccttcggatggaaagacatcaaggaatggtacgagatgctgatgggacattgcacctattttccagaagagctgagaagcgtcaagtacgcttataacgcagatctgtacaacgccctgaatgacctgaacaacctggtcatcaccagggatgaaaacgagaaactggaatactatgagaagttccagatcatcgaaaacgtgtttaagcagaagaaaaagcctacactgaaacagattgctaaggagatcctggtcaacgaagaggacatcaagggctaccgggtgacaagcactggaaaaccagagttcaccaatctgaaagtgtatcacgatattaaggacatcacagcacggaaagaaatcattgagaacgccgaactgctggatcagattgctaagatcctgactatctaccagagctccgaggacatccaggaagagctgactaacctgaacagcgagctgacccaggaagagatcgaacagattagtaatctgaaggggtacaccggaacacacaacctgtccctgaaagctatcaatctgattctggatgagctgtggcatacaaacgacaatcagattgcaatctttaaccggctgaagctggtcccaaaaaaggtggacctgagtcagcagaaagagatcccaaccacactggtggacgatttcattctgtcacccgtggtcaagcggagcttcatccagagcatcaaagtgatcaacgccatcatcaagaagtacggcctgcccaatgatatcattatcgagctggctagggagaagaacagcaaggacgcacagaagatgatcaatgagatgcagaaacgaaaccggcagaccaatgaacgcattgaagagattatccgaactaccgggaaagagaacgcaaagtacctgattgaaaaaatcaagctgcacgatatgcaggagggaaagtgtctgtattctctggaggccatccccctggaggacctgctgaacaatccattcaactacgaggtcgatcatattatccccagaagcgtgtccttcgacaattcctttaacaacaaggtgctggtcaagcaggaagaggcctctaaaaagggcaataggactcctttccagtacctgtctagttcagattccaagatctcttacgaaacctttaaaaagcacattctgaatctggccaaaggaaagggccgcatcagcaagaccaaaaaggagtacctgctggaagagcgggacatcaacagattctccgtccagaaggattttattaaccggaatctggtggacacaagatacgctactcgcggcctgatgaatctgctgcgatcctatttccgggtgaacaatctggatgtgaaagtcaagtccatcaacggcgggttcacatcttttctgaggcgcaaatggaagtttaaaaaggagcgcaacaaagggtacaagcaccatgccgaagatgctctgattatcgcaaatgccgacttcatctttaaggagtggaaaaagctggacaaagccaagaaagtgatggagaaccagatgttcgaagagaagcaggccgaatctatgcccgaaatcgagacagaacaggagtacaaggagattttcatcactcctcaccagatcaagcatatcaaggatttcaaggactacaagtactctcaccgggtggataaaaagcccaacagagagctgatcaatgacaccctgtatagtacaagaaaagacgataaggggaataccctgattgtgaacaatctgaacggactgtacgacaaagataatgacaagctgaaaaagctgatcaacaaaagtcccgagaagctgctgatgtaccaccatgatcctcagacatatcagaaactgaagctgattatggagcagtacggcgacgagaagaacccactgtataagtactatgaagagactgggaactacctgaccaagtatagcaaaaaggataatggccccgtgatcaagaagatcaagtactatgggaacaagctgaatgcccatctggacatcacagacgattaccctaacagtcgcaacaaggtggtcaagctgtcactgaagccatacagattcgatgtctatctggacaacggcgtgtataaatttgtgactgtcaagaatctggatgtcatcaaaaaggagaactactatgaagtgaatagcaagtgctacgaagaggctaaaaagctgaaaaagattagcaaccaggcagagttcatcgcctccttttacaacaacgacctgattaagatcaatggcgaactgtatagggtcatcggggtgaacaatgatctgctgaaccgcattgaagtgaatatgattgacatcacttaccgagagtatctggaaaacatgaatgataagcgcccccctcgaattatcaaaacaattgcctctaagactcagagtatcaaaaagtactcaaccgacattctgggaaacctgtatgaggtgaagagcaaaaagcaccctcagattatcaaaaagggc

SEQ ID NO: 12 - protein, 1082 aa, Neisseria meningitidis
MAAFKPNPINYILGLDIGIASVGWAMVEIDEDENPICLIDLGVRVFERAEVPKTGDSLAMARRLARSVRRLTRRRAHRLLRARRLLKREGVLQAADFDENGLIKSLPNTPWQLRAAALDRKLTPLEWSAVLLHLIKHRGYLSQRKNEGETADKELGALLKGVADNAHALQTGDFRTPAELALNKFEKESGHIRNQRGDYSHTFSRKDLQAELILLFEKQKEFGNPHVSGGLKEGIETLLMTQRPALSGDAVQKMLGHCTFEPAEPKAAKNTYTAERFIWLTKLNNLRILEQGSERPLTDTERATLMDEPYRKSKLTYAQARKLLGLEDTAFFKGLRYGKDNAEASTLMEMKAYHAISRALEKEGLKDKKSPLNLSPELQDEIGTAFSLFKTDEDITGRLKDRIQPEILEALLKHISFDKFVQISLKALRRIVPLMEQGKRYDEACAEIYGDHYGKKNTEEKIYLPPIPADEIRNPVVLRALSQARKVINGVVRRYGSPARIHIETAREVGKSFKDRKEIEKRQEENRKDREKAAAKFREYFPNFVGEPKSKDILKLRLYEQQHGKCLYSGKEINLGRLNEKGYVEIDHALPFSRTWDDSFNNKVLVLGSENQNKGNQTPYEYFNGKDNSREWQEFKARVETSRFPRSKKQRILLQKFDEDGFKERNLNDTRYVNRFLCQFVADRMRLTGKGKKRVFASNGQITNLLRGFWGLRKVRAENDRHHALDAVVVACSTVAMQQKITRFVRYKEMNAFDGKTIDKETGEVLHQKTHFPQPWEFFAQEVMIRVFGKPDGKPEFEEADTPEKLRTLLAEKLSSRPEAVHEYVTPLFVSRAPNRKMSGQGHMETVKSAKRLDEGVSVLRVPLTQLKLKDLEKMVNREREPKLYEALKARLEAHKDDPAKAFAEPFYKYDKAGNRTQQVKAVRVEQVQKTGVWVRNHNGIADNATMVRVDVFEKGDKYYLVPIYSWQVAKGILPDRAVVQGKDEEDWQLIDDSFNFKFSLHPNDLVEVITKKARMFGYFASCHRGTGNINIRIHDLDHKIGKNGILEGIGVKTALSFQKYQIDELGKEIRPCRLKKRPPVR

SEQ ID NO: 13 - DNA, 3249 bp, Neisseria meningitidis
  misc_feature (1)..(3249): Exemplary codon optimized Cas9
atggccgccttcaagcccaaccccatcaactacatcctgggcctggacatcggcatcgccagcgtgggctgggccatggtggagatcgacgaggacgagaaccccatctgcctgatcgacctgggtgtgcgcgtgttcgagcgcgctgaggtgcccaagactggtgacagtctggctatggctcgccggcttgctcgctctgttcggcgccttactcgccggcgcgctcaccgccttctgcgcgctcgccgcctgctgaagcgcgagggtgtgctgcaggctgccgacttcgacgagaacggcctgatcaagagcctgcccaacactccttggcagctgcgcgctgccgctctggaccgcaagctgactcctctggagtggagcgccgtgctgctgcacctgatcaagcaccgcggctacctgagccagcgcaagaacgagggcgagaccgccgacaaggagctgggtgctctgctgaagggcgtggccgacaacgcccacgccctgcagactggtgacttccgcactcctgctgagctggccctgaacaagttcgagaaggagagcggccacatccgcaaccagcgcggcgactacagccacaccttcagccgcaaggacctgcaggccgagctgatcctgctgttcgagaagcagaaggagttcggcaacccccacgtgagcggcggcctgaaggagggcatcgagaccctgctgatgacccagcgccccgccctgagcggcgacgccgtgcagaagatgctgggccactgcaccttcgagccagccgagcccaaggccgccaagaacacctacaccgccgagcgcttcatctggctgaccaagctgaacaacctgcgcatcctggagcagggcagcgagcgccccctgaccgacaccgagcgcgccaccctgatggacgagccctaccgcaagagcaagctgacctacgcccaggcccgcaagctgctgggtctggaggacaccgccttcttcaagggcctgcgctacggcaaggacaacgccgaggccagcaccctgatggagatgaaggcctaccacgccatcagccgcgccctggagaaggagggcctgaaggacaagaagagtcctctgaacctgagccccgagctgcaggacgagatcggcaccgccttcagcctgttcaagaccgacgaggacatcaccggccgcctgaaggaccgcatccagcccgagatcctggaggccctgctgaagcacatcagcttcgacaagttcgtgcagatcagcctgaaggccctgcgccgcatcgtgcccctgatggagcagggcaagcgctacgacgaggcctgcgccgagatctacggcgaccactacggcaagaagaacaccgaggagaagatctacctgcctcctatccccgccgacgagatccgcaaccccgtggtgctgcgcgccctgagccaggcccgcaaggtgatcaacggcgtggtgcgccgctacggcagccccgcccgcatccacatcgagaccgcccgcgaggtgggcaagagcttcaaggaccgcaaggagatcgagaagcgccaggaggagaaccgcaaggaccgcgagaaggccgccgccaagttccgcgagtacttccccaacttcgtgggcgagcccaagagcaaggacatcctgaagctgcgcctgtacgagcagcagcacggcaagtgcctgtacagcggcaaggagatcaacctgggccgcctgaacgagaagggctacgtggagatcgaccacgccctgcccttcagccgcacctgggacgacagcttcaacaacaaggtgctggtgctgggcagcgagaaccagaacaagggcaaccagaccccctacgagtacttcaacggcaaggacaacagccgcgagtggcaggagttcaaggcccgcgtggagaccagccgcttcccccgcagcaagaagcagcgcatcctgctgcagaagttcgacgaggacggcttcaaggagcgcaacctgaacgacacccgctacgtgaaccgcttcctgtgccagttcgtggccgaccgcatgcgcctgaccggcaagggcaagaagcgcgtgttcgccagcaacggccagatcaccaacctgctgcgcggcttctggggcctgcgcaaggtgcgcgccgagaacgaccgccaccacgccctggacgccgtggtggtggcctgcagcaccgtggccatgcagcagaagatcacccgcttcgtgcgctacaaggagatgaacgccttcgacggtaaaaccatcgacaaggagaccggcgaggtgctgcaccagaagacccacttcccccagccctgggagttcttcgcccaggaggtgatgatccgcgtgttcggcaagcccgacggcaagcccgagttcgaggaggccgacacccccgagaagctgcgcaccctgctggccgagaagctgagcagccgccctgaggccgtgcacgagtacgtgactcctctgttcgtgagccgcgcccccaaccgcaagatgagcggtcagggtcacatggagaccgtgaagagcgccaagcgcctggacgagggcgtgagcgtgctgcgcgtgcccctgacccagctgaagctgaaggacctggagaagatggtgaaccgcgagcgcgagcccaagctgtacgaggccctgaaggcccgcctggaggcccacaaggacgaccccgccaaggccttcgccgagcccttctacaagtacgacaaggccggcaaccgcacccagcaggtgaaggccgtgcgcgtggagcaggtgcagaagaccggcgtgtgggtgcgcaaccacaacggcatcgccgacaacgccaccatggtgcgcgtggacgtgttcgagaagggcgacaagtactacctggtgcccatctacagctggcaggtggccaagggcatcctgcccgaccgcgccgtggtgcagggcaaggacgaggaggactggcagctgatcgacgacagcttcaacttcaagttcagcctgcaccccaacgacctggtggaggtgatcaccaagaaggcccgcatgttcggctacttcgccagctgccaccgcggcaccggcaacatcaacatccgcatccacgacctggaccacaagatcggcaagaacggcatcctggagggcatcggcgtgaagaccgccctgagcttccagaagtaccagatcgacgagctgggcaaggagatccgcccctgccgcctgaagaagcgccctcctgtgcgctaa

SEQ ID NO: 14 - protein, 859 aa, Artificial Sequence
  Synthetic Cas9 consensus sequence derived from Sm, Sp, St, and Li Cas9 sequences
  misc_feature (4)..(4): Xaa can be any naturally occurring amino acid
  misc_feature (8)..(18): N-terminal RuvC-like domain
  misc_feature (21)..(21): Xaa can be any naturally occurring amino acid
  misc_feature (23)..(23): Xaa can be any naturally occurring amino acid
  misc_feature (24)..(24): Xaa can be any naturally occurring amino acid
  misc_feature (26)..(26): Xaa can be any naturally occurring amino acid
  misc_feature (29)..(31): Each Xaa can independently be any naturally occurring amino acid
  misc_feature (33)..(33): Xaa can be any naturally occurring amino acid
  misc_feature (36)..(36): Xaa can be any naturally occurring amino acid
  misc_feature (45)..(45): Xaa can be any naturally occurring amino acid
  misc_feature (54)..(54): Xaa can be any naturally occurring amino acid
  misc_feature (63)..(63): Xaa can be any naturally occurring amino acid
  misc_feature (71)..(71): Xaa can be any naturally occurring amino acid
  misc_feature (75)..(75): Xaa can be any naturally occurring amino acid
  misc_feature (76)..(76): Xaa can be any naturally occurring amino acid
  misc_feature (78)..(80): Each Xaa can independently be any naturally occurring amino acid
  misc_feature (82)..(82): Xaa can be any naturally occurring amino acid
  misc_feature (84)..(84): Xaa can be any naturally occurring amino acid
  misc_feature (85)..(85): Xaa can be any naturally occurring amino acid
  misc_feature (89)..(89): Xaa can be any naturally occurring amino acid
  misc_feature (90)..(90): Xaa can be any naturally occurring amino acid
  misc_feature (98)..(98): Xaa can be any naturally occurring amino acid
  misc_feature (100)..(100): Xaa can be any naturally occurring amino acid
  misc_feature (106)..(106): Xaa can be any naturally occurring amino acid
  misc_feature (113)..(113): Xaa can be any naturally occurring amino acid
  misc_feature (116)..(116): Xaa can be any naturally occurring amino acid
  misc_feature (125)..(125): Xaa can be any naturally occurring amino acid
  misc_feature (126)..(126): Xaa can be any naturally occurring amino acid
  misc_feature (128)..(133): Each Xaa can independently be any naturally occurring amino acid
  misc_feature (135)..(135): Xaa can be any naturally occurring amino acid
  misc_feature (137)..(137): Xaa can be any naturally occurring amino acid
  misc_feature (139)..(147): Each Xaa can independently be any naturally occurring amino acid
  misc_feature (153)..(155): Each Xaa can independently be any naturally occurring amino acid
  misc_feature (157)..(157): Xaa can be any naturally occurring amino acid
  misc_feature (159)..(159): Xaa can be any naturally occurring amino acid
  misc_feature (161)..(161): Xaa can be any naturally occurring amino acid
  misc_feature (163)..(163): Xaa can be any naturally occurring amino acid
  misc_feature (166)..(168): Each Xaa can independently be any naturally occurring amino acid
  misc_feature (170)..(170): Xaa can be any naturally occurring amino acid
  misc_feature (171)..(171): Xaa can be any naturally occurring amino acid
  misc_feature (173)..(175): Each Xaa can independently be any naturally occurring amino acid
  misc_feature (177)..(177): Xaa can be any naturally occurring amino acid
  misc_feature (183)..(183): Xaa can be any naturally occurring amino acid
  misc_feature (185)..(187): Each Xaa can independently be any naturally occurring amino acid
  misc_feature (189)..(189): Xaa can be any naturally occurring amino acid
  misc_feature (192)..(195): Each Xaa can independently be any naturally occurring amino acid
  misc_feature (198)..(198): Xaa can be any naturally occurring amino acid
  misc_feature (199)..(199): Xaa can be any naturally occurring amino acid
  misc_feature (202)..(202): Xaa can be any naturally occurring amino acid
  misc_feature (206)..(206): Xaa can be any naturally occurring amino acid
  misc_feature (207)..(207): Xaa can be any naturally occurring amino acid
  misc_feature (210)..(210): Xaa can be any naturally occurring amino acid
  misc_feature (212)..(212): Xaa can be any naturally occurring amino acid
  misc_feature (213)..(213): Xaa can be any naturally occurring amino acid
  misc_feature (219)..(219): Xaa can be any naturally occurring amino acid
  misc_feature (220)..(220): Xaa can be any naturally occurring amino acid
  misc_feature (222)..(222): Xaa can be any naturally occurring amino acid
  misc_feature (224)..(224): Xaa can be any naturally occurring amino acid
  misc_feature (226)..(226): Xaa can be any naturally occurring amino acid
  misc_feature (236)..(236): Xaa can be any naturally occurring amino acid
  misc_feature (240)..(240): Xaa can be any naturally occurring amino acid
  misc_feature (241)..(241): Xaa can be any naturally occurring amino acid
  misc_feature (244)..(246): Each Xaa can independently be any naturally occurring amino acid
  misc_feature (248)..(248): Xaa can be any naturally occurring amino acid
  misc_feature (249)..(249): Xaa can be any naturally occurring amino acid
  misc_feature (250)..(250): Xaa can be any naturally occurring amino acid
  misc_feature (252)..(254): Each Xaa can independently be any naturally occurring amino acid
  misc_feature (256)..(256): Xaa can be any naturally occurring amino acid
  misc_feature (257)..(257): Xaa can be any naturally occurring amino acid
  misc_feature (268)..(268): Xaa can be any naturally occurring amino acid
  misc_feature (271)..(271): Xaa can be any naturally occurring amino acid
  misc_feature (273)..(273): Xaa can be any naturally occurring amino acid
  misc_feature (277)..(277): Xaa can be any naturally occurring amino acid
  misc_feature (280)..(280): Xaa can be any naturally occurring amino acid
  misc_feature (281)..(281): Xaa can be any naturally occurring amino acid
  misc_feature (283)..(283): Xaa can be any naturally occurring amino acid
  misc_feature (289)..(289): Xaa can be any naturally occurring amino acid
  misc_feature (290)..(290): Xaa can be any naturally occurring amino acid
  misc_feature (292)..(294): Each Xaa can independently be any naturally occurring amino acid
  misc_feature (301)..(301): Xaa can be any naturally occurring amino acid
  misc_feature (308)..(308): Xaa can be any naturally occurring amino acid
  misc_feature (319)..(322): Each Xaa can independently be any naturally occurring amino acid
  misc_feature (328)..(328): Xaa can be any naturally occurring amino acid
  misc_feature (329)..(329): Xaa can be any naturally occurring amino acid
  misc_feature (335)..(337): Each Xaa can independently be any naturally occurring amino acid
  misc_feature (346)..(346): Xaa can be any naturally occurring amino acid
  misc_feature (347)..(347): Xaa can be any naturally occurring amino acid
  misc_feature (356)..(361): Each Xaa can independently be any naturally occurring amino acid
  misc_feature (363)..(363): Xaa can be any naturally occurring amino acid
  misc_feature (370)..(373): Each Xaa can independently be any naturally occurring amino acid
  misc_feature (375)..(375): Xaa can be any naturally occurring amino acid
  misc_feature (376)..(376): Xaa can be any naturally occurring amino acid
  misc_feature (379)..(379): Xaa can be any naturally occurring amino acid
  misc_feature (386)..(390): Each Xaa can independently be any naturally occurring amino acid
  misc_feature (393)..(393): Xaa can be any naturally occurring amino acid
  misc_feature (395)..(395): Xaa can be any naturally occurring amino acid
  misc_feature (396)..(396): Xaa can be any naturally occurring amino acid
  misc_feature (398)..(398): Xaa can be any naturally occurring amino acid
  misc_feature (400)..(400): Xaa can be any naturally occurring amino acid
  misc_feature (403)..(403): Xaa can be any naturally occurring amino acid
  misc_feature (407)..(407): Xaa can be any naturally occurring amino acid
  misc_feature (410)..(410): Xaa can be any naturally occurring amino acid
  misc_feature (411)..(411): Xaa can be any naturally occurring amino acid
  misc_feature (413)..(416): Each Xaa can independently be any naturally occurring amino acid
  misc_feature (418)..(418): Xaa can be any naturally occurring amino acid
  misc_feature (422)..(422): Xaa can be any naturally occurring amino acid
  misc_feature (428)..(428): Xaa can be any naturally occurring amino acid
  misc_feature (431)..(431): Xaa can be any naturally occurring amino acid
  misc_feature (433)..(433): Xaa can be any naturally occurring amino acid
  misc_feature (437)..(439): Each Xaa can independently be any naturally occurring amino acid
  misc_feature (445)..(445): Xaa can be any naturally occurring amino acid
  misc_feature (451)..(451): Xaa can be any naturally occurring amino acid
  misc_feature (456)..(456): Xaa can be any naturally occurring amino acid
  misc_feature (459)..(459): Xaa can be any naturally occurring amino acid
  misc_feature (465)..(469): Each Xaa can independently be any naturally occurring amino acid
  misc_feature (481)..(481): Xaa can be any naturally occurring amino acid
  misc_feature (482)..(482): Xaa can be any naturally occurring amino acid
  misc_feature (484)..(484): Xaa can be any naturally occurring amino acid
  misc_feature (490)..(490): Xaa can be any naturally occurring amino acid
  misc_feature (494)..(494): Xaa can be any naturally occurring amino acid
  misc_feature (495)..(502): RuvC-like domain
  misc_feature (497)..(497): Xaa can be any naturally occurring amino acid
  misc_feature (506)..(506): Xaa can be any naturally occurring amino acid
  misc_feature (510)..(510): Xaa can be any naturally occurring amino acid
  misc_feature (513)..(513): Xaa can be any naturally occurring amino acid
  misc_feature (514)..(514): Xaa can be any naturally occurring amino acid
  misc_feature (517)..(517): Xaa can be any naturally occurring amino acid
  misc_feature (520)..(520): Xaa can be any naturally occurring amino acid
  misc_feature (525)..(525): Xaa can be any naturally occurring amino acid
  misc_feature (526)..(526): Xaa can be any naturally occurring amino acid
  misc_feature (529)..(529): Xaa can be any naturally occurring amino acid
  misc_feature (531)..(531): Xaa can be any naturally occurring amino acid
  misc_feature (532)..(532): Xaa can be any naturally occurring amino acid
  misc_feature (534)..(534): Xaa can be any naturally occurring amino acid
  misc_feature (542)..(542): Xaa can be any naturally occurring amino acid
  misc_feature (546)..(546): Xaa can be any naturally occurring amino acid
  misc_feature (547)..(547): Xaa can be any naturally occurring amino acid
  misc_feature (553)..(553): Xaa can be any naturally occurring amino acid
  misc_feature (555)..(575): HNH-like domain
  misc_feature (556)..(556): Xaa can be any naturally occurring amino acid
  misc_feature (560)..(560): Xaa can be any naturally occurring amino acid
  misc_feature (563)..(563): Xaa can be any naturally occurring amino acid
  misc_feature (565)..(565): Xaa can be any naturally occurring amino acid
  misc_feature (567)..(567): Xaa can be any naturally occurring amino acid
  misc_feature (579)..(579): Xaa can be any naturally occurring amino acid
  misc_feature (582)..(582): Xaa can be any naturally occurring amino acid
  misc_feature (583)..(583): Xaa can be any naturally occurring amino acid
  misc_feature (585)..(585): Xaa can be any naturally occurring amino acid
  misc_feature (588)..(588): Xaa can be any naturally occurring amino acid
  misc_feature (590)..(590): Xaa can be any naturally occurring amino acid
  misc_feature (592)..(592): Xaa can be any naturally occurring amino acid
  misc_feature (594)..(596): Each Xaa can independently be any naturally occurring amino acid
  misc_feature (610)..(610): Xaa can be any naturally occurring amino acid
  misc_feature (616)..(616): Xaa can be any naturally occurring amino acid
  misc_feature (628)..(628): Xaa can be any naturally occurring amino acid
  misc_feature (631)..(631): Xaa can be any naturally occurring amino acid
  misc_feature (633)..(633): Xaa can be any naturally occurring amino acid
  misc_feature (634)..(634): Xaa can be any naturally occurring amino acid
  misc_feature (636)..(636): Xaa can be any naturally occurring amino acid
  misc_feature (638)..(641): Each Xaa can independently be any naturally occurring amino acid
  misc_feature (643)..(645): Each Xaa can independently be any naturally occurring amino acid
  misc_feature (653)..(653): Xaa can be any naturally occurring amino acid
  misc_feature (657)..(657): Xaa can be any naturally occurring amino acid
  misc_feature (659)..(659): Xaa can be any naturally occurring amino acid
  misc_feature (660)..(660): Xaa can be any naturally occurring amino acid
  misc_feature (665)..(665): Xaa can be any naturally occurring amino acid
  misc_feature (666)..(666): Xaa can be any naturally occurring amino acid
  misc_feature (668)..(668): Xaa can be any naturally occurring amino acid
  misc_feature (669)..(669): Xaa can be any naturally occurring amino acid
  misc_feature (670)..(677): RuvC-like domain
  misc_feature (680)..(680): Xaa can be any naturally occurring amino acid
  misc_feature (681)..(681): Xaa can be any naturally occurring amino acid
  misc_feature (683)..(683): Xaa can be any naturally occurring amino acid
  misc_feature (686)..(686): Xaa can be any naturally occurring amino acid
  misc_feature (696)..(696): Xaa can be any naturally occurring amino acid
  misc_feature (697)..(697): Xaa can be any naturally occurring amino acid
  misc_feature (704)..(704): Xaa can be any naturally occurring amino acid
  misc_feature (708)..(708): Xaa can be any naturally occurring amino acid
  misc_feature (710)..(710): Xaa can be any naturally occurring amino acid
  misc_feature (711)..(711): Xaa can be any naturally occurring amino acid
  misc_feature (714)..(714): Xaa can be any naturally occurring amino acid
  misc_feature (717)..(720): Each Xaa can independently be any naturally occurring amino acid
  misc_feature (722)..(722): Xaa can be any naturally occurring amino acid
  misc_feature (725)..(725): Xaa can be any naturally occurring amino acid
  misc_feature (727)..(727): Xaa can be any naturally occurring amino acid
  misc_feature (733)..(735): Each Xaa can independently be any naturally occurring amino acid
  misc_feature (740)..(740): Xaa can be any naturally occurring amino acid
  misc_feature (742)..(742): Xaa can be any naturally occurring amino acid
  misc_feature (749)..(754): Each Xaa can independently be any naturally occurring amino acid
  misc_feature (758)..(761): Each Xaa can independently be any naturally occurring amino acid
  misc_feature (763)..(768): Each Xaa can independently be any naturally occurring amino acid
  misc_feature (771)..(771): Xaa can be any naturally occurring amino acid
  misc_feature (774)..(777): Each Xaa can independently be any naturally occurring amino acid
  misc_feature (782)..(782): Xaa can be any naturally occurring amino acid
  misc_feature (784)..(786): Each Xaa can independently be any naturally occurring amino acid
  misc_feature (788)..(788): Xaa can be any naturally occurring amino acid
  misc_feature (790)..(790): Xaa can be any naturally occurring amino acid
  misc_feature (795)..(795): Xaa can be any naturally occurring amino acid
  misc_feature (799)..(799): Xaa can be any naturally occurring amino acid
  misc_feature (801)..(801): Xaa can be any naturally occurring amino acid
  misc_feature (802)..(802): Xaa can be any naturally occurring amino acid
  misc_feature (804)..(804): Xaa can be any naturally occurring amino acid
  misc_feature (806)..(813): Each Xaa can independently be any naturally occurring amino acid
  misc_feature (815)..(818): Each Xaa can independently be any naturally occurring amino acid
  misc_feature (820)..(820): Xaa can be any naturally occurring amino acid
  misc_feature (823)..(827): Each Xaa can independently be any naturally occurring amino acid
  misc_feature (829)..(829): Xaa can be any naturally occurring amino acid
  misc_feature (830)..(830): Xaa can be any naturally occurring amino acid
  misc_feature (832)..(832): Xaa can be any naturally occurring amino acid
  misc_feature (835)..(837): Each Xaa can independently be any naturally occurring amino acid
  misc_feature (842)..(844): Each Xaa can independently be any naturally occurring amino acid
  misc_feature (846)..(846): Xaa can be any naturally occurring amino acid
  misc_feature (848)..(848): Xaa can be any naturally occurring amino acid
  misc_feature (851)..(851): Xaa can be any naturally occurring amino acid
  misc_feature (857)..(857): Xaa can be any naturally occurring amino acid
  misc_feature (857)..(857): Xaa can be any naturally occurring amino acid
MKYXIGLDIGTNSVGWAVTDXYXXKXKGXXXIXKNXGLFDGTARXRTARRRRRXNRIYLQIFXEMDFFRLXSFVXXKXXXPXFXXEYHXXPTIYHLRXLXKDLRLXYLALAHXIKXRGNFLIEGXXNXXXXXXYXFXIXXXXXXXXXPEKGFXXXLXGXFXFXLEXXXKXXYXXXLXLLIGDXYXXXFXAKXXXXLSXXVTXALSXXMIXRXXHDLLKXXYXEXFXKGYAGYIDGXQFYXXKLXXXGXXXKXXXEXXLRKQRTFDNGXIPXQXHLEXAIXXQXYPFLNXXIXXXTFRIPYXVGPLAGXSFAWRKIPWNXXXXDSAFIXXMTDLPXXXVLPKHSLYXXVYNELTKVXXXXXXKXIFKRKVXXXXGXXFNXSTYHDLXXXXXLDXNXXEXIXLTXFEDXMIXXLXXXXKXLRRXYTGWGXLSXLXGIRXXXSTILDXLDNRNXMQLIXDLXFKIKQXXXXXGSPAIKKGILQXXKXVDELVXMGPXIVXEMARENQTXGNSXRKXXKEXGSXILKEXXNLXNXXLXLYYLQNGXDMYXXLDILSXYDXDHIXPQXFXDXSIDNVLSNRKDXVPXXVXKKXWXLXLXXXRKFDLTKAERGGLXDKAFIXRQLVETRQITKXVAXLXXNXDXXXXVXXXTLKSLVSXFRKXFXXLYKVXXNXXHHAHDAYLNVXXLXYPXLEEFVYGDYXXKATKFYXNIMXFXXGEXWKXXXXVXMQXNXVKKEQXXXPKNSXLXKDKYGGXXXXXXKGKXXXXIXXXXXXFLXGYXXXXLPKYXLXXXGXRXLASEXKGNXLXXLXAXXXXXXXXEXXXXFXANXXXXXLXXGXAFXXXIRRYXXXTXIXQSXTGLYEXRL

SEQ ID NO: 15 - protein, 8 aa, Artificial Sequence
  RuvC-like domain
  VARIANT (2)..(2): Xaa is Val or His
  VARIANT (3)..(3): Xaa is Ile, Leu, or Val
  VARIANT (5)..(5): Xaa is Met or Thr
IXXEXARE

SEQ ID NO: 16 - protein, 8 aa, Artificial Sequence
  RuvC-like domain
  VARIANT (3)..(3): Xaa is Ile, Leu, or Val
IVXEMARE

SEQ ID NO: 17 - protein, 8 aa, Artificial Sequence
  RuvC-like domain
  VARIANT (4)..(4): Xaa is His or Leu
  VARIANT (7)..(7): Xaa is Arg or Val
  VARIANT (8)..(8): Xaa is Glu or Val
HHAXDAXX

SEQ ID NO: 18 - protein, 8 aa, Artificial Sequence
  RuvC-like domain
HHAHDAYL

SEQ ID NO: 19 - protein, 30 aa, Artificial Sequence
  N-terminal RuvC-like domain
  VARIANT (2)..(2): Xaa is Lys or Pro
  VARIANT (4)..(4): Xaa is Val, Leu, Ile, or Phe
  VARIANT (5)..(5): Xaa is Gly, Ala, or Ser
  VARIANT (6)..(6): Xaa is Leu, Ile, Val, or Phe
  MOD_RES (7)..(26): N-terminal RuvC-like domain, each Xaa can be any amino acid or absent, region may encompass 5-20 residues
  VARIANT (29)..(29): Xaa is Asp, Glu, Asn, or Gln
KXYXXXXXXXXXXXXXXXXXXXXXXXTDXY

SEQ ID NO: 20 - protein, 12 aa, Artificial Sequence
  N-terminal RuvC-like domain
  VARIANT (2)..(2): Xaa is Ile, Val, Met, Leu, or Thr
  VARIANT (4)..(4): Xaa is Thr, Ile, Val, Ser, Asn, Tyr, Glu, or Leu
  VARIANT (5)..(5): Xaa is Asn, Ser, Gly, Ala, Asp, Thr, Arg, Met, or Phe
  VARIANT (6)..(6): Xaa is Ser, Tyr, Asn, or Phe
  VARIANT (7)..(7): Xaa is Val, Ile, Leu, Cys, Thr, or Phe
  VARIANT (9)..(9): Xaa is Trp, Phe, Val, Tyr, Ser, or Leu
  VARIANT (10)..(10): Xaa is Ala, Ser, Cys, Val, or Gly
  VARIANT (11)..(11): Xaa is Val, Ile, Leu, Ala, Met, or His
  VARIANT (12)..(12): Any amino acid or absent
DXGXXXXGXXXX

SEQ ID NO: 21 - protein, 12 aa, Artificial Sequence
  N-terminal RuvC-like domain
  VARIANT (2)..(2): Xaa is Ile, Val, Met, Leu, or Thr
  VARIANT (4)..(4): Xaa is Thr, Ile, Val, Ser, Asn, Tyr, Glu, or Leu
  VARIANT (5)..(5): Xaa is Asn, Ser, Gly, Ala, Asp, Thr, Arg, Met, or Phe
  VARIANT (7)..(7): Xaa is Val, Ile, Leu, Cys, Thr, or Phe
  VARIANT (9)..(9): Xaa is Trp, Phe, Val, Tyr, Ser, or Leu
  VARIANT (10)..(10): Xaa is Ala, Ser, Cys, Val, or Gly
  VARIANT (11)..(11): Xaa is Val, Ile, Leu, Ala, Met, or His
  VARIANT (12)..(12): Any amino acid or absent
DXGXXSXGXXXX

SEQ ID NO: 22 - protein, 12 aa, Artificial Sequence
  N-terminal RuvC-like domain
  VARIANT (4)..(4): Xaa is Thr, Ile, Val, Ser, Asn, Tyr, Glu, or Leu
  VARIANT (5)..(5): Xaa is Asn, Ser, Gly, Ala, Asp, Thr, Arg, Met, or Phe
  VARIANT (11)..(11): Xaa is Val, Ile, Leu, Ala, Met, or His
  VARIANT (12)..(12): Any amino acid or absent
DIGXXSVGWAXX

SEQ ID NO: 23 - protein, 12 aa, Artificial Sequence
  N-terminal RuvC-like domain
  MOD_RES (12)..(12): Any non-polar alkyl amino acid or a hydroxyl amino acid
DIGTNSVGWAVX

SEQ ID NO: 24 - protein, 73 aa, Artificial Sequence
  HNH-like domain
  VARIANT (8)..(8): Xaa is Lys or Arg
  VARIANT (12)..(12): Xaa is Val or Thr
  VARIANT (13)..(13): Xaa is Gly or Asp
  VARIANT (14)..(14): Xaa is Glu, Gln, or Asp
  VARIANT (15)..(15): Xaa is Glu or Asp
  VARIANT (19)..(19): Xaa is Asp, Asn, or His
  VARIANT (20)..(20): Xaa is Tyr, Arg, or Asn
  VARIANT (23)..(23): Xaa is Gln, Asp, or Asn
  MOD_RES (25)..(64): HNH-like domain, each Xaa can be any amino acid or absent, region may encompass 15-40 residues
  VARIANT (67)..(67): Xaa is Gly or Glu
  VARIANT (69)..(69): Xaa is Ser or Gly
  VARIANT (71)..(71): Xaa is Asp or Asn
LYYLQNGXDMYXXXXLDIXXLSXYXXXXXXXXXXXXXXXXXXXXXXXXXXXXXXXXXXXXXXXXNRXKXDXVP

SEQ ID NO: 25 - protein, 27 aa, Artificial Sequence
  HNH-like domain
  VARIANT (1)..(1): Xaa is Asp, Glu, Gln, or Asn
  VARIANT (2)..(2): Xaa is Leu, Ile, Arg, Gln, Val, Met, or Lys
  VARIANT (3)..(3): Xaa is Asp or Glu
  VARIANT (5)..(5): Xaa is Ile, Val, Thr, Ala, or Leu
  VARIANT (6)..(6): Xaa is Val, Tyr, Ile, Leu, Phe, or Trp
  VARIANT (8)..(8): Xaa is Gln, His, Arg, Lys, Tyr, Ile, Leu, Phe, or Trp
  VARIANT (9)..(9): Xaa is Ser, Ala, Asp, Thr, or Lys
  VARIANT (10)..(10): Xaa is Phe, Leu, Val, Lys, Tyr, Met, Ile, Arg, Ala, Glu, Asp, or Gln
  VARIANT (11)..(11): Xaa is Leu, Arg, Thr, Ile, Val, Ser, Cys, Tyr, Lys, Phe, or Gly
  VARIANT (12)..(12): Xaa is Lys, Gln, Tyr, Thr, Phe, Leu, Trp, Met, Ala, Glu, Gly, or Ser
  VARIANT (13)..(13): Xaa is Asp, Ser, Asn, Arg, Leu, or Thr
  VARIANT (14)..(14): Xaa is Asp, Asn, or Ser
  VARIANT (15)..(15): Xaa is Ser, Ala, Thr, Gly, or Arg
  VARIANT (16)..(16): Xaa is Ile, Leu, Phe, Ser, Arg, Tyr, Gln, Trp, Asp, Lys, or His
  VARIANT (17)..(17): Xaa is Asp, Ser, Ile, Asn, Glu, Ala, His, Phe, Leu, Gln, Met, Gly, Tyr, or Val
  VARIANT (19)..(19): Xaa is Lys, Leu, Arg, Met, Thr, or Phe
  VARIANT (20)..(20): Xaa is Val, Leu, Ile, Ala, or Thr
  VARIANT (21)..(21): Xaa is Leu, Ile, Val, or Ala
  VARIANT (22)..(22): Xaa is Thr, Val, Cys, Glu, Ser, or Ala
  VARIANT (23)..(23): Xaa is Arg, Phe, Thr, Trp, Glu, Leu, Asn, Cys, Lys, Val, Ser, Gln, Ile, Tyr, His, or Ala
  VARIANT (24)..(24): Xaa is Ser, Pro, Arg, Lys, Asn, Ala, His, Gln, Gly, or Leu
  VARIANT (25)..(25): Xaa is Asp, Gly, Thr, Asn, Ser, Lys, Ala, Ile, Glu, Leu, Gln, Arg, or Tyr
  VARIANT (26)..(26): Xaa is Lys, Val, Ala, Glu, Tyr, Ile, Cys, Leu, Ser, Thr, Gly, Lys, Met, Asp, or Phe
XXXHXXPXXXXXXXXXXNXXXXXXXXN

SEQ ID NO: 26 - protein, 27 aa, Artificial Sequence
  HNH-like domain
  VARIANT (1)..(1): Xaa is Asp or Glu
  VARIANT (2)..(2): Xaa is Leu, Ile, Arg, Gln, Val, Met, or Lys
  VARIANT (3)..(3): Xaa is Asp or Glu
  VARIANT (5)..(5): Xaa is Ile, Val, Thr, Ala, or Leu
  VARIANT (6)..(6): Xaa is Val, Tyr, Ile, Leu, Phe, or Trp
  VARIANT (8)..(8): Xaa is Gln, His, Arg, Lys, Tyr, Ile, Leu, Phe, or Trp
  VARIANT (10)..(10): Xaa is Phe, Leu, Val, Lys, Tyr, Met, Ile, Arg, Ala, Glu, Asp, or Gln
  VARIANT (11)..(11): Xaa is Leu, Arg, Thr, Ile, Val, Ser, Cys, Tyr, Lys, Phe, or Gly
  VARIANT (12)..(12): Xaa is Lys, Gln, Tyr, Thr, Phe, Leu, Trp, Met, Ala, Glu, Gly, or Ser
  VARIANT (16)..(16): Xaa is Ile, Leu, Phe, Ser, Arg, Tyr, Gln, Trp, Asp, Lys, or His
  VARIANT (17)..(17): Xaa is Asp, Ser, Ile, Asn, Glu, Ala, His, Phe, Leu, Gln, Met, Gly, Tyr, or Val
  VARIANT (22)..(22): Xaa is Thr, Val, Cys, Glu, Ser, or Ala
  VARIANT (23)..(23): Xaa is Arg, Phe, Thr, Trp, Glu, Leu, Asn, Cys, Lys, Val, Ser, Gln, Ile, Tyr, His, or Ala
  VARIANT (24)..(24): Xaa is Ser, Pro, Arg, Lys, Asn, Ala, His, Gln, Gly, or Leu
  VARIANT (25)..(25): Xaa is Asp, Gly, Thr, Asn, Ser, Lys, Ala, Ile, Glu, Leu, Gln, Arg, or Tyr
  VARIANT (26)..(26): Xaa is Lys, Val, Ala, Glu, Tyr, Ile, Cys, Leu, Ser, Thr, Gly, Lys, Met, Asp, or Phe
XXXHXXPXSXXXDDSXXNKVLXXXXXN

SEQ ID NO: 27 - protein, 27 aa, Artificial Sequence
  HNH-like domain
  VARIANT (1)..(1): Xaa is Asp or Glu
  VARIANT (3)..(3): Xaa is Asp or Glu
  VARIANT (8)..(8): Xaa is Gln, His, Arg, Lys, Tyr, Ile, Leu, or Trp
  VARIANT (10)..(10): Xaa is Phe, Leu, Val, Lys, Tyr, Met, Ile, Arg, Ala, Glu, Asp, or Gln
  VARIANT (11)..(11): Xaa is Leu, Arg, Thr, Ile, Val, Ser, Cys, Tyr, Lys, Phe, or Gly
  VARIANT (12)..(12): Xaa is Lys, Gln, Tyr, Thr, Phe, Leu, Trp, Met, Ala, Glu, Gly, or Ser
  VARIANT (16)..(16): Xaa is Ile, Leu, Phe, Ser, Arg, Tyr, Gln, Trp, Asp, Lys, or His
  VARIANT (17)..(17): Xaa is Asp, Ser, Ile, Asn, Glu, Ala, His, Phe, Leu, Gln, Met, Gly, Tyr, or Val
  VARIANT (23)..(23): Xaa is Arg, Phe, Thr, Trp, Glu, Leu, Asn, Cys, Lys, Val, Ser, Gln, Ile, Tyr, His, or Ala
  VARIANT (24)..(24): Xaa is Ser, Pro, Arg, Lys, Asn, Ala, His, Gln, Gly, or Leu
  VARIANT (25)..(25): Xaa is Asp, Gly, Thr, Asn, Ser, Lys, Ala, Ile, Glu, Leu, Gln, Arg, or Tyr
  VARIANT (26)..(26): Xaa is Lys, Val, Ala, Glu, Tyr, Ile, Cys, Leu, Ser, Thr, Gly, Lys, Met, Asp, or Phe
XVXHIVPXSXXXDDSXXNKVLTXXXXN

SEQ ID NO: 28 - protein, 27 aa, Artificial Sequence
  HNH-like domain
  VARIANT (2)..(2): Xaa is Ile or Val
  VARIANT (6)..(6): Xaa is Ile or Val
  VARIANT (9)..(9): Xaa is Ala or Ser
  VARIANT (11)..(11): Xaa is Ile or Leu
  VARIANT (12)..(12): Xaa is Lys or Thr
  VARIANT (14)..(14): Xaa is Asp or Asn
  VARIANT (19)..(19): Xaa is Arg, Lys, or Leu
  VARIANT (22)..(22): Xaa is Thr or Val
  VARIANT (23)..(23): Xaa is Ser or Arg
  VARIANT (25)..(25): Xaa is Lys, Asp, or Ala
  VARIANT (26)..(26): Xaa is Glu, Lys, Gly, or Asn
DXDHIXPQXFXXDXSIDNXVLXXSXXN

SEQ ID NO: 29 - RNA, 116 nt, Artificial Sequence
  gRNA
  misc_feature (1)..(20): a, c, u, g, unknown or other
  misc_feature (1)..(20): targeting region
  misc_feature (21)..(42): first complementarity domain
  misc_feature (43)..(46): linking domain
  misc_feature (47)..(70): second complementarity domain
nnnnnnnnnnnnnnnnnnnnguuuuagagcuaugcuguuuuggaaacaaaacagcauagcaaguuaaaauaaggcuaguccguuaucaacuugaaaaaguggcaccgagucggugc

SEQ ID NO: 30 - RNA, 116 nt, Artificial Sequence
  gRNA
  misc_feature (1)..(20): a, c, u, g, unknown or other
  misc_feature (1)..(20): targeting region
  misc_feature (21)..(42): first complementarity domain
  misc_feature (43)..(46): linking domain
  misc_feature (47)..(70): second complementarity domain
nnnnnnnnnnnnnnnnnnnnguauuagagcuaugcuguauuggaaacaauacagcauagcaaguuaauauaaggcuaguccguuaucaacuugaaaaaguggcaccgagucggugc

SEQ ID NO: 31 - RNA, 96 nt, Artificial Sequence
  gRNA
  misc_feature (1)..(20): a, c, u, g, unknown or other
  misc_feature (1)..(20): targeting domain
  misc_feature (21)..(32): first complementarity domain
  misc_feature (33)..(36): linking domain
  misc_feature (37)..(50): second complementarity domain
  misc_feature (51)..(62): proximal domain
nnnnnnnnnnnnnnnnnnnnguuuaagagcuagaaauagcaaguuuaaauaaggcuaguccguuaucaacuugaaaaaguggcaccgagucggugc

SEQ ID NO: 32 - RNA, 47 nt, Artificial Sequence
  gRNA proximal and tail domains derived from S. pyogenes
aaggcuaguccguuaucaacuugaaaaaguggcaccgagucggugcu

SEQ ID NO: 33 - RNA, 49 nt, Artificial Sequence
  gRNA proximal and tail domains
aaggcuaguccguuaucaacuugaaaaaguggcaccgagucgguggugc

SEQ ID NO: 34 - RNA, 51 nt, Artificial Sequence
  gRNA proximal and tail domains
aaggcuaguccguuaucaacuugaaaaaguggcaccgagucggugcggauc

SEQ ID NO: 35 - RNA, 31 nt, Artificial Sequence
  gRNA proximal and tail domains
aaggcuaguccguuaucaacuugaaaaagug

SEQ ID NO: 36 - RNA, 18 nt, Artificial Sequence
  gRNA proximal and tail domains
aaggcuaguccguuauca

SEQ ID NO: 37 - RNA, 12 nt, Artificial Sequence
  gRNA proximal and tail domains
aaggcuaguccg

SEQ ID NO: 38 - RNA, 102 nt, Artificial Sequence
  Unimolecular gRNA derived from S. aureus
  misc_feature (1)..(20): n is a, c, g, or u
  misc_feature (1)..(20): Targeting domain
nnnnnnnnnnnnnnnnnnnnguuuuaguacucuggaaacagaaucuacuaaaacaaggcaaaaugccguguuuaucucgucaacuuguuggcgagauuuuuu

SEQ ID NO: 39 - RNA, 42 nt, Artificial
  Modular gRNA derived from S. pyogenes
  misc_feature (1)..(20): a, c, u, g, unknown or other
  misc_feature (1)..(20): Targeting domain
  misc_feature (21)..(42): First complementarity domain
nnnnnnnnnnnnnnnnnnnnguuuuagagcuaugcuguuuug

SEQ ID NO: 40 - RNA, 85 nt, Artificial Sequence
  Modular gRNA derived from S. pyogenes
  misc_feature (1)..(9): 5' extension domain
  misc_feature (10)..(33): Second complementarity domain
  misc_feature (34)..(45): Proximal domain
  misc_feature (46)..(85): Tail domain
ggaaccauucaaaacagcauagcaaguuaaaauaaggcuaguccguuaucaacuugaaaaaguggcaccgagucggugcuuuuuu

SEQ ID NO: 41 - RNA, 62 nt, Artificial Sequence
  Unimolecular gRNA derived from S. pyogenes
  misc_feature (1)..(20): a, c, u, g, unknown or other
  misc_feature (1)..(20): Targeting domain
  misc_feature (21)..(32): First complementarity domain
  misc_feature (33)..(36): Linking domain
  misc_feature (37)..(50): Second complementarity domain
  misc_feature (51)..(62): Proximal domain
nnnnnnnnnnnnnnnnnnnnguuuuagagcuagaaauagcaaguuaaaauaaggcuaguccg

SEQ ID NO: 42 - RNA, 102 nt, Artificial Sequence
  Unimolecular gRNA derived from S. pyogenes
  misc_feature (1)..(20): a, c, u, g, unknown or other
  misc_feature (1)..(20): Targeting domain
  misc_feature (21)..(32): First complementarity domain
  misc_feature (33)..(36): Linking domain
  misc_feature (37)..(50): Second complementarity domain
  misc_feature (51)..(62): Proximal domain
  misc_feature (63)..(102): Tail domain
nnnnnnnnnnnnnnnnnnnnguuuuagagcuagaaauagcaaguuaaaauaaggcuaguccguuaucaacuugaaaaaguggcaccgagucggugcuuuuuu

SEQ ID NO: 43 - RNA, 75 nt, Artificial Sequence
  Unimolecular gRNA derived from S. pyogenes
  misc_feature (1)..(20): Targeting domain
  misc_feature (1)..(20): a, c, u, g, unknown or other
  misc_feature (21)..(36): First complementarity domain
  misc_feature (37)..(40): Linking domain
  misc_feature (41)..(58): Second complementarity domain
  misc_feature (59)..(70): Proximal domain
  misc_feature (71)..(75): Tail domain
nnnnnnnnnnnnnnnnnnnnguuuuagagcuaugcugaaaagcauagcaaguuaaaauaaggcuaguccguuauc

SEQ ID NO: 44 - RNA, 87 nt, Artificial Sequence
  Unimolecular gRNA derived from S. pyogenes
  misc_feature (1)..(20): a, c, u, g, unknown or other
  misc_feature (1)..(20): Targeting domain
  misc_feature (21)..(32): First complementarity domain
  misc_feature (43)..(46): Linking domain
  misc_feature (57)..(70): Second complementarity domain
  misc_feature (71)..(82): Proximal domain
  misc_feature (83)..(87): Tail domain
nnnnnnnnnnnnnnnnnnnnguuuuagagcuaugcuguuuuggaaacaaaacagcauagcaaguuaaaauaaggcuaguccguuauc

SEQ ID NO: 45 - RNA, 42 nt, Artificial Sequence
  Modular gRNA derived from S. thermophilus
  misc_feature (1)..(20): a, c, u, g, unknown or other
  misc_feature (1)..(20): Targeting domain
  misc_feature (21)..(42): First complementarity domain
nnnnnnnnnnnnnnnnnnnnguuuuagagcuguguuguuucg

SEQ ID NO: 46 - RNA, 78 nt, Artificial Sequence
  Modular gRNA derived from S. thermophilus
  misc_feature (1)..(3): 5' extension domain
  misc_feature (4)..(27): Second complementarity domain
  misc_feature (28)..(40): Proximal domain
  misc_feature (41)..(78): Tail domain
gggcgaaacaacacagcgaguuaaaauaaggcuuaguccguacucaacuugaaaagguggcaccgauucgguguuuuu

SEQ ID NO: 47 - RNA, 85 nt, Artificial Sequence
  Modular gRNA derived from S. pyogenes
gaaccauucaaaacagcauagcaaguuaaaauaaggcuaguccguuaucaacuugaaaaaguggcaccgagucggugcuuuuuuu

SEQ ID NO: 48 - RNA, 96 nt, Artificial Sequence
  gRNA from S. pyogenes
  misc_feature (1)..(20): n is a, c, g, or u
  misc_feature (1)..(20): Targeting domain
nnnnnnnnnnnnnnnnnnnnguuuuagagcuagaaauagcaaguuaaaauaaggcuaguccguuaucaacuugaaaaaguggcaccgagucggugc

SEQ ID NO: 49 - RNA, 96 nt, Artificial Sequence
  gRNA
  misc_feature (1)..(20): n is a, c, g, or u
  misc_feature (1)..(20): Targeting domain
  misc_feature (21)..(32): First complementarity domain
  misc_feature (33)..(36): Linking domain
  misc_feature (37)..(50): Second complementarity domain
  misc_feature (51)..(62): Proximal domain
nnnnnnnnnnnnnnnnnnnnguauuagagcuagaaauagcaaguuaauauaaggcuaguccguuaucaacuugaaaaaguggcaccgagucggugc

SEQ ID NO: 50 - RNA, 104 nt, Artificial Sequence
  gRNA
  misc_feature (1)..(20): n is a, c, g, or u
  misc_feature (1)..(20): Targeting domain
  misc_feature (21)..(36): First complementarity domain
  misc_feature (37)..(40): Linking domain
  misc_feature (41)..(58): Second complementarity domain
nnnnnnnnnnnnnnnnnnnnguuuuagagcuaugcugaaaagcauagcaaguuaaaauaaggcuaguccguuaucaacuugaaaaaguggcaccgagucggugc

SEQ ID NO: 51 - RNA, 106 nt, Artificial Sequence
  gRNA
  misc_feature (1)..(20): n is a, c, g, or u
  misc_feature (1)..(20): Targeting domain
  misc_feature (21)..(37): First complementarity domain
  misc_feature (38)..(41): Linking domain
  misc_feature (42)..(60): Second complementarity domain
nnnnnnnnnnnnnnnnnnnnguuuuagagcuaugcuggaaacagcauagcaaguuaaaauaaggcuaguccguuaucaacuugaaaaaguggcaccgagucggugc

SEQ ID NO: 52 - protein, 12 aa, Peptoniphilus duerdenii
DIGTASVGWAVT

SEQ ID NO: 53 - protein, 12 aa, Treponema denticola
DVGTGSVGWAVT

SEQ ID NO: 54 - protein, 12 aa, S. mutans
DIGTNSVGWAVV

SEQ ID NO: 55 - protein, 12 aa, S. pyogenes
DIGTNSVGWAVI

SEQ ID NO: 56 - protein, 12 aa, L. innocua
DIGTNSVGWAVL

SEQ ID NO: 57 - protein, 12 aa, Flavobacterium branchiophilum FL-15
DLGTNSIGWAVV

SEQ ID NO: 58 - protein, 11 aa, Artificial Sequence
  N-terminal RuvC-like domain
DLGTNSIGWAI

SEQ ID NO: 59 - protein, 12 aa, Bacteroides fragilis, NCTC 9343
DLGTNSIGWALV

SEQ ID NO: 60 - protein, 12 aa, Fusobacterium nucleatum
DIGTNSVGWCVT

SEQ ID NO: 61 - protein, 12 aa, Acidaminococcus sp. D21
DIGTNSVGYAVT

SEQ ID NO: 62 - protein, 12 aa, Coprococcus catus GD-7
DMGTGSLGWAVT

SEQ ID NO: 63 - protein, 12 aa, Oenococcus kitaharae DSM 17330
DIGTSSVGWAAI

SEQ ID NO: 64 - protein, 12 aa, Catenibacterium mitsuokai DSM 15897
DLGTGSVGWAVV

SEQ ID NO: 65 - protein, 12 aa, Mycoplasma gallisepticum str. F
DLGVGSVGWAIV

SEQ ID NO: 66 - protein, 12 aa, Mycoplasma ovipneumoniae SC01
DLGIASIGWAII

SEQ ID NO: 67 - protein, 12 aa, Mycoplasma canis PG 14
DLGIASVGWAIV

SEQ ID NO: 68 - protein, 12 aa, Mycoplasma synoviae 53
DLGVASVGWSIV

SEQ ID NO: 69 - protein, 12 aa, Eubacterium rectale
DIGIASVGWAIL

SEQ ID NO: 70 - protein, 12 aa, Enterococcus faecalis TX0012
DLGISSVGWSVI

SEQ ID NO: 71 - protein, 12 aa, Ilyobacter polytropus DSM 2926
DIGIASVGWSVI

SEQ ID NO: 72 - protein, 12 aa, Ruminococcus albus 8
DVGIGSIGWAVI

SEQ ID NO: 73 - protein, 12 aa, Elusimicrobium minutum Pei191
DLGVGSIGFAIV

SEQ ID NO: 74 - protein, 12 aa, Akkermansia muciniphila
DIGYASIGWAVI

SEQ ID NO: 75 - protein, 12 aa, Artificial Sequence
  N-terminal RuvC-like domain
DTGTNSLGWAIV

SEQ ID NO: 76 - protein, 12 aa, Cand. Puniceispirillum marinum
DLGTNSIGWCLL

SEQ ID NO: 77 - protein, 12 aa, Rhodospirillum rubrum
DIGTDSLGWAVF

SEQ ID NO: 78 - protein, 12 aa, Lactobacillus rhamnosus GG
DIGSNSIGFAVV

SEQ ID NO: 79 - protein, 12 aa, Sphaerochaeta globus str. Buddy
DLGVGSIGVAVA

SEQ ID NO: 80 - protein, 12 aa, Artificial Sequence
  N-terminal RuvC-like domain
DLGIASCGWGVV

SEQ ID NO: 81 - protein, 12 aa, Mycoplasma mobile 163K
DLGIASVGWCLT

SEQ ID NO: 82 - protein, 12 aa, Streptococcus thermophilus LMD-9
DIGIGSVGVGIL

SEQ ID NO: 83 - protein, 12 aa, Staphylococcus lugdunensis M23590
DIGITSVGYGLI

SEQ ID NO: 84 - protein, 12 aa, Eubacterium dolichum DSM 3991
DIGITSVGFGII

SEQ ID NO: 85 - protein, 12 aa, Lactobacillus coryniformis KCTC 3535
DVGITSTGYAVL

SEQ ID NO: 86 - protein, 12 aa, Nitratifractor salsuginis DSM 16511
DLGITSFGYAIL

SEQ ID NO: 87 - protein, 12 aa, Bifidobacterium bifidum S17
DIGNASVGWSAF

SEQ ID NO: 88 - protein, 12 aa, Artificial Sequence
  N-terminal RuvC-like domain
DVGTNSCGWVAM

SEQ ID NO: 89 - protein, 12 aa, Acidothermus cellulolyticus 11B
DVGERSIGLAAV

SEQ ID NO: 90 - protein, 12 aa, Bifidobacterium longum DJO10A
DVGLNSVGLAAV

SEQ ID NO: 91 - protein, 12 aa, Artificial Sequence
  N-terminal RuvC-like domain
DVGLMSVGLAAI

SEQ ID NO: 92 - protein, 12 aa, Artificial Sequence
  N-terminal RuvC-like domain
DVGTFSVGLAAI

SEQ ID NO: 93 - protein, 12 aa, Staphylococcus pseudintermedius ED99
DIGTGSVGYACM

SEQ ID NO: 94 - protein, 12 aa, Artificial Sequence
  N-terminal RuvC-like domain
DLGTTSIGFAHI

SEQ ID NO: 95 - protein, 12 aa, Artificial Sequence
  N-terminal RuvC-like domain
DLGTNSIGSSVR

SEQ ID NO: 96 - protein, 12 aa, Artificial Sequence
  N-terminal RuvC-like domain
DIGTNSIGWAVI

SEQ ID NO: 97 - protein, 12 aa, Pasteurella multocida str. Pm70
DLGIASVGWAVV

SEQ ID NO: 98 - protein, 12 aa, Artificial Sequence
  N-terminal RuvC-like domain
DIGIASVGWAVL

SEQ ID NO: 99 - protein, 12 aa, Helicobacter mustelae 12198
DIGIASIGWAVI

SEQ ID NO: 100 - protein, 12 aa, Artificial Sequence
  N-terminal RuvC-like domain
DIGIASVGWAII

SEQ ID NO: 101 - protein, 12 aa, Clostridium cellulolyticum H10
DVGIASVGWAVI

SEQ ID NO: 102 - protein, 11 aa, Artificial Sequence
  N-terminal RuvC-like domain
DIGIASVGWAL

SEQ ID NO: 103 - protein, 12 aa, Neisseria meningitidis
DIGIASVGWAMV

SEQ ID NO: 104 - protein, 12 aa, Artificial Sequence
  N-terminal RuvC-like domain
DIGITSVGWAVI

SEQ ID NO: 105 - protein, 12 aa, Wolinella succinogenes DSM 1740
DLGISSLGWAIV

SEQ ID NO: 106 - protein, 12 aa, Azospirillum sp. B510
DLGTNSIGWGLL

SEQ ID NO: 107 - protein, 12 aa, Artificial Sequence
  N-terminal RuvC-like domain
DLGSTSLGWAIF

SEQ ID NO: 108 - protein, 12 aa, Campylobacter jejuni, NCTC 11168
DIGISSIGWAFS

SEQ ID NO: 109 - protein, 12 aa, Parvibaculum lavamentivorans DS-1
DIGTTSIGFSVI

SEQ ID NO: 110 - protein, 12 aa, Dinoroseobacter shibae DFL 12
DIGTSSIGWWLY

SEQ ID NO: 111 - protein, 12 aa, Nitrobacter hamburgensis X14
DLGSNSLGWFVT

SEQ ID NO: 112 - protein, 12 aa, Bradyrhizobium sp. BTAi1
DLGANSLGWFVV

SEQ ID NO: 113 - protein, 15 aa, Artificial Sequence
  N-terminal RuvC-like domain
DIGLRIGITSCGWSI

SEQ ID NO: 114 - protein, 12 aa, Artificial Sequence
  N-terminal RuvC-like domain
DMGAKYTGVFYA

SEQ ID NO: 115 - protein, 12 aa, Wolinella succinogenes DSM 1740
DLGGKNTGFFSF

SEQ ID NO: 116 - protein, 12 aa, Artificial Sequence
  N-terminal RuvC-like domain
DLGVKNTGVFSA

SEQ ID NO: 117 - protein, 12 aa, Artificial Sequence
  N-terminal RuvC-like domain
DLGAKFTGVALY

SEQ ID NO: 118 - protein, 12 aa, Legionella pneumophila str. Paris
DLGGKFTGVCLS

SEQ ID NO: 119 - protein, 12 aa, Artificial Sequence
  N-terminal RuvC-like domain
DLGGTYTGTFIT

SEQ ID NO: 120 - protein, 12 aa, S. thermophilus
DIGTNSVGWAVT

SEQ ID NO: 121 - protein, 12 aa, Eubacterium yurii
DVGTNSVGWAVT

SEQ ID NO: 122 - protein, 12 aa, Artificial Sequence
  N-terminal RuvC-like domain
DMGTNSVGWAVT

SEQ ID NO: 123 - protein, 12 aa, Solobacterium moorei F0204
DVGTSSVGWAVT

SEQ ID NO: 124 - protein, 27 aa, Treponema denticola
DIDHIYPQSKIKDDSISNRVLVCSSCN

SEQ ID NO: 125 - protein, 27 aa, Coprococcus catus GD-7
DIDHIYPQSKTMDDSLNNRVLVKKNYN

SEQ ID NO: 126 - protein, 27 aa, Peptoniphilus duerdenii
DQDHIYPKSKIYDDSLENRVLVKKNLN

SEQ ID NO: 127 - protein, 27 aa, Catenibacterium mitsuokai DSM 15897
QIDHIVPQSLVKDDSFDNRVLVVPSEN

SEQ ID NO: 128 - protein, 27 aa, S. mutans
DIDHIIPQAFIKDNSIDNRVLTSSKEN

SEQ ID NO: 129 - protein, 27 aa, S. thermophilus
DIDHIIPQAFLKDNSIDNKVLVSSASN

SEQ ID NO: 130 - protein, 27 aa, Oenococcus kitaharae DSM 17330
DIDHIIPQAYTKDNSLDNRVLVSNITN

SEQ ID NO: 131 - protein, 27 aa, L. inocua
DIDHIVPQSFITDNSIDNLVLTSSAGN

SEQ ID NO: 132 - protein, 27 aa, S. pyogenes
DVDHIVPQSFLKDDSIDNKVLTRSDKN

SEQ ID NO: 133 - protein, 27 aa, Acidaminococcus sp. D21
NIDHIYPQSMVKDDSLDNKVLVQSEIN

SEQ ID NO: 134 - protein, 27 aa, Lactobacillus rhamnosus GG
DIDHILPQSLIKDDSLDNRVLVNATIN

SEQ ID NO: 135 - protein, 27 aa, Artificial Sequence
  HNH-LIKE domain
DIDHILPQSFIKDDSLENRVLVKKAVN

SEQ ID NO: 136 - protein, 27 aa, Staphylococcus pseudintermedius ED99
EVDHIFPRSFIKDDSIDNKVLVIKKMN

SEQ ID NO: 137 - protein, 27 aa, Artificial Sequence
  HNH-LIKE domain
EVDHIIPRSYIKDDSFENKVLVYREEN

SEQ ID NO: 138 - protein, 27 aa, Bifidobacterium bifidum S17
DIDHIIPQAVTQNDSIDNRVLVARAEN

SEQ ID NO: 139 - protein, 27 aa, Mycoplasma gallisepticum str. F
EIDHIIPYSISFDDSSSNKLLVLAESN

SEQ ID NO: 140 - protein, 27 aa, Mycoplasma canis PG 14
EIDHIIPYSLCFDDSSANKVLVHKQSN

SEQ ID NO: 141 - protein, 27 aa, Ilyobacter polytropus DSM 2926
DIDHIIPYSRSMDDSYSNKVLVLSGEN

SEQ ID NO: 142 - protein, 27 aa, Artificial Sequence
  HNH-LIKE domain
DIDHIIPYSKSMDDSFNNKVLCLAEEN

SEQ ID NO: 143 - protein, 27 aa, Campylobacter jejuni
EIDHIYPYSRSFDDSYMNKVLVFTKQN

SEQ ID NO: 144 - protein, 27 aa, Clostridium cellulolyticum H10
QIDHIYPYSRSMDDSYMNKVLVLTDEN

SEQ ID NO: 145 - protein, 27 aa, Artificial Sequence
  HNH-LIKE domain
EIDHIIPFSRSFDDSLSNKILVLGSEN

SEQ ID NO: 146 - protein, 27 aa, N. meningitides
EIDHALPFSRTWDDSFNNKVLVLGSEN

SEQ ID NO: 147 - protein, 27 aa, Pasteurella multocida str. Pm70
EIDHALPFSRTWDDSFNNKVLVLASEN

SEQ ID NO: 148 - protein, 27 aa, Enterococcus faecalis TX0012
EIDHIIPISISLDDSINNKVLVLSKAN

SEQ ID NO: 149 - protein, 27 aa, Eubacterium dolichum DSM 3991
EVDHIIPISISLDDSITNKVLVTHREN

SEQ ID NO: 150 - protein, 27 aa, Artificial Sequence
  HNH-LIKE domain
QVDHALPYSRSYDDSKNNKVLVLTHEN

SEQ ID NO: 151 - protein, 27 aa, Streptococcus thermophilus LMD-9
EVDHILPLSITFDDSLANKVLVYATAN

SEQ ID NO: 152 - protein, 27 aa, Eubacterium rectale
EIDHIIPRSISFDDARSNKVLVYRSEN

SEQ ID NO: 153 - protein, 27 aa, Staphylococcus lugdunensis M23590
EVDHIIPRSVSFDNSYHNKVLVKQSEN

SEQ ID NO: 154 - protein, 27 aa, Artificial Sequence
  HNH-LIKE domain
DIDHILPYSITFDDSFRNKVLVTSQEN

SEQ ID NO: 155 - protein, 27 aa, Wolinella succinogenes DSM 1740
EIDHILPRSRSADDSFANKVLCLARAN

SEQ ID NO: 156 - protein, 27 aa, Cand. Puniceispirillum marinum
EIEHLLPFSLTLDDSMANKTVCFRQAN

SEQ ID NO: 157 - protein, 27 aa, Azospirillum sp. B510
DIDHILPFSVSLDDSAANKVVCLREAN

SEQ ID NO: 158 - protein, 27 aa, Bradyrhizobium sp. BTAi1
DIDHLIPFSISWDDSAANKVVCMRYAN

SEQ ID NO: 159 - protein, 27 aa, Nitrobacter hamburgensis X14
DIDHILPVAMTLDDSPANKIICMRYAN

SEQ ID NO: 160 - protein, 27 aa, Artificial Sequence
  HNH-LIKE domain
DVDHILPYSRTLDDSFPNRTLCLREAN

SEQ ID NO: 161 - protein, 27 aa, Artificial Sequence
  HNH-LIKE domain
EIEHILPFSRTLDDSLNNRTVAMRRAN

SEQ ID NO: 162 - protein, 27 aa, Lactobacillus coryniformis KCTC 3535
EVDHIIPYSISWDDSYTNKVLTSAKCN

SEQ ID NO: 163 - protein, 27 aa, Artificial Sequence
  HNH-LIKE domain
QVDHILPWSRFGDDSYLNKTLCTARSN

SEQ ID NO: 164 - protein, 27 aa, Ralstonia syzygii R24
QVDHILPFSKTLDDSFANKVLAQHDAN

SEQ ID NO: 165 - protein, 27 aa, Helicobacter mustelae 12198
QIDHAFPLSRSLDDSQSNKVLCLTSSN

SEQ ID NO: 166 - protein, 27 aa, Mycoplasma mobile 163K
DIDHIVPRSISFDDSFSNLVIVNKLDN

SEQ ID NO: 167 - protein, 27 aa, Mycoplasma ovipneumoniae SC01
EIEHIIPYSMSYDNSQANKILTEKAEN

SEQ ID NO: 168 - protein, 27 aa, Mycoplasma synoviae 53
EIDHVIPYSKSADDSWFNKLLVKKSTN

SEQ ID NO: 169 - protein, 27 aa, Aminomonas paucivorans DSM 12260
EMDHILPYSRSLDNGWHNRVLVHGKDN

SEQ ID NO: 170 - protein, 27 aa, Ruminococcus albus 8
EVDHIVPYSLILDNTINNKALVYAEEN

SEQ ID NO: 171 - protein, 27 aa, Artificial Sequence
  HNH-LIKE domain
EIEHVIPQSLYFDDSFSNKVICEAEVN

SEQ ID NO: 172 - protein, 27 aa, Bacteroides fragilis, NCTC 9343
DIEHIIPQARLFDDSFSNKTLEARSVN

SEQ ID NO: 173 - protein, 27 aa, Artificial Sequence
  HNH-LIKE domain
EIEHIVPKARVFDDSFSNKTLTFHRIN

SEQ ID NO: 174 - protein, 28 aa, Finegoldia magna
DKDHIIPQSMKKDDSIINNLVLVNKNAN

SEQ ID NO: 175 - protein, 27 aa, Parvibaculum lavamentivorans DS-1
EVEHIWPRSRSFDNSPRNKTLCRKDVN

SEQ ID NO: 176 - protein, 27 aa, Artificial Sequence
  HNH-LIKE domain
IVNHIIPYNRSFDDTYHNRVLTLTETK

SEQ ID NO: 177 - protein, 27 aa, Artificial Sequence
  HNH-LIKE domain
DMEHTIPKSISFDNSDQNLTLCESYYN

SEQ ID NO: 178 - protein, 27 aa, Artificial Sequence
  HNH-LIKE domain
DIEHTIPRSAGGDSTKMNLTLCSSRFN

SEQ ID NO: 179 - protein, 27 aa, Artificial Sequence
  HNH-LIKE domain
DIEHTIPRSISQDNSQMNKTLCSLKFN

SEQ ID NO: 180 - protein, 27 aa, Rhodospirillum rubrum
DIDHVIPLARGGRDSLDNMVLCQSDAN

SEQ ID NO: 181 - protein, 27 aa, Elusimicrobium minutum Pei191
DIEHLFPIAESEDNGRNNLVISHSACN

SEQ ID NO: 182 - protein, 27 aa, Sphaerochaeta globus str. Buddy
DVDHIFPRDDTADNSYGNKVVAHRQCN

SEQ ID NO: 183 - protein, 27 aa, Nitratifractor salsuginis DSM 16511
DIEHIVPQSLGGLSTDYNTIVTLKSVN

SEQ ID NO: 184 - protein, 27 aa, Acidothermus cellulolyticus 11B
ELDHIVPRTDGGSNRHENLAITCGACN

SEQ ID NO: 185 - protein, 28 aa, Bifidobacterium longum DJO10A
EMDHIVPRKGVGSTNTRTNFAAVCAECN

SEQ ID NO: 186 - protein, 28 aa, Artificial Sequence
  HNH-LIKE domain
EMDHIVPRKGVGSTNTRVNLAAACAACN

SEQ ID NO: 187 - protein, 28 aa, Artificial Sequence
  HNH-LIKE domain
EMDHIVPRAGQGSTNTRENLVAVCHRCN

SEQ ID NO: 188 - protein, 33 aa, Artificial Sequence
  HNH-LIKE domain
EIDHILPRSLIKDARGIVFNAEPNLIYASSRGN

SEQ ID NO: 189 - protein, 33 aa, Artificial Sequence
  HNH-LIKE domain
EIDHIIPRSLTGRTKKTVFNSEANLIYCSSKGN

SEQ ID NO: 190 - protein, 33 aa, Artificial Sequence
  HNH-LIKE domain
EIDHIIPRSLTLKKSESIYNSEVNLIFVSAQGN

SEQ ID NO: 191 - protein, 33 aa, Legionella pneumophila str. Paris
EIDHIYPRSLSKKHFGVIFNSEVNLIYCSSQGN

SEQ ID NO: 192 - protein, 33 aa, Wolinella succinogenes DSM 1740
EIDHILPRSHTLKIYGTVFNPEGNLIYVHQKCN

SEQ ID NO: 193 - protein, 30 aa, Artificial Sequence
  HNH-LIKE domain
ELDHIIPRSHKKYGTLNDEANLICVTRGDN

SEQ ID NO: 194 - protein, 27 aa, Akkermansia muciniphila
ELEHIVPHSFRQSNALSSLVLTWPGVN

SEQ ID NO: 195 - protein, 27 aa, Solobacterium moorei F0204
DIDHIYPRSKIKDDSITNRVLVEKDIN

SEQ ID NO: 196 - protein, 28 aa, Veillonella atypica ACS-134-V-Col7a
YDIDHIYPRSLTKDDSFDNLVLCERTAN

SEQ ID NO: 197 - protein, 28 aa, Fusobacterium nucleatum
DIDHIYPRSKVIKDDSFDNLVLVLKNEN

SEQ ID NO: 198 - protein, 27 aa, Filifactor alocis
DRDHIYPQSKIKDDSIDNLVLVNKTYN

SEQ ID NO: 199 - protein, 5 aa, S. thermophilus
NGGNG

SEQ ID NO: 200 - protein, 7 aa, S. thermophilus
NNAGAAW

SEQ ID NO: 201 - protein, 4 aa, S. mutans
NAAR

SEQ ID NO: 202 - protein, 5 aa, S. aureus
NNGRR

SEQ ID NO: 203 - protein, 6 aa, S. aureus
  misc_feature (1)..(6): PAM motif
NNGRRN

SEQ ID NO: 204 - protein, 6 aa, Artificial Sequence
  Synthetic peptide
NNGRRT

SEQ ID NO: 205 - protein, 6 aa, Artificial Sequence
  Synthetic peptide
NNGRRV

SEQ ID NO: 206 - RNA, 19 nt, Artificial Sequence
  Synthetic
gagcucagagugaaaaaaa

SEQ ID NO: 207 - RNA, 22 nt, Artificial Sequence
  Synthetic
guugagcucagagugaaaaaaa

SEQ ID NO: 208 - RNA, 24 nt, Artificial Sequence
  Synthetic
guaccagaaaaacacuccaaaaaa

SEQ ID NO: 209 - RNA, 20 nt, Artificial Sequence
  Synthetic
gucuugauuuggugaaaaaa

SEQ ID NO: 210 - RNA, 22 nt, Artificial Sequence
  Synthetic
gagucuugauuuggugaaaaaa

SEQ ID NO: 211 - RNA, 24 nt, Artificial Sequence
  Synthetic
gagagucuugauuuggugaaaaaa

SEQ ID NO: 212 - RNA, 24 nt, Artificial Sequence
  Synthetic
gcuuauuuccucauguguaaaaaa

SEQ ID NO: 213 - RNA, 18 nt, Artificial Sequence
  Synthetic
gaacucuauuuuaaaaaa

SEQ ID NO: 214 - RNA, 19 nt, Artificial Sequence
  Synthetic
ggaacucuauuuuaaaaaa

SEQ ID NO: 215 - RNA, 21 nt, Artificial Sequence
  Synthetic
gaggaacucuauuuuaaaaaa

SEQ ID NO: 216 - RNA, 22 nt, Artificial Sequence
  Synthetic
ggaggaacucuauuuuaaaaaa

SEQ ID NO: 217 - RNA, 18 nt, Artificial Sequence
  Synthetic
guaggaaguggacaaaaa

SEQ ID NO: 218 - RNA, 20 nt, Artificial Sequence
  Synthetic
guguaggaaguggacaaaaa

SEQ ID NO: 219 - RNA, 21 nt, Artificial Sequence
  Synthetic
gguguaggaaguggacaaaaa

SEQ ID NO: 220 - RNA, 18 nt, Artificial Sequence
  Synthetic
guccucuacauccaaaaa

SEQ ID NO: 221 - RNA, 18 nt, Artificial Sequence
  Synthetic
guugagagaaggcaaaaa

SEQ ID NO: 222 - RNA, 20 nt, Artificial Sequence
  Synthetic
gaguugagagaaggcaaaaa

SEQ ID NO: 223 - RNA, 21 nt, Artificial Sequence
  Synthetic
ggaguugagagaaggcaaaaa

SEQ ID NO: 224 - RNA, 19 nt, Artificial Sequence
  Synthetic
gcaaguuuuccugcaaaaa

SEQ ID NO: 225 - RNA, 22 nt, Artificial Sequence
  Synthetic
guugcaaguuuuccugcaaaaa

SEQ ID NO: 226 - RNA, 23 nt, Artificial Sequence
  Synthetic
gguugcaaguuuuccugcaaaaa

SEQ ID NO: 227 - RNA, 24 nt, Artificial Sequence
  Synthetic
ggguugcaaguuuuccugcaaaaa

SEQ ID NO: 228 - RNA, 22 nt, Artificial Sequence
  Synthetic
gauaaggggcaugggagaaaaa

SEQ ID NO: 229 - RNA, 23 nt, Artificial Sequence
  Synthetic
ggauaaggggcaugggagaaaaa

SEQ ID NO: 230 - RNA, 19 nt, Artificial Sequence
  Synthetic
gugguuucucuuagaaaaa

SEQ ID NO: 231 - RNA, 24 nt, Artificial Sequence
  Synthetic
gaucagugguuucucuuagaaaaa

SEQ ID NO: 232 - RNA, 23 nt, Artificial Sequence
  Synthetic
guuuaucugcagcaaaggaaaaa

SEQ ID NO: 233 - RNA, 24 nt, Artificial Sequence
  Synthetic
gaauaaaugcuucauauugaaaaa

SEQ ID NO: 234 - RNA, 22 nt, Artificial Sequence
  Synthetic
guauuauacauaaaaauaaaaa

SEQ ID NO: 235 - RNA, 20 nt, Artificial Sequence
  Synthetic
guaaauugaggggauaaaaa

SEQ ID NO: 236 - RNA, 22 nt, Artificial Sequence
  Synthetic
guguaaauugaggggauaaaaa

SEQ ID NO: 237 - RNA, 18 nt, Artificial Sequence
  Synthetic
gagaugugaagcuaaaaa

SEQ ID NO: 238 - RNA, 19 nt, Artificial Sequence
  Synthetic
ggagaugugaagcuaaaaa

SEQ ID NO: 239 - RNA, 20 nt, Artificial Sequence
  Synthetic
gggagaugugaagcuaaaaa

SEQ ID NO: 240 - RNA, 23 nt, Artificial Sequence
  Synthetic
gaagggagaugugaagcuaaaaa

SEQ ID NO: 241 - RNA, 20 nt, Artificial Sequence
  Synthetic
gccacaauauuagcuaaaaa

SEQ ID NO: 242 - RNA, 18 nt, Artificial Sequence
  Synthetic
gauuucauuaucuaaaaa

SEQ ID NO: 243 - RNA, 20 nt, Artificial Sequence
  Synthetic
gagauuucauuaucuaaaaa

SEQ ID NO: 244 - RNA, 21 nt, Artificial Sequence
  Synthetic
ggagauuucauuaucuaaaaa

SEQ ID NO: 245 - RNA, 22 nt, Artificial Sequence
  Synthetic
gggagauuucauuaucuaaaaa

SEQ ID NO: 246 - RNA, 19 nt, Artificial Sequence
  Synthetic
gaauaaagcuaaguaaaaa

SEQ ID NO: 247 - RNA, 24 nt, Artificial Sequence
  Synthetic
guuuagaauaaagcuaaguaaaaa

SEQ ID NO: 248 - RNA, 21 nt, Artificial Sequence
  Synthetic
gcaaaaggcccacaguaaaaa

SEQ ID NO: 249 - RNA, 20 nt, Artificial Sequence
  Synthetic
guuaaugcccccuguaaaaa

SEQ ID NO: 250 - RNA, 19 nt, Artificial Sequence
  Synthetic
guuaccagccaaaacaaaa

SEQ ID NO: 251 - RNA, 24 nt, Artificial Sequence
  Synthetic
gaaauguuaccagccaaaacaaaa

SEQ ID NO: 252 - RNA, 22 nt, Artificial Sequence
  Synthetic
guccauuuuuaaagaaacaaaa

SEQ ID NO: 253 - RNA, 24 nt, Artificial Sequence
  Synthetic
guguccauuuuuaaagaaacaaaa

SEQ ID NO: 254 - RNA, 19 nt, Artificial Sequence
  Synthetic
gaauuaaguagaaacaaaa

SEQ ID NO: 255 - RNA, 20 nt, Artificial Sequence
  Synthetic
ggaauuaaguagaaacaaaa

SEQ ID NO: 256 - RNA, 19 nt, Artificial Sequence
  Synthetic
guuacauuuccuaacaaaa

SEQ ID NO: 257 - RNA, 21 nt, Artificial Sequence
  Synthetic
gaguuacauuuccuaacaaaa

SEQ ID NO: 258 - RNA, 23 nt, Artificial Sequence
  Synthetic
gcgaguuacauuuccuaacaaaa

SEQ ID NO: 259 - RNA, 22 nt, Artificial Sequence
  Synthetic
gcuucuugaggucaacacaaaa

SEQ ID NO: 260 - RNA, 24 nt, Artificial Sequence
  Synthetic
gugcuucuugaggucaacacaaaa

SEQ ID NO: 261 - RNA, 23 nt, Artificial Sequence
  Synthetic
guuuagggucuaggaggacaaaa

SEQ ID NO: 262 - RNA, 24 nt, Artificial Sequence
  Synthetic
gguuuagggucuaggaggacaaaa

SEQ ID NO: 263 - RNA, 19 nt, Artificial Sequence
  Synthetic
guuuuccccuaagccaaaa

SEQ ID NO: 264 - RNA, 21 nt, Artificial Sequence
  Synthetic
guguuuuccccuaagccaaaa

SEQ ID NO: 265 - RNA, 22 nt, Artificial Sequence
  Synthetic
gguguuuuccccuaagccaaaa

SEQ ID NO: 266 - RNA, 21 nt, Artificial Sequence
  Synthetic
gauauguaaacagcuccaaaa

SEQ ID NO: 267 - RNA, 19 nt, Artificial Sequence
  Synthetic
gauauuuuaggguccaaaa

SEQ ID NO: 268 - RNA, 21 nt, Artificial Sequence
  Synthetic
gugauauuuuaggguccaaaa

SEQ ID NO: 269 - RNA, 23 nt, Artificial Sequence
  Synthetic
gugugauauuuuaggguccaaaa

SEQ ID NO: 270 - RNA, 22 nt, Artificial Sequence
  Synthetic
guauaagagaagaaaagcaaaa

SEQ ID NO: 271 - RNA, 21 nt, Artificial Sequence
  Synthetic
gucacacauccuuuagcaaaa

SEQ ID NO: 272 - RNA, 18 nt, Artificial Sequence
  Synthetic
gugaaccucugugcaaaa

SEQ ID NO: 273 - RNA, 22 nt, Artificial Sequence
  Synthetic
gaaugugaaccucugugcaaaa

SEQ ID NO: 274 - RNA, 18 nt, Artificial Sequence
  Synthetic
gacaaaacugguucaaaa

SEQ ID NO: 275 - RNA, 21 nt, Artificial Sequence
  Synthetic
gaagacaaaacugguucaaaa

SEQ ID NO: 276 - RNA, 22 nt, Artificial Sequence
  Synthetic
ggaagacaaaacugguucaaaa

SEQ ID NO: 277 - RNA, 24 nt, Artificial Sequence
  Synthetic
gaaauuccauauuuccuaagaaaa

SEQ ID NO: 278 - RNA, 20 nt, Artificial Sequence
  Synthetic
gcuucauucccuuaagaaaa

SEQ ID NO: 279 - RNA, 21 nt, Artificial Sequence
  Synthetic
ggcuucauucccuuaagaaaa

SEQ ID NO: 280 - RNA, 18 nt, Artificial Sequence
  Synthetic
ggccacauaaacagaaaa

SEQ ID NO: 281 - RNA, 23 nt, Artificial Sequence
  Synthetic
gaacuggccacauaaacagaaaa

SEQ ID NO: 282 - RNA, 24 nt, Artificial Sequence
  Synthetic
ggaacuggccacauaaacagaaaa

SEQ ID NO: 283 - RNA, 19 nt, Artificial Sequence
  Synthetic
gaaaaagcccuucagaaaa

SEQ ID NO: 284 - RNA, 21 nt, Artificial Sequence
  Synthetic
gaauaguaguaagagagaaaa

SEQ ID NO: 285 - RNA, 24 nt, Artificial Sequence
  Synthetic
guagaauaguaguaagagagaaaa

SEQ ID NO: 286 - RNA, 19 nt, Artificial Sequence
  Synthetic
gauaagauaauauagaaaa

SEQ ID NO: 287 - RNA, 22 nt, Artificial Sequence
  Synthetic
gacgauaagauaauauagaaaa

SEQ ID NO: 288 - RNA, 23 nt, Artificial Sequence
  Synthetic
ggacgauaagauaauauagaaaa

SEQ ID NO: 289 - RNA, 20 nt, Artificial Sequence
  Synthetic
guaugguuucauuuagaaaa

SEQ ID NO: 290 - RNA, 22 nt, Artificial Sequence
  Synthetic
gaguaugguuucauuuagaaaa

SEQ ID NO: 291 - RNA, 21 nt, Artificial Sequence
  Synthetic
gaucaggguucagaaggaaaa

SEQ ID NO: 292 - RNA, 23 nt, Artificial Sequence
  Synthetic
gugaucaggguucagaaggaaaa

SEQ ID NO: 293 - RNA, 20 nt, Artificial Sequence
  Synthetic
gcucuuaucauauaggaaaa

SEQ ID NO: 294 - RNA, 21 nt, Artificial Sequence
  Synthetic
ggcucuuaucauauaggaaaa

SEQ ID NO: 295 - RNA, 19 nt, Artificial Sequence
  Synthetic
gaaacacugacagggaaaa

SEQ ID NO: 296 - RNA, 19 nt, Artificial Sequence
  Synthetic
gauggcauauuugggaaaa

SEQ ID NO: 297 - RNA, 21 nt, Artificial Sequence
  Synthetic
gugauggcauauuugggaaaa

SEQ ID NO: 298 - RNA, 21 nt, Artificial Sequence
  Synthetic
gcaugcaaguaucauggaaaa

SEQ ID NO: 299 - RNA, 22 nt, Artificial Sequence
  Synthetic
ggcaugcaaguaucauggaaaa

SEQ ID NO: 300 - RNA, 19 nt, Artificial Sequence
  Synthetic
gaugaugcccucuggaaaa

SEQ ID NO: 301 - RNA, 24 nt, Artificial Sequence
  Synthetic
guaaagaugaugcccucuggaaaa

SEQ ID NO: 302 - RNA, 18 nt, Artificial Sequence
  Synthetic
gacuucucauuuggaaaa

SEQ ID NO: 303 - RNA, 19 nt, Artificial Sequence
  Synthetic
ggacuucucauuuggaaaa

SEQ ID NO: 304 - RNA, 20 nt, Artificial Sequence
  Synthetic
gggacuucucauuuggaaaa

SEQ ID NO: 305 - RNA, 22 nt, Artificial Sequence
  Synthetic
gagggacuucucauuuggaaaa

SEQ ID NO: 306 - RNA, 24 nt, Artificial Sequence
  Synthetic
gagagggacuucucauuuggaaaa

SEQ ID NO: 307 - RNA, 18 nt, Artificial Sequence
  Synthetic
gugagugguauaugaaaa

SEQ ID NO: 308 - RNA, 19 nt, Artificial Sequence
  Synthetic
ggugagugguauaugaaaa

SEQ ID NO: 309 - RNA, 20 nt, Artificial Sequence
  Synthetic
gggugagugguauaugaaaa

SEQ ID NO: 310 - RNA, 22 nt, Artificial Sequence
  Synthetic
guaucacaagcugaaaauaaaa

SEQ ID NO: 311 - RNA, 23 nt, Artificial Sequence
  Synthetic
gguaucacaagcugaaaauaaaa

SEQ ID NO: 312 - RNA, 18 nt, Artificial Sequence
  Synthetic
gguaaaggugaaauaaaa

SEQ ID NO: 313 - RNA, 22 nt, Artificial Sequence
  Synthetic
guuugguaaaggugaaauaaaa

SEQ ID NO: 314 - RNA, 23 nt, Artificial Sequence
  Synthetic
gguuugguaaaggugaaauaaaa

SEQ ID NO: 315 - RNA, 19 nt, Artificial Sequence
  Synthetic
gcacuguuaggcaauaaaa

SEQ ID NO: 316 - RNA, 18 nt, Artificial Sequence
  Synthetic
gauuagggaucaauaaaa

SEQ ID NO: 317 - RNA, 19 nt, Artificial Sequence
  Synthetic
ggauuagggaucaauaaaa

SEQ ID NO: 318 - RNA, 21 nt, Artificial Sequence
  Synthetic
gaggauuagggaucaauaaaa

SEQ ID NO: 319 - RNA, 22 nt, Artificial Sequence
  Synthetic
ggaggauuagggaucaauaaaa

SEQ ID NO: 320 - RNA, 23 nt, Artificial Sequence
  Synthetic
gggaggauuagggaucaauaaaa

SEQ ID NO: 321 - RNA, 21 nt, Artificial Sequence
  Synthetic
gcuauaacauauggaauaaaa

SEQ ID NO: 322 - RNA, 23 nt, Artificial Sequence
  Synthetic
gugcuauaacauauggaauaaaa

SEQ ID NO: 323 - RNA, 22 nt, Artificial Sequence
  Synthetic
gagaagaaaugacauaauaaaa

SEQ ID NO: 324 - RNA, 23 nt, Artificial Sequence
  Synthetic
ggagaagaaaugacauaauaaaa

SEQ ID NO: 325 - RNA, 24 nt, Artificial Sequence
  Synthetic
gaacaauuucaugaucagauaaaa

SEQ ID NO: 326 - RNA, 19 nt, Artificial Sequence
  Synthetic
gaguaaaacuccuauaaaa

SEQ ID NO: 327 - RNA, 22 nt, Artificial Sequence
  Synthetic
gaugaguaaaacuccuauaaaa

SEQ ID NO: 328 - RNA, 24 nt, Artificial Sequence
  Synthetic
gagaugaguaaaacuccuauaaaa

SEQ ID NO: 329 - RNA, 18 nt, Artificial Sequence
  Synthetic
ggaggugaaauuauaaaa

SEQ ID NO: 330 - RNA, 21 nt, Artificial Sequence
  Synthetic
guuuguauaguuuaccuaaaa

SEQ ID NO: 331 - RNA, 24 nt, Artificial Sequence
  Synthetic
gaaguuuguauaguuuaccuaaaa

SEQ ID NO: 332 - RNA, 19 nt, Artificial Sequence
  Synthetic
guugugguaguagcuaaaa

SEQ ID NO: 333 - RNA, 21 nt, Artificial Sequence
  Synthetic
gaguugugguaguagcuaaaa

SEQ ID NO: 334 - RNA, 24 nt, Artificial Sequence
  Synthetic
gcagaguugugguaguagcuaaaa

SEQ ID NO: 335 - RNA, 22 nt, Artificial Sequence
  Synthetic
gaacaaaacuccauuucuaaaa

SEQ ID NO: 336 - RNA, 23 nt, Artificial Sequence
  Synthetic
ggaacaaaacuccauuucuaaaa

SEQ ID NO: 337 - RNA, 22 nt, Artificial Sequence
  Synthetic
gauucacaguaaguuucuaaaa

SEQ ID NO: 338 - RNA, 22 nt, Artificial Sequence
  Synthetic
gaauauauugaaagcaguaaaa

SEQ ID NO: 339 - RNA, 24 nt, Artificial Sequence
  Synthetic
guauaacaauuaggaucaguaaaa

SEQ ID NO: 340 - RNA, 19 nt, Artificial Sequence
  Synthetic
gauaguaacaauaguaaaa

SEQ ID NO: 341 - RNA, 22 nt, Artificial Sequence
  Synthetic
gaaaugaaugaaauuaguaaaa

SEQ ID NO: 342 - RNA, 23 nt, Artificial Sequence
  Synthetic
guacaaguguuuaacagguaaaa

SEQ ID NO: 343 - RNA, 21 nt, Artificial Sequence
  Synthetic
gucuccccagagaauguaaaa

SEQ ID NO: 344 - RNA, 24 nt, Artificial Sequence
  Synthetic
guugucuccccagagaauguaaaa

SEQ ID NO: 345 - RNA, 23 nt, Artificial Sequence
  Synthetic
gcaauaaacuuuacuguguaaaa

SEQ ID NO: 346 - RNA, 21 nt, Artificial Sequence
  Synthetic
guuuuaccuaaaaaauuaaaa

SEQ ID NO: 347 - RNA, 24 nt, Artificial Sequence
  Synthetic
gcucuuagggaacaaaaauuaaaa

SEQ ID NO: 348 - RNA, 21 nt, Artificial Sequence
  Synthetic
gaauuauuuuauacauuaaaa

SEQ ID NO: 349 - RNA, 20 nt, Artificial Sequence
  Synthetic
gauaaccuucgucauuaaaa

SEQ ID NO: 350 - RNA, 24 nt, Artificial Sequence
  Synthetic
gaauaauaucuagggagauuaaaa

SEQ ID NO: 351 - RNA, 22 nt, Artificial Sequence
  Synthetic
gauuucuaauauguuauuaaaa

SEQ ID NO: 352 - RNA, 20 nt, Artificial Sequence
  Synthetic
gaauaauccccaccuuaaaa

SEQ ID NO: 353 - RNA, 23 nt, Artificial Sequence
  Synthetic
gacgaauaauccccaccuuaaaa

SEQ ID NO: 354 - RNA, 23 nt, Artificial Sequence
  Synthetic
guucaaauuuuaaagucuuaaaa

SEQ ID NO: 355 - RNA, 22 nt, Artificial Sequence
  Synthetic
gaacaguguuucauucuuaaaa

SEQ ID NO: 356 - RNA, 19 nt, Artificial Sequence
  Synthetic
gaagguuauuugguuaaaa

SEQ ID NO: 357 - RNA, 20 nt, Artificial Sequence
  Synthetic
ggaagguuauuugguuaaaa

SEQ ID NO: 358 - RNA, 21 nt, Artificial Sequence
  Synthetic
gauugcuggugcuauuuaaaa

SEQ ID NO: 359 - RNA, 23 nt, Artificial Sequence
  Synthetic
gugauugcuggugcuauuuaaaa

SEQ ID NO: 360 - RNA, 21 nt, Artificial Sequence
  Synthetic
gaacaguauucugcuuuaaaa

SEQ ID NO: 361 - RNA, 24 nt, Artificial Sequence
  Synthetic
gcagaacaguauucugcuuuaaaa

SEQ ID NO: 362 - RNA, 20 nt, Artificial Sequence
  Synthetic
gauuuacugauuguuuaaaa

SEQ ID NO: 363 - RNA, 18 nt, Artificial Sequence
  Synthetic
gagacuaaguaaaacaaa

SEQ ID NO: 364 - RNA, 22 nt, Artificial Sequence
  Synthetic
gacuaguguugcuaucaacaaa

SEQ ID NO: 365 - RNA, 24 nt, Artificial Sequence
  Synthetic
gagacuaguguugcuaucaacaaa

SEQ ID NO: 366 - RNA, 24 nt, Artificial Sequence
  Synthetic
gauauuuaaaauuaugagaacaaa

SEQ ID NO: 367 - RNA, 19 nt, Artificial Sequence
  Synthetic
gcauauguuagggaacaaa

SEQ ID NO: 368 - RNA, 24 nt, Artificial Sequence
  Synthetic
guuaagcauauguuagggaacaaa

SEQ ID NO: 369 - RNA, 18 nt, Artificial Sequence
  Synthetic
ggucacccccuccacaaa

SEQ ID NO: 370 - RNA, 20 nt, Artificial Sequence
  Synthetic
gauauagugcugagcacaaa

SEQ ID NO: 371 - RNA, 24 nt, Artificial Sequence
  Synthetic
gacugauauagugcugagcacaaa

SEQ ID NO: 372 - RNA, 18 nt, Artificial Sequence
  Synthetic
ggugagaaaaaugacaaa

SEQ ID NO: 373 - RNA, 20 nt, Artificial Sequence
  Synthetic
guuguuauaaugaauacaaa

SEQ ID NO: 374 - RNA, 23 nt, Artificial Sequence
  Synthetic
gauguuguuauaaugaauacaaa

SEQ ID NO: 375 - RNA, 22 nt, Artificial Sequence
  Synthetic
gucuuagagaaacacauacaaa

SEQ ID NO: 376 - RNA, 18 nt, Artificial Sequence
  Synthetic
guucucaaagcauacaaa

SEQ ID NO: 377 - RNA, 22 nt, Artificial Sequence
  Synthetic
guggcaauaugaaagauacaaa

SEQ ID NO: 378 - RNA, 24 nt, Artificial Sequence
  Synthetic
guguggcaauaugaaagauacaaa

SEQ ID NO: 379 - RNA, 19 nt, Artificial Sequence
  Synthetic
gagguacuauaacaccaaa

SEQ ID NO: 380 - RNA, 18 nt, Artificial Sequence
  Synthetic
gacucaacaaggaccaaa

SEQ ID NO: 381 - RNA, 18 nt, Artificial Sequence
  Synthetic
gugccagaaccuaccaaa

SEQ ID NO: 382 - RNA, 20 nt, Artificial Sequence
  Synthetic
gagugccagaaccuaccaaa

SEQ ID NO: 383 - RNA, 21 nt, Artificial Sequence
  Synthetic
guuuccacccagcaacccaaa

SEQ ID NO: 384 - RNA, 23 nt, Artificial Sequence
  Synthetic
gcucaauuauugcaguacccaaa

SEQ ID NO: 385 - RNA, 22 nt, Artificial Sequence
  Synthetic
guuaagcucaacaaaccccaaa

SEQ ID NO: 386 - RNA, 23 nt, Artificial Sequence
  Synthetic
gguuaagcucaacaaaccccaaa

SEQ ID NO: 387 - RNA, 20 nt, Artificial Sequence
  Synthetic
gacaggucuccuuccccaaa

SEQ ID NO: 388 - RNA, 19 nt, Artificial Sequence
  Synthetic
gauuccugaacaucccaaa

SEQ ID NO: 389 - RNA, 24 nt, Artificial Sequence
  Synthetic
gaacagugggaaaggaaagccaaa

SEQ ID NO: 390 - RNA, 18 nt, Artificial Sequence
  Synthetic
gaauuuauaguugccaaa

SEQ ID NO: 391 - RNA, 24 nt, Artificial Sequence
  Synthetic
gacuucccaacaagggaguccaaa

SEQ ID NO: 392 - RNA, 21 nt, Artificial Sequence
  Synthetic
gcccugaggaauauguccaaa

SEQ ID NO: 393 - RNA, 23 nt, Artificial Sequence
  Synthetic
gagcccugaggaauauguccaaa

SEQ ID NO: 394 - RNA, 18 nt, Artificial Sequence
  Synthetic
gaguuuucuuuuuccaaa

SEQ ID NO: 395 - RNA, 19 nt, Artificial Sequence
  Synthetic
ggaguuuucuuuuuccaaa

SEQ ID NO: 396 - RNA, 20 nt, Artificial Sequence
  Synthetic
gggaguuuucuuuuuccaaa

SEQ ID NO: 397 - RNA, 22 nt, Artificial Sequence
  Synthetic
gugggaguuuucuuuuuccaaa

SEQ ID NO: 398 - RNA, 24 nt, Artificial Sequence
  Synthetic
gagugggaguuuucuuuuuccaaa

SEQ ID NO: 399 - RNA, 18 nt, Artificial Sequence
  Synthetic
guguucauagcaagcaaa

SEQ ID NO: 400 - RNA, 18 nt, Artificial Sequence
  Synthetic
gguuaaccauacagcaaa

SEQ ID NO: 401 - RNA, 21 nt, Artificial Sequence
  Synthetic
gcagguuaaccauacagcaaa

SEQ ID NO: 402 - RNA, 22 nt, Artificial Sequence
  Synthetic
ggcagguuaaccauacagcaaa

SEQ ID NO: 403 - RNA, 23 nt, Artificial Sequence
  Synthetic
gauaauuauguggaugcagcaaa

SEQ ID NO: 404 - RNA, 21 nt, Artificial Sequence
  Synthetic
gacagaauguucuuuagcaaa

SEQ ID NO: 405 - RNA, 23 nt, Artificial Sequence
  Synthetic
gagacagaauguucuuuagcaaa

SEQ ID NO: 406 - RNA, 20 nt, Artificial Sequence
  Synthetic
gaacagcccaguuuagcaaa

SEQ ID NO: 407 - RNA, 24 nt, Artificial Sequence
  Synthetic
guaagaacagcccaguuuagcaaa

SEQ ID NO: 408 - RNA, 24 nt, Artificial Sequence
  Synthetic
gaccuuuccauuucucaaggcaaa

SEQ ID NO: 409 - RNA, 18 nt, Artificial Sequence
  Synthetic
gcuuucagaccaugcaaa

SEQ ID NO: 410 - RNA, 19 nt, Artificial Sequence
  Synthetic
ggcuuucagaccaugcaaa

SEQ ID NO: 411 - RNA, 21 nt, Artificial Sequence
  Synthetic
gaggcuuucagaccaugcaaa

SEQ ID NO: 412 - RNA, 22 nt, Artificial Sequence
  Synthetic
ggaggcuuucagaccaugcaaa

SEQ ID NO: 413 - RNA, 18 nt, Artificial Sequence
  Synthetic
guaauggugaagugcaaa

SEQ ID NO: 414 - RNA, 19 nt, Artificial Sequence
  Synthetic
gguaauggugaagugcaaa

SEQ ID NO: 415 - RNA, 18 nt, Artificial Sequence
  Synthetic
gaaaaucucaaacucaaa

SEQ ID NO: 416 - RNA, 24 nt, Artificial Sequence
  Synthetic
gaccuaccaugugagagucucaaa

SEQ ID NO: 417 - RNA, 23 nt, Artificial Sequence
  Synthetic
gccucaggagaaagcuucucaaa

SEQ ID NO: 418 - RNA, 18 nt, Artificial Sequence
  Synthetic
gccugucucccagucaaa

SEQ ID NO: 419 - RNA, 20 nt, Artificial Sequence
  Synthetic
gaacaaguugggaugucaaa

SEQ ID NO: 420 - RNA, 19 nt, Artificial Sequence
  Synthetic
gaauacagauggugucaaa

SEQ ID NO: 421 - RNA, 20 nt, Artificial Sequence
  Synthetic
guucaaugauugaauucaaa

SEQ ID NO: 422 - RNA, 21 nt, Artificial Sequence
  Synthetic
gguucaaugauugaauucaaa

SEQ ID NO: 423 - RNA, 23 nt, Artificial Sequence
  Synthetic
gagguucaaugauugaauucaaa

SEQ ID NO: 424 - RNA, 20 nt, Artificial Sequence
  Synthetic
gacuuuucuuuagauucaaa

SEQ ID NO: 425 - RNA, 22 nt, Artificial Sequence
  Synthetic
gauuaccuuucauacguucaaa

SEQ ID NO: 426 - RNA, 18 nt, Artificial Sequence
  Synthetic
gaaauuacuuuguucaaa

SEQ ID NO: 427 - RNA, 19 nt, Artificial Sequence
  Synthetic
gcggaauugccauuucaaa

SEQ ID NO: 428 - RNA, 20 nt, Artificial Sequence
  Synthetic
ggcggaauugccauuucaaa

SEQ ID NO: 429 - RNA, 22 nt, Artificial Sequence
  Synthetic
guggcggaauugccauuucaaa

SEQ ID NO: 430 - RNA, 21 nt, Artificial Sequence
  Synthetic
gucuugaaaggcaguuucaaa

SEQ ID NO: 431 - RNA, 23 nt, Artificial Sequence
  Synthetic
gauaaucaggucuuaaaaagaaa

SEQ ID NO: 432 - RNA, 23 nt, Artificial Sequence
  Synthetic
guagugauuaccucuaaaagaaa

SEQ ID NO: 433 - RNA, 21 nt, Artificial Sequence
  Synthetic
gcaucaaaaaauacaaagaaa

SEQ ID NO: 434 - RNA, 23 nt, Artificial Sequence
  Synthetic
gcuaguuccagaaaccaaagaaa

SEQ ID NO: 435 - RNA, 24 nt, Artificial Sequence
  Synthetic
gaacauccuuguggggacaagaaa

SEQ ID NO: 436 - RNA, 20 nt, Artificial Sequence
  Synthetic
gaaggcaauacgccaagaaa

SEQ ID NO: 437 - RNA, 22 nt, Artificial Sequence
  Synthetic
gagaaggcaauacgccaagaaa

SEQ ID NO: 438 - RNA, 23 nt, Artificial Sequence
  Synthetic
ggagaaggcaauacgccaagaaa

SEQ ID NO: 439 - RNA, 20 nt, Artificial Sequence
  Synthetic
gcuuauucucaugcaagaaa

SEQ ID NO: 440 - RNA, 21 nt, Artificial Sequence
  Synthetic
ggcuuauucucaugcaagaaa

SEQ ID NO: 441 - RNA, 22 nt, Artificial Sequence
  Synthetic
gggcuuauucucaugcaagaaa

SEQ ID NO: 442 - RNA, 20 nt, Artificial Sequence
  Synthetic
gauuagaugcuuucaagaaa

SEQ ID NO: 443 - RNA, 21 nt, Artificial Sequence
  Synthetic
ggauuagaugcuuucaagaaa

SEQ ID NO: 444 - RNA, 21 nt, Artificial Sequence
  Synthetic
guuuucuuagaacugaagaaa

SEQ ID NO: 445 - RNA, 18 nt, Artificial Sequence
  Synthetic
gguagaacaaauaagaaa

SEQ ID NO: 446 - RNA, 19 nt, Artificial Sequence
  Synthetic
ggguagaacaaauaagaaa

SEQ ID NO: 447 - RNA, 23 nt, Artificial Sequence
  Synthetic
gacaggguagaacaaauaagaaa

SEQ ID NO: 448 - RNA, 21 nt, Artificial Sequence
  Synthetic
gaucauggguagaauaagaaa

SEQ ID NO: 449 - RNA, 22 nt, Artificial Sequence
  Synthetic
ggaucauggguagaauaagaaa

SEQ ID NO: 450 - RNA, 20 nt, Artificial Sequence
  Synthetic
gcucacuauaucauaagaaa

SEQ ID NO: 451 - RNA, 22 nt, Artificial Sequence
  Synthetic
gagcucacuauaucauaagaaa

SEQ ID NO: 452 - RNA, 23 nt, Artificial Sequence
  Synthetic
ggagcucacuauaucauaagaaa

SEQ ID NO: 453 - RNA, 20 nt, Artificial Sequence
  Synthetic
gaaacuaaaucucuaagaaa

SEQ ID NO: 454 - RNA, 21 nt, Artificial Sequence
  Synthetic
ggaaacuaaaucucuaagaaa

SEQ ID NO: 455 - RNA, 21 nt, Artificial Sequence
  Synthetic
guguaguaauauauuaagaaa

SEQ ID NO: 456 - RNA, 19 nt, Artificial Sequence
  Synthetic
gcaacgauacuuuaagaaa

SEQ ID NO: 457 - RNA, 19 nt, Artificial Sequence
  Synthetic
gcuuauaaauuuuaagaaa

SEQ ID NO: 458 - RNA, 23 nt, Artificial Sequence
  Synthetic
gauagcuuauaaauuuuaagaaa

SEQ ID NO: 459 - RNA, 21 nt, Artificial Sequence
  Synthetic
gaccuaacacaaacacagaaa

SEQ ID NO: 460 - RNA, 19 nt, Artificial Sequence
  Synthetic
guauuuaaaaguacagaaa

SEQ ID NO: 461 - RNA, 20 nt, Artificial Sequence
  Synthetic
gguauuuaaaaguacagaaa

SEQ ID NO: 462 - RNA, 23 nt, Artificial Sequence
  Synthetic
guagguauuuaaaaguacagaaa

SEQ ID NO: 463 - RNA, 24 nt, Artificial Sequence
  Synthetic
guuuaauaaucacauuuacagaaa

SEQ ID NO: 464 - RNA, 21 nt, Artificial Sequence
  Synthetic
gacuaaccguacacccagaaa

SEQ ID NO: 465 - RNA, 22 nt, Artificial Sequence
  Synthetic
ggacuaaccguacacccagaaa

SEQ ID NO: 466 - RNA, 23 nt, Artificial Sequence
  Synthetic
gggacuaaccguacacccagaaa

SEQ ID NO: 467 - RNA, 24 nt, Artificial Sequence
  Synthetic
ggggacuaaccguacacccagaaa

SEQ ID NO: 468 - RNA, 19 nt, Artificial Sequence
  Synthetic
gagaagcucuaggcagaaa

SEQ ID NO: 469 - RNA, 18 nt, Artificial Sequence
  Synthetic
gggcucugccuucagaaa

SEQ ID NO: 470 - RNA, 20 nt, Artificial Sequence
  Synthetic
gcgggcucugccuucagaaa

SEQ ID NO: 471 - RNA, 18 nt, Artificial Sequence
  Synthetic
guacuaccuuuucagaaa

SEQ ID NO: 472 - RNA, 24 nt, Artificial Sequence
  Synthetic
guucacagggcgaaaaaagagaaa

SEQ ID NO: 473 - RNA, 19 nt, Artificial Sequence
  Synthetic
gaaaagaguugcagagaaa

SEQ ID NO: 474 - RNA, 20 nt, Artificial Sequence
  Synthetic
ggaaaagaguugcagagaaa

SEQ ID NO: 475 - RNA, 22 nt, Artificial Sequence
  Synthetic
guagucuucagaggaggagaaa

SEQ ID NO: 476 - RNA, 23 nt, Artificial Sequence
  Synthetic
gcagaagaugggauugggagaaa

SEQ ID NO: 477 - RNA, 18 nt, Artificial Sequence
  Synthetic
guugauauagaugagaaa

SEQ ID NO: 478 - RNA, 20 nt, Artificial Sequence
  Synthetic
gaagaacuagacuugagaaa

SEQ ID NO: 479 - RNA, 23 nt, Artificial Sequence
  Synthetic
gcagaagaacuagacuugagaaa

SEQ ID NO: 480 - RNA, 20 nt, Artificial Sequence
  Synthetic
gcaauucuccugaauagaaa

SEQ ID NO: 481 - RNA, 21 nt, Artificial Sequence
  Synthetic
ggcaauucuccugaauagaaa

SEQ ID NO: 482 - RNA, 19 nt, Artificial Sequence
  Synthetic
gugcuucaaaccauagaaa

SEQ ID NO: 483 - RNA, 20 nt, Artificial Sequence
  Synthetic
gacuagacaguaacuagaaa

SEQ ID NO: 484 - RNA, 22 nt, Artificial Sequence
  Synthetic
gugacuagacaguaacuagaaa

SEQ ID NO: 485 - RNA, 24 nt, Artificial Sequence
  Synthetic
gcgugacuagacaguaacuagaaa

SEQ ID NO: 486 - RNA, 23 nt, Artificial Sequence
  Synthetic
gccucuuaaaaguccucuagaaa

SEQ ID NO: 487 - RNA, 24 nt, Artificial Sequence
  Synthetic
ggccucuuaaaaguccucuagaaa

SEQ ID NO: 488 - RNA, 21 nt, Artificial Sequence
  Synthetic
gcucuaauagaaguuuagaaa

SEQ ID NO: 489 - RNA, 22 nt, Artificial Sequence
  Synthetic
ggcucuaauagaaguuuagaaa

SEQ ID NO: 490 - RNA, 24 nt, Artificial Sequence
  Synthetic
gaggcucuaauagaaguuuagaaa

SEQ ID NO: 491 - RNA, 20 nt, Artificial Sequence
  Synthetic
gauaugugaauguuuagaaa

SEQ ID NO: 492 - RNA, 22 nt, Artificial Sequence
  Synthetic
gaacaaaacuuacaaaaggaaa

SEQ ID NO: 493 - RNA, 23 nt, Artificial Sequence
  Synthetic
ggaacaaaacuuacaaaaggaaa

SEQ ID NO: 494 - RNA, 22 nt, Artificial Sequence
  Synthetic
gcugugaagaaugccaaggaaa

SEQ ID NO: 495 - RNA, 24 nt, Artificial Sequence
  Synthetic
gugcugugaagaaugccaaggaaa

SEQ ID NO: 496 - RNA, 21 nt, Artificial Sequence
  Synthetic
gacauuuauucaggaaggaaa

SEQ ID NO: 497 - RNA, 18 nt, Artificial Sequence
  Synthetic
gagucuguguagaggaaa

SEQ ID NO: 498 - RNA, 19 nt, Artificial Sequence
  Synthetic
ggagucuguguagaggaaa

SEQ ID NO: 499 - RNA, 24 nt, Artificial Sequence
  Synthetic
gccauggagucuguguagaggaaa

SEQ ID NO: 500 - RNA, 22 nt, Artificial Sequence
  Synthetic
gcuuaggcacaguuggaggaaa

SEQ ID NO: 501 - RNA, 18 nt, Artificial Sequence
  Synthetic
gacuguaaacugaggaaa

SEQ ID NO: 502 - RNA, 19 nt, Artificial Sequence
  Synthetic
ggacuguaaacugaggaaa

SEQ ID NO: 503 - RNA, 23 nt, Artificial Sequence
  Synthetic
gcacggacuguaaacugaggaaa

SEQ ID NO: 504 - RNA, 22 nt, Artificial Sequence
  Synthetic
gcuuauuagagacccuaggaaa

SEQ ID NO: 505 - RNA, 19 nt, Artificial Sequence
  Synthetic
gaucuacuuaaaagggaaa

SEQ ID NO: 506 - RNA, 22 nt, Artificial Sequence
  Synthetic
gaagguggaaaaagaagggaaa

SEQ ID NO: 507 - RNA, 23 nt, Artificial Sequence
  Synthetic
ggaagguggaaaaagaagggaaa

SEQ ID NO: 508 - RNA, 22 nt, Artificial Sequence
  Synthetic
gccuuuauccuuuaaauggaaa

SEQ ID NO: 509 - RNA, 19 nt, Artificial Sequence
  Synthetic
guuugaacagggauggaaa

SEQ ID NO: 510 - RNA, 24 nt, Artificial Sequence
  Synthetic
gcauuguuugaacagggauggaaa

SEQ ID NO: 511 - RNA, 21 nt, Artificial Sequence
  Synthetic
gaaaggguaaagacuuggaaa

SEQ ID NO: 512 - RNA, 18 nt, Artificial Sequence
  Synthetic
gaauacguggcuuggaaa

SEQ ID NO: 513 - RNA, 19 nt, Artificial Sequence
  Synthetic
ggaauacguggcuuggaaa

SEQ ID NO: 514 - RNA, 22 nt, Artificial Sequence
  Synthetic
guacucacuagaacaaaugaaa

SEQ ID NO: 515 - RNA, 24 nt, Artificial Sequence
  Synthetic
gauagacucauagaccaaaugaaa

SEQ ID NO: 516 - RNA, 23 nt, Artificial Sequence
  Synthetic
gaaaacagcacaggauaaugaaa

SEQ ID NO: 517 - RNA, 23 nt, Artificial Sequence
  Synthetic
gauuuuuuagucaauuaaugaaa

SEQ ID NO: 518 - RNA, 22 nt, Artificial Sequence
  Synthetic
guuaaaacuguaccgcaugaaa

SEQ ID NO: 519 - RNA, 23 nt, Artificial Sequence
  Synthetic
gaagaagauaucaaaagaugaaa

SEQ ID NO: 520 - RNA, 24 nt, Artificial Sequence
  Synthetic
ggaagaagauaucaaaagaugaaa

SEQ ID NO: 521 - RNA, 22 nt, Artificial Sequence
  Synthetic
guaauuagggaugauuaugaaa

SEQ ID NO: 522 - RNA, 19 nt, Artificial Sequence
  Synthetic
gcaggaauuagcccugaaa

SEQ ID NO: 523 - RNA, 20 nt, Artificial Sequence
  Synthetic
gaaguauuucaguccugaaa

SEQ ID NO: 524 - RNA, 24 nt, Artificial Sequence
  Synthetic
gucagaaguauuucaguccugaaa

SEQ ID NO: 525 - RNA, 23 nt, Artificial Sequence
  Synthetic
guuuaaaauaacuaguccugaaa

SEQ ID NO: 526 - RNA, 18 nt, Artificial Sequence
  Synthetic
gaguguuaccuucugaaa

SEQ ID NO: 527 - RNA, 23 nt, Artificial Sequence
  Synthetic
guauagaguguuaccuucugaaa

SEQ ID NO: 528 - RNA, 20 nt, Artificial Sequence
  Synthetic
gauuugcaaagcaagugaaa

SEQ ID NO: 529 - RNA, 19 nt, Artificial Sequence
  Synthetic
gacuguguguggagugaaa

SEQ ID NO: 530 - RNA, 22 nt, Artificial Sequence
  Synthetic
gcagacuguguguggagugaaa

SEQ ID NO: 531 - RNA, 18 nt, Artificial Sequence
  Synthetic
gaggacauuaaggugaaa

SEQ ID NO: 532 - RNA, 20 nt, Artificial Sequence
  Synthetic
gcgaggacauuaaggugaaa

SEQ ID NO: 533 - RNA, 22 nt, Artificial Sequence
  Synthetic
gugcgaggacauuaaggugaaa

SEQ ID NO: 534 - RNA, 20 nt, Artificial Sequence
  Synthetic
guaauaaugggguggugaaa

SEQ ID NO: 535 - RNA, 23 nt, Artificial Sequence
  Synthetic
gcuguaauaaugggguggugaaa

SEQ ID NO: 536 - RNA, 24 nt, Artificial Sequence
  Synthetic
ggcuguaauaaugggguggugaaa

SEQ ID NO: 537 - RNA, 20 nt, Artificial Sequence
  Synthetic
guugucuaaagagugugaaa

SEQ ID NO: 538 - RNA, 24 nt, Artificial Sequence
  Synthetic
gauuguugucuaaagagugugaaa

SEQ ID NO: 539 - RNA, 22 nt, Artificial Sequence
  Synthetic
gaacaauggaaaauccuugaaa

SEQ ID NO: 540 - RNA, 21 nt, Artificial Sequence
  Synthetic
gccugcuaugauaaguugaaa

SEQ ID NO: 541 - RNA, 24 nt, Artificial Sequence
  Synthetic
guagccugcuaugauaaguugaaa

SEQ ID NO: 542 - RNA, 20 nt, Artificial Sequence
  Synthetic
gcccaagucuccuguugaaa

SEQ ID NO: 543 - RNA, 20 nt, Artificial Sequence
  Synthetic
gccaaaguuugcuuuugaaa

SEQ ID NO: 544 - RNA, 24 nt, Artificial Sequence
  Synthetic
gcauccuuaaggaauacaaauaaa

SEQ ID NO: 545 - RNA, 21 nt, Artificial Sequence
  Synthetic
gaaaguauaguagcaaauaaa

SEQ ID NO: 546 - RNA, 21 nt, Artificial Sequence
  Synthetic
guucuuccacagggaaauaaa

SEQ ID NO: 547 - RNA, 24 nt, Artificial Sequence
  Synthetic
guuguucuuccacagggaaauaaa

SEQ ID NO: 548 - RNA, 24 nt, Artificial Sequence
  Synthetic
gauaauucauucguugagaauaaa

SEQ ID NO: 549 - RNA, 22 nt, Artificial Sequence
  Synthetic
guagacauuaguaaggaauaaa

SEQ ID NO: 550 - RNA, 24 nt, Artificial Sequence
  Synthetic
gcuucacagaucuuucugaauaaa

SEQ ID NO: 551 - RNA, 22 nt, Artificial Sequence
  Synthetic
gaaaaauaaucacccuaauaaa

SEQ ID NO: 552 - RNA, 20 nt, Artificial Sequence
  Synthetic
gauuccuuguagcuaauaaa

SEQ ID NO: 553 - RNA, 24 nt, Artificial Sequence
  Synthetic
gaccuaaacuaaagaaguaauaaa

SEQ ID NO: 554 - RNA, 20 nt, Artificial Sequence
  Synthetic
guaaguggacagcccauaaa

SEQ ID NO: 555 - RNA, 22 nt, Artificial Sequence
  Synthetic
gaguaaguggacagcccauaaa

SEQ ID NO: 556 - RNA, 23 nt, Artificial Sequence
  Synthetic
ggaguaaguggacagcccauaaa

SEQ ID NO: 557 - RNA, 24 nt, Artificial Sequence
  Synthetic
gggaguaaguggacagcccauaaa

SEQ ID NO: 558 - RNA, 19 nt, Artificial Sequence
  Synthetic
gaaagcaagagagcauaaa

SEQ ID NO: 559 - RNA, 20 nt, Artificial Sequence
  Synthetic
ggaaagcaagagagcauaaa

SEQ ID NO: 560 - RNA, 18 nt, Artificial Sequence
  Synthetic
gagccagcuaggcauaaa

SEQ ID NO: 561 - RNA, 24 nt, Artificial Sequence
  Synthetic
gaauaagagccagcuaggcauaaa

SEQ ID NO: 562 - RNA, 18 nt, Artificial Sequence
  Synthetic
ggaacaggcgaucauaaa

SEQ ID NO: 563 - RNA, 20 nt, Artificial Sequence
  Synthetic
gaggaacaggcgaucauaaa

SEQ ID NO: 564 - RNA, 21 nt, Artificial Sequence
  Synthetic
ggaggaacaggcgaucauaaa

SEQ ID NO: 565 - RNA, 24 nt, Artificial Sequence
  Synthetic
gcuggaggaacaggcgaucauaaa

SEQ ID NO: 566 - RNA, 18 nt, Artificial Sequence
  Synthetic
ggcuagaugcaagauaaa

SEQ ID NO: 567 - RNA, 20 nt, Artificial Sequence
  Synthetic
gccaaaagcauauagauaaa

SEQ ID NO: 568 - RNA, 18 nt, Artificial Sequence
  Synthetic
gauuugaaguaggauaaa

SEQ ID NO: 569 - RNA, 20 nt, Artificial Sequence
  Synthetic
gagauuugaaguaggauaaa

SEQ ID NO: 570 - RNA, 20 nt, Artificial Sequence
  Synthetic
gcuguaugaucagggauaaa

SEQ ID NO: 571 - RNA, 22 nt, Artificial Sequence
  Synthetic
gugcuguaugaucagggauaaa

SEQ ID NO: 572 - RNA, 24 nt, Artificial Sequence
  Synthetic
gagugcuguaugaucagggauaaa

SEQ ID NO: 573 - RNA, 19 nt, Artificial Sequence
  Synthetic
gacuucuggggaugauaaa

SEQ ID NO: 574 - RNA, 18 nt, Artificial Sequence
  Synthetic
ggcauuuggcuugauaaa

SEQ ID NO: 575 - RNA, 21 nt, Artificial Sequence
  Synthetic
gaaacuguaaugcuugauaaa

SEQ ID NO: 576 - RNA, 22 nt, Artificial Sequence
  Synthetic
gauuaucaugucuuuugauaaa

SEQ ID NO: 577 - RNA, 22 nt, Artificial Sequence
  Synthetic
gugagucccauaaaaauauaaa

SEQ ID NO: 578 - RNA, 20 nt, Artificial Sequence
  Synthetic
gaaggaaacacauauauaaa

SEQ ID NO: 579 - RNA, 21 nt, Artificial Sequence
  Synthetic
ggaaggaaacacauauauaaa

SEQ ID NO: 580 - RNA, 20 nt, Artificial Sequence
  Synthetic
gacuuugaaauuacuauaaa

SEQ ID NO: 581 - RNA, 24 nt, Artificial Sequence
  Synthetic
gcuuuuugaaucuguuacuauaaa

SEQ ID NO: 582 - RNA, 20 nt, Artificial Sequence
  Synthetic
gauggaauaagaucuauaaa

SEQ ID NO: 583 - RNA, 20 nt, Artificial Sequence
  Synthetic
gaagagugaauuucuauaaa

SEQ ID NO: 584 - RNA, 23 nt, Artificial Sequence
  Synthetic
gcagaagagugaauuucuauaaa

SEQ ID NO: 585 - RNA, 19 nt, Artificial Sequence
  Synthetic
gauauuauucuaguauaaa

SEQ ID NO: 586 - RNA, 18 nt, Artificial Sequence
  Synthetic
gccuagagaguuuauaaa

SEQ ID NO: 587 - RNA, 22 nt, Artificial Sequence
  Synthetic
gaaagccuagagaguuuauaaa

SEQ ID NO: 588 - RNA, 23 nt, Artificial Sequence
  Synthetic
ggaaagccuagagaguuuauaaa

SEQ ID NO: 589 - RNA, 18 nt, Artificial Sequence
  Synthetic
gguuuagguguuuauaaa

SEQ ID NO: 590 - RNA, 24 nt, Artificial Sequence
  Synthetic
guuccagguuuagguguuuauaaa

SEQ ID NO: 591 - RNA, 19 nt, Artificial Sequence
  Synthetic
gaaguuugcuacaacuaaa

SEQ ID NO: 592 - RNA, 20 nt, Artificial Sequence
  Synthetic
ggaaguuugcuacaacuaaa

SEQ ID NO: 593 - RNA, 21 nt, Artificial Sequence
  Synthetic
gggaaguuugcuacaacuaaa

SEQ ID NO: 594 - RNA, 23 nt, Artificial Sequence
  Synthetic
gagggaaguuugcuacaacuaaa

SEQ ID NO: 595 - RNA, 20 nt, Artificial Sequence
  Synthetic
gauacaaaguaaugacuaaa

SEQ ID NO: 596 - RNA, 24 nt, Artificial Sequence
  Synthetic
gaaugauacaaaguaaugacuaaa

SEQ ID NO: 597 - RNA, 18 nt, Artificial Sequence
  Synthetic
guuucuaugaauacuaaa

SEQ ID NO: 598 - RNA, 19 nt, Artificial Sequence
  Synthetic
gguuucuaugaauacuaaa

SEQ ID NO: 599 - RNA, 21 nt, Artificial Sequence
  Synthetic
gugguuucuaugaauacuaaa

SEQ ID NO: 600 - RNA, 19 nt, Artificial Sequence
  Synthetic
gccuaagcagauaccuaaa

SEQ ID NO: 601 - RNA, 22 nt, Artificial Sequence
  Synthetic
gauaucucuucaagauccuaaa

SEQ ID NO: 602 - RNA, 19 nt, Artificial Sequence
  Synthetic
guccuuacuagagucuaaa

SEQ ID NO: 603 - RNA, 21 nt, Artificial Sequence
  Synthetic
guguccuuacuagagucuaaa

SEQ ID NO: 604 - RNA, 21 nt, Artificial Sequence
  Synthetic
guacucaaacugucuucuaaa

SEQ ID NO: 605 - RNA, 23 nt, Artificial Sequence
  Synthetic
guuuuuuuaauguucaaaguaaa

SEQ ID NO: 606 - RNA, 24 nt, Artificial Sequence
  Synthetic
gguuuuuuuaauguucaaaguaaa

SEQ ID NO: 607 - RNA, 24 nt, Artificial Sequence
  Synthetic
gccaucauaccaaaaggaaguaaa

SEQ ID NO: 608 - RNA, 18 nt, Artificial Sequence
  Synthetic
gggcaacuucagaguaaa

SEQ ID NO: 609 - RNA, 21 nt, Artificial Sequence
  Synthetic
guugggcaacuucagaguaaa

SEQ ID NO: 610 - RNA, 22 nt, Artificial Sequence
  Synthetic
guaacauacugaaaauaguaaa

SEQ ID NO: 611 - RNA, 21 nt, Artificial Sequence
  Synthetic
gacuucauuuaaaaagguaaa

SEQ ID NO: 612 - RNA, 23 nt, Artificial Sequence
  Synthetic
gugacuucauuuaaaaagguaaa

SEQ ID NO: 613 - RNA, 20 nt, Artificial Sequence
  Synthetic
gaauauaugcuggagguaaa

SEQ ID NO: 614 - RNA, 24 nt, Artificial Sequence
  Synthetic
gucugaauauaugcuggagguaaa

SEQ ID NO: 615 - RNA, 18 nt, Artificial Sequence
  Synthetic
gaaacacaguuugguaaa

SEQ ID NO: 616 - RNA, 22 nt, Artificial Sequence
  Synthetic
gccugaaacacaguuugguaaa

SEQ ID NO: 617 - RNA, 21 nt, Artificial Sequence
  Synthetic
gcucaugauugcauauguaaa

SEQ ID NO: 618 - RNA, 24 nt, Artificial Sequence
  Synthetic
gaugcucaugauugcauauguaaa

SEQ ID NO: 619 - RNA, 24 nt, Artificial Sequence
  Synthetic
guacuuuacuuuguauuauguaaa

SEQ ID NO: 620 - RNA, 18 nt, Artificial Sequence
  Synthetic
gcagggcauuguuguaaa

SEQ ID NO: 621 - RNA, 19 nt, Artificial Sequence
  Synthetic
ggcagggcauuguuguaaa

SEQ ID NO: 622 - RNA, 21 nt, Artificial Sequence
  Synthetic
gaucuucucucccaaauuaaa

SEQ ID NO: 623 - RNA, 19 nt, Artificial Sequence
  Synthetic
guuaagugacuaaauuaaa

SEQ ID NO: 624 - RNA, 23 nt, Artificial Sequence
  Synthetic
guuuguuaagugacuaaauuaaa

SEQ ID NO: 625 - RNA, 18 nt, Artificial Sequence
  Synthetic
guacugauuauaauuaaa

SEQ ID NO: 626 - RNA, 19 nt, Artificial Sequence
  Synthetic
gagggggacaaacauuaaa

SEQ ID NO: 627 - RNA, 20 nt, Artificial Sequence
  Synthetic
ggagggggacaaacauuaaa

SEQ ID NO: 628 - RNA, 20 nt, Artificial Sequence
  Synthetic
gacuugggguuaagauuaaa

SEQ ID NO: 629 - RNA, 23 nt, Artificial Sequence
  Synthetic
gaaauuuaggaauucagauuaaa

SEQ ID NO: 630 - RNA, 18 nt, Artificial Sequence
  Synthetic
gaauugcuagagauuaaa

SEQ ID NO: 631 - RNA, 22 nt, Artificial Sequence
  Synthetic
gugcugaaaaauauuuauuaaa

SEQ ID NO: 632 - RNA, 24 nt, Artificial Sequence
  Synthetic
gauuuauauaccagaguucuuaaa

SEQ ID NO: 633 - RNA, 21 nt, Artificial Sequence
  Synthetic
guuugugauuuuuccguuaaa

SEQ ID NO: 634 - RNA, 22 nt, Artificial Sequence
  Synthetic
gguuugugauuuuuccguuaaa

SEQ ID NO: 635 - RNA, 24 nt, Artificial Sequence
  Synthetic
gugguuugugauuuuuccguuaaa

SEQ ID NO: 636 - RNA, 23 nt, Artificial Sequence
  Synthetic
gcucucauauuuucuugguuaaa

SEQ ID NO: 637 - RNA, 22 nt, Artificial Sequence
  Synthetic
guauuaaaagaaggauguuaaa

SEQ ID NO: 638 - RNA, 24 nt, Artificial Sequence
  Synthetic
guguauuaaaagaaggauguuaaa

SEQ ID NO: 639 - RNA, 23 nt, Artificial Sequence
  Synthetic
gcucaauauaaaguuuuguuaaa

SEQ ID NO: 640 - RNA, 20 nt, Artificial Sequence
  Synthetic
gaaauguucgugaauuuaaa

SEQ ID NO: 641 - RNA, 21 nt, Artificial Sequence
  Synthetic
ggaaauguucgugaauuuaaa

SEQ ID NO: 642 - RNA, 24 nt, Artificial Sequence
  Synthetic
guuggaaauguucgugaauuuaaa

SEQ ID NO: 643 - RNA, 22 nt, Artificial Sequence
  Synthetic
gaaggcaaauaagacauuuaaa

SEQ ID NO: 644 - RNA, 22 nt, Artificial Sequence
  Synthetic
gaauaugugcagggacuuuaaa

SEQ ID NO: 645 - RNA, 18 nt, Artificial Sequence
  Synthetic
ggacaggguugcuuuaaa

SEQ ID NO: 646 - RNA, 20 nt, Artificial Sequence
  Synthetic
guggacaggguugcuuuaaa

SEQ ID NO: 647 - RNA, 21 nt, Artificial Sequence
  Synthetic
gguggacaggguugcuuuaaa

SEQ ID NO: 648 - RNA, 23 nt, Artificial Sequence
  Synthetic
gugguggacaggguugcuuuaaa

SEQ ID NO: 649 - RNA, 24 nt, Artificial Sequence
  Synthetic
gacuacuguuaauguaucuuuaaa

SEQ ID NO: 650 - RNA, 18 nt, Artificial Sequence
  Synthetic
guacauuccaauuuuaaa

SEQ ID NO: 651 - RNA, 20 nt, Artificial Sequence
  Synthetic
gaguacauuccaauuuuaaa

SEQ ID NO: 652 - RNA, 21 nt, Artificial Sequence
  Synthetic
ggaguacauuccaauuuuaaa

SEQ ID NO: 653 - RNA, 24 nt, Artificial Sequence
  Synthetic
gcuggaguacauuccaauuuuaaa

SEQ ID NO: 654 - RNA, 20 nt, Artificial Sequence
  Synthetic
guccuaauguagauuuuaaa

SEQ ID NO: 655 - RNA, 21 nt, Artificial Sequence
  Synthetic
gguccuaauguagauuuuaaa

SEQ ID NO: 656 - RNA, 23 nt, Artificial Sequence
  Synthetic
gugguccuaauguagauuuuaaa

SEQ ID NO: 657 - RNA, 24 nt, Artificial Sequence
  Synthetic
ggugguccuaauguagauuuuaaa

SEQ ID NO: 658 - RNA, 22 nt, Artificial Sequence
  Synthetic
gccuauuuuacugucuuuuaaa

SEQ ID NO: 659 - RNA, 24 nt, Artificial Sequence
  Synthetic
gagccuauuuuacugucuuuuaaa

SEQ ID NO: 660 - RNA, 19 nt, Artificial Sequence
  Synthetic
gccacuucuuucuuuuaaa

SEQ ID NO: 661 - RNA, 23 nt, Artificial Sequence
  Synthetic
gcaaugugcaauucauuuuuaaa

SEQ ID NO: 662 - RNA, 18 nt, Artificial Sequence
  Synthetic
gaaacugauguuuuuaaa

SEQ ID NO: 663 - RNA, 19 nt, Artificial Sequence
  Synthetic
ggaaacugauguuuuuaaa

SEQ ID NO: 664 - RNA, 20 nt, Artificial Sequence
  Synthetic
gaaagggagcaauaaaacaa

SEQ ID NO: 665 - RNA, 21 nt, Artificial Sequence
  Synthetic
gauuuuuccauuuacaaacaa

SEQ ID NO: 666 - RNA, 21 nt, Artificial Sequence
  Synthetic
gaaaauugucuguucaaacaa

SEQ ID NO: 667 - RNA, 21 nt, Artificial Sequence
  Synthetic
gacugcucuucuuucaaacaa

SEQ ID NO: 668 - RNA, 23 nt, Artificial Sequence
  Synthetic
gugacugcucuucuuucaaacaa

SEQ ID NO: 669 - RNA, 18 nt, Artificial Sequence
  Synthetic
guucccauuccuaaacaa

SEQ ID NO: 670 - RNA, 23 nt, Artificial Sequence
  Synthetic
gaccuguucccauuccuaaacaa

SEQ ID NO: 671 - RNA, 18 nt, Artificial Sequence
  Synthetic
gcaguucaagcuaaacaa

SEQ ID NO: 672 - RNA, 24 nt, Artificial Sequence
  Synthetic
gaaauagcaguucaagcuaaacaa

SEQ ID NO: 673 - RNA, 23 nt, Artificial Sequence
  Synthetic
gaccaaaguugacuucccaacaa

SEQ ID NO: 674 - RNA, 24 nt, Artificial Sequence
  Synthetic
ggaccaaaguugacuucccaacaa

SEQ ID NO: 675 - RNA, 21 nt, Artificial Sequence
  Synthetic
gccauauaaacaaugcaacaa

SEQ ID NO: 676 - RNA, 22 nt, Artificial Sequence
  Synthetic
guuuucaaacuugguucaacaa

SEQ ID NO: 677 - RNA, 18 nt, Artificial Sequence
  Synthetic
gccaaauuuauagaacaa

SEQ ID NO: 678 - RNA, 23 nt, Artificial Sequence
  Synthetic
gcaauaguuccguggaggaacaa

SEQ ID NO: 679 - RNA, 18 nt, Artificial Sequence
  Synthetic
gauagaaagagggaacaa

SEQ ID NO: 680 - RNA, 23 nt, Artificial Sequence
  Synthetic
gcacagauagaaagagggaacaa

SEQ ID NO: 681 - RNA, 24 nt, Artificial Sequence
  Synthetic
gaaaauacaauuagacaaacacaa

SEQ ID NO: 682 - RNA, 18 nt, Artificial Sequence
  Synthetic
gcuaggauagacacacaa

SEQ ID NO: 683 - RNA, 21 nt, Artificial Sequence
  Synthetic
gaagcuaggauagacacacaa

SEQ ID NO: 684 - RNA, 24 nt, Artificial Sequence
  Synthetic
gacacacaauggaauacuacacaa

SEQ ID NO: 685 - RNA, 22 nt, Artificial Sequence
  Synthetic
gccucaaaguugucaaccacaa

SEQ ID NO: 686 - RNA, 18 nt, Artificial Sequence
  Synthetic
guguauuauuaaccacaa

SEQ ID NO: 687 - RNA, 18 nt, Artificial Sequence
  Synthetic
gcuaaagaguacccacaa

SEQ ID NO: 688 - RNA, 19 nt, Artificial Sequence
  Synthetic
ggcuaaagaguacccacaa

SEQ ID NO: 689 - RNA, 20 nt, Artificial Sequence
  Synthetic
gggcuaaagaguacccacaa

SEQ ID NO: 690 - RNA, 22 nt, Artificial Sequence
  Synthetic
gugggcuaaagaguacccacaa

SEQ ID NO: 691 - RNA, 18 nt, Artificial Sequence
  Synthetic
ggagcaaaaaggccacaa

SEQ ID NO: 692 - RNA, 20 nt, Artificial Sequence
  Synthetic
guggagcaaaaaggccacaa

SEQ ID NO: 693 - RNA, 23 nt, Artificial Sequence
  Synthetic
gauguggagcaaaaaggccacaa

SEQ ID NO: 694 - RNA, 21 nt, Artificial Sequence
  Synthetic
guuuagauucagagagcacaa

SEQ ID NO: 695 - RNA, 23 nt, Artificial Sequence
  Synthetic
gaguuuagauucagagagcacaa

SEQ ID NO: 696 - RNA, 21 nt, Artificial Sequence
  Synthetic
gaauuuagggaaauggcacaa

SEQ ID NO: 697 - RNA, 21 nt, Artificial Sequence
  Synthetic
guucucuacaggcugucacaa

SEQ ID NO: 698 - RNA, 20 nt, Artificial Sequence
  Synthetic
gcuugaaaauguauucacaa

SEQ ID NO: 699 - RNA, 23 nt, Artificial Sequence
  Synthetic
gaaacuuaaagaaauaaagacaa

SEQ ID NO: 700 - RNA, 19 nt, Artificial Sequence
  Synthetic
gcucaaaaguuugagacaa

SEQ ID NO: 701 - RNA, 20 nt, Artificial Sequence
  Synthetic
gcacuguugaaggaggacaa

SEQ ID NO: 702 - RNA, 21 nt, Artificial Sequence
  Synthetic
gauuccucugaauagggacaa

SEQ ID NO: 703 - RNA, 18 nt, Artificial Sequence
  Synthetic
guuugauaacuuggacaa

SEQ ID NO: 704 - RNA, 21 nt, Artificial Sequence
  Synthetic
guaguuugauaacuuggacaa

SEQ ID NO: 705 - RNA, 22 nt, Artificial Sequence
  Synthetic
gauucaaaguguugcaugacaa

SEQ ID NO: 706 - RNA, 23 nt, Artificial Sequence
  Synthetic
gucuuuuagguccaagaauacaa

SEQ ID NO: 707 - RNA, 24 nt, Artificial Sequence
  Synthetic
ggucuuuuagguccaagaauacaa

SEQ ID NO: 708 - RNA, 18 nt, Artificial Sequence
  Synthetic
gaaagaaggcuuauacaa

SEQ ID NO: 709 - RNA, 19 nt, Artificial Sequence
  Synthetic
ggaaagaaggcuuauacaa

SEQ ID NO: 710 - RNA, 20 nt, Artificial Sequence
  Synthetic
gggaaagaaggcuuauacaa

SEQ ID NO: 711 - RNA, 24 nt, Artificial Sequence
  Synthetic
guaagggaaagaaggcuuauacaa

SEQ ID NO: 712 - RNA, 23 nt, Artificial Sequence
  Synthetic
gacauuaaagauguuuuauacaa

SEQ ID NO: 713 - RNA, 20 nt, Artificial Sequence
  Synthetic
gcauuguuaaagaacuacaa

SEQ ID NO: 714 - RNA, 22 nt, Artificial Sequence
  Synthetic
gugcauuguuaaagaacuacaa

SEQ ID NO: 715 - RNA, 20 nt, Artificial Sequence
  Synthetic
guucagcugcugcccuacaa

SEQ ID NO: 716 - RNA, 18 nt, Artificial Sequence
  Synthetic
guguuccugcagcuacaa

SEQ ID NO: 717 - RNA, 21 nt, Artificial Sequence
  Synthetic
guuugagaucgauuucuacaa

SEQ ID NO: 718 - RNA, 22 nt, Artificial Sequence
  Synthetic
gauacuuuuuucaucaguacaa

SEQ ID NO: 719 - RNA, 18 nt, Artificial Sequence
  Synthetic
gcagugacauugguacaa

SEQ ID NO: 720 - RNA, 18 nt, Artificial Sequence
  Synthetic
gugauagaagaaaaccaa

SEQ ID NO: 721 - RNA, 21 nt, Artificial Sequence
  Synthetic
guuauaaauuauagaaaccaa

SEQ ID NO: 722 - RNA, 24 nt, Artificial Sequence
  Synthetic
gauguuauaaauuauagaaaccaa

SEQ ID NO: 723 - RNA, 20 nt, Artificial Sequence
  Synthetic
gcaaauacauuauaaaccaa

SEQ ID NO: 724 - RNA, 21 nt, Artificial Sequence
  Synthetic
ggcaaauacauuauaaaccaa

SEQ ID NO: 725 - RNA, 22 nt, Artificial Sequence
  Synthetic
gggcaaauacauuauaaaccaa

SEQ ID NO: 726 - RNA, 22 nt, Artificial Sequence
  Synthetic
gauaaugcaucuuuucaaccaa

SEQ ID NO: 727 - RNA, 20 nt, Artificial Sequence
  Synthetic
gcuauacuuuggguaaccaa

SEQ ID NO: 728 - RNA, 22 nt, Artificial Sequence
  Synthetic
gugcuauacuuuggguaaccaa

SEQ ID NO: 729 - RNA, 24 nt, Artificial Sequence
  Synthetic
gaaauccaauaauauauucaccaa

SEQ ID NO: 730 - RNA, 22 nt, Artificial Sequence
  Synthetic
gcccagaucacaucuagaccaa

SEQ ID NO: 731 - RNA, 23 nt, Artificial Sequence
  Synthetic
ggcccagaucacaucuagaccaa

SEQ ID NO: 732 - RNA, 24 nt, Artificial Sequence
  Synthetic
gggcccagaucacaucuagaccaa

SEQ ID NO: 733 - RNA, 18 nt, Artificial Sequence
  Synthetic
gaauacagaggcgaccaa

SEQ ID NO: 734 - RNA, 20 nt, Artificial Sequence
  Synthetic
gagaauacagaggcgaccaa

SEQ ID NO: 735 - RNA, 23 nt, Artificial Sequence
  Synthetic
gccaugugacuaguugugaccaa

SEQ ID NO: 736 - RNA, 18 nt, Artificial Sequence
  Synthetic
gcccacaauagauaccaa

SEQ ID NO: 737 - RNA, 20 nt, Artificial Sequence
  Synthetic
guugcaacacacugacccaa

SEQ ID NO: 738 - RNA, 20 nt, Artificial Sequence
  Synthetic
gaaguuguaaauaaucccaa

SEQ ID NO: 739 - RNA, 21 nt, Artificial Sequence
  Synthetic
ggaaguuguaaauaaucccaa

SEQ ID NO: 740 - RNA, 22 nt, Artificial Sequence
  Synthetic
gucugccuccccuuccucccaa

SEQ ID NO: 741 - RNA, 19 nt, Artificial Sequence
  Synthetic
gauuauaacaaggucccaa

SEQ ID NO: 742 - RNA, 22 nt, Artificial Sequence
  Synthetic
gcagauuauaacaaggucccaa

SEQ ID NO: 743 - RNA, 19 nt, Artificial Sequence
  Synthetic
guuauuuguuacuucccaa

SEQ ID NO: 744 - RNA, 23 nt, Artificial Sequence
  Synthetic
gauuauaucaauuuauuucccaa

SEQ ID NO: 745 - RNA, 23 nt, Artificial Sequence
  Synthetic
guauuuugggugacagaagccaa

SEQ ID NO: 746 - RNA, 18 nt, Artificial Sequence
  Synthetic
guuuaugugcagagccaa

SEQ ID NO: 747 - RNA, 21 nt, Artificial Sequence
  Synthetic
gucuaaagauagaguggccaa

SEQ ID NO: 748 - RNA, 19 nt, Artificial Sequence
  Synthetic
gcccauagggcucugccaa

SEQ ID NO: 749 - RNA, 20 nt, Artificial Sequence
  Synthetic
ggcccauagggcucugccaa

SEQ ID NO: 750 - RNA, 18 nt, Artificial Sequence
  Synthetic
gaucagcuccauugccaa

SEQ ID NO: 751 - RNA, 22 nt, Artificial Sequence
  Synthetic
gcaugaucagcuccauugccaa

SEQ ID NO: 752 - RNA, 19 nt, Artificial Sequence
  Synthetic
guaauauuucauuugccaa

SEQ ID NO: 753 - RNA, 20 nt, Artificial Sequence
  Synthetic
gguaauauuucauuugccaa

SEQ ID NO: 754 - RNA, 19 nt, Artificial Sequence
  Synthetic
gauaugcacuguuugccaa

SEQ ID NO: 755 - RNA, 20 nt, Artificial Sequence
  Synthetic
ggauaugcacuguuugccaa

SEQ ID NO: 756 - RNA, 21 nt, Artificial Sequence
  Synthetic
gggauaugcacuguuugccaa

SEQ ID NO: 757 - RNA, 24 nt, Artificial Sequence
  Synthetic
gucuacuuugauaacucuauccaa

SEQ ID NO: 758 - RNA, 18 nt, Artificial Sequence
  Synthetic
guacuucugacuuuccaa

SEQ ID NO: 759 - RNA, 19 nt, Artificial Sequence
  Synthetic
gguacuucugacuuuccaa

SEQ ID NO: 760 - RNA, 24 nt, Artificial Sequence
  Synthetic
gaaaagguacuucugacuuuccaa

SEQ ID NO: 761 - RNA, 18 nt, Artificial Sequence
  Synthetic
gacaguuuuuacaagcaa

SEQ ID NO: 762 - RNA, 19 nt, Artificial Sequence
  Synthetic
ggacaguuuuuacaagcaa

SEQ ID NO: 763 - RNA, 20 nt, Artificial Sequence
  Synthetic
gggacaguuuuuacaagcaa

SEQ ID NO: 764 - RNA, 19 nt, Artificial Sequence
  Synthetic
guuuugaaggaggaagcaa

SEQ ID NO: 765 - RNA, 21 nt, Artificial Sequence
  Synthetic
guguuuugaaggaggaagcaa

SEQ ID NO: 766 - RNA, 24 nt, Artificial Sequence
  Synthetic
gauguguuuugaaggaggaagcaa

SEQ ID NO: 767 - RNA, 18 nt, Artificial Sequence
  Synthetic
gaugaagaugguaagcaa

SEQ ID NO: 768 - RNA, 19 nt, Artificial Sequence
  Synthetic
ggaugaagaugguaagcaa

SEQ ID NO: 769 - RNA, 22 nt, Artificial Sequence
  Synthetic
gacggaugaagaugguaagcaa

SEQ ID NO: 770 - RNA, 19 nt, Artificial Sequence
  Synthetic
gucacacaauuuuaagcaa

SEQ ID NO: 771 - RNA, 18 nt, Artificial Sequence
  Synthetic
gaaaaucuuugacagcaa

SEQ ID NO: 772 - RNA, 23 nt, Artificial Sequence
  Synthetic
gcaaugaaaaucuuugacagcaa

SEQ ID NO: 773 - RNA, 18 nt, Artificial Sequence
  Synthetic
gcugaaggcuugcagcaa

SEQ ID NO: 774 - RNA, 19 nt, Artificial Sequence
  Synthetic
ggcugaaggcuugcagcaa

SEQ ID NO: 775 - RNA, 23 nt, Artificial Sequence
  Synthetic
gauuggcugaaggcuugcagcaa

SEQ ID NO: 776 - RNA, 19 nt, Artificial Sequence
  Synthetic
gacuuuuacaaucuagcaa

SEQ ID NO: 777 - RNA, 23 nt, Artificial Sequence
  Synthetic
gcuugacuuuuacaaucuagcaa

SEQ ID NO: 778 - RNA, 18 nt, Artificial Sequence
  Synthetic
ggccacacguaguagcaa

SEQ ID NO: 779 - RNA, 21 nt, Artificial Sequence
  Synthetic
gauggccacacguaguagcaa

SEQ ID NO: 780 - RNA, 24 nt, Artificial Sequence
  Synthetic
gccauccucucccuagggccgcaa

SEQ ID NO: 781 - RNA, 23 nt, Artificial Sequence
  Synthetic
guuucuaauuuaccagaaggcaa

SEQ ID NO: 782 - RNA, 22 nt, Artificial Sequence
  Synthetic
gauuccauucagaugaaggcaa

SEQ ID NO: 783 - RNA, 18 nt, Artificial Sequence
  Synthetic
gaagauagacacaggcaa

SEQ ID NO: 784 - RNA, 24 nt, Artificial Sequence
  Synthetic
gauuaagaagauagacacaggcaa

SEQ ID NO: 785 - RNA, 18 nt, Artificial Sequence
  Synthetic
gauauauugaauaggcaa

SEQ ID NO: 786 - RNA, 19 nt, Artificial Sequence
  Synthetic
gauuuuugguugggggcaa

SEQ ID NO: 787 - RNA, 21 nt, Artificial Sequence
  Synthetic
gugauuuuugguugggggcaa

SEQ ID NO: 788 - RNA, 22 nt, Artificial Sequence
  Synthetic
ggugauuuuugguugggggcaa

SEQ ID NO: 789 - RNA, 24 nt, Artificial Sequence
  Synthetic
gaggugauuuuugguugggggcaa

SEQ ID NO: 790 - RNA, 18 nt, Artificial Sequence
  Synthetic
gcaaggccauggaugcaa

SEQ ID NO: 791 - RNA, 20 nt, Artificial Sequence
  Synthetic
gagcaaggccauggaugcaa

SEQ ID NO: 792 - RNA, 22 nt, Artificial Sequence
  Synthetic
gugagcaaggccauggaugcaa

SEQ ID NO: 793 - RNA, 24 nt, Artificial Sequence
  Synthetic
gugugagcaaggccauggaugcaa

SEQ ID NO: 794 - RNA, 23 nt, Artificial Sequence
  Synthetic
guuuucucaggauugcuaugcaa

SEQ ID NO: 795 - RNA, 24 nt, Artificial Sequence
  Synthetic
gguuuucucaggauugcuaugcaa

SEQ ID NO: 796 - RNA, 23 nt, Artificial Sequence
  Synthetic
gccaaacauuuuuuguuaugcaa

SEQ ID NO: 797 - RNA, 18 nt, Artificial Sequence
  Synthetic
gcagcauaacaacugcaa

SEQ ID NO: 798 - RNA, 19 nt, Artificial Sequence
  Synthetic
ggcagcauaacaacugcaa

SEQ ID NO: 799 - RNA, 20 nt, Artificial Sequence
  Synthetic
gggcagcauaacaacugcaa

SEQ ID NO: 800 - RNA, 23 nt, Artificial Sequence
  Synthetic
gcugggcagcauaacaacugcaa

SEQ ID NO: 801 - RNA, 21 nt, Artificial Sequence
  Synthetic
guuuggaggagcacacugcaa

SEQ ID NO: 802 - RNA, 18 nt, Artificial Sequence
  Synthetic
guuuuauguguccugcaa

SEQ ID NO: 803 - RNA, 19 nt, Artificial Sequence
  Synthetic
gguuuuauguguccugcaa

SEQ ID NO: 804 - RNA, 24 nt, Artificial Sequence
  Synthetic
gucaagguuuuauguguccugcaa

SEQ ID NO: 805 - RNA, 19 nt, Artificial Sequence
  Synthetic
gaagugugggggugugcaa

SEQ ID NO: 806 - RNA, 23 nt, Artificial Sequence
  Synthetic
gacugaagugugggggugugcaa

SEQ ID NO: 807 - RNA, 20 nt, Artificial Sequence
  Synthetic
gacaugcucugauugugcaa

SEQ ID NO: 808 - RNA, 24 nt, Artificial Sequence
  Synthetic
gacugacaugcucugauugugcaa

SEQ ID NO: 809 - RNA, 18 nt, Artificial Sequence
  Synthetic
gcaauucaguaaaaucaa

SEQ ID NO: 810 - RNA, 24 nt, Artificial Sequence
  Synthetic
guauuagcaauucaguaaaaucaa

SEQ ID NO: 811 - RNA, 18 nt, Artificial Sequence
  Synthetic
guugcaauagucaaucaa

SEQ ID NO: 812 - RNA, 24 nt, Artificial Sequence
  Synthetic
guucauguugcaauagucaaucaa

SEQ ID NO: 813 - RNA, 22 nt, Artificial Sequence
  Synthetic
gcccaagaucuucuagaaucaa

SEQ ID NO: 814 - RNA, 19 nt, Artificial Sequence
  Synthetic
gaauuaggaggggaaucaa

SEQ ID NO: 815 - RNA, 18 nt, Artificial Sequence
  Synthetic
guguugucugugaaucaa

SEQ ID NO: 816 - RNA, 18 nt, Artificial Sequence
  Synthetic
gaccuuuguuuacaucaa

SEQ ID NO: 817 - RNA, 20 nt, Artificial Sequence
  Synthetic
gagaccuuuguuuacaucaa

SEQ ID NO: 818 - RNA, 21 nt, Artificial Sequence
  Synthetic
ggagaccuuuguuuacaucaa

SEQ ID NO: 819 - RNA, 21 nt, Artificial Sequence
  Synthetic
guuuauuuccaugggcaucaa

SEQ ID NO: 820 - RNA, 22 nt, Artificial Sequence
  Synthetic
gguuuauuuccaugggcaucaa

SEQ ID NO: 821 - RNA, 18 nt, Artificial Sequence
  Synthetic
guaauuuaucugcaucaa

SEQ ID NO: 822 - RNA, 21 nt, Artificial Sequence
  Synthetic
gauguaauuuaucugcaucaa

SEQ ID NO: 823 - RNA, 23 nt, Artificial Sequence
  Synthetic
gagauguaauuuaucugcaucaa

SEQ ID NO: 824 - RNA, 18 nt, Artificial Sequence
  Synthetic
ggaaaccaaagucaucaa

SEQ ID NO: 825 - RNA, 21 nt, Artificial Sequence
  Synthetic
gccggaaaccaaagucaucaa

SEQ ID NO: 826 - RNA, 22 nt, Artificial Sequence
  Synthetic
ggccggaaaccaaagucaucaa

SEQ ID NO: 827 - RNA, 23 nt, Artificial Sequence
  Synthetic
gggccggaaaccaaagucaucaa

SEQ ID NO: 828 - RNA, 18 nt, Artificial Sequence
  Synthetic
gguuuucuaccugaucaa

SEQ ID NO: 829 - RNA, 22 nt, Artificial Sequence
  Synthetic
gauagguuuucuaccugaucaa

SEQ ID NO: 830 - RNA, 23 nt, Artificial Sequence
  Synthetic
ggauagguuuucuaccugaucaa

SEQ ID NO: 831 - RNA, 20 nt, Artificial Sequence
  Synthetic
gaugccacaucgcauaucaa

SEQ ID NO: 832 - RNA, 22 nt, Artificial Sequence
  Synthetic
gagaugccacaucgcauaucaa

SEQ ID NO: 833 - RNA, 23 nt, Artificial Sequence
  Synthetic
ggagaugccacaucgcauaucaa

SEQ ID NO: 834 - RNA, 18 nt, Artificial Sequence
  Synthetic
ggagaucauggauaucaa

SEQ ID NO: 835 - RNA, 23 nt, Artificial Sequence
  Synthetic
gaauucaucagaaccacacucaa

SEQ ID NO: 836 - RNA, 20 nt, Artificial Sequence
  Synthetic
guaaugggaccuugacucaa

SEQ ID NO: 837 - RNA, 22 nt, Artificial Sequence
  Synthetic
gaguaaugggaccuugacucaa

SEQ ID NO: 838 - RNA, 21 nt, Artificial Sequence
  Synthetic
guccucuugacugacccucaa

SEQ ID NO: 839 - RNA, 19 nt, Artificial Sequence
  Synthetic
gaacagccaaugcucucaa

SEQ ID NO: 840 - RNA, 18 nt, Artificial Sequence
  Synthetic
guaguagccccuucucaa

SEQ ID NO: 841 - RNA, 19 nt, Artificial Sequence
  Synthetic
gguaguagccccuucucaa

SEQ ID NO: 842 - RNA, 20 nt, Artificial Sequence
  Synthetic
ggguaguagccccuucucaa

SEQ ID NO: 843 - RNA, 18 nt, Artificial Sequence
  Synthetic
gaaaugacaaguagucaa

SEQ ID NO: 844 - RNA, 20 nt, Artificial Sequence
  Synthetic
gagaaaugacaaguagucaa

SEQ ID NO: 845 - RNA, 18 nt, Artificial Sequence
  Synthetic
guccccuucggccgucaa

SEQ ID NO: 846 - RNA, 20 nt, Artificial Sequence
  Synthetic
gcguccccuucggccgucaa

SEQ ID NO: 847 - RNA, 24 nt, Artificial Sequence
  Synthetic
gaaagcguccccuucggccgucaa

SEQ ID NO: 848 - RNA, 18 nt, Artificial Sequence
  Synthetic
gacagcaucccaugucaa

SEQ ID NO: 849 - RNA, 21 nt, Artificial Sequence
  Synthetic
gcugacagcaucccaugucaa

SEQ ID NO: 850 - RNA, 22 nt, Artificial Sequence
  Synthetic
gcuccaaaauucauucugucaa

SEQ ID NO: 851 - RNA, 24 nt, Artificial Sequence
  Synthetic
gugcuccaaaauucauucugucaa

SEQ ID NO: 852 - RNA, 19 nt, Artificial Sequence
  Synthetic
gccacgacucuucugucaa

SEQ ID NO: 853 - RNA, 19 nt, Artificial Sequence
  Synthetic
guacucgauaaauugucaa

SEQ ID NO: 854 - RNA, 20 nt, Artificial Sequence
  Synthetic
gguacucgauaaauugucaa

SEQ ID NO: 855 - RNA, 18 nt, Artificial Sequence
  Synthetic
gguguacaccauugucaa

SEQ ID NO: 856 - RNA, 20 nt, Artificial Sequence
  Synthetic
gugguguacaccauugucaa

SEQ ID NO: 857 - RNA, 19 nt, Artificial Sequence
  Synthetic
guacuuuguguuuugucaa

SEQ ID NO: 858 - RNA, 19 nt, Artificial Sequence
  Synthetic
gaccaccaaucccauucaa

SEQ ID NO: 859 - RNA, 22 nt, Artificial Sequence
  Synthetic
guugaccaccaaucccauucaa

SEQ ID NO: 860 - RNA, 24 nt, Artificial Sequence
  Synthetic
gaguugaccaccaaucccauucaa

SEQ ID NO: 861 - RNA, 21 nt, Artificial Sequence
  Synthetic
gucauuuuuuagagcauucaa

SEQ ID NO: 862 - RNA, 21 nt, Artificial Sequence
  Synthetic
gcacaucucaugggcauucaa

SEQ ID NO: 863 - RNA, 23 nt, Artificial Sequence
  Synthetic
gagcacaucucaugggcauucaa

SEQ ID NO: 864 - RNA, 18 nt, Artificial Sequence
  Synthetic
gacagagcucugauucaa

SEQ ID NO: 865 - RNA, 20 nt, Artificial Sequence
  Synthetic
gugacagagcucugauucaa

SEQ ID NO: 866 - RNA, 19 nt, Artificial Sequence
  Synthetic
guuuggggucuuuauucaa

SEQ ID NO: 867 - RNA, 22 nt, Artificial Sequence
  Synthetic
gaaguuuggggucuuuauucaa

SEQ ID NO: 868 - RNA, 21 nt, Artificial Sequence
  Synthetic
gcacauuaucucauacuucaa

SEQ ID NO: 869 - RNA, 24 nt, Artificial Sequence
  Synthetic
gaagcacauuaucucauacuucaa

SEQ ID NO: 870 - RNA, 21 nt, Artificial Sequence
  Synthetic
guaucaaacuaaguucuucaa

SEQ ID NO: 871 - RNA, 18 nt, Artificial Sequence
  Synthetic
gguuucuauacuguucaa

SEQ ID NO: 872 - RNA, 22 nt, Artificial Sequence
  Synthetic
gccuaaaaagugucaauuucaa

SEQ ID NO: 873 - RNA, 18 nt, Artificial Sequence
  Synthetic
gauauguacgaauuucaa

SEQ ID NO: 874 - RNA, 20 nt, Artificial Sequence
  Synthetic
gagauauguacgaauuucaa

SEQ ID NO: 875 - RNA, 21 nt, Artificial Sequence
  Synthetic
ggagauauguacgaauuucaa

SEQ ID NO: 876 - RNA, 20 nt, Artificial Sequence
  Synthetic
guugauagcuuugauuucaa

SEQ ID NO: 877 - RNA, 24 nt, Artificial Sequence
  Synthetic
gcaaguucuguguuugccuuucaa

SEQ ID NO: 878 - RNA, 24 nt, Artificial Sequence
  Synthetic
gauuuacuuucaguagcuuuucaa

SEQ ID NO: 879 - RNA, 22 nt, Artificial Sequence
  Synthetic
gauauaaaguaaguguuuucaa

SEQ ID NO: 880 - RNA, 23 nt, Artificial Sequence
  Synthetic
ggauauaaaguaaguguuuucaa

SEQ ID NO: 881 - RNA, 20 nt, Artificial Sequence
  Synthetic
guaccuuauucauuuuucaa

SEQ ID NO: 882 - RNA, 22 nt, Artificial Sequence
  Synthetic
gaguaccuuauucauuuuucaa

SEQ ID NO: 883 - RNA, 19 nt, Artificial Sequence
  Synthetic
guuuauuguacuuuuucaa

SEQ ID NO: 884 - RNA, 20 nt, Artificial Sequence
  Synthetic
gguuuauuguacuuuuucaa

SEQ ID NO: 885 - RNA, 21 nt, Artificial Sequence
  Synthetic
guuagaaaaagagaaaaagaa

SEQ ID NO: 886 - RNA, 18 nt, Artificial Sequence
  Synthetic
gguuuccaaggaaaagaa

SEQ ID NO: 887 - RNA, 20 nt, Artificial Sequence
  Synthetic
gugguuuccaaggaaaagaa

SEQ ID NO: 888 - RNA, 18 nt, Artificial Sequence
  Synthetic
gcagggauaauaaaagaa

SEQ ID NO: 889 - RNA, 24 nt, Artificial Sequence
  Synthetic
gcuaaagcagggauaauaaaagaa

SEQ ID NO: 890 - RNA, 21 nt, Artificial Sequence
  Synthetic
guuacagugcccauaaaagaa

SEQ ID NO: 891 - RNA, 22 nt, Artificial Sequence
  Synthetic
gguuacagugcccauaaaagaa

SEQ ID NO: 892 - RNA, 23 nt, Artificial Sequence
  Synthetic
ggguuacagugcccauaaaagaa

SEQ ID NO: 893 - RNA, 24 nt, Artificial Sequence
  Synthetic
gaccaagagcagggaaagaaagaa

SEQ ID NO: 894 - RNA, 21 nt, Artificial Sequence
  Synthetic
gcacuuguauugaauaaagaa

SEQ ID NO: 895 - RNA, 23 nt, Artificial Sequence
  Synthetic
gaaacaugcuacuaucuaaagaa

SEQ ID NO: 896 - RNA, 22 nt, Artificial Sequence
  Synthetic
gauaccaagcauagguaaagaa

SEQ ID NO: 897 - RNA, 22 nt, Artificial Sequence
  Synthetic
guaccauaacuuuuaccaagaa

SEQ ID NO: 898 - RNA, 24 nt, Artificial Sequence
  Synthetic
guguaccauaacuuuuaccaagaa

SEQ ID NO: 899 - RNA, 24 nt, Artificial Sequence
  Synthetic
guuuccuggguagccuuccaagaa

SEQ ID NO: 900 - RNA, 18 nt, Artificial Sequence
  Synthetic
gguucuagggaucaagaa

SEQ ID NO: 901 - RNA, 19 nt, Artificial Sequence
  Synthetic
guuuaaauacacucaagaa

SEQ ID NO: 902 - RNA, 23 nt, Artificial Sequence
  Synthetic
guuaguuuaaauacacucaagaa

SEQ ID NO: 903 - RNA, 18 nt, Artificial Sequence
  Synthetic
gcauauuucaaagaagaa

SEQ ID NO: 904 - RNA, 20 nt, Artificial Sequence
  Synthetic
gugcauauuucaaagaagaa

SEQ ID NO: 905 - RNA, 23 nt, Artificial Sequence
  Synthetic
guugugcauauuucaaagaagaa

SEQ ID NO: 906 - RNA, 23 nt, Artificial Sequence
  Synthetic
gcuucaauuauguaacagaagaa

SEQ ID NO: 907 - RNA, 23 nt, Artificial Sequence
  Synthetic
guuaccaggagcuggaggaagaa

SEQ ID NO: 908 - RNA, 19 nt, Artificial Sequence
  Synthetic
guuuuacugacuggaagaa

SEQ ID NO: 909 - RNA, 23 nt, Artificial Sequence
  Synthetic
gcuuuaucaucaaaacugaagaa

SEQ ID NO: 910 - RNA, 19 nt, Artificial Sequence
  Synthetic
guugaaagauugugaagaa

SEQ ID NO: 911 - RNA, 20 nt, Artificial Sequence
  Synthetic
gguugaaagauugugaagaa

SEQ ID NO: 912 - RNA, 22 nt, Artificial Sequence
  Synthetic
gagguugaaagauugugaagaa

SEQ ID NO: 913 - RNA, 24 nt, Artificial Sequence
  Synthetic
gccuuaaugaaaguaccauaagaa

SEQ ID NO: 914 - RNA, 18 nt, Artificial Sequence
  Synthetic
guuacgguaggauaagaa

SEQ ID NO: 915 - RNA, 22 nt, Artificial Sequence
  Synthetic
guaaguuacgguaggauaagaa

SEQ ID NO: 916 - RNA, 23 nt, Artificial Sequence
  Synthetic
guuuuaaaagguaaucuuaagaa

SEQ ID NO: 917 - RNA, 20 nt, Artificial Sequence
  Synthetic
gauccauugcuucuuaagaa

SEQ ID NO: 918 - RNA, 24 nt, Artificial Sequence
  Synthetic
guaugauccauugcuucuuaagaa

SEQ ID NO: 919 - RNA, 23 nt, Artificial Sequence
  Synthetic
gaauaaaagauacaagaacagaa

SEQ ID NO: 920 - RNA, 19 nt, Artificial Sequence
  Synthetic
gagaugacuagacacagaa

SEQ ID NO: 921 - RNA, 18 nt, Artificial Sequence
  Synthetic
gaggaaacgaauacagaa

SEQ ID NO: 922 - RNA, 22 nt, Artificial Sequence
  Synthetic
gcccgaggaaacgaauacagaa

SEQ ID NO: 923 - RNA, 18 nt, Artificial Sequence
  Synthetic
guauuuauauauacagaa

SEQ ID NO: 924 - RNA, 18 nt, Artificial Sequence
  Synthetic
ggucuuaguaacccagaa

SEQ ID NO: 925 - RNA, 19 nt, Artificial Sequence
  Synthetic
gggucuuaguaacccagaa

SEQ ID NO: 926 - RNA, 20 nt, Artificial Sequence
  Synthetic
ggggucuuaguaacccagaa

SEQ ID NO: 927 - RNA, 19 nt, Artificial Sequence
  Synthetic
gaauaugcaauucccagaa

SEQ ID NO: 928 - RNA, 20 nt, Artificial Sequence
  Synthetic
ggaauaugcaauucccagaa

SEQ ID NO: 929 - RNA, 18 nt, Artificial Sequence
  Synthetic
gcacguuauuauccagaa

SEQ ID NO: 930 - RNA, 23 nt, Artificial Sequence
  Synthetic
gaaaugcacguuauuauccagaa

SEQ ID NO: 931 - RNA, 18 nt, Artificial Sequence
  Synthetic
ggugcaucgacuccagaa

SEQ ID NO: 932 - RNA, 19 nt, Artificial Sequence
  Synthetic
gggugcaucgacuccagaa

SEQ ID NO: 933 - RNA, 21 nt, Artificial Sequence
  Synthetic
gugggugcaucgacuccagaa

SEQ ID NO: 934 - RNA, 23 nt, Artificial Sequence
  Synthetic
gugugggugcaucgacuccagaa

SEQ ID NO: 935 - RNA, 20 nt, Artificial Sequence
  Synthetic
guucgagaucaguagcagaa

SEQ ID NO: 936 - RNA, 18 nt, Artificial Sequence
  Synthetic
gagaucaguuaggcagaa

SEQ ID NO: 937 - RNA, 19 nt, Artificial Sequence
  Synthetic
ggagaucaguuaggcagaa

SEQ ID NO: 938 - RNA, 20 nt, Artificial Sequence
  Synthetic
gggagaucaguuaggcagaa

SEQ ID NO: 939 - RNA, 18 nt, Artificial Sequence
  Synthetic
ggcuguuagaaaucagaa

SEQ ID NO: 940 - RNA, 20 nt, Artificial Sequence
  Synthetic
gaggcuguuagaaaucagaa

SEQ ID NO: 941 - RNA, 22 nt, Artificial Sequence
  Synthetic
gagaggcuguuagaaaucagaa

SEQ ID NO: 942 - RNA, 18 nt, Artificial Sequence
  Synthetic
ggcccacauugcucagaa

SEQ ID NO: 943 - RNA, 19 nt, Artificial Sequence
  Synthetic
gggcccacauugcucagaa

SEQ ID NO: 944 - RNA, 21 nt, Artificial Sequence
  Synthetic
gagggcccacauugcucagaa

SEQ ID NO: 945 - RNA, 19 nt, Artificial Sequence
  Synthetic
gucagucaugaagucagaa

SEQ ID NO: 946 - RNA, 23 nt, Artificial Sequence
  Synthetic
gcaugucagucaugaagucagaa

SEQ ID NO: 947 - RNA, 19 nt, Artificial Sequence
  Synthetic
gcaacccaauaugucagaa

SEQ ID NO: 948 - RNA, 22 nt, Artificial Sequence
  Synthetic
gcugcaacccaauaugucagaa

SEQ ID NO: 949 - RNA, 23 nt, Artificial Sequence
  Synthetic
gucaauggaauucagaaagagaa

SEQ ID NO: 950 - RNA, 21 nt, Artificial Sequence
  Synthetic
gaucuucuagaaucaagagaa

SEQ ID NO: 951 - RNA, 18 nt, Artificial Sequence
  Synthetic
gcugcacaauuaagagaa

SEQ ID NO: 952 - RNA, 22 nt, Artificial Sequence
  Synthetic
gcuagcugcacaauuaagagaa

SEQ ID NO: 953 - RNA, 19 nt, Artificial Sequence
  Synthetic
gaguuccuagggcagagaa

SEQ ID NO: 954 - RNA, 19 nt, Artificial Sequence
  Synthetic
gcagauugggggcagagaa

SEQ ID NO: 955 - RNA, 20 nt, Artificial Sequence
  Synthetic
guaguaguuguugcagagaa

SEQ ID NO: 956 - RNA, 18 nt, Artificial Sequence
  Synthetic
gguuggguagucagagaa

SEQ ID NO: 957 - RNA, 19 nt, Artificial Sequence
  Synthetic
ggguuggguagucagagaa

SEQ ID NO: 958 - RNA, 20 nt, Artificial Sequence
  Synthetic
gggguuggguagucagagaa

SEQ ID NO: 959 - RNA, 22 nt, Artificial Sequence
  Synthetic
gagggguuggguagucagagaa

SEQ ID NO: 960 - RNA, 24 nt, Artificial Sequence
  Synthetic
gugagggguuggguagucagagaa

SEQ ID NO: 961 - RNA, 20 nt, Artificial Sequence
  Synthetic
guagucaaguggauagagaa

SEQ ID NO: 962 - RNA, 21 nt, Artificial Sequence
  Synthetic
gcuauaagacaaccuagagaa

SEQ ID NO: 963 - RNA, 24 nt, Artificial Sequence
  Synthetic
gcagcuauaagacaaccuagagaa

SEQ ID NO: 964 - RNA, 20 nt, Artificial Sequence
  Synthetic
gcuggcauaaggcuagagaa

SEQ ID NO: 965 - RNA, 22 nt, Artificial Sequence
  Synthetic
gugcuggcauaaggcuagagaa

SEQ ID NO: 966 - RNA, 24 nt, Artificial Sequence
  Synthetic
gugugcuggcauaaggcuagagaa

SEQ ID NO: 967 - RNA, 21 nt, Artificial Sequence
  Synthetic
gaaagcagagaacuucgagaa

SEQ ID NO: 968 - RNA, 23 nt, Artificial Sequence
  Synthetic
gaauuuuguuuucuaaaggagaa

SEQ ID NO: 969 - RNA, 22 nt, Artificial Sequence
  Synthetic
gauacugaguauggauggagaa

SEQ ID NO: 970 - RNA, 20 nt, Artificial Sequence
  Synthetic
guuuauauuauucuggagaa

SEQ ID NO: 971 - RNA, 21 nt, Artificial Sequence
  Synthetic
gguuuauauuauucuggagaa

SEQ ID NO: 972 - RNA, 22 nt, Artificial Sequence
  Synthetic
ggguuuauauuauucuggagaa

SEQ ID NO: 973 - RNA, 19 nt, Artificial Sequence
  Synthetic
gauacuuacaccaugagaa

SEQ ID NO: 974 - RNA, 21 nt, Artificial Sequence
  Synthetic
gagauacuuacaccaugagaa

SEQ ID NO: 975 - RNA, 18 nt, Artificial Sequence
  Synthetic
gauuauaguauaugagaa

SEQ ID NO: 976 - RNA, 23 nt, Artificial Sequence
  Synthetic
guauuugggauucaaaaauagaa

SEQ ID NO: 977 - RNA, 24 nt, Artificial Sequence
  Synthetic
gguauuugggauucaaaaauagaa

SEQ ID NO: 978 - RNA, 19 nt, Artificial Sequence
  Synthetic
gccagugaaccaaauagaa

SEQ ID NO: 979 - RNA, 20 nt, Artificial Sequence
  Synthetic
ggccagugaaccaaauagaa

SEQ ID NO: 980 - RNA, 21 nt, Artificial Sequence
  Synthetic
gggccagugaaccaaauagaa

SEQ ID NO: 981 - RNA, 18 nt, Artificial Sequence
  Synthetic
gaugauuaugaaauagaa

SEQ ID NO: 982 - RNA, 19 nt, Artificial Sequence
  Synthetic
ggaugauuaugaaauagaa

SEQ ID NO: 983 - RNA, 20 nt, Artificial Sequence
  Synthetic
gggaugauuaugaaauagaa

SEQ ID NO: 984 - RNA, 19 nt, Artificial Sequence
  Synthetic
gacauagcaauaaauagaa

SEQ ID NO: 985 - RNA, 21 nt, Artificial Sequence
  Synthetic
gagacauagcaauaaauagaa

SEQ ID NO: 986 - RNA, 24 nt, Artificial Sequence
  Synthetic
gacuauguucauaaaauaauagaa

SEQ ID NO: 987 - RNA, 18 nt, Artificial Sequence
  Synthetic
gauuuucaacagauagaa

SEQ ID NO: 988 - RNA, 24 nt, Artificial Sequence
  Synthetic
gaauaagauuuucaacagauagaa

SEQ ID NO: 989 - RNA, 21 nt, Artificial Sequence
  Synthetic
gaaacaccuaaaaugauagaa

SEQ ID NO: 990 - RNA, 24 nt, Artificial Sequence
  Synthetic
gaugaaacaccuaaaaugauagaa

SEQ ID NO: 991 - RNA, 21 nt, Artificial Sequence
  Synthetic
guccaggagcugagccuagaa

SEQ ID NO: 992 - RNA, 24 nt, Artificial Sequence
  Synthetic
guuguccaggagcugagccuagaa

SEQ ID NO: 993 - RNA, 23 nt, Artificial Sequence
  Synthetic
gcauauaggccagaugucuagaa

SEQ ID NO: 994 - RNA, 22 nt, Artificial Sequence
  Synthetic
gaucaacugggagaaaguagaa

SEQ ID NO: 995 - RNA, 23 nt, Artificial Sequence
  Synthetic
ggaucaacugggagaaaguagaa

SEQ ID NO: 996 - RNA, 24 nt, Artificial Sequence
  Synthetic
gggaucaacugggagaaaguagaa

SEQ ID NO: 997 - RNA, 19 nt, Artificial Sequence
  Synthetic
gaaacuuggaccaguagaa

SEQ ID NO: 998 - RNA, 20 nt, Artificial Sequence
  Synthetic
gauuuuuucuaggaguagaa

SEQ ID NO: 999 - RNA, 23 nt, Artificial Sequence
  Synthetic
guagauuuuuucuaggaguagaa

SEQ ID NO: 1000 - RNA, 23 nt, Artificial Sequence
  Synthetic
gccuacagcaugaaaucguagaa

SEQ ID NO: 1001 - RNA, 21 nt, Artificial Sequence
  Synthetic
gcuaaguuaacacgcuuagaa

SEQ ID NO: 1002 - RNA, 23 nt, Artificial Sequence
  Synthetic
gugcuaaguuaacacgcuuagaa

SEQ ID NO: 1003 - RNA, 22 nt, Artificial Sequence
  Synthetic
gcaacgcaagcagauguuagaa

SEQ ID NO: 1004 - RNA, 24 nt, Artificial Sequence
  Synthetic
gugcaacgcaagcagauguuagaa

SEQ ID NO: 1005 - RNA, 21 nt, Artificial Sequence
  Synthetic
gcacacugaggccauuuagaa

SEQ ID NO: 1006 - RNA, 23 nt, Artificial Sequence
  Synthetic
gagcacacugaggccauuuagaa

SEQ ID NO: 1007 - RNA, 22 nt, Artificial Sequence
  Synthetic
guuucucuuagauccuuuagaa

SEQ ID NO: 1008 - RNA, 19 nt, Artificial Sequence
  Synthetic
gaagccacggagaaacgaa

SEQ ID NO: 1009 - RNA, 21 nt, Artificial Sequence
  Synthetic
gagaagccacggagaaacgaa

SEQ ID NO: 1010 - RNA, 22 nt, Artificial Sequence
  Synthetic
ggagaagccacggagaaacgaa

SEQ ID NO: 1011 - RNA, 23 nt, Artificial Sequence
  Synthetic
gggagaagccacggagaaacgaa

SEQ ID NO: 1012 - RNA, 19 nt, Artificial Sequence
  Synthetic
gugcugugcuuuauacgaa

SEQ ID NO: 1013 - RNA, 24 nt, Artificial Sequence
  Synthetic
gauuugugcugugcuuuauacgaa

SEQ ID NO: 1014 - RNA, 19 nt, Artificial Sequence
  Synthetic
gauaacuuguaaaaaggaa

SEQ ID NO: 1015 - RNA, 22 nt, Artificial Sequence
  Synthetic
guagauaacuuguaaaaaggaa

SEQ ID NO: 1016 - RNA, 21 nt, Artificial Sequence
  Synthetic
guuccugcagcuacaaaggaa

SEQ ID NO: 1017 - RNA, 23 nt, Artificial Sequence
  Synthetic
guguuccugcagcuacaaaggaa

SEQ ID NO: 1018 - RNA, 18 nt, Artificial Sequence
  Synthetic
gugagcauuaauaaggaa

SEQ ID NO: 1019 - RNA, 24 nt, Artificial Sequence
  Synthetic
gcuucugugagcauuaauaaggaa

SEQ ID NO: 1020 - RNA, 18 nt, Artificial Sequence
  Synthetic
gacuucggcugccaggaa

SEQ ID NO: 1021 - RNA, 22 nt, Artificial Sequence
  Synthetic
gauugacuucggcugccaggaa

SEQ ID NO: 1022 - RNA, 23 nt, Artificial Sequence
  Synthetic
gcaacacagccaagagucaggaa

SEQ ID NO: 1023 - RNA, 23 nt, Artificial Sequence
  Synthetic
guuaccucuuaauagaagaggaa

SEQ ID NO: 1024 - RNA, 18 nt, Artificial Sequence
  Synthetic
gccauauuaagagaggaa

SEQ ID NO: 1025 - RNA, 21 nt, Artificial Sequence
  Synthetic
gcagccauauuaagagaggaa

SEQ ID NO: 1026 - RNA, 22 nt, Artificial Sequence
  Synthetic
ggcagccauauuaagagaggaa

SEQ ID NO: 1027 - RNA, 23 nt, Artificial Sequence
  Synthetic
gggcagccauauuaagagaggaa

SEQ ID NO: 1028 - RNA, 24 nt, Artificial Sequence
  Synthetic
guuaaaugcauaaggggagaggaa

SEQ ID NO: 1029 - RNA, 19 nt, Artificial Sequence
  Synthetic
gauuauguaccuagaggaa

SEQ ID NO: 1030 - RNA, 22 nt, Artificial Sequence
  Synthetic
gacauggaaugauaaggaggaa

SEQ ID NO: 1031 - RNA, 19 nt, Artificial Sequence
  Synthetic
gcccuuagaaacauaggaa

SEQ ID NO: 1032 - RNA, 23 nt, Artificial Sequence
  Synthetic
gaaagcccuuagaaacauaggaa

SEQ ID NO: 1033 - RNA, 22 nt, Artificial Sequence
  Synthetic
guaucuauaagguaauuaggaa

SEQ ID NO: 1034 - RNA, 23 nt, Artificial Sequence
  Synthetic
gguaucuauaagguaauuaggaa

SEQ ID NO: 1035 - RNA, 19 nt, Artificial Sequence
  Synthetic
guuuggugauuccagggaa

SEQ ID NO: 1036 - RNA, 20 nt, Artificial Sequence
  Synthetic
gguuuggugauuccagggaa

SEQ ID NO: 1037 - RNA, 23 nt, Artificial Sequence
  Synthetic
guauuauaagcagcaagagggaa

SEQ ID NO: 1038 - RNA, 21 nt, Artificial Sequence
  Synthetic
gacacuggagcuuggagggaa

SEQ ID NO: 1039 - RNA, 24 nt, Artificial Sequence
  Synthetic
gaagacacuggagcuuggagggaa

SEQ ID NO: 1040 - RNA, 18 nt, Artificial Sequence
  Synthetic
ggguauugagaaggggaa

SEQ ID NO: 1041 - RNA, 20 nt, Artificial Sequence
  Synthetic
guggguauugagaaggggaa

SEQ ID NO: 1042 - RNA, 22 nt, Artificial Sequence
  Synthetic
gaguggguauugagaaggggaa

SEQ ID NO: 1043 - RNA, 24 nt, Artificial Sequence
  Synthetic
guuugaagcugaggguugggggaa

SEQ ID NO: 1044 - RNA, 19 nt, Artificial Sequence
  Synthetic
gacaugauuagauggggaa

SEQ ID NO: 1045 - RNA, 23 nt, Artificial Sequence
  Synthetic
gaaagacaugauuagauggggaa

SEQ ID NO: 1046 - RNA, 24 nt, Artificial Sequence
  Synthetic
ggaaagacaugauuagauggggaa

SEQ ID NO: 1047 - RNA, 22 nt, Artificial Sequence
  Synthetic
gugaaaagaaagguauggggaa

SEQ ID NO: 1048 - RNA, 23 nt, Artificial Sequence
  Synthetic
ggugaaaagaaagguauggggaa

SEQ ID NO: 1049 - RNA, 19 nt, Artificial Sequence
  Synthetic
gaacaagaucccuggggaa

SEQ ID NO: 1050 - RNA, 23 nt, Artificial Sequence
  Synthetic
gcaagaacaagaucccuggggaa

SEQ ID NO: 1051 - RNA, 24 nt, Artificial Sequence
  Synthetic
ggcaagaacaagaucccuggggaa

SEQ ID NO: 1052 - RNA, 24 nt, Artificial Sequence
  Synthetic
gcauacuuuuuagauguaauggaa

SEQ ID NO: 1053 - RNA, 20 nt, Artificial Sequence
  Synthetic
gaaugaauaggaacauggaa

SEQ ID NO: 1054 - RNA, 21 nt, Artificial Sequence
  Synthetic
gcagauaauugaaucauggaa

SEQ ID NO: 1055 - RNA, 23 nt, Artificial Sequence
  Synthetic
gugcagauaauugaaucauggaa

SEQ ID NO: 1056 - RNA, 24 nt, Artificial Sequence
  Synthetic
ggugcagauaauugaaucauggaa

SEQ ID NO: 1057 - RNA, 18 nt, Artificial Sequence
  Synthetic
gguguacauagacuggaa

SEQ ID NO: 1058 - RNA, 18 nt, Artificial Sequence
  Synthetic
gaauuuuccuugguggaa

SEQ ID NO: 1059 - RNA, 19 nt, Artificial Sequence
  Synthetic
ggaauuuuccuugguggaa

SEQ ID NO: 1060 - RNA, 19 nt, Artificial Sequence
  Synthetic
gagcaguagucucuuggaa

SEQ ID NO: 1061 - RNA, 21 nt, Artificial Sequence
  Synthetic
gagagcaguagucucuuggaa

SEQ ID NO: 1062 - RNA, 24 nt, Artificial Sequence
  Synthetic
gcugagagcaguagucucuuggaa

SEQ ID NO: 1063 - RNA, 24 nt, Artificial Sequence
  Synthetic
guuaccucugggugaggguuggaa

SEQ ID NO: 1064 - RNA, 18 nt, Artificial Sequence
  Synthetic
ggauaugagauguuggaa

SEQ ID NO: 1065 - RNA, 19 nt, Artificial Sequence
  Synthetic
gggauaugagauguuggaa

SEQ ID NO: 1066 - RNA, 23 nt, Artificial Sequence
  Synthetic
gacagggauaugagauguuggaa

SEQ ID NO: 1067 - RNA, 24 nt, Artificial Sequence
  Synthetic
ggacagggauaugagauguuggaa

SEQ ID NO: 1068 - RNA, 22 nt, Artificial Sequence
  Synthetic
guugaaauacaaaucaaaugaa

SEQ ID NO: 1069 - RNA, 24 nt, Artificial Sequence
  Synthetic
gaguugaaauacaaaucaaaugaa

SEQ ID NO: 1070 - RNA, 18 nt, Artificial Sequence
  Synthetic
gcaaaaaccuugaaugaa

SEQ ID NO: 1071 - RNA, 21 nt, Artificial Sequence
  Synthetic
gauugcugacaacauaaugaa

SEQ ID NO: 1072 - RNA, 22 nt, Artificial Sequence
  Synthetic
ggauugcugacaacauaaugaa

SEQ ID NO: 1073 - RNA, 22 nt, Artificial Sequence
  Synthetic
gaaacaaauuuuauguaaugaa

SEQ ID NO: 1074 - RNA, 21 nt, Artificial Sequence
  Synthetic
gaauggagaugaagacaugaa

SEQ ID NO: 1075 - RNA, 22 nt, Artificial Sequence
  Synthetic
ggaauggagaugaagacaugaa

SEQ ID NO: 1076 - RNA, 19 nt, Artificial Sequence
  Synthetic
gccucuguuaaaccaugaa

SEQ ID NO: 1077 - RNA, 22 nt, Artificial Sequence
  Synthetic
gaugccucuguuaaaccaugaa

SEQ ID NO: 1078 - RNA, 24 nt, Artificial Sequence
  Synthetic
gauacucagggaaaaagagaugaa

SEQ ID NO: 1079 - RNA, 22 nt, Artificial Sequence
  Synthetic
guauuuuauaauagaggaugaa

SEQ ID NO: 1080 - RNA, 23 nt, Artificial Sequence
  Synthetic
gccaacaaggauuucuggaugaa

SEQ ID NO: 1081 - RNA, 24 nt, Artificial Sequence
  Synthetic
ggccaacaaggauuucuggaugaa

SEQ ID NO: 1082 - RNA, 23 nt, Artificial Sequence
  Synthetic
gcacuaccagguuugcugaugaa

SEQ ID NO: 1083 - RNA, 18 nt, Artificial Sequence
  Synthetic
guaaaagaugaauaugaa

SEQ ID NO: 1084 - RNA, 19 nt, Artificial Sequence
  Synthetic
gguaaaagaugaauaugaa

SEQ ID NO: 1085 - RNA, 21 nt, Artificial Sequence
  Synthetic
gugguaaaagaugaauaugaa

SEQ ID NO: 1086 - RNA, 22 nt, Artificial Sequence
  Synthetic
ggugguaaaagaugaauaugaa

SEQ ID NO: 1087 - RNA, 24 nt, Artificial Sequence
  Synthetic
gaggugguaaaagaugaauaugaa

SEQ ID NO: 1088 - RNA, 23 nt, Artificial Sequence
  Synthetic
gcuuacuuauauuucauuaugaa

SEQ ID NO: 1089 - RNA, 23 nt, Artificial Sequence
  Synthetic
guaaaucucauguguauuaugaa

SEQ ID NO: 1090 - RNA, 20 nt, Artificial Sequence
  Synthetic
guacacagugcucuuaugaa

SEQ ID NO: 1091 - RNA, 21 nt, Artificial Sequence
  Synthetic
gguacacagugcucuuaugaa

SEQ ID NO: 1092 - RNA, 24 nt, Artificial Sequence
  Synthetic
gucucuagcaucuucugaacugaa

SEQ ID NO: 1093 - RNA, 18 nt, Artificial Sequence
  Synthetic
gcaagacugugcacugaa

SEQ ID NO: 1094 - RNA, 24 nt, Artificial Sequence
  Synthetic
guaauugcaagacugugcacugaa

SEQ ID NO: 1095 - RNA, 23 nt, Artificial Sequence
  Synthetic
gcauuaagaaaagauggacugaa

SEQ ID NO: 1096 - RNA, 21 nt, Artificial Sequence
  Synthetic
gaaaccauacaauucccugaa

SEQ ID NO: 1097 - RNA, 23 nt, Artificial Sequence
  Synthetic
gccacaaagaauuuagagcugaa

SEQ ID NO: 1098 - RNA, 18 nt, Artificial Sequence
  Synthetic
gaugaagaaauggcugaa

SEQ ID NO: 1099 - RNA, 21 nt, Artificial Sequence
  Synthetic
gaagaugaagaaauggcugaa

SEQ ID NO: 1100 - RNA, 24 nt, Artificial Sequence
  Synthetic
guugaagaugaagaaauggcugaa

SEQ ID NO: 1101 - RNA, 19 nt, Artificial Sequence
  Synthetic
guuugaauacuuggcugaa

SEQ ID NO: 1102 - RNA, 20 nt, Artificial Sequence
  Synthetic
gguuugaauacuuggcugaa

SEQ ID NO: 1103 - RNA, 18 nt, Artificial Sequence
  Synthetic
guagaaaugaagucugaa

SEQ ID NO: 1104 - RNA, 19 nt, Artificial Sequence
  Synthetic
gguagaaaugaagucugaa

SEQ ID NO: 1105 - RNA, 24 nt, Artificial Sequence
  Synthetic
guuauaaaaccuugcuagucugaa

SEQ ID NO: 1106 - RNA, 21 nt, Artificial Sequence
  Synthetic
gaaaaguuauuaacuucugaa

SEQ ID NO: 1107 - RNA, 21 nt, Artificial Sequence
  Synthetic
guaaaaacaaugcuaagugaa

SEQ ID NO: 1108 - RNA, 23 nt, Artificial Sequence
  Synthetic
gaguaaaaacaaugcuaagugaa

SEQ ID NO: 1109 - RNA, 23 nt, Artificial Sequence
  Synthetic
gcauuaaugaauaaguaagugaa

SEQ ID NO: 1110 - RNA, 18 nt, Artificial Sequence
  Synthetic
gaaugugguuagagugaa

SEQ ID NO: 1111 - RNA, 21 nt, Artificial Sequence
  Synthetic
gaaaccaguuuuaggagugaa

SEQ ID NO: 1112 - RNA, 19 nt, Artificial Sequence
  Synthetic
gcauaagcaaguuagugaa

SEQ ID NO: 1113 - RNA, 20 nt, Artificial Sequence
  Synthetic
ggcauaagcaaguuagugaa

SEQ ID NO: 1114 - RNA, 23 nt, Artificial Sequence
  Synthetic
gauuaucaaauucuguuagugaa

SEQ ID NO: 1115 - RNA, 18 nt, Artificial Sequence
  Synthetic
ggaaaggcauaaggugaa

SEQ ID NO: 1116 - RNA, 19 nt, Artificial Sequence
  Synthetic
gggaaaggcauaaggugaa

SEQ ID NO: 1117 - RNA, 20 nt, Artificial Sequence
  Synthetic
ggggaaaggcauaaggugaa

SEQ ID NO: 1118 - RNA, 21 nt, Artificial Sequence
  Synthetic
guccaagguggauaaggugaa

SEQ ID NO: 1119 - RNA, 23 nt, Artificial Sequence
  Synthetic
gaguccaagguggauaaggugaa

SEQ ID NO: 1120 - RNA, 19 nt, Artificial Sequence
  Synthetic
gugcuaauuaaaaugugaa

SEQ ID NO: 1121 - RNA, 20 nt, Artificial Sequence
  Synthetic
ggugcuaauuaaaaugugaa

SEQ ID NO: 1122 - RNA, 20 nt, Artificial Sequence
  Synthetic
gcacauuucagcugauugaa

SEQ ID NO: 1123 - RNA, 21 nt, Artificial Sequence
  Synthetic
ggcacauuucagcugauugaa

SEQ ID NO: 1124 - RNA, 21 nt, Artificial Sequence
  Synthetic
guuucgcuuaggaaccuugaa

SEQ ID NO: 1125 - RNA, 18 nt, Artificial Sequence
  Synthetic
ggugagaugauccuugaa

SEQ ID NO: 1126 - RNA, 19 nt, Artificial Sequence
  Synthetic
gggugagaugauccuugaa

SEQ ID NO: 1127 - RNA, 24 nt, Artificial Sequence
  Synthetic
gauccgggugagaugauccuugaa

SEQ ID NO: 1128 - RNA, 18 nt, Artificial Sequence
  Synthetic
ggaucugucuuccuugaa

SEQ ID NO: 1129 - RNA, 23 nt, Artificial Sequence
  Synthetic
gccuuggaucugucuuccuugaa

SEQ ID NO: 1130 - RNA, 19 nt, Artificial Sequence
  Synthetic
guauaaauaugcgcuugaa

SEQ ID NO: 1131 - RNA, 20 nt, Artificial Sequence
  Synthetic
gguauaaauaugcgcuugaa

SEQ ID NO: 1132 - RNA, 19 nt, Artificial Sequence
  Synthetic
guagcauuuuggaguugaa

SEQ ID NO: 1133 - RNA, 24 nt, Artificial Sequence
  Synthetic
gaauaucuaucuacaaugguugaa

SEQ ID NO: 1134 - RNA, 22 nt, Artificial Sequence
  Synthetic
gcuaugccaaucuaugguugaa

SEQ ID NO: 1135 - RNA, 18 nt, Artificial Sequence
  Synthetic
ggacaagagcaauuugaa

SEQ ID NO: 1136 - RNA, 23 nt, Artificial Sequence
  Synthetic
gaucuggacaagagcaauuugaa

SEQ ID NO: 1137 - RNA, 19 nt, Artificial Sequence
  Synthetic
gacgcagacagaauuugaa

SEQ ID NO: 1138 - RNA, 19 nt, Artificial Sequence
  Synthetic
gaagguauacucauuugaa

SEQ ID NO: 1139 - RNA, 24 nt, Artificial Sequence
  Synthetic
gauuaauaucaaaacauauuugaa

SEQ ID NO: 1140 - RNA, 23 nt, Artificial Sequence
  Synthetic
gucuuacucauauaguauuugaa

SEQ ID NO: 1141 - RNA, 21 nt, Artificial Sequence
  Synthetic
gcucucacuaauaauuuugaa

SEQ ID NO: 1142 - RNA, 24 nt, Artificial Sequence
  Synthetic
gacuaucugggugaugaaaaauaa

SEQ ID NO: 1143 - RNA, 18 nt, Artificial Sequence
  Synthetic
gaccacggugaaaaauaa

SEQ ID NO: 1144 - RNA, 21 nt, Artificial Sequence
  Synthetic
gaagaccacggugaaaaauaa

SEQ ID NO: 1145 - RNA, 22 nt, Artificial Sequence
  Synthetic
ggaagaccacggugaaaaauaa

SEQ ID NO: 1146 - RNA, 24 nt, Artificial Sequence
  Synthetic
gaggaagaccacggugaaaaauaa

SEQ ID NO: 1147 - RNA, 18 nt, Artificial Sequence
  Synthetic
gaccaguuguaaaaauaa

SEQ ID NO: 1148 - RNA, 20 nt, Artificial Sequence
  Synthetic
gagaccaguuguaaaaauaa

SEQ ID NO: 1149 - RNA, 20 nt, Artificial Sequence
  Synthetic
gccauacaaaaguaaaauaa

SEQ ID NO: 1150 - RNA, 21 nt, Artificial Sequence
  Synthetic
gaaauaaguauauuaaaauaa

SEQ ID NO: 1151 - RNA, 21 nt, Artificial Sequence
  Synthetic
gcuaaaaaaacuuuaaaauaa

SEQ ID NO: 1152 - RNA, 18 nt, Artificial Sequence
  Synthetic
guuuuuucaaccaaauaa

SEQ ID NO: 1153 - RNA, 21 nt, Artificial Sequence
  Synthetic
gauguuuuuucaaccaaauaa

SEQ ID NO: 1154 - RNA, 23 nt, Artificial Sequence
  Synthetic
gugauguuuuuucaaccaaauaa

SEQ ID NO: 1155 - RNA, 18 nt, Artificial Sequence
  Synthetic
guuuugcuuugcaaauaa

SEQ ID NO: 1156 - RNA, 19 nt, Artificial Sequence
  Synthetic
guucccaaaaaggaaauaa

SEQ ID NO: 1157 - RNA, 21 nt, Artificial Sequence
  Synthetic
gaguucccaaaaaggaaauaa

SEQ ID NO: 1158 - RNA, 18 nt, Artificial Sequence
  Synthetic
gagaggggcuggaaauaa

SEQ ID NO: 1159 - RNA, 22 nt, Artificial Sequence
  Synthetic
gcauuaaaaacaaccuaaauaa

SEQ ID NO: 1160 - RNA, 23 nt, Artificial Sequence
  Synthetic
ggcauuaaaaacaaccuaaauaa

SEQ ID NO: 1161 - RNA, 23 nt, Artificial Sequence
  Synthetic
gaacucuuguuggaauuaaauaa

SEQ ID NO: 1162 - RNA, 20 nt, Artificial Sequence
  Synthetic
gaacuguaggggaccaauaa

SEQ ID NO: 1163 - RNA, 23 nt, Artificial Sequence
  Synthetic
guagaacuguaggggaccaauaa

SEQ ID NO: 1164 - RNA, 21 nt, Artificial Sequence
  Synthetic
guuccuucauguauucaauaa

SEQ ID NO: 1165 - RNA, 20 nt, Artificial Sequence
  Synthetic
gacaucaggauccagaauaa

SEQ ID NO: 1166 - RNA, 22 nt, Artificial Sequence
  Synthetic
guacaagaauugucuagaauaa

SEQ ID NO: 1167 - RNA, 24 nt, Artificial Sequence
  Synthetic
guaauuaacuuuaccuuggaauaa

SEQ ID NO: 1168 - RNA, 18 nt, Artificial Sequence
  Synthetic
ggaacagacaaugaauaa

SEQ ID NO: 1169 - RNA, 21 nt, Artificial Sequence
  Synthetic
gaaggaacagacaaugaauaa

SEQ ID NO: 1170 - RNA, 22 nt, Artificial Sequence
  Synthetic
ggaaggaacagacaaugaauaa

SEQ ID NO: 1171 - RNA, 23 nt, Artificial Sequence
  Synthetic
gggaaggaacagacaaugaauaa

SEQ ID NO: 1172 - RNA, 20 nt, Artificial Sequence
  Synthetic
gauugacuaauaaugaauaa

SEQ ID NO: 1173 - RNA, 23 nt, Artificial Sequence
  Synthetic
guugauugacuaauaaugaauaa

SEQ ID NO: 1174 - RNA, 18 nt, Artificial Sequence
  Synthetic
ggagcuauuaaugaauaa

SEQ ID NO: 1175 - RNA, 20 nt, Artificial Sequence
  Synthetic
gaggagcuauuaaugaauaa

SEQ ID NO: 1176 - RNA, 21 nt, Artificial Sequence
  Synthetic
gauucacuguauuuugaauaa

SEQ ID NO: 1177 - RNA, 23 nt, Artificial Sequence
  Synthetic
guuuuugcaugccuuuugaauaa

SEQ ID NO: 1178 - RNA, 21 nt, Artificial Sequence
  Synthetic
gcaacccaagacacauaauaa

SEQ ID NO: 1179 - RNA, 23 nt, Artificial Sequence
  Synthetic
gagcaacccaagacacauaauaa

SEQ ID NO: 1180 - RNA, 24 nt, Artificial Sequence
  Synthetic
guccauaauguuaccuuuuaauaa

SEQ ID NO: 1181 - RNA, 22 nt, Artificial Sequence
  Synthetic
gaaaguugaguuuuuuuaauaa

SEQ ID NO: 1182 - RNA, 18 nt, Artificial Sequence
  Synthetic
ggugaaguuuaaacauaa

SEQ ID NO: 1183 - RNA, 20 nt, Artificial Sequence
  Synthetic
gauacuaaauuaacacauaa

SEQ ID NO: 1184 - RNA, 24 nt, Artificial Sequence
  Synthetic
gcccuaauacguaacuacacauaa

SEQ ID NO: 1185 - RNA, 18 nt, Artificial Sequence
  Synthetic
guuacagcaugcacauaa

SEQ ID NO: 1186 - RNA, 20 nt, Artificial Sequence
  Synthetic
gaguuacagcaugcacauaa

SEQ ID NO: 1187 - RNA, 21 nt, Artificial Sequence
  Synthetic
ggaguuacagcaugcacauaa

SEQ ID NO: 1188 - RNA, 23 nt, Artificial Sequence
  Synthetic
guggaguuacagcaugcacauaa

SEQ ID NO: 1189 - RNA, 24 nt, Artificial Sequence
  Synthetic
gguggaguuacagcaugcacauaa

SEQ ID NO: 1190 - RNA, 21 nt, Artificial Sequence
  Synthetic
gcaugguuuuauaauacauaa

SEQ ID NO: 1191 - RNA, 23 nt, Artificial Sequence
  Synthetic
gagcaugguuuuauaauacauaa

SEQ ID NO: 1192 - RNA, 21 nt, Artificial Sequence
  Synthetic
guaauggggaauauuacauaa

SEQ ID NO: 1193 - RNA, 19 nt, Artificial Sequence
  Synthetic
gcagauuuuaugaccauaa

SEQ ID NO: 1194 - RNA, 22 nt, Artificial Sequence
  Synthetic
gcauaccauaucaaagccauaa

SEQ ID NO: 1195 - RNA, 18 nt, Artificial Sequence
  Synthetic
ggaaaucacugagcauaa

SEQ ID NO: 1196 - RNA, 20 nt, Artificial Sequence
  Synthetic
gaagacauacacuagcauaa

SEQ ID NO: 1197 - RNA, 24 nt, Artificial Sequence
  Synthetic
gaauuuugggcuaauguagcauaa

SEQ ID NO: 1198 - RNA, 19 nt, Artificial Sequence
  Synthetic
gccucugaaaaacucauaa

SEQ ID NO: 1199 - RNA, 22 nt, Artificial Sequence
  Synthetic
guagccucugaaaaacucauaa

SEQ ID NO: 1200 - RNA, 20 nt, Artificial Sequence
  Synthetic
guaagaaaauggccucauaa

SEQ ID NO: 1201 - RNA, 20 nt, Artificial Sequence
  Synthetic
gauuuuaaaguaucucauaa

SEQ ID NO: 1202 - RNA, 18 nt, Artificial Sequence
  Synthetic
guucuuaugucuucauaa

SEQ ID NO: 1203 - RNA, 21 nt, Artificial Sequence
  Synthetic
gaaauagaaaugaaaagauaa

SEQ ID NO: 1204 - RNA, 18 nt, Artificial Sequence
  Synthetic
ggcagugucugaagauaa

SEQ ID NO: 1205 - RNA, 21 nt, Artificial Sequence
  Synthetic
gaaggcagugucugaagauaa

SEQ ID NO: 1206 - RNA, 19 nt, Artificial Sequence
  Synthetic
gucuuaaagaaacagauaa

SEQ ID NO: 1207 - RNA, 21 nt, Artificial Sequence
  Synthetic
gagucuuaaagaaacagauaa

SEQ ID NO: 1208 - RNA, 22 nt, Artificial Sequence
  Synthetic
ggagucuuaaagaaacagauaa

SEQ ID NO: 1209 - RNA, 19 nt, Artificial Sequence
  Synthetic
guaacuuacuuccagauaa

SEQ ID NO: 1210 - RNA, 20 nt, Artificial Sequence
  Synthetic
gguaacuuacuuccagauaa

SEQ ID NO: 1211 - RNA, 20 nt, Artificial Sequence
  Synthetic
guccuuguacuucaggauaa

SEQ ID NO: 1212 - RNA, 23 nt, Artificial Sequence
  Synthetic
gucguccuuguacuucaggauaa

SEQ ID NO: 1213 - RNA, 18 nt, Artificial Sequence
  Synthetic
guguguuguggaggauaa

SEQ ID NO: 1214 - RNA, 20 nt, Artificial Sequence
  Synthetic
guguguguuguggaggauaa

SEQ ID NO: 1215 - RNA, 18 nt, Artificial Sequence
  Synthetic
gaacagacuggcggauaa

SEQ ID NO: 1216 - RNA, 19 nt, Artificial Sequence
  Synthetic
ggaacagacuggcggauaa

SEQ ID NO: 1217 - RNA, 24 nt, Artificial Sequence
  Synthetic
gaucuggaacagacuggcggauaa

SEQ ID NO: 1218 - RNA, 19 nt, Artificial Sequence
  Synthetic
guagcuuuuccagggauaa

SEQ ID NO: 1219 - RNA, 24 nt, Artificial Sequence
  Synthetic
gauuuguagcuuuuccagggauaa

SEQ ID NO: 1220 - RNA, 21 nt, Artificial Sequence
  Synthetic
gaucauuguguguggggauaa

SEQ ID NO: 1221 - RNA, 19 nt, Artificial Sequence
  Synthetic
gcuuaaugccuuuggauaa

SEQ ID NO: 1222 - RNA, 24 nt, Artificial Sequence
  Synthetic
gauuucagauuucagaaaugauaa

SEQ ID NO: 1223 - RNA, 21 nt, Artificial Sequence
  Synthetic
guuuaacccuugugaugauaa

SEQ ID NO: 1224 - RNA, 22 nt, Artificial Sequence
  Synthetic
gguuuaacccuugugaugauaa

SEQ ID NO: 1225 - RNA, 20 nt, Artificial Sequence
  Synthetic
gauauuauuauugaugauaa

SEQ ID NO: 1226 - RNA, 20 nt, Artificial Sequence
  Synthetic
gaucuugcaggccgugauaa

SEQ ID NO: 1227 - RNA, 21 nt, Artificial Sequence
  Synthetic
ggaucuugcaggccgugauaa

SEQ ID NO: 1228 - RNA, 22 nt, Artificial Sequence
  Synthetic
gggaucuugcaggccgugauaa

SEQ ID NO: 1229 - RNA, 22 nt, Artificial Sequence
  Synthetic
guguauucaagauuuuugauaa

SEQ ID NO: 1230 - RNA, 24 nt, Artificial Sequence
  Synthetic
guguguauucaagauuuuugauaa

SEQ ID NO: 1231 - RNA, 19 nt, Artificial Sequence
  Synthetic
gauaaacugcaaaauauaa

SEQ ID NO: 1232 - RNA, 19 nt, Artificial Sequence
  Synthetic
gcccugaaggucaauauaa

SEQ ID NO: 1233 - RNA, 20 nt, Artificial Sequence
  Synthetic
ggcccugaaggucaauauaa

SEQ ID NO: 1234 - RNA, 22 nt, Artificial Sequence
  Synthetic
guggcccugaaggucaauauaa

SEQ ID NO: 1235 - RNA, 23 nt, Artificial Sequence
  Synthetic
gguggcccugaaggucaauauaa

SEQ ID NO: 1236 - RNA, 24 nt, Artificial Sequence
  Synthetic
gucaauauuuaguugguaauauaa

SEQ ID NO: 1237 - RNA, 20 nt, Artificial Sequence
  Synthetic
gaacucuuauacauauauaa

SEQ ID NO: 1238 - RNA, 21 nt, Artificial Sequence
  Synthetic
ggaacucuuauacauauauaa

SEQ ID NO: 1239 - RNA, 23 nt, Artificial Sequence
  Synthetic
gaggaacucuuauacauauauaa

SEQ ID NO: 1240 - RNA, 24 nt, Artificial Sequence
  Synthetic
gaaaaaaggaaaggaagacuauaa

SEQ ID NO: 1241 - RNA, 20 nt, Artificial Sequence
  Synthetic
gaauggcaugaucucuauaa

SEQ ID NO: 1242 - RNA, 18 nt, Artificial Sequence
  Synthetic
gguuuguuaccuguauaa

SEQ ID NO: 1243 - RNA, 19 nt, Artificial Sequence
  Synthetic
ggguuuguuaccuguauaa

SEQ ID NO: 1244 - RNA, 24 nt, Artificial Sequence
  Synthetic
gcuuacuuaaauuauaaauuauaa

SEQ ID NO: 1245 - RNA, 18 nt, Artificial Sequence
  Synthetic
guaugauugccauuauaa

SEQ ID NO: 1246 - RNA, 20 nt, Artificial Sequence
  Synthetic
gcccaugcuuuucauuauaa

SEQ ID NO: 1247 - RNA, 18 nt, Artificial Sequence
  Synthetic
ggaagggcuauauuauaa

SEQ ID NO: 1248 - RNA, 21 nt, Artificial Sequence
  Synthetic
gaaggaagggcuauauuauaa

SEQ ID NO: 1249 - RNA, 22 nt, Artificial Sequence
  Synthetic
ggaaggaagggcuauauuauaa

SEQ ID NO: 1250 - RNA, 21 nt, Artificial Sequence
  Synthetic
gcuuuugugaggaucuuauaa

SEQ ID NO: 1251 - RNA, 23 nt, Artificial Sequence
  Synthetic
gagcuuuugugaggaucuuauaa

SEQ ID NO: 1252 - RNA, 19 nt, Artificial Sequence
  Synthetic
gauaguuaauaauuuauaa

SEQ ID NO: 1253 - RNA, 21 nt, Artificial Sequence
  Synthetic
gagauaguuaauaauuuauaa

SEQ ID NO: 1254 - RNA, 22 nt, Artificial Sequence
  Synthetic
gauuaguggcuuuaauuuauaa

SEQ ID NO: 1255 - RNA, 18 nt, Artificial Sequence
  Synthetic
gcacaacagauuuuauaa

SEQ ID NO: 1256 - RNA, 20 nt, Artificial Sequence
  Synthetic
gagcacaacagauuuuauaa

SEQ ID NO: 1257 - RNA, 21 nt, Artificial Sequence
  Synthetic
gacuuauugaaacuuuuauaa

SEQ ID NO: 1258 - RNA, 22 nt, Artificial Sequence
  Synthetic
ggacuuauugaaacuuuuauaa

SEQ ID NO: 1259 - RNA, 18 nt, Artificial Sequence
  Synthetic
gacuauauugcucacuaa

SEQ ID NO: 1260 - RNA, 23 nt, Artificial Sequence
  Synthetic
gaaaaugacuucccaaagacuaa

SEQ ID NO: 1261 - RNA, 20 nt, Artificial Sequence
  Synthetic
guuuuagcuaaccagacuaa

SEQ ID NO: 1262 - RNA, 21 nt, Artificial Sequence
  Synthetic
gguuuuagcuaaccagacuaa

SEQ ID NO: 1263 - RNA, 23 nt, Artificial Sequence
  Synthetic
gugguuuuagcuaaccagacuaa

SEQ ID NO: 1264 - RNA, 24 nt, Artificial Sequence
  Synthetic
ggugguuuuagcuaaccagacuaa

SEQ ID NO: 1265 - RNA, 18 nt, Artificial Sequence
  Synthetic
guuuucgaaaauuacuaa

SEQ ID NO: 1266 - RNA, 22 nt, Artificial Sequence
  Synthetic
gaaauggggaagcuauuacuaa

SEQ ID NO: 1267 - RNA, 18 nt, Artificial Sequence
  Synthetic
gacuauaucaguuacuaa

SEQ ID NO: 1268 - RNA, 21 nt, Artificial Sequence
  Synthetic
gcugacuauaucaguuacuaa

SEQ ID NO: 1269 - RNA, 23 nt, Artificial Sequence
  Synthetic
gaaauaaaaauaauuuuuacuaa

SEQ ID NO: 1270 - RNA, 24 nt, Artificial Sequence
  Synthetic
gcaacuagcucuugcagaaccuaa

SEQ ID NO: 1271 - RNA, 21 nt, Artificial Sequence
  Synthetic
gcucucucuuaggggaccuaa

SEQ ID NO: 1272 - RNA, 18 nt, Artificial Sequence
  Synthetic
gcuccagucaguaccuaa

SEQ ID NO: 1273 - RNA, 22 nt, Artificial Sequence
  Synthetic
guaagcuccagucaguaccuaa

SEQ ID NO: 1274 - RNA, 24 nt, Artificial Sequence
  Synthetic
gcaacauuuaaggaaugggccuaa

SEQ ID NO: 1275 - RNA, 19 nt, Artificial Sequence
  Synthetic
guucuaaaggauauccuaa

SEQ ID NO: 1276 - RNA, 21 nt, Artificial Sequence
  Synthetic
gaccucuuggugguuagcuaa

SEQ ID NO: 1277 - RNA, 18 nt, Artificial Sequence
  Synthetic
guucaaagauuacgcuaa

SEQ ID NO: 1278 - RNA, 18 nt, Artificial Sequence
  Synthetic
ggagcacagagaggcuaa

SEQ ID NO: 1279 - RNA, 21 nt, Artificial Sequence
  Synthetic
gcuggagcacagagaggcuaa

SEQ ID NO: 1280 - RNA, 24 nt, Artificial Sequence
  Synthetic
gaagcuggagcacagagaggcuaa

SEQ ID NO: 1281 - RNA, 19 nt, Artificial Sequence
  Synthetic
guaguagaagcuuggcuaa

SEQ ID NO: 1282 - RNA, 20 nt, Artificial Sequence
  Synthetic
gguaguagaagcuuggcuaa

SEQ ID NO: 1283 - RNA, 18 nt, Artificial Sequence
  Synthetic
gugcguuugauaugcuaa

SEQ ID NO: 1284 - RNA, 20 nt, Artificial Sequence
  Synthetic
gccggaaaauuuacugcuaa

SEQ ID NO: 1285 - RNA, 20 nt, Artificial Sequence
  Synthetic
guuuuauuuagcguugcuaa

SEQ ID NO: 1286 - RNA, 24 nt, Artificial Sequence
  Synthetic
gucuguuuuauuuagcguugcuaa

SEQ ID NO: 1287 - RNA, 24 nt, Artificial Sequence
  Synthetic
gucaaacugaagauguaaaucuaa

SEQ ID NO: 1288 - RNA, 19 nt, Artificial Sequence
  Synthetic
gcacuuaaccacuaucuaa

SEQ ID NO: 1289 - RNA, 23 nt, Artificial Sequence
  Synthetic
gaaauuauucaggcuuuaucuaa

SEQ ID NO: 1290 - RNA, 21 nt, Artificial Sequence
  Synthetic
gucuaguugguuucccucuaa

SEQ ID NO: 1291 - RNA, 24 nt, Artificial Sequence
  Synthetic
gcugucuaguugguuucccucuaa

SEQ ID NO: 1292 - RNA, 18 nt, Artificial Sequence
  Synthetic
guuggauaaccagucuaa

SEQ ID NO: 1293 - RNA, 23 nt, Artificial Sequence
  Synthetic
gucauguuggauaaccagucuaa

SEQ ID NO: 1294 - RNA, 19 nt, Artificial Sequence
  Synthetic
gucuucaucaacauucuaa

SEQ ID NO: 1295 - RNA, 18 nt, Artificial Sequence
  Synthetic
guucaauccuauuucuaa

SEQ ID NO: 1296 - RNA, 22 nt, Artificial Sequence
  Synthetic
gacaguucaauccuauuucuaa

SEQ ID NO: 1297 - RNA, 21 nt, Artificial Sequence
  Synthetic
gcacgaauuauuauuuucuaa

SEQ ID NO: 1298 - RNA, 23 nt, Artificial Sequence
  Synthetic
gagcacgaauuauuauuuucuaa

SEQ ID NO: 1299 - RNA, 24 nt, Artificial Sequence
  Synthetic
guaucuuugaacauauuuuucuaa

SEQ ID NO: 1300 - RNA, 20 nt, Artificial Sequence
  Synthetic
guuuaaacaguagaaaguaa

SEQ ID NO: 1301 - RNA, 21 nt, Artificial Sequence
  Synthetic
gguuuaaacaguagaaaguaa

SEQ ID NO: 1302 - RNA, 21 nt, Artificial Sequence
  Synthetic
gacuggaauuugugaaaguaa

SEQ ID NO: 1303 - RNA, 23 nt, Artificial Sequence
  Synthetic
gcgacuggaauuugugaaaguaa

SEQ ID NO: 1304 - RNA, 24 nt, Artificial Sequence
  Synthetic
gaccccauaccaaaugagaaguaa

SEQ ID NO: 1305 - RNA, 19 nt, Artificial Sequence
  Synthetic
gaauuccugacuuaaguaa

SEQ ID NO: 1306 - RNA, 21 nt, Artificial Sequence
  Synthetic
gugaauuccugacuuaaguaa

SEQ ID NO: 1307 - RNA, 22 nt, Artificial Sequence
  Synthetic
gcccuguguccuaucccaguaa

SEQ ID NO: 1308 - RNA, 22 nt, Artificial Sequence
  Synthetic
gcauucacuaaacaagcaguaa

SEQ ID NO: 1309 - RNA, 19 nt, Artificial Sequence
  Synthetic
gaaauacaaaggagaguaa

SEQ ID NO: 1310 - RNA, 20 nt, Artificial Sequence
  Synthetic
ggaaauacaaaggagaguaa

SEQ ID NO: 1311 - RNA, 24 nt, Artificial Sequence
  Synthetic
gauaggaaauacaaaggagaguaa

SEQ ID NO: 1312 - RNA, 21 nt, Artificial Sequence
  Synthetic
guuuaucaaaagauugaguaa

SEQ ID NO: 1313 - RNA, 20 nt, Artificial Sequence
  Synthetic
gaugaugcuugaauuaguaa

SEQ ID NO: 1314 - RNA, 18 nt, Artificial Sequence
  Synthetic
gacauccuuauuuaguaa

SEQ ID NO: 1315 - RNA, 24 nt, Artificial Sequence
  Synthetic
guuuucuauacucaauaaagguaa

SEQ ID NO: 1316 - RNA, 18 nt, Artificial Sequence
  Synthetic
ggucugcacagcagguaa

SEQ ID NO: 1317 - RNA, 22 nt, Artificial Sequence
  Synthetic
guaaggucugcacagcagguaa

SEQ ID NO: 1318 - RNA, 18 nt, Artificial Sequence
  Synthetic
gaacucuauaggagguaa

SEQ ID NO: 1319 - RNA, 19 nt, Artificial Sequence
  Synthetic
gcaguaauaaucuagguaa

SEQ ID NO: 1320 - RNA, 20 nt, Artificial Sequence
  Synthetic
gcaaaacucaauuacgguaa

SEQ ID NO: 1321 - RNA, 21 nt, Artificial Sequence
  Synthetic
gcucagccccaaucaggguaa

SEQ ID NO: 1322 - RNA, 24 nt, Artificial Sequence
  Synthetic
guagcucagccccaaucaggguaa

SEQ ID NO: 1323 - RNA, 20 nt, Artificial Sequence
  Synthetic
gcauugauccuauuggguaa

SEQ ID NO: 1324 - RNA, 18 nt, Artificial Sequence
  Synthetic
guauucaucacuugguaa

SEQ ID NO: 1325 - RNA, 20 nt, Artificial Sequence
  Synthetic
gaguauucaucacuugguaa

SEQ ID NO: 1326 - RNA, 18 nt, Artificial Sequence
  Synthetic
ggcauuggcuuuugguaa

SEQ ID NO: 1327 - RNA, 19 nt, Artificial Sequence
  Synthetic
gugaucaauaaaaauguaa

SEQ ID NO: 1328 - RNA, 22 nt, Artificial Sequence
  Synthetic
gcugugaucaauaaaaauguaa

SEQ ID NO: 1329 - RNA, 24 nt, Artificial Sequence
  Synthetic
gugcugugaucaauaaaaauguaa

SEQ ID NO: 1330 - RNA, 19 nt, Artificial Sequence
  Synthetic
gaauacauauuaaauguaa

SEQ ID NO: 1331 - RNA, 23 nt, Artificial Sequence
  Synthetic
gcaugaauacauauuaaauguaa

SEQ ID NO: 1332 - RNA, 19 nt, Artificial Sequence
  Synthetic
guacuguauuacaauguaa

SEQ ID NO: 1333 - RNA, 21 nt, Artificial Sequence
  Synthetic
gaaacagagaaauuaauguaa

SEQ ID NO: 1334 - RNA, 19 nt, Artificial Sequence
  Synthetic
gaaggaggcagacauguaa

SEQ ID NO: 1335 - RNA, 21 nt, Artificial Sequence
  Synthetic
gugaaggaggcagacauguaa

SEQ ID NO: 1336 - RNA, 22 nt, Artificial Sequence
  Synthetic
ggugaaggaggcagacauguaa

SEQ ID NO: 1337 - RNA, 19 nt, Artificial Sequence
  Synthetic
gcauacuuuuuagauguaa

SEQ ID NO: 1338 - RNA, 20 nt, Artificial Sequence
  Synthetic
ggcauacuuuuuagauguaa

SEQ ID NO: 1339 - RNA, 21 nt, Artificial Sequence
  Synthetic
guuauauccauaaguauguaa

SEQ ID NO: 1340 - RNA, 23 nt, Artificial Sequence
  Synthetic
guguuauauccauaaguauguaa

SEQ ID NO: 1341 - RNA, 23 nt, Artificial Sequence
  Synthetic
gcuucucaaaaguugaccuguaa

SEQ ID NO: 1342 - RNA, 23 nt, Artificial Sequence
  Synthetic
gucauuaauauuuuucaguguaa

SEQ ID NO: 1343 - RNA, 23 nt, Artificial Sequence
  Synthetic
guccuacagcagaguaauuguaa

SEQ ID NO: 1344 - RNA, 21 nt, Artificial Sequence
  Synthetic
guacucaauaauuguuuguaa

SEQ ID NO: 1345 - RNA, 24 nt, Artificial Sequence
  Synthetic
guacaaaaaucaugccuaaauuaa

SEQ ID NO: 1346 - RNA, 24 nt, Artificial Sequence
  Synthetic
gacauaagguggagcuagaauuaa

SEQ ID NO: 1347 - RNA, 22 nt, Artificial Sequence
  Synthetic
guucuuccuguugaauaauuaa

SEQ ID NO: 1348 - RNA, 23 nt, Artificial Sequence
  Synthetic
guuaaaauuugucuuuuaauuaa

SEQ ID NO: 1349 - RNA, 18 nt, Artificial Sequence
  Synthetic
gagguuuaagaacauuaa

SEQ ID NO: 1350 - RNA, 20 nt, Artificial Sequence
  Synthetic
guuuccaaagucgacauuaa

SEQ ID NO: 1351 - RNA, 22 nt, Artificial Sequence
  Synthetic
guguuuccaaagucgacauuaa

SEQ ID NO: 1352 - RNA, 22 nt, Artificial Sequence
  Synthetic
guauuagaacugagagcauuaa

SEQ ID NO: 1353 - RNA, 22 nt, Artificial Sequence
  Synthetic
gaauaaaaagaccagucauuaa

SEQ ID NO: 1354 - RNA, 23 nt, Artificial Sequence
  Synthetic
ggaauaaaaagaccagucauuaa

SEQ ID NO: 1355 - RNA, 24 nt, Artificial Sequence
  Synthetic
gucuaaguaacuuacauggauuaa

SEQ ID NO: 1356 - RNA, 21 nt, Artificial Sequence
  Synthetic
gccauuauaaaagaauauuaa

SEQ ID NO: 1357 - RNA, 23 nt, Artificial Sequence
  Synthetic
guuucuuggaggcuuuauauuaa

SEQ ID NO: 1358 - RNA, 18 nt, Artificial Sequence
  Synthetic
gcuguuuacaucuauuaa

SEQ ID NO: 1359 - RNA, 23 nt, Artificial Sequence
  Synthetic
guaaucaauacauacauuauuaa

SEQ ID NO: 1360 - RNA, 19 nt, Artificial Sequence
  Synthetic
gcacuuaaauuauuauuaa

SEQ ID NO: 1361 - RNA, 21 nt, Artificial Sequence
  Synthetic
gugcacuuaaauuauuauuaa

SEQ ID NO: 1362 - RNA, 22 nt, Artificial Sequence
  Synthetic
gaaacguuauuuagccacuuaa

SEQ ID NO: 1363 - RNA, 23 nt, Artificial Sequence
  Synthetic
ggaaacguuauuuagccacuuaa

SEQ ID NO: 1364 - RNA, 19 nt, Artificial Sequence
  Synthetic
gauggagacagugacuuaa

SEQ ID NO: 1365 - RNA, 23 nt, Artificial Sequence
  Synthetic
gaaugauggagacagugacuuaa

SEQ ID NO: 1366 - RNA, 18 nt, Artificial Sequence
  Synthetic
gguaauuguuugacuuaa

SEQ ID NO: 1367 - RNA, 19 nt, Artificial Sequence
  Synthetic
guuuuguuucaguacuuaa

SEQ ID NO: 1368 - RNA, 20 nt, Artificial Sequence
  Synthetic
gguuuuguuucaguacuuaa

SEQ ID NO: 1369 - RNA, 24 nt, Artificial Sequence
  Synthetic
gcaugguuuuguuucaguacuuaa

SEQ ID NO: 1370 - RNA, 20 nt, Artificial Sequence
  Synthetic
gcaagaacuuuaaaccuuaa

SEQ ID NO: 1371 - RNA, 22 nt, Artificial Sequence
  Synthetic
gugcaagaacuuuaaaccuuaa

SEQ ID NO: 1372 - RNA, 22 nt, Artificial Sequence
  Synthetic
guaaugaaugugggaaccuuaa

SEQ ID NO: 1373 - RNA, 23 nt, Artificial Sequence
  Synthetic
gguaaugaaugugggaaccuuaa

SEQ ID NO: 1374 - RNA, 24 nt, Artificial Sequence
  Synthetic
ggguaaugaaugugggaaccuuaa

SEQ ID NO: 1375 - RNA, 20 nt, Artificial Sequence
  Synthetic
guuuaaaacacucaccuuaa

SEQ ID NO: 1376 - RNA, 21 nt, Artificial Sequence
  Synthetic
gguuuaaaacacucaccuuaa

SEQ ID NO: 1377 - RNA, 20 nt, Artificial Sequence
  Synthetic
gaaaaaaaaguaguccuuaa

SEQ ID NO: 1378 - RNA, 20 nt, Artificial Sequence
  Synthetic
gauugguacuuggagcuuaa

SEQ ID NO: 1379 - RNA, 22 nt, Artificial Sequence
  Synthetic
guuuuucuccucaauagcuuaa

SEQ ID NO: 1380 - RNA, 19 nt, Artificial Sequence
  Synthetic
gcuguauuccucugcuuaa

SEQ ID NO: 1381 - RNA, 23 nt, Artificial Sequence
  Synthetic
gccugcuguauuccucugcuuaa

SEQ ID NO: 1382 - RNA, 19 nt, Artificial Sequence
  Synthetic
gagaaucuaguuugcuuaa

SEQ ID NO: 1383 - RNA, 21 nt, Artificial Sequence
  Synthetic
gagagaaucuaguuugcuuaa

SEQ ID NO: 1384 - RNA, 23 nt, Artificial Sequence
  Synthetic
gagagagaaucuaguuugcuuaa

SEQ ID NO: 1385 - RNA, 24 nt, Artificial Sequence
  Synthetic
ggagagagaaucuaguuugcuuaa

SEQ ID NO: 1386 - RNA, 19 nt, Artificial Sequence
  Synthetic
gcuagaguuaucaucuuaa

SEQ ID NO: 1387 - RNA, 22 nt, Artificial Sequence
  Synthetic
gccgcuagaguuaucaucuuaa

SEQ ID NO: 1388 - RNA, 18 nt, Artificial Sequence
  Synthetic
ggaagaacacacucuuaa

SEQ ID NO: 1389 - RNA, 21 nt, Artificial Sequence
  Synthetic
gcaggaagaacacacucuuaa

SEQ ID NO: 1390 - RNA, 22 nt, Artificial Sequence
  Synthetic
ggcaggaagaacacacucuuaa

SEQ ID NO: 1391 - RNA, 23 nt, Artificial Sequence
  Synthetic
gggcaggaagaacacacucuuaa

SEQ ID NO: 1392 - RNA, 24 nt, Artificial Sequence
  Synthetic
ggggcaggaagaacacacucuuaa

SEQ ID NO: 1393 - RNA, 20 nt, Artificial Sequence
  Synthetic
gaaaaugccuuccuucuuaa

SEQ ID NO: 1394 - RNA, 22 nt, Artificial Sequence
  Synthetic
gugaaaaugccuuccuucuuaa

SEQ ID NO: 1395 - RNA, 23 nt, Artificial Sequence
  Synthetic
ggugaaaaugccuuccuucuuaa

SEQ ID NO: 1396 - RNA, 24 nt, Artificial Sequence
  Synthetic
gggugaaaaugccuuccuucuuaa

SEQ ID NO: 1397 - RNA, 24 nt, Artificial Sequence
  Synthetic
gucuaauuauauucaauuucuuaa

SEQ ID NO: 1398 - RNA, 22 nt, Artificial Sequence
  Synthetic
guauaccuauauagaaaguuaa

SEQ ID NO: 1399 - RNA, 21 nt, Artificial Sequence
  Synthetic
gaauauuuucagugaaguuaa

SEQ ID NO: 1400 - RNA, 22 nt, Artificial Sequence
  Synthetic
gacauauagaagagccaguuaa

SEQ ID NO: 1401 - RNA, 23 nt, Artificial Sequence
  Synthetic
ggacauauagaagagccaguuaa

SEQ ID NO: 1402 - RNA, 19 nt, Artificial Sequence
  Synthetic
gaauuucaggaagaguuaa

SEQ ID NO: 1403 - RNA, 23 nt, Artificial Sequence
  Synthetic
gauugaauuucaggaagaguuaa

SEQ ID NO: 1404 - RNA, 22 nt, Artificial Sequence
  Synthetic
guacauuaaauaauugaguuaa

SEQ ID NO: 1405 - RNA, 24 nt, Artificial Sequence
  Synthetic
guguacauuaaauaauugaguuaa

SEQ ID NO: 1406 - RNA, 22 nt, Artificial Sequence
  Synthetic
gucuagagcucacaccgguuaa

SEQ ID NO: 1407 - RNA, 18 nt, Artificial Sequence
  Synthetic
gcuugaauauaggguuaa

SEQ ID NO: 1408 - RNA, 19 nt, Artificial Sequence
  Synthetic
ggcuugaauauaggguuaa

SEQ ID NO: 1409 - RNA, 22 nt, Artificial Sequence
  Synthetic
gaaggcuugaauauaggguuaa

SEQ ID NO: 1410 - RNA, 18 nt, Artificial Sequence
  Synthetic
ggaaauaaagcugguuaa

SEQ ID NO: 1411 - RNA, 21 nt, Artificial Sequence
  Synthetic
guaaaauaguacagugguuaa

SEQ ID NO: 1412 - RNA, 22 nt, Artificial Sequence
  Synthetic
gguaaaauaguacagugguuaa

SEQ ID NO: 1413 - RNA, 24 nt, Artificial Sequence
  Synthetic
gagguaaaauaguacagugguuaa

SEQ ID NO: 1414 - RNA, 18 nt, Artificial Sequence
  Synthetic
gagaaacucuuugguuaa

SEQ ID NO: 1415 - RNA, 21 nt, Artificial Sequence
  Synthetic
gaauuaucuucaaaguguuaa

SEQ ID NO: 1416 - RNA, 21 nt, Artificial Sequence
  Synthetic
gucaaucugaguaauuguuaa

SEQ ID NO: 1417 - RNA, 24 nt, Artificial Sequence
  Synthetic
guugucaaucugaguaauuguuaa

SEQ ID NO: 1418 - RNA, 18 nt, Artificial Sequence
  Synthetic
ggguucggggaaauuuaa

SEQ ID NO: 1419 - RNA, 24 nt, Artificial Sequence
  Synthetic
gcacuaggguucggggaaauuuaa

SEQ ID NO: 1420 - RNA, 18 nt, Artificial Sequence
  Synthetic
gggacacauuaaauuuaa

SEQ ID NO: 1421 - RNA, 20 nt, Artificial Sequence
  Synthetic
gagggacacauuaaauuuaa

SEQ ID NO: 1422 - RNA, 24 nt, Artificial Sequence
  Synthetic
gacagagggacacauuaaauuuaa

SEQ ID NO: 1423 - RNA, 21 nt, Artificial Sequence
  Synthetic
guguagaaaauuuaaauuuaa

SEQ ID NO: 1424 - RNA, 21 nt, Artificial Sequence
  Synthetic
gaaugcuucagaagcauuuaa

SEQ ID NO: 1425 - RNA, 23 nt, Artificial Sequence
  Synthetic
gagaaugcuucagaagcauuuaa

SEQ ID NO: 1426 - RNA, 23 nt, Artificial Sequence
  Synthetic
gaaacugagcugagguuauuuaa

SEQ ID NO: 1427 - RNA, 21 nt, Artificial Sequence
  Synthetic
gauccauguuuaagacuuuaa

SEQ ID NO: 1428 - RNA, 23 nt, Artificial Sequence
  Synthetic
gugauccauguuuaagacuuuaa

SEQ ID NO: 1429 - RNA, 18 nt, Artificial Sequence
  Synthetic
gccaaugaauuacuuuaa

SEQ ID NO: 1430 - RNA, 23 nt, Artificial Sequence
  Synthetic
gucaugccaaugaauuacuuuaa

SEQ ID NO: 1431 - RNA, 23 nt, Artificial Sequence
  Synthetic
guucuaggcuagagaaucuuuaa

SEQ ID NO: 1432 - RNA, 18 nt, Artificial Sequence
  Synthetic
gaugcauaacuucuuuaa

SEQ ID NO: 1433 - RNA, 19 nt, Artificial Sequence
  Synthetic
ggaugcauaacuucuuuaa

SEQ ID NO: 1434 - RNA, 22 nt, Artificial Sequence
  Synthetic
gauaauauagcuauuucuuuaa

SEQ ID NO: 1435 - RNA, 21 nt, Artificial Sequence
  Synthetic
gaccugggaguaccaguuuaa

SEQ ID NO: 1436 - RNA, 19 nt, Artificial Sequence
  Synthetic
gcuauaugugguuguuuaa

SEQ ID NO: 1437 - RNA, 19 nt, Artificial Sequence
  Synthetic
guaaauauugacauuuuaa

SEQ ID NO: 1438 - RNA, 19 nt, Artificial Sequence
  Synthetic
guagacuaaucuauuuuaa

SEQ ID NO: 1439 - RNA, 23 nt, Artificial Sequence
  Synthetic
guaucucaacuaauaccuuuuaa

SEQ ID NO: 1440 - RNA, 20 nt, Artificial Sequence
  Synthetic
guaggcacagauaguuuuaa

SEQ ID NO: 1441 - RNA, 22 nt, Artificial Sequence
  Synthetic
gaguaggcacagauaguuuuaa

SEQ ID NO: 1442 - RNA, 23 nt, Artificial Sequence
  Synthetic
ggaguaggcacagauaguuuuaa

SEQ ID NO: 1443 - RNA, 19 nt, Artificial Sequence
  Synthetic
gaucucaaucauguuuuaa

SEQ ID NO: 1444 - RNA, 22 nt, Artificial Sequence
  Synthetic
gcauuaguuuuauauguuuuaa

SEQ ID NO: 1445 - RNA, 19 nt, Artificial Sequence
  Synthetic
gaucccaauuauguuuuaa

SEQ ID NO: 1446 - RNA, 24 nt, Artificial Sequence
  Synthetic
gauaugaucccaauuauguuuuaa

SEQ ID NO: 1447 - RNA, 18 nt, Artificial Sequence
  Synthetic
gaggauugaguguuuuaa

SEQ ID NO: 1448 - RNA, 19 nt, Artificial Sequence
  Synthetic
ggaggauugaguguuuuaa

SEQ ID NO: 1449 - RNA, 20 nt, Artificial Sequence
  Synthetic
gggaggauugaguguuuuaa

SEQ ID NO: 1450 - RNA, 24 nt, Artificial Sequence
  Synthetic
guacuuaacuagugauuguuuuaa

SEQ ID NO: 1451 - RNA, 21 nt, Artificial Sequence
  Synthetic
gccagagaaggauuuuuuuaa

SEQ ID NO: 1452 - RNA, 23 nt, Artificial Sequence
  Synthetic
gauuaucugcagauuuuuuuuaa

SEQ ID NO: 1453 - RNA, 24 nt, Artificial Sequence
  Synthetic
ggauuaucugcagauuuuuuuuaa

SEQ ID NO: 1454 - RNA, 20 nt, Artificial Sequence
  Synthetic
gucauaguauguaaaaaaca

SEQ ID NO: 1455 - RNA, 19 nt, Artificial Sequence
  Synthetic
gaauguguccugaaaaaca

SEQ ID NO: 1456 - RNA, 20 nt, Artificial Sequence
  Synthetic
ggaauguguccugaaaaaca

SEQ ID NO: 1457 - RNA, 22 nt, Artificial Sequence
  Synthetic
guggaauguguccugaaaaaca

SEQ ID NO: 1458 - RNA, 18 nt, Artificial Sequence
  Synthetic
gugccaccaaggaaaaca

SEQ ID NO: 1459 - RNA, 22 nt, Artificial Sequence
  Synthetic
gucagugccaccaaggaaaaca

SEQ ID NO: 1460 - RNA, 23 nt, Artificial Sequence
  Synthetic
ggucagugccaccaaggaaaaca

SEQ ID NO: 1461 - RNA, 20 nt, Artificial Sequence
  Synthetic
gaagauacaagaugaaaaca

SEQ ID NO: 1462 - RNA, 21 nt, Artificial Sequence
  Synthetic
ggaagauacaagaugaaaaca

SEQ ID NO: 1463 - RNA, 23 nt, Artificial Sequence
  Synthetic
guggaagauacaagaugaaaaca

SEQ ID NO: 1464 - RNA, 19 nt, Artificial Sequence
  Synthetic
gauagcaaguuugaaaaca

SEQ ID NO: 1465 - RNA, 21 nt, Artificial Sequence
  Synthetic
gagauagcaaguuugaaaaca

SEQ ID NO: 1466 - RNA, 24 nt, Artificial Sequence
  Synthetic
gaugagauagcaaguuugaaaaca

SEQ ID NO: 1467 - RNA, 22 nt, Artificial Sequence
  Synthetic
gaaauauauaaagcauaaaaca

SEQ ID NO: 1468 - RNA, 24 nt, Artificial Sequence
  Synthetic
gugaaauauauaaagcauaaaaca

SEQ ID NO: 1469 - RNA, 24 nt, Artificial Sequence
  Synthetic
gaaccaaacaaacgauuuaaaaca

SEQ ID NO: 1470 - RNA, 19 nt, Artificial Sequence
  Synthetic
gaaaaaaguauagcaaaca

SEQ ID NO: 1471 - RNA, 20 nt, Artificial Sequence
  Synthetic
ggaaaaaaguauagcaaaca

SEQ ID NO: 1472 - RNA, 23 nt, Artificial Sequence
  Synthetic
gaaggaaaaaaguauagcaaaca

SEQ ID NO: 1473 - RNA, 23 nt, Artificial Sequence
  Synthetic
gaucauuuucuuaacaucaaaca

SEQ ID NO: 1474 - RNA, 18 nt, Artificial Sequence
  Synthetic
gucuuuguaugucaaaca

SEQ ID NO: 1475 - RNA, 20 nt, Artificial Sequence
  Synthetic
gaagggaaguuuuucaaaca

SEQ ID NO: 1476 - RNA, 23 nt, Artificial Sequence
  Synthetic
gcauaauugaaaauccagaaaca

SEQ ID NO: 1477 - RNA, 20 nt, Artificial Sequence
  Synthetic
guaaauauaugggagaaaca

SEQ ID NO: 1478 - RNA, 21 nt, Artificial Sequence
  Synthetic
gguaaauauaugggagaaaca

SEQ ID NO: 1479 - RNA, 24 nt, Artificial Sequence
  Synthetic
gaagguaaauauaugggagaaaca

SEQ ID NO: 1480 - RNA, 21 nt, Artificial Sequence
  Synthetic
gccauagcugccucggaaaca

SEQ ID NO: 1481 - RNA, 22 nt, Artificial Sequence
  Synthetic
ggccauagcugccucggaaaca

SEQ ID NO: 1482 - RNA, 24 nt, Artificial Sequence
  Synthetic
guggccauagcugccucggaaaca

SEQ ID NO: 1483 - RNA, 18 nt, Artificial Sequence
  Synthetic
gaauauacacuggaaaca

SEQ ID NO: 1484 - RNA, 21 nt, Artificial Sequence
  Synthetic
gaucagagucuucuggaaaca

SEQ ID NO: 1485 - RNA, 22 nt, Artificial Sequence
  Synthetic
ggaucagagucuucuggaaaca

SEQ ID NO: 1486 - RNA, 23 nt, Artificial Sequence
  Synthetic
gggaucagagucuucuggaaaca

SEQ ID NO: 1487 - RNA, 24 nt, Artificial Sequence
  Synthetic
ggggaucagagucuucuggaaaca

SEQ ID NO: 1488 - RNA, 20 nt, Artificial Sequence
  Synthetic
guuguugacuaucugaaaca

SEQ ID NO: 1489 - RNA, 20 nt, Artificial Sequence
  Synthetic
gcuaauguuauugugaaaca

SEQ ID NO: 1490 - RNA, 23 nt, Artificial Sequence
  Synthetic
guaaaaguaaaguagaauaaaca

SEQ ID NO: 1491 - RNA, 19 nt, Artificial Sequence
  Synthetic
gauaguuagaagcuaaaca

SEQ ID NO: 1492 - RNA, 22 nt, Artificial Sequence
  Synthetic
gaagauaguuagaagcuaaaca

SEQ ID NO: 1493 - RNA, 19 nt, Artificial Sequence
  Synthetic
gcuuccaaaaagguaaaca

SEQ ID NO: 1494 - RNA, 21 nt, Artificial Sequence
  Synthetic
gagcuuccaaaaagguaaaca

SEQ ID NO: 1495 - RNA, 22 nt, Artificial Sequence
  Synthetic
ggagcuuccaaaaagguaaaca

SEQ ID NO: 1496 - RNA, 21 nt, Artificial Sequence
  Synthetic
gcauuauuucuuauguaaaca

SEQ ID NO: 1497 - RNA, 23 nt, Artificial Sequence
  Synthetic
gcccuaguccuucuauuuaaaca

SEQ ID NO: 1498 - RNA, 23 nt, Artificial Sequence
  Synthetic
gaaauauaucuuuugugacaaca

SEQ ID NO: 1499 - RNA, 21 nt, Artificial Sequence
  Synthetic
gaaacauaaaguuguacaaca

SEQ ID NO: 1500 - RNA, 22 nt, Artificial Sequence
  Synthetic
ggaaacauaaaguuguacaaca

SEQ ID NO: 1501 - RNA, 23 nt, Artificial Sequence
  Synthetic
gggaaacauaaaguuguacaaca

SEQ ID NO: 1502 - RNA, 18 nt, Artificial Sequence
  Synthetic
ggaaagucucuuacaaca

SEQ ID NO: 1503 - RNA, 24 nt, Artificial Sequence
  Synthetic
gacacaggaaagucucuuacaaca

SEQ ID NO: 1504 - RNA, 20 nt, Artificial Sequence
  Synthetic
gaccgaaguauaaagcaaca

SEQ ID NO: 1505 - RNA, 24 nt, Artificial Sequence
  Synthetic
gccacuaaagucucugaggcaaca

SEQ ID NO: 1506 - RNA, 18 nt, Artificial Sequence
  Synthetic
gagcuuuauaaugcaaca

SEQ ID NO: 1507 - RNA, 19 nt, Artificial Sequence
  Synthetic
ggagcuuuauaaugcaaca

SEQ ID NO: 1508 - RNA, 22 nt, Artificial Sequence
  Synthetic
gaaggagcuuuauaaugcaaca

SEQ ID NO: 1509 - RNA, 18 nt, Artificial Sequence
  Synthetic
gaacccagacggucaaca

SEQ ID NO: 1510 - RNA, 22 nt, Artificial Sequence
  Synthetic
gaaagaacccagacggucaaca

SEQ ID NO: 1511 - RNA, 23 nt, Artificial Sequence
  Synthetic
ggaaagaacccagacggucaaca

SEQ ID NO: 1512 - RNA, 23 nt, Artificial Sequence
  Synthetic
guacauaagaaugaaaaagaaca

SEQ ID NO: 1513 - RNA, 23 nt, Artificial Sequence
  Synthetic
guuauuaaugcuuacucagaaca

SEQ ID NO: 1514 - RNA, 18 nt, Artificial Sequence
  Synthetic
gccacggaguggagaaca

SEQ ID NO: 1515 - RNA, 24 nt, Artificial Sequence
  Synthetic
guucuagccacggaguggagaaca

SEQ ID NO: 1516 - RNA, 22 nt, Artificial Sequence
  Synthetic
guaaaacagcagcaguagaaca

SEQ ID NO: 1517 - RNA, 24 nt, Artificial Sequence
  Synthetic
guguaaaacagcagcaguagaaca

SEQ ID NO: 1518 - RNA, 22 nt, Artificial Sequence
  Synthetic
gauauccuuucauuuaggaaca

SEQ ID NO: 1519 - RNA, 22 nt, Artificial Sequence
  Synthetic
gcaaaauaaggaaaacggaaca

SEQ ID NO: 1520 - RNA, 24 nt, Artificial Sequence
  Synthetic
gagcaaaauaaggaaaacggaaca

SEQ ID NO: 1521 - RNA, 22 nt, Artificial Sequence
  Synthetic
gaagauggaagagacuggaaca

SEQ ID NO: 1522 - RNA, 18 nt, Artificial Sequence
  Synthetic
gugucccaggaaugaaca

SEQ ID NO: 1523 - RNA, 24 nt, Artificial Sequence
  Synthetic
guaucucauaugaaagcaugaaca

SEQ ID NO: 1524 - RNA, 19 nt, Artificial Sequence
  Synthetic
guaagaaacuauaugaaca

SEQ ID NO: 1525 - RNA, 22 nt, Artificial Sequence
  Synthetic
guaguaagaaacuauaugaaca

SEQ ID NO: 1526 - RNA, 23 nt, Artificial Sequence
  Synthetic
gguaguaagaaacuauaugaaca

SEQ ID NO: 1527 - RNA, 24 nt, Artificial Sequence
  Synthetic
ggguaguaagaaacuauaugaaca

SEQ ID NO: 1528 - RNA, 23 nt, Artificial Sequence
  Synthetic
gcaucugcuucucuuuaugaaca

SEQ ID NO: 1529 - RNA, 24 nt, Artificial Sequence
  Synthetic
ggcaucugcuucucuuuaugaaca

SEQ ID NO: 1530 - RNA, 20 nt, Artificial Sequence
  Synthetic
gacauuuaacaagcugaaca

SEQ ID NO: 1531 - RNA, 22 nt, Artificial Sequence
  Synthetic
gagacauuuaacaagcugaaca

SEQ ID NO: 1532 - RNA, 22 nt, Artificial Sequence
  Synthetic
gcccauggaauucuugugaaca

SEQ ID NO: 1533 - RNA, 23 nt, Artificial Sequence
  Synthetic
ggcccauggaauucuugugaaca

SEQ ID NO: 1534 - RNA, 19 nt, Artificial Sequence
  Synthetic
guagcaaaagaauugaaca

SEQ ID NO: 1535 - RNA, 22 nt, Artificial Sequence
  Synthetic
guaguagcaaaagaauugaaca

SEQ ID NO: 1536 - RNA, 21 nt, Artificial Sequence
  Synthetic
gcuauuuuggugacuugaaca

SEQ ID NO: 1537 - RNA, 22 nt, Artificial Sequence
  Synthetic
ggcuauuuuggugacuugaaca

SEQ ID NO: 1538 - RNA, 23 nt, Artificial Sequence
  Synthetic
gggcuauuuuggugacuugaaca

SEQ ID NO: 1539 - RNA, 21 nt, Artificial Sequence
  Synthetic
gccuuauauccagaaauaaca

SEQ ID NO: 1540 - RNA, 23 nt, Artificial Sequence
  Synthetic
gugccuuauauccagaaauaaca

SEQ ID NO: 1541 - RNA, 21 nt, Artificial Sequence
  Synthetic
gaauauucaaacuuaauaaca

SEQ ID NO: 1542 - RNA, 23 nt, Artificial Sequence
  Synthetic
gagaauauucaaacuuaauaaca

SEQ ID NO: 1543 - RNA, 18 nt, Artificial Sequence
  Synthetic
guguacacaguucuaaca

SEQ ID NO: 1544 - RNA, 21 nt, Artificial Sequence
  Synthetic
guuuuacuuauugaauuaaca

SEQ ID NO: 1545 - RNA, 24 nt, Artificial Sequence
  Synthetic
guaguuuuacuuauugaauuaaca

SEQ ID NO: 1546 - RNA, 18 nt, Artificial Sequence
  Synthetic
gugcccguuagauuaaca

SEQ ID NO: 1547 - RNA, 20 nt, Artificial Sequence
  Synthetic
guuuaggacuaugauuaaca

SEQ ID NO: 1548 - RNA, 21 nt, Artificial Sequence
  Synthetic
gguuuaggacuaugauuaaca

SEQ ID NO: 1549 - RNA, 23 nt, Artificial Sequence
  Synthetic
gucuauggucagccauauuaaca

SEQ ID NO: 1550 - RNA, 24 nt, Artificial Sequence
  Synthetic
guucaucauccuagccauaacaca

SEQ ID NO: 1551 - RNA, 18 nt, Artificial Sequence
  Synthetic
gaagcauuuagacacaca

SEQ ID NO: 1552 - RNA, 21 nt, Artificial Sequence
  Synthetic
gaugggagccuccaucacaca

SEQ ID NO: 1553 - RNA, 23 nt, Artificial Sequence
  Synthetic
gauuauguugauagacagacaca

SEQ ID NO: 1554 - RNA, 24 nt, Artificial Sequence
  Synthetic
ggauuauguugauagacagacaca

SEQ ID NO: 1555 - RNA, 18 nt, Artificial Sequence
  Synthetic
ggguauuuguuagacaca

SEQ ID NO: 1556 - RNA, 24 nt, Artificial Sequence
  Synthetic
gucaauggguauuuguuagacaca

SEQ ID NO: 1557 - RNA, 18 nt, Artificial Sequence
  Synthetic
guucucaacccugacaca

SEQ ID NO: 1558 - RNA, 24 nt, Artificial Sequence
  Synthetic
gcuucuguucucaacccugacaca

SEQ ID NO: 1559 - RNA, 18 nt, Artificial Sequence
  Synthetic
ggugacccccuugacaca

SEQ ID NO: 1560 - RNA, 18 nt, Artificial Sequence
  Synthetic
guucucuucaucuacaca

SEQ ID NO: 1561 - RNA, 18 nt, Artificial Sequence
  Synthetic
ggccagaaauuaaccaca

SEQ ID NO: 1562 - RNA, 20 nt, Artificial Sequence
  Synthetic
gaggccagaaauuaaccaca

SEQ ID NO: 1563 - RNA, 21 nt, Artificial Sequence
  Synthetic
ggaggccagaaauuaaccaca

SEQ ID NO: 1564 - RNA, 20 nt, Artificial Sequence
  Synthetic
gaaaaugcaggcacaccaca

SEQ ID NO: 1565 - RNA, 22 nt, Artificial Sequence
  Synthetic
gugaaaaugcaggcacaccaca

SEQ ID NO: 1566 - RNA, 18 nt, Artificial Sequence
  Synthetic
ggauguuagaaagccaca

SEQ ID NO: 1567 - RNA, 20 nt, Artificial Sequence
  Synthetic
gaggauguuagaaagccaca

SEQ ID NO: 1568 - RNA, 23 nt, Artificial Sequence
  Synthetic
gaugaggauguuagaaagccaca

SEQ ID NO: 1569 - RNA, 18 nt, Artificial Sequence
  Synthetic
gugacugcccaagccaca

SEQ ID NO: 1570 - RNA, 21 nt, Artificial Sequence
  Synthetic
gaagugacugcccaagccaca

SEQ ID NO: 1571 - RNA, 23 nt, Artificial Sequence
  Synthetic
gagaagugacugcccaagccaca

SEQ ID NO: 1572 - RNA, 20 nt, Artificial Sequence
  Synthetic
gccaaggaaaaguagccaca

SEQ ID NO: 1573 - RNA, 22 nt, Artificial Sequence
  Synthetic
gugccaaggaaaaguagccaca

SEQ ID NO: 1574 - RNA, 20 nt, Artificial Sequence
  Synthetic
gcauaggauagcccuccaca

SEQ ID NO: 1575 - RNA, 20 nt, Artificial Sequence
  Synthetic
gcuuuccauggccaagcaca

SEQ ID NO: 1576 - RNA, 21 nt, Artificial Sequence
  Synthetic
ggcuuuccauggccaagcaca

SEQ ID NO: 1577 - RNA, 22 nt, Artificial Sequence
  Synthetic
guauaagcccuacauacgcaca

SEQ ID NO: 1578 - RNA, 18 nt, Artificial Sequence
  Synthetic
gcucucguggaaggcaca

SEQ ID NO: 1579 - RNA, 19 nt, Artificial Sequence
  Synthetic
ggcucucguggaaggcaca

SEQ ID NO: 1580 - RNA, 23 nt, Artificial Sequence
  Synthetic
guauaggcaagggcaagaucaca

SEQ ID NO: 1581 - RNA, 23 nt, Artificial Sequence
  Synthetic
guauuaauuaaaguaauaucaca

SEQ ID NO: 1582 - RNA, 20 nt, Artificial Sequence
  Synthetic
gacccuuggcuacacucaca

SEQ ID NO: 1583 - RNA, 24 nt, Artificial Sequence
  Synthetic
guuagacccuuggcuacacucaca

SEQ ID NO: 1584 - RNA, 20 nt, Artificial Sequence
  Synthetic
gaaauauucauagacucaca

SEQ ID NO: 1585 - RNA, 22 nt, Artificial Sequence
  Synthetic
gugaaauauucauagacucaca

SEQ ID NO: 1586 - RNA, 21 nt, Artificial Sequence
  Synthetic
gcaaacacguggucucucaca

SEQ ID NO: 1587 - RNA, 22 nt, Artificial Sequence
  Synthetic
ggcaaacacguggucucucaca

SEQ ID NO: 1588 - RNA, 23 nt, Artificial Sequence
  Synthetic
gggcaaacacguggucucucaca

SEQ ID NO: 1589 - RNA, 20 nt, Artificial Sequence
  Synthetic
gacaucccaguaaagucaca

SEQ ID NO: 1590 - RNA, 24 nt, Artificial Sequence
  Synthetic
guuagacaucccaguaaagucaca

SEQ ID NO: 1591 - RNA, 18 nt, Artificial Sequence
  Synthetic
gucagccaagaagucaca

SEQ ID NO: 1592 - RNA, 20 nt, Artificial Sequence
  Synthetic
gugucagccaagaagucaca

SEQ ID NO: 1593 - RNA, 23 nt, Artificial Sequence
  Synthetic
gcagugcauucuaaaaugucaca

SEQ ID NO: 1594 - RNA, 21 nt, Artificial Sequence
  Synthetic
gaauaguauuauacauucaca

SEQ ID NO: 1595 - RNA, 21 nt, Artificial Sequence
  Synthetic
guucaggaagaauuauucaca

SEQ ID NO: 1596 - RNA, 22 nt, Artificial Sequence
  Synthetic
gguucaggaagaauuauucaca

SEQ ID NO: 1597 - RNA, 19 nt, Artificial Sequence
  Synthetic
gccuccauggcauuucaca

SEQ ID NO: 1598 - RNA, 23 nt, Artificial Sequence
  Synthetic
gccugccuccauggcauuucaca

SEQ ID NO: 1599 - RNA, 18 nt, Artificial Sequence
  Synthetic
gaaggauucacuuucaca

SEQ ID NO: 1600 - RNA, 21 nt, Artificial Sequence
  Synthetic
gcugaaggauucacuuucaca

SEQ ID NO: 1601 - RNA, 22 nt, Artificial Sequence
  Synthetic
ggcugaaggauucacuuucaca

SEQ ID NO: 1602 - RNA, 23 nt, Artificial Sequence
  Synthetic
gggcugaaggauucacuuucaca

SEQ ID NO: 1603 - RNA, 24 nt, Artificial Sequence
  Synthetic
ggggcugaaggauucacuuucaca

SEQ ID NO: 1604 - RNA, 18 nt, Artificial Sequence
  Synthetic
ggcauuuugacuuucaca

SEQ ID NO: 1605 - RNA, 21 nt, Artificial Sequence
  Synthetic
gauggcauuuugacuuucaca

SEQ ID NO: 1606 - RNA, 22 nt, Artificial Sequence
  Synthetic
gcacuauacaguaacaaagaca

SEQ ID NO: 1607 - RNA, 23 nt, Artificial Sequence
  Synthetic
gaagaaagaaaccaagaaagaca

SEQ ID NO: 1608 - RNA, 21 nt, Artificial Sequence
  Synthetic
gaauaaaccaguugaaagaca

SEQ ID NO: 1609 - RNA, 20 nt, Artificial Sequence
  Synthetic
gucacuguuuccccaagaca

SEQ ID NO: 1610 - RNA, 24 nt, Artificial Sequence
  Synthetic
guuagucacuguuuccccaagaca

SEQ ID NO: 1611 - RNA, 22 nt, Artificial Sequence
  Synthetic
gaauauuaucacuuugaagaca

SEQ ID NO: 1612 - RNA, 24 nt, Artificial Sequence
  Synthetic
gugaauauuaucacuuugaagaca

SEQ ID NO: 1613 - RNA, 20 nt, Artificial Sequence
  Synthetic
gucuugggaaggaacagaca

SEQ ID NO: 1614 - RNA, 21 nt, Artificial Sequence
  Synthetic
ggucuugggaaggaacagaca

SEQ ID NO: 1615 - RNA, 18 nt, Artificial Sequence
  Synthetic
gaugcucaaggacagaca

SEQ ID NO: 1616 - RNA, 21 nt, Artificial Sequence
  Synthetic
gaugaugcucaaggacagaca

SEQ ID NO: 1617 - RNA, 23 nt, Artificial Sequence
  Synthetic
gagaugaugcucaaggacagaca

SEQ ID NO: 1618 - RNA, 23 nt, Artificial Sequence
  Synthetic
gcaccacucuaccacugcagaca

SEQ ID NO: 1619 - RNA, 19 nt, Artificial Sequence
  Synthetic
gugacucaaguuagagaca

SEQ ID NO: 1620 - RNA, 20 nt, Artificial Sequence
  Synthetic
ggugacucaaguuagagaca

SEQ ID NO: 1621 - RNA, 21 nt, Artificial Sequence
  Synthetic
gggugacucaaguuagagaca

SEQ ID NO: 1622 - RNA, 24 nt, Artificial Sequence
  Synthetic
gcagggugacucaaguuagagaca

SEQ ID NO: 1623 - RNA, 18 nt, Artificial Sequence
  Synthetic
guucuaaaaagggagaca

SEQ ID NO: 1624 - RNA, 19 nt, Artificial Sequence
  Synthetic
gguucuaaaaagggagaca

SEQ ID NO: 1625 - RNA, 22 nt, Artificial Sequence
  Synthetic
guugguucuaaaaagggagaca

SEQ ID NO: 1626 - RNA, 19 nt, Artificial Sequence
  Synthetic
gaucuuauuugcugagaca

SEQ ID NO: 1627 - RNA, 20 nt, Artificial Sequence
  Synthetic
ggaucuuauuugcugagaca

SEQ ID NO: 1628 - RNA, 20 nt, Artificial Sequence
  Synthetic
guaaucugucauuuaggaca

SEQ ID NO: 1629 - RNA, 24 nt, Artificial Sequence
  Synthetic
gauaguaaucugucauuuaggaca

SEQ ID NO: 1630 - RNA, 19 nt, Artificial Sequence
  Synthetic
gccuaacucugaggggaca

SEQ ID NO: 1631 - RNA, 24 nt, Artificial Sequence
  Synthetic
gucaugccuaacucugaggggaca

SEQ ID NO: 1632 - RNA, 21 nt, Artificial Sequence
  Synthetic
gcuccucccacuguggggaca

SEQ ID NO: 1633 - RNA, 20 nt, Artificial Sequence
  Synthetic
guuuuuuaaaguuugggaca

SEQ ID NO: 1634 - RNA, 23 nt, Artificial Sequence
  Synthetic
guauaaacauguacacauggaca

SEQ ID NO: 1635 - RNA, 24 nt, Artificial Sequence
  Synthetic
gaauaacgcuaugucacauggaca

SEQ ID NO: 1636 - RNA, 19 nt, Artificial Sequence
  Synthetic
gaaaacugcaacuuggaca

SEQ ID NO: 1637 - RNA, 21 nt, Artificial Sequence
  Synthetic
gagaaaacugcaacuuggaca

SEQ ID NO: 1638 - RNA, 23 nt, Artificial Sequence
  Synthetic
gagagaaaacugcaacuuggaca

SEQ ID NO: 1639 - RNA, 22 nt, Artificial Sequence
  Synthetic
gaacaaacacgaaguaaugaca

SEQ ID NO: 1640 - RNA, 24 nt, Artificial Sequence
  Synthetic
gagaacaaacacgaaguaaugaca

SEQ ID NO: 1641 - RNA, 21 nt, Artificial Sequence
  Synthetic
gccagccuuuucauccugaca

SEQ ID NO: 1642 - RNA, 24 nt, Artificial Sequence
  Synthetic
guuuggcagaaaaaaaaagugaca

SEQ ID NO: 1643 - RNA, 19 nt, Artificial Sequence
  Synthetic
guauggaaagugguugaca

SEQ ID NO: 1644 - RNA, 20 nt, Artificial Sequence
  Synthetic
gguauggaaagugguugaca

SEQ ID NO: 1645 - RNA, 22 nt, Artificial Sequence
  Synthetic
gagguauggaaagugguugaca

SEQ ID NO: 1646 - RNA, 24 nt, Artificial Sequence
  Synthetic
gugagguauggaaagugguugaca

SEQ ID NO: 1647 - RNA, 22 nt, Artificial Sequence
  Synthetic
gaggacuuuucugguuuugaca

SEQ ID NO: 1648 - RNA, 24 nt, Artificial Sequence
  Synthetic
gcauauaauuauucauuaaauaca

SEQ ID NO: 1649 - RNA, 24 nt, Artificial Sequence
  Synthetic
gaaaucugacuuuauguuaauaca

SEQ ID NO: 1650 - RNA, 22 nt, Artificial Sequence
  Synthetic
gaacuacuaccacagacauaca

SEQ ID NO: 1651 - RNA, 24 nt, Artificial Sequence
  Synthetic
gagaacuacuaccacagacauaca

SEQ ID NO: 1652 - RNA, 22 nt, Artificial Sequence
  Synthetic
gcuuaaaugagauuaccauaca

SEQ ID NO: 1653 - RNA, 23 nt, Artificial Sequence
  Synthetic
ggcuuaaaugagauuaccauaca

SEQ ID NO: 1654 - RNA, 24 nt, Artificial Sequence
  Synthetic
gggcuuaaaugagauuaccauaca

SEQ ID NO: 1655 - RNA, 22 nt, Artificial Sequence
  Synthetic
gaaaaaaauuagagagcauaca

SEQ ID NO: 1656 - RNA, 22 nt, Artificial Sequence
  Synthetic
guauuugcuuugcuuucauaca

SEQ ID NO: 1657 - RNA, 24 nt, Artificial Sequence
  Synthetic
guguauuugcuuugcuuucauaca

SEQ ID NO: 1658 - RNA, 24 nt, Artificial Sequence
  Synthetic
gccugagaaauaaagaaauauaca

SEQ ID NO: 1659 - RNA, 22 nt, Artificial Sequence
  Synthetic
gcaaaucugaacauacuauaca

SEQ ID NO: 1660 - RNA, 24 nt, Artificial Sequence
  Synthetic
gucccaauuuuacucuucuauaca

SEQ ID NO: 1661 - RNA, 20 nt, Artificial Sequence
  Synthetic
gccauuggggguccccuaca

SEQ ID NO: 1662 - RNA, 22 nt, Artificial Sequence
  Synthetic
gauucuuuuuagaagggcuaca

SEQ ID NO: 1663 - RNA, 21 nt, Artificial Sequence
  Synthetic
gccuuucuuucuuuuaguaca

SEQ ID NO: 1664 - RNA, 23 nt, Artificial Sequence
  Synthetic
gugccuuucuuucuuuuaguaca

SEQ ID NO: 1665 - RNA, 23 nt, Artificial Sequence
  Synthetic
gacaacugcugagaaaauguaca

SEQ ID NO: 1666 - RNA, 18 nt, Artificial Sequence
  Synthetic
gaagcagaacgauguaca

SEQ ID NO: 1667 - RNA, 23 nt, Artificial Sequence
  Synthetic
guucagaagcagaacgauguaca

SEQ ID NO: 1668 - RNA, 21 nt, Artificial Sequence
  Synthetic
gagaaaaaaaaaauguguaca

SEQ ID NO: 1669 - RNA, 23 nt, Artificial Sequence
  Synthetic
gugagaaaaaaaaaauguguaca

SEQ ID NO: 1670 - RNA, 21 nt, Artificial Sequence
  Synthetic
gaaagcugaaagaauuguaca

SEQ ID NO: 1671 - RNA, 18 nt, Artificial Sequence
  Synthetic
guaauuuacagaauuaca

SEQ ID NO: 1672 - RNA, 21 nt, Artificial Sequence
  Synthetic
gaaguaauuuacagaauuaca

SEQ ID NO: 1673 - RNA, 23 nt, Artificial Sequence
  Synthetic
gagaaguaauuuacagaauuaca

SEQ ID NO: 1674 - RNA, 21 nt, Artificial Sequence
  Synthetic
guuuauuuuuucuuaauuaca

SEQ ID NO: 1675 - RNA, 22 nt, Artificial Sequence
  Synthetic
gguuuauuuuuucuuaauuaca

SEQ ID NO: 1676 - RNA, 19 nt, Artificial Sequence
  Synthetic
gcuggaacaaagcauuaca

SEQ ID NO: 1677 - RNA, 21 nt, Artificial Sequence
  Synthetic
gucauaaugcacacuguuaca

SEQ ID NO: 1678 - RNA, 18 nt, Artificial Sequence
  Synthetic
gguuaucuggucuuuaca

SEQ ID NO: 1679 - RNA, 22 nt, Artificial Sequence
  Synthetic
gcuuuggggguaguaguuuaca

SEQ ID NO: 1680 - RNA, 18 nt, Artificial Sequence
  Synthetic
gugggcugaugguuuaca

SEQ ID NO: 1681 - RNA, 19 nt, Artificial Sequence
  Synthetic
gcaagacuaaauuuuuaca

SEQ ID NO: 1682 - RNA, 23 nt, Artificial Sequence
  Synthetic
guaugcaagacuaaauuuuuaca

SEQ ID NO: 1683 - RNA, 21 nt, Artificial Sequence
  Synthetic
gcccaaaaacagauaaaacca

SEQ ID NO: 1684 - RNA, 24 nt, Artificial Sequence
  Synthetic
guugcccaaaaacagauaaaacca

SEQ ID NO: 1685 - RNA, 21 nt, Artificial Sequence
  Synthetic
gauaaugagaacuacaaacca

SEQ ID NO: 1686 - RNA, 24 nt, Artificial Sequence
  Synthetic
gcugauaaugagaacuacaaacca

SEQ ID NO: 1687 - RNA, 23 nt, Artificial Sequence
  Synthetic
gacauauguuucaugugaaacca

SEQ ID NO: 1688 - RNA, 24 nt, Artificial Sequence
  Synthetic
guuucauaaagguggaauaaacca

SEQ ID NO: 1689 - RNA, 18 nt, Artificial Sequence
  Synthetic
ggaugccgcuggcaacca

SEQ ID NO: 1690 - RNA, 18 nt, Artificial Sequence
  Synthetic
gcccagaaaccagaacca

SEQ ID NO: 1691 - RNA, 22 nt, Artificial Sequence
  Synthetic
gcucaaauuuuauugagaacca

SEQ ID NO: 1692 - RNA, 22 nt, Artificial Sequence
  Synthetic
gacagucaaacucguagaacca

SEQ ID NO: 1693 - RNA, 24 nt, Artificial Sequence
  Synthetic
gagacagucaaacucguagaacca

SEQ ID NO: 1694 - RNA, 19 nt, Artificial Sequence
  Synthetic
gcuggcaaccuaugaacca

SEQ ID NO: 1695 - RNA, 22 nt, Artificial Sequence
  Synthetic
guauccauuaacaauauaacca

SEQ ID NO: 1696 - RNA, 19 nt, Artificial Sequence
  Synthetic
gaugggccuaaucuaacca

SEQ ID NO: 1697 - RNA, 19 nt, Artificial Sequence
  Synthetic
guguuaaguccucuaacca

SEQ ID NO: 1698 - RNA, 24 nt, Artificial Sequence
  Synthetic
guaaaguguuaaguccucuaacca

SEQ ID NO: 1699 - RNA, 20 nt, Artificial Sequence
  Synthetic
gacuccaaacgcucacacca

SEQ ID NO: 1700 - RNA, 18 nt, Artificial Sequence
  Synthetic
gcagccuuuuagccacca

SEQ ID NO: 1701 - RNA, 24 nt, Artificial Sequence
  Synthetic
gaaaacaagugaguuuggccacca

SEQ ID NO: 1702 - RNA, 21 nt, Artificial Sequence
  Synthetic
gauuuaaaaaaauuuccacca

SEQ ID NO: 1703 - RNA, 22 nt, Artificial Sequence
  Synthetic
ggauuuaaaaaaauuuccacca

SEQ ID NO: 1704 - RNA, 24 nt, Artificial Sequence
  Synthetic
guggauuuaaaaaaauuuccacca

SEQ ID NO: 1705 - RNA, 21 nt, Artificial Sequence
  Synthetic
gcauucuuuacuuacucacca

SEQ ID NO: 1706 - RNA, 22 nt, Artificial Sequence
  Synthetic
ggcauucuuuacuuacucacca

SEQ ID NO: 1707 - RNA, 23 nt, Artificial Sequence
  Synthetic
gggcauucuuuacuuacucacca

SEQ ID NO: 1708 - RNA, 21 nt, Artificial Sequence
  Synthetic
guaaauggacgguggucacca

SEQ ID NO: 1709 - RNA, 24 nt, Artificial Sequence
  Synthetic
gcaguaaauggacgguggucacca

SEQ ID NO: 1710 - RNA, 18 nt, Artificial Sequence
  Synthetic
gcaggguaccauucacca

SEQ ID NO: 1711 - RNA, 23 nt, Artificial Sequence
  Synthetic
gaaaagcaggguaccauucacca

SEQ ID NO: 1712 - RNA, 24 nt, Artificial Sequence
  Synthetic
ggaaaagcaggguaccauucacca

SEQ ID NO: 1713 - RNA, 18 nt, Artificial Sequence
  Synthetic
gaacuauuccaaagacca

SEQ ID NO: 1714 - RNA, 19 nt, Artificial Sequence
  Synthetic
ggaacuauuccaaagacca

SEQ ID NO: 1715 - RNA, 22 nt, Artificial Sequence
  Synthetic
gaacuacaguauccagagacca

SEQ ID NO: 1716 - RNA, 23 nt, Artificial Sequence
  Synthetic
ggaacuacaguauccagagacca

SEQ ID NO: 1717 - RNA, 23 nt, Artificial Sequence
  Synthetic
gacaaacacaaaagaauagacca

SEQ ID NO: 1718 - RNA, 20 nt, Artificial Sequence
  Synthetic
gcaguuuggaauaaugacca

SEQ ID NO: 1719 - RNA, 22 nt, Artificial Sequence
  Synthetic
gcccaagcuggagcagugacca

SEQ ID NO: 1720 - RNA, 24 nt, Artificial Sequence
  Synthetic
gagcccaagcuggagcagugacca

SEQ ID NO: 1721 - RNA, 19 nt, Artificial Sequence
  Synthetic
gcacugaaaagggugacca

SEQ ID NO: 1722 - RNA, 21 nt, Artificial Sequence
  Synthetic
gugcacugaaaagggugacca

SEQ ID NO: 1723 - RNA, 18 nt, Artificial Sequence
  Synthetic
guuuguauguguugacca

SEQ ID NO: 1724 - RNA, 22 nt, Artificial Sequence
  Synthetic
gaauguuuguauguguugacca

SEQ ID NO: 1725 - RNA, 24 nt, Artificial Sequence
  Synthetic
gcacuauuuaaaauagaaauacca

SEQ ID NO: 1726 - RNA, 20 nt, Artificial Sequence
  Synthetic
gucagcaauaagccauacca

SEQ ID NO: 1727 - RNA, 21 nt, Artificial Sequence
  Synthetic
ggucagcaauaagccauacca

SEQ ID NO: 1728 - RNA, 23 nt, Artificial Sequence
  Synthetic
gaggucagcaauaagccauacca

SEQ ID NO: 1729 - RNA, 23 nt, Artificial Sequence
  Synthetic
gaauaagauagcauaggguacca

SEQ ID NO: 1730 - RNA, 20 nt, Artificial Sequence
  Synthetic
guaaggagucagacuuacca

SEQ ID NO: 1731 - RNA, 21 nt, Artificial Sequence
  Synthetic
gguaaggagucagacuuacca

SEQ ID NO: 1732 - RNA, 22 nt, Artificial Sequence
  Synthetic
ggguaaggagucagacuuacca

SEQ ID NO: 1733 - RNA, 24 nt, Artificial Sequence
  Synthetic
guggguaaggagucagacuuacca

SEQ ID NO: 1734 - RNA, 19 nt, Artificial Sequence
  Synthetic
gauugauuuauacuuacca

SEQ ID NO: 1735 - RNA, 20 nt, Artificial Sequence
  Synthetic
gucagagcagaggcaaccca

SEQ ID NO: 1736 - RNA, 22 nt, Artificial Sequence
  Synthetic
gagucagagcagaggcaaccca

SEQ ID NO: 1737 - RNA, 21 nt, Artificial Sequence
  Synthetic
gcuuuaagaucaaauaaccca

SEQ ID NO: 1738 - RNA, 23 nt, Artificial Sequence
  Synthetic
gacuuaagcaagguaaacaccca

SEQ ID NO: 1739 - RNA, 18 nt, Artificial Sequence
  Synthetic
gaacucuguuugcaccca

SEQ ID NO: 1740 - RNA, 23 nt, Artificial Sequence
  Synthetic
gcuuagaacucuguuugcaccca

SEQ ID NO: 1741 - RNA, 24 nt, Artificial Sequence
  Synthetic
ggcuuagaacucuguuugcaccca

SEQ ID NO: 1742 - RNA, 18 nt, Artificial Sequence
  Synthetic
gccccuauccuagaccca

SEQ ID NO: 1743 - RNA, 19 nt, Artificial Sequence
  Synthetic
ggccccuauccuagaccca

SEQ ID NO: 1744 - RNA, 21 nt, Artificial Sequence
  Synthetic
gaggccccuauccuagaccca

SEQ ID NO: 1745 - RNA, 21 nt, Artificial Sequence
  Synthetic
gacccucaaaaucuagaccca

SEQ ID NO: 1746 - RNA, 21 nt, Artificial Sequence
  Synthetic
ggagccuucagaaaugaccca

SEQ ID NO: 1747 - RNA, 18 nt, Artificial Sequence
  Synthetic
gaaacucaaauauaccca

SEQ ID NO: 1748 - RNA, 19 nt, Artificial Sequence
  Synthetic
gcuugccggauuuuaccca

SEQ ID NO: 1749 - RNA, 19 nt, Artificial Sequence
  Synthetic
gugaauuccagacacccca

SEQ ID NO: 1750 - RNA, 22 nt, Artificial Sequence
  Synthetic
gcugugaauuccagacacccca

SEQ ID NO: 1751 - RNA, 21 nt, Artificial Sequence
  Synthetic
ggcagcucagaugagccccca

SEQ ID NO: 1752 - RNA, 19 nt, Artificial Sequence
  Synthetic
gaucucuuaauauccccca

SEQ ID NO: 1753 - RNA, 21 nt, Artificial Sequence
  Synthetic
gccauuguaagacaaucccca

SEQ ID NO: 1754 - RNA, 21 nt, Artificial Sequence
  Synthetic
guaugucuaaaauccucccca

SEQ ID NO: 1755 - RNA, 18 nt, Artificial Sequence
  Synthetic
guguagguugucucccca

SEQ ID NO: 1756 - RNA, 20 nt, Artificial Sequence
  Synthetic
guguguagguugucucccca

SEQ ID NO: 1757 - RNA, 19 nt, Artificial Sequence
  Synthetic
gagaccagccacuucccca

SEQ ID NO: 1758 - RNA, 19 nt, Artificial Sequence
  Synthetic
guauacagaguagagccca

SEQ ID NO: 1759 - RNA, 22 nt, Artificial Sequence
  Synthetic
gcaguauacagaguagagccca

SEQ ID NO: 1760 - RNA, 23 nt, Artificial Sequence
  Synthetic
gacuaugccacagcaaaggccca

SEQ ID NO: 1761 - RNA, 23 nt, Artificial Sequence
  Synthetic
guacuugauuuggucgaggccca

SEQ ID NO: 1762 - RNA, 21 nt, Artificial Sequence
  Synthetic
gcaaaggaguuugugggccca

SEQ ID NO: 1763 - RNA, 24 nt, Artificial Sequence
  Synthetic
guugcaaaggaguuugugggccca

SEQ ID NO: 1764 - RNA, 21 nt, Artificial Sequence
  Synthetic
guuuacuaacuauaaugccca

SEQ ID NO: 1765 - RNA, 22 nt, Artificial Sequence
  Synthetic
gguuuacuaacuauaaugccca

SEQ ID NO: 1766 - RNA, 21 nt, Artificial Sequence
  Synthetic
gaaauguuauauucuugccca

SEQ ID NO: 1767 - RNA, 19 nt, Artificial Sequence
  Synthetic
gaucuuauuaaguugccca

SEQ ID NO: 1768 - RNA, 20 nt, Artificial Sequence
  Synthetic
gacuuugaaacauuugccca

SEQ ID NO: 1769 - RNA, 18 nt, Artificial Sequence
  Synthetic
guuccucacaaccuccca

SEQ ID NO: 1770 - RNA, 20 nt, Artificial Sequence
  Synthetic
guguuccucacaaccuccca

SEQ ID NO: 1771 - RNA, 22 nt, Artificial Sequence
  Synthetic
guguguuccucacaaccuccca

SEQ ID NO: 1772 - RNA, 24 nt, Artificial Sequence
  Synthetic
guguguguuccucacaaccuccca

SEQ ID NO: 1773 - RNA, 18 nt, Artificial Sequence
  Synthetic
ggaagcucaaggcuccca

SEQ ID NO: 1774 - RNA, 22 nt, Artificial Sequence
  Synthetic
gaaaggaagcucaaggcuccca

SEQ ID NO: 1775 - RNA, 23 nt, Artificial Sequence
  Synthetic
ggaaaggaagcucaaggcuccca

SEQ ID NO: 1776 - RNA, 22 nt, Artificial Sequence
  Synthetic
gaagcuguuuuuuuuucuccca

SEQ ID NO: 1777 - RNA, 18 nt, Artificial Sequence
  Synthetic
guuuucuuuuguguccca

SEQ ID NO: 1778 - RNA, 19 nt, Artificial Sequence
  Synthetic
gcuauggggucuguuccca

SEQ ID NO: 1779 - RNA, 23 nt, Artificial Sequence
  Synthetic
gccauuagccucaaacaaagcca

SEQ ID NO: 1780 - RNA, 22 nt, Artificial Sequence
  Synthetic
gaauuccauguggccaaagcca

SEQ ID NO: 1781 - RNA, 23 nt, Artificial Sequence
  Synthetic
ggaauuccauguggccaaagcca

SEQ ID NO: 1782 - RNA, 24 nt, Artificial Sequence
  Synthetic
gggaauuccauguggccaaagcca

SEQ ID NO: 1783 - RNA, 19 nt, Artificial Sequence
  Synthetic
gugguauauugagcagcca

SEQ ID NO: 1784 - RNA, 20 nt, Artificial Sequence
  Synthetic
ggugguauauugagcagcca

SEQ ID NO: 1785 - RNA, 21 nt, Artificial Sequence
  Synthetic
gggugguauauugagcagcca

SEQ ID NO: 1786 - RNA, 20 nt, Artificial Sequence
  Synthetic
gaagguaagggagucagcca

SEQ ID NO: 1787 - RNA, 23 nt, Artificial Sequence
  Synthetic
gaagaagguaagggagucagcca

SEQ ID NO: 1788 - RNA, 24 nt, Artificial Sequence
  Synthetic
ggaagaagguaagggagucagcca

SEQ ID NO: 1789 - RNA, 18 nt, Artificial Sequence
  Synthetic
gaugaauuguucuagcca

SEQ ID NO: 1790 - RNA, 20 nt, Artificial Sequence
  Synthetic
gagaugaauuguucuagcca

SEQ ID NO: 1791 - RNA, 21 nt, Artificial Sequence
  Synthetic
ggagaugaauuguucuagcca

SEQ ID NO: 1792 - RNA, 20 nt, Artificial Sequence
  Synthetic
gaagaguugccccugcgcca

SEQ ID NO: 1793 - RNA, 21 nt, Artificial Sequence
  Synthetic
gucuuguuucaaacacggcca

SEQ ID NO: 1794 - RNA, 22 nt, Artificial Sequence
  Synthetic
guaauguaaacguaaagggcca

SEQ ID NO: 1795 - RNA, 22 nt, Artificial Sequence
  Synthetic
gaaaucuuggggcuccgggcca

SEQ ID NO: 1796 - RNA, 24 nt, Artificial Sequence
  Synthetic
gugaaaucuuggggcuccgggcca

SEQ ID NO: 1797 - RNA, 19 nt, Artificial Sequence
  Synthetic
guaaugaggaagggggcca

SEQ ID NO: 1798 - RNA, 21 nt, Artificial Sequence
  Synthetic
guguaaugaggaagggggcca

SEQ ID NO: 1799 - RNA, 23 nt, Artificial Sequence
  Synthetic
guguguaaugaggaagggggcca

SEQ ID NO: 1800 - RNA, 18 nt, Artificial Sequence
  Synthetic
gugaucuuuauggggcca

SEQ ID NO: 1801 - RNA, 19 nt, Artificial Sequence
  Synthetic
ggugaucuuuauggggcca

SEQ ID NO: 1802 - RNA, 20 nt, Artificial Sequence
  Synthetic
gggugaucuuuauggggcca

SEQ ID NO: 1803 - RNA, 20 nt, Artificial Sequence
  Synthetic
gucuuugccauuaaaugcca

SEQ ID NO: 1804 - RNA, 18 nt, Artificial Sequence
  Synthetic
gcuaccgacauaaugcca

SEQ ID NO: 1805 - RNA, 22 nt, Artificial Sequence
  Synthetic
gacaaaccaagcagucaugcca

SEQ ID NO: 1806 - RNA, 23 nt, Artificial Sequence
  Synthetic
ggacaaaccaagcagucaugcca

SEQ ID NO: 1807 - RNA, 18 nt, Artificial Sequence
  Synthetic
ggcacaggacagaugcca

SEQ ID NO: 1808 - RNA, 19 nt, Artificial Sequence
  Synthetic
gggcacaggacagaugcca

SEQ ID NO: 1809 - RNA, 20 nt, Artificial Sequence
  Synthetic
ggggcacaggacagaugcca

SEQ ID NO: 1810 - RNA, 24 nt, Artificial Sequence
  Synthetic
gaaaggggcacaggacagaugcca

SEQ ID NO: 1811 - RNA, 21 nt, Artificial Sequence
  Synthetic
gauauggaauuauuuaugcca

SEQ ID NO: 1812 - RNA, 22 nt, Artificial Sequence
  Synthetic
ggauauggaauuauuuaugcca

SEQ ID NO: 1813 - RNA, 19 nt, Artificial Sequence
  Synthetic
guuuuuuuaaguacugcca

SEQ ID NO: 1814 - RNA, 20 nt, Artificial Sequence
  Synthetic
guuugauuugcauucugcca

SEQ ID NO: 1815 - RNA, 23 nt, Artificial Sequence
  Synthetic
gauguuugauuugcauucugcca

SEQ ID NO: 1816 - RNA, 20 nt, Artificial Sequence
  Synthetic
guugugcauacuaauugcca

SEQ ID NO: 1817 - RNA, 21 nt, Artificial Sequence
  Synthetic
gguugugcauacuaauugcca

SEQ ID NO: 1818 - RNA, 22 nt, Artificial Sequence
  Synthetic
ggguugugcauacuaauugcca

SEQ ID NO: 1819 - RNA, 23 nt, Artificial Sequence
  Synthetic
gggguugugcauacuaauugcca

SEQ ID NO: 1820 - RNA, 21 nt, Artificial Sequence
  Synthetic
gauuuucugcuguuauugcca

SEQ ID NO: 1821 - RNA, 23 nt, Artificial Sequence
  Synthetic
gagauuuucugcuguuauugcca

SEQ ID NO: 1822 - RNA, 24 nt, Artificial Sequence
  Synthetic
ggagauuuucugcuguuauugcca

SEQ ID NO: 1823 - RNA, 19 nt, Artificial Sequence
  Synthetic
gccuagagaaugaaaucca

SEQ ID NO: 1824 - RNA, 20 nt, Artificial Sequence
  Synthetic
guuaggauacuugaaaucca

SEQ ID NO: 1825 - RNA, 19 nt, Artificial Sequence
  Synthetic
gcauauaaaaggcaaucca

SEQ ID NO: 1826 - RNA, 23 nt, Artificial Sequence
  Synthetic
gaaagcauauaaaaggcaaucca

SEQ ID NO: 1827 - RNA, 20 nt, Artificial Sequence
  Synthetic
guuuguaauuggaauaucca

SEQ ID NO: 1828 - RNA, 21 nt, Artificial Sequence
  Synthetic
gguuuguaauuggaauaucca

SEQ ID NO: 1829 - RNA, 22 nt, Artificial Sequence
  Synthetic
ggguuuguaauuggaauaucca

SEQ ID NO: 1830 - RNA, 22 nt, Artificial Sequence
  Synthetic
gaaaucaauaccaagauaucca

SEQ ID NO: 1831 - RNA, 19 nt, Artificial Sequence
  Synthetic
gcuauuaucuagauaucca

SEQ ID NO: 1832 - RNA, 21 nt, Artificial Sequence
  Synthetic
gagcuauuaucuagauaucca

SEQ ID NO: 1833 - RNA, 22 nt, Artificial Sequence
  Synthetic
ggagcuauuaucuagauaucca

SEQ ID NO: 1834 - RNA, 21 nt, Artificial Sequence
  Synthetic
guuccacacuaaaaaucucca

SEQ ID NO: 1835 - RNA, 21 nt, Artificial Sequence
  Synthetic
gcucaagcagacaaaucucca

SEQ ID NO: 1836 - RNA, 18 nt, Artificial Sequence
  Synthetic
gaugaauucucaucucca

SEQ ID NO: 1837 - RNA, 22 nt, Artificial Sequence
  Synthetic
gcaucaauuggcuguaucucca

SEQ ID NO: 1838 - RNA, 18 nt, Artificial Sequence
  Synthetic
guugugaccagcucucca

SEQ ID NO: 1839 - RNA, 24 nt, Artificial Sequence
  Synthetic
gucuuuguugugaccagcucucca

SEQ ID NO: 1840 - RNA, 22 nt, Artificial Sequence
  Synthetic
gaauaucaacauuaguucucca

SEQ ID NO: 1841 - RNA, 21 nt, Artificial Sequence
  Synthetic
guaauugagacuauuucucca

SEQ ID NO: 1842 - RNA, 24 nt, Artificial Sequence
  Synthetic
guuguaauugagacuauuucucca

SEQ ID NO: 1843 - RNA, 18 nt, Artificial Sequence
  Synthetic
ggcaccaccgcaggucca

SEQ ID NO: 1844 - RNA, 18 nt, Artificial Sequence
  Synthetic
gaguggguggauugucca

SEQ ID NO: 1845 - RNA, 20 nt, Artificial Sequence
  Synthetic
gugaguggguggauugucca

SEQ ID NO: 1846 - RNA, 21 nt, Artificial Sequence
  Synthetic
ggugaguggguggauugucca

SEQ ID NO: 1847 - RNA, 23 nt, Artificial Sequence
  Synthetic
gaggugaguggguggauugucca

SEQ ID NO: 1848 - RNA, 23 nt, Artificial Sequence
  Synthetic
gcuaucauuuuucaaaaauucca

SEQ ID NO: 1849 - RNA, 21 nt, Artificial Sequence
  Synthetic
gucagauaaagacaaauucca

SEQ ID NO: 1850 - RNA, 19 nt, Artificial Sequence
  Synthetic
gcaaugcuacagcauucca

SEQ ID NO: 1851 - RNA, 21 nt, Artificial Sequence
  Synthetic
gagcaaugcuacagcauucca

SEQ ID NO: 1852 - RNA, 24 nt, Artificial Sequence
  Synthetic
gcugagcaaugcuacagcauucca

SEQ ID NO: 1853 - RNA, 18 nt, Artificial Sequence
  Synthetic
guacaugaaggcauucca

SEQ ID NO: 1854 - RNA, 20 nt, Artificial Sequence
  Synthetic
gaguacaugaaggcauucca

SEQ ID NO: 1855 - RNA, 21 nt, Artificial Sequence
  Synthetic
ggaguacaugaaggcauucca

SEQ ID NO: 1856 - RNA, 22 nt, Artificial Sequence
  Synthetic
gggaguacaugaaggcauucca

SEQ ID NO: 1857 - RNA, 20 nt, Artificial Sequence
  Synthetic
guacagguuuggugauucca

SEQ ID NO: 1858 - RNA, 21 nt, Artificial Sequence
  Synthetic
gguacagguuuggugauucca

SEQ ID NO: 1859 - RNA, 20 nt, Artificial Sequence
  Synthetic
gaaacuauuuccuucuucca

SEQ ID NO: 1860 - RNA, 24 nt, Artificial Sequence
  Synthetic
gccaauuauguguaucucuuucca

SEQ ID NO: 1861 - RNA, 20 nt, Artificial Sequence
  Synthetic
guugugucagugaguuucca

SEQ ID NO: 1862 - RNA, 22 nt, Artificial Sequence
  Synthetic
guguugugucagugaguuucca

SEQ ID NO: 1863 - RNA, 24 nt, Artificial Sequence
  Synthetic
guguguugugucagugaguuucca

SEQ ID NO: 1864 - RNA, 18 nt, Artificial Sequence
  Synthetic
gagacuuccauuuuucca

SEQ ID NO: 1865 - RNA, 21 nt, Artificial Sequence
  Synthetic
guugagacuuccauuuuucca

SEQ ID NO: 1866 - RNA, 23 nt, Artificial Sequence
  Synthetic
guguugagacuuccauuuuucca

SEQ ID NO: 1867 - RNA, 21 nt, Artificial Sequence
  Synthetic
gucagauaaguacuuuuucca

SEQ ID NO: 1868 - RNA, 24 nt, Artificial Sequence
  Synthetic
gcauuccuuugugaaccaaaagca

SEQ ID NO: 1869 - RNA, 18 nt, Artificial Sequence
  Synthetic
gucccauagcagaaagca

SEQ ID NO: 1870 - RNA, 24 nt, Artificial Sequence
  Synthetic
gcaacagucccauagcagaaagca

SEQ ID NO: 1871 - RNA, 21 nt, Artificial Sequence
  Synthetic
gguauuaguuucuuuaaagca

SEQ ID NO: 1872 - RNA, 18 nt, Artificial Sequence
  Synthetic
gagccaggccuucaagca

SEQ ID NO: 1873 - RNA, 19 nt, Artificial Sequence
  Synthetic
ggagccaggccuucaagca

SEQ ID NO: 1874 - RNA, 20 nt, Artificial Sequence
  Synthetic
gggagccaggccuucaagca

SEQ ID NO: 1875 - RNA, 21 nt, Artificial Sequence
  Synthetic
ggggagccaggccuucaagca

SEQ ID NO: 1876 - RNA, 24 nt, Artificial Sequence
  Synthetic
gaauguggaguuugagaggaagca

SEQ ID NO: 1877 - RNA, 19 nt, Artificial Sequence
  Synthetic
guuacuuucucuggaagca

SEQ ID NO: 1878 - RNA, 21 nt, Artificial Sequence
  Synthetic
gagacacgcugaauugaagca

SEQ ID NO: 1879 - RNA, 23 nt, Artificial Sequence
  Synthetic
gaaaaauauugaaacucuaagca

SEQ ID NO: 1880 - RNA, 22 nt, Artificial Sequence
  Synthetic
gccuucacuuuagaauuaagca

SEQ ID NO: 1881 - RNA, 23 nt, Artificial Sequence
  Synthetic
gauugacaaaggagaaaacagca

SEQ ID NO: 1882 - RNA, 24 nt, Artificial Sequence
  Synthetic
ggauugacaaaggagaaaacagca

SEQ ID NO: 1883 - RNA, 20 nt, Artificial Sequence
  Synthetic
guaauauaguaguaacagca

SEQ ID NO: 1884 - RNA, 18 nt, Artificial Sequence
  Synthetic
ggauagcugcucacagca

SEQ ID NO: 1885 - RNA, 20 nt, Artificial Sequence
  Synthetic
gaggauagcugcucacagca

SEQ ID NO: 1886 - RNA, 23 nt, Artificial Sequence
  Synthetic
gcagaggauagcugcucacagca

SEQ ID NO: 1887 - RNA, 18 nt, Artificial Sequence
  Synthetic
ggugcugcgaguacagca

SEQ ID NO: 1888 - RNA, 18 nt, Artificial Sequence
  Synthetic
gauugaugcccagcagca

SEQ ID NO: 1889 - RNA, 18 nt, Artificial Sequence
  Synthetic
gaaguuuguuuagcagca

SEQ ID NO: 1890 - RNA, 19 nt, Artificial Sequence
  Synthetic
gagcuaugucaaggcagca

SEQ ID NO: 1891 - RNA, 22 nt, Artificial Sequence
  Synthetic
gaagagcuaugucaaggcagca

SEQ ID NO: 1892 - RNA, 18 nt, Artificial Sequence
  Synthetic
gaaugucauuggagagca

SEQ ID NO: 1893 - RNA, 23 nt, Artificial Sequence
  Synthetic
gauaagaaugucauuggagagca

SEQ ID NO: 1894 - RNA, 19 nt, Artificial Sequence
  Synthetic
gaucagaagcaauggagca

SEQ ID NO: 1895 - RNA, 21 nt, Artificial Sequence
  Synthetic
gucaaauggaggacaugagca

SEQ ID NO: 1896 - RNA, 24 nt, Artificial Sequence
  Synthetic
gcugucaaauggaggacaugagca

SEQ ID NO: 1897 - RNA, 20 nt, Artificial Sequence
  Synthetic
gaugcaggagcgugugagca

SEQ ID NO: 1898 - RNA, 24 nt, Artificial Sequence
  Synthetic
guauucaguauaaauuuuugagca

SEQ ID NO: 1899 - RNA, 19 nt, Artificial Sequence
  Synthetic
gaauugugaaucaauagca

SEQ ID NO: 1900 - RNA, 20 nt, Artificial Sequence
  Synthetic
gcuagaggggauauauagca

SEQ ID NO: 1901 - RNA, 24 nt, Artificial Sequence
  Synthetic
gccagcuagaggggauauauagca

SEQ ID NO: 1902 - RNA, 19 nt, Artificial Sequence
  Synthetic
gcuuugcaaggucguagca

SEQ ID NO: 1903 - RNA, 23 nt, Artificial Sequence
  Synthetic
guaagcuuugcaaggucguagca

SEQ ID NO: 1904 - RNA, 24 nt, Artificial Sequence
  Synthetic
gguaagcuuugcaaggucguagca

SEQ ID NO: 1905 - RNA, 18 nt, Artificial Sequence
  Synthetic
gaaacucacaagguagca

SEQ ID NO: 1906 - RNA, 20 nt, Artificial Sequence
  Synthetic
gagaaacucacaagguagca

SEQ ID NO: 1907 - RNA, 19 nt, Artificial Sequence
  Synthetic
gcuuagcaggaagguagca

SEQ ID NO: 1908 - RNA, 19 nt, Artificial Sequence
  Synthetic
gcucuguccgcagguagca

SEQ ID NO: 1909 - RNA, 24 nt, Artificial Sequence
  Synthetic
gaauaaauuuauggcuaauuagca

SEQ ID NO: 1910 - RNA, 19 nt, Artificial Sequence
  Synthetic
gaauaccacuuacuuagca

SEQ ID NO: 1911 - RNA, 21 nt, Artificial Sequence
  Synthetic
gccacuucaugauuuuacgca

SEQ ID NO: 1912 - RNA, 24 nt, Artificial Sequence
  Synthetic
gaagccacuucaugauuuuacgca

SEQ ID NO: 1913 - RNA, 21 nt, Artificial Sequence
  Synthetic
guuuuaauuuuaggaugcgca

SEQ ID NO: 1914 - RNA, 22 nt, Artificial Sequence
  Synthetic
gguuuuaauuuuaggaugcgca

SEQ ID NO: 1915 - RNA, 19 nt, Artificial Sequence
  Synthetic
gucgaggaaaggaaaggca

SEQ ID NO: 1916 - RNA, 20 nt, Artificial Sequence
  Synthetic
ggucgaggaaaggaaaggca

SEQ ID NO: 1917 - RNA, 21 nt, Artificial Sequence
  Synthetic
gcauaagugauacuaaaggca

SEQ ID NO: 1918 - RNA, 24 nt, Artificial Sequence
  Synthetic
gaagcauaagugauacuaaaggca

SEQ ID NO: 1919 - RNA, 24 nt, Artificial Sequence
  Synthetic
guuuaaucuuacccucucaaggca

SEQ ID NO: 1920 - RNA, 18 nt, Artificial Sequence
  Synthetic
ggcuucaacaggcaggca

SEQ ID NO: 1921 - RNA, 19 nt, Artificial Sequence
  Synthetic
gggcuucaacaggcaggca

SEQ ID NO: 1922 - RNA, 19 nt, Artificial Sequence
  Synthetic
guauuuauuuugggaggca

SEQ ID NO: 1923 - RNA, 20 nt, Artificial Sequence
  Synthetic
gaacaaaaucuauggaggca

SEQ ID NO: 1924 - RNA, 24 nt, Artificial Sequence
  Synthetic
gaaagaacaaaaucuauggaggca

SEQ ID NO: 1925 - RNA, 19 nt, Artificial Sequence
  Synthetic
gaucucaaagaaugaggca

SEQ ID NO: 1926 - RNA, 24 nt, Artificial Sequence
  Synthetic
gcaaagaucucaaagaaugaggca

SEQ ID NO: 1927 - RNA, 20 nt, Artificial Sequence
  Synthetic
gcuuuauggcuaaauaggca

SEQ ID NO: 1928 - RNA, 18 nt, Artificial Sequence
  Synthetic
gcauucuuuggauaggca

SEQ ID NO: 1929 - RNA, 23 nt, Artificial Sequence
  Synthetic
gaaaccucacaauagguuaggca

SEQ ID NO: 1930 - RNA, 20 nt, Artificial Sequence
  Synthetic
gaauggaauuuuacucggca

SEQ ID NO: 1931 - RNA, 18 nt, Artificial Sequence
  Synthetic
gaaacaagggcaagggca

SEQ ID NO: 1932 - RNA, 19 nt, Artificial Sequence
  Synthetic
ggaaacaagggcaagggca

SEQ ID NO: 1933 - RNA, 19 nt, Artificial Sequence
  Synthetic
guauggggguaauagggca

SEQ ID NO: 1934 - RNA, 23 nt, Artificial Sequence
  Synthetic
gcuuguauggggguaauagggca

SEQ ID NO: 1935 - RNA, 24 nt, Artificial Sequence
  Synthetic
ggcuuguauggggguaauagggca

SEQ ID NO: 1936 - RNA, 19 nt, Artificial Sequence
  Synthetic
guacuaauugagaugggca

SEQ ID NO: 1937 - RNA, 23 nt, Artificial Sequence
  Synthetic
gcuaguacuaauugagaugggca

SEQ ID NO: 1938 - RNA, 24 nt, Artificial Sequence
  Synthetic
ggcuaguacuaauugagaugggca

SEQ ID NO: 1939 - RNA, 20 nt, Artificial Sequence
  Synthetic
gcaaaacacaauuuugggca

SEQ ID NO: 1940 - RNA, 23 nt, Artificial Sequence
  Synthetic
gaaaaaacagaaugcagauggca

SEQ ID NO: 1941 - RNA, 18 nt, Artificial Sequence
  Synthetic
gagaagggguagauggca

SEQ ID NO: 1942 - RNA, 19 nt, Artificial Sequence
  Synthetic
guaaaguauggguauggca

SEQ ID NO: 1943 - RNA, 20 nt, Artificial Sequence
  Synthetic
gguaaaguauggguauggca

SEQ ID NO: 1944 - RNA, 23 nt, Artificial Sequence
  Synthetic
gaagguaaaguauggguauggca

SEQ ID NO: 1945 - RNA, 18 nt, Artificial Sequence
  Synthetic
gcaguuuauucccuggca

SEQ ID NO: 1946 - RNA, 22 nt, Artificial Sequence
  Synthetic
gcaagcaguuuauucccuggca

SEQ ID NO: 1947 - RNA, 24 nt, Artificial Sequence
  Synthetic
gugcaagcaguuuauucccuggca

SEQ ID NO: 1948 - RNA, 21 nt, Artificial Sequence
  Synthetic
gaccuagcauagcuccuggca

SEQ ID NO: 1949 - RNA, 22 nt, Artificial Sequence
  Synthetic
ggaccuagcauagcuccuggca

SEQ ID NO: 1950 - RNA, 23 nt, Artificial Sequence
  Synthetic
gggaccuagcauagcuccuggca

SEQ ID NO: 1951 - RNA, 22 nt, Artificial Sequence
  Synthetic
guaacuggcacaaagucuggca

SEQ ID NO: 1952 - RNA, 22 nt, Artificial Sequence
  Synthetic
guuucuguaaucucuucuggca

SEQ ID NO: 1953 - RNA, 19 nt, Artificial Sequence
  Synthetic
gaguguaaagccauuggca

SEQ ID NO: 1954 - RNA, 24 nt, Artificial Sequence
  Synthetic
guaucgaguguaaagccauuggca

SEQ ID NO: 1955 - RNA, 19 nt, Artificial Sequence
  Synthetic
gauugguccaaacuuggca

SEQ ID NO: 1956 - RNA, 18 nt, Artificial Sequence
  Synthetic
gagucauaacaguuggca

SEQ ID NO: 1957 - RNA, 19 nt, Artificial Sequence
  Synthetic
ggagucauaacaguuggca

SEQ ID NO: 1958 - RNA, 20 nt, Artificial Sequence
  Synthetic
gcacacaguauuuuuuggca

SEQ ID NO: 1959 - RNA, 23 nt, Artificial Sequence
  Synthetic
gaucucagagagaggcaaaugca

SEQ ID NO: 1960 - RNA, 23 nt, Artificial Sequence
  Synthetic
gauaaaaucaagucucaaaugca

SEQ ID NO: 1961 - RNA, 23 nt, Artificial Sequence
  Synthetic
gcacagcaaauaauuauaaugca

SEQ ID NO: 1962 - RNA, 24 nt, Artificial Sequence
  Synthetic
ggcacagcaaauaauuauaaugca

SEQ ID NO: 1963 - RNA, 19 nt, Artificial Sequence
  Synthetic
gucugauucagaucaugca

SEQ ID NO: 1964 - RNA, 23 nt, Artificial Sequence
  Synthetic
gcaagucugauucagaucaugca

SEQ ID NO: 1965 - RNA, 21 nt, Artificial Sequence
  Synthetic
gcuaagccuuugacggaugca

SEQ ID NO: 1966 - RNA, 22 nt, Artificial Sequence
  Synthetic
gauaaauugucaaauggaugca

SEQ ID NO: 1967 - RNA, 18 nt, Artificial Sequence
  Synthetic
gcucuaggagaauaugca

SEQ ID NO: 1968 - RNA, 23 nt, Artificial Sequence
  Synthetic
gauaaaaaauuuaggaauaugca

SEQ ID NO: 1969 - RNA, 18 nt, Artificial Sequence
  Synthetic
gcuuggcuuagauaugca

SEQ ID NO: 1970 - RNA, 22 nt, Artificial Sequence
  Synthetic
gacagcuuggcuuagauaugca

SEQ ID NO: 1971 - RNA, 24 nt, Artificial Sequence
  Synthetic
gugacagcuuggcuuagauaugca

SEQ ID NO: 1972 - RNA, 23 nt, Artificial Sequence
  Synthetic
guaacuguucuaaugucuaugca

SEQ ID NO: 1973 - RNA, 24 nt, Artificial Sequence
  Synthetic
gguaacuguucuaaugucuaugca

SEQ ID NO: 1974 - RNA, 21 nt, Artificial Sequence
  Synthetic
gaaagugggaaauauuaugca

SEQ ID NO: 1975 - RNA, 23 nt, Artificial Sequence
  Synthetic
gcccuauguaaauaauaacugca

SEQ ID NO: 1976 - RNA, 19 nt, Artificial Sequence
  Synthetic
guuauuacuugcuacugca

SEQ ID NO: 1977 - RNA, 21 nt, Artificial Sequence
  Synthetic
guguuauuacuugcuacugca

SEQ ID NO: 1978 - RNA, 23 nt, Artificial Sequence
  Synthetic
guaauauccuccccauaucugca

SEQ ID NO: 1979 - RNA, 24 nt, Artificial Sequence
  Synthetic
gguaauauccuccccauaucugca

SEQ ID NO: 1980 - RNA, 21 nt, Artificial Sequence
  Synthetic
guucuuauaucuguuucugca

SEQ ID NO: 1981 - RNA, 22 nt, Artificial Sequence
  Synthetic
gguucuuauaucuguuucugca

SEQ ID NO: 1982 - RNA, 18 nt, Artificial Sequence
  Synthetic
gcaguuuuaaaaagugca

SEQ ID NO: 1983 - RNA, 23 nt, Artificial Sequence
  Synthetic
gcaaugcaguuuuaaaaagugca

SEQ ID NO: 1984 - RNA, 19 nt, Artificial Sequence
  Synthetic
gaaaauuauauucagugca

SEQ ID NO: 1985 - RNA, 22 nt, Artificial Sequence
  Synthetic
gcagaaaauuauauucagugca

SEQ ID NO: 1986 - RNA, 19 nt, Artificial Sequence
  Synthetic
guuacaauauuguauugca

SEQ ID NO: 1987 - RNA, 20 nt, Artificial Sequence
  Synthetic
gguuacaauauuguauugca

SEQ ID NO: 1988 - RNA, 21 nt, Artificial Sequence
  Synthetic
ggguuacaauauuguauugca

SEQ ID NO: 1989 - RNA, 23 nt, Artificial Sequence
  Synthetic
gaggguuacaauauuguauugca

SEQ ID NO: 1990 - RNA, 21 nt, Artificial Sequence
  Synthetic
gucaucauauugaaccuugca

SEQ ID NO: 1991 - RNA, 22 nt, Artificial Sequence
  Synthetic
gucaaauccucauaaucuugca

SEQ ID NO: 1992 - RNA, 24 nt, Artificial Sequence
  Synthetic
gagucaaauccucauaaucuugca

SEQ ID NO: 1993 - RNA, 24 nt, Artificial Sequence
  Synthetic
gaucuacuuugcugcucuguugca

SEQ ID NO: 1994 - RNA, 18 nt, Artificial Sequence
  Synthetic
gagagugauguauuugca

SEQ ID NO: 1995 - RNA, 20 nt, Artificial Sequence
  Synthetic
gugagagugauguauuugca

SEQ ID NO: 1996 - RNA, 23 nt, Artificial Sequence
  Synthetic
guagugagagugauguauuugca

SEQ ID NO: 1997 - RNA, 24 nt, Artificial Sequence
  Synthetic
gguagugagagugauguauuugca

SEQ ID NO: 1998 - RNA, 22 nt, Artificial Sequence
  Synthetic
gcaaacagacccagacuuugca

SEQ ID NO: 1999 - RNA, 21 nt, Artificial Sequence
  Synthetic
gucucuucagacaucuuugca

SEQ ID NO: 2000 - RNA, 18 nt, Artificial Sequence
  Synthetic
guucuuaacguuuuugca

SEQ ID NO: 2001 - RNA, 22 nt, Artificial Sequence
  Synthetic
guucguucuuaacguuuuugca

SEQ ID NO: 2002 - RNA, 22 nt, Artificial Sequence
  Synthetic
guuauuuggcuaacuaaaauca

SEQ ID NO: 2003 - RNA, 22 nt, Artificial Sequence
  Synthetic
gaaaacaaaaucuuggaaauca

SEQ ID NO: 2004 - RNA, 22 nt, Artificial Sequence
  Synthetic
guauucccaccacacccaauca

SEQ ID NO: 2005 - RNA, 19 nt, Artificial Sequence
  Synthetic
guucaugaugaugcaauca

SEQ ID NO: 2006 - RNA, 20 nt, Artificial Sequence
  Synthetic
gguucaugaugaugcaauca

SEQ ID NO: 2007 - RNA, 22 nt, Artificial Sequence
  Synthetic
gagguucaugaugaugcaauca

SEQ ID NO: 2008 - RNA, 19 nt, Artificial Sequence
  Synthetic
gccuagcacauaagaauca

SEQ ID NO: 2009 - RNA, 22 nt, Artificial Sequence
  Synthetic
guauccagagaccauagaauca

SEQ ID NO: 2010 - RNA, 24 nt, Artificial Sequence
  Synthetic
gaccaaauuaaaauacuugaauca

SEQ ID NO: 2011 - RNA, 19 nt, Artificial Sequence
  Synthetic
guauuugagugucuaauca

SEQ ID NO: 2012 - RNA, 21 nt, Artificial Sequence
  Synthetic
guguauuugagugucuaauca

SEQ ID NO: 2013 - RNA, 22 nt, Artificial Sequence
  Synthetic
gaaucuuaaaagaugaacauca

SEQ ID NO: 2014 - RNA, 24 nt, Artificial Sequence
  Synthetic
gagaaucuuaaaagaugaacauca

SEQ ID NO: 2015 - RNA, 22 nt, Artificial Sequence
  Synthetic
gccuuccacuaccaagacauca

SEQ ID NO: 2016 - RNA, 22 nt, Artificial Sequence
  Synthetic
gaauuauuauugacuuacauca

SEQ ID NO: 2017 - RNA, 23 nt, Artificial Sequence
  Synthetic
ggaauuauuauugacuuacauca

SEQ ID NO: 2018 - RNA, 18 nt, Artificial Sequence
  Synthetic
gagaugguccuugcauca

SEQ ID NO: 2019 - RNA, 19 nt, Artificial Sequence
  Synthetic
ggagaugguccuugcauca

SEQ ID NO: 2020 - RNA, 21 nt, Artificial Sequence
  Synthetic
gaggagaugguccuugcauca

SEQ ID NO: 2021 - RNA, 24 nt, Artificial Sequence
  Synthetic
gcagaggagaugguccuugcauca

SEQ ID NO: 2022 - RNA, 22 nt, Artificial Sequence
  Synthetic
guuaacuguuaaaaagucauca

SEQ ID NO: 2023 - RNA, 18 nt, Artificial Sequence
  Synthetic
ggcacuguuaaaagauca

SEQ ID NO: 2024 - RNA, 18 nt, Artificial Sequence
  Synthetic
ggaggcaucagcagauca

SEQ ID NO: 2025 - RNA, 19 nt, Artificial Sequence
  Synthetic
gggaggcaucagcagauca

SEQ ID NO: 2026 - RNA, 22 nt, Artificial Sequence
  Synthetic
guugggaggcaucagcagauca

SEQ ID NO: 2027 - RNA, 24 nt, Artificial Sequence
  Synthetic
guguugggaggcaucagcagauca

SEQ ID NO: 2028 - RNA, 22 nt, Artificial Sequence
  Synthetic
gacucuaagaaauuugggauca

SEQ ID NO: 2029 - RNA, 21 nt, Artificial Sequence
  Synthetic
gauaaagagaaauacauauca

SEQ ID NO: 2030 - RNA, 23 nt, Artificial Sequence
  Synthetic
gcuucuagcauuaguccauauca

SEQ ID NO: 2031 - RNA, 19 nt, Artificial Sequence
  Synthetic
gugaauucaaaucauauca

SEQ ID NO: 2032 - RNA, 20 nt, Artificial Sequence
  Synthetic
ggugaauucaaaucauauca

SEQ ID NO: 2033 - RNA, 19 nt, Artificial Sequence
  Synthetic
gcacguauaaugaguauca

SEQ ID NO: 2034 - RNA, 20 nt, Artificial Sequence
  Synthetic
ggcacguauaaugaguauca

SEQ ID NO: 2035 - RNA, 24 nt, Artificial Sequence
  Synthetic
gcauggcacguauaaugaguauca

SEQ ID NO: 2036 - RNA, 24 nt, Artificial Sequence
  Synthetic
guuuaauaugcagaauacuuauca

SEQ ID NO: 2037 - RNA, 21 nt, Artificial Sequence
  Synthetic
gcacugggguacacuuuauca

SEQ ID NO: 2038 - RNA, 22 nt, Artificial Sequence
  Synthetic
ggcacugggguacacuuuauca

SEQ ID NO: 2039 - RNA, 21 nt, Artificial Sequence
  Synthetic
gcuuuaauaaaugcuuuauca

SEQ ID NO: 2040 - RNA, 24 nt, Artificial Sequence
  Synthetic
gccauaccaagggaugcacacuca

SEQ ID NO: 2041 - RNA, 19 nt, Artificial Sequence
  Synthetic
guacuugaaacugcacuca

SEQ ID NO: 2042 - RNA, 18 nt, Artificial Sequence
  Synthetic
guauguaguagucacuca

SEQ ID NO: 2043 - RNA, 20 nt, Artificial Sequence
  Synthetic
gcuugagugcauaugacuca

SEQ ID NO: 2044 - RNA, 21 nt, Artificial Sequence
  Synthetic
guuucaaacauugacuacuca

SEQ ID NO: 2045 - RNA, 22 nt, Artificial Sequence
  Synthetic
gguuucaaacauugacuacuca

SEQ ID NO: 2046 - RNA, 24 nt, Artificial Sequence
  Synthetic
gagguuucaaacauugacuacuca

SEQ ID NO: 2047 - RNA, 19 nt, Artificial Sequence
  Synthetic
guauugcuuguacuacuca

SEQ ID NO: 2048 - RNA, 21 nt, Artificial Sequence
  Synthetic
guguauugcuuguacuacuca

SEQ ID NO: 2049 - RNA, 20 nt, Artificial Sequence
  Synthetic
gccucucagacagcaccuca

SEQ ID NO: 2050 - RNA, 21 nt, Artificial Sequence
  Synthetic
ggccucucagacagcaccuca

SEQ ID NO: 2051 - RNA, 19 nt, Artificial Sequence
  Synthetic
gugaagauuaaugaccuca

SEQ ID NO: 2052 - RNA, 22 nt, Artificial Sequence
  Synthetic
gcagugaagauuaaugaccuca

SEQ ID NO: 2053 - RNA, 19 nt, Artificial Sequence
  Synthetic
gccugauuuauugaccuca

SEQ ID NO: 2054 - RNA, 22 nt, Artificial Sequence
  Synthetic
gcugccugauuuauugaccuca

SEQ ID NO: 2055 - RNA, 23 nt, Artificial Sequence
  Synthetic
ggcugccugauuuauugaccuca

SEQ ID NO: 2056 - RNA, 20 nt, Artificial Sequence
  Synthetic
gaaggauaucagauaccuca

SEQ ID NO: 2057 - RNA, 18 nt, Artificial Sequence
  Synthetic
gguaucauaccucccuca

SEQ ID NO: 2058 - RNA, 19 nt, Artificial Sequence
  Synthetic
ggguaucauaccucccuca

SEQ ID NO: 2059 - RNA, 24 nt, Artificial Sequence
  Synthetic
gucuuggguaucauaccucccuca

SEQ ID NO: 2060 - RNA, 20 nt, Artificial Sequence
  Synthetic
gaaaacuuuaccaggccuca

SEQ ID NO: 2061 - RNA, 23 nt, Artificial Sequence
  Synthetic
gaauucuccaacuacuggccuca

SEQ ID NO: 2062 - RNA, 18 nt, Artificial Sequence
  Synthetic
guucaugaugaugccuca

SEQ ID NO: 2063 - RNA, 19 nt, Artificial Sequence
  Synthetic
gguucaugaugaugccuca

SEQ ID NO: 2064 - RNA, 21 nt, Artificial Sequence
  Synthetic
gagguucaugaugaugccuca

SEQ ID NO: 2065 - RNA, 23 nt, Artificial Sequence
  Synthetic
gcacacaguaaaaaccugccuca

SEQ ID NO: 2066 - RNA, 18 nt, Artificial Sequence
  Synthetic
gaauauaucaaauccuca

SEQ ID NO: 2067 - RNA, 22 nt, Artificial Sequence
  Synthetic
gcuuugcaagcucaaauccuca

SEQ ID NO: 2068 - RNA, 20 nt, Artificial Sequence
  Synthetic
gaaacacugugauuuccuca

SEQ ID NO: 2069 - RNA, 20 nt, Artificial Sequence
  Synthetic
gcuuacaucuuguuuccuca

SEQ ID NO: 2070 - RNA, 18 nt, Artificial Sequence
  Synthetic
gcugacuaucacagcuca

SEQ ID NO: 2071 - RNA, 18 nt, Artificial Sequence
  Synthetic
gccccugcaccuagcuca

SEQ ID NO: 2072 - RNA, 24 nt, Artificial Sequence
  Synthetic
gcuacagccccugcaccuagcuca

SEQ ID NO: 2073 - RNA, 18 nt, Artificial Sequence
  Synthetic
gagcuuaaccauggcuca

SEQ ID NO: 2074 - RNA, 19 nt, Artificial Sequence
  Synthetic
ggagcuuaaccauggcuca

SEQ ID NO: 2075 - RNA, 22 nt, Artificial Sequence
  Synthetic
gcuggagcuuaaccauggcuca

SEQ ID NO: 2076 - RNA, 19 nt, Artificial Sequence
  Synthetic
gucuaccacaauaugcuca

SEQ ID NO: 2077 - RNA, 22 nt, Artificial Sequence
  Synthetic
gcagucuaccacaauaugcuca

SEQ ID NO: 2078 - RNA, 20 nt, Artificial Sequence
  Synthetic
gcauaggguucuucugcuca

SEQ ID NO: 2079 - RNA, 19 nt, Artificial Sequence
  Synthetic
guguucacuuccgugcuca

SEQ ID NO: 2080 - RNA, 23 nt, Artificial Sequence
  Synthetic
guuaguguucacuuccgugcuca

SEQ ID NO: 2081 - RNA, 19 nt, Artificial Sequence
  Synthetic
gcaauagccccauugcuca

SEQ ID NO: 2082 - RNA, 20 nt, Artificial Sequence
  Synthetic
ggcaauagccccauugcuca

SEQ ID NO: 2083 - RNA, 21 nt, Artificial Sequence
  Synthetic
guaagggcgaguuguugcuca

SEQ ID NO: 2084 - RNA, 18 nt, Artificial Sequence
  Synthetic
ggaagauuugaaaucuca

SEQ ID NO: 2085 - RNA, 23 nt, Artificial Sequence
  Synthetic
gucauggaagauuugaaaucuca

SEQ ID NO: 2086 - RNA, 24 nt, Artificial Sequence
  Synthetic
ggucauggaagauuugaaaucuca

SEQ ID NO: 2087 - RNA, 19 nt, Artificial Sequence
  Synthetic
gugguuagggaacaucuca

SEQ ID NO: 2088 - RNA, 19 nt, Artificial Sequence
  Synthetic
gcccgugcccuugaucuca

SEQ ID NO: 2089 - RNA, 19 nt, Artificial Sequence
  Synthetic
gaaaaccaugucuaucuca

SEQ ID NO: 2090 - RNA, 20 nt, Artificial Sequence
  Synthetic
ggaaaaccaugucuaucuca

SEQ ID NO: 2091 - RNA, 21 nt, Artificial Sequence
  Synthetic
gggaaaaccaugucuaucuca

SEQ ID NO: 2092 - RNA, 22 nt, Artificial Sequence
  Synthetic
ggggaaaaccaugucuaucuca

SEQ ID NO: 2093 - RNA, 23 nt, Artificial Sequence
  Synthetic
gggggaaaaccaugucuaucuca

SEQ ID NO: 2094 - RNA, 23 nt, Artificial Sequence
  Synthetic
gcacaauaaugcuacuuaucuca

SEQ ID NO: 2095 - RNA, 22 nt, Artificial Sequence
  Synthetic
gcacuuuuuagauauucucuca

SEQ ID NO: 2096 - RNA, 23 nt, Artificial Sequence
  Synthetic
gcuucugaguuuuuguucucuca

SEQ ID NO: 2097 - RNA, 21 nt, Artificial Sequence
  Synthetic
gauccagguauucccuucuca

SEQ ID NO: 2098 - RNA, 21 nt, Artificial Sequence
  Synthetic
gcuaaauaauaaauguucuca

SEQ ID NO: 2099 - RNA, 22 nt, Artificial Sequence
  Synthetic
ggcuaaauaauaaauguucuca

SEQ ID NO: 2100 - RNA, 22 nt, Artificial Sequence
  Synthetic
gucaaaaccucucuuuuucuca

SEQ ID NO: 2101 - RNA, 18 nt, Artificial Sequence
  Synthetic
ggaugcucuuaaaaguca

SEQ ID NO: 2102 - RNA, 18 nt, Artificial Sequence
  Synthetic
gagaccuaaaucaaguca

SEQ ID NO: 2103 - RNA, 21 nt, Artificial Sequence
  Synthetic
gcagagaccuaaaucaaguca

SEQ ID NO: 2104 - RNA, 23 nt, Artificial Sequence
  Synthetic
gagcagagaccuaaaucaaguca

SEQ ID NO: 2105 - RNA, 19 nt, Artificial Sequence
  Synthetic
gugguauauucauaaguca

SEQ ID NO: 2106 - RNA, 23 nt, Artificial Sequence
  Synthetic
guaagugguauauucauaaguca

SEQ ID NO: 2107 - RNA, 18 nt, Artificial Sequence
  Synthetic
gcaguuuucuuuaaguca

SEQ ID NO: 2108 - RNA, 19 nt, Artificial Sequence
  Synthetic
ggcaguuuucuuuaaguca

SEQ ID NO: 2109 - RNA, 18 nt, Artificial Sequence
  Synthetic
gugaguguuuuuaaguca

SEQ ID NO: 2110 - RNA, 18 nt, Artificial Sequence
  Synthetic
guaccaucuuuucaguca

SEQ ID NO: 2111 - RNA, 19 nt, Artificial Sequence
  Synthetic
gguaccaucuuuucaguca

SEQ ID NO: 2112 - RNA, 21 nt, Artificial Sequence
  Synthetic
guaaucuuaagaauggaguca

SEQ ID NO: 2113 - RNA, 22 nt, Artificial Sequence
  Synthetic
gguaaucuuaagaauggaguca

SEQ ID NO: 2114 - RNA, 20 nt, Artificial Sequence
  Synthetic
guaugaccuaucaauaguca

SEQ ID NO: 2115 - RNA, 22 nt, Artificial Sequence
  Synthetic
gaguaugaccuaucaauaguca

SEQ ID NO: 2116 - RNA, 20 nt, Artificial Sequence
  Synthetic
gcagaagcaucugauaguca

SEQ ID NO: 2117 - RNA, 21 nt, Artificial Sequence
  Synthetic
ggcagaagcaucugauaguca

SEQ ID NO: 2118 - RNA, 19 nt, Artificial Sequence
  Synthetic
gagcugcuuagucuaguca

SEQ ID NO: 2119 - RNA, 20 nt, Artificial Sequence
  Synthetic
ggagcugcuuagucuaguca

SEQ ID NO: 2120 - RNA, 21 nt, Artificial Sequence
  Synthetic
gaacguagcauuucaccguca

SEQ ID NO: 2121 - RNA, 21 nt, Artificial Sequence
  Synthetic
gccccuuaaauaaaaagguca

SEQ ID NO: 2122 - RNA, 19 nt, Artificial Sequence
  Synthetic
gucaagaaugcgaagguca

SEQ ID NO: 2123 - RNA, 20 nt, Artificial Sequence
  Synthetic
ggucaagaaugcgaagguca

SEQ ID NO: 2124 - RNA, 21 nt, Artificial Sequence
  Synthetic
gggucaagaaugcgaagguca

SEQ ID NO: 2125 - RNA, 19 nt, Artificial Sequence
  Synthetic
gucacaaacgugaagguca

SEQ ID NO: 2126 - RNA, 20 nt, Artificial Sequence
  Synthetic
ggucacaaacgugaagguca

SEQ ID NO: 2127 - RNA, 21 nt, Artificial Sequence
  Synthetic
gggucacaaacgugaagguca

SEQ ID NO: 2128 - RNA, 21 nt, Artificial Sequence
  Synthetic
gcuaguaguauugucagguca

SEQ ID NO: 2129 - RNA, 20 nt, Artificial Sequence
  Synthetic
gaaggccagaagaaggguca

SEQ ID NO: 2130 - RNA, 24 nt, Artificial Sequence
  Synthetic
guaagaaggccagaagaaggguca

SEQ ID NO: 2131 - RNA, 20 nt, Artificial Sequence
  Synthetic
gucuugagacuuuuggguca

SEQ ID NO: 2132 - RNA, 21 nt, Artificial Sequence
  Synthetic
ggucuugagacuuuuggguca

SEQ ID NO: 2133 - RNA, 21 nt, Artificial Sequence
  Synthetic
guacagcuacucuucugguca

SEQ ID NO: 2134 - RNA, 24 nt, Artificial Sequence
  Synthetic
guuguacagcuacucuucugguca

SEQ ID NO: 2135 - RNA, 22 nt, Artificial Sequence
  Synthetic
gcuuauacaagcauauugguca

SEQ ID NO: 2136 - RNA, 24 nt, Artificial Sequence
  Synthetic
gauacaaaagggcuguguugguca

SEQ ID NO: 2137 - RNA, 18 nt, Artificial Sequence
  Synthetic
guuacuuuucuuugguca

SEQ ID NO: 2138 - RNA, 19 nt, Artificial Sequence
  Synthetic
gguuacuuuucuuugguca

SEQ ID NO: 2139 - RNA, 20 nt, Artificial Sequence
  Synthetic
ggguuacuuuucuuugguca

SEQ ID NO: 2140 - RNA, 18 nt, Artificial Sequence
  Synthetic
gaccacagaaaaauguca

SEQ ID NO: 2141 - RNA, 18 nt, Artificial Sequence
  Synthetic
gauaugcauugaauguca

SEQ ID NO: 2142 - RNA, 23 nt, Artificial Sequence
  Synthetic
gcuuagauaugcauugaauguca

SEQ ID NO: 2143 - RNA, 24 nt, Artificial Sequence
  Synthetic
ggcuuagauaugcauugaauguca

SEQ ID NO: 2144 - RNA, 21 nt, Artificial Sequence
  Synthetic
gacuagguucgugugauguca

SEQ ID NO: 2145 - RNA, 18 nt, Artificial Sequence
  Synthetic
gucuacagauugauguca

SEQ ID NO: 2146 - RNA, 21 nt, Artificial Sequence
  Synthetic
guagucuacagauugauguca

SEQ ID NO: 2147 - RNA, 23 nt, Artificial Sequence
  Synthetic
guguagucuacagauugauguca

SEQ ID NO: 2148 - RNA, 22 nt, Artificial Sequence
  Synthetic
gauaagaauagugucuauguca

SEQ ID NO: 2149 - RNA, 23 nt, Artificial Sequence
  Synthetic
ggauaagaauagugucuauguca

SEQ ID NO: 2150 - RNA, 23 nt, Artificial Sequence
  Synthetic
guuacagcuaaaugucccuguca

SEQ ID NO: 2151 - RNA, 18 nt, Artificial Sequence
  Synthetic
gaaaagucccagcuguca

SEQ ID NO: 2152 - RNA, 20 nt, Artificial Sequence
  Synthetic
gucagcuugcuauuguguca

SEQ ID NO: 2153 - RNA, 19 nt, Artificial Sequence
  Synthetic
gugauuguguguuguguca

SEQ ID NO: 2154 - RNA, 22 nt, Artificial Sequence
  Synthetic
gcagugauuguguguuguguca

SEQ ID NO: 2155 - RNA, 20 nt, Artificial Sequence
  Synthetic
gacaggguauccuguuguca

SEQ ID NO: 2156 - RNA, 22 nt, Artificial Sequence
  Synthetic
gugacaggguauccuguuguca

SEQ ID NO: 2157 - RNA, 23 nt, Artificial Sequence
  Synthetic
ggugacaggguauccuguuguca

SEQ ID NO: 2158 - RNA, 24 nt, Artificial Sequence
  Synthetic
gggugacaggguauccuguuguca

SEQ ID NO: 2159 - RNA, 24 nt, Artificial Sequence
  Synthetic
gaacauacacaaauuaauuuguca

SEQ ID NO: 2160 - RNA, 18 nt, Artificial Sequence
  Synthetic
guacuauuccguuuguca

SEQ ID NO: 2161 - RNA, 22 nt, Artificial Sequence
  Synthetic
gcacguacuauuccguuuguca

SEQ ID NO: 2162 - RNA, 24 nt, Artificial Sequence
  Synthetic
gcuucuuauuuuacccuuuuguca

SEQ ID NO: 2163 - RNA, 21 nt, Artificial Sequence
  Synthetic
gcaaaugauuaagcaaauuca

SEQ ID NO: 2164 - RNA, 24 nt, Artificial Sequence
  Synthetic
guagcaaaugauuaagcaaauuca

SEQ ID NO: 2165 - RNA, 18 nt, Artificial Sequence
  Synthetic
gaguuaauguuaaauuca

SEQ ID NO: 2166 - RNA, 22 nt, Artificial Sequence
  Synthetic
gcaaauguguuauuuuaauuca

SEQ ID NO: 2167 - RNA, 23 nt, Artificial Sequence
  Synthetic
ggcaaauguguuauuuuaauuca

SEQ ID NO: 2168 - RNA, 19 nt, Artificial Sequence
  Synthetic
gcaagcauucauccauuca

SEQ ID NO: 2169 - RNA, 21 nt, Artificial Sequence
  Synthetic
gagcaagcauucauccauuca

SEQ ID NO: 2170 - RNA, 22 nt, Artificial Sequence
  Synthetic
ggagcaagcauucauccauuca

SEQ ID NO: 2171 - RNA, 23 nt, Artificial Sequence
  Synthetic
gaauaucuaaaaccaagcauuca

SEQ ID NO: 2172 - RNA, 18 nt, Artificial Sequence
  Synthetic
guuuggcucccucauuca

SEQ ID NO: 2173 - RNA, 22 nt, Artificial Sequence
  Synthetic
gauucugcugcucccucauuca

SEQ ID NO: 2174 - RNA, 24 nt, Artificial Sequence
  Synthetic
gugauucugcugcucccucauuca

SEQ ID NO: 2175 - RNA, 21 nt, Artificial Sequence
  Synthetic
gcaugaucaguauuucauuca

SEQ ID NO: 2176 - RNA, 20 nt, Artificial Sequence
  Synthetic
gauacuuuucucuagauuca

SEQ ID NO: 2177 - RNA, 23 nt, Artificial Sequence
  Synthetic
gcagauacuuuucucuagauuca

SEQ ID NO: 2178 - RNA, 21 nt, Artificial Sequence
  Synthetic
gacuugaccaauccauauuca

SEQ ID NO: 2179 - RNA, 23 nt, Artificial Sequence
  Synthetic
gugacuugaccaauccauauuca

SEQ ID NO: 2180 - RNA, 23 nt, Artificial Sequence
  Synthetic
guuaauaacucuaaggguauuca

SEQ ID NO: 2181 - RNA, 23 nt, Artificial Sequence
  Synthetic
gcaucuuauaaaguauuuauuca

SEQ ID NO: 2182 - RNA, 23 nt, Artificial Sequence
  Synthetic
gccuuucauauuuguaaacuuca

SEQ ID NO: 2183 - RNA, 22 nt, Artificial Sequence
  Synthetic
gaaaaagcauccucucacuuca

SEQ ID NO: 2184 - RNA, 23 nt, Artificial Sequence
  Synthetic
ggaaaaagcauccucucacuuca

SEQ ID NO: 2185 - RNA, 19 nt, Artificial Sequence
  Synthetic
gaagcacguauggccuuca

SEQ ID NO: 2186 - RNA, 24 nt, Artificial Sequence
  Synthetic
guauacagacugaggauuccuuca

SEQ ID NO: 2187 - RNA, 22 nt, Artificial Sequence
  Synthetic
gauuuuuaaggaggcugcuuca

SEQ ID NO: 2188 - RNA, 19 nt, Artificial Sequence
  Synthetic
gaacucaucagcuucuuca

SEQ ID NO: 2189 - RNA, 22 nt, Artificial Sequence
  Synthetic
gauaccugaucugcuuucuuca

SEQ ID NO: 2190 - RNA, 24 nt, Artificial Sequence
  Synthetic
gagauaccugaucugcuuucuuca

SEQ ID NO: 2191 - RNA, 20 nt, Artificial Sequence
  Synthetic
guuuccaggacucuaguuca

SEQ ID NO: 2192 - RNA, 21 nt, Artificial Sequence
  Synthetic
gguuuccaggacucuaguuca

SEQ ID NO: 2193 - RNA, 18 nt, Artificial Sequence
  Synthetic
gccucagcugaccguuca

SEQ ID NO: 2194 - RNA, 19 nt, Artificial Sequence
  Synthetic
ggccucagcugaccguuca

SEQ ID NO: 2195 - RNA, 20 nt, Artificial Sequence
  Synthetic
gggccucagcugaccguuca

SEQ ID NO: 2196 - RNA, 24 nt, Artificial Sequence
  Synthetic
guaagggccucagcugaccguuca

SEQ ID NO: 2197 - RNA, 20 nt, Artificial Sequence
  Synthetic
gccccagucagauucguuca

SEQ ID NO: 2198 - RNA, 22 nt, Artificial Sequence
  Synthetic
gugccccagucagauucguuca

SEQ ID NO: 2199 - RNA, 23 nt, Artificial Sequence
  Synthetic
ggugccccagucagauucguuca

SEQ ID NO: 2200 - RNA, 21 nt, Artificial Sequence
  Synthetic
guuaggaguuauuuagguuca

SEQ ID NO: 2201 - RNA, 20 nt, Artificial Sequence
  Synthetic
guuuucaagguuuugguuca

SEQ ID NO: 2202 - RNA, 23 nt, Artificial Sequence
  Synthetic
gcuguuuucaagguuuugguuca

SEQ ID NO: 2203 - RNA, 22 nt, Artificial Sequence
  Synthetic
guuggaaugcaauaaauguuca

SEQ ID NO: 2204 - RNA, 20 nt, Artificial Sequence
  Synthetic
guuaaguagaggcauguuca

SEQ ID NO: 2205 - RNA, 21 nt, Artificial Sequence
  Synthetic
gguuaaguagaggcauguuca

SEQ ID NO: 2206 - RNA, 22 nt, Artificial Sequence
  Synthetic
gccuugagugucauuauguuca

SEQ ID NO: 2207 - RNA, 23 nt, Artificial Sequence
  Synthetic
ggccuugagugucauuauguuca

SEQ ID NO: 2208 - RNA, 18 nt, Artificial Sequence
  Synthetic
gauaauuuuaucuguuca

SEQ ID NO: 2209 - RNA, 19 nt, Artificial Sequence
  Synthetic
guauagagaaauaauuuca

SEQ ID NO: 2210 - RNA, 22 nt, Artificial Sequence
  Synthetic
guaguauagagaaauaauuuca

SEQ ID NO: 2211 - RNA, 21 nt, Artificial Sequence
  Synthetic
gccuuccgagaccccauuuca

SEQ ID NO: 2212 - RNA, 18 nt, Artificial Sequence
  Synthetic
ggcuauauuaagauuuca

SEQ ID NO: 2213 - RNA, 21 nt, Artificial Sequence
  Synthetic
guaggcuauauuaagauuuca

SEQ ID NO: 2214 - RNA, 22 nt, Artificial Sequence
  Synthetic
gacaaguaaccugaugauuuca

SEQ ID NO: 2215 - RNA, 18 nt, Artificial Sequence
  Synthetic
gauaagcuagauauuuca

SEQ ID NO: 2216 - RNA, 22 nt, Artificial Sequence
  Synthetic
gacugauaagcuagauauuuca

SEQ ID NO: 2217 - RNA, 20 nt, Artificial Sequence
  Synthetic
gauaaagaaggccuauuuca

SEQ ID NO: 2218 - RNA, 21 nt, Artificial Sequence
  Synthetic
ggauaaagaaggccuauuuca

SEQ ID NO: 2219 - RNA, 22 nt, Artificial Sequence
  Synthetic
gggauaaagaaggccuauuuca

SEQ ID NO: 2220 - RNA, 23 nt, Artificial Sequence
  Synthetic
ggggauaaagaaggccuauuuca

SEQ ID NO: 2221 - RNA, 18 nt, Artificial Sequence
  Synthetic
guuuaacuuccuauuuca

SEQ ID NO: 2222 - RNA, 23 nt, Artificial Sequence
  Synthetic
guuauuuauuuaaaucuauuuca

SEQ ID NO: 2223 - RNA, 21 nt, Artificial Sequence
  Synthetic
gaucuucuuuucucccuuuca

SEQ ID NO: 2224 - RNA, 21 nt, Artificial Sequence
  Synthetic
gcccguauauuguggcuuuca

SEQ ID NO: 2225 - RNA, 22 nt, Artificial Sequence
  Synthetic
gaauuaggaaaaauauguuuca

SEQ ID NO: 2226 - RNA, 24 nt, Artificial Sequence
  Synthetic
gccuuaauauuggugucuguuuca

SEQ ID NO: 2227 - RNA, 18 nt, Artificial Sequence
  Synthetic
gugcucaugauuguuuca

SEQ ID NO: 2228 - RNA, 23 nt, Artificial Sequence
  Synthetic
guaaagugcucaugauuguuuca

SEQ ID NO: 2229 - RNA, 20 nt, Artificial Sequence
  Synthetic
gaauaaugaaguaauuuuca

SEQ ID NO: 2230 - RNA, 22 nt, Artificial Sequence
  Synthetic
gagaauaaugaaguaauuuuca

SEQ ID NO: 2231 - RNA, 21 nt, Artificial Sequence
  Synthetic
guuuugagcucagucuuuuca

SEQ ID NO: 2232 - RNA, 19 nt, Artificial Sequence
  Synthetic
guaagguugcuucuuuuca

SEQ ID NO: 2233 - RNA, 18 nt, Artificial Sequence
  Synthetic
ggugaccucaauuuuuca

SEQ ID NO: 2234 - RNA, 22 nt, Artificial Sequence
  Synthetic
guuaccacuaaugguuuuuuca

SEQ ID NO: 2235 - RNA, 19 nt, Artificial Sequence
  Synthetic
gauaugauaaccaaaaaga

SEQ ID NO: 2236 - RNA, 24 nt, Artificial Sequence
  Synthetic
gacuugauaugauaaccaaaaaga

SEQ ID NO: 2237 - RNA, 23 nt, Artificial Sequence
  Synthetic
guuuaggaaaacauuuaaaaaga

SEQ ID NO: 2238 - RNA, 21 nt, Artificial Sequence
  Synthetic
gcaacacacugacccaaaaga

SEQ ID NO: 2239 - RNA, 24 nt, Artificial Sequence
  Synthetic
guugcaacacacugacccaaaaga

SEQ ID NO: 2240 - RNA, 18 nt, Artificial Sequence
  Synthetic
gauucaagcugcaaaaga

SEQ ID NO: 2241 - RNA, 22 nt, Artificial Sequence
  Synthetic
gucagauucaagcugcaaaaga

SEQ ID NO: 2242 - RNA, 24 nt, Artificial Sequence
  Synthetic
guaccuuauucauuuuucaaaaga

SEQ ID NO: 2243 - RNA, 19 nt, Artificial Sequence
  Synthetic
gccuagaagguagaaaaga

SEQ ID NO: 2244 - RNA, 21 nt, Artificial Sequence
  Synthetic
gagaagguugcuuggaaaaga

SEQ ID NO: 2245 - RNA, 22 nt, Artificial Sequence
  Synthetic
ggagaagguugcuuggaaaaga

SEQ ID NO: 2246 - RNA, 18 nt, Artificial Sequence
  Synthetic
ggcaacauugcuaaaaga

SEQ ID NO: 2247 - RNA, 21 nt, Artificial Sequence
  Synthetic
gcaggcaacauugcuaaaaga

SEQ ID NO: 2248 - RNA, 20 nt, Artificial Sequence
  Synthetic
gacauaggagggguaaaaga

SEQ ID NO: 2249 - RNA, 23 nt, Artificial Sequence
  Synthetic
gaagacauaggagggguaaaaga

SEQ ID NO: 2250 - RNA, 18 nt, Artificial Sequence
  Synthetic
gguaguaguuuacaaaga

SEQ ID NO: 2251 - RNA, 19 nt, Artificial Sequence
  Synthetic
ggguaguaguuuacaaaga

SEQ ID NO: 2252 - RNA, 20 nt, Artificial Sequence
  Synthetic
gggguaguaguuuacaaaga

SEQ ID NO: 2253 - RNA, 21 nt, Artificial Sequence
  Synthetic
ggggguaguaguuuacaaaga

SEQ ID NO: 2254 - RNA, 21 nt, Artificial Sequence
  Synthetic
gaaagauacaaauuccaaaga

SEQ ID NO: 2255 - RNA, 24 nt, Artificial Sequence
  Synthetic
gaugaaagauacaaauuccaaaga

SEQ ID NO: 2256 - RNA, 23 nt, Artificial Sequence
  Synthetic
guuaaaugcuggacucagaaaga

SEQ ID NO: 2257 - RNA, 24 nt, Artificial Sequence
  Synthetic
gguuaaaugcuggacucagaaaga

SEQ ID NO: 2258 - RNA, 24 nt, Artificial Sequence
  Synthetic
gcuaaaauuacauggguagaaaga

SEQ ID NO: 2259 - RNA, 18 nt, Artificial Sequence
  Synthetic
gccugagcaacggaaaga

SEQ ID NO: 2260 - RNA, 19 nt, Artificial Sequence
  Synthetic
gaccaagagcagggaaaga

SEQ ID NO: 2261 - RNA, 21 nt, Artificial Sequence
  Synthetic
gagaccaagagcagggaaaga

SEQ ID NO: 2262 - RNA, 21 nt, Artificial Sequence
  Synthetic
gcucucucuucauccuaaaga

SEQ ID NO: 2263 - RNA, 18 nt, Artificial Sequence
  Synthetic
ggcuuuuggauuuaaaga

SEQ ID NO: 2264 - RNA, 20 nt, Artificial Sequence
  Synthetic
guggcuuuuggauuuaaaga

SEQ ID NO: 2265 - RNA, 18 nt, Artificial Sequence
  Synthetic
gaaaguuggaacacaaga

SEQ ID NO: 2266 - RNA, 21 nt, Artificial Sequence
  Synthetic
gcagaaaguuggaacacaaga

SEQ ID NO: 2267 - RNA, 22 nt, Artificial Sequence
  Synthetic
guuaucagaccuuccaccaaga

SEQ ID NO: 2268 - RNA, 23 nt, Artificial Sequence
  Synthetic
gguuaucagaccuuccaccaaga

SEQ ID NO: 2269 - RNA, 22 nt, Artificial Sequence
  Synthetic
gauuauauuuuuaauagcaaga

SEQ ID NO: 2270 - RNA, 23 nt, Artificial Sequence
  Synthetic
ggauuauauuuuuaauagcaaga

SEQ ID NO: 2271 - RNA, 22 nt, Artificial Sequence
  Synthetic
gaaaacuggacuauuagcaaga

SEQ ID NO: 2272 - RNA, 18 nt, Artificial Sequence
  Synthetic
gaagauuuuuaugcaaga

SEQ ID NO: 2273 - RNA, 19 nt, Artificial Sequence
  Synthetic
gaaccccagguuugcaaga

SEQ ID NO: 2274 - RNA, 20 nt, Artificial Sequence
  Synthetic
ggaaccccagguuugcaaga

SEQ ID NO: 2275 - RNA, 20 nt, Artificial Sequence
  Synthetic
gcaaauugauuuauucaaga

SEQ ID NO: 2276 - RNA, 21 nt, Artificial Sequence
  Synthetic
ggcaaauugauuuauucaaga

SEQ ID NO: 2277 - RNA, 22 nt, Artificial Sequence
  Synthetic
gggcaaauugauuuauucaaga

SEQ ID NO: 2278 - RNA, 24 nt, Artificial Sequence
  Synthetic
gagggcaaauugauuuauucaaga

SEQ ID NO: 2279 - RNA, 19 nt, Artificial Sequence
  Synthetic
gcuauacucaacuucaaga

SEQ ID NO: 2280 - RNA, 24 nt, Artificial Sequence
  Synthetic
guuaugcuauacucaacuucaaga

SEQ ID NO: 2281 - RNA, 22 nt, Artificial Sequence
  Synthetic
gauuaauucugaagaaagaaga

SEQ ID NO: 2282 - RNA, 23 nt, Artificial Sequence
  Synthetic
ggauuaauucugaagaaagaaga

SEQ ID NO: 2283 - RNA, 18 nt, Artificial Sequence
  Synthetic
gucacacucuccagaaga

SEQ ID NO: 2284 - RNA, 18 nt, Artificial Sequence
  Synthetic
gagguacagagcagaaga

SEQ ID NO: 2285 - RNA, 20 nt, Artificial Sequence
  Synthetic
gagagguacagagcagaaga

SEQ ID NO: 2286 - RNA, 18 nt, Artificial Sequence
  Synthetic
guguuauuuagcagaaga

SEQ ID NO: 2287 - RNA, 22 nt, Artificial Sequence
  Synthetic
gaaaguguuauuuagcagaaga

SEQ ID NO: 2288 - RNA, 24 nt, Artificial Sequence
  Synthetic
gugaaaguguuauuuagcagaaga

SEQ ID NO: 2289 - RNA, 18 nt, Artificial Sequence
  Synthetic
ggaagaguauucagaaga

SEQ ID NO: 2290 - RNA, 23 nt, Artificial Sequence
  Synthetic
guuuaggaagaguauucagaaga

SEQ ID NO: 2291 - RNA, 23 nt, Artificial Sequence
  Synthetic
gauuaaaauucauaaaacgaaga

SEQ ID NO: 2292 - RNA, 20 nt, Artificial Sequence
  Synthetic
gccacugcagaaaaggaaga

SEQ ID NO: 2293 - RNA, 19 nt, Artificial Sequence
  Synthetic
gugagggcuuucaggaaga

SEQ ID NO: 2294 - RNA, 21 nt, Artificial Sequence
  Synthetic
gcgugagggcuuucaggaaga

SEQ ID NO: 2295 - RNA, 24 nt, Artificial Sequence
  Synthetic
gcagcgugagggcuuucaggaaga

SEQ ID NO: 2296 - RNA, 22 nt, Artificial Sequence
  Synthetic
gaaauuacagugaagcggaaga

SEQ ID NO: 2297 - RNA, 18 nt, Artificial Sequence
  Synthetic
ggcugauguuagggaaga

SEQ ID NO: 2298 - RNA, 23 nt, Artificial Sequence
  Synthetic
gaucaggcugauguuagggaaga

SEQ ID NO: 2299 - RNA, 24 nt, Artificial Sequence
  Synthetic
ggaucaggcugauguuagggaaga

SEQ ID NO: 2300 - RNA, 19 nt, Artificial Sequence
  Synthetic
gaaacacuggucuggaaga

SEQ ID NO: 2301 - RNA, 20 nt, Artificial Sequence
  Synthetic
ggaaacacuggucuggaaga

SEQ ID NO: 2302 - RNA, 21 nt, Artificial Sequence
  Synthetic
gggaaacacuggucuggaaga

SEQ ID NO: 2303 - RNA, 24 nt, Artificial Sequence
  Synthetic
guugggaaacacuggucuggaaga

SEQ ID NO: 2304 - RNA, 20 nt, Artificial Sequence
  Synthetic
gauauauagcuguuggaaga

SEQ ID NO: 2305 - RNA, 18 nt, Artificial Sequence
  Synthetic
guccuguguuaaugaaga

SEQ ID NO: 2306 - RNA, 22 nt, Artificial Sequence
  Synthetic
gcauuuaaugggcagaugaaga

SEQ ID NO: 2307 - RNA, 24 nt, Artificial Sequence
  Synthetic
guccaggaaaacauccaaauaaga

SEQ ID NO: 2308 - RNA, 20 nt, Artificial Sequence
  Synthetic
gcaccuguguuuuaauaaga

SEQ ID NO: 2309 - RNA, 22 nt, Artificial Sequence
  Synthetic
gugcaccuguguuuuaauaaga

SEQ ID NO: 2310 - RNA, 20 nt, Artificial Sequence
  Synthetic
gcagccugcugcagauaaga

SEQ ID NO: 2311 - RNA, 24 nt, Artificial Sequence
  Synthetic
gaaacauugaaggguuuuauaaga

SEQ ID NO: 2312 - RNA, 19 nt, Artificial Sequence
  Synthetic
gcugcaugacaaaguaaga

SEQ ID NO: 2313 - RNA, 22 nt, Artificial Sequence
  Synthetic
gcagcugcaugacaaaguaaga

SEQ ID NO: 2314 - RNA, 21 nt, Artificial Sequence
  Synthetic
gcacacaugucugguguaaga

SEQ ID NO: 2315 - RNA, 22 nt, Artificial Sequence
  Synthetic
ggcacacaugucugguguaaga

SEQ ID NO: 2316 - RNA, 18 nt, Artificial Sequence
  Synthetic
ggcaugucaaaauuaaga

SEQ ID NO: 2317 - RNA, 19 nt, Artificial Sequence
  Synthetic
gggcaugucaaaauuaaga

SEQ ID NO: 2318 - RNA, 20 nt, Artificial Sequence
  Synthetic
ggggcaugucaaaauuaaga

SEQ ID NO: 2319 - RNA, 21 nt, Artificial Sequence
  Synthetic
gauaugcacuucuuauuaaga

SEQ ID NO: 2320 - RNA, 23 nt, Artificial Sequence
  Synthetic
gaauuuucuuccauucuuuaaga

SEQ ID NO: 2321 - RNA, 19 nt, Artificial Sequence
  Synthetic
guaagacaacuguuuaaga

SEQ ID NO: 2322 - RNA, 20 nt, Artificial Sequence
  Synthetic
gguaagacaacuguuuaaga

SEQ ID NO: 2323 - RNA, 23 nt, Artificial Sequence
  Synthetic
guagguaagacaacuguuuaaga

SEQ ID NO: 2324 - RNA, 20 nt, Artificial Sequence
  Synthetic
gccuaagcaacauuuuaaga

SEQ ID NO: 2325 - RNA, 24 nt, Artificial Sequence
  Synthetic
gaaugccuaagcaacauuuuaaga

SEQ ID NO: 2326 - RNA, 18 nt, Artificial Sequence
  Synthetic
gaauuccaaguuuuaaga

SEQ ID NO: 2327 - RNA, 24 nt, Artificial Sequence
  Synthetic
gaaacagaauuccaaguuuuaaga

SEQ ID NO: 2328 - RNA, 18 nt, Artificial Sequence
  Synthetic
guuguaauuggaaacaga

SEQ ID NO: 2329 - RNA, 22 nt, Artificial Sequence
  Synthetic
guaaguuguaauuggaaacaga

SEQ ID NO: 2330 - RNA, 20 nt, Artificial Sequence
  Synthetic
gucuaugugcuaagaacaga

SEQ ID NO: 2331 - RNA, 20 nt, Artificial Sequence
  Synthetic
gucagagauaaaggaacaga

SEQ ID NO: 2332 - RNA, 22 nt, Artificial Sequence
  Synthetic
gugucagagauaaaggaacaga

SEQ ID NO: 2333 - RNA, 24 nt, Artificial Sequence
  Synthetic
gagugucagagauaaaggaacaga

SEQ ID NO: 2334 - RNA, 22 nt, Artificial Sequence
  Synthetic
guuauauaucuauacacacaga

SEQ ID NO: 2335 - RNA, 23 nt, Artificial Sequence
  Synthetic
guacuaauuuucuucaccacaga

SEQ ID NO: 2336 - RNA, 23 nt, Artificial Sequence
  Synthetic
guaauugaaauauuugccacaga

SEQ ID NO: 2337 - RNA, 24 nt, Artificial Sequence
  Synthetic
gaaacacuaacgccauuccacaga

SEQ ID NO: 2338 - RNA, 21 nt, Artificial Sequence
  Synthetic
guaaugaaaugcuuccacaga

SEQ ID NO: 2339 - RNA, 21 nt, Artificial Sequence
  Synthetic
gaucucaaaaaauuucacaga

SEQ ID NO: 2340 - RNA, 24 nt, Artificial Sequence
  Synthetic
gaugaucucaaaaaauuucacaga

SEQ ID NO: 2341 - RNA, 19 nt, Artificial Sequence
  Synthetic
gaagucaaaaugggacaga

SEQ ID NO: 2342 - RNA, 24 nt, Artificial Sequence
  Synthetic
gcuuugaagucaaaaugggacaga

SEQ ID NO: 2343 - RNA, 24 nt, Artificial Sequence
  Synthetic
guuacagagcuagucagugacaga

SEQ ID NO: 2344 - RNA, 18 nt, Artificial Sequence
  Synthetic
gacuuguagaaauacaga

SEQ ID NO: 2345 - RNA, 19 nt, Artificial Sequence
  Synthetic
ggacuuguagaaauacaga

SEQ ID NO: 2346 - RNA, 21 nt, Artificial Sequence
  Synthetic
gaggacuuguagaaauacaga

SEQ ID NO: 2347 - RNA, 19 nt, Artificial Sequence
  Synthetic
gaauuuauauuaauacaga

SEQ ID NO: 2348 - RNA, 21 nt, Artificial Sequence
  Synthetic
gugaauuuauauuaauacaga

SEQ ID NO: 2349 - RNA, 20 nt, Artificial Sequence
  Synthetic
guuuuacauucaguuacaga

SEQ ID NO: 2350 - RNA, 22 nt, Artificial Sequence
  Synthetic
gaguuuuacauucaguuacaga

SEQ ID NO: 2351 - RNA, 20 nt, Artificial Sequence
  Synthetic
gcaaagauaaugucaccaga

SEQ ID NO: 2352 - RNA, 22 nt, Artificial Sequence
  Synthetic
gagcaaagauaaugucaccaga

SEQ ID NO: 2353 - RNA, 24 nt, Artificial Sequence
  Synthetic
gagagcaaagauaaugucaccaga

SEQ ID NO: 2354 - RNA, 19 nt, Artificial Sequence
  Synthetic
gcuguaugggaaacccaga

SEQ ID NO: 2355 - RNA, 23 nt, Artificial Sequence
  Synthetic
gucugcuguaugggaaacccaga

SEQ ID NO: 2356 - RNA, 19 nt, Artificial Sequence
  Synthetic
gagguuauauguacccaga

SEQ ID NO: 2357 - RNA, 23 nt, Artificial Sequence
  Synthetic
gccugagguuauauguacccaga

SEQ ID NO: 2358 - RNA, 24 nt, Artificial Sequence
  Synthetic
ggccugagguuauauguacccaga

SEQ ID NO: 2359 - RNA, 21 nt, Artificial Sequence
  Synthetic
gaauuauuugggcaucccaga

SEQ ID NO: 2360 - RNA, 22 nt, Artificial Sequence
  Synthetic
ggaauuauuugggcaucccaga

SEQ ID NO: 2361 - RNA, 18 nt, Artificial Sequence
  Synthetic
gggaauuaauauuccaga

SEQ ID NO: 2362 - RNA, 21 nt, Artificial Sequence
  Synthetic
guagggaauuaauauuccaga

SEQ ID NO: 2363 - RNA, 24 nt, Artificial Sequence
  Synthetic
gcaguagggaauuaauauuccaga

SEQ ID NO: 2364 - RNA, 19 nt, Artificial Sequence
  Synthetic
gaguaccuauugaagcaga

SEQ ID NO: 2365 - RNA, 23 nt, Artificial Sequence
  Synthetic
guaagaguaccuauugaagcaga

SEQ ID NO: 2366 - RNA, 19 nt, Artificial Sequence
  Synthetic
gagguggagucccagcaga

SEQ ID NO: 2367 - RNA, 20 nt, Artificial Sequence
  Synthetic
ggagguggagucccagcaga

SEQ ID NO: 2368 - RNA, 22 nt, Artificial Sequence
  Synthetic
gaggagguggagucccagcaga

SEQ ID NO: 2369 - RNA, 23 nt, Artificial Sequence
  Synthetic
ggaggagguggagucccagcaga

SEQ ID NO: 2370 - RNA, 19 nt, Artificial Sequence
  Synthetic
gauugguuucagcagcaga

SEQ ID NO: 2371 - RNA, 20 nt, Artificial Sequence
  Synthetic
ggauugguuucagcagcaga

SEQ ID NO: 2372 - RNA, 22 nt, Artificial Sequence
  Synthetic
gaggauugguuucagcagcaga

SEQ ID NO: 2373 - RNA, 24 nt, Artificial Sequence
  Synthetic
gugaggauugguuucagcagcaga

SEQ ID NO: 2374 - RNA, 20 nt, Artificial Sequence
  Synthetic
gcaaaauacauugacgcaga

SEQ ID NO: 2375 - RNA, 23 nt, Artificial Sequence
  Synthetic
gaaaaaacaagaagugaggcaga

SEQ ID NO: 2376 - RNA, 24 nt, Artificial Sequence
  Synthetic
gacuuaaaacauaaaauuggcaga

SEQ ID NO: 2377 - RNA, 18 nt, Artificial Sequence
  Synthetic
gcauauuaagacaucaga

SEQ ID NO: 2378 - RNA, 23 nt, Artificial Sequence
  Synthetic
gacaugcauauuaagacaucaga

SEQ ID NO: 2379 - RNA, 20 nt, Artificial Sequence
  Synthetic
gcuaaaacauuaccaucaga

SEQ ID NO: 2380 - RNA, 23 nt, Artificial Sequence
  Synthetic
gcagcuaaaacauuaccaucaga

SEQ ID NO: 2381 - RNA, 22 nt, Artificial Sequence
  Synthetic
gauuuuucucagaaucaucaga

SEQ ID NO: 2382 - RNA, 24 nt, Artificial Sequence
  Synthetic
gcuuauaauugaaaugucaucaga

SEQ ID NO: 2383 - RNA, 21 nt, Artificial Sequence
  Synthetic
gcuauuuuuagauugaucaga

SEQ ID NO: 2384 - RNA, 23 nt, Artificial Sequence
  Synthetic
gagcuauuuuuagauugaucaga

SEQ ID NO: 2385 - RNA, 19 nt, Artificial Sequence
  Synthetic
gaucucaauugcucucaga

SEQ ID NO: 2386 - RNA, 20 nt, Artificial Sequence
  Synthetic
ggaucucaauugcucucaga

SEQ ID NO: 2387 - RNA, 22 nt, Artificial Sequence
  Synthetic
gaggaucucaauugcucucaga

SEQ ID NO: 2388 - RNA, 18 nt, Artificial Sequence
  Synthetic
gcaaauuguauggucaga

SEQ ID NO: 2389 - RNA, 23 nt, Artificial Sequence
  Synthetic
gcuuugcaaauuguauggucaga

SEQ ID NO: 2390 - RNA, 18 nt, Artificial Sequence
  Synthetic
gucauccuauaugucaga

SEQ ID NO: 2391 - RNA, 20 nt, Artificial Sequence
  Synthetic
guccucuaagcuucuucaga

SEQ ID NO: 2392 - RNA, 24 nt, Artificial Sequence
  Synthetic
gauuguccucuaagcuucuucaga

SEQ ID NO: 2393 - RNA, 18 nt, Artificial Sequence
  Synthetic
gguaguuuaucuuucaga

SEQ ID NO: 2394 - RNA, 20 nt, Artificial Sequence
  Synthetic
gagguaguuuaucuuucaga

SEQ ID NO: 2395 - RNA, 19 nt, Artificial Sequence
  Synthetic
gaacagaaaucucaagaga

SEQ ID NO: 2396 - RNA, 20 nt, Artificial Sequence
  Synthetic
gaauuucaacagcgaagaga

SEQ ID NO: 2397 - RNA, 23 nt, Artificial Sequence
  Synthetic
guagaauuucaacagcgaagaga

SEQ ID NO: 2398 - RNA, 24 nt, Artificial Sequence
  Synthetic
gauugacuaauaaugaauaagaga

SEQ ID NO: 2399 - RNA, 19 nt, Artificial Sequence
  Synthetic
gucugagcuugcacagaga

SEQ ID NO: 2400 - RNA, 23 nt, Artificial Sequence
  Synthetic
gaaugucugagcuugcacagaga

SEQ ID NO: 2401 - RNA, 24 nt, Artificial Sequence
  Synthetic
ggaaugucugagcuugcacagaga

SEQ ID NO: 2402 - RNA, 20 nt, Artificial Sequence
  Synthetic
gacagcccuuuggacagaga

SEQ ID NO: 2403 - RNA, 21 nt, Artificial Sequence
  Synthetic
guuucuguuguuugacagaga

SEQ ID NO: 2404 - RNA, 20 nt, Artificial Sequence
  Synthetic
gacaguaucugcuacagaga

SEQ ID NO: 2405 - RNA, 19 nt, Artificial Sequence
  Synthetic
guguaugcaaauccagaga

SEQ ID NO: 2406 - RNA, 19 nt, Artificial Sequence
  Synthetic
gagcucuagggaucagaga

SEQ ID NO: 2407 - RNA, 20 nt, Artificial Sequence
  Synthetic
ggagcucuagggaucagaga

SEQ ID NO: 2408 - RNA, 18 nt, Artificial Sequence
  Synthetic
gcagaacauggucagaga

SEQ ID NO: 2409 - RNA, 22 nt, Artificial Sequence
  Synthetic
gcuagcagaacauggucagaga

SEQ ID NO: 2410 - RNA, 23 nt, Artificial Sequence
  Synthetic
ggcuagcagaacauggucagaga

SEQ ID NO: 2411 - RNA, 18 nt, Artificial Sequence
  Synthetic
ggaacacacaaagagaga

SEQ ID NO: 2412 - RNA, 21 nt, Artificial Sequence
  Synthetic
guuggaacacacaaagagaga

SEQ ID NO: 2413 - RNA, 24 nt, Artificial Sequence
  Synthetic
gaaguuggaacacacaaagagaga

SEQ ID NO: 2414 - RNA, 20 nt, Artificial Sequence
  Synthetic
guaccagaccucaagagaga

SEQ ID NO: 2415 - RNA, 22 nt, Artificial Sequence
  Synthetic
gaaaacuaagccaggagagaga

SEQ ID NO: 2416 - RNA, 23 nt, Artificial Sequence
  Synthetic
ggaaaacuaagccaggagagaga

SEQ ID NO: 2417 - RNA, 24 nt, Artificial Sequence
  Synthetic
gggaaaacuaagccaggagagaga

SEQ ID NO: 2418 - RNA, 19 nt, Artificial Sequence
  Synthetic
gacccuuuucuaauagaga

SEQ ID NO: 2419 - RNA, 23 nt, Artificial Sequence
  Synthetic
gauugacccuuuucuaauagaga

SEQ ID NO: 2420 - RNA, 18 nt, Artificial Sequence
  Synthetic
guaggaaauggguagaga

SEQ ID NO: 2421 - RNA, 20 nt, Artificial Sequence
  Synthetic
gaguaggaaauggguagaga

SEQ ID NO: 2422 - RNA, 21 nt, Artificial Sequence
  Synthetic
ggaguaggaaauggguagaga

SEQ ID NO: 2423 - RNA, 23 nt, Artificial Sequence
  Synthetic
guggaguaggaaauggguagaga

SEQ ID NO: 2424 - RNA, 18 nt, Artificial Sequence
  Synthetic
gggacucaacuuucgaga

SEQ ID NO: 2425 - RNA, 20 nt, Artificial Sequence
  Synthetic
gagggacucaacuuucgaga

SEQ ID NO: 2426 - RNA, 18 nt, Artificial Sequence
  Synthetic
gaaaacuaagccaggaga

SEQ ID NO: 2427 - RNA, 19 nt, Artificial Sequence
  Synthetic
ggaaaacuaagccaggaga

SEQ ID NO: 2428 - RNA, 20 nt, Artificial Sequence
  Synthetic
gggaaaacuaagccaggaga

SEQ ID NO: 2429 - RNA, 20 nt, Artificial Sequence
  Synthetic
gaucaauggaugagaggaga

SEQ ID NO: 2430 - RNA, 23 nt, Artificial Sequence
  Synthetic
gcagaucaauggaugagaggaga

SEQ ID NO: 2431 - RNA, 19 nt, Artificial Sequence
  Synthetic
gaacaacuaagcagggaga

SEQ ID NO: 2432 - RNA, 21 nt, Artificial Sequence
  Synthetic
gagaacaacuaagcagggaga

SEQ ID NO: 2433 - RNA, 18 nt, Artificial Sequence
  Synthetic
guuuuaccuucagggaga

SEQ ID NO: 2434 - RNA, 19 nt, Artificial Sequence
  Synthetic
gguuuuaccuucagggaga

SEQ ID NO: 2435 - RNA, 23 nt, Artificial Sequence
  Synthetic
gcaagguuuuaccuucagggaga

SEQ ID NO: 2436 - RNA, 24 nt, Artificial Sequence
  Synthetic
guuuuaaggcaagaaggagggaga

SEQ ID NO: 2437 - RNA, 19 nt, Artificial Sequence
  Synthetic
gaggcucuuggcggggaga

SEQ ID NO: 2438 - RNA, 19 nt, Artificial Sequence
  Synthetic
gaauaacuaaagugggaga

SEQ ID NO: 2439 - RNA, 23 nt, Artificial Sequence
  Synthetic
gcuuuuauuauaacauugggaga

SEQ ID NO: 2440 - RNA, 22 nt, Artificial Sequence
  Synthetic
guuccaaauuuugcacuggaga

SEQ ID NO: 2441 - RNA, 18 nt, Artificial Sequence
  Synthetic
guuugcuugugguggaga

SEQ ID NO: 2442 - RNA, 19 nt, Artificial Sequence
  Synthetic
gguuugcuugugguggaga

SEQ ID NO: 2443 - RNA, 20 nt, Artificial Sequence
  Synthetic
ggguuugcuugugguggaga

SEQ ID NO: 2444 - RNA, 18 nt, Artificial Sequence
  Synthetic
gccucuaagaguuggaga

SEQ ID NO: 2445 - RNA, 22 nt, Artificial Sequence
  Synthetic
gccugccucuaagaguuggaga

SEQ ID NO: 2446 - RNA, 23 nt, Artificial Sequence
  Synthetic
ggccugccucuaagaguuggaga

SEQ ID NO: 2447 - RNA, 21 nt, Artificial Sequence
  Synthetic
gcuuccccuuuuuuuuggaga

SEQ ID NO: 2448 - RNA, 19 nt, Artificial Sequence
  Synthetic
gcgauauagugaaaugaga

SEQ ID NO: 2449 - RNA, 19 nt, Artificial Sequence
  Synthetic
gucccauuguggaaugaga

SEQ ID NO: 2450 - RNA, 22 nt, Artificial Sequence
  Synthetic
gucugaggaaaaaauaaugaga

SEQ ID NO: 2451 - RNA, 24 nt, Artificial Sequence
  Synthetic
gagucugaggaaaaaauaaugaga

SEQ ID NO: 2452 - RNA, 19 nt, Artificial Sequence
  Synthetic
gaaauuaaauauaaugaga

SEQ ID NO: 2453 - RNA, 20 nt, Artificial Sequence
  Synthetic
ggaaauuaaauauaaugaga

SEQ ID NO: 2454 - RNA, 22 nt, Artificial Sequence
  Synthetic
gaggaaauuaaauauaaugaga

SEQ ID NO: 2455 - RNA, 18 nt, Artificial Sequence
  Synthetic
ggggauaaaggcaugaga

SEQ ID NO: 2456 - RNA, 20 nt, Artificial Sequence
  Synthetic
gaggggauaaaggcaugaga

SEQ ID NO: 2457 - RNA, 22 nt, Artificial Sequence
  Synthetic
gagaggggauaaaggcaugaga

SEQ ID NO: 2458 - RNA, 18 nt, Artificial Sequence
  Synthetic
gauuuacucaauaugaga

SEQ ID NO: 2459 - RNA, 20 nt, Artificial Sequence
  Synthetic
gugauuuacucaauaugaga

SEQ ID NO: 2460 - RNA, 22 nt, Artificial Sequence
  Synthetic
gagugauuuacucaauaugaga

SEQ ID NO: 2461 - RNA, 24 nt, Artificial Sequence
  Synthetic
gugagugauuuacucaauaugaga

SEQ ID NO: 2462 - RNA, 21 nt, Artificial Sequence
  Synthetic
gaaaaugugaaguguaugaga

SEQ ID NO: 2463 - RNA, 22 nt, Artificial Sequence
  Synthetic
ggaaaaugugaaguguaugaga

SEQ ID NO: 2464 - RNA, 22 nt, Artificial Sequence
  Synthetic
gucauuacgccugguuaugaga

SEQ ID NO: 2465 - RNA, 18 nt, Artificial Sequence
  Synthetic
guuaggaauugugugaga

SEQ ID NO: 2466 - RNA, 18 nt, Artificial Sequence
  Synthetic
gaauaauguuacuugaga

SEQ ID NO: 2467 - RNA, 21 nt, Artificial Sequence
  Synthetic
gcugaauaauguuacuugaga

SEQ ID NO: 2468 - RNA, 23 nt, Artificial Sequence
  Synthetic
gagcugaauaauguuacuugaga

SEQ ID NO: 2469 - RNA, 24 nt, Artificial Sequence
  Synthetic
ggagcugaauaauguuacuugaga

SEQ ID NO: 2470 - RNA, 21 nt, Artificial Sequence
  Synthetic
guuuuauuuugucucuugaga

SEQ ID NO: 2471 - RNA, 24 nt, Artificial Sequence
  Synthetic
guaguuuuauuuugucucuugaga

SEQ ID NO: 2472 - RNA, 24 nt, Artificial Sequence
  Synthetic
guuaucugaagacagacaaauaga

SEQ ID NO: 2473 - RNA, 19 nt, Artificial Sequence
  Synthetic
gagaugagaucacaauaga

SEQ ID NO: 2474 - RNA, 20 nt, Artificial Sequence
  Synthetic
guuaugaugucaauaauaga

SEQ ID NO: 2475 - RNA, 18 nt, Artificial Sequence
  Synthetic
gauagaacuuaagauaga

SEQ ID NO: 2476 - RNA, 23 nt, Artificial Sequence
  Synthetic
gaauugauagaacuuaagauaga

SEQ ID NO: 2477 - RNA, 20 nt, Artificial Sequence
  Synthetic
guugauucuucucagauaga

SEQ ID NO: 2478 - RNA, 23 nt, Artificial Sequence
  Synthetic
gcuguugauucuucucagauaga

SEQ ID NO: 2479 - RNA, 22 nt, Artificial Sequence
  Synthetic
gauauucaaguaaaaugauaga

SEQ ID NO: 2480 - RNA, 18 nt, Artificial Sequence
  Synthetic
guaagcagaguuuauaga

SEQ ID NO: 2481 - RNA, 21 nt, Artificial Sequence
  Synthetic
guuguaagcagaguuuauaga

SEQ ID NO: 2482 - RNA, 22 nt, Artificial Sequence
  Synthetic
gguuguaagcagaguuuauaga

SEQ ID NO: 2483 - RNA, 20 nt, Artificial Sequence
  Synthetic
gcaccaacccugagacuaga

SEQ ID NO: 2484 - RNA, 24 nt, Artificial Sequence
  Synthetic
gucuacuucugugauuaaccuaga

SEQ ID NO: 2485 - RNA, 22 nt, Artificial Sequence
  Synthetic
gcauuggguuggcucaccuaga

SEQ ID NO: 2486 - RNA, 19 nt, Artificial Sequence
  Synthetic
guccaaaucauacccuaga

SEQ ID NO: 2487 - RNA, 21 nt, Artificial Sequence
  Synthetic
gagaggaaaugaaagccuaga

SEQ ID NO: 2488 - RNA, 18 nt, Artificial Sequence
  Synthetic
guguuuuuaaaagcuaga

SEQ ID NO: 2489 - RNA, 20 nt, Artificial Sequence
  Synthetic
gucaccuaaggccagcuaga

SEQ ID NO: 2490 - RNA, 23 nt, Artificial Sequence
  Synthetic
gaagucaccuaaggccagcuaga

SEQ ID NO: 2491 - RNA, 18 nt, Artificial Sequence
  Synthetic
gagaaugaaauaucuaga

SEQ ID NO: 2492 - RNA, 20 nt, Artificial Sequence
  Synthetic
gagagaaugaaauaucuaga

SEQ ID NO: 2493 - RNA, 24 nt, Artificial Sequence
  Synthetic
gaaagagagaaugaaauaucuaga

SEQ ID NO: 2494 - RNA, 21 nt, Artificial Sequence
  Synthetic
guauuuuuaaaauucucuaga

SEQ ID NO: 2495 - RNA, 20 nt, Artificial Sequence
  Synthetic
guuaaugaauguuuucuaga

SEQ ID NO: 2496 - RNA, 23 nt, Artificial Sequence
  Synthetic
gaacaauuuagucguuaaguaga

SEQ ID NO: 2497 - RNA, 24 nt, Artificial Sequence
  Synthetic
ggaacaauuuagucguuaaguaga

SEQ ID NO: 2498 - RNA, 21 nt, Artificial Sequence
  Synthetic
gaaaauguaauauucaguaga

SEQ ID NO: 2499 - RNA, 18 nt, Artificial Sequence
  Synthetic
gauaaacagacagguaga

SEQ ID NO: 2500 - RNA, 22 nt, Artificial Sequence
  Synthetic
gacugauaaacagacagguaga

SEQ ID NO: 2501 - RNA, 21 nt, Artificial Sequence
  Synthetic
gcaugcuaguaaucauguaga

SEQ ID NO: 2502 - RNA, 22 nt, Artificial Sequence
  Synthetic
ggcaugcuaguaaucauguaga

SEQ ID NO: 2503 - RNA, 24 nt, Artificial Sequence
  Synthetic
gaggcaugcuaguaaucauguaga

SEQ ID NO: 2504 - RNA, 24 nt, Artificial Sequence
  Synthetic
gucuaguaaagugucugguguaga

SEQ ID NO: 2505 - RNA, 24 nt, Artificial Sequence
  Synthetic
gaaauauauucaucuucuuguaga

SEQ ID NO: 2506 - RNA, 23 nt, Artificial Sequence
  Synthetic
gcaucucccucaguauuuguaga

SEQ ID NO: 2507 - RNA, 22 nt, Artificial Sequence
  Synthetic
guaaaauuaguauaauauuaga

SEQ ID NO: 2508 - RNA, 23 nt, Artificial Sequence
  Synthetic
guuucaaucauauauguauuaga

SEQ ID NO: 2509 - RNA, 24 nt, Artificial Sequence
  Synthetic
gguuucaaucauauauguauuaga

SEQ ID NO: 2510 - RNA, 19 nt, Artificial Sequence
  Synthetic
gugcuuaaaaauuauuaga

SEQ ID NO: 2511 - RNA, 20 nt, Artificial Sequence
  Synthetic
ggugcuuaaaaauuauuaga

SEQ ID NO: 2512 - RNA, 22 nt, Artificial Sequence
  Synthetic
gaggugcuuaaaaauuauuaga

SEQ ID NO: 2513 - RNA, 18 nt, Artificial Sequence
  Synthetic
guuaugguagcacuuaga

SEQ ID NO: 2514 - RNA, 24 nt, Artificial Sequence
  Synthetic
gaauccuccccuacaucccuuaga

SEQ ID NO: 2515 - RNA, 18 nt, Artificial Sequence
  Synthetic
gauuuucaaaagguuaga

SEQ ID NO: 2516 - RNA, 21 nt, Artificial Sequence
  Synthetic
guugauuuucaaaagguuaga

SEQ ID NO: 2517 - RNA, 20 nt, Artificial Sequence
  Synthetic
gucauuaaauucacuuuaga

SEQ ID NO: 2518 - RNA, 19 nt, Artificial Sequence
  Synthetic
gaagguggacuuguuuaga

SEQ ID NO: 2519 - RNA, 18 nt, Artificial Sequence
  Synthetic
gaauagugacauuuuaga

SEQ ID NO: 2520 - RNA, 19 nt, Artificial Sequence
  Synthetic
ggaauagugacauuuuaga

SEQ ID NO: 2521 - RNA, 18 nt, Artificial Sequence
  Synthetic
gacagugugcauuuuaga

SEQ ID NO: 2522 - RNA, 19 nt, Artificial Sequence
  Synthetic
ggacagugugcauuuuaga

SEQ ID NO: 2523 - RNA, 19 nt, Artificial Sequence
  Synthetic
gucuauuucuaguuuuaga

SEQ ID NO: 2524 - RNA, 23 nt, Artificial Sequence
  Synthetic
guuuuuacaucuguuagaaacga

SEQ ID NO: 2525 - RNA, 18 nt, Artificial Sequence
  Synthetic
gaggaaaagcaauaacga

SEQ ID NO: 2526 - RNA, 19 nt, Artificial Sequence
  Synthetic
ggaggaaaagcaauaacga

SEQ ID NO: 2527 - RNA, 22 nt, Artificial Sequence
  Synthetic
gcuggaggaaaagcaauaacga

SEQ ID NO: 2528 - RNA, 23 nt, Artificial Sequence
  Synthetic
ggcuggaggaaaagcaauaacga

SEQ ID NO: 2529 - RNA, 21 nt, Artificial Sequence
  Synthetic
gucaggaagagugacagacga

SEQ ID NO: 2530 - RNA, 22 nt, Artificial Sequence
  Synthetic
ggucaggaagagugacagacga

SEQ ID NO: 2531 - RNA, 23 nt, Artificial Sequence
  Synthetic
gggucaggaagagugacagacga

SEQ ID NO: 2532 - RNA, 24 nt, Artificial Sequence
  Synthetic
ggggucaggaagagugacagacga

SEQ ID NO: 2533 - RNA, 20 nt, Artificial Sequence
  Synthetic
guugagagguguucagacga

SEQ ID NO: 2534 - RNA, 24 nt, Artificial Sequence
  Synthetic
gaacaaagcagcuaauagugacga

SEQ ID NO: 2535 - RNA, 18 nt, Artificial Sequence
  Synthetic
gaacauugaguacagcga

SEQ ID NO: 2536 - RNA, 19 nt, Artificial Sequence
  Synthetic
ggaacauugaguacagcga

SEQ ID NO: 2537 - RNA, 23 nt, Artificial Sequence
  Synthetic
gacuggaacauugaguacagcga

SEQ ID NO: 2538 - RNA, 21 nt, Artificial Sequence
  Synthetic
gucuacgacugugcccugcga

SEQ ID NO: 2539 - RNA, 23 nt, Artificial Sequence
  Synthetic
gugucuacgacugugcccugcga

SEQ ID NO: 2540 - RNA, 22 nt, Artificial Sequence
  Synthetic
gaaaaacaaccaaaaguugcga

SEQ ID NO: 2541 - RNA, 21 nt, Artificial Sequence
  Synthetic
gauccauaaaugccaucucga

SEQ ID NO: 2542 - RNA, 20 nt, Artificial Sequence
  Synthetic
gucagaaguagagacuucga

SEQ ID NO: 2543 - RNA, 22 nt, Artificial Sequence
  Synthetic
gagucagaaguagagacuucga

SEQ ID NO: 2544 - RNA, 24 nt, Artificial Sequence
  Synthetic
gucuacagcuucuguugaguucga

SEQ ID NO: 2545 - RNA, 19 nt, Artificial Sequence
  Synthetic
gaacuuuacuucaaaagga

SEQ ID NO: 2546 - RNA, 22 nt, Artificial Sequence
  Synthetic
gucauucucuguaguaaaagga

SEQ ID NO: 2547 - RNA, 24 nt, Artificial Sequence
  Synthetic
gugucauucucuguaguaaaagga

SEQ ID NO: 2548 - RNA, 21 nt, Artificial Sequence
  Synthetic
guuuuauauguuuuaaaagga

SEQ ID NO: 2549 - RNA, 24 nt, Artificial Sequence
  Synthetic
gacuuuucugguuuugacaaagga

SEQ ID NO: 2550 - RNA, 21 nt, Artificial Sequence
  Synthetic
gcuugugaaaucgagaaagga

SEQ ID NO: 2551 - RNA, 24 nt, Artificial Sequence
  Synthetic
guugcuugugaaaucgagaaagga

SEQ ID NO: 2552 - RNA, 23 nt, Artificial Sequence
  Synthetic
gccauuucugcauuucuaaagga

SEQ ID NO: 2553 - RNA, 21 nt, Artificial Sequence
  Synthetic
guuuuaccucuauuacaagga

SEQ ID NO: 2554 - RNA, 24 nt, Artificial Sequence
  Synthetic
guuuugggagggaagagggaagga

SEQ ID NO: 2555 - RNA, 19 nt, Artificial Sequence
  Synthetic
gcauauauauccugaagga

SEQ ID NO: 2556 - RNA, 20 nt, Artificial Sequence
  Synthetic
ggcauauauauccugaagga

SEQ ID NO: 2557 - RNA, 24 nt, Artificial Sequence
  Synthetic
gcuuggcauauauauccugaagga

SEQ ID NO: 2558 - RNA, 21 nt, Artificial Sequence
  Synthetic
gacuaaaauuaaaacuaagga

SEQ ID NO: 2559 - RNA, 18 nt, Artificial Sequence
  Synthetic
guggcuuucucuuaagga

SEQ ID NO: 2560 - RNA, 21 nt, Artificial Sequence
  Synthetic
gcaguggcuuucucuuaagga

SEQ ID NO: 2561 - RNA, 23 nt, Artificial Sequence
  Synthetic
gagcaguggcuuucucuuaagga

SEQ ID NO: 2562 - RNA, 24 nt, Artificial Sequence
  Synthetic
ggagcaguggcuuucucuuaagga

SEQ ID NO: 2563 - RNA, 24 nt, Artificial Sequence
  Synthetic
gucuccaacuuccccuuuuaagga

SEQ ID NO: 2564 - RNA, 20 nt, Artificial Sequence
  Synthetic
gaauaagaggagaaucagga

SEQ ID NO: 2565 - RNA, 18 nt, Artificial Sequence
  Synthetic
gucacgugguugucagga

SEQ ID NO: 2566 - RNA, 23 nt, Artificial Sequence
  Synthetic
gcuuugucacgugguugucagga

SEQ ID NO: 2567 - RNA, 24 nt, Artificial Sequence
  Synthetic
ggcuuugucacgugguugucagga

SEQ ID NO: 2568 - RNA, 18 nt, Artificial Sequence
  Synthetic
guucuacuuuugucagga

SEQ ID NO: 2569 - RNA, 22 nt, Artificial Sequence
  Synthetic
gcuuguucuacuuuugucagga

SEQ ID NO: 2570 - RNA, 24 nt, Artificial Sequence
  Synthetic
gagcuuguucuacuuuugucagga

SEQ ID NO: 2571 - RNA, 19 nt, Artificial Sequence
  Synthetic
gucuuucggcucuucagga

SEQ ID NO: 2572 - RNA, 21 nt, Artificial Sequence
  Synthetic
gugucuuucggcucuucagga

SEQ ID NO: 2573 - RNA, 19 nt, Artificial Sequence
  Synthetic
gaucagugagacuagagga

SEQ ID NO: 2574 - RNA, 21 nt, Artificial Sequence
  Synthetic
gagaucagugagacuagagga

SEQ ID NO: 2575 - RNA, 22 nt, Artificial Sequence
  Synthetic
ggagaucagugagacuagagga

SEQ ID NO: 2576 - RNA, 18 nt, Artificial Sequence
  Synthetic
ggauuauuggaacgagga

SEQ ID NO: 2577 - RNA, 19 nt, Artificial Sequence
  Synthetic
gggauuauuggaacgagga

SEQ ID NO: 2578 - RNA, 20 nt, Artificial Sequence
  Synthetic
ggggauuauuggaacgagga

SEQ ID NO: 2579 - RNA, 24 nt, Artificial Sequence
  Synthetic
gaauggggauuauuggaacgagga

SEQ ID NO: 2580 - RNA, 24 nt, Artificial Sequence
  Synthetic
guuacauugucauuuaguggagga

SEQ ID NO: 2581 - RNA, 22 nt, Artificial Sequence
  Synthetic
guauaauguuaaggaaugagga

SEQ ID NO: 2582 - RNA, 23 nt, Artificial Sequence
  Synthetic
gguauaauguuaaggaaugagga

SEQ ID NO: 2583 - RNA, 24 nt, Artificial Sequence
  Synthetic
guuaaaggaaaugagaaaauagga

SEQ ID NO: 2584 - RNA, 19 nt, Artificial Sequence
  Synthetic
gaacaaccgucagauagga

SEQ ID NO: 2585 - RNA, 20 nt, Artificial Sequence
  Synthetic
ggaacaaccgucagauagga

SEQ ID NO: 2586 - RNA, 19 nt, Artificial Sequence
  Synthetic
gauaaaaagaaguauagga

SEQ ID NO: 2587 - RNA, 22 nt, Artificial Sequence
  Synthetic
gauuaaaaagacucagguagga

SEQ ID NO: 2588 - RNA, 18 nt, Artificial Sequence
  Synthetic
gugggggcacaauuagga

SEQ ID NO: 2589 - RNA, 18 nt, Artificial Sequence
  Synthetic
guugggugacgcuuagga

SEQ ID NO: 2590 - RNA, 20 nt, Artificial Sequence
  Synthetic
guguugggugacgcuuagga

SEQ ID NO: 2591 - RNA, 21 nt, Artificial Sequence
  Synthetic
gguguugggugacgcuuagga

SEQ ID NO: 2592 - RNA, 23 nt, Artificial Sequence
  Synthetic
gagguguugggugacgcuuagga

SEQ ID NO: 2593 - RNA, 24 nt, Artificial Sequence
  Synthetic
gcuauuuauugguacuuguuagga

SEQ ID NO: 2594 - RNA, 21 nt, Artificial Sequence
  Synthetic
guaagugagagagguuuagga

SEQ ID NO: 2595 - RNA, 24 nt, Artificial Sequence
  Synthetic
gaaguaagugagagagguuuagga

SEQ ID NO: 2596 - RNA, 18 nt, Artificial Sequence
  Synthetic
guacacaauagguacgga

SEQ ID NO: 2597 - RNA, 19 nt, Artificial Sequence
  Synthetic
gguacacaauagguacgga

SEQ ID NO: 2598 - RNA, 18 nt, Artificial Sequence
  Synthetic
gcuaacccugucuucgga

SEQ ID NO: 2599 - RNA, 19 nt, Artificial Sequence
  Synthetic
ggcuaacccugucuucgga

SEQ ID NO: 2600 - RNA, 20 nt, Artificial Sequence
  Synthetic
gggcuaacccugucuucgga

SEQ ID NO: 2601 - RNA, 19 nt, Artificial Sequence
  Synthetic
gaggguugguagaaaggga

SEQ ID NO: 2602 - RNA, 20 nt, Artificial Sequence
  Synthetic
gauggggcuaaagcaaggga

SEQ ID NO: 2603 - RNA, 21 nt, Artificial Sequence
  Synthetic
ggauggggcuaaagcaaggga

SEQ ID NO: 2604 - RNA, 22 nt, Artificial Sequence
  Synthetic
gggauggggcuaaagcaaggga

SEQ ID NO: 2605 - RNA, 22 nt, Artificial Sequence
  Synthetic
gcagggauaauaaaagaaggga

SEQ ID NO: 2606 - RNA, 20 nt, Artificial Sequence
  Synthetic
gcauuuuggaguugaaggga

SEQ ID NO: 2607 - RNA, 23 nt, Artificial Sequence
  Synthetic
guagcauuuuggaguugaaggga

SEQ ID NO: 2608 - RNA, 24 nt, Artificial Sequence
  Synthetic
gauacaaaaagaguguugaaggga

SEQ ID NO: 2609 - RNA, 19 nt, Artificial Sequence
  Synthetic
gcgauaugaaaauaaggga

SEQ ID NO: 2610 - RNA, 21 nt, Artificial Sequence
  Synthetic
gagcgauaugaaaauaaggga

SEQ ID NO: 2611 - RNA, 23 nt, Artificial Sequence
  Synthetic
gagagcgauaugaaaauaaggga

SEQ ID NO: 2612 - RNA, 20 nt, Artificial Sequence
  Synthetic
guaauuuuaguaagcaggga

SEQ ID NO: 2613 - RNA, 18 nt, Artificial Sequence
  Synthetic
gugagcugcucagaggga

SEQ ID NO: 2614 - RNA, 21 nt, Artificial Sequence
  Synthetic
gcugugagcugcucagaggga

SEQ ID NO: 2615 - RNA, 22 nt, Artificial Sequence
  Synthetic
ggcugugagcugcucagaggga

SEQ ID NO: 2616 - RNA, 22 nt, Artificial Sequence
  Synthetic
guuuaagauuggguaugaggga

SEQ ID NO: 2617 - RNA, 18 nt, Artificial Sequence
  Synthetic
gagcaacugucugaggga

SEQ ID NO: 2618 - RNA, 19 nt, Artificial Sequence
  Synthetic
guuacauacaggcuaggga

SEQ ID NO: 2619 - RNA, 18 nt, Artificial Sequence
  Synthetic
gaagcaggcuucuaggga

SEQ ID NO: 2620 - RNA, 21 nt, Artificial Sequence
  Synthetic
gcugaagcaggcuucuaggga

SEQ ID NO: 2621 - RNA, 22 nt, Artificial Sequence
  Synthetic
ggcugaagcaggcuucuaggga

SEQ ID NO: 2622 - RNA, 23 nt, Artificial Sequence
  Synthetic
gggcugaagcaggcuucuaggga

SEQ ID NO: 2623 - RNA, 18 nt, Artificial Sequence
  Synthetic
guagcauuuucuuaggga

SEQ ID NO: 2624 - RNA, 21 nt, Artificial Sequence
  Synthetic
gauuaaauaggguacacggga

SEQ ID NO: 2625 - RNA, 22 nt, Artificial Sequence
  Synthetic
gcuaggaaacgaagaaagggga

SEQ ID NO: 2626 - RNA, 24 nt, Artificial Sequence
  Synthetic
gugcuaggaaacgaagaaagggga

SEQ ID NO: 2627 - RNA, 20 nt, Artificial Sequence
  Synthetic
gauccuauaaaauuagggga

SEQ ID NO: 2628 - RNA, 18 nt, Artificial Sequence
  Synthetic
guaugaaauacaggggga

SEQ ID NO: 2629 - RNA, 19 nt, Artificial Sequence
  Synthetic
gguaugaaauacaggggga

SEQ ID NO: 2630 - RNA, 23 nt, Artificial Sequence
  Synthetic
guauuuaugaaaguaugggggga

SEQ ID NO: 2631 - RNA, 24 nt, Artificial Sequence
  Synthetic
guuuuuaggggguaaaguggggga

SEQ ID NO: 2632 - RNA, 18 nt, Artificial Sequence
  Synthetic
gaaaagcgagaaugggga

SEQ ID NO: 2633 - RNA, 19 nt, Artificial Sequence
  Synthetic
ggaaaagcgagaaugggga

SEQ ID NO: 2634 - RNA, 20 nt, Artificial Sequence
  Synthetic
gggaaaagcgagaaugggga

SEQ ID NO: 2635 - RNA, 21 nt, Artificial Sequence
  Synthetic
ggggaaaagcgagaaugggga

SEQ ID NO: 2636 - RNA, 24 nt, Artificial Sequence
  Synthetic
guaggggaaaagcgagaaugggga

SEQ ID NO: 2637 - RNA, 23 nt, Artificial Sequence
  Synthetic
guacaauguacugauaaugggga

SEQ ID NO: 2638 - RNA, 21 nt, Artificial Sequence
  Synthetic
gggagauagcaggaaauggga

SEQ ID NO: 2639 - RNA, 18 nt, Artificial Sequence
  Synthetic
gggugacaaaagauggga

SEQ ID NO: 2640 - RNA, 19 nt, Artificial Sequence
  Synthetic
ggggugacaaaagauggga

SEQ ID NO: 2641 - RNA, 23 nt, Artificial Sequence
  Synthetic
gucuggggugacaaaagauggga

SEQ ID NO: 2642 - RNA, 19 nt, Artificial Sequence
  Synthetic
gaauccccauuaccuggga

SEQ ID NO: 2643 - RNA, 23 nt, Artificial Sequence
  Synthetic
gcuuuuaagaaaaaugccuggga

SEQ ID NO: 2644 - RNA, 18 nt, Artificial Sequence
  Synthetic
guugguuugggaguggga

SEQ ID NO: 2645 - RNA, 19 nt, Artificial Sequence
  Synthetic
gguugguuugggaguggga

SEQ ID NO: 2646 - RNA, 21 nt, Artificial Sequence
  Synthetic
gugguugguuugggaguggga

SEQ ID NO: 2647 - RNA, 20 nt, Artificial Sequence
  Synthetic
gcacugaguugggguuggga

SEQ ID NO: 2648 - RNA, 23 nt, Artificial Sequence
  Synthetic
gaagcacugaguugggguuggga

SEQ ID NO: 2649 - RNA, 23 nt, Artificial Sequence
  Synthetic
gauacugcaaaaucaguuuggga

SEQ ID NO: 2650 - RNA, 21 nt, Artificial Sequence
  Synthetic
gaaaagauggacugaaaugga

SEQ ID NO: 2651 - RNA, 24 nt, Artificial Sequence
  Synthetic
gacauuuauaaagccacucaugga

SEQ ID NO: 2652 - RNA, 22 nt, Artificial Sequence
  Synthetic
gaucuccaccucuuuugaugga

SEQ ID NO: 2653 - RNA, 18 nt, Artificial Sequence
  Synthetic
gugauugaagaauaugga

SEQ ID NO: 2654 - RNA, 19 nt, Artificial Sequence
  Synthetic
ggugauugaagaauaugga

SEQ ID NO: 2655 - RNA, 20 nt, Artificial Sequence
  Synthetic
gggugauugaagaauaugga

SEQ ID NO: 2656 - RNA, 22 nt, Artificial Sequence
  Synthetic
gucucuugguaauaacuaugga

SEQ ID NO: 2657 - RNA, 22 nt, Artificial Sequence
  Synthetic
gccauuguaaacaagcuaugga

SEQ ID NO: 2658 - RNA, 22 nt, Artificial Sequence
  Synthetic
guuuuugcucugauuaacugga

SEQ ID NO: 2659 - RNA, 19 nt, Artificial Sequence
  Synthetic
gaaugucauugcuacugga

SEQ ID NO: 2660 - RNA, 18 nt, Artificial Sequence
  Synthetic
gguguggaggagccugga

SEQ ID NO: 2661 - RNA, 19 nt, Artificial Sequence
  Synthetic
ggguguggaggagccugga

SEQ ID NO: 2662 - RNA, 24 nt, Artificial Sequence
  Synthetic
gacauggguguggaggagccugga

SEQ ID NO: 2663 - RNA, 21 nt, Artificial Sequence
  Synthetic
gaauuacaguagagagcugga

SEQ ID NO: 2664 - RNA, 23 nt, Artificial Sequence
  Synthetic
gagaauuacaguagagagcugga

SEQ ID NO: 2665 - RNA, 19 nt, Artificial Sequence
  Synthetic
guagugccugguagcugga

SEQ ID NO: 2666 - RNA, 22 nt, Artificial Sequence
  Synthetic
gcuuuaccagcucuacucugga

SEQ ID NO: 2667 - RNA, 23 nt, Artificial Sequence
  Synthetic
ggcuuuaccagcucuacucugga

SEQ ID NO: 2668 - RNA, 18 nt, Artificial Sequence
  Synthetic
gccaaaugggugucugga

SEQ ID NO: 2669 - RNA, 21 nt, Artificial Sequence
  Synthetic
gaagccaaaugggugucugga

SEQ ID NO: 2670 - RNA, 18 nt, Artificial Sequence
  Synthetic
gcaguaggagauucugga

SEQ ID NO: 2671 - RNA, 24 nt, Artificial Sequence
  Synthetic
guuaaaacuuguaaauuuucugga

SEQ ID NO: 2672 - RNA, 22 nt, Artificial Sequence
  Synthetic
gaucuauuugauugauagugga

SEQ ID NO: 2673 - RNA, 19 nt, Artificial Sequence
  Synthetic
guaauuguaguauagugga

SEQ ID NO: 2674 - RNA, 20 nt, Artificial Sequence
  Synthetic
gguaauuguaguauagugga

SEQ ID NO: 2675 - RNA, 21 nt, Artificial Sequence
  Synthetic
ggguaauuguaguauagugga

SEQ ID NO: 2676 - RNA, 22 nt, Artificial Sequence
  Synthetic
gggguaauuguaguauagugga

SEQ ID NO: 2677 - RNA, 19 nt, Artificial Sequence
  Synthetic
gcauucaaaauguagugga

SEQ ID NO: 2678 - RNA, 20 nt, Artificial Sequence
  Synthetic
ggcauucaaaauguagugga

SEQ ID NO: 2679 - RNA, 21 nt, Artificial Sequence
  Synthetic
gggcauucaaaauguagugga

SEQ ID NO: 2680 - RNA, 21 nt, Artificial Sequence
  Synthetic
gacauuuuuucugggggugga

SEQ ID NO: 2681 - RNA, 24 nt, Artificial Sequence
  Synthetic
gaugacauuuuuucugggggugga

SEQ ID NO: 2682 - RNA, 18 nt, Artificial Sequence
  Synthetic
guuagugcaaaaugugga

SEQ ID NO: 2683 - RNA, 20 nt, Artificial Sequence
  Synthetic
guguuagugcaaaaugugga

SEQ ID NO: 2684 - RNA, 22 nt, Artificial Sequence
  Synthetic
gaauuuauuauuuccuugugga

SEQ ID NO: 2685 - RNA, 19 nt, Artificial Sequence
  Synthetic
guuuauggagucuugugga

SEQ ID NO: 2686 - RNA, 18 nt, Artificial Sequence
  Synthetic
gaccuuuuguuacuugga

SEQ ID NO: 2687 - RNA, 24 nt, Artificial Sequence
  Synthetic
gucacagaccuuuuguuacuugga

SEQ ID NO: 2688 - RNA, 23 nt, Artificial Sequence
  Synthetic
gacauauuauuuaaaaucuugga

SEQ ID NO: 2689 - RNA, 24 nt, Artificial Sequence
  Synthetic
ggacauauuauuuaaaaucuugga

SEQ ID NO: 2690 - RNA, 23 nt, Artificial Sequence
  Synthetic
guuaaauuauguuuguucuugga

SEQ ID NO: 2691 - RNA, 23 nt, Artificial Sequence
  Synthetic
gauuuacuaaguaacuaguugga

SEQ ID NO: 2692 - RNA, 19 nt, Artificial Sequence
  Synthetic
gcaaagaucaguaguugga

SEQ ID NO: 2693 - RNA, 20 nt, Artificial Sequence
  Synthetic
ggcaaagaucaguaguugga

SEQ ID NO: 2694 - RNA, 21 nt, Artificial Sequence
  Synthetic
gggcaaagaucaguaguugga

SEQ ID NO: 2695 - RNA, 22 nt, Artificial Sequence
  Synthetic
ggggcaaagaucaguaguugga

SEQ ID NO: 2696 - RNA, 23 nt, Artificial Sequence
  Synthetic
gggggcaaagaucaguaguugga

SEQ ID NO: 2697 - RNA, 20 nt, Artificial Sequence
  Synthetic
gucagcucgaagagguugga

SEQ ID NO: 2698 - RNA, 21 nt, Artificial Sequence
  Synthetic
gagaggagagaguaauuugga

SEQ ID NO: 2699 - RNA, 22 nt, Artificial Sequence
  Synthetic
ggagaggagagaguaauuugga

SEQ ID NO: 2700 - RNA, 24 nt, Artificial Sequence
  Synthetic
guggagaggagagaguaauuugga

SEQ ID NO: 2701 - RNA, 18 nt, Artificial Sequence
  Synthetic
gaaaauacgaaguuugga

SEQ ID NO: 2702 - RNA, 21 nt, Artificial Sequence
  Synthetic
gcagaaaauacgaaguuugga

SEQ ID NO: 2703 - RNA, 20 nt, Artificial Sequence
  Synthetic
guacagaugccuuguuugga

SEQ ID NO: 2704 - RNA, 19 nt, Artificial Sequence
  Synthetic
guaccucugaaauuuugga

SEQ ID NO: 2705 - RNA, 20 nt, Artificial Sequence
  Synthetic
gguaccucugaaauuuugga

SEQ ID NO: 2706 - RNA, 22 nt, Artificial Sequence
  Synthetic
gagguaccucugaaauuuugga

SEQ ID NO: 2707 - RNA, 22 nt, Artificial Sequence
  Synthetic
guccuucuggaucucaaaauga

SEQ ID NO: 2708 - RNA, 23 nt, Artificial Sequence
  Synthetic
gacugugaaaggaaagaaaauga

SEQ ID NO: 2709 - RNA, 18 nt, Artificial Sequence
  Synthetic
gauauucaaguaaaauga

SEQ ID NO: 2710 - RNA, 21 nt, Artificial Sequence
  Synthetic
gaaaaauauuuauuaaaauga

SEQ ID NO: 2711 - RNA, 24 nt, Artificial Sequence
  Synthetic
gcugaaaaauauuuauuaaaauga

SEQ ID NO: 2712 - RNA, 22 nt, Artificial Sequence
  Synthetic
guuguucuuuuuuaacaaauga

SEQ ID NO: 2713 - RNA, 23 nt, Artificial Sequence
  Synthetic
gguuguucuuuuuuaacaaauga

SEQ ID NO: 2714 - RNA, 24 nt, Artificial Sequence
  Synthetic
gcucauccuuauuauuccaaauga

SEQ ID NO: 2715 - RNA, 20 nt, Artificial Sequence
  Synthetic
gauuugcuuuacagaaauga

SEQ ID NO: 2716 - RNA, 21 nt, Artificial Sequence
  Synthetic
ggauuugcuuuacagaaauga

SEQ ID NO: 2717 - RNA, 22 nt, Artificial Sequence
  Synthetic
gggauuugcuuuacagaaauga

SEQ ID NO: 2718 - RNA, 23 nt, Artificial Sequence
  Synthetic
guaauugccauuuacugaaauga

SEQ ID NO: 2719 - RNA, 18 nt, Artificial Sequence
  Synthetic
gagcaauagaaacaauga

SEQ ID NO: 2720 - RNA, 19 nt, Artificial Sequence
  Synthetic
ggagcaauagaaacaauga

SEQ ID NO: 2721 - RNA, 20 nt, Artificial Sequence
  Synthetic
gggagcaauagaaacaauga

SEQ ID NO: 2722 - RNA, 18 nt, Artificial Sequence
  Synthetic
gacuaucugaaacaauga

SEQ ID NO: 2723 - RNA, 21 nt, Artificial Sequence
  Synthetic
guugacuaucugaaacaauga

SEQ ID NO: 2724 - RNA, 24 nt, Artificial Sequence
  Synthetic
guuguugacuaucugaaacaauga

SEQ ID NO: 2725 - RNA, 18 nt, Artificial Sequence
  Synthetic
gugccagccgaccaauga

SEQ ID NO: 2726 - RNA, 19 nt, Artificial Sequence
  Synthetic
guuuaaaggaagucaauga

SEQ ID NO: 2727 - RNA, 21 nt, Artificial Sequence
  Synthetic
guuuuguuuccucuagaauga

SEQ ID NO: 2728 - RNA, 23 nt, Artificial Sequence
  Synthetic
guguuuuguuuccucuagaauga

SEQ ID NO: 2729 - RNA, 18 nt, Artificial Sequence
  Synthetic
ggauagaacccggaauga

SEQ ID NO: 2730 - RNA, 22 nt, Artificial Sequence
  Synthetic
gauaggauagaacccggaauga

SEQ ID NO: 2731 - RNA, 23 nt, Artificial Sequence
  Synthetic
ggauaggauagaacccggaauga

SEQ ID NO: 2732 - RNA, 24 nt, Artificial Sequence
  Synthetic
gggauaggauagaacccggaauga

SEQ ID NO: 2733 - RNA, 22 nt, Artificial Sequence
  Synthetic
gaucucaaaguagugggaauga

SEQ ID NO: 2734 - RNA, 19 nt, Artificial Sequence
  Synthetic
gucuagucaacuggaauga

SEQ ID NO: 2735 - RNA, 20 nt, Artificial Sequence
  Synthetic
ggucuagucaacuggaauga

SEQ ID NO: 2736 - RNA, 18 nt, Artificial Sequence
  Synthetic
guggauugagaugaauga

SEQ ID NO: 2737 - RNA, 22 nt, Artificial Sequence
  Synthetic
gcaaguggauugagaugaauga

SEQ ID NO: 2738 - RNA, 22 nt, Artificial Sequence
  Synthetic
guaaaagcaaccauaugaauga

SEQ ID NO: 2739 - RNA, 23 nt, Artificial Sequence
  Synthetic
gguaaaagcaaccauaugaauga

SEQ ID NO: 2740 - RNA, 19 nt, Artificial Sequence
  Synthetic
gcauucacauacugaauga

SEQ ID NO: 2741 - RNA, 21 nt, Artificial Sequence
  Synthetic
gaaaagacccugaaauaauga

SEQ ID NO: 2742 - RNA, 23 nt, Artificial Sequence
  Synthetic
gagaaaagacccugaaauaauga

SEQ ID NO: 2743 - RNA, 18 nt, Artificial Sequence
  Synthetic
gucaaguugagauaauga

SEQ ID NO: 2744 - RNA, 21 nt, Artificial Sequence
  Synthetic
guagucaaguugagauaauga

SEQ ID NO: 2745 - RNA, 22 nt, Artificial Sequence
  Synthetic
gaaacaaaugcuucuauaauga

SEQ ID NO: 2746 - RNA, 23 nt, Artificial Sequence
  Synthetic
guuuagugaaaccaaaguaauga

SEQ ID NO: 2747 - RNA, 20 nt, Artificial Sequence
  Synthetic
guauagcuuuaauaacauga

SEQ ID NO: 2748 - RNA, 23 nt, Artificial Sequence
  Synthetic
gcuguauagcuuuaauaacauga

SEQ ID NO: 2749 - RNA, 19 nt, Artificial Sequence
  Synthetic
guaaauuaauuuaacauga

SEQ ID NO: 2750 - RNA, 24 nt, Artificial Sequence
  Synthetic
gcauuguaaauuaauuuaacauga

SEQ ID NO: 2751 - RNA, 18 nt, Artificial Sequence
  Synthetic
gcaucuguaucuacauga

SEQ ID NO: 2752 - RNA, 20 nt, Artificial Sequence
  Synthetic
gagcaucuguaucuacauga

SEQ ID NO: 2753 - RNA, 22 nt, Artificial Sequence
  Synthetic
gugagcaucuguaucuacauga

SEQ ID NO: 2754 - RNA, 19 nt, Artificial Sequence
  Synthetic
gagaaagugauuagcauga

SEQ ID NO: 2755 - RNA, 20 nt, Artificial Sequence
  Synthetic
gaaauggccugugcucauga

SEQ ID NO: 2756 - RNA, 24 nt, Artificial Sequence
  Synthetic
guuugaaauggccugugcucauga

SEQ ID NO: 2757 - RNA, 18 nt, Artificial Sequence
  Synthetic
gccuguugacucucauga

SEQ ID NO: 2758 - RNA, 18 nt, Artificial Sequence
  Synthetic
guccugaaguucucauga

SEQ ID NO: 2759 - RNA, 19 nt, Artificial Sequence
  Synthetic
gucacuuugggauucauga

SEQ ID NO: 2760 - RNA, 18 nt, Artificial Sequence
  Synthetic
gaagaaaguccuucauga

SEQ ID NO: 2761 - RNA, 21 nt, Artificial Sequence
  Synthetic
gaugaagaaaguccuucauga

SEQ ID NO: 2762 - RNA, 22 nt, Artificial Sequence
  Synthetic
ggaugaagaaaguccuucauga

SEQ ID NO: 2763 - RNA, 23 nt, Artificial Sequence
  Synthetic
gggaugaagaaaguccuucauga

SEQ ID NO: 2764 - RNA, 21 nt, Artificial Sequence
  Synthetic
gccugcagcacauuuucauga

SEQ ID NO: 2765 - RNA, 24 nt, Artificial Sequence
  Synthetic
guagccugcagcacauuuucauga

SEQ ID NO: 2766 - RNA, 18 nt, Artificial Sequence
  Synthetic
gaaguaggaacaagauga

SEQ ID NO: 2767 - RNA, 24 nt, Artificial Sequence
  Synthetic
gauacugaaguaggaacaagauga

SEQ ID NO: 2768 - RNA, 18 nt, Artificial Sequence
  Synthetic
gcaaguggauugagauga

SEQ ID NO: 2769 - RNA, 21 nt, Artificial Sequence
  Synthetic
gaugcaaguggauugagauga

SEQ ID NO: 2770 - RNA, 22 nt, Artificial Sequence
  Synthetic
ggaugcaaguggauugagauga

SEQ ID NO: 2771 - RNA, 19 nt, Artificial Sequence
  Synthetic
gcuguuuccauguagauga

SEQ ID NO: 2772 - RNA, 18 nt, Artificial Sequence
  Synthetic
ggaucucucugacgauga

SEQ ID NO: 2773 - RNA, 21 nt, Artificial Sequence
  Synthetic
gcaggaucucucugacgauga

SEQ ID NO: 2774 - RNA, 19 nt, Artificial Sequence
  Synthetic
gcugaaguggcaaggauga

SEQ ID NO: 2775 - RNA, 21 nt, Artificial Sequence
  Synthetic
gugcugaaguggcaaggauga

SEQ ID NO: 2776 - RNA, 22 nt, Artificial Sequence
  Synthetic
ggugcugaaguggcaaggauga

SEQ ID NO: 2777 - RNA, 23 nt, Artificial Sequence
  Synthetic
gggugcugaaguggcaaggauga

SEQ ID NO: 2778 - RNA, 20 nt, Artificial Sequence
  Synthetic
gacuuuuugugucaggauga

SEQ ID NO: 2779 - RNA, 21 nt, Artificial Sequence
  Synthetic
ggacuuuuugugucaggauga

SEQ ID NO: 2780 - RNA, 19 nt, Artificial Sequence
  Synthetic
gcuaagacauugaggauga

SEQ ID NO: 2781 - RNA, 20 nt, Artificial Sequence
  Synthetic
ggcuaagacauugaggauga

SEQ ID NO: 2782 - RNA, 18 nt, Artificial Sequence
  Synthetic
gcuuaauuggaaugauga

SEQ ID NO: 2783 - RNA, 18 nt, Artificial Sequence
  Synthetic
gcaacuaugaagugauga

SEQ ID NO: 2784 - RNA, 20 nt, Artificial Sequence
  Synthetic
gugcaacuaugaagugauga

SEQ ID NO: 2785 - RNA, 23 nt, Artificial Sequence
  Synthetic
gaaaauaucuuaugaagugauga

SEQ ID NO: 2786 - RNA, 24 nt, Artificial Sequence
  Synthetic
ggaaaauaucuuaugaagugauga

SEQ ID NO: 2787 - RNA, 18 nt, Artificial Sequence
  Synthetic
gcaaauuuacagugauga

SEQ ID NO: 2788 - RNA, 20 nt, Artificial Sequence
  Synthetic
gugcaaauuuacagugauga

SEQ ID NO: 2789 - RNA, 23 nt, Artificial Sequence
  Synthetic
gaugugcaaauuuacagugauga

SEQ ID NO: 2790 - RNA, 24 nt, Artificial Sequence
  Synthetic
gaacgucuaagauuaaggugauga

SEQ ID NO: 2791 - RNA, 19 nt, Artificial Sequence
  Synthetic
gugcaugcacaggugauga

SEQ ID NO: 2792 - RNA, 23 nt, Artificial Sequence
  Synthetic
gcaucuguucucuugcuugauga

SEQ ID NO: 2793 - RNA, 24 nt, Artificial Sequence
  Synthetic
guauuaugaaaugaguuuugauga

SEQ ID NO: 2794 - RNA, 19 nt, Artificial Sequence
  Synthetic
gcuauguacaaaaauauga

SEQ ID NO: 2795 - RNA, 18 nt, Artificial Sequence
  Synthetic
guaaaagcaaccauauga

SEQ ID NO: 2796 - RNA, 19 nt, Artificial Sequence
  Synthetic
gguaaaagcaaccauauga

SEQ ID NO: 2797 - RNA, 22 nt, Artificial Sequence
  Synthetic
gucucaaaaacuacaacuauga

SEQ ID NO: 2798 - RNA, 23 nt, Artificial Sequence
  Synthetic
ggucucaaaaacuacaacuauga

SEQ ID NO: 2799 - RNA, 18 nt, Artificial Sequence
  Synthetic
gaucauugcucacuauga

SEQ ID NO: 2800 - RNA, 19 nt, Artificial Sequence
  Synthetic
ggaucauugcucacuauga

SEQ ID NO: 2801 - RNA, 24 nt, Artificial Sequence
  Synthetic
gaauaggaucauugcucacuauga

SEQ ID NO: 2802 - RNA, 22 nt, Artificial Sequence
  Synthetic
gcuuuugagaaucagacuauga

SEQ ID NO: 2803 - RNA, 21 nt, Artificial Sequence
  Synthetic
guuuuaaaacaugggcuauga

SEQ ID NO: 2804 - RNA, 22 nt, Artificial Sequence
  Synthetic
gauuccagggaauagaguauga

SEQ ID NO: 2805 - RNA, 24 nt, Artificial Sequence
  Synthetic
gugauuccagggaauagaguauga

SEQ ID NO: 2806 - RNA, 23 nt, Artificial Sequence
  Synthetic
gacaucagcuacucgggguauga

SEQ ID NO: 2807 - RNA, 24 nt, Artificial Sequence
  Synthetic
ggacaucagcuacucgggguauga

SEQ ID NO: 2808 - RNA, 22 nt, Artificial Sequence
  Synthetic
gaaggguaauaaagcauuauga

SEQ ID NO: 2809 - RNA, 24 nt, Artificial Sequence
  Synthetic
gagaaggguaauaaagcauuauga

SEQ ID NO: 2810 - RNA, 19 nt, Artificial Sequence
  Synthetic
gaaggcuuaauguuuauga

SEQ ID NO: 2811 - RNA, 22 nt, Artificial Sequence
  Synthetic
gaagaaggcuuaauguuuauga

SEQ ID NO: 2812 - RNA, 23 nt, Artificial Sequence
  Synthetic
ggaagaaggcuuaauguuuauga

SEQ ID NO: 2813 - RNA, 24 nt, Artificial Sequence
  Synthetic
gggaagaaggcuuaauguuuauga

SEQ ID NO: 2814 - RNA, 18 nt, Artificial Sequence
  Synthetic
gcaugcaauauuuuauga

SEQ ID NO: 2815 - RNA, 22 nt, Artificial Sequence
  Synthetic
guaugcaugcaauauuuuauga

SEQ ID NO: 2816 - RNA, 24 nt, Artificial Sequence
  Synthetic
gcucuuaucauauaggaaaacuga

SEQ ID NO: 2817 - RNA, 18 nt, Artificial Sequence
  Synthetic
gacgcccuagugaacuga

SEQ ID NO: 2818 - RNA, 20 nt, Artificial Sequence
  Synthetic
gcugaagaauagguaacuga

SEQ ID NO: 2819 - RNA, 21 nt, Artificial Sequence
  Synthetic
ggcugaagaauagguaacuga

SEQ ID NO: 2820 - RNA, 24 nt, Artificial Sequence
  Synthetic
gauccacuuaaaagacuuaacuga

SEQ ID NO: 2821 - RNA, 19 nt, Artificial Sequence
  Synthetic
gcauuuugcacaccacuga

SEQ ID NO: 2822 - RNA, 18 nt, Artificial Sequence
  Synthetic
guccauuuuaaggacuga

SEQ ID NO: 2823 - RNA, 21 nt, Artificial Sequence
  Synthetic
guaguccauuuuaaggacuga

SEQ ID NO: 2824 - RNA, 22 nt, Artificial Sequence
  Synthetic
gacucaugcauucacauacuga

SEQ ID NO: 2825 - RNA, 22 nt, Artificial Sequence
  Synthetic
gcucauuucuguuuucuacuga

SEQ ID NO: 2826 - RNA, 19 nt, Artificial Sequence
  Synthetic
gucaauuggcagguacuga

SEQ ID NO: 2827 - RNA, 23 nt, Artificial Sequence
  Synthetic
guucgucaauuggcagguacuga

SEQ ID NO: 2828 - RNA, 24 nt, Artificial Sequence
  Synthetic
gguucgucaauuggcagguacuga

SEQ ID NO: 2829 - RNA, 21 nt, Artificial Sequence
  Synthetic
gaaugaacguccaaucccuga

SEQ ID NO: 2830 - RNA, 20 nt, Artificial Sequence
  Synthetic
gcuuggcauauauauccuga

SEQ ID NO: 2831 - RNA, 18 nt, Artificial Sequence
  Synthetic
gagucuauuuucuccuga

SEQ ID NO: 2832 - RNA, 22 nt, Artificial Sequence
  Synthetic
gcaugagucuauuuucuccuga

SEQ ID NO: 2833 - RNA, 19 nt, Artificial Sequence
  Synthetic
gcugugucuacuguccuga

SEQ ID NO: 2834 - RNA, 21 nt, Artificial Sequence
  Synthetic
gagcugugucuacuguccuga

SEQ ID NO: 2835 - RNA, 18 nt, Artificial Sequence
  Synthetic
gguuucuuacuguccuga

SEQ ID NO: 2836 - RNA, 24 nt, Artificial Sequence
  Synthetic
gaaaaugguuucuuacuguccuga

SEQ ID NO: 2837 - RNA, 18 nt, Artificial Sequence
  Synthetic
ggccauaguaaaagcuga

SEQ ID NO: 2838 - RNA, 19 nt, Artificial Sequence
  Synthetic
gggccauaguaaaagcuga

SEQ ID NO: 2839 - RNA, 24 nt, Artificial Sequence
  Synthetic
gaucagggccauaguaaaagcuga

SEQ ID NO: 2840 - RNA, 22 nt, Artificial Sequence
  Synthetic
guuaauggcacauuucagcuga

SEQ ID NO: 2841 - RNA, 20 nt, Artificial Sequence
  Synthetic
gcuuaguaugugagagcuga

SEQ ID NO: 2842 - RNA, 18 nt, Artificial Sequence
  Synthetic
guuauucugaaaugcuga

SEQ ID NO: 2843 - RNA, 21 nt, Artificial Sequence
  Synthetic
gacuggaaagacacaugcuga

SEQ ID NO: 2844 - RNA, 21 nt, Artificial Sequence
  Synthetic
gaauaagaaauuucaaucuga

SEQ ID NO: 2845 - RNA, 19 nt, Artificial Sequence
  Synthetic
gugauaaaagugcaucuga

SEQ ID NO: 2846 - RNA, 21 nt, Artificial Sequence
  Synthetic
gcgugauaaaagugcaucuga

SEQ ID NO: 2847 - RNA, 18 nt, Artificial Sequence
  Synthetic
gggaaagacaagaucuga

SEQ ID NO: 2848 - RNA, 20 nt, Artificial Sequence
  Synthetic
gugggaaagacaagaucuga

SEQ ID NO: 2849 - RNA, 21 nt, Artificial Sequence
  Synthetic
ggugggaaagacaagaucuga

SEQ ID NO: 2850 - RNA, 24 nt, Artificial Sequence
  Synthetic
gauggugggaaagacaagaucuga

SEQ ID NO: 2851 - RNA, 23 nt, Artificial Sequence
  Synthetic
gaauuaucuuagcccugaucuga

SEQ ID NO: 2852 - RNA, 24 nt, Artificial Sequence
  Synthetic
ggaauuaucuuagcccugaucuga

SEQ ID NO: 2853 - RNA, 24 nt, Artificial Sequence
  Synthetic
gccuacaggcaguggcaacucuga

SEQ ID NO: 2854 - RNA, 24 nt, Artificial Sequence
  Synthetic
gcuuauagaaaauggagacucuga

SEQ ID NO: 2855 - RNA, 24 nt, Artificial Sequence
  Synthetic
gcacaaaacauauguggucucuga

SEQ ID NO: 2856 - RNA, 22 nt, Artificial Sequence
  Synthetic
guuuuccaucaagauucucuga

SEQ ID NO: 2857 - RNA, 23 nt, Artificial Sequence
  Synthetic
gguuuuccaucaagauucucuga

SEQ ID NO: 2858 - RNA, 19 nt, Artificial Sequence
  Synthetic
gcuaauuagcucagucuga

SEQ ID NO: 2859 - RNA, 20 nt, Artificial Sequence
  Synthetic
ggcuaauuagcucagucuga

SEQ ID NO: 2860 - RNA, 22 nt, Artificial Sequence
  Synthetic
guggcuaauuagcucagucuga

SEQ ID NO: 2861 - RNA, 23 nt, Artificial Sequence
  Synthetic
gcacuugacuaagguucuucuga

SEQ ID NO: 2862 - RNA, 18 nt, Artificial Sequence
  Synthetic
gccaacuuucuuuucuga

SEQ ID NO: 2863 - RNA, 20 nt, Artificial Sequence
  Synthetic
gagccaacuuucuuuucuga

SEQ ID NO: 2864 - RNA, 18 nt, Artificial Sequence
  Synthetic
ggaccaagcccaaaguga

SEQ ID NO: 2865 - RNA, 24 nt, Artificial Sequence
  Synthetic
gcacauggaccaagcccaaaguga

SEQ ID NO: 2866 - RNA, 21 nt, Artificial Sequence
  Synthetic
gaauaacccuaugcaaaguga

SEQ ID NO: 2867 - RNA, 18 nt, Artificial Sequence
  Synthetic
gauuauuguucaaaguga

SEQ ID NO: 2868 - RNA, 22 nt, Artificial Sequence
  Synthetic
gauagauuauuguucaaaguga

SEQ ID NO: 2869 - RNA, 22 nt, Artificial Sequence
  Synthetic
gaaauuacuuuguucaaaguga

SEQ ID NO: 2870 - RNA, 22 nt, Artificial Sequence
  Synthetic
gucaauauguuggggaaaguga

SEQ ID NO: 2871 - RNA, 24 nt, Artificial Sequence
  Synthetic
gaucaagaauaauauugaaaguga

SEQ ID NO: 2872 - RNA, 23 nt, Artificial Sequence
  Synthetic
gaaguaaaguaaaagacaaguga

SEQ ID NO: 2873 - RNA, 21 nt, Artificial Sequence
  Synthetic
gcaaaaguauaguucaaguga

SEQ ID NO: 2874 - RNA, 22 nt, Artificial Sequence
  Synthetic
ggcaaaaguauaguucaaguga

SEQ ID NO: 2875 - RNA, 24 nt, Artificial Sequence
  Synthetic
guuuauauagccgucuugaaguga

SEQ ID NO: 2876 - RNA, 18 nt, Artificial Sequence
  Synthetic
gaagcuauuacuaaguga

SEQ ID NO: 2877 - RNA, 19 nt, Artificial Sequence
  Synthetic
ggaagcuauuacuaaguga

SEQ ID NO: 2878 - RNA, 20 nt, Artificial Sequence
  Synthetic
gggaagcuauuacuaaguga

SEQ ID NO: 2879 - RNA, 21 nt, Artificial Sequence
  Synthetic
ggggaagcuauuacuaaguga

SEQ ID NO: 2880 - RNA, 23 nt, Artificial Sequence
  Synthetic
guauauagucuuauuuuaaguga

SEQ ID NO: 2881 - RNA, 20 nt, Artificial Sequence
  Synthetic
guuaacauccaagacaguga

SEQ ID NO: 2882 - RNA, 21 nt, Artificial Sequence
  Synthetic
gucuaguggugaaagcaguga

SEQ ID NO: 2883 - RNA, 19 nt, Artificial Sequence
  Synthetic
guagaauguuaugcaguga

SEQ ID NO: 2884 - RNA, 21 nt, Artificial Sequence
  Synthetic
guguagaauguuaugcaguga

SEQ ID NO: 2885 - RNA, 23 nt, Artificial Sequence
  Synthetic
gcaauagccccauugcucaguga

SEQ ID NO: 2886 - RNA, 24 nt, Artificial Sequence
  Synthetic
ggcaauagccccauugcucaguga

SEQ ID NO: 2887 - RNA, 19 nt, Artificial Sequence
  Synthetic
gugcgcacuaucucaguga

SEQ ID NO: 2888 - RNA, 20 nt, Artificial Sequence
  Synthetic
ggugcgcacuaucucaguga

SEQ ID NO: 2889 - RNA, 24 nt, Artificial Sequence
  Synthetic
guucauccucaaauguaagaguga

SEQ ID NO: 2890 - RNA, 23 nt, Artificial Sequence
  Synthetic
gaauaaguaagugaauggaguga

SEQ ID NO: 2891 - RNA, 18 nt, Artificial Sequence
  Synthetic
gcuugggagguggaguga

SEQ ID NO: 2892 - RNA, 19 nt, Artificial Sequence
  Synthetic
ggcuugggagguggaguga

SEQ ID NO: 2893 - RNA, 21 nt, Artificial Sequence
  Synthetic
gaggcuugggagguggaguga

SEQ ID NO: 2894 - RNA, 21 nt, Artificial Sequence
  Synthetic
guaagugaauggagugaguga

SEQ ID NO: 2895 - RNA, 18 nt, Artificial Sequence
  Synthetic
guacauuuuaacuaguga

SEQ ID NO: 2896 - RNA, 19 nt, Artificial Sequence
  Synthetic
gguacauuuuaacuaguga

SEQ ID NO: 2897 - RNA, 24 nt, Artificial Sequence
  Synthetic
gaaaagguacauuuuaacuaguga

SEQ ID NO: 2898 - RNA, 18 nt, Artificial Sequence
  Synthetic
ggacuuggucgguaguga

SEQ ID NO: 2899 - RNA, 22 nt, Artificial Sequence
  Synthetic
gcuuggacuuggucgguaguga

SEQ ID NO: 2900 - RNA, 23 nt, Artificial Sequence
  Synthetic
ggcuuggacuuggucgguaguga

SEQ ID NO: 2901 - RNA, 22 nt, Artificial Sequence
  Synthetic
guacuuuuaaugcauuuaguga

SEQ ID NO: 2902 - RNA, 23 nt, Artificial Sequence
  Synthetic
gguacuuuuaaugcauuuaguga

SEQ ID NO: 2903 - RNA, 20 nt, Artificial Sequence
  Synthetic
guacaaagaccuuuuaguga

SEQ ID NO: 2904 - RNA, 22 nt, Artificial Sequence
  Synthetic
guguacaaagaccuuuuaguga

SEQ ID NO: 2905 - RNA, 23 nt, Artificial Sequence
  Synthetic
gguguacaaagaccuuuuaguga

SEQ ID NO: 2906 - RNA, 19 nt, Artificial Sequence
  Synthetic
gccaggaaugauuacguga

SEQ ID NO: 2907 - RNA, 23 nt, Artificial Sequence
  Synthetic
gaauaaucuaguugaagagguga

SEQ ID NO: 2908 - RNA, 23 nt, Artificial Sequence
  Synthetic
gacuucagugggaccugagguga

SEQ ID NO: 2909 - RNA, 21 nt, Artificial Sequence
  Synthetic
gcuuacaucugcuuaggguga

SEQ ID NO: 2910 - RNA, 19 nt, Artificial Sequence
  Synthetic
gucguuuuaauugggguga

SEQ ID NO: 2911 - RNA, 24 nt, Artificial Sequence
  Synthetic
gauaugucguuuuaauugggguga

SEQ ID NO: 2912 - RNA, 24 nt, Artificial Sequence
  Synthetic
guuuaauaaugauguuugggguga

SEQ ID NO: 2913 - RNA, 19 nt, Artificial Sequence
  Synthetic
guugagacgguguggguga

SEQ ID NO: 2914 - RNA, 18 nt, Artificial Sequence
  Synthetic
guuaagagcaggugguga

SEQ ID NO: 2915 - RNA, 21 nt, Artificial Sequence
  Synthetic
guuguuaagagcaggugguga

SEQ ID NO: 2916 - RNA, 21 nt, Artificial Sequence
  Synthetic
gcauacacuauguggugguga

SEQ ID NO: 2917 - RNA, 22 nt, Artificial Sequence
  Synthetic
ggcauacacuauguggugguga

SEQ ID NO: 2918 - RNA, 23 nt, Artificial Sequence
  Synthetic
gggcauacacuauguggugguga

SEQ ID NO: 2919 - RNA, 23 nt, Artificial Sequence
  Synthetic
gaaaauuaauguuagaaauguga

SEQ ID NO: 2920 - RNA, 19 nt, Artificial Sequence
  Synthetic
gauacuacuagggauguga

SEQ ID NO: 2921 - RNA, 23 nt, Artificial Sequence
  Synthetic
guaugauacuacuagggauguga

SEQ ID NO: 2922 - RNA, 19 nt, Artificial Sequence
  Synthetic
gaugccugccuuuauguga

SEQ ID NO: 2923 - RNA, 22 nt, Artificial Sequence
  Synthetic
gcagaugccugccuuuauguga

SEQ ID NO: 2924 - RNA, 23 nt, Artificial Sequence
  Synthetic
ggcagaugccugccuuuauguga

SEQ ID NO: 2925 - RNA, 23 nt, Artificial Sequence
  Synthetic
gucaauaaaaucuuauacuguga

SEQ ID NO: 2926 - RNA, 18 nt, Artificial Sequence
  Synthetic
guacaguaaaaucuguga

SEQ ID NO: 2927 - RNA, 19 nt, Artificial Sequence
  Synthetic
gguacaguaaaaucuguga

SEQ ID NO: 2928 - RNA, 23 nt, Artificial Sequence
  Synthetic
gauagguacaguaaaaucuguga

SEQ ID NO: 2929 - RNA, 18 nt, Artificial Sequence
  Synthetic
gcuuuguguuuucuguga

SEQ ID NO: 2930 - RNA, 22 nt, Artificial Sequence
  Synthetic
gccuacuugaggaaaaguguga

SEQ ID NO: 2931 - RNA, 20 nt, Artificial Sequence
  Synthetic
gcagggccugguagguguga

SEQ ID NO: 2932 - RNA, 21 nt, Artificial Sequence
  Synthetic
ggcagggccugguagguguga

SEQ ID NO: 2933 - RNA, 23 nt, Artificial Sequence
  Synthetic
gaggcagggccugguagguguga

SEQ ID NO: 2934 - RNA, 24 nt, Artificial Sequence
  Synthetic
ggaggcagggccugguagguguga

SEQ ID NO: 2935 - RNA, 18 nt, Artificial Sequence
  Synthetic
ggaauuuuugcauuguga

SEQ ID NO: 2936 - RNA, 19 nt, Artificial Sequence
  Synthetic
gggaauuuuugcauuguga

SEQ ID NO: 2937 - RNA, 19 nt, Artificial Sequence
  Synthetic
guaaaauuacagauuguga

SEQ ID NO: 2938 - RNA, 20 nt, Artificial Sequence
  Synthetic
gguaaaauuacagauuguga

SEQ ID NO: 2939 - RNA, 21 nt, Artificial Sequence
  Synthetic
ggguaaaauuacagauuguga

SEQ ID NO: 2940 - RNA, 22 nt, Artificial Sequence
  Synthetic
gggguaaaauuacagauuguga

SEQ ID NO: 2941 - RNA, 20 nt, Artificial Sequence
  Synthetic
gaauguuccuugacuuguga

SEQ ID NO: 2942 - RNA, 21 nt, Artificial Sequence
  Synthetic
gauaucucccauggcuuguga

SEQ ID NO: 2943 - RNA, 18 nt, Artificial Sequence
  Synthetic
guaauauuuaaguuguga

SEQ ID NO: 2944 - RNA, 19 nt, Artificial Sequence
  Synthetic
gguaauauuuaaguuguga

SEQ ID NO: 2945 - RNA, 20 nt, Artificial Sequence
  Synthetic
ggguaauauuuaaguuguga

SEQ ID NO: 2946 - RNA, 19 nt, Artificial Sequence
  Synthetic
gcagcuuuguggguuguga

SEQ ID NO: 2947 - RNA, 22 nt, Artificial Sequence
  Synthetic
gaauucuuuauucauuuuguga

SEQ ID NO: 2948 - RNA, 24 nt, Artificial Sequence
  Synthetic
gaaaauucucaaaguguaaauuga

SEQ ID NO: 2949 - RNA, 21 nt, Artificial Sequence
  Synthetic
gaaaacagugggagcaauuga

SEQ ID NO: 2950 - RNA, 18 nt, Artificial Sequence
  Synthetic
gaaaugcauacuaauuga

SEQ ID NO: 2951 - RNA, 18 nt, Artificial Sequence
  Synthetic
gcauaaagaggucauuga

SEQ ID NO: 2952 - RNA, 22 nt, Artificial Sequence
  Synthetic
gacugcauaaagaggucauuga

SEQ ID NO: 2953 - RNA, 23 nt, Artificial Sequence
  Synthetic
ggacugcauaaagaggucauuga

SEQ ID NO: 2954 - RNA, 19 nt, Artificial Sequence
  Synthetic
guuagccauguuucauuga

SEQ ID NO: 2955 - RNA, 21 nt, Artificial Sequence
  Synthetic
ggauggucuuuguuucauuga

SEQ ID NO: 2956 - RNA, 22 nt, Artificial Sequence
  Synthetic
gaaauuaacauucagagauuga

SEQ ID NO: 2957 - RNA, 19 nt, Artificial Sequence
  Synthetic
gcuacuagguaaauauuga

SEQ ID NO: 2958 - RNA, 22 nt, Artificial Sequence
  Synthetic
gucaucuuauuuuaaauauuga

SEQ ID NO: 2959 - RNA, 21 nt, Artificial Sequence
  Synthetic
gcuucuuccaccauauauuga

SEQ ID NO: 2960 - RNA, 18 nt, Artificial Sequence
  Synthetic
ggaagguguauauauuga

SEQ ID NO: 2961 - RNA, 20 nt, Artificial Sequence
  Synthetic
gaggaagguguauauauuga

SEQ ID NO: 2962 - RNA, 23 nt, Artificial Sequence
  Synthetic
gauaccuaaauauagcguauuga

SEQ ID NO: 2963 - RNA, 24 nt, Artificial Sequence
  Synthetic
ggauaccuaaauauagcguauuga

SEQ ID NO: 2964 - RNA, 18 nt, Artificial Sequence
  Synthetic
ggauagauggauuauuga

SEQ ID NO: 2965 - RNA, 19 nt, Artificial Sequence
  Synthetic
gggauagauggauuauuga

SEQ ID NO: 2966 - RNA, 21 nt, Artificial Sequence
  Synthetic
gagggauagauggauuauuga

SEQ ID NO: 2967 - RNA, 19 nt, Artificial Sequence
  Synthetic
guaagugcaguuuuauuga

SEQ ID NO: 2968 - RNA, 18 nt, Artificial Sequence
  Synthetic
gcaguuuagcauacuuga

SEQ ID NO: 2969 - RNA, 24 nt, Artificial Sequence
  Synthetic
gacuuauuaaguuaugcaccuuga

SEQ ID NO: 2970 - RNA, 20 nt, Artificial Sequence
  Synthetic
gaagucacagugaugcuuga

SEQ ID NO: 2971 - RNA, 20 nt, Artificial Sequence
  Synthetic
guagcuuagggauaucuuga

SEQ ID NO: 2972 - RNA, 19 nt, Artificial Sequence
  Synthetic
gcaaaauaaucaaaguuga

SEQ ID NO: 2973 - RNA, 20 nt, Artificial Sequence
  Synthetic
ggcaaaauaaucaaaguuga

SEQ ID NO: 2974 - RNA, 22 nt, Artificial Sequence
  Synthetic
gucuauggacaggcuaaguuga

SEQ ID NO: 2975 - RNA, 22 nt, Artificial Sequence
  Synthetic
guccuagggcucaguuaguuga

SEQ ID NO: 2976 - RNA, 20 nt, Artificial Sequence
  Synthetic
gaucuuuguauacucguuga

SEQ ID NO: 2977 - RNA, 22 nt, Artificial Sequence
  Synthetic
gcgaucuuuguauacucguuga

SEQ ID NO: 2978 - RNA, 24 nt, Artificial Sequence
  Synthetic
guuauucaauugacguaauguuga

SEQ ID NO: 2979 - RNA, 19 nt, Artificial Sequence
  Synthetic
gccuucuuucuucuguuga

SEQ ID NO: 2980 - RNA, 18 nt, Artificial Sequence
  Synthetic
gaaagcagagauuguuga

SEQ ID NO: 2981 - RNA, 21 nt, Artificial Sequence
  Synthetic
guugaaagcagagauuguuga

SEQ ID NO: 2982 - RNA, 21 nt, Artificial Sequence
  Synthetic
gauuugcuaauggauuguuga

SEQ ID NO: 2983 - RNA, 18 nt, Artificial Sequence
  Synthetic
gagaugcauaaaauuuga

SEQ ID NO: 2984 - RNA, 22 nt, Artificial Sequence
  Synthetic
gcuugagaugcauaaaauuuga

SEQ ID NO: 2985 - RNA, 24 nt, Artificial Sequence
  Synthetic
gugcuugagaugcauaaaauuuga

SEQ ID NO: 2986 - RNA, 21 nt, Artificial Sequence
  Synthetic
gagaauuguuuuauaauuuga

SEQ ID NO: 2987 - RNA, 23 nt, Artificial Sequence
  Synthetic
gcgagaauuguuuuauaauuuga

SEQ ID NO: 2988 - RNA, 18 nt, Artificial Sequence
  Synthetic
guauucagguugauuuga

SEQ ID NO: 2989 - RNA, 21 nt, Artificial Sequence
  Synthetic
gaaguauucagguugauuuga

SEQ ID NO: 2990 - RNA, 24 nt, Artificial Sequence
  Synthetic
gaugaaguauucagguugauuuga

SEQ ID NO: 2991 - RNA, 20 nt, Artificial Sequence
  Synthetic
gacaggaccuuuuuauuuga

SEQ ID NO: 2992 - RNA, 21 nt, Artificial Sequence
  Synthetic
gcucaccugcauaaacuuuga

SEQ ID NO: 2993 - RNA, 23 nt, Artificial Sequence
  Synthetic
gugcucaccugcauaaacuuuga

SEQ ID NO: 2994 - RNA, 24 nt, Artificial Sequence
  Synthetic
ggugcucaccugcauaaacuuuga

SEQ ID NO: 2995 - RNA, 20 nt, Artificial Sequence
  Synthetic
gcacguaaacaaggcuuuga

SEQ ID NO: 2996 - RNA, 21 nt, Artificial Sequence
  Synthetic
ggcacguaaacaaggcuuuga

SEQ ID NO: 2997 - RNA, 24 nt, Artificial Sequence
  Synthetic
guccuucauccaccugaucuuuga

SEQ ID NO: 2998 - RNA, 24 nt, Artificial Sequence
  Synthetic
gaaaauacaacaaauaaauuuuga

SEQ ID NO: 2999 - RNA, 21 nt, Artificial Sequence
  Synthetic
gucaugggaaagugauuuuga

SEQ ID NO: 3000 - RNA, 24 nt, Artificial Sequence
  Synthetic
gaagucaugggaaagugauuuuga

SEQ ID NO: 3001 - RNA, 20 nt, Artificial Sequence
  Synthetic
gucuguguccuuuguuuuga

SEQ ID NO: 3002 - RNA, 18 nt, Artificial Sequence
  Synthetic
ggaaaauguacuuuuuga

SEQ ID NO: 3003 - RNA, 20 nt, Artificial Sequence
  Synthetic
guggaaaauguacuuuuuga

SEQ ID NO: 3004 - RNA, 23 nt, Artificial Sequence
  Synthetic
guaguggaaaauguacuuuuuga

SEQ ID NO: 3005 - RNA, 23 nt, Artificial Sequence
  Synthetic
gccauuucugagacacaaaaaua

SEQ ID NO: 3006 - RNA, 23 nt, Artificial Sequence
  Synthetic
gaaggauuaauaaauacaaaaua

SEQ ID NO: 3007 - RNA, 21 nt, Artificial Sequence
  Synthetic
gaauucauuuuuaagaaaaua

SEQ ID NO: 3008 - RNA, 19 nt, Artificial Sequence
  Synthetic
gccguuaaaauggaaaaua

SEQ ID NO: 3009 - RNA, 21 nt, Artificial Sequence
  Synthetic
gugccguuaaaauggaaaaua

SEQ ID NO: 3010 - RNA, 18 nt, Artificial Sequence
  Synthetic
gccaccauacugaaaaua

SEQ ID NO: 3011 - RNA, 20 nt, Artificial Sequence
  Synthetic
gagccaccauacugaaaaua

SEQ ID NO: 3012 - RNA, 22 nt, Artificial Sequence
  Synthetic
gagagccaccauacugaaaaua

SEQ ID NO: 3013 - RNA, 24 nt, Artificial Sequence
  Synthetic
gagagagccaccauacugaaaaua

SEQ ID NO: 3014 - RNA, 20 nt, Artificial Sequence
  Synthetic
gccauccaugccugaaaaua

SEQ ID NO: 3015 - RNA, 22 nt, Artificial Sequence
  Synthetic
gagccauccaugccugaaaaua

SEQ ID NO: 3016 - RNA, 23 nt, Artificial Sequence
  Synthetic
ggagccauccaugccugaaaaua

SEQ ID NO: 3017 - RNA, 19 nt, Artificial Sequence
  Synthetic
guacguauuggauaaaaua

SEQ ID NO: 3018 - RNA, 23 nt, Artificial Sequence
  Synthetic
guaaguacguauuggauaaaaua

SEQ ID NO: 3019 - RNA, 21 nt, Artificial Sequence
  Synthetic
guaccuuuuguaaguaaaaua

SEQ ID NO: 3020 - RNA, 22 nt, Artificial Sequence
  Synthetic
gguaccuuuuguaaguaaaaua

SEQ ID NO: 3021 - RNA, 21 nt, Artificial Sequence
  Synthetic
gaaauuuguuauguuaaaaua

SEQ ID NO: 3022 - RNA, 18 nt, Artificial Sequence
  Synthetic
ggaacauuuaaacaaaua

SEQ ID NO: 3023 - RNA, 22 nt, Artificial Sequence
  Synthetic
gcuuggaacauuuaaacaaaua

SEQ ID NO: 3024 - RNA, 19 nt, Artificial Sequence
  Synthetic
gugcuugucuuaacaaaua

SEQ ID NO: 3025 - RNA, 20 nt, Artificial Sequence
  Synthetic
gauaagugaagagacaaaua

SEQ ID NO: 3026 - RNA, 19 nt, Artificial Sequence
  Synthetic
guaacaauaacuacaaaua

SEQ ID NO: 3027 - RNA, 20 nt, Artificial Sequence
  Synthetic
gguaacaauaacuacaaaua

SEQ ID NO: 3028 - RNA, 24 nt, Artificial Sequence
  Synthetic
guaugguaacaauaacuacaaaua

SEQ ID NO: 3029 - RNA, 24 nt, Artificial Sequence
  Synthetic
gaaacuaucaaaaauuuacaaaua

SEQ ID NO: 3030 - RNA, 22 nt, Artificial Sequence
  Synthetic
gcaagcaauugaaaagcaaaua

SEQ ID NO: 3031 - RNA, 24 nt, Artificial Sequence
  Synthetic
gagcaagcaauugaaaagcaaaua

SEQ ID NO: 3032 - RNA, 22 nt, Artificial Sequence
  Synthetic
gagaagaaaagaagugcaaaua

SEQ ID NO: 3033 - RNA, 23 nt, Artificial Sequence
  Synthetic
gaaaaaagaagagacaucaaaua

SEQ ID NO: 3034 - RNA, 24 nt, Artificial Sequence
  Synthetic
guccuccaccuauuuucagaaaua

SEQ ID NO: 3035 - RNA, 23 nt, Artificial Sequence
  Synthetic
gauuaauauauuuuucagaaaua

SEQ ID NO: 3036 - RNA, 22 nt, Artificial Sequence
  Synthetic
gugagguguggauguggaaaua

SEQ ID NO: 3037 - RNA, 19 nt, Artificial Sequence
  Synthetic
gucugucgguguggaaaua

SEQ ID NO: 3038 - RNA, 21 nt, Artificial Sequence
  Synthetic
gugucugucgguguggaaaua

SEQ ID NO: 3039 - RNA, 23 nt, Artificial Sequence
  Synthetic
gugugucugucgguguggaaaua

SEQ ID NO: 3040 - RNA, 22 nt, Artificial Sequence
  Synthetic
gcaaauuuuaaauguugaaaua

SEQ ID NO: 3041 - RNA, 23 nt, Artificial Sequence
  Synthetic
ggcaaauuuuaaauguugaaaua

SEQ ID NO: 3042 - RNA, 18 nt, Artificial Sequence
  Synthetic
gacggucccuaauaaaua

SEQ ID NO: 3043 - RNA, 19 nt, Artificial Sequence
  Synthetic
ggacggucccuaauaaaua

SEQ ID NO: 3044 - RNA, 21 nt, Artificial Sequence
  Synthetic
guggacggucccuaauaaaua

SEQ ID NO: 3045 - RNA, 19 nt, Artificial Sequence
  Synthetic
gagcaauucuguauaaaua

SEQ ID NO: 3046 - RNA, 23 nt, Artificial Sequence
  Synthetic
guaagagcaauucuguauaaaua

SEQ ID NO: 3047 - RNA, 18 nt, Artificial Sequence
  Synthetic
gaacaaguuguauaaaua

SEQ ID NO: 3048 - RNA, 22 nt, Artificial Sequence
  Synthetic
gaaagaacaaguuguauaaaua

SEQ ID NO: 3049 - RNA, 19 nt, Artificial Sequence
  Synthetic
gacagaauguuucuaaaua

SEQ ID NO: 3050 - RNA, 24 nt, Artificial Sequence
  Synthetic
gaauagacagaauguuucuaaaua

SEQ ID NO: 3051 - RNA, 18 nt, Artificial Sequence
  Synthetic
gguucaugaauguaaaua

SEQ ID NO: 3052 - RNA, 21 nt, Artificial Sequence
  Synthetic
guuugccauuguguuuaaaua

SEQ ID NO: 3053 - RNA, 18 nt, Artificial Sequence
  Synthetic
gaaaauaagcauacaaua

SEQ ID NO: 3054 - RNA, 21 nt, Artificial Sequence
  Synthetic
gaagaaaauaagcauacaaua

SEQ ID NO: 3055 - RNA, 18 nt, Artificial Sequence
  Synthetic
gaaguaaauuauacaaua

SEQ ID NO: 3056 - RNA, 21 nt, Artificial Sequence
  Synthetic
guugaaguaaauuauacaaua

SEQ ID NO: 3057 - RNA, 18 nt, Artificial Sequence
  Synthetic
gaagagggacauccaaua

SEQ ID NO: 3058 - RNA, 23 nt, Artificial Sequence
  Synthetic
gaacagaagagggacauccaaua

SEQ ID NO: 3059 - RNA, 24 nt, Artificial Sequence
  Synthetic
ggaacagaagagggacauccaaua

SEQ ID NO: 3060 - RNA, 23 nt, Artificial Sequence
  Synthetic
guuagacugaaauggaagcaaua

SEQ ID NO: 3061 - RNA, 24 nt, Artificial Sequence
  Synthetic
gguuagacugaaauggaagcaaua

SEQ ID NO: 3062 - RNA, 19 nt, Artificial Sequence
  Synthetic
gaguuaguacaucucaaua

SEQ ID NO: 3063 - RNA, 20 nt, Artificial Sequence
  Synthetic
ggaguuaguacaucucaaua

SEQ ID NO: 3064 - RNA, 21 nt, Artificial Sequence
  Synthetic
gggaguuaguacaucucaaua

SEQ ID NO: 3065 - RNA, 21 nt, Artificial Sequence
  Synthetic
gacaguauucuaaagucaaua

SEQ ID NO: 3066 - RNA, 24 nt, Artificial Sequence
  Synthetic
gcagacaguauucuaaagucaaua

SEQ ID NO: 3067 - RNA, 23 nt, Artificial Sequence
  Synthetic
gcucccaauucaacaauucaaua

SEQ ID NO: 3068 - RNA, 21 nt, Artificial Sequence
  Synthetic
gaaaucaaugauguuucaaua

SEQ ID NO: 3069 - RNA, 22 nt, Artificial Sequence
  Synthetic
ggaaaucaaugauguuucaaua

SEQ ID NO: 3070 - RNA, 20 nt, Artificial Sequence
  Synthetic
guaguucaaauaucagaaua

SEQ ID NO: 3071 - RNA, 21 nt, Artificial Sequence
  Synthetic
gguaguucaaauaucagaaua

SEQ ID NO: 3072 - RNA, 23 nt, Artificial Sequence
  Synthetic
gugguaguucaaauaucagaaua

SEQ ID NO: 3073 - RNA, 22 nt, Artificial Sequence
  Synthetic
gacucuguaauuuauuagaaua

SEQ ID NO: 3074 - RNA, 23 nt, Artificial Sequence
  Synthetic
ggacucuguaauuuauuagaaua

SEQ ID NO: 3075 - RNA, 20 nt, Artificial Sequence
  Synthetic
gaagaguaaugccaggaaua

SEQ ID NO: 3076 - RNA, 21 nt, Artificial Sequence
  Synthetic
ggaagaguaaugccaggaaua

SEQ ID NO: 3077 - RNA, 22 nt, Artificial Sequence
  Synthetic
gggaagaguaaugccaggaaua

SEQ ID NO: 3078 - RNA, 22 nt, Artificial Sequence
  Synthetic
guaucaggauuggggaggaaua

SEQ ID NO: 3079 - RNA, 23 nt, Artificial Sequence
  Synthetic
gguaucaggauuggggaggaaua

SEQ ID NO: 3080 - RNA, 24 nt, Artificial Sequence
  Synthetic
ggguaucaggauuggggaggaaua

SEQ ID NO: 3081 - RNA, 21 nt, Artificial Sequence
  Synthetic
gggagguggagugagggaaua

SEQ ID NO: 3082 - RNA, 19 nt, Artificial Sequence
  Synthetic
gccuuuaugugagggaaua

SEQ ID NO: 3083 - RNA, 23 nt, Artificial Sequence
  Synthetic
gccugccuuuaugugagggaaua

SEQ ID NO: 3084 - RNA, 21 nt, Artificial Sequence
  Synthetic
gaaaagauuguucugggaaua

SEQ ID NO: 3085 - RNA, 22 nt, Artificial Sequence
  Synthetic
guacccaggugccucaugaaua

SEQ ID NO: 3086 - RNA, 23 nt, Artificial Sequence
  Synthetic
guucauugaaugaauacugaaua

SEQ ID NO: 3087 - RNA, 21 nt, Artificial Sequence
  Synthetic
guaauugucauacucugaaua

SEQ ID NO: 3088 - RNA, 22 nt, Artificial Sequence
  Synthetic
gguaauugucauacucugaaua

SEQ ID NO: 3089 - RNA, 23 nt, Artificial Sequence
  Synthetic
ggguaauugucauacucugaaua

SEQ ID NO: 3090 - RNA, 24 nt, Artificial Sequence
  Synthetic
gggguaauugucauacucugaaua

SEQ ID NO: 3091 - RNA, 21 nt, Artificial Sequence
  Synthetic
gaauucaugaaggcuugaaua

SEQ ID NO: 3092 - RNA, 23 nt, Artificial Sequence
  Synthetic
gugaauucaugaaggcuugaaua

SEQ ID NO: 3093 - RNA, 24 nt, Artificial Sequence
  Synthetic
ggugaauucaugaaggcuugaaua

SEQ ID NO: 3094 - RNA, 22 nt, Artificial Sequence
  Synthetic
gauacccagggaagaaauaaua

SEQ ID NO: 3095 - RNA, 23 nt, Artificial Sequence
  Synthetic
gccccaaagguauuuuaauaaua

SEQ ID NO: 3096 - RNA, 19 nt, Artificial Sequence
  Synthetic
guucauugacccacuaaua

SEQ ID NO: 3097 - RNA, 20 nt, Artificial Sequence
  Synthetic
gguucauugacccacuaaua

SEQ ID NO: 3098 - RNA, 21 nt, Artificial Sequence
  Synthetic
ggguucauugacccacuaaua

SEQ ID NO: 3099 - RNA, 22 nt, Artificial Sequence
  Synthetic
gggguucauugacccacuaaua

SEQ ID NO: 3100 - RNA, 21 nt, Artificial Sequence
  Synthetic
gccuuuguugauugacuaaua

SEQ ID NO: 3101 - RNA, 22 nt, Artificial Sequence
  Synthetic
ggccuuuguugauugacuaaua

SEQ ID NO: 3102 - RNA, 23 nt, Artificial Sequence
  Synthetic
gaucaaaguuauauuaauuaaua

SEQ ID NO: 3103 - RNA, 24 nt, Artificial Sequence
  Synthetic
ggaucaaaguuauauuaauuaaua

SEQ ID NO: 3104 - RNA, 19 nt, Artificial Sequence
  Synthetic
gagaauauguuaauuaaua

SEQ ID NO: 3105 - RNA, 20 nt, Artificial Sequence
  Synthetic
ggagaauauguuaauuaaua

SEQ ID NO: 3106 - RNA, 22 nt, Artificial Sequence
  Synthetic
gaggagaauauguuaauuaaua

SEQ ID NO: 3107 - RNA, 18 nt, Artificial Sequence
  Synthetic
ggucuuagugcauuaaua

SEQ ID NO: 3108 - RNA, 18 nt, Artificial Sequence
  Synthetic
gaggucuggauauuaaua

SEQ ID NO: 3109 - RNA, 18 nt, Artificial Sequence
  Synthetic
ggaugauuaugguuaaua

SEQ ID NO: 3110 - RNA, 19 nt, Artificial Sequence
  Synthetic
gggaugauuaugguuaaua

SEQ ID NO: 3111 - RNA, 21 nt, Artificial Sequence
  Synthetic
gauucuuaaugccuguuaaua

SEQ ID NO: 3112 - RNA, 24 nt, Artificial Sequence
  Synthetic
gcucaucucacaccaaguuuaaua

SEQ ID NO: 3113 - RNA, 22 nt, Artificial Sequence
  Synthetic
gaaauguccucguaaaaacaua

SEQ ID NO: 3114 - RNA, 24 nt, Artificial Sequence
  Synthetic
gagaaauguccucguaaaaacaua

SEQ ID NO: 3115 - RNA, 18 nt, Artificial Sequence
  Synthetic
gauuuuuuauugaacaua

SEQ ID NO: 3116 - RNA, 24 nt, Artificial Sequence
  Synthetic
gacagaagccauacugauaacaua

SEQ ID NO: 3117 - RNA, 23 nt, Artificial Sequence
  Synthetic
gucaauaccugugcuauaacaua

SEQ ID NO: 3118 - RNA, 19 nt, Artificial Sequence
  Synthetic
guuaauagguuguaacaua

SEQ ID NO: 3119 - RNA, 20 nt, Artificial Sequence
  Synthetic
gguuaauagguuguaacaua

SEQ ID NO: 3120 - RNA, 24 nt, Artificial Sequence
  Synthetic
gaauacaaugaauuacaacacaua

SEQ ID NO: 3121 - RNA, 18 nt, Artificial Sequence
  Synthetic
guguugcguggccacaua

SEQ ID NO: 3122 - RNA, 19 nt, Artificial Sequence
  Synthetic
gguguugcguggccacaua

SEQ ID NO: 3123 - RNA, 19 nt, Artificial Sequence
  Synthetic
gauacaugauaagcacaua

SEQ ID NO: 3124 - RNA, 22 nt, Artificial Sequence
  Synthetic
gaagauacaugauaagcacaua

SEQ ID NO: 3125 - RNA, 23 nt, Artificial Sequence
  Synthetic
ggaagauacaugauaagcacaua

SEQ ID NO: 3126 - RNA, 24 nt, Artificial Sequence
  Synthetic
gggaagauacaugauaagcacaua

SEQ ID NO: 3127 - RNA, 18 nt, Artificial Sequence
  Synthetic
gacaguaacucgcacaua

SEQ ID NO: 3128 - RNA, 19 nt, Artificial Sequence
  Synthetic
ggacaguaacucgcacaua

SEQ ID NO: 3129 - RNA, 18 nt, Artificial Sequence
  Synthetic
gacucaugcauucacaua

SEQ ID NO: 3130 - RNA, 23 nt, Artificial Sequence
  Synthetic
gauuagacucaugcauucacaua

SEQ ID NO: 3131 - RNA, 24 nt, Artificial Sequence
  Synthetic
ggauuagacucaugcauucacaua

SEQ ID NO: 3132 - RNA, 21 nt, Artificial Sequence
  Synthetic
gcccuuuuuaggcuucacaua

SEQ ID NO: 3133 - RNA, 18 nt, Artificial Sequence
  Synthetic
ggcuguagagcagacaua

SEQ ID NO: 3134 - RNA, 22 nt, Artificial Sequence
  Synthetic
gauaggcuguagagcagacaua

SEQ ID NO: 3135 - RNA, 18 nt, Artificial Sequence
  Synthetic
gcccgucucggggacaua

SEQ ID NO: 3136 - RNA, 21 nt, Artificial Sequence
  Synthetic
gcagcccgucucggggacaua

SEQ ID NO: 3137 - RNA, 23 nt, Artificial Sequence
  Synthetic
gugcagcccgucucggggacaua

SEQ ID NO: 3138 - RNA, 24 nt, Artificial Sequence
  Synthetic
guaucacagaugaagacugacaua

SEQ ID NO: 3139 - RNA, 24 nt, Artificial Sequence
  Synthetic
gacauuuuccuguaucaguacaua

SEQ ID NO: 3140 - RNA, 22 nt, Artificial Sequence
  Synthetic
gcucaucugaaaagguuacaua

SEQ ID NO: 3141 - RNA, 22 nt, Artificial Sequence
  Synthetic
gcauaacgcuuuagagaccaua

SEQ ID NO: 3142 - RNA, 24 nt, Artificial Sequence
  Synthetic
gagcauaacgcuuuagagaccaua

SEQ ID NO: 3143 - RNA, 19 nt, Artificial Sequence
  Synthetic
guucuuuuacaauaccaua

SEQ ID NO: 3144 - RNA, 23 nt, Artificial Sequence
  Synthetic
guacguucuuuuacaauaccaua

SEQ ID NO: 3145 - RNA, 24 nt, Artificial Sequence
  Synthetic
gguacguucuuuuacaauaccaua

SEQ ID NO: 3146 - RNA, 19 nt, Artificial Sequence
  Synthetic
guuuucauauaguaccaua

SEQ ID NO: 3147 - RNA, 24 nt, Artificial Sequence
  Synthetic
gccacguuuucauauaguaccaua

SEQ ID NO: 3148 - RNA, 24 nt, Artificial Sequence
  Synthetic
guuaaaguauuaguuugagccaua

SEQ ID NO: 3149 - RNA, 21 nt, Artificial Sequence
  Synthetic
gucaaccuuucucaauccaua

SEQ ID NO: 3150 - RNA, 24 nt, Artificial Sequence
  Synthetic
gcucuggagaaugagguguccaua

SEQ ID NO: 3151 - RNA, 18 nt, Artificial Sequence
  Synthetic
guaaagagugaaagcaua

SEQ ID NO: 3152 - RNA, 19 nt, Artificial Sequence
  Synthetic
gauuuaucuggcaagcaua

SEQ ID NO: 3153 - RNA, 21 nt, Artificial Sequence
  Synthetic
gagauuuaucuggcaagcaua

SEQ ID NO: 3154 - RNA, 24 nt, Artificial Sequence
  Synthetic
gcagagauuuaucuggcaagcaua

SEQ ID NO: 3155 - RNA, 23 nt, Artificial Sequence
  Synthetic
gcacauagugcaguagcagcaua

SEQ ID NO: 3156 - RNA, 22 nt, Artificial Sequence
  Synthetic
gacagccagcuaugugagcaua

SEQ ID NO: 3157 - RNA, 22 nt, Artificial Sequence
  Synthetic
gaaaauaaauaauaugggcaua

SEQ ID NO: 3158 - RNA, 19 nt, Artificial Sequence
  Synthetic
guagacauuacauggcaua

SEQ ID NO: 3159 - RNA, 24 nt, Artificial Sequence
  Synthetic
guaacguagacauuacauggcaua

SEQ ID NO: 3160 - RNA, 19 nt, Artificial Sequence
  Synthetic
gauuaauaauucuugcaua

SEQ ID NO: 3161 - RNA, 21 nt, Artificial Sequence
  Synthetic
gugauuaauaauucuugcaua

SEQ ID NO: 3162 - RNA, 23 nt, Artificial Sequence
  Synthetic
gagugauuaauaauucuugcaua

SEQ ID NO: 3163 - RNA, 18 nt, Artificial Sequence
  Synthetic
gagccuauuugaaucaua

SEQ ID NO: 3164 - RNA, 21 nt, Artificial Sequence
  Synthetic
gcagagccuauuugaaucaua

SEQ ID NO: 3165 - RNA, 22 nt, Artificial Sequence
  Synthetic
ggcagagccuauuugaaucaua

SEQ ID NO: 3166 - RNA, 18 nt, Artificial Sequence
  Synthetic
guguuaccacuuaucaua

SEQ ID NO: 3167 - RNA, 19 nt, Artificial Sequence
  Synthetic
gguguuaccacuuaucaua

SEQ ID NO: 3168 - RNA, 21 nt, Artificial Sequence
  Synthetic
gagguguuaccacuuaucaua

SEQ ID NO: 3169 - RNA, 20 nt, Artificial Sequence
  Synthetic
gcaauauccauuaccucaua

SEQ ID NO: 3170 - RNA, 21 nt, Artificial Sequence
  Synthetic
guuaugggucuuacucucaua

SEQ ID NO: 3171 - RNA, 24 nt, Artificial Sequence
  Synthetic
guaguuaugggucuuacucucaua

SEQ ID NO: 3172 - RNA, 18 nt, Artificial Sequence
  Synthetic
guauuggauauggucaua

SEQ ID NO: 3173 - RNA, 19 nt, Artificial Sequence
  Synthetic
gguauuggauauggucaua

SEQ ID NO: 3174 - RNA, 22 nt, Artificial Sequence
  Synthetic
guacuguaucagugaugucaua

SEQ ID NO: 3175 - RNA, 24 nt, Artificial Sequence
  Synthetic
gaauaaacuugugauaucuucaua

SEQ ID NO: 3176 - RNA, 18 nt, Artificial Sequence
  Synthetic
guguccaggcccaagaua

SEQ ID NO: 3177 - RNA, 20 nt, Artificial Sequence
  Synthetic
gaguguccaggcccaagaua

SEQ ID NO: 3178 - RNA, 21 nt, Artificial Sequence
  Synthetic
ggaguguccaggcccaagaua

SEQ ID NO: 3179 - RNA, 20 nt, Artificial Sequence
  Synthetic
gcacccaaccgcucaagaua

SEQ ID NO: 3180 - RNA, 23 nt, Artificial Sequence
  Synthetic
guauuauauaauucaagaagaua

SEQ ID NO: 3181 - RNA, 24 nt, Artificial Sequence
  Synthetic
gcucccuggaaauagacuaagaua

SEQ ID NO: 3182 - RNA, 19 nt, Artificial Sequence
  Synthetic
guuuuucugauuuaagaua

SEQ ID NO: 3183 - RNA, 24 nt, Artificial Sequence
  Synthetic
gcacaguuuuucugauuuaagaua

SEQ ID NO: 3184 - RNA, 20 nt, Artificial Sequence
  Synthetic
guauuaccauacaacagaua

SEQ ID NO: 3185 - RNA, 23 nt, Artificial Sequence
  Synthetic
guaguauuaccauacaacagaua

SEQ ID NO: 3186 - RNA, 18 nt, Artificial Sequence
  Synthetic
gauuucuagaaccagaua

SEQ ID NO: 3187 - RNA, 21 nt, Artificial Sequence
  Synthetic
gaaagagggaaaggccagaua

SEQ ID NO: 3188 - RNA, 23 nt, Artificial Sequence
  Synthetic
gauagauauaaauaauucagaua

SEQ ID NO: 3189 - RNA, 19 nt, Artificial Sequence
  Synthetic
gaacccaaaugaagagaua

SEQ ID NO: 3190 - RNA, 18 nt, Artificial Sequence
  Synthetic
gcagagaacauugagaua

SEQ ID NO: 3191 - RNA, 19 nt, Artificial Sequence
  Synthetic
ggcagagaacauugagaua

SEQ ID NO: 3192 - RNA, 20 nt, Artificial Sequence
  Synthetic
gggcagagaacauugagaua

SEQ ID NO: 3193 - RNA, 21 nt, Artificial Sequence
  Synthetic
gaauguagucaaguugagaua

SEQ ID NO: 3194 - RNA, 19 nt, Artificial Sequence
  Synthetic
gcauauuuagacauagaua

SEQ ID NO: 3195 - RNA, 19 nt, Artificial Sequence
  Synthetic
guuacuugucaaguagaua

SEQ ID NO: 3196 - RNA, 20 nt, Artificial Sequence
  Synthetic
gguuacuugucaaguagaua

SEQ ID NO: 3197 - RNA, 18 nt, Artificial Sequence
  Synthetic
gucaacaucuuuacgaua

SEQ ID NO: 3198 - RNA, 23 nt, Artificial Sequence
  Synthetic
gcucagucaacaucuuuacgaua

SEQ ID NO: 3199 - RNA, 18 nt, Artificial Sequence
  Synthetic
gaucagguaccaaggaua

SEQ ID NO: 3200 - RNA, 20 nt, Artificial Sequence
  Synthetic
gugaucagguaccaaggaua

SEQ ID NO: 3201 - RNA, 22 nt, Artificial Sequence
  Synthetic
gcucaggaaaaaaaguaggaua

SEQ ID NO: 3202 - RNA, 18 nt, Artificial Sequence
  Synthetic
ggagacucugaagggaua

SEQ ID NO: 3203 - RNA, 24 nt, Artificial Sequence
  Synthetic
gaaaauggagacucugaagggaua

SEQ ID NO: 3204 - RNA, 19 nt, Artificial Sequence
  Synthetic
gcguuuggcucuauggaua

SEQ ID NO: 3205 - RNA, 20 nt, Artificial Sequence
  Synthetic
ggcguuuggcucuauggaua

SEQ ID NO: 3206 - RNA, 23 nt, Artificial Sequence
  Synthetic
guaggcguuuggcucuauggaua

SEQ ID NO: 3207 - RNA, 22 nt, Artificial Sequence
  Synthetic
gauuaaucuugaaacuaugaua

SEQ ID NO: 3208 - RNA, 19 nt, Artificial Sequence
  Synthetic
gauuuccuuguguaugaua

SEQ ID NO: 3209 - RNA, 20 nt, Artificial Sequence
  Synthetic
gaagucuaucccuuaugaua

SEQ ID NO: 3210 - RNA, 23 nt, Artificial Sequence
  Synthetic
guagaagucuaucccuuaugaua

SEQ ID NO: 3211 - RNA, 20 nt, Artificial Sequence
  Synthetic
gcuuucaccuguuuaugaua

SEQ ID NO: 3212 - RNA, 20 nt, Artificial Sequence
  Synthetic
gcuuugggcaacagcugaua

SEQ ID NO: 3213 - RNA, 20 nt, Artificial Sequence
  Synthetic
guaucuuauauaucuugaua

SEQ ID NO: 3214 - RNA, 18 nt, Artificial Sequence
  Synthetic
gauuuguugaauuugaua

SEQ ID NO: 3215 - RNA, 19 nt, Artificial Sequence
  Synthetic
ggauuuguugaauuugaua

SEQ ID NO: 3216 - RNA, 20 nt, Artificial Sequence
  Synthetic
gggauuuguugaauuugaua

SEQ ID NO: 3217 - RNA, 21 nt, Artificial Sequence
  Synthetic
ggggauuuguugaauuugaua

SEQ ID NO: 3218 - RNA, 22 nt, Artificial Sequence
  Synthetic
gggggauuuguugaauuugaua

SEQ ID NO: 3219 - RNA, 24 nt, Artificial Sequence
  Synthetic
gagggggauuuguugaauuugaua

SEQ ID NO: 3220 - RNA, 24 nt, Artificial Sequence
  Synthetic
guacuuaagaucaauuaaaauaua

SEQ ID NO: 3221 - RNA, 18 nt, Artificial Sequence
  Synthetic
guaacagagcuaaauaua

SEQ ID NO: 3222 - RNA, 21 nt, Artificial Sequence
  Synthetic
gcuguaacagagcuaaauaua

SEQ ID NO: 3223 - RNA, 24 nt, Artificial Sequence
  Synthetic
gaugcuguaacagagcuaaauaua

SEQ ID NO: 3224 - RNA, 22 nt, Artificial Sequence
  Synthetic
guauuucuaaguuaauaauaua

SEQ ID NO: 3225 - RNA, 18 nt, Artificial Sequence
  Synthetic
gucugacuauguaauaua

SEQ ID NO: 3226 - RNA, 19 nt, Artificial Sequence
  Synthetic
ggucugacuauguaauaua

SEQ ID NO: 3227 - RNA, 19 nt, Artificial Sequence
  Synthetic
gauuguauucauuaauaua

SEQ ID NO: 3228 - RNA, 21 nt, Artificial Sequence
  Synthetic
gaauauguuugaaaacauaua

SEQ ID NO: 3229 - RNA, 22 nt, Artificial Sequence
  Synthetic
guuuuaauauauauaacauaua

SEQ ID NO: 3230 - RNA, 24 nt, Artificial Sequence
  Synthetic
guguuuuaauauauauaacauaua

SEQ ID NO: 3231 - RNA, 20 nt, Artificial Sequence
  Synthetic
gcuuuuccuuuuggcauaua

SEQ ID NO: 3232 - RNA, 24 nt, Artificial Sequence
  Synthetic
guuugcuuuuccuuuuggcauaua

SEQ ID NO: 3233 - RNA, 22 nt, Artificial Sequence
  Synthetic
gauauauguaucugugcauaua

SEQ ID NO: 3234 - RNA, 20 nt, Artificial Sequence
  Synthetic
gcucuuaaauggaagauaua

SEQ ID NO: 3235 - RNA, 21 nt, Artificial Sequence
  Synthetic
ggcucuuaaauggaagauaua

SEQ ID NO: 3236 - RNA, 18 nt, Artificial Sequence
  Synthetic
gacauaucaccagauaua

SEQ ID NO: 3237 - RNA, 22 nt, Artificial Sequence
  Synthetic
guuagacauaucaccagauaua

SEQ ID NO: 3238 - RNA, 20 nt, Artificial Sequence
  Synthetic
guugugcuaccaacuauaua

SEQ ID NO: 3239 - RNA, 18 nt, Artificial Sequence
  Synthetic
guucuagguuuguauaua

SEQ ID NO: 3240 - RNA, 24 nt, Artificial Sequence
  Synthetic
gaaauuguucuagguuuguauaua

SEQ ID NO: 3241 - RNA, 24 nt, Artificial Sequence
  Synthetic
gaaaaagacauuuuuaauuauaua

SEQ ID NO: 3242 - RNA, 19 nt, Artificial Sequence
  Synthetic
guaagaaagaagaacuaua

SEQ ID NO: 3243 - RNA, 20 nt, Artificial Sequence
  Synthetic
gguaagaaagaagaacuaua

SEQ ID NO: 3244 - RNA, 24 nt, Artificial Sequence
  Synthetic
gaaugguaagaaagaagaacuaua

SEQ ID NO: 3245 - RNA, 21 nt, Artificial Sequence
  Synthetic
gucuuuacuuucuugacuaua

SEQ ID NO: 3246 - RNA, 20 nt, Artificial Sequence
  Synthetic
guaaguguuauuguacuaua

SEQ ID NO: 3247 - RNA, 24 nt, Artificial Sequence
  Synthetic
gacaguaaguguuauuguacuaua

SEQ ID NO: 3248 - RNA, 18 nt, Artificial Sequence
  Synthetic
gggaaauuuaaggcuaua

SEQ ID NO: 3249 - RNA, 23 nt, Artificial Sequence
  Synthetic
gaccugggaaauuuaaggcuaua

SEQ ID NO: 3250 - RNA, 18 nt, Artificial Sequence
  Synthetic
gaaacaaaugcuucuaua

SEQ ID NO: 3251 - RNA, 21 nt, Artificial Sequence
  Synthetic
gaccaguuuagaauuucuaua

SEQ ID NO: 3252 - RNA, 22 nt, Artificial Sequence
  Synthetic
ggaccaguuuagaauuucuaua

SEQ ID NO: 3253 - RNA, 23 nt, Artificial Sequence
  Synthetic
gggaccaguuuagaauuucuaua

SEQ ID NO: 3254 - RNA, 23 nt, Artificial Sequence
  Synthetic
gcuuauguuuguauucaaguaua

SEQ ID NO: 3255 - RNA, 18 nt, Artificial Sequence
  Synthetic
guugagaaucacaguaua

SEQ ID NO: 3256 - RNA, 22 nt, Artificial Sequence
  Synthetic
guaaguugagaaucacaguaua

SEQ ID NO: 3257 - RNA, 24 nt, Artificial Sequence
  Synthetic
gcguaaguugagaaucacaguaua

SEQ ID NO: 3258 - RNA, 21 nt, Artificial Sequence
  Synthetic
gauacuaaagaaagcaguaua

SEQ ID NO: 3259 - RNA, 23 nt, Artificial Sequence
  Synthetic
gugauacuaaagaaagcaguaua

SEQ ID NO: 3260 - RNA, 22 nt, Artificial Sequence
  Synthetic
gauucacauaagaugcaguaua

SEQ ID NO: 3261 - RNA, 18 nt, Artificial Sequence
  Synthetic
gugugcauggcacguaua

SEQ ID NO: 3262 - RNA, 22 nt, Artificial Sequence
  Synthetic
gaccgugugcauggcacguaua

SEQ ID NO: 3263 - RNA, 18 nt, Artificial Sequence
  Synthetic
gauaaagcaaaauguaua

SEQ ID NO: 3264 - RNA, 20 nt, Artificial Sequence
  Synthetic
guuagcuuuaagaaauuaua

SEQ ID NO: 3265 - RNA, 19 nt, Artificial Sequence
  Synthetic
guguguauucauaauuaua

SEQ ID NO: 3266 - RNA, 24 nt, Artificial Sequence
  Synthetic
gaaauguguguauucauaauuaua

SEQ ID NO: 3267 - RNA, 22 nt, Artificial Sequence
  Synthetic
gucuaucaaaggccauauuaua

SEQ ID NO: 3268 - RNA, 18 nt, Artificial Sequence
  Synthetic
guugcacucuauauuaua

SEQ ID NO: 3269 - RNA, 20 nt, Artificial Sequence
  Synthetic
guguugcacucuauauuaua

SEQ ID NO: 3270 - RNA, 22 nt, Artificial Sequence
  Synthetic
guguguugcacucuauauuaua

SEQ ID NO: 3271 - RNA, 24 nt, Artificial Sequence
  Synthetic
guguguguugcacucuauauuaua

SEQ ID NO: 3272 - RNA, 22 nt, Artificial Sequence
  Synthetic
guauuuauuuuuugcucuuaua

SEQ ID NO: 3273 - RNA, 21 nt, Artificial Sequence
  Synthetic
gcucagguccuuugucuuaua

SEQ ID NO: 3274 - RNA, 22 nt, Artificial Sequence
  Synthetic
ggcucagguccuuugucuuaua

SEQ ID NO: 3275 - RNA, 18 nt, Artificial Sequence
  Synthetic
guaagaauuagauuuaua

SEQ ID NO: 3276 - RNA, 20 nt, Artificial Sequence
  Synthetic
guguaagaauuagauuuaua

SEQ ID NO: 3277 - RNA, 22 nt, Artificial Sequence
  Synthetic
gaguguaagaauuagauuuaua

SEQ ID NO: 3278 - RNA, 22 nt, Artificial Sequence
  Synthetic
gucuaggugccugugauuuaua

SEQ ID NO: 3279 - RNA, 23 nt, Artificial Sequence
  Synthetic
ggucuaggugccugugauuuaua

SEQ ID NO: 3280 - RNA, 24 nt, Artificial Sequence
  Synthetic
gggucuaggugccugugauuuaua

SEQ ID NO: 3281 - RNA, 21 nt, Artificial Sequence
  Synthetic
gucugugaauauauauuuaua

SEQ ID NO: 3282 - RNA, 23 nt, Artificial Sequence
  Synthetic
gaucuaguuagggcuccuuuaua

SEQ ID NO: 3283 - RNA, 24 nt, Artificial Sequence
  Synthetic
ggaucuaguuagggcuccuuuaua

SEQ ID NO: 3284 - RNA, 22 nt, Artificial Sequence
  Synthetic
gaacuacggucauuucuuuaua

SEQ ID NO: 3285 - RNA, 24 nt, Artificial Sequence
  Synthetic
gagaacuacggucauuucuuuaua

SEQ ID NO: 3286 - RNA, 22 nt, Artificial Sequence
  Synthetic
gccaaucaaacaguauuuuaua

SEQ ID NO: 3287 - RNA, 24 nt, Artificial Sequence
  Synthetic
gagccaaucaaacaguauuuuaua

SEQ ID NO: 3288 - RNA, 23 nt, Artificial Sequence
  Synthetic
gaaaaaaguuucaguguuuuaua

SEQ ID NO: 3289 - RNA, 21 nt, Artificial Sequence
  Synthetic
guucaagauaacuuuuuuaua

SEQ ID NO: 3290 - RNA, 21 nt, Artificial Sequence
  Synthetic
gaaccccauagguucaaacua

SEQ ID NO: 3291 - RNA, 18 nt, Artificial Sequence
  Synthetic
guagaaauuacuaaacua

SEQ ID NO: 3292 - RNA, 19 nt, Artificial Sequence
  Synthetic
gguagaaauuacuaaacua

SEQ ID NO: 3293 - RNA, 21 nt, Artificial Sequence
  Synthetic
gugguagaaauuacuaaacua

SEQ ID NO: 3294 - RNA, 19 nt, Artificial Sequence
  Synthetic
gcaaugucaugggcaacua

SEQ ID NO: 3295 - RNA, 20 nt, Artificial Sequence
  Synthetic
ggcaaugucaugggcaacua

SEQ ID NO: 3296 - RNA, 21 nt, Artificial Sequence
  Synthetic
gcaaauaccaguagagaacua

SEQ ID NO: 3297 - RNA, 22 nt, Artificial Sequence
  Synthetic
ggcaaauaccaguagagaacua

SEQ ID NO: 3298 - RNA, 18 nt, Artificial Sequence
  Synthetic
gugauauaauuggaacua

SEQ ID NO: 3299 - RNA, 19 nt, Artificial Sequence
  Synthetic
ggugauauaauuggaacua

SEQ ID NO: 3300 - RNA, 20 nt, Artificial Sequence
  Synthetic
gggugauauaauuggaacua

SEQ ID NO: 3301 - RNA, 22 nt, Artificial Sequence
  Synthetic
gugggugauauaauuggaacua

SEQ ID NO: 3302 - RNA, 24 nt, Artificial Sequence
  Synthetic
gagugggugauauaauuggaacua

SEQ ID NO: 3303 - RNA, 18 nt, Artificial Sequence
  Synthetic
gguuuggacaaugaacua

SEQ ID NO: 3304 - RNA, 23 nt, Artificial Sequence
  Synthetic
guucagguuuggacaaugaacua

SEQ ID NO: 3305 - RNA, 18 nt, Artificial Sequence
  Synthetic
gucucuugguaauaacua

SEQ ID NO: 3306 - RNA, 18 nt, Artificial Sequence
  Synthetic
gaauguaauauauaacua

SEQ ID NO: 3307 - RNA, 21 nt, Artificial Sequence
  Synthetic
gcagaauguaauauauaacua

SEQ ID NO: 3308 - RNA, 22 nt, Artificial Sequence
  Synthetic
gaauaacuuuguaaauuaacua

SEQ ID NO: 3309 - RNA, 19 nt, Artificial Sequence
  Synthetic
gugcauagucacuuaacua

SEQ ID NO: 3310 - RNA, 19 nt, Artificial Sequence
  Synthetic
guauguagaagguuaacua

SEQ ID NO: 3311 - RNA, 24 nt, Artificial Sequence
  Synthetic
gauuuguauguagaagguuaacua

SEQ ID NO: 3312 - RNA, 18 nt, Artificial Sequence
  Synthetic
ggacugcccuguccacua

SEQ ID NO: 3313 - RNA, 20 nt, Artificial Sequence
  Synthetic
guggacugcccuguccacua

SEQ ID NO: 3314 - RNA, 21 nt, Artificial Sequence
  Synthetic
gguggacugcccuguccacua

SEQ ID NO: 3315 - RNA, 23 nt, Artificial Sequence
  Synthetic
gugguggacugcccuguccacua

SEQ ID NO: 3316 - RNA, 21 nt, Artificial Sequence
  Synthetic
gacuuuugcuugaaaucacua

SEQ ID NO: 3317 - RNA, 22 nt, Artificial Sequence
  Synthetic
ggacuuuugcuugaaaucacua

SEQ ID NO: 3318 - RNA, 19 nt, Artificial Sequence
  Synthetic
guggucacuaugaucacua

SEQ ID NO: 3319 - RNA, 19 nt, Artificial Sequence
  Synthetic
gcgccaaugagcaagacua

SEQ ID NO: 3320 - RNA, 23 nt, Artificial Sequence
  Synthetic
guuagcgccaaugagcaagacua

SEQ ID NO: 3321 - RNA, 19 nt, Artificial Sequence
  Synthetic
gucugauugacucggacua

SEQ ID NO: 3322 - RNA, 20 nt, Artificial Sequence
  Synthetic
ggucugauugacucggacua

SEQ ID NO: 3323 - RNA, 20 nt, Artificial Sequence
  Synthetic
gcauguguguauuuggacua

SEQ ID NO: 3324 - RNA, 22 nt, Artificial Sequence
  Synthetic
gugcauguguguauuuggacua

SEQ ID NO: 3325 - RNA, 18 nt, Artificial Sequence
  Synthetic
gcccagccaaaaugacua

SEQ ID NO: 3326 - RNA, 21 nt, Artificial Sequence
  Synthetic
guagcccagccaaaaugacua

SEQ ID NO: 3327 - RNA, 23 nt, Artificial Sequence
  Synthetic
gaguagcccagccaaaaugacua

SEQ ID NO: 3328 - RNA, 24 nt, Artificial Sequence
  Synthetic
guauaaugaaaagauaagugacua

SEQ ID NO: 3329 - RNA, 20 nt, Artificial Sequence
  Synthetic
gaccuuugaacccaauacua

SEQ ID NO: 3330 - RNA, 21 nt, Artificial Sequence
  Synthetic
ggaccuuugaacccaauacua

SEQ ID NO: 3331 - RNA, 19 nt, Artificial Sequence
  Synthetic
gagaaugugguacauacua

SEQ ID NO: 3332 - RNA, 20 nt, Artificial Sequence
  Synthetic
ggagaaugugguacauacua

SEQ ID NO: 3333 - RNA, 21 nt, Artificial Sequence
  Synthetic
gggagaaugugguacauacua

SEQ ID NO: 3334 - RNA, 20 nt, Artificial Sequence
  Synthetic
gcugaagaacccugauacua

SEQ ID NO: 3335 - RNA, 20 nt, Artificial Sequence
  Synthetic
gacacaucauuuauguacua

SEQ ID NO: 3336 - RNA, 20 nt, Artificial Sequence
  Synthetic
gcaauaauaguauauuacua

SEQ ID NO: 3337 - RNA, 19 nt, Artificial Sequence
  Synthetic
gcuuucuuuguuauuacua

SEQ ID NO: 3338 - RNA, 19 nt, Artificial Sequence
  Synthetic
gcugucacaacaguuacua

SEQ ID NO: 3339 - RNA, 22 nt, Artificial Sequence
  Synthetic
gccgcugucacaacaguuacua

SEQ ID NO: 3340 - RNA, 23 nt, Artificial Sequence
  Synthetic
ggccgcugucacaacaguuacua

SEQ ID NO: 3341 - RNA, 23 nt, Artificial Sequence
  Synthetic
gccugcccuucaucccaaaccua

SEQ ID NO: 3342 - RNA, 19 nt, Artificial Sequence
  Synthetic
guuaggacaaguaaaccua

SEQ ID NO: 3343 - RNA, 23 nt, Artificial Sequence
  Synthetic
gaaacaaaugagggagacaccua

SEQ ID NO: 3344 - RNA, 22 nt, Artificial Sequence
  Synthetic
gaaaaccuggaaauacgaccua

SEQ ID NO: 3345 - RNA, 21 nt, Artificial Sequence
  Synthetic
gcauuuuuaucuuaugaccua

SEQ ID NO: 3346 - RNA, 19 nt, Artificial Sequence
  Synthetic
guggauuucuucauaccua

SEQ ID NO: 3347 - RNA, 20 nt, Artificial Sequence
  Synthetic
gguggauuucuucauaccua

SEQ ID NO: 3348 - RNA, 22 nt, Artificial Sequence
  Synthetic
gugguggauuucuucauaccua

SEQ ID NO: 3349 - RNA, 18 nt, Artificial Sequence
  Synthetic
gacagaggcagauaccua

SEQ ID NO: 3350 - RNA, 20 nt, Artificial Sequence
  Synthetic
gugacagaggcagauaccua

SEQ ID NO: 3351 - RNA, 19 nt, Artificial Sequence
  Synthetic
gaggucugugauuuaccua

SEQ ID NO: 3352 - RNA, 22 nt, Artificial Sequence
  Synthetic
gaugaggucugugauuuaccua

SEQ ID NO: 3353 - RNA, 23 nt, Artificial Sequence
  Synthetic
ggaugaggucugugauuuaccua

SEQ ID NO: 3354 - RNA, 18 nt, Artificial Sequence
  Synthetic
guaaaggguaaaacccua

SEQ ID NO: 3355 - RNA, 22 nt, Artificial Sequence
  Synthetic
gcauguaaaggguaaaacccua

SEQ ID NO: 3356 - RNA, 23 nt, Artificial Sequence
  Synthetic
ggcauguaaaggguaaaacccua

SEQ ID NO: 3357 - RNA, 22 nt, Artificial Sequence
  Synthetic
gauaauaguagccccuacccua

SEQ ID NO: 3358 - RNA, 19 nt, Artificial Sequence
  Synthetic
gaucaaagggagaccccua

SEQ ID NO: 3359 - RNA, 20 nt, Artificial Sequence
  Synthetic
gacacauucauuucccccua

SEQ ID NO: 3360 - RNA, 18 nt, Artificial Sequence
  Synthetic
guccuaagacauccccua

SEQ ID NO: 3361 - RNA, 19 nt, Artificial Sequence
  Synthetic
gguccuaagacauccccua

SEQ ID NO: 3362 - RNA, 19 nt, Artificial Sequence
  Synthetic
gauaaacaugucaucccua

SEQ ID NO: 3363 - RNA, 20 nt, Artificial Sequence
  Synthetic
ggauaaacaugucaucccua

SEQ ID NO: 3364 - RNA, 23 nt, Artificial Sequence
  Synthetic
gcaggauaaacaugucaucccua

SEQ ID NO: 3365 - RNA, 18 nt, Artificial Sequence
  Synthetic
gggccaaauguuucccua

SEQ ID NO: 3366 - RNA, 24 nt, Artificial Sequence
  Synthetic
gucuuagggccaaauguuucccua

SEQ ID NO: 3367 - RNA, 19 nt, Artificial Sequence
  Synthetic
gcugcaguuggaaagccua

SEQ ID NO: 3368 - RNA, 22 nt, Artificial Sequence
  Synthetic
gcugcugcaguuggaaagccua

SEQ ID NO: 3369 - RNA, 24 nt, Artificial Sequence
  Synthetic
gugcugcugcaguuggaaagccua

SEQ ID NO: 3370 - RNA, 21 nt, Artificial Sequence
  Synthetic
gauaagaauuaguacggccua

SEQ ID NO: 3371 - RNA, 18 nt, Artificial Sequence
  Synthetic
guuguaagucagggccua

SEQ ID NO: 3372 - RNA, 19 nt, Artificial Sequence
  Synthetic
gguuguaagucagggccua

SEQ ID NO: 3373 - RNA, 20 nt, Artificial Sequence
  Synthetic
ggguuguaagucagggccua

SEQ ID NO: 3374 - RNA, 22 nt, Artificial Sequence
  Synthetic
guaauaucacaacgaaugccua

SEQ ID NO: 3375 - RNA, 19 nt, Artificial Sequence
  Synthetic
gcgggagaauacuugccua

SEQ ID NO: 3376 - RNA, 20 nt, Artificial Sequence
  Synthetic
guuuaauagcauugauccua

SEQ ID NO: 3377 - RNA, 22 nt, Artificial Sequence
  Synthetic
guguuuaauagcauugauccua

SEQ ID NO: 3378 - RNA, 18 nt, Artificial Sequence
  Synthetic
ggccagcaaaaccuccua

SEQ ID NO: 3379 - RNA, 23 nt, Artificial Sequence
  Synthetic
guucacuauauaguuuccuccua

SEQ ID NO: 3380 - RNA, 20 nt, Artificial Sequence
  Synthetic
gauaggcagguucuguccua

SEQ ID NO: 3381 - RNA, 22 nt, Artificial Sequence
  Synthetic
gauaacuccuaagguuuuccua

SEQ ID NO: 3382 - RNA, 23 nt, Artificial Sequence
  Synthetic
guacuuaaaauauuuagaagcua

SEQ ID NO: 3383 - RNA, 21 nt, Artificial Sequence
  Synthetic
guuccaaaaagcuaucagcua

SEQ ID NO: 3384 - RNA, 22 nt, Artificial Sequence
  Synthetic
gguuccaaaaagcuaucagcua

SEQ ID NO: 3385 - RNA, 20 nt, Artificial Sequence
  Synthetic
guaaucaaaauguucagcua

SEQ ID NO: 3386 - RNA, 21 nt, Artificial Sequence
  Synthetic
gguaaucaaaauguucagcua

SEQ ID NO: 3387 - RNA, 22 nt, Artificial Sequence
  Synthetic
ggguaaucaaaauguucagcua

SEQ ID NO: 3388 - RNA, 18 nt, Artificial Sequence
  Synthetic
gugguguugcucuagcua

SEQ ID NO: 3389 - RNA, 24 nt, Artificial Sequence
  Synthetic
gacuccuagcauuugaaaccgcua

SEQ ID NO: 3390 - RNA, 18 nt, Artificial Sequence
  Synthetic
guguaagguaacaggcua

SEQ ID NO: 3391 - RNA, 23 nt, Artificial Sequence
  Synthetic
gcuuuguguaagguaacaggcua

SEQ ID NO: 3392 - RNA, 24 nt, Artificial Sequence
  Synthetic
gcucccacaguuacauacaggcua

SEQ ID NO: 3393 - RNA, 18 nt, Artificial Sequence
  Synthetic
gagaaauguucuaggcua

SEQ ID NO: 3394 - RNA, 19 nt, Artificial Sequence
  Synthetic
ggagaaauguucuaggcua

SEQ ID NO: 3395 - RNA, 21 nt, Artificial Sequence
  Synthetic
guuaauagcguuguauggcua

SEQ ID NO: 3396 - RNA, 22 nt, Artificial Sequence
  Synthetic
gauuuacuucauacaaaugcua

SEQ ID NO: 3397 - RNA, 18 nt, Artificial Sequence
  Synthetic
guuuauuacaguaugcua

SEQ ID NO: 3398 - RNA, 21 nt, Artificial Sequence
  Synthetic
gauguuuauuacaguaugcua

SEQ ID NO: 3399 - RNA, 22 nt, Artificial Sequence
  Synthetic
ggauguuuauuacaguaugcua

SEQ ID NO: 3400 - RNA, 19 nt, Artificial Sequence
  Synthetic
guacuuauuauaugugcua

SEQ ID NO: 3401 - RNA, 22 nt, Artificial Sequence
  Synthetic
gcaguacuuauuauaugugcua

SEQ ID NO: 3402 - RNA, 18 nt, Artificial Sequence
  Synthetic
guagaucuggaaaaucua

SEQ ID NO: 3403 - RNA, 24 nt, Artificial Sequence
  Synthetic
guuauaauuuaaugggagaaucua

SEQ ID NO: 3404 - RNA, 21 nt, Artificial Sequence
  Synthetic
guuucggauacuaugaaucua

SEQ ID NO: 3405 - RNA, 20 nt, Artificial Sequence
  Synthetic
gaucucacuugaaaacucua

SEQ ID NO: 3406 - RNA, 21 nt, Artificial Sequence
  Synthetic
gcuuauauaugaggaacucua

SEQ ID NO: 3407 - RNA, 18 nt, Artificial Sequence
  Synthetic
gaaaauaauggaacucua

SEQ ID NO: 3408 - RNA, 22 nt, Artificial Sequence
  Synthetic
gacagaaaauaauggaacucua

SEQ ID NO: 3409 - RNA, 18 nt, Artificial Sequence
  Synthetic
gagugaaaacuaccucua

SEQ ID NO: 3410 - RNA, 23 nt, Artificial Sequence
  Synthetic
gcuauaaaauaguggucccucua

SEQ ID NO: 3411 - RNA, 24 nt, Artificial Sequence
  Synthetic
ggcuauaaaauaguggucccucua

SEQ ID NO: 3412 - RNA, 22 nt, Artificial Sequence
  Synthetic
gccuuugggguuauauccucua

SEQ ID NO: 3413 - RNA, 23 nt, Artificial Sequence
  Synthetic
gaccacucuacuuucugucucua

SEQ ID NO: 3414 - RNA, 24 nt, Artificial Sequence
  Synthetic
guucaaacgccuucccuuucucua

SEQ ID NO: 3415 - RNA, 19 nt, Artificial Sequence
  Synthetic
gagauacaacugaagucua

SEQ ID NO: 3416 - RNA, 20 nt, Artificial Sequence
  Synthetic
ggagauacaacugaagucua

SEQ ID NO: 3417 - RNA, 24 nt, Artificial Sequence
  Synthetic
gauuggagauacaacugaagucua

SEQ ID NO: 3418 - RNA, 19 nt, Artificial Sequence
  Synthetic
gcaagugaaaaagagucua

SEQ ID NO: 3419 - RNA, 24 nt, Artificial Sequence
  Synthetic
gcaaagcaagugaaaaagagucua

SEQ ID NO: 3420 - RNA, 20 nt, Artificial Sequence
  Synthetic
gcauucccaaauguagucua

SEQ ID NO: 3421 - RNA, 23 nt, Artificial Sequence
  Synthetic
gaagcauucccaaauguagucua

SEQ ID NO: 3422 - RNA, 24 nt, Artificial Sequence
  Synthetic
ggaagcauucccaaauguagucua

SEQ ID NO: 3423 - RNA, 20 nt, Artificial Sequence
  Synthetic
gcucccuucacugcugucua

SEQ ID NO: 3424 - RNA, 20 nt, Artificial Sequence
  Synthetic
gaaauggcuaagauugucua

SEQ ID NO: 3425 - RNA, 24 nt, Artificial Sequence
  Synthetic
gauagaaauggcuaagauugucua

SEQ ID NO: 3426 - RNA, 19 nt, Artificial Sequence
  Synthetic
guucauuugaagaauucua

SEQ ID NO: 3427 - RNA, 20 nt, Artificial Sequence
  Synthetic
gguucauuugaagaauucua

SEQ ID NO: 3428 - RNA, 21 nt, Artificial Sequence
  Synthetic
ggguucauuugaagaauucua

SEQ ID NO: 3429 - RNA, 23 nt, Artificial Sequence
  Synthetic
gaggguucauuugaagaauucua

SEQ ID NO: 3430 - RNA, 24 nt, Artificial Sequence
  Synthetic
ggaggguucauuugaagaauucua

SEQ ID NO: 3431 - RNA, 20 nt, Artificial Sequence
  Synthetic
gccuccauucuuccauucua

SEQ ID NO: 3432 - RNA, 22 nt, Artificial Sequence
  Synthetic
gcauugucacaggaaacuucua

SEQ ID NO: 3433 - RNA, 18 nt, Artificial Sequence
  Synthetic
gugaauaucugccuucua

SEQ ID NO: 3434 - RNA, 20 nt, Artificial Sequence
  Synthetic
gagugaauaucugccuucua

SEQ ID NO: 3435 - RNA, 18 nt, Artificial Sequence
  Synthetic
ggcagagagcuccuucua

SEQ ID NO: 3436 - RNA, 21 nt, Artificial Sequence
  Synthetic
gaaggcagagagcuccuucua

SEQ ID NO: 3437 - RNA, 23 nt, Artificial Sequence
  Synthetic
gugaaggcagagagcuccuucua

SEQ ID NO: 3438 - RNA, 24 nt, Artificial Sequence
  Synthetic
ggugaaggcagagagcuccuucua

SEQ ID NO: 3439 - RNA, 18 nt, Artificial Sequence
  Synthetic
ggaaaagggauaguucua

SEQ ID NO: 3440 - RNA, 20 nt, Artificial Sequence
  Synthetic
gaggaaaagggauaguucua

SEQ ID NO: 3441 - RNA, 19 nt, Artificial Sequence
  Synthetic
gagucauuuuaauuuucua

SEQ ID NO: 3442 - RNA, 22 nt, Artificial Sequence
  Synthetic
guagagucauuuuaauuuucua

SEQ ID NO: 3443 - RNA, 23 nt, Artificial Sequence
  Synthetic
gccccgcucauuucuguuuucua

SEQ ID NO: 3444 - RNA, 24 nt, Artificial Sequence
  Synthetic
ggccccgcucauuucuguuuucua

SEQ ID NO: 3445 - RNA, 21 nt, Artificial Sequence
  Synthetic
gaauaucaaucacuuuuucua

SEQ ID NO: 3446 - RNA, 24 nt, Artificial Sequence
  Synthetic
guugaauaucaaucacuuuuucua

SEQ ID NO: 3447 - RNA, 22 nt, Artificial Sequence
  Synthetic
gucuaguucagacaaaaaagua

SEQ ID NO: 3448 - RNA, 23 nt, Artificial Sequence
  Synthetic
gaaaaucagcaggagucaaagua

SEQ ID NO: 3449 - RNA, 19 nt, Artificial Sequence
  Synthetic
guaaacacuccagaaagua

SEQ ID NO: 3450 - RNA, 23 nt, Artificial Sequence
  Synthetic
guaaguaaacacuccagaaagua

SEQ ID NO: 3451 - RNA, 20 nt, Artificial Sequence
  Synthetic
gucacagaggcaggaaagua

SEQ ID NO: 3452 - RNA, 22 nt, Artificial Sequence
  Synthetic
gagucacagaggcaggaaagua

SEQ ID NO: 3453 - RNA, 19 nt, Artificial Sequence
  Synthetic
gugcaguuggaugaaagua

SEQ ID NO: 3454 - RNA, 21 nt, Artificial Sequence
  Synthetic
gagugcaguuggaugaaagua

SEQ ID NO: 3455 - RNA, 21 nt, Artificial Sequence
  Synthetic
gcuugguagaauuaggaagua

SEQ ID NO: 3456 - RNA, 23 nt, Artificial Sequence
  Synthetic
gagcuugguagaauuaggaagua

SEQ ID NO: 3457 - RNA, 24 nt, Artificial Sequence
  Synthetic
gcuuuuucuucaaauucugaagua

SEQ ID NO: 3458 - RNA, 19 nt, Artificial Sequence
  Synthetic
gaugaaguuaaucuaagua

SEQ ID NO: 3459 - RNA, 22 nt, Artificial Sequence
  Synthetic
gcagaugaaguuaaucuaagua

SEQ ID NO: 3460 - RNA, 20 nt, Artificial Sequence
  Synthetic
gucucuguauucagacagua

SEQ ID NO: 3461 - RNA, 23 nt, Artificial Sequence
  Synthetic
gucacacucuaacagugacagua

SEQ ID NO: 3462 - RNA, 18 nt, Artificial Sequence
  Synthetic
gaggcaaggcagccagua

SEQ ID NO: 3463 - RNA, 20 nt, Artificial Sequence
  Synthetic
gugaggcaaggcagccagua

SEQ ID NO: 3464 - RNA, 21 nt, Artificial Sequence
  Synthetic
ggugaggcaaggcagccagua

SEQ ID NO: 3465 - RNA, 23 nt, Artificial Sequence
  Synthetic
gaagucuuuccaugaaggcagua

SEQ ID NO: 3466 - RNA, 24 nt, Artificial Sequence
  Synthetic
ggaagucuuuccaugaaggcagua

SEQ ID NO: 3467 - RNA, 18 nt, Artificial Sequence
  Synthetic
guggaguaauaggcagua

SEQ ID NO: 3468 - RNA, 21 nt, Artificial Sequence
  Synthetic
gaaguggaguaauaggcagua

SEQ ID NO: 3469 - RNA, 19 nt, Artificial Sequence
  Synthetic
gcugugcucccuggcagua

SEQ ID NO: 3470 - RNA, 21 nt, Artificial Sequence
  Synthetic
gaaucucuaggaggaucagua

SEQ ID NO: 3471 - RNA, 18 nt, Artificial Sequence
  Synthetic
gagaccugcaacucagua

SEQ ID NO: 3472 - RNA, 21 nt, Artificial Sequence
  Synthetic
gcagagaccugcaacucagua

SEQ ID NO: 3473 - RNA, 24 nt, Artificial Sequence
  Synthetic
gaagcagagaccugcaacucagua

SEQ ID NO: 3474 - RNA, 19 nt, Artificial Sequence
  Synthetic
gcuaauagagacgucagua

SEQ ID NO: 3475 - RNA, 22 nt, Artificial Sequence
  Synthetic
guuauuagauacuaugucagua

SEQ ID NO: 3476 - RNA, 24 nt, Artificial Sequence
  Synthetic
guaaaaauccauuuuguuucagua

SEQ ID NO: 3477 - RNA, 19 nt, Artificial Sequence
  Synthetic
gaaaucaacucuaagagua

SEQ ID NO: 3478 - RNA, 21 nt, Artificial Sequence
  Synthetic
guuaaaguaugccccagagua

SEQ ID NO: 3479 - RNA, 23 nt, Artificial Sequence
  Synthetic
guguuaaaguaugccccagagua

SEQ ID NO: 3480 - RNA, 23 nt, Artificial Sequence
  Synthetic
guauuauuaaccacaagagagua

SEQ ID NO: 3481 - RNA, 21 nt, Artificial Sequence
  Synthetic
guuaugauaagcaguagagua

SEQ ID NO: 3482 - RNA, 22 nt, Artificial Sequence
  Synthetic
gguuaugauaagcaguagagua

SEQ ID NO: 3483 - RNA, 24 nt, Artificial Sequence
  Synthetic
gugguuaugauaagcaguagagua

SEQ ID NO: 3484 - RNA, 23 nt, Artificial Sequence
  Synthetic
gaucaauuaaaauauaucgagua

SEQ ID NO: 3485 - RNA, 23 nt, Artificial Sequence
  Synthetic
guuauuccuauagaggaggagua

SEQ ID NO: 3486 - RNA, 21 nt, Artificial Sequence
  Synthetic
gcuaacuauuaaagaugagua

SEQ ID NO: 3487 - RNA, 19 nt, Artificial Sequence
  Synthetic
gacauaaugccacugagua

SEQ ID NO: 3488 - RNA, 20 nt, Artificial Sequence
  Synthetic
guuuaauaggaaagugagua

SEQ ID NO: 3489 - RNA, 23 nt, Artificial Sequence
  Synthetic
gauguuuaauaggaaagugagua

SEQ ID NO: 3490 - RNA, 24 nt, Artificial Sequence
  Synthetic
gaucuuuuagcaaaccugugagua

SEQ ID NO: 3491 - RNA, 18 nt, Artificial Sequence
  Synthetic
gcagaccaaagcauagua

SEQ ID NO: 3492 - RNA, 22 nt, Artificial Sequence
  Synthetic
gaaugcagaccaaagcauagua

SEQ ID NO: 3493 - RNA, 23 nt, Artificial Sequence
  Synthetic
ggaaugcagaccaaagcauagua

SEQ ID NO: 3494 - RNA, 18 nt, Artificial Sequence
  Synthetic
ggucccucuuucauagua

SEQ ID NO: 3495 - RNA, 20 nt, Artificial Sequence
  Synthetic
guggucccucuuucauagua

SEQ ID NO: 3496 - RNA, 22 nt, Artificial Sequence
  Synthetic
gauaauucuggcauugauagua

SEQ ID NO: 3497 - RNA, 21 nt, Artificial Sequence
  Synthetic
guguacuuuuaaauacuagua

SEQ ID NO: 3498 - RNA, 23 nt, Artificial Sequence
  Synthetic
guguguacuuuuaaauacuagua

SEQ ID NO: 3499 - RNA, 19 nt, Artificial Sequence
  Synthetic
gaucacacaaccaguagua

SEQ ID NO: 3500 - RNA, 20 nt, Artificial Sequence
  Synthetic
ggaucacacaaccaguagua

SEQ ID NO: 3501 - RNA, 19 nt, Artificial Sequence
  Synthetic
guacuacucaguaguagua

SEQ ID NO: 3502 - RNA, 22 nt, Artificial Sequence
  Synthetic
guaguacuacucaguaguagua

SEQ ID NO: 3503 - RNA, 18 nt, Artificial Sequence
  Synthetic
gacuuugcugaauuagua

SEQ ID NO: 3504 - RNA, 19 nt, Artificial Sequence
  Synthetic
gugaucguagacauuagua

SEQ ID NO: 3505 - RNA, 23 nt, Artificial Sequence
  Synthetic
gauugugaucguagacauuagua

SEQ ID NO: 3506 - RNA, 24 nt, Artificial Sequence
  Synthetic
gauaaacacuuucuuuggcacgua

SEQ ID NO: 3507 - RNA, 18 nt, Artificial Sequence
  Synthetic
gugaucaguaaguacgua

SEQ ID NO: 3508 - RNA, 19 nt, Artificial Sequence
  Synthetic
gauaccuaaauauagcgua

SEQ ID NO: 3509 - RNA, 20 nt, Artificial Sequence
  Synthetic
ggauaccuaaauauagcgua

SEQ ID NO: 3510 - RNA, 21 nt, Artificial Sequence
  Synthetic
gggauaccuaaauauagcgua

SEQ ID NO: 3511 - RNA, 18 nt, Artificial Sequence
  Synthetic
guucauuuucuaaaggua

SEQ ID NO: 3512 - RNA, 20 nt, Artificial Sequence
  Synthetic
gcaccuagcacuuaaaggua

SEQ ID NO: 3513 - RNA, 18 nt, Artificial Sequence
  Synthetic
gacuuuugagucaaggua

SEQ ID NO: 3514 - RNA, 21 nt, Artificial Sequence
  Synthetic
guagacuuuugagucaaggua

SEQ ID NO: 3515 - RNA, 23 nt, Artificial Sequence
  Synthetic
guuuaauuucuggaaugcaggua

SEQ ID NO: 3516 - RNA, 24 nt, Artificial Sequence
  Synthetic
gguuuaauuucuggaaugcaggua

SEQ ID NO: 3517 - RNA, 19 nt, Artificial Sequence
  Synthetic
guggaagagaauucaggua

SEQ ID NO: 3518 - RNA, 24 nt, Artificial Sequence
  Synthetic
guaaaguggaagagaauucaggua

SEQ ID NO: 3519 - RNA, 21 nt, Artificial Sequence
  Synthetic
gauccugguacacaauaggua

SEQ ID NO: 3520 - RNA, 18 nt, Artificial Sequence
  Synthetic
gaucuuguaggauaggua

SEQ ID NO: 3521 - RNA, 19 nt, Artificial Sequence
  Synthetic
gaaguuguguaacuaggua

SEQ ID NO: 3522 - RNA, 22 nt, Artificial Sequence
  Synthetic
gcuaagaaggaaagaaagggua

SEQ ID NO: 3523 - RNA, 20 nt, Artificial Sequence
  Synthetic
guuugcugaugaauggggua

SEQ ID NO: 3524 - RNA, 21 nt, Artificial Sequence
  Synthetic
gguuugcugaugaauggggua

SEQ ID NO: 3525 - RNA, 19 nt, Artificial Sequence
  Synthetic
guggaguaggaaaugggua

SEQ ID NO: 3526 - RNA, 21 nt, Artificial Sequence
  Synthetic
gaguggaguaggaaaugggua

SEQ ID NO: 3527 - RNA, 22 nt, Artificial Sequence
  Synthetic
gacccagacuuugcaaugggua

SEQ ID NO: 3528 - RNA, 19 nt, Artificial Sequence
  Synthetic
gauaggaaaauuaugggua

SEQ ID NO: 3529 - RNA, 20 nt, Artificial Sequence
  Synthetic
ggauaggaaaauuaugggua

SEQ ID NO: 3530 - RNA, 21 nt, Artificial Sequence
  Synthetic
gggauaggaaaauuaugggua

SEQ ID NO: 3531 - RNA, 18 nt, Artificial Sequence
  Synthetic
gcauuuagugacugggua

SEQ ID NO: 3532 - RNA, 21 nt, Artificial Sequence
  Synthetic
gcuuccacgcuuucgugggua

SEQ ID NO: 3533 - RNA, 19 nt, Artificial Sequence
  Synthetic
gcauucauucaggugggua

SEQ ID NO: 3534 - RNA, 23 nt, Artificial Sequence
  Synthetic
guauauauggaaaaagaauggua

SEQ ID NO: 3535 - RNA, 19 nt, Artificial Sequence
  Synthetic
gagggccugacacauggua

SEQ ID NO: 3536 - RNA, 21 nt, Artificial Sequence
  Synthetic
gugagggccugacacauggua

SEQ ID NO: 3537 - RNA, 21 nt, Artificial Sequence
  Synthetic
gcuuagcaaagccaaguggua

SEQ ID NO: 3538 - RNA, 24 nt, Artificial Sequence
  Synthetic
gaugcuuagcaaagccaaguggua

SEQ ID NO: 3539 - RNA, 20 nt, Artificial Sequence
  Synthetic
gcugaucugaacagguggua

SEQ ID NO: 3540 - RNA, 22 nt, Artificial Sequence
  Synthetic
gaaaaaguucaugguuguggua

SEQ ID NO: 3541 - RNA, 24 nt, Artificial Sequence
  Synthetic
gugaaaaaguucaugguuguggua

SEQ ID NO: 3542 - RNA, 18 nt, Artificial Sequence
  Synthetic
guucuugugucauuggua

SEQ ID NO: 3543 - RNA, 21 nt, Artificial Sequence
  Synthetic
gcaguucuugugucauuggua

SEQ ID NO: 3544 - RNA, 23 nt, Artificial Sequence
  Synthetic
gagcaguucuugugucauuggua

SEQ ID NO: 3545 - RNA, 20 nt, Artificial Sequence
  Synthetic
gcuuggaaauuuuauuggua

SEQ ID NO: 3546 - RNA, 23 nt, Artificial Sequence
  Synthetic
gauggauguucaauaaaaaugua

SEQ ID NO: 3547 - RNA, 23 nt, Artificial Sequence
  Synthetic
gaaauuuaucuuucccaaaugua

SEQ ID NO: 3548 - RNA, 24 nt, Artificial Sequence
  Synthetic
ggaaauuuaucuuucccaaaugua

SEQ ID NO: 3549 - RNA, 21 nt, Artificial Sequence
  Synthetic
guucugucaguaagcaaugua

SEQ ID NO: 3550 - RNA, 21 nt, Artificial Sequence
  Synthetic
gcuuaucgaaaacggaaugua

SEQ ID NO: 3551 - RNA, 22 nt, Artificial Sequence
  Synthetic
ggcuuaucgaaaacggaaugua

SEQ ID NO: 3552 - RNA, 18 nt, Artificial Sequence
  Synthetic
gagacaaugaugaaugua

SEQ ID NO: 3553 - RNA, 20 nt, Artificial Sequence
  Synthetic
gugagacaaugaugaaugua

SEQ ID NO: 3554 - RNA, 22 nt, Artificial Sequence
  Synthetic
gucaaauguauuguugaaugua

SEQ ID NO: 3555 - RNA, 21 nt, Artificial Sequence
  Synthetic
gucauucaaauaaauaaugua

SEQ ID NO: 3556 - RNA, 24 nt, Artificial Sequence
  Synthetic
gaugucauucaaauaaauaaugua

SEQ ID NO: 3557 - RNA, 20 nt, Artificial Sequence
  Synthetic
gaagcacucacaauaaugua

SEQ ID NO: 3558 - RNA, 21 nt, Artificial Sequence
  Synthetic
ggaagcacucacaauaaugua

SEQ ID NO: 3559 - RNA, 21 nt, Artificial Sequence
  Synthetic
gcuuugggacaguaacaugua

SEQ ID NO: 3560 - RNA, 22 nt, Artificial Sequence
  Synthetic
guauaaaucuaucauacaugua

SEQ ID NO: 3561 - RNA, 23 nt, Artificial Sequence
  Synthetic
gguauaaaucuaucauacaugua

SEQ ID NO: 3562 - RNA, 19 nt, Artificial Sequence
  Synthetic
gacaauuuaauggcaugua

SEQ ID NO: 3563 - RNA, 20 nt, Artificial Sequence
  Synthetic
guaugguuucaauagaugua

SEQ ID NO: 3564 - RNA, 24 nt, Artificial Sequence
  Synthetic
gcacguaugguuucaauagaugua

SEQ ID NO: 3565 - RNA, 18 nt, Artificial Sequence
  Synthetic
ggcaauccaaaggaugua

SEQ ID NO: 3566 - RNA, 18 nt, Artificial Sequence
  Synthetic
ggaaaaauuaaugaugua

SEQ ID NO: 3567 - RNA, 23 nt, Artificial Sequence
  Synthetic
gaauaggaaaaauuaaugaugua

SEQ ID NO: 3568 - RNA, 18 nt, Artificial Sequence
  Synthetic
guugcaguuugcuaugua

SEQ ID NO: 3569 - RNA, 19 nt, Artificial Sequence
  Synthetic
gguugcaguuugcuaugua

SEQ ID NO: 3570 - RNA, 20 nt, Artificial Sequence
  Synthetic
ggguugcaguuugcuaugua

SEQ ID NO: 3571 - RNA, 19 nt, Artificial Sequence
  Synthetic
guaugaaaggcuguaugua

SEQ ID NO: 3572 - RNA, 20 nt, Artificial Sequence
  Synthetic
gaaaacugugccuaacugua

SEQ ID NO: 3573 - RNA, 23 nt, Artificial Sequence
  Synthetic
gaugaaaacugugccuaacugua

SEQ ID NO: 3574 - RNA, 21 nt, Artificial Sequence
  Synthetic
guuaagagaaagcaaccugua

SEQ ID NO: 3575 - RNA, 23 nt, Artificial Sequence
  Synthetic
gaaaauuucacaccugaccugua

SEQ ID NO: 3576 - RNA, 24 nt, Artificial Sequence
  Synthetic
ggaaaauuucacaccugaccugua

SEQ ID NO: 3577 - RNA, 24 nt, Artificial Sequence
  Synthetic
gccaacucacauuuuuagccugua

SEQ ID NO: 3578 - RNA, 20 nt, Artificial Sequence
  Synthetic
gucugucuccaacagcugua

SEQ ID NO: 3579 - RNA, 22 nt, Artificial Sequence
  Synthetic
gugucugucuccaacagcugua

SEQ ID NO: 3580 - RNA, 20 nt, Artificial Sequence
  Synthetic
gaaaauaaauaaucgcugua

SEQ ID NO: 3581 - RNA, 19 nt, Artificial Sequence
  Synthetic
gaauuaaagauaaucugua

SEQ ID NO: 3582 - RNA, 24 nt, Artificial Sequence
  Synthetic
guucagaauuaaagauaaucugua

SEQ ID NO: 3583 - RNA, 18 nt, Artificial Sequence
  Synthetic
gcuuauaacagaucugua

SEQ ID NO: 3584 - RNA, 19 nt, Artificial Sequence
  Synthetic
ggcuuauaacagaucugua

SEQ ID NO: 3585 - RNA, 24 nt, Artificial Sequence
  Synthetic
gccaaggcuuauaacagaucugua

SEQ ID NO: 3586 - RNA, 21 nt, Artificial Sequence
  Synthetic
gcacaacaucucuccucugua

SEQ ID NO: 3587 - RNA, 21 nt, Artificial Sequence
  Synthetic
gaucucuuauucugaagugua

SEQ ID NO: 3588 - RNA, 23 nt, Artificial Sequence
  Synthetic
gucauuacaggcacuucagugua

SEQ ID NO: 3589 - RNA, 20 nt, Artificial Sequence
  Synthetic
gcaacucaguaaagagugua

SEQ ID NO: 3590 - RNA, 19 nt, Artificial Sequence
  Synthetic
gugauaugggcagagugua

SEQ ID NO: 3591 - RNA, 20 nt, Artificial Sequence
  Synthetic
ggugauaugggcagagugua

SEQ ID NO: 3592 - RNA, 21 nt, Artificial Sequence
  Synthetic
gggugauaugggcagagugua

SEQ ID NO: 3593 - RNA, 22 nt, Artificial Sequence
  Synthetic
ggggugauaugggcagagugua

SEQ ID NO: 3594 - RNA, 22 nt, Artificial Sequence
  Synthetic
guucaaagaauccaguagugua

SEQ ID NO: 3595 - RNA, 23 nt, Artificial Sequence
  Synthetic
gguucaaagaauccaguagugua

SEQ ID NO: 3596 - RNA, 23 nt, Artificial Sequence
  Synthetic
gacuacuuguguggauuagugua

SEQ ID NO: 3597 - RNA, 18 nt, Artificial Sequence
  Synthetic
gaaaaucuuugaggugua

SEQ ID NO: 3598 - RNA, 24 nt, Artificial Sequence
  Synthetic
gaaaucgaaaaucuuugaggugua

SEQ ID NO: 3599 - RNA, 21 nt, Artificial Sequence
  Synthetic
gauaagcacagguagggugua

SEQ ID NO: 3600 - RNA, 24 nt, Artificial Sequence
  Synthetic
gcugauaagcacagguagggugua

SEQ ID NO: 3601 - RNA, 23 nt, Artificial Sequence
  Synthetic
gccuauuucauagaguuggugua

SEQ ID NO: 3602 - RNA, 24 nt, Artificial Sequence
  Synthetic
ggccuauuucauagaguuggugua

SEQ ID NO: 3603 - RNA, 23 nt, Artificial Sequence
  Synthetic
gccucuaaccuuccaaaauugua

SEQ ID NO: 3604 - RNA, 24 nt, Artificial Sequence
  Synthetic
ggccucuaaccuuccaaaauugua

SEQ ID NO: 3605 - RNA, 20 nt, Artificial Sequence
  Synthetic
gaucauauucuucuauugua

SEQ ID NO: 3606 - RNA, 19 nt, Artificial Sequence
  Synthetic
guucaguggacaacuugua

SEQ ID NO: 3607 - RNA, 18 nt, Artificial Sequence
  Synthetic
gucuuccgggacguugua

SEQ ID NO: 3608 - RNA, 21 nt, Artificial Sequence
  Synthetic
gcagucuuccgggacguugua

SEQ ID NO: 3609 - RNA, 23 nt, Artificial Sequence
  Synthetic
gugcagucuuccgggacguugua

SEQ ID NO: 3610 - RNA, 18 nt, Artificial Sequence
  Synthetic
gaccugguugguguugua

SEQ ID NO: 3611 - RNA, 20 nt, Artificial Sequence
  Synthetic
gagaccugguugguguugua

SEQ ID NO: 3612 - RNA, 24 nt, Artificial Sequence
  Synthetic
guaugagaccugguugguguugua

SEQ ID NO: 3613 - RNA, 19 nt, Artificial Sequence
  Synthetic
guuaaguaggauuguugua

SEQ ID NO: 3614 - RNA, 20 nt, Artificial Sequence
  Synthetic
gguuaaguaggauuguugua

SEQ ID NO: 3615 - RNA, 24 nt, Artificial Sequence
  Synthetic
gaaagguuaaguaggauuguugua

SEQ ID NO: 3616 - RNA, 18 nt, Artificial Sequence
  Synthetic
guguuuucucuuguugua

SEQ ID NO: 3617 - RNA, 19 nt, Artificial Sequence
  Synthetic
gugguuauaaauauuugua

SEQ ID NO: 3618 - RNA, 19 nt, Artificial Sequence
  Synthetic
gauuuaauuguuguuugua

SEQ ID NO: 3619 - RNA, 18 nt, Artificial Sequence
  Synthetic
ggauaaauuuauuuugua

SEQ ID NO: 3620 - RNA, 23 nt, Artificial Sequence
  Synthetic
gacccacuuugaaucuaaaauua

SEQ ID NO: 3621 - RNA, 18 nt, Artificial Sequence
  Synthetic
guacacacaaucaaauua

SEQ ID NO: 3622 - RNA, 21 nt, Artificial Sequence
  Synthetic
guaguacacacaaucaaauua

SEQ ID NO: 3623 - RNA, 23 nt, Artificial Sequence
  Synthetic
gaaauucaauacuuuucaaauua

SEQ ID NO: 3624 - RNA, 20 nt, Artificial Sequence
  Synthetic
gaaugcacauuuauaaauua

SEQ ID NO: 3625 - RNA, 21 nt, Artificial Sequence
  Synthetic
ggaaugcacauuuauaaauua

SEQ ID NO: 3626 - RNA, 22 nt, Artificial Sequence
  Synthetic
gggaaugcacauuuauaaauua

SEQ ID NO: 3627 - RNA, 23 nt, Artificial Sequence
  Synthetic
ggggaaugcacauuuauaaauua

SEQ ID NO: 3628 - RNA, 19 nt, Artificial Sequence
  Synthetic
gagagaagaggcuaaauua

SEQ ID NO: 3629 - RNA, 23 nt, Artificial Sequence
  Synthetic
gcuagagagaagaggcuaaauua

SEQ ID NO: 3630 - RNA, 24 nt, Artificial Sequence
  Synthetic
ggcuagagagaagaggcuaaauua

SEQ ID NO: 3631 - RNA, 20 nt, Artificial Sequence
  Synthetic
gauuaauaagauaacaauua

SEQ ID NO: 3632 - RNA, 22 nt, Artificial Sequence
  Synthetic
gagauuaauaagauaacaauua

SEQ ID NO: 3633 - RNA, 20 nt, Artificial Sequence
  Synthetic
gacugacucguuuucaauua

SEQ ID NO: 3634 - RNA, 23 nt, Artificial Sequence
  Synthetic
gccgucuugaagugacagaauua

SEQ ID NO: 3635 - RNA, 19 nt, Artificial Sequence
  Synthetic
gugucugucagcagaauua

SEQ ID NO: 3636 - RNA, 23 nt, Artificial Sequence
  Synthetic
gcaugugucugucagcagaauua

SEQ ID NO: 3637 - RNA, 19 nt, Artificial Sequence
  Synthetic
guauaugaaaagagaauua

SEQ ID NO: 3638 - RNA, 20 nt, Artificial Sequence
  Synthetic
gguauaugaaaagagaauua

SEQ ID NO: 3639 - RNA, 22 nt, Artificial Sequence
  Synthetic
gugguauaugaaaagagaauua

SEQ ID NO: 3640 - RNA, 24 nt, Artificial Sequence
  Synthetic
gagugguauaugaaaagagaauua

SEQ ID NO: 3641 - RNA, 21 nt, Artificial Sequence
  Synthetic
gcaagaaugauuugagaauua

SEQ ID NO: 3642 - RNA, 20 nt, Artificial Sequence
  Synthetic
guaaguaaaauaaugaauua

SEQ ID NO: 3643 - RNA, 22 nt, Artificial Sequence
  Synthetic
gaauggaugcauggaugaauua

SEQ ID NO: 3644 - RNA, 23 nt, Artificial Sequence
  Synthetic
ggaauggaugcauggaugaauua

SEQ ID NO: 3645 - RNA, 20 nt, Artificial Sequence
  Synthetic
gacucagagucccugaauua

SEQ ID NO: 3646 - RNA, 21 nt, Artificial Sequence
  Synthetic
ggacucagagucccugaauua

SEQ ID NO: 3647 - RNA, 24 nt, Artificial Sequence
  Synthetic
gaaggacucagagucccugaauua

SEQ ID NO: 3648 - RNA, 24 nt, Artificial Sequence
  Synthetic
gcauuuuaaacauuuggugaauua

SEQ ID NO: 3649 - RNA, 18 nt, Artificial Sequence
  Synthetic
gguuagcucugugaauua

SEQ ID NO: 3650 - RNA, 21 nt, Artificial Sequence
  Synthetic
gaauguacaucuguugaauua

SEQ ID NO: 3651 - RNA, 20 nt, Artificial Sequence
  Synthetic
gcacaaucaauuuugaauua

SEQ ID NO: 3652 - RNA, 22 nt, Artificial Sequence
  Synthetic
gagcacaaucaauuuugaauua

SEQ ID NO: 3653 - RNA, 24 nt, Artificial Sequence
  Synthetic
gagagcacaaucaauuuugaauua

SEQ ID NO: 3654 - RNA, 23 nt, Artificial Sequence
  Synthetic
gcauucuguagcuucccuaauua

SEQ ID NO: 3655 - RNA, 24 nt, Artificial Sequence
  Synthetic
ggcauucuguagcuucccuaauua

SEQ ID NO: 3656 - RNA, 20 nt, Artificial Sequence
  Synthetic
gauauauguuuuucuaauua

SEQ ID NO: 3657 - RNA, 21 nt, Artificial Sequence
  Synthetic
ggauauauguuuuucuaauua

SEQ ID NO: 3658 - RNA, 22 nt, Artificial Sequence
  Synthetic
guagaugaaaaugaaguaauua

SEQ ID NO: 3659 - RNA, 24 nt, Artificial Sequence
  Synthetic
guacucugguaguugauaacauua

SEQ ID NO: 3660 - RNA, 19 nt, Artificial Sequence
  Synthetic
gaaacugagcuagacauua

SEQ ID NO: 3661 - RNA, 19 nt, Artificial Sequence
  Synthetic
guucagaauacauacauua

SEQ ID NO: 3662 - RNA, 21 nt, Artificial Sequence
  Synthetic
gcguucagaauacauacauua

SEQ ID NO: 3663 - RNA, 23 nt, Artificial Sequence
  Synthetic
gagcguucagaauacauacauua

SEQ ID NO: 3664 - RNA, 24 nt, Artificial Sequence
  Synthetic
ggagcguucagaauacauacauua

SEQ ID NO: 3665 - RNA, 19 nt, Artificial Sequence
  Synthetic
gucucugugcuauacauua

SEQ ID NO: 3666 - RNA, 21 nt, Artificial Sequence
  Synthetic
gugucucugugcuauacauua

SEQ ID NO: 3667 - RNA, 22 nt, Artificial Sequence
  Synthetic
ggugucucugugcuauacauua

SEQ ID NO: 3668 - RNA, 23 nt, Artificial Sequence
  Synthetic
gggugucucugugcuauacauua

SEQ ID NO: 3669 - RNA, 24 nt, Artificial Sequence
  Synthetic
ggggugucucugugcuauacauua

SEQ ID NO: 3670 - RNA, 22 nt, Artificial Sequence
  Synthetic
gaaaaacuuaagccaggcauua

SEQ ID NO: 3671 - RNA, 23 nt, Artificial Sequence
  Synthetic
ggaaaaacuuaagccaggcauua

SEQ ID NO: 3672 - RNA, 18 nt, Artificial Sequence
  Synthetic
gguaauaagugcucauua

SEQ ID NO: 3673 - RNA, 19 nt, Artificial Sequence
  Synthetic
gagaagucugaucucauua

SEQ ID NO: 3674 - RNA, 19 nt, Artificial Sequence
  Synthetic
gagauuacccuucucauua

SEQ ID NO: 3675 - RNA, 22 nt, Artificial Sequence
  Synthetic
gcugagauuacccuucucauua

SEQ ID NO: 3676 - RNA, 24 nt, Artificial Sequence
  Synthetic
gauccuuuaugcuuuuauucauua

SEQ ID NO: 3677 - RNA, 19 nt, Artificial Sequence
  Synthetic
guauucuggaauaagauua

SEQ ID NO: 3678 - RNA, 18 nt, Artificial Sequence
  Synthetic
guaccaaaagugagauua

SEQ ID NO: 3679 - RNA, 24 nt, Artificial Sequence
  Synthetic
gauaaaguaccaaaagugagauua

SEQ ID NO: 3680 - RNA, 18 nt, Artificial Sequence
  Synthetic
guuuuagaaaaccgauua

SEQ ID NO: 3681 - RNA, 20 nt, Artificial Sequence
  Synthetic
guguuuuagaaaaccgauua

SEQ ID NO: 3682 - RNA, 20 nt, Artificial Sequence
  Synthetic
gaaacacuguucuaggauua

SEQ ID NO: 3683 - RNA, 22 nt, Artificial Sequence
  Synthetic
gagaaacacuguucuaggauua

SEQ ID NO: 3684 - RNA, 22 nt, Artificial Sequence
  Synthetic
gcacagagggauagauggauua

SEQ ID NO: 3685 - RNA, 24 nt, Artificial Sequence
  Synthetic
gucauaacaguuggcacuggauua

SEQ ID NO: 3686 - RNA, 20 nt, Artificial Sequence
  Synthetic
gauuauuaccuuuaugauua

SEQ ID NO: 3687 - RNA, 23 nt, Artificial Sequence
  Synthetic
gaagauuauuaccuuuaugauua

SEQ ID NO: 3688 - RNA, 19 nt, Artificial Sequence
  Synthetic
guaaaaucaaaagugauua

SEQ ID NO: 3689 - RNA, 20 nt, Artificial Sequence
  Synthetic
gguaaaaucaaaagugauua

SEQ ID NO: 3690 - RNA, 23 nt, Artificial Sequence
  Synthetic
gaugguaaaaucaaaagugauua

SEQ ID NO: 3691 - RNA, 22 nt, Artificial Sequence
  Synthetic
guaggagaauacaaaaauauua

SEQ ID NO: 3692 - RNA, 24 nt, Artificial Sequence
  Synthetic
gaguaggagaauacaaaaauauua

SEQ ID NO: 3693 - RNA, 22 nt, Artificial Sequence
  Synthetic
gcaaaauuauauuacaauauua

SEQ ID NO: 3694 - RNA, 22 nt, Artificial Sequence
  Synthetic
guaaauaugcccuuuaauauua

SEQ ID NO: 3695 - RNA, 19 nt, Artificial Sequence
  Synthetic
gugcuggagaaauauauua

SEQ ID NO: 3696 - RNA, 24 nt, Artificial Sequence
  Synthetic
gaacugugcuggagaaauauauua

SEQ ID NO: 3697 - RNA, 20 nt, Artificial Sequence
  Synthetic
gauuaugaguaaauauauua

SEQ ID NO: 3698 - RNA, 23 nt, Artificial Sequence
  Synthetic
gaugauuaugaguaaauauauua

SEQ ID NO: 3699 - RNA, 23 nt, Artificial Sequence
  Synthetic
guuuuuagucgacaacuauauua

SEQ ID NO: 3700 - RNA, 23 nt, Artificial Sequence
  Synthetic
gauauaauuuuccugaacuauua

SEQ ID NO: 3701 - RNA, 20 nt, Artificial Sequence
  Synthetic
guugucauaacagacuauua

SEQ ID NO: 3702 - RNA, 23 nt, Artificial Sequence
  Synthetic
gcaguugucauaacagacuauua

SEQ ID NO: 3703 - RNA, 18 nt, Artificial Sequence
  Synthetic
gugaucuuaaggcuauua

SEQ ID NO: 3704 - RNA, 20 nt, Artificial Sequence
  Synthetic
guugaaauuacaaucuauua

SEQ ID NO: 3705 - RNA, 20 nt, Artificial Sequence
  Synthetic
guaauauacucucaguauua

SEQ ID NO: 3706 - RNA, 18 nt, Artificial Sequence
  Synthetic
gaaagaguuaagguauua

SEQ ID NO: 3707 - RNA, 20 nt, Artificial Sequence
  Synthetic
gagaaagaguuaagguauua

SEQ ID NO: 3708 - RNA, 20 nt, Artificial Sequence
  Synthetic
guuuggacauauagguauua

SEQ ID NO: 3709 - RNA, 18 nt, Artificial Sequence
  Synthetic
gggagacauuggguauua

SEQ ID NO: 3710 - RNA, 23 nt, Artificial Sequence
  Synthetic
gaacaauaauacuaccuguauua

SEQ ID NO: 3711 - RNA, 24 nt, Artificial Sequence
  Synthetic
ggaacaauaauacuaccuguauua

SEQ ID NO: 3712 - RNA, 21 nt, Artificial Sequence
  Synthetic
gaaaucugauugccauuauua

SEQ ID NO: 3713 - RNA, 18 nt, Artificial Sequence
  Synthetic
gaugacauaauauuauua

SEQ ID NO: 3714 - RNA, 22 nt, Artificial Sequence
  Synthetic
gacugaugacauaauauuauua

SEQ ID NO: 3715 - RNA, 23 nt, Artificial Sequence
  Synthetic
ggacugaugacauaauauuauua

SEQ ID NO: 3716 - RNA, 19 nt, Artificial Sequence
  Synthetic
gcauuuuuaauuauuauua

SEQ ID NO: 3717 - RNA, 20 nt, Artificial Sequence
  Synthetic
ggcauuuuuaauuauuauua

SEQ ID NO: 3718 - RNA, 22 nt, Artificial Sequence
  Synthetic
gaggcauuuuuaauuauuauua

SEQ ID NO: 3719 - RNA, 23 nt, Artificial Sequence
  Synthetic
ggaggcauuuuuaauuauuauua

SEQ ID NO: 3720 - RNA, 18 nt, Artificial Sequence
  Synthetic
gacuccauuacaaacuua

SEQ ID NO: 3721 - RNA, 20 nt, Artificial Sequence
  Synthetic
gcgacuccauuacaaacuua

SEQ ID NO: 3722 - RNA, 24 nt, Artificial Sequence
  Synthetic
guuucaucaccacaaaguaacuua

SEQ ID NO: 3723 - RNA, 18 nt, Artificial Sequence
  Synthetic
guuuaaaauguacacuua

SEQ ID NO: 3724 - RNA, 20 nt, Artificial Sequence
  Synthetic
guguuuaaaauguacacuua

SEQ ID NO: 3725 - RNA, 21 nt, Artificial Sequence
  Synthetic
gguguuuaaaauguacacuua

SEQ ID NO: 3726 - RNA, 24 nt, Artificial Sequence
  Synthetic
gaagguguuuaaaauguacacuua

SEQ ID NO: 3727 - RNA, 21 nt, Artificial Sequence
  Synthetic
gucuauaaugugugccacuua

SEQ ID NO: 3728 - RNA, 24 nt, Artificial Sequence
  Synthetic
guagucuauaaugugugccacuua

SEQ ID NO: 3729 - RNA, 20 nt, Artificial Sequence
  Synthetic
gaaacuguuggacucacuua

SEQ ID NO: 3730 - RNA, 21 nt, Artificial Sequence
  Synthetic
ggaaacuguuggacucacuua

SEQ ID NO: 3731 - RNA, 23 nt, Artificial Sequence
  Synthetic
gaggaaacuguuggacucacuua

SEQ ID NO: 3732 - RNA, 23 nt, Artificial Sequence
  Synthetic
guauccaaucaauaauugacuua

SEQ ID NO: 3733 - RNA, 24 nt, Artificial Sequence
  Synthetic
gguauccaaucaauaauugacuua

SEQ ID NO: 3734 - RNA, 21 nt, Artificial Sequence
  Synthetic
gaacguaaacaauuauacuua

SEQ ID NO: 3735 - RNA, 18 nt, Artificial Sequence
  Synthetic
gccagcccuaccuacuua

SEQ ID NO: 3736 - RNA, 20 nt, Artificial Sequence
  Synthetic
gagccagcccuaccuacuua

SEQ ID NO: 3737 - RNA, 19 nt, Artificial Sequence
  Synthetic
gcuaaauguuagguacuua

SEQ ID NO: 3738 - RNA, 21 nt, Artificial Sequence
  Synthetic
gagcuaaauguuagguacuua

SEQ ID NO: 3739 - RNA, 22 nt, Artificial Sequence
  Synthetic
ggagcuaaauguuagguacuua

SEQ ID NO: 3740 - RNA, 23 nt, Artificial Sequence
  Synthetic
gcaucaagauguaguuuuacuua

SEQ ID NO: 3741 - RNA, 19 nt, Artificial Sequence
  Synthetic
gucauuagaaccaaccuua

SEQ ID NO: 3742 - RNA, 22 nt, Artificial Sequence
  Synthetic
gaugucauuagaaccaaccuua

SEQ ID NO: 3743 - RNA, 24 nt, Artificial Sequence
  Synthetic
gagaugucauuagaaccaaccuua

SEQ ID NO: 3744 - RNA, 20 nt, Artificial Sequence
  Synthetic
gcaauccagauaacaccuua

SEQ ID NO: 3745 - RNA, 18 nt, Artificial Sequence
  Synthetic
guauguucaugagccuua

SEQ ID NO: 3746 - RNA, 24 nt, Artificial Sequence
  Synthetic
guaaaaccagaauuggcauccuua

SEQ ID NO: 3747 - RNA, 23 nt, Artificial Sequence
  Synthetic
gcuacaguggaauauuauccuua

SEQ ID NO: 3748 - RNA, 22 nt, Artificial Sequence
  Synthetic
guuuuccuuaucguaguccuua

SEQ ID NO: 3749 - RNA, 22 nt, Artificial Sequence
  Synthetic
gcuuuugacaaaaucuuccuua

SEQ ID NO: 3750 - RNA, 20 nt, Artificial Sequence
  Synthetic
gucuuagaugagccagcuua

SEQ ID NO: 3751 - RNA, 24 nt, Artificial Sequence
  Synthetic
gacacaauauauguggggagcuua

SEQ ID NO: 3752 - RNA, 22 nt, Artificial Sequence
  Synthetic
gucauugauuaguuuuggcuua

SEQ ID NO: 3753 - RNA, 23 nt, Artificial Sequence
  Synthetic
ggucauugauuaguuuuggcuua

SEQ ID NO: 3754 - RNA, 21 nt, Artificial Sequence
  Synthetic
gucuaucagguuucaugcuua

SEQ ID NO: 3755 - RNA, 24 nt, Artificial Sequence
  Synthetic
guuuagacacauagagggugcuua

SEQ ID NO: 3756 - RNA, 20 nt, Artificial Sequence
  Synthetic
guuacaaaaaguggugcuua

SEQ ID NO: 3757 - RNA, 24 nt, Artificial Sequence
  Synthetic
gauaguuacaaaaaguggugcuua

SEQ ID NO: 3758 - RNA, 21 nt, Artificial Sequence
  Synthetic
gacccaaaagagugaaucuua

SEQ ID NO: 3759 - RNA, 19 nt, Artificial Sequence
  Synthetic
gccaaaaauaaacaucuua

SEQ ID NO: 3760 - RNA, 20 nt, Artificial Sequence
  Synthetic
ggccaaaaauaaacaucuua

SEQ ID NO: 3761 - RNA, 22 nt, Artificial Sequence
  Synthetic
guggccaaaaauaaacaucuua

SEQ ID NO: 3762 - RNA, 24 nt, Artificial Sequence
  Synthetic
gaguggccaaaaauaaacaucuua

SEQ ID NO: 3763 - RNA, 24 nt, Artificial Sequence
  Synthetic
gaaaaauauaaaaugcagaucuua

SEQ ID NO: 3764 - RNA, 21 nt, Artificial Sequence
  Synthetic
gaaauggucuuuaauaucuua

SEQ ID NO: 3765 - RNA, 24 nt, Artificial Sequence
  Synthetic
gucauuuuaauuuuugcuaucuua

SEQ ID NO: 3766 - RNA, 19 nt, Artificial Sequence
  Synthetic
gcuagcaaaucugcucuua

SEQ ID NO: 3767 - RNA, 20 nt, Artificial Sequence
  Synthetic
guagugaauuuucagucuua

SEQ ID NO: 3768 - RNA, 21 nt, Artificial Sequence
  Synthetic
gguagugaauuuucagucuua

SEQ ID NO: 3769 - RNA, 22 nt, Artificial Sequence
  Synthetic
ggguagugaauuuucagucuua

SEQ ID NO: 3770 - RNA, 20 nt, Artificial Sequence
  Synthetic
gaucucugggaugggucuua

SEQ ID NO: 3771 - RNA, 22 nt, Artificial Sequence
  Synthetic
gugaucucugggaugggucuua

SEQ ID NO: 3772 - RNA, 19 nt, Artificial Sequence
  Synthetic
gcuuuaucugaaauucuua

SEQ ID NO: 3773 - RNA, 21 nt, Artificial Sequence
  Synthetic
gagcuuuaucugaaauucuua

SEQ ID NO: 3774 - RNA, 20 nt, Artificial Sequence
  Synthetic
gaaguucucuugaauucuua

SEQ ID NO: 3775 - RNA, 20 nt, Artificial Sequence
  Synthetic
gcauuggaaaaagcuucuua

SEQ ID NO: 3776 - RNA, 21 nt, Artificial Sequence
  Synthetic
ggcauuggaaaaagcuucuua

SEQ ID NO: 3777 - RNA, 22 nt, Artificial Sequence
  Synthetic
gggcauuggaaaaagcuucuua

SEQ ID NO: 3778 - RNA, 24 nt, Artificial Sequence
  Synthetic
gagggcauuggaaaaagcuucuua

SEQ ID NO: 3779 - RNA, 20 nt, Artificial Sequence
  Synthetic
gaaacaaguauggcuucuua

SEQ ID NO: 3780 - RNA, 24 nt, Artificial Sequence
  Synthetic
gauuuccaugcagaugguuucuua

SEQ ID NO: 3781 - RNA, 18 nt, Artificial Sequence
  Synthetic
gauuguucacuuuucuua

SEQ ID NO: 3782 - RNA, 19 nt, Artificial Sequence
  Synthetic
ggauuguucacuuuucuua

SEQ ID NO: 3783 - RNA, 21 nt, Artificial Sequence
  Synthetic
guggauuguucacuuuucuua

SEQ ID NO: 3784 - RNA, 24 nt, Artificial Sequence
  Synthetic
guuguggauuguucacuuuucuua

SEQ ID NO: 3785 - RNA, 19 nt, Artificial Sequence
  Synthetic
gaaaacuuaucuuuucuua

SEQ ID NO: 3786 - RNA, 20 nt, Artificial Sequence
  Synthetic
ggaaaacuuaucuuuucuua

SEQ ID NO: 3787 - RNA, 24 nt, Artificial Sequence
  Synthetic
guaaggaaaacuuaucuuuucuua

SEQ ID NO: 3788 - RNA, 21 nt, Artificial Sequence
  Synthetic
guaucuuggccauggaaguua

SEQ ID NO: 3789 - RNA, 22 nt, Artificial Sequence
  Synthetic
gguaucuuggccauggaaguua

SEQ ID NO: 3790 - RNA, 22 nt, Artificial Sequence
  Synthetic
gcuuuuguuuucagcuaaguua

SEQ ID NO: 3791 - RNA, 24 nt, Artificial Sequence
  Synthetic
gcgcuuuuguuuucagcuaaguua

SEQ ID NO: 3792 - RNA, 21 nt, Artificial Sequence
  Synthetic
guuauacacagugaccaguua

SEQ ID NO: 3793 - RNA, 19 nt, Artificial Sequence
  Synthetic
guuguaaaaucugcaguua

SEQ ID NO: 3794 - RNA, 18 nt, Artificial Sequence
  Synthetic
gauggaagagaagaguua

SEQ ID NO: 3795 - RNA, 20 nt, Artificial Sequence
  Synthetic
gugauggaagagaagaguua

SEQ ID NO: 3796 - RNA, 19 nt, Artificial Sequence
  Synthetic
guguucaucucaggaguua

SEQ ID NO: 3797 - RNA, 24 nt, Artificial Sequence
  Synthetic
gcauuguguucaucucaggaguua

SEQ ID NO: 3798 - RNA, 20 nt, Artificial Sequence
  Synthetic
gucacauggacauggaguua

SEQ ID NO: 3799 - RNA, 19 nt, Artificial Sequence
  Synthetic
gaguuuggcuuuauaguua

SEQ ID NO: 3800 - RNA, 21 nt, Artificial Sequence
  Synthetic
gugaguuuggcuuuauaguua

SEQ ID NO: 3801 - RNA, 20 nt, Artificial Sequence
  Synthetic
gaacaguuuauuccuaguua

SEQ ID NO: 3802 - RNA, 23 nt, Artificial Sequence
  Synthetic
gaagaacaguuuauuccuaguua

SEQ ID NO: 3803 - RNA, 24 nt, Artificial Sequence
  Synthetic
ggaagaacaguuuauuccuaguua

SEQ ID NO: 3804 - RNA, 23 nt, Artificial Sequence
  Synthetic
gcuuucuuuggagaaguuaguua

SEQ ID NO: 3805 - RNA, 21 nt, Artificial Sequence
  Synthetic
guauguucagggaugacguua

SEQ ID NO: 3806 - RNA, 22 nt, Artificial Sequence
  Synthetic
gguauguucagggaugacguua

SEQ ID NO: 3807 - RNA, 19 nt, Artificial Sequence
  Synthetic
gaauuuuuguagcagguua

SEQ ID NO: 3808 - RNA, 24 nt, Artificial Sequence
  Synthetic
gcaaagaauuuuuguagcagguua

SEQ ID NO: 3809 - RNA, 18 nt, Artificial Sequence
  Synthetic
guaacacuaugcagguua

SEQ ID NO: 3810 - RNA, 23 nt, Artificial Sequence
  Synthetic
guuuccaauaugguauaauguua

SEQ ID NO: 3811 - RNA, 23 nt, Artificial Sequence
  Synthetic
guacauucaugugcuucauguua

SEQ ID NO: 3812 - RNA, 22 nt, Artificial Sequence
  Synthetic
guacuggugauaagagauguua

SEQ ID NO: 3813 - RNA, 22 nt, Artificial Sequence
  Synthetic
guggaaauuauugaauauguua

SEQ ID NO: 3814 - RNA, 24 nt, Artificial Sequence
  Synthetic
guguggaaauuauugaauauguua

SEQ ID NO: 3815 - RNA, 23 nt, Artificial Sequence
  Synthetic
gccuauacucacauccgcuguua

SEQ ID NO: 3816 - RNA, 19 nt, Artificial Sequence
  Synthetic
guuaugacagaugcuguua

SEQ ID NO: 3817 - RNA, 21 nt, Artificial Sequence
  Synthetic
gaguuaugacagaugcuguua

SEQ ID NO: 3818 - RNA, 19 nt, Artificial Sequence
  Synthetic
gaauugguuauuauuguua

SEQ ID NO: 3819 - RNA, 23 nt, Artificial Sequence
  Synthetic
gcuagaauugguuauuauuguua

SEQ ID NO: 3820 - RNA, 19 nt, Artificial Sequence
  Synthetic
gugggaaagaaaaaauuua

SEQ ID NO: 3821 - RNA, 21 nt, Artificial Sequence
  Synthetic
gugugggaaagaaaaaauuua

SEQ ID NO: 3822 - RNA, 22 nt, Artificial Sequence
  Synthetic
ggugugggaaagaaaaaauuua

SEQ ID NO: 3823 - RNA, 19 nt, Artificial Sequence
  Synthetic
gauuauuuccaaaaauuua

SEQ ID NO: 3824 - RNA, 20 nt, Artificial Sequence
  Synthetic
ggauuauuuccaaaaauuua

SEQ ID NO: 3825 - RNA, 21 nt, Artificial Sequence
  Synthetic
gagauuuuacuuugaaauuua

SEQ ID NO: 3826 - RNA, 23 nt, Artificial Sequence
  Synthetic
gugagauuuuacuuugaaauuua

SEQ ID NO: 3827 - RNA, 24 nt, Artificial Sequence
  Synthetic
ggugagauuuuacuuugaaauuua

SEQ ID NO: 3828 - RNA, 24 nt, Artificial Sequence
  Synthetic
guuuauugacuuuaauuaaauuua

SEQ ID NO: 3829 - RNA, 20 nt, Artificial Sequence
  Synthetic
gaaaauguauucccaauuua

SEQ ID NO: 3830 - RNA, 24 nt, Artificial Sequence
  Synthetic
gcuugaaaauguauucccaauuua

SEQ ID NO: 3831 - RNA, 19 nt, Artificial Sequence
  Synthetic
gaauggucagggcaauuua

SEQ ID NO: 3832 - RNA, 22 nt, Artificial Sequence
  Synthetic
guucuaauuuuauggcaauuua

SEQ ID NO: 3833 - RNA, 23 nt, Artificial Sequence
  Synthetic
guaaaaagaaagcugauaauuua

SEQ ID NO: 3834 - RNA, 24 nt, Artificial Sequence
  Synthetic
gaaauauaggagagaaguaauuua

SEQ ID NO: 3835 - RNA, 22 nt, Artificial Sequence
  Synthetic
gauauaguugucuuaacauuua

SEQ ID NO: 3836 - RNA, 18 nt, Artificial Sequence
  Synthetic
gaaguugguuuacauuua

SEQ ID NO: 3837 - RNA, 23 nt, Artificial Sequence
  Synthetic
gccuagaaguugguuuacauuua

SEQ ID NO: 3838 - RNA, 22 nt, Artificial Sequence
  Synthetic
gaugaguuaugaaauccauuua

SEQ ID NO: 3839 - RNA, 18 nt, Artificial Sequence
  Synthetic
guucacaguuggcauuua

SEQ ID NO: 3840 - RNA, 19 nt, Artificial Sequence
  Synthetic
gcuuacagcuaugcauuua

SEQ ID NO: 3841 - RNA, 21 nt, Artificial Sequence
  Synthetic
gugcuuacagcuaugcauuua

SEQ ID NO: 3842 - RNA, 22 nt, Artificial Sequence
  Synthetic
ggugcuuacagcuaugcauuua

SEQ ID NO: 3843 - RNA, 23 nt, Artificial Sequence
  Synthetic
gggugcuuacagcuaugcauuua

SEQ ID NO: 3844 - RNA, 20 nt, Artificial Sequence
  Synthetic
guucauggaacuaucauuua

SEQ ID NO: 3845 - RNA, 23 nt, Artificial Sequence
  Synthetic
guuguucauggaacuaucauuua

SEQ ID NO: 3846 - RNA, 20 nt, Artificial Sequence
  Synthetic
gcacaacaugucaagauuua

SEQ ID NO: 3847 - RNA, 19 nt, Artificial Sequence
  Synthetic
gcuuagaguaacagauuua

SEQ ID NO: 3848 - RNA, 19 nt, Artificial Sequence
  Synthetic
gcaacugaacacagauuua

SEQ ID NO: 3849 - RNA, 19 nt, Artificial Sequence
  Synthetic
gcauaucaaaagagauuua

SEQ ID NO: 3850 - RNA, 19 nt, Artificial Sequence
  Synthetic
guauugaguuauagauuua

SEQ ID NO: 3851 - RNA, 24 nt, Artificial Sequence
  Synthetic
guuaaguauugaguuauagauuua

SEQ ID NO: 3852 - RNA, 18 nt, Artificial Sequence
  Synthetic
gauuucuaaguagauuua

SEQ ID NO: 3853 - RNA, 22 nt, Artificial Sequence
  Synthetic
guaugauuucuaaguagauuua

SEQ ID NO: 3854 - RNA, 18 nt, Artificial Sequence
  Synthetic
gucaucaugauggauuua

SEQ ID NO: 3855 - RNA, 21 nt, Artificial Sequence
  Synthetic
gcagucaucaugauggauuua

SEQ ID NO: 3856 - RNA, 22 nt, Artificial Sequence
  Synthetic
gcaaauguggcuuuuggauuua

SEQ ID NO: 3857 - RNA, 20 nt, Artificial Sequence
  Synthetic
gucaccgguuugcugauuua

SEQ ID NO: 3858 - RNA, 22 nt, Artificial Sequence
  Synthetic
gugucaccgguuugcugauuua

SEQ ID NO: 3859 - RNA, 24 nt, Artificial Sequence
  Synthetic
guccaauaaccagauucugauuua

SEQ ID NO: 3860 - RNA, 18 nt, Artificial Sequence
  Synthetic
guaaucugucaauauuua

SEQ ID NO: 3861 - RNA, 20 nt, Artificial Sequence
  Synthetic
guucauuccauuccuauuua

SEQ ID NO: 3862 - RNA, 21 nt, Artificial Sequence
  Synthetic
gguucauuccauuccuauuua

SEQ ID NO: 3863 - RNA, 22 nt, Artificial Sequence
  Synthetic
ggguucauuccauuccuauuua

SEQ ID NO: 3864 - RNA, 18 nt, Artificial Sequence
  Synthetic
gaaguauuaagguauuua

SEQ ID NO: 3865 - RNA, 23 nt, Artificial Sequence
  Synthetic
gauauacugaagaaauguauuua

SEQ ID NO: 3866 - RNA, 19 nt, Artificial Sequence
  Synthetic
gucacuugcuuuguauuua

SEQ ID NO: 3867 - RNA, 22 nt, Artificial Sequence
  Synthetic
gaagucacuugcuuuguauuua

SEQ ID NO: 3868 - RNA, 23 nt, Artificial Sequence
  Synthetic
gacauacauuuaguagaacuuua

SEQ ID NO: 3869 - RNA, 18 nt, Artificial Sequence
  Synthetic
gguuguauaaucacuuua

SEQ ID NO: 3870 - RNA, 19 nt, Artificial Sequence
  Synthetic
ggguuguauaaucacuuua

SEQ ID NO: 3871 - RNA, 24 nt, Artificial Sequence
  Synthetic
guacuggguuguauaaucacuuua

SEQ ID NO: 3872 - RNA, 22 nt, Artificial Sequence
  Synthetic
gcauuguuacuuuaggacuuua

SEQ ID NO: 3873 - RNA, 23 nt, Artificial Sequence
  Synthetic
ggcauuguuacuuuaggacuuua

SEQ ID NO: 3874 - RNA, 20 nt, Artificial Sequence
  Synthetic
gaugauaaaauaguacuuua

SEQ ID NO: 3875 - RNA, 21 nt, Artificial Sequence
  Synthetic
gucuuauguuuuuaaccuuua

SEQ ID NO: 3876 - RNA, 22 nt, Artificial Sequence
  Synthetic
ggucuuauguuuuuaaccuuua

SEQ ID NO: 3877 - RNA, 23 nt, Artificial Sequence
  Synthetic
gggucuuauguuuuuaaccuuua

SEQ ID NO: 3878 - RNA, 20 nt, Artificial Sequence
  Synthetic
guaccuguguucacccuuua

SEQ ID NO: 3879 - RNA, 22 nt, Artificial Sequence
  Synthetic
gccaccaauucaaaugccuuua

SEQ ID NO: 3880 - RNA, 24 nt, Artificial Sequence
  Synthetic
gagccaccaauucaaaugccuuua

SEQ ID NO: 3881 - RNA, 21 nt, Artificial Sequence
  Synthetic
gaaaaauuaugccgcgcuuua

SEQ ID NO: 3882 - RNA, 18 nt, Artificial Sequence
  Synthetic
guguguacaaaaucuuua

SEQ ID NO: 3883 - RNA, 20 nt, Artificial Sequence
  Synthetic
guguguguacaaaaucuuua

SEQ ID NO: 3884 - RNA, 22 nt, Artificial Sequence
  Synthetic
guguguguguacaaaaucuuua

SEQ ID NO: 3885 - RNA, 20 nt, Artificial Sequence
  Synthetic
gaauuuauaauuuaucuuua

SEQ ID NO: 3886 - RNA, 24 nt, Artificial Sequence
  Synthetic
gcuagaauuuauaauuuaucuuua

SEQ ID NO: 3887 - RNA, 18 nt, Artificial Sequence
  Synthetic
gguggaaucuucucuuua

SEQ ID NO: 3888 - RNA, 24 nt, Artificial Sequence
  Synthetic
gauccagguggaaucuucucuuua

SEQ ID NO: 3889 - RNA, 23 nt, Artificial Sequence
  Synthetic
guaaucucuguccauuuucuuua

SEQ ID NO: 3890 - RNA, 18 nt, Artificial Sequence
  Synthetic
gcacucagauuuucuuua

SEQ ID NO: 3891 - RNA, 20 nt, Artificial Sequence
  Synthetic
gaacuugucccaccaguuua

SEQ ID NO: 3892 - RNA, 21 nt, Artificial Sequence
  Synthetic
ggaacuugucccaccaguuua

SEQ ID NO: 3893 - RNA, 18 nt, Artificial Sequence
  Synthetic
gcuuucuucuuuaguuua

SEQ ID NO: 3894 - RNA, 22 nt, Artificial Sequence
  Synthetic
gauacauuugggggcagguuua

SEQ ID NO: 3895 - RNA, 23 nt, Artificial Sequence
  Synthetic
gucaccauaaaacgcuauguuua

SEQ ID NO: 3896 - RNA, 22 nt, Artificial Sequence
  Synthetic
gauuuaggacguguccuguuua

SEQ ID NO: 3897 - RNA, 18 nt, Artificial Sequence
  Synthetic
gacaacaauuaguguuua

SEQ ID NO: 3898 - RNA, 20 nt, Artificial Sequence
  Synthetic
gugacaacaauuaguguuua

SEQ ID NO: 3899 - RNA, 21 nt, Artificial Sequence
  Synthetic
ggugacaacaauuaguguuua

SEQ ID NO: 3900 - RNA, 18 nt, Artificial Sequence
  Synthetic
gugacuuuggaaauuuua

SEQ ID NO: 3901 - RNA, 19 nt, Artificial Sequence
  Synthetic
ggugacuuuggaaauuuua

SEQ ID NO: 3902 - RNA, 22 nt, Artificial Sequence
  Synthetic
gauuugaguagguauaauuuua

SEQ ID NO: 3903 - RNA, 18 nt, Artificial Sequence
  Synthetic
gcucucauuauaauuuua

SEQ ID NO: 3904 - RNA, 23 nt, Artificial Sequence
  Synthetic
guaucgcucucauuauaauuuua

SEQ ID NO: 3905 - RNA, 23 nt, Artificial Sequence
  Synthetic
gcuuucuucuuaaacagauuuua

SEQ ID NO: 3906 - RNA, 22 nt, Artificial Sequence
  Synthetic
guucaaguacaguaugauuuua

SEQ ID NO: 3907 - RNA, 22 nt, Artificial Sequence
  Synthetic
gcauugaggcuucaguauuuua

SEQ ID NO: 3908 - RNA, 23 nt, Artificial Sequence
  Synthetic
ggcauugaggcuucaguauuuua

SEQ ID NO: 3909 - RNA, 20 nt, Artificial Sequence
  Synthetic
gaacuugagauuuuauuuua

SEQ ID NO: 3910 - RNA, 21 nt, Artificial Sequence
  Synthetic
ggaacuugagauuuuauuuua

SEQ ID NO: 3911 - RNA, 23 nt, Artificial Sequence
  Synthetic
gaggaacuugagauuuuauuuua

SEQ ID NO: 3912 - RNA, 24 nt, Artificial Sequence
  Synthetic
gucaauaggaaugcuauacuuuua

SEQ ID NO: 3913 - RNA, 18 nt, Artificial Sequence
  Synthetic
guguacaaagaccuuuua

SEQ ID NO: 3914 - RNA, 19 nt, Artificial Sequence
  Synthetic
gguguacaaagaccuuuua

SEQ ID NO: 3915 - RNA, 19 nt, Artificial Sequence
  Synthetic
gccacugucuugccuuuua

SEQ ID NO: 3916 - RNA, 21 nt, Artificial Sequence
  Synthetic
gagccacugucuugccuuuua

SEQ ID NO: 3917 - RNA, 22 nt, Artificial Sequence
  Synthetic
gacagauuucuauuuucuuuua

SEQ ID NO: 3918 - RNA, 23 nt, Artificial Sequence
  Synthetic
gcuuucucacccuugaaguuuua

SEQ ID NO: 3919 - RNA, 18 nt, Artificial Sequence
  Synthetic
gaaguuaucuuaguuuua

SEQ ID NO: 3920 - RNA, 21 nt, Artificial Sequence
  Synthetic
guacaugcguaucucguuuua

SEQ ID NO: 3921 - RNA, 22 nt, Artificial Sequence
  Synthetic
guuuucuaugauaaagguuuua

SEQ ID NO: 3922 - RNA, 23 nt, Artificial Sequence
  Synthetic
gguuuucuaugauaaagguuuua

SEQ ID NO: 3923 - RNA, 19 nt, Artificial Sequence
  Synthetic
gucagggaccacuguuuua

SEQ ID NO: 3924 - RNA, 20 nt, Artificial Sequence
  Synthetic
ggucagggaccacuguuuua

SEQ ID NO: 3925 - RNA, 21 nt, Artificial Sequence
  Synthetic
gggucagggaccacuguuuua

SEQ ID NO: 3926 - RNA, 23 nt, Artificial Sequence
  Synthetic
gaacaccaaaaauaaaauuuuua

SEQ ID NO: 3927 - RNA, 21 nt, Artificial Sequence
  Synthetic
guaccuuguaccaaauuuuua

SEQ ID NO: 3928 - RNA, 18 nt, Artificial Sequence
  Synthetic
gugcuuuuaugauuuuua

SEQ ID NO: 3929 - RNA, 22 nt, Artificial Sequence
  Synthetic
gauugugcuuuuaugauuuuua

SEQ ID NO: 3930 - RNA, 19 nt, Artificial Sequence
  Synthetic
gaaucagagacuauuuuua

SEQ ID NO: 3931 - RNA, 20 nt, Artificial Sequence
  Synthetic
ggaaucagagacuauuuuua

SEQ ID NO: 3932 - RNA, 23 nt, Artificial Sequence
  Synthetic
gucuuaaugccauaguauuuuua

SEQ ID NO: 3933 - RNA, 19 nt, Artificial Sequence
  Synthetic
gacuauggcuuccuuuuua

SEQ ID NO: 3934 - RNA, 20 nt, Artificial Sequence
  Synthetic
ggacuauggcuuccuuuuua

SEQ ID NO: 3935 - RNA, 21 nt, Artificial Sequence
  Synthetic
gggacuauggcuuccuuuuua

SEQ ID NO: 3936 - RNA, 18 nt, Artificial Sequence
  Synthetic
guuaggcaaggcuuuuua

SEQ ID NO: 3937 - RNA, 19 nt, Artificial Sequence
  Synthetic
gguuaggcaaggcuuuuua

SEQ ID NO: 3938 - RNA, 23 nt, Artificial Sequence
  Synthetic
guuccuccaucuuucucuuuuua

SEQ ID NO: 3939 - RNA, 19 nt, Artificial Sequence
  Synthetic
gaguauuuugagguuuuua

SEQ ID NO: 3940 - RNA, 20 nt, Artificial Sequence
  Synthetic
ggaguauuuugagguuuuua

SEQ ID NO: 3941 - RNA, 21 nt, Artificial Sequence
  Synthetic
gggaguauuuugagguuuuua

SEQ ID NO: 3942 - RNA, 23 nt, Artificial Sequence
  Synthetic
gugggaguauuuugagguuuuua

SEQ ID NO: 3943 - RNA, 19 nt, Artificial Sequence
  Synthetic
gaggcaggagggaaaaaac

SEQ ID NO: 3944 - RNA, 21 nt, Artificial Sequence
  Synthetic
gugaggcaggagggaaaaaac

SEQ ID NO: 3945 - RNA, 23 nt, Artificial Sequence
  Synthetic
gugugaggcaggagggaaaaaac

SEQ ID NO: 3946 - RNA, 18 nt, Artificial Sequence
  Synthetic
gaacaccaccagaaaaac

SEQ ID NO: 3947 - RNA, 19 nt, Artificial Sequence
  Synthetic
ggaacaccaccagaaaaac

SEQ ID NO: 3948 - RNA, 21 nt, Artificial Sequence
  Synthetic
gaauaaaaucggcagaaaaac

SEQ ID NO: 3949 - RNA, 22 nt, Artificial Sequence
  Synthetic
ggaauaaaaucggcagaaaaac

SEQ ID NO: 3950 - RNA, 22 nt, Artificial Sequence
  Synthetic
guuaccuguaguucagaaaaac

SEQ ID NO: 3951 - RNA, 20 nt, Artificial Sequence
  Synthetic
gaaaguacuccucacaaaac

SEQ ID NO: 3952 - RNA, 23 nt, Artificial Sequence
  Synthetic
gaagaaaguacuccucacaaaac

SEQ ID NO: 3953 - RNA, 18 nt, Artificial Sequence
  Synthetic
gccuccacaaugcaaaac

SEQ ID NO: 3954 - RNA, 24 nt, Artificial Sequence
  Synthetic
gauaaagccuccacaaugcaaaac

SEQ ID NO: 3955 - RNA, 21 nt, Artificial Sequence
  Synthetic
gaccguggaauauaggaaaac

SEQ ID NO: 3956 - RNA, 22 nt, Artificial Sequence
  Synthetic
ggaccguggaauauaggaaaac

SEQ ID NO: 3957 - RNA, 20 nt, Artificial Sequence
  Synthetic
guucaaaucaaauggaaaac

SEQ ID NO: 3958 - RNA, 23 nt, Artificial Sequence
  Synthetic
guuuuaaucaccuaaaauaaaac

SEQ ID NO: 3959 - RNA, 22 nt, Artificial Sequence
  Synthetic
guaaacacuuucuuaauaaaac

SEQ ID NO: 3960 - RNA, 23 nt, Artificial Sequence
  Synthetic
guauaaucacauuugacuaaaac

SEQ ID NO: 3961 - RNA, 20 nt, Artificial Sequence
  Synthetic
gaauaugaagucaguaaaac

SEQ ID NO: 3962 - RNA, 23 nt, Artificial Sequence
  Synthetic
guagaauaugaagucaguaaaac

SEQ ID NO: 3963 - RNA, 18 nt, Artificial Sequence
  Synthetic
gcuaaccaguaaacaaac

SEQ ID NO: 3964 - RNA, 22 nt, Artificial Sequence
  Synthetic
gaagaagaacugauggacaaac

SEQ ID NO: 3965 - RNA, 22 nt, Artificial Sequence
  Synthetic
gucaucugacgaaaccccaaac

SEQ ID NO: 3966 - RNA, 18 nt, Artificial Sequence
  Synthetic
gguggagaaagggcaaac

SEQ ID NO: 3967 - RNA, 24 nt, Artificial Sequence
  Synthetic
gacccugguggagaaagggcaaac

SEQ ID NO: 3968 - RNA, 18 nt, Artificial Sequence
  Synthetic
guucaauauauuucaaac

SEQ ID NO: 3969 - RNA, 18 nt, Artificial Sequence
  Synthetic
ggcuagaaguacagaaac

SEQ ID NO: 3970 - RNA, 21 nt, Artificial Sequence
  Synthetic
guaggcuagaaguacagaaac

SEQ ID NO: 3971 - RNA, 24 nt, Artificial Sequence
  Synthetic
gacguaggcuagaaguacagaaac

SEQ ID NO: 3972 - RNA, 18 nt, Artificial Sequence
  Synthetic
gauauuguaaagagaaac

SEQ ID NO: 3973 - RNA, 18 nt, Artificial Sequence
  Synthetic
gagacaaaugauagaaac

SEQ ID NO: 3974 - RNA, 21 nt, Artificial Sequence
  Synthetic
gaugagacaaaugauagaaac

SEQ ID NO: 3975 - RNA, 24 nt, Artificial Sequence
  Synthetic
guugaugagacaaaugauagaaac

SEQ ID NO: 3976 - RNA, 23 nt, Artificial Sequence
  Synthetic
gauucuaucccuauaugggaaac

SEQ ID NO: 3977 - RNA, 19 nt, Artificial Sequence
  Synthetic
gcuccuaacaucuggaaac

SEQ ID NO: 3978 - RNA, 22 nt, Artificial Sequence
  Synthetic
gucgcuccuaacaucuggaaac

SEQ ID NO: 3979 - RNA, 19 nt, Artificial Sequence
  Synthetic
guuagcauaucuuggaaac

SEQ ID NO: 3980 - RNA, 21 nt, Artificial Sequence
  Synthetic
gaguuagcauaucuuggaaac

SEQ ID NO: 3981 - RNA, 22 nt, Artificial Sequence
  Synthetic
ggaguuagcauaucuuggaaac

SEQ ID NO: 3982 - RNA, 24 nt, Artificial Sequence
  Synthetic
gaggaguuagcauaucuuggaaac

SEQ ID NO: 3983 - RNA, 24 nt, Artificial Sequence
  Synthetic
gacaaucauaaacacacaugaaac

SEQ ID NO: 3984 - RNA, 18 nt, Artificial Sequence
  Synthetic
gaaacaucuacaugaaac

SEQ ID NO: 3985 - RNA, 22 nt, Artificial Sequence
  Synthetic
guucaagucuuuaugcugaaac

SEQ ID NO: 3986 - RNA, 20 nt, Artificial Sequence
  Synthetic
gaaucuuaucagagugaaac

SEQ ID NO: 3987 - RNA, 21 nt, Artificial Sequence
  Synthetic
ggaaucuuaucagagugaaac

SEQ ID NO: 3988 - RNA, 21 nt, Artificial Sequence
  Synthetic
gccaagaaauguaugugaaac

SEQ ID NO: 3989 - RNA, 20 nt, Artificial Sequence
  Synthetic
guucauucagcuugauaaac

SEQ ID NO: 3990 - RNA, 18 nt, Artificial Sequence
  Synthetic
gcuaucaagaauauaaac

SEQ ID NO: 3991 - RNA, 23 nt, Artificial Sequence
  Synthetic
gcuauuauauacuaaugguaaac

SEQ ID NO: 3992 - RNA, 21 nt, Artificial Sequence
  Synthetic
gaacacacugguggcuuaaac

SEQ ID NO: 3993 - RNA, 24 nt, Artificial Sequence
  Synthetic
guugaacacacugguggcuuaaac

SEQ ID NO: 3994 - RNA, 24 nt, Artificial Sequence
  Synthetic
gcaaaaaaaagucuaagaaacaac

SEQ ID NO: 3995 - RNA, 21 nt, Artificial Sequence
  Synthetic
gccacauuuuaaaauaacaac

SEQ ID NO: 3996 - RNA, 20 nt, Artificial Sequence
  Synthetic
gaaaaauauaaauccacaac

SEQ ID NO: 3997 - RNA, 19 nt, Artificial Sequence
  Synthetic
gagaaaggagauucacaac

SEQ ID NO: 3998 - RNA, 22 nt, Artificial Sequence
  Synthetic
gcugagaaaggagauucacaac

SEQ ID NO: 3999 - RNA, 18 nt, Artificial Sequence
  Synthetic
gagaaggcaucagacaac

SEQ ID NO: 4000 - RNA, 19 nt, Artificial Sequence
  Synthetic
gugucgcucauucuacaac

SEQ ID NO: 4001 - RNA, 21 nt, Artificial Sequence
  Synthetic
gugugucgcucauucuacaac

SEQ ID NO: 4002 - RNA, 24 nt, Artificial Sequence
  Synthetic
gcugugugucgcucauucuacaac

SEQ ID NO: 4003 - RNA, 18 nt, Artificial Sequence
  Synthetic
gauaaguaaaauuacaac

SEQ ID NO: 4004 - RNA, 19 nt, Artificial Sequence
  Synthetic
gagcagucagggaaccaac

SEQ ID NO: 4005 - RNA, 21 nt, Artificial Sequence
  Synthetic
gaaauaucacugcuuaccaac

SEQ ID NO: 4006 - RNA, 20 nt, Artificial Sequence
  Synthetic
gaucugucauuugucccaac

SEQ ID NO: 4007 - RNA, 23 nt, Artificial Sequence
  Synthetic
gaagaucugucauuugucccaac

SEQ ID NO: 4008 - RNA, 19 nt, Artificial Sequence
  Synthetic
guuuggaaguggggccaac

SEQ ID NO: 4009 - RNA, 21 nt, Artificial Sequence
  Synthetic
guguuuggaaguggggccaac

SEQ ID NO: 4010 - RNA, 20 nt, Artificial Sequence
  Synthetic
gcaaauuucugaacuccaac

SEQ ID NO: 4011 - RNA, 21 nt, Artificial Sequence
  Synthetic
ggcaaauuucugaacuccaac

SEQ ID NO: 4012 - RNA, 20 nt, Artificial Sequence
  Synthetic
gauuaaagcaaauuuccaac

SEQ ID NO: 4013 - RNA, 24 nt, Artificial Sequence
  Synthetic
gauucuauuggcuuuauuuccaac

SEQ ID NO: 4014 - RNA, 18 nt, Artificial Sequence
  Synthetic
gguuuacucuaaagcaac

SEQ ID NO: 4015 - RNA, 19 nt, Artificial Sequence
  Synthetic
ggguuuacucuaaagcaac

SEQ ID NO: 4016 - RNA, 18 nt, Artificial Sequence
  Synthetic
gauugauugagaagcaac

SEQ ID NO: 4017 - RNA, 20 nt, Artificial Sequence
  Synthetic
gugauugauugagaagcaac

SEQ ID NO: 4018 - RNA, 19 nt, Artificial Sequence
  Synthetic
gacuaaaauuauaugcaac

SEQ ID NO: 4019 - RNA, 24 nt, Artificial Sequence
  Synthetic
gaacagacuaaaauuauaugcaac

SEQ ID NO: 4020 - RNA, 19 nt, Artificial Sequence
  Synthetic
gaccaauaauagaaucaac

SEQ ID NO: 4021 - RNA, 20 nt, Artificial Sequence
  Synthetic
ggaccaauaauagaaucaac

SEQ ID NO: 4022 - RNA, 21 nt, Artificial Sequence
  Synthetic
gggaccaauaauagaaucaac

SEQ ID NO: 4023 - RNA, 22 nt, Artificial Sequence
  Synthetic
ggggaccaauaauagaaucaac

SEQ ID NO: 4024 - RNA, 23 nt, Artificial Sequence
  Synthetic
guuuccggcuguaggacaucaac

SEQ ID NO: 4025 - RNA, 22 nt, Artificial Sequence
  Synthetic
gaaaaagaccaaaauccucaac

SEQ ID NO: 4026 - RNA, 23 nt, Artificial Sequence
  Synthetic
ggaaaaagaccaaaauccucaac

SEQ ID NO: 4027 - RNA, 20 nt, Artificial Sequence
  Synthetic
gaucucauggucuagucaac

SEQ ID NO: 4028 - RNA, 21 nt, Artificial Sequence
  Synthetic
ggaucucauggucuagucaac

SEQ ID NO: 4029 - RNA, 18 nt, Artificial Sequence
  Synthetic
guauauauuuaaaagaac

SEQ ID NO: 4030 - RNA, 19 nt, Artificial Sequence
  Synthetic
gguauauauuuaaaagaac

SEQ ID NO: 4031 - RNA, 19 nt, Artificial Sequence
  Synthetic
gagcucccccgcaaagaac

SEQ ID NO: 4032 - RNA, 24 nt, Artificial Sequence
  Synthetic
gacuugagcucccccgcaaagaac

SEQ ID NO: 4033 - RNA, 19 nt, Artificial Sequence
  Synthetic
gaaaugagagcacaagaac

SEQ ID NO: 4034 - RNA, 21 nt, Artificial Sequence
  Synthetic
gagaaaugagagcacaagaac

SEQ ID NO: 4035 - RNA, 23 nt, Artificial Sequence
  Synthetic
gagagaaaugagagcacaagaac

SEQ ID NO: 4036 - RNA, 20 nt, Artificial Sequence
  Synthetic
gcaagugauugugcaagaac

SEQ ID NO: 4037 - RNA, 22 nt, Artificial Sequence
  Synthetic
gagcaagugauugugcaagaac

SEQ ID NO: 4038 - RNA, 23 nt, Artificial Sequence
  Synthetic
ggagcaagugauugugcaagaac

SEQ ID NO: 4039 - RNA, 18 nt, Artificial Sequence
  Synthetic
ggauguuuuugacagaac

SEQ ID NO: 4040 - RNA, 19 nt, Artificial Sequence
  Synthetic
gccacuuggagaucagaac

SEQ ID NO: 4041 - RNA, 20 nt, Artificial Sequence
  Synthetic
ggccacuuggagaucagaac

SEQ ID NO: 4042 - RNA, 21 nt, Artificial Sequence
  Synthetic
gggccacuuggagaucagaac

SEQ ID NO: 4043 - RNA, 22 nt, Artificial Sequence
  Synthetic
gucaugggauauuuaggagaac

SEQ ID NO: 4044 - RNA, 23 nt, Artificial Sequence
  Synthetic
ggucaugggauauuuaggagaac

SEQ ID NO: 4045 - RNA, 19 nt, Artificial Sequence
  Synthetic
gauuugguggcaugagaac

SEQ ID NO: 4046 - RNA, 20 nt, Artificial Sequence
  Synthetic
ggauuugguggcaugagaac

SEQ ID NO: 4047 - RNA, 23 nt, Artificial Sequence
  Synthetic
gauggauuugguggcaugagaac

SEQ ID NO: 4048 - RNA, 19 nt, Artificial Sequence
  Synthetic
gaacgcagacccugagaac

SEQ ID NO: 4049 - RNA, 21 nt, Artificial Sequence
  Synthetic
guuuguuuucucuuugagaac

SEQ ID NO: 4050 - RNA, 19 nt, Artificial Sequence
  Synthetic
guuaggcaagaacuagaac

SEQ ID NO: 4051 - RNA, 19 nt, Artificial Sequence
  Synthetic
gcaccauuuaaccuagaac

SEQ ID NO: 4052 - RNA, 23 nt, Artificial Sequence
  Synthetic
gucagcaccauuuaaccuagaac

SEQ ID NO: 4053 - RNA, 24 nt, Artificial Sequence
  Synthetic
gacaucauuuccaucaucuagaac

SEQ ID NO: 4054 - RNA, 21 nt, Artificial Sequence
  Synthetic
guuuauccauuuugguagaac

SEQ ID NO: 4055 - RNA, 23 nt, Artificial Sequence
  Synthetic
guaaaacaguauaaaaaacgaac

SEQ ID NO: 4056 - RNA, 24 nt, Artificial Sequence
  Synthetic
gguaaaacaguauaaaaaacgaac

SEQ ID NO: 4057 - RNA, 20 nt, Artificial Sequence
  Synthetic
gccugccaucccaaaggaac

SEQ ID NO: 4058 - RNA, 20 nt, Artificial Sequence
  Synthetic
gucacgccuuuuguaggaac

SEQ ID NO: 4059 - RNA, 20 nt, Artificial Sequence
  Synthetic
gaucacacagauagcggaac

SEQ ID NO: 4060 - RNA, 24 nt, Artificial Sequence
  Synthetic
gacacucagcuuuggaucuggaac

SEQ ID NO: 4061 - RNA, 19 nt, Artificial Sequence
  Synthetic
guaugugcuuagaaugaac

SEQ ID NO: 4062 - RNA, 21 nt, Artificial Sequence
  Synthetic
guguaugugcuuagaaugaac

SEQ ID NO: 4063 - RNA, 23 nt, Artificial Sequence
  Synthetic
gaguguaugugcuuagaaugaac

SEQ ID NO: 4064 - RNA, 19 nt, Artificial Sequence
  Synthetic
gcgaagggaaaaacugaac

SEQ ID NO: 4065 - RNA, 23 nt, Artificial Sequence
  Synthetic
gucugcgaagggaaaaacugaac

SEQ ID NO: 4066 - RNA, 19 nt, Artificial Sequence
  Synthetic
gccucccaagucccugaac

SEQ ID NO: 4067 - RNA, 20 nt, Artificial Sequence
  Synthetic
ggccucccaagucccugaac

SEQ ID NO: 4068 - RNA, 20 nt, Artificial Sequence
  Synthetic
gacaggcuucuuugcugaac

SEQ ID NO: 4069 - RNA, 21 nt, Artificial Sequence
  Synthetic
guucugacugugcuagugaac

SEQ ID NO: 4070 - RNA, 19 nt, Artificial Sequence
  Synthetic
gcacagcauggccuugaac

SEQ ID NO: 4071 - RNA, 20 nt, Artificial Sequence
  Synthetic
ggcacagcauggccuugaac

SEQ ID NO: 4072 - RNA, 21 nt, Artificial Sequence
  Synthetic
gggcacagcauggccuugaac

SEQ ID NO: 4073 - RNA, 23 nt, Artificial Sequence
  Synthetic
gugggcacagcauggccuugaac

SEQ ID NO: 4074 - RNA, 18 nt, Artificial Sequence
  Synthetic
gccagcaaguauuugaac

SEQ ID NO: 4075 - RNA, 23 nt, Artificial Sequence
  Synthetic
gcacagccagcaaguauuugaac

SEQ ID NO: 4076 - RNA, 22 nt, Artificial Sequence
  Synthetic
gauaaaauggcauuguuugaac

SEQ ID NO: 4077 - RNA, 22 nt, Artificial Sequence
  Synthetic
gaagcauaaggaaggaaauaac

SEQ ID NO: 4078 - RNA, 23 nt, Artificial Sequence
  Synthetic
ggaagcauaaggaaggaaauaac

SEQ ID NO: 4079 - RNA, 23 nt, Artificial Sequence
  Synthetic
gacaaauguguaccaacaauaac

SEQ ID NO: 4080 - RNA, 23 nt, Artificial Sequence
  Synthetic
gaacaacuaaacaaauagauaac

SEQ ID NO: 4081 - RNA, 20 nt, Artificial Sequence
  Synthetic
gcuugaggugugaauauaac

SEQ ID NO: 4082 - RNA, 20 nt, Artificial Sequence
  Synthetic
gaagucacauguucuauaac

SEQ ID NO: 4083 - RNA, 24 nt, Artificial Sequence
  Synthetic
gccugaagucacauguucuauaac

SEQ ID NO: 4084 - RNA, 24 nt, Artificial Sequence
  Synthetic
guaaauagaauuaaaaaguauaac

SEQ ID NO: 4085 - RNA, 18 nt, Artificial Sequence
  Synthetic
gggguuauagcaacuaac

SEQ ID NO: 4086 - RNA, 21 nt, Artificial Sequence
  Synthetic
gcagggguuauagcaacuaac

SEQ ID NO: 4087 - RNA, 19 nt, Artificial Sequence
  Synthetic
gugucauaccauaacuaac

SEQ ID NO: 4088 - RNA, 21 nt, Artificial Sequence
  Synthetic
gagugucauaccauaacuaac

SEQ ID NO: 4089 - RNA, 20 nt, Artificial Sequence
  Synthetic
guuauuucugauaugcuaac

SEQ ID NO: 4090 - RNA, 19 nt, Artificial Sequence
  Synthetic
gcaagcagaaaauucuaac

SEQ ID NO: 4091 - RNA, 20 nt, Artificial Sequence
  Synthetic
ggcaagcagaaaauucuaac

SEQ ID NO: 4092 - RNA, 22 nt, Artificial Sequence
  Synthetic
guggcaagcagaaaauucuaac

SEQ ID NO: 4093 - RNA, 18 nt, Artificial Sequence
  Synthetic
ggaaagugaaagaguaac

SEQ ID NO: 4094 - RNA, 19 nt, Artificial Sequence
  Synthetic
gggaaagugaaagaguaac

SEQ ID NO: 4095 - RNA, 20 nt, Artificial Sequence
  Synthetic
ggggaaagugaaagaguaac

SEQ ID NO: 4096 - RNA, 23 nt, Artificial Sequence
  Synthetic
guuggggaaagugaaagaguaac

SEQ ID NO: 4097 - RNA, 19 nt, Artificial Sequence
  Synthetic
gauuuuggaguagcguaac

SEQ ID NO: 4098 - RNA, 20 nt, Artificial Sequence
  Synthetic
ggauuuuggaguagcguaac

SEQ ID NO: 4099 - RNA, 22 nt, Artificial Sequence
  Synthetic
guggauuuuggaguagcguaac

SEQ ID NO: 4100 - RNA, 19 nt, Artificial Sequence
  Synthetic
gcuuuauucaguauguaac

SEQ ID NO: 4101 - RNA, 20 nt, Artificial Sequence
  Synthetic
ggcuuuauucaguauguaac

SEQ ID NO: 4102 - RNA, 20 nt, Artificial Sequence
  Synthetic
gcagugugguagaguguaac

SEQ ID NO: 4103 - RNA, 22 nt, Artificial Sequence
  Synthetic
gagcagugugguagaguguaac

SEQ ID NO: 4104 - RNA, 24 nt, Artificial Sequence
  Synthetic
gugagcagugugguagaguguaac

SEQ ID NO: 4105 - RNA, 18 nt, Artificial Sequence
  Synthetic
gagaacguacauauuaac

SEQ ID NO: 4106 - RNA, 24 nt, Artificial Sequence
  Synthetic
guaauugagaacguacauauuaac

SEQ ID NO: 4107 - RNA, 21 nt, Artificial Sequence
  Synthetic
gaaacgccaaauucucuuaac

SEQ ID NO: 4108 - RNA, 21 nt, Artificial Sequence
  Synthetic
guauuguaaauccuaguuaac

SEQ ID NO: 4109 - RNA, 19 nt, Artificial Sequence
  Synthetic
gaagacuguauggguuaac

SEQ ID NO: 4110 - RNA, 23 nt, Artificial Sequence
  Synthetic
gaaagaagacuguauggguuaac

SEQ ID NO: 4111 - RNA, 24 nt, Artificial Sequence
  Synthetic
ggaaagaagacuguauggguuaac

SEQ ID NO: 4112 - RNA, 18 nt, Artificial Sequence
  Synthetic
gauaaacagaauguuaac

SEQ ID NO: 4113 - RNA, 24 nt, Artificial Sequence
  Synthetic
gacacaccgaagaugccauuuaac

SEQ ID NO: 4114 - RNA, 20 nt, Artificial Sequence
  Synthetic
guugaagcaucuccuuuaac

SEQ ID NO: 4115 - RNA, 22 nt, Artificial Sequence
  Synthetic
guguugaagcaucuccuuuaac

SEQ ID NO: 4116 - RNA, 21 nt, Artificial Sequence
  Synthetic
gccaguuaaaacaucuuuaac

SEQ ID NO: 4117 - RNA, 23 nt, Artificial Sequence
  Synthetic
gagccaguuaaaacaucuuuaac

SEQ ID NO: 4118 - RNA, 18 nt, Artificial Sequence
  Synthetic
gauaaacuaauguuuaac

SEQ ID NO: 4119 - RNA, 20 nt, Artificial Sequence
  Synthetic
gugauaaacuaauguuuaac

SEQ ID NO: 4120 - RNA, 21 nt, Artificial Sequence
  Synthetic
guuaacucuuuaauguuuaac

SEQ ID NO: 4121 - RNA, 23 nt, Artificial Sequence
  Synthetic
guguuaacucuuuaauguuuaac

SEQ ID NO: 4122 - RNA, 23 nt, Artificial Sequence
  Synthetic
gaaucauuuuaucugagaaacac

SEQ ID NO: 4123 - RNA, 18 nt, Artificial Sequence
  Synthetic
gagaaaucggugaaacac

SEQ ID NO: 4124 - RNA, 22 nt, Artificial Sequence
  Synthetic
gccugagaaaucggugaaacac

SEQ ID NO: 4125 - RNA, 19 nt, Artificial Sequence
  Synthetic
gacacauacuccacaacac

SEQ ID NO: 4126 - RNA, 22 nt, Artificial Sequence
  Synthetic
gacucguuuucucuuucaacac

SEQ ID NO: 4127 - RNA, 20 nt, Artificial Sequence
  Synthetic
gauugugcuguggggaacac

SEQ ID NO: 4128 - RNA, 22 nt, Artificial Sequence
  Synthetic
gcgauugugcuguggggaacac

SEQ ID NO: 4129 - RNA, 23 nt, Artificial Sequence
  Synthetic
ggcgauugugcuguggggaacac

SEQ ID NO: 4130 - RNA, 22 nt, Artificial Sequence
  Synthetic
gauuacauaucuaagugaacac

SEQ ID NO: 4131 - RNA, 24 nt, Artificial Sequence
  Synthetic
gcacaauuuccaugccaauaacac

SEQ ID NO: 4132 - RNA, 18 nt, Artificial Sequence
  Synthetic
ggcagcgcccagccacac

SEQ ID NO: 4133 - RNA, 20 nt, Artificial Sequence
  Synthetic
gaggcagcgcccagccacac

SEQ ID NO: 4134 - RNA, 21 nt, Artificial Sequence
  Synthetic
gauucauugcuuuaaucacac

SEQ ID NO: 4135 - RNA, 18 nt, Artificial Sequence
  Synthetic
gagaauagaaagagacac

SEQ ID NO: 4136 - RNA, 19 nt, Artificial Sequence
  Synthetic
ggagaauagaaagagacac

SEQ ID NO: 4137 - RNA, 23 nt, Artificial Sequence
  Synthetic
gaaaggagaauagaaagagacac

SEQ ID NO: 4138 - RNA, 20 nt, Artificial Sequence
  Synthetic
guuccuagugugaaugacac

SEQ ID NO: 4139 - RNA, 21 nt, Artificial Sequence
  Synthetic
gguuccuagugugaaugacac

SEQ ID NO: 4140 - RNA, 24 nt, Artificial Sequence
  Synthetic
gauuuacacuuaaauuuuauacac

SEQ ID NO: 4141 - RNA, 21 nt, Artificial Sequence
  Synthetic
guugcaaaacaaaauguacac

SEQ ID NO: 4142 - RNA, 23 nt, Artificial Sequence
  Synthetic
guguugcaaaacaaaauguacac

SEQ ID NO: 4143 - RNA, 24 nt, Artificial Sequence
  Synthetic
gguguugcaaaacaaaauguacac

SEQ ID NO: 4144 - RNA, 22 nt, Artificial Sequence
  Synthetic
guuguugaaugucagaaaccac

SEQ ID NO: 4145 - RNA, 23 nt, Artificial Sequence
  Synthetic
gguuguugaaugucagaaaccac

SEQ ID NO: 4146 - RNA, 22 nt, Artificial Sequence
  Synthetic
gcccugggguaugaaucaccac

SEQ ID NO: 4147 - RNA, 23 nt, Artificial Sequence
  Synthetic
ggcccugggguaugaaucaccac

SEQ ID NO: 4148 - RNA, 24 nt, Artificial Sequence
  Synthetic
gcaauuauaaucuauuuucaccac

SEQ ID NO: 4149 - RNA, 18 nt, Artificial Sequence
  Synthetic
gucaauauuucagaccac

SEQ ID NO: 4150 - RNA, 21 nt, Artificial Sequence
  Synthetic
guugucaauauuucagaccac

SEQ ID NO: 4151 - RNA, 24 nt, Artificial Sequence
  Synthetic
gauguugucaauauuucagaccac

SEQ ID NO: 4152 - RNA, 22 nt, Artificial Sequence
  Synthetic
guaagguaaaguuucugaccac

SEQ ID NO: 4153 - RNA, 24 nt, Artificial Sequence
  Synthetic
guguaagguaaaguuucugaccac

SEQ ID NO: 4154 - RNA, 19 nt, Artificial Sequence
  Synthetic
gcagggauguuuguaccac

SEQ ID NO: 4155 - RNA, 22 nt, Artificial Sequence
  Synthetic
gccaccuaaccuacauuaccac

SEQ ID NO: 4156 - RNA, 19 nt, Artificial Sequence
  Synthetic
gauaguacuuuuuacccac

SEQ ID NO: 4157 - RNA, 22 nt, Artificial Sequence
  Synthetic
guuacuucuaguaauaucccac

SEQ ID NO: 4158 - RNA, 24 nt, Artificial Sequence
  Synthetic
guguuacuucuaguaauaucccac

SEQ ID NO: 4159 - RNA, 19 nt, Artificial Sequence
  Synthetic
gaugauucucuuuagccac

SEQ ID NO: 4160 - RNA, 23 nt, Artificial Sequence
  Synthetic
gcaagaugauucucuuuagccac

SEQ ID NO: 4161 - RNA, 19 nt, Artificial Sequence
  Synthetic
guacuauaccucaggccac

SEQ ID NO: 4162 - RNA, 22 nt, Artificial Sequence
  Synthetic
gcaguacuauaccucaggccac

SEQ ID NO: 4163 - RNA, 18 nt, Artificial Sequence
  Synthetic
guuauugcuuugggccac

SEQ ID NO: 4164 - RNA, 24 nt, Artificial Sequence
  Synthetic
gaacuaguuauugcuuugggccac

SEQ ID NO: 4165 - RNA, 21 nt, Artificial Sequence
  Synthetic
gcauauucucaugguggccac

SEQ ID NO: 4166 - RNA, 21 nt, Artificial Sequence
  Synthetic
gcucucaaaauucacauccac

SEQ ID NO: 4167 - RNA, 24 nt, Artificial Sequence
  Synthetic
gcagcucucaaaauucacauccac

SEQ ID NO: 4168 - RNA, 20 nt, Artificial Sequence
  Synthetic
gccccauaacaguuauccac

SEQ ID NO: 4169 - RNA, 21 nt, Artificial Sequence
  Synthetic
ggccccauaacaguuauccac

SEQ ID NO: 4170 - RNA, 19 nt, Artificial Sequence
  Synthetic
gauaaugggugagcuccac

SEQ ID NO: 4171 - RNA, 19 nt, Artificial Sequence
  Synthetic
gaaaaggcaggcauuccac

SEQ ID NO: 4172 - RNA, 22 nt, Artificial Sequence
  Synthetic
gaagaaaaggcaggcauuccac

SEQ ID NO: 4173 - RNA, 23 nt, Artificial Sequence
  Synthetic
ggaagaaaaggcaggcauuccac

SEQ ID NO: 4174 - RNA, 18 nt, Artificial Sequence
  Synthetic
gauuggguuuaaaagcac

SEQ ID NO: 4175 - RNA, 21 nt, Artificial Sequence
  Synthetic
guagauuggguuuaaaagcac

SEQ ID NO: 4176 - RNA, 22 nt, Artificial Sequence
  Synthetic
gauaagguaauaugaacagcac

SEQ ID NO: 4177 - RNA, 18 nt, Artificial Sequence
  Synthetic
ggaaaaucaugacagcac

SEQ ID NO: 4178 - RNA, 20 nt, Artificial Sequence
  Synthetic
gcuagcucuaugcccagcac

SEQ ID NO: 4179 - RNA, 21 nt, Artificial Sequence
  Synthetic
ggcuagcucuaugcccagcac

SEQ ID NO: 4180 - RNA, 23 nt, Artificial Sequence
  Synthetic
gaaauucucaucaugucuagcac

SEQ ID NO: 4181 - RNA, 24 nt, Artificial Sequence
  Synthetic
ggaaauucucaucaugucuagcac

SEQ ID NO: 4182 - RNA, 18 nt, Artificial Sequence
  Synthetic
gugcaauuuugggcgcac

SEQ ID NO: 4183 - RNA, 21 nt, Artificial Sequence
  Synthetic
gacgugcaauuuugggcgcac

SEQ ID NO: 4184 - RNA, 22 nt, Artificial Sequence
  Synthetic
ggacgugcaauuuugggcgcac

SEQ ID NO: 4185 - RNA, 21 nt, Artificial Sequence
  Synthetic
gccacauacuaauauaggcac

SEQ ID NO: 4186 - RNA, 23 nt, Artificial Sequence
  Synthetic
gugccacauacuaauauaggcac

SEQ ID NO: 4187 - RNA, 19 nt, Artificial Sequence
  Synthetic
gcaacacguuacuaggcac

SEQ ID NO: 4188 - RNA, 22 nt, Artificial Sequence
  Synthetic
guagcaacacguuacuaggcac

SEQ ID NO: 4189 - RNA, 23 nt, Artificial Sequence
  Synthetic
gguagcaacacguuacuaggcac

SEQ ID NO: 4190 - RNA, 21 nt, Artificial Sequence
  Synthetic
gacagugagauuugggggcac

SEQ ID NO: 4191 - RNA, 23 nt, Artificial Sequence
  Synthetic
gagacagugagauuugggggcac

SEQ ID NO: 4192 - RNA, 23 nt, Artificial Sequence
  Synthetic
guuauauuuuaucccauuggcac

SEQ ID NO: 4193 - RNA, 19 nt, Artificial Sequence
  Synthetic
guauauuguucccaugcac

SEQ ID NO: 4194 - RNA, 20 nt, Artificial Sequence
  Synthetic
gucuaauuguaucauugcac

SEQ ID NO: 4195 - RNA, 23 nt, Artificial Sequence
  Synthetic
gaagucuaauuguaucauugcac

SEQ ID NO: 4196 - RNA, 24 nt, Artificial Sequence
  Synthetic
ggaagucuaauuguaucauugcac

SEQ ID NO: 4197 - RNA, 23 nt, Artificial Sequence
  Synthetic
gaaucagguuaggcaucuugcac

SEQ ID NO: 4198 - RNA, 24 nt, Artificial Sequence
  Synthetic
ggaaucagguuaggcaucuugcac

SEQ ID NO: 4199 - RNA, 20 nt, Artificial Sequence
  Synthetic
gcaggguauuuuaguugcac

SEQ ID NO: 4200 - RNA, 21 nt, Artificial Sequence
  Synthetic
ggcaggguauuuuaguugcac

SEQ ID NO: 4201 - RNA, 22 nt, Artificial Sequence
  Synthetic
gggcaggguauuuuaguugcac

SEQ ID NO: 4202 - RNA, 23 nt, Artificial Sequence
  Synthetic
ggggcaggguauuuuaguugcac

SEQ ID NO: 4203 - RNA, 19 nt, Artificial Sequence
  Synthetic
guuaagggaaauguugcac

SEQ ID NO: 4204 - RNA, 22 nt, Artificial Sequence
  Synthetic
guuguuaagggaaauguugcac

SEQ ID NO: 4205 - RNA, 23 nt, Artificial Sequence
  Synthetic
gguuguuaagggaaauguugcac

SEQ ID NO: 4206 - RNA, 22 nt, Artificial Sequence
  Synthetic
gaaacuuugauggaaaaaucac

SEQ ID NO: 4207 - RNA, 22 nt, Artificial Sequence
  Synthetic
guuaagaucuuaggcaaaucac

SEQ ID NO: 4208 - RNA, 20 nt, Artificial Sequence
  Synthetic
gucagagcugauggaaucac

SEQ ID NO: 4209 - RNA, 21 nt, Artificial Sequence
  Synthetic
ggucagagcugauggaaucac

SEQ ID NO: 4210 - RNA, 18 nt, Artificial Sequence
  Synthetic
gucccagaucagcaucac

SEQ ID NO: 4211 - RNA, 19 nt, Artificial Sequence
  Synthetic
ggucccagaucagcaucac

SEQ ID NO: 4212 - RNA, 20 nt, Artificial Sequence
  Synthetic
gggucccagaucagcaucac

SEQ ID NO: 4213 - RNA, 19 nt, Artificial Sequence
  Synthetic
gcuaaagcuuuacuaucac

SEQ ID NO: 4214 - RNA, 21 nt, Artificial Sequence
  Synthetic
gugcuaaagcuuuacuaucac

SEQ ID NO: 4215 - RNA, 18 nt, Artificial Sequence
  Synthetic
guuaugagugauacucac

SEQ ID NO: 4216 - RNA, 20 nt, Artificial Sequence
  Synthetic
gaguuaugagugauacucac

SEQ ID NO: 4217 - RNA, 24 nt, Artificial Sequence
  Synthetic
gcuagaguuaugagugauacucac

SEQ ID NO: 4218 - RNA, 23 nt, Artificial Sequence
  Synthetic
gucuuuuacaccauuguagucac

SEQ ID NO: 4219 - RNA, 18 nt, Artificial Sequence
  Synthetic
gucacgucaacaggucac

SEQ ID NO: 4220 - RNA, 23 nt, Artificial Sequence
  Synthetic
gauacauuugaucagacugucac

SEQ ID NO: 4221 - RNA, 18 nt, Artificial Sequence
  Synthetic
guaugucuagccugucac

SEQ ID NO: 4222 - RNA, 19 nt, Artificial Sequence
  Synthetic
gguaugucuagccugucac

SEQ ID NO: 4223 - RNA, 23 nt, Artificial Sequence
  Synthetic
gccugguaugucuagccugucac

SEQ ID NO: 4224 - RNA, 20 nt, Artificial Sequence
  Synthetic
guacacuguauuauauucac

SEQ ID NO: 4225 - RNA, 19 nt, Artificial Sequence
  Synthetic
guggggcacucaacuucac

SEQ ID NO: 4226 - RNA, 21 nt, Artificial Sequence
  Synthetic
gacauuugagaaagacuucac

SEQ ID NO: 4227 - RNA, 22 nt, Artificial Sequence
  Synthetic
ggacauuugagaaagacuucac

SEQ ID NO: 4228 - RNA, 22 nt, Artificial Sequence
  Synthetic
gucauugaucuaaguacuucac

SEQ ID NO: 4229 - RNA, 20 nt, Artificial Sequence
  Synthetic
guuuacaaagcacuguucac

SEQ ID NO: 4230 - RNA, 23 nt, Artificial Sequence
  Synthetic
gcaguuuacaaagcacuguucac

SEQ ID NO: 4231 - RNA, 23 nt, Artificial Sequence
  Synthetic
guauaagaauuuacacauuucac

SEQ ID NO: 4232 - RNA, 24 nt, Artificial Sequence
  Synthetic
gguauaagaauuuacacauuucac

SEQ ID NO: 4233 - RNA, 20 nt, Artificial Sequence
  Synthetic
gauucuggacaugauuucac

SEQ ID NO: 4234 - RNA, 19 nt, Artificial Sequence
  Synthetic
gucuuucugaauauuucac

SEQ ID NO: 4235 - RNA, 20 nt, Artificial Sequence
  Synthetic
gccuguaaggcaauuuucac

SEQ ID NO: 4236 - RNA, 23 nt, Artificial Sequence
  Synthetic
gaaacuucauauucaacaaagac

SEQ ID NO: 4237 - RNA, 24 nt, Artificial Sequence
  Synthetic
ggaaacuucauauucaacaaagac

SEQ ID NO: 4238 - RNA, 18 nt, Artificial Sequence
  Synthetic
gauuugccucagaaagac

SEQ ID NO: 4239 - RNA, 19 nt, Artificial Sequence
  Synthetic
ggauuugccucagaaagac

SEQ ID NO: 4240 - RNA, 22 nt, Artificial Sequence
  Synthetic
gcaggauuugccucagaaagac

SEQ ID NO: 4241 - RNA, 24 nt, Artificial Sequence
  Synthetic
gcuagacuuaggagucagaaagac

SEQ ID NO: 4242 - RNA, 22 nt, Artificial Sequence
  Synthetic
gugaauuuuauuuuugaaagac

SEQ ID NO: 4243 - RNA, 19 nt, Artificial Sequence
  Synthetic
gaguuuauuggcacaagac

SEQ ID NO: 4244 - RNA, 22 nt, Artificial Sequence
  Synthetic
gaugaguuuauuggcacaagac

SEQ ID NO: 4245 - RNA, 23 nt, Artificial Sequence
  Synthetic
gaucacagagcauuugucaagac

SEQ ID NO: 4246 - RNA, 24 nt, Artificial Sequence
  Synthetic
ggaucacagagcauuugucaagac

SEQ ID NO: 4247 - RNA, 23 nt, Artificial Sequence
  Synthetic
gauuuaauucuacaacagaagac

SEQ ID NO: 4248 - RNA, 19 nt, Artificial Sequence
  Synthetic
gagcuugaauacagaagac

SEQ ID NO: 4249 - RNA, 24 nt, Artificial Sequence
  Synthetic
gccuugagcuugaauacagaagac

SEQ ID NO: 4250 - RNA, 24 nt, Artificial Sequence
  Synthetic
gaauuaaacugcagcucagaagac

SEQ ID NO: 4251 - RNA, 18 nt, Artificial Sequence
  Synthetic
gggcgaccuugggaagac

SEQ ID NO: 4252 - RNA, 20 nt, Artificial Sequence
  Synthetic
gugggcgaccuugggaagac

SEQ ID NO: 4253 - RNA, 21 nt, Artificial Sequence
  Synthetic
ggugggcgaccuugggaagac

SEQ ID NO: 4254 - RNA, 18 nt, Artificial Sequence
  Synthetic
gugcucuaaaaugaagac

SEQ ID NO: 4255 - RNA, 22 nt, Artificial Sequence
  Synthetic
gccaaggaaaggugcugaagac

SEQ ID NO: 4256 - RNA, 19 nt, Artificial Sequence
  Synthetic
guacuugaugucugaagac

SEQ ID NO: 4257 - RNA, 20 nt, Artificial Sequence
  Synthetic
gguacuugaugucugaagac

SEQ ID NO: 4258 - RNA, 24 nt, Artificial Sequence
  Synthetic
gcaauauauaaaauaaucuaagac

SEQ ID NO: 4259 - RNA, 22 nt, Artificial Sequence
  Synthetic
guuaauaauacucauaacagac

SEQ ID NO: 4260 - RNA, 19 nt, Artificial Sequence
  Synthetic
gaacuauaaucucacagac

SEQ ID NO: 4261 - RNA, 24 nt, Artificial Sequence
  Synthetic
gucaccccaugggaaagagcagac

SEQ ID NO: 4262 - RNA, 21 nt, Artificial Sequence
  Synthetic
gaaauagcaaauauagcagac

SEQ ID NO: 4263 - RNA, 23 nt, Artificial Sequence
  Synthetic
gagaaauagcaaauauagcagac

SEQ ID NO: 4264 - RNA, 24 nt, Artificial Sequence
  Synthetic
ggagaaauagcaaauauagcagac

SEQ ID NO: 4265 - RNA, 19 nt, Artificial Sequence
  Synthetic
gcauaguguaccugcagac

SEQ ID NO: 4266 - RNA, 22 nt, Artificial Sequence
  Synthetic
gcagcauaguguaccugcagac

SEQ ID NO: 4267 - RNA, 23 nt, Artificial Sequence
  Synthetic
ggcagcauaguguaccugcagac

SEQ ID NO: 4268 - RNA, 21 nt, Artificial Sequence
  Synthetic
gucacaagaaaaguaucagac

SEQ ID NO: 4269 - RNA, 24 nt, Artificial Sequence
  Synthetic
guccacaucagaggugguucagac

SEQ ID NO: 4270 - RNA, 21 nt, Artificial Sequence
  Synthetic
guuuaucagagacacagagac

SEQ ID NO: 4271 - RNA, 22 nt, Artificial Sequence
  Synthetic
gguuuaucagagacacagagac

SEQ ID NO: 4272 - RNA, 24 nt, Artificial Sequence
  Synthetic
gugguuuaucagagacacagagac

SEQ ID NO: 4273 - RNA, 21 nt, Artificial Sequence
  Synthetic
gaccauagagaguugagagac

SEQ ID NO: 4274 - RNA, 23 nt, Artificial Sequence
  Synthetic
gagaccauagagaguugagagac

SEQ ID NO: 4275 - RNA, 20 nt, Artificial Sequence
  Synthetic
gaccccaaauagaaugagac

SEQ ID NO: 4276 - RNA, 22 nt, Artificial Sequence
  Synthetic
gugaccccaaauagaaugagac

SEQ ID NO: 4277 - RNA, 21 nt, Artificial Sequence
  Synthetic
gaagaugaugcugacugagac

SEQ ID NO: 4278 - RNA, 23 nt, Artificial Sequence
  Synthetic
gagaagaugaugcugacugagac

SEQ ID NO: 4279 - RNA, 18 nt, Artificial Sequence
  Synthetic
gcauuuuaucucugagac

SEQ ID NO: 4280 - RNA, 19 nt, Artificial Sequence
  Synthetic
ggcauuuuaucucugagac

SEQ ID NO: 4281 - RNA, 21 nt, Artificial Sequence
  Synthetic
gcuuagagcaaauucugagac

SEQ ID NO: 4282 - RNA, 22 nt, Artificial Sequence
  Synthetic
ggcuuagagcaaauucugagac

SEQ ID NO: 4283 - RNA, 19 nt, Artificial Sequence
  Synthetic
gagagaaugcacaauagac

SEQ ID NO: 4284 - RNA, 18 nt, Artificial Sequence
  Synthetic
ggcaaaauuuguauagac

SEQ ID NO: 4285 - RNA, 20 nt, Artificial Sequence
  Synthetic
guggcaaaauuuguauagac

SEQ ID NO: 4286 - RNA, 24 nt, Artificial Sequence
  Synthetic
guuuguggcaaaauuuguauagac

SEQ ID NO: 4287 - RNA, 18 nt, Artificial Sequence
  Synthetic
gcugugcuacuuauagac

SEQ ID NO: 4288 - RNA, 24 nt, Artificial Sequence
  Synthetic
gacauagcugugcuacuuauagac

SEQ ID NO: 4289 - RNA, 18 nt, Artificial Sequence
  Synthetic
gucuaccaaccuguagac

SEQ ID NO: 4290 - RNA, 22 nt, Artificial Sequence
  Synthetic
gacugucuaccaaccuguagac

SEQ ID NO: 4291 - RNA, 19 nt, Artificial Sequence
  Synthetic
gccaccagagaguguagac

SEQ ID NO: 4292 - RNA, 19 nt, Artificial Sequence
  Synthetic
gaaaauuagucccuuagac

SEQ ID NO: 4293 - RNA, 20 nt, Artificial Sequence
  Synthetic
ggaaaauuagucccuuagac

SEQ ID NO: 4294 - RNA, 24 nt, Artificial Sequence
  Synthetic
guuaggaaaauuagucccuuagac

SEQ ID NO: 4295 - RNA, 20 nt, Artificial Sequence
  Synthetic
gaaauuagcauuuguuagac

SEQ ID NO: 4296 - RNA, 22 nt, Artificial Sequence
  Synthetic
gagaaauuagcauuuguuagac

SEQ ID NO: 4297 - RNA, 23 nt, Artificial Sequence
  Synthetic
gacaccauagaggcaacagcgac

SEQ ID NO: 4298 - RNA, 18 nt, Artificial Sequence
  Synthetic
gauaugauuuguaucgac

SEQ ID NO: 4299 - RNA, 18 nt, Artificial Sequence
  Synthetic
gauccuugaaccaaggac

SEQ ID NO: 4300 - RNA, 22 nt, Artificial Sequence
  Synthetic
guucgauccuugaaccaaggac

SEQ ID NO: 4301 - RNA, 24 nt, Artificial Sequence
  Synthetic
guguucgauccuugaaccaaggac

SEQ ID NO: 4302 - RNA, 18 nt, Artificial Sequence
  Synthetic
gugcagugccuugaggac

SEQ ID NO: 4303 - RNA, 20 nt, Artificial Sequence
  Synthetic
gugugcagugccuugaggac

SEQ ID NO: 4304 - RNA, 21 nt, Artificial Sequence
  Synthetic
gccuaaucuugguuuuaggac

SEQ ID NO: 4305 - RNA, 19 nt, Artificial Sequence
  Synthetic
gaaaauacuuuguagggac

SEQ ID NO: 4306 - RNA, 20 nt, Artificial Sequence
  Synthetic
ggaaaauacuuuguagggac

SEQ ID NO: 4307 - RNA, 22 nt, Artificial Sequence
  Synthetic
gcucaaugggcaaaaacgggac

SEQ ID NO: 4308 - RNA, 22 nt, Artificial Sequence
  Synthetic
gacuccaacuuucuggggggac

SEQ ID NO: 4309 - RNA, 24 nt, Artificial Sequence
  Synthetic
gugacuccaacuuucuggggggac

SEQ ID NO: 4310 - RNA, 19 nt, Artificial Sequence
  Synthetic
gagggggcacugcugggac

SEQ ID NO: 4311 - RNA, 20 nt, Artificial Sequence
  Synthetic
guuguuuuuuucguugggac

SEQ ID NO: 4312 - RNA, 21 nt, Artificial Sequence
  Synthetic
gaaggaaaugauuacuuggac

SEQ ID NO: 4313 - RNA, 18 nt, Artificial Sequence
  Synthetic
gugauguuacuuuuggac

SEQ ID NO: 4314 - RNA, 20 nt, Artificial Sequence
  Synthetic
gagugauguuacuuuuggac

SEQ ID NO: 4315 - RNA, 21 nt, Artificial Sequence
  Synthetic
ggagugauguuacuuuuggac

SEQ ID NO: 4316 - RNA, 24 nt, Artificial Sequence
  Synthetic
gcaggagugauguuacuuuuggac

SEQ ID NO: 4317 - RNA, 18 nt, Artificial Sequence
  Synthetic
gauauguagagaaaugac

SEQ ID NO: 4318 - RNA, 18 nt, Artificial Sequence
  Synthetic
guuagcucaggaaaugac

SEQ ID NO: 4319 - RNA, 21 nt, Artificial Sequence
  Synthetic
gaaguuagcucaggaaaugac

SEQ ID NO: 4320 - RNA, 18 nt, Artificial Sequence
  Synthetic
gaguauacacuaaaugac

SEQ ID NO: 4321 - RNA, 19 nt, Artificial Sequence
  Synthetic
ggaguauacacuaaaugac

SEQ ID NO: 4322 - RNA, 20 nt, Artificial Sequence
  Synthetic
gggaguauacacuaaaugac

SEQ ID NO: 4323 - RNA, 19 nt, Artificial Sequence
  Synthetic
gcuaaccaaauuacaugac

SEQ ID NO: 4324 - RNA, 21 nt, Artificial Sequence
  Synthetic
gcuucccaugucacagaugac

SEQ ID NO: 4325 - RNA, 23 nt, Artificial Sequence
  Synthetic
gcuaccuuauauuauacuaugac

SEQ ID NO: 4326 - RNA, 24 nt, Artificial Sequence
  Synthetic
gauucauauccauucaucuaugac

SEQ ID NO: 4327 - RNA, 18 nt, Artificial Sequence
  Synthetic
guuuggaauuagacugac

SEQ ID NO: 4328 - RNA, 24 nt, Artificial Sequence
  Synthetic
guuaccugauucucuguaccugac

SEQ ID NO: 4329 - RNA, 24 nt, Artificial Sequence
  Synthetic
gucaucuguucuccuuccccugac

SEQ ID NO: 4330 - RNA, 18 nt, Artificial Sequence
  Synthetic
gagcaggagcccucugac

SEQ ID NO: 4331 - RNA, 20 nt, Artificial Sequence
  Synthetic
gcucaaaccaguucucugac

SEQ ID NO: 4332 - RNA, 24 nt, Artificial Sequence
  Synthetic
guuugcucaaaccaguucucugac

SEQ ID NO: 4333 - RNA, 24 nt, Artificial Sequence
  Synthetic
gaaacaccaguguguuauucugac

SEQ ID NO: 4334 - RNA, 18 nt, Artificial Sequence
  Synthetic
gagcagccaaggagugac

SEQ ID NO: 4335 - RNA, 22 nt, Artificial Sequence
  Synthetic
gauccuucaaaaaauucgugac

SEQ ID NO: 4336 - RNA, 18 nt, Artificial Sequence
  Synthetic
gaagacagauacugugac

SEQ ID NO: 4337 - RNA, 21 nt, Artificial Sequence
  Synthetic
gcugaagacagauacugugac

SEQ ID NO: 4338 - RNA, 24 nt, Artificial Sequence
  Synthetic
gaagcugaagacagauacugugac

SEQ ID NO: 4339 - RNA, 18 nt, Artificial Sequence
  Synthetic
ggucauaguuacugugac

SEQ ID NO: 4340 - RNA, 19 nt, Artificial Sequence
  Synthetic
gggucauaguuacugugac

SEQ ID NO: 4341 - RNA, 21 nt, Artificial Sequence
  Synthetic
gugggucauaguuacugugac

SEQ ID NO: 4342 - RNA, 21 nt, Artificial Sequence
  Synthetic
gacaucuaccaaaguugugac

SEQ ID NO: 4343 - RNA, 21 nt, Artificial Sequence
  Synthetic
ggauccauuucugguugugac

SEQ ID NO: 4344 - RNA, 24 nt, Artificial Sequence
  Synthetic
gcucacauugguaggaucauugac

SEQ ID NO: 4345 - RNA, 24 nt, Artificial Sequence
  Synthetic
gcuuggcuuuggaauuagauugac

SEQ ID NO: 4346 - RNA, 22 nt, Artificial Sequence
  Synthetic
guuuuacugcacuacacuugac

SEQ ID NO: 4347 - RNA, 18 nt, Artificial Sequence
  Synthetic
gaaacaacaauauuugac

SEQ ID NO: 4348 - RNA, 23 nt, Artificial Sequence
  Synthetic
gcucugaaacaacaauauuugac

SEQ ID NO: 4349 - RNA, 21 nt, Artificial Sequence
  Synthetic
guuaacaaacauuuguuugac

SEQ ID NO: 4350 - RNA, 22 nt, Artificial Sequence
  Synthetic
gguuaacaaacauuuguuugac

SEQ ID NO: 4351 - RNA, 19 nt, Artificial Sequence
  Synthetic
gaacaaggaaggaaaauac

SEQ ID NO: 4352 - RNA, 20 nt, Artificial Sequence
  Synthetic
ggaacaaggaaggaaaauac

SEQ ID NO: 4353 - RNA, 23 nt, Artificial Sequence
  Synthetic
gucagagaauacauauaaaauac

SEQ ID NO: 4354 - RNA, 23 nt, Artificial Sequence
  Synthetic
gccucauaaucacauugaaauac

SEQ ID NO: 4355 - RNA, 24 nt, Artificial Sequence
  Synthetic
ggccucauaaucacauugaaauac

SEQ ID NO: 4356 - RNA, 18 nt, Artificial Sequence
  Synthetic
gaaccaucucugcaauac

SEQ ID NO: 4357 - RNA, 24 nt, Artificial Sequence
  Synthetic
gaauauacugcaaauggucaauac

SEQ ID NO: 4358 - RNA, 19 nt, Artificial Sequence
  Synthetic
gacugaaauuuaagaauac

SEQ ID NO: 4359 - RNA, 22 nt, Artificial Sequence
  Synthetic
guauuuauuuagaaucuaauac

SEQ ID NO: 4360 - RNA, 18 nt, Artificial Sequence
  Synthetic
gggaaaaucaucuaauac

SEQ ID NO: 4361 - RNA, 23 nt, Artificial Sequence
  Synthetic
gacucgggaaaaucaucuaauac

SEQ ID NO: 4362 - RNA, 18 nt, Artificial Sequence
  Synthetic
gauuuuaaacaguaauac

SEQ ID NO: 4363 - RNA, 21 nt, Artificial Sequence
  Synthetic
guagauuuuaaacaguaauac

SEQ ID NO: 4364 - RNA, 18 nt, Artificial Sequence
  Synthetic
gguccccagcaguaauac

SEQ ID NO: 4365 - RNA, 24 nt, Artificial Sequence
  Synthetic
gauaacgguccccagcaguaauac

SEQ ID NO: 4366 - RNA, 19 nt, Artificial Sequence
  Synthetic
gaaagcagacaauacauac

SEQ ID NO: 4367 - RNA, 23 nt, Artificial Sequence
  Synthetic
guaugaaagcagacaauacauac

SEQ ID NO: 4368 - RNA, 24 nt, Artificial Sequence
  Synthetic
gccuucuggggcuagaaaccauac

SEQ ID NO: 4369 - RNA, 19 nt, Artificial Sequence
  Synthetic
gacaauggcaccaccauac

SEQ ID NO: 4370 - RNA, 18 nt, Artificial Sequence
  Synthetic
gcucacgucugaccauac

SEQ ID NO: 4371 - RNA, 23 nt, Artificial Sequence
  Synthetic
gaauagcucacgucugaccauac

SEQ ID NO: 4372 - RNA, 19 nt, Artificial Sequence
  Synthetic
gcugacgcccacuggauac

SEQ ID NO: 4373 - RNA, 24 nt, Artificial Sequence
  Synthetic
gcucugcugacgcccacuggauac

SEQ ID NO: 4374 - RNA, 18 nt, Artificial Sequence
  Synthetic
ggagaacugaacugauac

SEQ ID NO: 4375 - RNA, 22 nt, Artificial Sequence
  Synthetic
gacuuucacaaacccaauauac

SEQ ID NO: 4376 - RNA, 18 nt, Artificial Sequence
  Synthetic
gcaagauaaucaauauac

SEQ ID NO: 4377 - RNA, 22 nt, Artificial Sequence
  Synthetic
gcuugcaagauaaucaauauac

SEQ ID NO: 4378 - RNA, 20 nt, Artificial Sequence
  Synthetic
gucuacaugggagaauauac

SEQ ID NO: 4379 - RNA, 24 nt, Artificial Sequence
  Synthetic
guaugucuacaugggagaauauac

SEQ ID NO: 4380 - RNA, 24 nt, Artificial Sequence
  Synthetic
gcucucuuccagagauuuauauac

SEQ ID NO: 4381 - RNA, 18 nt, Artificial Sequence
  Synthetic
gacuuagagcugcuauac

SEQ ID NO: 4382 - RNA, 18 nt, Artificial Sequence
  Synthetic
ggaagggucaacuuauac

SEQ ID NO: 4383 - RNA, 19 nt, Artificial Sequence
  Synthetic
gggaagggucaacuuauac

SEQ ID NO: 4384 - RNA, 19 nt, Artificial Sequence
  Synthetic
gucuuuuaauuccuuauac

SEQ ID NO: 4385 - RNA, 18 nt, Artificial Sequence
  Synthetic
gcuuuagauauguuauac

SEQ ID NO: 4386 - RNA, 19 nt, Artificial Sequence
  Synthetic
ggcuuuagauauguuauac

SEQ ID NO: 4387 - RNA, 22 nt, Artificial Sequence
  Synthetic
gauggcuuuagauauguuauac

SEQ ID NO: 4388 - RNA, 22 nt, Artificial Sequence
  Synthetic
gacuagaugacuuauguuauac

SEQ ID NO: 4389 - RNA, 24 nt, Artificial Sequence
  Synthetic
gagacuagaugacuuauguuauac

SEQ ID NO: 4390 - RNA, 22 nt, Artificial Sequence
  Synthetic
guuuuauaaacugaugaacuac

SEQ ID NO: 4391 - RNA, 18 nt, Artificial Sequence
  Synthetic
gggauauaggaccacuac

SEQ ID NO: 4392 - RNA, 19 nt, Artificial Sequence
  Synthetic
ggggauauaggaccacuac

SEQ ID NO: 4393 - RNA, 24 nt, Artificial Sequence
  Synthetic
guuaaggggauauaggaccacuac

SEQ ID NO: 4394 - RNA, 18 nt, Artificial Sequence
  Synthetic
guuccuccaugggacuac

SEQ ID NO: 4395 - RNA, 20 nt, Artificial Sequence
  Synthetic
gaguuccuccaugggacuac

SEQ ID NO: 4396 - RNA, 24 nt, Artificial Sequence
  Synthetic
guaacaaaccuguacguauacuac

SEQ ID NO: 4397 - RNA, 20 nt, Artificial Sequence
  Synthetic
gcacucagaaccucaccuac

SEQ ID NO: 4398 - RNA, 23 nt, Artificial Sequence
  Synthetic
gaugcacucagaaccucaccuac

SEQ ID NO: 4399 - RNA, 23 nt, Artificial Sequence
  Synthetic
gccucucaccaugauguaccuac

SEQ ID NO: 4400 - RNA, 22 nt, Artificial Sequence
  Synthetic
gaacucucaugcaauugccuac

SEQ ID NO: 4401 - RNA, 23 nt, Artificial Sequence
  Synthetic
ggaacucucaugcaauugccuac

SEQ ID NO: 4402 - RNA, 21 nt, Artificial Sequence
  Synthetic
gcugaugaaacauuuuccuac

SEQ ID NO: 4403 - RNA, 21 nt, Artificial Sequence
  Synthetic
guucuuuccugagauagcuac

SEQ ID NO: 4404 - RNA, 18 nt, Artificial Sequence
  Synthetic
gauaugucagaagucuac

SEQ ID NO: 4405 - RNA, 19 nt, Artificial Sequence
  Synthetic
ggauaugucagaagucuac

SEQ ID NO: 4406 - RNA, 24 nt, Artificial Sequence
  Synthetic
gccuuuccaaguuuacucuucuac

SEQ ID NO: 4407 - RNA, 19 nt, Artificial Sequence
  Synthetic
gcaauauaugccgaaguac

SEQ ID NO: 4408 - RNA, 20 nt, Artificial Sequence
  Synthetic
ggcaauauaugccgaaguac

SEQ ID NO: 4409 - RNA, 21 nt, Artificial Sequence
  Synthetic
guaaaagacaaaauuaaguac

SEQ ID NO: 4410 - RNA, 18 nt, Artificial Sequence
  Synthetic
guauauuaucugcaguac

SEQ ID NO: 4411 - RNA, 21 nt, Artificial Sequence
  Synthetic
gaaauuaaguucauucaguac

SEQ ID NO: 4412 - RNA, 21 nt, Artificial Sequence
  Synthetic
gcuuggcugagcuaagaguac

SEQ ID NO: 4413 - RNA, 23 nt, Artificial Sequence
  Synthetic
gugcuuggcugagcuaagaguac

SEQ ID NO: 4414 - RNA, 20 nt, Artificial Sequence
  Synthetic
gacugugaagauuagaguac

SEQ ID NO: 4415 - RNA, 23 nt, Artificial Sequence
  Synthetic
gcagacugugaagauuagaguac

SEQ ID NO: 4416 - RNA, 19 nt, Artificial Sequence
  Synthetic
gauuaaucugaaugaguac

SEQ ID NO: 4417 - RNA, 20 nt, Artificial Sequence
  Synthetic
ggauuaaucugaaugaguac

SEQ ID NO: 4418 - RNA, 20 nt, Artificial Sequence
  Synthetic
gcuuauuguuuaaugaguac

SEQ ID NO: 4419 - RNA, 21 nt, Artificial Sequence
  Synthetic
ggcuuauuguuuaaugaguac

SEQ ID NO: 4420 - RNA, 22 nt, Artificial Sequence
  Synthetic
gggcuuauuguuuaaugaguac

SEQ ID NO: 4421 - RNA, 24 nt, Artificial Sequence
  Synthetic
gagggcuuauuguuuaaugaguac

SEQ ID NO: 4422 - RNA, 21 nt, Artificial Sequence
  Synthetic
guuuucagucauacauaguac

SEQ ID NO: 4423 - RNA, 20 nt, Artificial Sequence
  Synthetic
gcaacaaaggacgguaguac

SEQ ID NO: 4424 - RNA, 24 nt, Artificial Sequence
  Synthetic
gauugcaacaaaggacgguaguac

SEQ ID NO: 4425 - RNA, 20 nt, Artificial Sequence
  Synthetic
gaauuuagcuucuguaguac

SEQ ID NO: 4426 - RNA, 21 nt, Artificial Sequence
  Synthetic
ggaauuuagcuucuguaguac

SEQ ID NO: 4427 - RNA, 22 nt, Artificial Sequence
  Synthetic
gggaauuuagcuucuguaguac

SEQ ID NO: 4428 - RNA, 18 nt, Artificial Sequence
  Synthetic
gaaaacaaugagagguac

SEQ ID NO: 4429 - RNA, 20 nt, Artificial Sequence
  Synthetic
gugaaaacaaugagagguac

SEQ ID NO: 4430 - RNA, 18 nt, Artificial Sequence
  Synthetic
ggagccucuaaaugguac

SEQ ID NO: 4431 - RNA, 22 nt, Artificial Sequence
  Synthetic
gccuggagccucuaaaugguac

SEQ ID NO: 4432 - RNA, 22 nt, Artificial Sequence
  Synthetic
gcaucaaagacaagcaugguac

SEQ ID NO: 4433 - RNA, 19 nt, Artificial Sequence
  Synthetic
gccuugcgacucaugguac

SEQ ID NO: 4434 - RNA, 20 nt, Artificial Sequence
  Synthetic
gauacuuguucaucauguac

SEQ ID NO: 4435 - RNA, 20 nt, Artificial Sequence
  Synthetic
guuagcuauaguauuuguac

SEQ ID NO: 4436 - RNA, 20 nt, Artificial Sequence
  Synthetic
gcaagcaaugcuaaaauuac

SEQ ID NO: 4437 - RNA, 22 nt, Artificial Sequence
  Synthetic
gagcaagcaaugcuaaaauuac

SEQ ID NO: 4438 - RNA, 23 nt, Artificial Sequence
  Synthetic
ggagcaagcaaugcuaaaauuac

SEQ ID NO: 4439 - RNA, 18 nt, Artificial Sequence
  Synthetic
gagaauaauuucaauuac

SEQ ID NO: 4440 - RNA, 19 nt, Artificial Sequence
  Synthetic
ggagaauaauuucaauuac

SEQ ID NO: 4441 - RNA, 20 nt, Artificial Sequence
  Synthetic
gggagaauaauuucaauuac

SEQ ID NO: 4442 - RNA, 18 nt, Artificial Sequence
  Synthetic
gaauaaacaaggaauuac

SEQ ID NO: 4443 - RNA, 21 nt, Artificial Sequence
  Synthetic
guagaauaaacaaggaauuac

SEQ ID NO: 4444 - RNA, 19 nt, Artificial Sequence
  Synthetic
guuucuauuaaggaauuac

SEQ ID NO: 4445 - RNA, 20 nt, Artificial Sequence
  Synthetic
gguuucuauuaaggaauuac

SEQ ID NO: 4446 - RNA, 19 nt, Artificial Sequence
  Synthetic
guuucaaacuaugaauuac

SEQ ID NO: 4447 - RNA, 21 nt, Artificial Sequence
  Synthetic
guguuucaaacuaugaauuac

SEQ ID NO: 4448 - RNA, 23 nt, Artificial Sequence
  Synthetic
gcguguuucaaacuaugaauuac

SEQ ID NO: 4449 - RNA, 22 nt, Artificial Sequence
  Synthetic
guuuuucuaggugcugaauuac

SEQ ID NO: 4450 - RNA, 24 nt, Artificial Sequence
  Synthetic
guaaauauugauugaauuaauuac

SEQ ID NO: 4451 - RNA, 22 nt, Artificial Sequence
  Synthetic
gaaauaugccaggaaugauuac

SEQ ID NO: 4452 - RNA, 19 nt, Artificial Sequence
  Synthetic
gaauucuuucuaugauuac

SEQ ID NO: 4453 - RNA, 20 nt, Artificial Sequence
  Synthetic
ggaauucuuucuaugauuac

SEQ ID NO: 4454 - RNA, 21 nt, Artificial Sequence
  Synthetic
gggaauucuuucuaugauuac

SEQ ID NO: 4455 - RNA, 22 nt, Artificial Sequence
  Synthetic
ggggaauucuuucuaugauuac

SEQ ID NO: 4456 - RNA, 23 nt, Artificial Sequence
  Synthetic
guuucaucuuuuuaaaauauuac

SEQ ID NO: 4457 - RNA, 18 nt, Artificial Sequence
  Synthetic
gaaagcaucacguauuac

SEQ ID NO: 4458 - RNA, 20 nt, Artificial Sequence
  Synthetic
gagaaagcaucacguauuac

SEQ ID NO: 4459 - RNA, 22 nt, Artificial Sequence
  Synthetic
gagagaaagcaucacguauuac

SEQ ID NO: 4460 - RNA, 23 nt, Artificial Sequence
  Synthetic
ggagagaaagcaucacguauuac

SEQ ID NO: 4461 - RNA, 22 nt, Artificial Sequence
  Synthetic
guaccccuauauaucuuauuac

SEQ ID NO: 4462 - RNA, 23 nt, Artificial Sequence
  Synthetic
gguaccccuauauaucuuauuac

SEQ ID NO: 4463 - RNA, 24 nt, Artificial Sequence
  Synthetic
ggguaccccuauauaucuuauuac

SEQ ID NO: 4464 - RNA, 20 nt, Artificial Sequence
  Synthetic
gacaggucuaaguaacuuac

SEQ ID NO: 4465 - RNA, 18 nt, Artificial Sequence
  Synthetic
gguaggaaggacacuuac

SEQ ID NO: 4466 - RNA, 19 nt, Artificial Sequence
  Synthetic
ggguaggaaggacacuuac

SEQ ID NO: 4467 - RNA, 23 nt, Artificial Sequence
  Synthetic
gcauggguaggaaggacacuuac

SEQ ID NO: 4468 - RNA, 24 nt, Artificial Sequence
  Synthetic
ggcauggguaggaaggacacuuac

SEQ ID NO: 4469 - RNA, 20 nt, Artificial Sequence
  Synthetic
gccccagucagacuccuuac

SEQ ID NO: 4470 - RNA, 19 nt, Artificial Sequence
  Synthetic
guaauucuuguguccuuac

SEQ ID NO: 4471 - RNA, 20 nt, Artificial Sequence
  Synthetic
gguaauucuuguguccuuac

SEQ ID NO: 4472 - RNA, 18 nt, Artificial Sequence
  Synthetic
gccuuacaccuugcuuac

SEQ ID NO: 4473 - RNA, 24 nt, Artificial Sequence
  Synthetic
guaacugccuuacaccuugcuuac

SEQ ID NO: 4474 - RNA, 23 nt, Artificial Sequence
  Synthetic
gaaaucaucucaccgugaguuac

SEQ ID NO: 4475 - RNA, 24 nt, Artificial Sequence
  Synthetic
ggaaaucaucucaccgugaguuac

SEQ ID NO: 4476 - RNA, 21 nt, Artificial Sequence
  Synthetic
gcauaucaauguagauguuac

SEQ ID NO: 4477 - RNA, 23 nt, Artificial Sequence
  Synthetic
gagcauaucaauguagauguuac

SEQ ID NO: 4478 - RNA, 22 nt, Artificial Sequence
  Synthetic
gucuucauuaaacuuauguuac

SEQ ID NO: 4479 - RNA, 23 nt, Artificial Sequence
  Synthetic
ggucuucauuaaacuuauguuac

SEQ ID NO: 4480 - RNA, 24 nt, Artificial Sequence
  Synthetic
gcuaaccaagggaauuuguguuac

SEQ ID NO: 4481 - RNA, 24 nt, Artificial Sequence
  Synthetic
gucuauaauuugugaaguuguuac

SEQ ID NO: 4482 - RNA, 20 nt, Artificial Sequence
  Synthetic
guauuaagcuguuuuguuac

SEQ ID NO: 4483 - RNA, 20 nt, Artificial Sequence
  Synthetic
gcaaugaaugcucaauuuac

SEQ ID NO: 4484 - RNA, 23 nt, Artificial Sequence
  Synthetic
gcugcaaugaaugcucaauuuac

SEQ ID NO: 4485 - RNA, 22 nt, Artificial Sequence
  Synthetic
guauguaaaaauacauauuuac

SEQ ID NO: 4486 - RNA, 24 nt, Artificial Sequence
  Synthetic
gcaaaacugauccaggauauuuac

SEQ ID NO: 4487 - RNA, 21 nt, Artificial Sequence
  Synthetic
gaauuucucuuaacuauuuac

SEQ ID NO: 4488 - RNA, 23 nt, Artificial Sequence
  Synthetic
gugaauuucucuuaacuauuuac

SEQ ID NO: 4489 - RNA, 19 nt, Artificial Sequence
  Synthetic
guauucccuucuuauuuac

SEQ ID NO: 4490 - RNA, 20 nt, Artificial Sequence
  Synthetic
gguauucccuucuuauuuac

SEQ ID NO: 4491 - RNA, 22 nt, Artificial Sequence
  Synthetic
gugguauucccuucuuauuuac

SEQ ID NO: 4492 - RNA, 24 nt, Artificial Sequence
  Synthetic
gagugguauucccuucuuauuuac

SEQ ID NO: 4493 - RNA, 18 nt, Artificial Sequence
  Synthetic
guacaaaaucaacuuuac

SEQ ID NO: 4494 - RNA, 18 nt, Artificial Sequence
  Synthetic
gaacagucauuucuuuac

SEQ ID NO: 4495 - RNA, 20 nt, Artificial Sequence
  Synthetic
gcccaaauaugaaaguuuac

SEQ ID NO: 4496 - RNA, 22 nt, Artificial Sequence
  Synthetic
gauacugaugucagcaguuuac

SEQ ID NO: 4497 - RNA, 21 nt, Artificial Sequence
  Synthetic
guaagaauuucugaauuuuac

SEQ ID NO: 4498 - RNA, 22 nt, Artificial Sequence
  Synthetic
gguaagaauuucugaauuuuac

SEQ ID NO: 4499 - RNA, 21 nt, Artificial Sequence
  Synthetic
guaaaggauaguuucuuuuac

SEQ ID NO: 4500 - RNA, 22 nt, Artificial Sequence
  Synthetic
gguaaaggauaguuucuuuuac

SEQ ID NO: 4501 - RNA, 18 nt, Artificial Sequence
  Synthetic
guaaaccaugcaaaaacc

SEQ ID NO: 4502 - RNA, 20 nt, Artificial Sequence
  Synthetic
gaguaaaccaugcaaaaacc

SEQ ID NO: 4503 - RNA, 22 nt, Artificial Sequence
  Synthetic
gugaguaaaccaugcaaaaacc

SEQ ID NO: 4504 - RNA, 24 nt, Artificial Sequence
  Synthetic
gagugaguaaaccaugcaaaaacc

SEQ ID NO: 4505 - RNA, 23 nt, Artificial Sequence
  Synthetic
gcauuuacaaaugagucaaaacc

SEQ ID NO: 4506 - RNA, 24 nt, Artificial Sequence
  Synthetic
ggcauuuacaaaugagucaaaacc

SEQ ID NO: 4507 - RNA, 20 nt, Artificial Sequence
  Synthetic
gcacagugaauuagaaaacc

SEQ ID NO: 4508 - RNA, 18 nt, Artificial Sequence
  Synthetic
gcauaguacuugaaaacc

SEQ ID NO: 4509 - RNA, 23 nt, Artificial Sequence
  Synthetic
guucaaaguacuaccauaaaacc

SEQ ID NO: 4510 - RNA, 24 nt, Artificial Sequence
  Synthetic
gguucaaaguacuaccauaaaacc

SEQ ID NO: 4511 - RNA, 19 nt, Artificial Sequence
  Synthetic
guaggaaaaacagcaaacc

SEQ ID NO: 4512 - RNA, 20 nt, Artificial Sequence
  Synthetic
gguaggaaaaacagcaaacc

SEQ ID NO: 4513 - RNA, 21 nt, Artificial Sequence
  Synthetic
ggguaggaaaaacagcaaacc

SEQ ID NO: 4514 - RNA, 23 nt, Artificial Sequence
  Synthetic
gccuuugagcuugaauugaaacc

SEQ ID NO: 4515 - RNA, 19 nt, Artificial Sequence
  Synthetic
gauugggaauuaauaaacc

SEQ ID NO: 4516 - RNA, 20 nt, Artificial Sequence
  Synthetic
ggauugggaauuaauaaacc

SEQ ID NO: 4517 - RNA, 21 nt, Artificial Sequence
  Synthetic
gacugacauauugaguaaacc

SEQ ID NO: 4518 - RNA, 24 nt, Artificial Sequence
  Synthetic
gaagacugacauauugaguaaacc

SEQ ID NO: 4519 - RNA, 19 nt, Artificial Sequence
  Synthetic
gauugcugcuugguaaacc

SEQ ID NO: 4520 - RNA, 20 nt, Artificial Sequence
  Synthetic
ggauugcugcuugguaaacc

SEQ ID NO: 4521 - RNA, 22 nt, Artificial Sequence
  Synthetic
gaggauugcugcuugguaaacc

SEQ ID NO: 4522 - RNA, 24 nt, Artificial Sequence
  Synthetic
gagaggauugcugcuugguaaacc

SEQ ID NO: 4523 - RNA, 20 nt, Artificial Sequence
  Synthetic
guugaugccucuguuaaacc

SEQ ID NO: 4524 - RNA, 18 nt, Artificial Sequence
  Synthetic
guagaauuauuuuaaacc

SEQ ID NO: 4525 - RNA, 20 nt, Artificial Sequence
  Synthetic
gaguagaauuauuuuaaacc

SEQ ID NO: 4526 - RNA, 18 nt, Artificial Sequence
  Synthetic
guagaaguguuuuaaacc

SEQ ID NO: 4527 - RNA, 23 nt, Artificial Sequence
  Synthetic
gcaccaugcagccauccacaacc

SEQ ID NO: 4528 - RNA, 24 nt, Artificial Sequence
  Synthetic
gaucauaauaaugguugcacaacc

SEQ ID NO: 4529 - RNA, 19 nt, Artificial Sequence
  Synthetic
guuucacaauuccccaacc

SEQ ID NO: 4530 - RNA, 22 nt, Artificial Sequence
  Synthetic
guuguuucacaauuccccaacc

SEQ ID NO: 4531 - RNA, 23 nt, Artificial Sequence
  Synthetic
gguuguuucacaauuccccaacc

SEQ ID NO: 4532 - RNA, 18 nt, Artificial Sequence
  Synthetic
ggauaggcauggccaacc

SEQ ID NO: 4533 - RNA, 19 nt, Artificial Sequence
  Synthetic
gggauaggcauggccaacc

SEQ ID NO: 4534 - RNA, 19 nt, Artificial Sequence
  Synthetic
gaacacaaaauugccaacc

SEQ ID NO: 4535 - RNA, 21 nt, Artificial Sequence
  Synthetic
gagaacacaaaauugccaacc

SEQ ID NO: 4536 - RNA, 18 nt, Artificial Sequence
  Synthetic
ggcacggaggaugcaacc

SEQ ID NO: 4537 - RNA, 19 nt, Artificial Sequence
  Synthetic
gggcacggaggaugcaacc

SEQ ID NO: 4538 - RNA, 20 nt, Artificial Sequence
  Synthetic
guauuuaguggcgugcaacc

SEQ ID NO: 4539 - RNA, 23 nt, Artificial Sequence
  Synthetic
gcaguauuuaguggcgugcaacc

SEQ ID NO: 4540 - RNA, 24 nt, Artificial Sequence
  Synthetic
ggcaguauuuaguggcgugcaacc

SEQ ID NO: 4541 - RNA, 21 nt, Artificial Sequence
  Synthetic
gaaaugggauaggauagaacc

SEQ ID NO: 4542 - RNA, 22 nt, Artificial Sequence
  Synthetic
ggaaaugggauaggauagaacc

SEQ ID NO: 4543 - RNA, 19 nt, Artificial Sequence
  Synthetic
gaacauccacguaggaacc

SEQ ID NO: 4544 - RNA, 23 nt, Artificial Sequence
  Synthetic
gaaagaacauccacguaggaacc

SEQ ID NO: 4545 - RNA, 19 nt, Artificial Sequence
  Synthetic
guuuuucaauaacugaacc

SEQ ID NO: 4546 - RNA, 23 nt, Artificial Sequence
  Synthetic
guuccuaugguggggcuauaacc

SEQ ID NO: 4547 - RNA, 24 nt, Artificial Sequence
  Synthetic
gguuccuaugguggggcuauaacc

SEQ ID NO: 4548 - RNA, 18 nt, Artificial Sequence
  Synthetic
gaggcagcccgaguaacc

SEQ ID NO: 4549 - RNA, 23 nt, Artificial Sequence
  Synthetic
gauuagaggcagcccgaguaacc

SEQ ID NO: 4550 - RNA, 22 nt, Artificial Sequence
  Synthetic
gcuuuccgcagaagaaaacacc

SEQ ID NO: 4551 - RNA, 21 nt, Artificial Sequence
  Synthetic
guauuauuacuuaugaacacc

SEQ ID NO: 4552 - RNA, 24 nt, Artificial Sequence
  Synthetic
guuguauuauuacuuaugaacacc

SEQ ID NO: 4553 - RNA, 24 nt, Artificial Sequence
  Synthetic
gaauaaagacaguaccaagacacc

SEQ ID NO: 4554 - RNA, 18 nt, Artificial Sequence
  Synthetic
gugcaggaauaguacacc

SEQ ID NO: 4555 - RNA, 21 nt, Artificial Sequence
  Synthetic
gcagugcaggaauaguacacc

SEQ ID NO: 4556 - RNA, 24 nt, Artificial Sequence
  Synthetic
gaagcagugcaggaauaguacacc

SEQ ID NO: 4557 - RNA, 23 nt, Artificial Sequence
  Synthetic
gaaauaaugaacuggaccccacc

SEQ ID NO: 4558 - RNA, 22 nt, Artificial Sequence
  Synthetic
gccauuuuagagucuucccacc

SEQ ID NO: 4559 - RNA, 24 nt, Artificial Sequence
  Synthetic
gugccauuuuagagucuucccacc

SEQ ID NO: 4560 - RNA, 21 nt, Artificial Sequence
  Synthetic
gaacuuuggagauauuccacc

SEQ ID NO: 4561 - RNA, 24 nt, Artificial Sequence
  Synthetic
gaugaacuuuggagauauuccacc

SEQ ID NO: 4562 - RNA, 23 nt, Artificial Sequence
  Synthetic
gaccuuuauuuuguuaaugcacc

SEQ ID NO: 4563 - RNA, 20 nt, Artificial Sequence
  Synthetic
gcuucugaugucccaucacc

SEQ ID NO: 4564 - RNA, 21 nt, Artificial Sequence
  Synthetic
ggcuucugaugucccaucacc

SEQ ID NO: 4565 - RNA, 23 nt, Artificial Sequence
  Synthetic
guggcuucugaugucccaucacc

SEQ ID NO: 4566 - RNA, 23 nt, Artificial Sequence
  Synthetic
gcucaaccccugcccuccucacc

SEQ ID NO: 4567 - RNA, 19 nt, Artificial Sequence
  Synthetic
gaagggaaaucaucucacc

SEQ ID NO: 4568 - RNA, 19 nt, Artificial Sequence
  Synthetic
guuacuaacaguagucacc

SEQ ID NO: 4569 - RNA, 18 nt, Artificial Sequence
  Synthetic
gucugggugauggucacc

SEQ ID NO: 4570 - RNA, 19 nt, Artificial Sequence
  Synthetic
ggucugggugauggucacc

SEQ ID NO: 4571 - RNA, 18 nt, Artificial Sequence
  Synthetic
gaggucuugagauucacc

SEQ ID NO: 4572 - RNA, 21 nt, Artificial Sequence
  Synthetic
gaucuggaacaugaguagacc

SEQ ID NO: 4573 - RNA, 22 nt, Artificial Sequence
  Synthetic
ggaucuggaacaugaguagacc

SEQ ID NO: 4574 - RNA, 19 nt, Artificial Sequence
  Synthetic
guuucucuguucuuagacc

SEQ ID NO: 4575 - RNA, 21 nt, Artificial Sequence
  Synthetic
guguuucucuguucuuagacc

SEQ ID NO: 4576 - RNA, 21 nt, Artificial Sequence
  Synthetic
gauuuugucacuccaacgacc

SEQ ID NO: 4577 - RNA, 22 nt, Artificial Sequence
  Synthetic
ggauuuugucacuccaacgacc

SEQ ID NO: 4578 - RNA, 18 nt, Artificial Sequence
  Synthetic
gaguugcagcaagggacc

SEQ ID NO: 4579 - RNA, 23 nt, Artificial Sequence
  Synthetic
guccugaguugcagcaagggacc

SEQ ID NO: 4580 - RNA, 21 nt, Artificial Sequence
  Synthetic
gaauaugggucacgugggacc

SEQ ID NO: 4581 - RNA, 19 nt, Artificial Sequence
  Synthetic
guauuucuaggaauggacc

SEQ ID NO: 4582 - RNA, 22 nt, Artificial Sequence
  Synthetic
guuucaguugagcugaaugacc

SEQ ID NO: 4583 - RNA, 21 nt, Artificial Sequence
  Synthetic
gccaucaucaucuccaugacc

SEQ ID NO: 4584 - RNA, 24 nt, Artificial Sequence
  Synthetic
gcugccaucaucaucuccaugacc

SEQ ID NO: 4585 - RNA, 19 nt, Artificial Sequence
  Synthetic
gagaaaacaucuuaugacc

SEQ ID NO: 4586 - RNA, 20 nt, Artificial Sequence
  Synthetic
ggagaaaacaucuuaugacc

SEQ ID NO: 4587 - RNA, 20 nt, Artificial Sequence
  Synthetic
guacacuguguacacugacc

SEQ ID NO: 4588 - RNA, 18 nt, Artificial Sequence
  Synthetic
gaaauguauucagugacc

SEQ ID NO: 4589 - RNA, 21 nt, Artificial Sequence
  Synthetic
guagaaauguauucagugacc

SEQ ID NO: 4590 - RNA, 22 nt, Artificial Sequence
  Synthetic
gguagaaauguauucagugacc

SEQ ID NO: 4591 - RNA, 24 nt, Artificial Sequence
  Synthetic
gugguagaaauguauucagugacc

SEQ ID NO: 4592 - RNA, 24 nt, Artificial Sequence
  Synthetic
gcuuggcucccaagcugugugacc

SEQ ID NO: 4593 - RNA, 18 nt, Artificial Sequence
  Synthetic
gagagaaggagaaauacc

SEQ ID NO: 4594 - RNA, 21 nt, Artificial Sequence
  Synthetic
gcagagagaaggagaaauacc

SEQ ID NO: 4595 - RNA, 23 nt, Artificial Sequence
  Synthetic
gagcagagagaaggagaaauacc

SEQ ID NO: 4596 - RNA, 20 nt, Artificial Sequence
  Synthetic
gacauccaauauagaauacc

SEQ ID NO: 4597 - RNA, 21 nt, Artificial Sequence
  Synthetic
ggacauccaauauagaauacc

SEQ ID NO: 4598 - RNA, 22 nt, Artificial Sequence
  Synthetic
gggacauccaauauagaauacc

SEQ ID NO: 4599 - RNA, 24 nt, Artificial Sequence
  Synthetic
gagggacauccaauauagaauacc

SEQ ID NO: 4600 - RNA, 18 nt, Artificial Sequence
  Synthetic
gugcuuacuuuugauacc

SEQ ID NO: 4601 - RNA, 18 nt, Artificial Sequence
  Synthetic
gcauugcacguaucuacc

SEQ ID NO: 4602 - RNA, 18 nt, Artificial Sequence
  Synthetic
ggaacagcgcuuaguacc

SEQ ID NO: 4603 - RNA, 24 nt, Artificial Sequence
  Synthetic
guaccaggaacagcgcuuaguacc

SEQ ID NO: 4604 - RNA, 24 nt, Artificial Sequence
  Synthetic
gaauacugagggugaucagguacc

SEQ ID NO: 4605 - RNA, 20 nt, Artificial Sequence
  Synthetic
gauggguauuugaugguacc

SEQ ID NO: 4606 - RNA, 21 nt, Artificial Sequence
  Synthetic
ggauggguauuugaugguacc

SEQ ID NO: 4607 - RNA, 24 nt, Artificial Sequence
  Synthetic
gauggauggguauuugaugguacc

SEQ ID NO: 4608 - RNA, 24 nt, Artificial Sequence
  Synthetic
gaaaauaggaaaggaugcuguacc

SEQ ID NO: 4609 - RNA, 18 nt, Artificial Sequence
  Synthetic
gcuguuuuaaaaauuacc

SEQ ID NO: 4610 - RNA, 22 nt, Artificial Sequence
  Synthetic
gcaugcuguuuuaaaaauuacc

SEQ ID NO: 4611 - RNA, 21 nt, Artificial Sequence
  Synthetic
gacaagaauucaaaaguuacc

SEQ ID NO: 4612 - RNA, 22 nt, Artificial Sequence
  Synthetic
ggacaagaauucaaaaguuacc

SEQ ID NO: 4613 - RNA, 19 nt, Artificial Sequence
  Synthetic
guuaucaguauuuguuacc

SEQ ID NO: 4614 - RNA, 20 nt, Artificial Sequence
  Synthetic
gguuaucaguauuuguuacc

SEQ ID NO: 4615 - RNA, 19 nt, Artificial Sequence
  Synthetic
gcugcauacgguauuuacc

SEQ ID NO: 4616 - RNA, 24 nt, Artificial Sequence
  Synthetic
guacagcugcauacgguauuuacc

SEQ ID NO: 4617 - RNA, 22 nt, Artificial Sequence
  Synthetic
gauuucuauucuuggaaaaccc

SEQ ID NO: 4618 - RNA, 19 nt, Artificial Sequence
  Synthetic
gaaaagaucaaaacaaccc

SEQ ID NO: 4619 - RNA, 21 nt, Artificial Sequence
  Synthetic
gagaaaagaucaaaacaaccc

SEQ ID NO: 4620 - RNA, 24 nt, Artificial Sequence
  Synthetic
guauagauuacugggcuucaaccc

SEQ ID NO: 4621 - RNA, 19 nt, Artificial Sequence
  Synthetic
gacuguaguuagugaaccc

SEQ ID NO: 4622 - RNA, 24 nt, Artificial Sequence
  Synthetic
guuaugacuguaguuagugaaccc

SEQ ID NO: 4623 - RNA, 19 nt, Artificial Sequence
  Synthetic
guagacuacucuugaaccc

SEQ ID NO: 4624 - RNA, 22 nt, Artificial Sequence
  Synthetic
gcccuuagguaucaaguaaccc

SEQ ID NO: 4625 - RNA, 22 nt, Artificial Sequence
  Synthetic
gcucugucuauuucauucaccc

SEQ ID NO: 4626 - RNA, 23 nt, Artificial Sequence
  Synthetic
ggcucugucuauuucauucaccc

SEQ ID NO: 4627 - RNA, 22 nt, Artificial Sequence
  Synthetic
gucuuguucaccuccaagaccc

SEQ ID NO: 4628 - RNA, 18 nt, Artificial Sequence
  Synthetic
gaacaugaaagaagaccc

SEQ ID NO: 4629 - RNA, 20 nt, Artificial Sequence
  Synthetic
gagaacaugaaagaagaccc

SEQ ID NO: 4630 - RNA, 23 nt, Artificial Sequence
  Synthetic
gaagagaacaugaaagaagaccc

SEQ ID NO: 4631 - RNA, 24 nt, Artificial Sequence
  Synthetic
ggaagagaacaugaaagaagaccc

SEQ ID NO: 4632 - RNA, 24 nt, Artificial Sequence
  Synthetic
gcucacauuuuauaaaggagaccc

SEQ ID NO: 4633 - RNA, 19 nt, Artificial Sequence
  Synthetic
gcauccucaucugagaccc

SEQ ID NO: 4634 - RNA, 20 nt, Artificial Sequence
  Synthetic
ggcauccucaucugagaccc

SEQ ID NO: 4635 - RNA, 18 nt, Artificial Sequence
  Synthetic
gcauagcauguccuaccc

SEQ ID NO: 4636 - RNA, 20 nt, Artificial Sequence
  Synthetic
gagcauagcauguccuaccc

SEQ ID NO: 4637 - RNA, 20 nt, Artificial Sequence
  Synthetic
gaacguagcauguucuaccc

SEQ ID NO: 4638 - RNA, 19 nt, Artificial Sequence
  Synthetic
gacaucaaccagaguaccc

SEQ ID NO: 4639 - RNA, 20 nt, Artificial Sequence
  Synthetic
ggacaucaaccagaguaccc

SEQ ID NO: 4640 - RNA, 23 nt, Artificial Sequence
  Synthetic
guaggacaucaaccagaguaccc

SEQ ID NO: 4641 - RNA, 20 nt, Artificial Sequence
  Synthetic
gaagugguaauuuuguaccc

SEQ ID NO: 4642 - RNA, 24 nt, Artificial Sequence
  Synthetic
gaaagaagugguaauuuuguaccc

SEQ ID NO: 4643 - RNA, 20 nt, Artificial Sequence
  Synthetic
gccuuuaaauagucuuaccc

SEQ ID NO: 4644 - RNA, 22 nt, Artificial Sequence
  Synthetic
gugccuuuaaauagucuuaccc

SEQ ID NO: 4645 - RNA, 21 nt, Artificial Sequence
  Synthetic
guuacauagaugagaaacccc

SEQ ID NO: 4646 - RNA, 23 nt, Artificial Sequence
  Synthetic
guguuacauagaugagaaacccc

SEQ ID NO: 4647 - RNA, 20 nt, Artificial Sequence
  Synthetic
gacuagaaucugauaacccc

SEQ ID NO: 4648 - RNA, 21 nt, Artificial Sequence
  Synthetic
ggacuagaaucugauaacccc

SEQ ID NO: 4649 - RNA, 22 nt, Artificial Sequence
  Synthetic
gucaucuugcuuggaccacccc

SEQ ID NO: 4650 - RNA, 18 nt, Artificial Sequence
  Synthetic
gauaccacuacaaccccc

SEQ ID NO: 4651 - RNA, 21 nt, Artificial Sequence
  Synthetic
gaagauaccacuacaaccccc

SEQ ID NO: 4652 - RNA, 19 nt, Artificial Sequence
  Synthetic
gucucuccgugcuaccccc

SEQ ID NO: 4653 - RNA, 18 nt, Artificial Sequence
  Synthetic
gucccagucugugccccc

SEQ ID NO: 4654 - RNA, 24 nt, Artificial Sequence
  Synthetic
gcucacacauucacauuuugcccc

SEQ ID NO: 4655 - RNA, 20 nt, Artificial Sequence
  Synthetic
guagcucgauaaaucucccc

SEQ ID NO: 4656 - RNA, 22 nt, Artificial Sequence
  Synthetic
gaguagcucgauaaaucucccc

SEQ ID NO: 4657 - RNA, 24 nt, Artificial Sequence
  Synthetic
gugaguagcucgauaaaucucccc

SEQ ID NO: 4658 - RNA, 18 nt, Artificial Sequence
  Synthetic
guuggaagcugcuucccc

SEQ ID NO: 4659 - RNA, 22 nt, Artificial Sequence
  Synthetic
gacaguuggaagcugcuucccc

SEQ ID NO: 4660 - RNA, 23 nt, Artificial Sequence
  Synthetic
ggacaguuggaagcugcuucccc

SEQ ID NO: 4661 - RNA, 24 nt, Artificial Sequence
  Synthetic
gggacaguuggaagcugcuucccc

SEQ ID NO: 4662 - RNA, 19 nt, Artificial Sequence
  Synthetic
guuuauaguuaauuucccc

SEQ ID NO: 4663 - RNA, 18 nt, Artificial Sequence
  Synthetic
gaaaauaaauacaagccc

SEQ ID NO: 4664 - RNA, 19 nt, Artificial Sequence
  Synthetic
gaguuugggaaaagagccc

SEQ ID NO: 4665 - RNA, 21 nt, Artificial Sequence
  Synthetic
gagaguuugggaaaagagccc

SEQ ID NO: 4666 - RNA, 22 nt, Artificial Sequence
  Synthetic
ggagaguuugggaaaagagccc

SEQ ID NO: 4667 - RNA, 24 nt, Artificial Sequence
  Synthetic
gaggagaguuugggaaaagagccc

SEQ ID NO: 4668 - RNA, 19 nt, Artificial Sequence
  Synthetic
gaaccacgaggaagagccc

SEQ ID NO: 4669 - RNA, 22 nt, Artificial Sequence
  Synthetic
gcucuuuucuuuacccuagccc

SEQ ID NO: 4670 - RNA, 24 nt, Artificial Sequence
  Synthetic
gcauuuuucucuaaucaguagccc

SEQ ID NO: 4671 - RNA, 21 nt, Artificial Sequence
  Synthetic
gcuucagcucaggcaaggccc

SEQ ID NO: 4672 - RNA, 19 nt, Artificial Sequence
  Synthetic
gaugaaaccauaugggccc

SEQ ID NO: 4673 - RNA, 22 nt, Artificial Sequence
  Synthetic
guagaugaaaccauaugggccc

SEQ ID NO: 4674 - RNA, 20 nt, Artificial Sequence
  Synthetic
gaaaguguuaaaguaugccc

SEQ ID NO: 4675 - RNA, 24 nt, Artificial Sequence
  Synthetic
gcccgaaaguguuaaaguaugccc

SEQ ID NO: 4676 - RNA, 24 nt, Artificial Sequence
  Synthetic
gucuuuacucuugagcaucugccc

SEQ ID NO: 4677 - RNA, 18 nt, Artificial Sequence
  Synthetic
gaaaacucugcucugccc

SEQ ID NO: 4678 - RNA, 20 nt, Artificial Sequence
  Synthetic
gucauccaggugaagugccc

SEQ ID NO: 4679 - RNA, 18 nt, Artificial Sequence
  Synthetic
ggcucuccacaauugccc

SEQ ID NO: 4680 - RNA, 23 nt, Artificial Sequence
  Synthetic
gccauaugguauuucaauugccc

SEQ ID NO: 4681 - RNA, 20 nt, Artificial Sequence
  Synthetic
gacuggaagaaaggaauccc

SEQ ID NO: 4682 - RNA, 18 nt, Artificial Sequence
  Synthetic
gcagaaauuggacauccc

SEQ ID NO: 4683 - RNA, 23 nt, Artificial Sequence
  Synthetic
guccugcagaaauuggacauccc

SEQ ID NO: 4684 - RNA, 24 nt, Artificial Sequence
  Synthetic
gguccugcagaaauuggacauccc

SEQ ID NO: 4685 - RNA, 22 nt, Artificial Sequence
  Synthetic
guagcuggcugggccccauccc

SEQ ID NO: 4686 - RNA, 21 nt, Artificial Sequence
  Synthetic
gucuuguuuuaucaugauccc

SEQ ID NO: 4687 - RNA, 21 nt, Artificial Sequence
  Synthetic
gcaugggucucagggacuccc

SEQ ID NO: 4688 - RNA, 23 nt, Artificial Sequence
  Synthetic
guuugaccuaucuugcagcuccc

SEQ ID NO: 4689 - RNA, 18 nt, Artificial Sequence
  Synthetic
gcgcuggguucugcuccc

SEQ ID NO: 4690 - RNA, 22 nt, Artificial Sequence
  Synthetic
gcuugcgcuggguucugcuccc

SEQ ID NO: 4691 - RNA, 20 nt, Artificial Sequence
  Synthetic
gaaugcuccccccaucuccc

SEQ ID NO: 4692 - RNA, 24 nt, Artificial Sequence
  Synthetic
guccacugccacaugcauaguccc

SEQ ID NO: 4693 - RNA, 20 nt, Artificial Sequence
  Synthetic
gacccugcucccaguguccc

SEQ ID NO: 4694 - RNA, 19 nt, Artificial Sequence
  Synthetic
gccaucacauuguuguccc

SEQ ID NO: 4695 - RNA, 20 nt, Artificial Sequence
  Synthetic
ggccaucacauuguuguccc

SEQ ID NO: 4696 - RNA, 21 nt, Artificial Sequence
  Synthetic
guauuaucacccacccuuccc

SEQ ID NO: 4697 - RNA, 18 nt, Artificial Sequence
  Synthetic
guuggugaaccccuuccc

SEQ ID NO: 4698 - RNA, 19 nt, Artificial Sequence
  Synthetic
gguuggugaaccccuuccc

SEQ ID NO: 4699 - RNA, 19 nt, Artificial Sequence
  Synthetic
gaccuuaauucaucuuccc

SEQ ID NO: 4700 - RNA, 22 nt, Artificial Sequence
  Synthetic
gaagaccuuaauucaucuuccc

SEQ ID NO: 4701 - RNA, 23 nt, Artificial Sequence
  Synthetic
guuucuaauacacuuaucuuccc

SEQ ID NO: 4702 - RNA, 18 nt, Artificial Sequence
  Synthetic
gauccuuuaucucuuccc

SEQ ID NO: 4703 - RNA, 21 nt, Artificial Sequence
  Synthetic
gaagauccuuuaucucuuccc

SEQ ID NO: 4704 - RNA, 22 nt, Artificial Sequence
  Synthetic
ggaagauccuuuaucucuuccc

SEQ ID NO: 4705 - RNA, 23 nt, Artificial Sequence
  Synthetic
gggaagauccuuuaucucuuccc

SEQ ID NO: 4706 - RNA, 24 nt, Artificial Sequence
  Synthetic
ggggaagauccuuuaucucuuccc

SEQ ID NO: 4707 - RNA, 19 nt, Artificial Sequence
  Synthetic
gcaaguucucucauuuccc

SEQ ID NO: 4708 - RNA, 21 nt, Artificial Sequence
  Synthetic
gcgcaaguucucucauuuccc

SEQ ID NO: 4709 - RNA, 22 nt, Artificial Sequence
  Synthetic
guuucauuggcuuugauuuccc

SEQ ID NO: 4710 - RNA, 19 nt, Artificial Sequence
  Synthetic
guguuuuccauccuuuccc

SEQ ID NO: 4711 - RNA, 20 nt, Artificial Sequence
  Synthetic
gguguuuuccauccuuuccc

SEQ ID NO: 4712 - RNA, 22 nt, Artificial Sequence
  Synthetic
gugguguuuuccauccuuuccc

SEQ ID NO: 4713 - RNA, 24 nt, Artificial Sequence
  Synthetic
gaccaagaaaauaaguuaaaagcc

SEQ ID NO: 4714 - RNA, 23 nt, Artificial Sequence
  Synthetic
gcauuaguauuaccugcaaagcc

SEQ ID NO: 4715 - RNA, 20 nt, Artificial Sequence
  Synthetic
gucuguuugacuuuaaagcc

SEQ ID NO: 4716 - RNA, 22 nt, Artificial Sequence
  Synthetic
gcauuuuagauaaaacuaagcc

SEQ ID NO: 4717 - RNA, 24 nt, Artificial Sequence
  Synthetic
gcucauuugacauucacaacagcc

SEQ ID NO: 4718 - RNA, 22 nt, Artificial Sequence
  Synthetic
gaccuugacucuccauccagcc

SEQ ID NO: 4719 - RNA, 20 nt, Artificial Sequence
  Synthetic
gcuaauugggagaagcagcc

SEQ ID NO: 4720 - RNA, 18 nt, Artificial Sequence
  Synthetic
gagauaauagcugcagcc

SEQ ID NO: 4721 - RNA, 19 nt, Artificial Sequence
  Synthetic
ggagauaauagcugcagcc

SEQ ID NO: 4722 - RNA, 20 nt, Artificial Sequence
  Synthetic
gauccagcagaguuucagcc

SEQ ID NO: 4723 - RNA, 21 nt, Artificial Sequence
  Synthetic
gccagcuuuugaaagagagcc

SEQ ID NO: 4724 - RNA, 19 nt, Artificial Sequence
  Synthetic
gccuccugaggagagagcc

SEQ ID NO: 4725 - RNA, 22 nt, Artificial Sequence
  Synthetic
gcugccuccugaggagagagcc

SEQ ID NO: 4726 - RNA, 24 nt, Artificial Sequence
  Synthetic
gagcugccuccugaggagagagcc

SEQ ID NO: 4727 - RNA, 20 nt, Artificial Sequence
  Synthetic
gaaacagugcugugggagcc

SEQ ID NO: 4728 - RNA, 21 nt, Artificial Sequence
  Synthetic
ggaaacagugcugugggagcc

SEQ ID NO: 4729 - RNA, 18 nt, Artificial Sequence
  Synthetic
guauguccuucuugagcc

SEQ ID NO: 4730 - RNA, 19 nt, Artificial Sequence
  Synthetic
gguauguccuucuugagcc

SEQ ID NO: 4731 - RNA, 21 nt, Artificial Sequence
  Synthetic
gugguauguccuucuugagcc

SEQ ID NO: 4732 - RNA, 20 nt, Artificial Sequence
  Synthetic
gcccuuugaagaucauagcc

SEQ ID NO: 4733 - RNA, 23 nt, Artificial Sequence
  Synthetic
gaagcccuuugaagaucauagcc

SEQ ID NO: 4734 - RNA, 20 nt, Artificial Sequence
  Synthetic
guugcagaaaacugcuagcc

SEQ ID NO: 4735 - RNA, 24 nt, Artificial Sequence
  Synthetic
guaaguugcagaaaacugcuagcc

SEQ ID NO: 4736 - RNA, 20 nt, Artificial Sequence
  Synthetic
gauaaauuucuccuuuagcc

SEQ ID NO: 4737 - RNA, 19 nt, Artificial Sequence
  Synthetic
gcucgauuuauugagcgcc

SEQ ID NO: 4738 - RNA, 24 nt, Artificial Sequence
  Synthetic
guaaaacccagugugagcaaggcc

SEQ ID NO: 4739 - RNA, 18 nt, Artificial Sequence
  Synthetic
gaguuuuguauuaaggcc

SEQ ID NO: 4740 - RNA, 23 nt, Artificial Sequence
  Synthetic
guauccaguguguucaacaggcc

SEQ ID NO: 4741 - RNA, 24 nt, Artificial Sequence
  Synthetic
gguauccaguguguucaacaggcc

SEQ ID NO: 4742 - RNA, 19 nt, Artificial Sequence
  Synthetic
guuuucucauauguaggcc

SEQ ID NO: 4743 - RNA, 22 nt, Artificial Sequence
  Synthetic
guaauuuauuggaaggauggcc

SEQ ID NO: 4744 - RNA, 23 nt, Artificial Sequence
  Synthetic
gguaauuuauuggaaggauggcc

SEQ ID NO: 4745 - RNA, 24 nt, Artificial Sequence
  Synthetic
ggguaauuuauuggaaggauggcc

SEQ ID NO: 4746 - RNA, 20 nt, Artificial Sequence
  Synthetic
gucaaauuauuugccuggcc

SEQ ID NO: 4747 - RNA, 20 nt, Artificial Sequence
  Synthetic
guaacaggacuuagguggcc

SEQ ID NO: 4748 - RNA, 19 nt, Artificial Sequence
  Synthetic
gaaaucagucccaaaugcc

SEQ ID NO: 4749 - RNA, 20 nt, Artificial Sequence
  Synthetic
gaaaagggaagaguaaugcc

SEQ ID NO: 4750 - RNA, 19 nt, Artificial Sequence
  Synthetic
gauugaauggucccaugcc

SEQ ID NO: 4751 - RNA, 22 nt, Artificial Sequence
  Synthetic
gaauuucaaacagaaauaugcc

SEQ ID NO: 4752 - RNA, 19 nt, Artificial Sequence
  Synthetic
gcugugcuuagcauaugcc

SEQ ID NO: 4753 - RNA, 21 nt, Artificial Sequence
  Synthetic
gugcugugcuuagcauaugcc

SEQ ID NO: 4754 - RNA, 22 nt, Artificial Sequence
  Synthetic
ggugcugugcuuagcauaugcc

SEQ ID NO: 4755 - RNA, 20 nt, Artificial Sequence
  Synthetic
gucaugucauuaccuaugcc

SEQ ID NO: 4756 - RNA, 19 nt, Artificial Sequence
  Synthetic
gcucugcuacucuuaugcc

SEQ ID NO: 4757 - RNA, 20 nt, Artificial Sequence
  Synthetic
guuucuccuauaaaacugcc

SEQ ID NO: 4758 - RNA, 23 nt, Artificial Sequence
  Synthetic
gucguuucuccuauaaaacugcc

SEQ ID NO: 4759 - RNA, 22 nt, Artificial Sequence
  Synthetic
gcucaccaacugauguccugcc

SEQ ID NO: 4760 - RNA, 22 nt, Artificial Sequence
  Synthetic
gaacucaauggaaaaggcugcc

SEQ ID NO: 4761 - RNA, 20 nt, Artificial Sequence
  Synthetic
guagauugacuucggcugcc

SEQ ID NO: 4762 - RNA, 18 nt, Artificial Sequence
  Synthetic
gcugucuguuuaucugcc

SEQ ID NO: 4763 - RNA, 22 nt, Artificial Sequence
  Synthetic
gccagcugucuguuuaucugcc

SEQ ID NO: 4764 - RNA, 24 nt, Artificial Sequence
  Synthetic
gaauugagguuugcaaccucugcc

SEQ ID NO: 4765 - RNA, 19 nt, Artificial Sequence
  Synthetic
guuuacaaugaucucugcc

SEQ ID NO: 4766 - RNA, 24 nt, Artificial Sequence
  Synthetic
gacucguuuacaaugaucucugcc

SEQ ID NO: 4767 - RNA, 18 nt, Artificial Sequence
  Synthetic
ggacacaccaacagugcc

SEQ ID NO: 4768 - RNA, 19 nt, Artificial Sequence
  Synthetic
gggacacaccaacagugcc

SEQ ID NO: 4769 - RNA, 21 nt, Artificial Sequence
  Synthetic
gugggacacaccaacagugcc

SEQ ID NO: 4770 - RNA, 22 nt, Artificial Sequence
  Synthetic
ggugggacacaccaacagugcc

SEQ ID NO: 4771 - RNA, 21 nt, Artificial Sequence
  Synthetic
guaacagauuccccuggugcc

SEQ ID NO: 4772 - RNA, 22 nt, Artificial Sequence
  Synthetic
gaaauugcucuguaaaugugcc

SEQ ID NO: 4773 - RNA, 23 nt, Artificial Sequence
  Synthetic
ggaaauugcucuguaaaugugcc

SEQ ID NO: 4774 - RNA, 21 nt, Artificial Sequence
  Synthetic
gaacaugaaggaaugugugcc

SEQ ID NO: 4775 - RNA, 24 nt, Artificial Sequence
  Synthetic
gaaccucucuucccucugugugcc

SEQ ID NO: 4776 - RNA, 24 nt, Artificial Sequence
  Synthetic
gucauuuuuccugguaccauugcc

SEQ ID NO: 4777 - RNA, 19 nt, Artificial Sequence
  Synthetic
gucguucuucaaaguugcc

SEQ ID NO: 4778 - RNA, 18 nt, Artificial Sequence
  Synthetic
gagauuucuacuguugcc

SEQ ID NO: 4779 - RNA, 21 nt, Artificial Sequence
  Synthetic
gaugagauuucuacuguugcc

SEQ ID NO: 4780 - RNA, 20 nt, Artificial Sequence
  Synthetic
guuacccccauugauuugcc

SEQ ID NO: 4781 - RNA, 21 nt, Artificial Sequence
  Synthetic
gguuacccccauugauuugcc

SEQ ID NO: 4782 - RNA, 23 nt, Artificial Sequence
  Synthetic
gugguuacccccauugauuugcc

SEQ ID NO: 4783 - RNA, 22 nt, Artificial Sequence
  Synthetic
gucuauuuaacugcacuuugcc

SEQ ID NO: 4784 - RNA, 18 nt, Artificial Sequence
  Synthetic
gcuagcuuugaguuugcc

SEQ ID NO: 4785 - RNA, 22 nt, Artificial Sequence
  Synthetic
gauugcuagcuuugaguuugcc

SEQ ID NO: 4786 - RNA, 19 nt, Artificial Sequence
  Synthetic
gcaaccuaugaguuuugcc

SEQ ID NO: 4787 - RNA, 24 nt, Artificial Sequence
  Synthetic
gacaagcaaccuaugaguuuugcc

SEQ ID NO: 4788 - RNA, 20 nt, Artificial Sequence
  Synthetic
guaguacaggagagaaaucc

SEQ ID NO: 4789 - RNA, 23 nt, Artificial Sequence
  Synthetic
guuguaguacaggagagaaaucc

SEQ ID NO: 4790 - RNA, 24 nt, Artificial Sequence
  Synthetic
gguuguaguacaggagagaaaucc

SEQ ID NO: 4791 - RNA, 18 nt, Artificial Sequence
  Synthetic
gaaaaaucaucccaaucc

SEQ ID NO: 4792 - RNA, 22 nt, Artificial Sequence
  Synthetic
gacugaaaaaucaucccaaucc

SEQ ID NO: 4793 - RNA, 18 nt, Artificial Sequence
  Synthetic
gaauuuuacuugcaaucc

SEQ ID NO: 4794 - RNA, 21 nt, Artificial Sequence
  Synthetic
guugaauuuuacuugcaaucc

SEQ ID NO: 4795 - RNA, 19 nt, Artificial Sequence
  Synthetic
gagacuauaccuucaaucc

SEQ ID NO: 4796 - RNA, 23 nt, Artificial Sequence
  Synthetic
guuugagacuauaccuucaaucc

SEQ ID NO: 4797 - RNA, 24 nt, Artificial Sequence
  Synthetic
gcuauauuuaguggugacuaaucc

SEQ ID NO: 4798 - RNA, 18 nt, Artificial Sequence
  Synthetic
gcagcuugcuugccaucc

SEQ ID NO: 4799 - RNA, 20 nt, Artificial Sequence
  Synthetic
gugcagcuugcuugccaucc

SEQ ID NO: 4800 - RNA, 18 nt, Artificial Sequence
  Synthetic
gagcuaaucugagcaucc

SEQ ID NO: 4801 - RNA, 21 nt, Artificial Sequence
  Synthetic
guagagcuaaucugagcaucc

SEQ ID NO: 4802 - RNA, 18 nt, Artificial Sequence
  Synthetic
ggaauuauuugggcaucc

SEQ ID NO: 4803 - RNA, 23 nt, Artificial Sequence
  Synthetic
guuauggaauuauuugggcaucc

SEQ ID NO: 4804 - RNA, 18 nt, Artificial Sequence
  Synthetic
gauggagaaccaucaucc

SEQ ID NO: 4805 - RNA, 19 nt, Artificial Sequence
  Synthetic
ggauggagaaccaucaucc

SEQ ID NO: 4806 - RNA, 20 nt, Artificial Sequence
  Synthetic
gggauggagaaccaucaucc

SEQ ID NO: 4807 - RNA, 21 nt, Artificial Sequence
  Synthetic
ggggauggagaaccaucaucc

SEQ ID NO: 4808 - RNA, 23 nt, Artificial Sequence
  Synthetic
guggggauggagaaccaucaucc

SEQ ID NO: 4809 - RNA, 22 nt, Artificial Sequence
  Synthetic
guguauuuuuuuuuuaagaucc

SEQ ID NO: 4810 - RNA, 23 nt, Artificial Sequence
  Synthetic
gguguauuuuuuuuuuaagaucc

SEQ ID NO: 4811 - RNA, 18 nt, Artificial Sequence
  Synthetic
guauguggaggaggaucc

SEQ ID NO: 4812 - RNA, 20 nt, Artificial Sequence
  Synthetic
gaguauguggaggaggaucc

SEQ ID NO: 4813 - RNA, 21 nt, Artificial Sequence
  Synthetic
ggaguauguggaggaggaucc

SEQ ID NO: 4814 - RNA, 22 nt, Artificial Sequence
  Synthetic
gggaguauguggaggaggaucc

SEQ ID NO: 4815 - RNA, 24 nt, Artificial Sequence
  Synthetic
gagggaguauguggaggaggaucc

SEQ ID NO: 4816 - RNA, 18 nt, Artificial Sequence
  Synthetic
gaaguuuggacuggaucc

SEQ ID NO: 4817 - RNA, 19 nt, Artificial Sequence
  Synthetic
gauccgggugagaugaucc

SEQ ID NO: 4818 - RNA, 20 nt, Artificial Sequence
  Synthetic
ggauccgggugagaugaucc

SEQ ID NO: 4819 - RNA, 23 nt, Artificial Sequence
  Synthetic
gaaggauccgggugagaugaucc

SEQ ID NO: 4820 - RNA, 24 nt, Artificial Sequence
  Synthetic
ggaaggauccgggugagaugaucc

SEQ ID NO: 4821 - RNA, 21 nt, Artificial Sequence
  Synthetic
gauauacguauagugauaucc

SEQ ID NO: 4822 - RNA, 22 nt, Artificial Sequence
  Synthetic
ggauauacguauagugauaucc

SEQ ID NO: 4823 - RNA, 22 nt, Artificial Sequence
  Synthetic
gauuaaccguggucguauaucc

SEQ ID NO: 4824 - RNA, 23 nt, Artificial Sequence
  Synthetic
ggauuaaccguggucguauaucc

SEQ ID NO: 4825 - RNA, 19 nt, Artificial Sequence
  Synthetic
gagagagauggaucuaucc

SEQ ID NO: 4826 - RNA, 24 nt, Artificial Sequence
  Synthetic
guaaagagagagauggaucuaucc

SEQ ID NO: 4827 - RNA, 20 nt, Artificial Sequence
  Synthetic
gcuuuuacuuuaauguaucc

SEQ ID NO: 4828 - RNA, 22 nt, Artificial Sequence
  Synthetic
gagcuuuuacuuuaauguaucc

SEQ ID NO: 4829 - RNA, 24 nt, Artificial Sequence
  Synthetic
gaaacuuaaacuuuucccuuaucc

SEQ ID NO: 4830 - RNA, 23 nt, Artificial Sequence
  Synthetic
gccuaucuugagauuuuaacucc

SEQ ID NO: 4831 - RNA, 20 nt, Artificial Sequence
  Synthetic
gcccagaucaaguagacucc

SEQ ID NO: 4832 - RNA, 22 nt, Artificial Sequence
  Synthetic
gugcccagaucaaguagacucc

SEQ ID NO: 4833 - RNA, 23 nt, Artificial Sequence
  Synthetic
ggugcccagaucaaguagacucc

SEQ ID NO: 4834 - RNA, 18 nt, Artificial Sequence
  Synthetic
gguuugacaguuuccucc

SEQ ID NO: 4835 - RNA, 20 nt, Artificial Sequence
  Synthetic
gcgguuugacaguuuccucc

SEQ ID NO: 4836 - RNA, 21 nt, Artificial Sequence
  Synthetic
ggcgguuugacaguuuccucc

SEQ ID NO: 4837 - RNA, 21 nt, Artificial Sequence
  Synthetic
gucccagcccuuaggagcucc

SEQ ID NO: 4838 - RNA, 22 nt, Artificial Sequence
  Synthetic
ggucccagcccuuaggagcucc

SEQ ID NO: 4839 - RNA, 19 nt, Artificial Sequence
  Synthetic
gagaagaaaauagugcucc

SEQ ID NO: 4840 - RNA, 20 nt, Artificial Sequence
  Synthetic
ggagaagaaaauagugcucc

SEQ ID NO: 4841 - RNA, 24 nt, Artificial Sequence
  Synthetic
gauuggagaagaaaauagugcucc

SEQ ID NO: 4842 - RNA, 21 nt, Artificial Sequence
  Synthetic
guuagagcugaaaacaucucc

SEQ ID NO: 4843 - RNA, 19 nt, Artificial Sequence
  Synthetic
guuaaauuuccucaucucc

SEQ ID NO: 4844 - RNA, 22 nt, Artificial Sequence
  Synthetic
gcuguuaaauuuccucaucucc

SEQ ID NO: 4845 - RNA, 23 nt, Artificial Sequence
  Synthetic
ggcuguuaaauuuccucaucucc

SEQ ID NO: 4846 - RNA, 21 nt, Artificial Sequence
  Synthetic
gccccauuucuuccacucucc

SEQ ID NO: 4847 - RNA, 22 nt, Artificial Sequence
  Synthetic
ggccccauuucuuccacucucc

SEQ ID NO: 4848 - RNA, 23 nt, Artificial Sequence
  Synthetic
gucuuucuaaucauauccucucc

SEQ ID NO: 4849 - RNA, 20 nt, Artificial Sequence
  Synthetic
gcaauacauguggagucucc

SEQ ID NO: 4850 - RNA, 21 nt, Artificial Sequence
  Synthetic
gcaccuuuguaaauguucucc

SEQ ID NO: 4851 - RNA, 22 nt, Artificial Sequence
  Synthetic
ggcaccuuuguaaauguucucc

SEQ ID NO: 4852 - RNA, 19 nt, Artificial Sequence
  Synthetic
guuuucccaucuuuucucc

SEQ ID NO: 4853 - RNA, 22 nt, Artificial Sequence
  Synthetic
gccguuuucccaucuuuucucc

SEQ ID NO: 4854 - RNA, 21 nt, Artificial Sequence
  Synthetic
gaauuucuucauguuuagucc

SEQ ID NO: 4855 - RNA, 18 nt, Artificial Sequence
  Synthetic
gucuuuaagcaagcgucc

SEQ ID NO: 4856 - RNA, 24 nt, Artificial Sequence
  Synthetic
guacaagucuuuaagcaagcgucc

SEQ ID NO: 4857 - RNA, 23 nt, Artificial Sequence
  Synthetic
guuauguggcuuuaccaaggucc

SEQ ID NO: 4858 - RNA, 24 nt, Artificial Sequence
  Synthetic
gguuauguggcuuuaccaaggucc

SEQ ID NO: 4859 - RNA, 18 nt, Artificial Sequence
  Synthetic
guuaggucuuuuaggucc

SEQ ID NO: 4860 - RNA, 21 nt, Artificial Sequence
  Synthetic
guuuacaaagaaauauggucc

SEQ ID NO: 4861 - RNA, 22 nt, Artificial Sequence
  Synthetic
gaccuuuuauuauauauggucc

SEQ ID NO: 4862 - RNA, 23 nt, Artificial Sequence
  Synthetic
ggaccuuuuauuauauauggucc

SEQ ID NO: 4863 - RNA, 22 nt, Artificial Sequence
  Synthetic
gccacccuauaugugaaugucc

SEQ ID NO: 4864 - RNA, 23 nt, Artificial Sequence
  Synthetic
ggccacccuauaugugaaugucc

SEQ ID NO: 4865 - RNA, 20 nt, Artificial Sequence
  Synthetic
gaaguuaaauggguaugucc

SEQ ID NO: 4866 - RNA, 22 nt, Artificial Sequence
  Synthetic
gagaaguuaaauggguaugucc

SEQ ID NO: 4867 - RNA, 23 nt, Artificial Sequence
  Synthetic
ggagaaguuaaauggguaugucc

SEQ ID NO: 4868 - RNA, 18 nt, Artificial Sequence
  Synthetic
gccucuuccaugcugucc

SEQ ID NO: 4869 - RNA, 21 nt, Artificial Sequence
  Synthetic
gauucagaauauaaucugucc

SEQ ID NO: 4870 - RNA, 19 nt, Artificial Sequence
  Synthetic
gcaucagaagucugugucc

SEQ ID NO: 4871 - RNA, 20 nt, Artificial Sequence
  Synthetic
ggcaucagaagucugugucc

SEQ ID NO: 4872 - RNA, 19 nt, Artificial Sequence
  Synthetic
gagguuaagagauuugucc

SEQ ID NO: 4873 - RNA, 21 nt, Artificial Sequence
  Synthetic
gaaaaaggucuguacaauucc

SEQ ID NO: 4874 - RNA, 22 nt, Artificial Sequence
  Synthetic
ggaaaaaggucuguacaauucc

SEQ ID NO: 4875 - RNA, 19 nt, Artificial Sequence
  Synthetic
guaaacaaaccagaauucc

SEQ ID NO: 4876 - RNA, 23 nt, Artificial Sequence
  Synthetic
gcauuuucauaauuaaaacuucc

SEQ ID NO: 4877 - RNA, 21 nt, Artificial Sequence
  Synthetic
gucuacaaaugugaaacuucc

SEQ ID NO: 4878 - RNA, 24 nt, Artificial Sequence
  Synthetic
gaagucuacaaaugugaaacuucc

SEQ ID NO: 4879 - RNA, 23 nt, Artificial Sequence
  Synthetic
gcaaaugcucucucucaccuucc

SEQ ID NO: 4880 - RNA, 24 nt, Artificial Sequence
  Synthetic
ggcaaaugcucucucucaccuucc

SEQ ID NO: 4881 - RNA, 19 nt, Artificial Sequence
  Synthetic
guuuccuggguagccuucc

SEQ ID NO: 4882 - RNA, 18 nt, Artificial Sequence
  Synthetic
gaaagcuauuaaucuucc

SEQ ID NO: 4883 - RNA, 23 nt, Artificial Sequence
  Synthetic
gaauugaaagcuauuaaucuucc

SEQ ID NO: 4884 - RNA, 18 nt, Artificial Sequence
  Synthetic
gacaggaaaauaucuucc

SEQ ID NO: 4885 - RNA, 19 nt, Artificial Sequence
  Synthetic
ggacaggaaaauaucuucc

SEQ ID NO: 4886 - RNA, 23 nt, Artificial Sequence
  Synthetic
gucaggacaggaaaauaucuucc

SEQ ID NO: 4887 - RNA, 20 nt, Artificial Sequence
  Synthetic
guucucuagcauacucuucc

SEQ ID NO: 4888 - RNA, 24 nt, Artificial Sequence
  Synthetic
gaauguucucuagcauacucuucc

SEQ ID NO: 4889 - RNA, 21 nt, Artificial Sequence
  Synthetic
guacaugccauuccgucuucc

SEQ ID NO: 4890 - RNA, 21 nt, Artificial Sequence
  Synthetic
guaauucuuauuuguucuucc

SEQ ID NO: 4891 - RNA, 22 nt, Artificial Sequence
  Synthetic
gcaaaggccuaaauuuucuucc

SEQ ID NO: 4892 - RNA, 18 nt, Artificial Sequence
  Synthetic
gguaagguuaaaaguucc

SEQ ID NO: 4893 - RNA, 21 nt, Artificial Sequence
  Synthetic
guugguaagguuaaaaguucc

SEQ ID NO: 4894 - RNA, 24 nt, Artificial Sequence
  Synthetic
gccacauagagggggagaaguucc

SEQ ID NO: 4895 - RNA, 19 nt, Artificial Sequence
  Synthetic
gucugcauuuuucaguucc

SEQ ID NO: 4896 - RNA, 22 nt, Artificial Sequence
  Synthetic
gccuuucucugcuuuccguucc

SEQ ID NO: 4897 - RNA, 23 nt, Artificial Sequence
  Synthetic
ggccuuucucugcuuuccguucc

SEQ ID NO: 4898 - RNA, 21 nt, Artificial Sequence
  Synthetic
gauucagcggguacauguucc

SEQ ID NO: 4899 - RNA, 19 nt, Artificial Sequence
  Synthetic
gcauuugcgcaauuguucc

SEQ ID NO: 4900 - RNA, 21 nt, Artificial Sequence
  Synthetic
gagcauuugcgcaauuguucc

SEQ ID NO: 4901 - RNA, 23 nt, Artificial Sequence
  Synthetic
gagagcauuugcgcaauuguucc

SEQ ID NO: 4902 - RNA, 24 nt, Artificial Sequence
  Synthetic
ggagagcauuugcgcaauuguucc

SEQ ID NO: 4903 - RNA, 18 nt, Artificial Sequence
  Synthetic
gauauuuagcuccuuucc

SEQ ID NO: 4904 - RNA, 19 nt, Artificial Sequence
  Synthetic
ggauauuuagcuccuuucc

SEQ ID NO: 4905 - RNA, 18 nt, Artificial Sequence
  Synthetic
gccuaagucacaguuucc

SEQ ID NO: 4906 - RNA, 23 nt, Artificial Sequence
  Synthetic
gaaauuaugugaaauauguuucc

SEQ ID NO: 4907 - RNA, 18 nt, Artificial Sequence
  Synthetic
guucccuacaguguuucc

SEQ ID NO: 4908 - RNA, 21 nt, Artificial Sequence
  Synthetic
gcaaaaauuauauuuguuucc

SEQ ID NO: 4909 - RNA, 22 nt, Artificial Sequence
  Synthetic
ggcaaaaauuauauuuguuucc

SEQ ID NO: 4910 - RNA, 22 nt, Artificial Sequence
  Synthetic
guaauugaacauuuuuguuucc

SEQ ID NO: 4911 - RNA, 19 nt, Artificial Sequence
  Synthetic
gugacccaucucauuuucc

SEQ ID NO: 4912 - RNA, 20 nt, Artificial Sequence
  Synthetic
gcauacugauaagauuuucc

SEQ ID NO: 4913 - RNA, 20 nt, Artificial Sequence
  Synthetic
gccagauuuguagcuuuucc

SEQ ID NO: 4914 - RNA, 24 nt, Artificial Sequence
  Synthetic
gaaagccagauuuguagcuuuucc

SEQ ID NO: 4915 - RNA, 19 nt, Artificial Sequence
  Synthetic
gaucaugacuuaguuuucc

SEQ ID NO: 4916 - RNA, 24 nt, Artificial Sequence
  Synthetic
guacagaucaugacuuaguuuucc

SEQ ID NO: 4917 - RNA, 22 nt, Artificial Sequence
  Synthetic
gcuaacagaguuaaauuuuucc

SEQ ID NO: 4918 - RNA, 18 nt, Artificial Sequence
  Synthetic
gggaaguaggggaaaagc

SEQ ID NO: 4919 - RNA, 19 nt, Artificial Sequence
  Synthetic
ggggaaguaggggaaaagc

SEQ ID NO: 4920 - RNA, 20 nt, Artificial Sequence
  Synthetic
gggggaaguaggggaaaagc

SEQ ID NO: 4921 - RNA, 24 nt, Artificial Sequence
  Synthetic
gaaugggggaaguaggggaaaagc

SEQ ID NO: 4922 - RNA, 18 nt, Artificial Sequence
  Synthetic
guuaaaaugccccaaagc

SEQ ID NO: 4923 - RNA, 24 nt, Artificial Sequence
  Synthetic
gaaaaucauuuauucuuccaaagc

SEQ ID NO: 4924 - RNA, 20 nt, Artificial Sequence
  Synthetic
guaaagaagaugugcaaagc

SEQ ID NO: 4925 - RNA, 20 nt, Artificial Sequence
  Synthetic
gaaauaucccuagagaaagc

SEQ ID NO: 4926 - RNA, 24 nt, Artificial Sequence
  Synthetic
gauaacagcuuguugggagaaagc

SEQ ID NO: 4927 - RNA, 23 nt, Artificial Sequence
  Synthetic
gcuauuuuugugcaccauaaagc

SEQ ID NO: 4928 - RNA, 21 nt, Artificial Sequence
  Synthetic
guacgugcuuucuccuaaagc

SEQ ID NO: 4929 - RNA, 19 nt, Artificial Sequence
  Synthetic
gugacaagguagcuaaagc

SEQ ID NO: 4930 - RNA, 21 nt, Artificial Sequence
  Synthetic
gagugacaagguagcuaaagc

SEQ ID NO: 4931 - RNA, 21 nt, Artificial Sequence
  Synthetic
gcccuugccuauucaacaagc

SEQ ID NO: 4932 - RNA, 24 nt, Artificial Sequence
  Synthetic
gaagcccuugccuauucaacaagc

SEQ ID NO: 4933 - RNA, 22 nt, Artificial Sequence
  Synthetic
gccauuggacuggcagccaagc

SEQ ID NO: 4934 - RNA, 21 nt, Artificial Sequence
  Synthetic
gucucauucuggggcucaagc

SEQ ID NO: 4935 - RNA, 23 nt, Artificial Sequence
  Synthetic
gugucucauucuggggcucaagc

SEQ ID NO: 4936 - RNA, 18 nt, Artificial Sequence
  Synthetic
gcuucaaacaaaagaagc

SEQ ID NO: 4937 - RNA, 19 nt, Artificial Sequence
  Synthetic
ggcuucaaacaaaagaagc

SEQ ID NO: 4938 - RNA, 23 nt, Artificial Sequence
  Synthetic
gucuuuuuaggggauacagaagc

SEQ ID NO: 4939 - RNA, 20 nt, Artificial Sequence
  Synthetic
gcugagaccugaagagaagc

SEQ ID NO: 4940 - RNA, 19 nt, Artificial Sequence
  Synthetic
gucaguaaaucagagaagc

SEQ ID NO: 4941 - RNA, 20 nt, Artificial Sequence
  Synthetic
ggucaguaaaucagagaagc

SEQ ID NO: 4942 - RNA, 24 nt, Artificial Sequence
  Synthetic
gacaggucaguaaaucagagaagc

SEQ ID NO: 4943 - RNA, 18 nt, Artificial Sequence
  Synthetic
gcuuaacagaugagaagc

SEQ ID NO: 4944 - RNA, 21 nt, Artificial Sequence
  Synthetic
gaagcuuaacagaugagaagc

SEQ ID NO: 4945 - RNA, 23 nt, Artificial Sequence
  Synthetic
gagaagcuuaacagaugagaagc

SEQ ID NO: 4946 - RNA, 20 nt, Artificial Sequence
  Synthetic
gaaagcuaagacuuggaagc

SEQ ID NO: 4947 - RNA, 22 nt, Artificial Sequence
  Synthetic
gaucaggugauuauuaugaagc

SEQ ID NO: 4948 - RNA, 24 nt, Artificial Sequence
  Synthetic
gagaucaggugauuauuaugaagc

SEQ ID NO: 4949 - RNA, 18 nt, Artificial Sequence
  Synthetic
gucuaauugcacugaagc

SEQ ID NO: 4950 - RNA, 21 nt, Artificial Sequence
  Synthetic
guugucuaauugcacugaagc

SEQ ID NO: 4951 - RNA, 23 nt, Artificial Sequence
  Synthetic
gaguugucuaauugcacugaagc

SEQ ID NO: 4952 - RNA, 18 nt, Artificial Sequence
  Synthetic
gggcagaaaucuugaagc

SEQ ID NO: 4953 - RNA, 22 nt, Artificial Sequence
  Synthetic
gcaagggcagaaaucuugaagc

SEQ ID NO: 4954 - RNA, 23 nt, Artificial Sequence
  Synthetic
gaacuacuaaauggaaaauaagc

SEQ ID NO: 4955 - RNA, 21 nt, Artificial Sequence
  Synthetic
guaagucauaauuucauaagc

SEQ ID NO: 4956 - RNA, 24 nt, Artificial Sequence
  Synthetic
gcuguaagucauaauuucauaagc

SEQ ID NO: 4957 - RNA, 23 nt, Artificial Sequence
  Synthetic
guuuccuuaugauuuggcuaagc

SEQ ID NO: 4958 - RNA, 19 nt, Artificial Sequence
  Synthetic
gcuuauuaagagucuaagc

SEQ ID NO: 4959 - RNA, 21 nt, Artificial Sequence
  Synthetic
gcgcuuauuaagagucuaagc

SEQ ID NO: 4960 - RNA, 21 nt, Artificial Sequence
  Synthetic
gaaacuguaauuuuaguaagc

SEQ ID NO: 4961 - RNA, 19 nt, Artificial Sequence
  Synthetic
guucagggaguucuuaagc

SEQ ID NO: 4962 - RNA, 23 nt, Artificial Sequence
  Synthetic
gaccguucagggaguucuuaagc

SEQ ID NO: 4963 - RNA, 23 nt, Artificial Sequence
  Synthetic
gacuauggcuuacauaaaacagc

SEQ ID NO: 4964 - RNA, 24 nt, Artificial Sequence
  Synthetic
ggacuauggcuuacauaaaacagc

SEQ ID NO: 4965 - RNA, 19 nt, Artificial Sequence
  Synthetic
gaacuggaagaaucacagc

SEQ ID NO: 4966 - RNA, 24 nt, Artificial Sequence
  Synthetic
gaauauccuuuuguuuaugacagc

SEQ ID NO: 4967 - RNA, 18 nt, Artificial Sequence
  Synthetic
gucaaugguucugacagc

SEQ ID NO: 4968 - RNA, 21 nt, Artificial Sequence
  Synthetic
gucuuacaaaaugcacccagc

SEQ ID NO: 4969 - RNA, 18 nt, Artificial Sequence
  Synthetic
gacagacauaaucccagc

SEQ ID NO: 4970 - RNA, 24 nt, Artificial Sequence
  Synthetic
gaacaugacagacauaaucccagc

SEQ ID NO: 4971 - RNA, 20 nt, Artificial Sequence
  Synthetic
guuuguuuuggauauccagc

SEQ ID NO: 4972 - RNA, 22 nt, Artificial Sequence
  Synthetic
guguuuguuuuggauauccagc

SEQ ID NO: 4973 - RNA, 21 nt, Artificial Sequence
  Synthetic
gucuaaucuuaauacagcagc

SEQ ID NO: 4974 - RNA, 20 nt, Artificial Sequence
  Synthetic
gcaauugggauuugagcagc

SEQ ID NO: 4975 - RNA, 23 nt, Artificial Sequence
  Synthetic
guugcaauugggauuugagcagc

SEQ ID NO: 4976 - RNA, 24 nt, Artificial Sequence
  Synthetic
gguugcaauugggauuugagcagc

SEQ ID NO: 4977 - RNA, 19 nt, Artificial Sequence
  Synthetic
gacagcaugauguagcagc

SEQ ID NO: 4978 - RNA, 23 nt, Artificial Sequence
  Synthetic
gaaagacagcaugauguagcagc

SEQ ID NO: 4979 - RNA, 24 nt, Artificial Sequence
  Synthetic
ggaaagacagcaugauguagcagc

SEQ ID NO: 4980 - RNA, 22 nt, Artificial Sequence
  Synthetic
gcuuaucuagcauaagcgcagc

SEQ ID NO: 4981 - RNA, 23 nt, Artificial Sequence
  Synthetic
ggcuuaucuagcauaagcgcagc

SEQ ID NO: 4982 - RNA, 21 nt, Artificial Sequence
  Synthetic
gcuugguagauuagaggcagc

SEQ ID NO: 4983 - RNA, 22 nt, Artificial Sequence
  Synthetic
ggcuugguagauuagaggcagc

SEQ ID NO: 4984 - RNA, 19 nt, Artificial Sequence
  Synthetic
gaagucgucuggaggcagc

SEQ ID NO: 4985 - RNA, 18 nt, Artificial Sequence
  Synthetic
gaaugugcucuaggcagc

SEQ ID NO: 4986 - RNA, 19 nt, Artificial Sequence
  Synthetic
guacaugccuuccugcagc

SEQ ID NO: 4987 - RNA, 22 nt, Artificial Sequence
  Synthetic
guaguacaugccuuccugcagc

SEQ ID NO: 4988 - RNA, 23 nt, Artificial Sequence
  Synthetic
gcaucuagcaucacuuccucagc

SEQ ID NO: 4989 - RNA, 21 nt, Artificial Sequence
  Synthetic
guaaucagccuuucauucagc

SEQ ID NO: 4990 - RNA, 20 nt, Artificial Sequence
  Synthetic
gccuuucaugaauuuucagc

SEQ ID NO: 4991 - RNA, 21 nt, Artificial Sequence
  Synthetic
ggggcucuggagucaaagagc

SEQ ID NO: 4992 - RNA, 24 nt, Artificial Sequence
  Synthetic
gcaggggcucuggagucaaagagc

SEQ ID NO: 4993 - RNA, 21 nt, Artificial Sequence
  Synthetic
gaaagugaaguugcuaagagc

SEQ ID NO: 4994 - RNA, 23 nt, Artificial Sequence
  Synthetic
gagaaagugaaguugcuaagagc

SEQ ID NO: 4995 - RNA, 19 nt, Artificial Sequence
  Synthetic
gauucuauagcuacagagc

SEQ ID NO: 4996 - RNA, 22 nt, Artificial Sequence
  Synthetic
gaagauucuauagcuacagagc

SEQ ID NO: 4997 - RNA, 23 nt, Artificial Sequence
  Synthetic
ggaagauucuauagcuacagagc

SEQ ID NO: 4998 - RNA, 23 nt, Artificial Sequence
  Synthetic
gauugugcagugacgcccagagc

SEQ ID NO: 4999 - RNA, 18 nt, Artificial Sequence
  Synthetic
ggaaagaaccagcagagc

SEQ ID NO: 5000 - RNA, 20 nt, Artificial Sequence
  Synthetic
gaggaaagaaccagcagagc

SEQ ID NO: 5001 - RNA, 21 nt, Artificial Sequence
  Synthetic
ggaggaaagaaccagcagagc

SEQ ID NO: 5002 - RNA, 23 nt, Artificial Sequence
  Synthetic
gaggaggaaagaaccagcagagc

SEQ ID NO: 5003 - RNA, 18 nt, Artificial Sequence
  Synthetic
gaauucacuuuggagagc

SEQ ID NO: 5004 - RNA, 18 nt, Artificial Sequence
  Synthetic
gaauucuggucugagagc

SEQ ID NO: 5005 - RNA, 24 nt, Artificial Sequence
  Synthetic
gacacagaauucuggucugagagc

SEQ ID NO: 5006 - RNA, 19 nt, Artificial Sequence
  Synthetic
gcuuuuaacacuauagagc

SEQ ID NO: 5007 - RNA, 20 nt, Artificial Sequence
  Synthetic
ggcuuuuaacacuauagagc

SEQ ID NO: 5008 - RNA, 19 nt, Artificial Sequence
  Synthetic
guuaugacaaaaaaggagc

SEQ ID NO: 5009 - RNA, 21 nt, Artificial Sequence
  Synthetic
gacugugauaaaagaaggagc

SEQ ID NO: 5010 - RNA, 22 nt, Artificial Sequence
  Synthetic
ggacugugauaaaagaaggagc

SEQ ID NO: 5011 - RNA, 19 nt, Artificial Sequence
  Synthetic
guuuaauagcuagaggagc

SEQ ID NO: 5012 - RNA, 20 nt, Artificial Sequence
  Synthetic
gguuuaauagcuagaggagc

SEQ ID NO: 5013 - RNA, 18 nt, Artificial Sequence
  Synthetic
guuguuagccugaggagc

SEQ ID NO: 5014 - RNA, 20 nt, Artificial Sequence
  Synthetic
gaguuguuagccugaggagc

SEQ ID NO: 5015 - RNA, 23 nt, Artificial Sequence
  Synthetic
gaugaguuguuagccugaggagc

SEQ ID NO: 5016 - RNA, 24 nt, Artificial Sequence
  Synthetic
ggaugaguuguuagccugaggagc

SEQ ID NO: 5017 - RNA, 18 nt, Artificial Sequence
  Synthetic
gcaccaagcugagggagc

SEQ ID NO: 5018 - RNA, 18 nt, Artificial Sequence
  Synthetic
gauucucugguauggagc

SEQ ID NO: 5019 - RNA, 24 nt, Artificial Sequence
  Synthetic
gaauuagauucucugguauggagc

SEQ ID NO: 5020 - RNA, 19 nt, Artificial Sequence
  Synthetic
gugacagggacacuggagc

SEQ ID NO: 5021 - RNA, 23 nt, Artificial Sequence
  Synthetic
gaaauugagacauaagguggagc

SEQ ID NO: 5022 - RNA, 23 nt, Artificial Sequence
  Synthetic
gcuuuagcaaaugguaaaugagc

SEQ ID NO: 5023 - RNA, 19 nt, Artificial Sequence
  Synthetic
gucuuucucucuccugagc

SEQ ID NO: 5024 - RNA, 20 nt, Artificial Sequence
  Synthetic
ggucuuucucucuccugagc

SEQ ID NO: 5025 - RNA, 22 nt, Artificial Sequence
  Synthetic
gaggucuuucucucuccugagc

SEQ ID NO: 5026 - RNA, 24 nt, Artificial Sequence
  Synthetic
gaaauaauauuuggguuauugagc

SEQ ID NO: 5027 - RNA, 19 nt, Artificial Sequence
  Synthetic
gcauuuaaaggccuugagc

SEQ ID NO: 5028 - RNA, 19 nt, Artificial Sequence
  Synthetic
gaccuagccaacaaauagc

SEQ ID NO: 5029 - RNA, 24 nt, Artificial Sequence
  Synthetic
gacuugaccuagccaacaaauagc

SEQ ID NO: 5030 - RNA, 20 nt, Artificial Sequence
  Synthetic
gucucuuuguuagucauagc

SEQ ID NO: 5031 - RNA, 24 nt, Artificial Sequence
  Synthetic
gccagucucuuuguuagucauagc

SEQ ID NO: 5032 - RNA, 18 nt, Artificial Sequence
  Synthetic
gagucucccuggacuagc

SEQ ID NO: 5033 - RNA, 21 nt, Artificial Sequence
  Synthetic
gcagagucucccuggacuagc

SEQ ID NO: 5034 - RNA, 23 nt, Artificial Sequence
  Synthetic
gcaaaaagaauuccaguacuagc

SEQ ID NO: 5035 - RNA, 24 nt, Artificial Sequence
  Synthetic
ggcaaaaagaauuccaguacuagc

SEQ ID NO: 5036 - RNA, 21 nt, Artificial Sequence
  Synthetic
guuacaacaccagaugcuagc

SEQ ID NO: 5037 - RNA, 24 nt, Artificial Sequence
  Synthetic
guaguuacaacaccagaugcuagc

SEQ ID NO: 5038 - RNA, 18 nt, Artificial Sequence
  Synthetic
gaugcguuuauugcuagc

SEQ ID NO: 5039 - RNA, 18 nt, Artificial Sequence
  Synthetic
guuugugugggcucuagc

SEQ ID NO: 5040 - RNA, 21 nt, Artificial Sequence
  Synthetic
gcaguuugugugggcucuagc

SEQ ID NO: 5041 - RNA, 19 nt, Artificial Sequence
  Synthetic
gucuucacauguuucuagc

SEQ ID NO: 5042 - RNA, 20 nt, Artificial Sequence
  Synthetic
ggucuucacauguuucuagc

SEQ ID NO: 5043 - RNA, 19 nt, Artificial Sequence
  Synthetic
gaaacaucugaagauuagc

SEQ ID NO: 5044 - RNA, 20 nt, Artificial Sequence
  Synthetic
ggaaacaucugaagauuagc

SEQ ID NO: 5045 - RNA, 24 nt, Artificial Sequence
  Synthetic
gaauacaugacuuacagacuuagc

SEQ ID NO: 5046 - RNA, 21 nt, Artificial Sequence
  Synthetic
guuaucagcacaugucuuagc

SEQ ID NO: 5047 - RNA, 22 nt, Artificial Sequence
  Synthetic
gguuaucagcacaugucuuagc

SEQ ID NO: 5048 - RNA, 22 nt, Artificial Sequence
  Synthetic
gcuuuaaauuuaaaaaguuagc

SEQ ID NO: 5049 - RNA, 24 nt, Artificial Sequence
  Synthetic
gugcuuuaaauuuaaaaaguuagc

SEQ ID NO: 5050 - RNA, 18 nt, Artificial Sequence
  Synthetic
gggaagcaguauuuuagc

SEQ ID NO: 5051 - RNA, 24 nt, Artificial Sequence
  Synthetic
gaaaaagggaagcaguauuuuagc

SEQ ID NO: 5052 - RNA, 23 nt, Artificial Sequence
  Synthetic
gauaauaugauacauuauaacgc

SEQ ID NO: 5053 - RNA, 18 nt, Artificial Sequence
  Synthetic
gccacuaagcgaucacgc

SEQ ID NO: 5054 - RNA, 21 nt, Artificial Sequence
  Synthetic
gaaauaauacuagagauacgc

SEQ ID NO: 5055 - RNA, 23 nt, Artificial Sequence
  Synthetic
gauuaucugcccaugacuggcgc

SEQ ID NO: 5056 - RNA, 20 nt, Artificial Sequence
  Synthetic
gcccuuuuuccaccuggcgc

SEQ ID NO: 5057 - RNA, 23 nt, Artificial Sequence
  Synthetic
guuucucaccaaaauuuuggcgc

SEQ ID NO: 5058 - RNA, 19 nt, Artificial Sequence
  Synthetic
gugcaugggcacuucucgc

SEQ ID NO: 5059 - RNA, 21 nt, Artificial Sequence
  Synthetic
gauuucguuucacuuuuucgc

SEQ ID NO: 5060 - RNA, 23 nt, Artificial Sequence
  Synthetic
gagauuucguuucacuuuuucgc

SEQ ID NO: 5061 - RNA, 24 nt, Artificial Sequence
  Synthetic
ggagauuucguuucacuuuuucgc

SEQ ID NO: 5062 - RNA, 18 nt, Artificial Sequence
  Synthetic
guugacaaaugaaaaggc

SEQ ID NO: 5063 - RNA, 21 nt, Artificial Sequence
  Synthetic
gcuguugacaaaugaaaaggc

SEQ ID NO: 5064 - RNA, 24 nt, Artificial Sequence
  Synthetic
gaugcuguugacaaaugaaaaggc

SEQ ID NO: 5065 - RNA, 21 nt, Artificial Sequence
  Synthetic
gagaagggacuacacaaaggc

SEQ ID NO: 5066 - RNA, 24 nt, Artificial Sequence
  Synthetic
gacuucauguaauuaauuaaaggc

SEQ ID NO: 5067 - RNA, 20 nt, Artificial Sequence
  Synthetic
gcaggcacuuaagggaaggc

SEQ ID NO: 5068 - RNA, 18 nt, Artificial Sequence
  Synthetic
gaaugcaguaaugaaggc

SEQ ID NO: 5069 - RNA, 20 nt, Artificial Sequence
  Synthetic
gugaaugcaguaaugaaggc

SEQ ID NO: 5070 - RNA, 21 nt, Artificial Sequence
  Synthetic
gacaggugaauucaugaaggc

SEQ ID NO: 5071 - RNA, 24 nt, Artificial Sequence
  Synthetic
guucucuguggaaacauaacaggc

SEQ ID NO: 5072 - RNA, 18 nt, Artificial Sequence
  Synthetic
gccaaugacuucacaggc

SEQ ID NO: 5073 - RNA, 19 nt, Artificial Sequence
  Synthetic
ggccaaugacuucacaggc

SEQ ID NO: 5074 - RNA, 19 nt, Artificial Sequence
  Synthetic
gcacaccuaugugccaggc

SEQ ID NO: 5075 - RNA, 20 nt, Artificial Sequence
  Synthetic
ggcacaccuaugugccaggc

SEQ ID NO: 5076 - RNA, 21 nt, Artificial Sequence
  Synthetic
guacgaacuccuuuggcaggc

SEQ ID NO: 5077 - RNA, 23 nt, Artificial Sequence
  Synthetic
guuucucaguuaauguugcaggc

SEQ ID NO: 5078 - RNA, 24 nt, Artificial Sequence
  Synthetic
gguuucucaguuaauguugcaggc

SEQ ID NO: 5079 - RNA, 18 nt, Artificial Sequence
  Synthetic
ggaaaaaacacaucaggc

SEQ ID NO: 5080 - RNA, 20 nt, Artificial Sequence
  Synthetic
gaauuuuacagggaucaggc

SEQ ID NO: 5081 - RNA, 22 nt, Artificial Sequence
  Synthetic
gccuagagaauuuucaagaggc

SEQ ID NO: 5082 - RNA, 23 nt, Artificial Sequence
  Synthetic
ggccuagagaauuuucaagaggc

SEQ ID NO: 5083 - RNA, 24 nt, Artificial Sequence
  Synthetic
gggccuagagaauuuucaagaggc

SEQ ID NO: 5084 - RNA, 21 nt, Artificial Sequence
  Synthetic
gacauugcauuagagagaggc

SEQ ID NO: 5085 - RNA, 18 nt, Artificial Sequence
  Synthetic
guggugguuaagauaggc

SEQ ID NO: 5086 - RNA, 20 nt, Artificial Sequence
  Synthetic
gaguggugguuaagauaggc

SEQ ID NO: 5087 - RNA, 21 nt, Artificial Sequence
  Synthetic
ggaguggugguuaagauaggc

SEQ ID NO: 5088 - RNA, 22 nt, Artificial Sequence
  Synthetic
gggaguggugguuaagauaggc

SEQ ID NO: 5089 - RNA, 18 nt, Artificial Sequence
  Synthetic
guaugcuagguacuaggc

SEQ ID NO: 5090 - RNA, 20 nt, Artificial Sequence
  Synthetic
gaaugagaauucuccuaggc

SEQ ID NO: 5091 - RNA, 24 nt, Artificial Sequence
  Synthetic
gaaugaaugagaauucuccuaggc

SEQ ID NO: 5092 - RNA, 18 nt, Artificial Sequence
  Synthetic
ggcacgcacucuguaggc

SEQ ID NO: 5093 - RNA, 20 nt, Artificial Sequence
  Synthetic
guacagcgagggaauuaggc

SEQ ID NO: 5094 - RNA, 22 nt, Artificial Sequence
  Synthetic
gaguacagcgagggaauuaggc

SEQ ID NO: 5095 - RNA, 24 nt, Artificial Sequence
  Synthetic
gauuuucacuuuuacaguuuaggc

SEQ ID NO: 5096 - RNA, 22 nt, Artificial Sequence
  Synthetic
gcuuugcugccgcuggcucggc

SEQ ID NO: 5097 - RNA, 23 nt, Artificial Sequence
  Synthetic
ggcuuugcugccgcuggcucggc

SEQ ID NO: 5098 - RNA, 24 nt, Artificial Sequence
  Synthetic
gggcuuugcugccgcuggcucggc

SEQ ID NO: 5099 - RNA, 19 nt, Artificial Sequence
  Synthetic
gaguuacuuagcaaagggc

SEQ ID NO: 5100 - RNA, 23 nt, Artificial Sequence
  Synthetic
gcacacuagguguuggccagggc

SEQ ID NO: 5101 - RNA, 19 nt, Artificial Sequence
  Synthetic
gauaaaaagcagggagggc

SEQ ID NO: 5102 - RNA, 21 nt, Artificial Sequence
  Synthetic
gugauaaaaagcagggagggc

SEQ ID NO: 5103 - RNA, 22 nt, Artificial Sequence
  Synthetic
ggugauaaaaagcagggagggc

SEQ ID NO: 5104 - RNA, 23 nt, Artificial Sequence
  Synthetic
gggugauaaaaagcagggagggc

SEQ ID NO: 5105 - RNA, 18 nt, Artificial Sequence
  Synthetic
gaucacuaacuguagggc

SEQ ID NO: 5106 - RNA, 18 nt, Artificial Sequence
  Synthetic
ggcagcaaaucuuagggc

SEQ ID NO: 5107 - RNA, 22 nt, Artificial Sequence
  Synthetic
gaaaggcagcaaaucuuagggc

SEQ ID NO: 5108 - RNA, 23 nt, Artificial Sequence
  Synthetic
guuaacaaauggugaauccgggc

SEQ ID NO: 5109 - RNA, 21 nt, Artificial Sequence
  Synthetic
gggaagagauaaggaaggggc

SEQ ID NO: 5110 - RNA, 22 nt, Artificial Sequence
  Synthetic
ggggaagagauaaggaaggggc

SEQ ID NO: 5111 - RNA, 20 nt, Artificial Sequence
  Synthetic
gcagaagaggguuagggggc

SEQ ID NO: 5112 - RNA, 24 nt, Artificial Sequence
  Synthetic
gacagcagaagaggguuagggggc

SEQ ID NO: 5113 - RNA, 18 nt, Artificial Sequence
  Synthetic
gguugucacauugggggc

SEQ ID NO: 5114 - RNA, 23 nt, Artificial Sequence
  Synthetic
guaaaaguuucgggaagaugggc

SEQ ID NO: 5115 - RNA, 20 nt, Artificial Sequence
  Synthetic
guacugggaaacuacugggc

SEQ ID NO: 5116 - RNA, 19 nt, Artificial Sequence
  Synthetic
guuuagguugccucugggc

SEQ ID NO: 5117 - RNA, 21 nt, Artificial Sequence
  Synthetic
gaguuuagguugccucugggc

SEQ ID NO: 5118 - RNA, 24 nt, Artificial Sequence
  Synthetic
gacauugaaaagguauguuugggc

SEQ ID NO: 5119 - RNA, 18 nt, Artificial Sequence
  Synthetic
gcucaaaacaacaauggc

SEQ ID NO: 5120 - RNA, 20 nt, Artificial Sequence
  Synthetic
gagcucaaaacaacaauggc

SEQ ID NO: 5121 - RNA, 22 nt, Artificial Sequence
  Synthetic
gugagcucaaaacaacaauggc

SEQ ID NO: 5122 - RNA, 24 nt, Artificial Sequence
  Synthetic
gagugagcucaaaacaacaauggc

SEQ ID NO: 5123 - RNA, 21 nt, Artificial Sequence
  Synthetic
gcauaaaaaaaugggcauggc

SEQ ID NO: 5124 - RNA, 22 nt, Artificial Sequence
  Synthetic
ggcauaaaaaaaugggcauggc

SEQ ID NO: 5125 - RNA, 24 nt, Artificial Sequence
  Synthetic
guggcauaaaaaaaugggcauggc

SEQ ID NO: 5126 - RNA, 23 nt, Artificial Sequence
  Synthetic
guaaccauuauuuuucucauggc

SEQ ID NO: 5127 - RNA, 19 nt, Artificial Sequence
  Synthetic
gaguagcgguugauauggc

SEQ ID NO: 5128 - RNA, 18 nt, Artificial Sequence
  Synthetic
gcucugaaacugacuggc

SEQ ID NO: 5129 - RNA, 22 nt, Artificial Sequence
  Synthetic
gacugcucugaaacugacuggc

SEQ ID NO: 5130 - RNA, 19 nt, Artificial Sequence
  Synthetic
guacaaaauauuuacuggc

SEQ ID NO: 5131 - RNA, 22 nt, Artificial Sequence
  Synthetic
gauguacaaaauauuuacuggc

SEQ ID NO: 5132 - RNA, 23 nt, Artificial Sequence
  Synthetic
ggauguacaaaauauuuacuggc

SEQ ID NO: 5133 - RNA, 23 nt, Artificial Sequence
  Synthetic
guccauuacacagguuaucuggc

SEQ ID NO: 5134 - RNA, 24 nt, Artificial Sequence
  Synthetic
gguccauuacacagguuaucuggc

SEQ ID NO: 5135 - RNA, 18 nt, Artificial Sequence
  Synthetic
gaugggugcugaaguggc

SEQ ID NO: 5136 - RNA, 21 nt, Artificial Sequence
  Synthetic
gcugaugggugcugaaguggc

SEQ ID NO: 5137 - RNA, 22 nt, Artificial Sequence
  Synthetic
ggcugaugggugcugaaguggc

SEQ ID NO: 5138 - RNA, 24 nt, Artificial Sequence
  Synthetic
gauuuucaugaauuggagaguggc

SEQ ID NO: 5139 - RNA, 22 nt, Artificial Sequence
  Synthetic
gcaacuuggucaucauaguggc

SEQ ID NO: 5140 - RNA, 19 nt, Artificial Sequence
  Synthetic
gucaagagaugacuguggc

SEQ ID NO: 5141 - RNA, 18 nt, Artificial Sequence
  Synthetic
gguuaucugcaguguggc

SEQ ID NO: 5142 - RNA, 21 nt, Artificial Sequence
  Synthetic
gcugguuaucugcaguguggc

SEQ ID NO: 5143 - RNA, 22 nt, Artificial Sequence
  Synthetic
ggcugguuaucugcaguguggc

SEQ ID NO: 5144 - RNA, 23 nt, Artificial Sequence
  Synthetic
gggcugguuaucugcaguguggc

SEQ ID NO: 5145 - RNA, 24 nt, Artificial Sequence
  Synthetic
ggggcugguuaucugcaguguggc

SEQ ID NO: 5146 - RNA, 20 nt, Artificial Sequence
  Synthetic
gaaauacuuccaaaauuggc

SEQ ID NO: 5147 - RNA, 21 nt, Artificial Sequence
  Synthetic
guacccuuuccccccauuggc

SEQ ID NO: 5148 - RNA, 22 nt, Artificial Sequence
  Synthetic
gcuuccuagccauccgauuggc

SEQ ID NO: 5149 - RNA, 19 nt, Artificial Sequence
  Synthetic
gaaucugaaggaacuuggc

SEQ ID NO: 5150 - RNA, 21 nt, Artificial Sequence
  Synthetic
gagaaucugaaggaacuuggc

SEQ ID NO: 5151 - RNA, 23 nt, Artificial Sequence
  Synthetic
gugagaaucugaaggaacuuggc

SEQ ID NO: 5152 - RNA, 19 nt, Artificial Sequence
  Synthetic
guaucuaugaagacuuggc

SEQ ID NO: 5153 - RNA, 18 nt, Artificial Sequence
  Synthetic
gcugccuuauaaguuggc

SEQ ID NO: 5154 - RNA, 23 nt, Artificial Sequence
  Synthetic
gauaauauugugaguaaguuggc

SEQ ID NO: 5155 - RNA, 19 nt, Artificial Sequence
  Synthetic
gaacauuuuuuagguuggc

SEQ ID NO: 5156 - RNA, 20 nt, Artificial Sequence
  Synthetic
ggaacauuuuuuagguuggc

SEQ ID NO: 5157 - RNA, 21 nt, Artificial Sequence
  Synthetic
gggaacauuuuuuagguuggc

SEQ ID NO: 5158 - RNA, 23 nt, Artificial Sequence
  Synthetic
gagggaacauuuuuuagguuggc

SEQ ID NO: 5159 - RNA, 24 nt, Artificial Sequence
  Synthetic
ggagggaacauuuuuuagguuggc

SEQ ID NO: 5160 - RNA, 19 nt, Artificial Sequence
  Synthetic
gcuaaauguuuacuuuggc

SEQ ID NO: 5161 - RNA, 19 nt, Artificial Sequence
  Synthetic
gaauuugagaugguuuggc

SEQ ID NO: 5162 - RNA, 20 nt, Artificial Sequence
  Synthetic
gcaugucaaacauguuuggc

SEQ ID NO: 5163 - RNA, 23 nt, Artificial Sequence
  Synthetic
gaugcaugucaaacauguuuggc

SEQ ID NO: 5164 - RNA, 20 nt, Artificial Sequence
  Synthetic
guugauaggggcaaaaaugc

SEQ ID NO: 5165 - RNA, 22 nt, Artificial Sequence
  Synthetic
gaaugaauuauuuuaaaaaugc

SEQ ID NO: 5166 - RNA, 18 nt, Artificial Sequence
  Synthetic
gugauaacauccaaaugc

SEQ ID NO: 5167 - RNA, 24 nt, Artificial Sequence
  Synthetic
gcaccagugauaacauccaaaugc

SEQ ID NO: 5168 - RNA, 18 nt, Artificial Sequence
  Synthetic
ggggucaauuuccaaugc

SEQ ID NO: 5169 - RNA, 24 nt, Artificial Sequence
  Synthetic
gcccaaggggucaauuuccaaugc

SEQ ID NO: 5170 - RNA, 21 nt, Artificial Sequence
  Synthetic
gacucagucugauggcaaugc

SEQ ID NO: 5171 - RNA, 24 nt, Artificial Sequence
  Synthetic
gaagacucagucugauggcaaugc

SEQ ID NO: 5172 - RNA, 19 nt, Artificial Sequence
  Synthetic
gcugugcauggaagaaugc

SEQ ID NO: 5173 - RNA, 18 nt, Artificial Sequence
  Synthetic
ggagaggcagccgaaugc

SEQ ID NO: 5174 - RNA, 19 nt, Artificial Sequence
  Synthetic
gaaaagcacuuuggaaugc

SEQ ID NO: 5175 - RNA, 23 nt, Artificial Sequence
  Synthetic
gacuccaaggaacauuugaaugc

SEQ ID NO: 5176 - RNA, 24 nt, Artificial Sequence
  Synthetic
guucaccucccuccguaguaaugc

SEQ ID NO: 5177 - RNA, 20 nt, Artificial Sequence
  Synthetic
guagcccagguaauuaaugc

SEQ ID NO: 5178 - RNA, 23 nt, Artificial Sequence
  Synthetic
gaaguagcccagguaauuaaugc

SEQ ID NO: 5179 - RNA, 22 nt, Artificial Sequence
  Synthetic
gcacugaguauaacacacaugc

SEQ ID NO: 5180 - RNA, 23 nt, Artificial Sequence
  Synthetic
ggcacugaguauaacacacaugc

SEQ ID NO: 5181 - RNA, 24 nt, Artificial Sequence
  Synthetic
gggcacugaguauaacacacaugc

SEQ ID NO: 5182 - RNA, 24 nt, Artificial Sequence
  Synthetic
guuaauaaaauaaagcugacaugc

SEQ ID NO: 5183 - RNA, 23 nt, Artificial Sequence
  Synthetic
guuuaaguccucauuagccaugc

SEQ ID NO: 5184 - RNA, 18 nt, Artificial Sequence
  Synthetic
gaagcaucgauagcaugc

SEQ ID NO: 5185 - RNA, 21 nt, Artificial Sequence
  Synthetic
gcugaagcaucgauagcaugc

SEQ ID NO: 5186 - RNA, 23 nt, Artificial Sequence
  Synthetic
guaaaauaagagauggcucaugc

SEQ ID NO: 5187 - RNA, 24 nt, Artificial Sequence
  Synthetic
gguaaaauaagagauggcucaugc

SEQ ID NO: 5188 - RNA, 20 nt, Artificial Sequence
  Synthetic
gaauuauuuugcugucaugc

SEQ ID NO: 5189 - RNA, 18 nt, Artificial Sequence
  Synthetic
gaaauagucaauucaugc

SEQ ID NO: 5190 - RNA, 19 nt, Artificial Sequence
  Synthetic
ggaaauagucaauucaugc

SEQ ID NO: 5191 - RNA, 22 nt, Artificial Sequence
  Synthetic
guuggaaauagucaauucaugc

SEQ ID NO: 5192 - RNA, 23 nt, Artificial Sequence
  Synthetic
guucuagagugcugguuucaugc

SEQ ID NO: 5193 - RNA, 24 nt, Artificial Sequence
  Synthetic
gacuaauccauggaugaaagaugc

SEQ ID NO: 5194 - RNA, 18 nt, Artificial Sequence
  Synthetic
ggcuaaaaauauggaugc

SEQ ID NO: 5195 - RNA, 23 nt, Artificial Sequence
  Synthetic
guuuaggcuaaaaauauggaugc

SEQ ID NO: 5196 - RNA, 18 nt, Artificial Sequence
  Synthetic
gguaucaccuauggaugc

SEQ ID NO: 5197 - RNA, 23 nt, Artificial Sequence
  Synthetic
gaauagguaucaccuauggaugc

SEQ ID NO: 5198 - RNA, 24 nt, Artificial Sequence
  Synthetic
ggaauagguaucaccuauggaugc

SEQ ID NO: 5199 - RNA, 22 nt, Artificial Sequence
  Synthetic
gaaauaaaguaauaaaugaugc

SEQ ID NO: 5200 - RNA, 21 nt, Artificial Sequence
  Synthetic
gcauuuccuugcuaaugaugc

SEQ ID NO: 5201 - RNA, 23 nt, Artificial Sequence
  Synthetic
gaucuagacuuacuugaugaugc

SEQ ID NO: 5202 - RNA, 18 nt, Artificial Sequence
  Synthetic
gucaucagaauaugaugc

SEQ ID NO: 5203 - RNA, 20 nt, Artificial Sequence
  Synthetic
gugucaucagaauaugaugc

SEQ ID NO: 5204 - RNA, 24 nt, Artificial Sequence
  Synthetic
gcaagugucaucagaauaugaugc

SEQ ID NO: 5205 - RNA, 21 nt, Artificial Sequence
  Synthetic
gacuuggggagauggugaugc

SEQ ID NO: 5206 - RNA, 21 nt, Artificial Sequence
  Synthetic
gcuuaaaaauaaaguugaugc

SEQ ID NO: 5207 - RNA, 22 nt, Artificial Sequence
  Synthetic
ggcuuaaaaauaaaguugaugc

SEQ ID NO: 5208 - RNA, 24 nt, Artificial Sequence
  Synthetic
gcauuuucuuauuaauuaauaugc

SEQ ID NO: 5209 - RNA, 23 nt, Artificial Sequence
  Synthetic
gauuuuauuccugacagauaugc

SEQ ID NO: 5210 - RNA, 20 nt, Artificial Sequence
  Synthetic
gaagaauuucccacuuaugc

SEQ ID NO: 5211 - RNA, 18 nt, Artificial Sequence
  Synthetic
ggugguuaccucuuaugc

SEQ ID NO: 5212 - RNA, 21 nt, Artificial Sequence
  Synthetic
gaaggugguuaccucuuaugc

SEQ ID NO: 5213 - RNA, 21 nt, Artificial Sequence
  Synthetic
guucuaauacauuguuuaugc

SEQ ID NO: 5214 - RNA, 23 nt, Artificial Sequence
  Synthetic
guguucuaauacauuguuuaugc

SEQ ID NO: 5215 - RNA, 19 nt, Artificial Sequence
  Synthetic
gaccucacagaaccacugc

SEQ ID NO: 5216 - RNA, 20 nt, Artificial Sequence
  Synthetic
ggaccucacagaaccacugc

SEQ ID NO: 5217 - RNA, 19 nt, Artificial Sequence
  Synthetic
gugaagcuaucuuuacugc

SEQ ID NO: 5218 - RNA, 22 nt, Artificial Sequence
  Synthetic
gaugugaagcuaucuuuacugc

SEQ ID NO: 5219 - RNA, 18 nt, Artificial Sequence
  Synthetic
gcaggaguaugggccugc

SEQ ID NO: 5220 - RNA, 24 nt, Artificial Sequence
  Synthetic
guuucagcaggaguaugggccugc

SEQ ID NO: 5221 - RNA, 24 nt, Artificial Sequence
  Synthetic
guacuuccaaaccuggcugccugc

SEQ ID NO: 5222 - RNA, 21 nt, Artificial Sequence
  Synthetic
gccaaacgcaguucuagcugc

SEQ ID NO: 5223 - RNA, 23 nt, Artificial Sequence
  Synthetic
gugccaaacgcaguucuagcugc

SEQ ID NO: 5224 - RNA, 19 nt, Artificial Sequence
  Synthetic
gcagaaaauuuaaggcugc

SEQ ID NO: 5225 - RNA, 20 nt, Artificial Sequence
  Synthetic
ggcagaaaauuuaaggcugc

SEQ ID NO: 5226 - RNA, 22 nt, Artificial Sequence
  Synthetic
guggcagaaaauuuaaggcugc

SEQ ID NO: 5227 - RNA, 18 nt, Artificial Sequence
  Synthetic
gcaugcccaguaugcugc

SEQ ID NO: 5228 - RNA, 19 nt, Artificial Sequence
  Synthetic
gcccauccauucuugcugc

SEQ ID NO: 5229 - RNA, 22 nt, Artificial Sequence
  Synthetic
gcagcccauccauucuugcugc

SEQ ID NO: 5230 - RNA, 24 nt, Artificial Sequence
  Synthetic
gagcagcccauccauucuugcugc

SEQ ID NO: 5231 - RNA, 21 nt, Artificial Sequence
  Synthetic
gaaugcggauuuuaaaucugc

SEQ ID NO: 5232 - RNA, 18 nt, Artificial Sequence
  Synthetic
ggcuguuuaaaucucugc

SEQ ID NO: 5233 - RNA, 19 nt, Artificial Sequence
  Synthetic
gggcuguuuaaaucucugc

SEQ ID NO: 5234 - RNA, 21 nt, Artificial Sequence
  Synthetic
gagggcuguuuaaaucucugc

SEQ ID NO: 5235 - RNA, 23 nt, Artificial Sequence
  Synthetic
gugagggcuguuuaaaucucugc

SEQ ID NO: 5236 - RNA, 18 nt, Artificial Sequence
  Synthetic
gaccaaacuucguucugc

SEQ ID NO: 5237 - RNA, 18 nt, Artificial Sequence
  Synthetic
guacugcagccuuucugc

SEQ ID NO: 5238 - RNA, 19 nt, Artificial Sequence
  Synthetic
gguacugcagccuuucugc

SEQ ID NO: 5239 - RNA, 24 nt, Artificial Sequence
  Synthetic
gaaaugguacugcagccuuucugc

SEQ ID NO: 5240 - RNA, 22 nt, Artificial Sequence
  Synthetic
gaaauacccuuugccuuucugc

SEQ ID NO: 5241 - RNA, 23 nt, Artificial Sequence
  Synthetic
ggaaauacccuuugccuuucugc

SEQ ID NO: 5242 - RNA, 19 nt, Artificial Sequence
  Synthetic
gaggcauuucuguuucugc

SEQ ID NO: 5243 - RNA, 19 nt, Artificial Sequence
  Synthetic
gauguuuaucugugagugc

SEQ ID NO: 5244 - RNA, 23 nt, Artificial Sequence
  Synthetic
gcaagauguuuaucugugagugc

SEQ ID NO: 5245 - RNA, 24 nt, Artificial Sequence
  Synthetic
ggcaagauguuuaucugugagugc

SEQ ID NO: 5246 - RNA, 20 nt, Artificial Sequence
  Synthetic
gaagggcuuucaaauagugc

SEQ ID NO: 5247 - RNA, 20 nt, Artificial Sequence
  Synthetic
guuuagucaagucuuagugc

SEQ ID NO: 5248 - RNA, 22 nt, Artificial Sequence
  Synthetic
gaguuuagucaagucuuagugc

SEQ ID NO: 5249 - RNA, 22 nt, Artificial Sequence
  Synthetic
gacuauaggauauggaaggugc

SEQ ID NO: 5250 - RNA, 24 nt, Artificial Sequence
  Synthetic
gugacuauaggauauggaaggugc

SEQ ID NO: 5251 - RNA, 18 nt, Artificial Sequence
  Synthetic
gcagaagacuuacggugc

SEQ ID NO: 5252 - RNA, 19 nt, Artificial Sequence
  Synthetic
ggcagaagacuuacggugc

SEQ ID NO: 5253 - RNA, 19 nt, Artificial Sequence
  Synthetic
gucuuucacaaccuggugc

SEQ ID NO: 5254 - RNA, 18 nt, Artificial Sequence
  Synthetic
guaauaaaucuguggugc

SEQ ID NO: 5255 - RNA, 19 nt, Artificial Sequence
  Synthetic
gguaauaaaucuguggugc

SEQ ID NO: 5256 - RNA, 24 nt, Artificial Sequence
  Synthetic
gacaugguaauaaaucuguggugc

SEQ ID NO: 5257 - RNA, 21 nt, Artificial Sequence
  Synthetic
gcucacacaugaaguaugugc

SEQ ID NO: 5258 - RNA, 23 nt, Artificial Sequence
  Synthetic
guuacaucuguuucuaauugugc

SEQ ID NO: 5259 - RNA, 24 nt, Artificial Sequence
  Synthetic
gacaauagagucuauuaaaauugc

SEQ ID NO: 5260 - RNA, 18 nt, Artificial Sequence
  Synthetic
guaugacaucacaauugc

SEQ ID NO: 5261 - RNA, 21 nt, Artificial Sequence
  Synthetic
guuguaugacaucacaauugc

SEQ ID NO: 5262 - RNA, 22 nt, Artificial Sequence
  Synthetic
gguuguaugacaucacaauugc

SEQ ID NO: 5263 - RNA, 20 nt, Artificial Sequence
  Synthetic
gcccuugaguuuauaauugc

SEQ ID NO: 5264 - RNA, 21 nt, Artificial Sequence
  Synthetic
ggcccuugaguuuauaauugc

SEQ ID NO: 5265 - RNA, 22 nt, Artificial Sequence
  Synthetic
gggcccuugaguuuauaauugc

SEQ ID NO: 5266 - RNA, 20 nt, Artificial Sequence
  Synthetic
guugaaaacauagagauugc

SEQ ID NO: 5267 - RNA, 21 nt, Artificial Sequence
  Synthetic
gguugaaaacauagagauugc

SEQ ID NO: 5268 - RNA, 18 nt, Artificial Sequence
  Synthetic
guucauuauuuagauugc

SEQ ID NO: 5269 - RNA, 20 nt, Artificial Sequence
  Synthetic
guguucauuauuuagauugc

SEQ ID NO: 5270 - RNA, 23 nt, Artificial Sequence
  Synthetic
gcaaaccagguacagcauauugc

SEQ ID NO: 5271 - RNA, 19 nt, Artificial Sequence
  Synthetic
gacagaaagccauuauugc

SEQ ID NO: 5272 - RNA, 20 nt, Artificial Sequence
  Synthetic
ggacagaaagccauuauugc

SEQ ID NO: 5273 - RNA, 22 nt, Artificial Sequence
  Synthetic
guggacagaaagccauuauugc

SEQ ID NO: 5274 - RNA, 24 nt, Artificial Sequence
  Synthetic
gaguggacagaaagccauuauugc

SEQ ID NO: 5275 - RNA, 23 nt, Artificial Sequence
  Synthetic
gcuuccaagguuauuuaacuugc

SEQ ID NO: 5276 - RNA, 24 nt, Artificial Sequence
  Synthetic
ggcuuccaagguuauuuaacuugc

SEQ ID NO: 5277 - RNA, 18 nt, Artificial Sequence
  Synthetic
ggcccuaccuccacuugc

SEQ ID NO: 5278 - RNA, 19 nt, Artificial Sequence
  Synthetic
gucucaccuuuugacuugc

SEQ ID NO: 5279 - RNA, 24 nt, Artificial Sequence
  Synthetic
guauauacguaauuaaaaccuugc

SEQ ID NO: 5280 - RNA, 24 nt, Artificial Sequence
  Synthetic
guaauuagaauguuucuagcuugc

SEQ ID NO: 5281 - RNA, 19 nt, Artificial Sequence
  Synthetic
gucuggugcucugaguugc

SEQ ID NO: 5282 - RNA, 24 nt, Artificial Sequence
  Synthetic
guuauuuguuaugguucuuguugc

SEQ ID NO: 5283 - RNA, 19 nt, Artificial Sequence
  Synthetic
gccauauugauacauuugc

SEQ ID NO: 5284 - RNA, 24 nt, Artificial Sequence
  Synthetic
guuaugccauauugauacauuugc

SEQ ID NO: 5285 - RNA, 19 nt, Artificial Sequence
  Synthetic
guagcuaguuuuaguuugc

SEQ ID NO: 5286 - RNA, 21 nt, Artificial Sequence
  Synthetic
gaguagcuaguuuuaguuugc

SEQ ID NO: 5287 - RNA, 20 nt, Artificial Sequence
  Synthetic
guauucgaaaauaauuuugc

SEQ ID NO: 5288 - RNA, 20 nt, Artificial Sequence
  Synthetic
guuauuuuacacuauuuugc

SEQ ID NO: 5289 - RNA, 24 nt, Artificial Sequence
  Synthetic
guacguuauuuuacacuauuuugc

SEQ ID NO: 5290 - RNA, 20 nt, Artificial Sequence
  Synthetic
gccucauagauuuaaaaauc

SEQ ID NO: 5291 - RNA, 20 nt, Artificial Sequence
  Synthetic
gacuuuauaaauugaaaauc

SEQ ID NO: 5292 - RNA, 23 nt, Artificial Sequence
  Synthetic
guccuccccaaaacacagaaauc

SEQ ID NO: 5293 - RNA, 24 nt, Artificial Sequence
  Synthetic
gguccuccccaaaacacagaaauc

SEQ ID NO: 5294 - RNA, 19 nt, Artificial Sequence
  Synthetic
gugguuggcuucagaaauc

SEQ ID NO: 5295 - RNA, 21 nt, Artificial Sequence
  Synthetic
gugugguuggcuucagaaauc

SEQ ID NO: 5296 - RNA, 18 nt, Artificial Sequence
  Synthetic
guggaacauauggaaauc

SEQ ID NO: 5297 - RNA, 20 nt, Artificial Sequence
  Synthetic
guacaaggugugaugaaauc

SEQ ID NO: 5298 - RNA, 21 nt, Artificial Sequence
  Synthetic
gguacaaggugugaugaaauc

SEQ ID NO: 5299 - RNA, 22 nt, Artificial Sequence
  Synthetic
ggguacaaggugugaugaaauc

SEQ ID NO: 5300 - RNA, 18 nt, Artificial Sequence
  Synthetic
gaagcacuaggcuaaauc

SEQ ID NO: 5301 - RNA, 20 nt, Artificial Sequence
  Synthetic
gugaagcacuaggcuaaauc

SEQ ID NO: 5302 - RNA, 24 nt, Artificial Sequence
  Synthetic
guuagugaagcacuaggcuaaauc

SEQ ID NO: 5303 - RNA, 22 nt, Artificial Sequence
  Synthetic
gccucaguuuuaagagacaauc

SEQ ID NO: 5304 - RNA, 19 nt, Artificial Sequence
  Synthetic
gugacuuaaauguacaauc

SEQ ID NO: 5305 - RNA, 19 nt, Artificial Sequence
  Synthetic
gcuuuggugcagugcaauc

SEQ ID NO: 5306 - RNA, 20 nt, Artificial Sequence
  Synthetic
ggcuuuggugcagugcaauc

SEQ ID NO: 5307 - RNA, 24 nt, Artificial Sequence
  Synthetic
gcuuggcuuuggugcagugcaauc

SEQ ID NO: 5308 - RNA, 19 nt, Artificial Sequence
  Synthetic
guagugucuucacucaauc

SEQ ID NO: 5309 - RNA, 20 nt, Artificial Sequence
  Synthetic
gguagugucuucacucaauc

SEQ ID NO: 5310 - RNA, 23 nt, Artificial Sequence
  Synthetic
gaagguagugucuucacucaauc

SEQ ID NO: 5311 - RNA, 22 nt, Artificial Sequence
  Synthetic
guuacaaaguauaaugucaauc

SEQ ID NO: 5312 - RNA, 24 nt, Artificial Sequence
  Synthetic
guguuacaaaguauaaugucaauc

SEQ ID NO: 5313 - RNA, 18 nt, Artificial Sequence
  Synthetic
gacgcuuaggaaagaauc

SEQ ID NO: 5314 - RNA, 20 nt, Artificial Sequence
  Synthetic
gugacgcuuaggaaagaauc

SEQ ID NO: 5315 - RNA, 21 nt, Artificial Sequence
  Synthetic
ggugacgcuuaggaaagaauc

SEQ ID NO: 5316 - RNA, 22 nt, Artificial Sequence
  Synthetic
gggugacgcuuaggaaagaauc

SEQ ID NO: 5317 - RNA, 18 nt, Artificial Sequence
  Synthetic
gcuaauaaaugaagaauc

SEQ ID NO: 5318 - RNA, 18 nt, Artificial Sequence
  Synthetic
gcucuuaaugggagaauc

SEQ ID NO: 5319 - RNA, 19 nt, Artificial Sequence
  Synthetic
ggcucuuaaugggagaauc

SEQ ID NO: 5320 - RNA, 20 nt, Artificial Sequence
  Synthetic
guacuuguuaggauggaauc

SEQ ID NO: 5321 - RNA, 21 nt, Artificial Sequence
  Synthetic
gguacuuguuaggauggaauc

SEQ ID NO: 5322 - RNA, 18 nt, Artificial Sequence
  Synthetic
guacccacaggcugaauc

SEQ ID NO: 5323 - RNA, 20 nt, Artificial Sequence
  Synthetic
gaguacccacaggcugaauc

SEQ ID NO: 5324 - RNA, 23 nt, Artificial Sequence
  Synthetic
guacuuuauagaguuucugaauc

SEQ ID NO: 5325 - RNA, 19 nt, Artificial Sequence
  Synthetic
gcaauuacucuaaauaauc

SEQ ID NO: 5326 - RNA, 21 nt, Artificial Sequence
  Synthetic
gacaucaacacugaacuaauc

SEQ ID NO: 5327 - RNA, 19 nt, Artificial Sequence
  Synthetic
gaauagagcaacucuaauc

SEQ ID NO: 5328 - RNA, 20 nt, Artificial Sequence
  Synthetic
ggaauagagcaacucuaauc

SEQ ID NO: 5329 - RNA, 21 nt, Artificial Sequence
  Synthetic
gggaauagagcaacucuaauc

SEQ ID NO: 5330 - RNA, 22 nt, Artificial Sequence
  Synthetic
ggggaauagagcaacucuaauc

SEQ ID NO: 5331 - RNA, 19 nt, Artificial Sequence
  Synthetic
gaaauccaccgaaguaauc

SEQ ID NO: 5332 - RNA, 22 nt, Artificial Sequence
  Synthetic
gaaaacuaaagaaccuguaauc

SEQ ID NO: 5333 - RNA, 20 nt, Artificial Sequence
  Synthetic
guuucuuuuucccaaacauc

SEQ ID NO: 5334 - RNA, 22 nt, Artificial Sequence
  Synthetic
gaguuucuuuuucccaaacauc

SEQ ID NO: 5335 - RNA, 23 nt, Artificial Sequence
  Synthetic
ggaguuucuuuuucccaaacauc

SEQ ID NO: 5336 - RNA, 22 nt, Artificial Sequence
  Synthetic
gcaaauaaaaauaugaaacauc

SEQ ID NO: 5337 - RNA, 20 nt, Artificial Sequence
  Synthetic
gucucuuaccauucaacauc

SEQ ID NO: 5338 - RNA, 23 nt, Artificial Sequence
  Synthetic
guugucucuuaccauucaacauc

SEQ ID NO: 5339 - RNA, 19 nt, Artificial Sequence
  Synthetic
gucuguguuuuaucacauc

SEQ ID NO: 5340 - RNA, 22 nt, Artificial Sequence
  Synthetic
gcugucuguguuuuaucacauc

SEQ ID NO: 5341 - RNA, 20 nt, Artificial Sequence
  Synthetic
gccacccugccauguacauc

SEQ ID NO: 5342 - RNA, 24 nt, Artificial Sequence
  Synthetic
guacucuugcuucaucuugccauc

SEQ ID NO: 5343 - RNA, 18 nt, Artificial Sequence
  Synthetic
gagcucuuaggguccauc

SEQ ID NO: 5344 - RNA, 24 nt, Artificial Sequence
  Synthetic
guaacugagcucuuaggguccauc

SEQ ID NO: 5345 - RNA, 24 nt, Artificial Sequence
  Synthetic
guauuucuaaaaugccagagcauc

SEQ ID NO: 5346 - RNA, 19 nt, Artificial Sequence
  Synthetic
gaagagcaggcuaggcauc

SEQ ID NO: 5347 - RNA, 20 nt, Artificial Sequence
  Synthetic
ggaagagcaggcuaggcauc

SEQ ID NO: 5348 - RNA, 20 nt, Artificial Sequence
  Synthetic
gaacacugugcaaaaucauc

SEQ ID NO: 5349 - RNA, 23 nt, Artificial Sequence
  Synthetic
gccuaaaauguugccacaucauc

SEQ ID NO: 5350 - RNA, 21 nt, Artificial Sequence
  Synthetic
gaucuucacauacucaucauc

SEQ ID NO: 5351 - RNA, 20 nt, Artificial Sequence
  Synthetic
gacuuacucugaagaucauc

SEQ ID NO: 5352 - RNA, 23 nt, Artificial Sequence
  Synthetic
gaaucuauuauuuaaugaucauc

SEQ ID NO: 5353 - RNA, 22 nt, Artificial Sequence
  Synthetic
guaauauauuugcuuucucauc

SEQ ID NO: 5354 - RNA, 23 nt, Artificial Sequence
  Synthetic
gguaauauauuugcuuucucauc

SEQ ID NO: 5355 - RNA, 22 nt, Artificial Sequence
  Synthetic
guccaaaaagcuauaugucauc

SEQ ID NO: 5356 - RNA, 24 nt, Artificial Sequence
  Synthetic
guguccaaaaagcuauaugucauc

SEQ ID NO: 5357 - RNA, 21 nt, Artificial Sequence
  Synthetic
gcugggucucagucugucauc

SEQ ID NO: 5358 - RNA, 20 nt, Artificial Sequence
  Synthetic
gaacauuaauugaauucauc

SEQ ID NO: 5359 - RNA, 19 nt, Artificial Sequence
  Synthetic
guugauccacauauucauc

SEQ ID NO: 5360 - RNA, 24 nt, Artificial Sequence
  Synthetic
gcuuuuuaugaucaccgcuucauc

SEQ ID NO: 5361 - RNA, 23 nt, Artificial Sequence
  Synthetic
gaaauuauguaacagucuucauc

SEQ ID NO: 5362 - RNA, 19 nt, Artificial Sequence
  Synthetic
gcuuucugaccauuucauc

SEQ ID NO: 5363 - RNA, 21 nt, Artificial Sequence
  Synthetic
gugcuuucugaccauuucauc

SEQ ID NO: 5364 - RNA, 24 nt, Artificial Sequence
  Synthetic
guagugcuuucugaccauuucauc

SEQ ID NO: 5365 - RNA, 20 nt, Artificial Sequence
  Synthetic
guccugugaauacaaagauc

SEQ ID NO: 5366 - RNA, 23 nt, Artificial Sequence
  Synthetic
guuguccugugaauacaaagauc

SEQ ID NO: 5367 - RNA, 18 nt, Artificial Sequence
  Synthetic
guggcauauccaaagauc

SEQ ID NO: 5368 - RNA, 23 nt, Artificial Sequence
  Synthetic
gucacguggcauauccaaagauc

SEQ ID NO: 5369 - RNA, 24 nt, Artificial Sequence
  Synthetic
guccuuuaaugauacucaaagauc

SEQ ID NO: 5370 - RNA, 21 nt, Artificial Sequence
  Synthetic
gcaaaaguauuaagaaagauc

SEQ ID NO: 5371 - RNA, 24 nt, Artificial Sequence
  Synthetic
guugcaaaaguauuaagaaagauc

SEQ ID NO: 5372 - RNA, 19 nt, Artificial Sequence
  Synthetic
gaaauguaugggaaagauc

SEQ ID NO: 5373 - RNA, 19 nt, Artificial Sequence
  Synthetic
gugcacucccuagcagauc

SEQ ID NO: 5374 - RNA, 21 nt, Artificial Sequence
  Synthetic
gugugcacucccuagcagauc

SEQ ID NO: 5375 - RNA, 18 nt, Artificial Sequence
  Synthetic
gguacuuacaaggagauc

SEQ ID NO: 5376 - RNA, 22 nt, Artificial Sequence
  Synthetic
gcauuucauagacaucaggauc

SEQ ID NO: 5377 - RNA, 20 nt, Artificial Sequence
  Synthetic
guucaugguuguagaggauc

SEQ ID NO: 5378 - RNA, 20 nt, Artificial Sequence
  Synthetic
guuauguacuucauaggauc

SEQ ID NO: 5379 - RNA, 18 nt, Artificial Sequence
  Synthetic
guaaaacuucagcggauc

SEQ ID NO: 5380 - RNA, 19 nt, Artificial Sequence
  Synthetic
gguaaaacuucagcggauc

SEQ ID NO: 5381 - RNA, 24 nt, Artificial Sequence
  Synthetic
gauucauauuugguucuagggauc

SEQ ID NO: 5382 - RNA, 19 nt, Artificial Sequence
  Synthetic
gaacaggcaguuuuggauc

SEQ ID NO: 5383 - RNA, 22 nt, Artificial Sequence
  Synthetic
gaugaacaggcaguuuuggauc

SEQ ID NO: 5384 - RNA, 21 nt, Artificial Sequence
  Synthetic
gacuuugagugcuguaugauc

SEQ ID NO: 5385 - RNA, 23 nt, Artificial Sequence
  Synthetic
gugacuuugagugcuguaugauc

SEQ ID NO: 5386 - RNA, 24 nt, Artificial Sequence
  Synthetic
guuucuaaguuucuaaggcugauc

SEQ ID NO: 5387 - RNA, 19 nt, Artificial Sequence
  Synthetic
gaaggcucugguucugauc

SEQ ID NO: 5388 - RNA, 22 nt, Artificial Sequence
  Synthetic
gcugaaggcucugguucugauc

SEQ ID NO: 5389 - RNA, 19 nt, Artificial Sequence
  Synthetic
gcucaauaggaaauugauc

SEQ ID NO: 5390 - RNA, 24 nt, Artificial Sequence
  Synthetic
guuuugcucaauaggaaauugauc

SEQ ID NO: 5391 - RNA, 21 nt, Artificial Sequence
  Synthetic
gaaugauaacaaguguugauc

SEQ ID NO: 5392 - RNA, 24 nt, Artificial Sequence
  Synthetic
gaagaaugauaacaaguguugauc

SEQ ID NO: 5393 - RNA, 22 nt, Artificial Sequence
  Synthetic
gcucauguguauuuauuugauc

SEQ ID NO: 5394 - RNA, 24 nt, Artificial Sequence
  Synthetic
gugcucauguguauuuauuugauc

SEQ ID NO: 5395 - RNA, 21 nt, Artificial Sequence
  Synthetic
guuauuugugucacaaauauc

SEQ ID NO: 5396 - RNA, 22 nt, Artificial Sequence
  Synthetic
gauacaaaggcuaggaaauauc

SEQ ID NO: 5397 - RNA, 23 nt, Artificial Sequence
  Synthetic
guagaaagagagaaugaaauauc

SEQ ID NO: 5398 - RNA, 24 nt, Artificial Sequence
  Synthetic
gguagaaagagagaaugaaauauc

SEQ ID NO: 5399 - RNA, 18 nt, Artificial Sequence
  Synthetic
gcuuuucaauagaauauc

SEQ ID NO: 5400 - RNA, 21 nt, Artificial Sequence
  Synthetic
guagcuuuucaauagaauauc

SEQ ID NO: 5401 - RNA, 23 nt, Artificial Sequence
  Synthetic
gcaucugacggugguguaauauc

SEQ ID NO: 5402 - RNA, 22 nt, Artificial Sequence
  Synthetic
gcuaacuaacagaaaacauauc

SEQ ID NO: 5403 - RNA, 18 nt, Artificial Sequence
  Synthetic
gucuguauauggcauauc

SEQ ID NO: 5404 - RNA, 22 nt, Artificial Sequence
  Synthetic
gcaugucuguauauggcauauc

SEQ ID NO: 5405 - RNA, 23 nt, Artificial Sequence
  Synthetic
gauaucagacuaaaauucauauc

SEQ ID NO: 5406 - RNA, 21 nt, Artificial Sequence
  Synthetic
gucaaggucguaacauauauc

SEQ ID NO: 5407 - RNA, 22 nt, Artificial Sequence
  Synthetic
gccaugccaguuaacauauauc

SEQ ID NO: 5408 - RNA, 23 nt, Artificial Sequence
  Synthetic
guacuaaacaauaggaaacuauc

SEQ ID NO: 5409 - RNA, 18 nt, Artificial Sequence
  Synthetic
gagagggcauuaacuauc

SEQ ID NO: 5410 - RNA, 19 nt, Artificial Sequence
  Synthetic
gagguagagaguggcuauc

SEQ ID NO: 5411 - RNA, 20 nt, Artificial Sequence
  Synthetic
ggagguagagaguggcuauc

SEQ ID NO: 5412 - RNA, 21 nt, Artificial Sequence
  Synthetic
gggagguagagaguggcuauc

SEQ ID NO: 5413 - RNA, 24 nt, Artificial Sequence
  Synthetic
guagggagguagagaguggcuauc

SEQ ID NO: 5414 - RNA, 21 nt, Artificial Sequence
  Synthetic
guaaagacagcuuuggcuauc

SEQ ID NO: 5415 - RNA, 20 nt, Artificial Sequence
  Synthetic
gaauuuacauaagaucuauc

SEQ ID NO: 5416 - RNA, 18 nt, Artificial Sequence
  Synthetic
gguaccuacuagucuauc

SEQ ID NO: 5417 - RNA, 23 nt, Artificial Sequence
  Synthetic
gauuugguaccuacuagucuauc

SEQ ID NO: 5418 - RNA, 24 nt, Artificial Sequence
  Synthetic
ggauuugguaccuacuagucuauc

SEQ ID NO: 5419 - RNA, 19 nt, Artificial Sequence
  Synthetic
gauuuguucaaaaaguauc

SEQ ID NO: 5420 - RNA, 22 nt, Artificial Sequence
  Synthetic
gcagauuuguucaaaaaguauc

SEQ ID NO: 5421 - RNA, 24 nt, Artificial Sequence
  Synthetic
gagcagauuuguucaaaaaguauc

SEQ ID NO: 5422 - RNA, 23 nt, Artificial Sequence
  Synthetic
gaaaauagauuuucauugguauc

SEQ ID NO: 5423 - RNA, 22 nt, Artificial Sequence
  Synthetic
gauucugccuuuacaauguauc

SEQ ID NO: 5424 - RNA, 23 nt, Artificial Sequence
  Synthetic
ggauucugccuuuacaauguauc

SEQ ID NO: 5425 - RNA, 22 nt, Artificial Sequence
  Synthetic
gucaacucuagccucuuguauc

SEQ ID NO: 5426 - RNA, 18 nt, Artificial Sequence
  Synthetic
gaccuuucuuguuguauc

SEQ ID NO: 5427 - RNA, 19 nt, Artificial Sequence
  Synthetic
ggaccuuucuuguuguauc

SEQ ID NO: 5428 - RNA, 20 nt, Artificial Sequence
  Synthetic
gggaccuuucuuguuguauc

SEQ ID NO: 5429 - RNA, 24 nt, Artificial Sequence
  Synthetic
gaaugggaccuuucuuguuguauc

SEQ ID NO: 5430 - RNA, 22 nt, Artificial Sequence
  Synthetic
gccauuacauuaaacaauuauc

SEQ ID NO: 5431 - RNA, 23 nt, Artificial Sequence
  Synthetic
guauuccuuuucuuucaauuauc

SEQ ID NO: 5432 - RNA, 19 nt, Artificial Sequence
  Synthetic
gccaaaaguaaccauuauc

SEQ ID NO: 5433 - RNA, 21 nt, Artificial Sequence
  Synthetic
gagccaaaaguaaccauuauc

SEQ ID NO: 5434 - RNA, 20 nt, Artificial Sequence
  Synthetic
guucccagaaacccauuauc

SEQ ID NO: 5435 - RNA, 24 nt, Artificial Sequence
  Synthetic
gauaguucccagaaacccauuauc

SEQ ID NO: 5436 - RNA, 20 nt, Artificial Sequence
  Synthetic
guucccagaacaauauuauc

SEQ ID NO: 5437 - RNA, 21 nt, Artificial Sequence
  Synthetic
gguucccagaacaauauuauc

SEQ ID NO: 5438 - RNA, 20 nt, Artificial Sequence
  Synthetic
guuucuaucaaaaucuuauc

SEQ ID NO: 5439 - RNA, 18 nt, Artificial Sequence
  Synthetic
gaaauacaaaugguuauc

SEQ ID NO: 5440 - RNA, 18 nt, Artificial Sequence
  Synthetic
gggaaaagggucuuuauc

SEQ ID NO: 5441 - RNA, 20 nt, Artificial Sequence
  Synthetic
gagggaaaagggucuuuauc

SEQ ID NO: 5442 - RNA, 24 nt, Artificial Sequence
  Synthetic
gaaugagggaaaagggucuuuauc

SEQ ID NO: 5443 - RNA, 18 nt, Artificial Sequence
  Synthetic
gaguaaguacuuuuuauc

SEQ ID NO: 5444 - RNA, 20 nt, Artificial Sequence
  Synthetic
gagaguaaguacuuuuuauc

SEQ ID NO: 5445 - RNA, 21 nt, Artificial Sequence
  Synthetic
ggagaguaaguacuuuuuauc

SEQ ID NO: 5446 - RNA, 24 nt, Artificial Sequence
  Synthetic
gauggagaguaaguacuuuuuauc

SEQ ID NO: 5447 - RNA, 19 nt, Artificial Sequence
  Synthetic
gaaacuguauaucaaacuc

SEQ ID NO: 5448 - RNA, 20 nt, Artificial Sequence
  Synthetic
guaaacauuuuaucaaacuc

SEQ ID NO: 5449 - RNA, 21 nt, Artificial Sequence
  Synthetic
gguaaacauuuuaucaaacuc

SEQ ID NO: 5450 - RNA, 22 nt, Artificial Sequence
  Synthetic
ggguaaacauuuuaucaaacuc

SEQ ID NO: 5451 - RNA, 24 nt, Artificial Sequence
  Synthetic
guggguaaacauuuuaucaaacuc

SEQ ID NO: 5452 - RNA, 23 nt, Artificial Sequence
  Synthetic
gaaauaaggacuuuaaccaacuc

SEQ ID NO: 5453 - RNA, 24 nt, Artificial Sequence
  Synthetic
ggaaauaaggacuuuaaccaacuc

SEQ ID NO: 5454 - RNA, 19 nt, Artificial Sequence
  Synthetic
guuaaucuauguucaacuc

SEQ ID NO: 5455 - RNA, 18 nt, Artificial Sequence
  Synthetic
gguaucuuacaggaacuc

SEQ ID NO: 5456 - RNA, 20 nt, Artificial Sequence
  Synthetic
guuuguuaaacucugaacuc

SEQ ID NO: 5457 - RNA, 23 nt, Artificial Sequence
  Synthetic
gauauauuguaucugaauaacuc

SEQ ID NO: 5458 - RNA, 24 nt, Artificial Sequence
  Synthetic
ggauauauuguaucugaauaacuc

SEQ ID NO: 5459 - RNA, 20 nt, Artificial Sequence
  Synthetic
gcucuucaaguaaguaacuc

SEQ ID NO: 5460 - RNA, 18 nt, Artificial Sequence
  Synthetic
gucuaguaaaauuaacuc

SEQ ID NO: 5461 - RNA, 19 nt, Artificial Sequence
  Synthetic
ggucuaguaaaauuaacuc

SEQ ID NO: 5462 - RNA, 21 nt, Artificial Sequence
  Synthetic
guggucuaguaaaauuaacuc

SEQ ID NO: 5463 - RNA, 23 nt, Artificial Sequence
  Synthetic
guguggucuaguaaaauuaacuc

SEQ ID NO: 5464 - RNA, 23 nt, Artificial Sequence
  Synthetic
gccaucuaucauugacuuaacuc

SEQ ID NO: 5465 - RNA, 24 nt, Artificial Sequence
  Synthetic
ggccaucuaucauugacuuaacuc

SEQ ID NO: 5466 - RNA, 18 nt, Artificial Sequence
  Synthetic
ggugagguccuuacacuc

SEQ ID NO: 5467 - RNA, 21 nt, Artificial Sequence
  Synthetic
gucuucuaucucagcccacuc

SEQ ID NO: 5468 - RNA, 23 nt, Artificial Sequence
  Synthetic
gaaacccauguuacaaagcacuc

SEQ ID NO: 5469 - RNA, 18 nt, Artificial Sequence
  Synthetic
gcucuguuuuguucacuc

SEQ ID NO: 5470 - RNA, 19 nt, Artificial Sequence
  Synthetic
ggcucuguuuuguucacuc

SEQ ID NO: 5471 - RNA, 21 nt, Artificial Sequence
  Synthetic
gagaaagagucaagaagacuc

SEQ ID NO: 5472 - RNA, 23 nt, Artificial Sequence
  Synthetic
gagagaaagagucaagaagacuc

SEQ ID NO: 5473 - RNA, 19 nt, Artificial Sequence
  Synthetic
gacccaaacaguaagacuc

SEQ ID NO: 5474 - RNA, 18 nt, Artificial Sequence
  Synthetic
guuuggcaauuaagacuc

SEQ ID NO: 5475 - RNA, 19 nt, Artificial Sequence
  Synthetic
gaggauaaauaauagacuc

SEQ ID NO: 5476 - RNA, 21 nt, Artificial Sequence
  Synthetic
gugaggauaaauaauagacuc

SEQ ID NO: 5477 - RNA, 18 nt, Artificial Sequence
  Synthetic
gccugggacucuagacuc

SEQ ID NO: 5478 - RNA, 21 nt, Artificial Sequence
  Synthetic
gaagccugggacucuagacuc

SEQ ID NO: 5479 - RNA, 20 nt, Artificial Sequence
  Synthetic
gaaguaaaaaaugaggacuc

SEQ ID NO: 5480 - RNA, 18 nt, Artificial Sequence
  Synthetic
gcaauuacaagcggacuc

SEQ ID NO: 5481 - RNA, 22 nt, Artificial Sequence
  Synthetic
gcaaauugggaaagccugacuc

SEQ ID NO: 5482 - RNA, 19 nt, Artificial Sequence
  Synthetic
gaaaaugcagcuaauacuc

SEQ ID NO: 5483 - RNA, 18 nt, Artificial Sequence
  Synthetic
gucaucaugcagauacuc

SEQ ID NO: 5484 - RNA, 22 nt, Artificial Sequence
  Synthetic
guuuaaguaauccgagguacuc

SEQ ID NO: 5485 - RNA, 23 nt, Artificial Sequence
  Synthetic
gguuuaaguaauccgagguacuc

SEQ ID NO: 5486 - RNA, 21 nt, Artificial Sequence
  Synthetic
guaaauauauguaauguacuc

SEQ ID NO: 5487 - RNA, 22 nt, Artificial Sequence
  Synthetic
guacuuaacgcaguccuuacuc

SEQ ID NO: 5488 - RNA, 20 nt, Artificial Sequence
  Synthetic
guuucuccuccgcuuuacuc

SEQ ID NO: 5489 - RNA, 21 nt, Artificial Sequence
  Synthetic
gguuucuccuccgcuuuacuc

SEQ ID NO: 5490 - RNA, 23 nt, Artificial Sequence
  Synthetic
gagguuucuccuccgcuuuacuc

SEQ ID NO: 5491 - RNA, 24 nt, Artificial Sequence
  Synthetic
gcaaaaucagaaggcugaaaccuc

SEQ ID NO: 5492 - RNA, 21 nt, Artificial Sequence
  Synthetic
gaucucggcucgcugaaccuc

SEQ ID NO: 5493 - RNA, 23 nt, Artificial Sequence
  Synthetic
gagaucucggcucgcugaaccuc

SEQ ID NO: 5494 - RNA, 21 nt, Artificial Sequence
  Synthetic
gacaguccuccauuacaccuc

SEQ ID NO: 5495 - RNA, 22 nt, Artificial Sequence
  Synthetic
gauuuauacaacauauuaccuc

SEQ ID NO: 5496 - RNA, 24 nt, Artificial Sequence
  Synthetic
gugauuuauacaacauauuaccuc

SEQ ID NO: 5497 - RNA, 23 nt, Artificial Sequence
  Synthetic
guuaauuugguuuucuuuaccuc

SEQ ID NO: 5498 - RNA, 24 nt, Artificial Sequence
  Synthetic
gguuaauuugguuuucuuuaccuc

SEQ ID NO: 5499 - RNA, 20 nt, Artificial Sequence
  Synthetic
guauaauauggaacacccuc

SEQ ID NO: 5500 - RNA, 21 nt, Artificial Sequence
  Synthetic
gcuaacaguggucccacccuc

SEQ ID NO: 5501 - RNA, 24 nt, Artificial Sequence
  Synthetic
gcagcuaacaguggucccacccuc

SEQ ID NO: 5502 - RNA, 20 nt, Artificial Sequence
  Synthetic
gcuauaaccguuugacccuc

SEQ ID NO: 5503 - RNA, 22 nt, Artificial Sequence
  Synthetic
gagcuauaaccguuugacccuc

SEQ ID NO: 5504 - RNA, 20 nt, Artificial Sequence
  Synthetic
gacuugcuacuuuuacccuc

SEQ ID NO: 5505 - RNA, 18 nt, Artificial Sequence
  Synthetic
ggguuuuuuccuccccuc

SEQ ID NO: 5506 - RNA, 19 nt, Artificial Sequence
  Synthetic
gggguuuuuuccuccccuc

SEQ ID NO: 5507 - RNA, 20 nt, Artificial Sequence
  Synthetic
ggggguuuuuuccuccccuc

SEQ ID NO: 5508 - RNA, 22 nt, Artificial Sequence
  Synthetic
gaggggguuuuuuccuccccuc

SEQ ID NO: 5509 - RNA, 23 nt, Artificial Sequence
  Synthetic
ggaggggguuuuuuccuccccuc

SEQ ID NO: 5510 - RNA, 24 nt, Artificial Sequence
  Synthetic
gggaggggguuuuuuccuccccuc

SEQ ID NO: 5511 - RNA, 21 nt, Artificial Sequence
  Synthetic
gacaaaauuuauuuagcccuc

SEQ ID NO: 5512 - RNA, 23 nt, Artificial Sequence
  Synthetic
gagacaaaauuuauuuagcccuc

SEQ ID NO: 5513 - RNA, 23 nt, Artificial Sequence
  Synthetic
gcauuucugugcuuaaggcccuc

SEQ ID NO: 5514 - RNA, 24 nt, Artificial Sequence
  Synthetic
ggcauuucugugcuuaaggcccuc

SEQ ID NO: 5515 - RNA, 19 nt, Artificial Sequence
  Synthetic
gugcaucucaugugcccuc

SEQ ID NO: 5516 - RNA, 23 nt, Artificial Sequence
  Synthetic
gacagugcaucucaugugcccuc

SEQ ID NO: 5517 - RNA, 24 nt, Artificial Sequence
  Synthetic
ggacagugcaucucaugugcccuc

SEQ ID NO: 5518 - RNA, 22 nt, Artificial Sequence
  Synthetic
gucuuacccucuaacuucccuc

SEQ ID NO: 5519 - RNA, 18 nt, Artificial Sequence
  Synthetic
gucuuccccucuucccuc

SEQ ID NO: 5520 - RNA, 19 nt, Artificial Sequence
  Synthetic
ggucuuccccucuucccuc

SEQ ID NO: 5521 - RNA, 20 nt, Artificial Sequence
  Synthetic
gggucuuccccucuucccuc

SEQ ID NO: 5522 - RNA, 20 nt, Artificial Sequence
  Synthetic
gcagucccgcagucugccuc

SEQ ID NO: 5523 - RNA, 23 nt, Artificial Sequence
  Synthetic
gaugcagucccgcagucugccuc

SEQ ID NO: 5524 - RNA, 24 nt, Artificial Sequence
  Synthetic
ggaugcagucccgcagucugccuc

SEQ ID NO: 5525 - RNA, 22 nt, Artificial Sequence
  Synthetic
gcaauguccuguauggugccuc

SEQ ID NO: 5526 - RNA, 21 nt, Artificial Sequence
  Synthetic
gauugaaauucaggaauccuc

SEQ ID NO: 5527 - RNA, 18 nt, Artificial Sequence
  Synthetic
guuaagaucuuucuccuc

SEQ ID NO: 5528 - RNA, 19 nt, Artificial Sequence
  Synthetic
gguuaagaucuuucuccuc

SEQ ID NO: 5529 - RNA, 20 nt, Artificial Sequence
  Synthetic
gccaggucguucaaguccuc

SEQ ID NO: 5530 - RNA, 23 nt, Artificial Sequence
  Synthetic
gaagccaggucguucaaguccuc

SEQ ID NO: 5531 - RNA, 19 nt, Artificial Sequence
  Synthetic
gccauagcaauauguccuc

SEQ ID NO: 5532 - RNA, 24 nt, Artificial Sequence
  Synthetic
gaaaugccauagcaauauguccuc

SEQ ID NO: 5533 - RNA, 22 nt, Artificial Sequence
  Synthetic
guuuuuuuucaaaaucuuccuc

SEQ ID NO: 5534 - RNA, 23 nt, Artificial Sequence
  Synthetic
gcucucucuaguaaucaaagcuc

SEQ ID NO: 5535 - RNA, 24 nt, Artificial Sequence
  Synthetic
ggcucucucuaguaaucaaagcuc

SEQ ID NO: 5536 - RNA, 18 nt, Artificial Sequence
  Synthetic
gccauaugaagaaagcuc

SEQ ID NO: 5537 - RNA, 19 nt, Artificial Sequence
  Synthetic
ggccauaugaagaaagcuc

SEQ ID NO: 5538 - RNA, 21 nt, Artificial Sequence
  Synthetic
guggccauaugaagaaagcuc

SEQ ID NO: 5539 - RNA, 18 nt, Artificial Sequence
  Synthetic
guugaauuugucaagcuc

SEQ ID NO: 5540 - RNA, 21 nt, Artificial Sequence
  Synthetic
gcaguugaauuugucaagcuc

SEQ ID NO: 5541 - RNA, 24 nt, Artificial Sequence
  Synthetic
gucccacucuggauguucaagcuc

SEQ ID NO: 5542 - RNA, 22 nt, Artificial Sequence
  Synthetic
guucuugaagucaguuaagcuc

SEQ ID NO: 5543 - RNA, 21 nt, Artificial Sequence
  Synthetic
guccugagauuccuuuagcuc

SEQ ID NO: 5544 - RNA, 18 nt, Artificial Sequence
  Synthetic
gugagggaauaaaggcuc

SEQ ID NO: 5545 - RNA, 19 nt, Artificial Sequence
  Synthetic
ggugagggaauaaaggcuc

SEQ ID NO: 5546 - RNA, 21 nt, Artificial Sequence
  Synthetic
gaggugagggaauaaaggcuc

SEQ ID NO: 5547 - RNA, 18 nt, Artificial Sequence
  Synthetic
gcuuauaagcacaggcuc

SEQ ID NO: 5548 - RNA, 24 nt, Artificial Sequence
  Synthetic
guaauugcuuauaagcacaggcuc

SEQ ID NO: 5549 - RNA, 23 nt, Artificial Sequence
  Synthetic
gcacacuuugaguaguagggcuc

SEQ ID NO: 5550 - RNA, 20 nt, Artificial Sequence
  Synthetic
guauuuucuugcaggggcuc

SEQ ID NO: 5551 - RNA, 23 nt, Artificial Sequence
  Synthetic
guuguauuuucuugcaggggcuc

SEQ ID NO: 5552 - RNA, 23 nt, Artificial Sequence
  Synthetic
guaacaguggcaauguauggcuc

SEQ ID NO: 5553 - RNA, 21 nt, Artificial Sequence
  Synthetic
gaaccucugacuauaaugcuc

SEQ ID NO: 5554 - RNA, 23 nt, Artificial Sequence
  Synthetic
gagaaccucugacuauaaugcuc

SEQ ID NO: 5555 - RNA, 18 nt, Artificial Sequence
  Synthetic
gccuuacucuuuaugcuc

SEQ ID NO: 5556 - RNA, 19 nt, Artificial Sequence
  Synthetic
ggccuuacucuuuaugcuc

SEQ ID NO: 5557 - RNA, 23 nt, Artificial Sequence
  Synthetic
guaauauguuuuacuuacugcuc

SEQ ID NO: 5558 - RNA, 20 nt, Artificial Sequence
  Synthetic
gcaauuugaaauagcugcuc

SEQ ID NO: 5559 - RNA, 21 nt, Artificial Sequence
  Synthetic
ggcaauuugaaauagcugcuc

SEQ ID NO: 5560 - RNA, 23 nt, Artificial Sequence
  Synthetic
guggcaauuugaaauagcugcuc

SEQ ID NO: 5561 - RNA, 18 nt, Artificial Sequence
  Synthetic
ggauuaauaugugugcuc

SEQ ID NO: 5562 - RNA, 21 nt, Artificial Sequence
  Synthetic
gcaggauuaauaugugugcuc

SEQ ID NO: 5563 - RNA, 24 nt, Artificial Sequence
  Synthetic
gaagcaggauuaauaugugugcuc

SEQ ID NO: 5564 - RNA, 18 nt, Artificial Sequence
  Synthetic
gggaaaguuaauuugcuc

SEQ ID NO: 5565 - RNA, 20 nt, Artificial Sequence
  Synthetic
gagggaaaguuaauuugcuc

SEQ ID NO: 5566 - RNA, 24 nt, Artificial Sequence
  Synthetic
gcaacaaauuacuuuuguuugcuc

SEQ ID NO: 5567 - RNA, 18 nt, Artificial Sequence
  Synthetic
gcagaucuguggaaucuc

SEQ ID NO: 5568 - RNA, 22 nt, Artificial Sequence
  Synthetic
gccugcagaucuguggaaucuc

SEQ ID NO: 5569 - RNA, 23 nt, Artificial Sequence
  Synthetic
ggccugcagaucuguggaaucuc

SEQ ID NO: 5570 - RNA, 24 nt, Artificial Sequence
  Synthetic
gauccaauaagaaacuaccaucuc

SEQ ID NO: 5571 - RNA, 18 nt, Artificial Sequence
  Synthetic
gggcauuguguucaucuc

SEQ ID NO: 5572 - RNA, 18 nt, Artificial Sequence
  Synthetic
guuagggaacgugaucuc

SEQ ID NO: 5573 - RNA, 22 nt, Artificial Sequence
  Synthetic
guuuguuagggaacgugaucuc

SEQ ID NO: 5574 - RNA, 24 nt, Artificial Sequence
  Synthetic
gaguuuguuagggaacgugaucuc

SEQ ID NO: 5575 - RNA, 19 nt, Artificial Sequence
  Synthetic
gcucacuuauaacuaucuc

SEQ ID NO: 5576 - RNA, 20 nt, Artificial Sequence
  Synthetic
ggcucacuuauaacuaucuc

SEQ ID NO: 5577 - RNA, 20 nt, Artificial Sequence
  Synthetic
gaaaaagugcuauguaucuc

SEQ ID NO: 5578 - RNA, 21 nt, Artificial Sequence
  Synthetic
ggaaaaagugcuauguaucuc

SEQ ID NO: 5579 - RNA, 20 nt, Artificial Sequence
  Synthetic
gcuggggaggagauuaucuc

SEQ ID NO: 5580 - RNA, 23 nt, Artificial Sequence
  Synthetic
gaagcuggggaggagauuaucuc

SEQ ID NO: 5581 - RNA, 24 nt, Artificial Sequence
  Synthetic
ggaagcuggggaggagauuaucuc

SEQ ID NO: 5582 - RNA, 23 nt, Artificial Sequence
  Synthetic
gcacauuccgaguuucuuaucuc

SEQ ID NO: 5583 - RNA, 19 nt, Artificial Sequence
  Synthetic
guacuuaucaauuuaucuc

SEQ ID NO: 5584 - RNA, 21 nt, Artificial Sequence
  Synthetic
gaguacuuaucaauuuaucuc

SEQ ID NO: 5585 - RNA, 19 nt, Artificial Sequence
  Synthetic
gcaaaaaguucuuacucuc

SEQ ID NO: 5586 - RNA, 22 nt, Artificial Sequence
  Synthetic
gaagcaaaaaguucuuacucuc

SEQ ID NO: 5587 - RNA, 23 nt, Artificial Sequence
  Synthetic
guucuugcauucuuauuccucuc

SEQ ID NO: 5588 - RNA, 24 nt, Artificial Sequence
  Synthetic
gaaaagauuacaguuccugcucuc

SEQ ID NO: 5589 - RNA, 19 nt, Artificial Sequence
  Synthetic
gccuaaaaagguaucucuc

SEQ ID NO: 5590 - RNA, 22 nt, Artificial Sequence
  Synthetic
gaagccuaaaaagguaucucuc

SEQ ID NO: 5591 - RNA, 22 nt, Artificial Sequence
  Synthetic
gaucuuagucugugacucucuc

SEQ ID NO: 5592 - RNA, 23 nt, Artificial Sequence
  Synthetic
ggaucuuagucugugacucucuc

SEQ ID NO: 5593 - RNA, 21 nt, Artificial Sequence
  Synthetic
gcaaauuuaaaaaucucucuc

SEQ ID NO: 5594 - RNA, 18 nt, Artificial Sequence
  Synthetic
guucuuacauuuucucuc

SEQ ID NO: 5595 - RNA, 19 nt, Artificial Sequence
  Synthetic
gaacuuucacuuuucucuc

SEQ ID NO: 5596 - RNA, 22 nt, Artificial Sequence
  Synthetic
gcagaacuuucacuuuucucuc

SEQ ID NO: 5597 - RNA, 22 nt, Artificial Sequence
  Synthetic
gauaaaacaaagcugaagucuc

SEQ ID NO: 5598 - RNA, 20 nt, Artificial Sequence
  Synthetic
guuuuugaucugucagucuc

SEQ ID NO: 5599 - RNA, 18 nt, Artificial Sequence
  Synthetic
gaugugcucaguagucuc

SEQ ID NO: 5600 - RNA, 24 nt, Artificial Sequence
  Synthetic
gccauugaugugcucaguagucuc

SEQ ID NO: 5601 - RNA, 21 nt, Artificial Sequence
  Synthetic
gaaaaaucacaaacaugucuc

SEQ ID NO: 5602 - RNA, 18 nt, Artificial Sequence
  Synthetic
gguuaauuauucugucuc

SEQ ID NO: 5603 - RNA, 23 nt, Artificial Sequence
  Synthetic
gccccgguuaauuauucugucuc

SEQ ID NO: 5604 - RNA, 20 nt, Artificial Sequence
  Synthetic
gaaauuugaaacgcauucuc

SEQ ID NO: 5605 - RNA, 18 nt, Artificial Sequence
  Synthetic
guuccacuaggccuucuc

SEQ ID NO: 5606 - RNA, 20 nt, Artificial Sequence
  Synthetic
gaguuccacuaggccuucuc

SEQ ID NO: 5607 - RNA, 22 nt, Artificial Sequence
  Synthetic
gagaguuccacuaggccuucuc

SEQ ID NO: 5608 - RNA, 23 nt, Artificial Sequence
  Synthetic
gcuucacuguccacugccuucuc

SEQ ID NO: 5609 - RNA, 21 nt, Artificial Sequence
  Synthetic
gacucagaucauuaucuucuc

SEQ ID NO: 5610 - RNA, 19 nt, Artificial Sequence
  Synthetic
gagggucuauuauguucuc

SEQ ID NO: 5611 - RNA, 24 nt, Artificial Sequence
  Synthetic
gaucugagggucuauuauguucuc

SEQ ID NO: 5612 - RNA, 20 nt, Artificial Sequence
  Synthetic
gaccaugaaaacaauuucuc

SEQ ID NO: 5613 - RNA, 24 nt, Artificial Sequence
  Synthetic
guuugaccaugaaaacaauuucuc

SEQ ID NO: 5614 - RNA, 21 nt, Artificial Sequence
  Synthetic
gucagguuggagauauuucuc

SEQ ID NO: 5615 - RNA, 21 nt, Artificial Sequence
  Synthetic
gauuuauugaauguuuuucuc

SEQ ID NO: 5616 - RNA, 20 nt, Artificial Sequence
  Synthetic
guuuagucacucuaaaaguc

SEQ ID NO: 5617 - RNA, 21 nt, Artificial Sequence
  Synthetic
gguuuagucacucuaaaaguc

SEQ ID NO: 5618 - RNA, 24 nt, Artificial Sequence
  Synthetic
guccauuuuucccuuuggaaaguc

SEQ ID NO: 5619 - RNA, 23 nt, Artificial Sequence
  Synthetic
gacauaagagauaguauaaaguc

SEQ ID NO: 5620 - RNA, 18 nt, Artificial Sequence
  Synthetic
gucauuguaacuaaaguc

SEQ ID NO: 5621 - RNA, 19 nt, Artificial Sequence
  Synthetic
ggucauuguaacuaaaguc

SEQ ID NO: 5622 - RNA, 20 nt, Artificial Sequence
  Synthetic
gggucauuguaacuaaaguc

SEQ ID NO: 5623 - RNA, 24 nt, Artificial Sequence
  Synthetic
gauucaauaaagcuuuuugaaguc

SEQ ID NO: 5624 - RNA, 20 nt, Artificial Sequence
  Synthetic
guaucugaagguucuaaguc

SEQ ID NO: 5625 - RNA, 22 nt, Artificial Sequence
  Synthetic
guguaucugaagguucuaaguc

SEQ ID NO: 5626 - RNA, 20 nt, Artificial Sequence
  Synthetic
gcucagccaguggcacaguc

SEQ ID NO: 5627 - RNA, 24 nt, Artificial Sequence
  Synthetic
gccugcucagccaguggcacaguc

SEQ ID NO: 5628 - RNA, 18 nt, Artificial Sequence
  Synthetic
ggauuuuucaacccaguc

SEQ ID NO: 5629 - RNA, 23 nt, Artificial Sequence
  Synthetic
gcuaaggauuuuucaacccaguc

SEQ ID NO: 5630 - RNA, 18 nt, Artificial Sequence
  Synthetic
gaaucaccucacccaguc

SEQ ID NO: 5631 - RNA, 21 nt, Artificial Sequence
  Synthetic
gaagaaucaccucacccaguc

SEQ ID NO: 5632 - RNA, 22 nt, Artificial Sequence
  Synthetic
ggaagaaucaccucacccaguc

SEQ ID NO: 5633 - RNA, 24 nt, Artificial Sequence
  Synthetic
guauauauacuuuuauuugcaguc

SEQ ID NO: 5634 - RNA, 19 nt, Artificial Sequence
  Synthetic
gauucccaauuaaucaguc

SEQ ID NO: 5635 - RNA, 20 nt, Artificial Sequence
  Synthetic
ggauucccaauuaaucaguc

SEQ ID NO: 5636 - RNA, 22 nt, Artificial Sequence
  Synthetic
gaauucagauaaaauaucaguc

SEQ ID NO: 5637 - RNA, 23 nt, Artificial Sequence
  Synthetic
ggaauucagauaaaauaucaguc

SEQ ID NO: 5638 - RNA, 19 nt, Artificial Sequence
  Synthetic
gugggaauuuauaucaguc

SEQ ID NO: 5639 - RNA, 22 nt, Artificial Sequence
  Synthetic
guugugggaauuuauaucaguc

SEQ ID NO: 5640 - RNA, 18 nt, Artificial Sequence
  Synthetic
gcaacacagccaagaguc

SEQ ID NO: 5641 - RNA, 22 nt, Artificial Sequence
  Synthetic
gaaauacuauuccucaagaguc

SEQ ID NO: 5642 - RNA, 23 nt, Artificial Sequence
  Synthetic
gaaacaaucuaccuugcagaguc

SEQ ID NO: 5643 - RNA, 24 nt, Artificial Sequence
  Synthetic
ggaaacaaucuaccuugcagaguc

SEQ ID NO: 5644 - RNA, 21 nt, Artificial Sequence
  Synthetic
gcaugggagaaaaauggaguc

SEQ ID NO: 5645 - RNA, 22 nt, Artificial Sequence
  Synthetic
ggcaugggagaaaaauggaguc

SEQ ID NO: 5646 - RNA, 23 nt, Artificial Sequence
  Synthetic
gggcaugggagaaaaauggaguc

SEQ ID NO: 5647 - RNA, 24 nt, Artificial Sequence
  Synthetic
ggggcaugggagaaaaauggaguc

SEQ ID NO: 5648 - RNA, 19 nt, Artificial Sequence
  Synthetic
gcauacuuggcuuugaguc

SEQ ID NO: 5649 - RNA, 23 nt, Artificial Sequence
  Synthetic
gcuuauauuagcuccauauaguc

SEQ ID NO: 5650 - RNA, 24 nt, Artificial Sequence
  Synthetic
ggcuuauauuagcuccauauaguc

SEQ ID NO: 5651 - RNA, 22 nt, Artificial Sequence
  Synthetic
gcaauaucuaucuuuauuaguc

SEQ ID NO: 5652 - RNA, 23 nt, Artificial Sequence
  Synthetic
gacaauaaauuccuagaaucguc

SEQ ID NO: 5653 - RNA, 24 nt, Artificial Sequence
  Synthetic
ggacaauaaauuccuagaaucguc

SEQ ID NO: 5654 - RNA, 18 nt, Artificial Sequence
  Synthetic
gcaucuugaggaaagguc

SEQ ID NO: 5655 - RNA, 19 nt, Artificial Sequence
  Synthetic
ggcaucuugaggaaagguc

SEQ ID NO: 5656 - RNA, 21 nt, Artificial Sequence
  Synthetic
guggcaucuugaggaaagguc

SEQ ID NO: 5657 - RNA, 22 nt, Artificial Sequence
  Synthetic
gguggcaucuugaggaaagguc

SEQ ID NO: 5658 - RNA, 21 nt, Artificial Sequence
  Synthetic
gauaauguacaguugaagguc

SEQ ID NO: 5659 - RNA, 18 nt, Artificial Sequence
  Synthetic
guaacuuuggugcagguc

SEQ ID NO: 5660 - RNA, 23 nt, Artificial Sequence
  Synthetic
guccaguaacuuuggugcagguc

SEQ ID NO: 5661 - RNA, 24 nt, Artificial Sequence
  Synthetic
gguccaguaacuuuggugcagguc

SEQ ID NO: 5662 - RNA, 23 nt, Artificial Sequence
  Synthetic
gaauuuacacuccuucugagguc

SEQ ID NO: 5663 - RNA, 20 nt, Artificial Sequence
  Synthetic
guuaagauucauuugggguc

SEQ ID NO: 5664 - RNA, 22 nt, Artificial Sequence
  Synthetic
guguuaagauucauuugggguc

SEQ ID NO: 5665 - RNA, 19 nt, Artificial Sequence
  Synthetic
gcacauugcauuauggguc

SEQ ID NO: 5666 - RNA, 22 nt, Artificial Sequence
  Synthetic
gaagcacauugcauuauggguc

SEQ ID NO: 5667 - RNA, 23 nt, Artificial Sequence
  Synthetic
ggaagcacauugcauuauggguc

SEQ ID NO: 5668 - RNA, 18 nt, Artificial Sequence
  Synthetic
guauauuacuauuggguc

SEQ ID NO: 5669 - RNA, 21 nt, Artificial Sequence
  Synthetic
gcuucaguauuuuauuggguc

SEQ ID NO: 5670 - RNA, 22 nt, Artificial Sequence
  Synthetic
ggcuucaguauuuuauuggguc

SEQ ID NO: 5671 - RNA, 24 nt, Artificial Sequence
  Synthetic
gaggcuucaguauuuuauuggguc

SEQ ID NO: 5672 - RNA, 22 nt, Artificial Sequence
  Synthetic
gccauuugcaagccacaugguc

SEQ ID NO: 5673 - RNA, 18 nt, Artificial Sequence
  Synthetic
gcugaauuugaccugguc

SEQ ID NO: 5674 - RNA, 19 nt, Artificial Sequence
  Synthetic
ggcugaauuugaccugguc

SEQ ID NO: 5675 - RNA, 23 nt, Artificial Sequence
  Synthetic
gaccaucacuuuugaccuugguc

SEQ ID NO: 5676 - RNA, 20 nt, Artificial Sequence
  Synthetic
gauauccugguuauuugguc

SEQ ID NO: 5677 - RNA, 23 nt, Artificial Sequence
  Synthetic
gucaucauggauggauuuugguc

SEQ ID NO: 5678 - RNA, 18 nt, Artificial Sequence
  Synthetic
gacaucauugagaauguc

SEQ ID NO: 5679 - RNA, 23 nt, Artificial Sequence
  Synthetic
guccagacaucauugagaauguc

SEQ ID NO: 5680 - RNA, 19 nt, Artificial Sequence
  Synthetic
gaaaaagauauauaauguc

SEQ ID NO: 5681 - RNA, 23 nt, Artificial Sequence
  Synthetic
guuagaaaaagauauauaauguc

SEQ ID NO: 5682 - RNA, 24 nt, Artificial Sequence
  Synthetic
gcaacaaaaacaggagcuaauguc

SEQ ID NO: 5683 - RNA, 20 nt, Artificial Sequence
  Synthetic
gauugcacaugacacauguc

SEQ ID NO: 5684 - RNA, 21 nt, Artificial Sequence
  Synthetic
ggauugcacaugacacauguc

SEQ ID NO: 5685 - RNA, 24 nt, Artificial Sequence
  Synthetic
gcuuuucacuguuuccgucauguc

SEQ ID NO: 5686 - RNA, 18 nt, Artificial Sequence
  Synthetic
gcauauaggccagauguc

SEQ ID NO: 5687 - RNA, 22 nt, Artificial Sequence
  Synthetic
gucugcauauaggccagauguc

SEQ ID NO: 5688 - RNA, 20 nt, Artificial Sequence
  Synthetic
gacuugguauucaauauguc

SEQ ID NO: 5689 - RNA, 22 nt, Artificial Sequence
  Synthetic
gacuaaaaaauuauuuuauguc

SEQ ID NO: 5690 - RNA, 23 nt, Artificial Sequence
  Synthetic
gccuuugaggcaaggacacuguc

SEQ ID NO: 5691 - RNA, 23 nt, Artificial Sequence
  Synthetic
guauauaaaacgugucuacuguc

SEQ ID NO: 5692 - RNA, 24 nt, Artificial Sequence
  Synthetic
gcccuuauacuugcuuuaccuguc

SEQ ID NO: 5693 - RNA, 20 nt, Artificial Sequence
  Synthetic
gcuggcugugcagagcuguc

SEQ ID NO: 5694 - RNA, 18 nt, Artificial Sequence
  Synthetic
ggaagagaaaggucuguc

SEQ ID NO: 5695 - RNA, 21 nt, Artificial Sequence
  Synthetic
guaggaagagaaaggucuguc

SEQ ID NO: 5696 - RNA, 23 nt, Artificial Sequence
  Synthetic
gaguaggaagagaaaggucuguc

SEQ ID NO: 5697 - RNA, 24 nt, Artificial Sequence
  Synthetic
ggaguaggaagagaaaggucuguc

SEQ ID NO: 5698 - RNA, 24 nt, Artificial Sequence
  Synthetic
gucuccucugagccuuguucuguc

SEQ ID NO: 5699 - RNA, 23 nt, Artificial Sequence
  Synthetic
gacccauuacacuguuuucuguc

SEQ ID NO: 5700 - RNA, 18 nt, Artificial Sequence
  Synthetic
gaaagacagugaaguguc

SEQ ID NO: 5701 - RNA, 21 nt, Artificial Sequence
  Synthetic
guugaaagacagugaaguguc

SEQ ID NO: 5702 - RNA, 23 nt, Artificial Sequence
  Synthetic
gaguugaaagacagugaaguguc

SEQ ID NO: 5703 - RNA, 24 nt, Artificial Sequence
  Synthetic
ggaguugaaagacagugaaguguc

SEQ ID NO: 5704 - RNA, 24 nt, Artificial Sequence
  Synthetic
guuaaaaagucauccugugguguc

SEQ ID NO: 5705 - RNA, 22 nt, Artificial Sequence
  Synthetic
guuuauuacuagguuguguguc

SEQ ID NO: 5706 - RNA, 23 nt, Artificial Sequence
  Synthetic
gguuuauuacuagguuguguguc

SEQ ID NO: 5707 - RNA, 21 nt, Artificial Sequence
  Synthetic
gucuuuccccguacuuguguc

SEQ ID NO: 5708 - RNA, 24 nt, Artificial Sequence
  Synthetic
gcagucuuuccccguacuuguguc

SEQ ID NO: 5709 - RNA, 18 nt, Artificial Sequence
  Synthetic
gaaaaauuauuuuguguc

SEQ ID NO: 5710 - RNA, 22 nt, Artificial Sequence
  Synthetic
gcaagaaaaauuauuuuguguc

SEQ ID NO: 5711 - RNA, 23 nt, Artificial Sequence
  Synthetic
ggcaagaaaaauuauuuuguguc

SEQ ID NO: 5712 - RNA, 23 nt, Artificial Sequence
  Synthetic
guucauucaguacaagaauuguc

SEQ ID NO: 5713 - RNA, 21 nt, Artificial Sequence
  Synthetic
gaauagcccuucagaauuguc

SEQ ID NO: 5714 - RNA, 24 nt, Artificial Sequence
  Synthetic
guagaauagcccuucagaauuguc

SEQ ID NO: 5715 - RNA, 21 nt, Artificial Sequence
  Synthetic
guaaagauagauuagauuguc

SEQ ID NO: 5716 - RNA, 22 nt, Artificial Sequence
  Synthetic
gguaaagauagauuagauuguc

SEQ ID NO: 5717 - RNA, 24 nt, Artificial Sequence
  Synthetic
guuucaauggcauaauuuauuguc

SEQ ID NO: 5718 - RNA, 18 nt, Artificial Sequence
  Synthetic
gagcuaacguaacuuguc

SEQ ID NO: 5719 - RNA, 20 nt, Artificial Sequence
  Synthetic
gagagcuaacguaacuuguc

SEQ ID NO: 5720 - RNA, 21 nt, Artificial Sequence
  Synthetic
ggagagcuaacguaacuuguc

SEQ ID NO: 5721 - RNA, 23 nt, Artificial Sequence
  Synthetic
gauuucuuucaguucguguuguc

SEQ ID NO: 5722 - RNA, 18 nt, Artificial Sequence
  Synthetic
gagcuaacaguuguuguc

SEQ ID NO: 5723 - RNA, 20 nt, Artificial Sequence
  Synthetic
gcauuuugauaucaaaauuc

SEQ ID NO: 5724 - RNA, 19 nt, Artificial Sequence
  Synthetic
gaugaaaaguagcaaauuc

SEQ ID NO: 5725 - RNA, 24 nt, Artificial Sequence
  Synthetic
gcaaagaugaaaaguagcaaauuc

SEQ ID NO: 5726 - RNA, 18 nt, Artificial Sequence
  Synthetic
gauucuagauugaaauuc

SEQ ID NO: 5727 - RNA, 20 nt, Artificial Sequence
  Synthetic
gugauucuagauugaaauuc

SEQ ID NO: 5728 - RNA, 22 nt, Artificial Sequence
  Synthetic
gugugauucuagauugaaauuc

SEQ ID NO: 5729 - RNA, 24 nt, Artificial Sequence
  Synthetic
gugugugauucuagauugaaauuc

SEQ ID NO: 5730 - RNA, 21 nt, Artificial Sequence
  Synthetic
guaauuuuacguaguaaauuc

SEQ ID NO: 5731 - RNA, 19 nt, Artificial Sequence
  Synthetic
gugggcuuagacacaauuc

SEQ ID NO: 5732 - RNA, 23 nt, Artificial Sequence
  Synthetic
gcacgugggcuuagacacaauuc

SEQ ID NO: 5733 - RNA, 18 nt, Artificial Sequence
  Synthetic
ggaaugaagggacaauuc

SEQ ID NO: 5734 - RNA, 19 nt, Artificial Sequence
  Synthetic
gggaaugaagggacaauuc

SEQ ID NO: 5735 - RNA, 20 nt, Artificial Sequence
  Synthetic
ggggaaugaagggacaauuc

SEQ ID NO: 5736 - RNA, 22 nt, Artificial Sequence
  Synthetic
gaggggaaugaagggacaauuc

SEQ ID NO: 5737 - RNA, 20 nt, Artificial Sequence
  Synthetic
gcuguaccugcugccaauuc

SEQ ID NO: 5738 - RNA, 21 nt, Artificial Sequence
  Synthetic
ggcuguaccugcugccaauuc

SEQ ID NO: 5739 - RNA, 22 nt, Artificial Sequence
  Synthetic
gggcuguaccugcugccaauuc

SEQ ID NO: 5740 - RNA, 24 nt, Artificial Sequence
  Synthetic
gcuuaucuaaggugcugccaauuc

SEQ ID NO: 5741 - RNA, 18 nt, Artificial Sequence
  Synthetic
ggaauaagaauucaauuc

SEQ ID NO: 5742 - RNA, 20 nt, Artificial Sequence
  Synthetic
guggaauaagaauucaauuc

SEQ ID NO: 5743 - RNA, 22 nt, Artificial Sequence
  Synthetic
guguggaauaagaauucaauuc

SEQ ID NO: 5744 - RNA, 22 nt, Artificial Sequence
  Synthetic
gaccucuaaacugaaggaauuc

SEQ ID NO: 5745 - RNA, 23 nt, Artificial Sequence
  Synthetic
guauauucuaguuugaauaauuc

SEQ ID NO: 5746 - RNA, 21 nt, Artificial Sequence
  Synthetic
gaaucaucagagauauaauuc

SEQ ID NO: 5747 - RNA, 22 nt, Artificial Sequence
  Synthetic
ggaaucaucagagauauaauuc

SEQ ID NO: 5748 - RNA, 20 nt, Artificial Sequence
  Synthetic
gauuauacgggauguaauuc

SEQ ID NO: 5749 - RNA, 21 nt, Artificial Sequence
  Synthetic
ggauuauacgggauguaauuc

SEQ ID NO: 5750 - RNA, 18 nt, Artificial Sequence
  Synthetic
gaauaaauuauuuaauuc

SEQ ID NO: 5751 - RNA, 22 nt, Artificial Sequence
  Synthetic
guuauccacuggaauaacauuc

SEQ ID NO: 5752 - RNA, 24 nt, Artificial Sequence
  Synthetic
gcucccuuauauaucaggacauuc

SEQ ID NO: 5753 - RNA, 20 nt, Artificial Sequence
  Synthetic
gauuuagaagcuaugcauuc

SEQ ID NO: 5754 - RNA, 22 nt, Artificial Sequence
  Synthetic
gagauuuagaagcuaugcauuc

SEQ ID NO: 5755 - RNA, 24 nt, Artificial Sequence
  Synthetic
gagagauuuagaagcuaugcauuc

SEQ ID NO: 5756 - RNA, 18 nt, Artificial Sequence
  Synthetic
guuaaggucuuuucauuc

SEQ ID NO: 5757 - RNA, 21 nt, Artificial Sequence
  Synthetic
gucccauacaaugguagauuc

SEQ ID NO: 5758 - RNA, 22 nt, Artificial Sequence
  Synthetic
gcuauaaagccauggccgauuc

SEQ ID NO: 5759 - RNA, 19 nt, Artificial Sequence
  Synthetic
guacuuuuugaauggauuc

SEQ ID NO: 5760 - RNA, 23 nt, Artificial Sequence
  Synthetic
gucaauuuccaaugcuuggauuc

SEQ ID NO: 5761 - RNA, 24 nt, Artificial Sequence
  Synthetic
ggucaauuuccaaugcuuggauuc

SEQ ID NO: 5762 - RNA, 18 nt, Artificial Sequence
  Synthetic
ggugaaguaaugugauuc

SEQ ID NO: 5763 - RNA, 19 nt, Artificial Sequence
  Synthetic
gauagacgaggcuugauuc

SEQ ID NO: 5764 - RNA, 23 nt, Artificial Sequence
  Synthetic
gaaagauagacgaggcuugauuc

SEQ ID NO: 5765 - RNA, 18 nt, Artificial Sequence
  Synthetic
guggaaacuaguugauuc

SEQ ID NO: 5766 - RNA, 21 nt, Artificial Sequence
  Synthetic
gauuuuacaauuucaauauuc

SEQ ID NO: 5767 - RNA, 21 nt, Artificial Sequence
  Synthetic
guacaggggcucuucauauuc

SEQ ID NO: 5768 - RNA, 22 nt, Artificial Sequence
  Synthetic
gguacaggggcucuucauauuc

SEQ ID NO: 5769 - RNA, 22 nt, Artificial Sequence
  Synthetic
gucuaacccugcauuuauauuc

SEQ ID NO: 5770 - RNA, 22 nt, Artificial Sequence
  Synthetic
gugaauuuuuaaaaaaguauuc

SEQ ID NO: 5771 - RNA, 24 nt, Artificial Sequence
  Synthetic
gagugaauuuuuaaaaaaguauuc

SEQ ID NO: 5772 - RNA, 23 nt, Artificial Sequence
  Synthetic
guuuuuuugcaaaugcgguauuc

SEQ ID NO: 5773 - RNA, 19 nt, Artificial Sequence
  Synthetic
gacacccacauaauuauuc

SEQ ID NO: 5774 - RNA, 21 nt, Artificial Sequence
  Synthetic
gugacacccacauaauuauuc

SEQ ID NO: 5775 - RNA, 22 nt, Artificial Sequence
  Synthetic
ggugacacccacauaauuauuc

SEQ ID NO: 5776 - RNA, 23 nt, Artificial Sequence
  Synthetic
gggugacacccacauaauuauuc

SEQ ID NO: 5777 - RNA, 24 nt, Artificial Sequence
  Synthetic
ggggugacacccacauaauuauuc

SEQ ID NO: 5778 - RNA, 18 nt, Artificial Sequence
  Synthetic
gcuaguuguuacuuauuc

SEQ ID NO: 5779 - RNA, 19 nt, Artificial Sequence
  Synthetic
ggcuaguuguuacuuauuc

SEQ ID NO: 5780 - RNA, 21 nt, Artificial Sequence
  Synthetic
gaggcuaguuguuacuuauuc

SEQ ID NO: 5781 - RNA, 23 nt, Artificial Sequence
  Synthetic
gucacuuaccccuucuaaacuuc

SEQ ID NO: 5782 - RNA, 18 nt, Artificial Sequence
  Synthetic
gcuucaaagccuaacuuc

SEQ ID NO: 5783 - RNA, 19 nt, Artificial Sequence
  Synthetic
ggcuucaaagccuaacuuc

SEQ ID NO: 5784 - RNA, 23 nt, Artificial Sequence
  Synthetic
gauaggcuucaaagccuaacuuc

SEQ ID NO: 5785 - RNA, 24 nt, Artificial Sequence
  Synthetic
ggauaggcuucaaagccuaacuuc

SEQ ID NO: 5786 - RNA, 19 nt, Artificial Sequence
  Synthetic
gcuuuggaggucuaacuuc

SEQ ID NO: 5787 - RNA, 20 nt, Artificial Sequence
  Synthetic
ggcuuuggaggucuaacuuc

SEQ ID NO: 5788 - RNA, 21 nt, Artificial Sequence
  Synthetic
gggcuuuggaggucuaacuuc

SEQ ID NO: 5789 - RNA, 24 nt, Artificial Sequence
  Synthetic
gcccaucauuucuuguguaacuuc

SEQ ID NO: 5790 - RNA, 18 nt, Artificial Sequence
  Synthetic
gaauuggccuuucacuuc

SEQ ID NO: 5791 - RNA, 20 nt, Artificial Sequence
  Synthetic
guucauaauguuaagacuuc

SEQ ID NO: 5792 - RNA, 21 nt, Artificial Sequence
  Synthetic
gguucauaauguuaagacuuc

SEQ ID NO: 5793 - RNA, 23 nt, Artificial Sequence
  Synthetic
gagguucauaauguuaagacuuc

SEQ ID NO: 5794 - RNA, 20 nt, Artificial Sequence
  Synthetic
gucaaaucuuaagagacuuc

SEQ ID NO: 5795 - RNA, 20 nt, Artificial Sequence
  Synthetic
gauuuggugacacauacuuc

SEQ ID NO: 5796 - RNA, 22 nt, Artificial Sequence
  Synthetic
gagauuuggugacacauacuuc

SEQ ID NO: 5797 - RNA, 18 nt, Artificial Sequence
  Synthetic
gccaugaauuuauacuuc

SEQ ID NO: 5798 - RNA, 23 nt, Artificial Sequence
  Synthetic
guauagccaugaauuuauacuuc

SEQ ID NO: 5799 - RNA, 24 nt, Artificial Sequence
  Synthetic
gguauagccaugaauuuauacuuc

SEQ ID NO: 5800 - RNA, 22 nt, Artificial Sequence
  Synthetic
gcuaagugaaguggucuacuuc

SEQ ID NO: 5801 - RNA, 20 nt, Artificial Sequence
  Synthetic
guauuucuuuuccguacuuc

SEQ ID NO: 5802 - RNA, 23 nt, Artificial Sequence
  Synthetic
gaaguauuucuuuuccguacuuc

SEQ ID NO: 5803 - RNA, 24 nt, Artificial Sequence
  Synthetic
ggaaguauuucuuuuccguacuuc

SEQ ID NO: 5804 - RNA, 21 nt, Artificial Sequence
  Synthetic
gcuuaaaacaguagguacuuc

SEQ ID NO: 5805 - RNA, 24 nt, Artificial Sequence
  Synthetic
guagcuuaaaacaguagguacuuc

SEQ ID NO: 5806 - RNA, 19 nt, Artificial Sequence
  Synthetic
guggaauuuauuuuacuuc

SEQ ID NO: 5807 - RNA, 20 nt, Artificial Sequence
  Synthetic
gguggaauuuauuuuacuuc

SEQ ID NO: 5808 - RNA, 22 nt, Artificial Sequence
  Synthetic
gagguggaauuuauuuuacuuc

SEQ ID NO: 5809 - RNA, 24 nt, Artificial Sequence
  Synthetic
guccuuauguucauaaguaccuuc

SEQ ID NO: 5810 - RNA, 23 nt, Artificial Sequence
  Synthetic
gucuauuuuuacauaaagccuuc

SEQ ID NO: 5811 - RNA, 23 nt, Artificial Sequence
  Synthetic
gacuaauaacacacuuagccuuc

SEQ ID NO: 5812 - RNA, 24 nt, Artificial Sequence
  Synthetic
ggacuaauaacacacuuagccuuc

SEQ ID NO: 5813 - RNA, 18 nt, Artificial Sequence
  Synthetic
guuuuguuuuaauccuuc

SEQ ID NO: 5814 - RNA, 20 nt, Artificial Sequence
  Synthetic
guguuuuguuuuaauccuuc

SEQ ID NO: 5815 - RNA, 20 nt, Artificial Sequence
  Synthetic
gaaccuuuuccucuagcuuc

SEQ ID NO: 5816 - RNA, 21 nt, Artificial Sequence
  Synthetic
ggaaccuuuuccucuagcuuc

SEQ ID NO: 5817 - RNA, 22 nt, Artificial Sequence
  Synthetic
gacauacuacauaguaugcuuc

SEQ ID NO: 5818 - RNA, 24 nt, Artificial Sequence
  Synthetic
gugacauacuacauaguaugcuuc

SEQ ID NO: 5819 - RNA, 18 nt, Artificial Sequence
  Synthetic
gccucuccagacugcuuc

SEQ ID NO: 5820 - RNA, 24 nt, Artificial Sequence
  Synthetic
gucuuucuuacuauaguuugcuuc

SEQ ID NO: 5821 - RNA, 22 nt, Artificial Sequence
  Synthetic
gaaaaccuauauuagcaucuuc

SEQ ID NO: 5822 - RNA, 24 nt, Artificial Sequence
  Synthetic
gugaaaaccuauauuagcaucuuc

SEQ ID NO: 5823 - RNA, 19 nt, Artificial Sequence
  Synthetic
gaggcagcccaagaucuuc

SEQ ID NO: 5824 - RNA, 20 nt, Artificial Sequence
  Synthetic
ggaggcagcccaagaucuuc

SEQ ID NO: 5825 - RNA, 22 nt, Artificial Sequence
  Synthetic
guggaggcagcccaagaucuuc

SEQ ID NO: 5826 - RNA, 23 nt, Artificial Sequence
  Synthetic
gguggaggcagcccaagaucuuc

SEQ ID NO: 5827 - RNA, 19 nt, Artificial Sequence
  Synthetic
gcuaggguguacuaucuuc

SEQ ID NO: 5828 - RNA, 23 nt, Artificial Sequence
  Synthetic
gacagcuaggguguacuaucuuc

SEQ ID NO: 5829 - RNA, 19 nt, Artificial Sequence
  Synthetic
gugaaauccaaaacucuuc

SEQ ID NO: 5830 - RNA, 22 nt, Artificial Sequence
  Synthetic
gcaaccacaauagauacucuuc

SEQ ID NO: 5831 - RNA, 23 nt, Artificial Sequence
  Synthetic
guauaauaguucucuuucucuuc

SEQ ID NO: 5832 - RNA, 18 nt, Artificial Sequence
  Synthetic
gcaauuugcaccuucuuc

SEQ ID NO: 5833 - RNA, 22 nt, Artificial Sequence
  Synthetic
gucauauagcacauuuuucuuc

SEQ ID NO: 5834 - RNA, 23 nt, Artificial Sequence
  Synthetic
guuuaaauacauuuuuuuucuuc

SEQ ID NO: 5835 - RNA, 20 nt, Artificial Sequence
  Synthetic
gccaugcaggaaaaaaguuc

SEQ ID NO: 5836 - RNA, 18 nt, Artificial Sequence
  Synthetic
gagaagaaaugaaaguuc

SEQ ID NO: 5837 - RNA, 19 nt, Artificial Sequence
  Synthetic
ggagaagaaaugaaaguuc

SEQ ID NO: 5838 - RNA, 21 nt, Artificial Sequence
  Synthetic
gaggagaagaaaugaaaguuc

SEQ ID NO: 5839 - RNA, 22 nt, Artificial Sequence
  Synthetic
ggaggagaagaaaugaaaguuc

SEQ ID NO: 5840 - RNA, 24 nt, Artificial Sequence
  Synthetic
gaggaggagaagaaaugaaaguuc

SEQ ID NO: 5841 - RNA, 18 nt, Artificial Sequence
  Synthetic
gcuacuaccaccaaguuc

SEQ ID NO: 5842 - RNA, 21 nt, Artificial Sequence
  Synthetic
gucaguuuauuugagaaguuc

SEQ ID NO: 5843 - RNA, 22 nt, Artificial Sequence
  Synthetic
ggucaguuuauuugagaaguuc

SEQ ID NO: 5844 - RNA, 18 nt, Artificial Sequence
  Synthetic
gcuugacaacugaaguuc

SEQ ID NO: 5845 - RNA, 20 nt, Artificial Sequence
  Synthetic
gugcuugacaacugaaguuc

SEQ ID NO: 5846 - RNA, 19 nt, Artificial Sequence
  Synthetic
gaagccuuagguuaaguuc

SEQ ID NO: 5847 - RNA, 22 nt, Artificial Sequence
  Synthetic
gucucagggaagccaucaguuc

SEQ ID NO: 5848 - RNA, 23 nt, Artificial Sequence
  Synthetic
gcaaugaccacauuacucaguuc

SEQ ID NO: 5849 - RNA, 21 nt, Artificial Sequence
  Synthetic
gccaagccugauaacuaguuc

SEQ ID NO: 5850 - RNA, 18 nt, Artificial Sequence
  Synthetic
guggaaauaaauuaguuc

SEQ ID NO: 5851 - RNA, 21 nt, Artificial Sequence
  Synthetic
gcuugguacacaaggccguuc

SEQ ID NO: 5852 - RNA, 19 nt, Artificial Sequence
  Synthetic
guuugguaugguaugguuc

SEQ ID NO: 5853 - RNA, 22 nt, Artificial Sequence
  Synthetic
gaaguuugguaugguaugguuc

SEQ ID NO: 5854 - RNA, 23 nt, Artificial Sequence
  Synthetic
ggaaguuugguaugguaugguuc

SEQ ID NO: 5855 - RNA, 18 nt, Artificial Sequence
  Synthetic
guuaggauauuaugguuc

SEQ ID NO: 5856 - RNA, 23 nt, Artificial Sequence
  Synthetic
guuucucauaguuggaaauguuc

SEQ ID NO: 5857 - RNA, 19 nt, Artificial Sequence
  Synthetic
gauuacacccaucauguuc

SEQ ID NO: 5858 - RNA, 20 nt, Artificial Sequence
  Synthetic
gaaagacgggaaagauguuc

SEQ ID NO: 5859 - RNA, 21 nt, Artificial Sequence
  Synthetic
ggaaagacgggaaagauguuc

SEQ ID NO: 5860 - RNA, 22 nt, Artificial Sequence
  Synthetic
gauacgauuauucaugauguuc

SEQ ID NO: 5861 - RNA, 23 nt, Artificial Sequence
  Synthetic
ggauacgauuauucaugauguuc

SEQ ID NO: 5862 - RNA, 21 nt, Artificial Sequence
  Synthetic
guauugcucuaagguauguuc

SEQ ID NO: 5863 - RNA, 23 nt, Artificial Sequence
  Synthetic
gaguauugcucuaagguauguuc

SEQ ID NO: 5864 - RNA, 22 nt, Artificial Sequence
  Synthetic
gcucugacccaaaauucuguuc

SEQ ID NO: 5865 - RNA, 24 nt, Artificial Sequence
  Synthetic
gauaacauguuucuucaaguguuc

SEQ ID NO: 5866 - RNA, 21 nt, Artificial Sequence
  Synthetic
gcccuucugagaacaguguuc

SEQ ID NO: 5867 - RNA, 19 nt, Artificial Sequence
  Synthetic
gcagagcuguucaguguuc

SEQ ID NO: 5868 - RNA, 24 nt, Artificial Sequence
  Synthetic
gcccugcagagcuguucaguguuc

SEQ ID NO: 5869 - RNA, 21 nt, Artificial Sequence
  Synthetic
gacuuccagaauuauguguuc

SEQ ID NO: 5870 - RNA, 24 nt, Artificial Sequence
  Synthetic
gaauuauucugauuaacuguguuc

SEQ ID NO: 5871 - RNA, 19 nt, Artificial Sequence
  Synthetic
gauacuuaacuuguuguuc

SEQ ID NO: 5872 - RNA, 22 nt, Artificial Sequence
  Synthetic
guagauacuuaacuuguuguuc

SEQ ID NO: 5873 - RNA, 23 nt, Artificial Sequence
  Synthetic
gguagauacuuaacuuguuguuc

SEQ ID NO: 5874 - RNA, 18 nt, Artificial Sequence
  Synthetic
guuaaauuauguuuguuc

SEQ ID NO: 5875 - RNA, 22 nt, Artificial Sequence
  Synthetic
guaaaaauuacuuguuuuguuc

SEQ ID NO: 5876 - RNA, 21 nt, Artificial Sequence
  Synthetic
guuaagauauuuguaaauuuc

SEQ ID NO: 5877 - RNA, 23 nt, Artificial Sequence
  Synthetic
gucaaauguccucccucaauuuc

SEQ ID NO: 5878 - RNA, 19 nt, Artificial Sequence
  Synthetic
gccuaggauugagaauuuc

SEQ ID NO: 5879 - RNA, 23 nt, Artificial Sequence
  Synthetic
gcuagccuaggauugagaauuuc

SEQ ID NO: 5880 - RNA, 20 nt, Artificial Sequence
  Synthetic
gaaguucaaaguuuaauuuc

SEQ ID NO: 5881 - RNA, 20 nt, Artificial Sequence
  Synthetic
guugcugaugguuuaauuuc

SEQ ID NO: 5882 - RNA, 19 nt, Artificial Sequence
  Synthetic
gaggacauuauaacauuuc

SEQ ID NO: 5883 - RNA, 23 nt, Artificial Sequence
  Synthetic
gaauaaaggucuauguacauuuc

SEQ ID NO: 5884 - RNA, 20 nt, Artificial Sequence
  Synthetic
gaaaaugauaauuacauuuc

SEQ ID NO: 5885 - RNA, 22 nt, Artificial Sequence
  Synthetic
gagaaaaugauaauuacauuuc

SEQ ID NO: 5886 - RNA, 24 nt, Artificial Sequence
  Synthetic
gagagaaaaugauaauuacauuuc

SEQ ID NO: 5887 - RNA, 20 nt, Artificial Sequence
  Synthetic
gcaguuagugaacccauuuc

SEQ ID NO: 5888 - RNA, 21 nt, Artificial Sequence
  Synthetic
ggcaguuagugaacccauuuc

SEQ ID NO: 5889 - RNA, 20 nt, Artificial Sequence
  Synthetic
guaauuuuuucauccauuuc

SEQ ID NO: 5890 - RNA, 23 nt, Artificial Sequence
  Synthetic
gcuguaauuuuuucauccauuuc

SEQ ID NO: 5891 - RNA, 23 nt, Artificial Sequence
  Synthetic
gaaauuuuuuauguauccauuuc

SEQ ID NO: 5892 - RNA, 24 nt, Artificial Sequence
  Synthetic
gacaucaguauuuuaaaauauuuc

SEQ ID NO: 5893 - RNA, 21 nt, Artificial Sequence
  Synthetic
gguuuuuucaacaaauauuuc

SEQ ID NO: 5894 - RNA, 24 nt, Artificial Sequence
  Synthetic
guagguuuuuucaacaaauauuuc

SEQ ID NO: 5895 - RNA, 24 nt, Artificial Sequence
  Synthetic
guucuccaguaaguuuaauauuuc

SEQ ID NO: 5896 - RNA, 18 nt, Artificial Sequence
  Synthetic
ggauauuagauauauuuc

SEQ ID NO: 5897 - RNA, 18 nt, Artificial Sequence
  Synthetic
gagagggaaggguauuuc

SEQ ID NO: 5898 - RNA, 19 nt, Artificial Sequence
  Synthetic
ggagagggaaggguauuuc

SEQ ID NO: 5899 - RNA, 22 nt, Artificial Sequence
  Synthetic
gcuggagagggaaggguauuuc

SEQ ID NO: 5900 - RNA, 19 nt, Artificial Sequence
  Synthetic
gugaugcuagguuuauuuc

SEQ ID NO: 5901 - RNA, 20 nt, Artificial Sequence
  Synthetic
ggugaugcuagguuuauuuc

SEQ ID NO: 5902 - RNA, 23 nt, Artificial Sequence
  Synthetic
gaaggugaugcuagguuuauuuc

SEQ ID NO: 5903 - RNA, 19 nt, Artificial Sequence
  Synthetic
gugaauaguuaucacuuuc

SEQ ID NO: 5904 - RNA, 19 nt, Artificial Sequence
  Synthetic
guucuucucuauuacuuuc

SEQ ID NO: 5905 - RNA, 20 nt, Artificial Sequence
  Synthetic
gguucuucucuauuacuuuc

SEQ ID NO: 5906 - RNA, 21 nt, Artificial Sequence
  Synthetic
guaagaauaauauaaccuuuc

SEQ ID NO: 5907 - RNA, 18 nt, Artificial Sequence
  Synthetic
gcuaccuguuaaccuuuc

SEQ ID NO: 5908 - RNA, 22 nt, Artificial Sequence
  Synthetic
gauagcuaccuguuaaccuuuc

SEQ ID NO: 5909 - RNA, 18 nt, Artificial Sequence
  Synthetic
guuacuuuugacccuuuc

SEQ ID NO: 5910 - RNA, 23 nt, Artificial Sequence
  Synthetic
gcaauaagcccauauugccuuuc

SEQ ID NO: 5911 - RNA, 21 nt, Artificial Sequence
  Synthetic
gaauaauuuggcuugccuuuc

SEQ ID NO: 5912 - RNA, 22 nt, Artificial Sequence
  Synthetic
ggaauaauuuggcuugccuuuc

SEQ ID NO: 5913 - RNA, 20 nt, Artificial Sequence
  Synthetic
gaacaccucugcuuccuuuc

SEQ ID NO: 5914 - RNA, 22 nt, Artificial Sequence
  Synthetic
guuaccaugcuuccacgcuuuc

SEQ ID NO: 5915 - RNA, 19 nt, Artificial Sequence
  Synthetic
guagucagagacugcuuuc

SEQ ID NO: 5916 - RNA, 20 nt, Artificial Sequence
  Synthetic
gguagucagagacugcuuuc

SEQ ID NO: 5917 - RNA, 21 nt, Artificial Sequence
  Synthetic
ggguagucagagacugcuuuc

SEQ ID NO: 5918 - RNA, 22 nt, Artificial Sequence
  Synthetic
gggguagucagagacugcuuuc

SEQ ID NO: 5919 - RNA, 18 nt, Artificial Sequence
  Synthetic
gucuaggcaauaucuuuc

SEQ ID NO: 5920 - RNA, 22 nt, Artificial Sequence
  Synthetic
guacugauagaaacucucuuuc

SEQ ID NO: 5921 - RNA, 24 nt, Artificial Sequence
  Synthetic
guguacugauagaaacucucuuuc

SEQ ID NO: 5922 - RNA, 23 nt, Artificial Sequence
  Synthetic
guuaccuaucuuuguugucuuuc

SEQ ID NO: 5923 - RNA, 20 nt, Artificial Sequence
  Synthetic
guuauuuauccauuucuuuc

SEQ ID NO: 5924 - RNA, 18 nt, Artificial Sequence
  Synthetic
ggaaaauggcaaaguuuc

SEQ ID NO: 5925 - RNA, 21 nt, Artificial Sequence
  Synthetic
gcugccaagguuuucaguuuc

SEQ ID NO: 5926 - RNA, 23 nt, Artificial Sequence
  Synthetic
gugcugccaagguuuucaguuuc

SEQ ID NO: 5927 - RNA, 18 nt, Artificial Sequence
  Synthetic
guuaugagagagaguuuc

SEQ ID NO: 5928 - RNA, 19 nt, Artificial Sequence
  Synthetic
gguuaugagagagaguuuc

SEQ ID NO: 5929 - RNA, 23 nt, Artificial Sequence
  Synthetic
gccugguuaugagagagaguuuc

SEQ ID NO: 5930 - RNA, 23 nt, Artificial Sequence
  Synthetic
gucucaguaguguuuguaguuuc

SEQ ID NO: 5931 - RNA, 20 nt, Artificial Sequence
  Synthetic
gcaaaauauaggcagguuuc

SEQ ID NO: 5932 - RNA, 21 nt, Artificial Sequence
  Synthetic
ggcaaaauauaggcagguuuc

SEQ ID NO: 5933 - RNA, 21 nt, Artificial Sequence
  Synthetic
gauaaaggccucugagguuuc

SEQ ID NO: 5934 - RNA, 18 nt, Artificial Sequence
  Synthetic
gaauguggauacgguuuc

SEQ ID NO: 5935 - RNA, 20 nt, Artificial Sequence
  Synthetic
gugaauguggauacgguuuc

SEQ ID NO: 5936 - RNA, 23 nt, Artificial Sequence
  Synthetic
guuccuaaaauacccuugguuuc

SEQ ID NO: 5937 - RNA, 24 nt, Artificial Sequence
  Synthetic
gguuccuaaaauacccuugguuuc

SEQ ID NO: 5938 - RNA, 20 nt, Artificial Sequence
  Synthetic
guuuuacuuugccauguuuc

SEQ ID NO: 5939 - RNA, 21 nt, Artificial Sequence
  Synthetic
guauuauuauauccauguuuc

SEQ ID NO: 5940 - RNA, 22 nt, Artificial Sequence
  Synthetic
gguauuauuauauccauguuuc

SEQ ID NO: 5941 - RNA, 24 nt, Artificial Sequence
  Synthetic
gugguauuauuauauccauguuuc

SEQ ID NO: 5942 - RNA, 18 nt, Artificial Sequence
  Synthetic
gagugaauuuacuguuuc

SEQ ID NO: 5943 - RNA, 18 nt, Artificial Sequence
  Synthetic
guccucuggcauuguuuc

SEQ ID NO: 5944 - RNA, 23 nt, Artificial Sequence
  Synthetic
guucuguccucuggcauuguuuc

SEQ ID NO: 5945 - RNA, 24 nt, Artificial Sequence
  Synthetic
gguucuguccucuggcauuguuuc

SEQ ID NO: 5946 - RNA, 22 nt, Artificial Sequence
  Synthetic
guauuuguauguauuuuguuuc

SEQ ID NO: 5947 - RNA, 18 nt, Artificial Sequence
  Synthetic
gucaccgcuuaaauuuuc

SEQ ID NO: 5948 - RNA, 20 nt, Artificial Sequence
  Synthetic
gugucaccgcuuaaauuuuc

SEQ ID NO: 5949 - RNA, 21 nt, Artificial Sequence
  Synthetic
ggaaauacuuguuaaauuuuc

SEQ ID NO: 5950 - RNA, 24 nt, Artificial Sequence
  Synthetic
gcuggaaauacuuguuaaauuuuc

SEQ ID NO: 5951 - RNA, 24 nt, Artificial Sequence
  Synthetic
guaaauuaacuuuucuuaauuuuc

SEQ ID NO: 5952 - RNA, 20 nt, Artificial Sequence
  Synthetic
gcugaaaaaacgccauuuuc

SEQ ID NO: 5953 - RNA, 22 nt, Artificial Sequence
  Synthetic
gagcugaaaaaacgccauuuuc

SEQ ID NO: 5954 - RNA, 23 nt, Artificial Sequence
  Synthetic
ggagcugaaaaaacgccauuuuc

SEQ ID NO: 5955 - RNA, 24 nt, Artificial Sequence
  Synthetic
guuauauuguaacacagcauuuuc

SEQ ID NO: 5956 - RNA, 18 nt, Artificial Sequence
  Synthetic
ggaaaccguaucauuuuc

SEQ ID NO: 5957 - RNA, 21 nt, Artificial Sequence
  Synthetic
gaaggaaaccguaucauuuuc

SEQ ID NO: 5958 - RNA, 18 nt, Artificial Sequence
  Synthetic
ggcagaagccugauuuuc

SEQ ID NO: 5959 - RNA, 21 nt, Artificial Sequence
  Synthetic
gauggcagaagccugauuuuc

SEQ ID NO: 5960 - RNA, 24 nt, Artificial Sequence
  Synthetic
gaugauggcagaagccugauuuuc

SEQ ID NO: 5961 - RNA, 22 nt, Artificial Sequence
  Synthetic
guaauuucaauuugugauuuuc

SEQ ID NO: 5962 - RNA, 23 nt, Artificial Sequence
  Synthetic
gguaauuucaauuugugauuuuc

SEQ ID NO: 5963 - RNA, 23 nt, Artificial Sequence
  Synthetic
gucacaauaaauguuuacuuuuc

SEQ ID NO: 5964 - RNA, 21 nt, Artificial Sequence
  Synthetic
gacuagacuucuauccuuuuc

SEQ ID NO: 5965 - RNA, 20 nt, Artificial Sequence
  Synthetic
gcauaaucugggagcuuuuc

SEQ ID NO: 5966 - RNA, 23 nt, Artificial Sequence
  Synthetic
gaugcauaaucugggagcuuuuc

SEQ ID NO: 5967 - RNA, 19 nt, Artificial Sequence
  Synthetic
gagauacaagaggcuuuuc

SEQ ID NO: 5968 - RNA, 20 nt, Artificial Sequence
  Synthetic
ggagauacaagaggcuuuuc

SEQ ID NO: 5969 - RNA, 22 nt, Artificial Sequence
  Synthetic
gaggagauacaagaggcuuuuc

SEQ ID NO: 5970 - RNA, 20 nt, Artificial Sequence
  Synthetic
gcacuauuaagcaucuuuuc

SEQ ID NO: 5971 - RNA, 19 nt, Artificial Sequence
  Synthetic
gcaaaaugauccucuuuuc

SEQ ID NO: 5972 - RNA, 21 nt, Artificial Sequence
  Synthetic
gaguuacaaaaacuucuuuuc

SEQ ID NO: 5973 - RNA, 21 nt, Artificial Sequence
  Synthetic
gaaauaauauauaaaguuuuc

SEQ ID NO: 5974 - RNA, 23 nt, Artificial Sequence
  Synthetic
gagaaauaauauauaaaguuuuc

SEQ ID NO: 5975 - RNA, 23 nt, Artificial Sequence
  Synthetic
gaucaucaguuuuugagguuuuc

SEQ ID NO: 5976 - RNA, 23 nt, Artificial Sequence
  Synthetic
guuuuacaccuuuugauguuuuc

SEQ ID NO: 5977 - RNA, 24 nt, Artificial Sequence
  Synthetic
gguuuuacaccuuuugauguuuuc

SEQ ID NO: 5978 - RNA, 19 nt, Artificial Sequence
  Synthetic
gauaguugcugaauuuuuc

SEQ ID NO: 5979 - RNA, 24 nt, Artificial Sequence
  Synthetic
guuuugauaguugcugaauuuuuc

SEQ ID NO: 5980 - RNA, 21 nt, Artificial Sequence
  Synthetic
gcaaggguugacucauuuuuc

SEQ ID NO: 5981 - RNA, 21 nt, Artificial Sequence
  Synthetic
gcaccugaacaauuauuuuuc

SEQ ID NO: 5982 - RNA, 24 nt, Artificial Sequence
  Synthetic
guagcaccugaacaauuauuuuuc

SEQ ID NO: 5983 - RNA, 24 nt, Artificial Sequence
  Synthetic
guuauaaaaguuuccuucuuuuuc

SEQ ID NO: 5984 - RNA, 21 nt, Artificial Sequence
  Synthetic
gaaaucucaaagaauuuuuuc

SEQ ID NO: 5985 - RNA, 24 nt, Artificial Sequence
  Synthetic
guuuuacuuauuugaacuuuuuuc

SEQ ID NO: 5986 - RNA, 20 nt, Artificial Sequence
  Synthetic
gcuucagauuauuuuuuuuc

SEQ ID NO: 5987 - RNA, 22 nt, Artificial Sequence
  Synthetic
gugcuucagauuauuuuuuuuc

SEQ ID NO: 5988 - RNA, 19 nt, Artificial Sequence
  Synthetic
gacaccuuuuuuaaaaaag

SEQ ID NO: 5989 - RNA, 21 nt, Artificial Sequence
  Synthetic
gugacaccuuuuuuaaaaaag

SEQ ID NO: 5990 - RNA, 20 nt, Artificial Sequence
  Synthetic
gauuguuugcucucaaaaag

SEQ ID NO: 5991 - RNA, 21 nt, Artificial Sequence
  Synthetic
gaauguaaaauuuucaaaaag

SEQ ID NO: 5992 - RNA, 23 nt, Artificial Sequence
  Synthetic
guacuuucauccuccugaaaaag

SEQ ID NO: 5993 - RNA, 19 nt, Artificial Sequence
  Synthetic
gagaagagucuuuaaaaag

SEQ ID NO: 5994 - RNA, 24 nt, Artificial Sequence
  Synthetic
gauuugagaagagucuuuaaaaag

SEQ ID NO: 5995 - RNA, 21 nt, Artificial Sequence
  Synthetic
gaauauuaaagaggacaaaag

SEQ ID NO: 5996 - RNA, 22 nt, Artificial Sequence
  Synthetic
ggaauauuaaagaggacaaaag

SEQ ID NO: 5997 - RNA, 19 nt, Artificial Sequence
  Synthetic
gacagaauuucuacaaaag

SEQ ID NO: 5998 - RNA, 21 nt, Artificial Sequence
  Synthetic
gagacagaauuucuacaaaag

SEQ ID NO: 5999 - RNA, 20 nt, Artificial Sequence
  Synthetic
gaucuggcacucaccaaaag

SEQ ID NO: 6000 - RNA, 22 nt, Artificial Sequence
  Synthetic
gugaucuggcacucaccaaaag

SEQ ID NO: 6001 - RNA, 21 nt, Artificial Sequence
  Synthetic
gauauggaacuaccccaaaag

SEQ ID NO: 6002 - RNA, 19 nt, Artificial Sequence
  Synthetic
guuugacuaaggccaaaag

SEQ ID NO: 6003 - RNA, 19 nt, Artificial Sequence
  Synthetic
guauuccaagcagcaaaag

SEQ ID NO: 6004 - RNA, 20 nt, Artificial Sequence
  Synthetic
gguauuccaagcagcaaaag

SEQ ID NO: 6005 - RNA, 21 nt, Artificial Sequence
  Synthetic
gaacuaccaucuucgcaaaag

SEQ ID NO: 6006 - RNA, 21 nt, Artificial Sequence
  Synthetic
guaugugauuauaggcaaaag

SEQ ID NO: 6007 - RNA, 24 nt, Artificial Sequence
  Synthetic
gaaacauaaaauaggaaucaaaag

SEQ ID NO: 6008 - RNA, 21 nt, Artificial Sequence
  Synthetic
gaaacugaagacacagaaaag

SEQ ID NO: 6009 - RNA, 23 nt, Artificial Sequence
  Synthetic
gcgaaacugaagacacagaaaag

SEQ ID NO: 6010 - RNA, 19 nt, Artificial Sequence
  Synthetic
gaagaucaugccagaaaag

SEQ ID NO: 6011 - RNA, 21 nt, Artificial Sequence
  Synthetic
guaauuucauccaaggaaaag

SEQ ID NO: 6012 - RNA, 23 nt, Artificial Sequence
  Synthetic
gaguaauuucauccaaggaaaag

SEQ ID NO: 6013 - RNA, 19 nt, Artificial Sequence
  Synthetic
gaacuugauaaaauaaaag

SEQ ID NO: 6014 - RNA, 21 nt, Artificial Sequence
  Synthetic
gugaacuugauaaaauaaaag

SEQ ID NO: 6015 - RNA, 20 nt, Artificial Sequence
  Synthetic
gaucagggccauaguaaaag

SEQ ID NO: 6016 - RNA, 21 nt, Artificial Sequence
  Synthetic
guuucguuaccuugguaaaag

SEQ ID NO: 6017 - RNA, 18 nt, Artificial Sequence
  Synthetic
gcauuagugauguaaaag

SEQ ID NO: 6018 - RNA, 21 nt, Artificial Sequence
  Synthetic
gaugcauuagugauguaaaag

SEQ ID NO: 6019 - RNA, 24 nt, Artificial Sequence
  Synthetic
gcugaugcauuagugauguaaaag

SEQ ID NO: 6020 - RNA, 20 nt, Artificial Sequence
  Synthetic
gacccauaguguauuaaaag

SEQ ID NO: 6021 - RNA, 20 nt, Artificial Sequence
  Synthetic
guccuuaaacaaguuaaaag

SEQ ID NO: 6022 - RNA, 18 nt, Artificial Sequence
  Synthetic
gagguccuuaguuaaaag

SEQ ID NO: 6023 - RNA, 19 nt, Artificial Sequence
  Synthetic
ggagguccuuaguuaaaag

SEQ ID NO: 6024 - RNA, 24 nt, Artificial Sequence
  Synthetic
gaucuggagguccuuaguuaaaag

SEQ ID NO: 6025 - RNA, 18 nt, Artificial Sequence
  Synthetic
gaugccaaacguuaaaag

SEQ ID NO: 6026 - RNA, 24 nt, Artificial Sequence
  Synthetic
gccaaacagcagucuagaacaaag

SEQ ID NO: 6027 - RNA, 21 nt, Artificial Sequence
  Synthetic
guccaguaugacuggacaaag

SEQ ID NO: 6028 - RNA, 24 nt, Artificial Sequence
  Synthetic
gauguccaguaugacuggacaaag

SEQ ID NO: 6029 - RNA, 21 nt, Artificial Sequence
  Synthetic
gucaggauaggaaauacaaag

SEQ ID NO: 6030 - RNA, 19 nt, Artificial Sequence
  Synthetic
gucaagaguuaguacaaag

SEQ ID NO: 6031 - RNA, 21 nt, Artificial Sequence
  Synthetic
gagucaagaguuaguacaaag

SEQ ID NO: 6032 - RNA, 19 nt, Artificial Sequence
  Synthetic
gaaacaaggaguaccaaag

SEQ ID NO: 6033 - RNA, 20 nt, Artificial Sequence
  Synthetic
ggaaacaaggaguaccaaag

SEQ ID NO: 6034 - RNA, 18 nt, Artificial Sequence
  Synthetic
ggucaguuguuaccaaag

SEQ ID NO: 6035 - RNA, 20 nt, Artificial Sequence
  Synthetic
gauauucagccagcccaaag

SEQ ID NO: 6036 - RNA, 23 nt, Artificial Sequence
  Synthetic
gaagauauucagccagcccaaag

SEQ ID NO: 6037 - RNA, 19 nt, Artificial Sequence
  Synthetic
gauuccaauuuagccaaag

SEQ ID NO: 6038 - RNA, 24 nt, Artificial Sequence
  Synthetic
gaacuaaguccuucauuuccaaag

SEQ ID NO: 6039 - RNA, 20 nt, Artificial Sequence
  Synthetic
gauuacagugcugaucaaag

SEQ ID NO: 6040 - RNA, 18 nt, Artificial Sequence
  Synthetic
gaaaacuacauaucaaag

SEQ ID NO: 6041 - RNA, 20 nt, Artificial Sequence
  Synthetic
gagaaaacuacauaucaaag

SEQ ID NO: 6042 - RNA, 24 nt, Artificial Sequence
  Synthetic
gacugagaaaacuacauaucaaag

SEQ ID NO: 6043 - RNA, 19 nt, Artificial Sequence
  Synthetic
guagggaaaccacucaaag

SEQ ID NO: 6044 - RNA, 21 nt, Artificial Sequence
  Synthetic
guguagggaaaccacucaaag

SEQ ID NO: 6045 - RNA, 18 nt, Artificial Sequence
  Synthetic
guuacaguugguucaaag

SEQ ID NO: 6046 - RNA, 22 nt, Artificial Sequence
  Synthetic
guuaguuacaguugguucaaag

SEQ ID NO: 6047 - RNA, 18 nt, Artificial Sequence
  Synthetic
guugugcauauuucaaag

SEQ ID NO: 6048 - RNA, 24 nt, Artificial Sequence
  Synthetic
gaaauuguugugcauauuucaaag

SEQ ID NO: 6049 - RNA, 20 nt, Artificial Sequence
  Synthetic
guuaccuuggauuuucaaag

SEQ ID NO: 6050 - RNA, 21 nt, Artificial Sequence
  Synthetic
gcauuuauuauaaaaagaaag

SEQ ID NO: 6051 - RNA, 21 nt, Artificial Sequence
  Synthetic
guggaaaugcuggaaagaaag

SEQ ID NO: 6052 - RNA, 21 nt, Artificial Sequence
  Synthetic
guuaaaguauaaggaagaaag

SEQ ID NO: 6053 - RNA, 22 nt, Artificial Sequence
  Synthetic
gguuaaaguauaaggaagaaag

SEQ ID NO: 6054 - RNA, 20 nt, Artificial Sequence
  Synthetic
guugaagacuauuaagaaag

SEQ ID NO: 6055 - RNA, 21 nt, Artificial Sequence
  Synthetic
gguugaagacuauuaagaaag

SEQ ID NO: 6056 - RNA, 19 nt, Artificial Sequence
  Synthetic
gcagaucaauuuaagaaag

SEQ ID NO: 6057 - RNA, 20 nt, Artificial Sequence
  Synthetic
gcaacccaaggaagagaaag

SEQ ID NO: 6058 - RNA, 24 nt, Artificial Sequence
  Synthetic
gccagugagagaaaauagagaaag

SEQ ID NO: 6059 - RNA, 24 nt, Artificial Sequence
  Synthetic
gacaauuggaauucuccuagaaag

SEQ ID NO: 6060 - RNA, 18 nt, Artificial Sequence
  Synthetic
gugucacacuguagaaag

SEQ ID NO: 6061 - RNA, 21 nt, Artificial Sequence
  Synthetic
gaugugucacacuguagaaag

SEQ ID NO: 6062 - RNA, 23 nt, Artificial Sequence
  Synthetic
gagaugugucacacuguagaaag

SEQ ID NO: 6063 - RNA, 20 nt, Artificial Sequence
  Synthetic
guagauuuauuuuuagaaag

SEQ ID NO: 6064 - RNA, 21 nt, Artificial Sequence
  Synthetic
gguagauuuauuuuuagaaag

SEQ ID NO: 6065 - RNA, 23 nt, Artificial Sequence
  Synthetic
gcuaaaaaagaauuaagggaaag

SEQ ID NO: 6066 - RNA, 18 nt, Artificial Sequence
  Synthetic
gauuagauauuuggaaag

SEQ ID NO: 6067 - RNA, 21 nt, Artificial Sequence
  Synthetic
gcagauuagauauuuggaaag

SEQ ID NO: 6068 - RNA, 18 nt, Artificial Sequence
  Synthetic
gacgccaccaaaugaaag

SEQ ID NO: 6069 - RNA, 20 nt, Artificial Sequence
  Synthetic
gagacgccaccaaaugaaag

SEQ ID NO: 6070 - RNA, 21 nt, Artificial Sequence
  Synthetic
ggagacgccaccaaaugaaag

SEQ ID NO: 6071 - RNA, 22 nt, Artificial Sequence
  Synthetic
gaucaagagggcagccugaaag

SEQ ID NO: 6072 - RNA, 24 nt, Artificial Sequence
  Synthetic
gugaucaagagggcagccugaaag

SEQ ID NO: 6073 - RNA, 19 nt, Artificial Sequence
  Synthetic
gaaaaguuuguccugaaag

SEQ ID NO: 6074 - RNA, 21 nt, Artificial Sequence
  Synthetic
guuuuaugggauaagugaaag

SEQ ID NO: 6075 - RNA, 18 nt, Artificial Sequence
  Synthetic
gaauguagggggugaaag

SEQ ID NO: 6076 - RNA, 19 nt, Artificial Sequence
  Synthetic
ggaauguagggggugaaag

SEQ ID NO: 6077 - RNA, 23 nt, Artificial Sequence
  Synthetic
gcaacuuuugacagauuugaaag

SEQ ID NO: 6078 - RNA, 24 nt, Artificial Sequence
  Synthetic
gaauauauaaaggcuuuaauaaag

SEQ ID NO: 6079 - RNA, 20 nt, Artificial Sequence
  Synthetic
guaauaacaauuuuauaaag

SEQ ID NO: 6080 - RNA, 22 nt, Artificial Sequence
  Synthetic
gcuuuccuaaauuuuacuaaag

SEQ ID NO: 6081 - RNA, 21 nt, Artificial Sequence
  Synthetic
gauaugugaaacugccuaaag

SEQ ID NO: 6082 - RNA, 23 nt, Artificial Sequence
  Synthetic
gcuaaugucuuguaaaaguaaag

SEQ ID NO: 6083 - RNA, 18 nt, Artificial Sequence
  Synthetic
guauucuauggaguaaag

SEQ ID NO: 6084 - RNA, 24 nt, Artificial Sequence
  Synthetic
guuuuuguauucuauggaguaaag

SEQ ID NO: 6085 - RNA, 19 nt, Artificial Sequence
  Synthetic
gaugguaccuugaguaaag

SEQ ID NO: 6086 - RNA, 18 nt, Artificial Sequence
  Synthetic
ggcuacagauauguaaag

SEQ ID NO: 6087 - RNA, 19 nt, Artificial Sequence
  Synthetic
gggcuacagauauguaaag

SEQ ID NO: 6088 - RNA, 20 nt, Artificial Sequence
  Synthetic
ggggcuacagauauguaaag

SEQ ID NO: 6089 - RNA, 24 nt, Artificial Sequence
  Synthetic
gucaggggcuacagauauguaaag

SEQ ID NO: 6090 - RNA, 19 nt, Artificial Sequence
  Synthetic
gcuucccucagcuguaaag

SEQ ID NO: 6091 - RNA, 20 nt, Artificial Sequence
  Synthetic
ggcuucccucagcuguaaag

SEQ ID NO: 6092 - RNA, 21 nt, Artificial Sequence
  Synthetic
gggcuucccucagcuguaaag

SEQ ID NO: 6093 - RNA, 24 nt, Artificial Sequence
  Synthetic
guacuuuuaugcuaacuauuaaag

SEQ ID NO: 6094 - RNA, 20 nt, Artificial Sequence
  Synthetic
gcaagaaacuuuccuuaaag

SEQ ID NO: 6095 - RNA, 22 nt, Artificial Sequence
  Synthetic
gugcaagaaacuuuccuuaaag

SEQ ID NO: 6096 - RNA, 23 nt, Artificial Sequence
  Synthetic
ggugcaagaaacuuuccuuaaag

SEQ ID NO: 6097 - RNA, 21 nt, Artificial Sequence
  Synthetic
gauaagcuuuuuuuuuuaaag

SEQ ID NO: 6098 - RNA, 18 nt, Artificial Sequence
  Synthetic
gcucugaagauuaacaag

SEQ ID NO: 6099 - RNA, 21 nt, Artificial Sequence
  Synthetic
gauguaacaaauuaccacaag

SEQ ID NO: 6100 - RNA, 21 nt, Artificial Sequence
  Synthetic
guuuucaugaagaaucacaag

SEQ ID NO: 6101 - RNA, 24 nt, Artificial Sequence
  Synthetic
gaaguuuucaugaagaaucacaag

SEQ ID NO: 6102 - RNA, 20 nt, Artificial Sequence
  Synthetic
gaaggaggugaugauacaag

SEQ ID NO: 6103 - RNA, 22 nt, Artificial Sequence
  Synthetic
gagaaggaggugaugauacaag

SEQ ID NO: 6104 - RNA, 24 nt, Artificial Sequence
  Synthetic
gagagaaggaggugaugauacaag

SEQ ID NO: 6105 - RNA, 20 nt, Artificial Sequence
  Synthetic
guaaaauauaauauuacaag

SEQ ID NO: 6106 - RNA, 20 nt, Artificial Sequence
  Synthetic
guuuucuuccguaccccaag

SEQ ID NO: 6107 - RNA, 22 nt, Artificial Sequence
  Synthetic
gcuccuacgcucaccucccaag

SEQ ID NO: 6108 - RNA, 21 nt, Artificial Sequence
  Synthetic
gcauauugcuuacaugccaag

SEQ ID NO: 6109 - RNA, 24 nt, Artificial Sequence
  Synthetic
guugcauauugcuuacaugccaag

SEQ ID NO: 6110 - RNA, 19 nt, Artificial Sequence
  Synthetic
gaaauaaaaccccuccaag

SEQ ID NO: 6111 - RNA, 20 nt, Artificial Sequence
  Synthetic
ggaaauaaaaccccuccaag

SEQ ID NO: 6112 - RNA, 22 nt, Artificial Sequence
  Synthetic
gaggaaauaaaaccccuccaag

SEQ ID NO: 6113 - RNA, 19 nt, Artificial Sequence
  Synthetic
guagguaauccucuccaag

SEQ ID NO: 6114 - RNA, 20 nt, Artificial Sequence
  Synthetic
gguagguaauccucuccaag

SEQ ID NO: 6115 - RNA, 21 nt, Artificial Sequence
  Synthetic
ggguagguaauccucuccaag

SEQ ID NO: 6116 - RNA, 21 nt, Artificial Sequence
  Synthetic
gaauagagcaauaaguccaag

SEQ ID NO: 6117 - RNA, 23 nt, Artificial Sequence
  Synthetic
gaagagcccaggaugaguccaag

SEQ ID NO: 6118 - RNA, 20 nt, Artificial Sequence
  Synthetic
guaacucauucaguuccaag

SEQ ID NO: 6119 - RNA, 19 nt, Artificial Sequence
  Synthetic
gaagaucucuuuaagcaag

SEQ ID NO: 6120 - RNA, 24 nt, Artificial Sequence
  Synthetic
gccucuugugaagagugacgcaag

SEQ ID NO: 6121 - RNA, 24 nt, Artificial Sequence
  Synthetic
gauuuauagagaaaaccaggcaag

SEQ ID NO: 6122 - RNA, 19 nt, Artificial Sequence
  Synthetic
guugauuguuguaugcaag

SEQ ID NO: 6123 - RNA, 20 nt, Artificial Sequence
  Synthetic
gguugauuguuguaugcaag

SEQ ID NO: 6124 - RNA, 21 nt, Artificial Sequence
  Synthetic
ggguugauuguuguaugcaag

SEQ ID NO: 6125 - RNA, 22 nt, Artificial Sequence
  Synthetic
gggguugauuguuguaugcaag

SEQ ID NO: 6126 - RNA, 20 nt, Artificial Sequence
  Synthetic
gcaacauagcuuuuugcaag

SEQ ID NO: 6127 - RNA, 21 nt, Artificial Sequence
  Synthetic
ggcaacauagcuuuuugcaag

SEQ ID NO: 6128 - RNA, 22 nt, Artificial Sequence
  Synthetic
gggcaacauagcuuuuugcaag

SEQ ID NO: 6129 - RNA, 21 nt, Artificial Sequence
  Synthetic
gcaaagcacuaggaaaucaag

SEQ ID NO: 6130 - RNA, 22 nt, Artificial Sequence
  Synthetic
ggcaaagcacuaggaaaucaag

SEQ ID NO: 6131 - RNA, 22 nt, Artificial Sequence
  Synthetic
guauagaauccuugguaucaag

SEQ ID NO: 6132 - RNA, 18 nt, Artificial Sequence
  Synthetic
gcugcaaaaugugucaag

SEQ ID NO: 6133 - RNA, 19 nt, Artificial Sequence
  Synthetic
ggcugcaaaaugugucaag

SEQ ID NO: 6134 - RNA, 18 nt, Artificial Sequence
  Synthetic
guagagaagugguucaag

SEQ ID NO: 6135 - RNA, 21 nt, Artificial Sequence
  Synthetic
gcuagugaguuaagaaagaag

SEQ ID NO: 6136 - RNA, 20 nt, Artificial Sequence
  Synthetic
guugcuuauuuuagaagaag

SEQ ID NO: 6137 - RNA, 21 nt, Artificial Sequence
  Synthetic
gguugcuuauuuuagaagaag

SEQ ID NO: 6138 - RNA, 24 nt, Artificial Sequence
  Synthetic
gaugguugcuuauuuuagaagaag

SEQ ID NO: 6139 - RNA, 19 nt, Artificial Sequence
  Synthetic
gauguaagaaggccagaag

SEQ ID NO: 6140 - RNA, 20 nt, Artificial Sequence
  Synthetic
ggauguaagaaggccagaag

SEQ ID NO: 6141 - RNA, 23 nt, Artificial Sequence
  Synthetic
gaaggauguaagaaggccagaag

SEQ ID NO: 6142 - RNA, 18 nt, Artificial Sequence
  Synthetic
gggccauaguagcagaag

SEQ ID NO: 6143 - RNA, 22 nt, Artificial Sequence
  Synthetic
gaaagggccauaguagcagaag

SEQ ID NO: 6144 - RNA, 24 nt, Artificial Sequence
  Synthetic
gagaaagggccauaguagcagaag

SEQ ID NO: 6145 - RNA, 21 nt, Artificial Sequence
  Synthetic
guuuuucuuauucaucagaag

SEQ ID NO: 6146 - RNA, 23 nt, Artificial Sequence
  Synthetic
guguuuuucuuauucaucagaag

SEQ ID NO: 6147 - RNA, 18 nt, Artificial Sequence
  Synthetic
gugauuggagaucagaag

SEQ ID NO: 6148 - RNA, 21 nt, Artificial Sequence
  Synthetic
guugugauuggagaucagaag

SEQ ID NO: 6149 - RNA, 20 nt, Artificial Sequence
  Synthetic
gcauuauuccucaagagaag

SEQ ID NO: 6150 - RNA, 19 nt, Artificial Sequence
  Synthetic
guguuuuuugacagagaag

SEQ ID NO: 6151 - RNA, 20 nt, Artificial Sequence
  Synthetic
gguguuuuuugacagagaag

SEQ ID NO: 6152 - RNA, 21 nt, Artificial Sequence
  Synthetic
gauaguauauuauaggagaag

SEQ ID NO: 6153 - RNA, 22 nt, Artificial Sequence
  Synthetic
ggauaguauauuauaggagaag

SEQ ID NO: 6154 - RNA, 24 nt, Artificial Sequence
  Synthetic
gaggauaguauauuauaggagaag

SEQ ID NO: 6155 - RNA, 24 nt, Artificial Sequence
  Synthetic
guaaccuguugucccuaggagaag

SEQ ID NO: 6156 - RNA, 22 nt, Artificial Sequence
  Synthetic
gacauaugagaacaccuagaag

SEQ ID NO: 6157 - RNA, 22 nt, Artificial Sequence
  Synthetic
gcauuucucucaguccuagaag

SEQ ID NO: 6158 - RNA, 21 nt, Artificial Sequence
  Synthetic
guuugaguaacucuguagaag

SEQ ID NO: 6159 - RNA, 18 nt, Artificial Sequence
  Synthetic
gcuuugcacuguuagaag

SEQ ID NO: 6160 - RNA, 20 nt, Artificial Sequence
  Synthetic
gugcuuugcacuguuagaag

SEQ ID NO: 6161 - RNA, 20 nt, Artificial Sequence
  Synthetic
gacauuccacuaacacgaag

SEQ ID NO: 6162 - RNA, 22 nt, Artificial Sequence
  Synthetic
gugacauuccacuaacacgaag

SEQ ID NO: 6163 - RNA, 24 nt, Artificial Sequence
  Synthetic
gccccucuuccccuauuaaggaag

SEQ ID NO: 6164 - RNA, 21 nt, Artificial Sequence
  Synthetic
gauuguaagcagaagaggaag

SEQ ID NO: 6165 - RNA, 20 nt, Artificial Sequence
  Synthetic
gaagaugacaagugaggaag

SEQ ID NO: 6166 - RNA, 21 nt, Artificial Sequence
  Synthetic
ggaagaugacaagugaggaag

SEQ ID NO: 6167 - RNA, 19 nt, Artificial Sequence
  Synthetic
gcugaagugguugaggaag

SEQ ID NO: 6168 - RNA, 22 nt, Artificial Sequence
  Synthetic
gaauaaguguuagaauaggaag

SEQ ID NO: 6169 - RNA, 23 nt, Artificial Sequence
  Synthetic
ggaauaaguguuagaauaggaag

SEQ ID NO: 6170 - RNA, 23 nt, Artificial Sequence
  Synthetic
gcuuaaacucuuccaaagggaag

SEQ ID NO: 6171 - RNA, 18 nt, Artificial Sequence
  Synthetic
gcugaaguaaccgggaag

SEQ ID NO: 6172 - RNA, 23 nt, Artificial Sequence
  Synthetic
gacggaagcaaggcagugggaag

SEQ ID NO: 6173 - RNA, 21 nt, Artificial Sequence
  Synthetic
gaggaaaggaggaaauggaag

SEQ ID NO: 6174 - RNA, 23 nt, Artificial Sequence
  Synthetic
gugaggaaaggaggaaauggaag

SEQ ID NO: 6175 - RNA, 19 nt, Artificial Sequence
  Synthetic
guuaacagugggguggaag

SEQ ID NO: 6176 - RNA, 24 nt, Artificial Sequence
  Synthetic
gaccuguuaacagugggguggaag

SEQ ID NO: 6177 - RNA, 19 nt, Artificial Sequence
  Synthetic
gugcagugaucccaugaag

SEQ ID NO: 6178 - RNA, 20 nt, Artificial Sequence
  Synthetic
gacauuguucuauucugaag

SEQ ID NO: 6179 - RNA, 23 nt, Artificial Sequence
  Synthetic
guagacauuguucuauucugaag

SEQ ID NO: 6180 - RNA, 18 nt, Artificial Sequence
  Synthetic
guguguauacaagugaag

SEQ ID NO: 6181 - RNA, 23 nt, Artificial Sequence
  Synthetic
gaucuguguguauacaagugaag

SEQ ID NO: 6182 - RNA, 18 nt, Artificial Sequence
  Synthetic
guaaaaacuccugugaag

SEQ ID NO: 6183 - RNA, 20 nt, Artificial Sequence
  Synthetic
gaguaaaaacuccugugaag

SEQ ID NO: 6184 - RNA, 22 nt, Artificial Sequence
  Synthetic
gagaguaaaaacuccugugaag

SEQ ID NO: 6185 - RNA, 19 nt, Artificial Sequence
  Synthetic
gugcuauagagauuugaag

SEQ ID NO: 6186 - RNA, 20 nt, Artificial Sequence
  Synthetic
ggugcuauagagauuugaag

SEQ ID NO: 6187 - RNA, 18 nt, Artificial Sequence
  Synthetic
gcauacuuuuauuugaag

SEQ ID NO: 6188 - RNA, 19 nt, Artificial Sequence
  Synthetic
ggcauacuuuuauuugaag

SEQ ID NO: 6189 - RNA, 20 nt, Artificial Sequence
  Synthetic
gggcauacuuuuauuugaag

SEQ ID NO: 6190 - RNA, 23 nt, Artificial Sequence
  Synthetic
gcagggcauacuuuuauuugaag

SEQ ID NO: 6191 - RNA, 24 nt, Artificial Sequence
  Synthetic
ggcagggcauacuuuuauuugaag

SEQ ID NO: 6192 - RNA, 18 nt, Artificial Sequence
  Synthetic
gcagguacggguuugaag

SEQ ID NO: 6193 - RNA, 20 nt, Artificial Sequence
  Synthetic
gagcagguacggguuugaag

SEQ ID NO: 6194 - RNA, 21 nt, Artificial Sequence
  Synthetic
ggagcagguacggguuugaag

SEQ ID NO: 6195 - RNA, 24 nt, Artificial Sequence
  Synthetic
gauggagcagguacggguuugaag

SEQ ID NO: 6196 - RNA, 19 nt, Artificial Sequence
  Synthetic
gugacuacaauaaaauaag

SEQ ID NO: 6197 - RNA, 19 nt, Artificial Sequence
  Synthetic
gugugagaggggaaauaag

SEQ ID NO: 6198 - RNA, 21 nt, Artificial Sequence
  Synthetic
gugugugagaggggaaauaag

SEQ ID NO: 6199 - RNA, 22 nt, Artificial Sequence
  Synthetic
gcuuuacaauaucuuacauaag

SEQ ID NO: 6200 - RNA, 22 nt, Artificial Sequence
  Synthetic
gauauuaggggaaaggcauaag

SEQ ID NO: 6201 - RNA, 18 nt, Artificial Sequence
  Synthetic
guuguuuucuugcauaag

SEQ ID NO: 6202 - RNA, 22 nt, Artificial Sequence
  Synthetic
guuaguuguuuucuugcauaag

SEQ ID NO: 6203 - RNA, 18 nt, Artificial Sequence
  Synthetic
gucauauuucuucauaag

SEQ ID NO: 6204 - RNA, 18 nt, Artificial Sequence
  Synthetic
gaguccaagguggauaag

SEQ ID NO: 6205 - RNA, 21 nt, Artificial Sequence
  Synthetic
gaugaguccaagguggauaag

SEQ ID NO: 6206 - RNA, 22 nt, Artificial Sequence
  Synthetic
ggaugaguccaagguggauaag

SEQ ID NO: 6207 - RNA, 24 nt, Artificial Sequence
  Synthetic
gaauauuucaugagagauuauaag

SEQ ID NO: 6208 - RNA, 19 nt, Artificial Sequence
  Synthetic
guggaggggaagaacuaag

SEQ ID NO: 6209 - RNA, 21 nt, Artificial Sequence
  Synthetic
guguggaggggaagaacuaag

SEQ ID NO: 6210 - RNA, 22 nt, Artificial Sequence
  Synthetic
gguguggaggggaagaacuaag

SEQ ID NO: 6211 - RNA, 23 nt, Artificial Sequence
  Synthetic
ggguguggaggggaagaacuaag

SEQ ID NO: 6212 - RNA, 19 nt, Artificial Sequence
  Synthetic
gcuuuuuuacuuaccuaag

SEQ ID NO: 6213 - RNA, 22 nt, Artificial Sequence
  Synthetic
guaucucgaaaagaacccuaag

SEQ ID NO: 6214 - RNA, 22 nt, Artificial Sequence
  Synthetic
guuuuauuuaaggagcccuaag

SEQ ID NO: 6215 - RNA, 19 nt, Artificial Sequence
  Synthetic
gcuucuuaaacucccuaag

SEQ ID NO: 6216 - RNA, 21 nt, Artificial Sequence
  Synthetic
gugcuucuuaaacucccuaag

SEQ ID NO: 6217 - RNA, 24 nt, Artificial Sequence
  Synthetic
gaagugcuucuuaaacucccuaag

SEQ ID NO: 6218 - RNA, 22 nt, Artificial Sequence
  Synthetic
gacaaucuaggcuuauccuaag

SEQ ID NO: 6219 - RNA, 18 nt, Artificial Sequence
  Synthetic
gucuauggacaggcuaag

SEQ ID NO: 6220 - RNA, 21 nt, Artificial Sequence
  Synthetic
gcuagauuaucugaaaguaag

SEQ ID NO: 6221 - RNA, 23 nt, Artificial Sequence
  Synthetic
gagcuagauuaucugaaaguaag

SEQ ID NO: 6222 - RNA, 20 nt, Artificial Sequence
  Synthetic
gauaccuuauuucaaguaag

SEQ ID NO: 6223 - RNA, 19 nt, Artificial Sequence
  Synthetic
gugaggcagacagaguaag

SEQ ID NO: 6224 - RNA, 22 nt, Artificial Sequence
  Synthetic
gaagugaggcagacagaguaag

SEQ ID NO: 6225 - RNA, 20 nt, Artificial Sequence
  Synthetic
guugaguggguaggaguaag

SEQ ID NO: 6226 - RNA, 19 nt, Artificial Sequence
  Synthetic
guuagagacaaugaguaag

SEQ ID NO: 6227 - RNA, 22 nt, Artificial Sequence
  Synthetic
guuaauaauaacaauauguaag

SEQ ID NO: 6228 - RNA, 23 nt, Artificial Sequence
  Synthetic
gguuaauaauaacaauauguaag

SEQ ID NO: 6229 - RNA, 20 nt, Artificial Sequence
  Synthetic
gaaucagcuuuauauguaag

SEQ ID NO: 6230 - RNA, 22 nt, Artificial Sequence
  Synthetic
gagaaucagcuuuauauguaag

SEQ ID NO: 6231 - RNA, 23 nt, Artificial Sequence
  Synthetic
ggagaaucagcuuuauauguaag

SEQ ID NO: 6232 - RNA, 20 nt, Artificial Sequence
  Synthetic
guuccacauagaucuguaag

SEQ ID NO: 6233 - RNA, 22 nt, Artificial Sequence
  Synthetic
guguuccacauagaucuguaag

SEQ ID NO: 6234 - RNA, 23 nt, Artificial Sequence
  Synthetic
gguguuccacauagaucuguaag

SEQ ID NO: 6235 - RNA, 21 nt, Artificial Sequence
  Synthetic
gaauuggccuuagguuguaag

SEQ ID NO: 6236 - RNA, 22 nt, Artificial Sequence
  Synthetic
gcccaauaacuuauuuuguaag

SEQ ID NO: 6237 - RNA, 24 nt, Artificial Sequence
  Synthetic
gagcccaauaacuuauuuuguaag

SEQ ID NO: 6238 - RNA, 19 nt, Artificial Sequence
  Synthetic
guuuuucuaugacauuaag

SEQ ID NO: 6239 - RNA, 23 nt, Artificial Sequence
  Synthetic
gaauguuuuucuaugacauuaag

SEQ ID NO: 6240 - RNA, 18 nt, Artificial Sequence
  Synthetic
guaacuaaacagauuaag

SEQ ID NO: 6241 - RNA, 18 nt, Artificial Sequence
  Synthetic
gcagugaaugcgauuaag

SEQ ID NO: 6242 - RNA, 18 nt, Artificial Sequence
  Synthetic
guuuggugaaagguuaag

SEQ ID NO: 6243 - RNA, 22 nt, Artificial Sequence
  Synthetic
guaaguuuggugaaagguuaag

SEQ ID NO: 6244 - RNA, 24 nt, Artificial Sequence
  Synthetic
gaaacaacacuauauaaauuuaag

SEQ ID NO: 6245 - RNA, 20 nt, Artificial Sequence
  Synthetic
guuggagucugagauuuaag

SEQ ID NO: 6246 - RNA, 22 nt, Artificial Sequence
  Synthetic
guguuggagucugagauuuaag

SEQ ID NO: 6247 - RNA, 23 nt, Artificial Sequence
  Synthetic
gguguuggagucugagauuuaag

SEQ ID NO: 6248 - RNA, 24 nt, Artificial Sequence
  Synthetic
gauauccauauugagguauuuaag

SEQ ID NO: 6249 - RNA, 21 nt, Artificial Sequence
  Synthetic
gauuuaaagaacuauuuuaag

SEQ ID NO: 6250 - RNA, 20 nt, Artificial Sequence
  Synthetic
gcuuccauaggaaaaaacag

SEQ ID NO: 6251 - RNA, 18 nt, Artificial Sequence
  Synthetic
guuuuauuaccaaaacag

SEQ ID NO: 6252 - RNA, 18 nt, Artificial Sequence
  Synthetic
ggugauagugugaaacag

SEQ ID NO: 6253 - RNA, 21 nt, Artificial Sequence
  Synthetic
gauggugauagugugaaacag

SEQ ID NO: 6254 - RNA, 23 nt, Artificial Sequence
  Synthetic
gugauggugauagugugaaacag

SEQ ID NO: 6255 - RNA, 20 nt, Artificial Sequence
  Synthetic
guucauccuuaucccaacag

SEQ ID NO: 6256 - RNA, 18 nt, Artificial Sequence
  Synthetic
ggaaagaaacagcaacag

SEQ ID NO: 6257 - RNA, 20 nt, Artificial Sequence
  Synthetic
guggaaagaaacagcaacag

SEQ ID NO: 6258 - RNA, 22 nt, Artificial Sequence
  Synthetic
gaguggaaagaaacagcaacag

SEQ ID NO: 6259 - RNA, 19 nt, Artificial Sequence
  Synthetic
gaacauauucugagaacag

SEQ ID NO: 6260 - RNA, 20 nt, Artificial Sequence
  Synthetic
ggaacauauucugagaacag

SEQ ID NO: 6261 - RNA, 24 nt, Artificial Sequence
  Synthetic
guauggaacauauucugagaacag

SEQ ID NO: 6262 - RNA, 24 nt, Artificial Sequence
  Synthetic
guauccauugcuaaauaguaacag

SEQ ID NO: 6263 - RNA, 18 nt, Artificial Sequence
  Synthetic
gauauuugcuacacacag

SEQ ID NO: 6264 - RNA, 23 nt, Artificial Sequence
  Synthetic
gcuuuucuggcagccccacacag

SEQ ID NO: 6265 - RNA, 21 nt, Artificial Sequence
  Synthetic
guauuauuacccaacccacag

SEQ ID NO: 6266 - RNA, 23 nt, Artificial Sequence
  Synthetic
guguauuauuacccaacccacag

SEQ ID NO: 6267 - RNA, 19 nt, Artificial Sequence
  Synthetic
gauguguggggaugcacag

SEQ ID NO: 6268 - RNA, 20 nt, Artificial Sequence
  Synthetic
ggauguguggggaugcacag

SEQ ID NO: 6269 - RNA, 23 nt, Artificial Sequence
  Synthetic
gauggauguguggggaugcacag

SEQ ID NO: 6270 - RNA, 24 nt, Artificial Sequence
  Synthetic
ggauggauguguggggaugcacag

SEQ ID NO: 6271 - RNA, 19 nt, Artificial Sequence
  Synthetic
gagccaguaaauaucacag

SEQ ID NO: 6272 - RNA, 22 nt, Artificial Sequence
  Synthetic
guugagccaguaaauaucacag

SEQ ID NO: 6273 - RNA, 23 nt, Artificial Sequence
  Synthetic
gacggacaaaauguguaagacag

SEQ ID NO: 6274 - RNA, 24 nt, Artificial Sequence
  Synthetic
ggacggacaaaauguguaagacag

SEQ ID NO: 6275 - RNA, 19 nt, Artificial Sequence
  Synthetic
gcgaaggagacagcgacag

SEQ ID NO: 6276 - RNA, 21 nt, Artificial Sequence
  Synthetic
gagcgaaggagacagcgacag

SEQ ID NO: 6277 - RNA, 22 nt, Artificial Sequence
  Synthetic
ggagcgaaggagacagcgacag

SEQ ID NO: 6278 - RNA, 18 nt, Artificial Sequence
  Synthetic
gcauuucugugaggacag

SEQ ID NO: 6279 - RNA, 19 nt, Artificial Sequence
  Synthetic
ggcauuucugugaggacag

SEQ ID NO: 6280 - RNA, 22 nt, Artificial Sequence
  Synthetic
gcaggcauuucugugaggacag

SEQ ID NO: 6281 - RNA, 20 nt, Artificial Sequence
  Synthetic
gacaaaaaauuuugggacag

SEQ ID NO: 6282 - RNA, 22 nt, Artificial Sequence
  Synthetic
guauuucaggaauugaugacag

SEQ ID NO: 6283 - RNA, 23 nt, Artificial Sequence
  Synthetic
gguauuucaggaauugaugacag

SEQ ID NO: 6284 - RNA, 24 nt, Artificial Sequence
  Synthetic
ggguauuucaggaauugaugacag

SEQ ID NO: 6285 - RNA, 22 nt, Artificial Sequence
  Synthetic
guuccucaaagaccacugacag

SEQ ID NO: 6286 - RNA, 21 nt, Artificial Sequence
  Synthetic
gccaugucuacuuucugacag

SEQ ID NO: 6287 - RNA, 18 nt, Artificial Sequence
  Synthetic
ggauagcuuguccuacag

SEQ ID NO: 6288 - RNA, 23 nt, Artificial Sequence
  Synthetic
gcaauggauagcuuguccuacag

SEQ ID NO: 6289 - RNA, 22 nt, Artificial Sequence
  Synthetic
guauauaagauaaaaaguacag

SEQ ID NO: 6290 - RNA, 22 nt, Artificial Sequence
  Synthetic
gauaaaucucucaugcguacag

SEQ ID NO: 6291 - RNA, 19 nt, Artificial Sequence
  Synthetic
gauuaauacaaauuuacag

SEQ ID NO: 6292 - RNA, 20 nt, Artificial Sequence
  Synthetic
gcugaaccuggauuuuacag

SEQ ID NO: 6293 - RNA, 19 nt, Artificial Sequence
  Synthetic
gauuaaguauuuaaaccag

SEQ ID NO: 6294 - RNA, 21 nt, Artificial Sequence
  Synthetic
guuuucaaugacgugaaccag

SEQ ID NO: 6295 - RNA, 24 nt, Artificial Sequence
  Synthetic
gcaguuuucaaugacgugaaccag

SEQ ID NO: 6296 - RNA, 21 nt, Artificial Sequence
  Synthetic
gccauugggguuuuuaaccag

SEQ ID NO: 6297 - RNA, 22 nt, Artificial Sequence
  Synthetic
guuucaaaucccaagacaccag

SEQ ID NO: 6298 - RNA, 23 nt, Artificial Sequence
  Synthetic
guaucuugacuacaaugcaccag

SEQ ID NO: 6299 - RNA, 18 nt, Artificial Sequence
  Synthetic
gucccaaaaacagaccag

SEQ ID NO: 6300 - RNA, 20 nt, Artificial Sequence
  Synthetic
gugucccaaaaacagaccag

SEQ ID NO: 6301 - RNA, 19 nt, Artificial Sequence
  Synthetic
guuuuccauaaaauaccag

SEQ ID NO: 6302 - RNA, 21 nt, Artificial Sequence
  Synthetic
guguuuuccauaaaauaccag

SEQ ID NO: 6303 - RNA, 22 nt, Artificial Sequence
  Synthetic
guuuauagauucuugagcccag

SEQ ID NO: 6304 - RNA, 24 nt, Artificial Sequence
  Synthetic
guguuuauagauucuugagcccag

SEQ ID NO: 6305 - RNA, 24 nt, Artificial Sequence
  Synthetic
gcaacuccacuccucguagcccag

SEQ ID NO: 6306 - RNA, 22 nt, Artificial Sequence
  Synthetic
gccauaugggcucugcgcccag

SEQ ID NO: 6307 - RNA, 21 nt, Artificial Sequence
  Synthetic
gcuuguauauauaaugcccag

SEQ ID NO: 6308 - RNA, 21 nt, Artificial Sequence
  Synthetic
gcuucagcuagcuggucccag

SEQ ID NO: 6309 - RNA, 24 nt, Artificial Sequence
  Synthetic
gcaacccaaagaguaacuagccag

SEQ ID NO: 6310 - RNA, 18 nt, Artificial Sequence
  Synthetic
guccaauccaugauccag

SEQ ID NO: 6311 - RNA, 20 nt, Artificial Sequence
  Synthetic
gaguccaauccaugauccag

SEQ ID NO: 6312 - RNA, 20 nt, Artificial Sequence
  Synthetic
gcagagaaugaaauauccag

SEQ ID NO: 6313 - RNA, 21 nt, Artificial Sequence
  Synthetic
ggcagagaaugaaauauccag

SEQ ID NO: 6314 - RNA, 18 nt, Artificial Sequence
  Synthetic
ggggaaaaaguaguccag

SEQ ID NO: 6315 - RNA, 19 nt, Artificial Sequence
  Synthetic
gggggaaaaaguaguccag

SEQ ID NO: 6316 - RNA, 20 nt, Artificial Sequence
  Synthetic
ggggggaaaaaguaguccag

SEQ ID NO: 6317 - RNA, 21 nt, Artificial Sequence
  Synthetic
gggggggaaaaaguaguccag

SEQ ID NO: 6318 - RNA, 20 nt, Artificial Sequence
  Synthetic
gauggauauggaagguccag

SEQ ID NO: 6319 - RNA, 24 nt, Artificial Sequence
  Synthetic
gaaugauggauauggaagguccag

SEQ ID NO: 6320 - RNA, 24 nt, Artificial Sequence
  Synthetic
guuuccacauacaugcauguccag

SEQ ID NO: 6321 - RNA, 22 nt, Artificial Sequence
  Synthetic
gcacacuauugaaauuguccag

SEQ ID NO: 6322 - RNA, 20 nt, Artificial Sequence
  Synthetic
gaaucauuauuuccuuccag

SEQ ID NO: 6323 - RNA, 24 nt, Artificial Sequence
  Synthetic
gauagaaucauuauuuccuuccag

SEQ ID NO: 6324 - RNA, 19 nt, Artificial Sequence
  Synthetic
gucauacuguaaguuccag

SEQ ID NO: 6325 - RNA, 22 nt, Artificial Sequence
  Synthetic
gcugucauacuguaaguuccag

SEQ ID NO: 6326 - RNA, 24 nt, Artificial Sequence
  Synthetic
gcaaacaguagcaacuggaagcag

SEQ ID NO: 6327 - RNA, 21 nt, Artificial Sequence
  Synthetic
gucaaaaagccaguacagcag

SEQ ID NO: 6328 - RNA, 22 nt, Artificial Sequence
  Synthetic
ggucaaaaagccaguacagcag

SEQ ID NO: 6329 - RNA, 23 nt, Artificial Sequence
  Synthetic
gucucccaacaaaucuccagcag

SEQ ID NO: 6330 - RNA, 24 nt, Artificial Sequence
  Synthetic
gaacuuuuagagugcaugcagcag

SEQ ID NO: 6331 - RNA, 23 nt, Artificial Sequence
  Synthetic
gacggaguucaagacuucagcag

SEQ ID NO: 6332 - RNA, 22 nt, Artificial Sequence
  Synthetic
gcaauuguaaguuucugagcag

SEQ ID NO: 6333 - RNA, 24 nt, Artificial Sequence
  Synthetic
gagcaauuguaaguuucugagcag

SEQ ID NO: 6334 - RNA, 22 nt, Artificial Sequence
  Synthetic
gccaccagaagauuuugagcag

SEQ ID NO: 6335 - RNA, 24 nt, Artificial Sequence
  Synthetic
gagccaccagaagauuuugagcag

SEQ ID NO: 6336 - RNA, 22 nt, Artificial Sequence
  Synthetic
gaaauugaagaaacaguagcag

SEQ ID NO: 6337 - RNA, 18 nt, Artificial Sequence
  Synthetic
gggagggaguaaaggcag

SEQ ID NO: 6338 - RNA, 22 nt, Artificial Sequence
  Synthetic
gccugggagggaguaaaggcag

SEQ ID NO: 6339 - RNA, 21 nt, Artificial Sequence
  Synthetic
gauucuugccaaugcaggcag

SEQ ID NO: 6340 - RNA, 22 nt, Artificial Sequence
  Synthetic
ggauucuugccaaugcaggcag

SEQ ID NO: 6341 - RNA, 24 nt, Artificial Sequence
  Synthetic
guggauucuugccaaugcaggcag

SEQ ID NO: 6342 - RNA, 22 nt, Artificial Sequence
  Synthetic
gccacucuauuuggagaggcag

SEQ ID NO: 6343 - RNA, 23 nt, Artificial Sequence
  Synthetic
ggccacucuauuuggagaggcag

SEQ ID NO: 6344 - RNA, 18 nt, Artificial Sequence
  Synthetic
gaguuuagguaggggcag

SEQ ID NO: 6345 - RNA, 19 nt, Artificial Sequence
  Synthetic
gcucagauggcuucugcag

SEQ ID NO: 6346 - RNA, 21 nt, Artificial Sequence
  Synthetic
gagcucagauggcuucugcag

SEQ ID NO: 6347 - RNA, 22 nt, Artificial Sequence
  Synthetic
ggagcucagauggcuucugcag

SEQ ID NO: 6348 - RNA, 23 nt, Artificial Sequence
  Synthetic
gggagcucagauggcuucugcag

SEQ ID NO: 6349 - RNA, 21 nt, Artificial Sequence
  Synthetic
guaaagucacaaagagugcag

SEQ ID NO: 6350 - RNA, 23 nt, Artificial Sequence
  Synthetic
gaauuuauguuccuugugugcag

SEQ ID NO: 6351 - RNA, 18 nt, Artificial Sequence
  Synthetic
gucuuuuauauuuugcag

SEQ ID NO: 6352 - RNA, 22 nt, Artificial Sequence
  Synthetic
gcuuuaauaaacucuuuugcag

SEQ ID NO: 6353 - RNA, 19 nt, Artificial Sequence
  Synthetic
guaaacuaucacaaaucag

SEQ ID NO: 6354 - RNA, 18 nt, Artificial Sequence
  Synthetic
ggccaugucccaaaucag

SEQ ID NO: 6355 - RNA, 23 nt, Artificial Sequence
  Synthetic
gcccuggccaugucccaaaucag

SEQ ID NO: 6356 - RNA, 21 nt, Artificial Sequence
  Synthetic
guugaaagaauucagaaucag

SEQ ID NO: 6357 - RNA, 23 nt, Artificial Sequence
  Synthetic
guuuaaguuuauuaauacaucag

SEQ ID NO: 6358 - RNA, 20 nt, Artificial Sequence
  Synthetic
gcaggagaugucaccaucag

SEQ ID NO: 6359 - RNA, 23 nt, Artificial Sequence
  Synthetic
gcagcaggagaugucaccaucag

SEQ ID NO: 6360 - RNA, 24 nt, Artificial Sequence
  Synthetic
ggcagcaggagaugucaccaucag

SEQ ID NO: 6361 - RNA, 19 nt, Artificial Sequence
  Synthetic
gucuagaaccagucaucag

SEQ ID NO: 6362 - RNA, 21 nt, Artificial Sequence
  Synthetic
gccuuaaaacuucaggaucag

SEQ ID NO: 6363 - RNA, 18 nt, Artificial Sequence
  Synthetic
gugagggaauaugaucag

SEQ ID NO: 6364 - RNA, 19 nt, Artificial Sequence
  Synthetic
ggugagggaauaugaucag

SEQ ID NO: 6365 - RNA, 20 nt, Artificial Sequence
  Synthetic
gccucacuaucccugaucag

SEQ ID NO: 6366 - RNA, 23 nt, Artificial Sequence
  Synthetic
gcugccucacuaucccugaucag

SEQ ID NO: 6367 - RNA, 20 nt, Artificial Sequence
  Synthetic
gauuucaagugaaauaucag

SEQ ID NO: 6368 - RNA, 22 nt, Artificial Sequence
  Synthetic
gagauuucaagugaaauaucag

SEQ ID NO: 6369 - RNA, 23 nt, Artificial Sequence
  Synthetic
ggagauuucaagugaaauaucag

SEQ ID NO: 6370 - RNA, 22 nt, Artificial Sequence
  Synthetic
gaaaaaaaacagaguauaucag

SEQ ID NO: 6371 - RNA, 23 nt, Artificial Sequence
  Synthetic
ggaaaaaaaacagaguauaucag

SEQ ID NO: 6372 - RNA, 23 nt, Artificial Sequence
  Synthetic
gcucaacaaauauugcuuaucag

SEQ ID NO: 6373 - RNA, 22 nt, Artificial Sequence
  Synthetic
gaaauuguaaauaagaacucag

SEQ ID NO: 6374 - RNA, 18 nt, Artificial Sequence
  Synthetic
guacacaucagaacucag

SEQ ID NO: 6375 - RNA, 23 nt, Artificial Sequence
  Synthetic
gauuuguacacaucagaacucag

SEQ ID NO: 6376 - RNA, 24 nt, Artificial Sequence
  Synthetic
ggauuuguacacaucagaacucag

SEQ ID NO: 6377 - RNA, 18 nt, Artificial Sequence
  Synthetic
gaaaaagcauacccucag

SEQ ID NO: 6378 - RNA, 20 nt, Artificial Sequence
  Synthetic
gugaaaaagcauacccucag

SEQ ID NO: 6379 - RNA, 21 nt, Artificial Sequence
  Synthetic
ggugaaaaagcauacccucag

SEQ ID NO: 6380 - RNA, 22 nt, Artificial Sequence
  Synthetic
gggugaaaaagcauacccucag

SEQ ID NO: 6381 - RNA, 18 nt, Artificial Sequence
  Synthetic
ggaauacacuauccucag

SEQ ID NO: 6382 - RNA, 18 nt, Artificial Sequence
  Synthetic
gaguucuaaagaucucag

SEQ ID NO: 6383 - RNA, 21 nt, Artificial Sequence
  Synthetic
gcugaguucuaaagaucucag

SEQ ID NO: 6384 - RNA, 22 nt, Artificial Sequence
  Synthetic
ggcugaguucuaaagaucucag

SEQ ID NO: 6385 - RNA, 24 nt, Artificial Sequence
  Synthetic
gcacuuuauuuauucagaggucag

SEQ ID NO: 6386 - RNA, 22 nt, Artificial Sequence
  Synthetic
gcauauauaugguucaugucag

SEQ ID NO: 6387 - RNA, 24 nt, Artificial Sequence
  Synthetic
gcuuacaaagcaugugucugucag

SEQ ID NO: 6388 - RNA, 21 nt, Artificial Sequence
  Synthetic
gaauuaacuggugauugucag

SEQ ID NO: 6389 - RNA, 19 nt, Artificial Sequence
  Synthetic
gcaacauguuaccauucag

SEQ ID NO: 6390 - RNA, 23 nt, Artificial Sequence
  Synthetic
guuugcaacauguuaccauucag

SEQ ID NO: 6391 - RNA, 18 nt, Artificial Sequence
  Synthetic
gcgauguguagacuucag

SEQ ID NO: 6392 - RNA, 22 nt, Artificial Sequence
  Synthetic
gacagcgauguguagacuucag

SEQ ID NO: 6393 - RNA, 23 nt, Artificial Sequence
  Synthetic
ggacagcgauguguagacuucag

SEQ ID NO: 6394 - RNA, 18 nt, Artificial Sequence
  Synthetic
ggcacaaaguagguucag

SEQ ID NO: 6395 - RNA, 22 nt, Artificial Sequence
  Synthetic
guuuggcacaaaguagguucag

SEQ ID NO: 6396 - RNA, 24 nt, Artificial Sequence
  Synthetic
guguuuggcacaaaguagguucag

SEQ ID NO: 6397 - RNA, 21 nt, Artificial Sequence
  Synthetic
guucauggacauuugguucag

SEQ ID NO: 6398 - RNA, 22 nt, Artificial Sequence
  Synthetic
gguucauggacauuugguucag

SEQ ID NO: 6399 - RNA, 19 nt, Artificial Sequence
  Synthetic
guuaucaacauaauuucag

SEQ ID NO: 6400 - RNA, 19 nt, Artificial Sequence
  Synthetic
gccuuaucucucauuucag

SEQ ID NO: 6401 - RNA, 23 nt, Artificial Sequence
  Synthetic
gaaagccuuaucucucauuucag

SEQ ID NO: 6402 - RNA, 19 nt, Artificial Sequence
  Synthetic
gugauaacuuaaguuucag

SEQ ID NO: 6403 - RNA, 23 nt, Artificial Sequence
  Synthetic
gaaugugauaacuuaaguuucag

SEQ ID NO: 6404 - RNA, 23 nt, Artificial Sequence
  Synthetic
gcaaacucauuaaaaauuuucag

SEQ ID NO: 6405 - RNA, 18 nt, Artificial Sequence
  Synthetic
gccucaucagauuuucag

SEQ ID NO: 6406 - RNA, 19 nt, Artificial Sequence
  Synthetic
ggccucaucagauuuucag

SEQ ID NO: 6407 - RNA, 21 nt, Artificial Sequence
  Synthetic
gcggccucaucagauuuucag

SEQ ID NO: 6408 - RNA, 24 nt, Artificial Sequence
  Synthetic
guugcggccucaucagauuuucag

SEQ ID NO: 6409 - RNA, 23 nt, Artificial Sequence
  Synthetic
guaugaauucuaacaguuuucag

SEQ ID NO: 6410 - RNA, 21 nt, Artificial Sequence
  Synthetic
gacaaaauacacaaaaaagag

SEQ ID NO: 6411 - RNA, 24 nt, Artificial Sequence
  Synthetic
gaucuacuuaaaagggaaaaagag

SEQ ID NO: 6412 - RNA, 19 nt, Artificial Sequence
  Synthetic
gagacauauuugaaaagag

SEQ ID NO: 6413 - RNA, 18 nt, Artificial Sequence
  Synthetic
gcucuuguagacaaagag

SEQ ID NO: 6414 - RNA, 19 nt, Artificial Sequence
  Synthetic
ggcucuuguagacaaagag

SEQ ID NO: 6415 - RNA, 19 nt, Artificial Sequence
  Synthetic
gaauguuuucuagaaagag

SEQ ID NO: 6416 - RNA, 22 nt, Artificial Sequence
  Synthetic
gacaaaaguguagaugcaagag

SEQ ID NO: 6417 - RNA, 19 nt, Artificial Sequence
  Synthetic
gacaucacaauugcaagag

SEQ ID NO: 6418 - RNA, 23 nt, Artificial Sequence
  Synthetic
guaugacaucacaauugcaagag

SEQ ID NO: 6419 - RNA, 22 nt, Artificial Sequence
  Synthetic
gcuaauaagggaaagagaagag

SEQ ID NO: 6420 - RNA, 23 nt, Artificial Sequence
  Synthetic
ggcuaauaagggaaagagaagag

SEQ ID NO: 6421 - RNA, 22 nt, Artificial Sequence
  Synthetic
gagaaggcaguggggagaagag

SEQ ID NO: 6422 - RNA, 18 nt, Artificial Sequence
  Synthetic
gaauuagugauggaagag

SEQ ID NO: 6423 - RNA, 19 nt, Artificial Sequence
  Synthetic
gaauaaucuaguugaagag

SEQ ID NO: 6424 - RNA, 21 nt, Artificial Sequence
  Synthetic
gccugggugaguaaauaagag

SEQ ID NO: 6425 - RNA, 18 nt, Artificial Sequence
  Synthetic
gaggaaacugaauaagag

SEQ ID NO: 6426 - RNA, 21 nt, Artificial Sequence
  Synthetic
guugaggaaacugaauaagag

SEQ ID NO: 6427 - RNA, 24 nt, Artificial Sequence
  Synthetic
gcaguugaggaaacugaauaagag

SEQ ID NO: 6428 - RNA, 24 nt, Artificial Sequence
  Synthetic
gacaucuaaauggagaccuaagag

SEQ ID NO: 6429 - RNA, 24 nt, Artificial Sequence
  Synthetic
gcacuccaaccagggaccuaagag

SEQ ID NO: 6430 - RNA, 20 nt, Artificial Sequence
  Synthetic
gcuuuuucacaguguaagag

SEQ ID NO: 6431 - RNA, 21 nt, Artificial Sequence
  Synthetic
ggcuuuuucacaguguaagag

SEQ ID NO: 6432 - RNA, 22 nt, Artificial Sequence
  Synthetic
gggcuuuuucacaguguaagag

SEQ ID NO: 6433 - RNA, 18 nt, Artificial Sequence
  Synthetic
ggacucuaacauuaagag

SEQ ID NO: 6434 - RNA, 24 nt, Artificial Sequence
  Synthetic
gacuaaggacucuaacauuaagag

SEQ ID NO: 6435 - RNA, 21 nt, Artificial Sequence
  Synthetic
gaucuuucugaauaaacagag

SEQ ID NO: 6436 - RNA, 19 nt, Artificial Sequence
  Synthetic
gucgggcguugucacagag

SEQ ID NO: 6437 - RNA, 20 nt, Artificial Sequence
  Synthetic
ggucgggcguugucacagag

SEQ ID NO: 6438 - RNA, 22 nt, Artificial Sequence
  Synthetic
gcggucgggcguugucacagag

SEQ ID NO: 6439 - RNA, 24 nt, Artificial Sequence
  Synthetic
gugcggucgggcguugucacagag

SEQ ID NO: 6440 - RNA, 21 nt, Artificial Sequence
  Synthetic
gacuucccuaaagauacagag

SEQ ID NO: 6441 - RNA, 22 nt, Artificial Sequence
  Synthetic
ggacuucccuaaagauacagag

SEQ ID NO: 6442 - RNA, 23 nt, Artificial Sequence
  Synthetic
gggacuucccuaaagauacagag

SEQ ID NO: 6443 - RNA, 21 nt, Artificial Sequence
  Synthetic
gcuucuuccgcuuugccagag

SEQ ID NO: 6444 - RNA, 22 nt, Artificial Sequence
  Synthetic
gauauagcuuacugcagcagag

SEQ ID NO: 6445 - RNA, 23 nt, Artificial Sequence
  Synthetic
ggauauagcuuacugcagcagag

SEQ ID NO: 6446 - RNA, 24 nt, Artificial Sequence
  Synthetic
gggauauagcuuacugcagcagag

SEQ ID NO: 6447 - RNA, 21 nt, Artificial Sequence
  Synthetic
gaaacuucugaaaaggcagag

SEQ ID NO: 6448 - RNA, 19 nt, Artificial Sequence
  Synthetic
gcuacugcagaaggcagag

SEQ ID NO: 6449 - RNA, 22 nt, Artificial Sequence
  Synthetic
gacuucaugcaugcaugcagag

SEQ ID NO: 6450 - RNA, 22 nt, Artificial Sequence
  Synthetic
guuaaguugaacgauugcagag

SEQ ID NO: 6451 - RNA, 24 nt, Artificial Sequence
  Synthetic
guguuaaguugaacgauugcagag

SEQ ID NO: 6452 - RNA, 23 nt, Artificial Sequence
  Synthetic
gaaagaauucaucaagaucagag

SEQ ID NO: 6453 - RNA, 22 nt, Artificial Sequence
  Synthetic
gacuuaaaugaguagaucagag

SEQ ID NO: 6454 - RNA, 20 nt, Artificial Sequence
  Synthetic
guacaaugaauauaucagag

SEQ ID NO: 6455 - RNA, 19 nt, Artificial Sequence
  Synthetic
gacuuaaaagaauucagag

SEQ ID NO: 6456 - RNA, 21 nt, Artificial Sequence
  Synthetic
gugacuuaaaagaauucagag

SEQ ID NO: 6457 - RNA, 22 nt, Artificial Sequence
  Synthetic
gaaaagaggcauacacagagag

SEQ ID NO: 6458 - RNA, 23 nt, Artificial Sequence
  Synthetic
ggaaaagaggcauacacagagag

SEQ ID NO: 6459 - RNA, 20 nt, Artificial Sequence
  Synthetic
gaauucuagcuuacagagag

SEQ ID NO: 6460 - RNA, 23 nt, Artificial Sequence
  Synthetic
gccaagauaaaaaugucagagag

SEQ ID NO: 6461 - RNA, 18 nt, Artificial Sequence
  Synthetic
gucuguguaaagagagag

SEQ ID NO: 6462 - RNA, 19 nt, Artificial Sequence
  Synthetic
ggucuguguaaagagagag

SEQ ID NO: 6463 - RNA, 20 nt, Artificial Sequence
  Synthetic
gcaaucuagggaagagagag

SEQ ID NO: 6464 - RNA, 21 nt, Artificial Sequence
  Synthetic
gcagcaggauugaggagagag

SEQ ID NO: 6465 - RNA, 22 nt, Artificial Sequence
  Synthetic
ggcagcaggauugaggagagag

SEQ ID NO: 6466 - RNA, 22 nt, Artificial Sequence
  Synthetic
gcucugggagugagggagagag

SEQ ID NO: 6467 - RNA, 23 nt, Artificial Sequence
  Synthetic
guauauuucagcuuaauagagag

SEQ ID NO: 6468 - RNA, 24 nt, Artificial Sequence
  Synthetic
gccucuuccucugagacuagagag

SEQ ID NO: 6469 - RNA, 18 nt, Artificial Sequence
  Synthetic
gcaacaggugaaggagag

SEQ ID NO: 6470 - RNA, 22 nt, Artificial Sequence
  Synthetic
gaaugcaacaggugaaggagag

SEQ ID NO: 6471 - RNA, 20 nt, Artificial Sequence
  Synthetic
gaaaccgaaaauagggagag

SEQ ID NO: 6472 - RNA, 22 nt, Artificial Sequence
  Synthetic
gagaaaccgaaaauagggagag

SEQ ID NO: 6473 - RNA, 18 nt, Artificial Sequence
  Synthetic
gggaucagaaugggagag

SEQ ID NO: 6474 - RNA, 21 nt, Artificial Sequence
  Synthetic
gcugggaucagaaugggagag

SEQ ID NO: 6475 - RNA, 22 nt, Artificial Sequence
  Synthetic
ggcugggaucagaaugggagag

SEQ ID NO: 6476 - RNA, 24 nt, Artificial Sequence
  Synthetic
guggcugggaucagaaugggagag

SEQ ID NO: 6477 - RNA, 19 nt, Artificial Sequence
  Synthetic
gcagaucaauggaugagag

SEQ ID NO: 6478 - RNA, 21 nt, Artificial Sequence
  Synthetic
gaaaagaauucagggugagag

SEQ ID NO: 6479 - RNA, 22 nt, Artificial Sequence
  Synthetic
ggaaaagaauucagggugagag

SEQ ID NO: 6480 - RNA, 20 nt, Artificial Sequence
  Synthetic
gcuuuuacaguaaaauagag

SEQ ID NO: 6481 - RNA, 19 nt, Artificial Sequence
  Synthetic
guccuuuaucuuaauagag

SEQ ID NO: 6482 - RNA, 22 nt, Artificial Sequence
  Synthetic
guuguccuuuaucuuaauagag

SEQ ID NO: 6483 - RNA, 19 nt, Artificial Sequence
  Synthetic
guauguguugaccauagag

SEQ ID NO: 6484 - RNA, 23 nt, Artificial Sequence
  Synthetic
guuuguauguguugaccauagag

SEQ ID NO: 6485 - RNA, 18 nt, Artificial Sequence
  Synthetic
ggacugaaauggauagag

SEQ ID NO: 6486 - RNA, 21 nt, Artificial Sequence
  Synthetic
gauggacugaaauggauagag

SEQ ID NO: 6487 - RNA, 19 nt, Artificial Sequence
  Synthetic
gaauauggaguggauagag

SEQ ID NO: 6488 - RNA, 22 nt, Artificial Sequence
  Synthetic
gaagaauauggaguggauagag

SEQ ID NO: 6489 - RNA, 19 nt, Artificial Sequence
  Synthetic
gaauacguaauaccuagag

SEQ ID NO: 6490 - RNA, 18 nt, Artificial Sequence
  Synthetic
gcuaaggcagagcuagag

SEQ ID NO: 6491 - RNA, 23 nt, Artificial Sequence
  Synthetic
guugaauucauagagauguagag

SEQ ID NO: 6492 - RNA, 20 nt, Artificial Sequence
  Synthetic
gacacuaauguaaauuagag

SEQ ID NO: 6493 - RNA, 19 nt, Artificial Sequence
  Synthetic
gaaugaguuagaaggcgag

SEQ ID NO: 6494 - RNA, 19 nt, Artificial Sequence
  Synthetic
gcuuuccccuaccaucgag

SEQ ID NO: 6495 - RNA, 23 nt, Artificial Sequence
  Synthetic
gcuaaaauuaucaugcugucgag

SEQ ID NO: 6496 - RNA, 22 nt, Artificial Sequence
  Synthetic
gcaaaugcuuuuugaauucgag

SEQ ID NO: 6497 - RNA, 23 nt, Artificial Sequence
  Synthetic
gaaaauggcaggcuacaaaggag

SEQ ID NO: 6498 - RNA, 20 nt, Artificial Sequence
  Synthetic
gacacugaaguuuaaaggag

SEQ ID NO: 6499 - RNA, 21 nt, Artificial Sequence
  Synthetic
ggacacugaaguuuaaaggag

SEQ ID NO: 6500 - RNA, 18 nt, Artificial Sequence
  Synthetic
gcugugugcagcaaggag

SEQ ID NO: 6501 - RNA, 19 nt, Artificial Sequence
  Synthetic
gaaugcgaaggucaaggag

SEQ ID NO: 6502 - RNA, 24 nt, Artificial Sequence
  Synthetic
gucaagaaugcgaaggucaaggag

SEQ ID NO: 6503 - RNA, 19 nt, Artificial Sequence
  Synthetic
gcguaguaaaaggaaggag

SEQ ID NO: 6504 - RNA, 22 nt, Artificial Sequence
  Synthetic
gcugcguaguaaaaggaaggag

SEQ ID NO: 6505 - RNA, 18 nt, Artificial Sequence
  Synthetic
gaacuauuagauaaggag

SEQ ID NO: 6506 - RNA, 18 nt, Artificial Sequence
  Synthetic
gaccugcaaccacaggag

SEQ ID NO: 6507 - RNA, 19 nt, Artificial Sequence
  Synthetic
ggaccugcaaccacaggag

SEQ ID NO: 6508 - RNA, 22 nt, Artificial Sequence
  Synthetic
gcaggaccugcaaccacaggag

SEQ ID NO: 6509 - RNA, 23 nt, Artificial Sequence
  Synthetic
ggcaggaccugcaaccacaggag

SEQ ID NO: 6510 - RNA, 20 nt, Artificial Sequence
  Synthetic
gcuugcuugccauccaggag

SEQ ID NO: 6511 - RNA, 23 nt, Artificial Sequence
  Synthetic
gcagcuugcuugccauccaggag

SEQ ID NO: 6512 - RNA, 24 nt, Artificial Sequence
  Synthetic
gaauugcagaagaagaaagaggag

SEQ ID NO: 6513 - RNA, 21 nt, Artificial Sequence
  Synthetic
gaagaauugaagacagaggag

SEQ ID NO: 6514 - RNA, 23 nt, Artificial Sequence
  Synthetic
gagaagaauugaagacagaggag

SEQ ID NO: 6515 - RNA, 18 nt, Artificial Sequence
  Synthetic
gauuaugaaagagaggag

SEQ ID NO: 6516 - RNA, 20 nt, Artificial Sequence
  Synthetic
gagauuaugaaagagaggag

SEQ ID NO: 6517 - RNA, 23 nt, Artificial Sequence
  Synthetic
gcaggauugaggagagagaggag

SEQ ID NO: 6518 - RNA, 18 nt, Artificial Sequence
  Synthetic
gaaauuauauuagaggag

SEQ ID NO: 6519 - RNA, 23 nt, Artificial Sequence
  Synthetic
gcucugaaauuauauuagaggag

SEQ ID NO: 6520 - RNA, 19 nt, Artificial Sequence
  Synthetic
guaaagacugaaggaggag

SEQ ID NO: 6521 - RNA, 23 nt, Artificial Sequence
  Synthetic
guuuguuguggguggaggaggag

SEQ ID NO: 6522 - RNA, 24 nt, Artificial Sequence
  Synthetic
gguuuguuguggguggaggaggag

SEQ ID NO: 6523 - RNA, 18 nt, Artificial Sequence
  Synthetic
gcauuucugugugaggag

SEQ ID NO: 6524 - RNA, 22 nt, Artificial Sequence
  Synthetic
guuugcauuucugugugaggag

SEQ ID NO: 6525 - RNA, 19 nt, Artificial Sequence
  Synthetic
gucacagaaguuauaggag

SEQ ID NO: 6526 - RNA, 21 nt, Artificial Sequence
  Synthetic
gagucacagaaguuauaggag

SEQ ID NO: 6527 - RNA, 18 nt, Artificial Sequence
  Synthetic
gaugaagucuucuaggag

SEQ ID NO: 6528 - RNA, 19 nt, Artificial Sequence
  Synthetic
ggaugaagucuucuaggag

SEQ ID NO: 6529 - RNA, 23 nt, Artificial Sequence
  Synthetic
gacuggaugaagucuucuaggag

SEQ ID NO: 6530 - RNA, 24 nt, Artificial Sequence
  Synthetic
ggacuggaugaagucuucuaggag

SEQ ID NO: 6531 - RNA, 19 nt, Artificial Sequence
  Synthetic
gaauaccaagaauuaggag

SEQ ID NO: 6532 - RNA, 22 nt, Artificial Sequence
  Synthetic
gagcggaggaaaggaaagggag

SEQ ID NO: 6533 - RNA, 24 nt, Artificial Sequence
  Synthetic
gugagcggaggaaaggaaagggag

SEQ ID NO: 6534 - RNA, 21 nt, Artificial Sequence
  Synthetic
gaaaguaccauaagaagggag

SEQ ID NO: 6535 - RNA, 24 nt, Artificial Sequence
  Synthetic
gaauuaaccacuaaagccagggag

SEQ ID NO: 6536 - RNA, 21 nt, Artificial Sequence
  Synthetic
gugcuugugcuuuguggggag

SEQ ID NO: 6537 - RNA, 24 nt, Artificial Sequence
  Synthetic
gacaaacauuugaauuugugggag

SEQ ID NO: 6538 - RNA, 23 nt, Artificial Sequence
  Synthetic
guucaaagugauagaauugggag

SEQ ID NO: 6539 - RNA, 23 nt, Artificial Sequence
  Synthetic
gaauccauaugaguggaauggag

SEQ ID NO: 6540 - RNA, 18 nt, Artificial Sequence
  Synthetic
gaaauauguuuccuggag

SEQ ID NO: 6541 - RNA, 20 nt, Artificial Sequence
  Synthetic
gugaaauauguuuccuggag

SEQ ID NO: 6542 - RNA, 18 nt, Artificial Sequence
  Synthetic
gaaaccuccucuguggag

SEQ ID NO: 6543 - RNA, 22 nt, Artificial Sequence
  Synthetic
gaacuagcuuuguauguuggag

SEQ ID NO: 6544 - RNA, 22 nt, Artificial Sequence
  Synthetic
gaaauaguucaugccuuuggag

SEQ ID NO: 6545 - RNA, 18 nt, Artificial Sequence
  Synthetic
gcaggccauaguuuggag

SEQ ID NO: 6546 - RNA, 23 nt, Artificial Sequence
  Synthetic
gucuugcaggccauaguuuggag

SEQ ID NO: 6547 - RNA, 24 nt, Artificial Sequence
  Synthetic
ggucuugcaggccauaguuuggag

SEQ ID NO: 6548 - RNA, 18 nt, Artificial Sequence
  Synthetic
gagacuacaaaaaaugag

SEQ ID NO: 6549 - RNA, 22 nt, Artificial Sequence
  Synthetic
guaagagacuacaaaaaaugag

SEQ ID NO: 6550 - RNA, 24 nt, Artificial Sequence
  Synthetic
gaguaagagacuacaaaaaaugag

SEQ ID NO: 6551 - RNA, 19 nt, Artificial Sequence
  Synthetic
gucaacauauaguaaugag

SEQ ID NO: 6552 - RNA, 20 nt, Artificial Sequence
  Synthetic
ggucaacauauaguaaugag

SEQ ID NO: 6553 - RNA, 21 nt, Artificial Sequence
  Synthetic
gggucaacauauaguaaugag

SEQ ID NO: 6554 - RNA, 18 nt, Artificial Sequence
  Synthetic
gggaaucuaugggaugag

SEQ ID NO: 6555 - RNA, 20 nt, Artificial Sequence
  Synthetic
gagggaaucuaugggaugag

SEQ ID NO: 6556 - RNA, 22 nt, Artificial Sequence
  Synthetic
guuaaguagaugggaugaugag

SEQ ID NO: 6557 - RNA, 20 nt, Artificial Sequence
  Synthetic
gaauaagcugaugauaugag

SEQ ID NO: 6558 - RNA, 21 nt, Artificial Sequence
  Synthetic
ggaauaagcugaugauaugag

SEQ ID NO: 6559 - RNA, 22 nt, Artificial Sequence
  Synthetic
gggaauaagcugaugauaugag

SEQ ID NO: 6560 - RNA, 23 nt, Artificial Sequence
  Synthetic
ggggaauaagcugaugauaugag

SEQ ID NO: 6561 - RNA, 24 nt, Artificial Sequence
  Synthetic
gggggaauaagcugaugauaugag

SEQ ID NO: 6562 - RNA, 20 nt, Artificial Sequence
  Synthetic
gaaaaugaaucuauuaugag

SEQ ID NO: 6563 - RNA, 21 nt, Artificial Sequence
  Synthetic
guaaacgaaaacuuuuaugag

SEQ ID NO: 6564 - RNA, 22 nt, Artificial Sequence
  Synthetic
guuucuuauaaaugacacugag

SEQ ID NO: 6565 - RNA, 21 nt, Artificial Sequence
  Synthetic
gcccuuuggacagagacugag

SEQ ID NO: 6566 - RNA, 18 nt, Artificial Sequence
  Synthetic
guacaucucaauacugag

SEQ ID NO: 6567 - RNA, 22 nt, Artificial Sequence
  Synthetic
guuaguacaucucaauacugag

SEQ ID NO: 6568 - RNA, 24 nt, Artificial Sequence
  Synthetic
gaguuaguacaucucaauacugag

SEQ ID NO: 6569 - RNA, 21 nt, Artificial Sequence
  Synthetic
gucacucauucuccuccugag

SEQ ID NO: 6570 - RNA, 22 nt, Artificial Sequence
  Synthetic
gccuaaccaucccagggcugag

SEQ ID NO: 6571 - RNA, 18 nt, Artificial Sequence
  Synthetic
gagccucuaagugcugag

SEQ ID NO: 6572 - RNA, 20 nt, Artificial Sequence
  Synthetic
gagagccucuaagugcugag

SEQ ID NO: 6573 - RNA, 21 nt, Artificial Sequence
  Synthetic
ggagagccucuaagugcugag

SEQ ID NO: 6574 - RNA, 24 nt, Artificial Sequence
  Synthetic
gcaggagagccucuaagugcugag

SEQ ID NO: 6575 - RNA, 22 nt, Artificial Sequence
  Synthetic
gacccaauaaaaguuugcugag

SEQ ID NO: 6576 - RNA, 24 nt, Artificial Sequence
  Synthetic
gagacccaauaaaaguuugcugag

SEQ ID NO: 6577 - RNA, 21 nt, Artificial Sequence
  Synthetic
gacaauuaaaaauucucugag

SEQ ID NO: 6578 - RNA, 19 nt, Artificial Sequence
  Synthetic
gagaauggagcuaagugag

SEQ ID NO: 6579 - RNA, 18 nt, Artificial Sequence
  Synthetic
gcuuuguggggaggugag

SEQ ID NO: 6580 - RNA, 20 nt, Artificial Sequence
  Synthetic
gugcuuuguggggaggugag

SEQ ID NO: 6581 - RNA, 24 nt, Artificial Sequence
  Synthetic
gcuugugcuuuguggggaggugag

SEQ ID NO: 6582 - RNA, 20 nt, Artificial Sequence
  Synthetic
guacauauuguuauggugag

SEQ ID NO: 6583 - RNA, 21 nt, Artificial Sequence
  Synthetic
gguacauauuguuauggugag

SEQ ID NO: 6584 - RNA, 20 nt, Artificial Sequence
  Synthetic
gcucucgacuuuucugugag

SEQ ID NO: 6585 - RNA, 24 nt, Artificial Sequence
  Synthetic
gcuuccaaaaagguaaacauugag

SEQ ID NO: 6586 - RNA, 18 nt, Artificial Sequence
  Synthetic
ggaugcaaguggauugag

SEQ ID NO: 6587 - RNA, 23 nt, Artificial Sequence
  Synthetic
gccauggaugcaaguggauugag

SEQ ID NO: 6588 - RNA, 24 nt, Artificial Sequence
  Synthetic
ggccauggaugcaaguggauugag

SEQ ID NO: 6589 - RNA, 20 nt, Artificial Sequence
  Synthetic
guauugauuaauauauugag

SEQ ID NO: 6590 - RNA, 24 nt, Artificial Sequence
  Synthetic
gacaauuccuccaauggacuugag

SEQ ID NO: 6591 - RNA, 19 nt, Artificial Sequence
  Synthetic
gcuaucaguuucaguugag

SEQ ID NO: 6592 - RNA, 21 nt, Artificial Sequence
  Synthetic
guggaaaugaaagcauuugag

SEQ ID NO: 6593 - RNA, 24 nt, Artificial Sequence
  Synthetic
guuguggaaaugaaagcauuugag

SEQ ID NO: 6594 - RNA, 22 nt, Artificial Sequence
  Synthetic
guuaccuaccuggagauuugag

SEQ ID NO: 6595 - RNA, 23 nt, Artificial Sequence
  Synthetic
gguuaccuaccuggagauuugag

SEQ ID NO: 6596 - RNA, 24 nt, Artificial Sequence
  Synthetic
guucaccuuccucagcaguuugag

SEQ ID NO: 6597 - RNA, 21 nt, Artificial Sequence
  Synthetic
gcacccaggauuaauuuugag

SEQ ID NO: 6598 - RNA, 23 nt, Artificial Sequence
  Synthetic
gagcacccaggauuaauuuugag

SEQ ID NO: 6599 - RNA, 18 nt, Artificial Sequence
  Synthetic
guggcagugacuuuugag

SEQ ID NO: 6600 - RNA, 23 nt, Artificial Sequence
  Synthetic
gacuaguggcagugacuuuugag

SEQ ID NO: 6601 - RNA, 19 nt, Artificial Sequence
  Synthetic
gcacguuaaauaaaaauag

SEQ ID NO: 6602 - RNA, 22 nt, Artificial Sequence
  Synthetic
guagcacguuaaauaaaaauag

SEQ ID NO: 6603 - RNA, 21 nt, Artificial Sequence
  Synthetic
gacauuucagaaagaaaauag

SEQ ID NO: 6604 - RNA, 20 nt, Artificial Sequence
  Synthetic
gucauuauauuauaaaauag

SEQ ID NO: 6605 - RNA, 21 nt, Artificial Sequence
  Synthetic
guuuucaucccacugaaauag

SEQ ID NO: 6606 - RNA, 24 nt, Artificial Sequence
  Synthetic
gcuguuuucaucccacugaaauag

SEQ ID NO: 6607 - RNA, 19 nt, Artificial Sequence
  Synthetic
gaucagggaaaauaaauag

SEQ ID NO: 6608 - RNA, 21 nt, Artificial Sequence
  Synthetic
gagaucagggaaaauaaauag

SEQ ID NO: 6609 - RNA, 18 nt, Artificial Sequence
  Synthetic
ggucugguuucuaaauag

SEQ ID NO: 6610 - RNA, 18 nt, Artificial Sequence
  Synthetic
gaugucccaaguaaauag

SEQ ID NO: 6611 - RNA, 23 nt, Artificial Sequence
  Synthetic
gcuuuguuucuuuuauuaaauag

SEQ ID NO: 6612 - RNA, 19 nt, Artificial Sequence
  Synthetic
gaggaggaucccagaauag

SEQ ID NO: 6613 - RNA, 20 nt, Artificial Sequence
  Synthetic
ggaggaggaucccagaauag

SEQ ID NO: 6614 - RNA, 22 nt, Artificial Sequence
  Synthetic
guggaggaggaucccagaauag

SEQ ID NO: 6615 - RNA, 24 nt, Artificial Sequence
  Synthetic
gcauuuuuucucuaccuggaauag

SEQ ID NO: 6616 - RNA, 19 nt, Artificial Sequence
  Synthetic
gcguuucauccaauaauag

SEQ ID NO: 6617 - RNA, 21 nt, Artificial Sequence
  Synthetic
guuauuauccccauauaauag

SEQ ID NO: 6618 - RNA, 22 nt, Artificial Sequence
  Synthetic
gaccauuuuuuuuaacuaauag

SEQ ID NO: 6619 - RNA, 18 nt, Artificial Sequence
  Synthetic
guugaugcuauuuaauag

SEQ ID NO: 6620 - RNA, 21 nt, Artificial Sequence
  Synthetic
gauguugaugcuauuuaauag

SEQ ID NO: 6621 - RNA, 21 nt, Artificial Sequence
  Synthetic
guaaugucagagguuuaauag

SEQ ID NO: 6622 - RNA, 22 nt, Artificial Sequence
  Synthetic
gguaaugucagagguuuaauag

SEQ ID NO: 6623 - RNA, 19 nt, Artificial Sequence
  Synthetic
gaccuacagagacacauag

SEQ ID NO: 6624 - RNA, 23 nt, Artificial Sequence
  Synthetic
guuuuuucaauggaugagcauag

SEQ ID NO: 6625 - RNA, 24 nt, Artificial Sequence
  Synthetic
gguuuuuucaauggaugagcauag

SEQ ID NO: 6626 - RNA, 19 nt, Artificial Sequence
  Synthetic
gauaauuaacuuggcauag

SEQ ID NO: 6627 - RNA, 20 nt, Artificial Sequence
  Synthetic
gauuuauguuaagugcauag

SEQ ID NO: 6628 - RNA, 23 nt, Artificial Sequence
  Synthetic
gaugauuuauguuaagugcauag

SEQ ID NO: 6629 - RNA, 20 nt, Artificial Sequence
  Synthetic
guaaaaggaaaacaucauag

SEQ ID NO: 6630 - RNA, 21 nt, Artificial Sequence
  Synthetic
gguaaaaggaaaacaucauag

SEQ ID NO: 6631 - RNA, 24 nt, Artificial Sequence
  Synthetic
gaagguaaaaggaaaacaucauag

SEQ ID NO: 6632 - RNA, 18 nt, Artificial Sequence
  Synthetic
gguagacagaauagauag

SEQ ID NO: 6633 - RNA, 22 nt, Artificial Sequence
  Synthetic
gacagguagacagaauagauag

SEQ ID NO: 6634 - RNA, 18 nt, Artificial Sequence
  Synthetic
gauguguggaguagauag

SEQ ID NO: 6635 - RNA, 20 nt, Artificial Sequence
  Synthetic
gagauguguggaguagauag

SEQ ID NO: 6636 - RNA, 21 nt, Artificial Sequence
  Synthetic
ggagauguguggaguagauag

SEQ ID NO: 6637 - RNA, 20 nt, Artificial Sequence
  Synthetic
guccaaagguaauccgauag

SEQ ID NO: 6638 - RNA, 22 nt, Artificial Sequence
  Synthetic
gaguccaaagguaauccgauag

SEQ ID NO: 6639 - RNA, 18 nt, Artificial Sequence
  Synthetic
ggaugcacagagggauag

SEQ ID NO: 6640 - RNA, 19 nt, Artificial Sequence
  Synthetic
gggaugcacagagggauag

SEQ ID NO: 6641 - RNA, 20 nt, Artificial Sequence
  Synthetic
ggggaugcacagagggauag

SEQ ID NO: 6642 - RNA, 22 nt, Artificial Sequence
  Synthetic
guggggaugcacagagggauag

SEQ ID NO: 6643 - RNA, 24 nt, Artificial Sequence
  Synthetic
guguggggaugcacagagggauag

SEQ ID NO: 6644 - RNA, 20 nt, Artificial Sequence
  Synthetic
gcacacuugacagaugauag

SEQ ID NO: 6645 - RNA, 19 nt, Artificial Sequence
  Synthetic
gcuaaaauagaugugauag

SEQ ID NO: 6646 - RNA, 21 nt, Artificial Sequence
  Synthetic
gugcuaaaauagaugugauag

SEQ ID NO: 6647 - RNA, 22 nt, Artificial Sequence
  Synthetic
ggugcuaaaauagaugugauag

SEQ ID NO: 6648 - RNA, 23 nt, Artificial Sequence
  Synthetic
gggugcuaaaauagaugugauag

SEQ ID NO: 6649 - RNA, 21 nt, Artificial Sequence
  Synthetic
gucaucacccaugugugauag

SEQ ID NO: 6650 - RNA, 23 nt, Artificial Sequence
  Synthetic
gaacuauaauaacauauugauag

SEQ ID NO: 6651 - RNA, 24 nt, Artificial Sequence
  Synthetic
ggaacuauaauaacauauugauag

SEQ ID NO: 6652 - RNA, 23 nt, Artificial Sequence
  Synthetic
guuacauacacuaacaaauauag

SEQ ID NO: 6653 - RNA, 19 nt, Artificial Sequence
  Synthetic
gcugaaucucagaauauag

SEQ ID NO: 6654 - RNA, 21 nt, Artificial Sequence
  Synthetic
gauagaguucauaucauauag

SEQ ID NO: 6655 - RNA, 19 nt, Artificial Sequence
  Synthetic
gaaguuaaaagcgauauag

SEQ ID NO: 6656 - RNA, 23 nt, Artificial Sequence
  Synthetic
gcuucaccuguaaaaauauauag

SEQ ID NO: 6657 - RNA, 18 nt, Artificial Sequence
  Synthetic
ggcuaaccaaaguuauag

SEQ ID NO: 6658 - RNA, 24 nt, Artificial Sequence
  Synthetic
guccaaggcuaaccaaaguuauag

SEQ ID NO: 6659 - RNA, 18 nt, Artificial Sequence
  Synthetic
gagaacagaauuuuauag

SEQ ID NO: 6660 - RNA, 21 nt, Artificial Sequence
  Synthetic
gcagagaacagaauuuuauag

SEQ ID NO: 6661 - RNA, 22 nt, Artificial Sequence
  Synthetic
ggcagagaacagaauuuuauag

SEQ ID NO: 6662 - RNA, 23 nt, Artificial Sequence
  Synthetic
gggcagagaacagaauuuuauag

SEQ ID NO: 6663 - RNA, 24 nt, Artificial Sequence
  Synthetic
ggggcagagaacagaauuuuauag

SEQ ID NO: 6664 - RNA, 18 nt, Artificial Sequence
  Synthetic
gauuuacuaaguaacuag

SEQ ID NO: 6665 - RNA, 22 nt, Artificial Sequence
  Synthetic
gucuuauuuccuguuuaacuag

SEQ ID NO: 6666 - RNA, 18 nt, Artificial Sequence
  Synthetic
ggagaucagugagacuag

SEQ ID NO: 6667 - RNA, 20 nt, Artificial Sequence
  Synthetic
gaaagugagagggggacuag

SEQ ID NO: 6668 - RNA, 23 nt, Artificial Sequence
  Synthetic
gcagaaagugagagggggacuag

SEQ ID NO: 6669 - RNA, 24 nt, Artificial Sequence
  Synthetic
ggcagaaagugagagggggacuag

SEQ ID NO: 6670 - RNA, 18 nt, Artificial Sequence
  Synthetic
gaaaacacagaauacuag

SEQ ID NO: 6671 - RNA, 19 nt, Artificial Sequence
  Synthetic
ggaaaacacagaauacuag

SEQ ID NO: 6672 - RNA, 24 nt, Artificial Sequence
  Synthetic
guuuuauuugucuauguguacuag

SEQ ID NO: 6673 - RNA, 19 nt, Artificial Sequence
  Synthetic
gaauuauauaaauuacuag

SEQ ID NO: 6674 - RNA, 22 nt, Artificial Sequence
  Synthetic
guagaauuauauaaauuacuag

SEQ ID NO: 6675 - RNA, 23 nt, Artificial Sequence
  Synthetic
gguagaauuauauaaauuacuag

SEQ ID NO: 6676 - RNA, 23 nt, Artificial Sequence
  Synthetic
gacuacuucaaauaacuuccuag

SEQ ID NO: 6677 - RNA, 24 nt, Artificial Sequence
  Synthetic
gcuucuugaugucauuguuccuag

SEQ ID NO: 6678 - RNA, 23 nt, Artificial Sequence
  Synthetic
gccuaauauaaaggugcagcuag

SEQ ID NO: 6679 - RNA, 22 nt, Artificial Sequence
  Synthetic
guaccugaccuaaucaggcuag

SEQ ID NO: 6680 - RNA, 23 nt, Artificial Sequence
  Synthetic
gguaccugaccuaaucaggcuag

SEQ ID NO: 6681 - RNA, 23 nt, Artificial Sequence
  Synthetic
guuuuuuaagagacuccugcuag

SEQ ID NO: 6682 - RNA, 21 nt, Artificial Sequence
  Synthetic
gccucauaucuucucugcuag

SEQ ID NO: 6683 - RNA, 22 nt, Artificial Sequence
  Synthetic
ggccucauaucuucucugcuag

SEQ ID NO: 6684 - RNA, 19 nt, Artificial Sequence
  Synthetic
guaucagauaaugugcuag

SEQ ID NO: 6685 - RNA, 21 nt, Artificial Sequence
  Synthetic
guguaucagauaaugugcuag

SEQ ID NO: 6686 - RNA, 18 nt, Artificial Sequence
  Synthetic
ggcaugaacuguugcuag

SEQ ID NO: 6687 - RNA, 20 nt, Artificial Sequence
  Synthetic
gcggcaugaacuguugcuag

SEQ ID NO: 6688 - RNA, 18 nt, Artificial Sequence
  Synthetic
guuggagucaaaaucuag

SEQ ID NO: 6689 - RNA, 23 nt, Artificial Sequence
  Synthetic
gcucuguuggagucaaaaucuag

SEQ ID NO: 6690 - RNA, 18 nt, Artificial Sequence
  Synthetic
gcccccugcaguaucuag

SEQ ID NO: 6691 - RNA, 21 nt, Artificial Sequence
  Synthetic
guagcccccugcaguaucuag

SEQ ID NO: 6692 - RNA, 22 nt, Artificial Sequence
  Synthetic
gcuuauuuauuugaaucucuag

SEQ ID NO: 6693 - RNA, 24 nt, Artificial Sequence
  Synthetic
gugcuuauuuauuugaaucucuag

SEQ ID NO: 6694 - RNA, 20 nt, Artificial Sequence
  Synthetic
gccaacugccacuggucuag

SEQ ID NO: 6695 - RNA, 23 nt, Artificial Sequence
  Synthetic
guaacuugacugccacauucuag

SEQ ID NO: 6696 - RNA, 20 nt, Artificial Sequence
  Synthetic
gaaauaccacaccauucuag

SEQ ID NO: 6697 - RNA, 18 nt, Artificial Sequence
  Synthetic
guauauucuagauucuag

SEQ ID NO: 6698 - RNA, 22 nt, Artificial Sequence
  Synthetic
gucuguauauucuagauucuag

SEQ ID NO: 6699 - RNA, 19 nt, Artificial Sequence
  Synthetic
guuucaccuucuauucuag

SEQ ID NO: 6700 - RNA, 23 nt, Artificial Sequence
  Synthetic
gcuuguuucaccuucuauucuag

SEQ ID NO: 6701 - RNA, 20 nt, Artificial Sequence
  Synthetic
gaaucuucuuuugaaaguag

SEQ ID NO: 6702 - RNA, 19 nt, Artificial Sequence
  Synthetic
gcacuccucccaacaguag

SEQ ID NO: 6703 - RNA, 22 nt, Artificial Sequence
  Synthetic
gaagcacuccucccaacaguag

SEQ ID NO: 6704 - RNA, 23 nt, Artificial Sequence
  Synthetic
gaaaccuagcacauacacaguag

SEQ ID NO: 6705 - RNA, 24 nt, Artificial Sequence
  Synthetic
ggaaaccuagcacauacacaguag

SEQ ID NO: 6706 - RNA, 20 nt, Artificial Sequence
  Synthetic
gucuccauuaagcacaguag

SEQ ID NO: 6707 - RNA, 22 nt, Artificial Sequence
  Synthetic
gcuuugucucuguccccaguag

SEQ ID NO: 6708 - RNA, 18 nt, Artificial Sequence
  Synthetic
ggguaaauuaaucaguag

SEQ ID NO: 6709 - RNA, 19 nt, Artificial Sequence
  Synthetic
gggguaaauuaaucaguag

SEQ ID NO: 6710 - RNA, 20 nt, Artificial Sequence
  Synthetic
ggggguaaauuaaucaguag

SEQ ID NO: 6711 - RNA, 21 nt, Artificial Sequence
  Synthetic
gggggguaaauuaaucaguag

SEQ ID NO: 6712 - RNA, 21 nt, Artificial Sequence
  Synthetic
guacaauacaccacagaguag

SEQ ID NO: 6713 - RNA, 24 nt, Artificial Sequence
  Synthetic
gacucaaccaauaagggagaguag

SEQ ID NO: 6714 - RNA, 20 nt, Artificial Sequence
  Synthetic
gcuauugugucaaggaguag

SEQ ID NO: 6715 - RNA, 24 nt, Artificial Sequence
  Synthetic
gcuugcuauugugucaaggaguag

SEQ ID NO: 6716 - RNA, 24 nt, Artificial Sequence
  Synthetic
guuacccuuaggauuaaguaguag

SEQ ID NO: 6717 - RNA, 22 nt, Artificial Sequence
  Synthetic
gaaccauagauauuauuaguag

SEQ ID NO: 6718 - RNA, 24 nt, Artificial Sequence
  Synthetic
guauacuucccaccagccacguag

SEQ ID NO: 6719 - RNA, 21 nt, Artificial Sequence
  Synthetic
guacuguaccuuaugccguag

SEQ ID NO: 6720 - RNA, 24 nt, Artificial Sequence
  Synthetic
guuauuuagcuauuuucaagguag

SEQ ID NO: 6721 - RNA, 18 nt, Artificial Sequence
  Synthetic
ggaauaaauuggagguag

SEQ ID NO: 6722 - RNA, 19 nt, Artificial Sequence
  Synthetic
gugaagaguuuguggguag

SEQ ID NO: 6723 - RNA, 23 nt, Artificial Sequence
  Synthetic
gaauagaauugagaaaaugguag

SEQ ID NO: 6724 - RNA, 18 nt, Artificial Sequence
  Synthetic
gaucaaguuagaugguag

SEQ ID NO: 6725 - RNA, 19 nt, Artificial Sequence
  Synthetic
ggaucaaguuagaugguag

SEQ ID NO: 6726 - RNA, 22 nt, Artificial Sequence
  Synthetic
gaaggaucaaguuagaugguag

SEQ ID NO: 6727 - RNA, 23 nt, Artificial Sequence
  Synthetic
gucauuaauguagugccugguag

SEQ ID NO: 6728 - RNA, 19 nt, Artificial Sequence
  Synthetic
gcuucagcacacuugguag

SEQ ID NO: 6729 - RNA, 21 nt, Artificial Sequence
  Synthetic
gugcuucagcacacuugguag

SEQ ID NO: 6730 - RNA, 22 nt, Artificial Sequence
  Synthetic
gcaaugggcauucaaaauguag

SEQ ID NO: 6731 - RNA, 22 nt, Artificial Sequence
  Synthetic
gcuuuucacugagcgcauguag

SEQ ID NO: 6732 - RNA, 21 nt, Artificial Sequence
  Synthetic
guuccaguaaaugcucuguag

SEQ ID NO: 6733 - RNA, 22 nt, Artificial Sequence
  Synthetic
gguuccaguaaaugcucuguag

SEQ ID NO: 6734 - RNA, 23 nt, Artificial Sequence
  Synthetic
ggguuccaguaaaugcucuguag

SEQ ID NO: 6735 - RNA, 20 nt, Artificial Sequence
  Synthetic
gaauguucuguaaauuguag

SEQ ID NO: 6736 - RNA, 21 nt, Artificial Sequence
  Synthetic
ggaauguucuguaaauuguag

SEQ ID NO: 6737 - RNA, 24 nt, Artificial Sequence
  Synthetic
gucaaaaucguauuguguuuguag

SEQ ID NO: 6738 - RNA, 22 nt, Artificial Sequence
  Synthetic
guaaacuuugagacuuuuguag

SEQ ID NO: 6739 - RNA, 23 nt, Artificial Sequence
  Synthetic
gauauagaauaauaacaaauuag

SEQ ID NO: 6740 - RNA, 24 nt, Artificial Sequence
  Synthetic
ggauauagaauaauaacaaauuag

SEQ ID NO: 6741 - RNA, 23 nt, Artificial Sequence
  Synthetic
guuuucaugcugggacaaauuag

SEQ ID NO: 6742 - RNA, 23 nt, Artificial Sequence
  Synthetic
gauauagugugaacauuaauuag

SEQ ID NO: 6743 - RNA, 24 nt, Artificial Sequence
  Synthetic
ggauauagugugaacauuaauuag

SEQ ID NO: 6744 - RNA, 22 nt, Artificial Sequence
  Synthetic
gaccaaaagcagauaagauuag

SEQ ID NO: 6745 - RNA, 23 nt, Artificial Sequence
  Synthetic
ggaccaaaagcagauaagauuag

SEQ ID NO: 6746 - RNA, 24 nt, Artificial Sequence
  Synthetic
gggaccaaaagcagauaagauuag

SEQ ID NO: 6747 - RNA, 22 nt, Artificial Sequence
  Synthetic
guucauagguucucaggauuag

SEQ ID NO: 6748 - RNA, 20 nt, Artificial Sequence
  Synthetic
gaaguuugcucugugauuag

SEQ ID NO: 6749 - RNA, 24 nt, Artificial Sequence
  Synthetic
gucugaaguuugcucugugauuag

SEQ ID NO: 6750 - RNA, 18 nt, Artificial Sequence
  Synthetic
gcacucaacguauauuag

SEQ ID NO: 6751 - RNA, 19 nt, Artificial Sequence
  Synthetic
ggcacucaacguauauuag

SEQ ID NO: 6752 - RNA, 22 nt, Artificial Sequence
  Synthetic
guaggcacucaacguauauuag

SEQ ID NO: 6753 - RNA, 22 nt, Artificial Sequence
  Synthetic
gaauaugaaucacaucuauuag

SEQ ID NO: 6754 - RNA, 24 nt, Artificial Sequence
  Synthetic
gagaauaugaaucacaucuauuag

SEQ ID NO: 6755 - RNA, 18 nt, Artificial Sequence
  Synthetic
gauaguuucaucuauuag

SEQ ID NO: 6756 - RNA, 19 nt, Artificial Sequence
  Synthetic
ggauaguuucaucuauuag

SEQ ID NO: 6757 - RNA, 21 nt, Artificial Sequence
  Synthetic
guggauaguuucaucuauuag

SEQ ID NO: 6758 - RNA, 21 nt, Artificial Sequence
  Synthetic
gauucuguggaaccguauuag

SEQ ID NO: 6759 - RNA, 22 nt, Artificial Sequence
  Synthetic
ggauucuguggaaccguauuag

SEQ ID NO: 6760 - RNA, 21 nt, Artificial Sequence
  Synthetic
gcuuuucuauucugguauuag

SEQ ID NO: 6761 - RNA, 20 nt, Artificial Sequence
  Synthetic
guuuauuuccucauacuuag

SEQ ID NO: 6762 - RNA, 24 nt, Artificial Sequence
  Synthetic
gaaaguuuauuuccucauacuuag

SEQ ID NO: 6763 - RNA, 21 nt, Artificial Sequence
  Synthetic
guuuagagaaagucaccuuag

SEQ ID NO: 6764 - RNA, 21 nt, Artificial Sequence
  Synthetic
gcuuuucuaccccugccuuag

SEQ ID NO: 6765 - RNA, 23 nt, Artificial Sequence
  Synthetic
gaauuagcagcaagauuccuuag

SEQ ID NO: 6766 - RNA, 19 nt, Artificial Sequence
  Synthetic
guuuuaaaugagggcuuag

SEQ ID NO: 6767 - RNA, 21 nt, Artificial Sequence
  Synthetic
gaguuuuaaaugagggcuuag

SEQ ID NO: 6768 - RNA, 22 nt, Artificial Sequence
  Synthetic
ggaguuuuaaaugagggcuuag

SEQ ID NO: 6769 - RNA, 24 nt, Artificial Sequence
  Synthetic
gaggaguuuuaaaugagggcuuag

SEQ ID NO: 6770 - RNA, 18 nt, Artificial Sequence
  Synthetic
gagagaacauuaucuuag

SEQ ID NO: 6771 - RNA, 21 nt, Artificial Sequence
  Synthetic
gcugagagaacauuaucuuag

SEQ ID NO: 6772 - RNA, 20 nt, Artificial Sequence
  Synthetic
gucugagaugaaacaguuag

SEQ ID NO: 6773 - RNA, 22 nt, Artificial Sequence
  Synthetic
gagucugagaugaaacaguuag

SEQ ID NO: 6774 - RNA, 24 nt, Artificial Sequence
  Synthetic
guuuguggguagguggauaguuag

SEQ ID NO: 6775 - RNA, 21 nt, Artificial Sequence
  Synthetic
gaucauucugguagugguuag

SEQ ID NO: 6776 - RNA, 21 nt, Artificial Sequence
  Synthetic
gauuaaagacuuuacuguuag

SEQ ID NO: 6777 - RNA, 21 nt, Artificial Sequence
  Synthetic
gauucuaaaaauagguguuag

SEQ ID NO: 6778 - RNA, 18 nt, Artificial Sequence
  Synthetic
guauauggacuuuguuag

SEQ ID NO: 6779 - RNA, 22 nt, Artificial Sequence
  Synthetic
guauguauauggacuuuguuag

SEQ ID NO: 6780 - RNA, 23 nt, Artificial Sequence
  Synthetic
gguauguauauggacuuuguuag

SEQ ID NO: 6781 - RNA, 18 nt, Artificial Sequence
  Synthetic
ggagcuaaggaaauuuag

SEQ ID NO: 6782 - RNA, 19 nt, Artificial Sequence
  Synthetic
gggagcuaaggaaauuuag

SEQ ID NO: 6783 - RNA, 20 nt, Artificial Sequence
  Synthetic
ggggagcuaaggaaauuuag

SEQ ID NO: 6784 - RNA, 24 nt, Artificial Sequence
  Synthetic
gcuaggggagcuaaggaaauuuag

SEQ ID NO: 6785 - RNA, 20 nt, Artificial Sequence
  Synthetic
guaguugacaauaaauuuag

SEQ ID NO: 6786 - RNA, 21 nt, Artificial Sequence
  Synthetic
gguaguugacaauaaauuuag

SEQ ID NO: 6787 - RNA, 24 nt, Artificial Sequence
  Synthetic
gaagguaguugacaauaaauuuag

SEQ ID NO: 6788 - RNA, 20 nt, Artificial Sequence
  Synthetic
gcuuagaaucgaagauuuag

SEQ ID NO: 6789 - RNA, 21 nt, Artificial Sequence
  Synthetic
ggcuuagaaucgaagauuuag

SEQ ID NO: 6790 - RNA, 23 nt, Artificial Sequence
  Synthetic
gauuaaaauaaauauuuauuuag

SEQ ID NO: 6791 - RNA, 24 nt, Artificial Sequence
  Synthetic
gccacuuuuucucccuuacuuuag

SEQ ID NO: 6792 - RNA, 20 nt, Artificial Sequence
  Synthetic
gcaguagcaccuugcuuuag

SEQ ID NO: 6793 - RNA, 23 nt, Artificial Sequence
  Synthetic
gaagcaguagcaccuugcuuuag

SEQ ID NO: 6794 - RNA, 20 nt, Artificial Sequence
  Synthetic
gacuuaacugccaucuuuag

SEQ ID NO: 6795 - RNA, 21 nt, Artificial Sequence
  Synthetic
ggacuuaacugccaucuuuag

SEQ ID NO: 6796 - RNA, 19 nt, Artificial Sequence
  Synthetic
gcuaggcaccucucuuuag

SEQ ID NO: 6797 - RNA, 20 nt, Artificial Sequence
  Synthetic
ggcuaggcaccucucuuuag

SEQ ID NO: 6798 - RNA, 21 nt, Artificial Sequence
  Synthetic
gggcuaggcaccucucuuuag

SEQ ID NO: 6799 - RNA, 21 nt, Artificial Sequence
  Synthetic
gcaucggguaucucucuuuag

SEQ ID NO: 6800 - RNA, 24 nt, Artificial Sequence
  Synthetic
guagcaucggguaucucucuuuag

SEQ ID NO: 6801 - RNA, 21 nt, Artificial Sequence
  Synthetic
gacuuuuuaagcuuucuuuag

SEQ ID NO: 6802 - RNA, 24 nt, Artificial Sequence
  Synthetic
gcagacuuuuuaagcuuucuuuag

SEQ ID NO: 6803 - RNA, 19 nt, Artificial Sequence
  Synthetic
guaaauacagaaaguuuag

SEQ ID NO: 6804 - RNA, 20 nt, Artificial Sequence
  Synthetic
gccaaaacguaaugguuuag

SEQ ID NO: 6805 - RNA, 18 nt, Artificial Sequence
  Synthetic
ggaaaaccacaauuuuag

SEQ ID NO: 6806 - RNA, 19 nt, Artificial Sequence
  Synthetic
gggaaaaccacaauuuuag

SEQ ID NO: 6807 - RNA, 21 nt, Artificial Sequence
  Synthetic
gagggaaaaccacaauuuuag

SEQ ID NO: 6808 - RNA, 22 nt, Artificial Sequence
  Synthetic
ggagggaaaaccacaauuuuag

SEQ ID NO: 6809 - RNA, 21 nt, Artificial Sequence
  Synthetic
gacaagaguacauaauuuuag

SEQ ID NO: 6810 - RNA, 20 nt, Artificial Sequence
  Synthetic
gauucaaaggaacauuuuag

SEQ ID NO: 6811 - RNA, 21 nt, Artificial Sequence
  Synthetic
gcugcaguuaacacauuuuag

SEQ ID NO: 6812 - RNA, 19 nt, Artificial Sequence
  Synthetic
guuauucuccaucuuuuag

SEQ ID NO: 6813 - RNA, 20 nt, Artificial Sequence
  Synthetic
gguuauucuccaucuuuuag

SEQ ID NO: 6814 - RNA, 23 nt, Artificial Sequence
  Synthetic
guagguuauucuccaucuuuuag

SEQ ID NO: 6815 - RNA, 23 nt, Artificial Sequence
  Synthetic
gaaaauauaccauuaucuuuuag

SEQ ID NO: 6816 - RNA, 19 nt, Artificial Sequence
  Synthetic
gagcauauuuggguuuuag

SEQ ID NO: 6817 - RNA, 24 nt, Artificial Sequence
  Synthetic
gacaugagcauauuuggguuuuag

SEQ ID NO: 6818 - RNA, 24 nt, Artificial Sequence
  Synthetic
gaaaaucucgguaccaauaaaacg

SEQ ID NO: 6819 - RNA, 24 nt, Artificial Sequence
  Synthetic
gaucaacauagguguccgucaacg

SEQ ID NO: 6820 - RNA, 23 nt, Artificial Sequence
  Synthetic
gcauaaacagugaaaacagaacg

SEQ ID NO: 6821 - RNA, 22 nt, Artificial Sequence
  Synthetic
guuucauacuguuuucagaacg

SEQ ID NO: 6822 - RNA, 18 nt, Artificial Sequence
  Synthetic
ggaaacucaccuagaacg

SEQ ID NO: 6823 - RNA, 22 nt, Artificial Sequence
  Synthetic
gccaggaaacucaccuagaacg

SEQ ID NO: 6824 - RNA, 23 nt, Artificial Sequence
  Synthetic
ggccaggaaacucaccuagaacg

SEQ ID NO: 6825 - RNA, 21 nt, Artificial Sequence
  Synthetic
gaauaacuaaaagaucuaacg

SEQ ID NO: 6826 - RNA, 24 nt, Artificial Sequence
  Synthetic
guagaauaacuaaaagaucuaacg

SEQ ID NO: 6827 - RNA, 21 nt, Artificial Sequence
  Synthetic
gcauggcccuuuagagacacg

SEQ ID NO: 6828 - RNA, 22 nt, Artificial Sequence
  Synthetic
gacauuacuuuuucuggacacg

SEQ ID NO: 6829 - RNA, 18 nt, Artificial Sequence
  Synthetic
gaaagaauuacuaccacg

SEQ ID NO: 6830 - RNA, 19 nt, Artificial Sequence
  Synthetic
ggaaagaauuacuaccacg

SEQ ID NO: 6831 - RNA, 21 nt, Artificial Sequence
  Synthetic
guggaaagaauuacuaccacg

SEQ ID NO: 6832 - RNA, 22 nt, Artificial Sequence
  Synthetic
gguggaaagaauuacuaccacg

SEQ ID NO: 6833 - RNA, 23 nt, Artificial Sequence
  Synthetic
ggguggaaagaauuacuaccacg

SEQ ID NO: 6834 - RNA, 24 nt, Artificial Sequence
  Synthetic
gggguggaaagaauuacuaccacg

SEQ ID NO: 6835 - RNA, 18 nt, Artificial Sequence
  Synthetic
ggcacucuucugggcacg

SEQ ID NO: 6836 - RNA, 24 nt, Artificial Sequence
  Synthetic
guacuaggcacucuucugggcacg

SEQ ID NO: 6837 - RNA, 24 nt, Artificial Sequence
  Synthetic
guaauuuuaaauaccgguugcacg

SEQ ID NO: 6838 - RNA, 18 nt, Artificial Sequence
  Synthetic
ggaugcugacaacucacg

SEQ ID NO: 6839 - RNA, 18 nt, Artificial Sequence
  Synthetic
gaucaucacuaugagacg

SEQ ID NO: 6840 - RNA, 23 nt, Artificial Sequence
  Synthetic
guauagaucaucacuaugagacg

SEQ ID NO: 6841 - RNA, 18 nt, Artificial Sequence
  Synthetic
gaccaauguuaauagacg

SEQ ID NO: 6842 - RNA, 18 nt, Artificial Sequence
  Synthetic
ggaacaagaaugaugacg

SEQ ID NO: 6843 - RNA, 18 nt, Artificial Sequence
  Synthetic
gugaccaagauacauacg

SEQ ID NO: 6844 - RNA, 21 nt, Artificial Sequence
  Synthetic
gacuguuuuccagaugauacg

SEQ ID NO: 6845 - RNA, 22 nt, Artificial Sequence
  Synthetic
gaaaaagcaaaaauugacuacg

SEQ ID NO: 6846 - RNA, 20 nt, Artificial Sequence
  Synthetic
gauucugauaaugaccuacg

SEQ ID NO: 6847 - RNA, 24 nt, Artificial Sequence
  Synthetic
guuaucagugcuggccugcuuacg

SEQ ID NO: 6848 - RNA, 22 nt, Artificial Sequence
  Synthetic
guuuaggauuucagaguuuacg

SEQ ID NO: 6849 - RNA, 18 nt, Artificial Sequence
  Synthetic
gugcuuucaaauggaccg

SEQ ID NO: 6850 - RNA, 22 nt, Artificial Sequence
  Synthetic
guuagugcuuucaaauggaccg

SEQ ID NO: 6851 - RNA, 18 nt, Artificial Sequence
  Synthetic
gacugagaugcuggaccg

SEQ ID NO: 6852 - RNA, 24 nt, Artificial Sequence
  Synthetic
guuaaugacugagaugcuggaccg

SEQ ID NO: 6853 - RNA, 21 nt, Artificial Sequence
  Synthetic
guaaugggggaaagguuaccg

SEQ ID NO: 6854 - RNA, 20 nt, Artificial Sequence
  Synthetic
guuuuauaaaccauuuaccg

SEQ ID NO: 6855 - RNA, 24 nt, Artificial Sequence
  Synthetic
gaaaguuuuauaaaccauuuaccg

SEQ ID NO: 6856 - RNA, 19 nt, Artificial Sequence
  Synthetic
gcccagaagucuucccccg

SEQ ID NO: 6857 - RNA, 20 nt, Artificial Sequence
  Synthetic
ggcccagaagucuucccccg

SEQ ID NO: 6858 - RNA, 22 nt, Artificial Sequence
  Synthetic
guacaguuuagaauguaucccg

SEQ ID NO: 6859 - RNA, 18 nt, Artificial Sequence
  Synthetic
gugauaaauuccuagccg

SEQ ID NO: 6860 - RNA, 24 nt, Artificial Sequence
  Synthetic
gaacccuacaacauguauuagccg

SEQ ID NO: 6861 - RNA, 18 nt, Artificial Sequence
  Synthetic
gauggcaguagcaauccg

SEQ ID NO: 6862 - RNA, 19 nt, Artificial Sequence
  Synthetic
ggauggcaguagcaauccg

SEQ ID NO: 6863 - RNA, 21 nt, Artificial Sequence
  Synthetic
gaggauggcaguagcaauccg

SEQ ID NO: 6864 - RNA, 23 nt, Artificial Sequence
  Synthetic
gugaggauggcaguagcaauccg

SEQ ID NO: 6865 - RNA, 20 nt, Artificial Sequence
  Synthetic
guaaccuaaaugcagcuccg

SEQ ID NO: 6866 - RNA, 22 nt, Artificial Sequence
  Synthetic
gaguaaccuaaaugcagcuccg

SEQ ID NO: 6867 - RNA, 23 nt, Artificial Sequence
  Synthetic
ggaguaaccuaaaugcagcuccg

SEQ ID NO: 6868 - RNA, 24 nt, Artificial Sequence
  Synthetic
gggaguaaccuaaaugcagcuccg

SEQ ID NO: 6869 - RNA, 22 nt, Artificial Sequence
  Synthetic
gaaccaccucuuuuauuuuccg

SEQ ID NO: 6870 - RNA, 19 nt, Artificial Sequence
  Synthetic
guucucaaaauggggggcg

SEQ ID NO: 6871 - RNA, 20 nt, Artificial Sequence
  Synthetic
gguucucaaaauggggggcg

SEQ ID NO: 6872 - RNA, 22 nt, Artificial Sequence
  Synthetic
gauauuuuuauuuugccuggcg

SEQ ID NO: 6873 - RNA, 18 nt, Artificial Sequence
  Synthetic
gguuuguuguuguuggcg

SEQ ID NO: 6874 - RNA, 23 nt, Artificial Sequence
  Synthetic
gaaaugguuuguuguuguuggcg

SEQ ID NO: 6875 - RNA, 22 nt, Artificial Sequence
  Synthetic
guaaucauccaaacuuuaugcg

SEQ ID NO: 6876 - RNA, 20 nt, Artificial Sequence
  Synthetic
guaccuuuuaaugggcugcg

SEQ ID NO: 6877 - RNA, 22 nt, Artificial Sequence
  Synthetic
gaguaccuuuuaaugggcugcg

SEQ ID NO: 6878 - RNA, 19 nt, Artificial Sequence
  Synthetic
guuugcacccuuuugugcg

SEQ ID NO: 6879 - RNA, 21 nt, Artificial Sequence
  Synthetic
guguuugcacccuuuugugcg

SEQ ID NO: 6880 - RNA, 23 nt, Artificial Sequence
  Synthetic
gccaacuucguagagguauugcg

SEQ ID NO: 6881 - RNA, 19 nt, Artificial Sequence
  Synthetic
guaggacagcuugcuugcg

SEQ ID NO: 6882 - RNA, 20 nt, Artificial Sequence
  Synthetic
gguaggacagcuugcuugcg

SEQ ID NO: 6883 - RNA, 19 nt, Artificial Sequence
  Synthetic
gucacugugcaaguaaucg

SEQ ID NO: 6884 - RNA, 18 nt, Artificial Sequence
  Synthetic
guucuacuucauccaucg

SEQ ID NO: 6885 - RNA, 22 nt, Artificial Sequence
  Synthetic
gaaaguucuacuucauccaucg

SEQ ID NO: 6886 - RNA, 23 nt, Artificial Sequence
  Synthetic
ggaaaguucuacuucauccaucg

SEQ ID NO: 6887 - RNA, 19 nt, Artificial Sequence
  Synthetic
gcugaguuggaaaagaucg

SEQ ID NO: 6888 - RNA, 24 nt, Artificial Sequence
  Synthetic
gaaaugcugaguuggaaaagaucg

SEQ ID NO: 6889 - RNA, 21 nt, Artificial Sequence
  Synthetic
guauucaucgcaacgaacucg

SEQ ID NO: 6890 - RNA, 18 nt, Artificial Sequence
  Synthetic
gcgaucuuuguauacucg

SEQ ID NO: 6891 - RNA, 19 nt, Artificial Sequence
  Synthetic
guuauggcaacaauccucg

SEQ ID NO: 6892 - RNA, 20 nt, Artificial Sequence
  Synthetic
gguuauggcaacaauccucg

SEQ ID NO: 6893 - RNA, 21 nt, Artificial Sequence
  Synthetic
ggguuauggcaacaauccucg

SEQ ID NO: 6894 - RNA, 22 nt, Artificial Sequence
  Synthetic
gggguuauggcaacaauccucg

SEQ ID NO: 6895 - RNA, 22 nt, Artificial Sequence
  Synthetic
gaauauugacuuccuaugcucg

SEQ ID NO: 6896 - RNA, 24 nt, Artificial Sequence
  Synthetic
gagaauauugacuuccuaugcucg

SEQ ID NO: 6897 - RNA, 24 nt, Artificial Sequence
  Synthetic
gauucauacacagaccuggucucg

SEQ ID NO: 6898 - RNA, 18 nt, Artificial Sequence
  Synthetic
gagaagacauaccagucg

SEQ ID NO: 6899 - RNA, 19 nt, Artificial Sequence
  Synthetic
ggagaagacauaccagucg

SEQ ID NO: 6900 - RNA, 20 nt, Artificial Sequence
  Synthetic
gaugagaggagagugagucg

SEQ ID NO: 6901 - RNA, 21 nt, Artificial Sequence
  Synthetic
ggaugagaggagagugagucg

SEQ ID NO: 6902 - RNA, 19 nt, Artificial Sequence
  Synthetic
gcucucuggggaugggucg

SEQ ID NO: 6903 - RNA, 22 nt, Artificial Sequence
  Synthetic
gaagcucucuggggaugggucg

SEQ ID NO: 6904 - RNA, 19 nt, Artificial Sequence
  Synthetic
gucgguauauaauaauucg

SEQ ID NO: 6905 - RNA, 24 nt, Artificial Sequence
  Synthetic
gcccaauuguagcauugagauucg

SEQ ID NO: 6906 - RNA, 21 nt, Artificial Sequence
  Synthetic
gucuugauaaguggaaguucg

SEQ ID NO: 6907 - RNA, 23 nt, Artificial Sequence
  Synthetic
gaccuaggcggcaaacaaaaagg

SEQ ID NO: 6908 - RNA, 24 nt, Artificial Sequence
  Synthetic
gucauuaaauacuuuugaaaaagg

SEQ ID NO: 6909 - RNA, 20 nt, Artificial Sequence
  Synthetic
gaaagucacaauuaaaaagg

SEQ ID NO: 6910 - RNA, 24 nt, Artificial Sequence
  Synthetic
guaugaaagucacaauuaaaaagg

SEQ ID NO: 6911 - RNA, 24 nt, Artificial Sequence
  Synthetic
guuaaauguauauuaaugaaaagg

SEQ ID NO: 6912 - RNA, 23 nt, Artificial Sequence
  Synthetic
guuccaaggagaauaugaaaagg

SEQ ID NO: 6913 - RNA, 21 nt, Artificial Sequence
  Synthetic
guuucacaaaaagugaaaagg

SEQ ID NO: 6914 - RNA, 20 nt, Artificial Sequence
  Synthetic
guuuuuaaaacgugaaaagg

SEQ ID NO: 6915 - RNA, 21 nt, Artificial Sequence
  Synthetic
gacugaugguugcuacaaagg

SEQ ID NO: 6916 - RNA, 23 nt, Artificial Sequence
  Synthetic
gagacugaugguugcuacaaagg

SEQ ID NO: 6917 - RNA, 24 nt, Artificial Sequence
  Synthetic
ggagacugaugguugcuacaaagg

SEQ ID NO: 6918 - RNA, 18 nt, Artificial Sequence
  Synthetic
ggcauacuuguacaaagg

SEQ ID NO: 6919 - RNA, 23 nt, Artificial Sequence
  Synthetic
gaaauggcauacuuguacaaagg

SEQ ID NO: 6920 - RNA, 24 nt, Artificial Sequence
  Synthetic
guauucaguuuuuugcgucaaagg

SEQ ID NO: 6921 - RNA, 21 nt, Artificial Sequence
  Synthetic
gucuuugaaaaaugagaaagg

SEQ ID NO: 6922 - RNA, 23 nt, Artificial Sequence
  Synthetic
gucccuaggcaugucuagaaagg

SEQ ID NO: 6923 - RNA, 19 nt, Artificial Sequence
  Synthetic
gagguaauuauaggaaagg

SEQ ID NO: 6924 - RNA, 22 nt, Artificial Sequence
  Synthetic
gaagagguaauuauaggaaagg

SEQ ID NO: 6925 - RNA, 23 nt, Artificial Sequence
  Synthetic
ggaagagguaauuauaggaaagg

SEQ ID NO: 6926 - RNA, 21 nt, Artificial Sequence
  Synthetic
guaauaggaguuucauaaagg

SEQ ID NO: 6927 - RNA, 23 nt, Artificial Sequence
  Synthetic
gcuuuuaucuuccaaguuaaagg

SEQ ID NO: 6928 - RNA, 23 nt, Artificial Sequence
  Synthetic
gcauuugagucaaguguuaaagg

SEQ ID NO: 6929 - RNA, 24 nt, Artificial Sequence
  Synthetic
ggcauuugagucaaguguuaaagg

SEQ ID NO: 6930 - RNA, 21 nt, Artificial Sequence
  Synthetic
guacaagaaaggaaaacaagg

SEQ ID NO: 6931 - RNA, 23 nt, Artificial Sequence
  Synthetic
gaguacaagaaaggaaaacaagg

SEQ ID NO: 6932 - RNA, 20 nt, Artificial Sequence
  Synthetic
gucuugggauauaaacaagg

SEQ ID NO: 6933 - RNA, 23 nt, Artificial Sequence
  Synthetic
guuuaagagagacaugaacaagg

SEQ ID NO: 6934 - RNA, 24 nt, Artificial Sequence
  Synthetic
gaauuccuugcuugccuggcaagg

SEQ ID NO: 6935 - RNA, 19 nt, Artificial Sequence
  Synthetic
gcauaucugaaauucaagg

SEQ ID NO: 6936 - RNA, 20 nt, Artificial Sequence
  Synthetic
ggcauaucugaaauucaagg

SEQ ID NO: 6937 - RNA, 19 nt, Artificial Sequence
  Synthetic
gcaaaugcgguauucaagg

SEQ ID NO: 6938 - RNA, 18 nt, Artificial Sequence
  Synthetic
ggauaaaauuauucaagg

SEQ ID NO: 6939 - RNA, 21 nt, Artificial Sequence
  Synthetic
gaaggauaaaauuauucaagg

SEQ ID NO: 6940 - RNA, 19 nt, Artificial Sequence
  Synthetic
gcuccuuuuguaaagaagg

SEQ ID NO: 6941 - RNA, 20 nt, Artificial Sequence
  Synthetic
ggcuccuuuuguaaagaagg

SEQ ID NO: 6942 - RNA, 24 nt, Artificial Sequence
  Synthetic
gccuggcuccuuuuguaaagaagg

SEQ ID NO: 6943 - RNA, 20 nt, Artificial Sequence
  Synthetic
gacauuacauggcaagaagg

SEQ ID NO: 6944 - RNA, 21 nt, Artificial Sequence
  Synthetic
ggacauuacauggcaagaagg

SEQ ID NO: 6945 - RNA, 24 nt, Artificial Sequence
  Synthetic
gcaggacauuacauggcaagaagg

SEQ ID NO: 6946 - RNA, 20 nt, Artificial Sequence
  Synthetic
guuucuucaccucuggaagg

SEQ ID NO: 6947 - RNA, 24 nt, Artificial Sequence
  Synthetic
gccuguuucuucaccucuggaagg

SEQ ID NO: 6948 - RNA, 19 nt, Artificial Sequence
  Synthetic
gauuacauaaccaugaagg

SEQ ID NO: 6949 - RNA, 20 nt, Artificial Sequence
  Synthetic
ggauuacauaaccaugaagg

SEQ ID NO: 6950 - RNA, 21 nt, Artificial Sequence
  Synthetic
gggauuacauaaccaugaagg

SEQ ID NO: 6951 - RNA, 20 nt, Artificial Sequence
  Synthetic
guucccugaaggacugaagg

SEQ ID NO: 6952 - RNA, 24 nt, Artificial Sequence
  Synthetic
gucaaccaucacagcagcugaagg

SEQ ID NO: 6953 - RNA, 22 nt, Artificial Sequence
  Synthetic
gaggaucucugaagucugaagg

SEQ ID NO: 6954 - RNA, 23 nt, Artificial Sequence
  Synthetic
ggaggaucucugaagucugaagg

SEQ ID NO: 6955 - RNA, 19 nt, Artificial Sequence
  Synthetic
gcuggcauauacuugaagg

SEQ ID NO: 6956 - RNA, 20 nt, Artificial Sequence
  Synthetic
gcaagacucaaccaauaagg

SEQ ID NO: 6957 - RNA, 22 nt, Artificial Sequence
  Synthetic
gagcaagacucaaccaauaagg

SEQ ID NO: 6958 - RNA, 23 nt, Artificial Sequence
  Synthetic
ggagcaagacucaaccaauaagg

SEQ ID NO: 6959 - RNA, 22 nt, Artificial Sequence
  Synthetic
gauuuauaaaagccuaauaagg

SEQ ID NO: 6960 - RNA, 23 nt, Artificial Sequence
  Synthetic
ggauuuauaaaagccuaauaagg

SEQ ID NO: 6961 - RNA, 23 nt, Artificial Sequence
  Synthetic
gauaucagauuguaucacuaagg

SEQ ID NO: 6962 - RNA, 22 nt, Artificial Sequence
  Synthetic
gaacauuguagaauugcuaagg

SEQ ID NO: 6963 - RNA, 23 nt, Artificial Sequence
  Synthetic
ggaacauuguagaauugcuaagg

SEQ ID NO: 6964 - RNA, 18 nt, Artificial Sequence
  Synthetic
ggcugcaugauucuaagg

SEQ ID NO: 6965 - RNA, 21 nt, Artificial Sequence
  Synthetic
gcuggcugcaugauucuaagg

SEQ ID NO: 6966 - RNA, 18 nt, Artificial Sequence
  Synthetic
guugauaagcacguaagg

SEQ ID NO: 6967 - RNA, 20 nt, Artificial Sequence
  Synthetic
gaguugauaagcacguaagg

SEQ ID NO: 6968 - RNA, 22 nt, Artificial Sequence
  Synthetic
gugaguugauaagcacguaagg

SEQ ID NO: 6969 - RNA, 19 nt, Artificial Sequence
  Synthetic
guugccauacauuguaagg

SEQ ID NO: 6970 - RNA, 20 nt, Artificial Sequence
  Synthetic
gguugccauacauuguaagg

SEQ ID NO: 6971 - RNA, 19 nt, Artificial Sequence
  Synthetic
gacaauguauaaauuaagg

SEQ ID NO: 6972 - RNA, 22 nt, Artificial Sequence
  Synthetic
gaugacaauguauaaauuaagg

SEQ ID NO: 6973 - RNA, 22 nt, Artificial Sequence
  Synthetic
gauuccuaccugaagcuuaagg

SEQ ID NO: 6974 - RNA, 23 nt, Artificial Sequence
  Synthetic
ggauuccuaccugaagcuuaagg

SEQ ID NO: 6975 - RNA, 22 nt, Artificial Sequence
  Synthetic
gauauagugcuggauuuuaagg

SEQ ID NO: 6976 - RNA, 23 nt, Artificial Sequence
  Synthetic
ggauauagugcuggauuuuaagg

SEQ ID NO: 6977 - RNA, 18 nt, Artificial Sequence
  Synthetic
gaacaauacagcaacagg

SEQ ID NO: 6978 - RNA, 19 nt, Artificial Sequence
  Synthetic
ggaacaauacagcaacagg

SEQ ID NO: 6979 - RNA, 19 nt, Artificial Sequence
  Synthetic
gaaacugaguacccacagg

SEQ ID NO: 6980 - RNA, 20 nt, Artificial Sequence
  Synthetic
ggaaacugaguacccacagg

SEQ ID NO: 6981 - RNA, 24 nt, Artificial Sequence
  Synthetic
guuuggaaacugaguacccacagg

SEQ ID NO: 6982 - RNA, 21 nt, Artificial Sequence
  Synthetic
guaccugcugauaagcacagg

SEQ ID NO: 6983 - RNA, 22 nt, Artificial Sequence
  Synthetic
gguaccugcugauaagcacagg

SEQ ID NO: 6984 - RNA, 19 nt, Artificial Sequence
  Synthetic
gugcauccaaguagacagg

SEQ ID NO: 6985 - RNA, 22 nt, Artificial Sequence
  Synthetic
gcugugcauccaaguagacagg

SEQ ID NO: 6986 - RNA, 21 nt, Artificial Sequence
  Synthetic
guuagcucauauauugacagg

SEQ ID NO: 6987 - RNA, 24 nt, Artificial Sequence
  Synthetic
guuagcuuuaagaaauuauacagg

SEQ ID NO: 6988 - RNA, 24 nt, Artificial Sequence
  Synthetic
gacauacuaaguagguguuacagg

SEQ ID NO: 6989 - RNA, 19 nt, Artificial Sequence
  Synthetic
guaaacagaagccaccagg

SEQ ID NO: 6990 - RNA, 22 nt, Artificial Sequence
  Synthetic
guuguaaacagaagccaccagg

SEQ ID NO: 6991 - RNA, 18 nt, Artificial Sequence
  Synthetic
gaccugcaacagcccagg

SEQ ID NO: 6992 - RNA, 22 nt, Artificial Sequence
  Synthetic
gacugaccugcaacagcccagg

SEQ ID NO: 6993 - RNA, 22 nt, Artificial Sequence
  Synthetic
gaaagaaagagaagagcccagg

SEQ ID NO: 6994 - RNA, 23 nt, Artificial Sequence
  Synthetic
ggaaagaaagagaagagcccagg

SEQ ID NO: 6995 - RNA, 24 nt, Artificial Sequence
  Synthetic
gggaaagaaagagaagagcccagg

SEQ ID NO: 6996 - RNA, 22 nt, Artificial Sequence
  Synthetic
guacuugucagcauuucccagg

SEQ ID NO: 6997 - RNA, 18 nt, Artificial Sequence
  Synthetic
ggaauguaaaaggccagg

SEQ ID NO: 6998 - RNA, 19 nt, Artificial Sequence
  Synthetic
gggaauguaaaaggccagg

SEQ ID NO: 6999 - RNA, 24 nt, Artificial Sequence
  Synthetic
gcucugggaauguaaaaggccagg

SEQ ID NO: 7000 - RNA, 18 nt, Artificial Sequence
  Synthetic
gauaagguaagauccagg

SEQ ID NO: 7001 - RNA, 20 nt, Artificial Sequence
  Synthetic
gagauaagguaagauccagg

SEQ ID NO: 7002 - RNA, 21 nt, Artificial Sequence
  Synthetic
ggagauaagguaagauccagg

SEQ ID NO: 7003 - RNA, 22 nt, Artificial Sequence
  Synthetic
gggagauaagguaagauccagg

SEQ ID NO: 7004 - RNA, 22 nt, Artificial Sequence
  Synthetic
guaaccuauugaccucuccagg

SEQ ID NO: 7005 - RNA, 23 nt, Artificial Sequence
  Synthetic
gguaaccuauugaccucuccagg

SEQ ID NO: 7006 - RNA, 24 nt, Artificial Sequence
  Synthetic
ggguaaccuauugaccucuccagg

SEQ ID NO: 7007 - RNA, 24 nt, Artificial Sequence
  Synthetic
gaaauuuucauuauuaaaagcagg

SEQ ID NO: 7008 - RNA, 21 nt, Artificial Sequence
  Synthetic
guuuccaucaggggacgcagg

SEQ ID NO: 7009 - RNA, 22 nt, Artificial Sequence
  Synthetic
gguuuccaucaggggacgcagg

SEQ ID NO: 7010 - RNA, 23 nt, Artificial Sequence
  Synthetic
ggguuuccaucaggggacgcagg

SEQ ID NO: 7011 - RNA, 21 nt, Artificial Sequence
  Synthetic
gaacauuugguccuuugcagg

SEQ ID NO: 7012 - RNA, 21 nt, Artificial Sequence
  Synthetic
gaauacuagggaagaaucagg

SEQ ID NO: 7013 - RNA, 24 nt, Artificial Sequence
  Synthetic
guagaauacuagggaagaaucagg

SEQ ID NO: 7014 - RNA, 19 nt, Artificial Sequence
  Synthetic
gucuacaacaaagcucagg

SEQ ID NO: 7015 - RNA, 23 nt, Artificial Sequence
  Synthetic
gauagucuacaacaaagcucagg

SEQ ID NO: 7016 - RNA, 18 nt, Artificial Sequence
  Synthetic
ggggugugauuucucagg

SEQ ID NO: 7017 - RNA, 21 nt, Artificial Sequence
  Synthetic
guaggggugugauuucucagg

SEQ ID NO: 7018 - RNA, 23 nt, Artificial Sequence
  Synthetic
gaguaggggugugauuucucagg

SEQ ID NO: 7019 - RNA, 19 nt, Artificial Sequence
  Synthetic
gaagccaaucugagucagg

SEQ ID NO: 7020 - RNA, 19 nt, Artificial Sequence
  Synthetic
guuaaaaacuuuagucagg

SEQ ID NO: 7021 - RNA, 20 nt, Artificial Sequence
  Synthetic
gguuaaaaacuuuagucagg

SEQ ID NO: 7022 - RNA, 21 nt, Artificial Sequence
  Synthetic
ggguuaaaaacuuuagucagg

SEQ ID NO: 7023 - RNA, 22 nt, Artificial Sequence
  Synthetic
gggguuaaaaacuuuagucagg

SEQ ID NO: 7024 - RNA, 19 nt, Artificial Sequence
  Synthetic
gaguuuccauggggucagg

SEQ ID NO: 7025 - RNA, 21 nt, Artificial Sequence
  Synthetic
gugaguuuccauggggucagg

SEQ ID NO: 7026 - RNA, 19 nt, Artificial Sequence
  Synthetic
gaaugaauggcuauucagg

SEQ ID NO: 7027 - RNA, 20 nt, Artificial Sequence
  Synthetic
ggaaugaauggcuauucagg

SEQ ID NO: 7028 - RNA, 20 nt, Artificial Sequence
  Synthetic
guaguaugcaguuauucagg

SEQ ID NO: 7029 - RNA, 23 nt, Artificial Sequence
  Synthetic
guuguaguaugcaguuauucagg

SEQ ID NO: 7030 - RNA, 18 nt, Artificial Sequence
  Synthetic
ggacagauuagguucagg

SEQ ID NO: 7031 - RNA, 19 nt, Artificial Sequence
  Synthetic
gggacagauuagguucagg

SEQ ID NO: 7032 - RNA, 20 nt, Artificial Sequence
  Synthetic
guucucgauugaauuucagg

SEQ ID NO: 7033 - RNA, 22 nt, Artificial Sequence
  Synthetic
gaauuuugcuacauauuucagg

SEQ ID NO: 7034 - RNA, 23 nt, Artificial Sequence
  Synthetic
gaauaaaaauuucuuuuuucagg

SEQ ID NO: 7035 - RNA, 24 nt, Artificial Sequence
  Synthetic
gaacaaaagaagggcaaaaagagg

SEQ ID NO: 7036 - RNA, 18 nt, Artificial Sequence
  Synthetic
gucuuggaguauaagagg

SEQ ID NO: 7037 - RNA, 23 nt, Artificial Sequence
  Synthetic
gauaaugugcuaguacuaagagg

SEQ ID NO: 7038 - RNA, 22 nt, Artificial Sequence
  Synthetic
gauuauagguauaguuaagagg

SEQ ID NO: 7039 - RNA, 23 nt, Artificial Sequence
  Synthetic
ggauuauagguauaguuaagagg

SEQ ID NO: 7040 - RNA, 21 nt, Artificial Sequence
  Synthetic
ggagaacaggaaggacagagg

SEQ ID NO: 7041 - RNA, 22 nt, Artificial Sequence
  Synthetic
gggagaacaggaaggacagagg

SEQ ID NO: 7042 - RNA, 24 nt, Artificial Sequence
  Synthetic
gagggagaacaggaaggacagagg

SEQ ID NO: 7043 - RNA, 18 nt, Artificial Sequence
  Synthetic
gucuagauguagcagagg

SEQ ID NO: 7044 - RNA, 24 nt, Artificial Sequence
  Synthetic
gucauugucuagauguagcagagg

SEQ ID NO: 7045 - RNA, 18 nt, Artificial Sequence
  Synthetic
gaagaaguagaucagagg

SEQ ID NO: 7046 - RNA, 21 nt, Artificial Sequence
  Synthetic
gaagcaucugauagucagagg

SEQ ID NO: 7047 - RNA, 24 nt, Artificial Sequence
  Synthetic
gcagaagcaucugauagucagagg

SEQ ID NO: 7048 - RNA, 18 nt, Artificial Sequence
  Synthetic
gcaguuuuccaagagagg

SEQ ID NO: 7049 - RNA, 19 nt, Artificial Sequence
  Synthetic
ggcaguuuuccaagagagg

SEQ ID NO: 7050 - RNA, 20 nt, Artificial Sequence
  Synthetic
gggcaguuuuccaagagagg

SEQ ID NO: 7051 - RNA, 20 nt, Artificial Sequence
  Synthetic
gcacuucucacucagagagg

SEQ ID NO: 7052 - RNA, 21 nt, Artificial Sequence
  Synthetic
ggcacuucucacucagagagg

SEQ ID NO: 7053 - RNA, 22 nt, Artificial Sequence
  Synthetic
gggcacuucucacucagagagg

SEQ ID NO: 7054 - RNA, 21 nt, Artificial Sequence
  Synthetic
gagaagugugaaggagagagg

SEQ ID NO: 7055 - RNA, 24 nt, Artificial Sequence
  Synthetic
gaagagaagugugaaggagagagg

SEQ ID NO: 7056 - RNA, 22 nt, Artificial Sequence
  Synthetic
guaucagugauuaggggagagg

SEQ ID NO: 7057 - RNA, 24 nt, Artificial Sequence
  Synthetic
guguaucagugauuaggggagagg

SEQ ID NO: 7058 - RNA, 22 nt, Artificial Sequence
  Synthetic
guacagaggaaaaacugagagg

SEQ ID NO: 7059 - RNA, 18 nt, Artificial Sequence
  Synthetic
guguuauuccuauagagg

SEQ ID NO: 7060 - RNA, 20 nt, Artificial Sequence
  Synthetic
gaguguuauuccuauagagg

SEQ ID NO: 7061 - RNA, 18 nt, Artificial Sequence
  Synthetic
ggaggaauuuuauagagg

SEQ ID NO: 7062 - RNA, 21 nt, Artificial Sequence
  Synthetic
gaauauuccagaaucuagagg

SEQ ID NO: 7063 - RNA, 23 nt, Artificial Sequence
  Synthetic
gagaauauuccagaaucuagagg

SEQ ID NO: 7064 - RNA, 18 nt, Artificial Sequence
  Synthetic
guaauagcuaguuagagg

SEQ ID NO: 7065 - RNA, 23 nt, Artificial Sequence
  Synthetic
guauuguaauagcuaguuagagg

SEQ ID NO: 7066 - RNA, 24 nt, Artificial Sequence
  Synthetic
gguauuguaauagcuaguuagagg

SEQ ID NO: 7067 - RNA, 22 nt, Artificial Sequence
  Synthetic
gcaucaaauggauuucacgagg

SEQ ID NO: 7068 - RNA, 23 nt, Artificial Sequence
  Synthetic
ggcaucaaauggauuucacgagg

SEQ ID NO: 7069 - RNA, 24 nt, Artificial Sequence
  Synthetic
gggcaucaaauggauuucacgagg

SEQ ID NO: 7070 - RNA, 21 nt, Artificial Sequence
  Synthetic
gcaauggaguauuacaggagg

SEQ ID NO: 7071 - RNA, 22 nt, Artificial Sequence
  Synthetic
guggaaugcuuccaggaggagg

SEQ ID NO: 7072 - RNA, 19 nt, Artificial Sequence
  Synthetic
guuggggauuuggaggagg

SEQ ID NO: 7073 - RNA, 24 nt, Artificial Sequence
  Synthetic
gucaaguuggggauuuggaggagg

SEQ ID NO: 7074 - RNA, 22 nt, Artificial Sequence
  Synthetic
guaucaaggacagacggggagg

SEQ ID NO: 7075 - RNA, 24 nt, Artificial Sequence
  Synthetic
gaguaucaaggacagacggggagg

SEQ ID NO: 7076 - RNA, 19 nt, Artificial Sequence
  Synthetic
gauuagcucaucugggagg

SEQ ID NO: 7077 - RNA, 22 nt, Artificial Sequence
  Synthetic
guagauuagcucaucugggagg

SEQ ID NO: 7078 - RNA, 23 nt, Artificial Sequence
  Synthetic
gguagauuagcucaucugggagg

SEQ ID NO: 7079 - RNA, 21 nt, Artificial Sequence
  Synthetic
gguuaacagaggcuugggagg

SEQ ID NO: 7080 - RNA, 21 nt, Artificial Sequence
  Synthetic
gcuaaauauaaugaauggagg

SEQ ID NO: 7081 - RNA, 23 nt, Artificial Sequence
  Synthetic
gagcuaaauauaaugaauggagg

SEQ ID NO: 7082 - RNA, 18 nt, Artificial Sequence
  Synthetic
gucacaagugaguggagg

SEQ ID NO: 7083 - RNA, 21 nt, Artificial Sequence
  Synthetic
gcugucacaagugaguggagg

SEQ ID NO: 7084 - RNA, 22 nt, Artificial Sequence
  Synthetic
ggcugucacaagugaguggagg

SEQ ID NO: 7085 - RNA, 18 nt, Artificial Sequence
  Synthetic
gguggugguuauuggagg

SEQ ID NO: 7086 - RNA, 20 nt, Artificial Sequence
  Synthetic
gugguggugguuauuggagg

SEQ ID NO: 7087 - RNA, 24 nt, Artificial Sequence
  Synthetic
guuaaaaaacaaaacaaaaugagg

SEQ ID NO: 7088 - RNA, 21 nt, Artificial Sequence
  Synthetic
guuuucuaaaugaaaaugagg

SEQ ID NO: 7089 - RNA, 22 nt, Artificial Sequence
  Synthetic
gaugaggaagaaauugaugagg

SEQ ID NO: 7090 - RNA, 19 nt, Artificial Sequence
  Synthetic
gccguaaagguuggugagg

SEQ ID NO: 7091 - RNA, 20 nt, Artificial Sequence
  Synthetic
ggccguaaagguuggugagg

SEQ ID NO: 7092 - RNA, 21 nt, Artificial Sequence
  Synthetic
gggccguaaagguuggugagg

SEQ ID NO: 7093 - RNA, 24 nt, Artificial Sequence
  Synthetic
gaagggccguaaagguuggugagg

SEQ ID NO: 7094 - RNA, 22 nt, Artificial Sequence
  Synthetic
gcacugcaaaagaccugugagg

SEQ ID NO: 7095 - RNA, 18 nt, Artificial Sequence
  Synthetic
guaaagacuugugugagg

SEQ ID NO: 7096 - RNA, 19 nt, Artificial Sequence
  Synthetic
gguaaagacuugugugagg

SEQ ID NO: 7097 - RNA, 20 nt, Artificial Sequence
  Synthetic
ggguaaagacuugugugagg

SEQ ID NO: 7098 - RNA, 21 nt, Artificial Sequence
  Synthetic
gggguaaagacuugugugagg

SEQ ID NO: 7099 - RNA, 24 nt, Artificial Sequence
  Synthetic
gccaauauggcuaagacauugagg

SEQ ID NO: 7100 - RNA, 18 nt, Artificial Sequence
  Synthetic
gaggaguggccaaauagg

SEQ ID NO: 7101 - RNA, 20 nt, Artificial Sequence
  Synthetic
gugaggaguggccaaauagg

SEQ ID NO: 7102 - RNA, 22 nt, Artificial Sequence
  Synthetic
gagugaggaguggccaaauagg

SEQ ID NO: 7103 - RNA, 24 nt, Artificial Sequence
  Synthetic
gagagugaggaguggccaaauagg

SEQ ID NO: 7104 - RNA, 18 nt, Artificial Sequence
  Synthetic
ggagauugaagacauagg

SEQ ID NO: 7105 - RNA, 21 nt, Artificial Sequence
  Synthetic
gacggagauugaagacauagg

SEQ ID NO: 7106 - RNA, 24 nt, Artificial Sequence
  Synthetic
guagacggagauugaagacauagg

SEQ ID NO: 7107 - RNA, 18 nt, Artificial Sequence
  Synthetic
gaauuuuuaucauauagg

SEQ ID NO: 7108 - RNA, 23 nt, Artificial Sequence
  Synthetic
guuaagaauuuuuaucauauagg

SEQ ID NO: 7109 - RNA, 19 nt, Artificial Sequence
  Synthetic
guaauaacaaugauauagg

SEQ ID NO: 7110 - RNA, 23 nt, Artificial Sequence
  Synthetic
gauaguaauaacaaugauauagg

SEQ ID NO: 7111 - RNA, 20 nt, Artificial Sequence
  Synthetic
guucaugguugugguauagg

SEQ ID NO: 7112 - RNA, 21 nt, Artificial Sequence
  Synthetic
gcacaaaaagcagaaacuagg

SEQ ID NO: 7113 - RNA, 24 nt, Artificial Sequence
  Synthetic
gcagcacaaaaagcagaaacuagg

SEQ ID NO: 7114 - RNA, 19 nt, Artificial Sequence
  Synthetic
gcacguuagaaucacuagg

SEQ ID NO: 7115 - RNA, 21 nt, Artificial Sequence
  Synthetic
gaacaaggcucacaaccuagg

SEQ ID NO: 7116 - RNA, 23 nt, Artificial Sequence
  Synthetic
gagaacaaggcucacaaccuagg

SEQ ID NO: 7117 - RNA, 20 nt, Artificial Sequence
  Synthetic
gaauauaguacccagcuagg

SEQ ID NO: 7118 - RNA, 19 nt, Artificial Sequence
  Synthetic
gcaucgauagcaugcuagg

SEQ ID NO: 7119 - RNA, 22 nt, Artificial Sequence
  Synthetic
gaagcaucgauagcaugcuagg

SEQ ID NO: 7120 - RNA, 22 nt, Artificial Sequence
  Synthetic
gccucuccagacugcuucuagg

SEQ ID NO: 7121 - RNA, 18 nt, Artificial Sequence
  Synthetic
gcuuuggggacaaguagg

SEQ ID NO: 7122 - RNA, 19 nt, Artificial Sequence
  Synthetic
gaagguccagaggaguagg

SEQ ID NO: 7123 - RNA, 20 nt, Artificial Sequence
  Synthetic
ggaagguccagaggaguagg

SEQ ID NO: 7124 - RNA, 18 nt, Artificial Sequence
  Synthetic
guaucucucuuuaguagg

SEQ ID NO: 7125 - RNA, 19 nt, Artificial Sequence
  Synthetic
gguaucucucuuuaguagg

SEQ ID NO: 7126 - RNA, 20 nt, Artificial Sequence
  Synthetic
ggguaucucucuuuaguagg

SEQ ID NO: 7127 - RNA, 19 nt, Artificial Sequence
  Synthetic
guauauauacagccguagg

SEQ ID NO: 7128 - RNA, 23 nt, Artificial Sequence
  Synthetic
gccuguauauauacagccguagg

SEQ ID NO: 7129 - RNA, 19 nt, Artificial Sequence
  Synthetic
gcaugcugucuuucguagg

SEQ ID NO: 7130 - RNA, 20 nt, Artificial Sequence
  Synthetic
ggcaugcugucuuucguagg

SEQ ID NO: 7131 - RNA, 21 nt, Artificial Sequence
  Synthetic
gggcaugcugucuuucguagg

SEQ ID NO: 7132 - RNA, 23 nt, Artificial Sequence
  Synthetic
guaacuauagcuuuuuagguagg

SEQ ID NO: 7133 - RNA, 23 nt, Artificial Sequence
  Synthetic
guuuuauuucccccugugguagg

SEQ ID NO: 7134 - RNA, 19 nt, Artificial Sequence
  Synthetic
guacuucccuaucuguagg

SEQ ID NO: 7135 - RNA, 23 nt, Artificial Sequence
  Synthetic
gaaaguacuucccuaucuguagg

SEQ ID NO: 7136 - RNA, 24 nt, Artificial Sequence
  Synthetic
guaucuuuaggaugcaaaauuagg

SEQ ID NO: 7137 - RNA, 21 nt, Artificial Sequence
  Synthetic
gauuagauauagaccauuagg

SEQ ID NO: 7138 - RNA, 19 nt, Artificial Sequence
  Synthetic
gugccacucacaacuuagg

SEQ ID NO: 7139 - RNA, 24 nt, Artificial Sequence
  Synthetic
gcuuacaagagacuuuuccuuagg

SEQ ID NO: 7140 - RNA, 18 nt, Artificial Sequence
  Synthetic
gccaaaggggaucuuagg

SEQ ID NO: 7141 - RNA, 22 nt, Artificial Sequence
  Synthetic
gaaagccaaaggggaucuuagg

SEQ ID NO: 7142 - RNA, 23 nt, Artificial Sequence
  Synthetic
ggaaagccaaaggggaucuuagg

SEQ ID NO: 7143 - RNA, 20 nt, Artificial Sequence
  Synthetic
gucuuuauaguuaaguuagg

SEQ ID NO: 7144 - RNA, 23 nt, Artificial Sequence
  Synthetic
guauaugaaacauuccaguuagg

SEQ ID NO: 7145 - RNA, 18 nt, Artificial Sequence
  Synthetic
gggaaaguaggaguuagg

SEQ ID NO: 7146 - RNA, 22 nt, Artificial Sequence
  Synthetic
gccugggaaaguaggaguuagg

SEQ ID NO: 7147 - RNA, 24 nt, Artificial Sequence
  Synthetic
gugccugggaaaguaggaguuagg

SEQ ID NO: 7148 - RNA, 24 nt, Artificial Sequence
  Synthetic
guuuuuauuugaguauuauuuagg

SEQ ID NO: 7149 - RNA, 18 nt, Artificial Sequence
  Synthetic
gacucuaguuacuuuagg

SEQ ID NO: 7150 - RNA, 20 nt, Artificial Sequence
  Synthetic
gugacucuaguuacuuuagg

SEQ ID NO: 7151 - RNA, 24 nt, Artificial Sequence
  Synthetic
gaaagugacucuaguuacuuuagg

SEQ ID NO: 7152 - RNA, 18 nt, Artificial Sequence
  Synthetic
gagacccagagcuuuagg

SEQ ID NO: 7153 - RNA, 22 nt, Artificial Sequence
  Synthetic
guuugagacccagagcuuuagg

SEQ ID NO: 7154 - RNA, 18 nt, Artificial Sequence
  Synthetic
gcuauugacuucuuuagg

SEQ ID NO: 7155 - RNA, 20 nt, Artificial Sequence
  Synthetic
guuuccuguacauguuuagg

SEQ ID NO: 7156 - RNA, 23 nt, Artificial Sequence
  Synthetic
gcuguuuccuguacauguuuagg

SEQ ID NO: 7157 - RNA, 18 nt, Artificial Sequence
  Synthetic
gcagguuaagauuuuagg

SEQ ID NO: 7158 - RNA, 22 nt, Artificial Sequence
  Synthetic
guuagcagguuaagauuuuagg

SEQ ID NO: 7159 - RNA, 24 nt, Artificial Sequence
  Synthetic
gaguuagcagguuaagauuuuagg

SEQ ID NO: 7160 - RNA, 19 nt, Artificial Sequence
  Synthetic
gcaagagagcauaaaacgg

SEQ ID NO: 7161 - RNA, 23 nt, Artificial Sequence
  Synthetic
gaaagcaagagagcauaaaacgg

SEQ ID NO: 7162 - RNA, 24 nt, Artificial Sequence
  Synthetic
ggaaagcaagagagcauaaaacgg

SEQ ID NO: 7163 - RNA, 21 nt, Artificial Sequence
  Synthetic
guuuaggacugcuuccaacgg

SEQ ID NO: 7164 - RNA, 22 nt, Artificial Sequence
  Synthetic
gguuuaggacugcuuccaacgg

SEQ ID NO: 7165 - RNA, 18 nt, Artificial Sequence
  Synthetic
gagggcgcagaagcacgg

SEQ ID NO: 7166 - RNA, 19 nt, Artificial Sequence
  Synthetic
gauagaagccagaagacgg

SEQ ID NO: 7167 - RNA, 24 nt, Artificial Sequence
  Synthetic
gcaaugauagaagccagaagacgg

SEQ ID NO: 7168 - RNA, 23 nt, Artificial Sequence
  Synthetic
gacauagguuacugaggugacgg

SEQ ID NO: 7169 - RNA, 18 nt, Artificial Sequence
  Synthetic
gcaucuaguaauugacgg

SEQ ID NO: 7170 - RNA, 23 nt, Artificial Sequence
  Synthetic
gacaagcaucuaguaauugacgg

SEQ ID NO: 7171 - RNA, 24 nt, Artificial Sequence
  Synthetic
gcuuucuucaugcauugaauacgg

SEQ ID NO: 7172 - RNA, 23 nt, Artificial Sequence
  Synthetic
gccuacuagaauguaaguuacgg

SEQ ID NO: 7173 - RNA, 24 nt, Artificial Sequence
  Synthetic
gucuuguaaacuguauagaaccgg

SEQ ID NO: 7174 - RNA, 18 nt, Artificial Sequence
  Synthetic
gaucauauuuagccccgg

SEQ ID NO: 7175 - RNA, 20 nt, Artificial Sequence
  Synthetic
gugaucauauuuagccccgg

SEQ ID NO: 7176 - RNA, 23 nt, Artificial Sequence
  Synthetic
gaagugaucauauuuagccccgg

SEQ ID NO: 7177 - RNA, 22 nt, Artificial Sequence
  Synthetic
gccuuaugggugcaacucccgg

SEQ ID NO: 7178 - RNA, 24 nt, Artificial Sequence
  Synthetic
gauccuuuagaacugaauucccgg

SEQ ID NO: 7179 - RNA, 23 nt, Artificial Sequence
  Synthetic
gcaccugcugcucaggccagcgg

SEQ ID NO: 7180 - RNA, 18 nt, Artificial Sequence
  Synthetic
guuuucauugauuuucgg

SEQ ID NO: 7181 - RNA, 22 nt, Artificial Sequence
  Synthetic
gccauuuucuucugcaaaaggg

SEQ ID NO: 7182 - RNA, 23 nt, Artificial Sequence
  Synthetic
ggccauuuucuucugcaaaaggg

SEQ ID NO: 7183 - RNA, 23 nt, Artificial Sequence
  Synthetic
guccccuucggccgucaaaaggg

SEQ ID NO: 7184 - RNA, 23 nt, Artificial Sequence
  Synthetic
gaaaauagacacugaagaaaggg

SEQ ID NO: 7185 - RNA, 21 nt, Artificial Sequence
  Synthetic
gaucaccgcauagcuaaaggg

SEQ ID NO: 7186 - RNA, 19 nt, Artificial Sequence
  Synthetic
gcuguggggaacacaaggg

SEQ ID NO: 7187 - RNA, 21 nt, Artificial Sequence
  Synthetic
gugcuguggggaacacaaggg

SEQ ID NO: 7188 - RNA, 21 nt, Artificial Sequence
  Synthetic
guauacagggccauagaaggg

SEQ ID NO: 7189 - RNA, 22 nt, Artificial Sequence
  Synthetic
gguauacagggccauagaaggg

SEQ ID NO: 7190 - RNA, 21 nt, Artificial Sequence
  Synthetic
gaauaaguguucauagaaggg

SEQ ID NO: 7191 - RNA, 23 nt, Artificial Sequence
  Synthetic
guuggaugugugugugggaaggg

SEQ ID NO: 7192 - RNA, 20 nt, Artificial Sequence
  Synthetic
gucuuuguuucauugaaggg

SEQ ID NO: 7193 - RNA, 21 nt, Artificial Sequence
  Synthetic
ggucuuuguuucauugaaggg

SEQ ID NO: 7194 - RNA, 24 nt, Artificial Sequence
  Synthetic
gauggucuuuguuucauugaaggg

SEQ ID NO: 7195 - RNA, 21 nt, Artificial Sequence
  Synthetic
guuuuagugugguaauaaggg

SEQ ID NO: 7196 - RNA, 22 nt, Artificial Sequence
  Synthetic
gguuuuagugugguaauaaggg

SEQ ID NO: 7197 - RNA, 23 nt, Artificial Sequence
  Synthetic
gauuuuacuuugaaauuuaaggg

SEQ ID NO: 7198 - RNA, 19 nt, Artificial Sequence
  Synthetic
gcuaagauugucuacaggg

SEQ ID NO: 7199 - RNA, 20 nt, Artificial Sequence
  Synthetic
ggcuaagauugucuacaggg

SEQ ID NO: 7200 - RNA, 22 nt, Artificial Sequence
  Synthetic
gcaugguugccagggaccaggg

SEQ ID NO: 7201 - RNA, 18 nt, Artificial Sequence
  Synthetic
ggaaacuacugggcaggg

SEQ ID NO: 7202 - RNA, 19 nt, Artificial Sequence
  Synthetic
gggaaacuacugggcaggg

SEQ ID NO: 7203 - RNA, 24 nt, Artificial Sequence
  Synthetic
guacugggaaacuacugggcaggg

SEQ ID NO: 7204 - RNA, 21 nt, Artificial Sequence
  Synthetic
gggggauuggggggcagaggg

SEQ ID NO: 7205 - RNA, 24 nt, Artificial Sequence
  Synthetic
guugggggauuggggggcagaggg

SEQ ID NO: 7206 - RNA, 20 nt, Artificial Sequence
  Synthetic
gcaacacagaugagagaggg

SEQ ID NO: 7207 - RNA, 21 nt, Artificial Sequence
  Synthetic
ggcaacacagaugagagaggg

SEQ ID NO: 7208 - RNA, 22 nt, Artificial Sequence
  Synthetic
gggcaacacagaugagagaggg

SEQ ID NO: 7209 - RNA, 19 nt, Artificial Sequence
  Synthetic
guuaugcaccuugagaggg

SEQ ID NO: 7210 - RNA, 18 nt, Artificial Sequence
  Synthetic
gcauaaacuuugagaggg

SEQ ID NO: 7211 - RNA, 19 nt, Artificial Sequence
  Synthetic
gcucaggccagcgggaggg

SEQ ID NO: 7212 - RNA, 22 nt, Artificial Sequence
  Synthetic
gcugcucaggccagcgggaggg

SEQ ID NO: 7213 - RNA, 18 nt, Artificial Sequence
  Synthetic
gaagauauauuuggaggg

SEQ ID NO: 7214 - RNA, 22 nt, Artificial Sequence
  Synthetic
gaucgaagauauauuuggaggg

SEQ ID NO: 7215 - RNA, 18 nt, Artificial Sequence
  Synthetic
gaucaugcagaaugaggg

SEQ ID NO: 7216 - RNA, 24 nt, Artificial Sequence
  Synthetic
guacaauuagaaauuugcugaggg

SEQ ID NO: 7217 - RNA, 19 nt, Artificial Sequence
  Synthetic
gauagcuguuaugugaggg

SEQ ID NO: 7218 - RNA, 23 nt, Artificial Sequence
  Synthetic
gaauauuuuauauacacauaggg

SEQ ID NO: 7219 - RNA, 19 nt, Artificial Sequence
  Synthetic
gaggugguucagacuaggg

SEQ ID NO: 7220 - RNA, 18 nt, Artificial Sequence
  Synthetic
ggauguagaauacuaggg

SEQ ID NO: 7221 - RNA, 22 nt, Artificial Sequence
  Synthetic
guaccuaggcaaacaaguaggg

SEQ ID NO: 7222 - RNA, 24 nt, Artificial Sequence
  Synthetic
guguaccuaggcaaacaaguaggg

SEQ ID NO: 7223 - RNA, 19 nt, Artificial Sequence
  Synthetic
gaucaggcugauguuaggg

SEQ ID NO: 7224 - RNA, 20 nt, Artificial Sequence
  Synthetic
ggaucaggcugauguuaggg

SEQ ID NO: 7225 - RNA, 21 nt, Artificial Sequence
  Synthetic
gggaucaggcugauguuaggg

SEQ ID NO: 7226 - RNA, 23 nt, Artificial Sequence
  Synthetic
gugggaucaggcugauguuaggg

SEQ ID NO: 7227 - RNA, 21 nt, Artificial Sequence
  Synthetic
gcuauuauauaagaaaacggg

SEQ ID NO: 7228 - RNA, 21 nt, Artificial Sequence
  Synthetic
gauaggggcauaagaaacggg

SEQ ID NO: 7229 - RNA, 18 nt, Artificial Sequence
  Synthetic
guaucaaggacagacggg

SEQ ID NO: 7230 - RNA, 20 nt, Artificial Sequence
  Synthetic
gaguaucaaggacagacggg

SEQ ID NO: 7231 - RNA, 20 nt, Artificial Sequence
  Synthetic
gccuaagaaauuguaccggg

SEQ ID NO: 7232 - RNA, 23 nt, Artificial Sequence
  Synthetic
gaagccuaagaaauuguaccggg

SEQ ID NO: 7233 - RNA, 18 nt, Artificial Sequence
  Synthetic
gaaaucuuaugggccggg

SEQ ID NO: 7234 - RNA, 21 nt, Artificial Sequence
  Synthetic
guaaaacccaaggugggcggg

SEQ ID NO: 7235 - RNA, 22 nt, Artificial Sequence
  Synthetic
gguaaaacccaaggugggcggg

SEQ ID NO: 7236 - RNA, 23 nt, Artificial Sequence
  Synthetic
ggguaaaacccaaggugggcggg

SEQ ID NO: 7237 - RNA, 19 nt, Artificial Sequence
  Synthetic
guuuugguuuucccucggg

SEQ ID NO: 7238 - RNA, 24 nt, Artificial Sequence
  Synthetic
guuuuguuuugguuuucccucggg

SEQ ID NO: 7239 - RNA, 20 nt, Artificial Sequence
  Synthetic
gucugauggcaaugcagggg

SEQ ID NO: 7240 - RNA, 19 nt, Artificial Sequence
  Synthetic
gaggcucuguguucagggg

SEQ ID NO: 7241 - RNA, 19 nt, Artificial Sequence
  Synthetic
gaguguuauuaaagagggg

SEQ ID NO: 7242 - RNA, 23 nt, Artificial Sequence
  Synthetic
gacuuagauuauguugggagggg

SEQ ID NO: 7243 - RNA, 18 nt, Artificial Sequence
  Synthetic
gauuuaucuacugagggg

SEQ ID NO: 7244 - RNA, 20 nt, Artificial Sequence
  Synthetic
gagauuuaucuacugagggg

SEQ ID NO: 7245 - RNA, 19 nt, Artificial Sequence
  Synthetic
gaaaaauccaagugagggg

SEQ ID NO: 7246 - RNA, 21 nt, Artificial Sequence
  Synthetic
guacuucacagagccaggggg

SEQ ID NO: 7247 - RNA, 24 nt, Artificial Sequence
  Synthetic
gauguacuucacagagccaggggg

SEQ ID NO: 7248 - RNA, 20 nt, Artificial Sequence
  Synthetic
gccuccuuguuggggggggg

SEQ ID NO: 7249 - RNA, 21 nt, Artificial Sequence
  Synthetic
ggccuccuuguuggggggggg

SEQ ID NO: 7250 - RNA, 18 nt, Artificial Sequence
  Synthetic
gagcuaugccacuggggg

SEQ ID NO: 7251 - RNA, 20 nt, Artificial Sequence
  Synthetic
gagagcuaugccacuggggg

SEQ ID NO: 7252 - RNA, 21 nt, Artificial Sequence
  Synthetic
gaccacaagcugacuuggggg

SEQ ID NO: 7253 - RNA, 22 nt, Artificial Sequence
  Synthetic
ggaccacaagcugacuuggggg

SEQ ID NO: 7254 - RNA, 24 nt, Artificial Sequence
  Synthetic
gaggaccacaagcugacuuggggg

SEQ ID NO: 7255 - RNA, 21 nt, Artificial Sequence
  Synthetic
gcccuggaucaagaaaugggg

SEQ ID NO: 7256 - RNA, 22 nt, Artificial Sequence
  Synthetic
ggcccuggaucaagaaaugggg

SEQ ID NO: 7257 - RNA, 24 nt, Artificial Sequence
  Synthetic
gaggcccuggaucaagaaaugggg

SEQ ID NO: 7258 - RNA, 20 nt, Artificial Sequence
  Synthetic
guugguuaagagaaaugggg

SEQ ID NO: 7259 - RNA, 22 nt, Artificial Sequence
  Synthetic
guguugguuaagagaaaugggg

SEQ ID NO: 7260 - RNA, 24 nt, Artificial Sequence
  Synthetic
guguguugguuaagagaaaugggg

SEQ ID NO: 7261 - RNA, 19 nt, Artificial Sequence
  Synthetic
guuuuuacaagcaaugggg

SEQ ID NO: 7262 - RNA, 23 nt, Artificial Sequence
  Synthetic
gacaguuuuuacaagcaaugggg

SEQ ID NO: 7263 - RNA, 24 nt, Artificial Sequence
  Synthetic
ggacaguuuuuacaagcaaugggg

SEQ ID NO: 7264 - RNA, 24 nt, Artificial Sequence
  Synthetic
gaucucaaagaaugaggcaugggg

SEQ ID NO: 7265 - RNA, 20 nt, Artificial Sequence
  Synthetic
gcucuugucuccaacugggg

SEQ ID NO: 7266 - RNA, 18 nt, Artificial Sequence
  Synthetic
gcgcaauuguuccugggg

SEQ ID NO: 7267 - RNA, 24 nt, Artificial Sequence
  Synthetic
gcauuugcgcaauuguuccugggg

SEQ ID NO: 7268 - RNA, 18 nt, Artificial Sequence
  Synthetic
gucagaagcucucugggg

SEQ ID NO: 7269 - RNA, 20 nt, Artificial Sequence
  Synthetic
gugucagaagcucucugggg

SEQ ID NO: 7270 - RNA, 18 nt, Artificial Sequence
  Synthetic
gacauacagugagugggg

SEQ ID NO: 7271 - RNA, 20 nt, Artificial Sequence
  Synthetic
guuuuaaucuuuaauugggg

SEQ ID NO: 7272 - RNA, 24 nt, Artificial Sequence
  Synthetic
guuaguuuuaaucuuuaauugggg

SEQ ID NO: 7273 - RNA, 19 nt, Artificial Sequence
  Synthetic
guggguaucaggauugggg

SEQ ID NO: 7274 - RNA, 21 nt, Artificial Sequence
  Synthetic
gaguggguaucaggauugggg

SEQ ID NO: 7275 - RNA, 23 nt, Artificial Sequence
  Synthetic
gugaguggguaucaggauugggg

SEQ ID NO: 7276 - RNA, 24 nt, Artificial Sequence
  Synthetic
ggugaguggguaucaggauugggg

SEQ ID NO: 7277 - RNA, 23 nt, Artificial Sequence
  Synthetic
gcauuuaaaaccagauguugggg

SEQ ID NO: 7278 - RNA, 19 nt, Artificial Sequence
  Synthetic
gaagcauuuggccaauggg

SEQ ID NO: 7279 - RNA, 23 nt, Artificial Sequence
  Synthetic
gaaagaagcauuuggccaauggg

SEQ ID NO: 7280 - RNA, 19 nt, Artificial Sequence
  Synthetic
gugacuucaaauacauggg

SEQ ID NO: 7281 - RNA, 24 nt, Artificial Sequence
  Synthetic
gcaaagugacuucaaauacauggg

SEQ ID NO: 7282 - RNA, 20 nt, Artificial Sequence
  Synthetic
guacuucauaggaucauggg

SEQ ID NO: 7283 - RNA, 19 nt, Artificial Sequence
  Synthetic
gaaaaaggggugauauggg

SEQ ID NO: 7284 - RNA, 20 nt, Artificial Sequence
  Synthetic
ggaaaaaggggugauauggg

SEQ ID NO: 7285 - RNA, 21 nt, Artificial Sequence
  Synthetic
gggaaaaaggggugauauggg

SEQ ID NO: 7286 - RNA, 18 nt, Artificial Sequence
  Synthetic
gagagcgggaguuauggg

SEQ ID NO: 7287 - RNA, 19 nt, Artificial Sequence
  Synthetic
ggagagcgggaguuauggg

SEQ ID NO: 7288 - RNA, 20 nt, Artificial Sequence
  Synthetic
gauucauucacaucccuggg

SEQ ID NO: 7289 - RNA, 20 nt, Artificial Sequence
  Synthetic
gcucugguucugauccuggg

SEQ ID NO: 7290 - RNA, 21 nt, Artificial Sequence
  Synthetic
ggcucugguucugauccuggg

SEQ ID NO: 7291 - RNA, 24 nt, Artificial Sequence
  Synthetic
gaaggcucugguucugauccuggg

SEQ ID NO: 7292 - RNA, 21 nt, Artificial Sequence
  Synthetic
gauuuucauugguauccuggg

SEQ ID NO: 7293 - RNA, 19 nt, Artificial Sequence
  Synthetic
gcauuagagagaggcuggg

SEQ ID NO: 7294 - RNA, 18 nt, Artificial Sequence
  Synthetic
gggaacgugaucucuggg

SEQ ID NO: 7295 - RNA, 22 nt, Artificial Sequence
  Synthetic
guuagggaacgugaucucuggg

SEQ ID NO: 7296 - RNA, 24 nt, Artificial Sequence
  Synthetic
gauauccugguuauuuggucuggg

SEQ ID NO: 7297 - RNA, 23 nt, Artificial Sequence
  Synthetic
gauuaauacaaauuuacaguggg

SEQ ID NO: 7298 - RNA, 21 nt, Artificial Sequence
  Synthetic
gcuugaaaauaaagcaguggg

SEQ ID NO: 7299 - RNA, 20 nt, Artificial Sequence
  Synthetic
gcauacacaaaucagguggg

SEQ ID NO: 7300 - RNA, 21 nt, Artificial Sequence
  Synthetic
ggcauacacaaaucagguggg

SEQ ID NO: 7301 - RNA, 24 nt, Artificial Sequence
  Synthetic
gauggcauacacaaaucagguggg

SEQ ID NO: 7302 - RNA, 18 nt, Artificial Sequence
  Synthetic
gacuagcucugagguggg

SEQ ID NO: 7303 - RNA, 21 nt, Artificial Sequence
  Synthetic
gucgacuagcucugagguggg

SEQ ID NO: 7304 - RNA, 23 nt, Artificial Sequence
  Synthetic
guacuaaguuaaacaaggguggg

SEQ ID NO: 7305 - RNA, 22 nt, Artificial Sequence
  Synthetic
gcacuacauacucaggauuggg

SEQ ID NO: 7306 - RNA, 23 nt, Artificial Sequence
  Synthetic
ggcacuacauacucaggauuggg

SEQ ID NO: 7307 - RNA, 20 nt, Artificial Sequence
  Synthetic
guaggggagguaugguuggg

SEQ ID NO: 7308 - RNA, 20 nt, Artificial Sequence
  Synthetic
gcauuauccaucccuuuggg

SEQ ID NO: 7309 - RNA, 21 nt, Artificial Sequence
  Synthetic
ggcauuauccaucccuuuggg

SEQ ID NO: 7310 - RNA, 22 nt, Artificial Sequence
  Synthetic
gaacugaacugaaugcuuuggg

SEQ ID NO: 7311 - RNA, 20 nt, Artificial Sequence
  Synthetic
gccaaaagcauggaaaaugg

SEQ ID NO: 7312 - RNA, 18 nt, Artificial Sequence
  Synthetic
ggauaauccuuaaaaugg

SEQ ID NO: 7313 - RNA, 19 nt, Artificial Sequence
  Synthetic
gggauaauccuuaaaaugg

SEQ ID NO: 7314 - RNA, 23 nt, Artificial Sequence
  Synthetic
gucagggauaauccuuaaaaugg

SEQ ID NO: 7315 - RNA, 24 nt, Artificial Sequence
  Synthetic
ggucagggauaauccuuaaaaugg

SEQ ID NO: 7316 - RNA, 20 nt, Artificial Sequence
  Synthetic
gaucaaucuacagcaaaugg

SEQ ID NO: 7317 - RNA, 24 nt, Artificial Sequence
  Synthetic
gaccuuauuuuucuuagcaaaugg

SEQ ID NO: 7318 - RNA, 19 nt, Artificial Sequence
  Synthetic
guugaagaugaagaaaugg

SEQ ID NO: 7319 - RNA, 22 nt, Artificial Sequence
  Synthetic
gauguugaagaugaagaaaugg

SEQ ID NO: 7320 - RNA, 23 nt, Artificial Sequence
  Synthetic
ggauguugaagaugaagaaaugg

SEQ ID NO: 7321 - RNA, 20 nt, Artificial Sequence
  Synthetic
gauuuaauuuagcuaaaugg

SEQ ID NO: 7322 - RNA, 23 nt, Artificial Sequence
  Synthetic
guagauuuaauuuagcuaaaugg

SEQ ID NO: 7323 - RNA, 18 nt, Artificial Sequence
  Synthetic
ggaauaugcagagaaugg

SEQ ID NO: 7324 - RNA, 20 nt, Artificial Sequence
  Synthetic
guugcaaagaaagugaaugg

SEQ ID NO: 7325 - RNA, 23 nt, Artificial Sequence
  Synthetic
gaaguugcaaagaaagugaaugg

SEQ ID NO: 7326 - RNA, 22 nt, Artificial Sequence
  Synthetic
guuauuggaggguuuugaaugg

SEQ ID NO: 7327 - RNA, 24 nt, Artificial Sequence
  Synthetic
gaguuauuggaggguuuugaaugg

SEQ ID NO: 7328 - RNA, 20 nt, Artificial Sequence
  Synthetic
gcuaccucacauacuaaugg

SEQ ID NO: 7329 - RNA, 18 nt, Artificial Sequence
  Synthetic
gucucuggcuuguaaugg

SEQ ID NO: 7330 - RNA, 18 nt, Artificial Sequence
  Synthetic
gacuauggcucuuaaugg

SEQ ID NO: 7331 - RNA, 24 nt, Artificial Sequence
  Synthetic
gaaacagacuauggcucuuaaugg

SEQ ID NO: 7332 - RNA, 22 nt, Artificial Sequence
  Synthetic
gaauacuguuauaauuuaaugg

SEQ ID NO: 7333 - RNA, 19 nt, Artificial Sequence
  Synthetic
gaucuugaauguuuaaugg

SEQ ID NO: 7334 - RNA, 20 nt, Artificial Sequence
  Synthetic
ggaucuugaauguuuaaugg

SEQ ID NO: 7335 - RNA, 22 nt, Artificial Sequence
  Synthetic
gaggaucuugaauguuuaaugg

SEQ ID NO: 7336 - RNA, 21 nt, Artificial Sequence
  Synthetic
gaaaagaagacauuuuaaugg

SEQ ID NO: 7337 - RNA, 22 nt, Artificial Sequence
  Synthetic
ggaaaagaagacauuuuaaugg

SEQ ID NO: 7338 - RNA, 23 nt, Artificial Sequence
  Synthetic
gggaaaagaagacauuuuaaugg

SEQ ID NO: 7339 - RNA, 21 nt, Artificial Sequence
  Synthetic
gcaucaauauuuaucacaugg

SEQ ID NO: 7340 - RNA, 23 nt, Artificial Sequence
  Synthetic
gaaaauacuuuguagggacaugg

SEQ ID NO: 7341 - RNA, 24 nt, Artificial Sequence
  Synthetic
ggaaaauacuuuguagggacaugg

SEQ ID NO: 7342 - RNA, 18 nt, Artificial Sequence
  Synthetic
gacuagcuggcuacaugg

SEQ ID NO: 7343 - RNA, 20 nt, Artificial Sequence
  Synthetic
gagacuagcuggcuacaugg

SEQ ID NO: 7344 - RNA, 19 nt, Artificial Sequence
  Synthetic
gccuuguaugucuacaugg

SEQ ID NO: 7345 - RNA, 24 nt, Artificial Sequence
  Synthetic
gcucugccuuguaugucuacaugg

SEQ ID NO: 7346 - RNA, 18 nt, Artificial Sequence
  Synthetic
gggcacauuccuccaugg

SEQ ID NO: 7347 - RNA, 19 nt, Artificial Sequence
  Synthetic
ggggcacauuccuccaugg

SEQ ID NO: 7348 - RNA, 19 nt, Artificial Sequence
  Synthetic
guacggaauggaugcaugg

SEQ ID NO: 7349 - RNA, 20 nt, Artificial Sequence
  Synthetic
gguacggaauggaugcaugg

SEQ ID NO: 7350 - RNA, 18 nt, Artificial Sequence
  Synthetic
gaaaaagacacaucaugg

SEQ ID NO: 7351 - RNA, 19 nt, Artificial Sequence
  Synthetic
ggaaaaagacacaucaugg

SEQ ID NO: 7352 - RNA, 23 nt, Artificial Sequence
  Synthetic
gauagaaaagcaaaaaaagaugg

SEQ ID NO: 7353 - RNA, 18 nt, Artificial Sequence
  Synthetic
guaggcauucucagaugg

SEQ ID NO: 7354 - RNA, 21 nt, Artificial Sequence
  Synthetic
gcuguaggcauucucagaugg

SEQ ID NO: 7355 - RNA, 22 nt, Artificial Sequence
  Synthetic
ggcuguaggcauucucagaugg

SEQ ID NO: 7356 - RNA, 23 nt, Artificial Sequence
  Synthetic
gggcuguaggcauucucagaugg

SEQ ID NO: 7357 - RNA, 22 nt, Artificial Sequence
  Synthetic
guacagagagaacuggagaugg

SEQ ID NO: 7358 - RNA, 23 nt, Artificial Sequence
  Synthetic
gguacagagagaacuggagaugg

SEQ ID NO: 7359 - RNA, 21 nt, Artificial Sequence
  Synthetic
gugaaaauaagaaugagaugg

SEQ ID NO: 7360 - RNA, 18 nt, Artificial Sequence
  Synthetic
gaaucuauuaugagaugg

SEQ ID NO: 7361 - RNA, 24 nt, Artificial Sequence
  Synthetic
gaaaaugaaucuauuaugagaugg

SEQ ID NO: 7362 - RNA, 20 nt, Artificial Sequence
  Synthetic
gaucauauuagucuagaugg

SEQ ID NO: 7363 - RNA, 22 nt, Artificial Sequence
  Synthetic
gagaucauauuagucuagaugg

SEQ ID NO: 7364 - RNA, 23 nt, Artificial Sequence
  Synthetic
ggagaucauauuagucuagaugg

SEQ ID NO: 7365 - RNA, 18 nt, Artificial Sequence
  Synthetic
guauuggccuggggaugg

SEQ ID NO: 7366 - RNA, 20 nt, Artificial Sequence
  Synthetic
guguauuggccuggggaugg

SEQ ID NO: 7367 - RNA, 23 nt, Artificial Sequence
  Synthetic
gauguguauuggccuggggaugg

SEQ ID NO: 7368 - RNA, 18 nt, Artificial Sequence
  Synthetic
ggaaugucuuuuggaugg

SEQ ID NO: 7369 - RNA, 19 nt, Artificial Sequence
  Synthetic
gggaaugucuuuuggaugg

SEQ ID NO: 7370 - RNA, 18 nt, Artificial Sequence
  Synthetic
gagaugaauuacugaugg

SEQ ID NO: 7371 - RNA, 24 nt, Artificial Sequence
  Synthetic
gacaaagagaugaauuacugaugg

SEQ ID NO: 7372 - RNA, 24 nt, Artificial Sequence
  Synthetic
gaaacaaaggaaagagaaauaugg

SEQ ID NO: 7373 - RNA, 21 nt, Artificial Sequence
  Synthetic
gauacuauuacauagauaugg

SEQ ID NO: 7374 - RNA, 22 nt, Artificial Sequence
  Synthetic
ggauacuauuacauagauaugg

SEQ ID NO: 7375 - RNA, 21 nt, Artificial Sequence
  Synthetic
gaucaugucuccaguguaugg

SEQ ID NO: 7376 - RNA, 18 nt, Artificial Sequence
  Synthetic
guaaacaaaauauuaugg

SEQ ID NO: 7377 - RNA, 22 nt, Artificial Sequence
  Synthetic
gacuguaaacaaaauauuaugg

SEQ ID NO: 7378 - RNA, 24 nt, Artificial Sequence
  Synthetic
gagacuguaaacaaaauauuaugg

SEQ ID NO: 7379 - RNA, 18 nt, Artificial Sequence
  Synthetic
ggaauuucuaauuuaugg

SEQ ID NO: 7380 - RNA, 21 nt, Artificial Sequence
  Synthetic
gaaggaauuucuaauuuaugg

SEQ ID NO: 7381 - RNA, 23 nt, Artificial Sequence
  Synthetic
gcaaaagagauucuuuuuuaugg

SEQ ID NO: 7382 - RNA, 21 nt, Artificial Sequence
  Synthetic
gauaacaaucccagcaacugg

SEQ ID NO: 7383 - RNA, 24 nt, Artificial Sequence
  Synthetic
guagauaacaaucccagcaacugg

SEQ ID NO: 7384 - RNA, 20 nt, Artificial Sequence
  Synthetic
gaaagauugugaagaacugg

SEQ ID NO: 7385 - RNA, 23 nt, Artificial Sequence
  Synthetic
guugaaagauugugaagaacugg

SEQ ID NO: 7386 - RNA, 24 nt, Artificial Sequence
  Synthetic
gguugaaagauugugaagaacugg

SEQ ID NO: 7387 - RNA, 20 nt, Artificial Sequence
  Synthetic
guagaaaaauacugaacugg

SEQ ID NO: 7388 - RNA, 23 nt, Artificial Sequence
  Synthetic
gaaauagaauagaauaacacugg

SEQ ID NO: 7389 - RNA, 18 nt, Artificial Sequence
  Synthetic
ggcauguuuauagacugg

SEQ ID NO: 7390 - RNA, 18 nt, Artificial Sequence
  Synthetic
guaacacacaaguacugg

SEQ ID NO: 7391 - RNA, 19 nt, Artificial Sequence
  Synthetic
gguaacacacaaguacugg

SEQ ID NO: 7392 - RNA, 23 nt, Artificial Sequence
  Synthetic
guucuccuuuaaaaugguacugg

SEQ ID NO: 7393 - RNA, 24 nt, Artificial Sequence
  Synthetic
gguucuccuuuaaaaugguacugg

SEQ ID NO: 7394 - RNA, 19 nt, Artificial Sequence
  Synthetic
gugaaaugaaacuuacugg

SEQ ID NO: 7395 - RNA, 22 nt, Artificial Sequence
  Synthetic
gaagugaaaugaaacuuacugg

SEQ ID NO: 7396 - RNA, 19 nt, Artificial Sequence
  Synthetic
gaagucuaauuccaccugg

SEQ ID NO: 7397 - RNA, 21 nt, Artificial Sequence
  Synthetic
gugaagucuaauuccaccugg

SEQ ID NO: 7398 - RNA, 24 nt, Artificial Sequence
  Synthetic
guccuuccacaggcaggccccugg

SEQ ID NO: 7399 - RNA, 19 nt, Artificial Sequence
  Synthetic
gcuguauagcuuucccugg

SEQ ID NO: 7400 - RNA, 19 nt, Artificial Sequence
  Synthetic
guaaaauccaaaagccugg

SEQ ID NO: 7401 - RNA, 20 nt, Artificial Sequence
  Synthetic
gauaacauccaaaugccugg

SEQ ID NO: 7402 - RNA, 22 nt, Artificial Sequence
  Synthetic
gugauaacauccaaaugccugg

SEQ ID NO: 7403 - RNA, 21 nt, Artificial Sequence
  Synthetic
gcuuaaaaaaccgggagcugg

SEQ ID NO: 7404 - RNA, 19 nt, Artificial Sequence
  Synthetic
gcuguuuggugauagcugg

SEQ ID NO: 7405 - RNA, 18 nt, Artificial Sequence
  Synthetic
ggucauuccauaggcugg

SEQ ID NO: 7406 - RNA, 19 nt, Artificial Sequence
  Synthetic
gggucauuccauaggcugg

SEQ ID NO: 7407 - RNA, 20 nt, Artificial Sequence
  Synthetic
ggggucauuccauaggcugg

SEQ ID NO: 7408 - RNA, 22 nt, Artificial Sequence
  Synthetic
guucaucuaggcacugggcugg

SEQ ID NO: 7409 - RNA, 23 nt, Artificial Sequence
  Synthetic
gcuaauaauaguacuuaugcugg

SEQ ID NO: 7410 - RNA, 24 nt, Artificial Sequence
  Synthetic
ggcuaauaauaguacuuaugcugg

SEQ ID NO: 7411 - RNA, 18 nt, Artificial Sequence
  Synthetic
gagcaggcacugugcugg

SEQ ID NO: 7412 - RNA, 19 nt, Artificial Sequence
  Synthetic
ggagcaggcacugugcugg

SEQ ID NO: 7413 - RNA, 21 nt, Artificial Sequence
  Synthetic
gaggagcaggcacugugcugg

SEQ ID NO: 7414 - RNA, 21 nt, Artificial Sequence
  Synthetic
gaaaggaaugucaaaaucugg

SEQ ID NO: 7415 - RNA, 20 nt, Artificial Sequence
  Synthetic
gaaaauggaucuggaucugg

SEQ ID NO: 7416 - RNA, 21 nt, Artificial Sequence
  Synthetic
ggaaaauggaucuggaucugg

SEQ ID NO: 7417 - RNA, 22 nt, Artificial Sequence
  Synthetic
gggaaaauggaucuggaucugg

SEQ ID NO: 7418 - RNA, 20 nt, Artificial Sequence
  Synthetic
gauuuguauccauuaucugg

SEQ ID NO: 7419 - RNA, 21 nt, Artificial Sequence
  Synthetic
ggauuuguauccauuaucugg

SEQ ID NO: 7420 - RNA, 20 nt, Artificial Sequence
  Synthetic
guuugggggucucagucugg

SEQ ID NO: 7421 - RNA, 24 nt, Artificial Sequence
  Synthetic
gauuuucucucauuuauauucugg

SEQ ID NO: 7422 - RNA, 18 nt, Artificial Sequence
  Synthetic
gauuacuguguguucugg

SEQ ID NO: 7423 - RNA, 24 nt, Artificial Sequence
  Synthetic
gccauugauuacuguguguucugg

SEQ ID NO: 7424 - RNA, 18 nt, Artificial Sequence
  Synthetic
gccaacaaggauuucugg

SEQ ID NO: 7425 - RNA, 19 nt, Artificial Sequence
  Synthetic
ggccaacaaggauuucugg

SEQ ID NO: 7426 - RNA, 20 nt, Artificial Sequence
  Synthetic
gggccaacaaggauuucugg

SEQ ID NO: 7427 - RNA, 21 nt, Artificial Sequence
  Synthetic
ggggccaacaaggauuucugg

SEQ ID NO: 7428 - RNA, 23 nt, Artificial Sequence
  Synthetic
guggggccaacaaggauuucugg

SEQ ID NO: 7429 - RNA, 18 nt, Artificial Sequence
  Synthetic
guguugggugauuucugg

SEQ ID NO: 7430 - RNA, 20 nt, Artificial Sequence
  Synthetic
guguguugggugauuucugg

SEQ ID NO: 7431 - RNA, 22 nt, Artificial Sequence
  Synthetic
guguguguugggugauuucugg

SEQ ID NO: 7432 - RNA, 20 nt, Artificial Sequence
  Synthetic
gcuuaagugucugaaagugg

SEQ ID NO: 7433 - RNA, 20 nt, Artificial Sequence
  Synthetic
guagguauaauugaaagugg

SEQ ID NO: 7434 - RNA, 23 nt, Artificial Sequence
  Synthetic
gacguagguauaauugaaagugg

SEQ ID NO: 7435 - RNA, 22 nt, Artificial Sequence
  Synthetic
gaaaauuaugcacuuuaagugg

SEQ ID NO: 7436 - RNA, 22 nt, Artificial Sequence
  Synthetic
guccugaugccgcacacagugg

SEQ ID NO: 7437 - RNA, 20 nt, Artificial Sequence
  Synthetic
gaagcaaaacaagccagugg

SEQ ID NO: 7438 - RNA, 23 nt, Artificial Sequence
  Synthetic
gcugaagcaaaacaagccagugg

SEQ ID NO: 7439 - RNA, 24 nt, Artificial Sequence
  Synthetic
ggcugaagcaaaacaagccagugg

SEQ ID NO: 7440 - RNA, 19 nt, Artificial Sequence
  Synthetic
guauuauuugucucagugg

SEQ ID NO: 7441 - RNA, 23 nt, Artificial Sequence
  Synthetic
guacacaaaggcagacagagugg

SEQ ID NO: 7442 - RNA, 24 nt, Artificial Sequence
  Synthetic
gguacacaaaggcagacagagugg

SEQ ID NO: 7443 - RNA, 18 nt, Artificial Sequence
  Synthetic
gaauguggugaggagugg

SEQ ID NO: 7444 - RNA, 20 nt, Artificial Sequence
  Synthetic
gugaauguggugaggagugg

SEQ ID NO: 7445 - RNA, 21 nt, Artificial Sequence
  Synthetic
ggugaauguggugaggagugg

SEQ ID NO: 7446 - RNA, 23 nt, Artificial Sequence
  Synthetic
gaggugaauguggugaggagugg

SEQ ID NO: 7447 - RNA, 21 nt, Artificial Sequence
  Synthetic
guucagacuaggguggagugg

SEQ ID NO: 7448 - RNA, 22 nt, Artificial Sequence
  Synthetic
gguucagacuaggguggagugg

SEQ ID NO: 7449 - RNA, 24 nt, Artificial Sequence
  Synthetic
gugguucagacuaggguggagugg

SEQ ID NO: 7450 - RNA, 23 nt, Artificial Sequence
  Synthetic
gaaacauuuuccuacuugagugg

SEQ ID NO: 7451 - RNA, 21 nt, Artificial Sequence
  Synthetic
gcuugaccagcuguuuagugg

SEQ ID NO: 7452 - RNA, 23 nt, Artificial Sequence
  Synthetic
gugcuugaccagcuguuuagugg

SEQ ID NO: 7453 - RNA, 20 nt, Artificial Sequence
  Synthetic
guagcauacuuuacacgugg

SEQ ID NO: 7454 - RNA, 19 nt, Artificial Sequence
  Synthetic
gcagcuauuugagaggugg

SEQ ID NO: 7455 - RNA, 18 nt, Artificial Sequence
  Synthetic
gguuuuauuaugaggugg

SEQ ID NO: 7456 - RNA, 21 nt, Artificial Sequence
  Synthetic
guugguuuuauuaugaggugg

SEQ ID NO: 7457 - RNA, 18 nt, Artificial Sequence
  Synthetic
gcaguuguauguaggugg

SEQ ID NO: 7458 - RNA, 20 nt, Artificial Sequence
  Synthetic
gcauaguuccauagcggugg

SEQ ID NO: 7459 - RNA, 24 nt, Artificial Sequence
  Synthetic
gcuagcauaguuccauagcggugg

SEQ ID NO: 7460 - RNA, 23 nt, Artificial Sequence
  Synthetic
gaagacacagaaaaggagggugg

SEQ ID NO: 7461 - RNA, 19 nt, Artificial Sequence
  Synthetic
guacaaagacauauggugg

SEQ ID NO: 7462 - RNA, 21 nt, Artificial Sequence
  Synthetic
gucuguuucaguuacuggugg

SEQ ID NO: 7463 - RNA, 23 nt, Artificial Sequence
  Synthetic
guaggugugauuggaucaugugg

SEQ ID NO: 7464 - RNA, 24 nt, Artificial Sequence
  Synthetic
gguaggugugauuggaucaugugg

SEQ ID NO: 7465 - RNA, 23 nt, Artificial Sequence
  Synthetic
gcagugauucuaggaagcugugg

SEQ ID NO: 7466 - RNA, 24 nt, Artificial Sequence
  Synthetic
ggcagugauucuaggaagcugugg

SEQ ID NO: 7467 - RNA, 18 nt, Artificial Sequence
  Synthetic
gaaaagugagcagugugg

SEQ ID NO: 7468 - RNA, 20 nt, Artificial Sequence
  Synthetic
gucaaaaguaacaggugugg

SEQ ID NO: 7469 - RNA, 20 nt, Artificial Sequence
  Synthetic
gauuguucucccuugugugg

SEQ ID NO: 7470 - RNA, 23 nt, Artificial Sequence
  Synthetic
gccgauuguucucccuugugugg

SEQ ID NO: 7471 - RNA, 18 nt, Artificial Sequence
  Synthetic
gcacaagggagauugugg

SEQ ID NO: 7472 - RNA, 20 nt, Artificial Sequence
  Synthetic
gagcacaagggagauugugg

SEQ ID NO: 7473 - RNA, 23 nt, Artificial Sequence
  Synthetic
gaagagcacaagggagauugugg

SEQ ID NO: 7474 - RNA, 21 nt, Artificial Sequence
  Synthetic
ggcaagaucauuuuguugugg

SEQ ID NO: 7475 - RNA, 23 nt, Artificial Sequence
  Synthetic
gaauauuaaauuagcuuuugugg

SEQ ID NO: 7476 - RNA, 20 nt, Artificial Sequence
  Synthetic
guaagauuuccuuuuugugg

SEQ ID NO: 7477 - RNA, 21 nt, Artificial Sequence
  Synthetic
gguaagauuuccuuuuugugg

SEQ ID NO: 7478 - RNA, 20 nt, Artificial Sequence
  Synthetic
gaauuauucugagcaauugg

SEQ ID NO: 7479 - RNA, 22 nt, Artificial Sequence
  Synthetic
gugaauuauucugagcaauugg

SEQ ID NO: 7480 - RNA, 23 nt, Artificial Sequence
  Synthetic
ggugaauuauucugagcaauugg

SEQ ID NO: 7481 - RNA, 22 nt, Artificial Sequence
  Synthetic
gacuacuuucaugccacauugg

SEQ ID NO: 7482 - RNA, 19 nt, Artificial Sequence
  Synthetic
gagguagagcucacauugg

SEQ ID NO: 7483 - RNA, 22 nt, Artificial Sequence
  Synthetic
gaagagguagagcucacauugg

SEQ ID NO: 7484 - RNA, 18 nt, Artificial Sequence
  Synthetic
gggaccuuuuugcauugg

SEQ ID NO: 7485 - RNA, 21 nt, Artificial Sequence
  Synthetic
gcugggaccuuuuugcauugg

SEQ ID NO: 7486 - RNA, 24 nt, Artificial Sequence
  Synthetic
gcagcugggaccuuuuugcauugg

SEQ ID NO: 7487 - RNA, 19 nt, Artificial Sequence
  Synthetic
gaacaugucuucucauugg

SEQ ID NO: 7488 - RNA, 19 nt, Artificial Sequence
  Synthetic
guggacuuguuuagauugg

SEQ ID NO: 7489 - RNA, 20 nt, Artificial Sequence
  Synthetic
gguggacuuguuuagauugg

SEQ ID NO: 7490 - RNA, 23 nt, Artificial Sequence
  Synthetic
gaagguggacuuguuuagauugg

SEQ ID NO: 7491 - RNA, 21 nt, Artificial Sequence
  Synthetic
guaaaauagaauuuggauugg

SEQ ID NO: 7492 - RNA, 22 nt, Artificial Sequence
  Synthetic
gaaccuuaagauuaauuauugg

SEQ ID NO: 7493 - RNA, 24 nt, Artificial Sequence
  Synthetic
gugaaccuuaagauuaauuauugg

SEQ ID NO: 7494 - RNA, 22 nt, Artificial Sequence
  Synthetic
guuuuauaggguaauuuauugg

SEQ ID NO: 7495 - RNA, 21 nt, Artificial Sequence
  Synthetic
gcaaaauuuuuguacacuugg

SEQ ID NO: 7496 - RNA, 22 nt, Artificial Sequence
  Synthetic
ggcaaaauuuuuguacacuugg

SEQ ID NO: 7497 - RNA, 20 nt, Artificial Sequence
  Synthetic
guaucagguggaggacuugg

SEQ ID NO: 7498 - RNA, 21 nt, Artificial Sequence
  Synthetic
gguaucagguggaggacuugg

SEQ ID NO: 7499 - RNA, 22 nt, Artificial Sequence
  Synthetic
gacaaaagguuugaauacuugg

SEQ ID NO: 7500 - RNA, 19 nt, Artificial Sequence
  Synthetic
gugaguuaucuuuacuugg

SEQ ID NO: 7501 - RNA, 21 nt, Artificial Sequence
  Synthetic
gagugaguuaucuuuacuugg

SEQ ID NO: 7502 - RNA, 18 nt, Artificial Sequence
  Synthetic
guccuccccacuccuugg

SEQ ID NO: 7503 - RNA, 21 nt, Artificial Sequence
  Synthetic
gaaguccuccccacuccuugg

SEQ ID NO: 7504 - RNA, 18 nt, Artificial Sequence
  Synthetic
guugguuucugagcuugg

SEQ ID NO: 7505 - RNA, 18 nt, Artificial Sequence
  Synthetic
gggguggguugcgcuugg

SEQ ID NO: 7506 - RNA, 23 nt, Artificial Sequence
  Synthetic
guuuagggguggguugcgcuugg

SEQ ID NO: 7507 - RNA, 24 nt, Artificial Sequence
  Synthetic
gguuuagggguggguugcgcuugg

SEQ ID NO: 7508 - RNA, 19 nt, Artificial Sequence
  Synthetic
guaauugacccuggcuugg

SEQ ID NO: 7509 - RNA, 20 nt, Artificial Sequence
  Synthetic
gguaauugacccuggcuugg

SEQ ID NO: 7510 - RNA, 24 nt, Artificial Sequence
  Synthetic
gauauguguuuuuuggcaucuugg

SEQ ID NO: 7511 - RNA, 22 nt, Artificial Sequence
  Synthetic
guuugcaagaacaggcaguugg

SEQ ID NO: 7512 - RNA, 24 nt, Artificial Sequence
  Synthetic
guguuugcaagaacaggcaguugg

SEQ ID NO: 7513 - RNA, 19 nt, Artificial Sequence
  Synthetic
gccuaucuucccauguugg

SEQ ID NO: 7514 - RNA, 23 nt, Artificial Sequence
  Synthetic
gacugccuaucuucccauguugg

SEQ ID NO: 7515 - RNA, 23 nt, Artificial Sequence
  Synthetic
gauucuagauauauagcuguugg

SEQ ID NO: 7516 - RNA, 18 nt, Artificial Sequence
  Synthetic
ggagccauuaaaauuugg

SEQ ID NO: 7517 - RNA, 18 nt, Artificial Sequence
  Synthetic
gguucacauuccauuugg

SEQ ID NO: 7518 - RNA, 21 nt, Artificial Sequence
  Synthetic
guugguucacauuccauuugg

SEQ ID NO: 7519 - RNA, 23 nt, Artificial Sequence
  Synthetic
guguugguucacauuccauuugg

SEQ ID NO: 7520 - RNA, 24 nt, Artificial Sequence
  Synthetic
gguguugguucacauuccauuugg

SEQ ID NO: 7521 - RNA, 23 nt, Artificial Sequence
  Synthetic
gacacaaauucacuaucauuugg

SEQ ID NO: 7522 - RNA, 24 nt, Artificial Sequence
  Synthetic
ggacacaaauucacuaucauuugg

SEQ ID NO: 7523 - RNA, 18 nt, Artificial Sequence
  Synthetic
gcuuccucucugauuugg

SEQ ID NO: 7524 - RNA, 19 nt, Artificial Sequence
  Synthetic
ggcuuccucucugauuugg

SEQ ID NO: 7525 - RNA, 22 nt, Artificial Sequence
  Synthetic
gcaggcuuccucucugauuugg

SEQ ID NO: 7526 - RNA, 23 nt, Artificial Sequence
  Synthetic
ggcaggcuuccucucugauuugg

SEQ ID NO: 7527 - RNA, 18 nt, Artificial Sequence
  Synthetic
ggaaauguuaaucuuugg

SEQ ID NO: 7528 - RNA, 21 nt, Artificial Sequence
  Synthetic
guaggaaauguuaaucuuugg

SEQ ID NO: 7529 - RNA, 19 nt, Artificial Sequence
  Synthetic
gaucuacuuuuaauuuugg

SEQ ID NO: 7530 - RNA, 18 nt, Artificial Sequence
  Synthetic
gcuuucuucccauuuugg

SEQ ID NO: 7531 - RNA, 19 nt, Artificial Sequence
  Synthetic
ggcuuucuucccauuuugg

SEQ ID NO: 7532 - RNA, 22 nt, Artificial Sequence
  Synthetic
guaggcuuucuucccauuuugg

SEQ ID NO: 7533 - RNA, 24 nt, Artificial Sequence
  Synthetic
guguaggcuuucuucccauuuugg

SEQ ID NO: 7534 - RNA, 18 nt, Artificial Sequence
  Synthetic
ggugaacugggauuuugg

SEQ ID NO: 7535 - RNA, 20 nt, Artificial Sequence
  Synthetic
gaggugaacugggauuuugg

SEQ ID NO: 7536 - RNA, 22 nt, Artificial Sequence
  Synthetic
guauaaauaagaaauuuuuugg

SEQ ID NO: 7537 - RNA, 23 nt, Artificial Sequence
  Synthetic
gguauaaauaagaaauuuuuugg

SEQ ID NO: 7538 - RNA, 19 nt, Artificial Sequence
  Synthetic
gacucaagugauuuuuugg

SEQ ID NO: 7539 - RNA, 23 nt, Artificial Sequence
  Synthetic
gaaugacucaagugauuuuuugg

SEQ ID NO: 7540 - RNA, 24 nt, Artificial Sequence
  Synthetic
ggaaugacucaagugauuuuuugg

SEQ ID NO: 7541 - RNA, 24 nt, Artificial Sequence
  Synthetic
guuccacuaucauuugaaaaaaug

SEQ ID NO: 7542 - RNA, 22 nt, Artificial Sequence
  Synthetic
gucauugacuuguacaaaaaug

SEQ ID NO: 7543 - RNA, 23 nt, Artificial Sequence
  Synthetic
ggucauugacuuguacaaaaaug

SEQ ID NO: 7544 - RNA, 19 nt, Artificial Sequence
  Synthetic
guugaucuucugaaaaaug

SEQ ID NO: 7545 - RNA, 20 nt, Artificial Sequence
  Synthetic
gguugaucuucugaaaaaug

SEQ ID NO: 7546 - RNA, 18 nt, Artificial Sequence
  Synthetic
ggaaucagucccaaaaug

SEQ ID NO: 7547 - RNA, 20 nt, Artificial Sequence
  Synthetic
guggaaucagucccaaaaug

SEQ ID NO: 7548 - RNA, 23 nt, Artificial Sequence
  Synthetic
gcuguggaaucagucccaaaaug

SEQ ID NO: 7549 - RNA, 24 nt, Artificial Sequence
  Synthetic
ggcuguggaaucagucccaaaaug

SEQ ID NO: 7550 - RNA, 23 nt, Artificial Sequence
  Synthetic
gauccuauuuaacagagaaaaug

SEQ ID NO: 7551 - RNA, 24 nt, Artificial Sequence
  Synthetic
ggauccuauuuaacagagaaaaug

SEQ ID NO: 7552 - RNA, 20 nt, Artificial Sequence
  Synthetic
gcccagauggcaauaaaaug

SEQ ID NO: 7553 - RNA, 21 nt, Artificial Sequence
  Synthetic
guccuuuugggauguaaaaug

SEQ ID NO: 7554 - RNA, 20 nt, Artificial Sequence
  Synthetic
guaaagaacugcuuaaaaug

SEQ ID NO: 7555 - RNA, 21 nt, Artificial Sequence
  Synthetic
gguaaagaacugcuuaaaaug

SEQ ID NO: 7556 - RNA, 19 nt, Artificial Sequence
  Synthetic
gauguuaaauacacaaaug

SEQ ID NO: 7557 - RNA, 24 nt, Artificial Sequence
  Synthetic
gucaagauguuaaauacacaaaug

SEQ ID NO: 7558 - RNA, 20 nt, Artificial Sequence
  Synthetic
gaucuggccuaggacaaaug

SEQ ID NO: 7559 - RNA, 21 nt, Artificial Sequence
  Synthetic
ggaucuggccuaggacaaaug

SEQ ID NO: 7560 - RNA, 18 nt, Artificial Sequence
  Synthetic
gaaaagggauaccaaaug

SEQ ID NO: 7561 - RNA, 18 nt, Artificial Sequence
  Synthetic
guagauuuccuccaaaug

SEQ ID NO: 7562 - RNA, 23 nt, Artificial Sequence
  Synthetic
gacacccauaaaaucuccaaaug

SEQ ID NO: 7563 - RNA, 18 nt, Artificial Sequence
  Synthetic
gaugagaagaggcaaaug

SEQ ID NO: 7564 - RNA, 19 nt, Artificial Sequence
  Synthetic
ggaugagaagaggcaaaug

SEQ ID NO: 7565 - RNA, 22 nt, Artificial Sequence
  Synthetic
gaauauaagggcaaugcaaaug

SEQ ID NO: 7566 - RNA, 18 nt, Artificial Sequence
  Synthetic
gggaguugcuaagaaaug

SEQ ID NO: 7567 - RNA, 21 nt, Artificial Sequence
  Synthetic
gcuuaggaaaugugagaaaug

SEQ ID NO: 7568 - RNA, 23 nt, Artificial Sequence
  Synthetic
gauacauucugcuacaugaaaug

SEQ ID NO: 7569 - RNA, 24 nt, Artificial Sequence
  Synthetic
ggauacauucugcuacaugaaaug

SEQ ID NO: 7570 - RNA, 18 nt, Artificial Sequence
  Synthetic
guacaggauccugaaaug

SEQ ID NO: 7571 - RNA, 20 nt, Artificial Sequence
  Synthetic
guguacaggauccugaaaug

SEQ ID NO: 7572 - RNA, 21 nt, Artificial Sequence
  Synthetic
gguguacaggauccugaaaug

SEQ ID NO: 7573 - RNA, 23 nt, Artificial Sequence
  Synthetic
gagguguacaggauccugaaaug

SEQ ID NO: 7574 - RNA, 21 nt, Artificial Sequence
  Synthetic
gcucaugcuuugauugaaaug

SEQ ID NO: 7575 - RNA, 21 nt, Artificial Sequence
  Synthetic
gauuuaaguucuguugaaaug

SEQ ID NO: 7576 - RNA, 23 nt, Artificial Sequence
  Synthetic
gugauuuaaguucuguugaaaug

SEQ ID NO: 7577 - RNA, 18 nt, Artificial Sequence
  Synthetic
ggcuuuaaagccuaaaug

SEQ ID NO: 7578 - RNA, 21 nt, Artificial Sequence
  Synthetic
gaauaauuaagagauuaaaug

SEQ ID NO: 7579 - RNA, 20 nt, Artificial Sequence
  Synthetic
gcacauauauauauuaaaug

SEQ ID NO: 7580 - RNA, 22 nt, Artificial Sequence
  Synthetic
gacaucagagugaauuuaaaug

SEQ ID NO: 7581 - RNA, 19 nt, Artificial Sequence
  Synthetic
gagguguagucuuuaaaug

SEQ ID NO: 7582 - RNA, 23 nt, Artificial Sequence
  Synthetic
gucugagguguagucuuuaaaug

SEQ ID NO: 7583 - RNA, 20 nt, Artificial Sequence
  Synthetic
guccagaggccaaaacaaug

SEQ ID NO: 7584 - RNA, 19 nt, Artificial Sequence
  Synthetic
guucuuacaggcaacaaug

SEQ ID NO: 7585 - RNA, 22 nt, Artificial Sequence
  Synthetic
guuucaagaaaugugaacaaug

SEQ ID NO: 7586 - RNA, 24 nt, Artificial Sequence
  Synthetic
gaguuucaagaaaugugaacaaug

SEQ ID NO: 7587 - RNA, 20 nt, Artificial Sequence
  Synthetic
guagucugguauagccaaug

SEQ ID NO: 7588 - RNA, 21 nt, Artificial Sequence
  Synthetic
gaaauaaucagcaguccaaug

SEQ ID NO: 7589 - RNA, 24 nt, Artificial Sequence
  Synthetic
gaugaaauaaucagcaguccaaug

SEQ ID NO: 7590 - RNA, 20 nt, Artificial Sequence
  Synthetic
gacaauucucaauuccaaug

SEQ ID NO: 7591 - RNA, 21 nt, Artificial Sequence
  Synthetic
ggacaauucucaauuccaaug

SEQ ID NO: 7592 - RNA, 23 nt, Artificial Sequence
  Synthetic
guggacaauucucaauuccaaug

SEQ ID NO: 7593 - RNA, 18 nt, Artificial Sequence
  Synthetic
guggauuccauggcaaug

SEQ ID NO: 7594 - RNA, 23 nt, Artificial Sequence
  Synthetic
gaacaauugcauguaaugcaaug

SEQ ID NO: 7595 - RNA, 24 nt, Artificial Sequence
  Synthetic
ggaacaauugcauguaaugcaaug

SEQ ID NO: 7596 - RNA, 22 nt, Artificial Sequence
  Synthetic
gccugggucucugcuaucaaug

SEQ ID NO: 7597 - RNA, 24 nt, Artificial Sequence
  Synthetic
gagccugggucucugcuaucaaug

SEQ ID NO: 7598 - RNA, 18 nt, Artificial Sequence
  Synthetic
guuaugugucucucaaug

SEQ ID NO: 7599 - RNA, 19 nt, Artificial Sequence
  Synthetic
gguuaugugucucucaaug

SEQ ID NO: 7600 - RNA, 22 nt, Artificial Sequence
  Synthetic
gcagguuaugugucucucaaug

SEQ ID NO: 7601 - RNA, 19 nt, Artificial Sequence
  Synthetic
guucaguaaacagucaaug

SEQ ID NO: 7602 - RNA, 20 nt, Artificial Sequence
  Synthetic
gguucaguaaacagucaaug

SEQ ID NO: 7603 - RNA, 21 nt, Artificial Sequence
  Synthetic
ggguucaguaaacagucaaug

SEQ ID NO: 7604 - RNA, 22 nt, Artificial Sequence
  Synthetic
gccauaguauuuuuaaagaaug

SEQ ID NO: 7605 - RNA, 18 nt, Artificial Sequence
  Synthetic
gcuaucuuacuaagaaug

SEQ ID NO: 7606 - RNA, 21 nt, Artificial Sequence
  Synthetic
gaagcuaucuuacuaagaaug

SEQ ID NO: 7607 - RNA, 19 nt, Artificial Sequence
  Synthetic
gagcaauuugaacagaaug

SEQ ID NO: 7608 - RNA, 24 nt, Artificial Sequence
  Synthetic
gacaagagcaauuugaacagaaug

SEQ ID NO: 7609 - RNA, 21 nt, Artificial Sequence
  Synthetic
gaacuuaagauagauagaaug

SEQ ID NO: 7610 - RNA, 23 nt, Artificial Sequence
  Synthetic
gcccccccccgccauguagaaug

SEQ ID NO: 7611 - RNA, 24 nt, Artificial Sequence
  Synthetic
ggcccccccccgccauguagaaug

SEQ ID NO: 7612 - RNA, 19 nt, Artificial Sequence
  Synthetic
gucugaagauaaaugaaug

SEQ ID NO: 7613 - RNA, 21 nt, Artificial Sequence
  Synthetic
gugucugaagauaaaugaaug

SEQ ID NO: 7614 - RNA, 24 nt, Artificial Sequence
  Synthetic
gcagugucugaagauaaaugaaug

SEQ ID NO: 7615 - RNA, 19 nt, Artificial Sequence
  Synthetic
gaauugacuuaauugaaug

SEQ ID NO: 7616 - RNA, 22 nt, Artificial Sequence
  Synthetic
gcugaauugacuuaauugaaug

SEQ ID NO: 7617 - RNA, 22 nt, Artificial Sequence
  Synthetic
gauaaaauaucagucuugaaug

SEQ ID NO: 7618 - RNA, 21 nt, Artificial Sequence
  Synthetic
gacaggggaauuauaauaaug

SEQ ID NO: 7619 - RNA, 19 nt, Artificial Sequence
  Synthetic
guacaauguacugauaaug

SEQ ID NO: 7620 - RNA, 21 nt, Artificial Sequence
  Synthetic
guuauauaucuggugcuaaug

SEQ ID NO: 7621 - RNA, 23 nt, Artificial Sequence
  Synthetic
guguuauauaucuggugcuaaug

SEQ ID NO: 7622 - RNA, 23 nt, Artificial Sequence
  Synthetic
gaacauuugaguagauaguaaug

SEQ ID NO: 7623 - RNA, 20 nt, Artificial Sequence
  Synthetic
guuauucaauugacguaaug

SEQ ID NO: 7624 - RNA, 22 nt, Artificial Sequence
  Synthetic
guguuauucaauugacguaaug

SEQ ID NO: 7625 - RNA, 21 nt, Artificial Sequence
  Synthetic
guauucaauaaauuauuaaug

SEQ ID NO: 7626 - RNA, 23 nt, Artificial Sequence
  Synthetic
guguauucaauaaauuauuaaug

SEQ ID NO: 7627 - RNA, 23 nt, Artificial Sequence
  Synthetic
gaacuuuuauuacccaaaacaug

SEQ ID NO: 7628 - RNA, 24 nt, Artificial Sequence
  Synthetic
ggaacuuuuauuacccaaaacaug

SEQ ID NO: 7629 - RNA, 22 nt, Artificial Sequence
  Synthetic
gcaaacagaacauuaaaacaug

SEQ ID NO: 7630 - RNA, 19 nt, Artificial Sequence
  Synthetic
gaacucagucaagaacaug

SEQ ID NO: 7631 - RNA, 20 nt, Artificial Sequence
  Synthetic
guuauauguacagacacaug

SEQ ID NO: 7632 - RNA, 23 nt, Artificial Sequence
  Synthetic
gauguuauauguacagacacaug

SEQ ID NO: 7633 - RNA, 24 nt, Artificial Sequence
  Synthetic
ggauguuauauguacagacacaug

SEQ ID NO: 7634 - RNA, 21 nt, Artificial Sequence
  Synthetic
guucguaaaucaggacacaug

SEQ ID NO: 7635 - RNA, 22 nt, Artificial Sequence
  Synthetic
gguucguaaaucaggacacaug

SEQ ID NO: 7636 - RNA, 24 nt, Artificial Sequence
  Synthetic
gagguucguaaaucaggacacaug

SEQ ID NO: 7637 - RNA, 22 nt, Artificial Sequence
  Synthetic
guuuuuuaaauugcaucacaug

SEQ ID NO: 7638 - RNA, 23 nt, Artificial Sequence
  Synthetic
guaaaauacuauaacaauacaug

SEQ ID NO: 7639 - RNA, 21 nt, Artificial Sequence
  Synthetic
gaaauugaucugcaauacaug

SEQ ID NO: 7640 - RNA, 24 nt, Artificial Sequence
  Synthetic
gcagaaauugaucugcaauacaug

SEQ ID NO: 7641 - RNA, 18 nt, Artificial Sequence
  Synthetic
ggacaauacaaaaccaug

SEQ ID NO: 7642 - RNA, 20 nt, Artificial Sequence
  Synthetic
gaggacaauacaaaaccaug

SEQ ID NO: 7643 - RNA, 18 nt, Artificial Sequence
  Synthetic
gcaaaaaccucacccaug

SEQ ID NO: 7644 - RNA, 23 nt, Artificial Sequence
  Synthetic
gcucagcaaaaaccucacccaug

SEQ ID NO: 7645 - RNA, 19 nt, Artificial Sequence
  Synthetic
gaucuuaucuggucccaug

SEQ ID NO: 7646 - RNA, 22 nt, Artificial Sequence
  Synthetic
gaagaucuuaucuggucccaug

SEQ ID NO: 7647 - RNA, 23 nt, Artificial Sequence
  Synthetic
ggaagaucuuaucuggucccaug

SEQ ID NO: 7648 - RNA, 22 nt, Artificial Sequence
  Synthetic
gcaaaguauuggcuaggccaug

SEQ ID NO: 7649 - RNA, 21 nt, Artificial Sequence
  Synthetic
gcucagcuaguggaauccaug

SEQ ID NO: 7650 - RNA, 24 nt, Artificial Sequence
  Synthetic
gucuuaauuauuuggcaaagcaug

SEQ ID NO: 7651 - RNA, 22 nt, Artificial Sequence
  Synthetic
gcuacuuuuaugacgaggcaug

SEQ ID NO: 7652 - RNA, 20 nt, Artificial Sequence
  Synthetic
gcuagguuccaugaugcaug

SEQ ID NO: 7653 - RNA, 22 nt, Artificial Sequence
  Synthetic
gagcuagguuccaugaugcaug

SEQ ID NO: 7654 - RNA, 24 nt, Artificial Sequence
  Synthetic
gaaaacuuaaaaugugccugcaug

SEQ ID NO: 7655 - RNA, 24 nt, Artificial Sequence
  Synthetic
gaucuuugcuuugcagucaucaug

SEQ ID NO: 7656 - RNA, 22 nt, Artificial Sequence
  Synthetic
gucuauauuacauuucaucaug

SEQ ID NO: 7657 - RNA, 18 nt, Artificial Sequence
  Synthetic
ggucccccuaagaucaug

SEQ ID NO: 7658 - RNA, 24 nt, Artificial Sequence
  Synthetic
gucauaugagcauugaguaucaug

SEQ ID NO: 7659 - RNA, 18 nt, Artificial Sequence
  Synthetic
gauacuacuguacucaug

SEQ ID NO: 7660 - RNA, 19 nt, Artificial Sequence
  Synthetic
ggauacuacuguacucaug

SEQ ID NO: 7661 - RNA, 20 nt, Artificial Sequence
  Synthetic
gggauacuacuguacucaug

SEQ ID NO: 7662 - RNA, 21 nt, Artificial Sequence
  Synthetic
gcacuuuaccuguuccucaug

SEQ ID NO: 7663 - RNA, 22 nt, Artificial Sequence
  Synthetic
ggcacuuuaccuguuccucaug

SEQ ID NO: 7664 - RNA, 24 nt, Artificial Sequence
  Synthetic
guaaacccccauacacuucucaug

SEQ ID NO: 7665 - RNA, 21 nt, Artificial Sequence
  Synthetic
gcucauguuuaaugagucaug

SEQ ID NO: 7666 - RNA, 23 nt, Artificial Sequence
  Synthetic
gagcucauguuuaaugagucaug

SEQ ID NO: 7667 - RNA, 20 nt, Artificial Sequence
  Synthetic
gacuuaaaagcuaauucaug

SEQ ID NO: 7668 - RNA, 22 nt, Artificial Sequence
  Synthetic
gagacuuaaaagcuaauucaug

SEQ ID NO: 7669 - RNA, 23 nt, Artificial Sequence
  Synthetic
ggagacuuaaaagcuaauucaug

SEQ ID NO: 7670 - RNA, 24 nt, Artificial Sequence
  Synthetic
gggagacuuaaaagcuaauucaug

SEQ ID NO: 7671 - RNA, 23 nt, Artificial Sequence
  Synthetic
gcaaucucuccuccccguucaug

SEQ ID NO: 7672 - RNA, 21 nt, Artificial Sequence
  Synthetic
gucauuuggucuucuuucaug

SEQ ID NO: 7673 - RNA, 24 nt, Artificial Sequence
  Synthetic
guugucauuuggucuucuuucaug

SEQ ID NO: 7674 - RNA, 21 nt, Artificial Sequence
  Synthetic
gauuagcuggaaguuuucaug

SEQ ID NO: 7675 - RNA, 23 nt, Artificial Sequence
  Synthetic
gugauuagcuggaaguuuucaug

SEQ ID NO: 7676 - RNA, 22 nt, Artificial Sequence
  Synthetic
gaaagccauguccuaaaagaug

SEQ ID NO: 7677 - RNA, 23 nt, Artificial Sequence
  Synthetic
gucuuugcucuggaccuaagaug

SEQ ID NO: 7678 - RNA, 21 nt, Artificial Sequence
  Synthetic
guuuagauaaauauccagaug

SEQ ID NO: 7679 - RNA, 19 nt, Artificial Sequence
  Synthetic
gaucccaggccuccagaug

SEQ ID NO: 7680 - RNA, 20 nt, Artificial Sequence
  Synthetic
ggaucccaggccuccagaug

SEQ ID NO: 7681 - RNA, 21 nt, Artificial Sequence
  Synthetic
gggaucccaggccuccagaug

SEQ ID NO: 7682 - RNA, 18 nt, Artificial Sequence
  Synthetic
gcauuuaaugggcagaug

SEQ ID NO: 7683 - RNA, 22 nt, Artificial Sequence
  Synthetic
gauguuuuuaaaaaugcagaug

SEQ ID NO: 7684 - RNA, 24 nt, Artificial Sequence
  Synthetic
gugauguuuuuaaaaaugcagaug

SEQ ID NO: 7685 - RNA, 21 nt, Artificial Sequence
  Synthetic
gaacugaucaagacucagaug

SEQ ID NO: 7686 - RNA, 23 nt, Artificial Sequence
  Synthetic
gaaaaguugaauucauagagaug

SEQ ID NO: 7687 - RNA, 20 nt, Artificial Sequence
  Synthetic
gaaggaaacaaaucgagaug

SEQ ID NO: 7688 - RNA, 21 nt, Artificial Sequence
  Synthetic
ggaaggaaacaaaucgagaug

SEQ ID NO: 7689 - RNA, 19 nt, Artificial Sequence
  Synthetic
guaacacaucucauagaug

SEQ ID NO: 7690 - RNA, 24 nt, Artificial Sequence
  Synthetic
gaaaaguuagucauuuuauagaug

SEQ ID NO: 7691 - RNA, 18 nt, Artificial Sequence
  Synthetic
ggggucuuuauuuagaug

SEQ ID NO: 7692 - RNA, 22 nt, Artificial Sequence
  Synthetic
gcuuggggucuuuauuuagaug

SEQ ID NO: 7693 - RNA, 24 nt, Artificial Sequence
  Synthetic
gugcuuggggucuuuauuuagaug

SEQ ID NO: 7694 - RNA, 20 nt, Artificial Sequence
  Synthetic
gaugaauggugaugacgaug

SEQ ID NO: 7695 - RNA, 23 nt, Artificial Sequence
  Synthetic
guugaugaauggugaugacgaug

SEQ ID NO: 7696 - RNA, 24 nt, Artificial Sequence
  Synthetic
gguugaugaauggugaugacgaug

SEQ ID NO: 7697 - RNA, 19 nt, Artificial Sequence
  Synthetic
gauuuggccaaauacgaug

SEQ ID NO: 7698 - RNA, 23 nt, Artificial Sequence
  Synthetic
gucugauuuggccaaauacgaug

SEQ ID NO: 7699 - RNA, 18 nt, Artificial Sequence
  Synthetic
gggaaauuuaaaaggaug

SEQ ID NO: 7700 - RNA, 19 nt, Artificial Sequence
  Synthetic
ggggaaauuuaaaaggaug

SEQ ID NO: 7701 - RNA, 23 nt, Artificial Sequence
  Synthetic
guucggggaaauuuaaaaggaug

SEQ ID NO: 7702 - RNA, 24 nt, Artificial Sequence
  Synthetic
gguucggggaaauuuaaaaggaug

SEQ ID NO: 7703 - RNA, 18 nt, Artificial Sequence
  Synthetic
gaguuuuaaagaaggaug

SEQ ID NO: 7704 - RNA, 23 nt, Artificial Sequence
  Synthetic
gacuagaguuuuaaagaaggaug

SEQ ID NO: 7705 - RNA, 20 nt, Artificial Sequence
  Synthetic
guaauaucagugccaggaug

SEQ ID NO: 7706 - RNA, 23 nt, Artificial Sequence
  Synthetic
gucucccgucacauugcaggaug

SEQ ID NO: 7707 - RNA, 24 nt, Artificial Sequence
  Synthetic
ggucucccgucacauugcaggaug

SEQ ID NO: 7708 - RNA, 20 nt, Artificial Sequence
  Synthetic
gacacacaugauggaggaug

SEQ ID NO: 7709 - RNA, 18 nt, Artificial Sequence
  Synthetic
gugacaaauacuaggaug

SEQ ID NO: 7710 - RNA, 22 nt, Artificial Sequence
  Synthetic
guacgugacaaauacuaggaug

SEQ ID NO: 7711 - RNA, 19 nt, Artificial Sequence
  Synthetic
gcagucauauuuagggaug

SEQ ID NO: 7712 - RNA, 20 nt, Artificial Sequence
  Synthetic
gauacuccuuuccugggaug

SEQ ID NO: 7713 - RNA, 18 nt, Artificial Sequence
  Synthetic
ggauauccagccuggaug

SEQ ID NO: 7714 - RNA, 23 nt, Artificial Sequence
  Synthetic
guuuuggauauccagccuggaug

SEQ ID NO: 7715 - RNA, 24 nt, Artificial Sequence
  Synthetic
gaucuuacauugucugucuggaug

SEQ ID NO: 7716 - RNA, 22 nt, Artificial Sequence
  Synthetic
gaauuguaaauagcuguggaug

SEQ ID NO: 7717 - RNA, 18 nt, Artificial Sequence
  Synthetic
gauggauuuaaaaugaug

SEQ ID NO: 7718 - RNA, 24 nt, Artificial Sequence
  Synthetic
guucaugauggauuuaaaaugaug

SEQ ID NO: 7719 - RNA, 21 nt, Artificial Sequence
  Synthetic
gcauauuuggagccaaugaug

SEQ ID NO: 7720 - RNA, 18 nt, Artificial Sequence
  Synthetic
guaaagacacacaugaug

SEQ ID NO: 7721 - RNA, 19 nt, Artificial Sequence
  Synthetic
gguaaagacacacaugaug

SEQ ID NO: 7722 - RNA, 21 nt, Artificial Sequence
  Synthetic
gagguaaagacacacaugaug

SEQ ID NO: 7723 - RNA, 24 nt, Artificial Sequence
  Synthetic
guagagguaaagacacacaugaug

SEQ ID NO: 7724 - RNA, 21 nt, Artificial Sequence
  Synthetic
gcacacacaaucggcaugaug

SEQ ID NO: 7725 - RNA, 19 nt, Artificial Sequence
  Synthetic
gcuagaaaaaaugaugaug

SEQ ID NO: 7726 - RNA, 20 nt, Artificial Sequence
  Synthetic
ggcuagaaaaaaugaugaug

SEQ ID NO: 7727 - RNA, 22 nt, Artificial Sequence
  Synthetic
guggcuagaaaaaaugaugaug

SEQ ID NO: 7728 - RNA, 21 nt, Artificial Sequence
  Synthetic
gcaaugccaccagugaugaug

SEQ ID NO: 7729 - RNA, 23 nt, Artificial Sequence
  Synthetic
gcuucuucacuauguauaugaug

SEQ ID NO: 7730 - RNA, 24 nt, Artificial Sequence
  Synthetic
guuauuacccaccccugacugaug

SEQ ID NO: 7731 - RNA, 18 nt, Artificial Sequence
  Synthetic
gucaggaacugucugaug

SEQ ID NO: 7732 - RNA, 19 nt, Artificial Sequence
  Synthetic
ggucaggaacugucugaug

SEQ ID NO: 7733 - RNA, 20 nt, Artificial Sequence
  Synthetic
gauguagaauuagaaauaug

SEQ ID NO: 7734 - RNA, 24 nt, Artificial Sequence
  Synthetic
gcaugauguagaauuagaaauaug

SEQ ID NO: 7735 - RNA, 19 nt, Artificial Sequence
  Synthetic
gauggcaauuaccaauaug

SEQ ID NO: 7736 - RNA, 20 nt, Artificial Sequence
  Synthetic
ggauggcaauuaccaauaug

SEQ ID NO: 7737 - RNA, 22 nt, Artificial Sequence
  Synthetic
gaggauggcaauuaccaauaug

SEQ ID NO: 7738 - RNA, 22 nt, Artificial Sequence
  Synthetic
gaacuggagaugggagaauaug

SEQ ID NO: 7739 - RNA, 24 nt, Artificial Sequence
  Synthetic
gagaacuggagaugggagaauaug

SEQ ID NO: 7740 - RNA, 19 nt, Artificial Sequence
  Synthetic
gucacaagguuguaauaug

SEQ ID NO: 7741 - RNA, 21 nt, Artificial Sequence
  Synthetic
gugucacaagguuguaauaug

SEQ ID NO: 7742 - RNA, 23 nt, Artificial Sequence
  Synthetic
gagugucacaagguuguaauaug

SEQ ID NO: 7743 - RNA, 24 nt, Artificial Sequence
  Synthetic
gacucuaaaauaaaguuuaauaug

SEQ ID NO: 7744 - RNA, 18 nt, Artificial Sequence
  Synthetic
ggccuuauuuuuaauaug

SEQ ID NO: 7745 - RNA, 22 nt, Artificial Sequence
  Synthetic
gaacggccuuauuuuuaauaug

SEQ ID NO: 7746 - RNA, 23 nt, Artificial Sequence
  Synthetic
ggaacggccuuauuuuuaauaug

SEQ ID NO: 7747 - RNA, 21 nt, Artificial Sequence
  Synthetic
gcccagggccagcaacauaug

SEQ ID NO: 7748 - RNA, 24 nt, Artificial Sequence
  Synthetic
guauuucagguaauaaagcauaug

SEQ ID NO: 7749 - RNA, 22 nt, Artificial Sequence
  Synthetic
gaauucuacuuagucagauaug

SEQ ID NO: 7750 - RNA, 23 nt, Artificial Sequence
  Synthetic
ggaauucuacuuagucagauaug

SEQ ID NO: 7751 - RNA, 18 nt, Artificial Sequence
  Synthetic
gcaugacaacgggauaug

SEQ ID NO: 7752 - RNA, 21 nt, Artificial Sequence
  Synthetic
guugcaugacaacgggauaug

SEQ ID NO: 7753 - RNA, 23 nt, Artificial Sequence
  Synthetic
guguugcaugacaacgggauaug

SEQ ID NO: 7754 - RNA, 22 nt, Artificial Sequence
  Synthetic
gucaucccugaaaugggauaug

SEQ ID NO: 7755 - RNA, 19 nt, Artificial Sequence
  Synthetic
gcuuggauuccuggauaug

SEQ ID NO: 7756 - RNA, 19 nt, Artificial Sequence
  Synthetic
gcuuauuggaggugauaug

SEQ ID NO: 7757 - RNA, 22 nt, Artificial Sequence
  Synthetic
gaagcuuauuggaggugauaug

SEQ ID NO: 7758 - RNA, 21 nt, Artificial Sequence
  Synthetic
gaaauuuaaacuacauauaug

SEQ ID NO: 7759 - RNA, 23 nt, Artificial Sequence
  Synthetic
gagaaauuuaaacuacauauaug

SEQ ID NO: 7760 - RNA, 22 nt, Artificial Sequence
  Synthetic
gaaauuguacaugagauauaug

SEQ ID NO: 7761 - RNA, 23 nt, Artificial Sequence
  Synthetic
guacacgauccuuuuauuauaug

SEQ ID NO: 7762 - RNA, 20 nt, Artificial Sequence
  Synthetic
guacuucauucuguuauaug

SEQ ID NO: 7763 - RNA, 20 nt, Artificial Sequence
  Synthetic
guacuccggccuugccuaug

SEQ ID NO: 7764 - RNA, 19 nt, Artificial Sequence
  Synthetic
gacaaugcaucauccuaug

SEQ ID NO: 7765 - RNA, 24 nt, Artificial Sequence
  Synthetic
gcaaagacaaugcaucauccuaug

SEQ ID NO: 7766 - RNA, 19 nt, Artificial Sequence
  Synthetic
guugacucuugcugcuaug

SEQ ID NO: 7767 - RNA, 22 nt, Artificial Sequence
  Synthetic
gaaguugacucuugcugcuaug

SEQ ID NO: 7768 - RNA, 19 nt, Artificial Sequence
  Synthetic
gcuuuuccuuaccucuaug

SEQ ID NO: 7769 - RNA, 21 nt, Artificial Sequence
  Synthetic
gugcuuuuccuuaccucuaug

SEQ ID NO: 7770 - RNA, 21 nt, Artificial Sequence
  Synthetic
gcuaggggggcacugucuaug

SEQ ID NO: 7771 - RNA, 18 nt, Artificial Sequence
  Synthetic
gguggaaauuuuucuaug

SEQ ID NO: 7772 - RNA, 20 nt, Artificial Sequence
  Synthetic
gugguggaaauuuuucuaug

SEQ ID NO: 7773 - RNA, 21 nt, Artificial Sequence
  Synthetic
ggugguggaaauuuuucuaug

SEQ ID NO: 7774 - RNA, 24 nt, Artificial Sequence
  Synthetic
gaaggugguggaaauuuuucuaug

SEQ ID NO: 7775 - RNA, 24 nt, Artificial Sequence
  Synthetic
guccuccacauugcugccaguaug

SEQ ID NO: 7776 - RNA, 18 nt, Artificial Sequence
  Synthetic
guggaaaugauagguaug

SEQ ID NO: 7777 - RNA, 20 nt, Artificial Sequence
  Synthetic
gaguggaaaugauagguaug

SEQ ID NO: 7778 - RNA, 24 nt, Artificial Sequence
  Synthetic
gacaacuguuuaagauuggguaug

SEQ ID NO: 7779 - RNA, 18 nt, Artificial Sequence
  Synthetic
gcauaguaauuauguaug

SEQ ID NO: 7780 - RNA, 21 nt, Artificial Sequence
  Synthetic
guagcauaguaauuauguaug

SEQ ID NO: 7781 - RNA, 18 nt, Artificial Sequence
  Synthetic
guaaucacaaucuguaug

SEQ ID NO: 7782 - RNA, 23 nt, Artificial Sequence
  Synthetic
gaugaauuguccaaaguuguaug

SEQ ID NO: 7783 - RNA, 22 nt, Artificial Sequence
  Synthetic
gauauaugaaucuuaaguuaug

SEQ ID NO: 7784 - RNA, 23 nt, Artificial Sequence
  Synthetic
ggauauaugaaucuuaaguuaug

SEQ ID NO: 7785 - RNA, 18 nt, Artificial Sequence
  Synthetic
gcaguaagaagauuuaug

SEQ ID NO: 7786 - RNA, 19 nt, Artificial Sequence
  Synthetic
ggcaguaagaagauuuaug

SEQ ID NO: 7787 - RNA, 23 nt, Artificial Sequence
  Synthetic
gcauggcaguaagaagauuuaug

SEQ ID NO: 7788 - RNA, 19 nt, Artificial Sequence
  Synthetic
guacuuaaagcucuuuaug

SEQ ID NO: 7789 - RNA, 22 nt, Artificial Sequence
  Synthetic
guaguacuuaaagcucuuuaug

SEQ ID NO: 7790 - RNA, 18 nt, Artificial Sequence
  Synthetic
gugcuucagacaaaacug

SEQ ID NO: 7791 - RNA, 20 nt, Artificial Sequence
  Synthetic
gugugcuucagacaaaacug

SEQ ID NO: 7792 - RNA, 23 nt, Artificial Sequence
  Synthetic
gcagugugcuucagacaaaacug

SEQ ID NO: 7793 - RNA, 20 nt, Artificial Sequence
  Synthetic
gacaucauguuaugaaacug

SEQ ID NO: 7794 - RNA, 21 nt, Artificial Sequence
  Synthetic
ggacaucauguuaugaaacug

SEQ ID NO: 7795 - RNA, 19 nt, Artificial Sequence
  Synthetic
gcauauauucaaacaacug

SEQ ID NO: 7796 - RNA, 22 nt, Artificial Sequence
  Synthetic
gcagcauauauucaaacaacug

SEQ ID NO: 7797 - RNA, 19 nt, Artificial Sequence
  Synthetic
gcguauagaaacgcaacug

SEQ ID NO: 7798 - RNA, 23 nt, Artificial Sequence
  Synthetic
gcuagcguauagaaacgcaacug

SEQ ID NO: 7799 - RNA, 18 nt, Artificial Sequence
  Synthetic
guauuuuaauuagaacug

SEQ ID NO: 7800 - RNA, 23 nt, Artificial Sequence
  Synthetic
gcaucguauuuuaauuagaacug

SEQ ID NO: 7801 - RNA, 24 nt, Artificial Sequence
  Synthetic
ggcaucguauuuuaauuagaacug

SEQ ID NO: 7802 - RNA, 20 nt, Artificial Sequence
  Synthetic
gauuuguuuucagggaacug

SEQ ID NO: 7803 - RNA, 23 nt, Artificial Sequence
  Synthetic
guuuucccuauugaaaugaacug

SEQ ID NO: 7804 - RNA, 18 nt, Artificial Sequence
  Synthetic
gaaucuuacaacccacug

SEQ ID NO: 7805 - RNA, 20 nt, Artificial Sequence
  Synthetic
gagaaucuuacaacccacug

SEQ ID NO: 7806 - RNA, 22 nt, Artificial Sequence
  Synthetic
gagagaaucuuacaacccacug

SEQ ID NO: 7807 - RNA, 23 nt, Artificial Sequence
  Synthetic
ggagagaaucuuacaacccacug

SEQ ID NO: 7808 - RNA, 24 nt, Artificial Sequence
  Synthetic
gggagagaaucuuacaacccacug

SEQ ID NO: 7809 - RNA, 23 nt, Artificial Sequence
  Synthetic
gcuauauuguggugaguccacug

SEQ ID NO: 7810 - RNA, 23 nt, Artificial Sequence
  Synthetic
guauauuaaguucuguaucacug

SEQ ID NO: 7811 - RNA, 19 nt, Artificial Sequence
  Synthetic
gugugcuauucauucacug

SEQ ID NO: 7812 - RNA, 22 nt, Artificial Sequence
  Synthetic
gaagugugcuauucauucacug

SEQ ID NO: 7813 - RNA, 20 nt, Artificial Sequence
  Synthetic
gaacuuccggcccuucacug

SEQ ID NO: 7814 - RNA, 19 nt, Artificial Sequence
  Synthetic
gcaaaauaaaagaagacug

SEQ ID NO: 7815 - RNA, 22 nt, Artificial Sequence
  Synthetic
gaugcaaaauaaaagaagacug

SEQ ID NO: 7816 - RNA, 24 nt, Artificial Sequence
  Synthetic
gugaugcaaaauaaaagaagacug

SEQ ID NO: 7817 - RNA, 22 nt, Artificial Sequence
  Synthetic
gcccacgaucuggaacagacug

SEQ ID NO: 7818 - RNA, 23 nt, Artificial Sequence
  Synthetic
ggcccacgaucuggaacagacug

SEQ ID NO: 7819 - RNA, 21 nt, Artificial Sequence
  Synthetic
gaauccuuuguugccagacug

SEQ ID NO: 7820 - RNA, 22 nt, Artificial Sequence
  Synthetic
ggaauccuuuguugccagacug

SEQ ID NO: 7821 - RNA, 23 nt, Artificial Sequence
  Synthetic
gggaauccuuuguugccagacug

SEQ ID NO: 7822 - RNA, 21 nt, Artificial Sequence
  Synthetic
gacuccuuuguccaaggacug

SEQ ID NO: 7823 - RNA, 22 nt, Artificial Sequence
  Synthetic
gucaagggcauauuuaggacug

SEQ ID NO: 7824 - RNA, 23 nt, Artificial Sequence
  Synthetic
gauuacacaaaaagacuggacug

SEQ ID NO: 7825 - RNA, 19 nt, Artificial Sequence
  Synthetic
gcauuucuuauauugacug

SEQ ID NO: 7826 - RNA, 20 nt, Artificial Sequence
  Synthetic
gaaccaaugauaaacuacug

SEQ ID NO: 7827 - RNA, 19 nt, Artificial Sequence
  Synthetic
gccgcucauacaauuacug

SEQ ID NO: 7828 - RNA, 20 nt, Artificial Sequence
  Synthetic
ggccgcucauacaauuacug

SEQ ID NO: 7829 - RNA, 23 nt, Artificial Sequence
  Synthetic
gacuaugucuuuccuguuuacug

SEQ ID NO: 7830 - RNA, 24 nt, Artificial Sequence
  Synthetic
ggacuaugucuuuccuguuuacug

SEQ ID NO: 7831 - RNA, 19 nt, Artificial Sequence
  Synthetic
gagauggggcuagaaccug

SEQ ID NO: 7832 - RNA, 20 nt, Artificial Sequence
  Synthetic
ggagauggggcuagaaccug

SEQ ID NO: 7833 - RNA, 22 nt, Artificial Sequence
  Synthetic
gaggagauggggcuagaaccug

SEQ ID NO: 7834 - RNA, 20 nt, Artificial Sequence
  Synthetic
gcuugacugcauuuaaccug

SEQ ID NO: 7835 - RNA, 22 nt, Artificial Sequence
  Synthetic
gugcuugacugcauuuaaccug

SEQ ID NO: 7836 - RNA, 18 nt, Artificial Sequence
  Synthetic
gugccuuuugaauaccug

SEQ ID NO: 7837 - RNA, 19 nt, Artificial Sequence
  Synthetic
gcuuauauucauauaccug

SEQ ID NO: 7838 - RNA, 18 nt, Artificial Sequence
  Synthetic
gagcauaguaccuaccug

SEQ ID NO: 7839 - RNA, 20 nt, Artificial Sequence
  Synthetic
gugagcauaguaccuaccug

SEQ ID NO: 7840 - RNA, 19 nt, Artificial Sequence
  Synthetic
gauggaggggcucuaccug

SEQ ID NO: 7841 - RNA, 20 nt, Artificial Sequence
  Synthetic
ggauggaggggcucuaccug

SEQ ID NO: 7842 - RNA, 18 nt, Artificial Sequence
  Synthetic
gguucuggagcuuaccug

SEQ ID NO: 7843 - RNA, 22 nt, Artificial Sequence
  Synthetic
gaaugguucuggagcuuaccug

SEQ ID NO: 7844 - RNA, 20 nt, Artificial Sequence
  Synthetic
guauuauuuguuuuuaccug

SEQ ID NO: 7845 - RNA, 23 nt, Artificial Sequence
  Synthetic
gcuguauuauuuguuuuuaccug

SEQ ID NO: 7846 - RNA, 24 nt, Artificial Sequence
  Synthetic
ggcuguauuauuuguuuuuaccug

SEQ ID NO: 7847 - RNA, 23 nt, Artificial Sequence
  Synthetic
gaaagcaaagacaacaaacccug

SEQ ID NO: 7848 - RNA, 18 nt, Artificial Sequence
  Synthetic
ggcaaaaauuacacccug

SEQ ID NO: 7849 - RNA, 20 nt, Artificial Sequence
  Synthetic
guggcaaaaauuacacccug

SEQ ID NO: 7850 - RNA, 20 nt, Artificial Sequence
  Synthetic
gaaguucaguugccacccug

SEQ ID NO: 7851 - RNA, 21 nt, Artificial Sequence
  Synthetic
gaauuuaagcuggucacccug

SEQ ID NO: 7852 - RNA, 24 nt, Artificial Sequence
  Synthetic
gcugaauuuaagcuggucacccug

SEQ ID NO: 7853 - RNA, 21 nt, Artificial Sequence
  Synthetic
gauauauuaaauuucccccug

SEQ ID NO: 7854 - RNA, 19 nt, Artificial Sequence
  Synthetic
guaauugagcuuggcccug

SEQ ID NO: 7855 - RNA, 23 nt, Artificial Sequence
  Synthetic
gauaguaauugagcuuggcccug

SEQ ID NO: 7856 - RNA, 18 nt, Artificial Sequence
  Synthetic
gcaagaacaagaucccug

SEQ ID NO: 7857 - RNA, 19 nt, Artificial Sequence
  Synthetic
ggcaagaacaagaucccug

SEQ ID NO: 7858 - RNA, 20 nt, Artificial Sequence
  Synthetic
gggcaagaacaagaucccug

SEQ ID NO: 7859 - RNA, 22 nt, Artificial Sequence
  Synthetic
gagggcaagaacaagaucccug

SEQ ID NO: 7860 - RNA, 18 nt, Artificial Sequence
  Synthetic
guaacucgauauucccug

SEQ ID NO: 7861 - RNA, 24 nt, Artificial Sequence
  Synthetic
gcuuaaguaacucgauauucccug

SEQ ID NO: 7862 - RNA, 19 nt, Artificial Sequence
  Synthetic
gaccagaaauacuggccug

SEQ ID NO: 7863 - RNA, 22 nt, Artificial Sequence
  Synthetic
gaagaccagaaauacuggccug

SEQ ID NO: 7864 - RNA, 24 nt, Artificial Sequence
  Synthetic
gagaagaccagaaauacuggccug

SEQ ID NO: 7865 - RNA, 18 nt, Artificial Sequence
  Synthetic
ggcaagagaauaauccug

SEQ ID NO: 7866 - RNA, 21 nt, Artificial Sequence
  Synthetic
gaaggcaagagaauaauccug

SEQ ID NO: 7867 - RNA, 23 nt, Artificial Sequence
  Synthetic
guuuuacccagacagauauccug

SEQ ID NO: 7868 - RNA, 18 nt, Artificial Sequence
  Synthetic
gcuacccaaguuauccug

SEQ ID NO: 7869 - RNA, 21 nt, Artificial Sequence
  Synthetic
gcugcuacccaaguuauccug

SEQ ID NO: 7870 - RNA, 24 nt, Artificial Sequence
  Synthetic
guagcugcuacccaaguuauccug

SEQ ID NO: 7871 - RNA, 18 nt, Artificial Sequence
  Synthetic
gcuaacucccuccuccug

SEQ ID NO: 7872 - RNA, 19 nt, Artificial Sequence
  Synthetic
ggcuaacucccuccuccug

SEQ ID NO: 7873 - RNA, 20 nt, Artificial Sequence
  Synthetic
gggcuaacucccuccuccug

SEQ ID NO: 7874 - RNA, 24 nt, Artificial Sequence
  Synthetic
gucacuucauguuuaacucuccug

SEQ ID NO: 7875 - RNA, 21 nt, Artificial Sequence
  Synthetic
gguuucucuucagaaaagcug

SEQ ID NO: 7876 - RNA, 18 nt, Artificial Sequence
  Synthetic
ggugagaaauagcagcug

SEQ ID NO: 7877 - RNA, 19 nt, Artificial Sequence
  Synthetic
gggugagaaauagcagcug

SEQ ID NO: 7878 - RNA, 23 nt, Artificial Sequence
  Synthetic
guuagggugagaaauagcagcug

SEQ ID NO: 7879 - RNA, 20 nt, Artificial Sequence
  Synthetic
guagauucaauugucagcug

SEQ ID NO: 7880 - RNA, 24 nt, Artificial Sequence
  Synthetic
guuuguagauucaauugucagcug

SEQ ID NO: 7881 - RNA, 22 nt, Artificial Sequence
  Synthetic
gccccaggagaaaagagagcug

SEQ ID NO: 7882 - RNA, 18 nt, Artificial Sequence
  Synthetic
gcauuccuuaaauagcug

SEQ ID NO: 7883 - RNA, 19 nt, Artificial Sequence
  Synthetic
ggcauuccuuaaauagcug

SEQ ID NO: 7884 - RNA, 20 nt, Artificial Sequence
  Synthetic
gggcauuccuuaaauagcug

SEQ ID NO: 7885 - RNA, 18 nt, Artificial Sequence
  Synthetic
guucugauaagguagcug

SEQ ID NO: 7886 - RNA, 20 nt, Artificial Sequence
  Synthetic
gaguucugauaagguagcug

SEQ ID NO: 7887 - RNA, 21 nt, Artificial Sequence
  Synthetic
ggaguucugauaagguagcug

SEQ ID NO: 7888 - RNA, 24 nt, Artificial Sequence
  Synthetic
guaggaguucugauaagguagcug

SEQ ID NO: 7889 - RNA, 19 nt, Artificial Sequence
  Synthetic
gaggcuguggauaacgcug

SEQ ID NO: 7890 - RNA, 21 nt, Artificial Sequence
  Synthetic
gggugauucugcugcacgcug

SEQ ID NO: 7891 - RNA, 22 nt, Artificial Sequence
  Synthetic
ggggugauucugcugcacgcug

SEQ ID NO: 7892 - RNA, 23 nt, Artificial Sequence
  Synthetic
gcccucgagcagaaaccucgcug

SEQ ID NO: 7893 - RNA, 19 nt, Artificial Sequence
  Synthetic
gcacugggaaaucaggcug

SEQ ID NO: 7894 - RNA, 20 nt, Artificial Sequence
  Synthetic
ggcacugggaaaucaggcug

SEQ ID NO: 7895 - RNA, 23 nt, Artificial Sequence
  Synthetic
gcuggcacugggaaaucaggcug

SEQ ID NO: 7896 - RNA, 21 nt, Artificial Sequence
  Synthetic
gcuaugauacccaagaggcug

SEQ ID NO: 7897 - RNA, 21 nt, Artificial Sequence
  Synthetic
gcacuucuguaugagaggcug

SEQ ID NO: 7898 - RNA, 22 nt, Artificial Sequence
  Synthetic
ggcacuucuguaugagaggcug

SEQ ID NO: 7899 - RNA, 18 nt, Artificial Sequence
  Synthetic
gauggccacccagggcug

SEQ ID NO: 7900 - RNA, 20 nt, Artificial Sequence
  Synthetic
gugauggccacccagggcug

SEQ ID NO: 7901 - RNA, 22 nt, Artificial Sequence
  Synthetic
gugugauggccacccagggcug

SEQ ID NO: 7902 - RNA, 23 nt, Artificial Sequence
  Synthetic
ggugugauggccacccagggcug

SEQ ID NO: 7903 - RNA, 24 nt, Artificial Sequence
  Synthetic
gggugugauggccacccagggcug

SEQ ID NO: 7904 - RNA, 19 nt, Artificial Sequence
  Synthetic
guuuuaaaucucauggcug

SEQ ID NO: 7905 - RNA, 20 nt, Artificial Sequence
  Synthetic
gguuuuaaaucucauggcug

SEQ ID NO: 7906 - RNA, 18 nt, Artificial Sequence
  Synthetic
gauuucaccagcuggcug

SEQ ID NO: 7907 - RNA, 20 nt, Artificial Sequence
  Synthetic
gugauuucaccagcuggcug

SEQ ID NO: 7908 - RNA, 24 nt, Artificial Sequence
  Synthetic
guuuuagagggauuacucuggcug

SEQ ID NO: 7909 - RNA, 22 nt, Artificial Sequence
  Synthetic
gaaucuaaauauuuucuggcug

SEQ ID NO: 7910 - RNA, 24 nt, Artificial Sequence
  Synthetic
gugaaucuaaauauuuucuggcug

SEQ ID NO: 7911 - RNA, 19 nt, Artificial Sequence
  Synthetic
guuuuaugaaauaaugcug

SEQ ID NO: 7912 - RNA, 18 nt, Artificial Sequence
  Synthetic
gcuaaaauuaucaugcug

SEQ ID NO: 7913 - RNA, 19 nt, Artificial Sequence
  Synthetic
gccaggaauuuggaugcug

SEQ ID NO: 7914 - RNA, 22 nt, Artificial Sequence
  Synthetic
gaagccaggaauuuggaugcug

SEQ ID NO: 7915 - RNA, 23 nt, Artificial Sequence
  Synthetic
ggaagccaggaauuuggaugcug

SEQ ID NO: 7916 - RNA, 18 nt, Artificial Sequence
  Synthetic
guagauugccugaugcug

SEQ ID NO: 7917 - RNA, 19 nt, Artificial Sequence
  Synthetic
gguagauugccugaugcug

SEQ ID NO: 7918 - RNA, 20 nt, Artificial Sequence
  Synthetic
ggguagauugccugaugcug

SEQ ID NO: 7919 - RNA, 21 nt, Artificial Sequence
  Synthetic
gggguagauugccugaugcug

SEQ ID NO: 7920 - RNA, 24 nt, Artificial Sequence
  Synthetic
guugggguagauugccugaugcug

SEQ ID NO: 7921 - RNA, 20 nt, Artificial Sequence
  Synthetic
guuugaagaggaauaugcug

SEQ ID NO: 7922 - RNA, 21 nt, Artificial Sequence
  Synthetic
gguuugaagaggaauaugcug

SEQ ID NO: 7923 - RNA, 22 nt, Artificial Sequence
  Synthetic
ggguuugaagaggaauaugcug

SEQ ID NO: 7924 - RNA, 20 nt, Artificial Sequence
  Synthetic
gaauaauaauuguuaugcug

SEQ ID NO: 7925 - RNA, 21 nt, Artificial Sequence
  Synthetic
ggaauaauaauuguuaugcug

SEQ ID NO: 7926 - RNA, 22 nt, Artificial Sequence
  Synthetic
gggaauaauaauuguuaugcug

SEQ ID NO: 7927 - RNA, 22 nt, Artificial Sequence
  Synthetic
gucucaauaauuauaagugcug

SEQ ID NO: 7928 - RNA, 20 nt, Artificial Sequence
  Synthetic
guaccuaccccaaggugcug

SEQ ID NO: 7929 - RNA, 24 nt, Artificial Sequence
  Synthetic
gauaguaccuaccccaaggugcug

SEQ ID NO: 7930 - RNA, 18 nt, Artificial Sequence
  Synthetic
gcacuaccagguuugcug

SEQ ID NO: 7931 - RNA, 21 nt, Artificial Sequence
  Synthetic
guagcacuaccagguuugcug

SEQ ID NO: 7932 - RNA, 22 nt, Artificial Sequence
  Synthetic
gguagcacuaccagguuugcug

SEQ ID NO: 7933 - RNA, 18 nt, Artificial Sequence
  Synthetic
guucucaacaaaaaucug

SEQ ID NO: 7934 - RNA, 20 nt, Artificial Sequence
  Synthetic
guguucucaacaaaaaucug

SEQ ID NO: 7935 - RNA, 21 nt, Artificial Sequence
  Synthetic
gguguucucaacaaaaaucug

SEQ ID NO: 7936 - RNA, 23 nt, Artificial Sequence
  Synthetic
gugguguucucaacaaaaaucug

SEQ ID NO: 7937 - RNA, 18 nt, Artificial Sequence
  Synthetic
ggcucccuugggaaucug

SEQ ID NO: 7938 - RNA, 19 nt, Artificial Sequence
  Synthetic
gggcucccuugggaaucug

SEQ ID NO: 7939 - RNA, 23 nt, Artificial Sequence
  Synthetic
gacugggcucccuugggaaucug

SEQ ID NO: 7940 - RNA, 18 nt, Artificial Sequence
  Synthetic
ggcugccacgguaaucug

SEQ ID NO: 7941 - RNA, 20 nt, Artificial Sequence
  Synthetic
gaggcugccacgguaaucug

SEQ ID NO: 7942 - RNA, 20 nt, Artificial Sequence
  Synthetic
gcaccauagccgguaaucug

SEQ ID NO: 7943 - RNA, 23 nt, Artificial Sequence
  Synthetic
gcagcaccauagccgguaaucug

SEQ ID NO: 7944 - RNA, 24 nt, Artificial Sequence
  Synthetic
ggcagcaccauagccgguaaucug

SEQ ID NO: 7945 - RNA, 18 nt, Artificial Sequence
  Synthetic
guacugaauguacaucug

SEQ ID NO: 7946 - RNA, 19 nt, Artificial Sequence
  Synthetic
gguacugaauguacaucug

SEQ ID NO: 7947 - RNA, 22 nt, Artificial Sequence
  Synthetic
gauaaacuuccucugucaucug

SEQ ID NO: 7948 - RNA, 21 nt, Artificial Sequence
  Synthetic
guuacuaggccugcagaucug

SEQ ID NO: 7949 - RNA, 18 nt, Artificial Sequence
  Synthetic
ggguccuggccauaucug

SEQ ID NO: 7950 - RNA, 20 nt, Artificial Sequence
  Synthetic
guggguccuggccauaucug

SEQ ID NO: 7951 - RNA, 21 nt, Artificial Sequence
  Synthetic
gguggguccuggccauaucug

SEQ ID NO: 7952 - RNA, 22 nt, Artificial Sequence
  Synthetic
ggguggguccuggccauaucug

SEQ ID NO: 7953 - RNA, 23 nt, Artificial Sequence
  Synthetic
gggguggguccuggccauaucug

SEQ ID NO: 7954 - RNA, 19 nt, Artificial Sequence
  Synthetic
gcuucuaaauauguaucug

SEQ ID NO: 7955 - RNA, 22 nt, Artificial Sequence
  Synthetic
guugcuucuaaauauguaucug

SEQ ID NO: 7956 - RNA, 18 nt, Artificial Sequence
  Synthetic
gguuuccaauuaacucug

SEQ ID NO: 7957 - RNA, 23 nt, Artificial Sequence
  Synthetic
gucaugguuuccaauuaacucug

SEQ ID NO: 7958 - RNA, 24 nt, Artificial Sequence
  Synthetic
ggucaugguuuccaauuaacucug

SEQ ID NO: 7959 - RNA, 18 nt, Artificial Sequence
  Synthetic
gaacacgaauucacucug

SEQ ID NO: 7960 - RNA, 21 nt, Artificial Sequence
  Synthetic
guagaacacgaauucacucug

SEQ ID NO: 7961 - RNA, 22 nt, Artificial Sequence
  Synthetic
gguagaacacgaauucacucug

SEQ ID NO: 7962 - RNA, 18 nt, Artificial Sequence
  Synthetic
gaacucuggcguacucug

SEQ ID NO: 7963 - RNA, 19 nt, Artificial Sequence
  Synthetic
ggaacucuggcguacucug

SEQ ID NO: 7964 - RNA, 22 nt, Artificial Sequence
  Synthetic
gccaauaauuuuaucaccucug

SEQ ID NO: 7965 - RNA, 20 nt, Artificial Sequence
  Synthetic
gcugagguuauaauccucug

SEQ ID NO: 7966 - RNA, 23 nt, Artificial Sequence
  Synthetic
gaaaaacuuccagugaagcucug

SEQ ID NO: 7967 - RNA, 22 nt, Artificial Sequence
  Synthetic
gauaaaaggucaaacugcucug

SEQ ID NO: 7968 - RNA, 23 nt, Artificial Sequence
  Synthetic
ggauaaaaggucaaacugcucug

SEQ ID NO: 7969 - RNA, 19 nt, Artificial Sequence
  Synthetic
gcuccauccaugaucucug

SEQ ID NO: 7970 - RNA, 22 nt, Artificial Sequence
  Synthetic
gcagcuccauccaugaucucug

SEQ ID NO: 7971 - RNA, 18 nt, Artificial Sequence
  Synthetic
guacccggcagcucucug

SEQ ID NO: 7972 - RNA, 19 nt, Artificial Sequence
  Synthetic
gguacccggcagcucucug

SEQ ID NO: 7973 - RNA, 22 nt, Artificial Sequence
  Synthetic
gcugguacccggcagcucucug

SEQ ID NO: 7974 - RNA, 20 nt, Artificial Sequence
  Synthetic
gaaagggaaagcucucucug

SEQ ID NO: 7975 - RNA, 23 nt, Artificial Sequence
  Synthetic
gaagaaagggaaagcucucucug

SEQ ID NO: 7976 - RNA, 20 nt, Artificial Sequence
  Synthetic
guuauugauacaggucucug

SEQ ID NO: 7977 - RNA, 19 nt, Artificial Sequence
  Synthetic
gugaaucuuccauucucug

SEQ ID NO: 7978 - RNA, 21 nt, Artificial Sequence
  Synthetic
gaauggagagagguaagucug

SEQ ID NO: 7979 - RNA, 19 nt, Artificial Sequence
  Synthetic
gaaucuaaaaaacagucug

SEQ ID NO: 7980 - RNA, 18 nt, Artificial Sequence
  Synthetic
gguucaaaggagagucug

SEQ ID NO: 7981 - RNA, 19 nt, Artificial Sequence
  Synthetic
gagaauagucaaaggucug

SEQ ID NO: 7982 - RNA, 20 nt, Artificial Sequence
  Synthetic
ggagaauagucaaaggucug

SEQ ID NO: 7983 - RNA, 23 nt, Artificial Sequence
  Synthetic
gauggagaauagucaaaggucug

SEQ ID NO: 7984 - RNA, 24 nt, Artificial Sequence
  Synthetic
ggauggagaauagucaaaggucug

SEQ ID NO: 7985 - RNA, 20 nt, Artificial Sequence
  Synthetic
gcaaguaaucggugggucug

SEQ ID NO: 7986 - RNA, 22 nt, Artificial Sequence
  Synthetic
gugcaaguaaucggugggucug

SEQ ID NO: 7987 - RNA, 19 nt, Artificial Sequence
  Synthetic
gauauucacagauggucug

SEQ ID NO: 7988 - RNA, 19 nt, Artificial Sequence
  Synthetic
gucagucuuauuaugucug

SEQ ID NO: 7989 - RNA, 21 nt, Artificial Sequence
  Synthetic
gagucagucuuauuaugucug

SEQ ID NO: 7990 - RNA, 20 nt, Artificial Sequence
  Synthetic
guaucagaaggaugugucug

SEQ ID NO: 7991 - RNA, 20 nt, Artificial Sequence
  Synthetic
gaaggucccaacucauucug

SEQ ID NO: 7992 - RNA, 21 nt, Artificial Sequence
  Synthetic
ggaaggucccaacucauucug

SEQ ID NO: 7993 - RNA, 21 nt, Artificial Sequence
  Synthetic
guuaauuuuguucauauucug

SEQ ID NO: 7994 - RNA, 23 nt, Artificial Sequence
  Synthetic
guguuaauuuuguucauauucug

SEQ ID NO: 7995 - RNA, 19 nt, Artificial Sequence
  Synthetic
gucccugagugagcuucug

SEQ ID NO: 7996 - RNA, 22 nt, Artificial Sequence
  Synthetic
gcugucccugagugagcuucug

SEQ ID NO: 7997 - RNA, 23 nt, Artificial Sequence
  Synthetic
guuauccugccuucuuucuucug

SEQ ID NO: 7998 - RNA, 20 nt, Artificial Sequence
  Synthetic
guuuuuaguuuaauguucug

SEQ ID NO: 7999 - RNA, 21 nt, Artificial Sequence
  Synthetic
gguuuuuaguuuaauguucug

SEQ ID NO: 8000 - RNA, 20 nt, Artificial Sequence
  Synthetic
gauaguguccacauuuucug

SEQ ID NO: 8001 - RNA, 22 nt, Artificial Sequence
  Synthetic
gagauaguguccacauuuucug

SEQ ID NO: 8002 - RNA, 20 nt, Artificial Sequence
  Synthetic
gaaacuugaccucuuuucug

SEQ ID NO: 8003 - RNA, 24 nt, Artificial Sequence
  Synthetic
guucucuucucuuuaauuuuucug

SEQ ID NO: 8004 - RNA, 18 nt, Artificial Sequence
  Synthetic
gcgaggaucugaaaagug

SEQ ID NO: 8005 - RNA, 20 nt, Artificial Sequence
  Synthetic
gugcgaggaucugaaaagug

SEQ ID NO: 8006 - RNA, 23 nt, Artificial Sequence
  Synthetic
gucucucgauagaagcuaaagug

SEQ ID NO: 8007 - RNA, 23 nt, Artificial Sequence
  Synthetic
gaaacacuuggaucaguaaagug

SEQ ID NO: 8008 - RNA, 19 nt, Artificial Sequence
  Synthetic
guuuuuaggggguaaagug

SEQ ID NO: 8009 - RNA, 20 nt, Artificial Sequence
  Synthetic
gguuuuuaggggguaaagug

SEQ ID NO: 8010 - RNA, 22 nt, Artificial Sequence
  Synthetic
gagguuuuuaggggguaaagug

SEQ ID NO: 8011 - RNA, 23 nt, Artificial Sequence
  Synthetic
gauaccuuugaaaaauccaagug

SEQ ID NO: 8012 - RNA, 19 nt, Artificial Sequence
  Synthetic
gugggauguauuucaagug

SEQ ID NO: 8013 - RNA, 20 nt, Artificial Sequence
  Synthetic
ggugggauguauuucaagug

SEQ ID NO: 8014 - RNA, 24 nt, Artificial Sequence
  Synthetic
gaaaggugggauguauuucaagug

SEQ ID NO: 8015 - RNA, 21 nt, Artificial Sequence
  Synthetic
ggggagugaaaaagagaagug

SEQ ID NO: 8016 - RNA, 21 nt, Artificial Sequence
  Synthetic
gacucagauaagaaggaagug

SEQ ID NO: 8017 - RNA, 23 nt, Artificial Sequence
  Synthetic
gagacucagauaagaaggaagug

SEQ ID NO: 8018 - RNA, 20 nt, Artificial Sequence
  Synthetic
gauaguuaaauuaggaagug

SEQ ID NO: 8019 - RNA, 23 nt, Artificial Sequence
  Synthetic
gaugauaguuaaauuaggaagug

SEQ ID NO: 8020 - RNA, 22 nt, Artificial Sequence
  Synthetic
gauauaaauacaaaaugaagug

SEQ ID NO: 8021 - RNA, 23 nt, Artificial Sequence
  Synthetic
ggauauaaauacaaaaugaagug

SEQ ID NO: 8022 - RNA, 19 nt, Artificial Sequence
  Synthetic
gcaauaacucugugaagug

SEQ ID NO: 8023 - RNA, 24 nt, Artificial Sequence
  Synthetic
guaccgcaauaacucugugaagug

SEQ ID NO: 8024 - RNA, 22 nt, Artificial Sequence
  Synthetic
gacuucuagcauaggaacagug

SEQ ID NO: 8025 - RNA, 24 nt, Artificial Sequence
  Synthetic
gugacuucuagcauaggaacagug

SEQ ID NO: 8026 - RNA, 19 nt, Artificial Sequence
  Synthetic
gaugugcaaauuuacagug

SEQ ID NO: 8027 - RNA, 18 nt, Artificial Sequence
  Synthetic
gcaccacuugcaccagug

SEQ ID NO: 8028 - RNA, 24 nt, Artificial Sequence
  Synthetic
gcuuuauauauauauacuccagug

SEQ ID NO: 8029 - RNA, 20 nt, Artificial Sequence
  Synthetic
guuugaauuguaaggcagug

SEQ ID NO: 8030 - RNA, 22 nt, Artificial Sequence
  Synthetic
gaguuugaauuguaaggcagug

SEQ ID NO: 8031 - RNA, 23 nt, Artificial Sequence
  Synthetic
ggaguuugaauuguaaggcagug

SEQ ID NO: 8032 - RNA, 22 nt, Artificial Sequence
  Synthetic
gcacuggaauuauccugcagug

SEQ ID NO: 8033 - RNA, 19 nt, Artificial Sequence
  Synthetic
guaaacaauuacaucagug

SEQ ID NO: 8034 - RNA, 23 nt, Artificial Sequence
  Synthetic
gccuaaauuuucuuccaagagug

SEQ ID NO: 8035 - RNA, 24 nt, Artificial Sequence
  Synthetic
ggccuaaauuuucuuccaagagug

SEQ ID NO: 8036 - RNA, 19 nt, Artificial Sequence
  Synthetic
gaaugggccuaagagagug

SEQ ID NO: 8037 - RNA, 20 nt, Artificial Sequence
  Synthetic
ggaaugggccuaagagagug

SEQ ID NO: 8038 - RNA, 18 nt, Artificial Sequence
  Synthetic
guacaaaaaugaugagug

SEQ ID NO: 8039 - RNA, 23 nt, Artificial Sequence
  Synthetic
gacuuguacaaaaaugaugagug

SEQ ID NO: 8040 - RNA, 22 nt, Artificial Sequence
  Synthetic
gauaagaaaaccguguugagug

SEQ ID NO: 8041 - RNA, 21 nt, Artificial Sequence
  Synthetic
gcuaauccacucaaaauagug

SEQ ID NO: 8042 - RNA, 24 nt, Artificial Sequence
  Synthetic
guuuuaaaggagcaaaucauagug

SEQ ID NO: 8043 - RNA, 18 nt, Artificial Sequence
  Synthetic
gaaucuuuaaugauagug

SEQ ID NO: 8044 - RNA, 22 nt, Artificial Sequence
  Synthetic
gacagaaucuuuaaugauagug

SEQ ID NO: 8045 - RNA, 22 nt, Artificial Sequence
  Synthetic
gaauccugauauggauauagug

SEQ ID NO: 8046 - RNA, 20 nt, Artificial Sequence
  Synthetic
gcacuaggaggucccuagug

SEQ ID NO: 8047 - RNA, 22 nt, Artificial Sequence
  Synthetic
gaaaauaaaugaccuccuagug

SEQ ID NO: 8048 - RNA, 24 nt, Artificial Sequence
  Synthetic
gcauaaaaugaggagauucuagug

SEQ ID NO: 8049 - RNA, 19 nt, Artificial Sequence
  Synthetic
gcagagugggaagguagug

SEQ ID NO: 8050 - RNA, 20 nt, Artificial Sequence
  Synthetic
ggcagagugggaagguagug

SEQ ID NO: 8051 - RNA, 21 nt, Artificial Sequence
  Synthetic
gggcagagugggaagguagug

SEQ ID NO: 8052 - RNA, 22 nt, Artificial Sequence
  Synthetic
ggggcagagugggaagguagug

SEQ ID NO: 8053 - RNA, 23 nt, Artificial Sequence
  Synthetic
gaccaaaaucacauuauuuagug

SEQ ID NO: 8054 - RNA, 19 nt, Artificial Sequence
  Synthetic
gccuggcuacuguuuagug

SEQ ID NO: 8055 - RNA, 23 nt, Artificial Sequence
  Synthetic
gcauuugaauuacuuacaacgug

SEQ ID NO: 8056 - RNA, 18 nt, Artificial Sequence
  Synthetic
guguacaggaaacacgug

SEQ ID NO: 8057 - RNA, 18 nt, Artificial Sequence
  Synthetic
gaugauaagaaaaccgug

SEQ ID NO: 8058 - RNA, 21 nt, Artificial Sequence
  Synthetic
gaugaugauaagaaaaccgug

SEQ ID NO: 8059 - RNA, 22 nt, Artificial Sequence
  Synthetic
ggaugaugauaagaaaaccgug

SEQ ID NO: 8060 - RNA, 18 nt, Artificial Sequence
  Synthetic
gacuugguggcuaccgug

SEQ ID NO: 8061 - RNA, 20 nt, Artificial Sequence
  Synthetic
gucacaaauuuggaagcgug

SEQ ID NO: 8062 - RNA, 19 nt, Artificial Sequence
  Synthetic
gauuagggaaguaagcgug

SEQ ID NO: 8063 - RNA, 20 nt, Artificial Sequence
  Synthetic
ggauuagggaaguaagcgug

SEQ ID NO: 8064 - RNA, 22 nt, Artificial Sequence
  Synthetic
guggauuagggaaguaagcgug

SEQ ID NO: 8065 - RNA, 18 nt, Artificial Sequence
  Synthetic
gaacucuugguaagcgug

SEQ ID NO: 8066 - RNA, 19 nt, Artificial Sequence
  Synthetic
ggaacucuugguaagcgug

SEQ ID NO: 8067 - RNA, 21 nt, Artificial Sequence
  Synthetic
gaggaacucuugguaagcgug

SEQ ID NO: 8068 - RNA, 23 nt, Artificial Sequence
  Synthetic
gagaggaacucuugguaagcgug

SEQ ID NO: 8069 - RNA, 18 nt, Artificial Sequence
  Synthetic
gaaauaucgauaaaggug

SEQ ID NO: 8070 - RNA, 18 nt, Artificial Sequence
  Synthetic
gucuauuuuguucaggug

SEQ ID NO: 8071 - RNA, 21 nt, Artificial Sequence
  Synthetic
guugucuauuuuguucaggug

SEQ ID NO: 8072 - RNA, 20 nt, Artificial Sequence
  Synthetic
guaacuaauuauaugaggug

SEQ ID NO: 8073 - RNA, 24 nt, Artificial Sequence
  Synthetic
guccuuuuugugaaggcugaggug

SEQ ID NO: 8074 - RNA, 19 nt, Artificial Sequence
  Synthetic
guguguagcuuuauaggug

SEQ ID NO: 8075 - RNA, 20 nt, Artificial Sequence
  Synthetic
gccaaauguuuuucuaggug

SEQ ID NO: 8076 - RNA, 18 nt, Artificial Sequence
  Synthetic
guuagacacuguuaggug

SEQ ID NO: 8077 - RNA, 20 nt, Artificial Sequence
  Synthetic
guguuagacacuguuaggug

SEQ ID NO: 8078 - RNA, 23 nt, Artificial Sequence
  Synthetic
gcucaugauuguuucaaggggug

SEQ ID NO: 8079 - RNA, 23 nt, Artificial Sequence
  Synthetic
gauuuccuauaaauuaaauggug

SEQ ID NO: 8080 - RNA, 21 nt, Artificial Sequence
  Synthetic
gacaacccuuggggaauggug

SEQ ID NO: 8081 - RNA, 22 nt, Artificial Sequence
  Synthetic
gcagccaagaagucuuauggug

SEQ ID NO: 8082 - RNA, 23 nt, Artificial Sequence
  Synthetic
ggcagccaagaagucuuauggug

SEQ ID NO: 8083 - RNA, 20 nt, Artificial Sequence
  Synthetic
gucuaguaaagugucuggug

SEQ ID NO: 8084 - RNA, 22 nt, Artificial Sequence
  Synthetic
gagucuaguaaagugucuggug

SEQ ID NO: 8085 - RNA, 18 nt, Artificial Sequence
  Synthetic
ggagaggugaauguggug

SEQ ID NO: 8086 - RNA, 19 nt, Artificial Sequence
  Synthetic
gggagaggugaauguggug

SEQ ID NO: 8087 - RNA, 23 nt, Artificial Sequence
  Synthetic
gaaugggagaggugaauguggug

SEQ ID NO: 8088 - RNA, 18 nt, Artificial Sequence
  Synthetic
ggcauacacuauguggug

SEQ ID NO: 8089 - RNA, 19 nt, Artificial Sequence
  Synthetic
gggcauacacuauguggug

SEQ ID NO: 8090 - RNA, 23 nt, Artificial Sequence
  Synthetic
gaaagggcauacacuauguggug

SEQ ID NO: 8091 - RNA, 24 nt, Artificial Sequence
  Synthetic
ggaaagggcauacacuauguggug

SEQ ID NO: 8092 - RNA, 24 nt, Artificial Sequence
  Synthetic
gucuauacauaauuugcuguggug

SEQ ID NO: 8093 - RNA, 19 nt, Artificial Sequence
  Synthetic
gaauucauguuaguuggug

SEQ ID NO: 8094 - RNA, 21 nt, Artificial Sequence
  Synthetic
gugaauucauguuaguuggug

SEQ ID NO: 8095 - RNA, 22 nt, Artificial Sequence
  Synthetic
ggugaauucauguuaguuggug

SEQ ID NO: 8096 - RNA, 22 nt, Artificial Sequence
  Synthetic
gagaaauaagggaaaaaaugug

SEQ ID NO: 8097 - RNA, 19 nt, Artificial Sequence
  Synthetic
gucuguugacugaaaugug

SEQ ID NO: 8098 - RNA, 23 nt, Artificial Sequence
  Synthetic
gucagucuguugacugaaaugug

SEQ ID NO: 8099 - RNA, 20 nt, Artificial Sequence
  Synthetic
gauugcauggauuuaaugug

SEQ ID NO: 8100 - RNA, 18 nt, Artificial Sequence
  Synthetic
guucuugagcugcaugug

SEQ ID NO: 8101 - RNA, 18 nt, Artificial Sequence
  Synthetic
gaaauaacacuucaugug

SEQ ID NO: 8102 - RNA, 18 nt, Artificial Sequence
  Synthetic
guagcuggaugggaugug

SEQ ID NO: 8103 - RNA, 19 nt, Artificial Sequence
  Synthetic
gguagcuggaugggaugug

SEQ ID NO: 8104 - RNA, 23 nt, Artificial Sequence
  Synthetic
gccugguagcuggaugggaugug

SEQ ID NO: 8105 - RNA, 18 nt, Artificial Sequence
  Synthetic
gauauggauuuugaugug

SEQ ID NO: 8106 - RNA, 23 nt, Artificial Sequence
  Synthetic
guuuaucuuauagugaauaugug

SEQ ID NO: 8107 - RNA, 18 nt, Artificial Sequence
  Synthetic
gaauauaguugauaugug

SEQ ID NO: 8108 - RNA, 19 nt, Artificial Sequence
  Synthetic
ggaauauaguugauaugug

SEQ ID NO: 8109 - RNA, 21 nt, Artificial Sequence
  Synthetic
gaacuuagcugcaauuaugug

SEQ ID NO: 8110 - RNA, 22 nt, Artificial Sequence
  Synthetic
ggaacuuagcugcaauuaugug

SEQ ID NO: 8111 - RNA, 24 nt, Artificial Sequence
  Synthetic
gaggaacuuagcugcaauuaugug

SEQ ID NO: 8112 - RNA, 18 nt, Artificial Sequence
  Synthetic
gaaggggcucacacugug

SEQ ID NO: 8113 - RNA, 23 nt, Artificial Sequence
  Synthetic
guucaagcuauagaucaccugug

SEQ ID NO: 8114 - RNA, 18 nt, Artificial Sequence
  Synthetic
ggugucugauugccugug

SEQ ID NO: 8115 - RNA, 21 nt, Artificial Sequence
  Synthetic
gaaaugaacugugcagcugug

SEQ ID NO: 8116 - RNA, 23 nt, Artificial Sequence
  Synthetic
guuuucuuuguucgguggcugug

SEQ ID NO: 8117 - RNA, 19 nt, Artificial Sequence
  Synthetic
gcugacaggauuugcugug

SEQ ID NO: 8118 - RNA, 21 nt, Artificial Sequence
  Synthetic
gacuucuuucgcugaagugug

SEQ ID NO: 8119 - RNA, 23 nt, Artificial Sequence
  Synthetic
gagacuucuuucgcugaagugug

SEQ ID NO: 8120 - RNA, 20 nt, Artificial Sequence
  Synthetic
gaagcucuugugagggugug

SEQ ID NO: 8121 - RNA, 23 nt, Artificial Sequence
  Synthetic
gacaaugagucuuucaaugugug

SEQ ID NO: 8122 - RNA, 24 nt, Artificial Sequence
  Synthetic
gauaggaaaaaaaauguaugugug

SEQ ID NO: 8123 - RNA, 18 nt, Artificial Sequence
  Synthetic
gguaaugcagacugugug

SEQ ID NO: 8124 - RNA, 19 nt, Artificial Sequence
  Synthetic
gaaguucucaaccugugug

SEQ ID NO: 8125 - RNA, 18 nt, Artificial Sequence
  Synthetic
gggaaaacauucugugug

SEQ ID NO: 8126 - RNA, 22 nt, Artificial Sequence
  Synthetic
gaaagggaaaacauucugugug

SEQ ID NO: 8127 - RNA, 24 nt, Artificial Sequence
  Synthetic
gagaaagggaaaacauucugugug

SEQ ID NO: 8128 - RNA, 22 nt, Artificial Sequence
  Synthetic
gaaucuuuucggcucuugugug

SEQ ID NO: 8129 - RNA, 21 nt, Artificial Sequence
  Synthetic
gauuaaucuggaaagauugug

SEQ ID NO: 8130 - RNA, 22 nt, Artificial Sequence
  Synthetic
ggauuaaucuggaaagauugug

SEQ ID NO: 8131 - RNA, 24 nt, Artificial Sequence
  Synthetic
gaggauuaaucuggaaagauugug

SEQ ID NO: 8132 - RNA, 19 nt, Artificial Sequence
  Synthetic
guauagcugcuauauugug

SEQ ID NO: 8133 - RNA, 20 nt, Artificial Sequence
  Synthetic
gguauagcugcuauauugug

SEQ ID NO: 8134 - RNA, 18 nt, Artificial Sequence
  Synthetic
gauuuuguuaguauugug

SEQ ID NO: 8135 - RNA, 21 nt, Artificial Sequence
  Synthetic
gcagauuuuguuaguauugug

SEQ ID NO: 8136 - RNA, 21 nt, Artificial Sequence
  Synthetic
gagccaagaagucuuauugug

SEQ ID NO: 8137 - RNA, 22 nt, Artificial Sequence
  Synthetic
gacacaaaaauuuaaacuugug

SEQ ID NO: 8138 - RNA, 23 nt, Artificial Sequence
  Synthetic
ggacacaaaaauuuaaacuugug

SEQ ID NO: 8139 - RNA, 21 nt, Artificial Sequence
  Synthetic
gaaaguccacacuuccuugug

SEQ ID NO: 8140 - RNA, 23 nt, Artificial Sequence
  Synthetic
gagaaaguccacacuuccuugug

SEQ ID NO: 8141 - RNA, 19 nt, Artificial Sequence
  Synthetic
guacuacuggccucuugug

SEQ ID NO: 8142 - RNA, 22 nt, Artificial Sequence
  Synthetic
gauguacuacuggccucuugug

SEQ ID NO: 8143 - RNA, 23 nt, Artificial Sequence
  Synthetic
ggauguacuacuggccucuugug

SEQ ID NO: 8144 - RNA, 19 nt, Artificial Sequence
  Synthetic
gcauuuauuacguguugug

SEQ ID NO: 8145 - RNA, 22 nt, Artificial Sequence
  Synthetic
gcagcauuuauuacguguugug

SEQ ID NO: 8146 - RNA, 23 nt, Artificial Sequence
  Synthetic
ggcagcauuuauuacguguugug

SEQ ID NO: 8147 - RNA, 18 nt, Artificial Sequence
  Synthetic
gggguaguaagcuuugug

SEQ ID NO: 8148 - RNA, 21 nt, Artificial Sequence
  Synthetic
gaagggguaguaagcuuugug

SEQ ID NO: 8149 - RNA, 22 nt, Artificial Sequence
  Synthetic
ggaagggguaguaagcuuugug

SEQ ID NO: 8150 - RNA, 22 nt, Artificial Sequence
  Synthetic
guaaauuuuacuccucuuugug

SEQ ID NO: 8151 - RNA, 19 nt, Artificial Sequence
  Synthetic
gauuauaaaaaaguuugug

SEQ ID NO: 8152 - RNA, 21 nt, Artificial Sequence
  Synthetic
gagauuauaaaaaaguuugug

SEQ ID NO: 8153 - RNA, 23 nt, Artificial Sequence
  Synthetic
gaacuccaacuggaauguuugug

SEQ ID NO: 8154 - RNA, 24 nt, Artificial Sequence
  Synthetic
gauuuucugaaagcuuuguuugug

SEQ ID NO: 8155 - RNA, 18 nt, Artificial Sequence
  Synthetic
gguugccuucauuuugug

SEQ ID NO: 8156 - RNA, 22 nt, Artificial Sequence
  Synthetic
guacuuaaugcacauuuuugug

SEQ ID NO: 8157 - RNA, 23 nt, Artificial Sequence
  Synthetic
gguacuuaaugcacauuuuugug

SEQ ID NO: 8158 - RNA, 22 nt, Artificial Sequence
  Synthetic
gaaauuaauacugaaaaaauug

SEQ ID NO: 8159 - RNA, 23 nt, Artificial Sequence
  Synthetic
gauccagucuuaguuauaaauug

SEQ ID NO: 8160 - RNA, 21 nt, Artificial Sequence
  Synthetic
gcuuaagugaaucuuaaauug

SEQ ID NO: 8161 - RNA, 19 nt, Artificial Sequence
  Synthetic
gcugaagccuuuccaauug

SEQ ID NO: 8162 - RNA, 22 nt, Artificial Sequence
  Synthetic
gaugcugaagccuuuccaauug

SEQ ID NO: 8163 - RNA, 19 nt, Artificial Sequence
  Synthetic
gccugauuuucaugaauug

SEQ ID NO: 8164 - RNA, 22 nt, Artificial Sequence
  Synthetic
gaagccugauuuucaugaauug

SEQ ID NO: 8165 - RNA, 20 nt, Artificial Sequence
  Synthetic
gaaugcuucauuuguaauug

SEQ ID NO: 8166 - RNA, 24 nt, Artificial Sequence
  Synthetic
gaaugaaugcuucauuuguaauug

SEQ ID NO: 8167 - RNA, 20 nt, Artificial Sequence
  Synthetic
gauagaaaaacuguuaauug

SEQ ID NO: 8168 - RNA, 23 nt, Artificial Sequence
  Synthetic
guuuuauuauuuagauuuaauug

SEQ ID NO: 8169 - RNA, 18 nt, Artificial Sequence
  Synthetic
gcuugaucagaaacauug

SEQ ID NO: 8170 - RNA, 23 nt, Artificial Sequence
  Synthetic
gaccugcuugaucagaaacauug

SEQ ID NO: 8171 - RNA, 18 nt, Artificial Sequence
  Synthetic
gacaguagggaaacauug

SEQ ID NO: 8172 - RNA, 21 nt, Artificial Sequence
  Synthetic
gaagacaguagggaaacauug

SEQ ID NO: 8173 - RNA, 20 nt, Artificial Sequence
  Synthetic
gucuaucacuaggaacauug

SEQ ID NO: 8174 - RNA, 22 nt, Artificial Sequence
  Synthetic
gaaaagagcugaacccacauug

SEQ ID NO: 8175 - RNA, 20 nt, Artificial Sequence
  Synthetic
gcuggucucccgucacauug

SEQ ID NO: 8176 - RNA, 24 nt, Artificial Sequence
  Synthetic
guuucaauccauauauauacauug

SEQ ID NO: 8177 - RNA, 18 nt, Artificial Sequence
  Synthetic
gaagcugguauuacauug

SEQ ID NO: 8178 - RNA, 20 nt, Artificial Sequence
  Synthetic
gagaagcugguauuacauug

SEQ ID NO: 8179 - RNA, 23 nt, Artificial Sequence
  Synthetic
gaagagaagcugguauuacauug

SEQ ID NO: 8180 - RNA, 24 nt, Artificial Sequence
  Synthetic
ggaagagaagcugguauuacauug

SEQ ID NO: 8181 - RNA, 18 nt, Artificial Sequence
  Synthetic
guaaguacagaaccauug

SEQ ID NO: 8182 - RNA, 20 nt, Artificial Sequence
  Synthetic
guguaaguacagaaccauug

SEQ ID NO: 8183 - RNA, 21 nt, Artificial Sequence
  Synthetic
gguguaaguacagaaccauug

SEQ ID NO: 8184 - RNA, 22 nt, Artificial Sequence
  Synthetic
ggguguaaguacagaaccauug

SEQ ID NO: 8185 - RNA, 18 nt, Artificial Sequence
  Synthetic
gaggucgguacaccauug

SEQ ID NO: 8186 - RNA, 19 nt, Artificial Sequence
  Synthetic
guugaucgcucuaccauug

SEQ ID NO: 8187 - RNA, 22 nt, Artificial Sequence
  Synthetic
gcuguugaucgcucuaccauug

SEQ ID NO: 8188 - RNA, 20 nt, Artificial Sequence
  Synthetic
gcagaaauuaagucccauug

SEQ ID NO: 8189 - RNA, 21 nt, Artificial Sequence
  Synthetic
ggcagaaauuaagucccauug

SEQ ID NO: 8190 - RNA, 18 nt, Artificial Sequence
  Synthetic
guugcaaagcaugcauug

SEQ ID NO: 8191 - RNA, 21 nt, Artificial Sequence
  Synthetic
gauuucacagauuaugcauug

SEQ ID NO: 8192 - RNA, 20 nt, Artificial Sequence
  Synthetic
gaagcuagaacaacucauug

SEQ ID NO: 8193 - RNA, 21 nt, Artificial Sequence
  Synthetic
ggaagcuagaacaacucauug

SEQ ID NO: 8194 - RNA, 23 nt, Artificial Sequence
  Synthetic
gaccacgcaagauaauuucauug

SEQ ID NO: 8195 - RNA, 20 nt, Artificial Sequence
  Synthetic
gcaugaauagagaaagauug

SEQ ID NO: 8196 - RNA, 19 nt, Artificial Sequence
  Synthetic
guguuaaguugaacgauug

SEQ ID NO: 8197 - RNA, 23 nt, Artificial Sequence
  Synthetic
guuaguguuaaguugaacgauug

SEQ ID NO: 8198 - RNA, 24 nt, Artificial Sequence
  Synthetic
gguuaguguuaaguugaacgauug

SEQ ID NO: 8199 - RNA, 21 nt, Artificial Sequence
  Synthetic
guacacccagaaaugggauug

SEQ ID NO: 8200 - RNA, 19 nt, Artificial Sequence
  Synthetic
gugguucuugacaugauug

SEQ ID NO: 8201 - RNA, 19 nt, Artificial Sequence
  Synthetic
gaucaaagauuucugauug

SEQ ID NO: 8202 - RNA, 23 nt, Artificial Sequence
  Synthetic
guaauuaugguggcaagugauug

SEQ ID NO: 8203 - RNA, 20 nt, Artificial Sequence
  Synthetic
gaacuauuuaugggugauug

SEQ ID NO: 8204 - RNA, 21 nt, Artificial Sequence
  Synthetic
ggaacuauuuaugggugauug

SEQ ID NO: 8205 - RNA, 22 nt, Artificial Sequence
  Synthetic
gcaucaaaaauaugauugauug

SEQ ID NO: 8206 - RNA, 22 nt, Artificial Sequence
  Synthetic
gacacuguaucucucuugauug

SEQ ID NO: 8207 - RNA, 24 nt, Artificial Sequence
  Synthetic
gagacacuguaucucucuugauug

SEQ ID NO: 8208 - RNA, 20 nt, Artificial Sequence
  Synthetic
gucuuucaugugaaauauug

SEQ ID NO: 8209 - RNA, 22 nt, Artificial Sequence
  Synthetic
gagucuuucaugugaaauauug

SEQ ID NO: 8210 - RNA, 22 nt, Artificial Sequence
  Synthetic
guuuauuucacaaacaauauug

SEQ ID NO: 8211 - RNA, 23 nt, Artificial Sequence
  Synthetic
gcacuacgcagcccaacauauug

SEQ ID NO: 8212 - RNA, 24 nt, Artificial Sequence
  Synthetic
ggcacuacgcagcccaacauauug

SEQ ID NO: 8213 - RNA, 24 nt, Artificial Sequence
  Synthetic
guccauccauauuguuucauauug

SEQ ID NO: 8214 - RNA, 21 nt, Artificial Sequence
  Synthetic
guagaagccauaaaucuauug

SEQ ID NO: 8215 - RNA, 22 nt, Artificial Sequence
  Synthetic
guucuuuaauaaaaauguauug

SEQ ID NO: 8216 - RNA, 20 nt, Artificial Sequence
  Synthetic
gaauaaagucaaauguauug

SEQ ID NO: 8217 - RNA, 20 nt, Artificial Sequence
  Synthetic
gaaugagaugggaguuauug

SEQ ID NO: 8218 - RNA, 22 nt, Artificial Sequence
  Synthetic
guauaaauaaauguguuuauug

SEQ ID NO: 8219 - RNA, 19 nt, Artificial Sequence
  Synthetic
gaaagcaucaguuuuauug

SEQ ID NO: 8220 - RNA, 21 nt, Artificial Sequence
  Synthetic
gaaauuugaagaugagacuug

SEQ ID NO: 8221 - RNA, 22 nt, Artificial Sequence
  Synthetic
ggaaauuugaagaugagacuug

SEQ ID NO: 8222 - RNA, 18 nt, Artificial Sequence
  Synthetic
gacaacuguuuagacuug

SEQ ID NO: 8223 - RNA, 22 nt, Artificial Sequence
  Synthetic
gcuugacaacuguuuagacuug

SEQ ID NO: 8224 - RNA, 23 nt, Artificial Sequence
  Synthetic
ggcuugacaacuguuuagacuug

SEQ ID NO: 8225 - RNA, 24 nt, Artificial Sequence
  Synthetic
gggcuugacaacuguuuagacuug

SEQ ID NO: 8226 - RNA, 19 nt, Artificial Sequence
  Synthetic
gaguuaaaauacugacuug

SEQ ID NO: 8227 - RNA, 22 nt, Artificial Sequence
  Synthetic
gcagaguuaaaauacugacuug

SEQ ID NO: 8228 - RNA, 20 nt, Artificial Sequence
  Synthetic
gccauuaucucauugacuug

SEQ ID NO: 8229 - RNA, 18 nt, Artificial Sequence
  Synthetic
gauuucagguuugacuug

SEQ ID NO: 8230 - RNA, 23 nt, Artificial Sequence
  Synthetic
gccaugauuucagguuugacuug

SEQ ID NO: 8231 - RNA, 19 nt, Artificial Sequence
  Synthetic
gaauaauuaugcauacuug

SEQ ID NO: 8232 - RNA, 20 nt, Artificial Sequence
  Synthetic
ggaauaauuaugcauacuug

SEQ ID NO: 8233 - RNA, 22 nt, Artificial Sequence
  Synthetic
guggaauaauuaugcauacuug

SEQ ID NO: 8234 - RNA, 21 nt, Artificial Sequence
  Synthetic
gacacugcuggcauauacuug

SEQ ID NO: 8235 - RNA, 22 nt, Artificial Sequence
  Synthetic
ggacacugcuggcauauacuug

SEQ ID NO: 8236 - RNA, 23 nt, Artificial Sequence
  Synthetic
gaucccccuacguugucuacuug

SEQ ID NO: 8237 - RNA, 24 nt, Artificial Sequence
  Synthetic
ggaucccccuacguugucuacuug

SEQ ID NO: 8238 - RNA, 23 nt, Artificial Sequence
  Synthetic
guuaucuuaucagacaacccuug

SEQ ID NO: 8239 - RNA, 24 nt, Artificial Sequence
  Synthetic
gguuaucuuaucagacaacccuug

SEQ ID NO: 8240 - RNA, 18 nt, Artificial Sequence
  Synthetic
ggauacugaugccccuug

SEQ ID NO: 8241 - RNA, 18 nt, Artificial Sequence
  Synthetic
gugagagagauucccuug

SEQ ID NO: 8242 - RNA, 20 nt, Artificial Sequence
  Synthetic
gugugagagagauucccuug

SEQ ID NO: 8243 - RNA, 24 nt, Artificial Sequence
  Synthetic
gacugugugagagagauucccuug

SEQ ID NO: 8244 - RNA, 18 nt, Artificial Sequence
  Synthetic
gccagugcaacauccuug

SEQ ID NO: 8245 - RNA, 21 nt, Artificial Sequence
  Synthetic
gcugccagugcaacauccuug

SEQ ID NO: 8246 - RNA, 20 nt, Artificial Sequence
  Synthetic
guucacauaccucauccuug

SEQ ID NO: 8247 - RNA, 20 nt, Artificial Sequence
  Synthetic
guaguaccagaaucuccuug

SEQ ID NO: 8248 - RNA, 20 nt, Artificial Sequence
  Synthetic
gcaaacucaguaaaagcuug

SEQ ID NO: 8249 - RNA, 22 nt, Artificial Sequence
  Synthetic
gugcaaacucaguaaaagcuug

SEQ ID NO: 8250 - RNA, 21 nt, Artificial Sequence
  Synthetic
gacuaauccucucacagcuug

SEQ ID NO: 8251 - RNA, 23 nt, Artificial Sequence
  Synthetic
gugacuaauccucucacagcuug

SEQ ID NO: 8252 - RNA, 19 nt, Artificial Sequence
  Synthetic
gcugccugcauacagcuug

SEQ ID NO: 8253 - RNA, 19 nt, Artificial Sequence
  Synthetic
gucuggaaaagccagcuug

SEQ ID NO: 8254 - RNA, 23 nt, Artificial Sequence
  Synthetic
gaacacuuauaucaaagagcuug

SEQ ID NO: 8255 - RNA, 24 nt, Artificial Sequence
  Synthetic
gacccuuauuacagugcaugcuug

SEQ ID NO: 8256 - RNA, 19 nt, Artificial Sequence
  Synthetic
gcaucuguucucuugcuug

SEQ ID NO: 8257 - RNA, 22 nt, Artificial Sequence
  Synthetic
guugcaucuguucucuugcuug

SEQ ID NO: 8258 - RNA, 24 nt, Artificial Sequence
  Synthetic
guguugcaucuguucucuugcuug

SEQ ID NO: 8259 - RNA, 21 nt, Artificial Sequence
  Synthetic
gccacguuauaaaagaucuug

SEQ ID NO: 8260 - RNA, 22 nt, Artificial Sequence
  Synthetic
ggccacguuauaaaagaucuug

SEQ ID NO: 8261 - RNA, 19 nt, Artificial Sequence
  Synthetic
gcaggcacacagccucuug

SEQ ID NO: 8262 - RNA, 23 nt, Artificial Sequence
  Synthetic
gaaugcaggcacacagccucuug

SEQ ID NO: 8263 - RNA, 23 nt, Artificial Sequence
  Synthetic
gaaacagaaaauccguagucuug

SEQ ID NO: 8264 - RNA, 22 nt, Artificial Sequence
  Synthetic
gucucuuguaugaccugucuug

SEQ ID NO: 8265 - RNA, 23 nt, Artificial Sequence
  Synthetic
ggucucuuguaugaccugucuug

SEQ ID NO: 8266 - RNA, 22 nt, Artificial Sequence
  Synthetic
gaaaaauaaauauuucuucuug

SEQ ID NO: 8267 - RNA, 21 nt, Artificial Sequence
  Synthetic
gcaaccucugacauguucuug

SEQ ID NO: 8268 - RNA, 22 nt, Artificial Sequence
  Synthetic
ggcaaccucugacauguucuug

SEQ ID NO: 8269 - RNA, 19 nt, Artificial Sequence
  Synthetic
gaacauguagaauaaguug

SEQ ID NO: 8270 - RNA, 24 nt, Artificial Sequence
  Synthetic
gucaagaacauguagaauaaguug

SEQ ID NO: 8271 - RNA, 24 nt, Artificial Sequence
  Synthetic
gcacauucagauuaggguaaguug

SEQ ID NO: 8272 - RNA, 23 nt, Artificial Sequence
  Synthetic
guauuuauuucacaauuaaguug

SEQ ID NO: 8273 - RNA, 18 nt, Artificial Sequence
  Synthetic
gccuauaaaccacaguug

SEQ ID NO: 8274 - RNA, 24 nt, Artificial Sequence
  Synthetic
guuuuagccuauaaaccacaguug

SEQ ID NO: 8275 - RNA, 19 nt, Artificial Sequence
  Synthetic
gcugccgaaaucgcaguug

SEQ ID NO: 8276 - RNA, 22 nt, Artificial Sequence
  Synthetic
gaagcugccgaaaucgcaguug

SEQ ID NO: 8277 - RNA, 21 nt, Artificial Sequence
  Synthetic
guucaaagcacuuaagaguug

SEQ ID NO: 8278 - RNA, 22 nt, Artificial Sequence
  Synthetic
gaaacauuugcccagggaguug

SEQ ID NO: 8279 - RNA, 22 nt, Artificial Sequence
  Synthetic
gucuucacucaaucaugaguug

SEQ ID NO: 8280 - RNA, 24 nt, Artificial Sequence
  Synthetic
gugucuucacucaaucaugaguug

SEQ ID NO: 8281 - RNA, 21 nt, Artificial Sequence
  Synthetic
gaacaagucaguaaauaguug

SEQ ID NO: 8282 - RNA, 20 nt, Artificial Sequence
  Synthetic
guccuuuagcuuaauaguug

SEQ ID NO: 8283 - RNA, 21 nt, Artificial Sequence
  Synthetic
gguccuuuagcuuaauaguug

SEQ ID NO: 8284 - RNA, 21 nt, Artificial Sequence
  Synthetic
gaaaugcaguuuugauaguug

SEQ ID NO: 8285 - RNA, 22 nt, Artificial Sequence
  Synthetic
ggaaaugcaguuuugauaguug

SEQ ID NO: 8286 - RNA, 24 nt, Artificial Sequence
  Synthetic
gaggaaaugcaguuuugauaguug

SEQ ID NO: 8287 - RNA, 19 nt, Artificial Sequence
  Synthetic
guauaagcuccccuaguug

SEQ ID NO: 8288 - RNA, 24 nt, Artificial Sequence
  Synthetic
gucuuguauaagcuccccuaguug

SEQ ID NO: 8289 - RNA, 20 nt, Artificial Sequence
  Synthetic
gcccuguucuuccuuaguug

SEQ ID NO: 8290 - RNA, 22 nt, Artificial Sequence
  Synthetic
gagcccuguucuuccuuaguug

SEQ ID NO: 8291 - RNA, 23 nt, Artificial Sequence
  Synthetic
ggagcccuguucuuccuuaguug

SEQ ID NO: 8292 - RNA, 19 nt, Artificial Sequence
  Synthetic
gaugauaugagaaggguug

SEQ ID NO: 8293 - RNA, 22 nt, Artificial Sequence
  Synthetic
gcugaugauaugagaaggguug

SEQ ID NO: 8294 - RNA, 18 nt, Artificial Sequence
  Synthetic
gauuuauuuuauugguug

SEQ ID NO: 8295 - RNA, 22 nt, Artificial Sequence
  Synthetic
gucugauuuauuuuauugguug

SEQ ID NO: 8296 - RNA, 23 nt, Artificial Sequence
  Synthetic
ggucugauuuauuuuauugguug

SEQ ID NO: 8297 - RNA, 21 nt, Artificial Sequence
  Synthetic
gauucaugcauugcuugguug

SEQ ID NO: 8298 - RNA, 22 nt, Artificial Sequence
  Synthetic
ggauucaugcauugcuugguug

SEQ ID NO: 8299 - RNA, 19 nt, Artificial Sequence
  Synthetic
guuucucauucuccuguug

SEQ ID NO: 8300 - RNA, 20 nt, Artificial Sequence
  Synthetic
gguuucucauucuccuguug

SEQ ID NO: 8301 - RNA, 23 nt, Artificial Sequence
  Synthetic
guugguuucucauucuccuguug

SEQ ID NO: 8302 - RNA, 20 nt, Artificial Sequence
  Synthetic
gcucccuaaucgcucuguug

SEQ ID NO: 8303 - RNA, 18 nt, Artificial Sequence
  Synthetic
gacugcaaggaaguguug

SEQ ID NO: 8304 - RNA, 19 nt, Artificial Sequence
  Synthetic
ggacugcaaggaaguguug

SEQ ID NO: 8305 - RNA, 21 nt, Artificial Sequence
  Synthetic
guuuccacacucuaaguguug

SEQ ID NO: 8306 - RNA, 24 nt, Artificial Sequence
  Synthetic
guuguuuccacacucuaaguguug

SEQ ID NO: 8307 - RNA, 22 nt, Artificial Sequence
  Synthetic
gauuuuacucugcaacguguug

SEQ ID NO: 8308 - RNA, 18 nt, Artificial Sequence
  Synthetic
gaauuuuuucauguguug

SEQ ID NO: 8309 - RNA, 24 nt, Artificial Sequence
  Synthetic
gaauuugaauuuuuucauguguug

SEQ ID NO: 8310 - RNA, 23 nt, Artificial Sequence
  Synthetic
guuucacaagaaagaccuuguug

SEQ ID NO: 8311 - RNA, 24 nt, Artificial Sequence
  Synthetic
gguuucacaagaaagaccuuguug

SEQ ID NO: 8312 - RNA, 21 nt, Artificial Sequence
  Synthetic
gaaaacaacgucccuuuguug

SEQ ID NO: 8313 - RNA, 19 nt, Artificial Sequence
  Synthetic
gugugcauaagguuuguug

SEQ ID NO: 8314 - RNA, 22 nt, Artificial Sequence
  Synthetic
guugugugcauaagguuuguug

SEQ ID NO: 8315 - RNA, 24 nt, Artificial Sequence
  Synthetic
gaguugugugcauaagguuuguug

SEQ ID NO: 8316 - RNA, 19 nt, Artificial Sequence
  Synthetic
gcauauucagauuuuguug

SEQ ID NO: 8317 - RNA, 20 nt, Artificial Sequence
  Synthetic
ggcauauucagauuuuguug

SEQ ID NO: 8318 - RNA, 23 nt, Artificial Sequence
  Synthetic
gaaggcauauucagauuuuguug

SEQ ID NO: 8319 - RNA, 24 nt, Artificial Sequence
  Synthetic
gaacucuauugauguuuuuuguug

SEQ ID NO: 8320 - RNA, 21 nt, Artificial Sequence
  Synthetic
gagaagggcaaagaaaauuug

SEQ ID NO: 8321 - RNA, 21 nt, Artificial Sequence
  Synthetic
guccucauguugcuaaauuug

SEQ ID NO: 8322 - RNA, 22 nt, Artificial Sequence
  Synthetic
gguccucauguugcuaaauuug

SEQ ID NO: 8323 - RNA, 19 nt, Artificial Sequence
  Synthetic
gaaguuuuaauacaauuug

SEQ ID NO: 8324 - RNA, 20 nt, Artificial Sequence
  Synthetic
ggaaguuuuaauacaauuug

SEQ ID NO: 8325 - RNA, 21 nt, Artificial Sequence
  Synthetic
gggaaguuuuaauacaauuug

SEQ ID NO: 8326 - RNA, 23 nt, Artificial Sequence
  Synthetic
gugggaaguuuuaauacaauuug

SEQ ID NO: 8327 - RNA, 19 nt, Artificial Sequence
  Synthetic
gaagguuuuuaagaauuug

SEQ ID NO: 8328 - RNA, 22 nt, Artificial Sequence
  Synthetic
gcagaagguuuuuaagaauuug

SEQ ID NO: 8329 - RNA, 19 nt, Artificial Sequence
  Synthetic
gaagacuuuggcuaauuug

SEQ ID NO: 8330 - RNA, 23 nt, Artificial Sequence
  Synthetic
gaaugaagacuuuggcuaauuug

SEQ ID NO: 8331 - RNA, 22 nt, Artificial Sequence
  Synthetic
gauacugcauuuuaaacauuug

SEQ ID NO: 8332 - RNA, 21 nt, Artificial Sequence
  Synthetic
gcacuaauuaaaagacauuug

SEQ ID NO: 8333 - RNA, 20 nt, Artificial Sequence
  Synthetic
gccugcucgguauccauuug

SEQ ID NO: 8334 - RNA, 19 nt, Artificial Sequence
  Synthetic
gacuuggaggguucauuug

SEQ ID NO: 8335 - RNA, 22 nt, Artificial Sequence
  Synthetic
gcuuuguuauuaggaagauuug

SEQ ID NO: 8336 - RNA, 24 nt, Artificial Sequence
  Synthetic
gugcuuuguuauuaggaagauuug

SEQ ID NO: 8337 - RNA, 18 nt, Artificial Sequence
  Synthetic
guuugauauauagauuug

SEQ ID NO: 8338 - RNA, 19 nt, Artificial Sequence
  Synthetic
gagaaaguacuuagauuug

SEQ ID NO: 8339 - RNA, 21 nt, Artificial Sequence
  Synthetic
gagagaaaguacuuagauuug

SEQ ID NO: 8340 - RNA, 23 nt, Artificial Sequence
  Synthetic
gagagagaaaguacuuagauuug

SEQ ID NO: 8341 - RNA, 18 nt, Artificial Sequence
  Synthetic
gggugagagggggauuug

SEQ ID NO: 8342 - RNA, 21 nt, Artificial Sequence
  Synthetic
gaaccaucauccugggauuug

SEQ ID NO: 8343 - RNA, 23 nt, Artificial Sequence
  Synthetic
gagaaccaucauccugggauuug

SEQ ID NO: 8344 - RNA, 24 nt, Artificial Sequence
  Synthetic
ggagaaccaucauccugggauuug

SEQ ID NO: 8345 - RNA, 20 nt, Artificial Sequence
  Synthetic
guaauggaggcaaugauuug

SEQ ID NO: 8346 - RNA, 20 nt, Artificial Sequence
  Synthetic
guugagugaagggugauuug

SEQ ID NO: 8347 - RNA, 22 nt, Artificial Sequence
  Synthetic
guguugagugaagggugauuug

SEQ ID NO: 8348 - RNA, 19 nt, Artificial Sequence
  Synthetic
gaagagaguuaccuauuug

SEQ ID NO: 8349 - RNA, 20 nt, Artificial Sequence
  Synthetic
ggaagagaguuaccuauuug

SEQ ID NO: 8350 - RNA, 21 nt, Artificial Sequence
  Synthetic
gggaagagaguuaccuauuug

SEQ ID NO: 8351 - RNA, 19 nt, Artificial Sequence
  Synthetic
gcaucucccucaguauuug

SEQ ID NO: 8352 - RNA, 24 nt, Artificial Sequence
  Synthetic
gacuucugauucacuuuguauuug

SEQ ID NO: 8353 - RNA, 18 nt, Artificial Sequence
  Synthetic
gagcaagugauuuauuug

SEQ ID NO: 8354 - RNA, 22 nt, Artificial Sequence
  Synthetic
gaaaucaaacacauuuuauuug

SEQ ID NO: 8355 - RNA, 24 nt, Artificial Sequence
  Synthetic
gagaaaucaaacacauuuuauuug

SEQ ID NO: 8356 - RNA, 18 nt, Artificial Sequence
  Synthetic
guuuugaccuacacuuug

SEQ ID NO: 8357 - RNA, 23 nt, Artificial Sequence
  Synthetic
gaaaaguuuugaccuacacuuug

SEQ ID NO: 8358 - RNA, 24 nt, Artificial Sequence
  Synthetic
ggaaaaguuuugaccuacacuuug

SEQ ID NO: 8359 - RNA, 23 nt, Artificial Sequence
  Synthetic
gauaaauuuuuuauaagacuuug

SEQ ID NO: 8360 - RNA, 18 nt, Artificial Sequence
  Synthetic
ggcugaaaauuuacuuug

SEQ ID NO: 8361 - RNA, 21 nt, Artificial Sequence
  Synthetic
gcuggcugaaaauuuacuuug

SEQ ID NO: 8362 - RNA, 18 nt, Artificial Sequence
  Synthetic
gaaugaugacucccuuug

SEQ ID NO: 8363 - RNA, 23 nt, Artificial Sequence
  Synthetic
gcaucugaacauuugguccuuug

SEQ ID NO: 8364 - RNA, 18 nt, Artificial Sequence
  Synthetic
ggcuaugucuguccuuug

SEQ ID NO: 8365 - RNA, 21 nt, Artificial Sequence
  Synthetic
gcaggcuaugucuguccuuug

SEQ ID NO: 8366 - RNA, 19 nt, Artificial Sequence
  Synthetic
gccuaaucaaacagcuuug

SEQ ID NO: 8367 - RNA, 20 nt, Artificial Sequence
  Synthetic
ggccuaaucaaacagcuuug

SEQ ID NO: 8368 - RNA, 22 nt, Artificial Sequence
  Synthetic
gaggccuaaucaaacagcuuug

SEQ ID NO: 8369 - RNA, 24 nt, Artificial Sequence
  Synthetic
gugaggccuaaucaaacagcuuug

SEQ ID NO: 8370 - RNA, 22 nt, Artificial Sequence
  Synthetic
gaacuuauuaccuacugcuuug

SEQ ID NO: 8371 - RNA, 21 nt, Artificial Sequence
  Synthetic
gcacagggccgugcugcuuug

SEQ ID NO: 8372 - RNA, 22 nt, Artificial Sequence
  Synthetic
ggcacagggccgugcugcuuug

SEQ ID NO: 8373 - RNA, 21 nt, Artificial Sequence
  Synthetic
guaccuccauucuacucuuug

SEQ ID NO: 8374 - RNA, 21 nt, Artificial Sequence
  Synthetic
gcaaggaaugagaugucuuug

SEQ ID NO: 8375 - RNA, 23 nt, Artificial Sequence
  Synthetic
gagcaaggaaugagaugucuuug

SEQ ID NO: 8376 - RNA, 24 nt, Artificial Sequence
  Synthetic
ggagcaaggaaugagaugucuuug

SEQ ID NO: 8377 - RNA, 21 nt, Artificial Sequence
  Synthetic
gcuuuuaguauucugucuuug

SEQ ID NO: 8378 - RNA, 19 nt, Artificial Sequence
  Synthetic
gcugauuagaagacguuug

SEQ ID NO: 8379 - RNA, 22 nt, Artificial Sequence
  Synthetic
gacuacacuaacucugcguuug

SEQ ID NO: 8380 - RNA, 23 nt, Artificial Sequence
  Synthetic
gacauuuauuuggucacuguuug

SEQ ID NO: 8381 - RNA, 21 nt, Artificial Sequence
  Synthetic
gcaccaggauguagcuguuug

SEQ ID NO: 8382 - RNA, 24 nt, Artificial Sequence
  Synthetic
guugcaccaggauguagcuguuug

SEQ ID NO: 8383 - RNA, 18 nt, Artificial Sequence
  Synthetic
guuaccuaaaucuguuug

SEQ ID NO: 8384 - RNA, 21 nt, Artificial Sequence
  Synthetic
guuguuaccuaaaucuguuug

SEQ ID NO: 8385 - RNA, 18 nt, Artificial Sequence
  Synthetic
guaucugaaauuuguuug

SEQ ID NO: 8386 - RNA, 19 nt, Artificial Sequence
  Synthetic
gguaucugaaauuuguuug

SEQ ID NO: 8387 - RNA, 21 nt, Artificial Sequence
  Synthetic
gagguaucugaaauuuguuug

SEQ ID NO: 8388 - RNA, 24 nt, Artificial Sequence
  Synthetic
gcuccuuaaauuuuuguuuguuug

SEQ ID NO: 8389 - RNA, 23 nt, Artificial Sequence
  Synthetic
gaccuuguaauuagaaaauuuug

SEQ ID NO: 8390 - RNA, 20 nt, Artificial Sequence
  Synthetic
gucacuuuccaauaauuuug

SEQ ID NO: 8391 - RNA, 20 nt, Artificial Sequence
  Synthetic
gacagcacaagagcauuuug

SEQ ID NO: 8392 - RNA, 21 nt, Artificial Sequence
  Synthetic
ggacagcacaagagcauuuug

SEQ ID NO: 8393 - RNA, 24 nt, Artificial Sequence
  Synthetic
guacaaaggauguuguuuauuuug

SEQ ID NO: 8394 - RNA, 24 nt, Artificial Sequence
  Synthetic
gaauaauucugauuauaacuuuug

SEQ ID NO: 8395 - RNA, 19 nt, Artificial Sequence
  Synthetic
guuccucaguuuacuuuug

SEQ ID NO: 8396 - RNA, 24 nt, Artificial Sequence
  Synthetic
gaaauguuccucaguuuacuuuug

SEQ ID NO: 8397 - RNA, 21 nt, Artificial Sequence
  Synthetic
gacagagucucugugcuuuug

SEQ ID NO: 8398 - RNA, 20 nt, Artificial Sequence
  Synthetic
guauuaugaaaugaguuuug

SEQ ID NO: 8399 - RNA, 22 nt, Artificial Sequence
  Synthetic
guguauuaugaaaugaguuuug

SEQ ID NO: 8400 - RNA, 19 nt, Artificial Sequence
  Synthetic
guuacaaucacuaguuuug

SEQ ID NO: 8401 - RNA, 18 nt, Artificial Sequence
  Synthetic
gaguuuuuccuuguuuug

SEQ ID NO: 8402 - RNA, 19 nt, Artificial Sequence
  Synthetic
ggaguuuuuccuuguuuug

SEQ ID NO: 8403 - RNA, 22 nt, Artificial Sequence
  Synthetic
guuuugcccuacuauauuuuug

SEQ ID NO: 8404 - RNA, 23 nt, Artificial Sequence
  Synthetic
gguuuugcccuacuauauuuuug

SEQ ID NO: 8405 - RNA, 19 nt, Artificial Sequence
  Synthetic
gucuaguacaugguuuuug

SEQ ID NO: 8406 - RNA, 21 nt, Artificial Sequence
  Synthetic
gaugauuuucuuucuuuuuug

SEQ ID NO: 8407 - RNA, 23 nt, Artificial Sequence
  Synthetic
gagaugauuuucuuucuuuuuug

SEQ ID NO: 8408 - RNA, 24 nt, Artificial Sequence
  Synthetic
guucuucaaacacuugaaaaaaau

SEQ ID NO: 8409 - RNA, 22 nt, Artificial Sequence
  Synthetic
gaaaauucagugcuaaaaaaau

SEQ ID NO: 8410 - RNA, 23 nt, Artificial Sequence
  Synthetic
gaaaaauacaaauggcaaaaaau

SEQ ID NO: 8411 - RNA, 23 nt, Artificial Sequence
  Synthetic
guaauuuuuuaaaaaacaaaaau

SEQ ID NO: 8412 - RNA, 20 nt, Artificial Sequence
  Synthetic
gucugcagaacaugaaaaau

SEQ ID NO: 8413 - RNA, 23 nt, Artificial Sequence
  Synthetic
gaugucugcagaacaugaaaaau

SEQ ID NO: 8414 - RNA, 20 nt, Artificial Sequence
  Synthetic
guucacuguuuaauaaaaau

SEQ ID NO: 8415 - RNA, 19 nt, Artificial Sequence
  Synthetic
gucacauggugauaaaaau

SEQ ID NO: 8416 - RNA, 20 nt, Artificial Sequence
  Synthetic
ggucacauggugauaaaaau

SEQ ID NO: 8417 - RNA, 22 nt, Artificial Sequence
  Synthetic
gaggucacauggugauaaaaau

SEQ ID NO: 8418 - RNA, 22 nt, Artificial Sequence
  Synthetic
gagagaaguuuaggcuaaaaau

SEQ ID NO: 8419 - RNA, 23 nt, Artificial Sequence
  Synthetic
ggagagaaguuuaggcuaaaaau

SEQ ID NO: 8420 - RNA, 18 nt, Artificial Sequence
  Synthetic
ggcuuuugugcuaaaaau

SEQ ID NO: 8421 - RNA, 24 nt, Artificial Sequence
  Synthetic
gaaaauaguagaauggguaaaaau

SEQ ID NO: 8422 - RNA, 18 nt, Artificial Sequence
  Synthetic
gaguaugcuuguaaaaau

SEQ ID NO: 8423 - RNA, 19 nt, Artificial Sequence
  Synthetic
ggaguaugcuuguaaaaau

SEQ ID NO: 8424 - RNA, 21 nt, Artificial Sequence
  Synthetic
guggaguaugcuuguaaaaau

SEQ ID NO: 8425 - RNA, 22 nt, Artificial Sequence
  Synthetic
gguggaguaugcuuguaaaaau

SEQ ID NO: 8426 - RNA, 21 nt, Artificial Sequence
  Synthetic
gaaauaaauaugguuaaaaau

SEQ ID NO: 8427 - RNA, 22 nt, Artificial Sequence
  Synthetic
ggaaauaaauaugguuaaaaau

SEQ ID NO: 8428 - RNA, 21 nt, Artificial Sequence
  Synthetic
guaacaguccguguuaaaaau

SEQ ID NO: 8429 - RNA, 23 nt, Artificial Sequence
  Synthetic
gcuuuuuccagugugcacaaaau

SEQ ID NO: 8430 - RNA, 20 nt, Artificial Sequence
  Synthetic
guuauaacuuaagacaaaau

SEQ ID NO: 8431 - RNA, 19 nt, Artificial Sequence
  Synthetic
gucuggcaccagacaaaau

SEQ ID NO: 8432 - RNA, 19 nt, Artificial Sequence
  Synthetic
gacauugaaauuacaaaau

SEQ ID NO: 8433 - RNA, 21 nt, Artificial Sequence
  Synthetic
gugacauugaaauuacaaaau

SEQ ID NO: 8434 - RNA, 24 nt, Artificial Sequence
  Synthetic
guugugacauugaaauuacaaaau

SEQ ID NO: 8435 - RNA, 23 nt, Artificial Sequence
  Synthetic
gcaaauaccaaaauagucaaaau

SEQ ID NO: 8436 - RNA, 21 nt, Artificial Sequence
  Synthetic
gaaagacugaaugcagaaaau

SEQ ID NO: 8437 - RNA, 24 nt, Artificial Sequence
  Synthetic
gaagaaagacugaaugcagaaaau

SEQ ID NO: 8438 - RNA, 21 nt, Artificial Sequence
  Synthetic
gauacugcaguuauagaaaau

SEQ ID NO: 8439 - RNA, 19 nt, Artificial Sequence
  Synthetic
guguggccugugggaaaau

SEQ ID NO: 8440 - RNA, 21 nt, Artificial Sequence
  Synthetic
gaguguggccugugggaaaau

SEQ ID NO: 8441 - RNA, 24 nt, Artificial Sequence
  Synthetic
guugaguguggccugugggaaaau

SEQ ID NO: 8442 - RNA, 21 nt, Artificial Sequence
  Synthetic
gccuggcuccacauggaaaau

SEQ ID NO: 8443 - RNA, 21 nt, Artificial Sequence
  Synthetic
gcuaaccuguugaaauaaaau

SEQ ID NO: 8444 - RNA, 24 nt, Artificial Sequence
  Synthetic
gcagcuaaccuguugaaauaaaau

SEQ ID NO: 8445 - RNA, 20 nt, Artificial Sequence
  Synthetic
gaccguaguuuuaauaaaau

SEQ ID NO: 8446 - RNA, 21 nt, Artificial Sequence
  Synthetic
ggaccguaguuuuaauaaaau

SEQ ID NO: 8447 - RNA, 23 nt, Artificial Sequence
  Synthetic
guggaccguaguuuuaauaaaau

SEQ ID NO: 8448 - RNA, 23 nt, Artificial Sequence
  Synthetic
gccaucuaauggaaacauaaaau

SEQ ID NO: 8449 - RNA, 23 nt, Artificial Sequence
  Synthetic
gucucuuuaaccuucacuaaaau

SEQ ID NO: 8450 - RNA, 21 nt, Artificial Sequence
  Synthetic
guuaagugaaaugacuaaaau

SEQ ID NO: 8451 - RNA, 23 nt, Artificial Sequence
  Synthetic
gaaauucugucacauccuaaaau

SEQ ID NO: 8452 - RNA, 21 nt, Artificial Sequence
  Synthetic
gcccuuugaguauucuaaaau

SEQ ID NO: 8453 - RNA, 24 nt, Artificial Sequence
  Synthetic
gcagcccuuugaguauucuaaaau

SEQ ID NO: 8454 - RNA, 18 nt, Artificial Sequence
  Synthetic
gaggcuguguucuaaaau

SEQ ID NO: 8455 - RNA, 19 nt, Artificial Sequence
  Synthetic
ggaggcuguguucuaaaau

SEQ ID NO: 8456 - RNA, 20 nt, Artificial Sequence
  Synthetic
gcacaaccagccaguaaaau

SEQ ID NO: 8457 - RNA, 21 nt, Artificial Sequence
  Synthetic
ggcacaaccagccaguaaaau

SEQ ID NO: 8458 - RNA, 22 nt, Artificial Sequence
  Synthetic
gauaauauccuaauauuaaaau

SEQ ID NO: 8459 - RNA, 23 nt, Artificial Sequence
  Synthetic
ggauaauauccuaauauuaaaau

SEQ ID NO: 8460 - RNA, 18 nt, Artificial Sequence
  Synthetic
gucauccuuaaaacaaau

SEQ ID NO: 8461 - RNA, 22 nt, Artificial Sequence
  Synthetic
gccaaaagucauagacacaaau

SEQ ID NO: 8462 - RNA, 24 nt, Artificial Sequence
  Synthetic
gagccaaaagucauagacacaaau

SEQ ID NO: 8463 - RNA, 24 nt, Artificial Sequence
  Synthetic
gacaauuuacuuggggacacaaau

SEQ ID NO: 8464 - RNA, 19 nt, Artificial Sequence
  Synthetic
guuaacuauuuucacaaau

SEQ ID NO: 8465 - RNA, 20 nt, Artificial Sequence
  Synthetic
gauuguugacacagacaaau

SEQ ID NO: 8466 - RNA, 18 nt, Artificial Sequence
  Synthetic
gaacaaaaggugacaaau

SEQ ID NO: 8467 - RNA, 24 nt, Artificial Sequence
  Synthetic
gcauuagaacaaaaggugacaaau

SEQ ID NO: 8468 - RNA, 18 nt, Artificial Sequence
  Synthetic
gaaguucugcuuacaaau

SEQ ID NO: 8469 - RNA, 19 nt, Artificial Sequence
  Synthetic
ggaaguucugcuuacaaau

SEQ ID NO: 8470 - RNA, 18 nt, Artificial Sequence
  Synthetic
gaauaaacaaacccaaau

SEQ ID NO: 8471 - RNA, 21 nt, Artificial Sequence
  Synthetic
gcccaccgagaucugccaaau

SEQ ID NO: 8472 - RNA, 22 nt, Artificial Sequence
  Synthetic
ggcccaccgagaucugccaaau

SEQ ID NO: 8473 - RNA, 23 nt, Artificial Sequence
  Synthetic
gggcccaccgagaucugccaaau

SEQ ID NO: 8474 - RNA, 22 nt, Artificial Sequence
  Synthetic
gcuuaaugugaagacuccaaau

SEQ ID NO: 8475 - RNA, 18 nt, Artificial Sequence
  Synthetic
guucagagagaagcaaau

SEQ ID NO: 8476 - RNA, 19 nt, Artificial Sequence
  Synthetic
gguucagagagaagcaaau

SEQ ID NO: 8477 - RNA, 23 nt, Artificial Sequence
  Synthetic
gaaugguucagagagaagcaaau

SEQ ID NO: 8478 - RNA, 24 nt, Artificial Sequence
  Synthetic
gccauacgcacacaggcagcaaau

SEQ ID NO: 8479 - RNA, 23 nt, Artificial Sequence
  Synthetic
gacuaacgaaagcgaaggcaaau

SEQ ID NO: 8480 - RNA, 24 nt, Artificial Sequence
  Synthetic
gaauuuuaaaugccaguugcaaau

SEQ ID NO: 8481 - RNA, 24 nt, Artificial Sequence
  Synthetic
guuaucaucuuaaaagagucaaau

SEQ ID NO: 8482 - RNA, 18 nt, Artificial Sequence
  Synthetic
gaguaguaucugucaaau

SEQ ID NO: 8483 - RNA, 24 nt, Artificial Sequence
  Synthetic
guaucagaguaguaucugucaaau

SEQ ID NO: 8484 - RNA, 18 nt, Artificial Sequence
  Synthetic
ggcccuggaucaagaaau

SEQ ID NO: 8485 - RNA, 20 nt, Artificial Sequence
  Synthetic
gaggcccuggaucaagaaau

SEQ ID NO: 8486 - RNA, 21 nt, Artificial Sequence
  Synthetic
ggaggcccuggaucaagaaau

SEQ ID NO: 8487 - RNA, 23 nt, Artificial Sequence
  Synthetic
guagcuuuucauccuccagaaau

SEQ ID NO: 8488 - RNA, 20 nt, Artificial Sequence
  Synthetic
gaaguucacagaucagaaau

SEQ ID NO: 8489 - RNA, 22 nt, Artificial Sequence
  Synthetic
gagaaguucacagaucagaaau

SEQ ID NO: 8490 - RNA, 23 nt, Artificial Sequence
  Synthetic
guaacucuauuuuaaagagaaau

SEQ ID NO: 8491 - RNA, 23 nt, Artificial Sequence
  Synthetic
gcaaacuuuacgcacagagaaau

SEQ ID NO: 8492 - RNA, 18 nt, Artificial Sequence
  Synthetic
ggaaccacugauagaaau

SEQ ID NO: 8493 - RNA, 19 nt, Artificial Sequence
  Synthetic
gggaaccacugauagaaau

SEQ ID NO: 8494 - RNA, 23 nt, Artificial Sequence
  Synthetic
guaagggaaccacugauagaaau

SEQ ID NO: 8495 - RNA, 19 nt, Artificial Sequence
  Synthetic
guacuccuuuccuagaaau

SEQ ID NO: 8496 - RNA, 18 nt, Artificial Sequence
  Synthetic
gguguccgaguuagaaau

SEQ ID NO: 8497 - RNA, 22 nt, Artificial Sequence
  Synthetic
guaaacauaaacauuuagaaau

SEQ ID NO: 8498 - RNA, 18 nt, Artificial Sequence
  Synthetic
guuaugguuacaggaaau

SEQ ID NO: 8499 - RNA, 23 nt, Artificial Sequence
  Synthetic
gaacuguuaugguuacaggaaau

SEQ ID NO: 8500 - RNA, 24 nt, Artificial Sequence
  Synthetic
ggaacuguuaugguuacaggaaau

SEQ ID NO: 8501 - RNA, 20 nt, Artificial Sequence
  Synthetic
guucuuuauugaagggaaau

SEQ ID NO: 8502 - RNA, 21 nt, Artificial Sequence
  Synthetic
gacuauuguguccauggaaau

SEQ ID NO: 8503 - RNA, 20 nt, Artificial Sequence
  Synthetic
guugguaggcauguggaaau

SEQ ID NO: 8504 - RNA, 23 nt, Artificial Sequence
  Synthetic
gauguugguaggcauguggaaau

SEQ ID NO: 8505 - RNA, 20 nt, Artificial Sequence
  Synthetic
guuucauucuaauuggaaau

SEQ ID NO: 8506 - RNA, 24 nt, Artificial Sequence
  Synthetic
guauguuucauucuaauuggaaau

SEQ ID NO: 8507 - RNA, 18 nt, Artificial Sequence
  Synthetic
gauaaguguuuuggaaau

SEQ ID NO: 8508 - RNA, 24 nt, Artificial Sequence
  Synthetic
gauacugauaaguguuuuggaaau

SEQ ID NO: 8509 - RNA, 22 nt, Artificial Sequence
  Synthetic
gcuucucaucuucaagugaaau

SEQ ID NO: 8510 - RNA, 18 nt, Artificial Sequence
  Synthetic
gugaccuuucaaauaaau

SEQ ID NO: 8511 - RNA, 18 nt, Artificial Sequence
  Synthetic
gccuugguaucaauaaau

SEQ ID NO: 8512 - RNA, 19 nt, Artificial Sequence
  Synthetic
ggccuugguaucaauaaau

SEQ ID NO: 8513 - RNA, 20 nt, Artificial Sequence
  Synthetic
guaauugguucucaauaaau

SEQ ID NO: 8514 - RNA, 24 nt, Artificial Sequence
  Synthetic
gcacaauuaguaccuugaauaaau

SEQ ID NO: 8515 - RNA, 18 nt, Artificial Sequence
  Synthetic
guaccugugggcauaaau

SEQ ID NO: 8516 - RNA, 19 nt, Artificial Sequence
  Synthetic
gguaccugugggcauaaau

SEQ ID NO: 8517 - RNA, 24 nt, Artificial Sequence
  Synthetic
gacccuaggaaacugaauauaaau

SEQ ID NO: 8518 - RNA, 19 nt, Artificial Sequence
  Synthetic
gucuaugugccauauaaau

SEQ ID NO: 8519 - RNA, 24 nt, Artificial Sequence
  Synthetic
gcucagucuaugugccauauaaau

SEQ ID NO: 8520 - RNA, 23 nt, Artificial Sequence
  Synthetic
gucuuuuuuccuguuauauaaau

SEQ ID NO: 8521 - RNA, 22 nt, Artificial Sequence
  Synthetic
gauaagcaaguauccuauaaau

SEQ ID NO: 8522 - RNA, 22 nt, Artificial Sequence
  Synthetic
guccuaccccauccaacuaaau

SEQ ID NO: 8523 - RNA, 23 nt, Artificial Sequence
  Synthetic
gguccuaccccauccaacuaaau

SEQ ID NO: 8524 - RNA, 24 nt, Artificial Sequence
  Synthetic
gaaucauaaaaucuaaaucuaaau

SEQ ID NO: 8525 - RNA, 19 nt, Artificial Sequence
  Synthetic
guagaugagauaucuaaau

SEQ ID NO: 8526 - RNA, 18 nt, Artificial Sequence
  Synthetic
guaaccaaugcucuaaau

SEQ ID NO: 8527 - RNA, 20 nt, Artificial Sequence
  Synthetic
gaguaaccaaugcucuaaau

SEQ ID NO: 8528 - RNA, 24 nt, Artificial Sequence
  Synthetic
gucauugagcauacagaaguaaau

SEQ ID NO: 8529 - RNA, 20 nt, Artificial Sequence
  Synthetic
gaugccucucacuaguaaau

SEQ ID NO: 8530 - RNA, 21 nt, Artificial Sequence
  Synthetic
ggaugccucucacuaguaaau

SEQ ID NO: 8531 - RNA, 23 nt, Artificial Sequence
  Synthetic
gacguaaugacacuaauguaaau

SEQ ID NO: 8532 - RNA, 19 nt, Artificial Sequence
  Synthetic
gugcuuuacacauguaaau

SEQ ID NO: 8533 - RNA, 20 nt, Artificial Sequence
  Synthetic
ggugcuuuacacauguaaau

SEQ ID NO: 8534 - RNA, 23 nt, Artificial Sequence
  Synthetic
gaaauagauugugguguguaaau

SEQ ID NO: 8535 - RNA, 19 nt, Artificial Sequence
  Synthetic
gauuagggaggcauuaaau

SEQ ID NO: 8536 - RNA, 21 nt, Artificial Sequence
  Synthetic
gcgauuagggaggcauuaaau

SEQ ID NO: 8537 - RNA, 22 nt, Artificial Sequence
  Synthetic
ggcgauuagggaggcauuaaau

SEQ ID NO: 8538 - RNA, 23 nt, Artificial Sequence
  Synthetic
gggcgauuagggaggcauuaaau

SEQ ID NO: 8539 - RNA, 24 nt, Artificial Sequence
  Synthetic
ggggcgauuagggaggcauuaaau

SEQ ID NO: 8540 - RNA, 21 nt, Artificial Sequence
  Synthetic
gcuuuaaccuaaucauuaaau

SEQ ID NO: 8541 - RNA, 24 nt, Artificial Sequence
  Synthetic
guugcuuuaaccuaaucauuaaau

SEQ ID NO: 8542 - RNA, 24 nt, Artificial Sequence
  Synthetic
guuauuauuguuauuggauuaaau

SEQ ID NO: 8543 - RNA, 18 nt, Artificial Sequence
  Synthetic
gagguccuaaauuuaaau

SEQ ID NO: 8544 - RNA, 23 nt, Artificial Sequence
  Synthetic
guucagagguccuaaauuuaaau

SEQ ID NO: 8545 - RNA, 21 nt, Artificial Sequence
  Synthetic
gauguaaaaauauguuuaaau

SEQ ID NO: 8546 - RNA, 23 nt, Artificial Sequence
  Synthetic
gagauguaaaaauauguuuaaau

SEQ ID NO: 8547 - RNA, 21 nt, Artificial Sequence
  Synthetic
ggggauuuauuauuuuuaaau

SEQ ID NO: 8548 - RNA, 24 nt, Artificial Sequence
  Synthetic
guaggggauuuauuauuuuuaaau

SEQ ID NO: 8549 - RNA, 18 nt, Artificial Sequence
  Synthetic
gcaucaaauugcaacaau

SEQ ID NO: 8550 - RNA, 20 nt, Artificial Sequence
  Synthetic
gucuaaaggaagagaacaau

SEQ ID NO: 8551 - RNA, 22 nt, Artificial Sequence
  Synthetic
gagucuaaaggaagagaacaau

SEQ ID NO: 8552 - RNA, 18 nt, Artificial Sequence
  Synthetic
ggcaagaaguauaacaau

SEQ ID NO: 8553 - RNA, 19 nt, Artificial Sequence
  Synthetic
gggcaagaaguauaacaau

SEQ ID NO: 8554 - RNA, 21 nt, Artificial Sequence
  Synthetic
gcacugacgaagagacacaau

SEQ ID NO: 8555 - RNA, 22 nt, Artificial Sequence
  Synthetic
ggcacugacgaagagacacaau

SEQ ID NO: 8556 - RNA, 23 nt, Artificial Sequence
  Synthetic
gucuuucacugugggggcacaau

SEQ ID NO: 8557 - RNA, 24 nt, Artificial Sequence
  Synthetic
ggucuuucacugugggggcacaau

SEQ ID NO: 8558 - RNA, 19 nt, Artificial Sequence
  Synthetic
gaaguaaguggaagacaau

SEQ ID NO: 8559 - RNA, 20 nt, Artificial Sequence
  Synthetic
ggaaguaaguggaagacaau

SEQ ID NO: 8560 - RNA, 22 nt, Artificial Sequence
  Synthetic
gaggaaguaaguggaagacaau

SEQ ID NO: 8561 - RNA, 24 nt, Artificial Sequence
  Synthetic
gugaggaaguaaguggaagacaau

SEQ ID NO: 8562 - RNA, 19 nt, Artificial Sequence
  Synthetic
guagaaacuugaagacaau

SEQ ID NO: 8563 - RNA, 18 nt, Artificial Sequence
  Synthetic
gggacaaaagaggacaau

SEQ ID NO: 8564 - RNA, 20 nt, Artificial Sequence
  Synthetic
gagggacaaaagaggacaau

SEQ ID NO: 8565 - RNA, 23 nt, Artificial Sequence
  Synthetic
guugagggacaaaagaggacaau

SEQ ID NO: 8566 - RNA, 20 nt, Artificial Sequence
  Synthetic
gauacaauaagccugacaau

SEQ ID NO: 8567 - RNA, 23 nt, Artificial Sequence
  Synthetic
guagauacaauaagccugacaau

SEQ ID NO: 8568 - RNA, 24 nt, Artificial Sequence
  Synthetic
gguagauacaauaagccugacaau

SEQ ID NO: 8569 - RNA, 21 nt, Artificial Sequence
  Synthetic
guuagauucuagggauacaau

SEQ ID NO: 8570 - RNA, 23 nt, Artificial Sequence
  Synthetic
guguuagauucuagggauacaau

SEQ ID NO: 8571 - RNA, 21 nt, Artificial Sequence
  Synthetic
gcuuacaugugagccuacaau

SEQ ID NO: 8572 - RNA, 22 nt, Artificial Sequence
  Synthetic
gcacagcagguuauaaaccaau

SEQ ID NO: 8573 - RNA, 21 nt, Artificial Sequence
  Synthetic
guaauguagcucagccccaau

SEQ ID NO: 8574 - RNA, 21 nt, Artificial Sequence
  Synthetic
gucuagagauuuaagcccaau

SEQ ID NO: 8575 - RNA, 19 nt, Artificial Sequence
  Synthetic
gugcuucucuuuucccaau

SEQ ID NO: 8576 - RNA, 18 nt, Artificial Sequence
  Synthetic
guuuuuuaguaagccaau

SEQ ID NO: 8577 - RNA, 20 nt, Artificial Sequence
  Synthetic
gaguuuuuuaguaagccaau

SEQ ID NO: 8578 - RNA, 23 nt, Artificial Sequence
  Synthetic
gcugaguuuuuuaguaagccaau

SEQ ID NO: 8579 - RNA, 20 nt, Artificial Sequence
  Synthetic
gaagcaaugauauauccaau

SEQ ID NO: 8580 - RNA, 21 nt, Artificial Sequence
  Synthetic
ggaagcaaugauauauccaau

SEQ ID NO: 8581 - RNA, 24 nt, Artificial Sequence
  Synthetic
gcaggaagcaaugauauauccaau

SEQ ID NO: 8582 - RNA, 19 nt, Artificial Sequence
  Synthetic
guccaguucacuguccaau

SEQ ID NO: 8583 - RNA, 19 nt, Artificial Sequence
  Synthetic
gucuuguccauuuuccaau

SEQ ID NO: 8584 - RNA, 22 nt, Artificial Sequence
  Synthetic
gcugucuuguccauuuuccaau

SEQ ID NO: 8585 - RNA, 24 nt, Artificial Sequence
  Synthetic
guuuauagcauuauaagcagcaau

SEQ ID NO: 8586 - RNA, 21 nt, Artificial Sequence
  Synthetic
gucaccccaauuuaaugcaau

SEQ ID NO: 8587 - RNA, 23 nt, Artificial Sequence
  Synthetic
gaaaucuuugucuuaacugcaau

SEQ ID NO: 8588 - RNA, 19 nt, Artificial Sequence
  Synthetic
gcuggaucacuugugcaau

SEQ ID NO: 8589 - RNA, 20 nt, Artificial Sequence
  Synthetic
ggcuggaucacuugugcaau

SEQ ID NO: 8590 - RNA, 23 nt, Artificial Sequence
  Synthetic
gcuuaccccacaaauauugcaau

SEQ ID NO: 8591 - RNA, 19 nt, Artificial Sequence
  Synthetic
gccucaaucagguugcaau

SEQ ID NO: 8592 - RNA, 24 nt, Artificial Sequence
  Synthetic
gaaaauccacauuaaaaaaucaau

SEQ ID NO: 8593 - RNA, 20 nt, Artificial Sequence
  Synthetic
guagcuuucacuguaucaau

SEQ ID NO: 8594 - RNA, 19 nt, Artificial Sequence
  Synthetic
gugagauuauugagucaau

SEQ ID NO: 8595 - RNA, 24 nt, Artificial Sequence
  Synthetic
gcaaaucugguuguaaaugucaau

SEQ ID NO: 8596 - RNA, 23 nt, Artificial Sequence
  Synthetic
guaucucuguaauaucugucaau

SEQ ID NO: 8597 - RNA, 21 nt, Artificial Sequence
  Synthetic
gauucgcaugacugugucaau

SEQ ID NO: 8598 - RNA, 19 nt, Artificial Sequence
  Synthetic
gaaaauugauugugucaau

SEQ ID NO: 8599 - RNA, 21 nt, Artificial Sequence
  Synthetic
gugaaaauugauugugucaau

SEQ ID NO: 8600 - RNA, 23 nt, Artificial Sequence
  Synthetic
gagugaaaauugauugugucaau

SEQ ID NO: 8601 - RNA, 24 nt, Artificial Sequence
  Synthetic
ggagugaaaauugauugugucaau

SEQ ID NO: 8602 - RNA, 18 nt, Artificial Sequence
  Synthetic
ggcuccaaaguugucaau

SEQ ID NO: 8603 - RNA, 21 nt, Artificial Sequence
  Synthetic
gauggcuccaaaguugucaau

SEQ ID NO: 8604 - RNA, 22 nt, Artificial Sequence
  Synthetic
ggauggcuccaaaguugucaau

SEQ ID NO: 8605 - RNA, 21 nt, Artificial Sequence
  Synthetic
guuuuaaauuuacaauucaau

SEQ ID NO: 8606 - RNA, 18 nt, Artificial Sequence
  Synthetic
gccauuccugaguucaau

SEQ ID NO: 8607 - RNA, 19 nt, Artificial Sequence
  Synthetic
ggccauuccugaguucaau

SEQ ID NO: 8608 - RNA, 20 nt, Artificial Sequence
  Synthetic
gaaccaaaugagauuucaau

SEQ ID NO: 8609 - RNA, 23 nt, Artificial Sequence
  Synthetic
guugaaccaaaugagauuucaau

SEQ ID NO: 8610 - RNA, 18 nt, Artificial Sequence
  Synthetic
guuaccuauuugaagaau

SEQ ID NO: 8611 - RNA, 20 nt, Artificial Sequence
  Synthetic
gaguuaccuauuugaagaau

SEQ ID NO: 8612 - RNA, 22 nt, Artificial Sequence
  Synthetic
gagaguuaccuauuugaagaau

SEQ ID NO: 8613 - RNA, 18 nt, Artificial Sequence
  Synthetic
gucucaaaugcacagaau

SEQ ID NO: 8614 - RNA, 19 nt, Artificial Sequence
  Synthetic
guaccaagacacccagaau

SEQ ID NO: 8615 - RNA, 23 nt, Artificial Sequence
  Synthetic
gacaguaccaagacacccagaau

SEQ ID NO: 8616 - RNA, 24 nt, Artificial Sequence
  Synthetic
gauuuucaacagauagaagagaau

SEQ ID NO: 8617 - RNA, 22 nt, Artificial Sequence
  Synthetic
gaauacaaaaauauuagagaau

SEQ ID NO: 8618 - RNA, 24 nt, Artificial Sequence
  Synthetic
gagaauacaaaaauauuagagaau

SEQ ID NO: 8619 - RNA, 23 nt, Artificial Sequence
  Synthetic
gucuucucauucuacaugagaau

SEQ ID NO: 8620 - RNA, 18 nt, Artificial Sequence
  Synthetic
ggugcgagaccugagaau

SEQ ID NO: 8621 - RNA, 18 nt, Artificial Sequence
  Synthetic
ggaucaguaaaauagaau

SEQ ID NO: 8622 - RNA, 19 nt, Artificial Sequence
  Synthetic
gucaaugugguacuagaau

SEQ ID NO: 8623 - RNA, 18 nt, Artificial Sequence
  Synthetic
gucuuuucauucuagaau

SEQ ID NO: 8624 - RNA, 19 nt, Artificial Sequence
  Synthetic
ggucuuuucauucuagaau

SEQ ID NO: 8625 - RNA, 24 nt, Artificial Sequence
  Synthetic
guuaaggucuuuucauucuagaau

SEQ ID NO: 8626 - RNA, 23 nt, Artificial Sequence
  Synthetic
guuuucauagaaauacguagaau

SEQ ID NO: 8627 - RNA, 22 nt, Artificial Sequence
  Synthetic
guuaauauugaauguuuagaau

SEQ ID NO: 8628 - RNA, 20 nt, Artificial Sequence
  Synthetic
gcacuguaauauuuuagaau

SEQ ID NO: 8629 - RNA, 22 nt, Artificial Sequence
  Synthetic
gugcacuguaauauuuuagaau

SEQ ID NO: 8630 - RNA, 24 nt, Artificial Sequence
  Synthetic
gagugcacuguaauauuuuagaau

SEQ ID NO: 8631 - RNA, 19 nt, Artificial Sequence
  Synthetic
guguaacucuuuaacgaau

SEQ ID NO: 8632 - RNA, 20 nt, Artificial Sequence
  Synthetic
gguguaacucuuuaacgaau

SEQ ID NO: 8633 - RNA, 23 nt, Artificial Sequence
  Synthetic
guugguguaacucuuuaacgaau

SEQ ID NO: 8634 - RNA, 18 nt, Artificial Sequence
  Synthetic
gaaaaguacauuucgaau

SEQ ID NO: 8635 - RNA, 22 nt, Artificial Sequence
  Synthetic
gaaugaaaaguacauuucgaau

SEQ ID NO: 8636 - RNA, 19 nt, Artificial Sequence
  Synthetic
guaaaaucugugaaggaau

SEQ ID NO: 8637 - RNA, 24 nt, Artificial Sequence
  Synthetic
guacaguaaaaucugugaaggaau

SEQ ID NO: 8638 - RNA, 20 nt, Artificial Sequence
  Synthetic
gacaaguaaaccuaaggaau

SEQ ID NO: 8639 - RNA, 21 nt, Artificial Sequence
  Synthetic
ggacaaguaaaccuaaggaau

SEQ ID NO: 8640 - RNA, 18 nt, Artificial Sequence
  Synthetic
gguauaauguuaaggaau

SEQ ID NO: 8641 - RNA, 18 nt, Artificial Sequence
  Synthetic
guuucuaaauagaggaau

SEQ ID NO: 8642 - RNA, 19 nt, Artificial Sequence
  Synthetic
gguuucuaaauagaggaau

SEQ ID NO: 8643 - RNA, 23 nt, Artificial Sequence
  Synthetic
gucugguuucuaaauagaggaau

SEQ ID NO: 8644 - RNA, 24 nt, Artificial Sequence
  Synthetic
ggucugguuucuaaauagaggaau

SEQ ID NO: 8645 - RNA, 20 nt, Artificial Sequence
  Synthetic
guaaaauuuccuugaggaau

SEQ ID NO: 8646 - RNA, 23 nt, Artificial Sequence
  Synthetic
gaaguaaaauuuccuugaggaau

SEQ ID NO: 8647 - RNA, 22 nt, Artificial Sequence
  Synthetic
gucauuuauaauacaggggaau

SEQ ID NO: 8648 - RNA, 18 nt, Artificial Sequence
  Synthetic
gaagcccguaaauggaau

SEQ ID NO: 8649 - RNA, 21 nt, Artificial Sequence
  Synthetic
gaagaagcccguaaauggaau

SEQ ID NO: 8650 - RNA, 22 nt, Artificial Sequence
  Synthetic
ggaagaagcccguaaauggaau

SEQ ID NO: 8651 - RNA, 18 nt, Artificial Sequence
  Synthetic
guagaguguaacuggaau

SEQ ID NO: 8652 - RNA, 19 nt, Artificial Sequence
  Synthetic
gguagaguguaacuggaau

SEQ ID NO: 8653 - RNA, 21 nt, Artificial Sequence
  Synthetic
gugguagaguguaacuggaau

SEQ ID NO: 8654 - RNA, 23 nt, Artificial Sequence
  Synthetic
gugugguagaguguaacuggaau

SEQ ID NO: 8655 - RNA, 18 nt, Artificial Sequence
  Synthetic
gauuuugauguguggaau

SEQ ID NO: 8656 - RNA, 19 nt, Artificial Sequence
  Synthetic
ggauuuugauguguggaau

SEQ ID NO: 8657 - RNA, 24 nt, Artificial Sequence
  Synthetic
gauauggauuuugauguguggaau

SEQ ID NO: 8658 - RNA, 18 nt, Artificial Sequence
  Synthetic
guggcaaucuguuggaau

SEQ ID NO: 8659 - RNA, 23 nt, Artificial Sequence
  Synthetic
guaaaguggcaaucuguuggaau

SEQ ID NO: 8660 - RNA, 18 nt, Artificial Sequence
  Synthetic
guagucagagaaaugaau

SEQ ID NO: 8661 - RNA, 19 nt, Artificial Sequence
  Synthetic
gguagucagagaaaugaau

SEQ ID NO: 8662 - RNA, 20 nt, Artificial Sequence
  Synthetic
ggguagucagagaaaugaau

SEQ ID NO: 8663 - RNA, 23 nt, Artificial Sequence
  Synthetic
guuggguagucagagaaaugaau

SEQ ID NO: 8664 - RNA, 24 nt, Artificial Sequence
  Synthetic
gguuggguagucagagaaaugaau

SEQ ID NO: 8665 - RNA, 18 nt, Artificial Sequence
  Synthetic
guugcuuaaacaaugaau

SEQ ID NO: 8666 - RNA, 19 nt, Artificial Sequence
  Synthetic
guagagcaugggaaugaau

SEQ ID NO: 8667 - RNA, 20 nt, Artificial Sequence
  Synthetic
gguagagcaugggaaugaau

SEQ ID NO: 8668 - RNA, 19 nt, Artificial Sequence
  Synthetic
gauauauaaugucaugaau

SEQ ID NO: 8669 - RNA, 18 nt, Artificial Sequence
  Synthetic
guagaaacaaaagugaau

SEQ ID NO: 8670 - RNA, 21 nt, Artificial Sequence
  Synthetic
gcuauuacuaagugagugaau

SEQ ID NO: 8671 - RNA, 24 nt, Artificial Sequence
  Synthetic
gaagcuauuacuaagugagugaau

SEQ ID NO: 8672 - RNA, 18 nt, Artificial Sequence
  Synthetic
guuaaucuuugggugaau

SEQ ID NO: 8673 - RNA, 23 nt, Artificial Sequence
  Synthetic
gaaauguuaaucuuugggugaau

SEQ ID NO: 8674 - RNA, 24 nt, Artificial Sequence
  Synthetic
ggaaauguuaaucuuugggugaau

SEQ ID NO: 8675 - RNA, 22 nt, Artificial Sequence
  Synthetic
gauaacaagagaaucugugaau

SEQ ID NO: 8676 - RNA, 23 nt, Artificial Sequence
  Synthetic
gaucacaucuagaccaauugaau

SEQ ID NO: 8677 - RNA, 22 nt, Artificial Sequence
  Synthetic
gacuaguugugaccaauugaau

SEQ ID NO: 8678 - RNA, 24 nt, Artificial Sequence
  Synthetic
gugacuaguugugaccaauugaau

SEQ ID NO: 8679 - RNA, 21 nt, Artificial Sequence
  Synthetic
gaucauggauaucaauugaau

SEQ ID NO: 8680 - RNA, 23 nt, Artificial Sequence
  Synthetic
gagaucauggauaucaauugaau

SEQ ID NO: 8681 - RNA, 24 nt, Artificial Sequence
  Synthetic
ggagaucauggauaucaauugaau

SEQ ID NO: 8682 - RNA, 21 nt, Artificial Sequence
  Synthetic
guauuccaaagacuauugaau

SEQ ID NO: 8683 - RNA, 20 nt, Artificial Sequence
  Synthetic
gaaaaagaaugguauugaau

SEQ ID NO: 8684 - RNA, 21 nt, Artificial Sequence
  Synthetic
ggaaaaagaaugguauugaau

SEQ ID NO: 8685 - RNA, 19 nt, Artificial Sequence
  Synthetic
gcuguuuuguuacuugaau

SEQ ID NO: 8686 - RNA, 18 nt, Artificial Sequence
  Synthetic
ggauaaacagccuugaau

SEQ ID NO: 8687 - RNA, 18 nt, Artificial Sequence
  Synthetic
gagaacaguuucuugaau

SEQ ID NO: 8688 - RNA, 22 nt, Artificial Sequence
  Synthetic
gccccuuccaaccucuuugaau

SEQ ID NO: 8689 - RNA, 18 nt, Artificial Sequence
  Synthetic
ggccaggaauuuuugaau

SEQ ID NO: 8690 - RNA, 22 nt, Artificial Sequence
  Synthetic
gccuggccaggaauuuuugaau

SEQ ID NO: 8691 - RNA, 24 nt, Artificial Sequence
  Synthetic
gcgccuggccaggaauuuuugaau

SEQ ID NO: 8692 - RNA, 24 nt, Artificial Sequence
  Synthetic
guacaguaauucuuuauaaauaau

SEQ ID NO: 8693 - RNA, 18 nt, Artificial Sequence
  Synthetic
ggacuggggcuaaauaau

SEQ ID NO: 8694 - RNA, 20 nt, Artificial Sequence
  Synthetic
gaggacuggggcuaaauaau

SEQ ID NO: 8695 - RNA, 22 nt, Artificial Sequence
  Synthetic
gagaggacuggggcuaaauaau

SEQ ID NO: 8696 - RNA, 22 nt, Artificial Sequence
  Synthetic
gccaaaacauuugcccaauaau

SEQ ID NO: 8697 - RNA, 20 nt, Artificial Sequence
  Synthetic
gcuuuaccuuuugcaauaau

SEQ ID NO: 8698 - RNA, 18 nt, Artificial Sequence
  Synthetic
gagccaguaccgaauaau

SEQ ID NO: 8699 - RNA, 23 nt, Artificial Sequence
  Synthetic
gaaaagagccaguaccgaauaau

SEQ ID NO: 8700 - RNA, 19 nt, Artificial Sequence
  Synthetic
gaagaccuauaauaauaau

SEQ ID NO: 8701 - RNA, 19 nt, Artificial Sequence
  Synthetic
gagacacuagaguaauaau

SEQ ID NO: 8702 - RNA, 23 nt, Artificial Sequence
  Synthetic
gaaagagacacuagaguaauaau

SEQ ID NO: 8703 - RNA, 19 nt, Artificial Sequence
  Synthetic
guauuauaucuuuaauaau

SEQ ID NO: 8704 - RNA, 21 nt, Artificial Sequence
  Synthetic
guguauuauaucuuuaauaau

SEQ ID NO: 8705 - RNA, 18 nt, Artificial Sequence
  Synthetic
gacucaacuucucauaau

SEQ ID NO: 8706 - RNA, 23 nt, Artificial Sequence
  Synthetic
gauuuugcuuuagugcagauaau

SEQ ID NO: 8707 - RNA, 18 nt, Artificial Sequence
  Synthetic
gauagcuugauggauaau

SEQ ID NO: 8708 - RNA, 19 nt, Artificial Sequence
  Synthetic
ggauagcuugauggauaau

SEQ ID NO: 8709 - RNA, 21 nt, Artificial Sequence
  Synthetic
guggauagcuugauggauaau

SEQ ID NO: 8710 - RNA, 20 nt, Artificial Sequence
  Synthetic
gaauuauuucuucugauaau

SEQ ID NO: 8711 - RNA, 24 nt, Artificial Sequence
  Synthetic
gcuauucuagaucuuuuauauaau

SEQ ID NO: 8712 - RNA, 19 nt, Artificial Sequence
  Synthetic
gagcuugcaggauuauaau

SEQ ID NO: 8713 - RNA, 20 nt, Artificial Sequence
  Synthetic
gaauuuaauacaguuauaau

SEQ ID NO: 8714 - RNA, 19 nt, Artificial Sequence
  Synthetic
guagcuaccacucacuaau

SEQ ID NO: 8715 - RNA, 20 nt, Artificial Sequence
  Synthetic
gguagcuaccacucacuaau

SEQ ID NO: 8716 - RNA, 19 nt, Artificial Sequence
  Synthetic
guaaugcaauaaaccuaau

SEQ ID NO: 8717 - RNA, 22 nt, Artificial Sequence
  Synthetic
gcaaaucaaaagaugagcuaau

SEQ ID NO: 8718 - RNA, 18 nt, Artificial Sequence
  Synthetic
guucuaucagcaucuaau

SEQ ID NO: 8719 - RNA, 20 nt, Artificial Sequence
  Synthetic
guguucuaucagcaucuaau

SEQ ID NO: 8720 - RNA, 19 nt, Artificial Sequence
  Synthetic
guagggcgacagaucuaau

SEQ ID NO: 8721 - RNA, 20 nt, Artificial Sequence
  Synthetic
gguagggcgacagaucuaau

SEQ ID NO: 8722 - RNA, 22 nt, Artificial Sequence
  Synthetic
gagguagggcgacagaucuaau

SEQ ID NO: 8723 - RNA, 20 nt, Artificial Sequence
  Synthetic
gucaucuccuuucaaguaau

SEQ ID NO: 8724 - RNA, 20 nt, Artificial Sequence
  Synthetic
guuguaacauaaagaguaau

SEQ ID NO: 8725 - RNA, 21 nt, Artificial Sequence
  Synthetic
gguuguaacauaaagaguaau

SEQ ID NO: 8726 - RNA, 19 nt, Artificial Sequence
  Synthetic
guuaauuuuguuuaguaau

SEQ ID NO: 8727 - RNA, 24 nt, Artificial Sequence
  Synthetic
gcuucuugauaauaguuugguaau

SEQ ID NO: 8728 - RNA, 22 nt, Artificial Sequence
  Synthetic
gcacaggguggacaaauguaau

SEQ ID NO: 8729 - RNA, 22 nt, Artificial Sequence
  Synthetic
gcuuucugauggucuuuguaau

SEQ ID NO: 8730 - RNA, 20 nt, Artificial Sequence
  Synthetic
guugaaaaaggguuuguaau

SEQ ID NO: 8731 - RNA, 24 nt, Artificial Sequence
  Synthetic
gauccaaaaaaaauguucauuaau

SEQ ID NO: 8732 - RNA, 24 nt, Artificial Sequence
  Synthetic
guuuacuuucucuuaccgauuaau

SEQ ID NO: 8733 - RNA, 24 nt, Artificial Sequence
  Synthetic
gaaauucaaaugaaaaggauuaau

SEQ ID NO: 8734 - RNA, 20 nt, Artificial Sequence
  Synthetic
gcuuauauuaguauauuaau

SEQ ID NO: 8735 - RNA, 22 nt, Artificial Sequence
  Synthetic
gagcuuauauuaguauauuaau

SEQ ID NO: 8736 - RNA, 24 nt, Artificial Sequence
  Synthetic
gaccaauuucaauauuuacuuaau

SEQ ID NO: 8737 - RNA, 23 nt, Artificial Sequence
  Synthetic
gcaaaugaauuuuacagcuuaau

SEQ ID NO: 8738 - RNA, 19 nt, Artificial Sequence
  Synthetic
gaauuaugccgcaguuaau

SEQ ID NO: 8739 - RNA, 22 nt, Artificial Sequence
  Synthetic
gauuuuuucuacaaagguuaau

SEQ ID NO: 8740 - RNA, 24 nt, Artificial Sequence
  Synthetic
gugauuuuuucuacaaagguuaau

SEQ ID NO: 8741 - RNA, 22 nt, Artificial Sequence
  Synthetic
gcuaacaagaagaaauguuaau

SEQ ID NO: 8742 - RNA, 22 nt, Artificial Sequence
  Synthetic
guuuuauccuuuuguauuuaau

SEQ ID NO: 8743 - RNA, 24 nt, Artificial Sequence
  Synthetic
gaguuuuauccuuuuguauuuaau

SEQ ID NO: 8744 - RNA, 19 nt, Artificial Sequence
  Synthetic
guuaguuuuaaucuuuaau

SEQ ID NO: 8745 - RNA, 24 nt, Artificial Sequence
  Synthetic
gacaaucuuaugagaaauuuuaau

SEQ ID NO: 8746 - RNA, 18 nt, Artificial Sequence
  Synthetic
gauaucugucauuuuaau

SEQ ID NO: 8747 - RNA, 20 nt, Artificial Sequence
  Synthetic
gugauaucugucauuuuaau

SEQ ID NO: 8748 - RNA, 21 nt, Artificial Sequence
  Synthetic
ggugauaucugucauuuuaau

SEQ ID NO: 8749 - RNA, 19 nt, Artificial Sequence
  Synthetic
guggacuuuagcuuuuaau

SEQ ID NO: 8750 - RNA, 23 nt, Artificial Sequence
  Synthetic
gccuguggacuuuagcuuuuaau

SEQ ID NO: 8751 - RNA, 24 nt, Artificial Sequence
  Synthetic
ggccuguggacuuuagcuuuuaau

SEQ ID NO: 8752 - RNA, 22 nt, Artificial Sequence
  Synthetic
guacuuaaucugaaguuuuaau

SEQ ID NO: 8753 - RNA, 19 nt, Artificial Sequence
  Synthetic
gaucaauacccuaaaacau

SEQ ID NO: 8754 - RNA, 21 nt, Artificial Sequence
  Synthetic
gagaucaauacccuaaaacau

SEQ ID NO: 8755 - RNA, 24 nt, Artificial Sequence
  Synthetic
gaagagaucaauacccuaaaacau

SEQ ID NO: 8756 - RNA, 22 nt, Artificial Sequence
  Synthetic
gaaaaauuagcaagacaaacau

SEQ ID NO: 8757 - RNA, 21 nt, Artificial Sequence
  Synthetic
guaaacaaaacacucaaacau

SEQ ID NO: 8758 - RNA, 18 nt, Artificial Sequence
  Synthetic
gacaucaacuagaaacau

SEQ ID NO: 8759 - RNA, 21 nt, Artificial Sequence
  Synthetic
guguuuuugaaaauuaaacau

SEQ ID NO: 8760 - RNA, 18 nt, Artificial Sequence
  Synthetic
ggcaagucaguuaaacau

SEQ ID NO: 8761 - RNA, 18 nt, Artificial Sequence
  Synthetic
guccuuuauccacaacau

SEQ ID NO: 8762 - RNA, 22 nt, Artificial Sequence
  Synthetic
gccaguccuuuauccacaacau

SEQ ID NO: 8763 - RNA, 24 nt, Artificial Sequence
  Synthetic
gcccuacuuccuucuccccaacau

SEQ ID NO: 8764 - RNA, 21 nt, Artificial Sequence
  Synthetic
guaaguacguuuuugcaacau

SEQ ID NO: 8765 - RNA, 24 nt, Artificial Sequence
  Synthetic
guaguaaguacguuuuugcaacau

SEQ ID NO: 8766 - RNA, 19 nt, Artificial Sequence
  Synthetic
guaagacugaaaucaacau

SEQ ID NO: 8767 - RNA, 20 nt, Artificial Sequence
  Synthetic
gaaacagcaaaauucaacau

SEQ ID NO: 8768 - RNA, 22 nt, Artificial Sequence
  Synthetic
gagaaacagcaaaauucaacau

SEQ ID NO: 8769 - RNA, 24 nt, Artificial Sequence
  Synthetic
gugagaaacagcaaaauucaacau

SEQ ID NO: 8770 - RNA, 22 nt, Artificial Sequence
  Synthetic
gcagggguuaaaacuucaacau

SEQ ID NO: 8771 - RNA, 22 nt, Artificial Sequence
  Synthetic
gucuuugauacagcaagaacau

SEQ ID NO: 8772 - RNA, 24 nt, Artificial Sequence
  Synthetic
gagucuuugauacagcaagaacau

SEQ ID NO: 8773 - RNA, 19 nt, Artificial Sequence
  Synthetic
gcuuuuauuauaagaacau

SEQ ID NO: 8774 - RNA, 20 nt, Artificial Sequence
  Synthetic
ggcuuuuauuauaagaacau

SEQ ID NO: 8775 - RNA, 18 nt, Artificial Sequence
  Synthetic
gaaaguguagcagaacau

SEQ ID NO: 8776 - RNA, 20 nt, Artificial Sequence
  Synthetic
gagaaaguguagcagaacau

SEQ ID NO: 8777 - RNA, 19 nt, Artificial Sequence
  Synthetic
gucaggagaauuagaacau

SEQ ID NO: 8778 - RNA, 22 nt, Artificial Sequence
  Synthetic
gaucucugacuccaaggaacau

SEQ ID NO: 8779 - RNA, 18 nt, Artificial Sequence
  Synthetic
gggcauaagaaggaacau

SEQ ID NO: 8780 - RNA, 21 nt, Artificial Sequence
  Synthetic
gcugggcauaagaaggaacau

SEQ ID NO: 8781 - RNA, 20 nt, Artificial Sequence
  Synthetic
guauaaaguaaaaugaacau

SEQ ID NO: 8782 - RNA, 22 nt, Artificial Sequence
  Synthetic
guguauaaaguaaaaugaacau

SEQ ID NO: 8783 - RNA, 18 nt, Artificial Sequence
  Synthetic
gucagaucuggguaacau

SEQ ID NO: 8784 - RNA, 20 nt, Artificial Sequence
  Synthetic
gaaugucguuccuguaacau

SEQ ID NO: 8785 - RNA, 22 nt, Artificial Sequence
  Synthetic
gugaaugucguuccuguaacau

SEQ ID NO: 8786 - RNA, 23 nt, Artificial Sequence
  Synthetic
ggugaaugucguuccuguaacau

SEQ ID NO: 8787 - RNA, 19 nt, Artificial Sequence
  Synthetic
gugggcaccauauuaacau

SEQ ID NO: 8788 - RNA, 19 nt, Artificial Sequence
  Synthetic
gaaguaauuaucuuaacau

SEQ ID NO: 8789 - RNA, 20 nt, Artificial Sequence
  Synthetic
ggaaguaauuaucuuaacau

SEQ ID NO: 8790 - RNA, 22 nt, Artificial Sequence
  Synthetic
gcaauaccagccaaguuaacau

SEQ ID NO: 8791 - RNA, 23 nt, Artificial Sequence
  Synthetic
guuuuaguagcccaauuuaacau

SEQ ID NO: 8792 - RNA, 19 nt, Artificial Sequence
  Synthetic
gcucugaugucuuuaacau

SEQ ID NO: 8793 - RNA, 20 nt, Artificial Sequence
  Synthetic
ggcucugaugucuuuaacau

SEQ ID NO: 8794 - RNA, 22 nt, Artificial Sequence
  Synthetic
guggcucugaugucuuuaacau

SEQ ID NO: 8795 - RNA, 21 nt, Artificial Sequence
  Synthetic
guccgggcuugagauacacau

SEQ ID NO: 8796 - RNA, 24 nt, Artificial Sequence
  Synthetic
gauguccgggcuugagauacacau

SEQ ID NO: 8797 - RNA, 18 nt, Artificial Sequence
  Synthetic
guuuaauucauuacacau

SEQ ID NO: 8798 - RNA, 21 nt, Artificial Sequence
  Synthetic
gauguuuaauucauuacacau

SEQ ID NO: 8799 - RNA, 21 nt, Artificial Sequence
  Synthetic
gcacaauaaagccugccacau

SEQ ID NO: 8800 - RNA, 18 nt, Artificial Sequence
  Synthetic
gaaccuugccuagcacau

SEQ ID NO: 8801 - RNA, 21 nt, Artificial Sequence
  Synthetic
gaagaaccuugccuagcacau

SEQ ID NO: 8802 - RNA, 20 nt, Artificial Sequence
  Synthetic
guaacugaguuccugcacau

SEQ ID NO: 8803 - RNA, 18 nt, Artificial Sequence
  Synthetic
ggguucucuguugcacau

SEQ ID NO: 8804 - RNA, 23 nt, Artificial Sequence
  Synthetic
guuauggguucucuguugcacau

SEQ ID NO: 8805 - RNA, 18 nt, Artificial Sequence
  Synthetic
ggccaguaauacucacau

SEQ ID NO: 8806 - RNA, 20 nt, Artificial Sequence
  Synthetic
gcaauuugcauuagucacau

SEQ ID NO: 8807 - RNA, 19 nt, Artificial Sequence
  Synthetic
guauuggaugcugucacau

SEQ ID NO: 8808 - RNA, 21 nt, Artificial Sequence
  Synthetic
gaguauuggaugcugucacau

SEQ ID NO: 8809 - RNA, 24 nt, Artificial Sequence
  Synthetic
gauuaauucuucucugaaagacau

SEQ ID NO: 8810 - RNA, 19 nt, Artificial Sequence
  Synthetic
gacaugcauauuaagacau

SEQ ID NO: 8811 - RNA, 21 nt, Artificial Sequence
  Synthetic
gagacaugcauauuaagacau

SEQ ID NO: 8812 - RNA, 22 nt, Artificial Sequence
  Synthetic
ggagacaugcauauuaagacau

SEQ ID NO: 8813 - RNA, 19 nt, Artificial Sequence
  Synthetic
guucaaucaagggagacau

SEQ ID NO: 8814 - RNA, 20 nt, Artificial Sequence
  Synthetic
gguucaaucaagggagacau

SEQ ID NO: 8815 - RNA, 22 nt, Artificial Sequence
  Synthetic
gauucaagaaaaaaauagacau

SEQ ID NO: 8816 - RNA, 20 nt, Artificial Sequence
  Synthetic
gaccugucuccauaggacau

SEQ ID NO: 8817 - RNA, 23 nt, Artificial Sequence
  Synthetic
gcccuacuaccuggacaugacau

SEQ ID NO: 8818 - RNA, 23 nt, Artificial Sequence
  Synthetic
gucuuuauaugugaugaugacau

SEQ ID NO: 8819 - RNA, 23 nt, Artificial Sequence
  Synthetic
gcacauuauucugucagugacau

SEQ ID NO: 8820 - RNA, 19 nt, Artificial Sequence
  Synthetic
guuagugagauaaauacau

SEQ ID NO: 8821 - RNA, 20 nt, Artificial Sequence
  Synthetic
guucucaccucagcauacau

SEQ ID NO: 8822 - RNA, 21 nt, Artificial Sequence
  Synthetic
gguucucaccucagcauacau

SEQ ID NO: 8823 - RNA, 18 nt, Artificial Sequence
  Synthetic
gaccugggaguuauacau

SEQ ID NO: 8824 - RNA, 19 nt, Artificial Sequence
  Synthetic
ggaccugggaguuauacau

SEQ ID NO: 8825 - RNA, 20 nt, Artificial Sequence
  Synthetic
gggaccugggaguuauacau

SEQ ID NO: 8826 - RNA, 19 nt, Artificial Sequence
  Synthetic
guccuucuugugacuacau

SEQ ID NO: 8827 - RNA, 23 nt, Artificial Sequence
  Synthetic
gaauguccuucuugugacuacau

SEQ ID NO: 8828 - RNA, 22 nt, Artificial Sequence
  Synthetic
gaaaaguauuuaccuacuacau

SEQ ID NO: 8829 - RNA, 23 nt, Artificial Sequence
  Synthetic
ggaaaaguauuuaccuacuacau

SEQ ID NO: 8830 - RNA, 24 nt, Artificial Sequence
  Synthetic
gggaaaaguauuuaccuacuacau

SEQ ID NO: 8831 - RNA, 24 nt, Artificial Sequence
  Synthetic
gcuuuacauauauuugaccuacau

SEQ ID NO: 8832 - RNA, 18 nt, Artificial Sequence
  Synthetic
gaacauucccugcuacau

SEQ ID NO: 8833 - RNA, 21 nt, Artificial Sequence
  Synthetic
gcagaacauucccugcuacau

SEQ ID NO: 8834 - RNA, 23 nt, Artificial Sequence
  Synthetic
gagcagaacauucccugcuacau

SEQ ID NO: 8835 - RNA, 24 nt, Artificial Sequence
  Synthetic
ggagcagaacauucccugcuacau

SEQ ID NO: 8836 - RNA, 20 nt, Artificial Sequence
  Synthetic
guaaaugcaaggugcuacau

SEQ ID NO: 8837 - RNA, 18 nt, Artificial Sequence
  Synthetic
gggggugagccaguacau

SEQ ID NO: 8838 - RNA, 22 nt, Artificial Sequence
  Synthetic
gacugggggugagccaguacau

SEQ ID NO: 8839 - RNA, 18 nt, Artificial Sequence
  Synthetic
guacguagaaacguacau

SEQ ID NO: 8840 - RNA, 23 nt, Artificial Sequence
  Synthetic
gaauaguacguagaaacguacau

SEQ ID NO: 8841 - RNA, 23 nt, Artificial Sequence
  Synthetic
guuuaagugcuauuuuauuacau

SEQ ID NO: 8842 - RNA, 20 nt, Artificial Sequence
  Synthetic
gcaaucacacuuaaaaccau

SEQ ID NO: 8843 - RNA, 23 nt, Artificial Sequence
  Synthetic
gacuuuucaaacucggaaaccau

SEQ ID NO: 8844 - RNA, 18 nt, Artificial Sequence
  Synthetic
gagucuuaccagaaccau

SEQ ID NO: 8845 - RNA, 21 nt, Artificial Sequence
  Synthetic
guagagucuuaccagaaccau

SEQ ID NO: 8846 - RNA, 24 nt, Artificial Sequence
  Synthetic
gauguagagucuuaccagaaccau

SEQ ID NO: 8847 - RNA, 21 nt, Artificial Sequence
  Synthetic
gccuuaauauaucagaaccau

SEQ ID NO: 8848 - RNA, 22 nt, Artificial Sequence
  Synthetic
ggccuuaauauaucagaaccau

SEQ ID NO: 8849 - RNA, 23 nt, Artificial Sequence
  Synthetic
gggccuuaauauaucagaaccau

SEQ ID NO: 8850 - RNA, 22 nt, Artificial Sequence
  Synthetic
guuuuuaaaaaauaaacaccau

SEQ ID NO: 8851 - RNA, 20 nt, Artificial Sequence
  Synthetic
gaaauaugcuucaagaccau

SEQ ID NO: 8852 - RNA, 22 nt, Artificial Sequence
  Synthetic
gagaaauaugcuucaagaccau

SEQ ID NO: 8853 - RNA, 23 nt, Artificial Sequence
  Synthetic
ggagaaauaugcuucaagaccau

SEQ ID NO: 8854 - RNA, 19 nt, Artificial Sequence
  Synthetic
guagacagcuugcgaccau

SEQ ID NO: 8855 - RNA, 20 nt, Artificial Sequence
  Synthetic
gguagacagcuugcgaccau

SEQ ID NO: 8856 - RNA, 19 nt, Artificial Sequence
  Synthetic
gugaaacuggauggaccau

SEQ ID NO: 8857 - RNA, 20 nt, Artificial Sequence
  Synthetic
ggugaaacuggauggaccau

SEQ ID NO: 8858 - RNA, 22 nt, Artificial Sequence
  Synthetic
guggugaaacuggauggaccau

SEQ ID NO: 8859 - RNA, 23 nt, Artificial Sequence
  Synthetic
gguggugaaacuggauggaccau

SEQ ID NO: 8860 - RNA, 24 nt, Artificial Sequence
  Synthetic
ggguggugaaacuggauggaccau

SEQ ID NO: 8861 - RNA, 24 nt, Artificial Sequence
  Synthetic
gcccccagacgcuuaugcuaccau

SEQ ID NO: 8862 - RNA, 23 nt, Artificial Sequence
  Synthetic
guccuugacucucuuggccccau

SEQ ID NO: 8863 - RNA, 19 nt, Artificial Sequence
  Synthetic
gugucuacauuguccccau

SEQ ID NO: 8864 - RNA, 24 nt, Artificial Sequence
  Synthetic
gcuuuaagaaguuauuuuccccau

SEQ ID NO: 8865 - RNA, 21 nt, Artificial Sequence
  Synthetic
guacagagcauaaaaucccau

SEQ ID NO: 8866 - RNA, 23 nt, Artificial Sequence
  Synthetic
gaguacagagcauaaaaucccau

SEQ ID NO: 8867 - RNA, 19 nt, Artificial Sequence
  Synthetic
gaacagacuucuuucccau

SEQ ID NO: 8868 - RNA, 21 nt, Artificial Sequence
  Synthetic
gcgaacagacuucuuucccau

SEQ ID NO: 8869 - RNA, 20 nt, Artificial Sequence
  Synthetic
guccacuccguuuuagccau

SEQ ID NO: 8870 - RNA, 21 nt, Artificial Sequence
  Synthetic
gguccacuccguuuuagccau

SEQ ID NO: 8871 - RNA, 18 nt, Artificial Sequence
  Synthetic
gauuucuuccauggccau

SEQ ID NO: 8872 - RNA, 24 nt, Artificial Sequence
  Synthetic
guuucugauuucuuccauggccau

SEQ ID NO: 8873 - RNA, 18 nt, Artificial Sequence
  Synthetic
gagauaccuaguggccau

SEQ ID NO: 8874 - RNA, 19 nt, Artificial Sequence
  Synthetic
ggagauaccuaguggccau

SEQ ID NO: 8875 - RNA, 21 nt, Artificial Sequence
  Synthetic
gaggagauaccuaguggccau

SEQ ID NO: 8876 - RNA, 18 nt, Artificial Sequence
  Synthetic
gcaauuaggggaugccau

SEQ ID NO: 8877 - RNA, 18 nt, Artificial Sequence
  Synthetic
ggucugaggccuugccau

SEQ ID NO: 8878 - RNA, 19 nt, Artificial Sequence
  Synthetic
gggucugaggccuugccau

SEQ ID NO: 8879 - RNA, 20 nt, Artificial Sequence
  Synthetic
gcaacaacaagugcauccau

SEQ ID NO: 8880 - RNA, 21 nt, Artificial Sequence
  Synthetic
ggcaacaacaagugcauccau

SEQ ID NO: 8881 - RNA, 18 nt, Artificial Sequence
  Synthetic
gagagugucaugauccau

SEQ ID NO: 8882 - RNA, 22 nt, Artificial Sequence
  Synthetic
gccagagagugucaugauccau

SEQ ID NO: 8883 - RNA, 23 nt, Artificial Sequence
  Synthetic
ggccagagagugucaugauccau

SEQ ID NO: 8884 - RNA, 24 nt, Artificial Sequence
  Synthetic
gggccagagagugucaugauccau

SEQ ID NO: 8885 - RNA, 19 nt, Artificial Sequence
  Synthetic
gugauguuuacauauccau

SEQ ID NO: 8886 - RNA, 20 nt, Artificial Sequence
  Synthetic
ggugauguuuacauauccau

SEQ ID NO: 8887 - RNA, 22 nt, Artificial Sequence
  Synthetic
guggugauguuuacauauccau

SEQ ID NO: 8888 - RNA, 23 nt, Artificial Sequence
  Synthetic
gguggugauguuuacauauccau

SEQ ID NO: 8889 - RNA, 23 nt, Artificial Sequence
  Synthetic
gccaccaacaauauucacuccau

SEQ ID NO: 8890 - RNA, 19 nt, Artificial Sequence
  Synthetic
guuugcagaaccccuccau

SEQ ID NO: 8891 - RNA, 22 nt, Artificial Sequence
  Synthetic
gcaguuugcagaaccccuccau

SEQ ID NO: 8892 - RNA, 24 nt, Artificial Sequence
  Synthetic
gugcaguuugcagaaccccuccau

SEQ ID NO: 8893 - RNA, 18 nt, Artificial Sequence
  Synthetic
gaggacuggcuccuccau

SEQ ID NO: 8894 - RNA, 23 nt, Artificial Sequence
  Synthetic
gucauacaugcuguuuucuccau

SEQ ID NO: 8895 - RNA, 20 nt, Artificial Sequence
  Synthetic
gucugauuuuacucuuccau

SEQ ID NO: 8896 - RNA, 21 nt, Artificial Sequence
  Synthetic
gaaucuugucacuucuuccau

SEQ ID NO: 8897 - RNA, 18 nt, Artificial Sequence
  Synthetic
gguaaguuucaguuccau

SEQ ID NO: 8898 - RNA, 21 nt, Artificial Sequence
  Synthetic
guugguaaguuucaguuccau

SEQ ID NO: 8899 - RNA, 24 nt, Artificial Sequence
  Synthetic
guuguugguaaguuucaguuccau

SEQ ID NO: 8900 - RNA, 18 nt, Artificial Sequence
  Synthetic
guuuauuaucuuuuccau

SEQ ID NO: 8901 - RNA, 19 nt, Artificial Sequence
  Synthetic
gucuauacacaaaaagcau

SEQ ID NO: 8902 - RNA, 24 nt, Artificial Sequence
  Synthetic
gacaaaucaacaacauaaaagcau

SEQ ID NO: 8903 - RNA, 19 nt, Artificial Sequence
  Synthetic
gugauacaacucuaagcau

SEQ ID NO: 8904 - RNA, 22 nt, Artificial Sequence
  Synthetic
guauuccucauaagguaagcau

SEQ ID NO: 8905 - RNA, 19 nt, Artificial Sequence
  Synthetic
guuaauagggaaacagcau

SEQ ID NO: 8906 - RNA, 20 nt, Artificial Sequence
  Synthetic
gauagauauaauaccagcau

SEQ ID NO: 8907 - RNA, 18 nt, Artificial Sequence
  Synthetic
gaagacgaauaucagcau

SEQ ID NO: 8908 - RNA, 19 nt, Artificial Sequence
  Synthetic
ggaagacgaauaucagcau

SEQ ID NO: 8909 - RNA, 21 nt, Artificial Sequence
  Synthetic
guggaagacgaauaucagcau

SEQ ID NO: 8910 - RNA, 22 nt, Artificial Sequence
  Synthetic
gguggaagacgaauaucagcau

SEQ ID NO: 8911 - RNA, 23 nt, Artificial Sequence
  Synthetic
ggguggaagacgaauaucagcau

SEQ ID NO: 8912 - RNA, 24 nt, Artificial Sequence
  Synthetic
gggguggaagacgaauaucagcau

SEQ ID NO: 8913 - RNA, 18 nt, Artificial Sequence
  Synthetic
gauuuuaaaguucagcau

SEQ ID NO: 8914 - RNA, 22 nt, Artificial Sequence
  Synthetic
gaaagauuuuaaaguucagcau

SEQ ID NO: 8915 - RNA, 24 nt, Artificial Sequence
  Synthetic
gagaaagauuuuaaaguucagcau

SEQ ID NO: 8916 - RNA, 18 nt, Artificial Sequence
  Synthetic
gugacuucaggagagcau

SEQ ID NO: 8917 - RNA, 21 nt, Artificial Sequence
  Synthetic
guaauucuuaugguagagcau

SEQ ID NO: 8918 - RNA, 21 nt, Artificial Sequence
  Synthetic
gccacugagguaacugagcau

SEQ ID NO: 8919 - RNA, 22 nt, Artificial Sequence
  Synthetic
ggccacugagguaacugagcau

SEQ ID NO: 8920 - RNA, 23 nt, Artificial Sequence
  Synthetic
gaccaacaucacaaagguagcau

SEQ ID NO: 8921 - RNA, 24 nt, Artificial Sequence
  Synthetic
ggaccaacaucacaaagguagcau

SEQ ID NO: 8922 - RNA, 19 nt, Artificial Sequence
  Synthetic
gugaucagaaaacacgcau

SEQ ID NO: 8923 - RNA, 20 nt, Artificial Sequence
  Synthetic
ggugaucagaaaacacgcau

SEQ ID NO: 8924 - RNA, 19 nt, Artificial Sequence
  Synthetic
gcauagauuccaaaggcau

SEQ ID NO: 8925 - RNA, 23 nt, Artificial Sequence
  Synthetic
gaaagcauagauuccaaaggcau

SEQ ID NO: 8926 - RNA, 18 nt, Artificial Sequence
  Synthetic
gagaggggauaaaggcau

SEQ ID NO: 8927 - RNA, 21 nt, Artificial Sequence
  Synthetic
gaagagaggggauaaaggcau

SEQ ID NO: 8928 - RNA, 23 nt, Artificial Sequence
  Synthetic
gcgaagagaggggauaaaggcau

SEQ ID NO: 8929 - RNA, 19 nt, Artificial Sequence
  Synthetic
gaacugcauuucuaggcau

SEQ ID NO: 8930 - RNA, 21 nt, Artificial Sequence
  Synthetic
guuauuagcugguaguggcau

SEQ ID NO: 8931 - RNA, 24 nt, Artificial Sequence
  Synthetic
gcuuuuuagaggaggagguggcau

SEQ ID NO: 8932 - RNA, 21 nt, Artificial Sequence
  Synthetic
guauuuucucugaacaugcau

SEQ ID NO: 8933 - RNA, 23 nt, Artificial Sequence
  Synthetic
gcucaagguggugacaggugcau

SEQ ID NO: 8934 - RNA, 19 nt, Artificial Sequence
  Synthetic
guacgaugaaaaaaaucau

SEQ ID NO: 8935 - RNA, 24 nt, Artificial Sequence
  Synthetic
guuucuuugcuuuucugcaaucau

SEQ ID NO: 8936 - RNA, 18 nt, Artificial Sequence
  Synthetic
gaaguuauauuuaaucau

SEQ ID NO: 8937 - RNA, 23 nt, Artificial Sequence
  Synthetic
guuuauaauuugucugcuaucau

SEQ ID NO: 8938 - RNA, 24 nt, Artificial Sequence
  Synthetic
guauuaucaauucaccauuaucau

SEQ ID NO: 8939 - RNA, 20 nt, Artificial Sequence
  Synthetic
gcaggacuuuagucccucau

SEQ ID NO: 8940 - RNA, 23 nt, Artificial Sequence
  Synthetic
guauuuccuauacauuagcucau

SEQ ID NO: 8941 - RNA, 20 nt, Artificial Sequence
  Synthetic
gaacugagaauaaaucucau

SEQ ID NO: 8942 - RNA, 21 nt, Artificial Sequence
  Synthetic
gcuggaauuuauuuuucucau

SEQ ID NO: 8943 - RNA, 22 nt, Artificial Sequence
  Synthetic
ggcuggaauuuauuuuucucau

SEQ ID NO: 8944 - RNA, 24 nt, Artificial Sequence
  Synthetic
gaaauagggcauggaaaaagucau

SEQ ID NO: 8945 - RNA, 20 nt, Artificial Sequence
  Synthetic
gcugucugagggccagucau

SEQ ID NO: 8946 - RNA, 23 nt, Artificial Sequence
  Synthetic
gaugcugucugagggccagucau

SEQ ID NO: 8947 - RNA, 18 nt, Artificial Sequence
  Synthetic
ggauuacucggcagucau

SEQ ID NO: 8948 - RNA, 19 nt, Artificial Sequence
  Synthetic
gggauuacucggcagucau

SEQ ID NO: 8949 - RNA, 22 nt, Artificial Sequence
  Synthetic
gaaccacaguuccacaggucau

SEQ ID NO: 8950 - RNA, 23 nt, Artificial Sequence
  Synthetic
ggaaccacaguuccacaggucau

SEQ ID NO: 8951 - RNA, 19 nt, Artificial Sequence
  Synthetic
gaaaaugagcaagugucau

SEQ ID NO: 8952 - RNA, 21 nt, Artificial Sequence
  Synthetic
gugaaaaugagcaagugucau

SEQ ID NO: 8953 - RNA, 23 nt, Artificial Sequence
  Synthetic
gugugaaaaugagcaagugucau

SEQ ID NO: 8954 - RNA, 19 nt, Artificial Sequence
  Synthetic
gauaggauauaugugucau

SEQ ID NO: 8955 - RNA, 19 nt, Artificial Sequence
  Synthetic
gacccucauaggcauucau

SEQ ID NO: 8956 - RNA, 20 nt, Artificial Sequence
  Synthetic
ggacccucauaggcauucau

SEQ ID NO: 8957 - RNA, 24 nt, Artificial Sequence
  Synthetic
gcuaccuguuacccccagauucau

SEQ ID NO: 8958 - RNA, 20 nt, Artificial Sequence
  Synthetic
gacaagcauuagaacuucau

SEQ ID NO: 8959 - RNA, 21 nt, Artificial Sequence
  Synthetic
ggacaagcauuagaacuucau

SEQ ID NO: 8960 - RNA, 22 nt, Artificial Sequence
  Synthetic
gggacaagcauuagaacuucau

SEQ ID NO: 8961 - RNA, 24 nt, Artificial Sequence
  Synthetic
gagggacaagcauuagaacuucau

SEQ ID NO: 8962 - RNA, 21 nt, Artificial Sequence
  Synthetic
gcucaauacugccugcuucau

SEQ ID NO: 8963 - RNA, 19 nt, Artificial Sequence
  Synthetic
gugauuuaguuaucuucau

SEQ ID NO: 8964 - RNA, 22 nt, Artificial Sequence
  Synthetic
gcagugauuuaguuaucuucau

SEQ ID NO: 8965 - RNA, 18 nt, Artificial Sequence
  Synthetic
ggucucuggauucuucau

SEQ ID NO: 8966 - RNA, 18 nt, Artificial Sequence
  Synthetic
ggaagggacagcguucau

SEQ ID NO: 8967 - RNA, 19 nt, Artificial Sequence
  Synthetic
gggaagggacagcguucau

SEQ ID NO: 8968 - RNA, 20 nt, Artificial Sequence
  Synthetic
ggggaagggacagcguucau

SEQ ID NO: 8969 - RNA, 22 nt, Artificial Sequence
  Synthetic
gcggggaagggacagcguucau

SEQ ID NO: 8970 - RNA, 18 nt, Artificial Sequence
  Synthetic
gaaggaguggggguucau

SEQ ID NO: 8971 - RNA, 20 nt, Artificial Sequence
  Synthetic
gagaaggaguggggguucau

SEQ ID NO: 8972 - RNA, 21 nt, Artificial Sequence
  Synthetic
ggagaaggaguggggguucau

SEQ ID NO: 8973 - RNA, 22 nt, Artificial Sequence
  Synthetic
gggagaaggaguggggguucau

SEQ ID NO: 8974 - RNA, 24 nt, Artificial Sequence
  Synthetic
gagggagaaggaguggggguucau

SEQ ID NO: 8975 - RNA, 22 nt, Artificial Sequence
  Synthetic
gaauagcuugauagcuguucau

SEQ ID NO: 8976 - RNA, 23 nt, Artificial Sequence
  Synthetic
gaaaaaaaaaacuauacuuucau

SEQ ID NO: 8977 - RNA, 19 nt, Artificial Sequence
  Synthetic
gaaaagcacgauuuuucau

SEQ ID NO: 8978 - RNA, 24 nt, Artificial Sequence
  Synthetic
guaucgaaaagcacgauuuuucau

SEQ ID NO: 8979 - RNA, 21 nt, Artificial Sequence
  Synthetic
gauuguuuuuuauaaaaagau

SEQ ID NO: 8980 - RNA, 23 nt, Artificial Sequence
  Synthetic
gagauuguuuuuuauaaaaagau

SEQ ID NO: 8981 - RNA, 19 nt, Artificial Sequence
  Synthetic
gucuggggugacaaaagau

SEQ ID NO: 8982 - RNA, 21 nt, Artificial Sequence
  Synthetic
gugucuggggugacaaaagau

SEQ ID NO: 8983 - RNA, 22 nt, Artificial Sequence
  Synthetic
ggugucuggggugacaaaagau

SEQ ID NO: 8984 - RNA, 24 nt, Artificial Sequence
  Synthetic
guggugucuggggugacaaaagau

SEQ ID NO: 8985 - RNA, 20 nt, Artificial Sequence
  Synthetic
gaaacauguguaagaaagau

SEQ ID NO: 8986 - RNA, 18 nt, Artificial Sequence
  Synthetic
gguauuuccgagaaagau

SEQ ID NO: 8987 - RNA, 20 nt, Artificial Sequence
  Synthetic
gugguauuuccgagaaagau

SEQ ID NO: 8988 - RNA, 21 nt, Artificial Sequence
  Synthetic
ggugguauuuccgagaaagau

SEQ ID NO: 8989 - RNA, 24 nt, Artificial Sequence
  Synthetic
gaaggugguauuuccgagaaagau

SEQ ID NO: 8990 - RNA, 22 nt, Artificial Sequence
  Synthetic
guuucuuuuuaaggggaaagau

SEQ ID NO: 8991 - RNA, 18 nt, Artificial Sequence
  Synthetic
gugauuuuuauuaaagau

SEQ ID NO: 8992 - RNA, 19 nt, Artificial Sequence
  Synthetic
ggugauuuuuauuaaagau

SEQ ID NO: 8993 - RNA, 20 nt, Artificial Sequence
  Synthetic
gggugauuuuuauuaaagau

SEQ ID NO: 8994 - RNA, 21 nt, Artificial Sequence
  Synthetic
guuauugauucaaaucaagau

SEQ ID NO: 8995 - RNA, 24 nt, Artificial Sequence
  Synthetic
guaguuauugauucaaaucaagau

SEQ ID NO: 8996 - RNA, 18 nt, Artificial Sequence
  Synthetic
gaagcucugcuucaagau

SEQ ID NO: 8997 - RNA, 19 nt, Artificial Sequence
  Synthetic
ggaagcucugcuucaagau

SEQ ID NO: 8998 - RNA, 20 nt, Artificial Sequence
  Synthetic
gggaagcucugcuucaagau

SEQ ID NO: 8999 - RNA, 23 nt, Artificial Sequence
  Synthetic
gccgggaagcucugcuucaagau

SEQ ID NO: 9000 - RNA, 24 nt, Artificial Sequence
  Synthetic
ggccgggaagcucugcuucaagau

SEQ ID NO: 9001 - RNA, 18 nt, Artificial Sequence
  Synthetic
gaggcaguaucagaagau

SEQ ID NO: 9002 - RNA, 19 nt, Artificial Sequence
  Synthetic
ggaggcaguaucagaagau

SEQ ID NO: 9003 - RNA, 22 nt, Artificial Sequence
  Synthetic
gaaggaggcaguaucagaagau

SEQ ID NO: 9004 - RNA, 24 nt, Artificial Sequence
  Synthetic
gagaaggaggcaguaucagaagau

SEQ ID NO: 9005 - RNA, 19 nt, Artificial Sequence
  Synthetic
gucaauggaaguagaagau

SEQ ID NO: 9006 - RNA, 21 nt, Artificial Sequence
  Synthetic
gugucaauggaaguagaagau

SEQ ID NO: 9007 - RNA, 24 nt, Artificial Sequence
  Synthetic
guagugucaauggaaguagaagau

SEQ ID NO: 9008 - RNA, 23 nt, Artificial Sequence
  Synthetic
guaacauauuuugggaggaagau

SEQ ID NO: 9009 - RNA, 23 nt, Artificial Sequence
  Synthetic
gaauccauuuucuuagggaagau

SEQ ID NO: 9010 - RNA, 19 nt, Artificial Sequence
  Synthetic
guaagcagacugugaagau

SEQ ID NO: 9011 - RNA, 21 nt, Artificial Sequence
  Synthetic
guguaagcagacugugaagau

SEQ ID NO: 9012 - RNA, 23 nt, Artificial Sequence
  Synthetic
gaguguaagcagacugugaagau

SEQ ID NO: 9013 - RNA, 18 nt, Artificial Sequence
  Synthetic
gcacucuaauauuaagau

SEQ ID NO: 9014 - RNA, 20 nt, Artificial Sequence
  Synthetic
gagcacucuaauauuaagau

SEQ ID NO: 9015 - RNA, 24 nt, Artificial Sequence
  Synthetic
gucagagcacucuaauauuaagau

SEQ ID NO: 9016 - RNA, 18 nt, Artificial Sequence
  Synthetic
guuaggaauaaaacagau

SEQ ID NO: 9017 - RNA, 20 nt, Artificial Sequence
  Synthetic
guguuaggaauaaaacagau

SEQ ID NO: 9018 - RNA, 24 nt, Artificial Sequence
  Synthetic
gccuguguuaggaauaaaacagau

SEQ ID NO: 9019 - RNA, 24 nt, Artificial Sequence
  Synthetic
gcuauaugauauggcuagacagau

SEQ ID NO: 9020 - RNA, 22 nt, Artificial Sequence
  Synthetic
gccaacauguacaaaaccagau

SEQ ID NO: 9021 - RNA, 21 nt, Artificial Sequence
  Synthetic
gcucagcagccugcugcagau

SEQ ID NO: 9022 - RNA, 18 nt, Artificial Sequence
  Synthetic
gaaaagcuguuugcagau

SEQ ID NO: 9023 - RNA, 20 nt, Artificial Sequence
  Synthetic
gagaaaagcuguuugcagau

SEQ ID NO: 9024 - RNA, 23 nt, Artificial Sequence
  Synthetic
guagagaaaagcuguuugcagau

SEQ ID NO: 9025 - RNA, 24 nt, Artificial Sequence
  Synthetic
gguagagaaaagcuguuugcagau

SEQ ID NO: 9026 - RNA, 23 nt, Artificial Sequence
  Synthetic
gacccaucuggucuuucucagau

SEQ ID NO: 9027 - RNA, 21 nt, Artificial Sequence
  Synthetic
gcuaaaaguacacagucagau

SEQ ID NO: 9028 - RNA, 22 nt, Artificial Sequence
  Synthetic
ggcuaaaaguacacagucagau

SEQ ID NO: 9029 - RNA, 23 nt, Artificial Sequence
  Synthetic
gggcuaaaaguacacagucagau

SEQ ID NO: 9030 - RNA, 18 nt, Artificial Sequence
  Synthetic
ggaguuuagaggucagau

SEQ ID NO: 9031 - RNA, 18 nt, Artificial Sequence
  Synthetic
gugcagugacuuucagau

SEQ ID NO: 9032 - RNA, 18 nt, Artificial Sequence
  Synthetic
ggaaggguagaaagagau

SEQ ID NO: 9033 - RNA, 20 nt, Artificial Sequence
  Synthetic
guggaaggguagaaagagau

SEQ ID NO: 9034 - RNA, 24 nt, Artificial Sequence
  Synthetic
gccaguggaaggguagaaagagau

SEQ ID NO: 9035 - RNA, 24 nt, Artificial Sequence
  Synthetic
gaauuuacauucuaaaacagagau

SEQ ID NO: 9036 - RNA, 22 nt, Artificial Sequence
  Synthetic
gccauguuauuuaaacagagau

SEQ ID NO: 9037 - RNA, 24 nt, Artificial Sequence
  Synthetic
gagccauguuauuuaaacagagau

SEQ ID NO: 9038 - RNA, 18 nt, Artificial Sequence
  Synthetic
gagccgaggcccagagau

SEQ ID NO: 9039 - RNA, 22 nt, Artificial Sequence
  Synthetic
guaagagccgaggcccagagau

SEQ ID NO: 9040 - RNA, 18 nt, Artificial Sequence
  Synthetic
gggaagcauuuuagagau

SEQ ID NO: 9041 - RNA, 19 nt, Artificial Sequence
  Synthetic
gacuguaacaagaugagau

SEQ ID NO: 9042 - RNA, 21 nt, Artificial Sequence
  Synthetic
guuaugaaaaugcucugagau

SEQ ID NO: 9043 - RNA, 19 nt, Artificial Sequence
  Synthetic
gcuucugaggaggugagau

SEQ ID NO: 9044 - RNA, 23 nt, Artificial Sequence
  Synthetic
gauugcuucugaggaggugagau

SEQ ID NO: 9045 - RNA, 18 nt, Artificial Sequence
  Synthetic
gacccuaauaaaauagau

SEQ ID NO: 9046 - RNA, 22 nt, Artificial Sequence
  Synthetic
guuaauugccagagaaauagau

SEQ ID NO: 9047 - RNA, 23 nt, Artificial Sequence
  Synthetic
gucuucaaucucugugaauagau

SEQ ID NO: 9048 - RNA, 21 nt, Artificial Sequence
  Synthetic
gaacauuaaucacuacuagau

SEQ ID NO: 9049 - RNA, 23 nt, Artificial Sequence
  Synthetic
gugaacauuaaucacuacuagau

SEQ ID NO: 9050 - RNA, 18 nt, Artificial Sequence
  Synthetic
guuugauaaacccuagau

SEQ ID NO: 9051 - RNA, 21 nt, Artificial Sequence
  Synthetic
guaguuugauaaacccuagau

SEQ ID NO: 9052 - RNA, 20 nt, Artificial Sequence
  Synthetic
gcaacuacuaaaugcuagau

SEQ ID NO: 9053 - RNA, 20 nt, Artificial Sequence
  Synthetic
guaaaaucuacuugcuagau

SEQ ID NO: 9054 - RNA, 21 nt, Artificial Sequence
  Synthetic
gcaaucuaauauaaauuagau

SEQ ID NO: 9055 - RNA, 23 nt, Artificial Sequence
  Synthetic
gugcaaucuaauauaaauuagau

SEQ ID NO: 9056 - RNA, 24 nt, Artificial Sequence
  Synthetic
gucaucuguuagggaugcuuagau

SEQ ID NO: 9057 - RNA, 19 nt, Artificial Sequence
  Synthetic
gcccaacaugugcuuagau

SEQ ID NO: 9058 - RNA, 22 nt, Artificial Sequence
  Synthetic
gaugcccaacaugugcuuagau

SEQ ID NO: 9059 - RNA, 24 nt, Artificial Sequence
  Synthetic
gugaugcccaacaugugcuuagau

SEQ ID NO: 9060 - RNA, 23 nt, Artificial Sequence
  Synthetic
gaauucucugguguuucuuagau

SEQ ID NO: 9061 - RNA, 19 nt, Artificial Sequence
  Synthetic
gaaccuccggugguuagau

SEQ ID NO: 9062 - RNA, 20 nt, Artificial Sequence
  Synthetic
ggaaccuccggugguuagau

SEQ ID NO: 9063 - RNA, 24 nt, Artificial Sequence
  Synthetic
guuaggaaccuccggugguuagau

SEQ ID NO: 9064 - RNA, 19 nt, Artificial Sequence
  Synthetic
gagauagcugcugaccgau

SEQ ID NO: 9065 - RNA, 20 nt, Artificial Sequence
  Synthetic
ggagauagcugcugaccgau

SEQ ID NO: 9066 - RNA, 23 nt, Artificial Sequence
  Synthetic
gacggagauagcugcugaccgau

SEQ ID NO: 9067 - RNA, 20 nt, Artificial Sequence
  Synthetic
guuuaucuuucagaaaggau

SEQ ID NO: 9068 - RNA, 23 nt, Artificial Sequence
  Synthetic
guaguuuaucuuucagaaaggau

SEQ ID NO: 9069 - RNA, 24 nt, Artificial Sequence
  Synthetic
gguaguuuaucuuucagaaaggau

SEQ ID NO: 9070 - RNA, 18 nt, Artificial Sequence
  Synthetic
gguagaaagggaaaggau

SEQ ID NO: 9071 - RNA, 21 nt, Artificial Sequence
  Synthetic
guugguagaaagggaaaggau

SEQ ID NO: 9072 - RNA, 22 nt, Artificial Sequence
  Synthetic
gguugguagaaagggaaaggau

SEQ ID NO: 9073 - RNA, 23 nt, Artificial Sequence
  Synthetic
ggguugguagaaagggaaaggau

SEQ ID NO: 9074 - RNA, 18 nt, Artificial Sequence
  Synthetic
gucucagucuggaaggau

SEQ ID NO: 9075 - RNA, 19 nt, Artificial Sequence
  Synthetic
ggucucagucuggaaggau

SEQ ID NO: 9076 - RNA, 20 nt, Artificial Sequence
  Synthetic
gggucucagucuggaaggau

SEQ ID NO: 9077 - RNA, 21 nt, Artificial Sequence
  Synthetic
ggggucucagucuggaaggau

SEQ ID NO: 9078 - RNA, 22 nt, Artificial Sequence
  Synthetic
gggggucucagucuggaaggau

SEQ ID NO: 9079 - RNA, 21 nt, Artificial Sequence
  Synthetic
gcccaguuuagcaaacaggau

SEQ ID NO: 9080 - RNA, 23 nt, Artificial Sequence
  Synthetic
gucauaacagacuauuacaggau

SEQ ID NO: 9081 - RNA, 18 nt, Artificial Sequence
  Synthetic
gagaguguagaccaggau

SEQ ID NO: 9082 - RNA, 19 nt, Artificial Sequence
  Synthetic
gaauacuaugagucaggau

SEQ ID NO: 9083 - RNA, 23 nt, Artificial Sequence
  Synthetic
guuacaauagcaauggugaggau

SEQ ID NO: 9084 - RNA, 21 nt, Artificial Sequence
  Synthetic
guuuucuagaaagaguaggau

SEQ ID NO: 9085 - RNA, 19 nt, Artificial Sequence
  Synthetic
guuaggcacuuccagggau

SEQ ID NO: 9086 - RNA, 21 nt, Artificial Sequence
  Synthetic
guguuaggcacuuccagggau

SEQ ID NO: 9087 - RNA, 19 nt, Artificial Sequence
  Synthetic
guggcaaggaugaggggau

SEQ ID NO: 9088 - RNA, 22 nt, Artificial Sequence
  Synthetic
gaaguggcaaggaugaggggau

SEQ ID NO: 9089 - RNA, 23 nt, Artificial Sequence
  Synthetic
gaaggaacccuugagcuggggau

SEQ ID NO: 9090 - RNA, 18 nt, Artificial Sequence
  Synthetic
ggaauggggaaaugggau

SEQ ID NO: 9091 - RNA, 18 nt, Artificial Sequence
  Synthetic
gugguccacuccugggau

SEQ ID NO: 9092 - RNA, 21 nt, Artificial Sequence
  Synthetic
gcugugguccacuccugggau

SEQ ID NO: 9093 - RNA, 22 nt, Artificial Sequence
  Synthetic
ggcugugguccacuccugggau

SEQ ID NO: 9094 - RNA, 18 nt, Artificial Sequence
  Synthetic
gaugacuguggcugggau

SEQ ID NO: 9095 - RNA, 20 nt, Artificial Sequence
  Synthetic
gagaugacuguggcugggau

SEQ ID NO: 9096 - RNA, 22 nt, Artificial Sequence
  Synthetic
gaaacugaauucgaugugggau

SEQ ID NO: 9097 - RNA, 21 nt, Artificial Sequence
  Synthetic
gaaaaagaagggaaaauggau

SEQ ID NO: 9098 - RNA, 22 nt, Artificial Sequence
  Synthetic
ggaaaaagaagggaaaauggau

SEQ ID NO: 9099 - RNA, 24 nt, Artificial Sequence
  Synthetic
guggaaaaagaagggaaaauggau

SEQ ID NO: 9100 - RNA, 20 nt, Artificial Sequence
  Synthetic
guuuucuuuaccucauggau

SEQ ID NO: 9101 - RNA, 21 nt, Artificial Sequence
  Synthetic
gguuuucuuuaccucauggau

SEQ ID NO: 9102 - RNA, 21 nt, Artificial Sequence
  Synthetic
guggugaguccacugauggau

SEQ ID NO: 9103 - RNA, 18 nt, Artificial Sequence
  Synthetic
gauaagugaaagcuggau

SEQ ID NO: 9104 - RNA, 19 nt, Artificial Sequence
  Synthetic
ggauaagugaaagcuggau

SEQ ID NO: 9105 - RNA, 20 nt, Artificial Sequence
  Synthetic
gggauaagugaaagcuggau

SEQ ID NO: 9106 - RNA, 21 nt, Artificial Sequence
  Synthetic
gcaauagucaaucaaguggau

SEQ ID NO: 9107 - RNA, 24 nt, Artificial Sequence
  Synthetic
guugcaauagucaaucaaguggau

SEQ ID NO: 9108 - RNA, 24 nt, Artificial Sequence
  Synthetic
guucuacuucauccaucgguggau

SEQ ID NO: 9109 - RNA, 24 nt, Artificial Sequence
  Synthetic
guuuuucucuaaguuauuguggau

SEQ ID NO: 9110 - RNA, 18 nt, Artificial Sequence
  Synthetic
gaaagcaggaauuuggau

SEQ ID NO: 9111 - RNA, 20 nt, Artificial Sequence
  Synthetic
gccacgguuucuaaaaugau

SEQ ID NO: 9112 - RNA, 18 nt, Artificial Sequence
  Synthetic
gaaaugacuucaaaugau

SEQ ID NO: 9113 - RNA, 19 nt, Artificial Sequence
  Synthetic
gaaucacugaguaaaugau

SEQ ID NO: 9114 - RNA, 23 nt, Artificial Sequence
  Synthetic
gcauuauaauaacuuacaaugau

SEQ ID NO: 9115 - RNA, 23 nt, Artificial Sequence
  Synthetic
gccaauuugccuucuccaaugau

SEQ ID NO: 9116 - RNA, 20 nt, Artificial Sequence
  Synthetic
gaugcaaccagaucaaugau

SEQ ID NO: 9117 - RNA, 20 nt, Artificial Sequence
  Synthetic
gucuaccaauuaucaaugau

SEQ ID NO: 9118 - RNA, 19 nt, Artificial Sequence
  Synthetic
gaaacauacaacucaugau

SEQ ID NO: 9119 - RNA, 21 nt, Artificial Sequence
  Synthetic
gugaaacauacaacucaugau

SEQ ID NO: 9120 - RNA, 19 nt, Artificial Sequence
  Synthetic
guucauuuugccucaugau

SEQ ID NO: 9121 - RNA, 19 nt, Artificial Sequence
  Synthetic
gucccagguauuucaugau

SEQ ID NO: 9122 - RNA, 19 nt, Artificial Sequence
  Synthetic
gaugauuuucuuugaugau

SEQ ID NO: 9123 - RNA, 22 nt, Artificial Sequence
  Synthetic
guugaugauuuucuuugaugau

SEQ ID NO: 9124 - RNA, 18 nt, Artificial Sequence
  Synthetic
gguuuuaguuuauaugau

SEQ ID NO: 9125 - RNA, 23 nt, Artificial Sequence
  Synthetic
gacaagguuuuaguuuauaugau

SEQ ID NO: 9126 - RNA, 24 nt, Artificial Sequence
  Synthetic
ggacaagguuuuaguuuauaugau

SEQ ID NO: 9127 - RNA, 18 nt, Artificial Sequence
  Synthetic
gacccauuuuuauaugau

SEQ ID NO: 9128 - RNA, 21 nt, Artificial Sequence
  Synthetic
guagacccauuuuuauaugau

SEQ ID NO: 9129 - RNA, 22 nt, Artificial Sequence
  Synthetic
guuuaacuugaauaauuaugau

SEQ ID NO: 9130 - RNA, 19 nt, Artificial Sequence
  Synthetic
gaaacaauaagagacugau

SEQ ID NO: 9131 - RNA, 22 nt, Artificial Sequence
  Synthetic
gaagaaacaauaagagacugau

SEQ ID NO: 9132 - RNA, 23 nt, Artificial Sequence
  Synthetic
ggaagaaacaauaagagacugau

SEQ ID NO: 9133 - RNA, 19 nt, Artificial Sequence
  Synthetic
gaagucaagcauaccugau

SEQ ID NO: 9134 - RNA, 21 nt, Artificial Sequence
  Synthetic
gugaagucaagcauaccugau

SEQ ID NO: 9135 - RNA, 24 nt, Artificial Sequence
  Synthetic
gaacauuguaugaugaauccugau

SEQ ID NO: 9136 - RNA, 18 nt, Artificial Sequence
  Synthetic
gagcacugucaggcugau

SEQ ID NO: 9137 - RNA, 21 nt, Artificial Sequence
  Synthetic
guugagcacugucaggcugau

SEQ ID NO: 9138 - RNA, 23 nt, Artificial Sequence
  Synthetic
gaguugagcacugucaggcugau

SEQ ID NO: 9139 - RNA, 21 nt, Artificial Sequence
  Synthetic
guucacaucaaauguucugau

SEQ ID NO: 9140 - RNA, 22 nt, Artificial Sequence
  Synthetic
gguucacaucaaauguucugau

SEQ ID NO: 9141 - RNA, 24 nt, Artificial Sequence
  Synthetic
gagguucacaucaaauguucugau

SEQ ID NO: 9142 - RNA, 20 nt, Artificial Sequence
  Synthetic
gacaaaugaaccaaagugau

SEQ ID NO: 9143 - RNA, 22 nt, Artificial Sequence
  Synthetic
gugacaaaugaaccaaagugau

SEQ ID NO: 9144 - RNA, 23 nt, Artificial Sequence
  Synthetic
ggugacaaaugaaccaaagugau

SEQ ID NO: 9145 - RNA, 19 nt, Artificial Sequence
  Synthetic
gaguuuugaauuaagugau

SEQ ID NO: 9146 - RNA, 24 nt, Artificial Sequence
  Synthetic
gcaaagaguuuugaauuaagugau

SEQ ID NO: 9147 - RNA, 22 nt, Artificial Sequence
  Synthetic
guccuacaaccacguccgugau

SEQ ID NO: 9148 - RNA, 21 nt, Artificial Sequence
  Synthetic
gaaauuaauuccguaggugau

SEQ ID NO: 9149 - RNA, 22 nt, Artificial Sequence
  Synthetic
ggaaauuaauuccguaggugau

SEQ ID NO: 9150 - RNA, 24 nt, Artificial Sequence
  Synthetic
gaggaaauuaauuccguaggugau

SEQ ID NO: 9151 - RNA, 21 nt, Artificial Sequence
  Synthetic
gcucuaaaucaggacugugau

SEQ ID NO: 9152 - RNA, 19 nt, Artificial Sequence
  Synthetic
gacacauucugacugugau

SEQ ID NO: 9153 - RNA, 21 nt, Artificial Sequence
  Synthetic
gugacacauucugacugugau

SEQ ID NO: 9154 - RNA, 22 nt, Artificial Sequence
  Synthetic
gagaaauauaaaauacugugau

SEQ ID NO: 9155 - RNA, 18 nt, Artificial Sequence
  Synthetic
gauaccuucaucugugau

SEQ ID NO: 9156 - RNA, 20 nt, Artificial Sequence
  Synthetic
gagauaccuucaucugugau

SEQ ID NO: 9157 - RNA, 23 nt, Artificial Sequence
  Synthetic
gcuaaagaaaaauauugugugau

SEQ ID NO: 9158 - RNA, 18 nt, Artificial Sequence
  Synthetic
guacuugcaaauugugau

SEQ ID NO: 9159 - RNA, 20 nt, Artificial Sequence
  Synthetic
guuuuuaagauaccauugau

SEQ ID NO: 9160 - RNA, 21 nt, Artificial Sequence
  Synthetic
guuuuuuguugaagaguugau

SEQ ID NO: 9161 - RNA, 24 nt, Artificial Sequence
  Synthetic
gauguuuuuuguugaagaguugau

SEQ ID NO: 9162 - RNA, 22 nt, Artificial Sequence
  Synthetic
gaaauguaugcaaucuguugau

SEQ ID NO: 9163 - RNA, 24 nt, Artificial Sequence
  Synthetic
gagaaauguaugcaaucuguugau

SEQ ID NO: 9164 - RNA, 18 nt, Artificial Sequence
  Synthetic
gcacaguaacuauuugau

SEQ ID NO: 9165 - RNA, 22 nt, Artificial Sequence
  Synthetic
gaaagcacaguaacuauuugau

SEQ ID NO: 9166 - RNA, 20 nt, Artificial Sequence
  Synthetic
guuugugucuauacuuugau

SEQ ID NO: 9167 - RNA, 22 nt, Artificial Sequence
  Synthetic
guguuugugucuauacuuugau

SEQ ID NO: 9168 - RNA, 23 nt, Artificial Sequence
  Synthetic
gguguuugugucuauacuuugau

SEQ ID NO: 9169 - RNA, 20 nt, Artificial Sequence
  Synthetic
gaacuagaauguacuuugau

SEQ ID NO: 9170 - RNA, 20 nt, Artificial Sequence
  Synthetic
gaaccaaacagaaguuugau

SEQ ID NO: 9171 - RNA, 23 nt, Artificial Sequence
  Synthetic
gaagaaccaaacagaaguuugau

SEQ ID NO: 9172 - RNA, 21 nt, Artificial Sequence
  Synthetic
guuauauaccauugaaaauau

SEQ ID NO: 9173 - RNA, 23 nt, Artificial Sequence
  Synthetic
guguuauauaccauugaaaauau

SEQ ID NO: 9174 - RNA, 23 nt, Artificial Sequence
  Synthetic
gcuuuuaacaaugaggcaaauau

SEQ ID NO: 9175 - RNA, 19 nt, Artificial Sequence
  Synthetic
gauguuucaguuacaauau

SEQ ID NO: 9176 - RNA, 22 nt, Artificial Sequence
  Synthetic
gcuuacuaaauucugccaauau

SEQ ID NO: 9177 - RNA, 23 nt, Artificial Sequence
  Synthetic
ggcuuacuaaauucugccaauau

SEQ ID NO: 9178 - RNA, 21 nt, Artificial Sequence
  Synthetic
gccauauaggauugccaauau

SEQ ID NO: 9179 - RNA, 23 nt, Artificial Sequence
  Synthetic
gagccauauaggauugccaauau

SEQ ID NO: 9180 - RNA, 18 nt, Artificial Sequence
  Synthetic
gauuaauaaugucaauau

SEQ ID NO: 9181 - RNA, 22 nt, Artificial Sequence
  Synthetic
gaaagauuaauaaugucaauau

SEQ ID NO: 9182 - RNA, 23 nt, Artificial Sequence
  Synthetic
ggaaagauuaauaaugucaauau

SEQ ID NO: 9183 - RNA, 23 nt, Artificial Sequence
  Synthetic
gaauuuuuuccaggguagaauau

SEQ ID NO: 9184 - RNA, 20 nt, Artificial Sequence
  Synthetic
gaauuacaguugaugaauau

SEQ ID NO: 9185 - RNA, 23 nt, Artificial Sequence
  Synthetic
gaugaauuacaguugaugaauau

SEQ ID NO: 9186 - RNA, 18 nt, Artificial Sequence
  Synthetic
gauucccuuggugaauau

SEQ ID NO: 9187 - RNA, 20 nt, Artificial Sequence
  Synthetic
gagauucccuuggugaauau

SEQ ID NO: 9188 - RNA, 22 nt, Artificial Sequence
  Synthetic
gagagauucccuuggugaauau

SEQ ID NO: 9189 - RNA, 24 nt, Artificial Sequence
  Synthetic
gagagagauucccuuggugaauau

SEQ ID NO: 9190 - RNA, 18 nt, Artificial Sequence
  Synthetic
ggauaacugaaauaauau

SEQ ID NO: 9191 - RNA, 18 nt, Artificial Sequence
  Synthetic
gagugggaaagauaauau

SEQ ID NO: 9192 - RNA, 20 nt, Artificial Sequence
  Synthetic
gucaaaggaaagguuaauau

SEQ ID NO: 9193 - RNA, 18 nt, Artificial Sequence
  Synthetic
guaaaguccaaaacauau

SEQ ID NO: 9194 - RNA, 21 nt, Artificial Sequence
  Synthetic
gcuguaaaguccaaaacauau

SEQ ID NO: 9195 - RNA, 22 nt, Artificial Sequence
  Synthetic
gaggauuaauaucaaaacauau

SEQ ID NO: 9196 - RNA, 21 nt, Artificial Sequence
  Synthetic
gccugagaggcagaaacauau

SEQ ID NO: 9197 - RNA, 20 nt, Artificial Sequence
  Synthetic
gcugagaaauuaagacauau

SEQ ID NO: 9198 - RNA, 19 nt, Artificial Sequence
  Synthetic
gccauuaugguuuacauau

SEQ ID NO: 9199 - RNA, 20 nt, Artificial Sequence
  Synthetic
ggccauuaugguuuacauau

SEQ ID NO: 9200 - RNA, 23 nt, Artificial Sequence
  Synthetic
gaacuuuuuguucauaagcauau

SEQ ID NO: 9201 - RNA, 22 nt, Artificial Sequence
  Synthetic
gaauauaguuucacgagcauau

SEQ ID NO: 9202 - RNA, 20 nt, Artificial Sequence
  Synthetic
gacuagugacaugagcauau

SEQ ID NO: 9203 - RNA, 22 nt, Artificial Sequence
  Synthetic
gagacuagugacaugagcauau

SEQ ID NO: 9204 - RNA, 24 nt, Artificial Sequence
  Synthetic
gagagacuagugacaugagcauau

SEQ ID NO: 9205 - RNA, 23 nt, Artificial Sequence
  Synthetic
gaaauaaugcuuuuacugcauau

SEQ ID NO: 9206 - RNA, 23 nt, Artificial Sequence
  Synthetic
guacauuuauuuguaaaucauau

SEQ ID NO: 9207 - RNA, 21 nt, Artificial Sequence
  Synthetic
gaaaaggaccagaggucauau

SEQ ID NO: 9208 - RNA, 20 nt, Artificial Sequence
  Synthetic
gacuauaaagggauucauau

SEQ ID NO: 9209 - RNA, 23 nt, Artificial Sequence
  Synthetic
gaagacuauaaagggauucauau

SEQ ID NO: 9210 - RNA, 24 nt, Artificial Sequence
  Synthetic
ggaagacuauaaagggauucauau

SEQ ID NO: 9211 - RNA, 18 nt, Artificial Sequence
  Synthetic
guagagauucaaagauau

SEQ ID NO: 9212 - RNA, 20 nt, Artificial Sequence
  Synthetic
gcucaagguacugcagauau

SEQ ID NO: 9213 - RNA, 23 nt, Artificial Sequence
  Synthetic
gcugcucaagguacugcagauau

SEQ ID NO: 9214 - RNA, 20 nt, Artificial Sequence
  Synthetic
gccauugaaacaagagauau

SEQ ID NO: 9215 - RNA, 22 nt, Artificial Sequence
  Synthetic
gugccauugaaacaagagauau

SEQ ID NO: 9216 - RNA, 18 nt, Artificial Sequence
  Synthetic
gacugcuuucaaggauau

SEQ ID NO: 9217 - RNA, 20 nt, Artificial Sequence
  Synthetic
gagacugcuuucaaggauau

SEQ ID NO: 9218 - RNA, 24 nt, Artificial Sequence
  Synthetic
gucagagacugcuuucaaggauau

SEQ ID NO: 9219 - RNA, 22 nt, Artificial Sequence
  Synthetic
gcaaaggcacuuagaaggauau

SEQ ID NO: 9220 - RNA, 20 nt, Artificial Sequence
  Synthetic
guagaaagagaugaggauau

SEQ ID NO: 9221 - RNA, 21 nt, Artificial Sequence
  Synthetic
gguagaaagagaugaggauau

SEQ ID NO: 9222 - RNA, 22 nt, Artificial Sequence
  Synthetic
ggguagaaagagaugaggauau

SEQ ID NO: 9223 - RNA, 21 nt, Artificial Sequence
  Synthetic
guggaguagauagcuggauau

SEQ ID NO: 9224 - RNA, 23 nt, Artificial Sequence
  Synthetic
guguggaguagauagcuggauau

SEQ ID NO: 9225 - RNA, 20 nt, Artificial Sequence
  Synthetic
gauauuuucuugcaugauau

SEQ ID NO: 9226 - RNA, 21 nt, Artificial Sequence
  Synthetic
gucuuuuauugacuuugauau

SEQ ID NO: 9227 - RNA, 23 nt, Artificial Sequence
  Synthetic
gugucuuuuauugacuuugauau

SEQ ID NO: 9228 - RNA, 19 nt, Artificial Sequence
  Synthetic
gagauaaguauucauauau

SEQ ID NO: 9229 - RNA, 23 nt, Artificial Sequence
  Synthetic
gaaauuauauacuguauauauau

SEQ ID NO: 9230 - RNA, 18 nt, Artificial Sequence
  Synthetic
ggcguggccacccuauau

SEQ ID NO: 9231 - RNA, 18 nt, Artificial Sequence
  Synthetic
gauauagggaaaguauau

SEQ ID NO: 9232 - RNA, 23 nt, Artificial Sequence
  Synthetic
gcauugauauagggaaaguauau

SEQ ID NO: 9233 - RNA, 20 nt, Artificial Sequence
  Synthetic
gucccucauaagaauuauau

SEQ ID NO: 9234 - RNA, 20 nt, Artificial Sequence
  Synthetic
gcuccuuuuaauaauuauau

SEQ ID NO: 9235 - RNA, 22 nt, Artificial Sequence
  Synthetic
gagcuccuuuuaauaauuauau

SEQ ID NO: 9236 - RNA, 23 nt, Artificial Sequence
  Synthetic
ggagcuccuuuuaauaauuauau

SEQ ID NO: 9237 - RNA, 22 nt, Artificial Sequence
  Synthetic
gucacuucauuucccauuauau

SEQ ID NO: 9238 - RNA, 22 nt, Artificial Sequence
  Synthetic
gaguuuucuacuauuauuauau

SEQ ID NO: 9239 - RNA, 18 nt, Artificial Sequence
  Synthetic
guuacaguagucuuauau

SEQ ID NO: 9240 - RNA, 22 nt, Artificial Sequence
  Synthetic
gacuguuacaguagucuuauau

SEQ ID NO: 9241 - RNA, 23 nt, Artificial Sequence
  Synthetic
ggacuguuacaguagucuuauau

SEQ ID NO: 9242 - RNA, 20 nt, Artificial Sequence
  Synthetic
gcucuuuguauauguuauau

SEQ ID NO: 9243 - RNA, 21 nt, Artificial Sequence
  Synthetic
gacuggccuauuuauuuauau

SEQ ID NO: 9244 - RNA, 19 nt, Artificial Sequence
  Synthetic
gaauagaacaauuuuauau

SEQ ID NO: 9245 - RNA, 23 nt, Artificial Sequence
  Synthetic
gacagaauagaacaauuuuauau

SEQ ID NO: 9246 - RNA, 24 nt, Artificial Sequence
  Synthetic
ggacagaauagaacaauuuuauau

SEQ ID NO: 9247 - RNA, 20 nt, Artificial Sequence
  Synthetic
gcuauuuuaggagaaacuau

SEQ ID NO: 9248 - RNA, 18 nt, Artificial Sequence
  Synthetic
gcaaaugcaggaaacuau

SEQ ID NO: 9249 - RNA, 19 nt, Artificial Sequence
  Synthetic
gaaaugaaucucuaacuau

SEQ ID NO: 9250 - RNA, 24 nt, Artificial Sequence
  Synthetic
guaaagaaaugaaucucuaacuau

SEQ ID NO: 9251 - RNA, 18 nt, Artificial Sequence
  Synthetic
gaaguuaaucugcacuau

SEQ ID NO: 9252 - RNA, 20 nt, Artificial Sequence
  Synthetic
gugaaguuaaucugcacuau

SEQ ID NO: 9253 - RNA, 21 nt, Artificial Sequence
  Synthetic
gcuucaguuauucaucacuau

SEQ ID NO: 9254 - RNA, 22 nt, Artificial Sequence
  Synthetic
ggcuucaguuauucaucacuau

SEQ ID NO: 9255 - RNA, 22 nt, Artificial Sequence
  Synthetic
gcuuucuuaguuaauagacuau

SEQ ID NO: 9256 - RNA, 24 nt, Artificial Sequence
  Synthetic
gugcuuucuuaguuaauagacuau

SEQ ID NO: 9257 - RNA, 20 nt, Artificial Sequence
  Synthetic
gaugccuguugggggacuau

SEQ ID NO: 9258 - RNA, 24 nt, Artificial Sequence
  Synthetic
gaaagaugccuguugggggacuau

SEQ ID NO: 9259 - RNA, 22 nt, Artificial Sequence
  Synthetic
gaaauuacugaagacugacuau

SEQ ID NO: 9260 - RNA, 19 nt, Artificial Sequence
  Synthetic
gaccucauagagugacuau

SEQ ID NO: 9261 - RNA, 19 nt, Artificial Sequence
  Synthetic
guaaaugguaaauuacuau

SEQ ID NO: 9262 - RNA, 20 nt, Artificial Sequence
  Synthetic
gaaccauguccaauuacuau

SEQ ID NO: 9263 - RNA, 23 nt, Artificial Sequence
  Synthetic
gcaucacuauuaguauaaccuau

SEQ ID NO: 9264 - RNA, 20 nt, Artificial Sequence
  Synthetic
guuucuuucuacucaccuau

SEQ ID NO: 9265 - RNA, 20 nt, Artificial Sequence
  Synthetic
gauucucuggcagagccuau

SEQ ID NO: 9266 - RNA, 24 nt, Artificial Sequence
  Synthetic
gauugauucucuggcagagccuau

SEQ ID NO: 9267 - RNA, 22 nt, Artificial Sequence
  Synthetic
gaacuuuguguauguggccuau

SEQ ID NO: 9268 - RNA, 18 nt, Artificial Sequence
  Synthetic
gaaauucugaccuccuau

SEQ ID NO: 9269 - RNA, 19 nt, Artificial Sequence
  Synthetic
ggaaauucugaccuccuau

SEQ ID NO: 9270 - RNA, 20 nt, Artificial Sequence
  Synthetic
guaguaacuaaggcagcuau

SEQ ID NO: 9271 - RNA, 24 nt, Artificial Sequence
  Synthetic
guauguaguaacuaaggcagcuau

SEQ ID NO: 9272 - RNA, 20 nt, Artificial Sequence
  Synthetic
gauagugcccugcuagcuau

SEQ ID NO: 9273 - RNA, 23 nt, Artificial Sequence
  Synthetic
guacaguauacauggugggcuau

SEQ ID NO: 9274 - RNA, 20 nt, Artificial Sequence
  Synthetic
gcccacaaaucuauugcuau

SEQ ID NO: 9275 - RNA, 22 nt, Artificial Sequence
  Synthetic
gugcccacaaaucuauugcuau

SEQ ID NO: 9276 - RNA, 18 nt, Artificial Sequence
  Synthetic
gaugaugagguuugcuau

SEQ ID NO: 9277 - RNA, 22 nt, Artificial Sequence
  Synthetic
gcaugaugaugagguuugcuau

SEQ ID NO: 9278 - RNA, 24 nt, Artificial Sequence
  Synthetic
gugcaugaugaugagguuugcuau

SEQ ID NO: 9279 - RNA, 21 nt, Artificial Sequence
  Synthetic
gaaaaaauugguucacucuau

SEQ ID NO: 9280 - RNA, 24 nt, Artificial Sequence
  Synthetic
guagaaaaaauugguucacucuau

SEQ ID NO: 9281 - RNA, 23 nt, Artificial Sequence
  Synthetic
gaagguuaacucauuuucucuau

SEQ ID NO: 9282 - RNA, 21 nt, Artificial Sequence
  Synthetic
guacuuccauugacauucuau

SEQ ID NO: 9283 - RNA, 21 nt, Artificial Sequence
  Synthetic
gaaagaguugagauauucuau

SEQ ID NO: 9284 - RNA, 21 nt, Artificial Sequence
  Synthetic
guucuuguaguuuucuucuau

SEQ ID NO: 9285 - RNA, 22 nt, Artificial Sequence
  Synthetic
gguucuuguaguuuucuucuau

SEQ ID NO: 9286 - RNA, 20 nt, Artificial Sequence
  Synthetic
guuaaugccuguguuucuau

SEQ ID NO: 9287 - RNA, 23 nt, Artificial Sequence
  Synthetic
guaguuaaugccuguguuucuau

SEQ ID NO: 9288 - RNA, 18 nt, Artificial Sequence
  Synthetic
gugagucaauuuuucuau

SEQ ID NO: 9289 - RNA, 22 nt, Artificial Sequence
  Synthetic
gcaugugagucaauuuuucuau

SEQ ID NO: 9290 - RNA, 18 nt, Artificial Sequence
  Synthetic
gccagguuugccaaguau

SEQ ID NO: 9291 - RNA, 19 nt, Artificial Sequence
  Synthetic
ggccagguuugccaaguau

SEQ ID NO: 9292 - RNA, 21 nt, Artificial Sequence
  Synthetic
guggccagguuugccaaguau

SEQ ID NO: 9293 - RNA, 23 nt, Artificial Sequence
  Synthetic
gaguggccagguuugccaaguau

SEQ ID NO: 9294 - RNA, 18 nt, Artificial Sequence
  Synthetic
gcuugcauaaagaaguau

SEQ ID NO: 9295 - RNA, 22 nt, Artificial Sequence
  Synthetic
gccugcuugcauaaagaaguau

SEQ ID NO: 9296 - RNA, 23 nt, Artificial Sequence
  Synthetic
ggccugcuugcauaaagaaguau

SEQ ID NO: 9297 - RNA, 24 nt, Artificial Sequence
  Synthetic
gggccugcuugcauaaagaaguau

SEQ ID NO: 9298 - RNA, 20 nt, Artificial Sequence
  Synthetic
gcuauagcucuuagaaguau

SEQ ID NO: 9299 - RNA, 21 nt, Artificial Sequence
  Synthetic
guacaaaacuggccgaaguau

SEQ ID NO: 9300 - RNA, 23 nt, Artificial Sequence
  Synthetic
gccuauucaucccucuccaguau

SEQ ID NO: 9301 - RNA, 21 nt, Artificial Sequence
  Synthetic
gcauggaaaaugggagaguau

SEQ ID NO: 9302 - RNA, 23 nt, Artificial Sequence
  Synthetic
guaacagucuucaucaugaguau

SEQ ID NO: 9303 - RNA, 18 nt, Artificial Sequence
  Synthetic
gucuuacucauauaguau

SEQ ID NO: 9304 - RNA, 23 nt, Artificial Sequence
  Synthetic
gcacucugauuuaauuguaguau

SEQ ID NO: 9305 - RNA, 21 nt, Artificial Sequence
  Synthetic
guuagaaauuugaauuaguau

SEQ ID NO: 9306 - RNA, 23 nt, Artificial Sequence
  Synthetic
gaguuagaaauuugaauuaguau

SEQ ID NO: 9307 - RNA, 18 nt, Artificial Sequence
  Synthetic
gcuuguguuacuuaguau

SEQ ID NO: 9308 - RNA, 23 nt, Artificial Sequence
  Synthetic
guauugcuuguguuacuuaguau

SEQ ID NO: 9309 - RNA, 22 nt, Artificial Sequence
  Synthetic
gacuaauuucuaccuaagguau

SEQ ID NO: 9310 - RNA, 22 nt, Artificial Sequence
  Synthetic
guccaggacugucuggagguau

SEQ ID NO: 9311 - RNA, 23 nt, Artificial Sequence
  Synthetic
gguccaggacugucuggagguau

SEQ ID NO: 9312 - RNA, 21 nt, Artificial Sequence
  Synthetic
gcuuuuccuuacuuuagguau

SEQ ID NO: 9313 - RNA, 21 nt, Artificial Sequence
  Synthetic
gaaaugggggugaguggguau

SEQ ID NO: 9314 - RNA, 23 nt, Artificial Sequence
  Synthetic
gcugggaucugcaugguggguau

SEQ ID NO: 9315 - RNA, 20 nt, Artificial Sequence
  Synthetic
gucggggaggaggcugguau

SEQ ID NO: 9316 - RNA, 21 nt, Artificial Sequence
  Synthetic
ggucggggaggaggcugguau

SEQ ID NO: 9317 - RNA, 18 nt, Artificial Sequence
  Synthetic
gaauauuguagaauguau

SEQ ID NO: 9318 - RNA, 21 nt, Artificial Sequence
  Synthetic
gaagaauauuguagaauguau

SEQ ID NO: 9319 - RNA, 22 nt, Artificial Sequence
  Synthetic
ggaagaauauuguagaauguau

SEQ ID NO: 9320 - RNA, 19 nt, Artificial Sequence
  Synthetic
gaaaugugauauaauguau

SEQ ID NO: 9321 - RNA, 21 nt, Artificial Sequence
  Synthetic
gugaaaugugauauaauguau

SEQ ID NO: 9322 - RNA, 21 nt, Artificial Sequence
  Synthetic
gaaaaaaaaaaucuaauguau

SEQ ID NO: 9323 - RNA, 24 nt, Artificial Sequence
  Synthetic
gaaauuauuuauaguaccauguau

SEQ ID NO: 9324 - RNA, 19 nt, Artificial Sequence
  Synthetic
guuucaaucauauauguau

SEQ ID NO: 9325 - RNA, 20 nt, Artificial Sequence
  Synthetic
gguuucaaucauauauguau

SEQ ID NO: 9326 - RNA, 22 nt, Artificial Sequence
  Synthetic
gugguuucaaucauauauguau

SEQ ID NO: 9327 - RNA, 23 nt, Artificial Sequence
  Synthetic
ggugguuucaaucauauauguau

SEQ ID NO: 9328 - RNA, 19 nt, Artificial Sequence
  Synthetic
gugauuauccauuauguau

SEQ ID NO: 9329 - RNA, 21 nt, Artificial Sequence
  Synthetic
gcgugauuauccauuauguau

SEQ ID NO: 9330 - RNA, 20 nt, Artificial Sequence
  Synthetic
guuucauggucugacuguau

SEQ ID NO: 9331 - RNA, 21 nt, Artificial Sequence
  Synthetic
gcucucaggagaagccuguau

SEQ ID NO: 9332 - RNA, 19 nt, Artificial Sequence
  Synthetic
gacacugaaauugcuguau

SEQ ID NO: 9333 - RNA, 20 nt, Artificial Sequence
  Synthetic
ggacacugaaauugcuguau

SEQ ID NO: 9334 - RNA, 21 nt, Artificial Sequence
  Synthetic
gggacacugaaauugcuguau

SEQ ID NO: 9335 - RNA, 22 nt, Artificial Sequence
  Synthetic
gaaauauaaaugaggucuguau

SEQ ID NO: 9336 - RNA, 24 nt, Artificial Sequence
  Synthetic
gugaaauauaaaugaggucuguau

SEQ ID NO: 9337 - RNA, 18 nt, Artificial Sequence
  Synthetic
gagaauguucuucuguau

SEQ ID NO: 9338 - RNA, 19 nt, Artificial Sequence
  Synthetic
ggagaauguucuucuguau

SEQ ID NO: 9339 - RNA, 20 nt, Artificial Sequence
  Synthetic
gggagaauguucuucuguau

SEQ ID NO: 9340 - RNA, 21 nt, Artificial Sequence
  Synthetic
ggggagaauguucuucuguau

SEQ ID NO: 9341 - RNA, 24 nt, Artificial Sequence
  Synthetic
gaaggggagaauguucuucuguau

SEQ ID NO: 9342 - RNA, 18 nt, Artificial Sequence
  Synthetic
gucacuuuuacauuguau

SEQ ID NO: 9343 - RNA, 23 nt, Artificial Sequence
  Synthetic
gcaguucuauaguuugauuguau

SEQ ID NO: 9344 - RNA, 19 nt, Artificial Sequence
  Synthetic
guggaaggauauauuguau

SEQ ID NO: 9345 - RNA, 22 nt, Artificial Sequence
  Synthetic
guuguggaaggauauauuguau

SEQ ID NO: 9346 - RNA, 21 nt, Artificial Sequence
  Synthetic
guacaucucccuggcuuguau

SEQ ID NO: 9347 - RNA, 23 nt, Artificial Sequence
  Synthetic
gaguacaucucccuggcuuguau

SEQ ID NO: 9348 - RNA, 24 nt, Artificial Sequence
  Synthetic
gcucuaaauauggauauaaauuau

SEQ ID NO: 9349 - RNA, 23 nt, Artificial Sequence
  Synthetic
gcacaugucuuagccugaauuau

SEQ ID NO: 9350 - RNA, 20 nt, Artificial Sequence
  Synthetic
guuaaguuagguugaauuau

SEQ ID NO: 9351 - RNA, 20 nt, Artificial Sequence
  Synthetic
gacugugaaaaaauaauuau

SEQ ID NO: 9352 - RNA, 21 nt, Artificial Sequence
  Synthetic
ggacugugaaaaaauaauuau

SEQ ID NO: 9353 - RNA, 18 nt, Artificial Sequence
  Synthetic
gaacggacugauaauuau

SEQ ID NO: 9354 - RNA, 19 nt, Artificial Sequence
  Synthetic
gacauacuuaaaacauuau

SEQ ID NO: 9355 - RNA, 23 nt, Artificial Sequence
  Synthetic
guuagacauacuuaaaacauuau

SEQ ID NO: 9356 - RNA, 19 nt, Artificial Sequence
  Synthetic
guuccuggaaauccauuau

SEQ ID NO: 9357 - RNA, 23 nt, Artificial Sequence
  Synthetic
guaaguuccuggaaauccauuau

SEQ ID NO: 9358 - RNA, 21 nt, Artificial Sequence
  Synthetic
gcauggauuuguauccauuau

SEQ ID NO: 9359 - RNA, 22 nt, Artificial Sequence
  Synthetic
gacaaaauuauaauagcauuau

SEQ ID NO: 9360 - RNA, 18 nt, Artificial Sequence
  Synthetic
ggauggagugugcauuau

SEQ ID NO: 9361 - RNA, 24 nt, Artificial Sequence
  Synthetic
guucuuggauggagugugcauuau

SEQ ID NO: 9362 - RNA, 18 nt, Artificial Sequence
  Synthetic
gcaaauaguagucauuau

SEQ ID NO: 9363 - RNA, 19 nt, Artificial Sequence
  Synthetic
ggcaaauaguagucauuau

SEQ ID NO: 9364 - RNA, 22 nt, Artificial Sequence
  Synthetic
gaaggcaaauaguagucauuau

SEQ ID NO: 9365 - RNA, 23 nt, Artificial Sequence
  Synthetic
ggaaggcaaauaguagucauuau

SEQ ID NO: 9366 - RNA, 24 nt, Artificial Sequence
  Synthetic
gggaaggcaaauaguagucauuau

SEQ ID NO: 9367 - RNA, 19 nt, Artificial Sequence
  Synthetic
gaauugacacguauauuau

SEQ ID NO: 9368 - RNA, 22 nt, Artificial Sequence
  Synthetic
gauaguuauugauuauuauuau

SEQ ID NO: 9369 - RNA, 24 nt, Artificial Sequence
  Synthetic
gaaaucaagagucucucuuauuau

SEQ ID NO: 9370 - RNA, 24 nt, Artificial Sequence
  Synthetic
gcuuacugccuccagcuaacuuau

SEQ ID NO: 9371 - RNA, 18 nt, Artificial Sequence
  Synthetic
guaaccaagcacacuuau

SEQ ID NO: 9372 - RNA, 22 nt, Artificial Sequence
  Synthetic
gauuauuuuugcagacacuuau

SEQ ID NO: 9373 - RNA, 23 nt, Artificial Sequence
  Synthetic
ggauuauuuuugcagacacuuau

SEQ ID NO: 9374 - RNA, 24 nt, Artificial Sequence
  Synthetic
gggauuauuuuugcagacacuuau

SEQ ID NO: 9375 - RNA, 21 nt, Artificial Sequence
  Synthetic
gauuuguaccuuuugacuuau

SEQ ID NO: 9376 - RNA, 22 nt, Artificial Sequence
  Synthetic
ggauuuguaccuuuugacuuau

SEQ ID NO: 9377 - RNA, 23 nt, Artificial Sequence
  Synthetic
gggauuuguaccuuuugacuuau

SEQ ID NO: 9378 - RNA, 23 nt, Artificial Sequence
  Synthetic
gacaauucuaccuagauacuuau

SEQ ID NO: 9379 - RNA, 21 nt, Artificial Sequence
  Synthetic
gucuugcuugguguuacuuau

SEQ ID NO: 9380 - RNA, 22 nt, Artificial Sequence
  Synthetic
ggucuugcuugguguuacuuau

SEQ ID NO: 9381 - RNA, 21 nt, Artificial Sequence
  Synthetic
gcccucauggauuuaucuuau

SEQ ID NO: 9382 - RNA, 22 nt, Artificial Sequence
  Synthetic
ggcccucauggauuuaucuuau

SEQ ID NO: 9383 - RNA, 18 nt, Artificial Sequence
  Synthetic
gaaaacaaguguucuuau

SEQ ID NO: 9384 - RNA, 19 nt, Artificial Sequence
  Synthetic
ggaaaacaaguguucuuau

SEQ ID NO: 9385 - RNA, 21 nt, Artificial Sequence
  Synthetic
guggaaaacaaguguucuuau

SEQ ID NO: 9386 - RNA, 23 nt, Artificial Sequence
  Synthetic
gaguggaaaacaaguguucuuau

SEQ ID NO: 9387 - RNA, 24 nt, Artificial Sequence
  Synthetic
ggaguggaaaacaaguguucuuau

SEQ ID NO: 9388 - RNA, 21 nt, Artificial Sequence
  Synthetic
gauugaugaaagguuucuuau

SEQ ID NO: 9389 - RNA, 22 nt, Artificial Sequence
  Synthetic
guucugguguccugaaaguuau

SEQ ID NO: 9390 - RNA, 18 nt, Artificial Sequence
  Synthetic
ggauuuuccuaaaguuau

SEQ ID NO: 9391 - RNA, 21 nt, Artificial Sequence
  Synthetic
guaaauaauauuuaaaguuau

SEQ ID NO: 9392 - RNA, 20 nt, Artificial Sequence
  Synthetic
gaaaacauauaaagaguuau

SEQ ID NO: 9393 - RNA, 24 nt, Artificial Sequence
  Synthetic
guuugaaaacauauaaagaguuau

SEQ ID NO: 9394 - RNA, 18 nt, Artificial Sequence
  Synthetic
ggacuuaauaauaguuau

SEQ ID NO: 9395 - RNA, 19 nt, Artificial Sequence
  Synthetic
guuauacucaaaugguuau

SEQ ID NO: 9396 - RNA, 20 nt, Artificial Sequence
  Synthetic
gguuauacucaaaugguuau

SEQ ID NO: 9397 - RNA, 23 nt, Artificial Sequence
  Synthetic
gcugguuauacucaaaugguuau

SEQ ID NO: 9398 - RNA, 24 nt, Artificial Sequence
  Synthetic
gaacuuaucuuggaaggugguuau

SEQ ID NO: 9399 - RNA, 24 nt, Artificial Sequence
  Synthetic
gauuucauugaaacucacuguuau

SEQ ID NO: 9400 - RNA, 19 nt, Artificial Sequence
  Synthetic
gucugauaguuuuuguuau

SEQ ID NO: 9401 - RNA, 18 nt, Artificial Sequence
  Synthetic
guggacucuguaauuuau

SEQ ID NO: 9402 - RNA, 23 nt, Artificial Sequence
  Synthetic
gaaacauauuuuguguaauuuau

SEQ ID NO: 9403 - RNA, 20 nt, Artificial Sequence
  Synthetic
gaagaaguauuuuaauuuau

SEQ ID NO: 9404 - RNA, 19 nt, Artificial Sequence
  Synthetic
guaugaauacagcauuuau

SEQ ID NO: 9405 - RNA, 19 nt, Artificial Sequence
  Synthetic
gaggguacuaaagauuuau

SEQ ID NO: 9406 - RNA, 18 nt, Artificial Sequence
  Synthetic
guaguagcaaauauuuau

SEQ ID NO: 9407 - RNA, 22 nt, Artificial Sequence
  Synthetic
guaaguaguagcaaauauuuau

SEQ ID NO: 9408 - RNA, 21 nt, Artificial Sequence
  Synthetic
gaacuauuuaggcauauuuau

SEQ ID NO: 9409 - RNA, 21 nt, Artificial Sequence
  Synthetic
gcuauuuaaacagcuauuuau

SEQ ID NO: 9410 - RNA, 22 nt, Artificial Sequence
  Synthetic
ggcuauuuaaacagcuauuuau

SEQ ID NO: 9411 - RNA, 23 nt, Artificial Sequence
  Synthetic
gggcuauuuaaacagcuauuuau

SEQ ID NO: 9412 - RNA, 19 nt, Artificial Sequence
  Synthetic
gaaaauugugcuuauuuau

SEQ ID NO: 9413 - RNA, 24 nt, Artificial Sequence
  Synthetic
gaucauugaggaaaauuuauuuau

SEQ ID NO: 9414 - RNA, 22 nt, Artificial Sequence
  Synthetic
guccuuucauguuaaacuuuau

SEQ ID NO: 9415 - RNA, 20 nt, Artificial Sequence
  Synthetic
gauaggcaagaaugcuuuau

SEQ ID NO: 9416 - RNA, 19 nt, Artificial Sequence
  Synthetic
gauuugugcugugcuuuau

SEQ ID NO: 9417 - RNA, 24 nt, Artificial Sequence
  Synthetic
gcauuacucgucuccuugcuuuau

SEQ ID NO: 9418 - RNA, 19 nt, Artificial Sequence
  Synthetic
guauugugucugucuuuau

SEQ ID NO: 9419 - RNA, 21 nt, Artificial Sequence
  Synthetic
guguauugugucugucuuuau

SEQ ID NO: 9420 - RNA, 24 nt, Artificial Sequence
  Synthetic
guaguguauugugucugucuuuau

SEQ ID NO: 9421 - RNA, 24 nt, Artificial Sequence
  Synthetic
guccuuuuccuuaaauuucuuuau

SEQ ID NO: 9422 - RNA, 21 nt, Artificial Sequence
  Synthetic
ggugugaauuacacaguuuau

SEQ ID NO: 9423 - RNA, 24 nt, Artificial Sequence
  Synthetic
gcaggugugaauuacacaguuuau

SEQ ID NO: 9424 - RNA, 19 nt, Artificial Sequence
  Synthetic
gauguucuauaucguuuau

SEQ ID NO: 9425 - RNA, 21 nt, Artificial Sequence
  Synthetic
gugauguucuauaucguuuau

SEQ ID NO: 9426 - RNA, 24 nt, Artificial Sequence
  Synthetic
guugugauguucuauaucguuuau

SEQ ID NO: 9427 - RNA, 20 nt, Artificial Sequence
  Synthetic
gauggucaccauggguuuau

SEQ ID NO: 9428 - RNA, 22 nt, Artificial Sequence
  Synthetic
gugauggucaccauggguuuau

SEQ ID NO: 9429 - RNA, 23 nt, Artificial Sequence
  Synthetic
ggugauggucaccauggguuuau

SEQ ID NO: 9430 - RNA, 24 nt, Artificial Sequence
  Synthetic
gggugauggucaccauggguuuau

SEQ ID NO: 9431 - RNA, 21 nt, Artificial Sequence
  Synthetic
guaaauaaauuugcauuuuau

SEQ ID NO: 9432 - RNA, 24 nt, Artificial Sequence
  Synthetic
gauguaaauaaauuugcauuuuau

SEQ ID NO: 9433 - RNA, 22 nt, Artificial Sequence
  Synthetic
gaucuucuuuugaagauuuuau

SEQ ID NO: 9434 - RNA, 19 nt, Artificial Sequence
  Synthetic
gugggacccuggauuuuau

SEQ ID NO: 9435 - RNA, 24 nt, Artificial Sequence
  Synthetic
gucacgugggacccuggauuuuau

SEQ ID NO: 9436 - RNA, 24 nt, Artificial Sequence
  Synthetic
guccacagacaagaccacuuuuau

SEQ ID NO: 9437 - RNA, 20 nt, Artificial Sequence
  Synthetic
gaagcucaagugauuuuuau

SEQ ID NO: 9438 - RNA, 22 nt, Artificial Sequence
  Synthetic
gugaagcucaagugauuuuuau

SEQ ID NO: 9439 - RNA, 23 nt, Artificial Sequence
  Synthetic
ggugaagcucaagugauuuuuau

SEQ ID NO: 9440 - RNA, 22 nt, Artificial Sequence
  Synthetic
gaaugaguuuucguauuuuuau

SEQ ID NO: 9441 - RNA, 24 nt, Artificial Sequence
  Synthetic
gagaaugaguuuucguauuuuuau

SEQ ID NO: 9442 - RNA, 23 nt, Artificial Sequence
  Synthetic
guuacugucuaaauuauuuuuau

SEQ ID NO: 9443 - RNA, 20 nt, Artificial Sequence
  Synthetic
guuucaccugaacaaaaacu

SEQ ID NO: 9444 - RNA, 24 nt, Artificial Sequence
  Synthetic
gcuaguuucaccugaacaaaaacu

SEQ ID NO: 9445 - RNA, 22 nt, Artificial Sequence
  Synthetic
gaaaucaaguuggauaaaaacu

SEQ ID NO: 9446 - RNA, 23 nt, Artificial Sequence
  Synthetic
ggaaaucaaguuggauaaaaacu

SEQ ID NO: 9447 - RNA, 20 nt, Artificial Sequence
  Synthetic
guaaaauguuuuucaaaacu

SEQ ID NO: 9448 - RNA, 23 nt, Artificial Sequence
  Synthetic
guuguaaaauguuuuucaaaacu

SEQ ID NO: 9449 - RNA, 19 nt, Artificial Sequence
  Synthetic
gaguagggccaagaaaacu

SEQ ID NO: 9450 - RNA, 20 nt, Artificial Sequence
  Synthetic
ggaguagggccaagaaaacu

SEQ ID NO: 9451 - RNA, 21 nt, Artificial Sequence
  Synthetic
gggaguagggccaagaaaacu

SEQ ID NO: 9452 - RNA, 22 nt, Artificial Sequence
  Synthetic
gucuuauuuuauagagaaaacu

SEQ ID NO: 9453 - RNA, 18 nt, Artificial Sequence
  Synthetic
gcuguguacuggaaaacu

SEQ ID NO: 9454 - RNA, 20 nt, Artificial Sequence
  Synthetic
gucauaaccagagacaaacu

SEQ ID NO: 9455 - RNA, 18 nt, Artificial Sequence
  Synthetic
gaccacacgagacaaacu

SEQ ID NO: 9456 - RNA, 19 nt, Artificial Sequence
  Synthetic
ggaccacacgagacaaacu

SEQ ID NO: 9457 - RNA, 24 nt, Artificial Sequence
  Synthetic
gaacaggaccacacgagacaaacu

SEQ ID NO: 9458 - RNA, 20 nt, Artificial Sequence
  Synthetic
gaaccauagaaauccaaacu

SEQ ID NO: 9459 - RNA, 18 nt, Artificial Sequence
  Synthetic
guguucauuguccaaacu

SEQ ID NO: 9460 - RNA, 22 nt, Artificial Sequence
  Synthetic
gcuaguguucauuguccaaacu

SEQ ID NO: 9461 - RNA, 20 nt, Artificial Sequence
  Synthetic
gucucaaauguagucaaacu

SEQ ID NO: 9462 - RNA, 23 nt, Artificial Sequence
  Synthetic
guauuuuaugcguguuucaaacu

SEQ ID NO: 9463 - RNA, 20 nt, Artificial Sequence
  Synthetic
gauauugcagaugagaaacu

SEQ ID NO: 9464 - RNA, 19 nt, Artificial Sequence
  Synthetic
gcaauaaucuaguuaaacu

SEQ ID NO: 9465 - RNA, 22 nt, Artificial Sequence
  Synthetic
gugaacaaagccuuuuuaaacu

SEQ ID NO: 9466 - RNA, 18 nt, Artificial Sequence
  Synthetic
gacauacagagcucaacu

SEQ ID NO: 9467 - RNA, 18 nt, Artificial Sequence
  Synthetic
gccuucagaguuucaacu

SEQ ID NO: 9468 - RNA, 24 nt, Artificial Sequence
  Synthetic
gaaaaugccuucagaguuucaacu

SEQ ID NO: 9469 - RNA, 20 nt, Artificial Sequence
  Synthetic
gcccagcccaauaaagaacu

SEQ ID NO: 9470 - RNA, 20 nt, Artificial Sequence
  Synthetic
guauaucaagcauaagaacu

SEQ ID NO: 9471 - RNA, 24 nt, Artificial Sequence
  Synthetic
gaaucuaaauccaucuccagaacu

SEQ ID NO: 9472 - RNA, 19 nt, Artificial Sequence
  Synthetic
gcucuguuucuauagaacu

SEQ ID NO: 9473 - RNA, 20 nt, Artificial Sequence
  Synthetic
gcauggugucagaaggaacu

SEQ ID NO: 9474 - RNA, 24 nt, Artificial Sequence
  Synthetic
gaaagcauggugucagaaggaacu

SEQ ID NO: 9475 - RNA, 23 nt, Artificial Sequence
  Synthetic
guauuuuaggguucaggggaacu

SEQ ID NO: 9476 - RNA, 19 nt, Artificial Sequence
  Synthetic
gcugggcgaagggggaacu

SEQ ID NO: 9477 - RNA, 20 nt, Artificial Sequence
  Synthetic
ggcugggcgaagggggaacu

SEQ ID NO: 9478 - RNA, 18 nt, Artificial Sequence
  Synthetic
gaauugcaaucuggaacu

SEQ ID NO: 9479 - RNA, 21 nt, Artificial Sequence
  Synthetic
gaugaauugcaaucuggaacu

SEQ ID NO: 9480 - RNA, 20 nt, Artificial Sequence
  Synthetic
gccaaaacagauuuugaacu

SEQ ID NO: 9481 - RNA, 21 nt, Artificial Sequence
  Synthetic
ggccaaaacagauuuugaacu

SEQ ID NO: 9482 - RNA, 22 nt, Artificial Sequence
  Synthetic
gggccaaaacagauuuugaacu

SEQ ID NO: 9483 - RNA, 23 nt, Artificial Sequence
  Synthetic
ggggccaaaacagauuuugaacu

SEQ ID NO: 9484 - RNA, 20 nt, Artificial Sequence
  Synthetic
gaagugaugauagaauaacu

SEQ ID NO: 9485 - RNA, 23 nt, Artificial Sequence
  Synthetic
guuuaacaaauaagcacauaacu

SEQ ID NO: 9486 - RNA, 19 nt, Artificial Sequence
  Synthetic
gucuuucagugucauaacu

SEQ ID NO: 9487 - RNA, 18 nt, Artificial Sequence
  Synthetic
gccuacuccuguauaacu

SEQ ID NO: 9488 - RNA, 20 nt, Artificial Sequence
  Synthetic
gugccuacuccuguauaacu

SEQ ID NO: 9489 - RNA, 21 nt, Artificial Sequence
  Synthetic
ggugccuacuccuguauaacu

SEQ ID NO: 9490 - RNA, 24 nt, Artificial Sequence
  Synthetic
gcaggugccuacuccuguauaacu

SEQ ID NO: 9491 - RNA, 19 nt, Artificial Sequence
  Synthetic
gagguacccaagucuaacu

SEQ ID NO: 9492 - RNA, 22 nt, Artificial Sequence
  Synthetic
gaagagguacccaagucuaacu

SEQ ID NO: 9493 - RNA, 23 nt, Artificial Sequence
  Synthetic
ggaagagguacccaagucuaacu

SEQ ID NO: 9494 - RNA, 21 nt, Artificial Sequence
  Synthetic
gaauaaaacuaaugucuaacu

SEQ ID NO: 9495 - RNA, 22 nt, Artificial Sequence
  Synthetic
ggaauaaaacuaaugucuaacu

SEQ ID NO: 9496 - RNA, 21 nt, Artificial Sequence
  Synthetic
guuccacagguauuucuaacu

SEQ ID NO: 9497 - RNA, 24 nt, Artificial Sequence
  Synthetic
gauguuccacagguauuucuaacu

SEQ ID NO: 9498 - RNA, 20 nt, Artificial Sequence
  Synthetic
gucaauucgguugauuaacu

SEQ ID NO: 9499 - RNA, 21 nt, Artificial Sequence
  Synthetic
ggucaauucgguugauuaacu

SEQ ID NO: 9500 - RNA, 22 nt, Artificial Sequence
  Synthetic
gggucaauucgguugauuaacu

SEQ ID NO: 9501 - RNA, 18 nt, Artificial Sequence
  Synthetic
ggacacauucuaaacacu

SEQ ID NO: 9502 - RNA, 22 nt, Artificial Sequence
  Synthetic
gccaggacacauucuaaacacu

SEQ ID NO: 9503 - RNA, 24 nt, Artificial Sequence
  Synthetic
gugccaggacacauucuaaacacu

SEQ ID NO: 9504 - RNA, 19 nt, Artificial Sequence
  Synthetic
guaagugguaaagaacacu

SEQ ID NO: 9505 - RNA, 19 nt, Artificial Sequence
  Synthetic
guuacugcugaagaacacu

SEQ ID NO: 9506 - RNA, 21 nt, Artificial Sequence
  Synthetic
gaguuacugcugaagaacacu

SEQ ID NO: 9507 - RNA, 18 nt, Artificial Sequence
  Synthetic
gcuccaacuugccacacu

SEQ ID NO: 9508 - RNA, 24 nt, Artificial Sequence
  Synthetic
gccuuagcuccaacuugccacacu

SEQ ID NO: 9509 - RNA, 18 nt, Artificial Sequence
  Synthetic
gcagcuuuacuccacacu

SEQ ID NO: 9510 - RNA, 21 nt, Artificial Sequence
  Synthetic
gcugcagcuuuacuccacacu

SEQ ID NO: 9511 - RNA, 20 nt, Artificial Sequence
  Synthetic
gucagucucuggcgcacacu

SEQ ID NO: 9512 - RNA, 23 nt, Artificial Sequence
  Synthetic
gcugucagucucuggcgcacacu

SEQ ID NO: 9513 - RNA, 23 nt, Artificial Sequence
  Synthetic
gccuaaauguugaauuugacacu

SEQ ID NO: 9514 - RNA, 20 nt, Artificial Sequence
  Synthetic
guaagguauagaaauacacu

SEQ ID NO: 9515 - RNA, 24 nt, Artificial Sequence
  Synthetic
gcuuaacaccacaucuggaccacu

SEQ ID NO: 9516 - RNA, 18 nt, Artificial Sequence
  Synthetic
ggugaaaucugacccacu

SEQ ID NO: 9517 - RNA, 23 nt, Artificial Sequence
  Synthetic
gucuuggugaaaucugacccacu

SEQ ID NO: 9518 - RNA, 24 nt, Artificial Sequence
  Synthetic
ggucuuggugaaaucugacccacu

SEQ ID NO: 9519 - RNA, 20 nt, Artificial Sequence
  Synthetic
gaaagccuccucaucccacu

SEQ ID NO: 9520 - RNA, 21 nt, Artificial Sequence
  Synthetic
ggaaagccuccucaucccacu

SEQ ID NO: 9521 - RNA, 23 nt, Artificial Sequence
  Synthetic
gaggaaagccuccucaucccacu

SEQ ID NO: 9522 - RNA, 24 nt, Artificial Sequence
  Synthetic
ggaggaaagccuccucaucccacu

SEQ ID NO: 9523 - RNA, 18 nt, Artificial Sequence
  Synthetic
guacuugcaucucccacu

SEQ ID NO: 9524 - RNA, 20 nt, Artificial Sequence
  Synthetic
guguacuugcaucucccacu

SEQ ID NO: 9525 - RNA, 21 nt, Artificial Sequence
  Synthetic
gguguacuugcaucucccacu

SEQ ID NO: 9526 - RNA, 18 nt, Artificial Sequence
  Synthetic
gauguguauaaagccacu

SEQ ID NO: 9527 - RNA, 20 nt, Artificial Sequence
  Synthetic
gagauguguauaaagccacu

SEQ ID NO: 9528 - RNA, 18 nt, Artificial Sequence
  Synthetic
gaaaacagaauggccacu

SEQ ID NO: 9529 - RNA, 22 nt, Artificial Sequence
  Synthetic
guggcagagggagggcagcacu

SEQ ID NO: 9530 - RNA, 21 nt, Artificial Sequence
  Synthetic
guaucuucacuuuguagcacu

SEQ ID NO: 9531 - RNA, 20 nt, Artificial Sequence
  Synthetic
guuauuugcuuucuggcacu

SEQ ID NO: 9532 - RNA, 21 nt, Artificial Sequence
  Synthetic
gguuauuugcuuucuggcacu

SEQ ID NO: 9533 - RNA, 22 nt, Artificial Sequence
  Synthetic
ggguuauuugcuuucuggcacu

SEQ ID NO: 9534 - RNA, 21 nt, Artificial Sequence
  Synthetic
gaaucacuggacaugugcacu

SEQ ID NO: 9535 - RNA, 22 nt, Artificial Sequence
  Synthetic
gccaaacacuaguuugugcacu

SEQ ID NO: 9536 - RNA, 24 nt, Artificial Sequence
  Synthetic
guuuauauucuuaaacauugcacu

SEQ ID NO: 9537 - RNA, 23 nt, Artificial Sequence
  Synthetic
guagagacuucgagagaaucacu

SEQ ID NO: 9538 - RNA, 20 nt, Artificial Sequence
  Synthetic
gcauuaccuuuuuacucacu

SEQ ID NO: 9539 - RNA, 21 nt, Artificial Sequence
  Synthetic
ggcauuaccuuuuuacucacu

SEQ ID NO: 9540 - RNA, 23 nt, Artificial Sequence
  Synthetic
gucauuuuguacguaggcucacu

SEQ ID NO: 9541 - RNA, 24 nt, Artificial Sequence
  Synthetic
ggucauuuuguacguaggcucacu

SEQ ID NO: 9542 - RNA, 22 nt, Artificial Sequence
  Synthetic
gccuaaaacauuuguucucacu

SEQ ID NO: 9543 - RNA, 24 nt, Artificial Sequence
  Synthetic
gagccuaaaacauuuguucucacu

SEQ ID NO: 9544 - RNA, 19 nt, Artificial Sequence
  Synthetic
gugguaugucagagucacu

SEQ ID NO: 9545 - RNA, 22 nt, Artificial Sequence
  Synthetic
guagugguaugucagagucacu

SEQ ID NO: 9546 - RNA, 24 nt, Artificial Sequence
  Synthetic
gaguagugguaugucagagucacu

SEQ ID NO: 9547 - RNA, 19 nt, Artificial Sequence
  Synthetic
gaaugaccaggacgucacu

SEQ ID NO: 9548 - RNA, 21 nt, Artificial Sequence
  Synthetic
gagaaugaccaggacgucacu

SEQ ID NO: 9549 - RNA, 22 nt, Artificial Sequence
  Synthetic
ggagaaugaccaggacgucacu

SEQ ID NO: 9550 - RNA, 21 nt, Artificial Sequence
  Synthetic
guuaugcucaggcccgucacu

SEQ ID NO: 9551 - RNA, 22 nt, Artificial Sequence
  Synthetic
gccauuaaaugugauauucacu

SEQ ID NO: 9552 - RNA, 22 nt, Artificial Sequence
  Synthetic
gaauccugauaaggccaagacu

SEQ ID NO: 9553 - RNA, 23 nt, Artificial Sequence
  Synthetic
gucauucauauaacuugaagacu

SEQ ID NO: 9554 - RNA, 24 nt, Artificial Sequence
  Synthetic
ggucauucauauaacuugaagacu

SEQ ID NO: 9555 - RNA, 19 nt, Artificial Sequence
  Synthetic
gcccaggcaugaacagacu

SEQ ID NO: 9556 - RNA, 23 nt, Artificial Sequence
  Synthetic
gaaugcccaggcaugaacagacu

SEQ ID NO: 9557 - RNA, 18 nt, Artificial Sequence
  Synthetic
gauguguguauacagacu

SEQ ID NO: 9558 - RNA, 20 nt, Artificial Sequence
  Synthetic
gagauguguguauacagacu

SEQ ID NO: 9559 - RNA, 21 nt, Artificial Sequence
  Synthetic
ggagauguguguauacagacu

SEQ ID NO: 9560 - RNA, 20 nt, Artificial Sequence
  Synthetic
gucgaaggugcagccagacu

SEQ ID NO: 9561 - RNA, 22 nt, Artificial Sequence
  Synthetic
gagucgaaggugcagccagacu

SEQ ID NO: 9562 - RNA, 24 nt, Artificial Sequence
  Synthetic
gugagucgaaggugcagccagacu

SEQ ID NO: 9563 - RNA, 22 nt, Artificial Sequence
  Synthetic
gaaaugcugcagucuagagacu

SEQ ID NO: 9564 - RNA, 24 nt, Artificial Sequence
  Synthetic
gucuucuuuaacuuauuggagacu

SEQ ID NO: 9565 - RNA, 22 nt, Artificial Sequence
  Synthetic
gauguaaaauagacaugagacu

SEQ ID NO: 9566 - RNA, 22 nt, Artificial Sequence
  Synthetic
gauuuauuauuauuuuuagacu

SEQ ID NO: 9567 - RNA, 23 nt, Artificial Sequence
  Synthetic
ggauuuauuauuauuuuuagacu

SEQ ID NO: 9568 - RNA, 18 nt, Artificial Sequence
  Synthetic
gccuaaaauggaaggacu

SEQ ID NO: 9569 - RNA, 24 nt, Artificial Sequence
  Synthetic
gaaaaagccuaaaauggaaggacu

SEQ ID NO: 9570 - RNA, 20 nt, Artificial Sequence
  Synthetic
gccugauagugcuaaggacu

SEQ ID NO: 9571 - RNA, 19 nt, Artificial Sequence
  Synthetic
guaguuggggauacggacu

SEQ ID NO: 9572 - RNA, 20 nt, Artificial Sequence
  Synthetic
gguaguuggggauacggacu

SEQ ID NO: 9573 - RNA, 23 nt, Artificial Sequence
  Synthetic
gaagguaguuggggauacggacu

SEQ ID NO: 9574 - RNA, 18 nt, Artificial Sequence
  Synthetic
ggaaagagaauguggacu

SEQ ID NO: 9575 - RNA, 24 nt, Artificial Sequence
  Synthetic
guuucuucaacagcuuauaugacu

SEQ ID NO: 9576 - RNA, 18 nt, Artificial Sequence
  Synthetic
gccuuaugguguaugacu

SEQ ID NO: 9577 - RNA, 18 nt, Artificial Sequence
  Synthetic
ggaucuuuauggcugacu

SEQ ID NO: 9578 - RNA, 18 nt, Artificial Sequence
  Synthetic
guuuuaaauguucugacu

SEQ ID NO: 9579 - RNA, 20 nt, Artificial Sequence
  Synthetic
guguuuuaaauguucugacu

SEQ ID NO: 9580 - RNA, 20 nt, Artificial Sequence
  Synthetic
gaauaugaaucccagugacu

SEQ ID NO: 9581 - RNA, 20 nt, Artificial Sequence
  Synthetic
gcacccauuccucagugacu

SEQ ID NO: 9582 - RNA, 22 nt, Artificial Sequence
  Synthetic
gugcacccauuccucagugacu

SEQ ID NO: 9583 - RNA, 23 nt, Artificial Sequence
  Synthetic
ggugcacccauuccucagugacu

SEQ ID NO: 9584 - RNA, 21 nt, Artificial Sequence
  Synthetic
gagacucugauauaauugacu

SEQ ID NO: 9585 - RNA, 21 nt, Artificial Sequence
  Synthetic
gauauuaguucugaguugacu

SEQ ID NO: 9586 - RNA, 20 nt, Artificial Sequence
  Synthetic
gcaaccacaccacaaauacu

SEQ ID NO: 9587 - RNA, 24 nt, Artificial Sequence
  Synthetic
guuuuaaagacacagggaaauacu

SEQ ID NO: 9588 - RNA, 22 nt, Artificial Sequence
  Synthetic
gucaaaugauaauugaaauacu

SEQ ID NO: 9589 - RNA, 22 nt, Artificial Sequence
  Synthetic
gaaaaugaaaucugucaauacu

SEQ ID NO: 9590 - RNA, 18 nt, Artificial Sequence
  Synthetic
ggaaugguggagaauacu

SEQ ID NO: 9591 - RNA, 19 nt, Artificial Sequence
  Synthetic
gggaaugguggagaauacu

SEQ ID NO: 9592 - RNA, 20 nt, Artificial Sequence
  Synthetic
ggggaaugguggagaauacu

SEQ ID NO: 9593 - RNA, 23 nt, Artificial Sequence
  Synthetic
guucauaucauuuaaugaauacu

SEQ ID NO: 9594 - RNA, 19 nt, Artificial Sequence
  Synthetic
gcuuaaaauuaaacauacu

SEQ ID NO: 9595 - RNA, 23 nt, Artificial Sequence
  Synthetic
gauagcuuaaaauuaaacauacu

SEQ ID NO: 9596 - RNA, 20 nt, Artificial Sequence
  Synthetic
gcugcccuuauuuacauacu

SEQ ID NO: 9597 - RNA, 23 nt, Artificial Sequence
  Synthetic
gauuuuggccugcagaccauacu

SEQ ID NO: 9598 - RNA, 21 nt, Artificial Sequence
  Synthetic
gaucaauacacuguugauacu

SEQ ID NO: 9599 - RNA, 19 nt, Artificial Sequence
  Synthetic
gaauaaaaugugcuauacu

SEQ ID NO: 9600 - RNA, 23 nt, Artificial Sequence
  Synthetic
gaaugaauaaaaugugcuauacu

SEQ ID NO: 9601 - RNA, 24 nt, Artificial Sequence
  Synthetic
ggaaugaauaaaaugugcuauacu

SEQ ID NO: 9602 - RNA, 20 nt, Artificial Sequence
  Synthetic
guuuuguguaguaguauacu

SEQ ID NO: 9603 - RNA, 18 nt, Artificial Sequence
  Synthetic
ggcuucuucguuuauacu

SEQ ID NO: 9604 - RNA, 20 nt, Artificial Sequence
  Synthetic
gaggcuucuucguuuauacu

SEQ ID NO: 9605 - RNA, 22 nt, Artificial Sequence
  Synthetic
gaauucccuuuaauuuuauacu

SEQ ID NO: 9606 - RNA, 19 nt, Artificial Sequence
  Synthetic
gugaauguaugauacuacu

SEQ ID NO: 9607 - RNA, 21 nt, Artificial Sequence
  Synthetic
gcgugaauguaugauacuacu

SEQ ID NO: 9608 - RNA, 23 nt, Artificial Sequence
  Synthetic
gagcgugaauguaugauacuacu

SEQ ID NO: 9609 - RNA, 24 nt, Artificial Sequence
  Synthetic
ggagcgugaauguaugauacuacu

SEQ ID NO: 9610 - RNA, 18 nt, Artificial Sequence
  Synthetic
gaagggacaucagcuacu

SEQ ID NO: 9611 - RNA, 21 nt, Artificial Sequence
  Synthetic
gcugaagggacaucagcuacu

SEQ ID NO: 9612 - RNA, 19 nt, Artificial Sequence
  Synthetic
gcaaacuauuucugcuacu

SEQ ID NO: 9613 - RNA, 19 nt, Artificial Sequence
  Synthetic
guaagcaaacaguucuacu

SEQ ID NO: 9614 - RNA, 21 nt, Artificial Sequence
  Synthetic
guguaagcaaacaguucuacu

SEQ ID NO: 9615 - RNA, 23 nt, Artificial Sequence
  Synthetic
gaguguaagcaaacaguucuacu

SEQ ID NO: 9616 - RNA, 21 nt, Artificial Sequence
  Synthetic
gauuaaauaaucauuucuacu

SEQ ID NO: 9617 - RNA, 23 nt, Artificial Sequence
  Synthetic
gcaaauacuauaugcuaaguacu

SEQ ID NO: 9618 - RNA, 23 nt, Artificial Sequence
  Synthetic
guacaugauauaugccagguacu

SEQ ID NO: 9619 - RNA, 18 nt, Artificial Sequence
  Synthetic
gaaaaaucaggggguacu

SEQ ID NO: 9620 - RNA, 20 nt, Artificial Sequence
  Synthetic
gagaaaaaucaggggguacu

SEQ ID NO: 9621 - RNA, 21 nt, Artificial Sequence
  Synthetic
ggagaaaaaucaggggguacu

SEQ ID NO: 9622 - RNA, 19 nt, Artificial Sequence
  Synthetic
gaggagaugcuuugguacu

SEQ ID NO: 9623 - RNA, 20 nt, Artificial Sequence
  Synthetic
ggaggagaugcuuugguacu

SEQ ID NO: 9624 - RNA, 21 nt, Artificial Sequence
  Synthetic
gggaggagaugcuuugguacu

SEQ ID NO: 9625 - RNA, 23 nt, Artificial Sequence
  Synthetic
gugggaggagaugcuuugguacu

SEQ ID NO: 9626 - RNA, 24 nt, Artificial Sequence
  Synthetic
ggugggaggagaugcuuugguacu

SEQ ID NO: 9627 - RNA, 19 nt, Artificial Sequence
  Synthetic
guguuucuuuuuugguacu

SEQ ID NO: 9628 - RNA, 22 nt, Artificial Sequence
  Synthetic
gaaguguuucuuuuuugguacu

SEQ ID NO: 9629 - RNA, 23 nt, Artificial Sequence
  Synthetic
ggaaguguuucuuuuuugguacu

SEQ ID NO: 9630 - RNA, 19 nt, Artificial Sequence
  Synthetic
gcuuugaugauaauguacu

SEQ ID NO: 9631 - RNA, 24 nt, Artificial Sequence
  Synthetic
guaucuuguacuauaacuuguacu

SEQ ID NO: 9632 - RNA, 18 nt, Artificial Sequence
  Synthetic
gaauauacucagauuacu

SEQ ID NO: 9633 - RNA, 18 nt, Artificial Sequence
  Synthetic
gaaugaagcuaucuuacu

SEQ ID NO: 9634 - RNA, 19 nt, Artificial Sequence
  Synthetic
ggaaugaagcuaucuuacu

SEQ ID NO: 9635 - RNA, 23 nt, Artificial Sequence
  Synthetic
gaauggaaugaagcuaucuuacu

SEQ ID NO: 9636 - RNA, 24 nt, Artificial Sequence
  Synthetic
ggaauggaaugaagcuaucuuacu

SEQ ID NO: 9637 - RNA, 23 nt, Artificial Sequence
  Synthetic
gcuacaauuucucauuucuuacu

SEQ ID NO: 9638 - RNA, 19 nt, Artificial Sequence
  Synthetic
gcuugaaauauugguuacu

SEQ ID NO: 9639 - RNA, 18 nt, Artificial Sequence
  Synthetic
guaaauaaccaauuuacu

SEQ ID NO: 9640 - RNA, 21 nt, Artificial Sequence
  Synthetic
guaguaaauaaccaauuuacu

SEQ ID NO: 9641 - RNA, 24 nt, Artificial Sequence
  Synthetic
gaaguaguaaauaaccaauuuacu

SEQ ID NO: 9642 - RNA, 23 nt, Artificial Sequence
  Synthetic
guuuuugcacaugcucuuuuacu

SEQ ID NO: 9643 - RNA, 19 nt, Artificial Sequence
  Synthetic
gagaucuuuuagcaaaccu

SEQ ID NO: 9644 - RNA, 21 nt, Artificial Sequence
  Synthetic
gagagaucuuuuagcaaaccu

SEQ ID NO: 9645 - RNA, 24 nt, Artificial Sequence
  Synthetic
gaagagagaucuuuuagcaaaccu

SEQ ID NO: 9646 - RNA, 23 nt, Artificial Sequence
  Synthetic
guauuuuuuuucuccucaaaccu

SEQ ID NO: 9647 - RNA, 18 nt, Artificial Sequence
  Synthetic
gccuccucuccgaaaccu

SEQ ID NO: 9648 - RNA, 20 nt, Artificial Sequence
  Synthetic
gucucuaaaacuggaaaccu

SEQ ID NO: 9649 - RNA, 19 nt, Artificial Sequence
  Synthetic
guaauguuauuggaaaccu

SEQ ID NO: 9650 - RNA, 21 nt, Artificial Sequence
  Synthetic
guguaauguuauuggaaaccu

SEQ ID NO: 9651 - RNA, 22 nt, Artificial Sequence
  Synthetic
gguguaauguuauuggaaaccu

SEQ ID NO: 9652 - RNA, 23 nt, Artificial Sequence
  Synthetic
ggguguaauguuauuggaaaccu

SEQ ID NO: 9653 - RNA, 23 nt, Artificial Sequence
  Synthetic
gcuuaccccaggacaagcaaccu

SEQ ID NO: 9654 - RNA, 24 nt, Artificial Sequence
  Synthetic
ggcuuaccccaggacaagcaaccu

SEQ ID NO: 9655 - RNA, 23 nt, Artificial Sequence
  Synthetic
gaagauguuaauccccagaaccu

SEQ ID NO: 9656 - RNA, 20 nt, Artificial Sequence
  Synthetic
gacuuuucaaacaggaaccu

SEQ ID NO: 9657 - RNA, 22 nt, Artificial Sequence
  Synthetic
gaauuccuaaauugaggaaccu

SEQ ID NO: 9658 - RNA, 23 nt, Artificial Sequence
  Synthetic
ggaauuccuaaauugaggaaccu

SEQ ID NO: 9659 - RNA, 20 nt, Artificial Sequence
  Synthetic
gaagcuuaauacuauaaccu

SEQ ID NO: 9660 - RNA, 20 nt, Artificial Sequence
  Synthetic
gaaaacaucaaaacuaaccu

SEQ ID NO: 9661 - RNA, 21 nt, Artificial Sequence
  Synthetic
guccucacaguggaguaaccu

SEQ ID NO: 9662 - RNA, 24 nt, Artificial Sequence
  Synthetic
gcuguccucacaguggaguaaccu

SEQ ID NO: 9663 - RNA, 18 nt, Artificial Sequence
  Synthetic
gccucuccuuugacaccu

SEQ ID NO: 9664 - RNA, 18 nt, Artificial Sequence
  Synthetic
guacaucugaguacaccu

SEQ ID NO: 9665 - RNA, 23 nt, Artificial Sequence
  Synthetic
gaauuguacaucugaguacaccu

SEQ ID NO: 9666 - RNA, 20 nt, Artificial Sequence
  Synthetic
gcagagaaaagauaccaccu

SEQ ID NO: 9667 - RNA, 19 nt, Artificial Sequence
  Synthetic
gacuuucuaauguccaccu

SEQ ID NO: 9668 - RNA, 21 nt, Artificial Sequence
  Synthetic
gagacuuucuaauguccaccu

SEQ ID NO: 9669 - RNA, 22 nt, Artificial Sequence
  Synthetic
guccagagcacagacaucaccu

SEQ ID NO: 9670 - RNA, 23 nt, Artificial Sequence
  Synthetic
gguccagagcacagacaucaccu

SEQ ID NO: 9671 - RNA, 19 nt, Artificial Sequence
  Synthetic
gcuggaauagguaucaccu

SEQ ID NO: 9672 - RNA, 21 nt, Artificial Sequence
  Synthetic
gugcuggaauagguaucaccu

SEQ ID NO: 9673 - RNA, 22 nt, Artificial Sequence
  Synthetic
ggugcuggaauagguaucaccu

SEQ ID NO: 9674 - RNA, 19 nt, Artificial Sequence
  Synthetic
gcuuggauguuuaucaccu

SEQ ID NO: 9675 - RNA, 20 nt, Artificial Sequence
  Synthetic
ggcuuggauguuuaucaccu

SEQ ID NO: 9676 - RNA, 23 nt, Artificial Sequence
  Synthetic
gauggcuuggauguuuaucaccu

SEQ ID NO: 9677 - RNA, 21 nt, Artificial Sequence
  Synthetic
guauacagaugcuccucaccu

SEQ ID NO: 9678 - RNA, 19 nt, Artificial Sequence
  Synthetic
gaaaaugggauagucaccu

SEQ ID NO: 9679 - RNA, 20 nt, Artificial Sequence
  Synthetic
ggaaaaugggauagucaccu

SEQ ID NO: 9680 - RNA, 23 nt, Artificial Sequence
  Synthetic
gacuuaggaaggcagcaagaccu

SEQ ID NO: 9681 - RNA, 24 nt, Artificial Sequence
  Synthetic
ggacuuaggaaggcagcaagaccu

SEQ ID NO: 9682 - RNA, 21 nt, Artificial Sequence
  Synthetic
gauuuuucuggugcgagaccu

SEQ ID NO: 9683 - RNA, 22 nt, Artificial Sequence
  Synthetic
gacagacacaagagggagaccu

SEQ ID NO: 9684 - RNA, 20 nt, Artificial Sequence
  Synthetic
guagcuguggggugagaccu

SEQ ID NO: 9685 - RNA, 21 nt, Artificial Sequence
  Synthetic
gguagcuguggggugagaccu

SEQ ID NO: 9686 - RNA, 18 nt, Artificial Sequence
  Synthetic
ggaucuguugggcgaccu

SEQ ID NO: 9687 - RNA, 20 nt, Artificial Sequence
  Synthetic
guggaucuguugggcgaccu

SEQ ID NO: 9688 - RNA, 22 nt, Artificial Sequence
  Synthetic
guguggaucuguugggcgaccu

SEQ ID NO: 9689 - RNA, 23 nt, Artificial Sequence
  Synthetic
gguguggaucuguugggcgaccu

SEQ ID NO: 9690 - RNA, 22 nt, Artificial Sequence
  Synthetic
guaaagauuugccguaggaccu

SEQ ID NO: 9691 - RNA, 21 nt, Artificial Sequence
  Synthetic
guuacagauaggguaggaccu

SEQ ID NO: 9692 - RNA, 19 nt, Artificial Sequence
  Synthetic
gucaagcuagaagggaccu

SEQ ID NO: 9693 - RNA, 24 nt, Artificial Sequence
  Synthetic
gaacagucaagcuagaagggaccu

SEQ ID NO: 9694 - RNA, 21 nt, Artificial Sequence
  Synthetic
gauaaugaaaaauugggaccu

SEQ ID NO: 9695 - RNA, 19 nt, Artificial Sequence
  Synthetic
gacacaaugagaaugaccu

SEQ ID NO: 9696 - RNA, 21 nt, Artificial Sequence
  Synthetic
gagacacaaugagaaugaccu

SEQ ID NO: 9697 - RNA, 24 nt, Artificial Sequence
  Synthetic
gaagagacacaaugagaaugaccu

SEQ ID NO: 9698 - RNA, 18 nt, Artificial Sequence
  Synthetic
gucuaacuacaaguaccu

SEQ ID NO: 9699 - RNA, 20 nt, Artificial Sequence
  Synthetic
gcgucuaacuacaaguaccu

SEQ ID NO: 9700 - RNA, 23 nt, Artificial Sequence
  Synthetic
gaagcgucuaacuacaaguaccu

SEQ ID NO: 9701 - RNA, 23 nt, Artificial Sequence
  Synthetic
gaaaucaauaguguaccuuaccu

SEQ ID NO: 9702 - RNA, 21 nt, Artificial Sequence
  Synthetic
gaauccgggcaaggguuaccu

SEQ ID NO: 9703 - RNA, 23 nt, Artificial Sequence
  Synthetic
gugaauccgggcaaggguuaccu

SEQ ID NO: 9704 - RNA, 24 nt, Artificial Sequence
  Synthetic
ggugaauccgggcaaggguuaccu

SEQ ID NO: 9705 - RNA, 21 nt, Artificial Sequence
  Synthetic
gaauuaagaaagugguuaccu

SEQ ID NO: 9706 - RNA, 23 nt, Artificial Sequence
  Synthetic
gcacaugauggcucauguuaccu

SEQ ID NO: 9707 - RNA, 24 nt, Artificial Sequence
  Synthetic
ggcacaugauggcucauguuaccu

SEQ ID NO: 9708 - RNA, 22 nt, Artificial Sequence
  Synthetic
gacuuuguaauuaacuuuaccu

SEQ ID NO: 9709 - RNA, 23 nt, Artificial Sequence
  Synthetic
ggacuuuguaauuaacuuuaccu

SEQ ID NO: 9710 - RNA, 21 nt, Artificial Sequence
  Synthetic
guucuugggaaauaauacccu

SEQ ID NO: 9711 - RNA, 20 nt, Artificial Sequence
  Synthetic
gaaauccuugaagauacccu

SEQ ID NO: 9712 - RNA, 18 nt, Artificial Sequence
  Synthetic
ggguaguagaguuacccu

SEQ ID NO: 9713 - RNA, 19 nt, Artificial Sequence
  Synthetic
guagucauuuaucaccccu

SEQ ID NO: 9714 - RNA, 18 nt, Artificial Sequence
  Synthetic
gaaauauccaugaccccu

SEQ ID NO: 9715 - RNA, 21 nt, Artificial Sequence
  Synthetic
gaagaaauauccaugaccccu

SEQ ID NO: 9716 - RNA, 23 nt, Artificial Sequence
  Synthetic
gaacacaaugacugugggccccu

SEQ ID NO: 9717 - RNA, 23 nt, Artificial Sequence
  Synthetic
gaacaaaaugagucucugccccu

SEQ ID NO: 9718 - RNA, 24 nt, Artificial Sequence
  Synthetic
ggaacaaaaugagucucugccccu

SEQ ID NO: 9719 - RNA, 24 nt, Artificial Sequence
  Synthetic
guauuauucaaauucaaguccccu

SEQ ID NO: 9720 - RNA, 19 nt, Artificial Sequence
  Synthetic
gcauauacuuacuuccccu

SEQ ID NO: 9721 - RNA, 22 nt, Artificial Sequence
  Synthetic
gaaaccugagaauauuuccccu

SEQ ID NO: 9722 - RNA, 20 nt, Artificial Sequence
  Synthetic
gcagaaaagauguaugcccu

SEQ ID NO: 9723 - RNA, 19 nt, Artificial Sequence
  Synthetic
gacaucuauuuucugcccu

SEQ ID NO: 9724 - RNA, 22 nt, Artificial Sequence
  Synthetic
gaugacaucuauuuucugcccu

SEQ ID NO: 9725 - RNA, 21 nt, Artificial Sequence
  Synthetic
gaaucuaaauuucauaucccu

SEQ ID NO: 9726 - RNA, 22 nt, Artificial Sequence
  Synthetic
gucuuagcuccacacagucccu

SEQ ID NO: 9727 - RNA, 19 nt, Artificial Sequence
  Synthetic
guuggauguguaugucccu

SEQ ID NO: 9728 - RNA, 21 nt, Artificial Sequence
  Synthetic
guuuuugaugucuuguucccu

SEQ ID NO: 9729 - RNA, 19 nt, Artificial Sequence
  Synthetic
gccauaauaucaaaagccu

SEQ ID NO: 9730 - RNA, 20 nt, Artificial Sequence
  Synthetic
ggccauaauaucaaaagccu

SEQ ID NO: 9731 - RNA, 21 nt, Artificial Sequence
  Synthetic
gggccauaauaucaaaagccu

SEQ ID NO: 9732 - RNA, 18 nt, Artificial Sequence
  Synthetic
guuucaaacuccaagccu

SEQ ID NO: 9733 - RNA, 18 nt, Artificial Sequence
  Synthetic
guuuaagguaucaagccu

SEQ ID NO: 9734 - RNA, 21 nt, Artificial Sequence
  Synthetic
gaaguuuaagguaucaagccu

SEQ ID NO: 9735 - RNA, 21 nt, Artificial Sequence
  Synthetic
gaauccuccaaagagaagccu

SEQ ID NO: 9736 - RNA, 22 nt, Artificial Sequence
  Synthetic
ggaauccuccaaagagaagccu

SEQ ID NO: 9737 - RNA, 24 nt, Artificial Sequence
  Synthetic
guggaauccuccaaagagaagccu

SEQ ID NO: 9738 - RNA, 19 nt, Artificial Sequence
  Synthetic
guuggaagcagcccagccu

SEQ ID NO: 9739 - RNA, 23 nt, Artificial Sequence
  Synthetic
gauuguuggaagcagcccagccu

SEQ ID NO: 9740 - RNA, 21 nt, Artificial Sequence
  Synthetic
gacaagguuaaaucauagccu

SEQ ID NO: 9741 - RNA, 23 nt, Artificial Sequence
  Synthetic
gcgacaagguuaaaucauagccu

SEQ ID NO: 9742 - RNA, 23 nt, Artificial Sequence
  Synthetic
gcacauuugaaaauucuuagccu

SEQ ID NO: 9743 - RNA, 19 nt, Artificial Sequence
  Synthetic
gcggugguucccaaggccu

SEQ ID NO: 9744 - RNA, 18 nt, Artificial Sequence
  Synthetic
gauguacccuucaggccu

SEQ ID NO: 9745 - RNA, 20 nt, Artificial Sequence
  Synthetic
guagagcuaggcugaggccu

SEQ ID NO: 9746 - RNA, 19 nt, Artificial Sequence
  Synthetic
guagaugagaagagggccu

SEQ ID NO: 9747 - RNA, 23 nt, Artificial Sequence
  Synthetic
guucguagaugagaagagggccu

SEQ ID NO: 9748 - RNA, 22 nt, Artificial Sequence
  Synthetic
guaauaugauguguauuggccu

SEQ ID NO: 9749 - RNA, 24 nt, Artificial Sequence
  Synthetic
gaguaauaugauguguauuggccu

SEQ ID NO: 9750 - RNA, 22 nt, Artificial Sequence
  Synthetic
gaaaagucauugcuuaaugccu

SEQ ID NO: 9751 - RNA, 23 nt, Artificial Sequence
  Synthetic
gaacccuuguaaaauacaugccu

SEQ ID NO: 9752 - RNA, 24 nt, Artificial Sequence
  Synthetic
ggaacccuuguaaaauacaugccu

SEQ ID NO: 9753 - RNA, 20 nt, Artificial Sequence
  Synthetic
gcccacuagaaggcaugccu

SEQ ID NO: 9754 - RNA, 24 nt, Artificial Sequence
  Synthetic
gucagcccacuagaaggcaugccu

SEQ ID NO: 9755 - RNA, 19 nt, Artificial Sequence
  Synthetic
guauagcauaaucaugccu

SEQ ID NO: 9756 - RNA, 22 nt, Artificial Sequence
  Synthetic
guaacauguaaagaauaugccu

SEQ ID NO: 9757 - RNA, 21 nt, Artificial Sequence
  Synthetic
gccaggggcuggcugcugccu

SEQ ID NO: 9758 - RNA, 22 nt, Artificial Sequence
  Synthetic
ggccaggggcuggcugcugccu

SEQ ID NO: 9759 - RNA, 19 nt, Artificial Sequence
  Synthetic
guauuaaaugcuauugccu

SEQ ID NO: 9760 - RNA, 21 nt, Artificial Sequence
  Synthetic
gaguauuaaaugcuauugccu

SEQ ID NO: 9761 - RNA, 18 nt, Artificial Sequence
  Synthetic
ggaaagauguuauugccu

SEQ ID NO: 9762 - RNA, 23 nt, Artificial Sequence
  Synthetic
gcucaaggaguuucuuguugccu

SEQ ID NO: 9763 - RNA, 20 nt, Artificial Sequence
  Synthetic
gauacuuuaugcaaaauccu

SEQ ID NO: 9764 - RNA, 20 nt, Artificial Sequence
  Synthetic
guaauuggccaccaaauccu

SEQ ID NO: 9765 - RNA, 21 nt, Artificial Sequence
  Synthetic
gcuagaccucuccaucauccu

SEQ ID NO: 9766 - RNA, 19 nt, Artificial Sequence
  Synthetic
guauaaauauuuucauccu

SEQ ID NO: 9767 - RNA, 21 nt, Artificial Sequence
  Synthetic
guguauaaauauuuucauccu

SEQ ID NO: 9768 - RNA, 23 nt, Artificial Sequence
  Synthetic
guauaauaguauucccagauccu

SEQ ID NO: 9769 - RNA, 20 nt, Artificial Sequence
  Synthetic
gaagacuuauugcauauccu

SEQ ID NO: 9770 - RNA, 20 nt, Artificial Sequence
  Synthetic
gucuuucugucuuguauccu

SEQ ID NO: 9771 - RNA, 22 nt, Artificial Sequence
  Synthetic
gugucuuucugucuuguauccu

SEQ ID NO: 9772 - RNA, 23 nt, Artificial Sequence
  Synthetic
ggugucuuucugucuuguauccu

SEQ ID NO: 9773 - RNA, 18 nt, Artificial Sequence
  Synthetic
gauaugcauaaagcuccu

SEQ ID NO: 9774 - RNA, 22 nt, Artificial Sequence
  Synthetic
gccugauaugcauaaagcuccu

SEQ ID NO: 9775 - RNA, 24 nt, Artificial Sequence
  Synthetic
gugccugauaugcauaaagcuccu

SEQ ID NO: 9776 - RNA, 22 nt, Artificial Sequence
  Synthetic
gcacccuacauuuaaugcuccu

SEQ ID NO: 9777 - RNA, 23 nt, Artificial Sequence
  Synthetic
ggcacccuacauuuaaugcuccu

SEQ ID NO: 9778 - RNA, 18 nt, Artificial Sequence
  Synthetic
gaugaaugaaagucuccu

SEQ ID NO: 9779 - RNA, 24 nt, Artificial Sequence
  Synthetic
gucaaugaugaaugaaagucuccu

SEQ ID NO: 9780 - RNA, 20 nt, Artificial Sequence
  Synthetic
gaaauauuuucuagucuccu

SEQ ID NO: 9781 - RNA, 23 nt, Artificial Sequence
  Synthetic
guugaaauauuuucuagucuccu

SEQ ID NO: 9782 - RNA, 21 nt, Artificial Sequence
  Synthetic
guaauuagacuguaaaguccu

SEQ ID NO: 9783 - RNA, 24 nt, Artificial Sequence
  Synthetic
guuguaauuagacuguaaaguccu

SEQ ID NO: 9784 - RNA, 20 nt, Artificial Sequence
  Synthetic
gcuagaaccuggaggguccu

SEQ ID NO: 9785 - RNA, 21 nt, Artificial Sequence
  Synthetic
ggcuagaaccuggaggguccu

SEQ ID NO: 9786 - RNA, 22 nt, Artificial Sequence
  Synthetic
gggcuagaaccuggaggguccu

SEQ ID NO: 9787 - RNA, 23 nt, Artificial Sequence
  Synthetic
ggggcuagaaccuggaggguccu

SEQ ID NO: 9788 - RNA, 20 nt, Artificial Sequence
  Synthetic
gcccuguagguggcuguccu

SEQ ID NO: 9789 - RNA, 21 nt, Artificial Sequence
  Synthetic
ggcccuguagguggcuguccu

SEQ ID NO: 9790 - RNA, 23 nt, Artificial Sequence
  Synthetic
guggcccuguagguggcuguccu

SEQ ID NO: 9791 - RNA, 24 nt, Artificial Sequence
  Synthetic
gguggcccuguagguggcuguccu

SEQ ID NO: 9792 - RNA, 20 nt, Artificial Sequence
  Synthetic
gccuuauugaauguuguccu

SEQ ID NO: 9793 - RNA, 21 nt, Artificial Sequence
  Synthetic
ggccuuauugaauguuguccu

SEQ ID NO: 9794 - RNA, 23 nt, Artificial Sequence
  Synthetic
guggccuuauugaauguuguccu

SEQ ID NO: 9795 - RNA, 24 nt, Artificial Sequence
  Synthetic
gguggccuuauugaauguuguccu

SEQ ID NO: 9796 - RNA, 21 nt, Artificial Sequence
  Synthetic
gauacaauaaaauaaauuccu

SEQ ID NO: 9797 - RNA, 18 nt, Artificial Sequence
  Synthetic
ggaaagcucugaauuccu

SEQ ID NO: 9798 - RNA, 20 nt, Artificial Sequence
  Synthetic
gaggaaagcucugaauuccu

SEQ ID NO: 9799 - RNA, 22 nt, Artificial Sequence
  Synthetic
gugaggaaagcucugaauuccu

SEQ ID NO: 9800 - RNA, 21 nt, Artificial Sequence
  Synthetic
gcuuaguagucuauaauuccu

SEQ ID NO: 9801 - RNA, 23 nt, Artificial Sequence
  Synthetic
guacauaaaguuuccauauuccu

SEQ ID NO: 9802 - RNA, 24 nt, Artificial Sequence
  Synthetic
gaccacuuuuguggcauacuuccu

SEQ ID NO: 9803 - RNA, 19 nt, Artificial Sequence
  Synthetic
gcucuuuucucuacuuccu

SEQ ID NO: 9804 - RNA, 24 nt, Artificial Sequence
  Synthetic
gauaugcucuuuucucuacuuccu

SEQ ID NO: 9805 - RNA, 21 nt, Artificial Sequence
  Synthetic
guaccugucguaguacuuccu

SEQ ID NO: 9806 - RNA, 23 nt, Artificial Sequence
  Synthetic
gaguaccugucguaguacuuccu

SEQ ID NO: 9807 - RNA, 20 nt, Artificial Sequence
  Synthetic
guuuuucauucuugcuuccu

SEQ ID NO: 9808 - RNA, 21 nt, Artificial Sequence
  Synthetic
gguuuuucauucuugcuuccu

SEQ ID NO: 9809 - RNA, 23 nt, Artificial Sequence
  Synthetic
gacuguggguccaauuucuuccu

SEQ ID NO: 9810 - RNA, 18 nt, Artificial Sequence
  Synthetic
guuuucacaagauuuccu

SEQ ID NO: 9811 - RNA, 19 nt, Artificial Sequence
  Synthetic
gguuuucacaagauuuccu

SEQ ID NO: 9812 - RNA, 19 nt, Artificial Sequence
  Synthetic
gaagccaagcauauuuccu

SEQ ID NO: 9813 - RNA, 20 nt, Artificial Sequence
  Synthetic
ggaagccaagcauauuuccu

SEQ ID NO: 9814 - RNA, 22 nt, Artificial Sequence
  Synthetic
gaggaagccaagcauauuuccu

SEQ ID NO: 9815 - RNA, 21 nt, Artificial Sequence
  Synthetic
guaauuucaugaagcuuuccu

SEQ ID NO: 9816 - RNA, 22 nt, Artificial Sequence
  Synthetic
gguaauuucaugaagcuuuccu

SEQ ID NO: 9817 - RNA, 20 nt, Artificial Sequence
  Synthetic
gauggcaucuuaguuuuccu

SEQ ID NO: 9818 - RNA, 21 nt, Artificial Sequence
  Synthetic
guuucauuuacauuuuuuccu

SEQ ID NO: 9819 - RNA, 23 nt, Artificial Sequence
  Synthetic
gaguuucauuuacauuuuuuccu

SEQ ID NO: 9820 - RNA, 18 nt, Artificial Sequence
  Synthetic
gaggcagaauaaaaagcu

SEQ ID NO: 9821 - RNA, 22 nt, Artificial Sequence
  Synthetic
guuagaggcagaauaaaaagcu

SEQ ID NO: 9822 - RNA, 22 nt, Artificial Sequence
  Synthetic
guuuaguuucuccaacaaagcu

SEQ ID NO: 9823 - RNA, 18 nt, Artificial Sequence
  Synthetic
ggucuugugaggaaagcu

SEQ ID NO: 9824 - RNA, 23 nt, Artificial Sequence
  Synthetic
gcuuuggucuugugaggaaagcu

SEQ ID NO: 9825 - RNA, 18 nt, Artificial Sequence
  Synthetic
gcuaaacaguuugaagcu

SEQ ID NO: 9826 - RNA, 21 nt, Artificial Sequence
  Synthetic
guugcuaaacaguuugaagcu

SEQ ID NO: 9827 - RNA, 19 nt, Artificial Sequence
  Synthetic
gauuaagcuuccuuaagcu

SEQ ID NO: 9828 - RNA, 18 nt, Artificial Sequence
  Synthetic
gugccuauuuacacagcu

SEQ ID NO: 9829 - RNA, 24 nt, Artificial Sequence
  Synthetic
gacuacccaucuauaauuccagcu

SEQ ID NO: 9830 - RNA, 18 nt, Artificial Sequence
  Synthetic
ggugaaugagaugcagcu

SEQ ID NO: 9831 - RNA, 20 nt, Artificial Sequence
  Synthetic
gaggugaaugagaugcagcu

SEQ ID NO: 9832 - RNA, 24 nt, Artificial Sequence
  Synthetic
guaacucagcagugacacucagcu

SEQ ID NO: 9833 - RNA, 21 nt, Artificial Sequence
  Synthetic
guuuuacuggucuuuucagcu

SEQ ID NO: 9834 - RNA, 18 nt, Artificial Sequence
  Synthetic
ggaauuauuuuuucagcu

SEQ ID NO: 9835 - RNA, 24 nt, Artificial Sequence
  Synthetic
gaaaaauucuuucagaaaagagcu

SEQ ID NO: 9836 - RNA, 18 nt, Artificial Sequence
  Synthetic
gcucugucuuacagagcu

SEQ ID NO: 9837 - RNA, 18 nt, Artificial Sequence
  Synthetic
guacuggauaaaggagcu

SEQ ID NO: 9838 - RNA, 20 nt, Artificial Sequence
  Synthetic
gaguacuggauaaaggagcu

SEQ ID NO: 9839 - RNA, 21 nt, Artificial Sequence
  Synthetic
ggaguacuggauaaaggagcu

SEQ ID NO: 9840 - RNA, 19 nt, Artificial Sequence
  Synthetic
gagccaaucuaaaugagcu

SEQ ID NO: 9841 - RNA, 20 nt, Artificial Sequence
  Synthetic
ggagccaaucuaaaugagcu

SEQ ID NO: 9842 - RNA, 19 nt, Artificial Sequence
  Synthetic
gacugggaagagaugagcu

SEQ ID NO: 9843 - RNA, 21 nt, Artificial Sequence
  Synthetic
gagacugggaagagaugagcu

SEQ ID NO: 9844 - RNA, 24 nt, Artificial Sequence
  Synthetic
gaagagacugggaagagaugagcu

SEQ ID NO: 9845 - RNA, 18 nt, Artificial Sequence
  Synthetic
gaugauaaccacugagcu

SEQ ID NO: 9846 - RNA, 20 nt, Artificial Sequence
  Synthetic
guuuugugcuuggcugagcu

SEQ ID NO: 9847 - RNA, 23 nt, Artificial Sequence
  Synthetic
gcuguuuugugcuuggcugagcu

SEQ ID NO: 9848 - RNA, 20 nt, Artificial Sequence
  Synthetic
gaaguuagaagaucugagcu

SEQ ID NO: 9849 - RNA, 21 nt, Artificial Sequence
  Synthetic
ggaaguuagaagaucugagcu

SEQ ID NO: 9850 - RNA, 23 nt, Artificial Sequence
  Synthetic
gaggaaguuagaagaucugagcu

SEQ ID NO: 9851 - RNA, 19 nt, Artificial Sequence
  Synthetic
gagaaggaacccuugagcu

SEQ ID NO: 9852 - RNA, 24 nt, Artificial Sequence
  Synthetic
guacagagaaggaacccuugagcu

SEQ ID NO: 9853 - RNA, 20 nt, Artificial Sequence
  Synthetic
gucccuuugacaguugagcu

SEQ ID NO: 9854 - RNA, 20 nt, Artificial Sequence
  Synthetic
gcuuaguuuuaaaaauagcu

SEQ ID NO: 9855 - RNA, 24 nt, Artificial Sequence
  Synthetic
gcauuaucuguagugauaauagcu

SEQ ID NO: 9856 - RNA, 22 nt, Artificial Sequence
  Synthetic
guacuugucagaguucauagcu

SEQ ID NO: 9857 - RNA, 18 nt, Artificial Sequence
  Synthetic
ggauuaugauugcuagcu

SEQ ID NO: 9858 - RNA, 22 nt, Artificial Sequence
  Synthetic
guuuggauuaugauugcuagcu

SEQ ID NO: 9859 - RNA, 24 nt, Artificial Sequence
  Synthetic
gcucucuucauucuuagucuagcu

SEQ ID NO: 9860 - RNA, 19 nt, Artificial Sequence
  Synthetic
gccuaucuuuagaguagcu

SEQ ID NO: 9861 - RNA, 23 nt, Artificial Sequence
  Synthetic
gucagccuaucuuuagaguagcu

SEQ ID NO: 9862 - RNA, 18 nt, Artificial Sequence
  Synthetic
gaauuuccacccuuagcu

SEQ ID NO: 9863 - RNA, 20 nt, Artificial Sequence
  Synthetic
gugaauuuccacccuuagcu

SEQ ID NO: 9864 - RNA, 21 nt, Artificial Sequence
  Synthetic
ggugaauuuccacccuuagcu

SEQ ID NO: 9865 - RNA, 23 nt, Artificial Sequence
  Synthetic
gaggugaauuuccacccuuagcu

SEQ ID NO: 9866 - RNA, 18 nt, Artificial Sequence
  Synthetic
gaaguucuuuccuuagcu

SEQ ID NO: 9867 - RNA, 20 nt, Artificial Sequence
  Synthetic
gugaaguucuuuccuuagcu

SEQ ID NO: 9868 - RNA, 19 nt, Artificial Sequence
  Synthetic
guauagaaacucuuuagcu

SEQ ID NO: 9869 - RNA, 18 nt, Artificial Sequence
  Synthetic
gcauuguucucuuuagcu

SEQ ID NO: 9870 - RNA, 19 nt, Artificial Sequence
  Synthetic
ggcauuguucucuuuagcu

SEQ ID NO: 9871 - RNA, 18 nt, Artificial Sequence
  Synthetic
gugcuaaguuaacacgcu

SEQ ID NO: 9872 - RNA, 23 nt, Artificial Sequence
  Synthetic
gauaugugcuaaguuaacacgcu

SEQ ID NO: 9873 - RNA, 20 nt, Artificial Sequence
  Synthetic
gucacuuuuaaagggccgcu

SEQ ID NO: 9874 - RNA, 24 nt, Artificial Sequence
  Synthetic
guuagucacuuuuaaagggccgcu

SEQ ID NO: 9875 - RNA, 23 nt, Artificial Sequence
  Synthetic
guauaacaguccuaacuuucgcu

SEQ ID NO: 9876 - RNA, 24 nt, Artificial Sequence
  Synthetic
gguauaacaguccuaacuuucgcu

SEQ ID NO: 9877 - RNA, 18 nt, Artificial Sequence
  Synthetic
gcaacgcuacguaaggcu

SEQ ID NO: 9878 - RNA, 22 nt, Artificial Sequence
  Synthetic
gccugcaacgcuacguaaggcu

SEQ ID NO: 9879 - RNA, 18 nt, Artificial Sequence
  Synthetic
gagagauuuucccaggcu

SEQ ID NO: 9880 - RNA, 23 nt, Artificial Sequence
  Synthetic
gucaagagagauuuucccaggcu

SEQ ID NO: 9881 - RNA, 19 nt, Artificial Sequence
  Synthetic
guggugaagagaggaggcu

SEQ ID NO: 9882 - RNA, 21 nt, Artificial Sequence
  Synthetic
gaguggugaagagaggaggcu

SEQ ID NO: 9883 - RNA, 18 nt, Artificial Sequence
  Synthetic
gaguauuucccugaggcu

SEQ ID NO: 9884 - RNA, 19 nt, Artificial Sequence
  Synthetic
ggaguauuucccugaggcu

SEQ ID NO: 9885 - RNA, 21 nt, Artificial Sequence
  Synthetic
gaggaguauuucccugaggcu

SEQ ID NO: 9886 - RNA, 19 nt, Artificial Sequence
  Synthetic
gauuuacaaugguucggcu

SEQ ID NO: 9887 - RNA, 24 nt, Artificial Sequence
  Synthetic
guuuugauuuacaaugguucggcu

SEQ ID NO: 9888 - RNA, 18 nt, Artificial Sequence
  Synthetic
gguuucuauggaagggcu

SEQ ID NO: 9889 - RNA, 19 nt, Artificial Sequence
  Synthetic
ggguuucuauggaagggcu

SEQ ID NO: 9890 - RNA, 20 nt, Artificial Sequence
  Synthetic
gggguuucuauggaagggcu

SEQ ID NO: 9891 - RNA, 23 nt, Artificial Sequence
  Synthetic
gucuucuauauagccucagggcu

SEQ ID NO: 9892 - RNA, 20 nt, Artificial Sequence
  Synthetic
gucuuucuuugaagggggcu

SEQ ID NO: 9893 - RNA, 22 nt, Artificial Sequence
  Synthetic
gagucuuucuuugaagggggcu

SEQ ID NO: 9894 - RNA, 18 nt, Artificial Sequence
  Synthetic
gugcaagguauuggggcu

SEQ ID NO: 9895 - RNA, 20 nt, Artificial Sequence
  Synthetic
gugugcaagguauuggggcu

SEQ ID NO: 9896 - RNA, 18 nt, Artificial Sequence
  Synthetic
guugggcacugaauggcu

SEQ ID NO: 9897 - RNA, 21 nt, Artificial Sequence
  Synthetic
gauguugggcacugaauggcu

SEQ ID NO: 9898 - RNA, 19 nt, Artificial Sequence
  Synthetic
gagauuaucuugacuggcu

SEQ ID NO: 9899 - RNA, 22 nt, Artificial Sequence
  Synthetic
gaugagauuaucuugacuggcu

SEQ ID NO: 9900 - RNA, 23 nt, Artificial Sequence
  Synthetic
ggaugagauuaucuugacuggcu

SEQ ID NO: 9901 - RNA, 20 nt, Artificial Sequence
  Synthetic
gcuguucacgaucaguggcu

SEQ ID NO: 9902 - RNA, 18 nt, Artificial Sequence
  Synthetic
gacuaugcauacuuggcu

SEQ ID NO: 9903 - RNA, 23 nt, Artificial Sequence
  Synthetic
guuaagacuaugcauacuuggcu

SEQ ID NO: 9904 - RNA, 19 nt, Artificial Sequence
  Synthetic
gccaugauauauuuuggcu

SEQ ID NO: 9905 - RNA, 20 nt, Artificial Sequence
  Synthetic
gcauucuguagcaaaaugcu

SEQ ID NO: 9906 - RNA, 22 nt, Artificial Sequence
  Synthetic
gagcauucuguagcaaaaugcu

SEQ ID NO: 9907 - RNA, 19 nt, Artificial Sequence
  Synthetic
gagucaagacagaaaugcu

SEQ ID NO: 9908 - RNA, 18 nt, Artificial Sequence
  Synthetic
gagaagaugaagaaugcu

SEQ ID NO: 9909 - RNA, 21 nt, Artificial Sequence
  Synthetic
guugagaagaugaagaaugcu

SEQ ID NO: 9910 - RNA, 23 nt, Artificial Sequence
  Synthetic
guguugagaagaugaagaaugcu

SEQ ID NO: 9911 - RNA, 21 nt, Artificial Sequence
  Synthetic
guucucuguaauauacaugcu

SEQ ID NO: 9912 - RNA, 22 nt, Artificial Sequence
  Synthetic
gguucucuguaauauacaugcu

SEQ ID NO: 9913 - RNA, 18 nt, Artificial Sequence
  Synthetic
gagcucugcuugcaugcu

SEQ ID NO: 9914 - RNA, 19 nt, Artificial Sequence
  Synthetic
ggagcucugcuugcaugcu

SEQ ID NO: 9915 - RNA, 19 nt, Artificial Sequence
  Synthetic
guucauucuuugucaugcu

SEQ ID NO: 9916 - RNA, 20 nt, Artificial Sequence
  Synthetic
gaucugccauucuucaugcu

SEQ ID NO: 9917 - RNA, 20 nt, Artificial Sequence
  Synthetic
guaccuaugugggcgaugcu

SEQ ID NO: 9918 - RNA, 24 nt, Artificial Sequence
  Synthetic
gucuguaccuaugugggcgaugcu

SEQ ID NO: 9919 - RNA, 23 nt, Artificial Sequence
  Synthetic
guuccacaggucauuaggaugcu

SEQ ID NO: 9920 - RNA, 21 nt, Artificial Sequence
  Synthetic
gucauacuaaacccugaugcu

SEQ ID NO: 9921 - RNA, 21 nt, Artificial Sequence
  Synthetic
guaaagaaauuuuauacugcu

SEQ ID NO: 9922 - RNA, 19 nt, Artificial Sequence
  Synthetic
gcagauacugcuugcugcu

SEQ ID NO: 9923 - RNA, 24 nt, Artificial Sequence
  Synthetic
gcaaagcagauacugcuugcugcu

SEQ ID NO: 9924 - RNA, 22 nt, Artificial Sequence
  Synthetic
gaaaauuaagcuuacaucugcu

SEQ ID NO: 9925 - RNA, 19 nt, Artificial Sequence
  Synthetic
gcgaugaaugccuucugcu

SEQ ID NO: 9926 - RNA, 20 nt, Artificial Sequence
  Synthetic
ggcgaugaaugccuucugcu

SEQ ID NO: 9927 - RNA, 24 nt, Artificial Sequence
  Synthetic
gccuggcgaugaaugccuucugcu

SEQ ID NO: 9928 - RNA, 21 nt, Artificial Sequence
  Synthetic
gaguuuaauauuagaagugcu

SEQ ID NO: 9929 - RNA, 19 nt, Artificial Sequence
  Synthetic
gacagaguuguuaagugcu

SEQ ID NO: 9930 - RNA, 20 nt, Artificial Sequence
  Synthetic
ggacagaguuguuaagugcu

SEQ ID NO: 9931 - RNA, 22 nt, Artificial Sequence
  Synthetic
gauuccaaugagauccagugcu

SEQ ID NO: 9932 - RNA, 23 nt, Artificial Sequence
  Synthetic
ggauuccaaugagauccagugcu

SEQ ID NO: 9933 - RNA, 24 nt, Artificial Sequence
  Synthetic
gggauuccaaugagauccagugcu

SEQ ID NO: 9934 - RNA, 18 nt, Artificial Sequence
  Synthetic
ggaggcugaagcagugcu

SEQ ID NO: 9935 - RNA, 20 nt, Artificial Sequence
  Synthetic
gaggaggcugaagcagugcu

SEQ ID NO: 9936 - RNA, 19 nt, Artificial Sequence
  Synthetic
guauuacuaugauagugcu

SEQ ID NO: 9937 - RNA, 20 nt, Artificial Sequence
  Synthetic
gguauuacuaugauagugcu

SEQ ID NO: 9938 - RNA, 21 nt, Artificial Sequence
  Synthetic
ggguauuacuaugauagugcu

SEQ ID NO: 9939 - RNA, 22 nt, Artificial Sequence
  Synthetic
gauaaauaaaaguaaaggugcu

SEQ ID NO: 9940 - RNA, 24 nt, Artificial Sequence
  Synthetic
gagauaaauaaaaguaaaggugcu

SEQ ID NO: 9941 - RNA, 18 nt, Artificial Sequence
  Synthetic
ggaguuuuuuaaggugcu

SEQ ID NO: 9942 - RNA, 21 nt, Artificial Sequence
  Synthetic
guugagcaucauacuggugcu

SEQ ID NO: 9943 - RNA, 23 nt, Artificial Sequence
  Synthetic
guguugagcaucauacuggugcu

SEQ ID NO: 9944 - RNA, 20 nt, Artificial Sequence
  Synthetic
guuggcuccugucuggugcu

SEQ ID NO: 9945 - RNA, 22 nt, Artificial Sequence
  Synthetic
guguuggcuccugucuggugcu

SEQ ID NO: 9946 - RNA, 18 nt, Artificial Sequence
  Synthetic
gcauguagcuaaugugcu

SEQ ID NO: 9947 - RNA, 23 nt, Artificial Sequence
  Synthetic
gaucacguuugaguguaugugcu

SEQ ID NO: 9948 - RNA, 24 nt, Artificial Sequence
  Synthetic
gauuacaagaauuuguaaauugcu

SEQ ID NO: 9949 - RNA, 18 nt, Artificial Sequence
  Synthetic
guguguguucacauugcu

SEQ ID NO: 9950 - RNA, 23 nt, Artificial Sequence
  Synthetic
guuuuuaugagaaguagauugcu

SEQ ID NO: 9951 - RNA, 24 nt, Artificial Sequence
  Synthetic
gaauuuauuuucuuuuguauugcu

SEQ ID NO: 9952 - RNA, 19 nt, Artificial Sequence
  Synthetic
gaacagaaugacccuugcu

SEQ ID NO: 9953 - RNA, 20 nt, Artificial Sequence
  Synthetic
ggaacagaaugacccuugcu

SEQ ID NO: 9954 - RNA, 20 nt, Artificial Sequence
  Synthetic
gaacagaauugggccuugcu

SEQ ID NO: 9955 - RNA, 20 nt, Artificial Sequence
  Synthetic
guauuagccgcagaguugcu

SEQ ID NO: 9956 - RNA, 21 nt, Artificial Sequence
  Synthetic
gaaacaugaucccauguugcu

SEQ ID NO: 9957 - RNA, 22 nt, Artificial Sequence
  Synthetic
guucuuugacuacugcuuugcu

SEQ ID NO: 9958 - RNA, 23 nt, Artificial Sequence
  Synthetic
gguucuuugacuacugcuuugcu

SEQ ID NO: 9959 - RNA, 22 nt, Artificial Sequence
  Synthetic
gucaagagaaguuaucuuugcu

SEQ ID NO: 9960 - RNA, 22 nt, Artificial Sequence
  Synthetic
gacuuaacuccugaauuuugcu

SEQ ID NO: 9961 - RNA, 21 nt, Artificial Sequence
  Synthetic
gcaaaauaacuggaaaaaucu

SEQ ID NO: 9962 - RNA, 24 nt, Artificial Sequence
  Synthetic
gcugcaaaauaacuggaaaaaucu

SEQ ID NO: 9963 - RNA, 19 nt, Artificial Sequence
  Synthetic
gaccacaaacgugaaaucu

SEQ ID NO: 9964 - RNA, 20 nt, Artificial Sequence
  Synthetic
ggaccacaaacgugaaaucu

SEQ ID NO: 9965 - RNA, 22 nt, Artificial Sequence
  Synthetic
guggaccacaaacgugaaaucu

SEQ ID NO: 9966 - RNA, 21 nt, Artificial Sequence
  Synthetic
ggacaaaaaucaaauaaaucu

SEQ ID NO: 9967 - RNA, 24 nt, Artificial Sequence
  Synthetic
guuggacaaaaaucaaauaaaucu

SEQ ID NO: 9968 - RNA, 19 nt, Artificial Sequence
  Synthetic
gccuucuuuguauaaaucu

SEQ ID NO: 9969 - RNA, 19 nt, Artificial Sequence
  Synthetic
gugaguaguaauuaaaucu

SEQ ID NO: 9970 - RNA, 24 nt, Artificial Sequence
  Synthetic
guuacuaaagggauucuuaaaucu

SEQ ID NO: 9971 - RNA, 24 nt, Artificial Sequence
  Synthetic
gccuucagauuccagauagaaucu

SEQ ID NO: 9972 - RNA, 20 nt, Artificial Sequence
  Synthetic
gcaucagacaacuagaaucu

SEQ ID NO: 9973 - RNA, 21 nt, Artificial Sequence
  Synthetic
ggcaucagacaacuagaaucu

SEQ ID NO: 9974 - RNA, 24 nt, Artificial Sequence
  Synthetic
gaaggcaucagacaacuagaaucu

SEQ ID NO: 9975 - RNA, 24 nt, Artificial Sequence
  Synthetic
gccccucccaugguuuaugaaucu

SEQ ID NO: 9976 - RNA, 22 nt, Artificial Sequence
  Synthetic
gaaaauguauaacgcugaaucu

SEQ ID NO: 9977 - RNA, 21 nt, Artificial Sequence
  Synthetic
gauauaaaauucacauaaucu

SEQ ID NO: 9978 - RNA, 20 nt, Artificial Sequence
  Synthetic
gaacuaguuucaauuaaucu

SEQ ID NO: 9979 - RNA, 22 nt, Artificial Sequence
  Synthetic
gucuuguaggaaauguuaaucu

SEQ ID NO: 9980 - RNA, 24 nt, Artificial Sequence
  Synthetic
gugucuuguaggaaauguuaaucu

SEQ ID NO: 9981 - RNA, 19 nt, Artificial Sequence
  Synthetic
guuuucguauauuuaaucu

SEQ ID NO: 9982 - RNA, 20 nt, Artificial Sequence
  Synthetic
gaaaauagauaaaaacaucu

SEQ ID NO: 9983 - RNA, 18 nt, Artificial Sequence
  Synthetic
gcagaacuaaaaacaucu

SEQ ID NO: 9984 - RNA, 19 nt, Artificial Sequence
  Synthetic
ggcagaacuaaaaacaucu

SEQ ID NO: 9985 - RNA, 18 nt, Artificial Sequence
  Synthetic
gaagagaccaacccaucu

SEQ ID NO: 9986 - RNA, 19 nt, Artificial Sequence
  Synthetic
ggaagagaccaacccaucu

SEQ ID NO: 9987 - RNA, 22 nt, Artificial Sequence
  Synthetic
gcaggaagagaccaacccaucu

SEQ ID NO: 9988 - RNA, 19 nt, Artificial Sequence
  Synthetic
gauuguggucaagccaucu

SEQ ID NO: 9989 - RNA, 22 nt, Artificial Sequence
  Synthetic
gaugauuguggucaagccaucu

SEQ ID NO: 9990 - RNA, 18 nt, Artificial Sequence
  Synthetic
ggaaccauaaguccaucu

SEQ ID NO: 9991 - RNA, 23 nt, Artificial Sequence
  Synthetic
gcauuauugcuagcugaucaucu

SEQ ID NO: 9992 - RNA, 24 nt, Artificial Sequence
  Synthetic
ggcauuauugcuagcugaucaucu

SEQ ID NO: 9993 - RNA, 18 nt, Artificial Sequence
  Synthetic
gugaauuaguuaucaucu

SEQ ID NO: 9994 - RNA, 22 nt, Artificial Sequence
  Synthetic
gaucuaagguguuuucucaucu

SEQ ID NO: 9995 - RNA, 18 nt, Artificial Sequence
  Synthetic
guugggugacagucaucu

SEQ ID NO: 9996 - RNA, 19 nt, Artificial Sequence
  Synthetic
gguugggugacagucaucu

SEQ ID NO: 9997 - RNA, 21 nt, Artificial Sequence
  Synthetic
gagguugggugacagucaucu

SEQ ID NO: 9998 - RNA, 19 nt, Artificial Sequence
  Synthetic
gucaggaaacauaagaucu

SEQ ID NO: 9999 - RNA, 19 nt, Artificial Sequence
  Synthetic
gagauguugguagagaucu

SEQ ID NO: 10000 - RNA, 24 nt, Artificial Sequence
  Synthetic
gucuugagauguugguagagaucu

SEQ ID NO: 10001 - RNA, 21 nt, Artificial Sequence
  Synthetic
gauuugggggcacaaggaucu

SEQ ID NO: 10002 - RNA, 23 nt, Artificial Sequence
  Synthetic
gagauuugggggcacaaggaucu

SEQ ID NO: 10003 - RNA, 22 nt, Artificial Sequence
  Synthetic
gaaauccuauugaaaaugaucu

SEQ ID NO: 10004 - RNA, 20 nt, Artificial Sequence
  Synthetic
guccuucauccaccugaucu

SEQ ID NO: 10005 - RNA, 24 nt, Artificial Sequence
  Synthetic
gucuguccuucauccaccugaucu

SEQ ID NO: 10006 - RNA, 18 nt, Artificial Sequence
  Synthetic
gcaucucucuucugaucu

SEQ ID NO: 10007 - RNA, 22 nt, Artificial Sequence
  Synthetic
guccgcaucucucuucugaucu

SEQ ID NO: 10008 - RNA, 22 nt, Artificial Sequence
  Synthetic
gcuguuguacaauuugugaucu

SEQ ID NO: 10009 - RNA, 23 nt, Artificial Sequence
  Synthetic
guagacuauaaaauaaaauaucu

SEQ ID NO: 10010 - RNA, 22 nt, Artificial Sequence
  Synthetic
gaucaauaaaaaccacauaucu

SEQ ID NO: 10011 - RNA, 21 nt, Artificial Sequence
  Synthetic
gauuagguguaauagauaucu

SEQ ID NO: 10012 - RNA, 18 nt, Artificial Sequence
  Synthetic
guggguguagggauaucu

SEQ ID NO: 10013 - RNA, 20 nt, Artificial Sequence
  Synthetic
gaguggguguagggauaucu

SEQ ID NO: 10014 - RNA, 18 nt, Artificial Sequence
  Synthetic
gaaauauuuuugauaucu

SEQ ID NO: 10015 - RNA, 24 nt, Artificial Sequence
  Synthetic
gaaacacacaccacauauauaucu

SEQ ID NO: 10016 - RNA, 22 nt, Artificial Sequence
  Synthetic
guuauacagaguugaacuaucu

SEQ ID NO: 10017 - RNA, 18 nt, Artificial Sequence
  Synthetic
guauuucuuggacuaucu

SEQ ID NO: 10018 - RNA, 23 nt, Artificial Sequence
  Synthetic
guaucguauuucuuggacuaucu

SEQ ID NO: 10019 - RNA, 23 nt, Artificial Sequence
  Synthetic
gcaccaauacauuucuacuaucu

SEQ ID NO: 10020 - RNA, 20 nt, Artificial Sequence
  Synthetic
gcuaugacuagaaguuaucu

SEQ ID NO: 10021 - RNA, 21 nt, Artificial Sequence
  Synthetic
ggcuaugacuagaaguuaucu

SEQ ID NO: 10022 - RNA, 18 nt, Artificial Sequence
  Synthetic
gaucuuaaaucuuuaucu

SEQ ID NO: 10023 - RNA, 20 nt, Artificial Sequence
  Synthetic
gagaucuuaaaucuuuaucu

SEQ ID NO: 10024 - RNA, 18 nt, Artificial Sequence
  Synthetic
gaaacugaaaucaacucu

SEQ ID NO: 10025 - RNA, 22 nt, Artificial Sequence
  Synthetic
gauauaacauguuaauaacucu

SEQ ID NO: 10026 - RNA, 24 nt, Artificial Sequence
  Synthetic
gaaaauuaauagaaaagacacucu

SEQ ID NO: 10027 - RNA, 21 nt, Artificial Sequence
  Synthetic
guuugccaaaauccucacucu

SEQ ID NO: 10028 - RNA, 22 nt, Artificial Sequence
  Synthetic
gacacugccccuuccaaccucu

SEQ ID NO: 10029 - RNA, 18 nt, Artificial Sequence
  Synthetic
gcuaaaucaagaaccucu

SEQ ID NO: 10030 - RNA, 20 nt, Artificial Sequence
  Synthetic
gagcuaaaucaagaaccucu

SEQ ID NO: 10031 - RNA, 23 nt, Artificial Sequence
  Synthetic
gcagagcuaaaucaagaaccucu

SEQ ID NO: 10032 - RNA, 24 nt, Artificial Sequence
  Synthetic
gcauucagugcaaauaccaccucu

SEQ ID NO: 10033 - RNA, 22 nt, Artificial Sequence
  Synthetic
gccucuucuaguguuccccucu

SEQ ID NO: 10034 - RNA, 19 nt, Artificial Sequence
  Synthetic
gucccaaucuacucccucu

SEQ ID NO: 10035 - RNA, 20 nt, Artificial Sequence
  Synthetic
gcauguuccauguucccucu

SEQ ID NO: 10036 - RNA, 23 nt, Artificial Sequence
  Synthetic
gaaguguuugcuuuuuuuccucu

SEQ ID NO: 10037 - RNA, 24 nt, Artificial Sequence
  Synthetic
ggaaguguuugcuuuuuuuccucu

SEQ ID NO: 10038 - RNA, 19 nt, Artificial Sequence
  Synthetic
gccuaucaauuagagcucu

SEQ ID NO: 10039 - RNA, 22 nt, Artificial Sequence
  Synthetic
guugccuaucaauuagagcucu

SEQ ID NO: 10040 - RNA, 22 nt, Artificial Sequence
  Synthetic
guacucaccuuugguuagcucu

SEQ ID NO: 10041 - RNA, 22 nt, Artificial Sequence
  Synthetic
gacaugcuuauugauacgcucu

SEQ ID NO: 10042 - RNA, 23 nt, Artificial Sequence
  Synthetic
ggacaugcuuauugauacgcucu

SEQ ID NO: 10043 - RNA, 22 nt, Artificial Sequence
  Synthetic
gauuuaguaggcguuuggcucu

SEQ ID NO: 10044 - RNA, 24 nt, Artificial Sequence
  Synthetic
gagauuuaguaggcguuuggcucu

SEQ ID NO: 10045 - RNA, 18 nt, Artificial Sequence
  Synthetic
gaggaucucaauugcucu

SEQ ID NO: 10046 - RNA, 19 nt, Artificial Sequence
  Synthetic
gcgcaaaugguauugcucu

SEQ ID NO: 10047 - RNA, 21 nt, Artificial Sequence
  Synthetic
gagcgcaaaugguauugcucu

SEQ ID NO: 10048 - RNA, 22 nt, Artificial Sequence
  Synthetic
ggagcgcaaaugguauugcucu

SEQ ID NO: 10049 - RNA, 23 nt, Artificial Sequence
  Synthetic
gacuugaacagacuucuugcucu

SEQ ID NO: 10050 - RNA, 24 nt, Artificial Sequence
  Synthetic
ggacuugaacagacuucuugcucu

SEQ ID NO: 10051 - RNA, 20 nt, Artificial Sequence
  Synthetic
gcaugucucugaaaaucucu

SEQ ID NO: 10052 - RNA, 21 nt, Artificial Sequence
  Synthetic
ggcaugucucugaaaaucucu

SEQ ID NO: 10053 - RNA, 23 nt, Artificial Sequence
  Synthetic
gucccauauaaaaucccaucucu

SEQ ID NO: 10054 - RNA, 24 nt, Artificial Sequence
  Synthetic
ggucccauauaaaaucccaucucu

SEQ ID NO: 10055 - RNA, 20 nt, Artificial Sequence
  Synthetic
guuccuucucuuucaucucu

SEQ ID NO: 10056 - RNA, 24 nt, Artificial Sequence
  Synthetic
gacaguuccuucucuuucaucucu

SEQ ID NO: 10057 - RNA, 18 nt, Artificial Sequence
  Synthetic
gggagcgauccacucucu

SEQ ID NO: 10058 - RNA, 21 nt, Artificial Sequence
  Synthetic
guagggagcgauccacucucu

SEQ ID NO: 10059 - RNA, 24 nt, Artificial Sequence
  Synthetic
gauguagggagcgauccacucucu

SEQ ID NO: 10060 - RNA, 19 nt, Artificial Sequence
  Synthetic
gagugugaucugccucucu

SEQ ID NO: 10061 - RNA, 21 nt, Artificial Sequence
  Synthetic
gugagugugaucugccucucu

SEQ ID NO: 10062 - RNA, 23 nt, Artificial Sequence
  Synthetic
gugugagugugaucugccucucu

SEQ ID NO: 10063 - RNA, 21 nt, Artificial Sequence
  Synthetic
gcauugugucagaagcucucu

SEQ ID NO: 10064 - RNA, 23 nt, Artificial Sequence
  Synthetic
guuucugcuggaauauggucucu

SEQ ID NO: 10065 - RNA, 18 nt, Artificial Sequence
  Synthetic
ggguuuucuuuugucucu

SEQ ID NO: 10066 - RNA, 19 nt, Artificial Sequence
  Synthetic
gggguuuucuuuugucucu

SEQ ID NO: 10067 - RNA, 21 nt, Artificial Sequence
  Synthetic
gugggguuuucuuuugucucu

SEQ ID NO: 10068 - RNA, 20 nt, Artificial Sequence
  Synthetic
gaacaucauuacaauucucu

SEQ ID NO: 10069 - RNA, 21 nt, Artificial Sequence
  Synthetic
ggaacaucauuacaauucucu

SEQ ID NO: 10070 - RNA, 22 nt, Artificial Sequence
  Synthetic
gggaacaucauuacaauucucu

SEQ ID NO: 10071 - RNA, 22 nt, Artificial Sequence
  Synthetic
gccaauuuugacagcauucucu

SEQ ID NO: 10072 - RNA, 18 nt, Artificial Sequence
  Synthetic
gcaaauauauuauucucu

SEQ ID NO: 10073 - RNA, 24 nt, Artificial Sequence
  Synthetic
gcuuuacaacugaaaaaaaagucu

SEQ ID NO: 10074 - RNA, 23 nt, Artificial Sequence
  Synthetic
guuauugacugugcaaaaagucu

SEQ ID NO: 10075 - RNA, 19 nt, Artificial Sequence
  Synthetic
gaaaagcucuuuaaagucu

SEQ ID NO: 10076 - RNA, 20 nt, Artificial Sequence
  Synthetic
ggaaaagcucuuuaaagucu

SEQ ID NO: 10077 - RNA, 24 nt, Artificial Sequence
  Synthetic
gcaaaccuaaauuaauacaagucu

SEQ ID NO: 10078 - RNA, 18 nt, Artificial Sequence
  Synthetic
ggauugaaagggaagucu

SEQ ID NO: 10079 - RNA, 21 nt, Artificial Sequence
  Synthetic
guuggauugaaagggaagucu

SEQ ID NO: 10080 - RNA, 22 nt, Artificial Sequence
  Synthetic
guaucuggaauuucuacagucu

SEQ ID NO: 10081 - RNA, 18 nt, Artificial Sequence
  Synthetic
gcaaaaggacaccagucu

SEQ ID NO: 10082 - RNA, 21 nt, Artificial Sequence
  Synthetic
gccgcaaaaggacaccagucu

SEQ ID NO: 10083 - RNA, 23 nt, Artificial Sequence
  Synthetic
gugccgcaaaaggacaccagucu

SEQ ID NO: 10084 - RNA, 20 nt, Artificial Sequence
  Synthetic
gaaucuuggucaugcagucu

SEQ ID NO: 10085 - RNA, 18 nt, Artificial Sequence
  Synthetic
ggauuaucauugcagucu

SEQ ID NO: 10086 - RNA, 21 nt, Artificial Sequence
  Synthetic
gaaggauuaucauugcagucu

SEQ ID NO: 10087 - RNA, 18 nt, Artificial Sequence
  Synthetic
gauauucuauaucagucu

SEQ ID NO: 10088 - RNA, 21 nt, Artificial Sequence
  Synthetic
guagauauucuauaucagucu

SEQ ID NO: 10089 - RNA, 22 nt, Artificial Sequence
  Synthetic
gguagauauucuauaucagucu

SEQ ID NO: 10090 - RNA, 20 nt, Artificial Sequence
  Synthetic
gcugccaguauggagagucu

SEQ ID NO: 10091 - RNA, 19 nt, Artificial Sequence
  Synthetic
gaaucaaauauaauagucu

SEQ ID NO: 10092 - RNA, 22 nt, Artificial Sequence
  Synthetic
gcagaaucaaauauaauagucu

SEQ ID NO: 10093 - RNA, 22 nt, Artificial Sequence
  Synthetic
gacuuuugcuauuaucuagucu

SEQ ID NO: 10094 - RNA, 23 nt, Artificial Sequence
  Synthetic
ggacuuuugcuauuaucuagucu

SEQ ID NO: 10095 - RNA, 22 nt, Artificial Sequence
  Synthetic
gauuuaacuuguucuguagucu

SEQ ID NO: 10096 - RNA, 20 nt, Artificial Sequence
  Synthetic
guaagugagauaggacgucu

SEQ ID NO: 10097 - RNA, 19 nt, Artificial Sequence
  Synthetic
guguaauaaugguaggucu

SEQ ID NO: 10098 - RNA, 21 nt, Artificial Sequence
  Synthetic
gaguguaauaaugguaggucu

SEQ ID NO: 10099 - RNA, 22 nt, Artificial Sequence
  Synthetic
ggaguguaauaaugguaggucu

SEQ ID NO: 10100 - RNA, 18 nt, Artificial Sequence
  Synthetic
gcuucagugagauggucu

SEQ ID NO: 10101 - RNA, 23 nt, Artificial Sequence
  Synthetic
gaccugcuucagugagauggucu

SEQ ID NO: 10102 - RNA, 24 nt, Artificial Sequence
  Synthetic
ggaccugcuucagugagauggucu

SEQ ID NO: 10103 - RNA, 20 nt, Artificial Sequence
  Synthetic
guccacaauucaccuggucu

SEQ ID NO: 10104 - RNA, 22 nt, Artificial Sequence
  Synthetic
guucuaauuuacuuacaugucu

SEQ ID NO: 10105 - RNA, 18 nt, Artificial Sequence
  Synthetic
gcaaaaacaaauaugucu

SEQ ID NO: 10106 - RNA, 23 nt, Artificial Sequence
  Synthetic
gcucugcaaaaacaaauaugucu

SEQ ID NO: 10107 - RNA, 24 nt, Artificial Sequence
  Synthetic
ggcucugcaaaaacaaauaugucu

SEQ ID NO: 10108 - RNA, 23 nt, Artificial Sequence
  Synthetic
guaauuuaaaauuacauaugucu

SEQ ID NO: 10109 - RNA, 23 nt, Artificial Sequence
  Synthetic
gccccuauaauugagagcugucu

SEQ ID NO: 10110 - RNA, 18 nt, Artificial Sequence
  Synthetic
guuugaccaaaugugucu

SEQ ID NO: 10111 - RNA, 24 nt, Artificial Sequence
  Synthetic
gacaaaguuugaccaaaugugucu

SEQ ID NO: 10112 - RNA, 20 nt, Artificial Sequence
  Synthetic
guaugugcugaugugugucu

SEQ ID NO: 10113 - RNA, 24 nt, Artificial Sequence
  Synthetic
gucuguaugugcugaugugugucu

SEQ ID NO: 10114 - RNA, 18 nt, Artificial Sequence
  Synthetic
gcuaaaaguccauugucu

SEQ ID NO: 10115 - RNA, 18 nt, Artificial Sequence
  Synthetic
ggcauaaaacacuugucu

SEQ ID NO: 10116 - RNA, 21 nt, Artificial Sequence
  Synthetic
gaaggcauaaaacacuugucu

SEQ ID NO: 10117 - RNA, 22 nt, Artificial Sequence
  Synthetic
ggaaggcauaaaacacuugucu

SEQ ID NO: 10118 - RNA, 23 nt, Artificial Sequence
  Synthetic
gggaaggcauaaaacacuugucu

SEQ ID NO: 10119 - RNA, 20 nt, Artificial Sequence
  Synthetic
gcagucaacaaaaguugucu

SEQ ID NO: 10120 - RNA, 18 nt, Artificial Sequence
  Synthetic
guuuuagcugauuugucu

SEQ ID NO: 10121 - RNA, 23 nt, Artificial Sequence
  Synthetic
guuuuguuuuagcugauuugucu

SEQ ID NO: 10122 - RNA, 24 nt, Artificial Sequence
  Synthetic
guauuaaacuggcuuccaaauucu

SEQ ID NO: 10123 - RNA, 21 nt, Artificial Sequence
  Synthetic
guuuuccucccccuaaauucu

SEQ ID NO: 10124 - RNA, 20 nt, Artificial Sequence
  Synthetic
gacuaauucucugcaauucu

SEQ ID NO: 10125 - RNA, 18 nt, Artificial Sequence
  Synthetic
gcuaauuugugcaauucu

SEQ ID NO: 10126 - RNA, 22 nt, Artificial Sequence
  Synthetic
gugguauuaucaucuccauucu

SEQ ID NO: 10127 - RNA, 23 nt, Artificial Sequence
  Synthetic
ggugguauuaucaucuccauucu

SEQ ID NO: 10128 - RNA, 21 nt, Artificial Sequence
  Synthetic
gacuuagcccuuuuucauucu

SEQ ID NO: 10129 - RNA, 24 nt, Artificial Sequence
  Synthetic
gaagacuuagcccuuuuucauucu

SEQ ID NO: 10130 - RNA, 18 nt, Artificial Sequence
  Synthetic
gcacauaagaaagauucu

SEQ ID NO: 10131 - RNA, 22 nt, Artificial Sequence
  Synthetic
gaaagcacauaagaaagauucu

SEQ ID NO: 10132 - RNA, 23 nt, Artificial Sequence
  Synthetic
ggaaagcacauaagaaagauucu

SEQ ID NO: 10133 - RNA, 18 nt, Artificial Sequence
  Synthetic
guuuuccaucaagauucu

SEQ ID NO: 10134 - RNA, 19 nt, Artificial Sequence
  Synthetic
gguuuuccaucaagauucu

SEQ ID NO: 10135 - RNA, 22 nt, Artificial Sequence
  Synthetic
gcccuccuguguguuagauucu

SEQ ID NO: 10136 - RNA, 24 nt, Artificial Sequence
  Synthetic
gugcccuccuguguguuagauucu

SEQ ID NO: 10137 - RNA, 22 nt, Artificial Sequence
  Synthetic
gaaaagucagggcagggauucu

SEQ ID NO: 10138 - RNA, 24 nt, Artificial Sequence
  Synthetic
gugaaaagucagggcagggauucu

SEQ ID NO: 10139 - RNA, 18 nt, Artificial Sequence
  Synthetic
gcaaaucucuaugauucu

SEQ ID NO: 10140 - RNA, 21 nt, Artificial Sequence
  Synthetic
gacgcaaaucucuaugauucu

SEQ ID NO: 10141 - RNA, 21 nt, Artificial Sequence
  Synthetic
gcuauauucuauagugauucu

SEQ ID NO: 10142 - RNA, 18 nt, Artificial Sequence
  Synthetic
gagucaaauauugauucu

SEQ ID NO: 10143 - RNA, 19 nt, Artificial Sequence
  Synthetic
ggagucaaauauugauucu

SEQ ID NO: 10144 - RNA, 20 nt, Artificial Sequence
  Synthetic
gggagucaaauauugauucu

SEQ ID NO: 10145 - RNA, 24 nt, Artificial Sequence
  Synthetic
guccgggagucaaauauugauucu

SEQ ID NO: 10146 - RNA, 23 nt, Artificial Sequence
  Synthetic
gucucauuuuuuuuuaauauucu

SEQ ID NO: 10147 - RNA, 21 nt, Artificial Sequence
  Synthetic
guuuaagugaugauuuauucu

SEQ ID NO: 10148 - RNA, 18 nt, Artificial Sequence
  Synthetic
ggagguggauuuuauucu

SEQ ID NO: 10149 - RNA, 22 nt, Artificial Sequence
  Synthetic
guuuggagguggauuuuauucu

SEQ ID NO: 10150 - RNA, 21 nt, Artificial Sequence
  Synthetic
gaacacuuccuuuaaacuucu

SEQ ID NO: 10151 - RNA, 22 nt, Artificial Sequence
  Synthetic
ggaacacuuccuuuaaacuucu

SEQ ID NO: 10152 - RNA, 22 nt, Artificial Sequence
  Synthetic
gcuuuggaaacgcacaacuucu

SEQ ID NO: 10153 - RNA, 19 nt, Artificial Sequence
  Synthetic
gugaccauuccuaacuucu

SEQ ID NO: 10154 - RNA, 24 nt, Artificial Sequence
  Synthetic
gucacgugaccauuccuaacuucu

SEQ ID NO: 10155 - RNA, 19 nt, Artificial Sequence
  Synthetic
guuaugaauuuacacuucu

SEQ ID NO: 10156 - RNA, 19 nt, Artificial Sequence
  Synthetic
gucuggguacaugacuucu

SEQ ID NO: 10157 - RNA, 21 nt, Artificial Sequence
  Synthetic
gugucuggguacaugacuucu

SEQ ID NO: 10158 - RNA, 18 nt, Artificial Sequence
  Synthetic
guuaauuuucucccuucu

SEQ ID NO: 10159 - RNA, 20 nt, Artificial Sequence
  Synthetic
guguuaauuuucucccuucu

SEQ ID NO: 10160 - RNA, 24 nt, Artificial Sequence
  Synthetic
gcaccuaauaauaauacuccuucu

SEQ ID NO: 10161 - RNA, 24 nt, Artificial Sequence
  Synthetic
guuuuaaaaucaguauuuccuucu

SEQ ID NO: 10162 - RNA, 18 nt, Artificial Sequence
  Synthetic
ggacagauuuuuccuucu

SEQ ID NO: 10163 - RNA, 21 nt, Artificial Sequence
  Synthetic
guuggacagauuuuuccuucu

SEQ ID NO: 10164 - RNA, 19 nt, Artificial Sequence
  Synthetic
guauucuuaaauggcuucu

SEQ ID NO: 10165 - RNA, 21 nt, Artificial Sequence
  Synthetic
guguauucuuaaauggcuucu

SEQ ID NO: 10166 - RNA, 19 nt, Artificial Sequence
  Synthetic
guguuguuuaacugcuucu

SEQ ID NO: 10167 - RNA, 21 nt, Artificial Sequence
  Synthetic
guguguuguuuaacugcuucu

SEQ ID NO: 10168 - RNA, 22 nt, Artificial Sequence
  Synthetic
guaaaauuacacuacugcuucu

SEQ ID NO: 10169 - RNA, 24 nt, Artificial Sequence
  Synthetic
guguaaaauuacacuacugcuucu

SEQ ID NO: 10170 - RNA, 20 nt, Artificial Sequence
  Synthetic
gauacuauuuacaaucuucu

SEQ ID NO: 10171 - RNA, 24 nt, Artificial Sequence
  Synthetic
gcacaaaaaaguaccugcucuucu

SEQ ID NO: 10172 - RNA, 19 nt, Artificial Sequence
  Synthetic
gagaggaaagugcucuucu

SEQ ID NO: 10173 - RNA, 22 nt, Artificial Sequence
  Synthetic
guugagaggaaagugcucuucu

SEQ ID NO: 10174 - RNA, 22 nt, Artificial Sequence
  Synthetic
gacaaaagguuauugcucuucu

SEQ ID NO: 10175 - RNA, 22 nt, Artificial Sequence
  Synthetic
guuuuuuguaauccucucuucu

SEQ ID NO: 10176 - RNA, 19 nt, Artificial Sequence
  Synthetic
guuuauaagugguucuucu

SEQ ID NO: 10177 - RNA, 23 nt, Artificial Sequence
  Synthetic
gucucucuccaggucuuucuucu

SEQ ID NO: 10178 - RNA, 18 nt, Artificial Sequence
  Synthetic
gagcacuaacaaaguucu

SEQ ID NO: 10179 - RNA, 19 nt, Artificial Sequence
  Synthetic
gcuucuccacuacaguucu

SEQ ID NO: 10180 - RNA, 22 nt, Artificial Sequence
  Synthetic
guagcuucuccacuacaguucu

SEQ ID NO: 10181 - RNA, 23 nt, Artificial Sequence
  Synthetic
guaauaacucaagaaaggguucu

SEQ ID NO: 10182 - RNA, 21 nt, Artificial Sequence
  Synthetic
gaaagcucaugaauggguucu

SEQ ID NO: 10183 - RNA, 22 nt, Artificial Sequence
  Synthetic
ggaaagcucaugaauggguucu

SEQ ID NO: 10184 - RNA, 24 nt, Artificial Sequence
  Synthetic
gaauuucagauuaacucugguucu

SEQ ID NO: 10185 - RNA, 20 nt, Artificial Sequence
  Synthetic
gaugauucauauuugguucu

SEQ ID NO: 10186 - RNA, 21 nt, Artificial Sequence
  Synthetic
gccuuggcuacuuuugguucu

SEQ ID NO: 10187 - RNA, 20 nt, Artificial Sequence
  Synthetic
guugcauacuauucuguucu

SEQ ID NO: 10188 - RNA, 23 nt, Artificial Sequence
  Synthetic
guaugucuauuuaggaguguucu

SEQ ID NO: 10189 - RNA, 23 nt, Artificial Sequence
  Synthetic
gccuuaaaguccuguuguguucu

SEQ ID NO: 10190 - RNA, 24 nt, Artificial Sequence
  Synthetic
ggccuuaaaguccuguuguguucu

SEQ ID NO: 10191 - RNA, 20 nt, Artificial Sequence
  Synthetic
gcuuuagaaaagauuguucu

SEQ ID NO: 10192 - RNA, 21 nt, Artificial Sequence
  Synthetic
ggcuuuagaaaagauuguucu

SEQ ID NO: 10193 - RNA, 23 nt, Artificial Sequence
  Synthetic
guggcuuuagaaaagauuguucu

SEQ ID NO: 10194 - RNA, 19 nt, Artificial Sequence
  Synthetic
gcacucauucacuuguucu

SEQ ID NO: 10195 - RNA, 23 nt, Artificial Sequence
  Synthetic
gacugcacucauucacuuguucu

SEQ ID NO: 10196 - RNA, 18 nt, Artificial Sequence
  Synthetic
gugacuaugccaauuucu

SEQ ID NO: 10197 - RNA, 20 nt, Artificial Sequence
  Synthetic
gagugacuaugccaauuucu

SEQ ID NO: 10198 - RNA, 21 nt, Artificial Sequence
  Synthetic
ggagugacuaugccaauuucu

SEQ ID NO: 10199 - RNA, 24 nt, Artificial Sequence
  Synthetic
guuggagugacuaugccaauuucu

SEQ ID NO: 10200 - RNA, 22 nt, Artificial Sequence
  Synthetic
gagauauaauucuggaauuucu

SEQ ID NO: 10201 - RNA, 19 nt, Artificial Sequence
  Synthetic
gaucagucacuccauuucu

SEQ ID NO: 10202 - RNA, 18 nt, Artificial Sequence
  Synthetic
gggcaagugcugauuucu

SEQ ID NO: 10203 - RNA, 18 nt, Artificial Sequence
  Synthetic
ggugugaacacuauuucu

SEQ ID NO: 10204 - RNA, 22 nt, Artificial Sequence
  Synthetic
gcuaggugugaacacuauuucu

SEQ ID NO: 10205 - RNA, 21 nt, Artificial Sequence
  Synthetic
guaucuguuaacuguauuucu

SEQ ID NO: 10206 - RNA, 22 nt, Artificial Sequence
  Synthetic
gguaucuguuaacuguauuucu

SEQ ID NO: 10207 - RNA, 23 nt, Artificial Sequence
  Synthetic
ggguaucuguuaacuguauuucu

SEQ ID NO: 10208 - RNA, 19 nt, Artificial Sequence
  Synthetic
gucugccuaguuuauuucu

SEQ ID NO: 10209 - RNA, 21 nt, Artificial Sequence
  Synthetic
gugucugccuaguuuauuucu

SEQ ID NO: 10210 - RNA, 20 nt, Artificial Sequence
  Synthetic
guugauauuuaccucuuucu

SEQ ID NO: 10211 - RNA, 18 nt, Artificial Sequence
  Synthetic
guguaaguaggucuuucu

SEQ ID NO: 10212 - RNA, 19 nt, Artificial Sequence
  Synthetic
gguguaaguaggucuuucu

SEQ ID NO: 10213 - RNA, 22 nt, Artificial Sequence
  Synthetic
gcagguguaaguaggucuuucu

SEQ ID NO: 10214 - RNA, 21 nt, Artificial Sequence
  Synthetic
gauaagagaauugugguuucu

SEQ ID NO: 10215 - RNA, 24 nt, Artificial Sequence
  Synthetic
gccucuggacuacuuucuguuucu

SEQ ID NO: 10216 - RNA, 18 nt, Artificial Sequence
  Synthetic
gcacuuacucacuuuucu

SEQ ID NO: 10217 - RNA, 21 nt, Artificial Sequence
  Synthetic
guugcacuuacucacuuuucu

SEQ ID NO: 10218 - RNA, 24 nt, Artificial Sequence
  Synthetic
gauguugcacuuacucacuuuucu

SEQ ID NO: 10219 - RNA, 24 nt, Artificial Sequence
  Synthetic
gcucuuucaguuucuggguuuucu

SEQ ID NO: 10220 - RNA, 19 nt, Artificial Sequence
  Synthetic
gcaaaaaucgucuuuuucu

SEQ ID NO: 10221 - RNA, 22 nt, Artificial Sequence
  Synthetic
guugcaaaaaucgucuuuuucu

SEQ ID NO: 10222 - RNA, 23 nt, Artificial Sequence
  Synthetic
gguugcaaaaaucgucuuuuucu

SEQ ID NO: 10223 - RNA, 22 nt, Artificial Sequence
  Synthetic
gaaaacagaugacauuuuuucu

SEQ ID NO: 10224 - RNA, 24 nt, Artificial Sequence
  Synthetic
gagaaaacagaugacauuuuuucu

SEQ ID NO: 10225 - RNA, 23 nt, Artificial Sequence
  Synthetic
gaaauagagaguagauuuuuucu

SEQ ID NO: 10226 - RNA, 18 nt, Artificial Sequence
  Synthetic
guuuaaggacuuuuuucu

SEQ ID NO: 10227 - RNA, 21 nt, Artificial Sequence
  Synthetic
gaaguuuaaggacuuuuuucu

SEQ ID NO: 10228 - RNA, 24 nt, Artificial Sequence
  Synthetic
guagaaguuuaaggacuuuuuucu

SEQ ID NO: 10229 - RNA, 24 nt, Artificial Sequence
  Synthetic
gaaacccuuuguacaguuuuuucu

SEQ ID NO: 10230 - RNA, 22 nt, Artificial Sequence
  Synthetic
gaaaaguggaggaggaaaaagu

SEQ ID NO: 10231 - RNA, 23 nt, Artificial Sequence
  Synthetic
ggaaaaguggaggaggaaaaagu

SEQ ID NO: 10232 - RNA, 24 nt, Artificial Sequence
  Synthetic
gggaaaaguggaggaggaaaaagu

SEQ ID NO: 10233 - RNA, 23 nt, Artificial Sequence
  Synthetic
gcccuagggugaggggaaaaagu

SEQ ID NO: 10234 - RNA, 18 nt, Artificial Sequence
  Synthetic
guuaagcaagccaaaagu

SEQ ID NO: 10235 - RNA, 20 nt, Artificial Sequence
  Synthetic
guccuugaggaugcaaaagu

SEQ ID NO: 10236 - RNA, 21 nt, Artificial Sequence
  Synthetic
gguccuugaggaugcaaaagu

SEQ ID NO: 10237 - RNA, 18 nt, Artificial Sequence
  Synthetic
gccuacuugaggaaaagu

SEQ ID NO: 10238 - RNA, 21 nt, Artificial Sequence
  Synthetic
gauaauagaauauggaaaagu

SEQ ID NO: 10239 - RNA, 23 nt, Artificial Sequence
  Synthetic
gaauaaugucaguugauaaaagu

SEQ ID NO: 10240 - RNA, 23 nt, Artificial Sequence
  Synthetic
gauacccguaagagccacaaagu

SEQ ID NO: 10241 - RNA, 18 nt, Artificial Sequence
  Synthetic
gcuggaguccuacaaagu

SEQ ID NO: 10242 - RNA, 23 nt, Artificial Sequence
  Synthetic
gcccagcuggaguccuacaaagu

SEQ ID NO: 10243 - RNA, 22 nt, Artificial Sequence
  Synthetic
guagagcaguuguuuucaaagu

SEQ ID NO: 10244 - RNA, 24 nt, Artificial Sequence
  Synthetic
gaguagagcaguuguuuucaaagu

SEQ ID NO: 10245 - RNA, 20 nt, Artificial Sequence
  Synthetic
gaaugacaaguagagaaagu

SEQ ID NO: 10246 - RNA, 22 nt, Artificial Sequence
  Synthetic
gugaaugacaaguagagaaagu

SEQ ID NO: 10247 - RNA, 23 nt, Artificial Sequence
  Synthetic
guaaauuucaugguguagaaagu

SEQ ID NO: 10248 - RNA, 24 nt, Artificial Sequence
  Synthetic
gguaaauuucaugguguagaaagu

SEQ ID NO: 10249 - RNA, 20 nt, Artificial Sequence
  Synthetic
guuacuuuaaaugggaaagu

SEQ ID NO: 10250 - RNA, 23 nt, Artificial Sequence
  Synthetic
gaacuuuaugugccugggaaagu

SEQ ID NO: 10251 - RNA, 19 nt, Artificial Sequence
  Synthetic
gagcuucugccuugaaagu

SEQ ID NO: 10252 - RNA, 19 nt, Artificial Sequence
  Synthetic
gagacaaguuucauaaagu

SEQ ID NO: 10253 - RNA, 21 nt, Artificial Sequence
  Synthetic
gagagacaaguuucauaaagu

SEQ ID NO: 10254 - RNA, 19 nt, Artificial Sequence
  Synthetic
guguuuuuagauguaaagu

SEQ ID NO: 10255 - RNA, 22 nt, Artificial Sequence
  Synthetic
gaaguguuuuuagauguaaagu

SEQ ID NO: 10256 - RNA, 23 nt, Artificial Sequence
  Synthetic
ggaaguguuuuuagauguaaagu

SEQ ID NO: 10257 - RNA, 24 nt, Artificial Sequence
  Synthetic
gaaaauaaaaccccuccuuaaagu

SEQ ID NO: 10258 - RNA, 24 nt, Artificial Sequence
  Synthetic
gaccccaugucuaacauuuaaagu

SEQ ID NO: 10259 - RNA, 21 nt, Artificial Sequence
  Synthetic
gcccauauguauauuuaaagu

SEQ ID NO: 10260 - RNA, 24 nt, Artificial Sequence
  Synthetic
gaugcccauauguauauuuaaagu

SEQ ID NO: 10261 - RNA, 22 nt, Artificial Sequence
  Synthetic
guuuucaaucuuagcuacaagu

SEQ ID NO: 10262 - RNA, 18 nt, Artificial Sequence
  Synthetic
gguuagugguuuacaagu

SEQ ID NO: 10263 - RNA, 19 nt, Artificial Sequence
  Synthetic
ggguuagugguuuacaagu

SEQ ID NO: 10264 - RNA, 24 nt, Artificial Sequence
  Synthetic
gaaauggguuagugguuuacaagu

SEQ ID NO: 10265 - RNA, 18 nt, Artificial Sequence
  Synthetic
ggugaugacuuuucaagu

SEQ ID NO: 10266 - RNA, 20 nt, Artificial Sequence
  Synthetic
guggugaugacuuuucaagu

SEQ ID NO: 10267 - RNA, 24 nt, Artificial Sequence
  Synthetic
gacaguggugaugacuuuucaagu

SEQ ID NO: 10268 - RNA, 22 nt, Artificial Sequence
  Synthetic
gccaagagaacuaaauggaagu

SEQ ID NO: 10269 - RNA, 19 nt, Artificial Sequence
  Synthetic
gacauaccuaaguggaagu

SEQ ID NO: 10270 - RNA, 22 nt, Artificial Sequence
  Synthetic
gaagacauaccuaaguggaagu

SEQ ID NO: 10271 - RNA, 21 nt, Artificial Sequence
  Synthetic
gaaaacauagcucaaugaagu

SEQ ID NO: 10272 - RNA, 18 nt, Artificial Sequence
  Synthetic
gcaugucagucaugaagu

SEQ ID NO: 10273 - RNA, 20 nt, Artificial Sequence
  Synthetic
gugcaugucagucaugaagu

SEQ ID NO: 10274 - RNA, 22 nt, Artificial Sequence
  Synthetic
gagugaaaaagaaaagugaagu

SEQ ID NO: 10275 - RNA, 18 nt, Artificial Sequence
  Synthetic
gacaguacugagugaagu

SEQ ID NO: 10276 - RNA, 20 nt, Artificial Sequence
  Synthetic
gugacaguacugagugaagu

SEQ ID NO: 10277 - RNA, 24 nt, Artificial Sequence
  Synthetic
guauuuuaaauguccuagugaagu

SEQ ID NO: 10278 - RNA, 18 nt, Artificial Sequence
  Synthetic
gcuggaaguuauugaagu

SEQ ID NO: 10279 - RNA, 22 nt, Artificial Sequence
  Synthetic
guuagcuggaaguuauugaagu

SEQ ID NO: 10280 - RNA, 24 nt, Artificial Sequence
  Synthetic
guguuagcuggaaguuauugaagu

SEQ ID NO: 10281 - RNA, 20 nt, Artificial Sequence
  Synthetic
gauacgcuauuuaaauaagu

SEQ ID NO: 10282 - RNA, 20 nt, Artificial Sequence
  Synthetic
gacagagacuccacauaagu

SEQ ID NO: 10283 - RNA, 20 nt, Artificial Sequence
  Synthetic
gaaugauacauuacauaagu

SEQ ID NO: 10284 - RNA, 24 nt, Artificial Sequence
  Synthetic
gacugaaugauacauuacauaagu

SEQ ID NO: 10285 - RNA, 21 nt, Artificial Sequence
  Synthetic
gaaagaaacaaaagacuaagu

SEQ ID NO: 10286 - RNA, 22 nt, Artificial Sequence
  Synthetic
ggaaagaaacaaaagacuaagu

SEQ ID NO: 10287 - RNA, 23 nt, Artificial Sequence
  Synthetic
gggaaagaaacaaaagacuaagu

SEQ ID NO: 10288 - RNA, 24 nt, Artificial Sequence
  Synthetic
ggggaaagaaacaaaagacuaagu

SEQ ID NO: 10289 - RNA, 21 nt, Artificial Sequence
  Synthetic
gacuguucuaaagauguaagu

SEQ ID NO: 10290 - RNA, 23 nt, Artificial Sequence
  Synthetic
gagacuguucuaaagauguaagu

SEQ ID NO: 10291 - RNA, 22 nt, Artificial Sequence
  Synthetic
guccucauuagauagcuuaagu

SEQ ID NO: 10292 - RNA, 19 nt, Artificial Sequence
  Synthetic
gucuuauuguuuuuuaagu

SEQ ID NO: 10293 - RNA, 23 nt, Artificial Sequence
  Synthetic
gacugucuuauuguuuuuuaagu

SEQ ID NO: 10294 - RNA, 18 nt, Artificial Sequence
  Synthetic
gauuccaaaauaaacagu

SEQ ID NO: 10295 - RNA, 20 nt, Artificial Sequence
  Synthetic
gugauuccaaaauaaacagu

SEQ ID NO: 10296 - RNA, 20 nt, Artificial Sequence
  Synthetic
gaagagauguccuaaacagu

SEQ ID NO: 10297 - RNA, 21 nt, Artificial Sequence
  Synthetic
ggaagagauguccuaaacagu

SEQ ID NO: 10298 - RNA, 22 nt, Artificial Sequence
  Synthetic
gcccaaauuaauaguaaacagu

SEQ ID NO: 10299 - RNA, 23 nt, Artificial Sequence
  Synthetic
ggcccaaauuaauaguaaacagu

SEQ ID NO: 10300 - RNA, 24 nt, Artificial Sequence
  Synthetic
gggcccaaauuaauaguaaacagu

SEQ ID NO: 10301 - RNA, 18 nt, Artificial Sequence
  Synthetic
gagcagaagaaacacagu

SEQ ID NO: 10302 - RNA, 19 nt, Artificial Sequence
  Synthetic
guagauagagaggcacagu

SEQ ID NO: 10303 - RNA, 20 nt, Artificial Sequence
  Synthetic
gguagauagagaggcacagu

SEQ ID NO: 10304 - RNA, 22 nt, Artificial Sequence
  Synthetic
gagguagauagagaggcacagu

SEQ ID NO: 10305 - RNA, 24 nt, Artificial Sequence
  Synthetic
gugagguagauagagaggcacagu

SEQ ID NO: 10306 - RNA, 20 nt, Artificial Sequence
  Synthetic
gcacagcaagcugagacagu

SEQ ID NO: 10307 - RNA, 21 nt, Artificial Sequence
  Synthetic
ggcacagcaagcugagacagu

SEQ ID NO: 10308 - RNA, 22 nt, Artificial Sequence
  Synthetic
gggcacagcaagcugagacagu

SEQ ID NO: 10309 - RNA, 23 nt, Artificial Sequence
  Synthetic
ggggcacagcaagcugagacagu

SEQ ID NO: 10310 - RNA, 20 nt, Artificial Sequence
  Synthetic
gauuaauuuucaaaaccagu

SEQ ID NO: 10311 - RNA, 23 nt, Artificial Sequence
  Synthetic
gaugauuaauuuucaaaaccagu

SEQ ID NO: 10312 - RNA, 19 nt, Artificial Sequence
  Synthetic
guguaaggaacaccccagu

SEQ ID NO: 10313 - RNA, 19 nt, Artificial Sequence
  Synthetic
gaagaugauguaauccagu

SEQ ID NO: 10314 - RNA, 23 nt, Artificial Sequence
  Synthetic
gaaugaagaugauguaauccagu

SEQ ID NO: 10315 - RNA, 23 nt, Artificial Sequence
  Synthetic
gaaaauauacucucuucuccagu

SEQ ID NO: 10316 - RNA, 18 nt, Artificial Sequence
  Synthetic
guucacugguuguccagu

SEQ ID NO: 10317 - RNA, 23 nt, Artificial Sequence
  Synthetic
gaaucguucacugguuguccagu

SEQ ID NO: 10318 - RNA, 20 nt, Artificial Sequence
  Synthetic
gcaugguuaccauuuccagu

SEQ ID NO: 10319 - RNA, 21 nt, Artificial Sequence
  Synthetic
gcucagcuaacaugcugcagu

SEQ ID NO: 10320 - RNA, 22 nt, Artificial Sequence
  Synthetic
ggcucagcuaacaugcugcagu

SEQ ID NO: 10321 - RNA, 23 nt, Artificial Sequence
  Synthetic
guaaacgcaucugaaagugcagu

SEQ ID NO: 10322 - RNA, 24 nt, Artificial Sequence
  Synthetic
gguaaacgcaucugaaagugcagu

SEQ ID NO: 10323 - RNA, 19 nt, Artificial Sequence
  Synthetic
gauaacuggcaguugcagu

SEQ ID NO: 10324 - RNA, 21 nt, Artificial Sequence
  Synthetic
gagauaacuggcaguugcagu

SEQ ID NO: 10325 - RNA, 22 nt, Artificial Sequence
  Synthetic
ggagauaacuggcaguugcagu

SEQ ID NO: 10326 - RNA, 23 nt, Artificial Sequence
  Synthetic
gggagauaacuggcaguugcagu

SEQ ID NO: 10327 - RNA, 24 nt, Artificial Sequence
  Synthetic
ggggagauaacuggcaguugcagu

SEQ ID NO: 10328 - RNA, 20 nt, Artificial Sequence
  Synthetic
gaccuucugugcuuugcagu

SEQ ID NO: 10329 - RNA, 22 nt, Artificial Sequence
  Synthetic
gucaagaaggacauuuugcagu

SEQ ID NO: 10330 - RNA, 24 nt, Artificial Sequence
  Synthetic
gugucaagaaggacauuuugcagu

SEQ ID NO: 10331 - RNA, 18 nt, Artificial Sequence
  Synthetic
guuucaguugauaucagu

SEQ ID NO: 10332 - RNA, 19 nt, Artificial Sequence
  Synthetic
gcauuaugagugucucagu

SEQ ID NO: 10333 - RNA, 20 nt, Artificial Sequence
  Synthetic
guuaaagauacaaagucagu

SEQ ID NO: 10334 - RNA, 18 nt, Artificial Sequence
  Synthetic
guugauaucucagucagu

SEQ ID NO: 10335 - RNA, 20 nt, Artificial Sequence
  Synthetic
guguugauaucucagucagu

SEQ ID NO: 10336 - RNA, 20 nt, Artificial Sequence
  Synthetic
gucaucuccaucuugucagu

SEQ ID NO: 10337 - RNA, 22 nt, Artificial Sequence
  Synthetic
gugucaucuccaucuugucagu

SEQ ID NO: 10338 - RNA, 19 nt, Artificial Sequence
  Synthetic
gcagucauuaaaauucagu

SEQ ID NO: 10339 - RNA, 18 nt, Artificial Sequence
  Synthetic
ggaggauaguuguucagu

SEQ ID NO: 10340 - RNA, 20 nt, Artificial Sequence
  Synthetic
gcauugcuaucaauuucagu

SEQ ID NO: 10341 - RNA, 21 nt, Artificial Sequence
  Synthetic
ggcauugcuaucaauuucagu

SEQ ID NO: 10342 - RNA, 19 nt, Artificial Sequence
  Synthetic
gcaaucucuacauuucagu

SEQ ID NO: 10343 - RNA, 19 nt, Artificial Sequence
  Synthetic
gugagguuuuccuuucagu

SEQ ID NO: 10344 - RNA, 21 nt, Artificial Sequence
  Synthetic
gauucaaaaauagaaaagagu

SEQ ID NO: 10345 - RNA, 22 nt, Artificial Sequence
  Synthetic
ggauucaaaaauagaaaagagu

SEQ ID NO: 10346 - RNA, 23 nt, Artificial Sequence
  Synthetic
gggauucaaaaauagaaaagagu

SEQ ID NO: 10347 - RNA, 18 nt, Artificial Sequence
  Synthetic
ggucauguggcaaagagu

SEQ ID NO: 10348 - RNA, 24 nt, Artificial Sequence
  Synthetic
guucuacuuuugucaggaaagagu

SEQ ID NO: 10349 - RNA, 23 nt, Artificial Sequence
  Synthetic
gaauuucccacuuaugcaagagu

SEQ ID NO: 10350 - RNA, 19 nt, Artificial Sequence
  Synthetic
gugaacccauuucaagagu

SEQ ID NO: 10351 - RNA, 23 nt, Artificial Sequence
  Synthetic
guuagugaacccauuucaagagu

SEQ ID NO: 10352 - RNA, 21 nt, Artificial Sequence
  Synthetic
gccauuaaaauuuggaagagu

SEQ ID NO: 10353 - RNA, 23 nt, Artificial Sequence
  Synthetic
gagccauuaaaauuuggaagagu

SEQ ID NO: 10354 - RNA, 24 nt, Artificial Sequence
  Synthetic
ggagccauuaaaauuuggaagagu

SEQ ID NO: 10355 - RNA, 18 nt, Artificial Sequence
  Synthetic
gaguggagaacagagagu

SEQ ID NO: 10356 - RNA, 19 nt, Artificial Sequence
  Synthetic
ggaguggagaacagagagu

SEQ ID NO: 10357 - RNA, 24 nt, Artificial Sequence
  Synthetic
gccacggaguggagaacagagagu

SEQ ID NO: 10358 - RNA, 23 nt, Artificial Sequence
  Synthetic
guuuccaauuaacucuggagagu

SEQ ID NO: 10359 - RNA, 24 nt, Artificial Sequence
  Synthetic
gguuuccaauuaacucuggagagu

SEQ ID NO: 10360 - RNA, 21 nt, Artificial Sequence
  Synthetic
gucauacucugaauauagagu

SEQ ID NO: 10361 - RNA, 24 nt, Artificial Sequence
  Synthetic
guuuaaaauguacacuuauagagu

SEQ ID NO: 10362 - RNA, 18 nt, Artificial Sequence
  Synthetic
gcuugguaaaccuagagu

SEQ ID NO: 10363 - RNA, 21 nt, Artificial Sequence
  Synthetic
gcugcuugguaaaccuagagu

SEQ ID NO: 10364 - RNA, 20 nt, Artificial Sequence
  Synthetic
gcauucucagaugguagagu

SEQ ID NO: 10365 - RNA, 21 nt, Artificial Sequence
  Synthetic
ggcauucucagaugguagagu

SEQ ID NO: 10366 - RNA, 24 nt, Artificial Sequence
  Synthetic
guaggcauucucagaugguagagu

SEQ ID NO: 10367 - RNA, 22 nt, Artificial Sequence
  Synthetic
gucucuguuuauccuuuagagu

SEQ ID NO: 10368 - RNA, 20 nt, Artificial Sequence
  Synthetic
gcuagggaguggguaggagu

SEQ ID NO: 10369 - RNA, 21 nt, Artificial Sequence
  Synthetic
ggcuagggaguggguaggagu

SEQ ID NO: 10370 - RNA, 22 nt, Artificial Sequence
  Synthetic
guaauugcuacgcuguaggagu

SEQ ID NO: 10371 - RNA, 23 nt, Artificial Sequence
  Synthetic
gauacaagaugaaaacagggagu

SEQ ID NO: 10372 - RNA, 22 nt, Artificial Sequence
  Synthetic
gcuuugugguugguuugggagu

SEQ ID NO: 10373 - RNA, 22 nt, Artificial Sequence
  Synthetic
gauuacccagcuuuuugggagu

SEQ ID NO: 10374 - RNA, 22 nt, Artificial Sequence
  Synthetic
gauucagagagcacaauggagu

SEQ ID NO: 10375 - RNA, 18 nt, Artificial Sequence
  Synthetic
gugaaaaugaacuggagu

SEQ ID NO: 10376 - RNA, 20 nt, Artificial Sequence
  Synthetic
gagugaaaaugaacuggagu

SEQ ID NO: 10377 - RNA, 22 nt, Artificial Sequence
  Synthetic
gagagugaaaaugaacuggagu

SEQ ID NO: 10378 - RNA, 22 nt, Artificial Sequence
  Synthetic
gcuacuaucuaaagaaaugagu

SEQ ID NO: 10379 - RNA, 21 nt, Artificial Sequence
  Synthetic
gccaggcauuaaagaaugagu

SEQ ID NO: 10380 - RNA, 20 nt, Artificial Sequence
  Synthetic
gaaaauagggagagaugagu

SEQ ID NO: 10381 - RNA, 18 nt, Artificial Sequence
  Synthetic
gaucagacccugaugagu

SEQ ID NO: 10382 - RNA, 19 nt, Artificial Sequence
  Synthetic
ggaucagacccugaugagu

SEQ ID NO: 10383 - RNA, 23 nt, Artificial Sequence
  Synthetic
gcaaggaucagacccugaugagu

SEQ ID NO: 10384 - RNA, 20 nt, Artificial Sequence
  Synthetic
guauggcugaagcacugagu

SEQ ID NO: 10385 - RNA, 20 nt, Artificial Sequence
  Synthetic
gcauuuguaagauacugagu

SEQ ID NO: 10386 - RNA, 22 nt, Artificial Sequence
  Synthetic
gugcauuuguaagauacugagu

SEQ ID NO: 10387 - RNA, 23 nt, Artificial Sequence
  Synthetic
ggugcauuuguaagauacugagu

SEQ ID NO: 10388 - RNA, 21 nt, Artificial Sequence
  Synthetic
gaacauaauaaccuacugagu

SEQ ID NO: 10389 - RNA, 19 nt, Artificial Sequence
  Synthetic
gaauuagauugaccugagu

SEQ ID NO: 10390 - RNA, 20 nt, Artificial Sequence
  Synthetic
ggaauuagauugaccugagu

SEQ ID NO: 10391 - RNA, 18 nt, Artificial Sequence
  Synthetic
gaccaauugaaugugagu

SEQ ID NO: 10392 - RNA, 20 nt, Artificial Sequence
  Synthetic
gugaccaauugaaugugagu

SEQ ID NO: 10393 - RNA, 23 nt, Artificial Sequence
  Synthetic
guugugaccaauugaaugugagu

SEQ ID NO: 10394 - RNA, 18 nt, Artificial Sequence
  Synthetic
gaucuuuucugcaauagu

SEQ ID NO: 10395 - RNA, 22 nt, Artificial Sequence
  Synthetic
gccagaucuuuucugcaauagu

SEQ ID NO: 10396 - RNA, 21 nt, Artificial Sequence
  Synthetic
gaggaggagaaacagaauagu

SEQ ID NO: 10397 - RNA, 23 nt, Artificial Sequence
  Synthetic
gcauauuauauuuauaccauagu

SEQ ID NO: 10398 - RNA, 24 nt, Artificial Sequence
  Synthetic
ggcauauuauauuuauaccauagu

SEQ ID NO: 10399 - RNA, 23 nt, Artificial Sequence
  Synthetic
gaauuuggaugcugcgggauagu

SEQ ID NO: 10400 - RNA, 24 nt, Artificial Sequence
  Synthetic
ggaauuuggaugcugcgggauagu

SEQ ID NO: 10401 - RNA, 23 nt, Artificial Sequence
  Synthetic
gacuaaccucagguaauuauagu

SEQ ID NO: 10402 - RNA, 24 nt, Artificial Sequence
  Synthetic
ggacuaaccucagguaauuauagu

SEQ ID NO: 10403 - RNA, 19 nt, Artificial Sequence
  Synthetic
gacaacauuguuuuauagu

SEQ ID NO: 10404 - RNA, 19 nt, Artificial Sequence
  Synthetic
gaaaacugaugcuacuagu

SEQ ID NO: 10405 - RNA, 21 nt, Artificial Sequence
  Synthetic
gucaaggucaugguuccuagu

SEQ ID NO: 10406 - RNA, 22 nt, Artificial Sequence
  Synthetic
ggucaaggucaugguuccuagu

SEQ ID NO: 10407 - RNA, 18 nt, Artificial Sequence
  Synthetic
gacuaaaauaguucuagu

SEQ ID NO: 10408 - RNA, 23 nt, Artificial Sequence
  Synthetic
gucuugacuaaaauaguucuagu

SEQ ID NO: 10409 - RNA, 24 nt, Artificial Sequence
  Synthetic
ggucuugacuaaaauaguucuagu

SEQ ID NO: 10410 - RNA, 19 nt, Artificial Sequence
  Synthetic
guuaagaucucaaaguagu

SEQ ID NO: 10411 - RNA, 21 nt, Artificial Sequence
  Synthetic
gauauuuuggaggcaaguagu

SEQ ID NO: 10412 - RNA, 22 nt, Artificial Sequence
  Synthetic
ggauauuuuggaggcaaguagu

SEQ ID NO: 10413 - RNA, 19 nt, Artificial Sequence
  Synthetic
gaagcaaagacaagguagu

SEQ ID NO: 10414 - RNA, 23 nt, Artificial Sequence
  Synthetic
gaacuaauccaggauuugguagu

SEQ ID NO: 10415 - RNA, 20 nt, Artificial Sequence
  Synthetic
gaagcaauuugauauguagu

SEQ ID NO: 10416 - RNA, 22 nt, Artificial Sequence
  Synthetic
gaauaacuuuuaaaccuguagu

SEQ ID NO: 10417 - RNA, 19 nt, Artificial Sequence
  Synthetic
gagcaauaagcaguguagu

SEQ ID NO: 10418 - RNA, 20 nt, Artificial Sequence
  Synthetic
ggagcaauaagcaguguagu

SEQ ID NO: 10419 - RNA, 18 nt, Artificial Sequence
  Synthetic
gcuaccuaguuuuguagu

SEQ ID NO: 10420 - RNA, 19 nt, Artificial Sequence
  Synthetic
ggcuaccuaguuuuguagu

SEQ ID NO: 10421 - RNA, 19 nt, Artificial Sequence
  Synthetic
guaacuccauacacuuagu

SEQ ID NO: 10422 - RNA, 20 nt, Artificial Sequence
  Synthetic
gguaacuccauacacuuagu

SEQ ID NO: 10423 - RNA, 18 nt, Artificial Sequence
  Synthetic
gggugguacuaucuuagu

SEQ ID NO: 10424 - RNA, 20 nt, Artificial Sequence
  Synthetic
gaugaagcuagaaaguuagu

SEQ ID NO: 10425 - RNA, 18 nt, Artificial Sequence
  Synthetic
gcauggaaggcuguuagu

SEQ ID NO: 10426 - RNA, 21 nt, Artificial Sequence
  Synthetic
gcugcauggaaggcuguuagu

SEQ ID NO: 10427 - RNA, 22 nt, Artificial Sequence
  Synthetic
ggcugcauggaaggcuguuagu

SEQ ID NO: 10428 - RNA, 19 nt, Artificial Sequence
  Synthetic
gcauauguuuucauuuagu

SEQ ID NO: 10429 - RNA, 21 nt, Artificial Sequence
  Synthetic
gagcauauguuuucauuuagu

SEQ ID NO: 10430 - RNA, 23 nt, Artificial Sequence
  Synthetic
gugagcauauguuuucauuuagu

SEQ ID NO: 10431 - RNA, 21 nt, Artificial Sequence
  Synthetic
guaagucugcaaauauuuagu

SEQ ID NO: 10432 - RNA, 23 nt, Artificial Sequence
  Synthetic
guguaagucugcaaauauuuagu

SEQ ID NO: 10433 - RNA, 23 nt, Artificial Sequence
  Synthetic
guauuccuuccuguugcuuuagu

SEQ ID NO: 10434 - RNA, 24 nt, Artificial Sequence
  Synthetic
guuuucaccuugugacauuuuagu

SEQ ID NO: 10435 - RNA, 18 nt, Artificial Sequence
  Synthetic
guucaguucagcgaacgu

SEQ ID NO: 10436 - RNA, 23 nt, Artificial Sequence
  Synthetic
guucaguucaguucagcgaacgu

SEQ ID NO: 10437 - RNA, 22 nt, Artificial Sequence
  Synthetic
gcaaaguuccucaaaggaacgu

SEQ ID NO: 10438 - RNA, 24 nt, Artificial Sequence
  Synthetic
gugcaaaguuccucaaaggaacgu

SEQ ID NO: 10439 - RNA, 19 nt, Artificial Sequence
  Synthetic
gugacuggaauaauaacgu

SEQ ID NO: 10440 - RNA, 20 nt, Artificial Sequence
  Synthetic
guugguagaaaauaacacgu

SEQ ID NO: 10441 - RNA, 24 nt, Artificial Sequence
  Synthetic
gacuguugguagaaaauaacacgu

SEQ ID NO: 10442 - RNA, 20 nt, Artificial Sequence
  Synthetic
guucacgcucacaggcacgu

SEQ ID NO: 10443 - RNA, 24 nt, Artificial Sequence
  Synthetic
gcaaguucacgcucacaggcacgu

SEQ ID NO: 10444 - RNA, 19 nt, Artificial Sequence
  Synthetic
gacuugggaaugaucacgu

SEQ ID NO: 10445 - RNA, 23 nt, Artificial Sequence
  Synthetic
gaaagacuugggaaugaucacgu

SEQ ID NO: 10446 - RNA, 18 nt, Artificial Sequence
  Synthetic
ggccaguaguacucacgu

SEQ ID NO: 10447 - RNA, 19 nt, Artificial Sequence
  Synthetic
gaucauguauuacagacgu

SEQ ID NO: 10448 - RNA, 18 nt, Artificial Sequence
  Synthetic
gcaauuauuaucauacgu

SEQ ID NO: 10449 - RNA, 21 nt, Artificial Sequence
  Synthetic
gucaaucaacacuuuuuacgu

SEQ ID NO: 10450 - RNA, 22 nt, Artificial Sequence
  Synthetic
ggucaaucaacacuuuuuacgu

SEQ ID NO: 10451 - RNA, 18 nt, Artificial Sequence
  Synthetic
gucuauuccucuuagcgu

SEQ ID NO: 10452 - RNA, 21 nt, Artificial Sequence
  Synthetic
gcagucuauuccucuuagcgu

SEQ ID NO: 10453 - RNA, 22 nt, Artificial Sequence
  Synthetic
ggcagucuauuccucuuagcgu

SEQ ID NO: 10454 - RNA, 18 nt, Artificial Sequence
  Synthetic
guuguuuugugguugcgu

SEQ ID NO: 10455 - RNA, 19 nt, Artificial Sequence
  Synthetic
gguuguuuugugguugcgu

SEQ ID NO: 10456 - RNA, 20 nt, Artificial Sequence
  Synthetic
ggguuguuuugugguugcgu

SEQ ID NO: 10457 - RNA, 23 nt, Artificial Sequence
  Synthetic
guaggguuguuuugugguugcgu

SEQ ID NO: 10458 - RNA, 22 nt, Artificial Sequence
  Synthetic
guacuuucuuaauuuaaaucgu

SEQ ID NO: 10459 - RNA, 18 nt, Artificial Sequence
  Synthetic
ggaaccaaacccacucgu

SEQ ID NO: 10460 - RNA, 19 nt, Artificial Sequence
  Synthetic
gggaaccaaacccacucgu

SEQ ID NO: 10461 - RNA, 20 nt, Artificial Sequence
  Synthetic
gauugcugugccccacucgu

SEQ ID NO: 10462 - RNA, 20 nt, Artificial Sequence
  Synthetic
gaaaaccucuuccaccucgu

SEQ ID NO: 10463 - RNA, 22 nt, Artificial Sequence
  Synthetic
gagaaaaccucuuccaccucgu

SEQ ID NO: 10464 - RNA, 24 nt, Artificial Sequence
  Synthetic
gagagaaaaccucuuccaccucgu

SEQ ID NO: 10465 - RNA, 23 nt, Artificial Sequence
  Synthetic
guuacacuuugugugucuuucgu

SEQ ID NO: 10466 - RNA, 24 nt, Artificial Sequence
  Synthetic
gguuacacuuugugugucuuucgu

SEQ ID NO: 10467 - RNA, 20 nt, Artificial Sequence
  Synthetic
guuguaaaaugacaaaaggu

SEQ ID NO: 10468 - RNA, 21 nt, Artificial Sequence
  Synthetic
gguuguaaaaugacaaaaggu

SEQ ID NO: 10469 - RNA, 20 nt, Artificial Sequence
  Synthetic
gacaaggcaaaugaaaaggu

SEQ ID NO: 10470 - RNA, 21 nt, Artificial Sequence
  Synthetic
ggacaaggcaaaugaaaaggu

SEQ ID NO: 10471 - RNA, 18 nt, Artificial Sequence
  Synthetic
gaagcauucauaaaaggu

SEQ ID NO: 10472 - RNA, 20 nt, Artificial Sequence
  Synthetic
gagaagcauucauaaaaggu

SEQ ID NO: 10473 - RNA, 21 nt, Artificial Sequence
  Synthetic
ggagaagcauucauaaaaggu

SEQ ID NO: 10474 - RNA, 22 nt, Artificial Sequence
  Synthetic
gcccuacccuucauccaaaggu

SEQ ID NO: 10475 - RNA, 19 nt, Artificial Sequence
  Synthetic
guaguaacuguugaaaggu

SEQ ID NO: 10476 - RNA, 21 nt, Artificial Sequence
  Synthetic
gaguaguaacuguugaaaggu

SEQ ID NO: 10477 - RNA, 24 nt, Artificial Sequence
  Synthetic
gaaauauaaaucuuuuuuaaaggu

SEQ ID NO: 10478 - RNA, 21 nt, Artificial Sequence
  Synthetic
gaccaugcaaacauucaaggu

SEQ ID NO: 10479 - RNA, 22 nt, Artificial Sequence
  Synthetic
ggaccaugcaaacauucaaggu

SEQ ID NO: 10480 - RNA, 24 nt, Artificial Sequence
  Synthetic
gaggaccaugcaaacauucaaggu

SEQ ID NO: 10481 - RNA, 19 nt, Artificial Sequence
  Synthetic
gcucugggagguagaaggu

SEQ ID NO: 10482 - RNA, 20 nt, Artificial Sequence
  Synthetic
guaugacugaaugcacaggu

SEQ ID NO: 10483 - RNA, 22 nt, Artificial Sequence
  Synthetic
gaguaugacugaaugcacaggu

SEQ ID NO: 10484 - RNA, 22 nt, Artificial Sequence
  Synthetic
guaaccucugcccccaccaggu

SEQ ID NO: 10485 - RNA, 19 nt, Artificial Sequence
  Synthetic
gcggagauugcuuccaggu

SEQ ID NO: 10486 - RNA, 20 nt, Artificial Sequence
  Synthetic
ggcggagauugcuuccaggu

SEQ ID NO: 10487 - RNA, 24 nt, Artificial Sequence
  Synthetic
gcuuggcggagauugcuuccaggu

SEQ ID NO: 10488 - RNA, 20 nt, Artificial Sequence
  Synthetic
gacaaagagauggagcaggu

SEQ ID NO: 10489 - RNA, 21 nt, Artificial Sequence
  Synthetic
ggacaaagagauggagcaggu

SEQ ID NO: 10490 - RNA, 24 nt, Artificial Sequence
  Synthetic
gauggacaaagagauggagcaggu

SEQ ID NO: 10491 - RNA, 19 nt, Artificial Sequence
  Synthetic
gaaaacguaugaugcaggu

SEQ ID NO: 10492 - RNA, 21 nt, Artificial Sequence
  Synthetic
gcaaaggaaagcagaagaggu

SEQ ID NO: 10493 - RNA, 18 nt, Artificial Sequence
  Synthetic
gcauggcacggaagaggu

SEQ ID NO: 10494 - RNA, 20 nt, Artificial Sequence
  Synthetic
gagcauggcacggaagaggu

SEQ ID NO: 10495 - RNA, 21 nt, Artificial Sequence
  Synthetic
ggagcauggcacggaagaggu

SEQ ID NO: 10496 - RNA, 18 nt, Artificial Sequence
  Synthetic
gugcuugcuauuagaggu

SEQ ID NO: 10497 - RNA, 20 nt, Artificial Sequence
  Synthetic
gagugcuugcuauuagaggu

SEQ ID NO: 10498 - RNA, 21 nt, Artificial Sequence
  Synthetic
ggagugcuugcuauuagaggu

SEQ ID NO: 10499 - RNA, 22 nt, Artificial Sequence
  Synthetic
gggagugcuugcuauuagaggu

SEQ ID NO: 10500 - RNA, 23 nt, Artificial Sequence
  Synthetic
ggggagugcuugcuauuagaggu

SEQ ID NO: 10501 - RNA, 20 nt, Artificial Sequence
  Synthetic
guuaaaauguaguaggaggu

SEQ ID NO: 10502 - RNA, 21 nt, Artificial Sequence
  Synthetic
gguuaaaauguaguaggaggu

SEQ ID NO: 10503 - RNA, 24 nt, Artificial Sequence
  Synthetic
guagguuaaaauguaguaggaggu

SEQ ID NO: 10504 - RNA, 22 nt, Artificial Sequence
  Synthetic
gauuuagcugcaacaaugaggu

SEQ ID NO: 10505 - RNA, 19 nt, Artificial Sequence
  Synthetic
gagagaauguuagugaggu

SEQ ID NO: 10506 - RNA, 20 nt, Artificial Sequence
  Synthetic
ggagagaauguuagugaggu

SEQ ID NO: 10507 - RNA, 21 nt, Artificial Sequence
  Synthetic
guuuagaaggguaugugaggu

SEQ ID NO: 10508 - RNA, 22 nt, Artificial Sequence
  Synthetic
gguuuagaaggguaugugaggu

SEQ ID NO: 10509 - RNA, 18 nt, Artificial Sequence
  Synthetic
gaauccuuagcuugaggu

SEQ ID NO: 10510 - RNA, 19 nt, Artificial Sequence
  Synthetic
ggaauccuuagcuugaggu

SEQ ID NO: 10511 - RNA, 21 nt, Artificial Sequence
  Synthetic
gaggaauccuuagcuugaggu

SEQ ID NO: 10512 - RNA, 22 nt, Artificial Sequence
  Synthetic
ggaggaauccuuagcuugaggu

SEQ ID NO: 10513 - RNA, 24 nt, Artificial Sequence
  Synthetic
gaggaggaauccuuagcuugaggu

SEQ ID NO: 10514 - RNA, 23 nt, Artificial Sequence
  Synthetic
gacccacacuaguaguuugaggu

SEQ ID NO: 10515 - RNA, 20 nt, Artificial Sequence
  Synthetic
gaacgugacauucuauaggu

SEQ ID NO: 10516 - RNA, 21 nt, Artificial Sequence
  Synthetic
gaugaaagugaauauguaggu

SEQ ID NO: 10517 - RNA, 19 nt, Artificial Sequence
  Synthetic
gauaggguauauuuuaggu

SEQ ID NO: 10518 - RNA, 23 nt, Artificial Sequence
  Synthetic
gcuugauaggguauauuuuaggu

SEQ ID NO: 10519 - RNA, 21 nt, Artificial Sequence
  Synthetic
gucaaaucaugacuuuuaggu

SEQ ID NO: 10520 - RNA, 22 nt, Artificial Sequence
  Synthetic
ggucaaaucaugacuuuuaggu

SEQ ID NO: 10521 - RNA, 18 nt, Artificial Sequence
  Synthetic
guuauaaguugagacggu

SEQ ID NO: 10522 - RNA, 19 nt, Artificial Sequence
  Synthetic
gguuauaaguugagacggu

SEQ ID NO: 10523 - RNA, 23 nt, Artificial Sequence
  Synthetic
gaccuuuguaugaugaugacggu

SEQ ID NO: 10524 - RNA, 22 nt, Artificial Sequence
  Synthetic
gaauaaaccagcggauuacggu

SEQ ID NO: 10525 - RNA, 23 nt, Artificial Sequence
  Synthetic
ggaauaaaccagcggauuacggu

SEQ ID NO: 10526 - RNA, 19 nt, Artificial Sequence
  Synthetic
gaaaauaagaauacucggu

SEQ ID NO: 10527 - RNA, 18 nt, Artificial Sequence
  Synthetic
gaagcuuaacuuuucggu

SEQ ID NO: 10528 - RNA, 21 nt, Artificial Sequence
  Synthetic
guagaagcuuaacuuuucggu

SEQ ID NO: 10529 - RNA, 22 nt, Artificial Sequence
  Synthetic
gguagaagcuuaacuuuucggu

SEQ ID NO: 10530 - RNA, 23 nt, Artificial Sequence
  Synthetic
ggguagaagcuuaacuuuucggu

SEQ ID NO: 10531 - RNA, 18 nt, Artificial Sequence
  Synthetic
ggaaagauguucaagggu

SEQ ID NO: 10532 - RNA, 19 nt, Artificial Sequence
  Synthetic
gggaaagauguucaagggu

SEQ ID NO: 10533 - RNA, 22 nt, Artificial Sequence
  Synthetic
gacgggaaagauguucaagggu

SEQ ID NO: 10534 - RNA, 21 nt, Artificial Sequence
  Synthetic
guauaacacacaugccagggu

SEQ ID NO: 10535 - RNA, 23 nt, Artificial Sequence
  Synthetic
gaguauaacacacaugccagggu

SEQ ID NO: 10536 - RNA, 19 nt, Artificial Sequence
  Synthetic
gugguagcaggaggagggu

SEQ ID NO: 10537 - RNA, 23 nt, Artificial Sequence
  Synthetic
gacugugguagcaggaggagggu

SEQ ID NO: 10538 - RNA, 18 nt, Artificial Sequence
  Synthetic
ggcaagcuauuuucgggu

SEQ ID NO: 10539 - RNA, 21 nt, Artificial Sequence
  Synthetic
guaggcaagcuauuuucgggu

SEQ ID NO: 10540 - RNA, 22 nt, Artificial Sequence
  Synthetic
gguaggcaagcuauuuucgggu

SEQ ID NO: 10541 - RNA, 23 nt, Artificial Sequence
  Synthetic
ggguaggcaagcuauuuucgggu

SEQ ID NO: 10542 - RNA, 19 nt, Artificial Sequence
  Synthetic
guaaagacaaugugggggu

SEQ ID NO: 10543 - RNA, 23 nt, Artificial Sequence
  Synthetic
gcuuguaaagacaaugugggggu

SEQ ID NO: 10544 - RNA, 21 nt, Artificial Sequence
  Synthetic
gcucaggcaaggcccuggggu

SEQ ID NO: 10545 - RNA, 18 nt, Artificial Sequence
  Synthetic
ggugguugcuucuggggu

SEQ ID NO: 10546 - RNA, 20 nt, Artificial Sequence
  Synthetic
gauuagagaaucaguggggu

SEQ ID NO: 10547 - RNA, 22 nt, Artificial Sequence
  Synthetic
gugauuagagaaucaguggggu

SEQ ID NO: 10548 - RNA, 24 nt, Artificial Sequence
  Synthetic
gcuaaaucaagaaccucuuggggu

SEQ ID NO: 10549 - RNA, 20 nt, Artificial Sequence
  Synthetic
gcaguagcagcauaaugggu

SEQ ID NO: 10550 - RNA, 22 nt, Artificial Sequence
  Synthetic
gugcaguagcagcauaaugggu

SEQ ID NO: 10551 - RNA, 18 nt, Artificial Sequence
  Synthetic
gccuaggccuacaugggu

SEQ ID NO: 10552 - RNA, 20 nt, Artificial Sequence
  Synthetic
gagccuaggccuacaugggu

SEQ ID NO: 10553 - RNA, 20 nt, Artificial Sequence
  Synthetic
guuucuuccucuuugugggu

SEQ ID NO: 10554 - RNA, 18 nt, Artificial Sequence
  Synthetic
gcacaauuaggauugggu

SEQ ID NO: 10555 - RNA, 19 nt, Artificial Sequence
  Synthetic
ggcacaauuaggauugggu

SEQ ID NO: 10556 - RNA, 20 nt, Artificial Sequence
  Synthetic
gggcacaauuaggauugggu

SEQ ID NO: 10557 - RNA, 21 nt, Artificial Sequence
  Synthetic
ggggcacaauuaggauugggu

SEQ ID NO: 10558 - RNA, 22 nt, Artificial Sequence
  Synthetic
gggggcacaauuaggauugggu

SEQ ID NO: 10559 - RNA, 24 nt, Artificial Sequence
  Synthetic
gugggggcacaauuaggauugggu

SEQ ID NO: 10560 - RNA, 21 nt, Artificial Sequence
  Synthetic
gauuuauuuucccccaauggu

SEQ ID NO: 10561 - RNA, 22 nt, Artificial Sequence
  Synthetic
ggauuuauuuucccccaauggu

SEQ ID NO: 10562 - RNA, 24 nt, Artificial Sequence
  Synthetic
gaaaauaguuacaauagcaauggu

SEQ ID NO: 10563 - RNA, 18 nt, Artificial Sequence
  Synthetic
gaaccucccaauaauggu

SEQ ID NO: 10564 - RNA, 19 nt, Artificial Sequence
  Synthetic
ggaaccucccaauaauggu

SEQ ID NO: 10565 - RNA, 20 nt, Artificial Sequence
  Synthetic
gggaaccucccaauaauggu

SEQ ID NO: 10566 - RNA, 20 nt, Artificial Sequence
  Synthetic
gcuaaagggagcauaauggu

SEQ ID NO: 10567 - RNA, 24 nt, Artificial Sequence
  Synthetic
gacagcuaaagggagcauaauggu

SEQ ID NO: 10568 - RNA, 19 nt, Artificial Sequence
  Synthetic
guaaaaauccuuuaauggu

SEQ ID NO: 10569 - RNA, 21 nt, Artificial Sequence
  Synthetic
gauauucaaccuauagauggu

SEQ ID NO: 10570 - RNA, 23 nt, Artificial Sequence
  Synthetic
gagauauucaaccuauagauggu

SEQ ID NO: 10571 - RNA, 18 nt, Artificial Sequence
  Synthetic
gaaacaugccaugauggu

SEQ ID NO: 10572 - RNA, 24 nt, Artificial Sequence
  Synthetic
gaaacugaaacaugccaugauggu

SEQ ID NO: 10573 - RNA, 20 nt, Artificial Sequence
  Synthetic
gaaaauccuaaagugauggu

SEQ ID NO: 10574 - RNA, 21 nt, Artificial Sequence
  Synthetic
gucucuccacgcuuuuauggu

SEQ ID NO: 10575 - RNA, 19 nt, Artificial Sequence
  Synthetic
gcugaauugccuggcuggu

SEQ ID NO: 10576 - RNA, 18 nt, Artificial Sequence
  Synthetic
gggagaguaacaucuggu

SEQ ID NO: 10577 - RNA, 22 nt, Artificial Sequence
  Synthetic
guuugggagaguaacaucuggu

SEQ ID NO: 10578 - RNA, 21 nt, Artificial Sequence
  Synthetic
gccagucugcacuaaaguggu

SEQ ID NO: 10579 - RNA, 22 nt, Artificial Sequence
  Synthetic
ggccagucugcacuaaaguggu

SEQ ID NO: 10580 - RNA, 22 nt, Artificial Sequence
  Synthetic
guaauuuaaauuuaaccguggu

SEQ ID NO: 10581 - RNA, 23 nt, Artificial Sequence
  Synthetic
gguaauuuaaauuuaaccguggu

SEQ ID NO: 10582 - RNA, 20 nt, Artificial Sequence
  Synthetic
gcuuaucuugaaagcguggu

SEQ ID NO: 10583 - RNA, 19 nt, Artificial Sequence
  Synthetic
gacaauuccaugugguggu

SEQ ID NO: 10584 - RNA, 23 nt, Artificial Sequence
  Synthetic
gucugacaauuccaugugguggu

SEQ ID NO: 10585 - RNA, 22 nt, Artificial Sequence
  Synthetic
gcagagagagagaguugguggu

SEQ ID NO: 10586 - RNA, 21 nt, Artificial Sequence
  Synthetic
gucagguuaucugaauguggu

SEQ ID NO: 10587 - RNA, 22 nt, Artificial Sequence
  Synthetic
ggucagguuaucugaauguggu

SEQ ID NO: 10588 - RNA, 18 nt, Artificial Sequence
  Synthetic
guuuuauauguauguggu

SEQ ID NO: 10589 - RNA, 19 nt, Artificial Sequence
  Synthetic
gguuuuauauguauguggu

SEQ ID NO: 10590 - RNA, 24 nt, Artificial Sequence
  Synthetic
gacaugguuuuauauguauguggu

SEQ ID NO: 10591 - RNA, 20 nt, Artificial Sequence
  Synthetic
gaaagggacuguuaauuggu

SEQ ID NO: 10592 - RNA, 18 nt, Artificial Sequence
  Synthetic
gaugcaaugauuauuggu

SEQ ID NO: 10593 - RNA, 19 nt, Artificial Sequence
  Synthetic
ggaugcaaugauuauuggu

SEQ ID NO: 10594 - RNA, 19 nt, Artificial Sequence
  Synthetic
guuuaaaugaagucuuggu

SEQ ID NO: 10595 - RNA, 24 nt, Artificial Sequence
  Synthetic
guuuuguuuaaaugaagucuuggu

SEQ ID NO: 10596 - RNA, 20 nt, Artificial Sequence
  Synthetic
guugucuuaaaugucuuggu

SEQ ID NO: 10597 - RNA, 24 nt, Artificial Sequence
  Synthetic
gaauguugucuuaaaugucuuggu

SEQ ID NO: 10598 - RNA, 18 nt, Artificial Sequence
  Synthetic
gaaguuuuauuucuuggu

SEQ ID NO: 10599 - RNA, 19 nt, Artificial Sequence
  Synthetic
ggaaguuuuauuucuuggu

SEQ ID NO: 10600 - RNA, 22 nt, Artificial Sequence
  Synthetic
gcuggaaguuuuauuucuuggu

SEQ ID NO: 10601 - RNA, 18 nt, Artificial Sequence
  Synthetic
gcuucggacaacguuggu

SEQ ID NO: 10602 - RNA, 19 nt, Artificial Sequence
  Synthetic
guauuuuguaacuguuggu

SEQ ID NO: 10603 - RNA, 24 nt, Artificial Sequence
  Synthetic
gacaaguauuuuguaacuguuggu

SEQ ID NO: 10604 - RNA, 19 nt, Artificial Sequence
  Synthetic
guuaccaaggaaauuuggu

SEQ ID NO: 10605 - RNA, 22 nt, Artificial Sequence
  Synthetic
gcaguuaccaaggaaauuuggu

SEQ ID NO: 10606 - RNA, 19 nt, Artificial Sequence
  Synthetic
gaaguucauccucaaaugu

SEQ ID NO: 10607 - RNA, 21 nt, Artificial Sequence
  Synthetic
gagaaguucauccucaaaugu

SEQ ID NO: 10608 - RNA, 24 nt, Artificial Sequence
  Synthetic
gcagagaaguucauccucaaaugu

SEQ ID NO: 10609 - RNA, 23 nt, Artificial Sequence
  Synthetic
gcauuuguauagagaggaaaugu

SEQ ID NO: 10610 - RNA, 24 nt, Artificial Sequence
  Synthetic
ggcauuuguauagagaggaaaugu

SEQ ID NO: 10611 - RNA, 21 nt, Artificial Sequence
  Synthetic
gauagucauuaauguaaaugu

SEQ ID NO: 10612 - RNA, 20 nt, Artificial Sequence
  Synthetic
gaacagugcuacaacaaugu

SEQ ID NO: 10613 - RNA, 18 nt, Artificial Sequence
  Synthetic
gaauugaugggacaaugu

SEQ ID NO: 10614 - RNA, 21 nt, Artificial Sequence
  Synthetic
gaagaauugaugggacaaugu

SEQ ID NO: 10615 - RNA, 22 nt, Artificial Sequence
  Synthetic
ggaagaauugaugggacaaugu

SEQ ID NO: 10616 - RNA, 21 nt, Artificial Sequence
  Synthetic
gccuccuagcuuaugcaaugu

SEQ ID NO: 10617 - RNA, 21 nt, Artificial Sequence
  Synthetic
gaacuaccagaaugucaaugu

SEQ ID NO: 10618 - RNA, 24 nt, Artificial Sequence
  Synthetic
gaugaacuaccagaaugucaaugu

SEQ ID NO: 10619 - RNA, 23 nt, Artificial Sequence
  Synthetic
guuuuccaaugcgacaagaaugu

SEQ ID NO: 10620 - RNA, 24 nt, Artificial Sequence
  Synthetic
guuuauccuuuagaguaggaaugu

SEQ ID NO: 10621 - RNA, 22 nt, Artificial Sequence
  Synthetic
gaaugauuaagaaaaauaaugu

SEQ ID NO: 10622 - RNA, 24 nt, Artificial Sequence
  Synthetic
gugaaugauuaagaaaaauaaugu

SEQ ID NO: 10623 - RNA, 22 nt, Artificial Sequence
  Synthetic
gcucccuguuguacuaacaugu

SEQ ID NO: 10624 - RNA, 20 nt, Artificial Sequence
  Synthetic
gcuucuuccuacugacaugu

SEQ ID NO: 10625 - RNA, 23 nt, Artificial Sequence
  Synthetic
guagcuucuuccuacugacaugu

SEQ ID NO: 10626 - RNA, 24 nt, Artificial Sequence
  Synthetic
gguagcuucuuccuacugacaugu

SEQ ID NO: 10627 - RNA, 21 nt, Artificial Sequence
  Synthetic
gauuuuauuagaauuacaugu

SEQ ID NO: 10628 - RNA, 22 nt, Artificial Sequence
  Synthetic
ggauuuuauuagaauuacaugu

SEQ ID NO: 10629 - RNA, 22 nt, Artificial Sequence
  Synthetic
gugaauuacaggaaaaccaugu

SEQ ID NO: 10630 - RNA, 18 nt, Artificial Sequence
  Synthetic
gcuaucgaccuaccaugu

SEQ ID NO: 10631 - RNA, 19 nt, Artificial Sequence
  Synthetic
ggcuaucgaccuaccaugu

SEQ ID NO: 10632 - RNA, 20 nt, Artificial Sequence
  Synthetic
guccucugcuuaugccaugu

SEQ ID NO: 10633 - RNA, 23 nt, Artificial Sequence
  Synthetic
guucaugccauggcugagcaugu

SEQ ID NO: 10634 - RNA, 24 nt, Artificial Sequence
  Synthetic
gauauuuaaggugaaaaugcaugu

SEQ ID NO: 10635 - RNA, 18 nt, Artificial Sequence
  Synthetic
ggcacaauuacugcaugu

SEQ ID NO: 10636 - RNA, 24 nt, Artificial Sequence
  Synthetic
gauauuugucuaaauaaaucaugu

SEQ ID NO: 10637 - RNA, 20 nt, Artificial Sequence
  Synthetic
guuucuaaaaauaaucaugu

SEQ ID NO: 10638 - RNA, 22 nt, Artificial Sequence
  Synthetic
guauuuaaagauacuaucaugu

SEQ ID NO: 10639 - RNA, 18 nt, Artificial Sequence
  Synthetic
gccuuagugaucucaugu

SEQ ID NO: 10640 - RNA, 19 nt, Artificial Sequence
  Synthetic
ggccuuagugaucucaugu

SEQ ID NO: 10641 - RNA, 18 nt, Artificial Sequence
  Synthetic
gaagcugugguaggaugu

SEQ ID NO: 10642 - RNA, 19 nt, Artificial Sequence
  Synthetic
ggaagcugugguaggaugu

SEQ ID NO: 10643 - RNA, 19 nt, Artificial Sequence
  Synthetic
guuaauuauguuuggaugu

SEQ ID NO: 10644 - RNA, 23 nt, Artificial Sequence
  Synthetic
gaauguuaauuauguuuggaugu

SEQ ID NO: 10645 - RNA, 20 nt, Artificial Sequence
  Synthetic
guuguuauuagagaugaugu

SEQ ID NO: 10646 - RNA, 22 nt, Artificial Sequence
  Synthetic
gaguuguuauuagagaugaugu

SEQ ID NO: 10647 - RNA, 23 nt, Artificial Sequence
  Synthetic
ggaguuguuauuagagaugaugu

SEQ ID NO: 10648 - RNA, 18 nt, Artificial Sequence
  Synthetic
guauuuuaucagugaugu

SEQ ID NO: 10649 - RNA, 20 nt, Artificial Sequence
  Synthetic
guguauuuuaucagugaugu

SEQ ID NO: 10650 - RNA, 23 nt, Artificial Sequence
  Synthetic
gauguguauuuuaucagugaugu

SEQ ID NO: 10651 - RNA, 18 nt, Artificial Sequence
  Synthetic
gggauucccaaaauaugu

SEQ ID NO: 10652 - RNA, 19 nt, Artificial Sequence
  Synthetic
gucuuacaaucgaauaugu

SEQ ID NO: 10653 - RNA, 22 nt, Artificial Sequence
  Synthetic
gcugucuuacaaucgaauaugu

SEQ ID NO: 10654 - RNA, 22 nt, Artificial Sequence
  Synthetic
guauauccuucaggagauaugu

SEQ ID NO: 10655 - RNA, 21 nt, Artificial Sequence
  Synthetic
gccuuugaguaauuuauaugu

SEQ ID NO: 10656 - RNA, 18 nt, Artificial Sequence
  Synthetic
gaguacuugccacuaugu

SEQ ID NO: 10657 - RNA, 22 nt, Artificial Sequence
  Synthetic
gcacgaguacuugccacuaugu

SEQ ID NO: 10658 - RNA, 22 nt, Artificial Sequence
  Synthetic
gucaagcacagagugccuaugu

SEQ ID NO: 10659 - RNA, 18 nt, Artificial Sequence
  Synthetic
gagcuaguccagcuaugu

SEQ ID NO: 10660 - RNA, 21 nt, Artificial Sequence
  Synthetic
guagagcuaguccagcuaugu

SEQ ID NO: 10661 - RNA, 21 nt, Artificial Sequence
  Synthetic
gacucuuacaugccucuaugu

SEQ ID NO: 10662 - RNA, 22 nt, Artificial Sequence
  Synthetic
gcacaauauauaagagguaugu

SEQ ID NO: 10663 - RNA, 18 nt, Artificial Sequence
  Synthetic
gauagaguagugguaugu

SEQ ID NO: 10664 - RNA, 21 nt, Artificial Sequence
  Synthetic
gaaaauuugcagugauuaugu

SEQ ID NO: 10665 - RNA, 24 nt, Artificial Sequence
  Synthetic
guagaaaauuugcagugauuaugu

SEQ ID NO: 10666 - RNA, 21 nt, Artificial Sequence
  Synthetic
gcaaaaaaaaucugguuaugu

SEQ ID NO: 10667 - RNA, 24 nt, Artificial Sequence
  Synthetic
gaagcaaaaaaaaucugguuaugu

SEQ ID NO: 10668 - RNA, 24 nt, Artificial Sequence
  Synthetic
gcaaaauaugugugaaauuuaugu

SEQ ID NO: 10669 - RNA, 20 nt, Artificial Sequence
  Synthetic
gaaauaaaaucaguuuaugu

SEQ ID NO: 10670 - RNA, 23 nt, Artificial Sequence
  Synthetic
guagaaauaaaaucaguuuaugu

SEQ ID NO: 10671 - RNA, 24 nt, Artificial Sequence
  Synthetic
gguagaaauaaaaucaguuuaugu

SEQ ID NO: 10672 - RNA, 21 nt, Artificial Sequence
  Synthetic
gaaaaaguuauccuuuuaugu

SEQ ID NO: 10673 - RNA, 21 nt, Artificial Sequence
  Synthetic
gaauacagauauaauaacugu

SEQ ID NO: 10674 - RNA, 22 nt, Artificial Sequence
  Synthetic
ggaauacagauauaauaacugu

SEQ ID NO: 10675 - RNA, 23 nt, Artificial Sequence
  Synthetic
gcauuucauugauuacuaacugu

SEQ ID NO: 10676 - RNA, 24 nt, Artificial Sequence
  Synthetic
gauaguuuuuguguuuuuaacugu

SEQ ID NO: 10677 - RNA, 20 nt, Artificial Sequence
  Synthetic
guucggggcaagaccacugu

SEQ ID NO: 10678 - RNA, 21 nt, Artificial Sequence
  Synthetic
gguucggggcaagaccacugu

SEQ ID NO: 10679 - RNA, 21 nt, Artificial Sequence
  Synthetic
ggaguuuggaaagaagacugu

SEQ ID NO: 10680 - RNA, 23 nt, Artificial Sequence
  Synthetic
gaacuaggaaguauagauacugu

SEQ ID NO: 10681 - RNA, 24 nt, Artificial Sequence
  Synthetic
ggaacuaggaaguauagauacugu

SEQ ID NO: 10682 - RNA, 18 nt, Artificial Sequence
  Synthetic
gacaaaacgaaguacugu

SEQ ID NO: 10683 - RNA, 22 nt, Artificial Sequence
  Synthetic
gaaauaagagaacacuuacugu

SEQ ID NO: 10684 - RNA, 24 nt, Artificial Sequence
  Synthetic
gaaccuugcaaaggauuuuacugu

SEQ ID NO: 10685 - RNA, 23 nt, Artificial Sequence
  Synthetic
guauucccuuuacuccaaccugu

SEQ ID NO: 10686 - RNA, 22 nt, Artificial Sequence
  Synthetic
gucauuaaaaugauguaccugu

SEQ ID NO: 10687 - RNA, 23 nt, Artificial Sequence
  Synthetic
gaacacuaucaucucaccccugu

SEQ ID NO: 10688 - RNA, 20 nt, Artificial Sequence
  Synthetic
gcugcaguggacagcccugu

SEQ ID NO: 10689 - RNA, 23 nt, Artificial Sequence
  Synthetic
gcagcugcaguggacagcccugu

SEQ ID NO: 10690 - RNA, 19 nt, Artificial Sequence
  Synthetic
guagaguuagaaucccugu

SEQ ID NO: 10691 - RNA, 20 nt, Artificial Sequence
  Synthetic
gcaauauuacaccucccugu

SEQ ID NO: 10692 - RNA, 22 nt, Artificial Sequence
  Synthetic
gugcaauauuacaccucccugu

SEQ ID NO: 10693 - RNA, 23 nt, Artificial Sequence
  Synthetic
ggugcaauauuacaccucccugu

SEQ ID NO: 10694 - RNA, 19 nt, Artificial Sequence
  Synthetic
gaguccuuucucugccugu

SEQ ID NO: 10695 - RNA, 19 nt, Artificial Sequence
  Synthetic
guaguaauugcuacgcugu

SEQ ID NO: 10696 - RNA, 22 nt, Artificial Sequence
  Synthetic
guuguaguaauugcuacgcugu

SEQ ID NO: 10697 - RNA, 19 nt, Artificial Sequence
  Synthetic
gaugggccagccaggcugu

SEQ ID NO: 10698 - RNA, 24 nt, Artificial Sequence
  Synthetic
gaauauucuugggcaguuggcugu

SEQ ID NO: 10699 - RNA, 19 nt, Artificial Sequence
  Synthetic
gaugcucuucccuugcugu

SEQ ID NO: 10700 - RNA, 19 nt, Artificial Sequence
  Synthetic
gucuuaucauuagcucugu

SEQ ID NO: 10701 - RNA, 22 nt, Artificial Sequence
  Synthetic
gacuuaguuaacaauucucugu

SEQ ID NO: 10702 - RNA, 22 nt, Artificial Sequence
  Synthetic
gaguauauuaaaauaagucugu

SEQ ID NO: 10703 - RNA, 18 nt, Artificial Sequence
  Synthetic
gaucacggcacugucugu

SEQ ID NO: 10704 - RNA, 19 nt, Artificial Sequence
  Synthetic
gugaucuuacauugucugu

SEQ ID NO: 10705 - RNA, 21 nt, Artificial Sequence
  Synthetic
gauuggauauuuuaguucugu

SEQ ID NO: 10706 - RNA, 19 nt, Artificial Sequence
  Synthetic
gauguguacacauuucugu

SEQ ID NO: 10707 - RNA, 21 nt, Artificial Sequence
  Synthetic
gugauguguacacauuucugu

SEQ ID NO: 10708 - RNA, 18 nt, Artificial Sequence
  Synthetic
gaauucauccauuucugu

SEQ ID NO: 10709 - RNA, 19 nt, Artificial Sequence
  Synthetic
gcaguauaauuuuuucugu

SEQ ID NO: 10710 - RNA, 19 nt, Artificial Sequence
  Synthetic
gcauuggagacugaagugu

SEQ ID NO: 10711 - RNA, 24 nt, Artificial Sequence
  Synthetic
gauaagcauuggagacugaagugu

SEQ ID NO: 10712 - RNA, 19 nt, Artificial Sequence
  Synthetic
gaaaguaaggaauaagugu

SEQ ID NO: 10713 - RNA, 20 nt, Artificial Sequence
  Synthetic
ggaaaguaaggaauaagugu

SEQ ID NO: 10714 - RNA, 23 nt, Artificial Sequence
  Synthetic
gcaggaaaguaaggaauaagugu

SEQ ID NO: 10715 - RNA, 24 nt, Artificial Sequence
  Synthetic
ggcaggaaaguaaggaauaagugu

SEQ ID NO: 10716 - RNA, 21 nt, Artificial Sequence
  Synthetic
guuacagcaauguguaagugu

SEQ ID NO: 10717 - RNA, 22 nt, Artificial Sequence
  Synthetic
gguuacagcaauguguaagugu

SEQ ID NO: 10718 - RNA, 18 nt, Artificial Sequence
  Synthetic
guugcagugcuuaagugu

SEQ ID NO: 10719 - RNA, 21 nt, Artificial Sequence
  Synthetic
gcuguugcagugcuuaagugu

SEQ ID NO: 10720 - RNA, 21 nt, Artificial Sequence
  Synthetic
guuugggcuuuuucacagugu

SEQ ID NO: 10721 - RNA, 24 nt, Artificial Sequence
  Synthetic
gcaguuugggcuuuuucacagugu

SEQ ID NO: 10722 - RNA, 22 nt, Artificial Sequence
  Synthetic
gaauugaucaugucuccagugu

SEQ ID NO: 10723 - RNA, 19 nt, Artificial Sequence
  Synthetic
guuuugaaaagaagagugu

SEQ ID NO: 10724 - RNA, 20 nt, Artificial Sequence
  Synthetic
gguuuugaaaagaagagugu

SEQ ID NO: 10725 - RNA, 21 nt, Artificial Sequence
  Synthetic
ggguuuugaaaagaagagugu

SEQ ID NO: 10726 - RNA, 19 nt, Artificial Sequence
  Synthetic
gaugggaugugaagagugu

SEQ ID NO: 10727 - RNA, 20 nt, Artificial Sequence
  Synthetic
ggaugggaugugaagagugu

SEQ ID NO: 10728 - RNA, 23 nt, Artificial Sequence
  Synthetic
gcuggaugggaugugaagagugu

SEQ ID NO: 10729 - RNA, 20 nt, Artificial Sequence
  Synthetic
gauuucugauuggagagugu

SEQ ID NO: 10730 - RNA, 18 nt, Artificial Sequence
  Synthetic
gcacaagaacgugagugu

SEQ ID NO: 10731 - RNA, 20 nt, Artificial Sequence
  Synthetic
gagcacaagaacgugagugu

SEQ ID NO: 10732 - RNA, 22 nt, Artificial Sequence
  Synthetic
gagagcacaagaacgugagugu

SEQ ID NO: 10733 - RNA, 20 nt, Artificial Sequence
  Synthetic
guuugccuuucgaauagugu

SEQ ID NO: 10734 - RNA, 22 nt, Artificial Sequence
  Synthetic
gcuacucuuucauuuauagugu

SEQ ID NO: 10735 - RNA, 21 nt, Artificial Sequence
  Synthetic
gcuuagucagugugguagugu

SEQ ID NO: 10736 - RNA, 22 nt, Artificial Sequence
  Synthetic
ggcuuagucagugugguagugu

SEQ ID NO: 10737 - RNA, 18 nt, Artificial Sequence
  Synthetic
gugcuuagaaguuagugu

SEQ ID NO: 10738 - RNA, 19 nt, Artificial Sequence
  Synthetic
ggugcuuagaaguuagugu

SEQ ID NO: 10739 - RNA, 22 nt, Artificial Sequence
  Synthetic
guaggugcuuagaaguuagugu

SEQ ID NO: 10740 - RNA, 24 nt, Artificial Sequence
  Synthetic
gaguaggugcuuagaaguuagugu

SEQ ID NO: 10741 - RNA, 21 nt, Artificial Sequence
  Synthetic
gcccagugaugaggaaggugu

SEQ ID NO: 10742 - RNA, 18 nt, Artificial Sequence
  Synthetic
gccauaucuguagggugu

SEQ ID NO: 10743 - RNA, 19 nt, Artificial Sequence
  Synthetic
ggccauaucuguagggugu

SEQ ID NO: 10744 - RNA, 24 nt, Artificial Sequence
  Synthetic
guccuggccauaucuguagggugu

SEQ ID NO: 10745 - RNA, 18 nt, Artificial Sequence
  Synthetic
gaauuucagagugggugu

SEQ ID NO: 10746 - RNA, 24 nt, Artificial Sequence
  Synthetic
gucaauaacucucuucaauggugu

SEQ ID NO: 10747 - RNA, 18 nt, Artificial Sequence
  Synthetic
gcaggaagaugauggugu

SEQ ID NO: 10748 - RNA, 19 nt, Artificial Sequence
  Synthetic
ggcaggaagaugauggugu

SEQ ID NO: 10749 - RNA, 24 nt, Artificial Sequence
  Synthetic
guuuaggcaggaagaugauggugu

SEQ ID NO: 10750 - RNA, 20 nt, Artificial Sequence
  Synthetic
gaaaggggaaccacuggugu

SEQ ID NO: 10751 - RNA, 22 nt, Artificial Sequence
  Synthetic
gagaaaggggaaccacuggugu

SEQ ID NO: 10752 - RNA, 24 nt, Artificial Sequence
  Synthetic
gagagaaaggggaaccacuggugu

SEQ ID NO: 10753 - RNA, 20 nt, Artificial Sequence
  Synthetic
gauaaaucuagcaguggugu

SEQ ID NO: 10754 - RNA, 23 nt, Artificial Sequence
  Synthetic
gaagauaaaucuagcaguggugu

SEQ ID NO: 10755 - RNA, 24 nt, Artificial Sequence
  Synthetic
ggaagauaaaucuagcaguggugu

SEQ ID NO: 10756 - RNA, 23 nt, Artificial Sequence
  Synthetic
guuuucuuucuaauucaaugugu

SEQ ID NO: 10757 - RNA, 19 nt, Artificial Sequence
  Synthetic
gcuacauggauggaugugu

SEQ ID NO: 10758 - RNA, 20 nt, Artificial Sequence
  Synthetic
ggcuacauggauggaugugu

SEQ ID NO: 10759 - RNA, 23 nt, Artificial Sequence
  Synthetic
gcuggcuacauggauggaugugu

SEQ ID NO: 10760 - RNA, 19 nt, Artificial Sequence
  Synthetic
gauucagaccuagcugugu

SEQ ID NO: 10761 - RNA, 20 nt, Artificial Sequence
  Synthetic
ggauucagaccuagcugugu

SEQ ID NO: 10762 - RNA, 18 nt, Artificial Sequence
  Synthetic
gcuaucaagagucugugu

SEQ ID NO: 10763 - RNA, 19 nt, Artificial Sequence
  Synthetic
ggcuaucaagagucugugu

SEQ ID NO: 10764 - RNA, 21 nt, Artificial Sequence
  Synthetic
guggcuaucaagagucugugu

SEQ ID NO: 10765 - RNA, 23 nt, Artificial Sequence
  Synthetic
gaguggcuaucaagagucugugu

SEQ ID NO: 10766 - RNA, 22 nt, Artificial Sequence
  Synthetic
gaguauaaaaaugugucugugu

SEQ ID NO: 10767 - RNA, 22 nt, Artificial Sequence
  Synthetic
gaaacuggauaccugagugugu

SEQ ID NO: 10768 - RNA, 18 nt, Artificial Sequence
  Synthetic
gccaagcacuuggugugu

SEQ ID NO: 10769 - RNA, 23 nt, Artificial Sequence
  Synthetic
gcccagccaagcacuuggugugu

SEQ ID NO: 10770 - RNA, 23 nt, Artificial Sequence
  Synthetic
guuuuaauugcgacugugugugu

SEQ ID NO: 10771 - RNA, 22 nt, Artificial Sequence
  Synthetic
gucuaaauugaucauugugugu

SEQ ID NO: 10772 - RNA, 19 nt, Artificial Sequence
  Synthetic
gagaugcacacuauugugu

SEQ ID NO: 10773 - RNA, 18 nt, Artificial Sequence
  Synthetic
gugguauucuuauugugu

SEQ ID NO: 10774 - RNA, 19 nt, Artificial Sequence
  Synthetic
ggugguauucuuauugugu

SEQ ID NO: 10775 - RNA, 21 nt, Artificial Sequence
  Synthetic
gaggugguauucuuauugugu

SEQ ID NO: 10776 - RNA, 23 nt, Artificial Sequence
  Synthetic
gagaggugguauucuuauugugu

SEQ ID NO: 10777 - RNA, 21 nt, Artificial Sequence
  Synthetic
gcaacuuuacuaaacuugugu

SEQ ID NO: 10778 - RNA, 21 nt, Artificial Sequence
  Synthetic
guaauuacauguuauuugugu

SEQ ID NO: 10779 - RNA, 20 nt, Artificial Sequence
  Synthetic
gucauucacuaucuuugugu

SEQ ID NO: 10780 - RNA, 18 nt, Artificial Sequence
  Synthetic
gcuauggacuuuuugugu

SEQ ID NO: 10781 - RNA, 20 nt, Artificial Sequence
  Synthetic
gugcuauggacuuuuugugu

SEQ ID NO: 10782 - RNA, 21 nt, Artificial Sequence
  Synthetic
ggugcuauggacuuuuugugu

SEQ ID NO: 10783 - RNA, 23 nt, Artificial Sequence
  Synthetic
gcucucaaguuauagaaaauugu

SEQ ID NO: 10784 - RNA, 18 nt, Artificial Sequence
  Synthetic
guuggagggggaaauugu

SEQ ID NO: 10785 - RNA, 19 nt, Artificial Sequence
  Synthetic
gguuggagggggaaauugu

SEQ ID NO: 10786 - RNA, 21 nt, Artificial Sequence
  Synthetic
gagguuggagggggaaauugu

SEQ ID NO: 10787 - RNA, 23 nt, Artificial Sequence
  Synthetic
gugagguuggagggggaaauugu

SEQ ID NO: 10788 - RNA, 24 nt, Artificial Sequence
  Synthetic
ggugagguuggagggggaaauugu

SEQ ID NO: 10789 - RNA, 21 nt, Artificial Sequence
  Synthetic
guacuuuuucaauggaauugu

SEQ ID NO: 10790 - RNA, 24 nt, Artificial Sequence
  Synthetic
gcccagguuuugaaguuacauugu

SEQ ID NO: 10791 - RNA, 18 nt, Artificial Sequence
  Synthetic
gaucaauuauuccauugu

SEQ ID NO: 10792 - RNA, 24 nt, Artificial Sequence
  Synthetic
guucuugaucaauuauuccauugu

SEQ ID NO: 10793 - RNA, 22 nt, Artificial Sequence
  Synthetic
guuauuuguaauauggcauugu

SEQ ID NO: 10794 - RNA, 24 nt, Artificial Sequence
  Synthetic
gaaaaugcauguuugggucauugu

SEQ ID NO: 10795 - RNA, 24 nt, Artificial Sequence
  Synthetic
gaucaaaaucggaagaacgauugu

SEQ ID NO: 10796 - RNA, 21 nt, Artificial Sequence
  Synthetic
gcuccaucaaucucugauugu

SEQ ID NO: 10797 - RNA, 22 nt, Artificial Sequence
  Synthetic
ggcuccaucaaucucugauugu

SEQ ID NO: 10798 - RNA, 24 nt, Artificial Sequence
  Synthetic
guggcuccaucaaucucugauugu

SEQ ID NO: 10799 - RNA, 19 nt, Artificial Sequence
  Synthetic
gccauacaauccauauugu

SEQ ID NO: 10800 - RNA, 20 nt, Artificial Sequence
  Synthetic
ggccauacaauccauauugu

SEQ ID NO: 10801 - RNA, 24 nt, Artificial Sequence
  Synthetic
gacaggccauacaauccauauugu

SEQ ID NO: 10802 - RNA, 23 nt, Artificial Sequence
  Synthetic
guuuucaacuucucugauauugu

SEQ ID NO: 10803 - RNA, 18 nt, Artificial Sequence
  Synthetic
gagcugcuguacuauugu

SEQ ID NO: 10804 - RNA, 19 nt, Artificial Sequence
  Synthetic
ggagcugcuguacuauugu

SEQ ID NO: 10805 - RNA, 22 nt, Artificial Sequence
  Synthetic
gacaaugcuuaccauuuauugu

SEQ ID NO: 10806 - RNA, 20 nt, Artificial Sequence
  Synthetic
gcagcauuacgacuacuugu

SEQ ID NO: 10807 - RNA, 24 nt, Artificial Sequence
  Synthetic
gccagcagcauuacgacuacuugu

SEQ ID NO: 10808 - RNA, 19 nt, Artificial Sequence
  Synthetic
gcuauuuauugguacuugu

SEQ ID NO: 10809 - RNA, 22 nt, Artificial Sequence
  Synthetic
guugcuauuuauugguacuugu

SEQ ID NO: 10810 - RNA, 22 nt, Artificial Sequence
  Synthetic
gcauucauuccacuguacuugu

SEQ ID NO: 10811 - RNA, 21 nt, Artificial Sequence
  Synthetic
gccuuuaggauuuuuacuugu

SEQ ID NO: 10812 - RNA, 18 nt, Artificial Sequence
  Synthetic
gaguccaguucaccuugu

SEQ ID NO: 10813 - RNA, 20 nt, Artificial Sequence
  Synthetic
gagaguccaguucaccuugu

SEQ ID NO: 10814 - RNA, 19 nt, Artificial Sequence
  Synthetic
gccgauuguucucccuugu

SEQ ID NO: 10815 - RNA, 24 nt, Artificial Sequence
  Synthetic
gcaaagccgauuguucucccuugu

SEQ ID NO: 10816 - RNA, 20 nt, Artificial Sequence
  Synthetic
gcucucaaaaauauccuugu

SEQ ID NO: 10817 - RNA, 19 nt, Artificial Sequence
  Synthetic
gaacaaaagaauaucuugu

SEQ ID NO: 10818 - RNA, 22 nt, Artificial Sequence
  Synthetic
gaagaacaaaagaauaucuugu

SEQ ID NO: 10819 - RNA, 20 nt, Artificial Sequence
  Synthetic
gaaaauauugaagcucuugu

SEQ ID NO: 10820 - RNA, 24 nt, Artificial Sequence
  Synthetic
gaaaucccaugacgacuuucuugu

SEQ ID NO: 10821 - RNA, 20 nt, Artificial Sequence
  Synthetic
gcuuaugaaaaugcaguugu

SEQ ID NO: 10822 - RNA, 24 nt, Artificial Sequence
  Synthetic
gcaagcuuaugaaaaugcaguugu

SEQ ID NO: 10823 - RNA, 23 nt, Artificial Sequence
  Synthetic
guucacuuuaaaaauuggguugu

SEQ ID NO: 10824 - RNA, 21 nt, Artificial Sequence
  Synthetic
gauauaaugacauaauguugu

SEQ ID NO: 10825 - RNA, 23 nt, Artificial Sequence
  Synthetic
guacauauuuauagagauguugu

SEQ ID NO: 10826 - RNA, 20 nt, Artificial Sequence
  Synthetic
gaugaguauucauauguugu

SEQ ID NO: 10827 - RNA, 24 nt, Artificial Sequence
  Synthetic
gucuacuuccguugcaacuguugu

SEQ ID NO: 10828 - RNA, 18 nt, Artificial Sequence
  Synthetic
gcuagguagaguuguugu

SEQ ID NO: 10829 - RNA, 21 nt, Artificial Sequence
  Synthetic
gcuaccucuucagguuguugu

SEQ ID NO: 10830 - RNA, 24 nt, Artificial Sequence
  Synthetic
guaaauaaucccaacugaauuugu

SEQ ID NO: 10831 - RNA, 19 nt, Artificial Sequence
  Synthetic
gauacuaagggucauuugu

SEQ ID NO: 10832 - RNA, 22 nt, Artificial Sequence
  Synthetic
guugauacuaagggucauuugu

SEQ ID NO: 10833 - RNA, 23 nt, Artificial Sequence
  Synthetic
guuacccuaaauuaaauauuugu

SEQ ID NO: 10834 - RNA, 23 nt, Artificial Sequence
  Synthetic
guaaaccacuguauccuauuugu

SEQ ID NO: 10835 - RNA, 24 nt, Artificial Sequence
  Synthetic
gguaaaccacuguauccuauuugu

SEQ ID NO: 10836 - RNA, 22 nt, Artificial Sequence
  Synthetic
guaucucuuuaaagaucuuugu

SEQ ID NO: 10837 - RNA, 18 nt, Artificial Sequence
  Synthetic
guagacuucagucuuugu

SEQ ID NO: 10838 - RNA, 24 nt, Artificial Sequence
  Synthetic
gaaauuguagacuucagucuuugu

SEQ ID NO: 10839 - RNA, 24 nt, Artificial Sequence
  Synthetic
gaaauuagauaaaacuuucuuugu

SEQ ID NO: 10840 - RNA, 23 nt, Artificial Sequence
  Synthetic
gauuaauuccuauuucauuuugu

SEQ ID NO: 10841 - RNA, 24 nt, Artificial Sequence
  Synthetic
ggauuaauuccuauuucauuuugu

SEQ ID NO: 10842 - RNA, 23 nt, Artificial Sequence
  Synthetic
gauuuuauucuuuaauauuuugu

SEQ ID NO: 10843 - RNA, 22 nt, Artificial Sequence
  Synthetic
gaaaacaugcacauacuuuugu

SEQ ID NO: 10844 - RNA, 18 nt, Artificial Sequence
  Synthetic
guaugugugucuuuuugu

SEQ ID NO: 10845 - RNA, 23 nt, Artificial Sequence
  Synthetic
gcaacguaugugugucuuuuugu

SEQ ID NO: 10846 - RNA, 24 nt, Artificial Sequence
  Synthetic
ggcaacguaugugugucuuuuugu

SEQ ID NO: 10847 - RNA, 19 nt, Artificial Sequence
  Synthetic
gugagaguaauguuuuugu

SEQ ID NO: 10848 - RNA, 20 nt, Artificial Sequence
  Synthetic
ggugagaguaauguuuuugu

SEQ ID NO: 10849 - RNA, 23 nt, Artificial Sequence
  Synthetic
gcaggugagaguaauguuuuugu

SEQ ID NO: 10850 - RNA, 21 nt, Artificial Sequence
  Synthetic
gcccuugguuaaaaaaaaauu

SEQ ID NO: 10851 - RNA, 22 nt, Artificial Sequence
  Synthetic
ggcccuugguuaaaaaaaaauu

SEQ ID NO: 10852 - RNA, 23 nt, Artificial Sequence
  Synthetic
gggcccuugguuaaaaaaaaauu

SEQ ID NO: 10853 - RNA, 23 nt, Artificial Sequence
  Synthetic
gaauacuggagacugaaaaaauu

SEQ ID NO: 10854 - RNA, 21 nt, Artificial Sequence
  Synthetic
gaguggcaauugucaaaaauu

SEQ ID NO: 10855 - RNA, 23 nt, Artificial Sequence
  Synthetic
gcaacaucaucauuuuaaaaauu

SEQ ID NO: 10856 - RNA, 24 nt, Artificial Sequence
  Synthetic
ggcaacaucaucauuuuaaaaauu

SEQ ID NO: 10857 - RNA, 23 nt, Artificial Sequence
  Synthetic
gcagaaaaaaaaaacccaaaauu

SEQ ID NO: 10858 - RNA, 21 nt, Artificial Sequence
  Synthetic
guagaucacugaagcaaaauu

SEQ ID NO: 10859 - RNA, 18 nt, Artificial Sequence
  Synthetic
guccuuucuuucaaaauu

SEQ ID NO: 10860 - RNA, 23 nt, Artificial Sequence
  Synthetic
gaauuguccuuucuuucaaaauu

SEQ ID NO: 10861 - RNA, 21 nt, Artificial Sequence
  Synthetic
gccucaagggauaggaaaauu

SEQ ID NO: 10862 - RNA, 22 nt, Artificial Sequence
  Synthetic
ggccucaagggauaggaaaauu

SEQ ID NO: 10863 - RNA, 22 nt, Artificial Sequence
  Synthetic
gucaaaaguucuugugaaaauu

SEQ ID NO: 10864 - RNA, 20 nt, Artificial Sequence
  Synthetic
gacucaacuuugcacaaauu

SEQ ID NO: 10865 - RNA, 23 nt, Artificial Sequence
  Synthetic
gaagacucaacuuugcacaaauu

SEQ ID NO: 10866 - RNA, 23 nt, Artificial Sequence
  Synthetic
guuuuccaaaaaauugacaaauu

SEQ ID NO: 10867 - RNA, 24 nt, Artificial Sequence
  Synthetic
gguuuuccaaaaaauugacaaauu

SEQ ID NO: 10868 - RNA, 18 nt, Artificial Sequence
  Synthetic
gaaaacugguagcaaauu

SEQ ID NO: 10869 - RNA, 21 nt, Artificial Sequence
  Synthetic
guauccugacucuaagaaauu

SEQ ID NO: 10870 - RNA, 23 nt, Artificial Sequence
  Synthetic
gcguauccugacucuaagaaauu

SEQ ID NO: 10871 - RNA, 18 nt, Artificial Sequence
  Synthetic
gggcucaagggggaaauu

SEQ ID NO: 10872 - RNA, 20 nt, Artificial Sequence
  Synthetic
gugggcucaagggggaaauu

SEQ ID NO: 10873 - RNA, 23 nt, Artificial Sequence
  Synthetic
gcuuaugaugaaauagugaaauu

SEQ ID NO: 10874 - RNA, 24 nt, Artificial Sequence
  Synthetic
gcaaccagggaaggaauugaaauu

SEQ ID NO: 10875 - RNA, 21 nt, Artificial Sequence
  Synthetic
guuaccuuuauaugcuaaauu

SEQ ID NO: 10876 - RNA, 19 nt, Artificial Sequence
  Synthetic
guagauacauuauuaaauu

SEQ ID NO: 10877 - RNA, 22 nt, Artificial Sequence
  Synthetic
gccuugaaagcuauguacaauu

SEQ ID NO: 10878 - RNA, 18 nt, Artificial Sequence
  Synthetic
gauacagugcuuacaauu

SEQ ID NO: 10879 - RNA, 23 nt, Artificial Sequence
  Synthetic
guaaagauacagugcuuacaauu

SEQ ID NO: 10880 - RNA, 18 nt, Artificial Sequence
  Synthetic
ggucaauauguuccaauu

SEQ ID NO: 10881 - RNA, 22 nt, Artificial Sequence
  Synthetic
gucaggucaauauguuccaauu

SEQ ID NO: 10882 - RNA, 21 nt, Artificial Sequence
  Synthetic
gaauagagagcacaaucaauu

SEQ ID NO: 10883 - RNA, 24 nt, Artificial Sequence
  Synthetic
gccaccaguucaacccucucaauu

SEQ ID NO: 10884 - RNA, 23 nt, Artificial Sequence
  Synthetic
guauaauguccuccuugucaauu

SEQ ID NO: 10885 - RNA, 24 nt, Artificial Sequence
  Synthetic
gguauaauguccuccuugucaauu

SEQ ID NO: 10886 - RNA, 19 nt, Artificial Sequence
  Synthetic
gcucaucaaaaguucaauu

SEQ ID NO: 10887 - RNA, 20 nt, Artificial Sequence
  Synthetic
ggcucaucaaaaguucaauu

SEQ ID NO: 10888 - RNA, 22 nt, Artificial Sequence
  Synthetic
guggcucaucaaaaguucaauu

SEQ ID NO: 10889 - RNA, 23 nt, Artificial Sequence
  Synthetic
gguggcucaucaaaaguucaauu

SEQ ID NO: 10890 - RNA, 18 nt, Artificial Sequence
  Synthetic
guguguuaauuuucaauu

SEQ ID NO: 10891 - RNA, 19 nt, Artificial Sequence
  Synthetic
gguguguuaauuuucaauu

SEQ ID NO: 10892 - RNA, 22 nt, Artificial Sequence
  Synthetic
guagguguguuaauuuucaauu

SEQ ID NO: 10893 - RNA, 20 nt, Artificial Sequence
  Synthetic
gacagugacuuaaaagaauu

SEQ ID NO: 10894 - RNA, 22 nt, Artificial Sequence
  Synthetic
gagacagugacuuaaaagaauu

SEQ ID NO: 10895 - RNA, 23 nt, Artificial Sequence
  Synthetic
ggagacagugacuuaaaagaauu

SEQ ID NO: 10896 - RNA, 21 nt, Artificial Sequence
  Synthetic
gaaaauuauggguacagaauu

SEQ ID NO: 10897 - RNA, 22 nt, Artificial Sequence
  Synthetic
ggaaaauuauggguacagaauu

SEQ ID NO: 10898 - RNA, 18 nt, Artificial Sequence
  Synthetic
gagagaaaucccagaauu

SEQ ID NO: 10899 - RNA, 19 nt, Artificial Sequence
  Synthetic
ggagagaaaucccagaauu

SEQ ID NO: 10900 - RNA, 24 nt, Artificial Sequence
  Synthetic
guacaggagagaaaucccagaauu

SEQ ID NO: 10901 - RNA, 24 nt, Artificial Sequence
  Synthetic
guucaaaguuuaauuucuagaauu

SEQ ID NO: 10902 - RNA, 20 nt, Artificial Sequence
  Synthetic
guugugacaugaguagaauu

SEQ ID NO: 10903 - RNA, 21 nt, Artificial Sequence
  Synthetic
gguugugacaugaguagaauu

SEQ ID NO: 10904 - RNA, 19 nt, Artificial Sequence
  Synthetic
gcagcccagccuuagaauu

SEQ ID NO: 10905 - RNA, 22 nt, Artificial Sequence
  Synthetic
gaagcagcccagccuuagaauu

SEQ ID NO: 10906 - RNA, 23 nt, Artificial Sequence
  Synthetic
ggaagcagcccagccuuagaauu

SEQ ID NO: 10907 - RNA, 20 nt, Artificial Sequence
  Synthetic
gcuuuuugggaguuagaauu

SEQ ID NO: 10908 - RNA, 18 nt, Artificial Sequence
  Synthetic
gaugagcauagaugaauu

SEQ ID NO: 10909 - RNA, 19 nt, Artificial Sequence
  Synthetic
ggaugagcauagaugaauu

SEQ ID NO: 10910 - RNA, 24 nt, Artificial Sequence
  Synthetic
gcauuaaugaugagauuaugaauu

SEQ ID NO: 10911 - RNA, 22 nt, Artificial Sequence
  Synthetic
gaauugaaaugaaaccugaauu

SEQ ID NO: 10912 - RNA, 22 nt, Artificial Sequence
  Synthetic
guaaagaauaugccugugaauu

SEQ ID NO: 10913 - RNA, 23 nt, Artificial Sequence
  Synthetic
gaccuuaagauuacuugugaauu

SEQ ID NO: 10914 - RNA, 18 nt, Artificial Sequence
  Synthetic
gcuugcagcaauugaauu

SEQ ID NO: 10915 - RNA, 19 nt, Artificial Sequence
  Synthetic
ggcuugcagcaauugaauu

SEQ ID NO: 10916 - RNA, 22 nt, Artificial Sequence
  Synthetic
gaaggcuugcagcaauugaauu

SEQ ID NO: 10917 - RNA, 22 nt, Artificial Sequence
  Synthetic
gcacucuauauuauauugaauu

SEQ ID NO: 10918 - RNA, 21 nt, Artificial Sequence
  Synthetic
gaaaauauuccuguuugaauu

SEQ ID NO: 10919 - RNA, 24 nt, Artificial Sequence
  Synthetic
gaagaaaauauuccuguuugaauu

SEQ ID NO: 10920 - RNA, 21 nt, Artificial Sequence
  Synthetic
guuaccuuaaugaaaauaauu

SEQ ID NO: 10921 - RNA, 23 nt, Artificial Sequence
  Synthetic
guguuaccuuaaugaaaauaauu

SEQ ID NO: 10922 - RNA, 22 nt, Artificial Sequence
  Synthetic
gauguaaaguaugagaauaauu

SEQ ID NO: 10923 - RNA, 18 nt, Artificial Sequence
  Synthetic
gcagguuaaugaauaauu

SEQ ID NO: 10924 - RNA, 21 nt, Artificial Sequence
  Synthetic
guagcagguuaaugaauaauu

SEQ ID NO: 10925 - RNA, 19 nt, Artificial Sequence
  Synthetic
gauuaucguaaacauaauu

SEQ ID NO: 10926 - RNA, 20 nt, Artificial Sequence
  Synthetic
ggauuaucguaaacauaauu

SEQ ID NO: 10927 - RNA, 18 nt, Artificial Sequence
  Synthetic
gauuaucauuauauaauu

SEQ ID NO: 10928 - RNA, 20 nt, Artificial Sequence
  Synthetic
gagauuaucauuauauaauu

SEQ ID NO: 10929 - RNA, 18 nt, Artificial Sequence
  Synthetic
ggaagaguuauuauaauu

SEQ ID NO: 10930 - RNA, 19 nt, Artificial Sequence
  Synthetic
gauuacuugcuuuauaauu

SEQ ID NO: 10931 - RNA, 20 nt, Artificial Sequence
  Synthetic
ggauuacuugcuuuauaauu

SEQ ID NO: 10932 - RNA, 19 nt, Artificial Sequence
  Synthetic
gccuucuuuugaacuaauu

SEQ ID NO: 10933 - RNA, 23 nt, Artificial Sequence
  Synthetic
guaauacuucauauauccuaauu

SEQ ID NO: 10934 - RNA, 18 nt, Artificial Sequence
  Synthetic
guugauaaugggcuaauu

SEQ ID NO: 10935 - RNA, 19 nt, Artificial Sequence
  Synthetic
gguugauaaugggcuaauu

SEQ ID NO: 10936 - RNA, 22 nt, Artificial Sequence
  Synthetic
guugguugauaaugggcuaauu

SEQ ID NO: 10937 - RNA, 18 nt, Artificial Sequence
  Synthetic
gauacagaaacucuaauu

SEQ ID NO: 10938 - RNA, 22 nt, Artificial Sequence
  Synthetic
gcaagauacagaaacucuaauu

SEQ ID NO: 10939 - RNA, 20 nt, Artificial Sequence
  Synthetic
guacaguauaggcaguaauu

SEQ ID NO: 10940 - RNA, 23 nt, Artificial Sequence
  Synthetic
gaaguacaguauaggcaguaauu

SEQ ID NO: 10941 - RNA, 19 nt, Artificial Sequence
  Synthetic
guaugagauuauaguaauu

SEQ ID NO: 10942 - RNA, 22 nt, Artificial Sequence
  Synthetic
gcaguaugagauuauaguaauu

SEQ ID NO: 10943 - RNA, 23 nt, Artificial Sequence
  Synthetic
ggcaguaugagauuauaguaauu

SEQ ID NO: 10944 - RNA, 24 nt, Artificial Sequence
  Synthetic
gggcaguaugagauuauaguaauu

SEQ ID NO: 10945 - RNA, 19 nt, Artificial Sequence
  Synthetic
gaaaugggcagguguaauu

SEQ ID NO: 10946 - RNA, 21 nt, Artificial Sequence
  Synthetic
gagaaaugggcagguguaauu

SEQ ID NO: 10947 - RNA, 22 nt, Artificial Sequence
  Synthetic
ggagaaaugggcagguguaauu

SEQ ID NO: 10948 - RNA, 19 nt, Artificial Sequence
  Synthetic
gagagcauugcaauuaauu

SEQ ID NO: 10949 - RNA, 20 nt, Artificial Sequence
  Synthetic
ggagagcauugcaauuaauu

SEQ ID NO: 10950 - RNA, 21 nt, Artificial Sequence
  Synthetic
gggagagcauugcaauuaauu

SEQ ID NO: 10951 - RNA, 19 nt, Artificial Sequence
  Synthetic
gcaguaggacugauuaauu

SEQ ID NO: 10952 - RNA, 22 nt, Artificial Sequence
  Synthetic
guagcaguaggacugauuaauu

SEQ ID NO: 10953 - RNA, 19 nt, Artificial Sequence
  Synthetic
gagaacuccugccuuaauu

SEQ ID NO: 10954 - RNA, 21 nt, Artificial Sequence
  Synthetic
gagagaacuccugccuuaauu

SEQ ID NO: 10955 - RNA, 19 nt, Artificial Sequence
  Synthetic
gcagguaucaacguuaauu

SEQ ID NO: 10956 - RNA, 21 nt, Artificial Sequence
  Synthetic
gagcagguaucaacguuaauu

SEQ ID NO: 10957 - RNA, 18 nt, Artificial Sequence
  Synthetic
gaauauaaacaaaacauu

SEQ ID NO: 10958 - RNA, 21 nt, Artificial Sequence
  Synthetic
guaagaauuuaacaaaacauu

SEQ ID NO: 10959 - RNA, 22 nt, Artificial Sequence
  Synthetic
gcaaucauuuuauuuaaacauu

SEQ ID NO: 10960 - RNA, 21 nt, Artificial Sequence
  Synthetic
gaacaucuguguuccaacauu

SEQ ID NO: 10961 - RNA, 21 nt, Artificial Sequence
  Synthetic
gucaagugcuuugucaacauu

SEQ ID NO: 10962 - RNA, 23 nt, Artificial Sequence
  Synthetic
gucuaccuuacuuguucaacauu

SEQ ID NO: 10963 - RNA, 21 nt, Artificial Sequence
  Synthetic
gucaucuaauuugugaacauu

SEQ ID NO: 10964 - RNA, 23 nt, Artificial Sequence
  Synthetic
gagucaucuaauuugugaacauu

SEQ ID NO: 10965 - RNA, 18 nt, Artificial Sequence
  Synthetic
gucaaaggguuuaacauu

SEQ ID NO: 10966 - RNA, 18 nt, Artificial Sequence
  Synthetic
guaacaaaagaccacauu

SEQ ID NO: 10967 - RNA, 19 nt, Artificial Sequence
  Synthetic
gguaacaaaagaccacauu

SEQ ID NO: 10968 - RNA, 22 nt, Artificial Sequence
  Synthetic
gcuucaguccucugagcacauu

SEQ ID NO: 10969 - RNA, 23 nt, Artificial Sequence
  Synthetic
ggcuucaguccucugagcacauu

SEQ ID NO: 10970 - RNA, 18 nt, Artificial Sequence
  Synthetic
ggcuggcagaugcacauu

SEQ ID NO: 10971 - RNA, 19 nt, Artificial Sequence
  Synthetic
gggcuggcagaugcacauu

SEQ ID NO: 10972 - RNA, 24 nt, Artificial Sequence
  Synthetic
gcuuagggcuggcagaugcacauu

SEQ ID NO: 10973 - RNA, 23 nt, Artificial Sequence
  Synthetic
gaaaccuggaauauaugcacauu

SEQ ID NO: 10974 - RNA, 21 nt, Artificial Sequence
  Synthetic
gauauaaacacccuucacauu

SEQ ID NO: 10975 - RNA, 22 nt, Artificial Sequence
  Synthetic
ggauauaaacacccuucacauu

SEQ ID NO: 10976 - RNA, 24 nt, Artificial Sequence
  Synthetic
guggauauaaacacccuucacauu

SEQ ID NO: 10977 - RNA, 19 nt, Artificial Sequence
  Synthetic
gagaaaaaagguucacauu

SEQ ID NO: 10978 - RNA, 24 nt, Artificial Sequence
  Synthetic
gauaagagaaaaaagguucacauu

SEQ ID NO: 10979 - RNA, 20 nt, Artificial Sequence
  Synthetic
gccaauauggcuaagacauu

SEQ ID NO: 10980 - RNA, 20 nt, Artificial Sequence
  Synthetic
gucagguuucaucagacauu

SEQ ID NO: 10981 - RNA, 21 nt, Artificial Sequence
  Synthetic
ggucagguuucaucagacauu

SEQ ID NO: 10982 - RNA, 24 nt, Artificial Sequence
  Synthetic
gucggucagguuucaucagacauu

SEQ ID NO: 10983 - RNA, 21 nt, Artificial Sequence
  Synthetic
gagagaaggaaaggagacauu

SEQ ID NO: 10984 - RNA, 18 nt, Artificial Sequence
  Synthetic
gaguauacuggggacauu

SEQ ID NO: 10985 - RNA, 23 nt, Artificial Sequence
  Synthetic
guucagaguauacuggggacauu

SEQ ID NO: 10986 - RNA, 21 nt, Artificial Sequence
  Synthetic
gccaaauguguuuuugacauu

SEQ ID NO: 10987 - RNA, 22 nt, Artificial Sequence
  Synthetic
ggccaaauguguuuuugacauu

SEQ ID NO: 10988 - RNA, 21 nt, Artificial Sequence
  Synthetic
guaauauaaagcauauacauu

SEQ ID NO: 10989 - RNA, 19 nt, Artificial Sequence
  Synthetic
gauugugaagcuauacauu

SEQ ID NO: 10990 - RNA, 21 nt, Artificial Sequence
  Synthetic
gugauugugaagcuauacauu

SEQ ID NO: 10991 - RNA, 23 nt, Artificial Sequence
  Synthetic
gagugauugugaagcuauacauu

SEQ ID NO: 10992 - RNA, 23 nt, Artificial Sequence
  Synthetic
guucuauuuucaaaaccuacauu

SEQ ID NO: 10993 - RNA, 19 nt, Artificial Sequence
  Synthetic
gcugaaaggaggcuacauu

SEQ ID NO: 10994 - RNA, 18 nt, Artificial Sequence
  Synthetic
ggcuauaagaaaaccauu

SEQ ID NO: 10995 - RNA, 20 nt, Artificial Sequence
  Synthetic
gaggcuauaagaaaaccauu

SEQ ID NO: 10996 - RNA, 18 nt, Artificial Sequence
  Synthetic
gggguugggaugaccauu

SEQ ID NO: 10997 - RNA, 20 nt, Artificial Sequence
  Synthetic
gugggguugggaugaccauu

SEQ ID NO: 10998 - RNA, 20 nt, Artificial Sequence
  Synthetic
gucauaggaguaaagccauu

SEQ ID NO: 10999 - RNA, 21 nt, Artificial Sequence
  Synthetic
ggucauaggaguaaagccauu

SEQ ID NO: 11000 - RNA, 22 nt, Artificial Sequence
  Synthetic
gggucauaggaguaaagccauu

SEQ ID NO: 11001 - RNA, 19 nt, Artificial Sequence
  Synthetic
guuggcuuaaugagccauu

SEQ ID NO: 11002 - RNA, 21 nt, Artificial Sequence
  Synthetic
guguuggcuuaaugagccauu

SEQ ID NO: 11003 - RNA, 22 nt, Artificial Sequence
  Synthetic
gccccaccuccaaauauccauu

SEQ ID NO: 11004 - RNA, 23 nt, Artificial Sequence
  Synthetic
ggccccaccuccaaauauccauu

SEQ ID NO: 11005 - RNA, 20 nt, Artificial Sequence
  Synthetic
guaucuucaaugaguccauu

SEQ ID NO: 11006 - RNA, 19 nt, Artificial Sequence
  Synthetic
gaauuagcagcauuccauu

SEQ ID NO: 11007 - RNA, 18 nt, Artificial Sequence
  Synthetic
guguggcacauuuccauu

SEQ ID NO: 11008 - RNA, 24 nt, Artificial Sequence
  Synthetic
gccuaaguguggcacauuuccauu

SEQ ID NO: 11009 - RNA, 23 nt, Artificial Sequence
  Synthetic
guaccuuagguuaucuuuccauu

SEQ ID NO: 11010 - RNA, 22 nt, Artificial Sequence
  Synthetic
guuuucuucauugguuuccauu

SEQ ID NO: 11011 - RNA, 23 nt, Artificial Sequence
  Synthetic
gguuuucuucauugguuuccauu

SEQ ID NO: 11012 - RNA, 19 nt, Artificial Sequence
  Synthetic
gccuuagucggcucgcauu

SEQ ID NO: 11013 - RNA, 22 nt, Artificial Sequence
  Synthetic
guugccuuagucggcucgcauu

SEQ ID NO: 11014 - RNA, 18 nt, Artificial Sequence
  Synthetic
gcuaaauggccaggcauu

SEQ ID NO: 11015 - RNA, 19 nt, Artificial Sequence
  Synthetic
ggcuaaauggccaggcauu

SEQ ID NO: 11016 - RNA, 19 nt, Artificial Sequence
  Synthetic
guggcaaaucuggggcauu

SEQ ID NO: 11017 - RNA, 22 nt, Artificial Sequence
  Synthetic
gaauauuugccuaaaaugcauu

SEQ ID NO: 11018 - RNA, 22 nt, Artificial Sequence
  Synthetic
guaaauauuuacaucaugcauu

SEQ ID NO: 11019 - RNA, 18 nt, Artificial Sequence
  Synthetic
gggaucaugcuaugcauu

SEQ ID NO: 11020 - RNA, 22 nt, Artificial Sequence
  Synthetic
gucagggaucaugcuaugcauu

SEQ ID NO: 11021 - RNA, 19 nt, Artificial Sequence
  Synthetic
gcacugauaaaccugcauu

SEQ ID NO: 11022 - RNA, 20 nt, Artificial Sequence
  Synthetic
ggcacugauaaaccugcauu

SEQ ID NO: 11023 - RNA, 22 nt, Artificial Sequence
  Synthetic
guggcacugauaaaccugcauu

SEQ ID NO: 11024 - RNA, 19 nt, Artificial Sequence
  Synthetic
gcagauacacuucugcauu

SEQ ID NO: 11025 - RNA, 18 nt, Artificial Sequence
  Synthetic
guggaagcacauugcauu

SEQ ID NO: 11026 - RNA, 22 nt, Artificial Sequence
  Synthetic
gauuguggaagcacauugcauu

SEQ ID NO: 11027 - RNA, 24 nt, Artificial Sequence
  Synthetic
gagauuguggaagcacauugcauu

SEQ ID NO: 11028 - RNA, 19 nt, Artificial Sequence
  Synthetic
gauggaagcaccuugcauu

SEQ ID NO: 11029 - RNA, 22 nt, Artificial Sequence
  Synthetic
gaugauggaagcaccuugcauu

SEQ ID NO: 11030 - RNA, 24 nt, Artificial Sequence
  Synthetic
gagaugauggaagcaccuugcauu

SEQ ID NO: 11031 - RNA, 24 nt, Artificial Sequence
  Synthetic
gcuuuuacauauuuauaaaucauu

SEQ ID NO: 11032 - RNA, 18 nt, Artificial Sequence
  Synthetic
gaggcuagaacaaucauu

SEQ ID NO: 11033 - RNA, 22 nt, Artificial Sequence
  Synthetic
gcaaaucaguugacuaaucauu

SEQ ID NO: 11034 - RNA, 19 nt, Artificial Sequence
  Synthetic
gacauguccagacaucauu

SEQ ID NO: 11035 - RNA, 21 nt, Artificial Sequence
  Synthetic
gucaacaugauuuucaucauu

SEQ ID NO: 11036 - RNA, 18 nt, Artificial Sequence
  Synthetic
gugagguaguauaucauu

SEQ ID NO: 11037 - RNA, 20 nt, Artificial Sequence
  Synthetic
guaaucaaaaagguaucauu

SEQ ID NO: 11038 - RNA, 21 nt, Artificial Sequence
  Synthetic
gauaucagcaguaaacucauu

SEQ ID NO: 11039 - RNA, 24 nt, Artificial Sequence
  Synthetic
guagauaucagcaguaaacucauu

SEQ ID NO: 11040 - RNA, 18 nt, Artificial Sequence
  Synthetic
gaauaaaaaucacucauu

SEQ ID NO: 11041 - RNA, 23 nt, Artificial Sequence
  Synthetic
gcauugaauaaaaaucacucauu

SEQ ID NO: 11042 - RNA, 20 nt, Artificial Sequence
  Synthetic
guaaggguacuauucucauu

SEQ ID NO: 11043 - RNA, 19 nt, Artificial Sequence
  Synthetic
gcaaagacauacagucauu

SEQ ID NO: 11044 - RNA, 18 nt, Artificial Sequence
  Synthetic
guuuauuuugcugucauu

SEQ ID NO: 11045 - RNA, 24 nt, Artificial Sequence
  Synthetic
gcaucuguuuauuuugcugucauu

SEQ ID NO: 11046 - RNA, 21 nt, Artificial Sequence
  Synthetic
gcccgacagaaaauguucauu

SEQ ID NO: 11047 - RNA, 24 nt, Artificial Sequence
  Synthetic
guagcccgacagaaaauguucauu

SEQ ID NO: 11048 - RNA, 19 nt, Artificial Sequence
  Synthetic
gucuuuacuccauuucauu

SEQ ID NO: 11049 - RNA, 18 nt, Artificial Sequence
  Synthetic
gugagguuggauuucauu

SEQ ID NO: 11050 - RNA, 19 nt, Artificial Sequence
  Synthetic
ggugagguuggauuucauu

SEQ ID NO: 11051 - RNA, 23 nt, Artificial Sequence
  Synthetic
gaaaggugagguuggauuucauu

SEQ ID NO: 11052 - RNA, 22 nt, Artificial Sequence
  Synthetic
gauuuuaugcuauuguaagauu

SEQ ID NO: 11053 - RNA, 23 nt, Artificial Sequence
  Synthetic
ggauuuuaugcuauuguaagauu

SEQ ID NO: 11054 - RNA, 20 nt, Artificial Sequence
  Synthetic
gacuuugccuaucccagauu

SEQ ID NO: 11055 - RNA, 21 nt, Artificial Sequence
  Synthetic
ggacuuugccuaucccagauu

SEQ ID NO: 11056 - RNA, 24 nt, Artificial Sequence
  Synthetic
guaaaucugagguaaaugcagauu

SEQ ID NO: 11057 - RNA, 22 nt, Artificial Sequence
  Synthetic
gaucaaaauucauuuucagauu

SEQ ID NO: 11058 - RNA, 21 nt, Artificial Sequence
  Synthetic
gaccaaaugcaguaggagauu

SEQ ID NO: 11059 - RNA, 22 nt, Artificial Sequence
  Synthetic
ggaccaaaugcaguaggagauu

SEQ ID NO: 11060 - RNA, 23 nt, Artificial Sequence
  Synthetic
gaucacccuaauuacaugagauu

SEQ ID NO: 11061 - RNA, 24 nt, Artificial Sequence
  Synthetic
ggaucacccuaauuacaugagauu

SEQ ID NO: 11062 - RNA, 18 nt, Artificial Sequence
  Synthetic
ggcauuaaugaugagauu

SEQ ID NO: 11063 - RNA, 21 nt, Artificial Sequence
  Synthetic
gcaggcauuaaugaugagauu

SEQ ID NO: 11064 - RNA, 18 nt, Artificial Sequence
  Synthetic
gagcuguagcuugagauu

SEQ ID NO: 11065 - RNA, 19 nt, Artificial Sequence
  Synthetic
ggagcuguagcuugagauu

SEQ ID NO: 11066 - RNA, 23 nt, Artificial Sequence
  Synthetic
gacaggagcuguagcuugagauu

SEQ ID NO: 11067 - RNA, 19 nt, Artificial Sequence
  Synthetic
guuacaaaugccauagauu

SEQ ID NO: 11068 - RNA, 23 nt, Artificial Sequence
  Synthetic
guaaguuacaaaugccauagauu

SEQ ID NO: 11069 - RNA, 19 nt, Artificial Sequence
  Synthetic
gucauaaucagccuagauu

SEQ ID NO: 11070 - RNA, 24 nt, Artificial Sequence
  Synthetic
gcuaugucauaaucagccuagauu

SEQ ID NO: 11071 - RNA, 23 nt, Artificial Sequence
  Synthetic
gucaauaagggucucuguagauu

SEQ ID NO: 11072 - RNA, 23 nt, Artificial Sequence
  Synthetic
guucucucuuuaaaaaggcgauu

SEQ ID NO: 11073 - RNA, 24 nt, Artificial Sequence
  Synthetic
gguucucucuuuaaaaaggcgauu

SEQ ID NO: 11074 - RNA, 18 nt, Artificial Sequence
  Synthetic
ggacaucuagauucgauu

SEQ ID NO: 11075 - RNA, 23 nt, Artificial Sequence
  Synthetic
gauauggacaucuagauucgauu

SEQ ID NO: 11076 - RNA, 21 nt, Artificial Sequence
  Synthetic
gccauuaaaugccacaggauu

SEQ ID NO: 11077 - RNA, 21 nt, Artificial Sequence
  Synthetic
gcucacaaccuagggaggauu

SEQ ID NO: 11078 - RNA, 22 nt, Artificial Sequence
  Synthetic
ggcucacaaccuagggaggauu

SEQ ID NO: 11079 - RNA, 21 nt, Artificial Sequence
  Synthetic
gaaaacugcuagccuaggauu

SEQ ID NO: 11080 - RNA, 24 nt, Artificial Sequence
  Synthetic
gcagaaaacugcuagccuaggauu

SEQ ID NO: 11081 - RNA, 22 nt, Artificial Sequence
  Synthetic
gaauuuucagucuuaagggauu

SEQ ID NO: 11082 - RNA, 24 nt, Artificial Sequence
  Synthetic
gugaauuuucagucuuaagggauu

SEQ ID NO: 11083 - RNA, 20 nt, Artificial Sequence
  Synthetic
gcccagggaguugagggauu

SEQ ID NO: 11084 - RNA, 19 nt, Artificial Sequence
  Synthetic
gcuauguaucucauggauu

SEQ ID NO: 11085 - RNA, 21 nt, Artificial Sequence
  Synthetic
gugcuauguaucucauggauu

SEQ ID NO: 11086 - RNA, 19 nt, Artificial Sequence
  Synthetic
guuaaaagaucacuggauu

SEQ ID NO: 11087 - RNA, 24 nt, Artificial Sequence
  Synthetic
gcacuguuaaaagaucacuggauu

SEQ ID NO: 11088 - RNA, 24 nt, Artificial Sequence
  Synthetic
gaacaaauucuccauuucuggauu

SEQ ID NO: 11089 - RNA, 19 nt, Artificial Sequence
  Synthetic
gcauaagggcucuuggauu

SEQ ID NO: 11090 - RNA, 18 nt, Artificial Sequence
  Synthetic
guaccucugcuaaugauu

SEQ ID NO: 11091 - RNA, 20 nt, Artificial Sequence
  Synthetic
guguaccucugcuaaugauu

SEQ ID NO: 11092 - RNA, 18 nt, Artificial Sequence
  Synthetic
gauaauuuaaacaugauu

SEQ ID NO: 11093 - RNA, 18 nt, Artificial Sequence
  Synthetic
guacguucaggcaugauu

SEQ ID NO: 11094 - RNA, 21 nt, Artificial Sequence
  Synthetic
gcaguacguucaggcaugauu

SEQ ID NO: 11095 - RNA, 19 nt, Artificial Sequence
  Synthetic
gcaagaaccaugacugauu

SEQ ID NO: 11096 - RNA, 21 nt, Artificial Sequence
  Synthetic
guuuguaccugagaccugauu

SEQ ID NO: 11097 - RNA, 24 nt, Artificial Sequence
  Synthetic
gcuguuuguaccugagaccugauu

SEQ ID NO: 11098 - RNA, 24 nt, Artificial Sequence
  Synthetic
gccuacuuugaguaaucucugauu

SEQ ID NO: 11099 - RNA, 19 nt, Artificial Sequence
  Synthetic
guucuaagagucugugauu

SEQ ID NO: 11100 - RNA, 21 nt, Artificial Sequence
  Synthetic
guguucuaagagucugugauu

SEQ ID NO: 11101 - RNA, 24 nt, Artificial Sequence
  Synthetic
guuguguucuaagagucugugauu

SEQ ID NO: 11102 - RNA, 18 nt, Artificial Sequence
  Synthetic
guaaauuguucauugauu

SEQ ID NO: 11103 - RNA, 19 nt, Artificial Sequence
  Synthetic
gguaaauuguucauugauu

SEQ ID NO: 11104 - RNA, 20 nt, Artificial Sequence
  Synthetic
ggguaaauuguucauugauu

SEQ ID NO: 11105 - RNA, 21 nt, Artificial Sequence
  Synthetic
gggguaaauuguucauugauu

SEQ ID NO: 11106 - RNA, 22 nt, Artificial Sequence
  Synthetic
ggggguaaauuguucauugauu

SEQ ID NO: 11107 - RNA, 19 nt, Artificial Sequence
  Synthetic
gccugcuggaaucuugauu

SEQ ID NO: 11108 - RNA, 20 nt, Artificial Sequence
  Synthetic
ggccugcuggaaucuugauu

SEQ ID NO: 11109 - RNA, 21 nt, Artificial Sequence
  Synthetic
gggccugcuggaaucuugauu

SEQ ID NO: 11110 - RNA, 18 nt, Artificial Sequence
  Synthetic
gcugaccauauguugauu

SEQ ID NO: 11111 - RNA, 19 nt, Artificial Sequence
  Synthetic
ggcugaccauauguugauu

SEQ ID NO: 11112 - RNA, 21 nt, Artificial Sequence
  Synthetic
guggcugaccauauguugauu

SEQ ID NO: 11113 - RNA, 24 nt, Artificial Sequence
  Synthetic
gaaguggcugaccauauguugauu

SEQ ID NO: 11114 - RNA, 22 nt, Artificial Sequence
  Synthetic
gaaaagaggggaguguuugauu

SEQ ID NO: 11115 - RNA, 18 nt, Artificial Sequence
  Synthetic
guugacaaacaaaauauu

SEQ ID NO: 11116 - RNA, 19 nt, Artificial Sequence
  Synthetic
gguugacaaacaaaauauu

SEQ ID NO: 11117 - RNA, 20 nt, Artificial Sequence
  Synthetic
ggguugacaaacaaaauauu

SEQ ID NO: 11118 - RNA, 23 nt, Artificial Sequence
  Synthetic
gaaggguugacaaacaaaauauu

SEQ ID NO: 11119 - RNA, 21 nt, Artificial Sequence
  Synthetic
gcauggaugaauuaaaauauu

SEQ ID NO: 11120 - RNA, 24 nt, Artificial Sequence
  Synthetic
gaugcauggaugaauuaaaauauu

SEQ ID NO: 11121 - RNA, 22 nt, Artificial Sequence
  Synthetic
gcuaaagcaguugucaaauauu

SEQ ID NO: 11122 - RNA, 24 nt, Artificial Sequence
  Synthetic
gacaaaaagaaaauucagaauauu

SEQ ID NO: 11123 - RNA, 21 nt, Artificial Sequence
  Synthetic
gucuaggcuacugauaauauu

SEQ ID NO: 11124 - RNA, 19 nt, Artificial Sequence
  Synthetic
gauuucagucgcuaauauu

SEQ ID NO: 11125 - RNA, 20 nt, Artificial Sequence
  Synthetic
ggauuucagucgcuaauauu

SEQ ID NO: 11126 - RNA, 23 nt, Artificial Sequence
  Synthetic
gaaggauuucagucgcuaauauu

SEQ ID NO: 11127 - RNA, 21 nt, Artificial Sequence
  Synthetic
gaccuuuaacccgguaauauu

SEQ ID NO: 11128 - RNA, 19 nt, Artificial Sequence
  Synthetic
guguguaccaauuaauauu

SEQ ID NO: 11129 - RNA, 18 nt, Artificial Sequence
  Synthetic
guuuugugggcacauauu

SEQ ID NO: 11130 - RNA, 18 nt, Artificial Sequence
  Synthetic
guauugaaaugacauauu

SEQ ID NO: 11131 - RNA, 19 nt, Artificial Sequence
  Synthetic
gguauugaaaugacauauu

SEQ ID NO: 11132 - RNA, 21 nt, Artificial Sequence
  Synthetic
gagguauugaaaugacauauu

SEQ ID NO: 11133 - RNA, 23 nt, Artificial Sequence
  Synthetic
gucucauguguauuuagcauauu

SEQ ID NO: 11134 - RNA, 24 nt, Artificial Sequence
  Synthetic
ggucucauguguauuuagcauauu

SEQ ID NO: 11135 - RNA, 24 nt, Artificial Sequence
  Synthetic
gcauaucaaagggguaugcauauu

SEQ ID NO: 11136 - RNA, 21 nt, Artificial Sequence
  Synthetic
gcauauucugacuuucauauu

SEQ ID NO: 11137 - RNA, 18 nt, Artificial Sequence
  Synthetic
gccucaucaaaagauauu

SEQ ID NO: 11138 - RNA, 23 nt, Artificial Sequence
  Synthetic
guauaaaugcccaaaaggauauu

SEQ ID NO: 11139 - RNA, 21 nt, Artificial Sequence
  Synthetic
guaucauuuccugaugauauu

SEQ ID NO: 11140 - RNA, 18 nt, Artificial Sequence
  Synthetic
ggaaaauuaauauauauu

SEQ ID NO: 11141 - RNA, 19 nt, Artificial Sequence
  Synthetic
gggaaaauuaauauauauu

SEQ ID NO: 11142 - RNA, 20 nt, Artificial Sequence
  Synthetic
ggggaaaauuaauauauauu

SEQ ID NO: 11143 - RNA, 22 nt, Artificial Sequence
  Synthetic
guggggaaaauuaauauauauu

SEQ ID NO: 11144 - RNA, 24 nt, Artificial Sequence
  Synthetic
gaguggggaaaauuaauauauauu

SEQ ID NO: 11145 - RNA, 22 nt, Artificial Sequence
  Synthetic
guaaaauaaacaccuauauauu

SEQ ID NO: 11146 - RNA, 18 nt, Artificial Sequence
  Synthetic
guuggauucuacuauauu

SEQ ID NO: 11147 - RNA, 19 nt, Artificial Sequence
  Synthetic
gguuggauucuacuauauu

SEQ ID NO: 11148 - RNA, 21 nt, Artificial Sequence
  Synthetic
gugguuggauucuacuauauu

SEQ ID NO: 11149 - RNA, 23 nt, Artificial Sequence
  Synthetic
gagugguuggauucuacuauauu

SEQ ID NO: 11150 - RNA, 24 nt, Artificial Sequence
  Synthetic
ggagugguuggauucuacuauauu

SEQ ID NO: 11151 - RNA, 19 nt, Artificial Sequence
  Synthetic
gaaaagugaaaucuauauu

SEQ ID NO: 11152 - RNA, 18 nt, Artificial Sequence
  Synthetic
gacaaaagugaguauauu

SEQ ID NO: 11153 - RNA, 21 nt, Artificial Sequence
  Synthetic
gcagacaaaagugaguauauu

SEQ ID NO: 11154 - RNA, 19 nt, Artificial Sequence
  Synthetic
gccuggcacuguguauauu

SEQ ID NO: 11155 - RNA, 21 nt, Artificial Sequence
  Synthetic
gugccuggcacuguguauauu

SEQ ID NO: 11156 - RNA, 24 nt, Artificial Sequence
  Synthetic
gcuuuacauauaguaauuuauauu

SEQ ID NO: 11157 - RNA, 24 nt, Artificial Sequence
  Synthetic
gauaauaccuauuaucuuuauauu

SEQ ID NO: 11158 - RNA, 19 nt, Artificial Sequence
  Synthetic
guucuggauauccacuauu

SEQ ID NO: 11159 - RNA, 18 nt, Artificial Sequence
  Synthetic
guaaauggacagacuauu

SEQ ID NO: 11160 - RNA, 20 nt, Artificial Sequence
  Synthetic
gaguaaauggacagacuauu

SEQ ID NO: 11161 - RNA, 18 nt, Artificial Sequence
  Synthetic
gaacuaugugcuacuauu

SEQ ID NO: 11162 - RNA, 21 nt, Artificial Sequence
  Synthetic
gcugaacuaugugcuacuauu

SEQ ID NO: 11163 - RNA, 23 nt, Artificial Sequence
  Synthetic
gaucaaauguccuguguacuauu

SEQ ID NO: 11164 - RNA, 18 nt, Artificial Sequence
  Synthetic
gauaauuucuuuacuauu

SEQ ID NO: 11165 - RNA, 19 nt, Artificial Sequence
  Synthetic
ggauaauuucuuuacuauu

SEQ ID NO: 11166 - RNA, 18 nt, Artificial Sequence
  Synthetic
ggaucuucguuuccuauu

SEQ ID NO: 11167 - RNA, 24 nt, Artificial Sequence
  Synthetic
gcaaagaucuguacuuuagcuauu

SEQ ID NO: 11168 - RNA, 20 nt, Artificial Sequence
  Synthetic
gacuacuuaacaccgcuauu

SEQ ID NO: 11169 - RNA, 22 nt, Artificial Sequence
  Synthetic
guuacuucaauuuuuggcuauu

SEQ ID NO: 11170 - RNA, 22 nt, Artificial Sequence
  Synthetic
gucaaucgauuggcuugcuauu

SEQ ID NO: 11171 - RNA, 22 nt, Artificial Sequence
  Synthetic
guaaacuuauuccgcaaguauu

SEQ ID NO: 11172 - RNA, 24 nt, Artificial Sequence
  Synthetic
gaaauacuuucagucgcaaguauu

SEQ ID NO: 11173 - RNA, 23 nt, Artificial Sequence
  Synthetic
guuauauuuuuccgugaaguauu

SEQ ID NO: 11174 - RNA, 21 nt, Artificial Sequence
  Synthetic
gcuuuaaugauacuaaguauu

SEQ ID NO: 11175 - RNA, 22 nt, Artificial Sequence
  Synthetic
gagaugucauaaaagcaguauu

SEQ ID NO: 11176 - RNA, 24 nt, Artificial Sequence
  Synthetic
gugagaugucauaaaagcaguauu

SEQ ID NO: 11177 - RNA, 20 nt, Artificial Sequence
  Synthetic
gcagggagggcaggaguauu

SEQ ID NO: 11178 - RNA, 23 nt, Artificial Sequence
  Synthetic
gauuacuaguuuuacuuaguauu

SEQ ID NO: 11179 - RNA, 19 nt, Artificial Sequence
  Synthetic
gaaagagaguaaacguauu

SEQ ID NO: 11180 - RNA, 21 nt, Artificial Sequence
  Synthetic
gagaaagagaguaaacguauu

SEQ ID NO: 11181 - RNA, 24 nt, Artificial Sequence
  Synthetic
gcagagaaagagaguaaacguauu

SEQ ID NO: 11182 - RNA, 21 nt, Artificial Sequence
  Synthetic
gaucccacuuggaaagguauu

SEQ ID NO: 11183 - RNA, 24 nt, Artificial Sequence
  Synthetic
guugaucccacuuggaaagguauu

SEQ ID NO: 11184 - RNA, 18 nt, Artificial Sequence
  Synthetic
gauguuuuacuagguauu

SEQ ID NO: 11185 - RNA, 21 nt, Artificial Sequence
  Synthetic
gaaaaaagggguuuagguauu

SEQ ID NO: 11186 - RNA, 21 nt, Artificial Sequence
  Synthetic
gucaguuagagagcugguauu

SEQ ID NO: 11187 - RNA, 22 nt, Artificial Sequence
  Synthetic
ggucaguuagagagcugguauu

SEQ ID NO: 11188 - RNA, 23 nt, Artificial Sequence
  Synthetic
gggucaguuagagagcugguauu

SEQ ID NO: 11189 - RNA, 24 nt, Artificial Sequence
  Synthetic
ggggucaguuagagagcugguauu

SEQ ID NO: 11190 - RNA, 18 nt, Artificial Sequence
  Synthetic
gaaaugucauuugguauu

SEQ ID NO: 11191 - RNA, 21 nt, Artificial Sequence
  Synthetic
gcagaaaugucauuugguauu

SEQ ID NO: 11192 - RNA, 22 nt, Artificial Sequence
  Synthetic
guuucuaaaccaguacuguauu

SEQ ID NO: 11193 - RNA, 23 nt, Artificial Sequence
  Synthetic
gguuucuaaaccaguacuguauu

SEQ ID NO: 11194 - RNA, 24 nt, Artificial Sequence
  Synthetic
ggguuucuaaaccaguacuguauu

SEQ ID NO: 11195 - RNA, 24 nt, Artificial Sequence
  Synthetic
guauuuccauauacauguuguauu

SEQ ID NO: 11196 - RNA, 23 nt, Artificial Sequence
  Synthetic
gccuuuugaauaauuggauuauu

SEQ ID NO: 11197 - RNA, 18 nt, Artificial Sequence
  Synthetic
gagguaggcaguauuauu

SEQ ID NO: 11198 - RNA, 22 nt, Artificial Sequence
  Synthetic
gaaugagguaggcaguauuauu

SEQ ID NO: 11199 - RNA, 20 nt, Artificial Sequence
  Synthetic
gaugugucauagcgcuuauu

SEQ ID NO: 11200 - RNA, 22 nt, Artificial Sequence
  Synthetic
gagaugugucauagcgcuuauu

SEQ ID NO: 11201 - RNA, 21 nt, Artificial Sequence
  Synthetic
guuagauaugcacuucuuauu

SEQ ID NO: 11202 - RNA, 23 nt, Artificial Sequence
  Synthetic
gaguuagauaugcacuucuuauu

SEQ ID NO: 11203 - RNA, 24 nt, Artificial Sequence
  Synthetic
ggaguuagauaugcacuucuuauu

SEQ ID NO: 11204 - RNA, 18 nt, Artificial Sequence
  Synthetic
gauaaugucguucuuauu

SEQ ID NO: 11205 - RNA, 19 nt, Artificial Sequence
  Synthetic
ggauaaugucguucuuauu

SEQ ID NO: 11206 - RNA, 21 nt, Artificial Sequence
  Synthetic
gaggauaaugucguucuuauu

SEQ ID NO: 11207 - RNA, 23 nt, Artificial Sequence
  Synthetic
gagaggauaaugucguucuuauu

SEQ ID NO: 11208 - RNA, 23 nt, Artificial Sequence
  Synthetic
gaauaugcugaggaaaaguuauu

SEQ ID NO: 11209 - RNA, 24 nt, Artificial Sequence
  Synthetic
ggaauaugcugaggaaaaguuauu

SEQ ID NO: 11210 - RNA, 18 nt, Artificial Sequence
  Synthetic
guuuuucucuaaguuauu

SEQ ID NO: 11211 - RNA, 23 nt, Artificial Sequence
  Synthetic
guucuguuuuucucuaaguuauu

SEQ ID NO: 11212 - RNA, 18 nt, Artificial Sequence
  Synthetic
guuauagguagcguuauu

SEQ ID NO: 11213 - RNA, 21 nt, Artificial Sequence
  Synthetic
gcuaacccuaagccuguuauu

SEQ ID NO: 11214 - RNA, 23 nt, Artificial Sequence
  Synthetic
gagcuaacccuaagccuguuauu

SEQ ID NO: 11215 - RNA, 19 nt, Artificial Sequence
  Synthetic
gaagcuaauuccuguuauu

SEQ ID NO: 11216 - RNA, 21 nt, Artificial Sequence
  Synthetic
guaacucucaaacuuguuauu

SEQ ID NO: 11217 - RNA, 22 nt, Artificial Sequence
  Synthetic
gguaacucucaaacuuguuauu

SEQ ID NO: 11218 - RNA, 23 nt, Artificial Sequence
  Synthetic
ggguaacucucaaacuuguuauu

SEQ ID NO: 11219 - RNA, 21 nt, Artificial Sequence
  Synthetic
guaguuuuuagcaaauuuauu

SEQ ID NO: 11220 - RNA, 20 nt, Artificial Sequence
  Synthetic
gcauagcaucugaauuuauu

SEQ ID NO: 11221 - RNA, 22 nt, Artificial Sequence
  Synthetic
gagcauagcaucugaauuuauu

SEQ ID NO: 11222 - RNA, 20 nt, Artificial Sequence
  Synthetic
gcacuugggaucgauuuauu

SEQ ID NO: 11223 - RNA, 21 nt, Artificial Sequence
  Synthetic
ggcacuugggaucgauuuauu

SEQ ID NO: 11224 - RNA, 22 nt, Artificial Sequence
  Synthetic
guuuucagacacuaacuuuauu

SEQ ID NO: 11225 - RNA, 23 nt, Artificial Sequence
  Synthetic
gguuuucagacacuaacuuuauu

SEQ ID NO: 11226 - RNA, 23 nt, Artificial Sequence
  Synthetic
gauacauuaaaauaggcuuuauu

SEQ ID NO: 11227 - RNA, 24 nt, Artificial Sequence
  Synthetic
gaaaauuuaucuuugcuguuuauu

SEQ ID NO: 11228 - RNA, 22 nt, Artificial Sequence
  Synthetic
guucauacuggcuccuuuuauu

SEQ ID NO: 11229 - RNA, 23 nt, Artificial Sequence
  Synthetic
gccuuucagaguaaaguuuuauu

SEQ ID NO: 11230 - RNA, 21 nt, Artificial Sequence
  Synthetic
gaaauaaauucaaguuuuauu

SEQ ID NO: 11231 - RNA, 24 nt, Artificial Sequence
  Synthetic
guauccaacaguuucuguuuuauu

SEQ ID NO: 11232 - RNA, 23 nt, Artificial Sequence
  Synthetic
gcaucaaaaaauguuaaaaacuu

SEQ ID NO: 11233 - RNA, 24 nt, Artificial Sequence
  Synthetic
ggcaucaaaaaauguuaaaaacuu

SEQ ID NO: 11234 - RNA, 24 nt, Artificial Sequence
  Synthetic
guuuaaauuauucuuugaaaacuu

SEQ ID NO: 11235 - RNA, 19 nt, Artificial Sequence
  Synthetic
gaggaggcccaucaaacuu

SEQ ID NO: 11236 - RNA, 21 nt, Artificial Sequence
  Synthetic
gagaggaggcccaucaaacuu

SEQ ID NO: 11237 - RNA, 18 nt, Artificial Sequence
  Synthetic
guuucuuaaaugaaacuu

SEQ ID NO: 11238 - RNA, 21 nt, Artificial Sequence
  Synthetic
gauuuagaauuuucuaaacuu

SEQ ID NO: 11239 - RNA, 18 nt, Artificial Sequence
  Synthetic
ggcaagccaucacaacuu

SEQ ID NO: 11240 - RNA, 18 nt, Artificial Sequence
  Synthetic
ggaucauuuugccaacuu

SEQ ID NO: 11241 - RNA, 24 nt, Artificial Sequence
  Synthetic
gaauuuggaucauuuugccaacuu

SEQ ID NO: 11242 - RNA, 21 nt, Artificial Sequence
  Synthetic
gaauguauuguugggcaacuu

SEQ ID NO: 11243 - RNA, 18 nt, Artificial Sequence
  Synthetic
guucaaaccauggaacuu

SEQ ID NO: 11244 - RNA, 21 nt, Artificial Sequence
  Synthetic
gcaguucaaaccauggaacuu

SEQ ID NO: 11245 - RNA, 24 nt, Artificial Sequence
  Synthetic
gcagcaguucaaaccauggaacuu

SEQ ID NO: 11246 - RNA, 19 nt, Artificial Sequence
  Synthetic
gauuuuuauucaauaacuu

SEQ ID NO: 11247 - RNA, 22 nt, Artificial Sequence
  Synthetic
guugauuuuuauucaauaacuu

SEQ ID NO: 11248 - RNA, 18 nt, Artificial Sequence
  Synthetic
gaagccuugacauaacuu

SEQ ID NO: 11249 - RNA, 22 nt, Artificial Sequence
  Synthetic
gauugaagccuugacauaacuu

SEQ ID NO: 11250 - RNA, 24 nt, Artificial Sequence
  Synthetic
gugauugaagccuugacauaacuu

SEQ ID NO: 11251 - RNA, 18 nt, Artificial Sequence
  Synthetic
gggcuuguuaccuaacuu

SEQ ID NO: 11252 - RNA, 19 nt, Artificial Sequence
  Synthetic
gacucaaggaugguaacuu

SEQ ID NO: 11253 - RNA, 22 nt, Artificial Sequence
  Synthetic
guuaauuaaaguuauuuaacuu

SEQ ID NO: 11254 - RNA, 19 nt, Artificial Sequence
  Synthetic
gcaagagcguaaaacacuu

SEQ ID NO: 11255 - RNA, 22 nt, Artificial Sequence
  Synthetic
gcagcaagagcguaaaacacuu

SEQ ID NO: 11256 - RNA, 19 nt, Artificial Sequence
  Synthetic
gaacucuugcugaacacuu

SEQ ID NO: 11257 - RNA, 20 nt, Artificial Sequence
  Synthetic
gcauuugaggauauccacuu

SEQ ID NO: 11258 - RNA, 21 nt, Artificial Sequence
  Synthetic
gagguauuauuaauuccacuu

SEQ ID NO: 11259 - RNA, 24 nt, Artificial Sequence
  Synthetic
gaugagguauuauuaauuccacuu

SEQ ID NO: 11260 - RNA, 22 nt, Artificial Sequence
  Synthetic
gaaacuaaaaaauuaggcacuu

SEQ ID NO: 11261 - RNA, 19 nt, Artificial Sequence
  Synthetic
gaaaugaagcuuugcacuu

SEQ ID NO: 11262 - RNA, 24 nt, Artificial Sequence
  Synthetic
gauuuccugaacaucccaucacuu

SEQ ID NO: 11263 - RNA, 18 nt, Artificial Sequence
  Synthetic
gaaaggaguauaucacuu

SEQ ID NO: 11264 - RNA, 22 nt, Artificial Sequence
  Synthetic
gcuugaaaggaguauaucacuu

SEQ ID NO: 11265 - RNA, 24 nt, Artificial Sequence
  Synthetic
gcgcuugaaaggaguauaucacuu

SEQ ID NO: 11266 - RNA, 23 nt, Artificial Sequence
  Synthetic
guuaucugauaaauaagucacuu

SEQ ID NO: 11267 - RNA, 22 nt, Artificial Sequence
  Synthetic
guuaaugucauuaaauucacuu

SEQ ID NO: 11268 - RNA, 23 nt, Artificial Sequence
  Synthetic
gguuaaugucauuaaauucacuu

SEQ ID NO: 11269 - RNA, 18 nt, Artificial Sequence
  Synthetic
gccaucugagaaagacuu

SEQ ID NO: 11270 - RNA, 21 nt, Artificial Sequence
  Synthetic
guugccaucugagaaagacuu

SEQ ID NO: 11271 - RNA, 24 nt, Artificial Sequence
  Synthetic
gauguugccaucugagaaagacuu

SEQ ID NO: 11272 - RNA, 23 nt, Artificial Sequence
  Synthetic
guauucaagcauuuuacagacuu

SEQ ID NO: 11273 - RNA, 24 nt, Artificial Sequence
  Synthetic
gguauucaagcauuuuacagacuu

SEQ ID NO: 11274 - RNA, 20 nt, Artificial Sequence
  Synthetic
guuuccuuguugauagacuu

SEQ ID NO: 11275 - RNA, 18 nt, Artificial Sequence
  Synthetic
guggacagggcuagacuu

SEQ ID NO: 11276 - RNA, 23 nt, Artificial Sequence
  Synthetic
gacauguggacagggcuagacuu

SEQ ID NO: 11277 - RNA, 21 nt, Artificial Sequence
  Synthetic
gcaugccuagccaguagacuu

SEQ ID NO: 11278 - RNA, 22 nt, Artificial Sequence
  Synthetic
gucuucaauuuacauaggacuu

SEQ ID NO: 11279 - RNA, 23 nt, Artificial Sequence
  Synthetic
ggucuucaauuuacauaggacuu

SEQ ID NO: 11280 - RNA, 19 nt, Artificial Sequence
  Synthetic
gacccaaaguuucugacuu

SEQ ID NO: 11281 - RNA, 21 nt, Artificial Sequence
  Synthetic
gagacccaaaguuucugacuu

SEQ ID NO: 11282 - RNA, 21 nt, Artificial Sequence
  Synthetic
gcacauaaaauauauugacuu

SEQ ID NO: 11283 - RNA, 19 nt, Artificial Sequence
  Synthetic
guaucaauuuuaaauacuu

SEQ ID NO: 11284 - RNA, 21 nt, Artificial Sequence
  Synthetic
gaguaucaauuuuaaauacuu

SEQ ID NO: 11285 - RNA, 24 nt, Artificial Sequence
  Synthetic
gauucuaaaugaaggacaauacuu

SEQ ID NO: 11286 - RNA, 18 nt, Artificial Sequence
  Synthetic
gguauggagaugauacuu

SEQ ID NO: 11287 - RNA, 22 nt, Artificial Sequence
  Synthetic
gcuugguauggagaugauacuu

SEQ ID NO: 11288 - RNA, 22 nt, Artificial Sequence
  Synthetic
guguuuauuucauuuuauacuu

SEQ ID NO: 11289 - RNA, 19 nt, Artificial Sequence
  Synthetic
gaucuuuauuauccuacuu

SEQ ID NO: 11290 - RNA, 21 nt, Artificial Sequence
  Synthetic
gagaucuuuauuauccuacuu

SEQ ID NO: 11291 - RNA, 24 nt, Artificial Sequence
  Synthetic
guaaaacgcuuuuuacaucuacuu

SEQ ID NO: 11292 - RNA, 23 nt, Artificial Sequence
  Synthetic
gaaaccugaccuuaagauuacuu

SEQ ID NO: 11293 - RNA, 23 nt, Artificial Sequence
  Synthetic
gauccaguaaaugaugcuuacuu

SEQ ID NO: 11294 - RNA, 24 nt, Artificial Sequence
  Synthetic
ggauccaguaaaugaugcuuacuu

SEQ ID NO: 11295 - RNA, 21 nt, Artificial Sequence
  Synthetic
gaaugucuauuuuauuuacuu

SEQ ID NO: 11296 - RNA, 24 nt, Artificial Sequence
  Synthetic
guagaaugucuauuuuauuuacuu

SEQ ID NO: 11297 - RNA, 22 nt, Artificial Sequence
  Synthetic
gccauaaguuugugguuuacuu

SEQ ID NO: 11298 - RNA, 22 nt, Artificial Sequence
  Synthetic
gauucugcuucaggugaaccuu

SEQ ID NO: 11299 - RNA, 18 nt, Artificial Sequence
  Synthetic
gcuauuccauugaaccuu

SEQ ID NO: 11300 - RNA, 22 nt, Artificial Sequence
  Synthetic
gcaccacaaugaauauaaccuu

SEQ ID NO: 11301 - RNA, 23 nt, Artificial Sequence
  Synthetic
ggcaccacaaugaauauaaccuu

SEQ ID NO: 11302 - RNA, 19 nt, Artificial Sequence
  Synthetic
guuacuuacuaguaaccuu

SEQ ID NO: 11303 - RNA, 24 nt, Artificial Sequence
  Synthetic
guaucuuuuucagcuuuacaccuu

SEQ ID NO: 11304 - RNA, 18 nt, Artificial Sequence
  Synthetic
guucacccuguauaccuu

SEQ ID NO: 11305 - RNA, 22 nt, Artificial Sequence
  Synthetic
gcuuguucacccuguauaccuu

SEQ ID NO: 11306 - RNA, 18 nt, Artificial Sequence
  Synthetic
gugccacaguuauaccuu

SEQ ID NO: 11307 - RNA, 24 nt, Artificial Sequence
  Synthetic
gaauuagugccacaguuauaccuu

SEQ ID NO: 11308 - RNA, 20 nt, Artificial Sequence
  Synthetic
gcaacaccauuugcuaccuu

SEQ ID NO: 11309 - RNA, 22 nt, Artificial Sequence
  Synthetic
guuccguaaacucuuuuaccuu

SEQ ID NO: 11310 - RNA, 23 nt, Artificial Sequence
  Synthetic
gguuccguaaacucuuuuaccuu

SEQ ID NO: 11311 - RNA, 18 nt, Artificial Sequence
  Synthetic
gagcuucgaaugacccuu

SEQ ID NO: 11312 - RNA, 24 nt, Artificial Sequence
  Synthetic
gcuucagagcuucgaaugacccuu

SEQ ID NO: 11313 - RNA, 23 nt, Artificial Sequence
  Synthetic
guauccaaaaaagagcuccccuu

SEQ ID NO: 11314 - RNA, 20 nt, Artificial Sequence
  Synthetic
guucacaauuguaagcccuu

SEQ ID NO: 11315 - RNA, 18 nt, Artificial Sequence
  Synthetic
gaagguagaauagcccuu

SEQ ID NO: 11316 - RNA, 22 nt, Artificial Sequence
  Synthetic
gucugaagguagaauagcccuu

SEQ ID NO: 11317 - RNA, 18 nt, Artificial Sequence
  Synthetic
gcaccuucugcaucccuu

SEQ ID NO: 11318 - RNA, 19 nt, Artificial Sequence
  Synthetic
ggcaccuucugcaucccuu

SEQ ID NO: 11319 - RNA, 20 nt, Artificial Sequence
  Synthetic
gggcaccuucugcaucccuu

SEQ ID NO: 11320 - RNA, 21 nt, Artificial Sequence
  Synthetic
ggggcaccuucugcaucccuu

SEQ ID NO: 11321 - RNA, 24 nt, Artificial Sequence
  Synthetic
gaaggggcaccuucugcaucccuu

SEQ ID NO: 11322 - RNA, 19 nt, Artificial Sequence
  Synthetic
gcucugacugggcucccuu

SEQ ID NO: 11323 - RNA, 20 nt, Artificial Sequence
  Synthetic
gauccgucuuaaugucccuu

SEQ ID NO: 11324 - RNA, 24 nt, Artificial Sequence
  Synthetic
gauagauccgucuuaaugucccuu

SEQ ID NO: 11325 - RNA, 21 nt, Artificial Sequence
  Synthetic
guacuauaaucucauucccuu

SEQ ID NO: 11326 - RNA, 22 nt, Artificial Sequence
  Synthetic
gguacuauaaucucauucccuu

SEQ ID NO: 11327 - RNA, 19 nt, Artificial Sequence
  Synthetic
guugauacccuacagccuu

SEQ ID NO: 11328 - RNA, 18 nt, Artificial Sequence
  Synthetic
gaagaaauauccagccuu

SEQ ID NO: 11329 - RNA, 19 nt, Artificial Sequence
  Synthetic
ggaagaaauauccagccuu

SEQ ID NO: 11330 - RNA, 18 nt, Artificial Sequence
  Synthetic
gauugcuagguuagccuu

SEQ ID NO: 11331 - RNA, 18 nt, Artificial Sequence
  Synthetic
gggauauaagaaggccuu

SEQ ID NO: 11332 - RNA, 24 nt, Artificial Sequence
  Synthetic
guuuacacucauggaaaaugccuu

SEQ ID NO: 11333 - RNA, 19 nt, Artificial Sequence
  Synthetic
gacccguucccucugccuu

SEQ ID NO: 11334 - RNA, 20 nt, Artificial Sequence
  Synthetic
ggacccguucccucugccuu

SEQ ID NO: 11335 - RNA, 19 nt, Artificial Sequence
  Synthetic
gcaaguagccuugugccuu

SEQ ID NO: 11336 - RNA, 20 nt, Artificial Sequence
  Synthetic
ggcaaguagccuugugccuu

SEQ ID NO: 11337 - RNA, 19 nt, Artificial Sequence
  Synthetic
gacuagcuauuugugccuu

SEQ ID NO: 11338 - RNA, 24 nt, Artificial Sequence
  Synthetic
guaacgacuagcuauuugugccuu

SEQ ID NO: 11339 - RNA, 20 nt, Artificial Sequence
  Synthetic
gaaaacauacauuuugccuu

SEQ ID NO: 11340 - RNA, 19 nt, Artificial Sequence
  Synthetic
gucaccuagauuuugccuu

SEQ ID NO: 11341 - RNA, 21 nt, Artificial Sequence
  Synthetic
gugucaccuagauuuugccuu

SEQ ID NO: 11342 - RNA, 18 nt, Artificial Sequence
  Synthetic
gauugagacacuauccuu

SEQ ID NO: 11343 - RNA, 20 nt, Artificial Sequence
  Synthetic
gaaagucucuguuuauccuu

SEQ ID NO: 11344 - RNA, 22 nt, Artificial Sequence
  Synthetic
gaaaacuacuccuuuuauccuu

SEQ ID NO: 11345 - RNA, 23 nt, Artificial Sequence
  Synthetic
ggaaaacuacuccuuuuauccuu

SEQ ID NO: 11346 - RNA, 19 nt, Artificial Sequence
  Synthetic
gccauuucccaugcuccuu

SEQ ID NO: 11347 - RNA, 22 nt, Artificial Sequence
  Synthetic
gaagccauuucccaugcuccuu

SEQ ID NO: 11348 - RNA, 23 nt, Artificial Sequence
  Synthetic
ggaagccauuucccaugcuccuu

SEQ ID NO: 11349 - RNA, 24 nt, Artificial Sequence
  Synthetic
gggaagccauuucccaugcuccuu

SEQ ID NO: 11350 - RNA, 18 nt, Artificial Sequence
  Synthetic
gugagaagaaaaguccuu

SEQ ID NO: 11351 - RNA, 20 nt, Artificial Sequence
  Synthetic
gucauuuuuauuagguccuu

SEQ ID NO: 11352 - RNA, 19 nt, Artificial Sequence
  Synthetic
gugcaacccuuuuguccuu

SEQ ID NO: 11353 - RNA, 24 nt, Artificial Sequence
  Synthetic
gaacugugcaacccuuuuguccuu

SEQ ID NO: 11354 - RNA, 22 nt, Artificial Sequence
  Synthetic
gcaauugggaucauuuuuccuu

SEQ ID NO: 11355 - RNA, 18 nt, Artificial Sequence
  Synthetic
guauuguaaagaaagcuu

SEQ ID NO: 11356 - RNA, 19 nt, Artificial Sequence
  Synthetic
gguauuguaaagaaagcuu

SEQ ID NO: 11357 - RNA, 20 nt, Artificial Sequence
  Synthetic
ggguauuguaaagaaagcuu

SEQ ID NO: 11358 - RNA, 20 nt, Artificial Sequence
  Synthetic
guuaaacaaugguuaagcuu

SEQ ID NO: 11359 - RNA, 18 nt, Artificial Sequence
  Synthetic
guauggccaggacagcuu

SEQ ID NO: 11360 - RNA, 20 nt, Artificial Sequence
  Synthetic
gaguauggccaggacagcuu

SEQ ID NO: 11361 - RNA, 22 nt, Artificial Sequence
  Synthetic
gagaguauggccaggacagcuu

SEQ ID NO: 11362 - RNA, 22 nt, Artificial Sequence
  Synthetic
gauauauuacauuauucagcuu

SEQ ID NO: 11363 - RNA, 22 nt, Artificial Sequence
  Synthetic
gagguagaaaaagagagagcuu

SEQ ID NO: 11364 - RNA, 24 nt, Artificial Sequence
  Synthetic
gaucaauccaauuguuuggagcuu

SEQ ID NO: 11365 - RNA, 19 nt, Artificial Sequence
  Synthetic
gcagcauaugccauagcuu

SEQ ID NO: 11366 - RNA, 22 nt, Artificial Sequence
  Synthetic
gaugcagcauaugccauagcuu

SEQ ID NO: 11367 - RNA, 18 nt, Artificial Sequence
  Synthetic
gaguuacuuguauagcuu

SEQ ID NO: 11368 - RNA, 20 nt, Artificial Sequence
  Synthetic
gugaguuacuuguauagcuu

SEQ ID NO: 11369 - RNA, 19 nt, Artificial Sequence
  Synthetic
gcuauuaucucaguagcuu

SEQ ID NO: 11370 - RNA, 20 nt, Artificial Sequence
  Synthetic
ggcuauuaucucaguagcuu

SEQ ID NO: 11371 - RNA, 23 nt, Artificial Sequence
  Synthetic
gauggcuauuaucucaguagcuu

SEQ ID NO: 11372 - RNA, 22 nt, Artificial Sequence
  Synthetic
guauuucaaucuuugguagcuu

SEQ ID NO: 11373 - RNA, 24 nt, Artificial Sequence
  Synthetic
gaguauuucaaucuuugguagcuu

SEQ ID NO: 11374 - RNA, 18 nt, Artificial Sequence
  Synthetic
gagcuuccauagaggcuu

SEQ ID NO: 11375 - RNA, 20 nt, Artificial Sequence
  Synthetic
gagagcuuccauagaggcuu

SEQ ID NO: 11376 - RNA, 21 nt, Artificial Sequence
  Synthetic
ggagagcuuccauagaggcuu

SEQ ID NO: 11377 - RNA, 23 nt, Artificial Sequence
  Synthetic
guggagagcuuccauagaggcuu

SEQ ID NO: 11378 - RNA, 24 nt, Artificial Sequence
  Synthetic
gguggagagcuuccauagaggcuu

SEQ ID NO: 11379 - RNA, 20 nt, Artificial Sequence
  Synthetic
gaacaugcagugcuaggcuu

SEQ ID NO: 11380 - RNA, 22 nt, Artificial Sequence
  Synthetic
gagaacaugcagugcuaggcuu

SEQ ID NO: 11381 - RNA, 24 nt, Artificial Sequence
  Synthetic
gugagaacaugcagugcuaggcuu

SEQ ID NO: 11382 - RNA, 18 nt, Artificial Sequence
  Synthetic
guagaugugauugggcuu

SEQ ID NO: 11383 - RNA, 24 nt, Artificial Sequence
  Synthetic
guaauaguagaugugauugggcuu

SEQ ID NO: 11384 - RNA, 20 nt, Artificial Sequence
  Synthetic
gauaaucaacuuaauggcuu

SEQ ID NO: 11385 - RNA, 21 nt, Artificial Sequence
  Synthetic
ggauaaucaacuuaauggcuu

SEQ ID NO: 11386 - RNA, 24 nt, Artificial Sequence
  Synthetic
guaggauaaucaacuuaauggcuu

SEQ ID NO: 11387 - RNA, 22 nt, Artificial Sequence
  Synthetic
gaacaaagauuuuuaauggcuu

SEQ ID NO: 11388 - RNA, 24 nt, Artificial Sequence
  Synthetic
guuuuaaaaggaucacacuggcuu

SEQ ID NO: 11389 - RNA, 19 nt, Artificial Sequence
  Synthetic
gcaguauacagaguggcuu

SEQ ID NO: 11390 - RNA, 22 nt, Artificial Sequence
  Synthetic
gaugcaguauacagaguggcuu

SEQ ID NO: 11391 - RNA, 19 nt, Artificial Sequence
  Synthetic
guauuagcaaauguggcuu

SEQ ID NO: 11392 - RNA, 18 nt, Artificial Sequence
  Synthetic
gagugguauguguggcuu

SEQ ID NO: 11393 - RNA, 20 nt, Artificial Sequence
  Synthetic
gagagugguauguguggcuu

SEQ ID NO: 11394 - RNA, 21 nt, Artificial Sequence
  Synthetic
ggagagugguauguguggcuu

SEQ ID NO: 11395 - RNA, 22 nt, Artificial Sequence
  Synthetic
gacacaguuaagagcuuggcuu

SEQ ID NO: 11396 - RNA, 18 nt, Artificial Sequence
  Synthetic
gauguguacauuuggcuu

SEQ ID NO: 11397 - RNA, 19 nt, Artificial Sequence
  Synthetic
guaugccagggaaaugcuu

SEQ ID NO: 11398 - RNA, 24 nt, Artificial Sequence
  Synthetic
gaaauguaugccagggaaaugcuu

SEQ ID NO: 11399 - RNA, 18 nt, Artificial Sequence
  Synthetic
guccucuuuuaaaugcuu

SEQ ID NO: 11400 - RNA, 18 nt, Artificial Sequence
  Synthetic
gucaaacuagccaugcuu

SEQ ID NO: 11401 - RNA, 20 nt, Artificial Sequence
  Synthetic
gugucaaacuagccaugcuu

SEQ ID NO: 11402 - RNA, 22 nt, Artificial Sequence
  Synthetic
gagugucaaacuagccaugcuu

SEQ ID NO: 11403 - RNA, 21 nt, Artificial Sequence
  Synthetic
gaauaagucauguucaugcuu

SEQ ID NO: 11404 - RNA, 20 nt, Artificial Sequence
  Synthetic
guucaagggugaggaugcuu

SEQ ID NO: 11405 - RNA, 23 nt, Artificial Sequence
  Synthetic
gauguucaagggugaggaugcuu

SEQ ID NO: 11406 - RNA, 18 nt, Artificial Sequence
  Synthetic
gauccagaguugcugcuu

SEQ ID NO: 11407 - RNA, 19 nt, Artificial Sequence
  Synthetic
ggauccagaguugcugcuu

SEQ ID NO: 11408 - RNA, 21 nt, Artificial Sequence
  Synthetic
gcggauccagaguugcugcuu

SEQ ID NO: 11409 - RNA, 24 nt, Artificial Sequence
  Synthetic
gaacuuguauguaugaaucugcuu

SEQ ID NO: 11410 - RNA, 20 nt, Artificial Sequence
  Synthetic
gaaagagcacacuggugcuu

SEQ ID NO: 11411 - RNA, 24 nt, Artificial Sequence
  Synthetic
gaaagaaagagcacacuggugcuu

SEQ ID NO: 11412 - RNA, 24 nt, Artificial Sequence
  Synthetic
gaaauuaaccacaucucauugcuu

SEQ ID NO: 11413 - RNA, 21 nt, Artificial Sequence
  Synthetic
gauuauccauauucuuugcuu

SEQ ID NO: 11414 - RNA, 21 nt, Artificial Sequence
  Synthetic
ggcauuauuuuuuguuugcuu

SEQ ID NO: 11415 - RNA, 23 nt, Artificial Sequence
  Synthetic
gaggcauuauuuuuuguuugcuu

SEQ ID NO: 11416 - RNA, 21 nt, Artificial Sequence
  Synthetic
guuuuuuucucuuuuuugcuu

SEQ ID NO: 11417 - RNA, 23 nt, Artificial Sequence
  Synthetic
guguuuuuuucucuuuuuugcuu

SEQ ID NO: 11418 - RNA, 21 nt, Artificial Sequence
  Synthetic
gcuauccaguaacaaaaucuu

SEQ ID NO: 11419 - RNA, 24 nt, Artificial Sequence
  Synthetic
gccuuucuagucaugugcaaucuu

SEQ ID NO: 11420 - RNA, 18 nt, Artificial Sequence
  Synthetic
gcuccauuguucaaucuu

SEQ ID NO: 11421 - RNA, 18 nt, Artificial Sequence
  Synthetic
gaccuguaauggaaucuu

SEQ ID NO: 11422 - RNA, 21 nt, Artificial Sequence
  Synthetic
guugaccuguaauggaaucuu

SEQ ID NO: 11423 - RNA, 18 nt, Artificial Sequence
  Synthetic
gugcaaauuucucaucuu

SEQ ID NO: 11424 - RNA, 22 nt, Artificial Sequence
  Synthetic
gacaaccuugucagccuaucuu

SEQ ID NO: 11425 - RNA, 24 nt, Artificial Sequence
  Synthetic
gugacaaccuugucagccuaucuu

SEQ ID NO: 11426 - RNA, 18 nt, Artificial Sequence
  Synthetic
gucuuuggauaguaucuu

SEQ ID NO: 11427 - RNA, 20 nt, Artificial Sequence
  Synthetic
gaugaugcagcagguaucuu

SEQ ID NO: 11428 - RNA, 18 nt, Artificial Sequence
  Synthetic
ggcuuaaaacuguaucuu

SEQ ID NO: 11429 - RNA, 19 nt, Artificial Sequence
  Synthetic
gggcuuaaaacuguaucuu

SEQ ID NO: 11430 - RNA, 20 nt, Artificial Sequence
  Synthetic
ggggcuuaaaacuguaucuu

SEQ ID NO: 11431 - RNA, 24 nt, Artificial Sequence
  Synthetic
gauaggggcuuaaaacuguaucuu

SEQ ID NO: 11432 - RNA, 21 nt, Artificial Sequence
  Synthetic
gguuuuuaaauuaauuaucuu

SEQ ID NO: 11433 - RNA, 21 nt, Artificial Sequence
  Synthetic
gucuguauacauuguuaucuu

SEQ ID NO: 11434 - RNA, 23 nt, Artificial Sequence
  Synthetic
gugucuguauacauuguuaucuu

SEQ ID NO: 11435 - RNA, 19 nt, Artificial Sequence
  Synthetic
gugagaauguuuuuaucuu

SEQ ID NO: 11436 - RNA, 24 nt, Artificial Sequence
  Synthetic
gauuugugagaauguuuuuaucuu

SEQ ID NO: 11437 - RNA, 21 nt, Artificial Sequence
  Synthetic
gaaauaccugguacaacucuu

SEQ ID NO: 11438 - RNA, 23 nt, Artificial Sequence
  Synthetic
gugaaauaccugguacaacucuu

SEQ ID NO: 11439 - RNA, 22 nt, Artificial Sequence
  Synthetic
gcauuuccgcuuuagcacucuu

SEQ ID NO: 11440 - RNA, 23 nt, Artificial Sequence
  Synthetic
ggcauuuccgcuuuagcacucuu

SEQ ID NO: 11441 - RNA, 18 nt, Artificial Sequence
  Synthetic
gaauguguugagacucuu

SEQ ID NO: 11442 - RNA, 24 nt, Artificial Sequence
  Synthetic
gcucacgaauguguugagacucuu

SEQ ID NO: 11443 - RNA, 18 nt, Artificial Sequence
  Synthetic
gucuuucguuauacucuu

SEQ ID NO: 11444 - RNA, 24 nt, Artificial Sequence
  Synthetic
gacaaagucuuucguuauacucuu

SEQ ID NO: 11445 - RNA, 22 nt, Artificial Sequence
  Synthetic
gucauauauuuuauuuacucuu

SEQ ID NO: 11446 - RNA, 24 nt, Artificial Sequence
  Synthetic
gugucauauauuuuauuuacucuu

SEQ ID NO: 11447 - RNA, 20 nt, Artificial Sequence
  Synthetic
gacucuuaggcauaccucuu

SEQ ID NO: 11448 - RNA, 18 nt, Artificial Sequence
  Synthetic
guuggaauguuaccucuu

SEQ ID NO: 11449 - RNA, 21 nt, Artificial Sequence
  Synthetic
guaguuggaauguuaccucuu

SEQ ID NO: 11450 - RNA, 23 nt, Artificial Sequence
  Synthetic
guguaguuggaauguuaccucuu

SEQ ID NO: 11451 - RNA, 22 nt, Artificial Sequence
  Synthetic
gaaaaaacagucacacccucuu

SEQ ID NO: 11452 - RNA, 23 nt, Artificial Sequence
  Synthetic
ggaaaaaacagucacacccucuu

SEQ ID NO: 11453 - RNA, 24 nt, Artificial Sequence
  Synthetic
gggaaaaaacagucacacccucuu

SEQ ID NO: 11454 - RNA, 18 nt, Artificial Sequence
  Synthetic
gaugauauagagccucuu

SEQ ID NO: 11455 - RNA, 19 nt, Artificial Sequence
  Synthetic
ggaugauauagagccucuu

SEQ ID NO: 11456 - RNA, 21 nt, Artificial Sequence
  Synthetic
gaggaugauauagagccucuu

SEQ ID NO: 11457 - RNA, 22 nt, Artificial Sequence
  Synthetic
ggaggaugauauagagccucuu

SEQ ID NO: 11458 - RNA, 23 nt, Artificial Sequence
  Synthetic
gggaggaugauauagagccucuu

SEQ ID NO: 11459 - RNA, 20 nt, Artificial Sequence
  Synthetic
guuuuaggaaagcagcucuu

SEQ ID NO: 11460 - RNA, 20 nt, Artificial Sequence
  Synthetic
gaaugguacacagugcucuu

SEQ ID NO: 11461 - RNA, 22 nt, Artificial Sequence
  Synthetic
gagaaugguacacagugcucuu

SEQ ID NO: 11462 - RNA, 18 nt, Artificial Sequence
  Synthetic
gaagccucaacaucucuu

SEQ ID NO: 11463 - RNA, 22 nt, Artificial Sequence
  Synthetic
gauugaagccucaacaucucuu

SEQ ID NO: 11464 - RNA, 24 nt, Artificial Sequence
  Synthetic
gugauugaagccucaacaucucuu

SEQ ID NO: 11465 - RNA, 20 nt, Artificial Sequence
  Synthetic
gaaugggacacaacucucuu

SEQ ID NO: 11466 - RNA, 22 nt, Artificial Sequence
  Synthetic
gagaaugggacacaacucucuu

SEQ ID NO: 11467 - RNA, 20 nt, Artificial Sequence
  Synthetic
guaguuuuauuuugucucuu

SEQ ID NO: 11468 - RNA, 18 nt, Artificial Sequence
  Synthetic
ggcauuguugguucucuu

SEQ ID NO: 11469 - RNA, 21 nt, Artificial Sequence
  Synthetic
gaaggcauuguugguucucuu

SEQ ID NO: 11470 - RNA, 21 nt, Artificial Sequence
  Synthetic
guuuuuugccaauguucucuu

SEQ ID NO: 11471 - RNA, 22 nt, Artificial Sequence
  Synthetic
guacaacugcuucguuucucuu

SEQ ID NO: 11472 - RNA, 23 nt, Artificial Sequence
  Synthetic
gguacaacugcuucguuucucuu

SEQ ID NO: 11473 - RNA, 24 nt, Artificial Sequence
  Synthetic
ggguacaacugcuucguuucucuu

SEQ ID NO: 11474 - RNA, 18 nt, Artificial Sequence
  Synthetic
gggagaugggcaagucuu

SEQ ID NO: 11475 - RNA, 20 nt, Artificial Sequence
  Synthetic
gugggagaugggcaagucuu

SEQ ID NO: 11476 - RNA, 24 nt, Artificial Sequence
  Synthetic
guuugugggagaugggcaagucuu

SEQ ID NO: 11477 - RNA, 19 nt, Artificial Sequence
  Synthetic
gacuuaggaaaucagucuu

SEQ ID NO: 11478 - RNA, 22 nt, Artificial Sequence
  Synthetic
gaagacuuaggaaaucagucuu

SEQ ID NO: 11479 - RNA, 23 nt, Artificial Sequence
  Synthetic
ggaagacuuaggaaaucagucuu

SEQ ID NO: 11480 - RNA, 22 nt, Artificial Sequence
  Synthetic
gacuucacuuuuuuucagucuu

SEQ ID NO: 11481 - RNA, 23 nt, Artificial Sequence
  Synthetic
ggacuucacuuuuuuucagucuu

SEQ ID NO: 11482 - RNA, 22 nt, Artificial Sequence
  Synthetic
guacuucccaaccccuagucuu

SEQ ID NO: 11483 - RNA, 23 nt, Artificial Sequence
  Synthetic
gcaacuuaacaagaaaaugucuu

SEQ ID NO: 11484 - RNA, 22 nt, Artificial Sequence
  Synthetic
guuacuuuacugggaaugucuu

SEQ ID NO: 11485 - RNA, 19 nt, Artificial Sequence
  Synthetic
gauuguuaguugaugucuu

SEQ ID NO: 11486 - RNA, 20 nt, Artificial Sequence
  Synthetic
ggauuguuaguugaugucuu

SEQ ID NO: 11487 - RNA, 22 nt, Artificial Sequence
  Synthetic
guggauuguuaguugaugucuu

SEQ ID NO: 11488 - RNA, 18 nt, Artificial Sequence
  Synthetic
gaccaauuuuuaugucuu

SEQ ID NO: 11489 - RNA, 23 nt, Artificial Sequence
  Synthetic
gaaccugccugcuuugcugucuu

SEQ ID NO: 11490 - RNA, 19 nt, Artificial Sequence
  Synthetic
guauuccaauaucugucuu

SEQ ID NO: 11491 - RNA, 21 nt, Artificial Sequence
  Synthetic
guguauuccaauaucugucuu

SEQ ID NO: 11492 - RNA, 23 nt, Artificial Sequence
  Synthetic
gaguguauuccaauaucugucuu

SEQ ID NO: 11493 - RNA, 24 nt, Artificial Sequence
  Synthetic
ggaguguauuccaauaucugucuu

SEQ ID NO: 11494 - RNA, 18 nt, Artificial Sequence
  Synthetic
gcacaagaaacaauucuu

SEQ ID NO: 11495 - RNA, 20 nt, Artificial Sequence
  Synthetic
gugcacaagaaacaauucuu

SEQ ID NO: 11496 - RNA, 23 nt, Artificial Sequence
  Synthetic
gaaaauaauuuuuagcaauucuu

SEQ ID NO: 11497 - RNA, 18 nt, Artificial Sequence
  Synthetic
gaaaagguuggaauucuu

SEQ ID NO: 11498 - RNA, 24 nt, Artificial Sequence
  Synthetic
gcaaaugaaaagguuggaauucuu

SEQ ID NO: 11499 - RNA, 19 nt, Artificial Sequence
  Synthetic
gaaugaacuucuaauucuu

SEQ ID NO: 11500 - RNA, 24 nt, Artificial Sequence
  Synthetic
gauuacucauuuaacaacauucuu

SEQ ID NO: 11501 - RNA, 22 nt, Artificial Sequence
  Synthetic
guuuauucuuagugucauucuu

SEQ ID NO: 11502 - RNA, 24 nt, Artificial Sequence
  Synthetic
gaguuuauucuuagugucauucuu

SEQ ID NO: 11503 - RNA, 20 nt, Artificial Sequence
  Synthetic
guaucagacucaggauucuu

SEQ ID NO: 11504 - RNA, 19 nt, Artificial Sequence
  Synthetic
guaugcccucuggauucuu

SEQ ID NO: 11505 - RNA, 22 nt, Artificial Sequence
  Synthetic
gauguaugcccucuggauucuu

SEQ ID NO: 11506 - RNA, 18 nt, Artificial Sequence
  Synthetic
gaagggaaaaugauucuu

SEQ ID NO: 11507 - RNA, 21 nt, Artificial Sequence
  Synthetic
gucgaagggaaaaugauucuu

SEQ ID NO: 11508 - RNA, 23 nt, Artificial Sequence
  Synthetic
gaaaaugaggcuaguauauucuu

SEQ ID NO: 11509 - RNA, 24 nt, Artificial Sequence
  Synthetic
guuaauaauauuuuagguauucuu

SEQ ID NO: 11510 - RNA, 18 nt, Artificial Sequence
  Synthetic
gugucuccugaacuucuu

SEQ ID NO: 11511 - RNA, 19 nt, Artificial Sequence
  Synthetic
ggugucuccugaacuucuu

SEQ ID NO: 11512 - RNA, 24 nt, Artificial Sequence
  Synthetic
guacaggugucuccugaacuucuu

SEQ ID NO: 11513 - RNA, 19 nt, Artificial Sequence
  Synthetic
guaugauccauugcuucuu

SEQ ID NO: 11514 - RNA, 20 nt, Artificial Sequence
  Synthetic
gaaaacuugagccaguucuu

SEQ ID NO: 11515 - RNA, 23 nt, Artificial Sequence
  Synthetic
gcugaaaacuugagccaguucuu

SEQ ID NO: 11516 - RNA, 24 nt, Artificial Sequence
  Synthetic
ggcugaaaacuugagccaguucuu

SEQ ID NO: 11517 - RNA, 20 nt, Artificial Sequence
  Synthetic
gauuuauucugagaguucuu

SEQ ID NO: 11518 - RNA, 23 nt, Artificial Sequence
  Synthetic
gaugauuuauucugagaguucuu

SEQ ID NO: 11519 - RNA, 24 nt, Artificial Sequence
  Synthetic
gcacacuuaaagagcugauuucuu

SEQ ID NO: 11520 - RNA, 20 nt, Artificial Sequence
  Synthetic
gcaggcagcagaauuuucuu

SEQ ID NO: 11521 - RNA, 21 nt, Artificial Sequence
  Synthetic
gcauacgauacacauuuucuu

SEQ ID NO: 11522 - RNA, 24 nt, Artificial Sequence
  Synthetic
guagcauacgauacacauuuucuu

SEQ ID NO: 11523 - RNA, 19 nt, Artificial Sequence
  Synthetic
gaaaaaguagcauuuucuu

SEQ ID NO: 11524 - RNA, 24 nt, Artificial Sequence
  Synthetic
gucauucaaguccaauguuuucuu

SEQ ID NO: 11525 - RNA, 21 nt, Artificial Sequence
  Synthetic
gcuuaaauagcacuuuuucuu

SEQ ID NO: 11526 - RNA, 22 nt, Artificial Sequence
  Synthetic
ggcuuaaauagcacuuuuucuu

SEQ ID NO: 11527 - RNA, 19 nt, Artificial Sequence
  Synthetic
guaauugcaacuaaaaguu

SEQ ID NO: 11528 - RNA, 18 nt, Artificial Sequence
  Synthetic
guauuuuuaguaaaaguu

SEQ ID NO: 11529 - RNA, 20 nt, Artificial Sequence
  Synthetic
gaguauuuuuaguaaaaguu

SEQ ID NO: 11530 - RNA, 20 nt, Artificial Sequence
  Synthetic
guagcucaagauacaaaguu

SEQ ID NO: 11531 - RNA, 22 nt, Artificial Sequence
  Synthetic
gaguagcucaagauacaaaguu

SEQ ID NO: 11532 - RNA, 23 nt, Artificial Sequence
  Synthetic
ggaguagcucaagauacaaaguu

SEQ ID NO: 11533 - RNA, 24 nt, Artificial Sequence
  Synthetic
gggaguagcucaagauacaaaguu

SEQ ID NO: 11534 - RNA, 18 nt, Artificial Sequence
  Synthetic
guuaauuauuacaaaguu

SEQ ID NO: 11535 - RNA, 19 nt, Artificial Sequence
  Synthetic
gguuaauuauuacaaaguu

SEQ ID NO: 11536 - RNA, 20 nt, Artificial Sequence
  Synthetic
ggguuaauuauuacaaaguu

SEQ ID NO: 11537 - RNA, 24 nt, Artificial Sequence
  Synthetic
guaaaauaaauauauuaccaaguu

SEQ ID NO: 11538 - RNA, 20 nt, Artificial Sequence
  Synthetic
gccaggcauauggccaaguu

SEQ ID NO: 11539 - RNA, 19 nt, Artificial Sequence
  Synthetic
gaguuagacaggucaaguu

SEQ ID NO: 11540 - RNA, 20 nt, Artificial Sequence
  Synthetic
ggaguuagacaggucaaguu

SEQ ID NO: 11541 - RNA, 23 nt, Artificial Sequence
  Synthetic
gcaggaguuagacaggucaaguu

SEQ ID NO: 11542 - RNA, 19 nt, Artificial Sequence
  Synthetic
guaauuacccauagaaguu

SEQ ID NO: 11543 - RNA, 24 nt, Artificial Sequence
  Synthetic
gcauaguaauuacccauagaaguu

SEQ ID NO: 11544 - RNA, 21 nt, Artificial Sequence
  Synthetic
gccuugauuauaaaugaaguu

SEQ ID NO: 11545 - RNA, 22 nt, Artificial Sequence
  Synthetic
ggccuugauuauaaaugaaguu

SEQ ID NO: 11546 - RNA, 23 nt, Artificial Sequence
  Synthetic
gggccuugauuauaaaugaaguu

SEQ ID NO: 11547 - RNA, 20 nt, Artificial Sequence
  Synthetic
gauuccauauggcugaaguu

SEQ ID NO: 11548 - RNA, 22 nt, Artificial Sequence
  Synthetic
gugauuccauauggcugaaguu

SEQ ID NO: 11549 - RNA, 24 nt, Artificial Sequence
  Synthetic
gcacuccuuauaaguaaguaaguu

SEQ ID NO: 11550 - RNA, 18 nt, Artificial Sequence
  Synthetic
gacaugaaagcguaaguu

SEQ ID NO: 11551 - RNA, 19 nt, Artificial Sequence
  Synthetic
ggacaugaaagcguaaguu

SEQ ID NO: 11552 - RNA, 18 nt, Artificial Sequence
  Synthetic
gagaacucuuuguaaguu

SEQ ID NO: 11553 - RNA, 22 nt, Artificial Sequence
  Synthetic
guuagagaacucuuuguaaguu

SEQ ID NO: 11554 - RNA, 23 nt, Artificial Sequence
  Synthetic
gguuagagaacucuuuguaaguu

SEQ ID NO: 11555 - RNA, 18 nt, Artificial Sequence
  Synthetic
ggguguccccauuaaguu

SEQ ID NO: 11556 - RNA, 18 nt, Artificial Sequence
  Synthetic
guaaaggauuauuaaguu

SEQ ID NO: 11557 - RNA, 24 nt, Artificial Sequence
  Synthetic
gaauuaguaaaggauuauuaaguu

SEQ ID NO: 11558 - RNA, 23 nt, Artificial Sequence
  Synthetic
guuuuaauaaagggaaaacaguu

SEQ ID NO: 11559 - RNA, 19 nt, Artificial Sequence
  Synthetic
gugggugacaucaacaguu

SEQ ID NO: 11560 - RNA, 22 nt, Artificial Sequence
  Synthetic
gaugugggugacaucaacaguu

SEQ ID NO: 11561 - RNA, 24 nt, Artificial Sequence
  Synthetic
gugaugugggugacaucaacaguu

SEQ ID NO: 11562 - RNA, 19 nt, Artificial Sequence
  Synthetic
gauuaaugaucuaacaguu

SEQ ID NO: 11563 - RNA, 20 nt, Artificial Sequence
  Synthetic
ggauuaaugaucuaacaguu

SEQ ID NO: 11564 - RNA, 24 nt, Artificial Sequence
  Synthetic
gcuaggauuaaugaucuaacaguu

SEQ ID NO: 11565 - RNA, 21 nt, Artificial Sequence
  Synthetic
gcuaagaucccgggaccaguu

SEQ ID NO: 11566 - RNA, 21 nt, Artificial Sequence
  Synthetic
gucuauaucgugaccccaguu

SEQ ID NO: 11567 - RNA, 23 nt, Artificial Sequence
  Synthetic
gagucuauaucgugaccccaguu

SEQ ID NO: 11568 - RNA, 21 nt, Artificial Sequence
  Synthetic
gcauaaauggguuaagcaguu

SEQ ID NO: 11569 - RNA, 22 nt, Artificial Sequence
  Synthetic
ggcauaaauggguuaagcaguu

SEQ ID NO: 11570 - RNA, 24 nt, Artificial Sequence
  Synthetic
gauucauuacugucccucgcaguu

SEQ ID NO: 11571 - RNA, 21 nt, Artificial Sequence
  Synthetic
guauauuuaggcaaggcaguu

SEQ ID NO: 11572 - RNA, 18 nt, Artificial Sequence
  Synthetic
ggauuaggaaaugcaguu

SEQ ID NO: 11573 - RNA, 21 nt, Artificial Sequence
  Synthetic
gaaggauuaggaaaugcaguu

SEQ ID NO: 11574 - RNA, 23 nt, Artificial Sequence
  Synthetic
gagaaggauuaggaaaugcaguu

SEQ ID NO: 11575 - RNA, 18 nt, Artificial Sequence
  Synthetic
gauacugcaaaaucaguu

SEQ ID NO: 11576 - RNA, 19 nt, Artificial Sequence
  Synthetic
gaguaccugaguuucaguu

SEQ ID NO: 11577 - RNA, 21 nt, Artificial Sequence
  Synthetic
gcaucacguauuaccagaguu

SEQ ID NO: 11578 - RNA, 18 nt, Artificial Sequence
  Synthetic
gauggugaugcuagaguu

SEQ ID NO: 11579 - RNA, 20 nt, Artificial Sequence
  Synthetic
gagauggugaugcuagaguu

SEQ ID NO: 11580 - RNA, 21 nt, Artificial Sequence
  Synthetic
ggagauggugaugcuagaguu

SEQ ID NO: 11581 - RNA, 22 nt, Artificial Sequence
  Synthetic
gggagauggugaugcuagaguu

SEQ ID NO: 11582 - RNA, 23 nt, Artificial Sequence
  Synthetic
ggggagauggugaugcuagaguu

SEQ ID NO: 11583 - RNA, 18 nt, Artificial Sequence
  Synthetic
gguagaaaagagggaguu

SEQ ID NO: 11584 - RNA, 21 nt, Artificial Sequence
  Synthetic
gaagguagaaaagagggaguu

SEQ ID NO: 11585 - RNA, 24 nt, Artificial Sequence
  Synthetic
gaaagagaugaggauaugggaguu

SEQ ID NO: 11586 - RNA, 22 nt, Artificial Sequence
  Synthetic
gaaaugaagucugaauugaguu

SEQ ID NO: 11587 - RNA, 19 nt, Artificial Sequence
  Synthetic
guccauggaaauuugaguu

SEQ ID NO: 11588 - RNA, 21 nt, Artificial Sequence
  Synthetic
guguccauggaaauuugaguu

SEQ ID NO: 11589 - RNA, 23 nt, Artificial Sequence
  Synthetic
guuuuacaggcaacucaauaguu

SEQ ID NO: 11590 - RNA, 24 nt, Artificial Sequence
  Synthetic
gguuuuacaggcaacucaauaguu

SEQ ID NO: 11591 - RNA, 18 nt, Artificial Sequence
  Synthetic
gcauauaacauaauaguu

SEQ ID NO: 11592 - RNA, 21 nt, Artificial Sequence
  Synthetic
gaagcauauaacauaauaguu

SEQ ID NO: 11593 - RNA, 22 nt, Artificial Sequence
  Synthetic
ggaagcauauaacauaauaguu

SEQ ID NO: 11594 - RNA, 23 nt, Artificial Sequence
  Synthetic
gggaagcauauaacauaauaguu

SEQ ID NO: 11595 - RNA, 24 nt, Artificial Sequence
  Synthetic
ggggaagcauauaacauaauaguu

SEQ ID NO: 11596 - RNA, 21 nt, Artificial Sequence
  Synthetic
gauaaagaauggagcauaguu

SEQ ID NO: 11597 - RNA, 22 nt, Artificial Sequence
  Synthetic
gauuacuuaauuaucaguaguu

SEQ ID NO: 11598 - RNA, 22 nt, Artificial Sequence
  Synthetic
gauaugagugaacaagguaguu

SEQ ID NO: 11599 - RNA, 23 nt, Artificial Sequence
  Synthetic
ggauaugagugaacaagguaguu

SEQ ID NO: 11600 - RNA, 24 nt, Artificial Sequence
  Synthetic
gggauaugagugaacaagguaguu

SEQ ID NO: 11601 - RNA, 22 nt, Artificial Sequence
  Synthetic
guucagcaccacagguguaguu

SEQ ID NO: 11602 - RNA, 24 nt, Artificial Sequence
  Synthetic
gaguucagcaccacagguguaguu

SEQ ID NO: 11603 - RNA, 21 nt, Artificial Sequence
  Synthetic
gcuaaaucuaggccauuaguu

SEQ ID NO: 11604 - RNA, 18 nt, Artificial Sequence
  Synthetic
gagggauauccauuaguu

SEQ ID NO: 11605 - RNA, 21 nt, Artificial Sequence
  Synthetic
gaaacaucaaugauauuaguu

SEQ ID NO: 11606 - RNA, 24 nt, Artificial Sequence
  Synthetic
gcccuucacugggacccuaacguu

SEQ ID NO: 11607 - RNA, 19 nt, Artificial Sequence
  Synthetic
gaaaauagaauuucccguu

SEQ ID NO: 11608 - RNA, 21 nt, Artificial Sequence
  Synthetic
gagaaaauagaauuucccguu

SEQ ID NO: 11609 - RNA, 23 nt, Artificial Sequence
  Synthetic
gagagaaaauagaauuucccguu

SEQ ID NO: 11610 - RNA, 18 nt, Artificial Sequence
  Synthetic
gcgcccagccaaagcguu

SEQ ID NO: 11611 - RNA, 24 nt, Artificial Sequence
  Synthetic
gccaccgcgcccagccaaagcguu

SEQ ID NO: 11612 - RNA, 22 nt, Artificial Sequence
  Synthetic
gauccaacuucacuaaagcguu

SEQ ID NO: 11613 - RNA, 23 nt, Artificial Sequence
  Synthetic
ggauccaacuucacuaaagcguu

SEQ ID NO: 11614 - RNA, 19 nt, Artificial Sequence
  Synthetic
gacuggucaguggagcguu

SEQ ID NO: 11615 - RNA, 22 nt, Artificial Sequence
  Synthetic
gaugacuggucaguggagcguu

SEQ ID NO: 11616 - RNA, 23 nt, Artificial Sequence
  Synthetic
ggaugacuggucaguggagcguu

SEQ ID NO: 11617 - RNA, 24 nt, Artificial Sequence
  Synthetic
gggaugacuggucaguggagcguu

SEQ ID NO: 11618 - RNA, 19 nt, Artificial Sequence
  Synthetic
gcuucuaacaguuggcguu

SEQ ID NO: 11619 - RNA, 24 nt, Artificial Sequence
  Synthetic
gaaauauuagauaauucauucguu

SEQ ID NO: 11620 - RNA, 21 nt, Artificial Sequence
  Synthetic
gucuauagaccauucaagguu

SEQ ID NO: 11621 - RNA, 22 nt, Artificial Sequence
  Synthetic
ggucuauagaccauucaagguu

SEQ ID NO: 11622 - RNA, 21 nt, Artificial Sequence
  Synthetic
gcccaaugguaagaacagguu

SEQ ID NO: 11623 - RNA, 18 nt, Artificial Sequence
  Synthetic
gaauaaaaauugcagguu

SEQ ID NO: 11624 - RNA, 20 nt, Artificial Sequence
  Synthetic
gagaauaaaaauugcagguu

SEQ ID NO: 11625 - RNA, 21 nt, Artificial Sequence
  Synthetic
ggagaauaaaaauugcagguu

SEQ ID NO: 11626 - RNA, 18 nt, Artificial Sequence
  Synthetic
gguagagagggagagguu

SEQ ID NO: 11627 - RNA, 21 nt, Artificial Sequence
  Synthetic
gaugguagagagggagagguu

SEQ ID NO: 11628 - RNA, 24 nt, Artificial Sequence
  Synthetic
gaagaugguagagagggagagguu

SEQ ID NO: 11629 - RNA, 19 nt, Artificial Sequence
  Synthetic
gaagagcugaugagagguu

SEQ ID NO: 11630 - RNA, 24 nt, Artificial Sequence
  Synthetic
gaacugaagagcugaugagagguu

SEQ ID NO: 11631 - RNA, 18 nt, Artificial Sequence
  Synthetic
ggaaauaagaaugagguu

SEQ ID NO: 11632 - RNA, 20 nt, Artificial Sequence
  Synthetic
guggaaauaagaaugagguu

SEQ ID NO: 11633 - RNA, 24 nt, Artificial Sequence
  Synthetic
gcauguggaaauaagaaugagguu

SEQ ID NO: 11634 - RNA, 19 nt, Artificial Sequence
  Synthetic
gacuuaccaucgugagguu

SEQ ID NO: 11635 - RNA, 18 nt, Artificial Sequence
  Synthetic
gguuuaaaaaauuagguu

SEQ ID NO: 11636 - RNA, 23 nt, Artificial Sequence
  Synthetic
guuuugguuuaaaaaauuagguu

SEQ ID NO: 11637 - RNA, 24 nt, Artificial Sequence
  Synthetic
gguuuugguuuaaaaaauuagguu

SEQ ID NO: 11638 - RNA, 18 nt, Artificial Sequence
  Synthetic
gaaugagcaugagggguu

SEQ ID NO: 11639 - RNA, 23 nt, Artificial Sequence
  Synthetic
guauccaugaguuuauugggguu

SEQ ID NO: 11640 - RNA, 19 nt, Artificial Sequence
  Synthetic
gaagcacugaguugggguu

SEQ ID NO: 11641 - RNA, 22 nt, Artificial Sequence
  Synthetic
gcugaagcacugaguugggguu

SEQ ID NO: 11642 - RNA, 23 nt, Artificial Sequence
  Synthetic
ggcugaagcacugaguugggguu

SEQ ID NO: 11643 - RNA, 18 nt, Artificial Sequence
  Synthetic
gugaccuauaccuggguu

SEQ ID NO: 11644 - RNA, 23 nt, Artificial Sequence
  Synthetic
gaccugugaccuauaccuggguu

SEQ ID NO: 11645 - RNA, 24 nt, Artificial Sequence
  Synthetic
ggaccugugaccuauaccuggguu

SEQ ID NO: 11646 - RNA, 18 nt, Artificial Sequence
  Synthetic
gauguagcaucuaugguu

SEQ ID NO: 11647 - RNA, 23 nt, Artificial Sequence
  Synthetic
gaauacuauacugaaguaugguu

SEQ ID NO: 11648 - RNA, 18 nt, Artificial Sequence
  Synthetic
ggagggucaaaucugguu

SEQ ID NO: 11649 - RNA, 22 nt, Artificial Sequence
  Synthetic
gucuggagggucaaaucugguu

SEQ ID NO: 11650 - RNA, 18 nt, Artificial Sequence
  Synthetic
ggaguuguugcagugguu

SEQ ID NO: 11651 - RNA, 20 nt, Artificial Sequence
  Synthetic
guggaguuguugcagugguu

SEQ ID NO: 11652 - RNA, 22 nt, Artificial Sequence
  Synthetic
gcuaauauacaacauugugguu

SEQ ID NO: 11653 - RNA, 23 nt, Artificial Sequence
  Synthetic
ggcuaauauacaacauugugguu

SEQ ID NO: 11654 - RNA, 19 nt, Artificial Sequence
  Synthetic
guugaaaaguaacuugguu

SEQ ID NO: 11655 - RNA, 24 nt, Artificial Sequence
  Synthetic
gaccaguugaaaaguaacuugguu

SEQ ID NO: 11656 - RNA, 20 nt, Artificial Sequence
  Synthetic
guuuugucugcaccuugguu

SEQ ID NO: 11657 - RNA, 21 nt, Artificial Sequence
  Synthetic
gguuuugucugcaccuugguu

SEQ ID NO: 11658 - RNA, 21 nt, Artificial Sequence
  Synthetic
gacuuuuaaagauauuugguu

SEQ ID NO: 11659 - RNA, 21 nt, Artificial Sequence
  Synthetic
gacaggaugaccacuuugguu

SEQ ID NO: 11660 - RNA, 23 nt, Artificial Sequence
  Synthetic
gugacaggaugaccacuuugguu

SEQ ID NO: 11661 - RNA, 21 nt, Artificial Sequence
  Synthetic
gcaagacuuuuuuaaaauguu

SEQ ID NO: 11662 - RNA, 24 nt, Artificial Sequence
  Synthetic
guugcaagacuuuuuuaaaauguu

SEQ ID NO: 11663 - RNA, 21 nt, Artificial Sequence
  Synthetic
gaucuucaccacugaaauguu

SEQ ID NO: 11664 - RNA, 20 nt, Artificial Sequence
  Synthetic
gauacagaagcaagaauguu

SEQ ID NO: 11665 - RNA, 21 nt, Artificial Sequence
  Synthetic
ggauacagaagcaagaauguu

SEQ ID NO: 11666 - RNA, 22 nt, Artificial Sequence
  Synthetic
gggauacagaagcaagaauguu

SEQ ID NO: 11667 - RNA, 23 nt, Artificial Sequence
  Synthetic
ggggauacagaagcaagaauguu

SEQ ID NO: 11668 - RNA, 20 nt, Artificial Sequence
  Synthetic
gccuguuaauauugaauguu

SEQ ID NO: 11669 - RNA, 23 nt, Artificial Sequence
  Synthetic
gaauucaauuuuauaaacauguu

SEQ ID NO: 11670 - RNA, 18 nt, Artificial Sequence
  Synthetic
gcaauuuuauaccauguu

SEQ ID NO: 11671 - RNA, 22 nt, Artificial Sequence
  Synthetic
gcccagacccggcauccauguu

SEQ ID NO: 11672 - RNA, 23 nt, Artificial Sequence
  Synthetic
ggcccagacccggcauccauguu

SEQ ID NO: 11673 - RNA, 18 nt, Artificial Sequence
  Synthetic
gccacuacuguagauguu

SEQ ID NO: 11674 - RNA, 22 nt, Artificial Sequence
  Synthetic
gucagccacuacuguagauguu

SEQ ID NO: 11675 - RNA, 21 nt, Artificial Sequence
  Synthetic
gcauuuucauuuuuggauguu

SEQ ID NO: 11676 - RNA, 22 nt, Artificial Sequence
  Synthetic
ggcauuuucauuuuuggauguu

SEQ ID NO: 11677 - RNA, 21 nt, Artificial Sequence
  Synthetic
gaucaguuuaauaaugauguu

SEQ ID NO: 11678 - RNA, 18 nt, Artificial Sequence
  Synthetic
gaggaaaagaucuauguu

SEQ ID NO: 11679 - RNA, 22 nt, Artificial Sequence
  Synthetic
guuugaggaaaagaucuauguu

SEQ ID NO: 11680 - RNA, 23 nt, Artificial Sequence
  Synthetic
gguuugaggaaaagaucuauguu

SEQ ID NO: 11681 - RNA, 19 nt, Artificial Sequence
  Synthetic
guuauauagcaaguauguu

SEQ ID NO: 11682 - RNA, 21 nt, Artificial Sequence
  Synthetic
guguuauauagcaaguauguu

SEQ ID NO: 11683 - RNA, 24 nt, Artificial Sequence
  Synthetic
gcccuuaaggcuucccauuauguu

SEQ ID NO: 11684 - RNA, 18 nt, Artificial Sequence
  Synthetic
gucuagaaaccuccuguu

SEQ ID NO: 11685 - RNA, 22 nt, Artificial Sequence
  Synthetic
guaugucuagaaaccuccuguu

SEQ ID NO: 11686 - RNA, 18 nt, Artificial Sequence
  Synthetic
gguccuucggguccuguu

SEQ ID NO: 11687 - RNA, 19 nt, Artificial Sequence
  Synthetic
ggguccuucggguccuguu

SEQ ID NO: 11688 - RNA, 21 nt, Artificial Sequence
  Synthetic
gaggguccuucggguccuguu

SEQ ID NO: 11689 - RNA, 22 nt, Artificial Sequence
  Synthetic
ggaggguccuucggguccuguu

SEQ ID NO: 11690 - RNA, 23 nt, Artificial Sequence
  Synthetic
gcauuaucaagccagcugcuguu

SEQ ID NO: 11691 - RNA, 24 nt, Artificial Sequence
  Synthetic
gccaaaauugacuugucaucuguu

SEQ ID NO: 11692 - RNA, 18 nt, Artificial Sequence
  Synthetic
ggggugucauuaucuguu

SEQ ID NO: 11693 - RNA, 18 nt, Artificial Sequence
  Synthetic
ggaaauuucuucucuguu

SEQ ID NO: 11694 - RNA, 19 nt, Artificial Sequence
  Synthetic
gggaaauuucuucucuguu

SEQ ID NO: 11695 - RNA, 23 nt, Artificial Sequence
  Synthetic
gaaaacaaguaauauagucuguu

SEQ ID NO: 11696 - RNA, 22 nt, Artificial Sequence
  Synthetic
gcaagucuuuuuauuuucuguu

SEQ ID NO: 11697 - RNA, 22 nt, Artificial Sequence
  Synthetic
gaaaugauauaugccaaguguu

SEQ ID NO: 11698 - RNA, 19 nt, Artificial Sequence
  Synthetic
gugggaguuuacgaguguu

SEQ ID NO: 11699 - RNA, 20 nt, Artificial Sequence
  Synthetic
ggugggaguuuacgaguguu

SEQ ID NO: 11700 - RNA, 23 nt, Artificial Sequence
  Synthetic
guuggugggaguuuacgaguguu

SEQ ID NO: 11701 - RNA, 21 nt, Artificial Sequence
  Synthetic
gcaaaauuucuugugcguguu

SEQ ID NO: 11702 - RNA, 18 nt, Artificial Sequence
  Synthetic
gaaggaaaauaggguguu

SEQ ID NO: 11703 - RNA, 23 nt, Artificial Sequence
  Synthetic
guucagaaggaaaauaggguguu

SEQ ID NO: 11704 - RNA, 24 nt, Artificial Sequence
  Synthetic
gguucagaaggaaaauaggguguu

SEQ ID NO: 11705 - RNA, 24 nt, Artificial Sequence
  Synthetic
gaaaaucaauaaugguaauguguu

SEQ ID NO: 11706 - RNA, 22 nt, Artificial Sequence
  Synthetic
guacuaggaucccugauguguu

SEQ ID NO: 11707 - RNA, 18 nt, Artificial Sequence
  Synthetic
gacaggguagacuguguu

SEQ ID NO: 11708 - RNA, 21 nt, Artificial Sequence
  Synthetic
gcugacaggguagacuguguu

SEQ ID NO: 11709 - RNA, 23 nt, Artificial Sequence
  Synthetic
gauacaggaaaguugccuguguu

SEQ ID NO: 11710 - RNA, 20 nt, Artificial Sequence
  Synthetic
gucaccuuagaagaauuguu

SEQ ID NO: 11711 - RNA, 24 nt, Artificial Sequence
  Synthetic
gaaagucaccuuagaagaauuguu

SEQ ID NO: 11712 - RNA, 19 nt, Artificial Sequence
  Synthetic
gaaagaugcuauaauuguu

SEQ ID NO: 11713 - RNA, 24 nt, Artificial Sequence
  Synthetic
guuuuguuuuuaugcuuuauuguu

SEQ ID NO: 11714 - RNA, 19 nt, Artificial Sequence
  Synthetic
gagaggaaaauggcuuguu

SEQ ID NO: 11715 - RNA, 20 nt, Artificial Sequence
  Synthetic
gaacccgaaaccugcuuguu

SEQ ID NO: 11716 - RNA, 22 nt, Artificial Sequence
  Synthetic
gagaacccgaaaccugcuuguu

SEQ ID NO: 11717 - RNA, 23 nt, Artificial Sequence
  Synthetic
guuauuaguuuugguugcuuguu

SEQ ID NO: 11718 - RNA, 24 nt, Artificial Sequence
  Synthetic
gguuauuaguuuugguugcuuguu

SEQ ID NO: 11719 - RNA, 18 nt, Artificial Sequence
  Synthetic
ggaaauaaagggguuguu

SEQ ID NO: 11720 - RNA, 21 nt, Artificial Sequence
  Synthetic
gcuggaaauaaagggguuguu

SEQ ID NO: 11721 - RNA, 22 nt, Artificial Sequence
  Synthetic
ggcuggaaauaaagggguuguu

SEQ ID NO: 11722 - RNA, 23 nt, Artificial Sequence
  Synthetic
gggcuggaaauaaagggguuguu

SEQ ID NO: 11723 - RNA, 24 nt, Artificial Sequence
  Synthetic
ggggcuggaaauaaagggguuguu

SEQ ID NO: 11724 - RNA, 22 nt, Artificial Sequence
  Synthetic
guaucauuauucuucuguuguu

SEQ ID NO: 11725 - RNA, 23 nt, Artificial Sequence
  Synthetic
gaucauaauaaguaacauuuguu

SEQ ID NO: 11726 - RNA, 22 nt, Artificial Sequence
  Synthetic
gcuacuuuguagagccuuuguu

SEQ ID NO: 11727 - RNA, 24 nt, Artificial Sequence
  Synthetic
gugcuacuuuguagagccuuuguu

SEQ ID NO: 11728 - RNA, 19 nt, Artificial Sequence
  Synthetic
guuuugaauagauuuuguu

SEQ ID NO: 11729 - RNA, 20 nt, Artificial Sequence
  Synthetic
gguuuugaauagauuuuguu

SEQ ID NO: 11730 - RNA, 22 nt, Artificial Sequence
  Synthetic
gagguuuugaauagauuuuguu

SEQ ID NO: 11731 - RNA, 21 nt, Artificial Sequence
  Synthetic
guauuguacuucauuuuuguu

SEQ ID NO: 11732 - RNA, 22 nt, Artificial Sequence
  Synthetic
gcaaagcugaaaaacaaaauuu

SEQ ID NO: 11733 - RNA, 21 nt, Artificial Sequence
  Synthetic
gaccuggcacaauuaaaauuu

SEQ ID NO: 11734 - RNA, 18 nt, Artificial Sequence
  Synthetic
gauaaacaacacaaauuu

SEQ ID NO: 11735 - RNA, 18 nt, Artificial Sequence
  Synthetic
gacaaccugcacaaauuu

SEQ ID NO: 11736 - RNA, 24 nt, Artificial Sequence
  Synthetic
guuauugacaaccugcacaaauuu

SEQ ID NO: 11737 - RNA, 20 nt, Artificial Sequence
  Synthetic
guccugaaagcagcaaauuu

SEQ ID NO: 11738 - RNA, 19 nt, Artificial Sequence
  Synthetic
gaaugaguucgagaaauuu

SEQ ID NO: 11739 - RNA, 20 nt, Artificial Sequence
  Synthetic
guauucccaagcugaaauuu

SEQ ID NO: 11740 - RNA, 24 nt, Artificial Sequence
  Synthetic
gcaaguauucccaagcugaaauuu

SEQ ID NO: 11741 - RNA, 24 nt, Artificial Sequence
  Synthetic
gaauauagccauuagcguaaauuu

SEQ ID NO: 11742 - RNA, 19 nt, Artificial Sequence
  Synthetic
gaaacuaaacucacaauuu

SEQ ID NO: 11743 - RNA, 20 nt, Artificial Sequence
  Synthetic
ggaaacuaaacucacaauuu

SEQ ID NO: 11744 - RNA, 18 nt, Artificial Sequence
  Synthetic
gauagaaguauacaauuu

SEQ ID NO: 11745 - RNA, 22 nt, Artificial Sequence
  Synthetic
gucuacguaaaucauccaauuu

SEQ ID NO: 11746 - RNA, 19 nt, Artificial Sequence
  Synthetic
gagaaugcagaggcaauuu

SEQ ID NO: 11747 - RNA, 20 nt, Artificial Sequence
  Synthetic
gucuuucguaggaagaauuu

SEQ ID NO: 11748 - RNA, 23 nt, Artificial Sequence
  Synthetic
gcugucuuucguaggaagaauuu

SEQ ID NO: 11749 - RNA, 19 nt, Artificial Sequence
  Synthetic
gaauacucgguaagaauuu

SEQ ID NO: 11750 - RNA, 24 nt, Artificial Sequence
  Synthetic
gaauucuccuagaaagcagaauuu

SEQ ID NO: 11751 - RNA, 18 nt, Artificial Sequence
  Synthetic
gcuuaagugugagaauuu

SEQ ID NO: 11752 - RNA, 20 nt, Artificial Sequence
  Synthetic
gugcuuaagugugagaauuu

SEQ ID NO: 11753 - RNA, 23 nt, Artificial Sequence
  Synthetic
gcagugcuuaagugugagaauuu

SEQ ID NO: 11754 - RNA, 22 nt, Artificial Sequence
  Synthetic
gaaaccugcuuguuuagaauuu

SEQ ID NO: 11755 - RNA, 22 nt, Artificial Sequence
  Synthetic
guccuuuguuuugaaggaauuu

SEQ ID NO: 11756 - RNA, 24 nt, Artificial Sequence
  Synthetic
guguccuuuguuuugaaggaauuu

SEQ ID NO: 11757 - RNA, 23 nt, Artificial Sequence
  Synthetic
gucuuuaauaucuuaaugaauuu

SEQ ID NO: 11758 - RNA, 24 nt, Artificial Sequence
  Synthetic
ggucuuuaauaucuuaaugaauuu

SEQ ID NO: 11759 - RNA, 20 nt, Artificial Sequence
  Synthetic
gucccuuggcaauauaauuu

SEQ ID NO: 11760 - RNA, 23 nt, Artificial Sequence
  Synthetic
guaaauguaaaauugacuaauuu

SEQ ID NO: 11761 - RNA, 23 nt, Artificial Sequence
  Synthetic
gacccucccauaucuuuuaauuu

SEQ ID NO: 11762 - RNA, 22 nt, Artificial Sequence
  Synthetic
guaaaaaggauaaguaacauuu

SEQ ID NO: 11763 - RNA, 24 nt, Artificial Sequence
  Synthetic
gaguaaaaaggauaaguaacauuu

SEQ ID NO: 11764 - RNA, 24 nt, Artificial Sequence
  Synthetic
guauucuauuauucuucuacauuu

SEQ ID NO: 11765 - RNA, 23 nt, Artificial Sequence
  Synthetic
gaaauugguauuucuuuacauuu

SEQ ID NO: 11766 - RNA, 21 nt, Artificial Sequence
  Synthetic
guaccuuggcucccaccauuu

SEQ ID NO: 11767 - RNA, 24 nt, Artificial Sequence
  Synthetic
gaauucagaaaguagaagccauuu

SEQ ID NO: 11768 - RNA, 24 nt, Artificial Sequence
  Synthetic
gacagagaucacugagugccauuu

SEQ ID NO: 11769 - RNA, 18 nt, Artificial Sequence
  Synthetic
ggaacaaauucuccauuu

SEQ ID NO: 11770 - RNA, 20 nt, Artificial Sequence
  Synthetic
gaggaacaaauucuccauuu

SEQ ID NO: 11771 - RNA, 21 nt, Artificial Sequence
  Synthetic
gaaugaaccaggguuccauuu

SEQ ID NO: 11772 - RNA, 23 nt, Artificial Sequence
  Synthetic
gaaaauucauagaaguagcauuu

SEQ ID NO: 11773 - RNA, 24 nt, Artificial Sequence
  Synthetic
ggaaaauucauagaaguagcauuu

SEQ ID NO: 11774 - RNA, 23 nt, Artificial Sequence
  Synthetic
gcuuacugaccauagacgcauuu

SEQ ID NO: 11775 - RNA, 24 nt, Artificial Sequence
  Synthetic
ggcuuacugaccauagacgcauuu

SEQ ID NO: 11776 - RNA, 23 nt, Artificial Sequence
  Synthetic
gaaaauaucuuuggaugucauuu

SEQ ID NO: 11777 - RNA, 18 nt, Artificial Sequence
  Synthetic
gaucuauucauuucauuu

SEQ ID NO: 11778 - RNA, 20 nt, Artificial Sequence
  Synthetic
gagaucuauucauuucauuu

SEQ ID NO: 11779 - RNA, 19 nt, Artificial Sequence
  Synthetic
gugaaaggcauuuucauuu

SEQ ID NO: 11780 - RNA, 23 nt, Artificial Sequence
  Synthetic
gaaagugaaaggcauuuucauuu

SEQ ID NO: 11781 - RNA, 21 nt, Artificial Sequence
  Synthetic
gauguauuaaaaagaagauuu

SEQ ID NO: 11782 - RNA, 23 nt, Artificial Sequence
  Synthetic
guaugugcuagagaugcagauuu

SEQ ID NO: 11783 - RNA, 19 nt, Artificial Sequence
  Synthetic
gcaggagaaggggagauuu

SEQ ID NO: 11784 - RNA, 21 nt, Artificial Sequence
  Synthetic
gagcaggagaaggggagauuu

SEQ ID NO: 11785 - RNA, 23 nt, Artificial Sequence
  Synthetic
gagagcaggagaaggggagauuu

SEQ ID NO: 11786 - RNA, 24 nt, Artificial Sequence
  Synthetic
ggagagcaggagaaggggagauuu

SEQ ID NO: 11787 - RNA, 21 nt, Artificial Sequence
  Synthetic
gcacaaggugacaugagauuu

SEQ ID NO: 11788 - RNA, 18 nt, Artificial Sequence
  Synthetic
guacuaauugcuagauuu

SEQ ID NO: 11789 - RNA, 20 nt, Artificial Sequence
  Synthetic
gcagucacguuuguagauuu

SEQ ID NO: 11790 - RNA, 22 nt, Artificial Sequence
  Synthetic
guaucccuguuaguuuagauuu

SEQ ID NO: 11791 - RNA, 19 nt, Artificial Sequence
  Synthetic
guggggccaacaaggauuu

SEQ ID NO: 11792 - RNA, 22 nt, Artificial Sequence
  Synthetic
gaaguggggccaacaaggauuu

SEQ ID NO: 11793 - RNA, 23 nt, Artificial Sequence
  Synthetic
ggaaguggggccaacaaggauuu

SEQ ID NO: 11794 - RNA, 20 nt, Artificial Sequence
  Synthetic
guaacauuuguuuaggauuu

SEQ ID NO: 11795 - RNA, 22 nt, Artificial Sequence
  Synthetic
gacaagcaugguacagggauuu

SEQ ID NO: 11796 - RNA, 19 nt, Artificial Sequence
  Synthetic
gcugccauauuguggauuu

SEQ ID NO: 11797 - RNA, 21 nt, Artificial Sequence
  Synthetic
gcaaaaaugcaagaaugauuu

SEQ ID NO: 11798 - RNA, 22 nt, Artificial Sequence
  Synthetic
ggcaaaaaugcaagaaugauuu

SEQ ID NO: 11799 - RNA, 23 nt, Artificial Sequence
  Synthetic
gggcaaaaaugcaagaaugauuu

SEQ ID NO: 11800 - RNA, 24 nt, Artificial Sequence
  Synthetic
ggggcaaaaaugcaagaaugauuu

SEQ ID NO: 11801 - RNA, 24 nt, Artificial Sequence
  Synthetic
gcuaaauucaguuuucauugauuu

SEQ ID NO: 11802 - RNA, 18 nt, Artificial Sequence
  Synthetic
gaaauuccauuuugauuu

SEQ ID NO: 11803 - RNA, 20 nt, Artificial Sequence
  Synthetic
gagaaauuccauuuugauuu

SEQ ID NO: 11804 - RNA, 24 nt, Artificial Sequence
  Synthetic
guccuucuuacucucuaaauauuu

SEQ ID NO: 11805 - RNA, 22 nt, Artificial Sequence
  Synthetic
guaaacaagugacauaauauuu

SEQ ID NO: 11806 - RNA, 24 nt, Artificial Sequence
  Synthetic
guguaaacaagugacauaauauuu

SEQ ID NO: 11807 - RNA, 18 nt, Artificial Sequence
  Synthetic
gagugcacuguaauauuu

SEQ ID NO: 11808 - RNA, 19 nt, Artificial Sequence
  Synthetic
ggagugcacuguaauauuu

SEQ ID NO: 11809 - RNA, 20 nt, Artificial Sequence
  Synthetic
gggagugcacuguaauauuu

SEQ ID NO: 11810 - RNA, 22 nt, Artificial Sequence
  Synthetic
gauauccuaugcagucauauuu

SEQ ID NO: 11811 - RNA, 22 nt, Artificial Sequence
  Synthetic
gccuuuuucuacuuucauauuu

SEQ ID NO: 11812 - RNA, 21 nt, Artificial Sequence
  Synthetic
gaauaauauugugugauauuu

SEQ ID NO: 11813 - RNA, 21 nt, Artificial Sequence
  Synthetic
gccauuugccuucauauauuu

SEQ ID NO: 11814 - RNA, 18 nt, Artificial Sequence
  Synthetic
ggagcaccuaaccuauuu

SEQ ID NO: 11815 - RNA, 19 nt, Artificial Sequence
  Synthetic
guugcuuuugcuccuauuu

SEQ ID NO: 11816 - RNA, 20 nt, Artificial Sequence
  Synthetic
gguugcuuuugcuccuauuu

SEQ ID NO: 11817 - RNA, 22 nt, Artificial Sequence
  Synthetic
gugguugcuuuugcuccuauuu

SEQ ID NO: 11818 - RNA, 22 nt, Artificial Sequence
  Synthetic
gaucuggguaggcaagcuauuu

SEQ ID NO: 11819 - RNA, 23 nt, Artificial Sequence
  Synthetic
ggaucuggguaggcaagcuauuu

SEQ ID NO: 11820 - RNA, 19 nt, Artificial Sequence
  Synthetic
gcaugcaguaugucuauuu

SEQ ID NO: 11821 - RNA, 21 nt, Artificial Sequence
  Synthetic
gagcaugcaguaugucuauuu

SEQ ID NO: 11822 - RNA, 23 nt, Artificial Sequence
  Synthetic
gugagcaugcaguaugucuauuu

SEQ ID NO: 11823 - RNA, 24 nt, Artificial Sequence
  Synthetic
ggugagcaugcaguaugucuauuu

SEQ ID NO: 11824 - RNA, 21 nt, Artificial Sequence
  Synthetic
gaaauaaaaccuaaaguauuu

SEQ ID NO: 11825 - RNA, 22 nt, Artificial Sequence
  Synthetic
gauaauuaauuuuuuaguauuu

SEQ ID NO: 11826 - RNA, 19 nt, Artificial Sequence
  Synthetic
gaucauucaagcuguauuu

SEQ ID NO: 11827 - RNA, 20 nt, Artificial Sequence
  Synthetic
ggaucauucaagcuguauuu

SEQ ID NO: 11828 - RNA, 24 nt, Artificial Sequence
  Synthetic
gucuuuugcaaaauaauuguauuu

SEQ ID NO: 11829 - RNA, 18 nt, Artificial Sequence
  Synthetic
gugaagucuguuguauuu

SEQ ID NO: 11830 - RNA, 20 nt, Artificial Sequence
  Synthetic
gugugaagucuguuguauuu

SEQ ID NO: 11831 - RNA, 22 nt, Artificial Sequence
  Synthetic
gugugugaagucuguuguauuu

SEQ ID NO: 11832 - RNA, 24 nt, Artificial Sequence
  Synthetic
gugugugugaagucuguuguauuu

SEQ ID NO: 11833 - RNA, 20 nt, Artificial Sequence
  Synthetic
gacauguaagagaauuauuu

SEQ ID NO: 11834 - RNA, 23 nt, Artificial Sequence
  Synthetic
gcagacauguaagagaauuauuu

SEQ ID NO: 11835 - RNA, 24 nt, Artificial Sequence
  Synthetic
ggcagacauguaagagaauuauuu

SEQ ID NO: 11836 - RNA, 24 nt, Artificial Sequence
  Synthetic
gaauuuuuauauuucauauuauuu

SEQ ID NO: 11837 - RNA, 18 nt, Artificial Sequence
  Synthetic
gaguaccaaaacuuauuu

SEQ ID NO: 11838 - RNA, 20 nt, Artificial Sequence
  Synthetic
guacccaagucugcuuauuu

SEQ ID NO: 11839 - RNA, 18 nt, Artificial Sequence
  Synthetic
ggugucaaaaaguuauuu

SEQ ID NO: 11840 - RNA, 20 nt, Artificial Sequence
  Synthetic
guggugucaaaaaguuauuu

SEQ ID NO: 11841 - RNA, 22 nt, Artificial Sequence
  Synthetic
gccuauaccaaauuaguuauuu

SEQ ID NO: 11842 - RNA, 21 nt, Artificial Sequence
  Synthetic
gccuaugugaggagguuauuu

SEQ ID NO: 11843 - RNA, 22 nt, Artificial Sequence
  Synthetic
ggccuaugugaggagguuauuu

SEQ ID NO: 11844 - RNA, 18 nt, Artificial Sequence
  Synthetic
guugaucggaauuuauuu

SEQ ID NO: 11845 - RNA, 22 nt, Artificial Sequence
  Synthetic
gauguauaucucacauuuauuu

SEQ ID NO: 11846 - RNA, 23 nt, Artificial Sequence
  Synthetic
ggauguauaucucacauuuauuu

SEQ ID NO: 11847 - RNA, 22 nt, Artificial Sequence
  Synthetic
gcuacauaagugguauuuauuu

SEQ ID NO: 11848 - RNA, 19 nt, Artificial Sequence
  Synthetic
gcaguauuaaaguuuauuu

SEQ ID NO: 11849 - RNA, 21 nt, Artificial Sequence
  Synthetic
gugcaguauuaaaguuuauuu

SEQ ID NO: 11850 - RNA, 24 nt, Artificial Sequence
  Synthetic
gcugugcaguauuaaaguuuauuu

SEQ ID NO: 11851 - RNA, 24 nt, Artificial Sequence
  Synthetic
guuuuaagagggagucguuuauuu

SEQ ID NO: 11852 - RNA, 18 nt, Artificial Sequence
  Synthetic
gagcucaaauuuuuauuu

SEQ ID NO: 11853 - RNA, 20 nt, Artificial Sequence
  Synthetic
gaaaauguauucaaaacuuu

SEQ ID NO: 11854 - RNA, 24 nt, Artificial Sequence
  Synthetic
gaaugaaaauguauucaaaacuuu

SEQ ID NO: 11855 - RNA, 22 nt, Artificial Sequence
  Synthetic
gaagggggcaugagcaaacuuu

SEQ ID NO: 11856 - RNA, 24 nt, Artificial Sequence
  Synthetic
gcuuuuuucaguccuugaaacuuu

SEQ ID NO: 11857 - RNA, 23 nt, Artificial Sequence
  Synthetic
gcccuagauuuuaauggaacuuu

SEQ ID NO: 11858 - RNA, 18 nt, Artificial Sequence
  Synthetic
gggaauaggaauaacuuu

SEQ ID NO: 11859 - RNA, 19 nt, Artificial Sequence
  Synthetic
ggggaauaggaauaacuuu

SEQ ID NO: 11860 - RNA, 24 nt, Artificial Sequence
  Synthetic
guaauggggaauaggaauaacuuu

SEQ ID NO: 11861 - RNA, 21 nt, Artificial Sequence
  Synthetic
gaacacuaaaaagaacacuuu

SEQ ID NO: 11862 - RNA, 24 nt, Artificial Sequence
  Synthetic
gaauuuuuccaugcuauacacuuu

SEQ ID NO: 11863 - RNA, 22 nt, Artificial Sequence
  Synthetic
gacuaccacacugauccacuuu

SEQ ID NO: 11864 - RNA, 21 nt, Artificial Sequence
  Synthetic
gacuugggaaaaccugacuuu

SEQ ID NO: 11865 - RNA, 22 nt, Artificial Sequence
  Synthetic
gaaauaauuuuaaaaauacuuu

SEQ ID NO: 11866 - RNA, 24 nt, Artificial Sequence
  Synthetic
gugaaauaauuuuaaaaauacuuu

SEQ ID NO: 11867 - RNA, 18 nt, Artificial Sequence
  Synthetic
guugucagucuauacuuu

SEQ ID NO: 11868 - RNA, 22 nt, Artificial Sequence
  Synthetic
gaaaguugucagucuauacuuu

SEQ ID NO: 11869 - RNA, 24 nt, Artificial Sequence
  Synthetic
gugaaaguugucagucuauacuuu

SEQ ID NO: 11870 - RNA, 24 nt, Artificial Sequence
  Synthetic
gaacaccauggaucauucuacuuu

SEQ ID NO: 11871 - RNA, 19 nt, Artificial Sequence
  Synthetic
guaguggaaaauguacuuu

SEQ ID NO: 11872 - RNA, 21 nt, Artificial Sequence
  Synthetic
guuugacacaauguguacuuu

SEQ ID NO: 11873 - RNA, 21 nt, Artificial Sequence
  Synthetic
gaacuccagggaaguuacuuu

SEQ ID NO: 11874 - RNA, 22 nt, Artificial Sequence
  Synthetic
ggaacuccagggaaguuacuuu

SEQ ID NO: 11875 - RNA, 19 nt, Artificial Sequence
  Synthetic
gaucaauuguuagaccuuu

SEQ ID NO: 11876 - RNA, 21 nt, Artificial Sequence
  Synthetic
gugaucaauuguuagaccuuu

SEQ ID NO: 11877 - RNA, 23 nt, Artificial Sequence
  Synthetic
gagugaucaauuguuagaccuuu

SEQ ID NO: 11878 - RNA, 24 nt, Artificial Sequence
  Synthetic
ggagugaucaauuguuagaccuuu

SEQ ID NO: 11879 - RNA, 23 nt, Artificial Sequence
  Synthetic
gucuuuuaggaaugaauaccuuu

SEQ ID NO: 11880 - RNA, 24 nt, Artificial Sequence
  Synthetic
guauccuaaaaacaaauuaccuuu

SEQ ID NO: 11881 - RNA, 20 nt, Artificial Sequence
  Synthetic
gucagauaggaguuaccuuu

SEQ ID NO: 11882 - RNA, 21 nt, Artificial Sequence
  Synthetic
ggucagauaggaguuaccuuu

SEQ ID NO: 11883 - RNA, 23 nt, Artificial Sequence
  Synthetic
gaggucagauaggaguuaccuuu

SEQ ID NO: 11884 - RNA, 22 nt, Artificial Sequence
  Synthetic
gauuuaguaauugccucccuuu

SEQ ID NO: 11885 - RNA, 23 nt, Artificial Sequence
  Synthetic
ggauuuaguaauugccucccuuu

SEQ ID NO: 11886 - RNA, 20 nt, Artificial Sequence
  Synthetic
gaacgccauacaaagccuuu

SEQ ID NO: 11887 - RNA, 23 nt, Artificial Sequence
  Synthetic
gcauucacuuccuaggugccuuu

SEQ ID NO: 11888 - RNA, 23 nt, Artificial Sequence
  Synthetic
gacucuacacucuuaacuccuuu

SEQ ID NO: 11889 - RNA, 18 nt, Artificial Sequence
  Synthetic
gagaaggcacaguccuuu

SEQ ID NO: 11890 - RNA, 19 nt, Artificial Sequence
  Synthetic
ggagaaggcacaguccuuu

SEQ ID NO: 11891 - RNA, 21 nt, Artificial Sequence
  Synthetic
gaggagaaggcacaguccuuu

SEQ ID NO: 11892 - RNA, 20 nt, Artificial Sequence
  Synthetic
gacuuuuucucaauuccuuu

SEQ ID NO: 11893 - RNA, 20 nt, Artificial Sequence
  Synthetic
guuugaaacucugaagcuuu

SEQ ID NO: 11894 - RNA, 21 nt, Artificial Sequence
  Synthetic
gguuugaaacucugaagcuuu

SEQ ID NO: 11895 - RNA, 22 nt, Artificial Sequence
  Synthetic
ggguuugaaacucugaagcuuu

SEQ ID NO: 11896 - RNA, 21 nt, Artificial Sequence
  Synthetic
gaagcauuucuagugagcuuu

SEQ ID NO: 11897 - RNA, 22 nt, Artificial Sequence
  Synthetic
ggaagcauuucuagugagcuuu

SEQ ID NO: 11898 - RNA, 19 nt, Artificial Sequence
  Synthetic
gaacucauaguuaggcuuu

SEQ ID NO: 11899 - RNA, 24 nt, Artificial Sequence
  Synthetic
guuaugaacucauaguuaggcuuu

SEQ ID NO: 11900 - RNA, 19 nt, Artificial Sequence
  Synthetic
gcaguuuuucuuuggcuuu

SEQ ID NO: 11901 - RNA, 24 nt, Artificial Sequence
  Synthetic
gcaaaauuuguuugcaaaugcuuu

SEQ ID NO: 11902 - RNA, 24 nt, Artificial Sequence
  Synthetic
gaauauuuuaaaccacaaugcuuu

SEQ ID NO: 11903 - RNA, 22 nt, Artificial Sequence
  Synthetic
gauacuagauauuuucugcuuu

SEQ ID NO: 11904 - RNA, 20 nt, Artificial Sequence
  Synthetic
guauuauaaguuugugcuuu

SEQ ID NO: 11905 - RNA, 24 nt, Artificial Sequence
  Synthetic
guauguauuauaaguuugugcuuu

SEQ ID NO: 11906 - RNA, 18 nt, Artificial Sequence
  Synthetic
gagcggggcuuuugcuuu

SEQ ID NO: 11907 - RNA, 20 nt, Artificial Sequence
  Synthetic
gagagcggggcuuuugcuuu

SEQ ID NO: 11908 - RNA, 21 nt, Artificial Sequence
  Synthetic
gucaguuucauuaccaucuuu

SEQ ID NO: 11909 - RNA, 24 nt, Artificial Sequence
  Synthetic
gaugucaguuucauuaccaucuuu

SEQ ID NO: 11910 - RNA, 19 nt, Artificial Sequence
  Synthetic
gcacaggucauccaucuuu

SEQ ID NO: 11911 - RNA, 21 nt, Artificial Sequence
  Synthetic
gagcacaggucauccaucuuu

SEQ ID NO: 11912 - RNA, 23 nt, Artificial Sequence
  Synthetic
gagagcacaggucauccaucuuu

SEQ ID NO: 11913 - RNA, 23 nt, Artificial Sequence
  Synthetic
gccucaaaaaaugucucaucuuu

SEQ ID NO: 11914 - RNA, 22 nt, Artificial Sequence
  Synthetic
gcaccuuucaacaaagaucuuu

SEQ ID NO: 11915 - RNA, 24 nt, Artificial Sequence
  Synthetic
guuuacaaguuauuugcuaucuuu

SEQ ID NO: 11916 - RNA, 21 nt, Artificial Sequence
  Synthetic
gaaauaauuuuuucuaucuuu

SEQ ID NO: 11917 - RNA, 18 nt, Artificial Sequence
  Synthetic
gcuaaauuauuuaucuuu

SEQ ID NO: 11918 - RNA, 24 nt, Artificial Sequence
  Synthetic
gaacuugcuaaauuauuuaucuuu

SEQ ID NO: 11919 - RNA, 22 nt, Artificial Sequence
  Synthetic
gcauauauguuucuuccucuuu

SEQ ID NO: 11920 - RNA, 23 nt, Artificial Sequence
  Synthetic
gucacacagaaugguggcucuuu

SEQ ID NO: 11921 - RNA, 19 nt, Artificial Sequence
  Synthetic
guacauuguauugcucuuu

SEQ ID NO: 11922 - RNA, 24 nt, Artificial Sequence
  Synthetic
gaauuguacauuguauugcucuuu

SEQ ID NO: 11923 - RNA, 20 nt, Artificial Sequence
  Synthetic
gauucuugacaaaucucuuu

SEQ ID NO: 11924 - RNA, 20 nt, Artificial Sequence
  Synthetic
guccccagaugucucucuuu

SEQ ID NO: 11925 - RNA, 24 nt, Artificial Sequence
  Synthetic
gucaucaugaaccauucucucuuu

SEQ ID NO: 11926 - RNA, 20 nt, Artificial Sequence
  Synthetic
guaaauuguugauucucuuu

SEQ ID NO: 11927 - RNA, 21 nt, Artificial Sequence
  Synthetic
gguaaauuguugauucucuuu

SEQ ID NO: 11928 - RNA, 18 nt, Artificial Sequence
  Synthetic
gcaauggguuuucucuuu

SEQ ID NO: 11929 - RNA, 21 nt, Artificial Sequence
  Synthetic
gaagcaauggguuuucucuuu

SEQ ID NO: 11930 - RNA, 18 nt, Artificial Sequence
  Synthetic
gauaagaaaguagucuuu

SEQ ID NO: 11931 - RNA, 20 nt, Artificial Sequence
  Synthetic
gugauaagaaaguagucuuu

SEQ ID NO: 11932 - RNA, 23 nt, Artificial Sequence
  Synthetic
gaaaauggaaagacucugucuuu

SEQ ID NO: 11933 - RNA, 22 nt, Artificial Sequence
  Synthetic
gaacagacagacacuugucuuu

SEQ ID NO: 11934 - RNA, 19 nt, Artificial Sequence
  Synthetic
gaauuuucuuccauucuuu

SEQ ID NO: 11935 - RNA, 24 nt, Artificial Sequence
  Synthetic
gucuuauaaucauuugcauucuuu

SEQ ID NO: 11936 - RNA, 21 nt, Artificial Sequence
  Synthetic
gucugaugacuauuauucuuu

SEQ ID NO: 11937 - RNA, 22 nt, Artificial Sequence
  Synthetic
ggucugaugacuauuauucuuu

SEQ ID NO: 11938 - RNA, 23 nt, Artificial Sequence
  Synthetic
gggucugaugacuauuauucuuu

SEQ ID NO: 11939 - RNA, 20 nt, Artificial Sequence
  Synthetic
gaccuucacuuauguucuuu

SEQ ID NO: 11940 - RNA, 20 nt, Artificial Sequence
  Synthetic
gccuuuaggggugaaaguuu

SEQ ID NO: 11941 - RNA, 19 nt, Artificial Sequence
  Synthetic
guuugauuuguucaaguuu

SEQ ID NO: 11942 - RNA, 22 nt, Artificial Sequence
  Synthetic
gagcaaagggaaaaggaaguuu

SEQ ID NO: 11943 - RNA, 24 nt, Artificial Sequence
  Synthetic
gagagcaaagggaaaaggaaguuu

SEQ ID NO: 11944 - RNA, 21 nt, Artificial Sequence
  Synthetic
gauuaaaacauaaggaaguuu

SEQ ID NO: 11945 - RNA, 22 nt, Artificial Sequence
  Synthetic
ggauuaaaacauaaggaaguuu

SEQ ID NO: 11946 - RNA, 24 nt, Artificial Sequence
  Synthetic
gaggauuaaaacauaaggaaguuu

SEQ ID NO: 11947 - RNA, 18 nt, Artificial Sequence
  Synthetic
gcguguuuguuuaaguuu

SEQ ID NO: 11948 - RNA, 21 nt, Artificial Sequence
  Synthetic
gaagcguguuuguuuaaguuu

SEQ ID NO: 11949 - RNA, 18 nt, Artificial Sequence
  Synthetic
gacugucuaacacaguuu

SEQ ID NO: 11950 - RNA, 19 nt, Artificial Sequence
  Synthetic
ggacugucuaacacaguuu

SEQ ID NO: 11951 - RNA, 22 nt, Artificial Sequence
  Synthetic
gcaggacugucuaacacaguuu

SEQ ID NO: 11952 - RNA, 22 nt, Artificial Sequence
  Synthetic
gaaaauaaauuuaacacaguuu

SEQ ID NO: 11953 - RNA, 24 nt, Artificial Sequence
  Synthetic
gagaaaauaaauuuaacacaguuu

SEQ ID NO: 11954 - RNA, 18 nt, Artificial Sequence
  Synthetic
gggaaaaaagaccaguuu

SEQ ID NO: 11955 - RNA, 23 nt, Artificial Sequence
  Synthetic
gaaaagggaaaaaagaccaguuu

SEQ ID NO: 11956 - RNA, 19 nt, Artificial Sequence
  Synthetic
guggaaaucccugcaguuu

SEQ ID NO: 11957 - RNA, 23 nt, Artificial Sequence
  Synthetic
gaagcagacugcaaacucaguuu

SEQ ID NO: 11958 - RNA, 18 nt, Artificial Sequence
  Synthetic
gaaucauaaacucaguuu

SEQ ID NO: 11959 - RNA, 20 nt, Artificial Sequence
  Synthetic
gugaaucauaaacucaguuu

SEQ ID NO: 11960 - RNA, 19 nt, Artificial Sequence
  Synthetic
guugucauuauuucaguuu

SEQ ID NO: 11961 - RNA, 22 nt, Artificial Sequence
  Synthetic
gcaguugucauuauuucaguuu

SEQ ID NO: 11962 - RNA, 18 nt, Artificial Sequence
  Synthetic
gcagggcucuuucaguuu

SEQ ID NO: 11963 - RNA, 20 nt, Artificial Sequence
  Synthetic
guaacuguuggugggaguuu

SEQ ID NO: 11964 - RNA, 18 nt, Artificial Sequence
  Synthetic
gugaauagauaugaguuu

SEQ ID NO: 11965 - RNA, 21 nt, Artificial Sequence
  Synthetic
gagacgaauaauuuugaguuu

SEQ ID NO: 11966 - RNA, 22 nt, Artificial Sequence
  Synthetic
guuuuguuuuauauaauaguuu

SEQ ID NO: 11967 - RNA, 18 nt, Artificial Sequence
  Synthetic
gggaauucuucauaguuu

SEQ ID NO: 11968 - RNA, 19 nt, Artificial Sequence
  Synthetic
ggggaauucuucauaguuu

SEQ ID NO: 11969 - RNA, 21 nt, Artificial Sequence
  Synthetic
gaacuggcacccauauaguuu

SEQ ID NO: 11970 - RNA, 24 nt, Artificial Sequence
  Synthetic
guaauuugauuccgauacuaguuu

SEQ ID NO: 11971 - RNA, 20 nt, Artificial Sequence
  Synthetic
guaagcggcauuucuaguuu

SEQ ID NO: 11972 - RNA, 21 nt, Artificial Sequence
  Synthetic
gguaagcggcauuucuaguuu

SEQ ID NO: 11973 - RNA, 22 nt, Artificial Sequence
  Synthetic
ggguaagcggcauuucuaguuu

SEQ ID NO: 11974 - RNA, 24 nt, Artificial Sequence
  Synthetic
gaggguaagcggcauuucuaguuu

SEQ ID NO: 11975 - RNA, 19 nt, Artificial Sequence
  Synthetic
gccagccucaucuuaguuu

SEQ ID NO: 11976 - RNA, 20 nt, Artificial Sequence
  Synthetic
ggccagccucaucuuaguuu

SEQ ID NO: 11977 - RNA, 22 nt, Artificial Sequence
  Synthetic
gcucuagaguuccaacccguuu

SEQ ID NO: 11978 - RNA, 23 nt, Artificial Sequence
  Synthetic
ggcucuagaguuccaacccguuu

SEQ ID NO: 11979 - RNA, 24 nt, Artificial Sequence
  Synthetic
gacaaucccaaggugaaaagguuu

SEQ ID NO: 11980 - RNA, 19 nt, Artificial Sequence
  Synthetic
guuaaaaccacuaagguuu

SEQ ID NO: 11981 - RNA, 20 nt, Artificial Sequence
  Synthetic
gguuaaaaccacuaagguuu

SEQ ID NO: 11982 - RNA, 23 nt, Artificial Sequence
  Synthetic
gcuggagagaauaaagcagguuu

SEQ ID NO: 11983 - RNA, 24 nt, Artificial Sequence
  Synthetic
gcaaaauaauacaaagcuagguuu

SEQ ID NO: 11984 - RNA, 22 nt, Artificial Sequence
  Synthetic
gacuuaaaguuacaaaugguuu

SEQ ID NO: 11985 - RNA, 24 nt, Artificial Sequence
  Synthetic
gugacuuaaaguuacaaaugguuu

SEQ ID NO: 11986 - RNA, 19 nt, Artificial Sequence
  Synthetic
guugauauuuuaaugguuu

SEQ ID NO: 11987 - RNA, 20 nt, Artificial Sequence
  Synthetic
gguugauauuuuaaugguuu

SEQ ID NO: 11988 - RNA, 21 nt, Artificial Sequence
  Synthetic
gugaaugguaucagaugguuu

SEQ ID NO: 11989 - RNA, 22 nt, Artificial Sequence
  Synthetic
ggugaaugguaucagaugguuu

SEQ ID NO: 11990 - RNA, 22 nt, Artificial Sequence
  Synthetic
gaucucuuguuggcuaugguuu

SEQ ID NO: 11991 - RNA, 19 nt, Artificial Sequence
  Synthetic
guagguggaagggugguuu

SEQ ID NO: 11992 - RNA, 23 nt, Artificial Sequence
  Synthetic
guauguagguggaagggugguuu

SEQ ID NO: 11993 - RNA, 20 nt, Artificial Sequence
  Synthetic
guuagcuuugugguugguuu

SEQ ID NO: 11994 - RNA, 21 nt, Artificial Sequence
  Synthetic
gguuagcuuugugguugguuu

SEQ ID NO: 11995 - RNA, 23 nt, Artificial Sequence
  Synthetic
gagguuagcuuugugguugguuu

SEQ ID NO: 11996 - RNA, 18 nt, Artificial Sequence
  Synthetic
gaguuauauaaaauguuu

SEQ ID NO: 11997 - RNA, 19 nt, Artificial Sequence
  Synthetic
guagaaggaacuaauguuu

SEQ ID NO: 11998 - RNA, 20 nt, Artificial Sequence
  Synthetic
gguagaaggaacuaauguuu

SEQ ID NO: 11999 - RNA, 21 nt, Artificial Sequence
  Synthetic
ggguagaaggaacuaauguuu

SEQ ID NO: 12000 - RNA, 18 nt, Artificial Sequence
  Synthetic
gaagaaggcuuaauguuu

SEQ ID NO: 12001 - RNA, 19 nt, Artificial Sequence
  Synthetic
ggaagaaggcuuaauguuu

SEQ ID NO: 12002 - RNA, 20 nt, Artificial Sequence
  Synthetic
gggaagaaggcuuaauguuu

SEQ ID NO: 12003 - RNA, 23 nt, Artificial Sequence
  Synthetic
gcugggaagaaggcuuaauguuu

SEQ ID NO: 12004 - RNA, 24 nt, Artificial Sequence
  Synthetic
guucauauuccaggagacauguuu

SEQ ID NO: 12005 - RNA, 18 nt, Artificial Sequence
  Synthetic
gggugaauagggauguuu

SEQ ID NO: 12006 - RNA, 20 nt, Artificial Sequence
  Synthetic
gcaaaaaagccgcuauguuu

SEQ ID NO: 12007 - RNA, 19 nt, Artificial Sequence
  Synthetic
guccuugguuucuauguuu

SEQ ID NO: 12008 - RNA, 21 nt, Artificial Sequence
  Synthetic
gaguccuugguuucuauguuu

SEQ ID NO: 12009 - RNA, 18 nt, Artificial Sequence
  Synthetic
gcauaauccucucuguuu

SEQ ID NO: 12010 - RNA, 20 nt, Artificial Sequence
  Synthetic
gagcauaauccucucuguuu

SEQ ID NO: 12011 - RNA, 24 nt, Artificial Sequence
  Synthetic
gccagagcauaauccucucuguuu

SEQ ID NO: 12012 - RNA, 18 nt, Artificial Sequence
  Synthetic
gaucucuauauucuguuu

SEQ ID NO: 12013 - RNA, 23 nt, Artificial Sequence
  Synthetic
gauauauuaauuaccuucuguuu

SEQ ID NO: 12014 - RNA, 19 nt, Artificial Sequence
  Synthetic
guucauuacuuuucuguuu

SEQ ID NO: 12015 - RNA, 22 nt, Artificial Sequence
  Synthetic
gucucucaacuuagcaguguuu

SEQ ID NO: 12016 - RNA, 23 nt, Artificial Sequence
  Synthetic
ggucucucaacuuagcaguguuu

SEQ ID NO: 12017 - RNA, 21 nt, Artificial Sequence
  Synthetic
gauuaaaggauuaauguguuu

SEQ ID NO: 12018 - RNA, 22 nt, Artificial Sequence
  Synthetic
ggauuaaaggauuaauguguuu

SEQ ID NO: 12019 - RNA, 18 nt, Artificial Sequence
  Synthetic
gauugaagacauguguuu

SEQ ID NO: 12020 - RNA, 19 nt, Artificial Sequence
  Synthetic
ggauugaagacauguguuu

SEQ ID NO: 12021 - RNA, 20 nt, Artificial Sequence
  Synthetic
guugaagcaagcauguguuu

SEQ ID NO: 12022 - RNA, 24 nt, Artificial Sequence
  Synthetic
gcauguugaagcaagcauguguuu

SEQ ID NO: 12023 - RNA, 19 nt, Artificial Sequence
  Synthetic
gugauaaccugaauuguuu

SEQ ID NO: 12024 - RNA, 18 nt, Artificial Sequence
  Synthetic
gacuacguaggauuguuu

SEQ ID NO: 12025 - RNA, 22 nt, Artificial Sequence
  Synthetic
gaaaauaaagguaauguuguuu

SEQ ID NO: 12026 - RNA, 23 nt, Artificial Sequence
  Synthetic
ggaaaauaaagguaauguuguuu

SEQ ID NO: 12027 - RNA, 22 nt, Artificial Sequence
  Synthetic
gcaaaacauguuuauguuguuu

SEQ ID NO: 12028 - RNA, 20 nt, Artificial Sequence
  Synthetic
gaauccagacacauuuguuu

SEQ ID NO: 12029 - RNA, 20 nt, Artificial Sequence
  Synthetic
guuuaugcauuacuuuguuu

SEQ ID NO: 12030 - RNA, 23 nt, Artificial Sequence
  Synthetic
gaaaauaauauaucaguuuguuu

SEQ ID NO: 12031 - RNA, 21 nt, Artificial Sequence
  Synthetic
guggaagcaauaauuuuguuu

SEQ ID NO: 12032 - RNA, 22 nt, Artificial Sequence
  Synthetic
gguggaagcaauaauuuuguuu

SEQ ID NO: 12033 - RNA, 18 nt, Artificial Sequence
  Synthetic
gauauugauugaaauuuu

SEQ ID NO: 12034 - RNA, 19 nt, Artificial Sequence
  Synthetic
ggauauugauugaaauuuu

SEQ ID NO: 12035 - RNA, 19 nt, Artificial Sequence
  Synthetic
guaaaauggccacaauuuu

SEQ ID NO: 12036 - RNA, 20 nt, Artificial Sequence
  Synthetic
gguaaaauggccacaauuuu

SEQ ID NO: 12037 - RNA, 19 nt, Artificial Sequence
  Synthetic
gccugauaccuucaauuuu

SEQ ID NO: 12038 - RNA, 21 nt, Artificial Sequence
  Synthetic
gaauagggaagaaauaauuuu

SEQ ID NO: 12039 - RNA, 18 nt, Artificial Sequence
  Synthetic
gaaguaacucauaauuuu

SEQ ID NO: 12040 - RNA, 19 nt, Artificial Sequence
  Synthetic
ggaaguaacucauaauuuu

SEQ ID NO: 12041 - RNA, 23 nt, Artificial Sequence
  Synthetic
gaauggaaguaacucauaauuuu

SEQ ID NO: 12042 - RNA, 20 nt, Artificial Sequence
  Synthetic
gaaagguccuuauuaauuuu

SEQ ID NO: 12043 - RNA, 22 nt, Artificial Sequence
  Synthetic
gugaaagguccuuauuaauuuu

SEQ ID NO: 12044 - RNA, 20 nt, Artificial Sequence
  Synthetic
gaaugccuaagcaacauuuu

SEQ ID NO: 12045 - RNA, 23 nt, Artificial Sequence
  Synthetic
gaugaaugccuaagcaacauuuu

SEQ ID NO: 12046 - RNA, 23 nt, Artificial Sequence
  Synthetic
gaucaaaaauaugaauacauuuu

SEQ ID NO: 12047 - RNA, 23 nt, Artificial Sequence
  Synthetic
gcccaagguuuaaacuacauuuu

SEQ ID NO: 12048 - RNA, 20 nt, Artificial Sequence
  Synthetic
gaauccuagguuugcauuuu

SEQ ID NO: 12049 - RNA, 21 nt, Artificial Sequence
  Synthetic
ggaauccuagguuugcauuuu

SEQ ID NO: 12050 - RNA, 23 nt, Artificial Sequence
  Synthetic
guggaauccuagguuugcauuuu

SEQ ID NO: 12051 - RNA, 21 nt, Artificial Sequence
  Synthetic
guaauaaaagcaacucauuuu

SEQ ID NO: 12052 - RNA, 24 nt, Artificial Sequence
  Synthetic
guuaucaaagguuaaaaugauuuu

SEQ ID NO: 12053 - RNA, 18 nt, Artificial Sequence
  Synthetic
ggcacuuuuauugauuuu

SEQ ID NO: 12054 - RNA, 23 nt, Artificial Sequence
  Synthetic
gauauacaugauuaaucuauuuu

SEQ ID NO: 12055 - RNA, 19 nt, Artificial Sequence
  Synthetic
gaucuaggucuauuauuuu

SEQ ID NO: 12056 - RNA, 19 nt, Artificial Sequence
  Synthetic
gauugcuuuuacuuauuuu

SEQ ID NO: 12057 - RNA, 20 nt, Artificial Sequence
  Synthetic
ggauugcuuuuacuuauuuu

SEQ ID NO: 12058 - RNA, 21 nt, Artificial Sequence
  Synthetic
gggauugcuuuuacuuauuuu

SEQ ID NO: 12059 - RNA, 22 nt, Artificial Sequence
  Synthetic
ggggauugcuuuuacuuauuuu

SEQ ID NO: 12060 - RNA, 24 nt, Artificial Sequence
  Synthetic
gaucauugcuaauguauuuauuuu

SEQ ID NO: 12061 - RNA, 19 nt, Artificial Sequence
  Synthetic
gacaugcaucaaaacuuuu

SEQ ID NO: 12062 - RNA, 20 nt, Artificial Sequence
  Synthetic
ggacaugcaucaaaacuuuu

SEQ ID NO: 12063 - RNA, 22 nt, Artificial Sequence
  Synthetic
gaggacaugcaucaaaacuuuu

SEQ ID NO: 12064 - RNA, 21 nt, Artificial Sequence
  Synthetic
guuacacaggugaaaacuuuu

SEQ ID NO: 12065 - RNA, 21 nt, Artificial Sequence
  Synthetic
gauuuguuugaaggaacuuuu

SEQ ID NO: 12066 - RNA, 21 nt, Artificial Sequence
  Synthetic
gcaccacuccgucucacuuuu

SEQ ID NO: 12067 - RNA, 23 nt, Artificial Sequence
  Synthetic
gcauuuuguggaucuagacuuuu

SEQ ID NO: 12068 - RNA, 19 nt, Artificial Sequence
  Synthetic
gaagaguuuaucaccuuuu

SEQ ID NO: 12069 - RNA, 20 nt, Artificial Sequence
  Synthetic
ggaagaguuuaucaccuuuu

SEQ ID NO: 12070 - RNA, 23 nt, Artificial Sequence
  Synthetic
gcaggaagaguuuaucaccuuuu

SEQ ID NO: 12071 - RNA, 19 nt, Artificial Sequence
  Synthetic
gucugguacaguaccuuuu

SEQ ID NO: 12072 - RNA, 22 nt, Artificial Sequence
  Synthetic
guugucugguacaguaccuuuu

SEQ ID NO: 12073 - RNA, 19 nt, Artificial Sequence
  Synthetic
gaaaauccaggccccuuuu

SEQ ID NO: 12074 - RNA, 20 nt, Artificial Sequence
  Synthetic
ggaaaauccaggccccuuuu

SEQ ID NO: 12075 - RNA, 21 nt, Artificial Sequence
  Synthetic
gggaaaauccaggccccuuuu

SEQ ID NO: 12076 - RNA, 22 nt, Artificial Sequence
  Synthetic
gcuacuccugcuguggccuuuu

SEQ ID NO: 12077 - RNA, 20 nt, Artificial Sequence
  Synthetic
guuucugcauucuagcuuuu

SEQ ID NO: 12078 - RNA, 23 nt, Artificial Sequence
  Synthetic
gcuguuucugcauucuagcuuuu

SEQ ID NO: 12079 - RNA, 24 nt, Artificial Sequence
  Synthetic
ggcuguuucugcauucuagcuuuu

SEQ ID NO: 12080 - RNA, 18 nt, Artificial Sequence
  Synthetic
gccaacucuuuagcuuuu

SEQ ID NO: 12081 - RNA, 23 nt, Artificial Sequence
  Synthetic
gcuaugccaacucuuuagcuuuu

SEQ ID NO: 12082 - RNA, 18 nt, Artificial Sequence
  Synthetic
guuugagcaaaggcuuuu

SEQ ID NO: 12083 - RNA, 20 nt, Artificial Sequence
  Synthetic
guguuugagcaaaggcuuuu

SEQ ID NO: 12084 - RNA, 24 nt, Artificial Sequence
  Synthetic
gaauguguuugagcaaaggcuuuu

SEQ ID NO: 12085 - RNA, 18 nt, Artificial Sequence
  Synthetic
gaugccucaaaggcuuuu

SEQ ID NO: 12086 - RNA, 22 nt, Artificial Sequence
  Synthetic
guuugaugccucaaaggcuuuu

SEQ ID NO: 12087 - RNA, 18 nt, Artificial Sequence
  Synthetic
gugauucuaauugcuuuu

SEQ ID NO: 12088 - RNA, 21 nt, Artificial Sequence
  Synthetic
gaagugauucuaauugcuuuu

SEQ ID NO: 12089 - RNA, 19 nt, Artificial Sequence
  Synthetic
guuggggaaacaaucuuuu

SEQ ID NO: 12090 - RNA, 20 nt, Artificial Sequence
  Synthetic
gguuggggaaacaaucuuuu

SEQ ID NO: 12091 - RNA, 23 nt, Artificial Sequence
  Synthetic
gccuucccaaaccuugcucuuuu

SEQ ID NO: 12092 - RNA, 18 nt, Artificial Sequence
  Synthetic
gucacugaaaagucuuuu

SEQ ID NO: 12093 - RNA, 19 nt, Artificial Sequence
  Synthetic
ggucacugaaaagucuuuu

SEQ ID NO: 12094 - RNA, 23 nt, Artificial Sequence
  Synthetic
guaaggucacugaaaagucuuuu

SEQ ID NO: 12095 - RNA, 19 nt, Artificial Sequence
  Synthetic
gugcaaaguguauucuuuu

SEQ ID NO: 12096 - RNA, 19 nt, Artificial Sequence
  Synthetic
guuuccuacaucuucuuuu

SEQ ID NO: 12097 - RNA, 23 nt, Artificial Sequence
  Synthetic
guucaauggcuaauauuucuuuu

SEQ ID NO: 12098 - RNA, 21 nt, Artificial Sequence
  Synthetic
gcaaaauuucuauaaaguuuu

SEQ ID NO: 12099 - RNA, 22 nt, Artificial Sequence
  Synthetic
ggcaaaauuucuauaaaguuuu

SEQ ID NO: 12100 - RNA, 20 nt, Artificial Sequence
  Synthetic
gaauauaagaaaccaguuuu

SEQ ID NO: 12101 - RNA, 18 nt, Artificial Sequence
  Synthetic
guuauuggucucaguuuu

SEQ ID NO: 12102 - RNA, 21 nt, Artificial Sequence
  Synthetic
gauugugucaauaugaguuuu

SEQ ID NO: 12103 - RNA, 18 nt, Artificial Sequence
  Synthetic
guacccaauaauaguuuu

SEQ ID NO: 12104 - RNA, 19 nt, Artificial Sequence
  Synthetic
gguacccaauaauaguuuu

SEQ ID NO: 12105 - RNA, 21 nt, Artificial Sequence
  Synthetic
gaacuuacaucuuguaguuuu

SEQ ID NO: 12106 - RNA, 23 nt, Artificial Sequence
  Synthetic
gagaacuuacaucuuguaguuuu

SEQ ID NO: 12107 - RNA, 18 nt, Artificial Sequence
  Synthetic
gacagaaguauuaguuuu

SEQ ID NO: 12108 - RNA, 22 nt, Artificial Sequence
  Synthetic
gauugacagaaguauuaguuuu

SEQ ID NO: 12109 - RNA, 21 nt, Artificial Sequence
  Synthetic
guuuguuuaaaauuuaguuuu

SEQ ID NO: 12110 - RNA, 22 nt, Artificial Sequence
  Synthetic
gguuuguuuaaaauuuaguuuu

SEQ ID NO: 12111 - RNA, 18 nt, Artificial Sequence
  Synthetic
gccacuaagcaucguuuu

SEQ ID NO: 12112 - RNA, 18 nt, Artificial Sequence
  Synthetic
ggagcuaguaaauguuuu

SEQ ID NO: 12113 - RNA, 19 nt, Artificial Sequence
  Synthetic
gggagcuaguaaauguuuu

SEQ ID NO: 12114 - RNA, 22 nt, Artificial Sequence
  Synthetic
gcuuagucuuauagacuguuuu

SEQ ID NO: 12115 - RNA, 19 nt, Artificial Sequence
  Synthetic
gucccccuccuucuguuuu

SEQ ID NO: 12116 - RNA, 20 nt, Artificial Sequence
  Synthetic
ggucccccuccuucuguuuu

SEQ ID NO: 12117 - RNA, 22 nt, Artificial Sequence
  Synthetic
guggucccccuccuucuguuuu

SEQ ID NO: 12118 - RNA, 24 nt, Artificial Sequence
  Synthetic
gucucuacaauugaaaaguguuuu

SEQ ID NO: 12119 - RNA, 18 nt, Artificial Sequence
  Synthetic
guccugagacaguguuuu

SEQ ID NO: 12120 - RNA, 21 nt, Artificial Sequence
  Synthetic
gaacauaggauuuuguguuuu

SEQ ID NO: 12121 - RNA, 18 nt, Artificial Sequence
  Synthetic
gcguuuccucuuuguuuu

SEQ ID NO: 12122 - RNA, 18 nt, Artificial Sequence
  Synthetic
gcuuccuugcacauuuuu

SEQ ID NO: 12123 - RNA, 21 nt, Artificial Sequence
  Synthetic
guugcuuccuugcacauuuuu

SEQ ID NO: 12124 - RNA, 21 nt, Artificial Sequence
  Synthetic
gaaaaaagaaacaucauuuuu

SEQ ID NO: 12125 - RNA, 22 nt, Artificial Sequence
  Synthetic
ggaaaaaagaaacaucauuuuu

SEQ ID NO: 12126 - RNA, 18 nt, Artificial Sequence
  Synthetic
ggggagggacucauuuuu

SEQ ID NO: 12127 - RNA, 24 nt, Artificial Sequence
  Synthetic
guaaacaauucaguagugauuuuu

SEQ ID NO: 12128 - RNA, 22 nt, Artificial Sequence
  Synthetic
gcaaacaaaaaguuguauuuuu

SEQ ID NO: 12129 - RNA, 20 nt, Artificial Sequence
  Synthetic
guuagguucuguaacuuuuu

SEQ ID NO: 12130 - RNA, 23 nt, Artificial Sequence
  Synthetic
gauguuagguucuguaacuuuuu

SEQ ID NO: 12131 - RNA, 19 nt, Artificial Sequence
  Synthetic
gaggcauuagugacuuuuu

SEQ ID NO: 12132 - RNA, 23 nt, Artificial Sequence
  Synthetic
gacagaggcauuagugacuuuuu

SEQ ID NO: 12133 - RNA, 24 nt, Artificial Sequence
  Synthetic
ggacagaggcauuagugacuuuuu

SEQ ID NO: 12134 - RNA, 22 nt, Artificial Sequence
  Synthetic
gucuuagauuacccagcuuuuu

SEQ ID NO: 12135 - RNA, 23 nt, Artificial Sequence
  Synthetic
ggucuuagauuacccagcuuuuu

SEQ ID NO: 12136 - RNA, 24 nt, Artificial Sequence
  Synthetic
gggucuuagauuacccagcuuuuu

SEQ ID NO: 12137 - RNA, 22 nt, Artificial Sequence
  Synthetic
guuccucacuaaggcucuuuuu

SEQ ID NO: 12138 - RNA, 20 nt, Artificial Sequence
  Synthetic
gauuucaccagucucuuuuu

SEQ ID NO: 12139 - RNA, 22 nt, Artificial Sequence
  Synthetic
gugauuucaccagucucuuuuu

SEQ ID NO: 12140 - RNA, 21 nt, Artificial Sequence
  Synthetic
gccuacuaaaucagaguuuuu

SEQ ID NO: 12141 - RNA, 18 nt, Artificial Sequence
  Synthetic
gcauuguuaacuguuuuu

SEQ ID NO: 12142 - RNA, 19 nt, Artificial Sequence
  Synthetic
ggcauuguuaacuguuuuu

SEQ ID NO: 12143 - RNA, 21 nt, Artificial Sequence
  Synthetic
gaggcauuguuaacuguuuuu

SEQ ID NO: 12144 - RNA, 22 nt, Artificial Sequence
  Synthetic
ggaggcauuguuaacuguuuuu

SEQ ID NO: 12145 - RNA, 24 nt, Artificial Sequence
  Synthetic
gcucauuaaauauuagcuguuuuu

SEQ ID NO: 12146 - RNA, 23 nt, Artificial Sequence
  Synthetic
gacaaguaagccaauuuguuuuu

SEQ ID NO: 12147 - RNA, 24 nt, Artificial Sequence
  Synthetic
ggacaaguaagccaauuuguuuuu

SEQ ID NO: 12148 - RNA, 19 nt, Artificial Sequence
  Synthetic
gugaggccacuuuguuuuu

SEQ ID NO: 12149 - RNA, 21 nt, Artificial Sequence
  Synthetic
gagugaggccacuuuguuuuu

SEQ ID NO: 12150 - RNA, 20 nt, Artificial Sequence
  Synthetic
guucaaucagcuaauuuuuu

SEQ ID NO: 12151 - RNA, 21 nt, Artificial Sequence
  Synthetic
gguucaaucagcuaauuuuuu

SEQ ID NO: 12152 - RNA, 24 nt, Artificial Sequence
  Synthetic
gaauuacuuccagccccauuuuuu

SEQ ID NO: 12153 - RNA, 24 nt, Artificial Sequence
  Synthetic
guaauuauucuacuuuccuuuuuu

SEQ ID NO: 12154 - RNA, 24 nt, Artificial Sequence
  Synthetic
gaacaacuacccugaaaaaaaaaa

SEQ ID NO: 12155 - RNA, 21 nt, Artificial Sequence
  Synthetic
ggcauaguacugaaaaaaaaa

SEQ ID NO: 12156 - RNA, 24 nt, Artificial Sequence
  Synthetic
gaaggcauaguacugaaaaaaaaa

SEQ ID NO: 12157 - RNA, 22 nt, Artificial Sequence
  Synthetic
gcaaaauaguauagaaaaaaaa

SEQ ID NO: 12158 - RNA, 23 nt, Artificial Sequence
  Synthetic
ggcaaaauaguauagaaaaaaaa

SEQ ID NO: 12159 - RNA, 24 nt, Artificial Sequence
  Synthetic
gggcaaaauaguauagaaaaaaaa

SEQ ID NO: 12160 - RNA, 18 nt, Artificial Sequence
  Synthetic
gcgacagaggaaaaaaaa

SEQ ID NO: 12161 - RNA, 23 nt, Artificial Sequence
  Synthetic
gcugaaacugaaaaagcaaaaaa

SEQ ID NO: 12162 - RNA, 24 nt, Artificial Sequence
  Synthetic
ggcugaaacugaaaaagcaaaaaa

SEQ ID NO: 12163 - RNA, 23 nt, Artificial Sequence
  Synthetic
gauccagccuuugacgcaaaaaa

SEQ ID NO: 12164 - RNA, 18 nt, Artificial Sequence
  Synthetic
gccuuguccuucaaaaaa

SEQ ID NO: 12165 - RNA, 23 nt, Artificial Sequence
  Synthetic
guucugccuuguccuucaaaaaa

SEQ ID NO: 12166 - RNA, 19 nt, Artificial Sequence
  Synthetic
gccagacauuaagaaaaaa

SEQ ID NO: 12167 - RNA, 24 nt, Artificial Sequence
  Synthetic
gcccugccagacauuaagaaaaaa

SEQ ID NO: 12168 - RNA, 21 nt, Artificial Sequence
  Synthetic
guaaaguuuucauggaaaaaa

SEQ ID NO: 12169 - RNA, 22 nt, Artificial Sequence
  Synthetic
gguaaaguuuucauggaaaaaa

SEQ ID NO: 12170 - RNA, 19 nt, Artificial Sequence
  Synthetic
guaagcuuagaugaaaaaa

SEQ ID NO: 12171 - RNA, 20 nt, Artificial Sequence
  Synthetic
gguaagcuuagaugaaaaaa

SEQ ID NO: 12172 - RNA, 23 nt, Artificial Sequence
  Synthetic
guuaacuuucaaguaauaaaaaa

SEQ ID NO: 12173 - RNA, 20 nt, Artificial Sequence
  Synthetic
guuggaacagagauaaaaaa

SEQ ID NO: 12174 - RNA, 21 nt, Artificial Sequence
  Synthetic
gguuggaacagagauaaaaaa

SEQ ID NO: 12175 - RNA, 23 nt, Artificial Sequence
  Synthetic
gacauguaauuugaaaacaaaaa

SEQ ID NO: 12176 - RNA, 24 nt, Artificial Sequence
  Synthetic
ggacauguaauuugaaaacaaaaa

SEQ ID NO: 12177 - RNA, 23 nt, Artificial Sequence
  Synthetic
guuuccgcuucuaucaacaaaaa

SEQ ID NO: 12178 - RNA, 18 nt, Artificial Sequence
  Synthetic
gagaucgaaagacaaaaa

SEQ ID NO: 12179 - RNA, 22 nt, Artificial Sequence
  Synthetic
gcaaucacaaagccgacaaaaa

SEQ ID NO: 12180 - RNA, 22 nt, Artificial Sequence
  Synthetic
gaaaaaaucugaaauccaaaaa

SEQ ID NO: 12181 - RNA, 19 nt, Artificial Sequence
  Synthetic
gagguccaaaguccaaaaa

SEQ ID NO: 12182 - RNA, 20 nt, Artificial Sequence
  Synthetic
ggagguccaaaguccaaaaa

SEQ ID NO: 12183 - RNA, 18 nt, Artificial Sequence
  Synthetic
gccuuuuagaagcaaaaa

SEQ ID NO: 12184 - RNA, 21 nt, Artificial Sequence
  Synthetic
gaagccuuuuagaagcaaaaa

SEQ ID NO: 12185 - RNA, 22 nt, Artificial Sequence
  Synthetic
ggaagccuuuuagaagcaaaaa

SEQ ID NO: 12186 - RNA, 23 nt, Artificial Sequence
  Synthetic
gggaagccuuuuagaagcaaaaa

SEQ ID NO: 12187 - RNA, 24 nt, Artificial Sequence
  Synthetic
ggggaagccuuuuagaagcaaaaa

SEQ ID NO: 12188 - RNA, 18 nt, Artificial Sequence
  Synthetic
ggugguauacggcaaaaa

SEQ ID NO: 12189 - RNA, 21 nt, Artificial Sequence
  Synthetic
gcaggugguauacggcaaaaa

SEQ ID NO: 12190 - RNA, 22 nt, Artificial Sequence
  Synthetic
ggcaggugguauacggcaaaaa

SEQ ID NO: 12191 - RNA, 18 nt, Artificial Sequence
  Synthetic
guuucauggugucaaaaa

SEQ ID NO: 12192 - RNA, 18 nt, Artificial Sequence
  Synthetic
gagugcucuuaagaaaaa

SEQ ID NO: 12193 - RNA, 22 nt, Artificial Sequence
  Synthetic
gucugagugcucuuaagaaaaa

SEQ ID NO: 12194 - RNA, 24 nt, Artificial Sequence
  Synthetic
gagucugagugcucuuaagaaaaa

SEQ ID NO: 12195 - RNA, 21 nt, Artificial Sequence
  Synthetic
ggcaaaaaagaugcagaaaaa

SEQ ID NO: 12196 - RNA, 22 nt, Artificial Sequence
  Synthetic
gggcaaaaaagaugcagaaaaa

SEQ ID NO: 12197 - RNA, 24 nt, Artificial Sequence
  Synthetic
gagggcaaaaaagaugcagaaaaa

SEQ ID NO: 12198 - RNA, 19 nt, Artificial Sequence
  Synthetic
gaucgaugaaagagaaaaa

SEQ ID NO: 12199 - RNA, 22 nt, Artificial Sequence
  Synthetic
guugaucgaugaaagagaaaaa

SEQ ID NO: 12200 - RNA, 21 nt, Artificial Sequence
  Synthetic
gacacaauuuccugagaaaaa

SEQ ID NO: 12201 - RNA, 22 nt, Artificial Sequence
  Synthetic
ggacacaauuuccugagaaaaa

SEQ ID NO: 12202 - RNA, 18 nt, Artificial Sequence
  Synthetic
guggacuguuuggaaaaa

SEQ ID NO: 12203 - RNA, 23 nt, Artificial Sequence
  Synthetic
gauuaguggacuguuuggaaaaa

SEQ ID NO: 12204 - RNA, 20 nt, Artificial Sequence
  Synthetic
gauuuguucugaaugaaaaa

SEQ ID NO: 12205 - RNA, 24 nt, Artificial Sequence
  Synthetic
gauugauuuguucugaaugaaaaa

SEQ ID NO: 12206 - RNA, 21 nt, Artificial Sequence
  Synthetic
gaaaacacaauagaugaaaaa

SEQ ID NO: 12207 - RNA, 18 nt, Artificial Sequence
  Synthetic
guauaaaaguaugaaaaa

SEQ ID NO: 12208 - RNA, 21 nt, Artificial Sequence
  Synthetic
gcaguauaaaaguaugaaaaa

SEQ ID NO: 12209 - RNA, 23 nt, Artificial Sequence
  Synthetic
gugcaguauaaaaguaugaaaaa

SEQ ID NO: 12210 - RNA, 23 nt, Artificial Sequence
  Synthetic
gaaauaguggaaauuaugaaaaa

SEQ ID NO: 12211 - RNA, 18 nt, Artificial Sequence
  Synthetic
guaaaaugugcauaaaaa

SEQ ID NO: 12212 - RNA, 19 nt, Artificial Sequence
  Synthetic
gguaaaaugugcauaaaaa

SEQ ID NO: 12213 - RNA, 23 nt, Artificial Sequence
  Synthetic
guuagguaaaaugugcauaaaaa

SEQ ID NO: 12214 - RNA, 18 nt, Artificial Sequence
  Synthetic
gucucagcaauauaaaaa

SEQ ID NO: 12215 - RNA, 19 nt, Artificial Sequence
  Synthetic
ggucucagcaauauaaaaa

SEQ ID NO: 12216 - RNA, 20 nt, Artificial Sequence
  Synthetic
gggucucagcaauauaaaaa

SEQ ID NO: 12217 - RNA, 24 nt, Artificial Sequence
  Synthetic
guauaugaauuuagaauauaaaaa

SEQ ID NO: 12218 - RNA, 18 nt, Artificial Sequence
  Synthetic
gcuaugguaaauuaaaaa

SEQ ID NO: 12219 - RNA, 21 nt, Artificial Sequence
  Synthetic
gaagcuaugguaaauuaaaaa

SEQ ID NO: 12220 - RNA, 22 nt, Artificial Sequence
  Synthetic
ggaagcuaugguaaauuaaaaa

SEQ ID NO: 12221 - RNA, 24 nt, Artificial Sequence
  Synthetic
gucacaggaaauuguuuuuaaaaa

SEQ ID NO: 12222 - RNA, 19 nt, Artificial Sequence
  Synthetic
gcucaaguuuaaaacaaaa

SEQ ID NO: 12223 - RNA, 24 nt, Artificial Sequence
  Synthetic
gcuaagcucaaguuuaaaacaaaa

SEQ ID NO: 12224 - RNA, 19 nt, Artificial Sequence
  Synthetic
gcuuuaggggagaacaaaa

SEQ ID NO: 12225 - RNA, 22 nt, Artificial Sequence
  Synthetic
gaagcuuuaggggagaacaaaa

SEQ ID NO: 12226 - RNA, 21 nt, Artificial Sequence
  Synthetic
gaaucaggucugaacacaaaa

SEQ ID NO: 12227 - RNA, 23 nt, Artificial Sequence
  Synthetic
gagaaucaggucugaacacaaaa

SEQ ID NO: 12228 - RNA, 20 nt, Artificial Sequence
  Synthetic
gauaauuugugggcacaaaa

SEQ ID NO: 12229 - RNA, 23 nt, Artificial Sequence
  Synthetic
gaugauaauuugugggcacaaaa

SEQ ID NO: 12230 - RNA, 24 nt, Artificial Sequence
  Synthetic
ggaugauaauuugugggcacaaaa

SEQ ID NO: 12231 - RNA, 19 nt, Artificial Sequence
  Synthetic
gaggucaaacuucacaaaa

SEQ ID NO: 12232 - RNA, 22 nt, Artificial Sequence
  Synthetic
guagaggucaaacuucacaaaa

SEQ ID NO: 12233 - RNA, 23 nt, Artificial Sequence
  Synthetic
gguagaggucaaacuucacaaaa

SEQ ID NO: 12234 - RNA, 22 nt, Artificial Sequence
  Synthetic
gccuuaucauauaaagacaaaa

SEQ ID NO: 12235 - RNA, 24 nt, Artificial Sequence
  Synthetic
gugccuuaucauauaaagacaaaa

SEQ ID NO: 12236 - RNA, 19 nt, Artificial Sequence
  Synthetic
guuaagccacuggacaaaa

SEQ ID NO: 12237 - RNA, 20 nt, Artificial Sequence
  Synthetic
gguuaagccacuggacaaaa

SEQ ID NO: 12238 - RNA, 24 nt, Artificial Sequence
  Synthetic
guuugguuaagccacuggacaaaa

SEQ ID NO: 12239 - RNA, 22 nt, Artificial Sequence
  Synthetic
gccaugcacaaucacuacaaaa

SEQ ID NO: 12240 - RNA, 18 nt, Artificial Sequence
  Synthetic
gaagguuagaggccaaaa

SEQ ID NO: 12241 - RNA, 19 nt, Artificial Sequence
  Synthetic
ggaagguuagaggccaaaa

SEQ ID NO: 12242 - RNA, 24 nt, Artificial Sequence
  Synthetic
gaacacuuguuuuccacuccaaaa

SEQ ID NO: 12243 - RNA, 23 nt, Artificial Sequence
  Synthetic
guauugguugaauaagagcaaaa

SEQ ID NO: 12244 - RNA, 21 nt, Artificial Sequence
  Synthetic
gccugcaaaggaggagcaaaa

SEQ ID NO: 12245 - RNA, 24 nt, Artificial Sequence
  Synthetic
guagccugcaaaggaggagcaaaa

SEQ ID NO: 12246 - RNA, 21 nt, Artificial Sequence
  Synthetic
guuaaacacuuguacgcaaaa

SEQ ID NO: 12247 - RNA, 24 nt, Artificial Sequence
  Synthetic
gaaacaaugucauauauugcaaaa

SEQ ID NO: 12248 - RNA, 24 nt, Artificial Sequence
  Synthetic
gcucuucaaggaaaaaaaucaaaa

SEQ ID NO: 12249 - RNA, 24 nt, Artificial Sequence
  Synthetic
guaccucauacucucaaaucaaaa

SEQ ID NO: 12250 - RNA, 18 nt, Artificial Sequence
  Synthetic
ggguuuaaacaaucaaaa

SEQ ID NO: 12251 - RNA, 20 nt, Artificial Sequence
  Synthetic
gaggguuuaaacaaucaaaa

SEQ ID NO: 12252 - RNA, 21 nt, Artificial Sequence
  Synthetic
ggaggguuuaaacaaucaaaa

SEQ ID NO: 12253 - RNA, 22 nt, Artificial Sequence
  Synthetic
gggaggguuuaaacaaucaaaa

SEQ ID NO: 12254 - RNA, 22 nt, Artificial Sequence
  Synthetic
gaauaaacaauguggaucaaaa

SEQ ID NO: 12255 - RNA, 24 nt, Artificial Sequence
  Synthetic
gugaauaaacaauguggaucaaaa

SEQ ID NO: 12256 - RNA, 24 nt, Artificial Sequence
  Synthetic
guaucaacaguguauugaucaaaa

SEQ ID NO: 12257 - RNA, 24 nt, Artificial Sequence
  Synthetic
gauuccccacaaauuugaagaaaa

SEQ ID NO: 12258 - RNA, 24 nt, Artificial Sequence
  Synthetic
guuaauugaugauaauuaagaaaa

SEQ ID NO: 12259 - RNA, 21 nt, Artificial Sequence
  Synthetic
gaaggcaaaauguucagaaaa

SEQ ID NO: 12260 - RNA, 24 nt, Artificial Sequence
  Synthetic
gcacuucuucagcaaaagagaaaa

SEQ ID NO: 12261 - RNA, 22 nt, Artificial Sequence
  Synthetic
guuacacacaggauggagaaaa

SEQ ID NO: 12262 - RNA, 24 nt, Artificial Sequence
  Synthetic
gaguuacacacaggauggagaaaa

SEQ ID NO: 12263 - RNA, 21 nt, Artificial Sequence
  Synthetic
gacauuucacauuugagaaaa

SEQ ID NO: 12264 - RNA, 22 nt, Artificial Sequence
  Synthetic
ggacauuucacauuugagaaaa

SEQ ID NO: 12265 - RNA, 18 nt, Artificial Sequence
  Synthetic
gucuccauauauagaaaa

SEQ ID NO: 12266 - RNA, 20 nt, Artificial Sequence
  Synthetic
gagucuccauauauagaaaa

SEQ ID NO: 12267 - RNA, 21 nt, Artificial Sequence
  Synthetic
ggagucuccauauauagaaaa

SEQ ID NO: 12268 - RNA, 24 nt, Artificial Sequence
  Synthetic
gcuggagucuccauauauagaaaa

SEQ ID NO: 12269 - RNA, 20 nt, Artificial Sequence
  Synthetic
guaggaaugggguuagaaaa

SEQ ID NO: 12270 - RNA, 22 nt, Artificial Sequence
  Synthetic
gaguaggaaugggguuagaaaa

SEQ ID NO: 12271 - RNA, 24 nt, Artificial Sequence
  Synthetic
gagaguaggaaugggguuagaaaa

SEQ ID NO: 12272 - RNA, 19 nt, Artificial Sequence
  Synthetic
gacagcacaucuaggaaaa

SEQ ID NO: 12273 - RNA, 20 nt, Artificial Sequence
  Synthetic
ggacagcacaucuaggaaaa

SEQ ID NO: 12274 - RNA, 21 nt, Artificial Sequence
  Synthetic
gggacagcacaucuaggaaaa

SEQ ID NO: 12275 - RNA, 24 nt, Artificial Sequence
  Synthetic
gaugggacagcacaucuaggaaaa

SEQ ID NO: 12276 - RNA, 18 nt, Artificial Sequence
  Synthetic
ggggugacuggaugaaaa

SEQ ID NO: 12277 - RNA, 23 nt, Artificial Sequence
  Synthetic
gaaucucuuuugcaguaugaaaa

SEQ ID NO: 12278 - RNA, 19 nt, Artificial Sequence
  Synthetic
guacugaauauuaugaaaa

SEQ ID NO: 12279 - RNA, 20 nt, Artificial Sequence
  Synthetic
gguacugaauauuaugaaaa

SEQ ID NO: 12280 - RNA, 23 nt, Artificial Sequence
  Synthetic
gccgguacugaauauuaugaaaa

SEQ ID NO: 12281 - RNA, 19 nt, Artificial Sequence
  Synthetic
gagcgcuaaaugcugaaaa

SEQ ID NO: 12282 - RNA, 20 nt, Artificial Sequence
  Synthetic
ggagcgcuaaaugcugaaaa

SEQ ID NO: 12283 - RNA, 22 nt, Artificial Sequence
  Synthetic
gaggagcgcuaaaugcugaaaa

SEQ ID NO: 12284 - RNA, 24 nt, Artificial Sequence
  Synthetic
gagaggagcgcuaaaugcugaaaa

SEQ ID NO: 12285 - RNA, 20 nt, Artificial Sequence
  Synthetic
guaaguccacagagugaaaa

SEQ ID NO: 12286 - RNA, 22 nt, Artificial Sequence
  Synthetic
gacauagcccaaacugugaaaa

SEQ ID NO: 12287 - RNA, 21 nt, Artificial Sequence
  Synthetic
gucugcucuuuugaaauaaaa

SEQ ID NO: 12288 - RNA, 22 nt, Artificial Sequence
  Synthetic
ggucugcucuuuugaaauaaaa

SEQ ID NO: 12289 - RNA, 22 nt, Artificial Sequence
  Synthetic
gaaaaauaugauuuaaauaaaa

SEQ ID NO: 12290 - RNA, 22 nt, Artificial Sequence
  Synthetic
gaaguugguuaaaauaauaaaa

SEQ ID NO: 12291 - RNA, 23 nt, Artificial Sequence
  Synthetic
gaauaacgacagcuuuaauaaaa

SEQ ID NO: 12292 - RNA, 22 nt, Artificial Sequence
  Synthetic
gcauuaaaaguaccucauaaaa

SEQ ID NO: 12293 - RNA, 19 nt, Artificial Sequence
  Synthetic
gaaaguuaugaggauaaaa

SEQ ID NO: 12294 - RNA, 20 nt, Artificial Sequence
  Synthetic
ggaaaguuaugaggauaaaa

SEQ ID NO: 12295 - RNA, 22 nt, Artificial Sequence
  Synthetic
guggaaaguuaugaggauaaaa

SEQ ID NO: 12296 - RNA, 22 nt, Artificial Sequence
  Synthetic
guaaaauaguggaaugauaaaa

SEQ ID NO: 12297 - RNA, 20 nt, Artificial Sequence
  Synthetic
guuauauaaaugugauaaaa

SEQ ID NO: 12298 - RNA, 24 nt, Artificial Sequence
  Synthetic
gaaaguuauauaaaugugauaaaa

SEQ ID NO: 12299 - RNA, 20 nt, Artificial Sequence
  Synthetic
gucugaguuuuaauauaaaa

SEQ ID NO: 12300 - RNA, 24 nt, Artificial Sequence
  Synthetic
gaaagucugaguuuuaauauaaaa

SEQ ID NO: 12301 - RNA, 23 nt, Artificial Sequence
  Synthetic
guacuaauucuuaucauauaaaa

SEQ ID NO: 12302 - RNA, 24 nt, Artificial Sequence
  Synthetic
gcuucaauuuuagaagauauaaaa

SEQ ID NO: 12303 - RNA, 21 nt, Artificial Sequence
  Synthetic
gauagggguacuuauauaaaa

SEQ ID NO: 12304 - RNA, 24 nt, Artificial Sequence
  Synthetic
gaugauagggguacuuauauaaaa

SEQ ID NO: 12305 - RNA, 21 nt, Artificial Sequence
  Synthetic
gcuuccuuugcaguuauaaaa

SEQ ID NO: 12306 - RNA, 23 nt, Artificial Sequence
  Synthetic
gcgcuuccuuugcaguuauaaaa

SEQ ID NO: 12307 - RNA, 24 nt, Artificial Sequence
  Synthetic
gacauucacaacauguuuauaaaa

SEQ ID NO: 12308 - RNA, 21 nt, Artificial Sequence
  Synthetic
guccaauuuagcauacuaaaa

SEQ ID NO: 12309 - RNA, 18 nt, Artificial Sequence
  Synthetic
gaagcuguuauccuaaaa

SEQ ID NO: 12310 - RNA, 20 nt, Artificial Sequence
  Synthetic
gcgaagcuguuauccuaaaa

SEQ ID NO: 12311 - RNA, 22 nt, Artificial Sequence
  Synthetic
gagcgaagcuguuauccuaaaa

SEQ ID NO: 12312 - RNA, 18 nt, Artificial Sequence
  Synthetic
guaccacugcuccuaaaa

SEQ ID NO: 12313 - RNA, 19 nt, Artificial Sequence
  Synthetic
gauuaaacauaagcuaaaa

SEQ ID NO: 12314 - RNA, 20 nt, Artificial Sequence
  Synthetic
ggauuaaacauaagcuaaaa

SEQ ID NO: 12315 - RNA, 21 nt, Artificial Sequence
  Synthetic
gggauuaaacauaagcuaaaa

SEQ ID NO: 12316 - RNA, 19 nt, Artificial Sequence
  Synthetic
gugacaaguauggcuaaaa

SEQ ID NO: 12317 - RNA, 21 nt, Artificial Sequence
  Synthetic
gugugacaaguauggcuaaaa

SEQ ID NO: 12318 - RNA, 24 nt, Artificial Sequence
  Synthetic
guuaauagccaaugcuggcuaaaa

SEQ ID NO: 12319 - RNA, 22 nt, Artificial Sequence
  Synthetic
guuuccucaucugaugcuaaaa

SEQ ID NO: 12320 - RNA, 18 nt, Artificial Sequence
  Synthetic
gcaguccuguuucuaaaa

SEQ ID NO: 12321 - RNA, 19 nt, Artificial Sequence
  Synthetic
gcuccaaugcccaguaaaa

SEQ ID NO: 12322 - RNA, 24 nt, Artificial Sequence
  Synthetic
gcuuagcuccaaugcccaguaaaa

SEQ ID NO: 12323 - RNA, 23 nt, Artificial Sequence
  Synthetic
guuauuuaagauuagcaguaaaa

SEQ ID NO: 12324 - RNA, 19 nt, Artificial Sequence
  Synthetic
guucaguugcaugguaaaa

SEQ ID NO: 12325 - RNA, 21 nt, Artificial Sequence
  Synthetic
guguucaguugcaugguaaaa

SEQ ID NO: 12326 - RNA, 18 nt, Artificial Sequence
  Synthetic
guuuccagagugguaaaa

SEQ ID NO: 12327 - RNA, 24 nt, Artificial Sequence
  Synthetic
gcucuuacagaguguucuguaaaa

SEQ ID NO: 12328 - RNA, 18 nt, Artificial Sequence
  Synthetic
gcucggaaaauuguaaaa

SEQ ID NO: 12329 - RNA, 24 nt, Artificial Sequence
  Synthetic
gcaauugcucggaaaauuguaaaa

SEQ ID NO: 12330 - RNA, 21 nt, Artificial Sequence
  Synthetic
gauuuuucaguagaauuaaaa

SEQ ID NO: 12331 - RNA, 22 nt, Artificial Sequence
  Synthetic
gccuuuuuaaggauacuuaaaa

SEQ ID NO: 12332 - RNA, 24 nt, Artificial Sequence
  Synthetic
gugccuuuuuaaggauacuuaaaa

SEQ ID NO: 12333 - RNA, 20 nt, Artificial Sequence
  Synthetic
gccucucggagaucuuaaaa

SEQ ID NO: 12334 - RNA, 21 nt, Artificial Sequence
  Synthetic
guuuuccaacuuaaguuaaaa

SEQ ID NO: 12335 - RNA, 24 nt, Artificial Sequence
  Synthetic
guaguuuuccaacuuaaguuaaaa

SEQ ID NO: 12336 - RNA, 19 nt, Artificial Sequence
  Synthetic
gcauaagaggaauuuaaaa

SEQ ID NO: 12337 - RNA, 24 nt, Artificial Sequence
  Synthetic
gcacuuuuauaaaauuauuuaaaa

SEQ ID NO: 12338 - RNA, 22 nt, Artificial Sequence
  Synthetic
gcucugcacauaaacuuuaaaa

SEQ ID NO: 12339 - RNA, 23 nt, Artificial Sequence
  Synthetic
ggcucugcacauaaacuuuaaaa

SEQ ID NO: 12340 - RNA, 21 nt, Artificial Sequence
  Synthetic
guaaguuuauucccuuuaaaa

SEQ ID NO: 12341 - RNA, 22 nt, Artificial Sequence
  Synthetic
guguauuugaaaaauuuuaaaa

SEQ ID NO: 12342 - RNA, 18 nt, Artificial Sequence
  Synthetic
guccuuaauauuuuaaaa

SEQ ID NO: 12343 - RNA, 20 nt, Artificial Sequence
  Synthetic
gaguccuuaauauuuuaaaa

SEQ ID NO: 12344 - RNA, 24 nt, Artificial Sequence
  Synthetic
guuuguuuauucaauuuuuuaaaa

SEQ ID NO: 12345 - RNA, 18 nt, Artificial Sequence
  Synthetic
gaucaagagaaaaacaaa

SEQ ID NO: 12346 - RNA, 19 nt, Artificial Sequence
  Synthetic
ggaucaagagaaaaacaaa

SEQ ID NO: 12347 - RNA, 20 nt, Artificial Sequence
  Synthetic
gggaucaagagaaaaacaaa

SEQ ID NO: 12348 - RNA, 21 nt, Artificial Sequence
  Synthetic
ggggaucaagagaaaaacaaa

SEQ ID NO: 12349 - RNA, 18 nt, Artificial Sequence
  Synthetic
guuccuuagagaaacaaa

SEQ ID NO: 12350 - RNA, 19 nt, Artificial Sequence
  Synthetic
gguuccuuagagaaacaaa

SEQ ID NO: 12351 - RNA, 20 nt, Artificial Sequence
  Synthetic
ggguuccuuagagaaacaaa

SEQ ID NO: 12352 - RNA, 20 nt, Artificial Sequence
  Synthetic
gcacucacuacugaaacaaa

SEQ ID NO: 12353 - RNA, 21 nt, Artificial Sequence
  Synthetic
ggcacucacuacugaaacaaa

SEQ ID NO: 12354 - RNA, 24 nt, Artificial Sequence
  Synthetic
gaaggcacucacuacugaaacaaa

SEQ ID NO: 12355 - RNA, 19 nt, Artificial Sequence
  Synthetic
gaagcuuucuuuaaacaaa

SEQ ID NO: 12356 - RNA, 24 nt, Artificial Sequence
  Synthetic
gccacuucacauaguaucaacaaa

SEQ ID NO: 12357 - RNA, 21 nt, Artificial Sequence
  Synthetic
gaauguaaccaucagaacaaa

SEQ ID NO: 12358 - RNA, 24 nt, Artificial Sequence
  Synthetic
gcagaauguaaccaucagaacaaa

SEQ ID NO: 12359 - RNA, 18 nt, Artificial Sequence
  Synthetic
gggaagugcugacacaaa

SEQ ID NO: 12360 - RNA, 24 nt, Artificial Sequence
  Synthetic
gaacuugggaagugcugacacaaa

SEQ ID NO: 12361 - RNA, 19 nt, Artificial Sequence
  Synthetic
gccgguguugauccacaaa

SEQ ID NO: 12362 - RNA, 20 nt, Artificial Sequence
  Synthetic
ggccgguguugauccacaaa

SEQ ID NO: 12363 - RNA, 21 nt, Artificial Sequence
  Synthetic
gaaagggaacuucaucacaaa

SEQ ID NO: 12364 - RNA, 24 nt, Artificial Sequence
  Synthetic
gaagaaagggaacuucaucacaaa

SEQ ID NO: 12365 - RNA, 18 nt, Artificial Sequence
  Synthetic
guguggagcuaagacaaa

SEQ ID NO: 12366 - RNA, 22 nt, Artificial Sequence
  Synthetic
gacuguguggagcuaagacaaa

SEQ ID NO: 12367 - RNA, 23 nt, Artificial Sequence
  Synthetic
ggacuguguggagcuaagacaaa

SEQ ID NO: 12368 - RNA, 24 nt, Artificial Sequence
  Synthetic
gggacuguguggagcuaagacaaa

SEQ ID NO: 12369 - RNA, 19 nt, Artificial Sequence
  Synthetic
gagcagauucccugacaaa

SEQ ID NO: 12370 - RNA, 21 nt, Artificial Sequence
  Synthetic
gugagcagauucccugacaaa

SEQ ID NO: 12371 - RNA, 21 nt, Artificial Sequence
  Synthetic
gcucugucacugauugacaaa

SEQ ID NO: 12372 - RNA, 23 nt, Artificial Sequence
  Synthetic
gagcucugucacugauugacaaa

SEQ ID NO: 12373 - RNA, 22 nt, Artificial Sequence
  Synthetic
gaacaaaauccccaaauacaaa

SEQ ID NO: 12374 - RNA, 24 nt, Artificial Sequence
  Synthetic
gaaaaaaaauucuucaaauacaaa

SEQ ID NO: 12375 - RNA, 23 nt, Artificial Sequence
  Synthetic
gaaauucuaaauauacauacaaa

SEQ ID NO: 12376 - RNA, 24 nt, Artificial Sequence
  Synthetic
ggaaauucuaaauauacauacaaa

SEQ ID NO: 12377 - RNA, 18 nt, Artificial Sequence
  Synthetic
gaugucuauucaaccaaa

SEQ ID NO: 12378 - RNA, 19 nt, Artificial Sequence
  Synthetic
ggaugucuauucaaccaaa

SEQ ID NO: 12379 - RNA, 22 nt, Artificial Sequence
  Synthetic
gcuggaugucuauucaaccaaa

SEQ ID NO: 12380 - RNA, 19 nt, Artificial Sequence
  Synthetic
gcuuauaaggaagaccaaa

SEQ ID NO: 12381 - RNA, 19 nt, Artificial Sequence
  Synthetic
gaauucguguucuaccaaa

SEQ ID NO: 12382 - RNA, 21 nt, Artificial Sequence
  Synthetic
gugaauucguguucuaccaaa

SEQ ID NO: 12383 - RNA, 23 nt, Artificial Sequence
  Synthetic
gagugaauucguguucuaccaaa

SEQ ID NO: 12384 - RNA, 20 nt, Artificial Sequence
  Synthetic
gacuguuuacugaacccaaa

SEQ ID NO: 12385 - RNA, 19 nt, Artificial Sequence
  Synthetic
gaaacgaaaucuccccaaa

SEQ ID NO: 12386 - RNA, 21 nt, Artificial Sequence
  Synthetic
gugaaacgaaaucuccccaaa

SEQ ID NO: 12387 - RNA, 21 nt, Artificial Sequence
  Synthetic
guaugugcuagguuucccaaa

SEQ ID NO: 12388 - RNA, 23 nt, Artificial Sequence
  Synthetic
guguaugugcuagguuucccaaa

SEQ ID NO: 12389 - RNA, 21 nt, Artificial Sequence
  Synthetic
gaacaaauagcuagagccaaa

SEQ ID NO: 12390 - RNA, 19 nt, Artificial Sequence
  Synthetic
gauagaugauggugccaaa

SEQ ID NO: 12391 - RNA, 20 nt, Artificial Sequence
  Synthetic
gauaauauugaucauccaaa

SEQ ID NO: 12392 - RNA, 21 nt, Artificial Sequence
  Synthetic
gaaauagccaacauauccaaa

SEQ ID NO: 12393 - RNA, 22 nt, Artificial Sequence
  Synthetic
gacauuacaacugguauccaaa

SEQ ID NO: 12394 - RNA, 24 nt, Artificial Sequence
  Synthetic
gagacauuacaacugguauccaaa

SEQ ID NO: 12395 - RNA, 21 nt, Artificial Sequence
  Synthetic
gcauucggcugccucuccaaa

SEQ ID NO: 12396 - RNA, 22 nt, Artificial Sequence
  Synthetic
gcaaaaugauccaaauuccaaa

SEQ ID NO: 12397 - RNA, 23 nt, Artificial Sequence
  Synthetic
ggcaaaaugauccaaauuccaaa

SEQ ID NO: 12398 - RNA, 22 nt, Artificial Sequence
  Synthetic
gcagaaaggccagaauuccaaa

SEQ ID NO: 12399 - RNA, 22 nt, Artificial Sequence
  Synthetic
gacuuuaaagagcuuuuccaaa

SEQ ID NO: 12400 - RNA, 19 nt, Artificial Sequence
  Synthetic
gugugguuguauaagcaaa

SEQ ID NO: 12401 - RNA, 20 nt, Artificial Sequence
  Synthetic
ggugugguuguauaagcaaa

SEQ ID NO: 12402 - RNA, 19 nt, Artificial Sequence
  Synthetic
gcuguaugcaggcagcaaa

SEQ ID NO: 12403 - RNA, 23 nt, Artificial Sequence
  Synthetic
gacgagauggggaaaagagcaaa

SEQ ID NO: 12404 - RNA, 18 nt, Artificial Sequence
  Synthetic
gccuugcuaaugagcaaa

SEQ ID NO: 12405 - RNA, 19 nt, Artificial Sequence
  Synthetic
ggccuugcuaaugagcaaa

SEQ ID NO: 12406 - RNA, 21 nt, Artificial Sequence
  Synthetic
gaggccuugcuaaugagcaaa

SEQ ID NO: 12407 - RNA, 22 nt, Artificial Sequence
  Synthetic
gcuuucagaaaauccuagcaaa

SEQ ID NO: 12408 - RNA, 23 nt, Artificial Sequence
  Synthetic
gaaacuaaaaggaauaccgcaaa

SEQ ID NO: 12409 - RNA, 24 nt, Artificial Sequence
  Synthetic
ggaaacuaaaaggaauaccgcaaa

SEQ ID NO: 12410 - RNA, 19 nt, Artificial Sequence
  Synthetic
gacucacaugcauggcaaa

SEQ ID NO: 12411 - RNA, 21 nt, Artificial Sequence
  Synthetic
gacagaagucacuauggcaaa

SEQ ID NO: 12412 - RNA, 18 nt, Artificial Sequence
  Synthetic
gagauacaaggaugcaaa

SEQ ID NO: 12413 - RNA, 18 nt, Artificial Sequence
  Synthetic
gguacuugaaacugcaaa

SEQ ID NO: 12414 - RNA, 22 nt, Artificial Sequence
  Synthetic
gaaagguacuugaaacugcaaa

SEQ ID NO: 12415 - RNA, 18 nt, Artificial Sequence
  Synthetic
guggacaggugcugcaaa

SEQ ID NO: 12416 - RNA, 20 nt, Artificial Sequence
  Synthetic
gaguggacaggugcugcaaa

SEQ ID NO: 12417 - RNA, 22 nt, Artificial Sequence
  Synthetic
gagaguggacaggugcugcaaa

SEQ ID NO: 12418 - RNA, 24 nt, Artificial Sequence
  Synthetic
gagagaguggacaggugcugcaaa

SEQ ID NO: 12419 - RNA, 20 nt, Artificial Sequence
  Synthetic
guaauuguacauucugcaaa

SEQ ID NO: 12420 - RNA, 21 nt, Artificial Sequence
  Synthetic
gguaauuguacauucugcaaa

SEQ ID NO: 12421 - RNA, 23 nt, Artificial Sequence
  Synthetic
gauauaaauuccaugggugcaaa

SEQ ID NO: 12422 - RNA, 22 nt, Artificial Sequence
  Synthetic
guacagaacagaacuuugcaaa

SEQ ID NO: 12423 - RNA, 18 nt, Artificial Sequence
  Synthetic
guaauaaugcuuugcaaa

SEQ ID NO: 12424 - RNA, 24 nt, Artificial Sequence
  Synthetic
gaaacuguaauaaugcuuugcaaa

SEQ ID NO: 12425 - RNA, 24 nt, Artificial Sequence
  Synthetic
gccaucagagaacugcaaaucaaa

SEQ ID NO: 12426 - RNA, 22 nt, Artificial Sequence
  Synthetic
gacacuugaaaggauaaucaaa

SEQ ID NO: 12427 - RNA, 24 nt, Artificial Sequence
  Synthetic
gagacacuugaaaggauaaucaaa

SEQ ID NO: 12428 - RNA, 18 nt, Artificial Sequence
  Synthetic
guuggcauaaccaucaaa

SEQ ID NO: 12429 - RNA, 19 nt, Artificial Sequence
  Synthetic
gguuggcauaaccaucaaa

SEQ ID NO: 12430 - RNA, 21 nt, Artificial Sequence
  Synthetic
gagguuggcauaaccaucaaa

SEQ ID NO: 12431 - RNA, 19 nt, Artificial Sequence
  Synthetic
guuucagauguaucucaaa

SEQ ID NO: 12432 - RNA, 22 nt, Artificial Sequence
  Synthetic
gauguuucagauguaucucaaa

SEQ ID NO: 12433 - RNA, 18 nt, Artificial Sequence
  Synthetic
gguucuaagaaauucaaa

SEQ ID NO: 12434 - RNA, 18 nt, Artificial Sequence
  Synthetic
gaaaauuuuacauucaaa

SEQ ID NO: 12435 - RNA, 20 nt, Artificial Sequence
  Synthetic
gauuugacuuuuacuucaaa

SEQ ID NO: 12436 - RNA, 22 nt, Artificial Sequence
  Synthetic
gugauuugacuuuuacuucaaa

SEQ ID NO: 12437 - RNA, 20 nt, Artificial Sequence
  Synthetic
gucuuaaggucgauuucaaa

SEQ ID NO: 12438 - RNA, 23 nt, Artificial Sequence
  Synthetic
gcaucacacuugcuaguuucaaa

SEQ ID NO: 12439 - RNA, 24 nt, Artificial Sequence
  Synthetic
ggcaucacacuugcuaguuucaaa

SEQ ID NO: 12440 - RNA, 18 nt, Artificial Sequence
  Synthetic
gaggccguucaaaagaaa

SEQ ID NO: 12441 - RNA, 23 nt, Artificial Sequence
  Synthetic
gauaugaggccguucaaaagaaa

SEQ ID NO: 12442 - RNA, 21 nt, Artificial Sequence
  Synthetic
gccugaaauuaagaaaagaaa

SEQ ID NO: 12443 - RNA, 24 nt, Artificial Sequence
  Synthetic
guugccugaaauuaagaaaagaaa

SEQ ID NO: 12444 - RNA, 22 nt, Artificial Sequence
  Synthetic
gacauauaaugaugaaaagaaa

SEQ ID NO: 12445 - RNA, 23 nt, Artificial Sequence
  Synthetic
gaauccuagauaauugaaagaaa

SEQ ID NO: 12446 - RNA, 24 nt, Artificial Sequence
  Synthetic
ggaauccuagauaauugaaagaaa

SEQ ID NO: 12447 - RNA, 24 nt, Artificial Sequence
  Synthetic
gccccuauuuuacuaguaaagaaa

SEQ ID NO: 12448 - RNA, 23 nt, Artificial Sequence
  Synthetic
gauauagaauaucuaccaagaaa

SEQ ID NO: 12449 - RNA, 24 nt, Artificial Sequence
  Synthetic
guaaauacaaccccaaucaagaaa

SEQ ID NO: 12450 - RNA, 20 nt, Artificial Sequence
  Synthetic
guuauuguuucaagaagaaa

SEQ ID NO: 12451 - RNA, 23 nt, Artificial Sequence
  Synthetic
gaaguuauuguuucaagaagaaa

SEQ ID NO: 12452 - RNA, 19 nt, Artificial Sequence
  Synthetic
gcagaagguggagaagaaa

SEQ ID NO: 12453 - RNA, 23 nt, Artificial Sequence
  Synthetic
gauugcagaagguggagaagaaa

SEQ ID NO: 12454 - RNA, 20 nt, Artificial Sequence
  Synthetic
guucucuugaugauaagaaa

SEQ ID NO: 12455 - RNA, 22 nt, Artificial Sequence
  Synthetic
guguucucuugaugauaagaaa

SEQ ID NO: 12456 - RNA, 24 nt, Artificial Sequence
  Synthetic
guguguucucuugaugauaagaaa

SEQ ID NO: 12457 - RNA, 24 nt, Artificial Sequence
  Synthetic
gcaauccagaucuucccuaagaaa

SEQ ID NO: 12458 - RNA, 22 nt, Artificial Sequence
  Synthetic
gacaagucaauuuccuaagaaa

SEQ ID NO: 12459 - RNA, 18 nt, Artificial Sequence
  Synthetic
guuaaggaaauuaagaaa

SEQ ID NO: 12460 - RNA, 19 nt, Artificial Sequence
  Synthetic
gguuaaggaaauuaagaaa

SEQ ID NO: 12461 - RNA, 22 nt, Artificial Sequence
  Synthetic
gaaaugcuacucaauuaagaaa

SEQ ID NO: 12462 - RNA, 23 nt, Artificial Sequence
  Synthetic
ggaaaugcuacucaauuaagaaa

SEQ ID NO: 12463 - RNA, 19 nt, Artificial Sequence
  Synthetic
gcaaaaucuucuuaagaaa

SEQ ID NO: 12464 - RNA, 20 nt, Artificial Sequence
  Synthetic
ggcaaaaucuucuuaagaaa

SEQ ID NO: 12465 - RNA, 21 nt, Artificial Sequence
  Synthetic
gggcaaaaucuucuuaagaaa

SEQ ID NO: 12466 - RNA, 22 nt, Artificial Sequence
  Synthetic
guccaaacaaguaaaacagaaa

SEQ ID NO: 12467 - RNA, 24 nt, Artificial Sequence
  Synthetic
guauguauuugagaagaacagaaa

SEQ ID NO: 12468 - RNA, 21 nt, Artificial Sequence
  Synthetic
gucaaacgaaaggaacagaaa

SEQ ID NO: 12469 - RNA, 19 nt, Artificial Sequence
  Synthetic
gauagugaggcagcagaaa

SEQ ID NO: 12470 - RNA, 20 nt, Artificial Sequence
  Synthetic
ggauagugaggcagcagaaa

SEQ ID NO: 12471 - RNA, 21 nt, Artificial Sequence
  Synthetic
gggauagugaggcagcagaaa

SEQ ID NO: 12472 - RNA, 20 nt, Artificial Sequence
  Synthetic
guaguauugauucucagaaa

SEQ ID NO: 12473 - RNA, 18 nt, Artificial Sequence
  Synthetic
gaacaagaaguucagaaa

SEQ ID NO: 12474 - RNA, 20 nt, Artificial Sequence
  Synthetic
gugaacaagaaguucagaaa

SEQ ID NO: 12475 - RNA, 23 nt, Artificial Sequence
  Synthetic
gaagugaacaagaaguucagaaa

SEQ ID NO: 12476 - RNA, 21 nt, Artificial Sequence
  Synthetic
gacauagcuaguguucagaaa

SEQ ID NO: 12477 - RNA, 23 nt, Artificial Sequence
  Synthetic
gugacauagcuaguguucagaaa

SEQ ID NO: 12478 - RNA, 19 nt, Artificial Sequence
  Synthetic
guggagcuuugaagagaaa

SEQ ID NO: 12479 - RNA, 24 nt, Artificial Sequence
  Synthetic
gaauuguggagcuuugaagagaaa

SEQ ID NO: 12480 - RNA, 22 nt, Artificial Sequence
  Synthetic
gcugaauauucuaauagagaaa

SEQ ID NO: 12481 - RNA, 24 nt, Artificial Sequence
  Synthetic
gcccuuuugagagugugggagaaa

SEQ ID NO: 12482 - RNA, 21 nt, Artificial Sequence
  Synthetic
gcuauagauuuuuaugagaaa

SEQ ID NO: 12483 - RNA, 23 nt, Artificial Sequence
  Synthetic
gaaaacacaaaguaauugagaaa

SEQ ID NO: 12484 - RNA, 24 nt, Artificial Sequence
  Synthetic
gcacaauuaaaacagggauagaaa

SEQ ID NO: 12485 - RNA, 24 nt, Artificial Sequence
  Synthetic
gaauccugguaacuaugauagaaa

SEQ ID NO: 12486 - RNA, 19 nt, Artificial Sequence
  Synthetic
gaaacaguauuuauagaaa

SEQ ID NO: 12487 - RNA, 20 nt, Artificial Sequence
  Synthetic
ggaaacaguauuuauagaaa

SEQ ID NO: 12488 - RNA, 19 nt, Artificial Sequence
  Synthetic
gagacuugggggguagaaa

SEQ ID NO: 12489 - RNA, 20 nt, Artificial Sequence
  Synthetic
ggagacuugggggguagaaa

SEQ ID NO: 12490 - RNA, 21 nt, Artificial Sequence
  Synthetic
gaaaauaaauccuuuuagaaa

SEQ ID NO: 12491 - RNA, 22 nt, Artificial Sequence
  Synthetic
ggaaaauaaauccuuuuagaaa

SEQ ID NO: 12492 - RNA, 23 nt, Artificial Sequence
  Synthetic
gggaaaauaaauccuuuuagaaa

SEQ ID NO: 12493 - RNA, 24 nt, Artificial Sequence
  Synthetic
ggggaaaauaaauccuuuuagaaa

SEQ ID NO: 12494 - RNA, 22 nt, Artificial Sequence
  Synthetic
guuucucuuuacaauaucgaaa

SEQ ID NO: 12495 - RNA, 19 nt, Artificial Sequence
  Synthetic
guacaaccagagaaggaaa

SEQ ID NO: 12496 - RNA, 22 nt, Artificial Sequence
  Synthetic
guucuugauuuuaguaaggaaa

SEQ ID NO: 12497 - RNA, 18 nt, Artificial Sequence
  Synthetic
gcuccucucuucaggaaa

SEQ ID NO: 12498 - RNA, 22 nt, Artificial Sequence
  Synthetic
gacugcuccucucuucaggaaa

SEQ ID NO: 12499 - RNA, 19 nt, Artificial Sequence
  Synthetic
gugugacgguaugaggaaa

SEQ ID NO: 12500 - RNA, 22 nt, Artificial Sequence
  Synthetic
gcugugugacgguaugaggaaa

SEQ ID NO: 12501 - RNA, 21 nt, Artificial Sequence
  Synthetic
gaauacaauuucaguaggaaa

SEQ ID NO: 12502 - RNA, 23 nt, Artificial Sequence
  Synthetic
gagaauacaauuucaguaggaaa

SEQ ID NO: 12503 - RNA, 24 nt, Artificial Sequence
  Synthetic
ggagaauacaauuucaguaggaaa

SEQ ID NO: 12504 - RNA, 22 nt, Artificial Sequence
  Synthetic
gagagaaccacaguuuaggaaa

SEQ ID NO: 12505 - RNA, 19 nt, Artificial Sequence
  Synthetic
gacaauugccacucggaaa

SEQ ID NO: 12506 - RNA, 23 nt, Artificial Sequence
  Synthetic
gacagaauagaacagaagggaaa

SEQ ID NO: 12507 - RNA, 19 nt, Artificial Sequence
  Synthetic
gaagaaccauacagggaaa

SEQ ID NO: 12508 - RNA, 23 nt, Artificial Sequence
  Synthetic
gcuagaagaaccauacagggaaa

SEQ ID NO: 12509 - RNA, 18 nt, Artificial Sequence
  Synthetic
gagaaucucugagggaaa

SEQ ID NO: 12510 - RNA, 19 nt, Artificial Sequence
  Synthetic
ggagaaucucugagggaaa

SEQ ID NO: 12511 - RNA, 21 nt, Artificial Sequence
  Synthetic
gaggagaaucucugagggaaa

SEQ ID NO: 12512 - RNA, 21 nt, Artificial Sequence
  Synthetic
gggaaaaaaaauaaggggaaa

SEQ ID NO: 12513 - RNA, 21 nt, Artificial Sequence
  Synthetic
gaaaaaaaugaagcauggaaa

SEQ ID NO: 12514 - RNA, 22 nt, Artificial Sequence
  Synthetic
ggaaaaaaaugaagcauggaaa

SEQ ID NO: 12515 - RNA, 24 nt, Artificial Sequence
  Synthetic
gaggaaaaaaaugaagcauggaaa

SEQ ID NO: 12516 - RNA, 20 nt, Artificial Sequence
  Synthetic
guauggagaggaguuggaaa

SEQ ID NO: 12517 - RNA, 22 nt, Artificial Sequence
  Synthetic
guguauggagaggaguuggaaa

SEQ ID NO: 12518 - RNA, 21 nt, Artificial Sequence
  Synthetic
gaaugucaccagauuuggaaa

SEQ ID NO: 12519 - RNA, 19 nt, Artificial Sequence
  Synthetic
gccuacuuucaaaaugaaa

SEQ ID NO: 12520 - RNA, 20 nt, Artificial Sequence
  Synthetic
guugccaauaugaaaugaaa

SEQ ID NO: 12521 - RNA, 21 nt, Artificial Sequence
  Synthetic
gguugccaauaugaaaugaaa

SEQ ID NO: 12522 - RNA, 18 nt, Artificial Sequence
  Synthetic
gugauauaauaaaugaaa

SEQ ID NO: 12523 - RNA, 19 nt, Artificial Sequence
  Synthetic
ggugauauaauaaaugaaa

SEQ ID NO: 12524 - RNA, 22 nt, Artificial Sequence
  Synthetic
gcaggugauauaauaaaugaaa

SEQ ID NO: 12525 - RNA, 24 nt, Artificial Sequence
  Synthetic
guauuucuucuccauaagaugaaa

SEQ ID NO: 12526 - RNA, 23 nt, Artificial Sequence
  Synthetic
guagcaagaaacaaaauaugaaa

SEQ ID NO: 12527 - RNA, 18 nt, Artificial Sequence
  Synthetic
ggagagaauuauaugaaa

SEQ ID NO: 12528 - RNA, 20 nt, Artificial Sequence
  Synthetic
gaggagagaauuauaugaaa

SEQ ID NO: 12529 - RNA, 22 nt, Artificial Sequence
  Synthetic
gugaggagagaauuauaugaaa

SEQ ID NO: 12530 - RNA, 20 nt, Artificial Sequence
  Synthetic
gauaaacugaucuuaugaaa

SEQ ID NO: 12531 - RNA, 21 nt, Artificial Sequence
  Synthetic
ggauaaacugaucuuaugaaa

SEQ ID NO: 12532 - RNA, 23 nt, Artificial Sequence
  Synthetic
guggauaaacugaucuuaugaaa

SEQ ID NO: 12533 - RNA, 24 nt, Artificial Sequence
  Synthetic
gguggauaaacugaucuuaugaaa

SEQ ID NO: 12534 - RNA, 23 nt, Artificial Sequence
  Synthetic
gucaauauuuuaaaagacugaaa

SEQ ID NO: 12535 - RNA, 23 nt, Artificial Sequence
  Synthetic
gcaauucuaaagugaagcugaaa

SEQ ID NO: 12536 - RNA, 22 nt, Artificial Sequence
  Synthetic
gaaucuacaaacugggcugaaa

SEQ ID NO: 12537 - RNA, 23 nt, Artificial Sequence
  Synthetic
gaaaauaaauucagaaucugaaa

SEQ ID NO: 12538 - RNA, 24 nt, Artificial Sequence
  Synthetic
ggaaaauaaauucagaaucugaaa

SEQ ID NO: 12539 - RNA, 20 nt, Artificial Sequence
  Synthetic
gcaauugagauccucugaaa

SEQ ID NO: 12540 - RNA, 22 nt, Artificial Sequence
  Synthetic
gagcaauugagauccucugaaa

SEQ ID NO: 12541 - RNA, 24 nt, Artificial Sequence
  Synthetic
gagagcaauugagauccucugaaa

SEQ ID NO: 12542 - RNA, 24 nt, Artificial Sequence
  Synthetic
gaaaaaauaaaacuucuugugaaa

SEQ ID NO: 12543 - RNA, 22 nt, Artificial Sequence
  Synthetic
gaauaacacccacuaauugaaa

SEQ ID NO: 12544 - RNA, 20 nt, Artificial Sequence
  Synthetic
guauugacauuaauuugaaa

SEQ ID NO: 12545 - RNA, 21 nt, Artificial Sequence
  Synthetic
gguauugacauuaauuugaaa

SEQ ID NO: 12546 - RNA, 22 nt, Artificial Sequence
  Synthetic
gacuaacacauaauguuugaaa

SEQ ID NO: 12547 - RNA, 23 nt, Artificial Sequence
  Synthetic
ggacuaacacauaauguuugaaa

SEQ ID NO: 12548 - RNA, 21 nt, Artificial Sequence
  Synthetic
gcaaguaaacauauuuugaaa

SEQ ID NO: 12549 - RNA, 20 nt, Artificial Sequence
  Synthetic
gcccugauagguuuuugaaa

SEQ ID NO: 12550 - RNA, 20 nt, Artificial Sequence
  Synthetic
gaaggauaacugaaaauaaa

SEQ ID NO: 12551 - RNA, 24 nt, Artificial Sequence
  Synthetic
gucugaaggauaacugaaaauaaa

SEQ ID NO: 12552 - RNA, 19 nt, Artificial Sequence
  Synthetic
gccugucuagccaaauaaa

SEQ ID NO: 12553 - RNA, 23 nt, Artificial Sequence
  Synthetic
gcacaaaaaauguagcaaauaaa

SEQ ID NO: 12554 - RNA, 24 nt, Artificial Sequence
  Synthetic
ggcacaaaaaauguagcaaauaaa

SEQ ID NO: 12555 - RNA, 18 nt, Artificial Sequence
  Synthetic
guauugucugugaauaaa

SEQ ID NO: 12556 - RNA, 22 nt, Artificial Sequence
  Synthetic
gauuguauugucugugaauaaa

SEQ ID NO: 12557 - RNA, 23 nt, Artificial Sequence
  Synthetic
ggauuguauugucugugaauaaa

SEQ ID NO: 12558 - RNA, 21 nt, Artificial Sequence
  Synthetic
guaauugagaaaaauaauaaa

SEQ ID NO: 12559 - RNA, 20 nt, Artificial Sequence
  Synthetic
guauauagguaugucauaaa

SEQ ID NO: 12560 - RNA, 21 nt, Artificial Sequence
  Synthetic
guuuucacccuuaaggauaaa

SEQ ID NO: 12561 - RNA, 22 nt, Artificial Sequence
  Synthetic
gguuuucacccuuaaggauaaa

SEQ ID NO: 12562 - RNA, 21 nt, Artificial Sequence
  Synthetic
gucucagacaccucauauaaa

SEQ ID NO: 12563 - RNA, 23 nt, Artificial Sequence
  Synthetic
gccuuaagaucacaauauauaaa

SEQ ID NO: 12564 - RNA, 24 nt, Artificial Sequence
  Synthetic
gucacuucaagacggcuauauaaa

SEQ ID NO: 12565 - RNA, 23 nt, Artificial Sequence
  Synthetic
guauucaaaguuauuuuuauaaa

SEQ ID NO: 12566 - RNA, 18 nt, Artificial Sequence
  Synthetic
gcuacugcaaaaacuaaa

SEQ ID NO: 12567 - RNA, 23 nt, Artificial Sequence
  Synthetic
guaaagcuacugcaaaaacuaaa

SEQ ID NO: 12568 - RNA, 20 nt, Artificial Sequence
  Synthetic
gauaagacagggaaacuaaa

SEQ ID NO: 12569 - RNA, 18 nt, Artificial Sequence
  Synthetic
gaugccuuauauacuaaa

SEQ ID NO: 12570 - RNA, 18 nt, Artificial Sequence
  Synthetic
guucaacaccauccuaaa

SEQ ID NO: 12571 - RNA, 22 nt, Artificial Sequence
  Synthetic
gcaaguucaacaccauccuaaa

SEQ ID NO: 12572 - RNA, 20 nt, Artificial Sequence
  Synthetic
guuuuacauuggaggcuaaa

SEQ ID NO: 12573 - RNA, 18 nt, Artificial Sequence
  Synthetic
gaaauucccguggcuaaa

SEQ ID NO: 12574 - RNA, 19 nt, Artificial Sequence
  Synthetic
ggaaauucccguggcuaaa

SEQ ID NO: 12575 - RNA, 24 nt, Artificial Sequence
  Synthetic
gcaauuucuuucaaaaaugcuaaa

SEQ ID NO: 12576 - RNA, 20 nt, Artificial Sequence
  Synthetic
gcugcuuuuaaacugcuaaa

SEQ ID NO: 12577 - RNA, 24 nt, Artificial Sequence
  Synthetic
guuaucagagacuguauugcuaaa

SEQ ID NO: 12578 - RNA, 21 nt, Artificial Sequence
  Synthetic
gaucuguuucgguuugcuaaa

SEQ ID NO: 12579 - RNA, 21 nt, Artificial Sequence
  Synthetic
gcaucacugauggacucuaaa

SEQ ID NO: 12580 - RNA, 19 nt, Artificial Sequence
  Synthetic
gucaugcuuuaccucuaaa

SEQ ID NO: 12581 - RNA, 20 nt, Artificial Sequence
  Synthetic
ggucaugcuuuaccucuaaa

SEQ ID NO: 12582 - RNA, 21 nt, Artificial Sequence
  Synthetic
gggucaugcuuuaccucuaaa

SEQ ID NO: 12583 - RNA, 23 nt, Artificial Sequence
  Synthetic
gugggucaugcuuuaccucuaaa

SEQ ID NO: 12584 - RNA, 23 nt, Artificial Sequence
  Synthetic
gaccaaucuugacguccucuaaa

SEQ ID NO: 12585 - RNA, 24 nt, Artificial Sequence
  Synthetic
gauuccuacuuuugcaguucuaaa

SEQ ID NO: 12586 - RNA, 23 nt, Artificial Sequence
  Synthetic
gcucaaaccucaauaguucuaaa

SEQ ID NO: 12587 - RNA, 20 nt, Artificial Sequence
  Synthetic
gcuguugcccaugaaguaaa

SEQ ID NO: 12588 - RNA, 23 nt, Artificial Sequence
  Synthetic
gcugcuguugcccaugaaguaaa

SEQ ID NO: 12589 - RNA, 24 nt, Artificial Sequence
  Synthetic
ggcugcuguugcccaugaaguaaa

SEQ ID NO: 12590 - RNA, 19 nt, Artificial Sequence
  Synthetic
gauuagacauugaaguaaa

SEQ ID NO: 12591 - RNA, 20 nt, Artificial Sequence
  Synthetic
ggauuagacauugaaguaaa

SEQ ID NO: 12592 - RNA, 23 nt, Artificial Sequence
  Synthetic
guuucuuaaaaaguauaaguaaa

SEQ ID NO: 12593 - RNA, 24 nt, Artificial Sequence
  Synthetic
gcaaaccaaaacaauuacaguaaa

SEQ ID NO: 12594 - RNA, 20 nt, Artificial Sequence
  Synthetic
gaucacuuuugacgaguaaa

SEQ ID NO: 12595 - RNA, 24 nt, Artificial Sequence
  Synthetic
gcaugaucacuuuugacgaguaaa

SEQ ID NO: 12596 - RNA, 18 nt, Artificial Sequence
  Synthetic
gaauaagcccugaguaaa

SEQ ID NO: 12597 - RNA, 19 nt, Artificial Sequence
  Synthetic
gucauuuugauugaguaaa

SEQ ID NO: 12598 - RNA, 24 nt, Artificial Sequence
  Synthetic
gacuccuggaaaauacaacguaaa

SEQ ID NO: 12599 - RNA, 20 nt, Artificial Sequence
  Synthetic
gauacagauuucaagguaaa

SEQ ID NO: 12600 - RNA, 18 nt, Artificial Sequence
  Synthetic
gcaggcaaguauuguaaa

SEQ ID NO: 12601 - RNA, 19 nt, Artificial Sequence
  Synthetic
ggcaggcaaguauuguaaa

SEQ ID NO: 12602 - RNA, 24 nt, Artificial Sequence
  Synthetic
gauccaagaaaggaaauuuguaaa

SEQ ID NO: 12603 - RNA, 24 nt, Artificial Sequence
  Synthetic
gaauuuagaguaugcuuuuguaaa

SEQ ID NO: 12604 - RNA, 23 nt, Artificial Sequence
  Synthetic
guuccauauucugguaaauuaaa

SEQ ID NO: 12605 - RNA, 24 nt, Artificial Sequence
  Synthetic
gguuccauauucugguaaauuaaa

SEQ ID NO: 12606 - RNA, 18 nt, Artificial Sequence
  Synthetic
gacaaauacucaauuaaa

SEQ ID NO: 12607 - RNA, 22 nt, Artificial Sequence
  Synthetic
gauauuauuugaucacauuaaa

SEQ ID NO: 12608 - RNA, 24 nt, Artificial Sequence
  Synthetic
gugauauuauuugaucacauuaaa

SEQ ID NO: 12609 - RNA, 23 nt, Artificial Sequence
  Synthetic
guaugcuaugaagaaagauuaaa

SEQ ID NO: 12610 - RNA, 24 nt, Artificial Sequence
  Synthetic
gcaaccuccaaaaaaagacuuaaa

SEQ ID NO: 12611 - RNA, 24 nt, Artificial Sequence
  Synthetic
gcaaaaagaucuagaaaucuuaaa

SEQ ID NO: 12612 - RNA, 22 nt, Artificial Sequence
  Synthetic
gaccuuguauuuuaaaguuaaa

SEQ ID NO: 12613 - RNA, 18 nt, Artificial Sequence
  Synthetic
gaagaaggucagguuaaa

SEQ ID NO: 12614 - RNA, 21 nt, Artificial Sequence
  Synthetic
gaagaagaaggucagguuaaa

SEQ ID NO: 12615 - RNA, 23 nt, Artificial Sequence
  Synthetic
gugaagaagaaggucagguuaaa

SEQ ID NO: 12616 - RNA, 24 nt, Artificial Sequence
  Synthetic
guacucaacauuuucucuguuaaa

SEQ ID NO: 12617 - RNA, 22 nt, Artificial Sequence
  Synthetic
guauuuguauauauguguuaaa

SEQ ID NO: 12618 - RNA, 21 nt, Artificial Sequence
  Synthetic
gcuuuccuuuuaaaauuuaaa

SEQ ID NO: 12619 - RNA, 18 nt, Artificial Sequence
  Synthetic
gcaauuuuucccuuuaaa

SEQ ID NO: 12620 - RNA, 21 nt, Artificial Sequence
  Synthetic
guugcaauuuuucccuuuaaa

SEQ ID NO: 12621 - RNA, 22 nt, Artificial Sequence
  Synthetic
gguugcaauuuuucccuuuaaa

SEQ ID NO: 12622 - RNA, 22 nt, Artificial Sequence
  Synthetic
gacaaaugcaacaacguuuaaa

SEQ ID NO: 12623 - RNA, 22 nt, Artificial Sequence
  Synthetic
guaucuugggauaggguuuaaa

SEQ ID NO: 12624 - RNA, 23 nt, Artificial Sequence
  Synthetic
guaagguacuggagcauuuuaaa

SEQ ID NO: 12625 - RNA, 24 nt, Artificial Sequence
  Synthetic
gguaagguacuggagcauuuuaaa

SEQ ID NO: 12626 - RNA, 22 nt, Artificial Sequence
  Synthetic
gaaaaagccauuuuauuuuaaa

SEQ ID NO: 12627 - RNA, 20 nt, Artificial Sequence
  Synthetic
gauaagaacuuggaaaacaa

SEQ ID NO: 12628 - RNA, 20 nt, Artificial Sequence
  Synthetic
gacuguucaaaugaaaacaa

SEQ ID NO: 12629 - RNA, 18 nt, Artificial Sequence
  Synthetic
gaaaauauugaacaacaa

SEQ ID NO: 12630 - RNA, 19 nt, Artificial Sequence
  Synthetic
gaaauuggcuucucaacaa

SEQ ID NO: 12631 - RNA, 22 nt, Artificial Sequence
  Synthetic
gacgaaauuggcuucucaacaa

SEQ ID NO: 12632 - RNA, 18 nt, Artificial Sequence
  Synthetic
gauaggaauggucaacaa

SEQ ID NO: 12633 - RNA, 23 nt, Artificial Sequence
  Synthetic
gcacugauaggaauggucaacaa

SEQ ID NO: 12634 - RNA, 24 nt, Artificial Sequence
  Synthetic
gccuagagcacauucagagaacaa

SEQ ID NO: 12635 - RNA, 18 nt, Artificial Sequence
  Synthetic
ggauauccuuuagaacaa

SEQ ID NO: 12636 - RNA, 23 nt, Artificial Sequence
  Synthetic
gaaauacacuuagcaaugaacaa

SEQ ID NO: 12637 - RNA, 18 nt, Artificial Sequence
  Synthetic
ggcuaggaugaugaacaa

SEQ ID NO: 12638 - RNA, 23 nt, Artificial Sequence
  Synthetic
guuauggcuaggaugaugaacaa

SEQ ID NO: 12639 - RNA, 21 nt, Artificial Sequence
  Synthetic
gcaagucaucaaugugaacaa

SEQ ID NO: 12640 - RNA, 20 nt, Artificial Sequence
  Synthetic
gaaagaguacaguugaacaa

SEQ ID NO: 12641 - RNA, 24 nt, Artificial Sequence
  Synthetic
gaaagaaagaguacaguugaacaa

SEQ ID NO: 12642 - RNA, 18 nt, Artificial Sequence
  Synthetic
gauugaagcuuugaacaa

SEQ ID NO: 12643 - RNA, 19 nt, Artificial Sequence
  Synthetic
gacaauuuucugauaacaa

SEQ ID NO: 12644 - RNA, 24 nt, Artificial Sequence
  Synthetic
gaacagacaauuuucugauaacaa

SEQ ID NO: 12645 - RNA, 18 nt, Artificial Sequence
  Synthetic
ggaauugucuauuaacaa

SEQ ID NO: 12646 - RNA, 19 nt, Artificial Sequence
  Synthetic
guuuaauaacuacacacaa

SEQ ID NO: 12647 - RNA, 23 nt, Artificial Sequence
  Synthetic
gauuguuuaauaacuacacacaa

SEQ ID NO: 12648 - RNA, 20 nt, Artificial Sequence
  Synthetic
gcugcuaaugggagacacaa

SEQ ID NO: 12649 - RNA, 21 nt, Artificial Sequence
  Synthetic
ggcugcuaaugggagacacaa

SEQ ID NO: 12650 - RNA, 24 nt, Artificial Sequence
  Synthetic
gcuggcugcuaaugggagacacaa

SEQ ID NO: 12651 - RNA, 19 nt, Artificial Sequence
  Synthetic
gccauuuaagaauacacaa

SEQ ID NO: 12652 - RNA, 22 nt, Artificial Sequence
  Synthetic
gaagccauuuaagaauacacaa

SEQ ID NO: 12653 - RNA, 22 nt, Artificial Sequence
  Synthetic
gaauaaauuacuacuuacacaa

SEQ ID NO: 12654 - RNA, 19 nt, Artificial Sequence
  Synthetic
gaaaaaucacaaaccacaa

SEQ ID NO: 12655 - RNA, 20 nt, Artificial Sequence
  Synthetic
ggaaaaaucacaaaccacaa

SEQ ID NO: 12656 - RNA, 18 nt, Artificial Sequence
  Synthetic
gccaucuuugugccacaa

SEQ ID NO: 12657 - RNA, 24 nt, Artificial Sequence
  Synthetic
gcaaaccuaggauuccacgcacaa

SEQ ID NO: 12658 - RNA, 20 nt, Artificial Sequence
  Synthetic
gaaaugacauaucaucacaa

SEQ ID NO: 12659 - RNA, 21 nt, Artificial Sequence
  Synthetic
ggaaaugacauaucaucacaa

SEQ ID NO: 12660 - RNA, 19 nt, Artificial Sequence
  Synthetic
guuggauacagacucacaa

SEQ ID NO: 12661 - RNA, 22 nt, Artificial Sequence
  Synthetic
gcaguuggauacagacucacaa

SEQ ID NO: 12662 - RNA, 23 nt, Artificial Sequence
  Synthetic
guauguccucaagaagcucacaa

SEQ ID NO: 12663 - RNA, 19 nt, Artificial Sequence
  Synthetic
gcagaugaggaauucacaa

SEQ ID NO: 12664 - RNA, 20 nt, Artificial Sequence
  Synthetic
ggcagaugaggaauucacaa

SEQ ID NO: 12665 - RNA, 21 nt, Artificial Sequence
  Synthetic
gggcagaugaggaauucacaa

SEQ ID NO: 12666 - RNA, 24 nt, Artificial Sequence
  Synthetic
gaagggcagaugaggaauucacaa

SEQ ID NO: 12667 - RNA, 21 nt, Artificial Sequence
  Synthetic
gcuaaggaaagaacuucacaa

SEQ ID NO: 12668 - RNA, 19 nt, Artificial Sequence
  Synthetic
gucacuuuagucuucacaa

SEQ ID NO: 12669 - RNA, 20 nt, Artificial Sequence
  Synthetic
gcagaauaugucaaagacaa

SEQ ID NO: 12670 - RNA, 18 nt, Artificial Sequence
  Synthetic
gagaggauaacaagacaa

SEQ ID NO: 12671 - RNA, 22 nt, Artificial Sequence
  Synthetic
gacagagaggauaacaagacaa

SEQ ID NO: 12672 - RNA, 23 nt, Artificial Sequence
  Synthetic
ggacagagaggauaacaagacaa

SEQ ID NO: 12673 - RNA, 22 nt, Artificial Sequence
  Synthetic
gaauacagaugguacaagacaa

SEQ ID NO: 12674 - RNA, 23 nt, Artificial Sequence
  Synthetic
ggaauacagaugguacaagacaa

SEQ ID NO: 12675 - RNA, 20 nt, Artificial Sequence
  Synthetic
gucaaccaucauuaagacaa

SEQ ID NO: 12676 - RNA, 22 nt, Artificial Sequence
  Synthetic
gagucaaccaucauuaagacaa

SEQ ID NO: 12677 - RNA, 24 nt, Artificial Sequence
  Synthetic
gcgagucaaccaucauuaagacaa

SEQ ID NO: 12678 - RNA, 19 nt, Artificial Sequence
  Synthetic
guucuaugaauccagacaa

SEQ ID NO: 12679 - RNA, 21 nt, Artificial Sequence
  Synthetic
gaguucuaugaauccagacaa

SEQ ID NO: 12680 - RNA, 23 nt, Artificial Sequence
  Synthetic
gagaguucuaugaauccagacaa

SEQ ID NO: 12681 - RNA, 18 nt, Artificial Sequence
  Synthetic
gaaagaaacuaacgacaa

SEQ ID NO: 12682 - RNA, 24 nt, Artificial Sequence
  Synthetic
guaucagaaagaaacuaacgacaa

SEQ ID NO: 12683 - RNA, 21 nt, Artificial Sequence
  Synthetic
gcucucuugaugagacgacaa

SEQ ID NO: 12684 - RNA, 18 nt, Artificial Sequence
  Synthetic
gaaacucugaaaggacaa

SEQ ID NO: 12685 - RNA, 24 nt, Artificial Sequence
  Synthetic
gauuuugaaacucugaaaggacaa

SEQ ID NO: 12686 - RNA, 19 nt, Artificial Sequence
  Synthetic
guauacuuuugaaugacaa

SEQ ID NO: 12687 - RNA, 21 nt, Artificial Sequence
  Synthetic
guuuuuuacauacuaugacaa

SEQ ID NO: 12688 - RNA, 19 nt, Artificial Sequence
  Synthetic
gaacauauugaccugacaa

SEQ ID NO: 12689 - RNA, 20 nt, Artificial Sequence
  Synthetic
ggaacauauugaccugacaa

SEQ ID NO: 12690 - RNA, 21 nt, Artificial Sequence
  Synthetic
gucucauucuacagcugacaa

SEQ ID NO: 12691 - RNA, 22 nt, Artificial Sequence
  Synthetic
ggucucauucuacagcugacaa

SEQ ID NO: 12692 - RNA, 19 nt, Artificial Sequence
  Synthetic
gaauuuggagagcugacaa

SEQ ID NO: 12693 - RNA, 20 nt, Artificial Sequence
  Synthetic
ggaauuuggagagcugacaa

SEQ ID NO: 12694 - RNA, 23 nt, Artificial Sequence
  Synthetic
guuggaauuuggagagcugacaa

SEQ ID NO: 12695 - RNA, 19 nt, Artificial Sequence
  Synthetic
guggaaaauccugugacaa

SEQ ID NO: 12696 - RNA, 19 nt, Artificial Sequence
  Synthetic
gauggauguguuuugacaa

SEQ ID NO: 12697 - RNA, 20 nt, Artificial Sequence
  Synthetic
ggauggauguguuuugacaa

SEQ ID NO: 12698 - RNA, 24 nt, Artificial Sequence
  Synthetic
guuuggauggauguguuuugacaa

SEQ ID NO: 12699 - RNA, 18 nt, Artificial Sequence
  Synthetic
gauucagauuaaauacaa

SEQ ID NO: 12700 - RNA, 20 nt, Artificial Sequence
  Synthetic
gauugcguauauacauacaa

SEQ ID NO: 12701 - RNA, 18 nt, Artificial Sequence
  Synthetic
gauaaauuaaggauacaa

SEQ ID NO: 12702 - RNA, 18 nt, Artificial Sequence
  Synthetic
guuaucacuuugauacaa

SEQ ID NO: 12703 - RNA, 24 nt, Artificial Sequence
  Synthetic
guauauguuaucacuuugauacaa

SEQ ID NO: 12704 - RNA, 18 nt, Artificial Sequence
  Synthetic
gcaaagauaaauauacaa

SEQ ID NO: 12705 - RNA, 23 nt, Artificial Sequence
  Synthetic
gauuagcaaagauaaauauacaa

SEQ ID NO: 12706 - RNA, 18 nt, Artificial Sequence
  Synthetic
gacaauggauauauacaa

SEQ ID NO: 12707 - RNA, 19 nt, Artificial Sequence
  Synthetic
ggacaauggauauauacaa

SEQ ID NO: 12708 - RNA, 24 nt, Artificial Sequence
  Synthetic
gucuuggacaauggauauauacaa

SEQ ID NO: 12709 - RNA, 24 nt, Artificial Sequence
  Synthetic
gacuuuaauggucagucacuacaa

SEQ ID NO: 12710 - RNA, 18 nt, Artificial Sequence
  Synthetic
gaauaauaauaucuacaa

SEQ ID NO: 12711 - RNA, 23 nt, Artificial Sequence
  Synthetic
gaugacaaacaaaaggucuacaa

SEQ ID NO: 12712 - RNA, 22 nt, Artificial Sequence
  Synthetic
guuuuacuuaagacaaguacaa

SEQ ID NO: 12713 - RNA, 21 nt, Artificial Sequence
  Synthetic
guuugcaaacuugcuguacaa

SEQ ID NO: 12714 - RNA, 22 nt, Artificial Sequence
  Synthetic
gguuugcaaacuugcuguacaa

SEQ ID NO: 12715 - RNA, 24 nt, Artificial Sequence
  Synthetic
gugguuugcaaacuugcuguacaa

SEQ ID NO: 12716 - RNA, 19 nt, Artificial Sequence
  Synthetic
gagaacguaaaaauuacaa

SEQ ID NO: 12717 - RNA, 20 nt, Artificial Sequence
  Synthetic
ggagaacguaaaaauuacaa

SEQ ID NO: 12718 - RNA, 21 nt, Artificial Sequence
  Synthetic
gauuuucuucugcaauuacaa

SEQ ID NO: 12719 - RNA, 19 nt, Artificial Sequence
  Synthetic
gauagucccuagauuacaa

SEQ ID NO: 12720 - RNA, 18 nt, Artificial Sequence
  Synthetic
gaauucccaaucuuacaa

SEQ ID NO: 12721 - RNA, 21 nt, Artificial Sequence
  Synthetic
gaagcaagaaugaaaaaccaa

SEQ ID NO: 12722 - RNA, 22 nt, Artificial Sequence
  Synthetic
ggaagcaagaaugaaaaaccaa

SEQ ID NO: 12723 - RNA, 18 nt, Artificial Sequence
  Synthetic
gaaaacuacaagaaccaa

SEQ ID NO: 12724 - RNA, 21 nt, Artificial Sequence
  Synthetic
gaagaaaacuacaagaaccaa

SEQ ID NO: 12725 - RNA, 24 nt, Artificial Sequence
  Synthetic
gaaccuuugaacgguuuuaaccaa

SEQ ID NO: 12726 - RNA, 22 nt, Artificial Sequence
  Synthetic
gcaugaacuaacuugucaccaa

SEQ ID NO: 12727 - RNA, 23 nt, Artificial Sequence
  Synthetic
gcaaaaauccacauauucaccaa

SEQ ID NO: 12728 - RNA, 19 nt, Artificial Sequence
  Synthetic
guacauaaaaacagaccaa

SEQ ID NO: 12729 - RNA, 23 nt, Artificial Sequence
  Synthetic
gcaaguacauaaaaacagaccaa

SEQ ID NO: 12730 - RNA, 24 nt, Artificial Sequence
  Synthetic
ggcaaguacauaaaaacagaccaa

SEQ ID NO: 12731 - RNA, 18 nt, Artificial Sequence
  Synthetic
gcagagaaaagcuaccaa

SEQ ID NO: 12732 - RNA, 20 nt, Artificial Sequence
  Synthetic
gagcagagaaaagcuaccaa

SEQ ID NO: 12733 - RNA, 19 nt, Artificial Sequence
  Synthetic
gcuggaggugaauuaccaa

SEQ ID NO: 12734 - RNA, 21 nt, Artificial Sequence
  Synthetic
gugcuggaggugaauuaccaa

SEQ ID NO: 12735 - RNA, 24 nt, Artificial Sequence
  Synthetic
gaugugcuggaggugaauuaccaa

SEQ ID NO: 12736 - RNA, 19 nt, Artificial Sequence
  Synthetic
gaugucauaauuuuaccaa

SEQ ID NO: 12737 - RNA, 22 nt, Artificial Sequence
  Synthetic
guugaugucauaauuuuaccaa

SEQ ID NO: 12738 - RNA, 19 nt, Artificial Sequence
  Synthetic
gaaccacccaauuacccaa

SEQ ID NO: 12739 - RNA, 23 nt, Artificial Sequence
  Synthetic
guuagaaccacccaauuacccaa

SEQ ID NO: 12740 - RNA, 18 nt, Artificial Sequence
  Synthetic
ggcccagugucaccccaa

SEQ ID NO: 12741 - RNA, 19 nt, Artificial Sequence
  Synthetic
gggcccagugucaccccaa

SEQ ID NO: 12742 - RNA, 23 nt, Artificial Sequence
  Synthetic
gaaauuuagauucuugaccccaa

SEQ ID NO: 12743 - RNA, 20 nt, Artificial Sequence
  Synthetic
gcuuggccauggaaagccaa

SEQ ID NO: 12744 - RNA, 22 nt, Artificial Sequence
  Synthetic
gugcuuggccauggaaagccaa

SEQ ID NO: 12745 - RNA, 19 nt, Artificial Sequence
  Synthetic
gauaucucuuaugagccaa

SEQ ID NO: 12746 - RNA, 20 nt, Artificial Sequence
  Synthetic
ggauaucucuuaugagccaa

SEQ ID NO: 12747 - RNA, 23 nt, Artificial Sequence
  Synthetic
gaaauaaaacuugcuuuagccaa

SEQ ID NO: 12748 - RNA, 24 nt, Artificial Sequence
  Synthetic
ggaaauaaaacuugcuuuagccaa

SEQ ID NO: 12749 - RNA, 23 nt, Artificial Sequence
  Synthetic
gcauuuuugaugauucaggccaa

SEQ ID NO: 12750 - RNA, 24 nt, Artificial Sequence
  Synthetic
gauauaucauccucauggggccaa

SEQ ID NO: 12751 - RNA, 18 nt, Artificial Sequence
  Synthetic
gugcauaccauaugccaa

SEQ ID NO: 12752 - RNA, 20 nt, Artificial Sequence
  Synthetic
gagugcauaccauaugccaa

SEQ ID NO: 12753 - RNA, 21 nt, Artificial Sequence
  Synthetic
gaauuuacuaaauagugccaa

SEQ ID NO: 12754 - RNA, 18 nt, Artificial Sequence
  Synthetic
gugacaagauccauccaa

SEQ ID NO: 12755 - RNA, 24 nt, Artificial Sequence
  Synthetic
gaccaugugacaagauccauccaa

SEQ ID NO: 12756 - RNA, 19 nt, Artificial Sequence
  Synthetic
guucauuucucugauccaa

SEQ ID NO: 12757 - RNA, 24 nt, Artificial Sequence
  Synthetic
gucuaguucauuucucugauccaa

SEQ ID NO: 12758 - RNA, 18 nt, Artificial Sequence
  Synthetic
gagcaucuguauauccaa

SEQ ID NO: 12759 - RNA, 22 nt, Artificial Sequence
  Synthetic
guauagaagaaauguucuccaa

SEQ ID NO: 12760 - RNA, 23 nt, Artificial Sequence
  Synthetic
gguauagaagaaauguucuccaa

SEQ ID NO: 12761 - RNA, 20 nt, Artificial Sequence
  Synthetic
guagcuauagaaucuuccaa

SEQ ID NO: 12762 - RNA, 23 nt, Artificial Sequence
  Synthetic
gaacacaaaaaagaauuuuccaa

SEQ ID NO: 12763 - RNA, 18 nt, Artificial Sequence
  Synthetic
gguuuauuucaaaagcaa

SEQ ID NO: 12764 - RNA, 21 nt, Artificial Sequence
  Synthetic
guauacauggagcauaagcaa

SEQ ID NO: 12765 - RNA, 22 nt, Artificial Sequence
  Synthetic
gguauacauggagcauaagcaa

SEQ ID NO: 12766 - RNA, 18 nt, Artificial Sequence
  Synthetic
gagugggucuuuaagcaa

SEQ ID NO: 12767 - RNA, 21 nt, Artificial Sequence
  Synthetic
gaucugugaaagcagcagcaa

SEQ ID NO: 12768 - RNA, 22 nt, Artificial Sequence
  Synthetic
gucuuauuuaucagcucagcaa

SEQ ID NO: 12769 - RNA, 24 nt, Artificial Sequence
  Synthetic
gugucuuauuuaucagcucagcaa

SEQ ID NO: 12770 - RNA, 21 nt, Artificial Sequence
  Synthetic
guucacguucuaucagagcaa

SEQ ID NO: 12771 - RNA, 19 nt, Artificial Sequence
  Synthetic
gaaagaacuuacggagcaa

SEQ ID NO: 12772 - RNA, 18 nt, Artificial Sequence
  Synthetic
gccugcaagacugagcaa

SEQ ID NO: 12773 - RNA, 19 nt, Artificial Sequence
  Synthetic
gcacagcugagucuagcaa

SEQ ID NO: 12774 - RNA, 21 nt, Artificial Sequence
  Synthetic
gagcacagcugagucuagcaa

SEQ ID NO: 12775 - RNA, 21 nt, Artificial Sequence
  Synthetic
gauaggaauugaggaaggcaa

SEQ ID NO: 12776 - RNA, 22 nt, Artificial Sequence
  Synthetic
ggauaggaauugaggaaggcaa

SEQ ID NO: 12777 - RNA, 20 nt, Artificial Sequence
  Synthetic
gaauaucuaucuucaggcaa

SEQ ID NO: 12778 - RNA, 19 nt, Artificial Sequence
  Synthetic
gcaagaacauuagaggcaa

SEQ ID NO: 12779 - RNA, 20 nt, Artificial Sequence
  Synthetic
ggcaagaacauuagaggcaa

SEQ ID NO: 12780 - RNA, 22 nt, Artificial Sequence
  Synthetic
gaggcaagaacauuagaggcaa

SEQ ID NO: 12781 - RNA, 18 nt, Artificial Sequence
  Synthetic
ggugccaugaugaggcaa

SEQ ID NO: 12782 - RNA, 21 nt, Artificial Sequence
  Synthetic
gcaggugccaugaugaggcaa

SEQ ID NO: 12783 - RNA, 19 nt, Artificial Sequence
  Synthetic
gauuucaugcuguaggcaa

SEQ ID NO: 12784 - RNA, 20 nt, Artificial Sequence
  Synthetic
gcagucaauaaaaugggcaa

SEQ ID NO: 12785 - RNA, 20 nt, Artificial Sequence
  Synthetic
guaguuuaaaccuugggcaa

SEQ ID NO: 12786 - RNA, 20 nt, Artificial Sequence
  Synthetic
gacugguaacaaaaaugcaa

SEQ ID NO: 12787 - RNA, 22 nt, Artificial Sequence
  Synthetic
gugacugguaacaaaaaugcaa

SEQ ID NO: 12788 - RNA, 21 nt, Artificial Sequence
  Synthetic
gaaugacuuuucucugugcaa

SEQ ID NO: 12789 - RNA, 23 nt, Artificial Sequence
  Synthetic
gugaaugacuuuucucugugcaa

SEQ ID NO: 12790 - RNA, 20 nt, Artificial Sequence
  Synthetic
gauagucauuuacauugcaa

SEQ ID NO: 12791 - RNA, 20 nt, Artificial Sequence
  Synthetic
gcagaaguaguuuauugcaa

SEQ ID NO: 12792 - RNA, 22 nt, Artificial Sequence
  Synthetic
gaagagcacagaaaaaaaucaa

SEQ ID NO: 12793 - RNA, 23 nt, Artificial Sequence
  Synthetic
ggaagagcacagaaaaaaaucaa

SEQ ID NO: 12794 - RNA, 19 nt, Artificial Sequence
  Synthetic
gagcacacagcagaaucaa

SEQ ID NO: 12795 - RNA, 18 nt, Artificial Sequence
  Synthetic
gauuccaggacacaucaa

SEQ ID NO: 12796 - RNA, 20 nt, Artificial Sequence
  Synthetic
gugauuccaggacacaucaa

SEQ ID NO: 12797 - RNA, 23 nt, Artificial Sequence
  Synthetic
gaugugauuccaggacacaucaa

SEQ ID NO: 12798 - RNA, 24 nt, Artificial Sequence
  Synthetic
ggaugugauuccaggacacaucaa

SEQ ID NO: 12799 - RNA, 20 nt, Artificial Sequence
  Synthetic
gacaaagugacaaucaucaa

SEQ ID NO: 12800 - RNA, 22 nt, Artificial Sequence
  Synthetic
gugacaaagugacaaucaucaa

SEQ ID NO: 12801 - RNA, 22 nt, Artificial Sequence
  Synthetic
gaaaacauaguugcuauaucaa

SEQ ID NO: 12802 - RNA, 23 nt, Artificial Sequence
  Synthetic
ggaaaacauaguugcuauaucaa

SEQ ID NO: 12803 - RNA, 19 nt, Artificial Sequence
  Synthetic
gcugguagauguauaucaa

SEQ ID NO: 12804 - RNA, 21 nt, Artificial Sequence
  Synthetic
gugcugguagauguauaucaa

SEQ ID NO: 12805 - RNA, 23 nt, Artificial Sequence
  Synthetic
gugugcugguagauguauaucaa

SEQ ID NO: 12806 - RNA, 24 nt, Artificial Sequence
  Synthetic
ggugugcugguagauguauaucaa

SEQ ID NO: 12807 - RNA, 21 nt, Artificial Sequence
  Synthetic
guaaauacacugugguaucaa

SEQ ID NO: 12808 - RNA, 23 nt, Artificial Sequence
  Synthetic
guguaaauacacugugguaucaa

SEQ ID NO: 12809 - RNA, 21 nt, Artificial Sequence
  Synthetic
gcacaagagcuccaaacucaa

SEQ ID NO: 12810 - RNA, 18 nt, Artificial Sequence
  Synthetic
gucuaggagucaccucaa

SEQ ID NO: 12811 - RNA, 22 nt, Artificial Sequence
  Synthetic
gacuaggauguguuccccucaa

SEQ ID NO: 12812 - RNA, 24 nt, Artificial Sequence
  Synthetic
gagacuaggauguguuccccucaa

SEQ ID NO: 12813 - RNA, 22 nt, Artificial Sequence
  Synthetic
guccugaaugguaaugccucaa

SEQ ID NO: 12814 - RNA, 22 nt, Artificial Sequence
  Synthetic
gaucaaaagguuauacgcucaa

SEQ ID NO: 12815 - RNA, 24 nt, Artificial Sequence
  Synthetic
gucucauguccuaaauuggcucaa

SEQ ID NO: 12816 - RNA, 19 nt, Artificial Sequence
  Synthetic
gucaggguuucauucucaa

SEQ ID NO: 12817 - RNA, 21 nt, Artificial Sequence
  Synthetic
gagucaggguuucauucucaa

SEQ ID NO: 12818 - RNA, 22 nt, Artificial Sequence
  Synthetic
ggagucaggguuucauucucaa

SEQ ID NO: 12819 - RNA, 20 nt, Artificial Sequence
  Synthetic
gcauuugauuaucuucucaa

SEQ ID NO: 12820 - RNA, 23 nt, Artificial Sequence
  Synthetic
gaagcauuugauuaucuucucaa

SEQ ID NO: 12821 - RNA, 19 nt, Artificial Sequence
  Synthetic
gagaaagcagaaaagucaa

SEQ ID NO: 12822 - RNA, 21 nt, Artificial Sequence
  Synthetic
guauuugccaccuuuggucaa

SEQ ID NO: 12823 - RNA, 24 nt, Artificial Sequence
  Synthetic
guuguauuugccaccuuuggucaa

SEQ ID NO: 12824 - RNA, 21 nt, Artificial Sequence
  Synthetic
gauaaagguagaaccugucaa

SEQ ID NO: 12825 - RNA, 22 nt, Artificial Sequence
  Synthetic
ggauaaagguagaaccugucaa

SEQ ID NO: 12826 - RNA, 21 nt, Artificial Sequence
  Synthetic
gccaaauauucauugugucaa

SEQ ID NO: 12827 - RNA, 20 nt, Artificial Sequence
  Synthetic
guaugaggucaaaaauucaa

SEQ ID NO: 12828 - RNA, 21 nt, Artificial Sequence
  Synthetic
gguaugaggucaaaaauucaa

SEQ ID NO: 12829 - RNA, 24 nt, Artificial Sequence
  Synthetic
guagguaugaggucaaaaauucaa

SEQ ID NO: 12830 - RNA, 20 nt, Artificial Sequence
  Synthetic
gauaguuauaucaaauucaa

SEQ ID NO: 12831 - RNA, 22 nt, Artificial Sequence
  Synthetic
gaaaacaaguggauaaauucaa

SEQ ID NO: 12832 - RNA, 21 nt, Artificial Sequence
  Synthetic
gaaagaaacugaagaauucaa

SEQ ID NO: 12833 - RNA, 23 nt, Artificial Sequence
  Synthetic
gcgaaagaaacugaagaauucaa

SEQ ID NO: 12834 - RNA, 23 nt, Artificial Sequence
  Synthetic
guaucacauguuauauaauucaa

SEQ ID NO: 12835 - RNA, 24 nt, Artificial Sequence
  Synthetic
gguaucacauguuauauaauucaa

SEQ ID NO: 12836 - RNA, 18 nt, Artificial Sequence
  Synthetic
gcgguguucaccauucaa

SEQ ID NO: 12837 - RNA, 19 nt, Artificial Sequence
  Synthetic
gucauguccauccauucaa

SEQ ID NO: 12838 - RNA, 20 nt, Artificial Sequence
  Synthetic
ggucauguccauccauucaa

SEQ ID NO: 12839 - RNA, 21 nt, Artificial Sequence
  Synthetic
gggucauguccauccauucaa

SEQ ID NO: 12840 - RNA, 22 nt, Artificial Sequence
  Synthetic
ggggucauguccauccauucaa

SEQ ID NO: 12841 - RNA, 21 nt, Artificial Sequence
  Synthetic
gcauuuauguuauauauucaa

SEQ ID NO: 12842 - RNA, 22 nt, Artificial Sequence
  Synthetic
ggcauuuauguuauauauucaa

SEQ ID NO: 12843 - RNA, 22 nt, Artificial Sequence
  Synthetic
gauaaaagaugaaaguauucaa

SEQ ID NO: 12844 - RNA, 24 nt, Artificial Sequence
  Synthetic
gagauaaaagaugaaaguauucaa

SEQ ID NO: 12845 - RNA, 18 nt, Artificial Sequence
  Synthetic
gcaaauuaaccacuucaa

SEQ ID NO: 12846 - RNA, 21 nt, Artificial Sequence
  Synthetic
gaaaaagggauaaaccuucaa

SEQ ID NO: 12847 - RNA, 18 nt, Artificial Sequence
  Synthetic
gaguguauuuuucuucaa

SEQ ID NO: 12848 - RNA, 19 nt, Artificial Sequence
  Synthetic
ggaguguauuuuucuucaa

SEQ ID NO: 12849 - RNA, 20 nt, Artificial Sequence
  Synthetic
gggaguguauuuuucuucaa

SEQ ID NO: 12850 - RNA, 19 nt, Artificial Sequence
  Synthetic
gacaauucauaagguucaa

SEQ ID NO: 12851 - RNA, 24 nt, Artificial Sequence
  Synthetic
gacuugacaauucauaagguucaa

SEQ ID NO: 12852 - RNA, 22 nt, Artificial Sequence
  Synthetic
gcacacauuccuucauguucaa

SEQ ID NO: 12853 - RNA, 23 nt, Artificial Sequence
  Synthetic
ggcacacauuccuucauguucaa

SEQ ID NO: 12854 - RNA, 24 nt, Artificial Sequence
  Synthetic
guacaaaugcugagaauuguucaa

SEQ ID NO: 12855 - RNA, 18 nt, Artificial Sequence
  Synthetic
ggcaauuacugauuucaa

SEQ ID NO: 12856 - RNA, 24 nt, Artificial Sequence
  Synthetic
guaaauggcaauuacugauuucaa

SEQ ID NO: 12857 - RNA, 22 nt, Artificial Sequence
  Synthetic
gaucaugaaauuuauauuucaa

SEQ ID NO: 12858 - RNA, 19 nt, Artificial Sequence
  Synthetic
gugaaaaccaaaguuucaa

SEQ ID NO: 12859 - RNA, 20 nt, Artificial Sequence
  Synthetic
gacccucagaucauuuucaa

SEQ ID NO: 12860 - RNA, 24 nt, Artificial Sequence
  Synthetic
gacuagaggaaaagacaaaaagaa

SEQ ID NO: 12861 - RNA, 22 nt, Artificial Sequence
  Synthetic
gauauccuuuagaacaaaagaa

SEQ ID NO: 12862 - RNA, 23 nt, Artificial Sequence
  Synthetic
ggauauccuuuagaacaaaagaa

SEQ ID NO: 12863 - RNA, 23 nt, Artificial Sequence
  Synthetic
gacacagaaagacacacaaagaa

SEQ ID NO: 12864 - RNA, 24 nt, Artificial Sequence
  Synthetic
ggacacagaaagacacacaaagaa

SEQ ID NO: 12865 - RNA, 20 nt, Artificial Sequence
  Synthetic
gauauacacauugcaaagaa

SEQ ID NO: 12866 - RNA, 21 nt, Artificial Sequence
  Synthetic
ggauauacacauugcaaagaa

SEQ ID NO: 12867 - RNA, 19 nt, Artificial Sequence
  Synthetic
guggugaugagauaaagaa

SEQ ID NO: 12868 - RNA, 22 nt, Artificial Sequence
  Synthetic
gauguggugaugagauaaagaa

SEQ ID NO: 12869 - RNA, 23 nt, Artificial Sequence
  Synthetic
ggauguggugaugagauaaagaa

SEQ ID NO: 12870 - RNA, 21 nt, Artificial Sequence
  Synthetic
gacaaauuugugauuaaagaa

SEQ ID NO: 12871 - RNA, 22 nt, Artificial Sequence
  Synthetic
ggacaaauuugugauuaaagaa

SEQ ID NO: 12872 - RNA, 23 nt, Artificial Sequence
  Synthetic
gggacaaauuugugauuaaagaa

SEQ ID NO: 12873 - RNA, 20 nt, Artificial Sequence
  Synthetic
guauauuuucucuacaagaa

SEQ ID NO: 12874 - RNA, 24 nt, Artificial Sequence
  Synthetic
gacuguauauuuucucuacaagaa

SEQ ID NO: 12875 - RNA, 18 nt, Artificial Sequence
  Synthetic
gguauuauuucccaagaa

SEQ ID NO: 12876 - RNA, 19 nt, Artificial Sequence
  Synthetic
ggguauuauuucccaagaa

SEQ ID NO: 12877 - RNA, 22 nt, Artificial Sequence
  Synthetic
guuaaugagcucaacucaagaa

SEQ ID NO: 12878 - RNA, 20 nt, Artificial Sequence
  Synthetic
gaauuggacaaccucaagaa

SEQ ID NO: 12879 - RNA, 24 nt, Artificial Sequence
  Synthetic
gauagaauuggacaaccucaagaa

SEQ ID NO: 12880 - RNA, 18 nt, Artificial Sequence
  Synthetic
gcauacaucauucaagaa

SEQ ID NO: 12881 - RNA, 18 nt, Artificial Sequence
  Synthetic
gagaugcacaaagaagaa

SEQ ID NO: 12882 - RNA, 19 nt, Artificial Sequence
  Synthetic
ggagaugcacaaagaagaa

SEQ ID NO: 12883 - RNA, 20 nt, Artificial Sequence
  Synthetic
gggagaugcacaaagaagaa

SEQ ID NO: 12884 - RNA, 18 nt, Artificial Sequence
  Synthetic
gcuugguguaaagaagaa

SEQ ID NO: 12885 - RNA, 18 nt, Artificial Sequence
  Synthetic
gaguguaugucagaagaa

SEQ ID NO: 12886 - RNA, 19 nt, Artificial Sequence
  Synthetic
ggaguguaugucagaagaa

SEQ ID NO: 12887 - RNA, 23 nt, Artificial Sequence
  Synthetic
gauaggaguguaugucagaagaa

SEQ ID NO: 12888 - RNA, 24 nt, Artificial Sequence
  Synthetic
ggauaggaguguaugucagaagaa

SEQ ID NO: 12889 - RNA, 19 nt, Artificial Sequence
  Synthetic
gaugcauaggagagaagaa

SEQ ID NO: 12890 - RNA, 24 nt, Artificial Sequence
  Synthetic
gcuaagaugcauaggagagaagaa

SEQ ID NO: 12891 - RNA, 22 nt, Artificial Sequence
  Synthetic
guaaucuauacuuugcgaagaa

SEQ ID NO: 12892 - RNA, 22 nt, Artificial Sequence
  Synthetic
gcuggaugagaagaaggaagaa

SEQ ID NO: 12893 - RNA, 18 nt, Artificial Sequence
  Synthetic
gcuacaaaaccugaagaa

SEQ ID NO: 12894 - RNA, 20 nt, Artificial Sequence
  Synthetic
gugcuacaaaaccugaagaa

SEQ ID NO: 12895 - RNA, 21 nt, Artificial Sequence
  Synthetic
ggugcuacaaaaccugaagaa

SEQ ID NO: 12896 - RNA, 23 nt, Artificial Sequence
  Synthetic
guggugcuacaaaaccugaagaa

SEQ ID NO: 12897 - RNA, 21 nt, Artificial Sequence
  Synthetic
gaugggaagugaagugaagaa

SEQ ID NO: 12898 - RNA, 24 nt, Artificial Sequence
  Synthetic
guagaugggaagugaagugaagaa

SEQ ID NO: 12899 - RNA, 21 nt, Artificial Sequence
  Synthetic
gaaaacuccuguaaauaagaa

SEQ ID NO: 12900 - RNA, 21 nt, Artificial Sequence
  Synthetic
guauggcacacaagcuaagaa

SEQ ID NO: 12901 - RNA, 23 nt, Artificial Sequence
  Synthetic
gcguauggcacacaagcuaagaa

SEQ ID NO: 12902 - RNA, 22 nt, Artificial Sequence
  Synthetic
guauacauaaauuggcuaagaa

SEQ ID NO: 12903 - RNA, 24 nt, Artificial Sequence
  Synthetic
gaguauacauaaauuggcuaagaa

SEQ ID NO: 12904 - RNA, 18 nt, Artificial Sequence
  Synthetic
gagacuaagcucuaagaa

SEQ ID NO: 12905 - RNA, 22 nt, Artificial Sequence
  Synthetic
guuugagacuaagcucuaagaa

SEQ ID NO: 12906 - RNA, 24 nt, Artificial Sequence
  Synthetic
gaguuugagacuaagcucuaagaa

SEQ ID NO: 12907 - RNA, 19 nt, Artificial Sequence
  Synthetic
gaucuguuugacuuaagaa

SEQ ID NO: 12908 - RNA, 21 nt, Artificial Sequence
  Synthetic
gagaucuguuugacuuaagaa

SEQ ID NO: 12909 - RNA, 22 nt, Artificial Sequence
  Synthetic
ggagaucuguuugacuuaagaa

SEQ ID NO: 12910 - RNA, 18 nt, Artificial Sequence
  Synthetic
guucuggcucuuuaagaa

SEQ ID NO: 12911 - RNA, 21 nt, Artificial Sequence
  Synthetic
gauguucuggcucuuuaagaa

SEQ ID NO: 12912 - RNA, 24 nt, Artificial Sequence
  Synthetic
gaugauguucuggcucuuuaagaa

SEQ ID NO: 12913 - RNA, 19 nt, Artificial Sequence
  Synthetic
gcucuucacuuuuuaagaa

SEQ ID NO: 12914 - RNA, 22 nt, Artificial Sequence
  Synthetic
guacuugaaacugcaaacagaa

SEQ ID NO: 12915 - RNA, 23 nt, Artificial Sequence
  Synthetic
gguacuugaaacugcaaacagaa

SEQ ID NO: 12916 - RNA, 19 nt, Artificial Sequence
  Synthetic
guauguaauuauaacagaa

SEQ ID NO: 12917 - RNA, 22 nt, Artificial Sequence
  Synthetic
gaaauuggacauccuaacagaa

SEQ ID NO: 12918 - RNA, 19 nt, Artificial Sequence
  Synthetic
gcagcacaccaggacagaa

SEQ ID NO: 12919 - RNA, 20 nt, Artificial Sequence
  Synthetic
ggcagcacaccaggacagaa

SEQ ID NO: 12920 - RNA, 23 nt, Artificial Sequence
  Synthetic
gauggcagcacaccaggacagaa

SEQ ID NO: 12921 - RNA, 19 nt, Artificial Sequence
  Synthetic
gaacuagccccagccagaa

SEQ ID NO: 12922 - RNA, 18 nt, Artificial Sequence
  Synthetic
gugaggccacauccagaa

SEQ ID NO: 12923 - RNA, 23 nt, Artificial Sequence
  Synthetic
gauuugugaggccacauccagaa

SEQ ID NO: 12924 - RNA, 21 nt, Artificial Sequence
  Synthetic
gucagccauaaagauccagaa

SEQ ID NO: 12925 - RNA, 22 nt, Artificial Sequence
  Synthetic
gaacagaguguuuuaagcagaa

SEQ ID NO: 12926 - RNA, 23 nt, Artificial Sequence
  Synthetic
ggaacagaguguuuuaagcagaa

SEQ ID NO: 12927 - RNA, 21 nt, Artificial Sequence
  Synthetic
ggucagggaaggagagcagaa

SEQ ID NO: 12928 - RNA, 22 nt, Artificial Sequence
  Synthetic
gggucagggaaggagagcagaa

SEQ ID NO: 12929 - RNA, 23 nt, Artificial Sequence
  Synthetic
ggggucagggaaggagagcagaa

SEQ ID NO: 12930 - RNA, 23 nt, Artificial Sequence
  Synthetic
guagguaguaugguauagcagaa

SEQ ID NO: 12931 - RNA, 24 nt, Artificial Sequence
  Synthetic
gguagguaguaugguauagcagaa

SEQ ID NO: 12932 - RNA, 24 nt, Artificial Sequence
  Synthetic
gacaaccagagaggcugggcagaa

SEQ ID NO: 12933 - RNA, 19 nt, Artificial Sequence
  Synthetic
gagauuaaugaaaucagaa

SEQ ID NO: 12934 - RNA, 22 nt, Artificial Sequence
  Synthetic
gcuuacauuugaaaacucagaa

SEQ ID NO: 12935 - RNA, 19 nt, Artificial Sequence
  Synthetic
gaaucuaaacucuucagaa

SEQ ID NO: 12936 - RNA, 21 nt, Artificial Sequence
  Synthetic
gcauuagcaagagguucagaa

SEQ ID NO: 12937 - RNA, 22 nt, Artificial Sequence
  Synthetic
ggcauuagcaagagguucagaa

SEQ ID NO: 12938 - RNA, 19 nt, Artificial Sequence
  Synthetic
gucguugcauuuuucagaa

SEQ ID NO: 12939 - RNA, 24 nt, Artificial Sequence
  Synthetic
gcaucgucguugcauuuuucagaa

SEQ ID NO: 12940 - RNA, 19 nt, Artificial Sequence
  Synthetic
gacuuaauagauaagagaa

SEQ ID NO: 12941 - RNA, 21 nt, Artificial Sequence
  Synthetic
gugacuuaauagauaagagaa

SEQ ID NO: 12942 - RNA, 22 nt, Artificial Sequence
  Synthetic
ggugacuuaauagauaagagaa

SEQ ID NO: 12943 - RNA, 19 nt, Artificial Sequence
  Synthetic
guguugugcuuuaagagaa

SEQ ID NO: 12944 - RNA, 23 nt, Artificial Sequence
  Synthetic
gaaaguguugugcuuuaagagaa

SEQ ID NO: 12945 - RNA, 18 nt, Artificial Sequence
  Synthetic
gauguccugggcagagaa

SEQ ID NO: 12946 - RNA, 24 nt, Artificial Sequence
  Synthetic
gacuaccagagaaauaucagagaa

SEQ ID NO: 12947 - RNA, 19 nt, Artificial Sequence
  Synthetic
gauaaaccaugugagagaa

SEQ ID NO: 12948 - RNA, 22 nt, Artificial Sequence
  Synthetic
guaaaacauaguauugagagaa

SEQ ID NO: 12949 - RNA, 18 nt, Artificial Sequence
  Synthetic
gaaaauuggaauggagaa

SEQ ID NO: 12950 - RNA, 19 nt, Artificial Sequence
  Synthetic
ggaaaauuggaauggagaa

SEQ ID NO: 12951 - RNA, 20 nt, Artificial Sequence
  Synthetic
gggaaaauuggaauggagaa

SEQ ID NO: 12952 - RNA, 21 nt, Artificial Sequence
  Synthetic
ggggaaaauuggaauggagaa

SEQ ID NO: 12953 - RNA, 18 nt, Artificial Sequence
  Synthetic
guggguaaccauggagaa

SEQ ID NO: 12954 - RNA, 19 nt, Artificial Sequence
  Synthetic
gguggguaaccauggagaa

SEQ ID NO: 12955 - RNA, 20 nt, Artificial Sequence
  Synthetic
ggguggguaaccauggagaa

SEQ ID NO: 12956 - RNA, 22 nt, Artificial Sequence
  Synthetic
guggguggguaaccauggagaa

SEQ ID NO: 12957 - RNA, 23 nt, Artificial Sequence
  Synthetic
gguggguggguaaccauggagaa

SEQ ID NO: 12958 - RNA, 21 nt, Artificial Sequence
  Synthetic
gccucaugagaaggaugagaa

SEQ ID NO: 12959 - RNA, 22 nt, Artificial Sequence
  Synthetic
ggccucaugagaaggaugagaa

SEQ ID NO: 12960 - RNA, 21 nt, Artificial Sequence
  Synthetic
guccauaugacccagugagaa

SEQ ID NO: 12961 - RNA, 18 nt, Artificial Sequence
  Synthetic
guaaggggcuagugagaa

SEQ ID NO: 12962 - RNA, 19 nt, Artificial Sequence
  Synthetic
gguaaggggcuagugagaa

SEQ ID NO: 12963 - RNA, 21 nt, Artificial Sequence
  Synthetic
gagguaaggggcuagugagaa

SEQ ID NO: 12964 - RNA, 22 nt, Artificial Sequence
  Synthetic
ggagguaaggggcuagugagaa

SEQ ID NO: 12965 - RNA, 24 nt, Artificial Sequence
  Synthetic
guggagguaaggggcuagugagaa

SEQ ID NO: 12966 - RNA, 18 nt, Artificial Sequence
  Synthetic
gugcagacuucuugagaa

SEQ ID NO: 12967 - RNA, 21 nt, Artificial Sequence
  Synthetic
guuuucugucuucaaguagaa

SEQ ID NO: 12968 - RNA, 18 nt, Artificial Sequence
  Synthetic
gaggaauacagaguagaa

SEQ ID NO: 12969 - RNA, 20 nt, Artificial Sequence
  Synthetic
gugaggaauacagaguagaa

SEQ ID NO: 12970 - RNA, 23 nt, Artificial Sequence
  Synthetic
gaugugaggaauacagaguagaa

SEQ ID NO: 12971 - RNA, 18 nt, Artificial Sequence
  Synthetic
gcaguuaaguccguagaa

SEQ ID NO: 12972 - RNA, 19 nt, Artificial Sequence
  Synthetic
ggcaguuaaguccguagaa

SEQ ID NO: 12973 - RNA, 22 nt, Artificial Sequence
  Synthetic
gauggcaguuaaguccguagaa

SEQ ID NO: 12974 - RNA, 21 nt, Artificial Sequence
  Synthetic
gucaguugagaggguguagaa

SEQ ID NO: 12975 - RNA, 20 nt, Artificial Sequence
  Synthetic
gauuucuuccucaauuagaa

SEQ ID NO: 12976 - RNA, 18 nt, Artificial Sequence
  Synthetic
gcaaaaugaauauuagaa

SEQ ID NO: 12977 - RNA, 20 nt, Artificial Sequence
  Synthetic
gagcaaaaugaauauuagaa

SEQ ID NO: 12978 - RNA, 22 nt, Artificial Sequence
  Synthetic
gaauuaugguauauccuuagaa

SEQ ID NO: 12979 - RNA, 24 nt, Artificial Sequence
  Synthetic
gugaauuaugguauauccuuagaa

SEQ ID NO: 12980 - RNA, 19 nt, Artificial Sequence
  Synthetic
gauuaugauaugcuuagaa

SEQ ID NO: 12981 - RNA, 21 nt, Artificial Sequence
  Synthetic
gugauuaugauaugcuuagaa

SEQ ID NO: 12982 - RNA, 24 nt, Artificial Sequence
  Synthetic
gaagugauuaugauaugcuuagaa

SEQ ID NO: 12983 - RNA, 19 nt, Artificial Sequence
  Synthetic
gaggagacggaauuuagaa

SEQ ID NO: 12984 - RNA, 24 nt, Artificial Sequence
  Synthetic
gcucagaggagacggaauuuagaa

SEQ ID NO: 12985 - RNA, 19 nt, Artificial Sequence
  Synthetic
gagguacagcuauuuagaa

SEQ ID NO: 12986 - RNA, 24 nt, Artificial Sequence
  Synthetic
gaacugagguacagcuauuuagaa

SEQ ID NO: 12987 - RNA, 21 nt, Artificial Sequence
  Synthetic
gcucaccuacugcuuugcgaa

SEQ ID NO: 12988 - RNA, 24 nt, Artificial Sequence
  Synthetic
gcugcucaccuacugcuuugcgaa

SEQ ID NO: 12989 - RNA, 19 nt, Artificial Sequence
  Synthetic
gagucauauaagcaaggaa

SEQ ID NO: 12990 - RNA, 22 nt, Artificial Sequence
  Synthetic
guagagucauauaagcaaggaa

SEQ ID NO: 12991 - RNA, 24 nt, Artificial Sequence
  Synthetic
guguagagucauauaagcaaggaa

SEQ ID NO: 12992 - RNA, 18 nt, Artificial Sequence
  Synthetic
ggucuguaaaauaaggaa

SEQ ID NO: 12993 - RNA, 24 nt, Artificial Sequence
  Synthetic
gaacaaggucuguaaaauaaggaa

SEQ ID NO: 12994 - RNA, 18 nt, Artificial Sequence
  Synthetic
ggcuacgaaauacaggaa

SEQ ID NO: 12995 - RNA, 23 nt, Artificial Sequence
  Synthetic
gauuaaacucuacaucccaggaa

SEQ ID NO: 12996 - RNA, 24 nt, Artificial Sequence
  Synthetic
ggauuaaacucuacaucccaggaa

SEQ ID NO: 12997 - RNA, 18 nt, Artificial Sequence
  Synthetic
gguuuuuguuaucaggaa

SEQ ID NO: 12998 - RNA, 18 nt, Artificial Sequence
  Synthetic
guauauaguacucaggaa

SEQ ID NO: 12999 - RNA, 23 nt, Artificial Sequence
  Synthetic
guacaguauauaguacucaggaa

SEQ ID NO: 13000 - RNA, 24 nt, Artificial Sequence
  Synthetic
gguacaguauauaguacucaggaa

SEQ ID NO: 13001 - RNA, 20 nt, Artificial Sequence
  Synthetic
gauagaagucuagucaggaa

SEQ ID NO: 13002 - RNA, 21 nt, Artificial Sequence
  Synthetic
ggauagaagucuagucaggaa

SEQ ID NO: 13003 - RNA, 22 nt, Artificial Sequence
  Synthetic
guuuaaugggcaaacagaggaa

SEQ ID NO: 13004 - RNA, 21 nt, Artificial Sequence
  Synthetic
gagugagaauuuugagaggaa

SEQ ID NO: 13005 - RNA, 23 nt, Artificial Sequence
  Synthetic
gagagugagaauuuugagaggaa

SEQ ID NO: 13006 - RNA, 18 nt, Artificial Sequence
  Synthetic
gauuugggguaggaggaa

SEQ ID NO: 13007 - RNA, 19 nt, Artificial Sequence
  Synthetic
ggauuugggguaggaggaa

SEQ ID NO: 13008 - RNA, 22 nt, Artificial Sequence
  Synthetic
guauuaaggggaagaugaggaa

SEQ ID NO: 13009 - RNA, 19 nt, Artificial Sequence
  Synthetic
gugggaguugacugaggaa

SEQ ID NO: 13010 - RNA, 21 nt, Artificial Sequence
  Synthetic
gugugggaguugacugaggaa

SEQ ID NO: 13011 - RNA, 23 nt, Artificial Sequence
  Synthetic
gagugugggaguugacugaggaa

SEQ ID NO: 13012 - RNA, 19 nt, Artificial Sequence
  Synthetic
guguaggauugaauaggaa

SEQ ID NO: 13013 - RNA, 20 nt, Artificial Sequence
  Synthetic
gguguaggauugaauaggaa

SEQ ID NO: 13014 - RNA, 22 nt, Artificial Sequence
  Synthetic
gcgguguaggauugaauaggaa

SEQ ID NO: 13015 - RNA, 19 nt, Artificial Sequence
  Synthetic
guacuccuauuucuaggaa

SEQ ID NO: 13016 - RNA, 22 nt, Artificial Sequence
  Synthetic
guaguacuccuauuucuaggaa

SEQ ID NO: 13017 - RNA, 23 nt, Artificial Sequence
  Synthetic
gguaguacuccuauuucuaggaa

SEQ ID NO: 13018 - RNA, 21 nt, Artificial Sequence
  Synthetic
gaaauuguuggagaguaggaa

SEQ ID NO: 13019 - RNA, 22 nt, Artificial Sequence
  Synthetic
ggaaauuguuggagaguaggaa

SEQ ID NO: 13020 - RNA, 24 nt, Artificial Sequence
  Synthetic
gaggaaauuguuggagaguaggaa

SEQ ID NO: 13021 - RNA, 18 nt, Artificial Sequence
  Synthetic
ggcauguaaacguaggaa

SEQ ID NO: 13022 - RNA, 24 nt, Artificial Sequence
  Synthetic
guauuuggcauguaaacguaggaa

SEQ ID NO: 13023 - RNA, 18 nt, Artificial Sequence
  Synthetic
gggcaguucauuuaggaa

SEQ ID NO: 13024 - RNA, 24 nt, Artificial Sequence
  Synthetic
gacacagggcaguucauuuaggaa

SEQ ID NO: 13025 - RNA, 19 nt, Artificial Sequence
  Synthetic
gaagacaugucuuuaggaa

SEQ ID NO: 13026 - RNA, 23 nt, Artificial Sequence
  Synthetic
gaaagaagacaugucuuuaggaa

SEQ ID NO: 13027 - RNA, 21 nt, Artificial Sequence
  Synthetic
gaaaugcuccaggagagggaa

SEQ ID NO: 13028 - RNA, 24 nt, Artificial Sequence
  Synthetic
gauuaaucgcacauauauagggaa

SEQ ID NO: 13029 - RNA, 21 nt, Artificial Sequence
  Synthetic
guaaaacacgagauuagggaa

SEQ ID NO: 13030 - RNA, 22 nt, Artificial Sequence
  Synthetic
gguaaaacacgagauuagggaa

SEQ ID NO: 13031 - RNA, 21 nt, Artificial Sequence
  Synthetic
guuaagcuugcuuuuagggaa

SEQ ID NO: 13032 - RNA, 18 nt, Artificial Sequence
  Synthetic
gcugagugcuaaggggaa

SEQ ID NO: 13033 - RNA, 19 nt, Artificial Sequence
  Synthetic
ggcugagugcuaaggggaa

SEQ ID NO: 13034 - RNA, 22 nt, Artificial Sequence
  Synthetic
gaaggcugagugcuaaggggaa

SEQ ID NO: 13035 - RNA, 23 nt, Artificial Sequence
  Synthetic
ggaaggcugagugcuaaggggaa

SEQ ID NO: 13036 - RNA, 23 nt, Artificial Sequence
  Synthetic
gcuuccacugcauuugaggggaa

SEQ ID NO: 13037 - RNA, 20 nt, Artificial Sequence
  Synthetic
gcucuacuccauagggggaa

SEQ ID NO: 13038 - RNA, 21 nt, Artificial Sequence
  Synthetic
gucaggugaaaaccuggggaa

SEQ ID NO: 13039 - RNA, 22 nt, Artificial Sequence
  Synthetic
ggucaggugaaaaccuggggaa

SEQ ID NO: 13040 - RNA, 22 nt, Artificial Sequence
  Synthetic
gcaauuucuggcagguggggaa

SEQ ID NO: 13041 - RNA, 23 nt, Artificial Sequence
  Synthetic
ggcaauuucuggcagguggggaa

SEQ ID NO: 13042 - RNA, 24 nt, Artificial Sequence
  Synthetic
gggcaauuucuggcagguggggaa

SEQ ID NO: 13043 - RNA, 21 nt, Artificial Sequence
  Synthetic
guaaaaagaauagcaugggaa

SEQ ID NO: 13044 - RNA, 22 nt, Artificial Sequence
  Synthetic
gguaaaaagaauagcaugggaa

SEQ ID NO: 13045 - RNA, 21 nt, Artificial Sequence
  Synthetic
gcaacuuugagccuaugggaa

SEQ ID NO: 13046 - RNA, 24 nt, Artificial Sequence
  Synthetic
guugcaacuuugagccuaugggaa

SEQ ID NO: 13047 - RNA, 21 nt, Artificial Sequence
  Synthetic
gauaaguguuagaacugggaa

SEQ ID NO: 13048 - RNA, 24 nt, Artificial Sequence
  Synthetic
gcugauaaguguuagaacugggaa

SEQ ID NO: 13049 - RNA, 22 nt, Artificial Sequence
  Synthetic
guacagauuuaaucaaauggaa

SEQ ID NO: 13050 - RNA, 18 nt, Artificial Sequence
  Synthetic
gucuucucucaaauggaa

SEQ ID NO: 13051 - RNA, 20 nt, Artificial Sequence
  Synthetic
gugucuucucucaaauggaa

SEQ ID NO: 13052 - RNA, 24 nt, Artificial Sequence
  Synthetic
gaacugaacaaacagauaauggaa

SEQ ID NO: 13053 - RNA, 24 nt, Artificial Sequence
  Synthetic
gucaguaaaacaguggccauggaa

SEQ ID NO: 13054 - RNA, 20 nt, Artificial Sequence
  Synthetic
gccuuagcucaaagauggaa

SEQ ID NO: 13055 - RNA, 22 nt, Artificial Sequence
  Synthetic
gugccuuagcucaaagauggaa

SEQ ID NO: 13056 - RNA, 21 nt, Artificial Sequence
  Synthetic
gcauagcauauauaacuggaa

SEQ ID NO: 13057 - RNA, 24 nt, Artificial Sequence
  Synthetic
guugcauagcauauauaacuggaa

SEQ ID NO: 13058 - RNA, 18 nt, Artificial Sequence
  Synthetic
ggggucuuaauccuggaa

SEQ ID NO: 13059 - RNA, 21 nt, Artificial Sequence
  Synthetic
gauggggucuuaauccuggaa

SEQ ID NO: 13060 - RNA, 23 nt, Artificial Sequence
  Synthetic
gcgauggggucuuaauccuggaa

SEQ ID NO: 13061 - RNA, 19 nt, Artificial Sequence
  Synthetic
gcgaacugagaagcuggaa

SEQ ID NO: 13062 - RNA, 21 nt, Artificial Sequence
  Synthetic
gcugagggagguucucuggaa

SEQ ID NO: 13063 - RNA, 22 nt, Artificial Sequence
  Synthetic
ggcugagggagguucucuggaa

SEQ ID NO: 13064 - RNA, 20 nt, Artificial Sequence
  Synthetic
gaaugcugcuaauucuggaa

SEQ ID NO: 13065 - RNA, 21 nt, Artificial Sequence
  Synthetic
ggaaugcugcuaauucuggaa

SEQ ID NO: 13066 - RNA, 21 nt, Artificial Sequence
  Synthetic
gcuaugaggguagaaguggaa

SEQ ID NO: 13067 - RNA, 18 nt, Artificial Sequence
  Synthetic
gcaggcuauguaguggaa

SEQ ID NO: 13068 - RNA, 19 nt, Artificial Sequence
  Synthetic
ggcaggcuauguaguggaa

SEQ ID NO: 13069 - RNA, 21 nt, Artificial Sequence
  Synthetic
gaggcaggcuauguaguggaa

SEQ ID NO: 13070 - RNA, 22 nt, Artificial Sequence
  Synthetic
ggaggcaggcuauguaguggaa

SEQ ID NO: 13071 - RNA, 22 nt, Artificial Sequence
  Synthetic
gucuuuaaguuaaaauguggaa

SEQ ID NO: 13072 - RNA, 24 nt, Artificial Sequence
  Synthetic
gagucuuuaaguuaaaauguggaa

SEQ ID NO: 13073 - RNA, 18 nt, Artificial Sequence
  Synthetic
gugggacagacauuggaa

SEQ ID NO: 13074 - RNA, 23 nt, Artificial Sequence
  Synthetic
gaaaugugggacagacauuggaa

SEQ ID NO: 13075 - RNA, 22 nt, Artificial Sequence
  Synthetic
gauggugucacuuaaguuggaa

SEQ ID NO: 13076 - RNA, 21 nt, Artificial Sequence
  Synthetic
gcuagguggaaagaguuggaa

SEQ ID NO: 13077 - RNA, 22 nt, Artificial Sequence
  Synthetic
ggcuagguggaaagaguuggaa

SEQ ID NO: 13078 - RNA, 24 nt, Artificial Sequence
  Synthetic
gaggcuagguggaaagaguuggaa

SEQ ID NO: 13079 - RNA, 18 nt, Artificial Sequence
  Synthetic
gaaugaaugcauuuggaa

SEQ ID NO: 13080 - RNA, 19 nt, Artificial Sequence
  Synthetic
ggaaugaaugcauuuggaa

SEQ ID NO: 13081 - RNA, 21 nt, Artificial Sequence
  Synthetic
guggaaugaaugcauuuggaa

SEQ ID NO: 13082 - RNA, 19 nt, Artificial Sequence
  Synthetic
gcuuuugaugggaaaugaa

SEQ ID NO: 13083 - RNA, 23 nt, Artificial Sequence
  Synthetic
gaaugcuuuugaugggaaaugaa

SEQ ID NO: 13084 - RNA, 18 nt, Artificial Sequence
  Synthetic
ggugcaguaugaaaugaa

SEQ ID NO: 13085 - RNA, 23 nt, Artificial Sequence
  Synthetic
guauuggugcaguaugaaaugaa

SEQ ID NO: 13086 - RNA, 21 nt, Artificial Sequence
  Synthetic
gcucaaaauaguugaaaugaa

SEQ ID NO: 13087 - RNA, 22 nt, Artificial Sequence
  Synthetic
gaagagaaaucagagacaugaa

SEQ ID NO: 13088 - RNA, 24 nt, Artificial Sequence
  Synthetic
gagaagagaaaucagagacaugaa

SEQ ID NO: 13089 - RNA, 19 nt, Artificial Sequence
  Synthetic
gagucacuugugacaugaa

SEQ ID NO: 13090 - RNA, 21 nt, Artificial Sequence
  Synthetic
gugagucacuugugacaugaa

SEQ ID NO: 13091 - RNA, 22 nt, Artificial Sequence
  Synthetic
gaaauaccauaaaugucaugaa

SEQ ID NO: 13092 - RNA, 24 nt, Artificial Sequence
  Synthetic
gugaaauaccauaaaugucaugaa

SEQ ID NO: 13093 - RNA, 19 nt, Artificial Sequence
  Synthetic
gugaagaugcucugaugaa

SEQ ID NO: 13094 - RNA, 22 nt, Artificial Sequence
  Synthetic
guaucuuguugaaaauuaugaa

SEQ ID NO: 13095 - RNA, 20 nt, Artificial Sequence
  Synthetic
guauguuuacgaaaacugaa

SEQ ID NO: 13096 - RNA, 18 nt, Artificial Sequence
  Synthetic
gccuguucaucaacugaa

SEQ ID NO: 13097 - RNA, 21 nt, Artificial Sequence
  Synthetic
gauacuuguagagugacugaa

SEQ ID NO: 13098 - RNA, 23 nt, Artificial Sequence
  Synthetic
gugauacuuguagagugacugaa

SEQ ID NO: 13099 - RNA, 23 nt, Artificial Sequence
  Synthetic
gcuacauuuuuccugucccugaa

SEQ ID NO: 13100 - RNA, 24 nt, Artificial Sequence
  Synthetic
ggcuacauuuuuccugucccugaa

SEQ ID NO: 13101 - RNA, 20 nt, Artificial Sequence
  Synthetic
gcugcaaagaggugccugaa

SEQ ID NO: 13102 - RNA, 23 nt, Artificial Sequence
  Synthetic
gcugcugcaaagaggugccugaa

SEQ ID NO: 13103 - RNA, 21 nt, Artificial Sequence
  Synthetic
gaaagaaaauuccccucugaa

SEQ ID NO: 13104 - RNA, 22 nt, Artificial Sequence
  Synthetic
gucauagaaaaaaaugucugaa

SEQ ID NO: 13105 - RNA, 24 nt, Artificial Sequence
  Synthetic
gagucauagaaaaaaaugucugaa

SEQ ID NO: 13106 - RNA, 19 nt, Artificial Sequence
  Synthetic
gaggauaaagacuucugaa

SEQ ID NO: 13107 - RNA, 20 nt, Artificial Sequence
  Synthetic
gcuuugggaaauguucugaa

SEQ ID NO: 13108 - RNA, 18 nt, Artificial Sequence
  Synthetic
gaagauuuugaaagugaa

SEQ ID NO: 13109 - RNA, 19 nt, Artificial Sequence
  Synthetic
ggaagauuuugaaagugaa

SEQ ID NO: 13110 - RNA, 21 nt, Artificial Sequence
  Synthetic
gacagaaaaguuuacagugaa

SEQ ID NO: 13111 - RNA, 19 nt, Artificial Sequence
  Synthetic
gagggaugaucucagugaa

SEQ ID NO: 13112 - RNA, 22 nt, Artificial Sequence
  Synthetic
gaagagggaugaucucagugaa

SEQ ID NO: 13113 - RNA, 18 nt, Artificial Sequence
  Synthetic
gaauggaguaaaggugaa

SEQ ID NO: 13114 - RNA, 19 nt, Artificial Sequence
  Synthetic
ggaauggaguaaaggugaa

SEQ ID NO: 13115 - RNA, 20 nt, Artificial Sequence
  Synthetic
gggaauggaguaaaggugaa

SEQ ID NO: 13116 - RNA, 24 nt, Artificial Sequence
  Synthetic
gcaugggaauggaguaaaggugaa

SEQ ID NO: 13117 - RNA, 21 nt, Artificial Sequence
  Synthetic
gacacacuagauauaggugaa

SEQ ID NO: 13118 - RNA, 24 nt, Artificial Sequence
  Synthetic
guagacacacuagauauaggugaa

SEQ ID NO: 13119 - RNA, 19 nt, Artificial Sequence
  Synthetic
gaaagguguuuagggugaa

SEQ ID NO: 13120 - RNA, 20 nt, Artificial Sequence
  Synthetic
ggaaagguguuuagggugaa

SEQ ID NO: 13121 - RNA, 18 nt, Artificial Sequence
  Synthetic
ggcacacagaggggugaa

SEQ ID NO: 13122 - RNA, 22 nt, Artificial Sequence
  Synthetic
gccaggcacacagaggggugaa

SEQ ID NO: 13123 - RNA, 20 nt, Artificial Sequence
  Synthetic
gauacucugacaccauugaa

SEQ ID NO: 13124 - RNA, 21 nt, Artificial Sequence
  Synthetic
ggauacucugacaccauugaa

SEQ ID NO: 13125 - RNA, 21 nt, Artificial Sequence
  Synthetic
gcucaauauaaauauauugaa

SEQ ID NO: 13126 - RNA, 23 nt, Artificial Sequence
  Synthetic
gagcucaauauaaauauauugaa

SEQ ID NO: 13127 - RNA, 24 nt, Artificial Sequence
  Synthetic
ggagcucaauauaaauauauugaa

SEQ ID NO: 13128 - RNA, 20 nt, Artificial Sequence
  Synthetic
gaacuaauuaucuuauugaa

SEQ ID NO: 13129 - RNA, 21 nt, Artificial Sequence
  Synthetic
ggaacuaauuaucuuauugaa

SEQ ID NO: 13130 - RNA, 21 nt, Artificial Sequence
  Synthetic
gcacacuuuaguaaccuugaa

SEQ ID NO: 13131 - RNA, 24 nt, Artificial Sequence
  Synthetic
gacaacaucucuguuauccuugaa

SEQ ID NO: 13132 - RNA, 18 nt, Artificial Sequence
  Synthetic
gauuauacugggcuugaa

SEQ ID NO: 13133 - RNA, 22 nt, Artificial Sequence
  Synthetic
guuauacacccacacucuugaa

SEQ ID NO: 13134 - RNA, 24 nt, Artificial Sequence
  Synthetic
guguuauacacccacacucuugaa

SEQ ID NO: 13135 - RNA, 18 nt, Artificial Sequence
  Synthetic
guguacuguagaguugaa

SEQ ID NO: 13136 - RNA, 19 nt, Artificial Sequence
  Synthetic
gguguacuguagaguugaa

SEQ ID NO: 13137 - RNA, 23 nt, Artificial Sequence
  Synthetic
guuugguguacuguagaguugaa

SEQ ID NO: 13138 - RNA, 19 nt, Artificial Sequence
  Synthetic
gaacguggcagugguugaa

SEQ ID NO: 13139 - RNA, 21 nt, Artificial Sequence
  Synthetic
gugaacguggcagugguugaa

SEQ ID NO: 13140 - RNA, 24 nt, Artificial Sequence
  Synthetic
guagugaacguggcagugguugaa

SEQ ID NO: 13141 - RNA, 18 nt, Artificial Sequence
  Synthetic
guuaaugauagauuugaa

SEQ ID NO: 13142 - RNA, 19 nt, Artificial Sequence
  Synthetic
gguuaaugauagauuugaa

SEQ ID NO: 13143 - RNA, 21 nt, Artificial Sequence
  Synthetic
gagguuaaugauagauuugaa

SEQ ID NO: 13144 - RNA, 22 nt, Artificial Sequence
  Synthetic
ggagguuaaugauagauuugaa

SEQ ID NO: 13145 - RNA, 22 nt, Artificial Sequence
  Synthetic
guucugguuugcaauauuugaa

SEQ ID NO: 13146 - RNA, 20 nt, Artificial Sequence
  Synthetic
guuuucuguuucacuuugaa

SEQ ID NO: 13147 - RNA, 21 nt, Artificial Sequence
  Synthetic
guaagucuaagcuacuuugaa

SEQ ID NO: 13148 - RNA, 23 nt, Artificial Sequence
  Synthetic
gaguaagucuaagcuacuuugaa

SEQ ID NO: 13149 - RNA, 18 nt, Artificial Sequence
  Synthetic
gggauaaacacuuuugaa

SEQ ID NO: 13150 - RNA, 21 nt, Artificial Sequence
  Synthetic
gaccaaaggucugaaaaauaa

SEQ ID NO: 13151 - RNA, 23 nt, Artificial Sequence
  Synthetic
gcucuugauggaagagaaaauaa

SEQ ID NO: 13152 - RNA, 19 nt, Artificial Sequence
  Synthetic
guuuuagcauuuaaaauaa

SEQ ID NO: 13153 - RNA, 20 nt, Artificial Sequence
  Synthetic
gguuuuagcauuuaaaauaa

SEQ ID NO: 13154 - RNA, 20 nt, Artificial Sequence
  Synthetic
guuguauuaucaacaaauaa

SEQ ID NO: 13155 - RNA, 23 nt, Artificial Sequence
  Synthetic
guaaauacuuuucccucaaauaa

SEQ ID NO: 13156 - RNA, 24 nt, Artificial Sequence
  Synthetic
gguaaauacuuuucccucaaauaa

SEQ ID NO: 13157 - RNA, 19 nt, Artificial Sequence
  Synthetic
gugagauaaacagaaauaa

SEQ ID NO: 13158 - RNA, 20 nt, Artificial Sequence
  Synthetic
ggugagauaaacagaaauaa

SEQ ID NO: 13159 - RNA, 22 nt, Artificial Sequence
  Synthetic
guggugagauaaacagaaauaa

SEQ ID NO: 13160 - RNA, 24 nt, Artificial Sequence
  Synthetic
gaguggugagauaaacagaaauaa

SEQ ID NO: 13161 - RNA, 19 nt, Artificial Sequence
  Synthetic
gcuaaucauuaugaaauaa

SEQ ID NO: 13162 - RNA, 24 nt, Artificial Sequence
  Synthetic
gauaugcuaaucauuaugaaauaa

SEQ ID NO: 13163 - RNA, 22 nt, Artificial Sequence
  Synthetic
guggagaagcagagauaaauaa

SEQ ID NO: 13164 - RNA, 24 nt, Artificial Sequence
  Synthetic
gaguggagaagcagagauaaauaa

SEQ ID NO: 13165 - RNA, 20 nt, Artificial Sequence
  Synthetic
gaaguuucuagcuuaaauaa

SEQ ID NO: 13166 - RNA, 21 nt, Artificial Sequence
  Synthetic
guucuauacaguuuuaaauaa

SEQ ID NO: 13167 - RNA, 20 nt, Artificial Sequence
  Synthetic
gcuacaagaguuuuaaauaa

SEQ ID NO: 13168 - RNA, 23 nt, Artificial Sequence
  Synthetic
gaagcuacaagaguuuuaaauaa

SEQ ID NO: 13169 - RNA, 21 nt, Artificial Sequence
  Synthetic
gcauauuuugguuuuaaauaa

SEQ ID NO: 13170 - RNA, 19 nt, Artificial Sequence
  Synthetic
guuauagagauaacaauaa

SEQ ID NO: 13171 - RNA, 20 nt, Artificial Sequence
  Synthetic
gguuauagagauaacaauaa

SEQ ID NO: 13172 - RNA, 21 nt, Artificial Sequence
  Synthetic
ggguuauagagauaacaauaa

SEQ ID NO: 13173 - RNA, 23 nt, Artificial Sequence
  Synthetic
guggguuauagagauaacaauaa

SEQ ID NO: 13174 - RNA, 18 nt, Artificial Sequence
  Synthetic
guuuccaagcagcaauaa

SEQ ID NO: 13175 - RNA, 20 nt, Artificial Sequence
  Synthetic
gaguuuccaagcagcaauaa

SEQ ID NO: 13176 - RNA, 21 nt, Artificial Sequence
  Synthetic
ggaguuuccaagcagcaauaa

SEQ ID NO: 13177 - RNA, 23 nt, Artificial Sequence
  Synthetic
gaggaguuuccaagcagcaauaa

SEQ ID NO: 13178 - RNA, 22 nt, Artificial Sequence
  Synthetic
guuaauugugggagcucaauaa

SEQ ID NO: 13179 - RNA, 23 nt, Artificial Sequence
  Synthetic
gguuaauugugggagcucaauaa

SEQ ID NO: 13180 - RNA, 18 nt, Artificial Sequence
  Synthetic
ggaaauugugcucaauaa

SEQ ID NO: 13181 - RNA, 22 nt, Artificial Sequence
  Synthetic
gcauggaaauugugcucaauaa

SEQ ID NO: 13182 - RNA, 23 nt, Artificial Sequence
  Synthetic
ggcauggaaauugugcucaauaa

SEQ ID NO: 13183 - RNA, 19 nt, Artificial Sequence
  Synthetic
gaaggaacagcgagaauaa

SEQ ID NO: 13184 - RNA, 19 nt, Artificial Sequence
  Synthetic
gcacagacaaguggaauaa

SEQ ID NO: 13185 - RNA, 20 nt, Artificial Sequence
  Synthetic
ggcacagacaaguggaauaa

SEQ ID NO: 13186 - RNA, 18 nt, Artificial Sequence
  Synthetic
guaaugaacaaugaauaa

SEQ ID NO: 13187 - RNA, 21 nt, Artificial Sequence
  Synthetic
gaaguaaugaacaaugaauaa

SEQ ID NO: 13188 - RNA, 22 nt, Artificial Sequence
  Synthetic
gcagaaagauagacaugaauaa

SEQ ID NO: 13189 - RNA, 23 nt, Artificial Sequence
  Synthetic
ggcagaaagauagacaugaauaa

SEQ ID NO: 13190 - RNA, 18 nt, Artificial Sequence
  Synthetic
gaaguacuuucugaauaa

SEQ ID NO: 13191 - RNA, 19 nt, Artificial Sequence
  Synthetic
ggaaguacuuucugaauaa

SEQ ID NO: 13192 - RNA, 20 nt, Artificial Sequence
  Synthetic
gggaaguacuuucugaauaa

SEQ ID NO: 13193 - RNA, 24 nt, Artificial Sequence
  Synthetic
gauagggaaguacuuucugaauaa

SEQ ID NO: 13194 - RNA, 21 nt, Artificial Sequence
  Synthetic
gaauuacuauauguugaauaa

SEQ ID NO: 13195 - RNA, 23 nt, Artificial Sequence
  Synthetic
gcaaaagcuuuuuuguugaauaa

SEQ ID NO: 13196 - RNA, 24 nt, Artificial Sequence
  Synthetic
ggcaaaagcuuuuuuguugaauaa

SEQ ID NO: 13197 - RNA, 21 nt, Artificial Sequence
  Synthetic
gauaauagugaaauauaauaa

SEQ ID NO: 13198 - RNA, 24 nt, Artificial Sequence
  Synthetic
guagauaauagugaaauauaauaa

SEQ ID NO: 13199 - RNA, 20 nt, Artificial Sequence
  Synthetic
gauaauccagcauauaauaa

SEQ ID NO: 13200 - RNA, 18 nt, Artificial Sequence
  Synthetic
gggcuuuucuuauaauaa

SEQ ID NO: 13201 - RNA, 24 nt, Artificial Sequence
  Synthetic
gaaauuuauaauaccagcuaauaa

SEQ ID NO: 13202 - RNA, 22 nt, Artificial Sequence
  Synthetic
gcaaacaccuuugugcuaauaa

SEQ ID NO: 13203 - RNA, 23 nt, Artificial Sequence
  Synthetic
ggcaaacaccuuugugcuaauaa

SEQ ID NO: 13204 - RNA, 19 nt, Artificial Sequence
  Synthetic
gcaagccccaguguaauaa

SEQ ID NO: 13205 - RNA, 21 nt, Artificial Sequence
  Synthetic
gaaacugaaaauaauuaauaa

SEQ ID NO: 13206 - RNA, 24 nt, Artificial Sequence
  Synthetic
gaagaaacugaaaauaauuaauaa

SEQ ID NO: 13207 - RNA, 19 nt, Artificial Sequence
  Synthetic
gccauugucauauuaauaa

SEQ ID NO: 13208 - RNA, 23 nt, Artificial Sequence
  Synthetic
gaacgccauugucauauuaauaa

SEQ ID NO: 13209 - RNA, 20 nt, Artificial Sequence
  Synthetic
gucauugguaugguuaauaa

SEQ ID NO: 13210 - RNA, 20 nt, Artificial Sequence
  Synthetic
gaauauauacccaaacauaa

SEQ ID NO: 13211 - RNA, 23 nt, Artificial Sequence
  Synthetic
gaaaacaguaaguucacacauaa

SEQ ID NO: 13212 - RNA, 19 nt, Artificial Sequence
  Synthetic
gcauaaugacuucacauaa

SEQ ID NO: 13213 - RNA, 24 nt, Artificial Sequence
  Synthetic
gauuugcauaaugacuucacauaa

SEQ ID NO: 13214 - RNA, 18 nt, Artificial Sequence
  Synthetic
gcacauucaaagacauaa

SEQ ID NO: 13215 - RNA, 19 nt, Artificial Sequence
  Synthetic
ggcacauucaaagacauaa

SEQ ID NO: 13216 - RNA, 24 nt, Artificial Sequence
  Synthetic
guauuggcacauucaaagacauaa

SEQ ID NO: 13217 - RNA, 23 nt, Artificial Sequence
  Synthetic
gccacaagcacacauuuacauaa

SEQ ID NO: 13218 - RNA, 23 nt, Artificial Sequence
  Synthetic
gucauagguugaggccuccauaa

SEQ ID NO: 13219 - RNA, 24 nt, Artificial Sequence
  Synthetic
ggucauagguugaggccuccauaa

SEQ ID NO: 13220 - RNA, 19 nt, Artificial Sequence
  Synthetic
gauauggcugauugcauaa

SEQ ID NO: 13221 - RNA, 21 nt, Artificial Sequence
  Synthetic
gagauauggcugauugcauaa

SEQ ID NO: 13222 - RNA, 22 nt, Artificial Sequence
  Synthetic
ggagauauggcugauugcauaa

SEQ ID NO: 13223 - RNA, 22 nt, Artificial Sequence
  Synthetic
gauuaggcaacauguugcauaa

SEQ ID NO: 13224 - RNA, 24 nt, Artificial Sequence
  Synthetic
gcuauacagccucagugcucauaa

SEQ ID NO: 13225 - RNA, 19 nt, Artificial Sequence
  Synthetic
gaagaacuagaacagauaa

SEQ ID NO: 13226 - RNA, 19 nt, Artificial Sequence
  Synthetic
gaggucaauguggagauaa

SEQ ID NO: 13227 - RNA, 20 nt, Artificial Sequence
  Synthetic
ggaggucaauguggagauaa

SEQ ID NO: 13228 - RNA, 21 nt, Artificial Sequence
  Synthetic
gggaggucaauguggagauaa

SEQ ID NO: 13229 - RNA, 23 nt, Artificial Sequence
  Synthetic
gagggaggucaauguggagauaa

SEQ ID NO: 13230 - RNA, 24 nt, Artificial Sequence
  Synthetic
ggagggaggucaauguggagauaa

SEQ ID NO: 13231 - RNA, 19 nt, Artificial Sequence
  Synthetic
guuugaggugagacgauaa

SEQ ID NO: 13232 - RNA, 20 nt, Artificial Sequence
  Synthetic
gguuugaggugagacgauaa

SEQ ID NO: 13233 - RNA, 24 nt, Artificial Sequence
  Synthetic
guaagguuugaggugagacgauaa

SEQ ID NO: 13234 - RNA, 18 nt, Artificial Sequence
  Synthetic
ggauguacagagcgauaa

SEQ ID NO: 13235 - RNA, 21 nt, Artificial Sequence
  Synthetic
gauggauguacagagcgauaa

SEQ ID NO: 13236 - RNA, 22 nt, Artificial Sequence
  Synthetic
ggauggauguacagagcgauaa

SEQ ID NO: 13237 - RNA, 20 nt, Artificial Sequence
  Synthetic
gacaauaugcaucaggauaa

SEQ ID NO: 13238 - RNA, 23 nt, Artificial Sequence
  Synthetic
gaagacaauaugcaucaggauaa

SEQ ID NO: 13239 - RNA, 24 nt, Artificial Sequence
  Synthetic
ggaagacaauaugcaucaggauaa

SEQ ID NO: 13240 - RNA, 20 nt, Artificial Sequence
  Synthetic
gcucacacauuuagggauaa

SEQ ID NO: 13241 - RNA, 21 nt, Artificial Sequence
  Synthetic
ggcucacacauuuagggauaa

SEQ ID NO: 13242 - RNA, 23 nt, Artificial Sequence
  Synthetic
guggcucacacauuuagggauaa

SEQ ID NO: 13243 - RNA, 18 nt, Artificial Sequence
  Synthetic
gcaggccagcacugauaa

SEQ ID NO: 13244 - RNA, 22 nt, Artificial Sequence
  Synthetic
guaagcaggccagcacugauaa

SEQ ID NO: 13245 - RNA, 21 nt, Artificial Sequence
  Synthetic
gaaugacacagcccuugauaa

SEQ ID NO: 13246 - RNA, 22 nt, Artificial Sequence
  Synthetic
gaaguuauauaaauuaauauaa

SEQ ID NO: 13247 - RNA, 24 nt, Artificial Sequence
  Synthetic
gagaaguuauauaaauuaauauaa

SEQ ID NO: 13248 - RNA, 22 nt, Artificial Sequence
  Synthetic
guuaagauaaggacugauauaa

SEQ ID NO: 13249 - RNA, 24 nt, Artificial Sequence
  Synthetic
guguuaagauaaggacugauauaa

SEQ ID NO: 13250 - RNA, 23 nt, Artificial Sequence
  Synthetic
gcuccugauaaugguugcuauaa

SEQ ID NO: 13251 - RNA, 20 nt, Artificial Sequence
  Synthetic
gcucaugcaccucauuauaa

SEQ ID NO: 13252 - RNA, 19 nt, Artificial Sequence
  Synthetic
gcugaucacaguauuauaa

SEQ ID NO: 13253 - RNA, 20 nt, Artificial Sequence
  Synthetic
ggcugaucacaguauuauaa

SEQ ID NO: 13254 - RNA, 23 nt, Artificial Sequence
  Synthetic
gaaaaauucagccaguauuauaa

SEQ ID NO: 13255 - RNA, 21 nt, Artificial Sequence
  Synthetic
gcuucugcuuuauucaacuaa

SEQ ID NO: 13256 - RNA, 22 nt, Artificial Sequence
  Synthetic
ggcuucugcuuuauucaacuaa

SEQ ID NO: 13257 - RNA, 18 nt, Artificial Sequence
  Synthetic
gugugauugcagaacuaa

SEQ ID NO: 13258 - RNA, 23 nt, Artificial Sequence
  Synthetic
gucuuuaacccuaucgacacuaa

SEQ ID NO: 13259 - RNA, 22 nt, Artificial Sequence
  Synthetic
guucaagaccgaaaagcacuaa

SEQ ID NO: 13260 - RNA, 20 nt, Artificial Sequence
  Synthetic
guuuucauucuaagcacuaa

SEQ ID NO: 13261 - RNA, 24 nt, Artificial Sequence
  Synthetic
gcaaguuuucauucuaagcacuaa

SEQ ID NO: 13262 - RNA, 19 nt, Artificial Sequence
  Synthetic
guucuacccucuucacuaa

SEQ ID NO: 13263 - RNA, 22 nt, Artificial Sequence
  Synthetic
gcuguucuacccucuucacuaa

SEQ ID NO: 13264 - RNA, 18 nt, Artificial Sequence
  Synthetic
gacaugccuagggacuaa

SEQ ID NO: 13265 - RNA, 19 nt, Artificial Sequence
  Synthetic
gaccugguuuggauacuaa

SEQ ID NO: 13266 - RNA, 20 nt, Artificial Sequence
  Synthetic
guucucuuggcuguuacuaa

SEQ ID NO: 13267 - RNA, 19 nt, Artificial Sequence
  Synthetic
gugucauugaaagaccuaa

SEQ ID NO: 13268 - RNA, 20 nt, Artificial Sequence
  Synthetic
gaccacauauccuacccuaa

SEQ ID NO: 13269 - RNA, 18 nt, Artificial Sequence
  Synthetic
gcuuuucuucucuccuaa

SEQ ID NO: 13270 - RNA, 21 nt, Artificial Sequence
  Synthetic
gcagcuuuucuucucuccuaa

SEQ ID NO: 13271 - RNA, 18 nt, Artificial Sequence
  Synthetic
guagaauucaagagcuaa

SEQ ID NO: 13272 - RNA, 18 nt, Artificial Sequence
  Synthetic
gcagaagaaaaaggcuaa

SEQ ID NO: 13273 - RNA, 18 nt, Artificial Sequence
  Synthetic
gugacgagccaaggcuaa

SEQ ID NO: 13274 - RNA, 22 nt, Artificial Sequence
  Synthetic
guucuuuuuacuaaauggcuaa

SEQ ID NO: 13275 - RNA, 22 nt, Artificial Sequence
  Synthetic
guauaaaaaugguaagugcuaa

SEQ ID NO: 13276 - RNA, 23 nt, Artificial Sequence
  Synthetic
guucacacauaaucgagugcuaa

SEQ ID NO: 13277 - RNA, 19 nt, Artificial Sequence
  Synthetic
gaaaacaguaccaaucuaa

SEQ ID NO: 13278 - RNA, 18 nt, Artificial Sequence
  Synthetic
guaaagucuuuaaucuaa

SEQ ID NO: 13279 - RNA, 22 nt, Artificial Sequence
  Synthetic
gcuucaugcaaaaaugaucuaa

SEQ ID NO: 13280 - RNA, 20 nt, Artificial Sequence
  Synthetic
gcuaguacacaucuaucuaa

SEQ ID NO: 13281 - RNA, 22 nt, Artificial Sequence
  Synthetic
gagcuaguacacaucuaucuaa

SEQ ID NO: 13282 - RNA, 20 nt, Artificial Sequence
  Synthetic
gcaucuggauauuuaucuaa

SEQ ID NO: 13283 - RNA, 20 nt, Artificial Sequence
  Synthetic
gccuguaucucuugcucuaa

SEQ ID NO: 13284 - RNA, 22 nt, Artificial Sequence
  Synthetic
guauucuuaaauuucagucuaa

SEQ ID NO: 13285 - RNA, 21 nt, Artificial Sequence
  Synthetic
gauaaucugaauuuagucuaa

SEQ ID NO: 13286 - RNA, 23 nt, Artificial Sequence
  Synthetic
gacuuaguuuaaguagauucuaa

SEQ ID NO: 13287 - RNA, 20 nt, Artificial Sequence
  Synthetic
gauguuuauuauacuucuaa

SEQ ID NO: 13288 - RNA, 23 nt, Artificial Sequence
  Synthetic
guauuaucuaaauuuccuucuaa

SEQ ID NO: 13289 - RNA, 20 nt, Artificial Sequence
  Synthetic
gcuucuaagauugcuucuaa

SEQ ID NO: 13290 - RNA, 22 nt, Artificial Sequence
  Synthetic
guccuuaugcgcugucuucuaa

SEQ ID NO: 13291 - RNA, 24 nt, Artificial Sequence
  Synthetic
guguccuuaugcgcugucuucuaa

SEQ ID NO: 13292 - RNA, 18 nt, Artificial Sequence
  Synthetic
gauagggaaaaguucuaa

SEQ ID NO: 13293 - RNA, 18 nt, Artificial Sequence
  Synthetic
guuauuguuccuuucuaa

SEQ ID NO: 13294 - RNA, 18 nt, Artificial Sequence
  Synthetic
guaaguugggcuuucuaa

SEQ ID NO: 13295 - RNA, 18 nt, Artificial Sequence
  Synthetic
gagccaggaaaaaaguaa

SEQ ID NO: 13296 - RNA, 21 nt, Artificial Sequence
  Synthetic
ggaauauuacuuuaaaaguaa

SEQ ID NO: 13297 - RNA, 19 nt, Artificial Sequence
  Synthetic
gucuaauuggggaaaguaa

SEQ ID NO: 13298 - RNA, 23 nt, Artificial Sequence
  Synthetic
gauggugggagagagagaaguaa

SEQ ID NO: 13299 - RNA, 24 nt, Artificial Sequence
  Synthetic
ggauggugggagagagagaaguaa

SEQ ID NO: 13300 - RNA, 21 nt, Artificial Sequence
  Synthetic
gcuugcaucccugagaaguaa

SEQ ID NO: 13301 - RNA, 24 nt, Artificial Sequence
  Synthetic
gcagcuugcaucccugagaaguaa

SEQ ID NO: 13302 - RNA, 19 nt, Artificial Sequence
  Synthetic
guaggggaaugggaaguaa

SEQ ID NO: 13303 - RNA, 20 nt, Artificial Sequence
  Synthetic
gaaucuauguuggggaguaa

SEQ ID NO: 13304 - RNA, 22 nt, Artificial Sequence
  Synthetic
gagaaucuauguuggggaguaa

SEQ ID NO: 13305 - RNA, 18 nt, Artificial Sequence
  Synthetic
gaauaacaacaguaguaa

SEQ ID NO: 13306 - RNA, 20 nt, Artificial Sequence
  Synthetic
gagaauaacaacaguaguaa

SEQ ID NO: 13307 - RNA, 23 nt, Artificial Sequence
  Synthetic
gaagagaauaacaacaguaguaa

SEQ ID NO: 13308 - RNA, 24 nt, Artificial Sequence
  Synthetic
ggaagagaauaacaacaguaguaa

SEQ ID NO: 13309 - RNA, 18 nt, Artificial Sequence
  Synthetic
gagcugggcuggagguaa

SEQ ID NO: 13310 - RNA, 22 nt, Artificial Sequence
  Synthetic
gaaugagcugggcuggagguaa

SEQ ID NO: 13311 - RNA, 18 nt, Artificial Sequence
  Synthetic
guggguggguauagguaa

SEQ ID NO: 13312 - RNA, 20 nt, Artificial Sequence
  Synthetic
gaguggguggguauagguaa

SEQ ID NO: 13313 - RNA, 19 nt, Artificial Sequence
  Synthetic
gucagguuaaaaaggguaa

SEQ ID NO: 13314 - RNA, 20 nt, Artificial Sequence
  Synthetic
ggucagguuaaaaaggguaa

SEQ ID NO: 13315 - RNA, 23 nt, Artificial Sequence
  Synthetic
gaaggucagguuaaaaaggguaa

SEQ ID NO: 13316 - RNA, 20 nt, Artificial Sequence
  Synthetic
gaauauaauuuagaggguaa

SEQ ID NO: 13317 - RNA, 22 nt, Artificial Sequence
  Synthetic
gauuuguggugucauuggguaa

SEQ ID NO: 13318 - RNA, 18 nt, Artificial Sequence
  Synthetic
gaauuagaaacaauguaa

SEQ ID NO: 13319 - RNA, 19 nt, Artificial Sequence
  Synthetic
gugaagcuaaauaauguaa

SEQ ID NO: 13320 - RNA, 22 nt, Artificial Sequence
  Synthetic
gaugugaagcuaaauaauguaa

SEQ ID NO: 13321 - RNA, 24 nt, Artificial Sequence
  Synthetic
gugaugugaagcuaaauaauguaa

SEQ ID NO: 13322 - RNA, 21 nt, Artificial Sequence
  Synthetic
gcucuuuccccaaauauguaa

SEQ ID NO: 13323 - RNA, 24 nt, Artificial Sequence
  Synthetic
guuuuacaguugaacaaacuguaa

SEQ ID NO: 13324 - RNA, 18 nt, Artificial Sequence
  Synthetic
gauuagaguagacuguaa

SEQ ID NO: 13325 - RNA, 19 nt, Artificial Sequence
  Synthetic
ggauuagaguagacuguaa

SEQ ID NO: 13326 - RNA, 18 nt, Artificial Sequence
  Synthetic
gagucuuuuuuacuguaa

SEQ ID NO: 13327 - RNA, 18 nt, Artificial Sequence
  Synthetic
guccuacccuaucuguaa

SEQ ID NO: 13328 - RNA, 19 nt, Artificial Sequence
  Synthetic
gguccuacccuaucuguaa

SEQ ID NO: 13329 - RNA, 20 nt, Artificial Sequence
  Synthetic
gucauuuggcccuucuguaa

SEQ ID NO: 13330 - RNA, 20 nt, Artificial Sequence
  Synthetic
guaauagagagugaguguaa

SEQ ID NO: 13331 - RNA, 19 nt, Artificial Sequence
  Synthetic
guggcagagaucauuguaa

SEQ ID NO: 13332 - RNA, 19 nt, Artificial Sequence
  Synthetic
gagauaaaucuuauuguaa

SEQ ID NO: 13333 - RNA, 20 nt, Artificial Sequence
  Synthetic
gauugaagaauguguuguaa

SEQ ID NO: 13334 - RNA, 18 nt, Artificial Sequence
  Synthetic
gguuagggauauuuguaa

SEQ ID NO: 13335 - RNA, 24 nt, Artificial Sequence
  Synthetic
gaaucuaauuccauaaguuuguaa

SEQ ID NO: 13336 - RNA, 18 nt, Artificial Sequence
  Synthetic
gauagaaaaugcaauuaa

SEQ ID NO: 13337 - RNA, 21 nt, Artificial Sequence
  Synthetic
gguugagcaugucucaauuaa

SEQ ID NO: 13338 - RNA, 21 nt, Artificial Sequence
  Synthetic
guauauggaaugcugaauuaa

SEQ ID NO: 13339 - RNA, 18 nt, Artificial Sequence
  Synthetic
gggaucauuuguaauuaa

SEQ ID NO: 13340 - RNA, 19 nt, Artificial Sequence
  Synthetic
ggggaucauuuguaauuaa

SEQ ID NO: 13341 - RNA, 19 nt, Artificial Sequence
  Synthetic
gaaucacucuccccauuaa

SEQ ID NO: 13342 - RNA, 21 nt, Artificial Sequence
  Synthetic
gcgaaucacucuccccauuaa

SEQ ID NO: 13343 - RNA, 20 nt, Artificial Sequence
  Synthetic
gaaggcauuacaggcauuaa

SEQ ID NO: 13344 - RNA, 24 nt, Artificial Sequence
  Synthetic
gaaagaaggcauuacaggcauuaa

SEQ ID NO: 13345 - RNA, 19 nt, Artificial Sequence
  Synthetic
gagacagguaaaucauuaa

SEQ ID NO: 13346 - RNA, 21 nt, Artificial Sequence
  Synthetic
gucuuaacaaaaguucauuaa

SEQ ID NO: 13347 - RNA, 19 nt, Artificial Sequence
  Synthetic
gagaugaaacugggauuaa

SEQ ID NO: 13348 - RNA, 23 nt, Artificial Sequence
  Synthetic
gaaagagaugaaacugggauuaa

SEQ ID NO: 13349 - RNA, 21 nt, Artificial Sequence
  Synthetic
gguucguugaacaaauauuaa

SEQ ID NO: 13350 - RNA, 20 nt, Artificial Sequence
  Synthetic
gaagcaaaagcugauauuaa

SEQ ID NO: 13351 - RNA, 23 nt, Artificial Sequence
  Synthetic
gaagaagcaaaagcugauauuaa

SEQ ID NO: 13352 - RNA, 24 nt, Artificial Sequence
  Synthetic
ggaagaagcaaaagcugauauuaa

SEQ ID NO: 13353 - RNA, 19 nt, Artificial Sequence
  Synthetic
gcagcacaaaacguauuaa

SEQ ID NO: 13354 - RNA, 22 nt, Artificial Sequence
  Synthetic
guaggcaaugaauauuuauuaa

SEQ ID NO: 13355 - RNA, 23 nt, Artificial Sequence
  Synthetic
gguaggcaaugaauauuuauuaa

SEQ ID NO: 13356 - RNA, 22 nt, Artificial Sequence
  Synthetic
gaaaaaacaaguaucaacuuaa

SEQ ID NO: 13357 - RNA, 18 nt, Artificial Sequence
  Synthetic
ggggcaagaaaaccuuaa

SEQ ID NO: 13358 - RNA, 18 nt, Artificial Sequence
  Synthetic
gcaaggugauuaccuuaa

SEQ ID NO: 13359 - RNA, 21 nt, Artificial Sequence
  Synthetic
guagcaaggugauuaccuuaa

SEQ ID NO: 13360 - RNA, 19 nt, Artificial Sequence
  Synthetic
gcuguuuucaauugcuuaa

SEQ ID NO: 13361 - RNA, 18 nt, Artificial Sequence
  Synthetic
gacuuuuggcuugcuuaa

SEQ ID NO: 13362 - RNA, 22 nt, Artificial Sequence
  Synthetic
gcauagcuaaacacaaucuuaa

SEQ ID NO: 13363 - RNA, 23 nt, Artificial Sequence
  Synthetic
gaauacauaggaaugcaucuuaa

SEQ ID NO: 13364 - RNA, 20 nt, Artificial Sequence
  Synthetic
gccauguaccuaacucuuaa

SEQ ID NO: 13365 - RNA, 22 nt, Artificial Sequence
  Synthetic
gagccauguaccuaacucuuaa

SEQ ID NO: 13366 - RNA, 19 nt, Artificial Sequence
  Synthetic
guauuacagaagcucuuaa

SEQ ID NO: 13367 - RNA, 22 nt, Artificial Sequence
  Synthetic
gacaugguucuuuaagucuuaa

SEQ ID NO: 13368 - RNA, 23 nt, Artificial Sequence
  Synthetic
ggacaugguucuuuaagucuuaa

SEQ ID NO: 13369 - RNA, 19 nt, Artificial Sequence
  Synthetic
guuaagaacagauucuuaa

SEQ ID NO: 13370 - RNA, 22 nt, Artificial Sequence
  Synthetic
gcaguuaagaacagauucuuaa

SEQ ID NO: 13371 - RNA, 23 nt, Artificial Sequence
  Synthetic
ggcaguuaagaacagauucuuaa

SEQ ID NO: 13372 - RNA, 20 nt, Artificial Sequence
  Synthetic
gccugcaggagacuucuuaa

SEQ ID NO: 13373 - RNA, 21 nt, Artificial Sequence
  Synthetic
ggccugcaggagacuucuuaa

SEQ ID NO: 13374 - RNA, 22 nt, Artificial Sequence
  Synthetic
gggccugcaggagacuucuuaa

SEQ ID NO: 13375 - RNA, 20 nt, Artificial Sequence
  Synthetic
guuaaaauuugguuucuuaa

SEQ ID NO: 13376 - RNA, 24 nt, Artificial Sequence
  Synthetic
gucuguuaaaauuugguuucuuaa

SEQ ID NO: 13377 - RNA, 23 nt, Artificial Sequence
  Synthetic
gcauuauuauuccuuuuucuuaa

SEQ ID NO: 13378 - RNA, 24 nt, Artificial Sequence
  Synthetic
ggcauuauuauuccuuuuucuuaa

SEQ ID NO: 13379 - RNA, 19 nt, Artificial Sequence
  Synthetic
gaaguaauaugggaguuaa

SEQ ID NO: 13380 - RNA, 23 nt, Artificial Sequence
  Synthetic
gucuaucacagcauacuaguuaa

SEQ ID NO: 13381 - RNA, 18 nt, Artificial Sequence
  Synthetic
guaauguguaaugguuaa

SEQ ID NO: 13382 - RNA, 22 nt, Artificial Sequence
  Synthetic
gcauguaauguguaaugguuaa

SEQ ID NO: 13383 - RNA, 24 nt, Artificial Sequence
  Synthetic
guuuuuaaucuaagugcugguuaa

SEQ ID NO: 13384 - RNA, 21 nt, Artificial Sequence
  Synthetic
gcacagcagggaaaauguuaa

SEQ ID NO: 13385 - RNA, 24 nt, Artificial Sequence
  Synthetic
guaaacccucaagaauguuguuaa

SEQ ID NO: 13386 - RNA, 22 nt, Artificial Sequence
  Synthetic
guagguuuauauugcaauuuaa

SEQ ID NO: 13387 - RNA, 22 nt, Artificial Sequence
  Synthetic
gucauuugcagacagaauuuaa

SEQ ID NO: 13388 - RNA, 21 nt, Artificial Sequence
  Synthetic
guuacaugauaaaagauuuaa

SEQ ID NO: 13389 - RNA, 23 nt, Artificial Sequence
  Synthetic
gaguuacaugauaaaagauuuaa

SEQ ID NO: 13390 - RNA, 18 nt, Artificial Sequence
  Synthetic
guuauucuugauauuuaa

SEQ ID NO: 13391 - RNA, 24 nt, Artificial Sequence
  Synthetic
gcauaaguuauucuugauauuuaa

SEQ ID NO: 13392 - RNA, 23 nt, Artificial Sequence
  Synthetic
gaucuuccaugaagucccuuuaa

SEQ ID NO: 13393 - RNA, 19 nt, Artificial Sequence
  Synthetic
guggagguagggccuuuaa

SEQ ID NO: 13394 - RNA, 23 nt, Artificial Sequence
  Synthetic
gcaaguggagguagggccuuuaa

SEQ ID NO: 13395 - RNA, 19 nt, Artificial Sequence
  Synthetic
guggaguaugugucuuuaa

SEQ ID NO: 13396 - RNA, 22 nt, Artificial Sequence
  Synthetic
guuguggaguaugugucuuuaa

SEQ ID NO: 13397 - RNA, 24 nt, Artificial Sequence
  Synthetic
guguuguggaguaugugucuuuaa

SEQ ID NO: 13398 - RNA, 18 nt, Artificial Sequence
  Synthetic
gagguuacuauucuuuaa

SEQ ID NO: 13399 - RNA, 24 nt, Artificial Sequence
  Synthetic
gaaacagagguuacuauucuuuaa

SEQ ID NO: 13400 - RNA, 24 nt, Artificial Sequence
  Synthetic
gaauucagaaguagagagguuuaa

SEQ ID NO: 13401 - RNA, 18 nt, Artificial Sequence
  Synthetic
gaacaguacauuguuuaa

SEQ ID NO: 13402 - RNA, 22 nt, Artificial Sequence
  Synthetic
guuucaacuauugacauuuuaa

SEQ ID NO: 13403 - RNA, 18 nt, Artificial Sequence
  Synthetic
gaaacaagucuauuuuaa

SEQ ID NO: 13404 - RNA, 19 nt, Artificial Sequence
  Synthetic
ggaaacaagucuauuuuaa

SEQ ID NO: 13405 - RNA, 21 nt, Artificial Sequence
  Synthetic
gaggaaacaagucuauuuuaa

SEQ ID NO: 13406 - RNA, 24 nt, Artificial Sequence
  Synthetic
gauauaaauaauaguuuauuuuaa

SEQ ID NO: 13407 - RNA, 19 nt, Artificial Sequence
  Synthetic
guaaucaaacuucuuuuaa

SEQ ID NO: 13408 - RNA, 21 nt, Artificial Sequence
  Synthetic
gaguaaucaaacuucuuuuaa

SEQ ID NO: 13409 - RNA, 23 nt, Artificial Sequence
  Synthetic
gugaguaaucaaacuucuuuuaa

SEQ ID NO: 13410 - RNA, 18 nt, Artificial Sequence
  Synthetic
ggguagaauuucuuuuaa

SEQ ID NO: 13411 - RNA, 20 nt, Artificial Sequence
  Synthetic
guggguagaauuucuuuuaa

SEQ ID NO: 13412 - RNA, 23 nt, Artificial Sequence
  Synthetic
gcaguaacauuuaauauuuuuaa

SEQ ID NO: 13413 - RNA, 20 nt, Artificial Sequence
  Synthetic
guuacuucagcuuuuuuuaa

SEQ ID NO: 13414 - RNA, 21 nt, Artificial Sequence
  Synthetic
gguuacuucagcuuuuuuuaa

SEQ ID NO: 13415 - RNA, 24 nt, Artificial Sequence
  Synthetic
gcccacacugaaucuuuaaaaaca

SEQ ID NO: 13416 - RNA, 23 nt, Artificial Sequence
  Synthetic
gaccaacugguuucaagaaaaca

SEQ ID NO: 13417 - RNA, 21 nt, Artificial Sequence
  Synthetic
guuucggguucucagaaaaca

SEQ ID NO: 13418 - RNA, 22 nt, Artificial Sequence
  Synthetic
gguuucggguucucagaaaaca

SEQ ID NO: 13419 - RNA, 18 nt, Artificial Sequence
  Synthetic
gaacuaauguauaaaaca

SEQ ID NO: 13420 - RNA, 19 nt, Artificial Sequence
  Synthetic
ggaacuaauguauaaaaca

SEQ ID NO: 13421 - RNA, 21 nt, Artificial Sequence
  Synthetic
gaggaacuaauguauaaaaca

SEQ ID NO: 13422 - RNA, 24 nt, Artificial Sequence
  Synthetic
gcagaggaacuaauguauaaaaca

SEQ ID NO: 13423 - RNA, 19 nt, Artificial Sequence
  Synthetic
gaauuccuuuuauaaaaca

SEQ ID NO: 13424 - RNA, 24 nt, Artificial Sequence
  Synthetic
gaaucccaaauaccuaguaaaaca

SEQ ID NO: 13425 - RNA, 21 nt, Artificial Sequence
  Synthetic
gcuggauauccaaaacaaaca

SEQ ID NO: 13426 - RNA, 22 nt, Artificial Sequence
  Synthetic
ggcuggauauccaaaacaaaca

SEQ ID NO: 13427 - RNA, 20 nt, Artificial Sequence
  Synthetic
gccucauggugacccaaaca

SEQ ID NO: 13428 - RNA, 23 nt, Artificial Sequence
  Synthetic
gaagccucauggugacccaaaca

SEQ ID NO: 13429 - RNA, 19 nt, Artificial Sequence
  Synthetic
guaucuacuuggccaaaca

SEQ ID NO: 13430 - RNA, 20 nt, Artificial Sequence
  Synthetic
gguaucuacuuggccaaaca

SEQ ID NO: 13431 - RNA, 21 nt, Artificial Sequence
  Synthetic
ggguaucuacuuggccaaaca

SEQ ID NO: 13432 - RNA, 19 nt, Artificial Sequence
  Synthetic
gcuuaauuucuuccaaaca

SEQ ID NO: 13433 - RNA, 23 nt, Artificial Sequence
  Synthetic
gucugcuuaauuucuuccaaaca

SEQ ID NO: 13434 - RNA, 22 nt, Artificial Sequence
  Synthetic
gaaccauuauuucaggcaaaca

SEQ ID NO: 13435 - RNA, 21 nt, Artificial Sequence
  Synthetic
gaaaauaauaacguagaaaca

SEQ ID NO: 13436 - RNA, 24 nt, Artificial Sequence
  Synthetic
gaagaaaauaauaacguagaaaca

SEQ ID NO: 13437 - RNA, 21 nt, Artificial Sequence
  Synthetic
gcuuuuaacuguuaauaaaca

SEQ ID NO: 13438 - RNA, 19 nt, Artificial Sequence
  Synthetic
gcuucugaagagauaaaca

SEQ ID NO: 13439 - RNA, 19 nt, Artificial Sequence
  Synthetic
guauagacaagacuaaaca

SEQ ID NO: 13440 - RNA, 20 nt, Artificial Sequence
  Synthetic
gaaguauggccgccuaaaca

SEQ ID NO: 13441 - RNA, 24 nt, Artificial Sequence
  Synthetic
gcauaucaggcacugugcuaaaca

SEQ ID NO: 13442 - RNA, 18 nt, Artificial Sequence
  Synthetic
gaugaauauaaguaaaca

SEQ ID NO: 13443 - RNA, 20 nt, Artificial Sequence
  Synthetic
guaagauaaauagguaaaca

SEQ ID NO: 13444 - RNA, 21 nt, Artificial Sequence
  Synthetic
gaaaaaaaauguauuuaaaca

SEQ ID NO: 13445 - RNA, 24 nt, Artificial Sequence
  Synthetic
gaagaaaaaaaauguauuuaaaca

SEQ ID NO: 13446 - RNA, 19 nt, Artificial Sequence
  Synthetic
gagucauaauuuuuaaaca

SEQ ID NO: 13447 - RNA, 18 nt, Artificial Sequence
  Synthetic
ggcuuuagguucacaaca

SEQ ID NO: 13448 - RNA, 20 nt, Artificial Sequence
  Synthetic
guuaaagaguuacaccaaca

SEQ ID NO: 13449 - RNA, 19 nt, Artificial Sequence
  Synthetic
gcaaauaaaaugaccaaca

SEQ ID NO: 13450 - RNA, 18 nt, Artificial Sequence
  Synthetic
gggauauucaaagcaaca

SEQ ID NO: 13451 - RNA, 19 nt, Artificial Sequence
  Synthetic
ggggauauucaaagcaaca

SEQ ID NO: 13452 - RNA, 19 nt, Artificial Sequence
  Synthetic
gaaagacaacaaugcaaca

SEQ ID NO: 13453 - RNA, 22 nt, Artificial Sequence
  Synthetic
gcugaaagacaacaaugcaaca

SEQ ID NO: 13454 - RNA, 23 nt, Artificial Sequence
  Synthetic
ggcugaaagacaacaaugcaaca

SEQ ID NO: 13455 - RNA, 19 nt, Artificial Sequence
  Synthetic
guaguuuacuagaucaaca

SEQ ID NO: 13456 - RNA, 22 nt, Artificial Sequence
  Synthetic
guaguaguuuacuagaucaaca

SEQ ID NO: 13457 - RNA, 24 nt, Artificial Sequence
  Synthetic
gcauaaagucuuugaggaucaaca

SEQ ID NO: 13458 - RNA, 18 nt, Artificial Sequence
  Synthetic
gguuugaggaacucaaca

SEQ ID NO: 13459 - RNA, 24 nt, Artificial Sequence
  Synthetic
gcccauuucuucuuuuguagaaca

SEQ ID NO: 13460 - RNA, 18 nt, Artificial Sequence
  Synthetic
gaacucacaauuagaaca

SEQ ID NO: 13461 - RNA, 23 nt, Artificial Sequence
  Synthetic
guucugaacucacaauuagaaca

SEQ ID NO: 13462 - RNA, 24 nt, Artificial Sequence
  Synthetic
gguucugaacucacaauuagaaca

SEQ ID NO: 13463 - RNA, 22 nt, Artificial Sequence
  Synthetic
gccacugucaguucuuggaaca

SEQ ID NO: 13464 - RNA, 22 nt, Artificial Sequence
  Synthetic
guaacuguuuauuaauugaaca

SEQ ID NO: 13465 - RNA, 18 nt, Artificial Sequence
  Synthetic
guguucagaacuugaaca

SEQ ID NO: 13466 - RNA, 23 nt, Artificial Sequence
  Synthetic
gauauguguucagaacuugaaca

SEQ ID NO: 13467 - RNA, 24 nt, Artificial Sequence
  Synthetic
guaucuaauacuuggcacauaaca

SEQ ID NO: 13468 - RNA, 18 nt, Artificial Sequence
  Synthetic
gagcuggaaaagauaaca

SEQ ID NO: 13469 - RNA, 24 nt, Artificial Sequence
  Synthetic
gucucuugugguaguauuauaaca

SEQ ID NO: 13470 - RNA, 18 nt, Artificial Sequence
  Synthetic
gguacuagauauguaaca

SEQ ID NO: 13471 - RNA, 20 nt, Artificial Sequence
  Synthetic
gagguacuagauauguaaca

SEQ ID NO: 13472 - RNA, 24 nt, Artificial Sequence
  Synthetic
guuugagguacuagauauguaaca

SEQ ID NO: 13473 - RNA, 18 nt, Artificial Sequence
  Synthetic
gcuguggugguuguaaca

SEQ ID NO: 13474 - RNA, 19 nt, Artificial Sequence
  Synthetic
ggcuguggugguuguaaca

SEQ ID NO: 13475 - RNA, 24 nt, Artificial Sequence
  Synthetic
gaaaaggcuguggugguuguaaca

SEQ ID NO: 13476 - RNA, 21 nt, Artificial Sequence
  Synthetic
gaaccuggccaggcauuaaca

SEQ ID NO: 13477 - RNA, 23 nt, Artificial Sequence
  Synthetic
gagaaccuggccaggcauuaaca

SEQ ID NO: 13478 - RNA, 24 nt, Artificial Sequence
  Synthetic
ggagaaccuggccaggcauuaaca

SEQ ID NO: 13479 - RNA, 22 nt, Artificial Sequence
  Synthetic
guucccuaacauaugcuuaaca

SEQ ID NO: 13480 - RNA, 20 nt, Artificial Sequence
  Synthetic
gcuaaacaaauaaguuaaca

SEQ ID NO: 13481 - RNA, 18 nt, Artificial Sequence
  Synthetic
ggaggcaauccuuuaaca

SEQ ID NO: 13482 - RNA, 21 nt, Artificial Sequence
  Synthetic
gcacaacugucuguuuuaaca

SEQ ID NO: 13483 - RNA, 21 nt, Artificial Sequence
  Synthetic
guuaacugaaauaaaaacaca

SEQ ID NO: 13484 - RNA, 24 nt, Artificial Sequence
  Synthetic
guaaaauaaaaguaccccaacaca

SEQ ID NO: 13485 - RNA, 20 nt, Artificial Sequence
  Synthetic
gccuucaguuuaucaacaca

SEQ ID NO: 13486 - RNA, 21 nt, Artificial Sequence
  Synthetic
ggccuucaguuuaucaacaca

SEQ ID NO: 13487 - RNA, 23 nt, Artificial Sequence
  Synthetic
gaggccuucaguuuaucaacaca

SEQ ID NO: 13488 - RNA, 23 nt, Artificial Sequence
  Synthetic
guaucccuggccuguugaacaca

SEQ ID NO: 13489 - RNA, 18 nt, Artificial Sequence
  Synthetic
gagacaccuguacacaca

SEQ ID NO: 13490 - RNA, 19 nt, Artificial Sequence
  Synthetic
ggagacaccuguacacaca

SEQ ID NO: 13491 - RNA, 24 nt, Artificial Sequence
  Synthetic
guucaggagacaccuguacacaca

SEQ ID NO: 13492 - RNA, 21 nt, Artificial Sequence
  Synthetic
gagauggagauaacagacaca

SEQ ID NO: 13493 - RNA, 23 nt, Artificial Sequence
  Synthetic
gagagauggagauaacagacaca

SEQ ID NO: 13494 - RNA, 18 nt, Artificial Sequence
  Synthetic
gagcaaacuucagacaca

SEQ ID NO: 13495 - RNA, 20 nt, Artificial Sequence
  Synthetic
guuuucaugaaggagacaca

SEQ ID NO: 13496 - RNA, 21 nt, Artificial Sequence
  Synthetic
gacaaaaccaagaaauacaca

SEQ ID NO: 13497 - RNA, 21 nt, Artificial Sequence
  Synthetic
gcauuccuuucugccuacaca

SEQ ID NO: 13498 - RNA, 20 nt, Artificial Sequence
  Synthetic
gcagaggauaugucuacaca

SEQ ID NO: 13499 - RNA, 21 nt, Artificial Sequence
  Synthetic
ggcagaggauaugucuacaca

SEQ ID NO: 13500 - RNA, 22 nt, Artificial Sequence
  Synthetic
gggcagaggauaugucuacaca

SEQ ID NO: 13501 - RNA, 19 nt, Artificial Sequence
  Synthetic
gacaaugguguacaccaca

SEQ ID NO: 13502 - RNA, 19 nt, Artificial Sequence
  Synthetic
guauauucucaccaccaca

SEQ ID NO: 13503 - RNA, 22 nt, Artificial Sequence
  Synthetic
gauaaaauuccuucugcccaca

SEQ ID NO: 13504 - RNA, 23 nt, Artificial Sequence
  Synthetic
gcuuuuauaaucccuaucccaca

SEQ ID NO: 13505 - RNA, 24 nt, Artificial Sequence
  Synthetic
ggcuuuuauaaucccuaucccaca

SEQ ID NO: 13506 - RNA, 22 nt, Artificial Sequence
  Synthetic
gacuuuguuacuuauagccaca

SEQ ID NO: 13507 - RNA, 23 nt, Artificial Sequence
  Synthetic
ggacuuuguuacuuauagccaca

SEQ ID NO: 13508 - RNA, 18 nt, Artificial Sequence
  Synthetic
ggacuguagguagccaca

SEQ ID NO: 13509 - RNA, 21 nt, Artificial Sequence
  Synthetic
gcaggacuguagguagccaca

SEQ ID NO: 13510 - RNA, 24 nt, Artificial Sequence
  Synthetic
gcagcaggacuguagguagccaca

SEQ ID NO: 13511 - RNA, 22 nt, Artificial Sequence
  Synthetic
guucccauuuuucuccuccaca

SEQ ID NO: 13512 - RNA, 24 nt, Artificial Sequence
  Synthetic
guguucccauuuuucuccuccaca

SEQ ID NO: 13513 - RNA, 18 nt, Artificial Sequence
  Synthetic
gguugaaaguucuccaca

SEQ ID NO: 13514 - RNA, 20 nt, Artificial Sequence
  Synthetic
gagguugaaaguucuccaca

SEQ ID NO: 13515 - RNA, 21 nt, Artificial Sequence
  Synthetic
ggagguugaaaguucuccaca

SEQ ID NO: 13516 - RNA, 24 nt, Artificial Sequence
  Synthetic
gcaggagguugaaaguucuccaca

SEQ ID NO: 13517 - RNA, 20 nt, Artificial Sequence
  Synthetic
gccaaaaggauuagagcaca

SEQ ID NO: 13518 - RNA, 21 nt, Artificial Sequence
  Synthetic
gauuaaacagaaaaaugcaca

SEQ ID NO: 13519 - RNA, 20 nt, Artificial Sequence
  Synthetic
guauguuccugagaaucaca

SEQ ID NO: 13520 - RNA, 19 nt, Artificial Sequence
  Synthetic
gaugcuaauaauaaucaca

SEQ ID NO: 13521 - RNA, 20 nt, Artificial Sequence
  Synthetic
ggaugcuaauaauaaucaca

SEQ ID NO: 13522 - RNA, 18 nt, Artificial Sequence
  Synthetic
gagaagcuaguaaucaca

SEQ ID NO: 13523 - RNA, 19 nt, Artificial Sequence
  Synthetic
ggagaagcuaguaaucaca

SEQ ID NO: 13524 - RNA, 23 nt, Artificial Sequence
  Synthetic
gauaaaguuucaugguacucaca

SEQ ID NO: 13525 - RNA, 18 nt, Artificial Sequence
  Synthetic
gugacacggugccucaca

SEQ ID NO: 13526 - RNA, 19 nt, Artificial Sequence
  Synthetic
ggugacacggugccucaca

SEQ ID NO: 13527 - RNA, 21 nt, Artificial Sequence
  Synthetic
gcauccauggccuugcucaca

SEQ ID NO: 13528 - RNA, 21 nt, Artificial Sequence
  Synthetic
gauaaggcuugaguggucaca

SEQ ID NO: 13529 - RNA, 22 nt, Artificial Sequence
  Synthetic
ggauaaggcuugaguggucaca

SEQ ID NO: 13530 - RNA, 23 nt, Artificial Sequence
  Synthetic
gggauaaggcuugaguggucaca

SEQ ID NO: 13531 - RNA, 22 nt, Artificial Sequence
  Synthetic
gucuaugaguaggauauucaca

SEQ ID NO: 13532 - RNA, 19 nt, Artificial Sequence
  Synthetic
gaugcacacacuguucaca

SEQ ID NO: 13533 - RNA, 22 nt, Artificial Sequence
  Synthetic
gacuuuccagccccauuucaca

SEQ ID NO: 13534 - RNA, 23 nt, Artificial Sequence
  Synthetic
ggacuuuccagccccauuucaca

SEQ ID NO: 13535 - RNA, 24 nt, Artificial Sequence
  Synthetic
gggacuuuccagccccauuucaca

SEQ ID NO: 13536 - RNA, 18 nt, Artificial Sequence
  Synthetic
gagaaggaugauuucaca

SEQ ID NO: 13537 - RNA, 20 nt, Artificial Sequence
  Synthetic
gagagaaggaugauuucaca

SEQ ID NO: 13538 - RNA, 21 nt, Artificial Sequence
  Synthetic
ggagagaaggaugauuucaca

SEQ ID NO: 13539 - RNA, 24 nt, Artificial Sequence
  Synthetic
gcaggagagaaggaugauuucaca

SEQ ID NO: 13540 - RNA, 19 nt, Artificial Sequence
  Synthetic
gauaugaccuuauuucaca

SEQ ID NO: 13541 - RNA, 24 nt, Artificial Sequence
  Synthetic
gauucaucaucuaagacuuucaca

SEQ ID NO: 13542 - RNA, 23 nt, Artificial Sequence
  Synthetic
gaaaaucacgggaugcuuucaca

SEQ ID NO: 13543 - RNA, 22 nt, Artificial Sequence
  Synthetic
gauguuaaaaaagaaaaagaca

SEQ ID NO: 13544 - RNA, 18 nt, Artificial Sequence
  Synthetic
gucuauuaauuaaagaca

SEQ ID NO: 13545 - RNA, 20 nt, Artificial Sequence
  Synthetic
gagucuauuaauuaaagaca

SEQ ID NO: 13546 - RNA, 21 nt, Artificial Sequence
  Synthetic
ggagucuauuaauuaaagaca

SEQ ID NO: 13547 - RNA, 23 nt, Artificial Sequence
  Synthetic
guaugaggaaaaggaggaagaca

SEQ ID NO: 13548 - RNA, 19 nt, Artificial Sequence
  Synthetic
guuaacgcaggaacagaca

SEQ ID NO: 13549 - RNA, 23 nt, Artificial Sequence
  Synthetic
gcacguuaacgcaggaacagaca

SEQ ID NO: 13550 - RNA, 22 nt, Artificial Sequence
  Synthetic
gaacaaguaagguagacagaca

SEQ ID NO: 13551 - RNA, 18 nt, Artificial Sequence
  Synthetic
ggauuaucaucagagaca

SEQ ID NO: 13552 - RNA, 21 nt, Artificial Sequence
  Synthetic
gaaggauuaucaucagagaca

SEQ ID NO: 13553 - RNA, 23 nt, Artificial Sequence
  Synthetic
gaauauuaaaaaaaaaugagaca

SEQ ID NO: 13554 - RNA, 22 nt, Artificial Sequence
  Synthetic
gaaaaacaaugauacugagaca

SEQ ID NO: 13555 - RNA, 19 nt, Artificial Sequence
  Synthetic
gauuaucguugaauagaca

SEQ ID NO: 13556 - RNA, 20 nt, Artificial Sequence
  Synthetic
ggauuaucguugaauagaca

SEQ ID NO: 13557 - RNA, 21 nt, Artificial Sequence
  Synthetic
gggauuaucguugaauagaca

SEQ ID NO: 13558 - RNA, 22 nt, Artificial Sequence
  Synthetic
ggggauuaucguugaauagaca

SEQ ID NO: 13559 - RNA, 24 nt, Artificial Sequence
  Synthetic
guggggauuaucguugaauagaca

SEQ ID NO: 13560 - RNA, 23 nt, Artificial Sequence
  Synthetic
gaucuaaacugagguaauagaca

SEQ ID NO: 13561 - RNA, 20 nt, Artificial Sequence
  Synthetic
gaaacaugaaagguuagaca

SEQ ID NO: 13562 - RNA, 22 nt, Artificial Sequence
  Synthetic
gagaaacaugaaagguuagaca

SEQ ID NO: 13563 - RNA, 22 nt, Artificial Sequence
  Synthetic
guaccucuuucuuuccucgaca

SEQ ID NO: 13564 - RNA, 22 nt, Artificial Sequence
  Synthetic
gauuauaaccauagaaaggaca

SEQ ID NO: 13565 - RNA, 24 nt, Artificial Sequence
  Synthetic
gagauuauaaccauagaaaggaca

SEQ ID NO: 13566 - RNA, 19 nt, Artificial Sequence
  Synthetic
gagaaggaauuucaggaca

SEQ ID NO: 13567 - RNA, 20 nt, Artificial Sequence
  Synthetic
ggagaaggaauuucaggaca

SEQ ID NO: 13568 - RNA, 21 nt, Artificial Sequence
  Synthetic
gggagaaggaauuucaggaca

SEQ ID NO: 13569 - RNA, 18 nt, Artificial Sequence
  Synthetic
gguuuaugagcagggaca

SEQ ID NO: 13570 - RNA, 24 nt, Artificial Sequence
  Synthetic
gaauuugguuuaugagcagggaca

SEQ ID NO: 13571 - RNA, 24 nt, Artificial Sequence
  Synthetic
gucuuuuuaaucuugccugggaca

SEQ ID NO: 13572 - RNA, 22 nt, Artificial Sequence
  Synthetic
gcauaaacacacugacuggaca

SEQ ID NO: 13573 - RNA, 23 nt, Artificial Sequence
  Synthetic
ggcauaaacacacugacuggaca

SEQ ID NO: 13574 - RNA, 18 nt, Artificial Sequence
  Synthetic
ggguagccaaucuggaca

SEQ ID NO: 13575 - RNA, 20 nt, Artificial Sequence
  Synthetic
guggguagccaaucuggaca

SEQ ID NO: 13576 - RNA, 23 nt, Artificial Sequence
  Synthetic
guuacugacaaugcuucuggaca

SEQ ID NO: 13577 - RNA, 20 nt, Artificial Sequence
  Synthetic
gacacacacagucuuggaca

SEQ ID NO: 13578 - RNA, 22 nt, Artificial Sequence
  Synthetic
gugacacacacagucuuggaca

SEQ ID NO: 13579 - RNA, 22 nt, Artificial Sequence
  Synthetic
guauuuacaguguucuuggaca

SEQ ID NO: 13580 - RNA, 18 nt, Artificial Sequence
  Synthetic
guuuugugugccaugaca

SEQ ID NO: 13581 - RNA, 20 nt, Artificial Sequence
  Synthetic
gaguuuugugugccaugaca

SEQ ID NO: 13582 - RNA, 23 nt, Artificial Sequence
  Synthetic
gaagaguuuugugugccaugaca

SEQ ID NO: 13583 - RNA, 21 nt, Artificial Sequence
  Synthetic
gucauaacucugagcaugaca

SEQ ID NO: 13584 - RNA, 18 nt, Artificial Sequence
  Synthetic
gauaacgaaaauaugaca

SEQ ID NO: 13585 - RNA, 22 nt, Artificial Sequence
  Synthetic
gaauagcccccuaucuaugaca

SEQ ID NO: 13586 - RNA, 21 nt, Artificial Sequence
  Synthetic
guuucucacagaaaccugaca

SEQ ID NO: 13587 - RNA, 20 nt, Artificial Sequence
  Synthetic
gaaaaaaucauucagugaca

SEQ ID NO: 13588 - RNA, 19 nt, Artificial Sequence
  Synthetic
guuauuugacauggugaca

SEQ ID NO: 13589 - RNA, 21 nt, Artificial Sequence
  Synthetic
guguuauuugacauggugaca

SEQ ID NO: 13590 - RNA, 24 nt, Artificial Sequence
  Synthetic
gaucaccugaaaguuuaauugaca

SEQ ID NO: 13591 - RNA, 18 nt, Artificial Sequence
  Synthetic
gugccaaccugauugaca

SEQ ID NO: 13592 - RNA, 22 nt, Artificial Sequence
  Synthetic
guacgugccaaccugauugaca

SEQ ID NO: 13593 - RNA, 23 nt, Artificial Sequence
  Synthetic
guuuuuauuauuuucuauugaca

SEQ ID NO: 13594 - RNA, 18 nt, Artificial Sequence
  Synthetic
ggagccauucccuugaca

SEQ ID NO: 13595 - RNA, 19 nt, Artificial Sequence
  Synthetic
gggagccauucccuugaca

SEQ ID NO: 13596 - RNA, 23 nt, Artificial Sequence
  Synthetic
gcuccaaaaguacuuuguugaca

SEQ ID NO: 13597 - RNA, 20 nt, Artificial Sequence
  Synthetic
gauaucucaaucauuugaca

SEQ ID NO: 13598 - RNA, 21 nt, Artificial Sequence
  Synthetic
gauucauuuauucaaaauaca

SEQ ID NO: 13599 - RNA, 18 nt, Artificial Sequence
  Synthetic
gguaucuagauaaauaca

SEQ ID NO: 13600 - RNA, 19 nt, Artificial Sequence
  Synthetic
ggguaucuagauaaauaca

SEQ ID NO: 13601 - RNA, 20 nt, Artificial Sequence
  Synthetic
guagcuaaaccuuaaauaca

SEQ ID NO: 13602 - RNA, 21 nt, Artificial Sequence
  Synthetic
gucaaggaaagagacaauaca

SEQ ID NO: 13603 - RNA, 24 nt, Artificial Sequence
  Synthetic
gacuguuauauuuaaaauaauaca

SEQ ID NO: 13604 - RNA, 24 nt, Artificial Sequence
  Synthetic
gaacuuagaggucuucuacauaca

SEQ ID NO: 13605 - RNA, 22 nt, Artificial Sequence
  Synthetic
guaaauguugguuaaugauaca

SEQ ID NO: 13606 - RNA, 20 nt, Artificial Sequence
  Synthetic
gccacaggaugugugauaca

SEQ ID NO: 13607 - RNA, 21 nt, Artificial Sequence
  Synthetic
ggccacaggaugugugauaca

SEQ ID NO: 13608 - RNA, 23 nt, Artificial Sequence
  Synthetic
gaucuccgacaugacuugauaca

SEQ ID NO: 13609 - RNA, 24 nt, Artificial Sequence
  Synthetic
ggaucuccgacaugacuugauaca

SEQ ID NO: 13610 - RNA, 23 nt, Artificial Sequence
  Synthetic
gcucuucuauauguccauauaca

SEQ ID NO: 13611 - RNA, 24 nt, Artificial Sequence
  Synthetic
ggcucuucuauauguccauauaca

SEQ ID NO: 13612 - RNA, 18 nt, Artificial Sequence
  Synthetic
guauuuguagcauauaca

SEQ ID NO: 13613 - RNA, 22 nt, Artificial Sequence
  Synthetic
guuuguauuuguagcauauaca

SEQ ID NO: 13614 - RNA, 22 nt, Artificial Sequence
  Synthetic
guacacgaaagauuuauauaca

SEQ ID NO: 13615 - RNA, 18 nt, Artificial Sequence
  Synthetic
gcuauauuaaaguauaca

SEQ ID NO: 13616 - RNA, 19 nt, Artificial Sequence
  Synthetic
ggcuauauuaaaguauaca

SEQ ID NO: 13617 - RNA, 18 nt, Artificial Sequence
  Synthetic
gcuaggauuuauuauaca

SEQ ID NO: 13618 - RNA, 19 nt, Artificial Sequence
  Synthetic
ggcuaggauuuauuauaca

SEQ ID NO: 13619 - RNA, 21 nt, Artificial Sequence
  Synthetic
gaggcuaggauuuauuauaca

SEQ ID NO: 13620 - RNA, 24 nt, Artificial Sequence
  Synthetic
gcagaggcuaggauuuauuauaca

SEQ ID NO: 13621 - RNA, 19 nt, Artificial Sequence
  Synthetic
gccauacuaggaaacuaca

SEQ ID NO: 13622 - RNA, 19 nt, Artificial Sequence
  Synthetic
gucugcuuugacaacuaca

SEQ ID NO: 13623 - RNA, 21 nt, Artificial Sequence
  Synthetic
gagucugcuuugacaacuaca

SEQ ID NO: 13624 - RNA, 22 nt, Artificial Sequence
  Synthetic
ggagucugcuuugacaacuaca

SEQ ID NO: 13625 - RNA, 23 nt, Artificial Sequence
  Synthetic
guuuuccuccuuccugcacuaca

SEQ ID NO: 13626 - RNA, 24 nt, Artificial Sequence
  Synthetic
gguuuuccuccuuccugcacuaca

SEQ ID NO: 13627 - RNA, 19 nt, Artificial Sequence
  Synthetic
guuaaaaauauauacuaca

SEQ ID NO: 13628 - RNA, 22 nt, Artificial Sequence
  Synthetic
gauguuaaaaauauauacuaca

SEQ ID NO: 13629 - RNA, 20 nt, Artificial Sequence
  Synthetic
gauccuuuccuuuuacuaca

SEQ ID NO: 13630 - RNA, 21 nt, Artificial Sequence
  Synthetic
gucuaucugaggagaccuaca

SEQ ID NO: 13631 - RNA, 20 nt, Artificial Sequence
  Synthetic
gaaucacuggguauccuaca

SEQ ID NO: 13632 - RNA, 24 nt, Artificial Sequence
  Synthetic
guuacaaucucccagaaaucuaca

SEQ ID NO: 13633 - RNA, 18 nt, Artificial Sequence
  Synthetic
gaaguauagugcucuaca

SEQ ID NO: 13634 - RNA, 20 nt, Artificial Sequence
  Synthetic
gugaaguauagugcucuaca

SEQ ID NO: 13635 - RNA, 19 nt, Artificial Sequence
  Synthetic
gaaaagagugcagaguaca

SEQ ID NO: 13636 - RNA, 20 nt, Artificial Sequence
  Synthetic
guuaguguaguuggaguaca

SEQ ID NO: 13637 - RNA, 18 nt, Artificial Sequence
  Synthetic
gguaaaaguuaugguaca

SEQ ID NO: 13638 - RNA, 19 nt, Artificial Sequence
  Synthetic
gauuuaguaaaacuguaca

SEQ ID NO: 13639 - RNA, 23 nt, Artificial Sequence
  Synthetic
gccagauuuaguaaaacuguaca

SEQ ID NO: 13640 - RNA, 18 nt, Artificial Sequence
  Synthetic
gcccaauaaaugauuaca

SEQ ID NO: 13641 - RNA, 19 nt, Artificial Sequence
  Synthetic
ggcccaauaaaugauuaca

SEQ ID NO: 13642 - RNA, 21 nt, Artificial Sequence
  Synthetic
gaggcccaauaaaugauuaca

SEQ ID NO: 13643 - RNA, 22 nt, Artificial Sequence
  Synthetic
ggaggcccaauaaaugauuaca

SEQ ID NO: 13644 - RNA, 22 nt, Artificial Sequence
  Synthetic
gcugaauuuuuugaauauuaca

SEQ ID NO: 13645 - RNA, 18 nt, Artificial Sequence
  Synthetic
gaaaggcaaacuauuaca

SEQ ID NO: 13646 - RNA, 18 nt, Artificial Sequence
  Synthetic
gauauauaaauuauuaca

SEQ ID NO: 13647 - RNA, 19 nt, Artificial Sequence
  Synthetic
ggauauauaaauuauuaca

SEQ ID NO: 13648 - RNA, 23 nt, Artificial Sequence
  Synthetic
guuaggauauauaaauuauuaca

SEQ ID NO: 13649 - RNA, 23 nt, Artificial Sequence
  Synthetic
guaaaagcaauccccaacuuaca

SEQ ID NO: 13650 - RNA, 23 nt, Artificial Sequence
  Synthetic
gcauacaaaauucucaacuuaca

SEQ ID NO: 13651 - RNA, 19 nt, Artificial Sequence
  Synthetic
gaagaagugacaccuuaca

SEQ ID NO: 13652 - RNA, 20 nt, Artificial Sequence
  Synthetic
ggaagaagugacaccuuaca

SEQ ID NO: 13653 - RNA, 23 nt, Artificial Sequence
  Synthetic
guaggaagaagugacaccuuaca

SEQ ID NO: 13654 - RNA, 24 nt, Artificial Sequence
  Synthetic
guucacuuggcuacugucuuuaca

SEQ ID NO: 13655 - RNA, 22 nt, Artificial Sequence
  Synthetic
gauuuugacagaaaaguuuaca

SEQ ID NO: 13656 - RNA, 19 nt, Artificial Sequence
  Synthetic
gaaaaguagaaggaaacca

SEQ ID NO: 13657 - RNA, 24 nt, Artificial Sequence
  Synthetic
gaaacaaaaaaaauuaaagaacca

SEQ ID NO: 13658 - RNA, 24 nt, Artificial Sequence
  Synthetic
gaaauaaugacaacugcagaacca

SEQ ID NO: 13659 - RNA, 20 nt, Artificial Sequence
  Synthetic
guauuuacauucaugaacca

SEQ ID NO: 13660 - RNA, 21 nt, Artificial Sequence
  Synthetic
gcucaaaaauacagugaacca

SEQ ID NO: 13661 - RNA, 23 nt, Artificial Sequence
  Synthetic
gugcucaaaaauacagugaacca

SEQ ID NO: 13662 - RNA, 23 nt, Artificial Sequence
  Synthetic
gaaaaaauuagcugauugaacca

SEQ ID NO: 13663 - RNA, 22 nt, Artificial Sequence
  Synthetic
gaaauggagauucuguuaacca

SEQ ID NO: 13664 - RNA, 23 nt, Artificial Sequence
  Synthetic
ggaaauggagauucuguuaacca

SEQ ID NO: 13665 - RNA, 19 nt, Artificial Sequence
  Synthetic
gugauuuaguuuuuaacca

SEQ ID NO: 13666 - RNA, 21 nt, Artificial Sequence
  Synthetic
gauugacaaauucagacacca

SEQ ID NO: 13667 - RNA, 23 nt, Artificial Sequence
  Synthetic
gccuuagucaaacagaaucacca

SEQ ID NO: 13668 - RNA, 24 nt, Artificial Sequence
  Synthetic
ggccuuagucaaacagaaucacca

SEQ ID NO: 13669 - RNA, 20 nt, Artificial Sequence
  Synthetic
guucaggcucaucaucacca

SEQ ID NO: 13670 - RNA, 23 nt, Artificial Sequence
  Synthetic
gaaguucaggcucaucaucacca

SEQ ID NO: 13671 - RNA, 24 nt, Artificial Sequence
  Synthetic
ggaaguucaggcucaucaucacca

SEQ ID NO: 13672 - RNA, 24 nt, Artificial Sequence
  Synthetic
gauacucuauuuugaagaucacca

SEQ ID NO: 13673 - RNA, 19 nt, Artificial Sequence
  Synthetic
gaguguaaggaccucacca

SEQ ID NO: 13674 - RNA, 19 nt, Artificial Sequence
  Synthetic
guggugguuuaaaagacca

SEQ ID NO: 13675 - RNA, 22 nt, Artificial Sequence
  Synthetic
gcaguggugguuuaaaagacca

SEQ ID NO: 13676 - RNA, 19 nt, Artificial Sequence
  Synthetic
guagcuaaaguccagacca

SEQ ID NO: 13677 - RNA, 21 nt, Artificial Sequence
  Synthetic
gguuuauuuuuguuaugacca

SEQ ID NO: 13678 - RNA, 23 nt, Artificial Sequence
  Synthetic
gcgguuuauuuuuguuaugacca

SEQ ID NO: 13679 - RNA, 24 nt, Artificial Sequence
  Synthetic
ggcgguuuauuuuuguuaugacca

SEQ ID NO: 13680 - RNA, 18 nt, Artificial Sequence
  Synthetic
gaaaaguggaugugacca

SEQ ID NO: 13681 - RNA, 21 nt, Artificial Sequence
  Synthetic
gcugaaaaguggaugugacca

SEQ ID NO: 13682 - RNA, 19 nt, Artificial Sequence
  Synthetic
gagaccaacacaaauacca

SEQ ID NO: 13683 - RNA, 21 nt, Artificial Sequence
  Synthetic
guauauccaagcuccauacca

SEQ ID NO: 13684 - RNA, 20 nt, Artificial Sequence
  Synthetic
gaaauugcaaguguauacca

SEQ ID NO: 13685 - RNA, 23 nt, Artificial Sequence
  Synthetic
gaagaaauugcaaguguauacca

SEQ ID NO: 13686 - RNA, 24 nt, Artificial Sequence
  Synthetic
ggaagaaauugcaaguguauacca

SEQ ID NO: 13687 - RNA, 23 nt, Artificial Sequence
  Synthetic
guaaacaggaucuauuuguacca

SEQ ID NO: 13688 - RNA, 22 nt, Artificial Sequence
  Synthetic
gcacccuaggcaaauacaccca

SEQ ID NO: 13689 - RNA, 20 nt, Artificial Sequence
  Synthetic
gccucuguggaaaccaccca

SEQ ID NO: 13690 - RNA, 23 nt, Artificial Sequence
  Synthetic
gcagccucuguggaaaccaccca

SEQ ID NO: 13691 - RNA, 22 nt, Artificial Sequence
  Synthetic
gaauaaccaguugcaauaccca

SEQ ID NO: 13692 - RNA, 19 nt, Artificial Sequence
  Synthetic
gugagcauaaauuuaccca

SEQ ID NO: 13693 - RNA, 19 nt, Artificial Sequence
  Synthetic
gcaaagcaauaaagcccca

SEQ ID NO: 13694 - RNA, 23 nt, Artificial Sequence
  Synthetic
gcaagcaaagcaauaaagcccca

SEQ ID NO: 13695 - RNA, 24 nt, Artificial Sequence
  Synthetic
ggcaagcaaagcaauaaagcccca

SEQ ID NO: 13696 - RNA, 18 nt, Artificial Sequence
  Synthetic
gaaacccgaaguucccca

SEQ ID NO: 13697 - RNA, 19 nt, Artificial Sequence
  Synthetic
ggaaacccgaaguucccca

SEQ ID NO: 13698 - RNA, 22 nt, Artificial Sequence
  Synthetic
gacggaaacccgaaguucccca

SEQ ID NO: 13699 - RNA, 24 nt, Artificial Sequence
  Synthetic
gagacggaaacccgaaguucccca

SEQ ID NO: 13700 - RNA, 19 nt, Artificial Sequence
  Synthetic
guuacuacaucuaggccca

SEQ ID NO: 13701 - RNA, 19 nt, Artificial Sequence
  Synthetic
gaauuaagacaauggccca

SEQ ID NO: 13702 - RNA, 19 nt, Artificial Sequence
  Synthetic
gagaccacguguuugccca

SEQ ID NO: 13703 - RNA, 21 nt, Artificial Sequence
  Synthetic
gagagaccacguguuugccca

SEQ ID NO: 13704 - RNA, 23 nt, Artificial Sequence
  Synthetic
gugagagaccacguguuugccca

SEQ ID NO: 13705 - RNA, 24 nt, Artificial Sequence
  Synthetic
gaauaacuuucuuuguaacuccca

SEQ ID NO: 13706 - RNA, 18 nt, Artificial Sequence
  Synthetic
gaauauacugaucuccca

SEQ ID NO: 13707 - RNA, 18 nt, Artificial Sequence
  Synthetic
gaaucuuuaacucuccca

SEQ ID NO: 13708 - RNA, 19 nt, Artificial Sequence
  Synthetic
ggaaucuuuaacucuccca

SEQ ID NO: 13709 - RNA, 21 nt, Artificial Sequence
  Synthetic
gaggaaucuuuaacucuccca

SEQ ID NO: 13710 - RNA, 24 nt, Artificial Sequence
  Synthetic
gucucuuggaaaaaaacaguccca

SEQ ID NO: 13711 - RNA, 19 nt, Artificial Sequence
  Synthetic
gcuuguaaaaacuguccca

SEQ ID NO: 13712 - RNA, 18 nt, Artificial Sequence
  Synthetic
ggguuccagaguuuccca

SEQ ID NO: 13713 - RNA, 20 nt, Artificial Sequence
  Synthetic
gcccuccacaaauuuuccca

SEQ ID NO: 13714 - RNA, 21 nt, Artificial Sequence
  Synthetic
guuacauacugaauaaagcca

SEQ ID NO: 13715 - RNA, 21 nt, Artificial Sequence
  Synthetic
gauaaaauggcagagaagcca

SEQ ID NO: 13716 - RNA, 18 nt, Artificial Sequence
  Synthetic
ggauaaaaggagaagcca

SEQ ID NO: 13717 - RNA, 19 nt, Artificial Sequence
  Synthetic
gcucagaggacugaagcca

SEQ ID NO: 13718 - RNA, 21 nt, Artificial Sequence
  Synthetic
gugcucagaggacugaagcca

SEQ ID NO: 13719 - RNA, 22 nt, Artificial Sequence
  Synthetic
gucccucuauauauugaagcca

SEQ ID NO: 13720 - RNA, 19 nt, Artificial Sequence
  Synthetic
gcugcaugugcggcagcca

SEQ ID NO: 13721 - RNA, 18 nt, Artificial Sequence
  Synthetic
gguccuaugcaagagcca

SEQ ID NO: 13722 - RNA, 18 nt, Artificial Sequence
  Synthetic
ggcaaagcucuauagcca

SEQ ID NO: 13723 - RNA, 23 nt, Artificial Sequence
  Synthetic
gaaaaugaauuuugaucaggcca

SEQ ID NO: 13724 - RNA, 19 nt, Artificial Sequence
  Synthetic
gcuucugauuucgaggcca

SEQ ID NO: 13725 - RNA, 20 nt, Artificial Sequence
  Synthetic
ggcuucugauuucgaggcca

SEQ ID NO: 13726 - RNA, 23 nt, Artificial Sequence
  Synthetic
gcaauaucuacaaguuugggcca

SEQ ID NO: 13727 - RNA, 24 nt, Artificial Sequence
  Synthetic
ggcaauaucuacaaguuugggcca

SEQ ID NO: 13728 - RNA, 21 nt, Artificial Sequence
  Synthetic
gcaaaaugcaaugacuggcca

SEQ ID NO: 13729 - RNA, 23 nt, Artificial Sequence
  Synthetic
gugcaaaaugcaaugacuggcca

SEQ ID NO: 13730 - RNA, 19 nt, Artificial Sequence
  Synthetic
gucaguacaugccuggcca

SEQ ID NO: 13731 - RNA, 20 nt, Artificial Sequence
  Synthetic
gaagauuugcaucaaugcca

SEQ ID NO: 13732 - RNA, 21 nt, Artificial Sequence
  Synthetic
ggaagauuugcaucaaugcca

SEQ ID NO: 13733 - RNA, 22 nt, Artificial Sequence
  Synthetic
gucucugauaaaccacaugcca

SEQ ID NO: 13734 - RNA, 24 nt, Artificial Sequence
  Synthetic
gugucucugauaaaccacaugcca

SEQ ID NO: 13735 - RNA, 20 nt, Artificial Sequence
  Synthetic
guuuuagcuccaugaugcca

SEQ ID NO: 13736 - RNA, 18 nt, Artificial Sequence
  Synthetic
gguaccuauuauaugcca

SEQ ID NO: 13737 - RNA, 19 nt, Artificial Sequence
  Synthetic
ggguaccuauuauaugcca

SEQ ID NO: 13738 - RNA, 21 nt, Artificial Sequence
  Synthetic
gacaucacuaauacuaugcca

SEQ ID NO: 13739 - RNA, 20 nt, Artificial Sequence
  Synthetic
gauucaaauaggcucugcca

SEQ ID NO: 13740 - RNA, 19 nt, Artificial Sequence
  Synthetic
gagauaagcaguggugcca

SEQ ID NO: 13741 - RNA, 20 nt, Artificial Sequence
  Synthetic
ggagauaagcaguggugcca

SEQ ID NO: 13742 - RNA, 21 nt, Artificial Sequence
  Synthetic
gccaucaauucuccauugcca

SEQ ID NO: 13743 - RNA, 22 nt, Artificial Sequence
  Synthetic
guuuuuuccaaauuccuugcca

SEQ ID NO: 13744 - RNA, 24 nt, Artificial Sequence
  Synthetic
gaguuuuuuccaaauuccuugcca

SEQ ID NO: 13745 - RNA, 22 nt, Artificial Sequence
  Synthetic
guuggaguucagaaauuugcca

SEQ ID NO: 13746 - RNA, 24 nt, Artificial Sequence
  Synthetic
guuaaauaaaaaugagauuugcca

SEQ ID NO: 13747 - RNA, 18 nt, Artificial Sequence
  Synthetic
gacagugcaaguuugcca

SEQ ID NO: 13748 - RNA, 23 nt, Artificial Sequence
  Synthetic
gaaaagacagugcaaguuugcca

SEQ ID NO: 13749 - RNA, 22 nt, Artificial Sequence
  Synthetic
gucccaagccacugguuugcca

SEQ ID NO: 13750 - RNA, 24 nt, Artificial Sequence
  Synthetic
gagucccaagccacugguuugcca

SEQ ID NO: 13751 - RNA, 20 nt, Artificial Sequence
  Synthetic
gccaugcuccaagaaaucca

SEQ ID NO: 13752 - RNA, 22 nt, Artificial Sequence
  Synthetic
gugccaugcuccaagaaaucca

SEQ ID NO: 13753 - RNA, 21 nt, Artificial Sequence
  Synthetic
guuuuaaaauacuagaaucca

SEQ ID NO: 13754 - RNA, 19 nt, Artificial Sequence
  Synthetic
guccccaugacugaaucca

SEQ ID NO: 13755 - RNA, 24 nt, Artificial Sequence
  Synthetic
gcauuguccccaugacugaaucca

SEQ ID NO: 13756 - RNA, 22 nt, Artificial Sequence
  Synthetic
gaaacugacaugcccauaucca

SEQ ID NO: 13757 - RNA, 23 nt, Artificial Sequence
  Synthetic
gauucauuuucaauaacuaucca

SEQ ID NO: 13758 - RNA, 19 nt, Artificial Sequence
  Synthetic
gcuauucacugccuaucca

SEQ ID NO: 13759 - RNA, 21 nt, Artificial Sequence
  Synthetic
gugcuauucacugccuaucca

SEQ ID NO: 13760 - RNA, 22 nt, Artificial Sequence
  Synthetic
ggugcuauucacugccuaucca

SEQ ID NO: 13761 - RNA, 24 nt, Artificial Sequence
  Synthetic
guggugcuauucacugccuaucca

SEQ ID NO: 13762 - RNA, 21 nt, Artificial Sequence
  Synthetic
guaauuggcccuuaguaucca

SEQ ID NO: 13763 - RNA, 18 nt, Artificial Sequence
  Synthetic
guaaacauauaaacucca

SEQ ID NO: 13764 - RNA, 22 nt, Artificial Sequence
  Synthetic
gaauguaaacauauaaacucca

SEQ ID NO: 13765 - RNA, 20 nt, Artificial Sequence
  Synthetic
guuauuuaauuggaacucca

SEQ ID NO: 13766 - RNA, 21 nt, Artificial Sequence
  Synthetic
gguuauuuaauuggaacucca

SEQ ID NO: 13767 - RNA, 18 nt, Artificial Sequence
  Synthetic
guaggaaaaaguacucca

SEQ ID NO: 13768 - RNA, 20 nt, Artificial Sequence
  Synthetic
gauaauucuccuuuacucca

SEQ ID NO: 13769 - RNA, 22 nt, Artificial Sequence
  Synthetic
gugauaauucuccuuuacucca

SEQ ID NO: 13770 - RNA, 19 nt, Artificial Sequence
  Synthetic
gcaaagucaugacccucca

SEQ ID NO: 13771 - RNA, 23 nt, Artificial Sequence
  Synthetic
gaaugcaaagucaugacccucca

SEQ ID NO: 13772 - RNA, 24 nt, Artificial Sequence
  Synthetic
ggaaugcaaagucaugacccucca

SEQ ID NO: 13773 - RNA, 20 nt, Artificial Sequence
  Synthetic
gaauuagguauucgccucca

SEQ ID NO: 13774 - RNA, 24 nt, Artificial Sequence
  Synthetic
gccagaauuagguauucgccucca

SEQ ID NO: 13775 - RNA, 18 nt, Artificial Sequence
  Synthetic
gcuauuuuuuguccucca

SEQ ID NO: 13776 - RNA, 18 nt, Artificial Sequence
  Synthetic
guuugcugaacagcucca

SEQ ID NO: 13777 - RNA, 19 nt, Artificial Sequence
  Synthetic
gguuugcugaacagcucca

SEQ ID NO: 13778 - RNA, 23 nt, Artificial Sequence
  Synthetic
gcaagguuugcugaacagcucca

SEQ ID NO: 13779 - RNA, 19 nt, Artificial Sequence
  Synthetic
guauuuaacauaugcucca

SEQ ID NO: 13780 - RNA, 20 nt, Artificial Sequence
  Synthetic
gguauuuaacauaugcucca

SEQ ID NO: 13781 - RNA, 20 nt, Artificial Sequence
  Synthetic
gccuucccagacuuucucca

SEQ ID NO: 13782 - RNA, 18 nt, Artificial Sequence
  Synthetic
gguaguaaaguaagucca

SEQ ID NO: 13783 - RNA, 20 nt, Artificial Sequence
  Synthetic
gagguaguaaaguaagucca

SEQ ID NO: 13784 - RNA, 24 nt, Artificial Sequence
  Synthetic
gcaagagguaguaaaguaagucca

SEQ ID NO: 13785 - RNA, 24 nt, Artificial Sequence
  Synthetic
gauaauaggacuaagauaugucca

SEQ ID NO: 13786 - RNA, 18 nt, Artificial Sequence
  Synthetic
guuacuuacugaauucca

SEQ ID NO: 13787 - RNA, 21 nt, Artificial Sequence
  Synthetic
gaaguuacuuacugaauucca

SEQ ID NO: 13788 - RNA, 21 nt, Artificial Sequence
  Synthetic
gaacacacuguaugcauucca

SEQ ID NO: 13789 - RNA, 20 nt, Artificial Sequence
  Synthetic
gcaaugguauuuggauucca

SEQ ID NO: 13790 - RNA, 23 nt, Artificial Sequence
  Synthetic
gcuuuccaacuccagauauucca

SEQ ID NO: 13791 - RNA, 20 nt, Artificial Sequence
  Synthetic
guuaugacauuaaucuucca

SEQ ID NO: 13792 - RNA, 21 nt, Artificial Sequence
  Synthetic
gguuaugacauuaaucuucca

SEQ ID NO: 13793 - RNA, 24 nt, Artificial Sequence
  Synthetic
guuuauucuacuaauacgguucca

SEQ ID NO: 13794 - RNA, 19 nt, Artificial Sequence
  Synthetic
guaaaauaucguuguucca

SEQ ID NO: 13795 - RNA, 23 nt, Artificial Sequence
  Synthetic
guuuguaaaauaucguuguucca

SEQ ID NO: 13796 - RNA, 24 nt, Artificial Sequence
  Synthetic
gguuuguaaaauaucguuguucca

SEQ ID NO: 13797 - RNA, 19 nt, Artificial Sequence
  Synthetic
gaaucagagucaauuucca

SEQ ID NO: 13798 - RNA, 19 nt, Artificial Sequence
  Synthetic
guaaucagaaaacuuucca

SEQ ID NO: 13799 - RNA, 22 nt, Artificial Sequence
  Synthetic
gauguaaucagaaaacuuucca

SEQ ID NO: 13800 - RNA, 21 nt, Artificial Sequence
  Synthetic
gcucuaaaacagggcuuucca

SEQ ID NO: 13801 - RNA, 22 nt, Artificial Sequence
  Synthetic
ggcucuaaaacagggcuuucca

SEQ ID NO: 13802 - RNA, 21 nt, Artificial Sequence
  Synthetic
gucaaaauuauuuucuuucca

SEQ ID NO: 13803 - RNA, 21 nt, Artificial Sequence
  Synthetic
gaucaagaaauaauuuuucca

SEQ ID NO: 13804 - RNA, 21 nt, Artificial Sequence
  Synthetic
gacuguaucuugcuuuuucca

SEQ ID NO: 13805 - RNA, 22 nt, Artificial Sequence
  Synthetic
ggacuguaucuugcuuuuucca

SEQ ID NO: 13806 - RNA, 22 nt, Artificial Sequence
  Synthetic
gagggaaaaguggccaaaagca

SEQ ID NO: 13807 - RNA, 23 nt, Artificial Sequence
  Synthetic
ggagggaaaaguggccaaaagca

SEQ ID NO: 13808 - RNA, 24 nt, Artificial Sequence
  Synthetic
gggagggaaaaguggccaaaagca

SEQ ID NO: 13809 - RNA, 19 nt, Artificial Sequence
  Synthetic
guaaggggcagguaaagca

SEQ ID NO: 13810 - RNA, 22 nt, Artificial Sequence
  Synthetic
gauguaaggggcagguaaagca

SEQ ID NO: 13811 - RNA, 23 nt, Artificial Sequence
  Synthetic
ggauguaaggggcagguaaagca

SEQ ID NO: 13812 - RNA, 23 nt, Artificial Sequence
  Synthetic
gcuaaagaacaaaauguaaagca

SEQ ID NO: 13813 - RNA, 19 nt, Artificial Sequence
  Synthetic
gcaaucggauauuaaagca

SEQ ID NO: 13814 - RNA, 21 nt, Artificial Sequence
  Synthetic
gagagaaaauaaacacaagca

SEQ ID NO: 13815 - RNA, 21 nt, Artificial Sequence
  Synthetic
gcuaauaaugagagucaagca

SEQ ID NO: 13816 - RNA, 22 nt, Artificial Sequence
  Synthetic
ggcuaauaaugagagucaagca

SEQ ID NO: 13817 - RNA, 24 nt, Artificial Sequence
  Synthetic
guuaccacauuauauuuucaagca

SEQ ID NO: 13818 - RNA, 22 nt, Artificial Sequence
  Synthetic
gcaacaaaaagauaaagaagca

SEQ ID NO: 13819 - RNA, 21 nt, Artificial Sequence
  Synthetic
gaacucuauucuuaagaagca

SEQ ID NO: 13820 - RNA, 20 nt, Artificial Sequence
  Synthetic
gaccuaggaauagagaagca

SEQ ID NO: 13821 - RNA, 21 nt, Artificial Sequence
  Synthetic
ggaccuaggaauagagaagca

SEQ ID NO: 13822 - RNA, 22 nt, Artificial Sequence
  Synthetic
gaacauauuuuccacauaagca

SEQ ID NO: 13823 - RNA, 23 nt, Artificial Sequence
  Synthetic
ggaacauauuuuccacauaagca

SEQ ID NO: 13824 - RNA, 24 nt, Artificial Sequence
  Synthetic
gggaacauauuuuccacauaagca

SEQ ID NO: 13825 - RNA, 22 nt, Artificial Sequence
  Synthetic
gaaguggagagugagaacagca

SEQ ID NO: 13826 - RNA, 23 nt, Artificial Sequence
  Synthetic
ggaaguggagagugagaacagca

SEQ ID NO: 13827 - RNA, 24 nt, Artificial Sequence
  Synthetic
gacucucagaaacuacacacagca

SEQ ID NO: 13828 - RNA, 24 nt, Artificial Sequence
  Synthetic
gauuucccuuuagcauucacagca

SEQ ID NO: 13829 - RNA, 19 nt, Artificial Sequence
  Synthetic
gagugguaagcugacagca

SEQ ID NO: 13830 - RNA, 19 nt, Artificial Sequence
  Synthetic
gucuacguuacuuacagca

SEQ ID NO: 13831 - RNA, 24 nt, Artificial Sequence
  Synthetic
guaaugucuacguuacuuacagca

SEQ ID NO: 13832 - RNA, 18 nt, Artificial Sequence
  Synthetic
guaaagaagggcccagca

SEQ ID NO: 13833 - RNA, 19 nt, Artificial Sequence
  Synthetic
gguaaagaagggcccagca

SEQ ID NO: 13834 - RNA, 21 nt, Artificial Sequence
  Synthetic
gcgguaaagaagggcccagca

SEQ ID NO: 13835 - RNA, 22 nt, Artificial Sequence
  Synthetic
ggcgguaaagaagggcccagca

SEQ ID NO: 13836 - RNA, 23 nt, Artificial Sequence
  Synthetic
gggcgguaaagaagggcccagca

SEQ ID NO: 13837 - RNA, 24 nt, Artificial Sequence
  Synthetic
ggggcgguaaagaagggcccagca

SEQ ID NO: 13838 - RNA, 21 nt, Artificial Sequence
  Synthetic
gucucugcggccuugccagca

SEQ ID NO: 13839 - RNA, 24 nt, Artificial Sequence
  Synthetic
gauuucauagauuugguugcagca

SEQ ID NO: 13840 - RNA, 24 nt, Artificial Sequence
  Synthetic
guauccccauaaaaagcaucagca

SEQ ID NO: 13841 - RNA, 24 nt, Artificial Sequence
  Synthetic
gaaaucugaaucauuauuucagca

SEQ ID NO: 13842 - RNA, 23 nt, Artificial Sequence
  Synthetic
gcucauguguuuaauuuucagca

SEQ ID NO: 13843 - RNA, 19 nt, Artificial Sequence
  Synthetic
guucuauagaaacagagca

SEQ ID NO: 13844 - RNA, 18 nt, Artificial Sequence
  Synthetic
gcacuguuccagagagca

SEQ ID NO: 13845 - RNA, 19 nt, Artificial Sequence
  Synthetic
ggcacuguuccagagagca

SEQ ID NO: 13846 - RNA, 21 nt, Artificial Sequence
  Synthetic
gaggcacuguuccagagagca

SEQ ID NO: 13847 - RNA, 23 nt, Artificial Sequence
  Synthetic
gucauauauacuuuuguagagca

SEQ ID NO: 13848 - RNA, 20 nt, Artificial Sequence
  Synthetic
gaauuguugaauugggagca

SEQ ID NO: 13849 - RNA, 18 nt, Artificial Sequence
  Synthetic
gagaucuuaaaaugagca

SEQ ID NO: 13850 - RNA, 18 nt, Artificial Sequence
  Synthetic
gacuaggcuuucugagca

SEQ ID NO: 13851 - RNA, 19 nt, Artificial Sequence
  Synthetic
ggacuaggcuuucugagca

SEQ ID NO: 13852 - RNA, 23 nt, Artificial Sequence
  Synthetic
gacaaaguguccauuuuugagca

SEQ ID NO: 13853 - RNA, 24 nt, Artificial Sequence
  Synthetic
ggacaaaguguccauuuuugagca

SEQ ID NO: 13854 - RNA, 20 nt, Artificial Sequence
  Synthetic
gaacaaaggaaacaauagca

SEQ ID NO: 13855 - RNA, 22 nt, Artificial Sequence
  Synthetic
gagaacaaaggaaacaauagca

SEQ ID NO: 13856 - RNA, 20 nt, Artificial Sequence
  Synthetic
gcauuguguuucagauagca

SEQ ID NO: 13857 - RNA, 23 nt, Artificial Sequence
  Synthetic
gaagcauuguguuucagauagca

SEQ ID NO: 13858 - RNA, 21 nt, Artificial Sequence
  Synthetic
gauuuguuuuuugaccuagca

SEQ ID NO: 13859 - RNA, 23 nt, Artificial Sequence
  Synthetic
gagauuuguuuuuugaccuagca

SEQ ID NO: 13860 - RNA, 18 nt, Artificial Sequence
  Synthetic
gaagagagauagcuagca

SEQ ID NO: 13861 - RNA, 19 nt, Artificial Sequence
  Synthetic
ggaagagagauagcuagca

SEQ ID NO: 13862 - RNA, 23 nt, Artificial Sequence
  Synthetic
gacuauuaaacagauuuguagca

SEQ ID NO: 13863 - RNA, 18 nt, Artificial Sequence
  Synthetic
gaaggaaggugauuagca

SEQ ID NO: 13864 - RNA, 19 nt, Artificial Sequence
  Synthetic
ggaaggaaggugauuagca

SEQ ID NO: 13865 - RNA, 20 nt, Artificial Sequence
  Synthetic
gggaaggaaggugauuagca

SEQ ID NO: 13866 - RNA, 21 nt, Artificial Sequence
  Synthetic
ggggaaggaaggugauuagca

SEQ ID NO: 13867 - RNA, 22 nt, Artificial Sequence
  Synthetic
gggggaaggaaggugauuagca

SEQ ID NO: 13868 - RNA, 23 nt, Artificial Sequence
  Synthetic
ggggggaaggaaggugauuagca

SEQ ID NO: 13869 - RNA, 24 nt, Artificial Sequence
  Synthetic
gcacauuauuucagcugcuuagca

SEQ ID NO: 13870 - RNA, 21 nt, Artificial Sequence
  Synthetic
gauaaauuacauaauuuagca

SEQ ID NO: 13871 - RNA, 24 nt, Artificial Sequence
  Synthetic
gcagauaaauuacauaauuuagca

SEQ ID NO: 13872 - RNA, 20 nt, Artificial Sequence
  Synthetic
gaauguugcauuuuaacgca

SEQ ID NO: 13873 - RNA, 21 nt, Artificial Sequence
  Synthetic
gccugggguucacugcacgca

SEQ ID NO: 13874 - RNA, 18 nt, Artificial Sequence
  Synthetic
ggcaaguauucucccgca

SEQ ID NO: 13875 - RNA, 20 nt, Artificial Sequence
  Synthetic
guaauuuucaguguaaggca

SEQ ID NO: 13876 - RNA, 19 nt, Artificial Sequence
  Synthetic
gauuauauuaaaacaggca

SEQ ID NO: 13877 - RNA, 21 nt, Artificial Sequence
  Synthetic
gagauuauauuaaaacaggca

SEQ ID NO: 13878 - RNA, 21 nt, Artificial Sequence
  Synthetic
gaaucgggucccuaacaggca

SEQ ID NO: 13879 - RNA, 23 nt, Artificial Sequence
  Synthetic
gcgaaucgggucccuaacaggca

SEQ ID NO: 13880 - RNA, 22 nt, Artificial Sequence
  Synthetic
gacuuucuaaguggaccaggca

SEQ ID NO: 13881 - RNA, 18 nt, Artificial Sequence
  Synthetic
gcuuauaguugguaggca

SEQ ID NO: 13882 - RNA, 19 nt, Artificial Sequence
  Synthetic
gucugcaacuuuuagggca

SEQ ID NO: 13883 - RNA, 22 nt, Artificial Sequence
  Synthetic
guagucugcaacuuuuagggca

SEQ ID NO: 13884 - RNA, 23 nt, Artificial Sequence
  Synthetic
guaucuuauguggcuagggggca

SEQ ID NO: 13885 - RNA, 22 nt, Artificial Sequence
  Synthetic
gcaaaaagcaaaaacuggggca

SEQ ID NO: 13886 - RNA, 22 nt, Artificial Sequence
  Synthetic
gcuggcugugcaaucuugggca

SEQ ID NO: 13887 - RNA, 22 nt, Artificial Sequence
  Synthetic
gcaauugaaauaccauauggca

SEQ ID NO: 13888 - RNA, 23 nt, Artificial Sequence
  Synthetic
ggcaauugaaauaccauauggca

SEQ ID NO: 13889 - RNA, 24 nt, Artificial Sequence
  Synthetic
gggcaauugaaauaccauauggca

SEQ ID NO: 13890 - RNA, 20 nt, Artificial Sequence
  Synthetic
gcaagucuaagcuuguggca

SEQ ID NO: 13891 - RNA, 24 nt, Artificial Sequence
  Synthetic
gaaagcaagucuaagcuuguggca

SEQ ID NO: 13892 - RNA, 20 nt, Artificial Sequence
  Synthetic
gauuagcugauuuauuggca

SEQ ID NO: 13893 - RNA, 20 nt, Artificial Sequence
  Synthetic
guaagugccucucguuggca

SEQ ID NO: 13894 - RNA, 18 nt, Artificial Sequence
  Synthetic
gagucaggcaauuuggca

SEQ ID NO: 13895 - RNA, 21 nt, Artificial Sequence
  Synthetic
gcugagucaggcaauuuggca

SEQ ID NO: 13896 - RNA, 24 nt, Artificial Sequence
  Synthetic
gaagcugagucaggcaauuuggca

SEQ ID NO: 13897 - RNA, 23 nt, Artificial Sequence
  Synthetic
gcuauaauucuuuaacuuuggca

SEQ ID NO: 13898 - RNA, 24 nt, Artificial Sequence
  Synthetic
ggcuauaauucuuuaacuuuggca

SEQ ID NO: 13899 - RNA, 21 nt, Artificial Sequence
  Synthetic
gcaauaugaaaaaaaaaugca

SEQ ID NO: 13900 - RNA, 19 nt, Artificial Sequence
  Synthetic
gccuacuguuuaaaaugca

SEQ ID NO: 13901 - RNA, 20 nt, Artificial Sequence
  Synthetic
ggccuacuguuuaaaaugca

SEQ ID NO: 13902 - RNA, 18 nt, Artificial Sequence
  Synthetic
gagguagcacacaaugca

SEQ ID NO: 13903 - RNA, 21 nt, Artificial Sequence
  Synthetic
gcagagguagcacacaaugca

SEQ ID NO: 13904 - RNA, 22 nt, Artificial Sequence
  Synthetic
ggcagagguagcacacaaugca

SEQ ID NO: 13905 - RNA, 21 nt, Artificial Sequence
  Synthetic
guuaauggauacuucaaugca

SEQ ID NO: 13906 - RNA, 19 nt, Artificial Sequence
  Synthetic
gaaaucagaaaagaaugca

SEQ ID NO: 13907 - RNA, 21 nt, Artificial Sequence
  Synthetic
gaauuugaaaacauuaaugca

SEQ ID NO: 13908 - RNA, 20 nt, Artificial Sequence
  Synthetic
guaacgguuaagaauaugca

SEQ ID NO: 13909 - RNA, 18 nt, Artificial Sequence
  Synthetic
guuaagaauaauuaugca

SEQ ID NO: 13910 - RNA, 20 nt, Artificial Sequence
  Synthetic
gaguuaagaauaauuaugca

SEQ ID NO: 13911 - RNA, 21 nt, Artificial Sequence
  Synthetic
ggaguuaagaauaauuaugca

SEQ ID NO: 13912 - RNA, 22 nt, Artificial Sequence
  Synthetic
gggaguuaagaauaauuaugca

SEQ ID NO: 13913 - RNA, 19 nt, Artificial Sequence
  Synthetic
guacuagucuucuuaugca

SEQ ID NO: 13914 - RNA, 22 nt, Artificial Sequence
  Synthetic
guuguacuagucuucuuaugca

SEQ ID NO: 13915 - RNA, 24 nt, Artificial Sequence
  Synthetic
guuucuugaagggccauaacugca

SEQ ID NO: 13916 - RNA, 19 nt, Artificial Sequence
  Synthetic
gaaugguauucuaacugca

SEQ ID NO: 13917 - RNA, 20 nt, Artificial Sequence
  Synthetic
ggaaugguauucuaacugca

SEQ ID NO: 13918 - RNA, 22 nt, Artificial Sequence
  Synthetic
gaggaaugguauucuaacugca

SEQ ID NO: 13919 - RNA, 21 nt, Artificial Sequence
  Synthetic
gaauaaaucucuaagacugca

SEQ ID NO: 13920 - RNA, 21 nt, Artificial Sequence
  Synthetic
gcaucccuaaauaugacugca

SEQ ID NO: 13921 - RNA, 24 nt, Artificial Sequence
  Synthetic
gcaacugaaaugcugcuuccugca

SEQ ID NO: 13922 - RNA, 19 nt, Artificial Sequence
  Synthetic
gaaugcagggcaggcugca

SEQ ID NO: 13923 - RNA, 20 nt, Artificial Sequence
  Synthetic
ggaaugcagggcaggcugca

SEQ ID NO: 13924 - RNA, 21 nt, Artificial Sequence
  Synthetic
gggaaugcagggcaggcugca

SEQ ID NO: 13925 - RNA, 20 nt, Artificial Sequence
  Synthetic
gauugugugauaaaagugca

SEQ ID NO: 13926 - RNA, 19 nt, Artificial Sequence
  Synthetic
gcaggauaauuccagugca

SEQ ID NO: 13927 - RNA, 19 nt, Artificial Sequence
  Synthetic
guucacaggggugagugca

SEQ ID NO: 13928 - RNA, 20 nt, Artificial Sequence
  Synthetic
gguucacaggggugagugca

SEQ ID NO: 13929 - RNA, 22 nt, Artificial Sequence
  Synthetic
gugguucacaggggugagugca

SEQ ID NO: 13930 - RNA, 23 nt, Artificial Sequence
  Synthetic
ggugguucacaggggugagugca

SEQ ID NO: 13931 - RNA, 23 nt, Artificial Sequence
  Synthetic
gaauaaaaauaaggucaggugca

SEQ ID NO: 13932 - RNA, 18 nt, Artificial Sequence
  Synthetic
guggguuuagagggugca

SEQ ID NO: 13933 - RNA, 19 nt, Artificial Sequence
  Synthetic
gguggguuuagagggugca

SEQ ID NO: 13934 - RNA, 19 nt, Artificial Sequence
  Synthetic
gagguuacaaacaugugca

SEQ ID NO: 13935 - RNA, 20 nt, Artificial Sequence
  Synthetic
ggagguuacaaacaugugca

SEQ ID NO: 13936 - RNA, 21 nt, Artificial Sequence
  Synthetic
gggagguuacaaacaugugca

SEQ ID NO: 13937 - RNA, 22 nt, Artificial Sequence
  Synthetic
ggggagguuacaaacaugugca

SEQ ID NO: 13938 - RNA, 19 nt, Artificial Sequence
  Synthetic
gcgaccagaucuaugugca

SEQ ID NO: 13939 - RNA, 20 nt, Artificial Sequence
  Synthetic
ggcgaccagaucuaugugca

SEQ ID NO: 13940 - RNA, 21 nt, Artificial Sequence
  Synthetic
gggcgaccagaucuaugugca

SEQ ID NO: 13941 - RNA, 22 nt, Artificial Sequence
  Synthetic
ggggcgaccagaucuaugugca

SEQ ID NO: 13942 - RNA, 22 nt, Artificial Sequence
  Synthetic
guuucuaccagguguaugugca

SEQ ID NO: 13943 - RNA, 24 nt, Artificial Sequence
  Synthetic
gaguuucuaccagguguaugugca

SEQ ID NO: 13944 - RNA, 21 nt, Artificial Sequence
  Synthetic
gaaauggugagaugcugugca

SEQ ID NO: 13945 - RNA, 24 nt, Artificial Sequence
  Synthetic
gaagaaauggugagaugcugugca

SEQ ID NO: 13946 - RNA, 22 nt, Artificial Sequence
  Synthetic
guuucucaaaugucagugugca

SEQ ID NO: 13947 - RNA, 24 nt, Artificial Sequence
  Synthetic
guguuucucaaaugucagugugca

SEQ ID NO: 13948 - RNA, 19 nt, Artificial Sequence
  Synthetic
gugcagugccuggugugca

SEQ ID NO: 13949 - RNA, 21 nt, Artificial Sequence
  Synthetic
gcgugcagugccuggugugca

SEQ ID NO: 13950 - RNA, 22 nt, Artificial Sequence
  Synthetic
gaacaaaucaacagaaauugca

SEQ ID NO: 13951 - RNA, 19 nt, Artificial Sequence
  Synthetic
guguuaggaaacaauugca

SEQ ID NO: 13952 - RNA, 20 nt, Artificial Sequence
  Synthetic
guuuucuaagaggaauugca

SEQ ID NO: 13953 - RNA, 22 nt, Artificial Sequence
  Synthetic
guguuuucuaagaggaauugca

SEQ ID NO: 13954 - RNA, 18 nt, Artificial Sequence
  Synthetic
gggggaaaaccucuugca

SEQ ID NO: 13955 - RNA, 21 nt, Artificial Sequence
  Synthetic
guugggggaaaaccucuugca

SEQ ID NO: 13956 - RNA, 22 nt, Artificial Sequence
  Synthetic
gguugggggaaaaccucuugca

SEQ ID NO: 13957 - RNA, 24 nt, Artificial Sequence
  Synthetic
gugguugggggaaaaccucuugca

SEQ ID NO: 13958 - RNA, 23 nt, Artificial Sequence
  Synthetic
gauuccaagaggugguauuugca

SEQ ID NO: 13959 - RNA, 24 nt, Artificial Sequence
  Synthetic
ggauuccaagaggugguauuugca

SEQ ID NO: 13960 - RNA, 23 nt, Artificial Sequence
  Synthetic
gaaaaacauucuaucacuuugca

SEQ ID NO: 13961 - RNA, 23 nt, Artificial Sequence
  Synthetic
guaauagggacaaaagaaaauca

SEQ ID NO: 13962 - RNA, 24 nt, Artificial Sequence
  Synthetic
gguaauagggacaaaagaaaauca

SEQ ID NO: 13963 - RNA, 22 nt, Artificial Sequence
  Synthetic
guaaaguaacuuauacaaauca

SEQ ID NO: 13964 - RNA, 23 nt, Artificial Sequence
  Synthetic
gguaaaguaacuuauacaaauca

SEQ ID NO: 13965 - RNA, 18 nt, Artificial Sequence
  Synthetic
gcggaaauuaccaaauca

SEQ ID NO: 13966 - RNA, 20 nt, Artificial Sequence
  Synthetic
gugcggaaauuaccaaauca

SEQ ID NO: 13967 - RNA, 22 nt, Artificial Sequence
  Synthetic
gagugcggaaauuaccaaauca

SEQ ID NO: 13968 - RNA, 18 nt, Artificial Sequence
  Synthetic
gaagaacuauucaaauca

SEQ ID NO: 13969 - RNA, 23 nt, Artificial Sequence
  Synthetic
gaaaagaagaacuauucaaauca

SEQ ID NO: 13970 - RNA, 21 nt, Artificial Sequence
  Synthetic
ggaauaaaaauguucaaauca

SEQ ID NO: 13971 - RNA, 18 nt, Artificial Sequence
  Synthetic
gucuuuguuaagcaauca

SEQ ID NO: 13972 - RNA, 20 nt, Artificial Sequence
  Synthetic
gagucuuuguuaagcaauca

SEQ ID NO: 13973 - RNA, 22 nt, Artificial Sequence
  Synthetic
guccaugggaucuagucaauca

SEQ ID NO: 13974 - RNA, 18 nt, Artificial Sequence
  Synthetic
gcaagugaaguucaauca

SEQ ID NO: 13975 - RNA, 21 nt, Artificial Sequence
  Synthetic
gcugcaagugaaguucaauca

SEQ ID NO: 13976 - RNA, 22 nt, Artificial Sequence
  Synthetic
ggcugcaagugaaguucaauca

SEQ ID NO: 13977 - RNA, 23 nt, Artificial Sequence
  Synthetic
gggcugcaagugaaguucaauca

SEQ ID NO: 13978 - RNA, 24 nt, Artificial Sequence
  Synthetic
ggggcugcaagugaaguucaauca

SEQ ID NO: 13979 - RNA, 19 nt, Artificial Sequence
  Synthetic
gaaaauguaguuggaauca

SEQ ID NO: 13980 - RNA, 20 nt, Artificial Sequence
  Synthetic
ggaaaauguaguuggaauca

SEQ ID NO: 13981 - RNA, 21 nt, Artificial Sequence
  Synthetic
gggaaaauguaguuggaauca

SEQ ID NO: 13982 - RNA, 23 nt, Artificial Sequence
  Synthetic
gagggaaaauguaguuggaauca

SEQ ID NO: 13983 - RNA, 24 nt, Artificial Sequence
  Synthetic
ggagggaaaauguaguuggaauca

SEQ ID NO: 13984 - RNA, 22 nt, Artificial Sequence
  Synthetic
guauaugugucacuuugaauca

SEQ ID NO: 13985 - RNA, 18 nt, Artificial Sequence
  Synthetic
gcauauagaagauaauca

SEQ ID NO: 13986 - RNA, 19 nt, Artificial Sequence
  Synthetic
ggcauauagaagauaauca

SEQ ID NO: 13987 - RNA, 23 nt, Artificial Sequence
  Synthetic
gauuauaauugcagugauaauca

SEQ ID NO: 13988 - RNA, 19 nt, Artificial Sequence
  Synthetic
guuuggcuaaucuuaauca

SEQ ID NO: 13989 - RNA, 21 nt, Artificial Sequence
  Synthetic
gaguuuggcuaaucuuaauca

SEQ ID NO: 13990 - RNA, 18 nt, Artificial Sequence
  Synthetic
gagacagaaauaacauca

SEQ ID NO: 13991 - RNA, 23 nt, Artificial Sequence
  Synthetic
gacacgagacagaaauaacauca

SEQ ID NO: 13992 - RNA, 19 nt, Artificial Sequence
  Synthetic
gacaaugaacauaacauca

SEQ ID NO: 13993 - RNA, 20 nt, Artificial Sequence
  Synthetic
gaagagggaugcuaccauca

SEQ ID NO: 13994 - RNA, 19 nt, Artificial Sequence
  Synthetic
gagaagaaaauaagcauca

SEQ ID NO: 13995 - RNA, 23 nt, Artificial Sequence
  Synthetic
gucugagaagaaaauaagcauca

SEQ ID NO: 13996 - RNA, 23 nt, Artificial Sequence
  Synthetic
gaauucugucaauuucugcauca

SEQ ID NO: 13997 - RNA, 18 nt, Artificial Sequence
  Synthetic
guuagggaaggaucauca

SEQ ID NO: 13998 - RNA, 20 nt, Artificial Sequence
  Synthetic
gaguuagggaaggaucauca

SEQ ID NO: 13999 - RNA, 18 nt, Artificial Sequence
  Synthetic
ggauuucauaacucauca

SEQ ID NO: 14000 - RNA, 18 nt, Artificial Sequence
  Synthetic
ggaguccuucccucauca

SEQ ID NO: 14001 - RNA, 21 nt, Artificial Sequence
  Synthetic
gaauaauaaaaaaaaagauca

SEQ ID NO: 14002 - RNA, 22 nt, Artificial Sequence
  Synthetic
ggaauaauaaaaaaaaagauca

SEQ ID NO: 14003 - RNA, 24 nt, Artificial Sequence
  Synthetic
gaggaauaauaaaaaaaaagauca

SEQ ID NO: 14004 - RNA, 23 nt, Artificial Sequence
  Synthetic
gucagaagugugggugaagauca

SEQ ID NO: 14005 - RNA, 22 nt, Artificial Sequence
  Synthetic
gcuuugagaacaagauagauca

SEQ ID NO: 14006 - RNA, 19 nt, Artificial Sequence
  Synthetic
gcaugcuguggaaggauca

SEQ ID NO: 14007 - RNA, 20 nt, Artificial Sequence
  Synthetic
ggcaugcuguggaaggauca

SEQ ID NO: 14008 - RNA, 21 nt, Artificial Sequence
  Synthetic
gggcaugcuguggaaggauca

SEQ ID NO: 14009 - RNA, 21 nt, Artificial Sequence
  Synthetic
gcuacaucauauagcggauca

SEQ ID NO: 14010 - RNA, 22 nt, Artificial Sequence
  Synthetic
ggcuacaucauauagcggauca

SEQ ID NO: 14011 - RNA, 23 nt, Artificial Sequence
  Synthetic
gggcuacaucauauagcggauca

SEQ ID NO: 14012 - RNA, 24 nt, Artificial Sequence
  Synthetic
ggggcuacaucauauagcggauca

SEQ ID NO: 14013 - RNA, 20 nt, Artificial Sequence
  Synthetic
gacacugaaagacaugauca

SEQ ID NO: 14014 - RNA, 19 nt, Artificial Sequence
  Synthetic
gacuaccagagaaauauca

SEQ ID NO: 14015 - RNA, 21 nt, Artificial Sequence
  Synthetic
gcgacuaccagagaaauauca

SEQ ID NO: 14016 - RNA, 22 nt, Artificial Sequence
  Synthetic
guccagaauauggcuuauauca

SEQ ID NO: 14017 - RNA, 24 nt, Artificial Sequence
  Synthetic
gaguccagaauauggcuuauauca

SEQ ID NO: 14018 - RNA, 21 nt, Artificial Sequence
  Synthetic
gaaaugauuuaugacuuauca

SEQ ID NO: 14019 - RNA, 22 nt, Artificial Sequence
  Synthetic
ggaaaugauuuaugacuuauca

SEQ ID NO: 14020 - RNA, 22 nt, Artificial Sequence
  Synthetic
gaaaaaugagagacguuuauca

SEQ ID NO: 14021 - RNA, 23 nt, Artificial Sequence
  Synthetic
ggaaaaaugagagacguuuauca

SEQ ID NO: 14022 - RNA, 21 nt, Artificial Sequence
  Synthetic
gaacuuuaaagaaaaaacuca

SEQ ID NO: 14023 - RNA, 22 nt, Artificial Sequence
  Synthetic
ggaacuuuaaagaaaaaacuca

SEQ ID NO: 14024 - RNA, 20 nt, Artificial Sequence
  Synthetic
gaugucaauguagaaacuca

SEQ ID NO: 14025 - RNA, 24 nt, Artificial Sequence
  Synthetic
guuagaugucaauguagaaacuca

SEQ ID NO: 14026 - RNA, 21 nt, Artificial Sequence
  Synthetic
guauacuuucucuugaacuca

SEQ ID NO: 14027 - RNA, 23 nt, Artificial Sequence
  Synthetic
guguauacuuucucuugaacuca

SEQ ID NO: 14028 - RNA, 22 nt, Artificial Sequence
  Synthetic
gaaacaagaaaauaguaacuca

SEQ ID NO: 14029 - RNA, 23 nt, Artificial Sequence
  Synthetic
ggaaacaagaaaauaguaacuca

SEQ ID NO: 14030 - RNA, 19 nt, Artificial Sequence
  Synthetic
gucuagaugauuuaacuca

SEQ ID NO: 14031 - RNA, 18 nt, Artificial Sequence
  Synthetic
gugaugucucuuuacuca

SEQ ID NO: 14032 - RNA, 18 nt, Artificial Sequence
  Synthetic
ggguggaaauucaccuca

SEQ ID NO: 14033 - RNA, 23 nt, Artificial Sequence
  Synthetic
gcuaaggguggaaauucaccuca

SEQ ID NO: 14034 - RNA, 19 nt, Artificial Sequence
  Synthetic
gauuaaauaacagaccuca

SEQ ID NO: 14035 - RNA, 21 nt, Artificial Sequence
  Synthetic
gagauuaaauaacagaccuca

SEQ ID NO: 14036 - RNA, 22 nt, Artificial Sequence
  Synthetic
ggagauuaaauaacagaccuca

SEQ ID NO: 14037 - RNA, 19 nt, Artificial Sequence
  Synthetic
gacugagugcuaacccuca

SEQ ID NO: 14038 - RNA, 18 nt, Artificial Sequence
  Synthetic
gguucagggaagcccuca

SEQ ID NO: 14039 - RNA, 20 nt, Artificial Sequence
  Synthetic
gugguucagggaagcccuca

SEQ ID NO: 14040 - RNA, 19 nt, Artificial Sequence
  Synthetic
gccugcagggaaagccuca

SEQ ID NO: 14041 - RNA, 21 nt, Artificial Sequence
  Synthetic
gugccugcagggaaagccuca

SEQ ID NO: 14042 - RNA, 18 nt, Artificial Sequence
  Synthetic
gguuuucuuauagccuca

SEQ ID NO: 14043 - RNA, 18 nt, Artificial Sequence
  Synthetic
gcacaggcaauggccuca

SEQ ID NO: 14044 - RNA, 19 nt, Artificial Sequence
  Synthetic
ggcacaggcaauggccuca

SEQ ID NO: 14045 - RNA, 21 nt, Artificial Sequence
  Synthetic
guggcacaggcaauggccuca

SEQ ID NO: 14046 - RNA, 18 nt, Artificial Sequence
  Synthetic
gccccuggacacagcuca

SEQ ID NO: 14047 - RNA, 22 nt, Artificial Sequence
  Synthetic
gucagccccuggacacagcuca

SEQ ID NO: 14048 - RNA, 24 nt, Artificial Sequence
  Synthetic
gaauuuauugauucucuuggcuca

SEQ ID NO: 14049 - RNA, 19 nt, Artificial Sequence
  Synthetic
gagaauguucaaaugcuca

SEQ ID NO: 14050 - RNA, 19 nt, Artificial Sequence
  Synthetic
gugcuuaaaaaccugcuca

SEQ ID NO: 14051 - RNA, 21 nt, Artificial Sequence
  Synthetic
gugugcuuaaaaaccugcuca

SEQ ID NO: 14052 - RNA, 23 nt, Artificial Sequence
  Synthetic
gagugugcuuaaaaaccugcuca

SEQ ID NO: 14053 - RNA, 20 nt, Artificial Sequence
  Synthetic
gauacggcagugagcucuca

SEQ ID NO: 14054 - RNA, 19 nt, Artificial Sequence
  Synthetic
gaugaaaucuuugcucuca

SEQ ID NO: 14055 - RNA, 22 nt, Artificial Sequence
  Synthetic
gcagaugaaaucuuugcucuca

SEQ ID NO: 14056 - RNA, 18 nt, Artificial Sequence
  Synthetic
gaaaucauacaucucuca

SEQ ID NO: 14057 - RNA, 21 nt, Artificial Sequence
  Synthetic
gaagaaaucauacaucucuca

SEQ ID NO: 14058 - RNA, 23 nt, Artificial Sequence
  Synthetic
gagaagaaaucauacaucucuca

SEQ ID NO: 14059 - RNA, 23 nt, Artificial Sequence
  Synthetic
guucuaaauggcaucaucucuca

SEQ ID NO: 14060 - RNA, 22 nt, Artificial Sequence
  Synthetic
gaccacuguuuuccuucucuca

SEQ ID NO: 14061 - RNA, 23 nt, Artificial Sequence
  Synthetic
ggaccacuguuuuccuucucuca

SEQ ID NO: 14062 - RNA, 22 nt, Artificial Sequence
  Synthetic
gcuuacuucacaauaggucuca

SEQ ID NO: 14063 - RNA, 23 nt, Artificial Sequence
  Synthetic
ggcuuacuucacaauaggucuca

SEQ ID NO: 14064 - RNA, 24 nt, Artificial Sequence
  Synthetic
gggcuuacuucacaauaggucuca

SEQ ID NO: 14065 - RNA, 19 nt, Artificial Sequence
  Synthetic
gcuccuuggugcauucuca

SEQ ID NO: 14066 - RNA, 21 nt, Artificial Sequence
  Synthetic
gacucauucgauuuauucuca

SEQ ID NO: 14067 - RNA, 19 nt, Artificial Sequence
  Synthetic
gaaucaaguggaguucuca

SEQ ID NO: 14068 - RNA, 21 nt, Artificial Sequence
  Synthetic
gagaaucaaguggaguucuca

SEQ ID NO: 14069 - RNA, 22 nt, Artificial Sequence
  Synthetic
ggagaaucaaguggaguucuca

SEQ ID NO: 14070 - RNA, 18 nt, Artificial Sequence
  Synthetic
ggccuuuauuuguucuca

SEQ ID NO: 14071 - RNA, 21 nt, Artificial Sequence
  Synthetic
guuggccuuuauuuguucuca

SEQ ID NO: 14072 - RNA, 23 nt, Artificial Sequence
  Synthetic
guguuggccuuuauuuguucuca

SEQ ID NO: 14073 - RNA, 23 nt, Artificial Sequence
  Synthetic
guuauuuaaaguucuauuucuca

SEQ ID NO: 14074 - RNA, 24 nt, Artificial Sequence
  Synthetic
gaaaaggaauacauuuauuucuca

SEQ ID NO: 14075 - RNA, 22 nt, Artificial Sequence
  Synthetic
gacacaauacacuacaaaguca

SEQ ID NO: 14076 - RNA, 19 nt, Artificial Sequence
  Synthetic
gucuguuuuagucaaguca

SEQ ID NO: 14077 - RNA, 24 nt, Artificial Sequence
  Synthetic
guuuugucuguuuuagucaaguca

SEQ ID NO: 14078 - RNA, 19 nt, Artificial Sequence
  Synthetic
guagaaaguuuucaaguca

SEQ ID NO: 14079 - RNA, 21 nt, Artificial Sequence
  Synthetic
gaguagaaaguuuucaaguca

SEQ ID NO: 14080 - RNA, 21 nt, Artificial Sequence
  Synthetic
gaauaccaagucuguaaguca

SEQ ID NO: 14081 - RNA, 23 nt, Artificial Sequence
  Synthetic
gacauaucaucacaaaagaguca

SEQ ID NO: 14082 - RNA, 21 nt, Artificial Sequence
  Synthetic
gcauuugcaucacuggaguca

SEQ ID NO: 14083 - RNA, 18 nt, Artificial Sequence
  Synthetic
gugugcaaugaauaguca

SEQ ID NO: 14084 - RNA, 19 nt, Artificial Sequence
  Synthetic
ggugugcaaugaauaguca

SEQ ID NO: 14085 - RNA, 23 nt, Artificial Sequence
  Synthetic
gccuggugugcaaugaauaguca

SEQ ID NO: 14086 - RNA, 19 nt, Artificial Sequence
  Synthetic
guaguaggaaugauaguca

SEQ ID NO: 14087 - RNA, 21 nt, Artificial Sequence
  Synthetic
gaguaguaggaaugauaguca

SEQ ID NO: 14088 - RNA, 23 nt, Artificial Sequence
  Synthetic
gagaguaguaggaaugauaguca

SEQ ID NO: 14089 - RNA, 24 nt, Artificial Sequence
  Synthetic
ggagaguaguaggaaugauaguca

SEQ ID NO: 14090 - RNA, 24 nt, Artificial Sequence
  Synthetic
gcaauaccuaccauaugcuaguca

SEQ ID NO: 14091 - RNA, 20 nt, Artificial Sequence
  Synthetic
gaucagagcagugcuaguca

SEQ ID NO: 14092 - RNA, 24 nt, Artificial Sequence
  Synthetic
guuagaucagagcagugcuaguca

SEQ ID NO: 14093 - RNA, 19 nt, Artificial Sequence
  Synthetic
guuuuauagugguuaguca

SEQ ID NO: 14094 - RNA, 22 nt, Artificial Sequence
  Synthetic
guacuuuauuguuauuuaguca

SEQ ID NO: 14095 - RNA, 24 nt, Artificial Sequence
  Synthetic
gaguacuuuauuguuauuuaguca

SEQ ID NO: 14096 - RNA, 23 nt, Artificial Sequence
  Synthetic
gacauaaaauaauuuuuuaguca

SEQ ID NO: 14097 - RNA, 22 nt, Artificial Sequence
  Synthetic
gaaacucuaagaggccagguca

SEQ ID NO: 14098 - RNA, 19 nt, Artificial Sequence
  Synthetic
gagagcauuaaaccgguca

SEQ ID NO: 14099 - RNA, 22 nt, Artificial Sequence
  Synthetic
gcugagagcauuaaaccgguca

SEQ ID NO: 14100 - RNA, 18 nt, Artificial Sequence
  Synthetic
gaaggucauucaggguca

SEQ ID NO: 14101 - RNA, 19 nt, Artificial Sequence
  Synthetic
ggaaggucauucaggguca

SEQ ID NO: 14102 - RNA, 22 nt, Artificial Sequence
  Synthetic
guaggaaggucauucaggguca

SEQ ID NO: 14103 - RNA, 24 nt, Artificial Sequence
  Synthetic
gaguaggaaggucauucaggguca

SEQ ID NO: 14104 - RNA, 19 nt, Artificial Sequence
  Synthetic
gcaucuaacuccaugguca

SEQ ID NO: 14105 - RNA, 19 nt, Artificial Sequence
  Synthetic
gaaugggacauagugguca

SEQ ID NO: 14106 - RNA, 20 nt, Artificial Sequence
  Synthetic
gcacaaggaagauuauguca

SEQ ID NO: 14107 - RNA, 21 nt, Artificial Sequence
  Synthetic
ggcacaaggaagauuauguca

SEQ ID NO: 14108 - RNA, 24 nt, Artificial Sequence
  Synthetic
gcauccacaugauuugugguguca

SEQ ID NO: 14109 - RNA, 24 nt, Artificial Sequence
  Synthetic
gcuacucauguguugcuaaauuca

SEQ ID NO: 14110 - RNA, 24 nt, Artificial Sequence
  Synthetic
guccuguuucuaaaauagaauuca

SEQ ID NO: 14111 - RNA, 22 nt, Artificial Sequence
  Synthetic
gcaauuuuugaaguagaauuca

SEQ ID NO: 14112 - RNA, 24 nt, Artificial Sequence
  Synthetic
gagcaauuuuugaaguagaauuca

SEQ ID NO: 14113 - RNA, 18 nt, Artificial Sequence
  Synthetic
gccaccugaaguaauuca

SEQ ID NO: 14114 - RNA, 21 nt, Artificial Sequence
  Synthetic
gaauuaaggauauguaauuca

SEQ ID NO: 14115 - RNA, 23 nt, Artificial Sequence
  Synthetic
guuacuuauugagaauccauuca

SEQ ID NO: 14116 - RNA, 24 nt, Artificial Sequence
  Synthetic
gguuacuuauugagaauccauuca

SEQ ID NO: 14117 - RNA, 19 nt, Artificial Sequence
  Synthetic
gagaugcugauaucauuca

SEQ ID NO: 14118 - RNA, 22 nt, Artificial Sequence
  Synthetic
gagcauuucauuuauucauuca

SEQ ID NO: 14119 - RNA, 18 nt, Artificial Sequence
  Synthetic
guggcggugguucauuca

SEQ ID NO: 14120 - RNA, 21 nt, Artificial Sequence
  Synthetic
gcaguggcggugguucauuca

SEQ ID NO: 14121 - RNA, 21 nt, Artificial Sequence
  Synthetic
gucccacauaguguagauuca

SEQ ID NO: 14122 - RNA, 24 nt, Artificial Sequence
  Synthetic
gcagucccacauaguguagauuca

SEQ ID NO: 14123 - RNA, 18 nt, Artificial Sequence
  Synthetic
ggcaguuguguagauuca

SEQ ID NO: 14124 - RNA, 19 nt, Artificial Sequence
  Synthetic
gggcaguuguguagauuca

SEQ ID NO: 14125 - RNA, 24 nt, Artificial Sequence
  Synthetic
gucccacuuagugcuuuugauuca

SEQ ID NO: 14126 - RNA, 24 nt, Artificial Sequence
  Synthetic
gauaaauuagcugaagcauauuca

SEQ ID NO: 14127 - RNA, 21 nt, Artificial Sequence
  Synthetic
gccacguaaucuccuuauuca

SEQ ID NO: 14128 - RNA, 22 nt, Artificial Sequence
  Synthetic
ggccacguaaucuccuuauuca

SEQ ID NO: 14129 - RNA, 23 nt, Artificial Sequence
  Synthetic
gggccacguaaucuccuuauuca

SEQ ID NO: 14130 - RNA, 19 nt, Artificial Sequence
  Synthetic
gaggagagagaguuauuca

SEQ ID NO: 14131 - RNA, 20 nt, Artificial Sequence
  Synthetic
ggaggagagagaguuauuca

SEQ ID NO: 14132 - RNA, 21 nt, Artificial Sequence
  Synthetic
gccuuuuuuguucuuuauuca

SEQ ID NO: 14133 - RNA, 22 nt, Artificial Sequence
  Synthetic
gucaucucauaaugaaacuuca

SEQ ID NO: 14134 - RNA, 18 nt, Artificial Sequence
  Synthetic
gcccagcagugaacuuca

SEQ ID NO: 14135 - RNA, 20 nt, Artificial Sequence
  Synthetic
gacacaaauucagcacuuca

SEQ ID NO: 14136 - RNA, 21 nt, Artificial Sequence
  Synthetic
ggacacaaauucagcacuuca

SEQ ID NO: 14137 - RNA, 19 nt, Artificial Sequence
  Synthetic
guaauacuacucuccuuca

SEQ ID NO: 14138 - RNA, 20 nt, Artificial Sequence
  Synthetic
gguaauacuacucuccuuca

SEQ ID NO: 14139 - RNA, 24 nt, Artificial Sequence
  Synthetic
guaugguaauacuacucuccuuca

SEQ ID NO: 14140 - RNA, 19 nt, Artificial Sequence
  Synthetic
gauucucuggugaucuuca

SEQ ID NO: 14141 - RNA, 24 nt, Artificial Sequence
  Synthetic
gaucugauucucuggugaucuuca

SEQ ID NO: 14142 - RNA, 19 nt, Artificial Sequence
  Synthetic
gugaauauauuccucuuca

SEQ ID NO: 14143 - RNA, 20 nt, Artificial Sequence
  Synthetic
ggugaauauauuccucuuca

SEQ ID NO: 14144 - RNA, 19 nt, Artificial Sequence
  Synthetic
gagcaaugggagcucuuca

SEQ ID NO: 14145 - RNA, 20 nt, Artificial Sequence
  Synthetic
ggagcaaugggagcucuuca

SEQ ID NO: 14146 - RNA, 21 nt, Artificial Sequence
  Synthetic
gggagcaaugggagcucuuca

SEQ ID NO: 14147 - RNA, 18 nt, Artificial Sequence
  Synthetic
ggaccaaaauauucuuca

SEQ ID NO: 14148 - RNA, 24 nt, Artificial Sequence
  Synthetic
guauuuggaccaaaauauucuuca

SEQ ID NO: 14149 - RNA, 18 nt, Artificial Sequence
  Synthetic
gcuccucugucaaguuca

SEQ ID NO: 14150 - RNA, 20 nt, Artificial Sequence
  Synthetic
gugcuccucugucaaguuca

SEQ ID NO: 14151 - RNA, 19 nt, Artificial Sequence
  Synthetic
gcgcuaagauugaaguuca

SEQ ID NO: 14152 - RNA, 24 nt, Artificial Sequence
  Synthetic
gacaagcgcuaagauugaaguuca

SEQ ID NO: 14153 - RNA, 22 nt, Artificial Sequence
  Synthetic
guucucaggaaguucagguuca

SEQ ID NO: 14154 - RNA, 21 nt, Artificial Sequence
  Synthetic
gaccucugcucuagguguuca

SEQ ID NO: 14155 - RNA, 24 nt, Artificial Sequence
  Synthetic
gcugaccucugcucuagguguuca

SEQ ID NO: 14156 - RNA, 20 nt, Artificial Sequence
  Synthetic
gauugguuugaaaaauuuca

SEQ ID NO: 14157 - RNA, 24 nt, Artificial Sequence
  Synthetic
gcaauaguuggagguggaauuuca

SEQ ID NO: 14158 - RNA, 19 nt, Artificial Sequence
  Synthetic
gcuacuguucauaauuuca

SEQ ID NO: 14159 - RNA, 21 nt, Artificial Sequence
  Synthetic
gagcuacuguucauaauuuca

SEQ ID NO: 14160 - RNA, 22 nt, Artificial Sequence
  Synthetic
gacuuuuccaugcgucauuuca

SEQ ID NO: 14161 - RNA, 23 nt, Artificial Sequence
  Synthetic
ggacuuuuccaugcgucauuuca

SEQ ID NO: 14162 - RNA, 19 nt, Artificial Sequence
  Synthetic
gagaauagcaacuauuuca

SEQ ID NO: 14163 - RNA, 20 nt, Artificial Sequence
  Synthetic
ggagaauagcaacuauuuca

SEQ ID NO: 14164 - RNA, 20 nt, Artificial Sequence
  Synthetic
gcaagaauuugcaacuuuca

SEQ ID NO: 14165 - RNA, 21 nt, Artificial Sequence
  Synthetic
ggcaagaauuugcaacuuuca

SEQ ID NO: 14166 - RNA, 23 nt, Artificial Sequence
  Synthetic
gaaaacacuagaaaauacuuuca

SEQ ID NO: 14167 - RNA, 19 nt, Artificial Sequence
  Synthetic
gaaaaacauuauacuuuca

SEQ ID NO: 14168 - RNA, 24 nt, Artificial Sequence
  Synthetic
gcauuaacaggggauggccuuuca

SEQ ID NO: 14169 - RNA, 23 nt, Artificial Sequence
  Synthetic
gaucauuguaaacgagucuuuca

SEQ ID NO: 14170 - RNA, 18 nt, Artificial Sequence
  Synthetic
gaaugaguuacuguuuca

SEQ ID NO: 14171 - RNA, 23 nt, Artificial Sequence
  Synthetic
gaacugaaugaguuacuguuuca

SEQ ID NO: 14172 - RNA, 24 nt, Artificial Sequence
  Synthetic
ggaacugaaugaguuacuguuuca

SEQ ID NO: 14173 - RNA, 23 nt, Artificial Sequence
  Synthetic
guuauacaggcuauuuuguuuca

SEQ ID NO: 14174 - RNA, 21 nt, Artificial Sequence
  Synthetic
gcauuuuuauacagauuuuca

SEQ ID NO: 14175 - RNA, 21 nt, Artificial Sequence
  Synthetic
gaauaauaagaguacuuuuca

SEQ ID NO: 14176 - RNA, 18 nt, Artificial Sequence
  Synthetic
gaaaugaguuaguuuuca

SEQ ID NO: 14177 - RNA, 19 nt, Artificial Sequence
  Synthetic
guagcuuccauuuuuuuca

SEQ ID NO: 14178 - RNA, 18 nt, Artificial Sequence
  Synthetic
gccugagacucaaaaaga

SEQ ID NO: 14179 - RNA, 19 nt, Artificial Sequence
  Synthetic
ggccugagacucaaaaaga

SEQ ID NO: 14180 - RNA, 20 nt, Artificial Sequence
  Synthetic
gggccugagacucaaaaaga

SEQ ID NO: 14181 - RNA, 24 nt, Artificial Sequence
  Synthetic
gccagggccugagacucaaaaaga

SEQ ID NO: 14182 - RNA, 20 nt, Artificial Sequence
  Synthetic
gaaccauacagggaaaaaga

SEQ ID NO: 14183 - RNA, 23 nt, Artificial Sequence
  Synthetic
gaagaaccauacagggaaaaaga

SEQ ID NO: 14184 - RNA, 20 nt, Artificial Sequence
  Synthetic
gauaaauuuccaagaaaaga

SEQ ID NO: 14185 - RNA, 24 nt, Artificial Sequence
  Synthetic
gaaagauaaauuuccaagaaaaga

SEQ ID NO: 14186 - RNA, 22 nt, Artificial Sequence
  Synthetic
gagagaacacagcuggaaaaga

SEQ ID NO: 14187 - RNA, 21 nt, Artificial Sequence
  Synthetic
gacucuuagagcuauaaaaga

SEQ ID NO: 14188 - RNA, 22 nt, Artificial Sequence
  Synthetic
ggacucuuagagcuauaaaaga

SEQ ID NO: 14189 - RNA, 23 nt, Artificial Sequence
  Synthetic
gggacucuuagagcuauaaaaga

SEQ ID NO: 14190 - RNA, 24 nt, Artificial Sequence
  Synthetic
ggggacucuuagagcuauaaaaga

SEQ ID NO: 14191 - RNA, 18 nt, Artificial Sequence
  Synthetic
ggugauuaccuuaaaaga

SEQ ID NO: 14192 - RNA, 22 nt, Artificial Sequence
  Synthetic
gcaaggugauuaccuuaaaaga

SEQ ID NO: 14193 - RNA, 21 nt, Artificial Sequence
  Synthetic
guuucuguaacccuacaaaga

SEQ ID NO: 14194 - RNA, 24 nt, Artificial Sequence
  Synthetic
gaaguuucuguaacccuacaaaga

SEQ ID NO: 14195 - RNA, 18 nt, Artificial Sequence
  Synthetic
gaguaguugcagcaaaga

SEQ ID NO: 14196 - RNA, 19 nt, Artificial Sequence
  Synthetic
gagguuauacauucaaaga

SEQ ID NO: 14197 - RNA, 18 nt, Artificial Sequence
  Synthetic
gucauacuggaagaaaga

SEQ ID NO: 14198 - RNA, 19 nt, Artificial Sequence
  Synthetic
ggucauacuggaagaaaga

SEQ ID NO: 14199 - RNA, 20 nt, Artificial Sequence
  Synthetic
gcaaacuauaguaagaaaga

SEQ ID NO: 14200 - RNA, 23 nt, Artificial Sequence
  Synthetic
gaagcaaacuauaguaagaaaga

SEQ ID NO: 14201 - RNA, 18 nt, Artificial Sequence
  Synthetic
gugaaauauucagaaaga

SEQ ID NO: 14202 - RNA, 18 nt, Artificial Sequence
  Synthetic
gggaaaaaaacauaaaga

SEQ ID NO: 14203 - RNA, 19 nt, Artificial Sequence
  Synthetic
ggggaaaaaaacauaaaga

SEQ ID NO: 14204 - RNA, 20 nt, Artificial Sequence
  Synthetic
gucguuuuuaauccuaaaga

SEQ ID NO: 14205 - RNA, 21 nt, Artificial Sequence
  Synthetic
ggucguuuuuaauccuaaaga

SEQ ID NO: 14206 - RNA, 19 nt, Artificial Sequence
  Synthetic
gccuuuuuuugaguaaaga

SEQ ID NO: 14207 - RNA, 20 nt, Artificial Sequence
  Synthetic
ggccuuuuuuugaguaaaga

SEQ ID NO: 14208 - RNA, 21 nt, Artificial Sequence
  Synthetic
guuugagguuauuuuuaaaga

SEQ ID NO: 14209 - RNA, 24 nt, Artificial Sequence
  Synthetic
gaaguuugagguuauuuuuaaaga

SEQ ID NO: 14210 - RNA, 23 nt, Artificial Sequence
  Synthetic
gaaaaaacaaaggcaaaacaaga

SEQ ID NO: 14211 - RNA, 21 nt, Artificial Sequence
  Synthetic
gaaaaccuauuuucaacaaga

SEQ ID NO: 14212 - RNA, 22 nt, Artificial Sequence
  Synthetic
ggaaaaccuauuuucaacaaga

SEQ ID NO: 14213 - RNA, 23 nt, Artificial Sequence
  Synthetic
gggaaaaccuauuuucaacaaga

SEQ ID NO: 14214 - RNA, 19 nt, Artificial Sequence
  Synthetic
gaaacagugacuaacaaga

SEQ ID NO: 14215 - RNA, 20 nt, Artificial Sequence
  Synthetic
ggaaacagugacuaacaaga

SEQ ID NO: 14216 - RNA, 21 nt, Artificial Sequence
  Synthetic
gggaaacagugacuaacaaga

SEQ ID NO: 14217 - RNA, 22 nt, Artificial Sequence
  Synthetic
ggggaaacagugacuaacaaga

SEQ ID NO: 14218 - RNA, 20 nt, Artificial Sequence
  Synthetic
gcaaacuuucagccacaaga

SEQ ID NO: 14219 - RNA, 22 nt, Artificial Sequence
  Synthetic
gauucaaugaaaaucgacaaga

SEQ ID NO: 14220 - RNA, 23 nt, Artificial Sequence
  Synthetic
ggauucaaugaaaaucgacaaga

SEQ ID NO: 14221 - RNA, 24 nt, Artificial Sequence
  Synthetic
gggauucaaugaaaaucgacaaga

SEQ ID NO: 14222 - RNA, 24 nt, Artificial Sequence
  Synthetic
guuuacuugaaauuugcuacaaga

SEQ ID NO: 14223 - RNA, 24 nt, Artificial Sequence
  Synthetic
gcuauccagacccuggcagcaaga

SEQ ID NO: 14224 - RNA, 20 nt, Artificial Sequence
  Synthetic
gaaaaugguugcacucaaga

SEQ ID NO: 14225 - RNA, 22 nt, Artificial Sequence
  Synthetic
gagaaaaugguugcacucaaga

SEQ ID NO: 14226 - RNA, 24 nt, Artificial Sequence
  Synthetic
gccaacagcuaugcagugucaaga

SEQ ID NO: 14227 - RNA, 18 nt, Artificial Sequence
  Synthetic
gacuugucuaaaagaaga

SEQ ID NO: 14228 - RNA, 24 nt, Artificial Sequence
  Synthetic
guuaaugggaguggaagaagaaga

SEQ ID NO: 14229 - RNA, 19 nt, Artificial Sequence
  Synthetic
gaaugcauaugggagaaga

SEQ ID NO: 14230 - RNA, 19 nt, Artificial Sequence
  Synthetic
gcuugucuccaauagaaga

SEQ ID NO: 14231 - RNA, 21 nt, Artificial Sequence
  Synthetic
gagcuugucuccaauagaaga

SEQ ID NO: 14232 - RNA, 24 nt, Artificial Sequence
  Synthetic
guugagcuugucuccaauagaaga

SEQ ID NO: 14233 - RNA, 18 nt, Artificial Sequence
  Synthetic
gcuaaaauucauagaaga

SEQ ID NO: 14234 - RNA, 21 nt, Artificial Sequence
  Synthetic
guugcuaaaauucauagaaga

SEQ ID NO: 14235 - RNA, 23 nt, Artificial Sequence
  Synthetic
guguugcuaaaauucauagaaga

SEQ ID NO: 14236 - RNA, 19 nt, Artificial Sequence
  Synthetic
gcacagacaacuuagaaga

SEQ ID NO: 14237 - RNA, 20 nt, Artificial Sequence
  Synthetic
ggcacagacaacuuagaaga

SEQ ID NO: 14238 - RNA, 20 nt, Artificial Sequence
  Synthetic
guauugacucauuccgaaga

SEQ ID NO: 14239 - RNA, 23 nt, Artificial Sequence
  Synthetic
gcuguauugacucauuccgaaga

SEQ ID NO: 14240 - RNA, 20 nt, Artificial Sequence
  Synthetic
gcugaggagugaguggaaga

SEQ ID NO: 14241 - RNA, 22 nt, Artificial Sequence
  Synthetic
gaaaauaccaugugaaugaaga

SEQ ID NO: 14242 - RNA, 24 nt, Artificial Sequence
  Synthetic
gagaaaauaccaugugaaugaaga

SEQ ID NO: 14243 - RNA, 19 nt, Artificial Sequence
  Synthetic
gccaaguugaauaugaaga

SEQ ID NO: 14244 - RNA, 19 nt, Artificial Sequence
  Synthetic
gaguuacccuaacugaaga

SEQ ID NO: 14245 - RNA, 23 nt, Artificial Sequence
  Synthetic
gaaaaaaaaauugcaggugaaga

SEQ ID NO: 14246 - RNA, 24 nt, Artificial Sequence
  Synthetic
ggaaaaaaaaauugcaggugaaga

SEQ ID NO: 14247 - RNA, 21 nt, Artificial Sequence
  Synthetic
gcuuucuucuuuuauugaaga

SEQ ID NO: 14248 - RNA, 22 nt, Artificial Sequence
  Synthetic
gcccagcagcuuguggauaaga

SEQ ID NO: 14249 - RNA, 23 nt, Artificial Sequence
  Synthetic
ggcccagcagcuuguggauaaga

SEQ ID NO: 14250 - RNA, 18 nt, Artificial Sequence
  Synthetic
gauaaccugaauauaaga

SEQ ID NO: 14251 - RNA, 21 nt, Artificial Sequence
  Synthetic
gcauucuagggaacaguaaga

SEQ ID NO: 14252 - RNA, 20 nt, Artificial Sequence
  Synthetic
guuuuauuguaguaguaaga

SEQ ID NO: 14253 - RNA, 21 nt, Artificial Sequence
  Synthetic
gguuuuauuguaguaguaaga

SEQ ID NO: 14254 - RNA, 24 nt, Artificial Sequence
  Synthetic
guagguuuuauuguaguaguaaga

SEQ ID NO: 14255 - RNA, 20 nt, Artificial Sequence
  Synthetic
gaaggaagcucaauguaaga

SEQ ID NO: 14256 - RNA, 22 nt, Artificial Sequence
  Synthetic
gugaaggaagcucaauguaaga

SEQ ID NO: 14257 - RNA, 23 nt, Artificial Sequence
  Synthetic
ggugaaggaagcucaauguaaga

SEQ ID NO: 14258 - RNA, 21 nt, Artificial Sequence
  Synthetic
gaaauuugaaagcauguaaga

SEQ ID NO: 14259 - RNA, 22 nt, Artificial Sequence
  Synthetic
ggaaauuugaaagcauguaaga

SEQ ID NO: 14260 - RNA, 23 nt, Artificial Sequence
  Synthetic
gggaaauuugaaagcauguaaga

SEQ ID NO: 14261 - RNA, 18 nt, Artificial Sequence
  Synthetic
gaaaaccauaccuuaaga

SEQ ID NO: 14262 - RNA, 23 nt, Artificial Sequence
  Synthetic
gauuugaaaaccauaccuuaaga

SEQ ID NO: 14263 - RNA, 19 nt, Artificial Sequence
  Synthetic
guguauaauauuguuaaga

SEQ ID NO: 14264 - RNA, 22 nt, Artificial Sequence
  Synthetic
gcuguguauaauauuguuaaga

SEQ ID NO: 14265 - RNA, 23 nt, Artificial Sequence
  Synthetic
ggcuguguauaauauuguuaaga

SEQ ID NO: 14266 - RNA, 19 nt, Artificial Sequence
  Synthetic
gcaaaucuguuuguuaaga

SEQ ID NO: 14267 - RNA, 22 nt, Artificial Sequence
  Synthetic
gaaaaagcuaauuggaaacaga

SEQ ID NO: 14268 - RNA, 19 nt, Artificial Sequence
  Synthetic
gagcuccaaacucaacaga

SEQ ID NO: 14269 - RNA, 18 nt, Artificial Sequence
  Synthetic
gcaguauguuucaacaga

SEQ ID NO: 14270 - RNA, 21 nt, Artificial Sequence
  Synthetic
gaugcaguauguuucaacaga

SEQ ID NO: 14271 - RNA, 20 nt, Artificial Sequence
  Synthetic
guuuacuagaucaacacaga

SEQ ID NO: 14272 - RNA, 23 nt, Artificial Sequence
  Synthetic
guaguuuacuagaucaacacaga

SEQ ID NO: 14273 - RNA, 19 nt, Artificial Sequence
  Synthetic
gcuuuauacgggucacaga

SEQ ID NO: 14274 - RNA, 21 nt, Artificial Sequence
  Synthetic
gagcuuuauacgggucacaga

SEQ ID NO: 14275 - RNA, 21 nt, Artificial Sequence
  Synthetic
ggagauuuguugggagacaga

SEQ ID NO: 14276 - RNA, 24 nt, Artificial Sequence
  Synthetic
gcuggagauuuguugggagacaga

SEQ ID NO: 14277 - RNA, 18 nt, Artificial Sequence
  Synthetic
gcagaucugugagacaga

SEQ ID NO: 14278 - RNA, 19 nt, Artificial Sequence
  Synthetic
ggcagaucugugagacaga

SEQ ID NO: 14279 - RNA, 22 nt, Artificial Sequence
  Synthetic
gauggcagaucugugagacaga

SEQ ID NO: 14280 - RNA, 23 nt, Artificial Sequence
  Synthetic
ggauggcagaucugugagacaga

SEQ ID NO: 14281 - RNA, 19 nt, Artificial Sequence
  Synthetic
gacacgacaggaggacaga

SEQ ID NO: 14282 - RNA, 22 nt, Artificial Sequence
  Synthetic
gaagacacgacaggaggacaga

SEQ ID NO: 14283 - RNA, 23 nt, Artificial Sequence
  Synthetic
ggaagacacgacaggaggacaga

SEQ ID NO: 14284 - RNA, 19 nt, Artificial Sequence
  Synthetic
gaaauuguacaaugacaga

SEQ ID NO: 14285 - RNA, 20 nt, Artificial Sequence
  Synthetic
gcuuacauucuguugacaga

SEQ ID NO: 14286 - RNA, 20 nt, Artificial Sequence
  Synthetic
gucuuuuaauaaauuacaga

SEQ ID NO: 14287 - RNA, 24 nt, Artificial Sequence
  Synthetic
guaugucuuuuaauaaauuacaga

SEQ ID NO: 14288 - RNA, 24 nt, Artificial Sequence
  Synthetic
gucccaugaccacgagagaccaga

SEQ ID NO: 14289 - RNA, 21 nt, Artificial Sequence
  Synthetic
gccaagguacaugguaccaga

SEQ ID NO: 14290 - RNA, 23 nt, Artificial Sequence
  Synthetic
gagccaagguacaugguaccaga

SEQ ID NO: 14291 - RNA, 24 nt, Artificial Sequence
  Synthetic
ggagccaagguacaugguaccaga

SEQ ID NO: 14292 - RNA, 19 nt, Artificial Sequence
  Synthetic
guuaagcagaucucccaga

SEQ ID NO: 14293 - RNA, 23 nt, Artificial Sequence
  Synthetic
gaaaguuaagcagaucucccaga

SEQ ID NO: 14294 - RNA, 18 nt, Artificial Sequence
  Synthetic
gggcaauaaagagccaga

SEQ ID NO: 14295 - RNA, 23 nt, Artificial Sequence
  Synthetic
gauuugggcaauaaagagccaga

SEQ ID NO: 14296 - RNA, 21 nt, Artificial Sequence
  Synthetic
gaaaggagcuaaauauccaga

SEQ ID NO: 14297 - RNA, 22 nt, Artificial Sequence
  Synthetic
ggaaaggagcuaaauauccaga

SEQ ID NO: 14298 - RNA, 21 nt, Artificial Sequence
  Synthetic
gcucuguugcaauacuccaga

SEQ ID NO: 14299 - RNA, 22 nt, Artificial Sequence
  Synthetic
gccaaacaacuuaaaaagcaga

SEQ ID NO: 14300 - RNA, 23 nt, Artificial Sequence
  Synthetic
guauaauugucaaggaaagcaga

SEQ ID NO: 14301 - RNA, 19 nt, Artificial Sequence
  Synthetic
gugaaagugguaaagcaga

SEQ ID NO: 14302 - RNA, 23 nt, Artificial Sequence
  Synthetic
guuagugaaagugguaaagcaga

SEQ ID NO: 14303 - RNA, 24 nt, Artificial Sequence
  Synthetic
gguuagugaaagugguaaagcaga

SEQ ID NO: 14304 - RNA, 24 nt, Artificial Sequence
  Synthetic
gcccaauguccauugauuagcaga

SEQ ID NO: 14305 - RNA, 23 nt, Artificial Sequence
  Synthetic
gccaaaccucagucauuugcaga

SEQ ID NO: 14306 - RNA, 22 nt, Artificial Sequence
  Synthetic
guaauuauauuuuauuugcaga

SEQ ID NO: 14307 - RNA, 19 nt, Artificial Sequence
  Synthetic
gugaauuagaguuaucaga

SEQ ID NO: 14308 - RNA, 20 nt, Artificial Sequence
  Synthetic
ggugaauuagaguuaucaga

SEQ ID NO: 14309 - RNA, 19 nt, Artificial Sequence
  Synthetic
gauaacuccagaccucaga

SEQ ID NO: 14310 - RNA, 20 nt, Artificial Sequence
  Synthetic
ggauaacuccagaccucaga

SEQ ID NO: 14311 - RNA, 21 nt, Artificial Sequence
  Synthetic
gggauaacuccagaccucaga

SEQ ID NO: 14312 - RNA, 19 nt, Artificial Sequence
  Synthetic
gccaacaugaagagucaga

SEQ ID NO: 14313 - RNA, 19 nt, Artificial Sequence
  Synthetic
gaagaacaggcaggucaga

SEQ ID NO: 14314 - RNA, 24 nt, Artificial Sequence
  Synthetic
gaccugaagaacaggcaggucaga

SEQ ID NO: 14315 - RNA, 20 nt, Artificial Sequence
  Synthetic
gaagagaggggucugucaga

SEQ ID NO: 14316 - RNA, 24 nt, Artificial Sequence
  Synthetic
gaaugaagagaggggucugucaga

SEQ ID NO: 14317 - RNA, 21 nt, Artificial Sequence
  Synthetic
guuuuaccucugacauucaga

SEQ ID NO: 14318 - RNA, 20 nt, Artificial Sequence
  Synthetic
gcuuggagagacccuucaga

SEQ ID NO: 14319 - RNA, 21 nt, Artificial Sequence
  Synthetic
ggcuuggagagacccuucaga

SEQ ID NO: 14320 - RNA, 22 nt, Artificial Sequence
  Synthetic
gggcuuggagagacccuucaga

SEQ ID NO: 14321 - RNA, 24 nt, Artificial Sequence
  Synthetic
gugggcuuggagagacccuucaga

SEQ ID NO: 14322 - RNA, 19 nt, Artificial Sequence
  Synthetic
gauaccguguacguucaga

SEQ ID NO: 14323 - RNA, 20 nt, Artificial Sequence
  Synthetic
ggauaccguguacguucaga

SEQ ID NO: 14324 - RNA, 24 nt, Artificial Sequence
  Synthetic
gacuggauaccguguacguucaga

SEQ ID NO: 14325 - RNA, 24 nt, Artificial Sequence
  Synthetic
gcaauuaaucuaaggacaaagaga

SEQ ID NO: 14326 - RNA, 23 nt, Artificial Sequence
  Synthetic
guugccaaaggaggggaaagaga

SEQ ID NO: 14327 - RNA, 24 nt, Artificial Sequence
  Synthetic
gguugccaaaggaggggaaagaga

SEQ ID NO: 14328 - RNA, 19 nt, Artificial Sequence
  Synthetic
gacaauagggauaaagaga

SEQ ID NO: 14329 - RNA, 18 nt, Artificial Sequence
  Synthetic
gguaguucaaacaagaga

SEQ ID NO: 14330 - RNA, 23 nt, Artificial Sequence
  Synthetic
gaacagguaguucaaacaagaga

SEQ ID NO: 14331 - RNA, 24 nt, Artificial Sequence
  Synthetic
ggaacagguaguucaaacaagaga

SEQ ID NO: 14332 - RNA, 18 nt, Artificial Sequence
  Synthetic
gacauggcugacaagaga

SEQ ID NO: 14333 - RNA, 19 nt, Artificial Sequence
  Synthetic
ggacauggcugacaagaga

SEQ ID NO: 14334 - RNA, 24 nt, Artificial Sequence
  Synthetic
gauuaggacauggcugacaagaga

SEQ ID NO: 14335 - RNA, 20 nt, Artificial Sequence
  Synthetic
guuugugugcauucaagaga

SEQ ID NO: 14336 - RNA, 22 nt, Artificial Sequence
  Synthetic
guguuugugugcauucaagaga

SEQ ID NO: 14337 - RNA, 18 nt, Artificial Sequence
  Synthetic
gguuucccaaauaagaga

SEQ ID NO: 14338 - RNA, 23 nt, Artificial Sequence
  Synthetic
gacaaaacugaggcucacagaga

SEQ ID NO: 14339 - RNA, 21 nt, Artificial Sequence
  Synthetic
gaggugaaaggcagccagaga

SEQ ID NO: 14340 - RNA, 24 nt, Artificial Sequence
  Synthetic
gaagaggugaaaggcagccagaga

SEQ ID NO: 14341 - RNA, 18 nt, Artificial Sequence
  Synthetic
ggacgugcagugcagaga

SEQ ID NO: 14342 - RNA, 23 nt, Artificial Sequence
  Synthetic
gcacuggacgugcagugcagaga

SEQ ID NO: 14343 - RNA, 21 nt, Artificial Sequence
  Synthetic
gacccauggcgggaagagaga

SEQ ID NO: 14344 - RNA, 24 nt, Artificial Sequence
  Synthetic
gaagacccauggcgggaagagaga

SEQ ID NO: 14345 - RNA, 20 nt, Artificial Sequence
  Synthetic
gcacugcaacagcagagaga

SEQ ID NO: 14346 - RNA, 22 nt, Artificial Sequence
  Synthetic
guacucuuuuuuguaauagaga

SEQ ID NO: 14347 - RNA, 23 nt, Artificial Sequence
  Synthetic
gguacucuuuuuuguaauagaga

SEQ ID NO: 14348 - RNA, 21 nt, Artificial Sequence
  Synthetic
ggacaaagaaagucauagaga

SEQ ID NO: 14349 - RNA, 24 nt, Artificial Sequence
  Synthetic
gaaucaaaaccaaaucuauagaga

SEQ ID NO: 14350 - RNA, 20 nt, Artificial Sequence
  Synthetic
gaaugauagaauacuagaga

SEQ ID NO: 14351 - RNA, 23 nt, Artificial Sequence
  Synthetic
guagaaugauagaauacuagaga

SEQ ID NO: 14352 - RNA, 24 nt, Artificial Sequence
  Synthetic
gguagaaugauagaauacuagaga

SEQ ID NO: 14353 - RNA, 20 nt, Artificial Sequence
  Synthetic
gauacaacaaaaucuagaga

SEQ ID NO: 14354 - RNA, 22 nt, Artificial Sequence
  Synthetic
gugauacaacaaaaucuagaga

SEQ ID NO: 14355 - RNA, 23 nt, Artificial Sequence
  Synthetic
gaucaaaagggugaugguagaga

SEQ ID NO: 14356 - RNA, 23 nt, Artificial Sequence
  Synthetic
guacauacauuuuuauguagaga

SEQ ID NO: 14357 - RNA, 23 nt, Artificial Sequence
  Synthetic
gaauucacagagaagauuagaga

SEQ ID NO: 14358 - RNA, 24 nt, Artificial Sequence
  Synthetic
gaaacuaagcagcgaccuuagaga

SEQ ID NO: 14359 - RNA, 20 nt, Artificial Sequence
  Synthetic
guagaacaacagguuagaga

SEQ ID NO: 14360 - RNA, 21 nt, Artificial Sequence
  Synthetic
gguagaacaacagguuagaga

SEQ ID NO: 14361 - RNA, 22 nt, Artificial Sequence
  Synthetic
ggguagaacaacagguuagaga

SEQ ID NO: 14362 - RNA, 18 nt, Artificial Sequence
  Synthetic
gccccaagucggccgaga

SEQ ID NO: 14363 - RNA, 21 nt, Artificial Sequence
  Synthetic
guaugccuuuuguuuucgaga

SEQ ID NO: 14364 - RNA, 19 nt, Artificial Sequence
  Synthetic
gccgaaacuaguaaggaga

SEQ ID NO: 14365 - RNA, 20 nt, Artificial Sequence
  Synthetic
ggccgaaacuaguaaggaga

SEQ ID NO: 14366 - RNA, 23 nt, Artificial Sequence
  Synthetic
guaggccgaaacuaguaaggaga

SEQ ID NO: 14367 - RNA, 19 nt, Artificial Sequence
  Synthetic
gaauaauuuaggcaggaga

SEQ ID NO: 14368 - RNA, 19 nt, Artificial Sequence
  Synthetic
gaacaaggcucagaggaga

SEQ ID NO: 14369 - RNA, 23 nt, Artificial Sequence
  Synthetic
gacagaacaaggcucagaggaga

SEQ ID NO: 14370 - RNA, 22 nt, Artificial Sequence
  Synthetic
gccuacucaucucaggaggaga

SEQ ID NO: 14371 - RNA, 20 nt, Artificial Sequence
  Synthetic
gcaauaaccuuaaagggaga

SEQ ID NO: 14372 - RNA, 18 nt, Artificial Sequence
  Synthetic
gcucucucagcagggaga

SEQ ID NO: 14373 - RNA, 23 nt, Artificial Sequence
  Synthetic
gauaugcucucucagcagggaga

SEQ ID NO: 14374 - RNA, 24 nt, Artificial Sequence
  Synthetic
ggauaugcucucucagcagggaga

SEQ ID NO: 14375 - RNA, 23 nt, Artificial Sequence
  Synthetic
gauucaggaaguagaaugggaga

SEQ ID NO: 14376 - RNA, 18 nt, Artificial Sequence
  Synthetic
ggcuaagagguauggaga

SEQ ID NO: 14377 - RNA, 22 nt, Artificial Sequence
  Synthetic
gccaggcuaagagguauggaga

SEQ ID NO: 14378 - RNA, 21 nt, Artificial Sequence
  Synthetic
gacauggugagaaacuggaga

SEQ ID NO: 14379 - RNA, 22 nt, Artificial Sequence
  Synthetic
ggacauggugagaaacuggaga

SEQ ID NO: 14380 - RNA, 23 nt, Artificial Sequence
  Synthetic
gggacauggugagaaacuggaga

SEQ ID NO: 14381 - RNA, 18 nt, Artificial Sequence
  Synthetic
gccucugucuccuggaga

SEQ ID NO: 14382 - RNA, 19 nt, Artificial Sequence
  Synthetic
ggccucugucuccuggaga

SEQ ID NO: 14383 - RNA, 20 nt, Artificial Sequence
  Synthetic
gggccucugucuccuggaga

SEQ ID NO: 14384 - RNA, 22 nt, Artificial Sequence
  Synthetic
gagggccucugucuccuggaga

SEQ ID NO: 14385 - RNA, 23 nt, Artificial Sequence
  Synthetic
ggagggccucugucuccuggaga

SEQ ID NO: 14386 - RNA, 23 nt, Artificial Sequence
  Synthetic
guugacugcuuuuccccaugaga

SEQ ID NO: 14387 - RNA, 21 nt, Artificial Sequence
  Synthetic
gggagacagaagagcaugaga

SEQ ID NO: 14388 - RNA, 23 nt, Artificial Sequence
  Synthetic
gugggagacagaagagcaugaga

SEQ ID NO: 14389 - RNA, 24 nt, Artificial Sequence
  Synthetic
gcaaaacaaaguguuuucaugaga

SEQ ID NO: 14390 - RNA, 19 nt, Artificial Sequence
  Synthetic
guguacaaaaauucugaga

SEQ ID NO: 14391 - RNA, 22 nt, Artificial Sequence
  Synthetic
gaaguguacaaaaauucugaga

SEQ ID NO: 14392 - RNA, 23 nt, Artificial Sequence
  Synthetic
ggaaguguacaaaaauucugaga

SEQ ID NO: 14393 - RNA, 24 nt, Artificial Sequence
  Synthetic
gggaaguguacaaaaauucugaga

SEQ ID NO: 14394 - RNA, 18 nt, Artificial Sequence
  Synthetic
gugcuuuucugagugaga

SEQ ID NO: 14395 - RNA, 18 nt, Artificial Sequence
  Synthetic
gaagugagguaggugaga

SEQ ID NO: 14396 - RNA, 19 nt, Artificial Sequence
  Synthetic
ggaagugagguaggugaga

SEQ ID NO: 14397 - RNA, 18 nt, Artificial Sequence
  Synthetic
guaauagagacugugaga

SEQ ID NO: 14398 - RNA, 24 nt, Artificial Sequence
  Synthetic
gaaaauacgguguccaaauugaga

SEQ ID NO: 14399 - RNA, 22 nt, Artificial Sequence
  Synthetic
gaauacagcagagugguugaga

SEQ ID NO: 14400 - RNA, 18 nt, Artificial Sequence
  Synthetic
gcuaucucuuuaaauaga

SEQ ID NO: 14401 - RNA, 20 nt, Artificial Sequence
  Synthetic
gagcuaucucuuuaaauaga

SEQ ID NO: 14402 - RNA, 21 nt, Artificial Sequence
  Synthetic
ggagcuaucucuuuaaauaga

SEQ ID NO: 14403 - RNA, 22 nt, Artificial Sequence
  Synthetic
gggagcuaucucuuuaaauaga

SEQ ID NO: 14404 - RNA, 18 nt, Artificial Sequence
  Synthetic
gacauacaguugcauaga

SEQ ID NO: 14405 - RNA, 19 nt, Artificial Sequence
  Synthetic
ggacauacaguugcauaga

SEQ ID NO: 14406 - RNA, 23 nt, Artificial Sequence
  Synthetic
guacggacauacaguugcauaga

SEQ ID NO: 14407 - RNA, 24 nt, Artificial Sequence
  Synthetic
gguacggacauacaguugcauaga

SEQ ID NO: 14408 - RNA, 20 nt, Artificial Sequence
  Synthetic
gucuuuaagaaccucauaga

SEQ ID NO: 14409 - RNA, 21 nt, Artificial Sequence
  Synthetic
ggucuuuaagaaccucauaga

SEQ ID NO: 14410 - RNA, 23 nt, Artificial Sequence
  Synthetic
gcuuggauggauagaaagauaga

SEQ ID NO: 14411 - RNA, 19 nt, Artificial Sequence
  Synthetic
gaaggcacuggcagauaga

SEQ ID NO: 14412 - RNA, 19 nt, Artificial Sequence
  Synthetic
gcaugaugguaaggauaga

SEQ ID NO: 14413 - RNA, 21 nt, Artificial Sequence
  Synthetic
gagcaugaugguaaggauaga

SEQ ID NO: 14414 - RNA, 23 nt, Artificial Sequence
  Synthetic
gucauaaagcaaaggaggauaga

SEQ ID NO: 14415 - RNA, 18 nt, Artificial Sequence
  Synthetic
gucaauuagagggauaga

SEQ ID NO: 14416 - RNA, 24 nt, Artificial Sequence
  Synthetic
gacaaagucaauuagagggauaga

SEQ ID NO: 14417 - RNA, 21 nt, Artificial Sequence
  Synthetic
gcucauauaaagaaauauaga

SEQ ID NO: 14418 - RNA, 22 nt, Artificial Sequence
  Synthetic
guucauuguuaauuguuauaga

SEQ ID NO: 14419 - RNA, 19 nt, Artificial Sequence
  Synthetic
gucaguuggaaagacuaga

SEQ ID NO: 14420 - RNA, 20 nt, Artificial Sequence
  Synthetic
ggucaguuggaaagacuaga

SEQ ID NO: 14421 - RNA, 23 nt, Artificial Sequence
  Synthetic
gaaggucaguuggaaagacuaga

SEQ ID NO: 14422 - RNA, 20 nt, Artificial Sequence
  Synthetic
gcuuucauuuguuggcuaga

SEQ ID NO: 14423 - RNA, 24 nt, Artificial Sequence
  Synthetic
guucacuuuggggaagucucuaga

SEQ ID NO: 14424 - RNA, 19 nt, Artificial Sequence
  Synthetic
gugccaggucuagucuaga

SEQ ID NO: 14425 - RNA, 18 nt, Artificial Sequence
  Synthetic
guugaaccugggucuaga

SEQ ID NO: 14426 - RNA, 20 nt, Artificial Sequence
  Synthetic
guguugaaccugggucuaga

SEQ ID NO: 14427 - RNA, 22 nt, Artificial Sequence
  Synthetic
gaguguugaaccugggucuaga

SEQ ID NO: 14428 - RNA, 24 nt, Artificial Sequence
  Synthetic
gugaguguugaaccugggucuaga

SEQ ID NO: 14429 - RNA, 24 nt, Artificial Sequence
  Synthetic
gacuacucugaggcucuuucuaga

SEQ ID NO: 14430 - RNA, 20 nt, Artificial Sequence
  Synthetic
gaaguuaagagcaaaguaga

SEQ ID NO: 14431 - RNA, 18 nt, Artificial Sequence
  Synthetic
ggaagcaacagcaguaga

SEQ ID NO: 14432 - RNA, 18 nt, Artificial Sequence
  Synthetic
gaucucuaaggcaguaga

SEQ ID NO: 14433 - RNA, 21 nt, Artificial Sequence
  Synthetic
gaagaucucuaaggcaguaga

SEQ ID NO: 14434 - RNA, 20 nt, Artificial Sequence
  Synthetic
guuuucuguaagauaguaga

SEQ ID NO: 14435 - RNA, 21 nt, Artificial Sequence
  Synthetic
gucauaaaacauugggguaga

SEQ ID NO: 14436 - RNA, 22 nt, Artificial Sequence
  Synthetic
ggucauaaaacauugggguaga

SEQ ID NO: 14437 - RNA, 23 nt, Artificial Sequence
  Synthetic
gggucauaaaacauugggguaga

SEQ ID NO: 14438 - RNA, 24 nt, Artificial Sequence
  Synthetic
ggggucauaaaacauugggguaga

SEQ ID NO: 14439 - RNA, 19 nt, Artificial Sequence
  Synthetic
guugugaaacaaugguaga

SEQ ID NO: 14440 - RNA, 19 nt, Artificial Sequence
  Synthetic
gcuggagaucagugguaga

SEQ ID NO: 14441 - RNA, 22 nt, Artificial Sequence
  Synthetic
guagcuggagaucagugguaga

SEQ ID NO: 14442 - RNA, 23 nt, Artificial Sequence
  Synthetic
gguagcuggagaucagugguaga

SEQ ID NO: 14443 - RNA, 22 nt, Artificial Sequence
  Synthetic
gaaacaaacacaaugguguaga

SEQ ID NO: 14444 - RNA, 23 nt, Artificial Sequence
  Synthetic
ggaaacaaacacaaugguguaga

SEQ ID NO: 14445 - RNA, 20 nt, Artificial Sequence
  Synthetic
gauauacagcacuuuguaga

SEQ ID NO: 14446 - RNA, 21 nt, Artificial Sequence
  Synthetic
ggauauacagcacuuuguaga

SEQ ID NO: 14447 - RNA, 24 nt, Artificial Sequence
  Synthetic
gcuauauugcuccugaaaauuaga

SEQ ID NO: 14448 - RNA, 18 nt, Artificial Sequence
  Synthetic
gccucugcacaaauuaga

SEQ ID NO: 14449 - RNA, 21 nt, Artificial Sequence
  Synthetic
gucgccucugcacaaauuaga

SEQ ID NO: 14450 - RNA, 23 nt, Artificial Sequence
  Synthetic
guuacauacauuugggaauuaga

SEQ ID NO: 14451 - RNA, 19 nt, Artificial Sequence
  Synthetic
gagaaaaaacacgguuaga

SEQ ID NO: 14452 - RNA, 21 nt, Artificial Sequence
  Synthetic
gccaggucauugaauguuaga

SEQ ID NO: 14453 - RNA, 22 nt, Artificial Sequence
  Synthetic
ggccaggucauugaauguuaga

SEQ ID NO: 14454 - RNA, 24 nt, Artificial Sequence
  Synthetic
gaggccaggucauugaauguuaga

SEQ ID NO: 14455 - RNA, 24 nt, Artificial Sequence
  Synthetic
gauaaaaaauuccugaaguuuaga

SEQ ID NO: 14456 - RNA, 23 nt, Artificial Sequence
  Synthetic
guuuucauggucaaacuuuuaga

SEQ ID NO: 14457 - RNA, 19 nt, Artificial Sequence
  Synthetic
guuucauuagauuuuuaga

SEQ ID NO: 14458 - RNA, 20 nt, Artificial Sequence
  Synthetic
gguuucauuagauuuuuaga

SEQ ID NO: 14459 - RNA, 21 nt, Artificial Sequence
  Synthetic
ggguuucauuagauuuuuaga

SEQ ID NO: 14460 - RNA, 20 nt, Artificial Sequence
  Synthetic
gacauuuagcuuuuuuuaga

SEQ ID NO: 14461 - RNA, 20 nt, Artificial Sequence
  Synthetic
gaauccauaaucuagaacga

SEQ ID NO: 14462 - RNA, 24 nt, Artificial Sequence
  Synthetic
gccugaauccauaaucuagaacga

SEQ ID NO: 14463 - RNA, 23 nt, Artificial Sequence
  Synthetic
gauugagggcuccacccucacga

SEQ ID NO: 14464 - RNA, 24 nt, Artificial Sequence
  Synthetic
ggauugagggcuccacccucacga

SEQ ID NO: 14465 - RNA, 19 nt, Artificial Sequence
  Synthetic
guucuagugcucuauacga

SEQ ID NO: 14466 - RNA, 20 nt, Artificial Sequence
  Synthetic
guagccuuucuaguuaccga

SEQ ID NO: 14467 - RNA, 19 nt, Artificial Sequence
  Synthetic
gauguugcugguccagcga

SEQ ID NO: 14468 - RNA, 22 nt, Artificial Sequence
  Synthetic
gcugauguugcugguccagcga

SEQ ID NO: 14469 - RNA, 24 nt, Artificial Sequence
  Synthetic
gugcugauguugcugguccagcga

SEQ ID NO: 14470 - RNA, 23 nt, Artificial Sequence
  Synthetic
gcuaacuguccaucaacaugcga

SEQ ID NO: 14471 - RNA, 18 nt, Artificial Sequence
  Synthetic
gguuuuuacugugugcga

SEQ ID NO: 14472 - RNA, 21 nt, Artificial Sequence
  Synthetic
gcagguuuuuacugugugcga

SEQ ID NO: 14473 - RNA, 22 nt, Artificial Sequence
  Synthetic
ggcagguuuuuacugugugcga

SEQ ID NO: 14474 - RNA, 24 nt, Artificial Sequence
  Synthetic
gaggcagguuuuuacugugugcga

SEQ ID NO: 14475 - RNA, 24 nt, Artificial Sequence
  Synthetic
gcuuauuugucuuaacaagaucga

SEQ ID NO: 14476 - RNA, 22 nt, Artificial Sequence
  Synthetic
gaaaaaaaaaauuucuugucga

SEQ ID NO: 14477 - RNA, 23 nt, Artificial Sequence
  Synthetic
ggaaaaaaaaaauuucuugucga

SEQ ID NO: 14478 - RNA, 24 nt, Artificial Sequence
  Synthetic
gggaaaaaaaaaauuucuugucga

SEQ ID NO: 14479 - RNA, 19 nt, Artificial Sequence
  Synthetic
gccacuaaauauguuucga

SEQ ID NO: 14480 - RNA, 23 nt, Artificial Sequence
  Synthetic
gcugguagaaaaaccaaaaagga

SEQ ID NO: 14481 - RNA, 22 nt, Artificial Sequence
  Synthetic
guacauacucaaaagaaaagga

SEQ ID NO: 14482 - RNA, 23 nt, Artificial Sequence
  Synthetic
gguacauacucaaaagaaaagga

SEQ ID NO: 14483 - RNA, 24 nt, Artificial Sequence
  Synthetic
ggguacauacucaaaagaaaagga

SEQ ID NO: 14484 - RNA, 18 nt, Artificial Sequence
  Synthetic
gaaguccccagaaaagga

SEQ ID NO: 14485 - RNA, 22 nt, Artificial Sequence
  Synthetic
gacugaaguccccagaaaagga

SEQ ID NO: 14486 - RNA, 19 nt, Artificial Sequence
  Synthetic
gaaguacaacaugaaagga

SEQ ID NO: 14487 - RNA, 20 nt, Artificial Sequence
  Synthetic
gucaaggguuaaguaaagga

SEQ ID NO: 14488 - RNA, 22 nt, Artificial Sequence
  Synthetic
gagucaaggguuaaguaaagga

SEQ ID NO: 14489 - RNA, 22 nt, Artificial Sequence
  Synthetic
guccuugccucaaaggcaagga

SEQ ID NO: 14490 - RNA, 24 nt, Artificial Sequence
  Synthetic
guguccuugccucaaaggcaagga

SEQ ID NO: 14491 - RNA, 21 nt, Artificial Sequence
  Synthetic
ggaguguagaaauuucaagga

SEQ ID NO: 14492 - RNA, 23 nt, Artificial Sequence
  Synthetic
gaggaguguagaaauuucaagga

SEQ ID NO: 14493 - RNA, 22 nt, Artificial Sequence
  Synthetic
gaaacaaaacacaggagaagga

SEQ ID NO: 14494 - RNA, 23 nt, Artificial Sequence
  Synthetic
ggaaacaaaacacaggagaagga

SEQ ID NO: 14495 - RNA, 20 nt, Artificial Sequence
  Synthetic
guccaugaaccugggaagga

SEQ ID NO: 14496 - RNA, 23 nt, Artificial Sequence
  Synthetic
gcauuggagacagaaaugaagga

SEQ ID NO: 14497 - RNA, 23 nt, Artificial Sequence
  Synthetic
guacaugcuuccuaaaugaagga

SEQ ID NO: 14498 - RNA, 18 nt, Artificial Sequence
  Synthetic
gauauaguagaauaagga

SEQ ID NO: 14499 - RNA, 19 nt, Artificial Sequence
  Synthetic
ggauauaguagaauaagga

SEQ ID NO: 14500 - RNA, 23 nt, Artificial Sequence
  Synthetic
gauaggauauaguagaauaagga

SEQ ID NO: 14501 - RNA, 20 nt, Artificial Sequence
  Synthetic
gcaauauuuugauauaagga

SEQ ID NO: 14502 - RNA, 21 nt, Artificial Sequence
  Synthetic
ggcaauauuuugauauaagga

SEQ ID NO: 14503 - RNA, 19 nt, Artificial Sequence
  Synthetic
gaccaguaacagcuaagga

SEQ ID NO: 14504 - RNA, 24 nt, Artificial Sequence
  Synthetic
gaaaagaccaguaacagcuaagga

SEQ ID NO: 14505 - RNA, 23 nt, Artificial Sequence
  Synthetic
guucuagagcaugaugguaagga

SEQ ID NO: 14506 - RNA, 22 nt, Artificial Sequence
  Synthetic
guuaccaucauauuguuaagga

SEQ ID NO: 14507 - RNA, 20 nt, Artificial Sequence
  Synthetic
gaaacauaaccacaacagga

SEQ ID NO: 14508 - RNA, 21 nt, Artificial Sequence
  Synthetic
ggaaacauaaccacaacagga

SEQ ID NO: 14509 - RNA, 23 nt, Artificial Sequence
  Synthetic
guggaaacauaaccacaacagga

SEQ ID NO: 14510 - RNA, 20 nt, Artificial Sequence
  Synthetic
guuggggaaccuacacagga

SEQ ID NO: 14511 - RNA, 23 nt, Artificial Sequence
  Synthetic
guaguuggggaaccuacacagga

SEQ ID NO: 14512 - RNA, 18 nt, Artificial Sequence
  Synthetic
gcccuucgcaaggcagga

SEQ ID NO: 14513 - RNA, 20 nt, Artificial Sequence
  Synthetic
gugcccuucgcaaggcagga

SEQ ID NO: 14514 - RNA, 20 nt, Artificial Sequence
  Synthetic
gaaucaagggaggggcagga

SEQ ID NO: 14515 - RNA, 21 nt, Artificial Sequence
  Synthetic
ggaaucaagggaggggcagga

SEQ ID NO: 14516 - RNA, 22 nt, Artificial Sequence
  Synthetic
gggaaucaagggaggggcagga

SEQ ID NO: 14517 - RNA, 19 nt, Artificial Sequence
  Synthetic
gagccacuggugggcagga

SEQ ID NO: 14518 - RNA, 20 nt, Artificial Sequence
  Synthetic
ggagccacuggugggcagga

SEQ ID NO: 14519 - RNA, 24 nt, Artificial Sequence
  Synthetic
gauuggagccacuggugggcagga

SEQ ID NO: 14520 - RNA, 18 nt, Artificial Sequence
  Synthetic
guuccucacagugcagga

SEQ ID NO: 14521 - RNA, 20 nt, Artificial Sequence
  Synthetic
gaguuccucacagugcagga

SEQ ID NO: 14522 - RNA, 19 nt, Artificial Sequence
  Synthetic
gacaagcugcucuucagga

SEQ ID NO: 14523 - RNA, 21 nt, Artificial Sequence
  Synthetic
gugacaagcugcucuucagga

SEQ ID NO: 14524 - RNA, 22 nt, Artificial Sequence
  Synthetic
ggugacaagcugcucuucagga

SEQ ID NO: 14525 - RNA, 19 nt, Artificial Sequence
  Synthetic
gcuucucuauauuucagga

SEQ ID NO: 14526 - RNA, 24 nt, Artificial Sequence
  Synthetic
gaaaauuaauagaauuuuucagga

SEQ ID NO: 14527 - RNA, 24 nt, Artificial Sequence
  Synthetic
gaaucauucagguguuauagagga

SEQ ID NO: 14528 - RNA, 20 nt, Artificial Sequence
  Synthetic
gaaggcacccagcaggagga

SEQ ID NO: 14529 - RNA, 22 nt, Artificial Sequence
  Synthetic
gagaaggcacccagcaggagga

SEQ ID NO: 14530 - RNA, 19 nt, Artificial Sequence
  Synthetic
gagcugggugagaggagga

SEQ ID NO: 14531 - RNA, 22 nt, Artificial Sequence
  Synthetic
gaugagcugggugagaggagga

SEQ ID NO: 14532 - RNA, 18 nt, Artificial Sequence
  Synthetic
ggguccgugaaaugagga

SEQ ID NO: 14533 - RNA, 19 nt, Artificial Sequence
  Synthetic
guaguauugugaaugagga

SEQ ID NO: 14534 - RNA, 23 nt, Artificial Sequence
  Synthetic
gacaguaguauugugaaugagga

SEQ ID NO: 14535 - RNA, 24 nt, Artificial Sequence
  Synthetic
gcuaauacucagagucacugagga

SEQ ID NO: 14536 - RNA, 20 nt, Artificial Sequence
  Synthetic
guauaauccuggacugagga

SEQ ID NO: 14537 - RNA, 20 nt, Artificial Sequence
  Synthetic
gaaguaggcauagcugagga

SEQ ID NO: 14538 - RNA, 20 nt, Artificial Sequence
  Synthetic
gcacucucuuguugugagga

SEQ ID NO: 14539 - RNA, 21 nt, Artificial Sequence
  Synthetic
ggcacucucuuguugugagga

SEQ ID NO: 14540 - RNA, 23 nt, Artificial Sequence
  Synthetic
guauaaaaguaugaaaaauagga

SEQ ID NO: 14541 - RNA, 18 nt, Artificial Sequence
  Synthetic
gcacguuuaaacauagga

SEQ ID NO: 14542 - RNA, 19 nt, Artificial Sequence
  Synthetic
ggcacguuuaaacauagga

SEQ ID NO: 14543 - RNA, 18 nt, Artificial Sequence
  Synthetic
guaugauauaauauagga

SEQ ID NO: 14544 - RNA, 22 nt, Artificial Sequence
  Synthetic
gauaguaugauauaauauagga

SEQ ID NO: 14545 - RNA, 22 nt, Artificial Sequence
  Synthetic
gaacacuuguuaaacacuagga

SEQ ID NO: 14546 - RNA, 23 nt, Artificial Sequence
  Synthetic
ggaacacuuguuaaacacuagga

SEQ ID NO: 14547 - RNA, 18 nt, Artificial Sequence
  Synthetic
gagcaaugcagacuagga

SEQ ID NO: 14548 - RNA, 24 nt, Artificial Sequence
  Synthetic
gccauagagcaaugcagacuagga

SEQ ID NO: 14549 - RNA, 19 nt, Artificial Sequence
  Synthetic
gcaagagaaugaucuagga

SEQ ID NO: 14550 - RNA, 21 nt, Artificial Sequence
  Synthetic
gaccuguuacuuuuucuagga

SEQ ID NO: 14551 - RNA, 24 nt, Artificial Sequence
  Synthetic
guagaccuguuacuuuuucuagga

SEQ ID NO: 14552 - RNA, 19 nt, Artificial Sequence
  Synthetic
gugagccuuauggguagga

SEQ ID NO: 14553 - RNA, 24 nt, Artificial Sequence
  Synthetic
gauccauuuugcugcgguguagga

SEQ ID NO: 14554 - RNA, 21 nt, Artificial Sequence
  Synthetic
gccaaugcuggcuaaaacgga

SEQ ID NO: 14555 - RNA, 19 nt, Artificial Sequence
  Synthetic
gugaguagaaagaaacgga

SEQ ID NO: 14556 - RNA, 20 nt, Artificial Sequence
  Synthetic
ggugaguagaaagaaacgga

SEQ ID NO: 14557 - RNA, 19 nt, Artificial Sequence
  Synthetic
gucagugccugugcacgga

SEQ ID NO: 14558 - RNA, 23 nt, Artificial Sequence
  Synthetic
gaaaauguaguuggaaucacgga

SEQ ID NO: 14559 - RNA, 24 nt, Artificial Sequence
  Synthetic
ggaaaauguaguuggaaucacgga

SEQ ID NO: 14560 - RNA, 20 nt, Artificial Sequence
  Synthetic
gaauuccccuugcccccgga

SEQ ID NO: 14561 - RNA, 22 nt, Artificial Sequence
  Synthetic
gagaauuccccuugcccccgga

SEQ ID NO: 14562 - RNA, 20 nt, Artificial Sequence
  Synthetic
gaagaguguaggugggcgga

SEQ ID NO: 14563 - RNA, 21 nt, Artificial Sequence
  Synthetic
ggaagaguguaggugggcgga

SEQ ID NO: 14564 - RNA, 22 nt, Artificial Sequence
  Synthetic
gggaagaguguaggugggcgga

SEQ ID NO: 14565 - RNA, 18 nt, Artificial Sequence
  Synthetic
guggcaaccucaaaggga

SEQ ID NO: 14566 - RNA, 22 nt, Artificial Sequence
  Synthetic
gccuguggcaaccucaaaggga

SEQ ID NO: 14567 - RNA, 22 nt, Artificial Sequence
  Synthetic
guagggcuggaggacacaggga

SEQ ID NO: 14568 - RNA, 23 nt, Artificial Sequence
  Synthetic
gguagggcuggaggacacaggga

SEQ ID NO: 14569 - RNA, 24 nt, Artificial Sequence
  Synthetic
ggguagggcuggaggacacaggga

SEQ ID NO: 14570 - RNA, 22 nt, Artificial Sequence
  Synthetic
guaccaggaaaaaugacaggga

SEQ ID NO: 14571 - RNA, 23 nt, Artificial Sequence
  Synthetic
gguaccaggaaaaaugacaggga

SEQ ID NO: 14572 - RNA, 20 nt, Artificial Sequence
  Synthetic
gaagcucuucaaagcaggga

SEQ ID NO: 14573 - RNA, 22 nt, Artificial Sequence
  Synthetic
gugaagcucuucaaagcaggga

SEQ ID NO: 14574 - RNA, 21 nt, Artificial Sequence
  Synthetic
guuuggccaucagaagaggga

SEQ ID NO: 14575 - RNA, 20 nt, Artificial Sequence
  Synthetic
gcacccauaaggcagaggga

SEQ ID NO: 14576 - RNA, 23 nt, Artificial Sequence
  Synthetic
guugcacccauaaggcagaggga

SEQ ID NO: 14577 - RNA, 21 nt, Artificial Sequence
  Synthetic
gaagagaaccagaaggaggga

SEQ ID NO: 14578 - RNA, 22 nt, Artificial Sequence
  Synthetic
ggaagagaaccagaaggaggga

SEQ ID NO: 14579 - RNA, 23 nt, Artificial Sequence
  Synthetic
guauccuuaaugaucucuaggga

SEQ ID NO: 14580 - RNA, 24 nt, Artificial Sequence
  Synthetic
gguauccuuaaugaucucuaggga

SEQ ID NO: 14581 - RNA, 19 nt, Artificial Sequence
  Synthetic
gucgguaaugcaaacggga

SEQ ID NO: 14582 - RNA, 20 nt, Artificial Sequence
  Synthetic
gaucugaagggcaaggggga

SEQ ID NO: 14583 - RNA, 22 nt, Artificial Sequence
  Synthetic
gucaaaaauaaagguaggggga

SEQ ID NO: 14584 - RNA, 19 nt, Artificial Sequence
  Synthetic
guguucugugcauggggga

SEQ ID NO: 14585 - RNA, 20 nt, Artificial Sequence
  Synthetic
gguguucugugcauggggga

SEQ ID NO: 14586 - RNA, 21 nt, Artificial Sequence
  Synthetic
ggguguucugugcauggggga

SEQ ID NO: 14587 - RNA, 22 nt, Artificial Sequence
  Synthetic
gggguguucugugcauggggga

SEQ ID NO: 14588 - RNA, 23 nt, Artificial Sequence
  Synthetic
ggggguguucugugcauggggga

SEQ ID NO: 14589 - RNA, 24 nt, Artificial Sequence
  Synthetic
gggggguguucugugcauggggga

SEQ ID NO: 14590 - RNA, 20 nt, Artificial Sequence
  Synthetic
gucaggaauucacgugggga

SEQ ID NO: 14591 - RNA, 22 nt, Artificial Sequence
  Synthetic
gaaucuacugucuuuaauggga

SEQ ID NO: 14592 - RNA, 18 nt, Artificial Sequence
  Synthetic
ggaaaucuagauauggga

SEQ ID NO: 14593 - RNA, 20 nt, Artificial Sequence
  Synthetic
gcaagcaagcugcacuggga

SEQ ID NO: 14594 - RNA, 21 nt, Artificial Sequence
  Synthetic
ggcaagcaagcugcacuggga

SEQ ID NO: 14595 - RNA, 24 nt, Artificial Sequence
  Synthetic
gauggcaagcaagcugcacuggga

SEQ ID NO: 14596 - RNA, 18 nt, Artificial Sequence
  Synthetic
gucuuucagcugguggga

SEQ ID NO: 14597 - RNA, 22 nt, Artificial Sequence
  Synthetic
gauuagcaucauuauuguggga

SEQ ID NO: 14598 - RNA, 23 nt, Artificial Sequence
  Synthetic
ggauuagcaucauuauuguggga

SEQ ID NO: 14599 - RNA, 19 nt, Artificial Sequence
  Synthetic
gccuugcaguaucuuggga

SEQ ID NO: 14600 - RNA, 20 nt, Artificial Sequence
  Synthetic
ggccuugcaguaucuuggga

SEQ ID NO: 14601 - RNA, 18 nt, Artificial Sequence
  Synthetic
gguaauauuaaguuggga

SEQ ID NO: 14602 - RNA, 21 nt, Artificial Sequence
  Synthetic
gauuuuuaaaauaaaaaugga

SEQ ID NO: 14603 - RNA, 22 nt, Artificial Sequence
  Synthetic
ggauuuuuaaaauaaaaaugga

SEQ ID NO: 14604 - RNA, 23 nt, Artificial Sequence
  Synthetic
gggauuuuuaaaauaaaaaugga

SEQ ID NO: 14605 - RNA, 21 nt, Artificial Sequence
  Synthetic
guauaaggaugaugaaaugga

SEQ ID NO: 14606 - RNA, 22 nt, Artificial Sequence
  Synthetic
gguauaaggaugaugaaaugga

SEQ ID NO: 14607 - RNA, 21 nt, Artificial Sequence
  Synthetic
gcccagugucaccccaaugga

SEQ ID NO: 14608 - RNA, 22 nt, Artificial Sequence
  Synthetic
ggcccagugucaccccaaugga

SEQ ID NO: 14609 - RNA, 23 nt, Artificial Sequence
  Synthetic
gggcccagugucaccccaaugga

SEQ ID NO: 14610 - RNA, 19 nt, Artificial Sequence
  Synthetic
gugcugcugggagaaugga

SEQ ID NO: 14611 - RNA, 24 nt, Artificial Sequence
  Synthetic
guaccuaaaggaguugauaaugga

SEQ ID NO: 14612 - RNA, 18 nt, Artificial Sequence
  Synthetic
guuaauacuacacaugga

SEQ ID NO: 14613 - RNA, 20 nt, Artificial Sequence
  Synthetic
guguuaauacuacacaugga

SEQ ID NO: 14614 - RNA, 18 nt, Artificial Sequence
  Synthetic
gugccacacugacaugga

SEQ ID NO: 14615 - RNA, 24 nt, Artificial Sequence
  Synthetic
gaaacagugccacacugacaugga

SEQ ID NO: 14616 - RNA, 20 nt, Artificial Sequence
  Synthetic
gucaucuaaauucucaugga

SEQ ID NO: 14617 - RNA, 24 nt, Artificial Sequence
  Synthetic
gaaagucaucuaaauucucaugga

SEQ ID NO: 14618 - RNA, 20 nt, Artificial Sequence
  Synthetic
gacaggcaggggaauaugga

SEQ ID NO: 14619 - RNA, 22 nt, Artificial Sequence
  Synthetic
gagacaggcaggggaauaugga

SEQ ID NO: 14620 - RNA, 23 nt, Artificial Sequence
  Synthetic
ggagacaggcaggggaauaugga

SEQ ID NO: 14621 - RNA, 24 nt, Artificial Sequence
  Synthetic
gggagacaggcaggggaauaugga

SEQ ID NO: 14622 - RNA, 24 nt, Artificial Sequence
  Synthetic
gaaaaauggaaauuugaauaugga

SEQ ID NO: 14623 - RNA, 19 nt, Artificial Sequence
  Synthetic
gagccugucccuauaugga

SEQ ID NO: 14624 - RNA, 20 nt, Artificial Sequence
  Synthetic
ggagccugucccuauaugga

SEQ ID NO: 14625 - RNA, 22 nt, Artificial Sequence
  Synthetic
gaggagccugucccuauaugga

SEQ ID NO: 14626 - RNA, 19 nt, Artificial Sequence
  Synthetic
gcucagaaccacguaugga

SEQ ID NO: 14627 - RNA, 22 nt, Artificial Sequence
  Synthetic
guagcucagaaccacguaugga

SEQ ID NO: 14628 - RNA, 19 nt, Artificial Sequence
  Synthetic
guuauaacuuagguaugga

SEQ ID NO: 14629 - RNA, 22 nt, Artificial Sequence
  Synthetic
gauguuauaacuuagguaugga

SEQ ID NO: 14630 - RNA, 23 nt, Artificial Sequence
  Synthetic
ggauguuauaacuuagguaugga

SEQ ID NO: 14631 - RNA, 19 nt, Artificial Sequence
  Synthetic
gauaguugauuguuaugga

SEQ ID NO: 14632 - RNA, 20 nt, Artificial Sequence
  Synthetic
ggauaguugauuguuaugga

SEQ ID NO: 14633 - RNA, 22 nt, Artificial Sequence
  Synthetic
gaggauaguugauuguuaugga

SEQ ID NO: 14634 - RNA, 18 nt, Artificial Sequence
  Synthetic
guuguuagaaagacugga

SEQ ID NO: 14635 - RNA, 20 nt, Artificial Sequence
  Synthetic
gcuggggaagugagacugga

SEQ ID NO: 14636 - RNA, 22 nt, Artificial Sequence
  Synthetic
gugcuggggaagugagacugga

SEQ ID NO: 14637 - RNA, 23 nt, Artificial Sequence
  Synthetic
ggugcuggggaagugagacugga

SEQ ID NO: 14638 - RNA, 19 nt, Artificial Sequence
  Synthetic
gccuugcauuaaaccugga

SEQ ID NO: 14639 - RNA, 20 nt, Artificial Sequence
  Synthetic
gucuuugugccugggcugga

SEQ ID NO: 14640 - RNA, 23 nt, Artificial Sequence
  Synthetic
gcugucuuugugccugggcugga

SEQ ID NO: 14641 - RNA, 20 nt, Artificial Sequence
  Synthetic
guucaguuuuugaaucugga

SEQ ID NO: 14642 - RNA, 23 nt, Artificial Sequence
  Synthetic
gaaguucaguuuuugaaucugga

SEQ ID NO: 14643 - RNA, 24 nt, Artificial Sequence
  Synthetic
ggaaguucaguuuuugaaucugga

SEQ ID NO: 14644 - RNA, 19 nt, Artificial Sequence
  Synthetic
gccaauggacuucucugga

SEQ ID NO: 14645 - RNA, 20 nt, Artificial Sequence
  Synthetic
gauugcuuucucauucugga

SEQ ID NO: 14646 - RNA, 22 nt, Artificial Sequence
  Synthetic
gaacucugacaaguacagugga

SEQ ID NO: 14647 - RNA, 19 nt, Artificial Sequence
  Synthetic
guagaucacgaucagugga

SEQ ID NO: 14648 - RNA, 18 nt, Artificial Sequence
  Synthetic
gggaaauuuuuucgugga

SEQ ID NO: 14649 - RNA, 22 nt, Artificial Sequence
  Synthetic
guaaauguugaggcuaggugga

SEQ ID NO: 14650 - RNA, 19 nt, Artificial Sequence
  Synthetic
gcugacuggcaaaugugga

SEQ ID NO: 14651 - RNA, 20 nt, Artificial Sequence
  Synthetic
ggcugacuggcaaaugugga

SEQ ID NO: 14652 - RNA, 23 nt, Artificial Sequence
  Synthetic
gucuuuaaccuggcaucugugga

SEQ ID NO: 14653 - RNA, 24 nt, Artificial Sequence
  Synthetic
ggucuuuaaccuggcaucugugga

SEQ ID NO: 14654 - RNA, 19 nt, Artificial Sequence
  Synthetic
gaaaacgugagugugugga

SEQ ID NO: 14655 - RNA, 20 nt, Artificial Sequence
  Synthetic
ggaaaacgugagugugugga

SEQ ID NO: 14656 - RNA, 23 nt, Artificial Sequence
  Synthetic
gcaggaaaacgugagugugugga

SEQ ID NO: 14657 - RNA, 24 nt, Artificial Sequence
  Synthetic
ggcaggaaaacgugagugugugga

SEQ ID NO: 14658 - RNA, 20 nt, Artificial Sequence
  Synthetic
gacuuaauucaauuugugga

SEQ ID NO: 14659 - RNA, 21 nt, Artificial Sequence
  Synthetic
ggacuuaauucaauuugugga

SEQ ID NO: 14660 - RNA, 23 nt, Artificial Sequence
  Synthetic
gaggacuuaauucaauuugugga

SEQ ID NO: 14661 - RNA, 18 nt, Artificial Sequence
  Synthetic
gagcagaagggcauugga

SEQ ID NO: 14662 - RNA, 20 nt, Artificial Sequence
  Synthetic
gagagcagaagggcauugga

SEQ ID NO: 14663 - RNA, 21 nt, Artificial Sequence
  Synthetic
ggagagcagaagggcauugga

SEQ ID NO: 14664 - RNA, 23 nt, Artificial Sequence
  Synthetic
gcggagagcagaagggcauugga

SEQ ID NO: 14665 - RNA, 18 nt, Artificial Sequence
  Synthetic
gauuacaucuucauugga

SEQ ID NO: 14666 - RNA, 21 nt, Artificial Sequence
  Synthetic
gaugauuacaucuucauugga

SEQ ID NO: 14667 - RNA, 22 nt, Artificial Sequence
  Synthetic
ggaugauuacaucuucauugga

SEQ ID NO: 14668 - RNA, 19 nt, Artificial Sequence
  Synthetic
guauuauaaauggauugga

SEQ ID NO: 14669 - RNA, 20 nt, Artificial Sequence
  Synthetic
guagcugguaaagacuugga

SEQ ID NO: 14670 - RNA, 21 nt, Artificial Sequence
  Synthetic
gguagcugguaaagacuugga

SEQ ID NO: 14671 - RNA, 24 nt, Artificial Sequence
  Synthetic
gcccucuccaggacucuccuugga

SEQ ID NO: 14672 - RNA, 18 nt, Artificial Sequence
  Synthetic
ggaaaagcugagcuugga

SEQ ID NO: 14673 - RNA, 20 nt, Artificial Sequence
  Synthetic
gaggaaaagcugagcuugga

SEQ ID NO: 14674 - RNA, 22 nt, Artificial Sequence
  Synthetic
gugaggaaaagcugagcuugga

SEQ ID NO: 14675 - RNA, 23 nt, Artificial Sequence
  Synthetic
gacuuucucgaggugaucuugga

SEQ ID NO: 14676 - RNA, 19 nt, Artificial Sequence
  Synthetic
gaucuccacaaguguugga

SEQ ID NO: 14677 - RNA, 21 nt, Artificial Sequence
  Synthetic
gugaucuccacaaguguugga

SEQ ID NO: 14678 - RNA, 22 nt, Artificial Sequence
  Synthetic
ggugaucuccacaaguguugga

SEQ ID NO: 14679 - RNA, 19 nt, Artificial Sequence
  Synthetic
gacaaggcagugauuugga

SEQ ID NO: 14680 - RNA, 19 nt, Artificial Sequence
  Synthetic
gcaugaaaaaauauuugga

SEQ ID NO: 14681 - RNA, 18 nt, Artificial Sequence
  Synthetic
gaaagauauuccuuugga

SEQ ID NO: 14682 - RNA, 22 nt, Artificial Sequence
  Synthetic
gauagaaagauauuccuuugga

SEQ ID NO: 14683 - RNA, 24 nt, Artificial Sequence
  Synthetic
gagauagaaagauauuccuuugga

SEQ ID NO: 14684 - RNA, 24 nt, Artificial Sequence
  Synthetic
guuaaaggacaaaaugauuuugga

SEQ ID NO: 14685 - RNA, 19 nt, Artificial Sequence
  Synthetic
guugugggaaggaaaauga

SEQ ID NO: 14686 - RNA, 20 nt, Artificial Sequence
  Synthetic
gguugugggaaggaaaauga

SEQ ID NO: 14687 - RNA, 21 nt, Artificial Sequence
  Synthetic
ggguugugggaaggaaaauga

SEQ ID NO: 14688 - RNA, 19 nt, Artificial Sequence
  Synthetic
gaaauguuaguagaaauga

SEQ ID NO: 14689 - RNA, 22 nt, Artificial Sequence
  Synthetic
gccaaugacaaaugugaaauga

SEQ ID NO: 14690 - RNA, 23 nt, Artificial Sequence
  Synthetic
gauauaaaaugggagauaaauga

SEQ ID NO: 14691 - RNA, 20 nt, Artificial Sequence
  Synthetic
guaauaaugcugauaaauga

SEQ ID NO: 14692 - RNA, 21 nt, Artificial Sequence
  Synthetic
gcauucucacacuauaaauga

SEQ ID NO: 14693 - RNA, 18 nt, Artificial Sequence
  Synthetic
gcuuuuaguauacaauga

SEQ ID NO: 14694 - RNA, 19 nt, Artificial Sequence
  Synthetic
ggcuuuuaguauacaauga

SEQ ID NO: 14695 - RNA, 21 nt, Artificial Sequence
  Synthetic
guggcuuuuaguauacaauga

SEQ ID NO: 14696 - RNA, 20 nt, Artificial Sequence
  Synthetic
gacuucuccucacccaauga

SEQ ID NO: 14697 - RNA, 21 nt, Artificial Sequence
  Synthetic
gcauagaaaaaauagcaauga

SEQ ID NO: 14698 - RNA, 23 nt, Artificial Sequence
  Synthetic
gugcauagaaaaaauagcaauga

SEQ ID NO: 14699 - RNA, 18 nt, Artificial Sequence
  Synthetic
gaagggugguggcaauga

SEQ ID NO: 14700 - RNA, 20 nt, Artificial Sequence
  Synthetic
gagaagggugguggcaauga

SEQ ID NO: 14701 - RNA, 18 nt, Artificial Sequence
  Synthetic
guauuuagcugucaauga

SEQ ID NO: 14702 - RNA, 21 nt, Artificial Sequence
  Synthetic
guuacccuaacugaagaauga

SEQ ID NO: 14703 - RNA, 23 nt, Artificial Sequence
  Synthetic
gaguuacccuaacugaagaauga

SEQ ID NO: 14704 - RNA, 24 nt, Artificial Sequence
  Synthetic
gaauacauuuuaauaacugaauga

SEQ ID NO: 14705 - RNA, 19 nt, Artificial Sequence
  Synthetic
guacaaguaaugugaauga

SEQ ID NO: 14706 - RNA, 22 nt, Artificial Sequence
  Synthetic
guaguacaaguaaugugaauga

SEQ ID NO: 14707 - RNA, 23 nt, Artificial Sequence
  Synthetic
gguaguacaaguaaugugaauga

SEQ ID NO: 14708 - RNA, 19 nt, Artificial Sequence
  Synthetic
guuauuuggaaccuaauga

SEQ ID NO: 14709 - RNA, 20 nt, Artificial Sequence
  Synthetic
guugaaauauaguguaauga

SEQ ID NO: 14710 - RNA, 22 nt, Artificial Sequence
  Synthetic
guguugaaauauaguguaauga

SEQ ID NO: 14711 - RNA, 19 nt, Artificial Sequence
  Synthetic
gauacaaagacaaacauga

SEQ ID NO: 14712 - RNA, 20 nt, Artificial Sequence
  Synthetic
ggauacaaagacaaacauga

SEQ ID NO: 14713 - RNA, 23 nt, Artificial Sequence
  Synthetic
gcagcugaucugcagacacauga

SEQ ID NO: 14714 - RNA, 23 nt, Artificial Sequence
  Synthetic
guuaauaaacagagaugacauga

SEQ ID NO: 14715 - RNA, 21 nt, Artificial Sequence
  Synthetic
gucagugauacagauacauga

SEQ ID NO: 14716 - RNA, 21 nt, Artificial Sequence
  Synthetic
gccauuaguuuggcuacauga

SEQ ID NO: 14717 - RNA, 19 nt, Artificial Sequence
  Synthetic
guaauaaguucauccauga

SEQ ID NO: 14718 - RNA, 20 nt, Artificial Sequence
  Synthetic
gguaauaaguucauccauga

SEQ ID NO: 14719 - RNA, 23 nt, Artificial Sequence
  Synthetic
guagguaauaaguucauccauga

SEQ ID NO: 14720 - RNA, 18 nt, Artificial Sequence
  Synthetic
gcugaauauuaagcauga

SEQ ID NO: 14721 - RNA, 21 nt, Artificial Sequence
  Synthetic
gcaaacaugcugagugcauga

SEQ ID NO: 14722 - RNA, 22 nt, Artificial Sequence
  Synthetic
ggcaaacaugcugagugcauga

SEQ ID NO: 14723 - RNA, 20 nt, Artificial Sequence
  Synthetic
guucuuaucuuccaucauga

SEQ ID NO: 14724 - RNA, 23 nt, Artificial Sequence
  Synthetic
guuccuugccucuaugaucauga

SEQ ID NO: 14725 - RNA, 20 nt, Artificial Sequence
  Synthetic
gcaugaaaaaauuaucauga

SEQ ID NO: 14726 - RNA, 22 nt, Artificial Sequence
  Synthetic
gagcaugaaaaaauuaucauga

SEQ ID NO: 14727 - RNA, 23 nt, Artificial Sequence
  Synthetic
guauaauagcauuucacucauga

SEQ ID NO: 14728 - RNA, 18 nt, Artificial Sequence
  Synthetic
gcaccugagaugucauga

SEQ ID NO: 14729 - RNA, 20 nt, Artificial Sequence
  Synthetic
gugcaccugagaugucauga

SEQ ID NO: 14730 - RNA, 21 nt, Artificial Sequence
  Synthetic
gcauuauuuaaaaacagauga

SEQ ID NO: 14731 - RNA, 22 nt, Artificial Sequence
  Synthetic
gcaaugcacauaaaucagauga

SEQ ID NO: 14732 - RNA, 22 nt, Artificial Sequence
  Synthetic
gaaaaaguauccucagagauga

SEQ ID NO: 14733 - RNA, 23 nt, Artificial Sequence
  Synthetic
gcucuaagccugagaggagauga

SEQ ID NO: 14734 - RNA, 20 nt, Artificial Sequence
  Synthetic
gauacuccagucauagauga

SEQ ID NO: 14735 - RNA, 23 nt, Artificial Sequence
  Synthetic
gcagauacuccagucauagauga

SEQ ID NO: 14736 - RNA, 24 nt, Artificial Sequence
  Synthetic
ggcagauacuccagucauagauga

SEQ ID NO: 14737 - RNA, 19 nt, Artificial Sequence
  Synthetic
guuauuaaaauuuagauga

SEQ ID NO: 14738 - RNA, 20 nt, Artificial Sequence
  Synthetic
gcacuuuugaauugggauga

SEQ ID NO: 14739 - RNA, 18 nt, Artificial Sequence
  Synthetic
ggcacuucaccuggauga

SEQ ID NO: 14740 - RNA, 19 nt, Artificial Sequence
  Synthetic
gggcacuucaccuggauga

SEQ ID NO: 14741 - RNA, 18 nt, Artificial Sequence
  Synthetic
gggaaauuuaaaugauga

SEQ ID NO: 14742 - RNA, 18 nt, Artificial Sequence
  Synthetic
guguuaagaucaugauga

SEQ ID NO: 14743 - RNA, 21 nt, Artificial Sequence
  Synthetic
gccguguuaagaucaugauga

SEQ ID NO: 14744 - RNA, 18 nt, Artificial Sequence
  Synthetic
guugauaacuuuugauga

SEQ ID NO: 14745 - RNA, 22 nt, Artificial Sequence
  Synthetic
gauaguugauaacuuuugauga

SEQ ID NO: 14746 - RNA, 18 nt, Artificial Sequence
  Synthetic
guacuuuuugaaauauga

SEQ ID NO: 14747 - RNA, 18 nt, Artificial Sequence
  Synthetic
gaguaaacgugaauauga

SEQ ID NO: 14748 - RNA, 19 nt, Artificial Sequence
  Synthetic
ggaguaaacgugaauauga

SEQ ID NO: 14749 - RNA, 23 nt, Artificial Sequence
  Synthetic
guaaggaguaaacgugaauauga

SEQ ID NO: 14750 - RNA, 22 nt, Artificial Sequence
  Synthetic
gucucuuucaagauuaauauga

SEQ ID NO: 14751 - RNA, 19 nt, Artificial Sequence
  Synthetic
gccuccaaauaagauauga

SEQ ID NO: 14752 - RNA, 20 nt, Artificial Sequence
  Synthetic
ggccuccaaauaagauauga

SEQ ID NO: 14753 - RNA, 21 nt, Artificial Sequence
  Synthetic
gggccuccaaauaagauauga

SEQ ID NO: 14754 - RNA, 18 nt, Artificial Sequence
  Synthetic
ggaugugaaaggauauga

SEQ ID NO: 14755 - RNA, 19 nt, Artificial Sequence
  Synthetic
guccaaaauagugauauga

SEQ ID NO: 14756 - RNA, 20 nt, Artificial Sequence
  Synthetic
gguccaaaauagugauauga

SEQ ID NO: 14757 - RNA, 21 nt, Artificial Sequence
  Synthetic
ggguccaaaauagugauauga

SEQ ID NO: 14758 - RNA, 21 nt, Artificial Sequence
  Synthetic
gcacaaaagaaagaacuauga

SEQ ID NO: 14759 - RNA, 23 nt, Artificial Sequence
  Synthetic
gugcacaaaagaaagaacuauga

SEQ ID NO: 14760 - RNA, 18 nt, Artificial Sequence
  Synthetic
ggaggggggguacuauga

SEQ ID NO: 14761 - RNA, 22 nt, Artificial Sequence
  Synthetic
gaauggaggggggguacuauga

SEQ ID NO: 14762 - RNA, 21 nt, Artificial Sequence
  Synthetic
gucacuaaucuuaagcuauga

SEQ ID NO: 14763 - RNA, 20 nt, Artificial Sequence
  Synthetic
guagaaaaaggcagcuauga

SEQ ID NO: 14764 - RNA, 24 nt, Artificial Sequence
  Synthetic
gaaaguagaaaaaggcagcuauga

SEQ ID NO: 14765 - RNA, 22 nt, Artificial Sequence
  Synthetic
gcucccagugucagcgcuauga

SEQ ID NO: 14766 - RNA, 23 nt, Artificial Sequence
  Synthetic
ggcucccagugucagcgcuauga

SEQ ID NO: 14767 - RNA, 22 nt, Artificial Sequence
  Synthetic
gcucacauuaacaauucuauga

SEQ ID NO: 14768 - RNA, 23 nt, Artificial Sequence
  Synthetic
ggcucacauuaacaauucuauga

SEQ ID NO: 14769 - RNA, 24 nt, Artificial Sequence
  Synthetic
gggcucacauuaacaauucuauga

SEQ ID NO: 14770 - RNA, 18 nt, Artificial Sequence
  Synthetic
guggguuugcuuguauga

SEQ ID NO: 14771 - RNA, 21 nt, Artificial Sequence
  Synthetic
gggagcuauuaaaaauuauga

SEQ ID NO: 14772 - RNA, 23 nt, Artificial Sequence
  Synthetic
gagggagcuauuaaaaauuauga

SEQ ID NO: 14773 - RNA, 18 nt, Artificial Sequence
  Synthetic
guccugucaaaauuauga

SEQ ID NO: 14774 - RNA, 21 nt, Artificial Sequence
  Synthetic
gauguccugucaaaauuauga

SEQ ID NO: 14775 - RNA, 19 nt, Artificial Sequence
  Synthetic
gauaaccaggauauuauga

SEQ ID NO: 14776 - RNA, 22 nt, Artificial Sequence
  Synthetic
gaugauaaccaggauauuauga

SEQ ID NO: 14777 - RNA, 18 nt, Artificial Sequence
  Synthetic
gugugacuuuuauuauga

SEQ ID NO: 14778 - RNA, 19 nt, Artificial Sequence
  Synthetic
ggugugacuuuuauuauga

SEQ ID NO: 14779 - RNA, 24 nt, Artificial Sequence
  Synthetic
gcaccuuucuuggggcccuuauga

SEQ ID NO: 14780 - RNA, 18 nt, Artificial Sequence
  Synthetic
ggcaguuacagcuuauga

SEQ ID NO: 14781 - RNA, 21 nt, Artificial Sequence
  Synthetic
guuggcaguuacagcuuauga

SEQ ID NO: 14782 - RNA, 23 nt, Artificial Sequence
  Synthetic
guguuggcaguuacagcuuauga

SEQ ID NO: 14783 - RNA, 21 nt, Artificial Sequence
  Synthetic
gggagagagagaaguaacuga

SEQ ID NO: 14784 - RNA, 23 nt, Artificial Sequence
  Synthetic
gugggagagagagaaguaacuga

SEQ ID NO: 14785 - RNA, 24 nt, Artificial Sequence
  Synthetic
ggugggagagagagaaguaacuga

SEQ ID NO: 14786 - RNA, 23 nt, Artificial Sequence
  Synthetic
gacucaaauccuuaugucacuga

SEQ ID NO: 14787 - RNA, 18 nt, Artificial Sequence
  Synthetic
ggauacuuugcagacuga

SEQ ID NO: 14788 - RNA, 19 nt, Artificial Sequence
  Synthetic
gggauacuuugcagacuga

SEQ ID NO: 14789 - RNA, 20 nt, Artificial Sequence
  Synthetic
ggggauacuuugcagacuga

SEQ ID NO: 14790 - RNA, 20 nt, Artificial Sequence
  Synthetic
gaauacaacuuagagacuga

SEQ ID NO: 14791 - RNA, 21 nt, Artificial Sequence
  Synthetic
guuaagagcaaaguagacuga

SEQ ID NO: 14792 - RNA, 24 nt, Artificial Sequence
  Synthetic
gaaguuaagagcaaaguagacuga

SEQ ID NO: 14793 - RNA, 21 nt, Artificial Sequence
  Synthetic
guuuacucaguacccaccuga

SEQ ID NO: 14794 - RNA, 19 nt, Artificial Sequence
  Synthetic
gcuaaggcacaugcccuga

SEQ ID NO: 14795 - RNA, 23 nt, Artificial Sequence
  Synthetic
guaugcuaaggcacaugcccuga

SEQ ID NO: 14796 - RNA, 24 nt, Artificial Sequence
  Synthetic
gguaugcuaaggcacaugcccuga

SEQ ID NO: 14797 - RNA, 22 nt, Artificial Sequence
  Synthetic
guuaaacucuauuguucccuga

SEQ ID NO: 14798 - RNA, 23 nt, Artificial Sequence
  Synthetic
guaaaucacagaccucauccuga

SEQ ID NO: 14799 - RNA, 24 nt, Artificial Sequence
  Synthetic
gguaaaucacagaccucauccuga

SEQ ID NO: 14800 - RNA, 18 nt, Artificial Sequence
  Synthetic
ggcaagagagcaagcuga

SEQ ID NO: 14801 - RNA, 19 nt, Artificial Sequence
  Synthetic
gggcaagagagcaagcuga

SEQ ID NO: 14802 - RNA, 22 nt, Artificial Sequence
  Synthetic
gaagggcaagagagcaagcuga

SEQ ID NO: 14803 - RNA, 19 nt, Artificial Sequence
  Synthetic
guguuuacauacuggcuga

SEQ ID NO: 14804 - RNA, 18 nt, Artificial Sequence
  Synthetic
guuucaguuucuggcuga

SEQ ID NO: 14805 - RNA, 22 nt, Artificial Sequence
  Synthetic
gcauguuucaguuucuggcuga

SEQ ID NO: 14806 - RNA, 23 nt, Artificial Sequence
  Synthetic
ggcauguuucaguuucuggcuga

SEQ ID NO: 14807 - RNA, 21 nt, Artificial Sequence
  Synthetic
gaccuagaaaaaaacugcuga

SEQ ID NO: 14808 - RNA, 23 nt, Artificial Sequence
  Synthetic
gagaccuagaaaaaaacugcuga

SEQ ID NO: 14809 - RNA, 24 nt, Artificial Sequence
  Synthetic
guacaaaucccugaaaacugcuga

SEQ ID NO: 14810 - RNA, 24 nt, Artificial Sequence
  Synthetic
gaaauauuucagaggcugugcuga

SEQ ID NO: 14811 - RNA, 21 nt, Artificial Sequence
  Synthetic
guuuuucagaauaaaaucuga

SEQ ID NO: 14812 - RNA, 23 nt, Artificial Sequence
  Synthetic
guguuuuucagaauaaaaucuga

SEQ ID NO: 14813 - RNA, 21 nt, Artificial Sequence
  Synthetic
guaaaauuacuuaaaaucuga

SEQ ID NO: 14814 - RNA, 22 nt, Artificial Sequence
  Synthetic
gguaaaauuacuuaaaaucuga

SEQ ID NO: 14815 - RNA, 20 nt, Artificial Sequence
  Synthetic
gccagcugucagauaucuga

SEQ ID NO: 14816 - RNA, 18 nt, Artificial Sequence
  Synthetic
guagaagaugcuaucuga

SEQ ID NO: 14817 - RNA, 23 nt, Artificial Sequence
  Synthetic
guuuuguagaagaugcuaucuga

SEQ ID NO: 14818 - RNA, 24 nt, Artificial Sequence
  Synthetic
gguuuuguagaagaugcuaucuga

SEQ ID NO: 14819 - RNA, 23 nt, Artificial Sequence
  Synthetic
guacaugaugaacaaguaucuga

SEQ ID NO: 14820 - RNA, 19 nt, Artificial Sequence
  Synthetic
gugauuccaucagcucuga

SEQ ID NO: 14821 - RNA, 22 nt, Artificial Sequence
  Synthetic
gaaaaauagauacagugucuga

SEQ ID NO: 14822 - RNA, 20 nt, Artificial Sequence
  Synthetic
gcuggagagauugauucuga

SEQ ID NO: 14823 - RNA, 21 nt, Artificial Sequence
  Synthetic
ggcuggagagauugauucuga

SEQ ID NO: 14824 - RNA, 22 nt, Artificial Sequence
  Synthetic
gggcuggagagauugauucuga

SEQ ID NO: 14825 - RNA, 19 nt, Artificial Sequence
  Synthetic
gcuuccauggauauucuga

SEQ ID NO: 14826 - RNA, 21 nt, Artificial Sequence
  Synthetic
gagcuuccauggauauucuga

SEQ ID NO: 14827 - RNA, 24 nt, Artificial Sequence
  Synthetic
gcagagcuuccauggauauucuga

SEQ ID NO: 14828 - RNA, 19 nt, Artificial Sequence
  Synthetic
gcuuacauaaguauucuga

SEQ ID NO: 14829 - RNA, 22 nt, Artificial Sequence
  Synthetic
gaugcuuacauaaguauucuga

SEQ ID NO: 14830 - RNA, 24 nt, Artificial Sequence
  Synthetic
gugaugcuuacauaaguauucuga

SEQ ID NO: 14831 - RNA, 19 nt, Artificial Sequence
  Synthetic
gccaaagacugucuucuga

SEQ ID NO: 14832 - RNA, 20 nt, Artificial Sequence
  Synthetic
ggccaaagacugucuucuga

SEQ ID NO: 14833 - RNA, 18 nt, Artificial Sequence
  Synthetic
gcucucuaaauuuucuga

SEQ ID NO: 14834 - RNA, 21 nt, Artificial Sequence
  Synthetic
gaugcucucuaaauuuucuga

SEQ ID NO: 14835 - RNA, 21 nt, Artificial Sequence
  Synthetic
gcacauucagagaacaaguga

SEQ ID NO: 14836 - RNA, 23 nt, Artificial Sequence
  Synthetic
gagcacauucagagaacaaguga

SEQ ID NO: 14837 - RNA, 18 nt, Artificial Sequence
  Synthetic
gggggaguagacaaguga

SEQ ID NO: 14838 - RNA, 22 nt, Artificial Sequence
  Synthetic
guuagggggaguagacaaguga

SEQ ID NO: 14839 - RNA, 24 nt, Artificial Sequence
  Synthetic
guguuagggggaguagacaaguga

SEQ ID NO: 14840 - RNA, 24 nt, Artificial Sequence
  Synthetic
gaauaucuaucuucaggcaaguga

SEQ ID NO: 14841 - RNA, 21 nt, Artificial Sequence
  Synthetic
gauugagagauucugaaguga

SEQ ID NO: 14842 - RNA, 22 nt, Artificial Sequence
  Synthetic
ggauugagagauucugaaguga

SEQ ID NO: 14843 - RNA, 24 nt, Artificial Sequence
  Synthetic
gauuccaaacauucauugaaguga

SEQ ID NO: 14844 - RNA, 23 nt, Artificial Sequence
  Synthetic
gaauuuccacgcauuugaaguga

SEQ ID NO: 14845 - RNA, 19 nt, Artificial Sequence
  Synthetic
gaaagagacaauacaguga

SEQ ID NO: 14846 - RNA, 20 nt, Artificial Sequence
  Synthetic
ggaaagagacaauacaguga

SEQ ID NO: 14847 - RNA, 18 nt, Artificial Sequence
  Synthetic
ggugcaccaacccaguga

SEQ ID NO: 14848 - RNA, 19 nt, Artificial Sequence
  Synthetic
gggugcaccaacccaguga

SEQ ID NO: 14849 - RNA, 23 nt, Artificial Sequence
  Synthetic
gaaugggugcaccaacccaguga

SEQ ID NO: 14850 - RNA, 24 nt, Artificial Sequence
  Synthetic
ggaaugggugcaccaacccaguga

SEQ ID NO: 14851 - RNA, 20 nt, Artificial Sequence
  Synthetic
gaaauguucaaggccaguga

SEQ ID NO: 14852 - RNA, 21 nt, Artificial Sequence
  Synthetic
gauuuuuuuauucaagaguga

SEQ ID NO: 14853 - RNA, 22 nt, Artificial Sequence
  Synthetic
ggauuuuuuuauucaagaguga

SEQ ID NO: 14854 - RNA, 18 nt, Artificial Sequence
  Synthetic
guugaauaugaagaguga

SEQ ID NO: 14855 - RNA, 23 nt, Artificial Sequence
  Synthetic
gccaaguugaauaugaagaguga

SEQ ID NO: 14856 - RNA, 24 nt, Artificial Sequence
  Synthetic
gccaggaaaaaaguaagagaguga

SEQ ID NO: 14857 - RNA, 23 nt, Artificial Sequence
  Synthetic
guuuuugaaucuggaaugaguga

SEQ ID NO: 14858 - RNA, 19 nt, Artificial Sequence
  Synthetic
gccuuaucaaagugaguga

SEQ ID NO: 14859 - RNA, 23 nt, Artificial Sequence
  Synthetic
guuugccuuaucaaagugaguga

SEQ ID NO: 14860 - RNA, 19 nt, Artificial Sequence
  Synthetic
gagacaauacagugaguga

SEQ ID NO: 14861 - RNA, 23 nt, Artificial Sequence
  Synthetic
gaaagagacaauacagugaguga

SEQ ID NO: 14862 - RNA, 24 nt, Artificial Sequence
  Synthetic
ggaaagagacaauacagugaguga

SEQ ID NO: 14863 - RNA, 20 nt, Artificial Sequence
  Synthetic
guuuucccaugugauaguga

SEQ ID NO: 14864 - RNA, 23 nt, Artificial Sequence
  Synthetic
gcuguuuucccaugugauaguga

SEQ ID NO: 14865 - RNA, 21 nt, Artificial Sequence
  Synthetic
guccuuaccgaauacuaguga

SEQ ID NO: 14866 - RNA, 21 nt, Artificial Sequence
  Synthetic
guauuguccucaguguaguga

SEQ ID NO: 14867 - RNA, 21 nt, Artificial Sequence
  Synthetic
gcuuagccugucacuuaguga

SEQ ID NO: 14868 - RNA, 22 nt, Artificial Sequence
  Synthetic
ggcuuagccugucacuuaguga

SEQ ID NO: 14869 - RNA, 21 nt, Artificial Sequence
  Synthetic
guuuguuaaauuaacacguga

SEQ ID NO: 14870 - RNA, 19 nt, Artificial Sequence
  Synthetic
gacuauucuuaauacguga

SEQ ID NO: 14871 - RNA, 20 nt, Artificial Sequence
  Synthetic
guuauuaucuacaaagguga

SEQ ID NO: 14872 - RNA, 21 nt, Artificial Sequence
  Synthetic
gguuauuaucuacaaagguga

SEQ ID NO: 14873 - RNA, 24 nt, Artificial Sequence
  Synthetic
guagguuauuaucuacaaagguga

SEQ ID NO: 14874 - RNA, 22 nt, Artificial Sequence
  Synthetic
gcaauuguggagagccagguga

SEQ ID NO: 14875 - RNA, 23 nt, Artificial Sequence
  Synthetic
ggcaauuguggagagccagguga

SEQ ID NO: 14876 - RNA, 24 nt, Artificial Sequence
  Synthetic
gggcaauuguggagagccagguga

SEQ ID NO: 14877 - RNA, 24 nt, Artificial Sequence
  Synthetic
guuaaugcuaaauaugugagguga

SEQ ID NO: 14878 - RNA, 18 nt, Artificial Sequence
  Synthetic
gaagcccaaaauagguga

SEQ ID NO: 14879 - RNA, 23 nt, Artificial Sequence
  Synthetic
gaaaugaagcccaaaauagguga

SEQ ID NO: 14880 - RNA, 24 nt, Artificial Sequence
  Synthetic
ggaaaugaagcccaaaauagguga

SEQ ID NO: 14881 - RNA, 20 nt, Artificial Sequence
  Synthetic
guaacugucuuaaaggguga

SEQ ID NO: 14882 - RNA, 23 nt, Artificial Sequence
  Synthetic
guaguaacugucuuaaaggguga

SEQ ID NO: 14883 - RNA, 21 nt, Artificial Sequence
  Synthetic
gcugggaaggguaggggguga

SEQ ID NO: 14884 - RNA, 24 nt, Artificial Sequence
  Synthetic
gaugcugggaaggguaggggguga

SEQ ID NO: 14885 - RNA, 19 nt, Artificial Sequence
  Synthetic
gaaacagagcaauggguga

SEQ ID NO: 14886 - RNA, 20 nt, Artificial Sequence
  Synthetic
gaagugugaaaauuugguga

SEQ ID NO: 14887 - RNA, 18 nt, Artificial Sequence
  Synthetic
ggucauuuaaaaauguga

SEQ ID NO: 14888 - RNA, 21 nt, Artificial Sequence
  Synthetic
gaaaauguuaaacggauguga

SEQ ID NO: 14889 - RNA, 22 nt, Artificial Sequence
  Synthetic
ggaaaauguuaaacggauguga

SEQ ID NO: 14890 - RNA, 23 nt, Artificial Sequence
  Synthetic
gggaaaauguuaaacggauguga

SEQ ID NO: 14891 - RNA, 23 nt, Artificial Sequence
  Synthetic
gcaaauucagcccagggauguga

SEQ ID NO: 14892 - RNA, 24 nt, Artificial Sequence
  Synthetic
ggcaaauucagcccagggauguga

SEQ ID NO: 14893 - RNA, 24 nt, Artificial Sequence
  Synthetic
guauauauagacuuuaugauguga

SEQ ID NO: 14894 - RNA, 19 nt, Artificial Sequence
  Synthetic
gauaaaugucuugauguga

SEQ ID NO: 14895 - RNA, 20 nt, Artificial Sequence
  Synthetic
gauguuuagagccacuguga

SEQ ID NO: 14896 - RNA, 22 nt, Artificial Sequence
  Synthetic
gugauguuuagagccacuguga

SEQ ID NO: 14897 - RNA, 23 nt, Artificial Sequence
  Synthetic
ggugauguuuagagccacuguga

SEQ ID NO: 14898 - RNA, 18 nt, Artificial Sequence
  Synthetic
gucccugagucacuguga

SEQ ID NO: 14899 - RNA, 19 nt, Artificial Sequence
  Synthetic
ggucccugagucacuguga

SEQ ID NO: 14900 - RNA, 19 nt, Artificial Sequence
  Synthetic
guugccaauaaaccuguga

SEQ ID NO: 14901 - RNA, 23 nt, Artificial Sequence
  Synthetic
guuuguugccaauaaaccuguga

SEQ ID NO: 14902 - RNA, 24 nt, Artificial Sequence
  Synthetic
gguuuguugccaauaaaccuguga

SEQ ID NO: 14903 - RNA, 24 nt, Artificial Sequence
  Synthetic
gaccuuuuauccuucaagcuguga

SEQ ID NO: 14904 - RNA, 19 nt, Artificial Sequence
  Synthetic
gagaacaaguucuguguga

SEQ ID NO: 14905 - RNA, 21 nt, Artificial Sequence
  Synthetic
guuucgugagugcaauuguga

SEQ ID NO: 14906 - RNA, 22 nt, Artificial Sequence
  Synthetic
gguuucgugagugcaauuguga

SEQ ID NO: 14907 - RNA, 24 nt, Artificial Sequence
  Synthetic
gagguuucgugagugcaauuguga

SEQ ID NO: 14908 - RNA, 18 nt, Artificial Sequence
  Synthetic
ggaaaguaaaccuuguga

SEQ ID NO: 14909 - RNA, 24 nt, Artificial Sequence
  Synthetic
gacaccuagcuuccagauuuguga

SEQ ID NO: 14910 - RNA, 24 nt, Artificial Sequence
  Synthetic
gauacaauuuggggucuuuuguga

SEQ ID NO: 14911 - RNA, 24 nt, Artificial Sequence
  Synthetic
gcacagaaagaggaaggaaauuga

SEQ ID NO: 14912 - RNA, 20 nt, Artificial Sequence
  Synthetic
gacuagaaagaguaaauuga

SEQ ID NO: 14913 - RNA, 24 nt, Artificial Sequence
  Synthetic
gaaagacuagaaagaguaaauuga

SEQ ID NO: 14914 - RNA, 18 nt, Artificial Sequence
  Synthetic
guaacugcugacaauuga

SEQ ID NO: 14915 - RNA, 20 nt, Artificial Sequence
  Synthetic
guguaacugcugacaauuga

SEQ ID NO: 14916 - RNA, 19 nt, Artificial Sequence
  Synthetic
gacuuagguccucaauuga

SEQ ID NO: 14917 - RNA, 20 nt, Artificial Sequence
  Synthetic
ggacuuagguccucaauuga

SEQ ID NO: 14918 - RNA, 24 nt, Artificial Sequence
  Synthetic
gauuggacuuagguccucaauuga

SEQ ID NO: 14919 - RNA, 19 nt, Artificial Sequence
  Synthetic
gugcaauguggaauauuga

SEQ ID NO: 14920 - RNA, 22 nt, Artificial Sequence
  Synthetic
gcaaaacggggcagcauauuga

SEQ ID NO: 14921 - RNA, 18 nt, Artificial Sequence
  Synthetic
gguuaauuuauguauuga

SEQ ID NO: 14922 - RNA, 22 nt, Artificial Sequence
  Synthetic
gugaagaagaggaagaacuuga

SEQ ID NO: 14923 - RNA, 23 nt, Artificial Sequence
  Synthetic
ggugaagaagaggaagaacuuga

SEQ ID NO: 14924 - RNA, 24 nt, Artificial Sequence
  Synthetic
gggugaagaagaggaagaacuuga

SEQ ID NO: 14925 - RNA, 18 nt, Artificial Sequence
  Synthetic
gccagcagagacacuuga

SEQ ID NO: 14926 - RNA, 23 nt, Artificial Sequence
  Synthetic
gcuuugccagcagagacacuuga

SEQ ID NO: 14927 - RNA, 23 nt, Artificial Sequence
  Synthetic
guacuuaaaaaauaaagacuuga

SEQ ID NO: 14928 - RNA, 19 nt, Artificial Sequence
  Synthetic
guuauuaaaauagacuuga

SEQ ID NO: 14929 - RNA, 20 nt, Artificial Sequence
  Synthetic
gguuauuaaaauagacuuga

SEQ ID NO: 14930 - RNA, 21 nt, Artificial Sequence
  Synthetic
gacaaagaaaaugauacuuga

SEQ ID NO: 14931 - RNA, 19 nt, Artificial Sequence
  Synthetic
gauaaaaaucugcccuuga

SEQ ID NO: 14932 - RNA, 20 nt, Artificial Sequence
  Synthetic
gcucccauuccaugccuuga

SEQ ID NO: 14933 - RNA, 22 nt, Artificial Sequence
  Synthetic
gagcucccauuccaugccuuga

SEQ ID NO: 14934 - RNA, 24 nt, Artificial Sequence
  Synthetic
gugagcucccauuccaugccuuga

SEQ ID NO: 14935 - RNA, 20 nt, Artificial Sequence
  Synthetic
gcaucuccagaucuccuuga

SEQ ID NO: 14936 - RNA, 22 nt, Artificial Sequence
  Synthetic
guucuuuauuuuucaagcuuga

SEQ ID NO: 14937 - RNA, 24 nt, Artificial Sequence
  Synthetic
guguucuuuauuuuucaagcuuga

SEQ ID NO: 14938 - RNA, 22 nt, Artificial Sequence
  Synthetic
guuauaccuaaggaaaucuuga

SEQ ID NO: 14939 - RNA, 18 nt, Artificial Sequence
  Synthetic
gggauuaacacaucuuga

SEQ ID NO: 14940 - RNA, 19 nt, Artificial Sequence
  Synthetic
ggggauuaacacaucuuga

SEQ ID NO: 14941 - RNA, 24 nt, Artificial Sequence
  Synthetic
gcaaaggggauuaacacaucuuga

SEQ ID NO: 14942 - RNA, 19 nt, Artificial Sequence
  Synthetic
gucaacuauuagaucuuga

SEQ ID NO: 14943 - RNA, 24 nt, Artificial Sequence
  Synthetic
gaucugucaacuauuagaucuuga

SEQ ID NO: 14944 - RNA, 18 nt, Artificial Sequence
  Synthetic
gccacagucaucucuuga

SEQ ID NO: 14945 - RNA, 18 nt, Artificial Sequence
  Synthetic
guaacaugugucucuuga

SEQ ID NO: 14946 - RNA, 19 nt, Artificial Sequence
  Synthetic
gguaacaugugucucuuga

SEQ ID NO: 14947 - RNA, 21 nt, Artificial Sequence
  Synthetic
gugguaacaugugucucuuga

SEQ ID NO: 14948 - RNA, 22 nt, Artificial Sequence
  Synthetic
guuccuaugaacuaucaguuga

SEQ ID NO: 14949 - RNA, 22 nt, Artificial Sequence
  Synthetic
gcaucugagaaaagucaguuga

SEQ ID NO: 14950 - RNA, 23 nt, Artificial Sequence
  Synthetic
ggcaucugagaaaagucaguuga

SEQ ID NO: 14951 - RNA, 20 nt, Artificial Sequence
  Synthetic
gaaagaaacaguucaguuga

SEQ ID NO: 14952 - RNA, 22 nt, Artificial Sequence
  Synthetic
gagaaagaaacaguucaguuga

SEQ ID NO: 14953 - RNA, 19 nt, Artificial Sequence
  Synthetic
gaauuuuuaugcacguuga

SEQ ID NO: 14954 - RNA, 22 nt, Artificial Sequence
  Synthetic
gcagaauuuuuaugcacguuga

SEQ ID NO: 14955 - RNA, 19 nt, Artificial Sequence
  Synthetic
guucacauuuucagguuga

SEQ ID NO: 14956 - RNA, 22 nt, Artificial Sequence
  Synthetic
gauguucacauuuucagguuga

SEQ ID NO: 14957 - RNA, 20 nt, Artificial Sequence
  Synthetic
gacucauaaacaguuguuga

SEQ ID NO: 14958 - RNA, 20 nt, Artificial Sequence
  Synthetic
gucacacuaaucuuuguuga

SEQ ID NO: 14959 - RNA, 21 nt, Artificial Sequence
  Synthetic
ggucacacuaaucuuuguuga

SEQ ID NO: 14960 - RNA, 22 nt, Artificial Sequence
  Synthetic
gggucacacuaaucuuuguuga

SEQ ID NO: 14961 - RNA, 24 nt, Artificial Sequence
  Synthetic
gcacaaaaauagcugagaauuuga

SEQ ID NO: 14962 - RNA, 18 nt, Artificial Sequence
  Synthetic
gaacaguagguaauuuga

SEQ ID NO: 14963 - RNA, 23 nt, Artificial Sequence
  Synthetic
gaaaagaacaguagguaauuuga

SEQ ID NO: 14964 - RNA, 24 nt, Artificial Sequence
  Synthetic
ggaaaagaacaguagguaauuuga

SEQ ID NO: 14965 - RNA, 23 nt, Artificial Sequence
  Synthetic
guaaaucuuuugaggucauuuga

SEQ ID NO: 14966 - RNA, 24 nt, Artificial Sequence
  Synthetic
gguaaaucuuuugaggucauuuga

SEQ ID NO: 14967 - RNA, 19 nt, Artificial Sequence
  Synthetic
gaugguaauuaagauuuga

SEQ ID NO: 14968 - RNA, 18 nt, Artificial Sequence
  Synthetic
gcucccuugccccuuuga

SEQ ID NO: 14969 - RNA, 18 nt, Artificial Sequence
  Synthetic
guuuucaagcuccuuuga

SEQ ID NO: 14970 - RNA, 21 nt, Artificial Sequence
  Synthetic
gcaguuuucaagcuccuuuga

SEQ ID NO: 14971 - RNA, 20 nt, Artificial Sequence
  Synthetic
guacuuacuuauaucuuuga

SEQ ID NO: 14972 - RNA, 22 nt, Artificial Sequence
  Synthetic
guguacuuacuuauaucuuuga

SEQ ID NO: 14973 - RNA, 18 nt, Artificial Sequence
  Synthetic
ggaaaugauugucuuuga

SEQ ID NO: 14974 - RNA, 19 nt, Artificial Sequence
  Synthetic
gggaaaugauugucuuuga

SEQ ID NO: 14975 - RNA, 20 nt, Artificial Sequence
  Synthetic
ggggaaaugauugucuuuga

SEQ ID NO: 14976 - RNA, 22 nt, Artificial Sequence
  Synthetic
guggggaaaugauugucuuuga

SEQ ID NO: 14977 - RNA, 22 nt, Artificial Sequence
  Synthetic
gacuaguaaauacuaaguuuga

SEQ ID NO: 14978 - RNA, 21 nt, Artificial Sequence
  Synthetic
gucuaugaaugaccaguuuga

SEQ ID NO: 14979 - RNA, 23 nt, Artificial Sequence
  Synthetic
gagucuaugaaugaccaguuuga

SEQ ID NO: 14980 - RNA, 20 nt, Artificial Sequence
  Synthetic
gaaagugacagaauguuuga

SEQ ID NO: 14981 - RNA, 21 nt, Artificial Sequence
  Synthetic
ggaaagugacagaauguuuga

SEQ ID NO: 14982 - RNA, 20 nt, Artificial Sequence
  Synthetic
guccaaucacgacauuuuga

SEQ ID NO: 14983 - RNA, 21 nt, Artificial Sequence
  Synthetic
gguccaaucacgacauuuuga

SEQ ID NO: 14984 - RNA, 22 nt, Artificial Sequence
  Synthetic
ggguccaaucacgacauuuuga

SEQ ID NO: 14985 - RNA, 24 nt, Artificial Sequence
  Synthetic
guggguccaaucacgacauuuuga

SEQ ID NO: 14986 - RNA, 23 nt, Artificial Sequence
  Synthetic
gacugggacaaaagucauuuuga

SEQ ID NO: 14987 - RNA, 20 nt, Artificial Sequence
  Synthetic
guuuaguaaucagauuuuga

SEQ ID NO: 14988 - RNA, 23 nt, Artificial Sequence
  Synthetic
guuguuuaguaaucagauuuuga

SEQ ID NO: 14989 - RNA, 20 nt, Artificial Sequence
  Synthetic
gaaauucagcacuauuuuga

SEQ ID NO: 14990 - RNA, 21 nt, Artificial Sequence
  Synthetic
ggaaauucagcacuauuuuga

SEQ ID NO: 14991 - RNA, 24 nt, Artificial Sequence
  Synthetic
gcuggaaauucagcacuauuuuga

SEQ ID NO: 14992 - RNA, 21 nt, Artificial Sequence
  Synthetic
guuagcuuguaccacuuuuga

SEQ ID NO: 14993 - RNA, 19 nt, Artificial Sequence
  Synthetic
gugggaaaugucguuuuga

SEQ ID NO: 14994 - RNA, 18 nt, Artificial Sequence
  Synthetic
ggaaaugaugguuuuuga

SEQ ID NO: 14995 - RNA, 24 nt, Artificial Sequence
  Synthetic
guacuuuucaaagaguguuuuuga

SEQ ID NO: 14996 - RNA, 20 nt, Artificial Sequence
  Synthetic
guauaaagauacaaaaaaua

SEQ ID NO: 14997 - RNA, 21 nt, Artificial Sequence
  Synthetic
gguauaaagauacaaaaaaua

SEQ ID NO: 14998 - RNA, 22 nt, Artificial Sequence
  Synthetic
ggguauaaagauacaaaaaaua

SEQ ID NO: 14999 - RNA, 23 nt, Artificial Sequence
  Synthetic
gggguauaaagauacaaaaaaua

SEQ ID NO: 15000 - RNA, 18 nt, Artificial Sequence
  Synthetic
gugucauucacaaaaaua

SEQ ID NO: 15001 - RNA, 22 nt, Artificial Sequence
  Synthetic
gauugugucauucacaaaaaua

SEQ ID NO: 15002 - RNA, 19 nt, Artificial Sequence
  Synthetic
gacucgguguucaaaaaua

SEQ ID NO: 15003 - RNA, 20 nt, Artificial Sequence
  Synthetic
ggacucgguguucaaaaaua

SEQ ID NO: 15004 - RNA, 21 nt, Artificial Sequence
  Synthetic
gcuagauuucagggaaaaaua

SEQ ID NO: 15005 - RNA, 19 nt, Artificial Sequence
  Synthetic
gcacugccauuagaaaaua

SEQ ID NO: 15006 - RNA, 22 nt, Artificial Sequence
  Synthetic
gaacuaaauggcagggaaaaua

SEQ ID NO: 15007 - RNA, 23 nt, Artificial Sequence
  Synthetic
ggaacuaaauggcagggaaaaua

SEQ ID NO: 15008 - RNA, 24 nt, Artificial Sequence
  Synthetic
gggaacuaaauggcagggaaaaua

SEQ ID NO: 15009 - RNA, 23 nt, Artificial Sequence
  Synthetic
gacuaggguugccuuauaaaaua

SEQ ID NO: 15010 - RNA, 18 nt, Artificial Sequence
  Synthetic
gugguuguuuuacaaaua

SEQ ID NO: 15011 - RNA, 22 nt, Artificial Sequence
  Synthetic
gaaugugguuguuuuacaaaua

SEQ ID NO: 15012 - RNA, 23 nt, Artificial Sequence
  Synthetic
ggaaugugguuguuuuacaaaua

SEQ ID NO: 15013 - RNA, 21 nt, Artificial Sequence
  Synthetic
gacuuaaacauaccccaaaua

SEQ ID NO: 15014 - RNA, 22 nt, Artificial Sequence
  Synthetic
ggacuuaaacauaccccaaaua

SEQ ID NO: 15015 - RNA, 24 nt, Artificial Sequence
  Synthetic
gaggacuuaaacauaccccaaaua

SEQ ID NO: 15016 - RNA, 20 nt, Artificial Sequence
  Synthetic
gcugcuaaauuuaagaaaua

SEQ ID NO: 15017 - RNA, 20 nt, Artificial Sequence
  Synthetic
guuuggaaucaagagaaaua

SEQ ID NO: 15018 - RNA, 21 nt, Artificial Sequence
  Synthetic
gguuuggaaucaagagaaaua

SEQ ID NO: 15019 - RNA, 24 nt, Artificial Sequence
  Synthetic
gcagguuuggaaucaagagaaaua

SEQ ID NO: 15020 - RNA, 23 nt, Artificial Sequence
  Synthetic
guucuuuauaucacauagaaaua

SEQ ID NO: 15021 - RNA, 22 nt, Artificial Sequence
  Synthetic
gauuccauuuucuuaggaaaua

SEQ ID NO: 15022 - RNA, 24 nt, Artificial Sequence
  Synthetic
gugauuccauuuucuuaggaaaua

SEQ ID NO: 15023 - RNA, 23 nt, Artificial Sequence
  Synthetic
gucauuaugaucacugggaaaua

SEQ ID NO: 15024 - RNA, 18 nt, Artificial Sequence
  Synthetic
guuaugucauuugaaaua

SEQ ID NO: 15025 - RNA, 21 nt, Artificial Sequence
  Synthetic
gaauuuccucuguuugaaaua

SEQ ID NO: 15026 - RNA, 18 nt, Artificial Sequence
  Synthetic
ggaaacacuuaauaaaua

SEQ ID NO: 15027 - RNA, 20 nt, Artificial Sequence
  Synthetic
gcauugucuuugcauaaaua

SEQ ID NO: 15028 - RNA, 23 nt, Artificial Sequence
  Synthetic
gaugcauugucuuugcauaaaua

SEQ ID NO: 15029 - RNA, 19 nt, Artificial Sequence
  Synthetic
gaucuuccugauauaaaua

SEQ ID NO: 15030 - RNA, 18 nt, Artificial Sequence
  Synthetic
gcuaguaagugcuaaaua

SEQ ID NO: 15031 - RNA, 18 nt, Artificial Sequence
  Synthetic
ggaauuugaauuuaaaua

SEQ ID NO: 15032 - RNA, 18 nt, Artificial Sequence
  Synthetic
gucaguugcauuuaaaua

SEQ ID NO: 15033 - RNA, 21 nt, Artificial Sequence
  Synthetic
gaugucaguugcauuuaaaua

SEQ ID NO: 15034 - RNA, 22 nt, Artificial Sequence
  Synthetic
ggaugucaguugcauuuaaaua

SEQ ID NO: 15035 - RNA, 18 nt, Artificial Sequence
  Synthetic
gcuggggaaaaaacaaua

SEQ ID NO: 15036 - RNA, 24 nt, Artificial Sequence
  Synthetic
gcaaucucagaaacuaacacaaua

SEQ ID NO: 15037 - RNA, 22 nt, Artificial Sequence
  Synthetic
gaaauagggaagauagccaaua

SEQ ID NO: 15038 - RNA, 24 nt, Artificial Sequence
  Synthetic
gugaaauagggaagauagccaaua

SEQ ID NO: 15039 - RNA, 20 nt, Artificial Sequence
  Synthetic
gccuugaauuuaauccaaua

SEQ ID NO: 15040 - RNA, 19 nt, Artificial Sequence
  Synthetic
gucuuuaggaaaagcaaua

SEQ ID NO: 15041 - RNA, 22 nt, Artificial Sequence
  Synthetic
guagucuuuaggaaaagcaaua

SEQ ID NO: 15042 - RNA, 18 nt, Artificial Sequence
  Synthetic
gggaagacuugggcaaua

SEQ ID NO: 15043 - RNA, 24 nt, Artificial Sequence
  Synthetic
gacuuugggaagacuugggcaaua

SEQ ID NO: 15044 - RNA, 20 nt, Artificial Sequence
  Synthetic
gaaagaacauuacuucaaua

SEQ ID NO: 15045 - RNA, 23 nt, Artificial Sequence
  Synthetic
guuaaaacuggcaucccagaaua

SEQ ID NO: 15046 - RNA, 18 nt, Artificial Sequence
  Synthetic
gaguuucucaggagaaua

SEQ ID NO: 15047 - RNA, 20 nt, Artificial Sequence
  Synthetic
guucaaaugcucauagaaua

SEQ ID NO: 15048 - RNA, 24 nt, Artificial Sequence
  Synthetic
gaauguucaaaugcucauagaaua

SEQ ID NO: 15049 - RNA, 19 nt, Artificial Sequence
  Synthetic
gauaggauauaguagaaua

SEQ ID NO: 15050 - RNA, 20 nt, Artificial Sequence
  Synthetic
gauauuaauaauuuagaaua

SEQ ID NO: 15051 - RNA, 21 nt, Artificial Sequence
  Synthetic
ggauauuaauaauuuagaaua

SEQ ID NO: 15052 - RNA, 23 nt, Artificial Sequence
  Synthetic
gaaaaaaaauuaggagaggaaua

SEQ ID NO: 15053 - RNA, 20 nt, Artificial Sequence
  Synthetic
gaaauuugaugugaggaaua

SEQ ID NO: 15054 - RNA, 22 nt, Artificial Sequence
  Synthetic
gugaaauuugaugugaggaaua

SEQ ID NO: 15055 - RNA, 18 nt, Artificial Sequence
  Synthetic
gguauccuacagggaaua

SEQ ID NO: 15056 - RNA, 19 nt, Artificial Sequence
  Synthetic
ggguauccuacagggaaua

SEQ ID NO: 15057 - RNA, 19 nt, Artificial Sequence
  Synthetic
gcagaucuacaguggaaua

SEQ ID NO: 15058 - RNA, 20 nt, Artificial Sequence
  Synthetic
ggcagaucuacaguggaaua

SEQ ID NO: 15059 - RNA, 22 nt, Artificial Sequence
  Synthetic
gaggcagaucuacaguggaaua

SEQ ID NO: 15060 - RNA, 23 nt, Artificial Sequence
  Synthetic
ggaggcagaucuacaguggaaua

SEQ ID NO: 15061 - RNA, 23 nt, Artificial Sequence
  Synthetic
gaacuauuaaggaaauaugaaua

SEQ ID NO: 15062 - RNA, 24 nt, Artificial Sequence
  Synthetic
gauauaaagagggugauaugaaua

SEQ ID NO: 15063 - RNA, 22 nt, Artificial Sequence
  Synthetic
guauaagcuuagugagugaaua

SEQ ID NO: 15064 - RNA, 18 nt, Artificial Sequence
  Synthetic
gccugugauuagugaaua

SEQ ID NO: 15065 - RNA, 22 nt, Artificial Sequence
  Synthetic
gcccagccucugguuuugaaua

SEQ ID NO: 15066 - RNA, 21 nt, Artificial Sequence
  Synthetic
gaaauaauacaaauaauaaua

SEQ ID NO: 15067 - RNA, 20 nt, Artificial Sequence
  Synthetic
gacaagugguaguaauaaua

SEQ ID NO: 15068 - RNA, 18 nt, Artificial Sequence
  Synthetic
guauucuaagccauaaua

SEQ ID NO: 15069 - RNA, 20 nt, Artificial Sequence
  Synthetic
gcccuaccucucugauaaua

SEQ ID NO: 15070 - RNA, 18 nt, Artificial Sequence
  Synthetic
gaagggugggugauaaua

SEQ ID NO: 15071 - RNA, 19 nt, Artificial Sequence
  Synthetic
ggaagggugggugauaaua

SEQ ID NO: 15072 - RNA, 20 nt, Artificial Sequence
  Synthetic
gggaagggugggugauaaua

SEQ ID NO: 15073 - RNA, 21 nt, Artificial Sequence
  Synthetic
ggggaagggugggugauaaua

SEQ ID NO: 15074 - RNA, 18 nt, Artificial Sequence
  Synthetic
gagggaaaugugauaaua

SEQ ID NO: 15075 - RNA, 20 nt, Artificial Sequence
  Synthetic
gagagggaaaugugauaaua

SEQ ID NO: 15076 - RNA, 21 nt, Artificial Sequence
  Synthetic
ggagagggaaaugugauaaua

SEQ ID NO: 15077 - RNA, 23 nt, Artificial Sequence
  Synthetic
gaggagagggaaaugugauaaua

SEQ ID NO: 15078 - RNA, 18 nt, Artificial Sequence
  Synthetic
guaaguucuuuuauaaua

SEQ ID NO: 15079 - RNA, 18 nt, Artificial Sequence
  Synthetic
guuauuauaaugcuaaua

SEQ ID NO: 15080 - RNA, 22 nt, Artificial Sequence
  Synthetic
guaaguuauuauaaugcuaaua

SEQ ID NO: 15081 - RNA, 19 nt, Artificial Sequence
  Synthetic
gcuuauaauuugucuaaua

SEQ ID NO: 15082 - RNA, 18 nt, Artificial Sequence
  Synthetic
gcaguagaaagaguaaua

SEQ ID NO: 15083 - RNA, 19 nt, Artificial Sequence
  Synthetic
ggcaguagaaagaguaaua

SEQ ID NO: 15084 - RNA, 18 nt, Artificial Sequence
  Synthetic
guguacuaacauguaaua

SEQ ID NO: 15085 - RNA, 21 nt, Artificial Sequence
  Synthetic
guaguguacuaacauguaaua

SEQ ID NO: 15086 - RNA, 24 nt, Artificial Sequence
  Synthetic
gauguaguguacuaacauguaaua

SEQ ID NO: 15087 - RNA, 18 nt, Artificial Sequence
  Synthetic
guacucuuuuuuguaaua

SEQ ID NO: 15088 - RNA, 19 nt, Artificial Sequence
  Synthetic
gguacucuuuuuuguaaua

SEQ ID NO: 15089 - RNA, 22 nt, Artificial Sequence
  Synthetic
gcucugaggugaguaauuaaua

SEQ ID NO: 15090 - RNA, 23 nt, Artificial Sequence
  Synthetic
ggcucugaggugaguaauuaaua

SEQ ID NO: 15091 - RNA, 20 nt, Artificial Sequence
  Synthetic
gacuaauuaccaucuuaaua

SEQ ID NO: 15092 - RNA, 20 nt, Artificial Sequence
  Synthetic
gcuuuacagcaaguuuaaua

SEQ ID NO: 15093 - RNA, 23 nt, Artificial Sequence
  Synthetic
guagcuuuacagcaaguuuaaua

SEQ ID NO: 15094 - RNA, 21 nt, Artificial Sequence
  Synthetic
gcuugagauaauguuuuaaua

SEQ ID NO: 15095 - RNA, 19 nt, Artificial Sequence
  Synthetic
guauaauuacagaaacaua

SEQ ID NO: 15096 - RNA, 20 nt, Artificial Sequence
  Synthetic
gguauaauuacagaaacaua

SEQ ID NO: 15097 - RNA, 23 nt, Artificial Sequence
  Synthetic
guagguauaauuacagaaacaua

SEQ ID NO: 15098 - RNA, 21 nt, Artificial Sequence
  Synthetic
gucuuuuagcaauuucacaua

SEQ ID NO: 15099 - RNA, 22 nt, Artificial Sequence
  Synthetic
gaauuauauacauuuagacaua

SEQ ID NO: 15100 - RNA, 24 nt, Artificial Sequence
  Synthetic
gugaauuauauacauuuagacaua

SEQ ID NO: 15101 - RNA, 19 nt, Artificial Sequence
  Synthetic
gcacuacauuaaugacaua

SEQ ID NO: 15102 - RNA, 20 nt, Artificial Sequence
  Synthetic
ggcacuacauuaaugacaua

SEQ ID NO: 15103 - RNA, 19 nt, Artificial Sequence
  Synthetic
gauacucucuucugacaua

SEQ ID NO: 15104 - RNA, 23 nt, Artificial Sequence
  Synthetic
guaugauacucucuucugacaua

SEQ ID NO: 15105 - RNA, 19 nt, Artificial Sequence
  Synthetic
gcagauucuuucugacaua

SEQ ID NO: 15106 - RNA, 20 nt, Artificial Sequence
  Synthetic
ggcagauucuuucugacaua

SEQ ID NO: 15107 - RNA, 22 nt, Artificial Sequence
  Synthetic
guggcagauucuuucugacaua

SEQ ID NO: 15108 - RNA, 24 nt, Artificial Sequence
  Synthetic
gaguggcagauucuuucugacaua

SEQ ID NO: 15109 - RNA, 22 nt, Artificial Sequence
  Synthetic
gacauaugcuguaaaauacaua

SEQ ID NO: 15110 - RNA, 19 nt, Artificial Sequence
  Synthetic
gaaggcauccuuauacaua

SEQ ID NO: 15111 - RNA, 20 nt, Artificial Sequence
  Synthetic
ggaaggcauccuuauacaua

SEQ ID NO: 15112 - RNA, 21 nt, Artificial Sequence
  Synthetic
gauaucagauuuuucuacaua

SEQ ID NO: 15113 - RNA, 22 nt, Artificial Sequence
  Synthetic
ggauaucagauuuuucuacaua

SEQ ID NO: 15114 - RNA, 24 nt, Artificial Sequence
  Synthetic
guggauaucagauuuuucuacaua

SEQ ID NO: 15115 - RNA, 22 nt, Artificial Sequence
  Synthetic
gauauuuucucccauguacaua

SEQ ID NO: 15116 - RNA, 21 nt, Artificial Sequence
  Synthetic
gcaauuugucuauauuacaua

SEQ ID NO: 15117 - RNA, 23 nt, Artificial Sequence
  Synthetic
gugcaauuugucuauauuacaua

SEQ ID NO: 15118 - RNA, 21 nt, Artificial Sequence
  Synthetic
gaaacagaucccuguuacaua

SEQ ID NO: 15119 - RNA, 22 nt, Artificial Sequence
  Synthetic
ggaaacagaucccuguuacaua

SEQ ID NO: 15120 - RNA, 20 nt, Artificial Sequence
  Synthetic
gauaagggccugaaaccaua

SEQ ID NO: 15121 - RNA, 22 nt, Artificial Sequence
  Synthetic
gugauaagggccugaaaccaua

SEQ ID NO: 15122 - RNA, 19 nt, Artificial Sequence
  Synthetic
gacauucugcucuaccaua

SEQ ID NO: 15123 - RNA, 22 nt, Artificial Sequence
  Synthetic
gaagacauucugcucuaccaua

SEQ ID NO: 15124 - RNA, 24 nt, Artificial Sequence
  Synthetic
gugaagacauucugcucuaccaua

SEQ ID NO: 15125 - RNA, 19 nt, Artificial Sequence
  Synthetic
gccacaaacagugcccaua

SEQ ID NO: 15126 - RNA, 21 nt, Artificial Sequence
  Synthetic
gugccacaaacagugcccaua

SEQ ID NO: 15127 - RNA, 22 nt, Artificial Sequence
  Synthetic
ggugccacaaacagugcccaua

SEQ ID NO: 15128 - RNA, 23 nt, Artificial Sequence
  Synthetic
gggugccacaaacagugcccaua

SEQ ID NO: 15129 - RNA, 20 nt, Artificial Sequence
  Synthetic
gauuauacacgagagccaua

SEQ ID NO: 15130 - RNA, 21 nt, Artificial Sequence
  Synthetic
ggauuauacacgagagccaua

SEQ ID NO: 15131 - RNA, 18 nt, Artificial Sequence
  Synthetic
gaguucgcuagagccaua

SEQ ID NO: 15132 - RNA, 23 nt, Artificial Sequence
  Synthetic
gcaaagaguucgcuagagccaua

SEQ ID NO: 15133 - RNA, 22 nt, Artificial Sequence
  Synthetic
guaauauagacaguuugccaua

SEQ ID NO: 15134 - RNA, 18 nt, Artificial Sequence
  Synthetic
gaucccuagagcuccaua

SEQ ID NO: 15135 - RNA, 18 nt, Artificial Sequence
  Synthetic
gauuaaaaaauuuccaua

SEQ ID NO: 15136 - RNA, 19 nt, Artificial Sequence
  Synthetic
ggauuaaaaaauuuccaua

SEQ ID NO: 15137 - RNA, 18 nt, Artificial Sequence
  Synthetic
gggcagggguugagcaua

SEQ ID NO: 15138 - RNA, 20 nt, Artificial Sequence
  Synthetic
gagggcagggguugagcaua

SEQ ID NO: 15139 - RNA, 21 nt, Artificial Sequence
  Synthetic
ggagggcagggguugagcaua

SEQ ID NO: 15140 - RNA, 23 nt, Artificial Sequence
  Synthetic
gaggagggcagggguugagcaua

SEQ ID NO: 15141 - RNA, 18 nt, Artificial Sequence
  Synthetic
gaauuuuaaaccugcaua

SEQ ID NO: 15142 - RNA, 23 nt, Artificial Sequence
  Synthetic
guaacgaauuuuaaaccugcaua

SEQ ID NO: 15143 - RNA, 19 nt, Artificial Sequence
  Synthetic
gaaaagaugcauuaucaua

SEQ ID NO: 15144 - RNA, 22 nt, Artificial Sequence
  Synthetic
guugaaaagaugcauuaucaua

SEQ ID NO: 15145 - RNA, 23 nt, Artificial Sequence
  Synthetic
gguugaaaagaugcauuaucaua

SEQ ID NO: 15146 - RNA, 18 nt, Artificial Sequence
  Synthetic
gcuccauucuuuaucaua

SEQ ID NO: 15147 - RNA, 20 nt, Artificial Sequence
  Synthetic
guaaacuuuuagcccucaua

SEQ ID NO: 15148 - RNA, 23 nt, Artificial Sequence
  Synthetic
gauguaaacuuuuagcccucaua

SEQ ID NO: 15149 - RNA, 18 nt, Artificial Sequence
  Synthetic
ggaguuucagugcucaua

SEQ ID NO: 15150 - RNA, 20 nt, Artificial Sequence
  Synthetic
guggaguuucagugcucaua

SEQ ID NO: 15151 - RNA, 22 nt, Artificial Sequence
  Synthetic
guaaugggaauucagucucaua

SEQ ID NO: 15152 - RNA, 24 nt, Artificial Sequence
  Synthetic
guguaaugggaauucagucucaua

SEQ ID NO: 15153 - RNA, 18 nt, Artificial Sequence
  Synthetic
gagaaaggaauggucaua

SEQ ID NO: 15154 - RNA, 20 nt, Artificial Sequence
  Synthetic
gugagaaaggaauggucaua

SEQ ID NO: 15155 - RNA, 24 nt, Artificial Sequence
  Synthetic
gcuagugagaaaggaauggucaua

SEQ ID NO: 15156 - RNA, 23 nt, Artificial Sequence
  Synthetic
gaauuugugaacauaauuucaua

SEQ ID NO: 15157 - RNA, 20 nt, Artificial Sequence
  Synthetic
gucacucacacacaaagaua

SEQ ID NO: 15158 - RNA, 18 nt, Artificial Sequence
  Synthetic
gccauccaggucaagaua

SEQ ID NO: 15159 - RNA, 18 nt, Artificial Sequence
  Synthetic
gugagcauggagaagaua

SEQ ID NO: 15160 - RNA, 20 nt, Artificial Sequence
  Synthetic
gagugagcauggagaagaua

SEQ ID NO: 15161 - RNA, 23 nt, Artificial Sequence
  Synthetic
gcagagugagcauggagaagaua

SEQ ID NO: 15162 - RNA, 23 nt, Artificial Sequence
  Synthetic
guuauuuucuuuaaaauaagaua

SEQ ID NO: 15163 - RNA, 19 nt, Artificial Sequence
  Synthetic
gcauuuauucacccagaua

SEQ ID NO: 15164 - RNA, 22 nt, Artificial Sequence
  Synthetic
gaagcauuuauucacccagaua

SEQ ID NO: 15165 - RNA, 24 nt, Artificial Sequence
  Synthetic
gaaaaacauucaagggaagagaua

SEQ ID NO: 15166 - RNA, 19 nt, Artificial Sequence
  Synthetic
gcacugugaaauggagaua

SEQ ID NO: 15167 - RNA, 19 nt, Artificial Sequence
  Synthetic
guucuggauuuaguagaua

SEQ ID NO: 15168 - RNA, 21 nt, Artificial Sequence
  Synthetic
gaguucuggauuuaguagaua

SEQ ID NO: 15169 - RNA, 22 nt, Artificial Sequence
  Synthetic
ggaguucuggauuuaguagaua

SEQ ID NO: 15170 - RNA, 18 nt, Artificial Sequence
  Synthetic
gguugcucuagguagaua

SEQ ID NO: 15171 - RNA, 22 nt, Artificial Sequence
  Synthetic
gccugguugcucuagguagaua

SEQ ID NO: 15172 - RNA, 24 nt, Artificial Sequence
  Synthetic
gagccugguugcucuagguagaua

SEQ ID NO: 15173 - RNA, 19 nt, Artificial Sequence
  Synthetic
gaagcagguauguuagaua

SEQ ID NO: 15174 - RNA, 20 nt, Artificial Sequence
  Synthetic
ggaagcagguauguuagaua

SEQ ID NO: 15175 - RNA, 24 nt, Artificial Sequence
  Synthetic
guauggaagcagguauguuagaua

SEQ ID NO: 15176 - RNA, 20 nt, Artificial Sequence
  Synthetic
guuggagacuguguuagaua

SEQ ID NO: 15177 - RNA, 24 nt, Artificial Sequence
  Synthetic
guaaguuggagacuguguuagaua

SEQ ID NO: 15178 - RNA, 23 nt, Artificial Sequence
  Synthetic
gaaccaacaaugagagaaggaua

SEQ ID NO: 15179 - RNA, 24 nt, Artificial Sequence
  Synthetic
ggaaccaacaaugagagaaggaua

SEQ ID NO: 15180 - RNA, 24 nt, Artificial Sequence
  Synthetic
gauuuaaucaaauggaagaggaua

SEQ ID NO: 15181 - RNA, 21 nt, Artificial Sequence
  Synthetic
gaaaacagacuugugaggaua

SEQ ID NO: 15182 - RNA, 22 nt, Artificial Sequence
  Synthetic
gauaaaauaaugguuggggaua

SEQ ID NO: 15183 - RNA, 22 nt, Artificial Sequence
  Synthetic
gucaacgauaagauuuuggaua

SEQ ID NO: 15184 - RNA, 19 nt, Artificial Sequence
  Synthetic
guuauucuuccaaaugaua

SEQ ID NO: 15185 - RNA, 24 nt, Artificial Sequence
  Synthetic
gcuuaccaguaccuaagcaugaua

SEQ ID NO: 15186 - RNA, 18 nt, Artificial Sequence
  Synthetic
gcaauacucugcaugaua

SEQ ID NO: 15187 - RNA, 20 nt, Artificial Sequence
  Synthetic
gagcaauacucugcaugaua

SEQ ID NO: 15188 - RNA, 24 nt, Artificial Sequence
  Synthetic
gcccacagaauuaauaauaugaua

SEQ ID NO: 15189 - RNA, 18 nt, Artificial Sequence
  Synthetic
gauagguuguuuaugaua

SEQ ID NO: 15190 - RNA, 24 nt, Artificial Sequence
  Synthetic
gcaaacugcacucuaagacugaua

SEQ ID NO: 15191 - RNA, 23 nt, Artificial Sequence
  Synthetic
guuuuuccucacagcaccugaua

SEQ ID NO: 15192 - RNA, 20 nt, Artificial Sequence
  Synthetic
gcacaaaagucacccugaua

SEQ ID NO: 15193 - RNA, 23 nt, Artificial Sequence
  Synthetic
gaugcacaaaagucacccugaua

SEQ ID NO: 15194 - RNA, 24 nt, Artificial Sequence
  Synthetic
ggaugcacaaaagucacccugaua

SEQ ID NO: 15195 - RNA, 23 nt, Artificial Sequence
  Synthetic
guaaccuaugucuuagagugaua

SEQ ID NO: 15196 - RNA, 18 nt, Artificial Sequence
  Synthetic
gcaugauacaaggugaua

SEQ ID NO: 15197 - RNA, 21 nt, Artificial Sequence
  Synthetic
gaugcaugauacaaggugaua

SEQ ID NO: 15198 - RNA, 19 nt, Artificial Sequence
  Synthetic
gcuguuuucccaugugaua

SEQ ID NO: 15199 - RNA, 23 nt, Artificial Sequence
  Synthetic
gaauaauugccuuaucugugaua

SEQ ID NO: 15200 - RNA, 19 nt, Artificial Sequence
  Synthetic
gacauggucuaacuugaua

SEQ ID NO: 15201 - RNA, 22 nt, Artificial Sequence
  Synthetic
guugacauggucuaacuugaua

SEQ ID NO: 15202 - RNA, 19 nt, Artificial Sequence
  Synthetic
guaccuaaaggaguugaua

SEQ ID NO: 15203 - RNA, 21 nt, Artificial Sequence
  Synthetic
guguaccuaaaggaguugaua

SEQ ID NO: 15204 - RNA, 18 nt, Artificial Sequence
  Synthetic
ggagcuagcacuuugaua

SEQ ID NO: 15205 - RNA, 19 nt, Artificial Sequence
  Synthetic
gggagcuagcacuuugaua

SEQ ID NO: 15206 - RNA, 24 nt, Artificial Sequence
  Synthetic
gacuugggagcuagcacuuugaua

SEQ ID NO: 15207 - RNA, 23 nt, Artificial Sequence
  Synthetic
gauuuauauuuuucuuuuugaua

SEQ ID NO: 15208 - RNA, 24 nt, Artificial Sequence
  Synthetic
ggauuuauauuuuucuuuuugaua

SEQ ID NO: 15209 - RNA, 22 nt, Artificial Sequence
  Synthetic
gacauucaaauuguaaaauaua

SEQ ID NO: 15210 - RNA, 18 nt, Artificial Sequence
  Synthetic
gagcucaauauaaauaua

SEQ ID NO: 15211 - RNA, 19 nt, Artificial Sequence
  Synthetic
ggagcucaauauaaauaua

SEQ ID NO: 15212 - RNA, 22 nt, Artificial Sequence
  Synthetic
gucucccugugaaguaaauaua

SEQ ID NO: 15213 - RNA, 19 nt, Artificial Sequence
  Synthetic
guuacuuuuuaagaauaua

SEQ ID NO: 15214 - RNA, 23 nt, Artificial Sequence
  Synthetic
gccaguuacuuuuuaagaauaua

SEQ ID NO: 15215 - RNA, 18 nt, Artificial Sequence
  Synthetic
guaauucauaauaauaua

SEQ ID NO: 15216 - RNA, 22 nt, Artificial Sequence
  Synthetic
gaaauguaaaucucuuaauaua

SEQ ID NO: 15217 - RNA, 19 nt, Artificial Sequence
  Synthetic
guuaauuucaacacauaua

SEQ ID NO: 15218 - RNA, 20 nt, Artificial Sequence
  Synthetic
gguuaauuucaacacauaua

SEQ ID NO: 15219 - RNA, 22 nt, Artificial Sequence
  Synthetic
gugguuaauuucaacacauaua

SEQ ID NO: 15220 - RNA, 19 nt, Artificial Sequence
  Synthetic
gaaaacagcaagacauaua

SEQ ID NO: 15221 - RNA, 22 nt, Artificial Sequence
  Synthetic
gaugaaaacagcaagacauaua

SEQ ID NO: 15222 - RNA, 23 nt, Artificial Sequence
  Synthetic
ggaugaaaacagcaagacauaua

SEQ ID NO: 15223 - RNA, 24 nt, Artificial Sequence
  Synthetic
guuuacuacauuaacauacauaua

SEQ ID NO: 15224 - RNA, 19 nt, Artificial Sequence
  Synthetic
gcuguagaaauaccauaua

SEQ ID NO: 15225 - RNA, 20 nt, Artificial Sequence
  Synthetic
gucaaauacaagggcauaua

SEQ ID NO: 15226 - RNA, 19 nt, Artificial Sequence
  Synthetic
gugugagcagcugcauaua

SEQ ID NO: 15227 - RNA, 20 nt, Artificial Sequence
  Synthetic
ggugugagcagcugcauaua

SEQ ID NO: 15228 - RNA, 21 nt, Artificial Sequence
  Synthetic
gggugugagcagcugcauaua

SEQ ID NO: 15229 - RNA, 22 nt, Artificial Sequence
  Synthetic
ggggugugagcagcugcauaua

SEQ ID NO: 15230 - RNA, 24 nt, Artificial Sequence
  Synthetic
gaggggugugagcagcugcauaua

SEQ ID NO: 15231 - RNA, 19 nt, Artificial Sequence
  Synthetic
gaaggggcuacaucauaua

SEQ ID NO: 15232 - RNA, 20 nt, Artificial Sequence
  Synthetic
ggaaggggcuacaucauaua

SEQ ID NO: 15233 - RNA, 24 nt, Artificial Sequence
  Synthetic
gauaggaaggggcuacaucauaua

SEQ ID NO: 15234 - RNA, 22 nt, Artificial Sequence
  Synthetic
guuuccaguguauauucauaua

SEQ ID NO: 15235 - RNA, 21 nt, Artificial Sequence
  Synthetic
gcacugguucacacggauaua

SEQ ID NO: 15236 - RNA, 24 nt, Artificial Sequence
  Synthetic
guagcacugguucacacggauaua

SEQ ID NO: 15237 - RNA, 18 nt, Artificial Sequence
  Synthetic
gaguggugaguugauaua

SEQ ID NO: 15238 - RNA, 22 nt, Artificial Sequence
  Synthetic
guuacucauguugaaauauaua

SEQ ID NO: 15239 - RNA, 23 nt, Artificial Sequence
  Synthetic
gguuacucauguugaaauauaua

SEQ ID NO: 15240 - RNA, 18 nt, Artificial Sequence
  Synthetic
gagauauggccauauaua

SEQ ID NO: 15241 - RNA, 20 nt, Artificial Sequence
  Synthetic
guuuugaaaguuguuauaua

SEQ ID NO: 15242 - RNA, 22 nt, Artificial Sequence
  Synthetic
guguuuugaaaguuguuauaua

SEQ ID NO: 15243 - RNA, 23 nt, Artificial Sequence
  Synthetic
gcucccuaaggguagaaacuaua

SEQ ID NO: 15244 - RNA, 22 nt, Artificial Sequence
  Synthetic
guaacaugucgaacuaacuaua

SEQ ID NO: 15245 - RNA, 23 nt, Artificial Sequence
  Synthetic
gcaucagagauuuauaggcuaua

SEQ ID NO: 15246 - RNA, 24 nt, Artificial Sequence
  Synthetic
ggcaucagagauuuauaggcuaua

SEQ ID NO: 15247 - RNA, 20 nt, Artificial Sequence
  Synthetic
gaauuuaggaggcugcuaua

SEQ ID NO: 15248 - RNA, 21 nt, Artificial Sequence
  Synthetic
ggaauuuaggaggcugcuaua

SEQ ID NO: 15249 - RNA, 22 nt, Artificial Sequence
  Synthetic
gcaauggaaacaaucugcuaua

SEQ ID NO: 15250 - RNA, 23 nt, Artificial Sequence
  Synthetic
gacaauaugcaaauaaaucuaua

SEQ ID NO: 15251 - RNA, 21 nt, Artificial Sequence
  Synthetic
gaaucugacaugaauucuaua

SEQ ID NO: 15252 - RNA, 24 nt, Artificial Sequence
  Synthetic
gaugaaucugacaugaauucuaua

SEQ ID NO: 15253 - RNA, 19 nt, Artificial Sequence
  Synthetic
guaaaccuuauguucuaua

SEQ ID NO: 15254 - RNA, 21 nt, Artificial Sequence
  Synthetic
gaauuugcauacauaaguaua

SEQ ID NO: 15255 - RNA, 19 nt, Artificial Sequence
  Synthetic
gugcccacaaaacaguaua

SEQ ID NO: 15256 - RNA, 18 nt, Artificial Sequence
  Synthetic
guaagaaugaacaguaua

SEQ ID NO: 15257 - RNA, 19 nt, Artificial Sequence
  Synthetic
gguaagaaugaacaguaua

SEQ ID NO: 15258 - RNA, 19 nt, Artificial Sequence
  Synthetic
gaauugguccuagaguaua

SEQ ID NO: 15259 - RNA, 22 nt, Artificial Sequence
  Synthetic
guagaauugguccuagaguaua

SEQ ID NO: 15260 - RNA, 23 nt, Artificial Sequence
  Synthetic
gguagaauugguccuagaguaua

SEQ ID NO: 15261 - RNA, 19 nt, Artificial Sequence
  Synthetic
guucgguaugaaagguaua

SEQ ID NO: 15262 - RNA, 23 nt, Artificial Sequence
  Synthetic
gcuuguucgguaugaaagguaua

SEQ ID NO: 15263 - RNA, 18 nt, Artificial Sequence
  Synthetic
gacaacucccaagguaua

SEQ ID NO: 15264 - RNA, 22 nt, Artificial Sequence
  Synthetic
gacugacaacucccaagguaua

SEQ ID NO: 15265 - RNA, 24 nt, Artificial Sequence
  Synthetic
gagacugacaacucccaagguaua

SEQ ID NO: 15266 - RNA, 18 nt, Artificial Sequence
  Synthetic
guuacuugcaauuguaua

SEQ ID NO: 15267 - RNA, 19 nt, Artificial Sequence
  Synthetic
gguuacuugcaauuguaua

SEQ ID NO: 15268 - RNA, 20 nt, Artificial Sequence
  Synthetic
ggguuacuugcaauuguaua

SEQ ID NO: 15269 - RNA, 24 nt, Artificial Sequence
  Synthetic
guccaaauaauaacacagauuaua

SEQ ID NO: 15270 - RNA, 21 nt, Artificial Sequence
  Synthetic
gauaugaacuaaucacuuaua

SEQ ID NO: 15271 - RNA, 21 nt, Artificial Sequence
  Synthetic
gcaauuaagacauauguuaua

SEQ ID NO: 15272 - RNA, 20 nt, Artificial Sequence
  Synthetic
gaauuaggaagccuguuaua

SEQ ID NO: 15273 - RNA, 23 nt, Artificial Sequence
  Synthetic
gauucccugcucaaaaauuuaua

SEQ ID NO: 15274 - RNA, 24 nt, Artificial Sequence
  Synthetic
ggauucccugcucaaaaauuuaua

SEQ ID NO: 15275 - RNA, 23 nt, Artificial Sequence
  Synthetic
gaauacuagugauaggauuuaua

SEQ ID NO: 15276 - RNA, 18 nt, Artificial Sequence
  Synthetic
gacaauucuauauuuaua

SEQ ID NO: 15277 - RNA, 21 nt, Artificial Sequence
  Synthetic
gaauaauaauuuauauuuaua

SEQ ID NO: 15278 - RNA, 24 nt, Artificial Sequence
  Synthetic
gaaacaaaauucucauuauuuaua

SEQ ID NO: 15279 - RNA, 22 nt, Artificial Sequence
  Synthetic
gucuauuguuuucaccuuuaua

SEQ ID NO: 15280 - RNA, 23 nt, Artificial Sequence
  Synthetic
guccacauaaauauaauuuuaua

SEQ ID NO: 15281 - RNA, 19 nt, Artificial Sequence
  Synthetic
gagcaguugugauuuuaua

SEQ ID NO: 15282 - RNA, 20 nt, Artificial Sequence
  Synthetic
ggagcaguugugauuuuaua

SEQ ID NO: 15283 - RNA, 21 nt, Artificial Sequence
  Synthetic
gggagcaguugugauuuuaua

SEQ ID NO: 15284 - RNA, 22 nt, Artificial Sequence
  Synthetic
ggggagcaguugugauuuuaua

SEQ ID NO: 15285 - RNA, 23 nt, Artificial Sequence
  Synthetic
guuccauguauuaauauuuuaua

SEQ ID NO: 15286 - RNA, 18 nt, Artificial Sequence
  Synthetic
ggucuuauuuaacaacua

SEQ ID NO: 15287 - RNA, 22 nt, Artificial Sequence
  Synthetic
gaauauagaacaaauucaacua

SEQ ID NO: 15288 - RNA, 18 nt, Artificial Sequence
  Synthetic
gugaaggaugaggaacua

SEQ ID NO: 15289 - RNA, 20 nt, Artificial Sequence
  Synthetic
guuaugaauauccuuaacua

SEQ ID NO: 15290 - RNA, 24 nt, Artificial Sequence
  Synthetic
gccacaaaacaauucaauacacua

SEQ ID NO: 15291 - RNA, 19 nt, Artificial Sequence
  Synthetic
gagcucugaacuagcacua

SEQ ID NO: 15292 - RNA, 24 nt, Artificial Sequence
  Synthetic
gcacagagcucugaacuagcacua

SEQ ID NO: 15293 - RNA, 20 nt, Artificial Sequence
  Synthetic
gaauugagcuaauggcacua

SEQ ID NO: 15294 - RNA, 23 nt, Artificial Sequence
  Synthetic
gaagaauugagcuaauggcacua

SEQ ID NO: 15295 - RNA, 22 nt, Artificial Sequence
  Synthetic
gaccuauucucaaaaaucacua

SEQ ID NO: 15296 - RNA, 22 nt, Artificial Sequence
  Synthetic
guuagcuagaaaauuaagacua

SEQ ID NO: 15297 - RNA, 18 nt, Artificial Sequence
  Synthetic
ggucagucaagaggacua

SEQ ID NO: 15298 - RNA, 19 nt, Artificial Sequence
  Synthetic
gggucagucaagaggacua

SEQ ID NO: 15299 - RNA, 21 nt, Artificial Sequence
  Synthetic
gagggucagucaagaggacua

SEQ ID NO: 15300 - RNA, 18 nt, Artificial Sequence
  Synthetic
gaguuuauugcuggacua

SEQ ID NO: 15301 - RNA, 18 nt, Artificial Sequence
  Synthetic
gcucacaucuaaugacua

SEQ ID NO: 15302 - RNA, 19 nt, Artificial Sequence
  Synthetic
ggcucacaucuaaugacua

SEQ ID NO: 15303 - RNA, 21 nt, Artificial Sequence
  Synthetic
gaggcucacaucuaaugacua

SEQ ID NO: 15304 - RNA, 22 nt, Artificial Sequence
  Synthetic
ggaggcucacaucuaaugacua

SEQ ID NO: 15305 - RNA, 23 nt, Artificial Sequence
  Synthetic
gggaggcucacaucuaaugacua

SEQ ID NO: 15306 - RNA, 24 nt, Artificial Sequence
  Synthetic
gauuaaauaauuuuaauaugacua

SEQ ID NO: 15307 - RNA, 22 nt, Artificial Sequence
  Synthetic
guuauacugacuuuagugacua

SEQ ID NO: 15308 - RNA, 24 nt, Artificial Sequence
  Synthetic
guccuauaaacauaaacuugacua

SEQ ID NO: 15309 - RNA, 23 nt, Artificial Sequence
  Synthetic
gucauuguguucuuucuugacua

SEQ ID NO: 15310 - RNA, 18 nt, Artificial Sequence
  Synthetic
gauuaaacaaaaauacua

SEQ ID NO: 15311 - RNA, 19 nt, Artificial Sequence
  Synthetic
gcauuacuauuuaauacua

SEQ ID NO: 15312 - RNA, 18 nt, Artificial Sequence
  Synthetic
gagcaucaauuuauacua

SEQ ID NO: 15313 - RNA, 18 nt, Artificial Sequence
  Synthetic
gaccugacaauacuacua

SEQ ID NO: 15314 - RNA, 20 nt, Artificial Sequence
  Synthetic
guagcuacucaguacuacua

SEQ ID NO: 15315 - RNA, 22 nt, Artificial Sequence
  Synthetic
gaguagcuacucaguacuacua

SEQ ID NO: 15316 - RNA, 18 nt, Artificial Sequence
  Synthetic
guaguccagaggcuacua

SEQ ID NO: 15317 - RNA, 22 nt, Artificial Sequence
  Synthetic
gaaaguaguccagaggcuacua

SEQ ID NO: 15318 - RNA, 22 nt, Artificial Sequence
  Synthetic
guacuacuacugaguaguacua

SEQ ID NO: 15319 - RNA, 21 nt, Artificial Sequence
  Synthetic
guuuggagauacuauguacua

SEQ ID NO: 15320 - RNA, 23 nt, Artificial Sequence
  Synthetic
guacauacacaguagcuuuacua

SEQ ID NO: 15321 - RNA, 24 nt, Artificial Sequence
  Synthetic
gguacauacacaguagcuuuacua

SEQ ID NO: 15322 - RNA, 18 nt, Artificial Sequence
  Synthetic
gcuuuuccauuuuuacua

SEQ ID NO: 15323 - RNA, 23 nt, Artificial Sequence
  Synthetic
gcacugcuuuuccauuuuuacua

SEQ ID NO: 15324 - RNA, 21 nt, Artificial Sequence
  Synthetic
gcaaggcaggauugaaaccua

SEQ ID NO: 15325 - RNA, 19 nt, Artificial Sequence
  Synthetic
gugagccuagaauaaccua

SEQ ID NO: 15326 - RNA, 24 nt, Artificial Sequence
  Synthetic
gcuucucaggacucucaucaccua

SEQ ID NO: 15327 - RNA, 24 nt, Artificial Sequence
  Synthetic
guauauuuuuaugcuuuucaccua

SEQ ID NO: 15328 - RNA, 23 nt, Artificial Sequence
  Synthetic
guccuauguaaauugaagaccua

SEQ ID NO: 15329 - RNA, 18 nt, Artificial Sequence
  Synthetic
gacaauaccccagaccua

SEQ ID NO: 15330 - RNA, 21 nt, Artificial Sequence
  Synthetic
gagcaaaauaacugagaccua

SEQ ID NO: 15331 - RNA, 23 nt, Artificial Sequence
  Synthetic
gagagcaaaauaacugagaccua

SEQ ID NO: 15332 - RNA, 21 nt, Artificial Sequence
  Synthetic
gcauuuggauuucauuaccua

SEQ ID NO: 15333 - RNA, 23 nt, Artificial Sequence
  Synthetic
gaccuagcauauggccuacccua

SEQ ID NO: 15334 - RNA, 21 nt, Artificial Sequence
  Synthetic
gcuuccgcucuuuccccccua

SEQ ID NO: 15335 - RNA, 20 nt, Artificial Sequence
  Synthetic
gaaggagaugaguaucccua

SEQ ID NO: 15336 - RNA, 21 nt, Artificial Sequence
  Synthetic
ggaaggagaugaguaucccua

SEQ ID NO: 15337 - RNA, 23 nt, Artificial Sequence
  Synthetic
gaggaaggagaugaguaucccua

SEQ ID NO: 15338 - RNA, 20 nt, Artificial Sequence
  Synthetic
gaugauaucagguuucccua

SEQ ID NO: 15339 - RNA, 21 nt, Artificial Sequence
  Synthetic
ggaugauaucagguuucccua

SEQ ID NO: 15340 - RNA, 19 nt, Artificial Sequence
  Synthetic
gagaaagcacccaagccua

SEQ ID NO: 15341 - RNA, 20 nt, Artificial Sequence
  Synthetic
ggagaaagcacccaagccua

SEQ ID NO: 15342 - RNA, 23 nt, Artificial Sequence
  Synthetic
guuggagaaagcacccaagccua

SEQ ID NO: 15343 - RNA, 20 nt, Artificial Sequence
  Synthetic
gcucucacucagccagccua

SEQ ID NO: 15344 - RNA, 22 nt, Artificial Sequence
  Synthetic
gagcucucacucagccagccua

SEQ ID NO: 15345 - RNA, 23 nt, Artificial Sequence
  Synthetic
ggagcucucacucagccagccua

SEQ ID NO: 15346 - RNA, 19 nt, Artificial Sequence
  Synthetic
gacagggaauagcagccua

SEQ ID NO: 15347 - RNA, 21 nt, Artificial Sequence
  Synthetic
gugacagggaauagcagccua

SEQ ID NO: 15348 - RNA, 22 nt, Artificial Sequence
  Synthetic
ggugacagggaauagcagccua

SEQ ID NO: 15349 - RNA, 18 nt, Artificial Sequence
  Synthetic
gaagccuaaucuagccua

SEQ ID NO: 15350 - RNA, 23 nt, Artificial Sequence
  Synthetic
guaaugaagccuaaucuagccua

SEQ ID NO: 15351 - RNA, 22 nt, Artificial Sequence
  Synthetic
gccaaguuuuuuuuuuugccua

SEQ ID NO: 15352 - RNA, 18 nt, Artificial Sequence
  Synthetic
guugccagcggcauccua

SEQ ID NO: 15353 - RNA, 19 nt, Artificial Sequence
  Synthetic
gguugccagcggcauccua

SEQ ID NO: 15354 - RNA, 24 nt, Artificial Sequence
  Synthetic
guucuauuaaaguaguuccuccua

SEQ ID NO: 15355 - RNA, 20 nt, Artificial Sequence
  Synthetic
gcagcccagcucaucuccua

SEQ ID NO: 15356 - RNA, 18 nt, Artificial Sequence
  Synthetic
gcuccugaccaauuccua

SEQ ID NO: 15357 - RNA, 21 nt, Artificial Sequence
  Synthetic
guauaguuuugaccauuccua

SEQ ID NO: 15358 - RNA, 19 nt, Artificial Sequence
  Synthetic
gaacagguggggauuccua

SEQ ID NO: 15359 - RNA, 21 nt, Artificial Sequence
  Synthetic
gucuguguuucaaguuuccua

SEQ ID NO: 15360 - RNA, 23 nt, Artificial Sequence
  Synthetic
gacauauacaaaauaaaaagcua

SEQ ID NO: 15361 - RNA, 20 nt, Artificial Sequence
  Synthetic
gaagucacucacaaaagcua

SEQ ID NO: 15362 - RNA, 24 nt, Artificial Sequence
  Synthetic
gcuagaagucacucacaaaagcua

SEQ ID NO: 15363 - RNA, 18 nt, Artificial Sequence
  Synthetic
ggaauauuacagaagcua

SEQ ID NO: 15364 - RNA, 24 nt, Artificial Sequence
  Synthetic
gaaaauauuaagaauuugaagcua

SEQ ID NO: 15365 - RNA, 20 nt, Artificial Sequence
  Synthetic
guaccuacuguuuuaagcua

SEQ ID NO: 15366 - RNA, 23 nt, Artificial Sequence
  Synthetic
gaaguaccuacuguuuuaagcua

SEQ ID NO: 15367 - RNA, 19 nt, Artificial Sequence
  Synthetic
gagaguccugguacagcua

SEQ ID NO: 15368 - RNA, 21 nt, Artificial Sequence
  Synthetic
gcaaggaaaaaugaucagcua

SEQ ID NO: 15369 - RNA, 19 nt, Artificial Sequence
  Synthetic
gaaacaaggagcugagcua

SEQ ID NO: 15370 - RNA, 24 nt, Artificial Sequence
  Synthetic
guuuaaacccaagcucuguagcua

SEQ ID NO: 15371 - RNA, 22 nt, Artificial Sequence
  Synthetic
guaaucaugcagcuuaaggcua

SEQ ID NO: 15372 - RNA, 18 nt, Artificial Sequence
  Synthetic
guggcaggaucucggcua

SEQ ID NO: 15373 - RNA, 20 nt, Artificial Sequence
  Synthetic
gaguggcaggaucucggcua

SEQ ID NO: 15374 - RNA, 21 nt, Artificial Sequence
  Synthetic
ggaguggcaggaucucggcua

SEQ ID NO: 15375 - RNA, 23 nt, Artificial Sequence
  Synthetic
guggaguggcaggaucucggcua

SEQ ID NO: 15376 - RNA, 21 nt, Artificial Sequence
  Synthetic
ggggaaagggggggauggcua

SEQ ID NO: 15377 - RNA, 22 nt, Artificial Sequence
  Synthetic
gggggaaagggggggauggcua

SEQ ID NO: 15378 - RNA, 21 nt, Artificial Sequence
  Synthetic
gucaguuacuggguauggcua

SEQ ID NO: 15379 - RNA, 21 nt, Artificial Sequence
  Synthetic
gaacuuuggcagauuuggcua

SEQ ID NO: 15380 - RNA, 24 nt, Artificial Sequence
  Synthetic
gcugaacuuuggcagauuuggcua

SEQ ID NO: 15381 - RNA, 22 nt, Artificial Sequence
  Synthetic
gcacaucuucuuuacaaugcua

SEQ ID NO: 15382 - RNA, 21 nt, Artificial Sequence
  Synthetic
gcauacauaauuacuaugcua

SEQ ID NO: 15383 - RNA, 21 nt, Artificial Sequence
  Synthetic
gaaaaggaaggaauucugcua

SEQ ID NO: 15384 - RNA, 20 nt, Artificial Sequence
  Synthetic
gacaaguacggacugugcua

SEQ ID NO: 15385 - RNA, 23 nt, Artificial Sequence
  Synthetic
gcugacaaguacggacugugcua

SEQ ID NO: 15386 - RNA, 24 nt, Artificial Sequence
  Synthetic
guaaaaugauaauguauauugcua

SEQ ID NO: 15387 - RNA, 21 nt, Artificial Sequence
  Synthetic
guucuucaaaagagguugcua

SEQ ID NO: 15388 - RNA, 23 nt, Artificial Sequence
  Synthetic
gaguucuucaaaagagguugcua

SEQ ID NO: 15389 - RNA, 24 nt, Artificial Sequence
  Synthetic
ggaguucuucaaaagagguugcua

SEQ ID NO: 15390 - RNA, 18 nt, Artificial Sequence
  Synthetic
gugauacaacaaaaucua

SEQ ID NO: 15391 - RNA, 23 nt, Artificial Sequence
  Synthetic
guaaagugauacaacaaaaucua

SEQ ID NO: 15392 - RNA, 20 nt, Artificial Sequence
  Synthetic
gauguugaauaaucaaucua

SEQ ID NO: 15393 - RNA, 24 nt, Artificial Sequence
  Synthetic
gaaagauguugaauaaucaaucua

SEQ ID NO: 15394 - RNA, 24 nt, Artificial Sequence
  Synthetic
guucuauaggacagugcuaaucua

SEQ ID NO: 15395 - RNA, 21 nt, Artificial Sequence
  Synthetic
guaaagaaugcccaauaucua

SEQ ID NO: 15396 - RNA, 18 nt, Artificial Sequence
  Synthetic
gcaugcaauuaauaucua

SEQ ID NO: 15397 - RNA, 19 nt, Artificial Sequence
  Synthetic
ggcaugcaauuaauaucua

SEQ ID NO: 15398 - RNA, 22 nt, Artificial Sequence
  Synthetic
guuggcaugcaauuaauaucua

SEQ ID NO: 15399 - RNA, 23 nt, Artificial Sequence
  Synthetic
gguuggcaugcaauuaauaucua

SEQ ID NO: 15400 - RNA, 24 nt, Artificial Sequence
  Synthetic
gccucauuccaguacaaaacucua

SEQ ID NO: 15401 - RNA, 21 nt, Artificial Sequence
  Synthetic
gcuuucuuuucugucacucua

SEQ ID NO: 15402 - RNA, 18 nt, Artificial Sequence
  Synthetic
gagcuugcauucccucua

SEQ ID NO: 15403 - RNA, 21 nt, Artificial Sequence
  Synthetic
gcagagcuugcauucccucua

SEQ ID NO: 15404 - RNA, 22 nt, Artificial Sequence
  Synthetic
ggcagagcuugcauucccucua

SEQ ID NO: 15405 - RNA, 18 nt, Artificial Sequence
  Synthetic
ggccucagccuagcucua

SEQ ID NO: 15406 - RNA, 19 nt, Artificial Sequence
  Synthetic
gaugcucagauuagcucua

SEQ ID NO: 15407 - RNA, 20 nt, Artificial Sequence
  Synthetic
ggaugcucagauuagcucua

SEQ ID NO: 15408 - RNA, 21 nt, Artificial Sequence
  Synthetic
gggaugcucagauuagcucua

SEQ ID NO: 15409 - RNA, 19 nt, Artificial Sequence
  Synthetic
gaugacaaggcaggcucua

SEQ ID NO: 15410 - RNA, 21 nt, Artificial Sequence
  Synthetic
gagaugacaaggcaggcucua

SEQ ID NO: 15411 - RNA, 22 nt, Artificial Sequence
  Synthetic
ggagaugacaaggcaggcucua

SEQ ID NO: 15412 - RNA, 20 nt, Artificial Sequence
  Synthetic
gaaaaggugagcuuucucua

SEQ ID NO: 15413 - RNA, 23 nt, Artificial Sequence
  Synthetic
guugaaaaggugagcuuucucua

SEQ ID NO: 15414 - RNA, 19 nt, Artificial Sequence
  Synthetic
gucuagaugugaaagucua

SEQ ID NO: 15415 - RNA, 19 nt, Artificial Sequence
  Synthetic
gaauuccauucuaagucua

SEQ ID NO: 15416 - RNA, 24 nt, Artificial Sequence
  Synthetic
gcccagaauuccauucuaagucua

SEQ ID NO: 15417 - RNA, 18 nt, Artificial Sequence
  Synthetic
ggauuuugaaagugucua

SEQ ID NO: 15418 - RNA, 20 nt, Artificial Sequence
  Synthetic
gaggauuuugaaagugucua

SEQ ID NO: 15419 - RNA, 21 nt, Artificial Sequence
  Synthetic
ggaggauuuugaaagugucua

SEQ ID NO: 15420 - RNA, 19 nt, Artificial Sequence
  Synthetic
guggccaagacuuauucua

SEQ ID NO: 15421 - RNA, 20 nt, Artificial Sequence
  Synthetic
gguggccaagacuuauucua

SEQ ID NO: 15422 - RNA, 21 nt, Artificial Sequence
  Synthetic
gcaaguuucuuucaacuucua

SEQ ID NO: 15423 - RNA, 19 nt, Artificial Sequence
  Synthetic
gaaaugccugcuacuucua

SEQ ID NO: 15424 - RNA, 19 nt, Artificial Sequence
  Synthetic
gcacuauuuaugccuucua

SEQ ID NO: 15425 - RNA, 21 nt, Artificial Sequence
  Synthetic
gaaugucauguacaaguucua

SEQ ID NO: 15426 - RNA, 18 nt, Artificial Sequence
  Synthetic
gccgggaauucaguucua

SEQ ID NO: 15427 - RNA, 20 nt, Artificial Sequence
  Synthetic
guauuucaguaaauguucua

SEQ ID NO: 15428 - RNA, 24 nt, Artificial Sequence
  Synthetic
gaaauuggaaccuuuuaauuucua

SEQ ID NO: 15429 - RNA, 19 nt, Artificial Sequence
  Synthetic
gacagucaauauauuucua

SEQ ID NO: 15430 - RNA, 21 nt, Artificial Sequence
  Synthetic
gccugaggaucuauauuucua

SEQ ID NO: 15431 - RNA, 22 nt, Artificial Sequence
  Synthetic
ggccugaggaucuauauuucua

SEQ ID NO: 15432 - RNA, 24 nt, Artificial Sequence
  Synthetic
gaggccugaggaucuauauuucua

SEQ ID NO: 15433 - RNA, 18 nt, Artificial Sequence
  Synthetic
gaaucaaugcuauuucua

SEQ ID NO: 15434 - RNA, 19 nt, Artificial Sequence
  Synthetic
ggaaucaaugcuauuucua

SEQ ID NO: 15435 - RNA, 22 nt, Artificial Sequence
  Synthetic
gaaggaaucaaugcuauuucua

SEQ ID NO: 15436 - RNA, 23 nt, Artificial Sequence
  Synthetic
ggaaggaaucaaugcuauuucua

SEQ ID NO: 15437 - RNA, 19 nt, Artificial Sequence
  Synthetic
gacuccugcugauuuucua

SEQ ID NO: 15438 - RNA, 18 nt, Artificial Sequence
  Synthetic
gguaagcaguguuuucua

SEQ ID NO: 15439 - RNA, 20 nt, Artificial Sequence
  Synthetic
gagguaagcaguguuuucua

SEQ ID NO: 15440 - RNA, 23 nt, Artificial Sequence
  Synthetic
gauguucuucccauuuuuuucua

SEQ ID NO: 15441 - RNA, 24 nt, Artificial Sequence
  Synthetic
guuuauucaauaauuugaaaagua

SEQ ID NO: 15442 - RNA, 19 nt, Artificial Sequence
  Synthetic
guccaaccacuacaaagua

SEQ ID NO: 15443 - RNA, 21 nt, Artificial Sequence
  Synthetic
gaauuuacagcaacccaagua

SEQ ID NO: 15444 - RNA, 23 nt, Artificial Sequence
  Synthetic
gagaauuuacagcaacccaagua

SEQ ID NO: 15445 - RNA, 23 nt, Artificial Sequence
  Synthetic
gcucuaggcaagcaccugaagua

SEQ ID NO: 15446 - RNA, 24 nt, Artificial Sequence
  Synthetic
ggcucuaggcaagcaccugaagua

SEQ ID NO: 15447 - RNA, 18 nt, Artificial Sequence
  Synthetic
gauuaaaaagaguaagua

SEQ ID NO: 15448 - RNA, 22 nt, Artificial Sequence
  Synthetic
gaaagauuaaaaagaguaagua

SEQ ID NO: 15449 - RNA, 21 nt, Artificial Sequence
  Synthetic
gaauucaguggugaguaagua

SEQ ID NO: 15450 - RNA, 18 nt, Artificial Sequence
  Synthetic
gauugacaaccaacagua

SEQ ID NO: 15451 - RNA, 18 nt, Artificial Sequence
  Synthetic
gcauaacacaucacagua

SEQ ID NO: 15452 - RNA, 22 nt, Artificial Sequence
  Synthetic
guaugcauaacacaucacagua

SEQ ID NO: 15453 - RNA, 22 nt, Artificial Sequence
  Synthetic
guaaaugacuuuuuacccagua

SEQ ID NO: 15454 - RNA, 22 nt, Artificial Sequence
  Synthetic
gaaauagagaauagaggcagua

SEQ ID NO: 15455 - RNA, 18 nt, Artificial Sequence
  Synthetic
gcaguuaaauaugcagua

SEQ ID NO: 15456 - RNA, 19 nt, Artificial Sequence
  Synthetic
ggcaguuaaauaugcagua

SEQ ID NO: 15457 - RNA, 22 nt, Artificial Sequence
  Synthetic
guaggcaguuaaauaugcagua

SEQ ID NO: 15458 - RNA, 24 nt, Artificial Sequence
  Synthetic
gaguaggcaguuaaauaugcagua

SEQ ID NO: 15459 - RNA, 20 nt, Artificial Sequence
  Synthetic
gcuaaguauuuguugcagua

SEQ ID NO: 15460 - RNA, 21 nt, Artificial Sequence
  Synthetic
ggcuaaguauuuguugcagua

SEQ ID NO: 15461 - RNA, 20 nt, Artificial Sequence
  Synthetic
gaaucacuaccuuaucagua

SEQ ID NO: 15462 - RNA, 22 nt, Artificial Sequence
  Synthetic
gagaaucacuaccuuaucagua

SEQ ID NO: 15463 - RNA, 23 nt, Artificial Sequence
  Synthetic
ggagaaucacuaccuuaucagua

SEQ ID NO: 15464 - RNA, 24 nt, Artificial Sequence
  Synthetic
gggagaaucacuaccuuaucagua

SEQ ID NO: 15465 - RNA, 19 nt, Artificial Sequence
  Synthetic
gcugagucaauguagagua

SEQ ID NO: 15466 - RNA, 24 nt, Artificial Sequence
  Synthetic
guaaugcugagucaauguagagua

SEQ ID NO: 15467 - RNA, 20 nt, Artificial Sequence
  Synthetic
gaaauauaauguugggagua

SEQ ID NO: 15468 - RNA, 23 nt, Artificial Sequence
  Synthetic
guugaaauauaauguugggagua

SEQ ID NO: 15469 - RNA, 24 nt, Artificial Sequence
  Synthetic
gguugaaauauaauguugggagua

SEQ ID NO: 15470 - RNA, 20 nt, Artificial Sequence
  Synthetic
gcugagaauuugauggagua

SEQ ID NO: 15471 - RNA, 20 nt, Artificial Sequence
  Synthetic
gaucgaaaaguuuaugagua

SEQ ID NO: 15472 - RNA, 24 nt, Artificial Sequence
  Synthetic
gaaaaauacuacaaagccauagua

SEQ ID NO: 15473 - RNA, 19 nt, Artificial Sequence
  Synthetic
gccaagagaaaauauagua

SEQ ID NO: 15474 - RNA, 21 nt, Artificial Sequence
  Synthetic
gugccaagagaaaauauagua

SEQ ID NO: 15475 - RNA, 22 nt, Artificial Sequence
  Synthetic
ggugccaagagaaaauauagua

SEQ ID NO: 15476 - RNA, 19 nt, Artificial Sequence
  Synthetic
gagugucaucaauauagua

SEQ ID NO: 15477 - RNA, 20 nt, Artificial Sequence
  Synthetic
ggagugucaucaauauagua

SEQ ID NO: 15478 - RNA, 24 nt, Artificial Sequence
  Synthetic
gcaaggagugucaucaauauagua

SEQ ID NO: 15479 - RNA, 19 nt, Artificial Sequence
  Synthetic
guugggagaaucacuagua

SEQ ID NO: 15480 - RNA, 20 nt, Artificial Sequence
  Synthetic
gguugggagaaucacuagua

SEQ ID NO: 15481 - RNA, 18 nt, Artificial Sequence
  Synthetic
gagaugacacagcuagua

SEQ ID NO: 15482 - RNA, 20 nt, Artificial Sequence
  Synthetic
gagagaugacacagcuagua

SEQ ID NO: 15483 - RNA, 19 nt, Artificial Sequence
  Synthetic
gaccauuaacucucuagua

SEQ ID NO: 15484 - RNA, 20 nt, Artificial Sequence
  Synthetic
ggaccauuaacucucuagua

SEQ ID NO: 15485 - RNA, 24 nt, Artificial Sequence
  Synthetic
gauuuccuacuaaacaagguagua

SEQ ID NO: 15486 - RNA, 20 nt, Artificial Sequence
  Synthetic
gaauaauuacuaacuuagua

SEQ ID NO: 15487 - RNA, 19 nt, Artificial Sequence
  Synthetic
gcaacuuacagucaacgua

SEQ ID NO: 15488 - RNA, 18 nt, Artificial Sequence
  Synthetic
ggcauuaucaaucacgua

SEQ ID NO: 15489 - RNA, 23 nt, Artificial Sequence
  Synthetic
guauaggcauuaucaaucacgua

SEQ ID NO: 15490 - RNA, 22 nt, Artificial Sequence
  Synthetic
gauaacaaucagggaaaccgua

SEQ ID NO: 15491 - RNA, 23 nt, Artificial Sequence
  Synthetic
ggauaacaaucagggaaaccgua

SEQ ID NO: 15492 - RNA, 22 nt, Artificial Sequence
  Synthetic
guacacacacacaaauugcgua

SEQ ID NO: 15493 - RNA, 23 nt, Artificial Sequence
  Synthetic
gcuccucauguucuacauucgua

SEQ ID NO: 15494 - RNA, 24 nt, Artificial Sequence
  Synthetic
ggcuccucauguucuacauucgua

SEQ ID NO: 15495 - RNA, 19 nt, Artificial Sequence
  Synthetic
guucccaggaauuuucgua

SEQ ID NO: 15496 - RNA, 20 nt, Artificial Sequence
  Synthetic
gacaacugcacaugaaggua

SEQ ID NO: 15497 - RNA, 22 nt, Artificial Sequence
  Synthetic
gagacaacugcacaugaaggua

SEQ ID NO: 15498 - RNA, 24 nt, Artificial Sequence
  Synthetic
gucaccagaaccaaaaaccaggua

SEQ ID NO: 15499 - RNA, 24 nt, Artificial Sequence
  Synthetic
gcucuccccuaauuucacgaggua

SEQ ID NO: 15500 - RNA, 24 nt, Artificial Sequence
  Synthetic
gcuacaaaggguaguguggaggua

SEQ ID NO: 15501 - RNA, 20 nt, Artificial Sequence
  Synthetic
gcauaacccauuaugaggua

SEQ ID NO: 15502 - RNA, 23 nt, Artificial Sequence
  Synthetic
gaagcauaacccauuaugaggua

SEQ ID NO: 15503 - RNA, 24 nt, Artificial Sequence
  Synthetic
ggaagcauaacccauuaugaggua

SEQ ID NO: 15504 - RNA, 18 nt, Artificial Sequence
  Synthetic
gagcuugggagugaggua

SEQ ID NO: 15505 - RNA, 19 nt, Artificial Sequence
  Synthetic
ggagcuugggagugaggua

SEQ ID NO: 15506 - RNA, 20 nt, Artificial Sequence
  Synthetic
gggagcuugggagugaggua

SEQ ID NO: 15507 - RNA, 21 nt, Artificial Sequence
  Synthetic
ggggagcuugggagugaggua

SEQ ID NO: 15508 - RNA, 23 nt, Artificial Sequence
  Synthetic
guggggagcuugggagugaggua

SEQ ID NO: 15509 - RNA, 23 nt, Artificial Sequence
  Synthetic
gacauuggaggcaucuugaggua

SEQ ID NO: 15510 - RNA, 19 nt, Artificial Sequence
  Synthetic
guuucuugcaccaggggua

SEQ ID NO: 15511 - RNA, 23 nt, Artificial Sequence
  Synthetic
gaaaguuucuugcaccaggggua

SEQ ID NO: 15512 - RNA, 24 nt, Artificial Sequence
  Synthetic
ggaaaguuucuugcaccaggggua

SEQ ID NO: 15513 - RNA, 18 nt, Artificial Sequence
  Synthetic
gacaucaugguaauggua

SEQ ID NO: 15514 - RNA, 19 nt, Artificial Sequence
  Synthetic
ggacaucaugguaauggua

SEQ ID NO: 15515 - RNA, 24 nt, Artificial Sequence
  Synthetic
guuuuggacaucaugguaauggua

SEQ ID NO: 15516 - RNA, 20 nt, Artificial Sequence
  Synthetic
gaauuuuccuuaccauggua

SEQ ID NO: 15517 - RNA, 22 nt, Artificial Sequence
  Synthetic
gcgaauuuuccuuaccauggua

SEQ ID NO: 15518 - RNA, 19 nt, Artificial Sequence
  Synthetic
gaaaauguuggaauuggua

SEQ ID NO: 15519 - RNA, 19 nt, Artificial Sequence
  Synthetic
gaucgauuaaguauuggua

SEQ ID NO: 15520 - RNA, 20 nt, Artificial Sequence
  Synthetic
gcuaucuaacuauguuggua

SEQ ID NO: 15521 - RNA, 21 nt, Artificial Sequence
  Synthetic
ggcuaucuaacuauguuggua

SEQ ID NO: 15522 - RNA, 22 nt, Artificial Sequence
  Synthetic
gggcuaucuaacuauguuggua

SEQ ID NO: 15523 - RNA, 23 nt, Artificial Sequence
  Synthetic
gaaguuuuauuccauuguuggua

SEQ ID NO: 15524 - RNA, 24 nt, Artificial Sequence
  Synthetic
ggaaguuuuauuccauuguuggua

SEQ ID NO: 15525 - RNA, 21 nt, Artificial Sequence
  Synthetic
guuauuugggaaagaaaugua

SEQ ID NO: 15526 - RNA, 21 nt, Artificial Sequence
  Synthetic
guuauuaguccaagaaaugua

SEQ ID NO: 15527 - RNA, 23 nt, Artificial Sequence
  Synthetic
guguuauuaguccaagaaaugua

SEQ ID NO: 15528 - RNA, 23 nt, Artificial Sequence
  Synthetic
guuuuaaaauaucauuaaaugua

SEQ ID NO: 15529 - RNA, 20 nt, Artificial Sequence
  Synthetic
gucuuacauggcuucaugua

SEQ ID NO: 15530 - RNA, 24 nt, Artificial Sequence
  Synthetic
gcacaauguccgagccaagaugua

SEQ ID NO: 15531 - RNA, 21 nt, Artificial Sequence
  Synthetic
gacuggacacagagugaugua

SEQ ID NO: 15532 - RNA, 22 nt, Artificial Sequence
  Synthetic
gcucuguuaacauaaauaugua

SEQ ID NO: 15533 - RNA, 18 nt, Artificial Sequence
  Synthetic
ggcauuuauacaacugua

SEQ ID NO: 15534 - RNA, 19 nt, Artificial Sequence
  Synthetic
gggcauuuauacaacugua

SEQ ID NO: 15535 - RNA, 19 nt, Artificial Sequence
  Synthetic
gcugaaagagugaacugua

SEQ ID NO: 15536 - RNA, 20 nt, Artificial Sequence
  Synthetic
ggcugaaagagugaacugua

SEQ ID NO: 15537 - RNA, 22 nt, Artificial Sequence
  Synthetic
gucacaagaccuucacccugua

SEQ ID NO: 15538 - RNA, 24 nt, Artificial Sequence
  Synthetic
gagucacaagaccuucacccugua

SEQ ID NO: 15539 - RNA, 20 nt, Artificial Sequence
  Synthetic
guuacauaauugaagcugua

SEQ ID NO: 15540 - RNA, 20 nt, Artificial Sequence
  Synthetic
gcaccaaccuaacagcugua

SEQ ID NO: 15541 - RNA, 18 nt, Artificial Sequence
  Synthetic
guuuaccccuuaucugua

SEQ ID NO: 15542 - RNA, 19 nt, Artificial Sequence
  Synthetic
gguuuaccccuuaucugua

SEQ ID NO: 15543 - RNA, 21 nt, Artificial Sequence
  Synthetic
gugguuuaccccuuaucugua

SEQ ID NO: 15544 - RNA, 19 nt, Artificial Sequence
  Synthetic
gaggagccaguccucugua

SEQ ID NO: 15545 - RNA, 20 nt, Artificial Sequence
  Synthetic
ggaggagccaguccucugua

SEQ ID NO: 15546 - RNA, 23 nt, Artificial Sequence
  Synthetic
gaauaugccagugccucucugua

SEQ ID NO: 15547 - RNA, 22 nt, Artificial Sequence
  Synthetic
gcucaaggguuccuucucugua

SEQ ID NO: 15548 - RNA, 18 nt, Artificial Sequence
  Synthetic
gaaaacauaaaaagugua

SEQ ID NO: 15549 - RNA, 22 nt, Artificial Sequence
  Synthetic
gcaugaaaacauaaaaagugua

SEQ ID NO: 15550 - RNA, 23 nt, Artificial Sequence
  Synthetic
ggcaugaaaacauaaaaagugua

SEQ ID NO: 15551 - RNA, 24 nt, Artificial Sequence
  Synthetic
gggcaugaaaacauaaaaagugua

SEQ ID NO: 15552 - RNA, 18 nt, Artificial Sequence
  Synthetic
gcaguuauguaaagugua

SEQ ID NO: 15553 - RNA, 22 nt, Artificial Sequence
  Synthetic
gauauuugguggguuaagugua

SEQ ID NO: 15554 - RNA, 22 nt, Artificial Sequence
  Synthetic
guuuuguauuguccucagugua

SEQ ID NO: 15555 - RNA, 23 nt, Artificial Sequence
  Synthetic
gguuuuguauuguccucagugua

SEQ ID NO: 15556 - RNA, 19 nt, Artificial Sequence
  Synthetic
guuuaaaauuaagagugua

SEQ ID NO: 15557 - RNA, 20 nt, Artificial Sequence
  Synthetic
gguuuaaaauuaagagugua

SEQ ID NO: 15558 - RNA, 21 nt, Artificial Sequence
  Synthetic
ggguuuaaaauuaagagugua

SEQ ID NO: 15559 - RNA, 22 nt, Artificial Sequence
  Synthetic
gauggaggaaccuggaugugua

SEQ ID NO: 15560 - RNA, 23 nt, Artificial Sequence
  Synthetic
ggauggaggaaccuggaugugua

SEQ ID NO: 15561 - RNA, 24 nt, Artificial Sequence
  Synthetic
gggauggaggaaccuggaugugua

SEQ ID NO: 15562 - RNA, 20 nt, Artificial Sequence
  Synthetic
gcuuaguuuauuuuugugua

SEQ ID NO: 15563 - RNA, 20 nt, Artificial Sequence
  Synthetic
gcuuugcuaagcaucuugua

SEQ ID NO: 15564 - RNA, 21 nt, Artificial Sequence
  Synthetic
ggcuuugcuaagcaucuugua

SEQ ID NO: 15565 - RNA, 22 nt, Artificial Sequence
  Synthetic
guuccaucuggggacauuugua

SEQ ID NO: 15566 - RNA, 24 nt, Artificial Sequence
  Synthetic
gaguuccaucuggggacauuugua

SEQ ID NO: 15567 - RNA, 19 nt, Artificial Sequence
  Synthetic
gaucuaaaucucauuugua

SEQ ID NO: 15568 - RNA, 23 nt, Artificial Sequence
  Synthetic
guuagaucuaaaucucauuugua

SEQ ID NO: 15569 - RNA, 19 nt, Artificial Sequence
  Synthetic
gcaacuugauuaguuugua

SEQ ID NO: 15570 - RNA, 22 nt, Artificial Sequence
  Synthetic
gcugaagacauuuuaaaaauua

SEQ ID NO: 15571 - RNA, 21 nt, Artificial Sequence
  Synthetic
gaauggggauuaaggaaauua

SEQ ID NO: 15572 - RNA, 23 nt, Artificial Sequence
  Synthetic
gaacucuuuauucuaauaaauua

SEQ ID NO: 15573 - RNA, 20 nt, Artificial Sequence
  Synthetic
guaugucuuuuaauaaauua

SEQ ID NO: 15574 - RNA, 24 nt, Artificial Sequence
  Synthetic
guuucauucaauuacaaacaauua

SEQ ID NO: 15575 - RNA, 18 nt, Artificial Sequence
  Synthetic
gauaauuuugcacaauua

SEQ ID NO: 15576 - RNA, 23 nt, Artificial Sequence
  Synthetic
gaccagauaauuuugcacaauua

SEQ ID NO: 15577 - RNA, 18 nt, Artificial Sequence
  Synthetic
ggaugggugugacaauua

SEQ ID NO: 15578 - RNA, 22 nt, Artificial Sequence
  Synthetic
gauuggaugggugugacaauua

SEQ ID NO: 15579 - RNA, 24 nt, Artificial Sequence
  Synthetic
gagauuggaugggugugacaauua

SEQ ID NO: 15580 - RNA, 22 nt, Artificial Sequence
  Synthetic
gccacauuugcuaauacaauua

SEQ ID NO: 15581 - RNA, 20 nt, Artificial Sequence
  Synthetic
gaauguguaacugucaauua

SEQ ID NO: 15582 - RNA, 22 nt, Artificial Sequence
  Synthetic
guuucaaucauaucaugaauua

SEQ ID NO: 15583 - RNA, 23 nt, Artificial Sequence
  Synthetic
gguuucaaucauaucaugaauua

SEQ ID NO: 15584 - RNA, 21 nt, Artificial Sequence
  Synthetic
guuuuuaguucugccuaauua

SEQ ID NO: 15585 - RNA, 24 nt, Artificial Sequence
  Synthetic
gauguuuuuaguucugccuaauua

SEQ ID NO: 15586 - RNA, 18 nt, Artificial Sequence
  Synthetic
guuaccaccaaguaauua

SEQ ID NO: 15587 - RNA, 18 nt, Artificial Sequence
  Synthetic
guguuauuccaaccauua

SEQ ID NO: 15588 - RNA, 18 nt, Artificial Sequence
  Synthetic
guaauguuguaagcauua

SEQ ID NO: 15589 - RNA, 21 nt, Artificial Sequence
  Synthetic
gacuauauacgcauagcauua

SEQ ID NO: 15590 - RNA, 22 nt, Artificial Sequence
  Synthetic
gccuuaaaugcaauguucauua

SEQ ID NO: 15591 - RNA, 21 nt, Artificial Sequence
  Synthetic
gauauuuuaggagaaagauua

SEQ ID NO: 15592 - RNA, 22 nt, Artificial Sequence
  Synthetic
gaaaaguacaaagacaagauua

SEQ ID NO: 15593 - RNA, 23 nt, Artificial Sequence
  Synthetic
gauuauauaccccaaaaggauua

SEQ ID NO: 15594 - RNA, 24 nt, Artificial Sequence
  Synthetic
ggauuauauaccccaaaaggauua

SEQ ID NO: 15595 - RNA, 18 nt, Artificial Sequence
  Synthetic
gaccugcuauugggauua

SEQ ID NO: 15596 - RNA, 21 nt, Artificial Sequence
  Synthetic
gaaaggauggcauuuggauua

SEQ ID NO: 15597 - RNA, 22 nt, Artificial Sequence
  Synthetic
gaucaauaaacagccaugauua

SEQ ID NO: 15598 - RNA, 20 nt, Artificial Sequence
  Synthetic
gucacgcaucuuuaugauua

SEQ ID NO: 15599 - RNA, 18 nt, Artificial Sequence
  Synthetic
ggcagcaauuggugauua

SEQ ID NO: 15600 - RNA, 18 nt, Artificial Sequence
  Synthetic
gucccuugccugugauua

SEQ ID NO: 15601 - RNA, 18 nt, Artificial Sequence
  Synthetic
guacaauguuauugauua

SEQ ID NO: 15602 - RNA, 20 nt, Artificial Sequence
  Synthetic
gaccucaugcaaaaauauua

SEQ ID NO: 15603 - RNA, 24 nt, Artificial Sequence
  Synthetic
gaccgaccucaugcaaaaauauua

SEQ ID NO: 15604 - RNA, 23 nt, Artificial Sequence
  Synthetic
guaacuauucaaacaaaauauua

SEQ ID NO: 15605 - RNA, 21 nt, Artificial Sequence
  Synthetic
guuauuuaucaugaaauauua

SEQ ID NO: 15606 - RNA, 18 nt, Artificial Sequence
  Synthetic
gaacaacccagaauauua

SEQ ID NO: 15607 - RNA, 21 nt, Artificial Sequence
  Synthetic
gcaaacaggauuggcauauua

SEQ ID NO: 15608 - RNA, 24 nt, Artificial Sequence
  Synthetic
gcauauauaugcaaugggauauua

SEQ ID NO: 15609 - RNA, 19 nt, Artificial Sequence
  Synthetic
gugggcacccaauauauua

SEQ ID NO: 15610 - RNA, 18 nt, Artificial Sequence
  Synthetic
guaucugcuuauauauua

SEQ ID NO: 15611 - RNA, 23 nt, Artificial Sequence
  Synthetic
gaaaaguaucugcuuauauauua

SEQ ID NO: 15612 - RNA, 18 nt, Artificial Sequence
  Synthetic
gaaaaaaagaaccuauua

SEQ ID NO: 15613 - RNA, 19 nt, Artificial Sequence
  Synthetic
ggaaaaaaagaaccuauua

SEQ ID NO: 15614 - RNA, 24 nt, Artificial Sequence
  Synthetic
gcacuaaauaaaugguagcuauua

SEQ ID NO: 15615 - RNA, 19 nt, Artificial Sequence
  Synthetic
gugaguggaauugcuauua

SEQ ID NO: 15616 - RNA, 20 nt, Artificial Sequence
  Synthetic
ggugaguggaauugcuauua

SEQ ID NO: 15617 - RNA, 23 nt, Artificial Sequence
  Synthetic
guaggugaguggaauugcuauua

SEQ ID NO: 15618 - RNA, 24 nt, Artificial Sequence
  Synthetic
gguaggugaguggaauugcuauua

SEQ ID NO: 15619 - RNA, 19 nt, Artificial Sequence
  Synthetic
guagagaagcauucuauua

SEQ ID NO: 15620 - RNA, 20 nt, Artificial Sequence
  Synthetic
gguagagaagcauucuauua

SEQ ID NO: 15621 - RNA, 22 nt, Artificial Sequence
  Synthetic
gugguagagaagcauucuauua

SEQ ID NO: 15622 - RNA, 21 nt, Artificial Sequence
  Synthetic
gaauaugcaggccuucuauua

SEQ ID NO: 15623 - RNA, 23 nt, Artificial Sequence
  Synthetic
gagaauaugcaggccuucuauua

SEQ ID NO: 15624 - RNA, 24 nt, Artificial Sequence
  Synthetic
gaccuuaaaguugcuacaguauua

SEQ ID NO: 15625 - RNA, 18 nt, Artificial Sequence
  Synthetic
gggagacgguagguauua

SEQ ID NO: 15626 - RNA, 20 nt, Artificial Sequence
  Synthetic
gagggagacgguagguauua

SEQ ID NO: 15627 - RNA, 21 nt, Artificial Sequence
  Synthetic
ggagggagacgguagguauua

SEQ ID NO: 15628 - RNA, 20 nt, Artificial Sequence
  Synthetic
guugagauuuauauguauua

SEQ ID NO: 15629 - RNA, 18 nt, Artificial Sequence
  Synthetic
ggugcugacucauuauua

SEQ ID NO: 15630 - RNA, 21 nt, Artificial Sequence
  Synthetic
gcuuucauuuaaguauuauua

SEQ ID NO: 15631 - RNA, 23 nt, Artificial Sequence
  Synthetic
guaucaaagcuuauuauuuauua

SEQ ID NO: 15632 - RNA, 23 nt, Artificial Sequence
  Synthetic
gucauuguccccuucuuuuauua

SEQ ID NO: 15633 - RNA, 21 nt, Artificial Sequence
  Synthetic
gacaugaugaauaaaaacuua

SEQ ID NO: 15634 - RNA, 20 nt, Artificial Sequence
  Synthetic
gaaguuaacaauaaaacuua

SEQ ID NO: 15635 - RNA, 24 nt, Artificial Sequence
  Synthetic
gaaagaaguuaacaauaaaacuua

SEQ ID NO: 15636 - RNA, 22 nt, Artificial Sequence
  Synthetic
gcaaaaccagacaggaaacuua

SEQ ID NO: 15637 - RNA, 23 nt, Artificial Sequence
  Synthetic
gcuauuauaccacacggaacuua

SEQ ID NO: 15638 - RNA, 22 nt, Artificial Sequence
  Synthetic
guacaagguacagaugaacuua

SEQ ID NO: 15639 - RNA, 23 nt, Artificial Sequence
  Synthetic
gguacaagguacagaugaacuua

SEQ ID NO: 15640 - RNA, 20 nt, Artificial Sequence
  Synthetic
gcaacaugaacuguaacuua

SEQ ID NO: 15641 - RNA, 19 nt, Artificial Sequence
  Synthetic
gauuagguggguuaacuua

SEQ ID NO: 15642 - RNA, 23 nt, Artificial Sequence
  Synthetic
gcuaucuaucuuacaaacacuua

SEQ ID NO: 15643 - RNA, 18 nt, Artificial Sequence
  Synthetic
gacuuuugcuaacacuua

SEQ ID NO: 15644 - RNA, 20 nt, Artificial Sequence
  Synthetic
gugacuuuugcuaacacuua

SEQ ID NO: 15645 - RNA, 24 nt, Artificial Sequence
  Synthetic
gauagugacuuuugcuaacacuua

SEQ ID NO: 15646 - RNA, 21 nt, Artificial Sequence
  Synthetic
gcuacaccauguaaccacuua

SEQ ID NO: 15647 - RNA, 23 nt, Artificial Sequence
  Synthetic
gagcuacaccauguaaccacuua

SEQ ID NO: 15648 - RNA, 23 nt, Artificial Sequence
  Synthetic
gauuuuuccuagucucccacuua

SEQ ID NO: 15649 - RNA, 23 nt, Artificial Sequence
  Synthetic
gcuuucacgauagacuccacuua

SEQ ID NO: 15650 - RNA, 23 nt, Artificial Sequence
  Synthetic
gcaaaaauauuaaagaauacuua

SEQ ID NO: 15651 - RNA, 20 nt, Artificial Sequence
  Synthetic
gcuuacaccagugcuacuua

SEQ ID NO: 15652 - RNA, 21 nt, Artificial Sequence
  Synthetic
ggcuuacaccagugcuacuua

SEQ ID NO: 15653 - RNA, 23 nt, Artificial Sequence
  Synthetic
guggcuuacaccagugcuacuua

SEQ ID NO: 15654 - RNA, 23 nt, Artificial Sequence
  Synthetic
gauccuugcuuuaauuguacuua

SEQ ID NO: 15655 - RNA, 18 nt, Artificial Sequence
  Synthetic
gaguuaagaaguuacuua

SEQ ID NO: 15656 - RNA, 24 nt, Artificial Sequence
  Synthetic
gccaaugaguuaagaaguuacuua

SEQ ID NO: 15657 - RNA, 23 nt, Artificial Sequence
  Synthetic
gcucauuggcaauaauuuacuua

SEQ ID NO: 15658 - RNA, 19 nt, Artificial Sequence
  Synthetic
gaaaaucuaguuuuacuua

SEQ ID NO: 15659 - RNA, 20 nt, Artificial Sequence
  Synthetic
ggaaaaucuaguuuuacuua

SEQ ID NO: 15660 - RNA, 19 nt, Artificial Sequence
  Synthetic
gaaaccucaacgguccuua

SEQ ID NO: 15661 - RNA, 20 nt, Artificial Sequence
  Synthetic
gaaccaugaagccuuccuua

SEQ ID NO: 15662 - RNA, 22 nt, Artificial Sequence
  Synthetic
gagaaccaugaagccuuccuua

SEQ ID NO: 15663 - RNA, 23 nt, Artificial Sequence
  Synthetic
gacacucauuaaguauaagcuua

SEQ ID NO: 15664 - RNA, 18 nt, Artificial Sequence
  Synthetic
guccuaaaccagggcuua

SEQ ID NO: 15665 - RNA, 21 nt, Artificial Sequence
  Synthetic
gaaacacucacuaauggcuua

SEQ ID NO: 15666 - RNA, 22 nt, Artificial Sequence
  Synthetic
ggaaacacucacuaauggcuua

SEQ ID NO: 15667 - RNA, 23 nt, Artificial Sequence
  Synthetic
gggaaacacucacuaauggcuua

SEQ ID NO: 15668 - RNA, 22 nt, Artificial Sequence
  Synthetic
gcacaguauguugccuggcuua

SEQ ID NO: 15669 - RNA, 24 nt, Artificial Sequence
  Synthetic
gugcacaguauguugccuggcuua

SEQ ID NO: 15670 - RNA, 23 nt, Artificial Sequence
  Synthetic
gccuuaucgaugaagguaucuua

SEQ ID NO: 15671 - RNA, 24 nt, Artificial Sequence
  Synthetic
gccuaaauuuaccacuuuaucuua

SEQ ID NO: 15672 - RNA, 18 nt, Artificial Sequence
  Synthetic
guugguauuuggcucuua

SEQ ID NO: 15673 - RNA, 21 nt, Artificial Sequence
  Synthetic
guaguugguauuuggcucuua

SEQ ID NO: 15674 - RNA, 19 nt, Artificial Sequence
  Synthetic
gcucugaggguuucucuua

SEQ ID NO: 15675 - RNA, 19 nt, Artificial Sequence
  Synthetic
gcaguuaagaugagucuua

SEQ ID NO: 15676 - RNA, 18 nt, Artificial Sequence
  Synthetic
guuguaguaacugucuua

SEQ ID NO: 15677 - RNA, 20 nt, Artificial Sequence
  Synthetic
gaguuguaguaacugucuua

SEQ ID NO: 15678 - RNA, 20 nt, Artificial Sequence
  Synthetic
guaaaauucagaaauucuua

SEQ ID NO: 15679 - RNA, 19 nt, Artificial Sequence
  Synthetic
gacuuugaauucauucuua

SEQ ID NO: 15680 - RNA, 24 nt, Artificial Sequence
  Synthetic
gcaaugacuuugaauucauucuua

SEQ ID NO: 15681 - RNA, 18 nt, Artificial Sequence
  Synthetic
gucuuuuucagauucuua

SEQ ID NO: 15682 - RNA, 20 nt, Artificial Sequence
  Synthetic
gagucuuuuucagauucuua

SEQ ID NO: 15683 - RNA, 18 nt, Artificial Sequence
  Synthetic
gguugaaguggguucuua

SEQ ID NO: 15684 - RNA, 20 nt, Artificial Sequence
  Synthetic
gugguugaaguggguucuua

SEQ ID NO: 15685 - RNA, 23 nt, Artificial Sequence
  Synthetic
gcagugguugaaguggguucuua

SEQ ID NO: 15686 - RNA, 24 nt, Artificial Sequence
  Synthetic
ggcagugguugaaguggguucuua

SEQ ID NO: 15687 - RNA, 18 nt, Artificial Sequence
  Synthetic
gagauggacgauuucuua

SEQ ID NO: 15688 - RNA, 18 nt, Artificial Sequence
  Synthetic
ggagaugguaguuucuua

SEQ ID NO: 15689 - RNA, 21 nt, Artificial Sequence
  Synthetic
gcauuacaauuucuuuucuua

SEQ ID NO: 15690 - RNA, 22 nt, Artificial Sequence
  Synthetic
ggcauuacaauuucuuuucuua

SEQ ID NO: 15691 - RNA, 19 nt, Artificial Sequence
  Synthetic
guguagcuaguuuuucuua

SEQ ID NO: 15692 - RNA, 24 nt, Artificial Sequence
  Synthetic
guuuuguguagcuaguuuuucuua

SEQ ID NO: 15693 - RNA, 22 nt, Artificial Sequence
  Synthetic
gcuuuugcuuucaauaaaguua

SEQ ID NO: 15694 - RNA, 18 nt, Artificial Sequence
  Synthetic
gcuuggaauaccaaguua

SEQ ID NO: 15695 - RNA, 21 nt, Artificial Sequence
  Synthetic
gcugcuuggaauaccaaguua

SEQ ID NO: 15696 - RNA, 22 nt, Artificial Sequence
  Synthetic
gaaccugaucuuuaagaaguua

SEQ ID NO: 15697 - RNA, 20 nt, Artificial Sequence
  Synthetic
gacacuccugagggaaguua

SEQ ID NO: 15698 - RNA, 22 nt, Artificial Sequence
  Synthetic
guauuauaauuggauuaaguua

SEQ ID NO: 15699 - RNA, 22 nt, Artificial Sequence
  Synthetic
gcaaauguuucaaagucaguua

SEQ ID NO: 15700 - RNA, 23 nt, Artificial Sequence
  Synthetic
ggcaaauguuucaaagucaguua

SEQ ID NO: 15701 - RNA, 24 nt, Artificial Sequence
  Synthetic
gggcaaauguuucaaagucaguua

SEQ ID NO: 15702 - RNA, 18 nt, Artificial Sequence
  Synthetic
gguaugcugcuucaguua

SEQ ID NO: 15703 - RNA, 20 nt, Artificial Sequence
  Synthetic
gagguaugcugcuucaguua

SEQ ID NO: 15704 - RNA, 22 nt, Artificial Sequence
  Synthetic
gagagguaugcugcuucaguua

SEQ ID NO: 15705 - RNA, 23 nt, Artificial Sequence
  Synthetic
gaaaacaaguagaugaggaguua

SEQ ID NO: 15706 - RNA, 21 nt, Artificial Sequence
  Synthetic
gauagucuuacuuaggaguua

SEQ ID NO: 15707 - RNA, 24 nt, Artificial Sequence
  Synthetic
gaacauaaucucuucauggaguua

SEQ ID NO: 15708 - RNA, 18 nt, Artificial Sequence
  Synthetic
gcccacaguuaugaguua

SEQ ID NO: 15709 - RNA, 19 nt, Artificial Sequence
  Synthetic
ggcccacaguuaugaguua

SEQ ID NO: 15710 - RNA, 21 nt, Artificial Sequence
  Synthetic
guggcccacaguuaugaguua

SEQ ID NO: 15711 - RNA, 19 nt, Artificial Sequence
  Synthetic
gagugucacugcugaguua

SEQ ID NO: 15712 - RNA, 22 nt, Artificial Sequence
  Synthetic
gcugagugucacugcugaguua

SEQ ID NO: 15713 - RNA, 21 nt, Artificial Sequence
  Synthetic
ggggugguguagguauaguua

SEQ ID NO: 15714 - RNA, 22 nt, Artificial Sequence
  Synthetic
gggggugguguagguauaguua

SEQ ID NO: 15715 - RNA, 24 nt, Artificial Sequence
  Synthetic
gugggggugguguagguauaguua

SEQ ID NO: 15716 - RNA, 24 nt, Artificial Sequence
  Synthetic
gucccacgugacccauauucguua

SEQ ID NO: 15717 - RNA, 18 nt, Artificial Sequence
  Synthetic
ggggcagcgggaugguua

SEQ ID NO: 15718 - RNA, 19 nt, Artificial Sequence
  Synthetic
gggggcagcgggaugguua

SEQ ID NO: 15719 - RNA, 21 nt, Artificial Sequence
  Synthetic
gagggggcagcgggaugguua

SEQ ID NO: 15720 - RNA, 22 nt, Artificial Sequence
  Synthetic
ggagggggcagcgggaugguua

SEQ ID NO: 15721 - RNA, 23 nt, Artificial Sequence
  Synthetic
gggagggggcagcgggaugguua

SEQ ID NO: 15722 - RNA, 24 nt, Artificial Sequence
  Synthetic
ggggagggggcagcgggaugguua

SEQ ID NO: 15723 - RNA, 24 nt, Artificial Sequence
  Synthetic
guuuuuuuucugagaaugugguua

SEQ ID NO: 15724 - RNA, 23 nt, Artificial Sequence
  Synthetic
guucuucugcuggccugugguua

SEQ ID NO: 15725 - RNA, 19 nt, Artificial Sequence
  Synthetic
gagcuauagaauaauguua

SEQ ID NO: 15726 - RNA, 22 nt, Artificial Sequence
  Synthetic
gcugagcuauagaauaauguua

SEQ ID NO: 15727 - RNA, 24 nt, Artificial Sequence
  Synthetic
gagcugagcuauagaauaauguua

SEQ ID NO: 15728 - RNA, 20 nt, Artificial Sequence
  Synthetic
gaucacuguugcauauguua

SEQ ID NO: 15729 - RNA, 22 nt, Artificial Sequence
  Synthetic
gugaucacuguugcauauguua

SEQ ID NO: 15730 - RNA, 24 nt, Artificial Sequence
  Synthetic
gugugaucacuguugcauauguua

SEQ ID NO: 15731 - RNA, 21 nt, Artificial Sequence
  Synthetic
guucuuaaucuagguauguua

SEQ ID NO: 15732 - RNA, 22 nt, Artificial Sequence
  Synthetic
gccuuaggaaccuguuauguua

SEQ ID NO: 15733 - RNA, 19 nt, Artificial Sequence
  Synthetic
gcugacauaugcacuguua

SEQ ID NO: 15734 - RNA, 24 nt, Artificial Sequence
  Synthetic
gcuuugcugacauaugcacuguua

SEQ ID NO: 15735 - RNA, 20 nt, Artificial Sequence
  Synthetic
gucuuaaaaaccuccuguua

SEQ ID NO: 15736 - RNA, 21 nt, Artificial Sequence
  Synthetic
ggucuuaaaaaccuccuguua

SEQ ID NO: 15737 - RNA, 18 nt, Artificial Sequence
  Synthetic
gguucuuuauauguguua

SEQ ID NO: 15738 - RNA, 24 nt, Artificial Sequence
  Synthetic
gcuaaagguucuuuauauguguua

SEQ ID NO: 15739 - RNA, 21 nt, Artificial Sequence
  Synthetic
guaauaagaaaaacauuguua

SEQ ID NO: 15740 - RNA, 18 nt, Artificial Sequence
  Synthetic
guuauacagcuguuguua

SEQ ID NO: 15741 - RNA, 23 nt, Artificial Sequence
  Synthetic
gccagaaaagaaaagauuuguua

SEQ ID NO: 15742 - RNA, 19 nt, Artificial Sequence
  Synthetic
gacccccaagauuuuguua

SEQ ID NO: 15743 - RNA, 23 nt, Artificial Sequence
  Synthetic
gaaugacccccaagauuuuguua

SEQ ID NO: 15744 - RNA, 19 nt, Artificial Sequence
  Synthetic
guccacugagcaaaauuua

SEQ ID NO: 15745 - RNA, 20 nt, Artificial Sequence
  Synthetic
gguccacugagcaaaauuua

SEQ ID NO: 15746 - RNA, 18 nt, Artificial Sequence
  Synthetic
gcagagguacacaauuua

SEQ ID NO: 15747 - RNA, 19 nt, Artificial Sequence
  Synthetic
gcauccauuugacaauuua

SEQ ID NO: 15748 - RNA, 18 nt, Artificial Sequence
  Synthetic
gggucaauuuggaauuua

SEQ ID NO: 15749 - RNA, 21 nt, Artificial Sequence
  Synthetic
guccacauagaauauaauuua

SEQ ID NO: 15750 - RNA, 23 nt, Artificial Sequence
  Synthetic
guuauaauaggggcuuacauuua

SEQ ID NO: 15751 - RNA, 18 nt, Artificial Sequence
  Synthetic
gagugcuggcaccauuua

SEQ ID NO: 15752 - RNA, 23 nt, Artificial Sequence
  Synthetic
gcaaagagugcuggcaccauuua

SEQ ID NO: 15753 - RNA, 21 nt, Artificial Sequence
  Synthetic
guucuauuccauuuccauuua

SEQ ID NO: 15754 - RNA, 19 nt, Artificial Sequence
  Synthetic
gaauaaugauuagcauuua

SEQ ID NO: 15755 - RNA, 20 nt, Artificial Sequence
  Synthetic
ggaauaaugauuagcauuua

SEQ ID NO: 15756 - RNA, 21 nt, Artificial Sequence
  Synthetic
gggaauaaugauuagcauuua

SEQ ID NO: 15757 - RNA, 22 nt, Artificial Sequence
  Synthetic
gaaauguuaugaaaaucauuua

SEQ ID NO: 15758 - RNA, 18 nt, Artificial Sequence
  Synthetic
gcauggaaggaucauuua

SEQ ID NO: 15759 - RNA, 19 nt, Artificial Sequence
  Synthetic
ggcauggaaggaucauuua

SEQ ID NO: 15760 - RNA, 20 nt, Artificial Sequence
  Synthetic
gggcauggaaggaucauuua

SEQ ID NO: 15761 - RNA, 23 nt, Artificial Sequence
  Synthetic
gcagggcauggaaggaucauuua

SEQ ID NO: 15762 - RNA, 19 nt, Artificial Sequence
  Synthetic
gaucacaggauuucauuua

SEQ ID NO: 15763 - RNA, 20 nt, Artificial Sequence
  Synthetic
ggaucacaggauuucauuua

SEQ ID NO: 15764 - RNA, 22 nt, Artificial Sequence
  Synthetic
gcggaucacaggauuucauuua

SEQ ID NO: 15765 - RNA, 21 nt, Artificial Sequence
  Synthetic
gcaaaaacuaaaaaggauuua

SEQ ID NO: 15766 - RNA, 18 nt, Artificial Sequence
  Synthetic
gacacugacucugauuua

SEQ ID NO: 15767 - RNA, 20 nt, Artificial Sequence
  Synthetic
gagacacugacucugauuua

SEQ ID NO: 15768 - RNA, 22 nt, Artificial Sequence
  Synthetic
gagagacacugacucugauuua

SEQ ID NO: 15769 - RNA, 24 nt, Artificial Sequence
  Synthetic
gagagagacacugacucugauuua

SEQ ID NO: 15770 - RNA, 21 nt, Artificial Sequence
  Synthetic
guccagcgaaagagugauuua

SEQ ID NO: 15771 - RNA, 22 nt, Artificial Sequence
  Synthetic
gguccagcgaaagagugauuua

SEQ ID NO: 15772 - RNA, 22 nt, Artificial Sequence
  Synthetic
gcuuuaaauuccgaaauauuua

SEQ ID NO: 15773 - RNA, 23 nt, Artificial Sequence
  Synthetic
ggcuuuaaauuccgaaauauuua

SEQ ID NO: 15774 - RNA, 18 nt, Artificial Sequence
  Synthetic
guuugaacuuaauauuua

SEQ ID NO: 15775 - RNA, 18 nt, Artificial Sequence
  Synthetic
gcguuaguaugauauuua

SEQ ID NO: 15776 - RNA, 22 nt, Artificial Sequence
  Synthetic
guuuguuacauuuauauauuua

SEQ ID NO: 15777 - RNA, 23 nt, Artificial Sequence
  Synthetic
gguuuguuacauuuauauauuua

SEQ ID NO: 15778 - RNA, 18 nt, Artificial Sequence
  Synthetic
gauuuaauccacuauuua

SEQ ID NO: 15779 - RNA, 21 nt, Artificial Sequence
  Synthetic
gucgauuuaauccacuauuua

SEQ ID NO: 15780 - RNA, 22 nt, Artificial Sequence
  Synthetic
ggucgauuuaauccacuauuua

SEQ ID NO: 15781 - RNA, 24 nt, Artificial Sequence
  Synthetic
gaaaguuuauucuacagcuauuua

SEQ ID NO: 15782 - RNA, 19 nt, Artificial Sequence
  Synthetic
gaugucagggagguauuua

SEQ ID NO: 15783 - RNA, 20 nt, Artificial Sequence
  Synthetic
gauucuugauaauguauuua

SEQ ID NO: 15784 - RNA, 23 nt, Artificial Sequence
  Synthetic
guacauugcacucauuguauuua

SEQ ID NO: 15785 - RNA, 21 nt, Artificial Sequence
  Synthetic
gacaugaaagaaaauuauuua

SEQ ID NO: 15786 - RNA, 22 nt, Artificial Sequence
  Synthetic
guuuuuaaauuguuguuauuua

SEQ ID NO: 15787 - RNA, 18 nt, Artificial Sequence
  Synthetic
guuccagccauuuauuua

SEQ ID NO: 15788 - RNA, 20 nt, Artificial Sequence
  Synthetic
guguuccagccauuuauuua

SEQ ID NO: 15789 - RNA, 21 nt, Artificial Sequence
  Synthetic
gguguuccagccauuuauuua

SEQ ID NO: 15790 - RNA, 20 nt, Artificial Sequence
  Synthetic
gaauauaguuuuuuuauuua

SEQ ID NO: 15791 - RNA, 19 nt, Artificial Sequence
  Synthetic
gcaauaagauuugacuuua

SEQ ID NO: 15792 - RNA, 20 nt, Artificial Sequence
  Synthetic
gaccaaccaggccuacuuua

SEQ ID NO: 15793 - RNA, 21 nt, Artificial Sequence
  Synthetic
ggaccaaccaggccuacuuua

SEQ ID NO: 15794 - RNA, 23 nt, Artificial Sequence
  Synthetic
gaggaccaaccaggccuacuuua

SEQ ID NO: 15795 - RNA, 19 nt, Artificial Sequence
  Synthetic
gcuuauucuuuuaccuuua

SEQ ID NO: 15796 - RNA, 19 nt, Artificial Sequence
  Synthetic
guauuucagagccgcuuua

SEQ ID NO: 15797 - RNA, 23 nt, Artificial Sequence
  Synthetic
gccuguauuucagagccgcuuua

SEQ ID NO: 15798 - RNA, 19 nt, Artificial Sequence
  Synthetic
gauucucuuguuaucuuua

SEQ ID NO: 15799 - RNA, 18 nt, Artificial Sequence
  Synthetic
gacucccuacacucuuua

SEQ ID NO: 15800 - RNA, 20 nt, Artificial Sequence
  Synthetic
gugacucccuacacucuuua

SEQ ID NO: 15801 - RNA, 21 nt, Artificial Sequence
  Synthetic
gcaagguugacacugucuuua

SEQ ID NO: 15802 - RNA, 18 nt, Artificial Sequence
  Synthetic
ggggaagaggccaguuua

SEQ ID NO: 15803 - RNA, 21 nt, Artificial Sequence
  Synthetic
gcuggggaagaggccaguuua

SEQ ID NO: 15804 - RNA, 23 nt, Artificial Sequence
  Synthetic
gugcuggggaagaggccaguuua

SEQ ID NO: 15805 - RNA, 23 nt, Artificial Sequence
  Synthetic
guuccuuauuuaaccucaguuua

SEQ ID NO: 15806 - RNA, 22 nt, Artificial Sequence
  Synthetic
gcacugugccaaugucaguuua

SEQ ID NO: 15807 - RNA, 22 nt, Artificial Sequence
  Synthetic
gcaucuuuuugaccuuaguuua

SEQ ID NO: 15808 - RNA, 18 nt, Artificial Sequence
  Synthetic
ggucauaugguggguuua

SEQ ID NO: 15809 - RNA, 21 nt, Artificial Sequence
  Synthetic
gaaggucauaugguggguuua

SEQ ID NO: 15810 - RNA, 22 nt, Artificial Sequence
  Synthetic
ggaaggucauaugguggguuua

SEQ ID NO: 15811 - RNA, 23 nt, Artificial Sequence
  Synthetic
gggaaggucauaugguggguuua

SEQ ID NO: 15812 - RNA, 21 nt, Artificial Sequence
  Synthetic
guugaagggaaaaaauguuua

SEQ ID NO: 15813 - RNA, 23 nt, Artificial Sequence
  Synthetic
gcuuuauauuacauguauguuua

SEQ ID NO: 15814 - RNA, 22 nt, Artificial Sequence
  Synthetic
gcacucaauuacugcuuguuua

SEQ ID NO: 15815 - RNA, 22 nt, Artificial Sequence
  Synthetic
guuaaugcuuauuucuuguuua

SEQ ID NO: 15816 - RNA, 24 nt, Artificial Sequence
  Synthetic
gaguuaaugcuuauuucuuguuua

SEQ ID NO: 15817 - RNA, 21 nt, Artificial Sequence
  Synthetic
gacaacaacaauaguuguuua

SEQ ID NO: 15818 - RNA, 22 nt, Artificial Sequence
  Synthetic
gucagugcuccauauuuguuua

SEQ ID NO: 15819 - RNA, 18 nt, Artificial Sequence
  Synthetic
gauuucaggauaauuuua

SEQ ID NO: 15820 - RNA, 21 nt, Artificial Sequence
  Synthetic
gcacaucuacuacuaauuuua

SEQ ID NO: 15821 - RNA, 21 nt, Artificial Sequence
  Synthetic
gaacccuguccccuaauuuua

SEQ ID NO: 15822 - RNA, 22 nt, Artificial Sequence
  Synthetic
ggaacccuguccccuaauuuua

SEQ ID NO: 15823 - RNA, 23 nt, Artificial Sequence
  Synthetic
gcuuaaucauuugcuacauuuua

SEQ ID NO: 15824 - RNA, 21 nt, Artificial Sequence
  Synthetic
guacagguauaccucauuuua

SEQ ID NO: 15825 - RNA, 24 nt, Artificial Sequence
  Synthetic
guccuuauuuaacaccagauuuua

SEQ ID NO: 15826 - RNA, 19 nt, Artificial Sequence
  Synthetic
gauggcagaugauauuuua

SEQ ID NO: 15827 - RNA, 22 nt, Artificial Sequence
  Synthetic
gucgauggcagaugauauuuua

SEQ ID NO: 15828 - RNA, 24 nt, Artificial Sequence
  Synthetic
gugucgauggcagaugauauuuua

SEQ ID NO: 15829 - RNA, 23 nt, Artificial Sequence
  Synthetic
guauacauaugccaaguauuuua

SEQ ID NO: 15830 - RNA, 20 nt, Artificial Sequence
  Synthetic
gcacagcaaucaguauuuua

SEQ ID NO: 15831 - RNA, 21 nt, Artificial Sequence
  Synthetic
ggcacagcaaucaguauuuua

SEQ ID NO: 15832 - RNA, 22 nt, Artificial Sequence
  Synthetic
gggcacagcaaucaguauuuua

SEQ ID NO: 15833 - RNA, 23 nt, Artificial Sequence
  Synthetic
ggggcacagcaaucaguauuuua

SEQ ID NO: 15834 - RNA, 20 nt, Artificial Sequence
  Synthetic
guuuucuucuaucacuuuua

SEQ ID NO: 15835 - RNA, 21 nt, Artificial Sequence
  Synthetic
gguuuucuucuaucacuuuua

SEQ ID NO: 15836 - RNA, 21 nt, Artificial Sequence
  Synthetic
gaaauguaauugccccuuuua

SEQ ID NO: 15837 - RNA, 19 nt, Artificial Sequence
  Synthetic
gaaggaguugugccuuuua

SEQ ID NO: 15838 - RNA, 19 nt, Artificial Sequence
  Synthetic
gcaauuccacaagcuuuua

SEQ ID NO: 15839 - RNA, 20 nt, Artificial Sequence
  Synthetic
gcauauaaaaaaaucuuuua

SEQ ID NO: 15840 - RNA, 19 nt, Artificial Sequence
  Synthetic
guuaaaaaguguaguuuua

SEQ ID NO: 15841 - RNA, 23 nt, Artificial Sequence
  Synthetic
gcauguuaaaaaguguaguuuua

SEQ ID NO: 15842 - RNA, 24 nt, Artificial Sequence
  Synthetic
ggcauguuaaaaaguguaguuuua

SEQ ID NO: 15843 - RNA, 22 nt, Artificial Sequence
  Synthetic
guuuaacggugacaugguuuua

SEQ ID NO: 15844 - RNA, 24 nt, Artificial Sequence
  Synthetic
guguuuaacggugacaugguuuua

SEQ ID NO: 15845 - RNA, 21 nt, Artificial Sequence
  Synthetic
gaauucagcugaaaauuuuua

SEQ ID NO: 15846 - RNA, 18 nt, Artificial Sequence
  Synthetic
gggaaagcuggauuuuua

SEQ ID NO: 15847 - RNA, 19 nt, Artificial Sequence
  Synthetic
ggggaaagcuggauuuuua

SEQ ID NO: 15848 - RNA, 21 nt, Artificial Sequence
  Synthetic
gaaaccguggcauuauuuuua

SEQ ID NO: 15849 - RNA, 22 nt, Artificial Sequence
  Synthetic
guaacuaaacauuuuauuuuua

SEQ ID NO: 15850 - RNA, 23 nt, Artificial Sequence
  Synthetic
gguaacuaaacauuuuauuuuua

SEQ ID NO: 15851 - RNA, 21 nt, Artificial Sequence
  Synthetic
gagauuuucauuuucuuuuua

SEQ ID NO: 15852 - RNA, 23 nt, Artificial Sequence
  Synthetic
gagagauuuucauuuucuuuuua

SEQ ID NO: 15853 - RNA, 18 nt, Artificial Sequence
  Synthetic
guccaaaacagguuuuua

SEQ ID NO: 15854 - RNA, 19 nt, Artificial Sequence
  Synthetic
gguccaaaacagguuuuua

SEQ ID NO: 15855 - RNA, 20 nt, Artificial Sequence
  Synthetic
ggguccaaaacagguuuuua

SEQ ID NO: 15856 - RNA, 21 nt, Artificial Sequence
  Synthetic
gggguccaaaacagguuuuua

SEQ ID NO: 15857 - RNA, 21 nt, Artificial Sequence
  Synthetic
guucucuaaccuaauuuuuua

SEQ ID NO: 15858 - RNA, 20 nt, Artificial Sequence
  Synthetic
gcuugauaaugcauuuuuua

SEQ ID NO: 15859 - RNA, 21 nt, Artificial Sequence
  Synthetic
ggcuugauaaugcauuuuuua

SEQ ID NO: 15860 - RNA, 24 nt, Artificial Sequence
  Synthetic
guuggcuugauaaugcauuuuuua

SEQ ID NO: 15861 - RNA, 23 nt, Artificial Sequence
  Synthetic
gaaucugauguuuuaguuuuuua

SEQ ID NO: 15862 - RNA, 19 nt, Artificial Sequence
  Synthetic
gaaugguucauguuuuuua

SEQ ID NO: 15863 - RNA, 22 nt, Artificial Sequence
  Synthetic
gcugaaugguucauguuuuuua

SEQ ID NO: 15864 - RNA, 24 nt, Artificial Sequence
  Synthetic
gugcugaaugguucauguuuuuua

SEQ ID NO: 15865 - RNA, 23 nt, Artificial Sequence
  Synthetic
gcauaguuaucauuuuuuuuuua

SEQ ID NO: 15866 - RNA, 18 nt, Artificial Sequence
  Synthetic
gagaggauuacaaaaaac

SEQ ID NO: 15867 - RNA, 21 nt, Artificial Sequence
  Synthetic
gaagagaggauuacaaaaaac

SEQ ID NO: 15868 - RNA, 24 nt, Artificial Sequence
  Synthetic
gaaauuugaagcagugggaaaaac

SEQ ID NO: 15869 - RNA, 21 nt, Artificial Sequence
  Synthetic
gaaugaagauguccacaaaac

SEQ ID NO: 15870 - RNA, 24 nt, Artificial Sequence
  Synthetic
guagaaugaagauguccacaaaac

SEQ ID NO: 15871 - RNA, 19 nt, Artificial Sequence
  Synthetic
gaauccugauggacaaaac

SEQ ID NO: 15872 - RNA, 21 nt, Artificial Sequence
  Synthetic
gagaauccugauggacaaaac

SEQ ID NO: 15873 - RNA, 19 nt, Artificial Sequence
  Synthetic
guggggaggacuucaaaac

SEQ ID NO: 15874 - RNA, 21 nt, Artificial Sequence
  Synthetic
gaguggggaggacuucaaaac

SEQ ID NO: 15875 - RNA, 22 nt, Artificial Sequence
  Synthetic
ggaguggggaggacuucaaaac

SEQ ID NO: 15876 - RNA, 24 nt, Artificial Sequence
  Synthetic
gauauaaagaagcugaaagaaaac

SEQ ID NO: 15877 - RNA, 20 nt, Artificial Sequence
  Synthetic
gcugcucugaggcagaaaac

SEQ ID NO: 15878 - RNA, 23 nt, Artificial Sequence
  Synthetic
gaugcugcucugaggcagaaaac

SEQ ID NO: 15879 - RNA, 19 nt, Artificial Sequence
  Synthetic
gcgagaagaaugagaaaac

SEQ ID NO: 15880 - RNA, 20 nt, Artificial Sequence
  Synthetic
ggcgagaagaaugagaaaac

SEQ ID NO: 15881 - RNA, 24 nt, Artificial Sequence
  Synthetic
gcaaggcgagaagaaugagaaaac

SEQ ID NO: 15882 - RNA, 18 nt, Artificial Sequence
  Synthetic
gcaauggagaaggaaaac

SEQ ID NO: 15883 - RNA, 23 nt, Artificial Sequence
  Synthetic
gccaugcaauggagaaggaaaac

SEQ ID NO: 15884 - RNA, 19 nt, Artificial Sequence
  Synthetic
guaagacgggcaggaaaac

SEQ ID NO: 15885 - RNA, 20 nt, Artificial Sequence
  Synthetic
gguaagacgggcaggaaaac

SEQ ID NO: 15886 - RNA, 24 nt, Artificial Sequence
  Synthetic
gaccgguaagacgggcaggaaaac

SEQ ID NO: 15887 - RNA, 24 nt, Artificial Sequence
  Synthetic
gaaacaaaaguccaucaggaaaac

SEQ ID NO: 15888 - RNA, 21 nt, Artificial Sequence
  Synthetic
gaaauaugcagaugggaaaac

SEQ ID NO: 15889 - RNA, 23 nt, Artificial Sequence
  Synthetic
gagaaauaugcagaugggaaaac

SEQ ID NO: 15890 - RNA, 23 nt, Artificial Sequence
  Synthetic
guuuuuucccaaauauggaaaac

SEQ ID NO: 15891 - RNA, 22 nt, Artificial Sequence
  Synthetic
gcauuuaauguuaaaauaaaac

SEQ ID NO: 15892 - RNA, 23 nt, Artificial Sequence
  Synthetic
ggcauuuaauguuaaaauaaaac

SEQ ID NO: 15893 - RNA, 19 nt, Artificial Sequence
  Synthetic
gacugguuuagacuaaaac

SEQ ID NO: 15894 - RNA, 20 nt, Artificial Sequence
  Synthetic
ggacugguuuagacuaaaac

SEQ ID NO: 15895 - RNA, 23 nt, Artificial Sequence
  Synthetic
guuggacugguuuagacuaaaac

SEQ ID NO: 15896 - RNA, 20 nt, Artificial Sequence
  Synthetic
guauuaagcacaauuaaaac

SEQ ID NO: 15897 - RNA, 21 nt, Artificial Sequence
  Synthetic
gcaugucugugguauuaaaac

SEQ ID NO: 15898 - RNA, 22 nt, Artificial Sequence
  Synthetic
gagagacuuucgauguuaaaac

SEQ ID NO: 15899 - RNA, 18 nt, Artificial Sequence
  Synthetic
gauagcagaagcacaaac

SEQ ID NO: 15900 - RNA, 22 nt, Artificial Sequence
  Synthetic
gaaugauagcagaagcacaaac

SEQ ID NO: 15901 - RNA, 21 nt, Artificial Sequence
  Synthetic
guuauggauacaaagacaaac

SEQ ID NO: 15902 - RNA, 24 nt, Artificial Sequence
  Synthetic
gaaguuauggauacaaagacaaac

SEQ ID NO: 15903 - RNA, 24 nt, Artificial Sequence
  Synthetic
gaauuucuccucgcugucccaaac

SEQ ID NO: 15904 - RNA, 19 nt, Artificial Sequence
  Synthetic
gauaaucuauuauccaaac

SEQ ID NO: 15905 - RNA, 21 nt, Artificial Sequence
  Synthetic
gugauaaucuauuauccaaac

SEQ ID NO: 15906 - RNA, 23 nt, Artificial Sequence
  Synthetic
gagugauaaucuauuauccaaac

SEQ ID NO: 15907 - RNA, 20 nt, Artificial Sequence
  Synthetic
gacugaaugguaaugcaaac

SEQ ID NO: 15908 - RNA, 19 nt, Artificial Sequence
  Synthetic
gaauauucagaauucaaac

SEQ ID NO: 15909 - RNA, 20 nt, Artificial Sequence
  Synthetic
ggaauauucagaauucaaac

SEQ ID NO: 15910 - RNA, 20 nt, Artificial Sequence
  Synthetic
gauucuggaauuauucaaac

SEQ ID NO: 15911 - RNA, 23 nt, Artificial Sequence
  Synthetic
gaccuucucuagagacuucaaac

SEQ ID NO: 15912 - RNA, 24 nt, Artificial Sequence
  Synthetic
ggaccuucucuagagacuucaaac

SEQ ID NO: 15913 - RNA, 19 nt, Artificial Sequence
  Synthetic
guauugaagaauuucaaac

SEQ ID NO: 15914 - RNA, 20 nt, Artificial Sequence
  Synthetic
gguauugaagaauuucaaac

SEQ ID NO: 15915 - RNA, 22 nt, Artificial Sequence
  Synthetic
gagagaagagagaaaaagaaac

SEQ ID NO: 15916 - RNA, 23 nt, Artificial Sequence
  Synthetic
ggagagaagagagaaaaagaaac

SEQ ID NO: 15917 - RNA, 19 nt, Artificial Sequence
  Synthetic
gucuucuaguuacagaaac

SEQ ID NO: 15918 - RNA, 23 nt, Artificial Sequence
  Synthetic
guaugucuucuaguuacagaaac

SEQ ID NO: 15919 - RNA, 20 nt, Artificial Sequence
  Synthetic
guugucgucccaagagaaac

SEQ ID NO: 15920 - RNA, 22 nt, Artificial Sequence
  Synthetic
gaguugucgucccaagagaaac

SEQ ID NO: 15921 - RNA, 20 nt, Artificial Sequence
  Synthetic
guugacacuggaagagaaac

SEQ ID NO: 15922 - RNA, 22 nt, Artificial Sequence
  Synthetic
gauuucagguuuuuggagaaac

SEQ ID NO: 15923 - RNA, 19 nt, Artificial Sequence
  Synthetic
guuuaaaccugagcgaaac

SEQ ID NO: 15924 - RNA, 24 nt, Artificial Sequence
  Synthetic
gaccauuugaauugagguggaaac

SEQ ID NO: 15925 - RNA, 19 nt, Artificial Sequence
  Synthetic
gacaugaaagagaugaaac

SEQ ID NO: 15926 - RNA, 18 nt, Artificial Sequence
  Synthetic
gggacagggauaugaaac

SEQ ID NO: 15927 - RNA, 24 nt, Artificial Sequence
  Synthetic
gauaaagggacagggauaugaaac

SEQ ID NO: 15928 - RNA, 18 nt, Artificial Sequence
  Synthetic
gagagaaauuuaugaaac

SEQ ID NO: 15929 - RNA, 23 nt, Artificial Sequence
  Synthetic
gccaagagagaaauuuaugaaac

SEQ ID NO: 15930 - RNA, 22 nt, Artificial Sequence
  Synthetic
guuuuacaaauaagugugaaac

SEQ ID NO: 15931 - RNA, 24 nt, Artificial Sequence
  Synthetic
gaguuuuacaaauaagugugaaac

SEQ ID NO: 15932 - RNA, 18 nt, Artificial Sequence
  Synthetic
gauguuaagaauugaaac

SEQ ID NO: 15933 - RNA, 24 nt, Artificial Sequence
  Synthetic
guuuuugauguuaagaauugaaac

SEQ ID NO: 15934 - RNA, 19 nt, Artificial Sequence
  Synthetic
gauuuaucauccuugaaac

SEQ ID NO: 15935 - RNA, 19 nt, Artificial Sequence
  Synthetic
guuagcugaaauuugaaac

SEQ ID NO: 15936 - RNA, 22 nt, Artificial Sequence
  Synthetic
gcaguuagcugaaauuugaaac

SEQ ID NO: 15937 - RNA, 24 nt, Artificial Sequence
  Synthetic
gcauauuugaguuagaaaauaaac

SEQ ID NO: 15938 - RNA, 18 nt, Artificial Sequence
  Synthetic
gacuguauugaacuaaac

SEQ ID NO: 15939 - RNA, 20 nt, Artificial Sequence
  Synthetic
gugacuguauugaacuaaac

SEQ ID NO: 15940 - RNA, 23 nt, Artificial Sequence
  Synthetic
gaagugacuguauugaacuaaac

SEQ ID NO: 15941 - RNA, 23 nt, Artificial Sequence
  Synthetic
guucaccaagccuugcauuaaac

SEQ ID NO: 15942 - RNA, 19 nt, Artificial Sequence
  Synthetic
gauuuugcagcacuuaaac

SEQ ID NO: 15943 - RNA, 21 nt, Artificial Sequence
  Synthetic
gagauuuugcagcacuuaaac

SEQ ID NO: 15944 - RNA, 22 nt, Artificial Sequence
  Synthetic
ggagauuuugcagcacuuaaac

SEQ ID NO: 15945 - RNA, 23 nt, Artificial Sequence
  Synthetic
gggagauuuugcagcacuuaaac

SEQ ID NO: 15946 - RNA, 22 nt, Artificial Sequence
  Synthetic
gaaauacauuagauuuuuaaac

SEQ ID NO: 15947 - RNA, 23 nt, Artificial Sequence
  Synthetic
ggaaauacauuagauuuuuaaac

SEQ ID NO: 15948 - RNA, 18 nt, Artificial Sequence
  Synthetic
gugugaagagguaacaac

SEQ ID NO: 15949 - RNA, 24 nt, Artificial Sequence
  Synthetic
gucccagugugaagagguaacaac

SEQ ID NO: 15950 - RNA, 21 nt, Artificial Sequence
  Synthetic
gccuuucucaagucccacaac

SEQ ID NO: 15951 - RNA, 24 nt, Artificial Sequence
  Synthetic
gaagccuuucucaagucccacaac

SEQ ID NO: 15952 - RNA, 21 nt, Artificial Sequence
  Synthetic
gauuguggacuaugagacaac

SEQ ID NO: 15953 - RNA, 23 nt, Artificial Sequence
  Synthetic
gugauuguggacuaugagacaac

SEQ ID NO: 15954 - RNA, 22 nt, Artificial Sequence
  Synthetic
gaaauaauaggcuuaugacaac

SEQ ID NO: 15955 - RNA, 19 nt, Artificial Sequence
  Synthetic
guacacgaauuuauacaac

SEQ ID NO: 15956 - RNA, 19 nt, Artificial Sequence
  Synthetic
gcguagcaauuacuacaac

SEQ ID NO: 15957 - RNA, 18 nt, Artificial Sequence
  Synthetic
ggagaaugagaaaccaac

SEQ ID NO: 15958 - RNA, 23 nt, Artificial Sequence
  Synthetic
guucaacuaaccaaucaaccaac

SEQ ID NO: 15959 - RNA, 18 nt, Artificial Sequence
  Synthetic
gggaagggguucaccaac

SEQ ID NO: 15960 - RNA, 19 nt, Artificial Sequence
  Synthetic
ggggaagggguucaccaac

SEQ ID NO: 15961 - RNA, 19 nt, Artificial Sequence
  Synthetic
guggggaauugaggccaac

SEQ ID NO: 15962 - RNA, 24 nt, Artificial Sequence
  Synthetic
gcauuguggggaauugaggccaac

SEQ ID NO: 15963 - RNA, 22 nt, Artificial Sequence
  Synthetic
gcauuuugcagguauauccaac

SEQ ID NO: 15964 - RNA, 21 nt, Artificial Sequence
  Synthetic
gggcaggagacugacugcaac

SEQ ID NO: 15965 - RNA, 22 nt, Artificial Sequence
  Synthetic
ggggcaggagacugacugcaac

SEQ ID NO: 15966 - RNA, 24 nt, Artificial Sequence
  Synthetic
guggggcaggagacugacugcaac

SEQ ID NO: 15967 - RNA, 22 nt, Artificial Sequence
  Synthetic
gacauuauccucucaaaucaac

SEQ ID NO: 15968 - RNA, 21 nt, Artificial Sequence
  Synthetic
gacaacauggcugaagucaac

SEQ ID NO: 15969 - RNA, 19 nt, Artificial Sequence
  Synthetic
gccuuguggaucugucaac

SEQ ID NO: 15970 - RNA, 22 nt, Artificial Sequence
  Synthetic
guugccuuguggaucugucaac

SEQ ID NO: 15971 - RNA, 19 nt, Artificial Sequence
  Synthetic
gauucugaauucuuucaac

SEQ ID NO: 15972 - RNA, 21 nt, Artificial Sequence
  Synthetic
gaaaaauauaggaagaagaac

SEQ ID NO: 15973 - RNA, 22 nt, Artificial Sequence
  Synthetic
gcauaaaaauaguaagaagaac

SEQ ID NO: 15974 - RNA, 23 nt, Artificial Sequence
  Synthetic
guugggugaagaagaggaagaac

SEQ ID NO: 15975 - RNA, 24 nt, Artificial Sequence
  Synthetic
gacccuugucaucacuggaagaac

SEQ ID NO: 15976 - RNA, 23 nt, Artificial Sequence
  Synthetic
gaaauuucugcuuuaugaagaac

SEQ ID NO: 15977 - RNA, 22 nt, Artificial Sequence
  Synthetic
guccccucauauacugaagaac

SEQ ID NO: 15978 - RNA, 19 nt, Artificial Sequence
  Synthetic
guaguaaaaugaagagaac

SEQ ID NO: 15979 - RNA, 22 nt, Artificial Sequence
  Synthetic
gcuguaguaaaaugaagagaac

SEQ ID NO: 15980 - RNA, 18 nt, Artificial Sequence
  Synthetic
gcagaaccugaagagaac

SEQ ID NO: 15981 - RNA, 24 nt, Artificial Sequence
  Synthetic
gauauugcagaaccugaagagaac

SEQ ID NO: 15982 - RNA, 24 nt, Artificial Sequence
  Synthetic
guacucauuacacugcaugagaac

SEQ ID NO: 15983 - RNA, 22 nt, Artificial Sequence
  Synthetic
gaaaagguaauuaacugagaac

SEQ ID NO: 15984 - RNA, 19 nt, Artificial Sequence
  Synthetic
gaccaucuaggcauagaac

SEQ ID NO: 15985 - RNA, 22 nt, Artificial Sequence
  Synthetic
gcagaccaucuaggcauagaac

SEQ ID NO: 15986 - RNA, 23 nt, Artificial Sequence
  Synthetic
ggcagaccaucuaggcauagaac

SEQ ID NO: 15987 - RNA, 24 nt, Artificial Sequence
  Synthetic
gggcagaccaucuaggcauagaac

SEQ ID NO: 15988 - RNA, 18 nt, Artificial Sequence
  Synthetic
guauuaacagacacgaac

SEQ ID NO: 15989 - RNA, 21 nt, Artificial Sequence
  Synthetic
gcaguauuaacagacacgaac

SEQ ID NO: 15990 - RNA, 19 nt, Artificial Sequence
  Synthetic
gucuacuucauauacgaac

SEQ ID NO: 15991 - RNA, 20 nt, Artificial Sequence
  Synthetic
ggucuacuucauauacgaac

SEQ ID NO: 15992 - RNA, 22 nt, Artificial Sequence
  Synthetic
gaggucuacuucauauacgaac

SEQ ID NO: 15993 - RNA, 23 nt, Artificial Sequence
  Synthetic
ggaggucuacuucauauacgaac

SEQ ID NO: 15994 - RNA, 19 nt, Artificial Sequence
  Synthetic
guucauuuguuacaggaac

SEQ ID NO: 15995 - RNA, 21 nt, Artificial Sequence
  Synthetic
guguucauuuguuacaggaac

SEQ ID NO: 15996 - RNA, 23 nt, Artificial Sequence
  Synthetic
guguguucauuuguuacaggaac

SEQ ID NO: 15997 - RNA, 23 nt, Artificial Sequence
  Synthetic
gucauucacugggauggaggaac

SEQ ID NO: 15998 - RNA, 21 nt, Artificial Sequence
  Synthetic
gcaagcaaacgaggugggaac

SEQ ID NO: 15999 - RNA, 23 nt, Artificial Sequence
  Synthetic
gugcaagcaaacgaggugggaac

SEQ ID NO: 16000 - RNA, 21 nt, Artificial Sequence
  Synthetic
gcuucaugaacacuugggaac

SEQ ID NO: 16001 - RNA, 23 nt, Artificial Sequence
  Synthetic
gugcuucaugaacacuugggaac

SEQ ID NO: 16002 - RNA, 19 nt, Artificial Sequence
  Synthetic
gcaaacuaaaugcaugaac

SEQ ID NO: 16003 - RNA, 24 nt, Artificial Sequence
  Synthetic
gcaaagcaaacuaaaugcaugaac

SEQ ID NO: 16004 - RNA, 21 nt, Artificial Sequence
  Synthetic
guaaaauaugcugcuaugaac

SEQ ID NO: 16005 - RNA, 20 nt, Artificial Sequence
  Synthetic
guauuacagaaguuaugaac

SEQ ID NO: 16006 - RNA, 24 nt, Artificial Sequence
  Synthetic
gcuaguauuacagaaguuaugaac

SEQ ID NO: 16007 - RNA, 18 nt, Artificial Sequence
  Synthetic
gauaaauacucccugaac

SEQ ID NO: 16008 - RNA, 24 nt, Artificial Sequence
  Synthetic
gacuuagauaaauacucccugaac

SEQ ID NO: 16009 - RNA, 18 nt, Artificial Sequence
  Synthetic
guagggcagcagcugaac

SEQ ID NO: 16010 - RNA, 20 nt, Artificial Sequence
  Synthetic
gccaguuaaccucgcugaac

SEQ ID NO: 16011 - RNA, 21 nt, Artificial Sequence
  Synthetic
ggccaguuaaccucgcugaac

SEQ ID NO: 16012 - RNA, 24 nt, Artificial Sequence
  Synthetic
guuaacauaaaagaaguagugaac

SEQ ID NO: 16013 - RNA, 18 nt, Artificial Sequence
  Synthetic
guccauaauaaggugaac

SEQ ID NO: 16014 - RNA, 19 nt, Artificial Sequence
  Synthetic
gguccauaauaaggugaac

SEQ ID NO: 16015 - RNA, 21 nt, Artificial Sequence
  Synthetic
gugguccauaauaaggugaac

SEQ ID NO: 16016 - RNA, 21 nt, Artificial Sequence
  Synthetic
gcaaggaugagguaugugaac

SEQ ID NO: 16017 - RNA, 19 nt, Artificial Sequence
  Synthetic
gugugagaucauugugaac

SEQ ID NO: 16018 - RNA, 22 nt, Artificial Sequence
  Synthetic
gcagugugagaucauugugaac

SEQ ID NO: 16019 - RNA, 23 nt, Artificial Sequence
  Synthetic
ggcagugugagaucauugugaac

SEQ ID NO: 16020 - RNA, 18 nt, Artificial Sequence
  Synthetic
guggucucgaacuugaac

SEQ ID NO: 16021 - RNA, 19 nt, Artificial Sequence
  Synthetic
gaguuagugaguguugaac

SEQ ID NO: 16022 - RNA, 24 nt, Artificial Sequence
  Synthetic
guuaugaguuagugaguguugaac

SEQ ID NO: 16023 - RNA, 24 nt, Artificial Sequence
  Synthetic
gaaauuggaaaaaaagaaaauaac

SEQ ID NO: 16024 - RNA, 22 nt, Artificial Sequence
  Synthetic
gacccaccccagaccaaauaac

SEQ ID NO: 16025 - RNA, 23 nt, Artificial Sequence
  Synthetic
ggacccaccccagaccaaauaac

SEQ ID NO: 16026 - RNA, 22 nt, Artificial Sequence
  Synthetic
gaaacauacuacauucaauaac

SEQ ID NO: 16027 - RNA, 21 nt, Artificial Sequence
  Synthetic
guaaaguaacacaagaauaac

SEQ ID NO: 16028 - RNA, 23 nt, Artificial Sequence
  Synthetic
gauacagaagaauagcgaauaac

SEQ ID NO: 16029 - RNA, 21 nt, Artificial Sequence
  Synthetic
gcacaucuuuauaugaauaac

SEQ ID NO: 16030 - RNA, 22 nt, Artificial Sequence
  Synthetic
ggcacaucuuuauaugaauaac

SEQ ID NO: 16031 - RNA, 18 nt, Artificial Sequence
  Synthetic
gauguuuguucucauaac

SEQ ID NO: 16032 - RNA, 22 nt, Artificial Sequence
  Synthetic
gccugauguuuguucucauaac

SEQ ID NO: 16033 - RNA, 19 nt, Artificial Sequence
  Synthetic
guggaaaagaauucauaac

SEQ ID NO: 16034 - RNA, 22 nt, Artificial Sequence
  Synthetic
guaguggaaaagaauucauaac

SEQ ID NO: 16035 - RNA, 18 nt, Artificial Sequence
  Synthetic
guuauuguacaagauaac

SEQ ID NO: 16036 - RNA, 24 nt, Artificial Sequence
  Synthetic
guauuaguuauuguacaagauaac

SEQ ID NO: 16037 - RNA, 19 nt, Artificial Sequence
  Synthetic
gcgcaaaguuuaagauaac

SEQ ID NO: 16038 - RNA, 19 nt, Artificial Sequence
  Synthetic
gaaaauccuccaggauaac

SEQ ID NO: 16039 - RNA, 20 nt, Artificial Sequence
  Synthetic
ggaaaauccuccaggauaac

SEQ ID NO: 16040 - RNA, 18 nt, Artificial Sequence
  Synthetic
gauauaaaauaggauaac

SEQ ID NO: 16041 - RNA, 21 nt, Artificial Sequence
  Synthetic
gaagauauaaaauaggauaac

SEQ ID NO: 16042 - RNA, 23 nt, Artificial Sequence
  Synthetic
gcuuuauguaguaaaaugauaac

SEQ ID NO: 16043 - RNA, 18 nt, Artificial Sequence
  Synthetic
guuagauguaaugauaac

SEQ ID NO: 16044 - RNA, 22 nt, Artificial Sequence
  Synthetic
gaaaguuagauguaaugauaac

SEQ ID NO: 16045 - RNA, 18 nt, Artificial Sequence
  Synthetic
ggauuauuagaugauaac

SEQ ID NO: 16046 - RNA, 23 nt, Artificial Sequence
  Synthetic
guaaaggauuauuagaugauaac

SEQ ID NO: 16047 - RNA, 22 nt, Artificial Sequence
  Synthetic
gaacacaaugcccauauauaac

SEQ ID NO: 16048 - RNA, 20 nt, Artificial Sequence
  Synthetic
guuuauuaccuucaacuaac

SEQ ID NO: 16049 - RNA, 24 nt, Artificial Sequence
  Synthetic
guauucagcugcugaaacacuaac

SEQ ID NO: 16050 - RNA, 20 nt, Artificial Sequence
  Synthetic
gcccuuuaaaagugacuaac

SEQ ID NO: 16051 - RNA, 21 nt, Artificial Sequence
  Synthetic
ggcccuuuaaaagugacuaac

SEQ ID NO: 16052 - RNA, 23 nt, Artificial Sequence
  Synthetic
gcggcccuuuaaaagugacuaac

SEQ ID NO: 16053 - RNA, 18 nt, Artificial Sequence
  Synthetic
gaaugaacccaaccuaac

SEQ ID NO: 16054 - RNA, 19 nt, Artificial Sequence
  Synthetic
ggaaugaacccaaccuaac

SEQ ID NO: 16055 - RNA, 23 nt, Artificial Sequence
  Synthetic
gaauggaaugaacccaaccuaac

SEQ ID NO: 16056 - RNA, 24 nt, Artificial Sequence
  Synthetic
ggaauggaaugaacccaaccuaac

SEQ ID NO: 16057 - RNA, 18 nt, Artificial Sequence
  Synthetic
gcuauuucucacccuaac

SEQ ID NO: 16058 - RNA, 21 nt, Artificial Sequence
  Synthetic
gcugcuauuucucacccuaac

SEQ ID NO: 16059 - RNA, 19 nt, Artificial Sequence
  Synthetic
guuuauaagaaauccuaac

SEQ ID NO: 16060 - RNA, 20 nt, Artificial Sequence
  Synthetic
gguuuauaagaaauccuaac

SEQ ID NO: 16061 - RNA, 20 nt, Artificial Sequence
  Synthetic
gaugaaaugaaugggcuaac

SEQ ID NO: 16062 - RNA, 20 nt, Artificial Sequence
  Synthetic
gcuuacucauugucucuaac

SEQ ID NO: 16063 - RNA, 21 nt, Artificial Sequence
  Synthetic
guacuuuuuuacuucucuaac

SEQ ID NO: 16064 - RNA, 18 nt, Artificial Sequence
  Synthetic
gcauuugugauuucuaac

SEQ ID NO: 16065 - RNA, 19 nt, Artificial Sequence
  Synthetic
ggcauuugugauuucuaac

SEQ ID NO: 16066 - RNA, 20 nt, Artificial Sequence
  Synthetic
gggcauuugugauuucuaac

SEQ ID NO: 16067 - RNA, 24 nt, Artificial Sequence
  Synthetic
gaaugggcauuugugauuucuaac

SEQ ID NO: 16068 - RNA, 24 nt, Artificial Sequence
  Synthetic
guacuauucaccucuaaaaguaac

SEQ ID NO: 16069 - RNA, 21 nt, Artificial Sequence
  Synthetic
gacccaggggcuccagguaac

SEQ ID NO: 16070 - RNA, 18 nt, Artificial Sequence
  Synthetic
ggaggcuaacaugguaac

SEQ ID NO: 16071 - RNA, 19 nt, Artificial Sequence
  Synthetic
gggaggcuaacaugguaac

SEQ ID NO: 16072 - RNA, 22 nt, Artificial Sequence
  Synthetic
guugggaggcuaacaugguaac

SEQ ID NO: 16073 - RNA, 20 nt, Artificial Sequence
  Synthetic
gucuacaacgaacauguaac

SEQ ID NO: 16074 - RNA, 21 nt, Artificial Sequence
  Synthetic
gacucuagagugcuuuguaac

SEQ ID NO: 16075 - RNA, 20 nt, Artificial Sequence
  Synthetic
gucuaaaucugaaaauuaac

SEQ ID NO: 16076 - RNA, 24 nt, Artificial Sequence
  Synthetic
gacugucuaaaucugaaaauuaac

SEQ ID NO: 16077 - RNA, 21 nt, Artificial Sequence
  Synthetic
gcuaucuucaaugugauuaac

SEQ ID NO: 16078 - RNA, 18 nt, Artificial Sequence
  Synthetic
gauagguaaacauuuaac

SEQ ID NO: 16079 - RNA, 23 nt, Artificial Sequence
  Synthetic
guacagauagguaaacauuuaac

SEQ ID NO: 16080 - RNA, 24 nt, Artificial Sequence
  Synthetic
gguacagauagguaaacauuuaac

SEQ ID NO: 16081 - RNA, 18 nt, Artificial Sequence
  Synthetic
gcuuaaaguagcuuuaac

SEQ ID NO: 16082 - RNA, 24 nt, Artificial Sequence
  Synthetic
gauccugcuuaaaguagcuuuaac

SEQ ID NO: 16083 - RNA, 23 nt, Artificial Sequence
  Synthetic
guaaaagagaucuaguguuuaac

SEQ ID NO: 16084 - RNA, 19 nt, Artificial Sequence
  Synthetic
gcagugucagcuuuuuaac

SEQ ID NO: 16085 - RNA, 20 nt, Artificial Sequence
  Synthetic
ggcagugucagcuuuuuaac

SEQ ID NO: 16086 - RNA, 21 nt, Artificial Sequence
  Synthetic
gggcagugucagcuuuuuaac

SEQ ID NO: 16087 - RNA, 22 nt, Artificial Sequence
  Synthetic
ggggcagugucagcuuuuuaac

SEQ ID NO: 16088 - RNA, 19 nt, Artificial Sequence
  Synthetic
gaaagauuuucaaaaacac

SEQ ID NO: 16089 - RNA, 24 nt, Artificial Sequence
  Synthetic
gaaaagaaagauuuucaaaaacac

SEQ ID NO: 16090 - RNA, 18 nt, Artificial Sequence
  Synthetic
gauaaauauuaaaaacac

SEQ ID NO: 16091 - RNA, 19 nt, Artificial Sequence
  Synthetic
ggauaaauauuaaaaacac

SEQ ID NO: 16092 - RNA, 20 nt, Artificial Sequence
  Synthetic
gggauaaauauuaaaaacac

SEQ ID NO: 16093 - RNA, 22 nt, Artificial Sequence
  Synthetic
gagggauaaauauuaaaaacac

SEQ ID NO: 16094 - RNA, 19 nt, Artificial Sequence
  Synthetic
guuuuucaauaugaaacac

SEQ ID NO: 16095 - RNA, 20 nt, Artificial Sequence
  Synthetic
gguuuuucaauaugaaacac

SEQ ID NO: 16096 - RNA, 21 nt, Artificial Sequence
  Synthetic
ggguuuuucaauaugaaacac

SEQ ID NO: 16097 - RNA, 18 nt, Artificial Sequence
  Synthetic
ggaacacuuguuaaacac

SEQ ID NO: 16098 - RNA, 21 nt, Artificial Sequence
  Synthetic
gauggaacacuuguuaaacac

SEQ ID NO: 16099 - RNA, 22 nt, Artificial Sequence
  Synthetic
ggauggaacacuuguuaaacac

SEQ ID NO: 16100 - RNA, 19 nt, Artificial Sequence
  Synthetic
gcaaauauauauacaacac

SEQ ID NO: 16101 - RNA, 21 nt, Artificial Sequence
  Synthetic
gcauacaaaaaucgucaacac

SEQ ID NO: 16102 - RNA, 24 nt, Artificial Sequence
  Synthetic
guagcauacaaaaaucgucaacac

SEQ ID NO: 16103 - RNA, 19 nt, Artificial Sequence
  Synthetic
gaacacccaguuagaacac

SEQ ID NO: 16104 - RNA, 19 nt, Artificial Sequence
  Synthetic
gagcagaugaggauaacac

SEQ ID NO: 16105 - RNA, 20 nt, Artificial Sequence
  Synthetic
ggagcagaugaggauaacac

SEQ ID NO: 16106 - RNA, 21 nt, Artificial Sequence
  Synthetic
gggagcagaugaggauaacac

SEQ ID NO: 16107 - RNA, 22 nt, Artificial Sequence
  Synthetic
gaaauguuuguuaaauuaacac

SEQ ID NO: 16108 - RNA, 22 nt, Artificial Sequence
  Synthetic
gaccccaaaugaaucuuaacac

SEQ ID NO: 16109 - RNA, 23 nt, Artificial Sequence
  Synthetic
gacuuuuggcaugaaauacacac

SEQ ID NO: 16110 - RNA, 22 nt, Artificial Sequence
  Synthetic
gaaaacugguuuugauacacac

SEQ ID NO: 16111 - RNA, 23 nt, Artificial Sequence
  Synthetic
gcauaaccacuucauuaccacac

SEQ ID NO: 16112 - RNA, 18 nt, Artificial Sequence
  Synthetic
gcaaccuagguggcacac

SEQ ID NO: 16113 - RNA, 19 nt, Artificial Sequence
  Synthetic
ggcaaccuagguggcacac

SEQ ID NO: 16114 - RNA, 18 nt, Artificial Sequence
  Synthetic
gaauugaguuuggcacac

SEQ ID NO: 16115 - RNA, 23 nt, Artificial Sequence
  Synthetic
gaaaugaauugaguuuggcacac

SEQ ID NO: 16116 - RNA, 19 nt, Artificial Sequence
  Synthetic
gcagcugaucugcagacac

SEQ ID NO: 16117 - RNA, 18 nt, Artificial Sequence
  Synthetic
gcaaacagucagagacac

SEQ ID NO: 16118 - RNA, 19 nt, Artificial Sequence
  Synthetic
ggcaaacagucagagacac

SEQ ID NO: 16119 - RNA, 20 nt, Artificial Sequence
  Synthetic
gcagccauguuuugagacac

SEQ ID NO: 16120 - RNA, 23 nt, Artificial Sequence
  Synthetic
guugcagccauguuuugagacac

SEQ ID NO: 16121 - RNA, 24 nt, Artificial Sequence
  Synthetic
gguugcagccauguuuugagacac

SEQ ID NO: 16122 - RNA, 18 nt, Artificial Sequence
  Synthetic
gauuguuagagccgacac

SEQ ID NO: 16123 - RNA, 20 nt, Artificial Sequence
  Synthetic
gugauuguuagagccgacac

SEQ ID NO: 16124 - RNA, 24 nt, Artificial Sequence
  Synthetic
gauagugauuguuagagccgacac

SEQ ID NO: 16125 - RNA, 21 nt, Artificial Sequence
  Synthetic
guacuagcacauuaucgacac

SEQ ID NO: 16126 - RNA, 24 nt, Artificial Sequence
  Synthetic
guucaauuaaaaaaaaaaggacac

SEQ ID NO: 16127 - RNA, 19 nt, Artificial Sequence
  Synthetic
gucauugauaaauggacac

SEQ ID NO: 16128 - RNA, 24 nt, Artificial Sequence
  Synthetic
guuaagucauugauaaauggacac

SEQ ID NO: 16129 - RNA, 19 nt, Artificial Sequence
  Synthetic
gaggggcugcaguggacac

SEQ ID NO: 16130 - RNA, 20 nt, Artificial Sequence
  Synthetic
ggaggggcugcaguggacac

SEQ ID NO: 16131 - RNA, 21 nt, Artificial Sequence
  Synthetic
gggaggggcugcaguggacac

SEQ ID NO: 16132 - RNA, 22 nt, Artificial Sequence
  Synthetic
gauuucuauagcugaaugacac

SEQ ID NO: 16133 - RNA, 18 nt, Artificial Sequence
  Synthetic
guauaagggcccugacac

SEQ ID NO: 16134 - RNA, 22 nt, Artificial Sequence
  Synthetic
gcaaguauaagggcccugacac

SEQ ID NO: 16135 - RNA, 19 nt, Artificial Sequence
  Synthetic
gacugugucugccugacac

SEQ ID NO: 16136 - RNA, 18 nt, Artificial Sequence
  Synthetic
guggaaaacaauauacac

SEQ ID NO: 16137 - RNA, 18 nt, Artificial Sequence
  Synthetic
guaugcuaacuucuacac

SEQ ID NO: 16138 - RNA, 20 nt, Artificial Sequence
  Synthetic
guguaugcuaacuucuacac

SEQ ID NO: 16139 - RNA, 18 nt, Artificial Sequence
  Synthetic
gcuuuucuauauguacac

SEQ ID NO: 16140 - RNA, 20 nt, Artificial Sequence
  Synthetic
gugcuuuucuauauguacac

SEQ ID NO: 16141 - RNA, 22 nt, Artificial Sequence
  Synthetic
gagugcuuuucuauauguacac

SEQ ID NO: 16142 - RNA, 20 nt, Artificial Sequence
  Synthetic
guauauaugcccuuguacac

SEQ ID NO: 16143 - RNA, 22 nt, Artificial Sequence
  Synthetic
gaguauauaugcccuuguacac

SEQ ID NO: 16144 - RNA, 24 nt, Artificial Sequence
  Synthetic
gugaguauauaugcccuuguacac

SEQ ID NO: 16145 - RNA, 24 nt, Artificial Sequence
  Synthetic
gcacccagacuaagauaguaccac

SEQ ID NO: 16146 - RNA, 19 nt, Artificial Sequence
  Synthetic
gaucauugagacuacccac

SEQ ID NO: 16147 - RNA, 22 nt, Artificial Sequence
  Synthetic
gaugaucauugagacuacccac

SEQ ID NO: 16148 - RNA, 24 nt, Artificial Sequence
  Synthetic
gagaugaucauugagacuacccac

SEQ ID NO: 16149 - RNA, 18 nt, Artificial Sequence
  Synthetic
gauaaaauguuuacccac

SEQ ID NO: 16150 - RNA, 22 nt, Artificial Sequence
  Synthetic
guuugauaaaauguuuacccac

SEQ ID NO: 16151 - RNA, 24 nt, Artificial Sequence
  Synthetic
gaguuugauaaaauguuuacccac

SEQ ID NO: 16152 - RNA, 24 nt, Artificial Sequence
  Synthetic
gcaaauucgauuucuuguccccac

SEQ ID NO: 16153 - RNA, 18 nt, Artificial Sequence
  Synthetic
gacgguaugaaaagccac

SEQ ID NO: 16154 - RNA, 19 nt, Artificial Sequence
  Synthetic
ggacgguaugaaaagccac

SEQ ID NO: 16155 - RNA, 22 nt, Artificial Sequence
  Synthetic
guaggacgguaugaaaagccac

SEQ ID NO: 16156 - RNA, 18 nt, Artificial Sequence
  Synthetic
gcagcagaauuuagccac

SEQ ID NO: 16157 - RNA, 19 nt, Artificial Sequence
  Synthetic
ggcagcagaauuuagccac

SEQ ID NO: 16158 - RNA, 24 nt, Artificial Sequence
  Synthetic
gcaaaggcagcagaauuuagccac

SEQ ID NO: 16159 - RNA, 18 nt, Artificial Sequence
  Synthetic
ggucuagaguuaggccac

SEQ ID NO: 16160 - RNA, 20 nt, Artificial Sequence
  Synthetic
gaggucuagaguuaggccac

SEQ ID NO: 16161 - RNA, 22 nt, Artificial Sequence
  Synthetic
gugaggucuagaguuaggccac

SEQ ID NO: 16162 - RNA, 22 nt, Artificial Sequence
  Synthetic
gcauuugugaucguaaugccac

SEQ ID NO: 16163 - RNA, 19 nt, Artificial Sequence
  Synthetic
gaaggcuuucuguugccac

SEQ ID NO: 16164 - RNA, 23 nt, Artificial Sequence
  Synthetic
gccugaaggcuuucuguugccac

SEQ ID NO: 16165 - RNA, 21 nt, Artificial Sequence
  Synthetic
gaauuguucaauuggauccac

SEQ ID NO: 16166 - RNA, 23 nt, Artificial Sequence
  Synthetic
gagaauuguucaauuggauccac

SEQ ID NO: 16167 - RNA, 23 nt, Artificial Sequence
  Synthetic
gauaauugaaaacuauccuccac

SEQ ID NO: 16168 - RNA, 18 nt, Artificial Sequence
  Synthetic
guaaagagaagauuccac

SEQ ID NO: 16169 - RNA, 22 nt, Artificial Sequence
  Synthetic
guccacaguucagcuuuuccac

SEQ ID NO: 16170 - RNA, 19 nt, Artificial Sequence
  Synthetic
gaggguaaaaaaaaagcac

SEQ ID NO: 16171 - RNA, 20 nt, Artificial Sequence
  Synthetic
ggaggguaaaaaaaaagcac

SEQ ID NO: 16172 - RNA, 19 nt, Artificial Sequence
  Synthetic
gacuuguauuuggaagcac

SEQ ID NO: 16173 - RNA, 20 nt, Artificial Sequence
  Synthetic
ggacuuguauuuggaagcac

SEQ ID NO: 16174 - RNA, 21 nt, Artificial Sequence
  Synthetic
gcauucaguaacaugaagcac

SEQ ID NO: 16175 - RNA, 23 nt, Artificial Sequence
  Synthetic
gcgcauucaguaacaugaagcac

SEQ ID NO: 16176 - RNA, 18 nt, Artificial Sequence
  Synthetic
gcacugacuguacagcac

SEQ ID NO: 16177 - RNA, 18 nt, Artificial Sequence
  Synthetic
gccaguaagugucagcac

SEQ ID NO: 16178 - RNA, 23 nt, Artificial Sequence
  Synthetic
guaaagccaguaagugucagcac

SEQ ID NO: 16179 - RNA, 21 nt, Artificial Sequence
  Synthetic
gaauaagggccuauauagcac

SEQ ID NO: 16180 - RNA, 18 nt, Artificial Sequence
  Synthetic
gagagaccuuaguagcac

SEQ ID NO: 16181 - RNA, 22 nt, Artificial Sequence
  Synthetic
gucagagagaccuuaguagcac

SEQ ID NO: 16182 - RNA, 23 nt, Artificial Sequence
  Synthetic
ggucagagagaccuuaguagcac

SEQ ID NO: 16183 - RNA, 19 nt, Artificial Sequence
  Synthetic
gccccacacgcguuagcac

SEQ ID NO: 16184 - RNA, 22 nt, Artificial Sequence
  Synthetic
gcugccccacacgcguuagcac

SEQ ID NO: 16185 - RNA, 20 nt, Artificial Sequence
  Synthetic
guuuguacagauaugggcac

SEQ ID NO: 16186 - RNA, 22 nt, Artificial Sequence
  Synthetic
guucugcucuacgugauggcac

SEQ ID NO: 16187 - RNA, 23 nt, Artificial Sequence
  Synthetic
gacaaacaaaauguauauggcac

SEQ ID NO: 16188 - RNA, 24 nt, Artificial Sequence
  Synthetic
ggacaaacaaaauguauauggcac

SEQ ID NO: 16189 - RNA, 22 nt, Artificial Sequence
  Synthetic
guuuuaaccaagggaguggcac

SEQ ID NO: 16190 - RNA, 23 nt, Artificial Sequence
  Synthetic
gguuuuaaccaagggaguggcac

SEQ ID NO: 16191 - RNA, 19 nt, Artificial Sequence
  Synthetic
gaaagagcucagcaugcac

SEQ ID NO: 16192 - RNA, 23 nt, Artificial Sequence
  Synthetic
gccagaaagagcucagcaugcac

SEQ ID NO: 16193 - RNA, 24 nt, Artificial Sequence
  Synthetic
ggccagaaagagcucagcaugcac

SEQ ID NO: 16194 - RNA, 19 nt, Artificial Sequence
  Synthetic
gauggcaagcaagcugcac

SEQ ID NO: 16195 - RNA, 20 nt, Artificial Sequence
  Synthetic
ggauggcaagcaagcugcac

SEQ ID NO: 16196 - RNA, 18 nt, Artificial Sequence
  Synthetic
ggucauuuuuuucugcac

SEQ ID NO: 16197 - RNA, 24 nt, Artificial Sequence
  Synthetic
gcauuucaacagaacuuaaaucac

SEQ ID NO: 16198 - RNA, 20 nt, Artificial Sequence
  Synthetic
guuacaugcauuugcaucac

SEQ ID NO: 16199 - RNA, 22 nt, Artificial Sequence
  Synthetic
gcuaugauuccauuaucaucac

SEQ ID NO: 16200 - RNA, 24 nt, Artificial Sequence
  Synthetic
gagcuaugauuccauuaucaucac

SEQ ID NO: 16201 - RNA, 22 nt, Artificial Sequence
  Synthetic
guuuccacgugccaaguaucac

SEQ ID NO: 16202 - RNA, 18 nt, Artificial Sequence
  Synthetic
gacuacccaaccccucac

SEQ ID NO: 16203 - RNA, 22 nt, Artificial Sequence
  Synthetic
gcauaaaagagagaagucucac

SEQ ID NO: 16204 - RNA, 23 nt, Artificial Sequence
  Synthetic
gaucauacagcacucaaagucac

SEQ ID NO: 16205 - RNA, 19 nt, Artificial Sequence
  Synthetic
gucaccugccaaaggucac

SEQ ID NO: 16206 - RNA, 24 nt, Artificial Sequence
  Synthetic
gcuaagucaccugccaaaggucac

SEQ ID NO: 16207 - RNA, 19 nt, Artificial Sequence
  Synthetic
guauuguaauaaaggucac

SEQ ID NO: 16208 - RNA, 22 nt, Artificial Sequence
  Synthetic
gacguauuguaauaaaggucac

SEQ ID NO: 16209 - RNA, 18 nt, Artificial Sequence
  Synthetic
guguuaguggaaugucac

SEQ ID NO: 16210 - RNA, 19 nt, Artificial Sequence
  Synthetic
guuuguuguuauaugucac

SEQ ID NO: 16211 - RNA, 20 nt, Artificial Sequence
  Synthetic
guuuuggcacaaacugucac

SEQ ID NO: 16212 - RNA, 22 nt, Artificial Sequence
  Synthetic
guguuuuggcacaaacugucac

SEQ ID NO: 16213 - RNA, 24 nt, Artificial Sequence
  Synthetic
guguguuuuggcacaaacugucac

SEQ ID NO: 16214 - RNA, 20 nt, Artificial Sequence
  Synthetic
guaaccacagguugugucac

SEQ ID NO: 16215 - RNA, 18 nt, Artificial Sequence
  Synthetic
gguuuuguacuuugucac

SEQ ID NO: 16216 - RNA, 19 nt, Artificial Sequence
  Synthetic
ggguuuuguacuuugucac

SEQ ID NO: 16217 - RNA, 23 nt, Artificial Sequence
  Synthetic
gaaaggguuuuguacuuugucac

SEQ ID NO: 16218 - RNA, 18 nt, Artificial Sequence
  Synthetic
ggcauuagauacauucac

SEQ ID NO: 16219 - RNA, 20 nt, Artificial Sequence
  Synthetic
guggcauuagauacauucac

SEQ ID NO: 16220 - RNA, 24 nt, Artificial Sequence
  Synthetic
gcuuaacuggauagugucauucac

SEQ ID NO: 16221 - RNA, 21 nt, Artificial Sequence
  Synthetic
guauuucuccaacuuauucac

SEQ ID NO: 16222 - RNA, 21 nt, Artificial Sequence
  Synthetic
gaucaucccagggcacuucac

SEQ ID NO: 16223 - RNA, 18 nt, Artificial Sequence
  Synthetic
gcuuaaauucagcuucac

SEQ ID NO: 16224 - RNA, 23 nt, Artificial Sequence
  Synthetic
gaccagcuuaaauucagcuucac

SEQ ID NO: 16225 - RNA, 19 nt, Artificial Sequence
  Synthetic
gauuucacuguaucuucac

SEQ ID NO: 16226 - RNA, 22 nt, Artificial Sequence
  Synthetic
gaaacuuuuacuuccucuucac

SEQ ID NO: 16227 - RNA, 19 nt, Artificial Sequence
  Synthetic
gcuuguagcacugguucac

SEQ ID NO: 16228 - RNA, 20 nt, Artificial Sequence
  Synthetic
ggcuuguagcacugguucac

SEQ ID NO: 16229 - RNA, 23 nt, Artificial Sequence
  Synthetic
gcaggcuuguagcacugguucac

SEQ ID NO: 16230 - RNA, 20 nt, Artificial Sequence
  Synthetic
gcuauuuaauggugguucac

SEQ ID NO: 16231 - RNA, 21 nt, Artificial Sequence
  Synthetic
gcaagcaagcaaaccuuucac

SEQ ID NO: 16232 - RNA, 18 nt, Artificial Sequence
  Synthetic
gugcuuacuauguuucac

SEQ ID NO: 16233 - RNA, 23 nt, Artificial Sequence
  Synthetic
gaacucuauguuguuagaaagac

SEQ ID NO: 16234 - RNA, 18 nt, Artificial Sequence
  Synthetic
gaagauaaauuacaagac

SEQ ID NO: 16235 - RNA, 21 nt, Artificial Sequence
  Synthetic
gcagaagauaaauuacaagac

SEQ ID NO: 16236 - RNA, 21 nt, Artificial Sequence
  Synthetic
guggaggacauaggagaagac

SEQ ID NO: 16237 - RNA, 18 nt, Artificial Sequence
  Synthetic
guuuccuuucuugaagac

SEQ ID NO: 16238 - RNA, 19 nt, Artificial Sequence
  Synthetic
gguuuccuuucuugaagac

SEQ ID NO: 16239 - RNA, 22 nt, Artificial Sequence
  Synthetic
gcugguuuccuuucuugaagac

SEQ ID NO: 16240 - RNA, 20 nt, Artificial Sequence
  Synthetic
gcauguacuuuuucuaagac

SEQ ID NO: 16241 - RNA, 22 nt, Artificial Sequence
  Synthetic
gagcauguacuuuuucuaagac

SEQ ID NO: 16242 - RNA, 24 nt, Artificial Sequence
  Synthetic
guuuucagguuauaaccuuaagac

SEQ ID NO: 16243 - RNA, 22 nt, Artificial Sequence
  Synthetic
gaacaagugaagccuuuaagac

SEQ ID NO: 16244 - RNA, 24 nt, Artificial Sequence
  Synthetic
gugaacaagugaagccuuuaagac

SEQ ID NO: 16245 - RNA, 22 nt, Artificial Sequence
  Synthetic
gaaauacuuccuauuuuaagac

SEQ ID NO: 16246 - RNA, 19 nt, Artificial Sequence
  Synthetic
gagaguaucacaaacagac

SEQ ID NO: 16247 - RNA, 24 nt, Artificial Sequence
  Synthetic
gaaaagagaguaucacaaacagac

SEQ ID NO: 16248 - RNA, 21 nt, Artificial Sequence
  Synthetic
gggcuuuaaagucaaacagac

SEQ ID NO: 16249 - RNA, 18 nt, Artificial Sequence
  Synthetic
gaauguuugccaccagac

SEQ ID NO: 16250 - RNA, 24 nt, Artificial Sequence
  Synthetic
guuuaagaauguuugccaccagac

SEQ ID NO: 16251 - RNA, 23 nt, Artificial Sequence
  Synthetic
gacaauuuuuuaaauucccagac

SEQ ID NO: 16252 - RNA, 22 nt, Artificial Sequence
  Synthetic
gaaaagugcuugaggaagagac

SEQ ID NO: 16253 - RNA, 23 nt, Artificial Sequence
  Synthetic
ggaaaagugcuugaggaagagac

SEQ ID NO: 16254 - RNA, 18 nt, Artificial Sequence
  Synthetic
gcugagauuaugagagac

SEQ ID NO: 16255 - RNA, 23 nt, Artificial Sequence
  Synthetic
gaauacugcaucaagugagagac

SEQ ID NO: 16256 - RNA, 24 nt, Artificial Sequence
  Synthetic
ggaauacugcaucaagugagagac

SEQ ID NO: 16257 - RNA, 22 nt, Artificial Sequence
  Synthetic
guucucuuaggaugagggagac

SEQ ID NO: 16258 - RNA, 24 nt, Artificial Sequence
  Synthetic
gaauaauguuuucagguuggagac

SEQ ID NO: 16259 - RNA, 18 nt, Artificial Sequence
  Synthetic
gugcuggggaagugagac

SEQ ID NO: 16260 - RNA, 19 nt, Artificial Sequence
  Synthetic
ggugcuggggaagugagac

SEQ ID NO: 16261 - RNA, 21 nt, Artificial Sequence
  Synthetic
guggugcuggggaagugagac

SEQ ID NO: 16262 - RNA, 22 nt, Artificial Sequence
  Synthetic
gguggugcuggggaagugagac

SEQ ID NO: 16263 - RNA, 24 nt, Artificial Sequence
  Synthetic
gugguggugcuggggaagugagac

SEQ ID NO: 16264 - RNA, 22 nt, Artificial Sequence
  Synthetic
guaacagguuauuaaaauagac

SEQ ID NO: 16265 - RNA, 23 nt, Artificial Sequence
  Synthetic
gguaacagguuauuaaaauagac

SEQ ID NO: 16266 - RNA, 23 nt, Artificial Sequence
  Synthetic
guuuauuuuaaaugaauauagac

SEQ ID NO: 16267 - RNA, 18 nt, Artificial Sequence
  Synthetic
gggaagaacuuuauagac

SEQ ID NO: 16268 - RNA, 23 nt, Artificial Sequence
  Synthetic
gaacagggaagaacuuuauagac

SEQ ID NO: 16269 - RNA, 19 nt, Artificial Sequence
  Synthetic
gucaaguuauguauuagac

SEQ ID NO: 16270 - RNA, 20 nt, Artificial Sequence
  Synthetic
ggucaaguuauguauuagac

SEQ ID NO: 16271 - RNA, 18 nt, Artificial Sequence
  Synthetic
gacuaccccaaguuagac

SEQ ID NO: 16272 - RNA, 24 nt, Artificial Sequence
  Synthetic
gucucugacuaccccaaguuagac

SEQ ID NO: 16273 - RNA, 18 nt, Artificial Sequence
  Synthetic
guacuaugugucaucgac

SEQ ID NO: 16274 - RNA, 19 nt, Artificial Sequence
  Synthetic
gguacuaugugucaucgac

SEQ ID NO: 16275 - RNA, 23 nt, Artificial Sequence
  Synthetic
guucgguacuaugugucaucgac

SEQ ID NO: 16276 - RNA, 24 nt, Artificial Sequence
  Synthetic
gguucgguacuaugugucaucgac

SEQ ID NO: 16277 - RNA, 22 nt, Artificial Sequence
  Synthetic
guaucgacacacagcaaaggac

SEQ ID NO: 16278 - RNA, 22 nt, Artificial Sequence
  Synthetic
gagagcucagaaugagaaggac

SEQ ID NO: 16279 - RNA, 23 nt, Artificial Sequence
  Synthetic
ggagagcucagaaugagaaggac

SEQ ID NO: 16280 - RNA, 18 nt, Artificial Sequence
  Synthetic
gcuuuauuuuaagaggac

SEQ ID NO: 16281 - RNA, 19 nt, Artificial Sequence
  Synthetic
ggcuuuauuuuaagaggac

SEQ ID NO: 16282 - RNA, 22 nt, Artificial Sequence
  Synthetic
gcuggcuuuauuuuaagaggac

SEQ ID NO: 16283 - RNA, 23 nt, Artificial Sequence
  Synthetic
gccugggcuaagagcuagaggac

SEQ ID NO: 16284 - RNA, 23 nt, Artificial Sequence
  Synthetic
gauuucuguguuuuggggaggac

SEQ ID NO: 16285 - RNA, 23 nt, Artificial Sequence
  Synthetic
gaaaacagggccuggaugaggac

SEQ ID NO: 16286 - RNA, 19 nt, Artificial Sequence
  Synthetic
gugggaaaaaugaagggac

SEQ ID NO: 16287 - RNA, 21 nt, Artificial Sequence
  Synthetic
gacuccccuuuuuccagggac

SEQ ID NO: 16288 - RNA, 24 nt, Artificial Sequence
  Synthetic
gaugacuccccuuuuuccagggac

SEQ ID NO: 16289 - RNA, 20 nt, Artificial Sequence
  Synthetic
gccauucauuccaaggggac

SEQ ID NO: 16290 - RNA, 19 nt, Artificial Sequence
  Synthetic
gcuuaggaaucaaauggac

SEQ ID NO: 16291 - RNA, 24 nt, Artificial Sequence
  Synthetic
gccaccugauggacgaugauggac

SEQ ID NO: 16292 - RNA, 22 nt, Artificial Sequence
  Synthetic
gauuccuaucuuucuccuggac

SEQ ID NO: 16293 - RNA, 23 nt, Artificial Sequence
  Synthetic
ggauuccuaucuuucuccuggac

SEQ ID NO: 16294 - RNA, 21 nt, Artificial Sequence
  Synthetic
guuuuuaaaauauaucuggac

SEQ ID NO: 16295 - RNA, 18 nt, Artificial Sequence
  Synthetic
gguaccaggaaaaaugac

SEQ ID NO: 16296 - RNA, 23 nt, Artificial Sequence
  Synthetic
gcaaugguaccaggaaaaaugac

SEQ ID NO: 16297 - RNA, 24 nt, Artificial Sequence
  Synthetic
ggcaaugguaccaggaaaaaugac

SEQ ID NO: 16298 - RNA, 19 nt, Artificial Sequence
  Synthetic
gcuccaccucuaaaaugac

SEQ ID NO: 16299 - RNA, 20 nt, Artificial Sequence
  Synthetic
gcagaacuuucuagaaugac

SEQ ID NO: 16300 - RNA, 18 nt, Artificial Sequence
  Synthetic
guuaauagaaauaaugac

SEQ ID NO: 16301 - RNA, 19 nt, Artificial Sequence
  Synthetic
gucucauguuggagaugac

SEQ ID NO: 16302 - RNA, 23 nt, Artificial Sequence
  Synthetic
gaaagucucauguuggagaugac

SEQ ID NO: 16303 - RNA, 19 nt, Artificial Sequence
  Synthetic
gcuauuuaugaaauaugac

SEQ ID NO: 16304 - RNA, 20 nt, Artificial Sequence
  Synthetic
ggcuauuuaugaaauaugac

SEQ ID NO: 16305 - RNA, 22 nt, Artificial Sequence
  Synthetic
gauaaacacagagaccuaugac

SEQ ID NO: 16306 - RNA, 24 nt, Artificial Sequence
  Synthetic
gagauaaacacagagaccuaugac

SEQ ID NO: 16307 - RNA, 20 nt, Artificial Sequence
  Synthetic
gccaacaaaaguaguaugac

SEQ ID NO: 16308 - RNA, 20 nt, Artificial Sequence
  Synthetic
gaagaaagagaucuuaugac

SEQ ID NO: 16309 - RNA, 23 nt, Artificial Sequence
  Synthetic
gaagaagaaagagaucuuaugac

SEQ ID NO: 16310 - RNA, 24 nt, Artificial Sequence
  Synthetic
ggaagaagaaagagaucuuaugac

SEQ ID NO: 16311 - RNA, 19 nt, Artificial Sequence
  Synthetic
gaaacagugccacacugac

SEQ ID NO: 16312 - RNA, 19 nt, Artificial Sequence
  Synthetic
gauaauuuuacagacugac

SEQ ID NO: 16313 - RNA, 18 nt, Artificial Sequence
  Synthetic
gguugaugauagccugac

SEQ ID NO: 16314 - RNA, 19 nt, Artificial Sequence
  Synthetic
ggguugaugauagccugac

SEQ ID NO: 16315 - RNA, 23 nt, Artificial Sequence
  Synthetic
gcuuggguugaugauagccugac

SEQ ID NO: 16316 - RNA, 19 nt, Artificial Sequence
  Synthetic
gcacuaggggucagcugac

SEQ ID NO: 16317 - RNA, 22 nt, Artificial Sequence
  Synthetic
gaagcacuaggggucagcugac

SEQ ID NO: 16318 - RNA, 21 nt, Artificial Sequence
  Synthetic
gaacacacagaugaaucugac

SEQ ID NO: 16319 - RNA, 22 nt, Artificial Sequence
  Synthetic
ggaacacacagaugaaucugac

SEQ ID NO: 16320 - RNA, 23 nt, Artificial Sequence
  Synthetic
gggaacacacagaugaaucugac

SEQ ID NO: 16321 - RNA, 19 nt, Artificial Sequence
  Synthetic
gcaccuacacuuuucugac

SEQ ID NO: 16322 - RNA, 22 nt, Artificial Sequence
  Synthetic
gcccaccuugcaucagcgugac

SEQ ID NO: 16323 - RNA, 24 nt, Artificial Sequence
  Synthetic
gagcccaccuugcaucagcgugac

SEQ ID NO: 16324 - RNA, 21 nt, Artificial Sequence
  Synthetic
ggccaaguccuugaaggugac

SEQ ID NO: 16325 - RNA, 24 nt, Artificial Sequence
  Synthetic
gauggccaaguccuugaaggugac

SEQ ID NO: 16326 - RNA, 22 nt, Artificial Sequence
  Synthetic
gccaugggcaugcauaauugac

SEQ ID NO: 16327 - RNA, 24 nt, Artificial Sequence
  Synthetic
gagccaugggcaugcauaauugac

SEQ ID NO: 16328 - RNA, 21 nt, Artificial Sequence
  Synthetic
gcaaagauaacuucucuugac

SEQ ID NO: 16329 - RNA, 23 nt, Artificial Sequence
  Synthetic
gagcaaagauaacuucucuugac

SEQ ID NO: 16330 - RNA, 24 nt, Artificial Sequence
  Synthetic
guucucagaaaacaggggguugac

SEQ ID NO: 16331 - RNA, 20 nt, Artificial Sequence
  Synthetic
gacgcuuuucaaauuuugac

SEQ ID NO: 16332 - RNA, 24 nt, Artificial Sequence
  Synthetic
gaucgacgcuuuucaaauuuugac

SEQ ID NO: 16333 - RNA, 21 nt, Artificial Sequence
  Synthetic
gucugguaaaccuguuuugac

SEQ ID NO: 16334 - RNA, 20 nt, Artificial Sequence
  Synthetic
gaacacauuugcaaaaauac

SEQ ID NO: 16335 - RNA, 24 nt, Artificial Sequence
  Synthetic
gaucgaacacauuugcaaaaauac

SEQ ID NO: 16336 - RNA, 18 nt, Artificial Sequence
  Synthetic
gcguuugaaccaaaauac

SEQ ID NO: 16337 - RNA, 19 nt, Artificial Sequence
  Synthetic
ggcguuugaaccaaaauac

SEQ ID NO: 16338 - RNA, 22 nt, Artificial Sequence
  Synthetic
gaaggcguuugaaccaaaauac

SEQ ID NO: 16339 - RNA, 23 nt, Artificial Sequence
  Synthetic
ggaaggcguuugaaccaaaauac

SEQ ID NO: 16340 - RNA, 24 nt, Artificial Sequence
  Synthetic
gggaaggcguuugaaccaaaauac

SEQ ID NO: 16341 - RNA, 18 nt, Artificial Sequence
  Synthetic
gcauccguuuuaaaauac

SEQ ID NO: 16342 - RNA, 23 nt, Artificial Sequence
  Synthetic
gcuaagcauccguuuuaaaauac

SEQ ID NO: 16343 - RNA, 18 nt, Artificial Sequence
  Synthetic
gagacugauagcaaauac

SEQ ID NO: 16344 - RNA, 19 nt, Artificial Sequence
  Synthetic
ggagacugauagcaaauac

SEQ ID NO: 16345 - RNA, 21 nt, Artificial Sequence
  Synthetic
gacccagugagaagggaauac

SEQ ID NO: 16346 - RNA, 22 nt, Artificial Sequence
  Synthetic
guuaagaguucuuaaauaauac

SEQ ID NO: 16347 - RNA, 24 nt, Artificial Sequence
  Synthetic
gcuauuaucuaauucuccuaauac

SEQ ID NO: 16348 - RNA, 19 nt, Artificial Sequence
  Synthetic
gaauuuauauuauuaauac

SEQ ID NO: 16349 - RNA, 23 nt, Artificial Sequence
  Synthetic
gcaagaauuuauauuauuaauac

SEQ ID NO: 16350 - RNA, 22 nt, Artificial Sequence
  Synthetic
gcacauagacuauucuuaauac

SEQ ID NO: 16351 - RNA, 24 nt, Artificial Sequence
  Synthetic
gcaccaccucucuccccaacauac

SEQ ID NO: 16352 - RNA, 18 nt, Artificial Sequence
  Synthetic
guaguugcaaacacauac

SEQ ID NO: 16353 - RNA, 21 nt, Artificial Sequence
  Synthetic
guaguaguugcaaacacauac

SEQ ID NO: 16354 - RNA, 23 nt, Artificial Sequence
  Synthetic
gaguaguaguugcaaacacauac

SEQ ID NO: 16355 - RNA, 19 nt, Artificial Sequence
  Synthetic
guguaaaaugcagacauac

SEQ ID NO: 16356 - RNA, 21 nt, Artificial Sequence
  Synthetic
gcacaaacuuauaauacauac

SEQ ID NO: 16357 - RNA, 21 nt, Artificial Sequence
  Synthetic
gcuagucagugauacagauac

SEQ ID NO: 16358 - RNA, 22 nt, Artificial Sequence
  Synthetic
ggcuagucagugauacagauac

SEQ ID NO: 16359 - RNA, 18 nt, Artificial Sequence
  Synthetic
gaaaauaaccagagauac

SEQ ID NO: 16360 - RNA, 24 nt, Artificial Sequence
  Synthetic
gacaaagaaaauaaccagagauac

SEQ ID NO: 16361 - RNA, 18 nt, Artificial Sequence
  Synthetic
guguguggagugagauac

SEQ ID NO: 16362 - RNA, 19 nt, Artificial Sequence
  Synthetic
gguguguggagugagauac

SEQ ID NO: 16363 - RNA, 20 nt, Artificial Sequence
  Synthetic
ggguguguggagugagauac

SEQ ID NO: 16364 - RNA, 22 nt, Artificial Sequence
  Synthetic
gucuacauaggugcauagauac

SEQ ID NO: 16365 - RNA, 19 nt, Artificial Sequence
  Synthetic
gccaagucuucauagauac

SEQ ID NO: 16366 - RNA, 24 nt, Artificial Sequence
  Synthetic
guacccuaaaaucaugcuagauac

SEQ ID NO: 16367 - RNA, 23 nt, Artificial Sequence
  Synthetic
gcaaauauccauuuaaaauauac

SEQ ID NO: 16368 - RNA, 24 nt, Artificial Sequence
  Synthetic
gucaaagaauacuuaauaauauac

SEQ ID NO: 16369 - RNA, 22 nt, Artificial Sequence
  Synthetic
guauuggcacauauaccuauac

SEQ ID NO: 16370 - RNA, 23 nt, Artificial Sequence
  Synthetic
guuacuaaucugacucauuauac

SEQ ID NO: 16371 - RNA, 21 nt, Artificial Sequence
  Synthetic
gaaucugugggaaaguuauac

SEQ ID NO: 16372 - RNA, 23 nt, Artificial Sequence
  Synthetic
gugaaucugugggaaaguuauac

SEQ ID NO: 16373 - RNA, 19 nt, Artificial Sequence
  Synthetic
guuuuauuccaaguuauac

SEQ ID NO: 16374 - RNA, 20 nt, Artificial Sequence
  Synthetic
gguuuuauuccaaguuauac

SEQ ID NO: 16375 - RNA, 22 nt, Artificial Sequence
  Synthetic
gaaaaacugauuccauuuauac

SEQ ID NO: 16376 - RNA, 20 nt, Artificial Sequence
  Synthetic
gacuagagaaaacaaacuac

SEQ ID NO: 16377 - RNA, 24 nt, Artificial Sequence
  Synthetic
guuugacuagagaaaacaaacuac

SEQ ID NO: 16378 - RNA, 21 nt, Artificial Sequence
  Synthetic
gccaaugaauuuucaaacuac

SEQ ID NO: 16379 - RNA, 24 nt, Artificial Sequence
  Synthetic
gaugccaaugaauuuucaaacuac

SEQ ID NO: 16380 - RNA, 19 nt, Artificial Sequence
  Synthetic
gcgcuuagauguaaacuac

SEQ ID NO: 16381 - RNA, 23 nt, Artificial Sequence
  Synthetic
gaaagcgcuuagauguaaacuac

SEQ ID NO: 16382 - RNA, 24 nt, Artificial Sequence
  Synthetic
ggaaagcgcuuagauguaaacuac

SEQ ID NO: 16383 - RNA, 18 nt, Artificial Sequence
  Synthetic
gaacaguuccaacacuac

SEQ ID NO: 16384 - RNA, 18 nt, Artificial Sequence
  Synthetic
gcaauagcaaaauacuac

SEQ ID NO: 16385 - RNA, 18 nt, Artificial Sequence
  Synthetic
guuccaugacacuacuac

SEQ ID NO: 16386 - RNA, 19 nt, Artificial Sequence
  Synthetic
gguuccaugacacuacuac

SEQ ID NO: 16387 - RNA, 22 nt, Artificial Sequence
  Synthetic
gaugguuccaugacacuacuac

SEQ ID NO: 16388 - RNA, 24 nt, Artificial Sequence
  Synthetic
gugaugguuccaugacacuacuac

SEQ ID NO: 16389 - RNA, 24 nt, Artificial Sequence
  Synthetic
gccuacugcugugaaauuuacuac

SEQ ID NO: 16390 - RNA, 19 nt, Artificial Sequence
  Synthetic
gcuuacuaccccuuccuac

SEQ ID NO: 16391 - RNA, 22 nt, Artificial Sequence
  Synthetic
guacacaauucuagguuccuac

SEQ ID NO: 16392 - RNA, 19 nt, Artificial Sequence
  Synthetic
guucucccacuuuuccuac

SEQ ID NO: 16393 - RNA, 21 nt, Artificial Sequence
  Synthetic
gaacuguaguggagaagcuac

SEQ ID NO: 16394 - RNA, 23 nt, Artificial Sequence
  Synthetic
gaacccucccaccuuacagcuac

SEQ ID NO: 16395 - RNA, 21 nt, Artificial Sequence
  Synthetic
guauuacuguuuaaaaucuac

SEQ ID NO: 16396 - RNA, 22 nt, Artificial Sequence
  Synthetic
gguauuacuguuuaaaaucuac

SEQ ID NO: 16397 - RNA, 20 nt, Artificial Sequence
  Synthetic
gcauuaacauugcaaucuac

SEQ ID NO: 16398 - RNA, 18 nt, Artificial Sequence
  Synthetic
gccugugaggucaucuac

SEQ ID NO: 16399 - RNA, 21 nt, Artificial Sequence
  Synthetic
gaagccugugaggucaucuac

SEQ ID NO: 16400 - RNA, 22 nt, Artificial Sequence
  Synthetic
ggaagccugugaggucaucuac

SEQ ID NO: 16401 - RNA, 24 nt, Artificial Sequence
  Synthetic
gaggaagccugugaggucaucuac

SEQ ID NO: 16402 - RNA, 19 nt, Artificial Sequence
  Synthetic
gauuuucucugagaucuac

SEQ ID NO: 16403 - RNA, 20 nt, Artificial Sequence
  Synthetic
ggauuuucucugagaucuac

SEQ ID NO: 16404 - RNA, 21 nt, Artificial Sequence
  Synthetic
gcauauaauccagaacucuac

SEQ ID NO: 16405 - RNA, 23 nt, Artificial Sequence
  Synthetic
gugcauauaauccagaacucuac

SEQ ID NO: 16406 - RNA, 24 nt, Artificial Sequence
  Synthetic
ggugcauauaauccagaacucuac

SEQ ID NO: 16407 - RNA, 21 nt, Artificial Sequence
  Synthetic
gaaauacaccuucuccucuac

SEQ ID NO: 16408 - RNA, 24 nt, Artificial Sequence
  Synthetic
gacauauauauucucccugucuac

SEQ ID NO: 16409 - RNA, 19 nt, Artificial Sequence
  Synthetic
gauaauggaucgugucuac

SEQ ID NO: 16410 - RNA, 23 nt, Artificial Sequence
  Synthetic
gcaugauaauggaucgugucuac

SEQ ID NO: 16411 - RNA, 20 nt, Artificial Sequence
  Synthetic
guagaaaauggcaauucuac

SEQ ID NO: 16412 - RNA, 18 nt, Artificial Sequence
  Synthetic
guuuugaacuuauucuac

SEQ ID NO: 16413 - RNA, 20 nt, Artificial Sequence
  Synthetic
gaguuuugaacuuauucuac

SEQ ID NO: 16414 - RNA, 21 nt, Artificial Sequence
  Synthetic
ggaguuuugaacuuauucuac

SEQ ID NO: 16415 - RNA, 23 nt, Artificial Sequence
  Synthetic
gaaaaaaguccuuaaacuucuac

SEQ ID NO: 16416 - RNA, 20 nt, Artificial Sequence
  Synthetic
guaccaacuuaaauuucuac

SEQ ID NO: 16417 - RNA, 23 nt, Artificial Sequence
  Synthetic
guuguaccaacuuaaauuucuac

SEQ ID NO: 16418 - RNA, 24 nt, Artificial Sequence
  Synthetic
gguuguaccaacuuaaauuucuac

SEQ ID NO: 16419 - RNA, 18 nt, Artificial Sequence
  Synthetic
guaaaaucaaagcaguac

SEQ ID NO: 16420 - RNA, 19 nt, Artificial Sequence
  Synthetic
gguaaaaucaaagcaguac

SEQ ID NO: 16421 - RNA, 22 nt, Artificial Sequence
  Synthetic
gaagguaaaaucaaagcaguac

SEQ ID NO: 16422 - RNA, 21 nt, Artificial Sequence
  Synthetic
gccuccugccgcuaucaguac

SEQ ID NO: 16423 - RNA, 20 nt, Artificial Sequence
  Synthetic
guuaucaacuaccagaguac

SEQ ID NO: 16424 - RNA, 18 nt, Artificial Sequence
  Synthetic
ggugcugccucagaguac

SEQ ID NO: 16425 - RNA, 23 nt, Artificial Sequence
  Synthetic
gcuauggugcugccucagaguac

SEQ ID NO: 16426 - RNA, 24 nt, Artificial Sequence
  Synthetic
ggcuauggugcugccucagaguac

SEQ ID NO: 16427 - RNA, 18 nt, Artificial Sequence
  Synthetic
gguuaagaugcauaguac

SEQ ID NO: 16428 - RNA, 23 nt, Artificial Sequence
  Synthetic
guaaugguuaagaugcauaguac

SEQ ID NO: 16429 - RNA, 24 nt, Artificial Sequence
  Synthetic
gguaaugguuaagaugcauaguac

SEQ ID NO: 16430 - RNA, 18 nt, Artificial Sequence
  Synthetic
guucgaccugguuaguac

SEQ ID NO: 16431 - RNA, 19 nt, Artificial Sequence
  Synthetic
gguucgaccugguuaguac

SEQ ID NO: 16432 - RNA, 21 nt, Artificial Sequence
  Synthetic
gagguucgaccugguuaguac

SEQ ID NO: 16433 - RNA, 23 nt, Artificial Sequence
  Synthetic
gugagguucgaccugguuaguac

SEQ ID NO: 16434 - RNA, 19 nt, Artificial Sequence
  Synthetic
gugaggugugauuuaguac

SEQ ID NO: 16435 - RNA, 22 nt, Artificial Sequence
  Synthetic
gaagugaggugugauuuaguac

SEQ ID NO: 16436 - RNA, 21 nt, Artificial Sequence
  Synthetic
guccauauacauaccagguac

SEQ ID NO: 16437 - RNA, 24 nt, Artificial Sequence
  Synthetic
gucuauaguuaaacuuauagguac

SEQ ID NO: 16438 - RNA, 21 nt, Artificial Sequence
  Synthetic
guuuguuaaaaugaaggguac

SEQ ID NO: 16439 - RNA, 20 nt, Artificial Sequence
  Synthetic
gaaagucaacuaacggguac

SEQ ID NO: 16440 - RNA, 21 nt, Artificial Sequence
  Synthetic
ggaaagucaacuaacggguac

SEQ ID NO: 16441 - RNA, 19 nt, Artificial Sequence
  Synthetic
gucuguauuuucaguguac

SEQ ID NO: 16442 - RNA, 20 nt, Artificial Sequence
  Synthetic
ggucuguauuuucaguguac

SEQ ID NO: 16443 - RNA, 18 nt, Artificial Sequence
  Synthetic
gucuccuaggaauuguac

SEQ ID NO: 16444 - RNA, 19 nt, Artificial Sequence
  Synthetic
ggucuccuaggaauuguac

SEQ ID NO: 16445 - RNA, 18 nt, Artificial Sequence
  Synthetic
gagaugaugagauuguac

SEQ ID NO: 16446 - RNA, 22 nt, Artificial Sequence
  Synthetic
gaaagagaugaugagauuguac

SEQ ID NO: 16447 - RNA, 23 nt, Artificial Sequence
  Synthetic
ggaaagagaugaugagauuguac

SEQ ID NO: 16448 - RNA, 24 nt, Artificial Sequence
  Synthetic
gaucauaggauuaaaaaaaauuac

SEQ ID NO: 16449 - RNA, 18 nt, Artificial Sequence
  Synthetic
gguaugacaugaaauuac

SEQ ID NO: 16450 - RNA, 21 nt, Artificial Sequence
  Synthetic
gauuuccaucaauauaauuac

SEQ ID NO: 16451 - RNA, 20 nt, Artificial Sequence
  Synthetic
gcuuucguacuuuuaauuac

SEQ ID NO: 16452 - RNA, 20 nt, Artificial Sequence
  Synthetic
gcuuugcuucaucagauuac

SEQ ID NO: 16453 - RNA, 21 nt, Artificial Sequence
  Synthetic
gauauauacauacaauauuac

SEQ ID NO: 16454 - RNA, 18 nt, Artificial Sequence
  Synthetic
gauaggccuauauauuac

SEQ ID NO: 16455 - RNA, 23 nt, Artificial Sequence
  Synthetic
gcuaugauaggccuauauauuac

SEQ ID NO: 16456 - RNA, 24 nt, Artificial Sequence
  Synthetic
ggcuaugauaggccuauauauuac

SEQ ID NO: 16457 - RNA, 18 nt, Artificial Sequence
  Synthetic
guggaaagacauuauuac

SEQ ID NO: 16458 - RNA, 24 nt, Artificial Sequence
  Synthetic
gcuuaaguggaaagacauuauuac

SEQ ID NO: 16459 - RNA, 20 nt, Artificial Sequence
  Synthetic
gacacaaauuauauuauuac

SEQ ID NO: 16460 - RNA, 20 nt, Artificial Sequence
  Synthetic
guaaauuugcuuaaacuuac

SEQ ID NO: 16461 - RNA, 21 nt, Artificial Sequence
  Synthetic
gguaaauuugcuuaaacuuac

SEQ ID NO: 16462 - RNA, 18 nt, Artificial Sequence
  Synthetic
gucuuagcuaacacuuac

SEQ ID NO: 16463 - RNA, 19 nt, Artificial Sequence
  Synthetic
gaacagcugauacacuuac

SEQ ID NO: 16464 - RNA, 23 nt, Artificial Sequence
  Synthetic
gaaugaacagcugauacacuuac

SEQ ID NO: 16465 - RNA, 24 nt, Artificial Sequence
  Synthetic
ggaaugaacagcugauacacuuac

SEQ ID NO: 16466 - RNA, 20 nt, Artificial Sequence
  Synthetic
gauaaaugaacgugccuuac

SEQ ID NO: 16467 - RNA, 21 nt, Artificial Sequence
  Synthetic
gcuagugaaagguuagcuuac

SEQ ID NO: 16468 - RNA, 18 nt, Artificial Sequence
  Synthetic
gaccagugaacaaguuac

SEQ ID NO: 16469 - RNA, 22 nt, Artificial Sequence
  Synthetic
gaaagaccagugaacaaguuac

SEQ ID NO: 16470 - RNA, 23 nt, Artificial Sequence
  Synthetic
gaaaaauguagcacugcaguuac

SEQ ID NO: 16471 - RNA, 20 nt, Artificial Sequence
  Synthetic
gucaaacagacauggguuac

SEQ ID NO: 16472 - RNA, 18 nt, Artificial Sequence
  Synthetic
gucugaugcugauguuac

SEQ ID NO: 16473 - RNA, 19 nt, Artificial Sequence
  Synthetic
ggucugaugcugauguuac

SEQ ID NO: 16474 - RNA, 21 nt, Artificial Sequence
  Synthetic
gaggucugaugcugauguuac

SEQ ID NO: 16475 - RNA, 24 nt, Artificial Sequence
  Synthetic
gcagaggucugaugcugauguuac

SEQ ID NO: 16476 - RNA, 18 nt, Artificial Sequence
  Synthetic
ggaugaaacuuauguuac

SEQ ID NO: 16477 - RNA, 24 nt, Artificial Sequence
  Synthetic
gaaccaggaugaaacuuauguuac

SEQ ID NO: 16478 - RNA, 22 nt, Artificial Sequence
  Synthetic
gaucacaauauauguuuguuac

SEQ ID NO: 16479 - RNA, 23 nt, Artificial Sequence
  Synthetic
ggaucacaauauauguuuguuac

SEQ ID NO: 16480 - RNA, 19 nt, Artificial Sequence
  Synthetic
gcacucuuugugacuuuac

SEQ ID NO: 16481 - RNA, 19 nt, Artificial Sequence
  Synthetic
gacaauggugcuucuuuac

SEQ ID NO: 16482 - RNA, 22 nt, Artificial Sequence
  Synthetic
guugacaauggugcuucuuuac

SEQ ID NO: 16483 - RNA, 22 nt, Artificial Sequence
  Synthetic
guuucaguaaggagaauuuuac

SEQ ID NO: 16484 - RNA, 24 nt, Artificial Sequence
  Synthetic
gcuccuaugggcauauaauuuuac

SEQ ID NO: 16485 - RNA, 20 nt, Artificial Sequence
  Synthetic
gacuuuacagauuauuuuac

SEQ ID NO: 16486 - RNA, 23 nt, Artificial Sequence
  Synthetic
gaugacuuuacagauuauuuuac

SEQ ID NO: 16487 - RNA, 24 nt, Artificial Sequence
  Synthetic
ggaugacuuuacagauuauuuuac

SEQ ID NO: 16488 - RNA, 20 nt, Artificial Sequence
  Synthetic
gcccgaaugcacccuuuuac

SEQ ID NO: 16489 - RNA, 21 nt, Artificial Sequence
  Synthetic
ggcccgaaugcacccuuuuac

SEQ ID NO: 16490 - RNA, 22 nt, Artificial Sequence
  Synthetic
gggcccgaaugcacccuuuuac

SEQ ID NO: 16491 - RNA, 18 nt, Artificial Sequence
  Synthetic
gccaugagauuuaaaacc

SEQ ID NO: 16492 - RNA, 18 nt, Artificial Sequence
  Synthetic
gucaagaaaauacaaacc

SEQ ID NO: 16493 - RNA, 21 nt, Artificial Sequence
  Synthetic
guccaucaauuucagcaaacc

SEQ ID NO: 16494 - RNA, 19 nt, Artificial Sequence
  Synthetic
gauccacaaaaugcaaacc

SEQ ID NO: 16495 - RNA, 24 nt, Artificial Sequence
  Synthetic
gucuagauccacaaaaugcaaacc

SEQ ID NO: 16496 - RNA, 22 nt, Artificial Sequence
  Synthetic
gauaaacucuuucuugcaaacc

SEQ ID NO: 16497 - RNA, 24 nt, Artificial Sequence
  Synthetic
gugauaaacucuuucuugcaaacc

SEQ ID NO: 16498 - RNA, 19 nt, Artificial Sequence
  Synthetic
gaguccucaucaagaaacc

SEQ ID NO: 16499 - RNA, 19 nt, Artificial Sequence
  Synthetic
gucacaugucccugaaacc

SEQ ID NO: 16500 - RNA, 24 nt, Artificial Sequence
  Synthetic
gaauagucacaugucccugaaacc

SEQ ID NO: 16501 - RNA, 19 nt, Artificial Sequence
  Synthetic
guuaucucacacauaaacc

SEQ ID NO: 16502 - RNA, 18 nt, Artificial Sequence
  Synthetic
guuuuuuuaugaacaacc

SEQ ID NO: 16503 - RNA, 18 nt, Artificial Sequence
  Synthetic
gcccccaaugugacaacc

SEQ ID NO: 16504 - RNA, 18 nt, Artificial Sequence
  Synthetic
gaaugagaaauaucaacc

SEQ ID NO: 16505 - RNA, 21 nt, Artificial Sequence
  Synthetic
gaacagguuaugaacucaacc

SEQ ID NO: 16506 - RNA, 22 nt, Artificial Sequence
  Synthetic
ggaacagguuaugaacucaacc

SEQ ID NO: 16507 - RNA, 23 nt, Artificial Sequence
  Synthetic
gggaacagguuaugaacucaacc

SEQ ID NO: 16508 - RNA, 20 nt, Artificial Sequence
  Synthetic
guuaguuguaacucagaacc

SEQ ID NO: 16509 - RNA, 24 nt, Artificial Sequence
  Synthetic
gacuaaugauugcaaagaggaacc

SEQ ID NO: 16510 - RNA, 18 nt, Artificial Sequence
  Synthetic
gguaaaaauugaggaacc

SEQ ID NO: 16511 - RNA, 19 nt, Artificial Sequence
  Synthetic
ggguaaaaauugaggaacc

SEQ ID NO: 16512 - RNA, 18 nt, Artificial Sequence
  Synthetic
gaaaaguuugcaugaacc

SEQ ID NO: 16513 - RNA, 21 nt, Artificial Sequence
  Synthetic
guugaaaaguuugcaugaacc

SEQ ID NO: 16514 - RNA, 20 nt, Artificial Sequence
  Synthetic
guuagucuuggguuauaacc

SEQ ID NO: 16515 - RNA, 23 nt, Artificial Sequence
  Synthetic
gcaguuagucuuggguuauaacc

SEQ ID NO: 16516 - RNA, 22 nt, Artificial Sequence
  Synthetic
gacuuuuuaguaauuuauaacc

SEQ ID NO: 16517 - RNA, 24 nt, Artificial Sequence
  Synthetic
gagacuuuuuaguaauuuauaacc

SEQ ID NO: 16518 - RNA, 20 nt, Artificial Sequence
  Synthetic
gcugucuaauagaucuaacc

SEQ ID NO: 16519 - RNA, 18 nt, Artificial Sequence
  Synthetic
gccuggccauaaaacacc

SEQ ID NO: 16520 - RNA, 19 nt, Artificial Sequence
  Synthetic
ggccuggccauaaaacacc

SEQ ID NO: 16521 - RNA, 20 nt, Artificial Sequence
  Synthetic
gaaaucugcuucauaacacc

SEQ ID NO: 16522 - RNA, 21 nt, Artificial Sequence
  Synthetic
ggaaaucugcuucauaacacc

SEQ ID NO: 16523 - RNA, 23 nt, Artificial Sequence
  Synthetic
guggaaaucugcuucauaacacc

SEQ ID NO: 16524 - RNA, 21 nt, Artificial Sequence
  Synthetic
gauuuggucagaacucacacc

SEQ ID NO: 16525 - RNA, 22 nt, Artificial Sequence
  Synthetic
ggauuuggucagaacucacacc

SEQ ID NO: 16526 - RNA, 21 nt, Artificial Sequence
  Synthetic
guaauauucugcccgcccacc

SEQ ID NO: 16527 - RNA, 22 nt, Artificial Sequence
  Synthetic
gguaauauucugcccgcccacc

SEQ ID NO: 16528 - RNA, 19 nt, Artificial Sequence
  Synthetic
gaaacuaaagcaagccacc

SEQ ID NO: 16529 - RNA, 20 nt, Artificial Sequence
  Synthetic
ggaaacuaaagcaagccacc

SEQ ID NO: 16530 - RNA, 23 nt, Artificial Sequence
  Synthetic
guaggaaacuaaagcaagccacc

SEQ ID NO: 16531 - RNA, 21 nt, Artificial Sequence
  Synthetic
gucuuccuuuaggaagccacc

SEQ ID NO: 16532 - RNA, 18 nt, Artificial Sequence
  Synthetic
gccaccuacagggccacc

SEQ ID NO: 16533 - RNA, 22 nt, Artificial Sequence
  Synthetic
gacagccaccuacagggccacc

SEQ ID NO: 16534 - RNA, 23 nt, Artificial Sequence
  Synthetic
ggacagccaccuacagggccacc

SEQ ID NO: 16535 - RNA, 20 nt, Artificial Sequence
  Synthetic
guagaccagguccguccacc

SEQ ID NO: 16536 - RNA, 22 nt, Artificial Sequence
  Synthetic
gaguagaccagguccguccacc

SEQ ID NO: 16537 - RNA, 20 nt, Artificial Sequence
  Synthetic
gauuuguauguuuaagcacc

SEQ ID NO: 16538 - RNA, 21 nt, Artificial Sequence
  Synthetic
ggauuuguauguuuaagcacc

SEQ ID NO: 16539 - RNA, 22 nt, Artificial Sequence
  Synthetic
gggauuuguauguuuaagcacc

SEQ ID NO: 16540 - RNA, 23 nt, Artificial Sequence
  Synthetic
ggggauuuguauguuuaagcacc

SEQ ID NO: 16541 - RNA, 21 nt, Artificial Sequence
  Synthetic
guucccugaaaaugcagcacc

SEQ ID NO: 16542 - RNA, 23 nt, Artificial Sequence
  Synthetic
gauaacacuugcacagaaucacc

SEQ ID NO: 16543 - RNA, 21 nt, Artificial Sequence
  Synthetic
gaauuucaaaaugacaucacc

SEQ ID NO: 16544 - RNA, 19 nt, Artificial Sequence
  Synthetic
gugucuaucauuuuucacc

SEQ ID NO: 16545 - RNA, 18 nt, Artificial Sequence
  Synthetic
gggagcuuauacaagacc

SEQ ID NO: 16546 - RNA, 19 nt, Artificial Sequence
  Synthetic
ggggagcuuauacaagacc

SEQ ID NO: 16547 - RNA, 23 nt, Artificial Sequence
  Synthetic
gucguagagguagaaagaagacc

SEQ ID NO: 16548 - RNA, 18 nt, Artificial Sequence
  Synthetic
guccgagucaaucagacc

SEQ ID NO: 16549 - RNA, 22 nt, Artificial Sequence
  Synthetic
gcuaguccgagucaaucagacc

SEQ ID NO: 16550 - RNA, 20 nt, Artificial Sequence
  Synthetic
guuaggcuuggcauaggacc

SEQ ID NO: 16551 - RNA, 21 nt, Artificial Sequence
  Synthetic
gguuaggcuuggcauaggacc

SEQ ID NO: 16552 - RNA, 21 nt, Artificial Sequence
  Synthetic
gauaguuucaauaauaugacc

SEQ ID NO: 16553 - RNA, 18 nt, Artificial Sequence
  Synthetic
ggcuuuacuccuaugacc

SEQ ID NO: 16554 - RNA, 21 nt, Artificial Sequence
  Synthetic
gucaucaacuaccagcugacc

SEQ ID NO: 16555 - RNA, 22 nt, Artificial Sequence
  Synthetic
ggucaucaacuaccagcugacc

SEQ ID NO: 16556 - RNA, 24 nt, Artificial Sequence
  Synthetic
guggucaucaacuaccagcugacc

SEQ ID NO: 16557 - RNA, 23 nt, Artificial Sequence
  Synthetic
gcauaucagcauugucgcugacc

SEQ ID NO: 16558 - RNA, 19 nt, Artificial Sequence
  Synthetic
guuuuuaauuucucugacc

SEQ ID NO: 16559 - RNA, 24 nt, Artificial Sequence
  Synthetic
guuuuguuuuuaauuucucugacc

SEQ ID NO: 16560 - RNA, 20 nt, Artificial Sequence
  Synthetic
gcagugaagacgcuuugacc

SEQ ID NO: 16561 - RNA, 24 nt, Artificial Sequence
  Synthetic
gaaagcagugaagacgcuuugacc

SEQ ID NO: 16562 - RNA, 20 nt, Artificial Sequence
  Synthetic
gcuguacuggcuuuuugacc

SEQ ID NO: 16563 - RNA, 23 nt, Artificial Sequence
  Synthetic
gcugcuguacuggcuuuuugacc

SEQ ID NO: 16564 - RNA, 21 nt, Artificial Sequence
  Synthetic
gugcuaccuuccaaaaauacc

SEQ ID NO: 16565 - RNA, 24 nt, Artificial Sequence
  Synthetic
guagugcuaccuuccaaaaauacc

SEQ ID NO: 16566 - RNA, 18 nt, Artificial Sequence
  Synthetic
gaaagcuuuaaaaauacc

SEQ ID NO: 16567 - RNA, 24 nt, Artificial Sequence
  Synthetic
gacaaagaaagcuuuaaaaauacc

SEQ ID NO: 16568 - RNA, 23 nt, Artificial Sequence
  Synthetic
gacuucaaugugaacuacauacc

SEQ ID NO: 16569 - RNA, 18 nt, Artificial Sequence
  Synthetic
gugcuacucugucauacc

SEQ ID NO: 16570 - RNA, 23 nt, Artificial Sequence
  Synthetic
gccuugugcuacucugucauacc

SEQ ID NO: 16571 - RNA, 18 nt, Artificial Sequence
  Synthetic
gugacccaucuugauacc

SEQ ID NO: 16572 - RNA, 19 nt, Artificial Sequence
  Synthetic
gcuaggacacaacuauacc

SEQ ID NO: 16573 - RNA, 18 nt, Artificial Sequence
  Synthetic
gacagguccuuuacuacc

SEQ ID NO: 16574 - RNA, 19 nt, Artificial Sequence
  Synthetic
ggacagguccuuuacuacc

SEQ ID NO: 16575 - RNA, 21 nt, Artificial Sequence
  Synthetic
guggacagguccuuuacuacc

SEQ ID NO: 16576 - RNA, 24 nt, Artificial Sequence
  Synthetic
gaaguggacagguccuuuacuacc

SEQ ID NO: 16577 - RNA, 19 nt, Artificial Sequence
  Synthetic
guauuaaauaaaaccuacc

SEQ ID NO: 16578 - RNA, 18 nt, Artificial Sequence
  Synthetic
gcuuucucugacccuacc

SEQ ID NO: 16579 - RNA, 18 nt, Artificial Sequence
  Synthetic
guaaaaguuuguccuacc

SEQ ID NO: 16580 - RNA, 24 nt, Artificial Sequence
  Synthetic
gaaaaaguaaaaguuuguccuacc

SEQ ID NO: 16581 - RNA, 18 nt, Artificial Sequence
  Synthetic
gcccaauaaacagcuacc

SEQ ID NO: 16582 - RNA, 19 nt, Artificial Sequence
  Synthetic
ggcccaauaaacagcuacc

SEQ ID NO: 16583 - RNA, 20 nt, Artificial Sequence
  Synthetic
gggcccaauaaacagcuacc

SEQ ID NO: 16584 - RNA, 22 nt, Artificial Sequence
  Synthetic
gagggcccaauaaacagcuacc

SEQ ID NO: 16585 - RNA, 24 nt, Artificial Sequence
  Synthetic
gugagggcccaauaaacagcuacc

SEQ ID NO: 16586 - RNA, 23 nt, Artificial Sequence
  Synthetic
gacuaauggcauugcugucuacc

SEQ ID NO: 16587 - RNA, 24 nt, Artificial Sequence
  Synthetic
ggacuaauggcauugcugucuacc

SEQ ID NO: 16588 - RNA, 20 nt, Artificial Sequence
  Synthetic
gauaaacaauuaauucuacc

SEQ ID NO: 16589 - RNA, 24 nt, Artificial Sequence
  Synthetic
gaaugauaaacaauuaauucuacc

SEQ ID NO: 16590 - RNA, 18 nt, Artificial Sequence
  Synthetic
gcuguccaacauucuacc

SEQ ID NO: 16591 - RNA, 20 nt, Artificial Sequence
  Synthetic
gauuuucuguuucuucuacc

SEQ ID NO: 16592 - RNA, 21 nt, Artificial Sequence
  Synthetic
ggauuuucuguuucuucuacc

SEQ ID NO: 16593 - RNA, 21 nt, Artificial Sequence
  Synthetic
guauuaauuucuuguucuacc

SEQ ID NO: 16594 - RNA, 18 nt, Artificial Sequence
  Synthetic
gcucucucuuuuucuacc

SEQ ID NO: 16595 - RNA, 20 nt, Artificial Sequence
  Synthetic
guauggaacacucaaguacc

SEQ ID NO: 16596 - RNA, 23 nt, Artificial Sequence
  Synthetic
guuguauggaacacucaaguacc

SEQ ID NO: 16597 - RNA, 18 nt, Artificial Sequence
  Synthetic
gagacauuccggaguacc

SEQ ID NO: 16598 - RNA, 19 nt, Artificial Sequence
  Synthetic
ggagacauuccggaguacc

SEQ ID NO: 16599 - RNA, 19 nt, Artificial Sequence
  Synthetic
gauaugugucuaacguacc

SEQ ID NO: 16600 - RNA, 24 nt, Artificial Sequence
  Synthetic
gucaccauacaguuccuauguacc

SEQ ID NO: 16601 - RNA, 19 nt, Artificial Sequence
  Synthetic
gagcugagauuagauuacc

SEQ ID NO: 16602 - RNA, 23 nt, Artificial Sequence
  Synthetic
gacagagcugagauuagauuacc

SEQ ID NO: 16603 - RNA, 24 nt, Artificial Sequence
  Synthetic
ggacagagcugagauuagauuacc

SEQ ID NO: 16604 - RNA, 18 nt, Artificial Sequence
  Synthetic
gcauccaacacgcuuacc

SEQ ID NO: 16605 - RNA, 19 nt, Artificial Sequence
  Synthetic
guuugucaaaacaaaaccc

SEQ ID NO: 16606 - RNA, 22 nt, Artificial Sequence
  Synthetic
gaaguuugucaaaacaaaaccc

SEQ ID NO: 16607 - RNA, 23 nt, Artificial Sequence
  Synthetic
ggaaguuugucaaaacaaaaccc

SEQ ID NO: 16608 - RNA, 18 nt, Artificial Sequence
  Synthetic
gagcgaaaccagaaaccc

SEQ ID NO: 16609 - RNA, 20 nt, Artificial Sequence
  Synthetic
gagagcgaaaccagaaaccc

SEQ ID NO: 16610 - RNA, 21 nt, Artificial Sequence
  Synthetic
ggagagcgaaaccagaaaccc

SEQ ID NO: 16611 - RNA, 23 nt, Artificial Sequence
  Synthetic
gaggagagcgaaaccagaaaccc

SEQ ID NO: 16612 - RNA, 24 nt, Artificial Sequence
  Synthetic
ggaggagagcgaaaccagaaaccc

SEQ ID NO: 16613 - RNA, 19 nt, Artificial Sequence
  Synthetic
gcaauucaauauauaaccc

SEQ ID NO: 16614 - RNA, 19 nt, Artificial Sequence
  Synthetic
guagcagcuuuuaccaccc

SEQ ID NO: 16615 - RNA, 20 nt, Artificial Sequence
  Synthetic
gguagcagcuuuuaccaccc

SEQ ID NO: 16616 - RNA, 18 nt, Artificial Sequence
  Synthetic
gccuuaacaaaagcaccc

SEQ ID NO: 16617 - RNA, 22 nt, Artificial Sequence
  Synthetic
gaacgccuuaacaaaagcaccc

SEQ ID NO: 16618 - RNA, 18 nt, Artificial Sequence
  Synthetic
gccacuauaaauucaccc

SEQ ID NO: 16619 - RNA, 19 nt, Artificial Sequence
  Synthetic
gauuauuuauaauugaccc

SEQ ID NO: 16620 - RNA, 24 nt, Artificial Sequence
  Synthetic
gcuuagauuauuuauaauugaccc

SEQ ID NO: 16621 - RNA, 23 nt, Artificial Sequence
  Synthetic
gcccucacagaaugcaauuaccc

SEQ ID NO: 16622 - RNA, 20 nt, Artificial Sequence
  Synthetic
gacugccgggcuacaccccc

SEQ ID NO: 16623 - RNA, 23 nt, Artificial Sequence
  Synthetic
gucuuucacuauuugagaccccc

SEQ ID NO: 16624 - RNA, 20 nt, Artificial Sequence
  Synthetic
guuguccaagcaucgccccc

SEQ ID NO: 16625 - RNA, 24 nt, Artificial Sequence
  Synthetic
gucuuuaaucucacuaaguccccc

SEQ ID NO: 16626 - RNA, 18 nt, Artificial Sequence
  Synthetic
gagaaugguuggagcccc

SEQ ID NO: 16627 - RNA, 24 nt, Artificial Sequence
  Synthetic
gaaaacgagaaugguuggagcccc

SEQ ID NO: 16628 - RNA, 21 nt, Artificial Sequence
  Synthetic
gcuuauuguuguuguugcccc

SEQ ID NO: 16629 - RNA, 22 nt, Artificial Sequence
  Synthetic
ggcuuauuguuguuguugcccc

SEQ ID NO: 16630 - RNA, 18 nt, Artificial Sequence
  Synthetic
guuuauguucucaucccc

SEQ ID NO: 16631 - RNA, 20 nt, Artificial Sequence
  Synthetic
gaguuuauguucucaucccc

SEQ ID NO: 16632 - RNA, 21 nt, Artificial Sequence
  Synthetic
ggaguuuauguucucaucccc

SEQ ID NO: 16633 - RNA, 23 nt, Artificial Sequence
  Synthetic
guggaguuuauguucucaucccc

SEQ ID NO: 16634 - RNA, 24 nt, Artificial Sequence
  Synthetic
gguggaguuuauguucucaucccc

SEQ ID NO: 16635 - RNA, 22 nt, Artificial Sequence
  Synthetic
gcaaaaaccucuuucggucccc

SEQ ID NO: 16636 - RNA, 24 nt, Artificial Sequence
  Synthetic
gugcaaaaaccucuuucggucccc

SEQ ID NO: 16637 - RNA, 18 nt, Artificial Sequence
  Synthetic
gcaauugccaaauucccc

SEQ ID NO: 16638 - RNA, 19 nt, Artificial Sequence
  Synthetic
guauucuccaccauucccc

SEQ ID NO: 16639 - RNA, 21 nt, Artificial Sequence
  Synthetic
gauagcuucauuccauucccc

SEQ ID NO: 16640 - RNA, 18 nt, Artificial Sequence
  Synthetic
gauuacuacauuuucccc

SEQ ID NO: 16641 - RNA, 21 nt, Artificial Sequence
  Synthetic
guuuugaacauacugaagccc

SEQ ID NO: 16642 - RNA, 19 nt, Artificial Sequence
  Synthetic
gucuauggucaguaagccc

SEQ ID NO: 16643 - RNA, 21 nt, Artificial Sequence
  Synthetic
gcgucuauggucaguaagccc

SEQ ID NO: 16644 - RNA, 20 nt, Artificial Sequence
  Synthetic
gaauuaaaaacagccagccc

SEQ ID NO: 16645 - RNA, 21 nt, Artificial Sequence
  Synthetic
gauaucgaucccucucagccc

SEQ ID NO: 16646 - RNA, 18 nt, Artificial Sequence
  Synthetic
ggguggcaaauucagccc

SEQ ID NO: 16647 - RNA, 20 nt, Artificial Sequence
  Synthetic
guggguggcaaauucagccc

SEQ ID NO: 16648 - RNA, 19 nt, Artificial Sequence
  Synthetic
gaauggauuggaggagccc

SEQ ID NO: 16649 - RNA, 22 nt, Artificial Sequence
  Synthetic
gaugaauggauuggaggagccc

SEQ ID NO: 16650 - RNA, 23 nt, Artificial Sequence
  Synthetic
ggaugaauggauuggaggagccc

SEQ ID NO: 16651 - RNA, 19 nt, Artificial Sequence
  Synthetic
gccauuccagcuugagccc

SEQ ID NO: 16652 - RNA, 22 nt, Artificial Sequence
  Synthetic
gcuaauugcugcaugguagccc

SEQ ID NO: 16653 - RNA, 19 nt, Artificial Sequence
  Synthetic
guucuaggcuuauuagccc

SEQ ID NO: 16654 - RNA, 20 nt, Artificial Sequence
  Synthetic
gguucuaggcuuauuagccc

SEQ ID NO: 16655 - RNA, 21 nt, Artificial Sequence
  Synthetic
ggguucuaggcuuauuagccc

SEQ ID NO: 16656 - RNA, 18 nt, Artificial Sequence
  Synthetic
gcagaucucggugggccc

SEQ ID NO: 16657 - RNA, 19 nt, Artificial Sequence
  Synthetic
ggcagaucucggugggccc

SEQ ID NO: 16658 - RNA, 21 nt, Artificial Sequence
  Synthetic
gacucacacagccaacugccc

SEQ ID NO: 16659 - RNA, 21 nt, Artificial Sequence
  Synthetic
gcuccauuaauugggcugccc

SEQ ID NO: 16660 - RNA, 18 nt, Artificial Sequence
  Synthetic
gaucaagauggaaauccc

SEQ ID NO: 16661 - RNA, 20 nt, Artificial Sequence
  Synthetic
gagaucaagauggaaauccc

SEQ ID NO: 16662 - RNA, 24 nt, Artificial Sequence
  Synthetic
gucagagaucaagauggaaauccc

SEQ ID NO: 16663 - RNA, 20 nt, Artificial Sequence
  Synthetic
gccuaauggagaacaauccc

SEQ ID NO: 16664 - RNA, 22 nt, Artificial Sequence
  Synthetic
gcuauggcgauauaaacauccc

SEQ ID NO: 16665 - RNA, 22 nt, Artificial Sequence
  Synthetic
gaaaugauaugggugacauccc

SEQ ID NO: 16666 - RNA, 23 nt, Artificial Sequence
  Synthetic
ggaaaugauaugggugacauccc

SEQ ID NO: 16667 - RNA, 18 nt, Artificial Sequence
  Synthetic
ggaaguaacccauauccc

SEQ ID NO: 16668 - RNA, 23 nt, Artificial Sequence
  Synthetic
gcccaggaaguaacccauauccc

SEQ ID NO: 16669 - RNA, 22 nt, Artificial Sequence
  Synthetic
guaccucaauuuaaugacuccc

SEQ ID NO: 16670 - RNA, 23 nt, Artificial Sequence
  Synthetic
gguaccucaauuuaaugacuccc

SEQ ID NO: 16671 - RNA, 18 nt, Artificial Sequence
  Synthetic
gagcacagaucuacuccc

SEQ ID NO: 16672 - RNA, 19 nt, Artificial Sequence
  Synthetic
ggagcacagaucuacuccc

SEQ ID NO: 16673 - RNA, 20 nt, Artificial Sequence
  Synthetic
gggagcacagaucuacuccc

SEQ ID NO: 16674 - RNA, 21 nt, Artificial Sequence
  Synthetic
ggggagcacagaucuacuccc

SEQ ID NO: 16675 - RNA, 21 nt, Artificial Sequence
  Synthetic
gccagaguaguccucucuccc

SEQ ID NO: 16676 - RNA, 22 nt, Artificial Sequence
  Synthetic
ggccagaguaguccucucuccc

SEQ ID NO: 16677 - RNA, 21 nt, Artificial Sequence
  Synthetic
gcuacauuucugcucucuccc

SEQ ID NO: 16678 - RNA, 24 nt, Artificial Sequence
  Synthetic
guuacuuuucaacuggucucuccc

SEQ ID NO: 16679 - RNA, 23 nt, Artificial Sequence
  Synthetic
gccucugagaaauuuuaaguccc

SEQ ID NO: 16680 - RNA, 20 nt, Artificial Sequence
  Synthetic
gaaaucaaaaauauaguccc

SEQ ID NO: 16681 - RNA, 18 nt, Artificial Sequence
  Synthetic
gauuguuauaguaguccc

SEQ ID NO: 16682 - RNA, 22 nt, Artificial Sequence
  Synthetic
gcuuucaaggagaucccguccc

SEQ ID NO: 16683 - RNA, 23 nt, Artificial Sequence
  Synthetic
ggcuuucaaggagaucccguccc

SEQ ID NO: 16684 - RNA, 18 nt, Artificial Sequence
  Synthetic
gauacagaaaaauguccc

SEQ ID NO: 16685 - RNA, 21 nt, Artificial Sequence
  Synthetic
gcugauacagaaaaauguccc

SEQ ID NO: 16686 - RNA, 22 nt, Artificial Sequence
  Synthetic
ggcugauacagaaaaauguccc

SEQ ID NO: 16687 - RNA, 18 nt, Artificial Sequence
  Synthetic
gaauuuuucaaauguccc

SEQ ID NO: 16688 - RNA, 21 nt, Artificial Sequence
  Synthetic
guagaauuuuucaaauguccc

SEQ ID NO: 16689 - RNA, 23 nt, Artificial Sequence
  Synthetic
gaaaacuacauagaaacauuccc

SEQ ID NO: 16690 - RNA, 23 nt, Artificial Sequence
  Synthetic
gcauucagucauacucuauuccc

SEQ ID NO: 16691 - RNA, 21 nt, Artificial Sequence
  Synthetic
gauuagaguugcucuauuccc

SEQ ID NO: 16692 - RNA, 22 nt, Artificial Sequence
  Synthetic
ggauuagaguugcucuauuccc

SEQ ID NO: 16693 - RNA, 20 nt, Artificial Sequence
  Synthetic
gaccuggaaauuuuauuccc

SEQ ID NO: 16694 - RNA, 18 nt, Artificial Sequence
  Synthetic
gagggggaagaacuuccc

SEQ ID NO: 16695 - RNA, 21 nt, Artificial Sequence
  Synthetic
gcauccaaaaaguaacuuccc

SEQ ID NO: 16696 - RNA, 24 nt, Artificial Sequence
  Synthetic
gaucuccaacagcacugacuuccc

SEQ ID NO: 16697 - RNA, 23 nt, Artificial Sequence
  Synthetic
gaaauguagaaaaauauguuccc

SEQ ID NO: 16698 - RNA, 24 nt, Artificial Sequence
  Synthetic
ggaaauguagaaaaauauguuccc

SEQ ID NO: 16699 - RNA, 23 nt, Artificial Sequence
  Synthetic
guaucaauagccauacuguuccc

SEQ ID NO: 16700 - RNA, 18 nt, Artificial Sequence
  Synthetic
ggaggugccauuguuccc

SEQ ID NO: 16701 - RNA, 20 nt, Artificial Sequence
  Synthetic
guggaggugccauuguuccc

SEQ ID NO: 16702 - RNA, 18 nt, Artificial Sequence
  Synthetic
gggcaucuacucuuuccc

SEQ ID NO: 16703 - RNA, 19 nt, Artificial Sequence
  Synthetic
gugggaugaauaguuuccc

SEQ ID NO: 16704 - RNA, 20 nt, Artificial Sequence
  Synthetic
ggugggaugaauaguuuccc

SEQ ID NO: 16705 - RNA, 22 nt, Artificial Sequence
  Synthetic
guggugggaugaauaguuuccc

SEQ ID NO: 16706 - RNA, 21 nt, Artificial Sequence
  Synthetic
gcuuuucaaaauauaaaagcc

SEQ ID NO: 16707 - RNA, 23 nt, Artificial Sequence
  Synthetic
gagcuuuucaaaauauaaaagcc

SEQ ID NO: 16708 - RNA, 24 nt, Artificial Sequence
  Synthetic
ggagcuuuucaaaauauaaaagcc

SEQ ID NO: 16709 - RNA, 21 nt, Artificial Sequence
  Synthetic
gccuguuauaaagaauaagcc

SEQ ID NO: 16710 - RNA, 24 nt, Artificial Sequence
  Synthetic
gaagccuguuauaaagaauaagcc

SEQ ID NO: 16711 - RNA, 20 nt, Artificial Sequence
  Synthetic
gcuuugcaacuauauaagcc

SEQ ID NO: 16712 - RNA, 24 nt, Artificial Sequence
  Synthetic
gcaugcuuugcaacuauauaagcc

SEQ ID NO: 16713 - RNA, 21 nt, Artificial Sequence
  Synthetic
gucaguaaaagcaccuaagcc

SEQ ID NO: 16714 - RNA, 18 nt, Artificial Sequence
  Synthetic
gaaacaagcauguaagcc

SEQ ID NO: 16715 - RNA, 21 nt, Artificial Sequence
  Synthetic
gaagaaacaagcauguaagcc

SEQ ID NO: 16716 - RNA, 23 nt, Artificial Sequence
  Synthetic
gagaagaaacaagcauguaagcc

SEQ ID NO: 16717 - RNA, 18 nt, Artificial Sequence
  Synthetic
gaaauacauacaacagcc

SEQ ID NO: 16718 - RNA, 20 nt, Artificial Sequence
  Synthetic
gccugcuuggaccaacagcc

SEQ ID NO: 16719 - RNA, 18 nt, Artificial Sequence
  Synthetic
gggacugauuccacagcc

SEQ ID NO: 16720 - RNA, 18 nt, Artificial Sequence
  Synthetic
gcuauugagcacccagcc

SEQ ID NO: 16721 - RNA, 21 nt, Artificial Sequence
  Synthetic
guagcuauugagcacccagcc

SEQ ID NO: 16722 - RNA, 19 nt, Artificial Sequence
  Synthetic
gaauugcauauguagagcc

SEQ ID NO: 16723 - RNA, 20 nt, Artificial Sequence
  Synthetic
ggaauugcauauguagagcc

SEQ ID NO: 16724 - RNA, 23 nt, Artificial Sequence
  Synthetic
gcuuauagauacuaauuagagcc

SEQ ID NO: 16725 - RNA, 24 nt, Artificial Sequence
  Synthetic
gccucaaaugggcugguuagagcc

SEQ ID NO: 16726 - RNA, 24 nt, Artificial Sequence
  Synthetic
guuuauuacucuaucugaggagcc

SEQ ID NO: 16727 - RNA, 20 nt, Artificial Sequence
  Synthetic
gaugguugaggcagugagcc

SEQ ID NO: 16728 - RNA, 21 nt, Artificial Sequence
  Synthetic
ggaugguugaggcagugagcc

SEQ ID NO: 16729 - RNA, 19 nt, Artificial Sequence
  Synthetic
gugagguauaccgugagcc

SEQ ID NO: 16730 - RNA, 23 nt, Artificial Sequence
  Synthetic
gaucgugagguauaccgugagcc

SEQ ID NO: 16731 - RNA, 24 nt, Artificial Sequence
  Synthetic
ggaucgugagguauaccgugagcc

SEQ ID NO: 16732 - RNA, 19 nt, Artificial Sequence
  Synthetic
gaaguagguagcaguagcc

SEQ ID NO: 16733 - RNA, 20 nt, Artificial Sequence
  Synthetic
ggaaguagguagcaguagcc

SEQ ID NO: 16734 - RNA, 21 nt, Artificial Sequence
  Synthetic
gggaaguagguagcaguagcc

SEQ ID NO: 16735 - RNA, 24 nt, Artificial Sequence
  Synthetic
gcugggaaguagguagcaguagcc

SEQ ID NO: 16736 - RNA, 20 nt, Artificial Sequence
  Synthetic
gauucacugugaguguagcc

SEQ ID NO: 16737 - RNA, 22 nt, Artificial Sequence
  Synthetic
gcauuuagagacucuaugcgcc

SEQ ID NO: 16738 - RNA, 22 nt, Artificial Sequence
  Synthetic
gaacuucacaggagcagaggcc

SEQ ID NO: 16739 - RNA, 24 nt, Artificial Sequence
  Synthetic
gugaacuucacaggagcagaggcc

SEQ ID NO: 16740 - RNA, 21 nt, Artificial Sequence
  Synthetic
gaaccucaaagagaggaggcc

SEQ ID NO: 16741 - RNA, 22 nt, Artificial Sequence
  Synthetic
ggaaccucaaagagaggaggcc

SEQ ID NO: 16742 - RNA, 24 nt, Artificial Sequence
  Synthetic
gaggaaccucaaagagaggaggcc

SEQ ID NO: 16743 - RNA, 24 nt, Artificial Sequence
  Synthetic
gcuaucacccuccaucuggaggcc

SEQ ID NO: 16744 - RNA, 18 nt, Artificial Sequence
  Synthetic
gaaaaaauugaggcggcc

SEQ ID NO: 16745 - RNA, 20 nt, Artificial Sequence
  Synthetic
gucuagaugugaucugggcc

SEQ ID NO: 16746 - RNA, 21 nt, Artificial Sequence
  Synthetic
ggucuagaugugaucugggcc

SEQ ID NO: 16747 - RNA, 24 nt, Artificial Sequence
  Synthetic
gcccuuuugcagaagaaaauggcc

SEQ ID NO: 16748 - RNA, 18 nt, Artificial Sequence
  Synthetic
guguccauugauauggcc

SEQ ID NO: 16749 - RNA, 19 nt, Artificial Sequence
  Synthetic
gacgugaguacuacuggcc

SEQ ID NO: 16750 - RNA, 19 nt, Artificial Sequence
  Synthetic
gaugugaguauuacuggcc

SEQ ID NO: 16751 - RNA, 18 nt, Artificial Sequence
  Synthetic
gugaugucuguccuggcc

SEQ ID NO: 16752 - RNA, 20 nt, Artificial Sequence
  Synthetic
gugugaugucuguccuggcc

SEQ ID NO: 16753 - RNA, 19 nt, Artificial Sequence
  Synthetic
gcaagguugcuuaguggcc

SEQ ID NO: 16754 - RNA, 18 nt, Artificial Sequence
  Synthetic
guuaaaaugucuguggcc

SEQ ID NO: 16755 - RNA, 24 nt, Artificial Sequence
  Synthetic
gcuaauguuaaaaugucuguggcc

SEQ ID NO: 16756 - RNA, 20 nt, Artificial Sequence
  Synthetic
gaagagguagggcuuuggcc

SEQ ID NO: 16757 - RNA, 22 nt, Artificial Sequence
  Synthetic
gagaagagguagggcuuuggcc

SEQ ID NO: 16758 - RNA, 20 nt, Artificial Sequence
  Synthetic
gucaaauuacuucagaugcc

SEQ ID NO: 16759 - RNA, 21 nt, Artificial Sequence
  Synthetic
ggucaaauuacuucagaugcc

SEQ ID NO: 16760 - RNA, 22 nt, Artificial Sequence
  Synthetic
guucccugacugcucugaugcc

SEQ ID NO: 16761 - RNA, 23 nt, Artificial Sequence
  Synthetic
gguucccugacugcucugaugcc

SEQ ID NO: 16762 - RNA, 18 nt, Artificial Sequence
  Synthetic
gucuuuucucucccugcc

SEQ ID NO: 16763 - RNA, 23 nt, Artificial Sequence
  Synthetic
gcucagucuuuucucucccugcc

SEQ ID NO: 16764 - RNA, 20 nt, Artificial Sequence
  Synthetic
gcauuagugguacuccugcc

SEQ ID NO: 16765 - RNA, 21 nt, Artificial Sequence
  Synthetic
gaggaauugucuuuuccugcc

SEQ ID NO: 16766 - RNA, 22 nt, Artificial Sequence
  Synthetic
ggaggaauugucuuuuccugcc

SEQ ID NO: 16767 - RNA, 19 nt, Artificial Sequence
  Synthetic
gaauuucauuaacucugcc

SEQ ID NO: 16768 - RNA, 21 nt, Artificial Sequence
  Synthetic
gucaccucauagaggucugcc

SEQ ID NO: 16769 - RNA, 18 nt, Artificial Sequence
  Synthetic
gacaugaccuauucugcc

SEQ ID NO: 16770 - RNA, 20 nt, Artificial Sequence
  Synthetic
gagacaugaccuauucugcc

SEQ ID NO: 16771 - RNA, 21 nt, Artificial Sequence
  Synthetic
ggagacaugaccuauucugcc

SEQ ID NO: 16772 - RNA, 21 nt, Artificial Sequence
  Synthetic
gaauuuggugcuucuucugcc

SEQ ID NO: 16773 - RNA, 22 nt, Artificial Sequence
  Synthetic
gacacgacguucucuuucugcc

SEQ ID NO: 16774 - RNA, 24 nt, Artificial Sequence
  Synthetic
gugacacgacguucucuuucugcc

SEQ ID NO: 16775 - RNA, 19 nt, Artificial Sequence
  Synthetic
gugucucuucgucagugcc

SEQ ID NO: 16776 - RNA, 23 nt, Artificial Sequence
  Synthetic
gcaucaccuucaauaggggugcc

SEQ ID NO: 16777 - RNA, 18 nt, Artificial Sequence
  Synthetic
gccugggaguugggugcc

SEQ ID NO: 16778 - RNA, 24 nt, Artificial Sequence
  Synthetic
gcauuugccugggaguugggugcc

SEQ ID NO: 16779 - RNA, 21 nt, Artificial Sequence
  Synthetic
gcauaagcugucccuugugcc

SEQ ID NO: 16780 - RNA, 18 nt, Artificial Sequence
  Synthetic
gggucguauuguugugcc

SEQ ID NO: 16781 - RNA, 21 nt, Artificial Sequence
  Synthetic
gcagggucguauuguugugcc

SEQ ID NO: 16782 - RNA, 22 nt, Artificial Sequence
  Synthetic
ggcagggucguauuguugugcc

SEQ ID NO: 16783 - RNA, 18 nt, Artificial Sequence
  Synthetic
gauguaagaaaaauugcc

SEQ ID NO: 16784 - RNA, 23 nt, Artificial Sequence
  Synthetic
gaacagauguaagaaaaauugcc

SEQ ID NO: 16785 - RNA, 18 nt, Artificial Sequence
  Synthetic
gaauuaucuuauauugcc

SEQ ID NO: 16786 - RNA, 23 nt, Artificial Sequence
  Synthetic
gaaaagaauuaucuuauauugcc

SEQ ID NO: 16787 - RNA, 19 nt, Artificial Sequence
  Synthetic
gacugaaaacauacuugcc

SEQ ID NO: 16788 - RNA, 23 nt, Artificial Sequence
  Synthetic
guaugacugaaaacauacuugcc

SEQ ID NO: 16789 - RNA, 23 nt, Artificial Sequence
  Synthetic
gacauuuguuaacuuugguugcc

SEQ ID NO: 16790 - RNA, 24 nt, Artificial Sequence
  Synthetic
gaaaaaauguuuaaugaauuugcc

SEQ ID NO: 16791 - RNA, 21 nt, Artificial Sequence
  Synthetic
ggagagauuaaauaauuugcc

SEQ ID NO: 16792 - RNA, 24 nt, Artificial Sequence
  Synthetic
guuggagagauuaaauaauuugcc

SEQ ID NO: 16793 - RNA, 22 nt, Artificial Sequence
  Synthetic
gaaucucauaacuaacuuugcc

SEQ ID NO: 16794 - RNA, 18 nt, Artificial Sequence
  Synthetic
gguguuaggaauuuugcc

SEQ ID NO: 16795 - RNA, 24 nt, Artificial Sequence
  Synthetic
guuauuuuuaaaguagaaaaaucc

SEQ ID NO: 16796 - RNA, 24 nt, Artificial Sequence
  Synthetic
gcauuauaagaccaaaagaaaucc

SEQ ID NO: 16797 - RNA, 21 nt, Artificial Sequence
  Synthetic
gcuuccugcgacugccaaucc

SEQ ID NO: 16798 - RNA, 20 nt, Artificial Sequence
  Synthetic
guaaccuauuucccuaaucc

SEQ ID NO: 16799 - RNA, 23 nt, Artificial Sequence
  Synthetic
guuguaaccuauuucccuaaucc

SEQ ID NO: 16800 - RNA, 21 nt, Artificial Sequence
  Synthetic
gcauucacagauuuguaaucc

SEQ ID NO: 16801 - RNA, 24 nt, Artificial Sequence
  Synthetic
guugcauucacagauuuguaaucc

SEQ ID NO: 16802 - RNA, 19 nt, Artificial Sequence
  Synthetic
gagcuuucuguuuuaaucc

SEQ ID NO: 16803 - RNA, 18 nt, Artificial Sequence
  Synthetic
ggaacaaugcacacaucc

SEQ ID NO: 16804 - RNA, 21 nt, Artificial Sequence
  Synthetic
guacauuuuauguuaccaucc

SEQ ID NO: 16805 - RNA, 20 nt, Artificial Sequence
  Synthetic
gccgcugcccaaugccaucc

SEQ ID NO: 16806 - RNA, 24 nt, Artificial Sequence
  Synthetic
guuugccgcugcccaaugccaucc

SEQ ID NO: 16807 - RNA, 18 nt, Artificial Sequence
  Synthetic
gaguuaaaacuggcaucc

SEQ ID NO: 16808 - RNA, 20 nt, Artificial Sequence
  Synthetic
gcuguacaauggagucaucc

SEQ ID NO: 16809 - RNA, 22 nt, Artificial Sequence
  Synthetic
gacacugucaugagaaagaucc

SEQ ID NO: 16810 - RNA, 23 nt, Artificial Sequence
  Synthetic
ggacacugucaugagaaagaucc

SEQ ID NO: 16811 - RNA, 20 nt, Artificial Sequence
  Synthetic
guuggagcuaaggcugaucc

SEQ ID NO: 16812 - RNA, 24 nt, Artificial Sequence
  Synthetic
gcaaguuggagcuaaggcugaucc

SEQ ID NO: 16813 - RNA, 19 nt, Artificial Sequence
  Synthetic
gaagagggauaggugaucc

SEQ ID NO: 16814 - RNA, 20 nt, Artificial Sequence
  Synthetic
gcugauagucaucuugaucc

SEQ ID NO: 16815 - RNA, 22 nt, Artificial Sequence
  Synthetic
gagcugauagucaucuugaucc

SEQ ID NO: 16816 - RNA, 24 nt, Artificial Sequence
  Synthetic
gagagcugauagucaucuugaucc

SEQ ID NO: 16817 - RNA, 19 nt, Artificial Sequence
  Synthetic
gccuuuucuagaaauaucc

SEQ ID NO: 16818 - RNA, 23 nt, Artificial Sequence
  Synthetic
gcuugccuuuucuagaaauaucc

SEQ ID NO: 16819 - RNA, 24 nt, Artificial Sequence
  Synthetic
ggcuugccuuuucuagaaauaucc

SEQ ID NO: 16820 - RNA, 21 nt, Artificial Sequence
  Synthetic
guuuaugaggaaaauauaucc

SEQ ID NO: 16821 - RNA, 19 nt, Artificial Sequence
  Synthetic
gaggaauuugagacuaucc

SEQ ID NO: 16822 - RNA, 18 nt, Artificial Sequence
  Synthetic
gguuggccaugccuaucc

SEQ ID NO: 16823 - RNA, 23 nt, Artificial Sequence
  Synthetic
gcauacugauaagaaagguaucc

SEQ ID NO: 16824 - RNA, 19 nt, Artificial Sequence
  Synthetic
gacaacaucucuguuaucc

SEQ ID NO: 16825 - RNA, 20 nt, Artificial Sequence
  Synthetic
ggacaacaucucuguuaucc

SEQ ID NO: 16826 - RNA, 19 nt, Artificial Sequence
  Synthetic
gaaccacugcaacaacucc

SEQ ID NO: 16827 - RNA, 20 nt, Artificial Sequence
  Synthetic
gacaggaagaagcgaacucc

SEQ ID NO: 16828 - RNA, 24 nt, Artificial Sequence
  Synthetic
gcaugacaggaagaagcgaacucc

SEQ ID NO: 16829 - RNA, 19 nt, Artificial Sequence
  Synthetic
gcaggggaugucacacucc

SEQ ID NO: 16830 - RNA, 20 nt, Artificial Sequence
  Synthetic
ggcaggggaugucacacucc

SEQ ID NO: 16831 - RNA, 21 nt, Artificial Sequence
  Synthetic
gggcaggggaugucacacucc

SEQ ID NO: 16832 - RNA, 22 nt, Artificial Sequence
  Synthetic
ggggcaggggaugucacacucc

SEQ ID NO: 16833 - RNA, 24 nt, Artificial Sequence
  Synthetic
gcuuauaaaguaguuuuacacucc

SEQ ID NO: 16834 - RNA, 23 nt, Artificial Sequence
  Synthetic
gccauagucuguuucuccacucc

SEQ ID NO: 16835 - RNA, 19 nt, Artificial Sequence
  Synthetic
gaaagcaaggaaauacucc

SEQ ID NO: 16836 - RNA, 21 nt, Artificial Sequence
  Synthetic
gagaaagcaaggaaauacucc

SEQ ID NO: 16837 - RNA, 19 nt, Artificial Sequence
  Synthetic
gaggcagggaacauacucc

SEQ ID NO: 16838 - RNA, 20 nt, Artificial Sequence
  Synthetic
ggaggcagggaacauacucc

SEQ ID NO: 16839 - RNA, 23 nt, Artificial Sequence
  Synthetic
gcaggaggcagggaacauacucc

SEQ ID NO: 16840 - RNA, 18 nt, Artificial Sequence
  Synthetic
guacuguuucuauacucc

SEQ ID NO: 16841 - RNA, 19 nt, Artificial Sequence
  Synthetic
gguacuguuucuauacucc

SEQ ID NO: 16842 - RNA, 19 nt, Artificial Sequence
  Synthetic
gccauauuggucaaccucc

SEQ ID NO: 16843 - RNA, 20 nt, Artificial Sequence
  Synthetic
gaugacagaggucagccucc

SEQ ID NO: 16844 - RNA, 21 nt, Artificial Sequence
  Synthetic
gaauagcucuuggauggcucc

SEQ ID NO: 16845 - RNA, 23 nt, Artificial Sequence
  Synthetic
gugaauagcucuuggauggcucc

SEQ ID NO: 16846 - RNA, 22 nt, Artificial Sequence
  Synthetic
gccuugcagagagccaaucucc

SEQ ID NO: 16847 - RNA, 22 nt, Artificial Sequence
  Synthetic
gaaaaagaaagugagcaucucc

SEQ ID NO: 16848 - RNA, 18 nt, Artificial Sequence
  Synthetic
ggagagacuggcaucucc

SEQ ID NO: 16849 - RNA, 19 nt, Artificial Sequence
  Synthetic
gggagagacuggcaucucc

SEQ ID NO: 16850 - RNA, 21 nt, Artificial Sequence
  Synthetic
gagggagagacuggcaucucc

SEQ ID NO: 16851 - RNA, 21 nt, Artificial Sequence
  Synthetic
gaucugcgggcuccacucucc

SEQ ID NO: 16852 - RNA, 21 nt, Artificial Sequence
  Synthetic
gcauagcuucuaaaucucucc

SEQ ID NO: 16853 - RNA, 18 nt, Artificial Sequence
  Synthetic
gcauuucuauuucucucc

SEQ ID NO: 16854 - RNA, 21 nt, Artificial Sequence
  Synthetic
gacauucccaaacaugucucc

SEQ ID NO: 16855 - RNA, 18 nt, Artificial Sequence
  Synthetic
gacugguaugucuucucc

SEQ ID NO: 16856 - RNA, 18 nt, Artificial Sequence
  Synthetic
gaagucugagccaagucc

SEQ ID NO: 16857 - RNA, 20 nt, Artificial Sequence
  Synthetic
gcagcauuuuauaacagucc

SEQ ID NO: 16858 - RNA, 24 nt, Artificial Sequence
  Synthetic
gcaugcagcauuuuauaacagucc

SEQ ID NO: 16859 - RNA, 19 nt, Artificial Sequence
  Synthetic
gucaguuggaauacagucc

SEQ ID NO: 16860 - RNA, 22 nt, Artificial Sequence
  Synthetic
gcugucaguuggaauacagucc

SEQ ID NO: 16861 - RNA, 24 nt, Artificial Sequence
  Synthetic
gagcugucaguuggaauacagucc

SEQ ID NO: 16862 - RNA, 19 nt, Artificial Sequence
  Synthetic
guauagcagaaacgagucc

SEQ ID NO: 16863 - RNA, 20 nt, Artificial Sequence
  Synthetic
gguauagcagaaacgagucc

SEQ ID NO: 16864 - RNA, 24 nt, Artificial Sequence
  Synthetic
guaugguauagcagaaacgagucc

SEQ ID NO: 16865 - RNA, 19 nt, Artificial Sequence
  Synthetic
gcucugcugcugcuagucc

SEQ ID NO: 16866 - RNA, 20 nt, Artificial Sequence
  Synthetic
guuucgaacucuugacgucc

SEQ ID NO: 16867 - RNA, 21 nt, Artificial Sequence
  Synthetic
gguuucgaacucuugacgucc

SEQ ID NO: 16868 - RNA, 24 nt, Artificial Sequence
  Synthetic
gcugguuucgaacucuugacgucc

SEQ ID NO: 16869 - RNA, 20 nt, Artificial Sequence
  Synthetic
gaugggauuaagggaggucc

SEQ ID NO: 16870 - RNA, 21 nt, Artificial Sequence
  Synthetic
ggaugggauuaagggaggucc

SEQ ID NO: 16871 - RNA, 23 nt, Artificial Sequence
  Synthetic
guggaugggauuaagggaggucc

SEQ ID NO: 16872 - RNA, 20 nt, Artificial Sequence
  Synthetic
gaugaaagcaauuuaggucc

SEQ ID NO: 16873 - RNA, 19 nt, Artificial Sequence
  Synthetic
gcucuuuccgcuagggucc

SEQ ID NO: 16874 - RNA, 22 nt, Artificial Sequence
  Synthetic
gcugcucuuuccgcuagggucc

SEQ ID NO: 16875 - RNA, 20 nt, Artificial Sequence
  Synthetic
gauaccaucagccauggucc

SEQ ID NO: 16876 - RNA, 18 nt, Artificial Sequence
  Synthetic
gaaauucuaaacuggucc

SEQ ID NO: 16877 - RNA, 23 nt, Artificial Sequence
  Synthetic
gcacaauaugguagaauuggucc

SEQ ID NO: 16878 - RNA, 23 nt, Artificial Sequence
  Synthetic
gaaucuccuacugcauuuggucc

SEQ ID NO: 16879 - RNA, 18 nt, Artificial Sequence
  Synthetic
guuguaagauaaaugucc

SEQ ID NO: 16880 - RNA, 19 nt, Artificial Sequence
  Synthetic
gguuguaagauaaaugucc

SEQ ID NO: 16881 - RNA, 24 nt, Artificial Sequence
  Synthetic
guacagguuguaagauaaaugucc

SEQ ID NO: 16882 - RNA, 23 nt, Artificial Sequence
  Synthetic
guuucagauagcacagaaugucc

SEQ ID NO: 16883 - RNA, 18 nt, Artificial Sequence
  Synthetic
guuggaagcaagaugucc

SEQ ID NO: 16884 - RNA, 19 nt, Artificial Sequence
  Synthetic
guguugauuuuguaugucc

SEQ ID NO: 16885 - RNA, 19 nt, Artificial Sequence
  Synthetic
guguuaaccaccauugucc

SEQ ID NO: 16886 - RNA, 24 nt, Artificial Sequence
  Synthetic
gcaaaacucauagguugcuugucc

SEQ ID NO: 16887 - RNA, 22 nt, Artificial Sequence
  Synthetic
gccaaaaacugauauaaauucc

SEQ ID NO: 16888 - RNA, 21 nt, Artificial Sequence
  Synthetic
gaaacuacagguuacaauucc

SEQ ID NO: 16889 - RNA, 22 nt, Artificial Sequence
  Synthetic
ggaaacuacagguuacaauucc

SEQ ID NO: 16890 - RNA, 24 nt, Artificial Sequence
  Synthetic
guggaaacuacagguuacaauucc

SEQ ID NO: 16891 - RNA, 24 nt, Artificial Sequence
  Synthetic
guucuuucuugacuaacgaauucc

SEQ ID NO: 16892 - RNA, 21 nt, Artificial Sequence
  Synthetic
guuccaagcagauuuaauucc

SEQ ID NO: 16893 - RNA, 20 nt, Artificial Sequence
  Synthetic
gaaaacgucuuccucauucc

SEQ ID NO: 16894 - RNA, 18 nt, Artificial Sequence
  Synthetic
guuaggaucgcugauucc

SEQ ID NO: 16895 - RNA, 22 nt, Artificial Sequence
  Synthetic
gaacguuaggaucgcugauucc

SEQ ID NO: 16896 - RNA, 23 nt, Artificial Sequence
  Synthetic
ggaacguuaggaucgcugauucc

SEQ ID NO: 16897 - RNA, 24 nt, Artificial Sequence
  Synthetic
gggaacguuaggaucgcugauucc

SEQ ID NO: 16898 - RNA, 20 nt, Artificial Sequence
  Synthetic
gaaaaauguguuauuauucc

SEQ ID NO: 16899 - RNA, 24 nt, Artificial Sequence
  Synthetic
gucagaaaaauguguuauuauucc

SEQ ID NO: 16900 - RNA, 19 nt, Artificial Sequence
  Synthetic
gcuaccuccaauuuauucc

SEQ ID NO: 16901 - RNA, 20 nt, Artificial Sequence
  Synthetic
gaauaaaacaccuuuauucc

SEQ ID NO: 16902 - RNA, 18 nt, Artificial Sequence
  Synthetic
guuuucuucaugacuucc

SEQ ID NO: 16903 - RNA, 20 nt, Artificial Sequence
  Synthetic
gaguuuucuucaugacuucc

SEQ ID NO: 16904 - RNA, 20 nt, Artificial Sequence
  Synthetic
gcuaaaguucguugccuucc

SEQ ID NO: 16905 - RNA, 20 nt, Artificial Sequence
  Synthetic
gaaacuguagcagagcuucc

SEQ ID NO: 16906 - RNA, 18 nt, Artificial Sequence
  Synthetic
guuuaugcugaugcuucc

SEQ ID NO: 16907 - RNA, 19 nt, Artificial Sequence
  Synthetic
gguuuaugcugaugcuucc

SEQ ID NO: 16908 - RNA, 20 nt, Artificial Sequence
  Synthetic
gucuuccaacuucugcuucc

SEQ ID NO: 16909 - RNA, 24 nt, Artificial Sequence
  Synthetic
gucugucuuccaacuucugcuucc

SEQ ID NO: 16910 - RNA, 19 nt, Artificial Sequence
  Synthetic
gcaaguaguuucaucuucc

SEQ ID NO: 16911 - RNA, 18 nt, Artificial Sequence
  Synthetic
gauccugcuuucucuucc

SEQ ID NO: 16912 - RNA, 20 nt, Artificial Sequence
  Synthetic
gagauccugcuuucucuucc

SEQ ID NO: 16913 - RNA, 22 nt, Artificial Sequence
  Synthetic
gagagauccugcuuucucuucc

SEQ ID NO: 16914 - RNA, 24 nt, Artificial Sequence
  Synthetic
gcaucucuagcacauacuucuucc

SEQ ID NO: 16915 - RNA, 18 nt, Artificial Sequence
  Synthetic
gguuggaauuuagguucc

SEQ ID NO: 16916 - RNA, 23 nt, Artificial Sequence
  Synthetic
guccuauuugaaugaucuguucc

SEQ ID NO: 16917 - RNA, 24 nt, Artificial Sequence
  Synthetic
gaaucacagauugauaggauuucc

SEQ ID NO: 16918 - RNA, 18 nt, Artificial Sequence
  Synthetic
gcuggaucucuuauuucc

SEQ ID NO: 16919 - RNA, 21 nt, Artificial Sequence
  Synthetic
guaacuaguaaauaacuuucc

SEQ ID NO: 16920 - RNA, 19 nt, Artificial Sequence
  Synthetic
gcaucaaauuuuacuuucc

SEQ ID NO: 16921 - RNA, 19 nt, Artificial Sequence
  Synthetic
gcacuuuaaaacaguuucc

SEQ ID NO: 16922 - RNA, 19 nt, Artificial Sequence
  Synthetic
gauauucaugaaauuuucc

SEQ ID NO: 16923 - RNA, 23 nt, Artificial Sequence
  Synthetic
gccugauauucaugaaauuuucc

SEQ ID NO: 16924 - RNA, 21 nt, Artificial Sequence
  Synthetic
gaaacucugaaggcauuuucc

SEQ ID NO: 16925 - RNA, 24 nt, Artificial Sequence
  Synthetic
guugaaacucugaaggcauuuucc

SEQ ID NO: 16926 - RNA, 18 nt, Artificial Sequence
  Synthetic
gggguccgagacuuuucc

SEQ ID NO: 16927 - RNA, 22 nt, Artificial Sequence
  Synthetic
guaugggguccgagacuuuucc

SEQ ID NO: 16928 - RNA, 23 nt, Artificial Sequence
  Synthetic
gguaugggguccgagacuuuucc

SEQ ID NO: 16929 - RNA, 18 nt, Artificial Sequence
  Synthetic
gcucuuaaaaccuuuucc

SEQ ID NO: 16930 - RNA, 21 nt, Artificial Sequence
  Synthetic
guuuauguaaaugccuuuucc

SEQ ID NO: 16931 - RNA, 20 nt, Artificial Sequence
  Synthetic
gaaugguacccugcuuuucc

SEQ ID NO: 16932 - RNA, 22 nt, Artificial Sequence
  Synthetic
gugaaugguacccugcuuuucc

SEQ ID NO: 16933 - RNA, 23 nt, Artificial Sequence
  Synthetic
ggugaaugguacccugcuuuucc

SEQ ID NO: 16934 - RNA, 18 nt, Artificial Sequence
  Synthetic
gaaauucuuggguuuucc

SEQ ID NO: 16935 - RNA, 20 nt, Artificial Sequence
  Synthetic
guuggauuuguuauuuuucc

SEQ ID NO: 16936 - RNA, 22 nt, Artificial Sequence
  Synthetic
gauucccuucaucucuuuuucc

SEQ ID NO: 16937 - RNA, 23 nt, Artificial Sequence
  Synthetic
gaaaucauuuguccuccaaaagc

SEQ ID NO: 16938 - RNA, 21 nt, Artificial Sequence
  Synthetic
guaaugaggaacuguaaaagc

SEQ ID NO: 16939 - RNA, 24 nt, Artificial Sequence
  Synthetic
gccauaacaaguguuugccaaagc

SEQ ID NO: 16940 - RNA, 20 nt, Artificial Sequence
  Synthetic
gucaauauuagauccaaagc

SEQ ID NO: 16941 - RNA, 22 nt, Artificial Sequence
  Synthetic
gagucaauauuagauccaaagc

SEQ ID NO: 16942 - RNA, 23 nt, Artificial Sequence
  Synthetic
ggagucaauauuagauccaaagc

SEQ ID NO: 16943 - RNA, 24 nt, Artificial Sequence
  Synthetic
gggagucaauauuagauccaaagc

SEQ ID NO: 16944 - RNA, 18 nt, Artificial Sequence
  Synthetic
guuucuuauggcgaaagc

SEQ ID NO: 16945 - RNA, 22 nt, Artificial Sequence
  Synthetic
gagaaaaauaaaugaggaaagc

SEQ ID NO: 16946 - RNA, 22 nt, Artificial Sequence
  Synthetic
gauuuacucucuuagauaaagc

SEQ ID NO: 16947 - RNA, 19 nt, Artificial Sequence
  Synthetic
guacuaugaguuguaaagc

SEQ ID NO: 16948 - RNA, 23 nt, Artificial Sequence
  Synthetic
gccuguacuaugaguuguaaagc

SEQ ID NO: 16949 - RNA, 21 nt, Artificial Sequence
  Synthetic
gcauuaucaucaguuacaagc

SEQ ID NO: 16950 - RNA, 18 nt, Artificial Sequence
  Synthetic
gugaaaugguaaccaagc

SEQ ID NO: 16951 - RNA, 21 nt, Artificial Sequence
  Synthetic
gcugugaaaugguaaccaagc

SEQ ID NO: 16952 - RNA, 18 nt, Artificial Sequence
  Synthetic
gccucuaaucuaccaagc

SEQ ID NO: 16953 - RNA, 21 nt, Artificial Sequence
  Synthetic
gcugccucuaaucuaccaagc

SEQ ID NO: 16954 - RNA, 22 nt, Artificial Sequence
  Synthetic
ggcugccucuaaucuaccaagc

SEQ ID NO: 16955 - RNA, 23 nt, Artificial Sequence
  Synthetic
gggcugccucuaaucuaccaagc

SEQ ID NO: 16956 - RNA, 19 nt, Artificial Sequence
  Synthetic
gauuccuaggcucccaagc

SEQ ID NO: 16957 - RNA, 21 nt, Artificial Sequence
  Synthetic
gccuucugcauccugccaagc

SEQ ID NO: 16958 - RNA, 20 nt, Artificial Sequence
  Synthetic
gcuucaagguguuaucaagc

SEQ ID NO: 16959 - RNA, 19 nt, Artificial Sequence
  Synthetic
gcaggcaaggcacagaagc

SEQ ID NO: 16960 - RNA, 18 nt, Artificial Sequence
  Synthetic
gcugguuucugcagaagc

SEQ ID NO: 16961 - RNA, 22 nt, Artificial Sequence
  Synthetic
gcuagcugguuucugcagaagc

SEQ ID NO: 16962 - RNA, 23 nt, Artificial Sequence
  Synthetic
ggcuagcugguuucugcagaagc

SEQ ID NO: 16963 - RNA, 24 nt, Artificial Sequence
  Synthetic
gggcuagcugguuucugcagaagc

SEQ ID NO: 16964 - RNA, 19 nt, Artificial Sequence
  Synthetic
gaccaacguuguccgaagc

SEQ ID NO: 16965 - RNA, 20 nt, Artificial Sequence
  Synthetic
ggaccaacguuguccgaagc

SEQ ID NO: 16966 - RNA, 20 nt, Artificial Sequence
  Synthetic
gaagcugaucccuaggaagc

SEQ ID NO: 16967 - RNA, 21 nt, Artificial Sequence
  Synthetic
ggaagcugaucccuaggaagc

SEQ ID NO: 16968 - RNA, 18 nt, Artificial Sequence
  Synthetic
guacuugugaggggaagc

SEQ ID NO: 16969 - RNA, 18 nt, Artificial Sequence
  Synthetic
gaacaaugucugggaagc

SEQ ID NO: 16970 - RNA, 19 nt, Artificial Sequence
  Synthetic
ggaacaaugucugggaagc

SEQ ID NO: 16971 - RNA, 24 nt, Artificial Sequence
  Synthetic
gauaaggaacaaugucugggaagc

SEQ ID NO: 16972 - RNA, 18 nt, Artificial Sequence
  Synthetic
guuuguaugaacugaagc

SEQ ID NO: 16973 - RNA, 23 nt, Artificial Sequence
  Synthetic
guaauguuuguaugaacugaagc

SEQ ID NO: 16974 - RNA, 19 nt, Artificial Sequence
  Synthetic
gugcugggaaaugugaagc

SEQ ID NO: 16975 - RNA, 19 nt, Artificial Sequence
  Synthetic
guagaaguagauaauaagc

SEQ ID NO: 16976 - RNA, 23 nt, Artificial Sequence
  Synthetic
gaauguagaaguagauaauaagc

SEQ ID NO: 16977 - RNA, 18 nt, Artificial Sequence
  Synthetic
gaauuaaggacacuaagc

SEQ ID NO: 16978 - RNA, 20 nt, Artificial Sequence
  Synthetic
gaaccaauucccccaacagc

SEQ ID NO: 16979 - RNA, 24 nt, Artificial Sequence
  Synthetic
gauagaaccaauucccccaacagc

SEQ ID NO: 16980 - RNA, 24 nt, Artificial Sequence
  Synthetic
gauucaucucuugggugcaacagc

SEQ ID NO: 16981 - RNA, 21 nt, Artificial Sequence
  Synthetic
gaaugggucucuugcaacagc

SEQ ID NO: 16982 - RNA, 18 nt, Artificial Sequence
  Synthetic
gaaugagcgacacacagc

SEQ ID NO: 16983 - RNA, 21 nt, Artificial Sequence
  Synthetic
guagaaugagcgacacacagc

SEQ ID NO: 16984 - RNA, 24 nt, Artificial Sequence
  Synthetic
guuguagaaugagcgacacacagc

SEQ ID NO: 16985 - RNA, 23 nt, Artificial Sequence
  Synthetic
gauaauccauaaaaggccacagc

SEQ ID NO: 16986 - RNA, 24 nt, Artificial Sequence
  Synthetic
ggauaauccauaaaaggccacagc

SEQ ID NO: 16987 - RNA, 18 nt, Artificial Sequence
  Synthetic
gacuucggugaagacagc

SEQ ID NO: 16988 - RNA, 24 nt, Artificial Sequence
  Synthetic
guuuucuaccugauuaaugacagc

SEQ ID NO: 16989 - RNA, 23 nt, Artificial Sequence
  Synthetic
guauaaggacucaaaaauacagc

SEQ ID NO: 16990 - RNA, 21 nt, Artificial Sequence
  Synthetic
gaacuaugauugcuauacagc

SEQ ID NO: 16991 - RNA, 23 nt, Artificial Sequence
  Synthetic
gagaacuaugauugcuauacagc

SEQ ID NO: 16992 - RNA, 18 nt, Artificial Sequence
  Synthetic
gcaagugugagaaccagc

SEQ ID NO: 16993 - RNA, 21 nt, Artificial Sequence
  Synthetic
guugcaagugugagaaccagc

SEQ ID NO: 16994 - RNA, 20 nt, Artificial Sequence
  Synthetic
guucuuagacacggcccagc

SEQ ID NO: 16995 - RNA, 18 nt, Artificial Sequence
  Synthetic
gacuuuacuuaagccagc

SEQ ID NO: 16996 - RNA, 18 nt, Artificial Sequence
  Synthetic
gguucauagguugccagc

SEQ ID NO: 16997 - RNA, 23 nt, Artificial Sequence
  Synthetic
gaacuuagugguggauguccagc

SEQ ID NO: 16998 - RNA, 19 nt, Artificial Sequence
  Synthetic
gucaauucuccauagcagc

SEQ ID NO: 16999 - RNA, 19 nt, Artificial Sequence
  Synthetic
gucucauuuugauggcagc

SEQ ID NO: 17000 - RNA, 22 nt, Artificial Sequence
  Synthetic
guagucucauuuugauggcagc

SEQ ID NO: 17001 - RNA, 23 nt, Artificial Sequence
  Synthetic
gguagucucauuuugauggcagc

SEQ ID NO: 17002 - RNA, 24 nt, Artificial Sequence
  Synthetic
ggguagucucauuuugauggcagc

SEQ ID NO: 17003 - RNA, 20 nt, Artificial Sequence
  Synthetic
gcuauccagacccuggcagc

SEQ ID NO: 17004 - RNA, 22 nt, Artificial Sequence
  Synthetic
gagcuauccagacccuggcagc

SEQ ID NO: 17005 - RNA, 24 nt, Artificial Sequence
  Synthetic
gagagcuauccagacccuggcagc

SEQ ID NO: 17006 - RNA, 21 nt, Artificial Sequence
  Synthetic
gaaaacuaugucaauaucagc

SEQ ID NO: 17007 - RNA, 20 nt, Artificial Sequence
  Synthetic
guauauagaggugacucagc

SEQ ID NO: 17008 - RNA, 21 nt, Artificial Sequence
  Synthetic
gguauauagaggugacucagc

SEQ ID NO: 17009 - RNA, 23 nt, Artificial Sequence
  Synthetic
gagguauauagaggugacucagc

SEQ ID NO: 17010 - RNA, 20 nt, Artificial Sequence
  Synthetic
guagcugaugucccuucagc

SEQ ID NO: 17011 - RNA, 22 nt, Artificial Sequence
  Synthetic
gaguagcugaugucccuucagc

SEQ ID NO: 17012 - RNA, 20 nt, Artificial Sequence
  Synthetic
gaauaucacuucuuuucagc

SEQ ID NO: 17013 - RNA, 18 nt, Artificial Sequence
  Synthetic
ggagauuggugaaagagc

SEQ ID NO: 17014 - RNA, 19 nt, Artificial Sequence
  Synthetic
gggagauuggugaaagagc

SEQ ID NO: 17015 - RNA, 20 nt, Artificial Sequence
  Synthetic
ggggagauuggugaaagagc

SEQ ID NO: 17016 - RNA, 21 nt, Artificial Sequence
  Synthetic
gggggagauuggugaaagagc

SEQ ID NO: 17017 - RNA, 24 nt, Artificial Sequence
  Synthetic
gaugggggagauuggugaaagagc

SEQ ID NO: 17018 - RNA, 21 nt, Artificial Sequence
  Synthetic
gcuuacauguaaauaaagagc

SEQ ID NO: 17019 - RNA, 19 nt, Artificial Sequence
  Synthetic
gauuugggcaauaaagagc

SEQ ID NO: 17020 - RNA, 21 nt, Artificial Sequence
  Synthetic
gagauuugggcaauaaagagc

SEQ ID NO: 17021 - RNA, 24 nt, Artificial Sequence
  Synthetic
guagagauuugggcaauaaagagc

SEQ ID NO: 17022 - RNA, 21 nt, Artificial Sequence
  Synthetic
gauagguagucuagcaagagc

SEQ ID NO: 17023 - RNA, 23 nt, Artificial Sequence
  Synthetic
gugauagguagucuagcaagagc

SEQ ID NO: 17024 - RNA, 18 nt, Artificial Sequence
  Synthetic
guuagcuaguggaagagc

SEQ ID NO: 17025 - RNA, 18 nt, Artificial Sequence
  Synthetic
gacuuuggaggggagagc

SEQ ID NO: 17026 - RNA, 21 nt, Artificial Sequence
  Synthetic
gaugacuuuggaggggagagc

SEQ ID NO: 17027 - RNA, 22 nt, Artificial Sequence
  Synthetic
ggaugacuuuggaggggagagc

SEQ ID NO: 17028 - RNA, 23 nt, Artificial Sequence
  Synthetic
gggaugacuuuggaggggagagc

SEQ ID NO: 17029 - RNA, 24 nt, Artificial Sequence
  Synthetic
ggggaugacuuuggaggggagagc

SEQ ID NO: 17030 - RNA, 18 nt, Artificial Sequence
  Synthetic
gacugaagaggauagagc

SEQ ID NO: 17031 - RNA, 20 nt, Artificial Sequence
  Synthetic
gugacugaagaggauagagc

SEQ ID NO: 17032 - RNA, 22 nt, Artificial Sequence
  Synthetic
gagugacugaagaggauagagc

SEQ ID NO: 17033 - RNA, 19 nt, Artificial Sequence
  Synthetic
gucuuugaagcacuagagc

SEQ ID NO: 17034 - RNA, 22 nt, Artificial Sequence
  Synthetic
gcugucuuugaagcacuagagc

SEQ ID NO: 17035 - RNA, 22 nt, Artificial Sequence
  Synthetic
guaaguaaaaaagcuuuagagc

SEQ ID NO: 17036 - RNA, 23 nt, Artificial Sequence
  Synthetic
gguaaguaaaaaagcuuuagagc

SEQ ID NO: 17037 - RNA, 21 nt, Artificial Sequence
  Synthetic
gacacaaaagauggaaggagc

SEQ ID NO: 17038 - RNA, 22 nt, Artificial Sequence
  Synthetic
ggacacaaaagauggaaggagc

SEQ ID NO: 17039 - RNA, 20 nt, Artificial Sequence
  Synthetic
guacuuggaauguaaugagc

SEQ ID NO: 17040 - RNA, 22 nt, Artificial Sequence
  Synthetic
gaguacuuggaauguaaugagc

SEQ ID NO: 17041 - RNA, 21 nt, Artificial Sequence
  Synthetic
gaaagaggaaagaaacugagc

SEQ ID NO: 17042 - RNA, 24 nt, Artificial Sequence
  Synthetic
gaagaaagaggaaagaaacugagc

SEQ ID NO: 17043 - RNA, 18 nt, Artificial Sequence
  Synthetic
gauauuagaaacuugagc

SEQ ID NO: 17044 - RNA, 19 nt, Artificial Sequence
  Synthetic
ggauauuagaaacuugagc

SEQ ID NO: 17045 - RNA, 20 nt, Artificial Sequence
  Synthetic
gucauuuuucaaauuugagc

SEQ ID NO: 17046 - RNA, 21 nt, Artificial Sequence
  Synthetic
gcuugucucaaacuuuugagc

SEQ ID NO: 17047 - RNA, 23 nt, Artificial Sequence
  Synthetic
gcaaaagauaaauuugaaauagc

SEQ ID NO: 17048 - RNA, 22 nt, Artificial Sequence
  Synthetic
gacacaucaauaaauggauagc

SEQ ID NO: 17049 - RNA, 23 nt, Artificial Sequence
  Synthetic
ggacacaucaauaaauggauagc

SEQ ID NO: 17050 - RNA, 24 nt, Artificial Sequence
  Synthetic
gaaacucuagcaacacaguauagc

SEQ ID NO: 17051 - RNA, 19 nt, Artificial Sequence
  Synthetic
gcgccaagauuccccuagc

SEQ ID NO: 17052 - RNA, 20 nt, Artificial Sequence
  Synthetic
ggcgccaagauuccccuagc

SEQ ID NO: 17053 - RNA, 23 nt, Artificial Sequence
  Synthetic
guuaucuagguuccaauccuagc

SEQ ID NO: 17054 - RNA, 24 nt, Artificial Sequence
  Synthetic
gguuaucuagguuccaauccuagc

SEQ ID NO: 17055 - RNA, 20 nt, Artificial Sequence
  Synthetic
gcuccauauagacaucuagc

SEQ ID NO: 17056 - RNA, 21 nt, Artificial Sequence
  Synthetic
ggcuccauauagacaucuagc

SEQ ID NO: 17057 - RNA, 22 nt, Artificial Sequence
  Synthetic
gggcuccauauagacaucuagc

SEQ ID NO: 17058 - RNA, 18 nt, Artificial Sequence
  Synthetic
gaacuuggugguaguagc

SEQ ID NO: 17059 - RNA, 18 nt, Artificial Sequence
  Synthetic
gcacaccagaaugguagc

SEQ ID NO: 17060 - RNA, 19 nt, Artificial Sequence
  Synthetic
ggcacaccagaaugguagc

SEQ ID NO: 17061 - RNA, 23 nt, Artificial Sequence
  Synthetic
guuuggcacaccagaaugguagc

SEQ ID NO: 17062 - RNA, 20 nt, Artificial Sequence
  Synthetic
gccuugugaguuuguguagc

SEQ ID NO: 17063 - RNA, 22 nt, Artificial Sequence
  Synthetic
gugccuugugaguuuguguagc

SEQ ID NO: 17064 - RNA, 21 nt, Artificial Sequence
  Synthetic
gauagccugacaaggauuagc

SEQ ID NO: 17065 - RNA, 24 nt, Artificial Sequence
  Synthetic
gaugauagccugacaaggauuagc

SEQ ID NO: 17066 - RNA, 18 nt, Artificial Sequence
  Synthetic
gggaguuucgauauuagc

SEQ ID NO: 17067 - RNA, 23 nt, Artificial Sequence
  Synthetic
gauaagggaguuucgauauuagc

SEQ ID NO: 17068 - RNA, 24 nt, Artificial Sequence
  Synthetic
ggauaagggaguuucgauauuagc

SEQ ID NO: 17069 - RNA, 22 nt, Artificial Sequence
  Synthetic
guccucgguuuaggauauuagc

SEQ ID NO: 17070 - RNA, 22 nt, Artificial Sequence
  Synthetic
gcaaccaauauagaaacuuagc

SEQ ID NO: 17071 - RNA, 18 nt, Artificial Sequence
  Synthetic
gcauuuauaugauuuagc

SEQ ID NO: 17072 - RNA, 24 nt, Artificial Sequence
  Synthetic
guuuuagcauuuauaugauuuagc

SEQ ID NO: 17073 - RNA, 19 nt, Artificial Sequence
  Synthetic
gagucucggaauauuuagc

SEQ ID NO: 17074 - RNA, 23 nt, Artificial Sequence
  Synthetic
guuagagucucggaauauuuagc

SEQ ID NO: 17075 - RNA, 20 nt, Artificial Sequence
  Synthetic
gauuuuucggagacuuuagc

SEQ ID NO: 17076 - RNA, 21 nt, Artificial Sequence
  Synthetic
ggauuuuucggagacuuuagc

SEQ ID NO: 17077 - RNA, 23 nt, Artificial Sequence
  Synthetic
gcggauuuuucggagacuuuagc

SEQ ID NO: 17078 - RNA, 19 nt, Artificial Sequence
  Synthetic
gcauuugcugagugaacgc

SEQ ID NO: 17079 - RNA, 23 nt, Artificial Sequence
  Synthetic
guaagcauuugcugagugaacgc

SEQ ID NO: 17080 - RNA, 18 nt, Artificial Sequence
  Synthetic
ggguaacaauauuuacgc

SEQ ID NO: 17081 - RNA, 18 nt, Artificial Sequence
  Synthetic
gggaggucccaggaucgc

SEQ ID NO: 17082 - RNA, 24 nt, Artificial Sequence
  Synthetic
gauuaagggaggucccaggaucgc

SEQ ID NO: 17083 - RNA, 18 nt, Artificial Sequence
  Synthetic
gugaggaaagauggucgc

SEQ ID NO: 17084 - RNA, 24 nt, Artificial Sequence
  Synthetic
guuaaagugaggaaagauggucgc

SEQ ID NO: 17085 - RNA, 21 nt, Artificial Sequence
  Synthetic
gcacauagauagcagaaaggc

SEQ ID NO: 17086 - RNA, 22 nt, Artificial Sequence
  Synthetic
ggcacauagauagcagaaaggc

SEQ ID NO: 17087 - RNA, 23 nt, Artificial Sequence
  Synthetic
gggcacauagauagcagaaaggc

SEQ ID NO: 17088 - RNA, 18 nt, Artificial Sequence
  Synthetic
gaaggcugcaggaaaggc

SEQ ID NO: 17089 - RNA, 20 nt, Artificial Sequence
  Synthetic
gugaaggcugcaggaaaggc

SEQ ID NO: 17090 - RNA, 22 nt, Artificial Sequence
  Synthetic
gagugaaggcugcaggaaaggc

SEQ ID NO: 17091 - RNA, 23 nt, Artificial Sequence
  Synthetic
ggagugaaggcugcaggaaaggc

SEQ ID NO: 17092 - RNA, 24 nt, Artificial Sequence
  Synthetic
gggagugaaggcugcaggaaaggc

SEQ ID NO: 17093 - RNA, 18 nt, Artificial Sequence
  Synthetic
guuagcuguuuccaaggc

SEQ ID NO: 17094 - RNA, 20 nt, Artificial Sequence
  Synthetic
guguuagcuguuuccaaggc

SEQ ID NO: 17095 - RNA, 20 nt, Artificial Sequence
  Synthetic
guacucuacauaggcaaggc

SEQ ID NO: 17096 - RNA, 24 nt, Artificial Sequence
  Synthetic
gcuuguacucuacauaggcaaggc

SEQ ID NO: 17097 - RNA, 19 nt, Artificial Sequence
  Synthetic
gagcuagucaugagaaggc

SEQ ID NO: 17098 - RNA, 22 nt, Artificial Sequence
  Synthetic
gcugagcuagucaugagaaggc

SEQ ID NO: 17099 - RNA, 22 nt, Artificial Sequence
  Synthetic
gaagagaggaaaucaggaaggc

SEQ ID NO: 17100 - RNA, 24 nt, Artificial Sequence
  Synthetic
gagaagagaggaaaucaggaaggc

SEQ ID NO: 17101 - RNA, 22 nt, Artificial Sequence
  Synthetic
guucaguaaagagggauaaggc

SEQ ID NO: 17102 - RNA, 24 nt, Artificial Sequence
  Synthetic
gaguucaguaaagagggauaaggc

SEQ ID NO: 17103 - RNA, 18 nt, Artificial Sequence
  Synthetic
gauccacccuucuaaggc

SEQ ID NO: 17104 - RNA, 24 nt, Artificial Sequence
  Synthetic
guuuuugauccacccuucuaaggc

SEQ ID NO: 17105 - RNA, 18 nt, Artificial Sequence
  Synthetic
ggaauuccuaauuaaggc

SEQ ID NO: 17106 - RNA, 22 nt, Artificial Sequence
  Synthetic
gauuggaauuccuaauuaaggc

SEQ ID NO: 17107 - RNA, 24 nt, Artificial Sequence
  Synthetic
gacaccaugcuuucuaccacaggc

SEQ ID NO: 17108 - RNA, 18 nt, Artificial Sequence
  Synthetic
gaaugaugucagacaggc

SEQ ID NO: 17109 - RNA, 18 nt, Artificial Sequence
  Synthetic
gaaaauugccuuacaggc

SEQ ID NO: 17110 - RNA, 20 nt, Artificial Sequence
  Synthetic
gugaaaauugccuuacaggc

SEQ ID NO: 17111 - RNA, 21 nt, Artificial Sequence
  Synthetic
gaauaggaaaugccugcaggc

SEQ ID NO: 17112 - RNA, 22 nt, Artificial Sequence
  Synthetic
guuccagcuuuagcuaucaggc

SEQ ID NO: 17113 - RNA, 24 nt, Artificial Sequence
  Synthetic
guguuccagcuuuagcuaucaggc

SEQ ID NO: 17114 - RNA, 21 nt, Artificial Sequence
  Synthetic
gaaauuccagauacaagaggc

SEQ ID NO: 17115 - RNA, 24 nt, Artificial Sequence
  Synthetic
guagaaauuccagauacaagaggc

SEQ ID NO: 17116 - RNA, 23 nt, Artificial Sequence
  Synthetic
guuuuugcccauugagcagaggc

SEQ ID NO: 17117 - RNA, 24 nt, Artificial Sequence
  Synthetic
gacuuccuuuucugacauggaggc

SEQ ID NO: 17118 - RNA, 19 nt, Artificial Sequence
  Synthetic
gcagaaaaaaaacauaggc

SEQ ID NO: 17119 - RNA, 20 nt, Artificial Sequence
  Synthetic
gaugcauaaggcuucuaggc

SEQ ID NO: 17120 - RNA, 21 nt, Artificial Sequence
  Synthetic
ggaugcauaaggcuucuaggc

SEQ ID NO: 17121 - RNA, 22 nt, Artificial Sequence
  Synthetic
gggaugcauaaggcuucuaggc

SEQ ID NO: 17122 - RNA, 19 nt, Artificial Sequence
  Synthetic
gagaacaaauguuuuaggc

SEQ ID NO: 17123 - RNA, 21 nt, Artificial Sequence
  Synthetic
gugagaacaaauguuuuaggc

SEQ ID NO: 17124 - RNA, 18 nt, Artificial Sequence
  Synthetic
gaggcaguuacgaagggc

SEQ ID NO: 17125 - RNA, 19 nt, Artificial Sequence
  Synthetic
ggaggcaguuacgaagggc

SEQ ID NO: 17126 - RNA, 21 nt, Artificial Sequence
  Synthetic
guggaggcaguuacgaagggc

SEQ ID NO: 17127 - RNA, 24 nt, Artificial Sequence
  Synthetic
guaguggaggcaguuacgaagggc

SEQ ID NO: 17128 - RNA, 18 nt, Artificial Sequence
  Synthetic
guccccugaaaacagggc

SEQ ID NO: 17129 - RNA, 19 nt, Artificial Sequence
  Synthetic
gguccccugaaaacagggc

SEQ ID NO: 17130 - RNA, 20 nt, Artificial Sequence
  Synthetic
ggguccccugaaaacagggc

SEQ ID NO: 17131 - RNA, 21 nt, Artificial Sequence
  Synthetic
guccuggaccaggaccagggc

SEQ ID NO: 17132 - RNA, 18 nt, Artificial Sequence
  Synthetic
gcgaauagagggcagggc

SEQ ID NO: 17133 - RNA, 19 nt, Artificial Sequence
  Synthetic
gcugcacaggaaggagggc

SEQ ID NO: 17134 - RNA, 22 nt, Artificial Sequence
  Synthetic
guuuaucccuggugaggagggc

SEQ ID NO: 17135 - RNA, 21 nt, Artificial Sequence
  Synthetic
gaaauuauaugauccuagggc

SEQ ID NO: 17136 - RNA, 24 nt, Artificial Sequence
  Synthetic
gaugaaauuauaugauccuagggc

SEQ ID NO: 17137 - RNA, 18 nt, Artificial Sequence
  Synthetic
gagaucaagggcacgggc

SEQ ID NO: 17138 - RNA, 24 nt, Artificial Sequence
  Synthetic
gcucuaaaaauccagaaaaggggc

SEQ ID NO: 17139 - RNA, 18 nt, Artificial Sequence
  Synthetic
gagaagggaagcuggggc

SEQ ID NO: 17140 - RNA, 21 nt, Artificial Sequence
  Synthetic
guugagaagggaagcuggggc

SEQ ID NO: 17141 - RNA, 18 nt, Artificial Sequence
  Synthetic
gagaguugaacaaugggc

SEQ ID NO: 17142 - RNA, 22 nt, Artificial Sequence
  Synthetic
gcuugagaguugaacaaugggc

SEQ ID NO: 17143 - RNA, 23 nt, Artificial Sequence
  Synthetic
ggcuugagaguugaacaaugggc

SEQ ID NO: 17144 - RNA, 20 nt, Artificial Sequence
  Synthetic
gaaagauacacuugaugggc

SEQ ID NO: 17145 - RNA, 19 nt, Artificial Sequence
  Synthetic
gauaacacacugagugggc

SEQ ID NO: 17146 - RNA, 22 nt, Artificial Sequence
  Synthetic
guugauaacacacugagugggc

SEQ ID NO: 17147 - RNA, 23 nt, Artificial Sequence
  Synthetic
gguugauaacacacugagugggc

SEQ ID NO: 17148 - RNA, 20 nt, Artificial Sequence
  Synthetic
gauuggagccacuggugggc

SEQ ID NO: 17149 - RNA, 21 nt, Artificial Sequence
  Synthetic
ggauuggagccacuggugggc

SEQ ID NO: 17150 - RNA, 24 nt, Artificial Sequence
  Synthetic
guuggauuggagccacuggugggc

SEQ ID NO: 17151 - RNA, 18 nt, Artificial Sequence
  Synthetic
gaggguugcaaguugggc

SEQ ID NO: 17152 - RNA, 20 nt, Artificial Sequence
  Synthetic
gagaggguugcaaguugggc

SEQ ID NO: 17153 - RNA, 22 nt, Artificial Sequence
  Synthetic
gugagaggguugcaaguugggc

SEQ ID NO: 17154 - RNA, 24 nt, Artificial Sequence
  Synthetic
gagugagaggguugcaaguugggc

SEQ ID NO: 17155 - RNA, 20 nt, Artificial Sequence
  Synthetic
gcaucucucauucuuugggc

SEQ ID NO: 17156 - RNA, 23 nt, Artificial Sequence
  Synthetic
gaagcaucucucauucuuugggc

SEQ ID NO: 17157 - RNA, 18 nt, Artificial Sequence
  Synthetic
gcucagagugcuaauggc

SEQ ID NO: 17158 - RNA, 21 nt, Artificial Sequence
  Synthetic
guagcucagagugcuaauggc

SEQ ID NO: 17159 - RNA, 18 nt, Artificial Sequence
  Synthetic
gaagaggaguaagauggc

SEQ ID NO: 17160 - RNA, 20 nt, Artificial Sequence
  Synthetic
gagaagaggaguaagauggc

SEQ ID NO: 17161 - RNA, 21 nt, Artificial Sequence
  Synthetic
gcauaagcaaauggauauggc

SEQ ID NO: 17162 - RNA, 23 nt, Artificial Sequence
  Synthetic
gagcauaagcaaauggauauggc

SEQ ID NO: 17163 - RNA, 24 nt, Artificial Sequence
  Synthetic
ggagcauaagcaaauggauauggc

SEQ ID NO: 17164 - RNA, 21 nt, Artificial Sequence
  Synthetic
gucauuguauuauccuauggc

SEQ ID NO: 17165 - RNA, 24 nt, Artificial Sequence
  Synthetic
gaacauggaggaagugauuauggc

SEQ ID NO: 17166 - RNA, 19 nt, Artificial Sequence
  Synthetic
gacaggagccaacacuggc

SEQ ID NO: 17167 - RNA, 18 nt, Artificial Sequence
  Synthetic
guccuaaggaaaccuggc

SEQ ID NO: 17168 - RNA, 19 nt, Artificial Sequence
  Synthetic
gguccuaaggaaaccuggc

SEQ ID NO: 17169 - RNA, 21 nt, Artificial Sequence
  Synthetic
gagguccuaaggaaaccuggc

SEQ ID NO: 17170 - RNA, 23 nt, Artificial Sequence
  Synthetic
gagagguccuaaggaaaccuggc

SEQ ID NO: 17171 - RNA, 24 nt, Artificial Sequence
  Synthetic
ggagagguccuaaggaaaccuggc

SEQ ID NO: 17172 - RNA, 18 nt, Artificial Sequence
  Synthetic
gauaaacagacagcuggc

SEQ ID NO: 17173 - RNA, 21 nt, Artificial Sequence
  Synthetic
gcagauaaacagacagcuggc

SEQ ID NO: 17174 - RNA, 22 nt, Artificial Sequence
  Synthetic
ggcagauaaacagacagcuggc

SEQ ID NO: 17175 - RNA, 23 nt, Artificial Sequence
  Synthetic
gggcagauaaacagacagcuggc

SEQ ID NO: 17176 - RNA, 19 nt, Artificial Sequence
  Synthetic
gcaguagauacuuaguggc

SEQ ID NO: 17177 - RNA, 21 nt, Artificial Sequence
  Synthetic
guuaggcauuguguuaguggc

SEQ ID NO: 17178 - RNA, 20 nt, Artificial Sequence
  Synthetic
guacuauaugaaaacguggc

SEQ ID NO: 17179 - RNA, 21 nt, Artificial Sequence
  Synthetic
gguacuauaugaaaacguggc

SEQ ID NO: 17180 - RNA, 20 nt, Artificial Sequence
  Synthetic
gauguacauggcaggguggc

SEQ ID NO: 17181 - RNA, 21 nt, Artificial Sequence
  Synthetic
ggauguacauggcaggguggc

SEQ ID NO: 17182 - RNA, 19 nt, Artificial Sequence
  Synthetic
gauugcauuguaggguggc

SEQ ID NO: 17183 - RNA, 21 nt, Artificial Sequence
  Synthetic
gagauugcauuguaggguggc

SEQ ID NO: 17184 - RNA, 24 nt, Artificial Sequence
  Synthetic
guagagauugcauuguaggguggc

SEQ ID NO: 17185 - RNA, 18 nt, Artificial Sequence
  Synthetic
gggguuucaccuuguggc

SEQ ID NO: 17186 - RNA, 19 nt, Artificial Sequence
  Synthetic
ggggguuucaccuuguggc

SEQ ID NO: 17187 - RNA, 19 nt, Artificial Sequence
  Synthetic
gaaugcugucaaaauuggc

SEQ ID NO: 17188 - RNA, 21 nt, Artificial Sequence
  Synthetic
gagaaugcugucaaaauuggc

SEQ ID NO: 17189 - RNA, 24 nt, Artificial Sequence
  Synthetic
gaaaauucugcugccugcauuggc

SEQ ID NO: 17190 - RNA, 20 nt, Artificial Sequence
  Synthetic
gcuaagaguuauggguuggc

SEQ ID NO: 17191 - RNA, 23 nt, Artificial Sequence
  Synthetic
guugcuaagaguuauggguuggc

SEQ ID NO: 17192 - RNA, 23 nt, Artificial Sequence
  Synthetic
gcuuuccuuuugaagauguuggc

SEQ ID NO: 17193 - RNA, 19 nt, Artificial Sequence
  Synthetic
guuuugagacauauuuggc

SEQ ID NO: 17194 - RNA, 18 nt, Artificial Sequence
  Synthetic
guuuaucaagccaaaugc

SEQ ID NO: 17195 - RNA, 19 nt, Artificial Sequence
  Synthetic
gguuuaucaagccaaaugc

SEQ ID NO: 17196 - RNA, 18 nt, Artificial Sequence
  Synthetic
gcagaggcuuaacaaugc

SEQ ID NO: 17197 - RNA, 22 nt, Artificial Sequence
  Synthetic
gaaccccucaaccaagcaaugc

SEQ ID NO: 17198 - RNA, 18 nt, Artificial Sequence
  Synthetic
gcuccuuaaaugcaaugc

SEQ ID NO: 17199 - RNA, 21 nt, Artificial Sequence
  Synthetic
gcagcuccuuaaaugcaaugc

SEQ ID NO: 17200 - RNA, 19 nt, Artificial Sequence
  Synthetic
gcauuuugcuacagaaugc

SEQ ID NO: 17201 - RNA, 22 nt, Artificial Sequence
  Synthetic
gaaucaggauccagaggaaugc

SEQ ID NO: 17202 - RNA, 24 nt, Artificial Sequence
  Synthetic
gugaaucaggauccagaggaaugc

SEQ ID NO: 17203 - RNA, 20 nt, Artificial Sequence
  Synthetic
gccugcagacauuuuaaugc

SEQ ID NO: 17204 - RNA, 23 nt, Artificial Sequence
  Synthetic
guacuuuauaacuaucuacaugc

SEQ ID NO: 17205 - RNA, 21 nt, Artificial Sequence
  Synthetic
gauuugggaucuugaccaugc

SEQ ID NO: 17206 - RNA, 18 nt, Artificial Sequence
  Synthetic
guaugggggaaggcaugc

SEQ ID NO: 17207 - RNA, 22 nt, Artificial Sequence
  Synthetic
guuuguaugggggaaggcaugc

SEQ ID NO: 17208 - RNA, 24 nt, Artificial Sequence
  Synthetic
gcguuuguaugggggaaggcaugc

SEQ ID NO: 17209 - RNA, 21 nt, Artificial Sequence
  Synthetic
guacauuguuuaauuggaugc

SEQ ID NO: 17210 - RNA, 18 nt, Artificial Sequence
  Synthetic
guauuuaagacaugaugc

SEQ ID NO: 17211 - RNA, 18 nt, Artificial Sequence
  Synthetic
gcuuucacuauaauaugc

SEQ ID NO: 17212 - RNA, 19 nt, Artificial Sequence
  Synthetic
ggcuuucacuauaauaugc

SEQ ID NO: 17213 - RNA, 20 nt, Artificial Sequence
  Synthetic
gggcuuucacuauaauaugc

SEQ ID NO: 17214 - RNA, 21 nt, Artificial Sequence
  Synthetic
ggggcuuucacuauaauaugc

SEQ ID NO: 17215 - RNA, 19 nt, Artificial Sequence
  Synthetic
gacuuaucaaaggauaugc

SEQ ID NO: 17216 - RNA, 18 nt, Artificial Sequence
  Synthetic
ggaaggaacuuuauaugc

SEQ ID NO: 17217 - RNA, 22 nt, Artificial Sequence
  Synthetic
gucaggaaggaacuuuauaugc

SEQ ID NO: 17218 - RNA, 24 nt, Artificial Sequence
  Synthetic
gagucaggaaggaacuuuauaugc

SEQ ID NO: 17219 - RNA, 22 nt, Artificial Sequence
  Synthetic
gaacaaccaacucugaaacugc

SEQ ID NO: 17220 - RNA, 20 nt, Artificial Sequence
  Synthetic
guuugcaaagcauaaacugc

SEQ ID NO: 17221 - RNA, 21 nt, Artificial Sequence
  Synthetic
gcauuuuuaugaagacccugc

SEQ ID NO: 17222 - RNA, 22 nt, Artificial Sequence
  Synthetic
gcauaaagucugacaucccugc

SEQ ID NO: 17223 - RNA, 20 nt, Artificial Sequence
  Synthetic
guccuaacuguugucccugc

SEQ ID NO: 17224 - RNA, 18 nt, Artificial Sequence
  Synthetic
guuccagugugauccugc

SEQ ID NO: 17225 - RNA, 20 nt, Artificial Sequence
  Synthetic
guguuccagugugauccugc

SEQ ID NO: 17226 - RNA, 24 nt, Artificial Sequence
  Synthetic
gcuagugugaagagaaagagcugc

SEQ ID NO: 17227 - RNA, 18 nt, Artificial Sequence
  Synthetic
guaaugauacagagcugc

SEQ ID NO: 17228 - RNA, 24 nt, Artificial Sequence
  Synthetic
gccucucuguuuucuaaaaucugc

SEQ ID NO: 17229 - RNA, 23 nt, Artificial Sequence
  Synthetic
guuuuaagaaauuugcuaucugc

SEQ ID NO: 17230 - RNA, 20 nt, Artificial Sequence
  Synthetic
gaaauguuguaaaucucugc

SEQ ID NO: 17231 - RNA, 23 nt, Artificial Sequence
  Synthetic
guugaaauguuguaaaucucugc

SEQ ID NO: 17232 - RNA, 23 nt, Artificial Sequence
  Synthetic
gcaaaccacucacucacgucugc

SEQ ID NO: 17233 - RNA, 23 nt, Artificial Sequence
  Synthetic
gccaaaauaguuuuauauucugc

SEQ ID NO: 17234 - RNA, 21 nt, Artificial Sequence
  Synthetic
gccuaguauguuguauucugc

SEQ ID NO: 17235 - RNA, 22 nt, Artificial Sequence
  Synthetic
ggccuaguauguuguauucugc

SEQ ID NO: 17236 - RNA, 23 nt, Artificial Sequence
  Synthetic
gacaaugugauuaacacuucugc

SEQ ID NO: 17237 - RNA, 21 nt, Artificial Sequence
  Synthetic
gaaaguuuacuugcuuucugc

SEQ ID NO: 17238 - RNA, 23 nt, Artificial Sequence
  Synthetic
gugaaaguuuacuugcuuucugc

SEQ ID NO: 17239 - RNA, 19 nt, Artificial Sequence
  Synthetic
gccucucauacagaagugc

SEQ ID NO: 17240 - RNA, 19 nt, Artificial Sequence
  Synthetic
guggucauauugccagugc

SEQ ID NO: 17241 - RNA, 21 nt, Artificial Sequence
  Synthetic
gaguggucauauugccagugc

SEQ ID NO: 17242 - RNA, 24 nt, Artificial Sequence
  Synthetic
guagaguggucauauugccagugc

SEQ ID NO: 17243 - RNA, 21 nt, Artificial Sequence
  Synthetic
gauuuguuuugcuaagagugc

SEQ ID NO: 17244 - RNA, 22 nt, Artificial Sequence
  Synthetic
ggauuuguuuugcuaagagugc

SEQ ID NO: 17245 - RNA, 24 nt, Artificial Sequence
  Synthetic
gaggauuuguuuugcuaagagugc

SEQ ID NO: 17246 - RNA, 20 nt, Artificial Sequence
  Synthetic
gaugauaagaaagagagugc

SEQ ID NO: 17247 - RNA, 18 nt, Artificial Sequence
  Synthetic
gaaggcuuacacaggugc

SEQ ID NO: 17248 - RNA, 24 nt, Artificial Sequence
  Synthetic
gacacugaaggcuuacacaggugc

SEQ ID NO: 17249 - RNA, 22 nt, Artificial Sequence
  Synthetic
gucuaccauaccugguuggugc

SEQ ID NO: 17250 - RNA, 22 nt, Artificial Sequence
  Synthetic
guuuuccucuauuugaaugugc

SEQ ID NO: 17251 - RNA, 23 nt, Artificial Sequence
  Synthetic
gguuuuccucuauuugaaugugc

SEQ ID NO: 17252 - RNA, 19 nt, Artificial Sequence
  Synthetic
gcagagccuuuagaugugc

SEQ ID NO: 17253 - RNA, 21 nt, Artificial Sequence
  Synthetic
gcacagucagaacuagugugc

SEQ ID NO: 17254 - RNA, 23 nt, Artificial Sequence
  Synthetic
gugcacagucagaacuagugugc

SEQ ID NO: 17255 - RNA, 24 nt, Artificial Sequence
  Synthetic
ggugcacagucagaacuagugugc

SEQ ID NO: 17256 - RNA, 24 nt, Artificial Sequence
  Synthetic
gauucucacaugcaguaauugugc

SEQ ID NO: 17257 - RNA, 20 nt, Artificial Sequence
  Synthetic
guccacagcaaaaguugugc

SEQ ID NO: 17258 - RNA, 21 nt, Artificial Sequence
  Synthetic
gguccacagcaaaaguugugc

SEQ ID NO: 17259 - RNA, 19 nt, Artificial Sequence
  Synthetic
gccuuauugguauuugugc

SEQ ID NO: 17260 - RNA, 19 nt, Artificial Sequence
  Synthetic
gauaugugguuacaauugc

SEQ ID NO: 17261 - RNA, 23 nt, Artificial Sequence
  Synthetic
gauagauaugugguuacaauugc

SEQ ID NO: 17262 - RNA, 20 nt, Artificial Sequence
  Synthetic
gcaaaagcugucaacauugc

SEQ ID NO: 17263 - RNA, 23 nt, Artificial Sequence
  Synthetic
gaagcaaaagcugucaacauugc

SEQ ID NO: 17264 - RNA, 19 nt, Artificial Sequence
  Synthetic
gauguacaucauagauugc

SEQ ID NO: 17265 - RNA, 21 nt, Artificial Sequence
  Synthetic
gagauguacaucauagauugc

SEQ ID NO: 17266 - RNA, 22 nt, Artificial Sequence
  Synthetic
ggagauguacaucauagauugc

SEQ ID NO: 17267 - RNA, 20 nt, Artificial Sequence
  Synthetic
gcagagguguucuuuauugc

SEQ ID NO: 17268 - RNA, 23 nt, Artificial Sequence
  Synthetic
gaagcagagguguucuuuauugc

SEQ ID NO: 17269 - RNA, 24 nt, Artificial Sequence
  Synthetic
ggaagcagagguguucuuuauugc

SEQ ID NO: 17270 - RNA, 21 nt, Artificial Sequence
  Synthetic
gaacucccagguaacccuugc

SEQ ID NO: 17271 - RNA, 18 nt, Artificial Sequence
  Synthetic
gcccaaagaggcccuugc

SEQ ID NO: 17272 - RNA, 19 nt, Artificial Sequence
  Synthetic
gaagugcaguggcccuugc

SEQ ID NO: 17273 - RNA, 20 nt, Artificial Sequence
  Synthetic
ggaagugcaguggcccuugc

SEQ ID NO: 17274 - RNA, 21 nt, Artificial Sequence
  Synthetic
gggaagugcaguggcccuugc

SEQ ID NO: 17275 - RNA, 23 nt, Artificial Sequence
  Synthetic
gaaaaagacauuugacuaguugc

SEQ ID NO: 17276 - RNA, 18 nt, Artificial Sequence
  Synthetic
gaguugaugucugguugc

SEQ ID NO: 17277 - RNA, 24 nt, Artificial Sequence
  Synthetic
gccuacgaguugaugucugguugc

SEQ ID NO: 17278 - RNA, 18 nt, Artificial Sequence
  Synthetic
gauagaucagcauguugc

SEQ ID NO: 17279 - RNA, 21 nt, Artificial Sequence
  Synthetic
gaagauagaucagcauguugc

SEQ ID NO: 17280 - RNA, 23 nt, Artificial Sequence
  Synthetic
gacaacaaaacggucaaauuugc

SEQ ID NO: 17281 - RNA, 22 nt, Artificial Sequence
  Synthetic
gcacacaguuuaaguaauuugc

SEQ ID NO: 17282 - RNA, 23 nt, Artificial Sequence
  Synthetic
ggcacacaguuuaaguaauuugc

SEQ ID NO: 17283 - RNA, 18 nt, Artificial Sequence
  Synthetic
guuaccucacugauuugc

SEQ ID NO: 17284 - RNA, 24 nt, Artificial Sequence
  Synthetic
guaaaaguuaccucacugauuugc

SEQ ID NO: 17285 - RNA, 23 nt, Artificial Sequence
  Synthetic
gacauuuuauauaacuucuuugc

SEQ ID NO: 17286 - RNA, 22 nt, Artificial Sequence
  Synthetic
gacuugucagagugcauuuugc

SEQ ID NO: 17287 - RNA, 18 nt, Artificial Sequence
  Synthetic
guuaagagauuaaaaauc

SEQ ID NO: 17288 - RNA, 21 nt, Artificial Sequence
  Synthetic
gcaguuaagagauuaaaaauc

SEQ ID NO: 17289 - RNA, 23 nt, Artificial Sequence
  Synthetic
gcgcaguuaagagauuaaaaauc

SEQ ID NO: 17290 - RNA, 24 nt, Artificial Sequence
  Synthetic
ggcgcaguuaagagauuaaaaauc

SEQ ID NO: 17291 - RNA, 23 nt, Artificial Sequence
  Synthetic
gauuuaguuuguaguacaaaauc

SEQ ID NO: 17292 - RNA, 23 nt, Artificial Sequence
  Synthetic
gaacacaacaacacagcaaaauc

SEQ ID NO: 17293 - RNA, 23 nt, Artificial Sequence
  Synthetic
gcacauguaauucuaauaaaauc

SEQ ID NO: 17294 - RNA, 18 nt, Artificial Sequence
  Synthetic
guugugggguauaaaauc

SEQ ID NO: 17295 - RNA, 20 nt, Artificial Sequence
  Synthetic
gaguugugggguauaaaauc

SEQ ID NO: 17296 - RNA, 22 nt, Artificial Sequence
  Synthetic
gagaguugugggguauaaaauc

SEQ ID NO: 17297 - RNA, 23 nt, Artificial Sequence
  Synthetic
ggagaguugugggguauaaaauc

SEQ ID NO: 17298 - RNA, 24 nt, Artificial Sequence
  Synthetic
gggagaguugugggguauaaaauc

SEQ ID NO: 17299 - RNA, 20 nt, Artificial Sequence
  Synthetic
guuugguuucuauuaaaauc

SEQ ID NO: 17300 - RNA, 24 nt, Artificial Sequence
  Synthetic
gauuguuugguuucuauuaaaauc

SEQ ID NO: 17301 - RNA, 18 nt, Artificial Sequence
  Synthetic
gucuggguaaaacaaauc

SEQ ID NO: 17302 - RNA, 23 nt, Artificial Sequence
  Synthetic
guauuuugggagagacagaaauc

SEQ ID NO: 17303 - RNA, 22 nt, Artificial Sequence
  Synthetic
gcuuuccucuaauccagaaauc

SEQ ID NO: 17304 - RNA, 20 nt, Artificial Sequence
  Synthetic
gucuacuagaucaugaaauc

SEQ ID NO: 17305 - RNA, 21 nt, Artificial Sequence
  Synthetic
ggucuacuagaucaugaaauc

SEQ ID NO: 17306 - RNA, 24 nt, Artificial Sequence
  Synthetic
gaaaaaaauggguaauucuaaauc

SEQ ID NO: 17307 - RNA, 24 nt, Artificial Sequence
  Synthetic
gacuuuucuggggcuucuuaaauc

SEQ ID NO: 17308 - RNA, 21 nt, Artificial Sequence
  Synthetic
gaggaaaaggaagaaacaauc

SEQ ID NO: 17309 - RNA, 23 nt, Artificial Sequence
  Synthetic
gagaggaaaaggaagaaacaauc

SEQ ID NO: 17310 - RNA, 24 nt, Artificial Sequence
  Synthetic
ggagaggaaaaggaagaaacaauc

SEQ ID NO: 17311 - RNA, 24 nt, Artificial Sequence
  Synthetic
gauuucccuacacccugcccaauc

SEQ ID NO: 17312 - RNA, 23 nt, Artificial Sequence
  Synthetic
guccaagaguucgagauccaauc

SEQ ID NO: 17313 - RNA, 18 nt, Artificial Sequence
  Synthetic
ggaaaagggcaagcaauc

SEQ ID NO: 17314 - RNA, 23 nt, Artificial Sequence
  Synthetic
gucuuggaaaagggcaagcaauc

SEQ ID NO: 17315 - RNA, 24 nt, Artificial Sequence
  Synthetic
ggucuuggaaaagggcaagcaauc

SEQ ID NO: 17316 - RNA, 21 nt, Artificial Sequence
  Synthetic
gauauucaccuuuaagcaauc

SEQ ID NO: 17317 - RNA, 24 nt, Artificial Sequence
  Synthetic
gaagauauucaccuuuaagcaauc

SEQ ID NO: 17318 - RNA, 23 nt, Artificial Sequence
  Synthetic
gcauccuucccuaauuagcaauc

SEQ ID NO: 17319 - RNA, 24 nt, Artificial Sequence
  Synthetic
ggcauccuucccuaauuagcaauc

SEQ ID NO: 17320 - RNA, 18 nt, Artificial Sequence
  Synthetic
gaaguguacaauucaauc

SEQ ID NO: 17321 - RNA, 18 nt, Artificial Sequence
  Synthetic
gauuccugaauuucaauc

SEQ ID NO: 17322 - RNA, 19 nt, Artificial Sequence
  Synthetic
ggauuccugaauuucaauc

SEQ ID NO: 17323 - RNA, 21 nt, Artificial Sequence
  Synthetic
gaggauuccugaauuucaauc

SEQ ID NO: 17324 - RNA, 22 nt, Artificial Sequence
  Synthetic
ggaggauuccugaauuucaauc

SEQ ID NO: 17325 - RNA, 20 nt, Artificial Sequence
  Synthetic
guucaccauucaaaagaauc

SEQ ID NO: 17326 - RNA, 22 nt, Artificial Sequence
  Synthetic
guguucaccauucaaaagaauc

SEQ ID NO: 17327 - RNA, 23 nt, Artificial Sequence
  Synthetic
gguguucaccauucaaaagaauc

SEQ ID NO: 17328 - RNA, 23 nt, Artificial Sequence
  Synthetic
gaauaaugauuaauagaggaauc

SEQ ID NO: 17329 - RNA, 20 nt, Artificial Sequence
  Synthetic
gcacagaauguccaugaauc

SEQ ID NO: 17330 - RNA, 24 nt, Artificial Sequence
  Synthetic
gauagcacagaauguccaugaauc

SEQ ID NO: 17331 - RNA, 20 nt, Artificial Sequence
  Synthetic
gcagcuguaaaagaugaauc

SEQ ID NO: 17332 - RNA, 21 nt, Artificial Sequence
  Synthetic
ggcagcuguaaaagaugaauc

SEQ ID NO: 17333 - RNA, 22 nt, Artificial Sequence
  Synthetic
gggcagcuguaaaagaugaauc

SEQ ID NO: 17334 - RNA, 22 nt, Artificial Sequence
  Synthetic
guccugguacagcuacugaauc

SEQ ID NO: 17335 - RNA, 24 nt, Artificial Sequence
  Synthetic
gaguccugguacagcuacugaauc

SEQ ID NO: 17336 - RNA, 19 nt, Artificial Sequence
  Synthetic
gaaguucaguuuuugaauc

SEQ ID NO: 17337 - RNA, 20 nt, Artificial Sequence
  Synthetic
ggaaguucaguuuuugaauc

SEQ ID NO: 17338 - RNA, 21 nt, Artificial Sequence
  Synthetic
gggaaguucaguuuuugaauc

SEQ ID NO: 17339 - RNA, 22 nt, Artificial Sequence
  Synthetic
ggggaaguucaguuuuugaauc

SEQ ID NO: 17340 - RNA, 23 nt, Artificial Sequence
  Synthetic
gggggaaguucaguuuuugaauc

SEQ ID NO: 17341 - RNA, 20 nt, Artificial Sequence
  Synthetic
gacacugucccagucuaauc

SEQ ID NO: 17342 - RNA, 24 nt, Artificial Sequence
  Synthetic
gacagacacugucccagucuaauc

SEQ ID NO: 17343 - RNA, 23 nt, Artificial Sequence
  Synthetic
gucuaacuuguauguuucuaauc

SEQ ID NO: 17344 - RNA, 21 nt, Artificial Sequence
  Synthetic
guuuaaacauacaugguaauc

SEQ ID NO: 17345 - RNA, 21 nt, Artificial Sequence
  Synthetic
gcauucuucucaaaauuaauc

SEQ ID NO: 17346 - RNA, 22 nt, Artificial Sequence
  Synthetic
ggcauucuucucaaaauuaauc

SEQ ID NO: 17347 - RNA, 24 nt, Artificial Sequence
  Synthetic
guggcauucuucucaaaauuaauc

SEQ ID NO: 17348 - RNA, 19 nt, Artificial Sequence
  Synthetic
gacguuaaauauuuuaauc

SEQ ID NO: 17349 - RNA, 20 nt, Artificial Sequence
  Synthetic
ggacguuaaauauuuuaauc

SEQ ID NO: 17350 - RNA, 22 nt, Artificial Sequence
  Synthetic
guggacguuaaauauuuuaauc

SEQ ID NO: 17351 - RNA, 18 nt, Artificial Sequence
  Synthetic
gaaugcaaaucaaacauc

SEQ ID NO: 17352 - RNA, 21 nt, Artificial Sequence
  Synthetic
gcagaaugcaaaucaaacauc

SEQ ID NO: 17353 - RNA, 22 nt, Artificial Sequence
  Synthetic
ggcagaaugcaaaucaaacauc

SEQ ID NO: 17354 - RNA, 19 nt, Artificial Sequence
  Synthetic
gauacuauucuagaacauc

SEQ ID NO: 17355 - RNA, 21 nt, Artificial Sequence
  Synthetic
gugauacuauucuagaacauc

SEQ ID NO: 17356 - RNA, 24 nt, Artificial Sequence
  Synthetic
guugugauacuauucuagaacauc

SEQ ID NO: 17357 - RNA, 22 nt, Artificial Sequence
  Synthetic
gaaacucuggagcuugaacauc

SEQ ID NO: 17358 - RNA, 18 nt, Artificial Sequence
  Synthetic
gacaacucugaacacauc

SEQ ID NO: 17359 - RNA, 19 nt, Artificial Sequence
  Synthetic
ggacaacucugaacacauc

SEQ ID NO: 17360 - RNA, 22 nt, Artificial Sequence
  Synthetic
guuggacaacucugaacacauc

SEQ ID NO: 17361 - RNA, 21 nt, Artificial Sequence
  Synthetic
gcuacugcuaugaaccacauc

SEQ ID NO: 17362 - RNA, 18 nt, Artificial Sequence
  Synthetic
gcuacaguacugcacauc

SEQ ID NO: 17363 - RNA, 19 nt, Artificial Sequence
  Synthetic
gaauuuuuccuuggacauc

SEQ ID NO: 17364 - RNA, 23 nt, Artificial Sequence
  Synthetic
gaaagaauuuuuccuuggacauc

SEQ ID NO: 17365 - RNA, 22 nt, Artificial Sequence
  Synthetic
guaauuaaggcuauaaaccauc

SEQ ID NO: 17366 - RNA, 21 nt, Artificial Sequence
  Synthetic
gaacagacuucgugaaccauc

SEQ ID NO: 17367 - RNA, 22 nt, Artificial Sequence
  Synthetic
ggaacagacuucgugaaccauc

SEQ ID NO: 17368 - RNA, 22 nt, Artificial Sequence
  Synthetic
gacuuuuaaaguugcuaccauc

SEQ ID NO: 17369 - RNA, 24 nt, Artificial Sequence
  Synthetic
gugacuuuuaaaguugcuaccauc

SEQ ID NO: 17370 - RNA, 20 nt, Artificial Sequence
  Synthetic
gucauaaggccaaagccauc

SEQ ID NO: 17371 - RNA, 21 nt, Artificial Sequence
  Synthetic
guccucuauaggaaggccauc

SEQ ID NO: 17372 - RNA, 23 nt, Artificial Sequence
  Synthetic
gcuccucacaacuguuugccauc

SEQ ID NO: 17373 - RNA, 23 nt, Artificial Sequence
  Synthetic
gaaauuaaugcaugguaagcauc

SEQ ID NO: 17374 - RNA, 18 nt, Artificial Sequence
  Synthetic
gugagaugagcuagcauc

SEQ ID NO: 17375 - RNA, 20 nt, Artificial Sequence
  Synthetic
gugugagaugagcuagcauc

SEQ ID NO: 17376 - RNA, 21 nt, Artificial Sequence
  Synthetic
ggugugagaugagcuagcauc

SEQ ID NO: 17377 - RNA, 18 nt, Artificial Sequence
  Synthetic
ggccucacauacaucauc

SEQ ID NO: 17378 - RNA, 23 nt, Artificial Sequence
  Synthetic
gauuaggccucacauacaucauc

SEQ ID NO: 17379 - RNA, 21 nt, Artificial Sequence
  Synthetic
gcaugcauuuccagcaucauc

SEQ ID NO: 17380 - RNA, 20 nt, Artificial Sequence
  Synthetic
guuuaugaguuuuugucauc

SEQ ID NO: 17381 - RNA, 19 nt, Artificial Sequence
  Synthetic
gaagagcuguuuauucauc

SEQ ID NO: 17382 - RNA, 20 nt, Artificial Sequence
  Synthetic
ggaagagcuguuuauucauc

SEQ ID NO: 17383 - RNA, 23 nt, Artificial Sequence
  Synthetic
gcauaaaugccaacuuuaagauc

SEQ ID NO: 17384 - RNA, 21 nt, Artificial Sequence
  Synthetic
guuucuauaaaugaacagauc

SEQ ID NO: 17385 - RNA, 24 nt, Artificial Sequence
  Synthetic
guaauuagagacuuguggcagauc

SEQ ID NO: 17386 - RNA, 19 nt, Artificial Sequence
  Synthetic
gagauauuuuugagagauc

SEQ ID NO: 17387 - RNA, 20 nt, Artificial Sequence
  Synthetic
ggagauauuuuugagagauc

SEQ ID NO: 17388 - RNA, 21 nt, Artificial Sequence
  Synthetic
gggagauauuuuugagagauc

SEQ ID NO: 17389 - RNA, 18 nt, Artificial Sequence
  Synthetic
gaguuuucaagugagauc

SEQ ID NO: 17390 - RNA, 19 nt, Artificial Sequence
  Synthetic
gcguagagauucaacgauc

SEQ ID NO: 17391 - RNA, 20 nt, Artificial Sequence
  Synthetic
guacaauuuguaucaggauc

SEQ ID NO: 17392 - RNA, 23 nt, Artificial Sequence
  Synthetic
gaaguacaauuuguaucaggauc

SEQ ID NO: 17393 - RNA, 24 nt, Artificial Sequence
  Synthetic
ggaaguacaauuuguaucaggauc

SEQ ID NO: 17394 - RNA, 22 nt, Artificial Sequence
  Synthetic
gcacuggcagauagauaggauc

SEQ ID NO: 17395 - RNA, 23 nt, Artificial Sequence
  Synthetic
ggcacuggcagauagauaggauc

SEQ ID NO: 17396 - RNA, 19 nt, Artificial Sequence
  Synthetic
gccaauggcuggcuggauc

SEQ ID NO: 17397 - RNA, 20 nt, Artificial Sequence
  Synthetic
ggccaauggcuggcuggauc

SEQ ID NO: 17398 - RNA, 19 nt, Artificial Sequence
  Synthetic
gcugaaacucugcuggauc

SEQ ID NO: 17399 - RNA, 20 nt, Artificial Sequence
  Synthetic
ggcugaaacucugcuggauc

SEQ ID NO: 17400 - RNA, 21 nt, Artificial Sequence
  Synthetic
gggcugaaacucugcuggauc

SEQ ID NO: 17401 - RNA, 18 nt, Artificial Sequence
  Synthetic
gauauaaggcaaaugauc

SEQ ID NO: 17402 - RNA, 21 nt, Artificial Sequence
  Synthetic
gaagauauaaggcaaaugauc

SEQ ID NO: 17403 - RNA, 24 nt, Artificial Sequence
  Synthetic
guugaagauauaaggcaaaugauc

SEQ ID NO: 17404 - RNA, 20 nt, Artificial Sequence
  Synthetic
gaaaagaguuuuucaugauc

SEQ ID NO: 17405 - RNA, 21 nt, Artificial Sequence
  Synthetic
gcuaaaaacauucaccugauc

SEQ ID NO: 17406 - RNA, 23 nt, Artificial Sequence
  Synthetic
gagcuaaaaacauucaccugauc

SEQ ID NO: 17407 - RNA, 24 nt, Artificial Sequence
  Synthetic
ggagcuaaaaacauucaccugauc

SEQ ID NO: 17408 - RNA, 23 nt, Artificial Sequence
  Synthetic
gauaaauaaugcaaaaucugauc

SEQ ID NO: 17409 - RNA, 24 nt, Artificial Sequence
  Synthetic
ggauaaauaaugcaaaaucugauc

SEQ ID NO: 17410 - RNA, 22 nt, Artificial Sequence
  Synthetic
guauuuggguuucuuagugauc

SEQ ID NO: 17411 - RNA, 20 nt, Artificial Sequence
  Synthetic
gaagcuugcuuuuggugauc

SEQ ID NO: 17412 - RNA, 20 nt, Artificial Sequence
  Synthetic
gcuauuuucuucagaauauc

SEQ ID NO: 17413 - RNA, 19 nt, Artificial Sequence
  Synthetic
gucagauuugacuaauauc

SEQ ID NO: 17414 - RNA, 20 nt, Artificial Sequence
  Synthetic
ggucagauuugacuaauauc

SEQ ID NO: 17415 - RNA, 21 nt, Artificial Sequence
  Synthetic
gggucagauuugacuaauauc

SEQ ID NO: 17416 - RNA, 22 nt, Artificial Sequence
  Synthetic
gauaacaucaauuuuacauauc

SEQ ID NO: 17417 - RNA, 20 nt, Artificial Sequence
  Synthetic
guauagguuucaaucauauc

SEQ ID NO: 17418 - RNA, 21 nt, Artificial Sequence
  Synthetic
gguauagguuucaaucauauc

SEQ ID NO: 17419 - RNA, 22 nt, Artificial Sequence
  Synthetic
ggguauagguuucaaucauauc

SEQ ID NO: 17420 - RNA, 22 nt, Artificial Sequence
  Synthetic
gcauaugccguugguugauauc

SEQ ID NO: 17421 - RNA, 20 nt, Artificial Sequence
  Synthetic
gaauuuaaauuuucuauauc

SEQ ID NO: 17422 - RNA, 21 nt, Artificial Sequence
  Synthetic
ggaauuuaaauuuucuauauc

SEQ ID NO: 17423 - RNA, 18 nt, Artificial Sequence
  Synthetic
guguuacuuuuguauauc

SEQ ID NO: 17424 - RNA, 22 nt, Artificial Sequence
  Synthetic
gcauguguuacuuuuguauauc

SEQ ID NO: 17425 - RNA, 24 nt, Artificial Sequence
  Synthetic
gagcauguguuacuuuuguauauc

SEQ ID NO: 17426 - RNA, 19 nt, Artificial Sequence
  Synthetic
gacagucauauauuauauc

SEQ ID NO: 17427 - RNA, 21 nt, Artificial Sequence
  Synthetic
gagacagucauauauuauauc

SEQ ID NO: 17428 - RNA, 18 nt, Artificial Sequence
  Synthetic
gaauuauaaggcacuauc

SEQ ID NO: 17429 - RNA, 22 nt, Artificial Sequence
  Synthetic
gacagaauuauaaggcacuauc

SEQ ID NO: 17430 - RNA, 24 nt, Artificial Sequence
  Synthetic
gugacagaauuauaaggcacuauc

SEQ ID NO: 17431 - RNA, 18 nt, Artificial Sequence
  Synthetic
gucuguuuuuaaccuauc

SEQ ID NO: 17432 - RNA, 19 nt, Artificial Sequence
  Synthetic
ggucuguuuuuaaccuauc

SEQ ID NO: 17433 - RNA, 20 nt, Artificial Sequence
  Synthetic
gggucuguuuuuaaccuauc

SEQ ID NO: 17434 - RNA, 23 nt, Artificial Sequence
  Synthetic
gcagggucuguuuuuaaccuauc

SEQ ID NO: 17435 - RNA, 18 nt, Artificial Sequence
  Synthetic
guuucuuaugccccuauc

SEQ ID NO: 17436 - RNA, 21 nt, Artificial Sequence
  Synthetic
gaaacaacauuaacuccuauc

SEQ ID NO: 17437 - RNA, 23 nt, Artificial Sequence
  Synthetic
guucaauugaacugguaucuauc

SEQ ID NO: 17438 - RNA, 19 nt, Artificial Sequence
  Synthetic
guacagcuauaacucuauc

SEQ ID NO: 17439 - RNA, 20 nt, Artificial Sequence
  Synthetic
gauaugguguuuccucuauc

SEQ ID NO: 17440 - RNA, 21 nt, Artificial Sequence
  Synthetic
ggauaugguguuuccucuauc

SEQ ID NO: 17441 - RNA, 23 nt, Artificial Sequence
  Synthetic
gccuucuauucagagauucuauc

SEQ ID NO: 17442 - RNA, 18 nt, Artificial Sequence
  Synthetic
gaaauaacuacaaguauc

SEQ ID NO: 17443 - RNA, 21 nt, Artificial Sequence
  Synthetic
gaaaauacuuuggcauguauc

SEQ ID NO: 17444 - RNA, 20 nt, Artificial Sequence
  Synthetic
gucaaguauaaagauguauc

SEQ ID NO: 17445 - RNA, 21 nt, Artificial Sequence
  Synthetic
ggucaaguauaaagauguauc

SEQ ID NO: 17446 - RNA, 23 nt, Artificial Sequence
  Synthetic
gccuuauauuuguugccauuauc

SEQ ID NO: 17447 - RNA, 21 nt, Artificial Sequence
  Synthetic
gauugugauuacuuuauuauc

SEQ ID NO: 17448 - RNA, 18 nt, Artificial Sequence
  Synthetic
guuguaauuuuacuuauc

SEQ ID NO: 17449 - RNA, 24 nt, Artificial Sequence
  Synthetic
gucucccauaaucaacuccuuauc

SEQ ID NO: 17450 - RNA, 18 nt, Artificial Sequence
  Synthetic
gugccuauugugguuauc

SEQ ID NO: 17451 - RNA, 24 nt, Artificial Sequence
  Synthetic
gucccugugccuauugugguuauc

SEQ ID NO: 17452 - RNA, 20 nt, Artificial Sequence
  Synthetic
gaaggaucuuggcuguuauc

SEQ ID NO: 17453 - RNA, 21 nt, Artificial Sequence
  Synthetic
ggaaggaucuuggcuguuauc

SEQ ID NO: 17454 - RNA, 20 nt, Artificial Sequence
  Synthetic
gcagggccucaaguguuauc

SEQ ID NO: 17455 - RNA, 23 nt, Artificial Sequence
  Synthetic
guagcagggccucaaguguuauc

SEQ ID NO: 17456 - RNA, 19 nt, Artificial Sequence
  Synthetic
guauaauauguuuguuauc

SEQ ID NO: 17457 - RNA, 18 nt, Artificial Sequence
  Synthetic
gcuuucaauguuuuuauc

SEQ ID NO: 17458 - RNA, 19 nt, Artificial Sequence
  Synthetic
ggcuuucaauguuuuuauc

SEQ ID NO: 17459 - RNA, 18 nt, Artificial Sequence
  Synthetic
gagcaccuuaaaaaacuc

SEQ ID NO: 17460 - RNA, 22 nt, Artificial Sequence
  Synthetic
gacuccuuuucccagaaaacuc

SEQ ID NO: 17461 - RNA, 22 nt, Artificial Sequence
  Synthetic
gacaaccaggcagcacaaacuc

SEQ ID NO: 17462 - RNA, 21 nt, Artificial Sequence
  Synthetic
gcuuauaugggacauaaacuc

SEQ ID NO: 17463 - RNA, 22 nt, Artificial Sequence
  Synthetic
ggcuuauaugggacauaaacuc

SEQ ID NO: 17464 - RNA, 24 nt, Artificial Sequence
  Synthetic
guggcuuauaugggacauaaacuc

SEQ ID NO: 17465 - RNA, 18 nt, Artificial Sequence
  Synthetic
gaaccaaugaaacaacuc

SEQ ID NO: 17466 - RNA, 19 nt, Artificial Sequence
  Synthetic
gucuugucuuacucaacuc

SEQ ID NO: 17467 - RNA, 21 nt, Artificial Sequence
  Synthetic
gagucuugucuuacucaacuc

SEQ ID NO: 17468 - RNA, 24 nt, Artificial Sequence
  Synthetic
gaauuuauauuuuaaaaagaacuc

SEQ ID NO: 17469 - RNA, 20 nt, Artificial Sequence
  Synthetic
guaugucugggguagaacuc

SEQ ID NO: 17470 - RNA, 18 nt, Artificial Sequence
  Synthetic
gccggaguacuggaacuc

SEQ ID NO: 17471 - RNA, 19 nt, Artificial Sequence
  Synthetic
ggccggaguacuggaacuc

SEQ ID NO: 17472 - RNA, 23 nt, Artificial Sequence
  Synthetic
gcaaggccggaguacuggaacuc

SEQ ID NO: 17473 - RNA, 24 nt, Artificial Sequence
  Synthetic
ggcaaggccggaguacuggaacuc

SEQ ID NO: 17474 - RNA, 18 nt, Artificial Sequence
  Synthetic
ggcauucccauugaacuc

SEQ ID NO: 17475 - RNA, 22 nt, Artificial Sequence
  Synthetic
gcagagacagcagagauaacuc

SEQ ID NO: 17476 - RNA, 18 nt, Artificial Sequence
  Synthetic
gacauuuagcuguaacuc

SEQ ID NO: 17477 - RNA, 19 nt, Artificial Sequence
  Synthetic
ggacauuuagcuguaacuc

SEQ ID NO: 17478 - RNA, 20 nt, Artificial Sequence
  Synthetic
gggacauuuagcuguaacuc

SEQ ID NO: 17479 - RNA, 24 nt, Artificial Sequence
  Synthetic
gacagggacauuuagcuguaacuc

SEQ ID NO: 17480 - RNA, 19 nt, Artificial Sequence
  Synthetic
gucuuuuaaaauaagacuc

SEQ ID NO: 17481 - RNA, 22 nt, Artificial Sequence
  Synthetic
gcugucuuuuaaaauaagacuc

SEQ ID NO: 17482 - RNA, 18 nt, Artificial Sequence
  Synthetic
gacagagaggggagacuc

SEQ ID NO: 17483 - RNA, 20 nt, Artificial Sequence
  Synthetic
gcgacagagaggggagacuc

SEQ ID NO: 17484 - RNA, 20 nt, Artificial Sequence
  Synthetic
gauggaaacaaauucgacuc

SEQ ID NO: 17485 - RNA, 24 nt, Artificial Sequence
  Synthetic
gucagauggaaacaaauucgacuc

SEQ ID NO: 17486 - RNA, 20 nt, Artificial Sequence
  Synthetic
gcaggggaaagccuggacuc

SEQ ID NO: 17487 - RNA, 24 nt, Artificial Sequence
  Synthetic
gcuugcaggggaaagccuggacuc

SEQ ID NO: 17488 - RNA, 18 nt, Artificial Sequence
  Synthetic
gugugguugcauugacuc

SEQ ID NO: 17489 - RNA, 19 nt, Artificial Sequence
  Synthetic
ggugugguugcauugacuc

SEQ ID NO: 17490 - RNA, 21 nt, Artificial Sequence
  Synthetic
guggugugguugcauugacuc

SEQ ID NO: 17491 - RNA, 19 nt, Artificial Sequence
  Synthetic
gaaaauucucuaaguacuc

SEQ ID NO: 17492 - RNA, 20 nt, Artificial Sequence
  Synthetic
gaagaauaaaaaaauuacuc

SEQ ID NO: 17493 - RNA, 22 nt, Artificial Sequence
  Synthetic
gaucauuugccaaaaauuacuc

SEQ ID NO: 17494 - RNA, 23 nt, Artificial Sequence
  Synthetic
ggaucauuugccaaaaauuacuc

SEQ ID NO: 17495 - RNA, 20 nt, Artificial Sequence
  Synthetic
gacgaagcaaagugaaccuc

SEQ ID NO: 17496 - RNA, 20 nt, Artificial Sequence
  Synthetic
gacugguaagggaacaccuc

SEQ ID NO: 17497 - RNA, 18 nt, Artificial Sequence
  Synthetic
gauguaugucuucaccuc

SEQ ID NO: 17498 - RNA, 19 nt, Artificial Sequence
  Synthetic
ggauguaugucuucaccuc

SEQ ID NO: 17499 - RNA, 18 nt, Artificial Sequence
  Synthetic
gaggggaagagagaccuc

SEQ ID NO: 17500 - RNA, 19 nt, Artificial Sequence
  Synthetic
ggaggggaagagagaccuc

SEQ ID NO: 17501 - RNA, 22 nt, Artificial Sequence
  Synthetic
gauggaggggaagagagaccuc

SEQ ID NO: 17502 - RNA, 23 nt, Artificial Sequence
  Synthetic
gcuuucugggagaacuugaccuc

SEQ ID NO: 17503 - RNA, 21 nt, Artificial Sequence
  Synthetic
gcauaacaugcugacuaccuc

SEQ ID NO: 17504 - RNA, 24 nt, Artificial Sequence
  Synthetic
guagcauaacaugcugacuaccuc

SEQ ID NO: 17505 - RNA, 22 nt, Artificial Sequence
  Synthetic
gcuuugcacauuguaaacccuc

SEQ ID NO: 17506 - RNA, 19 nt, Artificial Sequence
  Synthetic
gagagcauuugccacccuc

SEQ ID NO: 17507 - RNA, 21 nt, Artificial Sequence
  Synthetic
gagagagcauuugccacccuc

SEQ ID NO: 17508 - RNA, 23 nt, Artificial Sequence
  Synthetic
gagagagagcauuugccacccuc

SEQ ID NO: 17509 - RNA, 18 nt, Artificial Sequence
  Synthetic
gaagugugggugacccuc

SEQ ID NO: 17510 - RNA, 19 nt, Artificial Sequence
  Synthetic
ggaagugugggugacccuc

SEQ ID NO: 17511 - RNA, 20 nt, Artificial Sequence
  Synthetic
gggaagugugggugacccuc

SEQ ID NO: 17512 - RNA, 21 nt, Artificial Sequence
  Synthetic
gauaauuagaauguugcccuc

SEQ ID NO: 17513 - RNA, 20 nt, Artificial Sequence
  Synthetic
gaauaaaucaauuugcccuc

SEQ ID NO: 17514 - RNA, 23 nt, Artificial Sequence
  Synthetic
gauuuuuagcauauuugucccuc

SEQ ID NO: 17515 - RNA, 18 nt, Artificial Sequence
  Synthetic
gcaaauuaacuuucccuc

SEQ ID NO: 17516 - RNA, 20 nt, Artificial Sequence
  Synthetic
gagcaaauuaacuuucccuc

SEQ ID NO: 17517 - RNA, 19 nt, Artificial Sequence
  Synthetic
gaacaaauucaucagccuc

SEQ ID NO: 17518 - RNA, 21 nt, Artificial Sequence
  Synthetic
gugaacaaauucaucagccuc

SEQ ID NO: 17519 - RNA, 22 nt, Artificial Sequence
  Synthetic
gccccacaauuaaucacgccuc

SEQ ID NO: 17520 - RNA, 19 nt, Artificial Sequence
  Synthetic
guuacaaggcauuggccuc

SEQ ID NO: 17521 - RNA, 19 nt, Artificial Sequence
  Synthetic
gagcuccuuuacgugccuc

SEQ ID NO: 17522 - RNA, 18 nt, Artificial Sequence
  Synthetic
gaaaacagcuugugccuc

SEQ ID NO: 17523 - RNA, 21 nt, Artificial Sequence
  Synthetic
gaugaaaacagcuugugccuc

SEQ ID NO: 17524 - RNA, 22 nt, Artificial Sequence
  Synthetic
ggaugaaaacagcuugugccuc

SEQ ID NO: 17525 - RNA, 23 nt, Artificial Sequence
  Synthetic
gggaugaaaacagcuugugccuc

SEQ ID NO: 17526 - RNA, 19 nt, Artificial Sequence
  Synthetic
gagaaaaaaaucacuccuc

SEQ ID NO: 17527 - RNA, 20 nt, Artificial Sequence
  Synthetic
ggagaaaaaaaucacuccuc

SEQ ID NO: 17528 - RNA, 23 nt, Artificial Sequence
  Synthetic
guuggagaaaaaaaucacuccuc

SEQ ID NO: 17529 - RNA, 18 nt, Artificial Sequence
  Synthetic
gcauauauguaaaagcuc

SEQ ID NO: 17530 - RNA, 20 nt, Artificial Sequence
  Synthetic
gagcauauauguaaaagcuc

SEQ ID NO: 17531 - RNA, 18 nt, Artificial Sequence
  Synthetic
gauuaauagcauaagcuc

SEQ ID NO: 17532 - RNA, 23 nt, Artificial Sequence
  Synthetic
gcacugauuaauagcauaagcuc

SEQ ID NO: 17533 - RNA, 18 nt, Artificial Sequence
  Synthetic
gacucugauccccagcuc

SEQ ID NO: 17534 - RNA, 21 nt, Artificial Sequence
  Synthetic
gaagacucugauccccagcuc

SEQ ID NO: 17535 - RNA, 23 nt, Artificial Sequence
  Synthetic
gacaugaugagaauuuccagcuc

SEQ ID NO: 17536 - RNA, 19 nt, Artificial Sequence
  Synthetic
gcugcaaagugaauagcuc

SEQ ID NO: 17537 - RNA, 21 nt, Artificial Sequence
  Synthetic
gugcugcaaagugaauagcuc

SEQ ID NO: 17538 - RNA, 22 nt, Artificial Sequence
  Synthetic
ggugcugcaaagugaauagcuc

SEQ ID NO: 17539 - RNA, 19 nt, Artificial Sequence
  Synthetic
guccuuuaauagauagcuc

SEQ ID NO: 17540 - RNA, 22 nt, Artificial Sequence
  Synthetic
guaguccuuuaauagauagcuc

SEQ ID NO: 17541 - RNA, 22 nt, Artificial Sequence
  Synthetic
gaaaacagcauguaugacgcuc

SEQ ID NO: 17542 - RNA, 24 nt, Artificial Sequence
  Synthetic
gagaaaacagcauguaugacgcuc

SEQ ID NO: 17543 - RNA, 20 nt, Artificial Sequence
  Synthetic
guaggucuguugugaggcuc

SEQ ID NO: 17544 - RNA, 19 nt, Artificial Sequence
  Synthetic
gacauauuccucagggcuc

SEQ ID NO: 17545 - RNA, 20 nt, Artificial Sequence
  Synthetic
ggacauauuccucagggcuc

SEQ ID NO: 17546 - RNA, 24 nt, Artificial Sequence
  Synthetic
gucuucaauuuccuucuagggcuc

SEQ ID NO: 17547 - RNA, 22 nt, Artificial Sequence
  Synthetic
gaguucagauucugcugggcuc

SEQ ID NO: 17548 - RNA, 23 nt, Artificial Sequence
  Synthetic
ggaguucagauucugcugggcuc

SEQ ID NO: 17549 - RNA, 18 nt, Artificial Sequence
  Synthetic
gguacgggucuguggcuc

SEQ ID NO: 17550 - RNA, 22 nt, Artificial Sequence
  Synthetic
gauugguacgggucuguggcuc

SEQ ID NO: 17551 - RNA, 23 nt, Artificial Sequence
  Synthetic
ggauugguacgggucuguggcuc

SEQ ID NO: 17552 - RNA, 19 nt, Artificial Sequence
  Synthetic
gacccaugggcagaugcuc

SEQ ID NO: 17553 - RNA, 20 nt, Artificial Sequence
  Synthetic
ggacccaugggcagaugcuc

SEQ ID NO: 17554 - RNA, 21 nt, Artificial Sequence
  Synthetic
gggacccaugggcagaugcuc

SEQ ID NO: 17555 - RNA, 22 nt, Artificial Sequence
  Synthetic
ggggacccaugggcagaugcuc

SEQ ID NO: 17556 - RNA, 23 nt, Artificial Sequence
  Synthetic
guaccuugagauaagagaugcuc

SEQ ID NO: 17557 - RNA, 19 nt, Artificial Sequence
  Synthetic
gugagcaaaagugaugcuc

SEQ ID NO: 17558 - RNA, 21 nt, Artificial Sequence
  Synthetic
gugugagcaaaagugaugcuc

SEQ ID NO: 17559 - RNA, 23 nt, Artificial Sequence
  Synthetic
gagugugagcaaaagugaugcuc

SEQ ID NO: 17560 - RNA, 24 nt, Artificial Sequence
  Synthetic
ggagugugagcaaaagugaugcuc

SEQ ID NO: 17561 - RNA, 23 nt, Artificial Sequence
  Synthetic
gcucaauauuaucuaauaugcuc

SEQ ID NO: 17562 - RNA, 21 nt, Artificial Sequence
  Synthetic
gcaacguguuaguaauugcuc

SEQ ID NO: 17563 - RNA, 21 nt, Artificial Sequence
  Synthetic
guauuugcaauugcauugcuc

SEQ ID NO: 17564 - RNA, 19 nt, Artificial Sequence
  Synthetic
guggcaugguauauugcuc

SEQ ID NO: 17565 - RNA, 22 nt, Artificial Sequence
  Synthetic
gaaauaaaggccaaagaaucuc

SEQ ID NO: 17566 - RNA, 22 nt, Artificial Sequence
  Synthetic
gaucuaggauguugggcaucuc

SEQ ID NO: 17567 - RNA, 24 nt, Artificial Sequence
  Synthetic
gugaucuaggauguugggcaucuc

SEQ ID NO: 17568 - RNA, 19 nt, Artificial Sequence
  Synthetic
gaaguaauuuccucaucuc

SEQ ID NO: 17569 - RNA, 22 nt, Artificial Sequence
  Synthetic
gaugaaguaauuuccucaucuc

SEQ ID NO: 17570 - RNA, 24 nt, Artificial Sequence
  Synthetic
gagaugaaguaauuuccucaucuc

SEQ ID NO: 17571 - RNA, 23 nt, Artificial Sequence
  Synthetic
gacuaacauacaauuuugaucuc

SEQ ID NO: 17572 - RNA, 18 nt, Artificial Sequence
  Synthetic
guacacagacaauaucuc

SEQ ID NO: 17573 - RNA, 22 nt, Artificial Sequence
  Synthetic
guuuguacacagacaauaucuc

SEQ ID NO: 17574 - RNA, 22 nt, Artificial Sequence
  Synthetic
guacuaaauuacucaaacucuc

SEQ ID NO: 17575 - RNA, 23 nt, Artificial Sequence
  Synthetic
gguacuaaauuacucaaacucuc

SEQ ID NO: 17576 - RNA, 18 nt, Artificial Sequence
  Synthetic
gaaaguuacuuaacucuc

SEQ ID NO: 17577 - RNA, 19 nt, Artificial Sequence
  Synthetic
ggaaaguuacuuaacucuc

SEQ ID NO: 17578 - RNA, 20 nt, Artificial Sequence
  Synthetic
gaaacauaugccccacucuc

SEQ ID NO: 17579 - RNA, 20 nt, Artificial Sequence
  Synthetic
gcuguccuggccauacucuc

SEQ ID NO: 17580 - RNA, 21 nt, Artificial Sequence
  Synthetic
gaaagcaaaagccccgcucuc

SEQ ID NO: 17581 - RNA, 20 nt, Artificial Sequence
  Synthetic
guccacuugagaaaucucuc

SEQ ID NO: 17582 - RNA, 22 nt, Artificial Sequence
  Synthetic
gcuaauauuacaaugaucucuc

SEQ ID NO: 17583 - RNA, 19 nt, Artificial Sequence
  Synthetic
gacuuccugcauaucucuc

SEQ ID NO: 17584 - RNA, 22 nt, Artificial Sequence
  Synthetic
guagacuuccugcauaucucuc

SEQ ID NO: 17585 - RNA, 23 nt, Artificial Sequence
  Synthetic
gguagacuuccugcauaucucuc

SEQ ID NO: 17586 - RNA, 24 nt, Artificial Sequence
  Synthetic
ggguagacuuccugcauaucucuc

SEQ ID NO: 17587 - RNA, 19 nt, Artificial Sequence
  Synthetic
guucuucaaguguucucuc

SEQ ID NO: 17588 - RNA, 20 nt, Artificial Sequence
  Synthetic
gguucuucaaguguucucuc

SEQ ID NO: 17589 - RNA, 24 nt, Artificial Sequence
  Synthetic
guuugguucuucaaguguucucuc

SEQ ID NO: 17590 - RNA, 19 nt, Artificial Sequence
  Synthetic
gaugccuugagaaauucuc

SEQ ID NO: 17591 - RNA, 22 nt, Artificial Sequence
  Synthetic
gaagaugccuugagaaauucuc

SEQ ID NO: 17592 - RNA, 19 nt, Artificial Sequence
  Synthetic
gaaagucaucuaaauucuc

SEQ ID NO: 17593 - RNA, 24 nt, Artificial Sequence
  Synthetic
guauuuagcauguucccaauucuc

SEQ ID NO: 17594 - RNA, 21 nt, Artificial Sequence
  Synthetic
gacauuuaagacaacauucuc

SEQ ID NO: 17595 - RNA, 19 nt, Artificial Sequence
  Synthetic
gaauucuguucccauucuc

SEQ ID NO: 17596 - RNA, 21 nt, Artificial Sequence
  Synthetic
gagaauucuguucccauucuc

SEQ ID NO: 17597 - RNA, 23 nt, Artificial Sequence
  Synthetic
gagagaauucuguucccauucuc

SEQ ID NO: 17598 - RNA, 19 nt, Artificial Sequence
  Synthetic
gcagaaggugccccuucuc

SEQ ID NO: 17599 - RNA, 22 nt, Artificial Sequence
  Synthetic
gaugcagaaggugccccuucuc

SEQ ID NO: 17600 - RNA, 23 nt, Artificial Sequence
  Synthetic
ggaugcagaaggugccccuucuc

SEQ ID NO: 17601 - RNA, 24 nt, Artificial Sequence
  Synthetic
gggaugcagaaggugccccuucuc

SEQ ID NO: 17602 - RNA, 18 nt, Artificial Sequence
  Synthetic
gaaaugaccguaguucuc

SEQ ID NO: 17603 - RNA, 19 nt, Artificial Sequence
  Synthetic
gucuugaagcauauuucuc

SEQ ID NO: 17604 - RNA, 20 nt, Artificial Sequence
  Synthetic
ggucuugaagcauauuucuc

SEQ ID NO: 17605 - RNA, 20 nt, Artificial Sequence
  Synthetic
gacuuaaagugauaaaaguc

SEQ ID NO: 17606 - RNA, 20 nt, Artificial Sequence
  Synthetic
guaaaguuaauuacaaaguc

SEQ ID NO: 17607 - RNA, 21 nt, Artificial Sequence
  Synthetic
gguaaaguuaauuacaaaguc

SEQ ID NO: 17608 - RNA, 21 nt, Artificial Sequence
  Synthetic
gaaauuauaggaggcaaaguc

SEQ ID NO: 17609 - RNA, 23 nt, Artificial Sequence
  Synthetic
gugaaauuauaggaggcaaaguc

SEQ ID NO: 17610 - RNA, 20 nt, Artificial Sequence
  Synthetic
gauuuucaauuuauaaaguc

SEQ ID NO: 17611 - RNA, 21 nt, Artificial Sequence
  Synthetic
ggauuuucaauuuauaaaguc

SEQ ID NO: 17612 - RNA, 18 nt, Artificial Sequence
  Synthetic
gggucaguuguagaaguc

SEQ ID NO: 17613 - RNA, 19 nt, Artificial Sequence
  Synthetic
ggggucaguuguagaaguc

SEQ ID NO: 17614 - RNA, 21 nt, Artificial Sequence
  Synthetic
gaggggucaguuguagaaguc

SEQ ID NO: 17615 - RNA, 24 nt, Artificial Sequence
  Synthetic
guagaggggucaguuguagaaguc

SEQ ID NO: 17616 - RNA, 24 nt, Artificial Sequence
  Synthetic
gccccucccaacauaaucuaaguc

SEQ ID NO: 17617 - RNA, 19 nt, Artificial Sequence
  Synthetic
gaacucaguuacuuaaguc

SEQ ID NO: 17618 - RNA, 20 nt, Artificial Sequence
  Synthetic
ggaacucaguuacuuaaguc

SEQ ID NO: 17619 - RNA, 23 nt, Artificial Sequence
  Synthetic
gcaggaacucaguuacuuaaguc

SEQ ID NO: 17620 - RNA, 18 nt, Artificial Sequence
  Synthetic
guuuaccuugcuuaaguc

SEQ ID NO: 17621 - RNA, 20 nt, Artificial Sequence
  Synthetic
guguuuaccuugcuuaaguc

SEQ ID NO: 17622 - RNA, 21 nt, Artificial Sequence
  Synthetic
gguguuuaccuugcuuaaguc

SEQ ID NO: 17623 - RNA, 22 nt, Artificial Sequence
  Synthetic
ggguguuuaccuugcuuaaguc

SEQ ID NO: 17624 - RNA, 24 nt, Artificial Sequence
  Synthetic
guggguguuuaccuugcuuaaguc

SEQ ID NO: 17625 - RNA, 21 nt, Artificial Sequence
  Synthetic
ggaaaggcaggagacacaguc

SEQ ID NO: 17626 - RNA, 23 nt, Artificial Sequence
  Synthetic
gaggaaaggcaggagacacaguc

SEQ ID NO: 17627 - RNA, 18 nt, Artificial Sequence
  Synthetic
gugaacuacaaagcaguc

SEQ ID NO: 17628 - RNA, 20 nt, Artificial Sequence
  Synthetic
gacggcucuucauggcaguc

SEQ ID NO: 17629 - RNA, 21 nt, Artificial Sequence
  Synthetic
ggacggcucuucauggcaguc

SEQ ID NO: 17630 - RNA, 22 nt, Artificial Sequence
  Synthetic
gauaaucuauucaccaucaguc

SEQ ID NO: 17631 - RNA, 18 nt, Artificial Sequence
  Synthetic
gacugaaauuccagaguc

SEQ ID NO: 17632 - RNA, 22 nt, Artificial Sequence
  Synthetic
gcaagacugaaauuccagaguc

SEQ ID NO: 17633 - RNA, 24 nt, Artificial Sequence
  Synthetic
gagcaagacugaaauuccagaguc

SEQ ID NO: 17634 - RNA, 21 nt, Artificial Sequence
  Synthetic
gauggcuccaagccuggaguc

SEQ ID NO: 17635 - RNA, 19 nt, Artificial Sequence
  Synthetic
gcugaaguugcuuggaguc

SEQ ID NO: 17636 - RNA, 19 nt, Artificial Sequence
  Synthetic
gucuagucuagaaugaguc

SEQ ID NO: 17637 - RNA, 20 nt, Artificial Sequence
  Synthetic
ggucuagucuagaaugaguc

SEQ ID NO: 17638 - RNA, 24 nt, Artificial Sequence
  Synthetic
gccaggucuagucuagaaugaguc

SEQ ID NO: 17639 - RNA, 24 nt, Artificial Sequence
  Synthetic
gacauuugacuaguugcaugaguc

SEQ ID NO: 17640 - RNA, 18 nt, Artificial Sequence
  Synthetic
gagcaugccaucugaguc

SEQ ID NO: 17641 - RNA, 21 nt, Artificial Sequence
  Synthetic
gcagagcaugccaucugaguc

SEQ ID NO: 17642 - RNA, 23 nt, Artificial Sequence
  Synthetic
gagcagagcaugccaucugaguc

SEQ ID NO: 17643 - RNA, 24 nt, Artificial Sequence
  Synthetic
ggagcagagcaugccaucugaguc

SEQ ID NO: 17644 - RNA, 19 nt, Artificial Sequence
  Synthetic
gaagacaaucaugugaguc

SEQ ID NO: 17645 - RNA, 23 nt, Artificial Sequence
  Synthetic
gcaagaagacaaucaugugaguc

SEQ ID NO: 17646 - RNA, 24 nt, Artificial Sequence
  Synthetic
guaaucugaguauauucuugaguc

SEQ ID NO: 17647 - RNA, 22 nt, Artificial Sequence
  Synthetic
gaaaagucuagcuucuugaguc

SEQ ID NO: 17648 - RNA, 24 nt, Artificial Sequence
  Synthetic
gugaaaagucuagcuucuugaguc

SEQ ID NO: 17649 - RNA, 22 nt, Artificial Sequence
  Synthetic
gaauaguacuguuauucuaguc

SEQ ID NO: 17650 - RNA, 20 nt, Artificial Sequence
  Synthetic
gcucuuugcugcaauuaguc

SEQ ID NO: 17651 - RNA, 21 nt, Artificial Sequence
  Synthetic
ggcucuuugcugcaauuaguc

SEQ ID NO: 17652 - RNA, 18 nt, Artificial Sequence
  Synthetic
gagaauaauuucuuaguc

SEQ ID NO: 17653 - RNA, 23 nt, Artificial Sequence
  Synthetic
gcaacuuugacuagcaguuaguc

SEQ ID NO: 17654 - RNA, 18 nt, Artificial Sequence
  Synthetic
gaaaaaaaaccaaagguc

SEQ ID NO: 17655 - RNA, 23 nt, Artificial Sequence
  Synthetic
guucagaaaaaaaaccaaagguc

SEQ ID NO: 17656 - RNA, 22 nt, Artificial Sequence
  Synthetic
gaccaucucacugaagcagguc

SEQ ID NO: 17657 - RNA, 24 nt, Artificial Sequence
  Synthetic
gaauuucaaaauuucuuucagguc

SEQ ID NO: 17658 - RNA, 21 nt, Artificial Sequence
  Synthetic
gcccuuaaucuucuggagguc

SEQ ID NO: 17659 - RNA, 20 nt, Artificial Sequence
  Synthetic
guauuaagcauugugagguc

SEQ ID NO: 17660 - RNA, 21 nt, Artificial Sequence
  Synthetic
gguauuaagcauugugagguc

SEQ ID NO: 17661 - RNA, 18 nt, Artificial Sequence
  Synthetic
gaagaauucaaagggguc

SEQ ID NO: 17662 - RNA, 24 nt, Artificial Sequence
  Synthetic
gaaacugaagaauucaaagggguc

SEQ ID NO: 17663 - RNA, 20 nt, Artificial Sequence
  Synthetic
gaucaagauugugguggguc

SEQ ID NO: 17664 - RNA, 21 nt, Artificial Sequence
  Synthetic
ggaucaagauugugguggguc

SEQ ID NO: 17665 - RNA, 22 nt, Artificial Sequence
  Synthetic
gggaucaagauugugguggguc

SEQ ID NO: 17666 - RNA, 19 nt, Artificial Sequence
  Synthetic
gcuucuuauucuguggguc

SEQ ID NO: 17667 - RNA, 20 nt, Artificial Sequence
  Synthetic
gcucaauggaaccucugguc

SEQ ID NO: 17668 - RNA, 20 nt, Artificial Sequence
  Synthetic
gaaugaacauauaggugguc

SEQ ID NO: 17669 - RNA, 20 nt, Artificial Sequence
  Synthetic
gcaaaaauauuguauugguc

SEQ ID NO: 17670 - RNA, 21 nt, Artificial Sequence
  Synthetic
ggcaaaaauauuguauugguc

SEQ ID NO: 17671 - RNA, 19 nt, Artificial Sequence
  Synthetic
gugaaauaccauaaauguc

SEQ ID NO: 17672 - RNA, 24 nt, Artificial Sequence
  Synthetic
gaaucgugaaauaccauaaauguc

SEQ ID NO: 17673 - RNA, 22 nt, Artificial Sequence
  Synthetic
gcuuaccaaaauuauuaauguc

SEQ ID NO: 17674 - RNA, 21 nt, Artificial Sequence
  Synthetic
gcuaagauauaauuuaauguc

SEQ ID NO: 17675 - RNA, 22 nt, Artificial Sequence
  Synthetic
ggcuaagauauaauuuaauguc

SEQ ID NO: 17676 - RNA, 23 nt, Artificial Sequence
  Synthetic
guauaccccugugaaaucauguc

SEQ ID NO: 17677 - RNA, 19 nt, Artificial Sequence
  Synthetic
gaguuuaaguguggauguc

SEQ ID NO: 17678 - RNA, 23 nt, Artificial Sequence
  Synthetic
gacagaguuuaaguguggauguc

SEQ ID NO: 17679 - RNA, 18 nt, Artificial Sequence
  Synthetic
guuaguuagcuugauguc

SEQ ID NO: 17680 - RNA, 21 nt, Artificial Sequence
  Synthetic
gaauuucuucucagauauguc

SEQ ID NO: 17681 - RNA, 24 nt, Artificial Sequence
  Synthetic
gucuauaaguagcacagcuauguc

SEQ ID NO: 17682 - RNA, 19 nt, Artificial Sequence
  Synthetic
gaucaugauucuguauguc

SEQ ID NO: 17683 - RNA, 21 nt, Artificial Sequence
  Synthetic
gagaucaugauucuguauguc

SEQ ID NO: 17684 - RNA, 23 nt, Artificial Sequence
  Synthetic
gagagaucaugauucuguauguc

SEQ ID NO: 17685 - RNA, 21 nt, Artificial Sequence
  Synthetic
guuucacauucuaucacuguc

SEQ ID NO: 17686 - RNA, 24 nt, Artificial Sequence
  Synthetic
gaaguuucacauucuaucacuguc

SEQ ID NO: 17687 - RNA, 18 nt, Artificial Sequence
  Synthetic
gauucaugcauaucuguc

SEQ ID NO: 17688 - RNA, 22 nt, Artificial Sequence
  Synthetic
gucaucauguugaacuucuguc

SEQ ID NO: 17689 - RNA, 19 nt, Artificial Sequence
  Synthetic
gaacacuuuugagaguguc

SEQ ID NO: 17690 - RNA, 24 nt, Artificial Sequence
  Synthetic
guuaaacgaauuccuugggguguc

SEQ ID NO: 17691 - RNA, 20 nt, Artificial Sequence
  Synthetic
gaaggagaguguuuuguguc

SEQ ID NO: 17692 - RNA, 21 nt, Artificial Sequence
  Synthetic
ggaaggagaguguuuuguguc

SEQ ID NO: 17693 - RNA, 23 nt, Artificial Sequence
  Synthetic
gaggaaggagaguguuuuguguc

SEQ ID NO: 17694 - RNA, 21 nt, Artificial Sequence
  Synthetic
gcacagauuucuaaaauuguc

SEQ ID NO: 17695 - RNA, 22 nt, Artificial Sequence
  Synthetic
ggcacagauuucuaaaauuguc

SEQ ID NO: 17696 - RNA, 23 nt, Artificial Sequence
  Synthetic
gggcacagauuucuaaaauuguc

SEQ ID NO: 17697 - RNA, 24 nt, Artificial Sequence
  Synthetic
ggggcacagauuucuaaaauuguc

SEQ ID NO: 17698 - RNA, 18 nt, Artificial Sequence
  Synthetic
guauacaugggacuuguc

SEQ ID NO: 17699 - RNA, 20 nt, Artificial Sequence
  Synthetic
guguauacaugggacuuguc

SEQ ID NO: 17700 - RNA, 24 nt, Artificial Sequence
  Synthetic
gaaaaagaaguuaaacaauuuguc

SEQ ID NO: 17701 - RNA, 21 nt, Artificial Sequence
  Synthetic
guauucugaaagagauuuguc

SEQ ID NO: 17702 - RNA, 18 nt, Artificial Sequence
  Synthetic
gggcuggaagaguuuguc

SEQ ID NO: 17703 - RNA, 24 nt, Artificial Sequence
  Synthetic
gaccacgggcuggaagaguuuguc

SEQ ID NO: 17704 - RNA, 20 nt, Artificial Sequence
  Synthetic
gcaugacugcuugguuuguc

SEQ ID NO: 17705 - RNA, 21 nt, Artificial Sequence
  Synthetic
ggcaugacugcuugguuuguc

SEQ ID NO: 17706 - RNA, 18 nt, Artificial Sequence
  Synthetic
gguacagacuuguuuguc

SEQ ID NO: 17707 - RNA, 22 nt, Artificial Sequence
  Synthetic
gaaaacagaaaauccuuuuguc

SEQ ID NO: 17708 - RNA, 19 nt, Artificial Sequence
  Synthetic
gaaacaagcuguuuuuguc

SEQ ID NO: 17709 - RNA, 21 nt, Artificial Sequence
  Synthetic
gagaaacaagcuguuuuuguc

SEQ ID NO: 17710 - RNA, 22 nt, Artificial Sequence
  Synthetic
ggagaaacaagcuguuuuuguc

SEQ ID NO: 17711 - RNA, 20 nt, Artificial Sequence
  Synthetic
gucccagauaauuuuuuguc

SEQ ID NO: 17712 - RNA, 18 nt, Artificial Sequence
  Synthetic
gucacaaugcaaaaauuc

SEQ ID NO: 17713 - RNA, 19 nt, Artificial Sequence
  Synthetic
guuacucuaagcaaaauuc

SEQ ID NO: 17714 - RNA, 20 nt, Artificial Sequence
  Synthetic
gaagguacccaaagaaauuc

SEQ ID NO: 17715 - RNA, 21 nt, Artificial Sequence
  Synthetic
ggaagguacccaaagaaauuc

SEQ ID NO: 17716 - RNA, 18 nt, Artificial Sequence
  Synthetic
guaucuauucugaaauuc

SEQ ID NO: 17717 - RNA, 24 nt, Artificial Sequence
  Synthetic
gcuucuguaucuauucugaaauuc

SEQ ID NO: 17718 - RNA, 18 nt, Artificial Sequence
  Synthetic
ggaaaaguaagacaauuc

SEQ ID NO: 17719 - RNA, 23 nt, Artificial Sequence
  Synthetic
gaccuggaaaaguaagacaauuc

SEQ ID NO: 17720 - RNA, 19 nt, Artificial Sequence
  Synthetic
gugaugagcucuacaauuc

SEQ ID NO: 17721 - RNA, 20 nt, Artificial Sequence
  Synthetic
ggugaugagcucuacaauuc

SEQ ID NO: 17722 - RNA, 24 nt, Artificial Sequence
  Synthetic
gcaaggugaugagcucuacaauuc

SEQ ID NO: 17723 - RNA, 21 nt, Artificial Sequence
  Synthetic
gguuauucuacuuuccaauuc

SEQ ID NO: 17724 - RNA, 19 nt, Artificial Sequence
  Synthetic
guuuaaacuucagcaauuc

SEQ ID NO: 17725 - RNA, 23 nt, Artificial Sequence
  Synthetic
gauuguuuaaacuucagcaauuc

SEQ ID NO: 17726 - RNA, 19 nt, Artificial Sequence
  Synthetic
gaguguucaaaaauaauuc

SEQ ID NO: 17727 - RNA, 23 nt, Artificial Sequence
  Synthetic
guuugaguguucaaaaauaauuc

SEQ ID NO: 17728 - RNA, 19 nt, Artificial Sequence
  Synthetic
gaauauuuugccuuaauuc

SEQ ID NO: 17729 - RNA, 21 nt, Artificial Sequence
  Synthetic
gagaauauuuugccuuaauuc

SEQ ID NO: 17730 - RNA, 20 nt, Artificial Sequence
  Synthetic
gauauguugugauuuaauuc

SEQ ID NO: 17731 - RNA, 23 nt, Artificial Sequence
  Synthetic
gaagauauguugugauuuaauuc

SEQ ID NO: 17732 - RNA, 24 nt, Artificial Sequence
  Synthetic
ggaagauauguugugauuuaauuc

SEQ ID NO: 17733 - RNA, 18 nt, Artificial Sequence
  Synthetic
ggucaugcuauuuaauuc

SEQ ID NO: 17734 - RNA, 24 nt, Artificial Sequence
  Synthetic
gaaucuggucaugcuauuuaauuc

SEQ ID NO: 17735 - RNA, 22 nt, Artificial Sequence
  Synthetic
gcucuucuuaaaagucacauuc

SEQ ID NO: 17736 - RNA, 19 nt, Artificial Sequence
  Synthetic
gaaauaagcugucacauuc

SEQ ID NO: 17737 - RNA, 24 nt, Artificial Sequence
  Synthetic
gaacagaaauaagcugucacauuc

SEQ ID NO: 17738 - RNA, 21 nt, Artificial Sequence
  Synthetic
gaaaagaccuggccuccauuc

SEQ ID NO: 17739 - RNA, 22 nt, Artificial Sequence
  Synthetic
ggaaaagaccuggccuccauuc

SEQ ID NO: 17740 - RNA, 23 nt, Artificial Sequence
  Synthetic
gggaaaagaccuggccuccauuc

SEQ ID NO: 17741 - RNA, 21 nt, Artificial Sequence
  Synthetic
gcacccugaaagacagcauuc

SEQ ID NO: 17742 - RNA, 24 nt, Artificial Sequence
  Synthetic
guuauaaaauuccuaucagcauuc

SEQ ID NO: 17743 - RNA, 22 nt, Artificial Sequence
  Synthetic
guaauaguuaggucacgcauuc

SEQ ID NO: 17744 - RNA, 24 nt, Artificial Sequence
  Synthetic
guguaauaguuaggucacgcauuc

SEQ ID NO: 17745 - RNA, 19 nt, Artificial Sequence
  Synthetic
gcauucagaaagggcauuc

SEQ ID NO: 17746 - RNA, 23 nt, Artificial Sequence
  Synthetic
gaaagcauucagaaagggcauuc

SEQ ID NO: 17747 - RNA, 20 nt, Artificial Sequence
  Synthetic
gacuaaauaauaauucauuc

SEQ ID NO: 17748 - RNA, 24 nt, Artificial Sequence
  Synthetic
guuucucaagaaacuuauucauuc

SEQ ID NO: 17749 - RNA, 18 nt, Artificial Sequence
  Synthetic
gaacuuguuucuucauuc

SEQ ID NO: 17750 - RNA, 20 nt, Artificial Sequence
  Synthetic
gagaacuuguuucuucauuc

SEQ ID NO: 17751 - RNA, 24 nt, Artificial Sequence
  Synthetic
guucaaauuuggguaguuucauuc

SEQ ID NO: 17752 - RNA, 23 nt, Artificial Sequence
  Synthetic
gcaaagaaaauucuuaaagauuc

SEQ ID NO: 17753 - RNA, 19 nt, Artificial Sequence
  Synthetic
guucuuugucaugagauuc

SEQ ID NO: 17754 - RNA, 24 nt, Artificial Sequence
  Synthetic
gucauguucuuugucaugagauuc

SEQ ID NO: 17755 - RNA, 19 nt, Artificial Sequence
  Synthetic
gcauccugccucuagauuc

SEQ ID NO: 17756 - RNA, 20 nt, Artificial Sequence
  Synthetic
gacugaaucagcuuagauuc

SEQ ID NO: 17757 - RNA, 22 nt, Artificial Sequence
  Synthetic
gagacugaaucagcuuagauuc

SEQ ID NO: 17758 - RNA, 24 nt, Artificial Sequence
  Synthetic
gcuucuaaaucucuccaaggauuc

SEQ ID NO: 17759 - RNA, 18 nt, Artificial Sequence
  Synthetic
gguaacccuggaggauuc

SEQ ID NO: 17760 - RNA, 21 nt, Artificial Sequence
  Synthetic
gcauaaauaggauguugauuc

SEQ ID NO: 17761 - RNA, 19 nt, Artificial Sequence
  Synthetic
gcuuauuaugauuugauuc

SEQ ID NO: 17762 - RNA, 22 nt, Artificial Sequence
  Synthetic
guuaaaaaaugauaaaauauuc

SEQ ID NO: 17763 - RNA, 24 nt, Artificial Sequence
  Synthetic
gacauuuagagcagauccauauuc

SEQ ID NO: 17764 - RNA, 20 nt, Artificial Sequence
  Synthetic
gucugaaauguuucauauuc

SEQ ID NO: 17765 - RNA, 22 nt, Artificial Sequence
  Synthetic
guagaauacagaaauuauauuc

SEQ ID NO: 17766 - RNA, 19 nt, Artificial Sequence
  Synthetic
gcacagucuaaaucuauuc

SEQ ID NO: 17767 - RNA, 23 nt, Artificial Sequence
  Synthetic
gccuuugaugauuuaugguauuc

SEQ ID NO: 17768 - RNA, 18 nt, Artificial Sequence
  Synthetic
gaaacaacguugguauuc

SEQ ID NO: 17769 - RNA, 19 nt, Artificial Sequence
  Synthetic
ggaaacaacguugguauuc

SEQ ID NO: 17770 - RNA, 21 nt, Artificial Sequence
  Synthetic
guggaaacaacguugguauuc

SEQ ID NO: 17771 - RNA, 23 nt, Artificial Sequence
  Synthetic
guguggaaacaacguugguauuc

SEQ ID NO: 17772 - RNA, 22 nt, Artificial Sequence
  Synthetic
gcaccuggccuggccuguauuc

SEQ ID NO: 17773 - RNA, 21 nt, Artificial Sequence
  Synthetic
guacugaacauuuguguauuc

SEQ ID NO: 17774 - RNA, 24 nt, Artificial Sequence
  Synthetic
gcuguacugaacauuuguguauuc

SEQ ID NO: 17775 - RNA, 24 nt, Artificial Sequence
  Synthetic
guaucuuauucacuaaucuuauuc

SEQ ID NO: 17776 - RNA, 19 nt, Artificial Sequence
  Synthetic
gcucacucacuaaaacuuc

SEQ ID NO: 17777 - RNA, 22 nt, Artificial Sequence
  Synthetic
guugcucacucacuaaaacuuc

SEQ ID NO: 17778 - RNA, 23 nt, Artificial Sequence
  Synthetic
gguugcucacucacuaaaacuuc

SEQ ID NO: 17779 - RNA, 18 nt, Artificial Sequence
  Synthetic
gccuuggcugcaaacuuc

SEQ ID NO: 17780 - RNA, 21 nt, Artificial Sequence
  Synthetic
gccaaggaagaggacaacuuc

SEQ ID NO: 17781 - RNA, 23 nt, Artificial Sequence
  Synthetic
gaucucucuggaaauacaacuuc

SEQ ID NO: 17782 - RNA, 18 nt, Artificial Sequence
  Synthetic
gggauuauuuacaacuuc

SEQ ID NO: 17783 - RNA, 21 nt, Artificial Sequence
  Synthetic
guugggauuauuuacaacuuc

SEQ ID NO: 17784 - RNA, 18 nt, Artificial Sequence
  Synthetic
ggguggcaacugaacuuc

SEQ ID NO: 17785 - RNA, 18 nt, Artificial Sequence
  Synthetic
ggggcucauagccacuuc

SEQ ID NO: 17786 - RNA, 24 nt, Artificial Sequence
  Synthetic
guauaaggggcucauagccacuuc

SEQ ID NO: 17787 - RNA, 21 nt, Artificial Sequence
  Synthetic
gaaccucgucagucagacuuc

SEQ ID NO: 17788 - RNA, 18 nt, Artificial Sequence
  Synthetic
guguagcacauagacuuc

SEQ ID NO: 17789 - RNA, 20 nt, Artificial Sequence
  Synthetic
gauguuaagauaauuacuuc

SEQ ID NO: 17790 - RNA, 23 nt, Artificial Sequence
  Synthetic
gcuuccaacauagacuaaccuuc

SEQ ID NO: 17791 - RNA, 18 nt, Artificial Sequence
  Synthetic
ggucagaggaauaccuuc

SEQ ID NO: 17792 - RNA, 24 nt, Artificial Sequence
  Synthetic
gcucuauuuuguguaauccccuuc

SEQ ID NO: 17793 - RNA, 18 nt, Artificial Sequence
  Synthetic
ggcuaggguauugccuuc

SEQ ID NO: 17794 - RNA, 22 nt, Artificial Sequence
  Synthetic
gaaaggcuaggguauugccuuc

SEQ ID NO: 17795 - RNA, 23 nt, Artificial Sequence
  Synthetic
ggaaaggcuaggguauugccuuc

SEQ ID NO: 17796 - RNA, 20 nt, Artificial Sequence
  Synthetic
gacugcaaugauaauccuuc

SEQ ID NO: 17797 - RNA, 22 nt, Artificial Sequence
  Synthetic
gauuaauauggaagauuccuuc

SEQ ID NO: 17798 - RNA, 19 nt, Artificial Sequence
  Synthetic
gaguaaaagauauuccuuc

SEQ ID NO: 17799 - RNA, 18 nt, Artificial Sequence
  Synthetic
gcucuuauuuguuccuuc

SEQ ID NO: 17800 - RNA, 19 nt, Artificial Sequence
  Synthetic
ggcucuuauuuguuccuuc

SEQ ID NO: 17801 - RNA, 22 nt, Artificial Sequence
  Synthetic
gacuuugugaauaaacagcuuc

SEQ ID NO: 17802 - RNA, 23 nt, Artificial Sequence
  Synthetic
guuuuuuguuuuuuuagagcuuc

SEQ ID NO: 17803 - RNA, 20 nt, Artificial Sequence
  Synthetic
guugugaaaagucuagcuuc

SEQ ID NO: 17804 - RNA, 21 nt, Artificial Sequence
  Synthetic
gguugugaaaagucuagcuuc

SEQ ID NO: 17805 - RNA, 23 nt, Artificial Sequence
  Synthetic
gagguugugaaaagucuagcuuc

SEQ ID NO: 17806 - RNA, 18 nt, Artificial Sequence
  Synthetic
gagaagcaggcaggcuuc

SEQ ID NO: 17807 - RNA, 21 nt, Artificial Sequence
  Synthetic
gcagagaagcaggcaggcuuc

SEQ ID NO: 17808 - RNA, 22 nt, Artificial Sequence
  Synthetic
ggcagagaagcaggcaggcuuc

SEQ ID NO: 17809 - RNA, 21 nt, Artificial Sequence
  Synthetic
gaacaucuaaaguauaucuuc

SEQ ID NO: 17810 - RNA, 19 nt, Artificial Sequence
  Synthetic
gaauccaaaggguaucuuc

SEQ ID NO: 17811 - RNA, 20 nt, Artificial Sequence
  Synthetic
gcuucaucaagauccucuuc

SEQ ID NO: 17812 - RNA, 18 nt, Artificial Sequence
  Synthetic
ggugacaagcugcucuuc

SEQ ID NO: 17813 - RNA, 22 nt, Artificial Sequence
  Synthetic
guuuggugacaagcugcucuuc

SEQ ID NO: 17814 - RNA, 22 nt, Artificial Sequence
  Synthetic
gaaaaaaaauauguaagucuuc

SEQ ID NO: 17815 - RNA, 22 nt, Artificial Sequence
  Synthetic
gcuuuuggcaaaaaucgucuuc

SEQ ID NO: 17816 - RNA, 22 nt, Artificial Sequence
  Synthetic
gaccuuaaguaagucugucuuc

SEQ ID NO: 17817 - RNA, 20 nt, Artificial Sequence
  Synthetic
gcuuaaguuuuuccuucuuc

SEQ ID NO: 17818 - RNA, 21 nt, Artificial Sequence
  Synthetic
ggcuuaaguuuuuccuucuuc

SEQ ID NO: 17819 - RNA, 23 nt, Artificial Sequence
  Synthetic
gauauacugauuuuagcuucuuc

SEQ ID NO: 17820 - RNA, 24 nt, Artificial Sequence
  Synthetic
gacauaaaccagauggucuucuuc

SEQ ID NO: 17821 - RNA, 22 nt, Artificial Sequence
  Synthetic
gauuggggucauuaaaaaguuc

SEQ ID NO: 17822 - RNA, 22 nt, Artificial Sequence
  Synthetic
guuguuuucagucagcaaguuc

SEQ ID NO: 17823 - RNA, 22 nt, Artificial Sequence
  Synthetic
guaacugggauuuaagaaguuc

SEQ ID NO: 17824 - RNA, 23 nt, Artificial Sequence
  Synthetic
gguaacugggauuuaagaaguuc

SEQ ID NO: 17825 - RNA, 20 nt, Artificial Sequence
  Synthetic
gaccugucaaaggacaguuc

SEQ ID NO: 17826 - RNA, 22 nt, Artificial Sequence
  Synthetic
gagaccugucaaaggacaguuc

SEQ ID NO: 17827 - RNA, 23 nt, Artificial Sequence
  Synthetic
ggagaccugucaaaggacaguuc

SEQ ID NO: 17828 - RNA, 24 nt, Artificial Sequence
  Synthetic
gucauucacugcuuccuccaguuc

SEQ ID NO: 17829 - RNA, 18 nt, Artificial Sequence
  Synthetic
gugggagcagggcaguuc

SEQ ID NO: 17830 - RNA, 24 nt, Artificial Sequence
  Synthetic
guaacugugggagcagggcaguuc

SEQ ID NO: 17831 - RNA, 18 nt, Artificial Sequence
  Synthetic
gagguugcuacagaguuc

SEQ ID NO: 17832 - RNA, 19 nt, Artificial Sequence
  Synthetic
guuagcucucucuacguuc

SEQ ID NO: 17833 - RNA, 20 nt, Artificial Sequence
  Synthetic
gaucaacauuaugaagguuc

SEQ ID NO: 17834 - RNA, 21 nt, Artificial Sequence
  Synthetic
gaaaaaauguguuucagguuc

SEQ ID NO: 17835 - RNA, 19 nt, Artificial Sequence
  Synthetic
gaagagaaaccugagguuc

SEQ ID NO: 17836 - RNA, 21 nt, Artificial Sequence
  Synthetic
gcauguauuuuacaaggguuc

SEQ ID NO: 17837 - RNA, 22 nt, Artificial Sequence
  Synthetic
ggcauguauuuuacaaggguuc

SEQ ID NO: 17838 - RNA, 24 nt, Artificial Sequence
  Synthetic
gaggcauguauuuuacaaggguuc

SEQ ID NO: 17839 - RNA, 20 nt, Artificial Sequence
  Synthetic
gaccuguggaacugugguuc

SEQ ID NO: 17840 - RNA, 18 nt, Artificial Sequence
  Synthetic
gccaggcugaaaauguuc

SEQ ID NO: 17841 - RNA, 24 nt, Artificial Sequence
  Synthetic
guaaaagccaggcugaaaauguuc

SEQ ID NO: 17842 - RNA, 18 nt, Artificial Sequence
  Synthetic
ggcaauuauaaaauguuc

SEQ ID NO: 17843 - RNA, 19 nt, Artificial Sequence
  Synthetic
gggcaauuauaaaauguuc

SEQ ID NO: 17844 - RNA, 24 nt, Artificial Sequence
  Synthetic
guacugggcaauuauaaaauguuc

SEQ ID NO: 17845 - RNA, 21 nt, Artificial Sequence
  Synthetic
gcaauuacaaaagaaauguuc

SEQ ID NO: 17846 - RNA, 19 nt, Artificial Sequence
  Synthetic
gauccgguuugggauguuc

SEQ ID NO: 17847 - RNA, 21 nt, Artificial Sequence
  Synthetic
gagauccgguuugggauguuc

SEQ ID NO: 17848 - RNA, 22 nt, Artificial Sequence
  Synthetic
ggagauccgguuugggauguuc

SEQ ID NO: 17849 - RNA, 23 nt, Artificial Sequence
  Synthetic
gauauuaaccuagaaauauguuc

SEQ ID NO: 17850 - RNA, 18 nt, Artificial Sequence
  Synthetic
gguaucaccaaccuguuc

SEQ ID NO: 17851 - RNA, 18 nt, Artificial Sequence
  Synthetic
gguuguucuguucuguuc

SEQ ID NO: 17852 - RNA, 21 nt, Artificial Sequence
  Synthetic
guagguuguucuguucuguuc

SEQ ID NO: 17853 - RNA, 22 nt, Artificial Sequence
  Synthetic
gaaaagacugaguucauuguuc

SEQ ID NO: 17854 - RNA, 21 nt, Artificial Sequence
  Synthetic
gauuuacuuguaauuuuguuc

SEQ ID NO: 17855 - RNA, 23 nt, Artificial Sequence
  Synthetic
gagauuuacuuguaauuuuguuc

SEQ ID NO: 17856 - RNA, 21 nt, Artificial Sequence
  Synthetic
gaagggaucaaggucaauuuc

SEQ ID NO: 17857 - RNA, 18 nt, Artificial Sequence
  Synthetic
gacauguucaguaauuuc

SEQ ID NO: 17858 - RNA, 19 nt, Artificial Sequence
  Synthetic
ggacauguucaguaauuuc

SEQ ID NO: 17859 - RNA, 22 nt, Artificial Sequence
  Synthetic
guaggacauguucaguaauuuc

SEQ ID NO: 17860 - RNA, 19 nt, Artificial Sequence
  Synthetic
gacaaccugaauuaauuuc

SEQ ID NO: 17861 - RNA, 21 nt, Artificial Sequence
  Synthetic
gagacaaccugaauuaauuuc

SEQ ID NO: 17862 - RNA, 20 nt, Artificial Sequence
  Synthetic
gacucuacauaucccauuuc

SEQ ID NO: 17863 - RNA, 19 nt, Artificial Sequence
  Synthetic
gagauuaaucuugcauuuc

SEQ ID NO: 17864 - RNA, 22 nt, Artificial Sequence
  Synthetic
gaugagauuaaucuugcauuuc

SEQ ID NO: 17865 - RNA, 22 nt, Artificial Sequence
  Synthetic
gaucccaaaacuauaagauuuc

SEQ ID NO: 17866 - RNA, 23 nt, Artificial Sequence
  Synthetic
ggaucccaaaacuauaagauuuc

SEQ ID NO: 17867 - RNA, 22 nt, Artificial Sequence
  Synthetic
guaauaauggcaaucagauuuc

SEQ ID NO: 17868 - RNA, 23 nt, Artificial Sequence
  Synthetic
gguaauaauggcaaucagauuuc

SEQ ID NO: 17869 - RNA, 20 nt, Artificial Sequence
  Synthetic
gccaucauugguuagauuuc

SEQ ID NO: 17870 - RNA, 24 nt, Artificial Sequence
  Synthetic
gaauauugcuauuugcaggauuuc

SEQ ID NO: 17871 - RNA, 24 nt, Artificial Sequence
  Synthetic
gcacucugugcuugacaugauuuc

SEQ ID NO: 17872 - RNA, 23 nt, Artificial Sequence
  Synthetic
gaacaaaguaauuucaauauuuc

SEQ ID NO: 17873 - RNA, 23 nt, Artificial Sequence
  Synthetic
gauuuccugaauaggaauauuuc

SEQ ID NO: 17874 - RNA, 24 nt, Artificial Sequence
  Synthetic
ggauuuccugaauaggaauauuuc

SEQ ID NO: 17875 - RNA, 22 nt, Artificial Sequence
  Synthetic
gcuuaguacuuuguaauauuuc

SEQ ID NO: 17876 - RNA, 24 nt, Artificial Sequence
  Synthetic
gagcuuaguacuuuguaauauuuc

SEQ ID NO: 17877 - RNA, 21 nt, Artificial Sequence
  Synthetic
guaauaaauaaaucauauuuc

SEQ ID NO: 17878 - RNA, 22 nt, Artificial Sequence
  Synthetic
gguaauaaauaaaucauauuuc

SEQ ID NO: 17879 - RNA, 20 nt, Artificial Sequence
  Synthetic
gcuuucucuagggauauuuc

SEQ ID NO: 17880 - RNA, 19 nt, Artificial Sequence
  Synthetic
gccuaaaguuauauauuuc

SEQ ID NO: 17881 - RNA, 20 nt, Artificial Sequence
  Synthetic
ggccuaaaguuauauauuuc

SEQ ID NO: 17882 - RNA, 23 nt, Artificial Sequence
  Synthetic
guuccacuuucaucaaguauuuc

SEQ ID NO: 17883 - RNA, 20 nt, Artificial Sequence
  Synthetic
gcucgaaaagcucuuauuuc

SEQ ID NO: 17884 - RNA, 21 nt, Artificial Sequence
  Synthetic
gacuuuugaaaucaaacuuuc

SEQ ID NO: 17885 - RNA, 24 nt, Artificial Sequence
  Synthetic
gaagacuuuugaaaucaaacuuuc

SEQ ID NO: 17886 - RNA, 20 nt, Artificial Sequence
  Synthetic
gauauaagccugaaacuuuc

SEQ ID NO: 17887 - RNA, 20 nt, Artificial Sequence
  Synthetic
guaugaggaaauaaacuuuc

SEQ ID NO: 17888 - RNA, 18 nt, Artificial Sequence
  Synthetic
gcaccuugcagaacuuuc

SEQ ID NO: 17889 - RNA, 19 nt, Artificial Sequence
  Synthetic
ggcaccuugcagaacuuuc

SEQ ID NO: 17890 - RNA, 21 nt, Artificial Sequence
  Synthetic
gaggcaccuugcagaacuuuc

SEQ ID NO: 17891 - RNA, 18 nt, Artificial Sequence
  Synthetic
guucccccaaguacuuuc

SEQ ID NO: 17892 - RNA, 18 nt, Artificial Sequence
  Synthetic
gccagauccaguacuuuc

SEQ ID NO: 17893 - RNA, 19 nt, Artificial Sequence
  Synthetic
ggccagauccaguacuuuc

SEQ ID NO: 17894 - RNA, 19 nt, Artificial Sequence
  Synthetic
gucuuucguauauccuuuc

SEQ ID NO: 17895 - RNA, 23 nt, Artificial Sequence
  Synthetic
gaaugucuuucguauauccuuuc

SEQ ID NO: 17896 - RNA, 19 nt, Artificial Sequence
  Synthetic
gaauaugacuagagcuuuc

SEQ ID NO: 17897 - RNA, 22 nt, Artificial Sequence
  Synthetic
guauuucccacaaaaggcuuuc

SEQ ID NO: 17898 - RNA, 19 nt, Artificial Sequence
  Synthetic
gaaagggcaguaugcuuuc

SEQ ID NO: 17899 - RNA, 20 nt, Artificial Sequence
  Synthetic
ggaaagggcaguaugcuuuc

SEQ ID NO: 17900 - RNA, 22 nt, Artificial Sequence
  Synthetic
gaggaaagggcaguaugcuuuc

SEQ ID NO: 17901 - RNA, 18 nt, Artificial Sequence
  Synthetic
gggaaacuuguugcuuuc

SEQ ID NO: 17902 - RNA, 21 nt, Artificial Sequence
  Synthetic
gaagggaaacuuguugcuuuc

SEQ ID NO: 17903 - RNA, 22 nt, Artificial Sequence
  Synthetic
ggaagggaaacuuguugcuuuc

SEQ ID NO: 17904 - RNA, 18 nt, Artificial Sequence
  Synthetic
guuucagagcagucuuuc

SEQ ID NO: 17905 - RNA, 22 nt, Artificial Sequence
  Synthetic
gucaguuucagagcagucuuuc

SEQ ID NO: 17906 - RNA, 19 nt, Artificial Sequence
  Synthetic
gagguaaggagcgucuuuc

SEQ ID NO: 17907 - RNA, 20 nt, Artificial Sequence
  Synthetic
ggagguaaggagcgucuuuc

SEQ ID NO: 17908 - RNA, 21 nt, Artificial Sequence
  Synthetic
gggagguaaggagcgucuuuc

SEQ ID NO: 17909 - RNA, 21 nt, Artificial Sequence
  Synthetic
gacugacuagccaugucuuuc

SEQ ID NO: 17910 - RNA, 24 nt, Artificial Sequence
  Synthetic
gcugacugacuagccaugucuuuc

SEQ ID NO: 17911 - RNA, 21 nt, Artificial Sequence
  Synthetic
guaauguuuuucaaaaguuuc

SEQ ID NO: 17912 - RNA, 23 nt, Artificial Sequence
  Synthetic
gaguaauguuuuucaaaaguuuc

SEQ ID NO: 17913 - RNA, 19 nt, Artificial Sequence
  Synthetic
gauacgcagauccaguuuc

SEQ ID NO: 17914 - RNA, 24 nt, Artificial Sequence
  Synthetic
gaucugauacgcagauccaguuuc

SEQ ID NO: 17915 - RNA, 19 nt, Artificial Sequence
  Synthetic
gugauuuccuaauaguuuc

SEQ ID NO: 17916 - RNA, 24 nt, Artificial Sequence
  Synthetic
gcucagugauuuccuaauaguuuc

SEQ ID NO: 17917 - RNA, 24 nt, Artificial Sequence
  Synthetic
guuauccuaugagaugauaguuuc

SEQ ID NO: 17918 - RNA, 22 nt, Artificial Sequence
  Synthetic
gaaacacauauuacuuaguuuc

SEQ ID NO: 17919 - RNA, 19 nt, Artificial Sequence
  Synthetic
gcaagcaagacaagguuuc

SEQ ID NO: 17920 - RNA, 20 nt, Artificial Sequence
  Synthetic
ggcaagcaagacaagguuuc

SEQ ID NO: 17921 - RNA, 22 nt, Artificial Sequence
  Synthetic
guuauaccauuuggaugguuuc

SEQ ID NO: 17922 - RNA, 23 nt, Artificial Sequence
  Synthetic
gguuauaccauuuggaugguuuc

SEQ ID NO: 17923 - RNA, 18 nt, Artificial Sequence
  Synthetic
gaaaauuuaauugguuuc

SEQ ID NO: 17924 - RNA, 22 nt, Artificial Sequence
  Synthetic
gucugaaaauuuaauugguuuc

SEQ ID NO: 17925 - RNA, 21 nt, Artificial Sequence
  Synthetic
gcuuucuauuaccuauguuuc

SEQ ID NO: 17926 - RNA, 22 nt, Artificial Sequence
  Synthetic
ggcuuucuauuaccuauguuuc

SEQ ID NO: 17927 - RNA, 23 nt, Artificial Sequence
  Synthetic
gggcuuucuauuaccuauguuuc

SEQ ID NO: 17928 - RNA, 24 nt, Artificial Sequence
  Synthetic
gaauuuauuuuguagauuuguuuc

SEQ ID NO: 17929 - RNA, 20 nt, Artificial Sequence
  Synthetic
gaaaugacuuaaaaauuuuc

SEQ ID NO: 17930 - RNA, 18 nt, Artificial Sequence
  Synthetic
ggcucaugacaaauuuuc

SEQ ID NO: 17931 - RNA, 20 nt, Artificial Sequence
  Synthetic
guggcucaugacaaauuuuc

SEQ ID NO: 17932 - RNA, 22 nt, Artificial Sequence
  Synthetic
gcguggcucaugacaaauuuuc

SEQ ID NO: 17933 - RNA, 23 nt, Artificial Sequence
  Synthetic
ggcguggcucaugacaaauuuuc

SEQ ID NO: 17934 - RNA, 20 nt, Artificial Sequence
  Synthetic
gccuuuauuacuacauuuuc

SEQ ID NO: 17935 - RNA, 23 nt, Artificial Sequence
  Synthetic
gaagccuuuauuacuacauuuuc

SEQ ID NO: 17936 - RNA, 19 nt, Artificial Sequence
  Synthetic
gauguauagaaagauuuuc

SEQ ID NO: 17937 - RNA, 21 nt, Artificial Sequence
  Synthetic
gcgauguauagaaagauuuuc

SEQ ID NO: 17938 - RNA, 23 nt, Artificial Sequence
  Synthetic
gauuccuguauuagaugauuuuc

SEQ ID NO: 17939 - RNA, 24 nt, Artificial Sequence
  Synthetic
ggauuccuguauuagaugauuuuc

SEQ ID NO: 17940 - RNA, 20 nt, Artificial Sequence
  Synthetic
guugcccuauuuuuauuuuc

SEQ ID NO: 17941 - RNA, 23 nt, Artificial Sequence
  Synthetic
gcaguugcccuauuuuuauuuuc

SEQ ID NO: 17942 - RNA, 21 nt, Artificial Sequence
  Synthetic
gaaugauagcauauacuuuuc

SEQ ID NO: 17943 - RNA, 22 nt, Artificial Sequence
  Synthetic
ggaaugauagcauauacuuuuc

SEQ ID NO: 17944 - RNA, 24 nt, Artificial Sequence
  Synthetic
guggaaugauagcauauacuuuuc

SEQ ID NO: 17945 - RNA, 21 nt, Artificial Sequence
  Synthetic
gaaugcccuugaaagcuuuuc

SEQ ID NO: 17946 - RNA, 19 nt, Artificial Sequence
  Synthetic
gcaacaaucauuucuuuuc

SEQ ID NO: 17947 - RNA, 21 nt, Artificial Sequence
  Synthetic
gaacaaguuaccggaguuuuc

SEQ ID NO: 17948 - RNA, 23 nt, Artificial Sequence
  Synthetic
gugaacaaguuaccggaguuuuc

SEQ ID NO: 17949 - RNA, 18 nt, Artificial Sequence
  Synthetic
gugaaagcgaguguuuuc

SEQ ID NO: 17950 - RNA, 19 nt, Artificial Sequence
  Synthetic
ggugaaagcgaguguuuuc

SEQ ID NO: 17951 - RNA, 20 nt, Artificial Sequence
  Synthetic
gaugaaucauggguguuuuc

SEQ ID NO: 17952 - RNA, 22 nt, Artificial Sequence
  Synthetic
gucuucaauccacaaguuuuuc

SEQ ID NO: 17953 - RNA, 24 nt, Artificial Sequence
  Synthetic
gcgucuucaauccacaaguuuuuc

SEQ ID NO: 17954 - RNA, 22 nt, Artificial Sequence
  Synthetic
gauaauuacaaccuuguuuuuc

SEQ ID NO: 17955 - RNA, 23 nt, Artificial Sequence
  Synthetic
ggauaauuacaaccuuguuuuuc

SEQ ID NO: 17956 - RNA, 24 nt, Artificial Sequence
  Synthetic
gcuuaaauauuguuuacuuuuuuc

SEQ ID NO: 17957 - RNA, 24 nt, Artificial Sequence
  Synthetic
gaauacaaaugaccuuaaaaaaag

SEQ ID NO: 17958 - RNA, 21 nt, Artificial Sequence
  Synthetic
gaccuuuguauaugaaaaaag

SEQ ID NO: 17959 - RNA, 20 nt, Artificial Sequence
  Synthetic
gaauucuaacucccaaaaag

SEQ ID NO: 17960 - RNA, 22 nt, Artificial Sequence
  Synthetic
gcuucuccagaaaagcaaaaag

SEQ ID NO: 17961 - RNA, 20 nt, Artificial Sequence
  Synthetic
guacuauuucauucaaaaag

SEQ ID NO: 17962 - RNA, 18 nt, Artificial Sequence
  Synthetic
gaugguaagccuaaaaag

SEQ ID NO: 17963 - RNA, 19 nt, Artificial Sequence
  Synthetic
ggaugguaagccuaaaaag

SEQ ID NO: 17964 - RNA, 21 nt, Artificial Sequence
  Synthetic
gaggaugguaagccuaaaaag

SEQ ID NO: 17965 - RNA, 19 nt, Artificial Sequence
  Synthetic
guugacuugaaguaaaaag

SEQ ID NO: 17966 - RNA, 20 nt, Artificial Sequence
  Synthetic
gaagcaguuguacccaaaag

SEQ ID NO: 17967 - RNA, 22 nt, Artificial Sequence
  Synthetic
gaaagcaaaagccagagaaaag

SEQ ID NO: 17968 - RNA, 22 nt, Artificial Sequence
  Synthetic
guuauuuacuacuucugaaaag

SEQ ID NO: 17969 - RNA, 23 nt, Artificial Sequence
  Synthetic
gguuauuuacuacuucugaaaag

SEQ ID NO: 17970 - RNA, 22 nt, Artificial Sequence
  Synthetic
gaaaaauagcucaauugaaaag

SEQ ID NO: 17971 - RNA, 21 nt, Artificial Sequence
  Synthetic
gucacuaauauuuuugaaaag

SEQ ID NO: 17972 - RNA, 24 nt, Artificial Sequence
  Synthetic
guagucacuaauauuuuugaaaag

SEQ ID NO: 17973 - RNA, 21 nt, Artificial Sequence
  Synthetic
gacaaagcaaggcaauaaaag

SEQ ID NO: 17974 - RNA, 23 nt, Artificial Sequence
  Synthetic
gagacaaagcaaggcaauaaaag

SEQ ID NO: 17975 - RNA, 23 nt, Artificial Sequence
  Synthetic
gucucccaauguuauaauaaaag

SEQ ID NO: 17976 - RNA, 22 nt, Artificial Sequence
  Synthetic
gaauaaaaacaaacuauaaaag

SEQ ID NO: 17977 - RNA, 20 nt, Artificial Sequence
  Synthetic
guacagggcagcuguaaaag

SEQ ID NO: 17978 - RNA, 23 nt, Artificial Sequence
  Synthetic
gaaguacagggcagcuguaaaag

SEQ ID NO: 17979 - RNA, 21 nt, Artificial Sequence
  Synthetic
gcccuccuguaaaauuaaaag

SEQ ID NO: 17980 - RNA, 24 nt, Artificial Sequence
  Synthetic
guugcccuccuguaaaauuaaaag

SEQ ID NO: 17981 - RNA, 22 nt, Artificial Sequence
  Synthetic
gagcaauauagcagaaacaaag

SEQ ID NO: 17982 - RNA, 23 nt, Artificial Sequence
  Synthetic
ggagcaauauagcagaaacaaag

SEQ ID NO: 17983 - RNA, 19 nt, Artificial Sequence
  Synthetic
gacugaaccccacacaaag

SEQ ID NO: 17984 - RNA, 20 nt, Artificial Sequence
  Synthetic
gaaguguggcagucacaaag

SEQ ID NO: 17985 - RNA, 21 nt, Artificial Sequence
  Synthetic
ggaaguguggcagucacaaag

SEQ ID NO: 17986 - RNA, 18 nt, Artificial Sequence
  Synthetic
gauaagcucuucacaaag

SEQ ID NO: 17987 - RNA, 19 nt, Artificial Sequence
  Synthetic
gaauggaagcuagacaaag

SEQ ID NO: 17988 - RNA, 20 nt, Artificial Sequence
  Synthetic
ggaauggaagcuagacaaag

SEQ ID NO: 17989 - RNA, 24 nt, Artificial Sequence
  Synthetic
gaaaggaauggaagcuagacaaag

SEQ ID NO: 17990 - RNA, 24 nt, Artificial Sequence
  Synthetic
guaccugaaacuggaaauacaaag

SEQ ID NO: 17991 - RNA, 23 nt, Artificial Sequence
  Synthetic
gccuuaacauaagagauacaaag

SEQ ID NO: 17992 - RNA, 24 nt, Artificial Sequence
  Synthetic
ggccuuaacauaagagauacaaag

SEQ ID NO: 17993 - RNA, 24 nt, Artificial Sequence
  Synthetic
gcauacuuuagggcuguuacaaag

SEQ ID NO: 17994 - RNA, 20 nt, Artificial Sequence
  Synthetic
guuggccagauugaccaaag

SEQ ID NO: 17995 - RNA, 21 nt, Artificial Sequence
  Synthetic
gguuggccagauugaccaaag

SEQ ID NO: 17996 - RNA, 18 nt, Artificial Sequence
  Synthetic
gauguggagacuccaaag

SEQ ID NO: 17997 - RNA, 19 nt, Artificial Sequence
  Synthetic
ggauguggagacuccaaag

SEQ ID NO: 17998 - RNA, 24 nt, Artificial Sequence
  Synthetic
gaaagagauuggaagaaggcaaag

SEQ ID NO: 17999 - RNA, 21 nt, Artificial Sequence
  Synthetic
gaauucacacugugaucaaag

SEQ ID NO: 18000 - RNA, 21 nt, Artificial Sequence
  Synthetic
gaggagaaaguggggucaaag

SEQ ID NO: 18001 - RNA, 22 nt, Artificial Sequence
  Synthetic
ggaggagaaaguggggucaaag

SEQ ID NO: 18002 - RNA, 21 nt, Artificial Sequence
  Synthetic
gaaagugaauacaauucaaag

SEQ ID NO: 18003 - RNA, 22 nt, Artificial Sequence
  Synthetic
ggaaagugaauacaauucaaag

SEQ ID NO: 18004 - RNA, 24 nt, Artificial Sequence
  Synthetic
gaggaaagugaauacaauucaaag

SEQ ID NO: 18005 - RNA, 22 nt, Artificial Sequence
  Synthetic
gcaauaaauaguucauucaaag

SEQ ID NO: 18006 - RNA, 19 nt, Artificial Sequence
  Synthetic
guaggcuguccuaagaaag

SEQ ID NO: 18007 - RNA, 20 nt, Artificial Sequence
  Synthetic
gguaggcuguccuaagaaag

SEQ ID NO: 18008 - RNA, 24 nt, Artificial Sequence
  Synthetic
guuaaacucuuuagagacagaaag

SEQ ID NO: 18009 - RNA, 21 nt, Artificial Sequence
  Synthetic
guuuugaacagaagcagaaag

SEQ ID NO: 18010 - RNA, 22 nt, Artificial Sequence
  Synthetic
gguuuugaacagaagcagaaag

SEQ ID NO: 18011 - RNA, 23 nt, Artificial Sequence
  Synthetic
ggguuuugaacagaagcagaaag

SEQ ID NO: 18012 - RNA, 24 nt, Artificial Sequence
  Synthetic
gggguuuugaacagaagcagaaag

SEQ ID NO: 18013 - RNA, 22 nt, Artificial Sequence
  Synthetic
gaaauagcucugaaucagaaag

SEQ ID NO: 18014 - RNA, 23 nt, Artificial Sequence
  Synthetic
ggaaauagcucugaaucagaaag

SEQ ID NO: 18015 - RNA, 21 nt, Artificial Sequence
  Synthetic
gaccaauuuccaaagagaaag

SEQ ID NO: 18016 - RNA, 18 nt, Artificial Sequence
  Synthetic
gcauuuuggaggagaaag

SEQ ID NO: 18017 - RNA, 21 nt, Artificial Sequence
  Synthetic
guucuucuagccuggagaaag

SEQ ID NO: 18018 - RNA, 18 nt, Artificial Sequence
  Synthetic
ggauaaacaaguagaaag

SEQ ID NO: 18019 - RNA, 18 nt, Artificial Sequence
  Synthetic
gucacccuuucucgaaag

SEQ ID NO: 18020 - RNA, 22 nt, Artificial Sequence
  Synthetic
gauugucacccuuucucgaaag

SEQ ID NO: 18021 - RNA, 23 nt, Artificial Sequence
  Synthetic
ggauugucacccuuucucgaaag

SEQ ID NO: 18022 - RNA, 24 nt, Artificial Sequence
  Synthetic
gggauugucacccuuucucgaaag

SEQ ID NO: 18023 - RNA, 22 nt, Artificial Sequence
  Synthetic
gaauaucccaaaaaaaggaaag

SEQ ID NO: 18024 - RNA, 22 nt, Artificial Sequence
  Synthetic
gacuuuaaaauguaaaggaaag

SEQ ID NO: 18025 - RNA, 18 nt, Artificial Sequence
  Synthetic
gacauaguuucaggaaag

SEQ ID NO: 18026 - RNA, 19 nt, Artificial Sequence
  Synthetic
ggacauaguuucaggaaag

SEQ ID NO: 18027 - RNA, 20 nt, Artificial Sequence
  Synthetic
gggacauaguuucaggaaag

SEQ ID NO: 18028 - RNA, 22 nt, Artificial Sequence
  Synthetic
guuaauauguaacuggggaaag

SEQ ID NO: 18029 - RNA, 23 nt, Artificial Sequence
  Synthetic
gguuaauauguaacuggggaaag

SEQ ID NO: 18030 - RNA, 22 nt, Artificial Sequence
  Synthetic
gauucuuauguggcugggaaag

SEQ ID NO: 18031 - RNA, 23 nt, Artificial Sequence
  Synthetic
ggauucuuauguggcugggaaag

SEQ ID NO: 18032 - RNA, 22 nt, Artificial Sequence
  Synthetic
gaaagaauugggguugggaaag

SEQ ID NO: 18033 - RNA, 23 nt, Artificial Sequence
  Synthetic
gaaaacaaugugaagaaugaaag

SEQ ID NO: 18034 - RNA, 24 nt, Artificial Sequence
  Synthetic
ggaaaacaaugugaagaaugaaag

SEQ ID NO: 18035 - RNA, 20 nt, Artificial Sequence
  Synthetic
guagggcagugcuaugaaag

SEQ ID NO: 18036 - RNA, 23 nt, Artificial Sequence
  Synthetic
gaaguagggcagugcuaugaaag

SEQ ID NO: 18037 - RNA, 24 nt, Artificial Sequence
  Synthetic
ggaaguagggcagugcuaugaaag

SEQ ID NO: 18038 - RNA, 22 nt, Artificial Sequence
  Synthetic
gcaaucaucuaguuugugaaag

SEQ ID NO: 18039 - RNA, 21 nt, Artificial Sequence
  Synthetic
guaagugcuaauguuugaaag

SEQ ID NO: 18040 - RNA, 23 nt, Artificial Sequence
  Synthetic
gaguaagugcuaauguuugaaag

SEQ ID NO: 18041 - RNA, 21 nt, Artificial Sequence
  Synthetic
guucuguaaaccuuuugaaag

SEQ ID NO: 18042 - RNA, 21 nt, Artificial Sequence
  Synthetic
gcaaacacaggggaaauaaag

SEQ ID NO: 18043 - RNA, 22 nt, Artificial Sequence
  Synthetic
gaaaauaauaaaauuaauaaag

SEQ ID NO: 18044 - RNA, 23 nt, Artificial Sequence
  Synthetic
ggaaaauaauaaaauuaauaaag

SEQ ID NO: 18045 - RNA, 19 nt, Artificial Sequence
  Synthetic
gccuagaaauacgauaaag

SEQ ID NO: 18046 - RNA, 20 nt, Artificial Sequence
  Synthetic
ggccuagaaauacgauaaag

SEQ ID NO: 18047 - RNA, 23 nt, Artificial Sequence
  Synthetic
gaaggccuagaaauacgauaaag

SEQ ID NO: 18048 - RNA, 24 nt, Artificial Sequence
  Synthetic
ggaaggccuagaaauacgauaaag

SEQ ID NO: 18049 - RNA, 19 nt, Artificial Sequence
  Synthetic
guguccguuucaucuaaag

SEQ ID NO: 18050 - RNA, 21 nt, Artificial Sequence
  Synthetic
gaguguccguuucaucuaaag

SEQ ID NO: 18051 - RNA, 20 nt, Artificial Sequence
  Synthetic
gcugcauugauuaucuaaag

SEQ ID NO: 18052 - RNA, 23 nt, Artificial Sequence
  Synthetic
gaugcugcauugauuaucuaaag

SEQ ID NO: 18053 - RNA, 19 nt, Artificial Sequence
  Synthetic
gauagauagauaaguaaag

SEQ ID NO: 18054 - RNA, 20 nt, Artificial Sequence
  Synthetic
gauuguagaguucaguaaag

SEQ ID NO: 18055 - RNA, 19 nt, Artificial Sequence
  Synthetic
gucaucuagaauaguaaag

SEQ ID NO: 18056 - RNA, 20 nt, Artificial Sequence
  Synthetic
ggucaucuagaauaguaaag

SEQ ID NO: 18057 - RNA, 19 nt, Artificial Sequence
  Synthetic
guuagugaaagugguaaag

SEQ ID NO: 18058 - RNA, 20 nt, Artificial Sequence
  Synthetic
gguuagugaaagugguaaag

SEQ ID NO: 18059 - RNA, 21 nt, Artificial Sequence
  Synthetic
gaauauuuggaagaauuaaag

SEQ ID NO: 18060 - RNA, 22 nt, Artificial Sequence
  Synthetic
gaaaucuaaugaacaguuaaag

SEQ ID NO: 18061 - RNA, 24 nt, Artificial Sequence
  Synthetic
gugaaaucuaaugaacaguuaaag

SEQ ID NO: 18062 - RNA, 21 nt, Artificial Sequence
  Synthetic
gcuuuagucauaacaaacaag

SEQ ID NO: 18063 - RNA, 23 nt, Artificial Sequence
  Synthetic
gcuuauuauugcagcauaacaag

SEQ ID NO: 18064 - RNA, 18 nt, Artificial Sequence
  Synthetic
gggagcaacuauaacaag

SEQ ID NO: 18065 - RNA, 20 nt, Artificial Sequence
  Synthetic
gccacauacugucuaacaag

SEQ ID NO: 18066 - RNA, 22 nt, Artificial Sequence
  Synthetic
gagccacauacugucuaacaag

SEQ ID NO: 18067 - RNA, 19 nt, Artificial Sequence
  Synthetic
gaauuuuggcacagacaag

SEQ ID NO: 18068 - RNA, 22 nt, Artificial Sequence
  Synthetic
gaagaauuuuggcacagacaag

SEQ ID NO: 18069 - RNA, 18 nt, Artificial Sequence
  Synthetic
guuuccgagcauuacaag

SEQ ID NO: 18070 - RNA, 19 nt, Artificial Sequence
  Synthetic
gguuuccgagcauuacaag

SEQ ID NO: 18071 - RNA, 20 nt, Artificial Sequence
  Synthetic
gaccaacugcuuaaaccaag

SEQ ID NO: 18072 - RNA, 23 nt, Artificial Sequence
  Synthetic
gcagaccaacugcuuaaaccaag

SEQ ID NO: 18073 - RNA, 24 nt, Artificial Sequence
  Synthetic
gauaauauuguucugggaaccaag

SEQ ID NO: 18074 - RNA, 18 nt, Artificial Sequence
  Synthetic
gaugaaccaagccccaag

SEQ ID NO: 18075 - RNA, 23 nt, Artificial Sequence
  Synthetic
gccucgaugaaccaagccccaag

SEQ ID NO: 18076 - RNA, 23 nt, Artificial Sequence
  Synthetic
gcuuucugauuguggcagccaag

SEQ ID NO: 18077 - RNA, 18 nt, Artificial Sequence
  Synthetic
ggauaacaggaggccaag

SEQ ID NO: 18078 - RNA, 20 nt, Artificial Sequence
  Synthetic
gaggauaacaggaggccaag

SEQ ID NO: 18079 - RNA, 23 nt, Artificial Sequence
  Synthetic
gcugaggauaacaggaggccaag

SEQ ID NO: 18080 - RNA, 24 nt, Artificial Sequence
  Synthetic
ggcugaggauaacaggaggccaag

SEQ ID NO: 18081 - RNA, 20 nt, Artificial Sequence
  Synthetic
gucaauguagaauggccaag

SEQ ID NO: 18082 - RNA, 23 nt, Artificial Sequence
  Synthetic
gaugucaauguagaauggccaag

SEQ ID NO: 18083 - RNA, 19 nt, Artificial Sequence
  Synthetic
gagggaacugguguccaag

SEQ ID NO: 18084 - RNA, 21 nt, Artificial Sequence
  Synthetic
gagagggaacugguguccaag

SEQ ID NO: 18085 - RNA, 23 nt, Artificial Sequence
  Synthetic
gugagagggaacugguguccaag

SEQ ID NO: 18086 - RNA, 21 nt, Artificial Sequence
  Synthetic
gauucagaauaccuuuccaag

SEQ ID NO: 18087 - RNA, 22 nt, Artificial Sequence
  Synthetic
ggauucagaauaccuuuccaag

SEQ ID NO: 18088 - RNA, 22 nt, Artificial Sequence
  Synthetic
guuuucucaccugauaagcaag

SEQ ID NO: 18089 - RNA, 19 nt, Artificial Sequence
  Synthetic
gucacauuuaaugagcaag

SEQ ID NO: 18090 - RNA, 20 nt, Artificial Sequence
  Synthetic
ggucacauuuaaugagcaag

SEQ ID NO: 18091 - RNA, 21 nt, Artificial Sequence
  Synthetic
gaucacauagcugguagcaag

SEQ ID NO: 18092 - RNA, 21 nt, Artificial Sequence
  Synthetic
gauaacauauagggaggcaag

SEQ ID NO: 18093 - RNA, 22 nt, Artificial Sequence
  Synthetic
ggauaacauauagggaggcaag

SEQ ID NO: 18094 - RNA, 18 nt, Artificial Sequence
  Synthetic
guuagaggauggugcaag

SEQ ID NO: 18095 - RNA, 23 nt, Artificial Sequence
  Synthetic
guauuaaaacuucccacaucaag

SEQ ID NO: 18096 - RNA, 18 nt, Artificial Sequence
  Synthetic
gaacuuccacuuaucaag

SEQ ID NO: 18097 - RNA, 19 nt, Artificial Sequence
  Synthetic
gccacauauaucacucaag

SEQ ID NO: 18098 - RNA, 19 nt, Artificial Sequence
  Synthetic
gccgggucugggccucaag

SEQ ID NO: 18099 - RNA, 22 nt, Artificial Sequence
  Synthetic
gaugccgggucugggccucaag

SEQ ID NO: 18100 - RNA, 23 nt, Artificial Sequence
  Synthetic
ggaugccgggucugggccucaag

SEQ ID NO: 18101 - RNA, 18 nt, Artificial Sequence
  Synthetic
gugcauggccugcucaag

SEQ ID NO: 18102 - RNA, 21 nt, Artificial Sequence
  Synthetic
gaucuccuugaaagggucaag

SEQ ID NO: 18103 - RNA, 21 nt, Artificial Sequence
  Synthetic
guuuguuucuuguaugucaag

SEQ ID NO: 18104 - RNA, 22 nt, Artificial Sequence
  Synthetic
gguuuguuucuuguaugucaag

SEQ ID NO: 18105 - RNA, 23 nt, Artificial Sequence
  Synthetic
ggguuuguuucuuguaugucaag

SEQ ID NO: 18106 - RNA, 19 nt, Artificial Sequence
  Synthetic
gcuugucugcucugucaag

SEQ ID NO: 18107 - RNA, 20 nt, Artificial Sequence
  Synthetic
gaugaagacagagugucaag

SEQ ID NO: 18108 - RNA, 23 nt, Artificial Sequence
  Synthetic
guugaugaagacagagugucaag

SEQ ID NO: 18109 - RNA, 18 nt, Artificial Sequence
  Synthetic
guggaagaagaauucaag

SEQ ID NO: 18110 - RNA, 23 nt, Artificial Sequence
  Synthetic
guucuguggaagaagaauucaag

SEQ ID NO: 18111 - RNA, 23 nt, Artificial Sequence
  Synthetic
guuuauuauguuuaauuuucaag

SEQ ID NO: 18112 - RNA, 22 nt, Artificial Sequence
  Synthetic
guucugugaggugauuuucaag

SEQ ID NO: 18113 - RNA, 23 nt, Artificial Sequence
  Synthetic
gguucugugaggugauuuucaag

SEQ ID NO: 18114 - RNA, 24 nt, Artificial Sequence
  Synthetic
ggguucugugaggugauuuucaag

SEQ ID NO: 18115 - RNA, 19 nt, Artificial Sequence
  Synthetic
gaacacugauauuuucaag

SEQ ID NO: 18116 - RNA, 21 nt, Artificial Sequence
  Synthetic
gagaacacugauauuuucaag

SEQ ID NO: 18117 - RNA, 18 nt, Artificial Sequence
  Synthetic
guagaauugucaaagaag

SEQ ID NO: 18118 - RNA, 19 nt, Artificial Sequence
  Synthetic
gguagaauugucaaagaag

SEQ ID NO: 18119 - RNA, 23 nt, Artificial Sequence
  Synthetic
gaaucagagagaagguaaagaag

SEQ ID NO: 18120 - RNA, 18 nt, Artificial Sequence
  Synthetic
gauuccuucuacaagaag

SEQ ID NO: 18121 - RNA, 21 nt, Artificial Sequence
  Synthetic
gcagauuccuucuacaagaag

SEQ ID NO: 18122 - RNA, 22 nt, Artificial Sequence
  Synthetic
ggcagauuccuucuacaagaag

SEQ ID NO: 18123 - RNA, 18 nt, Artificial Sequence
  Synthetic
gauagaaucuccaagaag

SEQ ID NO: 18124 - RNA, 23 nt, Artificial Sequence
  Synthetic
gacaugauagaaucuccaagaag

SEQ ID NO: 18125 - RNA, 21 nt, Artificial Sequence
  Synthetic
gucuccucauuagagaagaag

SEQ ID NO: 18126 - RNA, 24 nt, Artificial Sequence
  Synthetic
guugucuccucauuagagaagaag

SEQ ID NO: 18127 - RNA, 18 nt, Artificial Sequence
  Synthetic
gauuggaauuggaagaag

SEQ ID NO: 18128 - RNA, 19 nt, Artificial Sequence
  Synthetic
ggauuggaauuggaagaag

SEQ ID NO: 18129 - RNA, 23 nt, Artificial Sequence
  Synthetic
guuuggauuggaauuggaagaag

SEQ ID NO: 18130 - RNA, 24 nt, Artificial Sequence
  Synthetic
gaucaacaaaugguaggccagaag

SEQ ID NO: 18131 - RNA, 18 nt, Artificial Sequence
  Synthetic
guuguuauguggcagaag

SEQ ID NO: 18132 - RNA, 21 nt, Artificial Sequence
  Synthetic
guuguuguuauguggcagaag

SEQ ID NO: 18133 - RNA, 23 nt, Artificial Sequence
  Synthetic
gaguuguuguuauguggcagaag

SEQ ID NO: 18134 - RNA, 18 nt, Artificial Sequence
  Synthetic
ggaggauuaaaagagaag

SEQ ID NO: 18135 - RNA, 21 nt, Artificial Sequence
  Synthetic
gauggaggauuaaaagagaag

SEQ ID NO: 18136 - RNA, 24 nt, Artificial Sequence
  Synthetic
gaagauggaggauuaaaagagaag

SEQ ID NO: 18137 - RNA, 24 nt, Artificial Sequence
  Synthetic
gccuucagccagguuuaagagaag

SEQ ID NO: 18138 - RNA, 24 nt, Artificial Sequence
  Synthetic
guaaaaaucaaacaauuagagaag

SEQ ID NO: 18139 - RNA, 21 nt, Artificial Sequence
  Synthetic
ggagaaaauuacaaggagaag

SEQ ID NO: 18140 - RNA, 20 nt, Artificial Sequence
  Synthetic
gcaauccauauuaugagaag

SEQ ID NO: 18141 - RNA, 19 nt, Artificial Sequence
  Synthetic
gaaaucagauuuugagaag

SEQ ID NO: 18142 - RNA, 22 nt, Artificial Sequence
  Synthetic
guugaaaucagauuuugagaag

SEQ ID NO: 18143 - RNA, 24 nt, Artificial Sequence
  Synthetic
gcauuuaaauuuaaaacauagaag

SEQ ID NO: 18144 - RNA, 18 nt, Artificial Sequence
  Synthetic
gaaaauuaacacuagaag

SEQ ID NO: 18145 - RNA, 20 nt, Artificial Sequence
  Synthetic
gagaaaauuaacacuagaag

SEQ ID NO: 18146 - RNA, 21 nt, Artificial Sequence
  Synthetic
ggagaaaauuaacacuagaag

SEQ ID NO: 18147 - RNA, 22 nt, Artificial Sequence
  Synthetic
gggagaaaauuaacacuagaag

SEQ ID NO: 18148 - RNA, 24 nt, Artificial Sequence
  Synthetic
guuuauaccuacuuaguaacgaag

SEQ ID NO: 18149 - RNA, 21 nt, Artificial Sequence
  Synthetic
guuuucuuuugauacacgaag

SEQ ID NO: 18150 - RNA, 22 nt, Artificial Sequence
  Synthetic
gcauaauuuuauuuaaaggaag

SEQ ID NO: 18151 - RNA, 23 nt, Artificial Sequence
  Synthetic
ggcauaauuuuauuuaaaggaag

SEQ ID NO: 18152 - RNA, 21 nt, Artificial Sequence
  Synthetic
guccuacaggacagcaggaag

SEQ ID NO: 18153 - RNA, 22 nt, Artificial Sequence
  Synthetic
gguccuacaggacagcaggaag

SEQ ID NO: 18154 - RNA, 24 nt, Artificial Sequence
  Synthetic
gagguccuacaggacagcaggaag

SEQ ID NO: 18155 - RNA, 20 nt, Artificial Sequence
  Synthetic
guugcuagugauucaggaag

SEQ ID NO: 18156 - RNA, 21 nt, Artificial Sequence
  Synthetic
gguugcuagugauucaggaag

SEQ ID NO: 18157 - RNA, 22 nt, Artificial Sequence
  Synthetic
ggguugcuagugauucaggaag

SEQ ID NO: 18158 - RNA, 23 nt, Artificial Sequence
  Synthetic
gggguugcuagugauucaggaag

SEQ ID NO: 18159 - RNA, 20 nt, Artificial Sequence
  Synthetic
gaugauguuguuugaggaag

SEQ ID NO: 18160 - RNA, 22 nt, Artificial Sequence
  Synthetic
gcgaugauguuguuugaggaag

SEQ ID NO: 18161 - RNA, 24 nt, Artificial Sequence
  Synthetic
gagcgaugauguuguuugaggaag

SEQ ID NO: 18162 - RNA, 20 nt, Artificial Sequence
  Synthetic
gaacuuaacuuucagggaag

SEQ ID NO: 18163 - RNA, 21 nt, Artificial Sequence
  Synthetic
ggaacuuaacuuucagggaag

SEQ ID NO: 18164 - RNA, 23 nt, Artificial Sequence
  Synthetic
gaggaacuuaacuuucagggaag

SEQ ID NO: 18165 - RNA, 22 nt, Artificial Sequence
  Synthetic
gauauagcuaugugaggggaag

SEQ ID NO: 18166 - RNA, 21 nt, Artificial Sequence
  Synthetic
gaauucguugaggaugggaag

SEQ ID NO: 18167 - RNA, 19 nt, Artificial Sequence
  Synthetic
gccuuaucugacugggaag

SEQ ID NO: 18168 - RNA, 24 nt, Artificial Sequence
  Synthetic
guacacaaguauauuccugggaag

SEQ ID NO: 18169 - RNA, 22 nt, Artificial Sequence
  Synthetic
gauuuggugugugcucuggaag

SEQ ID NO: 18170 - RNA, 19 nt, Artificial Sequence
  Synthetic
gcagaauguucuguggaag

SEQ ID NO: 18171 - RNA, 18 nt, Artificial Sequence
  Synthetic
gcagaagauuuguggaag

SEQ ID NO: 18172 - RNA, 19 nt, Artificial Sequence
  Synthetic
ggcagaagauuuguggaag

SEQ ID NO: 18173 - RNA, 24 nt, Artificial Sequence
  Synthetic
gaaauggcagaagauuuguggaag

SEQ ID NO: 18174 - RNA, 21 nt, Artificial Sequence
  Synthetic
guuggagccccuugaaugaag

SEQ ID NO: 18175 - RNA, 22 nt, Artificial Sequence
  Synthetic
gguuggagccccuugaaugaag

SEQ ID NO: 18176 - RNA, 19 nt, Artificial Sequence
  Synthetic
gacuggagaagacaugaag

SEQ ID NO: 18177 - RNA, 22 nt, Artificial Sequence
  Synthetic
gaaaauacaaagaaauaugaag

SEQ ID NO: 18178 - RNA, 24 nt, Artificial Sequence
  Synthetic
gagaaaauacaaagaaauaugaag

SEQ ID NO: 18179 - RNA, 20 nt, Artificial Sequence
  Synthetic
gauguaaccauuagcugaag

SEQ ID NO: 18180 - RNA, 24 nt, Artificial Sequence
  Synthetic
guaagauguaaccauuagcugaag

SEQ ID NO: 18181 - RNA, 18 nt, Artificial Sequence
  Synthetic
gguccuugagggcugaag

SEQ ID NO: 18182 - RNA, 21 nt, Artificial Sequence
  Synthetic
gcugguccuugagggcugaag

SEQ ID NO: 18183 - RNA, 22 nt, Artificial Sequence
  Synthetic
ggcugguccuugagggcugaag

SEQ ID NO: 18184 - RNA, 22 nt, Artificial Sequence
  Synthetic
gauucuuaacgcuuuagugaag

SEQ ID NO: 18185 - RNA, 18 nt, Artificial Sequence
  Synthetic
ggucuacacguugugaag

SEQ ID NO: 18186 - RNA, 19 nt, Artificial Sequence
  Synthetic
gcgcuaucccuucuugaag

SEQ ID NO: 18187 - RNA, 21 nt, Artificial Sequence
  Synthetic
gacauuuguaugggguugaag

SEQ ID NO: 18188 - RNA, 22 nt, Artificial Sequence
  Synthetic
ggacauuuguaugggguugaag

SEQ ID NO: 18189 - RNA, 23 nt, Artificial Sequence
  Synthetic
gggacauuuguaugggguugaag

SEQ ID NO: 18190 - RNA, 24 nt, Artificial Sequence
  Synthetic
ggggacauuuguaugggguugaag

SEQ ID NO: 18191 - RNA, 22 nt, Artificial Sequence
  Synthetic
guuucuagagcaauuuuugaag

SEQ ID NO: 18192 - RNA, 18 nt, Artificial Sequence
  Synthetic
ggagacaguaaaaauaag

SEQ ID NO: 18193 - RNA, 21 nt, Artificial Sequence
  Synthetic
guuaaagaauuugaaaauaag

SEQ ID NO: 18194 - RNA, 19 nt, Artificial Sequence
  Synthetic
guagaggugcuaaaauaag

SEQ ID NO: 18195 - RNA, 21 nt, Artificial Sequence
  Synthetic
gaguagaggugcuaaaauaag

SEQ ID NO: 18196 - RNA, 22 nt, Artificial Sequence
  Synthetic
ggaguagaggugcuaaaauaag

SEQ ID NO: 18197 - RNA, 23 nt, Artificial Sequence
  Synthetic
gggaguagaggugcuaaaauaag

SEQ ID NO: 18198 - RNA, 24 nt, Artificial Sequence
  Synthetic
ggggaguagaggugcuaaaauaag

SEQ ID NO: 18199 - RNA, 18 nt, Artificial Sequence
  Synthetic
guucuaaguggaaauaag

SEQ ID NO: 18200 - RNA, 22 nt, Artificial Sequence
  Synthetic
gacaguucuaaguggaaauaag

SEQ ID NO: 18201 - RNA, 24 nt, Artificial Sequence
  Synthetic
gagacaguucuaaguggaaauaag

SEQ ID NO: 18202 - RNA, 18 nt, Artificial Sequence
  Synthetic
gaaagccugaggaauaag

SEQ ID NO: 18203 - RNA, 21 nt, Artificial Sequence
  Synthetic
gaagaaagccugaggaauaag

SEQ ID NO: 18204 - RNA, 23 nt, Artificial Sequence
  Synthetic
gagaagaaagccugaggaauaag

SEQ ID NO: 18205 - RNA, 19 nt, Artificial Sequence
  Synthetic
gaaaagccacuggaauaag

SEQ ID NO: 18206 - RNA, 23 nt, Artificial Sequence
  Synthetic
guaugaaaagccacuggaauaag

SEQ ID NO: 18207 - RNA, 24 nt, Artificial Sequence
  Synthetic
gguaugaaaagccacuggaauaag

SEQ ID NO: 18208 - RNA, 18 nt, Artificial Sequence
  Synthetic
gggcagggcaugaauaag

SEQ ID NO: 18209 - RNA, 20 nt, Artificial Sequence
  Synthetic
gagggcagggcaugaauaag

SEQ ID NO: 18210 - RNA, 20 nt, Artificial Sequence
  Synthetic
gucuagugcuuccuaauaag

SEQ ID NO: 18211 - RNA, 20 nt, Artificial Sequence
  Synthetic
gucuugccccgaaccauaag

SEQ ID NO: 18212 - RNA, 21 nt, Artificial Sequence
  Synthetic
ggucuugccccgaaccauaag

SEQ ID NO: 18213 - RNA, 23 nt, Artificial Sequence
  Synthetic
guggucuugccccgaaccauaag

SEQ ID NO: 18214 - RNA, 21 nt, Artificial Sequence
  Synthetic
gaaagaccaugaggucauaag

SEQ ID NO: 18215 - RNA, 24 nt, Artificial Sequence
  Synthetic
gacgaaagaccaugaggucauaag

SEQ ID NO: 18216 - RNA, 20 nt, Artificial Sequence
  Synthetic
gcaacaaaucacaagauaag

SEQ ID NO: 18217 - RNA, 18 nt, Artificial Sequence
  Synthetic
gauaaaauagaauauaag

SEQ ID NO: 18218 - RNA, 20 nt, Artificial Sequence
  Synthetic
gugauaaaauagaauauaag

SEQ ID NO: 18219 - RNA, 18 nt, Artificial Sequence
  Synthetic
guucugggaacauauaag

SEQ ID NO: 18220 - RNA, 23 nt, Artificial Sequence
  Synthetic
gaucaauuuagacaaucuauaag

SEQ ID NO: 18221 - RNA, 20 nt, Artificial Sequence
  Synthetic
gaauacaaaguuauuauaag

SEQ ID NO: 18222 - RNA, 21 nt, Artificial Sequence
  Synthetic
ggaauacaaaguuauuauaag

SEQ ID NO: 18223 - RNA, 18 nt, Artificial Sequence
  Synthetic
gggcuauuuuagacuaag

SEQ ID NO: 18224 - RNA, 21 nt, Artificial Sequence
  Synthetic
gaagggcuauuuuagacuaag

SEQ ID NO: 18225 - RNA, 22 nt, Artificial Sequence
  Synthetic
ggaagggcuauuuuagacuaag

SEQ ID NO: 18226 - RNA, 24 nt, Artificial Sequence
  Synthetic
guggaagggcuauuuuagacuaag

SEQ ID NO: 18227 - RNA, 24 nt, Artificial Sequence
  Synthetic
gucaacccaacauaucugacuaag

SEQ ID NO: 18228 - RNA, 20 nt, Artificial Sequence
  Synthetic
gcaaguugcaauguacuaag

SEQ ID NO: 18229 - RNA, 22 nt, Artificial Sequence
  Synthetic
gugcaaguugcaauguacuaag

SEQ ID NO: 18230 - RNA, 23 nt, Artificial Sequence
  Synthetic
ggugcaaguugcaauguacuaag

SEQ ID NO: 18231 - RNA, 22 nt, Artificial Sequence
  Synthetic
guccccgagugacuaagcuaag

SEQ ID NO: 18232 - RNA, 23 nt, Artificial Sequence
  Synthetic
gguccccgagugacuaagcuaag

SEQ ID NO: 18233 - RNA, 18 nt, Artificial Sequence
  Synthetic
ggcuacucuuacgcuaag

SEQ ID NO: 18234 - RNA, 19 nt, Artificial Sequence
  Synthetic
gggcuacucuuacgcuaag

SEQ ID NO: 18235 - RNA, 22 nt, Artificial Sequence
  Synthetic
gucgggcuacucuuacgcuaag

SEQ ID NO: 18236 - RNA, 22 nt, Artificial Sequence
  Synthetic
guaccucuggaucuuuucuaag

SEQ ID NO: 18237 - RNA, 19 nt, Artificial Sequence
  Synthetic
gcaaucuguguuuucuaag

SEQ ID NO: 18238 - RNA, 20 nt, Artificial Sequence
  Synthetic
ggcaaucuguguuuucuaag

SEQ ID NO: 18239 - RNA, 22 nt, Artificial Sequence
  Synthetic
gaggcaaucuguguuuucuaag

SEQ ID NO: 18240 - RNA, 23 nt, Artificial Sequence
  Synthetic
ggaggcaaucuguguuuucuaag

SEQ ID NO: 18241 - RNA, 23 nt, Artificial Sequence
  Synthetic
guuucugcucagaaagaaguaag

SEQ ID NO: 18242 - RNA, 18 nt, Artificial Sequence
  Synthetic
guuucauguuucaguaag

SEQ ID NO: 18243 - RNA, 21 nt, Artificial Sequence
  Synthetic
guaguuucauguuucaguaag

SEQ ID NO: 18244 - RNA, 20 nt, Artificial Sequence
  Synthetic
gaauacuaaaaccuaguaag

SEQ ID NO: 18245 - RNA, 21 nt, Artificial Sequence
  Synthetic
ggaauacuaaaaccuaguaag

SEQ ID NO: 18246 - RNA, 22 nt, Artificial Sequence
  Synthetic
gggaauacuaaaaccuaguaag

SEQ ID NO: 18247 - RNA, 23 nt, Artificial Sequence
  Synthetic
ggggaauacuaaaaccuaguaag

SEQ ID NO: 18248 - RNA, 18 nt, Artificial Sequence
  Synthetic
gaaguauugggacguaag

SEQ ID NO: 18249 - RNA, 19 nt, Artificial Sequence
  Synthetic
ggaaguauugggacguaag

SEQ ID NO: 18250 - RNA, 22 nt, Artificial Sequence
  Synthetic
gauggaaguauugggacguaag

SEQ ID NO: 18251 - RNA, 18 nt, Artificial Sequence
  Synthetic
gucagaauuuuagguaag

SEQ ID NO: 18252 - RNA, 19 nt, Artificial Sequence
  Synthetic
ggucagaauuuuagguaag

SEQ ID NO: 18253 - RNA, 20 nt, Artificial Sequence
  Synthetic
gggucagaauuuuagguaag

SEQ ID NO: 18254 - RNA, 21 nt, Artificial Sequence
  Synthetic
ggggucagaauuuuagguaag

SEQ ID NO: 18255 - RNA, 22 nt, Artificial Sequence
  Synthetic
gggggucagaauuuuagguaag

SEQ ID NO: 18256 - RNA, 24 nt, Artificial Sequence
  Synthetic
gugggggucagaauuuuagguaag

SEQ ID NO: 18257 - RNA, 19 nt, Artificial Sequence
  Synthetic
gcaauauuugugggguaag

SEQ ID NO: 18258 - RNA, 20 nt, Artificial Sequence
  Synthetic
guuugguagaaaaguguaag

SEQ ID NO: 18259 - RNA, 24 nt, Artificial Sequence
  Synthetic
guauguuugguagaaaaguguaag

SEQ ID NO: 18260 - RNA, 24 nt, Artificial Sequence
  Synthetic
gauauccaucuuagaacaauuaag

SEQ ID NO: 18261 - RNA, 19 nt, Artificial Sequence
  Synthetic
guaauuuuugagaauuaag

SEQ ID NO: 18262 - RNA, 20 nt, Artificial Sequence
  Synthetic
gguaauuuuugagaauuaag

SEQ ID NO: 18263 - RNA, 24 nt, Artificial Sequence
  Synthetic
gcaugguaauuuuugagaauuaag

SEQ ID NO: 18264 - RNA, 23 nt, Artificial Sequence
  Synthetic
gaaaacucaaaagggacauuaag

SEQ ID NO: 18265 - RNA, 23 nt, Artificial Sequence
  Synthetic
guuuuagaaauaaacauauuaag

SEQ ID NO: 18266 - RNA, 24 nt, Artificial Sequence
  Synthetic
gaauuuauugauaacaguauuaag

SEQ ID NO: 18267 - RNA, 20 nt, Artificial Sequence
  Synthetic
gaacugguggucaucuuaag

SEQ ID NO: 18268 - RNA, 21 nt, Artificial Sequence
  Synthetic
ggaacugguggucaucuuaag

SEQ ID NO: 18269 - RNA, 24 nt, Artificial Sequence
  Synthetic
gauggaacugguggucaucuuaag

SEQ ID NO: 18270 - RNA, 18 nt, Artificial Sequence
  Synthetic
gagguaauagcaguuaag

SEQ ID NO: 18271 - RNA, 20 nt, Artificial Sequence
  Synthetic
gacauuacauuucaguuaag

SEQ ID NO: 18272 - RNA, 19 nt, Artificial Sequence
  Synthetic
gaagacuacuguuguuaag

SEQ ID NO: 18273 - RNA, 21 nt, Artificial Sequence
  Synthetic
guucauugauaggcauuuaag

SEQ ID NO: 18274 - RNA, 18 nt, Artificial Sequence
  Synthetic
ggaaacacuaacuuuaag

SEQ ID NO: 18275 - RNA, 18 nt, Artificial Sequence
  Synthetic
guugcacaguauuuuaag

SEQ ID NO: 18276 - RNA, 23 nt, Artificial Sequence
  Synthetic
guuuaguugcacaguauuuuaag

SEQ ID NO: 18277 - RNA, 20 nt, Artificial Sequence
  Synthetic
gucugccugguacuuuuaag

SEQ ID NO: 18278 - RNA, 18 nt, Artificial Sequence
  Synthetic
gacugugacucuuuuaag

SEQ ID NO: 18279 - RNA, 19 nt, Artificial Sequence
  Synthetic
ggacugugacucuuuuaag

SEQ ID NO: 18280 - RNA, 20 nt, Artificial Sequence
  Synthetic
gggacugugacucuuuuaag

SEQ ID NO: 18281 - RNA, 19 nt, Artificial Sequence
  Synthetic
guuggugguuugaaaacag

SEQ ID NO: 18282 - RNA, 22 nt, Artificial Sequence
  Synthetic
gcuguuggugguuugaaaacag

SEQ ID NO: 18283 - RNA, 21 nt, Artificial Sequence
  Synthetic
guuuuuuucacccuaaaacag

SEQ ID NO: 18284 - RNA, 22 nt, Artificial Sequence
  Synthetic
gguuuuuuucacccuaaaacag

SEQ ID NO: 18285 - RNA, 18 nt, Artificial Sequence
  Synthetic
gagaauauggagaaacag

SEQ ID NO: 18286 - RNA, 18 nt, Artificial Sequence
  Synthetic
ggaaaucccaaacaacag

SEQ ID NO: 18287 - RNA, 18 nt, Artificial Sequence
  Synthetic
gaaacuuaccaacaacag

SEQ ID NO: 18288 - RNA, 23 nt, Artificial Sequence
  Synthetic
gaacugaaacuuaccaacaacag

SEQ ID NO: 18289 - RNA, 24 nt, Artificial Sequence
  Synthetic
ggaacugaaacuuaccaacaacag

SEQ ID NO: 18290 - RNA, 21 nt, Artificial Sequence
  Synthetic
gucuguuuuuauccacaacag

SEQ ID NO: 18291 - RNA, 19 nt, Artificial Sequence
  Synthetic
gaaaaauauucaccaacag

SEQ ID NO: 18292 - RNA, 22 nt, Artificial Sequence
  Synthetic
gcagaaaaauauucaccaacag

SEQ ID NO: 18293 - RNA, 19 nt, Artificial Sequence
  Synthetic
gcccaagccccgccaacag

SEQ ID NO: 18294 - RNA, 22 nt, Artificial Sequence
  Synthetic
gaagcccaagccccgccaacag

SEQ ID NO: 18295 - RNA, 20 nt, Artificial Sequence
  Synthetic
gaugguaccgggaugaacag

SEQ ID NO: 18296 - RNA, 19 nt, Artificial Sequence
  Synthetic
gacauuagcuguugaacag

SEQ ID NO: 18297 - RNA, 22 nt, Artificial Sequence
  Synthetic
gcaaguguucaauaaauaacag

SEQ ID NO: 18298 - RNA, 20 nt, Artificial Sequence
  Synthetic
guucugagugcaucuaacag

SEQ ID NO: 18299 - RNA, 21 nt, Artificial Sequence
  Synthetic
gguucugagugcaucuaacag

SEQ ID NO: 18300 - RNA, 23 nt, Artificial Sequence
  Synthetic
gagguucugagugcaucuaacag

SEQ ID NO: 18301 - RNA, 18 nt, Artificial Sequence
  Synthetic
gcuucaacauucuaacag

SEQ ID NO: 18302 - RNA, 22 nt, Artificial Sequence
  Synthetic
gacugcuucaacauucuaacag

SEQ ID NO: 18303 - RNA, 20 nt, Artificial Sequence
  Synthetic
guaacgcagcuaguuaacag

SEQ ID NO: 18304 - RNA, 24 nt, Artificial Sequence
  Synthetic
gaaauaaaaagugcaagaacacag

SEQ ID NO: 18305 - RNA, 18 nt, Artificial Sequence
  Synthetic
gaaaagugauuaacacag

SEQ ID NO: 18306 - RNA, 24 nt, Artificial Sequence
  Synthetic
gauaaagaaaagugauuaacacag

SEQ ID NO: 18307 - RNA, 22 nt, Artificial Sequence
  Synthetic
gauacuaaauaccaacacacag

SEQ ID NO: 18308 - RNA, 20 nt, Artificial Sequence
  Synthetic
gcacugcugggaacacacag

SEQ ID NO: 18309 - RNA, 21 nt, Artificial Sequence
  Synthetic
ggcacugcugggaacacacag

SEQ ID NO: 18310 - RNA, 20 nt, Artificial Sequence
  Synthetic
gucuuaacuagagcacacag

SEQ ID NO: 18311 - RNA, 18 nt, Artificial Sequence
  Synthetic
gauaugccaggcacacag

SEQ ID NO: 18312 - RNA, 20 nt, Artificial Sequence
  Synthetic
gagauaugccaggcacacag

SEQ ID NO: 18313 - RNA, 19 nt, Artificial Sequence
  Synthetic
guaucugcuuugcacacag

SEQ ID NO: 18314 - RNA, 22 nt, Artificial Sequence
  Synthetic
gcaguaucugcuuugcacacag

SEQ ID NO: 18315 - RNA, 18 nt, Artificial Sequence
  Synthetic
gcacacagucuuccacag

SEQ ID NO: 18316 - RNA, 20 nt, Artificial Sequence
  Synthetic
gagcacacagucuuccacag

SEQ ID NO: 18317 - RNA, 23 nt, Artificial Sequence
  Synthetic
gcugagcacacagucuuccacag

SEQ ID NO: 18318 - RNA, 18 nt, Artificial Sequence
  Synthetic
gugcaugaaugagcacag

SEQ ID NO: 18319 - RNA, 20 nt, Artificial Sequence
  Synthetic
gagugcaugaaugagcacag

SEQ ID NO: 18320 - RNA, 20 nt, Artificial Sequence
  Synthetic
gcagagauuucccaucacag

SEQ ID NO: 18321 - RNA, 23 nt, Artificial Sequence
  Synthetic
guuccucaucugagagaucacag

SEQ ID NO: 18322 - RNA, 21 nt, Artificial Sequence
  Synthetic
gaaucauuuaacuguucacag

SEQ ID NO: 18323 - RNA, 23 nt, Artificial Sequence
  Synthetic
gagaaucauuuaacuguucacag

SEQ ID NO: 18324 - RNA, 24 nt, Artificial Sequence
  Synthetic
ggagaaucauuuaacuguucacag

SEQ ID NO: 18325 - RNA, 19 nt, Artificial Sequence
  Synthetic
gugcuagauaguuucacag

SEQ ID NO: 18326 - RNA, 24 nt, Artificial Sequence
  Synthetic
guaaagugcuagauaguuucacag

SEQ ID NO: 18327 - RNA, 20 nt, Artificial Sequence
  Synthetic
guugggucaggaaaagacag

SEQ ID NO: 18328 - RNA, 18 nt, Artificial Sequence
  Synthetic
guuuugagcagcagacag

SEQ ID NO: 18329 - RNA, 21 nt, Artificial Sequence
  Synthetic
guaguuuugagcagcagacag

SEQ ID NO: 18330 - RNA, 22 nt, Artificial Sequence
  Synthetic
gguaguuuugagcagcagacag

SEQ ID NO: 18331 - RNA, 18 nt, Artificial Sequence
  Synthetic
gaguaauggguaggacag

SEQ ID NO: 18332 - RNA, 21 nt, Artificial Sequence
  Synthetic
guagaguaauggguaggacag

SEQ ID NO: 18333 - RNA, 19 nt, Artificial Sequence
  Synthetic
gacuuauugguuuggacag

SEQ ID NO: 18334 - RNA, 18 nt, Artificial Sequence
  Synthetic
guagaagucagaauacag

SEQ ID NO: 18335 - RNA, 20 nt, Artificial Sequence
  Synthetic
guguagaagucagaauacag

SEQ ID NO: 18336 - RNA, 21 nt, Artificial Sequence
  Synthetic
gacacacaucagcacauacag

SEQ ID NO: 18337 - RNA, 24 nt, Artificial Sequence
  Synthetic
gauaauuuguuauacuacauacag

SEQ ID NO: 18338 - RNA, 22 nt, Artificial Sequence
  Synthetic
gacaauuuagaggcugauacag

SEQ ID NO: 18339 - RNA, 24 nt, Artificial Sequence
  Synthetic
gugacaauuuagaggcugauacag

SEQ ID NO: 18340 - RNA, 19 nt, Artificial Sequence
  Synthetic
gcaucuuucagugauacag

SEQ ID NO: 18341 - RNA, 22 nt, Artificial Sequence
  Synthetic
gcagcaucuuucagugauacag

SEQ ID NO: 18342 - RNA, 23 nt, Artificial Sequence
  Synthetic
ggcagcaucuuucagugauacag

SEQ ID NO: 18343 - RNA, 24 nt, Artificial Sequence
  Synthetic
guccuaggauauguguauauacag

SEQ ID NO: 18344 - RNA, 18 nt, Artificial Sequence
  Synthetic
guuagaaaagcacuacag

SEQ ID NO: 18345 - RNA, 18 nt, Artificial Sequence
  Synthetic
gaacucugacaaguacag

SEQ ID NO: 18346 - RNA, 23 nt, Artificial Sequence
  Synthetic
gcuaugaacucugacaaguacag

SEQ ID NO: 18347 - RNA, 20 nt, Artificial Sequence
  Synthetic
guaagcagaagcaaguacag

SEQ ID NO: 18348 - RNA, 20 nt, Artificial Sequence
  Synthetic
guaucuucacaagaguacag

SEQ ID NO: 18349 - RNA, 22 nt, Artificial Sequence
  Synthetic
gucuauaucuaaucagguacag

SEQ ID NO: 18350 - RNA, 23 nt, Artificial Sequence
  Synthetic
ggucuauaucuaaucagguacag

SEQ ID NO: 18351 - RNA, 19 nt, Artificial Sequence
  Synthetic
gaguguccuucuaaaccag

SEQ ID NO: 18352 - RNA, 22 nt, Artificial Sequence
  Synthetic
gucacauuuggugaagcaccag

SEQ ID NO: 18353 - RNA, 24 nt, Artificial Sequence
  Synthetic
gugucacauuuggugaagcaccag

SEQ ID NO: 18354 - RNA, 19 nt, Artificial Sequence
  Synthetic
gugugacuccaggcaccag

SEQ ID NO: 18355 - RNA, 21 nt, Artificial Sequence
  Synthetic
gcgugugacuccaggcaccag

SEQ ID NO: 18356 - RNA, 22 nt, Artificial Sequence
  Synthetic
ggcgugugacuccaggcaccag

SEQ ID NO: 18357 - RNA, 18 nt, Artificial Sequence
  Synthetic
ggaagaaaacaauaccag

SEQ ID NO: 18358 - RNA, 20 nt, Artificial Sequence
  Synthetic
guggaagaaaacaauaccag

SEQ ID NO: 18359 - RNA, 24 nt, Artificial Sequence
  Synthetic
gaauguggaagaaaacaauaccag

SEQ ID NO: 18360 - RNA, 18 nt, Artificial Sequence
  Synthetic
guagguagcucauaccag

SEQ ID NO: 18361 - RNA, 21 nt, Artificial Sequence
  Synthetic
guuguagguagcucauaccag

SEQ ID NO: 18362 - RNA, 18 nt, Artificial Sequence
  Synthetic
ggggaugaaguaacccag

SEQ ID NO: 18363 - RNA, 23 nt, Artificial Sequence
  Synthetic
guuuuggggaugaaguaacccag

SEQ ID NO: 18364 - RNA, 24 nt, Artificial Sequence
  Synthetic
gguuuuggggaugaaguaacccag

SEQ ID NO: 18365 - RNA, 19 nt, Artificial Sequence
  Synthetic
gcuucccggccaagcccag

SEQ ID NO: 18366 - RNA, 21 nt, Artificial Sequence
  Synthetic
gagcuucccggccaagcccag

SEQ ID NO: 18367 - RNA, 24 nt, Artificial Sequence
  Synthetic
gcagagcuucccggccaagcccag

SEQ ID NO: 18368 - RNA, 20 nt, Artificial Sequence
  Synthetic
guugcauccuccgugcccag

SEQ ID NO: 18369 - RNA, 21 nt, Artificial Sequence
  Synthetic
gguugcauccuccgugcccag

SEQ ID NO: 18370 - RNA, 22 nt, Artificial Sequence
  Synthetic
gccuugcuuugccuaaucccag

SEQ ID NO: 18371 - RNA, 24 nt, Artificial Sequence
  Synthetic
gcgccuugcuuugccuaaucccag

SEQ ID NO: 18372 - RNA, 21 nt, Artificial Sequence
  Synthetic
gcuaggccaugauggucccag

SEQ ID NO: 18373 - RNA, 22 nt, Artificial Sequence
  Synthetic
gaucuguccuugauugucccag

SEQ ID NO: 18374 - RNA, 20 nt, Artificial Sequence
  Synthetic
guuuccuuccuuguucccag

SEQ ID NO: 18375 - RNA, 22 nt, Artificial Sequence
  Synthetic
guguuuccuuccuuguucccag

SEQ ID NO: 18376 - RNA, 18 nt, Artificial Sequence
  Synthetic
guugacgguauuucccag

SEQ ID NO: 18377 - RNA, 21 nt, Artificial Sequence
  Synthetic
gauguugacgguauuucccag

SEQ ID NO: 18378 - RNA, 22 nt, Artificial Sequence
  Synthetic
ggauguugacgguauuucccag

SEQ ID NO: 18379 - RNA, 23 nt, Artificial Sequence
  Synthetic
gaaggagacagguagacagccag

SEQ ID NO: 18380 - RNA, 24 nt, Artificial Sequence
  Synthetic
ggaaggagacagguagacagccag

SEQ ID NO: 18381 - RNA, 23 nt, Artificial Sequence
  Synthetic
gcuauacgauaauuuauagccag

SEQ ID NO: 18382 - RNA, 20 nt, Artificial Sequence
  Synthetic
gcuaaaaaaaucuuagccag

SEQ ID NO: 18383 - RNA, 22 nt, Artificial Sequence
  Synthetic
gaaaccaauguacggaggccag

SEQ ID NO: 18384 - RNA, 19 nt, Artificial Sequence
  Synthetic
gacugcaacuuuaggccag

SEQ ID NO: 18385 - RNA, 18 nt, Artificial Sequence
  Synthetic
gcacauuuuaaaugccag

SEQ ID NO: 18386 - RNA, 20 nt, Artificial Sequence
  Synthetic
gauggugaaucaggauccag

SEQ ID NO: 18387 - RNA, 23 nt, Artificial Sequence
  Synthetic
gcugauggugaaucaggauccag

SEQ ID NO: 18388 - RNA, 19 nt, Artificial Sequence
  Synthetic
gaccuuagagacccuccag

SEQ ID NO: 18389 - RNA, 21 nt, Artificial Sequence
  Synthetic
gagaccuuagagacccuccag

SEQ ID NO: 18390 - RNA, 23 nt, Artificial Sequence
  Synthetic
gugagaccuuagagacccuccag

SEQ ID NO: 18391 - RNA, 20 nt, Artificial Sequence
  Synthetic
gacuugcgauugauguccag

SEQ ID NO: 18392 - RNA, 19 nt, Artificial Sequence
  Synthetic
gaccaucauuaccuuccag

SEQ ID NO: 18393 - RNA, 22 nt, Artificial Sequence
  Synthetic
gcugaccaucauuaccuuccag

SEQ ID NO: 18394 - RNA, 24 nt, Artificial Sequence
  Synthetic
gagcugaccaucauuaccuuccag

SEQ ID NO: 18395 - RNA, 22 nt, Artificial Sequence
  Synthetic
guauagaagcuguacuuuccag

SEQ ID NO: 18396 - RNA, 19 nt, Artificial Sequence
  Synthetic
gcaacaccuuuaaaagcag

SEQ ID NO: 18397 - RNA, 24 nt, Artificial Sequence
  Synthetic
gccacgcaacaccuuuaaaagcag

SEQ ID NO: 18398 - RNA, 24 nt, Artificial Sequence
  Synthetic
gacauuaacaucgaaagaaagcag

SEQ ID NO: 18399 - RNA, 18 nt, Artificial Sequence
  Synthetic
gacuaaugcuagaagcag

SEQ ID NO: 18400 - RNA, 19 nt, Artificial Sequence
  Synthetic
ggacuaaugcuagaagcag

SEQ ID NO: 18401 - RNA, 24 nt, Artificial Sequence
  Synthetic
gauauggacuaaugcuagaagcag

SEQ ID NO: 18402 - RNA, 20 nt, Artificial Sequence
  Synthetic
guugauaucaggugaagcag

SEQ ID NO: 18403 - RNA, 21 nt, Artificial Sequence
  Synthetic
gguugauaucaggugaagcag

SEQ ID NO: 18404 - RNA, 19 nt, Artificial Sequence
  Synthetic
guuuaauuccuuuaagcag

SEQ ID NO: 18405 - RNA, 21 nt, Artificial Sequence
  Synthetic
gcauaggagaguuuucagcag

SEQ ID NO: 18406 - RNA, 24 nt, Artificial Sequence
  Synthetic
gaagcauaggagaguuuucagcag

SEQ ID NO: 18407 - RNA, 22 nt, Artificial Sequence
  Synthetic
gauucccugaaugagggagcag

SEQ ID NO: 18408 - RNA, 23 nt, Artificial Sequence
  Synthetic
ggauucccugaaugagggagcag

SEQ ID NO: 18409 - RNA, 19 nt, Artificial Sequence
  Synthetic
gaaagacggaagcuagcag

SEQ ID NO: 18410 - RNA, 21 nt, Artificial Sequence
  Synthetic
gugaaagacggaagcuagcag

SEQ ID NO: 18411 - RNA, 23 nt, Artificial Sequence
  Synthetic
gagugaaagacggaagcuagcag

SEQ ID NO: 18412 - RNA, 22 nt, Artificial Sequence
  Synthetic
gaaaaguaacacaaauacgcag

SEQ ID NO: 18413 - RNA, 19 nt, Artificial Sequence
  Synthetic
gccauacagaaaaaggcag

SEQ ID NO: 18414 - RNA, 20 nt, Artificial Sequence
  Synthetic
ggccauacagaaaaaggcag

SEQ ID NO: 18415 - RNA, 22 nt, Artificial Sequence
  Synthetic
gauaaaaaggaaaaggaggcag

SEQ ID NO: 18416 - RNA, 18 nt, Artificial Sequence
  Synthetic
gaucauaaaggagggcag

SEQ ID NO: 18417 - RNA, 19 nt, Artificial Sequence
  Synthetic
ggaucauaaaggagggcag

SEQ ID NO: 18418 - RNA, 21 nt, Artificial Sequence
  Synthetic
gaggagucggggagggggcag

SEQ ID NO: 18419 - RNA, 22 nt, Artificial Sequence
  Synthetic
ggaggagucggggagggggcag

SEQ ID NO: 18420 - RNA, 24 nt, Artificial Sequence
  Synthetic
guggaggagucggggagggggcag

SEQ ID NO: 18421 - RNA, 19 nt, Artificial Sequence
  Synthetic
gaaucuauacaaauggcag

SEQ ID NO: 18422 - RNA, 23 nt, Artificial Sequence
  Synthetic
gcuugaaucuauacaaauggcag

SEQ ID NO: 18423 - RNA, 24 nt, Artificial Sequence
  Synthetic
ggcuugaaucuauacaaauggcag

SEQ ID NO: 18424 - RNA, 19 nt, Artificial Sequence
  Synthetic
gccaucagugaaaaugcag

SEQ ID NO: 18425 - RNA, 21 nt, Artificial Sequence
  Synthetic
gugccaucagugaaaaugcag

SEQ ID NO: 18426 - RNA, 18 nt, Artificial Sequence
  Synthetic
gugcgggaagagaugcag

SEQ ID NO: 18427 - RNA, 18 nt, Artificial Sequence
  Synthetic
gcagaaacagcuaugcag

SEQ ID NO: 18428 - RNA, 24 nt, Artificial Sequence
  Synthetic
gccaauuuaucccucagcgugcag

SEQ ID NO: 18429 - RNA, 18 nt, Artificial Sequence
  Synthetic
guaguugcuggcuugcag

SEQ ID NO: 18430 - RNA, 23 nt, Artificial Sequence
  Synthetic
gaaauguaguugcuggcuugcag

SEQ ID NO: 18431 - RNA, 24 nt, Artificial Sequence
  Synthetic
ggaaauguaguugcuggcuugcag

SEQ ID NO: 18432 - RNA, 18 nt, Artificial Sequence
  Synthetic
ggggccaaaaaguugcag

SEQ ID NO: 18433 - RNA, 22 nt, Artificial Sequence
  Synthetic
gauaggggccaaaaaguugcag

SEQ ID NO: 18434 - RNA, 23 nt, Artificial Sequence
  Synthetic
ggauaggggccaaaaaguugcag

SEQ ID NO: 18435 - RNA, 20 nt, Artificial Sequence
  Synthetic
gauccaguacaacuuugcag

SEQ ID NO: 18436 - RNA, 18 nt, Artificial Sequence
  Synthetic
gugugccuguguuugcag

SEQ ID NO: 18437 - RNA, 23 nt, Artificial Sequence
  Synthetic
gacaugugugccuguguuugcag

SEQ ID NO: 18438 - RNA, 21 nt, Artificial Sequence
  Synthetic
gguauuuuuaauuaaaaucag

SEQ ID NO: 18439 - RNA, 19 nt, Artificial Sequence
  Synthetic
gaagaaacguauaaaucag

SEQ ID NO: 18440 - RNA, 20 nt, Artificial Sequence
  Synthetic
ggaagaaacguauaaaucag

SEQ ID NO: 18441 - RNA, 22 nt, Artificial Sequence
  Synthetic
gaggaagaaacguauaaaucag

SEQ ID NO: 18442 - RNA, 18 nt, Artificial Sequence
  Synthetic
gugguuaggaagaaucag

SEQ ID NO: 18443 - RNA, 22 nt, Artificial Sequence
  Synthetic
gcucgugguuaggaagaaucag

SEQ ID NO: 18444 - RNA, 22 nt, Artificial Sequence
  Synthetic
gcuucagugagggaggaaucag

SEQ ID NO: 18445 - RNA, 22 nt, Artificial Sequence
  Synthetic
gcuuaauagugcuaguaaucag

SEQ ID NO: 18446 - RNA, 24 nt, Artificial Sequence
  Synthetic
guuccuaacucauucaaagaucag

SEQ ID NO: 18447 - RNA, 20 nt, Artificial Sequence
  Synthetic
gaaaaugaaaguaauaucag

SEQ ID NO: 18448 - RNA, 18 nt, Artificial Sequence
  Synthetic
guuaauaccacauaucag

SEQ ID NO: 18449 - RNA, 23 nt, Artificial Sequence
  Synthetic
gaucuguuaauaccacauaucag

SEQ ID NO: 18450 - RNA, 18 nt, Artificial Sequence
  Synthetic
guuccuaugaacuaucag

SEQ ID NO: 18451 - RNA, 22 nt, Artificial Sequence
  Synthetic
gaaaguuccuaugaacuaucag

SEQ ID NO: 18452 - RNA, 21 nt, Artificial Sequence
  Synthetic
gcauuguggaggcuuuaucag

SEQ ID NO: 18453 - RNA, 24 nt, Artificial Sequence
  Synthetic
guuauucucaaaauguuuccucag

SEQ ID NO: 18454 - RNA, 19 nt, Artificial Sequence
  Synthetic
guuuaggaaaacagcucag

SEQ ID NO: 18455 - RNA, 22 nt, Artificial Sequence
  Synthetic
gaaguuuaggaaaacagcucag

SEQ ID NO: 18456 - RNA, 23 nt, Artificial Sequence
  Synthetic
ggaaguuuaggaaaacagcucag

SEQ ID NO: 18457 - RNA, 19 nt, Artificial Sequence
  Synthetic
gaugaggugaugagcucag

SEQ ID NO: 18458 - RNA, 21 nt, Artificial Sequence
  Synthetic
guuuaaauguaaauagcucag

SEQ ID NO: 18459 - RNA, 20 nt, Artificial Sequence
  Synthetic
guuguucuggacaugcucag

SEQ ID NO: 18460 - RNA, 21 nt, Artificial Sequence
  Synthetic
guauugcagguaggcucucag

SEQ ID NO: 18461 - RNA, 23 nt, Artificial Sequence
  Synthetic
gaauucuauaaugaguuucucag

SEQ ID NO: 18462 - RNA, 18 nt, Artificial Sequence
  Synthetic
gccacuuguauaagucag

SEQ ID NO: 18463 - RNA, 24 nt, Artificial Sequence
  Synthetic
guuauugccacuuguauaagucag

SEQ ID NO: 18464 - RNA, 18 nt, Artificial Sequence
  Synthetic
ggccaauuugacagucag

SEQ ID NO: 18465 - RNA, 20 nt, Artificial Sequence
  Synthetic
gaggccaauuugacagucag

SEQ ID NO: 18466 - RNA, 19 nt, Artificial Sequence
  Synthetic
gaaauacuuagcgagucag

SEQ ID NO: 18467 - RNA, 22 nt, Artificial Sequence
  Synthetic
gaagaaauacuuagcgagucag

SEQ ID NO: 18468 - RNA, 23 nt, Artificial Sequence
  Synthetic
gaauaugcacagcgucuagucag

SEQ ID NO: 18469 - RNA, 20 nt, Artificial Sequence
  Synthetic
gcucagagccacaaggucag

SEQ ID NO: 18470 - RNA, 19 nt, Artificial Sequence
  Synthetic
gcauaaauuacaaggucag

SEQ ID NO: 18471 - RNA, 24 nt, Artificial Sequence
  Synthetic
gacaagcauaaauuacaaggucag

SEQ ID NO: 18472 - RNA, 24 nt, Artificial Sequence
  Synthetic
gauaacaagauuuugaaaauucag

SEQ ID NO: 18473 - RNA, 24 nt, Artificial Sequence
  Synthetic
gcucacaaauguguugggauucag

SEQ ID NO: 18474 - RNA, 18 nt, Artificial Sequence
  Synthetic
gguguuuuauggauucag

SEQ ID NO: 18475 - RNA, 22 nt, Artificial Sequence
  Synthetic
gaaagguguuuuauggauucag

SEQ ID NO: 18476 - RNA, 22 nt, Artificial Sequence
  Synthetic
gaauucucuugucccuauucag

SEQ ID NO: 18477 - RNA, 19 nt, Artificial Sequence
  Synthetic
gaacccaguuucuauucag

SEQ ID NO: 18478 - RNA, 19 nt, Artificial Sequence
  Synthetic
guaauuugagaaacuucag

SEQ ID NO: 18479 - RNA, 18 nt, Artificial Sequence
  Synthetic
gaaaacagaacacuucag

SEQ ID NO: 18480 - RNA, 19 nt, Artificial Sequence
  Synthetic
ggaaaacagaacacuucag

SEQ ID NO: 18481 - RNA, 23 nt, Artificial Sequence
  Synthetic
gaaaacauacacaacaccuucag

SEQ ID NO: 18482 - RNA, 18 nt, Artificial Sequence
  Synthetic
gcuccccaaaugcuucag

SEQ ID NO: 18483 - RNA, 20 nt, Artificial Sequence
  Synthetic
gcaauguuccagauguucag

SEQ ID NO: 18484 - RNA, 24 nt, Artificial Sequence
  Synthetic
gaaugcaauguuccagauguucag

SEQ ID NO: 18485 - RNA, 19 nt, Artificial Sequence
  Synthetic
gaugauaugaaguguucag

SEQ ID NO: 18486 - RNA, 21 nt, Artificial Sequence
  Synthetic
gaaaaacacaacauuguucag

SEQ ID NO: 18487 - RNA, 22 nt, Artificial Sequence
  Synthetic
ggaaaaacacaacauuguucag

SEQ ID NO: 18488 - RNA, 22 nt, Artificial Sequence
  Synthetic
gaacaucuuuuagauuuuucag

SEQ ID NO: 18489 - RNA, 24 nt, Artificial Sequence
  Synthetic
gccuaccucauucagcuuuuucag

SEQ ID NO: 18490 - RNA, 21 nt, Artificial Sequence
  Synthetic
guuauguguaaugaaaaagag

SEQ ID NO: 18491 - RNA, 22 nt, Artificial Sequence
  Synthetic
guccugaauuguaguaaaagag

SEQ ID NO: 18492 - RNA, 21 nt, Artificial Sequence
  Synthetic
gaacaacuauccuccaaagag

SEQ ID NO: 18493 - RNA, 19 nt, Artificial Sequence
  Synthetic
guucaaacaagagaaagag

SEQ ID NO: 18494 - RNA, 22 nt, Artificial Sequence
  Synthetic
guaguucaaacaagagaaagag

SEQ ID NO: 18495 - RNA, 23 nt, Artificial Sequence
  Synthetic
gguaguucaaacaagagaaagag

SEQ ID NO: 18496 - RNA, 24 nt, Artificial Sequence
  Synthetic
gauucccuuucuagaaauaaagag

SEQ ID NO: 18497 - RNA, 23 nt, Artificial Sequence
  Synthetic
guauucuaagccauaauaaagag

SEQ ID NO: 18498 - RNA, 22 nt, Artificial Sequence
  Synthetic
gagaaggaucaggacccaagag

SEQ ID NO: 18499 - RNA, 18 nt, Artificial Sequence
  Synthetic
ggaagaacuucccaagag

SEQ ID NO: 18500 - RNA, 19 nt, Artificial Sequence
  Synthetic
gggaagaacuucccaagag

SEQ ID NO: 18501 - RNA, 20 nt, Artificial Sequence
  Synthetic
ggggaagaacuucccaagag

SEQ ID NO: 18502 - RNA, 21 nt, Artificial Sequence
  Synthetic
gggggaagaacuucccaagag

SEQ ID NO: 18503 - RNA, 23 nt, Artificial Sequence
  Synthetic
gagggggaagaacuucccaagag

SEQ ID NO: 18504 - RNA, 19 nt, Artificial Sequence
  Synthetic
guagggcuuuggccaagag

SEQ ID NO: 18505 - RNA, 20 nt, Artificial Sequence
  Synthetic
gguagggcuuuggccaagag

SEQ ID NO: 18506 - RNA, 22 nt, Artificial Sequence
  Synthetic
gagguagggcuuuggccaagag

SEQ ID NO: 18507 - RNA, 22 nt, Artificial Sequence
  Synthetic
guagagcagagggugagaagag

SEQ ID NO: 18508 - RNA, 22 nt, Artificial Sequence
  Synthetic
gucaaaaaagguguuugaagag

SEQ ID NO: 18509 - RNA, 22 nt, Artificial Sequence
  Synthetic
gaucaaaaagcuaaaaacagag

SEQ ID NO: 18510 - RNA, 22 nt, Artificial Sequence
  Synthetic
gaauaauugaucaagaacagag

SEQ ID NO: 18511 - RNA, 23 nt, Artificial Sequence
  Synthetic
ggaauaauugaucaagaacagag

SEQ ID NO: 18512 - RNA, 22 nt, Artificial Sequence
  Synthetic
guuuccacaauuucacacagag

SEQ ID NO: 18513 - RNA, 23 nt, Artificial Sequence
  Synthetic
gcaauaccauuugcgcuccagag

SEQ ID NO: 18514 - RNA, 23 nt, Artificial Sequence
  Synthetic
gcuucaacauucuaacagcagag

SEQ ID NO: 18515 - RNA, 22 nt, Artificial Sequence
  Synthetic
gcuuugcaccucauuagcagag

SEQ ID NO: 18516 - RNA, 20 nt, Artificial Sequence
  Synthetic
gaugacacccaugggcagag

SEQ ID NO: 18517 - RNA, 22 nt, Artificial Sequence
  Synthetic
gagaugacacccaugggcagag

SEQ ID NO: 18518 - RNA, 18 nt, Artificial Sequence
  Synthetic
gaagacacgauugcagag

SEQ ID NO: 18519 - RNA, 18 nt, Artificial Sequence
  Synthetic
gccuuaguaagaucagag

SEQ ID NO: 18520 - RNA, 21 nt, Artificial Sequence
  Synthetic
gaagccuuaguaagaucagag

SEQ ID NO: 18521 - RNA, 18 nt, Artificial Sequence
  Synthetic
gcuuguuaaucuucagag

SEQ ID NO: 18522 - RNA, 24 nt, Artificial Sequence
  Synthetic
gacccagcuuguuaaucuucagag

SEQ ID NO: 18523 - RNA, 22 nt, Artificial Sequence
  Synthetic
gaaauucuaaugucuuucagag

SEQ ID NO: 18524 - RNA, 23 nt, Artificial Sequence
  Synthetic
ggaaauucuaaugucuuucagag

SEQ ID NO: 18525 - RNA, 22 nt, Artificial Sequence
  Synthetic
guacaugagaacaaaaagagag

SEQ ID NO: 18526 - RNA, 20 nt, Artificial Sequence
  Synthetic
guucuaucaacugaagagag

SEQ ID NO: 18527 - RNA, 21 nt, Artificial Sequence
  Synthetic
gaaguaacaaauaacagagag

SEQ ID NO: 18528 - RNA, 22 nt, Artificial Sequence
  Synthetic
ggaaguaacaaauaacagagag

SEQ ID NO: 18529 - RNA, 23 nt, Artificial Sequence
  Synthetic
gggaaguaacaaauaacagagag

SEQ ID NO: 18530 - RNA, 21 nt, Artificial Sequence
  Synthetic
gagagacaggaggcaggagag

SEQ ID NO: 18531 - RNA, 22 nt, Artificial Sequence
  Synthetic
ggagagacaggaggcaggagag

SEQ ID NO: 18532 - RNA, 22 nt, Artificial Sequence
  Synthetic
gaaaaggaaccaacaaugagag

SEQ ID NO: 18533 - RNA, 24 nt, Artificial Sequence
  Synthetic
gugaaaaggaaccaacaaugagag

SEQ ID NO: 18534 - RNA, 19 nt, Artificial Sequence
  Synthetic
gaaccuuucagaaugagag

SEQ ID NO: 18535 - RNA, 21 nt, Artificial Sequence
  Synthetic
gagaaccuuucagaaugagag

SEQ ID NO: 18536 - RNA, 18 nt, Artificial Sequence
  Synthetic
guugagauacagugagag

SEQ ID NO: 18537 - RNA, 24 nt, Artificial Sequence
  Synthetic
guauuaguugagauacagugagag

SEQ ID NO: 18538 - RNA, 21 nt, Artificial Sequence
  Synthetic
gaaagaugagcugggugagag

SEQ ID NO: 18539 - RNA, 22 nt, Artificial Sequence
  Synthetic
ggaaagaugagcugggugagag

SEQ ID NO: 18540 - RNA, 19 nt, Artificial Sequence
  Synthetic
gccugccagcuauugagag

SEQ ID NO: 18541 - RNA, 20 nt, Artificial Sequence
  Synthetic
ggccugccagcuauugagag

SEQ ID NO: 18542 - RNA, 18 nt, Artificial Sequence
  Synthetic
gcugauaguaguugagag

SEQ ID NO: 18543 - RNA, 22 nt, Artificial Sequence
  Synthetic
gauagcugauaguaguugagag

SEQ ID NO: 18544 - RNA, 23 nt, Artificial Sequence
  Synthetic
ggauagcugauaguaguugagag

SEQ ID NO: 18545 - RNA, 19 nt, Artificial Sequence
  Synthetic
gaguggguaauaaauagag

SEQ ID NO: 18546 - RNA, 20 nt, Artificial Sequence
  Synthetic
ggaguggguaauaaauagag

SEQ ID NO: 18547 - RNA, 22 nt, Artificial Sequence
  Synthetic
guggaguggguaauaaauagag

SEQ ID NO: 18548 - RNA, 18 nt, Artificial Sequence
  Synthetic
ggugggaagaugauagag

SEQ ID NO: 18549 - RNA, 19 nt, Artificial Sequence
  Synthetic
guggcagagaggucuagag

SEQ ID NO: 18550 - RNA, 18 nt, Artificial Sequence
  Synthetic
gggaaguaaaagguagag

SEQ ID NO: 18551 - RNA, 24 nt, Artificial Sequence
  Synthetic
guuacuauaaucucuaauguagag

SEQ ID NO: 18552 - RNA, 21 nt, Artificial Sequence
  Synthetic
gcuuuauuuaacuuuguagag

SEQ ID NO: 18553 - RNA, 23 nt, Artificial Sequence
  Synthetic
gaauaaaagaaaaggaccacgag

SEQ ID NO: 18554 - RNA, 22 nt, Artificial Sequence
  Synthetic
guuaagauccuuaugauacgag

SEQ ID NO: 18555 - RNA, 24 nt, Artificial Sequence
  Synthetic
guguuaagauccuuaugauacgag

SEQ ID NO: 18556 - RNA, 19 nt, Artificial Sequence
  Synthetic
gugcugaaagcaaggcgag

SEQ ID NO: 18557 - RNA, 21 nt, Artificial Sequence
  Synthetic
gagugcugaaagcaaggcgag

SEQ ID NO: 18558 - RNA, 23 nt, Artificial Sequence
  Synthetic
gcgagugcugaaagcaaggcgag

SEQ ID NO: 18559 - RNA, 18 nt, Artificial Sequence
  Synthetic
gguagaaguggaaaggag

SEQ ID NO: 18560 - RNA, 19 nt, Artificial Sequence
  Synthetic
ggguagaaguggaaaggag

SEQ ID NO: 18561 - RNA, 21 nt, Artificial Sequence
  Synthetic
gaggguagaaguggaaaggag

SEQ ID NO: 18562 - RNA, 20 nt, Artificial Sequence
  Synthetic
gauucaaauaaagcaaggag

SEQ ID NO: 18563 - RNA, 23 nt, Artificial Sequence
  Synthetic
gaaagcaugggcagaggaaggag

SEQ ID NO: 18564 - RNA, 24 nt, Artificial Sequence
  Synthetic
ggaaagcaugggcagaggaaggag

SEQ ID NO: 18565 - RNA, 22 nt, Artificial Sequence
  Synthetic
guacaguucuggagaucaggag

SEQ ID NO: 18566 - RNA, 18 nt, Artificial Sequence
  Synthetic
gccuacucaucucaggag

SEQ ID NO: 18567 - RNA, 23 nt, Artificial Sequence
  Synthetic
gacuagccuacucaucucaggag

SEQ ID NO: 18568 - RNA, 24 nt, Artificial Sequence
  Synthetic
ggacuagccuacucaucucaggag

SEQ ID NO: 18569 - RNA, 22 nt, Artificial Sequence
  Synthetic
guauuugagggguggcuaggag

SEQ ID NO: 18570 - RNA, 21 nt, Artificial Sequence
  Synthetic
gaacagaaaaaaaauuaggag

SEQ ID NO: 18571 - RNA, 22 nt, Artificial Sequence
  Synthetic
ggaacagaaaaaaaauuaggag

SEQ ID NO: 18572 - RNA, 21 nt, Artificial Sequence
  Synthetic
gcucuagaaguccauuaggag

SEQ ID NO: 18573 - RNA, 22 nt, Artificial Sequence
  Synthetic
gugagauguuugagucacggag

SEQ ID NO: 18574 - RNA, 24 nt, Artificial Sequence
  Synthetic
gugugagauguuugagucacggag

SEQ ID NO: 18575 - RNA, 23 nt, Artificial Sequence
  Synthetic
gaauuuauuagagacagagggag

SEQ ID NO: 18576 - RNA, 24 nt, Artificial Sequence
  Synthetic
guucagggcuugggagugggggag

SEQ ID NO: 18577 - RNA, 21 nt, Artificial Sequence
  Synthetic
guucaugaaugcauaugggag

SEQ ID NO: 18578 - RNA, 22 nt, Artificial Sequence
  Synthetic
gguucaugaaugcauaugggag

SEQ ID NO: 18579 - RNA, 23 nt, Artificial Sequence
  Synthetic
guucauuccugggacacugggag

SEQ ID NO: 18580 - RNA, 20 nt, Artificial Sequence
  Synthetic
guucagcauacaccugggag

SEQ ID NO: 18581 - RNA, 18 nt, Artificial Sequence
  Synthetic
guggcauuugccugggag

SEQ ID NO: 18582 - RNA, 19 nt, Artificial Sequence
  Synthetic
gguggcauuugccugggag

SEQ ID NO: 18583 - RNA, 22 nt, Artificial Sequence
  Synthetic
gaugguggcauuugccugggag

SEQ ID NO: 18584 - RNA, 21 nt, Artificial Sequence
  Synthetic
gucauagaguuggggauggag

SEQ ID NO: 18585 - RNA, 18 nt, Artificial Sequence
  Synthetic
gucacaauguguauggag

SEQ ID NO: 18586 - RNA, 23 nt, Artificial Sequence
  Synthetic
guacauugauucacauacuggag

SEQ ID NO: 18587 - RNA, 22 nt, Artificial Sequence
  Synthetic
gcauuuagaagaugugcuggag

SEQ ID NO: 18588 - RNA, 23 nt, Artificial Sequence
  Synthetic
ggcauuuagaagaugugcuggag

SEQ ID NO: 18589 - RNA, 22 nt, Artificial Sequence
  Synthetic
gaauccauccucaguucuggag

SEQ ID NO: 18590 - RNA, 23 nt, Artificial Sequence
  Synthetic
ggaauccauccucaguucuggag

SEQ ID NO: 18591 - RNA, 18 nt, Artificial Sequence
  Synthetic
gggcaggaaugaguggag

SEQ ID NO: 18592 - RNA, 20 nt, Artificial Sequence
  Synthetic
gugggcaggaaugaguggag

SEQ ID NO: 18593 - RNA, 21 nt, Artificial Sequence
  Synthetic
ggugggcaggaaugaguggag

SEQ ID NO: 18594 - RNA, 19 nt, Artificial Sequence
  Synthetic
gcagcuuguagcuguggag

SEQ ID NO: 18595 - RNA, 24 nt, Artificial Sequence
  Synthetic
gucuagcagcuuguagcuguggag

SEQ ID NO: 18596 - RNA, 22 nt, Artificial Sequence
  Synthetic
gaccacaacauggcacuuggag

SEQ ID NO: 18597 - RNA, 24 nt, Artificial Sequence
  Synthetic
gugaccacaacauggcacuuggag

SEQ ID NO: 18598 - RNA, 19 nt, Artificial Sequence
  Synthetic
gaaggcccauaaaaaugag

SEQ ID NO: 18599 - RNA, 19 nt, Artificial Sequence
  Synthetic
gugauccuuggaaaaugag

SEQ ID NO: 18600 - RNA, 21 nt, Artificial Sequence
  Synthetic
gugugauccuuggaaaaugag

SEQ ID NO: 18601 - RNA, 24 nt, Artificial Sequence
  Synthetic
guugugugauccuuggaaaaugag

SEQ ID NO: 18602 - RNA, 23 nt, Artificial Sequence
  Synthetic
gaaccauaagguggauaaaugag

SEQ ID NO: 18603 - RNA, 22 nt, Artificial Sequence
  Synthetic
guaucuucuugaugauaaugag

SEQ ID NO: 18604 - RNA, 22 nt, Artificial Sequence
  Synthetic
gccuacuuaauucuauaaugag

SEQ ID NO: 18605 - RNA, 20 nt, Artificial Sequence
  Synthetic
gccauguuucuauuaaugag

SEQ ID NO: 18606 - RNA, 19 nt, Artificial Sequence
  Synthetic
gaugauuuugacacaugag

SEQ ID NO: 18607 - RNA, 18 nt, Artificial Sequence
  Synthetic
gguaaaucuuugcaugag

SEQ ID NO: 18608 - RNA, 19 nt, Artificial Sequence
  Synthetic
ggguaaaucuuugcaugag

SEQ ID NO: 18609 - RNA, 20 nt, Artificial Sequence
  Synthetic
gggguaaaucuuugcaugag

SEQ ID NO: 18610 - RNA, 23 nt, Artificial Sequence
  Synthetic
gauacucucaauggccucaugag

SEQ ID NO: 18611 - RNA, 22 nt, Artificial Sequence
  Synthetic
gcuucccauacggaaagaugag

SEQ ID NO: 18612 - RNA, 22 nt, Artificial Sequence
  Synthetic
guacagagaaugagcagaugag

SEQ ID NO: 18613 - RNA, 24 nt, Artificial Sequence
  Synthetic
gaguacagagaaugagcagaugag

SEQ ID NO: 18614 - RNA, 24 nt, Artificial Sequence
  Synthetic
guucccagggcaucugucuaugag

SEQ ID NO: 18615 - RNA, 18 nt, Artificial Sequence
  Synthetic
gaaugaagugcuccugag

SEQ ID NO: 18616 - RNA, 19 nt, Artificial Sequence
  Synthetic
ggaaugaagugcuccugag

SEQ ID NO: 18617 - RNA, 22 nt, Artificial Sequence
  Synthetic
gucggaaugaagugcuccugag

SEQ ID NO: 18618 - RNA, 19 nt, Artificial Sequence
  Synthetic
guuuuuuguaccaucugag

SEQ ID NO: 18619 - RNA, 21 nt, Artificial Sequence
  Synthetic
gacuuggaccucauuucugag

SEQ ID NO: 18620 - RNA, 24 nt, Artificial Sequence
  Synthetic
gcugacuuggaccucauuucugag

SEQ ID NO: 18621 - RNA, 18 nt, Artificial Sequence
  Synthetic
gcauggaagaggcgugag

SEQ ID NO: 18622 - RNA, 22 nt, Artificial Sequence
  Synthetic
gacagcauggaagaggcgugag

SEQ ID NO: 18623 - RNA, 23 nt, Artificial Sequence
  Synthetic
ggacagcauggaagaggcgugag

SEQ ID NO: 18624 - RNA, 24 nt, Artificial Sequence
  Synthetic
gggacagcauggaagaggcgugag

SEQ ID NO: 18625 - RNA, 21 nt, Artificial Sequence
  Synthetic
gaucauuucuugguaggugag

SEQ ID NO: 18626 - RNA, 24 nt, Artificial Sequence
  Synthetic
gaagaucauuucuugguaggugag

SEQ ID NO: 18627 - RNA, 20 nt, Artificial Sequence
  Synthetic
guuaaugcuaaauaugugag

SEQ ID NO: 18628 - RNA, 21 nt, Artificial Sequence
  Synthetic
gguuaaugcuaaauaugugag

SEQ ID NO: 18629 - RNA, 19 nt, Artificial Sequence
  Synthetic
gaacuuccaguuaugugag

SEQ ID NO: 18630 - RNA, 24 nt, Artificial Sequence
  Synthetic
guaauuaucauauuacucugugag

SEQ ID NO: 18631 - RNA, 19 nt, Artificial Sequence
  Synthetic
guaggggaaagcuugugag

SEQ ID NO: 18632 - RNA, 20 nt, Artificial Sequence
  Synthetic
gguaggggaaagcuugugag

SEQ ID NO: 18633 - RNA, 23 nt, Artificial Sequence
  Synthetic
gaugguaggggaaagcuugugag

SEQ ID NO: 18634 - RNA, 18 nt, Artificial Sequence
  Synthetic
gcugcacauuagauugag

SEQ ID NO: 18635 - RNA, 23 nt, Artificial Sequence
  Synthetic
gcuucgcugcacauuagauugag

SEQ ID NO: 18636 - RNA, 18 nt, Artificial Sequence
  Synthetic
guuggggcaacgauugag

SEQ ID NO: 18637 - RNA, 18 nt, Artificial Sequence
  Synthetic
ggugaauacaugauugag

SEQ ID NO: 18638 - RNA, 20 nt, Artificial Sequence
  Synthetic
guuuaggauauuagcuugag

SEQ ID NO: 18639 - RNA, 21 nt, Artificial Sequence
  Synthetic
gguuuaggauauuagcuugag

SEQ ID NO: 18640 - RNA, 18 nt, Artificial Sequence
  Synthetic
gauuaaacacuucuugag

SEQ ID NO: 18641 - RNA, 18 nt, Artificial Sequence
  Synthetic
gauguguaagaaguugag

SEQ ID NO: 18642 - RNA, 20 nt, Artificial Sequence
  Synthetic
gagauguguaagaaguugag

SEQ ID NO: 18643 - RNA, 21 nt, Artificial Sequence
  Synthetic
gccaccaacagcuuauuugag

SEQ ID NO: 18644 - RNA, 21 nt, Artificial Sequence
  Synthetic
gacuucccuguuuacuuugag

SEQ ID NO: 18645 - RNA, 22 nt, Artificial Sequence
  Synthetic
ggacuucccuguuuacuuugag

SEQ ID NO: 18646 - RNA, 22 nt, Artificial Sequence
  Synthetic
gcauauggaucaagaaaaauag

SEQ ID NO: 18647 - RNA, 23 nt, Artificial Sequence
  Synthetic
gaaaaugaaaugauguaaaauag

SEQ ID NO: 18648 - RNA, 20 nt, Artificial Sequence
  Synthetic
gaaaaaucuuauucaaauag

SEQ ID NO: 18649 - RNA, 23 nt, Artificial Sequence
  Synthetic
gaugaaaaaucuuauucaaauag

SEQ ID NO: 18650 - RNA, 21 nt, Artificial Sequence
  Synthetic
gggagcuggagagagaaauag

SEQ ID NO: 18651 - RNA, 22 nt, Artificial Sequence
  Synthetic
ggggagcuggagagagaaauag

SEQ ID NO: 18652 - RNA, 23 nt, Artificial Sequence
  Synthetic
gggggagcuggagagagaaauag

SEQ ID NO: 18653 - RNA, 22 nt, Artificial Sequence
  Synthetic
guuuuauaccuuaaauaaauag

SEQ ID NO: 18654 - RNA, 21 nt, Artificial Sequence
  Synthetic
guuguuuuauuaauuaaauag

SEQ ID NO: 18655 - RNA, 23 nt, Artificial Sequence
  Synthetic
gauuuuugugauuuugacaauag

SEQ ID NO: 18656 - RNA, 24 nt, Artificial Sequence
  Synthetic
ggauuuuugugauuuugacaauag

SEQ ID NO: 18657 - RNA, 18 nt, Artificial Sequence
  Synthetic
gaacauucuguacaauag

SEQ ID NO: 18658 - RNA, 19 nt, Artificial Sequence
  Synthetic
ggaacauucuguacaauag

SEQ ID NO: 18659 - RNA, 24 nt, Artificial Sequence
  Synthetic
gucaaggaacauucuguacaauag

SEQ ID NO: 18660 - RNA, 19 nt, Artificial Sequence
  Synthetic
gagagauugcuaagaauag

SEQ ID NO: 18661 - RNA, 20 nt, Artificial Sequence
  Synthetic
ggagagauugcuaagaauag

SEQ ID NO: 18662 - RNA, 22 nt, Artificial Sequence
  Synthetic
gaggagagauugcuaagaauag

SEQ ID NO: 18663 - RNA, 23 nt, Artificial Sequence
  Synthetic
ggaggagagauugcuaagaauag

SEQ ID NO: 18664 - RNA, 24 nt, Artificial Sequence
  Synthetic
gggaggagagauugcuaagaauag

SEQ ID NO: 18665 - RNA, 24 nt, Artificial Sequence
  Synthetic
gcuaugugaggggaaggagaauag

SEQ ID NO: 18666 - RNA, 19 nt, Artificial Sequence
  Synthetic
guucugugacagauaauag

SEQ ID NO: 18667 - RNA, 20 nt, Artificial Sequence
  Synthetic
gaauauuuaacauauaauag

SEQ ID NO: 18668 - RNA, 21 nt, Artificial Sequence
  Synthetic
ggaauauuuaacauauaauag

SEQ ID NO: 18669 - RNA, 20 nt, Artificial Sequence
  Synthetic
gucugaauaaugauuaauag

SEQ ID NO: 18670 - RNA, 24 nt, Artificial Sequence
  Synthetic
gcaugucugaauaaugauuaauag

SEQ ID NO: 18671 - RNA, 24 nt, Artificial Sequence
  Synthetic
gauccucuacaaccaugaacauag

SEQ ID NO: 18672 - RNA, 21 nt, Artificial Sequence
  Synthetic
gaaugcaagacaauaacauag

SEQ ID NO: 18673 - RNA, 22 nt, Artificial Sequence
  Synthetic
ggaaugcaagacaauaacauag

SEQ ID NO: 18674 - RNA, 20 nt, Artificial Sequence
  Synthetic
gauuguuaccuaucacauag

SEQ ID NO: 18675 - RNA, 22 nt, Artificial Sequence
  Synthetic
gugauuguuaccuaucacauag

SEQ ID NO: 18676 - RNA, 18 nt, Artificial Sequence
  Synthetic
gacgcuauggggacauag

SEQ ID NO: 18677 - RNA, 19 nt, Artificial Sequence
  Synthetic
ggacgcuauggggacauag

SEQ ID NO: 18678 - RNA, 24 nt, Artificial Sequence
  Synthetic
gcaaaggacgcuauggggacauag

SEQ ID NO: 18679 - RNA, 19 nt, Artificial Sequence
  Synthetic
gugagauuaggaagcauag

SEQ ID NO: 18680 - RNA, 21 nt, Artificial Sequence
  Synthetic
gagugagauuaggaagcauag

SEQ ID NO: 18681 - RNA, 19 nt, Artificial Sequence
  Synthetic
gcagauacuccagucauag

SEQ ID NO: 18682 - RNA, 20 nt, Artificial Sequence
  Synthetic
ggcagauacuccagucauag

SEQ ID NO: 18683 - RNA, 22 nt, Artificial Sequence
  Synthetic
guucugguggagaaaaagauag

SEQ ID NO: 18684 - RNA, 22 nt, Artificial Sequence
  Synthetic
gaaauaugggauggaaagauag

SEQ ID NO: 18685 - RNA, 24 nt, Artificial Sequence
  Synthetic
gagaaauaugggauggaaagauag

SEQ ID NO: 18686 - RNA, 20 nt, Artificial Sequence
  Synthetic
gcugaugaauaaugagauag

SEQ ID NO: 18687 - RNA, 22 nt, Artificial Sequence
  Synthetic
gauuuuuucaggcauucgauag

SEQ ID NO: 18688 - RNA, 24 nt, Artificial Sequence
  Synthetic
gaucacagaaagagggauggauag

SEQ ID NO: 18689 - RNA, 20 nt, Artificial Sequence
  Synthetic
gcucuguacccaaaauauag

SEQ ID NO: 18690 - RNA, 22 nt, Artificial Sequence
  Synthetic
gugcucuguacccaaaauauag

SEQ ID NO: 18691 - RNA, 20 nt, Artificial Sequence
  Synthetic
gcuauagcagagagauauag

SEQ ID NO: 18692 - RNA, 18 nt, Artificial Sequence
  Synthetic
gcucuagauaggauauag

SEQ ID NO: 18693 - RNA, 19 nt, Artificial Sequence
  Synthetic
ggcucuagauaggauauag

SEQ ID NO: 18694 - RNA, 23 nt, Artificial Sequence
  Synthetic
gcauggcucuagauaggauauag

SEQ ID NO: 18695 - RNA, 22 nt, Artificial Sequence
  Synthetic
gaggcugcuaaugcugcuauag

SEQ ID NO: 18696 - RNA, 24 nt, Artificial Sequence
  Synthetic
gaaaauaucagaagauuucuauag

SEQ ID NO: 18697 - RNA, 18 nt, Artificial Sequence
  Synthetic
gauguacucauuguauag

SEQ ID NO: 18698 - RNA, 20 nt, Artificial Sequence
  Synthetic
gugauguacucauuguauag

SEQ ID NO: 18699 - RNA, 24 nt, Artificial Sequence
  Synthetic
gaucauucucagcuggaauuauag

SEQ ID NO: 18700 - RNA, 18 nt, Artificial Sequence
  Synthetic
guaguacauuaaaacuag

SEQ ID NO: 18701 - RNA, 19 nt, Artificial Sequence
  Synthetic
guccuaaaccaaugacuag

SEQ ID NO: 18702 - RNA, 22 nt, Artificial Sequence
  Synthetic
gcaguccuaaaccaaugacuag

SEQ ID NO: 18703 - RNA, 20 nt, Artificial Sequence
  Synthetic
gauuagauauucucuacuag

SEQ ID NO: 18704 - RNA, 22 nt, Artificial Sequence
  Synthetic
gagauuagauauucucuacuag

SEQ ID NO: 18705 - RNA, 20 nt, Artificial Sequence
  Synthetic
gaaucuuucuuagaaccuag

SEQ ID NO: 18706 - RNA, 23 nt, Artificial Sequence
  Synthetic
gcugaaucuuucuuagaaccuag

SEQ ID NO: 18707 - RNA, 20 nt, Artificial Sequence
  Synthetic
gaucuucuauauggaccuag

SEQ ID NO: 18708 - RNA, 21 nt, Artificial Sequence
  Synthetic
ggaucuucuauauggaccuag

SEQ ID NO: 18709 - RNA, 22 nt, Artificial Sequence
  Synthetic
gggaucuucuauauggaccuag

SEQ ID NO: 18710 - RNA, 24 nt, Artificial Sequence
  Synthetic
gacauuaguuuuauuccagccuag

SEQ ID NO: 18711 - RNA, 21 nt, Artificial Sequence
  Synthetic
gacuccagcugggcagccuag

SEQ ID NO: 18712 - RNA, 22 nt, Artificial Sequence
  Synthetic
ggacuccagcugggcagccuag

SEQ ID NO: 18713 - RNA, 23 nt, Artificial Sequence
  Synthetic
gcuacuucuaugaauuuuccuag

SEQ ID NO: 18714 - RNA, 19 nt, Artificial Sequence
  Synthetic
gugcgcgcgcgugcgcuag

SEQ ID NO: 18715 - RNA, 21 nt, Artificial Sequence
  Synthetic
gugugcgcgcgcgugcgcuag

SEQ ID NO: 18716 - RNA, 23 nt, Artificial Sequence
  Synthetic
gugugugcgcgcgcgugcgcuag

SEQ ID NO: 18717 - RNA, 18 nt, Artificial Sequence
  Synthetic
gugaaaccuguucucuag

SEQ ID NO: 18718 - RNA, 23 nt, Artificial Sequence
  Synthetic
guauugugaaaccuguucucuag

SEQ ID NO: 18719 - RNA, 24 nt, Artificial Sequence
  Synthetic
gguauugugaaaccuguucucuag

SEQ ID NO: 18720 - RNA, 22 nt, Artificial Sequence
  Synthetic
gaacuggugggaaauggucuag

SEQ ID NO: 18721 - RNA, 23 nt, Artificial Sequence
  Synthetic
gaaaauguuuagaaaaguucuag

SEQ ID NO: 18722 - RNA, 20 nt, Artificial Sequence
  Synthetic
guuaaaauccaccguucuag

SEQ ID NO: 18723 - RNA, 21 nt, Artificial Sequence
  Synthetic
gguuaaaauccaccguucuag

SEQ ID NO: 18724 - RNA, 19 nt, Artificial Sequence
  Synthetic
guagauggagagaaaguag

SEQ ID NO: 18725 - RNA, 23 nt, Artificial Sequence
  Synthetic
gcuuguagauggagagaaaguag

SEQ ID NO: 18726 - RNA, 18 nt, Artificial Sequence
  Synthetic
gaagggccauguaaguag

SEQ ID NO: 18727 - RNA, 22 nt, Artificial Sequence
  Synthetic
gcaugaagggccauguaaguag

SEQ ID NO: 18728 - RNA, 24 nt, Artificial Sequence
  Synthetic
gagcaugaagggccauguaaguag

SEQ ID NO: 18729 - RNA, 21 nt, Artificial Sequence
  Synthetic
guaaugguucaauaacaguag

SEQ ID NO: 18730 - RNA, 23 nt, Artificial Sequence
  Synthetic
gaguaaugguucaauaacaguag

SEQ ID NO: 18731 - RNA, 24 nt, Artificial Sequence
  Synthetic
ggaguaaugguucaauaacaguag

SEQ ID NO: 18732 - RNA, 21 nt, Artificial Sequence
  Synthetic
gaucuccaaguggcccaguag

SEQ ID NO: 18733 - RNA, 18 nt, Artificial Sequence
  Synthetic
gauuuguaauuccaguag

SEQ ID NO: 18734 - RNA, 23 nt, Artificial Sequence
  Synthetic
guuuugauuuguaauuccaguag

SEQ ID NO: 18735 - RNA, 20 nt, Artificial Sequence
  Synthetic
gaugggucuugaagcaguag

SEQ ID NO: 18736 - RNA, 20 nt, Artificial Sequence
  Synthetic
gaccuucagaauggcaguag

SEQ ID NO: 18737 - RNA, 23 nt, Artificial Sequence
  Synthetic
gaucaagaaaauuauuauaguag

SEQ ID NO: 18738 - RNA, 18 nt, Artificial Sequence
  Synthetic
gcugugcccacuuaguag

SEQ ID NO: 18739 - RNA, 23 nt, Artificial Sequence
  Synthetic
gccaugcugugcccacuuaguag

SEQ ID NO: 18740 - RNA, 24 nt, Artificial Sequence
  Synthetic
ggccaugcugugcccacuuaguag

SEQ ID NO: 18741 - RNA, 18 nt, Artificial Sequence
  Synthetic
gccaaguagacaacguag

SEQ ID NO: 18742 - RNA, 24 nt, Artificial Sequence
  Synthetic
gaauucgccaaguagacaacguag

SEQ ID NO: 18743 - RNA, 19 nt, Artificial Sequence
  Synthetic
guacggagcuaucacguag

SEQ ID NO: 18744 - RNA, 22 nt, Artificial Sequence
  Synthetic
gaaguacggagcuaucacguag

SEQ ID NO: 18745 - RNA, 18 nt, Artificial Sequence
  Synthetic
gugucacaauuugcguag

SEQ ID NO: 18746 - RNA, 23 nt, Artificial Sequence
  Synthetic
gaugagggguggggguaggguag

SEQ ID NO: 18747 - RNA, 24 nt, Artificial Sequence
  Synthetic
guaacugaguggauggauggguag

SEQ ID NO: 18748 - RNA, 18 nt, Artificial Sequence
  Synthetic
gaacagucugguggguag

SEQ ID NO: 18749 - RNA, 21 nt, Artificial Sequence
  Synthetic
gcagaacagucugguggguag

SEQ ID NO: 18750 - RNA, 22 nt, Artificial Sequence
  Synthetic
ggcagaacagucugguggguag

SEQ ID NO: 18751 - RNA, 19 nt, Artificial Sequence
  Synthetic
gaagaucauuucuugguag

SEQ ID NO: 18752 - RNA, 21 nt, Artificial Sequence
  Synthetic
gugaagaucauuucuugguag

SEQ ID NO: 18753 - RNA, 19 nt, Artificial Sequence
  Synthetic
guguucaggguaaauguag

SEQ ID NO: 18754 - RNA, 20 nt, Artificial Sequence
  Synthetic
gguguucaggguaaauguag

SEQ ID NO: 18755 - RNA, 23 nt, Artificial Sequence
  Synthetic
gaugguguucaggguaaauguag

SEQ ID NO: 18756 - RNA, 24 nt, Artificial Sequence
  Synthetic
ggaugguguucaggguaaauguag

SEQ ID NO: 18757 - RNA, 24 nt, Artificial Sequence
  Synthetic
gucuuaauuccacauuucauguag

SEQ ID NO: 18758 - RNA, 18 nt, Artificial Sequence
  Synthetic
gaaauauaauuuauguag

SEQ ID NO: 18759 - RNA, 18 nt, Artificial Sequence
  Synthetic
gaguuaccaugaaauuag

SEQ ID NO: 18760 - RNA, 19 nt, Artificial Sequence
  Synthetic
ggaguuaccaugaaauuag

SEQ ID NO: 18761 - RNA, 23 nt, Artificial Sequence
  Synthetic
gauauugaucacgucuaaauuag

SEQ ID NO: 18762 - RNA, 18 nt, Artificial Sequence
  Synthetic
gugauaccuaacaauuag

SEQ ID NO: 18763 - RNA, 24 nt, Artificial Sequence
  Synthetic
gcuuuagugauaccuaacaauuag

SEQ ID NO: 18764 - RNA, 24 nt, Artificial Sequence
  Synthetic
gucaucagggacaaagucaauuag

SEQ ID NO: 18765 - RNA, 22 nt, Artificial Sequence
  Synthetic
gauauuacaaguugagaauuag

SEQ ID NO: 18766 - RNA, 24 nt, Artificial Sequence
  Synthetic
gagauauuacaaguugagaauuag

SEQ ID NO: 18767 - RNA, 24 nt, Artificial Sequence
  Synthetic
gcaaccucaaagggagggaauuag

SEQ ID NO: 18768 - RNA, 24 nt, Artificial Sequence
  Synthetic
gaucuaaaauuuaaaaauaauuag

SEQ ID NO: 18769 - RNA, 20 nt, Artificial Sequence
  Synthetic
gcugcuuugcaccucauuag

SEQ ID NO: 18770 - RNA, 21 nt, Artificial Sequence
  Synthetic
ggcugcuuugcaccucauuag

SEQ ID NO: 18771 - RNA, 24 nt, Artificial Sequence
  Synthetic
guauuuauguggaaauaugauuag

SEQ ID NO: 18772 - RNA, 20 nt, Artificial Sequence
  Synthetic
gcccaauguccauugauuag

SEQ ID NO: 18773 - RNA, 18 nt, Artificial Sequence
  Synthetic
ggauaaaguuuugauuag

SEQ ID NO: 18774 - RNA, 20 nt, Artificial Sequence
  Synthetic
gaggauaaaguuuugauuag

SEQ ID NO: 18775 - RNA, 21 nt, Artificial Sequence
  Synthetic
ggaggauaaaguuuugauuag

SEQ ID NO: 18776 - RNA, 20 nt, Artificial Sequence
  Synthetic
guaaggaauguagauauuag

SEQ ID NO: 18777 - RNA, 21 nt, Artificial Sequence
  Synthetic
gguaaggaauguagauauuag

SEQ ID NO: 18778 - RNA, 18 nt, Artificial Sequence
  Synthetic
guucccuauaauuauuag

SEQ ID NO: 18779 - RNA, 19 nt, Artificial Sequence
  Synthetic
gguucccuauaauuauuag

SEQ ID NO: 18780 - RNA, 21 nt, Artificial Sequence
  Synthetic
gagguucccuauaauuauuag

SEQ ID NO: 18781 - RNA, 22 nt, Artificial Sequence
  Synthetic
ggagguucccuauaauuauuag

SEQ ID NO: 18782 - RNA, 24 nt, Artificial Sequence
  Synthetic
gaaccauauuuaauaguuuauuag

SEQ ID NO: 18783 - RNA, 23 nt, Artificial Sequence
  Synthetic
gcaaauuggcacagacaacuuag

SEQ ID NO: 18784 - RNA, 24 nt, Artificial Sequence
  Synthetic
ggcaaauuggcacagacaacuuag

SEQ ID NO: 18785 - RNA, 20 nt, Artificial Sequence
  Synthetic
gcaacagcaaauggacuuag

SEQ ID NO: 18786 - RNA, 20 nt, Artificial Sequence
  Synthetic
guauuccuacauuuucuuag

SEQ ID NO: 18787 - RNA, 18 nt, Artificial Sequence
  Synthetic
gagcccagucuaaguuag

SEQ ID NO: 18788 - RNA, 19 nt, Artificial Sequence
  Synthetic
ggagcccagucuaaguuag

SEQ ID NO: 18789 - RNA, 20 nt, Artificial Sequence
  Synthetic
gggagcccagucuaaguuag

SEQ ID NO: 18790 - RNA, 22 nt, Artificial Sequence
  Synthetic
gcuaaggggaggguauaguuag

SEQ ID NO: 18791 - RNA, 23 nt, Artificial Sequence
  Synthetic
ggcuaaggggaggguauaguuag

SEQ ID NO: 18792 - RNA, 20 nt, Artificial Sequence
  Synthetic
gcagcuguguaauuaguuag

SEQ ID NO: 18793 - RNA, 21 nt, Artificial Sequence
  Synthetic
ggcagcuguguaauuaguuag

SEQ ID NO: 18794 - RNA, 22 nt, Artificial Sequence
  Synthetic
gggcagcuguguaauuaguuag

SEQ ID NO: 18795 - RNA, 19 nt, Artificial Sequence
  Synthetic
guauucaacuucguguuag

SEQ ID NO: 18796 - RNA, 21 nt, Artificial Sequence
  Synthetic
gaaaaaaauuaagauuguuag

SEQ ID NO: 18797 - RNA, 19 nt, Artificial Sequence
  Synthetic
gcaauauacagcaauuuag

SEQ ID NO: 18798 - RNA, 20 nt, Artificial Sequence
  Synthetic
ggcaauauacagcaauuuag

SEQ ID NO: 18799 - RNA, 22 nt, Artificial Sequence
  Synthetic
gaggcaauauacagcaauuuag

SEQ ID NO: 18800 - RNA, 18 nt, Artificial Sequence
  Synthetic
gaguagcagagcauuuag

SEQ ID NO: 18801 - RNA, 24 nt, Artificial Sequence
  Synthetic
gcauaagaguagcagagcauuuag

SEQ ID NO: 18802 - RNA, 22 nt, Artificial Sequence
  Synthetic
guuuauacaaaguugacuuuag

SEQ ID NO: 18803 - RNA, 24 nt, Artificial Sequence
  Synthetic
gaguuuauacaaaguugacuuuag

SEQ ID NO: 18804 - RNA, 21 nt, Artificial Sequence
  Synthetic
gcucauggccaauagcuuuag

SEQ ID NO: 18805 - RNA, 22 nt, Artificial Sequence
  Synthetic
ggcucauggccaauagcuuuag

SEQ ID NO: 18806 - RNA, 24 nt, Artificial Sequence
  Synthetic
gaggcucauggccaauagcuuuag

SEQ ID NO: 18807 - RNA, 18 nt, Artificial Sequence
  Synthetic
guacaucgauugcuuuag

SEQ ID NO: 18808 - RNA, 22 nt, Artificial Sequence
  Synthetic
gcaaguacaucgauugcuuuag

SEQ ID NO: 18809 - RNA, 24 nt, Artificial Sequence
  Synthetic
gaacccucccaagcuccaguuuag

SEQ ID NO: 18810 - RNA, 24 nt, Artificial Sequence
  Synthetic
gauuucuggggaaaaaagguuuag

SEQ ID NO: 18811 - RNA, 21 nt, Artificial Sequence
  Synthetic
guauuguaggugacauuuuag

SEQ ID NO: 18812 - RNA, 24 nt, Artificial Sequence
  Synthetic
gaaguauuguaggugacauuuuag

SEQ ID NO: 18813 - RNA, 20 nt, Artificial Sequence
  Synthetic
guucuuaaaguacauuuuag

SEQ ID NO: 18814 - RNA, 22 nt, Artificial Sequence
  Synthetic
gcguucuuaaaguacauuuuag

SEQ ID NO: 18815 - RNA, 24 nt, Artificial Sequence
  Synthetic
gugcguucuuaaaguacauuuuag

SEQ ID NO: 18816 - RNA, 21 nt, Artificial Sequence
  Synthetic
guuuucuauuaauuaaaaacg

SEQ ID NO: 18817 - RNA, 18 nt, Artificial Sequence
  Synthetic
gauuaaacccagcaaacg

SEQ ID NO: 18818 - RNA, 22 nt, Artificial Sequence
  Synthetic
guaagauuaaacccagcaaacg

SEQ ID NO: 18819 - RNA, 23 nt, Artificial Sequence
  Synthetic
gguaagauuaaacccagcaaacg

SEQ ID NO: 18820 - RNA, 24 nt, Artificial Sequence
  Synthetic
ggguaagauuaaacccagcaaacg

SEQ ID NO: 18821 - RNA, 20 nt, Artificial Sequence
  Synthetic
guugaguagaugagcaaacg

SEQ ID NO: 18822 - RNA, 21 nt, Artificial Sequence
  Synthetic
gguugaguagaugagcaaacg

SEQ ID NO: 18823 - RNA, 21 nt, Artificial Sequence
  Synthetic
gucaguacauaguuaccaacg

SEQ ID NO: 18824 - RNA, 22 nt, Artificial Sequence
  Synthetic
gaaaauggaccuuuuaugaacg

SEQ ID NO: 18825 - RNA, 19 nt, Artificial Sequence
  Synthetic
gaagcuguaaauacuaacg

SEQ ID NO: 18826 - RNA, 24 nt, Artificial Sequence
  Synthetic
gauaagaagcuguaaauacuaacg

SEQ ID NO: 18827 - RNA, 18 nt, Artificial Sequence
  Synthetic
ggcuucaauaacuuaacg

SEQ ID NO: 18828 - RNA, 19 nt, Artificial Sequence
  Synthetic
gggcuucaauaacuuaacg

SEQ ID NO: 18829 - RNA, 18 nt, Artificial Sequence
  Synthetic
gguuugcuggggaacacg

SEQ ID NO: 18830 - RNA, 20 nt, Artificial Sequence
  Synthetic
gagguuugcuggggaacacg

SEQ ID NO: 18831 - RNA, 23 nt, Artificial Sequence
  Synthetic
guugagguuugcuggggaacacg

SEQ ID NO: 18832 - RNA, 24 nt, Artificial Sequence
  Synthetic
gguugagguuugcuggggaacacg

SEQ ID NO: 18833 - RNA, 21 nt, Artificial Sequence
  Synthetic
gccccacauaagagggacacg

SEQ ID NO: 18834 - RNA, 18 nt, Artificial Sequence
  Synthetic
guauuuaagguguacacg

SEQ ID NO: 18835 - RNA, 22 nt, Artificial Sequence
  Synthetic
gauuaccauguacuaugucacg

SEQ ID NO: 18836 - RNA, 18 nt, Artificial Sequence
  Synthetic
guuagaugaagaaagacg

SEQ ID NO: 18837 - RNA, 21 nt, Artificial Sequence
  Synthetic
gaaguuagaugaagaaagacg

SEQ ID NO: 18838 - RNA, 22 nt, Artificial Sequence
  Synthetic
ggaaguuagaugaagaaagacg

SEQ ID NO: 18839 - RNA, 24 nt, Artificial Sequence
  Synthetic
guggaaguuagaugaagaaagacg

SEQ ID NO: 18840 - RNA, 24 nt, Artificial Sequence
  Synthetic
guuauuauuccuaggguaaagacg

SEQ ID NO: 18841 - RNA, 18 nt, Artificial Sequence
  Synthetic
gucaguuggcucaauacg

SEQ ID NO: 18842 - RNA, 19 nt, Artificial Sequence
  Synthetic
ggucaguuggcucaauacg

SEQ ID NO: 18843 - RNA, 20 nt, Artificial Sequence
  Synthetic
gggucaguuggcucaauacg

SEQ ID NO: 18844 - RNA, 21 nt, Artificial Sequence
  Synthetic
ggggucaguuggcucaauacg

SEQ ID NO: 18845 - RNA, 21 nt, Artificial Sequence
  Synthetic
gcuugacuaggaaaacauacg

SEQ ID NO: 18846 - RNA, 24 nt, Artificial Sequence
  Synthetic
gcugcuugacuaggaaaacauacg

SEQ ID NO: 18847 - RNA, 18 nt, Artificial Sequence
  Synthetic
guguuuagcaaagauacg

SEQ ID NO: 18848 - RNA, 19 nt, Artificial Sequence
  Synthetic
gguguuuagcaaagauacg

SEQ ID NO: 18849 - RNA, 22 nt, Artificial Sequence
  Synthetic
gcagguguuuagcaaagauacg

SEQ ID NO: 18850 - RNA, 23 nt, Artificial Sequence
  Synthetic
ggcagguguuuagcaaagauacg

SEQ ID NO: 18851 - RNA, 19 nt, Artificial Sequence
  Synthetic
gaaucuauguguguguacg

SEQ ID NO: 18852 - RNA, 20 nt, Artificial Sequence
  Synthetic
ggaaucuauguguguguacg

SEQ ID NO: 18853 - RNA, 18 nt, Artificial Sequence
  Synthetic
gauaucaaugagguuacg

SEQ ID NO: 18854 - RNA, 20 nt, Artificial Sequence
  Synthetic
gagauaucaaugagguuacg

SEQ ID NO: 18855 - RNA, 21 nt, Artificial Sequence
  Synthetic
ggagauaucaaugagguuacg

SEQ ID NO: 18856 - RNA, 18 nt, Artificial Sequence
  Synthetic
guuugaaaagcuuuuacg

SEQ ID NO: 18857 - RNA, 23 nt, Artificial Sequence
  Synthetic
gucacguuugaaaagcuuuuacg

SEQ ID NO: 18858 - RNA, 22 nt, Artificial Sequence
  Synthetic
guauacaaauucuaauccaccg

SEQ ID NO: 18859 - RNA, 23 nt, Artificial Sequence
  Synthetic
gguauacaaauucuaauccaccg

SEQ ID NO: 18860 - RNA, 18 nt, Artificial Sequence
  Synthetic
gcccaggagcgcuugccg

SEQ ID NO: 18861 - RNA, 24 nt, Artificial Sequence
  Synthetic
gaauaagcccaggagcgcuugccg

SEQ ID NO: 18862 - RNA, 18 nt, Artificial Sequence
  Synthetic
gugacauaccuaccuccg

SEQ ID NO: 18863 - RNA, 21 nt, Artificial Sequence
  Synthetic
gaccauuauuuccaaggagcg

SEQ ID NO: 18864 - RNA, 21 nt, Artificial Sequence
  Synthetic
gaaauggggucucggaaggcg

SEQ ID NO: 18865 - RNA, 19 nt, Artificial Sequence
  Synthetic
guuaugaaacuguaaggcg

SEQ ID NO: 18866 - RNA, 18 nt, Artificial Sequence
  Synthetic
ggcuaggaaggagaggcg

SEQ ID NO: 18867 - RNA, 21 nt, Artificial Sequence
  Synthetic
gaaggcuaggaaggagaggcg

SEQ ID NO: 18868 - RNA, 22 nt, Artificial Sequence
  Synthetic
ggaaggcuaggaaggagaggcg

SEQ ID NO: 18869 - RNA, 23 nt, Artificial Sequence
  Synthetic
gggaaggcuaggaaggagaggcg

SEQ ID NO: 18870 - RNA, 24 nt, Artificial Sequence
  Synthetic
ggggaaggcuaggaaggagaggcg

SEQ ID NO: 18871 - RNA, 22 nt, Artificial Sequence
  Synthetic
gcgagagggugggaugggggcg

SEQ ID NO: 18872 - RNA, 23 nt, Artificial Sequence
  Synthetic
ggcgagagggugggaugggggcg

SEQ ID NO: 18873 - RNA, 24 nt, Artificial Sequence
  Synthetic
gggcgagagggugggaugggggcg

SEQ ID NO: 18874 - RNA, 21 nt, Artificial Sequence
  Synthetic
gauccucacaaaagcucugcg

SEQ ID NO: 18875 - RNA, 23 nt, Artificial Sequence
  Synthetic
gaacauccaucgaguucguugcg

SEQ ID NO: 18876 - RNA, 23 nt, Artificial Sequence
  Synthetic
guacauugucuaaccauacaucg

SEQ ID NO: 18877 - RNA, 24 nt, Artificial Sequence
  Synthetic
gguacauugucuaaccauacaucg

SEQ ID NO: 18878 - RNA, 18 nt, Artificial Sequence
  Synthetic
ggacagaagguuacaucg

SEQ ID NO: 18879 - RNA, 18 nt, Artificial Sequence
  Synthetic
gccugguggggauuaucg

SEQ ID NO: 18880 - RNA, 20 nt, Artificial Sequence
  Synthetic
gcagcaaaaugauuaacucg

SEQ ID NO: 18881 - RNA, 22 nt, Artificial Sequence
  Synthetic
gaauagcuugcccacaaccucg

SEQ ID NO: 18882 - RNA, 24 nt, Artificial Sequence
  Synthetic
gugaauagcuugcccacaaccucg

SEQ ID NO: 18883 - RNA, 18 nt, Artificial Sequence
  Synthetic
gcuuugcuuaugaucucg

SEQ ID NO: 18884 - RNA, 23 nt, Artificial Sequence
  Synthetic
gccaugcuuugcuuaugaucucg

SEQ ID NO: 18885 - RNA, 19 nt, Artificial Sequence
  Synthetic
gugguguugaccuuugucg

SEQ ID NO: 18886 - RNA, 21 nt, Artificial Sequence
  Synthetic
gagugguguugaccuuugucg

SEQ ID NO: 18887 - RNA, 23 nt, Artificial Sequence
  Synthetic
gagagugguguugaccuuugucg

SEQ ID NO: 18888 - RNA, 24 nt, Artificial Sequence
  Synthetic
ggagagugguguugaccuuugucg

SEQ ID NO: 18889 - RNA, 18 nt, Artificial Sequence
  Synthetic
guugaugaagaucauucg

SEQ ID NO: 18890 - RNA, 20 nt, Artificial Sequence
  Synthetic
gaguugaugaagaucauucg

SEQ ID NO: 18891 - RNA, 21 nt, Artificial Sequence
  Synthetic
ggaguugaugaagaucauucg

SEQ ID NO: 18892 - RNA, 19 nt, Artificial Sequence
  Synthetic
gauaucccugauuacuucg

SEQ ID NO: 18893 - RNA, 22 nt, Artificial Sequence
  Synthetic
gaagauaucccugauuacuucg

SEQ ID NO: 18894 - RNA, 19 nt, Artificial Sequence
  Synthetic
gacuucuuuuaccucuucg

SEQ ID NO: 18895 - RNA, 24 nt, Artificial Sequence
  Synthetic
guaaugacuucuuuuaccucuucg

SEQ ID NO: 18896 - RNA, 23 nt, Artificial Sequence
  Synthetic
gauuuuucugggaaauuuuuucg

SEQ ID NO: 18897 - RNA, 18 nt, Artificial Sequence
  Synthetic
guuucuuuagaaaaaagg

SEQ ID NO: 18898 - RNA, 19 nt, Artificial Sequence
  Synthetic
gaaaaugggcucaaaaagg

SEQ ID NO: 18899 - RNA, 24 nt, Artificial Sequence
  Synthetic
gacaaauguauuucuagcaaaagg

SEQ ID NO: 18900 - RNA, 21 nt, Artificial Sequence
  Synthetic
guucacaugggaaguaaaagg

SEQ ID NO: 18901 - RNA, 24 nt, Artificial Sequence
  Synthetic
gcuaaacaaauaaguuaacaaagg

SEQ ID NO: 18902 - RNA, 18 nt, Artificial Sequence
  Synthetic
gcucuuuaaagacaaagg

SEQ ID NO: 18903 - RNA, 20 nt, Artificial Sequence
  Synthetic
gagcucuuuaaagacaaagg

SEQ ID NO: 18904 - RNA, 22 nt, Artificial Sequence
  Synthetic
gugagcucuuuaaagacaaagg

SEQ ID NO: 18905 - RNA, 20 nt, Artificial Sequence
  Synthetic
gcuauacuacgaggcaaagg

SEQ ID NO: 18906 - RNA, 22 nt, Artificial Sequence
  Synthetic
gccuuuucagaaguuucaaagg

SEQ ID NO: 18907 - RNA, 20 nt, Artificial Sequence
  Synthetic
gaaucuagaauugagaaagg

SEQ ID NO: 18908 - RNA, 20 nt, Artificial Sequence
  Synthetic
gauacuucuccauggaaagg

SEQ ID NO: 18909 - RNA, 23 nt, Artificial Sequence
  Synthetic
gaauuccggauacauuguaaagg

SEQ ID NO: 18910 - RNA, 20 nt, Artificial Sequence
  Synthetic
gauauaaacagcguccaagg

SEQ ID NO: 18911 - RNA, 18 nt, Artificial Sequence
  Synthetic
guuagaacacuagcaagg

SEQ ID NO: 18912 - RNA, 20 nt, Artificial Sequence
  Synthetic
gaguuagaacacuagcaagg

SEQ ID NO: 18913 - RNA, 19 nt, Artificial Sequence
  Synthetic
gaacaugacuuauucaagg

SEQ ID NO: 18914 - RNA, 23 nt, Artificial Sequence
  Synthetic
gcaugaacaugacuuauucaagg

SEQ ID NO: 18915 - RNA, 19 nt, Artificial Sequence
  Synthetic
gauagcugaagaaagaagg

SEQ ID NO: 18916 - RNA, 20 nt, Artificial Sequence
  Synthetic
ggauagcugaagaaagaagg

SEQ ID NO: 18917 - RNA, 22 nt, Artificial Sequence
  Synthetic
guggauagcugaagaaagaagg

SEQ ID NO: 18918 - RNA, 24 nt, Artificial Sequence
  Synthetic
guguggauagcugaagaaagaagg

SEQ ID NO: 18919 - RNA, 24 nt, Artificial Sequence
  Synthetic
guccuacccaaggggagaagaagg

SEQ ID NO: 18920 - RNA, 19 nt, Artificial Sequence
  Synthetic
guauagaaugagaagaagg

SEQ ID NO: 18921 - RNA, 22 nt, Artificial Sequence
  Synthetic
gcacaauguugucauaagaagg

SEQ ID NO: 18922 - RNA, 22 nt, Artificial Sequence
  Synthetic
gacuaagacaaaauucagaagg

SEQ ID NO: 18923 - RNA, 20 nt, Artificial Sequence
  Synthetic
gcaaaccacugcagagaagg

SEQ ID NO: 18924 - RNA, 18 nt, Artificial Sequence
  Synthetic
guucuagccaguagaagg

SEQ ID NO: 18925 - RNA, 20 nt, Artificial Sequence
  Synthetic
gaguucuagccaguagaagg

SEQ ID NO: 18926 - RNA, 23 nt, Artificial Sequence
  Synthetic
gcagaguucuagccaguagaagg

SEQ ID NO: 18927 - RNA, 24 nt, Artificial Sequence
  Synthetic
ggcagaguucuagccaguagaagg

SEQ ID NO: 18928 - RNA, 21 nt, Artificial Sequence
  Synthetic
gcuucaugguuuauaggaagg

SEQ ID NO: 18929 - RNA, 24 nt, Artificial Sequence
  Synthetic
gacgcuucaugguuuauaggaagg

SEQ ID NO: 18930 - RNA, 18 nt, Artificial Sequence
  Synthetic
gauucacucaggggaagg

SEQ ID NO: 18931 - RNA, 19 nt, Artificial Sequence
  Synthetic
ggauucacucaggggaagg

SEQ ID NO: 18932 - RNA, 24 nt, Artificial Sequence
  Synthetic
gcuaaggauucacucaggggaagg

SEQ ID NO: 18933 - RNA, 21 nt, Artificial Sequence
  Synthetic
gaauuuuacguugcuggaagg

SEQ ID NO: 18934 - RNA, 24 nt, Artificial Sequence
  Synthetic
guagaauuuuacguugcuggaagg

SEQ ID NO: 18935 - RNA, 23 nt, Artificial Sequence
  Synthetic
gaaacagaaaauacuguggaagg

SEQ ID NO: 18936 - RNA, 18 nt, Artificial Sequence
  Synthetic
gugauaggguguggaagg

SEQ ID NO: 18937 - RNA, 23 nt, Artificial Sequence
  Synthetic
gauaaaucuauuuauuaugaagg

SEQ ID NO: 18938 - RNA, 20 nt, Artificial Sequence
  Synthetic
gucacuaacaaagcugaagg

SEQ ID NO: 18939 - RNA, 18 nt, Artificial Sequence
  Synthetic
gcuaaaagguggugaagg

SEQ ID NO: 18940 - RNA, 22 nt, Artificial Sequence
  Synthetic
guagagauaaaaagaaauaagg

SEQ ID NO: 18941 - RNA, 23 nt, Artificial Sequence
  Synthetic
gguagagauaaaaagaaauaagg

SEQ ID NO: 18942 - RNA, 23 nt, Artificial Sequence
  Synthetic
gacaaucuauuguguagguaagg

SEQ ID NO: 18943 - RNA, 20 nt, Artificial Sequence
  Synthetic
gcuacgaagaaagauuaagg

SEQ ID NO: 18944 - RNA, 23 nt, Artificial Sequence
  Synthetic
gaugcuacgaagaaagauuaagg

SEQ ID NO: 18945 - RNA, 19 nt, Artificial Sequence
  Synthetic
gaaaauucagacuuuaagg

SEQ ID NO: 18946 - RNA, 24 nt, Artificial Sequence
  Synthetic
gcuuucauaugagauacuuuaagg

SEQ ID NO: 18947 - RNA, 23 nt, Artificial Sequence
  Synthetic
gcucuaucauuaaaauuuuaagg

SEQ ID NO: 18948 - RNA, 23 nt, Artificial Sequence
  Synthetic
gcaguaaaaaaaugagaaacagg

SEQ ID NO: 18949 - RNA, 22 nt, Artificial Sequence
  Synthetic
gaaaacgagucuuaaagacagg

SEQ ID NO: 18950 - RNA, 24 nt, Artificial Sequence
  Synthetic
gagaaaacgagucuuaaagacagg

SEQ ID NO: 18951 - RNA, 19 nt, Artificial Sequence
  Synthetic
gccaaucuaugacuacagg

SEQ ID NO: 18952 - RNA, 24 nt, Artificial Sequence
  Synthetic
gaaccaugaagccuuccuuacagg

SEQ ID NO: 18953 - RNA, 21 nt, Artificial Sequence
  Synthetic
gaaaucaaaauuugaaccagg

SEQ ID NO: 18954 - RNA, 23 nt, Artificial Sequence
  Synthetic
gugaaaucaaaauuugaaccagg

SEQ ID NO: 18955 - RNA, 19 nt, Artificial Sequence
  Synthetic
gaaaacaacccagaccagg

SEQ ID NO: 18956 - RNA, 22 nt, Artificial Sequence
  Synthetic
gaagaaaacaacccagaccagg

SEQ ID NO: 18957 - RNA, 19 nt, Artificial Sequence
  Synthetic
gcugaaacauucagccagg

SEQ ID NO: 18958 - RNA, 20 nt, Artificial Sequence
  Synthetic
ggcugaaacauucagccagg

SEQ ID NO: 18959 - RNA, 19 nt, Artificial Sequence
  Synthetic
gaagcuuucucuagccagg

SEQ ID NO: 18960 - RNA, 20 nt, Artificial Sequence
  Synthetic
gcagcuauucugcauccagg

SEQ ID NO: 18961 - RNA, 18 nt, Artificial Sequence
  Synthetic
gaaacuugccuuuccagg

SEQ ID NO: 18962 - RNA, 20 nt, Artificial Sequence
  Synthetic
gagaaacuugccuuuccagg

SEQ ID NO: 18963 - RNA, 22 nt, Artificial Sequence
  Synthetic
gagagaaacuugccuuuccagg

SEQ ID NO: 18964 - RNA, 23 nt, Artificial Sequence
  Synthetic
ggagagaaacuugccuuuccagg

SEQ ID NO: 18965 - RNA, 20 nt, Artificial Sequence
  Synthetic
gaagguugaauuucagcagg

SEQ ID NO: 18966 - RNA, 24 nt, Artificial Sequence
  Synthetic
gaaagaagguugaauuucagcagg

SEQ ID NO: 18967 - RNA, 19 nt, Artificial Sequence
  Synthetic
gugccacuggcugagcagg

SEQ ID NO: 18968 - RNA, 23 nt, Artificial Sequence
  Synthetic
gacugugccacuggcugagcagg

SEQ ID NO: 18969 - RNA, 19 nt, Artificial Sequence
  Synthetic
gcucuagcggaauagcagg

SEQ ID NO: 18970 - RNA, 24 nt, Artificial Sequence
  Synthetic
gcacugcucuagcggaauagcagg

SEQ ID NO: 18971 - RNA, 18 nt, Artificial Sequence
  Synthetic
ggacccuccacuagcagg

SEQ ID NO: 18972 - RNA, 21 nt, Artificial Sequence
  Synthetic
gcuggacccuccacuagcagg

SEQ ID NO: 18973 - RNA, 23 nt, Artificial Sequence
  Synthetic
gagcuggacccuccacuagcagg

SEQ ID NO: 18974 - RNA, 24 nt, Artificial Sequence
  Synthetic
ggagcuggacccuccacuagcagg

SEQ ID NO: 18975 - RNA, 18 nt, Artificial Sequence
  Synthetic
gcccuuccugggggcagg

SEQ ID NO: 18976 - RNA, 20 nt, Artificial Sequence
  Synthetic
gaaauauugacaacaucagg

SEQ ID NO: 18977 - RNA, 24 nt, Artificial Sequence
  Synthetic
gucugaaauauugacaacaucagg

SEQ ID NO: 18978 - RNA, 23 nt, Artificial Sequence
  Synthetic
gucaauauauuuauagagucagg

SEQ ID NO: 18979 - RNA, 22 nt, Artificial Sequence
  Synthetic
guucacaguucuaagggucagg

SEQ ID NO: 18980 - RNA, 18 nt, Artificial Sequence
  Synthetic
gcucaaaggagggucagg

SEQ ID NO: 18981 - RNA, 18 nt, Artificial Sequence
  Synthetic
ggcaauucaguuuucagg

SEQ ID NO: 18982 - RNA, 23 nt, Artificial Sequence
  Synthetic
gcaauucgaauauuagaaagagg

SEQ ID NO: 18983 - RNA, 21 nt, Artificial Sequence
  Synthetic
gcuuaaaaaccugcucagagg

SEQ ID NO: 18984 - RNA, 23 nt, Artificial Sequence
  Synthetic
gugcuuaaaaaccugcucagagg

SEQ ID NO: 18985 - RNA, 19 nt, Artificial Sequence
  Synthetic
gaucuucaucugucagagg

SEQ ID NO: 18986 - RNA, 20 nt, Artificial Sequence
  Synthetic
ggaucuucaucugucagagg

SEQ ID NO: 18987 - RNA, 19 nt, Artificial Sequence
  Synthetic
gacuugagucugggagagg

SEQ ID NO: 18988 - RNA, 21 nt, Artificial Sequence
  Synthetic
gagacuugagucugggagagg

SEQ ID NO: 18989 - RNA, 23 nt, Artificial Sequence
  Synthetic
gagagacuugagucugggagagg

SEQ ID NO: 18990 - RNA, 18 nt, Artificial Sequence
  Synthetic
gacucaaauauugagagg

SEQ ID NO: 18991 - RNA, 19 nt, Artificial Sequence
  Synthetic
ggacucaaauauugagagg

SEQ ID NO: 18992 - RNA, 21 nt, Artificial Sequence
  Synthetic
gaggacucaaauauugagagg

SEQ ID NO: 18993 - RNA, 20 nt, Artificial Sequence
  Synthetic
guuuuaaucaagucacgagg

SEQ ID NO: 18994 - RNA, 21 nt, Artificial Sequence
  Synthetic
gcaacacagagauaagcgagg

SEQ ID NO: 18995 - RNA, 23 nt, Artificial Sequence
  Synthetic
gaaugaaagacuagagaaggagg

SEQ ID NO: 18996 - RNA, 23 nt, Artificial Sequence
  Synthetic
gaaacauaaaaugugggaggagg

SEQ ID NO: 18997 - RNA, 23 nt, Artificial Sequence
  Synthetic
guagagaacaagaaaguaggagg

SEQ ID NO: 18998 - RNA, 23 nt, Artificial Sequence
  Synthetic
guuccaggcccacaagagggagg

SEQ ID NO: 18999 - RNA, 20 nt, Artificial Sequence
  Synthetic
gucauaaagaauuagggagg

SEQ ID NO: 19000 - RNA, 21 nt, Artificial Sequence
  Synthetic
ggucauaaagaauuagggagg

SEQ ID NO: 19001 - RNA, 22 nt, Artificial Sequence
  Synthetic
guacagacauagugccuggagg

SEQ ID NO: 19002 - RNA, 21 nt, Artificial Sequence
  Synthetic
gucaucauucucugcuggagg

SEQ ID NO: 19003 - RNA, 20 nt, Artificial Sequence
  Synthetic
gcuuuggaucagaguggagg

SEQ ID NO: 19004 - RNA, 22 nt, Artificial Sequence
  Synthetic
gugcuuuggaucagaguggagg

SEQ ID NO: 19005 - RNA, 23 nt, Artificial Sequence
  Synthetic
ggugcuuuggaucagaguggagg

SEQ ID NO: 19006 - RNA, 19 nt, Artificial Sequence
  Synthetic
guguggcaauaguuggagg

SEQ ID NO: 19007 - RNA, 22 nt, Artificial Sequence
  Synthetic
gcaucugccucccugacugagg

SEQ ID NO: 19008 - RNA, 23 nt, Artificial Sequence
  Synthetic
ggcaucugccucccugacugagg

SEQ ID NO: 19009 - RNA, 20 nt, Artificial Sequence
  Synthetic
guaguugacggacagugagg

SEQ ID NO: 19010 - RNA, 21 nt, Artificial Sequence
  Synthetic
gguaguugacggacagugagg

SEQ ID NO: 19011 - RNA, 20 nt, Artificial Sequence
  Synthetic
gauggucgcuuggauugagg

SEQ ID NO: 19012 - RNA, 24 nt, Artificial Sequence
  Synthetic
gaaagauggucgcuuggauugagg

SEQ ID NO: 19013 - RNA, 19 nt, Artificial Sequence
  Synthetic
gagaguugagagaaauagg

SEQ ID NO: 19014 - RNA, 20 nt, Artificial Sequence
  Synthetic
guuauaucaaauucaauagg

SEQ ID NO: 19015 - RNA, 24 nt, Artificial Sequence
  Synthetic
gauaguuauaucaaauucaauagg

SEQ ID NO: 19016 - RNA, 20 nt, Artificial Sequence
  Synthetic
guuuugaacauagccauagg

SEQ ID NO: 19017 - RNA, 23 nt, Artificial Sequence
  Synthetic
guuucccuuguaggagggauagg

SEQ ID NO: 19018 - RNA, 24 nt, Artificial Sequence
  Synthetic
guuaauauuaagggaggggauagg

SEQ ID NO: 19019 - RNA, 23 nt, Artificial Sequence
  Synthetic
guaauacccuuaccaucuauagg

SEQ ID NO: 19020 - RNA, 19 nt, Artificial Sequence
  Synthetic
guauagaaaagcaacuagg

SEQ ID NO: 19021 - RNA, 22 nt, Artificial Sequence
  Synthetic
gcaucauuuacuggauccuagg

SEQ ID NO: 19022 - RNA, 18 nt, Artificial Sequence
  Synthetic
gucaaugcaaaagcuagg

SEQ ID NO: 19023 - RNA, 19 nt, Artificial Sequence
  Synthetic
ggucaaugcaaaagcuagg

SEQ ID NO: 19024 - RNA, 20 nt, Artificial Sequence
  Synthetic
gggucaaugcaaaagcuagg

SEQ ID NO: 19025 - RNA, 24 nt, Artificial Sequence
  Synthetic
guucgggucaaugcaaaagcuagg

SEQ ID NO: 19026 - RNA, 20 nt, Artificial Sequence
  Synthetic
gacucuaauaaguaucuagg

SEQ ID NO: 19027 - RNA, 21 nt, Artificial Sequence
  Synthetic
ggacucuaauaaguaucuagg

SEQ ID NO: 19028 - RNA, 22 nt, Artificial Sequence
  Synthetic
gggacucuaauaaguaucuagg

SEQ ID NO: 19029 - RNA, 23 nt, Artificial Sequence
  Synthetic
ggggacucuaauaaguaucuagg

SEQ ID NO: 19030 - RNA, 24 nt, Artificial Sequence
  Synthetic
gggggacucuaauaaguaucuagg

SEQ ID NO: 19031 - RNA, 24 nt, Artificial Sequence
  Synthetic
gucuaagaauuuaacuacucuagg

SEQ ID NO: 19032 - RNA, 21 nt, Artificial Sequence
  Synthetic
gaaugacacuuagugucuagg

SEQ ID NO: 19033 - RNA, 24 nt, Artificial Sequence
  Synthetic
gacauuacauuucaguuaaguagg

SEQ ID NO: 19034 - RNA, 19 nt, Artificial Sequence
  Synthetic
guuguuuucaaauaguagg

SEQ ID NO: 19035 - RNA, 20 nt, Artificial Sequence
  Synthetic
gguuguuuucaaauaguagg

SEQ ID NO: 19036 - RNA, 22 nt, Artificial Sequence
  Synthetic
gauaaacuugggcucagguagg

SEQ ID NO: 19037 - RNA, 18 nt, Artificial Sequence
  Synthetic
gguaguuucccuuguagg

SEQ ID NO: 19038 - RNA, 20 nt, Artificial Sequence
  Synthetic
gugguaguuucccuuguagg

SEQ ID NO: 19039 - RNA, 21 nt, Artificial Sequence
  Synthetic
ggugguaguuucccuuguagg

SEQ ID NO: 19040 - RNA, 22 nt, Artificial Sequence
  Synthetic
guaagaaguuauaaaaauuagg

SEQ ID NO: 19041 - RNA, 24 nt, Artificial Sequence
  Synthetic
gucuaauagguguaaguucuuagg

SEQ ID NO: 19042 - RNA, 21 nt, Artificial Sequence
  Synthetic
guuagggcgaaguguguuagg

SEQ ID NO: 19043 - RNA, 22 nt, Artificial Sequence
  Synthetic
gguuagggcgaaguguguuagg

SEQ ID NO: 19044 - RNA, 22 nt, Artificial Sequence
  Synthetic
guaaugaacaaugaauaaacgg

SEQ ID NO: 19045 - RNA, 18 nt, Artificial Sequence
  Synthetic
gaaauuuguaaauaacgg

SEQ ID NO: 19046 - RNA, 23 nt, Artificial Sequence
  Synthetic
guauuucagagccgcuuuaacgg

SEQ ID NO: 19047 - RNA, 21 nt, Artificial Sequence
  Synthetic
gucugugguauuaaaacacgg

SEQ ID NO: 19048 - RNA, 19 nt, Artificial Sequence
  Synthetic
gcugaguacgugaacacgg

SEQ ID NO: 19049 - RNA, 21 nt, Artificial Sequence
  Synthetic
gcacuuccauaacagauacgg

SEQ ID NO: 19050 - RNA, 23 nt, Artificial Sequence
  Synthetic
gcuaaagcuucuuauuguuacgg

SEQ ID NO: 19051 - RNA, 20 nt, Artificial Sequence
  Synthetic
gaacucuguaucuugagcgg

SEQ ID NO: 19052 - RNA, 18 nt, Artificial Sequence
  Synthetic
gccuuccauuuugagcgg

SEQ ID NO: 19053 - RNA, 21 nt, Artificial Sequence
  Synthetic
gaagccuuccauuuugagcgg

SEQ ID NO: 19054 - RNA, 24 nt, Artificial Sequence
  Synthetic
guugaagccuuccauuuugagcgg

SEQ ID NO: 19055 - RNA, 21 nt, Artificial Sequence
  Synthetic
gauaagauucaagcuaugcgg

SEQ ID NO: 19056 - RNA, 20 nt, Artificial Sequence
  Synthetic
guaugugaauuauagcucgg

SEQ ID NO: 19057 - RNA, 21 nt, Artificial Sequence
  Synthetic
gguaugugaauuauagcucgg

SEQ ID NO: 19058 - RNA, 22 nt, Artificial Sequence
  Synthetic
gauauguaucuucuguggucgg

SEQ ID NO: 19059 - RNA, 23 nt, Artificial Sequence
  Synthetic
gcuaaaacaaaacauugcuucgg

SEQ ID NO: 19060 - RNA, 23 nt, Artificial Sequence
  Synthetic
gacauacugacauacuucuucgg

SEQ ID NO: 19061 - RNA, 20 nt, Artificial Sequence
  Synthetic
gacuagguuguaacaaaggg

SEQ ID NO: 19062 - RNA, 21 nt, Artificial Sequence
  Synthetic
ggacuagguuguaacaaaggg

SEQ ID NO: 19063 - RNA, 22 nt, Artificial Sequence
  Synthetic
gggacuagguuguaacaaaggg

SEQ ID NO: 19064 - RNA, 18 nt, Artificial Sequence
  Synthetic
gaaauccuccccaaaggg

SEQ ID NO: 19065 - RNA, 23 nt, Artificial Sequence
  Synthetic
gacuauauaccuaaaucaaaggg

SEQ ID NO: 19066 - RNA, 20 nt, Artificial Sequence
  Synthetic
guagugguagggggaaaggg

SEQ ID NO: 19067 - RNA, 21 nt, Artificial Sequence
  Synthetic
gguagugguagggggaaaggg

SEQ ID NO: 19068 - RNA, 22 nt, Artificial Sequence
  Synthetic
ggguagugguagggggaaaggg

SEQ ID NO: 19069 - RNA, 21 nt, Artificial Sequence
  Synthetic
gauagcccccuaccccaaggg

SEQ ID NO: 19070 - RNA, 24 nt, Artificial Sequence
  Synthetic
gcagauagcccccuaccccaaggg

SEQ ID NO: 19071 - RNA, 21 nt, Artificial Sequence
  Synthetic
gauaagcaguggugccaaggg

SEQ ID NO: 19072 - RNA, 23 nt, Artificial Sequence
  Synthetic
gagauaagcaguggugccaaggg

SEQ ID NO: 19073 - RNA, 24 nt, Artificial Sequence
  Synthetic
ggagauaagcaguggugccaaggg

SEQ ID NO: 19074 - RNA, 18 nt, Artificial Sequence
  Synthetic
gaaucuagugagcaaggg

SEQ ID NO: 19075 - RNA, 19 nt, Artificial Sequence
  Synthetic
ggaaucuagugagcaaggg

SEQ ID NO: 19076 - RNA, 21 nt, Artificial Sequence
  Synthetic
guggaaucuagugagcaaggg

SEQ ID NO: 19077 - RNA, 23 nt, Artificial Sequence
  Synthetic
gaguggaaucuagugagcaaggg

SEQ ID NO: 19078 - RNA, 18 nt, Artificial Sequence
  Synthetic
gcguuuacuaugcaaggg

SEQ ID NO: 19079 - RNA, 19 nt, Artificial Sequence
  Synthetic
ggcguuuacuaugcaaggg

SEQ ID NO: 19080 - RNA, 24 nt, Artificial Sequence
  Synthetic
gaaacggcguuuacuaugcaaggg

SEQ ID NO: 19081 - RNA, 19 nt, Artificial Sequence
  Synthetic
gcugcacacagcagaaggg

SEQ ID NO: 19082 - RNA, 19 nt, Artificial Sequence
  Synthetic
gcccuguacuagggaaggg

SEQ ID NO: 19083 - RNA, 20 nt, Artificial Sequence
  Synthetic
ggcccuguacuagggaaggg

SEQ ID NO: 19084 - RNA, 21 nt, Artificial Sequence
  Synthetic
gggcccuguacuagggaaggg

SEQ ID NO: 19085 - RNA, 22 nt, Artificial Sequence
  Synthetic
ggggcccuguacuagggaaggg

SEQ ID NO: 19086 - RNA, 23 nt, Artificial Sequence
  Synthetic
gggggcccuguacuagggaaggg

SEQ ID NO: 19087 - RNA, 20 nt, Artificial Sequence
  Synthetic
gcauguccuuuaaauaaggg

SEQ ID NO: 19088 - RNA, 23 nt, Artificial Sequence
  Synthetic
gaauaauuauuuuuaaauaaggg

SEQ ID NO: 19089 - RNA, 23 nt, Artificial Sequence
  Synthetic
guucucuuucuucucaguaaggg

SEQ ID NO: 19090 - RNA, 19 nt, Artificial Sequence
  Synthetic
guuacauguggccacaggg

SEQ ID NO: 19091 - RNA, 22 nt, Artificial Sequence
  Synthetic
gcuguuacauguggccacaggg

SEQ ID NO: 19092 - RNA, 24 nt, Artificial Sequence
  Synthetic
gcuauuuaauggugguucacaggg

SEQ ID NO: 19093 - RNA, 22 nt, Artificial Sequence
  Synthetic
gaaccauaaccccaggccaggg

SEQ ID NO: 19094 - RNA, 24 nt, Artificial Sequence
  Synthetic
gagaaccauaaccccaggccaggg

SEQ ID NO: 19095 - RNA, 22 nt, Artificial Sequence
  Synthetic
gacuuuggaggggagagcaggg

SEQ ID NO: 19096 - RNA, 19 nt, Artificial Sequence
  Synthetic
gauucccuuuugcucaggg

SEQ ID NO: 19097 - RNA, 23 nt, Artificial Sequence
  Synthetic
gaacgauucccuuuugcucaggg

SEQ ID NO: 19098 - RNA, 22 nt, Artificial Sequence
  Synthetic
gauaugccaggcacacagaggg

SEQ ID NO: 19099 - RNA, 24 nt, Artificial Sequence
  Synthetic
gagauaugccaggcacacagaggg

SEQ ID NO: 19100 - RNA, 20 nt, Artificial Sequence
  Synthetic
gauucacauacuggagaggg

SEQ ID NO: 19101 - RNA, 21 nt, Artificial Sequence
  Synthetic
gcaauccaauguaaaggaggg

SEQ ID NO: 19102 - RNA, 22 nt, Artificial Sequence
  Synthetic
ggcaauccaauguaaaggaggg

SEQ ID NO: 19103 - RNA, 18 nt, Artificial Sequence
  Synthetic
gcauuaacugguggaggg

SEQ ID NO: 19104 - RNA, 22 nt, Artificial Sequence
  Synthetic
gucugcauuaacugguggaggg

SEQ ID NO: 19105 - RNA, 22 nt, Artificial Sequence
  Synthetic
gaaagugaagaagugcugaggg

SEQ ID NO: 19106 - RNA, 23 nt, Artificial Sequence
  Synthetic
ggaaagugaagaagugcugaggg

SEQ ID NO: 19107 - RNA, 18 nt, Artificial Sequence
  Synthetic
gaaucuuauuuuugaggg

SEQ ID NO: 19108 - RNA, 19 nt, Artificial Sequence
  Synthetic
ggaaucuuauuuuugaggg

SEQ ID NO: 19109 - RNA, 20 nt, Artificial Sequence
  Synthetic
gggaaucuuauuuuugaggg

SEQ ID NO: 19110 - RNA, 18 nt, Artificial Sequence
  Synthetic
ggaauaccgcaaauaggg

SEQ ID NO: 19111 - RNA, 23 nt, Artificial Sequence
  Synthetic
gaaauucagaaaguuuuauaggg

SEQ ID NO: 19112 - RNA, 18 nt, Artificial Sequence
  Synthetic
gggggcccuguacuaggg

SEQ ID NO: 19113 - RNA, 22 nt, Artificial Sequence
  Synthetic
gaaugggggcccuguacuaggg

SEQ ID NO: 19114 - RNA, 22 nt, Artificial Sequence
  Synthetic
gcucucuagggcaaaucuaggg

SEQ ID NO: 19115 - RNA, 19 nt, Artificial Sequence
  Synthetic
gaagagaacuagaguaggg

SEQ ID NO: 19116 - RNA, 24 nt, Artificial Sequence
  Synthetic
gcauucccucuaagggauguaggg

SEQ ID NO: 19117 - RNA, 23 nt, Artificial Sequence
  Synthetic
gacaacuagucauuuccuuaggg

SEQ ID NO: 19118 - RNA, 20 nt, Artificial Sequence
  Synthetic
guucauggaggggcuuaggg

SEQ ID NO: 19119 - RNA, 18 nt, Artificial Sequence
  Synthetic
guaauaacugaguuaggg

SEQ ID NO: 19120 - RNA, 20 nt, Artificial Sequence
  Synthetic
guguaauaacugaguuaggg

SEQ ID NO: 19121 - RNA, 18 nt, Artificial Sequence
  Synthetic
gccagaguaagaugcggg

SEQ ID NO: 19122 - RNA, 22 nt, Artificial Sequence
  Synthetic
guaagccagaguaagaugcggg

SEQ ID NO: 19123 - RNA, 20 nt, Artificial Sequence
  Synthetic
guuuugaacacaacaucggg

SEQ ID NO: 19124 - RNA, 21 nt, Artificial Sequence
  Synthetic
gguuuugaacacaacaucggg

SEQ ID NO: 19125 - RNA, 19 nt, Artificial Sequence
  Synthetic
guaguaaauauuucucggg

SEQ ID NO: 19126 - RNA, 20 nt, Artificial Sequence
  Synthetic
gcaagaaucuacugaagggg

SEQ ID NO: 19127 - RNA, 20 nt, Artificial Sequence
  Synthetic
gcuaaggauucacucagggg

SEQ ID NO: 19128 - RNA, 22 nt, Artificial Sequence
  Synthetic
gugcuaaggauucacucagggg

SEQ ID NO: 19129 - RNA, 18 nt, Artificial Sequence
  Synthetic
gagagcaggcguuagggg

SEQ ID NO: 19130 - RNA, 22 nt, Artificial Sequence
  Synthetic
guaugagagcaggcguuagggg

SEQ ID NO: 19131 - RNA, 20 nt, Artificial Sequence
  Synthetic
gcuuuggaguuauuuagggg

SEQ ID NO: 19132 - RNA, 21 nt, Artificial Sequence
  Synthetic
ggcuuuggaguuauuuagggg

SEQ ID NO: 19133 - RNA, 19 nt, Artificial Sequence
  Synthetic
gccacauggagaaacgggg

SEQ ID NO: 19134 - RNA, 21 nt, Artificial Sequence
  Synthetic
gagccacauggagaaacgggg

SEQ ID NO: 19135 - RNA, 20 nt, Artificial Sequence
  Synthetic
gaauuuuggggaaaaggggg

SEQ ID NO: 19136 - RNA, 20 nt, Artificial Sequence
  Synthetic
gcaaauuuuggggaaggggg

SEQ ID NO: 19137 - RNA, 18 nt, Artificial Sequence
  Synthetic
gcugauuggcuugggggg

SEQ ID NO: 19138 - RNA, 21 nt, Artificial Sequence
  Synthetic
gccaauuaacguagauggggg

SEQ ID NO: 19139 - RNA, 24 nt, Artificial Sequence
  Synthetic
gaugccaauuaacguagauggggg

SEQ ID NO: 19140 - RNA, 19 nt, Artificial Sequence
  Synthetic
gauuaacuugauauggggg

SEQ ID NO: 19141 - RNA, 18 nt, Artificial Sequence
  Synthetic
guuauuagauccuggggg

SEQ ID NO: 19142 - RNA, 19 nt, Artificial Sequence
  Synthetic
gguuauuagauccuggggg

SEQ ID NO: 19143 - RNA, 21 nt, Artificial Sequence
  Synthetic
gugguuauuagauccuggggg

SEQ ID NO: 19144 - RNA, 22 nt, Artificial Sequence
  Synthetic
ggugguuauuagauccuggggg

SEQ ID NO: 19145 - RNA, 21 nt, Artificial Sequence
  Synthetic
ggguuggggguuguguggggg

SEQ ID NO: 19146 - RNA, 24 nt, Artificial Sequence
  Synthetic
gcaggguuggggguuguguggggg

SEQ ID NO: 19147 - RNA, 18 nt, Artificial Sequence
  Synthetic
gcugggcuccguuggggg

SEQ ID NO: 19148 - RNA, 19 nt, Artificial Sequence
  Synthetic
ggcugggcuccguuggggg

SEQ ID NO: 19149 - RNA, 20 nt, Artificial Sequence
  Synthetic
gaaagcuauuugguuggggg

SEQ ID NO: 19150 - RNA, 23 nt, Artificial Sequence
  Synthetic
guugaaagcuauuugguuggggg

SEQ ID NO: 19151 - RNA, 24 nt, Artificial Sequence
  Synthetic
gguugaaagcuauuugguuggggg

SEQ ID NO: 19152 - RNA, 21 nt, Artificial Sequence
  Synthetic
gggaaguguggggucaugggg

SEQ ID NO: 19153 - RNA, 24 nt, Artificial Sequence
  Synthetic
gacauaagaacucucuggaugggg

SEQ ID NO: 19154 - RNA, 19 nt, Artificial Sequence
  Synthetic
gcacacuaaccaagugggg

SEQ ID NO: 19155 - RNA, 23 nt, Artificial Sequence
  Synthetic
gcaagcacacuaaccaagugggg

SEQ ID NO: 19156 - RNA, 21 nt, Artificial Sequence
  Synthetic
gaaauaucucugggagugggg

SEQ ID NO: 19157 - RNA, 18 nt, Artificial Sequence
  Synthetic
gagcuuugggauuugggg

SEQ ID NO: 19158 - RNA, 23 nt, Artificial Sequence
  Synthetic
gcucugauuuaacugguuugggg

SEQ ID NO: 19159 - RNA, 24 nt, Artificial Sequence
  Synthetic
ggcucugauuuaacugguuugggg

SEQ ID NO: 19160 - RNA, 22 nt, Artificial Sequence
  Synthetic
gaagaaguuacagguuuugggg

SEQ ID NO: 19161 - RNA, 18 nt, Artificial Sequence
  Synthetic
gcugaguggaaaaauggg

SEQ ID NO: 19162 - RNA, 24 nt, Artificial Sequence
  Synthetic
guuuaacuaaagugauuaaauggg

SEQ ID NO: 19163 - RNA, 18 nt, Artificial Sequence
  Synthetic
gaaauaucagagaauggg

SEQ ID NO: 19164 - RNA, 20 nt, Artificial Sequence
  Synthetic
gagaaauaucagagaauggg

SEQ ID NO: 19165 - RNA, 21 nt, Artificial Sequence
  Synthetic
gaaaucauauuaacacauggg

SEQ ID NO: 19166 - RNA, 22 nt, Artificial Sequence
  Synthetic
ggaaaucauauuaacacauggg

SEQ ID NO: 19167 - RNA, 23 nt, Artificial Sequence
  Synthetic
gggaaaucauauuaacacauggg

SEQ ID NO: 19168 - RNA, 19 nt, Artificial Sequence
  Synthetic
gcuagauauugcacauggg

SEQ ID NO: 19169 - RNA, 21 nt, Artificial Sequence
  Synthetic
gugcuagauauugcacauggg

SEQ ID NO: 19170 - RNA, 20 nt, Artificial Sequence
  Synthetic
gccuuuaagaaagacauggg

SEQ ID NO: 19171 - RNA, 23 nt, Artificial Sequence
  Synthetic
gccacaguaggauggggcauggg

SEQ ID NO: 19172 - RNA, 22 nt, Artificial Sequence
  Synthetic
gauuuauggaguaaaucauggg

SEQ ID NO: 19173 - RNA, 23 nt, Artificial Sequence
  Synthetic
ggauuuauggaguaaaucauggg

SEQ ID NO: 19174 - RNA, 20 nt, Artificial Sequence
  Synthetic
gccucgauuucguucauggg

SEQ ID NO: 19175 - RNA, 21 nt, Artificial Sequence
  Synthetic
ggccucgauuucguucauggg

SEQ ID NO: 19176 - RNA, 22 nt, Artificial Sequence
  Synthetic
gggccucgauuucguucauggg

SEQ ID NO: 19177 - RNA, 18 nt, Artificial Sequence
  Synthetic
gguagagcagaugauggg

SEQ ID NO: 19178 - RNA, 19 nt, Artificial Sequence
  Synthetic
ggguagagcagaugauggg

SEQ ID NO: 19179 - RNA, 21 nt, Artificial Sequence
  Synthetic
gaggguagagcagaugauggg

SEQ ID NO: 19180 - RNA, 23 nt, Artificial Sequence
  Synthetic
gugaggguagagcagaugauggg

SEQ ID NO: 19181 - RNA, 20 nt, Artificial Sequence
  Synthetic
gaacccuaugcagauauggg

SEQ ID NO: 19182 - RNA, 23 nt, Artificial Sequence
  Synthetic
gaagaacccuaugcagauauggg

SEQ ID NO: 19183 - RNA, 23 nt, Artificial Sequence
  Synthetic
gccauacaaagaaaugauauggg

SEQ ID NO: 19184 - RNA, 20 nt, Artificial Sequence
  Synthetic
guuaaguucuuugcuauggg

SEQ ID NO: 19185 - RNA, 21 nt, Artificial Sequence
  Synthetic
gguuaaguucuuugcuauggg

SEQ ID NO: 19186 - RNA, 20 nt, Artificial Sequence
  Synthetic
gaagggacauauucuauggg

SEQ ID NO: 19187 - RNA, 21 nt, Artificial Sequence
  Synthetic
ggaagggacauauucuauggg

SEQ ID NO: 19188 - RNA, 22 nt, Artificial Sequence
  Synthetic
gcuuaaaauauuuauguauggg

SEQ ID NO: 19189 - RNA, 24 nt, Artificial Sequence
  Synthetic
gaacauauugaccugacaacuggg

SEQ ID NO: 19190 - RNA, 24 nt, Artificial Sequence
  Synthetic
guuuaauauuuccaggagacuggg

SEQ ID NO: 19191 - RNA, 20 nt, Artificial Sequence
  Synthetic
gucacugcugaguuacuggg

SEQ ID NO: 19192 - RNA, 22 nt, Artificial Sequence
  Synthetic
gugucacugcugaguuacuggg

SEQ ID NO: 19193 - RNA, 24 nt, Artificial Sequence
  Synthetic
gagugucacugcugaguuacuggg

SEQ ID NO: 19194 - RNA, 20 nt, Artificial Sequence
  Synthetic
gaaucucucaaauaccuggg

SEQ ID NO: 19195 - RNA, 21 nt, Artificial Sequence
  Synthetic
ggaaucucucaaauaccuggg

SEQ ID NO: 19196 - RNA, 19 nt, Artificial Sequence
  Synthetic
gaaaggccagucuccuggg

SEQ ID NO: 19197 - RNA, 23 nt, Artificial Sequence
  Synthetic
guacucaguuuccaaacucuggg

SEQ ID NO: 19198 - RNA, 24 nt, Artificial Sequence
  Synthetic
gguacucaguuuccaaacucuggg

SEQ ID NO: 19199 - RNA, 22 nt, Artificial Sequence
  Synthetic
gaauuuucaaugauguucuggg

SEQ ID NO: 19200 - RNA, 19 nt, Artificial Sequence
  Synthetic
guaucuucaaaacaguggg

SEQ ID NO: 19201 - RNA, 18 nt, Artificial Sequence
  Synthetic
gaagccuacuggaguggg

SEQ ID NO: 19202 - RNA, 19 nt, Artificial Sequence
  Synthetic
ggaagccuacuggaguggg

SEQ ID NO: 19203 - RNA, 21 nt, Artificial Sequence
  Synthetic
guggaagccuacuggaguggg

SEQ ID NO: 19204 - RNA, 24 nt, Artificial Sequence
  Synthetic
gacguggaagccuacuggaguggg

SEQ ID NO: 19205 - RNA, 20 nt, Artificial Sequence
  Synthetic
gccaaauacaugaucguggg

SEQ ID NO: 19206 - RNA, 18 nt, Artificial Sequence
  Synthetic
gggaagaguguagguggg

SEQ ID NO: 19207 - RNA, 20 nt, Artificial Sequence
  Synthetic
gaaaaugaagcaaggguggg

SEQ ID NO: 19208 - RNA, 23 nt, Artificial Sequence
  Synthetic
guuuuuggaaauucuucuguggg

SEQ ID NO: 19209 - RNA, 19 nt, Artificial Sequence
  Synthetic
gccucuucuccauuguggg

SEQ ID NO: 19210 - RNA, 21 nt, Artificial Sequence
  Synthetic
gaaauauauaacuaccuuggg

SEQ ID NO: 19211 - RNA, 22 nt, Artificial Sequence
  Synthetic
gcuccaagccuggagucuuggg

SEQ ID NO: 19212 - RNA, 23 nt, Artificial Sequence
  Synthetic
ggcuccaagccuggagucuuggg

SEQ ID NO: 19213 - RNA, 18 nt, Artificial Sequence
  Synthetic
gaugaauucuuucuuggg

SEQ ID NO: 19214 - RNA, 24 nt, Artificial Sequence
  Synthetic
gaucuugaugaauucuuucuuggg

SEQ ID NO: 19215 - RNA, 18 nt, Artificial Sequence
  Synthetic
gagcuacauauuuuuggg

SEQ ID NO: 19216 - RNA, 20 nt, Artificial Sequence
  Synthetic
gaucgcuuaguggcaaaugg

SEQ ID NO: 19217 - RNA, 22 nt, Artificial Sequence
  Synthetic
gugaucgcuuaguggcaaaugg

SEQ ID NO: 19218 - RNA, 24 nt, Artificial Sequence
  Synthetic
gcgugaucgcuuaguggcaaaugg

SEQ ID NO: 19219 - RNA, 21 nt, Artificial Sequence
  Synthetic
gaccauguggcuugcaaaugg

SEQ ID NO: 19220 - RNA, 19 nt, Artificial Sequence
  Synthetic
gacauccuaacagaaaugg

SEQ ID NO: 19221 - RNA, 20 nt, Artificial Sequence
  Synthetic
ggacauccuaacagaaaugg

SEQ ID NO: 19222 - RNA, 18 nt, Artificial Sequence
  Synthetic
gcauuucaauagaaaugg

SEQ ID NO: 19223 - RNA, 18 nt, Artificial Sequence
  Synthetic
gagaggguguagaaaugg

SEQ ID NO: 19224 - RNA, 21 nt, Artificial Sequence
  Synthetic
guugagaggguguagaaaugg

SEQ ID NO: 19225 - RNA, 22 nt, Artificial Sequence
  Synthetic
guuuauaaaacuagugaaaugg

SEQ ID NO: 19226 - RNA, 20 nt, Artificial Sequence
  Synthetic
gcaacauguugcauaaaugg

SEQ ID NO: 19227 - RNA, 21 nt, Artificial Sequence
  Synthetic
ggcaacauguugcauaaaugg

SEQ ID NO: 19228 - RNA, 20 nt, Artificial Sequence
  Synthetic
gaagaagaugaguagaaugg

SEQ ID NO: 19229 - RNA, 22 nt, Artificial Sequence
  Synthetic
gagaagaagaugaguagaaugg

SEQ ID NO: 19230 - RNA, 18 nt, Artificial Sequence
  Synthetic
gucucuggcagggaaugg

SEQ ID NO: 19231 - RNA, 19 nt, Artificial Sequence
  Synthetic
guuacaauucccugaaugg

SEQ ID NO: 19232 - RNA, 20 nt, Artificial Sequence
  Synthetic
gguuacaauucccugaaugg

SEQ ID NO: 19233 - RNA, 24 nt, Artificial Sequence
  Synthetic
guuuaacuugagagcaaauaaugg

SEQ ID NO: 19234 - RNA, 20 nt, Artificial Sequence
  Synthetic
gucccaaugcccaauaaugg

SEQ ID NO: 19235 - RNA, 23 nt, Artificial Sequence
  Synthetic
gcagucccaaugcccaauaaugg

SEQ ID NO: 19236 - RNA, 20 nt, Artificial Sequence
  Synthetic
gaagacaauuuuuauaaugg

SEQ ID NO: 19237 - RNA, 20 nt, Artificial Sequence
  Synthetic
gauguguuacaugguaaugg

SEQ ID NO: 19238 - RNA, 18 nt, Artificial Sequence
  Synthetic
ggcaauaucacuuaaugg

SEQ ID NO: 19239 - RNA, 24 nt, Artificial Sequence
  Synthetic
guacuaagacaacaacucacaugg

SEQ ID NO: 19240 - RNA, 23 nt, Artificial Sequence
  Synthetic
gauacauacguauagucacaugg

SEQ ID NO: 19241 - RNA, 20 nt, Artificial Sequence
  Synthetic
gcaauccaggauguacaugg

SEQ ID NO: 19242 - RNA, 24 nt, Artificial Sequence
  Synthetic
gcaagcaauccaggauguacaugg

SEQ ID NO: 19243 - RNA, 23 nt, Artificial Sequence
  Synthetic
gaacagcugauacacuuacaugg

SEQ ID NO: 19244 - RNA, 22 nt, Artificial Sequence
  Synthetic
gaucuuuagaacucagccaugg

SEQ ID NO: 19245 - RNA, 24 nt, Artificial Sequence
  Synthetic
gagaucuuuagaacucagccaugg

SEQ ID NO: 19246 - RNA, 23 nt, Artificial Sequence
  Synthetic
gacucuugguucuguugccaugg

SEQ ID NO: 19247 - RNA, 21 nt, Artificial Sequence
  Synthetic
gcaguggacagugaagcaugg

SEQ ID NO: 19248 - RNA, 22 nt, Artificial Sequence
  Synthetic
ggcaguggacagugaagcaugg

SEQ ID NO: 19249 - RNA, 19 nt, Artificial Sequence
  Synthetic
gcaucugagcagggcaugg

SEQ ID NO: 19250 - RNA, 22 nt, Artificial Sequence
  Synthetic
guagcaucugagcagggcaugg

SEQ ID NO: 19251 - RNA, 19 nt, Artificial Sequence
  Synthetic
gcuaucaagcuauucaugg

SEQ ID NO: 19252 - RNA, 24 nt, Artificial Sequence
  Synthetic
gaacagcuaucaagcuauucaugg

SEQ ID NO: 19253 - RNA, 24 nt, Artificial Sequence
  Synthetic
guuaaaauauagucaagaagaugg

SEQ ID NO: 19254 - RNA, 18 nt, Artificial Sequence
  Synthetic
gugcuuucuuuaagaugg

SEQ ID NO: 19255 - RNA, 20 nt, Artificial Sequence
  Synthetic
gugugcuuucuuuaagaugg

SEQ ID NO: 19256 - RNA, 22 nt, Artificial Sequence
  Synthetic
gugugugcuuucuuuaagaugg

SEQ ID NO: 19257 - RNA, 21 nt, Artificial Sequence
  Synthetic
guacauaguuaccaacgaugg

SEQ ID NO: 19258 - RNA, 19 nt, Artificial Sequence
  Synthetic
gaaguaacugaguggaugg

SEQ ID NO: 19259 - RNA, 21 nt, Artificial Sequence
  Synthetic
gagaaguaacugaguggaugg

SEQ ID NO: 19260 - RNA, 23 nt, Artificial Sequence
  Synthetic
gagagaaguaacugaguggaugg

SEQ ID NO: 19261 - RNA, 18 nt, Artificial Sequence
  Synthetic
gcacguauugguugaugg

SEQ ID NO: 19262 - RNA, 21 nt, Artificial Sequence
  Synthetic
gcugcacguauugguugaugg

SEQ ID NO: 19263 - RNA, 22 nt, Artificial Sequence
  Synthetic
ggcugcacguauugguugaugg

SEQ ID NO: 19264 - RNA, 23 nt, Artificial Sequence
  Synthetic
gggcugcacguauugguugaugg

SEQ ID NO: 19265 - RNA, 19 nt, Artificial Sequence
  Synthetic
gcaauuauuacuuugaugg

SEQ ID NO: 19266 - RNA, 23 nt, Artificial Sequence
  Synthetic
guacaaaagcaugcacaauaugg

SEQ ID NO: 19267 - RNA, 18 nt, Artificial Sequence
  Synthetic
ggguacauacucauaugg

SEQ ID NO: 19268 - RNA, 22 nt, Artificial Sequence
  Synthetic
gcaaggguacauacucauaugg

SEQ ID NO: 19269 - RNA, 18 nt, Artificial Sequence
  Synthetic
gguaggagggugauaugg

SEQ ID NO: 19270 - RNA, 20 nt, Artificial Sequence
  Synthetic
gagguaggagggugauaugg

SEQ ID NO: 19271 - RNA, 23 nt, Artificial Sequence
  Synthetic
gcugagguaggagggugauaugg

SEQ ID NO: 19272 - RNA, 20 nt, Artificial Sequence
  Synthetic
gcaggucugugauacuaugg

SEQ ID NO: 19273 - RNA, 24 nt, Artificial Sequence
  Synthetic
gcuugcaggucugugauacuaugg

SEQ ID NO: 19274 - RNA, 18 nt, Artificial Sequence
  Synthetic
guauuuuguggcuuaugg

SEQ ID NO: 19275 - RNA, 19 nt, Artificial Sequence
  Synthetic
gguauuuuguggcuuaugg

SEQ ID NO: 19276 - RNA, 22 nt, Artificial Sequence
  Synthetic
gaagguauuuuguggcuuaugg

SEQ ID NO: 19277 - RNA, 23 nt, Artificial Sequence
  Synthetic
ggaagguauuuuguggcuuaugg

SEQ ID NO: 19278 - RNA, 19 nt, Artificial Sequence
  Synthetic
gacguuguuuucuuuaugg

SEQ ID NO: 19279 - RNA, 20 nt, Artificial Sequence
  Synthetic
ggacguuguuuucuuuaugg

SEQ ID NO: 19280 - RNA, 21 nt, Artificial Sequence
  Synthetic
gggacguuguuuucuuuaugg

SEQ ID NO: 19281 - RNA, 19 nt, Artificial Sequence
  Synthetic
guaaagacuugauaacugg

SEQ ID NO: 19282 - RNA, 21 nt, Artificial Sequence
  Synthetic
gcguaaagacuugauaacugg

SEQ ID NO: 19283 - RNA, 23 nt, Artificial Sequence
  Synthetic
gagcguaaagacuugauaacugg

SEQ ID NO: 19284 - RNA, 19 nt, Artificial Sequence
  Synthetic
gcuucauuaccuucacugg

SEQ ID NO: 19285 - RNA, 22 nt, Artificial Sequence
  Synthetic
guugcuucauuaccuucacugg

SEQ ID NO: 19286 - RNA, 23 nt, Artificial Sequence
  Synthetic
gguugcuucauuaccuucacugg

SEQ ID NO: 19287 - RNA, 23 nt, Artificial Sequence
  Synthetic
gccaacaucugugaugauacugg

SEQ ID NO: 19288 - RNA, 22 nt, Artificial Sequence
  Synthetic
guacaaaccagguuuguacugg

SEQ ID NO: 19289 - RNA, 21 nt, Artificial Sequence
  Synthetic
gaauauaagaguaugcccugg

SEQ ID NO: 19290 - RNA, 22 nt, Artificial Sequence
  Synthetic
ggaauauaagaguaugcccugg

SEQ ID NO: 19291 - RNA, 24 nt, Artificial Sequence
  Synthetic
guggaauauaagaguaugcccugg

SEQ ID NO: 19292 - RNA, 24 nt, Artificial Sequence
  Synthetic
gcauauuccaagauggcagccugg

SEQ ID NO: 19293 - RNA, 19 nt, Artificial Sequence
  Synthetic
gacacuggaaugugccugg

SEQ ID NO: 19294 - RNA, 24 nt, Artificial Sequence
  Synthetic
gcccugacacuggaaugugccugg

SEQ ID NO: 19295 - RNA, 19 nt, Artificial Sequence
  Synthetic
gcauaucggccauuccugg

SEQ ID NO: 19296 - RNA, 23 nt, Artificial Sequence
  Synthetic
gcauucagaaagggcauuccugg

SEQ ID NO: 19297 - RNA, 19 nt, Artificial Sequence
  Synthetic
guccacaugcauuuccugg

SEQ ID NO: 19298 - RNA, 22 nt, Artificial Sequence
  Synthetic
gaaguccacaugcauuuccugg

SEQ ID NO: 19299 - RNA, 24 nt, Artificial Sequence
  Synthetic
gaacuuaacuuucagggaagcugg

SEQ ID NO: 19300 - RNA, 20 nt, Artificial Sequence
  Synthetic
gaaaacagaccacgggcugg

SEQ ID NO: 19301 - RNA, 21 nt, Artificial Sequence
  Synthetic
ggaaaacagaccacgggcugg

SEQ ID NO: 19302 - RNA, 23 nt, Artificial Sequence
  Synthetic
gaggaaaacagaccacgggcugg

SEQ ID NO: 19303 - RNA, 21 nt, Artificial Sequence
  Synthetic
gcucauuccccuuugggcugg

SEQ ID NO: 19304 - RNA, 19 nt, Artificial Sequence
  Synthetic
gccccuggccaauggcugg

SEQ ID NO: 19305 - RNA, 23 nt, Artificial Sequence
  Synthetic
gccagccccuggccaauggcugg

SEQ ID NO: 19306 - RNA, 18 nt, Artificial Sequence
  Synthetic
gcauaaaacauuggcugg

SEQ ID NO: 19307 - RNA, 18 nt, Artificial Sequence
  Synthetic
ggcugguuagccugcugg

SEQ ID NO: 19308 - RNA, 19 nt, Artificial Sequence
  Synthetic
gggcugguuagccugcugg

SEQ ID NO: 19309 - RNA, 23 nt, Artificial Sequence
  Synthetic
gcucgggcugguuagccugcugg

SEQ ID NO: 19310 - RNA, 18 nt, Artificial Sequence
  Synthetic
gagaaacauagcugcugg

SEQ ID NO: 19311 - RNA, 19 nt, Artificial Sequence
  Synthetic
ggagaaacauagcugcugg

SEQ ID NO: 19312 - RNA, 23 nt, Artificial Sequence
  Synthetic
gaaaggagaaacauagcugcugg

SEQ ID NO: 19313 - RNA, 23 nt, Artificial Sequence
  Synthetic
gauuaugaaaacagugcugcugg

SEQ ID NO: 19314 - RNA, 24 nt, Artificial Sequence
  Synthetic
ggauuaugaaaacagugcugcugg

SEQ ID NO: 19315 - RNA, 22 nt, Artificial Sequence
  Synthetic
gacuauacggggagauugcugg

SEQ ID NO: 19316 - RNA, 24 nt, Artificial Sequence
  Synthetic
gaauuuuuaaaagaucacaucugg

SEQ ID NO: 19317 - RNA, 18 nt, Artificial Sequence
  Synthetic
gagaauuuacuuaucugg

SEQ ID NO: 19318 - RNA, 19 nt, Artificial Sequence
  Synthetic
gaucugacacuaucucugg

SEQ ID NO: 19319 - RNA, 20 nt, Artificial Sequence
  Synthetic
ggaucugacacuaucucugg

SEQ ID NO: 19320 - RNA, 21 nt, Artificial Sequence
  Synthetic
gggaucugacacuaucucugg

SEQ ID NO: 19321 - RNA, 18 nt, Artificial Sequence
  Synthetic
gcauguuucaguuucugg

SEQ ID NO: 19322 - RNA, 19 nt, Artificial Sequence
  Synthetic
ggcauguuucaguuucugg

SEQ ID NO: 19323 - RNA, 20 nt, Artificial Sequence
  Synthetic
gaaguuaauaaauaaagugg

SEQ ID NO: 19324 - RNA, 21 nt, Artificial Sequence
  Synthetic
ggaaguuaauaaauaaagugg

SEQ ID NO: 19325 - RNA, 20 nt, Artificial Sequence
  Synthetic
gacugaaacuacacaagugg

SEQ ID NO: 19326 - RNA, 20 nt, Artificial Sequence
  Synthetic
gcuggccaggggagaagugg

SEQ ID NO: 19327 - RNA, 23 nt, Artificial Sequence
  Synthetic
gcagcuggccaggggagaagugg

SEQ ID NO: 19328 - RNA, 21 nt, Artificial Sequence
  Synthetic
gucaccugaggguuucagugg

SEQ ID NO: 19329 - RNA, 22 nt, Artificial Sequence
  Synthetic
ggucaccugaggguuucagugg

SEQ ID NO: 19330 - RNA, 24 nt, Artificial Sequence
  Synthetic
gaggucaccugaggguuucagugg

SEQ ID NO: 19331 - RNA, 20 nt, Artificial Sequence
  Synthetic
guagcauauacacagagugg

SEQ ID NO: 19332 - RNA, 19 nt, Artificial Sequence
  Synthetic
guucagggcuugggagugg

SEQ ID NO: 19333 - RNA, 21 nt, Artificial Sequence
  Synthetic
gaguucagggcuugggagugg

SEQ ID NO: 19334 - RNA, 23 nt, Artificial Sequence
  Synthetic
gauaaccaggauauuaugagugg

SEQ ID NO: 19335 - RNA, 19 nt, Artificial Sequence
  Synthetic
gagagaaguaacugagugg

SEQ ID NO: 19336 - RNA, 21 nt, Artificial Sequence
  Synthetic
gagagagaaguaacugagugg

SEQ ID NO: 19337 - RNA, 23 nt, Artificial Sequence
  Synthetic
gagagagagaaguaacugagugg

SEQ ID NO: 19338 - RNA, 24 nt, Artificial Sequence
  Synthetic
ggagagagagaaguaacugagugg

SEQ ID NO: 19339 - RNA, 22 nt, Artificial Sequence
  Synthetic
guucugcacuucauauuagugg

SEQ ID NO: 19340 - RNA, 20 nt, Artificial Sequence
  Synthetic
gauuuccugaauguuagugg

SEQ ID NO: 19341 - RNA, 19 nt, Artificial Sequence
  Synthetic
gagaaauaguugggcgugg

SEQ ID NO: 19342 - RNA, 18 nt, Artificial Sequence
  Synthetic
guuuaauuuucaaggugg

SEQ ID NO: 19343 - RNA, 18 nt, Artificial Sequence
  Synthetic
gacacuagguacaggugg

SEQ ID NO: 19344 - RNA, 23 nt, Artificial Sequence
  Synthetic
gaauugacacuagguacaggugg

SEQ ID NO: 19345 - RNA, 21 nt, Artificial Sequence
  Synthetic
gcuauaggagguaagaggugg

SEQ ID NO: 19346 - RNA, 23 nt, Artificial Sequence
  Synthetic
gugcuauaggagguaagaggugg

SEQ ID NO: 19347 - RNA, 22 nt, Artificial Sequence
  Synthetic
guaacaaauaacagagaggugg

SEQ ID NO: 19348 - RNA, 21 nt, Artificial Sequence
  Synthetic
gcuucacaaugaucagggugg

SEQ ID NO: 19349 - RNA, 22 nt, Artificial Sequence
  Synthetic
ggcuucacaaugaucagggugg

SEQ ID NO: 19350 - RNA, 23 nt, Artificial Sequence
  Synthetic
gggcuucacaaugaucagggugg

SEQ ID NO: 19351 - RNA, 22 nt, Artificial Sequence
  Synthetic
guauagucacauggaggggugg

SEQ ID NO: 19352 - RNA, 22 nt, Artificial Sequence
  Synthetic
gaaaaagcaaaaaacggggugg

SEQ ID NO: 19353 - RNA, 21 nt, Artificial Sequence
  Synthetic
gaucaaaagcugcaguggugg

SEQ ID NO: 19354 - RNA, 23 nt, Artificial Sequence
  Synthetic
gugaucaaaagcugcaguggugg

SEQ ID NO: 19355 - RNA, 24 nt, Artificial Sequence
  Synthetic
ggugaucaaaagcugcaguggugg

SEQ ID NO: 19356 - RNA, 19 nt, Artificial Sequence
  Synthetic
guuauaacaguguuggugg

SEQ ID NO: 19357 - RNA, 21 nt, Artificial Sequence
  Synthetic
gaguuauaacaguguuggugg

SEQ ID NO: 19358 - RNA, 20 nt, Artificial Sequence
  Synthetic
guauauguagagcaaugugg

SEQ ID NO: 19359 - RNA, 21 nt, Artificial Sequence
  Synthetic
gguauauguagagcaaugugg

SEQ ID NO: 19360 - RNA, 22 nt, Artificial Sequence
  Synthetic
ggguauauguagagcaaugugg

SEQ ID NO: 19361 - RNA, 22 nt, Artificial Sequence
  Synthetic
gaauugacaguuacagaugugg

SEQ ID NO: 19362 - RNA, 21 nt, Artificial Sequence
  Synthetic
gaauuuucaagggggaugugg

SEQ ID NO: 19363 - RNA, 23 nt, Artificial Sequence
  Synthetic
gcccacaaccucgugggaugugg

SEQ ID NO: 19364 - RNA, 18 nt, Artificial Sequence
  Synthetic
guauugcaugguaugugg

SEQ ID NO: 19365 - RNA, 21 nt, Artificial Sequence
  Synthetic
guaguauugcaugguaugugg

SEQ ID NO: 19366 - RNA, 23 nt, Artificial Sequence
  Synthetic
gaguaguauugcaugguaugugg

SEQ ID NO: 19367 - RNA, 20 nt, Artificial Sequence
  Synthetic
gcuaaguaguaacacugugg

SEQ ID NO: 19368 - RNA, 20 nt, Artificial Sequence
  Synthetic
gcauacugggcaugcugugg

SEQ ID NO: 19369 - RNA, 23 nt, Artificial Sequence
  Synthetic
gcagcauacugggcaugcugugg

SEQ ID NO: 19370 - RNA, 18 nt, Artificial Sequence
  Synthetic
gauauguaucuucugugg

SEQ ID NO: 19371 - RNA, 21 nt, Artificial Sequence
  Synthetic
guugauauguaucuucugugg

SEQ ID NO: 19372 - RNA, 20 nt, Artificial Sequence
  Synthetic
gacguaauuaugguuugugg

SEQ ID NO: 19373 - RNA, 21 nt, Artificial Sequence
  Synthetic
ggacguaauuaugguuugugg

SEQ ID NO: 19374 - RNA, 22 nt, Artificial Sequence
  Synthetic
gggacguaauuaugguuugugg

SEQ ID NO: 19375 - RNA, 23 nt, Artificial Sequence
  Synthetic
ggggacguaauuaugguuugugg

SEQ ID NO: 19376 - RNA, 24 nt, Artificial Sequence
  Synthetic
gggggacguaauuaugguuugugg

SEQ ID NO: 19377 - RNA, 20 nt, Artificial Sequence
  Synthetic
gaaaaauauuguaaaauugg

SEQ ID NO: 19378 - RNA, 21 nt, Artificial Sequence
  Synthetic
ggaaaaauauuguaaaauugg

SEQ ID NO: 19379 - RNA, 19 nt, Artificial Sequence
  Synthetic
gauagugguguucaauugg

SEQ ID NO: 19380 - RNA, 21 nt, Artificial Sequence
  Synthetic
gagauagugguguucaauugg

SEQ ID NO: 19381 - RNA, 22 nt, Artificial Sequence
  Synthetic
ggagauagugguguucaauugg

SEQ ID NO: 19382 - RNA, 18 nt, Artificial Sequence
  Synthetic
gugcagaccuuacauugg

SEQ ID NO: 19383 - RNA, 21 nt, Artificial Sequence
  Synthetic
gcugugcagaccuuacauugg

SEQ ID NO: 19384 - RNA, 22 nt, Artificial Sequence
  Synthetic
guauucuucucaaguccauugg

SEQ ID NO: 19385 - RNA, 23 nt, Artificial Sequence
  Synthetic
gguauucuucucaaguccauugg

SEQ ID NO: 19386 - RNA, 24 nt, Artificial Sequence
  Synthetic
ggguauucuucucaaguccauugg

SEQ ID NO: 19387 - RNA, 23 nt, Artificial Sequence
  Synthetic
gaaauuguacaaugacagauugg

SEQ ID NO: 19388 - RNA, 20 nt, Artificial Sequence
  Synthetic
gaaguagaaugggagauugg

SEQ ID NO: 19389 - RNA, 21 nt, Artificial Sequence
  Synthetic
ggaaguagaaugggagauugg

SEQ ID NO: 19390 - RNA, 23 nt, Artificial Sequence
  Synthetic
gaaaacuucuacucuuauauugg

SEQ ID NO: 19391 - RNA, 19 nt, Artificial Sequence
  Synthetic
gcugauugacuaguauugg

SEQ ID NO: 19392 - RNA, 20 nt, Artificial Sequence
  Synthetic
ggcugauugacuaguauugg

SEQ ID NO: 19393 - RNA, 21 nt, Artificial Sequence
  Synthetic
gcaucugguaaugauuauugg

SEQ ID NO: 19394 - RNA, 18 nt, Artificial Sequence
  Synthetic
guuucuuucuucacuugg

SEQ ID NO: 19395 - RNA, 19 nt, Artificial Sequence
  Synthetic
gguuucuuucuucacuugg

SEQ ID NO: 19396 - RNA, 23 nt, Artificial Sequence
  Synthetic
gucuuccuaacuaguaaccuugg

SEQ ID NO: 19397 - RNA, 20 nt, Artificial Sequence
  Synthetic
gaaugcuuauaucaccuugg

SEQ ID NO: 19398 - RNA, 19 nt, Artificial Sequence
  Synthetic
guaagaauaacagccuugg

SEQ ID NO: 19399 - RNA, 20 nt, Artificial Sequence
  Synthetic
gguaagaauaacagccuugg

SEQ ID NO: 19400 - RNA, 22 nt, Artificial Sequence
  Synthetic
gagguaagaauaacagccuugg

SEQ ID NO: 19401 - RNA, 19 nt, Artificial Sequence
  Synthetic
gcucauaugacugccuugg

SEQ ID NO: 19402 - RNA, 19 nt, Artificial Sequence
  Synthetic
guuaccagacauuccuugg

SEQ ID NO: 19403 - RNA, 20 nt, Artificial Sequence
  Synthetic
gguuaccagacauuccuugg

SEQ ID NO: 19404 - RNA, 22 nt, Artificial Sequence
  Synthetic
gagguuaccagacauuccuugg

SEQ ID NO: 19405 - RNA, 23 nt, Artificial Sequence
  Synthetic
ggagguuaccagacauuccuugg

SEQ ID NO: 19406 - RNA, 22 nt, Artificial Sequence
  Synthetic
gacuuuacuuaagccagcuugg

SEQ ID NO: 19407 - RNA, 24 nt, Artificial Sequence
  Synthetic
guaaauugagggaauucugcuugg

SEQ ID NO: 19408 - RNA, 18 nt, Artificial Sequence
  Synthetic
guguacaugacaucuugg

SEQ ID NO: 19409 - RNA, 24 nt, Artificial Sequence
  Synthetic
gucuauguguacaugacaucuugg

SEQ ID NO: 19410 - RNA, 20 nt, Artificial Sequence
  Synthetic
gcuucuauauuguaaguugg

SEQ ID NO: 19411 - RNA, 22 nt, Artificial Sequence
  Synthetic
guacuagcugguaucugguugg

SEQ ID NO: 19412 - RNA, 22 nt, Artificial Sequence
  Synthetic
guuaacuacauuucauuguugg

SEQ ID NO: 19413 - RNA, 18 nt, Artificial Sequence
  Synthetic
gcccuggagaaaauuugg

SEQ ID NO: 19414 - RNA, 19 nt, Artificial Sequence
  Synthetic
ggcccuggagaaaauuugg

SEQ ID NO: 19415 - RNA, 22 nt, Artificial Sequence
  Synthetic
gauguaauaaaaugaaauuugg

SEQ ID NO: 19416 - RNA, 22 nt, Artificial Sequence
  Synthetic
guuccuccaguaacagauuugg

SEQ ID NO: 19417 - RNA, 23 nt, Artificial Sequence
  Synthetic
gguuccuccaguaacagauuugg

SEQ ID NO: 19418 - RNA, 23 nt, Artificial Sequence
  Synthetic
gaauuaagguaaagaauauuugg

SEQ ID NO: 19419 - RNA, 24 nt, Artificial Sequence
  Synthetic
ggaauuaagguaaagaauauuugg

SEQ ID NO: 19420 - RNA, 18 nt, Artificial Sequence
  Synthetic
gacccaucuucccuuugg

SEQ ID NO: 19421 - RNA, 22 nt, Artificial Sequence
  Synthetic
gaaugacccaucuucccuuugg

SEQ ID NO: 19422 - RNA, 21 nt, Artificial Sequence
  Synthetic
guuugaaaauucaugcuuugg

SEQ ID NO: 19423 - RNA, 23 nt, Artificial Sequence
  Synthetic
guguuugaaaauucaugcuuugg

SEQ ID NO: 19424 - RNA, 22 nt, Artificial Sequence
  Synthetic
gcucugauugguuaaucuuugg

SEQ ID NO: 19425 - RNA, 20 nt, Artificial Sequence
  Synthetic
gauagguccugcaucuuugg

SEQ ID NO: 19426 - RNA, 21 nt, Artificial Sequence
  Synthetic
ggauagguccugcaucuuugg

SEQ ID NO: 19427 - RNA, 23 nt, Artificial Sequence
  Synthetic
gaggauagguccugcaucuuugg

SEQ ID NO: 19428 - RNA, 24 nt, Artificial Sequence
  Synthetic
ggaggauagguccugcaucuuugg

SEQ ID NO: 19429 - RNA, 24 nt, Artificial Sequence
  Synthetic
gucauuaaggagccaauaguuugg

SEQ ID NO: 19430 - RNA, 24 nt, Artificial Sequence
  Synthetic
gcuaucugaaacagaugcguuugg

SEQ ID NO: 19431 - RNA, 18 nt, Artificial Sequence
  Synthetic
ggacgcuggcauguuugg

SEQ ID NO: 19432 - RNA, 20 nt, Artificial Sequence
  Synthetic
gaggacgcuggcauguuugg

SEQ ID NO: 19433 - RNA, 19 nt, Artificial Sequence
  Synthetic
gaguuguuuauauguuugg

SEQ ID NO: 19434 - RNA, 22 nt, Artificial Sequence
  Synthetic
gaagaguuguuuauauguuugg

SEQ ID NO: 19435 - RNA, 23 nt, Artificial Sequence
  Synthetic
ggaagaguuguuuauauguuugg

SEQ ID NO: 19436 - RNA, 20 nt, Artificial Sequence
  Synthetic
gcaaaagucuaaguguuugg

SEQ ID NO: 19437 - RNA, 22 nt, Artificial Sequence
  Synthetic
gugcaaaagucuaaguguuugg

SEQ ID NO: 19438 - RNA, 18 nt, Artificial Sequence
  Synthetic
guuucaaagucuuuuugg

SEQ ID NO: 19439 - RNA, 19 nt, Artificial Sequence
  Synthetic
gguuucaaagucuuuuugg

SEQ ID NO: 19440 - RNA, 20 nt, Artificial Sequence
  Synthetic
ggguuucaaagucuuuuugg

SEQ ID NO: 19441 - RNA, 21 nt, Artificial Sequence
  Synthetic
gggguuucaaagucuuuuugg

SEQ ID NO: 19442 - RNA, 22 nt, Artificial Sequence
  Synthetic
ggggguuucaaagucuuuuugg

SEQ ID NO: 19443 - RNA, 24 nt, Artificial Sequence
  Synthetic
guggggguuucaaagucuuuuugg

SEQ ID NO: 19444 - RNA, 22 nt, Artificial Sequence
  Synthetic
gaauucauacuagucuuuuugg

SEQ ID NO: 19445 - RNA, 21 nt, Artificial Sequence
  Synthetic
gacagggauuugacaaaaaug

SEQ ID NO: 19446 - RNA, 23 nt, Artificial Sequence
  Synthetic
gugacagggauuugacaaaaaug

SEQ ID NO: 19447 - RNA, 24 nt, Artificial Sequence
  Synthetic
ggugacagggauuugacaaaaaug

SEQ ID NO: 19448 - RNA, 23 nt, Artificial Sequence
  Synthetic
gcuaaaguuuagagagaaaaaug

SEQ ID NO: 19449 - RNA, 24 nt, Artificial Sequence
  Synthetic
ggcuaaaguuuagagagaaaaaug

SEQ ID NO: 19450 - RNA, 19 nt, Artificial Sequence
  Synthetic
gagggacuuaauaaaaaug

SEQ ID NO: 19451 - RNA, 19 nt, Artificial Sequence
  Synthetic
guuucccuugaacaaaaug

SEQ ID NO: 19452 - RNA, 20 nt, Artificial Sequence
  Synthetic
gguuucccuugaacaaaaug

SEQ ID NO: 19453 - RNA, 18 nt, Artificial Sequence
  Synthetic
gagaauggaaucaaaaug

SEQ ID NO: 19454 - RNA, 20 nt, Artificial Sequence
  Synthetic
gagagaauggaaucaaaaug

SEQ ID NO: 19455 - RNA, 22 nt, Artificial Sequence
  Synthetic
gugagagaauggaaucaaaaug

SEQ ID NO: 19456 - RNA, 18 nt, Artificial Sequence
  Synthetic
guuuauauguagaaaaug

SEQ ID NO: 19457 - RNA, 21 nt, Artificial Sequence
  Synthetic
gcaguuuauauguagaaaaug

SEQ ID NO: 19458 - RNA, 22 nt, Artificial Sequence
  Synthetic
ggcaguuuauauguagaaaaug

SEQ ID NO: 19459 - RNA, 23 nt, Artificial Sequence
  Synthetic
gggcaguuuauauguagaaaaug

SEQ ID NO: 19460 - RNA, 22 nt, Artificial Sequence
  Synthetic
guuccugcacccuuguaaaaug

SEQ ID NO: 19461 - RNA, 19 nt, Artificial Sequence
  Synthetic
gagucuuuaaguuaaaaug

SEQ ID NO: 19462 - RNA, 20 nt, Artificial Sequence
  Synthetic
ggagucuuuaaguuaaaaug

SEQ ID NO: 19463 - RNA, 23 nt, Artificial Sequence
  Synthetic
gacggagucuuuaaguuaaaaug

SEQ ID NO: 19464 - RNA, 24 nt, Artificial Sequence
  Synthetic
gacaauuguuuguuuguuaaaaug

SEQ ID NO: 19465 - RNA, 22 nt, Artificial Sequence
  Synthetic
gaaaccaagaauacaccaaaug

SEQ ID NO: 19466 - RNA, 19 nt, Artificial Sequence
  Synthetic
gugaauaguuuaccaaaug

SEQ ID NO: 19467 - RNA, 21 nt, Artificial Sequence
  Synthetic
gagugaauaguuuaccaaaug

SEQ ID NO: 19468 - RNA, 18 nt, Artificial Sequence
  Synthetic
guuaaguacaugcaaaug

SEQ ID NO: 19469 - RNA, 23 nt, Artificial Sequence
  Synthetic
guccaguuaaguacaugcaaaug

SEQ ID NO: 19470 - RNA, 22 nt, Artificial Sequence
  Synthetic
gaaucuaagaagcucucaaaug

SEQ ID NO: 19471 - RNA, 22 nt, Artificial Sequence
  Synthetic
gaaucagcagaaugaagaaaug

SEQ ID NO: 19472 - RNA, 23 nt, Artificial Sequence
  Synthetic
ggaaucagcagaaugaagaaaug

SEQ ID NO: 19473 - RNA, 21 nt, Artificial Sequence
  Synthetic
gcacgaucugagacagaaaug

SEQ ID NO: 19474 - RNA, 22 nt, Artificial Sequence
  Synthetic
ggcacgaucugagacagaaaug

SEQ ID NO: 19475 - RNA, 19 nt, Artificial Sequence
  Synthetic
gauucagaauccagaaaug

SEQ ID NO: 19476 - RNA, 20 nt, Artificial Sequence
  Synthetic
ggauucagaauccagaaaug

SEQ ID NO: 19477 - RNA, 22 nt, Artificial Sequence
  Synthetic
gaggauucagaauccagaaaug

SEQ ID NO: 19478 - RNA, 20 nt, Artificial Sequence
  Synthetic
gaaugcacaguuuagaaaug

SEQ ID NO: 19479 - RNA, 23 nt, Artificial Sequence
  Synthetic
gaugaaugcacaguuuagaaaug

SEQ ID NO: 19480 - RNA, 21 nt, Artificial Sequence
  Synthetic
guggagagauuaggggaaaug

SEQ ID NO: 19481 - RNA, 22 nt, Artificial Sequence
  Synthetic
gguggagagauuaggggaaaug

SEQ ID NO: 19482 - RNA, 23 nt, Artificial Sequence
  Synthetic
gacacuagacaggcucugaaaug

SEQ ID NO: 19483 - RNA, 24 nt, Artificial Sequence
  Synthetic
ggacacuagacaggcucugaaaug

SEQ ID NO: 19484 - RNA, 19 nt, Artificial Sequence
  Synthetic
gacuguauuaugugaaaug

SEQ ID NO: 19485 - RNA, 21 nt, Artificial Sequence
  Synthetic
gagacuguauuaugugaaaug

SEQ ID NO: 19486 - RNA, 18 nt, Artificial Sequence
  Synthetic
gaucacugcagauaaaug

SEQ ID NO: 19487 - RNA, 21 nt, Artificial Sequence
  Synthetic
guuccugguacaugauaaaug

SEQ ID NO: 19488 - RNA, 24 nt, Artificial Sequence
  Synthetic
gcuguuccugguacaugauaaaug

SEQ ID NO: 19489 - RNA, 22 nt, Artificial Sequence
  Synthetic
gucacauuccagaauauaaaug

SEQ ID NO: 19490 - RNA, 19 nt, Artificial Sequence
  Synthetic
gauaauuaacaucuaaaug

SEQ ID NO: 19491 - RNA, 20 nt, Artificial Sequence
  Synthetic
ggauaauuaacaucuaaaug

SEQ ID NO: 19492 - RNA, 19 nt, Artificial Sequence
  Synthetic
gcaggcaaaauuguaaaug

SEQ ID NO: 19493 - RNA, 21 nt, Artificial Sequence
  Synthetic
gauuccuaggagcauuaaaug

SEQ ID NO: 19494 - RNA, 22 nt, Artificial Sequence
  Synthetic
ggauuccuaggagcauuaaaug

SEQ ID NO: 19495 - RNA, 19 nt, Artificial Sequence
  Synthetic
guagaaugagaagacaaug

SEQ ID NO: 19496 - RNA, 18 nt, Artificial Sequence
  Synthetic
ggggauugucuuacaaug

SEQ ID NO: 19497 - RNA, 18 nt, Artificial Sequence
  Synthetic
gagguggccuuuacaaug

SEQ ID NO: 19498 - RNA, 22 nt, Artificial Sequence
  Synthetic
gaaugagguggccuuuacaaug

SEQ ID NO: 19499 - RNA, 18 nt, Artificial Sequence
  Synthetic
gagauuaagagaccaaug

SEQ ID NO: 19500 - RNA, 18 nt, Artificial Sequence
  Synthetic
ggaagcauuuagccaaug

SEQ ID NO: 19501 - RNA, 24 nt, Artificial Sequence
  Synthetic
guaccaggaagcauuuagccaaug

SEQ ID NO: 19502 - RNA, 22 nt, Artificial Sequence
  Synthetic
gucuaaccucuacucagcaaug

SEQ ID NO: 19503 - RNA, 22 nt, Artificial Sequence
  Synthetic
gauuugaaacuccagugcaaug

SEQ ID NO: 19504 - RNA, 24 nt, Artificial Sequence
  Synthetic
gugauuugaaacuccagugcaaug

SEQ ID NO: 19505 - RNA, 22 nt, Artificial Sequence
  Synthetic
guuuuauagaaucuucucaaug

SEQ ID NO: 19506 - RNA, 21 nt, Artificial Sequence
  Synthetic
ggggaguugcagaugucaaug

SEQ ID NO: 19507 - RNA, 19 nt, Artificial Sequence
  Synthetic
gaaugccuuuauaagaaug

SEQ ID NO: 19508 - RNA, 24 nt, Artificial Sequence
  Synthetic
gucaugaaugccuuuauaagaaug

SEQ ID NO: 19509 - RNA, 20 nt, Artificial Sequence
  Synthetic
gaugugugauacacagaaug

SEQ ID NO: 19510 - RNA, 21 nt, Artificial Sequence
  Synthetic
ggaugugugauacacagaaug

SEQ ID NO: 19511 - RNA, 18 nt, Artificial Sequence
  Synthetic
gggaaacugcugagaaug

SEQ ID NO: 19512 - RNA, 23 nt, Artificial Sequence
  Synthetic
gacaugggaaacugcugagaaug

SEQ ID NO: 19513 - RNA, 20 nt, Artificial Sequence
  Synthetic
gccuugguaaauauagaaug

SEQ ID NO: 19514 - RNA, 20 nt, Artificial Sequence
  Synthetic
guuucacugggguaggaaug

SEQ ID NO: 19515 - RNA, 20 nt, Artificial Sequence
  Synthetic
gauguuaaguauauggaaug

SEQ ID NO: 19516 - RNA, 22 nt, Artificial Sequence
  Synthetic
gauuugguugcagcaaugaaug

SEQ ID NO: 19517 - RNA, 19 nt, Artificial Sequence
  Synthetic
guaaaacagaaacugaaug

SEQ ID NO: 19518 - RNA, 19 nt, Artificial Sequence
  Synthetic
gugguauuugcacugaaug

SEQ ID NO: 19519 - RNA, 20 nt, Artificial Sequence
  Synthetic
ggugguauuugcacugaaug

SEQ ID NO: 19520 - RNA, 22 nt, Artificial Sequence
  Synthetic
gaggugguauuugcacugaaug

SEQ ID NO: 19521 - RNA, 21 nt, Artificial Sequence
  Synthetic
gcaugagaaaauaggugaaug

SEQ ID NO: 19522 - RNA, 21 nt, Artificial Sequence
  Synthetic
gcaaagcuaauuuugugaaug

SEQ ID NO: 19523 - RNA, 23 nt, Artificial Sequence
  Synthetic
gacccacaauuucuuguugaaug

SEQ ID NO: 19524 - RNA, 24 nt, Artificial Sequence
  Synthetic
ggacccacaauuucuuguugaaug

SEQ ID NO: 19525 - RNA, 20 nt, Artificial Sequence
  Synthetic
gccuuugauugaaaauaaug

SEQ ID NO: 19526 - RNA, 19 nt, Artificial Sequence
  Synthetic
gaaccuaugaacaauaaug

SEQ ID NO: 19527 - RNA, 21 nt, Artificial Sequence
  Synthetic
gagaaccuaugaacaauaaug

SEQ ID NO: 19528 - RNA, 19 nt, Artificial Sequence
  Synthetic
gcuuucacagagaauaaug

SEQ ID NO: 19529 - RNA, 22 nt, Artificial Sequence
  Synthetic
gaugcuuucacagagaauaaug

SEQ ID NO: 19530 - RNA, 23 nt, Artificial Sequence
  Synthetic
ggaugcuuucacagagaauaaug

SEQ ID NO: 19531 - RNA, 24 nt, Artificial Sequence
  Synthetic
gggaugcuuucacagagaauaaug

SEQ ID NO: 19532 - RNA, 20 nt, Artificial Sequence
  Synthetic
gucuugcauacuucauaaug

SEQ ID NO: 19533 - RNA, 24 nt, Artificial Sequence
  Synthetic
gcauucuaaacucuaaugauaaug

SEQ ID NO: 19534 - RNA, 22 nt, Artificial Sequence
  Synthetic
gaaucuuacacuucaaguaaug

SEQ ID NO: 19535 - RNA, 24 nt, Artificial Sequence
  Synthetic
gugaaucuuacacuucaaguaaug

SEQ ID NO: 19536 - RNA, 18 nt, Artificial Sequence
  Synthetic
gcuauugucacaguaaug

SEQ ID NO: 19537 - RNA, 18 nt, Artificial Sequence
  Synthetic
gggucuuucccuguaaug

SEQ ID NO: 19538 - RNA, 24 nt, Artificial Sequence
  Synthetic
gaucuugggucuuucccuguaaug

SEQ ID NO: 19539 - RNA, 20 nt, Artificial Sequence
  Synthetic
guuaagaauccccuuuaaug

SEQ ID NO: 19540 - RNA, 21 nt, Artificial Sequence
  Synthetic
gcacauagaaauauuuuaaug

SEQ ID NO: 19541 - RNA, 22 nt, Artificial Sequence
  Synthetic
ggcacauagaaauauuuuaaug

SEQ ID NO: 19542 - RNA, 21 nt, Artificial Sequence
  Synthetic
gcaucuucauauuaaaacaug

SEQ ID NO: 19543 - RNA, 18 nt, Artificial Sequence
  Synthetic
gagaugcuggcaaacaug

SEQ ID NO: 19544 - RNA, 21 nt, Artificial Sequence
  Synthetic
gcugagaugcuggcaaacaug

SEQ ID NO: 19545 - RNA, 24 nt, Artificial Sequence
  Synthetic
gaugcugagaugcuggcaaacaug

SEQ ID NO: 19546 - RNA, 22 nt, Artificial Sequence
  Synthetic
guauuaugguaggggaaacaug

SEQ ID NO: 19547 - RNA, 23 nt, Artificial Sequence
  Synthetic
gguauuaugguaggggaaacaug

SEQ ID NO: 19548 - RNA, 22 nt, Artificial Sequence
  Synthetic
gaaaccagcacucuagaacaug

SEQ ID NO: 19549 - RNA, 18 nt, Artificial Sequence
  Synthetic
ggccuuaaggauaacaug

SEQ ID NO: 19550 - RNA, 22 nt, Artificial Sequence
  Synthetic
gaaaggccuuaaggauaacaug

SEQ ID NO: 19551 - RNA, 24 nt, Artificial Sequence
  Synthetic
gagaaaggccuuaaggauaacaug

SEQ ID NO: 19552 - RNA, 18 nt, Artificial Sequence
  Synthetic
ggagaggaauauaacaug

SEQ ID NO: 19553 - RNA, 19 nt, Artificial Sequence
  Synthetic
gggagaggaauauaacaug

SEQ ID NO: 19554 - RNA, 20 nt, Artificial Sequence
  Synthetic
guauuucaaagcgacacaug

SEQ ID NO: 19555 - RNA, 24 nt, Artificial Sequence
  Synthetic
gucuguauuucaaagcgacacaug

SEQ ID NO: 19556 - RNA, 22 nt, Artificial Sequence
  Synthetic
guaaauauaguuaggacacaug

SEQ ID NO: 19557 - RNA, 18 nt, Artificial Sequence
  Synthetic
guguuuccuguacacaug

SEQ ID NO: 19558 - RNA, 22 nt, Artificial Sequence
  Synthetic
gcacguguuuccuguacacaug

SEQ ID NO: 19559 - RNA, 23 nt, Artificial Sequence
  Synthetic
gcuuuagugaaaaaauccacaug

SEQ ID NO: 19560 - RNA, 22 nt, Artificial Sequence
  Synthetic
gccauauguuuauuuccacaug

SEQ ID NO: 19561 - RNA, 20 nt, Artificial Sequence
  Synthetic
gaugcugcauacuucacaug

SEQ ID NO: 19562 - RNA, 21 nt, Artificial Sequence
  Synthetic
gccacaguugcugaagacaug

SEQ ID NO: 19563 - RNA, 18 nt, Artificial Sequence
  Synthetic
ggaagcaggaaggacaug

SEQ ID NO: 19564 - RNA, 19 nt, Artificial Sequence
  Synthetic
gggaagcaggaaggacaug

SEQ ID NO: 19565 - RNA, 22 nt, Artificial Sequence
  Synthetic
guugggaagcaggaaggacaug

SEQ ID NO: 19566 - RNA, 24 nt, Artificial Sequence
  Synthetic
gaguugggaagcaggaaggacaug

SEQ ID NO: 19567 - RNA, 18 nt, Artificial Sequence
  Synthetic
gacaagugaccugacaug

SEQ ID NO: 19568 - RNA, 19 nt, Artificial Sequence
  Synthetic
gcgaaacauauacuacaug

SEQ ID NO: 19569 - RNA, 20 nt, Artificial Sequence
  Synthetic
ggcgaaacauauacuacaug

SEQ ID NO: 19570 - RNA, 22 nt, Artificial Sequence
  Synthetic
gaggcgaaacauauacuacaug

SEQ ID NO: 19571 - RNA, 23 nt, Artificial Sequence
  Synthetic
ggaggcgaaacauauacuacaug

SEQ ID NO: 19572 - RNA, 24 nt, Artificial Sequence
  Synthetic
gggaggcgaaacauauacuacaug

SEQ ID NO: 19573 - RNA, 19 nt, Artificial Sequence
  Synthetic
gaacaaaaaguucuacaug

SEQ ID NO: 19574 - RNA, 22 nt, Artificial Sequence
  Synthetic
guccaaaacaauaaaaaccaug

SEQ ID NO: 19575 - RNA, 23 nt, Artificial Sequence
  Synthetic
gguccaaaacaauaaaaaccaug

SEQ ID NO: 19576 - RNA, 19 nt, Artificial Sequence
  Synthetic
gccuuuuuauuucgccaug

SEQ ID NO: 19577 - RNA, 21 nt, Artificial Sequence
  Synthetic
gagccuuuuuauuucgccaug

SEQ ID NO: 19578 - RNA, 18 nt, Artificial Sequence
  Synthetic
gaaauuguuauggccaug

SEQ ID NO: 19579 - RNA, 19 nt, Artificial Sequence
  Synthetic
ggaaauuguuauggccaug

SEQ ID NO: 19580 - RNA, 20 nt, Artificial Sequence
  Synthetic
gggaaauuguuauggccaug

SEQ ID NO: 19581 - RNA, 23 nt, Artificial Sequence
  Synthetic
gcuugcuuuucauccacagcaug

SEQ ID NO: 19582 - RNA, 18 nt, Artificial Sequence
  Synthetic
guacauuauuucagcaug

SEQ ID NO: 19583 - RNA, 24 nt, Artificial Sequence
  Synthetic
gaacauguacauuauuucagcaug

SEQ ID NO: 19584 - RNA, 18 nt, Artificial Sequence
  Synthetic
gucagaguacaaggcaug

SEQ ID NO: 19585 - RNA, 19 nt, Artificial Sequence
  Synthetic
guauagacuaucaggcaug

SEQ ID NO: 19586 - RNA, 20 nt, Artificial Sequence
  Synthetic
gguauagacuaucaggcaug

SEQ ID NO: 19587 - RNA, 21 nt, Artificial Sequence
  Synthetic
ggguauagacuaucaggcaug

SEQ ID NO: 19588 - RNA, 18 nt, Artificial Sequence
  Synthetic
ggacugagaugaggcaug

SEQ ID NO: 19589 - RNA, 18 nt, Artificial Sequence
  Synthetic
ggcaaagugccuggcaug

SEQ ID NO: 19590 - RNA, 18 nt, Artificial Sequence
  Synthetic
gugauguaauaaugcaug

SEQ ID NO: 19591 - RNA, 18 nt, Artificial Sequence
  Synthetic
gacagcuuaucaugcaug

SEQ ID NO: 19592 - RNA, 23 nt, Artificial Sequence
  Synthetic
guaaugacagcuuaucaugcaug

SEQ ID NO: 19593 - RNA, 23 nt, Artificial Sequence
  Synthetic
guaacaauggcuuuagaugcaug

SEQ ID NO: 19594 - RNA, 22 nt, Artificial Sequence
  Synthetic
gaaaagguacaucauuugcaug

SEQ ID NO: 19595 - RNA, 24 nt, Artificial Sequence
  Synthetic
gagaaaagguacaucauuugcaug

SEQ ID NO: 19596 - RNA, 20 nt, Artificial Sequence
  Synthetic
gauuaaccuauguuugcaug

SEQ ID NO: 19597 - RNA, 22 nt, Artificial Sequence
  Synthetic
gacauaccagaauuuuugcaug

SEQ ID NO: 19598 - RNA, 19 nt, Artificial Sequence
  Synthetic
guaagagaaaagaaucaug

SEQ ID NO: 19599 - RNA, 24 nt, Artificial Sequence
  Synthetic
guaauguaagagaaaagaaucaug

SEQ ID NO: 19600 - RNA, 22 nt, Artificial Sequence
  Synthetic
gaaacacuguuuacgcaucaug

SEQ ID NO: 19601 - RNA, 23 nt, Artificial Sequence
  Synthetic
ggaaacacuguuuacgcaucaug

SEQ ID NO: 19602 - RNA, 19 nt, Artificial Sequence
  Synthetic
gaacuguaauuuuaucaug

SEQ ID NO: 19603 - RNA, 23 nt, Artificial Sequence
  Synthetic
guaaacugcaaaaggaccucaug

SEQ ID NO: 19604 - RNA, 23 nt, Artificial Sequence
  Synthetic
guuucuuugucuuuccucucaug

SEQ ID NO: 19605 - RNA, 19 nt, Artificial Sequence
  Synthetic
guucuccuggaaauucaug

SEQ ID NO: 19606 - RNA, 24 nt, Artificial Sequence
  Synthetic
guucaguucuccuggaaauucaug

SEQ ID NO: 19607 - RNA, 20 nt, Artificial Sequence
  Synthetic
gauaucccuugaaauucaug

SEQ ID NO: 19608 - RNA, 24 nt, Artificial Sequence
  Synthetic
gucagauaucccuugaaauucaug

SEQ ID NO: 19609 - RNA, 18 nt, Artificial Sequence
  Synthetic
gaaggggccacauucaug

SEQ ID NO: 19610 - RNA, 22 nt, Artificial Sequence
  Synthetic
gucaccaaagggaucauucaug

SEQ ID NO: 19611 - RNA, 18 nt, Artificial Sequence
  Synthetic
guauuuggucauuucaug

SEQ ID NO: 19612 - RNA, 18 nt, Artificial Sequence
  Synthetic
gaacucgacuaaaagaug

SEQ ID NO: 19613 - RNA, 19 nt, Artificial Sequence
  Synthetic
ggaacucgacuaaaagaug

SEQ ID NO: 19614 - RNA, 19 nt, Artificial Sequence
  Synthetic
gucacuggguagaaagaug

SEQ ID NO: 19615 - RNA, 24 nt, Artificial Sequence
  Synthetic
gucaagucacuggguagaaagaug

SEQ ID NO: 19616 - RNA, 21 nt, Artificial Sequence
  Synthetic
gaaauugauuuuuuaaagaug

SEQ ID NO: 19617 - RNA, 22 nt, Artificial Sequence
  Synthetic
ggaaauugauuuuuuaaagaug

SEQ ID NO: 19618 - RNA, 21 nt, Artificial Sequence
  Synthetic
gucuccaaagggaacaagaug

SEQ ID NO: 19619 - RNA, 22 nt, Artificial Sequence
  Synthetic
ggucuccaaagggaacaagaug

SEQ ID NO: 19620 - RNA, 24 nt, Artificial Sequence
  Synthetic
guggucuccaaagggaacaagaug

SEQ ID NO: 19621 - RNA, 18 nt, Artificial Sequence
  Synthetic
gauuuacaagacaagaug

SEQ ID NO: 19622 - RNA, 22 nt, Artificial Sequence
  Synthetic
guagagugcagugaagaagaug

SEQ ID NO: 19623 - RNA, 18 nt, Artificial Sequence
  Synthetic
ggcugugagcugaagaug

SEQ ID NO: 19624 - RNA, 20 nt, Artificial Sequence
  Synthetic
guggcugugagcugaagaug

SEQ ID NO: 19625 - RNA, 22 nt, Artificial Sequence
  Synthetic
guguggcugugagcugaagaug

SEQ ID NO: 19626 - RNA, 24 nt, Artificial Sequence
  Synthetic
gaguguggcugugagcugaagaug

SEQ ID NO: 19627 - RNA, 19 nt, Artificial Sequence
  Synthetic
gccacagccucuuaagaug

SEQ ID NO: 19628 - RNA, 18 nt, Artificial Sequence
  Synthetic
gugaggguagagcagaug

SEQ ID NO: 19629 - RNA, 21 nt, Artificial Sequence
  Synthetic
gcagugaggguagagcagaug

SEQ ID NO: 19630 - RNA, 23 nt, Artificial Sequence
  Synthetic
gugcagugaggguagagcagaug

SEQ ID NO: 19631 - RNA, 22 nt, Artificial Sequence
  Synthetic
gaaauagcucugaucucagaug

SEQ ID NO: 19632 - RNA, 18 nt, Artificial Sequence
  Synthetic
gcuaucacauaugagaug

SEQ ID NO: 19633 - RNA, 20 nt, Artificial Sequence
  Synthetic
gaaaacucccacucuagaug

SEQ ID NO: 19634 - RNA, 18 nt, Artificial Sequence
  Synthetic
gaagaaaacaaguagaug

SEQ ID NO: 19635 - RNA, 19 nt, Artificial Sequence
  Synthetic
ggaagaaaacaaguagaug

SEQ ID NO: 19636 - RNA, 23 nt, Artificial Sequence
  Synthetic
gaauggaagaaaacaaguagaug

SEQ ID NO: 19637 - RNA, 20 nt, Artificial Sequence
  Synthetic
gaugccaauuaacguagaug

SEQ ID NO: 19638 - RNA, 23 nt, Artificial Sequence
  Synthetic
guagaugccaauuaacguagaug

SEQ ID NO: 19639 - RNA, 24 nt, Artificial Sequence
  Synthetic
gguagaugccaauuaacguagaug

SEQ ID NO: 19640 - RNA, 23 nt, Artificial Sequence
  Synthetic
gauaaaaaagcauggcuuagaug

SEQ ID NO: 19641 - RNA, 22 nt, Artificial Sequence
  Synthetic
gccuaaucuagccuacaggaug

SEQ ID NO: 19642 - RNA, 23 nt, Artificial Sequence
  Synthetic
gauuaggaaaaagagccaggaug

SEQ ID NO: 19643 - RNA, 18 nt, Artificial Sequence
  Synthetic
ggaaggccauccaggaug

SEQ ID NO: 19644 - RNA, 20 nt, Artificial Sequence
  Synthetic
gcccagguuuugugaggaug

SEQ ID NO: 19645 - RNA, 24 nt, Artificial Sequence
  Synthetic
guuucuuucaacuucuaucggaug

SEQ ID NO: 19646 - RNA, 18 nt, Artificial Sequence
  Synthetic
gaaagagcugcugggaug

SEQ ID NO: 19647 - RNA, 20 nt, Artificial Sequence
  Synthetic
gagaaagagcugcugggaug

SEQ ID NO: 19648 - RNA, 23 nt, Artificial Sequence
  Synthetic
gaagagaaagagcugcugggaug

SEQ ID NO: 19649 - RNA, 18 nt, Artificial Sequence
  Synthetic
guauucuuaacauggaug

SEQ ID NO: 19650 - RNA, 19 nt, Artificial Sequence
  Synthetic
gguauucuuaacauggaug

SEQ ID NO: 19651 - RNA, 24 nt, Artificial Sequence
  Synthetic
gcacagguauucuuaacauggaug

SEQ ID NO: 19652 - RNA, 23 nt, Artificial Sequence
  Synthetic
guuuccaaacucugggcuggaug

SEQ ID NO: 19653 - RNA, 20 nt, Artificial Sequence
  Synthetic
guuuuugcagagccaugaug

SEQ ID NO: 19654 - RNA, 21 nt, Artificial Sequence
  Synthetic
gaaaaagauaugcagaugaug

SEQ ID NO: 19655 - RNA, 23 nt, Artificial Sequence
  Synthetic
gcgaaaaagauaugcagaugaug

SEQ ID NO: 19656 - RNA, 19 nt, Artificial Sequence
  Synthetic
guuacaaaaauggaugaug

SEQ ID NO: 19657 - RNA, 22 nt, Artificial Sequence
  Synthetic
gucguuacaaaaauggaugaug

SEQ ID NO: 19658 - RNA, 22 nt, Artificial Sequence
  Synthetic
guuaaugcucaggaugaugaug

SEQ ID NO: 19659 - RNA, 20 nt, Artificial Sequence
  Synthetic
guucaccucagggacugaug

SEQ ID NO: 19660 - RNA, 21 nt, Artificial Sequence
  Synthetic
gaguccaggcacagccugaug

SEQ ID NO: 19661 - RNA, 22 nt, Artificial Sequence
  Synthetic
ggaguccaggcacagccugaug

SEQ ID NO: 19662 - RNA, 23 nt, Artificial Sequence
  Synthetic
gccucagaauacaaaagcugaug

SEQ ID NO: 19663 - RNA, 20 nt, Artificial Sequence
  Synthetic
gacagacaggcugucugaug

SEQ ID NO: 19664 - RNA, 21 nt, Artificial Sequence
  Synthetic
ggacagacaggcugucugaug

SEQ ID NO: 19665 - RNA, 24 nt, Artificial Sequence
  Synthetic
gcuggacagacaggcugucugaug

SEQ ID NO: 19666 - RNA, 21 nt, Artificial Sequence
  Synthetic
gucauuggaaugugugugaug

SEQ ID NO: 19667 - RNA, 19 nt, Artificial Sequence
  Synthetic
gagcaagugucuugugaug

SEQ ID NO: 19668 - RNA, 24 nt, Artificial Sequence
  Synthetic
gacuugagcaagugucuugugaug

SEQ ID NO: 19669 - RNA, 23 nt, Artificial Sequence
  Synthetic
gaauacaaauaacuugauugaug

SEQ ID NO: 19670 - RNA, 24 nt, Artificial Sequence
  Synthetic
ggaauacaaauaacuugauugaug

SEQ ID NO: 19671 - RNA, 20 nt, Artificial Sequence
  Synthetic
gaaauagauauuauuugaug

SEQ ID NO: 19672 - RNA, 22 nt, Artificial Sequence
  Synthetic
gagucaccuggaaauuuugaug

SEQ ID NO: 19673 - RNA, 22 nt, Artificial Sequence
  Synthetic
gauuuuucauagucuuuugaug

SEQ ID NO: 19674 - RNA, 22 nt, Artificial Sequence
  Synthetic
gcacugcuucugaaaaaauaug

SEQ ID NO: 19675 - RNA, 20 nt, Artificial Sequence
  Synthetic
gaauacgaauuccaaauaug

SEQ ID NO: 19676 - RNA, 22 nt, Artificial Sequence
  Synthetic
gagaauacgaauuccaaauaug

SEQ ID NO: 19677 - RNA, 24 nt, Artificial Sequence
  Synthetic
gugagaauacgaauuccaaauaug

SEQ ID NO: 19678 - RNA, 18 nt, Artificial Sequence
  Synthetic
ggcacaaccuaacauaug

SEQ ID NO: 19679 - RNA, 19 nt, Artificial Sequence
  Synthetic
gggcacaaccuaacauaug

SEQ ID NO: 19680 - RNA, 24 nt, Artificial Sequence
  Synthetic
gccuagggcacaaccuaacauaug

SEQ ID NO: 19681 - RNA, 21 nt, Artificial Sequence
  Synthetic
gcuugacuuucaggacauaug

SEQ ID NO: 19682 - RNA, 22 nt, Artificial Sequence
  Synthetic
ggcuugacuuucaggacauaug

SEQ ID NO: 19683 - RNA, 22 nt, Artificial Sequence
  Synthetic
guaaaaauaauuuauccauaug

SEQ ID NO: 19684 - RNA, 18 nt, Artificial Sequence
  Synthetic
guagaacuuaggcauaug

SEQ ID NO: 19685 - RNA, 23 nt, Artificial Sequence
  Synthetic
gaaucguagaacuuaggcauaug

SEQ ID NO: 19686 - RNA, 19 nt, Artificial Sequence
  Synthetic
gcagcgggaaggucauaug

SEQ ID NO: 19687 - RNA, 22 nt, Artificial Sequence
  Synthetic
guagcagcgggaaggucauaug

SEQ ID NO: 19688 - RNA, 22 nt, Artificial Sequence
  Synthetic
gaaauagauaacaggucauaug

SEQ ID NO: 19689 - RNA, 23 nt, Artificial Sequence
  Synthetic
ggaaauagauaacaggucauaug

SEQ ID NO: 19690 - RNA, 18 nt, Artificial Sequence
  Synthetic
gagcaaaagauugauaug

SEQ ID NO: 19691 - RNA, 21 nt, Artificial Sequence
  Synthetic
gaaaauugggguaaauauaug

SEQ ID NO: 19692 - RNA, 22 nt, Artificial Sequence
  Synthetic
ggaaaauugggguaaauauaug

SEQ ID NO: 19693 - RNA, 18 nt, Artificial Sequence
  Synthetic
gguuuucaaguauauaug

SEQ ID NO: 19694 - RNA, 21 nt, Artificial Sequence
  Synthetic
gaugguuuucaaguauauaug

SEQ ID NO: 19695 - RNA, 18 nt, Artificial Sequence
  Synthetic
gaucagaauuacuauaug

SEQ ID NO: 19696 - RNA, 19 nt, Artificial Sequence
  Synthetic
ggaucagaauuacuauaug

SEQ ID NO: 19697 - RNA, 23 nt, Artificial Sequence
  Synthetic
gacaggaucagaauuacuauaug

SEQ ID NO: 19698 - RNA, 21 nt, Artificial Sequence
  Synthetic
ggacucauauauauguauaug

SEQ ID NO: 19699 - RNA, 23 nt, Artificial Sequence
  Synthetic
guggacucauauauauguauaug

SEQ ID NO: 19700 - RNA, 20 nt, Artificial Sequence
  Synthetic
gauaaaacccaaaaacuaug

SEQ ID NO: 19701 - RNA, 19 nt, Artificial Sequence
  Synthetic
guccuagaucaaaacuaug

SEQ ID NO: 19702 - RNA, 20 nt, Artificial Sequence
  Synthetic
gguccuagaucaaaacuaug

SEQ ID NO: 19703 - RNA, 22 nt, Artificial Sequence
  Synthetic
gagguccuagaucaaaacuaug

SEQ ID NO: 19704 - RNA, 19 nt, Artificial Sequence
  Synthetic
gaaacuuaagaaaacuaug

SEQ ID NO: 19705 - RNA, 24 nt, Artificial Sequence
  Synthetic
guccugaaacuuaagaaaacuaug

SEQ ID NO: 19706 - RNA, 21 nt, Artificial Sequence
  Synthetic
gcauuaauaaaagucacuaug

SEQ ID NO: 19707 - RNA, 18 nt, Artificial Sequence
  Synthetic
gaugcucaaaauacuaug

SEQ ID NO: 19708 - RNA, 20 nt, Artificial Sequence
  Synthetic
gugaugcucaaaauacuaug

SEQ ID NO: 19709 - RNA, 19 nt, Artificial Sequence
  Synthetic
gacuucauuucuaccuaug

SEQ ID NO: 19710 - RNA, 24 nt, Artificial Sequence
  Synthetic
gacauuuuagaagaaguaccuaug

SEQ ID NO: 19711 - RNA, 18 nt, Artificial Sequence
  Synthetic
gacuagggaguaccuaug

SEQ ID NO: 19712 - RNA, 19 nt, Artificial Sequence
  Synthetic
ggacuagggaguaccuaug

SEQ ID NO: 19713 - RNA, 20 nt, Artificial Sequence
  Synthetic
gcaggauaucauagucuaug

SEQ ID NO: 19714 - RNA, 23 nt, Artificial Sequence
  Synthetic
gaagcaggauaucauagucuaug

SEQ ID NO: 19715 - RNA, 21 nt, Artificial Sequence
  Synthetic
gauuaccuccuuaaaaguaug

SEQ ID NO: 19716 - RNA, 18 nt, Artificial Sequence
  Synthetic
guccuggccgagaguaug

SEQ ID NO: 19717 - RNA, 22 nt, Artificial Sequence
  Synthetic
gucuguccuggccgagaguaug

SEQ ID NO: 19718 - RNA, 22 nt, Artificial Sequence
  Synthetic
gcaauuuuauuaugugaguaug

SEQ ID NO: 19719 - RNA, 24 nt, Artificial Sequence
  Synthetic
gugcaauuuuauuaugugaguaug

SEQ ID NO: 19720 - RNA, 19 nt, Artificial Sequence
  Synthetic
gagauuguacagggguaug

SEQ ID NO: 19721 - RNA, 22 nt, Artificial Sequence
  Synthetic
gaugagauuguacagggguaug

SEQ ID NO: 19722 - RNA, 18 nt, Artificial Sequence
  Synthetic
gagaaggugcuuuguaug

SEQ ID NO: 19723 - RNA, 20 nt, Artificial Sequence
  Synthetic
gugagaaggugcuuuguaug

SEQ ID NO: 19724 - RNA, 23 nt, Artificial Sequence
  Synthetic
gcagugagaaggugcuuuguaug

SEQ ID NO: 19725 - RNA, 18 nt, Artificial Sequence
  Synthetic
ggcaaagggaggauuaug

SEQ ID NO: 19726 - RNA, 20 nt, Artificial Sequence
  Synthetic
gaggcaaagggaggauuaug

SEQ ID NO: 19727 - RNA, 24 nt, Artificial Sequence
  Synthetic
guaaauuccuaugcuuaccuuaug

SEQ ID NO: 19728 - RNA, 19 nt, Artificial Sequence
  Synthetic
gaugaugaguggccuuaug

SEQ ID NO: 19729 - RNA, 20 nt, Artificial Sequence
  Synthetic
ggaugaugaguggccuuaug

SEQ ID NO: 19730 - RNA, 21 nt, Artificial Sequence
  Synthetic
gaaaggaagguuuuaguuaug

SEQ ID NO: 19731 - RNA, 23 nt, Artificial Sequence
  Synthetic
guaucagugcuucacaauuuaug

SEQ ID NO: 19732 - RNA, 20 nt, Artificial Sequence
  Synthetic
gcaggaagccccacuuuaug

SEQ ID NO: 19733 - RNA, 18 nt, Artificial Sequence
  Synthetic
ggauaguuuuguuuuaug

SEQ ID NO: 19734 - RNA, 18 nt, Artificial Sequence
  Synthetic
ggcaggcuaauuuuuaug

SEQ ID NO: 19735 - RNA, 20 nt, Artificial Sequence
  Synthetic
guggcaggcuaauuuuuaug

SEQ ID NO: 19736 - RNA, 19 nt, Artificial Sequence
  Synthetic
gagaccuagaaaaaaacug

SEQ ID NO: 19737 - RNA, 23 nt, Artificial Sequence
  Synthetic
guaagagaccuagaaaaaaacug

SEQ ID NO: 19738 - RNA, 24 nt, Artificial Sequence
  Synthetic
gguaagagaccuagaaaaaaacug

SEQ ID NO: 19739 - RNA, 22 nt, Artificial Sequence
  Synthetic
guuucacucauuuaaaaaacug

SEQ ID NO: 19740 - RNA, 23 nt, Artificial Sequence
  Synthetic
gguuucacucauuuaaaaaacug

SEQ ID NO: 19741 - RNA, 20 nt, Artificial Sequence
  Synthetic
guacaaaucccugaaaacug

SEQ ID NO: 19742 - RNA, 21 nt, Artificial Sequence
  Synthetic
gguacaaaucccugaaaacug

SEQ ID NO: 19743 - RNA, 18 nt, Artificial Sequence
  Synthetic
gauuaccuuuuaaaacug

SEQ ID NO: 19744 - RNA, 19 nt, Artificial Sequence
  Synthetic
gugaacgcgaaagaaacug

SEQ ID NO: 19745 - RNA, 19 nt, Artificial Sequence
  Synthetic
guucuugagauggaaacug

SEQ ID NO: 19746 - RNA, 21 nt, Artificial Sequence
  Synthetic
gaguucuugagauggaaacug

SEQ ID NO: 19747 - RNA, 19 nt, Artificial Sequence
  Synthetic
gcuuccaaugccacaacug

SEQ ID NO: 19748 - RNA, 22 nt, Artificial Sequence
  Synthetic
gcugcuuccaaugccacaacug

SEQ ID NO: 19749 - RNA, 18 nt, Artificial Sequence
  Synthetic
gugaaaaaagcccaacug

SEQ ID NO: 19750 - RNA, 24 nt, Artificial Sequence
  Synthetic
guauuugugaaaaaagcccaacug

SEQ ID NO: 19751 - RNA, 21 nt, Artificial Sequence
  Synthetic
gcucuguuacagcaucaacug

SEQ ID NO: 19752 - RNA, 19 nt, Artificial Sequence
  Synthetic
gugcacugguucagaacug

SEQ ID NO: 19753 - RNA, 18 nt, Artificial Sequence
  Synthetic
gacaucuaaguggaacug

SEQ ID NO: 19754 - RNA, 20 nt, Artificial Sequence
  Synthetic
gagacaucuaaguggaacug

SEQ ID NO: 19755 - RNA, 21 nt, Artificial Sequence
  Synthetic
gauagggauauaugauaacug

SEQ ID NO: 19756 - RNA, 22 nt, Artificial Sequence
  Synthetic
ggauagggauauaugauaacug

SEQ ID NO: 19757 - RNA, 21 nt, Artificial Sequence
  Synthetic
gcuucagaguuacccuaacug

SEQ ID NO: 19758 - RNA, 20 nt, Artificial Sequence
  Synthetic
guugacugucucauuaacug

SEQ ID NO: 19759 - RNA, 21 nt, Artificial Sequence
  Synthetic
gguugacugucucauuaacug

SEQ ID NO: 19760 - RNA, 22 nt, Artificial Sequence
  Synthetic
ggguugacugucucauuaacug

SEQ ID NO: 19761 - RNA, 18 nt, Artificial Sequence
  Synthetic
gaauaguguuggacacug

SEQ ID NO: 19762 - RNA, 21 nt, Artificial Sequence
  Synthetic
guaagauggaaguugacacug

SEQ ID NO: 19763 - RNA, 23 nt, Artificial Sequence
  Synthetic
guguaagauggaaguugacacug

SEQ ID NO: 19764 - RNA, 20 nt, Artificial Sequence
  Synthetic
gaucauaucaaaagccacug

SEQ ID NO: 19765 - RNA, 23 nt, Artificial Sequence
  Synthetic
gauuuuaaauaauauguccacug

SEQ ID NO: 19766 - RNA, 21 nt, Artificial Sequence
  Synthetic
guuaccuuacacaaagcacug

SEQ ID NO: 19767 - RNA, 20 nt, Artificial Sequence
  Synthetic
gcuaauacucagagucacug

SEQ ID NO: 19768 - RNA, 23 nt, Artificial Sequence
  Synthetic
gcagcuaauacucagagucacug

SEQ ID NO: 19769 - RNA, 22 nt, Artificial Sequence
  Synthetic
gauccaaagcugagugucacug

SEQ ID NO: 19770 - RNA, 19 nt, Artificial Sequence
  Synthetic
guuuuuccucuauucacug

SEQ ID NO: 19771 - RNA, 20 nt, Artificial Sequence
  Synthetic
gguuuuuccucuauucacug

SEQ ID NO: 19772 - RNA, 22 nt, Artificial Sequence
  Synthetic
gucuaaauauagaaguucacug

SEQ ID NO: 19773 - RNA, 23 nt, Artificial Sequence
  Synthetic
ggucuaaauauagaaguucacug

SEQ ID NO: 19774 - RNA, 18 nt, Artificial Sequence
  Synthetic
gaucuggcuauuucacug

SEQ ID NO: 19775 - RNA, 23 nt, Artificial Sequence
  Synthetic
gcacagaucuggcuauuucacug

SEQ ID NO: 19776 - RNA, 24 nt, Artificial Sequence
  Synthetic
ggcacagaucuggcuauuucacug

SEQ ID NO: 19777 - RNA, 23 nt, Artificial Sequence
  Synthetic
gucccuacuucaaggcaagacug

SEQ ID NO: 19778 - RNA, 19 nt, Artificial Sequence
  Synthetic
gccaguggugaagagacug

SEQ ID NO: 19779 - RNA, 21 nt, Artificial Sequence
  Synthetic
gagccaguggugaagagacug

SEQ ID NO: 19780 - RNA, 23 nt, Artificial Sequence
  Synthetic
gagagccaguggugaagagacug

SEQ ID NO: 19781 - RNA, 24 nt, Artificial Sequence
  Synthetic
ggagagccaguggugaagagacug

SEQ ID NO: 19782 - RNA, 20 nt, Artificial Sequence
  Synthetic
gcauccaagauaagagacug

SEQ ID NO: 19783 - RNA, 21 nt, Artificial Sequence
  Synthetic
ggcauccaagauaagagacug

SEQ ID NO: 19784 - RNA, 21 nt, Artificial Sequence
  Synthetic
gagggaagaaacaguagacug

SEQ ID NO: 19785 - RNA, 22 nt, Artificial Sequence
  Synthetic
ggagggaagaaacaguagacug

SEQ ID NO: 19786 - RNA, 21 nt, Artificial Sequence
  Synthetic
ggccacucuaucuuuagacug

SEQ ID NO: 19787 - RNA, 23 nt, Artificial Sequence
  Synthetic
guuaaaucuaacucugaugacug

SEQ ID NO: 19788 - RNA, 22 nt, Artificial Sequence
  Synthetic
gcuauaugagcagaacugacug

SEQ ID NO: 19789 - RNA, 20 nt, Artificial Sequence
  Synthetic
guaauugaaaaaauauacug

SEQ ID NO: 19790 - RNA, 23 nt, Artificial Sequence
  Synthetic
gauguaauugaaaaaauauacug

SEQ ID NO: 19791 - RNA, 24 nt, Artificial Sequence
  Synthetic
ggauguaauugaaaaaauauacug

SEQ ID NO: 19792 - RNA, 21 nt, Artificial Sequence
  Synthetic
gcacagugcacugauauacug

SEQ ID NO: 19793 - RNA, 20 nt, Artificial Sequence
  Synthetic
gauguuauauuacccuacug

SEQ ID NO: 19794 - RNA, 18 nt, Artificial Sequence
  Synthetic
ggcuacgggaagcuacug

SEQ ID NO: 19795 - RNA, 20 nt, Artificial Sequence
  Synthetic
gaggcuacgggaagcuacug

SEQ ID NO: 19796 - RNA, 21 nt, Artificial Sequence
  Synthetic
ggaggcuacgggaagcuacug

SEQ ID NO: 19797 - RNA, 24 nt, Artificial Sequence
  Synthetic
gcuggaggcuacgggaagcuacug

SEQ ID NO: 19798 - RNA, 20 nt, Artificial Sequence
  Synthetic
gaauggauaugaaucuacug

SEQ ID NO: 19799 - RNA, 23 nt, Artificial Sequence
  Synthetic
gaugaauggauaugaaucuacug

SEQ ID NO: 19800 - RNA, 18 nt, Artificial Sequence
  Synthetic
gccugagguauaguacug

SEQ ID NO: 19801 - RNA, 19 nt, Artificial Sequence
  Synthetic
ggccugagguauaguacug

SEQ ID NO: 19802 - RNA, 21 nt, Artificial Sequence
  Synthetic
guggccugagguauaguacug

SEQ ID NO: 19803 - RNA, 23 nt, Artificial Sequence
  Synthetic
gucgggagcuacccuguguacug

SEQ ID NO: 19804 - RNA, 21 nt, Artificial Sequence
  Synthetic
gacauauaauguuguguacug

SEQ ID NO: 19805 - RNA, 20 nt, Artificial Sequence
  Synthetic
guuucaugcaggcauuacug

SEQ ID NO: 19806 - RNA, 24 nt, Artificial Sequence
  Synthetic
guuuguuucaugcaggcauuacug

SEQ ID NO: 19807 - RNA, 23 nt, Artificial Sequence
  Synthetic
guuuucaagucaauggauuacug

SEQ ID NO: 19808 - RNA, 18 nt, Artificial Sequence
  Synthetic
gcagguaucuaagaccug

SEQ ID NO: 19809 - RNA, 18 nt, Artificial Sequence
  Synthetic
gucauauuucaauaccug

SEQ ID NO: 19810 - RNA, 23 nt, Artificial Sequence
  Synthetic
gacaugucauauuucaauaccug

SEQ ID NO: 19811 - RNA, 18 nt, Artificial Sequence
  Synthetic
gcaaacaagguaacccug

SEQ ID NO: 19812 - RNA, 22 nt, Artificial Sequence
  Synthetic
gaaagcaaacaagguaacccug

SEQ ID NO: 19813 - RNA, 23 nt, Artificial Sequence
  Synthetic
ggaaagcaaacaagguaacccug

SEQ ID NO: 19814 - RNA, 19 nt, Artificial Sequence
  Synthetic
gugugucuuauuuucccug

SEQ ID NO: 19815 - RNA, 21 nt, Artificial Sequence
  Synthetic
gauaguugagaagaaagccug

SEQ ID NO: 19816 - RNA, 24 nt, Artificial Sequence
  Synthetic
gaagauaguugagaagaaagccug

SEQ ID NO: 19817 - RNA, 23 nt, Artificial Sequence
  Synthetic
gccugagcaauacaaugagccug

SEQ ID NO: 19818 - RNA, 22 nt, Artificial Sequence
  Synthetic
gcuauggaacuaugcuagccug

SEQ ID NO: 19819 - RNA, 22 nt, Artificial Sequence
  Synthetic
gucaucagucacagguugccug

SEQ ID NO: 19820 - RNA, 21 nt, Artificial Sequence
  Synthetic
gucuuuuagcaauguugccug

SEQ ID NO: 19821 - RNA, 21 nt, Artificial Sequence
  Synthetic
gucacacuauacaagauccug

SEQ ID NO: 19822 - RNA, 22 nt, Artificial Sequence
  Synthetic
ggucacacuauacaagauccug

SEQ ID NO: 19823 - RNA, 23 nt, Artificial Sequence
  Synthetic
gggucacacuauacaagauccug

SEQ ID NO: 19824 - RNA, 22 nt, Artificial Sequence
  Synthetic
guccucagagacuauuauccug

SEQ ID NO: 19825 - RNA, 21 nt, Artificial Sequence
  Synthetic
gaaauucguacauaucuccug

SEQ ID NO: 19826 - RNA, 23 nt, Artificial Sequence
  Synthetic
guauaauaauaaaaccuguccug

SEQ ID NO: 19827 - RNA, 23 nt, Artificial Sequence
  Synthetic
gauuuugcagucaauauuuccug

SEQ ID NO: 19828 - RNA, 18 nt, Artificial Sequence
  Synthetic
guaauaggagaaaagcug

SEQ ID NO: 19829 - RNA, 23 nt, Artificial Sequence
  Synthetic
guuucguaauaggagaaaagcug

SEQ ID NO: 19830 - RNA, 21 nt, Artificial Sequence
  Synthetic
guuauuagaauuuuaaagcug

SEQ ID NO: 19831 - RNA, 23 nt, Artificial Sequence
  Synthetic
gaguuauuagaauuuuaaagcug

SEQ ID NO: 19832 - RNA, 19 nt, Artificial Sequence
  Synthetic
gauaccauucaccaagcug

SEQ ID NO: 19833 - RNA, 20 nt, Artificial Sequence
  Synthetic
gaaacucugugaagaagcug

SEQ ID NO: 19834 - RNA, 21 nt, Artificial Sequence
  Synthetic
gcuccccuuaaaguacagcug

SEQ ID NO: 19835 - RNA, 24 nt, Artificial Sequence
  Synthetic
gauaucaacauuaagcagcagcug

SEQ ID NO: 19836 - RNA, 21 nt, Artificial Sequence
  Synthetic
guaaguggcauaagucagcug

SEQ ID NO: 19837 - RNA, 24 nt, Artificial Sequence
  Synthetic
gaaguaaguggcauaagucagcug

SEQ ID NO: 19838 - RNA, 20 nt, Artificial Sequence
  Synthetic
gaacauuccucagagagcug

SEQ ID NO: 19839 - RNA, 21 nt, Artificial Sequence
  Synthetic
ggaacauuccucagagagcug

SEQ ID NO: 19840 - RNA, 22 nt, Artificial Sequence
  Synthetic
gggaacauuccucagagagcug

SEQ ID NO: 19841 - RNA, 22 nt, Artificial Sequence
  Synthetic
gccucagaaguaggcauagcug

SEQ ID NO: 19842 - RNA, 21 nt, Artificial Sequence
  Synthetic
guuucacaauaacauuagcug

SEQ ID NO: 19843 - RNA, 23 nt, Artificial Sequence
  Synthetic
guguuucacaauaacauuagcug

SEQ ID NO: 19844 - RNA, 19 nt, Artificial Sequence
  Synthetic
gauauaaccccaaaggcug

SEQ ID NO: 19845 - RNA, 20 nt, Artificial Sequence
  Synthetic
ggauauaaccccaaaggcug

SEQ ID NO: 19846 - RNA, 22 nt, Artificial Sequence
  Synthetic
gaggauauaaccccaaaggcug

SEQ ID NO: 19847 - RNA, 18 nt, Artificial Sequence
  Synthetic
guaaacuuggaaaggcug

SEQ ID NO: 19848 - RNA, 20 nt, Artificial Sequence
  Synthetic
gaguaaacuuggaaaggcug

SEQ ID NO: 19849 - RNA, 23 nt, Artificial Sequence
  Synthetic
gaagaguaaacuuggaaaggcug

SEQ ID NO: 19850 - RNA, 21 nt, Artificial Sequence
  Synthetic
gacucugacaaaugaaggcug

SEQ ID NO: 19851 - RNA, 18 nt, Artificial Sequence
  Synthetic
gcacugccaaauaugcug

SEQ ID NO: 19852 - RNA, 19 nt, Artificial Sequence
  Synthetic
ggcacugccaaauaugcug

SEQ ID NO: 19853 - RNA, 23 nt, Artificial Sequence
  Synthetic
guacagucuuggugcagcugcug

SEQ ID NO: 19854 - RNA, 24 nt, Artificial Sequence
  Synthetic
gguacagucuuggugcagcugcug

SEQ ID NO: 19855 - RNA, 21 nt, Artificial Sequence
  Synthetic
gcuagucaucauucucugcug

SEQ ID NO: 19856 - RNA, 23 nt, Artificial Sequence
  Synthetic
gugcuagucaucauucucugcug

SEQ ID NO: 19857 - RNA, 24 nt, Artificial Sequence
  Synthetic
ggugcuagucaucauucucugcug

SEQ ID NO: 19858 - RNA, 21 nt, Artificial Sequence
  Synthetic
guuaguuuucacugagugcug

SEQ ID NO: 19859 - RNA, 23 nt, Artificial Sequence
  Synthetic
gaguuaguuuucacugagugcug

SEQ ID NO: 19860 - RNA, 23 nt, Artificial Sequence
  Synthetic
guaacaagaaaaauauauugcug

SEQ ID NO: 19861 - RNA, 21 nt, Artificial Sequence
  Synthetic
gaaaauaaguacauuuugcug

SEQ ID NO: 19862 - RNA, 23 nt, Artificial Sequence
  Synthetic
gagaaaauaaguacauuuugcug

SEQ ID NO: 19863 - RNA, 20 nt, Artificial Sequence
  Synthetic
gaaaaucauaauuaaaucug

SEQ ID NO: 19864 - RNA, 23 nt, Artificial Sequence
  Synthetic
gcucauuucuuaucugcaaucug

SEQ ID NO: 19865 - RNA, 24 nt, Artificial Sequence
  Synthetic
ggcucauuucuuaucugcaaucug

SEQ ID NO: 19866 - RNA, 22 nt, Artificial Sequence
  Synthetic
guuaacuuauuuacauaaucug

SEQ ID NO: 19867 - RNA, 22 nt, Artificial Sequence
  Synthetic
gccauucagugcccaacaucug

SEQ ID NO: 19868 - RNA, 18 nt, Artificial Sequence
  Synthetic
guacuucacaaauaucug

SEQ ID NO: 19869 - RNA, 22 nt, Artificial Sequence
  Synthetic
gaaauccugggcugaaacucug

SEQ ID NO: 19870 - RNA, 18 nt, Artificial Sequence
  Synthetic
guucucaggacuacucug

SEQ ID NO: 19871 - RNA, 20 nt, Artificial Sequence
  Synthetic
gcccuagauuuaguccucug

SEQ ID NO: 19872 - RNA, 19 nt, Artificial Sequence
  Synthetic
guugccucacuguccucug

SEQ ID NO: 19873 - RNA, 20 nt, Artificial Sequence
  Synthetic
gguugccucacuguccucug

SEQ ID NO: 19874 - RNA, 21 nt, Artificial Sequence
  Synthetic
ggguugccucacuguccucug

SEQ ID NO: 19875 - RNA, 18 nt, Artificial Sequence
  Synthetic
guggaaugaagagcucug

SEQ ID NO: 19876 - RNA, 19 nt, Artificial Sequence
  Synthetic
gguggaaugaagagcucug

SEQ ID NO: 19877 - RNA, 20 nt, Artificial Sequence
  Synthetic
ggguggaaugaagagcucug

SEQ ID NO: 19878 - RNA, 22 nt, Artificial Sequence
  Synthetic
gccaucagugaaaaaugcucug

SEQ ID NO: 19879 - RNA, 20 nt, Artificial Sequence
  Synthetic
gauuucagcgacccucucug

SEQ ID NO: 19880 - RNA, 22 nt, Artificial Sequence
  Synthetic
gagauuucagcgacccucucug

SEQ ID NO: 19881 - RNA, 24 nt, Artificial Sequence
  Synthetic
gugagauuucagcgacccucucug

SEQ ID NO: 19882 - RNA, 19 nt, Artificial Sequence
  Synthetic
gacgauaagggagucucug

SEQ ID NO: 19883 - RNA, 21 nt, Artificial Sequence
  Synthetic
gagacgauaagggagucucug

SEQ ID NO: 19884 - RNA, 23 nt, Artificial Sequence
  Synthetic
gugagacgauaagggagucucug

SEQ ID NO: 19885 - RNA, 24 nt, Artificial Sequence
  Synthetic
ggugagacgauaagggagucucug

SEQ ID NO: 19886 - RNA, 18 nt, Artificial Sequence
  Synthetic
gccaggugaaggagucug

SEQ ID NO: 19887 - RNA, 20 nt, Artificial Sequence
  Synthetic
gagccaggugaaggagucug

SEQ ID NO: 19888 - RNA, 22 nt, Artificial Sequence
  Synthetic
gagagccaggugaaggagucug

SEQ ID NO: 19889 - RNA, 23 nt, Artificial Sequence
  Synthetic
ggagagccaggugaaggagucug

SEQ ID NO: 19890 - RNA, 20 nt, Artificial Sequence
  Synthetic
gaaauugcauuucuagucug

SEQ ID NO: 19891 - RNA, 23 nt, Artificial Sequence
  Synthetic
gcagaaauugcauuucuagucug

SEQ ID NO: 19892 - RNA, 18 nt, Artificial Sequence
  Synthetic
ggcuuuuucuguagucug

SEQ ID NO: 19893 - RNA, 19 nt, Artificial Sequence
  Synthetic
gggcuuuuucuguagucug

SEQ ID NO: 19894 - RNA, 20 nt, Artificial Sequence
  Synthetic
ggggcuuuuucuguagucug

SEQ ID NO: 19895 - RNA, 24 nt, Artificial Sequence
  Synthetic
gcuuggggcuuuuucuguagucug

SEQ ID NO: 19896 - RNA, 19 nt, Artificial Sequence
  Synthetic
gaguguauuaaauggucug

SEQ ID NO: 19897 - RNA, 22 nt, Artificial Sequence
  Synthetic
gcagaguguauuaaauggucug

SEQ ID NO: 19898 - RNA, 23 nt, Artificial Sequence
  Synthetic
ggcagaguguauuaaauggucug

SEQ ID NO: 19899 - RNA, 24 nt, Artificial Sequence
  Synthetic
gggcagaguguauuaaauggucug

SEQ ID NO: 19900 - RNA, 21 nt, Artificial Sequence
  Synthetic
gcccuuucgacuucuggucug

SEQ ID NO: 19901 - RNA, 24 nt, Artificial Sequence
  Synthetic
gaagcccuuucgacuucuggucug

SEQ ID NO: 19902 - RNA, 24 nt, Artificial Sequence
  Synthetic
gacuaugguccccaaauaugucug

SEQ ID NO: 19903 - RNA, 20 nt, Artificial Sequence
  Synthetic
gaagaggucaaaagugucug

SEQ ID NO: 19904 - RNA, 21 nt, Artificial Sequence
  Synthetic
ggaagaggucaaaagugucug

SEQ ID NO: 19905 - RNA, 24 nt, Artificial Sequence
  Synthetic
gucucuuaaauguacuaaauucug

SEQ ID NO: 19906 - RNA, 20 nt, Artificial Sequence
  Synthetic
gacggauuaacuucauucug

SEQ ID NO: 19907 - RNA, 21 nt, Artificial Sequence
  Synthetic
ggacggauuaacuucauucug

SEQ ID NO: 19908 - RNA, 22 nt, Artificial Sequence
  Synthetic
gggacggauuaacuucauucug

SEQ ID NO: 19909 - RNA, 23 nt, Artificial Sequence
  Synthetic
ggggacggauuaacuucauucug

SEQ ID NO: 19910 - RNA, 18 nt, Artificial Sequence
  Synthetic
gaccaggccuucauucug

SEQ ID NO: 19911 - RNA, 20 nt, Artificial Sequence
  Synthetic
gagaccaggccuucauucug

SEQ ID NO: 19912 - RNA, 24 nt, Artificial Sequence
  Synthetic
gcaugagaccaggccuucauucug

SEQ ID NO: 19913 - RNA, 21 nt, Artificial Sequence
  Synthetic
gcacaaaugaagccgauucug

SEQ ID NO: 19914 - RNA, 22 nt, Artificial Sequence
  Synthetic
ggcacaaaugaagccgauucug

SEQ ID NO: 19915 - RNA, 19 nt, Artificial Sequence
  Synthetic
gcugcuuguuucacuucug

SEQ ID NO: 19916 - RNA, 21 nt, Artificial Sequence
  Synthetic
gugcugcuuguuucacuucug

SEQ ID NO: 19917 - RNA, 23 nt, Artificial Sequence
  Synthetic
gauaucuuccaaauuuccuucug

SEQ ID NO: 19918 - RNA, 20 nt, Artificial Sequence
  Synthetic
gaugaugaacccaucuucug

SEQ ID NO: 19919 - RNA, 22 nt, Artificial Sequence
  Synthetic
guagagcaaauucuuucuucug

SEQ ID NO: 19920 - RNA, 18 nt, Artificial Sequence
  Synthetic
ggcuuuaaguagguucug

SEQ ID NO: 19921 - RNA, 21 nt, Artificial Sequence
  Synthetic
gcaggcuuuaaguagguucug

SEQ ID NO: 19922 - RNA, 18 nt, Artificial Sequence
  Synthetic
gugcuauucaaauuucug

SEQ ID NO: 19923 - RNA, 20 nt, Artificial Sequence
  Synthetic
gugugcuauucaaauuucug

SEQ ID NO: 19924 - RNA, 18 nt, Artificial Sequence
  Synthetic
guucuuuguuaauuucug

SEQ ID NO: 19925 - RNA, 20 nt, Artificial Sequence
  Synthetic
guguucuuuguuaauuucug

SEQ ID NO: 19926 - RNA, 23 nt, Artificial Sequence
  Synthetic
gaauaugaacauaugcauuucug

SEQ ID NO: 19927 - RNA, 24 nt, Artificial Sequence
  Synthetic
ggaauaugaacauaugcauuucug

SEQ ID NO: 19928 - RNA, 18 nt, Artificial Sequence
  Synthetic
gagagauaaggcuuucug

SEQ ID NO: 19929 - RNA, 23 nt, Artificial Sequence
  Synthetic
gaaaugagagauaaggcuuucug

SEQ ID NO: 19930 - RNA, 18 nt, Artificial Sequence
  Synthetic
ggcucuacuauuuuucug

SEQ ID NO: 19931 - RNA, 20 nt, Artificial Sequence
  Synthetic
guggcucuacuauuuuucug

SEQ ID NO: 19932 - RNA, 18 nt, Artificial Sequence
  Synthetic
ggagggagagucaaagug

SEQ ID NO: 19933 - RNA, 20 nt, Artificial Sequence
  Synthetic
gaggagggagagucaaagug

SEQ ID NO: 19934 - RNA, 18 nt, Artificial Sequence
  Synthetic
gaaacgacaaagaaagug

SEQ ID NO: 19935 - RNA, 19 nt, Artificial Sequence
  Synthetic
ggaaacgacaaagaaagug

SEQ ID NO: 19936 - RNA, 20 nt, Artificial Sequence
  Synthetic
gggaaacgacaaagaaagug

SEQ ID NO: 19937 - RNA, 23 nt, Artificial Sequence
  Synthetic
guagggaaacgacaaagaaagug

SEQ ID NO: 19938 - RNA, 24 nt, Artificial Sequence
  Synthetic
gucacacuaaauuucaauaaagug

SEQ ID NO: 19939 - RNA, 21 nt, Artificial Sequence
  Synthetic
guucaagucggcccuaaagug

SEQ ID NO: 19940 - RNA, 18 nt, Artificial Sequence
  Synthetic
gcagaacgauguaaagug

SEQ ID NO: 19941 - RNA, 19 nt, Artificial Sequence
  Synthetic
ggcagaacgauguaaagug

SEQ ID NO: 19942 - RNA, 19 nt, Artificial Sequence
  Synthetic
gcuaccuauuauuaaagug

SEQ ID NO: 19943 - RNA, 18 nt, Artificial Sequence
  Synthetic
gaauucaauuaccaagug

SEQ ID NO: 19944 - RNA, 20 nt, Artificial Sequence
  Synthetic
gcacaugacaucgagaagug

SEQ ID NO: 19945 - RNA, 18 nt, Artificial Sequence
  Synthetic
gauguagacguagaagug

SEQ ID NO: 19946 - RNA, 19 nt, Artificial Sequence
  Synthetic
gaagcacuuuaaugaagug

SEQ ID NO: 19947 - RNA, 21 nt, Artificial Sequence
  Synthetic
gugaagcacuuuaaugaagug

SEQ ID NO: 19948 - RNA, 24 nt, Artificial Sequence
  Synthetic
gaagugaagcacuuuaaugaagug

SEQ ID NO: 19949 - RNA, 22 nt, Artificial Sequence
  Synthetic
gcaaaaaagaauuaaauaagug

SEQ ID NO: 19950 - RNA, 24 nt, Artificial Sequence
  Synthetic
gugcaaaaaagaauuaaauaagug

SEQ ID NO: 19951 - RNA, 18 nt, Artificial Sequence
  Synthetic
gugaauaaugguuaagug

SEQ ID NO: 19952 - RNA, 19 nt, Artificial Sequence
  Synthetic
ggugaauaaugguuaagug

SEQ ID NO: 19953 - RNA, 23 nt, Artificial Sequence
  Synthetic
gaaaggugaauaaugguuaagug

SEQ ID NO: 19954 - RNA, 24 nt, Artificial Sequence
  Synthetic
ggaaaggugaauaaugguuaagug

SEQ ID NO: 19955 - RNA, 20 nt, Artificial Sequence
  Synthetic
gcacagaguuccucacagug

SEQ ID NO: 19956 - RNA, 22 nt, Artificial Sequence
  Synthetic
gugcacagaguuccucacagug

SEQ ID NO: 19957 - RNA, 19 nt, Artificial Sequence
  Synthetic
gcuuccaagguuagcagug

SEQ ID NO: 19958 - RNA, 23 nt, Artificial Sequence
  Synthetic
gaaugcuuccaagguuagcagug

SEQ ID NO: 19959 - RNA, 24 nt, Artificial Sequence
  Synthetic
ggaaugcuuccaagguuagcagug

SEQ ID NO: 19960 - RNA, 20 nt, Artificial Sequence
  Synthetic
gaacuucaagaaaggcagug

SEQ ID NO: 19961 - RNA, 21 nt, Artificial Sequence
  Synthetic
ggaacuucaagaaaggcagug

SEQ ID NO: 19962 - RNA, 19 nt, Artificial Sequence
  Synthetic
gacagcagggacggcagug

SEQ ID NO: 19963 - RNA, 19 nt, Artificial Sequence
  Synthetic
gugaucaaaagcugcagug

SEQ ID NO: 19964 - RNA, 20 nt, Artificial Sequence
  Synthetic
ggugaucaaaagcugcagug

SEQ ID NO: 19965 - RNA, 22 nt, Artificial Sequence
  Synthetic
guggugaucaaaagcugcagug

SEQ ID NO: 19966 - RNA, 23 nt, Artificial Sequence
  Synthetic
gguggugaucaaaagcugcagug

SEQ ID NO: 19967 - RNA, 19 nt, Artificial Sequence
  Synthetic
gaauaucucuuucucagug

SEQ ID NO: 19968 - RNA, 18 nt, Artificial Sequence
  Synthetic
gguucuaugaauucagug

SEQ ID NO: 19969 - RNA, 20 nt, Artificial Sequence
  Synthetic
gugguucuaugaauucagug

SEQ ID NO: 19970 - RNA, 20 nt, Artificial Sequence
  Synthetic
gucaaaucaagaaaagagug

SEQ ID NO: 19971 - RNA, 22 nt, Artificial Sequence
  Synthetic
gagucaaaucaagaaaagagug

SEQ ID NO: 19972 - RNA, 23 nt, Artificial Sequence
  Synthetic
gaaaauucccuuauugaagagug

SEQ ID NO: 19973 - RNA, 24 nt, Artificial Sequence
  Synthetic
gaauucacaaaggaguuaagagug

SEQ ID NO: 19974 - RNA, 21 nt, Artificial Sequence
  Synthetic
gcuuuaucucaaaauagagug

SEQ ID NO: 19975 - RNA, 22 nt, Artificial Sequence
  Synthetic
ggcuuuaucucaaaauagagug

SEQ ID NO: 19976 - RNA, 22 nt, Artificial Sequence
  Synthetic
gccccuugaaugaaggggagug

SEQ ID NO: 19977 - RNA, 24 nt, Artificial Sequence
  Synthetic
gagccccuugaaugaaggggagug

SEQ ID NO: 19978 - RNA, 21 nt, Artificial Sequence
  Synthetic
ggacauuuaauucaaugagug

SEQ ID NO: 19979 - RNA, 24 nt, Artificial Sequence
  Synthetic
guaaccauuagcugaagaugagug

SEQ ID NO: 19980 - RNA, 19 nt, Artificial Sequence
  Synthetic
gaggucauuugagugagug

SEQ ID NO: 19981 - RNA, 19 nt, Artificial Sequence
  Synthetic
gaguuacugaaaaauagug

SEQ ID NO: 19982 - RNA, 18 nt, Artificial Sequence
  Synthetic
gucuuugaaugaauagug

SEQ ID NO: 19983 - RNA, 22 nt, Artificial Sequence
  Synthetic
gauugucuuugaaugaauagug

SEQ ID NO: 19984 - RNA, 22 nt, Artificial Sequence
  Synthetic
gaccuuaacuugauucauagug

SEQ ID NO: 19985 - RNA, 19 nt, Artificial Sequence
  Synthetic
guacuaaacauagauagug

SEQ ID NO: 19986 - RNA, 21 nt, Artificial Sequence
  Synthetic
guguacuaaacauagauagug

SEQ ID NO: 19987 - RNA, 23 nt, Artificial Sequence
  Synthetic
guguguacuaaacauagauagug

SEQ ID NO: 19988 - RNA, 18 nt, Artificial Sequence
  Synthetic
gcugucauucauauagug

SEQ ID NO: 19989 - RNA, 20 nt, Artificial Sequence
  Synthetic
gagcugucauucauauagug

SEQ ID NO: 19990 - RNA, 22 nt, Artificial Sequence
  Synthetic
gagagcugucauucauauagug

SEQ ID NO: 19991 - RNA, 24 nt, Artificial Sequence
  Synthetic
gacuuuugugauguauauauagug

SEQ ID NO: 19992 - RNA, 19 nt, Artificial Sequence
  Synthetic
gcacagcugaaagguagug

SEQ ID NO: 19993 - RNA, 22 nt, Artificial Sequence
  Synthetic
gcaaauaaucauaaauguagug

SEQ ID NO: 19994 - RNA, 23 nt, Artificial Sequence
  Synthetic
ggcaaauaaucauaaauguagug

SEQ ID NO: 19995 - RNA, 24 nt, Artificial Sequence
  Synthetic
gucuuuaccaauguaauauuagug

SEQ ID NO: 19996 - RNA, 22 nt, Artificial Sequence
  Synthetic
gaccucaacccuaagguuagug

SEQ ID NO: 19997 - RNA, 24 nt, Artificial Sequence
  Synthetic
gugaccucaacccuaagguuagug

SEQ ID NO: 19998 - RNA, 21 nt, Artificial Sequence
  Synthetic
guauaggcuuaugccuacgug

SEQ ID NO: 19999 - RNA, 24 nt, Artificial Sequence
  Synthetic
gcacccaggugcccucucaccgug

SEQ ID NO: 20000 - RNA, 18 nt, Artificial Sequence
  Synthetic
gaucuuuguugaaaggug

SEQ ID NO: 20001 - RNA, 22 nt, Artificial Sequence
  Synthetic
gaaagaucuuuguugaaaggug

SEQ ID NO: 20002 - RNA, 22 nt, Artificial Sequence
  Synthetic
gaaauucuucaaaucuuaggug

SEQ ID NO: 20003 - RNA, 23 nt, Artificial Sequence
  Synthetic
ggaaauucuucaaaucuuaggug

SEQ ID NO: 20004 - RNA, 24 nt, Artificial Sequence
  Synthetic
gggaaauucuucaaaucuuaggug

SEQ ID NO: 20005 - RNA, 22 nt, Artificial Sequence
  Synthetic
guuccauugccaaaaggcggug

SEQ ID NO: 20006 - RNA, 19 nt, Artificial Sequence
  Synthetic
gauccauuuugcugcggug

SEQ ID NO: 20007 - RNA, 22 nt, Artificial Sequence
  Synthetic
gaagauccauuuugcugcggug

SEQ ID NO: 20008 - RNA, 24 nt, Artificial Sequence
  Synthetic
gagaagauccauuuugcugcggug

SEQ ID NO: 20009 - RNA, 18 nt, Artificial Sequence
  Synthetic
gaaucagaaagcagggug

SEQ ID NO: 20010 - RNA, 23 nt, Artificial Sequence
  Synthetic
gcucugaaucagaaagcagggug

SEQ ID NO: 20011 - RNA, 24 nt, Artificial Sequence
  Synthetic
gaaaccaggaucuacucuagggug

SEQ ID NO: 20012 - RNA, 18 nt, Artificial Sequence
  Synthetic
gcuauucaugguagggug

SEQ ID NO: 20013 - RNA, 23 nt, Artificial Sequence
  Synthetic
gaaucucugagggaaaccgggug

SEQ ID NO: 20014 - RNA, 19 nt, Artificial Sequence
  Synthetic
gaaauggcuuugaggggug

SEQ ID NO: 20015 - RNA, 24 nt, Artificial Sequence
  Synthetic
gaacagaaauggcuuugaggggug

SEQ ID NO: 20016 - RNA, 20 nt, Artificial Sequence
  Synthetic
gcauuugaagugagggggug

SEQ ID NO: 20017 - RNA, 22 nt, Artificial Sequence
  Synthetic
gcaacacaguauagcuggggug

SEQ ID NO: 20018 - RNA, 18 nt, Artificial Sequence
  Synthetic
gacucucucuucauggug

SEQ ID NO: 20019 - RNA, 23 nt, Artificial Sequence
  Synthetic
gccuuccuaaguccuuacuggug

SEQ ID NO: 20020 - RNA, 18 nt, Artificial Sequence
  Synthetic
gcuagugucucucuggug

SEQ ID NO: 20021 - RNA, 23 nt, Artificial Sequence
  Synthetic
gccaugcuagugucucucuggug

SEQ ID NO: 20022 - RNA, 18 nt, Artificial Sequence
  Synthetic
gagaagacaagaguggug

SEQ ID NO: 20023 - RNA, 19 nt, Artificial Sequence
  Synthetic
ggagaagacaagaguggug

SEQ ID NO: 20024 - RNA, 24 nt, Artificial Sequence
  Synthetic
gauuaauaugacugaguuguggug

SEQ ID NO: 20025 - RNA, 20 nt, Artificial Sequence
  Synthetic
gcugacaauacugauuggug

SEQ ID NO: 20026 - RNA, 23 nt, Artificial Sequence
  Synthetic
gaccucuuucucucucuuuggug

SEQ ID NO: 20027 - RNA, 18 nt, Artificial Sequence
  Synthetic
gcaucuguauacaaugug

SEQ ID NO: 20028 - RNA, 20 nt, Artificial Sequence
  Synthetic
gagcaucuguauacaaugug

SEQ ID NO: 20029 - RNA, 21 nt, Artificial Sequence
  Synthetic
ggagcaucuguauacaaugug

SEQ ID NO: 20030 - RNA, 23 nt, Artificial Sequence
  Synthetic
gaggagcaucuguauacaaugug

SEQ ID NO: 20031 - RNA, 24 nt, Artificial Sequence
  Synthetic
guauacuaggcacuuuggaaugug

SEQ ID NO: 20032 - RNA, 20 nt, Artificial Sequence
  Synthetic
gcaaagggagguggcaugug

SEQ ID NO: 20033 - RNA, 21 nt, Artificial Sequence
  Synthetic
ggcaaagggagguggcaugug

SEQ ID NO: 20034 - RNA, 22 nt, Artificial Sequence
  Synthetic
gggcaaagggagguggcaugug

SEQ ID NO: 20035 - RNA, 23 nt, Artificial Sequence
  Synthetic
ggggcaaagggagguggcaugug

SEQ ID NO: 20036 - RNA, 20 nt, Artificial Sequence
  Synthetic
gucugagaaagauagaugug

SEQ ID NO: 20037 - RNA, 20 nt, Artificial Sequence
  Synthetic
gacuagugaaauuugaugug

SEQ ID NO: 20038 - RNA, 21 nt, Artificial Sequence
  Synthetic
ggacuagugaaauuugaugug

SEQ ID NO: 20039 - RNA, 24 nt, Artificial Sequence
  Synthetic
gcuggacuagugaaauuugaugug

SEQ ID NO: 20040 - RNA, 19 nt, Artificial Sequence
  Synthetic
gcuaaauugcuuugaugug

SEQ ID NO: 20041 - RNA, 23 nt, Artificial Sequence
  Synthetic
gacagcaggaagaagaauaugug

SEQ ID NO: 20042 - RNA, 24 nt, Artificial Sequence
  Synthetic
ggacagcaggaagaagaauaugug

SEQ ID NO: 20043 - RNA, 23 nt, Artificial Sequence
  Synthetic
gucucaagugguguguguaugug

SEQ ID NO: 20044 - RNA, 24 nt, Artificial Sequence
  Synthetic
ggucucaagugguguguguaugug

SEQ ID NO: 20045 - RNA, 21 nt, Artificial Sequence
  Synthetic
gcucuaaggacucucccugug

SEQ ID NO: 20046 - RNA, 22 nt, Artificial Sequence
  Synthetic
ggcucuaaggacucucccugug

SEQ ID NO: 20047 - RNA, 23 nt, Artificial Sequence
  Synthetic
gggcucuaaggacucucccugug

SEQ ID NO: 20048 - RNA, 24 nt, Artificial Sequence
  Synthetic
ggggcucuaaggacucucccugug

SEQ ID NO: 20049 - RNA, 18 nt, Artificial Sequence
  Synthetic
gguuuauaaccugcugug

SEQ ID NO: 20050 - RNA, 20 nt, Artificial Sequence
  Synthetic
gaacguacacauaaagugug

SEQ ID NO: 20051 - RNA, 20 nt, Artificial Sequence
  Synthetic
guccugaggcuagcagugug

SEQ ID NO: 20052 - RNA, 21 nt, Artificial Sequence
  Synthetic
gcuagggacuauuagagugug

SEQ ID NO: 20053 - RNA, 19 nt, Artificial Sequence
  Synthetic
gcaggaaaacgugagugug

SEQ ID NO: 20054 - RNA, 20 nt, Artificial Sequence
  Synthetic
ggcaggaaaacgugagugug

SEQ ID NO: 20055 - RNA, 21 nt, Artificial Sequence
  Synthetic
gggcaggaaaacgugagugug

SEQ ID NO: 20056 - RNA, 24 nt, Artificial Sequence
  Synthetic
gacgggcaggaaaacgugagugug

SEQ ID NO: 20057 - RNA, 22 nt, Artificial Sequence
  Synthetic
gauuuuauugacacauagugug

SEQ ID NO: 20058 - RNA, 20 nt, Artificial Sequence
  Synthetic
gcuuccuuguacguagugug

SEQ ID NO: 20059 - RNA, 19 nt, Artificial Sequence
  Synthetic
gcugacaauauuaggugug

SEQ ID NO: 20060 - RNA, 18 nt, Artificial Sequence
  Synthetic
gaauucagugacugugug

SEQ ID NO: 20061 - RNA, 21 nt, Artificial Sequence
  Synthetic
gcagaauucagugacugugug

SEQ ID NO: 20062 - RNA, 22 nt, Artificial Sequence
  Synthetic
gauauugcauacuaagugugug

SEQ ID NO: 20063 - RNA, 24 nt, Artificial Sequence
  Synthetic
gucucauacaacagaaauugugug

SEQ ID NO: 20064 - RNA, 20 nt, Artificial Sequence
  Synthetic
gcaggguuggggguugugug

SEQ ID NO: 20065 - RNA, 21 nt, Artificial Sequence
  Synthetic
ggcaggguuggggguugugug

SEQ ID NO: 20066 - RNA, 24 nt, Artificial Sequence
  Synthetic
guuggcaggguuggggguugugug

SEQ ID NO: 20067 - RNA, 18 nt, Artificial Sequence
  Synthetic
guuuguugcugcauugug

SEQ ID NO: 20068 - RNA, 22 nt, Artificial Sequence
  Synthetic
gaaaguuuguugcugcauugug

SEQ ID NO: 20069 - RNA, 22 nt, Artificial Sequence
  Synthetic
guuuucugggaucaagauugug

SEQ ID NO: 20070 - RNA, 24 nt, Artificial Sequence
  Synthetic
guguuuucugggaucaagauugug

SEQ ID NO: 20071 - RNA, 20 nt, Artificial Sequence
  Synthetic
gaacccuugacugacuugug

SEQ ID NO: 20072 - RNA, 20 nt, Artificial Sequence
  Synthetic
guucaagaaauuggcuugug

SEQ ID NO: 20073 - RNA, 23 nt, Artificial Sequence
  Synthetic
gucguucaagaaauuggcuugug

SEQ ID NO: 20074 - RNA, 18 nt, Artificial Sequence
  Synthetic
gcauagugaacauuugug

SEQ ID NO: 20075 - RNA, 22 nt, Artificial Sequence
  Synthetic
guaugcauagugaacauuugug

SEQ ID NO: 20076 - RNA, 20 nt, Artificial Sequence
  Synthetic
guuauacuuuuccauuugug

SEQ ID NO: 20077 - RNA, 18 nt, Artificial Sequence
  Synthetic
gugaaacaucuauuugug

SEQ ID NO: 20078 - RNA, 20 nt, Artificial Sequence
  Synthetic
gcagugguugagauuuugug

SEQ ID NO: 20079 - RNA, 22 nt, Artificial Sequence
  Synthetic
gugcagugguugagauuuugug

SEQ ID NO: 20080 - RNA, 23 nt, Artificial Sequence
  Synthetic
gauuuugacauccugguuuugug

SEQ ID NO: 20081 - RNA, 24 nt, Artificial Sequence
  Synthetic
gcuuucauuuccacaacaaaauug

SEQ ID NO: 20082 - RNA, 24 nt, Artificial Sequence
  Synthetic
gucuucauaaaaauuagaaaauug

SEQ ID NO: 20083 - RNA, 18 nt, Artificial Sequence
  Synthetic
guugagaauuacaaauug

SEQ ID NO: 20084 - RNA, 20 nt, Artificial Sequence
  Synthetic
gaauguuuuugcccaaauug

SEQ ID NO: 20085 - RNA, 21 nt, Artificial Sequence
  Synthetic
ggaauguuuuugcccaaauug

SEQ ID NO: 20086 - RNA, 18 nt, Artificial Sequence
  Synthetic
gcgguguauaucaaauug

SEQ ID NO: 20087 - RNA, 23 nt, Artificial Sequence
  Synthetic
gcuuugcgguguauaucaaauug

SEQ ID NO: 20088 - RNA, 20 nt, Artificial Sequence
  Synthetic
gaauugcuauauauaaauug

SEQ ID NO: 20089 - RNA, 23 nt, Artificial Sequence
  Synthetic
gaauccucugagggcuuaaauug

SEQ ID NO: 20090 - RNA, 18 nt, Artificial Sequence
  Synthetic
gauggaugcuuccaauug

SEQ ID NO: 20091 - RNA, 23 nt, Artificial Sequence
  Synthetic
gauaugauggaugcuuccaauug

SEQ ID NO: 20092 - RNA, 23 nt, Artificial Sequence
  Synthetic
gaauuuaauccaauauugaauug

SEQ ID NO: 20093 - RNA, 18 nt, Artificial Sequence
  Synthetic
gugggugguaaauaauug

SEQ ID NO: 20094 - RNA, 20 nt, Artificial Sequence
  Synthetic
guaacaauauugcauaauug

SEQ ID NO: 20095 - RNA, 19 nt, Artificial Sequence
  Synthetic
gacuuuuacaaccuaauug

SEQ ID NO: 20096 - RNA, 21 nt, Artificial Sequence
  Synthetic
gugacuuuuacaaccuaauug

SEQ ID NO: 20097 - RNA, 22 nt, Artificial Sequence
  Synthetic
ggugacuuuuacaaccuaauug

SEQ ID NO: 20098 - RNA, 18 nt, Artificial Sequence
  Synthetic
ggucauuuuuucuaauug

SEQ ID NO: 20099 - RNA, 19 nt, Artificial Sequence
  Synthetic
gggucauuuuuucuaauug

SEQ ID NO: 20100 - RNA, 20 nt, Artificial Sequence
  Synthetic
ggggucauuuuuucuaauug

SEQ ID NO: 20101 - RNA, 21 nt, Artificial Sequence
  Synthetic
gggggucauuuuuucuaauug

SEQ ID NO: 20102 - RNA, 24 nt, Artificial Sequence
  Synthetic
gaugggggucauuuuuucuaauug

SEQ ID NO: 20103 - RNA, 18 nt, Artificial Sequence
  Synthetic
ggauuuagauacacauug

SEQ ID NO: 20104 - RNA, 18 nt, Artificial Sequence
  Synthetic
gccccaugcuggacauug

SEQ ID NO: 20105 - RNA, 19 nt, Artificial Sequence
  Synthetic
ggccccaugcuggacauug

SEQ ID NO: 20106 - RNA, 20 nt, Artificial Sequence
  Synthetic
guaaaguaagaucagcauug

SEQ ID NO: 20107 - RNA, 23 nt, Artificial Sequence
  Synthetic
gaaguaaaguaagaucagcauug

SEQ ID NO: 20108 - RNA, 19 nt, Artificial Sequence
  Synthetic
gcagcuauccucugcauug

SEQ ID NO: 20109 - RNA, 20 nt, Artificial Sequence
  Synthetic
gaaauguagagauugcauug

SEQ ID NO: 20110 - RNA, 24 nt, Artificial Sequence
  Synthetic
gacugaaauguagagauugcauug

SEQ ID NO: 20111 - RNA, 20 nt, Artificial Sequence
  Synthetic
gacaauuuuuuuuugcauug

SEQ ID NO: 20112 - RNA, 19 nt, Artificial Sequence
  Synthetic
gagucuuaaguaaucauug

SEQ ID NO: 20113 - RNA, 21 nt, Artificial Sequence
  Synthetic
gagagucuuaaguaaucauug

SEQ ID NO: 20114 - RNA, 18 nt, Artificial Sequence
  Synthetic
ggacccucaaagucauug

SEQ ID NO: 20115 - RNA, 23 nt, Artificial Sequence
  Synthetic
gucuuggacccucaaagucauug

SEQ ID NO: 20116 - RNA, 18 nt, Artificial Sequence
  Synthetic
gccauacuuguuucauug

SEQ ID NO: 20117 - RNA, 21 nt, Artificial Sequence
  Synthetic
gaagccauacuuguuucauug

SEQ ID NO: 20118 - RNA, 19 nt, Artificial Sequence
  Synthetic
guuugcugacuaaagauug

SEQ ID NO: 20119 - RNA, 21 nt, Artificial Sequence
  Synthetic
guguuugcugacuaaagauug

SEQ ID NO: 20120 - RNA, 21 nt, Artificial Sequence
  Synthetic
gaacaagaggaaauaagauug

SEQ ID NO: 20121 - RNA, 18 nt, Artificial Sequence
  Synthetic
gccuccuucaccagauug

SEQ ID NO: 20122 - RNA, 22 nt, Artificial Sequence
  Synthetic
gucugccuccuucaccagauug

SEQ ID NO: 20123 - RNA, 20 nt, Artificial Sequence
  Synthetic
gauagcauggcuauggauug

SEQ ID NO: 20124 - RNA, 23 nt, Artificial Sequence
  Synthetic
guugauagcauggcuauggauug

SEQ ID NO: 20125 - RNA, 24 nt, Artificial Sequence
  Synthetic
gaauauuuauuaaacgaaugauug

SEQ ID NO: 20126 - RNA, 24 nt, Artificial Sequence
  Synthetic
gcuucacauguauauuacugauug

SEQ ID NO: 20127 - RNA, 24 nt, Artificial Sequence
  Synthetic
gacauuugacuaucacagugauug

SEQ ID NO: 20128 - RNA, 23 nt, Artificial Sequence
  Synthetic
gacauucuagaaugaaaauauug

SEQ ID NO: 20129 - RNA, 18 nt, Artificial Sequence
  Synthetic
gaaaaugguauaauauug

SEQ ID NO: 20130 - RNA, 20 nt, Artificial Sequence
  Synthetic
gagaaaaugguauaauauug

SEQ ID NO: 20131 - RNA, 21 nt, Artificial Sequence
  Synthetic
ggagaaaaugguauaauauug

SEQ ID NO: 20132 - RNA, 24 nt, Artificial Sequence
  Synthetic
gaauauucacugcuguacauauug

SEQ ID NO: 20133 - RNA, 19 nt, Artificial Sequence
  Synthetic
guguacaauuuauauauug

SEQ ID NO: 20134 - RNA, 20 nt, Artificial Sequence
  Synthetic
gguguacaauuuauauauug

SEQ ID NO: 20135 - RNA, 21 nt, Artificial Sequence
  Synthetic
ggguguacaauuuauauauug

SEQ ID NO: 20136 - RNA, 19 nt, Artificial Sequence
  Synthetic
guggauuuucugucuauug

SEQ ID NO: 20137 - RNA, 21 nt, Artificial Sequence
  Synthetic
gaauuuaucuuaaagguauug

SEQ ID NO: 20138 - RNA, 22 nt, Artificial Sequence
  Synthetic
ggaauuuaucuuaaagguauug

SEQ ID NO: 20139 - RNA, 23 nt, Artificial Sequence
  Synthetic
gggaauuuaucuuaaagguauug

SEQ ID NO: 20140 - RNA, 20 nt, Artificial Sequence
  Synthetic
gaagugggaaagguguauug

SEQ ID NO: 20141 - RNA, 21 nt, Artificial Sequence
  Synthetic
ggaagugggaaagguguauug

SEQ ID NO: 20142 - RNA, 18 nt, Artificial Sequence
  Synthetic
gcuuucugccuuguauug

SEQ ID NO: 20143 - RNA, 23 nt, Artificial Sequence
  Synthetic
gcucauucaggauaaaauuauug

SEQ ID NO: 20144 - RNA, 19 nt, Artificial Sequence
  Synthetic
guaagcccgaucauuauug

SEQ ID NO: 20145 - RNA, 21 nt, Artificial Sequence
  Synthetic
gaguaagcccgaucauuauug

SEQ ID NO: 20146 - RNA, 23 nt, Artificial Sequence
  Synthetic
gagaguaagcccgaucauuauug

SEQ ID NO: 20147 - RNA, 24 nt, Artificial Sequence
  Synthetic
guuucauuguuuuacuugcacuug

SEQ ID NO: 20148 - RNA, 22 nt, Artificial Sequence
  Synthetic
gagggagcagcagaaucacuug

SEQ ID NO: 20149 - RNA, 22 nt, Artificial Sequence
  Synthetic
gccccaaaaugugaaauacuug

SEQ ID NO: 20150 - RNA, 23 nt, Artificial Sequence
  Synthetic
ggccccaaaaugugaaauacuug

SEQ ID NO: 20151 - RNA, 19 nt, Artificial Sequence
  Synthetic
guggcacucuaaauacuug

SEQ ID NO: 20152 - RNA, 23 nt, Artificial Sequence
  Synthetic
gacauaguaaguguauguacuug

SEQ ID NO: 20153 - RNA, 24 nt, Artificial Sequence
  Synthetic
ggacauaguaaguguauguacuug

SEQ ID NO: 20154 - RNA, 20 nt, Artificial Sequence
  Synthetic
gccacuucaacuuuuacuug

SEQ ID NO: 20155 - RNA, 18 nt, Artificial Sequence
  Synthetic
guguuguuucuaaccuug

SEQ ID NO: 20156 - RNA, 18 nt, Artificial Sequence
  Synthetic
gauuaugucacuaccuug

SEQ ID NO: 20157 - RNA, 19 nt, Artificial Sequence
  Synthetic
gaaucuagcccuucccuug

SEQ ID NO: 20158 - RNA, 18 nt, Artificial Sequence
  Synthetic
gacuuggcuugagccuug

SEQ ID NO: 20159 - RNA, 19 nt, Artificial Sequence
  Synthetic
ggacuuggcuugagccuug

SEQ ID NO: 20160 - RNA, 21 nt, Artificial Sequence
  Synthetic
gaacauucaguuugguccuug

SEQ ID NO: 20161 - RNA, 24 nt, Artificial Sequence
  Synthetic
gucgaacauucaguuugguccuug

SEQ ID NO: 20162 - RNA, 22 nt, Artificial Sequence
  Synthetic
gacaugagucagaaguagcuug

SEQ ID NO: 20163 - RNA, 22 nt, Artificial Sequence
  Synthetic
gauuucaaaucuuaaaggcuug

SEQ ID NO: 20164 - RNA, 20 nt, Artificial Sequence
  Synthetic
gaaaaugauagaaaugcuug

SEQ ID NO: 20165 - RNA, 20 nt, Artificial Sequence
  Synthetic
gcauuuaauacucaugcuug

SEQ ID NO: 20166 - RNA, 18 nt, Artificial Sequence
  Synthetic
gaccaucuccucugcuug

SEQ ID NO: 20167 - RNA, 19 nt, Artificial Sequence
  Synthetic
ggaccaucuccucugcuug

SEQ ID NO: 20168 - RNA, 23 nt, Artificial Sequence
  Synthetic
gcaaggaccaucuccucugcuug

SEQ ID NO: 20169 - RNA, 18 nt, Artificial Sequence
  Synthetic
gcaagauacuauugcuug

SEQ ID NO: 20170 - RNA, 19 nt, Artificial Sequence
  Synthetic
ggcaagauacuauugcuug

SEQ ID NO: 20171 - RNA, 20 nt, Artificial Sequence
  Synthetic
gggcaagauacuauugcuug

SEQ ID NO: 20172 - RNA, 20 nt, Artificial Sequence
  Synthetic
gcacccagauaagcaucuug

SEQ ID NO: 20173 - RNA, 19 nt, Artificial Sequence
  Synthetic
guauuccucucugaucuug

SEQ ID NO: 20174 - RNA, 20 nt, Artificial Sequence
  Synthetic
guugaaaauacauacucuug

SEQ ID NO: 20175 - RNA, 21 nt, Artificial Sequence
  Synthetic
gguugaaaauacauacucuug

SEQ ID NO: 20176 - RNA, 19 nt, Artificial Sequence
  Synthetic
gauaauuguugaugucuug

SEQ ID NO: 20177 - RNA, 24 nt, Artificial Sequence
  Synthetic
gauuugauaauuguugaugucuug

SEQ ID NO: 20178 - RNA, 19 nt, Artificial Sequence
  Synthetic
gcaacuagcuuaauucuug

SEQ ID NO: 20179 - RNA, 20 nt, Artificial Sequence
  Synthetic
gacaugguuuuaaagaguug

SEQ ID NO: 20180 - RNA, 22 nt, Artificial Sequence
  Synthetic
gugacaugguuuuaaagaguug

SEQ ID NO: 20181 - RNA, 23 nt, Artificial Sequence
  Synthetic
ggugacaugguuuuaaagaguug

SEQ ID NO: 20182 - RNA, 22 nt, Artificial Sequence
  Synthetic
guauugguugaugggagaguug

SEQ ID NO: 20183 - RNA, 21 nt, Artificial Sequence
  Synthetic
gaaaaagggaagugagaguug

SEQ ID NO: 20184 - RNA, 23 nt, Artificial Sequence
  Synthetic
gcgaaaaagggaagugagaguug

SEQ ID NO: 20185 - RNA, 24 nt, Artificial Sequence
  Synthetic
ggcgaaaaagggaagugagaguug

SEQ ID NO: 20186 - RNA, 23 nt, Artificial Sequence
  Synthetic
guccaucaggaaaacaggaguug

SEQ ID NO: 20187 - RNA, 18 nt, Artificial Sequence
  Synthetic
gcuuuaacgggugaguug

SEQ ID NO: 20188 - RNA, 21 nt, Artificial Sequence
  Synthetic
gccgcuuuaacgggugaguug

SEQ ID NO: 20189 - RNA, 23 nt, Artificial Sequence
  Synthetic
gagccgcuuuaacgggugaguug

SEQ ID NO: 20190 - RNA, 23 nt, Artificial Sequence
  Synthetic
gcuucugccagagacccuaguug

SEQ ID NO: 20191 - RNA, 20 nt, Artificial Sequence
  Synthetic
gcuucuucacacaguaguug

SEQ ID NO: 20192 - RNA, 21 nt, Artificial Sequence
  Synthetic
guuuaauucugcaacacguug

SEQ ID NO: 20193 - RNA, 19 nt, Artificial Sequence
  Synthetic
guugugacagcggccguug

SEQ ID NO: 20194 - RNA, 20 nt, Artificial Sequence
  Synthetic
gaaauaauuggucaucguug

SEQ ID NO: 20195 - RNA, 23 nt, Artificial Sequence
  Synthetic
gcaucagaaaauaauagggguug

SEQ ID NO: 20196 - RNA, 24 nt, Artificial Sequence
  Synthetic
ggcaucagaaaauaauagggguug

SEQ ID NO: 20197 - RNA, 24 nt, Artificial Sequence
  Synthetic
gcacauauaccuauaccuggguug

SEQ ID NO: 20198 - RNA, 20 nt, Artificial Sequence
  Synthetic
gcccuucccuugcuggguug

SEQ ID NO: 20199 - RNA, 18 nt, Artificial Sequence
  Synthetic
gguuuuuaccacugguug

SEQ ID NO: 20200 - RNA, 19 nt, Artificial Sequence
  Synthetic
ggguuuuuaccacugguug

SEQ ID NO: 20201 - RNA, 23 nt, Artificial Sequence
  Synthetic
gauuggguuuuuaccacugguug

SEQ ID NO: 20202 - RNA, 24 nt, Artificial Sequence
  Synthetic
ggauuggguuuuuaccacugguug

SEQ ID NO: 20203 - RNA, 19 nt, Artificial Sequence
  Synthetic
gcucagagaaucuauguug

SEQ ID NO: 20204 - RNA, 20 nt, Artificial Sequence
  Synthetic
ggcucagagaaucuauguug

SEQ ID NO: 20205 - RNA, 18 nt, Artificial Sequence
  Synthetic
ggccgcaggggccuguug

SEQ ID NO: 20206 - RNA, 21 nt, Artificial Sequence
  Synthetic
gcuuuguuuauucaaguguug

SEQ ID NO: 20207 - RNA, 23 nt, Artificial Sequence
  Synthetic
gaauuaacuucugaaaauuguug

SEQ ID NO: 20208 - RNA, 24 nt, Artificial Sequence
  Synthetic
ggaauuaacuucugaaaauuguug

SEQ ID NO: 20209 - RNA, 21 nt, Artificial Sequence
  Synthetic
gggagagugaggaaauuguug

SEQ ID NO: 20210 - RNA, 18 nt, Artificial Sequence
  Synthetic
ggcauucauccuuuguug

SEQ ID NO: 20211 - RNA, 21 nt, Artificial Sequence
  Synthetic
gcaaugauaauaucuuuguug

SEQ ID NO: 20212 - RNA, 20 nt, Artificial Sequence
  Synthetic
gucauuuauccuuuuuguug

SEQ ID NO: 20213 - RNA, 19 nt, Artificial Sequence
  Synthetic
gaauaugaaucaaaauuug

SEQ ID NO: 20214 - RNA, 20 nt, Artificial Sequence
  Synthetic
ggaauaugaaucaaaauuug

SEQ ID NO: 20215 - RNA, 21 nt, Artificial Sequence
  Synthetic
guuucuagccuggaaaauuug

SEQ ID NO: 20216 - RNA, 18 nt, Artificial Sequence
  Synthetic
gcgaugaaugugaauuug

SEQ ID NO: 20217 - RNA, 18 nt, Artificial Sequence
  Synthetic
gcacauaaucaacauuug

SEQ ID NO: 20218 - RNA, 22 nt, Artificial Sequence
  Synthetic
guaagcacauaaucaacauuug

SEQ ID NO: 20219 - RNA, 19 nt, Artificial Sequence
  Synthetic
gaacaucuuaauccauuug

SEQ ID NO: 20220 - RNA, 21 nt, Artificial Sequence
  Synthetic
gucauuuuaauaguccauuug

SEQ ID NO: 20221 - RNA, 21 nt, Artificial Sequence
  Synthetic
gaagguuucaguaagcauuug

SEQ ID NO: 20222 - RNA, 22 nt, Artificial Sequence
  Synthetic
ggaagguuucaguaagcauuug

SEQ ID NO: 20223 - RNA, 18 nt, Artificial Sequence
  Synthetic
gauaguuuccugcauuug

SEQ ID NO: 20224 - RNA, 21 nt, Artificial Sequence
  Synthetic
gucuauaacuucucucauuug

SEQ ID NO: 20225 - RNA, 18 nt, Artificial Sequence
  Synthetic
gcaauguauuaugauuug

SEQ ID NO: 20226 - RNA, 21 nt, Artificial Sequence
  Synthetic
guauguuaucaaaaauauuug

SEQ ID NO: 20227 - RNA, 21 nt, Artificial Sequence
  Synthetic
gcacguaguaugaaauauuug

SEQ ID NO: 20228 - RNA, 21 nt, Artificial Sequence
  Synthetic
gcauccucauugcaauauuug

SEQ ID NO: 20229 - RNA, 18 nt, Artificial Sequence
  Synthetic
gcuaaaccaugauauuug

SEQ ID NO: 20230 - RNA, 19 nt, Artificial Sequence
  Synthetic
ggcuaaaccaugauauuug

SEQ ID NO: 20231 - RNA, 18 nt, Artificial Sequence
  Synthetic
gaugaauauugcuauuug

SEQ ID NO: 20232 - RNA, 24 nt, Artificial Sequence
  Synthetic
gaaacuugggcacaacaguauuug

SEQ ID NO: 20233 - RNA, 18 nt, Artificial Sequence
  Synthetic
gagcuaaauacuuauuug

SEQ ID NO: 20234 - RNA, 19 nt, Artificial Sequence
  Synthetic
ggagcuaaauacuuauuug

SEQ ID NO: 20235 - RNA, 20 nt, Artificial Sequence
  Synthetic
gggagcuaaauacuuauuug

SEQ ID NO: 20236 - RNA, 22 nt, Artificial Sequence
  Synthetic
gagggagcuaaauacuuauuug

SEQ ID NO: 20237 - RNA, 18 nt, Artificial Sequence
  Synthetic
gguuuuagggacccuuug

SEQ ID NO: 20238 - RNA, 20 nt, Artificial Sequence
  Synthetic
gugguuuuagggacccuuug

SEQ ID NO: 20239 - RNA, 23 nt, Artificial Sequence
  Synthetic
guugugguuuuagggacccuuug

SEQ ID NO: 20240 - RNA, 21 nt, Artificial Sequence
  Synthetic
gucacagacuaagauccuuug

SEQ ID NO: 20241 - RNA, 23 nt, Artificial Sequence
  Synthetic
gagucacagacuaagauccuuug

SEQ ID NO: 20242 - RNA, 21 nt, Artificial Sequence
  Synthetic
gaccucuucugcuuuccuuug

SEQ ID NO: 20243 - RNA, 22 nt, Artificial Sequence
  Synthetic
gcauaaauacugucaagcuuug

SEQ ID NO: 20244 - RNA, 24 nt, Artificial Sequence
  Synthetic
gugcauaaauacugucaagcuuug

SEQ ID NO: 20245 - RNA, 21 nt, Artificial Sequence
  Synthetic
guuuauuuuaacugagcuuug

SEQ ID NO: 20246 - RNA, 22 nt, Artificial Sequence
  Synthetic
gguuuauuuuaacugagcuuug

SEQ ID NO: 20247 - RNA, 23 nt, Artificial Sequence
  Synthetic
ggguuuauuuuaacugagcuuug

SEQ ID NO: 20248 - RNA, 24 nt, Artificial Sequence
  Synthetic
gcacauacucuauuucuagcuuug

SEQ ID NO: 20249 - RNA, 19 nt, Artificial Sequence
  Synthetic
gagaaauuaaggugcuuug

SEQ ID NO: 20250 - RNA, 18 nt, Artificial Sequence
  Synthetic
ggugugaaaauugcuuug

SEQ ID NO: 20251 - RNA, 19 nt, Artificial Sequence
  Synthetic
gggugugaaaauugcuuug

SEQ ID NO: 20252 - RNA, 18 nt, Artificial Sequence
  Synthetic
gggucacacuaaucuuug

SEQ ID NO: 20253 - RNA, 21 nt, Artificial Sequence
  Synthetic
guagggucacacuaaucuuug

SEQ ID NO: 20254 - RNA, 22 nt, Artificial Sequence
  Synthetic
gaauaaguaucuccacucuuug

SEQ ID NO: 20255 - RNA, 22 nt, Artificial Sequence
  Synthetic
gccacucugaggcuucucuuug

SEQ ID NO: 20256 - RNA, 23 nt, Artificial Sequence
  Synthetic
ggccacucugaggcuucucuuug

SEQ ID NO: 20257 - RNA, 20 nt, Artificial Sequence
  Synthetic
gcuuuaucuauuuuucuuug

SEQ ID NO: 20258 - RNA, 21 nt, Artificial Sequence
  Synthetic
guacaagugucaauagguuug

SEQ ID NO: 20259 - RNA, 20 nt, Artificial Sequence
  Synthetic
guaagaaaggauaugguuug

SEQ ID NO: 20260 - RNA, 23 nt, Artificial Sequence
  Synthetic
guaguaagaaaggauaugguuug

SEQ ID NO: 20261 - RNA, 23 nt, Artificial Sequence
  Synthetic
gaaagaaauaccuuaacuguuug

SEQ ID NO: 20262 - RNA, 24 nt, Artificial Sequence
  Synthetic
ggaaagaaauaccuuaacuguuug

SEQ ID NO: 20263 - RNA, 22 nt, Artificial Sequence
  Synthetic
guuucaauuuguugauauuuug

SEQ ID NO: 20264 - RNA, 24 nt, Artificial Sequence
  Synthetic
gaccaacagaggccagguauuuug

SEQ ID NO: 20265 - RNA, 18 nt, Artificial Sequence
  Synthetic
gauaguugauaacuuuug

SEQ ID NO: 20266 - RNA, 21 nt, Artificial Sequence
  Synthetic
guugauaguugauaacuuuug

SEQ ID NO: 20267 - RNA, 22 nt, Artificial Sequence
  Synthetic
gauuaagaaggugagacuuuug

SEQ ID NO: 20268 - RNA, 22 nt, Artificial Sequence
  Synthetic
gcuucaaaagaaccaucuuuug

SEQ ID NO: 20269 - RNA, 23 nt, Artificial Sequence
  Synthetic
ggcuucaaaagaaccaucuuuug

SEQ ID NO: 20270 - RNA, 24 nt, Artificial Sequence
  Synthetic
gggcuucaaaagaaccaucuuuug

SEQ ID NO: 20271 - RNA, 20 nt, Artificial Sequence
  Synthetic
gauaaagcucuuaucuuuug

SEQ ID NO: 20272 - RNA, 22 nt, Artificial Sequence
  Synthetic
gucccggagcuauaaaguuuug

SEQ ID NO: 20273 - RNA, 20 nt, Artificial Sequence
  Synthetic
guuuuuuugauguaguuuug

SEQ ID NO: 20274 - RNA, 21 nt, Artificial Sequence
  Synthetic
gguuuuuuugauguaguuuug

SEQ ID NO: 20275 - RNA, 19 nt, Artificial Sequence
  Synthetic
gugcauuggggagguuuug

SEQ ID NO: 20276 - RNA, 19 nt, Artificial Sequence
  Synthetic
gcaccacuauuagguuuug

SEQ ID NO: 20277 - RNA, 20 nt, Artificial Sequence
  Synthetic
guaugugaucaaauguuuug

SEQ ID NO: 20278 - RNA, 19 nt, Artificial Sequence
  Synthetic
guggauugucacuguuuug

SEQ ID NO: 20279 - RNA, 18 nt, Artificial Sequence
  Synthetic
ggcacuauacuauuuuug

SEQ ID NO: 20280 - RNA, 22 nt, Artificial Sequence
  Synthetic
gccaggcacuauacuauuuuug

SEQ ID NO: 20281 - RNA, 23 nt, Artificial Sequence
  Synthetic
ggccaggcacuauacuauuuuug

SEQ ID NO: 20282 - RNA, 24 nt, Artificial Sequence
  Synthetic
gggccaggcacuauacuauuuuug

SEQ ID NO: 20283 - RNA, 18 nt, Artificial Sequence
  Synthetic
gaaaaauccaacuuuuug

SEQ ID NO: 20284 - RNA, 19 nt, Artificial Sequence
  Synthetic
ggaaaaauccaacuuuuug

SEQ ID NO: 20285 - RNA, 24 nt, Artificial Sequence
  Synthetic
guccaggaaaaauccaacuuuuug

SEQ ID NO: 20286 - RNA, 20 nt, Artificial Sequence
  Synthetic
gaauaaaauuggccuuuuug

SEQ ID NO: 20287 - RNA, 21 nt, Artificial Sequence
  Synthetic
ggaauaaaauuggccuuuuug

SEQ ID NO: 20288 - RNA, 20 nt, Artificial Sequence
  Synthetic
gauauuuagauggcuuuuug

SEQ ID NO: 20289 - RNA, 24 nt, Artificial Sequence
  Synthetic
guuauucuagucacgaauuuuuug

SEQ ID NO: 20290 - RNA, 19 nt, Artificial Sequence
  Synthetic
gauggcaaaagcuuuuuug

SEQ ID NO: 20291 - RNA, 23 nt, Artificial Sequence
  Synthetic
gauagauggcaaaagcuuuuuug

SEQ ID NO: 20292 - RNA, 19 nt, Artificial Sequence
  Synthetic
gaaagccuuuucuuuuuug

SEQ ID NO: 20293 - RNA, 21 nt, Artificial Sequence
  Synthetic
gagaaagccuuuucuuuuuug

SEQ ID NO: 20294 - RNA, 22 nt, Artificial Sequence
  Synthetic
ggagaaagccuuuucuuuuuug

SEQ ID NO: 20295 - RNA, 23 nt, Artificial Sequence
  Synthetic
guuaguagauuuaagaaaaaaau

SEQ ID NO: 20296 - RNA, 21 nt, Artificial Sequence
  Synthetic
guucuaagauguuagaaaaau

SEQ ID NO: 20297 - RNA, 20 nt, Artificial Sequence
  Synthetic
guuuauuacuuuagaaaaau

SEQ ID NO: 20298 - RNA, 21 nt, Artificial Sequence
  Synthetic
guauuuucucagaauaaaaau

SEQ ID NO: 20299 - RNA, 21 nt, Artificial Sequence
  Synthetic
gauucuguacaggcuaaaaau

SEQ ID NO: 20300 - RNA, 24 nt, Artificial Sequence
  Synthetic
gcagauucuguacaggcuaaaaau

SEQ ID NO: 20301 - RNA, 19 nt, Artificial Sequence
  Synthetic
gucuaaccaugcuaaaaau

SEQ ID NO: 20302 - RNA, 24 nt, Artificial Sequence
  Synthetic
gcaauauaugauaaaauuaaaaau

SEQ ID NO: 20303 - RNA, 22 nt, Artificial Sequence
  Synthetic
gauacaauauuuucuuaaaaau

SEQ ID NO: 20304 - RNA, 19 nt, Artificial Sequence
  Synthetic
guuaacuauuguuaaaaau

SEQ ID NO: 20305 - RNA, 20 nt, Artificial Sequence
  Synthetic
gguuaacuauuguuaaaaau

SEQ ID NO: 20306 - RNA, 22 nt, Artificial Sequence
  Synthetic
gagguuaacuauuguuaaaaau

SEQ ID NO: 20307 - RNA, 24 nt, Artificial Sequence
  Synthetic
guuauaaccaagauguuuaaaaau

SEQ ID NO: 20308 - RNA, 22 nt, Artificial Sequence
  Synthetic
gaaccucauaaauuuuaaaaau

SEQ ID NO: 20309 - RNA, 18 nt, Artificial Sequence
  Synthetic
gagcaguaauaacaaaau

SEQ ID NO: 20310 - RNA, 20 nt, Artificial Sequence
  Synthetic
gugagcaguaauaacaaaau

SEQ ID NO: 20311 - RNA, 23 nt, Artificial Sequence
  Synthetic
guagugagcaguaauaacaaaau

SEQ ID NO: 20312 - RNA, 18 nt, Artificial Sequence
  Synthetic
gaagguauaggacaaaau

SEQ ID NO: 20313 - RNA, 19 nt, Artificial Sequence
  Synthetic
ggaagguauaggacaaaau

SEQ ID NO: 20314 - RNA, 18 nt, Artificial Sequence
  Synthetic
guuuauuuuguacaaaau

SEQ ID NO: 20315 - RNA, 20 nt, Artificial Sequence
  Synthetic
guguuuauuuuguacaaaau

SEQ ID NO: 20316 - RNA, 23 nt, Artificial Sequence
  Synthetic
guuuucucuguuuuuuacaaaau

SEQ ID NO: 20317 - RNA, 24 nt, Artificial Sequence
  Synthetic
gguuuucucuguuuuuuacaaaau

SEQ ID NO: 20318 - RNA, 21 nt, Artificial Sequence
  Synthetic
gacagauccugggggcaaaau

SEQ ID NO: 20319 - RNA, 22 nt, Artificial Sequence
  Synthetic
ggacagauccugggggcaaaau

SEQ ID NO: 20320 - RNA, 23 nt, Artificial Sequence
  Synthetic
gggacagauccugggggcaaaau

SEQ ID NO: 20321 - RNA, 21 nt, Artificial Sequence
  Synthetic
gacuuuuuucuuuuucaaaau

SEQ ID NO: 20322 - RNA, 21 nt, Artificial Sequence
  Synthetic
guauaugaaacaugagaaaau

SEQ ID NO: 20323 - RNA, 20 nt, Artificial Sequence
  Synthetic
gaauuuaacuggaggaaaau

SEQ ID NO: 20324 - RNA, 23 nt, Artificial Sequence
  Synthetic
gcagaauuuaacuggaggaaaau

SEQ ID NO: 20325 - RNA, 21 nt, Artificial Sequence
  Synthetic
guaaacaauccaacggaaaau

SEQ ID NO: 20326 - RNA, 21 nt, Artificial Sequence
  Synthetic
gagguacaaaaaagggaaaau

SEQ ID NO: 20327 - RNA, 22 nt, Artificial Sequence
  Synthetic
ggagguacaaaaaagggaaaau

SEQ ID NO: 20328 - RNA, 19 nt, Artificial Sequence
  Synthetic
gucaagaccuggggaaaau

SEQ ID NO: 20329 - RNA, 21 nt, Artificial Sequence
  Synthetic
gugucaagaccuggggaaaau

SEQ ID NO: 20330 - RNA, 23 nt, Artificial Sequence
  Synthetic
gugugucaagaccuggggaaaau

SEQ ID NO: 20331 - RNA, 24 nt, Artificial Sequence
  Synthetic
ggugugucaagaccuggggaaaau

SEQ ID NO: 20332 - RNA, 18 nt, Artificial Sequence
  Synthetic
gcaaagcauaaugaaaau

SEQ ID NO: 20333 - RNA, 19 nt, Artificial Sequence
  Synthetic
ggcaaagcauaaugaaaau

SEQ ID NO: 20334 - RNA, 19 nt, Artificial Sequence
  Synthetic
gagcauuuuccaugaaaau

SEQ ID NO: 20335 - RNA, 21 nt, Artificial Sequence
  Synthetic
gagagcauuuuccaugaaaau

SEQ ID NO: 20336 - RNA, 23 nt, Artificial Sequence
  Synthetic
gagagagcauuuuccaugaaaau

SEQ ID NO: 20337 - RNA, 19 nt, Artificial Sequence
  Synthetic
gacuucaaccucugaaaau

SEQ ID NO: 20338 - RNA, 20 nt, Artificial Sequence
  Synthetic
gcuugucagcaggugaaaau

SEQ ID NO: 20339 - RNA, 23 nt, Artificial Sequence
  Synthetic
guagcuugucagcaggugaaaau

SEQ ID NO: 20340 - RNA, 24 nt, Artificial Sequence
  Synthetic
gguagcuugucagcaggugaaaau

SEQ ID NO: 20341 - RNA, 21 nt, Artificial Sequence
  Synthetic
guucuguucuugggugaaaau

SEQ ID NO: 20342 - RNA, 18 nt, Artificial Sequence
  Synthetic
gaucuucgucuauaaaau

SEQ ID NO: 20343 - RNA, 19 nt, Artificial Sequence
  Synthetic
guaaaccaagaacuaaaau

SEQ ID NO: 20344 - RNA, 22 nt, Artificial Sequence
  Synthetic
guaguaaaccaagaacuaaaau

SEQ ID NO: 20345 - RNA, 22 nt, Artificial Sequence
  Synthetic
gauauuggaaaguaacuaaaau

SEQ ID NO: 20346 - RNA, 19 nt, Artificial Sequence
  Synthetic
gagcccaaggcccuaaaau

SEQ ID NO: 20347 - RNA, 20 nt, Artificial Sequence
  Synthetic
ggagcccaaggcccuaaaau

SEQ ID NO: 20348 - RNA, 21 nt, Artificial Sequence
  Synthetic
gggagcccaaggcccuaaaau

SEQ ID NO: 20349 - RNA, 22 nt, Artificial Sequence
  Synthetic
ggggagcccaaggcccuaaaau

SEQ ID NO: 20350 - RNA, 24 nt, Artificial Sequence
  Synthetic
gaggggagcccaaggcccuaaaau

SEQ ID NO: 20351 - RNA, 21 nt, Artificial Sequence
  Synthetic
gauuaugugaccguguaaaau

SEQ ID NO: 20352 - RNA, 20 nt, Artificial Sequence
  Synthetic
guaugaucaccuuguaaaau

SEQ ID NO: 20353 - RNA, 23 nt, Artificial Sequence
  Synthetic
gcuccauaucgagacauuaaaau

SEQ ID NO: 20354 - RNA, 23 nt, Artificial Sequence
  Synthetic
gcuauaacacuuguccuuaaaau

SEQ ID NO: 20355 - RNA, 18 nt, Artificial Sequence
  Synthetic
ggacagccggagacaaau

SEQ ID NO: 20356 - RNA, 19 nt, Artificial Sequence
  Synthetic
gggacagccggagacaaau

SEQ ID NO: 20357 - RNA, 22 nt, Artificial Sequence
  Synthetic
gcaccagugccagacgacaaau

SEQ ID NO: 20358 - RNA, 18 nt, Artificial Sequence
  Synthetic
guagaauaucccccaaau

SEQ ID NO: 20359 - RNA, 22 nt, Artificial Sequence
  Synthetic
gcuucuuauguagucuccaaau

SEQ ID NO: 20360 - RNA, 19 nt, Artificial Sequence
  Synthetic
gugaauacugaaagcaaau

SEQ ID NO: 20361 - RNA, 19 nt, Artificial Sequence
  Synthetic
gauuaaacuuugagcaaau

SEQ ID NO: 20362 - RNA, 19 nt, Artificial Sequence
  Synthetic
gauuuucccaaaggcaaau

SEQ ID NO: 20363 - RNA, 20 nt, Artificial Sequence
  Synthetic
ggauuuucccaaaggcaaau

SEQ ID NO: 20364 - RNA, 24 nt, Artificial Sequence
  Synthetic
gccuggauuuucccaaaggcaaau

SEQ ID NO: 20365 - RNA, 18 nt, Artificial Sequence
  Synthetic
gagauaaaagaggcaaau

SEQ ID NO: 20366 - RNA, 19 nt, Artificial Sequence
  Synthetic
ggagauaaaagaggcaaau

SEQ ID NO: 20367 - RNA, 20 nt, Artificial Sequence
  Synthetic
gggagauaaaagaggcaaau

SEQ ID NO: 20368 - RNA, 24 nt, Artificial Sequence
  Synthetic
guaagggagauaaaagaggcaaau

SEQ ID NO: 20369 - RNA, 23 nt, Artificial Sequence
  Synthetic
gaacaccaggcugacuggcaaau

SEQ ID NO: 20370 - RNA, 18 nt, Artificial Sequence
  Synthetic
gcaccagaaaaaucaaau

SEQ ID NO: 20371 - RNA, 23 nt, Artificial Sequence
  Synthetic
gucucgcaccagaaaaaucaaau

SEQ ID NO: 20372 - RNA, 24 nt, Artificial Sequence
  Synthetic
ggucucgcaccagaaaaaucaaau

SEQ ID NO: 20373 - RNA, 20 nt, Artificial Sequence
  Synthetic
guuucucacacaaaucaaau

SEQ ID NO: 20374 - RNA, 23 nt, Artificial Sequence
  Synthetic
guaguuucucacacaaaucaaau

SEQ ID NO: 20375 - RNA, 19 nt, Artificial Sequence
  Synthetic
gauugcucaaugaucaaau

SEQ ID NO: 20376 - RNA, 23 nt, Artificial Sequence
  Synthetic
guaauuuuucucaacucucaaau

SEQ ID NO: 20377 - RNA, 24 nt, Artificial Sequence
  Synthetic
gguaauuuuucucaacucucaaau

SEQ ID NO: 20378 - RNA, 23 nt, Artificial Sequence
  Synthetic
guauauaagacuagcauucaaau

SEQ ID NO: 20379 - RNA, 24 nt, Artificial Sequence
  Synthetic
gcucaauugauaucagguucaaau

SEQ ID NO: 20380 - RNA, 22 nt, Artificial Sequence
  Synthetic
gcaacaaaggugugguucaaau

SEQ ID NO: 20381 - RNA, 22 nt, Artificial Sequence
  Synthetic
gcauauuuuaccuuaaagaaau

SEQ ID NO: 20382 - RNA, 23 nt, Artificial Sequence
  Synthetic
ggcauauuuuaccuuaaagaaau

SEQ ID NO: 20383 - RNA, 24 nt, Artificial Sequence
  Synthetic
gggcauauuuuaccuuaaagaaau

SEQ ID NO: 20384 - RNA, 22 nt, Artificial Sequence
  Synthetic
guauaauaggccuucaagaaau

SEQ ID NO: 20385 - RNA, 24 nt, Artificial Sequence
  Synthetic
guguauaauaggccuucaagaaau

SEQ ID NO: 20386 - RNA, 24 nt, Artificial Sequence
  Synthetic
gauauauaggggaaagccagaaau

SEQ ID NO: 20387 - RNA, 23 nt, Artificial Sequence
  Synthetic
gaauggaaaacaaauauagaaau

SEQ ID NO: 20388 - RNA, 19 nt, Artificial Sequence
  Synthetic
gaagucccuaacuagaaau

SEQ ID NO: 20389 - RNA, 22 nt, Artificial Sequence
  Synthetic
guugaagucccuaacuagaaau

SEQ ID NO: 20390 - RNA, 24 nt, Artificial Sequence
  Synthetic
guguugaagucccuaacuagaaau

SEQ ID NO: 20391 - RNA, 20 nt, Artificial Sequence
  Synthetic
guauucucuucauuagaaau

SEQ ID NO: 20392 - RNA, 23 nt, Artificial Sequence
  Synthetic
gaaguauucucuucauuagaaau

SEQ ID NO: 20393 - RNA, 24 nt, Artificial Sequence
  Synthetic
ggaaguauucucuucauuagaaau

SEQ ID NO: 20394 - RNA, 18 nt, Artificial Sequence
  Synthetic
gauuaguugauuagaaau

SEQ ID NO: 20395 - RNA, 19 nt, Artificial Sequence
  Synthetic
ggauuaguugauuagaaau

SEQ ID NO: 20396 - RNA, 19 nt, Artificial Sequence
  Synthetic
gccaauuacauuuagaaau

SEQ ID NO: 20397 - RNA, 18 nt, Artificial Sequence
  Synthetic
ggcaagcacuuuggaaau

SEQ ID NO: 20398 - RNA, 21 nt, Artificial Sequence
  Synthetic
gcuggcaagcacuuuggaaau

SEQ ID NO: 20399 - RNA, 22 nt, Artificial Sequence
  Synthetic
ggcuggcaagcacuuuggaaau

SEQ ID NO: 20400 - RNA, 23 nt, Artificial Sequence
  Synthetic
gggcuggcaagcacuuuggaaau

SEQ ID NO: 20401 - RNA, 22 nt, Artificial Sequence
  Synthetic
gaaucuaauuuuucaaugaaau

SEQ ID NO: 20402 - RNA, 18 nt, Artificial Sequence
  Synthetic
gcaauuugcucaugaaau

SEQ ID NO: 20403 - RNA, 19 nt, Artificial Sequence
  Synthetic
ggcaauuugcucaugaaau

SEQ ID NO: 20404 - RNA, 22 nt, Artificial Sequence
  Synthetic
guaggcaauuugcucaugaaau

SEQ ID NO: 20405 - RNA, 22 nt, Artificial Sequence
  Synthetic
gucauuagccugcugaugaaau

SEQ ID NO: 20406 - RNA, 24 nt, Artificial Sequence
  Synthetic
gugucauuagccugcugaugaaau

SEQ ID NO: 20407 - RNA, 20 nt, Artificial Sequence
  Synthetic
gauaguaagauaccugaaau

SEQ ID NO: 20408 - RNA, 24 nt, Artificial Sequence
  Synthetic
gucuucacaugguagaugugaaau

SEQ ID NO: 20409 - RNA, 24 nt, Artificial Sequence
  Synthetic
guaacugcacauuuaaaaauaaau

SEQ ID NO: 20410 - RNA, 19 nt, Artificial Sequence
  Synthetic
gucaccagcauaaauaaau

SEQ ID NO: 20411 - RNA, 20 nt, Artificial Sequence
  Synthetic
ggucaccagcauaaauaaau

SEQ ID NO: 20412 - RNA, 18 nt, Artificial Sequence
  Synthetic
guuagcacuugaauaaau

SEQ ID NO: 20413 - RNA, 20 nt, Artificial Sequence
  Synthetic
gcguuagcacuugaauaaau

SEQ ID NO: 20414 - RNA, 21 nt, Artificial Sequence
  Synthetic
guaauuuuuccaauaauaaau

SEQ ID NO: 20415 - RNA, 24 nt, Artificial Sequence
  Synthetic
gaaguaauuuuuccaauaauaaau

SEQ ID NO: 20416 - RNA, 19 nt, Artificial Sequence
  Synthetic
gugaaugcugaagauaaau

SEQ ID NO: 20417 - RNA, 22 nt, Artificial Sequence
  Synthetic
gaugugaaugcugaagauaaau

SEQ ID NO: 20418 - RNA, 24 nt, Artificial Sequence
  Synthetic
guaaagaaagaaaauuauauaaau

SEQ ID NO: 20419 - RNA, 18 nt, Artificial Sequence
  Synthetic
gugcuuugaacuauaaau

SEQ ID NO: 20420 - RNA, 19 nt, Artificial Sequence
  Synthetic
gagaacgcuaguuauaaau

SEQ ID NO: 20421 - RNA, 21 nt, Artificial Sequence
  Synthetic
gagagaacgcuaguuauaaau

SEQ ID NO: 20422 - RNA, 24 nt, Artificial Sequence
  Synthetic
gaagagagaacgcuaguuauaaau

SEQ ID NO: 20423 - RNA, 19 nt, Artificial Sequence
  Synthetic
guaaaguaugcuacuaaau

SEQ ID NO: 20424 - RNA, 21 nt, Artificial Sequence
  Synthetic
guguaaaguaugcuacuaaau

SEQ ID NO: 20425 - RNA, 18 nt, Artificial Sequence
  Synthetic
gugguggcauaccuaaau

SEQ ID NO: 20426 - RNA, 19 nt, Artificial Sequence
  Synthetic
ggugguggcauaccuaaau

SEQ ID NO: 20427 - RNA, 22 nt, Artificial Sequence
  Synthetic
gcuggugguggcauaccuaaau

SEQ ID NO: 20428 - RNA, 19 nt, Artificial Sequence
  Synthetic
gacucaacuuuggcuaaau

SEQ ID NO: 20429 - RNA, 21 nt, Artificial Sequence
  Synthetic
gagacucaacuuuggcuaaau

SEQ ID NO: 20430 - RNA, 24 nt, Artificial Sequence
  Synthetic
guugagacucaacuuuggcuaaau

SEQ ID NO: 20431 - RNA, 18 nt, Artificial Sequence
  Synthetic
gccacagaccugcuaaau

SEQ ID NO: 20432 - RNA, 19 nt, Artificial Sequence
  Synthetic
gacugaaaccauaguaaau

SEQ ID NO: 20433 - RNA, 20 nt, Artificial Sequence
  Synthetic
guugcgaucauucuguaaau

SEQ ID NO: 20434 - RNA, 23 nt, Artificial Sequence
  Synthetic
gaaacauguuaucaaguguaaau

SEQ ID NO: 20435 - RNA, 22 nt, Artificial Sequence
  Synthetic
gaucccaauacuacaauuaaau

SEQ ID NO: 20436 - RNA, 23 nt, Artificial Sequence
  Synthetic
ggaucccaauacuacaauuaaau

SEQ ID NO: 20437 - RNA, 24 nt, Artificial Sequence
  Synthetic
gggaucccaauacuacaauuaaau

SEQ ID NO: 20438 - RNA, 23 nt, Artificial Sequence
  Synthetic
gcuaaacucauauugcauuaaau

SEQ ID NO: 20439 - RNA, 21 nt, Artificial Sequence
  Synthetic
gcauaacaugaugacuuaaau

SEQ ID NO: 20440 - RNA, 22 nt, Artificial Sequence
  Synthetic
ggcauaacaugaugacuuaaau

SEQ ID NO: 20441 - RNA, 20 nt, Artificial Sequence
  Synthetic
gcacaguucauuucuuaaau

SEQ ID NO: 20442 - RNA, 23 nt, Artificial Sequence
  Synthetic
gcugcacaguucauuucuuaaau

SEQ ID NO: 20443 - RNA, 19 nt, Artificial Sequence
  Synthetic
guaccuaccguauuuaaau

SEQ ID NO: 20444 - RNA, 20 nt, Artificial Sequence
  Synthetic
gguaccuaccguauuuaaau

SEQ ID NO: 20445 - RNA, 22 nt, Artificial Sequence
  Synthetic
gagguaccuaccguauuuaaau

SEQ ID NO: 20446 - RNA, 21 nt, Artificial Sequence
  Synthetic
gaaacuacaaacucuuuaaau

SEQ ID NO: 20447 - RNA, 20 nt, Artificial Sequence
  Synthetic
guacaaucuaugacaacaau

SEQ ID NO: 20448 - RNA, 21 nt, Artificial Sequence
  Synthetic
gacaaagauuugaagaacaau

SEQ ID NO: 20449 - RNA, 23 nt, Artificial Sequence
  Synthetic
gagacaaagauuugaagaacaau

SEQ ID NO: 20450 - RNA, 20 nt, Artificial Sequence
  Synthetic
guugacuguuagugaacaau

SEQ ID NO: 20451 - RNA, 22 nt, Artificial Sequence
  Synthetic
guguugacuguuagugaacaau

SEQ ID NO: 20452 - RNA, 18 nt, Artificial Sequence
  Synthetic
gaaugaaaaguuaacaau

SEQ ID NO: 20453 - RNA, 20 nt, Artificial Sequence
  Synthetic
gagaaugaaaaguuaacaau

SEQ ID NO: 20454 - RNA, 24 nt, Artificial Sequence
  Synthetic
gaaugagaaugaaaaguuaacaau

SEQ ID NO: 20455 - RNA, 20 nt, Artificial Sequence
  Synthetic
gaagaaauguuaaacacaau

SEQ ID NO: 20456 - RNA, 24 nt, Artificial Sequence
  Synthetic
guaugaagaaauguuaaacacaau

SEQ ID NO: 20457 - RNA, 18 nt, Artificial Sequence
  Synthetic
ggaaaacagauacacaau

SEQ ID NO: 20458 - RNA, 19 nt, Artificial Sequence
  Synthetic
gggaaaacagauacacaau

SEQ ID NO: 20459 - RNA, 20 nt, Artificial Sequence
  Synthetic
ggggaaaacagauacacaau

SEQ ID NO: 20460 - RNA, 23 nt, Artificial Sequence
  Synthetic
gaaggggaaaacagauacacaau

SEQ ID NO: 20461 - RNA, 21 nt, Artificial Sequence
  Synthetic
guauaucuuccauuccacaau

SEQ ID NO: 20462 - RNA, 20 nt, Artificial Sequence
  Synthetic
guuaaaugaguaaucacaau

SEQ ID NO: 20463 - RNA, 23 nt, Artificial Sequence
  Synthetic
guuguuaaaugaguaaucacaau

SEQ ID NO: 20464 - RNA, 21 nt, Artificial Sequence
  Synthetic
gcuuuaggaugaggugacaau

SEQ ID NO: 20465 - RNA, 22 nt, Artificial Sequence
  Synthetic
ggcuuuaggaugaggugacaau

SEQ ID NO: 20466 - RNA, 24 nt, Artificial Sequence
  Synthetic
gaggcuuuaggaugaggugacaau

SEQ ID NO: 20467 - RNA, 18 nt, Artificial Sequence
  Synthetic
gaauauguuccauacaau

SEQ ID NO: 20468 - RNA, 18 nt, Artificial Sequence
  Synthetic
gccuaauaaauguacaau

SEQ ID NO: 20469 - RNA, 20 nt, Artificial Sequence
  Synthetic
gagccuaauaaauguacaau

SEQ ID NO: 20470 - RNA, 21 nt, Artificial Sequence
  Synthetic
ggagccuaauaaauguacaau

SEQ ID NO: 20471 - RNA, 22 nt, Artificial Sequence
  Synthetic
gacuucacaaaagaauuacaau

SEQ ID NO: 20472 - RNA, 20 nt, Artificial Sequence
  Synthetic
gaaaauuuucaauuuacaau

SEQ ID NO: 20473 - RNA, 18 nt, Artificial Sequence
  Synthetic
gaguuaaaccaaaccaau

SEQ ID NO: 20474 - RNA, 21 nt, Artificial Sequence
  Synthetic
gcugaguuaaaccaaaccaau

SEQ ID NO: 20475 - RNA, 24 nt, Artificial Sequence
  Synthetic
gaagcugaguuaaaccaaaccaau

SEQ ID NO: 20476 - RNA, 21 nt, Artificial Sequence
  Synthetic
gaaaaccuuuccuuaaccaau

SEQ ID NO: 20477 - RNA, 19 nt, Artificial Sequence
  Synthetic
gaaugagaguuuuaccaau

SEQ ID NO: 20478 - RNA, 24 nt, Artificial Sequence
  Synthetic
gaucagaaugagaguuuuaccaau

SEQ ID NO: 20479 - RNA, 24 nt, Artificial Sequence
  Synthetic
gaaauuuaggaagagccucccaau

SEQ ID NO: 20480 - RNA, 20 nt, Artificial Sequence
  Synthetic
gauuugcucaguuucccaau

SEQ ID NO: 20481 - RNA, 23 nt, Artificial Sequence
  Synthetic
gaacuugcuuaugaaaauccaau

SEQ ID NO: 20482 - RNA, 19 nt, Artificial Sequence
  Synthetic
gauaacucaaauuuccaau

SEQ ID NO: 20483 - RNA, 21 nt, Artificial Sequence
  Synthetic
gcgauaacucaaauuuccaau

SEQ ID NO: 20484 - RNA, 20 nt, Artificial Sequence
  Synthetic
gucugauucucaaaagcaau

SEQ ID NO: 20485 - RNA, 18 nt, Artificial Sequence
  Synthetic
ggaagcgcauagagcaau

SEQ ID NO: 20486 - RNA, 18 nt, Artificial Sequence
  Synthetic
ggguauauguagagcaau

SEQ ID NO: 20487 - RNA, 23 nt, Artificial Sequence
  Synthetic
gauaaggguauauguagagcaau

SEQ ID NO: 20488 - RNA, 24 nt, Artificial Sequence
  Synthetic
ggauaaggguauauguagagcaau

SEQ ID NO: 20489 - RNA, 20 nt, Artificial Sequence
  Synthetic
guuaaagaaaaaugagcaau

SEQ ID NO: 20490 - RNA, 22 nt, Artificial Sequence
  Synthetic
gaguuaaagaaaaaugagcaau

SEQ ID NO: 20491 - RNA, 18 nt, Artificial Sequence
  Synthetic
gaagaacaaaauagcaau

SEQ ID NO: 20492 - RNA, 21 nt, Artificial Sequence
  Synthetic
guugaagaacaaaauagcaau

SEQ ID NO: 20493 - RNA, 22 nt, Artificial Sequence
  Synthetic
gaaaaaccugaagguuagcaau

SEQ ID NO: 20494 - RNA, 23 nt, Artificial Sequence
  Synthetic
ggaaaaaccugaagguuagcaau

SEQ ID NO: 20495 - RNA, 24 nt, Artificial Sequence
  Synthetic
gggaaaaaccugaagguuagcaau

SEQ ID NO: 20496 - RNA, 19 nt, Artificial Sequence
  Synthetic
gcuucuugucagaggcaau

SEQ ID NO: 20497 - RNA, 20 nt, Artificial Sequence
  Synthetic
gaaguuuuaaaagcugcaau

SEQ ID NO: 20498 - RNA, 20 nt, Artificial Sequence
  Synthetic
gucuucaaccucagugcaau

SEQ ID NO: 20499 - RNA, 21 nt, Artificial Sequence
  Synthetic
ggucuucaaccucagugcaau

SEQ ID NO: 20500 - RNA, 20 nt, Artificial Sequence
  Synthetic
gacauucauggcaaaucaau

SEQ ID NO: 20501 - RNA, 22 nt, Artificial Sequence
  Synthetic
gagacauucauggcaaaucaau

SEQ ID NO: 20502 - RNA, 20 nt, Artificial Sequence
  Synthetic
gcuagcugcauuucaucaau

SEQ ID NO: 20503 - RNA, 21 nt, Artificial Sequence
  Synthetic
gcuaaauaugaucacuucaau

SEQ ID NO: 20504 - RNA, 22 nt, Artificial Sequence
  Synthetic
ggcuaaauaugaucacuucaau

SEQ ID NO: 20505 - RNA, 23 nt, Artificial Sequence
  Synthetic
gggcuaaauaugaucacuucaau

SEQ ID NO: 20506 - RNA, 24 nt, Artificial Sequence
  Synthetic
ggggcuaaauaugaucacuucaau

SEQ ID NO: 20507 - RNA, 20 nt, Artificial Sequence
  Synthetic
gauguaaugugaguuucaau

SEQ ID NO: 20508 - RNA, 21 nt, Artificial Sequence
  Synthetic
ggauguaaugugaguuucaau

SEQ ID NO: 20509 - RNA, 22 nt, Artificial Sequence
  Synthetic
guuuccacaguaaaaaaagaau

SEQ ID NO: 20510 - RNA, 18 nt, Artificial Sequence
  Synthetic
gaccccgaagcaaagaau

SEQ ID NO: 20511 - RNA, 20 nt, Artificial Sequence
  Synthetic
gagaccccgaagcaaagaau

SEQ ID NO: 20512 - RNA, 22 nt, Artificial Sequence
  Synthetic
gagagaccccgaagcaaagaau

SEQ ID NO: 20513 - RNA, 24 nt, Artificial Sequence
  Synthetic
gugagagaccccgaagcaaagaau

SEQ ID NO: 20514 - RNA, 21 nt, Artificial Sequence
  Synthetic
gguuauuuuuaaagaaagaau

SEQ ID NO: 20515 - RNA, 23 nt, Artificial Sequence
  Synthetic
gagguuauuuuuaaagaaagaau

SEQ ID NO: 20516 - RNA, 20 nt, Artificial Sequence
  Synthetic
guaauguauuuugaaagaau

SEQ ID NO: 20517 - RNA, 21 nt, Artificial Sequence
  Synthetic
gguaauguauuuugaaagaau

SEQ ID NO: 20518 - RNA, 23 nt, Artificial Sequence
  Synthetic
gauuucaagacacagucaagaau

SEQ ID NO: 20519 - RNA, 20 nt, Artificial Sequence
  Synthetic
gcauuucuagucugaagaau

SEQ ID NO: 20520 - RNA, 23 nt, Artificial Sequence
  Synthetic
gucuuaaguaaucauugaagaau

SEQ ID NO: 20521 - RNA, 22 nt, Artificial Sequence
  Synthetic
gauaauuucaugcucuaagaau

SEQ ID NO: 20522 - RNA, 23 nt, Artificial Sequence
  Synthetic
gcuacaacauuuucucacagaau

SEQ ID NO: 20523 - RNA, 22 nt, Artificial Sequence
  Synthetic
guuaacuuugguugcccagaau

SEQ ID NO: 20524 - RNA, 18 nt, Artificial Sequence
  Synthetic
gccaaagccauccagaau

SEQ ID NO: 20525 - RNA, 19 nt, Artificial Sequence
  Synthetic
ggccaaagccauccagaau

SEQ ID NO: 20526 - RNA, 20 nt, Artificial Sequence
  Synthetic
gucuuuuaguauagcagaau

SEQ ID NO: 20527 - RNA, 21 nt, Artificial Sequence
  Synthetic
ggucuuuuaguauagcagaau

SEQ ID NO: 20528 - RNA, 23 nt, Artificial Sequence
  Synthetic
guggucuuuuaguauagcagaau

SEQ ID NO: 20529 - RNA, 20 nt, Artificial Sequence
  Synthetic
gaaugaaaauauugcagaau

SEQ ID NO: 20530 - RNA, 20 nt, Artificial Sequence
  Synthetic
gcuaucauugggaucagaau

SEQ ID NO: 20531 - RNA, 19 nt, Artificial Sequence
  Synthetic
gcauauugccccucagaau

SEQ ID NO: 20532 - RNA, 23 nt, Artificial Sequence
  Synthetic
guaagcauauugccccucagaau

SEQ ID NO: 20533 - RNA, 19 nt, Artificial Sequence
  Synthetic
guggccaaaagcagagaau

SEQ ID NO: 20534 - RNA, 24 nt, Artificial Sequence
  Synthetic
gaaaaguggccaaaagcagagaau

SEQ ID NO: 20535 - RNA, 19 nt, Artificial Sequence
  Synthetic
gaauuuuucaggagagaau

SEQ ID NO: 20536 - RNA, 19 nt, Artificial Sequence
  Synthetic
gucaauauuacgugagaau

SEQ ID NO: 20537 - RNA, 21 nt, Artificial Sequence
  Synthetic
gugucaauauuacgugagaau

SEQ ID NO: 20538 - RNA, 22 nt, Artificial Sequence
  Synthetic
guuaagaucaugaugauagaau

SEQ ID NO: 20539 - RNA, 24 nt, Artificial Sequence
  Synthetic
guguuaagaucaugaugauagaau

SEQ ID NO: 20540 - RNA, 18 nt, Artificial Sequence
  Synthetic
gaggacaacuucuagaau

SEQ ID NO: 20541 - RNA, 21 nt, Artificial Sequence
  Synthetic
gaagaggacaacuucuagaau

SEQ ID NO: 20542 - RNA, 22 nt, Artificial Sequence
  Synthetic
ggaagaggacaacuucuagaau

SEQ ID NO: 20543 - RNA, 21 nt, Artificial Sequence
  Synthetic
gucuuaguuuuuuuuuagaau

SEQ ID NO: 20544 - RNA, 22 nt, Artificial Sequence
  Synthetic
ggucuuaguuuuuuuuuagaau

SEQ ID NO: 20545 - RNA, 23 nt, Artificial Sequence
  Synthetic
gggucuuaguuuuuuuuuagaau

SEQ ID NO: 20546 - RNA, 24 nt, Artificial Sequence
  Synthetic
ggggucuuaguuuuuuuuuagaau

SEQ ID NO: 20547 - RNA, 23 nt, Artificial Sequence
  Synthetic
guccaagcaucgcccccaggaau

SEQ ID NO: 20548 - RNA, 22 nt, Artificial Sequence
  Synthetic
gaucaggacccaagagaggaau

SEQ ID NO: 20549 - RNA, 23 nt, Artificial Sequence
  Synthetic
ggaucaggacccaagagaggaau

SEQ ID NO: 20550 - RNA, 21 nt, Artificial Sequence
  Synthetic
gaaccaauaaauucuaggaau

SEQ ID NO: 20551 - RNA, 18 nt, Artificial Sequence
  Synthetic
ggagacaggcaggggaau

SEQ ID NO: 20552 - RNA, 19 nt, Artificial Sequence
  Synthetic
gggagacaggcaggggaau

SEQ ID NO: 20553 - RNA, 23 nt, Artificial Sequence
  Synthetic
gacugggagacaggcaggggaau

SEQ ID NO: 20554 - RNA, 18 nt, Artificial Sequence
  Synthetic
gagaagacaauggggaau

SEQ ID NO: 20555 - RNA, 22 nt, Artificial Sequence
  Synthetic
gaaugagaagacaauggggaau

SEQ ID NO: 20556 - RNA, 19 nt, Artificial Sequence
  Synthetic
guuacauacauuugggaau

SEQ ID NO: 20557 - RNA, 24 nt, Artificial Sequence
  Synthetic
guacaguuacauacauuugggaau

SEQ ID NO: 20558 - RNA, 20 nt, Artificial Sequence
  Synthetic
guuugcuuguaugauggaau

SEQ ID NO: 20559 - RNA, 21 nt, Artificial Sequence
  Synthetic
gguuugcuuguaugauggaau

SEQ ID NO: 20560 - RNA, 22 nt, Artificial Sequence
  Synthetic
ggguuugcuuguaugauggaau

SEQ ID NO: 20561 - RNA, 24 nt, Artificial Sequence
  Synthetic
guggguuugcuuguaugauggaau

SEQ ID NO: 20562 - RNA, 21 nt, Artificial Sequence
  Synthetic
gaaucauguaucugcuggaau

SEQ ID NO: 20563 - RNA, 20 nt, Artificial Sequence
  Synthetic
guuacuuaacucucuggaau

SEQ ID NO: 20564 - RNA, 24 nt, Artificial Sequence
  Synthetic
gaaaguuacuuaacucucuggaau

SEQ ID NO: 20565 - RNA, 18 nt, Artificial Sequence
  Synthetic
guauguuuccaguggaau

SEQ ID NO: 20566 - RNA, 24 nt, Artificial Sequence
  Synthetic
gccuucuuacauccuucuuggaau

SEQ ID NO: 20567 - RNA, 20 nt, Artificial Sequence
  Synthetic
gacauuaauuggaaaugaau

SEQ ID NO: 20568 - RNA, 23 nt, Artificial Sequence
  Synthetic
gcugacauuaauuggaaaugaau

SEQ ID NO: 20569 - RNA, 23 nt, Artificial Sequence
  Synthetic
guucccauuuucaguaaaugaau

SEQ ID NO: 20570 - RNA, 23 nt, Artificial Sequence
  Synthetic
gcuuuucaaauuuugacaugaau

SEQ ID NO: 20571 - RNA, 18 nt, Artificial Sequence
  Synthetic
gaaagacaugggaugaau

SEQ ID NO: 20572 - RNA, 23 nt, Artificial Sequence
  Synthetic
guauuuuuuucaucuggaugaau

SEQ ID NO: 20573 - RNA, 24 nt, Artificial Sequence
  Synthetic
gcaucuguauacaaugugaugaau

SEQ ID NO: 20574 - RNA, 24 nt, Artificial Sequence
  Synthetic
guuuucuguuauuauuauaugaau

SEQ ID NO: 20575 - RNA, 21 nt, Artificial Sequence
  Synthetic
gcuaguguucugauuaugaau

SEQ ID NO: 20576 - RNA, 24 nt, Artificial Sequence
  Synthetic
gcagcuaguguucugauuaugaau

SEQ ID NO: 20577 - RNA, 23 nt, Artificial Sequence
  Synthetic
gcuauuugcaggauuuccugaau

SEQ ID NO: 20578 - RNA, 19 nt, Artificial Sequence
  Synthetic
gacaauaacauagcugaau

SEQ ID NO: 20579 - RNA, 23 nt, Artificial Sequence
  Synthetic
gcaagacaauaacauagcugaau

SEQ ID NO: 20580 - RNA, 18 nt, Artificial Sequence
  Synthetic
guaagaugcgggcugaau

SEQ ID NO: 20581 - RNA, 20 nt, Artificial Sequence
  Synthetic
gaguaagaugcgggcugaau

SEQ ID NO: 20582 - RNA, 24 nt, Artificial Sequence
  Synthetic
gccagaguaagaugcgggcugaau

SEQ ID NO: 20583 - RNA, 23 nt, Artificial Sequence
  Synthetic
gaaacagaugcguuuggcugaau

SEQ ID NO: 20584 - RNA, 18 nt, Artificial Sequence
  Synthetic
gaaccuuguguagugaau

SEQ ID NO: 20585 - RNA, 19 nt, Artificial Sequence
  Synthetic
ggaaccuuguguagugaau

SEQ ID NO: 20586 - RNA, 23 nt, Artificial Sequence
  Synthetic
gaaaaaaagaaaauaacgugaau

SEQ ID NO: 20587 - RNA, 24 nt, Artificial Sequence
  Synthetic
ggaaaaaaagaaaauaacgugaau

SEQ ID NO: 20588 - RNA, 22 nt, Artificial Sequence
  Synthetic
gauuuugaaaauucaggugaau

SEQ ID NO: 20589 - RNA, 23 nt, Artificial Sequence
  Synthetic
gaauacaaaagcugauggugaau

SEQ ID NO: 20590 - RNA, 24 nt, Artificial Sequence
  Synthetic
guaaaaaauaguaagagugugaau

SEQ ID NO: 20591 - RNA, 18 nt, Artificial Sequence
  Synthetic
gacaguaguauugugaau

SEQ ID NO: 20592 - RNA, 20 nt, Artificial Sequence
  Synthetic
gagacaguaguauugugaau

SEQ ID NO: 20593 - RNA, 23 nt, Artificial Sequence
  Synthetic
guagagacaguaguauugugaau

SEQ ID NO: 20594 - RNA, 24 nt, Artificial Sequence
  Synthetic
gguagagacaguaguauugugaau

SEQ ID NO: 20595 - RNA, 18 nt, Artificial Sequence
  Synthetic
gauggugccaaauugaau

SEQ ID NO: 20596 - RNA, 21 nt, Artificial Sequence
  Synthetic
gaugauggugccaaauugaau

SEQ ID NO: 20597 - RNA, 19 nt, Artificial Sequence
  Synthetic
gagaucauaacgauugaau

SEQ ID NO: 20598 - RNA, 20 nt, Artificial Sequence
  Synthetic
ggagaucauaacgauugaau

SEQ ID NO: 20599 - RNA, 18 nt, Artificial Sequence
  Synthetic
gggaguuacuauuugaau

SEQ ID NO: 20600 - RNA, 19 nt, Artificial Sequence
  Synthetic
gucaugcaacacuuugaau

SEQ ID NO: 20601 - RNA, 22 nt, Artificial Sequence
  Synthetic
guugucaugcaacacuuugaau

SEQ ID NO: 20602 - RNA, 19 nt, Artificial Sequence
  Synthetic
gaacucugcacuuuugaau

SEQ ID NO: 20603 - RNA, 21 nt, Artificial Sequence
  Synthetic
gugaacucugcacuuuugaau

SEQ ID NO: 20604 - RNA, 21 nt, Artificial Sequence
  Synthetic
gucaaagaguugcuuuugaau

SEQ ID NO: 20605 - RNA, 23 nt, Artificial Sequence
  Synthetic
gagucaaagaguugcuuuugaau

SEQ ID NO: 20606 - RNA, 24 nt, Artificial Sequence
  Synthetic
ggagucaaagaguugcuuuugaau

SEQ ID NO: 20607 - RNA, 20 nt, Artificial Sequence
  Synthetic
gaagggcaucagaaaauaau

SEQ ID NO: 20608 - RNA, 18 nt, Artificial Sequence
  Synthetic
guuuacauaagaaauaau

SEQ ID NO: 20609 - RNA, 22 nt, Artificial Sequence
  Synthetic
gaaaucuuggccaguaaauaau

SEQ ID NO: 20610 - RNA, 23 nt, Artificial Sequence
  Synthetic
ggaaaucuuggccaguaaauaau

SEQ ID NO: 20611 - RNA, 18 nt, Artificial Sequence
  Synthetic
gacuuuaaagacaauaau

SEQ ID NO: 20612 - RNA, 22 nt, Artificial Sequence
  Synthetic
gccuaguggaacucucaauaau

SEQ ID NO: 20613 - RNA, 23 nt, Artificial Sequence
  Synthetic
ggccuaguggaacucucaauaau

SEQ ID NO: 20614 - RNA, 19 nt, Artificial Sequence
  Synthetic
gagacaguacuucaauaau

SEQ ID NO: 20615 - RNA, 20 nt, Artificial Sequence
  Synthetic
ggagacaguacuucaauaau

SEQ ID NO: 20616 - RNA, 21 nt, Artificial Sequence
  Synthetic
gggagacaguacuucaauaau

SEQ ID NO: 20617 - RNA, 23 nt, Artificial Sequence
  Synthetic
gcgggagacaguacuucaauaau

SEQ ID NO: 20618 - RNA, 19 nt, Artificial Sequence
  Synthetic
guugcuauaaaagaauaau

SEQ ID NO: 20619 - RNA, 20 nt, Artificial Sequence
  Synthetic
gguugcuauaaaagaauaau

SEQ ID NO: 20620 - RNA, 20 nt, Artificial Sequence
  Synthetic
gucaucaacagaugaauaau

SEQ ID NO: 20621 - RNA, 22 nt, Artificial Sequence
  Synthetic
gugucaucaacagaugaauaau

SEQ ID NO: 20622 - RNA, 23 nt, Artificial Sequence
  Synthetic
ggugucaucaacagaugaauaau

SEQ ID NO: 20623 - RNA, 24 nt, Artificial Sequence
  Synthetic
gggugucaucaacagaugaauaau

SEQ ID NO: 20624 - RNA, 23 nt, Artificial Sequence
  Synthetic
gaacaucaaagaaggcuaauaau

SEQ ID NO: 20625 - RNA, 22 nt, Artificial Sequence
  Synthetic
gccaauuuagaaauguaauaau

SEQ ID NO: 20626 - RNA, 24 nt, Artificial Sequence
  Synthetic
gaaaagauucuuuuaaaacauaau

SEQ ID NO: 20627 - RNA, 22 nt, Artificial Sequence
  Synthetic
gauuaaauuaaauucacauaau

SEQ ID NO: 20628 - RNA, 21 nt, Artificial Sequence
  Synthetic
gaccccauagcuaaagauaau

SEQ ID NO: 20629 - RNA, 24 nt, Artificial Sequence
  Synthetic
guuuucugucgugucuuugauaau

SEQ ID NO: 20630 - RNA, 19 nt, Artificial Sequence
  Synthetic
guucuuuaugcaauauaau

SEQ ID NO: 20631 - RNA, 22 nt, Artificial Sequence
  Synthetic
gucugaaaucucugccuauaau

SEQ ID NO: 20632 - RNA, 21 nt, Artificial Sequence
  Synthetic
gacuugaccuucgucuauaau

SEQ ID NO: 20633 - RNA, 22 nt, Artificial Sequence
  Synthetic
ggacuugaccuucgucuauaau

SEQ ID NO: 20634 - RNA, 18 nt, Artificial Sequence
  Synthetic
gaucaagagagguauaau

SEQ ID NO: 20635 - RNA, 20 nt, Artificial Sequence
  Synthetic
gagaucaagagagguauaau

SEQ ID NO: 20636 - RNA, 22 nt, Artificial Sequence
  Synthetic
guuugcuuuguuuuguuauaau

SEQ ID NO: 20637 - RNA, 19 nt, Artificial Sequence
  Synthetic
gaguuaaacaauuuauaau

SEQ ID NO: 20638 - RNA, 23 nt, Artificial Sequence
  Synthetic
gaaagaguuaaacaauuuauaau

SEQ ID NO: 20639 - RNA, 24 nt, Artificial Sequence
  Synthetic
gacaacauauuuauuaaaacuaau

SEQ ID NO: 20640 - RNA, 23 nt, Artificial Sequence
  Synthetic
guuucaguaaaccugacacuaau

SEQ ID NO: 20641 - RNA, 24 nt, Artificial Sequence
  Synthetic
gaaacaaacuaaaggcucacuaau

SEQ ID NO: 20642 - RNA, 20 nt, Artificial Sequence
  Synthetic
gcucauuacugcucacuaau

SEQ ID NO: 20643 - RNA, 21 nt, Artificial Sequence
  Synthetic
ggcucauuacugcucacuaau

SEQ ID NO: 20644 - RNA, 20 nt, Artificial Sequence
  Synthetic
gaaaaauaaugguuacuaau

SEQ ID NO: 20645 - RNA, 21 nt, Artificial Sequence
  Synthetic
gacuccucaacuuacccuaau

SEQ ID NO: 20646 - RNA, 18 nt, Artificial Sequence
  Synthetic
gacugucuuauuccuaau

SEQ ID NO: 20647 - RNA, 19 nt, Artificial Sequence
  Synthetic
ggacugucuuauuccuaau

SEQ ID NO: 20648 - RNA, 20 nt, Artificial Sequence
  Synthetic
gggacugucuuauuccuaau

SEQ ID NO: 20649 - RNA, 21 nt, Artificial Sequence
  Synthetic
gacaacguggaggcagcuaau

SEQ ID NO: 20650 - RNA, 22 nt, Artificial Sequence
  Synthetic
gacauuugugggagugucuaau

SEQ ID NO: 20651 - RNA, 20 nt, Artificial Sequence
  Synthetic
gaaaagguaguacaaguaau

SEQ ID NO: 20652 - RNA, 19 nt, Artificial Sequence
  Synthetic
gauuuugauucucaguaau

SEQ ID NO: 20653 - RNA, 22 nt, Artificial Sequence
  Synthetic
gucuuuucuaauccuugguaau

SEQ ID NO: 20654 - RNA, 19 nt, Artificial Sequence
  Synthetic
guuucgauuaggauguaau

SEQ ID NO: 20655 - RNA, 22 nt, Artificial Sequence
  Synthetic
guaguuucgauuaggauguaau

SEQ ID NO: 20656 - RNA, 24 nt, Artificial Sequence
  Synthetic
gauucaccaagcaugcacuguaau

SEQ ID NO: 20657 - RNA, 19 nt, Artificial Sequence
  Synthetic
gaucacuuaccuguguaau

SEQ ID NO: 20658 - RNA, 24 nt, Artificial Sequence
  Synthetic
gcaaccauauaauaucuuuguaau

SEQ ID NO: 20659 - RNA, 18 nt, Artificial Sequence
  Synthetic
gcauuuauagucauuaau

SEQ ID NO: 20660 - RNA, 20 nt, Artificial Sequence
  Synthetic
guuauaauuaggauauuaau

SEQ ID NO: 20661 - RNA, 21 nt, Artificial Sequence
  Synthetic
gaaagcucauuugcuauuaau

SEQ ID NO: 20662 - RNA, 22 nt, Artificial Sequence
  Synthetic
ggaaagcucauuugcuauuaau

SEQ ID NO: 20663 - RNA, 23 nt, Artificial Sequence
  Synthetic
gggaaagcucauuugcuauuaau

SEQ ID NO: 20664 - RNA, 24 nt, Artificial Sequence
  Synthetic
gcuuuacaugugaugacacuuaau

SEQ ID NO: 20665 - RNA, 21 nt, Artificial Sequence
  Synthetic
guaaucaauggcaaaguuaau

SEQ ID NO: 20666 - RNA, 21 nt, Artificial Sequence
  Synthetic
gaacagcuccagaggguuaau

SEQ ID NO: 20667 - RNA, 24 nt, Artificial Sequence
  Synthetic
gcugaacagcuccagaggguuaau

SEQ ID NO: 20668 - RNA, 18 nt, Artificial Sequence
  Synthetic
gcuaaucauuaauuuaau

SEQ ID NO: 20669 - RNA, 24 nt, Artificial Sequence
  Synthetic
gcauuuuauucaguuuacuuuaau

SEQ ID NO: 20670 - RNA, 21 nt, Artificial Sequence
  Synthetic
gcucccugaugugucuuuaau

SEQ ID NO: 20671 - RNA, 19 nt, Artificial Sequence
  Synthetic
gccaaauauucaguuuaau

SEQ ID NO: 20672 - RNA, 21 nt, Artificial Sequence
  Synthetic
gauuuaaaucuucaguuuaau

SEQ ID NO: 20673 - RNA, 22 nt, Artificial Sequence
  Synthetic
guucuuuuccuuuugguuuaau

SEQ ID NO: 20674 - RNA, 21 nt, Artificial Sequence
  Synthetic
gcaaagcuuccugauuuuaau

SEQ ID NO: 20675 - RNA, 19 nt, Artificial Sequence
  Synthetic
guggaaaacugguuuuaau

SEQ ID NO: 20676 - RNA, 22 nt, Artificial Sequence
  Synthetic
gcauucuuauugauuuuuuaau

SEQ ID NO: 20677 - RNA, 21 nt, Artificial Sequence
  Synthetic
gcuucauaugccaaaaaacau

SEQ ID NO: 20678 - RNA, 22 nt, Artificial Sequence
  Synthetic
ggcuucauaugccaaaaaacau

SEQ ID NO: 20679 - RNA, 18 nt, Artificial Sequence
  Synthetic
gagaacaagggaaaacau

SEQ ID NO: 20680 - RNA, 21 nt, Artificial Sequence
  Synthetic
guugagaacaagggaaaacau

SEQ ID NO: 20681 - RNA, 24 nt, Artificial Sequence
  Synthetic
guuagacauggggucauaaaacau

SEQ ID NO: 20682 - RNA, 21 nt, Artificial Sequence
  Synthetic
gaacauguccuagagaaacau

SEQ ID NO: 20683 - RNA, 20 nt, Artificial Sequence
  Synthetic
gaagaaccacuuauaaacau

SEQ ID NO: 20684 - RNA, 22 nt, Artificial Sequence
  Synthetic
gagaagaaccacuuauaaacau

SEQ ID NO: 20685 - RNA, 19 nt, Artificial Sequence
  Synthetic
gcacucacacagacaacau

SEQ ID NO: 20686 - RNA, 19 nt, Artificial Sequence
  Synthetic
gccaggacucuuacaacau

SEQ ID NO: 20687 - RNA, 22 nt, Artificial Sequence
  Synthetic
gaagccaggacucuuacaacau

SEQ ID NO: 20688 - RNA, 22 nt, Artificial Sequence
  Synthetic
gaauauuuuauauaaccaacau

SEQ ID NO: 20689 - RNA, 19 nt, Artificial Sequence
  Synthetic
guuugccguucaccaacau

SEQ ID NO: 20690 - RNA, 20 nt, Artificial Sequence
  Synthetic
gguuugccguucaccaacau

SEQ ID NO: 20691 - RNA, 23 nt, Artificial Sequence
  Synthetic
gcugguuugccguucaccaacau

SEQ ID NO: 20692 - RNA, 21 nt, Artificial Sequence
  Synthetic
gagagcuccaucuugcaacau

SEQ ID NO: 20693 - RNA, 21 nt, Artificial Sequence
  Synthetic
gcuauuaaauagcaucaacau

SEQ ID NO: 20694 - RNA, 19 nt, Artificial Sequence
  Synthetic
gcuuaagggucaucaacau

SEQ ID NO: 20695 - RNA, 21 nt, Artificial Sequence
  Synthetic
gaugagaaguaaaaagaacau

SEQ ID NO: 20696 - RNA, 23 nt, Artificial Sequence
  Synthetic
gagaugagaaguaaaaagaacau

SEQ ID NO: 20697 - RNA, 18 nt, Artificial Sequence
  Synthetic
gucuagaaauaagaacau

SEQ ID NO: 20698 - RNA, 21 nt, Artificial Sequence
  Synthetic
guauagugcugcgacgaacau

SEQ ID NO: 20699 - RNA, 23 nt, Artificial Sequence
  Synthetic
gaauuaaggguaagugggaacau

SEQ ID NO: 20700 - RNA, 19 nt, Artificial Sequence
  Synthetic
gugggaaaaacuugaacau

SEQ ID NO: 20701 - RNA, 21 nt, Artificial Sequence
  Synthetic
gagugggaaaaacuugaacau

SEQ ID NO: 20702 - RNA, 23 nt, Artificial Sequence
  Synthetic
gugagugggaaaaacuugaacau

SEQ ID NO: 20703 - RNA, 24 nt, Artificial Sequence
  Synthetic
ggugagugggaaaaacuugaacau

SEQ ID NO: 20704 - RNA, 23 nt, Artificial Sequence
  Synthetic
gaauuaucuaagaaagauaacau

SEQ ID NO: 20705 - RNA, 21 nt, Artificial Sequence
  Synthetic
guuacccacaaaagcuaacau

SEQ ID NO: 20706 - RNA, 22 nt, Artificial Sequence
  Synthetic
gguuacccacaaaagcuaacau

SEQ ID NO: 20707 - RNA, 20 nt, Artificial Sequence
  Synthetic
gaagagagacaugaacacau

SEQ ID NO: 20708 - RNA, 21 nt, Artificial Sequence
  Synthetic
ggaagagagacaugaacacau

SEQ ID NO: 20709 - RNA, 22 nt, Artificial Sequence
  Synthetic
gcaauuccauaauuguccacau

SEQ ID NO: 20710 - RNA, 24 nt, Artificial Sequence
  Synthetic
gagcaauuccauaauuguccacau

SEQ ID NO: 20711 - RNA, 20 nt, Artificial Sequence
  Synthetic
guuuggaaagaagggcacau

SEQ ID NO: 20712 - RNA, 19 nt, Artificial Sequence
  Synthetic
gaaauauaaacuggcacau

SEQ ID NO: 20713 - RNA, 24 nt, Artificial Sequence
  Synthetic
gacaagaaauauaaacuggcacau

SEQ ID NO: 20714 - RNA, 21 nt, Artificial Sequence
  Synthetic
gaucugaaagucacugcacau

SEQ ID NO: 20715 - RNA, 23 nt, Artificial Sequence
  Synthetic
guuuaccuaagacaguugcacau

SEQ ID NO: 20716 - RNA, 20 nt, Artificial Sequence
  Synthetic
guaucacauauuuaucacau

SEQ ID NO: 20717 - RNA, 19 nt, Artificial Sequence
  Synthetic
gccauacauauuuucacau

SEQ ID NO: 20718 - RNA, 21 nt, Artificial Sequence
  Synthetic
gagccauacauauuuucacau

SEQ ID NO: 20719 - RNA, 24 nt, Artificial Sequence
  Synthetic
gcugagccauacauauuuucacau

SEQ ID NO: 20720 - RNA, 18 nt, Artificial Sequence
  Synthetic
guuauuaccaagagacau

SEQ ID NO: 20721 - RNA, 24 nt, Artificial Sequence
  Synthetic
gaauuuaugucauuugugagacau

SEQ ID NO: 20722 - RNA, 23 nt, Artificial Sequence
  Synthetic
gaacuucugcuuuaagaggacau

SEQ ID NO: 20723 - RNA, 24 nt, Artificial Sequence
  Synthetic
ggaacuucugcuuuaagaggacau

SEQ ID NO: 20724 - RNA, 20 nt, Artificial Sequence
  Synthetic
guaauuuguaaaauggacau

SEQ ID NO: 20725 - RNA, 21 nt, Artificial Sequence
  Synthetic
gguaauuuguaaaauggacau

SEQ ID NO: 20726 - RNA, 23 nt, Artificial Sequence
  Synthetic
gugguaauuuguaaaauggacau

SEQ ID NO: 20727 - RNA, 21 nt, Artificial Sequence
  Synthetic
gaucacacucacacaugacau

SEQ ID NO: 20728 - RNA, 24 nt, Artificial Sequence
  Synthetic
gcagaucacacucacacaugacau

SEQ ID NO: 20729 - RNA, 20 nt, Artificial Sequence
  Synthetic
gacugcagccuaauugacau

SEQ ID NO: 20730 - RNA, 19 nt, Artificial Sequence
  Synthetic
gcauuaaaacuaaauacau

SEQ ID NO: 20731 - RNA, 24 nt, Artificial Sequence
  Synthetic
gcuuugcauuaaaacuaaauacau

SEQ ID NO: 20732 - RNA, 21 nt, Artificial Sequence
  Synthetic
gaauaccaccucucaauacau

SEQ ID NO: 20733 - RNA, 20 nt, Artificial Sequence
  Synthetic
gauuagaaaucugaauacau

SEQ ID NO: 20734 - RNA, 23 nt, Artificial Sequence
  Synthetic
guugauuagaaaucugaauacau

SEQ ID NO: 20735 - RNA, 23 nt, Artificial Sequence
  Synthetic
gcuucauuaacaguauaauacau

SEQ ID NO: 20736 - RNA, 19 nt, Artificial Sequence
  Synthetic
gcacuuuaaaguaauacau

SEQ ID NO: 20737 - RNA, 23 nt, Artificial Sequence
  Synthetic
gcuguauauauacaggcauacau

SEQ ID NO: 20738 - RNA, 24 nt, Artificial Sequence
  Synthetic
ggcuguauauauacaggcauacau

SEQ ID NO: 20739 - RNA, 20 nt, Artificial Sequence
  Synthetic
gcuacaaagugaagauacau

SEQ ID NO: 20740 - RNA, 22 nt, Artificial Sequence
  Synthetic
gugcuacaaagugaagauacau

SEQ ID NO: 20741 - RNA, 24 nt, Artificial Sequence
  Synthetic
gagugcuacaaagugaagauacau

SEQ ID NO: 20742 - RNA, 19 nt, Artificial Sequence
  Synthetic
gagguaaucuguccuacau

SEQ ID NO: 20743 - RNA, 22 nt, Artificial Sequence
  Synthetic
gaagagguaaucuguccuacau

SEQ ID NO: 20744 - RNA, 21 nt, Artificial Sequence
  Synthetic
gaaacaugagauuuccuacau

SEQ ID NO: 20745 - RNA, 18 nt, Artificial Sequence
  Synthetic
gaauuugauaaucuacau

SEQ ID NO: 20746 - RNA, 21 nt, Artificial Sequence
  Synthetic
gcuaaccaaaggugaguacau

SEQ ID NO: 20747 - RNA, 23 nt, Artificial Sequence
  Synthetic
gagcuaaccaaaggugaguacau

SEQ ID NO: 20748 - RNA, 24 nt, Artificial Sequence
  Synthetic
gauacauugcucugcaugguacau

SEQ ID NO: 20749 - RNA, 20 nt, Artificial Sequence
  Synthetic
guuuuggcuauuugguacau

SEQ ID NO: 20750 - RNA, 20 nt, Artificial Sequence
  Synthetic
gaaucaugggaauuguacau

SEQ ID NO: 20751 - RNA, 19 nt, Artificial Sequence
  Synthetic
gcaacaugaacuauuacau

SEQ ID NO: 20752 - RNA, 20 nt, Artificial Sequence
  Synthetic
ggcaacaugaacuauuacau

SEQ ID NO: 20753 - RNA, 18 nt, Artificial Sequence
  Synthetic
guugaucauauuuuacau

SEQ ID NO: 20754 - RNA, 20 nt, Artificial Sequence
  Synthetic
gcguugaucauauuuuacau

SEQ ID NO: 20755 - RNA, 21 nt, Artificial Sequence
  Synthetic
ggcguugaucauauuuuacau

SEQ ID NO: 20756 - RNA, 20 nt, Artificial Sequence
  Synthetic
gcacucauuacacaaaccau

SEQ ID NO: 20757 - RNA, 21 nt, Artificial Sequence
  Synthetic
ggcacucauuacacaaaccau

SEQ ID NO: 20758 - RNA, 23 nt, Artificial Sequence
  Synthetic
guggcacucauuacacaaaccau

SEQ ID NO: 20759 - RNA, 24 nt, Artificial Sequence
  Synthetic
gguggcacucauuacacaaaccau

SEQ ID NO: 20760 - RNA, 18 nt, Artificial Sequence
  Synthetic
gagcuuccaggaaaccau

SEQ ID NO: 20761 - RNA, 22 nt, Artificial Sequence
  Synthetic
gaaugagcuuccaggaaaccau

SEQ ID NO: 20762 - RNA, 22 nt, Artificial Sequence
  Synthetic
guuuuaaauuuuccggaaccau

SEQ ID NO: 20763 - RNA, 23 nt, Artificial Sequence
  Synthetic
gauucacacagaguaauaaccau

SEQ ID NO: 20764 - RNA, 21 nt, Artificial Sequence
  Synthetic
gaauaaaauccauauaaccau

SEQ ID NO: 20765 - RNA, 20 nt, Artificial Sequence
  Synthetic
gcccugaccauaagcaccau

SEQ ID NO: 20766 - RNA, 24 nt, Artificial Sequence
  Synthetic
gcuagcccugaccauaagcaccau

SEQ ID NO: 20767 - RNA, 19 nt, Artificial Sequence
  Synthetic
gaaauuuuacuuucaccau

SEQ ID NO: 20768 - RNA, 20 nt, Artificial Sequence
  Synthetic
guaacaccaagcaagaccau

SEQ ID NO: 20769 - RNA, 18 nt, Artificial Sequence
  Synthetic
gucugaguaggggaccau

SEQ ID NO: 20770 - RNA, 21 nt, Artificial Sequence
  Synthetic
gcugucugaguaggggaccau

SEQ ID NO: 20771 - RNA, 22 nt, Artificial Sequence
  Synthetic
ggcugucugaguaggggaccau

SEQ ID NO: 20772 - RNA, 24 nt, Artificial Sequence
  Synthetic
gaggcugucugaguaggggaccau

SEQ ID NO: 20773 - RNA, 21 nt, Artificial Sequence
  Synthetic
gaaaaugcuuucuuggaccau

SEQ ID NO: 20774 - RNA, 24 nt, Artificial Sequence
  Synthetic
gucuucucuuggagaaaauaccau

SEQ ID NO: 20775 - RNA, 24 nt, Artificial Sequence
  Synthetic
gcauccauaucuauuaaauaccau

SEQ ID NO: 20776 - RNA, 20 nt, Artificial Sequence
  Synthetic
gauauaagagguuauaccau

SEQ ID NO: 20777 - RNA, 19 nt, Artificial Sequence
  Synthetic
guguuaucggccaacccau

SEQ ID NO: 20778 - RNA, 18 nt, Artificial Sequence
  Synthetic
gcaucaaucuggccccau

SEQ ID NO: 20779 - RNA, 23 nt, Artificial Sequence
  Synthetic
gaccagcaucaaucuggccccau

SEQ ID NO: 20780 - RNA, 19 nt, Artificial Sequence
  Synthetic
guugacugcuuuuccccau

SEQ ID NO: 20781 - RNA, 19 nt, Artificial Sequence
  Synthetic
gaugaauaacugaagccau

SEQ ID NO: 20782 - RNA, 21 nt, Artificial Sequence
  Synthetic
gugaugaauaacugaagccau

SEQ ID NO: 20783 - RNA, 21 nt, Artificial Sequence
  Synthetic
gcacacacuguaaagagccau

SEQ ID NO: 20784 - RNA, 18 nt, Artificial Sequence
  Synthetic
gggagcagagcaugccau

SEQ ID NO: 20785 - RNA, 23 nt, Artificial Sequence
  Synthetic
gucuagggagcagagcaugccau

SEQ ID NO: 20786 - RNA, 18 nt, Artificial Sequence
  Synthetic
gaugacuaaauaugccau

SEQ ID NO: 20787 - RNA, 24 nt, Artificial Sequence
  Synthetic
guucaugaugacuaaauaugccau

SEQ ID NO: 20788 - RNA, 20 nt, Artificial Sequence
  Synthetic
gccagcauuaacauugccau

SEQ ID NO: 20789 - RNA, 21 nt, Artificial Sequence
  Synthetic
gcuuaucguauuccuauccau

SEQ ID NO: 20790 - RNA, 24 nt, Artificial Sequence
  Synthetic
gaaaucacgauaaugcuuauccau

SEQ ID NO: 20791 - RNA, 19 nt, Artificial Sequence
  Synthetic
gcuaauuuauuaucuccau

SEQ ID NO: 20792 - RNA, 18 nt, Artificial Sequence
  Synthetic
ggaccuccguuucuccau

SEQ ID NO: 20793 - RNA, 23 nt, Artificial Sequence
  Synthetic
gcucaggaccuccguuucuccau

SEQ ID NO: 20794 - RNA, 21 nt, Artificial Sequence
  Synthetic
gauaaggaugaacauguccau

SEQ ID NO: 20795 - RNA, 22 nt, Artificial Sequence
  Synthetic
ggauaaggaugaacauguccau

SEQ ID NO: 20796 - RNA, 23 nt, Artificial Sequence
  Synthetic
gggauaaggaugaacauguccau

SEQ ID NO: 20797 - RNA, 19 nt, Artificial Sequence
  Synthetic
gucaaaaauuucuguccau

SEQ ID NO: 20798 - RNA, 18 nt, Artificial Sequence
  Synthetic
gauaccaauugauuccau

SEQ ID NO: 20799 - RNA, 23 nt, Artificial Sequence
  Synthetic
gaaaguucuuguuuuuuuuccau

SEQ ID NO: 20800 - RNA, 18 nt, Artificial Sequence
  Synthetic
gccugcagguaaaagcau

SEQ ID NO: 20801 - RNA, 19 nt, Artificial Sequence
  Synthetic
gauuuccuuuuuaaagcau

SEQ ID NO: 20802 - RNA, 20 nt, Artificial Sequence
  Synthetic
ggauuuccuuuuuaaagcau

SEQ ID NO: 20803 - RNA, 22 nt, Artificial Sequence
  Synthetic
guggauuuccuuuuuaaagcau

SEQ ID NO: 20804 - RNA, 20 nt, Artificial Sequence
  Synthetic
gauaaguuagcaucaagcau

SEQ ID NO: 20805 - RNA, 22 nt, Artificial Sequence
  Synthetic
gcgauaaguuagcaucaagcau

SEQ ID NO: 20806 - RNA, 24 nt, Artificial Sequence
  Synthetic
gugcgauaaguuagcaucaagcau

SEQ ID NO: 20807 - RNA, 20 nt, Artificial Sequence
  Synthetic
gauaacgggcauugaagcau

SEQ ID NO: 20808 - RNA, 24 nt, Artificial Sequence
  Synthetic
gaaugauaacgggcauugaagcau

SEQ ID NO: 20809 - RNA, 19 nt, Artificial Sequence
  Synthetic
gacuuccaaaugccagcau

SEQ ID NO: 20810 - RNA, 23 nt, Artificial Sequence
  Synthetic
guuugacuuccaaaugccagcau

SEQ ID NO: 20811 - RNA, 24 nt, Artificial Sequence
  Synthetic
gguuugacuuccaaaugccagcau

SEQ ID NO: 20812 - RNA, 22 nt, Artificial Sequence
  Synthetic
gauaaaccuaaaugugcagcau

SEQ ID NO: 20813 - RNA, 23 nt, Artificial Sequence
  Synthetic
ggauaaaccuaaaugugcagcau

SEQ ID NO: 20814 - RNA, 23 nt, Artificial Sequence
  Synthetic
gaaauuagaaggcgauucagcau

SEQ ID NO: 20815 - RNA, 21 nt, Artificial Sequence
  Synthetic
gcuugggccaucaaggagcau

SEQ ID NO: 20816 - RNA, 22 nt, Artificial Sequence
  Synthetic
ggcuugggccaucaaggagcau

SEQ ID NO: 20817 - RNA, 24 nt, Artificial Sequence
  Synthetic
guggcuugggccaucaaggagcau

SEQ ID NO: 20818 - RNA, 20 nt, Artificial Sequence
  Synthetic
guuugggugauccuuagcau

SEQ ID NO: 20819 - RNA, 22 nt, Artificial Sequence
  Synthetic
gauaagaaguucuuuuuagcau

SEQ ID NO: 20820 - RNA, 23 nt, Artificial Sequence
  Synthetic
ggauaagaaguucuuuuuagcau

SEQ ID NO: 20821 - RNA, 24 nt, Artificial Sequence
  Synthetic
gggauaagaaguucuuuuuagcau

SEQ ID NO: 20822 - RNA, 18 nt, Artificial Sequence
  Synthetic
gaucuagcaaucccgcau

SEQ ID NO: 20823 - RNA, 23 nt, Artificial Sequence
  Synthetic
gcuuauucacauaaucaaggcau

SEQ ID NO: 20824 - RNA, 19 nt, Artificial Sequence
  Synthetic
gaaaacauauuccaggcau

SEQ ID NO: 20825 - RNA, 19 nt, Artificial Sequence
  Synthetic
gcaccuauuuuccaggcau

SEQ ID NO: 20826 - RNA, 23 nt, Artificial Sequence
  Synthetic
gucagcaccuauuuuccaggcau

SEQ ID NO: 20827 - RNA, 21 nt, Artificial Sequence
  Synthetic
gcaccaccuaaugucaggcau

SEQ ID NO: 20828 - RNA, 18 nt, Artificial Sequence
  Synthetic
gggacauggccagggcau

SEQ ID NO: 20829 - RNA, 21 nt, Artificial Sequence
  Synthetic
gaauauuugaaaggauggcau

SEQ ID NO: 20830 - RNA, 19 nt, Artificial Sequence
  Synthetic
gaccauggcagacuggcau

SEQ ID NO: 20831 - RNA, 20 nt, Artificial Sequence
  Synthetic
ggaccauggcagacuggcau

SEQ ID NO: 20832 - RNA, 22 nt, Artificial Sequence
  Synthetic
gaaauggcaacaaggcuggcau

SEQ ID NO: 20833 - RNA, 19 nt, Artificial Sequence
  Synthetic
gaaggaagacaauaugcau

SEQ ID NO: 20834 - RNA, 21 nt, Artificial Sequence
  Synthetic
gagaaggaagacaauaugcau

SEQ ID NO: 20835 - RNA, 23 nt, Artificial Sequence
  Synthetic
gugagaaggaagacaauaugcau

SEQ ID NO: 20836 - RNA, 24 nt, Artificial Sequence
  Synthetic
ggugagaaggaagacaauaugcau

SEQ ID NO: 20837 - RNA, 21 nt, Artificial Sequence
  Synthetic
gcucuccucaaguuuaugcau

SEQ ID NO: 20838 - RNA, 24 nt, Artificial Sequence
  Synthetic
gaagcucuccucaaguuuaugcau

SEQ ID NO: 20839 - RNA, 18 nt, Artificial Sequence
  Synthetic
gcucacacgcuccugcau

SEQ ID NO: 20840 - RNA, 18 nt, Artificial Sequence
  Synthetic
gguucagggccagugcau

SEQ ID NO: 20841 - RNA, 20 nt, Artificial Sequence
  Synthetic
gugguucagggccagugcau

SEQ ID NO: 20842 - RNA, 22 nt, Artificial Sequence
  Synthetic
gugugguucagggccagugcau

SEQ ID NO: 20843 - RNA, 22 nt, Artificial Sequence
  Synthetic
gaacacaaccuugucugugcau

SEQ ID NO: 20844 - RNA, 23 nt, Artificial Sequence
  Synthetic
ggaacacaaccuugucugugcau

SEQ ID NO: 20845 - RNA, 20 nt, Artificial Sequence
  Synthetic
gauguuuuuagauugugcau

SEQ ID NO: 20846 - RNA, 24 nt, Artificial Sequence
  Synthetic
gaucgauguuuuuagauugugcau

SEQ ID NO: 20847 - RNA, 24 nt, Artificial Sequence
  Synthetic
gauacacaguugcucuacuugcau

SEQ ID NO: 20848 - RNA, 18 nt, Artificial Sequence
  Synthetic
guaauuuguaccuugcau

SEQ ID NO: 20849 - RNA, 20 nt, Artificial Sequence
  Synthetic
guguaauuuguaccuugcau

SEQ ID NO: 20850 - RNA, 21 nt, Artificial Sequence
  Synthetic
gguguaauuuguaccuugcau

SEQ ID NO: 20851 - RNA, 22 nt, Artificial Sequence
  Synthetic
ggguguaauuuguaccuugcau

SEQ ID NO: 20852 - RNA, 18 nt, Artificial Sequence
  Synthetic
gaauccuguuucuugcau

SEQ ID NO: 20853 - RNA, 18 nt, Artificial Sequence
  Synthetic
gggaaacuucgaaaucau

SEQ ID NO: 20854 - RNA, 20 nt, Artificial Sequence
  Synthetic
guuucaaagguauaaaucau

SEQ ID NO: 20855 - RNA, 18 nt, Artificial Sequence
  Synthetic
gaauuguacaagaaucau

SEQ ID NO: 20856 - RNA, 19 nt, Artificial Sequence
  Synthetic
ggaauuguacaagaaucau

SEQ ID NO: 20857 - RNA, 23 nt, Artificial Sequence
  Synthetic
guaaucaaaaaaucucuaaucau

SEQ ID NO: 20858 - RNA, 24 nt, Artificial Sequence
  Synthetic
gguaaucaaaaaaucucuaaucau

SEQ ID NO: 20859 - RNA, 19 nt, Artificial Sequence
  Synthetic
guaaugaaacugacaucau

SEQ ID NO: 20860 - RNA, 20 nt, Artificial Sequence
  Synthetic
gguaaugaaacugacaucau

SEQ ID NO: 20861 - RNA, 23 nt, Artificial Sequence
  Synthetic
gaugguaaugaaacugacaucau

SEQ ID NO: 20862 - RNA, 21 nt, Artificial Sequence
  Synthetic
guuacacagcuaauagaucau

SEQ ID NO: 20863 - RNA, 22 nt, Artificial Sequence
  Synthetic
gguuacacagcuaauagaucau

SEQ ID NO: 20864 - RNA, 19 nt, Artificial Sequence
  Synthetic
gauuaaacauggauaucau

SEQ ID NO: 20865 - RNA, 18 nt, Artificial Sequence
  Synthetic
gcauacuauuacuaucau

SEQ ID NO: 20866 - RNA, 21 nt, Artificial Sequence
  Synthetic
guuuauauguuuugcuaucau

SEQ ID NO: 20867 - RNA, 22 nt, Artificial Sequence
  Synthetic
gcaaagugaacaacaguaucau

SEQ ID NO: 20868 - RNA, 24 nt, Artificial Sequence
  Synthetic
gugcaaagugaacaacaguaucau

SEQ ID NO: 20869 - RNA, 19 nt, Artificial Sequence
  Synthetic
guggaaaggcuuguaucau

SEQ ID NO: 20870 - RNA, 21 nt, Artificial Sequence
  Synthetic
guguggaaaggcuuguaucau

SEQ ID NO: 20871 - RNA, 19 nt, Artificial Sequence
  Synthetic
gcagcaugauauuuaucau

SEQ ID NO: 20872 - RNA, 22 nt, Artificial Sequence
  Synthetic
guugcagcaugauauuuaucau

SEQ ID NO: 20873 - RNA, 23 nt, Artificial Sequence
  Synthetic
gguugcagcaugauauuuaucau

SEQ ID NO: 20874 - RNA, 24 nt, Artificial Sequence
  Synthetic
ggguugcagcaugauauuuaucau

SEQ ID NO: 20875 - RNA, 23 nt, Artificial Sequence
  Synthetic
gaacuccucuccauuccacucau

SEQ ID NO: 20876 - RNA, 20 nt, Artificial Sequence
  Synthetic
guuagaucauccuuacucau

SEQ ID NO: 20877 - RNA, 19 nt, Artificial Sequence
  Synthetic
gcucauugaccugccucau

SEQ ID NO: 20878 - RNA, 24 nt, Artificial Sequence
  Synthetic
gaccugcucauugaccugccucau

SEQ ID NO: 20879 - RNA, 20 nt, Artificial Sequence
  Synthetic
gauggugcugggcugcucau

SEQ ID NO: 20880 - RNA, 22 nt, Artificial Sequence
  Synthetic
gugauggugcugggcugcucau

SEQ ID NO: 20881 - RNA, 24 nt, Artificial Sequence
  Synthetic
gagugauggugcugggcugcucau

SEQ ID NO: 20882 - RNA, 19 nt, Artificial Sequence
  Synthetic
gauacagaauuaaucucau

SEQ ID NO: 20883 - RNA, 20 nt, Artificial Sequence
  Synthetic
ggauacagaauuaaucucau

SEQ ID NO: 20884 - RNA, 23 nt, Artificial Sequence
  Synthetic
gauggauacagaauuaaucucau

SEQ ID NO: 20885 - RNA, 23 nt, Artificial Sequence
  Synthetic
gcauucacagcacuggaucucau

SEQ ID NO: 20886 - RNA, 22 nt, Artificial Sequence
  Synthetic
gauuucacagaggauaucucau

SEQ ID NO: 20887 - RNA, 18 nt, Artificial Sequence
  Synthetic
gcuauuauugucucucau

SEQ ID NO: 20888 - RNA, 21 nt, Artificial Sequence
  Synthetic
gaagcuauuauugucucucau

SEQ ID NO: 20889 - RNA, 22 nt, Artificial Sequence
  Synthetic
gcauuccuauugacacagucau

SEQ ID NO: 20890 - RNA, 21 nt, Artificial Sequence
  Synthetic
gaaaaguucuaaaugagucau

SEQ ID NO: 20891 - RNA, 22 nt, Artificial Sequence
  Synthetic
ggaaaaguucuaaaugagucau

SEQ ID NO: 20892 - RNA, 23 nt, Artificial Sequence
  Synthetic
gggaaaaguucuaaaugagucau

SEQ ID NO: 20893 - RNA, 19 nt, Artificial Sequence
  Synthetic
guaaaucuuuugaggucau

SEQ ID NO: 20894 - RNA, 20 nt, Artificial Sequence
  Synthetic
gguaaaucuuuugaggucau

SEQ ID NO: 20895 - RNA, 23 nt, Artificial Sequence
  Synthetic
gcagguaaaucuuuugaggucau

SEQ ID NO: 20896 - RNA, 24 nt, Artificial Sequence
  Synthetic
gcuuaacgggaaguguggggucau

SEQ ID NO: 20897 - RNA, 19 nt, Artificial Sequence
  Synthetic
gaagauaacaaagugucau

SEQ ID NO: 20898 - RNA, 20 nt, Artificial Sequence
  Synthetic
ggaagauaacaaagugucau

SEQ ID NO: 20899 - RNA, 18 nt, Artificial Sequence
  Synthetic
gcaguuuggcauugucau

SEQ ID NO: 20900 - RNA, 20 nt, Artificial Sequence
  Synthetic
guaaucuaaagcaaauucau

SEQ ID NO: 20901 - RNA, 21 nt, Artificial Sequence
  Synthetic
gcuaugucucuuaacauucau

SEQ ID NO: 20902 - RNA, 18 nt, Artificial Sequence
  Synthetic
gucgucauucccauucau

SEQ ID NO: 20903 - RNA, 24 nt, Artificial Sequence
  Synthetic
gcaacagucgucauucccauucau

SEQ ID NO: 20904 - RNA, 23 nt, Artificial Sequence
  Synthetic
gcaaaaacagacuugagauucau

SEQ ID NO: 20905 - RNA, 24 nt, Artificial Sequence
  Synthetic
ggcaaaaacagacuugagauucau

SEQ ID NO: 20906 - RNA, 19 nt, Artificial Sequence
  Synthetic
gacuguuuuuuagauucau

SEQ ID NO: 20907 - RNA, 20 nt, Artificial Sequence
  Synthetic
gauuuuucucaauuauucau

SEQ ID NO: 20908 - RNA, 24 nt, Artificial Sequence
  Synthetic
guuagauuuuucucaauuauucau

SEQ ID NO: 20909 - RNA, 20 nt, Artificial Sequence
  Synthetic
gcaauauuuuaucacuucau

SEQ ID NO: 20910 - RNA, 24 nt, Artificial Sequence
  Synthetic
gaaagcaauauuuuaucacuucau

SEQ ID NO: 20911 - RNA, 24 nt, Artificial Sequence
  Synthetic
gaaauccuauuccuuugccuucau

SEQ ID NO: 20912 - RNA, 18 nt, Artificial Sequence
  Synthetic
gauucuuuaucucuucau

SEQ ID NO: 20913 - RNA, 20 nt, Artificial Sequence
  Synthetic
gugauucuuuaucucuucau

SEQ ID NO: 20914 - RNA, 19 nt, Artificial Sequence
  Synthetic
gcuuuauuuuauucuucau

SEQ ID NO: 20915 - RNA, 23 nt, Artificial Sequence
  Synthetic
gaaagcuuuauuuuauucuucau

SEQ ID NO: 20916 - RNA, 23 nt, Artificial Sequence
  Synthetic
gacagacauuuuaauuucuucau

SEQ ID NO: 20917 - RNA, 19 nt, Artificial Sequence
  Synthetic
gcuuauuugaccuuuucau

SEQ ID NO: 20918 - RNA, 22 nt, Artificial Sequence
  Synthetic
gccacgguuucugguuuuucau

SEQ ID NO: 20919 - RNA, 22 nt, Artificial Sequence
  Synthetic
gaucagaaaauagacaaaagau

SEQ ID NO: 20920 - RNA, 22 nt, Artificial Sequence
  Synthetic
gcuuuaguauaacuucaaagau

SEQ ID NO: 20921 - RNA, 18 nt, Artificial Sequence
  Synthetic
gugggcuggcagaaagau

SEQ ID NO: 20922 - RNA, 24 nt, Artificial Sequence
  Synthetic
gucauuucuauuuggaggaaagau

SEQ ID NO: 20923 - RNA, 18 nt, Artificial Sequence
  Synthetic
gccuggaauguuaaagau

SEQ ID NO: 20924 - RNA, 21 nt, Artificial Sequence
  Synthetic
gauugcgucaaagaucaagau

SEQ ID NO: 20925 - RNA, 23 nt, Artificial Sequence
  Synthetic
guuucuggcuuagagaagaagau

SEQ ID NO: 20926 - RNA, 24 nt, Artificial Sequence
  Synthetic
gguuucuggcuuagagaagaagau

SEQ ID NO: 20927 - RNA, 23 nt, Artificial Sequence
  Synthetic
gcuucauaaucaguugggaagau

SEQ ID NO: 20928 - RNA, 21 nt, Artificial Sequence
  Synthetic
gucaaaagcaaauuggaagau

SEQ ID NO: 20929 - RNA, 20 nt, Artificial Sequence
  Synthetic
guaauugauuauaugaagau

SEQ ID NO: 20930 - RNA, 20 nt, Artificial Sequence
  Synthetic
gaugaugaguaugugaagau

SEQ ID NO: 20931 - RNA, 23 nt, Artificial Sequence
  Synthetic
guuucaauaagucacaauaagau

SEQ ID NO: 20932 - RNA, 19 nt, Artificial Sequence
  Synthetic
guuauuuaacacauaagau

SEQ ID NO: 20933 - RNA, 19 nt, Artificial Sequence
  Synthetic
gaagaauguucuauaagau

SEQ ID NO: 20934 - RNA, 20 nt, Artificial Sequence
  Synthetic
guuugaagccuuaguaagau

SEQ ID NO: 20935 - RNA, 18 nt, Artificial Sequence
  Synthetic
guuccuccaguaacagau

SEQ ID NO: 20936 - RNA, 19 nt, Artificial Sequence
  Synthetic
gguuccuccaguaacagau

SEQ ID NO: 20937 - RNA, 20 nt, Artificial Sequence
  Synthetic
gcuguauuuugggagcagau

SEQ ID NO: 20938 - RNA, 20 nt, Artificial Sequence
  Synthetic
gcccugaggggaaggcagau

SEQ ID NO: 20939 - RNA, 20 nt, Artificial Sequence
  Synthetic
guuuuaaaaacuaggcagau

SEQ ID NO: 20940 - RNA, 22 nt, Artificial Sequence
  Synthetic
gaguuuuaaaaacuaggcagau

SEQ ID NO: 20941 - RNA, 23 nt, Artificial Sequence
  Synthetic
gccuccauucccgggucucagau

SEQ ID NO: 20942 - RNA, 24 nt, Artificial Sequence
  Synthetic
ggccuccauucccgggucucagau

SEQ ID NO: 20943 - RNA, 19 nt, Artificial Sequence
  Synthetic
gcaacuauaaauuagagau

SEQ ID NO: 20944 - RNA, 24 nt, Artificial Sequence
  Synthetic
guuuagcaacuauaaauuagagau

SEQ ID NO: 20945 - RNA, 19 nt, Artificial Sequence
  Synthetic
guugaagauaagacgagau

SEQ ID NO: 20946 - RNA, 22 nt, Artificial Sequence
  Synthetic
gaaguugaagauaagacgagau

SEQ ID NO: 20947 - RNA, 20 nt, Artificial Sequence
  Synthetic
gaaugaggguuuaaggagau

SEQ ID NO: 20948 - RNA, 18 nt, Artificial Sequence
  Synthetic
gaaaucuaagcaggagau

SEQ ID NO: 20949 - RNA, 23 nt, Artificial Sequence
  Synthetic
guuuugaaaucuaagcaggagau

SEQ ID NO: 20950 - RNA, 21 nt, Artificial Sequence
  Synthetic
gauuggcuagccacuggagau

SEQ ID NO: 20951 - RNA, 19 nt, Artificial Sequence
  Synthetic
gcuauguaagaugugagau

SEQ ID NO: 20952 - RNA, 24 nt, Artificial Sequence
  Synthetic
gcauagcuauguaagaugugagau

SEQ ID NO: 20953 - RNA, 20 nt, Artificial Sequence
  Synthetic
guuuauguacagugugagau

SEQ ID NO: 20954 - RNA, 22 nt, Artificial Sequence
  Synthetic
guuaaugcccucucauugagau

SEQ ID NO: 20955 - RNA, 20 nt, Artificial Sequence
  Synthetic
gauuucacuuaaaaauagau

SEQ ID NO: 20956 - RNA, 21 nt, Artificial Sequence
  Synthetic
ggauuucacuuaaaaauagau

SEQ ID NO: 20957 - RNA, 22 nt, Artificial Sequence
  Synthetic
gcuauaauaauauuaaauagau

SEQ ID NO: 20958 - RNA, 20 nt, Artificial Sequence
  Synthetic
gucuuugaacuuaguuagau

SEQ ID NO: 20959 - RNA, 18 nt, Artificial Sequence
  Synthetic
guuaaccauaauuuagau

SEQ ID NO: 20960 - RNA, 19 nt, Artificial Sequence
  Synthetic
gguuaaccauaauuuagau

SEQ ID NO: 20961 - RNA, 18 nt, Artificial Sequence
  Synthetic
gucacuaaaauuuuagau

SEQ ID NO: 20962 - RNA, 21 nt, Artificial Sequence
  Synthetic
guagucacuaaaauuuuagau

SEQ ID NO: 20963 - RNA, 19 nt, Artificial Sequence
  Synthetic
gcuauuucauauuuuagau

SEQ ID NO: 20964 - RNA, 21 nt, Artificial Sequence
  Synthetic
gcuuucuacacuuuacacgau

SEQ ID NO: 20965 - RNA, 18 nt, Artificial Sequence
  Synthetic
gaacaaaguaguuucgau

SEQ ID NO: 20966 - RNA, 19 nt, Artificial Sequence
  Synthetic
ggaacaaaguaguuucgau

SEQ ID NO: 20967 - RNA, 23 nt, Artificial Sequence
  Synthetic
gaacggaacaaaguaguuucgau

SEQ ID NO: 20968 - RNA, 20 nt, Artificial Sequence
  Synthetic
gaccgugcugcccaaaggau

SEQ ID NO: 20969 - RNA, 23 nt, Artificial Sequence
  Synthetic
gaagaccgugcugcccaaaggau

SEQ ID NO: 20970 - RNA, 21 nt, Artificial Sequence
  Synthetic
guuaaacggaugugaaaggau

SEQ ID NO: 20971 - RNA, 21 nt, Artificial Sequence
  Synthetic
gauuucccaucacagaaggau

SEQ ID NO: 20972 - RNA, 23 nt, Artificial Sequence
  Synthetic
gagauuucccaucacagaaggau

SEQ ID NO: 20973 - RNA, 22 nt, Artificial Sequence
  Synthetic
guggagaaaaagauagaaggau

SEQ ID NO: 20974 - RNA, 23 nt, Artificial Sequence
  Synthetic
gguggagaaaaagauagaaggau

SEQ ID NO: 20975 - RNA, 18 nt, Artificial Sequence
  Synthetic
gaguuuuugagacaggau

SEQ ID NO: 20976 - RNA, 21 nt, Artificial Sequence
  Synthetic
guagaguuuuugagacaggau

SEQ ID NO: 20977 - RNA, 20 nt, Artificial Sequence
  Synthetic
gcauauguaauaugcaggau

SEQ ID NO: 20978 - RNA, 18 nt, Artificial Sequence
  Synthetic
gucuucuguugggaggau

SEQ ID NO: 20979 - RNA, 22 nt, Artificial Sequence
  Synthetic
gcuagucuucuguugggaggau

SEQ ID NO: 20980 - RNA, 21 nt, Artificial Sequence
  Synthetic
guuaccggaguuuucuaggau

SEQ ID NO: 20981 - RNA, 19 nt, Artificial Sequence
  Synthetic
gugaugauacugguaggau

SEQ ID NO: 20982 - RNA, 20 nt, Artificial Sequence
  Synthetic
gacagccagccaguuaggau

SEQ ID NO: 20983 - RNA, 19 nt, Artificial Sequence
  Synthetic
gauauacuaccucacggau

SEQ ID NO: 20984 - RNA, 20 nt, Artificial Sequence
  Synthetic
gcaauccuuuaacagcggau

SEQ ID NO: 20985 - RNA, 21 nt, Artificial Sequence
  Synthetic
ggcaauccuuuaacagcggau

SEQ ID NO: 20986 - RNA, 23 nt, Artificial Sequence
  Synthetic
gaggcaauccuuuaacagcggau

SEQ ID NO: 20987 - RNA, 24 nt, Artificial Sequence
  Synthetic
ggaggcaauccuuuaacagcggau

SEQ ID NO: 20988 - RNA, 21 nt, Artificial Sequence
  Synthetic
gaucugugagacagaagggau

SEQ ID NO: 20989 - RNA, 24 nt, Artificial Sequence
  Synthetic
gcagaucugugagacagaagggau

SEQ ID NO: 20990 - RNA, 19 nt, Artificial Sequence
  Synthetic
gcaaauucagcccagggau

SEQ ID NO: 20991 - RNA, 20 nt, Artificial Sequence
  Synthetic
ggcaaauucagcccagggau

SEQ ID NO: 20992 - RNA, 22 nt, Artificial Sequence
  Synthetic
guggcaaauucagcccagggau

SEQ ID NO: 20993 - RNA, 23 nt, Artificial Sequence
  Synthetic
gguggcaaauucagcccagggau

SEQ ID NO: 20994 - RNA, 24 nt, Artificial Sequence
  Synthetic
ggguggcaaauucagcccagggau

SEQ ID NO: 20995 - RNA, 24 nt, Artificial Sequence
  Synthetic
gcccaaagaggcccuugcagggau

SEQ ID NO: 20996 - RNA, 19 nt, Artificial Sequence
  Synthetic
gaaguuucaaaggcgggau

SEQ ID NO: 20997 - RNA, 18 nt, Artificial Sequence
  Synthetic
gcagugucaagaugggau

SEQ ID NO: 20998 - RNA, 23 nt, Artificial Sequence
  Synthetic
gcuaugcagugucaagaugggau

SEQ ID NO: 20999 - RNA, 19 nt, Artificial Sequence
  Synthetic
guuuugcuaucauugggau

SEQ ID NO: 21000 - RNA, 24 nt, Artificial Sequence
  Synthetic
guaaauaaauccuucuguugggau

SEQ ID NO: 21001 - RNA, 19 nt, Artificial Sequence
  Synthetic
guaugugaaagaaauggau

SEQ ID NO: 21002 - RNA, 23 nt, Artificial Sequence
  Synthetic
guauguaugugaaagaaauggau

SEQ ID NO: 21003 - RNA, 24 nt, Artificial Sequence
  Synthetic
gguauguaugugaaagaaauggau

SEQ ID NO: 21004 - RNA, 22 nt, Artificial Sequence
  Synthetic
gaucacaguauuauaaauggau

SEQ ID NO: 21005 - RNA, 22 nt, Artificial Sequence
  Synthetic
gcaauaaagagccagaauggau

SEQ ID NO: 21006 - RNA, 23 nt, Artificial Sequence
  Synthetic
ggcaauaaagagccagaauggau

SEQ ID NO: 21007 - RNA, 24 nt, Artificial Sequence
  Synthetic
gggcaauaaagagccagaauggau

SEQ ID NO: 21008 - RNA, 20 nt, Artificial Sequence
  Synthetic
guuggaaucacggaauggau

SEQ ID NO: 21009 - RNA, 23 nt, Artificial Sequence
  Synthetic
guaguuggaaucacggaauggau

SEQ ID NO: 21010 - RNA, 20 nt, Artificial Sequence
  Synthetic
gcauuuagccaaugauggau

SEQ ID NO: 21011 - RNA, 23 nt, Artificial Sequence
  Synthetic
gaagcauuuagccaaugauggau

SEQ ID NO: 21012 - RNA, 24 nt, Artificial Sequence
  Synthetic
ggaagcauuuagccaaugauggau

SEQ ID NO: 21013 - RNA, 18 nt, Artificial Sequence
  Synthetic
gaucauauuacuauggau

SEQ ID NO: 21014 - RNA, 19 nt, Artificial Sequence
  Synthetic
ggaucauauuacuauggau

SEQ ID NO: 21015 - RNA, 23 nt, Artificial Sequence
  Synthetic
gaacaaaauguaaagcacuggau

SEQ ID NO: 21016 - RNA, 22 nt, Artificial Sequence
  Synthetic
gcuccaggagagggaaguggau

SEQ ID NO: 21017 - RNA, 21 nt, Artificial Sequence
  Synthetic
gccagcggcauccuaguggau

SEQ ID NO: 21018 - RNA, 24 nt, Artificial Sequence
  Synthetic
guugccagcggcauccuaguggau

SEQ ID NO: 21019 - RNA, 19 nt, Artificial Sequence
  Synthetic
guaaaaagaacauuuggau

SEQ ID NO: 21020 - RNA, 22 nt, Artificial Sequence
  Synthetic
gaaguaaaaagaacauuuggau

SEQ ID NO: 21021 - RNA, 24 nt, Artificial Sequence
  Synthetic
gagaaguaaaaagaacauuuggau

SEQ ID NO: 21022 - RNA, 21 nt, Artificial Sequence
  Synthetic
ggagaugauggugcuuuggau

SEQ ID NO: 21023 - RNA, 24 nt, Artificial Sequence
  Synthetic
gcuggagaugauggugcuuuggau

SEQ ID NO: 21024 - RNA, 20 nt, Artificial Sequence
  Synthetic
guuugggggaugguuuggau

SEQ ID NO: 21025 - RNA, 24 nt, Artificial Sequence
  Synthetic
guuuguuugggggaugguuuggau

SEQ ID NO: 21026 - RNA, 19 nt, Artificial Sequence
  Synthetic
gaauaggggggaaaaugau

SEQ ID NO: 21027 - RNA, 22 nt, Artificial Sequence
  Synthetic
gaagaauaggggggaaaaugau

SEQ ID NO: 21028 - RNA, 23 nt, Artificial Sequence
  Synthetic
ggaagaauaggggggaaaaugau

SEQ ID NO: 21029 - RNA, 19 nt, Artificial Sequence
  Synthetic
gaaauauauuagaaaugau

SEQ ID NO: 21030 - RNA, 20 nt, Artificial Sequence
  Synthetic
ggaaauauauuagaaaugau

SEQ ID NO: 21031 - RNA, 18 nt, Artificial Sequence
  Synthetic
gcugagucaggaaaugau

SEQ ID NO: 21032 - RNA, 22 nt, Artificial Sequence
  Synthetic
gcaugcugagucaggaaaugau

SEQ ID NO: 21033 - RNA, 23 nt, Artificial Sequence
  Synthetic
ggcaugcugagucaggaaaugau

SEQ ID NO: 21034 - RNA, 18 nt, Artificial Sequence
  Synthetic
gaggcacugaacaaugau

SEQ ID NO: 21035 - RNA, 20 nt, Artificial Sequence
  Synthetic
gugaggcacugaacaaugau

SEQ ID NO: 21036 - RNA, 23 nt, Artificial Sequence
  Synthetic
gaagugaggcacugaacaaugau

SEQ ID NO: 21037 - RNA, 19 nt, Artificial Sequence
  Synthetic
gaaugggcuucacaaugau

SEQ ID NO: 21038 - RNA, 22 nt, Artificial Sequence
  Synthetic
gcugaaugggcuucacaaugau

SEQ ID NO: 21039 - RNA, 18 nt, Artificial Sequence
  Synthetic
gacgguagugacaaugau

SEQ ID NO: 21040 - RNA, 20 nt, Artificial Sequence
  Synthetic
gugacgguagugacaaugau

SEQ ID NO: 21041 - RNA, 23 nt, Artificial Sequence
  Synthetic
guagugacgguagugacaaugau

SEQ ID NO: 21042 - RNA, 23 nt, Artificial Sequence
  Synthetic
gaacuaauguuggcuccaaugau

SEQ ID NO: 21043 - RNA, 24 nt, Artificial Sequence
  Synthetic
gaaaacaagagccaacauaaugau

SEQ ID NO: 21044 - RNA, 23 nt, Artificial Sequence
  Synthetic
gacaucccagagaagauaaugau

SEQ ID NO: 21045 - RNA, 21 nt, Artificial Sequence
  Synthetic
gaacuuuguuugauuaaugau

SEQ ID NO: 21046 - RNA, 21 nt, Artificial Sequence
  Synthetic
gauccaagugcuagacaugau

SEQ ID NO: 21047 - RNA, 22 nt, Artificial Sequence
  Synthetic
ggauccaagugcuagacaugau

SEQ ID NO: 21048 - RNA, 23 nt, Artificial Sequence
  Synthetic
gggauccaagugcuagacaugau

SEQ ID NO: 21049 - RNA, 18 nt, Artificial Sequence
  Synthetic
gaauuaauaugacaugau

SEQ ID NO: 21050 - RNA, 24 nt, Artificial Sequence
  Synthetic
guacaugaauuaauaugacaugau

SEQ ID NO: 21051 - RNA, 18 nt, Artificial Sequence
  Synthetic
guguaccccaugcaugau

SEQ ID NO: 21052 - RNA, 23 nt, Artificial Sequence
  Synthetic
gacuaguguaccccaugcaugau

SEQ ID NO: 21053 - RNA, 18 nt, Artificial Sequence
  Synthetic
gccuuucuguuucaugau

SEQ ID NO: 21054 - RNA, 20 nt, Artificial Sequence
  Synthetic
gagccuuucuguuucaugau

SEQ ID NO: 21055 - RNA, 18 nt, Artificial Sequence
  Synthetic
guguaaauuaaagaugau

SEQ ID NO: 21056 - RNA, 19 nt, Artificial Sequence
  Synthetic
gguguaaauuaaagaugau

SEQ ID NO: 21057 - RNA, 18 nt, Artificial Sequence
  Synthetic
gacccaagauaagaugau

SEQ ID NO: 21058 - RNA, 20 nt, Artificial Sequence
  Synthetic
gagacccaagauaagaugau

SEQ ID NO: 21059 - RNA, 22 nt, Artificial Sequence
  Synthetic
gagagacccaagauaagaugau

SEQ ID NO: 21060 - RNA, 21 nt, Artificial Sequence
  Synthetic
gcaaagauuagaugagaugau

SEQ ID NO: 21061 - RNA, 22 nt, Artificial Sequence
  Synthetic
ggcaaagauuagaugagaugau

SEQ ID NO: 21062 - RNA, 23 nt, Artificial Sequence
  Synthetic
gcuaacuuugccuaguagaugau

SEQ ID NO: 21063 - RNA, 18 nt, Artificial Sequence
  Synthetic
gcaagucuuugauaugau

SEQ ID NO: 21064 - RNA, 24 nt, Artificial Sequence
  Synthetic
gauccuaggcugaguguguaugau

SEQ ID NO: 21065 - RNA, 21 nt, Artificial Sequence
  Synthetic
gcuaugucuaaaauuuaugau

SEQ ID NO: 21066 - RNA, 23 nt, Artificial Sequence
  Synthetic
gagcuaugucuaaaauuuaugau

SEQ ID NO: 21067 - RNA, 19 nt, Artificial Sequence
  Synthetic
guaaggaaaaugaacugau

SEQ ID NO: 21068 - RNA, 20 nt, Artificial Sequence
  Synthetic
gguaaggaaaaugaacugau

SEQ ID NO: 21069 - RNA, 21 nt, Artificial Sequence
  Synthetic
ggguaaggaaaaugaacugau

SEQ ID NO: 21070 - RNA, 22 nt, Artificial Sequence
  Synthetic
gggguaaggaaaaugaacugau

SEQ ID NO: 21071 - RNA, 21 nt, Artificial Sequence
  Synthetic
gaccaaaaagaguacacugau

SEQ ID NO: 21072 - RNA, 24 nt, Artificial Sequence
  Synthetic
gaagaccaaaaagaguacacugau

SEQ ID NO: 21073 - RNA, 24 nt, Artificial Sequence
  Synthetic
gauauuuaguuucagagcacugau

SEQ ID NO: 21074 - RNA, 23 nt, Artificial Sequence
  Synthetic
gacaaugaauugcacaaccugau

SEQ ID NO: 21075 - RNA, 24 nt, Artificial Sequence
  Synthetic
ggacaaugaauugcacaaccugau

SEQ ID NO: 21076 - RNA, 23 nt, Artificial Sequence
  Synthetic
guuuucuaaucaaauaagcugau

SEQ ID NO: 21077 - RNA, 24 nt, Artificial Sequence
  Synthetic
gguuuucuaaucaaauaagcugau

SEQ ID NO: 21078 - RNA, 22 nt, Artificial Sequence
  Synthetic
gaauuaaauaauuuauucugau

SEQ ID NO: 21079 - RNA, 23 nt, Artificial Sequence
  Synthetic
gacuucaaaccguuuuuucugau

SEQ ID NO: 21080 - RNA, 19 nt, Artificial Sequence
  Synthetic
guguaaguaucucagugau

SEQ ID NO: 21081 - RNA, 20 nt, Artificial Sequence
  Synthetic
gguguaaguaucucagugau

SEQ ID NO: 21082 - RNA, 23 nt, Artificial Sequence
  Synthetic
gcaaaugauauaaagagggugau

SEQ ID NO: 21083 - RNA, 21 nt, Artificial Sequence
  Synthetic
gauacaaugguuaugggugau

SEQ ID NO: 21084 - RNA, 22 nt, Artificial Sequence
  Synthetic
gaaacauuccuggggcugugau

SEQ ID NO: 21085 - RNA, 20 nt, Artificial Sequence
  Synthetic
gcaauaucuauugcugugau

SEQ ID NO: 21086 - RNA, 20 nt, Artificial Sequence
  Synthetic
guccccuuaucaaacuugau

SEQ ID NO: 21087 - RNA, 23 nt, Artificial Sequence
  Synthetic
gaaguccccuuaucaaacuugau

SEQ ID NO: 21088 - RNA, 24 nt, Artificial Sequence
  Synthetic
ggaaguccccuuaucaaacuugau

SEQ ID NO: 21089 - RNA, 18 nt, Artificial Sequence
  Synthetic
guuucuugugcacuugau

SEQ ID NO: 21090 - RNA, 23 nt, Artificial Sequence
  Synthetic
gaauuguuucuugugcacuugau

SEQ ID NO: 21091 - RNA, 19 nt, Artificial Sequence
  Synthetic
gaccaucaguguccuugau

SEQ ID NO: 21092 - RNA, 20 nt, Artificial Sequence
  Synthetic
ggaccaucaguguccuugau

SEQ ID NO: 21093 - RNA, 22 nt, Artificial Sequence
  Synthetic
gaggaccaucaguguccuugau

SEQ ID NO: 21094 - RNA, 24 nt, Artificial Sequence
  Synthetic
gacacuaugaugcaguagcuugau

SEQ ID NO: 21095 - RNA, 19 nt, Artificial Sequence
  Synthetic
gagucauucagaucuugau

SEQ ID NO: 21096 - RNA, 22 nt, Artificial Sequence
  Synthetic
gaauacagauaaaugucuugau

SEQ ID NO: 21097 - RNA, 18 nt, Artificial Sequence
  Synthetic
gaagccaacugucuugau

SEQ ID NO: 21098 - RNA, 23 nt, Artificial Sequence
  Synthetic
guacugaagccaacugucuugau

SEQ ID NO: 21099 - RNA, 22 nt, Artificial Sequence
  Synthetic
gcaaugacuuuucaaaguugau

SEQ ID NO: 21100 - RNA, 21 nt, Artificial Sequence
  Synthetic
gcuuuguggcauugauuugau

SEQ ID NO: 21101 - RNA, 22 nt, Artificial Sequence
  Synthetic
gccuauuggcaaagauuuugau

SEQ ID NO: 21102 - RNA, 20 nt, Artificial Sequence
  Synthetic
guacaggaaacagcaaauau

SEQ ID NO: 21103 - RNA, 22 nt, Artificial Sequence
  Synthetic
gcuagcaauuuuaccuaaauau

SEQ ID NO: 21104 - RNA, 18 nt, Artificial Sequence
  Synthetic
gaauggccauguaaauau

SEQ ID NO: 21105 - RNA, 24 nt, Artificial Sequence
  Synthetic
gacuacgaauggccauguaaauau

SEQ ID NO: 21106 - RNA, 18 nt, Artificial Sequence
  Synthetic
gaugcaauuauuaaauau

SEQ ID NO: 21107 - RNA, 23 nt, Artificial Sequence
  Synthetic
guucagaugcaauuauuaaauau

SEQ ID NO: 21108 - RNA, 18 nt, Artificial Sequence
  Synthetic
gagaccuaauuuaaauau

SEQ ID NO: 21109 - RNA, 20 nt, Artificial Sequence
  Synthetic
gcucugaagagugccaauau

SEQ ID NO: 21110 - RNA, 22 nt, Artificial Sequence
  Synthetic
gagcucugaagagugccaauau

SEQ ID NO: 21111 - RNA, 19 nt, Artificial Sequence
  Synthetic
guuuuuauaguaucaauau

SEQ ID NO: 21112 - RNA, 20 nt, Artificial Sequence
  Synthetic
gguuuuuauaguaucaauau

SEQ ID NO: 21113 - RNA, 21 nt, Artificial Sequence
  Synthetic
ggguuuuuauaguaucaauau

SEQ ID NO: 21114 - RNA, 22 nt, Artificial Sequence
  Synthetic
gggguuuuuauaguaucaauau

SEQ ID NO: 21115 - RNA, 24 nt, Artificial Sequence
  Synthetic
gaaccaacuaaagguugucaauau

SEQ ID NO: 21116 - RNA, 20 nt, Artificial Sequence
  Synthetic
gauaggauuuccaagaauau

SEQ ID NO: 21117 - RNA, 24 nt, Artificial Sequence
  Synthetic
gauugauaggauuuccaagaauau

SEQ ID NO: 21118 - RNA, 18 nt, Artificial Sequence
  Synthetic
gcgagaagaagagaauau

SEQ ID NO: 21119 - RNA, 21 nt, Artificial Sequence
  Synthetic
ggaguucuguaaguagaauau

SEQ ID NO: 21120 - RNA, 21 nt, Artificial Sequence
  Synthetic
gauaagcaucuuguggaauau

SEQ ID NO: 21121 - RNA, 24 nt, Artificial Sequence
  Synthetic
gcuuaauaacuauuuuuggaauau

SEQ ID NO: 21122 - RNA, 22 nt, Artificial Sequence
  Synthetic
gauaaggcuuucugcugaauau

SEQ ID NO: 21123 - RNA, 24 nt, Artificial Sequence
  Synthetic
gagauaaggcuuucugcugaauau

SEQ ID NO: 21124 - RNA, 18 nt, Artificial Sequence
  Synthetic
gguaaucauagugaauau

SEQ ID NO: 21125 - RNA, 19 nt, Artificial Sequence
  Synthetic
ggguaaucauagugaauau

SEQ ID NO: 21126 - RNA, 18 nt, Artificial Sequence
  Synthetic
gauaguaugauauaauau

SEQ ID NO: 21127 - RNA, 24 nt, Artificial Sequence
  Synthetic
guucaacauugcuugaaguaauau

SEQ ID NO: 21128 - RNA, 24 nt, Artificial Sequence
  Synthetic
gaaaauaaauccccauuuuaauau

SEQ ID NO: 21129 - RNA, 24 nt, Artificial Sequence
  Synthetic
guuaucaaauacauguacacauau

SEQ ID NO: 21130 - RNA, 19 nt, Artificial Sequence
  Synthetic
gaaggaaaugaccacauau

SEQ ID NO: 21131 - RNA, 21 nt, Artificial Sequence
  Synthetic
gugaaggaaaugaccacauau

SEQ ID NO: 21132 - RNA, 20 nt, Artificial Sequence
  Synthetic
gacgaaaagcucucacauau

SEQ ID NO: 21133 - RNA, 20 nt, Artificial Sequence
  Synthetic
gcaaauugcaguagacauau

SEQ ID NO: 21134 - RNA, 22 nt, Artificial Sequence
  Synthetic
gugcaaauugcaguagacauau

SEQ ID NO: 21135 - RNA, 23 nt, Artificial Sequence
  Synthetic
ggugcaaauugcaguagacauau

SEQ ID NO: 21136 - RNA, 24 nt, Artificial Sequence
  Synthetic
gauccccugagaggaaggacauau

SEQ ID NO: 21137 - RNA, 23 nt, Artificial Sequence
  Synthetic
gcucaacugucaaagggacauau

SEQ ID NO: 21138 - RNA, 22 nt, Artificial Sequence
  Synthetic
guucaauucauguuucccauau

SEQ ID NO: 21139 - RNA, 21 nt, Artificial Sequence
  Synthetic
gcacagacaacaguggcauau

SEQ ID NO: 21140 - RNA, 23 nt, Artificial Sequence
  Synthetic
gagcacagacaacaguggcauau

SEQ ID NO: 21141 - RNA, 22 nt, Artificial Sequence
  Synthetic
gacuugaugacagauaagauau

SEQ ID NO: 21142 - RNA, 20 nt, Artificial Sequence
  Synthetic
guaacucugaagacagauau

SEQ ID NO: 21143 - RNA, 23 nt, Artificial Sequence
  Synthetic
guuaaucuugaagaaccagauau

SEQ ID NO: 21144 - RNA, 18 nt, Artificial Sequence
  Synthetic
guagcacaacugagauau

SEQ ID NO: 21145 - RNA, 19 nt, Artificial Sequence
  Synthetic
gguagcacaacugagauau

SEQ ID NO: 21146 - RNA, 22 nt, Artificial Sequence
  Synthetic
guugguagcacaacugagauau

SEQ ID NO: 21147 - RNA, 22 nt, Artificial Sequence
  Synthetic
gaaauaugugcucaaaugauau

SEQ ID NO: 21148 - RNA, 24 nt, Artificial Sequence
  Synthetic
gugaaauaugugcucaaaugauau

SEQ ID NO: 21149 - RNA, 18 nt, Artificial Sequence
  Synthetic
guuauaaaagaaugauau

SEQ ID NO: 21150 - RNA, 18 nt, Artificial Sequence
  Synthetic
gccaacugauuaugauau

SEQ ID NO: 21151 - RNA, 23 nt, Artificial Sequence
  Synthetic
gucaucaauugcaaaacugauau

SEQ ID NO: 21152 - RNA, 24 nt, Artificial Sequence
  Synthetic
ggucaucaauugcaaaacugauau

SEQ ID NO: 21153 - RNA, 18 nt, Artificial Sequence
  Synthetic
gugcuauuuaagugauau

SEQ ID NO: 21154 - RNA, 19 nt, Artificial Sequence
  Synthetic
ggugcuauuuaagugauau

SEQ ID NO: 21155 - RNA, 21 nt, Artificial Sequence
  Synthetic
gaggugcuauuuaagugauau

SEQ ID NO: 21156 - RNA, 18 nt, Artificial Sequence
  Synthetic
gaagggagauaaauauau

SEQ ID NO: 21157 - RNA, 24 nt, Artificial Sequence
  Synthetic
gcuaccgaagggagauaaauauau

SEQ ID NO: 21158 - RNA, 19 nt, Artificial Sequence
  Synthetic
gaaucaauuuuaaauauau

SEQ ID NO: 21159 - RNA, 18 nt, Artificial Sequence
  Synthetic
gaaaguaaaucaauauau

SEQ ID NO: 21160 - RNA, 24 nt, Artificial Sequence
  Synthetic
gcuacugaaaguaaaucaauauau

SEQ ID NO: 21161 - RNA, 22 nt, Artificial Sequence
  Synthetic
gagaauauuuauuucaauauau

SEQ ID NO: 21162 - RNA, 18 nt, Artificial Sequence
  Synthetic
guuaagauaaacauauau

SEQ ID NO: 21163 - RNA, 19 nt, Artificial Sequence
  Synthetic
gugguuuaaauccauauau

SEQ ID NO: 21164 - RNA, 20 nt, Artificial Sequence
  Synthetic
ggugguuuaaauccauauau

SEQ ID NO: 21165 - RNA, 24 nt, Artificial Sequence
  Synthetic
gaaaggugguuuaaauccauauau

SEQ ID NO: 21166 - RNA, 21 nt, Artificial Sequence
  Synthetic
gauccuaguaauaagauauau

SEQ ID NO: 21167 - RNA, 24 nt, Artificial Sequence
  Synthetic
gaaauaauaauauguuggauauau

SEQ ID NO: 21168 - RNA, 23 nt, Artificial Sequence
  Synthetic
guaucauuaaguccccuauauau

SEQ ID NO: 21169 - RNA, 24 nt, Artificial Sequence
  Synthetic
gguaucauuaaguccccuauauau

SEQ ID NO: 21170 - RNA, 18 nt, Artificial Sequence
  Synthetic
gcugacuuuucuauauau

SEQ ID NO: 21171 - RNA, 22 nt, Artificial Sequence
  Synthetic
gauuauuccacaauguauauau

SEQ ID NO: 21172 - RNA, 18 nt, Artificial Sequence
  Synthetic
gaagagcauauacuauau

SEQ ID NO: 21173 - RNA, 22 nt, Artificial Sequence
  Synthetic
guaauauuauauuuuacuauau

SEQ ID NO: 21174 - RNA, 22 nt, Artificial Sequence
  Synthetic
gauauggugcuagguccuauau

SEQ ID NO: 21175 - RNA, 21 nt, Artificial Sequence
  Synthetic
guuuuuguaaagcugcuauau

SEQ ID NO: 21176 - RNA, 18 nt, Artificial Sequence
  Synthetic
gaguaauaaggaguauau

SEQ ID NO: 21177 - RNA, 22 nt, Artificial Sequence
  Synthetic
gaaagaguaauaaggaguauau

SEQ ID NO: 21178 - RNA, 19 nt, Artificial Sequence
  Synthetic
gacagccagauggguauau

SEQ ID NO: 21179 - RNA, 22 nt, Artificial Sequence
  Synthetic
guagacagccagauggguauau

SEQ ID NO: 21180 - RNA, 23 nt, Artificial Sequence
  Synthetic
gguagacagccagauggguauau

SEQ ID NO: 21181 - RNA, 22 nt, Artificial Sequence
  Synthetic
guuuuacacuccuuggguauau

SEQ ID NO: 21182 - RNA, 22 nt, Artificial Sequence
  Synthetic
gcucacccccagucaauuauau

SEQ ID NO: 21183 - RNA, 23 nt, Artificial Sequence
  Synthetic
ggcucacccccagucaauuauau

SEQ ID NO: 21184 - RNA, 18 nt, Artificial Sequence
  Synthetic
guaauguuuuaauuauau

SEQ ID NO: 21185 - RNA, 18 nt, Artificial Sequence
  Synthetic
gcaaaccuuggauuauau

SEQ ID NO: 21186 - RNA, 19 nt, Artificial Sequence
  Synthetic
guuuacuccucuauuauau

SEQ ID NO: 21187 - RNA, 19 nt, Artificial Sequence
  Synthetic
guacagccaauacuuauau

SEQ ID NO: 21188 - RNA, 20 nt, Artificial Sequence
  Synthetic
gguacagccaauacuuauau

SEQ ID NO: 21189 - RNA, 20 nt, Artificial Sequence
  Synthetic
gacugaggaugggguuauau

SEQ ID NO: 21190 - RNA, 21 nt, Artificial Sequence
  Synthetic
ggacugaggaugggguuauau

SEQ ID NO: 21191 - RNA, 23 nt, Artificial Sequence
  Synthetic
gcucuaugagaaaaagaaacuau

SEQ ID NO: 21192 - RNA, 18 nt, Artificial Sequence
  Synthetic
ggccuggcuuucaacuau

SEQ ID NO: 21193 - RNA, 22 nt, Artificial Sequence
  Synthetic
gacuggccuggcuuucaacuau

SEQ ID NO: 21194 - RNA, 22 nt, Artificial Sequence
  Synthetic
guucugacuguaaguacacuau

SEQ ID NO: 21195 - RNA, 19 nt, Artificial Sequence
  Synthetic
guugucaaauuuacacuau

SEQ ID NO: 21196 - RNA, 23 nt, Artificial Sequence
  Synthetic
gaauaauguaggccaaugacuau

SEQ ID NO: 21197 - RNA, 21 nt, Artificial Sequence
  Synthetic
gacuuugagaaaauauacuau

SEQ ID NO: 21198 - RNA, 18 nt, Artificial Sequence
  Synthetic
gugcuaauacuauacuau

SEQ ID NO: 21199 - RNA, 23 nt, Artificial Sequence
  Synthetic
guuuugugcuaauacuauacuau

SEQ ID NO: 21200 - RNA, 20 nt, Artificial Sequence
  Synthetic
gccaauaauuucauuacuau

SEQ ID NO: 21201 - RNA, 22 nt, Artificial Sequence
  Synthetic
gugccaauaauuucauuacuau

SEQ ID NO: 21202 - RNA, 19 nt, Artificial Sequence
  Synthetic
gagaaaaaguaguuacuau

SEQ ID NO: 21203 - RNA, 19 nt, Artificial Sequence
  Synthetic
guugcaacuuugagccuau

SEQ ID NO: 21204 - RNA, 18 nt, Artificial Sequence
  Synthetic
guauaaaaaauggccuau

SEQ ID NO: 21205 - RNA, 19 nt, Artificial Sequence
  Synthetic
gguauaaaaaauggccuau

SEQ ID NO: 21206 - RNA, 24 nt, Artificial Sequence
  Synthetic
gacuugguauaaaaaauggccuau

SEQ ID NO: 21207 - RNA, 18 nt, Artificial Sequence
  Synthetic
gugcagagaaaugccuau

SEQ ID NO: 21208 - RNA, 22 nt, Artificial Sequence
  Synthetic
gcucuucaggaaugaauccuau

SEQ ID NO: 21209 - RNA, 23 nt, Artificial Sequence
  Synthetic
guuacauacuacccuaauccuau

SEQ ID NO: 21210 - RNA, 21 nt, Artificial Sequence
  Synthetic
gcacuaauaugauuauccuau

SEQ ID NO: 21211 - RNA, 24 nt, Artificial Sequence
  Synthetic
gaagcacuaauaugauuauccuau

SEQ ID NO: 21212 - RNA, 23 nt, Artificial Sequence
  Synthetic
guccaacaaauuguuaguccuau

SEQ ID NO: 21213 - RNA, 21 nt, Artificial Sequence
  Synthetic
gcauaaauguauuuuuccuau

SEQ ID NO: 21214 - RNA, 19 nt, Artificial Sequence
  Synthetic
guuuuauuuuuccagcuau

SEQ ID NO: 21215 - RNA, 19 nt, Artificial Sequence
  Synthetic
gcucuugaggaguagcuau

SEQ ID NO: 21216 - RNA, 19 nt, Artificial Sequence
  Synthetic
guuauaacaucaaggcuau

SEQ ID NO: 21217 - RNA, 22 nt, Artificial Sequence
  Synthetic
gaaaaauaacucagcaggcuau

SEQ ID NO: 21218 - RNA, 19 nt, Artificial Sequence
  Synthetic
guuuuguagaagaugcuau

SEQ ID NO: 21219 - RNA, 20 nt, Artificial Sequence
  Synthetic
gguuuuguagaagaugcuau

SEQ ID NO: 21220 - RNA, 22 nt, Artificial Sequence
  Synthetic
gagguuuuguagaagaugcuau

SEQ ID NO: 21221 - RNA, 20 nt, Artificial Sequence
  Synthetic
guauguggauuaacugcuau

SEQ ID NO: 21222 - RNA, 21 nt, Artificial Sequence
  Synthetic
gguauguggauuaacugcuau

SEQ ID NO: 21223 - RNA, 18 nt, Artificial Sequence
  Synthetic
ggacaacagaccugcuau

SEQ ID NO: 21224 - RNA, 20 nt, Artificial Sequence
  Synthetic
gaggacaacagaccugcuau

SEQ ID NO: 21225 - RNA, 19 nt, Artificial Sequence
  Synthetic
guaucaagugguuugcuau

SEQ ID NO: 21226 - RNA, 18 nt, Artificial Sequence
  Synthetic
gcaugcuuggugaucuau

SEQ ID NO: 21227 - RNA, 21 nt, Artificial Sequence
  Synthetic
gaauauaguuuuaaacucuau

SEQ ID NO: 21228 - RNA, 18 nt, Artificial Sequence
  Synthetic
gguuuucagaggcucuau

SEQ ID NO: 21229 - RNA, 20 nt, Artificial Sequence
  Synthetic
gagguuuucagaggcucuau

SEQ ID NO: 21230 - RNA, 23 nt, Artificial Sequence
  Synthetic
guugagguuuucagaggcucuau

SEQ ID NO: 21231 - RNA, 19 nt, Artificial Sequence
  Synthetic
gucuuguuuccuucucuau

SEQ ID NO: 21232 - RNA, 22 nt, Artificial Sequence
  Synthetic
gaagucuuguuuccuucucuau

SEQ ID NO: 21233 - RNA, 19 nt, Artificial Sequence
  Synthetic
gaggaaaauguuagucuau

SEQ ID NO: 21234 - RNA, 24 nt, Artificial Sequence
  Synthetic
gucaugaggaaaauguuagucuau

SEQ ID NO: 21235 - RNA, 18 nt, Artificial Sequence
  Synthetic
gaguuacuuccauucuau

SEQ ID NO: 21236 - RNA, 19 nt, Artificial Sequence
  Synthetic
guuagcugcaaauuucuau

SEQ ID NO: 21237 - RNA, 23 nt, Artificial Sequence
  Synthetic
guucuuaaaccucaguuuucuau

SEQ ID NO: 21238 - RNA, 18 nt, Artificial Sequence
  Synthetic
gggcaaaauauaaaguau

SEQ ID NO: 21239 - RNA, 19 nt, Artificial Sequence
  Synthetic
ggggcaaaauauaaaguau

SEQ ID NO: 21240 - RNA, 20 nt, Artificial Sequence
  Synthetic
gggggcaaaauauaaaguau

SEQ ID NO: 21241 - RNA, 23 nt, Artificial Sequence
  Synthetic
gaagggggcaaaauauaaaguau

SEQ ID NO: 21242 - RNA, 19 nt, Artificial Sequence
  Synthetic
gaagggauuuuacaaguau

SEQ ID NO: 21243 - RNA, 22 nt, Artificial Sequence
  Synthetic
guagaagggauuuuacaaguau

SEQ ID NO: 21244 - RNA, 23 nt, Artificial Sequence
  Synthetic
gguagaagggauuuuacaaguau

SEQ ID NO: 21245 - RNA, 24 nt, Artificial Sequence
  Synthetic
ggguagaagggauuuuacaaguau

SEQ ID NO: 21246 - RNA, 22 nt, Artificial Sequence
  Synthetic
gaauuucccccucaagaaguau

SEQ ID NO: 21247 - RNA, 18 nt, Artificial Sequence
  Synthetic
gcuauuugagauaaguau

SEQ ID NO: 21248 - RNA, 23 nt, Artificial Sequence
  Synthetic
gauaagcuauuugagauaaguau

SEQ ID NO: 21249 - RNA, 18 nt, Artificial Sequence
  Synthetic
gauucauucauucaguau

SEQ ID NO: 21250 - RNA, 19 nt, Artificial Sequence
  Synthetic
guuguaggguuuucaguau

SEQ ID NO: 21251 - RNA, 22 nt, Artificial Sequence
  Synthetic
gaaguuguaggguuuucaguau

SEQ ID NO: 21252 - RNA, 24 nt, Artificial Sequence
  Synthetic
gugaaguuguaggguuuucaguau

SEQ ID NO: 21253 - RNA, 20 nt, Artificial Sequence
  Synthetic
guuaaugauacagagaguau

SEQ ID NO: 21254 - RNA, 21 nt, Artificial Sequence
  Synthetic
gguuaaugauacagagaguau

SEQ ID NO: 21255 - RNA, 24 nt, Artificial Sequence
  Synthetic
guugguuaaugauacagagaguau

SEQ ID NO: 21256 - RNA, 18 nt, Artificial Sequence
  Synthetic
guuucccaaucggaguau

SEQ ID NO: 21257 - RNA, 23 nt, Artificial Sequence
  Synthetic
gcucaguuucccaaucggaguau

SEQ ID NO: 21258 - RNA, 19 nt, Artificial Sequence
  Synthetic
gaauuucaaacaugaguau

SEQ ID NO: 21259 - RNA, 22 nt, Artificial Sequence
  Synthetic
gaagaauuucaaacaugaguau

SEQ ID NO: 21260 - RNA, 23 nt, Artificial Sequence
  Synthetic
gcucaccaucacaauaugaguau

SEQ ID NO: 21261 - RNA, 24 nt, Artificial Sequence
  Synthetic
ggcucaccaucacaauaugaguau

SEQ ID NO: 21262 - RNA, 18 nt, Artificial Sequence
  Synthetic
gccuauaucaaauaguau

SEQ ID NO: 21263 - RNA, 18 nt, Artificial Sequence
  Synthetic
gaagauuguaaauaguau

SEQ ID NO: 21264 - RNA, 20 nt, Artificial Sequence
  Synthetic
guagacccauaaacuaguau

SEQ ID NO: 21265 - RNA, 21 nt, Artificial Sequence
  Synthetic
gugaucucugucuccuaguau

SEQ ID NO: 21266 - RNA, 20 nt, Artificial Sequence
  Synthetic
gauugaggcauuauuaguau

SEQ ID NO: 21267 - RNA, 20 nt, Artificial Sequence
  Synthetic
gaacaaauaucccuuaguau

SEQ ID NO: 21268 - RNA, 24 nt, Artificial Sequence
  Synthetic
guaagaacaaauaucccuuaguau

SEQ ID NO: 21269 - RNA, 23 nt, Artificial Sequence
  Synthetic
gcuuuucugaaagcaguuaguau

SEQ ID NO: 21270 - RNA, 24 nt, Artificial Sequence
  Synthetic
guuuauaugguagaagguuaguau

SEQ ID NO: 21271 - RNA, 20 nt, Artificial Sequence
  Synthetic
gaagugucuucuuuuaguau

SEQ ID NO: 21272 - RNA, 21 nt, Artificial Sequence
  Synthetic
ggaagugucuucuuuuaguau

SEQ ID NO: 21273 - RNA, 22 nt, Artificial Sequence
  Synthetic
gggaagugucuucuuuuaguau

SEQ ID NO: 21274 - RNA, 23 nt, Artificial Sequence
  Synthetic
ggggaagugucuucuuuuaguau

SEQ ID NO: 21275 - RNA, 21 nt, Artificial Sequence
  Synthetic
guuuauaucauaagagcguau

SEQ ID NO: 21276 - RNA, 22 nt, Artificial Sequence
  Synthetic
gguuuauaucauaagagcguau

SEQ ID NO: 21277 - RNA, 22 nt, Artificial Sequence
  Synthetic
gaauuauguaaaauguucguau

SEQ ID NO: 21278 - RNA, 24 nt, Artificial Sequence
  Synthetic
gacaaaaaaaaauccuucagguau

SEQ ID NO: 21279 - RNA, 24 nt, Artificial Sequence
  Synthetic
gaauacaccacaguuuggagguau

SEQ ID NO: 21280 - RNA, 22 nt, Artificial Sequence
  Synthetic
guauaauggucuuccuagguau

SEQ ID NO: 21281 - RNA, 23 nt, Artificial Sequence
  Synthetic
gguauaauggucuuccuagguau

SEQ ID NO: 21282 - RNA, 24 nt, Artificial Sequence
  Synthetic
gacaacaccugagagugaggguau

SEQ ID NO: 21283 - RNA, 21 nt, Artificial Sequence
  Synthetic
gacauuauauugcaaugguau

SEQ ID NO: 21284 - RNA, 24 nt, Artificial Sequence
  Synthetic
guagacauuauauugcaaugguau

SEQ ID NO: 21285 - RNA, 21 nt, Artificial Sequence
  Synthetic
gaccaaugccccucaugguau

SEQ ID NO: 21286 - RNA, 24 nt, Artificial Sequence
  Synthetic
gaugaccaaugccccucaugguau

SEQ ID NO: 21287 - RNA, 22 nt, Artificial Sequence
  Synthetic
gccuaagcuaagugccugguau

SEQ ID NO: 21288 - RNA, 24 nt, Artificial Sequence
  Synthetic
gugccuaagcuaagugccugguau

SEQ ID NO: 21289 - RNA, 18 nt, Artificial Sequence
  Synthetic
guucacaguaucugguau

SEQ ID NO: 21290 - RNA, 21 nt, Artificial Sequence
  Synthetic
guaguucacaguaucugguau

SEQ ID NO: 21291 - RNA, 18 nt, Artificial Sequence
  Synthetic
gcaacaaagaacauguau

SEQ ID NO: 21292 - RNA, 19 nt, Artificial Sequence
  Synthetic
ggcaacaaagaacauguau

SEQ ID NO: 21293 - RNA, 18 nt, Artificial Sequence
  Synthetic
gugcaguaugguauguau

SEQ ID NO: 21294 - RNA, 24 nt, Artificial Sequence
  Synthetic
gacauagugcaguaugguauguau

SEQ ID NO: 21295 - RNA, 24 nt, Artificial Sequence
  Synthetic
gaaauaaaaaagauguuacuguau

SEQ ID NO: 21296 - RNA, 19 nt, Artificial Sequence
  Synthetic
gcaaugguauuugcuguau

SEQ ID NO: 21297 - RNA, 22 nt, Artificial Sequence
  Synthetic
gacacaaaauuucuuucuguau

SEQ ID NO: 21298 - RNA, 23 nt, Artificial Sequence
  Synthetic
ggacacaaaauuucuuucuguau

SEQ ID NO: 21299 - RNA, 23 nt, Artificial Sequence
  Synthetic
guuacucuacaugagaaguguau

SEQ ID NO: 21300 - RNA, 24 nt, Artificial Sequence
  Synthetic
gguuacucuacaugagaaguguau

SEQ ID NO: 21301 - RNA, 18 nt, Artificial Sequence
  Synthetic
gaggaguuuugcuuguau

SEQ ID NO: 21302 - RNA, 20 nt, Artificial Sequence
  Synthetic
gugaggaguuuugcuuguau

SEQ ID NO: 21303 - RNA, 21 nt, Artificial Sequence
  Synthetic
ggugaggaguuuugcuuguau

SEQ ID NO: 21304 - RNA, 23 nt, Artificial Sequence
  Synthetic
gcggugaggaguuuugcuuguau

SEQ ID NO: 21305 - RNA, 24 nt, Artificial Sequence
  Synthetic
ggcggugaggaguuuugcuuguau

SEQ ID NO: 21306 - RNA, 21 nt, Artificial Sequence
  Synthetic
gccaggaaguacaauuuguau

SEQ ID NO: 21307 - RNA, 23 nt, Artificial Sequence
  Synthetic
gagccaggaaguacaauuuguau

SEQ ID NO: 21308 - RNA, 22 nt, Artificial Sequence
  Synthetic
gaagaaacaaaccuaaaauuau

SEQ ID NO: 21309 - RNA, 23 nt, Artificial Sequence
  Synthetic
ggaagaaacaaaccuaaaauuau

SEQ ID NO: 21310 - RNA, 19 nt, Artificial Sequence
  Synthetic
gaauugguaguaaaauuau

SEQ ID NO: 21311 - RNA, 20 nt, Artificial Sequence
  Synthetic
ggaauugguaguaaaauuau

SEQ ID NO: 21312 - RNA, 20 nt, Artificial Sequence
  Synthetic
guucaguguaguaaaauuau

SEQ ID NO: 21313 - RNA, 19 nt, Artificial Sequence
  Synthetic
gaagaaguucugaaauuau

SEQ ID NO: 21314 - RNA, 21 nt, Artificial Sequence
  Synthetic
gagaagaaguucugaaauuau

SEQ ID NO: 21315 - RNA, 22 nt, Artificial Sequence
  Synthetic
ggagaagaaguucugaaauuau

SEQ ID NO: 21316 - RNA, 18 nt, Artificial Sequence
  Synthetic
guauucuugaauaauuau

SEQ ID NO: 21317 - RNA, 22 nt, Artificial Sequence
  Synthetic
gccuguauucuugaauaauuau

SEQ ID NO: 21318 - RNA, 23 nt, Artificial Sequence
  Synthetic
ggccuguauucuugaauaauuau

SEQ ID NO: 21319 - RNA, 22 nt, Artificial Sequence
  Synthetic
gcccuucuauaacuaacauuau

SEQ ID NO: 21320 - RNA, 24 nt, Artificial Sequence
  Synthetic
gugcccuucuauaacuaacauuau

SEQ ID NO: 21321 - RNA, 18 nt, Artificial Sequence
  Synthetic
guuaaauauaaucauuau

SEQ ID NO: 21322 - RNA, 24 nt, Artificial Sequence
  Synthetic
gccauacccuccguaggucauuau

SEQ ID NO: 21323 - RNA, 24 nt, Artificial Sequence
  Synthetic
gucucuaccucucagauucauuau

SEQ ID NO: 21324 - RNA, 19 nt, Artificial Sequence
  Synthetic
gaauucagugcaagauuau

SEQ ID NO: 21325 - RNA, 23 nt, Artificial Sequence
  Synthetic
guaagaauucagugcaagauuau

SEQ ID NO: 21326 - RNA, 24 nt, Artificial Sequence
  Synthetic
guuuuuaucuuucugacagauuau

SEQ ID NO: 21327 - RNA, 18 nt, Artificial Sequence
  Synthetic
ggcuaacucugagauuau

SEQ ID NO: 21328 - RNA, 21 nt, Artificial Sequence
  Synthetic
gagaaggaaauagaauauuau

SEQ ID NO: 21329 - RNA, 22 nt, Artificial Sequence
  Synthetic
gacaugauuucacuaauauuau

SEQ ID NO: 21330 - RNA, 23 nt, Artificial Sequence
  Synthetic
gaauauuaaaauccaccuauuau

SEQ ID NO: 21331 - RNA, 23 nt, Artificial Sequence
  Synthetic
guuuuauuuuuaacaucuauuau

SEQ ID NO: 21332 - RNA, 22 nt, Artificial Sequence
  Synthetic
gaaaacauaagaaugguauuau

SEQ ID NO: 21333 - RNA, 23 nt, Artificial Sequence
  Synthetic
ggaaaacauaagaaugguauuau

SEQ ID NO: 21334 - RNA, 24 nt, Artificial Sequence
  Synthetic
gggaaaacauaagaaugguauuau

SEQ ID NO: 21335 - RNA, 18 nt, Artificial Sequence
  Synthetic
gauauuaucauguauuau

SEQ ID NO: 21336 - RNA, 21 nt, Artificial Sequence
  Synthetic
gcagauauuaucauguauuau

SEQ ID NO: 21337 - RNA, 20 nt, Artificial Sequence
  Synthetic
gcuggcaaaguuuguauuau

SEQ ID NO: 21338 - RNA, 18 nt, Artificial Sequence
  Synthetic
guuuucuguuauuauuau

SEQ ID NO: 21339 - RNA, 19 nt, Artificial Sequence
  Synthetic
gauacuaaacagaacuuau

SEQ ID NO: 21340 - RNA, 21 nt, Artificial Sequence
  Synthetic
gacccacagucuuggccuuau

SEQ ID NO: 21341 - RNA, 22 nt, Artificial Sequence
  Synthetic
ggacccacagucuuggccuuau

SEQ ID NO: 21342 - RNA, 20 nt, Artificial Sequence
  Synthetic
guuagcaucuacguccuuau

SEQ ID NO: 21343 - RNA, 20 nt, Artificial Sequence
  Synthetic
gcaaacauaaacuuccuuau

SEQ ID NO: 21344 - RNA, 21 nt, Artificial Sequence
  Synthetic
ggcaaacauaaacuuccuuau

SEQ ID NO: 21345 - RNA, 20 nt, Artificial Sequence
  Synthetic
guauacuauucuuuccuuau

SEQ ID NO: 21346 - RNA, 22 nt, Artificial Sequence
  Synthetic
gaacuaaaauauccaaucuuau

SEQ ID NO: 21347 - RNA, 24 nt, Artificial Sequence
  Synthetic
gccacucuguauacugcaucuuau

SEQ ID NO: 21348 - RNA, 19 nt, Artificial Sequence
  Synthetic
gcccacaacuguaucuuau

SEQ ID NO: 21349 - RNA, 23 nt, Artificial Sequence
  Synthetic
guacauuuucaaaugucucuuau

SEQ ID NO: 21350 - RNA, 21 nt, Artificial Sequence
  Synthetic
gaaacaaauauuguuucuuau

SEQ ID NO: 21351 - RNA, 22 nt, Artificial Sequence
  Synthetic
ggaaacaaauauuguuucuuau

SEQ ID NO: 21352 - RNA, 23 nt, Artificial Sequence
  Synthetic
gucauucccagucuucaaguuau

SEQ ID NO: 21353 - RNA, 22 nt, Artificial Sequence
  Synthetic
gaauuaaaacagacacaguuau

SEQ ID NO: 21354 - RNA, 23 nt, Artificial Sequence
  Synthetic
ggaauuaaaacagacacaguuau

SEQ ID NO: 21355 - RNA, 22 nt, Artificial Sequence
  Synthetic
gaaauuuuugucuaagaguuau

SEQ ID NO: 21356 - RNA, 22 nt, Artificial Sequence
  Synthetic
gccuaacuaagucacagguuau

SEQ ID NO: 21357 - RNA, 22 nt, Artificial Sequence
  Synthetic
gcauaaggaaaguucauguuau

SEQ ID NO: 21358 - RNA, 18 nt, Artificial Sequence
  Synthetic
guguaaaugaucuguuau

SEQ ID NO: 21359 - RNA, 21 nt, Artificial Sequence
  Synthetic
gucguguaaaugaucuguuau

SEQ ID NO: 21360 - RNA, 18 nt, Artificial Sequence
  Synthetic
gauucuguaagguguuau

SEQ ID NO: 21361 - RNA, 21 nt, Artificial Sequence
  Synthetic
gaugauucuguaagguguuau

SEQ ID NO: 21362 - RNA, 24 nt, Artificial Sequence
  Synthetic
gcuuaaagacaaaguauuuguuau

SEQ ID NO: 21363 - RNA, 23 nt, Artificial Sequence
  Synthetic
gcucuuaucacugagacauuuau

SEQ ID NO: 21364 - RNA, 19 nt, Artificial Sequence
  Synthetic
gugaacugugaagauuuau

SEQ ID NO: 21365 - RNA, 19 nt, Artificial Sequence
  Synthetic
gaccucuuacuauauuuau

SEQ ID NO: 21366 - RNA, 24 nt, Artificial Sequence
  Synthetic
gauuaaagcaaugaaucuauuuau

SEQ ID NO: 21367 - RNA, 18 nt, Artificial Sequence
  Synthetic
ggucaugaaugccuuuau

SEQ ID NO: 21368 - RNA, 20 nt, Artificial Sequence
  Synthetic
gaggucaugaaugccuuuau

SEQ ID NO: 21369 - RNA, 21 nt, Artificial Sequence
  Synthetic
ggaggucaugaaugccuuuau

SEQ ID NO: 21370 - RNA, 23 nt, Artificial Sequence
  Synthetic
gcuuccaagaauauaagcuuuau

SEQ ID NO: 21371 - RNA, 22 nt, Artificial Sequence
  Synthetic
guuaacacauuuugagcuuuau

SEQ ID NO: 21372 - RNA, 22 nt, Artificial Sequence
  Synthetic
gucuucucuggcacaucuuuau

SEQ ID NO: 21373 - RNA, 24 nt, Artificial Sequence
  Synthetic
gauaaauaaaaauuuuuucuuuau

SEQ ID NO: 21374 - RNA, 18 nt, Artificial Sequence
  Synthetic
gcacaauuuauaguuuau

SEQ ID NO: 21375 - RNA, 19 nt, Artificial Sequence
  Synthetic
gaggguagaauagguuuau

SEQ ID NO: 21376 - RNA, 20 nt, Artificial Sequence
  Synthetic
ggaggguagaauagguuuau

SEQ ID NO: 21377 - RNA, 22 nt, Artificial Sequence
  Synthetic
guggaggguagaauagguuuau

SEQ ID NO: 21378 - RNA, 23 nt, Artificial Sequence
  Synthetic
gguggaggguagaauagguuuau

SEQ ID NO: 21379 - RNA, 18 nt, Artificial Sequence
  Synthetic
gcgugaagccuuguuuau

SEQ ID NO: 21380 - RNA, 19 nt, Artificial Sequence
  Synthetic
guucuaaaauggauuuuau

SEQ ID NO: 21381 - RNA, 22 nt, Artificial Sequence
  Synthetic
gcauucaagacugauauuuuau

SEQ ID NO: 21382 - RNA, 18 nt, Artificial Sequence
  Synthetic
gaggugaaacuauuuuau

SEQ ID NO: 21383 - RNA, 19 nt, Artificial Sequence
  Synthetic
gaaauucagaaaguuuuau

SEQ ID NO: 21384 - RNA, 21 nt, Artificial Sequence
  Synthetic
gugaaauucagaaaguuuuau

SEQ ID NO: 21385 - RNA, 23 nt, Artificial Sequence
  Synthetic
gugugaaauucagaaaguuuuau

SEQ ID NO: 21386 - RNA, 18 nt, Artificial Sequence
  Synthetic
gcucuaugggaguuuuau

SEQ ID NO: 21387 - RNA, 19 nt, Artificial Sequence
  Synthetic
ggcucuaugggaguuuuau

SEQ ID NO: 21388 - RNA, 21 nt, Artificial Sequence
  Synthetic
gaggcucuaugggaguuuuau

SEQ ID NO: 21389 - RNA, 20 nt, Artificial Sequence
  Synthetic
gucuuuacuggauguuuuau

SEQ ID NO: 21390 - RNA, 21 nt, Artificial Sequence
  Synthetic
gcccuuaaagcuuuuuuuuau

SEQ ID NO: 21391 - RNA, 22 nt, Artificial Sequence
  Synthetic
gcauuagaagccacaaaaaacu

SEQ ID NO: 21392 - RNA, 24 nt, Artificial Sequence
  Synthetic
gacacaugagaggaauaaaaaacu

SEQ ID NO: 21393 - RNA, 19 nt, Artificial Sequence
  Synthetic
gagggcugcuuuaaaaacu

SEQ ID NO: 21394 - RNA, 22 nt, Artificial Sequence
  Synthetic
gaaucuuugaaauaccaaaacu

SEQ ID NO: 21395 - RNA, 20 nt, Artificial Sequence
  Synthetic
guuguuggcuaugcaaaacu

SEQ ID NO: 21396 - RNA, 18 nt, Artificial Sequence
  Synthetic
gggacacaaaagaaaacu

SEQ ID NO: 21397 - RNA, 22 nt, Artificial Sequence
  Synthetic
gaucagcugacuagagaaaacu

SEQ ID NO: 21398 - RNA, 22 nt, Artificial Sequence
  Synthetic
gcuuagcuuacauuugaaaacu

SEQ ID NO: 21399 - RNA, 19 nt, Artificial Sequence
  Synthetic
gucacugugcauuaaaacu

SEQ ID NO: 21400 - RNA, 24 nt, Artificial Sequence
  Synthetic
gacucgucacugugcauuaaaacu

SEQ ID NO: 21401 - RNA, 21 nt, Artificial Sequence
  Synthetic
gcuuuuuacacagcacaaacu

SEQ ID NO: 21402 - RNA, 21 nt, Artificial Sequence
  Synthetic
gcuaaauuauuuccccaaacu

SEQ ID NO: 21403 - RNA, 23 nt, Artificial Sequence
  Synthetic
gugcuaaauuauuuccccaaacu

SEQ ID NO: 21404 - RNA, 21 nt, Artificial Sequence
  Synthetic
gcacuccagagauaagaaacu

SEQ ID NO: 21405 - RNA, 19 nt, Artificial Sequence
  Synthetic
guguaugacaucagaaacu

SEQ ID NO: 21406 - RNA, 20 nt, Artificial Sequence
  Synthetic
gguguaugacaucagaaacu

SEQ ID NO: 21407 - RNA, 22 nt, Artificial Sequence
  Synthetic
gagguguaugacaucagaaacu

SEQ ID NO: 21408 - RNA, 19 nt, Artificial Sequence
  Synthetic
gauucuaaagucagaaacu

SEQ ID NO: 21409 - RNA, 20 nt, Artificial Sequence
  Synthetic
ggauucuaaagucagaaacu

SEQ ID NO: 21410 - RNA, 23 nt, Artificial Sequence
  Synthetic
guuggauucuaaagucagaaacu

SEQ ID NO: 21411 - RNA, 21 nt, Artificial Sequence
  Synthetic
ggaaagagcgagagagaaacu

SEQ ID NO: 21412 - RNA, 22 nt, Artificial Sequence
  Synthetic
gggaaagagcgagagagaaacu

SEQ ID NO: 21413 - RNA, 23 nt, Artificial Sequence
  Synthetic
ggggaaagagcgagagagaaacu

SEQ ID NO: 21414 - RNA, 18 nt, Artificial Sequence
  Synthetic
guuugaaacauggaaacu

SEQ ID NO: 21415 - RNA, 18 nt, Artificial Sequence
  Synthetic
gucagaggaauugaaacu

SEQ ID NO: 21416 - RNA, 20 nt, Artificial Sequence
  Synthetic
gagucagaggaauugaaacu

SEQ ID NO: 21417 - RNA, 22 nt, Artificial Sequence
  Synthetic
gcgagucagaggaauugaaacu

SEQ ID NO: 21418 - RNA, 19 nt, Artificial Sequence
  Synthetic
guucuucuuauuugaaacu

SEQ ID NO: 21419 - RNA, 21 nt, Artificial Sequence
  Synthetic
guguucuucuuauuugaaacu

SEQ ID NO: 21420 - RNA, 22 nt, Artificial Sequence
  Synthetic
gguguucuucuuauuugaaacu

SEQ ID NO: 21421 - RNA, 23 nt, Artificial Sequence
  Synthetic
guucccagaauuucacauaaacu

SEQ ID NO: 21422 - RNA, 24 nt, Artificial Sequence
  Synthetic
gguucccagaauuucacauaaacu

SEQ ID NO: 21423 - RNA, 21 nt, Artificial Sequence
  Synthetic
guuuccugaaguugcuaaacu

SEQ ID NO: 21424 - RNA, 19 nt, Artificial Sequence
  Synthetic
gaacgagcagucuuaaacu

SEQ ID NO: 21425 - RNA, 24 nt, Artificial Sequence
  Synthetic
guucugaacgagcagucuuaaacu

SEQ ID NO: 21426 - RNA, 21 nt, Artificial Sequence
  Synthetic
guacaccuuguucuuuaaacu

SEQ ID NO: 21427 - RNA, 18 nt, Artificial Sequence
  Synthetic
gcugauauuuuuacaacu

SEQ ID NO: 21428 - RNA, 22 nt, Artificial Sequence
  Synthetic
gaaaauaaugaucuauccaacu

SEQ ID NO: 21429 - RNA, 24 nt, Artificial Sequence
  Synthetic
gugaaaauaaugaucuauccaacu

SEQ ID NO: 21430 - RNA, 21 nt, Artificial Sequence
  Synthetic
guaaccacaugauaaagaacu

SEQ ID NO: 21431 - RNA, 24 nt, Artificial Sequence
  Synthetic
gcaauuuuguguucucugagaacu

SEQ ID NO: 21432 - RNA, 20 nt, Artificial Sequence
  Synthetic
guacucuucccuugagaacu

SEQ ID NO: 21433 - RNA, 24 nt, Artificial Sequence
  Synthetic
guauguacucuucccuugagaacu

SEQ ID NO: 21434 - RNA, 23 nt, Artificial Sequence
  Synthetic
gaaaaacacuuuagcaaggaacu

SEQ ID NO: 21435 - RNA, 19 nt, Artificial Sequence
  Synthetic
guuaggggaagaaggaacu

SEQ ID NO: 21436 - RNA, 20 nt, Artificial Sequence
  Synthetic
gguuaggggaagaaggaacu

SEQ ID NO: 21437 - RNA, 21 nt, Artificial Sequence
  Synthetic
ggguuaggggaagaaggaacu

SEQ ID NO: 21438 - RNA, 22 nt, Artificial Sequence
  Synthetic
gggguuaggggaagaaggaacu

SEQ ID NO: 21439 - RNA, 18 nt, Artificial Sequence
  Synthetic
gcugcuagucauggaacu

SEQ ID NO: 21440 - RNA, 20 nt, Artificial Sequence
  Synthetic
gagcugcuagucauggaacu

SEQ ID NO: 21441 - RNA, 22 nt, Artificial Sequence
  Synthetic
guauguuggauaguggugaacu

SEQ ID NO: 21442 - RNA, 24 nt, Artificial Sequence
  Synthetic
gaguauguuggauaguggugaacu

SEQ ID NO: 21443 - RNA, 18 nt, Artificial Sequence
  Synthetic
gaccccaaaagccuaacu

SEQ ID NO: 21444 - RNA, 24 nt, Artificial Sequence
  Synthetic
guuuauauaauugcccuccuaacu

SEQ ID NO: 21445 - RNA, 18 nt, Artificial Sequence
  Synthetic
gagguuuggcuuguaacu

SEQ ID NO: 21446 - RNA, 21 nt, Artificial Sequence
  Synthetic
gaagagguuuggcuuguaacu

SEQ ID NO: 21447 - RNA, 23 nt, Artificial Sequence
  Synthetic
gaaacagaagucauccauuaacu

SEQ ID NO: 21448 - RNA, 19 nt, Artificial Sequence
  Synthetic
gaaacuuugaggguuaacu

SEQ ID NO: 21449 - RNA, 21 nt, Artificial Sequence
  Synthetic
gagaaacuuugaggguuaacu

SEQ ID NO: 21450 - RNA, 19 nt, Artificial Sequence
  Synthetic
gcaacuuuaagaaaacacu

SEQ ID NO: 21451 - RNA, 21 nt, Artificial Sequence
  Synthetic
gagcaacuuuaagaaaacacu

SEQ ID NO: 21452 - RNA, 22 nt, Artificial Sequence
  Synthetic
ggagcaacuuuaagaaaacacu

SEQ ID NO: 21453 - RNA, 23 nt, Artificial Sequence
  Synthetic
gggagcaacuuuaagaaaacacu

SEQ ID NO: 21454 - RNA, 22 nt, Artificial Sequence
  Synthetic
gcuauuuaaaaauagcaacacu

SEQ ID NO: 21455 - RNA, 24 nt, Artificial Sequence
  Synthetic
gugcuauuuaaaaauagcaacacu

SEQ ID NO: 21456 - RNA, 21 nt, Artificial Sequence
  Synthetic
gccaucaguuaauuacacacu

SEQ ID NO: 21457 - RNA, 22 nt, Artificial Sequence
  Synthetic
ggccaucaguuaauuacacacu

SEQ ID NO: 21458 - RNA, 22 nt, Artificial Sequence
  Synthetic
gcucuggaccagagaccacacu

SEQ ID NO: 21459 - RNA, 24 nt, Artificial Sequence
  Synthetic
gugcucuggaccagagaccacacu

SEQ ID NO: 21460 - RNA, 22 nt, Artificial Sequence
  Synthetic
gaucugcuagggagugcacacu

SEQ ID NO: 21461 - RNA, 19 nt, Artificial Sequence
  Synthetic
guuucaaugaaaucacacu

SEQ ID NO: 21462 - RNA, 21 nt, Artificial Sequence
  Synthetic
gaguuucaaugaaaucacacu

SEQ ID NO: 21463 - RNA, 23 nt, Artificial Sequence
  Synthetic
gugaguuucaaugaaaucacacu

SEQ ID NO: 21464 - RNA, 23 nt, Artificial Sequence
  Synthetic
gaacuccucagugucaggacacu

SEQ ID NO: 21465 - RNA, 24 nt, Artificial Sequence
  Synthetic
ggaacuccucagugucaggacacu

SEQ ID NO: 21466 - RNA, 20 nt, Artificial Sequence
  Synthetic
gcauccagaagaaugacacu

SEQ ID NO: 21467 - RNA, 19 nt, Artificial Sequence
  Synthetic
gagauguucccuaaccacu

SEQ ID NO: 21468 - RNA, 18 nt, Artificial Sequence
  Synthetic
ggaaauggguagcccacu

SEQ ID NO: 21469 - RNA, 19 nt, Artificial Sequence
  Synthetic
gggaaauggguagcccacu

SEQ ID NO: 21470 - RNA, 20 nt, Artificial Sequence
  Synthetic
ggggaaauggguagcccacu

SEQ ID NO: 21471 - RNA, 24 nt, Artificial Sequence
  Synthetic
gcuccuuggggugugcaucccacu

SEQ ID NO: 21472 - RNA, 18 nt, Artificial Sequence
  Synthetic
gugauguuuagagccacu

SEQ ID NO: 21473 - RNA, 19 nt, Artificial Sequence
  Synthetic
ggugauguuuagagccacu

SEQ ID NO: 21474 - RNA, 21 nt, Artificial Sequence
  Synthetic
guggugauguuuagagccacu

SEQ ID NO: 21475 - RNA, 22 nt, Artificial Sequence
  Synthetic
gguggugauguuuagagccacu

SEQ ID NO: 21476 - RNA, 23 nt, Artificial Sequence
  Synthetic
ggguggugauguuuagagccacu

SEQ ID NO: 21477 - RNA, 24 nt, Artificial Sequence
  Synthetic
gggguggugauguuuagagccacu

SEQ ID NO: 21478 - RNA, 18 nt, Artificial Sequence
  Synthetic
ggugguuaaugagccacu

SEQ ID NO: 21479 - RNA, 19 nt, Artificial Sequence
  Synthetic
gcagugcugcggggccacu

SEQ ID NO: 21480 - RNA, 21 nt, Artificial Sequence
  Synthetic
gagcagugcugcggggccacu

SEQ ID NO: 21481 - RNA, 24 nt, Artificial Sequence
  Synthetic
guugagcagugcugcggggccacu

SEQ ID NO: 21482 - RNA, 20 nt, Artificial Sequence
  Synthetic
gacaacagcaugcauccacu

SEQ ID NO: 21483 - RNA, 22 nt, Artificial Sequence
  Synthetic
gagacaacagcaugcauccacu

SEQ ID NO: 21484 - RNA, 18 nt, Artificial Sequence
  Synthetic
gguucccugaauuccacu

SEQ ID NO: 21485 - RNA, 23 nt, Artificial Sequence
  Synthetic
gacuaaaaccuagucuuuccacu

SEQ ID NO: 21486 - RNA, 23 nt, Artificial Sequence
  Synthetic
gcuuuauaucugcccuuagcacu

SEQ ID NO: 21487 - RNA, 18 nt, Artificial Sequence
  Synthetic
gcuaaauaacagcgcacu

SEQ ID NO: 21488 - RNA, 21 nt, Artificial Sequence
  Synthetic
guaagacuauuuaaaggcacu

SEQ ID NO: 21489 - RNA, 22 nt, Artificial Sequence
  Synthetic
gguaagacuauuuaaaggcacu

SEQ ID NO: 21490 - RNA, 23 nt, Artificial Sequence
  Synthetic
ggguaagacuauuuaaaggcacu

SEQ ID NO: 21491 - RNA, 24 nt, Artificial Sequence
  Synthetic
gaucugggcaccauucuaggcacu

SEQ ID NO: 21492 - RNA, 18 nt, Artificial Sequence
  Synthetic
gccugccuacagggcacu

SEQ ID NO: 21493 - RNA, 21 nt, Artificial Sequence
  Synthetic
gaagccugccuacagggcacu

SEQ ID NO: 21494 - RNA, 22 nt, Artificial Sequence
  Synthetic
ggaagccugccuacagggcacu

SEQ ID NO: 21495 - RNA, 24 nt, Artificial Sequence
  Synthetic
gaggaagccugccuacagggcacu

SEQ ID NO: 21496 - RNA, 18 nt, Artificial Sequence
  Synthetic
gucaauuguucuggcacu

SEQ ID NO: 21497 - RNA, 20 nt, Artificial Sequence
  Synthetic
gaagacccugauuaugcacu

SEQ ID NO: 21498 - RNA, 24 nt, Artificial Sequence
  Synthetic
guaaauaguaucugaaugugcacu

SEQ ID NO: 21499 - RNA, 19 nt, Artificial Sequence
  Synthetic
gacacaacacacaaucacu

SEQ ID NO: 21500 - RNA, 20 nt, Artificial Sequence
  Synthetic
gaagcacaaucaucaucacu

SEQ ID NO: 21501 - RNA, 23 nt, Artificial Sequence
  Synthetic
gaagaagcacaaucaucaucacu

SEQ ID NO: 21502 - RNA, 24 nt, Artificial Sequence
  Synthetic
ggaagaagcacaaucaucaucacu

SEQ ID NO: 21503 - RNA, 18 nt, Artificial Sequence
  Synthetic
gacaguauaugugucacu

SEQ ID NO: 21504 - RNA, 21 nt, Artificial Sequence
  Synthetic
gcugacaguauaugugucacu

SEQ ID NO: 21505 - RNA, 23 nt, Artificial Sequence
  Synthetic
gagcugacaguauaugugucacu

SEQ ID NO: 21506 - RNA, 22 nt, Artificial Sequence
  Synthetic
guuaacuguguaauaauucacu

SEQ ID NO: 21507 - RNA, 24 nt, Artificial Sequence
  Synthetic
gaguuaacuguguaauaauucacu

SEQ ID NO: 21508 - RNA, 19 nt, Artificial Sequence
  Synthetic
gaugaacaaaugauucacu

SEQ ID NO: 21509 - RNA, 20 nt, Artificial Sequence
  Synthetic
ggaugaacaaaugauucacu

SEQ ID NO: 21510 - RNA, 19 nt, Artificial Sequence
  Synthetic
gaggucauuaaucuucacu

SEQ ID NO: 21511 - RNA, 18 nt, Artificial Sequence
  Synthetic
gaagagaguaguuucacu

SEQ ID NO: 21512 - RNA, 23 nt, Artificial Sequence
  Synthetic
gaaucuagagguaauguuucacu

SEQ ID NO: 21513 - RNA, 24 nt, Artificial Sequence
  Synthetic
guaccaacaucacagguuuucacu

SEQ ID NO: 21514 - RNA, 22 nt, Artificial Sequence
  Synthetic
gugugugauguugaauaagacu

SEQ ID NO: 21515 - RNA, 18 nt, Artificial Sequence
  Synthetic
guuuauaagugccagacu

SEQ ID NO: 21516 - RNA, 19 nt, Artificial Sequence
  Synthetic
gguuuauaagugccagacu

SEQ ID NO: 21517 - RNA, 20 nt, Artificial Sequence
  Synthetic
ggguuuauaagugccagacu

SEQ ID NO: 21518 - RNA, 24 nt, Artificial Sequence
  Synthetic
guuaggguuuauaagugccagacu

SEQ ID NO: 21519 - RNA, 20 nt, Artificial Sequence
  Synthetic
gccauagagcaaugcagacu

SEQ ID NO: 21520 - RNA, 21 nt, Artificial Sequence
  Synthetic
ggccauagagcaaugcagacu

SEQ ID NO: 21521 - RNA, 24 nt, Artificial Sequence
  Synthetic
gcuggccauagagcaaugcagacu

SEQ ID NO: 21522 - RNA, 24 nt, Artificial Sequence
  Synthetic
gccucucuaaccaccucagagacu

SEQ ID NO: 21523 - RNA, 19 nt, Artificial Sequence
  Synthetic
gugcugcuaugaauagacu

SEQ ID NO: 21524 - RNA, 20 nt, Artificial Sequence
  Synthetic
ggugcugcuaugaauagacu

SEQ ID NO: 21525 - RNA, 22 nt, Artificial Sequence
  Synthetic
guggugcugcuaugaauagacu

SEQ ID NO: 21526 - RNA, 23 nt, Artificial Sequence
  Synthetic
gguggugcugcuaugaauagacu

SEQ ID NO: 21527 - RNA, 24 nt, Artificial Sequence
  Synthetic
ggguggugcugcuaugaauagacu

SEQ ID NO: 21528 - RNA, 19 nt, Artificial Sequence
  Synthetic
gugcucucuauucuagacu

SEQ ID NO: 21529 - RNA, 23 nt, Artificial Sequence
  Synthetic
gauugugcucucuauucuagacu

SEQ ID NO: 21530 - RNA, 19 nt, Artificial Sequence
  Synthetic
gcccaguggccuuuagacu

SEQ ID NO: 21531 - RNA, 22 nt, Artificial Sequence
  Synthetic
gucgcccaguggccuuuagacu

SEQ ID NO: 21532 - RNA, 22 nt, Artificial Sequence
  Synthetic
guaguuagaagaaaaauggacu

SEQ ID NO: 21533 - RNA, 19 nt, Artificial Sequence
  Synthetic
gugcaaacaucacuggacu

SEQ ID NO: 21534 - RNA, 22 nt, Artificial Sequence
  Synthetic
guagugcaaacaucacuggacu

SEQ ID NO: 21535 - RNA, 24 nt, Artificial Sequence
  Synthetic
gaaccacagcagcuugucuggacu

SEQ ID NO: 21536 - RNA, 24 nt, Artificial Sequence
  Synthetic
gacaaaacacaaaguacaaugacu

SEQ ID NO: 21537 - RNA, 24 nt, Artificial Sequence
  Synthetic
gaaaacuuggaagacgcaaugacu

SEQ ID NO: 21538 - RNA, 20 nt, Artificial Sequence
  Synthetic
gcugugguaugcuaaugacu

SEQ ID NO: 21539 - RNA, 24 nt, Artificial Sequence
  Synthetic
gucugcugugguaugcuaaugacu

SEQ ID NO: 21540 - RNA, 21 nt, Artificial Sequence
  Synthetic
gaaaaaacaagacaggugacu

SEQ ID NO: 21541 - RNA, 21 nt, Artificial Sequence
  Synthetic
gacuugcuuugacaauugacu

SEQ ID NO: 21542 - RNA, 23 nt, Artificial Sequence
  Synthetic
gugacuugcuuugacaauugacu

SEQ ID NO: 21543 - RNA, 18 nt, Artificial Sequence
  Synthetic
ggcuuuucuagcuugacu

SEQ ID NO: 21544 - RNA, 22 nt, Artificial Sequence
  Synthetic
gcuuggcuuuucuagcuugacu

SEQ ID NO: 21545 - RNA, 18 nt, Artificial Sequence
  Synthetic
guaaucacauaaaauacu

SEQ ID NO: 21546 - RNA, 20 nt, Artificial Sequence
  Synthetic
gaguaaucacauaaaauacu

SEQ ID NO: 21547 - RNA, 18 nt, Artificial Sequence
  Synthetic
gaauuuuuguaaaauacu

SEQ ID NO: 21548 - RNA, 19 nt, Artificial Sequence
  Synthetic
ggaauuuuuguaaaauacu

SEQ ID NO: 21549 - RNA, 20 nt, Artificial Sequence
  Synthetic
gucuuuguacaccuaauacu

SEQ ID NO: 21550 - RNA, 21 nt, Artificial Sequence
  Synthetic
ggucuuuguacaccuaauacu

SEQ ID NO: 21551 - RNA, 18 nt, Artificial Sequence
  Synthetic
gcuuuagcagcuaauacu

SEQ ID NO: 21552 - RNA, 19 nt, Artificial Sequence
  Synthetic
ggcuuuagcagcuaauacu

SEQ ID NO: 21553 - RNA, 21 nt, Artificial Sequence
  Synthetic
gaggcuuuagcagcuaauacu

SEQ ID NO: 21554 - RNA, 23 nt, Artificial Sequence
  Synthetic
gcauuuguauauccucuaauacu

SEQ ID NO: 21555 - RNA, 20 nt, Artificial Sequence
  Synthetic
gccagucagaggaccauacu

SEQ ID NO: 21556 - RNA, 18 nt, Artificial Sequence
  Synthetic
gucauggugcuagauacu

SEQ ID NO: 21557 - RNA, 19 nt, Artificial Sequence
  Synthetic
ggucauggugcuagauacu

SEQ ID NO: 21558 - RNA, 19 nt, Artificial Sequence
  Synthetic
guacuuuuaaauaccuacu

SEQ ID NO: 21559 - RNA, 23 nt, Artificial Sequence
  Synthetic
gcuguauugauaucuuggcuacu

SEQ ID NO: 21560 - RNA, 24 nt, Artificial Sequence
  Synthetic
gaccucauuuuugaaagaucuacu

SEQ ID NO: 21561 - RNA, 22 nt, Artificial Sequence
  Synthetic
gacuucccaaguucuaaguacu

SEQ ID NO: 21562 - RNA, 23 nt, Artificial Sequence
  Synthetic
ggacuucccaaguucuaaguacu

SEQ ID NO: 21563 - RNA, 18 nt, Artificial Sequence
  Synthetic
ggcuuucugguaaguacu

SEQ ID NO: 21564 - RNA, 23 nt, Artificial Sequence
  Synthetic
gcaacaucuggcuacugaguacu

SEQ ID NO: 21565 - RNA, 24 nt, Artificial Sequence
  Synthetic
ggcaacaucuggcuacugaguacu

SEQ ID NO: 21566 - RNA, 18 nt, Artificial Sequence
  Synthetic
ggguuuagauuagguacu

SEQ ID NO: 21567 - RNA, 19 nt, Artificial Sequence
  Synthetic
guuucaagugcuauguacu

SEQ ID NO: 21568 - RNA, 23 nt, Artificial Sequence
  Synthetic
gauuuacaauacaagccuguacu

SEQ ID NO: 21569 - RNA, 24 nt, Artificial Sequence
  Synthetic
ggauuuacaauacaagccuguacu

SEQ ID NO: 21570 - RNA, 21 nt, Artificial Sequence
  Synthetic
guacucuguaugcucuguacu

SEQ ID NO: 21571 - RNA, 23 nt, Artificial Sequence
  Synthetic
guguacucuguaugcucuguacu

SEQ ID NO: 21572 - RNA, 21 nt, Artificial Sequence
  Synthetic
gucccucuucacagguguacu

SEQ ID NO: 21573 - RNA, 19 nt, Artificial Sequence
  Synthetic
gauuuaggaucauauuacu

SEQ ID NO: 21574 - RNA, 20 nt, Artificial Sequence
  Synthetic
ggauuuaggaucauauuacu

SEQ ID NO: 21575 - RNA, 22 nt, Artificial Sequence
  Synthetic
guggauuuaggaucauauuacu

SEQ ID NO: 21576 - RNA, 19 nt, Artificial Sequence
  Synthetic
gaaacuaacagauauuacu

SEQ ID NO: 21577 - RNA, 20 nt, Artificial Sequence
  Synthetic
guagugugcaggauauuacu

SEQ ID NO: 21578 - RNA, 24 nt, Artificial Sequence
  Synthetic
guacguagugugcaggauauuacu

SEQ ID NO: 21579 - RNA, 19 nt, Artificial Sequence
  Synthetic
guaaugauuuccuauuacu

SEQ ID NO: 21580 - RNA, 20 nt, Artificial Sequence
  Synthetic
gacguccuaucucacuuacu

SEQ ID NO: 21581 - RNA, 23 nt, Artificial Sequence
  Synthetic
gaauccuuguucugcuacuuacu

SEQ ID NO: 21582 - RNA, 19 nt, Artificial Sequence
  Synthetic
guuaaugguguuccuuacu

SEQ ID NO: 21583 - RNA, 22 nt, Artificial Sequence
  Synthetic
guuguuaaugguguuccuuacu

SEQ ID NO: 21584 - RNA, 23 nt, Artificial Sequence
  Synthetic
gguuguuaaugguguuccuuacu

SEQ ID NO: 21585 - RNA, 22 nt, Artificial Sequence
  Synthetic
guucuugcacugcaauguuacu

SEQ ID NO: 21586 - RNA, 18 nt, Artificial Sequence
  Synthetic
gugauuuccuguguuacu

SEQ ID NO: 21587 - RNA, 20 nt, Artificial Sequence
  Synthetic
gugugauuuccuguguuacu

SEQ ID NO: 21588 - RNA, 21 nt, Artificial Sequence
  Synthetic
ggugugauuuccuguguuacu

SEQ ID NO: 21589 - RNA, 18 nt, Artificial Sequence
  Synthetic
ggaaguguuuuuguuacu

SEQ ID NO: 21590 - RNA, 21 nt, Artificial Sequence
  Synthetic
gcuggaaguguuuuuguuacu

SEQ ID NO: 21591 - RNA, 18 nt, Artificial Sequence
  Synthetic
guauuuuauaccuuuacu

SEQ ID NO: 21592 - RNA, 21 nt, Artificial Sequence
  Synthetic
gauguauuuuauaccuuuacu

SEQ ID NO: 21593 - RNA, 24 nt, Artificial Sequence
  Synthetic
gucucuuucccuucucuguuuacu

SEQ ID NO: 21594 - RNA, 18 nt, Artificial Sequence
  Synthetic
gaaguacaauuucaaccu

SEQ ID NO: 21595 - RNA, 19 nt, Artificial Sequence
  Synthetic
ggaaguacaauuucaaccu

SEQ ID NO: 21596 - RNA, 18 nt, Artificial Sequence
  Synthetic
gguauuagguaagaaccu

SEQ ID NO: 21597 - RNA, 21 nt, Artificial Sequence
  Synthetic
gaauccugaccuacagaaccu

SEQ ID NO: 21598 - RNA, 23 nt, Artificial Sequence
  Synthetic
gaaacaugagcaugauggaaccu

SEQ ID NO: 21599 - RNA, 23 nt, Artificial Sequence
  Synthetic
guccacaccacugcuuauaaccu

SEQ ID NO: 21600 - RNA, 20 nt, Artificial Sequence
  Synthetic
gucagcaucagugguaaccu

SEQ ID NO: 21601 - RNA, 24 nt, Artificial Sequence
  Synthetic
gccagucagcaucagugguaaccu

SEQ ID NO: 21602 - RNA, 18 nt, Artificial Sequence
  Synthetic
ggagcuagucaaacaccu

SEQ ID NO: 21603 - RNA, 23 nt, Artificial Sequence
  Synthetic
gaauaggagcuagucaaacaccu

SEQ ID NO: 21604 - RNA, 18 nt, Artificial Sequence
  Synthetic
gggaaauaaggaacaccu

SEQ ID NO: 21605 - RNA, 18 nt, Artificial Sequence
  Synthetic
gcggcuaaaaagacaccu

SEQ ID NO: 21606 - RNA, 18 nt, Artificial Sequence
  Synthetic
gcuuuuccauugacaccu

SEQ ID NO: 21607 - RNA, 23 nt, Artificial Sequence
  Synthetic
gaccagcuuuuccauugacaccu

SEQ ID NO: 21608 - RNA, 20 nt, Artificial Sequence
  Synthetic
guucaauucccaccccaccu

SEQ ID NO: 21609 - RNA, 23 nt, Artificial Sequence
  Synthetic
gauucugcauuuuuaguccaccu

SEQ ID NO: 21610 - RNA, 24 nt, Artificial Sequence
  Synthetic
gauuaaauauacuccacagcaccu

SEQ ID NO: 21611 - RNA, 21 nt, Artificial Sequence
  Synthetic
gauaaccuugugggagcaccu

SEQ ID NO: 21612 - RNA, 20 nt, Artificial Sequence
  Synthetic
gccuguugaugaggucaccu

SEQ ID NO: 21613 - RNA, 18 nt, Artificial Sequence
  Synthetic
gcuagaauuuugucaccu

SEQ ID NO: 21614 - RNA, 21 nt, Artificial Sequence
  Synthetic
gaagcuagaauuuugucaccu

SEQ ID NO: 21615 - RNA, 22 nt, Artificial Sequence
  Synthetic
ggaagcuagaauuuugucaccu

SEQ ID NO: 21616 - RNA, 23 nt, Artificial Sequence
  Synthetic
gggaagcuagaauuuugucaccu

SEQ ID NO: 21617 - RNA, 24 nt, Artificial Sequence
  Synthetic
ggggaagcuagaauuuugucaccu

SEQ ID NO: 21618 - RNA, 23 nt, Artificial Sequence
  Synthetic
gucagugugcacaggauucaccu

SEQ ID NO: 21619 - RNA, 23 nt, Artificial Sequence
  Synthetic
gcaaugaagaugagaaaggaccu

SEQ ID NO: 21620 - RNA, 19 nt, Artificial Sequence
  Synthetic
guuuaaauagcccugaccu

SEQ ID NO: 21621 - RNA, 22 nt, Artificial Sequence
  Synthetic
gcuguuuaaauagcccugaccu

SEQ ID NO: 21622 - RNA, 23 nt, Artificial Sequence
  Synthetic
gccaacuucuuuuaacaauaccu

SEQ ID NO: 21623 - RNA, 24 nt, Artificial Sequence
  Synthetic
ggccaacuucuuuuaacaauaccu

SEQ ID NO: 21624 - RNA, 19 nt, Artificial Sequence
  Synthetic
gaguuagugaaugcuaccu

SEQ ID NO: 21625 - RNA, 20 nt, Artificial Sequence
  Synthetic
ggaguuagugaaugcuaccu

SEQ ID NO: 21626 - RNA, 22 nt, Artificial Sequence
  Synthetic
gaggaguuagugaaugcuaccu

SEQ ID NO: 21627 - RNA, 21 nt, Artificial Sequence
  Synthetic
gauuacaaauaucaucuaccu

SEQ ID NO: 21628 - RNA, 21 nt, Artificial Sequence
  Synthetic
gacugaauggcaagcguaccu

SEQ ID NO: 21629 - RNA, 23 nt, Artificial Sequence
  Synthetic
gugacugaauggcaagcguaccu

SEQ ID NO: 21630 - RNA, 24 nt, Artificial Sequence
  Synthetic
ggugacugaauggcaagcguaccu

SEQ ID NO: 21631 - RNA, 18 nt, Artificial Sequence
  Synthetic
gaaaccuagcugguaccu

SEQ ID NO: 21632 - RNA, 23 nt, Artificial Sequence
  Synthetic
gaacugaaaccuagcugguaccu

SEQ ID NO: 21633 - RNA, 24 nt, Artificial Sequence
  Synthetic
ggaacugaaaccuagcugguaccu

SEQ ID NO: 21634 - RNA, 18 nt, Artificial Sequence
  Synthetic
gaucuagauuuuguaccu

SEQ ID NO: 21635 - RNA, 19 nt, Artificial Sequence
  Synthetic
ggaucuagauuuuguaccu

SEQ ID NO: 21636 - RNA, 20 nt, Artificial Sequence
  Synthetic
gggaucuagauuuuguaccu

SEQ ID NO: 21637 - RNA, 20 nt, Artificial Sequence
  Synthetic
gaaacuauaucuacuuaccu

SEQ ID NO: 21638 - RNA, 22 nt, Artificial Sequence
  Synthetic
gagaaacuauaucuacuuaccu

SEQ ID NO: 21639 - RNA, 18 nt, Artificial Sequence
  Synthetic
ggauacacuauuuuaccu

SEQ ID NO: 21640 - RNA, 22 nt, Artificial Sequence
  Synthetic
gcuuggauacacuauuuuaccu

SEQ ID NO: 21641 - RNA, 20 nt, Artificial Sequence
  Synthetic
gauagaguuucaguaacccu

SEQ ID NO: 21642 - RNA, 22 nt, Artificial Sequence
  Synthetic
gagauagaguuucaguaacccu

SEQ ID NO: 21643 - RNA, 23 nt, Artificial Sequence
  Synthetic
gucucagugaaugaauuaacccu

SEQ ID NO: 21644 - RNA, 24 nt, Artificial Sequence
  Synthetic
ggucucagugaaugaauuaacccu

SEQ ID NO: 21645 - RNA, 18 nt, Artificial Sequence
  Synthetic
ggguaacucuacuacccu

SEQ ID NO: 21646 - RNA, 20 nt, Artificial Sequence
  Synthetic
gaaucuagaaccucuacccu

SEQ ID NO: 21647 - RNA, 18 nt, Artificial Sequence
  Synthetic
gcauuuugacuuuacccu

SEQ ID NO: 21648 - RNA, 20 nt, Artificial Sequence
  Synthetic
gagcauuuugacuuuacccu

SEQ ID NO: 21649 - RNA, 18 nt, Artificial Sequence
  Synthetic
gcugaguuucuuuacccu

SEQ ID NO: 21650 - RNA, 19 nt, Artificial Sequence
  Synthetic
gccacggcagcaaaccccu

SEQ ID NO: 21651 - RNA, 20 nt, Artificial Sequence
  Synthetic
ggccacggcagcaaaccccu

SEQ ID NO: 21652 - RNA, 18 nt, Artificial Sequence
  Synthetic
gcaacaauaguauccccu

SEQ ID NO: 21653 - RNA, 21 nt, Artificial Sequence
  Synthetic
gauuauaauccccuguccccu

SEQ ID NO: 21654 - RNA, 23 nt, Artificial Sequence
  Synthetic
gugauuauaauccccuguccccu

SEQ ID NO: 21655 - RNA, 21 nt, Artificial Sequence
  Synthetic
guuuucuggccucuuuccccu

SEQ ID NO: 21656 - RNA, 24 nt, Artificial Sequence
  Synthetic
gaaguuuucuggccucuuuccccu

SEQ ID NO: 21657 - RNA, 20 nt, Artificial Sequence
  Synthetic
gcuuacacuuacugagcccu

SEQ ID NO: 21658 - RNA, 24 nt, Artificial Sequence
  Synthetic
gccagcuuacacuuacugagcccu

SEQ ID NO: 21659 - RNA, 19 nt, Artificial Sequence
  Synthetic
guuuuauauuucuagcccu

SEQ ID NO: 21660 - RNA, 23 nt, Artificial Sequence
  Synthetic
gcccucucuuggaaaacugcccu

SEQ ID NO: 21661 - RNA, 19 nt, Artificial Sequence
  Synthetic
gcguucaucauguugcccu

SEQ ID NO: 21662 - RNA, 22 nt, Artificial Sequence
  Synthetic
gcauuguaugauuuuaaucccu

SEQ ID NO: 21663 - RNA, 19 nt, Artificial Sequence
  Synthetic
guuguaacagugagucccu

SEQ ID NO: 21664 - RNA, 20 nt, Artificial Sequence
  Synthetic
gguuguaacagugagucccu

SEQ ID NO: 21665 - RNA, 22 nt, Artificial Sequence
  Synthetic
gugguuguaacagugagucccu

SEQ ID NO: 21666 - RNA, 23 nt, Artificial Sequence
  Synthetic
ggugguuguaacagugagucccu

SEQ ID NO: 21667 - RNA, 19 nt, Artificial Sequence
  Synthetic
gcuuuaauuucuugucccu

SEQ ID NO: 21668 - RNA, 22 nt, Artificial Sequence
  Synthetic
gcagcuuuaauuucuugucccu

SEQ ID NO: 21669 - RNA, 18 nt, Artificial Sequence
  Synthetic
gugcucaauugauucccu

SEQ ID NO: 21670 - RNA, 19 nt, Artificial Sequence
  Synthetic
ggugcucaauugauucccu

SEQ ID NO: 21671 - RNA, 21 nt, Artificial Sequence
  Synthetic
gaggugcucaauugauucccu

SEQ ID NO: 21672 - RNA, 22 nt, Artificial Sequence
  Synthetic
ggaggugcucaauugauucccu

SEQ ID NO: 21673 - RNA, 19 nt, Artificial Sequence
  Synthetic
gacacagccacacaagccu

SEQ ID NO: 21674 - RNA, 23 nt, Artificial Sequence
  Synthetic
gaaagacacagccacacaagccu

SEQ ID NO: 21675 - RNA, 18 nt, Artificial Sequence
  Synthetic
gcauucaggauucagccu

SEQ ID NO: 21676 - RNA, 22 nt, Artificial Sequence
  Synthetic
gcaugcauucaggauucagccu

SEQ ID NO: 21677 - RNA, 22 nt, Artificial Sequence
  Synthetic
gcacaaauggcagccagagccu

SEQ ID NO: 21678 - RNA, 18 nt, Artificial Sequence
  Synthetic
gcuucuacauaauagccu

SEQ ID NO: 21679 - RNA, 21 nt, Artificial Sequence
  Synthetic
gucgcuucuacauaauagccu

SEQ ID NO: 21680 - RNA, 24 nt, Artificial Sequence
  Synthetic
gauucacuaaauuucuugaggccu

SEQ ID NO: 21681 - RNA, 19 nt, Artificial Sequence
  Synthetic
gugaagggagcauaggccu

SEQ ID NO: 21682 - RNA, 22 nt, Artificial Sequence
  Synthetic
gcagugaagggagcauaggccu

SEQ ID NO: 21683 - RNA, 20 nt, Artificial Sequence
  Synthetic
gaaauaacuugccuaggccu

SEQ ID NO: 21684 - RNA, 22 nt, Artificial Sequence
  Synthetic
gugaaauaacuugccuaggccu

SEQ ID NO: 21685 - RNA, 23 nt, Artificial Sequence
  Synthetic
ggugaaauaacuugccuaggccu

SEQ ID NO: 21686 - RNA, 18 nt, Artificial Sequence
  Synthetic
ggccugagcucuaggccu

SEQ ID NO: 21687 - RNA, 19 nt, Artificial Sequence
  Synthetic
gggccugagcucuaggccu

SEQ ID NO: 21688 - RNA, 21 nt, Artificial Sequence
  Synthetic
gagggccugagcucuaggccu

SEQ ID NO: 21689 - RNA, 24 nt, Artificial Sequence
  Synthetic
gaugagggccugagcucuaggccu

SEQ ID NO: 21690 - RNA, 19 nt, Artificial Sequence
  Synthetic
gauuacucaaaguaggccu

SEQ ID NO: 21691 - RNA, 21 nt, Artificial Sequence
  Synthetic
gagauuacucaaaguaggccu

SEQ ID NO: 21692 - RNA, 18 nt, Artificial Sequence
  Synthetic
gaauuaauaacagggccu

SEQ ID NO: 21693 - RNA, 19 nt, Artificial Sequence
  Synthetic
ggaauuaauaacagggccu

SEQ ID NO: 21694 - RNA, 20 nt, Artificial Sequence
  Synthetic
gggaauuaauaacagggccu

SEQ ID NO: 21695 - RNA, 21 nt, Artificial Sequence
  Synthetic
ggggaauuaauaacagggccu

SEQ ID NO: 21696 - RNA, 23 nt, Artificial Sequence
  Synthetic
gcggggaauuaauaacagggccu

SEQ ID NO: 21697 - RNA, 24 nt, Artificial Sequence
  Synthetic
ggcggggaauuaauaacagggccu

SEQ ID NO: 21698 - RNA, 19 nt, Artificial Sequence
  Synthetic
guggguguaaggugggccu

SEQ ID NO: 21699 - RNA, 18 nt, Artificial Sequence
  Synthetic
guuaauggcacauggccu

SEQ ID NO: 21700 - RNA, 23 nt, Artificial Sequence
  Synthetic
guucaguuaauggcacauggccu

SEQ ID NO: 21701 - RNA, 20 nt, Artificial Sequence
  Synthetic
gaugccgagcaugauggccu

SEQ ID NO: 21702 - RNA, 22 nt, Artificial Sequence
  Synthetic
gugaugccgagcaugauggccu

SEQ ID NO: 21703 - RNA, 23 nt, Artificial Sequence
  Synthetic
ggugaugccgagcaugauggccu

SEQ ID NO: 21704 - RNA, 19 nt, Artificial Sequence
  Synthetic
gaaucacuucuuuuggccu

SEQ ID NO: 21705 - RNA, 22 nt, Artificial Sequence
  Synthetic
gccucaagagaauaaaaugccu

SEQ ID NO: 21706 - RNA, 19 nt, Artificial Sequence
  Synthetic
guguuacagaucuaugccu

SEQ ID NO: 21707 - RNA, 22 nt, Artificial Sequence
  Synthetic
gaaacaauauauaggacugccu

SEQ ID NO: 21708 - RNA, 23 nt, Artificial Sequence
  Synthetic
gauuaccggcuauggugcugccu

SEQ ID NO: 21709 - RNA, 20 nt, Artificial Sequence
  Synthetic
gcaccguaagucuucugccu

SEQ ID NO: 21710 - RNA, 18 nt, Artificial Sequence
  Synthetic
ggaccugcgguggugccu

SEQ ID NO: 21711 - RNA, 22 nt, Artificial Sequence
  Synthetic
gugcauuaugacuuaugugccu

SEQ ID NO: 21712 - RNA, 24 nt, Artificial Sequence
  Synthetic
gugugcauuaugacuuaugugccu

SEQ ID NO: 21713 - RNA, 22 nt, Artificial Sequence
  Synthetic
gcuuccacggauugcugugccu

SEQ ID NO: 21714 - RNA, 19 nt, Artificial Sequence
  Synthetic
gaguuaucaauaauugccu

SEQ ID NO: 21715 - RNA, 23 nt, Artificial Sequence
  Synthetic
gaaugaguuaucaauaauugccu

SEQ ID NO: 21716 - RNA, 21 nt, Artificial Sequence
  Synthetic
guuuucuaaaaagacuugccu

SEQ ID NO: 21717 - RNA, 19 nt, Artificial Sequence
  Synthetic
gcaaauguucauuuugccu

SEQ ID NO: 21718 - RNA, 20 nt, Artificial Sequence
  Synthetic
gaaacugaaauagaaauccu

SEQ ID NO: 21719 - RNA, 21 nt, Artificial Sequence
  Synthetic
ggaaacugaaauagaaauccu

SEQ ID NO: 21720 - RNA, 24 nt, Artificial Sequence
  Synthetic
gauacauuguaaaggcagaauccu

SEQ ID NO: 21721 - RNA, 18 nt, Artificial Sequence
  Synthetic
guuaacaaugggaauccu

SEQ ID NO: 21722 - RNA, 23 nt, Artificial Sequence
  Synthetic
gaaaaguuaacaaugggaauccu

SEQ ID NO: 21723 - RNA, 23 nt, Artificial Sequence
  Synthetic
gaacuucuaagcuauaacauccu

SEQ ID NO: 21724 - RNA, 24 nt, Artificial Sequence
  Synthetic
gaaaaauggugguuauuagauccu

SEQ ID NO: 21725 - RNA, 22 nt, Artificial Sequence
  Synthetic
gaucagguagaaaaccuauccu

SEQ ID NO: 21726 - RNA, 20 nt, Artificial Sequence
  Synthetic
gcuaccuuaucagaacuccu

SEQ ID NO: 21727 - RNA, 18 nt, Artificial Sequence
  Synthetic
gcuaguuuuuaaccuccu

SEQ ID NO: 21728 - RNA, 23 nt, Artificial Sequence
  Synthetic
gucauaucuacagguucccuccu

SEQ ID NO: 21729 - RNA, 24 nt, Artificial Sequence
  Synthetic
gcuucuacuuucugaauuccuccu

SEQ ID NO: 21730 - RNA, 23 nt, Artificial Sequence
  Synthetic
gaccauguugggggacagcuccu

SEQ ID NO: 21731 - RNA, 19 nt, Artificial Sequence
  Synthetic
gauacauuuagaggcuccu

SEQ ID NO: 21732 - RNA, 23 nt, Artificial Sequence
  Synthetic
guuugauacauuuagaggcuccu

SEQ ID NO: 21733 - RNA, 19 nt, Artificial Sequence
  Synthetic
gcaaguuaaaauggcuccu

SEQ ID NO: 21734 - RNA, 22 nt, Artificial Sequence
  Synthetic
guagcaaguuaaaauggcuccu

SEQ ID NO: 21735 - RNA, 20 nt, Artificial Sequence
  Synthetic
gauguaaacaaaggucuccu

SEQ ID NO: 21736 - RNA, 19 nt, Artificial Sequence
  Synthetic
gaaguugcuuuugucuccu

SEQ ID NO: 21737 - RNA, 23 nt, Artificial Sequence
  Synthetic
guuaucuguaucuauauucuccu

SEQ ID NO: 21738 - RNA, 18 nt, Artificial Sequence
  Synthetic
gaauugucuaguucuccu

SEQ ID NO: 21739 - RNA, 19 nt, Artificial Sequence
  Synthetic
guucagaauuaaaaguccu

SEQ ID NO: 21740 - RNA, 22 nt, Artificial Sequence
  Synthetic
gauguucagaauuaaaaguccu

SEQ ID NO: 21741 - RNA, 18 nt, Artificial Sequence
  Synthetic
gguauuuugucaaguccu

SEQ ID NO: 21742 - RNA, 19 nt, Artificial Sequence
  Synthetic
ggguauuuugucaaguccu

SEQ ID NO: 21743 - RNA, 22 nt, Artificial Sequence
  Synthetic
guaggguauuuugucaaguccu

SEQ ID NO: 21744 - RNA, 24 nt, Artificial Sequence
  Synthetic
gaguaggguauuuugucaaguccu

SEQ ID NO: 21745 - RNA, 18 nt, Artificial Sequence
  Synthetic
gaagagaacugaaguccu

SEQ ID NO: 21746 - RNA, 21 nt, Artificial Sequence
  Synthetic
gaugaagagaacugaaguccu

SEQ ID NO: 21747 - RNA, 24 nt, Artificial Sequence
  Synthetic
guagaugaagagaacugaaguccu

SEQ ID NO: 21748 - RNA, 22 nt, Artificial Sequence
  Synthetic
guuuuauguaagccauaguccu

SEQ ID NO: 21749 - RNA, 21 nt, Artificial Sequence
  Synthetic
guaaugguuaaacgaauuccu

SEQ ID NO: 21750 - RNA, 23 nt, Artificial Sequence
  Synthetic
guguaaugguuaaacgaauuccu

SEQ ID NO: 21751 - RNA, 18 nt, Artificial Sequence
  Synthetic
gccucuugcuuaauuccu

SEQ ID NO: 21752 - RNA, 23 nt, Artificial Sequence
  Synthetic
gcccacagcaccagcacauuccu

SEQ ID NO: 21753 - RNA, 24 nt, Artificial Sequence
  Synthetic
ggcccacagcaccagcacauuccu

SEQ ID NO: 21754 - RNA, 19 nt, Artificial Sequence
  Synthetic
guugaagccugacauuccu

SEQ ID NO: 21755 - RNA, 19 nt, Artificial Sequence
  Synthetic
gagauagaaagauauuccu

SEQ ID NO: 21756 - RNA, 22 nt, Artificial Sequence
  Synthetic
gaugagauagaaagauauuccu

SEQ ID NO: 21757 - RNA, 20 nt, Artificial Sequence
  Synthetic
gcaugaccacgugacuuccu

SEQ ID NO: 21758 - RNA, 21 nt, Artificial Sequence
  Synthetic
gucacuuacaucaugcuuccu

SEQ ID NO: 21759 - RNA, 20 nt, Artificial Sequence
  Synthetic
gcuguggcacagaaguuccu

SEQ ID NO: 21760 - RNA, 24 nt, Artificial Sequence
  Synthetic
gaaagcuguggcacagaaguuccu

SEQ ID NO: 21761 - RNA, 18 nt, Artificial Sequence
  Synthetic
gaacuuuuguauguuccu

SEQ ID NO: 21762 - RNA, 22 nt, Artificial Sequence
  Synthetic
gacagaacuuuuguauguuccu

SEQ ID NO: 21763 - RNA, 23 nt, Artificial Sequence
  Synthetic
guaacugugauuuacaguuuccu

SEQ ID NO: 21764 - RNA, 18 nt, Artificial Sequence
  Synthetic
guguuaguucuguuuccu

SEQ ID NO: 21765 - RNA, 22 nt, Artificial Sequence
  Synthetic
gcuaacuucuguuccuuuuccu

SEQ ID NO: 21766 - RNA, 24 nt, Artificial Sequence
  Synthetic
gagcuaacuucuguuccuuuuccu

SEQ ID NO: 21767 - RNA, 19 nt, Artificial Sequence
  Synthetic
gcaugauaacugaaaagcu

SEQ ID NO: 21768 - RNA, 18 nt, Artificial Sequence
  Synthetic
ggagagaaagacaaagcu

SEQ ID NO: 21769 - RNA, 21 nt, Artificial Sequence
  Synthetic
gcuggagagaaagacaaagcu

SEQ ID NO: 21770 - RNA, 22 nt, Artificial Sequence
  Synthetic
ggcuggagagaaagacaaagcu

SEQ ID NO: 21771 - RNA, 23 nt, Artificial Sequence
  Synthetic
gggcuggagagaaagacaaagcu

SEQ ID NO: 21772 - RNA, 24 nt, Artificial Sequence
  Synthetic
ggggcuggagagaaagacaaagcu

SEQ ID NO: 21773 - RNA, 19 nt, Artificial Sequence
  Synthetic
gacaguuuuaaucaaagcu

SEQ ID NO: 21774 - RNA, 23 nt, Artificial Sequence
  Synthetic
gauagacaguuuuaaucaaagcu

SEQ ID NO: 21775 - RNA, 18 nt, Artificial Sequence
  Synthetic
gcguauggcacacaagcu

SEQ ID NO: 21776 - RNA, 20 nt, Artificial Sequence
  Synthetic
gugcguauggcacacaagcu

SEQ ID NO: 21777 - RNA, 22 nt, Artificial Sequence
  Synthetic
gugugcguauggcacacaagcu

SEQ ID NO: 21778 - RNA, 23 nt, Artificial Sequence
  Synthetic
gaacuauuaugcuugaccaagcu

SEQ ID NO: 21779 - RNA, 20 nt, Artificial Sequence
  Synthetic
gcauuugaaaauaccaagcu

SEQ ID NO: 21780 - RNA, 24 nt, Artificial Sequence
  Synthetic
guuugcauuugaaaauaccaagcu

SEQ ID NO: 21781 - RNA, 18 nt, Artificial Sequence
  Synthetic
gggcuuguguaucaagcu

SEQ ID NO: 21782 - RNA, 19 nt, Artificial Sequence
  Synthetic
ggggcuuguguaucaagcu

SEQ ID NO: 21783 - RNA, 22 nt, Artificial Sequence
  Synthetic
gaaggggcuuguguaucaagcu

SEQ ID NO: 21784 - RNA, 24 nt, Artificial Sequence
  Synthetic
gugaaggggcuuguguaucaagcu

SEQ ID NO: 21785 - RNA, 21 nt, Artificial Sequence
  Synthetic
guuauauucacaccucaagcu

SEQ ID NO: 21786 - RNA, 22 nt, Artificial Sequence
  Synthetic
gcuuuuguuaaaagaugaagcu

SEQ ID NO: 21787 - RNA, 23 nt, Artificial Sequence
  Synthetic
ggcuuuuguuaaaagaugaagcu

SEQ ID NO: 21788 - RNA, 24 nt, Artificial Sequence
  Synthetic
gucaccauuuccuaauuauaagcu

SEQ ID NO: 21789 - RNA, 18 nt, Artificial Sequence
  Synthetic
gauguagggaauuaagcu

SEQ ID NO: 21790 - RNA, 22 nt, Artificial Sequence
  Synthetic
gaaagauguagggaauuaagcu

SEQ ID NO: 21791 - RNA, 21 nt, Artificial Sequence
  Synthetic
guaaaaucuguguuuuaagcu

SEQ ID NO: 21792 - RNA, 23 nt, Artificial Sequence
  Synthetic
gaguaaaaucuguguuuuaagcu

SEQ ID NO: 21793 - RNA, 19 nt, Artificial Sequence
  Synthetic
gagauagaauugaacagcu

SEQ ID NO: 21794 - RNA, 18 nt, Artificial Sequence
  Synthetic
ggagggagcgcuacagcu

SEQ ID NO: 21795 - RNA, 21 nt, Artificial Sequence
  Synthetic
gaaggagggagcgcuacagcu

SEQ ID NO: 21796 - RNA, 22 nt, Artificial Sequence
  Synthetic
ggaaggagggagcgcuacagcu

SEQ ID NO: 21797 - RNA, 23 nt, Artificial Sequence
  Synthetic
gggaaggagggagcgcuacagcu

SEQ ID NO: 21798 - RNA, 19 nt, Artificial Sequence
  Synthetic
gcaucuuaaacgagcagcu

SEQ ID NO: 21799 - RNA, 22 nt, Artificial Sequence
  Synthetic
guugcaucuuaaacgagcagcu

SEQ ID NO: 21800 - RNA, 24 nt, Artificial Sequence
  Synthetic
gcguugcaucuuaaacgagcagcu

SEQ ID NO: 21801 - RNA, 22 nt, Artificial Sequence
  Synthetic
gcccugggaugguuaggcagcu

SEQ ID NO: 21802 - RNA, 20 nt, Artificial Sequence
  Synthetic
gaaugcuauuuacuucagcu

SEQ ID NO: 21803 - RNA, 23 nt, Artificial Sequence
  Synthetic
gaugaaugcuauuuacuucagcu

SEQ ID NO: 21804 - RNA, 24 nt, Artificial Sequence
  Synthetic
guauacaaguuaaguggcagagcu

SEQ ID NO: 21805 - RNA, 21 nt, Artificial Sequence
  Synthetic
gaaucaaggucaaggagagcu

SEQ ID NO: 21806 - RNA, 18 nt, Artificial Sequence
  Synthetic
guguagccaaugagagcu

SEQ ID NO: 21807 - RNA, 23 nt, Artificial Sequence
  Synthetic
guacaguguagccaaugagagcu

SEQ ID NO: 21808 - RNA, 24 nt, Artificial Sequence
  Synthetic
gguacaguguagccaaugagagcu

SEQ ID NO: 21809 - RNA, 21 nt, Artificial Sequence
  Synthetic
gaccuuccugaagaaggagcu

SEQ ID NO: 21810 - RNA, 22 nt, Artificial Sequence
  Synthetic
ggaccuuccugaagaaggagcu

SEQ ID NO: 21811 - RNA, 23 nt, Artificial Sequence
  Synthetic
gggaccuuccugaagaaggagcu

SEQ ID NO: 21812 - RNA, 19 nt, Artificial Sequence
  Synthetic
gacacauugugauggagcu

SEQ ID NO: 21813 - RNA, 20 nt, Artificial Sequence
  Synthetic
ggacacauugugauggagcu

SEQ ID NO: 21814 - RNA, 18 nt, Artificial Sequence
  Synthetic
gugaggaaaagcugagcu

SEQ ID NO: 21815 - RNA, 24 nt, Artificial Sequence
  Synthetic
gauaaauggacugaaaagugagcu

SEQ ID NO: 21816 - RNA, 24 nt, Artificial Sequence
  Synthetic
gcuuuauggugcacaaaaauagcu

SEQ ID NO: 21817 - RNA, 18 nt, Artificial Sequence
  Synthetic
ggaugcuuagaaauagcu

SEQ ID NO: 21818 - RNA, 24 nt, Artificial Sequence
  Synthetic
gcuacuggaugcuuagaaauagcu

SEQ ID NO: 21819 - RNA, 18 nt, Artificial Sequence
  Synthetic
gaaaagcaggaaauagcu

SEQ ID NO: 21820 - RNA, 20 nt, Artificial Sequence
  Synthetic
gagaaaagcaggaaauagcu

SEQ ID NO: 21821 - RNA, 21 nt, Artificial Sequence
  Synthetic
ggagaaaagcaggaaauagcu

SEQ ID NO: 21822 - RNA, 22 nt, Artificial Sequence
  Synthetic
gggagaaaagcaggaaauagcu

SEQ ID NO: 21823 - RNA, 20 nt, Artificial Sequence
  Synthetic
gaaugauauuuacaauagcu

SEQ ID NO: 21824 - RNA, 22 nt, Artificial Sequence
  Synthetic
gugaaugauauuuacaauagcu

SEQ ID NO: 21825 - RNA, 18 nt, Artificial Sequence
  Synthetic
ggucaaacgguuauagcu

SEQ ID NO: 21826 - RNA, 19 nt, Artificial Sequence
  Synthetic
gggucaaacgguuauagcu

SEQ ID NO: 21827 - RNA, 21 nt, Artificial Sequence
  Synthetic
gagggucaaacgguuauagcu

SEQ ID NO: 21828 - RNA, 19 nt, Artificial Sequence
  Synthetic
gauacacugacaaguagcu

SEQ ID NO: 21829 - RNA, 20 nt, Artificial Sequence
  Synthetic
ggauacacugacaaguagcu

SEQ ID NO: 21830 - RNA, 18 nt, Artificial Sequence
  Synthetic
gcuuaucuuuauguagcu

SEQ ID NO: 21831 - RNA, 18 nt, Artificial Sequence
  Synthetic
gcaauagacaaauuagcu

SEQ ID NO: 21832 - RNA, 20 nt, Artificial Sequence
  Synthetic
gccaaaguaaacauuuagcu

SEQ ID NO: 21833 - RNA, 20 nt, Artificial Sequence
  Synthetic
gcauuuuggaaaauuacgcu

SEQ ID NO: 21834 - RNA, 18 nt, Artificial Sequence
  Synthetic
gcucccagugucagcgcu

SEQ ID NO: 21835 - RNA, 19 nt, Artificial Sequence
  Synthetic
ggcucccagugucagcgcu

SEQ ID NO: 21836 - RNA, 19 nt, Artificial Sequence
  Synthetic
gccugaguucaggggcgcu

SEQ ID NO: 21837 - RNA, 22 nt, Artificial Sequence
  Synthetic
gccaaaauaaaaucccaaggcu

SEQ ID NO: 21838 - RNA, 19 nt, Artificial Sequence
  Synthetic
gcagauuagggguaaggcu

SEQ ID NO: 21839 - RNA, 21 nt, Artificial Sequence
  Synthetic
gugcagauuagggguaaggcu

SEQ ID NO: 21840 - RNA, 23 nt, Artificial Sequence
  Synthetic
gugugcagauuagggguaaggcu

SEQ ID NO: 21841 - RNA, 19 nt, Artificial Sequence
  Synthetic
guauccuaaauaacaggcu

SEQ ID NO: 21842 - RNA, 24 nt, Artificial Sequence
  Synthetic
gccauacuuauuauggaagaggcu

SEQ ID NO: 21843 - RNA, 18 nt, Artificial Sequence
  Synthetic
gggcaugaaacagaggcu

SEQ ID NO: 21844 - RNA, 19 nt, Artificial Sequence
  Synthetic
ggggcaugaaacagaggcu

SEQ ID NO: 21845 - RNA, 22 nt, Artificial Sequence
  Synthetic
gauggggcaugaaacagaggcu

SEQ ID NO: 21846 - RNA, 20 nt, Artificial Sequence
  Synthetic
gacgcagccauucgacggcu

SEQ ID NO: 21847 - RNA, 24 nt, Artificial Sequence
  Synthetic
guuugacgcagccauucgacggcu

SEQ ID NO: 21848 - RNA, 21 nt, Artificial Sequence
  Synthetic
gacugagcccaacaccgggcu

SEQ ID NO: 21849 - RNA, 24 nt, Artificial Sequence
  Synthetic
gaccucuugacaggagcuggggcu

SEQ ID NO: 21850 - RNA, 21 nt, Artificial Sequence
  Synthetic
gaauaggugccuauuggggcu

SEQ ID NO: 21851 - RNA, 24 nt, Artificial Sequence
  Synthetic
gaagaauaggugccuauuggggcu

SEQ ID NO: 21852 - RNA, 19 nt, Artificial Sequence
  Synthetic
gauaagggcuuucugggcu

SEQ ID NO: 21853 - RNA, 23 nt, Artificial Sequence
  Synthetic
guuagauaagggcuuucugggcu

SEQ ID NO: 21854 - RNA, 18 nt, Artificial Sequence
  Synthetic
gaaauacugcugugggcu

SEQ ID NO: 21855 - RNA, 20 nt, Artificial Sequence
  Synthetic
gugaaauacugcugugggcu

SEQ ID NO: 21856 - RNA, 24 nt, Artificial Sequence
  Synthetic
guaagugaaauacugcugugggcu

SEQ ID NO: 21857 - RNA, 23 nt, Artificial Sequence
  Synthetic
gcaaaaaaggauuuguuugggcu

SEQ ID NO: 21858 - RNA, 19 nt, Artificial Sequence
  Synthetic
gacuguugauagcauggcu

SEQ ID NO: 21859 - RNA, 19 nt, Artificial Sequence
  Synthetic
gccuuuaucaagccuggcu

SEQ ID NO: 21860 - RNA, 19 nt, Artificial Sequence
  Synthetic
guuucauuauauuuuggcu

SEQ ID NO: 21861 - RNA, 18 nt, Artificial Sequence
  Synthetic
guuacaaguacaaaugcu

SEQ ID NO: 21862 - RNA, 22 nt, Artificial Sequence
  Synthetic
gucaguuacaaguacaaaugcu

SEQ ID NO: 21863 - RNA, 18 nt, Artificial Sequence
  Synthetic
guaaguaauucaaaugcu

SEQ ID NO: 21864 - RNA, 21 nt, Artificial Sequence
  Synthetic
guuguaaguaauucaaaugcu

SEQ ID NO: 21865 - RNA, 22 nt, Artificial Sequence
  Synthetic
guaauuggcucacugaaaugcu

SEQ ID NO: 21866 - RNA, 21 nt, Artificial Sequence
  Synthetic
guauugaaggucuacaaugcu

SEQ ID NO: 21867 - RNA, 18 nt, Artificial Sequence
  Synthetic
gcuuuagaaaccaaugcu

SEQ ID NO: 21868 - RNA, 21 nt, Artificial Sequence
  Synthetic
gaagcuuuagaaaccaaugcu

SEQ ID NO: 21869 - RNA, 22 nt, Artificial Sequence
  Synthetic
ggaagcuuuagaaaccaaugcu

SEQ ID NO: 21870 - RNA, 20 nt, Artificial Sequence
  Synthetic
gaagcaaaauaguuaaugcu

SEQ ID NO: 21871 - RNA, 22 nt, Artificial Sequence
  Synthetic
gcgaagcaaaauaguuaaugcu

SEQ ID NO: 21872 - RNA, 18 nt, Artificial Sequence
  Synthetic
gggguugcaacacaugcu

SEQ ID NO: 21873 - RNA, 21 nt, Artificial Sequence
  Synthetic
guugggguugcaacacaugcu

SEQ ID NO: 21874 - RNA, 24 nt, Artificial Sequence
  Synthetic
guuaucaucuaaguaaaagaugcu

SEQ ID NO: 21875 - RNA, 18 nt, Artificial Sequence
  Synthetic
ggaaaaucugaggaugcu

SEQ ID NO: 21876 - RNA, 19 nt, Artificial Sequence
  Synthetic
gggaaaaucugaggaugcu

SEQ ID NO: 21877 - RNA, 24 nt, Artificial Sequence
  Synthetic
gcuucgggaaaaucugaggaugcu

SEQ ID NO: 21878 - RNA, 19 nt, Artificial Sequence
  Synthetic
gcacacaucccuggaugcu

SEQ ID NO: 21879 - RNA, 24 nt, Artificial Sequence
  Synthetic
gauaccuuuuugauuacugaugcu

SEQ ID NO: 21880 - RNA, 18 nt, Artificial Sequence
  Synthetic
gcuuugugauaauaugcu

SEQ ID NO: 21881 - RNA, 19 nt, Artificial Sequence
  Synthetic
ggcuuugugauaauaugcu

SEQ ID NO: 21882 - RNA, 22 nt, Artificial Sequence
  Synthetic
guaggcuuugugauaauaugcu

SEQ ID NO: 21883 - RNA, 22 nt, Artificial Sequence
  Synthetic
guauuugggacauaguuaugcu

SEQ ID NO: 21884 - RNA, 19 nt, Artificial Sequence
  Synthetic
gcugacaugggaaacugcu

SEQ ID NO: 21885 - RNA, 22 nt, Artificial Sequence
  Synthetic
guagcugacaugggaaacugcu

SEQ ID NO: 21886 - RNA, 23 nt, Artificial Sequence
  Synthetic
gguagcugacaugggaaacugcu

SEQ ID NO: 21887 - RNA, 19 nt, Artificial Sequence
  Synthetic
gauugauuuaaauacugcu

SEQ ID NO: 21888 - RNA, 20 nt, Artificial Sequence
  Synthetic
ggauugauuuaaauacugcu

SEQ ID NO: 21889 - RNA, 21 nt, Artificial Sequence
  Synthetic
gggauugauuuaaauacugcu

SEQ ID NO: 21890 - RNA, 19 nt, Artificial Sequence
  Synthetic
gaaacacacaacuacugcu

SEQ ID NO: 21891 - RNA, 22 nt, Artificial Sequence
  Synthetic
gauuagaaagcccccagcugcu

SEQ ID NO: 21892 - RNA, 24 nt, Artificial Sequence
  Synthetic
gagauuagaaagcccccagcugcu

SEQ ID NO: 21893 - RNA, 24 nt, Artificial Sequence
  Synthetic
gaaauaugugucauuuuggcugcu

SEQ ID NO: 21894 - RNA, 19 nt, Artificial Sequence
  Synthetic
gccaugggguggugcugcu

SEQ ID NO: 21895 - RNA, 20 nt, Artificial Sequence
  Synthetic
ggccaugggguggugcugcu

SEQ ID NO: 21896 - RNA, 21 nt, Artificial Sequence
  Synthetic
gggccaugggguggugcugcu

SEQ ID NO: 21897 - RNA, 18 nt, Artificial Sequence
  Synthetic
gauccuucuuuugcugcu

SEQ ID NO: 21898 - RNA, 20 nt, Artificial Sequence
  Synthetic
gugauccuucuuuugcugcu

SEQ ID NO: 21899 - RNA, 20 nt, Artificial Sequence
  Synthetic
gauacacuguucccucugcu

SEQ ID NO: 21900 - RNA, 18 nt, Artificial Sequence
  Synthetic
ggaaagugaagaagugcu

SEQ ID NO: 21901 - RNA, 22 nt, Artificial Sequence
  Synthetic
gcauggaaagugaagaagugcu

SEQ ID NO: 21902 - RNA, 23 nt, Artificial Sequence
  Synthetic
ggcauggaaagugaagaagugcu

SEQ ID NO: 21903 - RNA, 23 nt, Artificial Sequence
  Synthetic
gucucaacugaagaaagggugcu

SEQ ID NO: 21904 - RNA, 24 nt, Artificial Sequence
  Synthetic
ggucucaacugaagaaagggugcu

SEQ ID NO: 21905 - RNA, 18 nt, Artificial Sequence
  Synthetic
gcuggagaugauggugcu

SEQ ID NO: 21906 - RNA, 18 nt, Artificial Sequence
  Synthetic
gauguucaauaaugugcu

SEQ ID NO: 21907 - RNA, 19 nt, Artificial Sequence
  Synthetic
ggauguucaauaaugugcu

SEQ ID NO: 21908 - RNA, 21 nt, Artificial Sequence
  Synthetic
gaggauguucaauaaugugcu

SEQ ID NO: 21909 - RNA, 24 nt, Artificial Sequence
  Synthetic
gcugaggauguucaauaaugugcu

SEQ ID NO: 21910 - RNA, 18 nt, Artificial Sequence
  Synthetic
ggaugcaucaagugugcu

SEQ ID NO: 21911 - RNA, 21 nt, Artificial Sequence
  Synthetic
guaggaugcaucaagugugcu

SEQ ID NO: 21912 - RNA, 19 nt, Artificial Sequence
  Synthetic
gaggagauuggaaauugcu

SEQ ID NO: 21913 - RNA, 24 nt, Artificial Sequence
  Synthetic
guacagaggagauuggaaauugcu

SEQ ID NO: 21914 - RNA, 21 nt, Artificial Sequence
  Synthetic
gaacggggaggagagauugcu

SEQ ID NO: 21915 - RNA, 18 nt, Artificial Sequence
  Synthetic
gucuuuuguaugauugcu

SEQ ID NO: 21916 - RNA, 24 nt, Artificial Sequence
  Synthetic
gucaaucuuuuagcugcuauugcu

SEQ ID NO: 21917 - RNA, 21 nt, Artificial Sequence
  Synthetic
gaaaucuuaauuauuauugcu

SEQ ID NO: 21918 - RNA, 21 nt, Artificial Sequence
  Synthetic
gauuauguuucucagcuugcu

SEQ ID NO: 21919 - RNA, 20 nt, Artificial Sequence
  Synthetic
guccaccaggaauaguugcu

SEQ ID NO: 21920 - RNA, 24 nt, Artificial Sequence
  Synthetic
guccguccaccaggaauaguugcu

SEQ ID NO: 21921 - RNA, 19 nt, Artificial Sequence
  Synthetic
gaaagcuacauuuguugcu

SEQ ID NO: 21922 - RNA, 21 nt, Artificial Sequence
  Synthetic
gugaaagcuacauuuguugcu

SEQ ID NO: 21923 - RNA, 18 nt, Artificial Sequence
  Synthetic
gcaaaccacagcuuugcu

SEQ ID NO: 21924 - RNA, 22 nt, Artificial Sequence
  Synthetic
gcaaagucugggucuguuugcu

SEQ ID NO: 21925 - RNA, 20 nt, Artificial Sequence
  Synthetic
gaaagaggauuuguuuugcu

SEQ ID NO: 21926 - RNA, 24 nt, Artificial Sequence
  Synthetic
gacugaaagaggauuuguuuugcu

SEQ ID NO: 21927 - RNA, 23 nt, Artificial Sequence
  Synthetic
gucuaugcaaaguuauuuuugcu

SEQ ID NO: 21928 - RNA, 24 nt, Artificial Sequence
  Synthetic
ggucuaugcaaaguuauuuuugcu

SEQ ID NO: 21929 - RNA, 22 nt, Artificial Sequence
  Synthetic
gaaacaggcuucgggaaaaucu

SEQ ID NO: 21930 - RNA, 23 nt, Artificial Sequence
  Synthetic
guucuuaucugagggugaaaucu

SEQ ID NO: 21931 - RNA, 20 nt, Artificial Sequence
  Synthetic
gcuacauaugugcuaaaucu

SEQ ID NO: 21932 - RNA, 19 nt, Artificial Sequence
  Synthetic
gccaacacagaaacaaucu

SEQ ID NO: 21933 - RNA, 18 nt, Artificial Sequence
  Synthetic
gcaugcucaccucaaucu

SEQ ID NO: 21934 - RNA, 18 nt, Artificial Sequence
  Synthetic
gagaauuaaugucaaucu

SEQ ID NO: 21935 - RNA, 19 nt, Artificial Sequence
  Synthetic
gcccuucuaaaaagaaucu

SEQ ID NO: 21936 - RNA, 22 nt, Artificial Sequence
  Synthetic
guagcccuucuaaaaagaaucu

SEQ ID NO: 21937 - RNA, 24 nt, Artificial Sequence
  Synthetic
guguagcccuucuaaaaagaaucu

SEQ ID NO: 21938 - RNA, 19 nt, Artificial Sequence
  Synthetic
guuaugguacacagaaucu

SEQ ID NO: 21939 - RNA, 24 nt, Artificial Sequence
  Synthetic
guacaacaugaaaggaaugaaucu

SEQ ID NO: 21940 - RNA, 21 nt, Artificial Sequence
  Synthetic
guuccuauguaccaugaaucu

SEQ ID NO: 21941 - RNA, 18 nt, Artificial Sequence
  Synthetic
gcuauacagcaugaaucu

SEQ ID NO: 21942 - RNA, 22 nt, Artificial Sequence
  Synthetic
gauugcuauacagcaugaaucu

SEQ ID NO: 21943 - RNA, 18 nt, Artificial Sequence
  Synthetic
gagugaacgcaugaaucu

SEQ ID NO: 21944 - RNA, 21 nt, Artificial Sequence
  Synthetic
gcugagugaacgcaugaaucu

SEQ ID NO: 21945 - RNA, 20 nt, Artificial Sequence
  Synthetic
gaaguaacccagaugaaucu

SEQ ID NO: 21946 - RNA, 23 nt, Artificial Sequence
  Synthetic
gaugaaguaacccagaugaaucu

SEQ ID NO: 21947 - RNA, 24 nt, Artificial Sequence
  Synthetic
ggaugaaguaacccagaugaaucu

SEQ ID NO: 21948 - RNA, 18 nt, Artificial Sequence
  Synthetic
gaauuuacaagauaaucu

SEQ ID NO: 21949 - RNA, 23 nt, Artificial Sequence
  Synthetic
gaacugaauuuacaagauaaucu

SEQ ID NO: 21950 - RNA, 18 nt, Artificial Sequence
  Synthetic
gaacuacagguaacaucu

SEQ ID NO: 21951 - RNA, 24 nt, Artificial Sequence
  Synthetic
guucaccguuuuaccaugacaucu

SEQ ID NO: 21952 - RNA, 23 nt, Artificial Sequence
  Synthetic
gcuucaaauccuccagaccaucu

SEQ ID NO: 21953 - RNA, 24 nt, Artificial Sequence
  Synthetic
ggcuucaaauccuccagaccaucu

SEQ ID NO: 21954 - RNA, 22 nt, Artificial Sequence
  Synthetic
gacuggcccucagacagcaucu

SEQ ID NO: 21955 - RNA, 18 nt, Artificial Sequence
  Synthetic
gucuuuaaccuggcaucu

SEQ ID NO: 21956 - RNA, 19 nt, Artificial Sequence
  Synthetic
ggucuuuaaccuggcaucu

SEQ ID NO: 21957 - RNA, 20 nt, Artificial Sequence
  Synthetic
gggucuuuaaccuggcaucu

SEQ ID NO: 21958 - RNA, 21 nt, Artificial Sequence
  Synthetic
ggggucuuuaaccuggcaucu

SEQ ID NO: 21959 - RNA, 24 nt, Artificial Sequence
  Synthetic
gauggggucuuuaaccuggcaucu

SEQ ID NO: 21960 - RNA, 18 nt, Artificial Sequence
  Synthetic
gccuauaauucaagaucu

SEQ ID NO: 21961 - RNA, 20 nt, Artificial Sequence
  Synthetic
gcuauagguuaugcagaucu

SEQ ID NO: 21962 - RNA, 21 nt, Artificial Sequence
  Synthetic
ggcuauagguuaugcagaucu

SEQ ID NO: 21963 - RNA, 22 nt, Artificial Sequence
  Synthetic
gggcuauagguuaugcagaucu

SEQ ID NO: 21964 - RNA, 24 nt, Artificial Sequence
  Synthetic
gugggcuauagguuaugcagaucu

SEQ ID NO: 21965 - RNA, 18 nt, Artificial Sequence
  Synthetic
gaacaaucccaaggaucu

SEQ ID NO: 21966 - RNA, 20 nt, Artificial Sequence
  Synthetic
gagaacaaucccaaggaucu

SEQ ID NO: 21967 - RNA, 21 nt, Artificial Sequence
  Synthetic
ggagaacaaucccaaggaucu

SEQ ID NO: 21968 - RNA, 19 nt, Artificial Sequence
  Synthetic
gucacgcauucauggaucu

SEQ ID NO: 21969 - RNA, 20 nt, Artificial Sequence
  Synthetic
ggucacgcauucauggaucu

SEQ ID NO: 21970 - RNA, 24 nt, Artificial Sequence
  Synthetic
guuaggucacgcauucauggaucu

SEQ ID NO: 21971 - RNA, 21 nt, Artificial Sequence
  Synthetic
gcccucaccaggcccugaucu

SEQ ID NO: 21972 - RNA, 22 nt, Artificial Sequence
  Synthetic
ggcccucaccaggcccugaucu

SEQ ID NO: 21973 - RNA, 23 nt, Artificial Sequence
  Synthetic
gggcccucaccaggcccugaucu

SEQ ID NO: 21974 - RNA, 24 nt, Artificial Sequence
  Synthetic
ggggcccucaccaggcccugaucu

SEQ ID NO: 21975 - RNA, 21 nt, Artificial Sequence
  Synthetic
guauuucucuaucccugaucu

SEQ ID NO: 21976 - RNA, 23 nt, Artificial Sequence
  Synthetic
guguauuucucuaucccugaucu

SEQ ID NO: 21977 - RNA, 24 nt, Artificial Sequence
  Synthetic
guauaucaacuggaucucugaucu

SEQ ID NO: 21978 - RNA, 18 nt, Artificial Sequence
  Synthetic
guuucaucugcaauaucu

SEQ ID NO: 21979 - RNA, 20 nt, Artificial Sequence
  Synthetic
gcguuucaucugcaauaucu

SEQ ID NO: 21980 - RNA, 18 nt, Artificial Sequence
  Synthetic
gaauggguccuaauaucu

SEQ ID NO: 21981 - RNA, 21 nt, Artificial Sequence
  Synthetic
gcugaauggguccuaauaucu

SEQ ID NO: 21982 - RNA, 22 nt, Artificial Sequence
  Synthetic
ggcugaauggguccuaauaucu

SEQ ID NO: 21983 - RNA, 18 nt, Artificial Sequence
  Synthetic
guuacaaaaggcauaucu

SEQ ID NO: 21984 - RNA, 20 nt, Artificial Sequence
  Synthetic
gaguuacaaaaggcauaucu

SEQ ID NO: 21985 - RNA, 21 nt, Artificial Sequence
  Synthetic
ggaguuacaaaaggcauaucu

SEQ ID NO: 21986 - RNA, 22 nt, Artificial Sequence
  Synthetic
gggaguuacaaaaggcauaucu

SEQ ID NO: 21987 - RNA, 23 nt, Artificial Sequence
  Synthetic
ggggaguuacaaaaggcauaucu

SEQ ID NO: 21988 - RNA, 24 nt, Artificial Sequence
  Synthetic
gggggaguuacaaaaggcauaucu

SEQ ID NO: 21989 - RNA, 19 nt, Artificial Sequence
  Synthetic
gauuuuacuguaccuaucu

SEQ ID NO: 21990 - RNA, 19 nt, Artificial Sequence
  Synthetic
gagccccuccauccuaucu

SEQ ID NO: 21991 - RNA, 22 nt, Artificial Sequence
  Synthetic
guagagccccuccauccuaucu

SEQ ID NO: 21992 - RNA, 23 nt, Artificial Sequence
  Synthetic
gguagagccccuccauccuaucu

SEQ ID NO: 21993 - RNA, 21 nt, Artificial Sequence
  Synthetic
gauuaagaucucugucuaucu

SEQ ID NO: 21994 - RNA, 19 nt, Artificial Sequence
  Synthetic
gcccugucuucuucuaucu

SEQ ID NO: 21995 - RNA, 22 nt, Artificial Sequence
  Synthetic
gcuccaaggccuugcaguaucu

SEQ ID NO: 21996 - RNA, 19 nt, Artificial Sequence
  Synthetic
guauuucugaguaguaucu

SEQ ID NO: 21997 - RNA, 23 nt, Artificial Sequence
  Synthetic
gaaaguauuucugaguaguaucu

SEQ ID NO: 21998 - RNA, 18 nt, Artificial Sequence
  Synthetic
ggaguuaucugauuaucu

SEQ ID NO: 21999 - RNA, 20 nt, Artificial Sequence
  Synthetic
gcuuaaauauuagcuuaucu

SEQ ID NO: 22000 - RNA, 22 nt, Artificial Sequence
  Synthetic
gagcuuaaauauuagcuuaucu

SEQ ID NO: 22001 - RNA, 24 nt, Artificial Sequence
  Synthetic
gcauuuaaaacagacaauuuaucu

SEQ ID NO: 22002 - RNA, 19 nt, Artificial Sequence
  Synthetic
gaauaucauagucaacucu

SEQ ID NO: 22003 - RNA, 22 nt, Artificial Sequence
  Synthetic
gaugaauaucauagucaacucu

SEQ ID NO: 22004 - RNA, 22 nt, Artificial Sequence
  Synthetic
guacaguagacauaagaacucu

SEQ ID NO: 22005 - RNA, 19 nt, Artificial Sequence
  Synthetic
gaaaacucuuaagaacucu

SEQ ID NO: 22006 - RNA, 24 nt, Artificial Sequence
  Synthetic
gaaucauuugacaacagacacucu

SEQ ID NO: 22007 - RNA, 21 nt, Artificial Sequence
  Synthetic
guucuuuuuuuuucccacucu

SEQ ID NO: 22008 - RNA, 24 nt, Artificial Sequence
  Synthetic
gaaguucuuuuuuuuucccacucu

SEQ ID NO: 22009 - RNA, 21 nt, Artificial Sequence
  Synthetic
guacacauacauauauacucu

SEQ ID NO: 22010 - RNA, 24 nt, Artificial Sequence
  Synthetic
gcuguacacauacauauauacucu

SEQ ID NO: 22011 - RNA, 18 nt, Artificial Sequence
  Synthetic
gaagaaaauuaguacucu

SEQ ID NO: 22012 - RNA, 20 nt, Artificial Sequence
  Synthetic
gugaagaaaauuaguacucu

SEQ ID NO: 22013 - RNA, 21 nt, Artificial Sequence
  Synthetic
ggugaagaaaauuaguacucu

SEQ ID NO: 22014 - RNA, 23 nt, Artificial Sequence
  Synthetic
guggugaagaaaauuaguacucu

SEQ ID NO: 22015 - RNA, 23 nt, Artificial Sequence
  Synthetic
gcuuaaugguuaauguguacucu

SEQ ID NO: 22016 - RNA, 23 nt, Artificial Sequence
  Synthetic
gaaaccuagaugugguuuacucu

SEQ ID NO: 22017 - RNA, 24 nt, Artificial Sequence
  Synthetic
ggaaaccuagaugugguuuacucu

SEQ ID NO: 22018 - RNA, 20 nt, Artificial Sequence
  Synthetic
guuaagauuauuccaccucu

SEQ ID NO: 22019 - RNA, 24 nt, Artificial Sequence
  Synthetic
gaaaguuaagauuauuccaccucu

SEQ ID NO: 22020 - RNA, 20 nt, Artificial Sequence
  Synthetic
gcugguccaggaauaccucu

SEQ ID NO: 22021 - RNA, 23 nt, Artificial Sequence
  Synthetic
guuccaguacacuauguaccucu

SEQ ID NO: 22022 - RNA, 18 nt, Artificial Sequence
  Synthetic
gagagacuguguaccucu

SEQ ID NO: 22023 - RNA, 21 nt, Artificial Sequence
  Synthetic
gcaaggauugaaagccccucu

SEQ ID NO: 22024 - RNA, 22 nt, Artificial Sequence
  Synthetic
ggcaaggauugaaagccccucu

SEQ ID NO: 22025 - RNA, 23 nt, Artificial Sequence
  Synthetic
gggcaaggauugaaagccccucu

SEQ ID NO: 22026 - RNA, 19 nt, Artificial Sequence
  Synthetic
gaaugauuugauuuccucu

SEQ ID NO: 22027 - RNA, 22 nt, Artificial Sequence
  Synthetic
gacgaaugauuugauuuccucu

SEQ ID NO: 22028 - RNA, 19 nt, Artificial Sequence
  Synthetic
gacaaguuacguuagcucu

SEQ ID NO: 22029 - RNA, 24 nt, Artificial Sequence
  Synthetic
gcucaaugcuguuggggaugcucu

SEQ ID NO: 22030 - RNA, 24 nt, Artificial Sequence
  Synthetic
gucacuccaacuccauugugcucu

SEQ ID NO: 22031 - RNA, 24 nt, Artificial Sequence
  Synthetic
gcacuuuuagaugaaaauugcucu

SEQ ID NO: 22032 - RNA, 19 nt, Artificial Sequence
  Synthetic
gaguaagugcaacaucucu

SEQ ID NO: 22033 - RNA, 21 nt, Artificial Sequence
  Synthetic
gugaguaagugcaacaucucu

SEQ ID NO: 22034 - RNA, 19 nt, Artificial Sequence
  Synthetic
gauucuacucuacaucucu

SEQ ID NO: 22035 - RNA, 22 nt, Artificial Sequence
  Synthetic
gcaaauaaaaugaaauaucucu

SEQ ID NO: 22036 - RNA, 21 nt, Artificial Sequence
  Synthetic
guuuaaacugacauacucucu

SEQ ID NO: 22037 - RNA, 19 nt, Artificial Sequence
  Synthetic
guguguauguauacucucu

SEQ ID NO: 22038 - RNA, 21 nt, Artificial Sequence
  Synthetic
guguguguauguauacucucu

SEQ ID NO: 22039 - RNA, 22 nt, Artificial Sequence
  Synthetic
gacaaaguccuaaccucucucu

SEQ ID NO: 22040 - RNA, 21 nt, Artificial Sequence
  Synthetic
gcucgagggcuugcucucucu

SEQ ID NO: 22041 - RNA, 21 nt, Artificial Sequence
  Synthetic
guagucuuuucauaugucucu

SEQ ID NO: 22042 - RNA, 18 nt, Artificial Sequence
  Synthetic
guagaagucccauucucu

SEQ ID NO: 22043 - RNA, 24 nt, Artificial Sequence
  Synthetic
guuuuuguagaagucccauucucu

SEQ ID NO: 22044 - RNA, 20 nt, Artificial Sequence
  Synthetic
gaaugcacugcaucuucucu

SEQ ID NO: 22045 - RNA, 20 nt, Artificial Sequence
  Synthetic
gaacacaaaagaucuucucu

SEQ ID NO: 22046 - RNA, 22 nt, Artificial Sequence
  Synthetic
gugaacacaaaagaucuucucu

SEQ ID NO: 22047 - RNA, 22 nt, Artificial Sequence
  Synthetic
gacaacuuaucaggucuucucu

SEQ ID NO: 22048 - RNA, 21 nt, Artificial Sequence
  Synthetic
gauauacuaaaaaaguucucu

SEQ ID NO: 22049 - RNA, 22 nt, Artificial Sequence
  Synthetic
gagauacugucaaauguucucu

SEQ ID NO: 22050 - RNA, 19 nt, Artificial Sequence
  Synthetic
gcuaucacuaaauuucucu

SEQ ID NO: 22051 - RNA, 24 nt, Artificial Sequence
  Synthetic
guuuuacggcuucaacauuucucu

SEQ ID NO: 22052 - RNA, 18 nt, Artificial Sequence
  Synthetic
ggaaaauagcauuucucu

SEQ ID NO: 22053 - RNA, 20 nt, Artificial Sequence
  Synthetic
gaggaaaauagcauuucucu

SEQ ID NO: 22054 - RNA, 20 nt, Artificial Sequence
  Synthetic
gacgauuagggacuuucucu

SEQ ID NO: 22055 - RNA, 22 nt, Artificial Sequence
  Synthetic
gagacgauuagggacuuucucu

SEQ ID NO: 22056 - RNA, 21 nt, Artificial Sequence
  Synthetic
gaaaauauuuaguuagagucu

SEQ ID NO: 22057 - RNA, 23 nt, Artificial Sequence
  Synthetic
gagaaaauauuuaguuagagucu

SEQ ID NO: 22058 - RNA, 23 nt, Artificial Sequence
  Synthetic
guuuucuuacuuucuaggagucu

SEQ ID NO: 22059 - RNA, 20 nt, Artificial Sequence
  Synthetic
guugaaugaauaaugagucu

SEQ ID NO: 22060 - RNA, 18 nt, Artificial Sequence
  Synthetic
gcaacuccuugugagucu

SEQ ID NO: 22061 - RNA, 24 nt, Artificial Sequence
  Synthetic
guuuuugcaacuccuugugagucu

SEQ ID NO: 22062 - RNA, 18 nt, Artificial Sequence
  Synthetic
gauguauaaaaauagucu

SEQ ID NO: 22063 - RNA, 20 nt, Artificial Sequence
  Synthetic
gucaucuuuacaaauagucu

SEQ ID NO: 22064 - RNA, 18 nt, Artificial Sequence
  Synthetic
ggaaacucccucuagucu

SEQ ID NO: 22065 - RNA, 21 nt, Artificial Sequence
  Synthetic
gaaggaaacucccucuagucu

SEQ ID NO: 22066 - RNA, 22 nt, Artificial Sequence
  Synthetic
ggaaggaaacucccucuagucu

SEQ ID NO: 22067 - RNA, 18 nt, Artificial Sequence
  Synthetic
gacgauaaauccacgucu

SEQ ID NO: 22068 - RNA, 24 nt, Artificial Sequence
  Synthetic
gacuuaaaguauugcccaaggucu

SEQ ID NO: 22069 - RNA, 22 nt, Artificial Sequence
  Synthetic
gucaccucaguaaccuaugucu

SEQ ID NO: 22070 - RNA, 18 nt, Artificial Sequence
  Synthetic
gaaacuagcuguaugucu

SEQ ID NO: 22071 - RNA, 20 nt, Artificial Sequence
  Synthetic
gugaaacuagcuguaugucu

SEQ ID NO: 22072 - RNA, 21 nt, Artificial Sequence
  Synthetic
ggugaaacuagcuguaugucu

SEQ ID NO: 22073 - RNA, 19 nt, Artificial Sequence
  Synthetic
guucccagggcaucugucu

SEQ ID NO: 22074 - RNA, 19 nt, Artificial Sequence
  Synthetic
guucuccaaaauucugucu

SEQ ID NO: 22075 - RNA, 19 nt, Artificial Sequence
  Synthetic
guacuaugauagagugucu

SEQ ID NO: 22076 - RNA, 20 nt, Artificial Sequence
  Synthetic
gguacuaugauagagugucu

SEQ ID NO: 22077 - RNA, 21 nt, Artificial Sequence
  Synthetic
ggguacuaugauagagugucu

SEQ ID NO: 22078 - RNA, 22 nt, Artificial Sequence
  Synthetic
gggguacuaugauagagugucu

SEQ ID NO: 22079 - RNA, 23 nt, Artificial Sequence
  Synthetic
ggggguacuaugauagagugucu

SEQ ID NO: 22080 - RNA, 24 nt, Artificial Sequence
  Synthetic
gggggguacuaugauagagugucu

SEQ ID NO: 22081 - RNA, 18 nt, Artificial Sequence
  Synthetic
gaugcaugaagauugucu

SEQ ID NO: 22082 - RNA, 19 nt, Artificial Sequence
  Synthetic
ggaugcaugaagauugucu

SEQ ID NO: 22083 - RNA, 18 nt, Artificial Sequence
  Synthetic
guggggaaaugauugucu

SEQ ID NO: 22084 - RNA, 22 nt, Artificial Sequence
  Synthetic
gauuuuacuuauuuaguugucu

SEQ ID NO: 22085 - RNA, 24 nt, Artificial Sequence
  Synthetic
gugauuuuacuuauuuaguugucu

SEQ ID NO: 22086 - RNA, 24 nt, Artificial Sequence
  Synthetic
guuccauuuuucuuauuguugucu

SEQ ID NO: 22087 - RNA, 22 nt, Artificial Sequence
  Synthetic
gcaaccaugcaacuauuugucu

SEQ ID NO: 22088 - RNA, 23 nt, Artificial Sequence
  Synthetic
ggcaaccaugcaacuauuugucu

SEQ ID NO: 22089 - RNA, 19 nt, Artificial Sequence
  Synthetic
gaaagaaccaauaaauucu

SEQ ID NO: 22090 - RNA, 20 nt, Artificial Sequence
  Synthetic
gaaaguugucacuaaauucu

SEQ ID NO: 22091 - RNA, 23 nt, Artificial Sequence
  Synthetic
gaagaaaguugucacuaaauucu

SEQ ID NO: 22092 - RNA, 22 nt, Artificial Sequence
  Synthetic
gauuacaaaaaacuggaauucu

SEQ ID NO: 22093 - RNA, 23 nt, Artificial Sequence
  Synthetic
ggauuacaaaaaacuggaauucu

SEQ ID NO: 22094 - RNA, 20 nt, Artificial Sequence
  Synthetic
gacaaccagugaacgauucu

SEQ ID NO: 22095 - RNA, 21 nt, Artificial Sequence
  Synthetic
ggacaaccagugaacgauucu

SEQ ID NO: 22096 - RNA, 18 nt, Artificial Sequence
  Synthetic
gcaacuccugacgauucu

SEQ ID NO: 22097 - RNA, 21 nt, Artificial Sequence
  Synthetic
gauuuuuguacuacauauucu

SEQ ID NO: 22098 - RNA, 24 nt, Artificial Sequence
  Synthetic
gccauuuuaucugcuucuuauucu

SEQ ID NO: 22099 - RNA, 19 nt, Artificial Sequence
  Synthetic
gccauauaggauuuauucu

SEQ ID NO: 22100 - RNA, 21 nt, Artificial Sequence
  Synthetic
gagccauauaggauuuauucu

SEQ ID NO: 22101 - RNA, 23 nt, Artificial Sequence
  Synthetic
gagagccauauaggauuuauucu

SEQ ID NO: 22102 - RNA, 21 nt, Artificial Sequence
  Synthetic
gauauuuccuguguuuauucu

SEQ ID NO: 22103 - RNA, 23 nt, Artificial Sequence
  Synthetic
gugauauuuccuguguuuauucu

SEQ ID NO: 22104 - RNA, 21 nt, Artificial Sequence
  Synthetic
gaauaaagaccccaaacuucu

SEQ ID NO: 22105 - RNA, 23 nt, Artificial Sequence
  Synthetic
gacucauaugccaauggacuucu

SEQ ID NO: 22106 - RNA, 18 nt, Artificial Sequence
  Synthetic
gagcucccacauacuucu

SEQ ID NO: 22107 - RNA, 20 nt, Artificial Sequence
  Synthetic
gugagcucccacauacuucu

SEQ ID NO: 22108 - RNA, 19 nt, Artificial Sequence
  Synthetic
gacauacugacauacuucu

SEQ ID NO: 22109 - RNA, 21 nt, Artificial Sequence
  Synthetic
gugacauacugacauacuucu

SEQ ID NO: 22110 - RNA, 18 nt, Artificial Sequence
  Synthetic
gccuucuuacauccuucu

SEQ ID NO: 22111 - RNA, 19 nt, Artificial Sequence
  Synthetic
ggccuucuuacauccuucu

SEQ ID NO: 22112 - RNA, 19 nt, Artificial Sequence
  Synthetic
gaaagacaaguuuccuucu

SEQ ID NO: 22113 - RNA, 21 nt, Artificial Sequence
  Synthetic
gagaaagacaaguuuccuucu

SEQ ID NO: 22114 - RNA, 19 nt, Artificial Sequence
  Synthetic
gaggaugcuuuuuccuucu

SEQ ID NO: 22115 - RNA, 21 nt, Artificial Sequence
  Synthetic
gagaggaugcuuuuuccuucu

SEQ ID NO: 22116 - RNA, 23 nt, Artificial Sequence
  Synthetic
gugagaggaugcuuuuuccuucu

SEQ ID NO: 22117 - RNA, 18 nt, Artificial Sequence
  Synthetic
gccuacagcccagcuucu

SEQ ID NO: 22118 - RNA, 22 nt, Artificial Sequence
  Synthetic
gaaugccuacagcccagcuucu

SEQ ID NO: 22119 - RNA, 24 nt, Artificial Sequence
  Synthetic
gagaaugccuacagcccagcuucu

SEQ ID NO: 22120 - RNA, 21 nt, Artificial Sequence
  Synthetic
gcuugugauguuguaucuucu

SEQ ID NO: 22121 - RNA, 21 nt, Artificial Sequence
  Synthetic
gcuaucuggauauccucuucu

SEQ ID NO: 22122 - RNA, 23 nt, Artificial Sequence
  Synthetic
gaaauacauaugaaaauucuucu

SEQ ID NO: 22123 - RNA, 18 nt, Artificial Sequence
  Synthetic
guuuuuggaaauucuucu

SEQ ID NO: 22124 - RNA, 22 nt, Artificial Sequence
  Synthetic
gacuguuuuuggaaauucuucu

SEQ ID NO: 22125 - RNA, 24 nt, Artificial Sequence
  Synthetic
gcgacuguuuuuggaaauucuucu

SEQ ID NO: 22126 - RNA, 20 nt, Artificial Sequence
  Synthetic
gaaaaacaucuacuucuucu

SEQ ID NO: 22127 - RNA, 23 nt, Artificial Sequence
  Synthetic
guucucaacaauaucuuucuucu

SEQ ID NO: 22128 - RNA, 24 nt, Artificial Sequence
  Synthetic
gguucucaacaauaucuuucuucu

SEQ ID NO: 22129 - RNA, 22 nt, Artificial Sequence
  Synthetic
gcuccuuuugaaguaaaguucu

SEQ ID NO: 22130 - RNA, 19 nt, Artificial Sequence
  Synthetic
gcaaccuguucacaguucu

SEQ ID NO: 22131 - RNA, 21 nt, Artificial Sequence
  Synthetic
gagcaaccuguucacaguucu

SEQ ID NO: 22132 - RNA, 18 nt, Artificial Sequence
  Synthetic
gucaugcugccuaguucu

SEQ ID NO: 22133 - RNA, 19 nt, Artificial Sequence
  Synthetic
ggucaugcugccuaguucu

SEQ ID NO: 22134 - RNA, 21 nt, Artificial Sequence
  Synthetic
gucaaacaguggcaagguucu

SEQ ID NO: 22135 - RNA, 22 nt, Artificial Sequence
  Synthetic
ggucaaacaguggcaagguucu

SEQ ID NO: 22136 - RNA, 24 nt, Artificial Sequence
  Synthetic
gaacauaucagcagaugugguucu

SEQ ID NO: 22137 - RNA, 21 nt, Artificial Sequence
  Synthetic
guguacaauuacugugguucu

SEQ ID NO: 22138 - RNA, 24 nt, Artificial Sequence
  Synthetic
guuguguacaauuacugugguucu

SEQ ID NO: 22139 - RNA, 24 nt, Artificial Sequence
  Synthetic
gcuuuacuauggaauauugguucu

SEQ ID NO: 22140 - RNA, 19 nt, Artificial Sequence
  Synthetic
gcaccuagaccccuguucu

SEQ ID NO: 22141 - RNA, 20 nt, Artificial Sequence
  Synthetic
ggcaccuagaccccuguucu

SEQ ID NO: 22142 - RNA, 19 nt, Artificial Sequence
  Synthetic
guguaccgcaggcuguucu

SEQ ID NO: 22143 - RNA, 24 nt, Artificial Sequence
  Synthetic
gaauagauuuuauucaucuguucu

SEQ ID NO: 22144 - RNA, 19 nt, Artificial Sequence
  Synthetic
gccuagauggacguguucu

SEQ ID NO: 22145 - RNA, 22 nt, Artificial Sequence
  Synthetic
gcagccuagauggacguguucu

SEQ ID NO: 22146 - RNA, 23 nt, Artificial Sequence
  Synthetic
gcauucuaugaucccaaauuucu

SEQ ID NO: 22147 - RNA, 24 nt, Artificial Sequence
  Synthetic
ggcauucuaugaucccaaauuucu

SEQ ID NO: 22148 - RNA, 18 nt, Artificial Sequence
  Synthetic
gugguuuaaaagauuucu

SEQ ID NO: 22149 - RNA, 24 nt, Artificial Sequence
  Synthetic
guccccuuaguaguaaauauuucu

SEQ ID NO: 22150 - RNA, 23 nt, Artificial Sequence
  Synthetic
gcuuaaccacugcacauauuucu

SEQ ID NO: 22151 - RNA, 18 nt, Artificial Sequence
  Synthetic
guuuuuccauauauuucu

SEQ ID NO: 22152 - RNA, 19 nt, Artificial Sequence
  Synthetic
gguuuuuccauauauuucu

SEQ ID NO: 22153 - RNA, 18 nt, Artificial Sequence
  Synthetic
ggaaauuuauaacuuucu

SEQ ID NO: 22154 - RNA, 20 nt, Artificial Sequence
  Synthetic
guggaaauuuauaacuuucu

SEQ ID NO: 22155 - RNA, 23 nt, Artificial Sequence
  Synthetic
guuauuuaguuuucuuacuuucu

SEQ ID NO: 22156 - RNA, 19 nt, Artificial Sequence
  Synthetic
guuuuaaagaagucuuucu

SEQ ID NO: 22157 - RNA, 23 nt, Artificial Sequence
  Synthetic
gaauguuuuaaagaagucuuucu

SEQ ID NO: 22158 - RNA, 20 nt, Artificial Sequence
  Synthetic
gaucuugaugaauucuuucu

SEQ ID NO: 22159 - RNA, 19 nt, Artificial Sequence
  Synthetic
gacuuuuaguuugguuucu

SEQ ID NO: 22160 - RNA, 21 nt, Artificial Sequence
  Synthetic
gugacuuuuaguuugguuucu

SEQ ID NO: 22161 - RNA, 18 nt, Artificial Sequence
  Synthetic
ggacaccaagaguuuucu

SEQ ID NO: 22162 - RNA, 19 nt, Artificial Sequence
  Synthetic
gggacaccaagaguuuucu

SEQ ID NO: 22163 - RNA, 22 nt, Artificial Sequence
  Synthetic
gccauuauauuguggguuuucu

SEQ ID NO: 22164 - RNA, 20 nt, Artificial Sequence
  Synthetic
gaacauggacugauuuuucu

SEQ ID NO: 22165 - RNA, 23 nt, Artificial Sequence
  Synthetic
gcuacuucuuucccugaaaaagu

SEQ ID NO: 22166 - RNA, 18 nt, Artificial Sequence
  Synthetic
gauacaacuuuaaaaagu

SEQ ID NO: 22167 - RNA, 19 nt, Artificial Sequence
  Synthetic
ggauacaacuuuaaaaagu

SEQ ID NO: 22168 - RNA, 19 nt, Artificial Sequence
  Synthetic
gucacaaaauuggaaaagu

SEQ ID NO: 22169 - RNA, 21 nt, Artificial Sequence
  Synthetic
gugucacaaaauuggaaaagu

SEQ ID NO: 22170 - RNA, 20 nt, Artificial Sequence
  Synthetic
guaaccauauacauaaaagu

SEQ ID NO: 22171 - RNA, 21 nt, Artificial Sequence
  Synthetic
guuugguucccuuauaaaagu

SEQ ID NO: 22172 - RNA, 22 nt, Artificial Sequence
  Synthetic
gguuugguucccuuauaaaagu

SEQ ID NO: 22173 - RNA, 23 nt, Artificial Sequence
  Synthetic
ggguuugguucccuuauaaaagu

SEQ ID NO: 22174 - RNA, 24 nt, Artificial Sequence
  Synthetic
gaauuauguucauacuuuaaaagu

SEQ ID NO: 22175 - RNA, 21 nt, Artificial Sequence
  Synthetic
gagcaaaaagggagacaaagu

SEQ ID NO: 22176 - RNA, 24 nt, Artificial Sequence
  Synthetic
gaagagcaaaaagggagacaaagu

SEQ ID NO: 22177 - RNA, 21 nt, Artificial Sequence
  Synthetic
gauuauaccauuggacaaagu

SEQ ID NO: 22178 - RNA, 23 nt, Artificial Sequence
  Synthetic
gagauuauaccauuggacaaagu

SEQ ID NO: 22179 - RNA, 22 nt, Artificial Sequence
  Synthetic
gcaaaacaggaaaagucaaagu

SEQ ID NO: 22180 - RNA, 23 nt, Artificial Sequence
  Synthetic
ggcaaaacaggaaaagucaaagu

SEQ ID NO: 22181 - RNA, 18 nt, Artificial Sequence
  Synthetic
gacuuguacuuucaaagu

SEQ ID NO: 22182 - RNA, 23 nt, Artificial Sequence
  Synthetic
gaauuuguuccucugaagaaagu

SEQ ID NO: 22183 - RNA, 19 nt, Artificial Sequence
  Synthetic
guguagguuuucagaaagu

SEQ ID NO: 22184 - RNA, 23 nt, Artificial Sequence
  Synthetic
guaagagaauggggggagaaagu

SEQ ID NO: 22185 - RNA, 24 nt, Artificial Sequence
  Synthetic
gguaagagaauggggggagaaagu

SEQ ID NO: 22186 - RNA, 18 nt, Artificial Sequence
  Synthetic
guuauauagcuagaaagu

SEQ ID NO: 22187 - RNA, 19 nt, Artificial Sequence
  Synthetic
gguuauauagcuagaaagu

SEQ ID NO: 22188 - RNA, 24 nt, Artificial Sequence
  Synthetic
gauagaaauauuguuuuagaaagu

SEQ ID NO: 22189 - RNA, 19 nt, Artificial Sequence
  Synthetic
gaacccagaauaugaaagu

SEQ ID NO: 22190 - RNA, 23 nt, Artificial Sequence
  Synthetic
gcaugaacccagaauaugaaagu

SEQ ID NO: 22191 - RNA, 20 nt, Artificial Sequence
  Synthetic
guaaauucaacgcauaaagu

SEQ ID NO: 22192 - RNA, 23 nt, Artificial Sequence
  Synthetic
gccguaaauucaacgcauaaagu

SEQ ID NO: 22193 - RNA, 18 nt, Artificial Sequence
  Synthetic
gauaagcucagauaaagu

SEQ ID NO: 22194 - RNA, 19 nt, Artificial Sequence
  Synthetic
ggauaagcucagauaaagu

SEQ ID NO: 22195 - RNA, 23 nt, Artificial Sequence
  Synthetic
guauggauaagcucagauaaagu

SEQ ID NO: 22196 - RNA, 20 nt, Artificial Sequence
  Synthetic
gaagaaaugaaggauaaagu

SEQ ID NO: 22197 - RNA, 21 nt, Artificial Sequence
  Synthetic
ggaagaaaugaaggauaaagu

SEQ ID NO: 22198 - RNA, 24 nt, Artificial Sequence
  Synthetic
gaaggaagaaaugaaggauaaagu

SEQ ID NO: 22199 - RNA, 20 nt, Artificial Sequence
  Synthetic
gaagcucuccaccuuaaagu

SEQ ID NO: 22200 - RNA, 21 nt, Artificial Sequence
  Synthetic
ggaagcucuccaccuuaaagu

SEQ ID NO: 22201 - RNA, 21 nt, Artificial Sequence
  Synthetic
gcuuaaauugauccuuaaagu

SEQ ID NO: 22202 - RNA, 18 nt, Artificial Sequence
  Synthetic
gauaaaaccauaacaagu

SEQ ID NO: 22203 - RNA, 23 nt, Artificial Sequence
  Synthetic
gaacagauaaaaccauaacaagu

SEQ ID NO: 22204 - RNA, 18 nt, Artificial Sequence
  Synthetic
gagauacuugccacaagu

SEQ ID NO: 22205 - RNA, 20 nt, Artificial Sequence
  Synthetic
gugagauacuugccacaagu

SEQ ID NO: 22206 - RNA, 21 nt, Artificial Sequence
  Synthetic
ggugagauacuugccacaagu

SEQ ID NO: 22207 - RNA, 23 nt, Artificial Sequence
  Synthetic
gaggugagauacuugccacaagu

SEQ ID NO: 22208 - RNA, 23 nt, Artificial Sequence
  Synthetic
gcaucuggcaguguuccacaagu

SEQ ID NO: 22209 - RNA, 18 nt, Artificial Sequence
  Synthetic
gaugcauuuuccccaagu

SEQ ID NO: 22210 - RNA, 19 nt, Artificial Sequence
  Synthetic
ggaugcauuuuccccaagu

SEQ ID NO: 22211 - RNA, 18 nt, Artificial Sequence
  Synthetic
gcaauaauuauuccaagu

SEQ ID NO: 22212 - RNA, 24 nt, Artificial Sequence
  Synthetic
gauuacuuuuaguuagaggcaagu

SEQ ID NO: 22213 - RNA, 19 nt, Artificial Sequence
  Synthetic
gcaccuuuccuuggcaagu

SEQ ID NO: 22214 - RNA, 21 nt, Artificial Sequence
  Synthetic
gacucauucugucaugcaagu

SEQ ID NO: 22215 - RNA, 22 nt, Artificial Sequence
  Synthetic
ggacucauucugucaugcaagu

SEQ ID NO: 22216 - RNA, 21 nt, Artificial Sequence
  Synthetic
guuuuggacuuguuuucaagu

SEQ ID NO: 22217 - RNA, 22 nt, Artificial Sequence
  Synthetic
gcaaugaacaacaguaagaagu

SEQ ID NO: 22218 - RNA, 18 nt, Artificial Sequence
  Synthetic
gauaauuauuccagaagu

SEQ ID NO: 22219 - RNA, 20 nt, Artificial Sequence
  Synthetic
gugauaauuauuccagaagu

SEQ ID NO: 22220 - RNA, 22 nt, Artificial Sequence
  Synthetic
gugugauaauuauuccagaagu

SEQ ID NO: 22221 - RNA, 23 nt, Artificial Sequence
  Synthetic
ggugugauaauuauuccagaagu

SEQ ID NO: 22222 - RNA, 22 nt, Artificial Sequence
  Synthetic
guacugagccacuagcagaagu

SEQ ID NO: 22223 - RNA, 23 nt, Artificial Sequence
  Synthetic
gguacugagccacuagcagaagu

SEQ ID NO: 22224 - RNA, 24 nt, Artificial Sequence
  Synthetic
ggguacugagccacuagcagaagu

SEQ ID NO: 22225 - RNA, 19 nt, Artificial Sequence
  Synthetic
gaaggggguggugagaagu

SEQ ID NO: 22226 - RNA, 24 nt, Artificial Sequence
  Synthetic
gcuuuaaaacuaaaguguagaagu

SEQ ID NO: 22227 - RNA, 21 nt, Artificial Sequence
  Synthetic
gcaaugagaaaaaaaggaagu

SEQ ID NO: 22228 - RNA, 22 nt, Artificial Sequence
  Synthetic
ggcaaugagaaaaaaaggaagu

SEQ ID NO: 22229 - RNA, 18 nt, Artificial Sequence
  Synthetic
guggcgaaaaagggaagu

SEQ ID NO: 22230 - RNA, 22 nt, Artificial Sequence
  Synthetic
gcauguggcgaaaaagggaagu

SEQ ID NO: 22231 - RNA, 23 nt, Artificial Sequence
  Synthetic
ggcauguggcgaaaaagggaagu

SEQ ID NO: 22232 - RNA, 22 nt, Artificial Sequence
  Synthetic
guuucaaaagacauugggaagu

SEQ ID NO: 22233 - RNA, 18 nt, Artificial Sequence
  Synthetic
gccuagauuuguggaagu

SEQ ID NO: 22234 - RNA, 24 nt, Artificial Sequence
  Synthetic
gacaacaacuguuagcucugaagu

SEQ ID NO: 22235 - RNA, 21 nt, Artificial Sequence
  Synthetic
guuuuauuuccucugugaagu

SEQ ID NO: 22236 - RNA, 22 nt, Artificial Sequence
  Synthetic
gguuuuauuuccucugugaagu

SEQ ID NO: 22237 - RNA, 23 nt, Artificial Sequence
  Synthetic
ggguuuuauuuccucugugaagu

SEQ ID NO: 22238 - RNA, 24 nt, Artificial Sequence
  Synthetic
gggguuuuauuuccucugugaagu

SEQ ID NO: 22239 - RNA, 21 nt, Artificial Sequence
  Synthetic
guaauagaaaacuuuugaagu

SEQ ID NO: 22240 - RNA, 19 nt, Artificial Sequence
  Synthetic
gaauuaggauauaauaagu

SEQ ID NO: 22241 - RNA, 20 nt, Artificial Sequence
  Synthetic
guaaucaacaugacauaagu

SEQ ID NO: 22242 - RNA, 22 nt, Artificial Sequence
  Synthetic
gcaaauugagauacagauaagu

SEQ ID NO: 22243 - RNA, 23 nt, Artificial Sequence
  Synthetic
gauacaagugacagaagcuaagu

SEQ ID NO: 22244 - RNA, 21 nt, Artificial Sequence
  Synthetic
gcauaaagaggugagguaagu

SEQ ID NO: 22245 - RNA, 22 nt, Artificial Sequence
  Synthetic
ggcauaaagaggugagguaagu

SEQ ID NO: 22246 - RNA, 23 nt, Artificial Sequence
  Synthetic
gggcauaaagaggugagguaagu

SEQ ID NO: 22247 - RNA, 21 nt, Artificial Sequence
  Synthetic
gaaaauuccguguuauuaagu

SEQ ID NO: 22248 - RNA, 21 nt, Artificial Sequence
  Synthetic
gacagggcaagaaaguuaagu

SEQ ID NO: 22249 - RNA, 24 nt, Artificial Sequence
  Synthetic
gaagacagggcaagaaaguuaagu

SEQ ID NO: 22250 - RNA, 18 nt, Artificial Sequence
  Synthetic
guuugacagaguuuaagu

SEQ ID NO: 22251 - RNA, 23 nt, Artificial Sequence
  Synthetic
gaccaguuugacagaguuuaagu

SEQ ID NO: 22252 - RNA, 18 nt, Artificial Sequence
  Synthetic
ggggacuagaagaacagu

SEQ ID NO: 22253 - RNA, 19 nt, Artificial Sequence
  Synthetic
gugucaccagaguaacagu

SEQ ID NO: 22254 - RNA, 22 nt, Artificial Sequence
  Synthetic
guugugucaccagaguaacagu

SEQ ID NO: 22255 - RNA, 23 nt, Artificial Sequence
  Synthetic
gguugugucaccagaguaacagu

SEQ ID NO: 22256 - RNA, 20 nt, Artificial Sequence
  Synthetic
gaugucacccacaucacagu

SEQ ID NO: 22257 - RNA, 23 nt, Artificial Sequence
  Synthetic
guugaugucacccacaucacagu

SEQ ID NO: 22258 - RNA, 18 nt, Artificial Sequence
  Synthetic
ggccuccauaaagacagu

SEQ ID NO: 22259 - RNA, 23 nt, Artificial Sequence
  Synthetic
guaacggccuccauaaagacagu

SEQ ID NO: 22260 - RNA, 21 nt, Artificial Sequence
  Synthetic
gaauccuuuuuagaagacagu

SEQ ID NO: 22261 - RNA, 23 nt, Artificial Sequence
  Synthetic
gugaauccuuuuuagaagacagu

SEQ ID NO: 22262 - RNA, 20 nt, Artificial Sequence
  Synthetic
gaaaggcaagucaggacagu

SEQ ID NO: 22263 - RNA, 22 nt, Artificial Sequence
  Synthetic
gagaaaggcaagucaggacagu

SEQ ID NO: 22264 - RNA, 18 nt, Artificial Sequence
  Synthetic
gagggcaguugugacagu

SEQ ID NO: 22265 - RNA, 23 nt, Artificial Sequence
  Synthetic
guauagagggcaguugugacagu

SEQ ID NO: 22266 - RNA, 23 nt, Artificial Sequence
  Synthetic
gauucuuucaaucugaauacagu

SEQ ID NO: 22267 - RNA, 24 nt, Artificial Sequence
  Synthetic
ggauucuuucaaucugaauacagu

SEQ ID NO: 22268 - RNA, 19 nt, Artificial Sequence
  Synthetic
guauuaguugagauacagu

SEQ ID NO: 22269 - RNA, 20 nt, Artificial Sequence
  Synthetic
gguauuaguugagauacagu

SEQ ID NO: 22270 - RNA, 21 nt, Artificial Sequence
  Synthetic
gacuuugguauaacuaccagu

SEQ ID NO: 22271 - RNA, 18 nt, Artificial Sequence
  Synthetic
gaucuggcagcuaccagu

SEQ ID NO: 22272 - RNA, 19 nt, Artificial Sequence
  Synthetic
ggaucuggcagcuaccagu

SEQ ID NO: 22273 - RNA, 19 nt, Artificial Sequence
  Synthetic
gugauuauuaaaagccagu

SEQ ID NO: 22274 - RNA, 22 nt, Artificial Sequence
  Synthetic
gaugugauuauuaaaagccagu

SEQ ID NO: 22275 - RNA, 20 nt, Artificial Sequence
  Synthetic
gaaacagagucaucuccagu

SEQ ID NO: 22276 - RNA, 21 nt, Artificial Sequence
  Synthetic
ggaaacagagucaucuccagu

SEQ ID NO: 22277 - RNA, 21 nt, Artificial Sequence
  Synthetic
gcacauaauuuacaguccagu

SEQ ID NO: 22278 - RNA, 24 nt, Artificial Sequence
  Synthetic
gaaauccaccacaaacauuccagu

SEQ ID NO: 22279 - RNA, 19 nt, Artificial Sequence
  Synthetic
gacaucuguauuuuccagu

SEQ ID NO: 22280 - RNA, 23 nt, Artificial Sequence
  Synthetic
gaaugacaucuguauuuuccagu

SEQ ID NO: 22281 - RNA, 18 nt, Artificial Sequence
  Synthetic
ggccuuaacaaaagcagu

SEQ ID NO: 22282 - RNA, 20 nt, Artificial Sequence
  Synthetic
guggccuuaacaaaagcagu

SEQ ID NO: 22283 - RNA, 21 nt, Artificial Sequence
  Synthetic
gguggccuuaacaaaagcagu

SEQ ID NO: 22284 - RNA, 22 nt, Artificial Sequence
  Synthetic
ggguggccuuaacaaaagcagu

SEQ ID NO: 22285 - RNA, 23 nt, Artificial Sequence
  Synthetic
gcauauggaggguuagaggcagu

SEQ ID NO: 22286 - RNA, 24 nt, Artificial Sequence
  Synthetic
ggcauauggaggguuagaggcagu

SEQ ID NO: 22287 - RNA, 20 nt, Artificial Sequence
  Synthetic
gccucaguagcaacugcagu

SEQ ID NO: 22288 - RNA, 23 nt, Artificial Sequence
  Synthetic
gaagccucaguagcaacugcagu

SEQ ID NO: 22289 - RNA, 18 nt, Artificial Sequence
  Synthetic
gguugguuuuucugcagu

SEQ ID NO: 22290 - RNA, 21 nt, Artificial Sequence
  Synthetic
gaauuaagguuaaugugcagu

SEQ ID NO: 22291 - RNA, 23 nt, Artificial Sequence
  Synthetic
gcaacaguagaaaucucaucagu

SEQ ID NO: 22292 - RNA, 24 nt, Artificial Sequence
  Synthetic
ggcaacaguagaaaucucaucagu

SEQ ID NO: 22293 - RNA, 20 nt, Artificial Sequence
  Synthetic
gucuguuauggugacucagu

SEQ ID NO: 22294 - RNA, 20 nt, Artificial Sequence
  Synthetic
guacaggcucuugccucagu

SEQ ID NO: 22295 - RNA, 23 nt, Artificial Sequence
  Synthetic
guuuuuauugcauauaucucagu

SEQ ID NO: 22296 - RNA, 19 nt, Artificial Sequence
  Synthetic
gaggcuagguggaaagagu

SEQ ID NO: 22297 - RNA, 22 nt, Artificial Sequence
  Synthetic
guugaggcuagguggaaagagu

SEQ ID NO: 22298 - RNA, 19 nt, Artificial Sequence
  Synthetic
gaacgaacggguaaagagu

SEQ ID NO: 22299 - RNA, 23 nt, Artificial Sequence
  Synthetic
gccaauuugacagucagaagagu

SEQ ID NO: 22300 - RNA, 24 nt, Artificial Sequence
  Synthetic
ggccaauuugacagucagaagagu

SEQ ID NO: 22301 - RNA, 18 nt, Artificial Sequence
  Synthetic
guaaaaaauaguaagagu

SEQ ID NO: 22302 - RNA, 19 nt, Artificial Sequence
  Synthetic
gguaaaaaauaguaagagu

SEQ ID NO: 22303 - RNA, 20 nt, Artificial Sequence
  Synthetic
ggguaaaaaauaguaagagu

SEQ ID NO: 22304 - RNA, 22 nt, Artificial Sequence
  Synthetic
gaggguaaaaaauaguaagagu

SEQ ID NO: 22305 - RNA, 23 nt, Artificial Sequence
  Synthetic
ggaggguaaaaaauaguaagagu

SEQ ID NO: 22306 - RNA, 19 nt, Artificial Sequence
  Synthetic
gcaaauacacccacagagu

SEQ ID NO: 22307 - RNA, 20 nt, Artificial Sequence
  Synthetic
ggcaaauacacccacagagu

SEQ ID NO: 22308 - RNA, 22 nt, Artificial Sequence
  Synthetic
gucccaaagguacagccagagu

SEQ ID NO: 22309 - RNA, 18 nt, Artificial Sequence
  Synthetic
guuuaagagaagcagagu

SEQ ID NO: 22310 - RNA, 19 nt, Artificial Sequence
  Synthetic
gguuuaagagaagcagagu

SEQ ID NO: 22311 - RNA, 23 nt, Artificial Sequence
  Synthetic
gccagguuuaagagaagcagagu

SEQ ID NO: 22312 - RNA, 24 nt, Artificial Sequence
  Synthetic
gacucaaauauugagaggcagagu

SEQ ID NO: 22313 - RNA, 19 nt, Artificial Sequence
  Synthetic
gaaauuucaaggagagagu

SEQ ID NO: 22314 - RNA, 22 nt, Artificial Sequence
  Synthetic
guagaaauuucaaggagagagu

SEQ ID NO: 22315 - RNA, 24 nt, Artificial Sequence
  Synthetic
guguagaaauuucaaggagagagu

SEQ ID NO: 22316 - RNA, 19 nt, Artificial Sequence
  Synthetic
gaggaaauuguuggagagu

SEQ ID NO: 22317 - RNA, 21 nt, Artificial Sequence
  Synthetic
gugaggaaauuguuggagagu

SEQ ID NO: 22318 - RNA, 23 nt, Artificial Sequence
  Synthetic
gagugaggaaauuguuggagagu

SEQ ID NO: 22319 - RNA, 20 nt, Artificial Sequence
  Synthetic
guaugacaacaccugagagu

SEQ ID NO: 22320 - RNA, 22 nt, Artificial Sequence
  Synthetic
gaguaugacaacaccugagagu

SEQ ID NO: 22321 - RNA, 23 nt, Artificial Sequence
  Synthetic
ggaguaugacaacaccugagagu

SEQ ID NO: 22322 - RNA, 18 nt, Artificial Sequence
  Synthetic
gcuuuaauaaaauagagu

SEQ ID NO: 22323 - RNA, 22 nt, Artificial Sequence
  Synthetic
gacagcuuuaauaaaauagagu

SEQ ID NO: 22324 - RNA, 21 nt, Artificial Sequence
  Synthetic
gaauucacguggggauagagu

SEQ ID NO: 22325 - RNA, 22 nt, Artificial Sequence
  Synthetic
ggaauucacguggggauagagu

SEQ ID NO: 22326 - RNA, 22 nt, Artificial Sequence
  Synthetic
guuuucuaaaaucugcuagagu

SEQ ID NO: 22327 - RNA, 20 nt, Artificial Sequence
  Synthetic
gauuuccuauuacuuagagu

SEQ ID NO: 22328 - RNA, 20 nt, Artificial Sequence
  Synthetic
gaucccaaauuucuuagagu

SEQ ID NO: 22329 - RNA, 19 nt, Artificial Sequence
  Synthetic
gauuucgaggccaacgagu

SEQ ID NO: 22330 - RNA, 19 nt, Artificial Sequence
  Synthetic
guauucucccgcaaggagu

SEQ ID NO: 22331 - RNA, 23 nt, Artificial Sequence
  Synthetic
gcaaguauucucccgcaaggagu

SEQ ID NO: 22332 - RNA, 24 nt, Artificial Sequence
  Synthetic
ggcaaguauucucccgcaaggagu

SEQ ID NO: 22333 - RNA, 20 nt, Artificial Sequence
  Synthetic
gcugggagaauggaaggagu

SEQ ID NO: 22334 - RNA, 23 nt, Artificial Sequence
  Synthetic
gcugcugggagaauggaaggagu

SEQ ID NO: 22335 - RNA, 24 nt, Artificial Sequence
  Synthetic
gauaauuuugcacaauuaaggagu

SEQ ID NO: 22336 - RNA, 20 nt, Artificial Sequence
  Synthetic
gaauuccaaauaugcggagu

SEQ ID NO: 22337 - RNA, 18 nt, Artificial Sequence
  Synthetic
guccauuaggaggggagu

SEQ ID NO: 22338 - RNA, 21 nt, Artificial Sequence
  Synthetic
gaaguccauuaggaggggagu

SEQ ID NO: 22339 - RNA, 23 nt, Artificial Sequence
  Synthetic
gacacagcccuugauaaaugagu

SEQ ID NO: 22340 - RNA, 18 nt, Artificial Sequence
  Synthetic
guugaugucuugaugagu

SEQ ID NO: 22341 - RNA, 23 nt, Artificial Sequence
  Synthetic
gaccuccguuucuccaucugagu

SEQ ID NO: 22342 - RNA, 24 nt, Artificial Sequence
  Synthetic
ggaccuccguuucuccaucugagu

SEQ ID NO: 22343 - RNA, 20 nt, Artificial Sequence
  Synthetic
gaugauuuaacucagugagu

SEQ ID NO: 22344 - RNA, 18 nt, Artificial Sequence
  Synthetic
guuugguccuuguugagu

SEQ ID NO: 22345 - RNA, 19 nt, Artificial Sequence
  Synthetic
gaggaggguaaaaaauagu

SEQ ID NO: 22346 - RNA, 20 nt, Artificial Sequence
  Synthetic
ggaggaggguaaaaaauagu

SEQ ID NO: 22347 - RNA, 22 nt, Artificial Sequence
  Synthetic
guggaggaggguaaaaaauagu

SEQ ID NO: 22348 - RNA, 24 nt, Artificial Sequence
  Synthetic
gaguggaggaggguaaaaaauagu

SEQ ID NO: 22349 - RNA, 22 nt, Artificial Sequence
  Synthetic
gauuauacuuaggcugaauagu

SEQ ID NO: 22350 - RNA, 21 nt, Artificial Sequence
  Synthetic
gucuuguuguaaaauaauagu

SEQ ID NO: 22351 - RNA, 20 nt, Artificial Sequence
  Synthetic
gcuucuacauauuuaauagu

SEQ ID NO: 22352 - RNA, 23 nt, Artificial Sequence
  Synthetic
guagcuucuacauauuuaauagu

SEQ ID NO: 22353 - RNA, 18 nt, Artificial Sequence
  Synthetic
gcucuucaugaauauagu

SEQ ID NO: 22354 - RNA, 23 nt, Artificial Sequence
  Synthetic
gcacagcucuucaugaauauagu

SEQ ID NO: 22355 - RNA, 24 nt, Artificial Sequence
  Synthetic
ggcacagcucuucaugaauauagu

SEQ ID NO: 22356 - RNA, 20 nt, Artificial Sequence
  Synthetic
gacaugagcccugauauagu

SEQ ID NO: 22357 - RNA, 21 nt, Artificial Sequence
  Synthetic
ggacaugagcccugauauagu

SEQ ID NO: 22358 - RNA, 21 nt, Artificial Sequence
  Synthetic
gaacaaaagauaauauauagu

SEQ ID NO: 22359 - RNA, 21 nt, Artificial Sequence
  Synthetic
gaauauaccacuuacuauagu

SEQ ID NO: 22360 - RNA, 19 nt, Artificial Sequence
  Synthetic
gcagcuuuuauucuauagu

SEQ ID NO: 22361 - RNA, 20 nt, Artificial Sequence
  Synthetic
guaacuuccaaauuuauagu

SEQ ID NO: 22362 - RNA, 22 nt, Artificial Sequence
  Synthetic
gcccugauauugacccgcuagu

SEQ ID NO: 22363 - RNA, 22 nt, Artificial Sequence
  Synthetic
gacaacuguaguggcugcuagu

SEQ ID NO: 22364 - RNA, 23 nt, Artificial Sequence
  Synthetic
guuuuuuuuaugaaaucucuagu

SEQ ID NO: 22365 - RNA, 18 nt, Artificial Sequence
  Synthetic
gcacauguuauaaguagu

SEQ ID NO: 22366 - RNA, 19 nt, Artificial Sequence
  Synthetic
ggcacauguuauaaguagu

SEQ ID NO: 22367 - RNA, 19 nt, Artificial Sequence
  Synthetic
gauggagggaaaauguagu

SEQ ID NO: 22368 - RNA, 20 nt, Artificial Sequence
  Synthetic
ggauggagggaaaauguagu

SEQ ID NO: 22369 - RNA, 24 nt, Artificial Sequence
  Synthetic
gccaggauggagggaaaauguagu

SEQ ID NO: 22370 - RNA, 18 nt, Artificial Sequence
  Synthetic
gaaauauauuauuguagu

SEQ ID NO: 22371 - RNA, 19 nt, Artificial Sequence
  Synthetic
guaugagaaaauauuuagu

SEQ ID NO: 22372 - RNA, 20 nt, Artificial Sequence
  Synthetic
gguaugagaaaauauuuagu

SEQ ID NO: 22373 - RNA, 24 nt, Artificial Sequence
  Synthetic
gucugguaugagaaaauauuuagu

SEQ ID NO: 22374 - RNA, 20 nt, Artificial Sequence
  Synthetic
gcuguaaggcuaauuuuagu

SEQ ID NO: 22375 - RNA, 21 nt, Artificial Sequence
  Synthetic
ggcuguaaggcuaauuuuagu

SEQ ID NO: 22376 - RNA, 19 nt, Artificial Sequence
  Synthetic
gcuagcuguucauuuuagu

SEQ ID NO: 22377 - RNA, 20 nt, Artificial Sequence
  Synthetic
ggcuagcuguucauuuuagu

SEQ ID NO: 22378 - RNA, 23 nt, Artificial Sequence
  Synthetic
gcuggcuagcuguucauuuuagu

SEQ ID NO: 22379 - RNA, 21 nt, Artificial Sequence
  Synthetic
gauagacuugaaaguuuuagu

SEQ ID NO: 22380 - RNA, 22 nt, Artificial Sequence
  Synthetic
ggauagacuugaaaguuuuagu

SEQ ID NO: 22381 - RNA, 20 nt, Artificial Sequence
  Synthetic
guccuuugguaguuuuuagu

SEQ ID NO: 22382 - RNA, 22 nt, Artificial Sequence
  Synthetic
gaguccuuugguaguuuuuagu

SEQ ID NO: 22383 - RNA, 20 nt, Artificial Sequence
  Synthetic
gcuauugaggagaaaaacgu

SEQ ID NO: 22384 - RNA, 18 nt, Artificial Sequence
  Synthetic
gaauaguaacaacaacgu

SEQ ID NO: 22385 - RNA, 24 nt, Artificial Sequence
  Synthetic
gacacagaauaguaacaacaacgu

SEQ ID NO: 22386 - RNA, 21 nt, Artificial Sequence
  Synthetic
gaaucuuagaaucaagaacgu

SEQ ID NO: 22387 - RNA, 21 nt, Artificial Sequence
  Synthetic
gaaaaaaacaacagggaacgu

SEQ ID NO: 22388 - RNA, 20 nt, Artificial Sequence
  Synthetic
guuacuaauuugaauaacgu

SEQ ID NO: 22389 - RNA, 21 nt, Artificial Sequence
  Synthetic
gguuacuaauuugaauaacgu

SEQ ID NO: 22390 - RNA, 24 nt, Artificial Sequence
  Synthetic
gauaaaauucuauagugauaacgu

SEQ ID NO: 22391 - RNA, 20 nt, Artificial Sequence
  Synthetic
guaugaauuauucuuaacgu

SEQ ID NO: 22392 - RNA, 21 nt, Artificial Sequence
  Synthetic
gguaugaauuauucuuaacgu

SEQ ID NO: 22393 - RNA, 24 nt, Artificial Sequence
  Synthetic
guuacuuaagucaggaauucacgu

SEQ ID NO: 22394 - RNA, 20 nt, Artificial Sequence
  Synthetic
gaaguuagaggguaagacgu

SEQ ID NO: 22395 - RNA, 21 nt, Artificial Sequence
  Synthetic
ggaaguuagaggguaagacgu

SEQ ID NO: 22396 - RNA, 22 nt, Artificial Sequence
  Synthetic
gggaaguuagaggguaagacgu

SEQ ID NO: 22397 - RNA, 24 nt, Artificial Sequence
  Synthetic
gagggaaguuagaggguaagacgu

SEQ ID NO: 22398 - RNA, 21 nt, Artificial Sequence
  Synthetic
gauacugugucaauauuacgu

SEQ ID NO: 22399 - RNA, 21 nt, Artificial Sequence
  Synthetic
gcuuuucuuuacaucuuacgu

SEQ ID NO: 22400 - RNA, 24 nt, Artificial Sequence
  Synthetic
guacaaccauucauuguugaccgu

SEQ ID NO: 22401 - RNA, 23 nt, Artificial Sequence
  Synthetic
gcauuuggauuaaugaauuccgu

SEQ ID NO: 22402 - RNA, 24 nt, Artificial Sequence
  Synthetic
ggcauuuggauuaaugaauuccgu

SEQ ID NO: 22403 - RNA, 21 nt, Artificial Sequence
  Synthetic
guaaacagauuuuuaaagcgu

SEQ ID NO: 22404 - RNA, 22 nt, Artificial Sequence
  Synthetic
gguaaacagauuuuuaaagcgu

SEQ ID NO: 22405 - RNA, 23 nt, Artificial Sequence
  Synthetic
ggguaaacagauuuuuaaagcgu

SEQ ID NO: 22406 - RNA, 22 nt, Artificial Sequence
  Synthetic
gcacuaaacaguagccaggcgu

SEQ ID NO: 22407 - RNA, 23 nt, Artificial Sequence
  Synthetic
guucuccaaagggauuuaggcgu

SEQ ID NO: 22408 - RNA, 19 nt, Artificial Sequence
  Synthetic
gauacaucguguugugcgu

SEQ ID NO: 22409 - RNA, 20 nt, Artificial Sequence
  Synthetic
gcugcaggaaaguuaaucgu

SEQ ID NO: 22410 - RNA, 18 nt, Artificial Sequence
  Synthetic
guauuugcaacuucucgu

SEQ ID NO: 22411 - RNA, 19 nt, Artificial Sequence
  Synthetic
gguauuugcaacuucucgu

SEQ ID NO: 22412 - RNA, 21 nt, Artificial Sequence
  Synthetic
gauaaucaaauucaaggucgu

SEQ ID NO: 22413 - RNA, 22 nt, Artificial Sequence
  Synthetic
gcaauuauuuuguguuaaaggu

SEQ ID NO: 22414 - RNA, 22 nt, Artificial Sequence
  Synthetic
gcccuuagcucauuaugaaggu

SEQ ID NO: 22415 - RNA, 22 nt, Artificial Sequence
  Synthetic
gaaaacugcaggaggauaaggu

SEQ ID NO: 22416 - RNA, 22 nt, Artificial Sequence
  Synthetic
gaccaacuaaccaaaguaaggu

SEQ ID NO: 22417 - RNA, 19 nt, Artificial Sequence
  Synthetic
gucaacccacuuuuaaggu

SEQ ID NO: 22418 - RNA, 20 nt, Artificial Sequence
  Synthetic
ggucaacccacuuuuaaggu

SEQ ID NO: 22419 - RNA, 22 nt, Artificial Sequence
  Synthetic
guggucaacccacuuuuaaggu

SEQ ID NO: 22420 - RNA, 24 nt, Artificial Sequence
  Synthetic
gaguggucaacccacuuuuaaggu

SEQ ID NO: 22421 - RNA, 18 nt, Artificial Sequence
  Synthetic
ggagagcaggaaacaggu

SEQ ID NO: 22422 - RNA, 19 nt, Artificial Sequence
  Synthetic
gggagagcaggaaacaggu

SEQ ID NO: 22423 - RNA, 20 nt, Artificial Sequence
  Synthetic
ggggagagcaggaaacaggu

SEQ ID NO: 22424 - RNA, 22 nt, Artificial Sequence
  Synthetic
gcuuccggguagcugaacaggu

SEQ ID NO: 22425 - RNA, 24 nt, Artificial Sequence
  Synthetic
gagcuuccggguagcugaacaggu

SEQ ID NO: 22426 - RNA, 18 nt, Artificial Sequence
  Synthetic
gaaaauacucccacaggu

SEQ ID NO: 22427 - RNA, 24 nt, Artificial Sequence
  Synthetic
gaauuagaaaauacucccacaggu

SEQ ID NO: 22428 - RNA, 20 nt, Artificial Sequence
  Synthetic
gcuuaagccagaagacaggu

SEQ ID NO: 22429 - RNA, 21 nt, Artificial Sequence
  Synthetic
guuuauuacuaugggacaggu

SEQ ID NO: 22430 - RNA, 23 nt, Artificial Sequence
  Synthetic
gcagaaacagaaaugccucaggu

SEQ ID NO: 22431 - RNA, 18 nt, Artificial Sequence
  Synthetic
gcuucugaauccucaggu

SEQ ID NO: 22432 - RNA, 22 nt, Artificial Sequence
  Synthetic
guaaggaauuacauagagaggu

SEQ ID NO: 22433 - RNA, 22 nt, Artificial Sequence
  Synthetic
gcucuuacaaucaguuagaggu

SEQ ID NO: 22434 - RNA, 24 nt, Artificial Sequence
  Synthetic
gugcucuuacaaucaguuagaggu

SEQ ID NO: 22435 - RNA, 18 nt, Artificial Sequence
  Synthetic
ggaaaugccuuuagaggu

SEQ ID NO: 22436 - RNA, 20 nt, Artificial Sequence
  Synthetic
gcaugcuacaccaaggaggu

SEQ ID NO: 22437 - RNA, 21 nt, Artificial Sequence
  Synthetic
guacuaacucccauaggaggu

SEQ ID NO: 22438 - RNA, 24 nt, Artificial Sequence
  Synthetic
gauguacuaacucccauaggaggu

SEQ ID NO: 22439 - RNA, 20 nt, Artificial Sequence
  Synthetic
gaaugaaaguuauaggaggu

SEQ ID NO: 22440 - RNA, 24 nt, Artificial Sequence
  Synthetic
gaaagaaugaaaguuauaggaggu

SEQ ID NO: 22441 - RNA, 23 nt, Artificial Sequence
  Synthetic
gaugggaagggucguggggaggu

SEQ ID NO: 22442 - RNA, 24 nt, Artificial Sequence
  Synthetic
ggaugggaagggucguggggaggu

SEQ ID NO: 22443 - RNA, 18 nt, Artificial Sequence
  Synthetic
gccaccgucuguggaggu

SEQ ID NO: 22444 - RNA, 22 nt, Artificial Sequence
  Synthetic
gacuuuuggagaauuuggaggu

SEQ ID NO: 22445 - RNA, 24 nt, Artificial Sequence
  Synthetic
gagacuuuuggagaauuuggaggu

SEQ ID NO: 22446 - RNA, 20 nt, Artificial Sequence
  Synthetic
gauguaaacaaaggugaggu

SEQ ID NO: 22447 - RNA, 22 nt, Artificial Sequence
  Synthetic
gagauguaaacaaaggugaggu

SEQ ID NO: 22448 - RNA, 18 nt, Artificial Sequence
  Synthetic
gauuauaugugaauaggu

SEQ ID NO: 22449 - RNA, 19 nt, Artificial Sequence
  Synthetic
ggauuauaugugaauaggu

SEQ ID NO: 22450 - RNA, 19 nt, Artificial Sequence
  Synthetic
guggagguaggggauaggu

SEQ ID NO: 22451 - RNA, 24 nt, Artificial Sequence
  Synthetic
guuaauauucaaacacagcuaggu

SEQ ID NO: 22452 - RNA, 22 nt, Artificial Sequence
  Synthetic
guaaugccauaaaaaucuaggu

SEQ ID NO: 22453 - RNA, 23 nt, Artificial Sequence
  Synthetic
gguaaugccauaaaaaucuaggu

SEQ ID NO: 22454 - RNA, 22 nt, Artificial Sequence
  Synthetic
gaucaggcuuuucauaguaggu

SEQ ID NO: 22455 - RNA, 24 nt, Artificial Sequence
  Synthetic
gugaucaggcuuuucauaguaggu

SEQ ID NO: 22456 - RNA, 19 nt, Artificial Sequence
  Synthetic
gaaugaggagagauuaggu

SEQ ID NO: 22457 - RNA, 24 nt, Artificial Sequence
  Synthetic
gaaaugaaugaggagagauuaggu

SEQ ID NO: 22458 - RNA, 19 nt, Artificial Sequence
  Synthetic
guaggaauaaaaacacggu

SEQ ID NO: 22459 - RNA, 24 nt, Artificial Sequence
  Synthetic
gcacaguaggaauaaaaacacggu

SEQ ID NO: 22460 - RNA, 19 nt, Artificial Sequence
  Synthetic
gcaguuugccuggcacggu

SEQ ID NO: 22461 - RNA, 21 nt, Artificial Sequence
  Synthetic
gagcaguuugccuggcacggu

SEQ ID NO: 22462 - RNA, 23 nt, Artificial Sequence
  Synthetic
gagagcaguuugccuggcacggu

SEQ ID NO: 22463 - RNA, 19 nt, Artificial Sequence
  Synthetic
guuugcucuaugcuacggu

SEQ ID NO: 22464 - RNA, 24 nt, Artificial Sequence
  Synthetic
guaauguuugcucuaugcuacggu

SEQ ID NO: 22465 - RNA, 20 nt, Artificial Sequence
  Synthetic
gaaugaaagaguauuccggu

SEQ ID NO: 22466 - RNA, 22 nt, Artificial Sequence
  Synthetic
gugaaugaaagaguauuccggu

SEQ ID NO: 22467 - RNA, 19 nt, Artificial Sequence
  Synthetic
gagugcuaauggcaagggu

SEQ ID NO: 22468 - RNA, 24 nt, Artificial Sequence
  Synthetic
gcucagagugcuaauggcaagggu

SEQ ID NO: 22469 - RNA, 20 nt, Artificial Sequence
  Synthetic
gauuauuaaaugagaagggu

SEQ ID NO: 22470 - RNA, 21 nt, Artificial Sequence
  Synthetic
ggauuauuaaaugagaagggu

SEQ ID NO: 22471 - RNA, 19 nt, Artificial Sequence
  Synthetic
gaauauacauacgaagggu

SEQ ID NO: 22472 - RNA, 21 nt, Artificial Sequence
  Synthetic
gauaacuuauuauuuaagggu

SEQ ID NO: 22473 - RNA, 18 nt, Artificial Sequence
  Synthetic
ggguaaauguagcagggu

SEQ ID NO: 22474 - RNA, 23 nt, Artificial Sequence
  Synthetic
guucaggguaaauguagcagggu

SEQ ID NO: 22475 - RNA, 21 nt, Artificial Sequence
  Synthetic
gcccauaaaaaugaggagggu

SEQ ID NO: 22476 - RNA, 22 nt, Artificial Sequence
  Synthetic
ggcccauaaaaaugaggagggu

SEQ ID NO: 22477 - RNA, 21 nt, Artificial Sequence
  Synthetic
gauuugacaaaaauggagggu

SEQ ID NO: 22478 - RNA, 22 nt, Artificial Sequence
  Synthetic
ggauuugacaaaaauggagggu

SEQ ID NO: 22479 - RNA, 23 nt, Artificial Sequence
  Synthetic
gggauuugacaaaaauggagggu

SEQ ID NO: 22480 - RNA, 20 nt, Artificial Sequence
  Synthetic
gcagagccaugaugaggggu

SEQ ID NO: 22481 - RNA, 23 nt, Artificial Sequence
  Synthetic
guuaucaauaauugccuaggggu

SEQ ID NO: 22482 - RNA, 18 nt, Artificial Sequence
  Synthetic
gaaggauaaagugggggu

SEQ ID NO: 22483 - RNA, 23 nt, Artificial Sequence
  Synthetic
gaaaugaaggauaaagugggggu

SEQ ID NO: 22484 - RNA, 22 nt, Artificial Sequence
  Synthetic
gcuuacuauguuucacuggggu

SEQ ID NO: 22485 - RNA, 24 nt, Artificial Sequence
  Synthetic
gugcuuacuauguuucacuggggu

SEQ ID NO: 22486 - RNA, 22 nt, Artificial Sequence
  Synthetic
gcauuucugacuauucuggggu

SEQ ID NO: 22487 - RNA, 22 nt, Artificial Sequence
  Synthetic
gcuauuugguuggggguggggu

SEQ ID NO: 22488 - RNA, 18 nt, Artificial Sequence
  Synthetic
gacauggguuacaugggu

SEQ ID NO: 22489 - RNA, 20 nt, Artificial Sequence
  Synthetic
gaacuuaguuagauaugggu

SEQ ID NO: 22490 - RNA, 22 nt, Artificial Sequence
  Synthetic
gauauaauaaaugaaacugggu

SEQ ID NO: 22491 - RNA, 24 nt, Artificial Sequence
  Synthetic
gugauauaauaaaugaaacugggu

SEQ ID NO: 22492 - RNA, 23 nt, Artificial Sequence
  Synthetic
gcaauacaaugagccugcugggu

SEQ ID NO: 22493 - RNA, 18 nt, Artificial Sequence
  Synthetic
guaugauggaaucugggu

SEQ ID NO: 22494 - RNA, 22 nt, Artificial Sequence
  Synthetic
gcuuguaugauggaaucugggu

SEQ ID NO: 22495 - RNA, 18 nt, Artificial Sequence
  Synthetic
gccuuucccugugugggu

SEQ ID NO: 22496 - RNA, 21 nt, Artificial Sequence
  Synthetic
gcagccuuucccugugugggu

SEQ ID NO: 22497 - RNA, 22 nt, Artificial Sequence
  Synthetic
ggcagccuuucccugugugggu

SEQ ID NO: 22498 - RNA, 23 nt, Artificial Sequence
  Synthetic
gcacacagcagaaucaauugggu

SEQ ID NO: 22499 - RNA, 18 nt, Artificial Sequence
  Synthetic
gaagggagagucuugggu

SEQ ID NO: 22500 - RNA, 20 nt, Artificial Sequence
  Synthetic
gagaagggagagucuugggu

SEQ ID NO: 22501 - RNA, 23 nt, Artificial Sequence
  Synthetic
gcagagaagggagagucuugggu

SEQ ID NO: 22502 - RNA, 24 nt, Artificial Sequence
  Synthetic
gauucuuuaucucuucauuugggu

SEQ ID NO: 22503 - RNA, 18 nt, Artificial Sequence
  Synthetic
gagucuuacuguuugggu

SEQ ID NO: 22504 - RNA, 18 nt, Artificial Sequence
  Synthetic
gcuaaguggagaaauggu

SEQ ID NO: 22505 - RNA, 24 nt, Artificial Sequence
  Synthetic
guacuagcuaaguggagaaauggu

SEQ ID NO: 22506 - RNA, 24 nt, Artificial Sequence
  Synthetic
gaaauauaaaggacaagcaauggu

SEQ ID NO: 22507 - RNA, 20 nt, Artificial Sequence
  Synthetic
gucagcagcaaaaccauggu

SEQ ID NO: 22508 - RNA, 19 nt, Artificial Sequence
  Synthetic
gcuucucaagagccauggu

SEQ ID NO: 22509 - RNA, 21 nt, Artificial Sequence
  Synthetic
gacuugaaugguuugcauggu

SEQ ID NO: 22510 - RNA, 18 nt, Artificial Sequence
  Synthetic
guucuagagcaugauggu

SEQ ID NO: 22511 - RNA, 21 nt, Artificial Sequence
  Synthetic
gauguucuagagcaugauggu

SEQ ID NO: 22512 - RNA, 24 nt, Artificial Sequence
  Synthetic
gcugauguucuagagcaugauggu

SEQ ID NO: 22513 - RNA, 24 nt, Artificial Sequence
  Synthetic
guuacaugaauaacuugugauggu

SEQ ID NO: 22514 - RNA, 20 nt, Artificial Sequence
  Synthetic
gaacaagaaucaucuauggu

SEQ ID NO: 22515 - RNA, 23 nt, Artificial Sequence
  Synthetic
gaagaacaagaaucaucuauggu

SEQ ID NO: 22516 - RNA, 22 nt, Artificial Sequence
  Synthetic
guuaucuucccaaaaguauggu

SEQ ID NO: 22517 - RNA, 24 nt, Artificial Sequence
  Synthetic
guguuaucuucccaaaaguauggu

SEQ ID NO: 22518 - RNA, 18 nt, Artificial Sequence
  Synthetic
ggaggcaaaagguauggu

SEQ ID NO: 22519 - RNA, 24 nt, Artificial Sequence
  Synthetic
gccucuggaggcaaaagguauggu

SEQ ID NO: 22520 - RNA, 19 nt, Artificial Sequence
  Synthetic
gaucuaauauuuuuauggu

SEQ ID NO: 22521 - RNA, 20 nt, Artificial Sequence
  Synthetic
ggaucuaauauuuuuauggu

SEQ ID NO: 22522 - RNA, 21 nt, Artificial Sequence
  Synthetic
gggaucuaauauuuuuauggu

SEQ ID NO: 22523 - RNA, 23 nt, Artificial Sequence
  Synthetic
guuaccgaaaggguuuuacuggu

SEQ ID NO: 22524 - RNA, 18 nt, Artificial Sequence
  Synthetic
gagaaauacagaccuggu

SEQ ID NO: 22525 - RNA, 19 nt, Artificial Sequence
  Synthetic
guaauaaaugcugccuggu

SEQ ID NO: 22526 - RNA, 23 nt, Artificial Sequence
  Synthetic
guuuuucuugucuuucagcuggu

SEQ ID NO: 22527 - RNA, 20 nt, Artificial Sequence
  Synthetic
gaccucaugcccuagcuggu

SEQ ID NO: 22528 - RNA, 19 nt, Artificial Sequence
  Synthetic
gagggcugaacuugcuggu

SEQ ID NO: 22529 - RNA, 22 nt, Artificial Sequence
  Synthetic
gaagagggcugaacuugcuggu

SEQ ID NO: 22530 - RNA, 23 nt, Artificial Sequence
  Synthetic
guuccucaucauaccacucuggu

SEQ ID NO: 22531 - RNA, 24 nt, Artificial Sequence
  Synthetic
gguuccucaucauaccacucuggu

SEQ ID NO: 22532 - RNA, 18 nt, Artificial Sequence
  Synthetic
gguuacagacugucuggu

SEQ ID NO: 22533 - RNA, 20 nt, Artificial Sequence
  Synthetic
gauuguauggccugucuggu

SEQ ID NO: 22534 - RNA, 21 nt, Artificial Sequence
  Synthetic
ggauuguauggccugucuggu

SEQ ID NO: 22535 - RNA, 18 nt, Artificial Sequence
  Synthetic
gauuuuguucuuucuggu

SEQ ID NO: 22536 - RNA, 20 nt, Artificial Sequence
  Synthetic
gccauaaauaaggaaguggu

SEQ ID NO: 22537 - RNA, 19 nt, Artificial Sequence
  Synthetic
gccccgaaaugguaguggu

SEQ ID NO: 22538 - RNA, 24 nt, Artificial Sequence
  Synthetic
guauagccccgaaaugguaguggu

SEQ ID NO: 22539 - RNA, 20 nt, Artificial Sequence
  Synthetic
guaaugacaggaaacguggu

SEQ ID NO: 22540 - RNA, 23 nt, Artificial Sequence
  Synthetic
gcuguaaugacaggaaacguggu

SEQ ID NO: 22541 - RNA, 18 nt, Artificial Sequence
  Synthetic
ggaagauuuauagguggu

SEQ ID NO: 22542 - RNA, 24 nt, Artificial Sequence
  Synthetic
gaaccaggaagauuuauagguggu

SEQ ID NO: 22543 - RNA, 20 nt, Artificial Sequence
  Synthetic
guaaccucauagauuguggu

SEQ ID NO: 22544 - RNA, 18 nt, Artificial Sequence
  Synthetic
guggaaguuuaaauuggu

SEQ ID NO: 22545 - RNA, 20 nt, Artificial Sequence
  Synthetic
gaguggaaguuuaaauuggu

SEQ ID NO: 22546 - RNA, 20 nt, Artificial Sequence
  Synthetic
guaaaguguaaagaauuggu

SEQ ID NO: 22547 - RNA, 24 nt, Artificial Sequence
  Synthetic
gucccuaacaggcaacggauuggu

SEQ ID NO: 22548 - RNA, 18 nt, Artificial Sequence
  Synthetic
gaucaagcacguauuggu

SEQ ID NO: 22549 - RNA, 21 nt, Artificial Sequence
  Synthetic
gaaaguacauaggaccuuggu

SEQ ID NO: 22550 - RNA, 22 nt, Artificial Sequence
  Synthetic
ggaaaguacauaggaccuuggu

SEQ ID NO: 22551 - RNA, 24 nt, Artificial Sequence
  Synthetic
guggaaaguacauaggaccuuggu

SEQ ID NO: 22552 - RNA, 19 nt, Artificial Sequence
  Synthetic
gcaguuucuucugcuuggu

SEQ ID NO: 22553 - RNA, 23 nt, Artificial Sequence
  Synthetic
guaagcaguuucuucugcuuggu

SEQ ID NO: 22554 - RNA, 18 nt, Artificial Sequence
  Synthetic
gguugaaaagaaguuggu

SEQ ID NO: 22555 - RNA, 20 nt, Artificial Sequence
  Synthetic
gugguugaaaagaaguuggu

SEQ ID NO: 22556 - RNA, 24 nt, Artificial Sequence
  Synthetic
gacagugguugaaaagaaguuggu

SEQ ID NO: 22557 - RNA, 24 nt, Artificial Sequence
  Synthetic
gacaauuauuguuuagugguuggu

SEQ ID NO: 22558 - RNA, 18 nt, Artificial Sequence
  Synthetic
guuaacauuaacuuuggu

SEQ ID NO: 22559 - RNA, 19 nt, Artificial Sequence
  Synthetic
gguuaacauuaacuuuggu

SEQ ID NO: 22560 - RNA, 21 nt, Artificial Sequence
  Synthetic
gugguuaacauuaacuuuggu

SEQ ID NO: 22561 - RNA, 18 nt, Artificial Sequence
  Synthetic
gccagccacuucuuuggu

SEQ ID NO: 22562 - RNA, 18 nt, Artificial Sequence
  Synthetic
gcacgucuaagguuuggu

SEQ ID NO: 22563 - RNA, 19 nt, Artificial Sequence
  Synthetic
gagucauagaaaaaaaugu

SEQ ID NO: 22564 - RNA, 20 nt, Artificial Sequence
  Synthetic
ggagucauagaaaaaaaugu

SEQ ID NO: 22565 - RNA, 22 nt, Artificial Sequence
  Synthetic
gaggagucauagaaaaaaaugu

SEQ ID NO: 22566 - RNA, 23 nt, Artificial Sequence
  Synthetic
ggaggagucauagaaaaaaaugu

SEQ ID NO: 22567 - RNA, 22 nt, Artificial Sequence
  Synthetic
gaaaaauagugagacaaaaugu

SEQ ID NO: 22568 - RNA, 24 nt, Artificial Sequence
  Synthetic
gagaaaaauagugagacaaaaugu

SEQ ID NO: 22569 - RNA, 22 nt, Artificial Sequence
  Synthetic
gauaaacaaauguacaaaaugu

SEQ ID NO: 22570 - RNA, 23 nt, Artificial Sequence
  Synthetic
ggauaaacaaauguacaaaaugu

SEQ ID NO: 22571 - RNA, 23 nt, Artificial Sequence
  Synthetic
gucuuuuaggacuuugaaaaugu

SEQ ID NO: 22572 - RNA, 24 nt, Artificial Sequence
  Synthetic
ggucuuuuaggacuuugaaaaugu

SEQ ID NO: 22573 - RNA, 21 nt, Artificial Sequence
  Synthetic
gaauugccuacccuaaaaugu

SEQ ID NO: 22574 - RNA, 22 nt, Artificial Sequence
  Synthetic
ggaauugccuacccuaaaaugu

SEQ ID NO: 22575 - RNA, 22 nt, Artificial Sequence
  Synthetic
gcuuaaucagcuaaguaaaugu

SEQ ID NO: 22576 - RNA, 19 nt, Artificial Sequence
  Synthetic
gacagauuacuaucaaugu

SEQ ID NO: 22577 - RNA, 21 nt, Artificial Sequence
  Synthetic
guacacuauugauuucaaugu

SEQ ID NO: 22578 - RNA, 22 nt, Artificial Sequence
  Synthetic
gguacacuauugauuucaaugu

SEQ ID NO: 22579 - RNA, 18 nt, Artificial Sequence
  Synthetic
gcauuuggaaaggaaugu

SEQ ID NO: 22580 - RNA, 22 nt, Artificial Sequence
  Synthetic
gaaugcauuuggaaaggaaugu

SEQ ID NO: 22581 - RNA, 18 nt, Artificial Sequence
  Synthetic
ggccaggucauugaaugu

SEQ ID NO: 22582 - RNA, 20 nt, Artificial Sequence
  Synthetic
gaggccaggucauugaaugu

SEQ ID NO: 22583 - RNA, 22 nt, Artificial Sequence
  Synthetic
gcagauaugagaacuauaaugu

SEQ ID NO: 22584 - RNA, 18 nt, Artificial Sequence
  Synthetic
ggcauacauuucuaaugu

SEQ ID NO: 22585 - RNA, 20 nt, Artificial Sequence
  Synthetic
gucaauccaccucuuaaugu

SEQ ID NO: 22586 - RNA, 18 nt, Artificial Sequence
  Synthetic
gguaaaugcucaacaugu

SEQ ID NO: 22587 - RNA, 22 nt, Artificial Sequence
  Synthetic
gccagguaaaugcucaacaugu

SEQ ID NO: 22588 - RNA, 18 nt, Artificial Sequence
  Synthetic
gaguugaugaagacaugu

SEQ ID NO: 22589 - RNA, 23 nt, Artificial Sequence
  Synthetic
gauuauuuacauauauuacaugu

SEQ ID NO: 22590 - RNA, 19 nt, Artificial Sequence
  Synthetic
gaacagcagcguaccaugu

SEQ ID NO: 22591 - RNA, 18 nt, Artificial Sequence
  Synthetic
ggaaauuugaaagcaugu

SEQ ID NO: 22592 - RNA, 19 nt, Artificial Sequence
  Synthetic
gggaaauuugaaagcaugu

SEQ ID NO: 22593 - RNA, 24 nt, Artificial Sequence
  Synthetic
gcaaauugcaagugcagagcaugu

SEQ ID NO: 22594 - RNA, 22 nt, Artificial Sequence
  Synthetic
guuaagaacacaaggagcaugu

SEQ ID NO: 22595 - RNA, 24 nt, Artificial Sequence
  Synthetic
gcaaauuaagcuaccucugcaugu

SEQ ID NO: 22596 - RNA, 21 nt, Artificial Sequence
  Synthetic
guuauuuucagaacaagaugu

SEQ ID NO: 22597 - RNA, 20 nt, Artificial Sequence
  Synthetic
gacggaguggugcaagaugu

SEQ ID NO: 22598 - RNA, 22 nt, Artificial Sequence
  Synthetic
gagacggaguggugcaagaugu

SEQ ID NO: 22599 - RNA, 24 nt, Artificial Sequence
  Synthetic
gugagacggaguggugcaagaugu

SEQ ID NO: 22600 - RNA, 21 nt, Artificial Sequence
  Synthetic
gcuauaagcacauugggaugu

SEQ ID NO: 22601 - RNA, 24 nt, Artificial Sequence
  Synthetic
guagcuauaagcacauugggaugu

SEQ ID NO: 22602 - RNA, 21 nt, Artificial Sequence
  Synthetic
guuuugagcuauuauggaugu

SEQ ID NO: 22603 - RNA, 23 nt, Artificial Sequence
  Synthetic
gaaauauuuuaaaauacugaugu

SEQ ID NO: 22604 - RNA, 20 nt, Artificial Sequence
  Synthetic
guauaaauaaccuuauaugu

SEQ ID NO: 22605 - RNA, 21 nt, Artificial Sequence
  Synthetic
gguauaaauaaccuuauaugu

SEQ ID NO: 22606 - RNA, 24 nt, Artificial Sequence
  Synthetic
gauuuccuugagcacucacuaugu

SEQ ID NO: 22607 - RNA, 22 nt, Artificial Sequence
  Synthetic
gauauaccauaagaggcuaugu

SEQ ID NO: 22608 - RNA, 21 nt, Artificial Sequence
  Synthetic
guuucccauuuuaggcuaugu

SEQ ID NO: 22609 - RNA, 18 nt, Artificial Sequence
  Synthetic
gaagcuuucaaucuaugu

SEQ ID NO: 22610 - RNA, 19 nt, Artificial Sequence
  Synthetic
ggaagcuuucaaucuaugu

SEQ ID NO: 22611 - RNA, 21 nt, Artificial Sequence
  Synthetic
guaccacguuccucaguaugu

SEQ ID NO: 22612 - RNA, 22 nt, Artificial Sequence
  Synthetic
gguaccacguuccucaguaugu

SEQ ID NO: 22613 - RNA, 18 nt, Artificial Sequence
  Synthetic
gauaaauauuagguaugu

SEQ ID NO: 22614 - RNA, 21 nt, Artificial Sequence
  Synthetic
gaauaguauugccugguaugu

SEQ ID NO: 22615 - RNA, 24 nt, Artificial Sequence
  Synthetic
gcugaauaguauugccugguaugu

SEQ ID NO: 22616 - RNA, 23 nt, Artificial Sequence
  Synthetic
gucucaugguccaaacuguaugu

SEQ ID NO: 22617 - RNA, 18 nt, Artificial Sequence
  Synthetic
gaacacacguguguaugu

SEQ ID NO: 22618 - RNA, 19 nt, Artificial Sequence
  Synthetic
ggaacacacguguguaugu

SEQ ID NO: 22619 - RNA, 20 nt, Artificial Sequence
  Synthetic
gaacuaugaaagaauuaugu

SEQ ID NO: 22620 - RNA, 24 nt, Artificial Sequence
  Synthetic
gaaagaacuaugaaagaauuaugu

SEQ ID NO: 22621 - RNA, 19 nt, Artificial Sequence
  Synthetic
gaaagaaaagacauuaugu

SEQ ID NO: 22622 - RNA, 20 nt, Artificial Sequence
  Synthetic
guauacuucaaugauuaugu

SEQ ID NO: 22623 - RNA, 21 nt, Artificial Sequence
  Synthetic
gguauacuucaaugauuaugu

SEQ ID NO: 22624 - RNA, 22 nt, Artificial Sequence
  Synthetic
ggguauacuucaaugauuaugu

SEQ ID NO: 22625 - RNA, 23 nt, Artificial Sequence
  Synthetic
gccuucuuauaucccuauuaugu

SEQ ID NO: 22626 - RNA, 24 nt, Artificial Sequence
  Synthetic
ggccuucuuauaucccuauuaugu

SEQ ID NO: 22627 - RNA, 18 nt, Artificial Sequence
  Synthetic
gcuuucagaguauuaugu

SEQ ID NO: 22628 - RNA, 19 nt, Artificial Sequence
  Synthetic
ggcuuucagaguauuaugu

SEQ ID NO: 22629 - RNA, 20 nt, Artificial Sequence
  Synthetic
gggcuuucagaguauuaugu

SEQ ID NO: 22630 - RNA, 22 nt, Artificial Sequence
  Synthetic
gagggcuuucagaguauuaugu

SEQ ID NO: 22631 - RNA, 21 nt, Artificial Sequence
  Synthetic
guuaaauguuaaaacuuaugu

SEQ ID NO: 22632 - RNA, 18 nt, Artificial Sequence
  Synthetic
guuuuaucuauguuaugu

SEQ ID NO: 22633 - RNA, 19 nt, Artificial Sequence
  Synthetic
gauagugaaggauuuaugu

SEQ ID NO: 22634 - RNA, 20 nt, Artificial Sequence
  Synthetic
ggauagugaaggauuuaugu

SEQ ID NO: 22635 - RNA, 22 nt, Artificial Sequence
  Synthetic
gaggauagugaaggauuuaugu

SEQ ID NO: 22636 - RNA, 24 nt, Artificial Sequence
  Synthetic
gagaggauagugaaggauuuaugu

SEQ ID NO: 22637 - RNA, 21 nt, Artificial Sequence
  Synthetic
gauuuaaauuuuaaaaacugu

SEQ ID NO: 22638 - RNA, 20 nt, Artificial Sequence
  Synthetic
gauaagaagaggaaaacugu

SEQ ID NO: 22639 - RNA, 18 nt, Artificial Sequence
  Synthetic
gacuccacugaaaacugu

SEQ ID NO: 22640 - RNA, 19 nt, Artificial Sequence
  Synthetic
ggacuccacugaaaacugu

SEQ ID NO: 22641 - RNA, 18 nt, Artificial Sequence
  Synthetic
gauuacuuaaaccacugu

SEQ ID NO: 22642 - RNA, 19 nt, Artificial Sequence
  Synthetic
ggauuacuuaaaccacugu

SEQ ID NO: 22643 - RNA, 21 nt, Artificial Sequence
  Synthetic
gguagguacuaugcucacugu

SEQ ID NO: 22644 - RNA, 20 nt, Artificial Sequence
  Synthetic
gcaugcucauucccuacugu

SEQ ID NO: 22645 - RNA, 20 nt, Artificial Sequence
  Synthetic
guauccuugagucuuacugu

SEQ ID NO: 22646 - RNA, 21 nt, Artificial Sequence
  Synthetic
gguauccuugagucuuacugu

SEQ ID NO: 22647 - RNA, 18 nt, Artificial Sequence
  Synthetic
gcacaugucuaaaccugu

SEQ ID NO: 22648 - RNA, 19 nt, Artificial Sequence
  Synthetic
ggcacaugucuaaaccugu

SEQ ID NO: 22649 - RNA, 22 nt, Artificial Sequence
  Synthetic
gaaggcacaugucuaaaccugu

SEQ ID NO: 22650 - RNA, 23 nt, Artificial Sequence
  Synthetic
ggaaggcacaugucuaaaccugu

SEQ ID NO: 22651 - RNA, 22 nt, Artificial Sequence
  Synthetic
gcuucuggaauugccuaccugu

SEQ ID NO: 22652 - RNA, 23 nt, Artificial Sequence
  Synthetic
ggcuucuggaauugccuaccugu

SEQ ID NO: 22653 - RNA, 24 nt, Artificial Sequence
  Synthetic
gggcuucuggaauugccuaccugu

SEQ ID NO: 22654 - RNA, 19 nt, Artificial Sequence
  Synthetic
gagaucuuuucuccccugu

SEQ ID NO: 22655 - RNA, 24 nt, Artificial Sequence
  Synthetic
gaaaagagaucuuuucuccccugu

SEQ ID NO: 22656 - RNA, 19 nt, Artificial Sequence
  Synthetic
gccaaauaauauucccugu

SEQ ID NO: 22657 - RNA, 20 nt, Artificial Sequence
  Synthetic
ggccaaauaauauucccugu

SEQ ID NO: 22658 - RNA, 23 nt, Artificial Sequence
  Synthetic
gauacuugcuuaucuauuccugu

SEQ ID NO: 22659 - RNA, 24 nt, Artificial Sequence
  Synthetic
ggauacuugcuuaucuauuccugu

SEQ ID NO: 22660 - RNA, 18 nt, Artificial Sequence
  Synthetic
guuauuuccuguagcugu

SEQ ID NO: 22661 - RNA, 22 nt, Artificial Sequence
  Synthetic
gaucugaacugaguugcgcugu

SEQ ID NO: 22662 - RNA, 21 nt, Artificial Sequence
  Synthetic
guuauaucauacauaggcugu

SEQ ID NO: 22663 - RNA, 22 nt, Artificial Sequence
  Synthetic
gguuauaucauacauaggcugu

SEQ ID NO: 22664 - RNA, 18 nt, Artificial Sequence
  Synthetic
guaccaacuugcugcugu

SEQ ID NO: 22665 - RNA, 19 nt, Artificial Sequence
  Synthetic
gguaccaacuugcugcugu

SEQ ID NO: 22666 - RNA, 20 nt, Artificial Sequence
  Synthetic
gcagaauacuguucugcugu

SEQ ID NO: 22667 - RNA, 18 nt, Artificial Sequence
  Synthetic
gugcccucaaaaaucugu

SEQ ID NO: 22668 - RNA, 24 nt, Artificial Sequence
  Synthetic
gauuuagugcccucaaaaaucugu

SEQ ID NO: 22669 - RNA, 18 nt, Artificial Sequence
  Synthetic
gacagugccgugaucugu

SEQ ID NO: 22670 - RNA, 23 nt, Artificial Sequence
  Synthetic
gaacagacagugccgugaucugu

SEQ ID NO: 22671 - RNA, 18 nt, Artificial Sequence
  Synthetic
gaauuuuuaauugucugu

SEQ ID NO: 22672 - RNA, 20 nt, Artificial Sequence
  Synthetic
gagaauuuuuaauugucugu

SEQ ID NO: 22673 - RNA, 19 nt, Artificial Sequence
  Synthetic
gauuuuuaucugauucugu

SEQ ID NO: 22674 - RNA, 21 nt, Artificial Sequence
  Synthetic
gagauuuuuaucugauucugu

SEQ ID NO: 22675 - RNA, 22 nt, Artificial Sequence
  Synthetic
ggagauuuuuaucugauucugu

SEQ ID NO: 22676 - RNA, 18 nt, Artificial Sequence
  Synthetic
guaaauaaauccuucugu

SEQ ID NO: 22677 - RNA, 19 nt, Artificial Sequence
  Synthetic
gguaaauaaauccuucugu

SEQ ID NO: 22678 - RNA, 20 nt, Artificial Sequence
  Synthetic
gucugauuacuaccaagugu

SEQ ID NO: 22679 - RNA, 24 nt, Artificial Sequence
  Synthetic
gaaauuaaaagguuggucaagugu

SEQ ID NO: 22680 - RNA, 18 nt, Artificial Sequence
  Synthetic
gugcaaaagucuaagugu

SEQ ID NO: 22681 - RNA, 21 nt, Artificial Sequence
  Synthetic
guuagcacgugucuuaagugu

SEQ ID NO: 22682 - RNA, 22 nt, Artificial Sequence
  Synthetic
gguuagcacgugucuuaagugu

SEQ ID NO: 22683 - RNA, 23 nt, Artificial Sequence
  Synthetic
ggguuagcacgugucuuaagugu

SEQ ID NO: 22684 - RNA, 18 nt, Artificial Sequence
  Synthetic
gaaaaauagauacagugu

SEQ ID NO: 22685 - RNA, 23 nt, Artificial Sequence
  Synthetic
gaaaagaaaaauagauacagugu

SEQ ID NO: 22686 - RNA, 22 nt, Artificial Sequence
  Synthetic
gaaauaagauguuuuccagugu

SEQ ID NO: 22687 - RNA, 18 nt, Artificial Sequence
  Synthetic
ggcccaguaguugagugu

SEQ ID NO: 22688 - RNA, 20 nt, Artificial Sequence
  Synthetic
guggcccaguaguugagugu

SEQ ID NO: 22689 - RNA, 21 nt, Artificial Sequence
  Synthetic
gcucaugcuaugauucggugu

SEQ ID NO: 22690 - RNA, 22 nt, Artificial Sequence
  Synthetic
ggcucaugcuaugauucggugu

SEQ ID NO: 22691 - RNA, 18 nt, Artificial Sequence
  Synthetic
guaaaaaaaauauggugu

SEQ ID NO: 22692 - RNA, 23 nt, Artificial Sequence
  Synthetic
gaacaguaaaaaaaauauggugu

SEQ ID NO: 22693 - RNA, 21 nt, Artificial Sequence
  Synthetic
gauagauggccauuuuggugu

SEQ ID NO: 22694 - RNA, 22 nt, Artificial Sequence
  Synthetic
guuuauccuuaaacaaaugugu

SEQ ID NO: 22695 - RNA, 22 nt, Artificial Sequence
  Synthetic
gacuuuaugcucacaaaugugu

SEQ ID NO: 22696 - RNA, 18 nt, Artificial Sequence
  Synthetic
guuuugcuccaaaugugu

SEQ ID NO: 22697 - RNA, 20 nt, Artificial Sequence
  Synthetic
gaguuuugcuccaaaugugu

SEQ ID NO: 22698 - RNA, 22 nt, Artificial Sequence
  Synthetic
gugaguuuugcuccaaaugugu

SEQ ID NO: 22699 - RNA, 18 nt, Artificial Sequence
  Synthetic
gcaugcaugcccaugugu

SEQ ID NO: 22700 - RNA, 22 nt, Artificial Sequence
  Synthetic
guaugcaugcaugcccaugugu

SEQ ID NO: 22701 - RNA, 24 nt, Artificial Sequence
  Synthetic
gaauaaucaggacuuaugcugugu

SEQ ID NO: 22702 - RNA, 22 nt, Artificial Sequence
  Synthetic
gcaaauacaagaauuucugugu

SEQ ID NO: 22703 - RNA, 23 nt, Artificial Sequence
  Synthetic
guccaacugauuuuuuucugugu

SEQ ID NO: 22704 - RNA, 20 nt, Artificial Sequence
  Synthetic
gucaaaaacauccagugugu

SEQ ID NO: 22705 - RNA, 23 nt, Artificial Sequence
  Synthetic
gcacugaaugcugaauggugugu

SEQ ID NO: 22706 - RNA, 18 nt, Artificial Sequence
  Synthetic
guuguuuccugcuugugu

SEQ ID NO: 22707 - RNA, 22 nt, Artificial Sequence
  Synthetic
gacuguuguuuccugcuugugu

SEQ ID NO: 22708 - RNA, 19 nt, Artificial Sequence
  Synthetic
gaauuaauucuuaaauugu

SEQ ID NO: 22709 - RNA, 22 nt, Artificial Sequence
  Synthetic
guugaauuaauucuuaaauugu

SEQ ID NO: 22710 - RNA, 19 nt, Artificial Sequence
  Synthetic
gagauaaugaggcaauugu

SEQ ID NO: 22711 - RNA, 21 nt, Artificial Sequence
  Synthetic
gagagauaaugaggcaauugu

SEQ ID NO: 22712 - RNA, 18 nt, Artificial Sequence
  Synthetic
gaacaggaagucaauugu

SEQ ID NO: 22713 - RNA, 19 nt, Artificial Sequence
  Synthetic
ggaacaggaagucaauugu

SEQ ID NO: 22714 - RNA, 22 nt, Artificial Sequence
  Synthetic
gaaggaacaggaagucaauugu

SEQ ID NO: 22715 - RNA, 23 nt, Artificial Sequence
  Synthetic
ggaaggaacaggaagucaauugu

SEQ ID NO: 22716 - RNA, 19 nt, Artificial Sequence
  Synthetic
guauauaaugacuaauugu

SEQ ID NO: 22717 - RNA, 23 nt, Artificial Sequence
  Synthetic
gccuguauauaaugacuaauugu

SEQ ID NO: 22718 - RNA, 18 nt, Artificial Sequence
  Synthetic
ggguacaaucugcauugu

SEQ ID NO: 22719 - RNA, 19 nt, Artificial Sequence
  Synthetic
gggguacaaucugcauugu

SEQ ID NO: 22720 - RNA, 20 nt, Artificial Sequence
  Synthetic
ggggguacaaucugcauugu

SEQ ID NO: 22721 - RNA, 20 nt, Artificial Sequence
  Synthetic
guaaagaaaauacucauugu

SEQ ID NO: 22722 - RNA, 21 nt, Artificial Sequence
  Synthetic
guucuuuuuuuucuucauugu

SEQ ID NO: 22723 - RNA, 18 nt, Artificial Sequence
  Synthetic
gauuagcaucauuauugu

SEQ ID NO: 22724 - RNA, 19 nt, Artificial Sequence
  Synthetic
ggauuagcaucauuauugu

SEQ ID NO: 22725 - RNA, 23 nt, Artificial Sequence
  Synthetic
gaacggauuagcaucauuauugu

SEQ ID NO: 22726 - RNA, 21 nt, Artificial Sequence
  Synthetic
gauuaccgaaaacagacuugu

SEQ ID NO: 22727 - RNA, 23 nt, Artificial Sequence
  Synthetic
gugauuaccgaaaacagacuugu

SEQ ID NO: 22728 - RNA, 19 nt, Artificial Sequence
  Synthetic
gaauaucugguugacuugu

SEQ ID NO: 22729 - RNA, 21 nt, Artificial Sequence
  Synthetic
gugaauaucugguugacuugu

SEQ ID NO: 22730 - RNA, 22 nt, Artificial Sequence
  Synthetic
gcacaauuucuucccuccuugu

SEQ ID NO: 22731 - RNA, 23 nt, Artificial Sequence
  Synthetic
guaaaagcucugugcaugcuugu

SEQ ID NO: 22732 - RNA, 21 nt, Artificial Sequence
  Synthetic
guuuagauaaacauaucuugu

SEQ ID NO: 22733 - RNA, 18 nt, Artificial Sequence
  Synthetic
guaacuguacuuucuugu

SEQ ID NO: 22734 - RNA, 23 nt, Artificial Sequence
  Synthetic
gccaaguaacuguacuuucuugu

SEQ ID NO: 22735 - RNA, 24 nt, Artificial Sequence
  Synthetic
ggccaaguaacuguacuuucuugu

SEQ ID NO: 22736 - RNA, 21 nt, Artificial Sequence
  Synthetic
ggaaaacaccacagaaguugu

SEQ ID NO: 22737 - RNA, 24 nt, Artificial Sequence
  Synthetic
gauggaaaacaccacagaaguugu

SEQ ID NO: 22738 - RNA, 20 nt, Artificial Sequence
  Synthetic
gacaauuacucugcaguugu

SEQ ID NO: 22739 - RNA, 20 nt, Artificial Sequence
  Synthetic
gcccaauucuguucaguugu

SEQ ID NO: 22740 - RNA, 21 nt, Artificial Sequence
  Synthetic
ggcccaauucuguucaguugu

SEQ ID NO: 22741 - RNA, 24 nt, Artificial Sequence
  Synthetic
gaaccuugacuagguuauaguugu

SEQ ID NO: 22742 - RNA, 21 nt, Artificial Sequence
  Synthetic
gccaguuuuguacuggguugu

SEQ ID NO: 22743 - RNA, 22 nt, Artificial Sequence
  Synthetic
ggccaguuuuguacuggguugu

SEQ ID NO: 22744 - RNA, 21 nt, Artificial Sequence
  Synthetic
gaaucaucaaaaaaauguugu

SEQ ID NO: 22745 - RNA, 19 nt, Artificial Sequence
  Synthetic
gaguaugauugacauuugu

SEQ ID NO: 22746 - RNA, 24 nt, Artificial Sequence
  Synthetic
gcaaagaguaugauugacauuugu

SEQ ID NO: 22747 - RNA, 24 nt, Artificial Sequence
  Synthetic
gcacaucaaauuugaugcauuugu

SEQ ID NO: 22748 - RNA, 21 nt, Artificial Sequence
  Synthetic
guucuuuucugaaagauuugu

SEQ ID NO: 22749 - RNA, 18 nt, Artificial Sequence
  Synthetic
gauuucuaaacuauuugu

SEQ ID NO: 22750 - RNA, 24 nt, Artificial Sequence
  Synthetic
gacaaagauuucuaaacuauuugu

SEQ ID NO: 22751 - RNA, 20 nt, Artificial Sequence
  Synthetic
gcuuuucaauaguuauuugu

SEQ ID NO: 22752 - RNA, 18 nt, Artificial Sequence
  Synthetic
guaguuugauuuauuugu

SEQ ID NO: 22753 - RNA, 21 nt, Artificial Sequence
  Synthetic
gcuguaguuugauuuauuugu

SEQ ID NO: 22754 - RNA, 20 nt, Artificial Sequence
  Synthetic
gucuuauuagcucacuuugu

SEQ ID NO: 22755 - RNA, 22 nt, Artificial Sequence
  Synthetic
gagaaauuuaauuuaaguuugu

SEQ ID NO: 22756 - RNA, 23 nt, Artificial Sequence
  Synthetic
ggagaaauuuaauuuaaguuugu

SEQ ID NO: 22757 - RNA, 20 nt, Artificial Sequence
  Synthetic
gauugagcugaguaguuugu

SEQ ID NO: 22758 - RNA, 21 nt, Artificial Sequence
  Synthetic
gaaauauaaauuaauguuugu

SEQ ID NO: 22759 - RNA, 22 nt, Artificial Sequence
  Synthetic
gacacugaucaauacauuuugu

SEQ ID NO: 22760 - RNA, 22 nt, Artificial Sequence
  Synthetic
gauuugcugacucuccuuuugu

SEQ ID NO: 22761 - RNA, 23 nt, Artificial Sequence
  Synthetic
ggauuugcugacucuccuuuugu

SEQ ID NO: 22762 - RNA, 24 nt, Artificial Sequence
  Synthetic
gggauuugcugacucuccuuuugu

SEQ ID NO: 22763 - RNA, 23 nt, Artificial Sequence
  Synthetic
gcaacaucagacuacaguuuugu

SEQ ID NO: 22764 - RNA, 20 nt, Artificial Sequence
  Synthetic
gaauacugcccagguuuugu

SEQ ID NO: 22765 - RNA, 23 nt, Artificial Sequence
  Synthetic
gcuuuaaguacuacauguuuugu

SEQ ID NO: 22766 - RNA, 18 nt, Artificial Sequence
  Synthetic
gauauaaaauauuuuugu

SEQ ID NO: 22767 - RNA, 19 nt, Artificial Sequence
  Synthetic
ggauauaaaauauuuuugu

SEQ ID NO: 22768 - RNA, 21 nt, Artificial Sequence
  Synthetic
gacugcagcauuucuuuuugu

SEQ ID NO: 22769 - RNA, 20 nt, Artificial Sequence
  Synthetic
gucuuugcaauuguuuuugu

SEQ ID NO: 22770 - RNA, 21 nt, Artificial Sequence
  Synthetic
guuuuuguuuuagaaaaaauu

SEQ ID NO: 22771 - RNA, 18 nt, Artificial Sequence
  Synthetic
guacaacaggacaaaauu

SEQ ID NO: 22772 - RNA, 19 nt, Artificial Sequence
  Synthetic
gguacaacaggacaaaauu

SEQ ID NO: 22773 - RNA, 20 nt, Artificial Sequence
  Synthetic
ggguacaacaggacaaaauu

SEQ ID NO: 22774 - RNA, 22 nt, Artificial Sequence
  Synthetic
guggguacaacaggacaaaauu

SEQ ID NO: 22775 - RNA, 21 nt, Artificial Sequence
  Synthetic
gggaaaaaaauccucaaaauu

SEQ ID NO: 22776 - RNA, 23 nt, Artificial Sequence
  Synthetic
gugggaaaaaaauccucaaaauu

SEQ ID NO: 22777 - RNA, 24 nt, Artificial Sequence
  Synthetic
guacccaacguacaguugaaaauu

SEQ ID NO: 22778 - RNA, 19 nt, Artificial Sequence
  Synthetic
gaguuugauaaauaaaauu

SEQ ID NO: 22779 - RNA, 23 nt, Artificial Sequence
  Synthetic
gccagaguuugauaaauaaaauu

SEQ ID NO: 22780 - RNA, 20 nt, Artificial Sequence
  Synthetic
gaucauguaugacuaaaauu

SEQ ID NO: 22781 - RNA, 22 nt, Artificial Sequence
  Synthetic
gugaucauguaugacuaaaauu

SEQ ID NO: 22782 - RNA, 19 nt, Artificial Sequence
  Synthetic
gaugaauggguuuaaaauu

SEQ ID NO: 22783 - RNA, 18 nt, Artificial Sequence
  Synthetic
guaucauaauuacaaauu

SEQ ID NO: 22784 - RNA, 19 nt, Artificial Sequence
  Synthetic
gguaucauaauuacaaauu

SEQ ID NO: 22785 - RNA, 21 nt, Artificial Sequence
  Synthetic
gagguaucauaauuacaaauu

SEQ ID NO: 22786 - RNA, 21 nt, Artificial Sequence
  Synthetic
gccuucugauuuugccaaauu

SEQ ID NO: 22787 - RNA, 21 nt, Artificial Sequence
  Synthetic
guuaaaaacaauuuccaaauu

SEQ ID NO: 22788 - RNA, 21 nt, Artificial Sequence
  Synthetic
gauucugagaaaaaucaaauu

SEQ ID NO: 22789 - RNA, 24 nt, Artificial Sequence
  Synthetic
gaugauucugagaaaaaucaaauu

SEQ ID NO: 22790 - RNA, 19 nt, Artificial Sequence
  Synthetic
gacuaaacaugaagaaauu

SEQ ID NO: 22791 - RNA, 20 nt, Artificial Sequence
  Synthetic
ggacuaaacaugaagaaauu

SEQ ID NO: 22792 - RNA, 21 nt, Artificial Sequence
  Synthetic
gggacuaaacaugaagaaauu

SEQ ID NO: 22793 - RNA, 24 nt, Artificial Sequence
  Synthetic
guuauaugcuuccccuaagaaauu

SEQ ID NO: 22794 - RNA, 20 nt, Artificial Sequence
  Synthetic
gacagcuguuuuaagaaauu

SEQ ID NO: 22795 - RNA, 21 nt, Artificial Sequence
  Synthetic
ggacagcuguuuuaagaaauu

SEQ ID NO: 22796 - RNA, 23 nt, Artificial Sequence
  Synthetic
gaggacagcuguuuuaagaaauu

SEQ ID NO: 22797 - RNA, 20 nt, Artificial Sequence
  Synthetic
gauucaauggaaaauaaauu

SEQ ID NO: 22798 - RNA, 22 nt, Artificial Sequence
  Synthetic
gccuccaaaauaagcauaaauu

SEQ ID NO: 22799 - RNA, 18 nt, Artificial Sequence
  Synthetic
gccuguugagcauaaauu

SEQ ID NO: 22800 - RNA, 23 nt, Artificial Sequence
  Synthetic
gcaauaaagaauacucauaaauu

SEQ ID NO: 22801 - RNA, 24 nt, Artificial Sequence
  Synthetic
ggcaauaaagaauacucauaaauu

SEQ ID NO: 22802 - RNA, 20 nt, Artificial Sequence
  Synthetic
gauuaguauauugauaaauu

SEQ ID NO: 22803 - RNA, 24 nt, Artificial Sequence
  Synthetic
gucagauuaguauauugauaaauu

SEQ ID NO: 22804 - RNA, 19 nt, Artificial Sequence
  Synthetic
guuaucuauccuauaaauu

SEQ ID NO: 22805 - RNA, 18 nt, Artificial Sequence
  Synthetic
gauacaauguuauaaauu

SEQ ID NO: 22806 - RNA, 20 nt, Artificial Sequence
  Synthetic
gagauacaauguuauaaauu

SEQ ID NO: 22807 - RNA, 23 nt, Artificial Sequence
  Synthetic
guagagauacaauguuauaaauu

SEQ ID NO: 22808 - RNA, 19 nt, Artificial Sequence
  Synthetic
gcugucuuauuuauaaauu

SEQ ID NO: 22809 - RNA, 21 nt, Artificial Sequence
  Synthetic
gagcugucuuauuuauaaauu

SEQ ID NO: 22810 - RNA, 24 nt, Artificial Sequence
  Synthetic
gaaauuauccuaaguggcuaaauu

SEQ ID NO: 22811 - RNA, 19 nt, Artificial Sequence
  Synthetic
guugucaccugaguaaauu

SEQ ID NO: 22812 - RNA, 18 nt, Artificial Sequence
  Synthetic
guaggugcuuaguaaauu

SEQ ID NO: 22813 - RNA, 21 nt, Artificial Sequence
  Synthetic
guaaauaaugugguguaaauu

SEQ ID NO: 22814 - RNA, 21 nt, Artificial Sequence
  Synthetic
gacuacuacauacuuuaaauu

SEQ ID NO: 22815 - RNA, 23 nt, Artificial Sequence
  Synthetic
gugacuacuacauacuuuaaauu

SEQ ID NO: 22816 - RNA, 21 nt, Artificial Sequence
  Synthetic
gucuugggauuugaaacaauu

SEQ ID NO: 22817 - RNA, 23 nt, Artificial Sequence
  Synthetic
gugucuugggauuugaaacaauu

SEQ ID NO: 22818 - RNA, 24 nt, Artificial Sequence
  Synthetic
ggugucuugggauuugaaacaauu

SEQ ID NO: 22819 - RNA, 23 nt, Artificial Sequence
  Synthetic
guuuuuaauauuggagaacaauu

SEQ ID NO: 22820 - RNA, 24 nt, Artificial Sequence
  Synthetic
gguuuuuaauauuggagaacaauu

SEQ ID NO: 22821 - RNA, 18 nt, Artificial Sequence
  Synthetic
gagaccaagcuaacaauu

SEQ ID NO: 22822 - RNA, 20 nt, Artificial Sequence
  Synthetic
gugagaccaagcuaacaauu

SEQ ID NO: 22823 - RNA, 23 nt, Artificial Sequence
  Synthetic
gaagugagaccaagcuaacaauu

SEQ ID NO: 22824 - RNA, 18 nt, Artificial Sequence
  Synthetic
gaucuuuaaaacacaauu

SEQ ID NO: 22825 - RNA, 19 nt, Artificial Sequence
  Synthetic
ggaucuuuaaaacacaauu

SEQ ID NO: 22826 - RNA, 21 nt, Artificial Sequence
  Synthetic
guggaucuuuaaaacacaauu

SEQ ID NO: 22827 - RNA, 22 nt, Artificial Sequence
  Synthetic
gguggaucuuuaaaacacaauu

SEQ ID NO: 22828 - RNA, 23 nt, Artificial Sequence
  Synthetic
ggguggaucuuuaaaacacaauu

SEQ ID NO: 22829 - RNA, 18 nt, Artificial Sequence
  Synthetic
gaauguauugauacaauu

SEQ ID NO: 22830 - RNA, 23 nt, Artificial Sequence
  Synthetic
guaacccauaaauuuauacaauu

SEQ ID NO: 22831 - RNA, 24 nt, Artificial Sequence
  Synthetic
gguaacccauaaauuuauacaauu

SEQ ID NO: 22832 - RNA, 18 nt, Artificial Sequence
  Synthetic
gaaccuaacaaagcaauu

SEQ ID NO: 22833 - RNA, 23 nt, Artificial Sequence
  Synthetic
gaauagaaccuaacaaagcaauu

SEQ ID NO: 22834 - RNA, 20 nt, Artificial Sequence
  Synthetic
gucaauaaagauuagcaauu

SEQ ID NO: 22835 - RNA, 24 nt, Artificial Sequence
  Synthetic
gacugucaauaaagauuagcaauu

SEQ ID NO: 22836 - RNA, 19 nt, Artificial Sequence
  Synthetic
gagaauaucacuugcaauu

SEQ ID NO: 22837 - RNA, 19 nt, Artificial Sequence
  Synthetic
gccucucuccagcucaauu

SEQ ID NO: 22838 - RNA, 18 nt, Artificial Sequence
  Synthetic
gagacuucugggucaauu

SEQ ID NO: 22839 - RNA, 19 nt, Artificial Sequence
  Synthetic
ggagacuucugggucaauu

SEQ ID NO: 22840 - RNA, 21 nt, Artificial Sequence
  Synthetic
gaggagacuucugggucaauu

SEQ ID NO: 22841 - RNA, 22 nt, Artificial Sequence
  Synthetic
ggaggagacuucugggucaauu

SEQ ID NO: 22842 - RNA, 24 nt, Artificial Sequence
  Synthetic
gcggaggagacuucugggucaauu

SEQ ID NO: 22843 - RNA, 19 nt, Artificial Sequence
  Synthetic
gaaauaauccgauucaauu

SEQ ID NO: 22844 - RNA, 21 nt, Artificial Sequence
  Synthetic
gagaaauaauccgauucaauu

SEQ ID NO: 22845 - RNA, 20 nt, Artificial Sequence
  Synthetic
guuggaacugauauucaauu

SEQ ID NO: 22846 - RNA, 22 nt, Artificial Sequence
  Synthetic
gaguuggaacugauauucaauu

SEQ ID NO: 22847 - RNA, 18 nt, Artificial Sequence
  Synthetic
gaauuaauuucaagaauu

SEQ ID NO: 22848 - RNA, 18 nt, Artificial Sequence
  Synthetic
gucuuuugaugaagaauu

SEQ ID NO: 22849 - RNA, 22 nt, Artificial Sequence
  Synthetic
gucuuaauccuggaacagaauu

SEQ ID NO: 22850 - RNA, 23 nt, Artificial Sequence
  Synthetic
ggucuuaauccuggaacagaauu

SEQ ID NO: 22851 - RNA, 24 nt, Artificial Sequence
  Synthetic
gggucuuaauccuggaacagaauu

SEQ ID NO: 22852 - RNA, 20 nt, Artificial Sequence
  Synthetic
gccucuuaagaugcagaauu

SEQ ID NO: 22853 - RNA, 23 nt, Artificial Sequence
  Synthetic
guuaucuauaacucaugagaauu

SEQ ID NO: 22854 - RNA, 18 nt, Artificial Sequence
  Synthetic
gcuauaaaagauagaauu

SEQ ID NO: 22855 - RNA, 20 nt, Artificial Sequence
  Synthetic
gagcuauaaaagauagaauu

SEQ ID NO: 22856 - RNA, 23 nt, Artificial Sequence
  Synthetic
gauuaauagaggaaucuagaauu

SEQ ID NO: 22857 - RNA, 19 nt, Artificial Sequence
  Synthetic
gcugauaggugguagaauu

SEQ ID NO: 22858 - RNA, 21 nt, Artificial Sequence
  Synthetic
gugcugauaggugguagaauu

SEQ ID NO: 22859 - RNA, 19 nt, Artificial Sequence
  Synthetic
guuucuucuccuuagaauu

SEQ ID NO: 22860 - RNA, 20 nt, Artificial Sequence
  Synthetic
gguuucuucuccuuagaauu

SEQ ID NO: 22861 - RNA, 21 nt, Artificial Sequence
  Synthetic
gacauaguuaugcuuagaauu

SEQ ID NO: 22862 - RNA, 22 nt, Artificial Sequence
  Synthetic
ggacauaguuaugcuuagaauu

SEQ ID NO: 22863 - RNA, 23 nt, Artificial Sequence
  Synthetic
gggacauaguuaugcuuagaauu

SEQ ID NO: 22864 - RNA, 24 nt, Artificial Sequence
  Synthetic
gaaauuuauaacuuucuuagaauu

SEQ ID NO: 22865 - RNA, 23 nt, Artificial Sequence
  Synthetic
guagauaaauauauuaaggaauu

SEQ ID NO: 22866 - RNA, 24 nt, Artificial Sequence
  Synthetic
gguagauaaauauauuaaggaauu

SEQ ID NO: 22867 - RNA, 18 nt, Artificial Sequence
  Synthetic
ggguaaagacgaggaauu

SEQ ID NO: 22868 - RNA, 19 nt, Artificial Sequence
  Synthetic
gcagggaaaauacggaauu

SEQ ID NO: 22869 - RNA, 20 nt, Artificial Sequence
  Synthetic
ggcagggaaaauacggaauu

SEQ ID NO: 22870 - RNA, 23 nt, Artificial Sequence
  Synthetic
gaucuacaguggaauagggaauu

SEQ ID NO: 22871 - RNA, 24 nt, Artificial Sequence
  Synthetic
gaaauaaggauguaaaauggaauu

SEQ ID NO: 22872 - RNA, 19 nt, Artificial Sequence
  Synthetic
gcgauucagcauuggaauu

SEQ ID NO: 22873 - RNA, 20 nt, Artificial Sequence
  Synthetic
ggcgauucagcauuggaauu

SEQ ID NO: 22874 - RNA, 23 nt, Artificial Sequence
  Synthetic
gaaggcgauucagcauuggaauu

SEQ ID NO: 22875 - RNA, 19 nt, Artificial Sequence
  Synthetic
gagaggcagaguuggaauu

SEQ ID NO: 22876 - RNA, 23 nt, Artificial Sequence
  Synthetic
gucacugaaugaaaacaugaauu

SEQ ID NO: 22877 - RNA, 21 nt, Artificial Sequence
  Synthetic
gucauggaugaaagaugaauu

SEQ ID NO: 22878 - RNA, 22 nt, Artificial Sequence
  Synthetic
ggucauggaugaaagaugaauu

SEQ ID NO: 22879 - RNA, 21 nt, Artificial Sequence
  Synthetic
guaauaugcaggauaugaauu

SEQ ID NO: 22880 - RNA, 22 nt, Artificial Sequence
  Synthetic
guaccaaacagguauaugaauu

SEQ ID NO: 22881 - RNA, 18 nt, Artificial Sequence
  Synthetic
guaauuacaaacugaauu

SEQ ID NO: 22882 - RNA, 21 nt, Artificial Sequence
  Synthetic
gcccccuucacauucugaauu

SEQ ID NO: 22883 - RNA, 21 nt, Artificial Sequence
  Synthetic
guuuggauaugauucugaauu

SEQ ID NO: 22884 - RNA, 22 nt, Artificial Sequence
  Synthetic
gguuuggauaugauucugaauu

SEQ ID NO: 22885 - RNA, 19 nt, Artificial Sequence
  Synthetic
guggaggcaggguugaauu

SEQ ID NO: 22886 - RNA, 21 nt, Artificial Sequence
  Synthetic
gaguggaggcaggguugaauu

SEQ ID NO: 22887 - RNA, 23 nt, Artificial Sequence
  Synthetic
gauuuucugucuauuguugaauu

SEQ ID NO: 22888 - RNA, 24 nt, Artificial Sequence
  Synthetic
ggauuuucugucuauuguugaauu

SEQ ID NO: 22889 - RNA, 19 nt, Artificial Sequence
  Synthetic
gauaaacuuuuguugaauu

SEQ ID NO: 22890 - RNA, 23 nt, Artificial Sequence
  Synthetic
guuugauaaacuuuuguugaauu

SEQ ID NO: 22891 - RNA, 23 nt, Artificial Sequence
  Synthetic
guacacagaaucuuggaauaauu

SEQ ID NO: 22892 - RNA, 24 nt, Artificial Sequence
  Synthetic
gguacacagaaucuuggaauaauu

SEQ ID NO: 22893 - RNA, 19 nt, Artificial Sequence
  Synthetic
gcaaaggauauuaauaauu

SEQ ID NO: 22894 - RNA, 22 nt, Artificial Sequence
  Synthetic
guuuauuugggucuuaauaauu

SEQ ID NO: 22895 - RNA, 23 nt, Artificial Sequence
  Synthetic
gguuuauuugggucuuaauaauu

SEQ ID NO: 22896 - RNA, 24 nt, Artificial Sequence
  Synthetic
ggguuuauuugggucuuaauaauu

SEQ ID NO: 22897 - RNA, 18 nt, Artificial Sequence
  Synthetic
guaaugaguaucauaauu

SEQ ID NO: 22898 - RNA, 21 nt, Artificial Sequence
  Synthetic
gauguaaugaguaucauaauu

SEQ ID NO: 22899 - RNA, 23 nt, Artificial Sequence
  Synthetic
gugauguaaugaguaucauaauu

SEQ ID NO: 22900 - RNA, 20 nt, Artificial Sequence
  Synthetic
gaucaaaggaaaagauaauu

SEQ ID NO: 22901 - RNA, 24 nt, Artificial Sequence
  Synthetic
gaauauacuggauauaagauaauu

SEQ ID NO: 22902 - RNA, 24 nt, Artificial Sequence
  Synthetic
guuuucaaguacuaugcuauaauu

SEQ ID NO: 22903 - RNA, 19 nt, Artificial Sequence
  Synthetic
gcuuucugaacuucuaauu

SEQ ID NO: 22904 - RNA, 21 nt, Artificial Sequence
  Synthetic
gagcuuucugaacuucuaauu

SEQ ID NO: 22905 - RNA, 22 nt, Artificial Sequence
  Synthetic
ggagcuuucugaacuucuaauu

SEQ ID NO: 22906 - RNA, 24 nt, Artificial Sequence
  Synthetic
guggagcuuucugaacuucuaauu

SEQ ID NO: 22907 - RNA, 20 nt, Artificial Sequence
  Synthetic
gcuuaauaaauauaguaauu

SEQ ID NO: 22908 - RNA, 22 nt, Artificial Sequence
  Synthetic
gugcuuaauaaauauaguaauu

SEQ ID NO: 22909 - RNA, 23 nt, Artificial Sequence
  Synthetic
ggugcuuaauaaauauaguaauu

SEQ ID NO: 22910 - RNA, 21 nt, Artificial Sequence
  Synthetic
gaaaugaaagaggauguaauu

SEQ ID NO: 22911 - RNA, 22 nt, Artificial Sequence
  Synthetic
guacacuccugacugauuaauu

SEQ ID NO: 22912 - RNA, 24 nt, Artificial Sequence
  Synthetic
gaguacacuccugacugauuaauu

SEQ ID NO: 22913 - RNA, 21 nt, Artificial Sequence
  Synthetic
gacuccaacaaauauuuaauu

SEQ ID NO: 22914 - RNA, 23 nt, Artificial Sequence
  Synthetic
gauaaaaguauuuauaaaacauu

SEQ ID NO: 22915 - RNA, 21 nt, Artificial Sequence
  Synthetic
gcauauacacacauaaacauu

SEQ ID NO: 22916 - RNA, 22 nt, Artificial Sequence
  Synthetic
ggcauauacacacauaaacauu

SEQ ID NO: 22917 - RNA, 22 nt, Artificial Sequence
  Synthetic
guuuagaaaaaagguaaacauu

SEQ ID NO: 22918 - RNA, 21 nt, Artificial Sequence
  Synthetic
gucucuuccauugucaacauu

SEQ ID NO: 22919 - RNA, 23 nt, Artificial Sequence
  Synthetic
gagucucuuccauugucaacauu

SEQ ID NO: 22920 - RNA, 18 nt, Artificial Sequence
  Synthetic
gagauauuguagaacauu

SEQ ID NO: 22921 - RNA, 19 nt, Artificial Sequence
  Synthetic
guucugaaacuugaacauu

SEQ ID NO: 22922 - RNA, 21 nt, Artificial Sequence
  Synthetic
gcguucugaaacuugaacauu

SEQ ID NO: 22923 - RNA, 24 nt, Artificial Sequence
  Synthetic
guagcguucugaaacuugaacauu

SEQ ID NO: 22924 - RNA, 20 nt, Artificial Sequence
  Synthetic
guagccaagggucuaacauu

SEQ ID NO: 22925 - RNA, 22 nt, Artificial Sequence
  Synthetic
guguagccaagggucuaacauu

SEQ ID NO: 22926 - RNA, 24 nt, Artificial Sequence
  Synthetic
gaguguagccaagggucuaacauu

SEQ ID NO: 22927 - RNA, 22 nt, Artificial Sequence
  Synthetic
gcucuaauuuuguucugacauu

SEQ ID NO: 22928 - RNA, 18 nt, Artificial Sequence
  Synthetic
gauccauuccacuacauu

SEQ ID NO: 22929 - RNA, 24 nt, Artificial Sequence
  Synthetic
gcccaugauccauuccacuacauu

SEQ ID NO: 22930 - RNA, 18 nt, Artificial Sequence
  Synthetic
ggcaaguuucuuuacauu

SEQ ID NO: 22931 - RNA, 23 nt, Artificial Sequence
  Synthetic
gacaaggcaaguuucuuuacauu

SEQ ID NO: 22932 - RNA, 22 nt, Artificial Sequence
  Synthetic
gaauuggcauuauaaaaccauu

SEQ ID NO: 22933 - RNA, 23 nt, Artificial Sequence
  Synthetic
ggaauuggcauuauaaaaccauu

SEQ ID NO: 22934 - RNA, 18 nt, Artificial Sequence
  Synthetic
gcuccuaaggugaccauu

SEQ ID NO: 22935 - RNA, 19 nt, Artificial Sequence
  Synthetic
ggcuccuaaggugaccauu

SEQ ID NO: 22936 - RNA, 24 nt, Artificial Sequence
  Synthetic
guauaggcuccuaaggugaccauu

SEQ ID NO: 22937 - RNA, 18 nt, Artificial Sequence
  Synthetic
gauuuauuccuugccauu

SEQ ID NO: 22938 - RNA, 24 nt, Artificial Sequence
  Synthetic
guaauagauuuauuccuugccauu

SEQ ID NO: 22939 - RNA, 20 nt, Artificial Sequence
  Synthetic
gauaaugccucuucuccauu

SEQ ID NO: 22940 - RNA, 23 nt, Artificial Sequence
  Synthetic
gaauuaaucauguuaauuccauu

SEQ ID NO: 22941 - RNA, 18 nt, Artificial Sequence
  Synthetic
ggagauggggggagcauu

SEQ ID NO: 22942 - RNA, 19 nt, Artificial Sequence
  Synthetic
gggagauggggggagcauu

SEQ ID NO: 22943 - RNA, 20 nt, Artificial Sequence
  Synthetic
ggggagauggggggagcauu

SEQ ID NO: 22944 - RNA, 19 nt, Artificial Sequence
  Synthetic
gagggggauggggagcauu

SEQ ID NO: 22945 - RNA, 19 nt, Artificial Sequence
  Synthetic
gcucccaugaucuggcauu

SEQ ID NO: 22946 - RNA, 24 nt, Artificial Sequence
  Synthetic
gccccgcucccaugaucuggcauu

SEQ ID NO: 22947 - RNA, 22 nt, Artificial Sequence
  Synthetic
gcacaaacuaguguuuggcauu

SEQ ID NO: 22948 - RNA, 24 nt, Artificial Sequence
  Synthetic
gugcacaaacuaguguuuggcauu

SEQ ID NO: 22949 - RNA, 20 nt, Artificial Sequence
  Synthetic
gcaaaaauacugcaugcauu

SEQ ID NO: 22950 - RNA, 19 nt, Artificial Sequence
  Synthetic
gcucagcuauucuaucauu

SEQ ID NO: 22951 - RNA, 20 nt, Artificial Sequence
  Synthetic
ggcucagcuauucuaucauu

SEQ ID NO: 22952 - RNA, 18 nt, Artificial Sequence
  Synthetic
guaauaaauuggcucauu

SEQ ID NO: 22953 - RNA, 18 nt, Artificial Sequence
  Synthetic
gaaccccucaugcucauu

SEQ ID NO: 22954 - RNA, 24 nt, Artificial Sequence
  Synthetic
gauucagaaccccucaugcucauu

SEQ ID NO: 22955 - RNA, 18 nt, Artificial Sequence
  Synthetic
ggcaggaguucucucauu

SEQ ID NO: 22956 - RNA, 23 nt, Artificial Sequence
  Synthetic
gaacaaaagcacuuacagucauu

SEQ ID NO: 22957 - RNA, 21 nt, Artificial Sequence
  Synthetic
gacaagaguaggaaggucauu

SEQ ID NO: 22958 - RNA, 22 nt, Artificial Sequence
  Synthetic
ggacaagaguaggaaggucauu

SEQ ID NO: 22959 - RNA, 23 nt, Artificial Sequence
  Synthetic
gggacaagaguaggaaggucauu

SEQ ID NO: 22960 - RNA, 20 nt, Artificial Sequence
  Synthetic
gucaaaucacacaauucauu

SEQ ID NO: 22961 - RNA, 24 nt, Artificial Sequence
  Synthetic
gacucuuaaguauuguccuucauu

SEQ ID NO: 22962 - RNA, 24 nt, Artificial Sequence
  Synthetic
gaccuauagaaugucacguucauu

SEQ ID NO: 22963 - RNA, 18 nt, Artificial Sequence
  Synthetic
ggaacacuaaauuucauu

SEQ ID NO: 22964 - RNA, 21 nt, Artificial Sequence
  Synthetic
gcaggaacacuaaauuucauu

SEQ ID NO: 22965 - RNA, 24 nt, Artificial Sequence
  Synthetic
gcugcaggaacacuaaauuucauu

SEQ ID NO: 22966 - RNA, 20 nt, Artificial Sequence
  Synthetic
guauacuauaauauuucauu

SEQ ID NO: 22967 - RNA, 21 nt, Artificial Sequence
  Synthetic
gguauacuauaauauuucauu

SEQ ID NO: 22968 - RNA, 22 nt, Artificial Sequence
  Synthetic
ggguauacuauaauauuucauu

SEQ ID NO: 22969 - RNA, 19 nt, Artificial Sequence
  Synthetic
guagacuucuuauuucauu

SEQ ID NO: 22970 - RNA, 21 nt, Artificial Sequence
  Synthetic
gaguagacuucuuauuucauu

SEQ ID NO: 22971 - RNA, 20 nt, Artificial Sequence
  Synthetic
gccuucacuuuguuuucauu

SEQ ID NO: 22972 - RNA, 21 nt, Artificial Sequence
  Synthetic
ggccuucacuuuguuuucauu

SEQ ID NO: 22973 - RNA, 23 nt, Artificial Sequence
  Synthetic
guggccuucacuuuguuuucauu

SEQ ID NO: 22974 - RNA, 20 nt, Artificial Sequence
  Synthetic
gaaaagucaacgauaagauu

SEQ ID NO: 22975 - RNA, 24 nt, Artificial Sequence
  Synthetic
guaucuucuauauuaaagcagauu

SEQ ID NO: 22976 - RNA, 19 nt, Artificial Sequence
  Synthetic
gaagcguagugugcagauu

SEQ ID NO: 22977 - RNA, 18 nt, Artificial Sequence
  Synthetic
gccucagaguugcagauu

SEQ ID NO: 22978 - RNA, 19 nt, Artificial Sequence
  Synthetic
ggccucagaguugcagauu

SEQ ID NO: 22979 - RNA, 24 nt, Artificial Sequence
  Synthetic
gcauaggccucagaguugcagauu

SEQ ID NO: 22980 - RNA, 19 nt, Artificial Sequence
  Synthetic
gucaaccuacagucagauu

SEQ ID NO: 22981 - RNA, 20 nt, Artificial Sequence
  Synthetic
ggucaaccuacagucagauu

SEQ ID NO: 22982 - RNA, 24 nt, Artificial Sequence
  Synthetic
guuuggucaaccuacagucagauu

SEQ ID NO: 22983 - RNA, 19 nt, Artificial Sequence
  Synthetic
gcagcaugagucauagauu

SEQ ID NO: 22984 - RNA, 20 nt, Artificial Sequence
  Synthetic
ggcagcaugagucauagauu

SEQ ID NO: 22985 - RNA, 18 nt, Artificial Sequence
  Synthetic
gagagauagugauagauu

SEQ ID NO: 22986 - RNA, 19 nt, Artificial Sequence
  Synthetic
ggagagauagugauagauu

SEQ ID NO: 22987 - RNA, 24 nt, Artificial Sequence
  Synthetic
gaaaaggagagauagugauagauu

SEQ ID NO: 22988 - RNA, 20 nt, Artificial Sequence
  Synthetic
gcacuucuauuuuagcgauu

SEQ ID NO: 22989 - RNA, 24 nt, Artificial Sequence
  Synthetic
gcucgcacuucuauuuuagcgauu

SEQ ID NO: 22990 - RNA, 18 nt, Artificial Sequence
  Synthetic
gaagggcacaucaggauu

SEQ ID NO: 22991 - RNA, 22 nt, Artificial Sequence
  Synthetic
gaaagaagggcacaucaggauu

SEQ ID NO: 22992 - RNA, 23 nt, Artificial Sequence
  Synthetic
ggaaagaagggcacaucaggauu

SEQ ID NO: 22993 - RNA, 23 nt, Artificial Sequence
  Synthetic
guaacucuacuacccuuaggauu

SEQ ID NO: 22994 - RNA, 24 nt, Artificial Sequence
  Synthetic
gguaacucuacuacccuuaggauu

SEQ ID NO: 22995 - RNA, 24 nt, Artificial Sequence
  Synthetic
gacauucucccagguaaggggauu

SEQ ID NO: 22996 - RNA, 18 nt, Artificial Sequence
  Synthetic
gggaaaaaauaugggauu

SEQ ID NO: 22997 - RNA, 23 nt, Artificial Sequence
  Synthetic
gaaaacuugugaaaaaauggauu

SEQ ID NO: 22998 - RNA, 20 nt, Artificial Sequence
  Synthetic
guaucagucuauuauggauu

SEQ ID NO: 22999 - RNA, 24 nt, Artificial Sequence
  Synthetic
gcuuucuccuggggacaguggauu

SEQ ID NO: 23000 - RNA, 21 nt, Artificial Sequence
  Synthetic
gaucuaaucuccauuuggauu

SEQ ID NO: 23001 - RNA, 20 nt, Artificial Sequence
  Synthetic
gucauuucauaaagaugauu

SEQ ID NO: 23002 - RNA, 22 nt, Artificial Sequence
  Synthetic
guauuccgguuuggauaugauu

SEQ ID NO: 23003 - RNA, 24 nt, Artificial Sequence
  Synthetic
gaguauuccgguuuggauaugauu

SEQ ID NO: 23004 - RNA, 19 nt, Artificial Sequence
  Synthetic
guacuucaucccacugauu

SEQ ID NO: 23005 - RNA, 18 nt, Artificial Sequence
  Synthetic
gauacaaaaguacugauu

SEQ ID NO: 23006 - RNA, 18 nt, Artificial Sequence
  Synthetic
gaaucaaauauccugauu

SEQ ID NO: 23007 - RNA, 24 nt, Artificial Sequence
  Synthetic
gcuuucaaaggcaaagcucugauu

SEQ ID NO: 23008 - RNA, 18 nt, Artificial Sequence
  Synthetic
gcagcuaguguucugauu

SEQ ID NO: 23009 - RNA, 19 nt, Artificial Sequence
  Synthetic
guaguacaauacagugauu

SEQ ID NO: 23010 - RNA, 22 nt, Artificial Sequence
  Synthetic
gaaguaguacaauacagugauu

SEQ ID NO: 23011 - RNA, 24 nt, Artificial Sequence
  Synthetic
gagaaguaguacaauacagugauu

SEQ ID NO: 23012 - RNA, 18 nt, Artificial Sequence
  Synthetic
gagcuuuaggaggugauu

SEQ ID NO: 23013 - RNA, 19 nt, Artificial Sequence
  Synthetic
ggagcuuuaggaggugauu

SEQ ID NO: 23014 - RNA, 20 nt, Artificial Sequence
  Synthetic
gggagcuuuaggaggugauu

SEQ ID NO: 23015 - RNA, 22 nt, Artificial Sequence
  Synthetic
gugggagcuuuaggaggugauu

SEQ ID NO: 23016 - RNA, 23 nt, Artificial Sequence
  Synthetic
ggugggagcuuuaggaggugauu

SEQ ID NO: 23017 - RNA, 24 nt, Artificial Sequence
  Synthetic
gggugggagcuuuaggaggugauu

SEQ ID NO: 23018 - RNA, 19 nt, Artificial Sequence
  Synthetic
guuaauuuacauugugauu

SEQ ID NO: 23019 - RNA, 24 nt, Artificial Sequence
  Synthetic
gaaaaguuaauuuacauugugauu

SEQ ID NO: 23020 - RNA, 19 nt, Artificial Sequence
  Synthetic
gugcagcaggaacuugauu

SEQ ID NO: 23021 - RNA, 20 nt, Artificial Sequence
  Synthetic
ggugcagcaggaacuugauu

SEQ ID NO: 23022 - RNA, 21 nt, Artificial Sequence
  Synthetic
gggugcagcaggaacuugauu

SEQ ID NO: 23023 - RNA, 21 nt, Artificial Sequence
  Synthetic
gaaaaucaaaaucaaaauauu

SEQ ID NO: 23024 - RNA, 24 nt, Artificial Sequence
  Synthetic
gaugaaaaucaaaaucaaaauauu

SEQ ID NO: 23025 - RNA, 22 nt, Artificial Sequence
  Synthetic
gcucacauaauuugaaaauauu

SEQ ID NO: 23026 - RNA, 19 nt, Artificial Sequence
  Synthetic
gaguaggagcuaaaauauu

SEQ ID NO: 23027 - RNA, 23 nt, Artificial Sequence
  Synthetic
gucugaguaggagcuaaaauauu

SEQ ID NO: 23028 - RNA, 18 nt, Artificial Sequence
  Synthetic
gaaguuuuaggaaauauu

SEQ ID NO: 23029 - RNA, 20 nt, Artificial Sequence
  Synthetic
gugaaguuuuaggaaauauu

SEQ ID NO: 23030 - RNA, 20 nt, Artificial Sequence
  Synthetic
gcuucaguuaaguaaauauu

SEQ ID NO: 23031 - RNA, 21 nt, Artificial Sequence
  Synthetic
ggcuucaguuaaguaaauauu

SEQ ID NO: 23032 - RNA, 22 nt, Artificial Sequence
  Synthetic
gggcuucaguuaaguaaauauu

SEQ ID NO: 23033 - RNA, 18 nt, Artificial Sequence
  Synthetic
gggacauucuuaaauauu

SEQ ID NO: 23034 - RNA, 20 nt, Artificial Sequence
  Synthetic
gccacuuagaaaauaauauu

SEQ ID NO: 23035 - RNA, 21 nt, Artificial Sequence
  Synthetic
gaaaauauguguacacauauu

SEQ ID NO: 23036 - RNA, 22 nt, Artificial Sequence
  Synthetic
ggaaaauauguguacacauauu

SEQ ID NO: 23037 - RNA, 23 nt, Artificial Sequence
  Synthetic
gucuacaaugugcuuuucauauu

SEQ ID NO: 23038 - RNA, 18 nt, Artificial Sequence
  Synthetic
gaugauaaccaggauauu

SEQ ID NO: 23039 - RNA, 21 nt, Artificial Sequence
  Synthetic
gaacggcucaaugaugauauu

SEQ ID NO: 23040 - RNA, 23 nt, Artificial Sequence
  Synthetic
guccaacaguuuccucugauauu

SEQ ID NO: 23041 - RNA, 18 nt, Artificial Sequence
  Synthetic
guuccauaauaauauauu

SEQ ID NO: 23042 - RNA, 19 nt, Artificial Sequence
  Synthetic
gcuugauaguagauauauu

SEQ ID NO: 23043 - RNA, 23 nt, Artificial Sequence
  Synthetic
gaauauaugauuauauauauauu

SEQ ID NO: 23044 - RNA, 19 nt, Artificial Sequence
  Synthetic
gcuuguugacguauauauu

SEQ ID NO: 23045 - RNA, 21 nt, Artificial Sequence
  Synthetic
gcuauuggcagucaguauauu

SEQ ID NO: 23046 - RNA, 18 nt, Artificial Sequence
  Synthetic
gaagaaagccauuauauu

SEQ ID NO: 23047 - RNA, 18 nt, Artificial Sequence
  Synthetic
gaaaugcaguauuauauu

SEQ ID NO: 23048 - RNA, 24 nt, Artificial Sequence
  Synthetic
gauuuugaaaugcaguauuauauu

SEQ ID NO: 23049 - RNA, 21 nt, Artificial Sequence
  Synthetic
gucugucaucaaauuuauauu

SEQ ID NO: 23050 - RNA, 18 nt, Artificial Sequence
  Synthetic
gguguauacuuuuauauu

SEQ ID NO: 23051 - RNA, 20 nt, Artificial Sequence
  Synthetic
gugguguauacuuuuauauu

SEQ ID NO: 23052 - RNA, 20 nt, Artificial Sequence
  Synthetic
gcuggaaauucagcacuauu

SEQ ID NO: 23053 - RNA, 22 nt, Artificial Sequence
  Synthetic
gagcuggaaauucagcacuauu

SEQ ID NO: 23054 - RNA, 18 nt, Artificial Sequence
  Synthetic
gcccagaauaugccuauu

SEQ ID NO: 23055 - RNA, 23 nt, Artificial Sequence
  Synthetic
gucuaauuggccugccagcuauu

SEQ ID NO: 23056 - RNA, 18 nt, Artificial Sequence
  Synthetic
gaaauguuuugagcuauu

SEQ ID NO: 23057 - RNA, 21 nt, Artificial Sequence
  Synthetic
guagaaauguuuugagcuauu

SEQ ID NO: 23058 - RNA, 21 nt, Artificial Sequence
  Synthetic
gccccaaauacuaacucuauu

SEQ ID NO: 23059 - RNA, 23 nt, Artificial Sequence
  Synthetic
gugccccaaauacuaacucuauu

SEQ ID NO: 23060 - RNA, 22 nt, Artificial Sequence
  Synthetic
guuacaaaaguaucagucuauu

SEQ ID NO: 23061 - RNA, 21 nt, Artificial Sequence
  Synthetic
gaaagaauauguuagucuauu

SEQ ID NO: 23062 - RNA, 24 nt, Artificial Sequence
  Synthetic
gcagaaagaauauguuagucuauu

SEQ ID NO: 23063 - RNA, 24 nt, Artificial Sequence
  Synthetic
gacuuuuuccucucucauucuauu

SEQ ID NO: 23064 - RNA, 23 nt, Artificial Sequence
  Synthetic
gaucucuucguguuuauucuauu

SEQ ID NO: 23065 - RNA, 20 nt, Artificial Sequence
  Synthetic
gaagcucugcucaaaguauu

SEQ ID NO: 23066 - RNA, 21 nt, Artificial Sequence
  Synthetic
ggaagcucugcucaaaguauu

SEQ ID NO: 23067 - RNA, 23 nt, Artificial Sequence
  Synthetic
gcauauggcaauuuugaaguauu

SEQ ID NO: 23068 - RNA, 18 nt, Artificial Sequence
  Synthetic
gguagagacaguaguauu

SEQ ID NO: 23069 - RNA, 19 nt, Artificial Sequence
  Synthetic
ggguagagacaguaguauu

SEQ ID NO: 23070 - RNA, 21 nt, Artificial Sequence
  Synthetic
gaggguagagacaguaguauu

SEQ ID NO: 23071 - RNA, 19 nt, Artificial Sequence
  Synthetic
gcaguaucucauucguauu

SEQ ID NO: 23072 - RNA, 19 nt, Artificial Sequence
  Synthetic
gaaaauuauaucagguauu

SEQ ID NO: 23073 - RNA, 20 nt, Artificial Sequence
  Synthetic
ggaaaauuauaucagguauu

SEQ ID NO: 23074 - RNA, 24 nt, Artificial Sequence
  Synthetic
gauuuuuauuacugugucuguauu

SEQ ID NO: 23075 - RNA, 22 nt, Artificial Sequence
  Synthetic
guuuugagcucacucaauuauu

SEQ ID NO: 23076 - RNA, 23 nt, Artificial Sequence
  Synthetic
gcauuauuacuaaaauaauuauu

SEQ ID NO: 23077 - RNA, 21 nt, Artificial Sequence
  Synthetic
guccaucucagaauaauuauu

SEQ ID NO: 23078 - RNA, 20 nt, Artificial Sequence
  Synthetic
gaagaaaaaugugcauuauu

SEQ ID NO: 23079 - RNA, 23 nt, Artificial Sequence
  Synthetic
guccuuacccauccaucauuauu

SEQ ID NO: 23080 - RNA, 20 nt, Artificial Sequence
  Synthetic
gacugaaguucaauauuauu

SEQ ID NO: 23081 - RNA, 24 nt, Artificial Sequence
  Synthetic
gucagacugaaguucaauauuauu

SEQ ID NO: 23082 - RNA, 21 nt, Artificial Sequence
  Synthetic
ggaguaucuauguauauuauu

SEQ ID NO: 23083 - RNA, 18 nt, Artificial Sequence
  Synthetic
guauuuccugcuauuauu

SEQ ID NO: 23084 - RNA, 19 nt, Artificial Sequence
  Synthetic
gugacaaaaucaacuuauu

SEQ ID NO: 23085 - RNA, 19 nt, Artificial Sequence
  Synthetic
gcuaucucccugacuuauu

SEQ ID NO: 23086 - RNA, 23 nt, Artificial Sequence
  Synthetic
guauacguauugacgugcuuauu

SEQ ID NO: 23087 - RNA, 18 nt, Artificial Sequence
  Synthetic
gugaauaucucaguuauu

SEQ ID NO: 23088 - RNA, 24 nt, Artificial Sequence
  Synthetic
guuauugugaauaucucaguuauu

SEQ ID NO: 23089 - RNA, 22 nt, Artificial Sequence
  Synthetic
gccuugaguaagaaauguuauu

SEQ ID NO: 23090 - RNA, 22 nt, Artificial Sequence
  Synthetic
gacuacagucaaaaaauuuauu

SEQ ID NO: 23091 - RNA, 20 nt, Artificial Sequence
  Synthetic
gauuagaaaaaugcuuuauu

SEQ ID NO: 23092 - RNA, 21 nt, Artificial Sequence
  Synthetic
ggauuagaaaaaugcuuuauu

SEQ ID NO: 23093 - RNA, 20 nt, Artificial Sequence
  Synthetic
gaagauaucacaaguuuauu

SEQ ID NO: 23094 - RNA, 19 nt, Artificial Sequence
  Synthetic
gauaacaucuaaguuuauu

SEQ ID NO: 23095 - RNA, 18 nt, Artificial Sequence
  Synthetic
gugguuaggggguuuauu

SEQ ID NO: 23096 - RNA, 22 nt, Artificial Sequence
  Synthetic
gccugugguuaggggguuuauu

SEQ ID NO: 23097 - RNA, 23 nt, Artificial Sequence
  Synthetic
ggccugugguuaggggguuuauu

SEQ ID NO: 23098 - RNA, 24 nt, Artificial Sequence
  Synthetic
gaauaacuuggugugacuuuuauu

SEQ ID NO: 23099 - RNA, 19 nt, Artificial Sequence
  Synthetic
gcaaacuuuggcaaaacuu

SEQ ID NO: 23100 - RNA, 22 nt, Artificial Sequence
  Synthetic
gacuacaggaggaauaaaacuu

SEQ ID NO: 23101 - RNA, 21 nt, Artificial Sequence
  Synthetic
gaucuuuaauauauaaaacuu

SEQ ID NO: 23102 - RNA, 22 nt, Artificial Sequence
  Synthetic
ggaucuuuaauauauaaaacuu

SEQ ID NO: 23103 - RNA, 19 nt, Artificial Sequence
  Synthetic
gaaaagcaaggacaaacuu

SEQ ID NO: 23104 - RNA, 24 nt, Artificial Sequence
  Synthetic
gcuaugaaaagcaaggacaaacuu

SEQ ID NO: 23105 - RNA, 18 nt, Artificial Sequence
  Synthetic
gcuugauaccuuaaacuu

SEQ ID NO: 23106 - RNA, 19 nt, Artificial Sequence
  Synthetic
ggcuugauaccuuaaacuu

SEQ ID NO: 23107 - RNA, 18 nt, Artificial Sequence
  Synthetic
guauguuuggaacaacuu

SEQ ID NO: 23108 - RNA, 20 nt, Artificial Sequence
  Synthetic
guguauguuuggaacaacuu

SEQ ID NO: 23109 - RNA, 20 nt, Artificial Sequence
  Synthetic
gaugggacagacagcaacuu

SEQ ID NO: 23110 - RNA, 18 nt, Artificial Sequence
  Synthetic
ggaaaugauuagcaacuu

SEQ ID NO: 23111 - RNA, 18 nt, Artificial Sequence
  Synthetic
guaagcaauaugcaacuu

SEQ ID NO: 23112 - RNA, 22 nt, Artificial Sequence
  Synthetic
gcauguaagcaauaugcaacuu

SEQ ID NO: 23113 - RNA, 23 nt, Artificial Sequence
  Synthetic
ggcauguaagcaauaugcaacuu

SEQ ID NO: 23114 - RNA, 21 nt, Artificial Sequence
  Synthetic
gacaugcauguugaagaacuu

SEQ ID NO: 23115 - RNA, 22 nt, Artificial Sequence
  Synthetic
gcucagacauuccagguaacuu

SEQ ID NO: 23116 - RNA, 20 nt, Artificial Sequence
  Synthetic
guaauuaucuuguguaacuu

SEQ ID NO: 23117 - RNA, 24 nt, Artificial Sequence
  Synthetic
gcucguaauuaucuuguguaacuu

SEQ ID NO: 23118 - RNA, 21 nt, Artificial Sequence
  Synthetic
gauucauugaaaaaaacacuu

SEQ ID NO: 23119 - RNA, 18 nt, Artificial Sequence
  Synthetic
gcagugccauucacacuu

SEQ ID NO: 23120 - RNA, 19 nt, Artificial Sequence
  Synthetic
ggcagugccauucacacuu

SEQ ID NO: 23121 - RNA, 21 nt, Artificial Sequence
  Synthetic
guggcagugccauucacacuu

SEQ ID NO: 23122 - RNA, 22 nt, Artificial Sequence
  Synthetic
gguggcagugccauucacacuu

SEQ ID NO: 23123 - RNA, 23 nt, Artificial Sequence
  Synthetic
ggguggcagugccauucacacuu

SEQ ID NO: 23124 - RNA, 22 nt, Artificial Sequence
  Synthetic
gcaaagugauggguucacacuu

SEQ ID NO: 23125 - RNA, 18 nt, Artificial Sequence
  Synthetic
guccgcaguagaccacuu

SEQ ID NO: 23126 - RNA, 20 nt, Artificial Sequence
  Synthetic
guguccgcaguagaccacuu

SEQ ID NO: 23127 - RNA, 21 nt, Artificial Sequence
  Synthetic
gguguccgcaguagaccacuu

SEQ ID NO: 23128 - RNA, 24 nt, Artificial Sequence
  Synthetic
gcaaacaguguugagggcccacuu

SEQ ID NO: 23129 - RNA, 21 nt, Artificial Sequence
  Synthetic
gcucuacuggauuugccacuu

SEQ ID NO: 23130 - RNA, 20 nt, Artificial Sequence
  Synthetic
gccuuauuuucacuccacuu

SEQ ID NO: 23131 - RNA, 22 nt, Artificial Sequence
  Synthetic
gaaaccauacugcauuccacuu

SEQ ID NO: 23132 - RNA, 22 nt, Artificial Sequence
  Synthetic
gucuacuguauacuaggcacuu

SEQ ID NO: 23133 - RNA, 24 nt, Artificial Sequence
  Synthetic
gugucuacuguauacuaggcacuu

SEQ ID NO: 23134 - RNA, 22 nt, Artificial Sequence
  Synthetic
gaauaaauguaguuuaucacuu

SEQ ID NO: 23135 - RNA, 24 nt, Artificial Sequence
  Synthetic
gagaauaaauguaguuuaucacuu

SEQ ID NO: 23136 - RNA, 21 nt, Artificial Sequence
  Synthetic
gucauuugcagaacaagacuu

SEQ ID NO: 23137 - RNA, 18 nt, Artificial Sequence
  Synthetic
gaugagcggaggagacuu

SEQ ID NO: 23138 - RNA, 19 nt, Artificial Sequence
  Synthetic
ggaugagcggaggagacuu

SEQ ID NO: 23139 - RNA, 24 nt, Artificial Sequence
  Synthetic
gaaaaggaugagcggaggagacuu

SEQ ID NO: 23140 - RNA, 20 nt, Artificial Sequence
  Synthetic
gacacauuugggugagacuu

SEQ ID NO: 23141 - RNA, 23 nt, Artificial Sequence
  Synthetic
gaagacacauuugggugagacuu

SEQ ID NO: 23142 - RNA, 18 nt, Artificial Sequence
  Synthetic
gcuacugucuuaggacuu

SEQ ID NO: 23143 - RNA, 21 nt, Artificial Sequence
  Synthetic
guuuuaagaauccucugacuu

SEQ ID NO: 23144 - RNA, 22 nt, Artificial Sequence
  Synthetic
gguuuuaagaauccucugacuu

SEQ ID NO: 23145 - RNA, 19 nt, Artificial Sequence
  Synthetic
gcagacucaguauugacuu

SEQ ID NO: 23146 - RNA, 23 nt, Artificial Sequence
  Synthetic
gauuuuaauucauuuacauacuu

SEQ ID NO: 23147 - RNA, 19 nt, Artificial Sequence
  Synthetic
gaagcaauggaucauacuu

SEQ ID NO: 23148 - RNA, 18 nt, Artificial Sequence
  Synthetic
gcaguuguucucauacuu

SEQ ID NO: 23149 - RNA, 19 nt, Artificial Sequence
  Synthetic
ggcaguuguucucauacuu

SEQ ID NO: 23150 - RNA, 20 nt, Artificial Sequence
  Synthetic
gggcaguuguucucauacuu

SEQ ID NO: 23151 - RNA, 21 nt, Artificial Sequence
  Synthetic
gcuaguguuuccaagauacuu

SEQ ID NO: 23152 - RNA, 19 nt, Artificial Sequence
  Synthetic
gcuuuugcuacauauacuu

SEQ ID NO: 23153 - RNA, 20 nt, Artificial Sequence
  Synthetic
ggcuuuugcuacauauacuu

SEQ ID NO: 23154 - RNA, 18 nt, Artificial Sequence
  Synthetic
guguguauacguauacuu

SEQ ID NO: 23155 - RNA, 20 nt, Artificial Sequence
  Synthetic
guguguguauacguauacuu

SEQ ID NO: 23156 - RNA, 22 nt, Artificial Sequence
  Synthetic
guguguguguauacguauacuu

SEQ ID NO: 23157 - RNA, 23 nt, Artificial Sequence
  Synthetic
gguguguguguauacguauacuu

SEQ ID NO: 23158 - RNA, 20 nt, Artificial Sequence
  Synthetic
guuaacuggcauggcuacuu

SEQ ID NO: 23159 - RNA, 20 nt, Artificial Sequence
  Synthetic
gcaugaaaauguaucuacuu

SEQ ID NO: 23160 - RNA, 24 nt, Artificial Sequence
  Synthetic
guaugcaugaaaauguaucuacuu

SEQ ID NO: 23161 - RNA, 18 nt, Artificial Sequence
  Synthetic
guacugcaaauucuacuu

SEQ ID NO: 23162 - RNA, 20 nt, Artificial Sequence
  Synthetic
gaguacugcaaauucuacuu

SEQ ID NO: 23163 - RNA, 19 nt, Artificial Sequence
  Synthetic
gcuccuuuaucaaguacuu

SEQ ID NO: 23164 - RNA, 21 nt, Artificial Sequence
  Synthetic
gaauugguuuuccacguacuu

SEQ ID NO: 23165 - RNA, 19 nt, Artificial Sequence
  Synthetic
gauaauauauagauuacuu

SEQ ID NO: 23166 - RNA, 22 nt, Artificial Sequence
  Synthetic
gaaaaaaaaaaauggauuacuu

SEQ ID NO: 23167 - RNA, 19 nt, Artificial Sequence
  Synthetic
gcugaaagauuccuuacuu

SEQ ID NO: 23168 - RNA, 21 nt, Artificial Sequence
  Synthetic
gugcugaaagauuccuuacuu

SEQ ID NO: 23169 - RNA, 18 nt, Artificial Sequence
  Synthetic
gaucugauagucuuacuu

SEQ ID NO: 23170 - RNA, 20 nt, Artificial Sequence
  Synthetic
guuguauaacacaguuacuu

SEQ ID NO: 23171 - RNA, 21 nt, Artificial Sequence
  Synthetic
gguuguauaacacaguuacuu

SEQ ID NO: 23172 - RNA, 20 nt, Artificial Sequence
  Synthetic
gaucuaauuuuauguuacuu

SEQ ID NO: 23173 - RNA, 19 nt, Artificial Sequence
  Synthetic
gagagaaggaauaaaccuu

SEQ ID NO: 23174 - RNA, 22 nt, Artificial Sequence
  Synthetic
gaugagagaaggaauaaaccuu

SEQ ID NO: 23175 - RNA, 19 nt, Artificial Sequence
  Synthetic
gcuugucacaagugaccuu

SEQ ID NO: 23176 - RNA, 19 nt, Artificial Sequence
  Synthetic
gauuugaaaaccauaccuu

SEQ ID NO: 23177 - RNA, 23 nt, Artificial Sequence
  Synthetic
gaaugauuugaaaaccauaccuu

SEQ ID NO: 23178 - RNA, 22 nt, Artificial Sequence
  Synthetic
gaauaauuaagaagccuaccuu

SEQ ID NO: 23179 - RNA, 24 nt, Artificial Sequence
  Synthetic
gagaauaauuaagaagccuaccuu

SEQ ID NO: 23180 - RNA, 18 nt, Artificial Sequence
  Synthetic
gccauuccaugcuaccuu

SEQ ID NO: 23181 - RNA, 20 nt, Artificial Sequence
  Synthetic
gugccauuccaugcuaccuu

SEQ ID NO: 23182 - RNA, 19 nt, Artificial Sequence
  Synthetic
gccuuccuuuucuuaccuu

SEQ ID NO: 23183 - RNA, 23 nt, Artificial Sequence
  Synthetic
gucugccuuccuuuucuuaccuu

SEQ ID NO: 23184 - RNA, 24 nt, Artificial Sequence
  Synthetic
ggucugccuuccuuuucuuaccuu

SEQ ID NO: 23185 - RNA, 22 nt, Artificial Sequence
  Synthetic
gagguagaaaaaaaaaacccuu

SEQ ID NO: 23186 - RNA, 18 nt, Artificial Sequence
  Synthetic
guauuacuuaaaacccuu

SEQ ID NO: 23187 - RNA, 21 nt, Artificial Sequence
  Synthetic
gaaguauuacuuaaaacccuu

SEQ ID NO: 23188 - RNA, 18 nt, Artificial Sequence
  Synthetic
gggcuuggagagacccuu

SEQ ID NO: 23189 - RNA, 20 nt, Artificial Sequence
  Synthetic
gugggcuuggagagacccuu

SEQ ID NO: 23190 - RNA, 21 nt, Artificial Sequence
  Synthetic
ggugggcuuggagagacccuu

SEQ ID NO: 23191 - RNA, 23 nt, Artificial Sequence
  Synthetic
gaggugggcuuggagagacccuu

SEQ ID NO: 23192 - RNA, 19 nt, Artificial Sequence
  Synthetic
gcaguuucacaugacccuu

SEQ ID NO: 23193 - RNA, 22 nt, Artificial Sequence
  Synthetic
gacacuucagacaaggccccuu

SEQ ID NO: 23194 - RNA, 23 nt, Artificial Sequence
  Synthetic
ggacacuucagacaaggccccuu

SEQ ID NO: 23195 - RNA, 24 nt, Artificial Sequence
  Synthetic
gggacacuucagacaaggccccuu

SEQ ID NO: 23196 - RNA, 24 nt, Artificial Sequence
  Synthetic
guccuuuaauaauuuccuccccuu

SEQ ID NO: 23197 - RNA, 19 nt, Artificial Sequence
  Synthetic
gcacuugcugaguccccuu

SEQ ID NO: 23198 - RNA, 22 nt, Artificial Sequence
  Synthetic
gcucuaagaaugggaaucccuu

SEQ ID NO: 23199 - RNA, 22 nt, Artificial Sequence
  Synthetic
gcaacgugcgugcagaucccuu

SEQ ID NO: 23200 - RNA, 23 nt, Artificial Sequence
  Synthetic
gauacauuuauuccuuaucccuu

SEQ ID NO: 23201 - RNA, 19 nt, Artificial Sequence
  Synthetic
gacuuuuuaaaauucccuu

SEQ ID NO: 23202 - RNA, 20 nt, Artificial Sequence
  Synthetic
ggacuuuuuaaaauucccuu

SEQ ID NO: 23203 - RNA, 22 nt, Artificial Sequence
  Synthetic
guggacuuuuuaaaauucccuu

SEQ ID NO: 23204 - RNA, 24 nt, Artificial Sequence
  Synthetic
gaacauaaaacuaaacauucccuu

SEQ ID NO: 23205 - RNA, 18 nt, Artificial Sequence
  Synthetic
gaggaucuuucuucccuu

SEQ ID NO: 23206 - RNA, 20 nt, Artificial Sequence
  Synthetic
gagaggaucuuucuucccuu

SEQ ID NO: 23207 - RNA, 18 nt, Artificial Sequence
  Synthetic
gaacaagggcaaagccuu

SEQ ID NO: 23208 - RNA, 23 nt, Artificial Sequence
  Synthetic
guaaagaacaagggcaaagccuu

SEQ ID NO: 23209 - RNA, 24 nt, Artificial Sequence
  Synthetic
gguaaagaacaagggcaaagccuu

SEQ ID NO: 23210 - RNA, 23 nt, Artificial Sequence
  Synthetic
gacaacauuauucugugagccuu

SEQ ID NO: 23211 - RNA, 18 nt, Artificial Sequence
  Synthetic
gaauuuaguuuuagccuu

SEQ ID NO: 23212 - RNA, 19 nt, Artificial Sequence
  Synthetic
guugguagagaaaggccuu

SEQ ID NO: 23213 - RNA, 21 nt, Artificial Sequence
  Synthetic
guguugguagagaaaggccuu

SEQ ID NO: 23214 - RNA, 23 nt, Artificial Sequence
  Synthetic
guguguugguagagaaaggccuu

SEQ ID NO: 23215 - RNA, 19 nt, Artificial Sequence
  Synthetic
guaauggaguaaaugccuu

SEQ ID NO: 23216 - RNA, 20 nt, Artificial Sequence
  Synthetic
gguaauggaguaaaugccuu

SEQ ID NO: 23217 - RNA, 24 nt, Artificial Sequence
  Synthetic
guaagguaauggaguaaaugccuu

SEQ ID NO: 23218 - RNA, 19 nt, Artificial Sequence
  Synthetic
guuuauaaaccagugccuu

SEQ ID NO: 23219 - RNA, 20 nt, Artificial Sequence
  Synthetic
gguuuauaaaccagugccuu

SEQ ID NO: 23220 - RNA, 21 nt, Artificial Sequence
  Synthetic
gcuuuuaacuucuguugccuu

SEQ ID NO: 23221 - RNA, 19 nt, Artificial Sequence
  Synthetic
gaugguuugaguaauccuu

SEQ ID NO: 23222 - RNA, 23 nt, Artificial Sequence
  Synthetic
gaaugaugguuugaguaauccuu

SEQ ID NO: 23223 - RNA, 24 nt, Artificial Sequence
  Synthetic
ggaaugaugguuugaguaauccuu

SEQ ID NO: 23224 - RNA, 19 nt, Artificial Sequence
  Synthetic
gaaaagacaaucuauccuu

SEQ ID NO: 23225 - RNA, 23 nt, Artificial Sequence
  Synthetic
guuagaaaagacaaucuauccuu

SEQ ID NO: 23226 - RNA, 24 nt, Artificial Sequence
  Synthetic
gguuagaaaagacaaucuauccuu

SEQ ID NO: 23227 - RNA, 21 nt, Artificial Sequence
  Synthetic
gccuugaauaauuuuauccuu

SEQ ID NO: 23228 - RNA, 18 nt, Artificial Sequence
  Synthetic
guuggagaucaucuccuu

SEQ ID NO: 23229 - RNA, 20 nt, Artificial Sequence
  Synthetic
gaguuggagaucaucuccuu

SEQ ID NO: 23230 - RNA, 21 nt, Artificial Sequence
  Synthetic
ggaguuggagaucaucuccuu

SEQ ID NO: 23231 - RNA, 23 nt, Artificial Sequence
  Synthetic
gaggaguuggagaucaucuccuu

SEQ ID NO: 23232 - RNA, 18 nt, Artificial Sequence
  Synthetic
ggcauucaucuucuccuu

SEQ ID NO: 23233 - RNA, 23 nt, Artificial Sequence
  Synthetic
gcuuaggcauucaucuucuccuu

SEQ ID NO: 23234 - RNA, 23 nt, Artificial Sequence
  Synthetic
gauucccuuuauuuguauuccuu

SEQ ID NO: 23235 - RNA, 22 nt, Artificial Sequence
  Synthetic
guaaauauuguuccauuuccuu

SEQ ID NO: 23236 - RNA, 23 nt, Artificial Sequence
  Synthetic
guaaacuacuacccccaaagcuu

SEQ ID NO: 23237 - RNA, 24 nt, Artificial Sequence
  Synthetic
gccuuccaauauaugcuaaagcuu

SEQ ID NO: 23238 - RNA, 20 nt, Artificial Sequence
  Synthetic
gcaaguaauaacacaagcuu

SEQ ID NO: 23239 - RNA, 23 nt, Artificial Sequence
  Synthetic
guagcaaguaauaacacaagcuu

SEQ ID NO: 23240 - RNA, 21 nt, Artificial Sequence
  Synthetic
gaccuccccaauuagaagcuu

SEQ ID NO: 23241 - RNA, 24 nt, Artificial Sequence
  Synthetic
gaacuuugaacucgagguaagcuu

SEQ ID NO: 23242 - RNA, 20 nt, Artificial Sequence
  Synthetic
guucucaggcccagcagcuu

SEQ ID NO: 23243 - RNA, 21 nt, Artificial Sequence
  Synthetic
gcuauuccaaaauuucagcuu

SEQ ID NO: 23244 - RNA, 19 nt, Artificial Sequence
  Synthetic
gacucuaaguggggagcuu

SEQ ID NO: 23245 - RNA, 20 nt, Artificial Sequence
  Synthetic
ggacucuaaguggggagcuu

SEQ ID NO: 23246 - RNA, 21 nt, Artificial Sequence
  Synthetic
gggacucuaaguggggagcuu

SEQ ID NO: 23247 - RNA, 22 nt, Artificial Sequence
  Synthetic
ggggacucuaaguggggagcuu

SEQ ID NO: 23248 - RNA, 20 nt, Artificial Sequence
  Synthetic
guuuauguuuucaugagcuu

SEQ ID NO: 23249 - RNA, 18 nt, Artificial Sequence
  Synthetic
gggcuggaauuauagcuu

SEQ ID NO: 23250 - RNA, 23 nt, Artificial Sequence
  Synthetic
gauuugggcuggaauuauagcuu

SEQ ID NO: 23251 - RNA, 22 nt, Artificial Sequence
  Synthetic
guauauuuuuuccuuauagcuu

SEQ ID NO: 23252 - RNA, 23 nt, Artificial Sequence
  Synthetic
gguauauuuuuuccuuauagcuu

SEQ ID NO: 23253 - RNA, 21 nt, Artificial Sequence
  Synthetic
guuauuaggauaauaaggcuu

SEQ ID NO: 23254 - RNA, 23 nt, Artificial Sequence
  Synthetic
guguuauuaggauaauaaggcuu

SEQ ID NO: 23255 - RNA, 20 nt, Artificial Sequence
  Synthetic
gucuccauccugccaggcuu

SEQ ID NO: 23256 - RNA, 21 nt, Artificial Sequence
  Synthetic
ggucuccauccugccaggcuu

SEQ ID NO: 23257 - RNA, 18 nt, Artificial Sequence
  Synthetic
guuaaaauacagaggcuu

SEQ ID NO: 23258 - RNA, 18 nt, Artificial Sequence
  Synthetic
guucuuaccauugggcuu

SEQ ID NO: 23259 - RNA, 19 nt, Artificial Sequence
  Synthetic
gcagauaaaccgauggcuu

SEQ ID NO: 23260 - RNA, 18 nt, Artificial Sequence
  Synthetic
ggcagcaaacuauggcuu

SEQ ID NO: 23261 - RNA, 19 nt, Artificial Sequence
  Synthetic
gggcagcaaacuauggcuu

SEQ ID NO: 23262 - RNA, 18 nt, Artificial Sequence
  Synthetic
gaaacacaggacuggcuu

SEQ ID NO: 23263 - RNA, 21 nt, Artificial Sequence
  Synthetic
gaaccaaaacagcaguggcuu

SEQ ID NO: 23264 - RNA, 22 nt, Artificial Sequence
  Synthetic
ggaaccaaaacagcaguggcuu

SEQ ID NO: 23265 - RNA, 18 nt, Artificial Sequence
  Synthetic
ggguugaacugguggcuu

SEQ ID NO: 23266 - RNA, 20 nt, Artificial Sequence
  Synthetic
gaggguugaacugguggcuu

SEQ ID NO: 23267 - RNA, 22 nt, Artificial Sequence
  Synthetic
gagaggguugaacugguggcuu

SEQ ID NO: 23268 - RNA, 22 nt, Artificial Sequence
  Synthetic
gcaacagaggauuucaaugcuu

SEQ ID NO: 23269 - RNA, 21 nt, Artificial Sequence
  Synthetic
gucagagcauaaaucaugcuu

SEQ ID NO: 23270 - RNA, 22 nt, Artificial Sequence
  Synthetic
ggucagagcauaaaucaugcuu

SEQ ID NO: 23271 - RNA, 23 nt, Artificial Sequence
  Synthetic
gggucagagcauaaaucaugcuu

SEQ ID NO: 23272 - RNA, 23 nt, Artificial Sequence
  Synthetic
gccccucccuuucccuccugcuu

SEQ ID NO: 23273 - RNA, 24 nt, Artificial Sequence
  Synthetic
gccccauuucucuuccagcugcuu

SEQ ID NO: 23274 - RNA, 18 nt, Artificial Sequence
  Synthetic
gagucuacucuucugcuu

SEQ ID NO: 23275 - RNA, 23 nt, Artificial Sequence
  Synthetic
gaacaugggguaucuuucugcuu

SEQ ID NO: 23276 - RNA, 18 nt, Artificial Sequence
  Synthetic
guccuuuaaaaagugcuu

SEQ ID NO: 23277 - RNA, 19 nt, Artificial Sequence
  Synthetic
gguccuuuaaaaagugcuu

SEQ ID NO: 23278 - RNA, 20 nt, Artificial Sequence
  Synthetic
ggguccuuuaaaaagugcuu

SEQ ID NO: 23279 - RNA, 19 nt, Artificial Sequence
  Synthetic
gacauuuacaauagugcuu

SEQ ID NO: 23280 - RNA, 22 nt, Artificial Sequence
  Synthetic
gcagacauuuacaauagugcuu

SEQ ID NO: 23281 - RNA, 18 nt, Artificial Sequence
  Synthetic
guccgcuuguaauugcuu

SEQ ID NO: 23282 - RNA, 20 nt, Artificial Sequence
  Synthetic
gaguccgcuuguaauugcuu

SEQ ID NO: 23283 - RNA, 18 nt, Artificial Sequence
  Synthetic
ggagucaaagaguugcuu

SEQ ID NO: 23284 - RNA, 18 nt, Artificial Sequence
  Synthetic
gaagcugaaagguugcuu

SEQ ID NO: 23285 - RNA, 19 nt, Artificial Sequence
  Synthetic
ggaagcugaaagguugcuu

SEQ ID NO: 23286 - RNA, 20 nt, Artificial Sequence
  Synthetic
gggaagcugaaagguugcuu

SEQ ID NO: 23287 - RNA, 20 nt, Artificial Sequence
  Synthetic
gauaauaaucccuguugcuu

SEQ ID NO: 23288 - RNA, 22 nt, Artificial Sequence
  Synthetic
gagauaauaaucccuguugcuu

SEQ ID NO: 23289 - RNA, 20 nt, Artificial Sequence
  Synthetic
gauaugcuugcccuuugcuu

SEQ ID NO: 23290 - RNA, 23 nt, Artificial Sequence
  Synthetic
guagauaugcuugcccuuugcuu

SEQ ID NO: 23291 - RNA, 23 nt, Artificial Sequence
  Synthetic
gucauaaaacauacugaaaucuu

SEQ ID NO: 23292 - RNA, 24 nt, Artificial Sequence
  Synthetic
gcauucauuuuuaaacuaaaucuu

SEQ ID NO: 23293 - RNA, 18 nt, Artificial Sequence
  Synthetic
guacagauauucaaucuu

SEQ ID NO: 23294 - RNA, 24 nt, Artificial Sequence
  Synthetic
gcaaauguacagauauucaaucuu

SEQ ID NO: 23295 - RNA, 18 nt, Artificial Sequence
  Synthetic
gcauauugaaagaaucuu

SEQ ID NO: 23296 - RNA, 21 nt, Artificial Sequence
  Synthetic
gcagcauauugaaagaaucuu

SEQ ID NO: 23297 - RNA, 22 nt, Artificial Sequence
  Synthetic
ggcagcauauugaaagaaucuu

SEQ ID NO: 23298 - RNA, 23 nt, Artificial Sequence
  Synthetic
gggcagcauauugaaagaaucuu

SEQ ID NO: 23299 - RNA, 24 nt, Artificial Sequence
  Synthetic
ggggcagcauauugaaagaaucuu

SEQ ID NO: 23300 - RNA, 23 nt, Artificial Sequence
  Synthetic
gauauuuacuggcucaacaucuu

SEQ ID NO: 23301 - RNA, 19 nt, Artificial Sequence
  Synthetic
guuaauuaaagaccaucuu

SEQ ID NO: 23302 - RNA, 24 nt, Artificial Sequence
  Synthetic
guuuaguuaauuaaagaccaucuu

SEQ ID NO: 23303 - RNA, 19 nt, Artificial Sequence
  Synthetic
gauuuucaaagaagaucuu

SEQ ID NO: 23304 - RNA, 18 nt, Artificial Sequence
  Synthetic
ggaugcucugaggaucuu

SEQ ID NO: 23305 - RNA, 19 nt, Artificial Sequence
  Synthetic
gggaugcucugaggaucuu

SEQ ID NO: 23306 - RNA, 20 nt, Artificial Sequence
  Synthetic
ggggaugcucugaggaucuu

SEQ ID NO: 23307 - RNA, 23 nt, Artificial Sequence
  Synthetic
guuggggaugcucugaggaucuu

SEQ ID NO: 23308 - RNA, 21 nt, Artificial Sequence
  Synthetic
gauuuuacuccagaugaucuu

SEQ ID NO: 23309 - RNA, 18 nt, Artificial Sequence
  Synthetic
guuaagugauuguaucuu

SEQ ID NO: 23310 - RNA, 19 nt, Artificial Sequence
  Synthetic
gguuaagugauuguaucuu

SEQ ID NO: 23311 - RNA, 20 nt, Artificial Sequence
  Synthetic
ggguuaagugauuguaucuu

SEQ ID NO: 23312 - RNA, 22 nt, Artificial Sequence
  Synthetic
gaggguuaagugauuguaucuu

SEQ ID NO: 23313 - RNA, 24 nt, Artificial Sequence
  Synthetic
gagaggguuaagugauuguaucuu

SEQ ID NO: 23314 - RNA, 18 nt, Artificial Sequence
  Synthetic
gaguuuucuuguuaucuu

SEQ ID NO: 23315 - RNA, 22 nt, Artificial Sequence
  Synthetic
guacgaguuuucuuguuaucuu

SEQ ID NO: 23316 - RNA, 23 nt, Artificial Sequence
  Synthetic
gguacgaguuuucuuguuaucuu

SEQ ID NO: 23317 - RNA, 21 nt, Artificial Sequence
  Synthetic
gcucucugaaucuaaacucuu

SEQ ID NO: 23318 - RNA, 23 nt, Artificial Sequence
  Synthetic
gugcucucugaaucuaaacucuu

SEQ ID NO: 23319 - RNA, 23 nt, Artificial Sequence
  Synthetic
gcucauguggccuguaaacucuu

SEQ ID NO: 23320 - RNA, 24 nt, Artificial Sequence
  Synthetic
ggcucauguggccuguaaacucuu

SEQ ID NO: 23321 - RNA, 18 nt, Artificial Sequence
  Synthetic
gcuaaaagcuuuacucuu

SEQ ID NO: 23322 - RNA, 20 nt, Artificial Sequence
  Synthetic
gugcuaaaagcuuuacucuu

SEQ ID NO: 23323 - RNA, 23 nt, Artificial Sequence
  Synthetic
gaagugcuaaaagcuuuacucuu

SEQ ID NO: 23324 - RNA, 24 nt, Artificial Sequence
  Synthetic
ggaagugcuaaaagcuuuacucuu

SEQ ID NO: 23325 - RNA, 18 nt, Artificial Sequence
  Synthetic
gcguuuuauuaaccucuu

SEQ ID NO: 23326 - RNA, 19 nt, Artificial Sequence
  Synthetic
ggcguuuuauuaaccucuu

SEQ ID NO: 23327 - RNA, 19 nt, Artificial Sequence
  Synthetic
gaagaggguagacccucuu

SEQ ID NO: 23328 - RNA, 22 nt, Artificial Sequence
  Synthetic
guagaagaggguagacccucuu

SEQ ID NO: 23329 - RNA, 24 nt, Artificial Sequence
  Synthetic
gaguagaagaggguagacccucuu

SEQ ID NO: 23330 - RNA, 20 nt, Artificial Sequence
  Synthetic
gaaagccuguaaaagcucuu

SEQ ID NO: 23331 - RNA, 19 nt, Artificial Sequence
  Synthetic
guaaauaaugcaagcucuu

SEQ ID NO: 23332 - RNA, 19 nt, Artificial Sequence
  Synthetic
guucagauuagaagcucuu

SEQ ID NO: 23333 - RNA, 22 nt, Artificial Sequence
  Synthetic
gcuaauaacuggauaagcucuu

SEQ ID NO: 23334 - RNA, 18 nt, Artificial Sequence
  Synthetic
gucguuucucaggcucuu

SEQ ID NO: 23335 - RNA, 21 nt, Artificial Sequence
  Synthetic
gcugucguuucucaggcucuu

SEQ ID NO: 23336 - RNA, 24 nt, Artificial Sequence
  Synthetic
guuacaaaaugaaaucauucucuu

SEQ ID NO: 23337 - RNA, 21 nt, Artificial Sequence
  Synthetic
gauaccugggcuuauucucuu

SEQ ID NO: 23338 - RNA, 23 nt, Artificial Sequence
  Synthetic
gucucuaaaauuaagguucucuu

SEQ ID NO: 23339 - RNA, 23 nt, Artificial Sequence
  Synthetic
gucuuauggugggcuuuucucuu

SEQ ID NO: 23340 - RNA, 19 nt, Artificial Sequence
  Synthetic
guauuuacauaaucgucuu

SEQ ID NO: 23341 - RNA, 20 nt, Artificial Sequence
  Synthetic
gguauuuacauaaucgucuu

SEQ ID NO: 23342 - RNA, 23 nt, Artificial Sequence
  Synthetic
gcugguauuuacauaaucgucuu

SEQ ID NO: 23343 - RNA, 24 nt, Artificial Sequence
  Synthetic
ggcugguauuuacauaaucgucuu

SEQ ID NO: 23344 - RNA, 21 nt, Artificial Sequence
  Synthetic
gacugugaauucuguggucuu

SEQ ID NO: 23345 - RNA, 19 nt, Artificial Sequence
  Synthetic
gccgugacaauucugucuu

SEQ ID NO: 23346 - RNA, 18 nt, Artificial Sequence
  Synthetic
guucgaucuaauugucuu

SEQ ID NO: 23347 - RNA, 18 nt, Artificial Sequence
  Synthetic
ggggagcuaccaauucuu

SEQ ID NO: 23348 - RNA, 24 nt, Artificial Sequence
  Synthetic
gucucuggggagcuaccaauucuu

SEQ ID NO: 23349 - RNA, 23 nt, Artificial Sequence
  Synthetic
gccauuucuucagucugauucuu

SEQ ID NO: 23350 - RNA, 20 nt, Artificial Sequence
  Synthetic
guuauggaaccuguauucuu

SEQ ID NO: 23351 - RNA, 24 nt, Artificial Sequence
  Synthetic
guaaguuauggaaccuguauucuu

SEQ ID NO: 23352 - RNA, 19 nt, Artificial Sequence
  Synthetic
gaaguacaaggaacuucuu

SEQ ID NO: 23353 - RNA, 20 nt, Artificial Sequence
  Synthetic
ggaaguacaaggaacuucuu

SEQ ID NO: 23354 - RNA, 22 nt, Artificial Sequence
  Synthetic
gaggaaguacaaggaacuucuu

SEQ ID NO: 23355 - RNA, 22 nt, Artificial Sequence
  Synthetic
gcaccuccaucgguaacuucuu

SEQ ID NO: 23356 - RNA, 18 nt, Artificial Sequence
  Synthetic
gagggaauuuaacuucuu

SEQ ID NO: 23357 - RNA, 22 nt, Artificial Sequence
  Synthetic
gcaugagggaauuuaacuucuu

SEQ ID NO: 23358 - RNA, 24 nt, Artificial Sequence
  Synthetic
gugcaugagggaauuuaacuucuu

SEQ ID NO: 23359 - RNA, 24 nt, Artificial Sequence
  Synthetic
gaaacucuuaugugcagacuucuu

SEQ ID NO: 23360 - RNA, 21 nt, Artificial Sequence
  Synthetic
guuugaaaaacuucccuucuu

SEQ ID NO: 23361 - RNA, 23 nt, Artificial Sequence
  Synthetic
guguuugaaaaacuucccuucuu

SEQ ID NO: 23362 - RNA, 18 nt, Artificial Sequence
  Synthetic
guaaaccauuaucuucuu

SEQ ID NO: 23363 - RNA, 21 nt, Artificial Sequence
  Synthetic
gaacagaauuacaccuuucuu

SEQ ID NO: 23364 - RNA, 22 nt, Artificial Sequence
  Synthetic
ggaacagaauuacaccuuucuu

SEQ ID NO: 23365 - RNA, 24 nt, Artificial Sequence
  Synthetic
gaggaacagaauuacaccuuucuu

SEQ ID NO: 23366 - RNA, 23 nt, Artificial Sequence
  Synthetic
gauugcauucuuucuucuuucuu

SEQ ID NO: 23367 - RNA, 18 nt, Artificial Sequence
  Synthetic
gaguaaagcuauuuucuu

SEQ ID NO: 23368 - RNA, 18 nt, Artificial Sequence
  Synthetic
gcagagcagaguuuucuu

SEQ ID NO: 23369 - RNA, 19 nt, Artificial Sequence
  Synthetic
ggcagagcagaguuuucuu

SEQ ID NO: 23370 - RNA, 20 nt, Artificial Sequence
  Synthetic
gggcagagcagaguuuucuu

SEQ ID NO: 23371 - RNA, 18 nt, Artificial Sequence
  Synthetic
gucuuuggaaaaaaaguu

SEQ ID NO: 23372 - RNA, 24 nt, Artificial Sequence
  Synthetic
gcaaaugucuuuggaaaaaaaguu

SEQ ID NO: 23373 - RNA, 18 nt, Artificial Sequence
  Synthetic
ggaagaauaggaaaaguu

SEQ ID NO: 23374 - RNA, 19 nt, Artificial Sequence
  Synthetic
gggaagaauaggaaaaguu

SEQ ID NO: 23375 - RNA, 20 nt, Artificial Sequence
  Synthetic
ggggaagaauaggaaaaguu

SEQ ID NO: 23376 - RNA, 18 nt, Artificial Sequence
  Synthetic
gguaucacucacaaaguu

SEQ ID NO: 23377 - RNA, 23 nt, Artificial Sequence
  Synthetic
gcacagguaucacucacaaaguu

SEQ ID NO: 23378 - RNA, 24 nt, Artificial Sequence
  Synthetic
ggcacagguaucacucacaaaguu

SEQ ID NO: 23379 - RNA, 23 nt, Artificial Sequence
  Synthetic
guauaucagagauauuacaaguu

SEQ ID NO: 23380 - RNA, 22 nt, Artificial Sequence
  Synthetic
guuaagcccuaggccggaaguu

SEQ ID NO: 23381 - RNA, 24 nt, Artificial Sequence
  Synthetic
gcguuaagcccuaggccggaaguu

SEQ ID NO: 23382 - RNA, 19 nt, Artificial Sequence
  Synthetic
gugaauggguauugaaguu

SEQ ID NO: 23383 - RNA, 22 nt, Artificial Sequence
  Synthetic
gacauaacacaaguuauaaguu

SEQ ID NO: 23384 - RNA, 19 nt, Artificial Sequence
  Synthetic
guuacacccuuccuaaguu

SEQ ID NO: 23385 - RNA, 23 nt, Artificial Sequence
  Synthetic
gaauguuacacccuuccuaaguu

SEQ ID NO: 23386 - RNA, 24 nt, Artificial Sequence
  Synthetic
gaacuuauaucacaauacacaguu

SEQ ID NO: 23387 - RNA, 24 nt, Artificial Sequence
  Synthetic
gauuuaaauaaguggcccacaguu

SEQ ID NO: 23388 - RNA, 23 nt, Artificial Sequence
  Synthetic
gccaaaaaaauguaugcacaguu

SEQ ID NO: 23389 - RNA, 18 nt, Artificial Sequence
  Synthetic
gugaggcuugguacaguu

SEQ ID NO: 23390 - RNA, 20 nt, Artificial Sequence
  Synthetic
gagugaggcuugguacaguu

SEQ ID NO: 23391 - RNA, 21 nt, Artificial Sequence
  Synthetic
ggagugaggcuugguacaguu

SEQ ID NO: 23392 - RNA, 22 nt, Artificial Sequence
  Synthetic
gggagugaggcuugguacaguu

SEQ ID NO: 23393 - RNA, 20 nt, Artificial Sequence
  Synthetic
gauaucaccauuuaucaguu

SEQ ID NO: 23394 - RNA, 23 nt, Artificial Sequence
  Synthetic
guccaaauaacaucuguucaguu

SEQ ID NO: 23395 - RNA, 18 nt, Artificial Sequence
  Synthetic
guacauuuuagcagaguu

SEQ ID NO: 23396 - RNA, 19 nt, Artificial Sequence
  Synthetic
gaaugauagucauagaguu

SEQ ID NO: 23397 - RNA, 20 nt, Artificial Sequence
  Synthetic
ggaaugauagucauagaguu

SEQ ID NO: 23398 - RNA, 23 nt, Artificial Sequence
  Synthetic
guaggaaugauagucauagaguu

SEQ ID NO: 23399 - RNA, 18 nt, Artificial Sequence
  Synthetic
ggaauucacaaaggaguu

SEQ ID NO: 23400 - RNA, 20 nt, Artificial Sequence
  Synthetic
gaggaauucacaaaggaguu

SEQ ID NO: 23401 - RNA, 23 nt, Artificial Sequence
  Synthetic
gaugaggaauucacaaaggaguu

SEQ ID NO: 23402 - RNA, 19 nt, Artificial Sequence
  Synthetic
gcaugguagccccggaguu

SEQ ID NO: 23403 - RNA, 22 nt, Artificial Sequence
  Synthetic
gcugcaugguagccccggaguu

SEQ ID NO: 23404 - RNA, 23 nt, Artificial Sequence
  Synthetic
guuucuucugcuuggugggaguu

SEQ ID NO: 23405 - RNA, 22 nt, Artificial Sequence
  Synthetic
gcucuucaguggguuuggaguu

SEQ ID NO: 23406 - RNA, 24 nt, Artificial Sequence
  Synthetic
gagcucuucaguggguuuggaguu

SEQ ID NO: 23407 - RNA, 18 nt, Artificial Sequence
  Synthetic
gacauaaacucaugaguu

SEQ ID NO: 23408 - RNA, 19 nt, Artificial Sequence
  Synthetic
ggacauaaacucaugaguu

SEQ ID NO: 23409 - RNA, 20 nt, Artificial Sequence
  Synthetic
gggacauaaacucaugaguu

SEQ ID NO: 23410 - RNA, 23 nt, Artificial Sequence
  Synthetic
gucagcaggugaaaauaugaguu

SEQ ID NO: 23411 - RNA, 23 nt, Artificial Sequence
  Synthetic
gucauuuacauugcaauugaguu

SEQ ID NO: 23412 - RNA, 18 nt, Artificial Sequence
  Synthetic
gccuaugggaauugaguu

SEQ ID NO: 23413 - RNA, 20 nt, Artificial Sequence
  Synthetic
gagccuaugggaauugaguu

SEQ ID NO: 23414 - RNA, 19 nt, Artificial Sequence
  Synthetic
gaauauaacauguugaguu

SEQ ID NO: 23415 - RNA, 20 nt, Artificial Sequence
  Synthetic
ggaauauaacauguugaguu

SEQ ID NO: 23416 - RNA, 22 nt, Artificial Sequence
  Synthetic
gaggaauauaacauguugaguu

SEQ ID NO: 23417 - RNA, 24 nt, Artificial Sequence
  Synthetic
gagaggaauauaacauguugaguu

SEQ ID NO: 23418 - RNA, 21 nt, Artificial Sequence
  Synthetic
gacuaauaaugcucaauaguu

SEQ ID NO: 23419 - RNA, 23 nt, Artificial Sequence
  Synthetic
gagacuaauaaugcucaauaguu

SEQ ID NO: 23420 - RNA, 24 nt, Artificial Sequence
  Synthetic
ggagacuaauaaugcucaauaguu

SEQ ID NO: 23421 - RNA, 20 nt, Artificial Sequence
  Synthetic
gcauggauggcuccauaguu

SEQ ID NO: 23422 - RNA, 21 nt, Artificial Sequence
  Synthetic
ggcauggauggcuccauaguu

SEQ ID NO: 23423 - RNA, 22 nt, Artificial Sequence
  Synthetic
gaaacuauacaugugcauaguu

SEQ ID NO: 23424 - RNA, 23 nt, Artificial Sequence
  Synthetic
ggaaacuauacaugugcauaguu

SEQ ID NO: 23425 - RNA, 21 nt, Artificial Sequence
  Synthetic
guauuuuucuacauacuaguu

SEQ ID NO: 23426 - RNA, 22 nt, Artificial Sequence
  Synthetic
gguauuuuucuacauacuaguu

SEQ ID NO: 23427 - RNA, 23 nt, Artificial Sequence
  Synthetic
gccacuuguacauguuccuaguu

SEQ ID NO: 23428 - RNA, 24 nt, Artificial Sequence
  Synthetic
ggccacuuguacauguuccuaguu

SEQ ID NO: 23429 - RNA, 18 nt, Artificial Sequence
  Synthetic
ggauagcugauaguaguu

SEQ ID NO: 23430 - RNA, 20 nt, Artificial Sequence
  Synthetic
gaggauagcugauaguaguu

SEQ ID NO: 23431 - RNA, 24 nt, Artificial Sequence
  Synthetic
gcaaaauuauuggacuauguaguu

SEQ ID NO: 23432 - RNA, 18 nt, Artificial Sequence
  Synthetic
gccucaagaacuuuaguu

SEQ ID NO: 23433 - RNA, 23 nt, Artificial Sequence
  Synthetic
gcuuugccucaagaacuuuaguu

SEQ ID NO: 23434 - RNA, 24 nt, Artificial Sequence
  Synthetic
ggcuuugccucaagaacuuuaguu

SEQ ID NO: 23435 - RNA, 24 nt, Artificial Sequence
  Synthetic
gaacuaaacuugaguuuuaacguu

SEQ ID NO: 23436 - RNA, 20 nt, Artificial Sequence
  Synthetic
gccccacuuccaaacacguu

SEQ ID NO: 23437 - RNA, 21 nt, Artificial Sequence
  Synthetic
ggccccacuuccaaacacguu

SEQ ID NO: 23438 - RNA, 24 nt, Artificial Sequence
  Synthetic
guuggccccacuuccaaacacguu

SEQ ID NO: 23439 - RNA, 19 nt, Artificial Sequence
  Synthetic
gaauauuugaggccacguu

SEQ ID NO: 23440 - RNA, 22 nt, Artificial Sequence
  Synthetic
guucucaggcuucaaauacguu

SEQ ID NO: 23441 - RNA, 18 nt, Artificial Sequence
  Synthetic
gucaaaaaaggaagcguu

SEQ ID NO: 23442 - RNA, 20 nt, Artificial Sequence
  Synthetic
gauccuguggugugagcguu

SEQ ID NO: 23443 - RNA, 22 nt, Artificial Sequence
  Synthetic
gagauccuguggugugagcguu

SEQ ID NO: 23444 - RNA, 24 nt, Artificial Sequence
  Synthetic
gagagauccuguggugugagcguu

SEQ ID NO: 23445 - RNA, 18 nt, Artificial Sequence
  Synthetic
gagagaaauauuugcguu

SEQ ID NO: 23446 - RNA, 22 nt, Artificial Sequence
  Synthetic
gucagagagaaauauuugcguu

SEQ ID NO: 23447 - RNA, 24 nt, Artificial Sequence
  Synthetic
gugucagagagaaauauuugcguu

SEQ ID NO: 23448 - RNA, 18 nt, Artificial Sequence
  Synthetic
gguaaauaccuuugcguu

SEQ ID NO: 23449 - RNA, 19 nt, Artificial Sequence
  Synthetic
gaaagaauaagaauucguu

SEQ ID NO: 23450 - RNA, 22 nt, Artificial Sequence
  Synthetic
gcccaagaaaauauguuucguu

SEQ ID NO: 23451 - RNA, 23 nt, Artificial Sequence
  Synthetic
ggcccaagaaaauauguuucguu

SEQ ID NO: 23452 - RNA, 18 nt, Artificial Sequence
  Synthetic
gugaauaucuaaaagguu

SEQ ID NO: 23453 - RNA, 18 nt, Artificial Sequence
  Synthetic
ggcagaagggagaagguu

SEQ ID NO: 23454 - RNA, 19 nt, Artificial Sequence
  Synthetic
gggcagaagggagaagguu

SEQ ID NO: 23455 - RNA, 20 nt, Artificial Sequence
  Synthetic
ggggcagaagggagaagguu

SEQ ID NO: 23456 - RNA, 24 nt, Artificial Sequence
  Synthetic
gauuggggcagaagggagaagguu

SEQ ID NO: 23457 - RNA, 20 nt, Artificial Sequence
  Synthetic
gaaaacaguugauccagguu

SEQ ID NO: 23458 - RNA, 21 nt, Artificial Sequence
  Synthetic
ggaaaacaguugauccagguu

SEQ ID NO: 23459 - RNA, 22 nt, Artificial Sequence
  Synthetic
gggaaaacaguugauccagguu

SEQ ID NO: 23460 - RNA, 23 nt, Artificial Sequence
  Synthetic
ggggaaaacaguugauccagguu

SEQ ID NO: 23461 - RNA, 21 nt, Artificial Sequence
  Synthetic
gcucaggugaacaagcagguu

SEQ ID NO: 23462 - RNA, 18 nt, Artificial Sequence
  Synthetic
gccauugaacugcagguu

SEQ ID NO: 23463 - RNA, 19 nt, Artificial Sequence
  Synthetic
gaguauagaaagggagguu

SEQ ID NO: 23464 - RNA, 22 nt, Artificial Sequence
  Synthetic
gcugaguauagaaagggagguu

SEQ ID NO: 23465 - RNA, 19 nt, Artificial Sequence
  Synthetic
gacccagguaggugagguu

SEQ ID NO: 23466 - RNA, 20 nt, Artificial Sequence
  Synthetic
ggacccagguaggugagguu

SEQ ID NO: 23467 - RNA, 22 nt, Artificial Sequence
  Synthetic
gaggacccagguaggugagguu

SEQ ID NO: 23468 - RNA, 24 nt, Artificial Sequence
  Synthetic
guuacuaauauccaucaauagguu

SEQ ID NO: 23469 - RNA, 18 nt, Artificial Sequence
  Synthetic
gaauagagaaacuagguu

SEQ ID NO: 23470 - RNA, 21 nt, Artificial Sequence
  Synthetic
gcauuaagcaaaguaacgguu

SEQ ID NO: 23471 - RNA, 23 nt, Artificial Sequence
  Synthetic
gagcauuaagcaaaguaacgguu

SEQ ID NO: 23472 - RNA, 18 nt, Artificial Sequence
  Synthetic
ggugcaggagauccgguu

SEQ ID NO: 23473 - RNA, 21 nt, Artificial Sequence
  Synthetic
gaaggugcaggagauccgguu

SEQ ID NO: 23474 - RNA, 18 nt, Artificial Sequence
  Synthetic
guuauaauguccucgguu

SEQ ID NO: 23475 - RNA, 23 nt, Artificial Sequence
  Synthetic
gaaauguuauaauguccucgguu

SEQ ID NO: 23476 - RNA, 18 nt, Artificial Sequence
  Synthetic
ggaggauuaugaaggguu

SEQ ID NO: 23477 - RNA, 19 nt, Artificial Sequence
  Synthetic
gggaggauuaugaaggguu

SEQ ID NO: 23478 - RNA, 24 nt, Artificial Sequence
  Synthetic
gcaaagggaggauuaugaaggguu

SEQ ID NO: 23479 - RNA, 20 nt, Artificial Sequence
  Synthetic
gccaaauaugcugggggguu

SEQ ID NO: 23480 - RNA, 18 nt, Artificial Sequence
  Synthetic
gaagauugucucuggguu

SEQ ID NO: 23481 - RNA, 22 nt, Artificial Sequence
  Synthetic
gcaugaagauugucucuggguu

SEQ ID NO: 23482 - RNA, 18 nt, Artificial Sequence
  Synthetic
ggagcucuucaguggguu

SEQ ID NO: 23483 - RNA, 19 nt, Artificial Sequence
  Synthetic
gggagcucuucaguggguu

SEQ ID NO: 23484 - RNA, 24 nt, Artificial Sequence
  Synthetic
gcaaugggagcucuucaguggguu

SEQ ID NO: 23485 - RNA, 18 nt, Artificial Sequence
  Synthetic
ggauaagauacaaugguu

SEQ ID NO: 23486 - RNA, 24 nt, Artificial Sequence
  Synthetic
gcaacaggauaagauacaaugguu

SEQ ID NO: 23487 - RNA, 19 nt, Artificial Sequence
  Synthetic
gcuugauaaaauaaugguu

SEQ ID NO: 23488 - RNA, 20 nt, Artificial Sequence
  Synthetic
ggcuugauaaaauaaugguu

SEQ ID NO: 23489 - RNA, 24 nt, Artificial Sequence
  Synthetic
gcuaggcuugauaaaauaaugguu

SEQ ID NO: 23490 - RNA, 24 nt, Artificial Sequence
  Synthetic
guuuucacugaaagcuuccugguu

SEQ ID NO: 23491 - RNA, 23 nt, Artificial Sequence
  Synthetic
gcaccacagcccagccucugguu

SEQ ID NO: 23492 - RNA, 19 nt, Artificial Sequence
  Synthetic
gacaacacuugaggugguu

SEQ ID NO: 23493 - RNA, 20 nt, Artificial Sequence
  Synthetic
gaaaugaguaauucuugguu

SEQ ID NO: 23494 - RNA, 18 nt, Artificial Sequence
  Synthetic
guugaaagcuauuugguu

SEQ ID NO: 23495 - RNA, 19 nt, Artificial Sequence
  Synthetic
gguugaaagcuauuugguu

SEQ ID NO: 23496 - RNA, 18 nt, Artificial Sequence
  Synthetic
gucaucugacuuuugguu

SEQ ID NO: 23497 - RNA, 19 nt, Artificial Sequence
  Synthetic
ggucaucugacuuuugguu

SEQ ID NO: 23498 - RNA, 20 nt, Artificial Sequence
  Synthetic
gggucaucugacuuuugguu

SEQ ID NO: 23499 - RNA, 19 nt, Artificial Sequence
  Synthetic
gcccaaagcagaaaauguu

SEQ ID NO: 23500 - RNA, 20 nt, Artificial Sequence
  Synthetic
ggcccaaagcagaaaauguu

SEQ ID NO: 23501 - RNA, 19 nt, Artificial Sequence
  Synthetic
gcuuuagaaagcaaauguu

SEQ ID NO: 23502 - RNA, 23 nt, Artificial Sequence
  Synthetic
gccagcuuuagaaagcaaauguu

SEQ ID NO: 23503 - RNA, 21 nt, Artificial Sequence
  Synthetic
gcauuuauuuguucaaauguu

SEQ ID NO: 23504 - RNA, 23 nt, Artificial Sequence
  Synthetic
gagcauuuauuuguucaaauguu

SEQ ID NO: 23505 - RNA, 21 nt, Artificial Sequence
  Synthetic
gacacacaaaauagaaauguu

SEQ ID NO: 23506 - RNA, 20 nt, Artificial Sequence
  Synthetic
gaauagcuuugggaaauguu

SEQ ID NO: 23507 - RNA, 23 nt, Artificial Sequence
  Synthetic
gcagaauagcuuugggaaauguu

SEQ ID NO: 23508 - RNA, 20 nt, Artificial Sequence
  Synthetic
gcagaaagaaaaacaauguu

SEQ ID NO: 23509 - RNA, 18 nt, Artificial Sequence
  Synthetic
ggaauugcuaagaauguu

SEQ ID NO: 23510 - RNA, 21 nt, Artificial Sequence
  Synthetic
gaaggaauugcuaagaauguu

SEQ ID NO: 23511 - RNA, 19 nt, Artificial Sequence
  Synthetic
gagguugaaauauaauguu

SEQ ID NO: 23512 - RNA, 21 nt, Artificial Sequence
  Synthetic
gagagguugaaauauaauguu

SEQ ID NO: 23513 - RNA, 22 nt, Artificial Sequence
  Synthetic
ggagagguugaaauauaauguu

SEQ ID NO: 23514 - RNA, 22 nt, Artificial Sequence
  Synthetic
guucugggucaguaaacauguu

SEQ ID NO: 23515 - RNA, 24 nt, Artificial Sequence
  Synthetic
gcucuuccucuugaaacacauguu

SEQ ID NO: 23516 - RNA, 22 nt, Artificial Sequence
  Synthetic
gcaucucuuuaugucacauguu

SEQ ID NO: 23517 - RNA, 19 nt, Artificial Sequence
  Synthetic
gcuggcuuagagacauguu

SEQ ID NO: 23518 - RNA, 20 nt, Artificial Sequence
  Synthetic
ggcuggcuuagagacauguu

SEQ ID NO: 23519 - RNA, 18 nt, Artificial Sequence
  Synthetic
gaugcuaacggacauguu

SEQ ID NO: 23520 - RNA, 20 nt, Artificial Sequence
  Synthetic
guugggagagcuuacauguu

SEQ ID NO: 23521 - RNA, 22 nt, Artificial Sequence
  Synthetic
gaguugggagagcuuacauguu

SEQ ID NO: 23522 - RNA, 19 nt, Artificial Sequence
  Synthetic
gauugauaaaaacgauguu

SEQ ID NO: 23523 - RNA, 23 nt, Artificial Sequence
  Synthetic
gcuuuuaggaauaaauugauguu

SEQ ID NO: 23524 - RNA, 18 nt, Artificial Sequence
  Synthetic
guuaagguuuuugauguu

SEQ ID NO: 23525 - RNA, 21 nt, Artificial Sequence
  Synthetic
gaaaaugccacuaaauauguu

SEQ ID NO: 23526 - RNA, 18 nt, Artificial Sequence
  Synthetic
gacacuugcgccuauguu

SEQ ID NO: 23527 - RNA, 22 nt, Artificial Sequence
  Synthetic
gccagacacuugcgccuauguu

SEQ ID NO: 23528 - RNA, 19 nt, Artificial Sequence
  Synthetic
gaaguauuauuccuauguu

SEQ ID NO: 23529 - RNA, 20 nt, Artificial Sequence
  Synthetic
ggaaguauuauuccuauguu

SEQ ID NO: 23530 - RNA, 18 nt, Artificial Sequence
  Synthetic
gucuucucauuguauguu

SEQ ID NO: 23531 - RNA, 19 nt, Artificial Sequence
  Synthetic
ggucuucucauuguauguu

SEQ ID NO: 23532 - RNA, 20 nt, Artificial Sequence
  Synthetic
guccaggacaaauaacuguu

SEQ ID NO: 23533 - RNA, 23 nt, Artificial Sequence
  Synthetic
guuguccaggacaaauaacuguu

SEQ ID NO: 23534 - RNA, 18 nt, Artificial Sequence
  Synthetic
ggauuugcauacacuguu

SEQ ID NO: 23535 - RNA, 23 nt, Artificial Sequence
  Synthetic
gaaguggugaaaagagcacuguu

SEQ ID NO: 23536 - RNA, 18 nt, Artificial Sequence
  Synthetic
guguaccuagucacuguu

SEQ ID NO: 23537 - RNA, 24 nt, Artificial Sequence
  Synthetic
guuuuaaucugcguugucacuguu

SEQ ID NO: 23538 - RNA, 22 nt, Artificial Sequence
  Synthetic
gugcacagggcuuagagcuguu

SEQ ID NO: 23539 - RNA, 18 nt, Artificial Sequence
  Synthetic
gacagauccaaggcuguu

SEQ ID NO: 23540 - RNA, 21 nt, Artificial Sequence
  Synthetic
gaagacagauccaaggcuguu

SEQ ID NO: 23541 - RNA, 22 nt, Artificial Sequence
  Synthetic
ggaagacagauccaaggcuguu

SEQ ID NO: 23542 - RNA, 21 nt, Artificial Sequence
  Synthetic
gaacuggggcucaaugcuguu

SEQ ID NO: 23543 - RNA, 22 nt, Artificial Sequence
  Synthetic
ggaacuggggcucaaugcuguu

SEQ ID NO: 23544 - RNA, 23 nt, Artificial Sequence
  Synthetic
gggaacuggggcucaaugcuguu

SEQ ID NO: 23545 - RNA, 24 nt, Artificial Sequence
  Synthetic
ggggaacuggggcucaaugcuguu

SEQ ID NO: 23546 - RNA, 20 nt, Artificial Sequence
  Synthetic
gaaaauguaauacuucuguu

SEQ ID NO: 23547 - RNA, 24 nt, Artificial Sequence
  Synthetic
gacagaaaauguaauacuucuguu

SEQ ID NO: 23548 - RNA, 21 nt, Artificial Sequence
  Synthetic
gcuugcaggaaauuuucuguu

SEQ ID NO: 23549 - RNA, 23 nt, Artificial Sequence
  Synthetic
gagcuugcaggaaauuuucuguu

SEQ ID NO: 23550 - RNA, 24 nt, Artificial Sequence
  Synthetic
ggagcuugcaggaaauuuucuguu

SEQ ID NO: 23551 - RNA, 18 nt, Artificial Sequence
  Synthetic
gggggucaccaaaguguu

SEQ ID NO: 23552 - RNA, 23 nt, Artificial Sequence
  Synthetic
gucaagggggucaccaaaguguu

SEQ ID NO: 23553 - RNA, 20 nt, Artificial Sequence
  Synthetic
gauugcucaggaaagguguu

SEQ ID NO: 23554 - RNA, 24 nt, Artificial Sequence
  Synthetic
gucagauugcucaggaaagguguu

SEQ ID NO: 23555 - RNA, 23 nt, Artificial Sequence
  Synthetic
gaaaaaauuuauuucaugguguu

SEQ ID NO: 23556 - RNA, 21 nt, Artificial Sequence
  Synthetic
gauuauugggaggaugguguu

SEQ ID NO: 23557 - RNA, 19 nt, Artificial Sequence
  Synthetic
guguaugaaaaacuguguu

SEQ ID NO: 23558 - RNA, 24 nt, Artificial Sequence
  Synthetic
guaccaaucuaauggaauuguguu

SEQ ID NO: 23559 - RNA, 19 nt, Artificial Sequence
  Synthetic
gcaucuaacauuaauuguu

SEQ ID NO: 23560 - RNA, 20 nt, Artificial Sequence
  Synthetic
ggcaucuaacauuaauuguu

SEQ ID NO: 23561 - RNA, 22 nt, Artificial Sequence
  Synthetic
guggcaucuaacauuaauuguu

SEQ ID NO: 23562 - RNA, 18 nt, Artificial Sequence
  Synthetic
guagaaagugggauuguu

SEQ ID NO: 23563 - RNA, 23 nt, Artificial Sequence
  Synthetic
gacuaaguuuaacaauuauuguu

SEQ ID NO: 23564 - RNA, 24 nt, Artificial Sequence
  Synthetic
ggacuaaguuuaacaauuauuguu

SEQ ID NO: 23565 - RNA, 19 nt, Artificial Sequence
  Synthetic
gugccuugucacccuuguu

SEQ ID NO: 23566 - RNA, 23 nt, Artificial Sequence
  Synthetic
gauagugccuugucacccuuguu

SEQ ID NO: 23567 - RNA, 18 nt, Artificial Sequence
  Synthetic
gucucaucuacucuuguu

SEQ ID NO: 23568 - RNA, 20 nt, Artificial Sequence
  Synthetic
gagucucaucuacucuuguu

SEQ ID NO: 23569 - RNA, 19 nt, Artificial Sequence
  Synthetic
gauuagggagcuaguuguu

SEQ ID NO: 23570 - RNA, 21 nt, Artificial Sequence
  Synthetic
gcgauuagggagcuaguuguu

SEQ ID NO: 23571 - RNA, 23 nt, Artificial Sequence
  Synthetic
gagcgauuagggagcuaguuguu

SEQ ID NO: 23572 - RNA, 20 nt, Artificial Sequence
  Synthetic
gacaagcaaguucauuuguu

SEQ ID NO: 23573 - RNA, 19 nt, Artificial Sequence
  Synthetic
guaagugguauucuuuguu

SEQ ID NO: 23574 - RNA, 24 nt, Artificial Sequence
  Synthetic
gcuaaguaagugguauucuuuguu

SEQ ID NO: 23575 - RNA, 18 nt, Artificial Sequence
  Synthetic
gcucaucaguuuuuuguu

SEQ ID NO: 23576 - RNA, 22 nt, Artificial Sequence
  Synthetic
gaaauggauacauaaaaaauuu

SEQ ID NO: 23577 - RNA, 23 nt, Artificial Sequence
  Synthetic
ggaaauggauacauaaaaaauuu

SEQ ID NO: 23578 - RNA, 22 nt, Artificial Sequence
  Synthetic
guuuuuacuuucagaaaaauuu

SEQ ID NO: 23579 - RNA, 20 nt, Artificial Sequence
  Synthetic
gaaaaauaaggucaaaauuu

SEQ ID NO: 23580 - RNA, 19 nt, Artificial Sequence
  Synthetic
guggaguuagauaaaauuu

SEQ ID NO: 23581 - RNA, 22 nt, Artificial Sequence
  Synthetic
gcuguggaguuagauaaaauuu

SEQ ID NO: 23582 - RNA, 18 nt, Artificial Sequence
  Synthetic
guugaagucuuaaaauuu

SEQ ID NO: 23583 - RNA, 22 nt, Artificial Sequence
  Synthetic
gacuguugaagucuuaaaauuu

SEQ ID NO: 23584 - RNA, 18 nt, Artificial Sequence
  Synthetic
guggcacugaccaaauuu

SEQ ID NO: 23585 - RNA, 19 nt, Artificial Sequence
  Synthetic
gguggcacugaccaaauuu

SEQ ID NO: 23586 - RNA, 21 nt, Artificial Sequence
  Synthetic
ggauaauuuucauagaaauuu

SEQ ID NO: 23587 - RNA, 18 nt, Artificial Sequence
  Synthetic
gcauauggugcuaaauuu

SEQ ID NO: 23588 - RNA, 18 nt, Artificial Sequence
  Synthetic
guuuggcaaauuaaauuu

SEQ ID NO: 23589 - RNA, 19 nt, Artificial Sequence
  Synthetic
gguuuggcaaauuaaauuu

SEQ ID NO: 23590 - RNA, 21 nt, Artificial Sequence
  Synthetic
gugguuuggcaaauuaaauuu

SEQ ID NO: 23591 - RNA, 18 nt, Artificial Sequence
  Synthetic
guucauaauaaacaauuu

SEQ ID NO: 23592 - RNA, 20 nt, Artificial Sequence
  Synthetic
guguucauaauaaacaauuu

SEQ ID NO: 23593 - RNA, 20 nt, Artificial Sequence
  Synthetic
gcauagcaacgauacaauuu

SEQ ID NO: 23594 - RNA, 22 nt, Artificial Sequence
  Synthetic
gagcauagcaacgauacaauuu

SEQ ID NO: 23595 - RNA, 19 nt, Artificial Sequence
  Synthetic
guacagucucuugcaauuu

SEQ ID NO: 23596 - RNA, 24 nt, Artificial Sequence
  Synthetic
gcccaguacagucucuugcaauuu

SEQ ID NO: 23597 - RNA, 21 nt, Artificial Sequence
  Synthetic
gauucagagguuccucaauuu

SEQ ID NO: 23598 - RNA, 24 nt, Artificial Sequence
  Synthetic
gcauuaacauugccaugagaauuu

SEQ ID NO: 23599 - RNA, 19 nt, Artificial Sequence
  Synthetic
gauuguggauauggaauuu

SEQ ID NO: 23600 - RNA, 20 nt, Artificial Sequence
  Synthetic
ggauuguggauauggaauuu

SEQ ID NO: 23601 - RNA, 24 nt, Artificial Sequence
  Synthetic
gcaaggauuguggauauggaauuu

SEQ ID NO: 23602 - RNA, 20 nt, Artificial Sequence
  Synthetic
gcauuuuuugguuggaauuu

SEQ ID NO: 23603 - RNA, 23 nt, Artificial Sequence
  Synthetic
guagcauuuuuugguuggaauuu

SEQ ID NO: 23604 - RNA, 19 nt, Artificial Sequence
  Synthetic
guugaccuuuauugaauuu

SEQ ID NO: 23605 - RNA, 20 nt, Artificial Sequence
  Synthetic
gguugaccuuuauugaauuu

SEQ ID NO: 23606 - RNA, 23 nt, Artificial Sequence
  Synthetic
guugguugaccuuuauugaauuu

SEQ ID NO: 23607 - RNA, 21 nt, Artificial Sequence
  Synthetic
gucucuguuuuaaaauaauuu

SEQ ID NO: 23608 - RNA, 19 nt, Artificial Sequence
  Synthetic
gucuacaaaagaauaauuu

SEQ ID NO: 23609 - RNA, 20 nt, Artificial Sequence
  Synthetic
ggucuacaaaagaauaauuu

SEQ ID NO: 23610 - RNA, 23 nt, Artificial Sequence
  Synthetic
gucacuauaaaaauaauuaauuu

SEQ ID NO: 23611 - RNA, 21 nt, Artificial Sequence
  Synthetic
gcucccacacccaguuaauuu

SEQ ID NO: 23612 - RNA, 23 nt, Artificial Sequence
  Synthetic
gagcucccacacccaguuaauuu

SEQ ID NO: 23613 - RNA, 18 nt, Artificial Sequence
  Synthetic
gucaaugaaaaaacauuu

SEQ ID NO: 23614 - RNA, 20 nt, Artificial Sequence
  Synthetic
gacuggaggaagaaacauuu

SEQ ID NO: 23615 - RNA, 22 nt, Artificial Sequence
  Synthetic
gagacuggaggaagaaacauuu

SEQ ID NO: 23616 - RNA, 18 nt, Artificial Sequence
  Synthetic
gagcaauuaucaacauuu

SEQ ID NO: 23617 - RNA, 19 nt, Artificial Sequence
  Synthetic
gacuguggcucacacauuu

SEQ ID NO: 23618 - RNA, 22 nt, Artificial Sequence
  Synthetic
gaugacuguggcucacacauuu

SEQ ID NO: 23619 - RNA, 20 nt, Artificial Sequence
  Synthetic
guaauuacaauaucacauuu

SEQ ID NO: 23620 - RNA, 23 nt, Artificial Sequence
  Synthetic
guaguaauuacaauaucacauuu

SEQ ID NO: 23621 - RNA, 24 nt, Artificial Sequence
  Synthetic
gguaguaauuacaauaucacauuu

SEQ ID NO: 23622 - RNA, 24 nt, Artificial Sequence
  Synthetic
gcaaucaaacuccuugugacauuu

SEQ ID NO: 23623 - RNA, 18 nt, Artificial Sequence
  Synthetic
guacaguuacauacauuu

SEQ ID NO: 23624 - RNA, 18 nt, Artificial Sequence
  Synthetic
gaucuuucccauacauuu

SEQ ID NO: 23625 - RNA, 18 nt, Artificial Sequence
  Synthetic
gagguuacuggcccauuu

SEQ ID NO: 23626 - RNA, 23 nt, Artificial Sequence
  Synthetic
gcauugagguuacuggcccauuu

SEQ ID NO: 23627 - RNA, 19 nt, Artificial Sequence
  Synthetic
gauuugcuacugcccauuu

SEQ ID NO: 23628 - RNA, 22 nt, Artificial Sequence
  Synthetic
gaugauuugcuacugcccauuu

SEQ ID NO: 23629 - RNA, 20 nt, Artificial Sequence
  Synthetic
guuuugagcuaaagccauuu

SEQ ID NO: 23630 - RNA, 21 nt, Artificial Sequence
  Synthetic
guuaauccuuagaagccauuu

SEQ ID NO: 23631 - RNA, 21 nt, Artificial Sequence
  Synthetic
guaagggaacugaaagcauuu

SEQ ID NO: 23632 - RNA, 22 nt, Artificial Sequence
  Synthetic
gguaagggaacugaaagcauuu

SEQ ID NO: 23633 - RNA, 21 nt, Artificial Sequence
  Synthetic
gaaauacuaaaaaaugcauuu

SEQ ID NO: 23634 - RNA, 24 nt, Artificial Sequence
  Synthetic
guugaaauacuaaaaaaugcauuu

SEQ ID NO: 23635 - RNA, 21 nt, Artificial Sequence
  Synthetic
gaaugcuuaucaaaugcauuu

SEQ ID NO: 23636 - RNA, 24 nt, Artificial Sequence
  Synthetic
gaaaauaaacaagggugugcauuu

SEQ ID NO: 23637 - RNA, 24 nt, Artificial Sequence
  Synthetic
guucuaccuugaauaacaucauuu

SEQ ID NO: 23638 - RNA, 19 nt, Artificial Sequence
  Synthetic
gacacaacuguauucauuu

SEQ ID NO: 23639 - RNA, 24 nt, Artificial Sequence
  Synthetic
gcuauaaaugcccauucuucauuu

SEQ ID NO: 23640 - RNA, 18 nt, Artificial Sequence
  Synthetic
gcaguaacucagagauuu

SEQ ID NO: 23641 - RNA, 23 nt, Artificial Sequence
  Synthetic
gaauguuuuuaaaauagagauuu

SEQ ID NO: 23642 - RNA, 18 nt, Artificial Sequence
  Synthetic
gauaucauggugagauuu

SEQ ID NO: 23643 - RNA, 20 nt, Artificial Sequence
  Synthetic
gagauaucauggugagauuu

SEQ ID NO: 23644 - RNA, 18 nt, Artificial Sequence
  Synthetic
gacuuuucuuauagauuu

SEQ ID NO: 23645 - RNA, 20 nt, Artificial Sequence
  Synthetic
gugacuuuucuuauagauuu

SEQ ID NO: 23646 - RNA, 24 nt, Artificial Sequence
  Synthetic
gccugugacuuuucuuauagauuu

SEQ ID NO: 23647 - RNA, 20 nt, Artificial Sequence
  Synthetic
guugacgauuguuacgauuu

SEQ ID NO: 23648 - RNA, 22 nt, Artificial Sequence
  Synthetic
guguugacgauuguuacgauuu

SEQ ID NO: 23649 - RNA, 19 nt, Artificial Sequence
  Synthetic
guauaaguaaaaaggauuu

SEQ ID NO: 23650 - RNA, 18 nt, Artificial Sequence
  Synthetic
ggcaggcuucugggauuu

SEQ ID NO: 23651 - RNA, 21 nt, Artificial Sequence
  Synthetic
gcaggcaggcuucugggauuu

SEQ ID NO: 23652 - RNA, 24 nt, Artificial Sequence
  Synthetic
gaagcaggcaggcuucugggauuu

SEQ ID NO: 23653 - RNA, 21 nt, Artificial Sequence
  Synthetic
gaaagcuugaguuaaugauuu

SEQ ID NO: 23654 - RNA, 23 nt, Artificial Sequence
  Synthetic
gcgaaagcuugaguuaaugauuu

SEQ ID NO: 23655 - RNA, 24 nt, Artificial Sequence
  Synthetic
ggcgaaagcuugaguuaaugauuu

SEQ ID NO: 23656 - RNA, 21 nt, Artificial Sequence
  Synthetic
guauaaucuacaacaugauuu

SEQ ID NO: 23657 - RNA, 24 nt, Artificial Sequence
  Synthetic
gcaagugauuuaauuuccugauuu

SEQ ID NO: 23658 - RNA, 20 nt, Artificial Sequence
  Synthetic
guuacaagaaaaagugauuu

SEQ ID NO: 23659 - RNA, 20 nt, Artificial Sequence
  Synthetic
gauaauaaaucaagugauuu

SEQ ID NO: 23660 - RNA, 21 nt, Artificial Sequence
  Synthetic
ggauaauaaaucaagugauuu

SEQ ID NO: 23661 - RNA, 24 nt, Artificial Sequence
  Synthetic
gcauucauuaggccacuuugauuu

SEQ ID NO: 23662 - RNA, 20 nt, Artificial Sequence
  Synthetic
gaugacauagccaaauauuu

SEQ ID NO: 23663 - RNA, 19 nt, Artificial Sequence
  Synthetic
gcauuaucugcaaauauuu

SEQ ID NO: 23664 - RNA, 22 nt, Artificial Sequence
  Synthetic
gcagcauuaucugcaaauauuu

SEQ ID NO: 23665 - RNA, 18 nt, Artificial Sequence
  Synthetic
guauuaaaucaaauauuu

SEQ ID NO: 23666 - RNA, 19 nt, Artificial Sequence
  Synthetic
gguauuaaaucaaauauuu

SEQ ID NO: 23667 - RNA, 20 nt, Artificial Sequence
  Synthetic
guuucuagccacuaauauuu

SEQ ID NO: 23668 - RNA, 22 nt, Artificial Sequence
  Synthetic
guguuucuagccacuaauauuu

SEQ ID NO: 23669 - RNA, 18 nt, Artificial Sequence
  Synthetic
gauuuugaguacauauuu

SEQ ID NO: 23670 - RNA, 19 nt, Artificial Sequence
  Synthetic
ggauuuugaguacauauuu

SEQ ID NO: 23671 - RNA, 19 nt, Artificial Sequence
  Synthetic
gauacgcauguacauauuu

SEQ ID NO: 23672 - RNA, 21 nt, Artificial Sequence
  Synthetic
gagauacgcauguacauauuu

SEQ ID NO: 23673 - RNA, 19 nt, Artificial Sequence
  Synthetic
gagugguugcaauauauuu

SEQ ID NO: 23674 - RNA, 20 nt, Artificial Sequence
  Synthetic
ggagugguugcaauauauuu

SEQ ID NO: 23675 - RNA, 19 nt, Artificial Sequence
  Synthetic
gugacauuuagauauauuu

SEQ ID NO: 23676 - RNA, 20 nt, Artificial Sequence
  Synthetic
ggugacauuuagauauauuu

SEQ ID NO: 23677 - RNA, 24 nt, Artificial Sequence
  Synthetic
gucaaaaaauuagucccuauauuu

SEQ ID NO: 23678 - RNA, 24 nt, Artificial Sequence
  Synthetic
gauuuacauuuauaauuuauauuu

SEQ ID NO: 23679 - RNA, 20 nt, Artificial Sequence
  Synthetic
gacuggugaaaucacuauuu

SEQ ID NO: 23680 - RNA, 22 nt, Artificial Sequence
  Synthetic
gagacuggugaaaucacuauuu

SEQ ID NO: 23681 - RNA, 22 nt, Artificial Sequence
  Synthetic
gcucuggauaacaucccuauuu

SEQ ID NO: 23682 - RNA, 18 nt, Artificial Sequence
  Synthetic
gcguuaaaauagcuauuu

SEQ ID NO: 23683 - RNA, 21 nt, Artificial Sequence
  Synthetic
gauaaaaauucuuagcuauuu

SEQ ID NO: 23684 - RNA, 23 nt, Artificial Sequence
  Synthetic
gagauaaaaauucuuagcuauuu

SEQ ID NO: 23685 - RNA, 21 nt, Artificial Sequence
  Synthetic
gcaaaacagcccuuucuauuu

SEQ ID NO: 23686 - RNA, 21 nt, Artificial Sequence
  Synthetic
gauucccacucuuuucuauuu

SEQ ID NO: 23687 - RNA, 18 nt, Artificial Sequence
  Synthetic
gaaauacugaaaguauuu

SEQ ID NO: 23688 - RNA, 19 nt, Artificial Sequence
  Synthetic
ggaaauacugaaaguauuu

SEQ ID NO: 23689 - RNA, 20 nt, Artificial Sequence
  Synthetic
gggaaauacugaaaguauuu

SEQ ID NO: 23690 - RNA, 23 nt, Artificial Sequence
  Synthetic
gaagggaaauacugaaaguauuu

SEQ ID NO: 23691 - RNA, 22 nt, Artificial Sequence
  Synthetic
guaucugaaugucuauguauuu

SEQ ID NO: 23692 - RNA, 24 nt, Artificial Sequence
  Synthetic
gaguaucugaaugucuauguauuu

SEQ ID NO: 23693 - RNA, 18 nt, Artificial Sequence
  Synthetic
gggccuuuugcuguauuu

SEQ ID NO: 23694 - RNA, 20 nt, Artificial Sequence
  Synthetic
gugggccuuuugcuguauuu

SEQ ID NO: 23695 - RNA, 19 nt, Artificial Sequence
  Synthetic
guguguugaucuuguauuu

SEQ ID NO: 23696 - RNA, 20 nt, Artificial Sequence
  Synthetic
gguguguugaucuuguauuu

SEQ ID NO: 23697 - RNA, 24 nt, Artificial Sequence
  Synthetic
gauucaugauaaccauuuguauuu

SEQ ID NO: 23698 - RNA, 19 nt, Artificial Sequence
  Synthetic
gacacaugcugaauuauuu

SEQ ID NO: 23699 - RNA, 21 nt, Artificial Sequence
  Synthetic
gcgacacaugcugaauuauuu

SEQ ID NO: 23700 - RNA, 18 nt, Artificial Sequence
  Synthetic
guuauucagucauuauuu

SEQ ID NO: 23701 - RNA, 21 nt, Artificial Sequence
  Synthetic
gcuguuauucagucauuauuu

SEQ ID NO: 23702 - RNA, 20 nt, Artificial Sequence
  Synthetic
gaaaagauaacuuauuauuu

SEQ ID NO: 23703 - RNA, 19 nt, Artificial Sequence
  Synthetic
gaaucauagagacuuauuu

SEQ ID NO: 23704 - RNA, 20 nt, Artificial Sequence
  Synthetic
ggaaucauagagacuuauuu

SEQ ID NO: 23705 - RNA, 21 nt, Artificial Sequence
  Synthetic
gacaaugacucaguguuauuu

SEQ ID NO: 23706 - RNA, 18 nt, Artificial Sequence
  Synthetic
gucccaucauuguuauuu

SEQ ID NO: 23707 - RNA, 19 nt, Artificial Sequence
  Synthetic
ggucccaucauuguuauuu

SEQ ID NO: 23708 - RNA, 22 nt, Artificial Sequence
  Synthetic
gaaggucccaucauuguuauuu

SEQ ID NO: 23709 - RNA, 23 nt, Artificial Sequence
  Synthetic
ggaaggucccaucauuguuauuu

SEQ ID NO: 23710 - RNA, 18 nt, Artificial Sequence
  Synthetic
gcauauuaaacuuuauuu

SEQ ID NO: 23711 - RNA, 23 nt, Artificial Sequence
  Synthetic
gccaaaaaaaaaaaaguuuauuu

SEQ ID NO: 23712 - RNA, 24 nt, Artificial Sequence
  Synthetic
gcuaaucucuuuugauguuuauuu

SEQ ID NO: 23713 - RNA, 23 nt, Artificial Sequence
  Synthetic
guuaaaaccccuacuguuuauuu

SEQ ID NO: 23714 - RNA, 24 nt, Artificial Sequence
  Synthetic
gguuaaaaccccuacuguuuauuu

SEQ ID NO: 23715 - RNA, 19 nt, Artificial Sequence
  Synthetic
gacuguucugagaaacuuu

SEQ ID NO: 23716 - RNA, 24 nt, Artificial Sequence
  Synthetic
gcacugacuguucugagaaacuuu

SEQ ID NO: 23717 - RNA, 24 nt, Artificial Sequence
  Synthetic
guucuaccaaaauggauaaacuuu

SEQ ID NO: 23718 - RNA, 19 nt, Artificial Sequence
  Synthetic
gacuaugagggucaacuuu

SEQ ID NO: 23719 - RNA, 18 nt, Artificial Sequence
  Synthetic
guaugcuuugagaacuuu

SEQ ID NO: 23720 - RNA, 22 nt, Artificial Sequence
  Synthetic
guuuguaugcuuugagaacuuu

SEQ ID NO: 23721 - RNA, 20 nt, Artificial Sequence
  Synthetic
guuuggagcugaaacacuuu

SEQ ID NO: 23722 - RNA, 21 nt, Artificial Sequence
  Synthetic
gguuuggagcugaaacacuuu

SEQ ID NO: 23723 - RNA, 18 nt, Artificial Sequence
  Synthetic
gucgauuuaauccacuuu

SEQ ID NO: 23724 - RNA, 19 nt, Artificial Sequence
  Synthetic
gagggaaaccacucacuuu

SEQ ID NO: 23725 - RNA, 21 nt, Artificial Sequence
  Synthetic
gugagggaaaccacucacuuu

SEQ ID NO: 23726 - RNA, 22 nt, Artificial Sequence
  Synthetic
guuaaauauuacagaagacuuu

SEQ ID NO: 23727 - RNA, 18 nt, Artificial Sequence
  Synthetic
guauuaagauuagacuuu

SEQ ID NO: 23728 - RNA, 21 nt, Artificial Sequence
  Synthetic
gcuguauuaagauuagacuuu

SEQ ID NO: 23729 - RNA, 24 nt, Artificial Sequence
  Synthetic
gcugcuguauuaagauuagacuuu

SEQ ID NO: 23730 - RNA, 22 nt, Artificial Sequence
  Synthetic
guaauguaauacauuggacuuu

SEQ ID NO: 23731 - RNA, 18 nt, Artificial Sequence
  Synthetic
gaaggaucaaaauacuuu

SEQ ID NO: 23732 - RNA, 18 nt, Artificial Sequence
  Synthetic
gaaaaaaauaaauacuuu

SEQ ID NO: 23733 - RNA, 23 nt, Artificial Sequence
  Synthetic
gcuacgaaaaaaauaaauacuuu

SEQ ID NO: 23734 - RNA, 18 nt, Artificial Sequence
  Synthetic
guaaaucaucacuacuuu

SEQ ID NO: 23735 - RNA, 21 nt, Artificial Sequence
  Synthetic
gaaguaaaucaucacuacuuu

SEQ ID NO: 23736 - RNA, 23 nt, Artificial Sequence
  Synthetic
gccuacagauagggaaguacuuu

SEQ ID NO: 23737 - RNA, 19 nt, Artificial Sequence
  Synthetic
gaucaauauauuuuacuuu

SEQ ID NO: 23738 - RNA, 23 nt, Artificial Sequence
  Synthetic
guaugaucaauauauuuuacuuu

SEQ ID NO: 23739 - RNA, 22 nt, Artificial Sequence
  Synthetic
gcaaaauuugguuuuuuacuuu

SEQ ID NO: 23740 - RNA, 23 nt, Artificial Sequence
  Synthetic
ggcaaaauuugguuuuuuacuuu

SEQ ID NO: 23741 - RNA, 19 nt, Artificial Sequence
  Synthetic
guuuccacagagaaccuuu

SEQ ID NO: 23742 - RNA, 24 nt, Artificial Sequence
  Synthetic
guuauguuuccacagagaaccuuu

SEQ ID NO: 23743 - RNA, 22 nt, Artificial Sequence
  Synthetic
gaugccuccuguguugcccuuu

SEQ ID NO: 23744 - RNA, 23 nt, Artificial Sequence
  Synthetic
ggaugccuccuguguugcccuuu

SEQ ID NO: 23745 - RNA, 22 nt, Artificial Sequence
  Synthetic
gaauucacagcuuggucccuuu

SEQ ID NO: 23746 - RNA, 23 nt, Artificial Sequence
  Synthetic
ggaauucacagcuuggucccuuu

SEQ ID NO: 23747 - RNA, 20 nt, Artificial Sequence
  Synthetic
gucuuuuaaaucucuccuuu

SEQ ID NO: 23748 - RNA, 21 nt, Artificial Sequence
  Synthetic
ggucuuuuaaaucucuccuuu

SEQ ID NO: 23749 - RNA, 24 nt, Artificial Sequence
  Synthetic
gucggucuuuuaaaucucuccuuu

SEQ ID NO: 23750 - RNA, 24 nt, Artificial Sequence
  Synthetic
gaauuuccagcuccagaguccuuu

SEQ ID NO: 23751 - RNA, 22 nt, Artificial Sequence
  Synthetic
gauuucuguaagccguuccuuu

SEQ ID NO: 23752 - RNA, 21 nt, Artificial Sequence
  Synthetic
gaaaugaguauggaaagcuuu

SEQ ID NO: 23753 - RNA, 22 nt, Artificial Sequence
  Synthetic
ggaaaugaguauggaaagcuuu

SEQ ID NO: 23754 - RNA, 24 nt, Artificial Sequence
  Synthetic
guaaacauuuaauuaucuagcuuu

SEQ ID NO: 23755 - RNA, 20 nt, Artificial Sequence
  Synthetic
gccugacccacuaccgcuuu

SEQ ID NO: 23756 - RNA, 19 nt, Artificial Sequence
  Synthetic
gucucaaaggacaggcuuu

SEQ ID NO: 23757 - RNA, 21 nt, Artificial Sequence
  Synthetic
gugucucaaaggacaggcuuu

SEQ ID NO: 23758 - RNA, 22 nt, Artificial Sequence
  Synthetic
guaaucuuggccagagggcuuu

SEQ ID NO: 23759 - RNA, 22 nt, Artificial Sequence
  Synthetic
gaaauaagauuuuuggggcuuu

SEQ ID NO: 23760 - RNA, 18 nt, Artificial Sequence
  Synthetic
guccagcccaugggcuuu

SEQ ID NO: 23761 - RNA, 23 nt, Artificial Sequence
  Synthetic
gauauaacaauuugugaugcuuu

SEQ ID NO: 23762 - RNA, 22 nt, Artificial Sequence
  Synthetic
guacauaggcagcauaugcuuu

SEQ ID NO: 23763 - RNA, 23 nt, Artificial Sequence
  Synthetic
gguacauaggcagcauaugcuuu

SEQ ID NO: 23764 - RNA, 24 nt, Artificial Sequence
  Synthetic
ggguacauaggcagcauaugcuuu

SEQ ID NO: 23765 - RNA, 22 nt, Artificial Sequence
  Synthetic
gccucccaccccacacugcuuu

SEQ ID NO: 23766 - RNA, 19 nt, Artificial Sequence
  Synthetic
gcugcucaccuacugcuuu

SEQ ID NO: 23767 - RNA, 22 nt, Artificial Sequence
  Synthetic
gcugcugcucaccuacugcuuu

SEQ ID NO: 23768 - RNA, 18 nt, Artificial Sequence
  Synthetic
guggaucauuucugcuuu

SEQ ID NO: 23769 - RNA, 19 nt, Artificial Sequence
  Synthetic
gauuuugccccaaaucuuu

SEQ ID NO: 23770 - RNA, 20 nt, Artificial Sequence
  Synthetic
ggauuuugccccaaaucuuu

SEQ ID NO: 23771 - RNA, 22 nt, Artificial Sequence
  Synthetic
guggauuuugccccaaaucuuu

SEQ ID NO: 23772 - RNA, 18 nt, Artificial Sequence
  Synthetic
gauuugaauccaaucuuu

SEQ ID NO: 23773 - RNA, 19 nt, Artificial Sequence
  Synthetic
ggauuugaauccaaucuuu

SEQ ID NO: 23774 - RNA, 20 nt, Artificial Sequence
  Synthetic
gggauuugaauccaaucuuu

SEQ ID NO: 23775 - RNA, 22 nt, Artificial Sequence
  Synthetic
gauuugggaaauaugcaucuuu

SEQ ID NO: 23776 - RNA, 21 nt, Artificial Sequence
  Synthetic
gauuuugcauaaaguaucuuu

SEQ ID NO: 23777 - RNA, 22 nt, Artificial Sequence
  Synthetic
ggauuuugcauaaaguaucuuu

SEQ ID NO: 23778 - RNA, 20 nt, Artificial Sequence
  Synthetic
gaugcaugugaaaacucuuu

SEQ ID NO: 23779 - RNA, 18 nt, Artificial Sequence
  Synthetic
gaccuauaaaaccucuuu

SEQ ID NO: 23780 - RNA, 18 nt, Artificial Sequence
  Synthetic
gaauucauacuagucuuu

SEQ ID NO: 23781 - RNA, 21 nt, Artificial Sequence
  Synthetic
gaagaauucauacuagucuuu

SEQ ID NO: 23782 - RNA, 21 nt, Artificial Sequence
  Synthetic
ggcccacauccucaggucuuu

SEQ ID NO: 23783 - RNA, 22 nt, Artificial Sequence
  Synthetic
gccaagaacugacaaugucuuu

SEQ ID NO: 23784 - RNA, 19 nt, Artificial Sequence
  Synthetic
gaagacaagggaugucuuu

SEQ ID NO: 23785 - RNA, 24 nt, Artificial Sequence
  Synthetic
gauucgaagacaagggaugucuuu

SEQ ID NO: 23786 - RNA, 18 nt, Artificial Sequence
  Synthetic
gucccuauaacugucuuu

SEQ ID NO: 23787 - RNA, 19 nt, Artificial Sequence
  Synthetic
ggucccuauaacugucuuu

SEQ ID NO: 23788 - RNA, 20 nt, Artificial Sequence
  Synthetic
gggucccuauaacugucuuu

SEQ ID NO: 23789 - RNA, 22 nt, Artificial Sequence
  Synthetic
gagggucccuauaacugucuuu

SEQ ID NO: 23790 - RNA, 18 nt, Artificial Sequence
  Synthetic
gcgaacuguuucuucuuu

SEQ ID NO: 23791 - RNA, 21 nt, Artificial Sequence
  Synthetic
gauaagugcuuauuguucuuu

SEQ ID NO: 23792 - RNA, 22 nt, Artificial Sequence
  Synthetic
ggauaagugcuuauuguucuuu

SEQ ID NO: 23793 - RNA, 24 nt, Artificial Sequence
  Synthetic
gaggauaagugcuuauuguucuuu

SEQ ID NO: 23794 - RNA, 18 nt, Artificial Sequence
  Synthetic
guauucauacauuucuuu

SEQ ID NO: 23795 - RNA, 20 nt, Artificial Sequence
  Synthetic
guguauucauacauuucuuu

SEQ ID NO: 23796 - RNA, 24 nt, Artificial Sequence
  Synthetic
gcaacauuggagaauauuuucuuu

SEQ ID NO: 23797 - RNA, 19 nt, Artificial Sequence
  Synthetic
gaacacgaucgaaaaguuu

SEQ ID NO: 23798 - RNA, 20 nt, Artificial Sequence
  Synthetic
guucaugaauaucaaaguuu

SEQ ID NO: 23799 - RNA, 21 nt, Artificial Sequence
  Synthetic
gguucaugaauaucaaaguuu

SEQ ID NO: 23800 - RNA, 24 nt, Artificial Sequence
  Synthetic
gaagguucaugaauaucaaaguuu

SEQ ID NO: 23801 - RNA, 24 nt, Artificial Sequence
  Synthetic
gaccuaauuccaaauaacaaguuu

SEQ ID NO: 23802 - RNA, 19 nt, Artificial Sequence
  Synthetic
guuuugaacuguuaaguuu

SEQ ID NO: 23803 - RNA, 18 nt, Artificial Sequence
  Synthetic
gaaauauaagagcaguuu

SEQ ID NO: 23804 - RNA, 18 nt, Artificial Sequence
  Synthetic
gcucuaugguggcaguuu

SEQ ID NO: 23805 - RNA, 22 nt, Artificial Sequence
  Synthetic
gccugcucuaugguggcaguuu

SEQ ID NO: 23806 - RNA, 23 nt, Artificial Sequence
  Synthetic
ggccugcucuaugguggcaguuu

SEQ ID NO: 23807 - RNA, 19 nt, Artificial Sequence
  Synthetic
gaugggggaaguucaguuu

SEQ ID NO: 23808 - RNA, 19 nt, Artificial Sequence
  Synthetic
gaaaaauugccaagaguuu

SEQ ID NO: 23809 - RNA, 23 nt, Artificial Sequence
  Synthetic
guaagaaaaauugccaagaguuu

SEQ ID NO: 23810 - RNA, 19 nt, Artificial Sequence
  Synthetic
gaauauuuagcuagaguuu

SEQ ID NO: 23811 - RNA, 20 nt, Artificial Sequence
  Synthetic
ggaauauuuagcuagaguuu

SEQ ID NO: 23812 - RNA, 21 nt, Artificial Sequence
  Synthetic
guuaggagcgacuaauaguuu

SEQ ID NO: 23813 - RNA, 24 nt, Artificial Sequence
  Synthetic
gauguuaggagcgacuaauaguuu

SEQ ID NO: 23814 - RNA, 22 nt, Artificial Sequence
  Synthetic
gcguuuuugugagcuauaguuu

SEQ ID NO: 23815 - RNA, 19 nt, Artificial Sequence
  Synthetic
gauuuaugcaugguaguuu

SEQ ID NO: 23816 - RNA, 18 nt, Artificial Sequence
  Synthetic
gcacagcuucaaccguuu

SEQ ID NO: 23817 - RNA, 21 nt, Artificial Sequence
  Synthetic
gaagcacagcuucaaccguuu

SEQ ID NO: 23818 - RNA, 24 nt, Artificial Sequence
  Synthetic
gucgaagcacagcuucaaccguuu

SEQ ID NO: 23819 - RNA, 18 nt, Artificial Sequence
  Synthetic
gugguucugaagucguuu

SEQ ID NO: 23820 - RNA, 23 nt, Artificial Sequence
  Synthetic
gaaaagugguucugaagucguuu

SEQ ID NO: 23821 - RNA, 24 nt, Artificial Sequence
  Synthetic
gaaaguauuucaaauuucagguuu

SEQ ID NO: 23822 - RNA, 19 nt, Artificial Sequence
  Synthetic
guguuccagaacgagguuu

SEQ ID NO: 23823 - RNA, 18 nt, Artificial Sequence
  Synthetic
gaaaaugcagaaggguuu

SEQ ID NO: 23824 - RNA, 20 nt, Artificial Sequence
  Synthetic
gugaaaaugcagaaggguuu

SEQ ID NO: 23825 - RNA, 21 nt, Artificial Sequence
  Synthetic
gaauaaaaacuuauaggguuu

SEQ ID NO: 23826 - RNA, 24 nt, Artificial Sequence
  Synthetic
gaugaauaaaaacuuauaggguuu

SEQ ID NO: 23827 - RNA, 20 nt, Artificial Sequence
  Synthetic
gauauagacucucaugguuu

SEQ ID NO: 23828 - RNA, 23 nt, Artificial Sequence
  Synthetic
gaagauauagacucucaugguuu

SEQ ID NO: 23829 - RNA, 19 nt, Artificial Sequence
  Synthetic
gcgugggaggcgaugguuu

SEQ ID NO: 23830 - RNA, 21 nt, Artificial Sequence
  Synthetic
gugcgugggaggcgaugguuu

SEQ ID NO: 23831 - RNA, 22 nt, Artificial Sequence
  Synthetic
ggugcgugggaggcgaugguuu

SEQ ID NO: 23832 - RNA, 24 nt, Artificial Sequence
  Synthetic
gaggugcgugggaggcgaugguuu

SEQ ID NO: 23833 - RNA, 18 nt, Artificial Sequence
  Synthetic
ggugagauuggaugguuu

SEQ ID NO: 23834 - RNA, 21 nt, Artificial Sequence
  Synthetic
guaggugagauuggaugguuu

SEQ ID NO: 23835 - RNA, 22 nt, Artificial Sequence
  Synthetic
gguaggugagauuggaugguuu

SEQ ID NO: 23836 - RNA, 24 nt, Artificial Sequence
  Synthetic
gagguaggugagauuggaugguuu

SEQ ID NO: 23837 - RNA, 19 nt, Artificial Sequence
  Synthetic
gaacaaaugaacuugguuu

SEQ ID NO: 23838 - RNA, 21 nt, Artificial Sequence
  Synthetic
gagaacaaaugaacuugguuu

SEQ ID NO: 23839 - RNA, 22 nt, Artificial Sequence
  Synthetic
ggagaacaaaugaacuugguuu

SEQ ID NO: 23840 - RNA, 23 nt, Artificial Sequence
  Synthetic
gacacauuccucucuaaauguuu

SEQ ID NO: 23841 - RNA, 21 nt, Artificial Sequence
  Synthetic
gaaacccugagugcaauguuu

SEQ ID NO: 23842 - RNA, 21 nt, Artificial Sequence
  Synthetic
gaacuaauaucauugauguuu

SEQ ID NO: 23843 - RNA, 18 nt, Artificial Sequence
  Synthetic
gacaacaaaaaccuguuu

SEQ ID NO: 23844 - RNA, 23 nt, Artificial Sequence
  Synthetic
guuauuagucucgucagcuguuu

SEQ ID NO: 23845 - RNA, 23 nt, Artificial Sequence
  Synthetic
gcccacuuaguagcuggguguuu

SEQ ID NO: 23846 - RNA, 22 nt, Artificial Sequence
  Synthetic
gcuuucccaaaacccuguguuu

SEQ ID NO: 23847 - RNA, 21 nt, Artificial Sequence
  Synthetic
gacuacccaccaggauuguuu

SEQ ID NO: 23848 - RNA, 23 nt, Artificial Sequence
  Synthetic
gagacuacccaccaggauuguuu

SEQ ID NO: 23849 - RNA, 21 nt, Artificial Sequence
  Synthetic
guuuaaucaagggaguuguuu

SEQ ID NO: 23850 - RNA, 24 nt, Artificial Sequence
  Synthetic
guuguuuaaucaagggaguuguuu

SEQ ID NO: 23851 - RNA, 19 nt, Artificial Sequence
  Synthetic
guuuucuaucccuuuguuu

SEQ ID NO: 23852 - RNA, 20 nt, Artificial Sequence
  Synthetic
gguuuucuaucccuuuguuu

SEQ ID NO: 23853 - RNA, 23 nt, Artificial Sequence
  Synthetic
gcugguuuucuaucccuuuguuu

SEQ ID NO: 23854 - RNA, 19 nt, Artificial Sequence
  Synthetic
gauugcuggcaguuuguuu

SEQ ID NO: 23855 - RNA, 24 nt, Artificial Sequence
  Synthetic
gucucgauugcuggcaguuuguuu

SEQ ID NO: 23856 - RNA, 21 nt, Artificial Sequence
  Synthetic
gauggggaaaaagaaaauuuu

SEQ ID NO: 23857 - RNA, 18 nt, Artificial Sequence
  Synthetic
gugacuggcucaaauuuu

SEQ ID NO: 23858 - RNA, 19 nt, Artificial Sequence
  Synthetic
ggugacuggcucaaauuuu

SEQ ID NO: 23859 - RNA, 23 nt, Artificial Sequence
  Synthetic
guauggugacuggcucaaauuuu

SEQ ID NO: 23860 - RNA, 24 nt, Artificial Sequence
  Synthetic
gguauggugacuggcucaaauuuu

SEQ ID NO: 23861 - RNA, 21 nt, Artificial Sequence
  Synthetic
guuuucccauauguaaauuuu

SEQ ID NO: 23862 - RNA, 24 nt, Artificial Sequence
  Synthetic
gauguuuucccauauguaaauuuu

SEQ ID NO: 23863 - RNA, 21 nt, Artificial Sequence
  Synthetic
gaaccuuaaaaaaucaauuuu

SEQ ID NO: 23864 - RNA, 18 nt, Artificial Sequence
  Synthetic
gaaggaucagagaauuuu

SEQ ID NO: 23865 - RNA, 19 nt, Artificial Sequence
  Synthetic
ggaaggaucagagaauuuu

SEQ ID NO: 23866 - RNA, 21 nt, Artificial Sequence
  Synthetic
guggaaggaucagagaauuuu

SEQ ID NO: 23867 - RNA, 24 nt, Artificial Sequence
  Synthetic
gcuguggaaggaucagagaauuuu

SEQ ID NO: 23868 - RNA, 24 nt, Artificial Sequence
  Synthetic
gucuucuuuuaguauuugaauuuu

SEQ ID NO: 23869 - RNA, 22 nt, Artificial Sequence
  Synthetic
gaaaacaugcccauguaauuuu

SEQ ID NO: 23870 - RNA, 23 nt, Artificial Sequence
  Synthetic
gcacaaacuaaugcuaacauuuu

SEQ ID NO: 23871 - RNA, 18 nt, Artificial Sequence
  Synthetic
guuaugaugucacauuuu

SEQ ID NO: 23872 - RNA, 21 nt, Artificial Sequence
  Synthetic
guuacaaaacaaauacauuuu

SEQ ID NO: 23873 - RNA, 22 nt, Artificial Sequence
  Synthetic
gguuacaaaacaaauacauuuu

SEQ ID NO: 23874 - RNA, 22 nt, Artificial Sequence
  Synthetic
guucuuuaaccuggaccauuuu

SEQ ID NO: 23875 - RNA, 22 nt, Artificial Sequence
  Synthetic
gcucucacauacuaagcauuuu

SEQ ID NO: 23876 - RNA, 19 nt, Artificial Sequence
  Synthetic
guuuuaucaucagcauuuu

SEQ ID NO: 23877 - RNA, 21 nt, Artificial Sequence
  Synthetic
gcauagauauauaaucauuuu

SEQ ID NO: 23878 - RNA, 22 nt, Artificial Sequence
  Synthetic
ggcauagauauauaaucauuuu

SEQ ID NO: 23879 - RNA, 21 nt, Artificial Sequence
  Synthetic
gauaaauaaggaagucauuuu

SEQ ID NO: 23880 - RNA, 24 nt, Artificial Sequence
  Synthetic
gaagauaaauaaggaagucauuuu

SEQ ID NO: 23881 - RNA, 24 nt, Artificial Sequence
  Synthetic
gucuccauuucacauuuucauuuu

SEQ ID NO: 23882 - RNA, 18 nt, Artificial Sequence
  Synthetic
gauuggaggcaagauuuu

SEQ ID NO: 23883 - RNA, 21 nt, Artificial Sequence
  Synthetic
gcagauuggaggcaagauuuu

SEQ ID NO: 23884 - RNA, 22 nt, Artificial Sequence
  Synthetic
ggcagauuggaggcaagauuuu

SEQ ID NO: 23885 - RNA, 24 nt, Artificial Sequence
  Synthetic
gcggcagauuggaggcaagauuuu

SEQ ID NO: 23886 - RNA, 22 nt, Artificial Sequence
  Synthetic
gaaaaccagcuucuaagauuuu

SEQ ID NO: 23887 - RNA, 18 nt, Artificial Sequence
  Synthetic
gaguuuuaucuggauuuu

SEQ ID NO: 23888 - RNA, 19 nt, Artificial Sequence
  Synthetic
ggaguuuuaucuggauuuu

SEQ ID NO: 23889 - RNA, 20 nt, Artificial Sequence
  Synthetic
gggaguuuuaucuggauuuu

SEQ ID NO: 23890 - RNA, 23 nt, Artificial Sequence
  Synthetic
gcuuacauguuuugaaugauuuu

SEQ ID NO: 23891 - RNA, 19 nt, Artificial Sequence
  Synthetic
gcaucuugcauaugauuuu

SEQ ID NO: 23892 - RNA, 23 nt, Artificial Sequence
  Synthetic
gacagcaucuugcauaugauuuu

SEQ ID NO: 23893 - RNA, 20 nt, Artificial Sequence
  Synthetic
gccuuuagggaggugauuuu

SEQ ID NO: 23894 - RNA, 21 nt, Artificial Sequence
  Synthetic
ggccuuuagggaggugauuuu

SEQ ID NO: 23895 - RNA, 22 nt, Artificial Sequence
  Synthetic
gggccuuuagggaggugauuuu

SEQ ID NO: 23896 - RNA, 23 nt, Artificial Sequence
  Synthetic
ggggccuuuagggaggugauuuu

SEQ ID NO: 23897 - RNA, 24 nt, Artificial Sequence
  Synthetic
gcaaucauaauccaaacauauuuu

SEQ ID NO: 23898 - RNA, 18 nt, Artificial Sequence
  Synthetic
gaaagcaauacauauuuu

SEQ ID NO: 23899 - RNA, 19 nt, Artificial Sequence
  Synthetic
ggaaagcaauacauauuuu

SEQ ID NO: 23900 - RNA, 23 nt, Artificial Sequence
  Synthetic
gcugcuuucuugccucauauuuu

SEQ ID NO: 23901 - RNA, 24 nt, Artificial Sequence
  Synthetic
ggcugcuuucuugccucauauuuu

SEQ ID NO: 23902 - RNA, 18 nt, Artificial Sequence
  Synthetic
gagcuuaauaacuauuuu

SEQ ID NO: 23903 - RNA, 24 nt, Artificial Sequence
  Synthetic
gaauacccaucuaacaccuauuuu

SEQ ID NO: 23904 - RNA, 18 nt, Artificial Sequence
  Synthetic
gcuuugcagaauuauuuu

SEQ ID NO: 23905 - RNA, 19 nt, Artificial Sequence
  Synthetic
gacucuucuagcaacuuuu

SEQ ID NO: 23906 - RNA, 24 nt, Artificial Sequence
  Synthetic
gcuuuaaagaaacuaauaccuuuu

SEQ ID NO: 23907 - RNA, 24 nt, Artificial Sequence
  Synthetic
gaaauaauguaauucauaccuuuu

SEQ ID NO: 23908 - RNA, 19 nt, Artificial Sequence
  Synthetic
gccauuuuucguaccuuuu

SEQ ID NO: 23909 - RNA, 21 nt, Artificial Sequence
  Synthetic
gugccauuuuucguaccuuuu

SEQ ID NO: 23910 - RNA, 18 nt, Artificial Sequence
  Synthetic
guaagucacuacccuuuu

SEQ ID NO: 23911 - RNA, 20 nt, Artificial Sequence
  Synthetic
guguaagucacuacccuuuu

SEQ ID NO: 23912 - RNA, 21 nt, Artificial Sequence
  Synthetic
gauauaaaacuuggcccuuuu

SEQ ID NO: 23913 - RNA, 23 nt, Artificial Sequence
  Synthetic
gugauauaaaacuuggcccuuuu

SEQ ID NO: 23914 - RNA, 24 nt, Artificial Sequence
  Synthetic
ggugauauaaaacuuggcccuuuu

SEQ ID NO: 23915 - RNA, 18 nt, Artificial Sequence
  Synthetic
gguuuuugugcuccuuuu

SEQ ID NO: 23916 - RNA, 21 nt, Artificial Sequence
  Synthetic
gaugguuuuugugcuccuuuu

SEQ ID NO: 23917 - RNA, 20 nt, Artificial Sequence
  Synthetic
gcauguggcagguggcuuuu

SEQ ID NO: 23918 - RNA, 23 nt, Artificial Sequence
  Synthetic
gcagcauguggcagguggcuuuu

SEQ ID NO: 23919 - RNA, 23 nt, Artificial Sequence
  Synthetic
gacccucuagacuauuggcuuuu

SEQ ID NO: 23920 - RNA, 21 nt, Artificial Sequence
  Synthetic
gucaaaugugauacugcuuuu

SEQ ID NO: 23921 - RNA, 18 nt, Artificial Sequence
  Synthetic
gcauuccaaagugcuuuu

SEQ ID NO: 23922 - RNA, 20 nt, Artificial Sequence
  Synthetic
gcccuaugaacauugcuuuu

SEQ ID NO: 23923 - RNA, 22 nt, Artificial Sequence
  Synthetic
gugcccuaugaacauugcuuuu

SEQ ID NO: 23924 - RNA, 24 nt, Artificial Sequence
  Synthetic
gugugcccuaugaacauugcuuuu

SEQ ID NO: 23925 - RNA, 21 nt, Artificial Sequence
  Synthetic
gcuugugcaugcagaucuuuu

SEQ ID NO: 23926 - RNA, 22 nt, Artificial Sequence
  Synthetic
ggcuugugcaugcagaucuuuu

SEQ ID NO: 23927 - RNA, 23 nt, Artificial Sequence
  Synthetic
guucuuggagcugagccucuuuu

SEQ ID NO: 23928 - RNA, 22 nt, Artificial Sequence
  Synthetic
gaccccaaaggggagcucuuuu

SEQ ID NO: 23929 - RNA, 22 nt, Artificial Sequence
  Synthetic
gucaaccuucccuacuucuuuu

SEQ ID NO: 23930 - RNA, 23 nt, Artificial Sequence
  Synthetic
ggucaaccuucccuacuucuuuu

SEQ ID NO: 23931 - RNA, 23 nt, Artificial Sequence
  Synthetic
gcagcuccaaaaguaaaaguuuu

SEQ ID NO: 23932 - RNA, 18 nt, Artificial Sequence
  Synthetic
guauauuacuuaaguuuu

SEQ ID NO: 23933 - RNA, 20 nt, Artificial Sequence
  Synthetic
gaguauauuacuuaaguuuu

SEQ ID NO: 23934 - RNA, 22 nt, Artificial Sequence
  Synthetic
gagaguauauuacuuaaguuuu

SEQ ID NO: 23935 - RNA, 19 nt, Artificial Sequence
  Synthetic
guauuauuuaagcaguuuu

SEQ ID NO: 23936 - RNA, 21 nt, Artificial Sequence
  Synthetic
guguauuauuuaagcaguuuu

SEQ ID NO: 23937 - RNA, 24 nt, Artificial Sequence
  Synthetic
gcaguguauuauuuaagcaguuuu

SEQ ID NO: 23938 - RNA, 20 nt, Artificial Sequence
  Synthetic
guucacaguauagcaguuuu

SEQ ID NO: 23939 - RNA, 18 nt, Artificial Sequence
  Synthetic
guuuuaccuugcaguuuu

SEQ ID NO: 23940 - RNA, 21 nt, Artificial Sequence
  Synthetic
guguuucuucugcucaguuuu

SEQ ID NO: 23941 - RNA, 19 nt, Artificial Sequence
  Synthetic
gccuucagcucucaguuuu

SEQ ID NO: 23942 - RNA, 23 nt, Artificial Sequence
  Synthetic
gacagccuucagcucucaguuuu

SEQ ID NO: 23943 - RNA, 23 nt, Artificial Sequence
  Synthetic
gacauuugugauaauucaguuuu

SEQ ID NO: 23944 - RNA, 24 nt, Artificial Sequence
  Synthetic
ggacauuugugauaauucaguuuu

SEQ ID NO: 23945 - RNA, 19 nt, Artificial Sequence
  Synthetic
gcguaagcuaaguaguuuu

SEQ ID NO: 23946 - RNA, 20 nt, Artificial Sequence
  Synthetic
guccauucuuucuucguuuu

SEQ ID NO: 23947 - RNA, 22 nt, Artificial Sequence
  Synthetic
gaguccauucuuucuucguuuu

SEQ ID NO: 23948 - RNA, 21 nt, Artificial Sequence
  Synthetic
ggggugaggugggaagguuuu

SEQ ID NO: 23949 - RNA, 24 nt, Artificial Sequence
  Synthetic
gcaggggugaggugggaagguuuu

SEQ ID NO: 23950 - RNA, 19 nt, Artificial Sequence
  Synthetic
gaaaaccaauacagguuuu

SEQ ID NO: 23951 - RNA, 19 nt, Artificial Sequence
  Synthetic
gucguuuugaaaggguuuu

SEQ ID NO: 23952 - RNA, 24 nt, Artificial Sequence
  Synthetic
gaaaugucguuuugaaaggguuuu

SEQ ID NO: 23953 - RNA, 21 nt, Artificial Sequence
  Synthetic
gucugcuacaaaaaugguuuu

SEQ ID NO: 23954 - RNA, 24 nt, Artificial Sequence
  Synthetic
gcugucugcuacaaaaaugguuuu

SEQ ID NO: 23955 - RNA, 18 nt, Artificial Sequence
  Synthetic
gagggugcaucugguuuu

SEQ ID NO: 23956 - RNA, 24 nt, Artificial Sequence
  Synthetic
gaaucugagggugcaucugguuuu

SEQ ID NO: 23957 - RNA, 24 nt, Artificial Sequence
  Synthetic
gaacuccacccuuugcuugguuuu

SEQ ID NO: 23958 - RNA, 21 nt, Artificial Sequence
  Synthetic
gcuuuucaccaaauauguuuu

SEQ ID NO: 23959 - RNA, 18 nt, Artificial Sequence
  Synthetic
gaugcugaaagguguuuu

SEQ ID NO: 23960 - RNA, 21 nt, Artificial Sequence
  Synthetic
gaugaugcugaaagguguuuu

SEQ ID NO: 23961 - RNA, 18 nt, Artificial Sequence
  Synthetic
gcuacaucaagguguuuu

SEQ ID NO: 23962 - RNA, 19 nt, Artificial Sequence
  Synthetic
ggcuacaucaagguguuuu

SEQ ID NO: 23963 - RNA, 22 nt, Artificial Sequence
  Synthetic
guucuaacgcaugguaauuuuu

SEQ ID NO: 23964 - RNA, 23 nt, Artificial Sequence
  Synthetic
gguucuaacgcaugguaauuuuu

SEQ ID NO: 23965 - RNA, 21 nt, Artificial Sequence
  Synthetic
ggagauuuaaaagagauuuuu

SEQ ID NO: 23966 - RNA, 20 nt, Artificial Sequence
  Synthetic
gucaacuugaguagauuuuu

SEQ ID NO: 23967 - RNA, 21 nt, Artificial Sequence
  Synthetic
gcacuguaguaugauauuuuu

SEQ ID NO: 23968 - RNA, 22 nt, Artificial Sequence
  Synthetic
ggcacuguaguaugauauuuuu

SEQ ID NO: 23969 - RNA, 24 nt, Artificial Sequence
  Synthetic
gcaauauuacgccaguuacuuuuu

SEQ ID NO: 23970 - RNA, 18 nt, Artificial Sequence
  Synthetic
gggaagcauaaccuuuuu

SEQ ID NO: 23971 - RNA, 21 nt, Artificial Sequence
  Synthetic
gacgggaagcauaaccuuuuu

SEQ ID NO: 23972 - RNA, 23 nt, Artificial Sequence
  Synthetic
gagacgggaagcauaaccuuuuu

SEQ ID NO: 23973 - RNA, 19 nt, Artificial Sequence
  Synthetic
gaccaucuacucccuuuuu

SEQ ID NO: 23974 - RNA, 18 nt, Artificial Sequence
  Synthetic
gaaauaaauggccuuuuu

SEQ ID NO: 23975 - RNA, 21 nt, Artificial Sequence
  Synthetic
gcugaaauaaauggccuuuuu

SEQ ID NO: 23976 - RNA, 22 nt, Artificial Sequence
  Synthetic
ggcugaaauaaauggccuuuuu

SEQ ID NO: 23977 - RNA, 19 nt, Artificial Sequence
  Synthetic
gaagaagcugugccuuuuu

SEQ ID NO: 23978 - RNA, 22 nt, Artificial Sequence
  Synthetic
gcugaagaagcugugccuuuuu

SEQ ID NO: 23979 - RNA, 21 nt, Artificial Sequence
  Synthetic
gaggauaguguauuccuuuuu

SEQ ID NO: 23980 - RNA, 20 nt, Artificial Sequence
  Synthetic
gaauuacuucuuugcuuuuu

SEQ ID NO: 23981 - RNA, 22 nt, Artificial Sequence
  Synthetic
gagaauuacuucuuugcuuuuu

SEQ ID NO: 23982 - RNA, 23 nt, Artificial Sequence
  Synthetic
ggagaauuacuucuuugcuuuuu

SEQ ID NO: 23983 - RNA, 18 nt, Artificial Sequence
  Synthetic
guccagcauugaguuuuu

SEQ ID NO: 23984 - RNA, 22 nt, Artificial Sequence
  Synthetic
guuuguccagcauugaguuuuu

SEQ ID NO: 23985 - RNA, 23 nt, Artificial Sequence
  Synthetic
gguuuguccagcauugaguuuuu

SEQ ID NO: 23986 - RNA, 22 nt, Artificial Sequence
  Synthetic
gaaaugguaaauuuguguuuuu

SEQ ID NO: 23987 - RNA, 19 nt, Artificial Sequence
  Synthetic
guaggcauucauuguuuuu

SEQ ID NO: 23988 - RNA, 20 nt, Artificial Sequence
  Synthetic
gguaggcauucauuguuuuu

SEQ ID NO: 23989 - RNA, 22 nt, Artificial Sequence
  Synthetic
gagguaggcauucauuguuuuu

SEQ ID NO: 23990 - RNA, 19 nt, Artificial Sequence
  Synthetic
gucuucacaauaauuuuuu

SEQ ID NO: 23991 - RNA, 20 nt, Artificial Sequence
  Synthetic
ggucuucacaauaauuuuuu

SEQ ID NO: 23992 - RNA, 20 nt, Artificial Sequence
  Synthetic
gcaaaauaccuccauuuuuu

SEQ ID NO: 23993 - RNA, 18 nt, Artificial Sequence
  Synthetic
ggggucuuaguuuuuuuu

SEQ ID NO: 23994 - RNA, 22 nt, Artificial Sequence
  Synthetic
gucuggggucuuaguuuuuuuu

SEQ ID NO: 23995 - RNA, 18 nt, Artificial Sequence
  Synthetic
acugagguggaaaaaaaa

SEQ ID NO: 23996 - RNA, 19 nt, Artificial Sequence
  Synthetic
cacugagguggaaaaaaaa

SEQ ID NO: 23997 - RNA, 20 nt, Artificial Sequence
  Synthetic
ucacugagguggaaaaaaaa

SEQ ID NO: 23998 - RNA, 21 nt, Artificial Sequence
  Synthetic
aaagcccagaggggaaaaaaa

SEQ ID NO: 23999 - RNA, 22 nt, Artificial Sequence
  Synthetic
uaaagcccagaggggaaaaaaa

SEQ ID NO: 24000 - RNA, 23 nt, Artificial Sequence
  Synthetic
auaaagcccagaggggaaaaaaa

SEQ ID NO: 24001 - RNA, 24 nt, Artificial Sequence
  Synthetic
cauaaagcccagaggggaaaaaaa

SEQ ID NO: 24002 - RNA, 18 nt, Artificial Sequence
  Synthetic
agcucagagugaaaaaaa

SEQ ID NO: 24003 - RNA, 20 nt, Artificial Sequence
  Synthetic
ugagcucagagugaaaaaaa

SEQ ID NO: 24004 - RNA, 21 nt, Artificial Sequence
  Synthetic
uugagcucagagugaaaaaaa

SEQ ID NO: 24005 - RNA, 23 nt, Artificial Sequence
  Synthetic
aguugagcucagagugaaaaaaa

SEQ ID NO: 24006 - RNA, 24 nt, Artificial Sequence
  Synthetic
caguugagcucagagugaaaaaaa

SEQ ID NO: 24007 - RNA, 21 nt, Artificial Sequence
  Synthetic
uuuugacaauguuuaaaaaaa

SEQ ID NO: 24008 - RNA, 22 nt, Artificial Sequence
  Synthetic
uuuuugacaauguuuaaaaaaa

SEQ ID NO: 24009 - RNA, 23 nt, Artificial Sequence
  Synthetic
cuuuuugacaauguuuaaaaaaa

SEQ ID NO: 24010 - RNA, 24 nt, Artificial Sequence
  Synthetic
ccuuuuugacaauguuuaaaaaaa

SEQ ID NO: 24011 - RNA, 21 nt, Artificial Sequence
  Synthetic
ccagaaaaacacuccaaaaaa

SEQ ID NO: 24012 - RNA, 22 nt, Artificial Sequence
  Synthetic
accagaaaaacacuccaaaaaa

SEQ ID NO: 24013 - RNA, 23 nt, Artificial Sequence
  Synthetic
uaccagaaaaacacuccaaaaaa

SEQ ID NO: 24014 - RNA, 21 nt, Artificial Sequence
  Synthetic
aauagcuaaucauucaaaaaa

SEQ ID NO: 24015 - RNA, 22 nt, Artificial Sequence
  Synthetic
aaauagcuaaucauucaaaaaa

SEQ ID NO: 24016 - RNA, 23 nt, Artificial Sequence
  Synthetic
aaaauagcuaaucauucaaaaaa

SEQ ID NO: 24017 - RNA, 24 nt, Artificial Sequence
  Synthetic
aaaaauagcuaaucauucaaaaaa

SEQ ID NO: 24018 - RNA, 18 nt, Artificial Sequence
  Synthetic
aguguucaugggaaaaaa

SEQ ID NO: 24019 - RNA, 19 nt, Artificial Sequence
  Synthetic
aaguguucaugggaaaaaa

SEQ ID NO: 24020 - RNA, 20 nt, Artificial Sequence
  Synthetic
uaaguguucaugggaaaaaa

SEQ ID NO: 24021 - RNA, 18 nt, Artificial Sequence
  Synthetic
cuugauuuggugaaaaaa

SEQ ID NO: 24022 - RNA, 19 nt, Artificial Sequence
  Synthetic
ucuugauuuggugaaaaaa

SEQ ID NO: 24023 - RNA, 21 nt, Artificial Sequence
  Synthetic
agucuugauuuggugaaaaaa

SEQ ID NO: 24024 - RNA, 23 nt, Artificial Sequence
  Synthetic
agagucuugauuuggugaaaaaa

SEQ ID NO: 24025 - RNA, 21 nt, Artificial Sequence
  Synthetic
uauuuccucauguguaaaaaa

SEQ ID NO: 24026 - RNA, 22 nt, Artificial Sequence
  Synthetic
uuauuuccucauguguaaaaaa

SEQ ID NO: 24027 - RNA, 23 nt, Artificial Sequence
  Synthetic
cuuauuuccucauguguaaaaaa

SEQ ID NO: 24028 - RNA, 20 nt, Artificial Sequence
  Synthetic
aggaacucuauuuuaaaaaa

SEQ ID NO: 24029 - RNA, 23 nt, Artificial Sequence
  Synthetic
aggaggaacucuauuuuaaaaaa

SEQ ID NO: 24030 - RNA, 24 nt, Artificial Sequence
  Synthetic
uaggaggaacucuauuuuaaaaaa

SEQ ID NO: 24031 - RNA, 19 nt, Artificial Sequence
  Synthetic
uguaggaaguggacaaaaa

SEQ ID NO: 24032 - RNA, 22 nt, Artificial Sequence
  Synthetic
agguguaggaaguggacaaaaa

SEQ ID NO: 24033 - RNA, 23 nt, Artificial Sequence
  Synthetic
aagguguaggaaguggacaaaaa

SEQ ID NO: 24034 - RNA, 24 nt, Artificial Sequence
  Synthetic
caagguguaggaaguggacaaaaa

SEQ ID NO: 24035 - RNA, 19 nt, Artificial Sequence
  Synthetic
uguccucuacauccaaaaa

SEQ ID NO: 24036 - RNA, 20 nt, Artificial Sequence
  Synthetic
auguccucuacauccaaaaa

SEQ ID NO: 24037 - RNA, 21 nt, Artificial Sequence
  Synthetic
aauguccucuacauccaaaaa

SEQ ID NO: 24038 - RNA, 22 nt, Artificial Sequence
  Synthetic
aaauguccucuacauccaaaaa

SEQ ID NO: 24039 - RNA, 23 nt, Artificial Sequence
  Synthetic
aaaauguccucuacauccaaaaa

SEQ ID NO: 24040 - RNA, 24 nt, Artificial Sequence
  Synthetic
uaaaauguccucuacauccaaaaa

SEQ ID NO: 24041 - RNA, 18 nt, Artificial Sequence
  Synthetic
aucauaacacuccaaaaa

SEQ ID NO: 24042 - RNA, 19 nt, Artificial Sequence
  Synthetic
aaucauaacacuccaaaaa

SEQ ID NO: 24043 - RNA, 20 nt, Artificial Sequence
  Synthetic
aaaucauaacacuccaaaaa

SEQ ID NO: 24044 - RNA, 21 nt, Artificial Sequence
  Synthetic
caaaucauaacacuccaaaaa

SEQ ID NO: 24045 - RNA, 22 nt, Artificial Sequence
  Synthetic
acaaaucauaacacuccaaaaa

SEQ ID NO: 24046 - RNA, 23 nt, Artificial Sequence
  Synthetic
cacaaaucauaacacuccaaaaa

SEQ ID NO: 24047 - RNA, 24 nt, Artificial Sequence
  Synthetic
ucacaaaucauaacacuccaaaaa

SEQ ID NO: 24048 - RNA, 19 nt, Artificial Sequence
  Synthetic
aguugagagaaggcaaaaa

SEQ ID NO: 24049 - RNA, 22 nt, Artificial Sequence
  Synthetic
uggaguugagagaaggcaaaaa

SEQ ID NO: 24050 - RNA, 23 nt, Artificial Sequence
  Synthetic
uuggaguugagagaaggcaaaaa

SEQ ID NO: 24051 - RNA, 24 nt, Artificial Sequence
  Synthetic
uuuggaguugagagaaggcaaaaa

SEQ ID NO: 24052 - RNA, 18 nt, Artificial Sequence
  Synthetic
caaguuuuccugcaaaaa

SEQ ID NO: 24053 - RNA, 20 nt, Artificial Sequence
  Synthetic
ugcaaguuuuccugcaaaaa

SEQ ID NO: 24054 - RNA, 21 nt, Artificial Sequence
  Synthetic
uugcaaguuuuccugcaaaaa

SEQ ID NO: 24055 - RNA, 21 nt, Artificial Sequence
  Synthetic
acaaaaggaaaacaucaaaaa

SEQ ID NO: 24056 - RNA, 22 nt, Artificial Sequence
  Synthetic
cacaaaaggaaaacaucaaaaa

SEQ ID NO: 24057 - RNA, 23 nt, Artificial Sequence
  Synthetic
ccacaaaaggaaaacaucaaaaa

SEQ ID NO: 24058 - RNA, 24 nt, Artificial Sequence
  Synthetic
cccacaaaaggaaaacaucaaaaa

SEQ ID NO: 24059 - RNA, 18 nt, Artificial Sequence
  Synthetic
aggggcaugggagaaaaa

SEQ ID NO: 24060 - RNA, 19 nt, Artificial Sequence
  Synthetic
aaggggcaugggagaaaaa

SEQ ID NO: 24061 - RNA, 20 nt, Artificial Sequence
  Synthetic
uaaggggcaugggagaaaaa

SEQ ID NO: 24062 - RNA, 21 nt, Artificial Sequence
  Synthetic
auaaggggcaugggagaaaaa

SEQ ID NO: 24063 - RNA, 24 nt, Artificial Sequence
  Synthetic
uggauaaggggcaugggagaaaaa

SEQ ID NO: 24064 - RNA, 18 nt, Artificial Sequence
  Synthetic
ugguuucucuuagaaaaa

SEQ ID NO: 24065 - RNA, 20 nt, Artificial Sequence
  Synthetic
agugguuucucuuagaaaaa

SEQ ID NO: 24066 - RNA, 21 nt, Artificial Sequence
  Synthetic
cagugguuucucuuagaaaaa

SEQ ID NO: 24067 - RNA, 22 nt, Artificial Sequence
  Synthetic
ucagugguuucucuuagaaaaa

SEQ ID NO: 24068 - RNA, 23 nt, Artificial Sequence
  Synthetic
aucagugguuucucuuagaaaaa

SEQ ID NO: 24069 - RNA, 21 nt, Artificial Sequence
  Synthetic
ucauugaagaauuuagaaaaa

SEQ ID NO: 24070 - RNA, 22 nt, Artificial Sequence
  Synthetic
aucauugaagaauuuagaaaaa

SEQ ID NO: 24071 - RNA, 23 nt, Artificial Sequence
  Synthetic
caucauugaagaauuuagaaaaa

SEQ ID NO: 24072 - RNA, 24 nt, Artificial Sequence
  Synthetic
acaucauugaagaauuuagaaaaa

SEQ ID NO: 24073 - RNA, 21 nt, Artificial Sequence
  Synthetic
uccuccuuuuauuuagaaaaa

SEQ ID NO: 24074 - RNA, 22 nt, Artificial Sequence
  Synthetic
cuccuccuuuuauuuagaaaaa

SEQ ID NO: 24075 - RNA, 23 nt, Artificial Sequence
  Synthetic
acuccuccuuuuauuuagaaaaa

SEQ ID NO: 24076 - RNA, 24 nt, Artificial Sequence
  Synthetic
aacuccuccuuuuauuuagaaaaa

SEQ ID NO: 24077 - RNA, 18 nt, Artificial Sequence
  Synthetic
ucugcagcaaaggaaaaa

SEQ ID NO: 24078 - RNA, 19 nt, Artificial Sequence
  Synthetic
aucugcagcaaaggaaaaa

SEQ ID NO: 24079 - RNA, 20 nt, Artificial Sequence
  Synthetic
uaucugcagcaaaggaaaaa

SEQ ID NO: 24080 - RNA, 21 nt, Artificial Sequence
  Synthetic
uuaucugcagcaaaggaaaaa

SEQ ID NO: 24081 - RNA, 22 nt, Artificial Sequence
  Synthetic
uuuaucugcagcaaaggaaaaa

SEQ ID NO: 24082 - RNA, 24 nt, Artificial Sequence
  Synthetic
cguuuaucugcagcaaaggaaaaa

SEQ ID NO: 24083 - RNA, 18 nt, Artificial Sequence
  Synthetic
uauaccucacaggaaaaa

SEQ ID NO: 24084 - RNA, 19 nt, Artificial Sequence
  Synthetic
uuauaccucacaggaaaaa

SEQ ID NO: 24085 - RNA, 20 nt, Artificial Sequence
  Synthetic
auuauaccucacaggaaaaa

SEQ ID NO: 24086 - RNA, 21 nt, Artificial Sequence
  Synthetic
uauuauaccucacaggaaaaa

SEQ ID NO: 24087 - RNA, 22 nt, Artificial Sequence
  Synthetic
cuauuauaccucacaggaaaaa

SEQ ID NO: 24088 - RNA, 23 nt, Artificial Sequence
  Synthetic
acuauuauaccucacaggaaaaa

SEQ ID NO: 24089 - RNA, 24 nt, Artificial Sequence
  Synthetic
uacuauuauaccucacaggaaaaa

SEQ ID NO: 24090 - RNA, 21 nt, Artificial Sequence
  Synthetic
uucuucacuaaaaaugaaaaa

SEQ ID NO: 24091 - RNA, 22 nt, Artificial Sequence
  Synthetic
cuucuucacuaaaaaugaaaaa

SEQ ID NO: 24092 - RNA, 23 nt, Artificial Sequence
  Synthetic
ucuucuucacuaaaaaugaaaaa

SEQ ID NO: 24093 - RNA, 24 nt, Artificial Sequence
  Synthetic
uucuucuucacuaaaaaugaaaaa

SEQ ID NO: 24094 - RNA, 21 nt, Artificial Sequence
  Synthetic
agaccagaaguuaaugaaaaa

SEQ ID NO: 24095 - RNA, 22 nt, Artificial Sequence
  Synthetic
cagaccagaaguuaaugaaaaa

SEQ ID NO: 24096 - RNA, 23 nt, Artificial Sequence
  Synthetic
ucagaccagaaguuaaugaaaaa

SEQ ID NO: 24097 - RNA, 24 nt, Artificial Sequence
  Synthetic
cucagaccagaaguuaaugaaaaa

SEQ ID NO: 24098 - RNA, 21 nt, Artificial Sequence
  Synthetic
uaaaugcuucauauugaaaaa

SEQ ID NO: 24099 - RNA, 22 nt, Artificial Sequence
  Synthetic
auaaaugcuucauauugaaaaa

SEQ ID NO: 24100 - RNA, 23 nt, Artificial Sequence
  Synthetic
aauaaaugcuucauauugaaaaa

SEQ ID NO: 24101 - RNA, 21 nt, Artificial Sequence
  Synthetic
uauuauacauaaaaauaaaaa

SEQ ID NO: 24102 - RNA, 23 nt, Artificial Sequence
  Synthetic
uguauuauacauaaaaauaaaaa

SEQ ID NO: 24103 - RNA, 24 nt, Artificial Sequence
  Synthetic
auguauuauacauaaaaauaaaaa

SEQ ID NO: 24104 - RNA, 21 nt, Artificial Sequence
  Synthetic
cuuuaaaacauucaauaaaaa

SEQ ID NO: 24105 - RNA, 22 nt, Artificial Sequence
  Synthetic
ucuuuaaaacauucaauaaaaa

SEQ ID NO: 24106 - RNA, 23 nt, Artificial Sequence
  Synthetic
uucuuuaaaacauucaauaaaaa

SEQ ID NO: 24107 - RNA, 24 nt, Artificial Sequence
  Synthetic
cuucuuuaaaacauucaauaaaaa

SEQ ID NO: 24108 - RNA, 18 nt, Artificial Sequence
  Synthetic
aaauugaggggauaaaaa

SEQ ID NO: 24109 - RNA, 19 nt, Artificial Sequence
  Synthetic
uaaauugaggggauaaaaa

SEQ ID NO: 24110 - RNA, 21 nt, Artificial Sequence
  Synthetic
uguaaauugaggggauaaaaa

SEQ ID NO: 24111 - RNA, 23 nt, Artificial Sequence
  Synthetic
aguguaaauugaggggauaaaaa

SEQ ID NO: 24112 - RNA, 24 nt, Artificial Sequence
  Synthetic
aaguguaaauugaggggauaaaaa

SEQ ID NO: 24113 - RNA, 21 nt, Artificial Sequence
  Synthetic
agggagaugugaagcuaaaaa

SEQ ID NO: 24114 - RNA, 22 nt, Artificial Sequence
  Synthetic
aagggagaugugaagcuaaaaa

SEQ ID NO: 24115 - RNA, 24 nt, Artificial Sequence
  Synthetic
cgaagggagaugugaagcuaaaaa

SEQ ID NO: 24116 - RNA, 18 nt, Artificial Sequence
  Synthetic
cacaauauuagcuaaaaa

SEQ ID NO: 24117 - RNA, 19 nt, Artificial Sequence
  Synthetic
ccacaauauuagcuaaaaa

SEQ ID NO: 24118 - RNA, 21 nt, Artificial Sequence
  Synthetic
ugccacaauauuagcuaaaaa

SEQ ID NO: 24119 - RNA, 22 nt, Artificial Sequence
  Synthetic
uugccacaauauuagcuaaaaa

SEQ ID NO: 24120 - RNA, 23 nt, Artificial Sequence
  Synthetic
uuugccacaauauuagcuaaaaa

SEQ ID NO: 24121 - RNA, 24 nt, Artificial Sequence
  Synthetic
auuugccacaauauuagcuaaaaa

SEQ ID NO: 24122 - RNA, 19 nt, Artificial Sequence
  Synthetic
agauuucauuaucuaaaaa

SEQ ID NO: 24123 - RNA, 23 nt, Artificial Sequence
  Synthetic
ugggagauuucauuaucuaaaaa

SEQ ID NO: 24124 - RNA, 24 nt, Artificial Sequence
  Synthetic
cugggagauuucauuaucuaaaaa

SEQ ID NO: 24125 - RNA, 18 nt, Artificial Sequence
  Synthetic
aauaaagcuaaguaaaaa

SEQ ID NO: 24126 - RNA, 20 nt, Artificial Sequence
  Synthetic
agaauaaagcuaaguaaaaa

SEQ ID NO: 24127 - RNA, 21 nt, Artificial Sequence
  Synthetic
uagaauaaagcuaaguaaaaa

SEQ ID NO: 24128 - RNA, 22 nt, Artificial Sequence
  Synthetic
uuagaauaaagcuaaguaaaaa

SEQ ID NO: 24129 - RNA, 23 nt, Artificial Sequence
  Synthetic
uuuagaauaaagcuaaguaaaaa

SEQ ID NO: 24130 - RNA, 18 nt, Artificial Sequence
  Synthetic
aaaggcccacaguaaaaa

SEQ ID NO: 24131 - RNA, 19 nt, Artificial Sequence
  Synthetic
aaaaggcccacaguaaaaa

SEQ ID NO: 24132 - RNA, 20 nt, Artificial Sequence
  Synthetic
caaaaggcccacaguaaaaa

SEQ ID NO: 24133 - RNA, 22 nt, Artificial Sequence
  Synthetic
agcaaaaggcccacaguaaaaa

SEQ ID NO: 24134 - RNA, 23 nt, Artificial Sequence
  Synthetic
cagcaaaaggcccacaguaaaaa

SEQ ID NO: 24135 - RNA, 24 nt, Artificial Sequence
  Synthetic
acagcaaaaggcccacaguaaaaa

SEQ ID NO: 24136 - RNA, 18 nt, Artificial Sequence
  Synthetic
uaaugcccccuguaaaaa

SEQ ID NO: 24137 - RNA, 19 nt, Artificial Sequence
  Synthetic
uuaaugcccccuguaaaaa

SEQ ID NO: 24138 - RNA, 21 nt, Artificial Sequence
  Synthetic
aguuaaugcccccuguaaaaa

SEQ ID NO: 24139 - RNA, 22 nt, Artificial Sequence
  Synthetic
aaguuaaugcccccuguaaaaa

SEQ ID NO: 24140 - RNA, 23 nt, Artificial Sequence
  Synthetic
aaaguuaaugcccccuguaaaaa

SEQ ID NO: 24141 - RNA, 24 nt, Artificial Sequence
  Synthetic
uaaaguuaaugcccccuguaaaaa

SEQ ID NO: 24142 - RNA, 18 nt, Artificial Sequence
  Synthetic
ugcgucaaaguuuaaaaa

SEQ ID NO: 24143 - RNA, 19 nt, Artificial Sequence
  Synthetic
augcgucaaaguuuaaaaa

SEQ ID NO: 24144 - RNA, 20 nt, Artificial Sequence
  Synthetic
caugcgucaaaguuuaaaaa

SEQ ID NO: 24145 - RNA, 21 nt, Artificial Sequence
  Synthetic
acaugcgucaaaguuuaaaaa

SEQ ID NO: 24146 - RNA, 22 nt, Artificial Sequence
  Synthetic
aacaugcgucaaaguuuaaaaa

SEQ ID NO: 24147 - RNA, 23 nt, Artificial Sequence
  Synthetic
uaacaugcgucaaaguuuaaaaa

SEQ ID NO: 24148 - RNA, 24 nt, Artificial Sequence
  Synthetic
auaacaugcgucaaaguuuaaaaa

SEQ ID NO: 24149 - RNA, 18 nt, Artificial Sequence
  Synthetic
uuaccagccaaaacaaaa

SEQ ID NO: 24150 - RNA, 20 nt, Artificial Sequence
  Synthetic
uguuaccagccaaaacaaaa

SEQ ID NO: 24151 - RNA, 21 nt, Artificial Sequence
  Synthetic
auguuaccagccaaaacaaaa

SEQ ID NO: 24152 - RNA, 22 nt, Artificial Sequence
  Synthetic
aauguuaccagccaaaacaaaa

SEQ ID NO: 24153 - RNA, 23 nt, Artificial Sequence
  Synthetic
aaauguuaccagccaaaacaaaa

SEQ ID NO: 24154 - RNA, 18 nt, Artificial Sequence
  Synthetic
uucuuauauaaaacaaaa

SEQ ID NO: 24155 - RNA, 19 nt, Artificial Sequence
  Synthetic
cuucuuauauaaaacaaaa

SEQ ID NO: 24156 - RNA, 20 nt, Artificial Sequence
  Synthetic
acuucuuauauaaaacaaaa

SEQ ID NO: 24157 - RNA, 21 nt, Artificial Sequence
  Synthetic
cacuucuuauauaaaacaaaa

SEQ ID NO: 24158 - RNA, 22 nt, Artificial Sequence
  Synthetic
acacuucuuauauaaaacaaaa

SEQ ID NO: 24159 - RNA, 23 nt, Artificial Sequence
  Synthetic
uacacuucuuauauaaaacaaaa

SEQ ID NO: 24160 - RNA, 24 nt, Artificial Sequence
  Synthetic
cuacacuucuuauauaaaacaaaa

SEQ ID NO: 24161 - RNA, 21 nt, Artificial Sequence
  Synthetic
uccauuuuuaaagaaacaaaa

SEQ ID NO: 24162 - RNA, 23 nt, Artificial Sequence
  Synthetic
uguccauuuuuaaagaaacaaaa

SEQ ID NO: 24163 - RNA, 18 nt, Artificial Sequence
  Synthetic
aauuaaguagaaacaaaa

SEQ ID NO: 24164 - RNA, 21 nt, Artificial Sequence
  Synthetic
aggaauuaaguagaaacaaaa

SEQ ID NO: 24165 - RNA, 22 nt, Artificial Sequence
  Synthetic
caggaauuaaguagaaacaaaa

SEQ ID NO: 24166 - RNA, 23 nt, Artificial Sequence
  Synthetic
acaggaauuaaguagaaacaaaa

SEQ ID NO: 24167 - RNA, 24 nt, Artificial Sequence
  Synthetic
uacaggaauuaaguagaaacaaaa

SEQ ID NO: 24168 - RNA, 18 nt, Artificial Sequence
  Synthetic
uuacauuuccuaacaaaa

SEQ ID NO: 24169 - RNA, 20 nt, Artificial Sequence
  Synthetic
aguuacauuuccuaacaaaa

SEQ ID NO: 24170 - RNA, 22 nt, Artificial Sequence
  Synthetic
cgaguuacauuuccuaacaaaa

SEQ ID NO: 24171 - RNA, 24 nt, Artificial Sequence
  Synthetic
agcgaguuacauuuccuaacaaaa

SEQ ID NO: 24172 - RNA, 18 nt, Artificial Sequence
  Synthetic
cuugaggucaacacaaaa

SEQ ID NO: 24173 - RNA, 19 nt, Artificial Sequence
  Synthetic
ucuugaggucaacacaaaa

SEQ ID NO: 24174 - RNA, 20 nt, Artificial Sequence
  Synthetic
uucuugaggucaacacaaaa

SEQ ID NO: 24175 - RNA, 21 nt, Artificial Sequence
  Synthetic
cuucuugaggucaacacaaaa

SEQ ID NO: 24176 - RNA, 23 nt, Artificial Sequence
  Synthetic
ugcuucuugaggucaacacaaaa

SEQ ID NO: 24177 - RNA, 18 nt, Artificial Sequence
  Synthetic
acaaguuagcagacaaaa

SEQ ID NO: 24178 - RNA, 19 nt, Artificial Sequence
  Synthetic
uacaaguuagcagacaaaa

SEQ ID NO: 24179 - RNA, 20 nt, Artificial Sequence
  Synthetic
auacaaguuagcagacaaaa

SEQ ID NO: 24180 - RNA, 21 nt, Artificial Sequence
  Synthetic
aauacaaguuagcagacaaaa

SEQ ID NO: 24181 - RNA, 22 nt, Artificial Sequence
  Synthetic
aaauacaaguuagcagacaaaa

SEQ ID NO: 24182 - RNA, 23 nt, Artificial Sequence
  Synthetic
uaaauacaaguuagcagacaaaa

SEQ ID NO: 24183 - RNA, 24 nt, Artificial Sequence
  Synthetic
uuaaauacaaguuagcagacaaaa

SEQ ID NO: 24184 - RNA, 21 nt, Artificial Sequence
  Synthetic
uuagggucuaggaggacaaaa

SEQ ID NO: 24185 - RNA, 22 nt, Artificial Sequence
  Synthetic
uuuagggucuaggaggacaaaa

SEQ ID NO: 24186 - RNA, 18 nt, Artificial Sequence
  Synthetic
ucacucucuauuacaaaa

SEQ ID NO: 24187 - RNA, 19 nt, Artificial Sequence
  Synthetic
cucacucucuauuacaaaa

SEQ ID NO: 24188 - RNA, 20 nt, Artificial Sequence
  Synthetic
acucacucucuauuacaaaa

SEQ ID NO: 24189 - RNA, 21 nt, Artificial Sequence
  Synthetic
cacucacucucuauuacaaaa

SEQ ID NO: 24190 - RNA, 22 nt, Artificial Sequence
  Synthetic
acacucacucucuauuacaaaa

SEQ ID NO: 24191 - RNA, 23 nt, Artificial Sequence
  Synthetic
uacacucacucucuauuacaaaa

SEQ ID NO: 24192 - RNA, 24 nt, Artificial Sequence
  Synthetic
uuacacucacucucuauuacaaaa

SEQ ID NO: 24193 - RNA, 18 nt, Artificial Sequence
  Synthetic
auuaaggugguuacaaaa

SEQ ID NO: 24194 - RNA, 19 nt, Artificial Sequence
  Synthetic
cauuaaggugguuacaaaa

SEQ ID NO: 24195 - RNA, 20 nt, Artificial Sequence
  Synthetic
ucauuaaggugguuacaaaa

SEQ ID NO: 24196 - RNA, 21 nt, Artificial Sequence
  Synthetic
uucauuaaggugguuacaaaa

SEQ ID NO: 24197 - RNA, 22 nt, Artificial Sequence
  Synthetic
cuucauuaaggugguuacaaaa

SEQ ID NO: 24198 - RNA, 23 nt, Artificial Sequence
  Synthetic
acuucauuaaggugguuacaaaa

SEQ ID NO: 24199 - RNA, 24 nt, Artificial Sequence
  Synthetic
uacuucauuaaggugguuacaaaa

SEQ ID NO: 24200 - RNA, 18 nt, Artificial Sequence
  Synthetic
uuuuccccuaagccaaaa

SEQ ID NO: 24201 - RNA, 20 nt, Artificial Sequence
  Synthetic
uguuuuccccuaagccaaaa

SEQ ID NO: 24202 - RNA, 23 nt, Artificial Sequence
  Synthetic
cgguguuuuccccuaagccaaaa

SEQ ID NO: 24203 - RNA, 24 nt, Artificial Sequence
  Synthetic
acgguguuuuccccuaagccaaaa

SEQ ID NO: 24204 - RNA, 18 nt, Artificial Sequence
  Synthetic
ucaguuucuaauccaaaa

SEQ ID NO: 24205 - RNA, 19 nt, Artificial Sequence
  Synthetic
aucaguuucuaauccaaaa

SEQ ID NO: 24206 - RNA, 20 nt, Artificial Sequence
  Synthetic
aaucaguuucuaauccaaaa

SEQ ID NO: 24207 - RNA, 21 nt, Artificial Sequence
  Synthetic
uaaucaguuucuaauccaaaa

SEQ ID NO: 24208 - RNA, 22 nt, Artificial Sequence
  Synthetic
auaaucaguuucuaauccaaaa

SEQ ID NO: 24209 - RNA, 23 nt, Artificial Sequence
  Synthetic
aauaaucaguuucuaauccaaaa

SEQ ID NO: 24210 - RNA, 24 nt, Artificial Sequence
  Synthetic
caauaaucaguuucuaauccaaaa

SEQ ID NO: 24211 - RNA, 18 nt, Artificial Sequence
  Synthetic
auguaaacagcuccaaaa

SEQ ID NO: 24212 - RNA, 19 nt, Artificial Sequence
  Synthetic
uauguaaacagcuccaaaa

SEQ ID NO: 24213 - RNA, 20 nt, Artificial Sequence
  Synthetic
auauguaaacagcuccaaaa

SEQ ID NO: 24214 - RNA, 22 nt, Artificial Sequence
  Synthetic
agauauguaaacagcuccaaaa

SEQ ID NO: 24215 - RNA, 23 nt, Artificial Sequence
  Synthetic
aagauauguaaacagcuccaaaa

SEQ ID NO: 24216 - RNA, 24 nt, Artificial Sequence
  Synthetic
aaagauauguaaacagcuccaaaa

SEQ ID NO: 24217 - RNA, 18 nt, Artificial Sequence
  Synthetic
auauuuuaggguccaaaa

SEQ ID NO: 24218 - RNA, 20 nt, Artificial Sequence
  Synthetic
ugauauuuuaggguccaaaa

SEQ ID NO: 24219 - RNA, 22 nt, Artificial Sequence
  Synthetic
ugugauauuuuaggguccaaaa

SEQ ID NO: 24220 - RNA, 24 nt, Artificial Sequence
  Synthetic
ugugugauauuuuaggguccaaaa

SEQ ID NO: 24221 - RNA, 21 nt, Artificial Sequence
  Synthetic
uauaagagaagaaaagcaaaa

SEQ ID NO: 24222 - RNA, 23 nt, Artificial Sequence
  Synthetic
uguauaagagaagaaaagcaaaa

SEQ ID NO: 24223 - RNA, 24 nt, Artificial Sequence
  Synthetic
uuguauaagagaagaaaagcaaaa

SEQ ID NO: 24224 - RNA, 21 nt, Artificial Sequence
  Synthetic
cugacccuccccugagcaaaa

SEQ ID NO: 24225 - RNA, 22 nt, Artificial Sequence
  Synthetic
acugacccuccccugagcaaaa

SEQ ID NO: 24226 - RNA, 23 nt, Artificial Sequence
  Synthetic
cacugacccuccccugagcaaaa

SEQ ID NO: 24227 - RNA, 24 nt, Artificial Sequence
  Synthetic
acacugacccuccccugagcaaaa

SEQ ID NO: 24228 - RNA, 18 nt, Artificial Sequence
  Synthetic
acacauccuuuagcaaaa

SEQ ID NO: 24229 - RNA, 19 nt, Artificial Sequence
  Synthetic
cacacauccuuuagcaaaa

SEQ ID NO: 24230 - RNA, 20 nt, Artificial Sequence
  Synthetic
ucacacauccuuuagcaaaa

SEQ ID NO: 24231 - RNA, 22 nt, Artificial Sequence
  Synthetic
ugucacacauccuuuagcaaaa

SEQ ID NO: 24232 - RNA, 23 nt, Artificial Sequence
  Synthetic
cugucacacauccuuuagcaaaa

SEQ ID NO: 24233 - RNA, 24 nt, Artificial Sequence
  Synthetic
ucugucacacauccuuuagcaaaa

SEQ ID NO: 24234 - RNA, 19 nt, Artificial Sequence
  Synthetic
ugugaaccucugugcaaaa

SEQ ID NO: 24235 - RNA, 20 nt, Artificial Sequence
  Synthetic
augugaaccucugugcaaaa

SEQ ID NO: 24236 - RNA, 21 nt, Artificial Sequence
  Synthetic
aaugugaaccucugugcaaaa

SEQ ID NO: 24237 - RNA, 23 nt, Artificial Sequence
  Synthetic
ugaaugugaaccucugugcaaaa

SEQ ID NO: 24238 - RNA, 24 nt, Artificial Sequence
  Synthetic
uugaaugugaaccucugugcaaaa

SEQ ID NO: 24239 - RNA, 18 nt, Artificial Sequence
  Synthetic
cuauggugaucuucaaaa

SEQ ID NO: 24240 - RNA, 19 nt, Artificial Sequence
  Synthetic
ucuauggugaucuucaaaa

SEQ ID NO: 24241 - RNA, 20 nt, Artificial Sequence
  Synthetic
uucuauggugaucuucaaaa

SEQ ID NO: 24242 - RNA, 21 nt, Artificial Sequence
  Synthetic
auucuauggugaucuucaaaa

SEQ ID NO: 24243 - RNA, 22 nt, Artificial Sequence
  Synthetic
aauucuauggugaucuucaaaa

SEQ ID NO: 24244 - RNA, 23 nt, Artificial Sequence
  Synthetic
uaauucuauggugaucuucaaaa

SEQ ID NO: 24245 - RNA, 24 nt, Artificial Sequence
  Synthetic
cuaauucuauggugaucuucaaaa

SEQ ID NO: 24246 - RNA, 19 nt, Artificial Sequence
  Synthetic
agacaaaacugguucaaaa

SEQ ID NO: 24247 - RNA, 20 nt, Artificial Sequence
  Synthetic
aagacaaaacugguucaaaa

SEQ ID NO: 24248 - RNA, 23 nt, Artificial Sequence
  Synthetic
aggaagacaaaacugguucaaaa

SEQ ID NO: 24249 - RNA, 24 nt, Artificial Sequence
  Synthetic
uaggaagacaaaacugguucaaaa

SEQ ID NO: 24250 - RNA, 18 nt, Artificial Sequence
  Synthetic
uuucgaucguguucaaaa

SEQ ID NO: 24251 - RNA, 19 nt, Artificial Sequence
  Synthetic
uuuucgaucguguucaaaa

SEQ ID NO: 24252 - RNA, 20 nt, Artificial Sequence
  Synthetic
cuuuucgaucguguucaaaa

SEQ ID NO: 24253 - RNA, 21 nt, Artificial Sequence
  Synthetic
acuuuucgaucguguucaaaa

SEQ ID NO: 24254 - RNA, 22 nt, Artificial Sequence
  Synthetic
aacuuuucgaucguguucaaaa

SEQ ID NO: 24255 - RNA, 23 nt, Artificial Sequence
  Synthetic
aaacuuuucgaucguguucaaaa

SEQ ID NO: 24256 - RNA, 24 nt, Artificial Sequence
  Synthetic
uaaacuuuucgaucguguucaaaa

SEQ ID NO: 24257 - RNA, 21 nt, Artificial Sequence
  Synthetic
aaugcaccauuuguuucaaaa

SEQ ID NO: 24258 - RNA, 22 nt, Artificial Sequence
  Synthetic
uaaugcaccauuuguuucaaaa

SEQ ID NO: 24259 - RNA, 23 nt, Artificial Sequence
  Synthetic
auaaugcaccauuuguuucaaaa

SEQ ID NO: 24260 - RNA, 24 nt, Artificial Sequence
  Synthetic
cauaaugcaccauuuguuucaaaa

SEQ ID NO: 24261 - RNA, 21 nt, Artificial Sequence
  Synthetic
uuuaguucaagaaaaagaaaa

SEQ ID NO: 24262 - RNA, 22 nt, Artificial Sequence
  Synthetic
uuuuaguucaagaaaaagaaaa

SEQ ID NO: 24263 - RNA, 23 nt, Artificial Sequence
  Synthetic
uuuuuaguucaagaaaaagaaaa

SEQ ID NO: 24264 - RNA, 24 nt, Artificial Sequence
  Synthetic
auuuuuaguucaagaaaaagaaaa

SEQ ID NO: 24265 - RNA, 21 nt, Artificial Sequence
  Synthetic
auuccauauuuccuaagaaaa

SEQ ID NO: 24266 - RNA, 22 nt, Artificial Sequence
  Synthetic
aauuccauauuuccuaagaaaa

SEQ ID NO: 24267 - RNA, 23 nt, Artificial Sequence
  Synthetic
aaauuccauauuuccuaagaaaa

SEQ ID NO: 24268 - RNA, 18 nt, Artificial Sequence
  Synthetic
uucauucccuuaagaaaa

SEQ ID NO: 24269 - RNA, 19 nt, Artificial Sequence
  Synthetic
cuucauucccuuaagaaaa

SEQ ID NO: 24270 - RNA, 22 nt, Artificial Sequence
  Synthetic
uggcuucauucccuuaagaaaa

SEQ ID NO: 24271 - RNA, 23 nt, Artificial Sequence
  Synthetic
cuggcuucauucccuuaagaaaa

SEQ ID NO: 24272 - RNA, 24 nt, Artificial Sequence
  Synthetic
ucuggcuucauucccuuaagaaaa

SEQ ID NO: 24273 - RNA, 19 nt, Artificial Sequence
  Synthetic
uggccacauaaacagaaaa

SEQ ID NO: 24274 - RNA, 20 nt, Artificial Sequence
  Synthetic
cuggccacauaaacagaaaa

SEQ ID NO: 24275 - RNA, 21 nt, Artificial Sequence
  Synthetic
acuggccacauaaacagaaaa

SEQ ID NO: 24276 - RNA, 22 nt, Artificial Sequence
  Synthetic
aacuggccacauaaacagaaaa

SEQ ID NO: 24277 - RNA, 21 nt, Artificial Sequence
  Synthetic
auacaaauaaaacacagaaaa

SEQ ID NO: 24278 - RNA, 22 nt, Artificial Sequence
  Synthetic
uauacaaauaaaacacagaaaa

SEQ ID NO: 24279 - RNA, 23 nt, Artificial Sequence
  Synthetic
uuauacaaauaaaacacagaaaa

SEQ ID NO: 24280 - RNA, 24 nt, Artificial Sequence
  Synthetic
cuuauacaaauaaaacacagaaaa

SEQ ID NO: 24281 - RNA, 18 nt, Artificial Sequence
  Synthetic
aaaaagcccuucagaaaa

SEQ ID NO: 24282 - RNA, 20 nt, Artificial Sequence
  Synthetic
ugaaaaagcccuucagaaaa

SEQ ID NO: 24283 - RNA, 21 nt, Artificial Sequence
  Synthetic
uugaaaaagcccuucagaaaa

SEQ ID NO: 24284 - RNA, 22 nt, Artificial Sequence
  Synthetic
uuugaaaaagcccuucagaaaa

SEQ ID NO: 24285 - RNA, 23 nt, Artificial Sequence
  Synthetic
auuugaaaaagcccuucagaaaa

SEQ ID NO: 24286 - RNA, 24 nt, Artificial Sequence
  Synthetic
aauuugaaaaagcccuucagaaaa

SEQ ID NO: 24287 - RNA, 22 nt, Artificial Sequence
  Synthetic
agaauaguaguaagagagaaaa

SEQ ID NO: 24288 - RNA, 23 nt, Artificial Sequence
  Synthetic
uagaauaguaguaagagagaaaa

SEQ ID NO: 24289 - RNA, 18 nt, Artificial Sequence
  Synthetic
cauguuuaagggagaaaa

SEQ ID NO: 24290 - RNA, 19 nt, Artificial Sequence
  Synthetic
acauguuuaagggagaaaa

SEQ ID NO: 24291 - RNA, 20 nt, Artificial Sequence
  Synthetic
uacauguuuaagggagaaaa

SEQ ID NO: 24292 - RNA, 21 nt, Artificial Sequence
  Synthetic
cuacauguuuaagggagaaaa

SEQ ID NO: 24293 - RNA, 22 nt, Artificial Sequence
  Synthetic
ucuacauguuuaagggagaaaa

SEQ ID NO: 24294 - RNA, 23 nt, Artificial Sequence
  Synthetic
uucuacauguuuaagggagaaaa

SEQ ID NO: 24295 - RNA, 24 nt, Artificial Sequence
  Synthetic
cuucuacauguuuaagggagaaaa

SEQ ID NO: 24296 - RNA, 18 nt, Artificial Sequence
  Synthetic
auaagauaauauagaaaa

SEQ ID NO: 24297 - RNA, 20 nt, Artificial Sequence
  Synthetic
cgauaagauaauauagaaaa

SEQ ID NO: 24298 - RNA, 21 nt, Artificial Sequence
  Synthetic
acgauaagauaauauagaaaa

SEQ ID NO: 24299 - RNA, 24 nt, Artificial Sequence
  Synthetic
aggacgauaagauaauauagaaaa

SEQ ID NO: 24300 - RNA, 18 nt, Artificial Sequence
  Synthetic
augucuauuuguagaaaa

SEQ ID NO: 24301 - RNA, 19 nt, Artificial Sequence
  Synthetic
aaugucuauuuguagaaaa

SEQ ID NO: 24302 - RNA, 20 nt, Artificial Sequence
  Synthetic
caaugucuauuuguagaaaa

SEQ ID NO: 24303 - RNA, 21 nt, Artificial Sequence
  Synthetic
ucaaugucuauuuguagaaaa

SEQ ID NO: 24304 - RNA, 22 nt, Artificial Sequence
  Synthetic
cucaaugucuauuuguagaaaa

SEQ ID NO: 24305 - RNA, 23 nt, Artificial Sequence
  Synthetic
ccucaaugucuauuuguagaaaa

SEQ ID NO: 24306 - RNA, 24 nt, Artificial Sequence
  Synthetic
cccucaaugucuauuuguagaaaa

SEQ ID NO: 24307 - RNA, 18 nt, Artificial Sequence
  Synthetic
augguuucauuuagaaaa

SEQ ID NO: 24308 - RNA, 19 nt, Artificial Sequence
  Synthetic
uaugguuucauuuagaaaa

SEQ ID NO: 24309 - RNA, 21 nt, Artificial Sequence
  Synthetic
aguaugguuucauuuagaaaa

SEQ ID NO: 24310 - RNA, 23 nt, Artificial Sequence
  Synthetic
ugaguaugguuucauuuagaaaa

SEQ ID NO: 24311 - RNA, 24 nt, Artificial Sequence
  Synthetic
uugaguaugguuucauuuagaaaa

SEQ ID NO: 24312 - RNA, 18 nt, Artificial Sequence
  Synthetic
ugacuggcuuaucgaaaa

SEQ ID NO: 24313 - RNA, 19 nt, Artificial Sequence
  Synthetic
uugacuggcuuaucgaaaa

SEQ ID NO: 24314 - RNA, 20 nt, Artificial Sequence
  Synthetic
uuugacuggcuuaucgaaaa

SEQ ID NO: 24315 - RNA, 22 nt, Artificial Sequence
  Synthetic
ugaucaggguucagaaggaaaa

SEQ ID NO: 24316 - RNA, 24 nt, Artificial Sequence
  Synthetic
ugugaucaggguucagaaggaaaa

SEQ ID NO: 24317 - RNA, 18 nt, Artificial Sequence
  Synthetic
ucuuaucauauaggaaaa

SEQ ID NO: 24318 - RNA, 19 nt, Artificial Sequence
  Synthetic
cucuuaucauauaggaaaa

SEQ ID NO: 24319 - RNA, 22 nt, Artificial Sequence
  Synthetic
aggcucuuaucauauaggaaaa

SEQ ID NO: 24320 - RNA, 23 nt, Artificial Sequence
  Synthetic
caggcucuuaucauauaggaaaa

SEQ ID NO: 24321 - RNA, 24 nt, Artificial Sequence
  Synthetic
acaggcucuuaucauauaggaaaa

SEQ ID NO: 24322 - RNA, 18 nt, Artificial Sequence
  Synthetic
aaacacugacagggaaaa

SEQ ID NO: 24323 - RNA, 20 nt, Artificial Sequence
  Synthetic
ugaaacacugacagggaaaa

SEQ ID NO: 24324 - RNA, 21 nt, Artificial Sequence
  Synthetic
uugaaacacugacagggaaaa

SEQ ID NO: 24325 - RNA, 22 nt, Artificial Sequence
  Synthetic
uuugaaacacugacagggaaaa

SEQ ID NO: 24326 - RNA, 23 nt, Artificial Sequence
  Synthetic
auuugaaacacugacagggaaaa

SEQ ID NO: 24327 - RNA, 24 nt, Artificial Sequence
  Synthetic
uauuugaaacacugacagggaaaa

SEQ ID NO: 24328 - RNA, 18 nt, Artificial Sequence
  Synthetic
auggcauauuugggaaaa

SEQ ID NO: 24329 - RNA, 20 nt, Artificial Sequence
  Synthetic
ugauggcauauuugggaaaa

SEQ ID NO: 24330 - RNA, 22 nt, Artificial Sequence
  Synthetic
ugugauggcauauuugggaaaa

SEQ ID NO: 24331 - RNA, 23 nt, Artificial Sequence
  Synthetic
augugauggcauauuugggaaaa

SEQ ID NO: 24332 - RNA, 24 nt, Artificial Sequence
  Synthetic
uaugugauggcauauuugggaaaa

SEQ ID NO: 24333 - RNA, 18 nt, Artificial Sequence
  Synthetic
ugcaaguaucauggaaaa

SEQ ID NO: 24334 - RNA, 19 nt, Artificial Sequence
  Synthetic
augcaaguaucauggaaaa

SEQ ID NO: 24335 - RNA, 20 nt, Artificial Sequence
  Synthetic
caugcaaguaucauggaaaa

SEQ ID NO: 24336 - RNA, 23 nt, Artificial Sequence
  Synthetic
aggcaugcaaguaucauggaaaa

SEQ ID NO: 24337 - RNA, 24 nt, Artificial Sequence
  Synthetic
uaggcaugcaaguaucauggaaaa

SEQ ID NO: 24338 - RNA, 18 nt, Artificial Sequence
  Synthetic
augaugcccucuggaaaa

SEQ ID NO: 24339 - RNA, 20 nt, Artificial Sequence
  Synthetic
agaugaugcccucuggaaaa

SEQ ID NO: 24340 - RNA, 21 nt, Artificial Sequence
  Synthetic
aagaugaugcccucuggaaaa

SEQ ID NO: 24341 - RNA, 22 nt, Artificial Sequence
  Synthetic
aaagaugaugcccucuggaaaa

SEQ ID NO: 24342 - RNA, 23 nt, Artificial Sequence
  Synthetic
uaaagaugaugcccucuggaaaa

SEQ ID NO: 24343 - RNA, 21 nt, Artificial Sequence
  Synthetic
agggacuucucauuuggaaaa

SEQ ID NO: 24344 - RNA, 23 nt, Artificial Sequence
  Synthetic
agagggacuucucauuuggaaaa

SEQ ID NO: 24345 - RNA, 18 nt, Artificial Sequence
  Synthetic
ccacuggaagaaugaaaa

SEQ ID NO: 24346 - RNA, 19 nt, Artificial Sequence
  Synthetic
cccacuggaagaaugaaaa

SEQ ID NO: 24347 - RNA, 20 nt, Artificial Sequence
  Synthetic
ucccacuggaagaaugaaaa

SEQ ID NO: 24348 - RNA, 21 nt, Artificial Sequence
  Synthetic
uucccacuggaagaaugaaaa

SEQ ID NO: 24349 - RNA, 22 nt, Artificial Sequence
  Synthetic
cuucccacuggaagaaugaaaa

SEQ ID NO: 24350 - RNA, 23 nt, Artificial Sequence
  Synthetic
acuucccacuggaagaaugaaaa

SEQ ID NO: 24351 - RNA, 24 nt, Artificial Sequence
  Synthetic
uacuucccacuggaagaaugaaaa

SEQ ID NO: 24352 - RNA, 21 nt, Artificial Sequence
  Synthetic
agggugagugguauaugaaaa

SEQ ID NO: 24353 - RNA, 22 nt, Artificial Sequence
  Synthetic
uagggugagugguauaugaaaa

SEQ ID NO: 24354 - RNA, 23 nt, Artificial Sequence
  Synthetic
auagggugagugguauaugaaaa

SEQ ID NO: 24355 - RNA, 24 nt, Artificial Sequence
  Synthetic
uauagggugagugguauaugaaaa

SEQ ID NO: 24356 - RNA, 21 nt, Artificial Sequence
  Synthetic
uaaaaguuagaaaccugaaaa

SEQ ID NO: 24357 - RNA, 22 nt, Artificial Sequence
  Synthetic
auaaaaguuagaaaccugaaaa

SEQ ID NO: 24358 - RNA, 23 nt, Artificial Sequence
  Synthetic
cauaaaaguuagaaaccugaaaa

SEQ ID NO: 24359 - RNA, 24 nt, Artificial Sequence
  Synthetic
ccauaaaaguuagaaaccugaaaa

SEQ ID NO: 24360 - RNA, 18 nt, Artificial Sequence
  Synthetic
agggaaccucccugaaaa

SEQ ID NO: 24361 - RNA, 19 nt, Artificial Sequence
  Synthetic
uagggaaccucccugaaaa

SEQ ID NO: 24362 - RNA, 20 nt, Artificial Sequence
  Synthetic
uuagggaaccucccugaaaa

SEQ ID NO: 24363 - RNA, 21 nt, Artificial Sequence
  Synthetic
uuuagggaaccucccugaaaa

SEQ ID NO: 24364 - RNA, 22 nt, Artificial Sequence
  Synthetic
cuuuagggaaccucccugaaaa

SEQ ID NO: 24365 - RNA, 23 nt, Artificial Sequence
  Synthetic
acuuuagggaaccucccugaaaa

SEQ ID NO: 24366 - RNA, 24 nt, Artificial Sequence
  Synthetic
uacuuuagggaaccucccugaaaa

SEQ ID NO: 24367 - RNA, 18 nt, Artificial Sequence
  Synthetic
uuguacucuuccugaaaa

SEQ ID NO: 24368 - RNA, 19 nt, Artificial Sequence
  Synthetic
uuuguacucuuccugaaaa

SEQ ID NO: 24369 - RNA, 20 nt, Artificial Sequence
  Synthetic
uuuuguacucuuccugaaaa

SEQ ID NO: 24370 - RNA, 21 nt, Artificial Sequence
  Synthetic
auuuuguacucuuccugaaaa

SEQ ID NO: 24371 - RNA, 22 nt, Artificial Sequence
  Synthetic
uauuuuguacucuuccugaaaa

SEQ ID NO: 24372 - RNA, 23 nt, Artificial Sequence
  Synthetic
uuauuuuguacucuuccugaaaa

SEQ ID NO: 24373 - RNA, 24 nt, Artificial Sequence
  Synthetic
uuuauuuuguacucuuccugaaaa

SEQ ID NO: 24374 - RNA, 21 nt, Artificial Sequence
  Synthetic
aaaaagcagcagcucugaaaa

SEQ ID NO: 24375 - RNA, 22 nt, Artificial Sequence
  Synthetic
caaaaagcagcagcucugaaaa

SEQ ID NO: 24376 - RNA, 23 nt, Artificial Sequence
  Synthetic
acaaaaagcagcagcucugaaaa

SEQ ID NO: 24377 - RNA, 24 nt, Artificial Sequence
  Synthetic
aacaaaaagcagcagcucugaaaa

SEQ ID NO: 24378 - RNA, 21 nt, Artificial Sequence
  Synthetic
uaaaggaagucaaagugaaaa

SEQ ID NO: 24379 - RNA, 22 nt, Artificial Sequence
  Synthetic
auaaaggaagucaaagugaaaa

SEQ ID NO: 24380 - RNA, 23 nt, Artificial Sequence
  Synthetic
uauaaaggaagucaaagugaaaa

SEQ ID NO: 24381 - RNA, 24 nt, Artificial Sequence
  Synthetic
uuauaaaggaagucaaagugaaaa

SEQ ID NO: 24382 - RNA, 18 nt, Artificial Sequence
  Synthetic
ugcuuuaauaagugaaaa

SEQ ID NO: 24383 - RNA, 19 nt, Artificial Sequence
  Synthetic
uugcuuuaauaagugaaaa

SEQ ID NO: 24384 - RNA, 20 nt, Artificial Sequence
  Synthetic
uuugcuuuaauaagugaaaa

SEQ ID NO: 24385 - RNA, 21 nt, Artificial Sequence
  Synthetic
auuugcuuuaauaagugaaaa

SEQ ID NO: 24386 - RNA, 22 nt, Artificial Sequence
  Synthetic
aauuugcuuuaauaagugaaaa

SEQ ID NO: 24387 - RNA, 23 nt, Artificial Sequence
  Synthetic
uaauuugcuuuaauaagugaaaa

SEQ ID NO: 24388 - RNA, 24 nt, Artificial Sequence
  Synthetic
uuaauuugcuuuaauaagugaaaa

SEQ ID NO: 24389 - RNA, 18 nt, Artificial Sequence
  Synthetic
cuugccacagagugaaaa

SEQ ID NO: 24390 - RNA, 19 nt, Artificial Sequence
  Synthetic
ucuugccacagagugaaaa

SEQ ID NO: 24391 - RNA, 20 nt, Artificial Sequence
  Synthetic
uucuugccacagagugaaaa

SEQ ID NO: 24392 - RNA, 21 nt, Artificial Sequence
  Synthetic
ucuuaggagcucacuugaaaa

SEQ ID NO: 24393 - RNA, 22 nt, Artificial Sequence
  Synthetic
uucuuaggagcucacuugaaaa

SEQ ID NO: 24394 - RNA, 23 nt, Artificial Sequence
  Synthetic
cuucuuaggagcucacuugaaaa

SEQ ID NO: 24395 - RNA, 24 nt, Artificial Sequence
  Synthetic
ucuucuuaggagcucacuugaaaa

SEQ ID NO: 24396 - RNA, 21 nt, Artificial Sequence
  Synthetic
aaugaguggcaguuuugaaaa

SEQ ID NO: 24397 - RNA, 22 nt, Artificial Sequence
  Synthetic
caaugaguggcaguuuugaaaa

SEQ ID NO: 24398 - RNA, 23 nt, Artificial Sequence
  Synthetic
ucaaugaguggcaguuuugaaaa

SEQ ID NO: 24399 - RNA, 24 nt, Artificial Sequence
  Synthetic
aucaaugaguggcaguuuugaaaa

SEQ ID NO: 24400 - RNA, 21 nt, Artificial Sequence
  Synthetic
auucauguccuaaaaauaaaa

SEQ ID NO: 24401 - RNA, 22 nt, Artificial Sequence
  Synthetic
cauucauguccuaaaaauaaaa

SEQ ID NO: 24402 - RNA, 23 nt, Artificial Sequence
  Synthetic
ccauucauguccuaaaaauaaaa

SEQ ID NO: 24403 - RNA, 24 nt, Artificial Sequence
  Synthetic
uccauucauguccuaaaaauaaaa

SEQ ID NO: 24404 - RNA, 21 nt, Artificial Sequence
  Synthetic
uaucacaagcugaaaauaaaa

SEQ ID NO: 24405 - RNA, 24 nt, Artificial Sequence
  Synthetic
agguaucacaagcugaaaauaaaa

SEQ ID NO: 24406 - RNA, 19 nt, Artificial Sequence
  Synthetic
ugguaaaggugaaauaaaa

SEQ ID NO: 24407 - RNA, 20 nt, Artificial Sequence
  Synthetic
uugguaaaggugaaauaaaa

SEQ ID NO: 24408 - RNA, 21 nt, Artificial Sequence
  Synthetic
uuugguaaaggugaaauaaaa

SEQ ID NO: 24409 - RNA, 24 nt, Artificial Sequence
  Synthetic
ugguuugguaaaggugaaauaaaa

SEQ ID NO: 24410 - RNA, 18 nt, Artificial Sequence
  Synthetic
cacuguuaggcaauaaaa

SEQ ID NO: 24411 - RNA, 20 nt, Artificial Sequence
  Synthetic
agcacuguuaggcaauaaaa

SEQ ID NO: 24412 - RNA, 21 nt, Artificial Sequence
  Synthetic
aagcacuguuaggcaauaaaa

SEQ ID NO: 24413 - RNA, 22 nt, Artificial Sequence
  Synthetic
aaagcacuguuaggcaauaaaa

SEQ ID NO: 24414 - RNA, 23 nt, Artificial Sequence
  Synthetic
caaagcacuguuaggcaauaaaa

SEQ ID NO: 24415 - RNA, 24 nt, Artificial Sequence
  Synthetic
acaaagcacuguuaggcaauaaaa

SEQ ID NO: 24416 - RNA, 20 nt, Artificial Sequence
  Synthetic
aggauuagggaucaauaaaa

SEQ ID NO: 24417 - RNA, 24 nt, Artificial Sequence
  Synthetic
agggaggauuagggaucaauaaaa

SEQ ID NO: 24418 - RNA, 18 nt, Artificial Sequence
  Synthetic
auaacauauggaauaaaa

SEQ ID NO: 24419 - RNA, 19 nt, Artificial Sequence
  Synthetic
uauaacauauggaauaaaa

SEQ ID NO: 24420 - RNA, 20 nt, Artificial Sequence
  Synthetic
cuauaacauauggaauaaaa

SEQ ID NO: 24421 - RNA, 22 nt, Artificial Sequence
  Synthetic
ugcuauaacauauggaauaaaa

SEQ ID NO: 24422 - RNA, 24 nt, Artificial Sequence
  Synthetic
ugugcuauaacauauggaauaaaa

SEQ ID NO: 24423 - RNA, 18 nt, Artificial Sequence
  Synthetic
ucugcauucugaauaaaa

SEQ ID NO: 24424 - RNA, 19 nt, Artificial Sequence
  Synthetic
uucugcauucugaauaaaa

SEQ ID NO: 24425 - RNA, 20 nt, Artificial Sequence
  Synthetic
cuucugcauucugaauaaaa

SEQ ID NO: 24426 - RNA, 21 nt, Artificial Sequence
  Synthetic
acuucugcauucugaauaaaa

SEQ ID NO: 24427 - RNA, 22 nt, Artificial Sequence
  Synthetic
cacuucugcauucugaauaaaa

SEQ ID NO: 24428 - RNA, 23 nt, Artificial Sequence
  Synthetic
acacuucugcauucugaauaaaa

SEQ ID NO: 24429 - RNA, 24 nt, Artificial Sequence
  Synthetic
uacacuucugcauucugaauaaaa

SEQ ID NO: 24430 - RNA, 21 nt, Artificial Sequence
  Synthetic
agaagaaaugacauaauaaaa

SEQ ID NO: 24431 - RNA, 24 nt, Artificial Sequence
  Synthetic
aggagaagaaaugacauaauaaaa

SEQ ID NO: 24432 - RNA, 21 nt, Artificial Sequence
  Synthetic
uauuaaugaaauuuaauaaaa

SEQ ID NO: 24433 - RNA, 22 nt, Artificial Sequence
  Synthetic
auauuaaugaaauuuaauaaaa

SEQ ID NO: 24434 - RNA, 23 nt, Artificial Sequence
  Synthetic
cauauuaaugaaauuuaauaaaa

SEQ ID NO: 24435 - RNA, 24 nt, Artificial Sequence
  Synthetic
ucauauuaaugaaauuuaauaaaa

SEQ ID NO: 24436 - RNA, 18 nt, Artificial Sequence
  Synthetic
uuucaugaucagauaaaa

SEQ ID NO: 24437 - RNA, 19 nt, Artificial Sequence
  Synthetic
auuucaugaucagauaaaa

SEQ ID NO: 24438 - RNA, 20 nt, Artificial Sequence
  Synthetic
aauuucaugaucagauaaaa

SEQ ID NO: 24439 - RNA, 21 nt, Artificial Sequence
  Synthetic
caauuucaugaucagauaaaa

SEQ ID NO: 24440 - RNA, 22 nt, Artificial Sequence
  Synthetic
acaauuucaugaucagauaaaa

SEQ ID NO: 24441 - RNA, 23 nt, Artificial Sequence
  Synthetic
aacaauuucaugaucagauaaaa

SEQ ID NO: 24442 - RNA, 18 nt, Artificial Sequence
  Synthetic
aauguaugaaugauaaaa

SEQ ID NO: 24443 - RNA, 19 nt, Artificial Sequence
  Synthetic
aaauguaugaaugauaaaa

SEQ ID NO: 24444 - RNA, 20 nt, Artificial Sequence
  Synthetic
caaauguaugaaugauaaaa

SEQ ID NO: 24445 - RNA, 21 nt, Artificial Sequence
  Synthetic
ucaaauguaugaaugauaaaa

SEQ ID NO: 24446 - RNA, 22 nt, Artificial Sequence
  Synthetic
aucaaauguaugaaugauaaaa

SEQ ID NO: 24447 - RNA, 23 nt, Artificial Sequence
  Synthetic
uaucaaauguaugaaugauaaaa

SEQ ID NO: 24448 - RNA, 24 nt, Artificial Sequence
  Synthetic
uuaucaaauguaugaaugauaaaa

SEQ ID NO: 24449 - RNA, 21 nt, Artificial Sequence
  Synthetic
cugagggcuagaaauauaaaa

SEQ ID NO: 24450 - RNA, 22 nt, Artificial Sequence
  Synthetic
ucugagggcuagaaauauaaaa

SEQ ID NO: 24451 - RNA, 23 nt, Artificial Sequence
  Synthetic
uucugagggcuagaaauauaaaa

SEQ ID NO: 24452 - RNA, 24 nt, Artificial Sequence
  Synthetic
auucugagggcuagaaauauaaaa

SEQ ID NO: 24453 - RNA, 18 nt, Artificial Sequence
  Synthetic
aguaaaacuccuauaaaa

SEQ ID NO: 24454 - RNA, 20 nt, Artificial Sequence
  Synthetic
ugaguaaaacuccuauaaaa

SEQ ID NO: 24455 - RNA, 21 nt, Artificial Sequence
  Synthetic
augaguaaaacuccuauaaaa

SEQ ID NO: 24456 - RNA, 23 nt, Artificial Sequence
  Synthetic
agaugaguaaaacuccuauaaaa

SEQ ID NO: 24457 - RNA, 21 nt, Artificial Sequence
  Synthetic
cucccuuugaaaucuauaaaa

SEQ ID NO: 24458 - RNA, 22 nt, Artificial Sequence
  Synthetic
ucucccuuugaaaucuauaaaa

SEQ ID NO: 24459 - RNA, 23 nt, Artificial Sequence
  Synthetic
cucucccuuugaaaucuauaaaa

SEQ ID NO: 24460 - RNA, 24 nt, Artificial Sequence
  Synthetic
ucucucccuuugaaaucuauaaaa

SEQ ID NO: 24461 - RNA, 21 nt, Artificial Sequence
  Synthetic
auacauuucugauguauaaaa

SEQ ID NO: 24462 - RNA, 22 nt, Artificial Sequence
  Synthetic
cauacauuucugauguauaaaa

SEQ ID NO: 24463 - RNA, 23 nt, Artificial Sequence
  Synthetic
ccauacauuucugauguauaaaa

SEQ ID NO: 24464 - RNA, 24 nt, Artificial Sequence
  Synthetic
uccauacauuucugauguauaaaa

SEQ ID NO: 24465 - RNA, 19 nt, Artificial Sequence
  Synthetic
aggaggugaaauuauaaaa

SEQ ID NO: 24466 - RNA, 20 nt, Artificial Sequence
  Synthetic
uaggaggugaaauuauaaaa

SEQ ID NO: 24467 - RNA, 18 nt, Artificial Sequence
  Synthetic
uguauaguuuaccuaaaa

SEQ ID NO: 24468 - RNA, 19 nt, Artificial Sequence
  Synthetic
uuguauaguuuaccuaaaa

SEQ ID NO: 24469 - RNA, 20 nt, Artificial Sequence
  Synthetic
uuuguauaguuuaccuaaaa

SEQ ID NO: 24470 - RNA, 22 nt, Artificial Sequence
  Synthetic
aguuuguauaguuuaccuaaaa

SEQ ID NO: 24471 - RNA, 23 nt, Artificial Sequence
  Synthetic
aaguuuguauaguuuaccuaaaa

SEQ ID NO: 24472 - RNA, 18 nt, Artificial Sequence
  Synthetic
uccaauuucccccuaaaa

SEQ ID NO: 24473 - RNA, 19 nt, Artificial Sequence
  Synthetic
uuccaauuucccccuaaaa

SEQ ID NO: 24474 - RNA, 20 nt, Artificial Sequence
  Synthetic
uuuccaauuucccccuaaaa

SEQ ID NO: 24475 - RNA, 21 nt, Artificial Sequence
  Synthetic
cuuuccaauuucccccuaaaa

SEQ ID NO: 24476 - RNA, 22 nt, Artificial Sequence
  Synthetic
ucuuuccaauuucccccuaaaa

SEQ ID NO: 24477 - RNA, 23 nt, Artificial Sequence
  Synthetic
aucuuuccaauuucccccuaaaa

SEQ ID NO: 24478 - RNA, 24 nt, Artificial Sequence
  Synthetic
aaucuuuccaauuucccccuaaaa

SEQ ID NO: 24479 - RNA, 18 nt, Artificial Sequence
  Synthetic
uugugguaguagcuaaaa

SEQ ID NO: 24480 - RNA, 20 nt, Artificial Sequence
  Synthetic
aguugugguaguagcuaaaa

SEQ ID NO: 24481 - RNA, 22 nt, Artificial Sequence
  Synthetic
agaguugugguaguagcuaaaa

SEQ ID NO: 24482 - RNA, 23 nt, Artificial Sequence
  Synthetic
cagaguugugguaguagcuaaaa

SEQ ID NO: 24483 - RNA, 21 nt, Artificial Sequence
  Synthetic
uucaaaauauaugaucuaaaa

SEQ ID NO: 24484 - RNA, 22 nt, Artificial Sequence
  Synthetic
uuucaaaauauaugaucuaaaa

SEQ ID NO: 24485 - RNA, 23 nt, Artificial Sequence
  Synthetic
uuuucaaaauauaugaucuaaaa

SEQ ID NO: 24486 - RNA, 24 nt, Artificial Sequence
  Synthetic
cuuuucaaaauauaugaucuaaaa

SEQ ID NO: 24487 - RNA, 21 nt, Artificial Sequence
  Synthetic
aacaaaacuccauuucuaaaa

SEQ ID NO: 24488 - RNA, 24 nt, Artificial Sequence
  Synthetic
uggaacaaaacuccauuucuaaaa

SEQ ID NO: 24489 - RNA, 18 nt, Artificial Sequence
  Synthetic
cacaguaaguuucuaaaa

SEQ ID NO: 24490 - RNA, 19 nt, Artificial Sequence
  Synthetic
ucacaguaaguuucuaaaa

SEQ ID NO: 24491 - RNA, 20 nt, Artificial Sequence
  Synthetic
uucacaguaaguuucuaaaa

SEQ ID NO: 24492 - RNA, 21 nt, Artificial Sequence
  Synthetic
auucacaguaaguuucuaaaa

SEQ ID NO: 24493 - RNA, 23 nt, Artificial Sequence
  Synthetic
agauucacaguaaguuucuaaaa

SEQ ID NO: 24494 - RNA, 24 nt, Artificial Sequence
  Synthetic
cagauucacaguaaguuucuaaaa

SEQ ID NO: 24495 - RNA, 18 nt, Artificial Sequence
  Synthetic
aauaaucugaaaguaaaa

SEQ ID NO: 24496 - RNA, 19 nt, Artificial Sequence
  Synthetic
caauaaucugaaaguaaaa

SEQ ID NO: 24497 - RNA, 20 nt, Artificial Sequence
  Synthetic
acaauaaucugaaaguaaaa

SEQ ID NO: 24498 - RNA, 21 nt, Artificial Sequence
  Synthetic
uacaauaaucugaaaguaaaa

SEQ ID NO: 24499 - RNA, 22 nt, Artificial Sequence
  Synthetic
cuacaauaaucugaaaguaaaa

SEQ ID NO: 24500 - RNA, 23 nt, Artificial Sequence
  Synthetic
acuacaauaaucugaaaguaaaa

SEQ ID NO: 24501 - RNA, 24 nt, Artificial Sequence
  Synthetic
aacuacaauaaucugaaaguaaaa

SEQ ID NO: 24502 - RNA, 21 nt, Artificial Sequence
  Synthetic
aauauauugaaagcaguaaaa

SEQ ID NO: 24503 - RNA, 23 nt, Artificial Sequence
  Synthetic
ugaauauauugaaagcaguaaaa

SEQ ID NO: 24504 - RNA, 24 nt, Artificial Sequence
  Synthetic
uugaauauauugaaagcaguaaaa

SEQ ID NO: 24505 - RNA, 18 nt, Artificial Sequence
  Synthetic
caauuaggaucaguaaaa

SEQ ID NO: 24506 - RNA, 19 nt, Artificial Sequence
  Synthetic
acaauuaggaucaguaaaa

SEQ ID NO: 24507 - RNA, 20 nt, Artificial Sequence
  Synthetic
aacaauuaggaucaguaaaa

SEQ ID NO: 24508 - RNA, 21 nt, Artificial Sequence
  Synthetic
uaacaauuaggaucaguaaaa

SEQ ID NO: 24509 - RNA, 22 nt, Artificial Sequence
  Synthetic
auaacaauuaggaucaguaaaa

SEQ ID NO: 24510 - RNA, 23 nt, Artificial Sequence
  Synthetic
uauaacaauuaggaucaguaaaa

SEQ ID NO: 24511 - RNA, 18 nt, Artificial Sequence
  Synthetic
auaguaacaauaguaaaa

SEQ ID NO: 24512 - RNA, 20 nt, Artificial Sequence
  Synthetic
ugauaguaacaauaguaaaa

SEQ ID NO: 24513 - RNA, 21 nt, Artificial Sequence
  Synthetic
uugauaguaacaauaguaaaa

SEQ ID NO: 24514 - RNA, 22 nt, Artificial Sequence
  Synthetic
cuugauaguaacaauaguaaaa

SEQ ID NO: 24515 - RNA, 23 nt, Artificial Sequence
  Synthetic
ucuugauaguaacaauaguaaaa

SEQ ID NO: 24516 - RNA, 24 nt, Artificial Sequence
  Synthetic
uucuugauaguaacaauaguaaaa

SEQ ID NO: 24517 - RNA, 21 nt, Artificial Sequence
  Synthetic
aaaugaaugaaauuaguaaaa

SEQ ID NO: 24518 - RNA, 23 nt, Artificial Sequence
  Synthetic
agaaaugaaugaaauuaguaaaa

SEQ ID NO: 24519 - RNA, 24 nt, Artificial Sequence
  Synthetic
uagaaaugaaugaaauuaguaaaa

SEQ ID NO: 24520 - RNA, 21 nt, Artificial Sequence
  Synthetic
acaaguguuuaacagguaaaa

SEQ ID NO: 24521 - RNA, 22 nt, Artificial Sequence
  Synthetic
uacaaguguuuaacagguaaaa

SEQ ID NO: 24522 - RNA, 24 nt, Artificial Sequence
  Synthetic
cguacaaguguuuaacagguaaaa

SEQ ID NO: 24523 - RNA, 18 nt, Artificial Sequence
  Synthetic
uccccagagaauguaaaa

SEQ ID NO: 24524 - RNA, 19 nt, Artificial Sequence
  Synthetic
cuccccagagaauguaaaa

SEQ ID NO: 24525 - RNA, 20 nt, Artificial Sequence
  Synthetic
ucuccccagagaauguaaaa

SEQ ID NO: 24526 - RNA, 22 nt, Artificial Sequence
  Synthetic
ugucuccccagagaauguaaaa

SEQ ID NO: 24527 - RNA, 23 nt, Artificial Sequence
  Synthetic
uugucuccccagagaauguaaaa

SEQ ID NO: 24528 - RNA, 18 nt, Artificial Sequence
  Synthetic
uuauguuuacguguaaaa

SEQ ID NO: 24529 - RNA, 19 nt, Artificial Sequence
  Synthetic
cuuauguuuacguguaaaa

SEQ ID NO: 24530 - RNA, 20 nt, Artificial Sequence
  Synthetic
ucuuauguuuacguguaaaa

SEQ ID NO: 24531 - RNA, 21 nt, Artificial Sequence
  Synthetic
aucuuauguuuacguguaaaa

SEQ ID NO: 24532 - RNA, 22 nt, Artificial Sequence
  Synthetic
uaucuuauguuuacguguaaaa

SEQ ID NO: 24533 - RNA, 23 nt, Artificial Sequence
  Synthetic
auaucuuauguuuacguguaaaa

SEQ ID NO: 24534 - RNA, 24 nt, Artificial Sequence
  Synthetic
aauaucuuauguuuacguguaaaa

SEQ ID NO: 24535 - RNA, 18 nt, Artificial Sequence
  Synthetic
aaacuuuacuguguaaaa

SEQ ID NO: 24536 - RNA, 19 nt, Artificial Sequence
  Synthetic
uaaacuuuacuguguaaaa

SEQ ID NO: 24537 - RNA, 20 nt, Artificial Sequence
  Synthetic
auaaacuuuacuguguaaaa

SEQ ID NO: 24538 - RNA, 21 nt, Artificial Sequence
  Synthetic
aauaaacuuuacuguguaaaa

SEQ ID NO: 24539 - RNA, 22 nt, Artificial Sequence
  Synthetic
caauaaacuuuacuguguaaaa

SEQ ID NO: 24540 - RNA, 24 nt, Artificial Sequence
  Synthetic
agcaauaaacuuuacuguguaaaa

SEQ ID NO: 24541 - RNA, 22 nt, Artificial Sequence
  Synthetic
uguuuuaccuaaaaaauuaaaa

SEQ ID NO: 24542 - RNA, 23 nt, Artificial Sequence
  Synthetic
auguuuuaccuaaaaaauuaaaa

SEQ ID NO: 24543 - RNA, 24 nt, Artificial Sequence
  Synthetic
cauguuuuaccuaaaaaauuaaaa

SEQ ID NO: 24544 - RNA, 21 nt, Artificial Sequence
  Synthetic
cuuagggaacaaaaauuaaaa

SEQ ID NO: 24545 - RNA, 22 nt, Artificial Sequence
  Synthetic
ucuuagggaacaaaaauuaaaa

SEQ ID NO: 24546 - RNA, 23 nt, Artificial Sequence
  Synthetic
cucuuagggaacaaaaauuaaaa

SEQ ID NO: 24547 - RNA, 18 nt, Artificial Sequence
  Synthetic
auuuccuacaaauuaaaa

SEQ ID NO: 24548 - RNA, 19 nt, Artificial Sequence
  Synthetic
uauuuccuacaaauuaaaa

SEQ ID NO: 24549 - RNA, 20 nt, Artificial Sequence
  Synthetic
uuauuuccuacaaauuaaaa

SEQ ID NO: 24550 - RNA, 21 nt, Artificial Sequence
  Synthetic
cuuauuuccuacaaauuaaaa

SEQ ID NO: 24551 - RNA, 22 nt, Artificial Sequence
  Synthetic
ucuuauuuccuacaaauuaaaa

SEQ ID NO: 24552 - RNA, 23 nt, Artificial Sequence
  Synthetic
aucuuauuuccuacaaauuaaaa

SEQ ID NO: 24553 - RNA, 24 nt, Artificial Sequence
  Synthetic
caucuuauuuccuacaaauuaaaa

SEQ ID NO: 24554 - RNA, 22 nt, Artificial Sequence
  Synthetic
ugaauuauuuuauacauuaaaa

SEQ ID NO: 24555 - RNA, 23 nt, Artificial Sequence
  Synthetic
augaauuauuuuauacauuaaaa

SEQ ID NO: 24556 - RNA, 24 nt, Artificial Sequence
  Synthetic
aaugaauuauuuuauacauuaaaa

SEQ ID NO: 24557 - RNA, 18 nt, Artificial Sequence
  Synthetic
agcaaauuugcauuaaaa

SEQ ID NO: 24558 - RNA, 19 nt, Artificial Sequence
  Synthetic
cagcaaauuugcauuaaaa

SEQ ID NO: 24559 - RNA, 20 nt, Artificial Sequence
  Synthetic
ccagcaaauuugcauuaaaa

SEQ ID NO: 24560 - RNA, 21 nt, Artificial Sequence
  Synthetic
accagcaaauuugcauuaaaa

SEQ ID NO: 24561 - RNA, 22 nt, Artificial Sequence
  Synthetic
aaccagcaaauuugcauuaaaa

SEQ ID NO: 24562 - RNA, 23 nt, Artificial Sequence
  Synthetic
aaaccagcaaauuugcauuaaaa

SEQ ID NO: 24563 - RNA, 24 nt, Artificial Sequence
  Synthetic
caaaccagcaaauuugcauuaaaa

SEQ ID NO: 24564 - RNA, 18 nt, Artificial Sequence
  Synthetic
uaaccuucgucauuaaaa

SEQ ID NO: 24565 - RNA, 19 nt, Artificial Sequence
  Synthetic
auaaccuucgucauuaaaa

SEQ ID NO: 24566 - RNA, 21 nt, Artificial Sequence
  Synthetic
ugauaaccuucgucauuaaaa

SEQ ID NO: 24567 - RNA, 22 nt, Artificial Sequence
  Synthetic
uugauaaccuucgucauuaaaa

SEQ ID NO: 24568 - RNA, 23 nt, Artificial Sequence
  Synthetic
uuugauaaccuucgucauuaaaa

SEQ ID NO: 24569 - RNA, 24 nt, Artificial Sequence
  Synthetic
cuuugauaaccuucgucauuaaaa

SEQ ID NO: 24570 - RNA, 18 nt, Artificial Sequence
  Synthetic
ucaugauagagauuaaaa

SEQ ID NO: 24571 - RNA, 19 nt, Artificial Sequence
  Synthetic
uucaugauagagauuaaaa

SEQ ID NO: 24572 - RNA, 20 nt, Artificial Sequence
  Synthetic
uuucaugauagagauuaaaa

SEQ ID NO: 24573 - RNA, 21 nt, Artificial Sequence
  Synthetic
uuuucaugauagagauuaaaa

SEQ ID NO: 24574 - RNA, 22 nt, Artificial Sequence
  Synthetic
uuuuucaugauagagauuaaaa

SEQ ID NO: 24575 - RNA, 23 nt, Artificial Sequence
  Synthetic
cuuuuucaugauagagauuaaaa

SEQ ID NO: 24576 - RNA, 24 nt, Artificial Sequence
  Synthetic
acuuuuucaugauagagauuaaaa

SEQ ID NO: 24577 - RNA, 18 nt, Artificial Sequence
  Synthetic
uaucuagggagauuaaaa

SEQ ID NO: 24578 - RNA, 19 nt, Artificial Sequence
  Synthetic
auaucuagggagauuaaaa

SEQ ID NO: 24579 - RNA, 20 nt, Artificial Sequence
  Synthetic
aauaucuagggagauuaaaa

SEQ ID NO: 24580 - RNA, 21 nt, Artificial Sequence
  Synthetic
uaauaucuagggagauuaaaa

SEQ ID NO: 24581 - RNA, 22 nt, Artificial Sequence
  Synthetic
auaauaucuagggagauuaaaa

SEQ ID NO: 24582 - RNA, 23 nt, Artificial Sequence
  Synthetic
aauaauaucuagggagauuaaaa

SEQ ID NO: 24583 - RNA, 21 nt, Artificial Sequence
  Synthetic
auuucuaauauguuauuaaaa

SEQ ID NO: 24584 - RNA, 23 nt, Artificial Sequence
  Synthetic
ugauuucuaauauguuauuaaaa

SEQ ID NO: 24585 - RNA, 24 nt, Artificial Sequence
  Synthetic
uugauuucuaauauguuauuaaaa

SEQ ID NO: 24586 - RNA, 18 nt, Artificial Sequence
  Synthetic
cauagaguagacuuaaaa

SEQ ID NO: 24587 - RNA, 19 nt, Artificial Sequence
  Synthetic
ucauagaguagacuuaaaa

SEQ ID NO: 24588 - RNA, 20 nt, Artificial Sequence
  Synthetic
cucauagaguagacuuaaaa

SEQ ID NO: 24589 - RNA, 21 nt, Artificial Sequence
  Synthetic
ucucauagaguagacuuaaaa

SEQ ID NO: 24590 - RNA, 22 nt, Artificial Sequence
  Synthetic
aucucauagaguagacuuaaaa

SEQ ID NO: 24591 - RNA, 23 nt, Artificial Sequence
  Synthetic
uaucucauagaguagacuuaaaa

SEQ ID NO: 24592 - RNA, 24 nt, Artificial Sequence
  Synthetic
uuaucucauagaguagacuuaaaa

SEQ ID NO: 24593 - RNA, 18 nt, Artificial Sequence
  Synthetic
auaauccccaccuuaaaa

SEQ ID NO: 24594 - RNA, 19 nt, Artificial Sequence
  Synthetic
aauaauccccaccuuaaaa

SEQ ID NO: 24595 - RNA, 21 nt, Artificial Sequence
  Synthetic
cgaauaauccccaccuuaaaa

SEQ ID NO: 24596 - RNA, 22 nt, Artificial Sequence
  Synthetic
acgaauaauccccaccuuaaaa

SEQ ID NO: 24597 - RNA, 24 nt, Artificial Sequence
  Synthetic
ugacgaauaauccccaccuuaaaa

SEQ ID NO: 24598 - RNA, 21 nt, Artificial Sequence
  Synthetic
ucaaauuuuaaagucuuaaaa

SEQ ID NO: 24599 - RNA, 22 nt, Artificial Sequence
  Synthetic
uucaaauuuuaaagucuuaaaa

SEQ ID NO: 24600 - RNA, 24 nt, Artificial Sequence
  Synthetic
uguucaaauuuuaaagucuuaaaa

SEQ ID NO: 24601 - RNA, 18 nt, Artificial Sequence
  Synthetic
aguguuucauucuuaaaa

SEQ ID NO: 24602 - RNA, 19 nt, Artificial Sequence
  Synthetic
caguguuucauucuuaaaa

SEQ ID NO: 24603 - RNA, 20 nt, Artificial Sequence
  Synthetic
acaguguuucauucuuaaaa

SEQ ID NO: 24604 - RNA, 21 nt, Artificial Sequence
  Synthetic
aacaguguuucauucuuaaaa

SEQ ID NO: 24605 - RNA, 23 nt, Artificial Sequence
  Synthetic
agaacaguguuucauucuuaaaa

SEQ ID NO: 24606 - RNA, 24 nt, Artificial Sequence
  Synthetic
uagaacaguguuucauucuuaaaa

SEQ ID NO: 24607 - RNA, 18 nt, Artificial Sequence
  Synthetic
aagguuauuugguuaaaa

SEQ ID NO: 24608 - RNA, 21 nt, Artificial Sequence
  Synthetic
aggaagguuauuugguuaaaa

SEQ ID NO: 24609 - RNA, 22 nt, Artificial Sequence
  Synthetic
aaggaagguuauuugguuaaaa

SEQ ID NO: 24610 - RNA, 23 nt, Artificial Sequence
  Synthetic
uaaggaagguuauuugguuaaaa

SEQ ID NO: 24611 - RNA, 24 nt, Artificial Sequence
  Synthetic
uuaaggaagguuauuugguuaaaa

SEQ ID NO: 24612 - RNA, 18 nt, Artificial Sequence
  Synthetic
ugcuggugcuauuuaaaa

SEQ ID NO: 24613 - RNA, 19 nt, Artificial Sequence
  Synthetic
uugcuggugcuauuuaaaa

SEQ ID NO: 24614 - RNA, 20 nt, Artificial Sequence
  Synthetic
auugcuggugcuauuuaaaa

SEQ ID NO: 24615 - RNA, 22 nt, Artificial Sequence
  Synthetic
ugauugcuggugcuauuuaaaa

SEQ ID NO: 24616 - RNA, 24 nt, Artificial Sequence
  Synthetic
agugauugcuggugcuauuuaaaa

SEQ ID NO: 24617 - RNA, 18 nt, Artificial Sequence
  Synthetic
cauaaagagacuuuaaaa

SEQ ID NO: 24618 - RNA, 19 nt, Artificial Sequence
  Synthetic
acauaaagagacuuuaaaa

SEQ ID NO: 24619 - RNA, 20 nt, Artificial Sequence
  Synthetic
uacauaaagagacuuuaaaa

SEQ ID NO: 24620 - RNA, 21 nt, Artificial Sequence
  Synthetic
auacauaaagagacuuuaaaa

SEQ ID NO: 24621 - RNA, 22 nt, Artificial Sequence
  Synthetic
uauacauaaagagacuuuaaaa

SEQ ID NO: 24622 - RNA, 23 nt, Artificial Sequence
  Synthetic
auauacauaaagagacuuuaaaa

SEQ ID NO: 24623 - RNA, 24 nt, Artificial Sequence
  Synthetic
aauauacauaaagagacuuuaaaa

SEQ ID NO: 24624 - RNA, 22 nt, Artificial Sequence
  Synthetic
agaacaguauucugcuuuaaaa

SEQ ID NO: 24625 - RNA, 23 nt, Artificial Sequence
  Synthetic
cagaacaguauucugcuuuaaaa

SEQ ID NO: 24626 - RNA, 18 nt, Artificial Sequence
  Synthetic
agaagauuuaguuuaaaa

SEQ ID NO: 24627 - RNA, 19 nt, Artificial Sequence
  Synthetic
cagaagauuuaguuuaaaa

SEQ ID NO: 24628 - RNA, 20 nt, Artificial Sequence
  Synthetic
ccagaagauuuaguuuaaaa

SEQ ID NO: 24629 - RNA, 21 nt, Artificial Sequence
  Synthetic
uccagaagauuuaguuuaaaa

SEQ ID NO: 24630 - RNA, 22 nt, Artificial Sequence
  Synthetic
auccagaagauuuaguuuaaaa

SEQ ID NO: 24631 - RNA, 23 nt, Artificial Sequence
  Synthetic
uauccagaagauuuaguuuaaaa

SEQ ID NO: 24632 - RNA, 24 nt, Artificial Sequence
  Synthetic
auauccagaagauuuaguuuaaaa

SEQ ID NO: 24633 - RNA, 18 nt, Artificial Sequence
  Synthetic
uuuacugauuguuuaaaa

SEQ ID NO: 24634 - RNA, 19 nt, Artificial Sequence
  Synthetic
auuuacugauuguuuaaaa

SEQ ID NO: 24635 - RNA, 21 nt, Artificial Sequence
  Synthetic
ugauuuacugauuguuuaaaa

SEQ ID NO: 24636 - RNA, 22 nt, Artificial Sequence
  Synthetic
augauuuacugauuguuuaaaa

SEQ ID NO: 24637 - RNA, 23 nt, Artificial Sequence
  Synthetic
uaugauuuacugauuguuuaaaa

SEQ ID NO: 24638 - RNA, 24 nt, Artificial Sequence
  Synthetic
auaugauuuacugauuguuuaaaa

SEQ ID NO: 24639 - RNA, 21 nt, Artificial Sequence
  Synthetic
cuucacugaauaguuuuaaaa

SEQ ID NO: 24640 - RNA, 22 nt, Artificial Sequence
  Synthetic
acuucacugaauaguuuuaaaa

SEQ ID NO: 24641 - RNA, 23 nt, Artificial Sequence
  Synthetic
aacuucacugaauaguuuuaaaa

SEQ ID NO: 24642 - RNA, 24 nt, Artificial Sequence
  Synthetic
aaacuucacugaauaguuuuaaaa

SEQ ID NO: 24643 - RNA, 19 nt, Artificial Sequence
  Synthetic
ugagacuaaguaaaacaaa

SEQ ID NO: 24644 - RNA, 20 nt, Artificial Sequence
  Synthetic
uugagacuaaguaaaacaaa

SEQ ID NO: 24645 - RNA, 21 nt, Artificial Sequence
  Synthetic
auugagacuaaguaaaacaaa

SEQ ID NO: 24646 - RNA, 22 nt, Artificial Sequence
  Synthetic
cauugagacuaaguaaaacaaa

SEQ ID NO: 24647 - RNA, 23 nt, Artificial Sequence
  Synthetic
acauugagacuaaguaaaacaaa

SEQ ID NO: 24648 - RNA, 24 nt, Artificial Sequence
  Synthetic
uacauugagacuaaguaaaacaaa

SEQ ID NO: 24649 - RNA, 18 nt, Artificial Sequence
  Synthetic
ucauaauucaacaacaaa

SEQ ID NO: 24650 - RNA, 19 nt, Artificial Sequence
  Synthetic
cucauaauucaacaacaaa

SEQ ID NO: 24651 - RNA, 20 nt, Artificial Sequence
  Synthetic
acucauaauucaacaacaaa

SEQ ID NO: 24652 - RNA, 18 nt, Artificial Sequence
  Synthetic
aguguugcuaucaacaaa

SEQ ID NO: 24653 - RNA, 19 nt, Artificial Sequence
  Synthetic
uaguguugcuaucaacaaa

SEQ ID NO: 24654 - RNA, 20 nt, Artificial Sequence
  Synthetic
cuaguguugcuaucaacaaa

SEQ ID NO: 24655 - RNA, 21 nt, Artificial Sequence
  Synthetic
acuaguguugcuaucaacaaa

SEQ ID NO: 24656 - RNA, 23 nt, Artificial Sequence
  Synthetic
agacuaguguugcuaucaacaaa

SEQ ID NO: 24657 - RNA, 21 nt, Artificial Sequence
  Synthetic
auuuaaaauuaugagaacaaa

SEQ ID NO: 24658 - RNA, 22 nt, Artificial Sequence
  Synthetic
uauuuaaaauuaugagaacaaa

SEQ ID NO: 24659 - RNA, 23 nt, Artificial Sequence
  Synthetic
auauuuaaaauuaugagaacaaa

SEQ ID NO: 24660 - RNA, 18 nt, Artificial Sequence
  Synthetic
cauauguuagggaacaaa

SEQ ID NO: 24661 - RNA, 20 nt, Artificial Sequence
  Synthetic
agcauauguuagggaacaaa

SEQ ID NO: 24662 - RNA, 21 nt, Artificial Sequence
  Synthetic
aagcauauguuagggaacaaa

SEQ ID NO: 24663 - RNA, 22 nt, Artificial Sequence
  Synthetic
uaagcauauguuagggaacaaa

SEQ ID NO: 24664 - RNA, 23 nt, Artificial Sequence
  Synthetic
uuaagcauauguuagggaacaaa

SEQ ID NO: 24665 - RNA, 21 nt, Artificial Sequence
  Synthetic
ugaauuuuuauuuugaacaaa

SEQ ID NO: 24666 - RNA, 22 nt, Artificial Sequence
  Synthetic
augaauuuuuauuuugaacaaa

SEQ ID NO: 24667 - RNA, 23 nt, Artificial Sequence
  Synthetic
uaugaauuuuuauuuugaacaaa

SEQ ID NO: 24668 - RNA, 24 nt, Artificial Sequence
  Synthetic
cuaugaauuuuuauuuugaacaaa

SEQ ID NO: 24669 - RNA, 18 nt, Artificial Sequence
  Synthetic
ccagcucccccacacaaa

SEQ ID NO: 24670 - RNA, 19 nt, Artificial Sequence
  Synthetic
uccagcucccccacacaaa

SEQ ID NO: 24671 - RNA, 20 nt, Artificial Sequence
  Synthetic
cuccagcucccccacacaaa

SEQ ID NO: 24672 - RNA, 21 nt, Artificial Sequence
  Synthetic
ucuccagcucccccacacaaa

SEQ ID NO: 24673 - RNA, 22 nt, Artificial Sequence
  Synthetic
cucuccagcucccccacacaaa

SEQ ID NO: 24674 - RNA, 23 nt, Artificial Sequence
  Synthetic
ucucuccagcucccccacacaaa

SEQ ID NO: 24675 - RNA, 24 nt, Artificial Sequence
  Synthetic
cucucuccagcucccccacacaaa

SEQ ID NO: 24676 - RNA, 19 nt, Artificial Sequence
  Synthetic
uggucacccccuccacaaa

SEQ ID NO: 24677 - RNA, 20 nt, Artificial Sequence
  Synthetic
cuggucacccccuccacaaa

SEQ ID NO: 24678 - RNA, 21 nt, Artificial Sequence
  Synthetic
ccuggucacccccuccacaaa

SEQ ID NO: 24679 - RNA, 22 nt, Artificial Sequence
  Synthetic
cccuggucacccccuccacaaa

SEQ ID NO: 24680 - RNA, 23 nt, Artificial Sequence
  Synthetic
ucccuggucacccccuccacaaa

SEQ ID NO: 24681 - RNA, 24 nt, Artificial Sequence
  Synthetic
uucccuggucacccccuccacaaa

SEQ ID NO: 24682 - RNA, 18 nt, Artificial Sequence
  Synthetic
uauagugcugagcacaaa

SEQ ID NO: 24683 - RNA, 19 nt, Artificial Sequence
  Synthetic
auauagugcugagcacaaa

SEQ ID NO: 24684 - RNA, 21 nt, Artificial Sequence
  Synthetic
ugauauagugcugagcacaaa

SEQ ID NO: 24685 - RNA, 22 nt, Artificial Sequence
  Synthetic
cugauauagugcugagcacaaa

SEQ ID NO: 24686 - RNA, 23 nt, Artificial Sequence
  Synthetic
acugauauagugcugagcacaaa

SEQ ID NO: 24687 - RNA, 18 nt, Artificial Sequence
  Synthetic
ucacugcuguuucacaaa

SEQ ID NO: 24688 - RNA, 19 nt, Artificial Sequence
  Synthetic
aucacugcuguuucacaaa

SEQ ID NO: 24689 - RNA, 20 nt, Artificial Sequence
  Synthetic
caucacugcuguuucacaaa

SEQ ID NO: 24690 - RNA, 21 nt, Artificial Sequence
  Synthetic
ccaucacugcuguuucacaaa

SEQ ID NO: 24691 - RNA, 22 nt, Artificial Sequence
  Synthetic
cccaucacugcuguuucacaaa

SEQ ID NO: 24692 - RNA, 23 nt, Artificial Sequence
  Synthetic
ucccaucacugcuguuucacaaa

SEQ ID NO: 24693 - RNA, 24 nt, Artificial Sequence
  Synthetic
uucccaucacugcuguuucacaaa

SEQ ID NO: 24694 - RNA, 18 nt, Artificial Sequence
  Synthetic
ucuuuaaagcaggacaaa

SEQ ID NO: 24695 - RNA, 19 nt, Artificial Sequence
  Synthetic
uucuuuaaagcaggacaaa

SEQ ID NO: 24696 - RNA, 20 nt, Artificial Sequence
  Synthetic
auucuuuaaagcaggacaaa

SEQ ID NO: 24697 - RNA, 21 nt, Artificial Sequence
  Synthetic
aauucuuuaaagcaggacaaa

SEQ ID NO: 24698 - RNA, 22 nt, Artificial Sequence
  Synthetic
aaauucuuuaaagcaggacaaa

SEQ ID NO: 24699 - RNA, 23 nt, Artificial Sequence
  Synthetic
uaaauucuuuaaagcaggacaaa

SEQ ID NO: 24700 - RNA, 24 nt, Artificial Sequence
  Synthetic
auaaauucuuuaaagcaggacaaa

SEQ ID NO: 24701 - RNA, 21 nt, Artificial Sequence
  Synthetic
uucacaauucaaugggacaaa

SEQ ID NO: 24702 - RNA, 22 nt, Artificial Sequence
  Synthetic
uuucacaauucaaugggacaaa

SEQ ID NO: 24703 - RNA, 23 nt, Artificial Sequence
  Synthetic
auuucacaauucaaugggacaaa

SEQ ID NO: 24704 - RNA, 24 nt, Artificial Sequence
  Synthetic
aauuucacaauucaaugggacaaa

SEQ ID NO: 24705 - RNA, 19 nt, Artificial Sequence
  Synthetic
uggugagaaaaaugacaaa

SEQ ID NO: 24706 - RNA, 20 nt, Artificial Sequence
  Synthetic
auggugagaaaaaugacaaa

SEQ ID NO: 24707 - RNA, 21 nt, Artificial Sequence
  Synthetic
uauggugagaaaaaugacaaa

SEQ ID NO: 24708 - RNA, 22 nt, Artificial Sequence
  Synthetic
uuauggugagaaaaaugacaaa

SEQ ID NO: 24709 - RNA, 23 nt, Artificial Sequence
  Synthetic
uuuauggugagaaaaaugacaaa

SEQ ID NO: 24710 - RNA, 24 nt, Artificial Sequence
  Synthetic
uuuuauggugagaaaaaugacaaa

SEQ ID NO: 24711 - RNA, 18 nt, Artificial Sequence
  Synthetic
auaauguacagugacaaa

SEQ ID NO: 24712 - RNA, 19 nt, Artificial Sequence
  Synthetic
aauaauguacagugacaaa

SEQ ID NO: 24713 - RNA, 20 nt, Artificial Sequence
  Synthetic
caauaauguacagugacaaa

SEQ ID NO: 24714 - RNA, 21 nt, Artificial Sequence
  Synthetic
acaauaauguacagugacaaa

SEQ ID NO: 24715 - RNA, 22 nt, Artificial Sequence
  Synthetic
uacaauaauguacagugacaaa

SEQ ID NO: 24716 - RNA, 23 nt, Artificial Sequence
  Synthetic
cuacaauaauguacagugacaaa

SEQ ID NO: 24717 - RNA, 24 nt, Artificial Sequence
  Synthetic
acuacaauaauguacagugacaaa

SEQ ID NO: 24718 - RNA, 18 nt, Artificial Sequence
  Synthetic
uguuauaaugaauacaaa

SEQ ID NO: 24719 - RNA, 19 nt, Artificial Sequence
  Synthetic
uuguuauaaugaauacaaa

SEQ ID NO: 24720 - RNA, 21 nt, Artificial Sequence
  Synthetic
uguuguuauaaugaauacaaa

SEQ ID NO: 24721 - RNA, 22 nt, Artificial Sequence
  Synthetic
auguuguuauaaugaauacaaa

SEQ ID NO: 24722 - RNA, 24 nt, Artificial Sequence
  Synthetic
ugauguuguuauaaugaauacaaa

SEQ ID NO: 24723 - RNA, 21 nt, Artificial Sequence
  Synthetic
ucuuagagaaacacauacaaa

SEQ ID NO: 24724 - RNA, 23 nt, Artificial Sequence
  Synthetic
ugucuuagagaaacacauacaaa

SEQ ID NO: 24725 - RNA, 24 nt, Artificial Sequence
  Synthetic
uugucuuagagaaacacauacaaa

SEQ ID NO: 24726 - RNA, 19 nt, Artificial Sequence
  Synthetic
aguucucaaagcauacaaa

SEQ ID NO: 24727 - RNA, 20 nt, Artificial Sequence
  Synthetic
aaguucucaaagcauacaaa

SEQ ID NO: 24728 - RNA, 21 nt, Artificial Sequence
  Synthetic
aaaguucucaaagcauacaaa

SEQ ID NO: 24729 - RNA, 22 nt, Artificial Sequence
  Synthetic
uaaaguucucaaagcauacaaa

SEQ ID NO: 24730 - RNA, 23 nt, Artificial Sequence
  Synthetic
uuaaaguucucaaagcauacaaa

SEQ ID NO: 24731 - RNA, 24 nt, Artificial Sequence
  Synthetic
cuuaaaguucucaaagcauacaaa

SEQ ID NO: 24732 - RNA, 21 nt, Artificial Sequence
  Synthetic
uggcaauaugaaagauacaaa

SEQ ID NO: 24733 - RNA, 23 nt, Artificial Sequence
  Synthetic
uguggcaauaugaaagauacaaa

SEQ ID NO: 24734 - RNA, 18 nt, Artificial Sequence
  Synthetic
agguacuauaacaccaaa

SEQ ID NO: 24735 - RNA, 20 nt, Artificial Sequence
  Synthetic
ugagguacuauaacaccaaa

SEQ ID NO: 24736 - RNA, 21 nt, Artificial Sequence
  Synthetic
augagguacuauaacaccaaa

SEQ ID NO: 24737 - RNA, 22 nt, Artificial Sequence
  Synthetic
aaugagguacuauaacaccaaa

SEQ ID NO: 24738 - RNA, 23 nt, Artificial Sequence
  Synthetic
caaugagguacuauaacaccaaa

SEQ ID NO: 24739 - RNA, 24 nt, Artificial Sequence
  Synthetic
acaaugagguacuauaacaccaaa

SEQ ID NO: 24740 - RNA, 18 nt, Artificial Sequence
  Synthetic
aagaaacguuucaccaaa

SEQ ID NO: 24741 - RNA, 19 nt, Artificial Sequence
  Synthetic
caagaaacguuucaccaaa

SEQ ID NO: 24742 - RNA, 20 nt, Artificial Sequence
  Synthetic
ucaagaaacguuucaccaaa

SEQ ID NO: 24743 - RNA, 21 nt, Artificial Sequence
  Synthetic
aucaagaaacguuucaccaaa

SEQ ID NO: 24744 - RNA, 22 nt, Artificial Sequence
  Synthetic
caucaagaaacguuucaccaaa

SEQ ID NO: 24745 - RNA, 23 nt, Artificial Sequence
  Synthetic
acaucaagaaacguuucaccaaa

SEQ ID NO: 24746 - RNA, 24 nt, Artificial Sequence
  Synthetic
cacaucaagaaacguuucaccaaa

SEQ ID NO: 24747 - RNA, 19 nt, Artificial Sequence
  Synthetic
agacucaacaaggaccaaa

SEQ ID NO: 24748 - RNA, 20 nt, Artificial Sequence
  Synthetic
cagacucaacaaggaccaaa

SEQ ID NO: 24749 - RNA, 21 nt, Artificial Sequence
  Synthetic
ucagacucaacaaggaccaaa

SEQ ID NO: 24750 - RNA, 22 nt, Artificial Sequence
  Synthetic
cucagacucaacaaggaccaaa

SEQ ID NO: 24751 - RNA, 23 nt, Artificial Sequence
  Synthetic
acucagacucaacaaggaccaaa

SEQ ID NO: 24752 - RNA, 24 nt, Artificial Sequence
  Synthetic
aacucagacucaacaaggaccaaa

SEQ ID NO: 24753 - RNA, 19 nt, Artificial Sequence
  Synthetic
agugccagaaccuaccaaa

SEQ ID NO: 24754 - RNA, 21 nt, Artificial Sequence
  Synthetic
ugagugccagaaccuaccaaa

SEQ ID NO: 24755 - RNA, 22 nt, Artificial Sequence
  Synthetic
uugagugccagaaccuaccaaa

SEQ ID NO: 24756 - RNA, 23 nt, Artificial Sequence
  Synthetic
cuugagugccagaaccuaccaaa

SEQ ID NO: 24757 - RNA, 24 nt, Artificial Sequence
  Synthetic
ucuugagugccagaaccuaccaaa

SEQ ID NO: 24758 - RNA, 18 nt, Artificial Sequence
  Synthetic
uccacccagcaacccaaa

SEQ ID NO: 24759 - RNA, 19 nt, Artificial Sequence
  Synthetic
uuccacccagcaacccaaa

SEQ ID NO: 24760 - RNA, 20 nt, Artificial Sequence
  Synthetic
uuuccacccagcaacccaaa

SEQ ID NO: 24761 - RNA, 22 nt, Artificial Sequence
  Synthetic
uguuuccacccagcaacccaaa

SEQ ID NO: 24762 - RNA, 23 nt, Artificial Sequence
  Synthetic
uuguuuccacccagcaacccaaa

SEQ ID NO: 24763 - RNA, 24 nt, Artificial Sequence
  Synthetic
uuuguuuccacccagcaacccaaa

SEQ ID NO: 24764 - RNA, 18 nt, Artificial Sequence
  Synthetic
auuauugcaguacccaaa

SEQ ID NO: 24765 - RNA, 19 nt, Artificial Sequence
  Synthetic
aauuauugcaguacccaaa

SEQ ID NO: 24766 - RNA, 20 nt, Artificial Sequence
  Synthetic
caauuauugcaguacccaaa

SEQ ID NO: 24767 - RNA, 21 nt, Artificial Sequence
  Synthetic
ucaauuauugcaguacccaaa

SEQ ID NO: 24768 - RNA, 22 nt, Artificial Sequence
  Synthetic
cucaauuauugcaguacccaaa

SEQ ID NO: 24769 - RNA, 24 nt, Artificial Sequence
  Synthetic
ugcucaauuauugcaguacccaaa

SEQ ID NO: 24770 - RNA, 21 nt, Artificial Sequence
  Synthetic
uuaagcucaacaaaccccaaa

SEQ ID NO: 24771 - RNA, 24 nt, Artificial Sequence
  Synthetic
cgguuaagcucaacaaaccccaaa

SEQ ID NO: 24772 - RNA, 18 nt, Artificial Sequence
  Synthetic
caaggcugugaccccaaa

SEQ ID NO: 24773 - RNA, 19 nt, Artificial Sequence
  Synthetic
ucaaggcugugaccccaaa

SEQ ID NO: 24774 - RNA, 20 nt, Artificial Sequence
  Synthetic
uucaaggcugugaccccaaa

SEQ ID NO: 24775 - RNA, 21 nt, Artificial Sequence
  Synthetic
auucaaggcugugaccccaaa

SEQ ID NO: 24776 - RNA, 22 nt, Artificial Sequence
  Synthetic
aauucaaggcugugaccccaaa

SEQ ID NO: 24777 - RNA, 23 nt, Artificial Sequence
  Synthetic
aaauucaaggcugugaccccaaa

SEQ ID NO: 24778 - RNA, 24 nt, Artificial Sequence
  Synthetic
uaaauucaaggcugugaccccaaa

SEQ ID NO: 24779 - RNA, 18 nt, Artificial Sequence
  Synthetic
caggucuccuuccccaaa

SEQ ID NO: 24780 - RNA, 19 nt, Artificial Sequence
  Synthetic
acaggucuccuuccccaaa

SEQ ID NO: 24781 - RNA, 21 nt, Artificial Sequence
  Synthetic
ugacaggucuccuuccccaaa

SEQ ID NO: 24782 - RNA, 22 nt, Artificial Sequence
  Synthetic
uugacaggucuccuuccccaaa

SEQ ID NO: 24783 - RNA, 23 nt, Artificial Sequence
  Synthetic
uuugacaggucuccuuccccaaa

SEQ ID NO: 24784 - RNA, 24 nt, Artificial Sequence
  Synthetic
cuuugacaggucuccuuccccaaa

SEQ ID NO: 24785 - RNA, 18 nt, Artificial Sequence
  Synthetic
auuccugaacaucccaaa

SEQ ID NO: 24786 - RNA, 20 nt, Artificial Sequence
  Synthetic
agauuccugaacaucccaaa

SEQ ID NO: 24787 - RNA, 21 nt, Artificial Sequence
  Synthetic
uagauuccugaacaucccaaa

SEQ ID NO: 24788 - RNA, 22 nt, Artificial Sequence
  Synthetic
auagauuccugaacaucccaaa

SEQ ID NO: 24789 - RNA, 23 nt, Artificial Sequence
  Synthetic
aauagauuccugaacaucccaaa

SEQ ID NO: 24790 - RNA, 24 nt, Artificial Sequence
  Synthetic
aaauagauuccugaacaucccaaa

SEQ ID NO: 24791 - RNA, 21 nt, Artificial Sequence
  Synthetic
cagugggaaaggaaagccaaa

SEQ ID NO: 24792 - RNA, 22 nt, Artificial Sequence
  Synthetic
acagugggaaaggaaagccaaa

SEQ ID NO: 24793 - RNA, 23 nt, Artificial Sequence
  Synthetic
aacagugggaaaggaaagccaaa

SEQ ID NO: 24794 - RNA, 19 nt, Artificial Sequence
  Synthetic
ugaauuuauaguugccaaa

SEQ ID NO: 24795 - RNA, 20 nt, Artificial Sequence
  Synthetic
uugaauuuauaguugccaaa

SEQ ID NO: 24796 - RNA, 21 nt, Artificial Sequence
  Synthetic
uuugaauuuauaguugccaaa

SEQ ID NO: 24797 - RNA, 22 nt, Artificial Sequence
  Synthetic
auuugaauuuauaguugccaaa

SEQ ID NO: 24798 - RNA, 23 nt, Artificial Sequence
  Synthetic
cauuugaauuuauaguugccaaa

SEQ ID NO: 24799 - RNA, 24 nt, Artificial Sequence
  Synthetic
ucauuugaauuuauaguugccaaa

SEQ ID NO: 24800 - RNA, 18 nt, Artificial Sequence
  Synthetic
ccaacaagggaguccaaa

SEQ ID NO: 24801 - RNA, 19 nt, Artificial Sequence
  Synthetic
cccaacaagggaguccaaa

SEQ ID NO: 24802 - RNA, 20 nt, Artificial Sequence
  Synthetic
ucccaacaagggaguccaaa

SEQ ID NO: 24803 - RNA, 21 nt, Artificial Sequence
  Synthetic
uucccaacaagggaguccaaa

SEQ ID NO: 24804 - RNA, 22 nt, Artificial Sequence
  Synthetic
cuucccaacaagggaguccaaa

SEQ ID NO: 24805 - RNA, 23 nt, Artificial Sequence
  Synthetic
acuucccaacaagggaguccaaa

SEQ ID NO: 24806 - RNA, 18 nt, Artificial Sequence
  Synthetic
cugaggaauauguccaaa

SEQ ID NO: 24807 - RNA, 19 nt, Artificial Sequence
  Synthetic
ccugaggaauauguccaaa

SEQ ID NO: 24808 - RNA, 20 nt, Artificial Sequence
  Synthetic
cccugaggaauauguccaaa

SEQ ID NO: 24809 - RNA, 22 nt, Artificial Sequence
  Synthetic
agcccugaggaauauguccaaa

SEQ ID NO: 24810 - RNA, 24 nt, Artificial Sequence
  Synthetic
agagcccugaggaauauguccaaa

SEQ ID NO: 24811 - RNA, 21 nt, Artificial Sequence
  Synthetic
ugggaguuuucuuuuuccaaa

SEQ ID NO: 24812 - RNA, 23 nt, Artificial Sequence
  Synthetic
agugggaguuuucuuuuuccaaa

SEQ ID NO: 24813 - RNA, 19 nt, Artificial Sequence
  Synthetic
uguguucauagcaagcaaa

SEQ ID NO: 24814 - RNA, 20 nt, Artificial Sequence
  Synthetic
uuguguucauagcaagcaaa

SEQ ID NO: 24815 - RNA, 19 nt, Artificial Sequence
  Synthetic
agguuaaccauacagcaaa

SEQ ID NO: 24816 - RNA, 20 nt, Artificial Sequence
  Synthetic
cagguuaaccauacagcaaa

SEQ ID NO: 24817 - RNA, 23 nt, Artificial Sequence
  Synthetic
uggcagguuaaccauacagcaaa

SEQ ID NO: 24818 - RNA, 24 nt, Artificial Sequence
  Synthetic
uuggcagguuaaccauacagcaaa

SEQ ID NO: 24819 - RNA, 18 nt, Artificial Sequence
  Synthetic
auccuacaccgcagcaaa

SEQ ID NO: 24820 - RNA, 19 nt, Artificial Sequence
  Synthetic
aauccuacaccgcagcaaa

SEQ ID NO: 24821 - RNA, 20 nt, Artificial Sequence
  Synthetic
caauccuacaccgcagcaaa

SEQ ID NO: 24822 - RNA, 21 nt, Artificial Sequence
  Synthetic
ucaauccuacaccgcagcaaa

SEQ ID NO: 24823 - RNA, 22 nt, Artificial Sequence
  Synthetic
uucaauccuacaccgcagcaaa

SEQ ID NO: 24824 - RNA, 23 nt, Artificial Sequence
  Synthetic
auucaauccuacaccgcagcaaa

SEQ ID NO: 24825 - RNA, 24 nt, Artificial Sequence
  Synthetic
uauucaauccuacaccgcagcaaa

SEQ ID NO: 24826 - RNA, 18 nt, Artificial Sequence
  Synthetic
uuauguggaugcagcaaa

SEQ ID NO: 24827 - RNA, 19 nt, Artificial Sequence
  Synthetic
auuauguggaugcagcaaa

SEQ ID NO: 24828 - RNA, 20 nt, Artificial Sequence
  Synthetic
aauuauguggaugcagcaaa

SEQ ID NO: 24829 - RNA, 21 nt, Artificial Sequence
  Synthetic
uaauuauguggaugcagcaaa

SEQ ID NO: 24830 - RNA, 22 nt, Artificial Sequence
  Synthetic
auaauuauguggaugcagcaaa

SEQ ID NO: 24831 - RNA, 24 nt, Artificial Sequence
  Synthetic
ugauaauuauguggaugcagcaaa

SEQ ID NO: 24832 - RNA, 18 nt, Artificial Sequence
  Synthetic
acauugucuuucagcaaa

SEQ ID NO: 24833 - RNA, 19 nt, Artificial Sequence
  Synthetic
uacauugucuuucagcaaa

SEQ ID NO: 24834 - RNA, 20 nt, Artificial Sequence
  Synthetic
auacauugucuuucagcaaa

SEQ ID NO: 24835 - RNA, 21 nt, Artificial Sequence
  Synthetic
cauacauugucuuucagcaaa

SEQ ID NO: 24836 - RNA, 22 nt, Artificial Sequence
  Synthetic
ccauacauugucuuucagcaaa

SEQ ID NO: 24837 - RNA, 23 nt, Artificial Sequence
  Synthetic
uccauacauugucuuucagcaaa

SEQ ID NO: 24838 - RNA, 24 nt, Artificial Sequence
  Synthetic
uuccauacauugucuuucagcaaa

SEQ ID NO: 24839 - RNA, 18 nt, Artificial Sequence
  Synthetic
agaauguucuuuagcaaa

SEQ ID NO: 24840 - RNA, 19 nt, Artificial Sequence
  Synthetic
cagaauguucuuuagcaaa

SEQ ID NO: 24841 - RNA, 20 nt, Artificial Sequence
  Synthetic
acagaauguucuuuagcaaa

SEQ ID NO: 24842 - RNA, 22 nt, Artificial Sequence
  Synthetic
agacagaauguucuuuagcaaa

SEQ ID NO: 24843 - RNA, 24 nt, Artificial Sequence
  Synthetic
agagacagaauguucuuuagcaaa

SEQ ID NO: 24844 - RNA, 18 nt, Artificial Sequence
  Synthetic
acagcccaguuuagcaaa

SEQ ID NO: 24845 - RNA, 19 nt, Artificial Sequence
  Synthetic
aacagcccaguuuagcaaa

SEQ ID NO: 24846 - RNA, 21 nt, Artificial Sequence
  Synthetic
agaacagcccaguuuagcaaa

SEQ ID NO: 24847 - RNA, 22 nt, Artificial Sequence
  Synthetic
aagaacagcccaguuuagcaaa

SEQ ID NO: 24848 - RNA, 23 nt, Artificial Sequence
  Synthetic
uaagaacagcccaguuuagcaaa

SEQ ID NO: 24849 - RNA, 18 nt, Artificial Sequence
  Synthetic
uccauuucucaaggcaaa

SEQ ID NO: 24850 - RNA, 19 nt, Artificial Sequence
  Synthetic
uuccauuucucaaggcaaa

SEQ ID NO: 24851 - RNA, 20 nt, Artificial Sequence
  Synthetic
uuuccauuucucaaggcaaa

SEQ ID NO: 24852 - RNA, 21 nt, Artificial Sequence
  Synthetic
cuuuccauuucucaaggcaaa

SEQ ID NO: 24853 - RNA, 22 nt, Artificial Sequence
  Synthetic
ccuuuccauuucucaaggcaaa

SEQ ID NO: 24854 - RNA, 23 nt, Artificial Sequence
  Synthetic
accuuuccauuucucaaggcaaa

SEQ ID NO: 24855 - RNA, 18 nt, Artificial Sequence
  Synthetic
uaaggggacagaggcaaa

SEQ ID NO: 24856 - RNA, 19 nt, Artificial Sequence
  Synthetic
cuaaggggacagaggcaaa

SEQ ID NO: 24857 - RNA, 20 nt, Artificial Sequence
  Synthetic
acuaaggggacagaggcaaa

SEQ ID NO: 24858 - RNA, 21 nt, Artificial Sequence
  Synthetic
uacuaaggggacagaggcaaa

SEQ ID NO: 24859 - RNA, 22 nt, Artificial Sequence
  Synthetic
cuacuaaggggacagaggcaaa

SEQ ID NO: 24860 - RNA, 23 nt, Artificial Sequence
  Synthetic
acuacuaaggggacagaggcaaa

SEQ ID NO: 24861 - RNA, 24 nt, Artificial Sequence
  Synthetic
uacuacuaaggggacagaggcaaa

SEQ ID NO: 24862 - RNA, 20 nt, Artificial Sequence
  Synthetic
aggcuuucagaccaugcaaa

SEQ ID NO: 24863 - RNA, 23 nt, Artificial Sequence
  Synthetic
uggaggcuuucagaccaugcaaa

SEQ ID NO: 24864 - RNA, 24 nt, Artificial Sequence
  Synthetic
cuggaggcuuucagaccaugcaaa

SEQ ID NO: 24865 - RNA, 20 nt, Artificial Sequence
  Synthetic
agguaauggugaagugcaaa

SEQ ID NO: 24866 - RNA, 21 nt, Artificial Sequence
  Synthetic
aagguaauggugaagugcaaa

SEQ ID NO: 24867 - RNA, 22 nt, Artificial Sequence
  Synthetic
uaagguaauggugaagugcaaa

SEQ ID NO: 24868 - RNA, 23 nt, Artificial Sequence
  Synthetic
uuaagguaauggugaagugcaaa

SEQ ID NO: 24869 - RNA, 24 nt, Artificial Sequence
  Synthetic
cuuaagguaauggugaagugcaaa

SEQ ID NO: 24870 - RNA, 18 nt, Artificial Sequence
  Synthetic
auacugucaccuugcaaa

SEQ ID NO: 24871 - RNA, 19 nt, Artificial Sequence
  Synthetic
cauacugucaccuugcaaa

SEQ ID NO: 24872 - RNA, 20 nt, Artificial Sequence
  Synthetic
acauacugucaccuugcaaa

SEQ ID NO: 24873 - RNA, 21 nt, Artificial Sequence
  Synthetic
uacauacugucaccuugcaaa

SEQ ID NO: 24874 - RNA, 22 nt, Artificial Sequence
  Synthetic
auacauacugucaccuugcaaa

SEQ ID NO: 24875 - RNA, 23 nt, Artificial Sequence
  Synthetic
uauacauacugucaccuugcaaa

SEQ ID NO: 24876 - RNA, 24 nt, Artificial Sequence
  Synthetic
auauacauacugucaccuugcaaa

SEQ ID NO: 24877 - RNA, 19 nt, Artificial Sequence
  Synthetic
ugaaaaucucaaacucaaa

SEQ ID NO: 24878 - RNA, 20 nt, Artificial Sequence
  Synthetic
uugaaaaucucaaacucaaa

SEQ ID NO: 24879 - RNA, 21 nt, Artificial Sequence
  Synthetic
uuugaaaaucucaaacucaaa

SEQ ID NO: 24880 - RNA, 22 nt, Artificial Sequence
  Synthetic
uuuugaaaaucucaaacucaaa

SEQ ID NO: 24881 - RNA, 23 nt, Artificial Sequence
  Synthetic
auuuugaaaaucucaaacucaaa

SEQ ID NO: 24882 - RNA, 24 nt, Artificial Sequence
  Synthetic
aauuuugaaaaucucaaacucaaa

SEQ ID NO: 24883 - RNA, 18 nt, Artificial Sequence
  Synthetic
ccaugugagagucucaaa

SEQ ID NO: 24884 - RNA, 19 nt, Artificial Sequence
  Synthetic
accaugugagagucucaaa

SEQ ID NO: 24885 - RNA, 20 nt, Artificial Sequence
  Synthetic
uaccaugugagagucucaaa

SEQ ID NO: 24886 - RNA, 21 nt, Artificial Sequence
  Synthetic
cuaccaugugagagucucaaa

SEQ ID NO: 24887 - RNA, 22 nt, Artificial Sequence
  Synthetic
ccuaccaugugagagucucaaa

SEQ ID NO: 24888 - RNA, 23 nt, Artificial Sequence
  Synthetic
accuaccaugugagagucucaaa

SEQ ID NO: 24889 - RNA, 18 nt, Artificial Sequence
  Synthetic
aggagaaagcuucucaaa

SEQ ID NO: 24890 - RNA, 19 nt, Artificial Sequence
  Synthetic
caggagaaagcuucucaaa

SEQ ID NO: 24891 - RNA, 20 nt, Artificial Sequence
  Synthetic
ucaggagaaagcuucucaaa

SEQ ID NO: 24892 - RNA, 21 nt, Artificial Sequence
  Synthetic
cucaggagaaagcuucucaaa

SEQ ID NO: 24893 - RNA, 22 nt, Artificial Sequence
  Synthetic
ccucaggagaaagcuucucaaa

SEQ ID NO: 24894 - RNA, 24 nt, Artificial Sequence
  Synthetic
ugccucaggagaaagcuucucaaa

SEQ ID NO: 24895 - RNA, 19 nt, Artificial Sequence
  Synthetic
ugccugucucccagucaaa

SEQ ID NO: 24896 - RNA, 20 nt, Artificial Sequence
  Synthetic
cugccugucucccagucaaa

SEQ ID NO: 24897 - RNA, 21 nt, Artificial Sequence
  Synthetic
ccugccugucucccagucaaa

SEQ ID NO: 24898 - RNA, 22 nt, Artificial Sequence
  Synthetic
cccugccugucucccagucaaa

SEQ ID NO: 24899 - RNA, 23 nt, Artificial Sequence
  Synthetic
ccccugccugucucccagucaaa

SEQ ID NO: 24900 - RNA, 24 nt, Artificial Sequence
  Synthetic
uccccugccugucucccagucaaa

SEQ ID NO: 24901 - RNA, 18 nt, Artificial Sequence
  Synthetic
acaaguugggaugucaaa

SEQ ID NO: 24902 - RNA, 19 nt, Artificial Sequence
  Synthetic
aacaaguugggaugucaaa

SEQ ID NO: 24903 - RNA, 21 nt, Artificial Sequence
  Synthetic
agaacaaguugggaugucaaa

SEQ ID NO: 24904 - RNA, 22 nt, Artificial Sequence
  Synthetic
uagaacaaguugggaugucaaa

SEQ ID NO: 24905 - RNA, 23 nt, Artificial Sequence
  Synthetic
cuagaacaaguugggaugucaaa

SEQ ID NO: 24906 - RNA, 24 nt, Artificial Sequence
  Synthetic
acuagaacaaguugggaugucaaa

SEQ ID NO: 24907 - RNA, 18 nt, Artificial Sequence
  Synthetic
aauacagauggugucaaa

SEQ ID NO: 24908 - RNA, 20 nt, Artificial Sequence
  Synthetic
ugaauacagauggugucaaa

SEQ ID NO: 24909 - RNA, 21 nt, Artificial Sequence
  Synthetic
uugaauacagauggugucaaa

SEQ ID NO: 24910 - RNA, 22 nt, Artificial Sequence
  Synthetic
uuugaauacagauggugucaaa

SEQ ID NO: 24911 - RNA, 23 nt, Artificial Sequence
  Synthetic
uuuugaauacagauggugucaaa

SEQ ID NO: 24912 - RNA, 24 nt, Artificial Sequence
  Synthetic
auuuugaauacagauggugucaaa

SEQ ID NO: 24913 - RNA, 18 nt, Artificial Sequence
  Synthetic
ucaaugauugaauucaaa

SEQ ID NO: 24914 - RNA, 19 nt, Artificial Sequence
  Synthetic
uucaaugauugaauucaaa

SEQ ID NO: 24915 - RNA, 22 nt, Artificial Sequence
  Synthetic
agguucaaugauugaauucaaa

SEQ ID NO: 24916 - RNA, 24 nt, Artificial Sequence
  Synthetic
agagguucaaugauugaauucaaa

SEQ ID NO: 24917 - RNA, 18 nt, Artificial Sequence
  Synthetic
cuuuucuuuagauucaaa

SEQ ID NO: 24918 - RNA, 19 nt, Artificial Sequence
  Synthetic
acuuuucuuuagauucaaa

SEQ ID NO: 24919 - RNA, 21 nt, Artificial Sequence
  Synthetic
ugacuuuucuuuagauucaaa

SEQ ID NO: 24920 - RNA, 22 nt, Artificial Sequence
  Synthetic
uugacuuuucuuuagauucaaa

SEQ ID NO: 24921 - RNA, 23 nt, Artificial Sequence
  Synthetic
auugacuuuucuuuagauucaaa

SEQ ID NO: 24922 - RNA, 24 nt, Artificial Sequence
  Synthetic
cauugacuuuucuuuagauucaaa

SEQ ID NO: 24923 - RNA, 18 nt, Artificial Sequence
  Synthetic
auaaauauuaaguucaaa

SEQ ID NO: 24924 - RNA, 19 nt, Artificial Sequence
  Synthetic
aauaaauauuaaguucaaa

SEQ ID NO: 24925 - RNA, 20 nt, Artificial Sequence
  Synthetic
caauaaauauuaaguucaaa

SEQ ID NO: 24926 - RNA, 21 nt, Artificial Sequence
  Synthetic
ucaauaaauauuaaguucaaa

SEQ ID NO: 24927 - RNA, 22 nt, Artificial Sequence
  Synthetic
uucaauaaauauuaaguucaaa

SEQ ID NO: 24928 - RNA, 23 nt, Artificial Sequence
  Synthetic
auucaauaaauauuaaguucaaa

SEQ ID NO: 24929 - RNA, 24 nt, Artificial Sequence
  Synthetic
aauucaauaaauauuaaguucaaa

SEQ ID NO: 24930 - RNA, 18 nt, Artificial Sequence
  Synthetic
aaaacuuaacaguucaaa

SEQ ID NO: 24931 - RNA, 19 nt, Artificial Sequence
  Synthetic
caaaacuuaacaguucaaa

SEQ ID NO: 24932 - RNA, 20 nt, Artificial Sequence
  Synthetic
ccaaaacuuaacaguucaaa

SEQ ID NO: 24933 - RNA, 21 nt, Artificial Sequence
  Synthetic
cccaaaacuuaacaguucaaa

SEQ ID NO: 24934 - RNA, 22 nt, Artificial Sequence
  Synthetic
ccccaaaacuuaacaguucaaa

SEQ ID NO: 24935 - RNA, 23 nt, Artificial Sequence
  Synthetic
accccaaaacuuaacaguucaaa

SEQ ID NO: 24936 - RNA, 24 nt, Artificial Sequence
  Synthetic
caccccaaaacuuaacaguucaaa

SEQ ID NO: 24937 - RNA, 18 nt, Artificial Sequence
  Synthetic
accuuucauacguucaaa

SEQ ID NO: 24938 - RNA, 19 nt, Artificial Sequence
  Synthetic
uaccuuucauacguucaaa

SEQ ID NO: 24939 - RNA, 20 nt, Artificial Sequence
  Synthetic
uuaccuuucauacguucaaa

SEQ ID NO: 24940 - RNA, 21 nt, Artificial Sequence
  Synthetic
auuaccuuucauacguucaaa

SEQ ID NO: 24941 - RNA, 23 nt, Artificial Sequence
  Synthetic
ugauuaccuuucauacguucaaa

SEQ ID NO: 24942 - RNA, 24 nt, Artificial Sequence
  Synthetic
augauuaccuuucauacguucaaa

SEQ ID NO: 24943 - RNA, 19 nt, Artificial Sequence
  Synthetic
ugaaauuacuuuguucaaa

SEQ ID NO: 24944 - RNA, 20 nt, Artificial Sequence
  Synthetic
uugaaauuacuuuguucaaa

SEQ ID NO: 24945 - RNA, 21 nt, Artificial Sequence
  Synthetic
auugaaauuacuuuguucaaa

SEQ ID NO: 24946 - RNA, 22 nt, Artificial Sequence
  Synthetic
uauugaaauuacuuuguucaaa

SEQ ID NO: 24947 - RNA, 23 nt, Artificial Sequence
  Synthetic
auauugaaauuacuuuguucaaa

SEQ ID NO: 24948 - RNA, 24 nt, Artificial Sequence
  Synthetic
aauauugaaauuacuuuguucaaa

SEQ ID NO: 24949 - RNA, 18 nt, Artificial Sequence
  Synthetic
cggaauugccauuucaaa

SEQ ID NO: 24950 - RNA, 21 nt, Artificial Sequence
  Synthetic
uggcggaauugccauuucaaa

SEQ ID NO: 24951 - RNA, 23 nt, Artificial Sequence
  Synthetic
aguggcggaauugccauuucaaa

SEQ ID NO: 24952 - RNA, 24 nt, Artificial Sequence
  Synthetic
aaguggcggaauugccauuucaaa

SEQ ID NO: 24953 - RNA, 18 nt, Artificial Sequence
  Synthetic
uugaaaggcaguuucaaa

SEQ ID NO: 24954 - RNA, 19 nt, Artificial Sequence
  Synthetic
cuugaaaggcaguuucaaa

SEQ ID NO: 24955 - RNA, 20 nt, Artificial Sequence
  Synthetic
ucuugaaaggcaguuucaaa

SEQ ID NO: 24956 - RNA, 22 nt, Artificial Sequence
  Synthetic
ugucuugaaaggcaguuucaaa

SEQ ID NO: 24957 - RNA, 23 nt, Artificial Sequence
  Synthetic
cugucuugaaaggcaguuucaaa

SEQ ID NO: 24958 - RNA, 24 nt, Artificial Sequence
  Synthetic
acugucuugaaaggcaguuucaaa

SEQ ID NO: 24959 - RNA, 21 nt, Artificial Sequence
  Synthetic
aucaaaagagaagguuucaaa

SEQ ID NO: 24960 - RNA, 22 nt, Artificial Sequence
  Synthetic
aaucaaaagagaagguuucaaa

SEQ ID NO: 24961 - RNA, 23 nt, Artificial Sequence
  Synthetic
uaaucaaaagagaagguuucaaa

SEQ ID NO: 24962 - RNA, 24 nt, Artificial Sequence
  Synthetic
uuaaucaaaagagaagguuucaaa

SEQ ID NO: 24963 - RNA, 18 nt, Artificial Sequence
  Synthetic
ucaggucuuaaaaagaaa

SEQ ID NO: 24964 - RNA, 19 nt, Artificial Sequence
  Synthetic
aucaggucuuaaaaagaaa

SEQ ID NO: 24965 - RNA, 20 nt, Artificial Sequence
  Synthetic
aaucaggucuuaaaaagaaa

SEQ ID NO: 24966 - RNA, 21 nt, Artificial Sequence
  Synthetic
uaaucaggucuuaaaaagaaa

SEQ ID NO: 24967 - RNA, 22 nt, Artificial Sequence
  Synthetic
auaaucaggucuuaaaaagaaa

SEQ ID NO: 24968 - RNA, 24 nt, Artificial Sequence
  Synthetic
ugauaaucaggucuuaaaaagaaa

SEQ ID NO: 24969 - RNA, 21 nt, Artificial Sequence
  Synthetic
agugauuaccucuaaaagaaa

SEQ ID NO: 24970 - RNA, 22 nt, Artificial Sequence
  Synthetic
uagugauuaccucuaaaagaaa

SEQ ID NO: 24971 - RNA, 24 nt, Artificial Sequence
  Synthetic
aguagugauuaccucuaaaagaaa

SEQ ID NO: 24972 - RNA, 22 nt, Artificial Sequence
  Synthetic
agcaucaaaaaauacaaagaaa

SEQ ID NO: 24973 - RNA, 23 nt, Artificial Sequence
  Synthetic
cagcaucaaaaaauacaaagaaa

SEQ ID NO: 24974 - RNA, 24 nt, Artificial Sequence
  Synthetic
ucagcaucaaaaaauacaaagaaa

SEQ ID NO: 24975 - RNA, 21 nt, Artificial Sequence
  Synthetic
uaguuccagaaaccaaagaaa

SEQ ID NO: 24976 - RNA, 22 nt, Artificial Sequence
  Synthetic
cuaguuccagaaaccaaagaaa

SEQ ID NO: 24977 - RNA, 24 nt, Artificial Sequence
  Synthetic
ugcuaguuccagaaaccaaagaaa

SEQ ID NO: 24978 - RNA, 18 nt, Artificial Sequence
  Synthetic
uuuuuauggccaaagaaa

SEQ ID NO: 24979 - RNA, 19 nt, Artificial Sequence
  Synthetic
uuuuuuauggccaaagaaa

SEQ ID NO: 24980 - RNA, 20 nt, Artificial Sequence
  Synthetic
auuuuuuauggccaaagaaa

SEQ ID NO: 24981 - RNA, 21 nt, Artificial Sequence
  Synthetic
aauuuuuuauggccaaagaaa

SEQ ID NO: 24982 - RNA, 22 nt, Artificial Sequence
  Synthetic
uaauuuuuuauggccaaagaaa

SEQ ID NO: 24983 - RNA, 23 nt, Artificial Sequence
  Synthetic
uuaauuuuuuauggccaaagaaa

SEQ ID NO: 24984 - RNA, 24 nt, Artificial Sequence
  Synthetic
uuuaauuuuuuauggccaaagaaa

SEQ ID NO: 24985 - RNA, 18 nt, Artificial Sequence
  Synthetic
uccgaaguugcaaagaaa

SEQ ID NO: 24986 - RNA, 19 nt, Artificial Sequence
  Synthetic
uuccgaaguugcaaagaaa

SEQ ID NO: 24987 - RNA, 20 nt, Artificial Sequence
  Synthetic
uuuccgaaguugcaaagaaa

SEQ ID NO: 24988 - RNA, 21 nt, Artificial Sequence
  Synthetic
uuuuccgaaguugcaaagaaa

SEQ ID NO: 24989 - RNA, 22 nt, Artificial Sequence
  Synthetic
uuuuuccgaaguugcaaagaaa

SEQ ID NO: 24990 - RNA, 23 nt, Artificial Sequence
  Synthetic
auuuuuccgaaguugcaaagaaa

SEQ ID NO: 24991 - RNA, 24 nt, Artificial Sequence
  Synthetic
aauuuuuccgaaguugcaaagaaa

SEQ ID NO: 24992 - RNA, 21 nt, Artificial Sequence
  Synthetic
uguauucauaauauaaagaaa

SEQ ID NO: 24993 - RNA, 22 nt, Artificial Sequence
  Synthetic
auguauucauaauauaaagaaa

SEQ ID NO: 24994 - RNA, 23 nt, Artificial Sequence
  Synthetic
uauguauucauaauauaaagaaa

SEQ ID NO: 24995 - RNA, 24 nt, Artificial Sequence
  Synthetic
uuauguauucauaauauaaagaaa

SEQ ID NO: 24996 - RNA, 21 nt, Artificial Sequence
  Synthetic
cauccuuguggggacaagaaa

SEQ ID NO: 24997 - RNA, 22 nt, Artificial Sequence
  Synthetic
acauccuuguggggacaagaaa

SEQ ID NO: 24998 - RNA, 23 nt, Artificial Sequence
  Synthetic
aacauccuuguggggacaagaaa

SEQ ID NO: 24999 - RNA, 18 nt, Artificial Sequence
  Synthetic
aggcaauacgccaagaaa

SEQ ID NO: 25000 - RNA, 19 nt, Artificial Sequence
  Synthetic
aaggcaauacgccaagaaa

SEQ ID NO: 25001 - RNA, 21 nt, Artificial Sequence
  Synthetic
agaaggcaauacgccaagaaa

SEQ ID NO: 25002 - RNA, 24 nt, Artificial Sequence
  Synthetic
aggagaaggcaauacgccaagaaa

SEQ ID NO: 25003 - RNA, 18 nt, Artificial Sequence
  Synthetic
uuauucucaugcaagaaa

SEQ ID NO: 25004 - RNA, 19 nt, Artificial Sequence
  Synthetic
cuuauucucaugcaagaaa

SEQ ID NO: 25005 - RNA, 23 nt, Artificial Sequence
  Synthetic
ugggcuuauucucaugcaagaaa

SEQ ID NO: 25006 - RNA, 24 nt, Artificial Sequence
  Synthetic
cugggcuuauucucaugcaagaaa

SEQ ID NO: 25007 - RNA, 18 nt, Artificial Sequence
  Synthetic
uuagaugcuuucaagaaa

SEQ ID NO: 25008 - RNA, 19 nt, Artificial Sequence
  Synthetic
auuagaugcuuucaagaaa

SEQ ID NO: 25009 - RNA, 22 nt, Artificial Sequence
  Synthetic
uggauuagaugcuuucaagaaa

SEQ ID NO: 25010 - RNA, 23 nt, Artificial Sequence
  Synthetic
cuggauuagaugcuuucaagaaa

SEQ ID NO: 25011 - RNA, 24 nt, Artificial Sequence
  Synthetic
ucuggauuagaugcuuucaagaaa

SEQ ID NO: 25012 - RNA, 22 nt, Artificial Sequence
  Synthetic
aguuuucuuagaacugaagaaa

SEQ ID NO: 25013 - RNA, 23 nt, Artificial Sequence
  Synthetic
caguuuucuuagaacugaagaaa

SEQ ID NO: 25014 - RNA, 24 nt, Artificial Sequence
  Synthetic
ucaguuuucuuagaacugaagaaa

SEQ ID NO: 25015 - RNA, 20 nt, Artificial Sequence
  Synthetic
aggguagaacaaauaagaaa

SEQ ID NO: 25016 - RNA, 21 nt, Artificial Sequence
  Synthetic
caggguagaacaaauaagaaa

SEQ ID NO: 25017 - RNA, 22 nt, Artificial Sequence
  Synthetic
acaggguagaacaaauaagaaa

SEQ ID NO: 25018 - RNA, 24 nt, Artificial Sequence
  Synthetic
cgacaggguagaacaaauaagaaa

SEQ ID NO: 25019 - RNA, 23 nt, Artificial Sequence
  Synthetic
aggaucauggguagaauaagaaa

SEQ ID NO: 25020 - RNA, 24 nt, Artificial Sequence
  Synthetic
uaggaucauggguagaauaagaaa

SEQ ID NO: 25021 - RNA, 18 nt, Artificial Sequence
  Synthetic
agauaggggcauaagaaa

SEQ ID NO: 25022 - RNA, 19 nt, Artificial Sequence
  Synthetic
aagauaggggcauaagaaa

SEQ ID NO: 25023 - RNA, 20 nt, Artificial Sequence
  Synthetic
caagauaggggcauaagaaa

SEQ ID NO: 25024 - RNA, 21 nt, Artificial Sequence
  Synthetic
ccaagauaggggcauaagaaa

SEQ ID NO: 25025 - RNA, 22 nt, Artificial Sequence
  Synthetic
cccaagauaggggcauaagaaa

SEQ ID NO: 25026 - RNA, 23 nt, Artificial Sequence
  Synthetic
acccaagauaggggcauaagaaa

SEQ ID NO: 25027 - RNA, 24 nt, Artificial Sequence
  Synthetic
aacccaagauaggggcauaagaaa

SEQ ID NO: 25028 - RNA, 18 nt, Artificial Sequence
  Synthetic
ucacuauaucauaagaaa

SEQ ID NO: 25029 - RNA, 19 nt, Artificial Sequence
  Synthetic
cucacuauaucauaagaaa

SEQ ID NO: 25030 - RNA, 21 nt, Artificial Sequence
  Synthetic
agcucacuauaucauaagaaa

SEQ ID NO: 25031 - RNA, 24 nt, Artificial Sequence
  Synthetic
aggagcucacuauaucauaagaaa

SEQ ID NO: 25032 - RNA, 18 nt, Artificial Sequence
  Synthetic
aacuaaaucucuaagaaa

SEQ ID NO: 25033 - RNA, 19 nt, Artificial Sequence
  Synthetic
aaacuaaaucucuaagaaa

SEQ ID NO: 25034 - RNA, 22 nt, Artificial Sequence
  Synthetic
uggaaacuaaaucucuaagaaa

SEQ ID NO: 25035 - RNA, 23 nt, Artificial Sequence
  Synthetic
auggaaacuaaaucucuaagaaa

SEQ ID NO: 25036 - RNA, 24 nt, Artificial Sequence
  Synthetic
aauggaaacuaaaucucuaagaaa

SEQ ID NO: 25037 - RNA, 22 nt, Artificial Sequence
  Synthetic
aguguaguaauauauuaagaaa

SEQ ID NO: 25038 - RNA, 23 nt, Artificial Sequence
  Synthetic
aaguguaguaauauauuaagaaa

SEQ ID NO: 25039 - RNA, 24 nt, Artificial Sequence
  Synthetic
uaaguguaguaauauauuaagaaa

SEQ ID NO: 25040 - RNA, 18 nt, Artificial Sequence
  Synthetic
caacgauacuuuaagaaa

SEQ ID NO: 25041 - RNA, 20 nt, Artificial Sequence
  Synthetic
agcaacgauacuuuaagaaa

SEQ ID NO: 25042 - RNA, 21 nt, Artificial Sequence
  Synthetic
aagcaacgauacuuuaagaaa

SEQ ID NO: 25043 - RNA, 22 nt, Artificial Sequence
  Synthetic
uaagcaacgauacuuuaagaaa

SEQ ID NO: 25044 - RNA, 23 nt, Artificial Sequence
  Synthetic
auaagcaacgauacuuuaagaaa

SEQ ID NO: 25045 - RNA, 24 nt, Artificial Sequence
  Synthetic
uauaagcaacgauacuuuaagaaa

SEQ ID NO: 25046 - RNA, 18 nt, Artificial Sequence
  Synthetic
cuuauaaauuuuaagaaa

SEQ ID NO: 25047 - RNA, 20 nt, Artificial Sequence
  Synthetic
agcuuauaaauuuuaagaaa

SEQ ID NO: 25048 - RNA, 21 nt, Artificial Sequence
  Synthetic
uagcuuauaaauuuuaagaaa

SEQ ID NO: 25049 - RNA, 22 nt, Artificial Sequence
  Synthetic
auagcuuauaaauuuuaagaaa

SEQ ID NO: 25050 - RNA, 24 nt, Artificial Sequence
  Synthetic
ugauagcuuauaaauuuuaagaaa

SEQ ID NO: 25051 - RNA, 18 nt, Artificial Sequence
  Synthetic
cuaacacaaacacagaaa

SEQ ID NO: 25052 - RNA, 19 nt, Artificial Sequence
  Synthetic
ccuaacacaaacacagaaa

SEQ ID NO: 25053 - RNA, 20 nt, Artificial Sequence
  Synthetic
accuaacacaaacacagaaa

SEQ ID NO: 25054 - RNA, 22 nt, Artificial Sequence
  Synthetic
agaccuaacacaaacacagaaa

SEQ ID NO: 25055 - RNA, 23 nt, Artificial Sequence
  Synthetic
uagaccuaacacaaacacagaaa

SEQ ID NO: 25056 - RNA, 24 nt, Artificial Sequence
  Synthetic
auagaccuaacacaaacacagaaa

SEQ ID NO: 25057 - RNA, 18 nt, Artificial Sequence
  Synthetic
uauuuaaaaguacagaaa

SEQ ID NO: 25058 - RNA, 21 nt, Artificial Sequence
  Synthetic
agguauuuaaaaguacagaaa

SEQ ID NO: 25059 - RNA, 22 nt, Artificial Sequence
  Synthetic
uagguauuuaaaaguacagaaa

SEQ ID NO: 25060 - RNA, 24 nt, Artificial Sequence
  Synthetic
aguagguauuuaaaaguacagaaa

SEQ ID NO: 25061 - RNA, 21 nt, Artificial Sequence
  Synthetic
uaauaaucacauuuacagaaa

SEQ ID NO: 25062 - RNA, 22 nt, Artificial Sequence
  Synthetic
uuaauaaucacauuuacagaaa

SEQ ID NO: 25063 - RNA, 23 nt, Artificial Sequence
  Synthetic
uuuaauaaucacauuuacagaaa

SEQ ID NO: 25064 - RNA, 18 nt, Artificial Sequence
  Synthetic
uaaccguacacccagaaa

SEQ ID NO: 25065 - RNA, 19 nt, Artificial Sequence
  Synthetic
cuaaccguacacccagaaa

SEQ ID NO: 25066 - RNA, 20 nt, Artificial Sequence
  Synthetic
acuaaccguacacccagaaa

SEQ ID NO: 25067 - RNA, 21 nt, Artificial Sequence
  Synthetic
uaauuuauuuuuacccagaaa

SEQ ID NO: 25068 - RNA, 22 nt, Artificial Sequence
  Synthetic
auaauuuauuuuuacccagaaa

SEQ ID NO: 25069 - RNA, 23 nt, Artificial Sequence
  Synthetic
uauaauuuauuuuuacccagaaa

SEQ ID NO: 25070 - RNA, 24 nt, Artificial Sequence
  Synthetic
cuauaauuuauuuuuacccagaaa

SEQ ID NO: 25071 - RNA, 18 nt, Artificial Sequence
  Synthetic
agccagccucuccagaaa

SEQ ID NO: 25072 - RNA, 19 nt, Artificial Sequence
  Synthetic
cagccagccucuccagaaa

SEQ ID NO: 25073 - RNA, 20 nt, Artificial Sequence
  Synthetic
acagccagccucuccagaaa

SEQ ID NO: 25074 - RNA, 21 nt, Artificial Sequence
  Synthetic
uacagccagccucuccagaaa

SEQ ID NO: 25075 - RNA, 22 nt, Artificial Sequence
  Synthetic
cuacagccagccucuccagaaa

SEQ ID NO: 25076 - RNA, 23 nt, Artificial Sequence
  Synthetic
ucuacagccagccucuccagaaa

SEQ ID NO: 25077 - RNA, 24 nt, Artificial Sequence
  Synthetic
uucuacagccagccucuccagaaa

SEQ ID NO: 25078 - RNA, 18 nt, Artificial Sequence
  Synthetic
agaagcucuaggcagaaa

SEQ ID NO: 25079 - RNA, 20 nt, Artificial Sequence
  Synthetic
agagaagcucuaggcagaaa

SEQ ID NO: 25080 - RNA, 18 nt, Artificial Sequence
  Synthetic
aacaugaaguugcagaaa

SEQ ID NO: 25081 - RNA, 19 nt, Artificial Sequence
  Synthetic
caacaugaaguugcagaaa

SEQ ID NO: 25082 - RNA, 20 nt, Artificial Sequence
  Synthetic
ccaacaugaaguugcagaaa

SEQ ID NO: 25083 - RNA, 21 nt, Artificial Sequence
  Synthetic
uccaacaugaaguugcagaaa

SEQ ID NO: 25084 - RNA, 22 nt, Artificial Sequence
  Synthetic
uuccaacaugaaguugcagaaa

SEQ ID NO: 25085 - RNA, 23 nt, Artificial Sequence
  Synthetic
auuccaacaugaaguugcagaaa

SEQ ID NO: 25086 - RNA, 24 nt, Artificial Sequence
  Synthetic
uauuccaacaugaaguugcagaaa

SEQ ID NO: 25087 - RNA, 19 nt, Artificial Sequence
  Synthetic
cgggcucugccuucagaaa

SEQ ID NO: 25088 - RNA, 21 nt, Artificial Sequence
  Synthetic
ugcgggcucugccuucagaaa

SEQ ID NO: 25089 - RNA, 22 nt, Artificial Sequence
  Synthetic
augcgggcucugccuucagaaa

SEQ ID NO: 25090 - RNA, 23 nt, Artificial Sequence
  Synthetic
caugcgggcucugccuucagaaa

SEQ ID NO: 25091 - RNA, 24 nt, Artificial Sequence
  Synthetic
ucaugcgggcucugccuucagaaa

SEQ ID NO: 25092 - RNA, 19 nt, Artificial Sequence
  Synthetic
uguacuaccuuuucagaaa

SEQ ID NO: 25093 - RNA, 20 nt, Artificial Sequence
  Synthetic
uuguacuaccuuuucagaaa

SEQ ID NO: 25094 - RNA, 21 nt, Artificial Sequence
  Synthetic
cuuguacuaccuuuucagaaa

SEQ ID NO: 25095 - RNA, 22 nt, Artificial Sequence
  Synthetic
acuuguacuaccuuuucagaaa

SEQ ID NO: 25096 - RNA, 23 nt, Artificial Sequence
  Synthetic
uacuuguacuaccuuuucagaaa

SEQ ID NO: 25097 - RNA, 24 nt, Artificial Sequence
  Synthetic
uuacuuguacuaccuuuucagaaa

SEQ ID NO: 25098 - RNA, 21 nt, Artificial Sequence
  Synthetic
cacagggcgaaaaaagagaaa

SEQ ID NO: 25099 - RNA, 22 nt, Artificial Sequence
  Synthetic
ucacagggcgaaaaaagagaaa

SEQ ID NO: 25100 - RNA, 23 nt, Artificial Sequence
  Synthetic
uucacagggcgaaaaaagagaaa

SEQ ID NO: 25101 - RNA, 18 nt, Artificial Sequence
  Synthetic
aaaagaguugcagagaaa

SEQ ID NO: 25102 - RNA, 21 nt, Artificial Sequence
  Synthetic
uagucuucagaggaggagaaa

SEQ ID NO: 25103 - RNA, 23 nt, Artificial Sequence
  Synthetic
aguagucuucagaggaggagaaa

SEQ ID NO: 25104 - RNA, 24 nt, Artificial Sequence
  Synthetic
caguagucuucagaggaggagaaa

SEQ ID NO: 25105 - RNA, 21 nt, Artificial Sequence
  Synthetic
agaagaugggauugggagaaa

SEQ ID NO: 25106 - RNA, 22 nt, Artificial Sequence
  Synthetic
cagaagaugggauugggagaaa

SEQ ID NO: 25107 - RNA, 24 nt, Artificial Sequence
  Synthetic
agcagaagaugggauugggagaaa

SEQ ID NO: 25108 - RNA, 19 nt, Artificial Sequence
  Synthetic
uguugauauagaugagaaa

SEQ ID NO: 25109 - RNA, 20 nt, Artificial Sequence
  Synthetic
auguugauauagaugagaaa

SEQ ID NO: 25110 - RNA, 21 nt, Artificial Sequence
  Synthetic
cauguugauauagaugagaaa

SEQ ID NO: 25111 - RNA, 22 nt, Artificial Sequence
  Synthetic
acauguugauauagaugagaaa

SEQ ID NO: 25112 - RNA, 23 nt, Artificial Sequence
  Synthetic
cacauguugauauagaugagaaa

SEQ ID NO: 25113 - RNA, 24 nt, Artificial Sequence
  Synthetic
acacauguugauauagaugagaaa

SEQ ID NO: 25114 - RNA, 18 nt, Artificial Sequence
  Synthetic
agaacuagacuugagaaa

SEQ ID NO: 25115 - RNA, 19 nt, Artificial Sequence
  Synthetic
aagaacuagacuugagaaa

SEQ ID NO: 25116 - RNA, 21 nt, Artificial Sequence
  Synthetic
agaagaacuagacuugagaaa

SEQ ID NO: 25117 - RNA, 22 nt, Artificial Sequence
  Synthetic
cagaagaacuagacuugagaaa

SEQ ID NO: 25118 - RNA, 24 nt, Artificial Sequence
  Synthetic
agcagaagaacuagacuugagaaa

SEQ ID NO: 25119 - RNA, 18 nt, Artificial Sequence
  Synthetic
aauucuccugaauagaaa

SEQ ID NO: 25120 - RNA, 19 nt, Artificial Sequence
  Synthetic
caauucuccugaauagaaa

SEQ ID NO: 25121 - RNA, 22 nt, Artificial Sequence
  Synthetic
aggcaauucuccugaauagaaa

SEQ ID NO: 25122 - RNA, 23 nt, Artificial Sequence
  Synthetic
aaggcaauucuccugaauagaaa

SEQ ID NO: 25123 - RNA, 24 nt, Artificial Sequence
  Synthetic
aaaggcaauucuccugaauagaaa

SEQ ID NO: 25124 - RNA, 18 nt, Artificial Sequence
  Synthetic
uuaguauccuaauagaaa

SEQ ID NO: 25125 - RNA, 19 nt, Artificial Sequence
  Synthetic
auuaguauccuaauagaaa

SEQ ID NO: 25126 - RNA, 20 nt, Artificial Sequence
  Synthetic
aauuaguauccuaauagaaa

SEQ ID NO: 25127 - RNA, 21 nt, Artificial Sequence
  Synthetic
uaauuaguauccuaauagaaa

SEQ ID NO: 25128 - RNA, 22 nt, Artificial Sequence
  Synthetic
auaauuaguauccuaauagaaa

SEQ ID NO: 25129 - RNA, 23 nt, Artificial Sequence
  Synthetic
cauaauuaguauccuaauagaaa

SEQ ID NO: 25130 - RNA, 24 nt, Artificial Sequence
  Synthetic
ccauaauuaguauccuaauagaaa

SEQ ID NO: 25131 - RNA, 18 nt, Artificial Sequence
  Synthetic
ugcuucaaaccauagaaa

SEQ ID NO: 25132 - RNA, 20 nt, Artificial Sequence
  Synthetic
agugcuucaaaccauagaaa

SEQ ID NO: 25133 - RNA, 21 nt, Artificial Sequence
  Synthetic
uagugcuucaaaccauagaaa

SEQ ID NO: 25134 - RNA, 22 nt, Artificial Sequence
  Synthetic
cuagugcuucaaaccauagaaa

SEQ ID NO: 25135 - RNA, 23 nt, Artificial Sequence
  Synthetic
ccuagugcuucaaaccauagaaa

SEQ ID NO: 25136 - RNA, 24 nt, Artificial Sequence
  Synthetic
cccuagugcuucaaaccauagaaa

SEQ ID NO: 25137 - RNA, 18 nt, Artificial Sequence
  Synthetic
ugcacaguuuuauagaaa

SEQ ID NO: 25138 - RNA, 19 nt, Artificial Sequence
  Synthetic
cugcacaguuuuauagaaa

SEQ ID NO: 25139 - RNA, 20 nt, Artificial Sequence
  Synthetic
ucugcacaguuuuauagaaa

SEQ ID NO: 25140 - RNA, 21 nt, Artificial Sequence
  Synthetic
aucugcacaguuuuauagaaa

SEQ ID NO: 25141 - RNA, 22 nt, Artificial Sequence
  Synthetic
aaucugcacaguuuuauagaaa

SEQ ID NO: 25142 - RNA, 23 nt, Artificial Sequence
  Synthetic
uaaucugcacaguuuuauagaaa

SEQ ID NO: 25143 - RNA, 24 nt, Artificial Sequence
  Synthetic
auaaucugcacaguuuuauagaaa

SEQ ID NO: 25144 - RNA, 18 nt, Artificial Sequence
  Synthetic
cuagacaguaacuagaaa

SEQ ID NO: 25145 - RNA, 19 nt, Artificial Sequence
  Synthetic
acuagacaguaacuagaaa

SEQ ID NO: 25146 - RNA, 21 nt, Artificial Sequence
  Synthetic
ugacuagacaguaacuagaaa

SEQ ID NO: 25147 - RNA, 23 nt, Artificial Sequence
  Synthetic
cgugacuagacaguaacuagaaa

SEQ ID NO: 25148 - RNA, 18 nt, Artificial Sequence
  Synthetic
auucaacaaagcuagaaa

SEQ ID NO: 25149 - RNA, 19 nt, Artificial Sequence
  Synthetic
cauucaacaaagcuagaaa

SEQ ID NO: 25150 - RNA, 20 nt, Artificial Sequence
  Synthetic
ucauucaacaaagcuagaaa

SEQ ID NO: 25151 - RNA, 21 nt, Artificial Sequence
  Synthetic
uucauucaacaaagcuagaaa

SEQ ID NO: 25152 - RNA, 22 nt, Artificial Sequence
  Synthetic
auucauucaacaaagcuagaaa

SEQ ID NO: 25153 - RNA, 23 nt, Artificial Sequence
  Synthetic
cauucauucaacaaagcuagaaa

SEQ ID NO: 25154 - RNA, 24 nt, Artificial Sequence
  Synthetic
acauucauucaacaaagcuagaaa

SEQ ID NO: 25155 - RNA, 18 nt, Artificial Sequence
  Synthetic
uuaaaaguccucuagaaa

SEQ ID NO: 25156 - RNA, 19 nt, Artificial Sequence
  Synthetic
cuuaaaaguccucuagaaa

SEQ ID NO: 25157 - RNA, 20 nt, Artificial Sequence
  Synthetic
ucuuaaaaguccucuagaaa

SEQ ID NO: 25158 - RNA, 21 nt, Artificial Sequence
  Synthetic
cucuuaaaaguccucuagaaa

SEQ ID NO: 25159 - RNA, 22 nt, Artificial Sequence
  Synthetic
ccucuuaaaaguccucuagaaa

SEQ ID NO: 25160 - RNA, 18 nt, Artificial Sequence
  Synthetic
ucucuuuauuucuagaaa

SEQ ID NO: 25161 - RNA, 19 nt, Artificial Sequence
  Synthetic
cucucuuuauuucuagaaa

SEQ ID NO: 25162 - RNA, 20 nt, Artificial Sequence
  Synthetic
ccucucuuuauuucuagaaa

SEQ ID NO: 25163 - RNA, 21 nt, Artificial Sequence
  Synthetic
cccucucuuuauuucuagaaa

SEQ ID NO: 25164 - RNA, 22 nt, Artificial Sequence
  Synthetic
ucccucucuuuauuucuagaaa

SEQ ID NO: 25165 - RNA, 23 nt, Artificial Sequence
  Synthetic
aucccucucuuuauuucuagaaa

SEQ ID NO: 25166 - RNA, 24 nt, Artificial Sequence
  Synthetic
aaucccucucuuuauuucuagaaa

SEQ ID NO: 25167 - RNA, 18 nt, Artificial Sequence
  Synthetic
cacggaauuuucuagaaa

SEQ ID NO: 25168 - RNA, 19 nt, Artificial Sequence
  Synthetic
acacggaauuuucuagaaa

SEQ ID NO: 25169 - RNA, 20 nt, Artificial Sequence
  Synthetic
aacacggaauuuucuagaaa

SEQ ID NO: 25170 - RNA, 21 nt, Artificial Sequence
  Synthetic
uaacacggaauuuucuagaaa

SEQ ID NO: 25171 - RNA, 22 nt, Artificial Sequence
  Synthetic
auaacacggaauuuucuagaaa

SEQ ID NO: 25172 - RNA, 23 nt, Artificial Sequence
  Synthetic
aauaacacggaauuuucuagaaa

SEQ ID NO: 25173 - RNA, 24 nt, Artificial Sequence
  Synthetic
uaauaacacggaauuuucuagaaa

SEQ ID NO: 25174 - RNA, 18 nt, Artificial Sequence
  Synthetic
ccuuuuauuguguagaaa

SEQ ID NO: 25175 - RNA, 19 nt, Artificial Sequence
  Synthetic
accuuuuauuguguagaaa

SEQ ID NO: 25176 - RNA, 20 nt, Artificial Sequence
  Synthetic
uaccuuuuauuguguagaaa

SEQ ID NO: 25177 - RNA, 21 nt, Artificial Sequence
  Synthetic
uuaccuuuuauuguguagaaa

SEQ ID NO: 25178 - RNA, 22 nt, Artificial Sequence
  Synthetic
cuuaccuuuuauuguguagaaa

SEQ ID NO: 25179 - RNA, 23 nt, Artificial Sequence
  Synthetic
ucuuaccuuuuauuguguagaaa

SEQ ID NO: 25180 - RNA, 24 nt, Artificial Sequence
  Synthetic
uucuuaccuuuuauuguguagaaa

SEQ ID NO: 25181 - RNA, 18 nt, Artificial Sequence
  Synthetic
uuuccuagucauuagaaa

SEQ ID NO: 25182 - RNA, 19 nt, Artificial Sequence
  Synthetic
cuuuccuagucauuagaaa

SEQ ID NO: 25183 - RNA, 20 nt, Artificial Sequence
  Synthetic
ucuuuccuagucauuagaaa

SEQ ID NO: 25184 - RNA, 21 nt, Artificial Sequence
  Synthetic
cucuuuccuagucauuagaaa

SEQ ID NO: 25185 - RNA, 22 nt, Artificial Sequence
  Synthetic
acucuuuccuagucauuagaaa

SEQ ID NO: 25186 - RNA, 23 nt, Artificial Sequence
  Synthetic
uacucuuuccuagucauuagaaa

SEQ ID NO: 25187 - RNA, 24 nt, Artificial Sequence
  Synthetic
auacucuuuccuagucauuagaaa

SEQ ID NO: 25188 - RNA, 18 nt, Artificial Sequence
  Synthetic
cuaauagaaguuuagaaa

SEQ ID NO: 25189 - RNA, 19 nt, Artificial Sequence
  Synthetic
ucuaauagaaguuuagaaa

SEQ ID NO: 25190 - RNA, 20 nt, Artificial Sequence
  Synthetic
cucuaauagaaguuuagaaa

SEQ ID NO: 25191 - RNA, 23 nt, Artificial Sequence
  Synthetic
aggcucuaauagaaguuuagaaa

SEQ ID NO: 25192 - RNA, 18 nt, Artificial Sequence
  Synthetic
uaugugaauguuuagaaa

SEQ ID NO: 25193 - RNA, 19 nt, Artificial Sequence
  Synthetic
auaugugaauguuuagaaa

SEQ ID NO: 25194 - RNA, 21 nt, Artificial Sequence
  Synthetic
agauaugugaauguuuagaaa

SEQ ID NO: 25195 - RNA, 22 nt, Artificial Sequence
  Synthetic
aagauaugugaauguuuagaaa

SEQ ID NO: 25196 - RNA, 23 nt, Artificial Sequence
  Synthetic
aaagauaugugaauguuuagaaa

SEQ ID NO: 25197 - RNA, 24 nt, Artificial Sequence
  Synthetic
caaagauaugugaauguuuagaaa

SEQ ID NO: 25198 - RNA, 21 nt, Artificial Sequence
  Synthetic
aacaaaacuuacaaaaggaaa

SEQ ID NO: 25199 - RNA, 24 nt, Artificial Sequence
  Synthetic
uggaacaaaacuuacaaaaggaaa

SEQ ID NO: 25200 - RNA, 21 nt, Artificial Sequence
  Synthetic
cugugaagaaugccaaggaaa

SEQ ID NO: 25201 - RNA, 23 nt, Artificial Sequence
  Synthetic
ugcugugaagaaugccaaggaaa

SEQ ID NO: 25202 - RNA, 18 nt, Artificial Sequence
  Synthetic
auuuauucaggaaggaaa

SEQ ID NO: 25203 - RNA, 19 nt, Artificial Sequence
  Synthetic
cauuuauucaggaaggaaa

SEQ ID NO: 25204 - RNA, 20 nt, Artificial Sequence
  Synthetic
acauuuauucaggaaggaaa

SEQ ID NO: 25205 - RNA, 22 nt, Artificial Sequence
  Synthetic
ugacauuuauucaggaaggaaa

SEQ ID NO: 25206 - RNA, 23 nt, Artificial Sequence
  Synthetic
uugacauuuauucaggaaggaaa

SEQ ID NO: 25207 - RNA, 24 nt, Artificial Sequence
  Synthetic
auugacauuuauucaggaaggaaa

SEQ ID NO: 25208 - RNA, 21 nt, Artificial Sequence
  Synthetic
uucagauaugggauaaggaaa

SEQ ID NO: 25209 - RNA, 22 nt, Artificial Sequence
  Synthetic
auucagauaugggauaaggaaa

SEQ ID NO: 25210 - RNA, 23 nt, Artificial Sequence
  Synthetic
aauucagauaugggauaaggaaa

SEQ ID NO: 25211 - RNA, 24 nt, Artificial Sequence
  Synthetic
uaauucagauaugggauaaggaaa

SEQ ID NO: 25212 - RNA, 21 nt, Artificial Sequence
  Synthetic
agucagggagauagcaggaaa

SEQ ID NO: 25213 - RNA, 22 nt, Artificial Sequence
  Synthetic
aagucagggagauagcaggaaa

SEQ ID NO: 25214 - RNA, 23 nt, Artificial Sequence
  Synthetic
uaagucagggagauagcaggaaa

SEQ ID NO: 25215 - RNA, 24 nt, Artificial Sequence
  Synthetic
auaagucagggagauagcaggaaa

SEQ ID NO: 25216 - RNA, 21 nt, Artificial Sequence
  Synthetic
uuuaaaguaaauuucaggaaa

SEQ ID NO: 25217 - RNA, 22 nt, Artificial Sequence
  Synthetic
auuuaaaguaaauuucaggaaa

SEQ ID NO: 25218 - RNA, 23 nt, Artificial Sequence
  Synthetic
aauuuaaaguaaauuucaggaaa

SEQ ID NO: 25219 - RNA, 24 nt, Artificial Sequence
  Synthetic
aaauuuaaaguaaauuucaggaaa

SEQ ID NO: 25220 - RNA, 20 nt, Artificial Sequence
  Synthetic
uggagucuguguagaggaaa

SEQ ID NO: 25221 - RNA, 21 nt, Artificial Sequence
  Synthetic
auggagucuguguagaggaaa

SEQ ID NO: 25222 - RNA, 22 nt, Artificial Sequence
  Synthetic
cauggagucuguguagaggaaa

SEQ ID NO: 25223 - RNA, 23 nt, Artificial Sequence
  Synthetic
ccauggagucuguguagaggaaa

SEQ ID NO: 25224 - RNA, 18 nt, Artificial Sequence
  Synthetic
aggcacaguuggaggaaa

SEQ ID NO: 25225 - RNA, 19 nt, Artificial Sequence
  Synthetic
uaggcacaguuggaggaaa

SEQ ID NO: 25226 - RNA, 20 nt, Artificial Sequence
  Synthetic
uuaggcacaguuggaggaaa

SEQ ID NO: 25227 - RNA, 21 nt, Artificial Sequence
  Synthetic
cuuaggcacaguuggaggaaa

SEQ ID NO: 25228 - RNA, 23 nt, Artificial Sequence
  Synthetic
agcuuaggcacaguuggaggaaa

SEQ ID NO: 25229 - RNA, 24 nt, Artificial Sequence
  Synthetic
uagcuuaggcacaguuggaggaaa

SEQ ID NO: 25230 - RNA, 20 nt, Artificial Sequence
  Synthetic
cggacuguaaacugaggaaa

SEQ ID NO: 25231 - RNA, 21 nt, Artificial Sequence
  Synthetic
acggacuguaaacugaggaaa

SEQ ID NO: 25232 - RNA, 22 nt, Artificial Sequence
  Synthetic
cacggacuguaaacugaggaaa

SEQ ID NO: 25233 - RNA, 24 nt, Artificial Sequence
  Synthetic
agcacggacuguaaacugaggaaa

SEQ ID NO: 25234 - RNA, 18 nt, Artificial Sequence
  Synthetic
uucccgcaguugaggaaa

SEQ ID NO: 25235 - RNA, 19 nt, Artificial Sequence
  Synthetic
auucccgcaguugaggaaa

SEQ ID NO: 25236 - RNA, 20 nt, Artificial Sequence
  Synthetic
aauucccgcaguugaggaaa

SEQ ID NO: 25237 - RNA, 21 nt, Artificial Sequence
  Synthetic
aaauucccgcaguugaggaaa

SEQ ID NO: 25238 - RNA, 22 nt, Artificial Sequence
  Synthetic
uaaauucccgcaguugaggaaa

SEQ ID NO: 25239 - RNA, 23 nt, Artificial Sequence
  Synthetic
auaaauucccgcaguugaggaaa

SEQ ID NO: 25240 - RNA, 24 nt, Artificial Sequence
  Synthetic
uauaaauucccgcaguugaggaaa

SEQ ID NO: 25241 - RNA, 18 nt, Artificial Sequence
  Synthetic
uagauguuuaauaggaaa

SEQ ID NO: 25242 - RNA, 19 nt, Artificial Sequence
  Synthetic
auagauguuuaauaggaaa

SEQ ID NO: 25243 - RNA, 20 nt, Artificial Sequence
  Synthetic
aauagauguuuaauaggaaa

SEQ ID NO: 25244 - RNA, 21 nt, Artificial Sequence
  Synthetic
aaauagauguuuaauaggaaa

SEQ ID NO: 25245 - RNA, 22 nt, Artificial Sequence
  Synthetic
aaaauagauguuuaauaggaaa

SEQ ID NO: 25246 - RNA, 23 nt, Artificial Sequence
  Synthetic
caaaauagauguuuaauaggaaa

SEQ ID NO: 25247 - RNA, 24 nt, Artificial Sequence
  Synthetic
acaaaauagauguuuaauaggaaa

SEQ ID NO: 25248 - RNA, 18 nt, Artificial Sequence
  Synthetic
auuagagacccuaggaaa

SEQ ID NO: 25249 - RNA, 19 nt, Artificial Sequence
  Synthetic
uauuagagacccuaggaaa

SEQ ID NO: 25250 - RNA, 20 nt, Artificial Sequence
  Synthetic
uuauuagagacccuaggaaa

SEQ ID NO: 25251 - RNA, 21 nt, Artificial Sequence
  Synthetic
cuuauuagagacccuaggaaa

SEQ ID NO: 25252 - RNA, 23 nt, Artificial Sequence
  Synthetic
ugcuuauuagagacccuaggaaa

SEQ ID NO: 25253 - RNA, 24 nt, Artificial Sequence
  Synthetic
augcuuauuagagacccuaggaaa

SEQ ID NO: 25254 - RNA, 18 nt, Artificial Sequence
  Synthetic
aucuacuuaaaagggaaa

SEQ ID NO: 25255 - RNA, 20 nt, Artificial Sequence
  Synthetic
agaucuacuuaaaagggaaa

SEQ ID NO: 25256 - RNA, 21 nt, Artificial Sequence
  Synthetic
aagaucuacuuaaaagggaaa

SEQ ID NO: 25257 - RNA, 22 nt, Artificial Sequence
  Synthetic
aaagaucuacuuaaaagggaaa

SEQ ID NO: 25258 - RNA, 23 nt, Artificial Sequence
  Synthetic
caaagaucuacuuaaaagggaaa

SEQ ID NO: 25259 - RNA, 24 nt, Artificial Sequence
  Synthetic
ucaaagaucuacuuaaaagggaaa

SEQ ID NO: 25260 - RNA, 21 nt, Artificial Sequence
  Synthetic
aagguggaaaaagaagggaaa

SEQ ID NO: 25261 - RNA, 24 nt, Artificial Sequence
  Synthetic
uggaagguggaaaaagaagggaaa

SEQ ID NO: 25262 - RNA, 18 nt, Artificial Sequence
  Synthetic
auuacaggaauggggaaa

SEQ ID NO: 25263 - RNA, 19 nt, Artificial Sequence
  Synthetic
uauuacaggaauggggaaa

SEQ ID NO: 25264 - RNA, 20 nt, Artificial Sequence
  Synthetic
auauuacaggaauggggaaa

SEQ ID NO: 25265 - RNA, 21 nt, Artificial Sequence
  Synthetic
aauauuacaggaauggggaaa

SEQ ID NO: 25266 - RNA, 22 nt, Artificial Sequence
  Synthetic
aaauauuacaggaauggggaaa

SEQ ID NO: 25267 - RNA, 23 nt, Artificial Sequence
  Synthetic
aaaauauuacaggaauggggaaa

SEQ ID NO: 25268 - RNA, 24 nt, Artificial Sequence
  Synthetic
uaaaauauuacaggaauggggaaa

SEQ ID NO: 25269 - RNA, 18 nt, Artificial Sequence
  Synthetic
auagccuaaaaugggaaa

SEQ ID NO: 25270 - RNA, 19 nt, Artificial Sequence
  Synthetic
cauagccuaaaaugggaaa

SEQ ID NO: 25271 - RNA, 20 nt, Artificial Sequence
  Synthetic
acauagccuaaaaugggaaa

SEQ ID NO: 25272 - RNA, 21 nt, Artificial Sequence
  Synthetic
cacauagccuaaaaugggaaa

SEQ ID NO: 25273 - RNA, 22 nt, Artificial Sequence
  Synthetic
acacauagccuaaaaugggaaa

SEQ ID NO: 25274 - RNA, 23 nt, Artificial Sequence
  Synthetic
cacacauagccuaaaaugggaaa

SEQ ID NO: 25275 - RNA, 24 nt, Artificial Sequence
  Synthetic
ucacacauagccuaaaaugggaaa

SEQ ID NO: 25276 - RNA, 18 nt, Artificial Sequence
  Synthetic
uuauccuuuaaauggaaa

SEQ ID NO: 25277 - RNA, 19 nt, Artificial Sequence
  Synthetic
uuuauccuuuaaauggaaa

SEQ ID NO: 25278 - RNA, 20 nt, Artificial Sequence
  Synthetic
cuuuauccuuuaaauggaaa

SEQ ID NO: 25279 - RNA, 21 nt, Artificial Sequence
  Synthetic
ccuuuauccuuuaaauggaaa

SEQ ID NO: 25280 - RNA, 23 nt, Artificial Sequence
  Synthetic
agccuuuauccuuuaaauggaaa

SEQ ID NO: 25281 - RNA, 24 nt, Artificial Sequence
  Synthetic
aagccuuuauccuuuaaauggaaa

SEQ ID NO: 25282 - RNA, 18 nt, Artificial Sequence
  Synthetic
uuugaacagggauggaaa

SEQ ID NO: 25283 - RNA, 20 nt, Artificial Sequence
  Synthetic
uguuugaacagggauggaaa

SEQ ID NO: 25284 - RNA, 21 nt, Artificial Sequence
  Synthetic
uuguuugaacagggauggaaa

SEQ ID NO: 25285 - RNA, 22 nt, Artificial Sequence
  Synthetic
auuguuugaacagggauggaaa

SEQ ID NO: 25286 - RNA, 23 nt, Artificial Sequence
  Synthetic
cauuguuugaacagggauggaaa

SEQ ID NO: 25287 - RNA, 18 nt, Artificial Sequence
  Synthetic
aagaaauuuggcuggaaa

SEQ ID NO: 25288 - RNA, 19 nt, Artificial Sequence
  Synthetic
uaagaaauuuggcuggaaa

SEQ ID NO: 25289 - RNA, 20 nt, Artificial Sequence
  Synthetic
uuaagaaauuuggcuggaaa

SEQ ID NO: 25290 - RNA, 21 nt, Artificial Sequence
  Synthetic
auuaagaaauuuggcuggaaa

SEQ ID NO: 25291 - RNA, 22 nt, Artificial Sequence
  Synthetic
aauuaagaaauuuggcuggaaa

SEQ ID NO: 25292 - RNA, 23 nt, Artificial Sequence
  Synthetic
caauuaagaaauuuggcuggaaa

SEQ ID NO: 25293 - RNA, 24 nt, Artificial Sequence
  Synthetic
acaauuaagaaauuuggcuggaaa

SEQ ID NO: 25294 - RNA, 18 nt, Artificial Sequence
  Synthetic
uauguacgguaguggaaa

SEQ ID NO: 25295 - RNA, 19 nt, Artificial Sequence
  Synthetic
auauguacgguaguggaaa

SEQ ID NO: 25296 - RNA, 20 nt, Artificial Sequence
  Synthetic
aauauguacgguaguggaaa

SEQ ID NO: 25297 - RNA, 21 nt, Artificial Sequence
  Synthetic
aaauauguacgguaguggaaa

SEQ ID NO: 25298 - RNA, 22 nt, Artificial Sequence
  Synthetic
aaaauauguacgguaguggaaa

SEQ ID NO: 25299 - RNA, 23 nt, Artificial Sequence
  Synthetic
aaaaauauguacgguaguggaaa

SEQ ID NO: 25300 - RNA, 24 nt, Artificial Sequence
  Synthetic
uaaaaauauguacgguaguggaaa

SEQ ID NO: 25301 - RNA, 18 nt, Artificial Sequence
  Synthetic
uaagcacugcuguggaaa

SEQ ID NO: 25302 - RNA, 19 nt, Artificial Sequence
  Synthetic
uuaagcacugcuguggaaa

SEQ ID NO: 25303 - RNA, 20 nt, Artificial Sequence
  Synthetic
auuaagcacugcuguggaaa

SEQ ID NO: 25304 - RNA, 21 nt, Artificial Sequence
  Synthetic
cauuaagcacugcuguggaaa

SEQ ID NO: 25305 - RNA, 22 nt, Artificial Sequence
  Synthetic
ccauuaagcacugcuguggaaa

SEQ ID NO: 25306 - RNA, 23 nt, Artificial Sequence
  Synthetic
accauuaagcacugcuguggaaa

SEQ ID NO: 25307 - RNA, 24 nt, Artificial Sequence
  Synthetic
aaccauuaagcacugcuguggaaa

SEQ ID NO: 25308 - RNA, 18 nt, Artificial Sequence
  Synthetic
uuuagugaccauuggaaa

SEQ ID NO: 25309 - RNA, 19 nt, Artificial Sequence
  Synthetic
cuuuagugaccauuggaaa

SEQ ID NO: 25310 - RNA, 20 nt, Artificial Sequence
  Synthetic
acuuuagugaccauuggaaa

SEQ ID NO: 25311 - RNA, 21 nt, Artificial Sequence
  Synthetic
uacuuuagugaccauuggaaa

SEQ ID NO: 25312 - RNA, 22 nt, Artificial Sequence
  Synthetic
auacuuuagugaccauuggaaa

SEQ ID NO: 25313 - RNA, 23 nt, Artificial Sequence
  Synthetic
aauacuuuagugaccauuggaaa

SEQ ID NO: 25314 - RNA, 24 nt, Artificial Sequence
  Synthetic
uaauacuuuagugaccauuggaaa

SEQ ID NO: 25315 - RNA, 18 nt, Artificial Sequence
  Synthetic
aggguaaagacuuggaaa

SEQ ID NO: 25316 - RNA, 19 nt, Artificial Sequence
  Synthetic
aaggguaaagacuuggaaa

SEQ ID NO: 25317 - RNA, 20 nt, Artificial Sequence
  Synthetic
aaaggguaaagacuuggaaa

SEQ ID NO: 25318 - RNA, 22 nt, Artificial Sequence
  Synthetic
agaaaggguaaagacuuggaaa

SEQ ID NO: 25319 - RNA, 23 nt, Artificial Sequence
  Synthetic
uagaaaggguaaagacuuggaaa

SEQ ID NO: 25320 - RNA, 24 nt, Artificial Sequence
  Synthetic
uuagaaaggguaaagacuuggaaa

SEQ ID NO: 25321 - RNA, 20 nt, Artificial Sequence
  Synthetic
uggaauacguggcuuggaaa

SEQ ID NO: 25322 - RNA, 18 nt, Artificial Sequence
  Synthetic
cagcccagaguuuggaaa

SEQ ID NO: 25323 - RNA, 19 nt, Artificial Sequence
  Synthetic
ccagcccagaguuuggaaa

SEQ ID NO: 25324 - RNA, 20 nt, Artificial Sequence
  Synthetic
uccagcccagaguuuggaaa

SEQ ID NO: 25325 - RNA, 21 nt, Artificial Sequence
  Synthetic
auccagcccagaguuuggaaa

SEQ ID NO: 25326 - RNA, 22 nt, Artificial Sequence
  Synthetic
cauccagcccagaguuuggaaa

SEQ ID NO: 25327 - RNA, 23 nt, Artificial Sequence
  Synthetic
ccauccagcccagaguuuggaaa

SEQ ID NO: 25328 - RNA, 24 nt, Artificial Sequence
  Synthetic
uccauccagcccagaguuuggaaa

SEQ ID NO: 25329 - RNA, 18 nt, Artificial Sequence
  Synthetic
ucacuagaacaaaugaaa

SEQ ID NO: 25330 - RNA, 19 nt, Artificial Sequence
  Synthetic
cucacuagaacaaaugaaa

SEQ ID NO: 25331 - RNA, 20 nt, Artificial Sequence
  Synthetic
acucacuagaacaaaugaaa

SEQ ID NO: 25332 - RNA, 21 nt, Artificial Sequence
  Synthetic
uacucacuagaacaaaugaaa

SEQ ID NO: 25333 - RNA, 23 nt, Artificial Sequence
  Synthetic
uguacucacuagaacaaaugaaa

SEQ ID NO: 25334 - RNA, 24 nt, Artificial Sequence
  Synthetic
auguacucacuagaacaaaugaaa

SEQ ID NO: 25335 - RNA, 21 nt, Artificial Sequence
  Synthetic
agacucauagaccaaaugaaa

SEQ ID NO: 25336 - RNA, 22 nt, Artificial Sequence
  Synthetic
uagacucauagaccaaaugaaa

SEQ ID NO: 25337 - RNA, 23 nt, Artificial Sequence
  Synthetic
auagacucauagaccaaaugaaa

SEQ ID NO: 25338 - RNA, 18 nt, Artificial Sequence
  Synthetic
cagcacaggauaaugaaa

SEQ ID NO: 25339 - RNA, 19 nt, Artificial Sequence
  Synthetic
acagcacaggauaaugaaa

SEQ ID NO: 25340 - RNA, 20 nt, Artificial Sequence
  Synthetic
aacagcacaggauaaugaaa

SEQ ID NO: 25341 - RNA, 21 nt, Artificial Sequence
  Synthetic
aaacagcacaggauaaugaaa

SEQ ID NO: 25342 - RNA, 22 nt, Artificial Sequence
  Synthetic
aaaacagcacaggauaaugaaa

SEQ ID NO: 25343 - RNA, 24 nt, Artificial Sequence
  Synthetic
agaaaacagcacaggauaaugaaa

SEQ ID NO: 25344 - RNA, 18 nt, Artificial Sequence
  Synthetic
uuuagucaauuaaugaaa

SEQ ID NO: 25345 - RNA, 19 nt, Artificial Sequence
  Synthetic
uuuuagucaauuaaugaaa

SEQ ID NO: 25346 - RNA, 20 nt, Artificial Sequence
  Synthetic
uuuuuagucaauuaaugaaa

SEQ ID NO: 25347 - RNA, 21 nt, Artificial Sequence
  Synthetic
uuuuuuagucaauuaaugaaa

SEQ ID NO: 25348 - RNA, 22 nt, Artificial Sequence
  Synthetic
auuuuuuagucaauuaaugaaa

SEQ ID NO: 25349 - RNA, 24 nt, Artificial Sequence
  Synthetic
ugauuuuuuagucaauuaaugaaa

SEQ ID NO: 25350 - RNA, 18 nt, Artificial Sequence
  Synthetic
aaacuguaccgcaugaaa

SEQ ID NO: 25351 - RNA, 19 nt, Artificial Sequence
  Synthetic
aaaacuguaccgcaugaaa

SEQ ID NO: 25352 - RNA, 20 nt, Artificial Sequence
  Synthetic
uaaaacuguaccgcaugaaa

SEQ ID NO: 25353 - RNA, 21 nt, Artificial Sequence
  Synthetic
uuaaaacuguaccgcaugaaa

SEQ ID NO: 25354 - RNA, 23 nt, Artificial Sequence
  Synthetic
uguuaaaacuguaccgcaugaaa

SEQ ID NO: 25355 - RNA, 24 nt, Artificial Sequence
  Synthetic
auguuaaaacuguaccgcaugaaa

SEQ ID NO: 25356 - RNA, 21 nt, Artificial Sequence
  Synthetic
agaagauaucaaaagaugaaa

SEQ ID NO: 25357 - RNA, 22 nt, Artificial Sequence
  Synthetic
aagaagauaucaaaagaugaaa

SEQ ID NO: 25358 - RNA, 18 nt, Artificial Sequence
  Synthetic
uucaucucuuagaugaaa

SEQ ID NO: 25359 - RNA, 19 nt, Artificial Sequence
  Synthetic
uuucaucucuuagaugaaa

SEQ ID NO: 25360 - RNA, 20 nt, Artificial Sequence
  Synthetic
uuuucaucucuuagaugaaa

SEQ ID NO: 25361 - RNA, 21 nt, Artificial Sequence
  Synthetic
uuuuucaucucuuagaugaaa

SEQ ID NO: 25362 - RNA, 22 nt, Artificial Sequence
  Synthetic
auuuuucaucucuuagaugaaa

SEQ ID NO: 25363 - RNA, 23 nt, Artificial Sequence
  Synthetic
uauuuuucaucucuuagaugaaa

SEQ ID NO: 25364 - RNA, 24 nt, Artificial Sequence
  Synthetic
uuauuuuucaucucuuagaugaaa

SEQ ID NO: 25365 - RNA, 18 nt, Artificial Sequence
  Synthetic
uuagggaugauuaugaaa

SEQ ID NO: 25366 - RNA, 19 nt, Artificial Sequence
  Synthetic
auuagggaugauuaugaaa

SEQ ID NO: 25367 - RNA, 20 nt, Artificial Sequence
  Synthetic
aauuagggaugauuaugaaa

SEQ ID NO: 25368 - RNA, 21 nt, Artificial Sequence
  Synthetic
uaauuagggaugauuaugaaa

SEQ ID NO: 25369 - RNA, 23 nt, Artificial Sequence
  Synthetic
aguaauuagggaugauuaugaaa

SEQ ID NO: 25370 - RNA, 24 nt, Artificial Sequence
  Synthetic
caguaauuagggaugauuaugaaa

SEQ ID NO: 25371 - RNA, 18 nt, Artificial Sequence
  Synthetic
caggaauuagcccugaaa

SEQ ID NO: 25372 - RNA, 20 nt, Artificial Sequence
  Synthetic
agcaggaauuagcccugaaa

SEQ ID NO: 25373 - RNA, 21 nt, Artificial Sequence
  Synthetic
aagcaggaauuagcccugaaa

SEQ ID NO: 25374 - RNA, 22 nt, Artificial Sequence
  Synthetic
uaagcaggaauuagcccugaaa

SEQ ID NO: 25375 - RNA, 23 nt, Artificial Sequence
  Synthetic
uuaagcaggaauuagcccugaaa

SEQ ID NO: 25376 - RNA, 24 nt, Artificial Sequence
  Synthetic
auuaagcaggaauuagcccugaaa

SEQ ID NO: 25377 - RNA, 18 nt, Artificial Sequence
  Synthetic
uguaagucaucccugaaa

SEQ ID NO: 25378 - RNA, 19 nt, Artificial Sequence
  Synthetic
cuguaagucaucccugaaa

SEQ ID NO: 25379 - RNA, 20 nt, Artificial Sequence
  Synthetic
ucuguaagucaucccugaaa

SEQ ID NO: 25380 - RNA, 21 nt, Artificial Sequence
  Synthetic
cucuguaagucaucccugaaa

SEQ ID NO: 25381 - RNA, 22 nt, Artificial Sequence
  Synthetic
ccucuguaagucaucccugaaa

SEQ ID NO: 25382 - RNA, 23 nt, Artificial Sequence
  Synthetic
cccucuguaagucaucccugaaa

SEQ ID NO: 25383 - RNA, 24 nt, Artificial Sequence
  Synthetic
ucccucuguaagucaucccugaaa

SEQ ID NO: 25384 - RNA, 18 nt, Artificial Sequence
  Synthetic
aguauuucaguccugaaa

SEQ ID NO: 25385 - RNA, 19 nt, Artificial Sequence
  Synthetic
aaguauuucaguccugaaa

SEQ ID NO: 25386 - RNA, 21 nt, Artificial Sequence
  Synthetic
agaaguauuucaguccugaaa

SEQ ID NO: 25387 - RNA, 22 nt, Artificial Sequence
  Synthetic
cagaaguauuucaguccugaaa

SEQ ID NO: 25388 - RNA, 23 nt, Artificial Sequence
  Synthetic
ucagaaguauuucaguccugaaa

SEQ ID NO: 25389 - RNA, 18 nt, Artificial Sequence
  Synthetic
aaauaacuaguccugaaa

SEQ ID NO: 25390 - RNA, 19 nt, Artificial Sequence
  Synthetic
aaaauaacuaguccugaaa

SEQ ID NO: 25391 - RNA, 20 nt, Artificial Sequence
  Synthetic
uaaaauaacuaguccugaaa

SEQ ID NO: 25392 - RNA, 21 nt, Artificial Sequence
  Synthetic
uuaaaauaacuaguccugaaa

SEQ ID NO: 25393 - RNA, 22 nt, Artificial Sequence
  Synthetic
uuuaaaauaacuaguccugaaa

SEQ ID NO: 25394 - RNA, 24 nt, Artificial Sequence
  Synthetic
aguuuaaaauaacuaguccugaaa

SEQ ID NO: 25395 - RNA, 18 nt, Artificial Sequence
  Synthetic
cuaauguacauucugaaa

SEQ ID NO: 25396 - RNA, 19 nt, Artificial Sequence
  Synthetic
ucuaauguacauucugaaa

SEQ ID NO: 25397 - RNA, 20 nt, Artificial Sequence
  Synthetic
uucuaauguacauucugaaa

SEQ ID NO: 25398 - RNA, 21 nt, Artificial Sequence
  Synthetic
cuucuaauguacauucugaaa

SEQ ID NO: 25399 - RNA, 22 nt, Artificial Sequence
  Synthetic
acuucuaauguacauucugaaa

SEQ ID NO: 25400 - RNA, 23 nt, Artificial Sequence
  Synthetic
aacuucuaauguacauucugaaa

SEQ ID NO: 25401 - RNA, 24 nt, Artificial Sequence
  Synthetic
aaacuucuaauguacauucugaaa

SEQ ID NO: 25402 - RNA, 18 nt, Artificial Sequence
  Synthetic
agggaaggacuucugaaa

SEQ ID NO: 25403 - RNA, 19 nt, Artificial Sequence
  Synthetic
aagggaaggacuucugaaa

SEQ ID NO: 25404 - RNA, 20 nt, Artificial Sequence
  Synthetic
caagggaaggacuucugaaa

SEQ ID NO: 25405 - RNA, 21 nt, Artificial Sequence
  Synthetic
ccaagggaaggacuucugaaa

SEQ ID NO: 25406 - RNA, 22 nt, Artificial Sequence
  Synthetic
accaagggaaggacuucugaaa

SEQ ID NO: 25407 - RNA, 23 nt, Artificial Sequence
  Synthetic
aaccaagggaaggacuucugaaa

SEQ ID NO: 25408 - RNA, 24 nt, Artificial Sequence
  Synthetic
aaaccaagggaaggacuucugaaa

SEQ ID NO: 25409 - RNA, 19 nt, Artificial Sequence
  Synthetic
agaguguuaccuucugaaa

SEQ ID NO: 25410 - RNA, 20 nt, Artificial Sequence
  Synthetic
uagaguguuaccuucugaaa

SEQ ID NO: 25411 - RNA, 21 nt, Artificial Sequence
  Synthetic
auagaguguuaccuucugaaa

SEQ ID NO: 25412 - RNA, 22 nt, Artificial Sequence
  Synthetic
uauagaguguuaccuucugaaa

SEQ ID NO: 25413 - RNA, 24 nt, Artificial Sequence
  Synthetic
uguauagaguguuaccuucugaaa

SEQ ID NO: 25414 - RNA, 18 nt, Artificial Sequence
  Synthetic
uuugcaaagcaagugaaa

SEQ ID NO: 25415 - RNA, 19 nt, Artificial Sequence
  Synthetic
auuugcaaagcaagugaaa

SEQ ID NO: 25416 - RNA, 21 nt, Artificial Sequence
  Synthetic
ugauuugcaaagcaagugaaa

SEQ ID NO: 25417 - RNA, 22 nt, Artificial Sequence
  Synthetic
cugauuugcaaagcaagugaaa

SEQ ID NO: 25418 - RNA, 23 nt, Artificial Sequence
  Synthetic
acugauuugcaaagcaagugaaa

SEQ ID NO: 25419 - RNA, 24 nt, Artificial Sequence
  Synthetic
aacugauuugcaaagcaagugaaa

SEQ ID NO: 25420 - RNA, 18 nt, Artificial Sequence
  Synthetic
acuguguguggagugaaa

SEQ ID NO: 25421 - RNA, 20 nt, Artificial Sequence
  Synthetic
agacuguguguggagugaaa

SEQ ID NO: 25422 - RNA, 21 nt, Artificial Sequence
  Synthetic
cagacuguguguggagugaaa

SEQ ID NO: 25423 - RNA, 23 nt, Artificial Sequence
  Synthetic
ugcagacuguguguggagugaaa

SEQ ID NO: 25424 - RNA, 24 nt, Artificial Sequence
  Synthetic
augcagacuguguguggagugaaa

SEQ ID NO: 25425 - RNA, 19 nt, Artificial Sequence
  Synthetic
cgaggacauuaaggugaaa

SEQ ID NO: 25426 - RNA, 21 nt, Artificial Sequence
  Synthetic
ugcgaggacauuaaggugaaa

SEQ ID NO: 25427 - RNA, 23 nt, Artificial Sequence
  Synthetic
agugcgaggacauuaaggugaaa

SEQ ID NO: 25428 - RNA, 24 nt, Artificial Sequence
  Synthetic
aagugcgaggacauuaaggugaaa

SEQ ID NO: 25429 - RNA, 21 nt, Artificial Sequence
  Synthetic
caaggcuuugauagggugaaa

SEQ ID NO: 25430 - RNA, 22 nt, Artificial Sequence
  Synthetic
acaaggcuuugauagggugaaa

SEQ ID NO: 25431 - RNA, 23 nt, Artificial Sequence
  Synthetic
aacaaggcuuugauagggugaaa

SEQ ID NO: 25432 - RNA, 24 nt, Artificial Sequence
  Synthetic
aaacaaggcuuugauagggugaaa

SEQ ID NO: 25433 - RNA, 18 nt, Artificial Sequence
  Synthetic
aauaaugggguggugaaa

SEQ ID NO: 25434 - RNA, 19 nt, Artificial Sequence
  Synthetic
uaauaaugggguggugaaa

SEQ ID NO: 25435 - RNA, 21 nt, Artificial Sequence
  Synthetic
uguaauaaugggguggugaaa

SEQ ID NO: 25436 - RNA, 22 nt, Artificial Sequence
  Synthetic
cuguaauaaugggguggugaaa

SEQ ID NO: 25437 - RNA, 18 nt, Artificial Sequence
  Synthetic
uaaucuuccacugugaaa

SEQ ID NO: 25438 - RNA, 19 nt, Artificial Sequence
  Synthetic
auaaucuuccacugugaaa

SEQ ID NO: 25439 - RNA, 20 nt, Artificial Sequence
  Synthetic
aauaaucuuccacugugaaa

SEQ ID NO: 25440 - RNA, 21 nt, Artificial Sequence
  Synthetic
caauaaucuuccacugugaaa

SEQ ID NO: 25441 - RNA, 22 nt, Artificial Sequence
  Synthetic
ucaauaaucuuccacugugaaa

SEQ ID NO: 25442 - RNA, 23 nt, Artificial Sequence
  Synthetic
cucaauaaucuuccacugugaaa

SEQ ID NO: 25443 - RNA, 24 nt, Artificial Sequence
  Synthetic
ucucaauaaucuuccacugugaaa

SEQ ID NO: 25444 - RNA, 18 nt, Artificial Sequence
  Synthetic
ugucugcaggcugugaaa

SEQ ID NO: 25445 - RNA, 19 nt, Artificial Sequence
  Synthetic
augucugcaggcugugaaa

SEQ ID NO: 25446 - RNA, 20 nt, Artificial Sequence
  Synthetic
aaugucugcaggcugugaaa

SEQ ID NO: 25447 - RNA, 21 nt, Artificial Sequence
  Synthetic
aaaugucugcaggcugugaaa

SEQ ID NO: 25448 - RNA, 22 nt, Artificial Sequence
  Synthetic
aaaaugucugcaggcugugaaa

SEQ ID NO: 25449 - RNA, 23 nt, Artificial Sequence
  Synthetic
uaaaaugucugcaggcugugaaa

SEQ ID NO: 25450 - RNA, 24 nt, Artificial Sequence
  Synthetic
uuaaaaugucugcaggcugugaaa

SEQ ID NO: 25451 - RNA, 18 nt, Artificial Sequence
  Synthetic
ugucuaaagagugugaaa

SEQ ID NO: 25452 - RNA, 19 nt, Artificial Sequence
  Synthetic
uugucuaaagagugugaaa

SEQ ID NO: 25453 - RNA, 21 nt, Artificial Sequence
  Synthetic
uguugucuaaagagugugaaa

SEQ ID NO: 25454 - RNA, 22 nt, Artificial Sequence
  Synthetic
uuguugucuaaagagugugaaa

SEQ ID NO: 25455 - RNA, 23 nt, Artificial Sequence
  Synthetic
auuguugucuaaagagugugaaa

SEQ ID NO: 25456 - RNA, 18 nt, Artificial Sequence
  Synthetic
aguggauaguuauugaaa

SEQ ID NO: 25457 - RNA, 19 nt, Artificial Sequence
  Synthetic
caguggauaguuauugaaa

SEQ ID NO: 25458 - RNA, 20 nt, Artificial Sequence
  Synthetic
ucaguggauaguuauugaaa

SEQ ID NO: 25459 - RNA, 21 nt, Artificial Sequence
  Synthetic
cucaguggauaguuauugaaa

SEQ ID NO: 25460 - RNA, 22 nt, Artificial Sequence
  Synthetic
acucaguggauaguuauugaaa

SEQ ID NO: 25461 - RNA, 23 nt, Artificial Sequence
  Synthetic
uacucaguggauaguuauugaaa

SEQ ID NO: 25462 - RNA, 24 nt, Artificial Sequence
  Synthetic
auacucaguggauaguuauugaaa

SEQ ID NO: 25463 - RNA, 21 nt, Artificial Sequence
  Synthetic
aacaauggaaaauccuugaaa

SEQ ID NO: 25464 - RNA, 23 nt, Artificial Sequence
  Synthetic
agaacaauggaaaauccuugaaa

SEQ ID NO: 25465 - RNA, 24 nt, Artificial Sequence
  Synthetic
aagaacaauggaaaauccuugaaa

SEQ ID NO: 25466 - RNA, 18 nt, Artificial Sequence
  Synthetic
uuuaugugaggcuugaaa

SEQ ID NO: 25467 - RNA, 19 nt, Artificial Sequence
  Synthetic
uuuuaugugaggcuugaaa

SEQ ID NO: 25468 - RNA, 20 nt, Artificial Sequence
  Synthetic
auuuuaugugaggcuugaaa

SEQ ID NO: 25469 - RNA, 21 nt, Artificial Sequence
  Synthetic
aauuuuaugugaggcuugaaa

SEQ ID NO: 25470 - RNA, 22 nt, Artificial Sequence
  Synthetic
aaauuuuaugugaggcuugaaa

SEQ ID NO: 25471 - RNA, 23 nt, Artificial Sequence
  Synthetic
aaaauuuuaugugaggcuugaaa

SEQ ID NO: 25472 - RNA, 24 nt, Artificial Sequence
  Synthetic
uaaaauuuuaugugaggcuugaaa

SEQ ID NO: 25473 - RNA, 18 nt, Artificial Sequence
  Synthetic
ugcuaugauaaguugaaa

SEQ ID NO: 25474 - RNA, 19 nt, Artificial Sequence
  Synthetic
cugcuaugauaaguugaaa

SEQ ID NO: 25475 - RNA, 20 nt, Artificial Sequence
  Synthetic
ccugcuaugauaaguugaaa

SEQ ID NO: 25476 - RNA, 22 nt, Artificial Sequence
  Synthetic
agccugcuaugauaaguugaaa

SEQ ID NO: 25477 - RNA, 23 nt, Artificial Sequence
  Synthetic
uagccugcuaugauaaguugaaa

SEQ ID NO: 25478 - RNA, 18 nt, Artificial Sequence
  Synthetic
ccaagucuccuguugaaa

SEQ ID NO: 25479 - RNA, 19 nt, Artificial Sequence
  Synthetic
cccaagucuccuguugaaa

SEQ ID NO: 25480 - RNA, 21 nt, Artificial Sequence
  Synthetic
ugcccaagucuccuguugaaa

SEQ ID NO: 25481 - RNA, 22 nt, Artificial Sequence
  Synthetic
cugcccaagucuccuguugaaa

SEQ ID NO: 25482 - RNA, 23 nt, Artificial Sequence
  Synthetic
ucugcccaagucuccuguugaaa

SEQ ID NO: 25483 - RNA, 24 nt, Artificial Sequence
  Synthetic
cucugcccaagucuccuguugaaa

SEQ ID NO: 25484 - RNA, 21 nt, Artificial Sequence
  Synthetic
uuaagagcagaaauuuugaaa

SEQ ID NO: 25485 - RNA, 22 nt, Artificial Sequence
  Synthetic
auuaagagcagaaauuuugaaa

SEQ ID NO: 25486 - RNA, 23 nt, Artificial Sequence
  Synthetic
cauuaagagcagaaauuuugaaa

SEQ ID NO: 25487 - RNA, 24 nt, Artificial Sequence
  Synthetic
ucauuaagagcagaaauuuugaaa

SEQ ID NO: 25488 - RNA, 21 nt, Artificial Sequence
  Synthetic
uuauccaaaaauauuuugaaa

SEQ ID NO: 25489 - RNA, 22 nt, Artificial Sequence
  Synthetic
uuuauccaaaaauauuuugaaa

SEQ ID NO: 25490 - RNA, 23 nt, Artificial Sequence
  Synthetic
uuuuauccaaaaauauuuugaaa

SEQ ID NO: 25491 - RNA, 24 nt, Artificial Sequence
  Synthetic
uuuuuauccaaaaauauuuugaaa

SEQ ID NO: 25492 - RNA, 18 nt, Artificial Sequence
  Synthetic
caaaguuugcuuuugaaa

SEQ ID NO: 25493 - RNA, 19 nt, Artificial Sequence
  Synthetic
ccaaaguuugcuuuugaaa

SEQ ID NO: 25494 - RNA, 21 nt, Artificial Sequence
  Synthetic
ugccaaaguuugcuuuugaaa

SEQ ID NO: 25495 - RNA, 22 nt, Artificial Sequence
  Synthetic
uugccaaaguuugcuuuugaaa

SEQ ID NO: 25496 - RNA, 23 nt, Artificial Sequence
  Synthetic
uuugccaaaguuugcuuuugaaa

SEQ ID NO: 25497 - RNA, 24 nt, Artificial Sequence
  Synthetic
uuuugccaaaguuugcuuuugaaa

SEQ ID NO: 25498 - RNA, 18 nt, Artificial Sequence
  Synthetic
uuaaggaauacaaauaaa

SEQ ID NO: 25499 - RNA, 19 nt, Artificial Sequence
  Synthetic
cuuaaggaauacaaauaaa

SEQ ID NO: 25500 - RNA, 20 nt, Artificial Sequence
  Synthetic
ccuuaaggaauacaaauaaa

SEQ ID NO: 25501 - RNA, 21 nt, Artificial Sequence
  Synthetic
uccuuaaggaauacaaauaaa

SEQ ID NO: 25502 - RNA, 22 nt, Artificial Sequence
  Synthetic
auccuuaaggaauacaaauaaa

SEQ ID NO: 25503 - RNA, 23 nt, Artificial Sequence
  Synthetic
cauccuuaaggaauacaaauaaa

SEQ ID NO: 25504 - RNA, 18 nt, Artificial Sequence
  Synthetic
aguauaguagcaaauaaa

SEQ ID NO: 25505 - RNA, 19 nt, Artificial Sequence
  Synthetic
aaguauaguagcaaauaaa

SEQ ID NO: 25506 - RNA, 20 nt, Artificial Sequence
  Synthetic
aaaguauaguagcaaauaaa

SEQ ID NO: 25507 - RNA, 22 nt, Artificial Sequence
  Synthetic
agaaaguauaguagcaaauaaa

SEQ ID NO: 25508 - RNA, 23 nt, Artificial Sequence
  Synthetic
aagaaaguauaguagcaaauaaa

SEQ ID NO: 25509 - RNA, 24 nt, Artificial Sequence
  Synthetic
aaagaaaguauaguagcaaauaaa

SEQ ID NO: 25510 - RNA, 18 nt, Artificial Sequence
  Synthetic
aguagccaaucaaauaaa

SEQ ID NO: 25511 - RNA, 19 nt, Artificial Sequence
  Synthetic
aaguagccaaucaaauaaa

SEQ ID NO: 25512 - RNA, 20 nt, Artificial Sequence
  Synthetic
uaaguagccaaucaaauaaa

SEQ ID NO: 25513 - RNA, 21 nt, Artificial Sequence
  Synthetic
uuaaguagccaaucaaauaaa

SEQ ID NO: 25514 - RNA, 22 nt, Artificial Sequence
  Synthetic
uuuaaguagccaaucaaauaaa

SEQ ID NO: 25515 - RNA, 23 nt, Artificial Sequence
  Synthetic
cuuuaaguagccaaucaaauaaa

SEQ ID NO: 25516 - RNA, 24 nt, Artificial Sequence
  Synthetic
ucuuuaaguagccaaucaaauaaa

SEQ ID NO: 25517 - RNA, 18 nt, Artificial Sequence
  Synthetic
cuuccacagggaaauaaa

SEQ ID NO: 25518 - RNA, 19 nt, Artificial Sequence
  Synthetic
ucuuccacagggaaauaaa

SEQ ID NO: 25519 - RNA, 20 nt, Artificial Sequence
  Synthetic
uucuuccacagggaaauaaa

SEQ ID NO: 25520 - RNA, 22 nt, Artificial Sequence
  Synthetic
uguucuuccacagggaaauaaa

SEQ ID NO: 25521 - RNA, 23 nt, Artificial Sequence
  Synthetic
uuguucuuccacagggaaauaaa

SEQ ID NO: 25522 - RNA, 21 nt, Artificial Sequence
  Synthetic
ccaauauaaauuggaaauaaa

SEQ ID NO: 25523 - RNA, 22 nt, Artificial Sequence
  Synthetic
uccaauauaaauuggaaauaaa

SEQ ID NO: 25524 - RNA, 23 nt, Artificial Sequence
  Synthetic
uuccaauauaaauuggaaauaaa

SEQ ID NO: 25525 - RNA, 24 nt, Artificial Sequence
  Synthetic
uuuccaauauaaauuggaaauaaa

SEQ ID NO: 25526 - RNA, 18 nt, Artificial Sequence
  Synthetic
aagagacauagcaauaaa

SEQ ID NO: 25527 - RNA, 19 nt, Artificial Sequence
  Synthetic
uaagagacauagcaauaaa

SEQ ID NO: 25528 - RNA, 20 nt, Artificial Sequence
  Synthetic
uuaagagacauagcaauaaa

SEQ ID NO: 25529 - RNA, 21 nt, Artificial Sequence
  Synthetic
uuuaagagacauagcaauaaa

SEQ ID NO: 25530 - RNA, 22 nt, Artificial Sequence
  Synthetic
cuuuaagagacauagcaauaaa

SEQ ID NO: 25531 - RNA, 23 nt, Artificial Sequence
  Synthetic
acuuuaagagacauagcaauaaa

SEQ ID NO: 25532 - RNA, 24 nt, Artificial Sequence
  Synthetic
uacuuuaagagacauagcaauaaa

SEQ ID NO: 25533 - RNA, 18 nt, Artificial Sequence
  Synthetic
ucauucguugagaauaaa

SEQ ID NO: 25534 - RNA, 19 nt, Artificial Sequence
  Synthetic
uucauucguugagaauaaa

SEQ ID NO: 25535 - RNA, 20 nt, Artificial Sequence
  Synthetic
auucauucguugagaauaaa

SEQ ID NO: 25536 - RNA, 21 nt, Artificial Sequence
  Synthetic
aauucauucguugagaauaaa

SEQ ID NO: 25537 - RNA, 22 nt, Artificial Sequence
  Synthetic
uaauucauucguugagaauaaa

SEQ ID NO: 25538 - RNA, 23 nt, Artificial Sequence
  Synthetic
auaauucauucguugagaauaaa

SEQ ID NO: 25539 - RNA, 21 nt, Artificial Sequence
  Synthetic
uagacauuaguaaggaauaaa

SEQ ID NO: 25540 - RNA, 23 nt, Artificial Sequence
  Synthetic
cguagacauuaguaaggaauaaa

SEQ ID NO: 25541 - RNA, 24 nt, Artificial Sequence
  Synthetic
ucguagacauuaguaaggaauaaa

SEQ ID NO: 25542 - RNA, 18 nt, Artificial Sequence
  Synthetic
cagaucuuucugaauaaa

SEQ ID NO: 25543 - RNA, 19 nt, Artificial Sequence
  Synthetic
acagaucuuucugaauaaa

SEQ ID NO: 25544 - RNA, 20 nt, Artificial Sequence
  Synthetic
cacagaucuuucugaauaaa

SEQ ID NO: 25545 - RNA, 21 nt, Artificial Sequence
  Synthetic
ucacagaucuuucugaauaaa

SEQ ID NO: 25546 - RNA, 22 nt, Artificial Sequence
  Synthetic
uucacagaucuuucugaauaaa

SEQ ID NO: 25547 - RNA, 23 nt, Artificial Sequence
  Synthetic
cuucacagaucuuucugaauaaa

SEQ ID NO: 25548 - RNA, 21 nt, Artificial Sequence
  Synthetic
aaucuugaggaaacuaauaaa

SEQ ID NO: 25549 - RNA, 22 nt, Artificial Sequence
  Synthetic
aaaucuugaggaaacuaauaaa

SEQ ID NO: 25550 - RNA, 23 nt, Artificial Sequence
  Synthetic
uaaaucuugaggaaacuaauaaa

SEQ ID NO: 25551 - RNA, 24 nt, Artificial Sequence
  Synthetic
auaaaucuugaggaaacuaauaaa

SEQ ID NO: 25552 - RNA, 18 nt, Artificial Sequence
  Synthetic
aauaaucacccuaauaaa

SEQ ID NO: 25553 - RNA, 19 nt, Artificial Sequence
  Synthetic
aaauaaucacccuaauaaa

SEQ ID NO: 25554 - RNA, 20 nt, Artificial Sequence
  Synthetic
aaaauaaucacccuaauaaa

SEQ ID NO: 25555 - RNA, 21 nt, Artificial Sequence
  Synthetic
aaaaauaaucacccuaauaaa

SEQ ID NO: 25556 - RNA, 23 nt, Artificial Sequence
  Synthetic
agaaaaauaaucacccuaauaaa

SEQ ID NO: 25557 - RNA, 24 nt, Artificial Sequence
  Synthetic
aagaaaaauaaucacccuaauaaa

SEQ ID NO: 25558 - RNA, 18 nt, Artificial Sequence
  Synthetic
uuccuuguagcuaauaaa

SEQ ID NO: 25559 - RNA, 19 nt, Artificial Sequence
  Synthetic
auuccuuguagcuaauaaa

SEQ ID NO: 25560 - RNA, 21 nt, Artificial Sequence
  Synthetic
agauuccuuguagcuaauaaa

SEQ ID NO: 25561 - RNA, 22 nt, Artificial Sequence
  Synthetic
uagauuccuuguagcuaauaaa

SEQ ID NO: 25562 - RNA, 23 nt, Artificial Sequence
  Synthetic
auagauuccuuguagcuaauaaa

SEQ ID NO: 25563 - RNA, 24 nt, Artificial Sequence
  Synthetic
aauagauuccuuguagcuaauaaa

SEQ ID NO: 25564 - RNA, 21 nt, Artificial Sequence
  Synthetic
cuaaacuaaagaaguaauaaa

SEQ ID NO: 25565 - RNA, 22 nt, Artificial Sequence
  Synthetic
ccuaaacuaaagaaguaauaaa

SEQ ID NO: 25566 - RNA, 23 nt, Artificial Sequence
  Synthetic
accuaaacuaaagaaguaauaaa

SEQ ID NO: 25567 - RNA, 18 nt, Artificial Sequence
  Synthetic
aaguggacagcccauaaa

SEQ ID NO: 25568 - RNA, 19 nt, Artificial Sequence
  Synthetic
uaaguggacagcccauaaa

SEQ ID NO: 25569 - RNA, 21 nt, Artificial Sequence
  Synthetic
aguaaguggacagcccauaaa

SEQ ID NO: 25570 - RNA, 18 nt, Artificial Sequence
  Synthetic
aaagcaagagagcauaaa

SEQ ID NO: 25571 - RNA, 21 nt, Artificial Sequence
  Synthetic
aggaaagcaagagagcauaaa

SEQ ID NO: 25572 - RNA, 22 nt, Artificial Sequence
  Synthetic
aaggaaagcaagagagcauaaa

SEQ ID NO: 25573 - RNA, 23 nt, Artificial Sequence
  Synthetic
caaggaaagcaagagagcauaaa

SEQ ID NO: 25574 - RNA, 24 nt, Artificial Sequence
  Synthetic
acaaggaaagcaagagagcauaaa

SEQ ID NO: 25575 - RNA, 19 nt, Artificial Sequence
  Synthetic
agagccagcuaggcauaaa

SEQ ID NO: 25576 - RNA, 20 nt, Artificial Sequence
  Synthetic
aagagccagcuaggcauaaa

SEQ ID NO: 25577 - RNA, 21 nt, Artificial Sequence
  Synthetic
uaagagccagcuaggcauaaa

SEQ ID NO: 25578 - RNA, 22 nt, Artificial Sequence
  Synthetic
auaagagccagcuaggcauaaa

SEQ ID NO: 25579 - RNA, 23 nt, Artificial Sequence
  Synthetic
aauaagagccagcuaggcauaaa

SEQ ID NO: 25580 - RNA, 19 nt, Artificial Sequence
  Synthetic
aggaacaggcgaucauaaa

SEQ ID NO: 25581 - RNA, 22 nt, Artificial Sequence
  Synthetic
uggaggaacaggcgaucauaaa

SEQ ID NO: 25582 - RNA, 23 nt, Artificial Sequence
  Synthetic
cuggaggaacaggcgaucauaaa

SEQ ID NO: 25583 - RNA, 18 nt, Artificial Sequence
  Synthetic
acggagagaauucauaaa

SEQ ID NO: 25584 - RNA, 19 nt, Artificial Sequence
  Synthetic
uacggagagaauucauaaa

SEQ ID NO: 25585 - RNA, 20 nt, Artificial Sequence
  Synthetic
auacggagagaauucauaaa

SEQ ID NO: 25586 - RNA, 21 nt, Artificial Sequence
  Synthetic
uauacggagagaauucauaaa

SEQ ID NO: 25587 - RNA, 22 nt, Artificial Sequence
  Synthetic
auauacggagagaauucauaaa

SEQ ID NO: 25588 - RNA, 23 nt, Artificial Sequence
  Synthetic
uauauacggagagaauucauaaa

SEQ ID NO: 25589 - RNA, 24 nt, Artificial Sequence
  Synthetic
auauauacggagagaauucauaaa

SEQ ID NO: 25590 - RNA, 19 nt, Artificial Sequence
  Synthetic
uggcuagaugcaagauaaa

SEQ ID NO: 25591 - RNA, 20 nt, Artificial Sequence
  Synthetic
cuggcuagaugcaagauaaa

SEQ ID NO: 25592 - RNA, 21 nt, Artificial Sequence
  Synthetic
acuggcuagaugcaagauaaa

SEQ ID NO: 25593 - RNA, 22 nt, Artificial Sequence
  Synthetic
uacuggcuagaugcaagauaaa

SEQ ID NO: 25594 - RNA, 23 nt, Artificial Sequence
  Synthetic
auacuggcuagaugcaagauaaa

SEQ ID NO: 25595 - RNA, 24 nt, Artificial Sequence
  Synthetic
aauacuggcuagaugcaagauaaa

SEQ ID NO: 25596 - RNA, 21 nt, Artificial Sequence
  Synthetic
uaaagagagagcccagauaaa

SEQ ID NO: 25597 - RNA, 22 nt, Artificial Sequence
  Synthetic
uuaaagagagagcccagauaaa

SEQ ID NO: 25598 - RNA, 23 nt, Artificial Sequence
  Synthetic
auuaaagagagagcccagauaaa

SEQ ID NO: 25599 - RNA, 24 nt, Artificial Sequence
  Synthetic
aauuaaagagagagcccagauaaa

SEQ ID NO: 25600 - RNA, 18 nt, Artificial Sequence
  Synthetic
caaaagcauauagauaaa

SEQ ID NO: 25601 - RNA, 19 nt, Artificial Sequence
  Synthetic
ccaaaagcauauagauaaa

SEQ ID NO: 25602 - RNA, 21 nt, Artificial Sequence
  Synthetic
ugccaaaagcauauagauaaa

SEQ ID NO: 25603 - RNA, 22 nt, Artificial Sequence
  Synthetic
uugccaaaagcauauagauaaa

SEQ ID NO: 25604 - RNA, 23 nt, Artificial Sequence
  Synthetic
uuugccaaaagcauauagauaaa

SEQ ID NO: 25605 - RNA, 24 nt, Artificial Sequence
  Synthetic
uuuugccaaaagcauauagauaaa

SEQ ID NO: 25606 - RNA, 19 nt, Artificial Sequence
  Synthetic
agauuugaaguaggauaaa

SEQ ID NO: 25607 - RNA, 21 nt, Artificial Sequence
  Synthetic
agagauuugaaguaggauaaa

SEQ ID NO: 25608 - RNA, 22 nt, Artificial Sequence
  Synthetic
uagagauuugaaguaggauaaa

SEQ ID NO: 25609 - RNA, 23 nt, Artificial Sequence
  Synthetic
auagagauuugaaguaggauaaa

SEQ ID NO: 25610 - RNA, 24 nt, Artificial Sequence
  Synthetic
uauagagauuugaaguaggauaaa

SEQ ID NO: 25611 - RNA, 18 nt, Artificial Sequence
  Synthetic
uguaugaucagggauaaa

SEQ ID NO: 25612 - RNA, 19 nt, Artificial Sequence
  Synthetic
cuguaugaucagggauaaa

SEQ ID NO: 25613 - RNA, 21 nt, Artificial Sequence
  Synthetic
ugcuguaugaucagggauaaa

SEQ ID NO: 25614 - RNA, 23 nt, Artificial Sequence
  Synthetic
agugcuguaugaucagggauaaa

SEQ ID NO: 25615 - RNA, 18 nt, Artificial Sequence
  Synthetic
acuucuggggaugauaaa

SEQ ID NO: 25616 - RNA, 20 nt, Artificial Sequence
  Synthetic
ugacuucuggggaugauaaa

SEQ ID NO: 25617 - RNA, 21 nt, Artificial Sequence
  Synthetic
augacuucuggggaugauaaa

SEQ ID NO: 25618 - RNA, 22 nt, Artificial Sequence
  Synthetic
caugacuucuggggaugauaaa

SEQ ID NO: 25619 - RNA, 23 nt, Artificial Sequence
  Synthetic
acaugacuucuggggaugauaaa

SEQ ID NO: 25620 - RNA, 24 nt, Artificial Sequence
  Synthetic
uacaugacuucuggggaugauaaa

SEQ ID NO: 25621 - RNA, 18 nt, Artificial Sequence
  Synthetic
acaaucuuuccugauaaa

SEQ ID NO: 25622 - RNA, 19 nt, Artificial Sequence
  Synthetic
aacaaucuuuccugauaaa

SEQ ID NO: 25623 - RNA, 20 nt, Artificial Sequence
  Synthetic
uaacaaucuuuccugauaaa

SEQ ID NO: 25624 - RNA, 21 nt, Artificial Sequence
  Synthetic
uuaacaaucuuuccugauaaa

SEQ ID NO: 25625 - RNA, 22 nt, Artificial Sequence
  Synthetic
cuuaacaaucuuuccugauaaa

SEQ ID NO: 25626 - RNA, 23 nt, Artificial Sequence
  Synthetic
ucuuaacaaucuuuccugauaaa

SEQ ID NO: 25627 - RNA, 24 nt, Artificial Sequence
  Synthetic
cucuuaacaaucuuuccugauaaa

SEQ ID NO: 25628 - RNA, 19 nt, Artificial Sequence
  Synthetic
aggcauuuggcuugauaaa

SEQ ID NO: 25629 - RNA, 20 nt, Artificial Sequence
  Synthetic
caggcauuuggcuugauaaa

SEQ ID NO: 25630 - RNA, 21 nt, Artificial Sequence
  Synthetic
ccaggcauuuggcuugauaaa

SEQ ID NO: 25631 - RNA, 22 nt, Artificial Sequence
  Synthetic
cccaggcauuuggcuugauaaa

SEQ ID NO: 25632 - RNA, 23 nt, Artificial Sequence
  Synthetic
acccaggcauuuggcuugauaaa

SEQ ID NO: 25633 - RNA, 24 nt, Artificial Sequence
  Synthetic
cacccaggcauuuggcuugauaaa

SEQ ID NO: 25634 - RNA, 18 nt, Artificial Sequence
  Synthetic
acuguaaugcuugauaaa

SEQ ID NO: 25635 - RNA, 19 nt, Artificial Sequence
  Synthetic
aacuguaaugcuugauaaa

SEQ ID NO: 25636 - RNA, 20 nt, Artificial Sequence
  Synthetic
aaacuguaaugcuugauaaa

SEQ ID NO: 25637 - RNA, 22 nt, Artificial Sequence
  Synthetic
agaaacuguaaugcuugauaaa

SEQ ID NO: 25638 - RNA, 23 nt, Artificial Sequence
  Synthetic
uagaaacuguaaugcuugauaaa

SEQ ID NO: 25639 - RNA, 24 nt, Artificial Sequence
  Synthetic
auagaaacuguaaugcuugauaaa

SEQ ID NO: 25640 - RNA, 21 nt, Artificial Sequence
  Synthetic
auuaucaugucuuuugauaaa

SEQ ID NO: 25641 - RNA, 23 nt, Artificial Sequence
  Synthetic
ugauuaucaugucuuuugauaaa

SEQ ID NO: 25642 - RNA, 24 nt, Artificial Sequence
  Synthetic
augauuaucaugucuuuugauaaa

SEQ ID NO: 25643 - RNA, 21 nt, Artificial Sequence
  Synthetic
ugagucccauaaaaauauaaa

SEQ ID NO: 25644 - RNA, 23 nt, Artificial Sequence
  Synthetic
ugugagucccauaaaaauauaaa

SEQ ID NO: 25645 - RNA, 24 nt, Artificial Sequence
  Synthetic
uugugagucccauaaaaauauaaa

SEQ ID NO: 25646 - RNA, 18 nt, Artificial Sequence
  Synthetic
aagggcugacaauauaaa

SEQ ID NO: 25647 - RNA, 19 nt, Artificial Sequence
  Synthetic
aaagggcugacaauauaaa

SEQ ID NO: 25648 - RNA, 20 nt, Artificial Sequence
  Synthetic
caaagggcugacaauauaaa

SEQ ID NO: 25649 - RNA, 21 nt, Artificial Sequence
  Synthetic
acaaagggcugacaauauaaa

SEQ ID NO: 25650 - RNA, 22 nt, Artificial Sequence
  Synthetic
aacaaagggcugacaauauaaa

SEQ ID NO: 25651 - RNA, 23 nt, Artificial Sequence
  Synthetic
uaacaaagggcugacaauauaaa

SEQ ID NO: 25652 - RNA, 24 nt, Artificial Sequence
  Synthetic
cuaacaaagggcugacaauauaaa

SEQ ID NO: 25653 - RNA, 21 nt, Artificial Sequence
  Synthetic
cuaauagaaacagaauauaaa

SEQ ID NO: 25654 - RNA, 22 nt, Artificial Sequence
  Synthetic
ccuaauagaaacagaauauaaa

SEQ ID NO: 25655 - RNA, 23 nt, Artificial Sequence
  Synthetic
uccuaauagaaacagaauauaaa

SEQ ID NO: 25656 - RNA, 24 nt, Artificial Sequence
  Synthetic
auccuaauagaaacagaauauaaa

SEQ ID NO: 25657 - RNA, 18 nt, Artificial Sequence
  Synthetic
aggaaacacauauauaaa

SEQ ID NO: 25658 - RNA, 19 nt, Artificial Sequence
  Synthetic
aaggaaacacauauauaaa

SEQ ID NO: 25659 - RNA, 22 nt, Artificial Sequence
  Synthetic
aggaaggaaacacauauauaaa

SEQ ID NO: 25660 - RNA, 23 nt, Artificial Sequence
  Synthetic
aaggaaggaaacacauauauaaa

SEQ ID NO: 25661 - RNA, 24 nt, Artificial Sequence
  Synthetic
caaggaaggaaacacauauauaaa

SEQ ID NO: 25662 - RNA, 18 nt, Artificial Sequence
  Synthetic
cuuugaaauuacuauaaa

SEQ ID NO: 25663 - RNA, 19 nt, Artificial Sequence
  Synthetic
acuuugaaauuacuauaaa

SEQ ID NO: 25664 - RNA, 21 nt, Artificial Sequence
  Synthetic
ugacuuugaaauuacuauaaa

SEQ ID NO: 25665 - RNA, 22 nt, Artificial Sequence
  Synthetic
uugacuuugaaauuacuauaaa

SEQ ID NO: 25666 - RNA, 23 nt, Artificial Sequence
  Synthetic
uuugacuuugaaauuacuauaaa

SEQ ID NO: 25667 - RNA, 24 nt, Artificial Sequence
  Synthetic
uuuugacuuugaaauuacuauaaa

SEQ ID NO: 25668 - RNA, 18 nt, Artificial Sequence
  Synthetic
ugaaucuguuacuauaaa

SEQ ID NO: 25669 - RNA, 19 nt, Artificial Sequence
  Synthetic
uugaaucuguuacuauaaa

SEQ ID NO: 25670 - RNA, 20 nt, Artificial Sequence
  Synthetic
uuugaaucuguuacuauaaa

SEQ ID NO: 25671 - RNA, 21 nt, Artificial Sequence
  Synthetic
uuuugaaucuguuacuauaaa

SEQ ID NO: 25672 - RNA, 22 nt, Artificial Sequence
  Synthetic
uuuuugaaucuguuacuauaaa

SEQ ID NO: 25673 - RNA, 23 nt, Artificial Sequence
  Synthetic
cuuuuugaaucuguuacuauaaa

SEQ ID NO: 25674 - RNA, 18 nt, Artificial Sequence
  Synthetic
uggaauaagaucuauaaa

SEQ ID NO: 25675 - RNA, 19 nt, Artificial Sequence
  Synthetic
auggaauaagaucuauaaa

SEQ ID NO: 25676 - RNA, 21 nt, Artificial Sequence
  Synthetic
agauggaauaagaucuauaaa

SEQ ID NO: 25677 - RNA, 22 nt, Artificial Sequence
  Synthetic
aagauggaauaagaucuauaaa

SEQ ID NO: 25678 - RNA, 23 nt, Artificial Sequence
  Synthetic
aaagauggaauaagaucuauaaa

SEQ ID NO: 25679 - RNA, 24 nt, Artificial Sequence
  Synthetic
aaaagauggaauaagaucuauaaa

SEQ ID NO: 25680 - RNA, 18 nt, Artificial Sequence
  Synthetic
agagugaauuucuauaaa

SEQ ID NO: 25681 - RNA, 19 nt, Artificial Sequence
  Synthetic
aagagugaauuucuauaaa

SEQ ID NO: 25682 - RNA, 21 nt, Artificial Sequence
  Synthetic
agaagagugaauuucuauaaa

SEQ ID NO: 25683 - RNA, 22 nt, Artificial Sequence
  Synthetic
cagaagagugaauuucuauaaa

SEQ ID NO: 25684 - RNA, 24 nt, Artificial Sequence
  Synthetic
ugcagaagagugaauuucuauaaa

SEQ ID NO: 25685 - RNA, 18 nt, Artificial Sequence
  Synthetic
auauuauucuaguauaaa

SEQ ID NO: 25686 - RNA, 20 nt, Artificial Sequence
  Synthetic
ugauauuauucuaguauaaa

SEQ ID NO: 25687 - RNA, 21 nt, Artificial Sequence
  Synthetic
augauauuauucuaguauaaa

SEQ ID NO: 25688 - RNA, 22 nt, Artificial Sequence
  Synthetic
aaugauauuauucuaguauaaa

SEQ ID NO: 25689 - RNA, 23 nt, Artificial Sequence
  Synthetic
caaugauauuauucuaguauaaa

SEQ ID NO: 25690 - RNA, 24 nt, Artificial Sequence
  Synthetic
acaaugauauuauucuaguauaaa

SEQ ID NO: 25691 - RNA, 19 nt, Artificial Sequence
  Synthetic
agccuagagaguuuauaaa

SEQ ID NO: 25692 - RNA, 20 nt, Artificial Sequence
  Synthetic
aagccuagagaguuuauaaa

SEQ ID NO: 25693 - RNA, 21 nt, Artificial Sequence
  Synthetic
aaagccuagagaguuuauaaa

SEQ ID NO: 25694 - RNA, 24 nt, Artificial Sequence
  Synthetic
uggaaagccuagagaguuuauaaa

SEQ ID NO: 25695 - RNA, 19 nt, Artificial Sequence
  Synthetic
agguuuagguguuuauaaa

SEQ ID NO: 25696 - RNA, 20 nt, Artificial Sequence
  Synthetic
cagguuuagguguuuauaaa

SEQ ID NO: 25697 - RNA, 21 nt, Artificial Sequence
  Synthetic
ccagguuuagguguuuauaaa

SEQ ID NO: 25698 - RNA, 22 nt, Artificial Sequence
  Synthetic
uccagguuuagguguuuauaaa

SEQ ID NO: 25699 - RNA, 23 nt, Artificial Sequence
  Synthetic
uuccagguuuagguguuuauaaa

SEQ ID NO: 25700 - RNA, 18 nt, Artificial Sequence
  Synthetic
aauucaguguuuuauaaa

SEQ ID NO: 25701 - RNA, 19 nt, Artificial Sequence
  Synthetic
caauucaguguuuuauaaa

SEQ ID NO: 25702 - RNA, 20 nt, Artificial Sequence
  Synthetic
acaauucaguguuuuauaaa

SEQ ID NO: 25703 - RNA, 21 nt, Artificial Sequence
  Synthetic
aacaauucaguguuuuauaaa

SEQ ID NO: 25704 - RNA, 22 nt, Artificial Sequence
  Synthetic
uaacaauucaguguuuuauaaa

SEQ ID NO: 25705 - RNA, 23 nt, Artificial Sequence
  Synthetic
uuaacaauucaguguuuuauaaa

SEQ ID NO: 25706 - RNA, 24 nt, Artificial Sequence
  Synthetic
auuaacaauucaguguuuuauaaa

SEQ ID NO: 25707 - RNA, 18 nt, Artificial Sequence
  Synthetic
aaguuugcuacaacuaaa

SEQ ID NO: 25708 - RNA, 22 nt, Artificial Sequence
  Synthetic
agggaaguuugcuacaacuaaa

SEQ ID NO: 25709 - RNA, 24 nt, Artificial Sequence
  Synthetic
agagggaaguuugcuacaacuaaa

SEQ ID NO: 25710 - RNA, 18 nt, Artificial Sequence
  Synthetic
uacaaaguaaugacuaaa

SEQ ID NO: 25711 - RNA, 19 nt, Artificial Sequence
  Synthetic
auacaaaguaaugacuaaa

SEQ ID NO: 25712 - RNA, 21 nt, Artificial Sequence
  Synthetic
ugauacaaaguaaugacuaaa

SEQ ID NO: 25713 - RNA, 22 nt, Artificial Sequence
  Synthetic
augauacaaaguaaugacuaaa

SEQ ID NO: 25714 - RNA, 23 nt, Artificial Sequence
  Synthetic
aaugauacaaaguaaugacuaaa

SEQ ID NO: 25715 - RNA, 20 nt, Artificial Sequence
  Synthetic
ugguuucuaugaauacuaaa

SEQ ID NO: 25716 - RNA, 22 nt, Artificial Sequence
  Synthetic
ugugguuucuaugaauacuaaa

SEQ ID NO: 25717 - RNA, 23 nt, Artificial Sequence
  Synthetic
uugugguuucuaugaauacuaaa

SEQ ID NO: 25718 - RNA, 24 nt, Artificial Sequence
  Synthetic
auugugguuucuaugaauacuaaa

SEQ ID NO: 25719 - RNA, 18 nt, Artificial Sequence
  Synthetic
ccuaagcagauaccuaaa

SEQ ID NO: 25720 - RNA, 20 nt, Artificial Sequence
  Synthetic
agccuaagcagauaccuaaa

SEQ ID NO: 25721 - RNA, 21 nt, Artificial Sequence
  Synthetic
cagccuaagcagauaccuaaa

SEQ ID NO: 25722 - RNA, 22 nt, Artificial Sequence
  Synthetic
ccagccuaagcagauaccuaaa

SEQ ID NO: 25723 - RNA, 23 nt, Artificial Sequence
  Synthetic
accagccuaagcagauaccuaaa

SEQ ID NO: 25724 - RNA, 24 nt, Artificial Sequence
  Synthetic
uaccagccuaagcagauaccuaaa

SEQ ID NO: 25725 - RNA, 18 nt, Artificial Sequence
  Synthetic
cuggcacugcacccuaaa

SEQ ID NO: 25726 - RNA, 19 nt, Artificial Sequence
  Synthetic
acuggcacugcacccuaaa

SEQ ID NO: 25727 - RNA, 20 nt, Artificial Sequence
  Synthetic
uacuggcacugcacccuaaa

SEQ ID NO: 25728 - RNA, 21 nt, Artificial Sequence
  Synthetic
uuacuggcacugcacccuaaa

SEQ ID NO: 25729 - RNA, 22 nt, Artificial Sequence
  Synthetic
auuacuggcacugcacccuaaa

SEQ ID NO: 25730 - RNA, 23 nt, Artificial Sequence
  Synthetic
cauuacuggcacugcacccuaaa

SEQ ID NO: 25731 - RNA, 24 nt, Artificial Sequence
  Synthetic
acauuacuggcacugcacccuaaa

SEQ ID NO: 25732 - RNA, 18 nt, Artificial Sequence
  Synthetic
ucucuucaagauccuaaa

SEQ ID NO: 25733 - RNA, 19 nt, Artificial Sequence
  Synthetic
aucucuucaagauccuaaa

SEQ ID NO: 25734 - RNA, 20 nt, Artificial Sequence
  Synthetic
uaucucuucaagauccuaaa

SEQ ID NO: 25735 - RNA, 21 nt, Artificial Sequence
  Synthetic
auaucucuucaagauccuaaa

SEQ ID NO: 25736 - RNA, 23 nt, Artificial Sequence
  Synthetic
agauaucucuucaagauccuaaa

SEQ ID NO: 25737 - RNA, 24 nt, Artificial Sequence
  Synthetic
cagauaucucuucaagauccuaaa

SEQ ID NO: 25738 - RNA, 21 nt, Artificial Sequence
  Synthetic
ucucaaagucauauagcuaaa

SEQ ID NO: 25739 - RNA, 22 nt, Artificial Sequence
  Synthetic
uucucaaagucauauagcuaaa

SEQ ID NO: 25740 - RNA, 23 nt, Artificial Sequence
  Synthetic
uuucucaaagucauauagcuaaa

SEQ ID NO: 25741 - RNA, 24 nt, Artificial Sequence
  Synthetic
uuuucucaaagucauauagcuaaa

SEQ ID NO: 25742 - RNA, 18 nt, Artificial Sequence
  Synthetic
uccuuacuagagucuaaa

SEQ ID NO: 25743 - RNA, 20 nt, Artificial Sequence
  Synthetic
uguccuuacuagagucuaaa

SEQ ID NO: 25744 - RNA, 22 nt, Artificial Sequence
  Synthetic
uguguccuuacuagagucuaaa

SEQ ID NO: 25745 - RNA, 23 nt, Artificial Sequence
  Synthetic
uuguguccuuacuagagucuaaa

SEQ ID NO: 25746 - RNA, 24 nt, Artificial Sequence
  Synthetic
cuuguguccuuacuagagucuaaa

SEQ ID NO: 25747 - RNA, 18 nt, Artificial Sequence
  Synthetic
cucaaacugucuucuaaa

SEQ ID NO: 25748 - RNA, 19 nt, Artificial Sequence
  Synthetic
acucaaacugucuucuaaa

SEQ ID NO: 25749 - RNA, 20 nt, Artificial Sequence
  Synthetic
uacucaaacugucuucuaaa

SEQ ID NO: 25750 - RNA, 22 nt, Artificial Sequence
  Synthetic
uguacucaaacugucuucuaaa

SEQ ID NO: 25751 - RNA, 23 nt, Artificial Sequence
  Synthetic
uuguacucaaacugucuucuaaa

SEQ ID NO: 25752 - RNA, 24 nt, Artificial Sequence
  Synthetic
uuuguacucaaacugucuucuaaa

SEQ ID NO: 25753 - RNA, 21 nt, Artificial Sequence
  Synthetic
uuuuuuaauguucaaaguaaa

SEQ ID NO: 25754 - RNA, 22 nt, Artificial Sequence
  Synthetic
uuuuuuuaauguucaaaguaaa

SEQ ID NO: 25755 - RNA, 18 nt, Artificial Sequence
  Synthetic
cacucaaauuaaaguaaa

SEQ ID NO: 25756 - RNA, 19 nt, Artificial Sequence
  Synthetic
ccacucaaauuaaaguaaa

SEQ ID NO: 25757 - RNA, 20 nt, Artificial Sequence
  Synthetic
accacucaaauuaaaguaaa

SEQ ID NO: 25758 - RNA, 21 nt, Artificial Sequence
  Synthetic
caccacucaaauuaaaguaaa

SEQ ID NO: 25759 - RNA, 22 nt, Artificial Sequence
  Synthetic
acaccacucaaauuaaaguaaa

SEQ ID NO: 25760 - RNA, 23 nt, Artificial Sequence
  Synthetic
aacaccacucaaauuaaaguaaa

SEQ ID NO: 25761 - RNA, 24 nt, Artificial Sequence
  Synthetic
aaacaccacucaaauuaaaguaaa

SEQ ID NO: 25762 - RNA, 18 nt, Artificial Sequence
  Synthetic
auaccaaaaggaaguaaa

SEQ ID NO: 25763 - RNA, 19 nt, Artificial Sequence
  Synthetic
cauaccaaaaggaaguaaa

SEQ ID NO: 25764 - RNA, 20 nt, Artificial Sequence
  Synthetic
ucauaccaaaaggaaguaaa

SEQ ID NO: 25765 - RNA, 21 nt, Artificial Sequence
  Synthetic
aucauaccaaaaggaaguaaa

SEQ ID NO: 25766 - RNA, 22 nt, Artificial Sequence
  Synthetic
caucauaccaaaaggaaguaaa

SEQ ID NO: 25767 - RNA, 23 nt, Artificial Sequence
  Synthetic
ccaucauaccaaaaggaaguaaa

SEQ ID NO: 25768 - RNA, 19 nt, Artificial Sequence
  Synthetic
ugggcaacuucagaguaaa

SEQ ID NO: 25769 - RNA, 20 nt, Artificial Sequence
  Synthetic
uugggcaacuucagaguaaa

SEQ ID NO: 25770 - RNA, 22 nt, Artificial Sequence
  Synthetic
uguugggcaacuucagaguaaa

SEQ ID NO: 25771 - RNA, 23 nt, Artificial Sequence
  Synthetic
uuguugggcaacuucagaguaaa

SEQ ID NO: 25772 - RNA, 24 nt, Artificial Sequence
  Synthetic
auuguugggcaacuucagaguaaa

SEQ ID NO: 25773 - RNA, 18 nt, Artificial Sequence
  Synthetic
cauacugaaaauaguaaa

SEQ ID NO: 25774 - RNA, 19 nt, Artificial Sequence
  Synthetic
acauacugaaaauaguaaa

SEQ ID NO: 25775 - RNA, 20 nt, Artificial Sequence
  Synthetic
aacauacugaaaauaguaaa

SEQ ID NO: 25776 - RNA, 21 nt, Artificial Sequence
  Synthetic
uaacauacugaaaauaguaaa

SEQ ID NO: 25777 - RNA, 23 nt, Artificial Sequence
  Synthetic
aguaacauacugaaaauaguaaa

SEQ ID NO: 25778 - RNA, 24 nt, Artificial Sequence
  Synthetic
aaguaacauacugaaaauaguaaa

SEQ ID NO: 25779 - RNA, 18 nt, Artificial Sequence
  Synthetic
uuggaagaagcccguaaa

SEQ ID NO: 25780 - RNA, 19 nt, Artificial Sequence
  Synthetic
uuuggaagaagcccguaaa

SEQ ID NO: 25781 - RNA, 20 nt, Artificial Sequence
  Synthetic
cuuuggaagaagcccguaaa

SEQ ID NO: 25782 - RNA, 21 nt, Artificial Sequence
  Synthetic
ucuuuggaagaagcccguaaa

SEQ ID NO: 25783 - RNA, 22 nt, Artificial Sequence
  Synthetic
uucuuuggaagaagcccguaaa

SEQ ID NO: 25784 - RNA, 23 nt, Artificial Sequence
  Synthetic
auucuuuggaagaagcccguaaa

SEQ ID NO: 25785 - RNA, 24 nt, Artificial Sequence
  Synthetic
aauucuuuggaagaagcccguaaa

SEQ ID NO: 25786 - RNA, 18 nt, Artificial Sequence
  Synthetic
cugaguaauuaucguaaa

SEQ ID NO: 25787 - RNA, 19 nt, Artificial Sequence
  Synthetic
ucugaguaauuaucguaaa

SEQ ID NO: 25788 - RNA, 20 nt, Artificial Sequence
  Synthetic
uucugaguaauuaucguaaa

SEQ ID NO: 25789 - RNA, 21 nt, Artificial Sequence
  Synthetic
auucugaguaauuaucguaaa

SEQ ID NO: 25790 - RNA, 22 nt, Artificial Sequence
  Synthetic
cauucugaguaauuaucguaaa

SEQ ID NO: 25791 - RNA, 23 nt, Artificial Sequence
  Synthetic
ccauucugaguaauuaucguaaa

SEQ ID NO: 25792 - RNA, 24 nt, Artificial Sequence
  Synthetic
uccauucugaguaauuaucguaaa

SEQ ID NO: 25793 - RNA, 22 nt, Artificial Sequence
  Synthetic
ugacuucauuuaaaaagguaaa

SEQ ID NO: 25794 - RNA, 24 nt, Artificial Sequence
  Synthetic
agugacuucauuuaaaaagguaaa

SEQ ID NO: 25795 - RNA, 18 nt, Artificial Sequence
  Synthetic
auauaugcuggagguaaa

SEQ ID NO: 25796 - RNA, 19 nt, Artificial Sequence
  Synthetic
aauauaugcuggagguaaa

SEQ ID NO: 25797 - RNA, 21 nt, Artificial Sequence
  Synthetic
ugaauauaugcuggagguaaa

SEQ ID NO: 25798 - RNA, 22 nt, Artificial Sequence
  Synthetic
cugaauauaugcuggagguaaa

SEQ ID NO: 25799 - RNA, 23 nt, Artificial Sequence
  Synthetic
ucugaauauaugcuggagguaaa

SEQ ID NO: 25800 - RNA, 19 nt, Artificial Sequence
  Synthetic
ugaaacacaguuugguaaa

SEQ ID NO: 25801 - RNA, 20 nt, Artificial Sequence
  Synthetic
cugaaacacaguuugguaaa

SEQ ID NO: 25802 - RNA, 21 nt, Artificial Sequence
  Synthetic
ccugaaacacaguuugguaaa

SEQ ID NO: 25803 - RNA, 23 nt, Artificial Sequence
  Synthetic
ugccugaaacacaguuugguaaa

SEQ ID NO: 25804 - RNA, 24 nt, Artificial Sequence
  Synthetic
uugccugaaacacaguuugguaaa

SEQ ID NO: 25805 - RNA, 18 nt, Artificial Sequence
  Synthetic
caugauugcauauguaaa

SEQ ID NO: 25806 - RNA, 19 nt, Artificial Sequence
  Synthetic
ucaugauugcauauguaaa

SEQ ID NO: 25807 - RNA, 20 nt, Artificial Sequence
  Synthetic
cucaugauugcauauguaaa

SEQ ID NO: 25808 - RNA, 22 nt, Artificial Sequence
  Synthetic
ugcucaugauugcauauguaaa

SEQ ID NO: 25809 - RNA, 23 nt, Artificial Sequence
  Synthetic
augcucaugauugcauauguaaa

SEQ ID NO: 25810 - RNA, 21 nt, Artificial Sequence
  Synthetic
cuuuacuuuguauuauguaaa

SEQ ID NO: 25811 - RNA, 22 nt, Artificial Sequence
  Synthetic
acuuuacuuuguauuauguaaa

SEQ ID NO: 25812 - RNA, 23 nt, Artificial Sequence
  Synthetic
uacuuuacuuuguauuauguaaa

SEQ ID NO: 25813 - RNA, 20 nt, Artificial Sequence
  Synthetic
uggcagggcauuguuguaaa

SEQ ID NO: 25814 - RNA, 18 nt, Artificial Sequence
  Synthetic
cuucucucccaaauuaaa

SEQ ID NO: 25815 - RNA, 19 nt, Artificial Sequence
  Synthetic
ucuucucucccaaauuaaa

SEQ ID NO: 25816 - RNA, 20 nt, Artificial Sequence
  Synthetic
aucuucucucccaaauuaaa

SEQ ID NO: 25817 - RNA, 22 nt, Artificial Sequence
  Synthetic
ugaucuucucucccaaauuaaa

SEQ ID NO: 25818 - RNA, 23 nt, Artificial Sequence
  Synthetic
augaucuucucucccaaauuaaa

SEQ ID NO: 25819 - RNA, 24 nt, Artificial Sequence
  Synthetic
aaugaucuucucucccaaauuaaa

SEQ ID NO: 25820 - RNA, 18 nt, Artificial Sequence
  Synthetic
uuaagugacuaaauuaaa

SEQ ID NO: 25821 - RNA, 20 nt, Artificial Sequence
  Synthetic
uguuaagugacuaaauuaaa

SEQ ID NO: 25822 - RNA, 21 nt, Artificial Sequence
  Synthetic
uuguuaagugacuaaauuaaa

SEQ ID NO: 25823 - RNA, 22 nt, Artificial Sequence
  Synthetic
uuuguuaagugacuaaauuaaa

SEQ ID NO: 25824 - RNA, 24 nt, Artificial Sequence
  Synthetic
aguuuguuaagugacuaaauuaaa

SEQ ID NO: 25825 - RNA, 19 nt, Artificial Sequence
  Synthetic
uguacugauuauaauuaaa

SEQ ID NO: 25826 - RNA, 20 nt, Artificial Sequence
  Synthetic
auguacugauuauaauuaaa

SEQ ID NO: 25827 - RNA, 21 nt, Artificial Sequence
  Synthetic
aauguacugauuauaauuaaa

SEQ ID NO: 25828 - RNA, 22 nt, Artificial Sequence
  Synthetic
aaauguacugauuauaauuaaa

SEQ ID NO: 25829 - RNA, 23 nt, Artificial Sequence
  Synthetic
aaaauguacugauuauaauuaaa

SEQ ID NO: 25830 - RNA, 24 nt, Artificial Sequence
  Synthetic
aaaaauguacugauuauaauuaaa

SEQ ID NO: 25831 - RNA, 18 nt, Artificial Sequence
  Synthetic
agggggacaaacauuaaa

SEQ ID NO: 25832 - RNA, 21 nt, Artificial Sequence
  Synthetic
uggagggggacaaacauuaaa

SEQ ID NO: 25833 - RNA, 22 nt, Artificial Sequence
  Synthetic
uuggagggggacaaacauuaaa

SEQ ID NO: 25834 - RNA, 23 nt, Artificial Sequence
  Synthetic
uuuggagggggacaaacauuaaa

SEQ ID NO: 25835 - RNA, 24 nt, Artificial Sequence
  Synthetic
auuuggagggggacaaacauuaaa

SEQ ID NO: 25836 - RNA, 21 nt, Artificial Sequence
  Synthetic
uuugaaaaauucuacauuaaa

SEQ ID NO: 25837 - RNA, 22 nt, Artificial Sequence
  Synthetic
auuugaaaaauucuacauuaaa

SEQ ID NO: 25838 - RNA, 23 nt, Artificial Sequence
  Synthetic
cauuugaaaaauucuacauuaaa

SEQ ID NO: 25839 - RNA, 24 nt, Artificial Sequence
  Synthetic
acauuugaaaaauucuacauuaaa

SEQ ID NO: 25840 - RNA, 18 nt, Artificial Sequence
  Synthetic
cuugggguuaagauuaaa

SEQ ID NO: 25841 - RNA, 19 nt, Artificial Sequence
  Synthetic
acuugggguuaagauuaaa

SEQ ID NO: 25842 - RNA, 21 nt, Artificial Sequence
  Synthetic
agacuugggguuaagauuaaa

SEQ ID NO: 25843 - RNA, 22 nt, Artificial Sequence
  Synthetic
cagacuugggguuaagauuaaa

SEQ ID NO: 25844 - RNA, 23 nt, Artificial Sequence
  Synthetic
acagacuugggguuaagauuaaa

SEQ ID NO: 25845 - RNA, 24 nt, Artificial Sequence
  Synthetic
aacagacuugggguuaagauuaaa

SEQ ID NO: 25846 - RNA, 18 nt, Artificial Sequence
  Synthetic
uuaggaauucagauuaaa

SEQ ID NO: 25847 - RNA, 19 nt, Artificial Sequence
  Synthetic
uuuaggaauucagauuaaa

SEQ ID NO: 25848 - RNA, 20 nt, Artificial Sequence
  Synthetic
auuuaggaauucagauuaaa

SEQ ID NO: 25849 - RNA, 21 nt, Artificial Sequence
  Synthetic
aauuuaggaauucagauuaaa

SEQ ID NO: 25850 - RNA, 22 nt, Artificial Sequence
  Synthetic
aaauuuaggaauucagauuaaa

SEQ ID NO: 25851 - RNA, 24 nt, Artificial Sequence
  Synthetic
agaaauuuaggaauucagauuaaa

SEQ ID NO: 25852 - RNA, 19 nt, Artificial Sequence
  Synthetic
agaauugcuagagauuaaa

SEQ ID NO: 25853 - RNA, 20 nt, Artificial Sequence
  Synthetic
uagaauugcuagagauuaaa

SEQ ID NO: 25854 - RNA, 21 nt, Artificial Sequence
  Synthetic
auagaauugcuagagauuaaa

SEQ ID NO: 25855 - RNA, 22 nt, Artificial Sequence
  Synthetic
aauagaauugcuagagauuaaa

SEQ ID NO: 25856 - RNA, 23 nt, Artificial Sequence
  Synthetic
uaauagaauugcuagagauuaaa

SEQ ID NO: 25857 - RNA, 24 nt, Artificial Sequence
  Synthetic
cuaauagaauugcuagagauuaaa

SEQ ID NO: 25858 - RNA, 21 nt, Artificial Sequence
  Synthetic
ugcugaaaaauauuuauuaaa

SEQ ID NO: 25859 - RNA, 23 nt, Artificial Sequence
  Synthetic
agugcugaaaaauauuuauuaaa

SEQ ID NO: 25860 - RNA, 24 nt, Artificial Sequence
  Synthetic
uagugcugaaaaauauuuauuaaa

SEQ ID NO: 25861 - RNA, 18 nt, Artificial Sequence
  Synthetic
uauaccagaguucuuaaa

SEQ ID NO: 25862 - RNA, 19 nt, Artificial Sequence
  Synthetic
auauaccagaguucuuaaa

SEQ ID NO: 25863 - RNA, 20 nt, Artificial Sequence
  Synthetic
uauauaccagaguucuuaaa

SEQ ID NO: 25864 - RNA, 21 nt, Artificial Sequence
  Synthetic
uuauauaccagaguucuuaaa

SEQ ID NO: 25865 - RNA, 22 nt, Artificial Sequence
  Synthetic
uuuauauaccagaguucuuaaa

SEQ ID NO: 25866 - RNA, 23 nt, Artificial Sequence
  Synthetic
auuuauauaccagaguucuuaaa

SEQ ID NO: 25867 - RNA, 18 nt, Artificial Sequence
  Synthetic
ugugauuuuuccguuaaa

SEQ ID NO: 25868 - RNA, 19 nt, Artificial Sequence
  Synthetic
uugugauuuuuccguuaaa

SEQ ID NO: 25869 - RNA, 20 nt, Artificial Sequence
  Synthetic
uuugugauuuuuccguuaaa

SEQ ID NO: 25870 - RNA, 23 nt, Artificial Sequence
  Synthetic
ugguuugugauuuuuccguuaaa

SEQ ID NO: 25871 - RNA, 18 nt, Artificial Sequence
  Synthetic
cauauuuucuugguuaaa

SEQ ID NO: 25872 - RNA, 19 nt, Artificial Sequence
  Synthetic
ucauauuuucuugguuaaa

SEQ ID NO: 25873 - RNA, 20 nt, Artificial Sequence
  Synthetic
cucauauuuucuugguuaaa

SEQ ID NO: 25874 - RNA, 21 nt, Artificial Sequence
  Synthetic
ucucauauuuucuugguuaaa

SEQ ID NO: 25875 - RNA, 22 nt, Artificial Sequence
  Synthetic
cucucauauuuucuugguuaaa

SEQ ID NO: 25876 - RNA, 24 nt, Artificial Sequence
  Synthetic
agcucucauauuuucuugguuaaa

SEQ ID NO: 25877 - RNA, 18 nt, Artificial Sequence
  Synthetic
uaaaagaaggauguuaaa

SEQ ID NO: 25878 - RNA, 19 nt, Artificial Sequence
  Synthetic
uuaaaagaaggauguuaaa

SEQ ID NO: 25879 - RNA, 20 nt, Artificial Sequence
  Synthetic
auuaaaagaaggauguuaaa

SEQ ID NO: 25880 - RNA, 21 nt, Artificial Sequence
  Synthetic
uauuaaaagaaggauguuaaa

SEQ ID NO: 25881 - RNA, 23 nt, Artificial Sequence
  Synthetic
uguauuaaaagaaggauguuaaa

SEQ ID NO: 25882 - RNA, 18 nt, Artificial Sequence
  Synthetic
auauaaaguuuuguuaaa

SEQ ID NO: 25883 - RNA, 19 nt, Artificial Sequence
  Synthetic
aauauaaaguuuuguuaaa

SEQ ID NO: 25884 - RNA, 20 nt, Artificial Sequence
  Synthetic
caauauaaaguuuuguuaaa

SEQ ID NO: 25885 - RNA, 21 nt, Artificial Sequence
  Synthetic
ucaauauaaaguuuuguuaaa

SEQ ID NO: 25886 - RNA, 22 nt, Artificial Sequence
  Synthetic
cucaauauaaaguuuuguuaaa

SEQ ID NO: 25887 - RNA, 24 nt, Artificial Sequence
  Synthetic
agcucaauauaaaguuuuguuaaa

SEQ ID NO: 25888 - RNA, 18 nt, Artificial Sequence
  Synthetic
aauguucgugaauuuaaa

SEQ ID NO: 25889 - RNA, 19 nt, Artificial Sequence
  Synthetic
aaauguucgugaauuuaaa

SEQ ID NO: 25890 - RNA, 22 nt, Artificial Sequence
  Synthetic
uggaaauguucgugaauuuaaa

SEQ ID NO: 25891 - RNA, 23 nt, Artificial Sequence
  Synthetic
uuggaaauguucgugaauuuaaa

SEQ ID NO: 25892 - RNA, 21 nt, Artificial Sequence
  Synthetic
aaggcaaauaagacauuuaaa

SEQ ID NO: 25893 - RNA, 23 nt, Artificial Sequence
  Synthetic
agaaggcaaauaagacauuuaaa

SEQ ID NO: 25894 - RNA, 24 nt, Artificial Sequence
  Synthetic
uagaaggcaaauaagacauuuaaa

SEQ ID NO: 25895 - RNA, 18 nt, Artificial Sequence
  Synthetic
uugaagucucuauuuaaa

SEQ ID NO: 25896 - RNA, 19 nt, Artificial Sequence
  Synthetic
uuugaagucucuauuuaaa

SEQ ID NO: 25897 - RNA, 20 nt, Artificial Sequence
  Synthetic
uuuugaagucucuauuuaaa

SEQ ID NO: 25898 - RNA, 21 nt, Artificial Sequence
  Synthetic
uuuuugaagucucuauuuaaa

SEQ ID NO: 25899 - RNA, 22 nt, Artificial Sequence
  Synthetic
uuuuuugaagucucuauuuaaa

SEQ ID NO: 25900 - RNA, 23 nt, Artificial Sequence
  Synthetic
auuuuuugaagucucuauuuaaa

SEQ ID NO: 25901 - RNA, 24 nt, Artificial Sequence
  Synthetic
aauuuuuugaagucucuauuuaaa

SEQ ID NO: 25902 - RNA, 18 nt, Artificial Sequence
  Synthetic
augugcagggacuuuaaa

SEQ ID NO: 25903 - RNA, 19 nt, Artificial Sequence
  Synthetic
uaugugcagggacuuuaaa

SEQ ID NO: 25904 - RNA, 20 nt, Artificial Sequence
  Synthetic
auaugugcagggacuuuaaa

SEQ ID NO: 25905 - RNA, 21 nt, Artificial Sequence
  Synthetic
aauaugugcagggacuuuaaa

SEQ ID NO: 25906 - RNA, 23 nt, Artificial Sequence
  Synthetic
cgaauaugugcagggacuuuaaa

SEQ ID NO: 25907 - RNA, 24 nt, Artificial Sequence
  Synthetic
acgaauaugugcagggacuuuaaa

SEQ ID NO: 25908 - RNA, 19 nt, Artificial Sequence
  Synthetic
uggacaggguugcuuuaaa

SEQ ID NO: 25909 - RNA, 22 nt, Artificial Sequence
  Synthetic
ugguggacaggguugcuuuaaa

SEQ ID NO: 25910 - RNA, 24 nt, Artificial Sequence
  Synthetic
agugguggacaggguugcuuuaaa

SEQ ID NO: 25911 - RNA, 18 nt, Artificial Sequence
  Synthetic
uguuaauguaucuuuaaa

SEQ ID NO: 25912 - RNA, 19 nt, Artificial Sequence
  Synthetic
cuguuaauguaucuuuaaa

SEQ ID NO: 25913 - RNA, 20 nt, Artificial Sequence
  Synthetic
acuguuaauguaucuuuaaa

SEQ ID NO: 25914 - RNA, 21 nt, Artificial Sequence
  Synthetic
uacuguuaauguaucuuuaaa

SEQ ID NO: 25915 - RNA, 22 nt, Artificial Sequence
  Synthetic
cuacuguuaauguaucuuuaaa

SEQ ID NO: 25916 - RNA, 23 nt, Artificial Sequence
  Synthetic
acuacuguuaauguaucuuuaaa

SEQ ID NO: 25917 - RNA, 19 nt, Artificial Sequence
  Synthetic
aguacauuccaauuuuaaa

SEQ ID NO: 25918 - RNA, 22 nt, Artificial Sequence
  Synthetic
uggaguacauuccaauuuuaaa

SEQ ID NO: 25919 - RNA, 23 nt, Artificial Sequence
  Synthetic
cuggaguacauuccaauuuuaaa

SEQ ID NO: 25920 - RNA, 18 nt, Artificial Sequence
  Synthetic
ccuaauguagauuuuaaa

SEQ ID NO: 25921 - RNA, 19 nt, Artificial Sequence
  Synthetic
uccuaauguagauuuuaaa

SEQ ID NO: 25922 - RNA, 22 nt, Artificial Sequence
  Synthetic
ugguccuaauguagauuuuaaa

SEQ ID NO: 25923 - RNA, 21 nt, Artificial Sequence
  Synthetic
uuuggauucuaguauuuuaaa

SEQ ID NO: 25924 - RNA, 22 nt, Artificial Sequence
  Synthetic
cuuuggauucuaguauuuuaaa

SEQ ID NO: 25925 - RNA, 23 nt, Artificial Sequence
  Synthetic
ccuuuggauucuaguauuuuaaa

SEQ ID NO: 25926 - RNA, 24 nt, Artificial Sequence
  Synthetic
cccuuuggauucuaguauuuuaaa

SEQ ID NO: 25927 - RNA, 21 nt, Artificial Sequence
  Synthetic
uagugaaaagauuauuuuaaa

SEQ ID NO: 25928 - RNA, 22 nt, Artificial Sequence
  Synthetic
uuagugaaaagauuauuuuaaa

SEQ ID NO: 25929 - RNA, 23 nt, Artificial Sequence
  Synthetic
auuagugaaaagauuauuuuaaa

SEQ ID NO: 25930 - RNA, 24 nt, Artificial Sequence
  Synthetic
uauuagugaaaagauuauuuuaaa

SEQ ID NO: 25931 - RNA, 18 nt, Artificial Sequence
  Synthetic
auuuuacugucuuuuaaa

SEQ ID NO: 25932 - RNA, 19 nt, Artificial Sequence
  Synthetic
uauuuuacugucuuuuaaa

SEQ ID NO: 25933 - RNA, 20 nt, Artificial Sequence
  Synthetic
cuauuuuacugucuuuuaaa

SEQ ID NO: 25934 - RNA, 21 nt, Artificial Sequence
  Synthetic
ccuauuuuacugucuuuuaaa

SEQ ID NO: 25935 - RNA, 23 nt, Artificial Sequence
  Synthetic
agccuauuuuacugucuuuuaaa

SEQ ID NO: 25936 - RNA, 18 nt, Artificial Sequence
  Synthetic
ccacuucuuucuuuuaaa

SEQ ID NO: 25937 - RNA, 20 nt, Artificial Sequence
  Synthetic
agccacuucuuucuuuuaaa

SEQ ID NO: 25938 - RNA, 21 nt, Artificial Sequence
  Synthetic
uagccacuucuuucuuuuaaa

SEQ ID NO: 25939 - RNA, 22 nt, Artificial Sequence
  Synthetic
uuagccacuucuuucuuuuaaa

SEQ ID NO: 25940 - RNA, 23 nt, Artificial Sequence
  Synthetic
uuuagccacuucuuucuuuuaaa

SEQ ID NO: 25941 - RNA, 24 nt, Artificial Sequence
  Synthetic
uuuuagccacuucuuucuuuuaaa

SEQ ID NO: 25942 - RNA, 21 nt, Artificial Sequence
  Synthetic
aaugugcaauucauuuuuaaa

SEQ ID NO: 25943 - RNA, 22 nt, Artificial Sequence
  Synthetic
caaugugcaauucauuuuuaaa

SEQ ID NO: 25944 - RNA, 24 nt, Artificial Sequence
  Synthetic
ugcaaugugcaauucauuuuuaaa

SEQ ID NO: 25945 - RNA, 20 nt, Artificial Sequence
  Synthetic
cggaaacugauguuuuuaaa

SEQ ID NO: 25946 - RNA, 21 nt, Artificial Sequence
  Synthetic
ucggaaacugauguuuuuaaa

SEQ ID NO: 25947 - RNA, 22 nt, Artificial Sequence
  Synthetic
uucggaaacugauguuuuuaaa

SEQ ID NO: 25948 - RNA, 23 nt, Artificial Sequence
  Synthetic
auucggaaacugauguuuuuaaa

SEQ ID NO: 25949 - RNA, 24 nt, Artificial Sequence
  Synthetic
uauucggaaacugauguuuuuaaa

SEQ ID NO: 25950 - RNA, 21 nt, Artificial Sequence
  Synthetic
ucauuucaaaggugaaaacaa

SEQ ID NO: 25951 - RNA, 22 nt, Artificial Sequence
  Synthetic
cucauuucaaaggugaaaacaa

SEQ ID NO: 25952 - RNA, 23 nt, Artificial Sequence
  Synthetic
acucauuucaaaggugaaaacaa

SEQ ID NO: 25953 - RNA, 24 nt, Artificial Sequence
  Synthetic
aacucauuucaaaggugaaaacaa

SEQ ID NO: 25954 - RNA, 18 nt, Artificial Sequence
  Synthetic
aagggagcaauaaaacaa

SEQ ID NO: 25955 - RNA, 19 nt, Artificial Sequence
  Synthetic
aaagggagcaauaaaacaa

SEQ ID NO: 25956 - RNA, 21 nt, Artificial Sequence
  Synthetic
agaaagggagcaauaaaacaa

SEQ ID NO: 25957 - RNA, 22 nt, Artificial Sequence
  Synthetic
cagaaagggagcaauaaaacaa

SEQ ID NO: 25958 - RNA, 23 nt, Artificial Sequence
  Synthetic
ucagaaagggagcaauaaaacaa

SEQ ID NO: 25959 - RNA, 24 nt, Artificial Sequence
  Synthetic
cucagaaagggagcaauaaaacaa

SEQ ID NO: 25960 - RNA, 22 nt, Artificial Sequence
  Synthetic
ugauuuuuccauuuacaaacaa

SEQ ID NO: 25961 - RNA, 23 nt, Artificial Sequence
  Synthetic
cugauuuuuccauuuacaaacaa

SEQ ID NO: 25962 - RNA, 24 nt, Artificial Sequence
  Synthetic
ucugauuuuuccauuuacaaacaa

SEQ ID NO: 25963 - RNA, 18 nt, Artificial Sequence
  Synthetic
uuugaucugaucaaacaa

SEQ ID NO: 25964 - RNA, 19 nt, Artificial Sequence
  Synthetic
auuugaucugaucaaacaa

SEQ ID NO: 25965 - RNA, 20 nt, Artificial Sequence
  Synthetic
uauuugaucugaucaaacaa

SEQ ID NO: 25966 - RNA, 21 nt, Artificial Sequence
  Synthetic
cuauuugaucugaucaaacaa

SEQ ID NO: 25967 - RNA, 22 nt, Artificial Sequence
  Synthetic
acuauuugaucugaucaaacaa

SEQ ID NO: 25968 - RNA, 23 nt, Artificial Sequence
  Synthetic
cacuauuugaucugaucaaacaa

SEQ ID NO: 25969 - RNA, 24 nt, Artificial Sequence
  Synthetic
acacuauuugaucugaucaaacaa

SEQ ID NO: 25970 - RNA, 18 nt, Artificial Sequence
  Synthetic
aauugucuguucaaacaa

SEQ ID NO: 25971 - RNA, 19 nt, Artificial Sequence
  Synthetic
aaauugucuguucaaacaa

SEQ ID NO: 25972 - RNA, 20 nt, Artificial Sequence
  Synthetic
aaaauugucuguucaaacaa

SEQ ID NO: 25973 - RNA, 22 nt, Artificial Sequence
  Synthetic
agaaaauugucuguucaaacaa

SEQ ID NO: 25974 - RNA, 23 nt, Artificial Sequence
  Synthetic
cagaaaauugucuguucaaacaa

SEQ ID NO: 25975 - RNA, 24 nt, Artificial Sequence
  Synthetic
ucagaaaauugucuguucaaacaa

SEQ ID NO: 25976 - RNA, 18 nt, Artificial Sequence
  Synthetic
ugcucuucuuucaaacaa

SEQ ID NO: 25977 - RNA, 19 nt, Artificial Sequence
  Synthetic
cugcucuucuuucaaacaa

SEQ ID NO: 25978 - RNA, 20 nt, Artificial Sequence
  Synthetic
acugcucuucuuucaaacaa

SEQ ID NO: 25979 - RNA, 22 nt, Artificial Sequence
  Synthetic
ugacugcucuucuuucaaacaa

SEQ ID NO: 25980 - RNA, 24 nt, Artificial Sequence
  Synthetic
agugacugcucuucuuucaaacaa

SEQ ID NO: 25981 - RNA, 21 nt, Artificial Sequence
  Synthetic
uugccagaaauaaagaaacaa

SEQ ID NO: 25982 - RNA, 22 nt, Artificial Sequence
  Synthetic
auugccagaaauaaagaaacaa

SEQ ID NO: 25983 - RNA, 23 nt, Artificial Sequence
  Synthetic
uauugccagaaauaaagaaacaa

SEQ ID NO: 25984 - RNA, 24 nt, Artificial Sequence
  Synthetic
auauugccagaaauaaagaaacaa

SEQ ID NO: 25985 - RNA, 19 nt, Artificial Sequence
  Synthetic
uguucccauuccuaaacaa

SEQ ID NO: 25986 - RNA, 20 nt, Artificial Sequence
  Synthetic
cuguucccauuccuaaacaa

SEQ ID NO: 25987 - RNA, 21 nt, Artificial Sequence
  Synthetic
ccuguucccauuccuaaacaa

SEQ ID NO: 25988 - RNA, 22 nt, Artificial Sequence
  Synthetic
accuguucccauuccuaaacaa

SEQ ID NO: 25989 - RNA, 24 nt, Artificial Sequence
  Synthetic
agaccuguucccauuccuaaacaa

SEQ ID NO: 25990 - RNA, 19 nt, Artificial Sequence
  Synthetic
agcaguucaagcuaaacaa

SEQ ID NO: 25991 - RNA, 20 nt, Artificial Sequence
  Synthetic
uagcaguucaagcuaaacaa

SEQ ID NO: 25992 - RNA, 21 nt, Artificial Sequence
  Synthetic
auagcaguucaagcuaaacaa

SEQ ID NO: 25993 - RNA, 22 nt, Artificial Sequence
  Synthetic
aauagcaguucaagcuaaacaa

SEQ ID NO: 25994 - RNA, 23 nt, Artificial Sequence
  Synthetic
aaauagcaguucaagcuaaacaa

SEQ ID NO: 25995 - RNA, 18 nt, Artificial Sequence
  Synthetic
auuccauccucacaacaa

SEQ ID NO: 25996 - RNA, 19 nt, Artificial Sequence
  Synthetic
cauuccauccucacaacaa

SEQ ID NO: 25997 - RNA, 20 nt, Artificial Sequence
  Synthetic
acauuccauccucacaacaa

SEQ ID NO: 25998 - RNA, 21 nt, Artificial Sequence
  Synthetic
uacauuccauccucacaacaa

SEQ ID NO: 25999 - RNA, 22 nt, Artificial Sequence
  Synthetic
uuacauuccauccucacaacaa

SEQ ID NO: 26000 - RNA, 23 nt, Artificial Sequence
  Synthetic
auuacauuccauccucacaacaa

SEQ ID NO: 26001 - RNA, 24 nt, Artificial Sequence
  Synthetic
uauuacauuccauccucacaacaa

SEQ ID NO: 26002 - RNA, 18 nt, Artificial Sequence
  Synthetic
ugcaccccuuaccaacaa

SEQ ID NO: 26003 - RNA, 19 nt, Artificial Sequence
  Synthetic
uugcaccccuuaccaacaa

SEQ ID NO: 26004 - RNA, 20 nt, Artificial Sequence
  Synthetic
auugcaccccuuaccaacaa

SEQ ID NO: 26005 - RNA, 21 nt, Artificial Sequence
  Synthetic
uauugcaccccuuaccaacaa

SEQ ID NO: 26006 - RNA, 22 nt, Artificial Sequence
  Synthetic
uuauugcaccccuuaccaacaa

SEQ ID NO: 26007 - RNA, 23 nt, Artificial Sequence
  Synthetic
uuuauugcaccccuuaccaacaa

SEQ ID NO: 26008 - RNA, 24 nt, Artificial Sequence
  Synthetic
auuuauugcaccccuuaccaacaa

SEQ ID NO: 26009 - RNA, 18 nt, Artificial Sequence
  Synthetic
aaguugacuucccaacaa

SEQ ID NO: 26010 - RNA, 19 nt, Artificial Sequence
  Synthetic
aaaguugacuucccaacaa

SEQ ID NO: 26011 - RNA, 20 nt, Artificial Sequence
  Synthetic
caaaguugacuucccaacaa

SEQ ID NO: 26012 - RNA, 21 nt, Artificial Sequence
  Synthetic
ccaaaguugacuucccaacaa

SEQ ID NO: 26013 - RNA, 22 nt, Artificial Sequence
  Synthetic
accaaaguugacuucccaacaa

SEQ ID NO: 26014 - RNA, 21 nt, Artificial Sequence
  Synthetic
caagaugacugccagcaacaa

SEQ ID NO: 26015 - RNA, 22 nt, Artificial Sequence
  Synthetic
ccaagaugacugccagcaacaa

SEQ ID NO: 26016 - RNA, 23 nt, Artificial Sequence
  Synthetic
uccaagaugacugccagcaacaa

SEQ ID NO: 26017 - RNA, 24 nt, Artificial Sequence
  Synthetic
uuccaagaugacugccagcaacaa

SEQ ID NO: 26018 - RNA, 18 nt, Artificial Sequence
  Synthetic
auauaaacaaugcaacaa

SEQ ID NO: 26019 - RNA, 19 nt, Artificial Sequence
  Synthetic
cauauaaacaaugcaacaa

SEQ ID NO: 26020 - RNA, 20 nt, Artificial Sequence
  Synthetic
ccauauaaacaaugcaacaa

SEQ ID NO: 26021 - RNA, 22 nt, Artificial Sequence
  Synthetic
ugccauauaaacaaugcaacaa

SEQ ID NO: 26022 - RNA, 23 nt, Artificial Sequence
  Synthetic
uugccauauaaacaaugcaacaa

SEQ ID NO: 26023 - RNA, 24 nt, Artificial Sequence
  Synthetic
auugccauauaaacaaugcaacaa

SEQ ID NO: 26024 - RNA, 21 nt, Artificial Sequence
  Synthetic
uuuucaaacuugguucaacaa

SEQ ID NO: 26025 - RNA, 23 nt, Artificial Sequence
  Synthetic
cguuuucaaacuugguucaacaa

SEQ ID NO: 26026 - RNA, 24 nt, Artificial Sequence
  Synthetic
ucguuuucaaacuugguucaacaa

SEQ ID NO: 26027 - RNA, 18 nt, Artificial Sequence
  Synthetic
uccaggcuagaagaacaa

SEQ ID NO: 26028 - RNA, 19 nt, Artificial Sequence
  Synthetic
cuccaggcuagaagaacaa

SEQ ID NO: 26029 - RNA, 20 nt, Artificial Sequence
  Synthetic
ucuccaggcuagaagaacaa

SEQ ID NO: 26030 - RNA, 21 nt, Artificial Sequence
  Synthetic
uucuccaggcuagaagaacaa

SEQ ID NO: 26031 - RNA, 22 nt, Artificial Sequence
  Synthetic
uuucuccaggcuagaagaacaa

SEQ ID NO: 26032 - RNA, 23 nt, Artificial Sequence
  Synthetic
cuuucuccaggcuagaagaacaa

SEQ ID NO: 26033 - RNA, 24 nt, Artificial Sequence
  Synthetic
ucuuucuccaggcuagaagaacaa

SEQ ID NO: 26034 - RNA, 19 nt, Artificial Sequence
  Synthetic
ugccaaauuuauagaacaa

SEQ ID NO: 26035 - RNA, 20 nt, Artificial Sequence
  Synthetic
augccaaauuuauagaacaa

SEQ ID NO: 26036 - RNA, 21 nt, Artificial Sequence
  Synthetic
uaugccaaauuuauagaacaa

SEQ ID NO: 26037 - RNA, 22 nt, Artificial Sequence
  Synthetic
auaugccaaauuuauagaacaa

SEQ ID NO: 26038 - RNA, 23 nt, Artificial Sequence
  Synthetic
aauaugccaaauuuauagaacaa

SEQ ID NO: 26039 - RNA, 24 nt, Artificial Sequence
  Synthetic
uaauaugccaaauuuauagaacaa

SEQ ID NO: 26040 - RNA, 18 nt, Artificial Sequence
  Synthetic
aguuccguggaggaacaa

SEQ ID NO: 26041 - RNA, 19 nt, Artificial Sequence
  Synthetic
uaguuccguggaggaacaa

SEQ ID NO: 26042 - RNA, 20 nt, Artificial Sequence
  Synthetic
auaguuccguggaggaacaa

SEQ ID NO: 26043 - RNA, 21 nt, Artificial Sequence
  Synthetic
aauaguuccguggaggaacaa

SEQ ID NO: 26044 - RNA, 22 nt, Artificial Sequence
  Synthetic
caauaguuccguggaggaacaa

SEQ ID NO: 26045 - RNA, 24 nt, Artificial Sequence
  Synthetic
ugcaauaguuccguggaggaacaa

SEQ ID NO: 26046 - RNA, 18 nt, Artificial Sequence
  Synthetic
uacuccaucagggaacaa

SEQ ID NO: 26047 - RNA, 19 nt, Artificial Sequence
  Synthetic
auacuccaucagggaacaa

SEQ ID NO: 26048 - RNA, 20 nt, Artificial Sequence
  Synthetic
uauacuccaucagggaacaa

SEQ ID NO: 26049 - RNA, 21 nt, Artificial Sequence
  Synthetic
cuauacuccaucagggaacaa

SEQ ID NO: 26050 - RNA, 22 nt, Artificial Sequence
  Synthetic
ucuauacuccaucagggaacaa

SEQ ID NO: 26051 - RNA, 23 nt, Artificial Sequence
  Synthetic
uucuauacuccaucagggaacaa

SEQ ID NO: 26052 - RNA, 24 nt, Artificial Sequence
  Synthetic
cuucuauacuccaucagggaacaa

SEQ ID NO: 26053 - RNA, 19 nt, Artificial Sequence
  Synthetic
agauagaaagagggaacaa

SEQ ID NO: 26054 - RNA, 20 nt, Artificial Sequence
  Synthetic
cagauagaaagagggaacaa

SEQ ID NO: 26055 - RNA, 21 nt, Artificial Sequence
  Synthetic
acagauagaaagagggaacaa

SEQ ID NO: 26056 - RNA, 22 nt, Artificial Sequence
  Synthetic
cacagauagaaagagggaacaa

SEQ ID NO: 26057 - RNA, 24 nt, Artificial Sequence
  Synthetic
ugcacagauagaaagagggaacaa

SEQ ID NO: 26058 - RNA, 18 nt, Artificial Sequence
  Synthetic
accccauaaagauaacaa

SEQ ID NO: 26059 - RNA, 19 nt, Artificial Sequence
  Synthetic
uaccccauaaagauaacaa

SEQ ID NO: 26060 - RNA, 20 nt, Artificial Sequence
  Synthetic
cuaccccauaaagauaacaa

SEQ ID NO: 26061 - RNA, 21 nt, Artificial Sequence
  Synthetic
ucuaccccauaaagauaacaa

SEQ ID NO: 26062 - RNA, 22 nt, Artificial Sequence
  Synthetic
aucuaccccauaaagauaacaa

SEQ ID NO: 26063 - RNA, 23 nt, Artificial Sequence
  Synthetic
uaucuaccccauaaagauaacaa

SEQ ID NO: 26064 - RNA, 24 nt, Artificial Sequence
  Synthetic
uuaucuaccccauaaagauaacaa

SEQ ID NO: 26065 - RNA, 18 nt, Artificial Sequence
  Synthetic
auaacuauagaguaacaa

SEQ ID NO: 26066 - RNA, 19 nt, Artificial Sequence
  Synthetic
uauaacuauagaguaacaa

SEQ ID NO: 26067 - RNA, 20 nt, Artificial Sequence
  Synthetic
auauaacuauagaguaacaa

SEQ ID NO: 26068 - RNA, 21 nt, Artificial Sequence
  Synthetic
uauauaacuauagaguaacaa

SEQ ID NO: 26069 - RNA, 22 nt, Artificial Sequence
  Synthetic
auauauaacuauagaguaacaa

SEQ ID NO: 26070 - RNA, 23 nt, Artificial Sequence
  Synthetic
aauauauaacuauagaguaacaa

SEQ ID NO: 26071 - RNA, 24 nt, Artificial Sequence
  Synthetic
uaauauauaacuauagaguaacaa

SEQ ID NO: 26072 - RNA, 18 nt, Artificial Sequence
  Synthetic
uuccucauacauuaacaa

SEQ ID NO: 26073 - RNA, 19 nt, Artificial Sequence
  Synthetic
uuuccucauacauuaacaa

SEQ ID NO: 26074 - RNA, 20 nt, Artificial Sequence
  Synthetic
uuuuccucauacauuaacaa

SEQ ID NO: 26075 - RNA, 21 nt, Artificial Sequence
  Synthetic
cuuuuccucauacauuaacaa

SEQ ID NO: 26076 - RNA, 22 nt, Artificial Sequence
  Synthetic
ccuuuuccucauacauuaacaa

SEQ ID NO: 26077 - RNA, 23 nt, Artificial Sequence
  Synthetic
uccuuuuccucauacauuaacaa

SEQ ID NO: 26078 - RNA, 24 nt, Artificial Sequence
  Synthetic
cuccuuuuccucauacauuaacaa

SEQ ID NO: 26079 - RNA, 18 nt, Artificial Sequence
  Synthetic
acuguccaguuuuaacaa

SEQ ID NO: 26080 - RNA, 19 nt, Artificial Sequence
  Synthetic
uacuguccaguuuuaacaa

SEQ ID NO: 26081 - RNA, 20 nt, Artificial Sequence
  Synthetic
uuacuguccaguuuuaacaa

SEQ ID NO: 26082 - RNA, 21 nt, Artificial Sequence
  Synthetic
uuuacuguccaguuuuaacaa

SEQ ID NO: 26083 - RNA, 22 nt, Artificial Sequence
  Synthetic
auuuacuguccaguuuuaacaa

SEQ ID NO: 26084 - RNA, 23 nt, Artificial Sequence
  Synthetic
uauuuacuguccaguuuuaacaa

SEQ ID NO: 26085 - RNA, 24 nt, Artificial Sequence
  Synthetic
uuauuuacuguccaguuuuaacaa

SEQ ID NO: 26086 - RNA, 21 nt, Artificial Sequence
  Synthetic
aauacaauuagacaaacacaa

SEQ ID NO: 26087 - RNA, 22 nt, Artificial Sequence
  Synthetic
aaauacaauuagacaaacacaa

SEQ ID NO: 26088 - RNA, 23 nt, Artificial Sequence
  Synthetic
aaaauacaauuagacaaacacaa

SEQ ID NO: 26089 - RNA, 19 nt, Artificial Sequence
  Synthetic
agcuaggauagacacacaa

SEQ ID NO: 26090 - RNA, 20 nt, Artificial Sequence
  Synthetic
aagcuaggauagacacacaa

SEQ ID NO: 26091 - RNA, 22 nt, Artificial Sequence
  Synthetic
agaagcuaggauagacacacaa

SEQ ID NO: 26092 - RNA, 23 nt, Artificial Sequence
  Synthetic
uagaagcuaggauagacacacaa

SEQ ID NO: 26093 - RNA, 24 nt, Artificial Sequence
  Synthetic
uuagaagcuaggauagacacacaa

SEQ ID NO: 26094 - RNA, 21 nt, Artificial Sequence
  Synthetic
acacaauggaauacuacacaa

SEQ ID NO: 26095 - RNA, 22 nt, Artificial Sequence
  Synthetic
cacacaauggaauacuacacaa

SEQ ID NO: 26096 - RNA, 23 nt, Artificial Sequence
  Synthetic
acacacaauggaauacuacacaa

SEQ ID NO: 26097 - RNA, 18 nt, Artificial Sequence
  Synthetic
caaaguugucaaccacaa

SEQ ID NO: 26098 - RNA, 19 nt, Artificial Sequence
  Synthetic
ucaaaguugucaaccacaa

SEQ ID NO: 26099 - RNA, 20 nt, Artificial Sequence
  Synthetic
cucaaaguugucaaccacaa

SEQ ID NO: 26100 - RNA, 21 nt, Artificial Sequence
  Synthetic
ccucaaaguugucaaccacaa

SEQ ID NO: 26101 - RNA, 23 nt, Artificial Sequence
  Synthetic
ugccucaaaguugucaaccacaa

SEQ ID NO: 26102 - RNA, 24 nt, Artificial Sequence
  Synthetic
augccucaaaguugucaaccacaa

SEQ ID NO: 26103 - RNA, 19 nt, Artificial Sequence
  Synthetic
uguguauuauuaaccacaa

SEQ ID NO: 26104 - RNA, 20 nt, Artificial Sequence
  Synthetic
auguguauuauuaaccacaa

SEQ ID NO: 26105 - RNA, 21 nt, Artificial Sequence
  Synthetic
aauguguauuauuaaccacaa

SEQ ID NO: 26106 - RNA, 22 nt, Artificial Sequence
  Synthetic
aaauguguauuauuaaccacaa

SEQ ID NO: 26107 - RNA, 23 nt, Artificial Sequence
  Synthetic
caaauguguauuauuaaccacaa

SEQ ID NO: 26108 - RNA, 24 nt, Artificial Sequence
  Synthetic
ucaaauguguauuauuaaccacaa

SEQ ID NO: 26109 - RNA, 21 nt, Artificial Sequence
  Synthetic
ugggcuaaagaguacccacaa

SEQ ID NO: 26110 - RNA, 23 nt, Artificial Sequence
  Synthetic
ugugggcuaaagaguacccacaa

SEQ ID NO: 26111 - RNA, 24 nt, Artificial Sequence
  Synthetic
cugugggcuaaagaguacccacaa

SEQ ID NO: 26112 - RNA, 19 nt, Artificial Sequence
  Synthetic
uggagcaaaaaggccacaa

SEQ ID NO: 26113 - RNA, 21 nt, Artificial Sequence
  Synthetic
uguggagcaaaaaggccacaa

SEQ ID NO: 26114 - RNA, 22 nt, Artificial Sequence
  Synthetic
auguggagcaaaaaggccacaa

SEQ ID NO: 26115 - RNA, 24 nt, Artificial Sequence
  Synthetic
agauguggagcaaaaaggccacaa

SEQ ID NO: 26116 - RNA, 18 nt, Artificial Sequence
  Synthetic
uagauucagagagcacaa

SEQ ID NO: 26117 - RNA, 19 nt, Artificial Sequence
  Synthetic
uuagauucagagagcacaa

SEQ ID NO: 26118 - RNA, 20 nt, Artificial Sequence
  Synthetic
uuuagauucagagagcacaa

SEQ ID NO: 26119 - RNA, 22 nt, Artificial Sequence
  Synthetic
aguuuagauucagagagcacaa

SEQ ID NO: 26120 - RNA, 24 nt, Artificial Sequence
  Synthetic
agaguuuagauucagagagcacaa

SEQ ID NO: 26121 - RNA, 18 nt, Artificial Sequence
  Synthetic
uuuagggaaauggcacaa

SEQ ID NO: 26122 - RNA, 19 nt, Artificial Sequence
  Synthetic
auuuagggaaauggcacaa

SEQ ID NO: 26123 - RNA, 20 nt, Artificial Sequence
  Synthetic
aauuuagggaaauggcacaa

SEQ ID NO: 26124 - RNA, 22 nt, Artificial Sequence
  Synthetic
ugaauuuagggaaauggcacaa

SEQ ID NO: 26125 - RNA, 23 nt, Artificial Sequence
  Synthetic
cugaauuuagggaaauggcacaa

SEQ ID NO: 26126 - RNA, 24 nt, Artificial Sequence
  Synthetic
ucugaauuuagggaaauggcacaa

SEQ ID NO: 26127 - RNA, 18 nt, Artificial Sequence
  Synthetic
cucuacaggcugucacaa

SEQ ID NO: 26128 - RNA, 19 nt, Artificial Sequence
  Synthetic
ucucuacaggcugucacaa

SEQ ID NO: 26129 - RNA, 20 nt, Artificial Sequence
  Synthetic
uucucuacaggcugucacaa

SEQ ID NO: 26130 - RNA, 22 nt, Artificial Sequence
  Synthetic
uguucucuacaggcugucacaa

SEQ ID NO: 26131 - RNA, 23 nt, Artificial Sequence
  Synthetic
cuguucucuacaggcugucacaa

SEQ ID NO: 26132 - RNA, 24 nt, Artificial Sequence
  Synthetic
ucuguucucuacaggcugucacaa

SEQ ID NO: 26133 - RNA, 18 nt, Artificial Sequence
  Synthetic
uugaaaauguauucacaa

SEQ ID NO: 26134 - RNA, 19 nt, Artificial Sequence
  Synthetic
cuugaaaauguauucacaa

SEQ ID NO: 26135 - RNA, 21 nt, Artificial Sequence
  Synthetic
ugcuugaaaauguauucacaa

SEQ ID NO: 26136 - RNA, 22 nt, Artificial Sequence
  Synthetic
uugcuugaaaauguauucacaa

SEQ ID NO: 26137 - RNA, 23 nt, Artificial Sequence
  Synthetic
uuugcuugaaaauguauucacaa

SEQ ID NO: 26138 - RNA, 24 nt, Artificial Sequence
  Synthetic
uuuugcuugaaaauguauucacaa

SEQ ID NO: 26139 - RNA, 21 nt, Artificial Sequence
  Synthetic
aacuuaaagaaauaaagacaa

SEQ ID NO: 26140 - RNA, 22 nt, Artificial Sequence
  Synthetic
aaacuuaaagaaauaaagacaa

SEQ ID NO: 26141 - RNA, 24 nt, Artificial Sequence
  Synthetic
agaaacuuaaagaaauaaagacaa

SEQ ID NO: 26142 - RNA, 18 nt, Artificial Sequence
  Synthetic
aauaccuacuccagacaa

SEQ ID NO: 26143 - RNA, 19 nt, Artificial Sequence
  Synthetic
aaauaccuacuccagacaa

SEQ ID NO: 26144 - RNA, 20 nt, Artificial Sequence
  Synthetic
uaaauaccuacuccagacaa

SEQ ID NO: 26145 - RNA, 21 nt, Artificial Sequence
  Synthetic
uuaaauaccuacuccagacaa

SEQ ID NO: 26146 - RNA, 22 nt, Artificial Sequence
  Synthetic
auuaaauaccuacuccagacaa

SEQ ID NO: 26147 - RNA, 23 nt, Artificial Sequence
  Synthetic
aauuaaauaccuacuccagacaa

SEQ ID NO: 26148 - RNA, 24 nt, Artificial Sequence
  Synthetic
uaauuaaauaccuacuccagacaa

SEQ ID NO: 26149 - RNA, 18 nt, Artificial Sequence
  Synthetic
cucaaaaguuugagacaa

SEQ ID NO: 26150 - RNA, 20 nt, Artificial Sequence
  Synthetic
ugcucaaaaguuugagacaa

SEQ ID NO: 26151 - RNA, 21 nt, Artificial Sequence
  Synthetic
cugcucaaaaguuugagacaa

SEQ ID NO: 26152 - RNA, 22 nt, Artificial Sequence
  Synthetic
ccugcucaaaaguuugagacaa

SEQ ID NO: 26153 - RNA, 23 nt, Artificial Sequence
  Synthetic
uccugcucaaaaguuugagacaa

SEQ ID NO: 26154 - RNA, 24 nt, Artificial Sequence
  Synthetic
cuccugcucaaaaguuugagacaa

SEQ ID NO: 26155 - RNA, 18 nt, Artificial Sequence
  Synthetic
aauagaggcaauagacaa

SEQ ID NO: 26156 - RNA, 19 nt, Artificial Sequence
  Synthetic
caauagaggcaauagacaa

SEQ ID NO: 26157 - RNA, 20 nt, Artificial Sequence
  Synthetic
acaauagaggcaauagacaa

SEQ ID NO: 26158 - RNA, 21 nt, Artificial Sequence
  Synthetic
aacaauagaggcaauagacaa

SEQ ID NO: 26159 - RNA, 22 nt, Artificial Sequence
  Synthetic
caacaauagaggcaauagacaa

SEQ ID NO: 26160 - RNA, 23 nt, Artificial Sequence
  Synthetic
ucaacaauagaggcaauagacaa

SEQ ID NO: 26161 - RNA, 24 nt, Artificial Sequence
  Synthetic
aucaacaauagaggcaauagacaa

SEQ ID NO: 26162 - RNA, 18 nt, Artificial Sequence
  Synthetic
acuguugaaggaggacaa

SEQ ID NO: 26163 - RNA, 19 nt, Artificial Sequence
  Synthetic
cacuguugaaggaggacaa

SEQ ID NO: 26164 - RNA, 21 nt, Artificial Sequence
  Synthetic
agcacuguugaaggaggacaa

SEQ ID NO: 26165 - RNA, 22 nt, Artificial Sequence
  Synthetic
uagcacuguugaaggaggacaa

SEQ ID NO: 26166 - RNA, 23 nt, Artificial Sequence
  Synthetic
cuagcacuguugaaggaggacaa

SEQ ID NO: 26167 - RNA, 24 nt, Artificial Sequence
  Synthetic
acuagcacuguugaaggaggacaa

SEQ ID NO: 26168 - RNA, 18 nt, Artificial Sequence
  Synthetic
uccucugaauagggacaa

SEQ ID NO: 26169 - RNA, 19 nt, Artificial Sequence
  Synthetic
uuccucugaauagggacaa

SEQ ID NO: 26170 - RNA, 20 nt, Artificial Sequence
  Synthetic
auuccucugaauagggacaa

SEQ ID NO: 26171 - RNA, 22 nt, Artificial Sequence
  Synthetic
agauuccucugaauagggacaa

SEQ ID NO: 26172 - RNA, 23 nt, Artificial Sequence
  Synthetic
uagauuccucugaauagggacaa

SEQ ID NO: 26173 - RNA, 24 nt, Artificial Sequence
  Synthetic
auagauuccucugaauagggacaa

SEQ ID NO: 26174 - RNA, 19 nt, Artificial Sequence
  Synthetic
aguuugauaacuuggacaa

SEQ ID NO: 26175 - RNA, 20 nt, Artificial Sequence
  Synthetic
uaguuugauaacuuggacaa

SEQ ID NO: 26176 - RNA, 22 nt, Artificial Sequence
  Synthetic
uguaguuugauaacuuggacaa

SEQ ID NO: 26177 - RNA, 23 nt, Artificial Sequence
  Synthetic
cuguaguuugauaacuuggacaa

SEQ ID NO: 26178 - RNA, 24 nt, Artificial Sequence
  Synthetic
ccuguaguuugauaacuuggacaa

SEQ ID NO: 26179 - RNA, 18 nt, Artificial Sequence
  Synthetic
cuuuuggcauuuggacaa

SEQ ID NO: 26180 - RNA, 19 nt, Artificial Sequence
  Synthetic
acuuuuggcauuuggacaa

SEQ ID NO: 26181 - RNA, 20 nt, Artificial Sequence
  Synthetic
aacuuuuggcauuuggacaa

SEQ ID NO: 26182 - RNA, 21 nt, Artificial Sequence
  Synthetic
caacuuuuggcauuuggacaa

SEQ ID NO: 26183 - RNA, 22 nt, Artificial Sequence
  Synthetic
acaacuuuuggcauuuggacaa

SEQ ID NO: 26184 - RNA, 23 nt, Artificial Sequence
  Synthetic
aacaacuuuuggcauuuggacaa

SEQ ID NO: 26185 - RNA, 24 nt, Artificial Sequence
  Synthetic
aaacaacuuuuggcauuuggacaa

SEQ ID NO: 26186 - RNA, 18 nt, Artificial Sequence
  Synthetic
caaaguguugcaugacaa

SEQ ID NO: 26187 - RNA, 19 nt, Artificial Sequence
  Synthetic
ucaaaguguugcaugacaa

SEQ ID NO: 26188 - RNA, 20 nt, Artificial Sequence
  Synthetic
uucaaaguguugcaugacaa

SEQ ID NO: 26189 - RNA, 21 nt, Artificial Sequence
  Synthetic
auucaaaguguugcaugacaa

SEQ ID NO: 26190 - RNA, 23 nt, Artificial Sequence
  Synthetic
ugauucaaaguguugcaugacaa

SEQ ID NO: 26191 - RNA, 24 nt, Artificial Sequence
  Synthetic
cugauucaaaguguugcaugacaa

SEQ ID NO: 26192 - RNA, 18 nt, Artificial Sequence
  Synthetic
uugagaaccaagugacaa

SEQ ID NO: 26193 - RNA, 19 nt, Artificial Sequence
  Synthetic
uuugagaaccaagugacaa

SEQ ID NO: 26194 - RNA, 20 nt, Artificial Sequence
  Synthetic
cuuugagaaccaagugacaa

SEQ ID NO: 26195 - RNA, 21 nt, Artificial Sequence
  Synthetic
acuuugagaaccaagugacaa

SEQ ID NO: 26196 - RNA, 22 nt, Artificial Sequence
  Synthetic
cacuuugagaaccaagugacaa

SEQ ID NO: 26197 - RNA, 23 nt, Artificial Sequence
  Synthetic
ucacuuugagaaccaagugacaa

SEQ ID NO: 26198 - RNA, 24 nt, Artificial Sequence
  Synthetic
uucacuuugagaaccaagugacaa

SEQ ID NO: 26199 - RNA, 18 nt, Artificial Sequence
  Synthetic
uuagguccaagaauacaa

SEQ ID NO: 26200 - RNA, 19 nt, Artificial Sequence
  Synthetic
uuuagguccaagaauacaa

SEQ ID NO: 26201 - RNA, 20 nt, Artificial Sequence
  Synthetic
uuuuagguccaagaauacaa

SEQ ID NO: 26202 - RNA, 21 nt, Artificial Sequence
  Synthetic
cuuuuagguccaagaauacaa

SEQ ID NO: 26203 - RNA, 22 nt, Artificial Sequence
  Synthetic
ucuuuuagguccaagaauacaa

SEQ ID NO: 26204 - RNA, 21 nt, Artificial Sequence
  Synthetic
uuugccuguaugaauauacaa

SEQ ID NO: 26205 - RNA, 22 nt, Artificial Sequence
  Synthetic
auuugccuguaugaauauacaa

SEQ ID NO: 26206 - RNA, 23 nt, Artificial Sequence
  Synthetic
cauuugccuguaugaauauacaa

SEQ ID NO: 26207 - RNA, 24 nt, Artificial Sequence
  Synthetic
acauuugccuguaugaauauacaa

SEQ ID NO: 26208 - RNA, 18 nt, Artificial Sequence
  Synthetic
cuguguggagauauacaa

SEQ ID NO: 26209 - RNA, 19 nt, Artificial Sequence
  Synthetic
acuguguggagauauacaa

SEQ ID NO: 26210 - RNA, 20 nt, Artificial Sequence
  Synthetic
cacuguguggagauauacaa

SEQ ID NO: 26211 - RNA, 21 nt, Artificial Sequence
  Synthetic
ccacuguguggagauauacaa

SEQ ID NO: 26212 - RNA, 22 nt, Artificial Sequence
  Synthetic
accacuguguggagauauacaa

SEQ ID NO: 26213 - RNA, 23 nt, Artificial Sequence
  Synthetic
uaccacuguguggagauauacaa

SEQ ID NO: 26214 - RNA, 24 nt, Artificial Sequence
  Synthetic
auaccacuguguggagauauacaa

SEQ ID NO: 26215 - RNA, 21 nt, Artificial Sequence
  Synthetic
agggaaagaaggcuuauacaa

SEQ ID NO: 26216 - RNA, 22 nt, Artificial Sequence
  Synthetic
aagggaaagaaggcuuauacaa

SEQ ID NO: 26217 - RNA, 23 nt, Artificial Sequence
  Synthetic
uaagggaaagaaggcuuauacaa

SEQ ID NO: 26218 - RNA, 21 nt, Artificial Sequence
  Synthetic
cauuaaagauguuuuauacaa

SEQ ID NO: 26219 - RNA, 22 nt, Artificial Sequence
  Synthetic
acauuaaagauguuuuauacaa

SEQ ID NO: 26220 - RNA, 24 nt, Artificial Sequence
  Synthetic
ugacauuaaagauguuuuauacaa

SEQ ID NO: 26221 - RNA, 18 nt, Artificial Sequence
  Synthetic
auuguuaaagaacuacaa

SEQ ID NO: 26222 - RNA, 19 nt, Artificial Sequence
  Synthetic
cauuguuaaagaacuacaa

SEQ ID NO: 26223 - RNA, 21 nt, Artificial Sequence
  Synthetic
ugcauuguuaaagaacuacaa

SEQ ID NO: 26224 - RNA, 23 nt, Artificial Sequence
  Synthetic
ugugcauuguuaaagaacuacaa

SEQ ID NO: 26225 - RNA, 24 nt, Artificial Sequence
  Synthetic
uugugcauuguuaaagaacuacaa

SEQ ID NO: 26226 - RNA, 18 nt, Artificial Sequence
  Synthetic
uggcaccaucaccuacaa

SEQ ID NO: 26227 - RNA, 19 nt, Artificial Sequence
  Synthetic
uuggcaccaucaccuacaa

SEQ ID NO: 26228 - RNA, 20 nt, Artificial Sequence
  Synthetic
cuuggcaccaucaccuacaa

SEQ ID NO: 26229 - RNA, 21 nt, Artificial Sequence
  Synthetic
ucuuggcaccaucaccuacaa

SEQ ID NO: 26230 - RNA, 22 nt, Artificial Sequence
  Synthetic
cucuuggcaccaucaccuacaa

SEQ ID NO: 26231 - RNA, 23 nt, Artificial Sequence
  Synthetic
ucucuuggcaccaucaccuacaa

SEQ ID NO: 26232 - RNA, 24 nt, Artificial Sequence
  Synthetic
uucucuuggcaccaucaccuacaa

SEQ ID NO: 26233 - RNA, 18 nt, Artificial Sequence
  Synthetic
ucagcugcugcccuacaa

SEQ ID NO: 26234 - RNA, 19 nt, Artificial Sequence
  Synthetic
uucagcugcugcccuacaa

SEQ ID NO: 26235 - RNA, 21 nt, Artificial Sequence
  Synthetic
uguucagcugcugcccuacaa

SEQ ID NO: 26236 - RNA, 22 nt, Artificial Sequence
  Synthetic
cuguucagcugcugcccuacaa

SEQ ID NO: 26237 - RNA, 23 nt, Artificial Sequence
  Synthetic
ccuguucagcugcugcccuacaa

SEQ ID NO: 26238 - RNA, 24 nt, Artificial Sequence
  Synthetic
cccuguucagcugcugcccuacaa

SEQ ID NO: 26239 - RNA, 19 nt, Artificial Sequence
  Synthetic
aguguuccugcagcuacaa

SEQ ID NO: 26240 - RNA, 20 nt, Artificial Sequence
  Synthetic
uaguguuccugcagcuacaa

SEQ ID NO: 26241 - RNA, 21 nt, Artificial Sequence
  Synthetic
uuaguguuccugcagcuacaa

SEQ ID NO: 26242 - RNA, 22 nt, Artificial Sequence
  Synthetic
uuuaguguuccugcagcuacaa

SEQ ID NO: 26243 - RNA, 23 nt, Artificial Sequence
  Synthetic
auuuaguguuccugcagcuacaa

SEQ ID NO: 26244 - RNA, 24 nt, Artificial Sequence
  Synthetic
aauuuaguguuccugcagcuacaa

SEQ ID NO: 26245 - RNA, 18 nt, Artificial Sequence
  Synthetic
ugagaucgauuucuacaa

SEQ ID NO: 26246 - RNA, 19 nt, Artificial Sequence
  Synthetic
uugagaucgauuucuacaa

SEQ ID NO: 26247 - RNA, 20 nt, Artificial Sequence
  Synthetic
uuugagaucgauuucuacaa

SEQ ID NO: 26248 - RNA, 22 nt, Artificial Sequence
  Synthetic
aguuugagaucgauuucuacaa

SEQ ID NO: 26249 - RNA, 23 nt, Artificial Sequence
  Synthetic
aaguuugagaucgauuucuacaa

SEQ ID NO: 26250 - RNA, 24 nt, Artificial Sequence
  Synthetic
uaaguuugagaucgauuucuacaa

SEQ ID NO: 26251 - RNA, 21 nt, Artificial Sequence
  Synthetic
auacuuuuuucaucaguacaa

SEQ ID NO: 26252 - RNA, 23 nt, Artificial Sequence
  Synthetic
ugauacuuuuuucaucaguacaa

SEQ ID NO: 26253 - RNA, 24 nt, Artificial Sequence
  Synthetic
cugauacuuuuuucaucaguacaa

SEQ ID NO: 26254 - RNA, 19 nt, Artificial Sequence
  Synthetic
ugcagugacauugguacaa

SEQ ID NO: 26255 - RNA, 20 nt, Artificial Sequence
  Synthetic
augcagugacauugguacaa

SEQ ID NO: 26256 - RNA, 21 nt, Artificial Sequence
  Synthetic
caugcagugacauugguacaa

SEQ ID NO: 26257 - RNA, 22 nt, Artificial Sequence
  Synthetic
ucaugcagugacauugguacaa

SEQ ID NO: 26258 - RNA, 23 nt, Artificial Sequence
  Synthetic
aucaugcagugacauugguacaa

SEQ ID NO: 26259 - RNA, 24 nt, Artificial Sequence
  Synthetic
uaucaugcagugacauugguacaa

SEQ ID NO: 26260 - RNA, 18 nt, Artificial Sequence
  Synthetic
uguucagcugucuuacaa

SEQ ID NO: 26261 - RNA, 19 nt, Artificial Sequence
  Synthetic
uuguucagcugucuuacaa

SEQ ID NO: 26262 - RNA, 20 nt, Artificial Sequence
  Synthetic
uuuguucagcugucuuacaa

SEQ ID NO: 26263 - RNA, 21 nt, Artificial Sequence
  Synthetic
uuuuguucagcugucuuacaa

SEQ ID NO: 26264 - RNA, 22 nt, Artificial Sequence
  Synthetic
auuuuguucagcugucuuacaa

SEQ ID NO: 26265 - RNA, 23 nt, Artificial Sequence
  Synthetic
aauuuuguucagcugucuuacaa

SEQ ID NO: 26266 - RNA, 24 nt, Artificial Sequence
  Synthetic
caauuuuguucagcugucuuacaa

SEQ ID NO: 26267 - RNA, 18 nt, Artificial Sequence
  Synthetic
ucagaugggcauuuacaa

SEQ ID NO: 26268 - RNA, 19 nt, Artificial Sequence
  Synthetic
cucagaugggcauuuacaa

SEQ ID NO: 26269 - RNA, 20 nt, Artificial Sequence
  Synthetic
ccucagaugggcauuuacaa

SEQ ID NO: 26270 - RNA, 21 nt, Artificial Sequence
  Synthetic
accucagaugggcauuuacaa

SEQ ID NO: 26271 - RNA, 22 nt, Artificial Sequence
  Synthetic
aaccucagaugggcauuuacaa

SEQ ID NO: 26272 - RNA, 23 nt, Artificial Sequence
  Synthetic
aaaccucagaugggcauuuacaa

SEQ ID NO: 26273 - RNA, 24 nt, Artificial Sequence
  Synthetic
aaaaccucagaugggcauuuacaa

SEQ ID NO: 26274 - RNA, 19 nt, Artificial Sequence
  Synthetic
agugauagaagaaaaccaa

SEQ ID NO: 26275 - RNA, 20 nt, Artificial Sequence
  Synthetic
aagugauagaagaaaaccaa

SEQ ID NO: 26276 - RNA, 21 nt, Artificial Sequence
  Synthetic
aaagugauagaagaaaaccaa

SEQ ID NO: 26277 - RNA, 22 nt, Artificial Sequence
  Synthetic
aaaagugauagaagaaaaccaa

SEQ ID NO: 26278 - RNA, 23 nt, Artificial Sequence
  Synthetic
uaaaagugauagaagaaaaccaa

SEQ ID NO: 26279 - RNA, 24 nt, Artificial Sequence
  Synthetic
cuaaaagugauagaagaaaaccaa

SEQ ID NO: 26280 - RNA, 18 nt, Artificial Sequence
  Synthetic
auaaauuauagaaaccaa

SEQ ID NO: 26281 - RNA, 19 nt, Artificial Sequence
  Synthetic
uauaaauuauagaaaccaa

SEQ ID NO: 26282 - RNA, 20 nt, Artificial Sequence
  Synthetic
uuauaaauuauagaaaccaa

SEQ ID NO: 26283 - RNA, 22 nt, Artificial Sequence
  Synthetic
uguuauaaauuauagaaaccaa

SEQ ID NO: 26284 - RNA, 23 nt, Artificial Sequence
  Synthetic
auguuauaaauuauagaaaccaa

SEQ ID NO: 26285 - RNA, 18 nt, Artificial Sequence
  Synthetic
aaauacauuauaaaccaa

SEQ ID NO: 26286 - RNA, 19 nt, Artificial Sequence
  Synthetic
caaauacauuauaaaccaa

SEQ ID NO: 26287 - RNA, 23 nt, Artificial Sequence
  Synthetic
ugggcaaauacauuauaaaccaa

SEQ ID NO: 26288 - RNA, 24 nt, Artificial Sequence
  Synthetic
uugggcaaauacauuauaaaccaa

SEQ ID NO: 26289 - RNA, 18 nt, Artificial Sequence
  Synthetic
augcaucuuuucaaccaa

SEQ ID NO: 26290 - RNA, 19 nt, Artificial Sequence
  Synthetic
aaugcaucuuuucaaccaa

SEQ ID NO: 26291 - RNA, 20 nt, Artificial Sequence
  Synthetic
uaaugcaucuuuucaaccaa

SEQ ID NO: 26292 - RNA, 21 nt, Artificial Sequence
  Synthetic
auaaugcaucuuuucaaccaa

SEQ ID NO: 26293 - RNA, 23 nt, Artificial Sequence
  Synthetic
ugauaaugcaucuuuucaaccaa

SEQ ID NO: 26294 - RNA, 24 nt, Artificial Sequence
  Synthetic
augauaaugcaucuuuucaaccaa

SEQ ID NO: 26295 - RNA, 18 nt, Artificial Sequence
  Synthetic
cuuuucuuccugaaccaa

SEQ ID NO: 26296 - RNA, 19 nt, Artificial Sequence
  Synthetic
acuuuucuuccugaaccaa

SEQ ID NO: 26297 - RNA, 20 nt, Artificial Sequence
  Synthetic
aacuuuucuuccugaaccaa

SEQ ID NO: 26298 - RNA, 21 nt, Artificial Sequence
  Synthetic
aaacuuuucuuccugaaccaa

SEQ ID NO: 26299 - RNA, 22 nt, Artificial Sequence
  Synthetic
uaaacuuuucuuccugaaccaa

SEQ ID NO: 26300 - RNA, 23 nt, Artificial Sequence
  Synthetic
uuaaacuuuucuuccugaaccaa

SEQ ID NO: 26301 - RNA, 24 nt, Artificial Sequence
  Synthetic
uuuaaacuuuucuuccugaaccaa

SEQ ID NO: 26302 - RNA, 18 nt, Artificial Sequence
  Synthetic
auaauugauuugaaccaa

SEQ ID NO: 26303 - RNA, 19 nt, Artificial Sequence
  Synthetic
uauaauugauuugaaccaa

SEQ ID NO: 26304 - RNA, 20 nt, Artificial Sequence
  Synthetic
uuauaauugauuugaaccaa

SEQ ID NO: 26305 - RNA, 21 nt, Artificial Sequence
  Synthetic
auuauaauugauuugaaccaa

SEQ ID NO: 26306 - RNA, 22 nt, Artificial Sequence
  Synthetic
uauuauaauugauuugaaccaa

SEQ ID NO: 26307 - RNA, 23 nt, Artificial Sequence
  Synthetic
auauuauaauugauuugaaccaa

SEQ ID NO: 26308 - RNA, 24 nt, Artificial Sequence
  Synthetic
uauauuauaauugauuugaaccaa

SEQ ID NO: 26309 - RNA, 18 nt, Artificial Sequence
  Synthetic
auuugccaugcuaaccaa

SEQ ID NO: 26310 - RNA, 19 nt, Artificial Sequence
  Synthetic
cauuugccaugcuaaccaa

SEQ ID NO: 26311 - RNA, 20 nt, Artificial Sequence
  Synthetic
acauuugccaugcuaaccaa

SEQ ID NO: 26312 - RNA, 21 nt, Artificial Sequence
  Synthetic
uacauuugccaugcuaaccaa

SEQ ID NO: 26313 - RNA, 22 nt, Artificial Sequence
  Synthetic
auacauuugccaugcuaaccaa

SEQ ID NO: 26314 - RNA, 23 nt, Artificial Sequence
  Synthetic
uauacauuugccaugcuaaccaa

SEQ ID NO: 26315 - RNA, 24 nt, Artificial Sequence
  Synthetic
cuauacauuugccaugcuaaccaa

SEQ ID NO: 26316 - RNA, 18 nt, Artificial Sequence
  Synthetic
uauacuuuggguaaccaa

SEQ ID NO: 26317 - RNA, 19 nt, Artificial Sequence
  Synthetic
cuauacuuuggguaaccaa

SEQ ID NO: 26318 - RNA, 21 nt, Artificial Sequence
  Synthetic
ugcuauacuuuggguaaccaa

SEQ ID NO: 26319 - RNA, 23 nt, Artificial Sequence
  Synthetic
ugugcuauacuuuggguaaccaa

SEQ ID NO: 26320 - RNA, 24 nt, Artificial Sequence
  Synthetic
augugcuauacuuuggguaaccaa

SEQ ID NO: 26321 - RNA, 18 nt, Artificial Sequence
  Synthetic
caauaauauauucaccaa

SEQ ID NO: 26322 - RNA, 19 nt, Artificial Sequence
  Synthetic
ccaauaauauauucaccaa

SEQ ID NO: 26323 - RNA, 20 nt, Artificial Sequence
  Synthetic
uccaauaauauauucaccaa

SEQ ID NO: 26324 - RNA, 21 nt, Artificial Sequence
  Synthetic
auccaauaauauauucaccaa

SEQ ID NO: 26325 - RNA, 22 nt, Artificial Sequence
  Synthetic
aauccaauaauauauucaccaa

SEQ ID NO: 26326 - RNA, 23 nt, Artificial Sequence
  Synthetic
aaauccaauaauauauucaccaa

SEQ ID NO: 26327 - RNA, 18 nt, Artificial Sequence
  Synthetic
agaucacaucuagaccaa

SEQ ID NO: 26328 - RNA, 19 nt, Artificial Sequence
  Synthetic
cagaucacaucuagaccaa

SEQ ID NO: 26329 - RNA, 20 nt, Artificial Sequence
  Synthetic
ccagaucacaucuagaccaa

SEQ ID NO: 26330 - RNA, 21 nt, Artificial Sequence
  Synthetic
cccagaucacaucuagaccaa

SEQ ID NO: 26331 - RNA, 19 nt, Artificial Sequence
  Synthetic
agaauacagaggcgaccaa

SEQ ID NO: 26332 - RNA, 21 nt, Artificial Sequence
  Synthetic
agagaauacagaggcgaccaa

SEQ ID NO: 26333 - RNA, 22 nt, Artificial Sequence
  Synthetic
cagagaauacagaggcgaccaa

SEQ ID NO: 26334 - RNA, 23 nt, Artificial Sequence
  Synthetic
ucagagaauacagaggcgaccaa

SEQ ID NO: 26335 - RNA, 24 nt, Artificial Sequence
  Synthetic
cucagagaauacagaggcgaccaa

SEQ ID NO: 26336 - RNA, 21 nt, Artificial Sequence
  Synthetic
caugugacuaguugugaccaa

SEQ ID NO: 26337 - RNA, 22 nt, Artificial Sequence
  Synthetic
ccaugugacuaguugugaccaa

SEQ ID NO: 26338 - RNA, 24 nt, Artificial Sequence
  Synthetic
agccaugugacuaguugugaccaa

SEQ ID NO: 26339 - RNA, 19 nt, Artificial Sequence
  Synthetic
ugcccacaauagauaccaa

SEQ ID NO: 26340 - RNA, 20 nt, Artificial Sequence
  Synthetic
cugcccacaauagauaccaa

SEQ ID NO: 26341 - RNA, 21 nt, Artificial Sequence
  Synthetic
ucugcccacaauagauaccaa

SEQ ID NO: 26342 - RNA, 22 nt, Artificial Sequence
  Synthetic
cucugcccacaauagauaccaa

SEQ ID NO: 26343 - RNA, 23 nt, Artificial Sequence
  Synthetic
ucucugcccacaauagauaccaa

SEQ ID NO: 26344 - RNA, 24 nt, Artificial Sequence
  Synthetic
aucucugcccacaauagauaccaa

SEQ ID NO: 26345 - RNA, 18 nt, Artificial Sequence
  Synthetic
ugcaacacacugacccaa

SEQ ID NO: 26346 - RNA, 19 nt, Artificial Sequence
  Synthetic
uugcaacacacugacccaa

SEQ ID NO: 26347 - RNA, 21 nt, Artificial Sequence
  Synthetic
aguugcaacacacugacccaa

SEQ ID NO: 26348 - RNA, 22 nt, Artificial Sequence
  Synthetic
aaguugcaacacacugacccaa

SEQ ID NO: 26349 - RNA, 23 nt, Artificial Sequence
  Synthetic
caaguugcaacacacugacccaa

SEQ ID NO: 26350 - RNA, 24 nt, Artificial Sequence
  Synthetic
acaaguugcaacacacugacccaa

SEQ ID NO: 26351 - RNA, 18 nt, Artificial Sequence
  Synthetic
aguuguauaaaugcccaa

SEQ ID NO: 26352 - RNA, 19 nt, Artificial Sequence
  Synthetic
caguuguauaaaugcccaa

SEQ ID NO: 26353 - RNA, 20 nt, Artificial Sequence
  Synthetic
acaguuguauaaaugcccaa

SEQ ID NO: 26354 - RNA, 21 nt, Artificial Sequence
  Synthetic
uacaguuguauaaaugcccaa

SEQ ID NO: 26355 - RNA, 22 nt, Artificial Sequence
  Synthetic
uuacaguuguauaaaugcccaa

SEQ ID NO: 26356 - RNA, 23 nt, Artificial Sequence
  Synthetic
cuuacaguuguauaaaugcccaa

SEQ ID NO: 26357 - RNA, 24 nt, Artificial Sequence
  Synthetic
ccuuacaguuguauaaaugcccaa

SEQ ID NO: 26358 - RNA, 18 nt, Artificial Sequence
  Synthetic
aguuguaaauaaucccaa

SEQ ID NO: 26359 - RNA, 19 nt, Artificial Sequence
  Synthetic
aaguuguaaauaaucccaa

SEQ ID NO: 26360 - RNA, 22 nt, Artificial Sequence
  Synthetic
uggaaguuguaaauaaucccaa

SEQ ID NO: 26361 - RNA, 23 nt, Artificial Sequence
  Synthetic
cuggaaguuguaaauaaucccaa

SEQ ID NO: 26362 - RNA, 24 nt, Artificial Sequence
  Synthetic
ccuggaaguuguaaauaaucccaa

SEQ ID NO: 26363 - RNA, 21 nt, Artificial Sequence
  Synthetic
ucugccuccccuuccucccaa

SEQ ID NO: 26364 - RNA, 23 nt, Artificial Sequence
  Synthetic
ugucugccuccccuuccucccaa

SEQ ID NO: 26365 - RNA, 24 nt, Artificial Sequence
  Synthetic
cugucugccuccccuuccucccaa

SEQ ID NO: 26366 - RNA, 18 nt, Artificial Sequence
  Synthetic
auuauaacaaggucccaa

SEQ ID NO: 26367 - RNA, 20 nt, Artificial Sequence
  Synthetic
agauuauaacaaggucccaa

SEQ ID NO: 26368 - RNA, 21 nt, Artificial Sequence
  Synthetic
cagauuauaacaaggucccaa

SEQ ID NO: 26369 - RNA, 23 nt, Artificial Sequence
  Synthetic
agcagauuauaacaaggucccaa

SEQ ID NO: 26370 - RNA, 24 nt, Artificial Sequence
  Synthetic
aagcagauuauaacaaggucccaa

SEQ ID NO: 26371 - RNA, 18 nt, Artificial Sequence
  Synthetic
uuauuuguuacuucccaa

SEQ ID NO: 26372 - RNA, 20 nt, Artificial Sequence
  Synthetic
uguuauuuguuacuucccaa

SEQ ID NO: 26373 - RNA, 21 nt, Artificial Sequence
  Synthetic
cuguuauuuguuacuucccaa

SEQ ID NO: 26374 - RNA, 22 nt, Artificial Sequence
  Synthetic
ucuguuauuuguuacuucccaa

SEQ ID NO: 26375 - RNA, 23 nt, Artificial Sequence
  Synthetic
cucuguuauuuguuacuucccaa

SEQ ID NO: 26376 - RNA, 24 nt, Artificial Sequence
  Synthetic
ucucuguuauuuguuacuucccaa

SEQ ID NO: 26377 - RNA, 18 nt, Artificial Sequence
  Synthetic
uaucaauuuauuucccaa

SEQ ID NO: 26378 - RNA, 19 nt, Artificial Sequence
  Synthetic
auaucaauuuauuucccaa

SEQ ID NO: 26379 - RNA, 20 nt, Artificial Sequence
  Synthetic
uauaucaauuuauuucccaa

SEQ ID NO: 26380 - RNA, 21 nt, Artificial Sequence
  Synthetic
uuauaucaauuuauuucccaa

SEQ ID NO: 26381 - RNA, 22 nt, Artificial Sequence
  Synthetic
auuauaucaauuuauuucccaa

SEQ ID NO: 26382 - RNA, 24 nt, Artificial Sequence
  Synthetic
agauuauaucaauuuauuucccaa

SEQ ID NO: 26383 - RNA, 18 nt, Artificial Sequence
  Synthetic
uugggugacagaagccaa

SEQ ID NO: 26384 - RNA, 19 nt, Artificial Sequence
  Synthetic
uuugggugacagaagccaa

SEQ ID NO: 26385 - RNA, 20 nt, Artificial Sequence
  Synthetic
uuuugggugacagaagccaa

SEQ ID NO: 26386 - RNA, 21 nt, Artificial Sequence
  Synthetic
auuuugggugacagaagccaa

SEQ ID NO: 26387 - RNA, 22 nt, Artificial Sequence
  Synthetic
uauuuugggugacagaagccaa

SEQ ID NO: 26388 - RNA, 24 nt, Artificial Sequence
  Synthetic
aguauuuugggugacagaagccaa

SEQ ID NO: 26389 - RNA, 19 nt, Artificial Sequence
  Synthetic
aguuuaugugcagagccaa

SEQ ID NO: 26390 - RNA, 20 nt, Artificial Sequence
  Synthetic
aaguuuaugugcagagccaa

SEQ ID NO: 26391 - RNA, 21 nt, Artificial Sequence
  Synthetic
aaaguuuaugugcagagccaa

SEQ ID NO: 26392 - RNA, 22 nt, Artificial Sequence
  Synthetic
uaaaguuuaugugcagagccaa

SEQ ID NO: 26393 - RNA, 23 nt, Artificial Sequence
  Synthetic
uuaaaguuuaugugcagagccaa

SEQ ID NO: 26394 - RNA, 24 nt, Artificial Sequence
  Synthetic
uuuaaaguuuaugugcagagccaa

SEQ ID NO: 26395 - RNA, 18 nt, Artificial Sequence
  Synthetic
auagauucucugagccaa

SEQ ID NO: 26396 - RNA, 19 nt, Artificial Sequence
  Synthetic
cauagauucucugagccaa

SEQ ID NO: 26397 - RNA, 20 nt, Artificial Sequence
  Synthetic
acauagauucucugagccaa

SEQ ID NO: 26398 - RNA, 21 nt, Artificial Sequence
  Synthetic
aacauagauucucugagccaa

SEQ ID NO: 26399 - RNA, 22 nt, Artificial Sequence
  Synthetic
caacauagauucucugagccaa

SEQ ID NO: 26400 - RNA, 23 nt, Artificial Sequence
  Synthetic
ccaacauagauucucugagccaa

SEQ ID NO: 26401 - RNA, 24 nt, Artificial Sequence
  Synthetic
cccaacauagauucucugagccaa

SEQ ID NO: 26402 - RNA, 18 nt, Artificial Sequence
  Synthetic
cugucaagcuugagccaa

SEQ ID NO: 26403 - RNA, 19 nt, Artificial Sequence
  Synthetic
acugucaagcuugagccaa

SEQ ID NO: 26404 - RNA, 20 nt, Artificial Sequence
  Synthetic
cacugucaagcuugagccaa

SEQ ID NO: 26405 - RNA, 21 nt, Artificial Sequence
  Synthetic
acacugucaagcuugagccaa

SEQ ID NO: 26406 - RNA, 22 nt, Artificial Sequence
  Synthetic
cacacugucaagcuugagccaa

SEQ ID NO: 26407 - RNA, 23 nt, Artificial Sequence
  Synthetic
acacacugucaagcuugagccaa

SEQ ID NO: 26408 - RNA, 24 nt, Artificial Sequence
  Synthetic
cacacacugucaagcuugagccaa

SEQ ID NO: 26409 - RNA, 18 nt, Artificial Sequence
  Synthetic
aggcaaaugugaggccaa

SEQ ID NO: 26410 - RNA, 19 nt, Artificial Sequence
  Synthetic
aaggcaaaugugaggccaa

SEQ ID NO: 26411 - RNA, 20 nt, Artificial Sequence
  Synthetic
caaggcaaaugugaggccaa

SEQ ID NO: 26412 - RNA, 21 nt, Artificial Sequence
  Synthetic
ucaaggcaaaugugaggccaa

SEQ ID NO: 26413 - RNA, 22 nt, Artificial Sequence
  Synthetic
uucaaggcaaaugugaggccaa

SEQ ID NO: 26414 - RNA, 23 nt, Artificial Sequence
  Synthetic
cuucaaggcaaaugugaggccaa

SEQ ID NO: 26415 - RNA, 24 nt, Artificial Sequence
  Synthetic
acuucaaggcaaaugugaggccaa

SEQ ID NO: 26416 - RNA, 18 nt, Artificial Sequence
  Synthetic
uaaagauagaguggccaa

SEQ ID NO: 26417 - RNA, 19 nt, Artificial Sequence
  Synthetic
cuaaagauagaguggccaa

SEQ ID NO: 26418 - RNA, 20 nt, Artificial Sequence
  Synthetic
ucuaaagauagaguggccaa

SEQ ID NO: 26419 - RNA, 22 nt, Artificial Sequence
  Synthetic
agucuaaagauagaguggccaa

SEQ ID NO: 26420 - RNA, 23 nt, Artificial Sequence
  Synthetic
cagucuaaagauagaguggccaa

SEQ ID NO: 26421 - RNA, 24 nt, Artificial Sequence
  Synthetic
ccagucuaaagauagaguggccaa

SEQ ID NO: 26422 - RNA, 18 nt, Artificial Sequence
  Synthetic
aauucugauaaaugccaa

SEQ ID NO: 26423 - RNA, 19 nt, Artificial Sequence
  Synthetic
uaauucugauaaaugccaa

SEQ ID NO: 26424 - RNA, 20 nt, Artificial Sequence
  Synthetic
auaauucugauaaaugccaa

SEQ ID NO: 26425 - RNA, 21 nt, Artificial Sequence
  Synthetic
aauaauucugauaaaugccaa

SEQ ID NO: 26426 - RNA, 22 nt, Artificial Sequence
  Synthetic
aaauaauucugauaaaugccaa

SEQ ID NO: 26427 - RNA, 23 nt, Artificial Sequence
  Synthetic
uaaauaauucugauaaaugccaa

SEQ ID NO: 26428 - RNA, 24 nt, Artificial Sequence
  Synthetic
uuaaauaauucugauaaaugccaa

SEQ ID NO: 26429 - RNA, 18 nt, Artificial Sequence
  Synthetic
cccauagggcucugccaa

SEQ ID NO: 26430 - RNA, 21 nt, Artificial Sequence
  Synthetic
uggcccauagggcucugccaa

SEQ ID NO: 26431 - RNA, 22 nt, Artificial Sequence
  Synthetic
auggcccauagggcucugccaa

SEQ ID NO: 26432 - RNA, 23 nt, Artificial Sequence
  Synthetic
uauggcccauagggcucugccaa

SEQ ID NO: 26433 - RNA, 24 nt, Artificial Sequence
  Synthetic
cuauggcccauagggcucugccaa

SEQ ID NO: 26434 - RNA, 19 nt, Artificial Sequence
  Synthetic
ugaucagcuccauugccaa

SEQ ID NO: 26435 - RNA, 20 nt, Artificial Sequence
  Synthetic
augaucagcuccauugccaa

SEQ ID NO: 26436 - RNA, 21 nt, Artificial Sequence
  Synthetic
caugaucagcuccauugccaa

SEQ ID NO: 26437 - RNA, 23 nt, Artificial Sequence
  Synthetic
ugcaugaucagcuccauugccaa

SEQ ID NO: 26438 - RNA, 24 nt, Artificial Sequence
  Synthetic
augcaugaucagcuccauugccaa

SEQ ID NO: 26439 - RNA, 18 nt, Artificial Sequence
  Synthetic
uaauauuucauuugccaa

SEQ ID NO: 26440 - RNA, 21 nt, Artificial Sequence
  Synthetic
ugguaauauuucauuugccaa

SEQ ID NO: 26441 - RNA, 22 nt, Artificial Sequence
  Synthetic
uugguaauauuucauuugccaa

SEQ ID NO: 26442 - RNA, 23 nt, Artificial Sequence
  Synthetic
uuugguaauauuucauuugccaa

SEQ ID NO: 26443 - RNA, 24 nt, Artificial Sequence
  Synthetic
uuuugguaauauuucauuugccaa

SEQ ID NO: 26444 - RNA, 18 nt, Artificial Sequence
  Synthetic
auaugcacuguuugccaa

SEQ ID NO: 26445 - RNA, 22 nt, Artificial Sequence
  Synthetic
ugggauaugcacuguuugccaa

SEQ ID NO: 26446 - RNA, 23 nt, Artificial Sequence
  Synthetic
cugggauaugcacuguuugccaa

SEQ ID NO: 26447 - RNA, 24 nt, Artificial Sequence
  Synthetic
ccugggauaugcacuguuugccaa

SEQ ID NO: 26448 - RNA, 18 nt, Artificial Sequence
  Synthetic
uuugauaacucuauccaa

SEQ ID NO: 26449 - RNA, 19 nt, Artificial Sequence
  Synthetic
cuuugauaacucuauccaa

SEQ ID NO: 26450 - RNA, 20 nt, Artificial Sequence
  Synthetic
acuuugauaacucuauccaa

SEQ ID NO: 26451 - RNA, 21 nt, Artificial Sequence
  Synthetic
uacuuugauaacucuauccaa

SEQ ID NO: 26452 - RNA, 22 nt, Artificial Sequence
  Synthetic
cuacuuugauaacucuauccaa

SEQ ID NO: 26453 - RNA, 23 nt, Artificial Sequence
  Synthetic
ucuacuuugauaacucuauccaa

SEQ ID NO: 26454 - RNA, 21 nt, Artificial Sequence
  Synthetic
uccucuuuguaagaacuccaa

SEQ ID NO: 26455 - RNA, 22 nt, Artificial Sequence
  Synthetic
uuccucuuuguaagaacuccaa

SEQ ID NO: 26456 - RNA, 23 nt, Artificial Sequence
  Synthetic
auuccucuuuguaagaacuccaa

SEQ ID NO: 26457 - RNA, 24 nt, Artificial Sequence
  Synthetic
uauuccucuuuguaagaacuccaa

SEQ ID NO: 26458 - RNA, 18 nt, Artificial Sequence
  Synthetic
aacaugauuuauuuccaa

SEQ ID NO: 26459 - RNA, 19 nt, Artificial Sequence
  Synthetic
caacaugauuuauuuccaa

SEQ ID NO: 26460 - RNA, 20 nt, Artificial Sequence
  Synthetic
acaacaugauuuauuuccaa

SEQ ID NO: 26461 - RNA, 21 nt, Artificial Sequence
  Synthetic
aacaacaugauuuauuuccaa

SEQ ID NO: 26462 - RNA, 22 nt, Artificial Sequence
  Synthetic
uaacaacaugauuuauuuccaa

SEQ ID NO: 26463 - RNA, 23 nt, Artificial Sequence
  Synthetic
auaacaacaugauuuauuuccaa

SEQ ID NO: 26464 - RNA, 24 nt, Artificial Sequence
  Synthetic
aauaacaacaugauuuauuuccaa

SEQ ID NO: 26465 - RNA, 20 nt, Artificial Sequence
  Synthetic
agguacuucugacuuuccaa

SEQ ID NO: 26466 - RNA, 21 nt, Artificial Sequence
  Synthetic
aagguacuucugacuuuccaa

SEQ ID NO: 26467 - RNA, 22 nt, Artificial Sequence
  Synthetic
aaagguacuucugacuuuccaa

SEQ ID NO: 26468 - RNA, 23 nt, Artificial Sequence
  Synthetic
aaaagguacuucugacuuuccaa

SEQ ID NO: 26469 - RNA, 18 nt, Artificial Sequence
  Synthetic
uccucuuuaguuuuccaa

SEQ ID NO: 26470 - RNA, 19 nt, Artificial Sequence
  Synthetic
uuccucuuuaguuuuccaa

SEQ ID NO: 26471 - RNA, 20 nt, Artificial Sequence
  Synthetic
cuuccucuuuaguuuuccaa

SEQ ID NO: 26472 - RNA, 21 nt, Artificial Sequence
  Synthetic
ccuuccucuuuaguuuuccaa

SEQ ID NO: 26473 - RNA, 22 nt, Artificial Sequence
  Synthetic
cccuuccucuuuaguuuuccaa

SEQ ID NO: 26474 - RNA, 23 nt, Artificial Sequence
  Synthetic
ucccuuccucuuuaguuuuccaa

SEQ ID NO: 26475 - RNA, 24 nt, Artificial Sequence
  Synthetic
aucccuuccucuuuaguuuuccaa

SEQ ID NO: 26476 - RNA, 18 nt, Artificial Sequence
  Synthetic
uacuauuaccaaaagcaa

SEQ ID NO: 26477 - RNA, 19 nt, Artificial Sequence
  Synthetic
uuacuauuaccaaaagcaa

SEQ ID NO: 26478 - RNA, 20 nt, Artificial Sequence
  Synthetic
uuuacuauuaccaaaagcaa

SEQ ID NO: 26479 - RNA, 21 nt, Artificial Sequence
  Synthetic
uuuuacuauuaccaaaagcaa

SEQ ID NO: 26480 - RNA, 22 nt, Artificial Sequence
  Synthetic
auuuuacuauuaccaaaagcaa

SEQ ID NO: 26481 - RNA, 23 nt, Artificial Sequence
  Synthetic
uauuuuacuauuaccaaaagcaa

SEQ ID NO: 26482 - RNA, 24 nt, Artificial Sequence
  Synthetic
uuauuuuacuauuaccaaaagcaa

SEQ ID NO: 26483 - RNA, 21 nt, Artificial Sequence
  Synthetic
ugggacaguuuuuacaagcaa

SEQ ID NO: 26484 - RNA, 22 nt, Artificial Sequence
  Synthetic
uugggacaguuuuuacaagcaa

SEQ ID NO: 26485 - RNA, 23 nt, Artificial Sequence
  Synthetic
uuugggacaguuuuuacaagcaa

SEQ ID NO: 26486 - RNA, 24 nt, Artificial Sequence
  Synthetic
cuuugggacaguuuuuacaagcaa

SEQ ID NO: 26487 - RNA, 18 nt, Artificial Sequence
  Synthetic
uuuugaaggaggaagcaa

SEQ ID NO: 26488 - RNA, 20 nt, Artificial Sequence
  Synthetic
uguuuugaaggaggaagcaa

SEQ ID NO: 26489 - RNA, 22 nt, Artificial Sequence
  Synthetic
uguguuuugaaggaggaagcaa

SEQ ID NO: 26490 - RNA, 23 nt, Artificial Sequence
  Synthetic
auguguuuugaaggaggaagcaa

SEQ ID NO: 26491 - RNA, 20 nt, Artificial Sequence
  Synthetic
cggaugaagaugguaagcaa

SEQ ID NO: 26492 - RNA, 21 nt, Artificial Sequence
  Synthetic
acggaugaagaugguaagcaa

SEQ ID NO: 26493 - RNA, 23 nt, Artificial Sequence
  Synthetic
ugacggaugaagaugguaagcaa

SEQ ID NO: 26494 - RNA, 24 nt, Artificial Sequence
  Synthetic
augacggaugaagaugguaagcaa

SEQ ID NO: 26495 - RNA, 18 nt, Artificial Sequence
  Synthetic
uacuuugucuuuaagcaa

SEQ ID NO: 26496 - RNA, 19 nt, Artificial Sequence
  Synthetic
auacuuugucuuuaagcaa

SEQ ID NO: 26497 - RNA, 20 nt, Artificial Sequence
  Synthetic
aauacuuugucuuuaagcaa

SEQ ID NO: 26498 - RNA, 21 nt, Artificial Sequence
  Synthetic
aaauacuuugucuuuaagcaa

SEQ ID NO: 26499 - RNA, 22 nt, Artificial Sequence
  Synthetic
caaauacuuugucuuuaagcaa

SEQ ID NO: 26500 - RNA, 23 nt, Artificial Sequence
  Synthetic
acaaauacuuugucuuuaagcaa

SEQ ID NO: 26501 - RNA, 24 nt, Artificial Sequence
  Synthetic
aacaaauacuuugucuuuaagcaa

SEQ ID NO: 26502 - RNA, 18 nt, Artificial Sequence
  Synthetic
ucacacaauuuuaagcaa

SEQ ID NO: 26503 - RNA, 20 nt, Artificial Sequence
  Synthetic
agucacacaauuuuaagcaa

SEQ ID NO: 26504 - RNA, 21 nt, Artificial Sequence
  Synthetic
cagucacacaauuuuaagcaa

SEQ ID NO: 26505 - RNA, 22 nt, Artificial Sequence
  Synthetic
ucagucacacaauuuuaagcaa

SEQ ID NO: 26506 - RNA, 23 nt, Artificial Sequence
  Synthetic
aucagucacacaauuuuaagcaa

SEQ ID NO: 26507 - RNA, 24 nt, Artificial Sequence
  Synthetic
aaucagucacacaauuuuaagcaa

SEQ ID NO: 26508 - RNA, 19 nt, Artificial Sequence
  Synthetic
ugaaaaucuuugacagcaa

SEQ ID NO: 26509 - RNA, 20 nt, Artificial Sequence
  Synthetic
augaaaaucuuugacagcaa

SEQ ID NO: 26510 - RNA, 21 nt, Artificial Sequence
  Synthetic
aaugaaaaucuuugacagcaa

SEQ ID NO: 26511 - RNA, 22 nt, Artificial Sequence
  Synthetic
caaugaaaaucuuugacagcaa

SEQ ID NO: 26512 - RNA, 24 nt, Artificial Sequence
  Synthetic
ugcaaugaaaaucuuugacagcaa

SEQ ID NO: 26513 - RNA, 20 nt, Artificial Sequence
  Synthetic
uggcugaaggcuugcagcaa

SEQ ID NO: 26514 - RNA, 21 nt, Artificial Sequence
  Synthetic
uuggcugaaggcuugcagcaa

SEQ ID NO: 26515 - RNA, 22 nt, Artificial Sequence
  Synthetic
auuggcugaaggcuugcagcaa

SEQ ID NO: 26516 - RNA, 24 nt, Artificial Sequence
  Synthetic
agauuggcugaaggcuugcagcaa

SEQ ID NO: 26517 - RNA, 18 nt, Artificial Sequence
  Synthetic
acucauuuccaauagcaa

SEQ ID NO: 26518 - RNA, 19 nt, Artificial Sequence
  Synthetic
uacucauuuccaauagcaa

SEQ ID NO: 26519 - RNA, 20 nt, Artificial Sequence
  Synthetic
auacucauuuccaauagcaa

SEQ ID NO: 26520 - RNA, 21 nt, Artificial Sequence
  Synthetic
cauacucauuuccaauagcaa

SEQ ID NO: 26521 - RNA, 22 nt, Artificial Sequence
  Synthetic
ccauacucauuuccaauagcaa

SEQ ID NO: 26522 - RNA, 23 nt, Artificial Sequence
  Synthetic
uccauacucauuuccaauagcaa

SEQ ID NO: 26523 - RNA, 24 nt, Artificial Sequence
  Synthetic
uuccauacucauuuccaauagcaa

SEQ ID NO: 26524 - RNA, 18 nt, Artificial Sequence
  Synthetic
aguaagcauaacuagcaa

SEQ ID NO: 26525 - RNA, 19 nt, Artificial Sequence
  Synthetic
caguaagcauaacuagcaa

SEQ ID NO: 26526 - RNA, 20 nt, Artificial Sequence
  Synthetic
ccaguaagcauaacuagcaa

SEQ ID NO: 26527 - RNA, 21 nt, Artificial Sequence
  Synthetic
cccaguaagcauaacuagcaa

SEQ ID NO: 26528 - RNA, 22 nt, Artificial Sequence
  Synthetic
acccaguaagcauaacuagcaa

SEQ ID NO: 26529 - RNA, 23 nt, Artificial Sequence
  Synthetic
uacccaguaagcauaacuagcaa

SEQ ID NO: 26530 - RNA, 24 nt, Artificial Sequence
  Synthetic
auacccaguaagcauaacuagcaa

SEQ ID NO: 26531 - RNA, 18 nt, Artificial Sequence
  Synthetic
acuuuuacaaucuagcaa

SEQ ID NO: 26532 - RNA, 20 nt, Artificial Sequence
  Synthetic
ugacuuuuacaaucuagcaa

SEQ ID NO: 26533 - RNA, 21 nt, Artificial Sequence
  Synthetic
uugacuuuuacaaucuagcaa

SEQ ID NO: 26534 - RNA, 22 nt, Artificial Sequence
  Synthetic
cuugacuuuuacaaucuagcaa

SEQ ID NO: 26535 - RNA, 24 nt, Artificial Sequence
  Synthetic
agcuugacuuuuacaaucuagcaa

SEQ ID NO: 26536 - RNA, 19 nt, Artificial Sequence
  Synthetic
uggccacacguaguagcaa

SEQ ID NO: 26537 - RNA, 20 nt, Artificial Sequence
  Synthetic
auggccacacguaguagcaa

SEQ ID NO: 26538 - RNA, 22 nt, Artificial Sequence
  Synthetic
ugauggccacacguaguagcaa

SEQ ID NO: 26539 - RNA, 23 nt, Artificial Sequence
  Synthetic
uugauggccacacguaguagcaa

SEQ ID NO: 26540 - RNA, 24 nt, Artificial Sequence
  Synthetic
uuugauggccacacguaguagcaa

SEQ ID NO: 26541 - RNA, 18 nt, Artificial Sequence
  Synthetic
cucucccuagggccgcaa

SEQ ID NO: 26542 - RNA, 19 nt, Artificial Sequence
  Synthetic
ccucucccuagggccgcaa

SEQ ID NO: 26543 - RNA, 20 nt, Artificial Sequence
  Synthetic
uccucucccuagggccgcaa

SEQ ID NO: 26544 - RNA, 21 nt, Artificial Sequence
  Synthetic
auccucucccuagggccgcaa

SEQ ID NO: 26545 - RNA, 22 nt, Artificial Sequence
  Synthetic
cauccucucccuagggccgcaa

SEQ ID NO: 26546 - RNA, 23 nt, Artificial Sequence
  Synthetic
ccauccucucccuagggccgcaa

SEQ ID NO: 26547 - RNA, 18 nt, Artificial Sequence
  Synthetic
ucugcucggguuucgcaa

SEQ ID NO: 26548 - RNA, 19 nt, Artificial Sequence
  Synthetic
cucugcucggguuucgcaa

SEQ ID NO: 26549 - RNA, 20 nt, Artificial Sequence
  Synthetic
ucucugcucggguuucgcaa

SEQ ID NO: 26550 - RNA, 21 nt, Artificial Sequence
  Synthetic
uucucugcucggguuucgcaa

SEQ ID NO: 26551 - RNA, 22 nt, Artificial Sequence
  Synthetic
uuucucugcucggguuucgcaa

SEQ ID NO: 26552 - RNA, 23 nt, Artificial Sequence
  Synthetic
uuuucucugcucggguuucgcaa

SEQ ID NO: 26553 - RNA, 24 nt, Artificial Sequence
  Synthetic
cuuuucucugcucggguuucgcaa

SEQ ID NO: 26554 - RNA, 18 nt, Artificial Sequence
  Synthetic
uaauuuaccagaaggcaa

SEQ ID NO: 26555 - RNA, 19 nt, Artificial Sequence
  Synthetic
cuaauuuaccagaaggcaa

SEQ ID NO: 26556 - RNA, 20 nt, Artificial Sequence
  Synthetic
ucuaauuuaccagaaggcaa

SEQ ID NO: 26557 - RNA, 21 nt, Artificial Sequence
  Synthetic
uucuaauuuaccagaaggcaa

SEQ ID NO: 26558 - RNA, 22 nt, Artificial Sequence
  Synthetic
uuucuaauuuaccagaaggcaa

SEQ ID NO: 26559 - RNA, 24 nt, Artificial Sequence
  Synthetic
uguuucuaauuuaccagaaggcaa

SEQ ID NO: 26560 - RNA, 18 nt, Artificial Sequence
  Synthetic
ccauucagaugaaggcaa

SEQ ID NO: 26561 - RNA, 19 nt, Artificial Sequence
  Synthetic
uccauucagaugaaggcaa

SEQ ID NO: 26562 - RNA, 20 nt, Artificial Sequence
  Synthetic
uuccauucagaugaaggcaa

SEQ ID NO: 26563 - RNA, 21 nt, Artificial Sequence
  Synthetic
auuccauucagaugaaggcaa

SEQ ID NO: 26564 - RNA, 23 nt, Artificial Sequence
  Synthetic
ugauuccauucagaugaaggcaa

SEQ ID NO: 26565 - RNA, 24 nt, Artificial Sequence
  Synthetic
augauuccauucagaugaaggcaa

SEQ ID NO: 26566 - RNA, 19 nt, Artificial Sequence
  Synthetic
agaagauagacacaggcaa

SEQ ID NO: 26567 - RNA, 20 nt, Artificial Sequence
  Synthetic
aagaagauagacacaggcaa

SEQ ID NO: 26568 - RNA, 21 nt, Artificial Sequence
  Synthetic
uaagaagauagacacaggcaa

SEQ ID NO: 26569 - RNA, 22 nt, Artificial Sequence
  Synthetic
uuaagaagauagacacaggcaa

SEQ ID NO: 26570 - RNA, 23 nt, Artificial Sequence
  Synthetic
auuaagaagauagacacaggcaa

SEQ ID NO: 26571 - RNA, 18 nt, Artificial Sequence
  Synthetic
auaacuuuguggaggcaa

SEQ ID NO: 26572 - RNA, 19 nt, Artificial Sequence
  Synthetic
cauaacuuuguggaggcaa

SEQ ID NO: 26573 - RNA, 20 nt, Artificial Sequence
  Synthetic
acauaacuuuguggaggcaa

SEQ ID NO: 26574 - RNA, 21 nt, Artificial Sequence
  Synthetic
cacauaacuuuguggaggcaa

SEQ ID NO: 26575 - RNA, 22 nt, Artificial Sequence
  Synthetic
ucacauaacuuuguggaggcaa

SEQ ID NO: 26576 - RNA, 23 nt, Artificial Sequence
  Synthetic
uucacauaacuuuguggaggcaa

SEQ ID NO: 26577 - RNA, 24 nt, Artificial Sequence
  Synthetic
cuucacauaacuuuguggaggcaa

SEQ ID NO: 26578 - RNA, 19 nt, Artificial Sequence
  Synthetic
agauauauugaauaggcaa

SEQ ID NO: 26579 - RNA, 20 nt, Artificial Sequence
  Synthetic
cagauauauugaauaggcaa

SEQ ID NO: 26580 - RNA, 21 nt, Artificial Sequence
  Synthetic
ccagauauauugaauaggcaa

SEQ ID NO: 26581 - RNA, 22 nt, Artificial Sequence
  Synthetic
accagauauauugaauaggcaa

SEQ ID NO: 26582 - RNA, 23 nt, Artificial Sequence
  Synthetic
caccagauauauugaauaggcaa

SEQ ID NO: 26583 - RNA, 24 nt, Artificial Sequence
  Synthetic
ucaccagauauauugaauaggcaa

SEQ ID NO: 26584 - RNA, 18 nt, Artificial Sequence
  Synthetic
auuuuugguugggggcaa

SEQ ID NO: 26585 - RNA, 20 nt, Artificial Sequence
  Synthetic
ugauuuuugguugggggcaa

SEQ ID NO: 26586 - RNA, 23 nt, Artificial Sequence
  Synthetic
aggugauuuuugguugggggcaa

SEQ ID NO: 26587 - RNA, 18 nt, Artificial Sequence
  Synthetic
uuuucagguggugggcaa

SEQ ID NO: 26588 - RNA, 19 nt, Artificial Sequence
  Synthetic
uuuuucagguggugggcaa

SEQ ID NO: 26589 - RNA, 20 nt, Artificial Sequence
  Synthetic
cuuuuucagguggugggcaa

SEQ ID NO: 26590 - RNA, 21 nt, Artificial Sequence
  Synthetic
acuuuuucagguggugggcaa

SEQ ID NO: 26591 - RNA, 22 nt, Artificial Sequence
  Synthetic
aacuuuuucagguggugggcaa

SEQ ID NO: 26592 - RNA, 23 nt, Artificial Sequence
  Synthetic
aaacuuuuucagguggugggcaa

SEQ ID NO: 26593 - RNA, 24 nt, Artificial Sequence
  Synthetic
caaacuuuuucagguggugggcaa

SEQ ID NO: 26594 - RNA, 18 nt, Artificial Sequence
  Synthetic
auccaaugcuucuggcaa

SEQ ID NO: 26595 - RNA, 19 nt, Artificial Sequence
  Synthetic
uauccaaugcuucuggcaa

SEQ ID NO: 26596 - RNA, 20 nt, Artificial Sequence
  Synthetic
auauccaaugcuucuggcaa

SEQ ID NO: 26597 - RNA, 21 nt, Artificial Sequence
  Synthetic
uauauccaaugcuucuggcaa

SEQ ID NO: 26598 - RNA, 22 nt, Artificial Sequence
  Synthetic
uuauauccaaugcuucuggcaa

SEQ ID NO: 26599 - RNA, 23 nt, Artificial Sequence
  Synthetic
auuauauccaaugcuucuggcaa

SEQ ID NO: 26600 - RNA, 24 nt, Artificial Sequence
  Synthetic
uauuauauccaaugcuucuggcaa

SEQ ID NO: 26601 - RNA, 18 nt, Artificial Sequence
  Synthetic
uauuguuaaaauuggcaa

SEQ ID NO: 26602 - RNA, 19 nt, Artificial Sequence
  Synthetic
auauuguuaaaauuggcaa

SEQ ID NO: 26603 - RNA, 20 nt, Artificial Sequence
  Synthetic
aauauuguuaaaauuggcaa

SEQ ID NO: 26604 - RNA, 21 nt, Artificial Sequence
  Synthetic
uaauauuguuaaaauuggcaa

SEQ ID NO: 26605 - RNA, 22 nt, Artificial Sequence
  Synthetic
uuaauauuguuaaaauuggcaa

SEQ ID NO: 26606 - RNA, 23 nt, Artificial Sequence
  Synthetic
cuuaauauuguuaaaauuggcaa

SEQ ID NO: 26607 - RNA, 24 nt, Artificial Sequence
  Synthetic
ucuuaauauuguuaaaauuggcaa

SEQ ID NO: 26608 - RNA, 21 nt, Artificial Sequence
  Synthetic
caauuuugccugcaaaugcaa

SEQ ID NO: 26609 - RNA, 22 nt, Artificial Sequence
  Synthetic
acaauuuugccugcaaaugcaa

SEQ ID NO: 26610 - RNA, 23 nt, Artificial Sequence
  Synthetic
uacaauuuugccugcaaaugcaa

SEQ ID NO: 26611 - RNA, 24 nt, Artificial Sequence
  Synthetic
uuacaauuuugccugcaaaugcaa

SEQ ID NO: 26612 - RNA, 18 nt, Artificial Sequence
  Synthetic
aauggucucuaaaugcaa

SEQ ID NO: 26613 - RNA, 19 nt, Artificial Sequence
  Synthetic
aaauggucucuaaaugcaa

SEQ ID NO: 26614 - RNA, 20 nt, Artificial Sequence
  Synthetic
uaaauggucucuaaaugcaa

SEQ ID NO: 26615 - RNA, 21 nt, Artificial Sequence
  Synthetic
cuaaauggucucuaaaugcaa

SEQ ID NO: 26616 - RNA, 22 nt, Artificial Sequence
  Synthetic
acuaaauggucucuaaaugcaa

SEQ ID NO: 26617 - RNA, 23 nt, Artificial Sequence
  Synthetic
uacuaaauggucucuaaaugcaa

SEQ ID NO: 26618 - RNA, 24 nt, Artificial Sequence
  Synthetic
auacuaaauggucucuaaaugcaa

SEQ ID NO: 26619 - RNA, 19 nt, Artificial Sequence
  Synthetic
agcaaggccauggaugcaa

SEQ ID NO: 26620 - RNA, 21 nt, Artificial Sequence
  Synthetic
ugagcaaggccauggaugcaa

SEQ ID NO: 26621 - RNA, 23 nt, Artificial Sequence
  Synthetic
ugugagcaaggccauggaugcaa

SEQ ID NO: 26622 - RNA, 18 nt, Artificial Sequence
  Synthetic
cucaggauugcuaugcaa

SEQ ID NO: 26623 - RNA, 19 nt, Artificial Sequence
  Synthetic
ucucaggauugcuaugcaa

SEQ ID NO: 26624 - RNA, 20 nt, Artificial Sequence
  Synthetic
uucucaggauugcuaugcaa

SEQ ID NO: 26625 - RNA, 21 nt, Artificial Sequence
  Synthetic
uuucucaggauugcuaugcaa

SEQ ID NO: 26626 - RNA, 22 nt, Artificial Sequence
  Synthetic
uuuucucaggauugcuaugcaa

SEQ ID NO: 26627 - RNA, 21 nt, Artificial Sequence
  Synthetic
caaacauuuuuuguuaugcaa

SEQ ID NO: 26628 - RNA, 22 nt, Artificial Sequence
  Synthetic
ccaaacauuuuuuguuaugcaa

SEQ ID NO: 26629 - RNA, 24 nt, Artificial Sequence
  Synthetic
agccaaacauuuuuuguuaugcaa

SEQ ID NO: 26630 - RNA, 21 nt, Artificial Sequence
  Synthetic
ugggcagcauaacaacugcaa

SEQ ID NO: 26631 - RNA, 22 nt, Artificial Sequence
  Synthetic
cugggcagcauaacaacugcaa

SEQ ID NO: 26632 - RNA, 24 nt, Artificial Sequence
  Synthetic
agcugggcagcauaacaacugcaa

SEQ ID NO: 26633 - RNA, 18 nt, Artificial Sequence
  Synthetic
uggaggagcacacugcaa

SEQ ID NO: 26634 - RNA, 19 nt, Artificial Sequence
  Synthetic
uuggaggagcacacugcaa

SEQ ID NO: 26635 - RNA, 20 nt, Artificial Sequence
  Synthetic
uuuggaggagcacacugcaa

SEQ ID NO: 26636 - RNA, 22 nt, Artificial Sequence
  Synthetic
aguuuggaggagcacacugcaa

SEQ ID NO: 26637 - RNA, 23 nt, Artificial Sequence
  Synthetic
aaguuuggaggagcacacugcaa

SEQ ID NO: 26638 - RNA, 24 nt, Artificial Sequence
  Synthetic
aaaguuuggaggagcacacugcaa

SEQ ID NO: 26639 - RNA, 18 nt, Artificial Sequence
  Synthetic
uggaggcagugacugcaa

SEQ ID NO: 26640 - RNA, 19 nt, Artificial Sequence
  Synthetic
uuggaggcagugacugcaa

SEQ ID NO: 26641 - RNA, 20 nt, Artificial Sequence
  Synthetic
cuuggaggcagugacugcaa

SEQ ID NO: 26642 - RNA, 21 nt, Artificial Sequence
  Synthetic
acuuggaggcagugacugcaa

SEQ ID NO: 26643 - RNA, 22 nt, Artificial Sequence
  Synthetic
uacuuggaggcagugacugcaa

SEQ ID NO: 26644 - RNA, 23 nt, Artificial Sequence
  Synthetic
auacuuggaggcagugacugcaa

SEQ ID NO: 26645 - RNA, 24 nt, Artificial Sequence
  Synthetic
uauacuuggaggcagugacugcaa

SEQ ID NO: 26646 - RNA, 20 nt, Artificial Sequence
  Synthetic
agguuuuauguguccugcaa

SEQ ID NO: 26647 - RNA, 21 nt, Artificial Sequence
  Synthetic
aagguuuuauguguccugcaa

SEQ ID NO: 26648 - RNA, 22 nt, Artificial Sequence
  Synthetic
caagguuuuauguguccugcaa

SEQ ID NO: 26649 - RNA, 23 nt, Artificial Sequence
  Synthetic
ucaagguuuuauguguccugcaa

SEQ ID NO: 26650 - RNA, 18 nt, Artificial Sequence
  Synthetic
aagugugggggugugcaa

SEQ ID NO: 26651 - RNA, 20 nt, Artificial Sequence
  Synthetic
ugaagugugggggugugcaa

SEQ ID NO: 26652 - RNA, 21 nt, Artificial Sequence
  Synthetic
cugaagugugggggugugcaa

SEQ ID NO: 26653 - RNA, 22 nt, Artificial Sequence
  Synthetic
acugaagugugggggugugcaa

SEQ ID NO: 26654 - RNA, 24 nt, Artificial Sequence
  Synthetic
agacugaagugugggggugugcaa

SEQ ID NO: 26655 - RNA, 18 nt, Artificial Sequence
  Synthetic
caugcucugauugugcaa

SEQ ID NO: 26656 - RNA, 19 nt, Artificial Sequence
  Synthetic
acaugcucugauugugcaa

SEQ ID NO: 26657 - RNA, 21 nt, Artificial Sequence
  Synthetic
ugacaugcucugauugugcaa

SEQ ID NO: 26658 - RNA, 22 nt, Artificial Sequence
  Synthetic
cugacaugcucugauugugcaa

SEQ ID NO: 26659 - RNA, 23 nt, Artificial Sequence
  Synthetic
acugacaugcucugauugugcaa

SEQ ID NO: 26660 - RNA, 18 nt, Artificial Sequence
  Synthetic
ccguaauauaaguugcaa

SEQ ID NO: 26661 - RNA, 19 nt, Artificial Sequence
  Synthetic
uccguaauauaaguugcaa

SEQ ID NO: 26662 - RNA, 20 nt, Artificial Sequence
  Synthetic
auccguaauauaaguugcaa

SEQ ID NO: 26663 - RNA, 21 nt, Artificial Sequence
  Synthetic
uauccguaauauaaguugcaa

SEQ ID NO: 26664 - RNA, 22 nt, Artificial Sequence
  Synthetic
cuauccguaauauaaguugcaa

SEQ ID NO: 26665 - RNA, 23 nt, Artificial Sequence
  Synthetic
ccuauccguaauauaaguugcaa

SEQ ID NO: 26666 - RNA, 24 nt, Artificial Sequence
  Synthetic
cccuauccguaauauaaguugcaa

SEQ ID NO: 26667 - RNA, 19 nt, Artificial Sequence
  Synthetic
agcaauucaguaaaaucaa

SEQ ID NO: 26668 - RNA, 20 nt, Artificial Sequence
  Synthetic
uagcaauucaguaaaaucaa

SEQ ID NO: 26669 - RNA, 21 nt, Artificial Sequence
  Synthetic
uuagcaauucaguaaaaucaa

SEQ ID NO: 26670 - RNA, 22 nt, Artificial Sequence
  Synthetic
auuagcaauucaguaaaaucaa

SEQ ID NO: 26671 - RNA, 23 nt, Artificial Sequence
  Synthetic
uauuagcaauucaguaaaaucaa

SEQ ID NO: 26672 - RNA, 18 nt, Artificial Sequence
  Synthetic
uccagguagaccaaucaa

SEQ ID NO: 26673 - RNA, 19 nt, Artificial Sequence
  Synthetic
uuccagguagaccaaucaa

SEQ ID NO: 26674 - RNA, 20 nt, Artificial Sequence
  Synthetic
uuuccagguagaccaaucaa

SEQ ID NO: 26675 - RNA, 21 nt, Artificial Sequence
  Synthetic
uuuuccagguagaccaaucaa

SEQ ID NO: 26676 - RNA, 22 nt, Artificial Sequence
  Synthetic
auuuuccagguagaccaaucaa

SEQ ID NO: 26677 - RNA, 23 nt, Artificial Sequence
  Synthetic
uauuuuccagguagaccaaucaa

SEQ ID NO: 26678 - RNA, 24 nt, Artificial Sequence
  Synthetic
uuauuuuccagguagaccaaucaa

SEQ ID NO: 26679 - RNA, 19 nt, Artificial Sequence
  Synthetic
uguugcaauagucaaucaa

SEQ ID NO: 26680 - RNA, 20 nt, Artificial Sequence
  Synthetic
auguugcaauagucaaucaa

SEQ ID NO: 26681 - RNA, 21 nt, Artificial Sequence
  Synthetic
cauguugcaauagucaaucaa

SEQ ID NO: 26682 - RNA, 22 nt, Artificial Sequence
  Synthetic
ucauguugcaauagucaaucaa

SEQ ID NO: 26683 - RNA, 23 nt, Artificial Sequence
  Synthetic
uucauguugcaauagucaaucaa

SEQ ID NO: 26684 - RNA, 18 nt, Artificial Sequence
  Synthetic
aagaucuucuagaaucaa

SEQ ID NO: 26685 - RNA, 19 nt, Artificial Sequence
  Synthetic
caagaucuucuagaaucaa

SEQ ID NO: 26686 - RNA, 20 nt, Artificial Sequence
  Synthetic
ccaagaucuucuagaaucaa

SEQ ID NO: 26687 - RNA, 21 nt, Artificial Sequence
  Synthetic
cccaagaucuucuagaaucaa

SEQ ID NO: 26688 - RNA, 23 nt, Artificial Sequence
  Synthetic
agcccaagaucuucuagaaucaa

SEQ ID NO: 26689 - RNA, 24 nt, Artificial Sequence
  Synthetic
cagcccaagaucuucuagaaucaa

SEQ ID NO: 26690 - RNA, 18 nt, Artificial Sequence
  Synthetic
aauuaggaggggaaucaa

SEQ ID NO: 26691 - RNA, 20 nt, Artificial Sequence
  Synthetic
agaauuaggaggggaaucaa

SEQ ID NO: 26692 - RNA, 21 nt, Artificial Sequence
  Synthetic
aagaauuaggaggggaaucaa

SEQ ID NO: 26693 - RNA, 22 nt, Artificial Sequence
  Synthetic
caagaauuaggaggggaaucaa

SEQ ID NO: 26694 - RNA, 23 nt, Artificial Sequence
  Synthetic
ccaagaauuaggaggggaaucaa

SEQ ID NO: 26695 - RNA, 24 nt, Artificial Sequence
  Synthetic
accaagaauuaggaggggaaucaa

SEQ ID NO: 26696 - RNA, 19 nt, Artificial Sequence
  Synthetic
aguguugucugugaaucaa

SEQ ID NO: 26697 - RNA, 20 nt, Artificial Sequence
  Synthetic
aaguguugucugugaaucaa

SEQ ID NO: 26698 - RNA, 21 nt, Artificial Sequence
  Synthetic
caaguguugucugugaaucaa

SEQ ID NO: 26699 - RNA, 22 nt, Artificial Sequence
  Synthetic
ucaaguguugucugugaaucaa

SEQ ID NO: 26700 - RNA, 23 nt, Artificial Sequence
  Synthetic
cucaaguguugucugugaaucaa

SEQ ID NO: 26701 - RNA, 24 nt, Artificial Sequence
  Synthetic
ccucaaguguugucugugaaucaa

SEQ ID NO: 26702 - RNA, 21 nt, Artificial Sequence
  Synthetic
cguugccaaaucugacaucaa

SEQ ID NO: 26703 - RNA, 22 nt, Artificial Sequence
  Synthetic
acguugccaaaucugacaucaa

SEQ ID NO: 26704 - RNA, 23 nt, Artificial Sequence
  Synthetic
uacguugccaaaucugacaucaa

SEQ ID NO: 26705 - RNA, 24 nt, Artificial Sequence
  Synthetic
uuacguugccaaaucugacaucaa

SEQ ID NO: 26706 - RNA, 19 nt, Artificial Sequence
  Synthetic
agaccuuuguuuacaucaa

SEQ ID NO: 26707 - RNA, 22 nt, Artificial Sequence
  Synthetic
aggagaccuuuguuuacaucaa

SEQ ID NO: 26708 - RNA, 23 nt, Artificial Sequence
  Synthetic
uaggagaccuuuguuuacaucaa

SEQ ID NO: 26709 - RNA, 24 nt, Artificial Sequence
  Synthetic
cuaggagaccuuuguuuacaucaa

SEQ ID NO: 26710 - RNA, 18 nt, Artificial Sequence
  Synthetic
auacacuuugagcaucaa

SEQ ID NO: 26711 - RNA, 19 nt, Artificial Sequence
  Synthetic
aauacacuuugagcaucaa

SEQ ID NO: 26712 - RNA, 20 nt, Artificial Sequence
  Synthetic
aaauacacuuugagcaucaa

SEQ ID NO: 26713 - RNA, 21 nt, Artificial Sequence
  Synthetic
aaaauacacuuugagcaucaa

SEQ ID NO: 26714 - RNA, 22 nt, Artificial Sequence
  Synthetic
caaaauacacuuugagcaucaa

SEQ ID NO: 26715 - RNA, 23 nt, Artificial Sequence
  Synthetic
acaaaauacacuuugagcaucaa

SEQ ID NO: 26716 - RNA, 24 nt, Artificial Sequence
  Synthetic
aacaaaauacacuuugagcaucaa

SEQ ID NO: 26717 - RNA, 18 nt, Artificial Sequence
  Synthetic
uauuuccaugggcaucaa

SEQ ID NO: 26718 - RNA, 19 nt, Artificial Sequence
  Synthetic
uuauuuccaugggcaucaa

SEQ ID NO: 26719 - RNA, 20 nt, Artificial Sequence
  Synthetic
uuuauuuccaugggcaucaa

SEQ ID NO: 26720 - RNA, 23 nt, Artificial Sequence
  Synthetic
ugguuuauuuccaugggcaucaa

SEQ ID NO: 26721 - RNA, 24 nt, Artificial Sequence
  Synthetic
augguuuauuuccaugggcaucaa

SEQ ID NO: 26722 - RNA, 19 nt, Artificial Sequence
  Synthetic
uguaauuuaucugcaucaa

SEQ ID NO: 26723 - RNA, 20 nt, Artificial Sequence
  Synthetic
auguaauuuaucugcaucaa

SEQ ID NO: 26724 - RNA, 22 nt, Artificial Sequence
  Synthetic
agauguaauuuaucugcaucaa

SEQ ID NO: 26725 - RNA, 24 nt, Artificial Sequence
  Synthetic
ugagauguaauuuaucugcaucaa

SEQ ID NO: 26726 - RNA, 19 nt, Artificial Sequence
  Synthetic
cggaaaccaaagucaucaa

SEQ ID NO: 26727 - RNA, 20 nt, Artificial Sequence
  Synthetic
ccggaaaccaaagucaucaa

SEQ ID NO: 26728 - RNA, 24 nt, Artificial Sequence
  Synthetic
ugggccggaaaccaaagucaucaa

SEQ ID NO: 26729 - RNA, 18 nt, Artificial Sequence
  Synthetic
uuuaaacccauucaucaa

SEQ ID NO: 26730 - RNA, 19 nt, Artificial Sequence
  Synthetic
uuuuaaacccauucaucaa

SEQ ID NO: 26731 - RNA, 20 nt, Artificial Sequence
  Synthetic
auuuuaaacccauucaucaa

SEQ ID NO: 26732 - RNA, 21 nt, Artificial Sequence
  Synthetic
aauuuuaaacccauucaucaa

SEQ ID NO: 26733 - RNA, 22 nt, Artificial Sequence
  Synthetic
uaauuuuaaacccauucaucaa

SEQ ID NO: 26734 - RNA, 23 nt, Artificial Sequence
  Synthetic
uuaauuuuaaacccauucaucaa

SEQ ID NO: 26735 - RNA, 24 nt, Artificial Sequence
  Synthetic
cuuaauuuuaaacccauucaucaa

SEQ ID NO: 26736 - RNA, 19 nt, Artificial Sequence
  Synthetic
agguuuucuaccugaucaa

SEQ ID NO: 26737 - RNA, 20 nt, Artificial Sequence
  Synthetic
uagguuuucuaccugaucaa

SEQ ID NO: 26738 - RNA, 21 nt, Artificial Sequence
  Synthetic
auagguuuucuaccugaucaa

SEQ ID NO: 26739 - RNA, 24 nt, Artificial Sequence
  Synthetic
aggauagguuuucuaccugaucaa

SEQ ID NO: 26740 - RNA, 18 nt, Artificial Sequence
  Synthetic
ugccacaucgcauaucaa

SEQ ID NO: 26741 - RNA, 19 nt, Artificial Sequence
  Synthetic
augccacaucgcauaucaa

SEQ ID NO: 26742 - RNA, 21 nt, Artificial Sequence
  Synthetic
agaugccacaucgcauaucaa

SEQ ID NO: 26743 - RNA, 24 nt, Artificial Sequence
  Synthetic
aggagaugccacaucgcauaucaa

SEQ ID NO: 26744 - RNA, 19 nt, Artificial Sequence
  Synthetic
aggagaucauggauaucaa

SEQ ID NO: 26745 - RNA, 20 nt, Artificial Sequence
  Synthetic
aaggagaucauggauaucaa

SEQ ID NO: 26746 - RNA, 21 nt, Artificial Sequence
  Synthetic
caaggagaucauggauaucaa

SEQ ID NO: 26747 - RNA, 22 nt, Artificial Sequence
  Synthetic
acaaggagaucauggauaucaa

SEQ ID NO: 26748 - RNA, 23 nt, Artificial Sequence
  Synthetic
uacaaggagaucauggauaucaa

SEQ ID NO: 26749 - RNA, 24 nt, Artificial Sequence
  Synthetic
uuacaaggagaucauggauaucaa

SEQ ID NO: 26750 - RNA, 18 nt, Artificial Sequence
  Synthetic
agagcaugaaauuaucaa

SEQ ID NO: 26751 - RNA, 19 nt, Artificial Sequence
  Synthetic
uagagcaugaaauuaucaa

SEQ ID NO: 26752 - RNA, 20 nt, Artificial Sequence
  Synthetic
uuagagcaugaaauuaucaa

SEQ ID NO: 26753 - RNA, 18 nt, Artificial Sequence
  Synthetic
ccacuaauuccuuaucaa

SEQ ID NO: 26754 - RNA, 19 nt, Artificial Sequence
  Synthetic
accacuaauuccuuaucaa

SEQ ID NO: 26755 - RNA, 20 nt, Artificial Sequence
  Synthetic
caccacuaauuccuuaucaa

SEQ ID NO: 26756 - RNA, 21 nt, Artificial Sequence
  Synthetic
ucaccacuaauuccuuaucaa

SEQ ID NO: 26757 - RNA, 22 nt, Artificial Sequence
  Synthetic
uucaccacuaauuccuuaucaa

SEQ ID NO: 26758 - RNA, 23 nt, Artificial Sequence
  Synthetic
uuucaccacuaauuccuuaucaa

SEQ ID NO: 26759 - RNA, 24 nt, Artificial Sequence
  Synthetic
cuuucaccacuaauuccuuaucaa

SEQ ID NO: 26760 - RNA, 18 nt, Artificial Sequence
  Synthetic
caucagaaccacacucaa

SEQ ID NO: 26761 - RNA, 19 nt, Artificial Sequence
  Synthetic
ucaucagaaccacacucaa

SEQ ID NO: 26762 - RNA, 20 nt, Artificial Sequence
  Synthetic
uucaucagaaccacacucaa

SEQ ID NO: 26763 - RNA, 21 nt, Artificial Sequence
  Synthetic
auucaucagaaccacacucaa

SEQ ID NO: 26764 - RNA, 22 nt, Artificial Sequence
  Synthetic
aauucaucagaaccacacucaa

SEQ ID NO: 26765 - RNA, 24 nt, Artificial Sequence
  Synthetic
agaauucaucagaaccacacucaa

SEQ ID NO: 26766 - RNA, 18 nt, Artificial Sequence
  Synthetic
aaugggaccuugacucaa

SEQ ID NO: 26767 - RNA, 19 nt, Artificial Sequence
  Synthetic
uaaugggaccuugacucaa

SEQ ID NO: 26768 - RNA, 21 nt, Artificial Sequence
  Synthetic
aguaaugggaccuugacucaa

SEQ ID NO: 26769 - RNA, 23 nt, Artificial Sequence
  Synthetic
ugaguaaugggaccuugacucaa

SEQ ID NO: 26770 - RNA, 24 nt, Artificial Sequence
  Synthetic
cugaguaaugggaccuugacucaa

SEQ ID NO: 26771 - RNA, 18 nt, Artificial Sequence
  Synthetic
cucuugacugacccucaa

SEQ ID NO: 26772 - RNA, 19 nt, Artificial Sequence
  Synthetic
ccucuugacugacccucaa

SEQ ID NO: 26773 - RNA, 20 nt, Artificial Sequence
  Synthetic
uccucuugacugacccucaa

SEQ ID NO: 26774 - RNA, 22 nt, Artificial Sequence
  Synthetic
aguccucuugacugacccucaa

SEQ ID NO: 26775 - RNA, 23 nt, Artificial Sequence
  Synthetic
uaguccucuugacugacccucaa

SEQ ID NO: 26776 - RNA, 24 nt, Artificial Sequence
  Synthetic
uuaguccucuugacugacccucaa

SEQ ID NO: 26777 - RNA, 18 nt, Artificial Sequence
  Synthetic
caaaacuuuuccccucaa

SEQ ID NO: 26778 - RNA, 19 nt, Artificial Sequence
  Synthetic
ucaaaacuuuuccccucaa

SEQ ID NO: 26779 - RNA, 20 nt, Artificial Sequence
  Synthetic
aucaaaacuuuuccccucaa

SEQ ID NO: 26780 - RNA, 21 nt, Artificial Sequence
  Synthetic
uaucaaaacuuuuccccucaa

SEQ ID NO: 26781 - RNA, 22 nt, Artificial Sequence
  Synthetic
uuaucaaaacuuuuccccucaa

SEQ ID NO: 26782 - RNA, 23 nt, Artificial Sequence
  Synthetic
uuuaucaaaacuuuuccccucaa

SEQ ID NO: 26783 - RNA, 24 nt, Artificial Sequence
  Synthetic
uuuuaucaaaacuuuuccccucaa

SEQ ID NO: 26784 - RNA, 18 nt, Artificial Sequence
  Synthetic
aacagccaaugcucucaa

SEQ ID NO: 26785 - RNA, 20 nt, Artificial Sequence
  Synthetic
agaacagccaaugcucucaa

SEQ ID NO: 26786 - RNA, 21 nt, Artificial Sequence
  Synthetic
aagaacagccaaugcucucaa

SEQ ID NO: 26787 - RNA, 22 nt, Artificial Sequence
  Synthetic
aaagaacagccaaugcucucaa

SEQ ID NO: 26788 - RNA, 23 nt, Artificial Sequence
  Synthetic
uaaagaacagccaaugcucucaa

SEQ ID NO: 26789 - RNA, 24 nt, Artificial Sequence
  Synthetic
auaaagaacagccaaugcucucaa

SEQ ID NO: 26790 - RNA, 21 nt, Artificial Sequence
  Synthetic
uggguaguagccccuucucaa

SEQ ID NO: 26791 - RNA, 22 nt, Artificial Sequence
  Synthetic
cuggguaguagccccuucucaa

SEQ ID NO: 26792 - RNA, 23 nt, Artificial Sequence
  Synthetic
ucuggguaguagccccuucucaa

SEQ ID NO: 26793 - RNA, 24 nt, Artificial Sequence
  Synthetic
aucuggguaguagccccuucucaa

SEQ ID NO: 26794 - RNA, 19 nt, Artificial Sequence
  Synthetic
agaaaugacaaguagucaa

SEQ ID NO: 26795 - RNA, 21 nt, Artificial Sequence
  Synthetic
agagaaaugacaaguagucaa

SEQ ID NO: 26796 - RNA, 22 nt, Artificial Sequence
  Synthetic
cagagaaaugacaaguagucaa

SEQ ID NO: 26797 - RNA, 23 nt, Artificial Sequence
  Synthetic
acagagaaaugacaaguagucaa

SEQ ID NO: 26798 - RNA, 24 nt, Artificial Sequence
  Synthetic
aacagagaaaugacaaguagucaa

SEQ ID NO: 26799 - RNA, 19 nt, Artificial Sequence
  Synthetic
cguccccuucggccgucaa

SEQ ID NO: 26800 - RNA, 21 nt, Artificial Sequence
  Synthetic
agcguccccuucggccgucaa

SEQ ID NO: 26801 - RNA, 22 nt, Artificial Sequence
  Synthetic
aagcguccccuucggccgucaa

SEQ ID NO: 26802 - RNA, 23 nt, Artificial Sequence
  Synthetic
aaagcguccccuucggccgucaa

SEQ ID NO: 26803 - RNA, 19 nt, Artificial Sequence
  Synthetic
ugacagcaucccaugucaa

SEQ ID NO: 26804 - RNA, 20 nt, Artificial Sequence
  Synthetic
cugacagcaucccaugucaa

SEQ ID NO: 26805 - RNA, 22 nt, Artificial Sequence
  Synthetic
agcugacagcaucccaugucaa

SEQ ID NO: 26806 - RNA, 23 nt, Artificial Sequence
  Synthetic
uagcugacagcaucccaugucaa

SEQ ID NO: 26807 - RNA, 24 nt, Artificial Sequence
  Synthetic
uuagcugacagcaucccaugucaa

SEQ ID NO: 26808 - RNA, 18 nt, Artificial Sequence
  Synthetic
uaugaguaaagaugucaa

SEQ ID NO: 26809 - RNA, 19 nt, Artificial Sequence
  Synthetic
uuaugaguaaagaugucaa

SEQ ID NO: 26810 - RNA, 20 nt, Artificial Sequence
  Synthetic
uuuaugaguaaagaugucaa

SEQ ID NO: 26811 - RNA, 21 nt, Artificial Sequence
  Synthetic
uuuuaugaguaaagaugucaa

SEQ ID NO: 26812 - RNA, 22 nt, Artificial Sequence
  Synthetic
auuuuaugaguaaagaugucaa

SEQ ID NO: 26813 - RNA, 23 nt, Artificial Sequence
  Synthetic
uauuuuaugaguaaagaugucaa

SEQ ID NO: 26814 - RNA, 24 nt, Artificial Sequence
  Synthetic
uuauuuuaugaguaaagaugucaa

SEQ ID NO: 26815 - RNA, 18 nt, Artificial Sequence
  Synthetic
caaaauucauucugucaa

SEQ ID NO: 26816 - RNA, 19 nt, Artificial Sequence
  Synthetic
ccaaaauucauucugucaa

SEQ ID NO: 26817 - RNA, 20 nt, Artificial Sequence
  Synthetic
uccaaaauucauucugucaa

SEQ ID NO: 26818 - RNA, 21 nt, Artificial Sequence
  Synthetic
cuccaaaauucauucugucaa

SEQ ID NO: 26819 - RNA, 23 nt, Artificial Sequence
  Synthetic
ugcuccaaaauucauucugucaa

SEQ ID NO: 26820 - RNA, 18 nt, Artificial Sequence
  Synthetic
ccacgacucuucugucaa

SEQ ID NO: 26821 - RNA, 20 nt, Artificial Sequence
  Synthetic
ugccacgacucuucugucaa

SEQ ID NO: 26822 - RNA, 21 nt, Artificial Sequence
  Synthetic
uugccacgacucuucugucaa

SEQ ID NO: 26823 - RNA, 22 nt, Artificial Sequence
  Synthetic
uuugccacgacucuucugucaa

SEQ ID NO: 26824 - RNA, 23 nt, Artificial Sequence
  Synthetic
cuuugccacgacucuucugucaa

SEQ ID NO: 26825 - RNA, 24 nt, Artificial Sequence
  Synthetic
ucuuugccacgacucuucugucaa

SEQ ID NO: 26826 - RNA, 18 nt, Artificial Sequence
  Synthetic
uacucgauaaauugucaa

SEQ ID NO: 26827 - RNA, 21 nt, Artificial Sequence
  Synthetic
agguacucgauaaauugucaa

SEQ ID NO: 26828 - RNA, 22 nt, Artificial Sequence
  Synthetic
cagguacucgauaaauugucaa

SEQ ID NO: 26829 - RNA, 23 nt, Artificial Sequence
  Synthetic
acagguacucgauaaauugucaa

SEQ ID NO: 26830 - RNA, 24 nt, Artificial Sequence
  Synthetic
aacagguacucgauaaauugucaa

SEQ ID NO: 26831 - RNA, 19 nt, Artificial Sequence
  Synthetic
ugguguacaccauugucaa

SEQ ID NO: 26832 - RNA, 21 nt, Artificial Sequence
  Synthetic
ugugguguacaccauugucaa

SEQ ID NO: 26833 - RNA, 22 nt, Artificial Sequence
  Synthetic
cugugguguacaccauugucaa

SEQ ID NO: 26834 - RNA, 23 nt, Artificial Sequence
  Synthetic
ccugugguguacaccauugucaa

SEQ ID NO: 26835 - RNA, 24 nt, Artificial Sequence
  Synthetic
cccugugguguacaccauugucaa

SEQ ID NO: 26836 - RNA, 18 nt, Artificial Sequence
  Synthetic
uacuuuguguuuugucaa

SEQ ID NO: 26837 - RNA, 20 nt, Artificial Sequence
  Synthetic
uguacuuuguguuuugucaa

SEQ ID NO: 26838 - RNA, 21 nt, Artificial Sequence
  Synthetic
uuguacuuuguguuuugucaa

SEQ ID NO: 26839 - RNA, 22 nt, Artificial Sequence
  Synthetic
auuguacuuuguguuuugucaa

SEQ ID NO: 26840 - RNA, 23 nt, Artificial Sequence
  Synthetic
cauuguacuuuguguuuugucaa

SEQ ID NO: 26841 - RNA, 24 nt, Artificial Sequence
  Synthetic
ucauuguacuuuguguuuugucaa

SEQ ID NO: 26842 - RNA, 18 nt, Artificial Sequence
  Synthetic
aagucucacuacauucaa

SEQ ID NO: 26843 - RNA, 19 nt, Artificial Sequence
  Synthetic
uaagucucacuacauucaa

SEQ ID NO: 26844 - RNA, 20 nt, Artificial Sequence
  Synthetic
auaagucucacuacauucaa

SEQ ID NO: 26845 - RNA, 21 nt, Artificial Sequence
  Synthetic
aauaagucucacuacauucaa

SEQ ID NO: 26846 - RNA, 22 nt, Artificial Sequence
  Synthetic
aaauaagucucacuacauucaa

SEQ ID NO: 26847 - RNA, 23 nt, Artificial Sequence
  Synthetic
aaaauaagucucacuacauucaa

SEQ ID NO: 26848 - RNA, 24 nt, Artificial Sequence
  Synthetic
uaaaauaagucucacuacauucaa

SEQ ID NO: 26849 - RNA, 18 nt, Artificial Sequence
  Synthetic
accaccaaucccauucaa

SEQ ID NO: 26850 - RNA, 20 nt, Artificial Sequence
  Synthetic
ugaccaccaaucccauucaa

SEQ ID NO: 26851 - RNA, 21 nt, Artificial Sequence
  Synthetic
uugaccaccaaucccauucaa

SEQ ID NO: 26852 - RNA, 23 nt, Artificial Sequence
  Synthetic
aguugaccaccaaucccauucaa

SEQ ID NO: 26853 - RNA, 18 nt, Artificial Sequence
  Synthetic
auuuuuuagagcauucaa

SEQ ID NO: 26854 - RNA, 19 nt, Artificial Sequence
  Synthetic
cauuuuuuagagcauucaa

SEQ ID NO: 26855 - RNA, 20 nt, Artificial Sequence
  Synthetic
ucauuuuuuagagcauucaa

SEQ ID NO: 26856 - RNA, 22 nt, Artificial Sequence
  Synthetic
ugucauuuuuuagagcauucaa

SEQ ID NO: 26857 - RNA, 23 nt, Artificial Sequence
  Synthetic
uugucauuuuuuagagcauucaa

SEQ ID NO: 26858 - RNA, 24 nt, Artificial Sequence
  Synthetic
uuugucauuuuuuagagcauucaa

SEQ ID NO: 26859 - RNA, 22 nt, Artificial Sequence
  Synthetic
agcacaucucaugggcauucaa

SEQ ID NO: 26860 - RNA, 24 nt, Artificial Sequence
  Synthetic
agagcacaucucaugggcauucaa

SEQ ID NO: 26861 - RNA, 19 nt, Artificial Sequence
  Synthetic
ugacagagcucugauucaa

SEQ ID NO: 26862 - RNA, 21 nt, Artificial Sequence
  Synthetic
agugacagagcucugauucaa

SEQ ID NO: 26863 - RNA, 22 nt, Artificial Sequence
  Synthetic
cagugacagagcucugauucaa

SEQ ID NO: 26864 - RNA, 23 nt, Artificial Sequence
  Synthetic
ucagugacagagcucugauucaa

SEQ ID NO: 26865 - RNA, 24 nt, Artificial Sequence
  Synthetic
aucagugacagagcucugauucaa

SEQ ID NO: 26866 - RNA, 18 nt, Artificial Sequence
  Synthetic
aauuuacuuccuauucaa

SEQ ID NO: 26867 - RNA, 19 nt, Artificial Sequence
  Synthetic
uaauuuacuuccuauucaa

SEQ ID NO: 26868 - RNA, 20 nt, Artificial Sequence
  Synthetic
uuaauuuacuuccuauucaa

SEQ ID NO: 26869 - RNA, 21 nt, Artificial Sequence
  Synthetic
auuaauuuacuuccuauucaa

SEQ ID NO: 26870 - RNA, 22 nt, Artificial Sequence
  Synthetic
aauuaauuuacuuccuauucaa

SEQ ID NO: 26871 - RNA, 23 nt, Artificial Sequence
  Synthetic
aaauuaauuuacuuccuauucaa

SEQ ID NO: 26872 - RNA, 24 nt, Artificial Sequence
  Synthetic
caaauuaauuuacuuccuauucaa

SEQ ID NO: 26873 - RNA, 18 nt, Artificial Sequence
  Synthetic
uuuggggucuuuauucaa

SEQ ID NO: 26874 - RNA, 20 nt, Artificial Sequence
  Synthetic
aguuuggggucuuuauucaa

SEQ ID NO: 26875 - RNA, 21 nt, Artificial Sequence
  Synthetic
aaguuuggggucuuuauucaa

SEQ ID NO: 26876 - RNA, 23 nt, Artificial Sequence
  Synthetic
agaaguuuggggucuuuauucaa

SEQ ID NO: 26877 - RNA, 24 nt, Artificial Sequence
  Synthetic
uagaaguuuggggucuuuauucaa

SEQ ID NO: 26878 - RNA, 18 nt, Artificial Sequence
  Synthetic
cauuaucucauacuucaa

SEQ ID NO: 26879 - RNA, 19 nt, Artificial Sequence
  Synthetic
acauuaucucauacuucaa

SEQ ID NO: 26880 - RNA, 20 nt, Artificial Sequence
  Synthetic
cacauuaucucauacuucaa

SEQ ID NO: 26881 - RNA, 22 nt, Artificial Sequence
  Synthetic
agcacauuaucucauacuucaa

SEQ ID NO: 26882 - RNA, 23 nt, Artificial Sequence
  Synthetic
aagcacauuaucucauacuucaa

SEQ ID NO: 26883 - RNA, 18 nt, Artificial Sequence
  Synthetic
ucaaacuaaguucuucaa

SEQ ID NO: 26884 - RNA, 19 nt, Artificial Sequence
  Synthetic
aucaaacuaaguucuucaa

SEQ ID NO: 26885 - RNA, 20 nt, Artificial Sequence
  Synthetic
uaucaaacuaaguucuucaa

SEQ ID NO: 26886 - RNA, 22 nt, Artificial Sequence
  Synthetic
uguaucaaacuaaguucuucaa

SEQ ID NO: 26887 - RNA, 23 nt, Artificial Sequence
  Synthetic
auguaucaaacuaaguucuucaa

SEQ ID NO: 26888 - RNA, 24 nt, Artificial Sequence
  Synthetic
aauguaucaaacuaaguucuucaa

SEQ ID NO: 26889 - RNA, 21 nt, Artificial Sequence
  Synthetic
uuuuuaaaacuuuaaguucaa

SEQ ID NO: 26890 - RNA, 22 nt, Artificial Sequence
  Synthetic
cuuuuuaaaacuuuaaguucaa

SEQ ID NO: 26891 - RNA, 23 nt, Artificial Sequence
  Synthetic
acuuuuuaaaacuuuaaguucaa

SEQ ID NO: 26892 - RNA, 24 nt, Artificial Sequence
  Synthetic
cacuuuuuaaaacuuuaaguucaa

SEQ ID NO: 26893 - RNA, 19 nt, Artificial Sequence
  Synthetic
agguuucuauacuguucaa

SEQ ID NO: 26894 - RNA, 20 nt, Artificial Sequence
  Synthetic
uagguuucuauacuguucaa

SEQ ID NO: 26895 - RNA, 21 nt, Artificial Sequence
  Synthetic
cuagguuucuauacuguucaa

SEQ ID NO: 26896 - RNA, 22 nt, Artificial Sequence
  Synthetic
ccuagguuucuauacuguucaa

SEQ ID NO: 26897 - RNA, 23 nt, Artificial Sequence
  Synthetic
cccuagguuucuauacuguucaa

SEQ ID NO: 26898 - RNA, 24 nt, Artificial Sequence
  Synthetic
ucccuagguuucuauacuguucaa

SEQ ID NO: 26899 - RNA, 18 nt, Artificial Sequence
  Synthetic
aaaaagugucaauuucaa

SEQ ID NO: 26900 - RNA, 19 nt, Artificial Sequence
  Synthetic
uaaaaagugucaauuucaa

SEQ ID NO: 26901 - RNA, 20 nt, Artificial Sequence
  Synthetic
cuaaaaagugucaauuucaa

SEQ ID NO: 26902 - RNA, 21 nt, Artificial Sequence
  Synthetic
ccuaaaaagugucaauuucaa

SEQ ID NO: 26903 - RNA, 23 nt, Artificial Sequence
  Synthetic
agccuaaaaagugucaauuucaa

SEQ ID NO: 26904 - RNA, 24 nt, Artificial Sequence
  Synthetic
aagccuaaaaagugucaauuucaa

SEQ ID NO: 26905 - RNA, 19 nt, Artificial Sequence
  Synthetic
agauauguacgaauuucaa

SEQ ID NO: 26906 - RNA, 22 nt, Artificial Sequence
  Synthetic
aggagauauguacgaauuucaa

SEQ ID NO: 26907 - RNA, 23 nt, Artificial Sequence
  Synthetic
caggagauauguacgaauuucaa

SEQ ID NO: 26908 - RNA, 24 nt, Artificial Sequence
  Synthetic
ucaggagauauguacgaauuucaa

SEQ ID NO: 26909 - RNA, 18 nt, Artificial Sequence
  Synthetic
ugauagcuuugauuucaa

SEQ ID NO: 26910 - RNA, 19 nt, Artificial Sequence
  Synthetic
uugauagcuuugauuucaa

SEQ ID NO: 26911 - RNA, 21 nt, Artificial Sequence
  Synthetic
uguugauagcuuugauuucaa

SEQ ID NO: 26912 - RNA, 22 nt, Artificial Sequence
  Synthetic
cuguugauagcuuugauuucaa

SEQ ID NO: 26913 - RNA, 23 nt, Artificial Sequence
  Synthetic
ucuguugauagcuuugauuucaa

SEQ ID NO: 26914 - RNA, 24 nt, Artificial Sequence
  Synthetic
cucuguugauagcuuugauuucaa

SEQ ID NO: 26915 - RNA, 21 nt, Artificial Sequence
  Synthetic
aguucuguguuugccuuucaa

SEQ ID NO: 26916 - RNA, 22 nt, Artificial Sequence
  Synthetic
aaguucuguguuugccuuucaa

SEQ ID NO: 26917 - RNA, 23 nt, Artificial Sequence
  Synthetic
caaguucuguguuugccuuucaa

SEQ ID NO: 26918 - RNA, 18 nt, Artificial Sequence
  Synthetic
uaauuauaaaucuuucaa

SEQ ID NO: 26919 - RNA, 19 nt, Artificial Sequence
  Synthetic
uuaauuauaaaucuuucaa

SEQ ID NO: 26920 - RNA, 20 nt, Artificial Sequence
  Synthetic
uuuaauuauaaaucuuucaa

SEQ ID NO: 26921 - RNA, 21 nt, Artificial Sequence
  Synthetic
auuuaauuauaaaucuuucaa

SEQ ID NO: 26922 - RNA, 22 nt, Artificial Sequence
  Synthetic
uauuuaauuauaaaucuuucaa

SEQ ID NO: 26923 - RNA, 23 nt, Artificial Sequence
  Synthetic
auauuuaauuauaaaucuuucaa

SEQ ID NO: 26924 - RNA, 24 nt, Artificial Sequence
  Synthetic
uauauuuaauuauaaaucuuucaa

SEQ ID NO: 26925 - RNA, 18 nt, Artificial Sequence
  Synthetic
cuuucaguagcuuuucaa

SEQ ID NO: 26926 - RNA, 19 nt, Artificial Sequence
  Synthetic
acuuucaguagcuuuucaa

SEQ ID NO: 26927 - RNA, 20 nt, Artificial Sequence
  Synthetic
uacuuucaguagcuuuucaa

SEQ ID NO: 26928 - RNA, 21 nt, Artificial Sequence
  Synthetic
uuacuuucaguagcuuuucaa

SEQ ID NO: 26929 - RNA, 22 nt, Artificial Sequence
  Synthetic
uuuacuuucaguagcuuuucaa

SEQ ID NO: 26930 - RNA, 23 nt, Artificial Sequence
  Synthetic
auuuacuuucaguagcuuuucaa

SEQ ID NO: 26931 - RNA, 18 nt, Artificial Sequence
  Synthetic
augauuuugucuuuucaa

SEQ ID NO: 26932 - RNA, 19 nt, Artificial Sequence
  Synthetic
uaugauuuugucuuuucaa

SEQ ID NO: 26933 - RNA, 20 nt, Artificial Sequence
  Synthetic
cuaugauuuugucuuuucaa

SEQ ID NO: 26934 - RNA, 21 nt, Artificial Sequence
  Synthetic
ucuaugauuuugucuuuucaa

SEQ ID NO: 26935 - RNA, 22 nt, Artificial Sequence
  Synthetic
cucuaugauuuugucuuuucaa

SEQ ID NO: 26936 - RNA, 23 nt, Artificial Sequence
  Synthetic
ucucuaugauuuugucuuuucaa

SEQ ID NO: 26937 - RNA, 24 nt, Artificial Sequence
  Synthetic
aucucuaugauuuugucuuuucaa

SEQ ID NO: 26938 - RNA, 18 nt, Artificial Sequence
  Synthetic
uaaaguaaguguuuucaa

SEQ ID NO: 26939 - RNA, 19 nt, Artificial Sequence
  Synthetic
auaaaguaaguguuuucaa

SEQ ID NO: 26940 - RNA, 20 nt, Artificial Sequence
  Synthetic
uauaaaguaaguguuuucaa

SEQ ID NO: 26941 - RNA, 21 nt, Artificial Sequence
  Synthetic
auauaaaguaaguguuuucaa

SEQ ID NO: 26942 - RNA, 24 nt, Artificial Sequence
  Synthetic
uggauauaaaguaaguguuuucaa

SEQ ID NO: 26943 - RNA, 18 nt, Artificial Sequence
  Synthetic
accuuauucauuuuucaa

SEQ ID NO: 26944 - RNA, 19 nt, Artificial Sequence
  Synthetic
uaccuuauucauuuuucaa

SEQ ID NO: 26945 - RNA, 21 nt, Artificial Sequence
  Synthetic
aguaccuuauucauuuuucaa

SEQ ID NO: 26946 - RNA, 23 nt, Artificial Sequence
  Synthetic
agaguaccuuauucauuuuucaa

SEQ ID NO: 26947 - RNA, 24 nt, Artificial Sequence
  Synthetic
aagaguaccuuauucauuuuucaa

SEQ ID NO: 26948 - RNA, 18 nt, Artificial Sequence
  Synthetic
uuuauuguacuuuuucaa

SEQ ID NO: 26949 - RNA, 21 nt, Artificial Sequence
  Synthetic
agguuuauuguacuuuuucaa

SEQ ID NO: 26950 - RNA, 22 nt, Artificial Sequence
  Synthetic
uagguuuauuguacuuuuucaa

SEQ ID NO: 26951 - RNA, 23 nt, Artificial Sequence
  Synthetic
auagguuuauuguacuuuuucaa

SEQ ID NO: 26952 - RNA, 24 nt, Artificial Sequence
  Synthetic
aauagguuuauuguacuuuuucaa

SEQ ID NO: 26953 - RNA, 22 nt, Artificial Sequence
  Synthetic
aguuagaaaaagagaaaaagaa

SEQ ID NO: 26954 - RNA, 23 nt, Artificial Sequence
  Synthetic
caguuagaaaaagagaaaaagaa

SEQ ID NO: 26955 - RNA, 24 nt, Artificial Sequence
  Synthetic
ucaguuagaaaaagagaaaaagaa

SEQ ID NO: 26956 - RNA, 19 nt, Artificial Sequence
  Synthetic
ugguuuccaaggaaaagaa

SEQ ID NO: 26957 - RNA, 21 nt, Artificial Sequence
  Synthetic
ugugguuuccaaggaaaagaa

SEQ ID NO: 26958 - RNA, 22 nt, Artificial Sequence
  Synthetic
uugugguuuccaaggaaaagaa

SEQ ID NO: 26959 - RNA, 23 nt, Artificial Sequence
  Synthetic
auugugguuuccaaggaaaagaa

SEQ ID NO: 26960 - RNA, 24 nt, Artificial Sequence
  Synthetic
uauugugguuuccaaggaaaagaa

SEQ ID NO: 26961 - RNA, 21 nt, Artificial Sequence
  Synthetic
auauuacacuaaauaaaagaa

SEQ ID NO: 26962 - RNA, 22 nt, Artificial Sequence
  Synthetic
aauauuacacuaaauaaaagaa

SEQ ID NO: 26963 - RNA, 23 nt, Artificial Sequence
  Synthetic
aaauauuacacuaaauaaaagaa

SEQ ID NO: 26964 - RNA, 24 nt, Artificial Sequence
  Synthetic
aaaauauuacacuaaauaaaagaa

SEQ ID NO: 26965 - RNA, 19 nt, Artificial Sequence
  Synthetic
agcagggauaauaaaagaa

SEQ ID NO: 26966 - RNA, 20 nt, Artificial Sequence
  Synthetic
aagcagggauaauaaaagaa

SEQ ID NO: 26967 - RNA, 21 nt, Artificial Sequence
  Synthetic
aaagcagggauaauaaaagaa

SEQ ID NO: 26968 - RNA, 22 nt, Artificial Sequence
  Synthetic
uaaagcagggauaauaaaagaa

SEQ ID NO: 26969 - RNA, 23 nt, Artificial Sequence
  Synthetic
cuaaagcagggauaauaaaagaa

SEQ ID NO: 26970 - RNA, 18 nt, Artificial Sequence
  Synthetic
acagugcccauaaaagaa

SEQ ID NO: 26971 - RNA, 19 nt, Artificial Sequence
  Synthetic
uacagugcccauaaaagaa

SEQ ID NO: 26972 - RNA, 20 nt, Artificial Sequence
  Synthetic
uuacagugcccauaaaagaa

SEQ ID NO: 26973 - RNA, 24 nt, Artificial Sequence
  Synthetic
uggguuacagugcccauaaaagaa

SEQ ID NO: 26974 - RNA, 21 nt, Artificial Sequence
  Synthetic
caagagcagggaaagaaagaa

SEQ ID NO: 26975 - RNA, 22 nt, Artificial Sequence
  Synthetic
ccaagagcagggaaagaaagaa

SEQ ID NO: 26976 - RNA, 23 nt, Artificial Sequence
  Synthetic
accaagagcagggaaagaaagaa

SEQ ID NO: 26977 - RNA, 21 nt, Artificial Sequence
  Synthetic
ucaaauguaagagugaaagaa

SEQ ID NO: 26978 - RNA, 22 nt, Artificial Sequence
  Synthetic
cucaaauguaagagugaaagaa

SEQ ID NO: 26979 - RNA, 23 nt, Artificial Sequence
  Synthetic
ccucaaauguaagagugaaagaa

SEQ ID NO: 26980 - RNA, 24 nt, Artificial Sequence
  Synthetic
uccucaaauguaagagugaaagaa

SEQ ID NO: 26981 - RNA, 18 nt, Artificial Sequence
  Synthetic
cuuguauugaauaaagaa

SEQ ID NO: 26982 - RNA, 19 nt, Artificial Sequence
  Synthetic
acuuguauugaauaaagaa

SEQ ID NO: 26983 - RNA, 20 nt, Artificial Sequence
  Synthetic
cacuuguauugaauaaagaa

SEQ ID NO: 26984 - RNA, 22 nt, Artificial Sequence
  Synthetic
ugcacuuguauugaauaaagaa

SEQ ID NO: 26985 - RNA, 23 nt, Artificial Sequence
  Synthetic
cugcacuuguauugaauaaagaa

SEQ ID NO: 26986 - RNA, 24 nt, Artificial Sequence
  Synthetic
acugcacuuguauugaauaaagaa

SEQ ID NO: 26987 - RNA, 18 nt, Artificial Sequence
  Synthetic
augcuacuaucuaaagaa

SEQ ID NO: 26988 - RNA, 19 nt, Artificial Sequence
  Synthetic
caugcuacuaucuaaagaa

SEQ ID NO: 26989 - RNA, 20 nt, Artificial Sequence
  Synthetic
acaugcuacuaucuaaagaa

SEQ ID NO: 26990 - RNA, 21 nt, Artificial Sequence
  Synthetic
aacaugcuacuaucuaaagaa

SEQ ID NO: 26991 - RNA, 22 nt, Artificial Sequence
  Synthetic
aaacaugcuacuaucuaaagaa

SEQ ID NO: 26992 - RNA, 24 nt, Artificial Sequence
  Synthetic
ugaaacaugcuacuaucuaaagaa

SEQ ID NO: 26993 - RNA, 18 nt, Artificial Sequence
  Synthetic
ccaagcauagguaaagaa

SEQ ID NO: 26994 - RNA, 19 nt, Artificial Sequence
  Synthetic
accaagcauagguaaagaa

SEQ ID NO: 26995 - RNA, 20 nt, Artificial Sequence
  Synthetic
uaccaagcauagguaaagaa

SEQ ID NO: 26996 - RNA, 21 nt, Artificial Sequence
  Synthetic
auaccaagcauagguaaagaa

SEQ ID NO: 26997 - RNA, 23 nt, Artificial Sequence
  Synthetic
agauaccaagcauagguaaagaa

SEQ ID NO: 26998 - RNA, 24 nt, Artificial Sequence
  Synthetic
cagauaccaagcauagguaaagaa

SEQ ID NO: 26999 - RNA, 21 nt, Artificial Sequence
  Synthetic
uauuuuuuucacuuuaaagaa

SEQ ID NO: 27000 - RNA, 22 nt, Artificial Sequence
  Synthetic
auauuuuuuucacuuuaaagaa

SEQ ID NO: 27001 - RNA, 23 nt, Artificial Sequence
  Synthetic
cauauuuuuuucacuuuaaagaa

SEQ ID NO: 27002 - RNA, 24 nt, Artificial Sequence
  Synthetic
ucauauuuuuuucacuuuaaagaa

SEQ ID NO: 27003 - RNA, 18 nt, Artificial Sequence
  Synthetic
agcuucacaucacaagaa

SEQ ID NO: 27004 - RNA, 19 nt, Artificial Sequence
  Synthetic
uagcuucacaucacaagaa

SEQ ID NO: 27005 - RNA, 20 nt, Artificial Sequence
  Synthetic
uuagcuucacaucacaagaa

SEQ ID NO: 27006 - RNA, 21 nt, Artificial Sequence
  Synthetic
uuuagcuucacaucacaagaa

SEQ ID NO: 27007 - RNA, 22 nt, Artificial Sequence
  Synthetic
auuuagcuucacaucacaagaa

SEQ ID NO: 27008 - RNA, 23 nt, Artificial Sequence
  Synthetic
uauuuagcuucacaucacaagaa

SEQ ID NO: 27009 - RNA, 24 nt, Artificial Sequence
  Synthetic
uuauuuagcuucacaucacaagaa

SEQ ID NO: 27010 - RNA, 18 nt, Artificial Sequence
  Synthetic
uuuuauucaugacaagaa

SEQ ID NO: 27011 - RNA, 19 nt, Artificial Sequence
  Synthetic
cuuuuauucaugacaagaa

SEQ ID NO: 27012 - RNA, 20 nt, Artificial Sequence
  Synthetic
ccuuuuauucaugacaagaa

SEQ ID NO: 27013 - RNA, 18 nt, Artificial Sequence
  Synthetic
cauaacuuuuaccaagaa

SEQ ID NO: 27014 - RNA, 19 nt, Artificial Sequence
  Synthetic
ccauaacuuuuaccaagaa

SEQ ID NO: 27015 - RNA, 20 nt, Artificial Sequence
  Synthetic
accauaacuuuuaccaagaa

SEQ ID NO: 27016 - RNA, 21 nt, Artificial Sequence
  Synthetic
uaccauaacuuuuaccaagaa

SEQ ID NO: 27017 - RNA, 23 nt, Artificial Sequence
  Synthetic
uguaccauaacuuuuaccaagaa

SEQ ID NO: 27018 - RNA, 18 nt, Artificial Sequence
  Synthetic
uggguagccuuccaagaa

SEQ ID NO: 27019 - RNA, 19 nt, Artificial Sequence
  Synthetic
cuggguagccuuccaagaa

SEQ ID NO: 27020 - RNA, 20 nt, Artificial Sequence
  Synthetic
ccuggguagccuuccaagaa

SEQ ID NO: 27021 - RNA, 21 nt, Artificial Sequence
  Synthetic
uccuggguagccuuccaagaa

SEQ ID NO: 27022 - RNA, 22 nt, Artificial Sequence
  Synthetic
uuccuggguagccuuccaagaa

SEQ ID NO: 27023 - RNA, 23 nt, Artificial Sequence
  Synthetic
uuuccuggguagccuuccaagaa

SEQ ID NO: 27024 - RNA, 19 nt, Artificial Sequence
  Synthetic
ugguucuagggaucaagaa

SEQ ID NO: 27025 - RNA, 20 nt, Artificial Sequence
  Synthetic
uugguucuagggaucaagaa

SEQ ID NO: 27026 - RNA, 21 nt, Artificial Sequence
  Synthetic
uuugguucuagggaucaagaa

SEQ ID NO: 27027 - RNA, 22 nt, Artificial Sequence
  Synthetic
auuugguucuagggaucaagaa

SEQ ID NO: 27028 - RNA, 23 nt, Artificial Sequence
  Synthetic
uauuugguucuagggaucaagaa

SEQ ID NO: 27029 - RNA, 24 nt, Artificial Sequence
  Synthetic
auauuugguucuagggaucaagaa

SEQ ID NO: 27030 - RNA, 18 nt, Artificial Sequence
  Synthetic
uuuaaauacacucaagaa

SEQ ID NO: 27031 - RNA, 20 nt, Artificial Sequence
  Synthetic
aguuuaaauacacucaagaa

SEQ ID NO: 27032 - RNA, 21 nt, Artificial Sequence
  Synthetic
uaguuuaaauacacucaagaa

SEQ ID NO: 27033 - RNA, 22 nt, Artificial Sequence
  Synthetic
uuaguuuaaauacacucaagaa

SEQ ID NO: 27034 - RNA, 24 nt, Artificial Sequence
  Synthetic
uguuaguuuaaauacacucaagaa

SEQ ID NO: 27035 - RNA, 18 nt, Artificial Sequence
  Synthetic
cuaugauuuauucaagaa

SEQ ID NO: 27036 - RNA, 19 nt, Artificial Sequence
  Synthetic
ccuaugauuuauucaagaa

SEQ ID NO: 27037 - RNA, 20 nt, Artificial Sequence
  Synthetic
uccuaugauuuauucaagaa

SEQ ID NO: 27038 - RNA, 21 nt, Artificial Sequence
  Synthetic
cuccuaugauuuauucaagaa

SEQ ID NO: 27039 - RNA, 22 nt, Artificial Sequence
  Synthetic
ucuccuaugauuuauucaagaa

SEQ ID NO: 27040 - RNA, 23 nt, Artificial Sequence
  Synthetic
aucuccuaugauuuauucaagaa

SEQ ID NO: 27041 - RNA, 24 nt, Artificial Sequence
  Synthetic
uaucuccuaugauuuauucaagaa

SEQ ID NO: 27042 - RNA, 19 nt, Artificial Sequence
  Synthetic
ugcauauuucaaagaagaa

SEQ ID NO: 27043 - RNA, 21 nt, Artificial Sequence
  Synthetic
ugugcauauuucaaagaagaa

SEQ ID NO: 27044 - RNA, 22 nt, Artificial Sequence
  Synthetic
uugugcauauuucaaagaagaa

SEQ ID NO: 27045 - RNA, 24 nt, Artificial Sequence
  Synthetic
uguugugcauauuucaaagaagaa

SEQ ID NO: 27046 - RNA, 18 nt, Artificial Sequence
  Synthetic
aauuauguaacagaagaa

SEQ ID NO: 27047 - RNA, 19 nt, Artificial Sequence
  Synthetic
caauuauguaacagaagaa

SEQ ID NO: 27048 - RNA, 20 nt, Artificial Sequence
  Synthetic
ucaauuauguaacagaagaa

SEQ ID NO: 27049 - RNA, 21 nt, Artificial Sequence
  Synthetic
uucaauuauguaacagaagaa

SEQ ID NO: 27050 - RNA, 22 nt, Artificial Sequence
  Synthetic
cuucaauuauguaacagaagaa

SEQ ID NO: 27051 - RNA, 24 nt, Artificial Sequence
  Synthetic
agcuucaauuauguaacagaagaa

SEQ ID NO: 27052 - RNA, 21 nt, Artificial Sequence
  Synthetic
uaccaggagcuggaggaagaa

SEQ ID NO: 27053 - RNA, 22 nt, Artificial Sequence
  Synthetic
uuaccaggagcuggaggaagaa

SEQ ID NO: 27054 - RNA, 24 nt, Artificial Sequence
  Synthetic
uguuaccaggagcuggaggaagaa

SEQ ID NO: 27055 - RNA, 18 nt, Artificial Sequence
  Synthetic
uuuuacugacuggaagaa

SEQ ID NO: 27056 - RNA, 20 nt, Artificial Sequence
  Synthetic
uguuuuacugacuggaagaa

SEQ ID NO: 27057 - RNA, 21 nt, Artificial Sequence
  Synthetic
cuguuuuacugacuggaagaa

SEQ ID NO: 27058 - RNA, 22 nt, Artificial Sequence
  Synthetic
acuguuuuacugacuggaagaa

SEQ ID NO: 27059 - RNA, 23 nt, Artificial Sequence
  Synthetic
cacuguuuuacugacuggaagaa

SEQ ID NO: 27060 - RNA, 24 nt, Artificial Sequence
  Synthetic
ccacuguuuuacugacuggaagaa

SEQ ID NO: 27061 - RNA, 18 nt, Artificial Sequence
  Synthetic
aucaucaaaacugaagaa

SEQ ID NO: 27062 - RNA, 19 nt, Artificial Sequence
  Synthetic
uaucaucaaaacugaagaa

SEQ ID NO: 27063 - RNA, 20 nt, Artificial Sequence
  Synthetic
uuaucaucaaaacugaagaa

SEQ ID NO: 27064 - RNA, 21 nt, Artificial Sequence
  Synthetic
uuuaucaucaaaacugaagaa

SEQ ID NO: 27065 - RNA, 22 nt, Artificial Sequence
  Synthetic
cuuuaucaucaaaacugaagaa

SEQ ID NO: 27066 - RNA, 24 nt, Artificial Sequence
  Synthetic
agcuuuaucaucaaaacugaagaa

SEQ ID NO: 27067 - RNA, 18 nt, Artificial Sequence
  Synthetic
uugaaagauugugaagaa

SEQ ID NO: 27068 - RNA, 21 nt, Artificial Sequence
  Synthetic
agguugaaagauugugaagaa

SEQ ID NO: 27069 - RNA, 23 nt, Artificial Sequence
  Synthetic
agagguugaaagauugugaagaa

SEQ ID NO: 27070 - RNA, 24 nt, Artificial Sequence
  Synthetic
cagagguugaaagauugugaagaa

SEQ ID NO: 27071 - RNA, 21 nt, Artificial Sequence
  Synthetic
uuaaugaaaguaccauaagaa

SEQ ID NO: 27072 - RNA, 22 nt, Artificial Sequence
  Synthetic
cuuaaugaaaguaccauaagaa

SEQ ID NO: 27073 - RNA, 23 nt, Artificial Sequence
  Synthetic
ccuuaaugaaaguaccauaagaa

SEQ ID NO: 27074 - RNA, 19 nt, Artificial Sequence
  Synthetic
aguuacgguaggauaagaa

SEQ ID NO: 27075 - RNA, 20 nt, Artificial Sequence
  Synthetic
aaguuacgguaggauaagaa

SEQ ID NO: 27076 - RNA, 21 nt, Artificial Sequence
  Synthetic
uaaguuacgguaggauaagaa

SEQ ID NO: 27077 - RNA, 23 nt, Artificial Sequence
  Synthetic
uguaaguuacgguaggauaagaa

SEQ ID NO: 27078 - RNA, 24 nt, Artificial Sequence
  Synthetic
auguaaguuacgguaggauaagaa

SEQ ID NO: 27079 - RNA, 18 nt, Artificial Sequence
  Synthetic
aaaagguaaucuuaagaa

SEQ ID NO: 27080 - RNA, 19 nt, Artificial Sequence
  Synthetic
uaaaagguaaucuuaagaa

SEQ ID NO: 27081 - RNA, 20 nt, Artificial Sequence
  Synthetic
uuaaaagguaaucuuaagaa

SEQ ID NO: 27082 - RNA, 21 nt, Artificial Sequence
  Synthetic
uuuaaaagguaaucuuaagaa

SEQ ID NO: 27083 - RNA, 22 nt, Artificial Sequence
  Synthetic
uuuuaaaagguaaucuuaagaa

SEQ ID NO: 27084 - RNA, 24 nt, Artificial Sequence
  Synthetic
aguuuuaaaagguaaucuuaagaa

SEQ ID NO: 27085 - RNA, 18 nt, Artificial Sequence
  Synthetic
uccauugcuucuuaagaa

SEQ ID NO: 27086 - RNA, 19 nt, Artificial Sequence
  Synthetic
auccauugcuucuuaagaa

SEQ ID NO: 27087 - RNA, 21 nt, Artificial Sequence
  Synthetic
ugauccauugcuucuuaagaa

SEQ ID NO: 27088 - RNA, 22 nt, Artificial Sequence
  Synthetic
augauccauugcuucuuaagaa

SEQ ID NO: 27089 - RNA, 23 nt, Artificial Sequence
  Synthetic
uaugauccauugcuucuuaagaa

SEQ ID NO: 27090 - RNA, 21 nt, Artificial Sequence
  Synthetic
cuuuuguuacuguuuuaagaa

SEQ ID NO: 27091 - RNA, 22 nt, Artificial Sequence
  Synthetic
ccuuuuguuacuguuuuaagaa

SEQ ID NO: 27092 - RNA, 23 nt, Artificial Sequence
  Synthetic
accuuuuguuacuguuuuaagaa

SEQ ID NO: 27093 - RNA, 24 nt, Artificial Sequence
  Synthetic
caccuuuuguuacuguuuuaagaa

SEQ ID NO: 27094 - RNA, 21 nt, Artificial Sequence
  Synthetic
auaaaagauacaagaacagaa

SEQ ID NO: 27095 - RNA, 22 nt, Artificial Sequence
  Synthetic
aauaaaagauacaagaacagaa

SEQ ID NO: 27096 - RNA, 24 nt, Artificial Sequence
  Synthetic
agaauaaaagauacaagaacagaa

SEQ ID NO: 27097 - RNA, 18 nt, Artificial Sequence
  Synthetic
agaugacuagacacagaa

SEQ ID NO: 27098 - RNA, 20 nt, Artificial Sequence
  Synthetic
agagaugacuagacacagaa

SEQ ID NO: 27099 - RNA, 21 nt, Artificial Sequence
  Synthetic
cagagaugacuagacacagaa

SEQ ID NO: 27100 - RNA, 22 nt, Artificial Sequence
  Synthetic
acagagaugacuagacacagaa

SEQ ID NO: 27101 - RNA, 23 nt, Artificial Sequence
  Synthetic
uacagagaugacuagacacagaa

SEQ ID NO: 27102 - RNA, 24 nt, Artificial Sequence
  Synthetic
uuacagagaugacuagacacagaa

SEQ ID NO: 27103 - RNA, 19 nt, Artificial Sequence
  Synthetic
cgaggaaacgaauacagaa

SEQ ID NO: 27104 - RNA, 20 nt, Artificial Sequence
  Synthetic
ccgaggaaacgaauacagaa

SEQ ID NO: 27105 - RNA, 21 nt, Artificial Sequence
  Synthetic
cccgaggaaacgaauacagaa

SEQ ID NO: 27106 - RNA, 23 nt, Artificial Sequence
  Synthetic
agcccgaggaaacgaauacagaa

SEQ ID NO: 27107 - RNA, 24 nt, Artificial Sequence
  Synthetic
aagcccgaggaaacgaauacagaa

SEQ ID NO: 27108 - RNA, 19 nt, Artificial Sequence
  Synthetic
uguauuuauauauacagaa

SEQ ID NO: 27109 - RNA, 20 nt, Artificial Sequence
  Synthetic
cuguauuuauauauacagaa

SEQ ID NO: 27110 - RNA, 21 nt, Artificial Sequence
  Synthetic
ucuguauuuauauauacagaa

SEQ ID NO: 27111 - RNA, 22 nt, Artificial Sequence
  Synthetic
uucuguauuuauauauacagaa

SEQ ID NO: 27112 - RNA, 23 nt, Artificial Sequence
  Synthetic
uuucuguauuuauauauacagaa

SEQ ID NO: 27113 - RNA, 24 nt, Artificial Sequence
  Synthetic
auuucuguauuuauauauacagaa

SEQ ID NO: 27114 - RNA, 21 nt, Artificial Sequence
  Synthetic
aggggucuuaguaacccagaa

SEQ ID NO: 27115 - RNA, 22 nt, Artificial Sequence
  Synthetic
uaggggucuuaguaacccagaa

SEQ ID NO: 27116 - RNA, 23 nt, Artificial Sequence
  Synthetic
auaggggucuuaguaacccagaa

SEQ ID NO: 27117 - RNA, 24 nt, Artificial Sequence
  Synthetic
uauaggggucuuaguaacccagaa

SEQ ID NO: 27118 - RNA, 18 nt, Artificial Sequence
  Synthetic
aauaugcaauucccagaa

SEQ ID NO: 27119 - RNA, 21 nt, Artificial Sequence
  Synthetic
aggaauaugcaauucccagaa

SEQ ID NO: 27120 - RNA, 22 nt, Artificial Sequence
  Synthetic
uaggaauaugcaauucccagaa

SEQ ID NO: 27121 - RNA, 23 nt, Artificial Sequence
  Synthetic
auaggaauaugcaauucccagaa

SEQ ID NO: 27122 - RNA, 24 nt, Artificial Sequence
  Synthetic
uauaggaauaugcaauucccagaa

SEQ ID NO: 27123 - RNA, 19 nt, Artificial Sequence
  Synthetic
ugcacguuauuauccagaa

SEQ ID NO: 27124 - RNA, 20 nt, Artificial Sequence
  Synthetic
augcacguuauuauccagaa

SEQ ID NO: 27125 - RNA, 21 nt, Artificial Sequence
  Synthetic
aaugcacguuauuauccagaa

SEQ ID NO: 27126 - RNA, 22 nt, Artificial Sequence
  Synthetic
aaaugcacguuauuauccagaa

SEQ ID NO: 27127 - RNA, 24 nt, Artificial Sequence
  Synthetic
agaaaugcacguuauuauccagaa

SEQ ID NO: 27128 - RNA, 20 nt, Artificial Sequence
  Synthetic
ugggugcaucgacuccagaa

SEQ ID NO: 27129 - RNA, 22 nt, Artificial Sequence
  Synthetic
ugugggugcaucgacuccagaa

SEQ ID NO: 27130 - RNA, 24 nt, Artificial Sequence
  Synthetic
agugugggugcaucgacuccagaa

SEQ ID NO: 27131 - RNA, 21 nt, Artificial Sequence
  Synthetic
uaccaugugaagacagcagaa

SEQ ID NO: 27132 - RNA, 22 nt, Artificial Sequence
  Synthetic
cuaccaugugaagacagcagaa

SEQ ID NO: 27133 - RNA, 23 nt, Artificial Sequence
  Synthetic
ucuaccaugugaagacagcagaa

SEQ ID NO: 27134 - RNA, 24 nt, Artificial Sequence
  Synthetic
aucuaccaugugaagacagcagaa

SEQ ID NO: 27135 - RNA, 18 nt, Artificial Sequence
  Synthetic
ucgagaucaguagcagaa

SEQ ID NO: 27136 - RNA, 19 nt, Artificial Sequence
  Synthetic
uucgagaucaguagcagaa

SEQ ID NO: 27137 - RNA, 21 nt, Artificial Sequence
  Synthetic
uguucgagaucaguagcagaa

SEQ ID NO: 27138 - RNA, 22 nt, Artificial Sequence
  Synthetic
auguucgagaucaguagcagaa

SEQ ID NO: 27139 - RNA, 23 nt, Artificial Sequence
  Synthetic
uauguucgagaucaguagcagaa

SEQ ID NO: 27140 - RNA, 24 nt, Artificial Sequence
  Synthetic
uuauguucgagaucaguagcagaa

SEQ ID NO: 27141 - RNA, 18 nt, Artificial Sequence
  Synthetic
uucauuguguaggcagaa

SEQ ID NO: 27142 - RNA, 19 nt, Artificial Sequence
  Synthetic
auucauuguguaggcagaa

SEQ ID NO: 27143 - RNA, 20 nt, Artificial Sequence
  Synthetic
cauucauuguguaggcagaa

SEQ ID NO: 27144 - RNA, 21 nt, Artificial Sequence
  Synthetic
ccauucauuguguaggcagaa

SEQ ID NO: 27145 - RNA, 22 nt, Artificial Sequence
  Synthetic
uccauucauuguguaggcagaa

SEQ ID NO: 27146 - RNA, 23 nt, Artificial Sequence
  Synthetic
cuccauucauuguguaggcagaa

SEQ ID NO: 27147 - RNA, 24 nt, Artificial Sequence
  Synthetic
ccuccauucauuguguaggcagaa

SEQ ID NO: 27148 - RNA, 21 nt, Artificial Sequence
  Synthetic
agggagaucaguuaggcagaa

SEQ ID NO: 27149 - RNA, 22 nt, Artificial Sequence
  Synthetic
aagggagaucaguuaggcagaa

SEQ ID NO: 27150 - RNA, 23 nt, Artificial Sequence
  Synthetic
aaagggagaucaguuaggcagaa

SEQ ID NO: 27151 - RNA, 24 nt, Artificial Sequence
  Synthetic
aaaagggagaucaguuaggcagaa

SEQ ID NO: 27152 - RNA, 19 nt, Artificial Sequence
  Synthetic
aggcuguuagaaaucagaa

SEQ ID NO: 27153 - RNA, 21 nt, Artificial Sequence
  Synthetic
agaggcuguuagaaaucagaa

SEQ ID NO: 27154 - RNA, 23 nt, Artificial Sequence
  Synthetic
agagaggcuguuagaaaucagaa

SEQ ID NO: 27155 - RNA, 24 nt, Artificial Sequence
  Synthetic
cagagaggcuguuagaaaucagaa

SEQ ID NO: 27156 - RNA, 18 nt, Artificial Sequence
  Synthetic
aaucuccuuaacucagaa

SEQ ID NO: 27157 - RNA, 19 nt, Artificial Sequence
  Synthetic
aaaucuccuuaacucagaa

SEQ ID NO: 27158 - RNA, 20 nt, Artificial Sequence
  Synthetic
uaaaucuccuuaacucagaa

SEQ ID NO: 27159 - RNA, 21 nt, Artificial Sequence
  Synthetic
uuaaaucuccuuaacucagaa

SEQ ID NO: 27160 - RNA, 22 nt, Artificial Sequence
  Synthetic
uuuaaaucuccuuaacucagaa

SEQ ID NO: 27161 - RNA, 23 nt, Artificial Sequence
  Synthetic
uuuuaaaucuccuuaacucagaa

SEQ ID NO: 27162 - RNA, 24 nt, Artificial Sequence
  Synthetic
cuuuuaaaucuccuuaacucagaa

SEQ ID NO: 27163 - RNA, 20 nt, Artificial Sequence
  Synthetic
agggcccacauugcucagaa

SEQ ID NO: 27164 - RNA, 22 nt, Artificial Sequence
  Synthetic
agagggcccacauugcucagaa

SEQ ID NO: 27165 - RNA, 23 nt, Artificial Sequence
  Synthetic
cagagggcccacauugcucagaa

SEQ ID NO: 27166 - RNA, 24 nt, Artificial Sequence
  Synthetic
ccagagggcccacauugcucagaa

SEQ ID NO: 27167 - RNA, 18 nt, Artificial Sequence
  Synthetic
ucagucaugaagucagaa

SEQ ID NO: 27168 - RNA, 20 nt, Artificial Sequence
  Synthetic
ugucagucaugaagucagaa

SEQ ID NO: 27169 - RNA, 21 nt, Artificial Sequence
  Synthetic
augucagucaugaagucagaa

SEQ ID NO: 27170 - RNA, 22 nt, Artificial Sequence
  Synthetic
caugucagucaugaagucagaa

SEQ ID NO: 27171 - RNA, 24 nt, Artificial Sequence
  Synthetic
ugcaugucagucaugaagucagaa

SEQ ID NO: 27172 - RNA, 18 nt, Artificial Sequence
  Synthetic
caacccaauaugucagaa

SEQ ID NO: 27173 - RNA, 20 nt, Artificial Sequence
  Synthetic
ugcaacccaauaugucagaa

SEQ ID NO: 27174 - RNA, 21 nt, Artificial Sequence
  Synthetic
cugcaacccaauaugucagaa

SEQ ID NO: 27175 - RNA, 23 nt, Artificial Sequence
  Synthetic
ugcugcaacccaauaugucagaa

SEQ ID NO: 27176 - RNA, 24 nt, Artificial Sequence
  Synthetic
augcugcaacccaauaugucagaa

SEQ ID NO: 27177 - RNA, 18 nt, Artificial Sequence
  Synthetic
cuguugugggcuucagaa

SEQ ID NO: 27178 - RNA, 19 nt, Artificial Sequence
  Synthetic
ucuguugugggcuucagaa

SEQ ID NO: 27179 - RNA, 20 nt, Artificial Sequence
  Synthetic
uucuguugugggcuucagaa

SEQ ID NO: 27180 - RNA, 21 nt, Artificial Sequence
  Synthetic
uuucuguugugggcuucagaa

SEQ ID NO: 27181 - RNA, 22 nt, Artificial Sequence
  Synthetic
uuuucuguugugggcuucagaa

SEQ ID NO: 27182 - RNA, 23 nt, Artificial Sequence
  Synthetic
uuuuucuguugugggcuucagaa

SEQ ID NO: 27183 - RNA, 24 nt, Artificial Sequence
  Synthetic
auuuuucuguugugggcuucagaa

SEQ ID NO: 27184 - RNA, 21 nt, Artificial Sequence
  Synthetic
caauggaauucagaaagagaa

SEQ ID NO: 27185 - RNA, 22 nt, Artificial Sequence
  Synthetic
ucaauggaauucagaaagagaa

SEQ ID NO: 27186 - RNA, 24 nt, Artificial Sequence
  Synthetic
ugucaauggaauucagaaagagaa

SEQ ID NO: 27187 - RNA, 18 nt, Artificial Sequence
  Synthetic
cuucuagaaucaagagaa

SEQ ID NO: 27188 - RNA, 19 nt, Artificial Sequence
  Synthetic
ucuucuagaaucaagagaa

SEQ ID NO: 27189 - RNA, 20 nt, Artificial Sequence
  Synthetic
aucuucuagaaucaagagaa

SEQ ID NO: 27190 - RNA, 22 nt, Artificial Sequence
  Synthetic
agaucuucuagaaucaagagaa

SEQ ID NO: 27191 - RNA, 23 nt, Artificial Sequence
  Synthetic
aagaucuucuagaaucaagagaa

SEQ ID NO: 27192 - RNA, 24 nt, Artificial Sequence
  Synthetic
caagaucuucuagaaucaagagaa

SEQ ID NO: 27193 - RNA, 19 nt, Artificial Sequence
  Synthetic
agcugcacaauuaagagaa

SEQ ID NO: 27194 - RNA, 20 nt, Artificial Sequence
  Synthetic
uagcugcacaauuaagagaa

SEQ ID NO: 27195 - RNA, 21 nt, Artificial Sequence
  Synthetic
cuagcugcacaauuaagagaa

SEQ ID NO: 27196 - RNA, 23 nt, Artificial Sequence
  Synthetic
agcuagcugcacaauuaagagaa

SEQ ID NO: 27197 - RNA, 24 nt, Artificial Sequence
  Synthetic
cagcuagcugcacaauuaagagaa

SEQ ID NO: 27198 - RNA, 21 nt, Artificial Sequence
  Synthetic
caaaauauuuaugacagagaa

SEQ ID NO: 27199 - RNA, 22 nt, Artificial Sequence
  Synthetic
ucaaaauauuuaugacagagaa

SEQ ID NO: 27200 - RNA, 23 nt, Artificial Sequence
  Synthetic
aucaaaauauuuaugacagagaa

SEQ ID NO: 27201 - RNA, 24 nt, Artificial Sequence
  Synthetic
uaucaaaauauuuaugacagagaa

SEQ ID NO: 27202 - RNA, 18 nt, Artificial Sequence
  Synthetic
aguuccuagggcagagaa

SEQ ID NO: 27203 - RNA, 20 nt, Artificial Sequence
  Synthetic
agaguuccuagggcagagaa

SEQ ID NO: 27204 - RNA, 21 nt, Artificial Sequence
  Synthetic
cagaguuccuagggcagagaa

SEQ ID NO: 27205 - RNA, 22 nt, Artificial Sequence
  Synthetic
ccagaguuccuagggcagagaa

SEQ ID NO: 27206 - RNA, 23 nt, Artificial Sequence
  Synthetic
cccagaguuccuagggcagagaa

SEQ ID NO: 27207 - RNA, 24 nt, Artificial Sequence
  Synthetic
ucccagaguuccuagggcagagaa

SEQ ID NO: 27208 - RNA, 18 nt, Artificial Sequence
  Synthetic
cagauugggggcagagaa

SEQ ID NO: 27209 - RNA, 20 nt, Artificial Sequence
  Synthetic
agcagauugggggcagagaa

SEQ ID NO: 27210 - RNA, 18 nt, Artificial Sequence
  Synthetic
aguaguuguugcagagaa

SEQ ID NO: 27211 - RNA, 19 nt, Artificial Sequence
  Synthetic
uaguaguuguugcagagaa

SEQ ID NO: 27212 - RNA, 21 nt, Artificial Sequence
  Synthetic
aguaguaguuguugcagagaa

SEQ ID NO: 27213 - RNA, 22 nt, Artificial Sequence
  Synthetic
uaguaguaguuguugcagagaa

SEQ ID NO: 27214 - RNA, 23 nt, Artificial Sequence
  Synthetic
uuaguaguaguuguugcagagaa

SEQ ID NO: 27215 - RNA, 24 nt, Artificial Sequence
  Synthetic
uuuaguaguaguuguugcagagaa

SEQ ID NO: 27216 - RNA, 21 nt, Artificial Sequence
  Synthetic
agggguuggguagucagagaa

SEQ ID NO: 27217 - RNA, 23 nt, Artificial Sequence
  Synthetic
ugagggguuggguagucagagaa

SEQ ID NO: 27218 - RNA, 18 nt, Artificial Sequence
  Synthetic
uuuccuucacauagagaa

SEQ ID NO: 27219 - RNA, 19 nt, Artificial Sequence
  Synthetic
auuuccuucacauagagaa

SEQ ID NO: 27220 - RNA, 20 nt, Artificial Sequence
  Synthetic
aauuuccuucacauagagaa

SEQ ID NO: 27221 - RNA, 21 nt, Artificial Sequence
  Synthetic
aaauuuccuucacauagagaa

SEQ ID NO: 27222 - RNA, 22 nt, Artificial Sequence
  Synthetic
uaaauuuccuucacauagagaa

SEQ ID NO: 27223 - RNA, 23 nt, Artificial Sequence
  Synthetic
uuaaauuuccuucacauagagaa

SEQ ID NO: 27224 - RNA, 24 nt, Artificial Sequence
  Synthetic
auuaaauuuccuucacauagagaa

SEQ ID NO: 27225 - RNA, 18 nt, Artificial Sequence
  Synthetic
agucaaguggauagagaa

SEQ ID NO: 27226 - RNA, 19 nt, Artificial Sequence
  Synthetic
uagucaaguggauagagaa

SEQ ID NO: 27227 - RNA, 18 nt, Artificial Sequence
  Synthetic
aaguauauaacuagagaa

SEQ ID NO: 27228 - RNA, 19 nt, Artificial Sequence
  Synthetic
caaguauauaacuagagaa

SEQ ID NO: 27229 - RNA, 20 nt, Artificial Sequence
  Synthetic
acaaguauauaacuagagaa

SEQ ID NO: 27230 - RNA, 21 nt, Artificial Sequence
  Synthetic
aacaaguauauaacuagagaa

SEQ ID NO: 27231 - RNA, 22 nt, Artificial Sequence
  Synthetic
aaacaaguauauaacuagagaa

SEQ ID NO: 27232 - RNA, 23 nt, Artificial Sequence
  Synthetic
uaaacaaguauauaacuagagaa

SEQ ID NO: 27233 - RNA, 24 nt, Artificial Sequence
  Synthetic
uuaaacaaguauauaacuagagaa

SEQ ID NO: 27234 - RNA, 18 nt, Artificial Sequence
  Synthetic
auaagacaaccuagagaa

SEQ ID NO: 27235 - RNA, 19 nt, Artificial Sequence
  Synthetic
uauaagacaaccuagagaa

SEQ ID NO: 27236 - RNA, 20 nt, Artificial Sequence
  Synthetic
cuauaagacaaccuagagaa

SEQ ID NO: 27237 - RNA, 22 nt, Artificial Sequence
  Synthetic
agcuauaagacaaccuagagaa

SEQ ID NO: 27238 - RNA, 23 nt, Artificial Sequence
  Synthetic
cagcuauaagacaaccuagagaa

SEQ ID NO: 27239 - RNA, 18 nt, Artificial Sequence
  Synthetic
uggcauaaggcuagagaa

SEQ ID NO: 27240 - RNA, 19 nt, Artificial Sequence
  Synthetic
cuggcauaaggcuagagaa

SEQ ID NO: 27241 - RNA, 21 nt, Artificial Sequence
  Synthetic
ugcuggcauaaggcuagagaa

SEQ ID NO: 27242 - RNA, 23 nt, Artificial Sequence
  Synthetic
ugugcuggcauaaggcuagagaa

SEQ ID NO: 27243 - RNA, 18 nt, Artificial Sequence
  Synthetic
uacuuagaugcuagagaa

SEQ ID NO: 27244 - RNA, 19 nt, Artificial Sequence
  Synthetic
uuacuuagaugcuagagaa

SEQ ID NO: 27245 - RNA, 20 nt, Artificial Sequence
  Synthetic
uuuacuuagaugcuagagaa

SEQ ID NO: 27246 - RNA, 21 nt, Artificial Sequence
  Synthetic
auuuacuuagaugcuagagaa

SEQ ID NO: 27247 - RNA, 22 nt, Artificial Sequence
  Synthetic
uauuuacuuagaugcuagagaa

SEQ ID NO: 27248 - RNA, 23 nt, Artificial Sequence
  Synthetic
cuauuuacuuagaugcuagagaa

SEQ ID NO: 27249 - RNA, 24 nt, Artificial Sequence
  Synthetic
ucuauuuacuuagaugcuagagaa

SEQ ID NO: 27250 - RNA, 18 nt, Artificial Sequence
  Synthetic
agcagagaacuucgagaa

SEQ ID NO: 27251 - RNA, 19 nt, Artificial Sequence
  Synthetic
aagcagagaacuucgagaa

SEQ ID NO: 27252 - RNA, 20 nt, Artificial Sequence
  Synthetic
aaagcagagaacuucgagaa

SEQ ID NO: 27253 - RNA, 22 nt, Artificial Sequence
  Synthetic
agaaagcagagaacuucgagaa

SEQ ID NO: 27254 - RNA, 23 nt, Artificial Sequence
  Synthetic
aagaaagcagagaacuucgagaa

SEQ ID NO: 27255 - RNA, 24 nt, Artificial Sequence
  Synthetic
caagaaagcagagaacuucgagaa

SEQ ID NO: 27256 - RNA, 21 nt, Artificial Sequence
  Synthetic
auuuuguuuucuaaaggagaa

SEQ ID NO: 27257 - RNA, 22 nt, Artificial Sequence
  Synthetic
aauuuuguuuucuaaaggagaa

SEQ ID NO: 27258 - RNA, 24 nt, Artificial Sequence
  Synthetic
ugaauuuuguuuucuaaaggagaa

SEQ ID NO: 27259 - RNA, 18 nt, Artificial Sequence
  Synthetic
cugaguauggauggagaa

SEQ ID NO: 27260 - RNA, 19 nt, Artificial Sequence
  Synthetic
acugaguauggauggagaa

SEQ ID NO: 27261 - RNA, 20 nt, Artificial Sequence
  Synthetic
uacugaguauggauggagaa

SEQ ID NO: 27262 - RNA, 21 nt, Artificial Sequence
  Synthetic
auacugaguauggauggagaa

SEQ ID NO: 27263 - RNA, 23 nt, Artificial Sequence
  Synthetic
agauacugaguauggauggagaa

SEQ ID NO: 27264 - RNA, 24 nt, Artificial Sequence
  Synthetic
aagauacugaguauggauggagaa

SEQ ID NO: 27265 - RNA, 18 nt, Artificial Sequence
  Synthetic
uuauauuauucuggagaa

SEQ ID NO: 27266 - RNA, 19 nt, Artificial Sequence
  Synthetic
uuuauauuauucuggagaa

SEQ ID NO: 27267 - RNA, 23 nt, Artificial Sequence
  Synthetic
aggguuuauauuauucuggagaa

SEQ ID NO: 27268 - RNA, 24 nt, Artificial Sequence
  Synthetic
aaggguuuauauuauucuggagaa

SEQ ID NO: 27269 - RNA, 18 nt, Artificial Sequence
  Synthetic
auacuuacaccaugagaa

SEQ ID NO: 27270 - RNA, 20 nt, Artificial Sequence
  Synthetic
agauacuuacaccaugagaa

SEQ ID NO: 27271 - RNA, 22 nt, Artificial Sequence
  Synthetic
ugagauacuuacaccaugagaa

SEQ ID NO: 27272 - RNA, 23 nt, Artificial Sequence
  Synthetic
cugagauacuuacaccaugagaa

SEQ ID NO: 27273 - RNA, 24 nt, Artificial Sequence
  Synthetic
acugagauacuuacaccaugagaa

SEQ ID NO: 27274 - RNA, 19 nt, Artificial Sequence
  Synthetic
ugauuauaguauaugagaa

SEQ ID NO: 27275 - RNA, 20 nt, Artificial Sequence
  Synthetic
uugauuauaguauaugagaa

SEQ ID NO: 27276 - RNA, 21 nt, Artificial Sequence
  Synthetic
auugauuauaguauaugagaa

SEQ ID NO: 27277 - RNA, 22 nt, Artificial Sequence
  Synthetic
aauugauuauaguauaugagaa

SEQ ID NO: 27278 - RNA, 23 nt, Artificial Sequence
  Synthetic
aaauugauuauaguauaugagaa

SEQ ID NO: 27279 - RNA, 24 nt, Artificial Sequence
  Synthetic
caaauugauuauaguauaugagaa

SEQ ID NO: 27280 - RNA, 18 nt, Artificial Sequence
  Synthetic
ugggauucaaaaauagaa

SEQ ID NO: 27281 - RNA, 19 nt, Artificial Sequence
  Synthetic
uugggauucaaaaauagaa

SEQ ID NO: 27282 - RNA, 20 nt, Artificial Sequence
  Synthetic
uuugggauucaaaaauagaa

SEQ ID NO: 27283 - RNA, 21 nt, Artificial Sequence
  Synthetic
auuugggauucaaaaauagaa

SEQ ID NO: 27284 - RNA, 22 nt, Artificial Sequence
  Synthetic
uauuugggauucaaaaauagaa

SEQ ID NO: 27285 - RNA, 18 nt, Artificial Sequence
  Synthetic
ccagugaaccaaauagaa

SEQ ID NO: 27286 - RNA, 22 nt, Artificial Sequence
  Synthetic
agggccagugaaccaaauagaa

SEQ ID NO: 27287 - RNA, 23 nt, Artificial Sequence
  Synthetic
aagggccagugaaccaaauagaa

SEQ ID NO: 27288 - RNA, 24 nt, Artificial Sequence
  Synthetic
aaagggccagugaaccaaauagaa

SEQ ID NO: 27289 - RNA, 21 nt, Artificial Sequence
  Synthetic
agggaugauuaugaaauagaa

SEQ ID NO: 27290 - RNA, 22 nt, Artificial Sequence
  Synthetic
uagggaugauuaugaaauagaa

SEQ ID NO: 27291 - RNA, 23 nt, Artificial Sequence
  Synthetic
uuagggaugauuaugaaauagaa

SEQ ID NO: 27292 - RNA, 24 nt, Artificial Sequence
  Synthetic
auuagggaugauuaugaaauagaa

SEQ ID NO: 27293 - RNA, 18 nt, Artificial Sequence
  Synthetic
acauagcaauaaauagaa

SEQ ID NO: 27294 - RNA, 20 nt, Artificial Sequence
  Synthetic
agacauagcaauaaauagaa

SEQ ID NO: 27295 - RNA, 22 nt, Artificial Sequence
  Synthetic
agagacauagcaauaaauagaa

SEQ ID NO: 27296 - RNA, 23 nt, Artificial Sequence
  Synthetic
aagagacauagcaauaaauagaa

SEQ ID NO: 27297 - RNA, 24 nt, Artificial Sequence
  Synthetic
uaagagacauagcaauaaauagaa

SEQ ID NO: 27298 - RNA, 21 nt, Artificial Sequence
  Synthetic
uguacacauagaccaauagaa

SEQ ID NO: 27299 - RNA, 22 nt, Artificial Sequence
  Synthetic
auguacacauagaccaauagaa

SEQ ID NO: 27300 - RNA, 23 nt, Artificial Sequence
  Synthetic
cauguacacauagaccaauagaa

SEQ ID NO: 27301 - RNA, 24 nt, Artificial Sequence
  Synthetic
ucauguacacauagaccaauagaa

SEQ ID NO: 27302 - RNA, 21 nt, Artificial Sequence
  Synthetic
uauguucauaaaauaauagaa

SEQ ID NO: 27303 - RNA, 22 nt, Artificial Sequence
  Synthetic
cuauguucauaaaauaauagaa

SEQ ID NO: 27304 - RNA, 23 nt, Artificial Sequence
  Synthetic
acuauguucauaaaauaauagaa

SEQ ID NO: 27305 - RNA, 18 nt, Artificial Sequence
  Synthetic
uuuuaauuugucauagaa

SEQ ID NO: 27306 - RNA, 19 nt, Artificial Sequence
  Synthetic
auuuuaauuugucauagaa

SEQ ID NO: 27307 - RNA, 20 nt, Artificial Sequence
  Synthetic
cauuuuaauuugucauagaa

SEQ ID NO: 27308 - RNA, 21 nt, Artificial Sequence
  Synthetic
ccauuuuaauuugucauagaa

SEQ ID NO: 27309 - RNA, 22 nt, Artificial Sequence
  Synthetic
cccauuuuaauuugucauagaa

SEQ ID NO: 27310 - RNA, 23 nt, Artificial Sequence
  Synthetic
ucccauuuuaauuugucauagaa

SEQ ID NO: 27311 - RNA, 24 nt, Artificial Sequence
  Synthetic
aucccauuuuaauuugucauagaa

SEQ ID NO: 27312 - RNA, 18 nt, Artificial Sequence
  Synthetic
cauauuuuuaagauagaa

SEQ ID NO: 27313 - RNA, 19 nt, Artificial Sequence
  Synthetic
ccauauuuuuaagauagaa

SEQ ID NO: 27314 - RNA, 20 nt, Artificial Sequence
  Synthetic
uccauauuuuuaagauagaa

SEQ ID NO: 27315 - RNA, 21 nt, Artificial Sequence
  Synthetic
auccauauuuuuaagauagaa

SEQ ID NO: 27316 - RNA, 22 nt, Artificial Sequence
  Synthetic
aauccauauuuuuaagauagaa

SEQ ID NO: 27317 - RNA, 23 nt, Artificial Sequence
  Synthetic
caauccauauuuuuaagauagaa

SEQ ID NO: 27318 - RNA, 24 nt, Artificial Sequence
  Synthetic
ucaauccauauuuuuaagauagaa

SEQ ID NO: 27319 - RNA, 19 nt, Artificial Sequence
  Synthetic
agauuuucaacagauagaa

SEQ ID NO: 27320 - RNA, 20 nt, Artificial Sequence
  Synthetic
aagauuuucaacagauagaa

SEQ ID NO: 27321 - RNA, 21 nt, Artificial Sequence
  Synthetic
uaagauuuucaacagauagaa

SEQ ID NO: 27322 - RNA, 22 nt, Artificial Sequence
  Synthetic
auaagauuuucaacagauagaa

SEQ ID NO: 27323 - RNA, 23 nt, Artificial Sequence
  Synthetic
aauaagauuuucaacagauagaa

SEQ ID NO: 27324 - RNA, 18 nt, Artificial Sequence
  Synthetic
acaccuaaaaugauagaa

SEQ ID NO: 27325 - RNA, 19 nt, Artificial Sequence
  Synthetic
aacaccuaaaaugauagaa

SEQ ID NO: 27326 - RNA, 20 nt, Artificial Sequence
  Synthetic
aaacaccuaaaaugauagaa

SEQ ID NO: 27327 - RNA, 22 nt, Artificial Sequence
  Synthetic
ugaaacaccuaaaaugauagaa

SEQ ID NO: 27328 - RNA, 23 nt, Artificial Sequence
  Synthetic
augaaacaccuaaaaugauagaa

SEQ ID NO: 27329 - RNA, 18 nt, Artificial Sequence
  Synthetic
caggagcugagccuagaa

SEQ ID NO: 27330 - RNA, 19 nt, Artificial Sequence
  Synthetic
ccaggagcugagccuagaa

SEQ ID NO: 27331 - RNA, 20 nt, Artificial Sequence
  Synthetic
uccaggagcugagccuagaa

SEQ ID NO: 27332 - RNA, 22 nt, Artificial Sequence
  Synthetic
uguccaggagcugagccuagaa

SEQ ID NO: 27333 - RNA, 23 nt, Artificial Sequence
  Synthetic
uuguccaggagcugagccuagaa

SEQ ID NO: 27334 - RNA, 18 nt, Artificial Sequence
  Synthetic
auacauugauggcuagaa

SEQ ID NO: 27335 - RNA, 19 nt, Artificial Sequence
  Synthetic
aauacauugauggcuagaa

SEQ ID NO: 27336 - RNA, 20 nt, Artificial Sequence
  Synthetic
caauacauugauggcuagaa

SEQ ID NO: 27337 - RNA, 21 nt, Artificial Sequence
  Synthetic
acaauacauugauggcuagaa

SEQ ID NO: 27338 - RNA, 22 nt, Artificial Sequence
  Synthetic
aacaauacauugauggcuagaa

SEQ ID NO: 27339 - RNA, 23 nt, Artificial Sequence
  Synthetic
uaacaauacauugauggcuagaa

SEQ ID NO: 27340 - RNA, 24 nt, Artificial Sequence
  Synthetic
cuaacaauacauugauggcuagaa

SEQ ID NO: 27341 - RNA, 18 nt, Artificial Sequence
  Synthetic
uaggccagaugucuagaa

SEQ ID NO: 27342 - RNA, 19 nt, Artificial Sequence
  Synthetic
auaggccagaugucuagaa

SEQ ID NO: 27343 - RNA, 20 nt, Artificial Sequence
  Synthetic
uauaggccagaugucuagaa

SEQ ID NO: 27344 - RNA, 21 nt, Artificial Sequence
  Synthetic
auauaggccagaugucuagaa

SEQ ID NO: 27345 - RNA, 22 nt, Artificial Sequence
  Synthetic
cauauaggccagaugucuagaa

SEQ ID NO: 27346 - RNA, 24 nt, Artificial Sequence
  Synthetic
ugcauauaggccagaugucuagaa

SEQ ID NO: 27347 - RNA, 18 nt, Artificial Sequence
  Synthetic
aacugggagaaaguagaa

SEQ ID NO: 27348 - RNA, 19 nt, Artificial Sequence
  Synthetic
caacugggagaaaguagaa

SEQ ID NO: 27349 - RNA, 20 nt, Artificial Sequence
  Synthetic
ucaacugggagaaaguagaa

SEQ ID NO: 27350 - RNA, 21 nt, Artificial Sequence
  Synthetic
aucaacugggagaaaguagaa

SEQ ID NO: 27351 - RNA, 18 nt, Artificial Sequence
  Synthetic
aaacuuggaccaguagaa

SEQ ID NO: 27352 - RNA, 20 nt, Artificial Sequence
  Synthetic
agaaacuuggaccaguagaa

SEQ ID NO: 27353 - RNA, 18 nt, Artificial Sequence
  Synthetic
uuuuuucuaggaguagaa

SEQ ID NO: 27354 - RNA, 19 nt, Artificial Sequence
  Synthetic
auuuuuucuaggaguagaa

SEQ ID NO: 27355 - RNA, 21 nt, Artificial Sequence
  Synthetic
agauuuuuucuaggaguagaa

SEQ ID NO: 27356 - RNA, 22 nt, Artificial Sequence
  Synthetic
uagauuuuuucuaggaguagaa

SEQ ID NO: 27357 - RNA, 24 nt, Artificial Sequence
  Synthetic
aguagauuuuuucuaggaguagaa

SEQ ID NO: 27358 - RNA, 18 nt, Artificial Sequence
  Synthetic
cagcaugaaaucguagaa

SEQ ID NO: 27359 - RNA, 19 nt, Artificial Sequence
  Synthetic
acagcaugaaaucguagaa

SEQ ID NO: 27360 - RNA, 20 nt, Artificial Sequence
  Synthetic
uacagcaugaaaucguagaa

SEQ ID NO: 27361 - RNA, 21 nt, Artificial Sequence
  Synthetic
cuacagcaugaaaucguagaa

SEQ ID NO: 27362 - RNA, 22 nt, Artificial Sequence
  Synthetic
ccuacagcaugaaaucguagaa

SEQ ID NO: 27363 - RNA, 24 nt, Artificial Sequence
  Synthetic
ugccuacagcaugaaaucguagaa

SEQ ID NO: 27364 - RNA, 18 nt, Artificial Sequence
  Synthetic
aucacuacuagauuagaa

SEQ ID NO: 27365 - RNA, 19 nt, Artificial Sequence
  Synthetic
aaucacuacuagauuagaa

SEQ ID NO: 27366 - RNA, 20 nt, Artificial Sequence
  Synthetic
uaaucacuacuagauuagaa

SEQ ID NO: 27367 - RNA, 21 nt, Artificial Sequence
  Synthetic
uuaaucacuacuagauuagaa

SEQ ID NO: 27368 - RNA, 22 nt, Artificial Sequence
  Synthetic
auuaaucacuacuagauuagaa

SEQ ID NO: 27369 - RNA, 23 nt, Artificial Sequence
  Synthetic
cauuaaucacuacuagauuagaa

SEQ ID NO: 27370 - RNA, 24 nt, Artificial Sequence
  Synthetic
acauuaaucacuacuagauuagaa

SEQ ID NO: 27371 - RNA, 18 nt, Artificial Sequence
  Synthetic
aaguuaacacgcuuagaa

SEQ ID NO: 27372 - RNA, 19 nt, Artificial Sequence
  Synthetic
uaaguuaacacgcuuagaa

SEQ ID NO: 27373 - RNA, 20 nt, Artificial Sequence
  Synthetic
cuaaguuaacacgcuuagaa

SEQ ID NO: 27374 - RNA, 22 nt, Artificial Sequence
  Synthetic
ugcuaaguuaacacgcuuagaa

SEQ ID NO: 27375 - RNA, 24 nt, Artificial Sequence
  Synthetic
ugugcuaaguuaacacgcuuagaa

SEQ ID NO: 27376 - RNA, 18 nt, Artificial Sequence
  Synthetic
cgcaagcagauguuagaa

SEQ ID NO: 27377 - RNA, 19 nt, Artificial Sequence
  Synthetic
acgcaagcagauguuagaa

SEQ ID NO: 27378 - RNA, 20 nt, Artificial Sequence
  Synthetic
aacgcaagcagauguuagaa

SEQ ID NO: 27379 - RNA, 21 nt, Artificial Sequence
  Synthetic
caacgcaagcagauguuagaa

SEQ ID NO: 27380 - RNA, 23 nt, Artificial Sequence
  Synthetic
ugcaacgcaagcagauguuagaa

SEQ ID NO: 27381 - RNA, 18 nt, Artificial Sequence
  Synthetic
cacugaggccauuuagaa

SEQ ID NO: 27382 - RNA, 19 nt, Artificial Sequence
  Synthetic
acacugaggccauuuagaa

SEQ ID NO: 27383 - RNA, 20 nt, Artificial Sequence
  Synthetic
cacacugaggccauuuagaa

SEQ ID NO: 27384 - RNA, 22 nt, Artificial Sequence
  Synthetic
agcacacugaggccauuuagaa

SEQ ID NO: 27385 - RNA, 24 nt, Artificial Sequence
  Synthetic
agagcacacugaggccauuuagaa

SEQ ID NO: 27386 - RNA, 18 nt, Artificial Sequence
  Synthetic
cucuuagauccuuuagaa

SEQ ID NO: 27387 - RNA, 19 nt, Artificial Sequence
  Synthetic
ucucuuagauccuuuagaa

SEQ ID NO: 27388 - RNA, 20 nt, Artificial Sequence
  Synthetic
uucucuuagauccuuuagaa

SEQ ID NO: 27389 - RNA, 21 nt, Artificial Sequence
  Synthetic
uuucucuuagauccuuuagaa

SEQ ID NO: 27390 - RNA, 23 nt, Artificial Sequence
  Synthetic
aguuucucuuagauccuuuagaa

SEQ ID NO: 27391 - RNA, 24 nt, Artificial Sequence
  Synthetic
aaguuucucuuagauccuuuagaa

SEQ ID NO: 27392 - RNA, 18 nt, Artificial Sequence
  Synthetic
uacucugugguuuuagaa

SEQ ID NO: 27393 - RNA, 19 nt, Artificial Sequence
  Synthetic
cuacucugugguuuuagaa

SEQ ID NO: 27394 - RNA, 20 nt, Artificial Sequence
  Synthetic
ucuacucugugguuuuagaa

SEQ ID NO: 27395 - RNA, 21 nt, Artificial Sequence
  Synthetic
aucuacucugugguuuuagaa

SEQ ID NO: 27396 - RNA, 22 nt, Artificial Sequence
  Synthetic
caucuacucugugguuuuagaa

SEQ ID NO: 27397 - RNA, 23 nt, Artificial Sequence
  Synthetic
ccaucuacucugugguuuuagaa

SEQ ID NO: 27398 - RNA, 24 nt, Artificial Sequence
  Synthetic
uccaucuacucugugguuuuagaa

SEQ ID NO: 27399 - RNA, 18 nt, Artificial Sequence
  Synthetic
aagccacggagaaacgaa

SEQ ID NO: 27400 - RNA, 20 nt, Artificial Sequence
  Synthetic
agaagccacggagaaacgaa

SEQ ID NO: 27401 - RNA, 24 nt, Artificial Sequence
  Synthetic
ugggagaagccacggagaaacgaa

SEQ ID NO: 27402 - RNA, 18 nt, Artificial Sequence
  Synthetic
ugcugugcuuuauacgaa

SEQ ID NO: 27403 - RNA, 20 nt, Artificial Sequence
  Synthetic
ugugcugugcuuuauacgaa

SEQ ID NO: 27404 - RNA, 21 nt, Artificial Sequence
  Synthetic
uugugcugugcuuuauacgaa

SEQ ID NO: 27405 - RNA, 22 nt, Artificial Sequence
  Synthetic
uuugugcugugcuuuauacgaa

SEQ ID NO: 27406 - RNA, 23 nt, Artificial Sequence
  Synthetic
auuugugcugugcuuuauacgaa

SEQ ID NO: 27407 - RNA, 18 nt, Artificial Sequence
  Synthetic
auaacuuguaaaaaggaa

SEQ ID NO: 27408 - RNA, 20 nt, Artificial Sequence
  Synthetic
agauaacuuguaaaaaggaa

SEQ ID NO: 27409 - RNA, 21 nt, Artificial Sequence
  Synthetic
uagauaacuuguaaaaaggaa

SEQ ID NO: 27410 - RNA, 23 nt, Artificial Sequence
  Synthetic
uguagauaacuuguaaaaaggaa

SEQ ID NO: 27411 - RNA, 24 nt, Artificial Sequence
  Synthetic
uuguagauaacuuguaaaaaggaa

SEQ ID NO: 27412 - RNA, 22 nt, Artificial Sequence
  Synthetic
uguuccugcagcuacaaaggaa

SEQ ID NO: 27413 - RNA, 24 nt, Artificial Sequence
  Synthetic
aguguuccugcagcuacaaaggaa

SEQ ID NO: 27414 - RNA, 18 nt, Artificial Sequence
  Synthetic
cagaugaaggcaaaggaa

SEQ ID NO: 27415 - RNA, 19 nt, Artificial Sequence
  Synthetic
ucagaugaaggcaaaggaa

SEQ ID NO: 27416 - RNA, 20 nt, Artificial Sequence
  Synthetic
uucagaugaaggcaaaggaa

SEQ ID NO: 27417 - RNA, 21 nt, Artificial Sequence
  Synthetic
auucagaugaaggcaaaggaa

SEQ ID NO: 27418 - RNA, 22 nt, Artificial Sequence
  Synthetic
cauucagaugaaggcaaaggaa

SEQ ID NO: 27419 - RNA, 23 nt, Artificial Sequence
  Synthetic
ccauucagaugaaggcaaaggaa

SEQ ID NO: 27420 - RNA, 24 nt, Artificial Sequence
  Synthetic
uccauucagaugaaggcaaaggaa

SEQ ID NO: 27421 - RNA, 21 nt, Artificial Sequence
  Synthetic
ucacaggcaagggacaaggaa

SEQ ID NO: 27422 - RNA, 22 nt, Artificial Sequence
  Synthetic
aucacaggcaagggacaaggaa

SEQ ID NO: 27423 - RNA, 23 nt, Artificial Sequence
  Synthetic
aaucacaggcaagggacaaggaa

SEQ ID NO: 27424 - RNA, 24 nt, Artificial Sequence
  Synthetic
uaaucacaggcaagggacaaggaa

SEQ ID NO: 27425 - RNA, 19 nt, Artificial Sequence
  Synthetic
ugugagcauuaauaaggaa

SEQ ID NO: 27426 - RNA, 20 nt, Artificial Sequence
  Synthetic
cugugagcauuaauaaggaa

SEQ ID NO: 27427 - RNA, 21 nt, Artificial Sequence
  Synthetic
ucugugagcauuaauaaggaa

SEQ ID NO: 27428 - RNA, 22 nt, Artificial Sequence
  Synthetic
uucugugagcauuaauaaggaa

SEQ ID NO: 27429 - RNA, 23 nt, Artificial Sequence
  Synthetic
cuucugugagcauuaauaaggaa

SEQ ID NO: 27430 - RNA, 18 nt, Artificial Sequence
  Synthetic
acuugcccauauaaggaa

SEQ ID NO: 27431 - RNA, 19 nt, Artificial Sequence
  Synthetic
aacuugcccauauaaggaa

SEQ ID NO: 27432 - RNA, 20 nt, Artificial Sequence
  Synthetic
uaacuugcccauauaaggaa

SEQ ID NO: 27433 - RNA, 21 nt, Artificial Sequence
  Synthetic
cuaacuugcccauauaaggaa

SEQ ID NO: 27434 - RNA, 22 nt, Artificial Sequence
  Synthetic
ccuaacuugcccauauaaggaa

SEQ ID NO: 27435 - RNA, 23 nt, Artificial Sequence
  Synthetic
accuaacuugcccauauaaggaa

SEQ ID NO: 27436 - RNA, 24 nt, Artificial Sequence
  Synthetic
aaccuaacuugcccauauaaggaa

SEQ ID NO: 27437 - RNA, 18 nt, Artificial Sequence
  Synthetic
aagaaauuguaccaggaa

SEQ ID NO: 27438 - RNA, 19 nt, Artificial Sequence
  Synthetic
aaagaaauuguaccaggaa

SEQ ID NO: 27439 - RNA, 20 nt, Artificial Sequence
  Synthetic
aaaagaaauuguaccaggaa

SEQ ID NO: 27440 - RNA, 19 nt, Artificial Sequence
  Synthetic
ugacuucggcugccaggaa

SEQ ID NO: 27441 - RNA, 20 nt, Artificial Sequence
  Synthetic
uugacuucggcugccaggaa

SEQ ID NO: 27442 - RNA, 21 nt, Artificial Sequence
  Synthetic
auugacuucggcugccaggaa

SEQ ID NO: 27443 - RNA, 23 nt, Artificial Sequence
  Synthetic
agauugacuucggcugccaggaa

SEQ ID NO: 27444 - RNA, 24 nt, Artificial Sequence
  Synthetic
uagauugacuucggcugccaggaa

SEQ ID NO: 27445 - RNA, 18 nt, Artificial Sequence
  Synthetic
uuugcuaacacucaggaa

SEQ ID NO: 27446 - RNA, 19 nt, Artificial Sequence
  Synthetic
cuuugcuaacacucaggaa

SEQ ID NO: 27447 - RNA, 20 nt, Artificial Sequence
  Synthetic
acuuugcuaacacucaggaa

SEQ ID NO: 27448 - RNA, 21 nt, Artificial Sequence
  Synthetic
cacuuugcuaacacucaggaa

SEQ ID NO: 27449 - RNA, 22 nt, Artificial Sequence
  Synthetic
ucacuuugcuaacacucaggaa

SEQ ID NO: 27450 - RNA, 23 nt, Artificial Sequence
  Synthetic
aucacuuugcuaacacucaggaa

SEQ ID NO: 27451 - RNA, 24 nt, Artificial Sequence
  Synthetic
caucacuuugcuaacacucaggaa

SEQ ID NO: 27452 - RNA, 18 nt, Artificial Sequence
  Synthetic
acagccaagagucaggaa

SEQ ID NO: 27453 - RNA, 19 nt, Artificial Sequence
  Synthetic
cacagccaagagucaggaa

SEQ ID NO: 27454 - RNA, 20 nt, Artificial Sequence
  Synthetic
acacagccaagagucaggaa

SEQ ID NO: 27455 - RNA, 21 nt, Artificial Sequence
  Synthetic
aacacagccaagagucaggaa

SEQ ID NO: 27456 - RNA, 22 nt, Artificial Sequence
  Synthetic
caacacagccaagagucaggaa

SEQ ID NO: 27457 - RNA, 24 nt, Artificial Sequence
  Synthetic
ugcaacacagccaagagucaggaa

SEQ ID NO: 27458 - RNA, 18 nt, Artificial Sequence
  Synthetic
cucuuaauagaagaggaa

SEQ ID NO: 27459 - RNA, 19 nt, Artificial Sequence
  Synthetic
ccucuuaauagaagaggaa

SEQ ID NO: 27460 - RNA, 20 nt, Artificial Sequence
  Synthetic
accucuuaauagaagaggaa

SEQ ID NO: 27461 - RNA, 21 nt, Artificial Sequence
  Synthetic
uaccucuuaauagaagaggaa

SEQ ID NO: 27462 - RNA, 22 nt, Artificial Sequence
  Synthetic
uuaccucuuaauagaagaggaa

SEQ ID NO: 27463 - RNA, 24 nt, Artificial Sequence
  Synthetic
uguuaccucuuaauagaagaggaa

SEQ ID NO: 27464 - RNA, 19 nt, Artificial Sequence
  Synthetic
agccauauuaagagaggaa

SEQ ID NO: 27465 - RNA, 20 nt, Artificial Sequence
  Synthetic
cagccauauuaagagaggaa

SEQ ID NO: 27466 - RNA, 24 nt, Artificial Sequence
  Synthetic
agggcagccauauuaagagaggaa

SEQ ID NO: 27467 - RNA, 18 nt, Artificial Sequence
  Synthetic
ugcauaaggggagaggaa

SEQ ID NO: 27468 - RNA, 19 nt, Artificial Sequence
  Synthetic
augcauaaggggagaggaa

SEQ ID NO: 27469 - RNA, 20 nt, Artificial Sequence
  Synthetic
aaugcauaaggggagaggaa

SEQ ID NO: 27470 - RNA, 21 nt, Artificial Sequence
  Synthetic
aaaugcauaaggggagaggaa

SEQ ID NO: 27471 - RNA, 22 nt, Artificial Sequence
  Synthetic
uaaaugcauaaggggagaggaa

SEQ ID NO: 27472 - RNA, 23 nt, Artificial Sequence
  Synthetic
uuaaaugcauaaggggagaggaa

SEQ ID NO: 27473 - RNA, 18 nt, Artificial Sequence
  Synthetic
auuauguaccuagaggaa

SEQ ID NO: 27474 - RNA, 20 nt, Artificial Sequence
  Synthetic
cgauuauguaccuagaggaa

SEQ ID NO: 27475 - RNA, 21 nt, Artificial Sequence
  Synthetic
ccgauuauguaccuagaggaa

SEQ ID NO: 27476 - RNA, 22 nt, Artificial Sequence
  Synthetic
accgauuauguaccuagaggaa

SEQ ID NO: 27477 - RNA, 23 nt, Artificial Sequence
  Synthetic
uaccgauuauguaccuagaggaa

SEQ ID NO: 27478 - RNA, 24 nt, Artificial Sequence
  Synthetic
cuaccgauuauguaccuagaggaa

SEQ ID NO: 27479 - RNA, 18 nt, Artificial Sequence
  Synthetic
uuacagaagcccgaggaa

SEQ ID NO: 27480 - RNA, 19 nt, Artificial Sequence
  Synthetic
auuacagaagcccgaggaa

SEQ ID NO: 27481 - RNA, 20 nt, Artificial Sequence
  Synthetic
aauuacagaagcccgaggaa

SEQ ID NO: 27482 - RNA, 21 nt, Artificial Sequence
  Synthetic
uaauuacagaagcccgaggaa

SEQ ID NO: 27483 - RNA, 22 nt, Artificial Sequence
  Synthetic
uuaauuacagaagcccgaggaa

SEQ ID NO: 27484 - RNA, 23 nt, Artificial Sequence
  Synthetic
cuuaauuacagaagcccgaggaa

SEQ ID NO: 27485 - RNA, 24 nt, Artificial Sequence
  Synthetic
acuuaauuacagaagcccgaggaa

SEQ ID NO: 27486 - RNA, 18 nt, Artificial Sequence
  Synthetic
uggaaugauaaggaggaa

SEQ ID NO: 27487 - RNA, 19 nt, Artificial Sequence
  Synthetic
auggaaugauaaggaggaa

SEQ ID NO: 27488 - RNA, 20 nt, Artificial Sequence
  Synthetic
cauggaaugauaaggaggaa

SEQ ID NO: 27489 - RNA, 21 nt, Artificial Sequence
  Synthetic
acauggaaugauaaggaggaa

SEQ ID NO: 27490 - RNA, 23 nt, Artificial Sequence
  Synthetic
ugacauggaaugauaaggaggaa

SEQ ID NO: 27491 - RNA, 24 nt, Artificial Sequence
  Synthetic
uugacauggaaugauaaggaggaa

SEQ ID NO: 27492 - RNA, 18 nt, Artificial Sequence
  Synthetic
cccuuagaaacauaggaa

SEQ ID NO: 27493 - RNA, 20 nt, Artificial Sequence
  Synthetic
agcccuuagaaacauaggaa

SEQ ID NO: 27494 - RNA, 21 nt, Artificial Sequence
  Synthetic
aagcccuuagaaacauaggaa

SEQ ID NO: 27495 - RNA, 22 nt, Artificial Sequence
  Synthetic
aaagcccuuagaaacauaggaa

SEQ ID NO: 27496 - RNA, 24 nt, Artificial Sequence
  Synthetic
agaaagcccuuagaaacauaggaa

SEQ ID NO: 27497 - RNA, 18 nt, Artificial Sequence
  Synthetic
uacugaguggaguaggaa

SEQ ID NO: 27498 - RNA, 19 nt, Artificial Sequence
  Synthetic
auacugaguggaguaggaa

SEQ ID NO: 27499 - RNA, 20 nt, Artificial Sequence
  Synthetic
aauacugaguggaguaggaa

SEQ ID NO: 27500 - RNA, 21 nt, Artificial Sequence
  Synthetic
caauacugaguggaguaggaa

SEQ ID NO: 27501 - RNA, 22 nt, Artificial Sequence
  Synthetic
ucaauacugaguggaguaggaa

SEQ ID NO: 27502 - RNA, 23 nt, Artificial Sequence
  Synthetic
cucaauacugaguggaguaggaa

SEQ ID NO: 27503 - RNA, 24 nt, Artificial Sequence
  Synthetic
ucucaauacugaguggaguaggaa

SEQ ID NO: 27504 - RNA, 18 nt, Artificial Sequence
  Synthetic
cuauaagguaauuaggaa

SEQ ID NO: 27505 - RNA, 19 nt, Artificial Sequence
  Synthetic
ucuauaagguaauuaggaa

SEQ ID NO: 27506 - RNA, 20 nt, Artificial Sequence
  Synthetic
aucuauaagguaauuaggaa

SEQ ID NO: 27507 - RNA, 21 nt, Artificial Sequence
  Synthetic
uaucuauaagguaauuaggaa

SEQ ID NO: 27508 - RNA, 24 nt, Artificial Sequence
  Synthetic
agguaucuauaagguaauuaggaa

SEQ ID NO: 27509 - RNA, 18 nt, Artificial Sequence
  Synthetic
aauuaacacauaagggaa

SEQ ID NO: 27510 - RNA, 19 nt, Artificial Sequence
  Synthetic
aaauuaacacauaagggaa

SEQ ID NO: 27511 - RNA, 20 nt, Artificial Sequence
  Synthetic
uaaauuaacacauaagggaa

SEQ ID NO: 27512 - RNA, 21 nt, Artificial Sequence
  Synthetic
cuaaauuaacacauaagggaa

SEQ ID NO: 27513 - RNA, 22 nt, Artificial Sequence
  Synthetic
acuaaauuaacacauaagggaa

SEQ ID NO: 27514 - RNA, 23 nt, Artificial Sequence
  Synthetic
uacuaaauuaacacauaagggaa

SEQ ID NO: 27515 - RNA, 24 nt, Artificial Sequence
  Synthetic
auacuaaauuaacacauaagggaa

SEQ ID NO: 27516 - RNA, 18 nt, Artificial Sequence
  Synthetic
uuuggugauuccagggaa

SEQ ID NO: 27517 - RNA, 21 nt, Artificial Sequence
  Synthetic
agguuuggugauuccagggaa

SEQ ID NO: 27518 - RNA, 22 nt, Artificial Sequence
  Synthetic
cagguuuggugauuccagggaa

SEQ ID NO: 27519 - RNA, 23 nt, Artificial Sequence
  Synthetic
acagguuuggugauuccagggaa

SEQ ID NO: 27520 - RNA, 24 nt, Artificial Sequence
  Synthetic
uacagguuuggugauuccagggaa

SEQ ID NO: 27521 - RNA, 18 nt, Artificial Sequence
  Synthetic
auaagcagcaagagggaa

SEQ ID NO: 27522 - RNA, 19 nt, Artificial Sequence
  Synthetic
uauaagcagcaagagggaa

SEQ ID NO: 27523 - RNA, 20 nt, Artificial Sequence
  Synthetic
uuauaagcagcaagagggaa

SEQ ID NO: 27524 - RNA, 21 nt, Artificial Sequence
  Synthetic
auuauaagcagcaagagggaa

SEQ ID NO: 27525 - RNA, 22 nt, Artificial Sequence
  Synthetic
uauuauaagcagcaagagggaa

SEQ ID NO: 27526 - RNA, 24 nt, Artificial Sequence
  Synthetic
uguauuauaagcagcaagagggaa

SEQ ID NO: 27527 - RNA, 22 nt, Artificial Sequence
  Synthetic
agacacuggagcuuggagggaa

SEQ ID NO: 27528 - RNA, 23 nt, Artificial Sequence
  Synthetic
aagacacuggagcuuggagggaa

SEQ ID NO: 27529 - RNA, 21 nt, Artificial Sequence
  Synthetic
ugagaggguggaaugagggaa

SEQ ID NO: 27530 - RNA, 22 nt, Artificial Sequence
  Synthetic
uugagaggguggaaugagggaa

SEQ ID NO: 27531 - RNA, 23 nt, Artificial Sequence
  Synthetic
cuugagaggguggaaugagggaa

SEQ ID NO: 27532 - RNA, 24 nt, Artificial Sequence
  Synthetic
ccuugagaggguggaaugagggaa

SEQ ID NO: 27533 - RNA, 19 nt, Artificial Sequence
  Synthetic
uggguauugagaaggggaa

SEQ ID NO: 27534 - RNA, 21 nt, Artificial Sequence
  Synthetic
aguggguauugagaaggggaa

SEQ ID NO: 27535 - RNA, 23 nt, Artificial Sequence
  Synthetic
agaguggguauugagaaggggaa

SEQ ID NO: 27536 - RNA, 24 nt, Artificial Sequence
  Synthetic
uagaguggguauugagaaggggaa

SEQ ID NO: 27537 - RNA, 21 nt, Artificial Sequence
  Synthetic
ugaagcugaggguugggggaa

SEQ ID NO: 27538 - RNA, 22 nt, Artificial Sequence
  Synthetic
uugaagcugaggguugggggaa

SEQ ID NO: 27539 - RNA, 23 nt, Artificial Sequence
  Synthetic
uuugaagcugaggguugggggaa

SEQ ID NO: 27540 - RNA, 18 nt, Artificial Sequence
  Synthetic
acaugauuagauggggaa

SEQ ID NO: 27541 - RNA, 20 nt, Artificial Sequence
  Synthetic
agacaugauuagauggggaa

SEQ ID NO: 27542 - RNA, 21 nt, Artificial Sequence
  Synthetic
aagacaugauuagauggggaa

SEQ ID NO: 27543 - RNA, 22 nt, Artificial Sequence
  Synthetic
aaagacaugauuagauggggaa

SEQ ID NO: 27544 - RNA, 21 nt, Artificial Sequence
  Synthetic
ugaaaagaaagguauggggaa

SEQ ID NO: 27545 - RNA, 24 nt, Artificial Sequence
  Synthetic
aggugaaaagaaagguauggggaa

SEQ ID NO: 27546 - RNA, 18 nt, Artificial Sequence
  Synthetic
aacaagaucccuggggaa

SEQ ID NO: 27547 - RNA, 20 nt, Artificial Sequence
  Synthetic
agaacaagaucccuggggaa

SEQ ID NO: 27548 - RNA, 21 nt, Artificial Sequence
  Synthetic
aagaacaagaucccuggggaa

SEQ ID NO: 27549 - RNA, 22 nt, Artificial Sequence
  Synthetic
caagaacaagaucccuggggaa

SEQ ID NO: 27550 - RNA, 18 nt, Artificial Sequence
  Synthetic
aauucaggagaaugggaa

SEQ ID NO: 27551 - RNA, 19 nt, Artificial Sequence
  Synthetic
uaauucaggagaaugggaa

SEQ ID NO: 27552 - RNA, 20 nt, Artificial Sequence
  Synthetic
uuaauucaggagaaugggaa

SEQ ID NO: 27553 - RNA, 21 nt, Artificial Sequence
  Synthetic
auuaauucaggagaaugggaa

SEQ ID NO: 27554 - RNA, 22 nt, Artificial Sequence
  Synthetic
uauuaauucaggagaaugggaa

SEQ ID NO: 27555 - RNA, 23 nt, Artificial Sequence
  Synthetic
cuauuaauucaggagaaugggaa

SEQ ID NO: 27556 - RNA, 24 nt, Artificial Sequence
  Synthetic
acuauuaauucaggagaaugggaa

SEQ ID NO: 27557 - RNA, 18 nt, Artificial Sequence
  Synthetic
uuucugugguaaugggaa

SEQ ID NO: 27558 - RNA, 19 nt, Artificial Sequence
  Synthetic
auuucugugguaaugggaa

SEQ ID NO: 27559 - RNA, 20 nt, Artificial Sequence
  Synthetic
aauuucugugguaaugggaa

SEQ ID NO: 27560 - RNA, 21 nt, Artificial Sequence
  Synthetic
uaauuucugugguaaugggaa

SEQ ID NO: 27561 - RNA, 22 nt, Artificial Sequence
  Synthetic
uuaauuucugugguaaugggaa

SEQ ID NO: 27562 - RNA, 23 nt, Artificial Sequence
  Synthetic
uuuaauuucugugguaaugggaa

SEQ ID NO: 27563 - RNA, 24 nt, Artificial Sequence
  Synthetic
uuuuaauuucugugguaaugggaa

SEQ ID NO: 27564 - RNA, 18 nt, Artificial Sequence
  Synthetic
uguauugguccaugggaa

SEQ ID NO: 27565 - RNA, 19 nt, Artificial Sequence
  Synthetic
auguauugguccaugggaa

SEQ ID NO: 27566 - RNA, 20 nt, Artificial Sequence
  Synthetic
uauguauugguccaugggaa

SEQ ID NO: 27567 - RNA, 21 nt, Artificial Sequence
  Synthetic
auauguauugguccaugggaa

SEQ ID NO: 27568 - RNA, 22 nt, Artificial Sequence
  Synthetic
aauauguauugguccaugggaa

SEQ ID NO: 27569 - RNA, 23 nt, Artificial Sequence
  Synthetic
aaauauguauugguccaugggaa

SEQ ID NO: 27570 - RNA, 24 nt, Artificial Sequence
  Synthetic
caaauauguauugguccaugggaa

SEQ ID NO: 27571 - RNA, 21 nt, Artificial Sequence
  Synthetic
caaaaaaauaagcauugggaa

SEQ ID NO: 27572 - RNA, 22 nt, Artificial Sequence
  Synthetic
acaaaaaaauaagcauugggaa

SEQ ID NO: 27573 - RNA, 23 nt, Artificial Sequence
  Synthetic
aacaaaaaaauaagcauugggaa

SEQ ID NO: 27574 - RNA, 24 nt, Artificial Sequence
  Synthetic
caacaaaaaaauaagcauugggaa

SEQ ID NO: 27575 - RNA, 18 nt, Artificial Sequence
  Synthetic
uuuuuggaagaaauggaa

SEQ ID NO: 27576 - RNA, 19 nt, Artificial Sequence
  Synthetic
cuuuuuggaagaaauggaa

SEQ ID NO: 27577 - RNA, 20 nt, Artificial Sequence
  Synthetic
acuuuuuggaagaaauggaa

SEQ ID NO: 27578 - RNA, 21 nt, Artificial Sequence
  Synthetic
uacuuuuuggaagaaauggaa

SEQ ID NO: 27579 - RNA, 22 nt, Artificial Sequence
  Synthetic
uuacuuuuuggaagaaauggaa

SEQ ID NO: 27580 - RNA, 23 nt, Artificial Sequence
  Synthetic
cuuacuuuuuggaagaaauggaa

SEQ ID NO: 27581 - RNA, 24 nt, Artificial Sequence
  Synthetic
ccuuacuuuuuggaagaaauggaa

SEQ ID NO: 27582 - RNA, 18 nt, Artificial Sequence
  Synthetic
uuuuuagauguaauggaa

SEQ ID NO: 27583 - RNA, 19 nt, Artificial Sequence
  Synthetic
cuuuuuagauguaauggaa

SEQ ID NO: 27584 - RNA, 20 nt, Artificial Sequence
  Synthetic
acuuuuuagauguaauggaa

SEQ ID NO: 27585 - RNA, 21 nt, Artificial Sequence
  Synthetic
uacuuuuuagauguaauggaa

SEQ ID NO: 27586 - RNA, 22 nt, Artificial Sequence
  Synthetic
auacuuuuuagauguaauggaa

SEQ ID NO: 27587 - RNA, 23 nt, Artificial Sequence
  Synthetic
cauacuuuuuagauguaauggaa

SEQ ID NO: 27588 - RNA, 18 nt, Artificial Sequence
  Synthetic
augaauaggaacauggaa

SEQ ID NO: 27589 - RNA, 19 nt, Artificial Sequence
  Synthetic
aaugaauaggaacauggaa

SEQ ID NO: 27590 - RNA, 21 nt, Artificial Sequence
  Synthetic
ugaaugaauaggaacauggaa

SEQ ID NO: 27591 - RNA, 22 nt, Artificial Sequence
  Synthetic
augaaugaauaggaacauggaa

SEQ ID NO: 27592 - RNA, 23 nt, Artificial Sequence
  Synthetic
aaugaaugaauaggaacauggaa

SEQ ID NO: 27593 - RNA, 24 nt, Artificial Sequence
  Synthetic
aaaugaaugaauaggaacauggaa

SEQ ID NO: 27594 - RNA, 22 nt, Artificial Sequence
  Synthetic
ugcagauaauugaaucauggaa

SEQ ID NO: 27595 - RNA, 18 nt, Artificial Sequence
  Synthetic
accuaaaguauuauggaa

SEQ ID NO: 27596 - RNA, 19 nt, Artificial Sequence
  Synthetic
caccuaaaguauuauggaa

SEQ ID NO: 27597 - RNA, 20 nt, Artificial Sequence
  Synthetic
ucaccuaaaguauuauggaa

SEQ ID NO: 27598 - RNA, 21 nt, Artificial Sequence
  Synthetic
aucaccuaaaguauuauggaa

SEQ ID NO: 27599 - RNA, 22 nt, Artificial Sequence
  Synthetic
uaucaccuaaaguauuauggaa

SEQ ID NO: 27600 - RNA, 23 nt, Artificial Sequence
  Synthetic
auaucaccuaaaguauuauggaa

SEQ ID NO: 27601 - RNA, 24 nt, Artificial Sequence
  Synthetic
cauaucaccuaaaguauuauggaa

SEQ ID NO: 27602 - RNA, 18 nt, Artificial Sequence
  Synthetic
uuugcuaaccuuauggaa

SEQ ID NO: 27603 - RNA, 19 nt, Artificial Sequence
  Synthetic
auuugcuaaccuuauggaa

SEQ ID NO: 27604 - RNA, 20 nt, Artificial Sequence
  Synthetic
cauuugcuaaccuuauggaa

SEQ ID NO: 27605 - RNA, 21 nt, Artificial Sequence
  Synthetic
ccauuugcuaaccuuauggaa

SEQ ID NO: 27606 - RNA, 22 nt, Artificial Sequence
  Synthetic
cccauuugcuaaccuuauggaa

SEQ ID NO: 27607 - RNA, 23 nt, Artificial Sequence
  Synthetic
ucccauuugcuaaccuuauggaa

SEQ ID NO: 27608 - RNA, 24 nt, Artificial Sequence
  Synthetic
uucccauuugcuaaccuuauggaa

SEQ ID NO: 27609 - RNA, 19 nt, Artificial Sequence
  Synthetic
agguguacauagacuggaa

SEQ ID NO: 27610 - RNA, 20 nt, Artificial Sequence
  Synthetic
aagguguacauagacuggaa

SEQ ID NO: 27611 - RNA, 21 nt, Artificial Sequence
  Synthetic
caagguguacauagacuggaa

SEQ ID NO: 27612 - RNA, 22 nt, Artificial Sequence
  Synthetic
acaagguguacauagacuggaa

SEQ ID NO: 27613 - RNA, 23 nt, Artificial Sequence
  Synthetic
cacaagguguacauagacuggaa

SEQ ID NO: 27614 - RNA, 24 nt, Artificial Sequence
  Synthetic
ucacaagguguacauagacuggaa

SEQ ID NO: 27615 - RNA, 18 nt, Artificial Sequence
  Synthetic
ucuguaaguaaaguggaa

SEQ ID NO: 27616 - RNA, 19 nt, Artificial Sequence
  Synthetic
uucuguaaguaaaguggaa

SEQ ID NO: 27617 - RNA, 20 nt, Artificial Sequence
  Synthetic
uuucuguaaguaaaguggaa

SEQ ID NO: 27618 - RNA, 21 nt, Artificial Sequence
  Synthetic
cuuucuguaaguaaaguggaa

SEQ ID NO: 27619 - RNA, 22 nt, Artificial Sequence
  Synthetic
acuuucuguaaguaaaguggaa

SEQ ID NO: 27620 - RNA, 23 nt, Artificial Sequence
  Synthetic
cacuuucuguaaguaaaguggaa

SEQ ID NO: 27621 - RNA, 24 nt, Artificial Sequence
  Synthetic
ucacuuucuguaaguaaaguggaa

SEQ ID NO: 27622 - RNA, 20 nt, Artificial Sequence
  Synthetic
uggaauuuuccuugguggaa

SEQ ID NO: 27623 - RNA, 21 nt, Artificial Sequence
  Synthetic
uuggaauuuuccuugguggaa

SEQ ID NO: 27624 - RNA, 22 nt, Artificial Sequence
  Synthetic
uuuggaauuuuccuugguggaa

SEQ ID NO: 27625 - RNA, 23 nt, Artificial Sequence
  Synthetic
auuuggaauuuuccuugguggaa

SEQ ID NO: 27626 - RNA, 24 nt, Artificial Sequence
  Synthetic
cauuuggaauuuuccuugguggaa

SEQ ID NO: 27627 - RNA, 18 nt, Artificial Sequence
  Synthetic
agcaguagucucuuggaa

SEQ ID NO: 27628 - RNA, 20 nt, Artificial Sequence
  Synthetic
agagcaguagucucuuggaa

SEQ ID NO: 27629 - RNA, 22 nt, Artificial Sequence
  Synthetic
ugagagcaguagucucuuggaa

SEQ ID NO: 27630 - RNA, 23 nt, Artificial Sequence
  Synthetic
cugagagcaguagucucuuggaa

SEQ ID NO: 27631 - RNA, 18 nt, Artificial Sequence
  Synthetic
ucugggugaggguuggaa

SEQ ID NO: 27632 - RNA, 19 nt, Artificial Sequence
  Synthetic
cucugggugaggguuggaa

SEQ ID NO: 27633 - RNA, 20 nt, Artificial Sequence
  Synthetic
ccucugggugaggguuggaa

SEQ ID NO: 27634 - RNA, 21 nt, Artificial Sequence
  Synthetic
accucugggugaggguuggaa

SEQ ID NO: 27635 - RNA, 22 nt, Artificial Sequence
  Synthetic
uaccucugggugaggguuggaa

SEQ ID NO: 27636 - RNA, 23 nt, Artificial Sequence
  Synthetic
uuaccucugggugaggguuggaa

SEQ ID NO: 27637 - RNA, 20 nt, Artificial Sequence
  Synthetic
agggauaugagauguuggaa

SEQ ID NO: 27638 - RNA, 21 nt, Artificial Sequence
  Synthetic
cagggauaugagauguuggaa

SEQ ID NO: 27639 - RNA, 22 nt, Artificial Sequence
  Synthetic
acagggauaugagauguuggaa

SEQ ID NO: 27640 - RNA, 21 nt, Artificial Sequence
  Synthetic
uugaaauacaaaucaaaugaa

SEQ ID NO: 27641 - RNA, 23 nt, Artificial Sequence
  Synthetic
aguugaaauacaaaucaaaugaa

SEQ ID NO: 27642 - RNA, 18 nt, Artificial Sequence
  Synthetic
uaggaccucuccaaugaa

SEQ ID NO: 27643 - RNA, 19 nt, Artificial Sequence
  Synthetic
uuaggaccucuccaaugaa

SEQ ID NO: 27644 - RNA, 20 nt, Artificial Sequence
  Synthetic
cuuaggaccucuccaaugaa

SEQ ID NO: 27645 - RNA, 21 nt, Artificial Sequence
  Synthetic
ccuuaggaccucuccaaugaa

SEQ ID NO: 27646 - RNA, 22 nt, Artificial Sequence
  Synthetic
uccuuaggaccucuccaaugaa

SEQ ID NO: 27647 - RNA, 23 nt, Artificial Sequence
  Synthetic
uuccuuaggaccucuccaaugaa

SEQ ID NO: 27648 - RNA, 24 nt, Artificial Sequence
  Synthetic
uuuccuuaggaccucuccaaugaa

SEQ ID NO: 27649 - RNA, 19 nt, Artificial Sequence
  Synthetic
ugcaaaaaccuugaaugaa

SEQ ID NO: 27650 - RNA, 20 nt, Artificial Sequence
  Synthetic
augcaaaaaccuugaaugaa

SEQ ID NO: 27651 - RNA, 21 nt, Artificial Sequence
  Synthetic
caugcaaaaaccuugaaugaa

SEQ ID NO: 27652 - RNA, 22 nt, Artificial Sequence
  Synthetic
ccaugcaaaaaccuugaaugaa

SEQ ID NO: 27653 - RNA, 23 nt, Artificial Sequence
  Synthetic
accaugcaaaaaccuugaaugaa

SEQ ID NO: 27654 - RNA, 24 nt, Artificial Sequence
  Synthetic
aaccaugcaaaaaccuugaaugaa

SEQ ID NO: 27655 - RNA, 18 nt, Artificial Sequence
  Synthetic
ugcugacaacauaaugaa

SEQ ID NO: 27656 - RNA, 19 nt, Artificial Sequence
  Synthetic
uugcugacaacauaaugaa

SEQ ID NO: 27657 - RNA, 20 nt, Artificial Sequence
  Synthetic
auugcugacaacauaaugaa

SEQ ID NO: 27658 - RNA, 23 nt, Artificial Sequence
  Synthetic
uggauugcugacaacauaaugaa

SEQ ID NO: 27659 - RNA, 24 nt, Artificial Sequence
  Synthetic
auggauugcugacaacauaaugaa

SEQ ID NO: 27660 - RNA, 18 nt, Artificial Sequence
  Synthetic
acucgcauuucuaaugaa

SEQ ID NO: 27661 - RNA, 19 nt, Artificial Sequence
  Synthetic
cacucgcauuucuaaugaa

SEQ ID NO: 27662 - RNA, 20 nt, Artificial Sequence
  Synthetic
ucacucgcauuucuaaugaa

SEQ ID NO: 27663 - RNA, 21 nt, Artificial Sequence
  Synthetic
aucacucgcauuucuaaugaa

SEQ ID NO: 27664 - RNA, 22 nt, Artificial Sequence
  Synthetic
uaucacucgcauuucuaaugaa

SEQ ID NO: 27665 - RNA, 23 nt, Artificial Sequence
  Synthetic
cuaucacucgcauuucuaaugaa

SEQ ID NO: 27666 - RNA, 24 nt, Artificial Sequence
  Synthetic
acuaucacucgcauuucuaaugaa

SEQ ID NO: 27667 - RNA, 21 nt, Artificial Sequence
  Synthetic
aaacaaauuuuauguaaugaa

SEQ ID NO: 27668 - RNA, 23 nt, Artificial Sequence
  Synthetic
agaaacaaauuuuauguaaugaa

SEQ ID NO: 27669 - RNA, 24 nt, Artificial Sequence
  Synthetic
aagaaacaaauuuuauguaaugaa

SEQ ID NO: 27670 - RNA, 18 nt, Artificial Sequence
  Synthetic
uggagaugaagacaugaa

SEQ ID NO: 27671 - RNA, 19 nt, Artificial Sequence
  Synthetic
auggagaugaagacaugaa

SEQ ID NO: 27672 - RNA, 20 nt, Artificial Sequence
  Synthetic
aauggagaugaagacaugaa

SEQ ID NO: 27673 - RNA, 23 nt, Artificial Sequence
  Synthetic
aggaauggagaugaagacaugaa

SEQ ID NO: 27674 - RNA, 24 nt, Artificial Sequence
  Synthetic
aaggaauggagaugaagacaugaa

SEQ ID NO: 27675 - RNA, 18 nt, Artificial Sequence
  Synthetic
ccucuguuaaaccaugaa

SEQ ID NO: 27676 - RNA, 20 nt, Artificial Sequence
  Synthetic
ugccucuguuaaaccaugaa

SEQ ID NO: 27677 - RNA, 21 nt, Artificial Sequence
  Synthetic
augccucuguuaaaccaugaa

SEQ ID NO: 27678 - RNA, 23 nt, Artificial Sequence
  Synthetic
ugaugccucuguuaaaccaugaa

SEQ ID NO: 27679 - RNA, 24 nt, Artificial Sequence
  Synthetic
uugaugccucuguuaaaccaugaa

SEQ ID NO: 27680 - RNA, 18 nt, Artificial Sequence
  Synthetic
ucaacuuagccccaugaa

SEQ ID NO: 27681 - RNA, 19 nt, Artificial Sequence
  Synthetic
uucaacuuagccccaugaa

SEQ ID NO: 27682 - RNA, 20 nt, Artificial Sequence
  Synthetic
auucaacuuagccccaugaa

SEQ ID NO: 27683 - RNA, 21 nt, Artificial Sequence
  Synthetic
aauucaacuuagccccaugaa

SEQ ID NO: 27684 - RNA, 22 nt, Artificial Sequence
  Synthetic
uaauucaacuuagccccaugaa

SEQ ID NO: 27685 - RNA, 23 nt, Artificial Sequence
  Synthetic
uuaauucaacuuagccccaugaa

SEQ ID NO: 27686 - RNA, 24 nt, Artificial Sequence
  Synthetic
auuaauucaacuuagccccaugaa

SEQ ID NO: 27687 - RNA, 18 nt, Artificial Sequence
  Synthetic
cuaauuaccuaucaugaa

SEQ ID NO: 27688 - RNA, 19 nt, Artificial Sequence
  Synthetic
acuaauuaccuaucaugaa

SEQ ID NO: 27689 - RNA, 20 nt, Artificial Sequence
  Synthetic
uacuaauuaccuaucaugaa

SEQ ID NO: 27690 - RNA, 21 nt, Artificial Sequence
  Synthetic
auacuaauuaccuaucaugaa

SEQ ID NO: 27691 - RNA, 22 nt, Artificial Sequence
  Synthetic
aauacuaauuaccuaucaugaa

SEQ ID NO: 27692 - RNA, 23 nt, Artificial Sequence
  Synthetic
uaauacuaauuaccuaucaugaa

SEQ ID NO: 27693 - RNA, 24 nt, Artificial Sequence
  Synthetic
uuaauacuaauuaccuaucaugaa

SEQ ID NO: 27694 - RNA, 21 nt, Artificial Sequence
  Synthetic
acucagggaaaaagagaugaa

SEQ ID NO: 27695 - RNA, 22 nt, Artificial Sequence
  Synthetic
uacucagggaaaaagagaugaa

SEQ ID NO: 27696 - RNA, 23 nt, Artificial Sequence
  Synthetic
auacucagggaaaaagagaugaa

SEQ ID NO: 27697 - RNA, 18 nt, Artificial Sequence
  Synthetic
uuuauaauagaggaugaa

SEQ ID NO: 27698 - RNA, 19 nt, Artificial Sequence
  Synthetic
uuuuauaauagaggaugaa

SEQ ID NO: 27699 - RNA, 20 nt, Artificial Sequence
  Synthetic
auuuuauaauagaggaugaa

SEQ ID NO: 27700 - RNA, 21 nt, Artificial Sequence
  Synthetic
uauuuuauaauagaggaugaa

SEQ ID NO: 27701 - RNA, 23 nt, Artificial Sequence
  Synthetic
aguauuuuauaauagaggaugaa

SEQ ID NO: 27702 - RNA, 24 nt, Artificial Sequence
  Synthetic
uaguauuuuauaauagaggaugaa

SEQ ID NO: 27703 - RNA, 21 nt, Artificial Sequence
  Synthetic
caacaaggauuucuggaugaa

SEQ ID NO: 27704 - RNA, 22 nt, Artificial Sequence
  Synthetic
ccaacaaggauuucuggaugaa

SEQ ID NO: 27705 - RNA, 18 nt, Artificial Sequence
  Synthetic
accagguuugcugaugaa

SEQ ID NO: 27706 - RNA, 19 nt, Artificial Sequence
  Synthetic
uaccagguuugcugaugaa

SEQ ID NO: 27707 - RNA, 20 nt, Artificial Sequence
  Synthetic
cuaccagguuugcugaugaa

SEQ ID NO: 27708 - RNA, 21 nt, Artificial Sequence
  Synthetic
acuaccagguuugcugaugaa

SEQ ID NO: 27709 - RNA, 22 nt, Artificial Sequence
  Synthetic
cacuaccagguuugcugaugaa

SEQ ID NO: 27710 - RNA, 24 nt, Artificial Sequence
  Synthetic
agcacuaccagguuugcugaugaa

SEQ ID NO: 27711 - RNA, 20 nt, Artificial Sequence
  Synthetic
ugguaaaagaugaauaugaa

SEQ ID NO: 27712 - RNA, 23 nt, Artificial Sequence
  Synthetic
aggugguaaaagaugaauaugaa

SEQ ID NO: 27713 - RNA, 18 nt, Artificial Sequence
  Synthetic
uuaagugaucacuaugaa

SEQ ID NO: 27714 - RNA, 19 nt, Artificial Sequence
  Synthetic
uuuaagugaucacuaugaa

SEQ ID NO: 27715 - RNA, 20 nt, Artificial Sequence
  Synthetic
cuuuaagugaucacuaugaa

SEQ ID NO: 27716 - RNA, 21 nt, Artificial Sequence
  Synthetic
acuuuaagugaucacuaugaa

SEQ ID NO: 27717 - RNA, 22 nt, Artificial Sequence
  Synthetic
aacuuuaagugaucacuaugaa

SEQ ID NO: 27718 - RNA, 23 nt, Artificial Sequence
  Synthetic
aaacuuuaagugaucacuaugaa

SEQ ID NO: 27719 - RNA, 24 nt, Artificial Sequence
  Synthetic
caaacuuuaagugaucacuaugaa

SEQ ID NO: 27720 - RNA, 18 nt, Artificial Sequence
  Synthetic
cuuauauuucauuaugaa

SEQ ID NO: 27721 - RNA, 19 nt, Artificial Sequence
  Synthetic
acuuauauuucauuaugaa

SEQ ID NO: 27722 - RNA, 20 nt, Artificial Sequence
  Synthetic
uacuuauauuucauuaugaa

SEQ ID NO: 27723 - RNA, 21 nt, Artificial Sequence
  Synthetic
uuacuuauauuucauuaugaa

SEQ ID NO: 27724 - RNA, 22 nt, Artificial Sequence
  Synthetic
cuuacuuauauuucauuaugaa

SEQ ID NO: 27725 - RNA, 24 nt, Artificial Sequence
  Synthetic
agcuuacuuauauuucauuaugaa

SEQ ID NO: 27726 - RNA, 18 nt, Artificial Sequence
  Synthetic
ucucauguguauuaugaa

SEQ ID NO: 27727 - RNA, 19 nt, Artificial Sequence
  Synthetic
aucucauguguauuaugaa

SEQ ID NO: 27728 - RNA, 20 nt, Artificial Sequence
  Synthetic
aaucucauguguauuaugaa

SEQ ID NO: 27729 - RNA, 21 nt, Artificial Sequence
  Synthetic
aaaucucauguguauuaugaa

SEQ ID NO: 27730 - RNA, 22 nt, Artificial Sequence
  Synthetic
uaaaucucauguguauuaugaa

SEQ ID NO: 27731 - RNA, 24 nt, Artificial Sequence
  Synthetic
uguaaaucucauguguauuaugaa

SEQ ID NO: 27732 - RNA, 18 nt, Artificial Sequence
  Synthetic
acacagugcucuuaugaa

SEQ ID NO: 27733 - RNA, 19 nt, Artificial Sequence
  Synthetic
uacacagugcucuuaugaa

SEQ ID NO: 27734 - RNA, 22 nt, Artificial Sequence
  Synthetic
ugguacacagugcucuuaugaa

SEQ ID NO: 27735 - RNA, 23 nt, Artificial Sequence
  Synthetic
augguacacagugcucuuaugaa

SEQ ID NO: 27736 - RNA, 24 nt, Artificial Sequence
  Synthetic
aaugguacacagugcucuuaugaa

SEQ ID NO: 27737 - RNA, 18 nt, Artificial Sequence
  Synthetic
agcaucuucugaacugaa

SEQ ID NO: 27738 - RNA, 19 nt, Artificial Sequence
  Synthetic
uagcaucuucugaacugaa

SEQ ID NO: 27739 - RNA, 20 nt, Artificial Sequence
  Synthetic
cuagcaucuucugaacugaa

SEQ ID NO: 27740 - RNA, 21 nt, Artificial Sequence
  Synthetic
ucuagcaucuucugaacugaa

SEQ ID NO: 27741 - RNA, 22 nt, Artificial Sequence
  Synthetic
cucuagcaucuucugaacugaa

SEQ ID NO: 27742 - RNA, 23 nt, Artificial Sequence
  Synthetic
ucucuagcaucuucugaacugaa

SEQ ID NO: 27743 - RNA, 21 nt, Artificial Sequence
  Synthetic
cauuuuaaaaauagcacugaa

SEQ ID NO: 27744 - RNA, 22 nt, Artificial Sequence
  Synthetic
acauuuuaaaaauagcacugaa

SEQ ID NO: 27745 - RNA, 23 nt, Artificial Sequence
  Synthetic
uacauuuuaaaaauagcacugaa

SEQ ID NO: 27746 - RNA, 24 nt, Artificial Sequence
  Synthetic
auacauuuuaaaaauagcacugaa

SEQ ID NO: 27747 - RNA, 19 nt, Artificial Sequence
  Synthetic
ugcaagacugugcacugaa

SEQ ID NO: 27748 - RNA, 20 nt, Artificial Sequence
  Synthetic
uugcaagacugugcacugaa

SEQ ID NO: 27749 - RNA, 21 nt, Artificial Sequence
  Synthetic
auugcaagacugugcacugaa

SEQ ID NO: 27750 - RNA, 22 nt, Artificial Sequence
  Synthetic
aauugcaagacugugcacugaa

SEQ ID NO: 27751 - RNA, 23 nt, Artificial Sequence
  Synthetic
uaauugcaagacugugcacugaa

SEQ ID NO: 27752 - RNA, 18 nt, Artificial Sequence
  Synthetic
aagaaaagauggacugaa

SEQ ID NO: 27753 - RNA, 19 nt, Artificial Sequence
  Synthetic
uaagaaaagauggacugaa

SEQ ID NO: 27754 - RNA, 20 nt, Artificial Sequence
  Synthetic
uuaagaaaagauggacugaa

SEQ ID NO: 27755 - RNA, 21 nt, Artificial Sequence
  Synthetic
auuaagaaaagauggacugaa

SEQ ID NO: 27756 - RNA, 22 nt, Artificial Sequence
  Synthetic
cauuaagaaaagauggacugaa

SEQ ID NO: 27757 - RNA, 24 nt, Artificial Sequence
  Synthetic
ugcauuaagaaaagauggacugaa

SEQ ID NO: 27758 - RNA, 21 nt, Artificial Sequence
  Synthetic
uaguuuucuugucauacugaa

SEQ ID NO: 27759 - RNA, 22 nt, Artificial Sequence
  Synthetic
auaguuuucuugucauacugaa

SEQ ID NO: 27760 - RNA, 23 nt, Artificial Sequence
  Synthetic
aauaguuuucuugucauacugaa

SEQ ID NO: 27761 - RNA, 24 nt, Artificial Sequence
  Synthetic
uaauaguuuucuugucauacugaa

SEQ ID NO: 27762 - RNA, 18 nt, Artificial Sequence
  Synthetic
accauacaauucccugaa

SEQ ID NO: 27763 - RNA, 19 nt, Artificial Sequence
  Synthetic
aaccauacaauucccugaa

SEQ ID NO: 27764 - RNA, 20 nt, Artificial Sequence
  Synthetic
aaaccauacaauucccugaa

SEQ ID NO: 27765 - RNA, 22 nt, Artificial Sequence
  Synthetic
ugaaaccauacaauucccugaa

SEQ ID NO: 27766 - RNA, 23 nt, Artificial Sequence
  Synthetic
cugaaaccauacaauucccugaa

SEQ ID NO: 27767 - RNA, 24 nt, Artificial Sequence
  Synthetic
ucugaaaccauacaauucccugaa

SEQ ID NO: 27768 - RNA, 18 nt, Artificial Sequence
  Synthetic
uagacuacagaagcugaa

SEQ ID NO: 27769 - RNA, 19 nt, Artificial Sequence
  Synthetic
auagacuacagaagcugaa

SEQ ID NO: 27770 - RNA, 20 nt, Artificial Sequence
  Synthetic
cauagacuacagaagcugaa

SEQ ID NO: 27771 - RNA, 21 nt, Artificial Sequence
  Synthetic
ucauagacuacagaagcugaa

SEQ ID NO: 27772 - RNA, 22 nt, Artificial Sequence
  Synthetic
aucauagacuacagaagcugaa

SEQ ID NO: 27773 - RNA, 23 nt, Artificial Sequence
  Synthetic
uaucauagacuacagaagcugaa

SEQ ID NO: 27774 - RNA, 24 nt, Artificial Sequence
  Synthetic
auaucauagacuacagaagcugaa

SEQ ID NO: 27775 - RNA, 18 nt, Artificial Sequence
  Synthetic
aaagaauuuagagcugaa

SEQ ID NO: 27776 - RNA, 19 nt, Artificial Sequence
  Synthetic
caaagaauuuagagcugaa

SEQ ID NO: 27777 - RNA, 20 nt, Artificial Sequence
  Synthetic
acaaagaauuuagagcugaa

SEQ ID NO: 27778 - RNA, 21 nt, Artificial Sequence
  Synthetic
cacaaagaauuuagagcugaa

SEQ ID NO: 27779 - RNA, 22 nt, Artificial Sequence
  Synthetic
ccacaaagaauuuagagcugaa

SEQ ID NO: 27780 - RNA, 24 nt, Artificial Sequence
  Synthetic
agccacaaagaauuuagagcugaa

SEQ ID NO: 27781 - RNA, 19 nt, Artificial Sequence
  Synthetic
agaugaagaaauggcugaa

SEQ ID NO: 27782 - RNA, 20 nt, Artificial Sequence
  Synthetic
aagaugaagaaauggcugaa

SEQ ID NO: 27783 - RNA, 22 nt, Artificial Sequence
  Synthetic
ugaagaugaagaaauggcugaa

SEQ ID NO: 27784 - RNA, 23 nt, Artificial Sequence
  Synthetic
uugaagaugaagaaauggcugaa

SEQ ID NO: 27785 - RNA, 18 nt, Artificial Sequence
  Synthetic
uuugaauacuuggcugaa

SEQ ID NO: 27786 - RNA, 21 nt, Artificial Sequence
  Synthetic
agguuugaauacuuggcugaa

SEQ ID NO: 27787 - RNA, 22 nt, Artificial Sequence
  Synthetic
aagguuugaauacuuggcugaa

SEQ ID NO: 27788 - RNA, 23 nt, Artificial Sequence
  Synthetic
aaagguuugaauacuuggcugaa

SEQ ID NO: 27789 - RNA, 24 nt, Artificial Sequence
  Synthetic
aaaagguuugaauacuuggcugaa

SEQ ID NO: 27790 - RNA, 20 nt, Artificial Sequence
  Synthetic
agguagaaaugaagucugaa

SEQ ID NO: 27791 - RNA, 21 nt, Artificial Sequence
  Synthetic
uagguagaaaugaagucugaa

SEQ ID NO: 27792 - RNA, 22 nt, Artificial Sequence
  Synthetic
auagguagaaaugaagucugaa

SEQ ID NO: 27793 - RNA, 23 nt, Artificial Sequence
  Synthetic
cauagguagaaaugaagucugaa

SEQ ID NO: 27794 - RNA, 24 nt, Artificial Sequence
  Synthetic
acauagguagaaaugaagucugaa

SEQ ID NO: 27795 - RNA, 18 nt, Artificial Sequence
  Synthetic
aaaccuugcuagucugaa

SEQ ID NO: 27796 - RNA, 19 nt, Artificial Sequence
  Synthetic
aaaaccuugcuagucugaa

SEQ ID NO: 27797 - RNA, 20 nt, Artificial Sequence
  Synthetic
uaaaaccuugcuagucugaa

SEQ ID NO: 27798 - RNA, 21 nt, Artificial Sequence
  Synthetic
auaaaaccuugcuagucugaa

SEQ ID NO: 27799 - RNA, 22 nt, Artificial Sequence
  Synthetic
uauaaaaccuugcuagucugaa

SEQ ID NO: 27800 - RNA, 23 nt, Artificial Sequence
  Synthetic
uuauaaaaccuugcuagucugaa

SEQ ID NO: 27801 - RNA, 21 nt, Artificial Sequence
  Synthetic
auaaagcauauacauucugaa

SEQ ID NO: 27802 - RNA, 22 nt, Artificial Sequence
  Synthetic
uauaaagcauauacauucugaa

SEQ ID NO: 27803 - RNA, 23 nt, Artificial Sequence
  Synthetic
auauaaagcauauacauucugaa

SEQ ID NO: 27804 - RNA, 24 nt, Artificial Sequence
  Synthetic
aauauaaagcauauacauucugaa

SEQ ID NO: 27805 - RNA, 18 nt, Artificial Sequence
  Synthetic
aaguuauuaacuucugaa

SEQ ID NO: 27806 - RNA, 19 nt, Artificial Sequence
  Synthetic
aaaguuauuaacuucugaa

SEQ ID NO: 27807 - RNA, 20 nt, Artificial Sequence
  Synthetic
aaaaguuauuaacuucugaa

SEQ ID NO: 27808 - RNA, 22 nt, Artificial Sequence
  Synthetic
agaaaaguuauuaacuucugaa

SEQ ID NO: 27809 - RNA, 23 nt, Artificial Sequence
  Synthetic
uagaaaaguuauuaacuucugaa

SEQ ID NO: 27810 - RNA, 24 nt, Artificial Sequence
  Synthetic
uuagaaaaguuauuaacuucugaa

SEQ ID NO: 27811 - RNA, 22 nt, Artificial Sequence
  Synthetic
aguaaaaacaaugcuaagugaa

SEQ ID NO: 27812 - RNA, 24 nt, Artificial Sequence
  Synthetic
agaguaaaaacaaugcuaagugaa

SEQ ID NO: 27813 - RNA, 21 nt, Artificial Sequence
  Synthetic
auuaaugaauaaguaagugaa

SEQ ID NO: 27814 - RNA, 22 nt, Artificial Sequence
  Synthetic
cauuaaugaauaaguaagugaa

SEQ ID NO: 27815 - RNA, 24 nt, Artificial Sequence
  Synthetic
agcauuaaugaauaaguaagugaa

SEQ ID NO: 27816 - RNA, 18 nt, Artificial Sequence
  Synthetic
accuugcauagcagugaa

SEQ ID NO: 27817 - RNA, 19 nt, Artificial Sequence
  Synthetic
uaccuugcauagcagugaa

SEQ ID NO: 27818 - RNA, 20 nt, Artificial Sequence
  Synthetic
auaccuugcauagcagugaa

SEQ ID NO: 27819 - RNA, 21 nt, Artificial Sequence
  Synthetic
aauaccuugcauagcagugaa

SEQ ID NO: 27820 - RNA, 22 nt, Artificial Sequence
  Synthetic
uaauaccuugcauagcagugaa

SEQ ID NO: 27821 - RNA, 23 nt, Artificial Sequence
  Synthetic
auaauaccuugcauagcagugaa

SEQ ID NO: 27822 - RNA, 24 nt, Artificial Sequence
  Synthetic
cauaauaccuugcauagcagugaa

SEQ ID NO: 27823 - RNA, 19 nt, Artificial Sequence
  Synthetic
ugaaugugguuagagugaa

SEQ ID NO: 27824 - RNA, 20 nt, Artificial Sequence
  Synthetic
cugaaugugguuagagugaa

SEQ ID NO: 27825 - RNA, 21 nt, Artificial Sequence
  Synthetic
ucugaaugugguuagagugaa

SEQ ID NO: 27826 - RNA, 22 nt, Artificial Sequence
  Synthetic
aucugaaugugguuagagugaa

SEQ ID NO: 27827 - RNA, 23 nt, Artificial Sequence
  Synthetic
uaucugaaugugguuagagugaa

SEQ ID NO: 27828 - RNA, 24 nt, Artificial Sequence
  Synthetic
uuaucugaaugugguuagagugaa

SEQ ID NO: 27829 - RNA, 22 nt, Artificial Sequence
  Synthetic
agaaaccaguuuuaggagugaa

SEQ ID NO: 27830 - RNA, 23 nt, Artificial Sequence
  Synthetic
aagaaaccaguuuuaggagugaa

SEQ ID NO: 27831 - RNA, 24 nt, Artificial Sequence
  Synthetic
uaagaaaccaguuuuaggagugaa

SEQ ID NO: 27832 - RNA, 18 nt, Artificial Sequence
  Synthetic
cauaagcaaguuagugaa

SEQ ID NO: 27833 - RNA, 21 nt, Artificial Sequence
  Synthetic
cggcauaagcaaguuagugaa

SEQ ID NO: 27834 - RNA, 22 nt, Artificial Sequence
  Synthetic
acggcauaagcaaguuagugaa

SEQ ID NO: 27835 - RNA, 23 nt, Artificial Sequence
  Synthetic
cacggcauaagcaaguuagugaa

SEQ ID NO: 27836 - RNA, 24 nt, Artificial Sequence
  Synthetic
acacggcauaagcaaguuagugaa

SEQ ID NO: 27837 - RNA, 18 nt, Artificial Sequence
  Synthetic
ucaaauucuguuagugaa

SEQ ID NO: 27838 - RNA, 19 nt, Artificial Sequence
  Synthetic
aucaaauucuguuagugaa

SEQ ID NO: 27839 - RNA, 20 nt, Artificial Sequence
  Synthetic
uaucaaauucuguuagugaa

SEQ ID NO: 27840 - RNA, 21 nt, Artificial Sequence
  Synthetic
uuaucaaauucuguuagugaa

SEQ ID NO: 27841 - RNA, 22 nt, Artificial Sequence
  Synthetic
auuaucaaauucuguuagugaa

SEQ ID NO: 27842 - RNA, 24 nt, Artificial Sequence
  Synthetic
agauuaucaaauucuguuagugaa

SEQ ID NO: 27843 - RNA, 21 nt, Artificial Sequence
  Synthetic
aggggaaaggcauaaggugaa

SEQ ID NO: 27844 - RNA, 22 nt, Artificial Sequence
  Synthetic
uaggggaaaggcauaaggugaa

SEQ ID NO: 27845 - RNA, 23 nt, Artificial Sequence
  Synthetic
uuaggggaaaggcauaaggugaa

SEQ ID NO: 27846 - RNA, 24 nt, Artificial Sequence
  Synthetic
auuaggggaaaggcauaaggugaa

SEQ ID NO: 27847 - RNA, 18 nt, Artificial Sequence
  Synthetic
caagguggauaaggugaa

SEQ ID NO: 27848 - RNA, 19 nt, Artificial Sequence
  Synthetic
ccaagguggauaaggugaa

SEQ ID NO: 27849 - RNA, 20 nt, Artificial Sequence
  Synthetic
uccaagguggauaaggugaa

SEQ ID NO: 27850 - RNA, 22 nt, Artificial Sequence
  Synthetic
aguccaagguggauaaggugaa

SEQ ID NO: 27851 - RNA, 24 nt, Artificial Sequence
  Synthetic
ugaguccaagguggauaaggugaa

SEQ ID NO: 27852 - RNA, 18 nt, Artificial Sequence
  Synthetic
ugcuaauuaaaaugugaa

SEQ ID NO: 27853 - RNA, 21 nt, Artificial Sequence
  Synthetic
uggugcuaauuaaaaugugaa

SEQ ID NO: 27854 - RNA, 22 nt, Artificial Sequence
  Synthetic
uuggugcuaauuaaaaugugaa

SEQ ID NO: 27855 - RNA, 23 nt, Artificial Sequence
  Synthetic
uuuggugcuaauuaaaaugugaa

SEQ ID NO: 27856 - RNA, 24 nt, Artificial Sequence
  Synthetic
auuuggugcuaauuaaaaugugaa

SEQ ID NO: 27857 - RNA, 18 nt, Artificial Sequence
  Synthetic
acuauauucguaauugaa

SEQ ID NO: 27858 - RNA, 19 nt, Artificial Sequence
  Synthetic
aacuauauucguaauugaa

SEQ ID NO: 27859 - RNA, 20 nt, Artificial Sequence
  Synthetic
aaacuauauucguaauugaa

SEQ ID NO: 27860 - RNA, 21 nt, Artificial Sequence
  Synthetic
aaaacuauauucguaauugaa

SEQ ID NO: 27861 - RNA, 22 nt, Artificial Sequence
  Synthetic
aaaaacuauauucguaauugaa

SEQ ID NO: 27862 - RNA, 23 nt, Artificial Sequence
  Synthetic
aaaaaacuauauucguaauugaa

SEQ ID NO: 27863 - RNA, 24 nt, Artificial Sequence
  Synthetic
aaaaaaacuauauucguaauugaa

SEQ ID NO: 27864 - RNA, 18 nt, Artificial Sequence
  Synthetic
aaaacaguggagauugaa

SEQ ID NO: 27865 - RNA, 19 nt, Artificial Sequence
  Synthetic
aaaaacaguggagauugaa

SEQ ID NO: 27866 - RNA, 20 nt, Artificial Sequence
  Synthetic
uaaaaacaguggagauugaa

SEQ ID NO: 27867 - RNA, 21 nt, Artificial Sequence
  Synthetic
auaaaaacaguggagauugaa

SEQ ID NO: 27868 - RNA, 22 nt, Artificial Sequence
  Synthetic
aauaaaaacaguggagauugaa

SEQ ID NO: 27869 - RNA, 23 nt, Artificial Sequence
  Synthetic
aaauaaaaacaguggagauugaa

SEQ ID NO: 27870 - RNA, 24 nt, Artificial Sequence
  Synthetic
caaauaaaaacaguggagauugaa

SEQ ID NO: 27871 - RNA, 18 nt, Artificial Sequence
  Synthetic
acauuucagcugauugaa

SEQ ID NO: 27872 - RNA, 19 nt, Artificial Sequence
  Synthetic
cacauuucagcugauugaa

SEQ ID NO: 27873 - RNA, 22 nt, Artificial Sequence
  Synthetic
uggcacauuucagcugauugaa

SEQ ID NO: 27874 - RNA, 23 nt, Artificial Sequence
  Synthetic
auggcacauuucagcugauugaa

SEQ ID NO: 27875 - RNA, 24 nt, Artificial Sequence
  Synthetic
aauggcacauuucagcugauugaa

SEQ ID NO: 27876 - RNA, 18 nt, Artificial Sequence
  Synthetic
uaguugguggguauugaa

SEQ ID NO: 27877 - RNA, 19 nt, Artificial Sequence
  Synthetic
cuaguugguggguauugaa

SEQ ID NO: 27878 - RNA, 20 nt, Artificial Sequence
  Synthetic
ccuaguugguggguauugaa

SEQ ID NO: 27879 - RNA, 21 nt, Artificial Sequence
  Synthetic
cccuaguugguggguauugaa

SEQ ID NO: 27880 - RNA, 22 nt, Artificial Sequence
  Synthetic
ccccuaguugguggguauugaa

SEQ ID NO: 27881 - RNA, 23 nt, Artificial Sequence
  Synthetic
uccccuaguugguggguauugaa

SEQ ID NO: 27882 - RNA, 24 nt, Artificial Sequence
  Synthetic
cuccccuaguugguggguauugaa

SEQ ID NO: 27883 - RNA, 18 nt, Artificial Sequence
  Synthetic
ucgcuuaggaaccuugaa

SEQ ID NO: 27884 - RNA, 19 nt, Artificial Sequence
  Synthetic
uucgcuuaggaaccuugaa

SEQ ID NO: 27885 - RNA, 20 nt, Artificial Sequence
  Synthetic
uuucgcuuaggaaccuugaa

SEQ ID NO: 27886 - RNA, 22 nt, Artificial Sequence
  Synthetic
uguuucgcuuaggaaccuugaa

SEQ ID NO: 27887 - RNA, 23 nt, Artificial Sequence
  Synthetic
uuguuucgcuuaggaaccuugaa

SEQ ID NO: 27888 - RNA, 24 nt, Artificial Sequence
  Synthetic
auuguuucgcuuaggaaccuugaa

SEQ ID NO: 27889 - RNA, 20 nt, Artificial Sequence
  Synthetic
cgggugagaugauccuugaa

SEQ ID NO: 27890 - RNA, 21 nt, Artificial Sequence
  Synthetic
ccgggugagaugauccuugaa

SEQ ID NO: 27891 - RNA, 22 nt, Artificial Sequence
  Synthetic
uccgggugagaugauccuugaa

SEQ ID NO: 27892 - RNA, 23 nt, Artificial Sequence
  Synthetic
auccgggugagaugauccuugaa

SEQ ID NO: 27893 - RNA, 19 nt, Artificial Sequence
  Synthetic
uggaucugucuuccuugaa

SEQ ID NO: 27894 - RNA, 20 nt, Artificial Sequence
  Synthetic
uuggaucugucuuccuugaa

SEQ ID NO: 27895 - RNA, 21 nt, Artificial Sequence
  Synthetic
cuuggaucugucuuccuugaa

SEQ ID NO: 27896 - RNA, 22 nt, Artificial Sequence
  Synthetic
ccuuggaucugucuuccuugaa

SEQ ID NO: 27897 - RNA, 24 nt, Artificial Sequence
  Synthetic
agccuuggaucugucuuccuugaa

SEQ ID NO: 27898 - RNA, 18 nt, Artificial Sequence
  Synthetic
uauaaauaugcgcuugaa

SEQ ID NO: 27899 - RNA, 21 nt, Artificial Sequence
  Synthetic
agguauaaauaugcgcuugaa

SEQ ID NO: 27900 - RNA, 22 nt, Artificial Sequence
  Synthetic
cagguauaaauaugcgcuugaa

SEQ ID NO: 27901 - RNA, 23 nt, Artificial Sequence
  Synthetic
acagguauaaauaugcgcuugaa

SEQ ID NO: 27902 - RNA, 24 nt, Artificial Sequence
  Synthetic
aacagguauaaauaugcgcuugaa

SEQ ID NO: 27903 - RNA, 18 nt, Artificial Sequence
  Synthetic
uagcauuuuggaguugaa

SEQ ID NO: 27904 - RNA, 20 nt, Artificial Sequence
  Synthetic
aguagcauuuuggaguugaa

SEQ ID NO: 27905 - RNA, 18 nt, Artificial Sequence
  Synthetic
cuaucuacaaugguugaa

SEQ ID NO: 27906 - RNA, 19 nt, Artificial Sequence
  Synthetic
ucuaucuacaaugguugaa

SEQ ID NO: 27907 - RNA, 20 nt, Artificial Sequence
  Synthetic
aucuaucuacaaugguugaa

SEQ ID NO: 27908 - RNA, 21 nt, Artificial Sequence
  Synthetic
uaucuaucuacaaugguugaa

SEQ ID NO: 27909 - RNA, 22 nt, Artificial Sequence
  Synthetic
auaucuaucuacaaugguugaa

SEQ ID NO: 27910 - RNA, 23 nt, Artificial Sequence
  Synthetic
aauaucuaucuacaaugguugaa

SEQ ID NO: 27911 - RNA, 18 nt, Artificial Sequence
  Synthetic
ugccaaucuaugguugaa

SEQ ID NO: 27912 - RNA, 19 nt, Artificial Sequence
  Synthetic
augccaaucuaugguugaa

SEQ ID NO: 27913 - RNA, 20 nt, Artificial Sequence
  Synthetic
uaugccaaucuaugguugaa

SEQ ID NO: 27914 - RNA, 21 nt, Artificial Sequence
  Synthetic
cuaugccaaucuaugguugaa

SEQ ID NO: 27915 - RNA, 23 nt, Artificial Sequence
  Synthetic
ugcuaugccaaucuaugguugaa

SEQ ID NO: 27916 - RNA, 24 nt, Artificial Sequence
  Synthetic
uugcuaugccaaucuaugguugaa

SEQ ID NO: 27917 - RNA, 21 nt, Artificial Sequence
  Synthetic
ucauguuaugaaacuguugaa

SEQ ID NO: 27918 - RNA, 22 nt, Artificial Sequence
  Synthetic
aucauguuaugaaacuguugaa

SEQ ID NO: 27919 - RNA, 23 nt, Artificial Sequence
  Synthetic
caucauguuaugaaacuguugaa

SEQ ID NO: 27920 - RNA, 24 nt, Artificial Sequence
  Synthetic
acaucauguuaugaaacuguugaa

SEQ ID NO: 27921 - RNA, 21 nt, Artificial Sequence
  Synthetic
agucaguaaauaguuguugaa

SEQ ID NO: 27922 - RNA, 22 nt, Artificial Sequence
  Synthetic
aagucaguaaauaguuguugaa

SEQ ID NO: 27923 - RNA, 23 nt, Artificial Sequence
  Synthetic
caagucaguaaauaguuguugaa

SEQ ID NO: 27924 - RNA, 24 nt, Artificial Sequence
  Synthetic
acaagucaguaaauaguuguugaa

SEQ ID NO: 27925 - RNA, 18 nt, Artificial Sequence
  Synthetic
uacagcuucuuuguugaa

SEQ ID NO: 27926 - RNA, 19 nt, Artificial Sequence
  Synthetic
uuacagcuucuuuguugaa

SEQ ID NO: 27927 - RNA, 20 nt, Artificial Sequence
  Synthetic
uuuacagcuucuuuguugaa

SEQ ID NO: 27928 - RNA, 21 nt, Artificial Sequence
  Synthetic
uuuuacagcuucuuuguugaa

SEQ ID NO: 27929 - RNA, 22 nt, Artificial Sequence
  Synthetic
auuuuacagcuucuuuguugaa

SEQ ID NO: 27930 - RNA, 23 nt, Artificial Sequence
  Synthetic
cauuuuacagcuucuuuguugaa

SEQ ID NO: 27931 - RNA, 24 nt, Artificial Sequence
  Synthetic
ucauuuuacagcuucuuuguugaa

SEQ ID NO: 27932 - RNA, 19 nt, Artificial Sequence
  Synthetic
uggacaagagcaauuugaa

SEQ ID NO: 27933 - RNA, 20 nt, Artificial Sequence
  Synthetic
cuggacaagagcaauuugaa

SEQ ID NO: 27934 - RNA, 21 nt, Artificial Sequence
  Synthetic
ucuggacaagagcaauuugaa

SEQ ID NO: 27935 - RNA, 22 nt, Artificial Sequence
  Synthetic
aucuggacaagagcaauuugaa

SEQ ID NO: 27936 - RNA, 24 nt, Artificial Sequence
  Synthetic
ugaucuggacaagagcaauuugaa

SEQ ID NO: 27937 - RNA, 18 nt, Artificial Sequence
  Synthetic
acgcagacagaauuugaa

SEQ ID NO: 27938 - RNA, 20 nt, Artificial Sequence
  Synthetic
ugacgcagacagaauuugaa

SEQ ID NO: 27939 - RNA, 21 nt, Artificial Sequence
  Synthetic
uugacgcagacagaauuugaa

SEQ ID NO: 27940 - RNA, 22 nt, Artificial Sequence
  Synthetic
auugacgcagacagaauuugaa

SEQ ID NO: 27941 - RNA, 23 nt, Artificial Sequence
  Synthetic
cauugacgcagacagaauuugaa

SEQ ID NO: 27942 - RNA, 24 nt, Artificial Sequence
  Synthetic
acauugacgcagacagaauuugaa

SEQ ID NO: 27943 - RNA, 18 nt, Artificial Sequence
  Synthetic
aagguauacucauuugaa

SEQ ID NO: 27944 - RNA, 20 nt, Artificial Sequence
  Synthetic
agaagguauacucauuugaa

SEQ ID NO: 27945 - RNA, 21 nt, Artificial Sequence
  Synthetic
cagaagguauacucauuugaa

SEQ ID NO: 27946 - RNA, 22 nt, Artificial Sequence
  Synthetic
ucagaagguauacucauuugaa

SEQ ID NO: 27947 - RNA, 23 nt, Artificial Sequence
  Synthetic
uucagaagguauacucauuugaa

SEQ ID NO: 27948 - RNA, 24 nt, Artificial Sequence
  Synthetic
uuucagaagguauacucauuugaa

SEQ ID NO: 27949 - RNA, 21 nt, Artificial Sequence
  Synthetic
uucuugaugaugucauuugaa

SEQ ID NO: 27950 - RNA, 22 nt, Artificial Sequence
  Synthetic
cuucuugaugaugucauuugaa

SEQ ID NO: 27951 - RNA, 23 nt, Artificial Sequence
  Synthetic
ccuucuugaugaugucauuugaa

SEQ ID NO: 27952 - RNA, 24 nt, Artificial Sequence
  Synthetic
uccuucuugaugaugucauuugaa

SEQ ID NO: 27953 - RNA, 18 nt, Artificial Sequence
  Synthetic
uaucaaaacauauuugaa

SEQ ID NO: 27954 - RNA, 19 nt, Artificial Sequence
  Synthetic
auaucaaaacauauuugaa

SEQ ID NO: 27955 - RNA, 20 nt, Artificial Sequence
  Synthetic
aauaucaaaacauauuugaa

SEQ ID NO: 27956 - RNA, 21 nt, Artificial Sequence
  Synthetic
uaauaucaaaacauauuugaa

SEQ ID NO: 27957 - RNA, 22 nt, Artificial Sequence
  Synthetic
uuaauaucaaaacauauuugaa

SEQ ID NO: 27958 - RNA, 23 nt, Artificial Sequence
  Synthetic
auuaauaucaaaacauauuugaa

SEQ ID NO: 27959 - RNA, 18 nt, Artificial Sequence
  Synthetic
acucauauaguauuugaa

SEQ ID NO: 27960 - RNA, 19 nt, Artificial Sequence
  Synthetic
uacucauauaguauuugaa

SEQ ID NO: 27961 - RNA, 20 nt, Artificial Sequence
  Synthetic
uuacucauauaguauuugaa

SEQ ID NO: 27962 - RNA, 21 nt, Artificial Sequence
  Synthetic
cuuacucauauaguauuugaa

SEQ ID NO: 27963 - RNA, 22 nt, Artificial Sequence
  Synthetic
ucuuacucauauaguauuugaa

SEQ ID NO: 27964 - RNA, 24 nt, Artificial Sequence
  Synthetic
ugucuuacucauauaguauuugaa

SEQ ID NO: 27965 - RNA, 18 nt, Artificial Sequence
  Synthetic
cuguugcuuuaguuugaa

SEQ ID NO: 27966 - RNA, 19 nt, Artificial Sequence
  Synthetic
ccuguugcuuuaguuugaa

SEQ ID NO: 27967 - RNA, 20 nt, Artificial Sequence
  Synthetic
uccuguugcuuuaguuugaa

SEQ ID NO: 27968 - RNA, 21 nt, Artificial Sequence
  Synthetic
uuccuguugcuuuaguuugaa

SEQ ID NO: 27969 - RNA, 22 nt, Artificial Sequence
  Synthetic
cuuccuguugcuuuaguuugaa

SEQ ID NO: 27970 - RNA, 23 nt, Artificial Sequence
  Synthetic
ccuuccuguugcuuuaguuugaa

SEQ ID NO: 27971 - RNA, 24 nt, Artificial Sequence
  Synthetic
uccuuccuguugcuuuaguuugaa

SEQ ID NO: 27972 - RNA, 18 nt, Artificial Sequence
  Synthetic
cucacuaauaauuuugaa

SEQ ID NO: 27973 - RNA, 19 nt, Artificial Sequence
  Synthetic
ucucacuaauaauuuugaa

SEQ ID NO: 27974 - RNA, 20 nt, Artificial Sequence
  Synthetic
cucucacuaauaauuuugaa

SEQ ID NO: 27975 - RNA, 22 nt, Artificial Sequence
  Synthetic
ugcucucacuaauaauuuugaa

SEQ ID NO: 27976 - RNA, 23 nt, Artificial Sequence
  Synthetic
uugcucucacuaauaauuuugaa

SEQ ID NO: 27977 - RNA, 24 nt, Artificial Sequence
  Synthetic
auugcucucacuaauaauuuugaa

SEQ ID NO: 27978 - RNA, 18 nt, Artificial Sequence
  Synthetic
auggugaagcauuuugaa

SEQ ID NO: 27979 - RNA, 19 nt, Artificial Sequence
  Synthetic
cauggugaagcauuuugaa

SEQ ID NO: 27980 - RNA, 20 nt, Artificial Sequence
  Synthetic
acauggugaagcauuuugaa

SEQ ID NO: 27981 - RNA, 18 nt, Artificial Sequence
  Synthetic
aggcuuggggaaaaauaa

SEQ ID NO: 27982 - RNA, 19 nt, Artificial Sequence
  Synthetic
aaggcuuggggaaaaauaa

SEQ ID NO: 27983 - RNA, 20 nt, Artificial Sequence
  Synthetic
uaaggcuuggggaaaaauaa

SEQ ID NO: 27984 - RNA, 21 nt, Artificial Sequence
  Synthetic
uuaaggcuuggggaaaaauaa

SEQ ID NO: 27985 - RNA, 22 nt, Artificial Sequence
  Synthetic
cuuaaggcuuggggaaaaauaa

SEQ ID NO: 27986 - RNA, 23 nt, Artificial Sequence
  Synthetic
acuuaaggcuuggggaaaaauaa

SEQ ID NO: 27987 - RNA, 24 nt, Artificial Sequence
  Synthetic
aacuuaaggcuuggggaaaaauaa

SEQ ID NO: 27988 - RNA, 18 nt, Artificial Sequence
  Synthetic
cugggugaugaaaaauaa

SEQ ID NO: 27989 - RNA, 19 nt, Artificial Sequence
  Synthetic
ucugggugaugaaaaauaa

SEQ ID NO: 27990 - RNA, 20 nt, Artificial Sequence
  Synthetic
aucugggugaugaaaaauaa

SEQ ID NO: 27991 - RNA, 21 nt, Artificial Sequence
  Synthetic
uaucugggugaugaaaaauaa

SEQ ID NO: 27992 - RNA, 22 nt, Artificial Sequence
  Synthetic
cuaucugggugaugaaaaauaa

SEQ ID NO: 27993 - RNA, 23 nt, Artificial Sequence
  Synthetic
acuaucugggugaugaaaaauaa

SEQ ID NO: 27994 - RNA, 19 nt, Artificial Sequence
  Synthetic
agaccacggugaaaaauaa

SEQ ID NO: 27995 - RNA, 20 nt, Artificial Sequence
  Synthetic
aagaccacggugaaaaauaa

SEQ ID NO: 27996 - RNA, 23 nt, Artificial Sequence
  Synthetic
aggaagaccacggugaaaaauaa

SEQ ID NO: 27997 - RNA, 19 nt, Artificial Sequence
  Synthetic
agaccaguuguaaaaauaa

SEQ ID NO: 27998 - RNA, 21 nt, Artificial Sequence
  Synthetic
cgagaccaguuguaaaaauaa

SEQ ID NO: 27999 - RNA, 22 nt, Artificial Sequence
  Synthetic
acgagaccaguuguaaaaauaa

SEQ ID NO: 28000 - RNA, 23 nt, Artificial Sequence
  Synthetic
cacgagaccaguuguaaaaauaa

SEQ ID NO: 28001 - RNA, 24 nt, Artificial Sequence
  Synthetic
ccacgagaccaguuguaaaaauaa

SEQ ID NO: 28002 - RNA, 21 nt, Artificial Sequence
  Synthetic
cauaaacauuuguaaaaauaa

SEQ ID NO: 28003 - RNA, 22 nt, Artificial Sequence
  Synthetic
ucauaaacauuuguaaaaauaa

SEQ ID NO: 28004 - RNA, 23 nt, Artificial Sequence
  Synthetic
aucauaaacauuuguaaaaauaa

SEQ ID NO: 28005 - RNA, 24 nt, Artificial Sequence
  Synthetic
aaucauaaacauuuguaaaaauaa

SEQ ID NO: 28006 - RNA, 18 nt, Artificial Sequence
  Synthetic
uugauuuucacaaaauaa

SEQ ID NO: 28007 - RNA, 19 nt, Artificial Sequence
  Synthetic
uuugauuuucacaaaauaa

SEQ ID NO: 28008 - RNA, 20 nt, Artificial Sequence
  Synthetic
cuuugauuuucacaaaauaa

SEQ ID NO: 28009 - RNA, 21 nt, Artificial Sequence
  Synthetic
acuuugauuuucacaaaauaa

SEQ ID NO: 28010 - RNA, 22 nt, Artificial Sequence
  Synthetic
cacuuugauuuucacaaaauaa

SEQ ID NO: 28011 - RNA, 23 nt, Artificial Sequence
  Synthetic
ccacuuugauuuucacaaaauaa

SEQ ID NO: 28012 - RNA, 24 nt, Artificial Sequence
  Synthetic
uccacuuugauuuucacaaaauaa

SEQ ID NO: 28013 - RNA, 18 nt, Artificial Sequence
  Synthetic
cauacaaaaguaaaauaa

SEQ ID NO: 28014 - RNA, 19 nt, Artificial Sequence
  Synthetic
ccauacaaaaguaaaauaa

SEQ ID NO: 28015 - RNA, 21 nt, Artificial Sequence
  Synthetic
ugccauacaaaaguaaaauaa

SEQ ID NO: 28016 - RNA, 22 nt, Artificial Sequence
  Synthetic
augccauacaaaaguaaaauaa

SEQ ID NO: 28017 - RNA, 23 nt, Artificial Sequence
  Synthetic
uaugccauacaaaaguaaaauaa

SEQ ID NO: 28018 - RNA, 24 nt, Artificial Sequence
  Synthetic
auaugccauacaaaaguaaaauaa

SEQ ID NO: 28019 - RNA, 22 nt, Artificial Sequence
  Synthetic
agaaauaaguauauuaaaauaa

SEQ ID NO: 28020 - RNA, 23 nt, Artificial Sequence
  Synthetic
cagaaauaaguauauuaaaauaa

SEQ ID NO: 28021 - RNA, 24 nt, Artificial Sequence
  Synthetic
ucagaaauaaguauauuaaaauaa

SEQ ID NO: 28022 - RNA, 22 nt, Artificial Sequence
  Synthetic
agcuaaaaaaacuuuaaaauaa

SEQ ID NO: 28023 - RNA, 23 nt, Artificial Sequence
  Synthetic
aagcuaaaaaaacuuuaaaauaa

SEQ ID NO: 28024 - RNA, 24 nt, Artificial Sequence
  Synthetic
aaagcuaaaaaaacuuuaaaauaa

SEQ ID NO: 28025 - RNA, 19 nt, Artificial Sequence
  Synthetic
uguuuuuucaaccaaauaa

SEQ ID NO: 28026 - RNA, 20 nt, Artificial Sequence
  Synthetic
auguuuuuucaaccaaauaa

SEQ ID NO: 28027 - RNA, 22 nt, Artificial Sequence
  Synthetic
ugauguuuuuucaaccaaauaa

SEQ ID NO: 28028 - RNA, 24 nt, Artificial Sequence
  Synthetic
cgugauguuuuuucaaccaaauaa

SEQ ID NO: 28029 - RNA, 19 nt, Artificial Sequence
  Synthetic
aguuuugcuuugcaaauaa

SEQ ID NO: 28030 - RNA, 20 nt, Artificial Sequence
  Synthetic
caguuuugcuuugcaaauaa

SEQ ID NO: 28031 - RNA, 21 nt, Artificial Sequence
  Synthetic
ucaguuuugcuuugcaaauaa

SEQ ID NO: 28032 - RNA, 22 nt, Artificial Sequence
  Synthetic
uucaguuuugcuuugcaaauaa

SEQ ID NO: 28033 - RNA, 23 nt, Artificial Sequence
  Synthetic
uuucaguuuugcuuugcaaauaa

SEQ ID NO: 28034 - RNA, 24 nt, Artificial Sequence
  Synthetic
uuuucaguuuugcuuugcaaauaa

SEQ ID NO: 28035 - RNA, 18 nt, Artificial Sequence
  Synthetic
uucccaaaaaggaaauaa

SEQ ID NO: 28036 - RNA, 20 nt, Artificial Sequence
  Synthetic
aguucccaaaaaggaaauaa

SEQ ID NO: 28037 - RNA, 22 nt, Artificial Sequence
  Synthetic
agaguucccaaaaaggaaauaa

SEQ ID NO: 28038 - RNA, 23 nt, Artificial Sequence
  Synthetic
uagaguucccaaaaaggaaauaa

SEQ ID NO: 28039 - RNA, 24 nt, Artificial Sequence
  Synthetic
auagaguucccaaaaaggaaauaa

SEQ ID NO: 28040 - RNA, 19 nt, Artificial Sequence
  Synthetic
cgagaggggcuggaaauaa

SEQ ID NO: 28041 - RNA, 20 nt, Artificial Sequence
  Synthetic
ccgagaggggcuggaaauaa

SEQ ID NO: 28042 - RNA, 21 nt, Artificial Sequence
  Synthetic
cccgagaggggcuggaaauaa

SEQ ID NO: 28043 - RNA, 22 nt, Artificial Sequence
  Synthetic
ucccgagaggggcuggaaauaa

SEQ ID NO: 28044 - RNA, 23 nt, Artificial Sequence
  Synthetic
uucccgagaggggcuggaaauaa

SEQ ID NO: 28045 - RNA, 24 nt, Artificial Sequence
  Synthetic
auucccgagaggggcuggaaauaa

SEQ ID NO: 28046 - RNA, 21 nt, Artificial Sequence
  Synthetic
ucauugaaauuaaauaaauaa

SEQ ID NO: 28047 - RNA, 22 nt, Artificial Sequence
  Synthetic
aucauugaaauuaaauaaauaa

SEQ ID NO: 28048 - RNA, 23 nt, Artificial Sequence
  Synthetic
caucauugaaauuaaauaaauaa

SEQ ID NO: 28049 - RNA, 24 nt, Artificial Sequence
  Synthetic
acaucauugaaauuaaauaaauaa

SEQ ID NO: 28050 - RNA, 21 nt, Artificial Sequence
  Synthetic
cauucacacacauauaaauaa

SEQ ID NO: 28051 - RNA, 22 nt, Artificial Sequence
  Synthetic
ucauucacacacauauaaauaa

SEQ ID NO: 28052 - RNA, 23 nt, Artificial Sequence
  Synthetic
uucauucacacacauauaaauaa

SEQ ID NO: 28053 - RNA, 24 nt, Artificial Sequence
  Synthetic
auucauucacacacauauaaauaa

SEQ ID NO: 28054 - RNA, 21 nt, Artificial Sequence
  Synthetic
cauuaaaaacaaccuaaauaa

SEQ ID NO: 28055 - RNA, 24 nt, Artificial Sequence
  Synthetic
aggcauuaaaaacaaccuaaauaa

SEQ ID NO: 28056 - RNA, 18 nt, Artificial Sequence
  Synthetic
cuuguuggaauuaaauaa

SEQ ID NO: 28057 - RNA, 19 nt, Artificial Sequence
  Synthetic
ucuuguuggaauuaaauaa

SEQ ID NO: 28058 - RNA, 20 nt, Artificial Sequence
  Synthetic
cucuuguuggaauuaaauaa

SEQ ID NO: 28059 - RNA, 21 nt, Artificial Sequence
  Synthetic
acucuuguuggaauuaaauaa

SEQ ID NO: 28060 - RNA, 22 nt, Artificial Sequence
  Synthetic
aacucuuguuggaauuaaauaa

SEQ ID NO: 28061 - RNA, 24 nt, Artificial Sequence
  Synthetic
agaacucuuguuggaauuaaauaa

SEQ ID NO: 28062 - RNA, 18 nt, Artificial Sequence
  Synthetic
caaguguacauuaaauaa

SEQ ID NO: 28063 - RNA, 19 nt, Artificial Sequence
  Synthetic
ucaaguguacauuaaauaa

SEQ ID NO: 28064 - RNA, 20 nt, Artificial Sequence
  Synthetic
aucaaguguacauuaaauaa

SEQ ID NO: 28065 - RNA, 21 nt, Artificial Sequence
  Synthetic
aaucaaguguacauuaaauaa

SEQ ID NO: 28066 - RNA, 22 nt, Artificial Sequence
  Synthetic
aaaucaaguguacauuaaauaa

SEQ ID NO: 28067 - RNA, 23 nt, Artificial Sequence
  Synthetic
caaaucaaguguacauuaaauaa

SEQ ID NO: 28068 - RNA, 24 nt, Artificial Sequence
  Synthetic
ucaaaucaaguguacauuaaauaa

SEQ ID NO: 28069 - RNA, 18 nt, Artificial Sequence
  Synthetic
acuguaggggaccaauaa

SEQ ID NO: 28070 - RNA, 19 nt, Artificial Sequence
  Synthetic
aacuguaggggaccaauaa

SEQ ID NO: 28071 - RNA, 21 nt, Artificial Sequence
  Synthetic
agaacuguaggggaccaauaa

SEQ ID NO: 28072 - RNA, 22 nt, Artificial Sequence
  Synthetic
uagaacuguaggggaccaauaa

SEQ ID NO: 28073 - RNA, 24 nt, Artificial Sequence
  Synthetic
aguagaacuguaggggaccaauaa

SEQ ID NO: 28074 - RNA, 18 nt, Artificial Sequence
  Synthetic
uagugaaagccccaauaa

SEQ ID NO: 28075 - RNA, 19 nt, Artificial Sequence
  Synthetic
auagugaaagccccaauaa

SEQ ID NO: 28076 - RNA, 20 nt, Artificial Sequence
  Synthetic
uauagugaaagccccaauaa

SEQ ID NO: 28077 - RNA, 21 nt, Artificial Sequence
  Synthetic
uuauagugaaagccccaauaa

SEQ ID NO: 28078 - RNA, 22 nt, Artificial Sequence
  Synthetic
auuauagugaaagccccaauaa

SEQ ID NO: 28079 - RNA, 23 nt, Artificial Sequence
  Synthetic
uauuauagugaaagccccaauaa

SEQ ID NO: 28080 - RNA, 24 nt, Artificial Sequence
  Synthetic
auauuauagugaaagccccaauaa

SEQ ID NO: 28081 - RNA, 18 nt, Artificial Sequence
  Synthetic
auguuaugaugucaauaa

SEQ ID NO: 28082 - RNA, 19 nt, Artificial Sequence
  Synthetic
aauguuaugaugucaauaa

SEQ ID NO: 28083 - RNA, 20 nt, Artificial Sequence
  Synthetic
caauguuaugaugucaauaa

SEQ ID NO: 28084 - RNA, 21 nt, Artificial Sequence
  Synthetic
ucaauguuaugaugucaauaa

SEQ ID NO: 28085 - RNA, 22 nt, Artificial Sequence
  Synthetic
cucaauguuaugaugucaauaa

SEQ ID NO: 28086 - RNA, 23 nt, Artificial Sequence
  Synthetic
acucaauguuaugaugucaauaa

SEQ ID NO: 28087 - RNA, 24 nt, Artificial Sequence
  Synthetic
cacucaauguuaugaugucaauaa

SEQ ID NO: 28088 - RNA, 18 nt, Artificial Sequence
  Synthetic
ccuucauguauucaauaa

SEQ ID NO: 28089 - RNA, 19 nt, Artificial Sequence
  Synthetic
uccuucauguauucaauaa

SEQ ID NO: 28090 - RNA, 20 nt, Artificial Sequence
  Synthetic
uuccuucauguauucaauaa

SEQ ID NO: 28091 - RNA, 22 nt, Artificial Sequence
  Synthetic
uguuccuucauguauucaauaa

SEQ ID NO: 28092 - RNA, 23 nt, Artificial Sequence
  Synthetic
uuguuccuucauguauucaauaa

SEQ ID NO: 28093 - RNA, 24 nt, Artificial Sequence
  Synthetic
uuuguuccuucauguauucaauaa

SEQ ID NO: 28094 - RNA, 18 nt, Artificial Sequence
  Synthetic
caucaggauccagaauaa

SEQ ID NO: 28095 - RNA, 19 nt, Artificial Sequence
  Synthetic
acaucaggauccagaauaa

SEQ ID NO: 28096 - RNA, 21 nt, Artificial Sequence
  Synthetic
agacaucaggauccagaauaa

SEQ ID NO: 28097 - RNA, 22 nt, Artificial Sequence
  Synthetic
uagacaucaggauccagaauaa

SEQ ID NO: 28098 - RNA, 23 nt, Artificial Sequence
  Synthetic
auagacaucaggauccagaauaa

SEQ ID NO: 28099 - RNA, 24 nt, Artificial Sequence
  Synthetic
cauagacaucaggauccagaauaa

SEQ ID NO: 28100 - RNA, 18 nt, Artificial Sequence
  Synthetic
aaccuggugcuagaauaa

SEQ ID NO: 28101 - RNA, 19 nt, Artificial Sequence
  Synthetic
caaccuggugcuagaauaa

SEQ ID NO: 28102 - RNA, 20 nt, Artificial Sequence
  Synthetic
acaaccuggugcuagaauaa

SEQ ID NO: 28103 - RNA, 21 nt, Artificial Sequence
  Synthetic
cacaaccuggugcuagaauaa

SEQ ID NO: 28104 - RNA, 22 nt, Artificial Sequence
  Synthetic
ucacaaccuggugcuagaauaa

SEQ ID NO: 28105 - RNA, 23 nt, Artificial Sequence
  Synthetic
uucacaaccuggugcuagaauaa

SEQ ID NO: 28106 - RNA, 24 nt, Artificial Sequence
  Synthetic
uuucacaaccuggugcuagaauaa

SEQ ID NO: 28107 - RNA, 18 nt, Artificial Sequence
  Synthetic
aagaauugucuagaauaa

SEQ ID NO: 28108 - RNA, 19 nt, Artificial Sequence
  Synthetic
caagaauugucuagaauaa

SEQ ID NO: 28109 - RNA, 20 nt, Artificial Sequence
  Synthetic
acaagaauugucuagaauaa

SEQ ID NO: 28110 - RNA, 21 nt, Artificial Sequence
  Synthetic
uacaagaauugucuagaauaa

SEQ ID NO: 28111 - RNA, 23 nt, Artificial Sequence
  Synthetic
aguacaagaauugucuagaauaa

SEQ ID NO: 28112 - RNA, 24 nt, Artificial Sequence
  Synthetic
caguacaagaauugucuagaauaa

SEQ ID NO: 28113 - RNA, 21 nt, Artificial Sequence
  Synthetic
auuaacuuuaccuuggaauaa

SEQ ID NO: 28114 - RNA, 22 nt, Artificial Sequence
  Synthetic
aauuaacuuuaccuuggaauaa

SEQ ID NO: 28115 - RNA, 23 nt, Artificial Sequence
  Synthetic
uaauuaacuuuaccuuggaauaa

SEQ ID NO: 28116 - RNA, 21 nt, Artificial Sequence
  Synthetic
caauaauaguuuuuggaauaa

SEQ ID NO: 28117 - RNA, 22 nt, Artificial Sequence
  Synthetic
ccaauaauaguuuuuggaauaa

SEQ ID NO: 28118 - RNA, 23 nt, Artificial Sequence
  Synthetic
cccaauaauaguuuuuggaauaa

SEQ ID NO: 28119 - RNA, 24 nt, Artificial Sequence
  Synthetic
acccaauaauaguuuuuggaauaa

SEQ ID NO: 28120 - RNA, 19 nt, Artificial Sequence
  Synthetic
aggaacagacaaugaauaa

SEQ ID NO: 28121 - RNA, 20 nt, Artificial Sequence
  Synthetic
aaggaacagacaaugaauaa

SEQ ID NO: 28122 - RNA, 24 nt, Artificial Sequence
  Synthetic
ugggaaggaacagacaaugaauaa

SEQ ID NO: 28123 - RNA, 18 nt, Artificial Sequence
  Synthetic
uugacuaauaaugaauaa

SEQ ID NO: 28124 - RNA, 19 nt, Artificial Sequence
  Synthetic
auugacuaauaaugaauaa

SEQ ID NO: 28125 - RNA, 21 nt, Artificial Sequence
  Synthetic
ugauugacuaauaaugaauaa

SEQ ID NO: 28126 - RNA, 22 nt, Artificial Sequence
  Synthetic
uugauugacuaauaaugaauaa

SEQ ID NO: 28127 - RNA, 24 nt, Artificial Sequence
  Synthetic
uguugauugacuaauaaugaauaa

SEQ ID NO: 28128 - RNA, 19 nt, Artificial Sequence
  Synthetic
aggagcuauuaaugaauaa

SEQ ID NO: 28129 - RNA, 21 nt, Artificial Sequence
  Synthetic
ugaggagcuauuaaugaauaa

SEQ ID NO: 28130 - RNA, 22 nt, Artificial Sequence
  Synthetic
augaggagcuauuaaugaauaa

SEQ ID NO: 28131 - RNA, 23 nt, Artificial Sequence
  Synthetic
aaugaggagcuauuaaugaauaa

SEQ ID NO: 28132 - RNA, 24 nt, Artificial Sequence
  Synthetic
caaugaggagcuauuaaugaauaa

SEQ ID NO: 28133 - RNA, 18 nt, Artificial Sequence
  Synthetic
ucacuguauuuugaauaa

SEQ ID NO: 28134 - RNA, 19 nt, Artificial Sequence
  Synthetic
uucacuguauuuugaauaa

SEQ ID NO: 28135 - RNA, 20 nt, Artificial Sequence
  Synthetic
auucacuguauuuugaauaa

SEQ ID NO: 28136 - RNA, 22 nt, Artificial Sequence
  Synthetic
ugauucacuguauuuugaauaa

SEQ ID NO: 28137 - RNA, 23 nt, Artificial Sequence
  Synthetic
augauucacuguauuuugaauaa

SEQ ID NO: 28138 - RNA, 24 nt, Artificial Sequence
  Synthetic
aaugauucacuguauuuugaauaa

SEQ ID NO: 28139 - RNA, 18 nt, Artificial Sequence
  Synthetic
ugcaugccuuuugaauaa

SEQ ID NO: 28140 - RNA, 19 nt, Artificial Sequence
  Synthetic
uugcaugccuuuugaauaa

SEQ ID NO: 28141 - RNA, 20 nt, Artificial Sequence
  Synthetic
uuugcaugccuuuugaauaa

SEQ ID NO: 28142 - RNA, 21 nt, Artificial Sequence
  Synthetic
uuuugcaugccuuuugaauaa

SEQ ID NO: 28143 - RNA, 22 nt, Artificial Sequence
  Synthetic
uuuuugcaugccuuuugaauaa

SEQ ID NO: 28144 - RNA, 24 nt, Artificial Sequence
  Synthetic
aguuuuugcaugccuuuugaauaa

SEQ ID NO: 28145 - RNA, 18 nt, Artificial Sequence
  Synthetic
uagacuacaaaauaauaa

SEQ ID NO: 28146 - RNA, 19 nt, Artificial Sequence
  Synthetic
auagacuacaaaauaauaa

SEQ ID NO: 28147 - RNA, 20 nt, Artificial Sequence
  Synthetic
uauagacuacaaaauaauaa

SEQ ID NO: 28148 - RNA, 21 nt, Artificial Sequence
  Synthetic
uuauagacuacaaaauaauaa

SEQ ID NO: 28149 - RNA, 22 nt, Artificial Sequence
  Synthetic
auuauagacuacaaaauaauaa

SEQ ID NO: 28150 - RNA, 23 nt, Artificial Sequence
  Synthetic
uauuauagacuacaaaauaauaa

SEQ ID NO: 28151 - RNA, 24 nt, Artificial Sequence
  Synthetic
uuauuauagacuacaaaauaauaa

SEQ ID NO: 28152 - RNA, 18 nt, Artificial Sequence
  Synthetic
acccaagacacauaauaa

SEQ ID NO: 28153 - RNA, 19 nt, Artificial Sequence
  Synthetic
aacccaagacacauaauaa

SEQ ID NO: 28154 - RNA, 20 nt, Artificial Sequence
  Synthetic
caacccaagacacauaauaa

SEQ ID NO: 28155 - RNA, 22 nt, Artificial Sequence
  Synthetic
agcaacccaagacacauaauaa

SEQ ID NO: 28156 - RNA, 24 nt, Artificial Sequence
  Synthetic
agagcaacccaagacacauaauaa

SEQ ID NO: 28157 - RNA, 18 nt, Artificial Sequence
  Synthetic
uacuguuggcuguaauaa

SEQ ID NO: 28158 - RNA, 19 nt, Artificial Sequence
  Synthetic
cuacuguuggcuguaauaa

SEQ ID NO: 28159 - RNA, 20 nt, Artificial Sequence
  Synthetic
acuacuguuggcuguaauaa

SEQ ID NO: 28160 - RNA, 21 nt, Artificial Sequence
  Synthetic
aacuacuguuggcuguaauaa

SEQ ID NO: 28161 - RNA, 22 nt, Artificial Sequence
  Synthetic
aaacuacuguuggcuguaauaa

SEQ ID NO: 28162 - RNA, 23 nt, Artificial Sequence
  Synthetic
aaaacuacuguuggcuguaauaa

SEQ ID NO: 28163 - RNA, 24 nt, Artificial Sequence
  Synthetic
uaaaacuacuguuggcuguaauaa

SEQ ID NO: 28164 - RNA, 18 nt, Artificial Sequence
  Synthetic
aauguuaccuuuuaauaa

SEQ ID NO: 28165 - RNA, 19 nt, Artificial Sequence
  Synthetic
uaauguuaccuuuuaauaa

SEQ ID NO: 28166 - RNA, 20 nt, Artificial Sequence
  Synthetic
auaauguuaccuuuuaauaa

SEQ ID NO: 28167 - RNA, 21 nt, Artificial Sequence
  Synthetic
cauaauguuaccuuuuaauaa

SEQ ID NO: 28168 - RNA, 22 nt, Artificial Sequence
  Synthetic
ccauaauguuaccuuuuaauaa

SEQ ID NO: 28169 - RNA, 23 nt, Artificial Sequence
  Synthetic
uccauaauguuaccuuuuaauaa

SEQ ID NO: 28170 - RNA, 21 nt, Artificial Sequence
  Synthetic
aaaguugaguuuuuuuaauaa

SEQ ID NO: 28171 - RNA, 23 nt, Artificial Sequence
  Synthetic
agaaaguugaguuuuuuuaauaa

SEQ ID NO: 28172 - RNA, 24 nt, Artificial Sequence
  Synthetic
uagaaaguugaguuuuuuuaauaa

SEQ ID NO: 28173 - RNA, 19 nt, Artificial Sequence
  Synthetic
uggugaaguuuaaacauaa

SEQ ID NO: 28174 - RNA, 20 nt, Artificial Sequence
  Synthetic
auggugaaguuuaaacauaa

SEQ ID NO: 28175 - RNA, 21 nt, Artificial Sequence
  Synthetic
uauggugaaguuuaaacauaa

SEQ ID NO: 28176 - RNA, 22 nt, Artificial Sequence
  Synthetic
uuauggugaaguuuaaacauaa

SEQ ID NO: 28177 - RNA, 23 nt, Artificial Sequence
  Synthetic
auuauggugaaguuuaaacauaa

SEQ ID NO: 28178 - RNA, 24 nt, Artificial Sequence
  Synthetic
cauuauggugaaguuuaaacauaa

SEQ ID NO: 28179 - RNA, 18 nt, Artificial Sequence
  Synthetic
uacuaaauuaacacauaa

SEQ ID NO: 28180 - RNA, 19 nt, Artificial Sequence
  Synthetic
auacuaaauuaacacauaa

SEQ ID NO: 28181 - RNA, 21 nt, Artificial Sequence
  Synthetic
agauacuaaauuaacacauaa

SEQ ID NO: 28182 - RNA, 22 nt, Artificial Sequence
  Synthetic
uagauacuaaauuaacacauaa

SEQ ID NO: 28183 - RNA, 23 nt, Artificial Sequence
  Synthetic
uuagauacuaaauuaacacauaa

SEQ ID NO: 28184 - RNA, 24 nt, Artificial Sequence
  Synthetic
cuuagauacuaaauuaacacauaa

SEQ ID NO: 28185 - RNA, 18 nt, Artificial Sequence
  Synthetic
auacguaacuacacauaa

SEQ ID NO: 28186 - RNA, 19 nt, Artificial Sequence
  Synthetic
aauacguaacuacacauaa

SEQ ID NO: 28187 - RNA, 20 nt, Artificial Sequence
  Synthetic
uaauacguaacuacacauaa

SEQ ID NO: 28188 - RNA, 21 nt, Artificial Sequence
  Synthetic
cuaauacguaacuacacauaa

SEQ ID NO: 28189 - RNA, 22 nt, Artificial Sequence
  Synthetic
ccuaauacguaacuacacauaa

SEQ ID NO: 28190 - RNA, 23 nt, Artificial Sequence
  Synthetic
cccuaauacguaacuacacauaa

SEQ ID NO: 28191 - RNA, 19 nt, Artificial Sequence
  Synthetic
aguuacagcaugcacauaa

SEQ ID NO: 28192 - RNA, 22 nt, Artificial Sequence
  Synthetic
uggaguuacagcaugcacauaa

SEQ ID NO: 28193 - RNA, 18 nt, Artificial Sequence
  Synthetic
ugguuuuauaauacauaa

SEQ ID NO: 28194 - RNA, 19 nt, Artificial Sequence
  Synthetic
augguuuuauaauacauaa

SEQ ID NO: 28195 - RNA, 20 nt, Artificial Sequence
  Synthetic
caugguuuuauaauacauaa

SEQ ID NO: 28196 - RNA, 22 nt, Artificial Sequence
  Synthetic
agcaugguuuuauaauacauaa

SEQ ID NO: 28197 - RNA, 24 nt, Artificial Sequence
  Synthetic
agagcaugguuuuauaauacauaa

SEQ ID NO: 28198 - RNA, 18 nt, Artificial Sequence
  Synthetic
auggggaauauuacauaa

SEQ ID NO: 28199 - RNA, 19 nt, Artificial Sequence
  Synthetic
aauggggaauauuacauaa

SEQ ID NO: 28200 - RNA, 20 nt, Artificial Sequence
  Synthetic
uaauggggaauauuacauaa

SEQ ID NO: 28201 - RNA, 22 nt, Artificial Sequence
  Synthetic
aguaauggggaauauuacauaa

SEQ ID NO: 28202 - RNA, 23 nt, Artificial Sequence
  Synthetic
uaguaauggggaauauuacauaa

SEQ ID NO: 28203 - RNA, 24 nt, Artificial Sequence
  Synthetic
auaguaauggggaauauuacauaa

SEQ ID NO: 28204 - RNA, 18 nt, Artificial Sequence
  Synthetic
cagauuuuaugaccauaa

SEQ ID NO: 28205 - RNA, 20 nt, Artificial Sequence
  Synthetic
ugcagauuuuaugaccauaa

SEQ ID NO: 28206 - RNA, 18 nt, Artificial Sequence
  Synthetic
accauaucaaagccauaa

SEQ ID NO: 28207 - RNA, 19 nt, Artificial Sequence
  Synthetic
uaccauaucaaagccauaa

SEQ ID NO: 28208 - RNA, 20 nt, Artificial Sequence
  Synthetic
auaccauaucaaagccauaa

SEQ ID NO: 28209 - RNA, 21 nt, Artificial Sequence
  Synthetic
cauaccauaucaaagccauaa

SEQ ID NO: 28210 - RNA, 23 nt, Artificial Sequence
  Synthetic
cgcauaccauaucaaagccauaa

SEQ ID NO: 28211 - RNA, 24 nt, Artificial Sequence
  Synthetic
acgcauaccauaucaaagccauaa

SEQ ID NO: 28212 - RNA, 19 nt, Artificial Sequence
  Synthetic
aggaaaucacugagcauaa

SEQ ID NO: 28213 - RNA, 20 nt, Artificial Sequence
  Synthetic
uaggaaaucacugagcauaa

SEQ ID NO: 28214 - RNA, 21 nt, Artificial Sequence
  Synthetic
uuaggaaaucacugagcauaa

SEQ ID NO: 28215 - RNA, 22 nt, Artificial Sequence
  Synthetic
auuaggaaaucacugagcauaa

SEQ ID NO: 28216 - RNA, 23 nt, Artificial Sequence
  Synthetic
uauuaggaaaucacugagcauaa

SEQ ID NO: 28217 - RNA, 24 nt, Artificial Sequence
  Synthetic
cuauuaggaaaucacugagcauaa

SEQ ID NO: 28218 - RNA, 18 nt, Artificial Sequence
  Synthetic
agacauacacuagcauaa

SEQ ID NO: 28219 - RNA, 19 nt, Artificial Sequence
  Synthetic
aagacauacacuagcauaa

SEQ ID NO: 28220 - RNA, 21 nt, Artificial Sequence
  Synthetic
agaagacauacacuagcauaa

SEQ ID NO: 28221 - RNA, 22 nt, Artificial Sequence
  Synthetic
uagaagacauacacuagcauaa

SEQ ID NO: 28222 - RNA, 23 nt, Artificial Sequence
  Synthetic
cuagaagacauacacuagcauaa

SEQ ID NO: 28223 - RNA, 24 nt, Artificial Sequence
  Synthetic
acuagaagacauacacuagcauaa

SEQ ID NO: 28224 - RNA, 18 nt, Artificial Sequence
  Synthetic
ugggcuaauguagcauaa

SEQ ID NO: 28225 - RNA, 19 nt, Artificial Sequence
  Synthetic
uugggcuaauguagcauaa

SEQ ID NO: 28226 - RNA, 20 nt, Artificial Sequence
  Synthetic
uuugggcuaauguagcauaa

SEQ ID NO: 28227 - RNA, 21 nt, Artificial Sequence
  Synthetic
uuuugggcuaauguagcauaa

SEQ ID NO: 28228 - RNA, 22 nt, Artificial Sequence
  Synthetic
auuuugggcuaauguagcauaa

SEQ ID NO: 28229 - RNA, 23 nt, Artificial Sequence
  Synthetic
aauuuugggcuaauguagcauaa

SEQ ID NO: 28230 - RNA, 18 nt, Artificial Sequence
  Synthetic
ccucugaaaaacucauaa

SEQ ID NO: 28231 - RNA, 20 nt, Artificial Sequence
  Synthetic
agccucugaaaaacucauaa

SEQ ID NO: 28232 - RNA, 21 nt, Artificial Sequence
  Synthetic
uagccucugaaaaacucauaa

SEQ ID NO: 28233 - RNA, 23 nt, Artificial Sequence
  Synthetic
uguagccucugaaaaacucauaa

SEQ ID NO: 28234 - RNA, 24 nt, Artificial Sequence
  Synthetic
auguagccucugaaaaacucauaa

SEQ ID NO: 28235 - RNA, 18 nt, Artificial Sequence
  Synthetic
aagaaaauggccucauaa

SEQ ID NO: 28236 - RNA, 19 nt, Artificial Sequence
  Synthetic
uaagaaaauggccucauaa

SEQ ID NO: 28237 - RNA, 21 nt, Artificial Sequence
  Synthetic
aguaagaaaauggccucauaa

SEQ ID NO: 28238 - RNA, 22 nt, Artificial Sequence
  Synthetic
uaguaagaaaauggccucauaa

SEQ ID NO: 28239 - RNA, 23 nt, Artificial Sequence
  Synthetic
uuaguaagaaaauggccucauaa

SEQ ID NO: 28240 - RNA, 24 nt, Artificial Sequence
  Synthetic
auuaguaagaaaauggccucauaa

SEQ ID NO: 28241 - RNA, 18 nt, Artificial Sequence
  Synthetic
uuuuaaaguaucucauaa

SEQ ID NO: 28242 - RNA, 19 nt, Artificial Sequence
  Synthetic
auuuuaaaguaucucauaa

SEQ ID NO: 28243 - RNA, 21 nt, Artificial Sequence
  Synthetic
agauuuuaaaguaucucauaa

SEQ ID NO: 28244 - RNA, 22 nt, Artificial Sequence
  Synthetic
cagauuuuaaaguaucucauaa

SEQ ID NO: 28245 - RNA, 23 nt, Artificial Sequence
  Synthetic
ucagauuuuaaaguaucucauaa

SEQ ID NO: 28246 - RNA, 24 nt, Artificial Sequence
  Synthetic
uucagauuuuaaaguaucucauaa

SEQ ID NO: 28247 - RNA, 19 nt, Artificial Sequence
  Synthetic
uguucuuaugucuucauaa

SEQ ID NO: 28248 - RNA, 20 nt, Artificial Sequence
  Synthetic
cuguucuuaugucuucauaa

SEQ ID NO: 28249 - RNA, 21 nt, Artificial Sequence
  Synthetic
ucuguucuuaugucuucauaa

SEQ ID NO: 28250 - RNA, 22 nt, Artificial Sequence
  Synthetic
uucuguucuuaugucuucauaa

SEQ ID NO: 28251 - RNA, 23 nt, Artificial Sequence
  Synthetic
uuucuguucuuaugucuucauaa

SEQ ID NO: 28252 - RNA, 24 nt, Artificial Sequence
  Synthetic
auuucuguucuuaugucuucauaa

SEQ ID NO: 28253 - RNA, 22 nt, Artificial Sequence
  Synthetic
ugaaauagaaaugaaaagauaa

SEQ ID NO: 28254 - RNA, 23 nt, Artificial Sequence
  Synthetic
augaaauagaaaugaaaagauaa

SEQ ID NO: 28255 - RNA, 24 nt, Artificial Sequence
  Synthetic
aaugaaauagaaaugaaaagauaa

SEQ ID NO: 28256 - RNA, 18 nt, Artificial Sequence
  Synthetic
cauauaaaaugaagauaa

SEQ ID NO: 28257 - RNA, 19 nt, Artificial Sequence
  Synthetic
ccauauaaaaugaagauaa

SEQ ID NO: 28258 - RNA, 20 nt, Artificial Sequence
  Synthetic
uccauauaaaaugaagauaa

SEQ ID NO: 28259 - RNA, 21 nt, Artificial Sequence
  Synthetic
uuccauauaaaaugaagauaa

SEQ ID NO: 28260 - RNA, 22 nt, Artificial Sequence
  Synthetic
cuuccauauaaaaugaagauaa

SEQ ID NO: 28261 - RNA, 23 nt, Artificial Sequence
  Synthetic
ccuuccauauaaaaugaagauaa

SEQ ID NO: 28262 - RNA, 24 nt, Artificial Sequence
  Synthetic
uccuuccauauaaaaugaagauaa

SEQ ID NO: 28263 - RNA, 19 nt, Artificial Sequence
  Synthetic
aggcagugucugaagauaa

SEQ ID NO: 28264 - RNA, 20 nt, Artificial Sequence
  Synthetic
aaggcagugucugaagauaa

SEQ ID NO: 28265 - RNA, 22 nt, Artificial Sequence
  Synthetic
agaaggcagugucugaagauaa

SEQ ID NO: 28266 - RNA, 23 nt, Artificial Sequence
  Synthetic
cagaaggcagugucugaagauaa

SEQ ID NO: 28267 - RNA, 24 nt, Artificial Sequence
  Synthetic
ucagaaggcagugucugaagauaa

SEQ ID NO: 28268 - RNA, 18 nt, Artificial Sequence
  Synthetic
agucugauuuuaagauaa

SEQ ID NO: 28269 - RNA, 19 nt, Artificial Sequence
  Synthetic
aagucugauuuuaagauaa

SEQ ID NO: 28270 - RNA, 20 nt, Artificial Sequence
  Synthetic
caagucugauuuuaagauaa

SEQ ID NO: 28271 - RNA, 21 nt, Artificial Sequence
  Synthetic
acaagucugauuuuaagauaa

SEQ ID NO: 28272 - RNA, 22 nt, Artificial Sequence
  Synthetic
cacaagucugauuuuaagauaa

SEQ ID NO: 28273 - RNA, 23 nt, Artificial Sequence
  Synthetic
ucacaagucugauuuuaagauaa

SEQ ID NO: 28274 - RNA, 24 nt, Artificial Sequence
  Synthetic
uucacaagucugauuuuaagauaa

SEQ ID NO: 28275 - RNA, 18 nt, Artificial Sequence
  Synthetic
agcuuuucaaacagauaa

SEQ ID NO: 28276 - RNA, 19 nt, Artificial Sequence
  Synthetic
aagcuuuucaaacagauaa

SEQ ID NO: 28277 - RNA, 20 nt, Artificial Sequence
  Synthetic
uaagcuuuucaaacagauaa

SEQ ID NO: 28278 - RNA, 21 nt, Artificial Sequence
  Synthetic
auaagcuuuucaaacagauaa

SEQ ID NO: 28279 - RNA, 22 nt, Artificial Sequence
  Synthetic
aauaagcuuuucaaacagauaa

SEQ ID NO: 28280 - RNA, 23 nt, Artificial Sequence
  Synthetic
caauaagcuuuucaaacagauaa

SEQ ID NO: 28281 - RNA, 24 nt, Artificial Sequence
  Synthetic
acaauaagcuuuucaaacagauaa

SEQ ID NO: 28282 - RNA, 18 nt, Artificial Sequence
  Synthetic
ucuuaaagaaacagauaa

SEQ ID NO: 28283 - RNA, 20 nt, Artificial Sequence
  Synthetic
agucuuaaagaaacagauaa

SEQ ID NO: 28284 - RNA, 23 nt, Artificial Sequence
  Synthetic
uggagucuuaaagaaacagauaa

SEQ ID NO: 28285 - RNA, 24 nt, Artificial Sequence
  Synthetic
cuggagucuuaaagaaacagauaa

SEQ ID NO: 28286 - RNA, 18 nt, Artificial Sequence
  Synthetic
uaacuuacuuccagauaa

SEQ ID NO: 28287 - RNA, 21 nt, Artificial Sequence
  Synthetic
ugguaacuuacuuccagauaa

SEQ ID NO: 28288 - RNA, 22 nt, Artificial Sequence
  Synthetic
uugguaacuuacuuccagauaa

SEQ ID NO: 28289 - RNA, 23 nt, Artificial Sequence
  Synthetic
cuugguaacuuacuuccagauaa

SEQ ID NO: 28290 - RNA, 24 nt, Artificial Sequence
  Synthetic
acuugguaacuuacuuccagauaa

SEQ ID NO: 28291 - RNA, 18 nt, Artificial Sequence
  Synthetic
ugaagaaaauagagauaa

SEQ ID NO: 28292 - RNA, 19 nt, Artificial Sequence
  Synthetic
cugaagaaaauagagauaa

SEQ ID NO: 28293 - RNA, 20 nt, Artificial Sequence
  Synthetic
ccugaagaaaauagagauaa

SEQ ID NO: 28294 - RNA, 21 nt, Artificial Sequence
  Synthetic
accugaagaaaauagagauaa

SEQ ID NO: 28295 - RNA, 22 nt, Artificial Sequence
  Synthetic
uaccugaagaaaauagagauaa

SEQ ID NO: 28296 - RNA, 23 nt, Artificial Sequence
  Synthetic
auaccugaagaaaauagagauaa

SEQ ID NO: 28297 - RNA, 24 nt, Artificial Sequence
  Synthetic
uauaccugaagaaaauagagauaa

SEQ ID NO: 28298 - RNA, 18 nt, Artificial Sequence
  Synthetic
ccuuguacuucaggauaa

SEQ ID NO: 28299 - RNA, 19 nt, Artificial Sequence
  Synthetic
uccuuguacuucaggauaa

SEQ ID NO: 28300 - RNA, 21 nt, Artificial Sequence
  Synthetic
cguccuuguacuucaggauaa

SEQ ID NO: 28301 - RNA, 22 nt, Artificial Sequence
  Synthetic
ucguccuuguacuucaggauaa

SEQ ID NO: 28302 - RNA, 24 nt, Artificial Sequence
  Synthetic
cgucguccuuguacuucaggauaa

SEQ ID NO: 28303 - RNA, 19 nt, Artificial Sequence
  Synthetic
uguguguuguggaggauaa

SEQ ID NO: 28304 - RNA, 20 nt, Artificial Sequence
  Synthetic
uggaacagacuggcggauaa

SEQ ID NO: 28305 - RNA, 21 nt, Artificial Sequence
  Synthetic
cuggaacagacuggcggauaa

SEQ ID NO: 28306 - RNA, 22 nt, Artificial Sequence
  Synthetic
ucuggaacagacuggcggauaa

SEQ ID NO: 28307 - RNA, 23 nt, Artificial Sequence
  Synthetic
aucuggaacagacuggcggauaa

SEQ ID NO: 28308 - RNA, 18 nt, Artificial Sequence
  Synthetic
uagcuuuuccagggauaa

SEQ ID NO: 28309 - RNA, 20 nt, Artificial Sequence
  Synthetic
uguagcuuuuccagggauaa

SEQ ID NO: 28310 - RNA, 21 nt, Artificial Sequence
  Synthetic
uuguagcuuuuccagggauaa

SEQ ID NO: 28311 - RNA, 22 nt, Artificial Sequence
  Synthetic
uuuguagcuuuuccagggauaa

SEQ ID NO: 28312 - RNA, 23 nt, Artificial Sequence
  Synthetic
auuuguagcuuuuccagggauaa

SEQ ID NO: 28313 - RNA, 18 nt, Artificial Sequence
  Synthetic
cauuguguguggggauaa

SEQ ID NO: 28314 - RNA, 19 nt, Artificial Sequence
  Synthetic
ucauuguguguggggauaa

SEQ ID NO: 28315 - RNA, 20 nt, Artificial Sequence
  Synthetic
aucauuguguguggggauaa

SEQ ID NO: 28316 - RNA, 22 nt, Artificial Sequence
  Synthetic
ugaucauuguguguggggauaa

SEQ ID NO: 28317 - RNA, 23 nt, Artificial Sequence
  Synthetic
uugaucauuguguguggggauaa

SEQ ID NO: 28318 - RNA, 24 nt, Artificial Sequence
  Synthetic
auugaucauuguguguggggauaa

SEQ ID NO: 28319 - RNA, 18 nt, Artificial Sequence
  Synthetic
cuuaaugccuuuggauaa

SEQ ID NO: 28320 - RNA, 20 nt, Artificial Sequence
  Synthetic
ugcuuaaugccuuuggauaa

SEQ ID NO: 28321 - RNA, 21 nt, Artificial Sequence
  Synthetic
uugcuuaaugccuuuggauaa

SEQ ID NO: 28322 - RNA, 22 nt, Artificial Sequence
  Synthetic
auugcuuaaugccuuuggauaa

SEQ ID NO: 28323 - RNA, 23 nt, Artificial Sequence
  Synthetic
cauugcuuaaugccuuuggauaa

SEQ ID NO: 28324 - RNA, 24 nt, Artificial Sequence
  Synthetic
ucauugcuuaaugccuuuggauaa

SEQ ID NO: 28325 - RNA, 18 nt, Artificial Sequence
  Synthetic
agauuucagaaaugauaa

SEQ ID NO: 28326 - RNA, 19 nt, Artificial Sequence
  Synthetic
cagauuucagaaaugauaa

SEQ ID NO: 28327 - RNA, 20 nt, Artificial Sequence
  Synthetic
ucagauuucagaaaugauaa

SEQ ID NO: 28328 - RNA, 21 nt, Artificial Sequence
  Synthetic
uucagauuucagaaaugauaa

SEQ ID NO: 28329 - RNA, 22 nt, Artificial Sequence
  Synthetic
uuucagauuucagaaaugauaa

SEQ ID NO: 28330 - RNA, 23 nt, Artificial Sequence
  Synthetic
auuucagauuucagaaaugauaa

SEQ ID NO: 28331 - RNA, 18 nt, Artificial Sequence
  Synthetic
cacacuguugcaugauaa

SEQ ID NO: 28332 - RNA, 19 nt, Artificial Sequence
  Synthetic
acacacuguugcaugauaa

SEQ ID NO: 28333 - RNA, 20 nt, Artificial Sequence
  Synthetic
cacacacuguugcaugauaa

SEQ ID NO: 28334 - RNA, 21 nt, Artificial Sequence
  Synthetic
ucacacacuguugcaugauaa

SEQ ID NO: 28335 - RNA, 22 nt, Artificial Sequence
  Synthetic
aucacacacuguugcaugauaa

SEQ ID NO: 28336 - RNA, 23 nt, Artificial Sequence
  Synthetic
uaucacacacuguugcaugauaa

SEQ ID NO: 28337 - RNA, 24 nt, Artificial Sequence
  Synthetic
cuaucacacacuguugcaugauaa

SEQ ID NO: 28338 - RNA, 18 nt, Artificial Sequence
  Synthetic
uaacccuugugaugauaa

SEQ ID NO: 28339 - RNA, 19 nt, Artificial Sequence
  Synthetic
uuaacccuugugaugauaa

SEQ ID NO: 28340 - RNA, 20 nt, Artificial Sequence
  Synthetic
uuuaacccuugugaugauaa

SEQ ID NO: 28341 - RNA, 23 nt, Artificial Sequence
  Synthetic
ugguuuaacccuugugaugauaa

SEQ ID NO: 28342 - RNA, 24 nt, Artificial Sequence
  Synthetic
cugguuuaacccuugugaugauaa

SEQ ID NO: 28343 - RNA, 18 nt, Artificial Sequence
  Synthetic
uauuauuauugaugauaa

SEQ ID NO: 28344 - RNA, 19 nt, Artificial Sequence
  Synthetic
auauuauuauugaugauaa

SEQ ID NO: 28345 - RNA, 21 nt, Artificial Sequence
  Synthetic
ugauauuauuauugaugauaa

SEQ ID NO: 28346 - RNA, 22 nt, Artificial Sequence
  Synthetic
augauauuauuauugaugauaa

SEQ ID NO: 28347 - RNA, 23 nt, Artificial Sequence
  Synthetic
caugauauuauuauugaugauaa

SEQ ID NO: 28348 - RNA, 24 nt, Artificial Sequence
  Synthetic
acaugauauuauuauugaugauaa

SEQ ID NO: 28349 - RNA, 18 nt, Artificial Sequence
  Synthetic
ucuugcaggccgugauaa

SEQ ID NO: 28350 - RNA, 19 nt, Artificial Sequence
  Synthetic
aucuugcaggccgugauaa

SEQ ID NO: 28351 - RNA, 23 nt, Artificial Sequence
  Synthetic
cgggaucuugcaggccgugauaa

SEQ ID NO: 28352 - RNA, 24 nt, Artificial Sequence
  Synthetic
acgggaucuugcaggccgugauaa

SEQ ID NO: 28353 - RNA, 21 nt, Artificial Sequence
  Synthetic
uguauucaagauuuuugauaa

SEQ ID NO: 28354 - RNA, 23 nt, Artificial Sequence
  Synthetic
uguguauucaagauuuuugauaa

SEQ ID NO: 28355 - RNA, 18 nt, Artificial Sequence
  Synthetic
auaaacugcaaaauauaa

SEQ ID NO: 28356 - RNA, 20 nt, Artificial Sequence
  Synthetic
ugauaaacugcaaaauauaa

SEQ ID NO: 28357 - RNA, 21 nt, Artificial Sequence
  Synthetic
cugauaaacugcaaaauauaa

SEQ ID NO: 28358 - RNA, 22 nt, Artificial Sequence
  Synthetic
ucugauaaacugcaaaauauaa

SEQ ID NO: 28359 - RNA, 23 nt, Artificial Sequence
  Synthetic
aucugauaaacugcaaaauauaa

SEQ ID NO: 28360 - RNA, 24 nt, Artificial Sequence
  Synthetic
uaucugauaaacugcaaaauauaa

SEQ ID NO: 28361 - RNA, 18 nt, Artificial Sequence
  Synthetic
cccugaaggucaauauaa

SEQ ID NO: 28362 - RNA, 21 nt, Artificial Sequence
  Synthetic
uggcccugaaggucaauauaa

SEQ ID NO: 28363 - RNA, 24 nt, Artificial Sequence
  Synthetic
agguggcccugaaggucaauauaa

SEQ ID NO: 28364 - RNA, 18 nt, Artificial Sequence
  Synthetic
auuuaguugguaauauaa

SEQ ID NO: 28365 - RNA, 19 nt, Artificial Sequence
  Synthetic
uauuuaguugguaauauaa

SEQ ID NO: 28366 - RNA, 20 nt, Artificial Sequence
  Synthetic
auauuuaguugguaauauaa

SEQ ID NO: 28367 - RNA, 21 nt, Artificial Sequence
  Synthetic
aauauuuaguugguaauauaa

SEQ ID NO: 28368 - RNA, 22 nt, Artificial Sequence
  Synthetic
caauauuuaguugguaauauaa

SEQ ID NO: 28369 - RNA, 23 nt, Artificial Sequence
  Synthetic
ucaauauuuaguugguaauauaa

SEQ ID NO: 28370 - RNA, 21 nt, Artificial Sequence
  Synthetic
uuuaaagugcuauuaauauaa

SEQ ID NO: 28371 - RNA, 22 nt, Artificial Sequence
  Synthetic
cuuuaaagugcuauuaauauaa

SEQ ID NO: 28372 - RNA, 23 nt, Artificial Sequence
  Synthetic
acuuuaaagugcuauuaauauaa

SEQ ID NO: 28373 - RNA, 24 nt, Artificial Sequence
  Synthetic
uacuuuaaagugcuauuaauauaa

SEQ ID NO: 28374 - RNA, 18 nt, Artificial Sequence
  Synthetic
accauguauaauauauaa

SEQ ID NO: 28375 - RNA, 19 nt, Artificial Sequence
  Synthetic
aaccauguauaauauauaa

SEQ ID NO: 28376 - RNA, 20 nt, Artificial Sequence
  Synthetic
aaaccauguauaauauauaa

SEQ ID NO: 28377 - RNA, 21 nt, Artificial Sequence
  Synthetic
aaaaccauguauaauauauaa

SEQ ID NO: 28378 - RNA, 22 nt, Artificial Sequence
  Synthetic
aaaaaccauguauaauauauaa

SEQ ID NO: 28379 - RNA, 23 nt, Artificial Sequence
  Synthetic
aaaaaaccauguauaauauauaa

SEQ ID NO: 28380 - RNA, 24 nt, Artificial Sequence
  Synthetic
aaaaaaaccauguauaauauauaa

SEQ ID NO: 28381 - RNA, 18 nt, Artificial Sequence
  Synthetic
acucuuauacauauauaa

SEQ ID NO: 28382 - RNA, 19 nt, Artificial Sequence
  Synthetic
aacucuuauacauauauaa

SEQ ID NO: 28383 - RNA, 22 nt, Artificial Sequence
  Synthetic
aggaacucuuauacauauauaa

SEQ ID NO: 28384 - RNA, 24 nt, Artificial Sequence
  Synthetic
ugaggaacucuuauacauauauaa

SEQ ID NO: 28385 - RNA, 21 nt, Artificial Sequence
  Synthetic
aaaaggaaaggaagacuauaa

SEQ ID NO: 28386 - RNA, 22 nt, Artificial Sequence
  Synthetic
aaaaaggaaaggaagacuauaa

SEQ ID NO: 28387 - RNA, 23 nt, Artificial Sequence
  Synthetic
aaaaaaggaaaggaagacuauaa

SEQ ID NO: 28388 - RNA, 18 nt, Artificial Sequence
  Synthetic
auggcaugaucucuauaa

SEQ ID NO: 28389 - RNA, 19 nt, Artificial Sequence
  Synthetic
aauggcaugaucucuauaa

SEQ ID NO: 28390 - RNA, 21 nt, Artificial Sequence
  Synthetic
ugaauggcaugaucucuauaa

SEQ ID NO: 28391 - RNA, 22 nt, Artificial Sequence
  Synthetic
uugaauggcaugaucucuauaa

SEQ ID NO: 28392 - RNA, 23 nt, Artificial Sequence
  Synthetic
cuugaauggcaugaucucuauaa

SEQ ID NO: 28393 - RNA, 24 nt, Artificial Sequence
  Synthetic
acuugaauggcaugaucucuauaa

SEQ ID NO: 28394 - RNA, 18 nt, Artificial Sequence
  Synthetic
aagcgaauaaauguauaa

SEQ ID NO: 28395 - RNA, 19 nt, Artificial Sequence
  Synthetic
uaagcgaauaaauguauaa

SEQ ID NO: 28396 - RNA, 20 nt, Artificial Sequence
  Synthetic
auaagcgaauaaauguauaa

SEQ ID NO: 28397 - RNA, 21 nt, Artificial Sequence
  Synthetic
aauaagcgaauaaauguauaa

SEQ ID NO: 28398 - RNA, 22 nt, Artificial Sequence
  Synthetic
aaauaagcgaauaaauguauaa

SEQ ID NO: 28399 - RNA, 23 nt, Artificial Sequence
  Synthetic
aaaauaagcgaauaaauguauaa

SEQ ID NO: 28400 - RNA, 24 nt, Artificial Sequence
  Synthetic
aaaaauaagcgaauaaauguauaa

SEQ ID NO: 28401 - RNA, 20 nt, Artificial Sequence
  Synthetic
cggguuuguuaccuguauaa

SEQ ID NO: 28402 - RNA, 21 nt, Artificial Sequence
  Synthetic
acggguuuguuaccuguauaa

SEQ ID NO: 28403 - RNA, 22 nt, Artificial Sequence
  Synthetic
uacggguuuguuaccuguauaa

SEQ ID NO: 28404 - RNA, 23 nt, Artificial Sequence
  Synthetic
cuacggguuuguuaccuguauaa

SEQ ID NO: 28405 - RNA, 24 nt, Artificial Sequence
  Synthetic
ucuacggguuuguuaccuguauaa

SEQ ID NO: 28406 - RNA, 18 nt, Artificial Sequence
  Synthetic
uuaaauuauaaauuauaa

SEQ ID NO: 28407 - RNA, 19 nt, Artificial Sequence
  Synthetic
cuuaaauuauaaauuauaa

SEQ ID NO: 28408 - RNA, 20 nt, Artificial Sequence
  Synthetic
acuuaaauuauaaauuauaa

SEQ ID NO: 28409 - RNA, 21 nt, Artificial Sequence
  Synthetic
uacuuaaauuauaaauuauaa

SEQ ID NO: 28410 - RNA, 22 nt, Artificial Sequence
  Synthetic
uuacuuaaauuauaaauuauaa

SEQ ID NO: 28411 - RNA, 23 nt, Artificial Sequence
  Synthetic
cuuacuuaaauuauaaauuauaa

SEQ ID NO: 28412 - RNA, 19 nt, Artificial Sequence
  Synthetic
uguaugauugccauuauaa

SEQ ID NO: 28413 - RNA, 20 nt, Artificial Sequence
  Synthetic
uuguaugauugccauuauaa

SEQ ID NO: 28414 - RNA, 21 nt, Artificial Sequence
  Synthetic
cuuguaugauugccauuauaa

SEQ ID NO: 28415 - RNA, 22 nt, Artificial Sequence
  Synthetic
ucuuguaugauugccauuauaa

SEQ ID NO: 28416 - RNA, 23 nt, Artificial Sequence
  Synthetic
uucuuguaugauugccauuauaa

SEQ ID NO: 28417 - RNA, 24 nt, Artificial Sequence
  Synthetic
uuucuuguaugauugccauuauaa

SEQ ID NO: 28418 - RNA, 18 nt, Artificial Sequence
  Synthetic
ccaugcuuuucauuauaa

SEQ ID NO: 28419 - RNA, 19 nt, Artificial Sequence
  Synthetic
cccaugcuuuucauuauaa

SEQ ID NO: 28420 - RNA, 21 nt, Artificial Sequence
  Synthetic
agcccaugcuuuucauuauaa

SEQ ID NO: 28421 - RNA, 22 nt, Artificial Sequence
  Synthetic
uagcccaugcuuuucauuauaa

SEQ ID NO: 28422 - RNA, 23 nt, Artificial Sequence
  Synthetic
auagcccaugcuuuucauuauaa

SEQ ID NO: 28423 - RNA, 24 nt, Artificial Sequence
  Synthetic
aauagcccaugcuuuucauuauaa

SEQ ID NO: 28424 - RNA, 19 nt, Artificial Sequence
  Synthetic
aggaagggcuauauuauaa

SEQ ID NO: 28425 - RNA, 20 nt, Artificial Sequence
  Synthetic
aaggaagggcuauauuauaa

SEQ ID NO: 28426 - RNA, 23 nt, Artificial Sequence
  Synthetic
aggaaggaagggcuauauuauaa

SEQ ID NO: 28427 - RNA, 24 nt, Artificial Sequence
  Synthetic
aaggaaggaagggcuauauuauaa

SEQ ID NO: 28428 - RNA, 18 nt, Artificial Sequence
  Synthetic
uuugugaggaucuuauaa

SEQ ID NO: 28429 - RNA, 19 nt, Artificial Sequence
  Synthetic
uuuugugaggaucuuauaa

SEQ ID NO: 28430 - RNA, 20 nt, Artificial Sequence
  Synthetic
cuuuugugaggaucuuauaa

SEQ ID NO: 28431 - RNA, 22 nt, Artificial Sequence
  Synthetic
agcuuuugugaggaucuuauaa

SEQ ID NO: 28432 - RNA, 24 nt, Artificial Sequence
  Synthetic
agagcuuuugugaggaucuuauaa

SEQ ID NO: 28433 - RNA, 18 nt, Artificial Sequence
  Synthetic
uguugcucuuucuuauaa

SEQ ID NO: 28434 - RNA, 19 nt, Artificial Sequence
  Synthetic
uuguugcucuuucuuauaa

SEQ ID NO: 28435 - RNA, 20 nt, Artificial Sequence
  Synthetic
uuuguugcucuuucuuauaa

SEQ ID NO: 28436 - RNA, 21 nt, Artificial Sequence
  Synthetic
cuuuguugcucuuucuuauaa

SEQ ID NO: 28437 - RNA, 22 nt, Artificial Sequence
  Synthetic
ucuuuguugcucuuucuuauaa

SEQ ID NO: 28438 - RNA, 23 nt, Artificial Sequence
  Synthetic
uucuuuguugcucuuucuuauaa

SEQ ID NO: 28439 - RNA, 24 nt, Artificial Sequence
  Synthetic
uuucuuuguugcucuuucuuauaa

SEQ ID NO: 28440 - RNA, 18 nt, Artificial Sequence
  Synthetic
auaguuaauaauuuauaa

SEQ ID NO: 28441 - RNA, 20 nt, Artificial Sequence
  Synthetic
agauaguuaauaauuuauaa

SEQ ID NO: 28442 - RNA, 22 nt, Artificial Sequence
  Synthetic
agagauaguuaauaauuuauaa

SEQ ID NO: 28443 - RNA, 23 nt, Artificial Sequence
  Synthetic
uagagauaguuaauaauuuauaa

SEQ ID NO: 28444 - RNA, 24 nt, Artificial Sequence
  Synthetic
uuagagauaguuaauaauuuauaa

SEQ ID NO: 28445 - RNA, 18 nt, Artificial Sequence
  Synthetic
aguggcuuuaauuuauaa

SEQ ID NO: 28446 - RNA, 19 nt, Artificial Sequence
  Synthetic
uaguggcuuuaauuuauaa

SEQ ID NO: 28447 - RNA, 20 nt, Artificial Sequence
  Synthetic
uuaguggcuuuaauuuauaa

SEQ ID NO: 28448 - RNA, 21 nt, Artificial Sequence
  Synthetic
auuaguggcuuuaauuuauaa

SEQ ID NO: 28449 - RNA, 23 nt, Artificial Sequence
  Synthetic
ugauuaguggcuuuaauuuauaa

SEQ ID NO: 28450 - RNA, 24 nt, Artificial Sequence
  Synthetic
uugauuaguggcuuuaauuuauaa

SEQ ID NO: 28451 - RNA, 19 nt, Artificial Sequence
  Synthetic
agcacaacagauuuuauaa

SEQ ID NO: 28452 - RNA, 21 nt, Artificial Sequence
  Synthetic
agagcacaacagauuuuauaa

SEQ ID NO: 28453 - RNA, 22 nt, Artificial Sequence
  Synthetic
cagagcacaacagauuuuauaa

SEQ ID NO: 28454 - RNA, 23 nt, Artificial Sequence
  Synthetic
acagagcacaacagauuuuauaa

SEQ ID NO: 28455 - RNA, 24 nt, Artificial Sequence
  Synthetic
uacagagcacaacagauuuuauaa

SEQ ID NO: 28456 - RNA, 23 nt, Artificial Sequence
  Synthetic
uggacuuauugaaacuuuuauaa

SEQ ID NO: 28457 - RNA, 24 nt, Artificial Sequence
  Synthetic
uuggacuuauugaaacuuuuauaa

SEQ ID NO: 28458 - RNA, 18 nt, Artificial Sequence
  Synthetic
uaauacagauaaaacuaa

SEQ ID NO: 28459 - RNA, 19 nt, Artificial Sequence
  Synthetic
uuaauacagauaaaacuaa

SEQ ID NO: 28460 - RNA, 20 nt, Artificial Sequence
  Synthetic
cuuaauacagauaaaacuaa

SEQ ID NO: 28461 - RNA, 21 nt, Artificial Sequence
  Synthetic
ccuuaauacagauaaaacuaa

SEQ ID NO: 28462 - RNA, 22 nt, Artificial Sequence
  Synthetic
uccuuaauacagauaaaacuaa

SEQ ID NO: 28463 - RNA, 23 nt, Artificial Sequence
  Synthetic
uuccuuaauacagauaaaacuaa

SEQ ID NO: 28464 - RNA, 24 nt, Artificial Sequence
  Synthetic
uuuccuuaauacagauaaaacuaa

SEQ ID NO: 28465 - RNA, 18 nt, Artificial Sequence
  Synthetic
ucaacauguggcaacuaa

SEQ ID NO: 28466 - RNA, 19 nt, Artificial Sequence
  Synthetic
aucaacauguggcaacuaa

SEQ ID NO: 28467 - RNA, 20 nt, Artificial Sequence
  Synthetic
uaucaacauguggcaacuaa

SEQ ID NO: 28468 - RNA, 21 nt, Artificial Sequence
  Synthetic
auaucaacauguggcaacuaa

SEQ ID NO: 28469 - RNA, 22 nt, Artificial Sequence
  Synthetic
aauaucaacauguggcaacuaa

SEQ ID NO: 28470 - RNA, 23 nt, Artificial Sequence
  Synthetic
aaauaucaacauguggcaacuaa

SEQ ID NO: 28471 - RNA, 24 nt, Artificial Sequence
  Synthetic
uaaauaucaacauguggcaacuaa

SEQ ID NO: 28472 - RNA, 19 nt, Artificial Sequence
  Synthetic
ugacuauauugcucacuaa

SEQ ID NO: 28473 - RNA, 20 nt, Artificial Sequence
  Synthetic
uugacuauauugcucacuaa

SEQ ID NO: 28474 - RNA, 21 nt, Artificial Sequence
  Synthetic
auugacuauauugcucacuaa

SEQ ID NO: 28475 - RNA, 22 nt, Artificial Sequence
  Synthetic
uauugacuauauugcucacuaa

SEQ ID NO: 28476 - RNA, 23 nt, Artificial Sequence
  Synthetic
auauugacuauauugcucacuaa

SEQ ID NO: 28477 - RNA, 24 nt, Artificial Sequence
  Synthetic
aauauugacuauauugcucacuaa

SEQ ID NO: 28478 - RNA, 18 nt, Artificial Sequence
  Synthetic
ugacuucccaaagacuaa

SEQ ID NO: 28479 - RNA, 19 nt, Artificial Sequence
  Synthetic
augacuucccaaagacuaa

SEQ ID NO: 28480 - RNA, 20 nt, Artificial Sequence
  Synthetic
aaugacuucccaaagacuaa

SEQ ID NO: 28481 - RNA, 21 nt, Artificial Sequence
  Synthetic
aaaugacuucccaaagacuaa

SEQ ID NO: 28482 - RNA, 22 nt, Artificial Sequence
  Synthetic
aaaaugacuucccaaagacuaa

SEQ ID NO: 28483 - RNA, 24 nt, Artificial Sequence
  Synthetic
agaaaaugacuucccaaagacuaa

SEQ ID NO: 28484 - RNA, 18 nt, Artificial Sequence
  Synthetic
uuuagcuaaccagacuaa

SEQ ID NO: 28485 - RNA, 19 nt, Artificial Sequence
  Synthetic
uuuuagcuaaccagacuaa

SEQ ID NO: 28486 - RNA, 22 nt, Artificial Sequence
  Synthetic
ugguuuuagcuaaccagacuaa

SEQ ID NO: 28487 - RNA, 19 nt, Artificial Sequence
  Synthetic
uguuuucgaaaauuacuaa

SEQ ID NO: 28488 - RNA, 20 nt, Artificial Sequence
  Synthetic
auguuuucgaaaauuacuaa

SEQ ID NO: 28489 - RNA, 21 nt, Artificial Sequence
  Synthetic
uauguuuucgaaaauuacuaa

SEQ ID NO: 28490 - RNA, 22 nt, Artificial Sequence
  Synthetic
auauguuuucgaaaauuacuaa

SEQ ID NO: 28491 - RNA, 23 nt, Artificial Sequence
  Synthetic
aauauguuuucgaaaauuacuaa

SEQ ID NO: 28492 - RNA, 24 nt, Artificial Sequence
  Synthetic
uaauauguuuucgaaaauuacuaa

SEQ ID NO: 28493 - RNA, 18 nt, Artificial Sequence
  Synthetic
uggggaagcuauuacuaa

SEQ ID NO: 28494 - RNA, 19 nt, Artificial Sequence
  Synthetic
auggggaagcuauuacuaa

SEQ ID NO: 28495 - RNA, 20 nt, Artificial Sequence
  Synthetic
aauggggaagcuauuacuaa

SEQ ID NO: 28496 - RNA, 21 nt, Artificial Sequence
  Synthetic
aaauggggaagcuauuacuaa

SEQ ID NO: 28497 - RNA, 23 nt, Artificial Sequence
  Synthetic
ugaaauggggaagcuauuacuaa

SEQ ID NO: 28498 - RNA, 24 nt, Artificial Sequence
  Synthetic
augaaauggggaagcuauuacuaa

SEQ ID NO: 28499 - RNA, 19 nt, Artificial Sequence
  Synthetic
ugacuauaucaguuacuaa

SEQ ID NO: 28500 - RNA, 20 nt, Artificial Sequence
  Synthetic
cugacuauaucaguuacuaa

SEQ ID NO: 28501 - RNA, 22 nt, Artificial Sequence
  Synthetic
ugcugacuauaucaguuacuaa

SEQ ID NO: 28502 - RNA, 23 nt, Artificial Sequence
  Synthetic
cugcugacuauaucaguuacuaa

SEQ ID NO: 28503 - RNA, 24 nt, Artificial Sequence
  Synthetic
ucugcugacuauaucaguuacuaa

SEQ ID NO: 28504 - RNA, 18 nt, Artificial Sequence
  Synthetic
auuagugcacguuacuaa

SEQ ID NO: 28505 - RNA, 19 nt, Artificial Sequence
  Synthetic
cauuagugcacguuacuaa

SEQ ID NO: 28506 - RNA, 20 nt, Artificial Sequence
  Synthetic
ucauuagugcacguuacuaa

SEQ ID NO: 28507 - RNA, 21 nt, Artificial Sequence
  Synthetic
cucauuagugcacguuacuaa

SEQ ID NO: 28508 - RNA, 22 nt, Artificial Sequence
  Synthetic
ucucauuagugcacguuacuaa

SEQ ID NO: 28509 - RNA, 23 nt, Artificial Sequence
  Synthetic
uucucauuagugcacguuacuaa

SEQ ID NO: 28510 - RNA, 24 nt, Artificial Sequence
  Synthetic
cuucucauuagugcacguuacuaa

SEQ ID NO: 28511 - RNA, 21 nt, Artificial Sequence
  Synthetic
aauaaaaauaauuuuuacuaa

SEQ ID NO: 28512 - RNA, 22 nt, Artificial Sequence
  Synthetic
aaauaaaaauaauuuuuacuaa

SEQ ID NO: 28513 - RNA, 24 nt, Artificial Sequence
  Synthetic
ugaaauaaaaauaauuuuuacuaa

SEQ ID NO: 28514 - RNA, 18 nt, Artificial Sequence
  Synthetic
agcucuugcagaaccuaa

SEQ ID NO: 28515 - RNA, 19 nt, Artificial Sequence
  Synthetic
uagcucuugcagaaccuaa

SEQ ID NO: 28516 - RNA, 20 nt, Artificial Sequence
  Synthetic
cuagcucuugcagaaccuaa

SEQ ID NO: 28517 - RNA, 21 nt, Artificial Sequence
  Synthetic
acuagcucuugcagaaccuaa

SEQ ID NO: 28518 - RNA, 22 nt, Artificial Sequence
  Synthetic
aacuagcucuugcagaaccuaa

SEQ ID NO: 28519 - RNA, 23 nt, Artificial Sequence
  Synthetic
caacuagcucuugcagaaccuaa

SEQ ID NO: 28520 - RNA, 18 nt, Artificial Sequence
  Synthetic
cucucuuaggggaccuaa

SEQ ID NO: 28521 - RNA, 19 nt, Artificial Sequence
  Synthetic
ucucucuuaggggaccuaa

SEQ ID NO: 28522 - RNA, 20 nt, Artificial Sequence
  Synthetic
cucucucuuaggggaccuaa

SEQ ID NO: 28523 - RNA, 22 nt, Artificial Sequence
  Synthetic
ugcucucucuuaggggaccuaa

SEQ ID NO: 28524 - RNA, 23 nt, Artificial Sequence
  Synthetic
uugcucucucuuaggggaccuaa

SEQ ID NO: 28525 - RNA, 24 nt, Artificial Sequence
  Synthetic
uuugcucucucuuaggggaccuaa

SEQ ID NO: 28526 - RNA, 19 nt, Artificial Sequence
  Synthetic
agcuccagucaguaccuaa

SEQ ID NO: 28527 - RNA, 20 nt, Artificial Sequence
  Synthetic
aagcuccagucaguaccuaa

SEQ ID NO: 28528 - RNA, 21 nt, Artificial Sequence
  Synthetic
uaagcuccagucaguaccuaa

SEQ ID NO: 28529 - RNA, 23 nt, Artificial Sequence
  Synthetic
aguaagcuccagucaguaccuaa

SEQ ID NO: 28530 - RNA, 24 nt, Artificial Sequence
  Synthetic
uaguaagcuccagucaguaccuaa

SEQ ID NO: 28531 - RNA, 21 nt, Artificial Sequence
  Synthetic
acauuuaaggaaugggccuaa

SEQ ID NO: 28532 - RNA, 22 nt, Artificial Sequence
  Synthetic
aacauuuaaggaaugggccuaa

SEQ ID NO: 28533 - RNA, 23 nt, Artificial Sequence
  Synthetic
caacauuuaaggaaugggccuaa

SEQ ID NO: 28534 - RNA, 18 nt, Artificial Sequence
  Synthetic
uucuaaaggauauccuaa

SEQ ID NO: 28535 - RNA, 20 nt, Artificial Sequence
  Synthetic
uguucuaaaggauauccuaa

SEQ ID NO: 28536 - RNA, 21 nt, Artificial Sequence
  Synthetic
uuguucuaaaggauauccuaa

SEQ ID NO: 28537 - RNA, 22 nt, Artificial Sequence
  Synthetic
uuuguucuaaaggauauccuaa

SEQ ID NO: 28538 - RNA, 23 nt, Artificial Sequence
  Synthetic
uuuuguucuaaaggauauccuaa

SEQ ID NO: 28539 - RNA, 24 nt, Artificial Sequence
  Synthetic
cuuuuguucuaaaggauauccuaa

SEQ ID NO: 28540 - RNA, 21 nt, Artificial Sequence
  Synthetic
cauauauauggagaaagcuaa

SEQ ID NO: 28541 - RNA, 22 nt, Artificial Sequence
  Synthetic
ccauauauauggagaaagcuaa

SEQ ID NO: 28542 - RNA, 23 nt, Artificial Sequence
  Synthetic
accauauauauggagaaagcuaa

SEQ ID NO: 28543 - RNA, 24 nt, Artificial Sequence
  Synthetic
uaccauauauauggagaaagcuaa

SEQ ID NO: 28544 - RNA, 18 nt, Artificial Sequence
  Synthetic
cucuuggugguuagcuaa

SEQ ID NO: 28545 - RNA, 19 nt, Artificial Sequence
  Synthetic
ccucuuggugguuagcuaa

SEQ ID NO: 28546 - RNA, 20 nt, Artificial Sequence
  Synthetic
accucuuggugguuagcuaa

SEQ ID NO: 28547 - RNA, 22 nt, Artificial Sequence
  Synthetic
cgaccucuuggugguuagcuaa

SEQ ID NO: 28548 - RNA, 23 nt, Artificial Sequence
  Synthetic
acgaccucuuggugguuagcuaa

SEQ ID NO: 28549 - RNA, 24 nt, Artificial Sequence
  Synthetic
aacgaccucuuggugguuagcuaa

SEQ ID NO: 28550 - RNA, 19 nt, Artificial Sequence
  Synthetic
uguucaaagauuacgcuaa

SEQ ID NO: 28551 - RNA, 20 nt, Artificial Sequence
  Synthetic
uuguucaaagauuacgcuaa

SEQ ID NO: 28552 - RNA, 21 nt, Artificial Sequence
  Synthetic
auuguucaaagauuacgcuaa

SEQ ID NO: 28553 - RNA, 22 nt, Artificial Sequence
  Synthetic
aauuguucaaagauuacgcuaa

SEQ ID NO: 28554 - RNA, 23 nt, Artificial Sequence
  Synthetic
aaauuguucaaagauuacgcuaa

SEQ ID NO: 28555 - RNA, 24 nt, Artificial Sequence
  Synthetic
caaauuguucaaagauuacgcuaa

SEQ ID NO: 28556 - RNA, 19 nt, Artificial Sequence
  Synthetic
uggagcacagagaggcuaa

SEQ ID NO: 28557 - RNA, 20 nt, Artificial Sequence
  Synthetic
cuggagcacagagaggcuaa

SEQ ID NO: 28558 - RNA, 22 nt, Artificial Sequence
  Synthetic
agcuggagcacagagaggcuaa

SEQ ID NO: 28559 - RNA, 23 nt, Artificial Sequence
  Synthetic
aagcuggagcacagagaggcuaa

SEQ ID NO: 28560 - RNA, 18 nt, Artificial Sequence
  Synthetic
uaguagaagcuuggcuaa

SEQ ID NO: 28561 - RNA, 21 nt, Artificial Sequence
  Synthetic
agguaguagaagcuuggcuaa

SEQ ID NO: 28562 - RNA, 22 nt, Artificial Sequence
  Synthetic
cagguaguagaagcuuggcuaa

SEQ ID NO: 28563 - RNA, 23 nt, Artificial Sequence
  Synthetic
ucagguaguagaagcuuggcuaa

SEQ ID NO: 28564 - RNA, 24 nt, Artificial Sequence
  Synthetic
aucagguaguagaagcuuggcuaa

SEQ ID NO: 28565 - RNA, 19 nt, Artificial Sequence
  Synthetic
agugcguuugauaugcuaa

SEQ ID NO: 28566 - RNA, 20 nt, Artificial Sequence
  Synthetic
uagugcguuugauaugcuaa

SEQ ID NO: 28567 - RNA, 21 nt, Artificial Sequence
  Synthetic
cuagugcguuugauaugcuaa

SEQ ID NO: 28568 - RNA, 22 nt, Artificial Sequence
  Synthetic
ucuagugcguuugauaugcuaa

SEQ ID NO: 28569 - RNA, 23 nt, Artificial Sequence
  Synthetic
uucuagugcguuugauaugcuaa

SEQ ID NO: 28570 - RNA, 24 nt, Artificial Sequence
  Synthetic
uuucuagugcguuugauaugcuaa

SEQ ID NO: 28571 - RNA, 18 nt, Artificial Sequence
  Synthetic
cggaaaauuuacugcuaa

SEQ ID NO: 28572 - RNA, 19 nt, Artificial Sequence
  Synthetic
ccggaaaauuuacugcuaa

SEQ ID NO: 28573 - RNA, 21 nt, Artificial Sequence
  Synthetic
agccggaaaauuuacugcuaa

SEQ ID NO: 28574 - RNA, 22 nt, Artificial Sequence
  Synthetic
cagccggaaaauuuacugcuaa

SEQ ID NO: 28575 - RNA, 23 nt, Artificial Sequence
  Synthetic
ucagccggaaaauuuacugcuaa

SEQ ID NO: 28576 - RNA, 24 nt, Artificial Sequence
  Synthetic
aucagccggaaaauuuacugcuaa

SEQ ID NO: 28577 - RNA, 18 nt, Artificial Sequence
  Synthetic
uuuauuuagcguugcuaa

SEQ ID NO: 28578 - RNA, 19 nt, Artificial Sequence
  Synthetic
uuuuauuuagcguugcuaa

SEQ ID NO: 28579 - RNA, 21 nt, Artificial Sequence
  Synthetic
uguuuuauuuagcguugcuaa

SEQ ID NO: 28580 - RNA, 22 nt, Artificial Sequence
  Synthetic
cuguuuuauuuagcguugcuaa

SEQ ID NO: 28581 - RNA, 23 nt, Artificial Sequence
  Synthetic
ucuguuuuauuuagcguugcuaa

SEQ ID NO: 28582 - RNA, 18 nt, Artificial Sequence
  Synthetic
cugaagauguaaaucuaa

SEQ ID NO: 28583 - RNA, 19 nt, Artificial Sequence
  Synthetic
acugaagauguaaaucuaa

SEQ ID NO: 28584 - RNA, 20 nt, Artificial Sequence
  Synthetic
aacugaagauguaaaucuaa

SEQ ID NO: 28585 - RNA, 21 nt, Artificial Sequence
  Synthetic
aaacugaagauguaaaucuaa

SEQ ID NO: 28586 - RNA, 22 nt, Artificial Sequence
  Synthetic
caaacugaagauguaaaucuaa

SEQ ID NO: 28587 - RNA, 23 nt, Artificial Sequence
  Synthetic
ucaaacugaagauguaaaucuaa

SEQ ID NO: 28588 - RNA, 18 nt, Artificial Sequence
  Synthetic
uauacacuggugaucuaa

SEQ ID NO: 28589 - RNA, 19 nt, Artificial Sequence
  Synthetic
auauacacuggugaucuaa

SEQ ID NO: 28590 - RNA, 20 nt, Artificial Sequence
  Synthetic
uauauacacuggugaucuaa

SEQ ID NO: 28591 - RNA, 21 nt, Artificial Sequence
  Synthetic
auauauacacuggugaucuaa

SEQ ID NO: 28592 - RNA, 22 nt, Artificial Sequence
  Synthetic
uauauauacacuggugaucuaa

SEQ ID NO: 28593 - RNA, 23 nt, Artificial Sequence
  Synthetic
cuauauauacacuggugaucuaa

SEQ ID NO: 28594 - RNA, 24 nt, Artificial Sequence
  Synthetic
acuauauauacacuggugaucuaa

SEQ ID NO: 28595 - RNA, 18 nt, Artificial Sequence
  Synthetic
cacuuaaccacuaucuaa

SEQ ID NO: 28596 - RNA, 20 nt, Artificial Sequence
  Synthetic
agcacuuaaccacuaucuaa

SEQ ID NO: 28597 - RNA, 21 nt, Artificial Sequence
  Synthetic
cagcacuuaaccacuaucuaa

SEQ ID NO: 28598 - RNA, 22 nt, Artificial Sequence
  Synthetic
ucagcacuuaaccacuaucuaa

SEQ ID NO: 28599 - RNA, 23 nt, Artificial Sequence
  Synthetic
cucagcacuuaaccacuaucuaa

SEQ ID NO: 28600 - RNA, 24 nt, Artificial Sequence
  Synthetic
ccucagcacuuaaccacuaucuaa

SEQ ID NO: 28601 - RNA, 18 nt, Artificial Sequence
  Synthetic
uauucaggcuuuaucuaa

SEQ ID NO: 28602 - RNA, 19 nt, Artificial Sequence
  Synthetic
uuauucaggcuuuaucuaa

SEQ ID NO: 28603 - RNA, 20 nt, Artificial Sequence
  Synthetic
auuauucaggcuuuaucuaa

SEQ ID NO: 28604 - RNA, 21 nt, Artificial Sequence
  Synthetic
aauuauucaggcuuuaucuaa

SEQ ID NO: 28605 - RNA, 22 nt, Artificial Sequence
  Synthetic
aaauuauucaggcuuuaucuaa

SEQ ID NO: 28606 - RNA, 24 nt, Artificial Sequence
  Synthetic
cgaaauuauucaggcuuuaucuaa

SEQ ID NO: 28607 - RNA, 18 nt, Artificial Sequence
  Synthetic
uaguugguuucccucuaa

SEQ ID NO: 28608 - RNA, 19 nt, Artificial Sequence
  Synthetic
cuaguugguuucccucuaa

SEQ ID NO: 28609 - RNA, 20 nt, Artificial Sequence
  Synthetic
ucuaguugguuucccucuaa

SEQ ID NO: 28610 - RNA, 22 nt, Artificial Sequence
  Synthetic
ugucuaguugguuucccucuaa

SEQ ID NO: 28611 - RNA, 23 nt, Artificial Sequence
  Synthetic
cugucuaguugguuucccucuaa

SEQ ID NO: 28612 - RNA, 19 nt, Artificial Sequence
  Synthetic
uguuggauaaccagucuaa

SEQ ID NO: 28613 - RNA, 20 nt, Artificial Sequence
  Synthetic
auguuggauaaccagucuaa

SEQ ID NO: 28614 - RNA, 21 nt, Artificial Sequence
  Synthetic
cauguuggauaaccagucuaa

SEQ ID NO: 28615 - RNA, 22 nt, Artificial Sequence
  Synthetic
ucauguuggauaaccagucuaa

SEQ ID NO: 28616 - RNA, 24 nt, Artificial Sequence
  Synthetic
agucauguuggauaaccagucuaa

SEQ ID NO: 28617 - RNA, 18 nt, Artificial Sequence
  Synthetic
ccacuggggaaauucuaa

SEQ ID NO: 28618 - RNA, 19 nt, Artificial Sequence
  Synthetic
cccacuggggaaauucuaa

SEQ ID NO: 28619 - RNA, 20 nt, Artificial Sequence
  Synthetic
ucccacuggggaaauucuaa

SEQ ID NO: 28620 - RNA, 21 nt, Artificial Sequence
  Synthetic
aucccacuggggaaauucuaa

SEQ ID NO: 28621 - RNA, 22 nt, Artificial Sequence
  Synthetic
aaucccacuggggaaauucuaa

SEQ ID NO: 28622 - RNA, 23 nt, Artificial Sequence
  Synthetic
uaaucccacuggggaaauucuaa

SEQ ID NO: 28623 - RNA, 24 nt, Artificial Sequence
  Synthetic
uuaaucccacuggggaaauucuaa

SEQ ID NO: 28624 - RNA, 18 nt, Artificial Sequence
  Synthetic
ucuucaucaacauucuaa

SEQ ID NO: 28625 - RNA, 20 nt, Artificial Sequence
  Synthetic
ugucuucaucaacauucuaa

SEQ ID NO: 28626 - RNA, 21 nt, Artificial Sequence
  Synthetic
cugucuucaucaacauucuaa

SEQ ID NO: 28627 - RNA, 22 nt, Artificial Sequence
  Synthetic
ucugucuucaucaacauucuaa

SEQ ID NO: 28628 - RNA, 23 nt, Artificial Sequence
  Synthetic
cucugucuucaucaacauucuaa

SEQ ID NO: 28629 - RNA, 24 nt, Artificial Sequence
  Synthetic
acucugucuucaucaacauucuaa

SEQ ID NO: 28630 - RNA, 18 nt, Artificial Sequence
  Synthetic
cacacucuaguguucuaa

SEQ ID NO: 28631 - RNA, 19 nt, Artificial Sequence
  Synthetic
acacacucuaguguucuaa

SEQ ID NO: 28632 - RNA, 20 nt, Artificial Sequence
  Synthetic
aacacacucuaguguucuaa

SEQ ID NO: 28633 - RNA, 21 nt, Artificial Sequence
  Synthetic
uaacacacucuaguguucuaa

SEQ ID NO: 28634 - RNA, 22 nt, Artificial Sequence
  Synthetic
auaacacacucuaguguucuaa

SEQ ID NO: 28635 - RNA, 23 nt, Artificial Sequence
  Synthetic
uauaacacacucuaguguucuaa

SEQ ID NO: 28636 - RNA, 24 nt, Artificial Sequence
  Synthetic
auauaacacacucuaguguucuaa

SEQ ID NO: 28637 - RNA, 19 nt, Artificial Sequence
  Synthetic
aguucaauccuauuucuaa

SEQ ID NO: 28638 - RNA, 20 nt, Artificial Sequence
  Synthetic
caguucaauccuauuucuaa

SEQ ID NO: 28639 - RNA, 21 nt, Artificial Sequence
  Synthetic
acaguucaauccuauuucuaa

SEQ ID NO: 28640 - RNA, 23 nt, Artificial Sequence
  Synthetic
ugacaguucaauccuauuucuaa

SEQ ID NO: 28641 - RNA, 24 nt, Artificial Sequence
  Synthetic
uugacaguucaauccuauuucuaa

SEQ ID NO: 28642 - RNA, 18 nt, Artificial Sequence
  Synthetic
cgaauuauuauuuucuaa

SEQ ID NO: 28643 - RNA, 19 nt, Artificial Sequence
  Synthetic
acgaauuauuauuuucuaa

SEQ ID NO: 28644 - RNA, 20 nt, Artificial Sequence
  Synthetic
cacgaauuauuauuuucuaa

SEQ ID NO: 28645 - RNA, 22 nt, Artificial Sequence
  Synthetic
agcacgaauuauuauuuucuaa

SEQ ID NO: 28646 - RNA, 24 nt, Artificial Sequence
  Synthetic
agagcacgaauuauuauuuucuaa

SEQ ID NO: 28647 - RNA, 21 nt, Artificial Sequence
  Synthetic
ucuuugaacauauuuuucuaa

SEQ ID NO: 28648 - RNA, 22 nt, Artificial Sequence
  Synthetic
aucuuugaacauauuuuucuaa

SEQ ID NO: 28649 - RNA, 23 nt, Artificial Sequence
  Synthetic
uaucuuugaacauauuuuucuaa

SEQ ID NO: 28650 - RNA, 18 nt, Artificial Sequence
  Synthetic
uuaaacaguagaaaguaa

SEQ ID NO: 28651 - RNA, 19 nt, Artificial Sequence
  Synthetic
uuuaaacaguagaaaguaa

SEQ ID NO: 28652 - RNA, 22 nt, Artificial Sequence
  Synthetic
agguuuaaacaguagaaaguaa

SEQ ID NO: 28653 - RNA, 23 nt, Artificial Sequence
  Synthetic
cagguuuaaacaguagaaaguaa

SEQ ID NO: 28654 - RNA, 24 nt, Artificial Sequence
  Synthetic
ucagguuuaaacaguagaaaguaa

SEQ ID NO: 28655 - RNA, 18 nt, Artificial Sequence
  Synthetic
uggaauuugugaaaguaa

SEQ ID NO: 28656 - RNA, 19 nt, Artificial Sequence
  Synthetic
cuggaauuugugaaaguaa

SEQ ID NO: 28657 - RNA, 20 nt, Artificial Sequence
  Synthetic
acuggaauuugugaaaguaa

SEQ ID NO: 28658 - RNA, 22 nt, Artificial Sequence
  Synthetic
cgacuggaauuugugaaaguaa

SEQ ID NO: 28659 - RNA, 24 nt, Artificial Sequence
  Synthetic
agcgacuggaauuugugaaaguaa

SEQ ID NO: 28660 - RNA, 18 nt, Artificial Sequence
  Synthetic
auguuaaacuucaaguaa

SEQ ID NO: 28661 - RNA, 19 nt, Artificial Sequence
  Synthetic
cauguuaaacuucaaguaa

SEQ ID NO: 28662 - RNA, 20 nt, Artificial Sequence
  Synthetic
ucauguuaaacuucaaguaa

SEQ ID NO: 28663 - RNA, 21 nt, Artificial Sequence
  Synthetic
uucauguuaaacuucaaguaa

SEQ ID NO: 28664 - RNA, 22 nt, Artificial Sequence
  Synthetic
auucauguuaaacuucaaguaa

SEQ ID NO: 28665 - RNA, 23 nt, Artificial Sequence
  Synthetic
uauucauguuaaacuucaaguaa

SEQ ID NO: 28666 - RNA, 24 nt, Artificial Sequence
  Synthetic
auauucauguuaaacuucaaguaa

SEQ ID NO: 28667 - RNA, 18 nt, Artificial Sequence
  Synthetic
auaccaaaugagaaguaa

SEQ ID NO: 28668 - RNA, 19 nt, Artificial Sequence
  Synthetic
cauaccaaaugagaaguaa

SEQ ID NO: 28669 - RNA, 20 nt, Artificial Sequence
  Synthetic
ccauaccaaaugagaaguaa

SEQ ID NO: 28670 - RNA, 21 nt, Artificial Sequence
  Synthetic
cccauaccaaaugagaaguaa

SEQ ID NO: 28671 - RNA, 22 nt, Artificial Sequence
  Synthetic
ccccauaccaaaugagaaguaa

SEQ ID NO: 28672 - RNA, 23 nt, Artificial Sequence
  Synthetic
accccauaccaaaugagaaguaa

SEQ ID NO: 28673 - RNA, 18 nt, Artificial Sequence
  Synthetic
aauuccugacuuaaguaa

SEQ ID NO: 28674 - RNA, 20 nt, Artificial Sequence
  Synthetic
ugaauuccugacuuaaguaa

SEQ ID NO: 28675 - RNA, 22 nt, Artificial Sequence
  Synthetic
cgugaauuccugacuuaaguaa

SEQ ID NO: 28676 - RNA, 23 nt, Artificial Sequence
  Synthetic
acgugaauuccugacuuaaguaa

SEQ ID NO: 28677 - RNA, 24 nt, Artificial Sequence
  Synthetic
cacgugaauuccugacuuaaguaa

SEQ ID NO: 28678 - RNA, 18 nt, Artificial Sequence
  Synthetic
uguguccuaucccaguaa

SEQ ID NO: 28679 - RNA, 19 nt, Artificial Sequence
  Synthetic
cuguguccuaucccaguaa

SEQ ID NO: 28680 - RNA, 20 nt, Artificial Sequence
  Synthetic
ccuguguccuaucccaguaa

SEQ ID NO: 28681 - RNA, 21 nt, Artificial Sequence
  Synthetic
cccuguguccuaucccaguaa

SEQ ID NO: 28682 - RNA, 23 nt, Artificial Sequence
  Synthetic
ugcccuguguccuaucccaguaa

SEQ ID NO: 28683 - RNA, 24 nt, Artificial Sequence
  Synthetic
cugcccuguguccuaucccaguaa

SEQ ID NO: 28684 - RNA, 18 nt, Artificial Sequence
  Synthetic
ucacuaaacaagcaguaa

SEQ ID NO: 28685 - RNA, 19 nt, Artificial Sequence
  Synthetic
uucacuaaacaagcaguaa

SEQ ID NO: 28686 - RNA, 20 nt, Artificial Sequence
  Synthetic
auucacuaaacaagcaguaa

SEQ ID NO: 28687 - RNA, 21 nt, Artificial Sequence
  Synthetic
cauucacuaaacaagcaguaa

SEQ ID NO: 28688 - RNA, 23 nt, Artificial Sequence
  Synthetic
ugcauucacuaaacaagcaguaa

SEQ ID NO: 28689 - RNA, 24 nt, Artificial Sequence
  Synthetic
augcauucacuaaacaagcaguaa

SEQ ID NO: 28690 - RNA, 18 nt, Artificial Sequence
  Synthetic
cuugcccuuuuucaguaa

SEQ ID NO: 28691 - RNA, 19 nt, Artificial Sequence
  Synthetic
ucuugcccuuuuucaguaa

SEQ ID NO: 28692 - RNA, 20 nt, Artificial Sequence
  Synthetic
cucuugcccuuuuucaguaa

SEQ ID NO: 28693 - RNA, 21 nt, Artificial Sequence
  Synthetic
ccucuugcccuuuuucaguaa

SEQ ID NO: 28694 - RNA, 22 nt, Artificial Sequence
  Synthetic
accucuugcccuuuuucaguaa

SEQ ID NO: 28695 - RNA, 23 nt, Artificial Sequence
  Synthetic
uaccucuugcccuuuuucaguaa

SEQ ID NO: 28696 - RNA, 24 nt, Artificial Sequence
  Synthetic
cuaccucuugcccuuuuucaguaa

SEQ ID NO: 28697 - RNA, 18 nt, Artificial Sequence
  Synthetic
cucuuguacagagaguaa

SEQ ID NO: 28698 - RNA, 19 nt, Artificial Sequence
  Synthetic
acucuuguacagagaguaa

SEQ ID NO: 28699 - RNA, 20 nt, Artificial Sequence
  Synthetic
aacucuuguacagagaguaa

SEQ ID NO: 28700 - RNA, 18 nt, Artificial Sequence
  Synthetic
aaauacaaaggagaguaa

SEQ ID NO: 28701 - RNA, 21 nt, Artificial Sequence
  Synthetic
aggaaauacaaaggagaguaa

SEQ ID NO: 28702 - RNA, 22 nt, Artificial Sequence
  Synthetic
uaggaaauacaaaggagaguaa

SEQ ID NO: 28703 - RNA, 23 nt, Artificial Sequence
  Synthetic
auaggaaauacaaaggagaguaa

SEQ ID NO: 28704 - RNA, 21 nt, Artificial Sequence
  Synthetic
uuaaaaugaauggaugaguaa

SEQ ID NO: 28705 - RNA, 22 nt, Artificial Sequence
  Synthetic
auuaaaaugaauggaugaguaa

SEQ ID NO: 28706 - RNA, 23 nt, Artificial Sequence
  Synthetic
uauuaaaaugaauggaugaguaa

SEQ ID NO: 28707 - RNA, 24 nt, Artificial Sequence
  Synthetic
uuauuaaaaugaauggaugaguaa

SEQ ID NO: 28708 - RNA, 18 nt, Artificial Sequence
  Synthetic
uaucaaaagauugaguaa

SEQ ID NO: 28709 - RNA, 19 nt, Artificial Sequence
  Synthetic
uuaucaaaagauugaguaa

SEQ ID NO: 28710 - RNA, 20 nt, Artificial Sequence
  Synthetic
uuuaucaaaagauugaguaa

SEQ ID NO: 28711 - RNA, 22 nt, Artificial Sequence
  Synthetic
uguuuaucaaaagauugaguaa

SEQ ID NO: 28712 - RNA, 23 nt, Artificial Sequence
  Synthetic
auguuuaucaaaagauugaguaa

SEQ ID NO: 28713 - RNA, 24 nt, Artificial Sequence
  Synthetic
aauguuuaucaaaagauugaguaa

SEQ ID NO: 28714 - RNA, 18 nt, Artificial Sequence
  Synthetic
aaugcuaugauauaguaa

SEQ ID NO: 28715 - RNA, 19 nt, Artificial Sequence
  Synthetic
aaaugcuaugauauaguaa

SEQ ID NO: 28716 - RNA, 20 nt, Artificial Sequence
  Synthetic
uaaaugcuaugauauaguaa

SEQ ID NO: 28717 - RNA, 21 nt, Artificial Sequence
  Synthetic
uuaaaugcuaugauauaguaa

SEQ ID NO: 28718 - RNA, 22 nt, Artificial Sequence
  Synthetic
auuaaaugcuaugauauaguaa

SEQ ID NO: 28719 - RNA, 23 nt, Artificial Sequence
  Synthetic
uauuaaaugcuaugauauaguaa

SEQ ID NO: 28720 - RNA, 24 nt, Artificial Sequence
  Synthetic
uuauuaaaugcuaugauauaguaa

SEQ ID NO: 28721 - RNA, 18 nt, Artificial Sequence
  Synthetic
ugaugcuugaauuaguaa

SEQ ID NO: 28722 - RNA, 19 nt, Artificial Sequence
  Synthetic
augaugcuugaauuaguaa

SEQ ID NO: 28723 - RNA, 21 nt, Artificial Sequence
  Synthetic
ugaugaugcuugaauuaguaa

SEQ ID NO: 28724 - RNA, 22 nt, Artificial Sequence
  Synthetic
uugaugaugcuugaauuaguaa

SEQ ID NO: 28725 - RNA, 23 nt, Artificial Sequence
  Synthetic
cuugaugaugcuugaauuaguaa

SEQ ID NO: 28726 - RNA, 24 nt, Artificial Sequence
  Synthetic
acuugaugaugcuugaauuaguaa

SEQ ID NO: 28727 - RNA, 18 nt, Artificial Sequence
  Synthetic
caccaguauauuuaguaa

SEQ ID NO: 28728 - RNA, 19 nt, Artificial Sequence
  Synthetic
acaccaguauauuuaguaa

SEQ ID NO: 28729 - RNA, 20 nt, Artificial Sequence
  Synthetic
cacaccaguauauuuaguaa

SEQ ID NO: 28730 - RNA, 21 nt, Artificial Sequence
  Synthetic
acacaccaguauauuuaguaa

SEQ ID NO: 28731 - RNA, 22 nt, Artificial Sequence
  Synthetic
aacacaccaguauauuuaguaa

SEQ ID NO: 28732 - RNA, 23 nt, Artificial Sequence
  Synthetic
caacacaccaguauauuuaguaa

SEQ ID NO: 28733 - RNA, 24 nt, Artificial Sequence
  Synthetic
acaacacaccaguauauuuaguaa

SEQ ID NO: 28734 - RNA, 19 nt, Artificial Sequence
  Synthetic
agacauccuuauuuaguaa

SEQ ID NO: 28735 - RNA, 20 nt, Artificial Sequence
  Synthetic
uagacauccuuauuuaguaa

SEQ ID NO: 28736 - RNA, 21 nt, Artificial Sequence
  Synthetic
auagacauccuuauuuaguaa

SEQ ID NO: 28737 - RNA, 22 nt, Artificial Sequence
  Synthetic
uauagacauccuuauuuaguaa

SEQ ID NO: 28738 - RNA, 23 nt, Artificial Sequence
  Synthetic
uuauagacauccuuauuuaguaa

SEQ ID NO: 28739 - RNA, 24 nt, Artificial Sequence
  Synthetic
auuauagacauccuuauuuaguaa

SEQ ID NO: 28740 - RNA, 18 nt, Artificial Sequence
  Synthetic
aaaaaacuauauucguaa

SEQ ID NO: 28741 - RNA, 19 nt, Artificial Sequence
  Synthetic
aaaaaaacuauauucguaa

SEQ ID NO: 28742 - RNA, 20 nt, Artificial Sequence
  Synthetic
uaaaaaaacuauauucguaa

SEQ ID NO: 28743 - RNA, 21 nt, Artificial Sequence
  Synthetic
auaaaaaaacuauauucguaa

SEQ ID NO: 28744 - RNA, 22 nt, Artificial Sequence
  Synthetic
aauaaaaaaacuauauucguaa

SEQ ID NO: 28745 - RNA, 23 nt, Artificial Sequence
  Synthetic
aaauaaaaaaacuauauucguaa

SEQ ID NO: 28746 - RNA, 24 nt, Artificial Sequence
  Synthetic
uaaauaaaaaaacuauauucguaa

SEQ ID NO: 28747 - RNA, 18 nt, Artificial Sequence
  Synthetic
uauacucaauaaagguaa

SEQ ID NO: 28748 - RNA, 19 nt, Artificial Sequence
  Synthetic
cuauacucaauaaagguaa

SEQ ID NO: 28749 - RNA, 20 nt, Artificial Sequence
  Synthetic
ucuauacucaauaaagguaa

SEQ ID NO: 28750 - RNA, 21 nt, Artificial Sequence
  Synthetic
uucuauacucaauaaagguaa

SEQ ID NO: 28751 - RNA, 22 nt, Artificial Sequence
  Synthetic
uuucuauacucaauaaagguaa

SEQ ID NO: 28752 - RNA, 23 nt, Artificial Sequence
  Synthetic
uuuucuauacucaauaaagguaa

SEQ ID NO: 28753 - RNA, 18 nt, Artificial Sequence
  Synthetic
uucauuuguauaagguaa

SEQ ID NO: 28754 - RNA, 19 nt, Artificial Sequence
  Synthetic
uuucauuuguauaagguaa

SEQ ID NO: 28755 - RNA, 20 nt, Artificial Sequence
  Synthetic
uuuucauuuguauaagguaa

SEQ ID NO: 28756 - RNA, 21 nt, Artificial Sequence
  Synthetic
auuuucauuuguauaagguaa

SEQ ID NO: 28757 - RNA, 22 nt, Artificial Sequence
  Synthetic
uauuuucauuuguauaagguaa

SEQ ID NO: 28758 - RNA, 23 nt, Artificial Sequence
  Synthetic
uuauuuucauuuguauaagguaa

SEQ ID NO: 28759 - RNA, 24 nt, Artificial Sequence
  Synthetic
uuuauuuucauuuguauaagguaa

SEQ ID NO: 28760 - RNA, 19 nt, Artificial Sequence
  Synthetic
aggucugcacagcagguaa

SEQ ID NO: 28761 - RNA, 20 nt, Artificial Sequence
  Synthetic
aaggucugcacagcagguaa

SEQ ID NO: 28762 - RNA, 21 nt, Artificial Sequence
  Synthetic
uaaggucugcacagcagguaa

SEQ ID NO: 28763 - RNA, 23 nt, Artificial Sequence
  Synthetic
uguaaggucugcacagcagguaa

SEQ ID NO: 28764 - RNA, 24 nt, Artificial Sequence
  Synthetic
auguaaggucugcacagcagguaa

SEQ ID NO: 28765 - RNA, 18 nt, Artificial Sequence
  Synthetic
ccaggagcccagagguaa

SEQ ID NO: 28766 - RNA, 19 nt, Artificial Sequence
  Synthetic
accaggagcccagagguaa

SEQ ID NO: 28767 - RNA, 20 nt, Artificial Sequence
  Synthetic
uaccaggagcccagagguaa

SEQ ID NO: 28768 - RNA, 21 nt, Artificial Sequence
  Synthetic
cuaccaggagcccagagguaa

SEQ ID NO: 28769 - RNA, 22 nt, Artificial Sequence
  Synthetic
ucuaccaggagcccagagguaa

SEQ ID NO: 28770 - RNA, 23 nt, Artificial Sequence
  Synthetic
cucuaccaggagcccagagguaa

SEQ ID NO: 28771 - RNA, 24 nt, Artificial Sequence
  Synthetic
acucuaccaggagcccagagguaa

SEQ ID NO: 28772 - RNA, 18 nt, Artificial Sequence
  Synthetic
uauuuuuaagagagguaa

SEQ ID NO: 28773 - RNA, 19 nt, Artificial Sequence
  Synthetic
auauuuuuaagagagguaa

SEQ ID NO: 28774 - RNA, 20 nt, Artificial Sequence
  Synthetic
aauauuuuuaagagagguaa

SEQ ID NO: 28775 - RNA, 21 nt, Artificial Sequence
  Synthetic
uaauauuuuuaagagagguaa

SEQ ID NO: 28776 - RNA, 22 nt, Artificial Sequence
  Synthetic
cuaauauuuuuaagagagguaa

SEQ ID NO: 28777 - RNA, 23 nt, Artificial Sequence
  Synthetic
acuaauauuuuuaagagagguaa

SEQ ID NO: 28778 - RNA, 24 nt, Artificial Sequence
  Synthetic
cacuaauauuuuuaagagagguaa

SEQ ID NO: 28779 - RNA, 19 nt, Artificial Sequence
  Synthetic
agaacucuauaggagguaa

SEQ ID NO: 28780 - RNA, 20 nt, Artificial Sequence
  Synthetic
aagaacucuauaggagguaa

SEQ ID NO: 28781 - RNA, 21 nt, Artificial Sequence
  Synthetic
aaagaacucuauaggagguaa

SEQ ID NO: 28782 - RNA, 22 nt, Artificial Sequence
  Synthetic
caaagaacucuauaggagguaa

SEQ ID NO: 28783 - RNA, 23 nt, Artificial Sequence
  Synthetic
ucaaagaacucuauaggagguaa

SEQ ID NO: 28784 - RNA, 24 nt, Artificial Sequence
  Synthetic
cucaaagaacucuauaggagguaa

SEQ ID NO: 28785 - RNA, 18 nt, Artificial Sequence
  Synthetic
caguaauaaucuagguaa

SEQ ID NO: 28786 - RNA, 20 nt, Artificial Sequence
  Synthetic
ugcaguaauaaucuagguaa

SEQ ID NO: 28787 - RNA, 21 nt, Artificial Sequence
  Synthetic
augcaguaauaaucuagguaa

SEQ ID NO: 28788 - RNA, 22 nt, Artificial Sequence
  Synthetic
caugcaguaauaaucuagguaa

SEQ ID NO: 28789 - RNA, 23 nt, Artificial Sequence
  Synthetic
ucaugcaguaauaaucuagguaa

SEQ ID NO: 28790 - RNA, 24 nt, Artificial Sequence
  Synthetic
aucaugcaguaauaaucuagguaa

SEQ ID NO: 28791 - RNA, 18 nt, Artificial Sequence
  Synthetic
aaaacucaauuacgguaa

SEQ ID NO: 28792 - RNA, 19 nt, Artificial Sequence
  Synthetic
caaaacucaauuacgguaa

SEQ ID NO: 28793 - RNA, 21 nt, Artificial Sequence
  Synthetic
agcaaaacucaauuacgguaa

SEQ ID NO: 28794 - RNA, 22 nt, Artificial Sequence
  Synthetic
cagcaaaacucaauuacgguaa

SEQ ID NO: 28795 - RNA, 23 nt, Artificial Sequence
  Synthetic
acagcaaaacucaauuacgguaa

SEQ ID NO: 28796 - RNA, 24 nt, Artificial Sequence
  Synthetic
cacagcaaaacucaauuacgguaa

SEQ ID NO: 28797 - RNA, 18 nt, Artificial Sequence
  Synthetic
cagccccaaucaggguaa

SEQ ID NO: 28798 - RNA, 19 nt, Artificial Sequence
  Synthetic
ucagccccaaucaggguaa

SEQ ID NO: 28799 - RNA, 20 nt, Artificial Sequence
  Synthetic
cucagccccaaucaggguaa

SEQ ID NO: 28800 - RNA, 22 nt, Artificial Sequence
  Synthetic
agcucagccccaaucaggguaa

SEQ ID NO: 28801 - RNA, 23 nt, Artificial Sequence
  Synthetic
uagcucagccccaaucaggguaa

SEQ ID NO: 28802 - RNA, 18 nt, Artificial Sequence
  Synthetic
auugauccuauuggguaa

SEQ ID NO: 28803 - RNA, 19 nt, Artificial Sequence
  Synthetic
cauugauccuauuggguaa

SEQ ID NO: 28804 - RNA, 21 nt, Artificial Sequence
  Synthetic
agcauugauccuauuggguaa

SEQ ID NO: 28805 - RNA, 22 nt, Artificial Sequence
  Synthetic
uagcauugauccuauuggguaa

SEQ ID NO: 28806 - RNA, 23 nt, Artificial Sequence
  Synthetic
auagcauugauccuauuggguaa

SEQ ID NO: 28807 - RNA, 24 nt, Artificial Sequence
  Synthetic
aauagcauugauccuauuggguaa

SEQ ID NO: 28808 - RNA, 19 nt, Artificial Sequence
  Synthetic
aguauucaucacuugguaa

SEQ ID NO: 28809 - RNA, 21 nt, Artificial Sequence
  Synthetic
agaguauucaucacuugguaa

SEQ ID NO: 28810 - RNA, 22 nt, Artificial Sequence
  Synthetic
uagaguauucaucacuugguaa

SEQ ID NO: 28811 - RNA, 23 nt, Artificial Sequence
  Synthetic
uuagaguauucaucacuugguaa

SEQ ID NO: 28812 - RNA, 24 nt, Artificial Sequence
  Synthetic
auuagaguauucaucacuugguaa

SEQ ID NO: 28813 - RNA, 19 nt, Artificial Sequence
  Synthetic
aggcauuggcuuuugguaa

SEQ ID NO: 28814 - RNA, 20 nt, Artificial Sequence
  Synthetic
uaggcauuggcuuuugguaa

SEQ ID NO: 28815 - RNA, 21 nt, Artificial Sequence
  Synthetic
auaggcauuggcuuuugguaa

SEQ ID NO: 28816 - RNA, 22 nt, Artificial Sequence
  Synthetic
cauaggcauuggcuuuugguaa

SEQ ID NO: 28817 - RNA, 23 nt, Artificial Sequence
  Synthetic
ccauaggcauuggcuuuugguaa

SEQ ID NO: 28818 - RNA, 24 nt, Artificial Sequence
  Synthetic
uccauaggcauuggcuuuugguaa

SEQ ID NO: 28819 - RNA, 18 nt, Artificial Sequence
  Synthetic
ugaucaauaaaaauguaa

SEQ ID NO: 28820 - RNA, 20 nt, Artificial Sequence
  Synthetic
ugugaucaauaaaaauguaa

SEQ ID NO: 28821 - RNA, 21 nt, Artificial Sequence
  Synthetic
cugugaucaauaaaaauguaa

SEQ ID NO: 28822 - RNA, 23 nt, Artificial Sequence
  Synthetic
ugcugugaucaauaaaaauguaa

SEQ ID NO: 28823 - RNA, 18 nt, Artificial Sequence
  Synthetic
aauacauauuaaauguaa

SEQ ID NO: 28824 - RNA, 20 nt, Artificial Sequence
  Synthetic
ugaauacauauuaaauguaa

SEQ ID NO: 28825 - RNA, 21 nt, Artificial Sequence
  Synthetic
augaauacauauuaaauguaa

SEQ ID NO: 28826 - RNA, 22 nt, Artificial Sequence
  Synthetic
caugaauacauauuaaauguaa

SEQ ID NO: 28827 - RNA, 24 nt, Artificial Sequence
  Synthetic
agcaugaauacauauuaaauguaa

SEQ ID NO: 28828 - RNA, 18 nt, Artificial Sequence
  Synthetic
uacuguauuacaauguaa

SEQ ID NO: 28829 - RNA, 20 nt, Artificial Sequence
  Synthetic
uguacuguauuacaauguaa

SEQ ID NO: 28830 - RNA, 21 nt, Artificial Sequence
  Synthetic
auguacuguauuacaauguaa

SEQ ID NO: 28831 - RNA, 22 nt, Artificial Sequence
  Synthetic
cauguacuguauuacaauguaa

SEQ ID NO: 28832 - RNA, 23 nt, Artificial Sequence
  Synthetic
ucauguacuguauuacaauguaa

SEQ ID NO: 28833 - RNA, 24 nt, Artificial Sequence
  Synthetic
uucauguacuguauuacaauguaa

SEQ ID NO: 28834 - RNA, 18 nt, Artificial Sequence
  Synthetic
acagagaaauuaauguaa

SEQ ID NO: 28835 - RNA, 19 nt, Artificial Sequence
  Synthetic
aacagagaaauuaauguaa

SEQ ID NO: 28836 - RNA, 20 nt, Artificial Sequence
  Synthetic
aaacagagaaauuaauguaa

SEQ ID NO: 28837 - RNA, 22 nt, Artificial Sequence
  Synthetic
agaaacagagaaauuaauguaa

SEQ ID NO: 28838 - RNA, 23 nt, Artificial Sequence
  Synthetic
aagaaacagagaaauuaauguaa

SEQ ID NO: 28839 - RNA, 24 nt, Artificial Sequence
  Synthetic
aaagaaacagagaaauuaauguaa

SEQ ID NO: 28840 - RNA, 18 nt, Artificial Sequence
  Synthetic
aaggaggcagacauguaa

SEQ ID NO: 28841 - RNA, 20 nt, Artificial Sequence
  Synthetic
ugaaggaggcagacauguaa

SEQ ID NO: 28842 - RNA, 23 nt, Artificial Sequence
  Synthetic
uggugaaggaggcagacauguaa

SEQ ID NO: 28843 - RNA, 24 nt, Artificial Sequence
  Synthetic
cuggugaaggaggcagacauguaa

SEQ ID NO: 28844 - RNA, 18 nt, Artificial Sequence
  Synthetic
cauacuuuuuagauguaa

SEQ ID NO: 28845 - RNA, 21 nt, Artificial Sequence
  Synthetic
aggcauacuuuuuagauguaa

SEQ ID NO: 28846 - RNA, 22 nt, Artificial Sequence
  Synthetic
aaggcauacuuuuuagauguaa

SEQ ID NO: 28847 - RNA, 23 nt, Artificial Sequence
  Synthetic
aaaggcauacuuuuuagauguaa

SEQ ID NO: 28848 - RNA, 24 nt, Artificial Sequence
  Synthetic
aaaaggcauacuuuuuagauguaa

SEQ ID NO: 28849 - RNA, 18 nt, Artificial Sequence
  Synthetic
auauccauaaguauguaa

SEQ ID NO: 28850 - RNA, 19 nt, Artificial Sequence
  Synthetic
uauauccauaaguauguaa

SEQ ID NO: 28851 - RNA, 20 nt, Artificial Sequence
  Synthetic
uuauauccauaaguauguaa

SEQ ID NO: 28852 - RNA, 22 nt, Artificial Sequence
  Synthetic
uguuauauccauaaguauguaa

SEQ ID NO: 28853 - RNA, 24 nt, Artificial Sequence
  Synthetic
aguguuauauccauaaguauguaa

SEQ ID NO: 28854 - RNA, 18 nt, Artificial Sequence
  Synthetic
ucaaaaguugaccuguaa

SEQ ID NO: 28855 - RNA, 19 nt, Artificial Sequence
  Synthetic
cucaaaaguugaccuguaa

SEQ ID NO: 28856 - RNA, 20 nt, Artificial Sequence
  Synthetic
ucucaaaaguugaccuguaa

SEQ ID NO: 28857 - RNA, 21 nt, Artificial Sequence
  Synthetic
uucucaaaaguugaccuguaa

SEQ ID NO: 28858 - RNA, 22 nt, Artificial Sequence
  Synthetic
cuucucaaaaguugaccuguaa

SEQ ID NO: 28859 - RNA, 24 nt, Artificial Sequence
  Synthetic
ugcuucucaaaaguugaccuguaa

SEQ ID NO: 28860 - RNA, 18 nt, Artificial Sequence
  Synthetic
uaauauuuuucaguguaa

SEQ ID NO: 28861 - RNA, 19 nt, Artificial Sequence
  Synthetic
uuaauauuuuucaguguaa

SEQ ID NO: 28862 - RNA, 20 nt, Artificial Sequence
  Synthetic
auuaauauuuuucaguguaa

SEQ ID NO: 28863 - RNA, 21 nt, Artificial Sequence
  Synthetic
cauuaauauuuuucaguguaa

SEQ ID NO: 28864 - RNA, 22 nt, Artificial Sequence
  Synthetic
ucauuaauauuuuucaguguaa

SEQ ID NO: 28865 - RNA, 24 nt, Artificial Sequence
  Synthetic
ugucauuaauauuuuucaguguaa

SEQ ID NO: 28866 - RNA, 18 nt, Artificial Sequence
  Synthetic
acagcagaguaauuguaa

SEQ ID NO: 28867 - RNA, 19 nt, Artificial Sequence
  Synthetic
uacagcagaguaauuguaa

SEQ ID NO: 28868 - RNA, 20 nt, Artificial Sequence
  Synthetic
cuacagcagaguaauuguaa

SEQ ID NO: 28869 - RNA, 21 nt, Artificial Sequence
  Synthetic
ccuacagcagaguaauuguaa

SEQ ID NO: 28870 - RNA, 22 nt, Artificial Sequence
  Synthetic
uccuacagcagaguaauuguaa

SEQ ID NO: 28871 - RNA, 24 nt, Artificial Sequence
  Synthetic
uguccuacagcagaguaauuguaa

SEQ ID NO: 28872 - RNA, 18 nt, Artificial Sequence
  Synthetic
cucaauaauuguuuguaa

SEQ ID NO: 28873 - RNA, 19 nt, Artificial Sequence
  Synthetic
acucaauaauuguuuguaa

SEQ ID NO: 28874 - RNA, 20 nt, Artificial Sequence
  Synthetic
uacucaauaauuguuuguaa

SEQ ID NO: 28875 - RNA, 22 nt, Artificial Sequence
  Synthetic
uguacucaauaauuguuuguaa

SEQ ID NO: 28876 - RNA, 23 nt, Artificial Sequence
  Synthetic
uuguacucaauaauuguuuguaa

SEQ ID NO: 28877 - RNA, 24 nt, Artificial Sequence
  Synthetic
auuguacucaauaauuguuuguaa

SEQ ID NO: 28878 - RNA, 18 nt, Artificial Sequence
  Synthetic
cacgcgcgcaaaaauuaa

SEQ ID NO: 28879 - RNA, 19 nt, Artificial Sequence
  Synthetic
acacgcgcgcaaaaauuaa

SEQ ID NO: 28880 - RNA, 20 nt, Artificial Sequence
  Synthetic
cacacgcgcgcaaaaauuaa

SEQ ID NO: 28881 - RNA, 21 nt, Artificial Sequence
  Synthetic
acacacgcgcgcaaaaauuaa

SEQ ID NO: 28882 - RNA, 22 nt, Artificial Sequence
  Synthetic
cacacacgcgcgcaaaaauuaa

SEQ ID NO: 28883 - RNA, 23 nt, Artificial Sequence
  Synthetic
acacacacgcgcgcaaaaauuaa

SEQ ID NO: 28884 - RNA, 24 nt, Artificial Sequence
  Synthetic
cacacacacgcgcgcaaaaauuaa

SEQ ID NO: 28885 - RNA, 21 nt, Artificial Sequence
  Synthetic
auguucaaaaauaaaaauuaa

SEQ ID NO: 28886 - RNA, 22 nt, Artificial Sequence
  Synthetic
aauguucaaaaauaaaaauuaa

SEQ ID NO: 28887 - RNA, 23 nt, Artificial Sequence
  Synthetic
uaauguucaaaaauaaaaauuaa

SEQ ID NO: 28888 - RNA, 24 nt, Artificial Sequence
  Synthetic
uuaauguucaaaaauaaaaauuaa

SEQ ID NO: 28889 - RNA, 21 nt, Artificial Sequence
  Synthetic
aauuuggugaaauaaaauuaa

SEQ ID NO: 28890 - RNA, 22 nt, Artificial Sequence
  Synthetic
uaauuuggugaaauaaaauuaa

SEQ ID NO: 28891 - RNA, 23 nt, Artificial Sequence
  Synthetic
cuaauuuggugaaauaaaauuaa

SEQ ID NO: 28892 - RNA, 24 nt, Artificial Sequence
  Synthetic
ccuaauuuggugaaauaaaauuaa

SEQ ID NO: 28893 - RNA, 21 nt, Artificial Sequence
  Synthetic
accuagguagguuaaaauuaa

SEQ ID NO: 28894 - RNA, 22 nt, Artificial Sequence
  Synthetic
aaccuagguagguuaaaauuaa

SEQ ID NO: 28895 - RNA, 23 nt, Artificial Sequence
  Synthetic
caaccuagguagguuaaaauuaa

SEQ ID NO: 28896 - RNA, 24 nt, Artificial Sequence
  Synthetic
acaaccuagguagguuaaaauuaa

SEQ ID NO: 28897 - RNA, 21 nt, Artificial Sequence
  Synthetic
caaaaaucaugccuaaauuaa

SEQ ID NO: 28898 - RNA, 22 nt, Artificial Sequence
  Synthetic
acaaaaaucaugccuaaauuaa

SEQ ID NO: 28899 - RNA, 23 nt, Artificial Sequence
  Synthetic
uacaaaaaucaugccuaaauuaa

SEQ ID NO: 28900 - RNA, 21 nt, Artificial Sequence
  Synthetic
uguauuucauuuuuaaauuaa

SEQ ID NO: 28901 - RNA, 22 nt, Artificial Sequence
  Synthetic
auguauuucauuuuuaaauuaa

SEQ ID NO: 28902 - RNA, 23 nt, Artificial Sequence
  Synthetic
aauguauuucauuuuuaaauuaa

SEQ ID NO: 28903 - RNA, 24 nt, Artificial Sequence
  Synthetic
aaauguauuucauuuuuaaauuaa

SEQ ID NO: 28904 - RNA, 18 nt, Artificial Sequence
  Synthetic
agguggagcuagaauuaa

SEQ ID NO: 28905 - RNA, 19 nt, Artificial Sequence
  Synthetic
aagguggagcuagaauuaa

SEQ ID NO: 28906 - RNA, 20 nt, Artificial Sequence
  Synthetic
uaagguggagcuagaauuaa

SEQ ID NO: 28907 - RNA, 21 nt, Artificial Sequence
  Synthetic
auaagguggagcuagaauuaa

SEQ ID NO: 28908 - RNA, 22 nt, Artificial Sequence
  Synthetic
cauaagguggagcuagaauuaa

SEQ ID NO: 28909 - RNA, 23 nt, Artificial Sequence
  Synthetic
acauaagguggagcuagaauuaa

SEQ ID NO: 28910 - RNA, 18 nt, Artificial Sequence
  Synthetic
uuccuguugaauaauuaa

SEQ ID NO: 28911 - RNA, 19 nt, Artificial Sequence
  Synthetic
cuuccuguugaauaauuaa

SEQ ID NO: 28912 - RNA, 20 nt, Artificial Sequence
  Synthetic
ucuuccuguugaauaauuaa

SEQ ID NO: 28913 - RNA, 21 nt, Artificial Sequence
  Synthetic
uucuuccuguugaauaauuaa

SEQ ID NO: 28914 - RNA, 23 nt, Artificial Sequence
  Synthetic
aguucuuccuguugaauaauuaa

SEQ ID NO: 28915 - RNA, 24 nt, Artificial Sequence
  Synthetic
aaguucuuccuguugaauaauuaa

SEQ ID NO: 28916 - RNA, 18 nt, Artificial Sequence
  Synthetic
auccgauugcauaauuaa

SEQ ID NO: 28917 - RNA, 19 nt, Artificial Sequence
  Synthetic
uauccgauugcauaauuaa

SEQ ID NO: 28918 - RNA, 20 nt, Artificial Sequence
  Synthetic
auauccgauugcauaauuaa

SEQ ID NO: 28919 - RNA, 21 nt, Artificial Sequence
  Synthetic
aauauccgauugcauaauuaa

SEQ ID NO: 28920 - RNA, 22 nt, Artificial Sequence
  Synthetic
uaauauccgauugcauaauuaa

SEQ ID NO: 28921 - RNA, 23 nt, Artificial Sequence
  Synthetic
uuaauauccgauugcauaauuaa

SEQ ID NO: 28922 - RNA, 24 nt, Artificial Sequence
  Synthetic
uuuaauauccgauugcauaauuaa

SEQ ID NO: 28923 - RNA, 21 nt, Artificial Sequence
  Synthetic
uaaaauuugucuuuuaauuaa

SEQ ID NO: 28924 - RNA, 22 nt, Artificial Sequence
  Synthetic
uuaaaauuugucuuuuaauuaa

SEQ ID NO: 28925 - RNA, 24 nt, Artificial Sequence
  Synthetic
uguuaaaauuugucuuuuaauuaa

SEQ ID NO: 28926 - RNA, 19 nt, Artificial Sequence
  Synthetic
ugagguuuaagaacauuaa

SEQ ID NO: 28927 - RNA, 20 nt, Artificial Sequence
  Synthetic
cugagguuuaagaacauuaa

SEQ ID NO: 28928 - RNA, 21 nt, Artificial Sequence
  Synthetic
acugagguuuaagaacauuaa

SEQ ID NO: 28929 - RNA, 22 nt, Artificial Sequence
  Synthetic
aacugagguuuaagaacauuaa

SEQ ID NO: 28930 - RNA, 23 nt, Artificial Sequence
  Synthetic
aaacugagguuuaagaacauuaa

SEQ ID NO: 28931 - RNA, 24 nt, Artificial Sequence
  Synthetic
aaaacugagguuuaagaacauuaa

SEQ ID NO: 28932 - RNA, 18 nt, Artificial Sequence
  Synthetic
uuccaaagucgacauuaa

SEQ ID NO: 28933 - RNA, 19 nt, Artificial Sequence
  Synthetic
uuuccaaagucgacauuaa

SEQ ID NO: 28934 - RNA, 21 nt, Artificial Sequence
  Synthetic
uguuuccaaagucgacauuaa

SEQ ID NO: 28935 - RNA, 23 nt, Artificial Sequence
  Synthetic
uguguuuccaaagucgacauuaa

SEQ ID NO: 28936 - RNA, 24 nt, Artificial Sequence
  Synthetic
auguguuuccaaagucgacauuaa

SEQ ID NO: 28937 - RNA, 18 nt, Artificial Sequence
  Synthetic
ugugacuauggacauuaa

SEQ ID NO: 28938 - RNA, 19 nt, Artificial Sequence
  Synthetic
uugugacuauggacauuaa

SEQ ID NO: 28939 - RNA, 20 nt, Artificial Sequence
  Synthetic
auugugacuauggacauuaa

SEQ ID NO: 28940 - RNA, 21 nt, Artificial Sequence
  Synthetic
cauugugacuauggacauuaa

SEQ ID NO: 28941 - RNA, 22 nt, Artificial Sequence
  Synthetic
ucauugugacuauggacauuaa

SEQ ID NO: 28942 - RNA, 23 nt, Artificial Sequence
  Synthetic
cucauugugacuauggacauuaa

SEQ ID NO: 28943 - RNA, 24 nt, Artificial Sequence
  Synthetic
ucucauugugacuauggacauuaa

SEQ ID NO: 28944 - RNA, 18 nt, Artificial Sequence
  Synthetic
uagaacugagagcauuaa

SEQ ID NO: 28945 - RNA, 19 nt, Artificial Sequence
  Synthetic
uuagaacugagagcauuaa

SEQ ID NO: 28946 - RNA, 20 nt, Artificial Sequence
  Synthetic
auuagaacugagagcauuaa

SEQ ID NO: 28947 - RNA, 21 nt, Artificial Sequence
  Synthetic
uauuagaacugagagcauuaa

SEQ ID NO: 28948 - RNA, 23 nt, Artificial Sequence
  Synthetic
uguauuagaacugagagcauuaa

SEQ ID NO: 28949 - RNA, 24 nt, Artificial Sequence
  Synthetic
auguauuagaacugagagcauuaa

SEQ ID NO: 28950 - RNA, 18 nt, Artificial Sequence
  Synthetic
auuuucauaagucauuaa

SEQ ID NO: 28951 - RNA, 19 nt, Artificial Sequence
  Synthetic
uauuuucauaagucauuaa

SEQ ID NO: 28952 - RNA, 20 nt, Artificial Sequence
  Synthetic
auauuuucauaagucauuaa

SEQ ID NO: 28953 - RNA, 21 nt, Artificial Sequence
  Synthetic
aauauuuucauaagucauuaa

SEQ ID NO: 28954 - RNA, 22 nt, Artificial Sequence
  Synthetic
aaauauuuucauaagucauuaa

SEQ ID NO: 28955 - RNA, 23 nt, Artificial Sequence
  Synthetic
aaaauauuuucauaagucauuaa

SEQ ID NO: 28956 - RNA, 24 nt, Artificial Sequence
  Synthetic
uaaaauauuuucauaagucauuaa

SEQ ID NO: 28957 - RNA, 18 nt, Artificial Sequence
  Synthetic
aaaaagaccagucauuaa

SEQ ID NO: 28958 - RNA, 19 nt, Artificial Sequence
  Synthetic
uaaaaagaccagucauuaa

SEQ ID NO: 28959 - RNA, 20 nt, Artificial Sequence
  Synthetic
auaaaaagaccagucauuaa

SEQ ID NO: 28960 - RNA, 21 nt, Artificial Sequence
  Synthetic
aauaaaaagaccagucauuaa

SEQ ID NO: 28961 - RNA, 24 nt, Artificial Sequence
  Synthetic
uggaauaaaaagaccagucauuaa

SEQ ID NO: 28962 - RNA, 18 nt, Artificial Sequence
  Synthetic
agcuauaaaguucauuaa

SEQ ID NO: 28963 - RNA, 19 nt, Artificial Sequence
  Synthetic
uagcuauaaaguucauuaa

SEQ ID NO: 28964 - RNA, 20 nt, Artificial Sequence
  Synthetic
auagcuauaaaguucauuaa

SEQ ID NO: 28965 - RNA, 21 nt, Artificial Sequence
  Synthetic
uauagcuauaaaguucauuaa

SEQ ID NO: 28966 - RNA, 22 nt, Artificial Sequence
  Synthetic
auauagcuauaaaguucauuaa

SEQ ID NO: 28967 - RNA, 23 nt, Artificial Sequence
  Synthetic
aauauagcuauaaaguucauuaa

SEQ ID NO: 28968 - RNA, 24 nt, Artificial Sequence
  Synthetic
aaauauagcuauaaaguucauuaa

SEQ ID NO: 28969 - RNA, 18 nt, Artificial Sequence
  Synthetic
caucauucacuagauuaa

SEQ ID NO: 28970 - RNA, 19 nt, Artificial Sequence
  Synthetic
acaucauucacuagauuaa

SEQ ID NO: 28971 - RNA, 20 nt, Artificial Sequence
  Synthetic
uacaucauucacuagauuaa

SEQ ID NO: 28972 - RNA, 21 nt, Artificial Sequence
  Synthetic
uuacaucauucacuagauuaa

SEQ ID NO: 28973 - RNA, 22 nt, Artificial Sequence
  Synthetic
auuacaucauucacuagauuaa

SEQ ID NO: 28974 - RNA, 23 nt, Artificial Sequence
  Synthetic
cauuacaucauucacuagauuaa

SEQ ID NO: 28975 - RNA, 24 nt, Artificial Sequence
  Synthetic
ucauuacaucauucacuagauuaa

SEQ ID NO: 28976 - RNA, 21 nt, Artificial Sequence
  Synthetic
uaaguaacuuacauggauuaa

SEQ ID NO: 28977 - RNA, 22 nt, Artificial Sequence
  Synthetic
cuaaguaacuuacauggauuaa

SEQ ID NO: 28978 - RNA, 23 nt, Artificial Sequence
  Synthetic
ucuaaguaacuuacauggauuaa

SEQ ID NO: 28979 - RNA, 22 nt, Artificial Sequence
  Synthetic
ugccauuauaaaagaauauuaa

SEQ ID NO: 28980 - RNA, 23 nt, Artificial Sequence
  Synthetic
uugccauuauaaaagaauauuaa

SEQ ID NO: 28981 - RNA, 24 nt, Artificial Sequence
  Synthetic
auugccauuauaaaagaauauuaa

SEQ ID NO: 28982 - RNA, 18 nt, Artificial Sequence
  Synthetic
uuggaggcuuuauauuaa

SEQ ID NO: 28983 - RNA, 19 nt, Artificial Sequence
  Synthetic
cuuggaggcuuuauauuaa

SEQ ID NO: 28984 - RNA, 20 nt, Artificial Sequence
  Synthetic
ucuuggaggcuuuauauuaa

SEQ ID NO: 28985 - RNA, 21 nt, Artificial Sequence
  Synthetic
uucuuggaggcuuuauauuaa

SEQ ID NO: 28986 - RNA, 22 nt, Artificial Sequence
  Synthetic
uuucuuggaggcuuuauauuaa

SEQ ID NO: 28987 - RNA, 24 nt, Artificial Sequence
  Synthetic
uguuucuuggaggcuuuauauuaa

SEQ ID NO: 28988 - RNA, 19 nt, Artificial Sequence
  Synthetic
agcuguuuacaucuauuaa

SEQ ID NO: 28989 - RNA, 20 nt, Artificial Sequence
  Synthetic
uagcuguuuacaucuauuaa

SEQ ID NO: 28990 - RNA, 21 nt, Artificial Sequence
  Synthetic
auagcuguuuacaucuauuaa

SEQ ID NO: 28991 - RNA, 22 nt, Artificial Sequence
  Synthetic
aauagcuguuuacaucuauuaa

SEQ ID NO: 28992 - RNA, 23 nt, Artificial Sequence
  Synthetic
aaauagcuguuuacaucuauuaa

SEQ ID NO: 28993 - RNA, 24 nt, Artificial Sequence
  Synthetic
aaaauagcuguuuacaucuauuaa

SEQ ID NO: 28994 - RNA, 21 nt, Artificial Sequence
  Synthetic
aaucaauacauacauuauuaa

SEQ ID NO: 28995 - RNA, 22 nt, Artificial Sequence
  Synthetic
uaaucaauacauacauuauuaa

SEQ ID NO: 28996 - RNA, 24 nt, Artificial Sequence
  Synthetic
aguaaucaauacauacauuauuaa

SEQ ID NO: 28997 - RNA, 18 nt, Artificial Sequence
  Synthetic
ccauuaggucauuauuaa

SEQ ID NO: 28998 - RNA, 19 nt, Artificial Sequence
  Synthetic
cccauuaggucauuauuaa

SEQ ID NO: 28999 - RNA, 20 nt, Artificial Sequence
  Synthetic
ucccauuaggucauuauuaa

SEQ ID NO: 29000 - RNA, 21 nt, Artificial Sequence
  Synthetic
cucccauuaggucauuauuaa

SEQ ID NO: 29001 - RNA, 22 nt, Artificial Sequence
  Synthetic
ucucccauuaggucauuauuaa

SEQ ID NO: 29002 - RNA, 23 nt, Artificial Sequence
  Synthetic
uucucccauuaggucauuauuaa

SEQ ID NO: 29003 - RNA, 24 nt, Artificial Sequence
  Synthetic
cuucucccauuaggucauuauuaa

SEQ ID NO: 29004 - RNA, 18 nt, Artificial Sequence
  Synthetic
cacuuaaauuauuauuaa

SEQ ID NO: 29005 - RNA, 20 nt, Artificial Sequence
  Synthetic
ugcacuuaaauuauuauuaa

SEQ ID NO: 29006 - RNA, 22 nt, Artificial Sequence
  Synthetic
ugugcacuuaaauuauuauuaa

SEQ ID NO: 29007 - RNA, 23 nt, Artificial Sequence
  Synthetic
cugugcacuuaaauuauuauuaa

SEQ ID NO: 29008 - RNA, 24 nt, Artificial Sequence
  Synthetic
acugugcacuuaaauuauuauuaa

SEQ ID NO: 29009 - RNA, 18 nt, Artificial Sequence
  Synthetic
cguuauuuagccacuuaa

SEQ ID NO: 29010 - RNA, 19 nt, Artificial Sequence
  Synthetic
acguuauuuagccacuuaa

SEQ ID NO: 29011 - RNA, 20 nt, Artificial Sequence
  Synthetic
aacguuauuuagccacuuaa

SEQ ID NO: 29012 - RNA, 21 nt, Artificial Sequence
  Synthetic
aaacguuauuuagccacuuaa

SEQ ID NO: 29013 - RNA, 24 nt, Artificial Sequence
  Synthetic
aggaaacguuauuuagccacuuaa

SEQ ID NO: 29014 - RNA, 18 nt, Artificial Sequence
  Synthetic
auggagacagugacuuaa

SEQ ID NO: 29015 - RNA, 20 nt, Artificial Sequence
  Synthetic
ugauggagacagugacuuaa

SEQ ID NO: 29016 - RNA, 21 nt, Artificial Sequence
  Synthetic
augauggagacagugacuuaa

SEQ ID NO: 29017 - RNA, 22 nt, Artificial Sequence
  Synthetic
aaugauggagacagugacuuaa

SEQ ID NO: 29018 - RNA, 24 nt, Artificial Sequence
  Synthetic
agaaugauggagacagugacuuaa

SEQ ID NO: 29019 - RNA, 18 nt, Artificial Sequence
  Synthetic
aaagcugaauugacuuaa

SEQ ID NO: 29020 - RNA, 19 nt, Artificial Sequence
  Synthetic
aaaagcugaauugacuuaa

SEQ ID NO: 29021 - RNA, 20 nt, Artificial Sequence
  Synthetic
caaaagcugaauugacuuaa

SEQ ID NO: 29022 - RNA, 21 nt, Artificial Sequence
  Synthetic
ucaaaagcugaauugacuuaa

SEQ ID NO: 29023 - RNA, 22 nt, Artificial Sequence
  Synthetic
aucaaaagcugaauugacuuaa

SEQ ID NO: 29024 - RNA, 23 nt, Artificial Sequence
  Synthetic
caucaaaagcugaauugacuuaa

SEQ ID NO: 29025 - RNA, 24 nt, Artificial Sequence
  Synthetic
acaucaaaagcugaauugacuuaa

SEQ ID NO: 29026 - RNA, 19 nt, Artificial Sequence
  Synthetic
ugguaauuguuugacuuaa

SEQ ID NO: 29027 - RNA, 20 nt, Artificial Sequence
  Synthetic
augguaauuguuugacuuaa

SEQ ID NO: 29028 - RNA, 21 nt, Artificial Sequence
  Synthetic
uaugguaauuguuugacuuaa

SEQ ID NO: 29029 - RNA, 22 nt, Artificial Sequence
  Synthetic
uuaugguaauuguuugacuuaa

SEQ ID NO: 29030 - RNA, 23 nt, Artificial Sequence
  Synthetic
uuuaugguaauuguuugacuuaa

SEQ ID NO: 29031 - RNA, 24 nt, Artificial Sequence
  Synthetic
cuuuaugguaauuguuugacuuaa

SEQ ID NO: 29032 - RNA, 18 nt, Artificial Sequence
  Synthetic
uuuuguuucaguacuuaa

SEQ ID NO: 29033 - RNA, 21 nt, Artificial Sequence
  Synthetic
ugguuuuguuucaguacuuaa

SEQ ID NO: 29034 - RNA, 22 nt, Artificial Sequence
  Synthetic
augguuuuguuucaguacuuaa

SEQ ID NO: 29035 - RNA, 23 nt, Artificial Sequence
  Synthetic
caugguuuuguuucaguacuuaa

SEQ ID NO: 29036 - RNA, 18 nt, Artificial Sequence
  Synthetic
aagaacuuuaaaccuuaa

SEQ ID NO: 29037 - RNA, 19 nt, Artificial Sequence
  Synthetic
caagaacuuuaaaccuuaa

SEQ ID NO: 29038 - RNA, 21 nt, Artificial Sequence
  Synthetic
ugcaagaacuuuaaaccuuaa

SEQ ID NO: 29039 - RNA, 23 nt, Artificial Sequence
  Synthetic
agugcaagaacuuuaaaccuuaa

SEQ ID NO: 29040 - RNA, 24 nt, Artificial Sequence
  Synthetic
cagugcaagaacuuuaaaccuuaa

SEQ ID NO: 29041 - RNA, 18 nt, Artificial Sequence
  Synthetic
ugaaugugggaaccuuaa

SEQ ID NO: 29042 - RNA, 19 nt, Artificial Sequence
  Synthetic
augaaugugggaaccuuaa

SEQ ID NO: 29043 - RNA, 20 nt, Artificial Sequence
  Synthetic
aaugaaugugggaaccuuaa

SEQ ID NO: 29044 - RNA, 21 nt, Artificial Sequence
  Synthetic
uaaugaaugugggaaccuuaa

SEQ ID NO: 29045 - RNA, 18 nt, Artificial Sequence
  Synthetic
uuaaaacacucaccuuaa

SEQ ID NO: 29046 - RNA, 19 nt, Artificial Sequence
  Synthetic
uuuaaaacacucaccuuaa

SEQ ID NO: 29047 - RNA, 22 nt, Artificial Sequence
  Synthetic
ugguuuaaaacacucaccuuaa

SEQ ID NO: 29048 - RNA, 23 nt, Artificial Sequence
  Synthetic
uugguuuaaaacacucaccuuaa

SEQ ID NO: 29049 - RNA, 24 nt, Artificial Sequence
  Synthetic
uuugguuuaaaacacucaccuuaa

SEQ ID NO: 29050 - RNA, 18 nt, Artificial Sequence
  Synthetic
auuccguaaaauccuuaa

SEQ ID NO: 29051 - RNA, 19 nt, Artificial Sequence
  Synthetic
cauuccguaaaauccuuaa

SEQ ID NO: 29052 - RNA, 20 nt, Artificial Sequence
  Synthetic
ccauuccguaaaauccuuaa

SEQ ID NO: 29053 - RNA, 21 nt, Artificial Sequence
  Synthetic
accauuccguaaaauccuuaa

SEQ ID NO: 29054 - RNA, 22 nt, Artificial Sequence
  Synthetic
caccauuccguaaaauccuuaa

SEQ ID NO: 29055 - RNA, 23 nt, Artificial Sequence
  Synthetic
ccaccauuccguaaaauccuuaa

SEQ ID NO: 29056 - RNA, 24 nt, Artificial Sequence
  Synthetic
accaccauuccguaaaauccuuaa

SEQ ID NO: 29057 - RNA, 18 nt, Artificial Sequence
  Synthetic
aaaaaaaguaguccuuaa

SEQ ID NO: 29058 - RNA, 19 nt, Artificial Sequence
  Synthetic
aaaaaaaaguaguccuuaa

SEQ ID NO: 29059 - RNA, 21 nt, Artificial Sequence
  Synthetic
agaaaaaaaaguaguccuuaa

SEQ ID NO: 29060 - RNA, 22 nt, Artificial Sequence
  Synthetic
aagaaaaaaaaguaguccuuaa

SEQ ID NO: 29061 - RNA, 23 nt, Artificial Sequence
  Synthetic
caagaaaaaaaaguaguccuuaa

SEQ ID NO: 29062 - RNA, 24 nt, Artificial Sequence
  Synthetic
ucaagaaaaaaaaguaguccuuaa

SEQ ID NO: 29063 - RNA, 18 nt, Artificial Sequence
  Synthetic
uugguacuuggagcuuaa

SEQ ID NO: 29064 - RNA, 19 nt, Artificial Sequence
  Synthetic
auugguacuuggagcuuaa

SEQ ID NO: 29065 - RNA, 21 nt, Artificial Sequence
  Synthetic
agauugguacuuggagcuuaa

SEQ ID NO: 29066 - RNA, 22 nt, Artificial Sequence
  Synthetic
uagauugguacuuggagcuuaa

SEQ ID NO: 29067 - RNA, 23 nt, Artificial Sequence
  Synthetic
cuagauugguacuuggagcuuaa

SEQ ID NO: 29068 - RNA, 24 nt, Artificial Sequence
  Synthetic
ucuagauugguacuuggagcuuaa

SEQ ID NO: 29069 - RNA, 18 nt, Artificial Sequence
  Synthetic
uucuccucaauagcuuaa

SEQ ID NO: 29070 - RNA, 19 nt, Artificial Sequence
  Synthetic
uuucuccucaauagcuuaa

SEQ ID NO: 29071 - RNA, 20 nt, Artificial Sequence
  Synthetic
uuuucuccucaauagcuuaa

SEQ ID NO: 29072 - RNA, 21 nt, Artificial Sequence
  Synthetic
uuuuucuccucaauagcuuaa

SEQ ID NO: 29073 - RNA, 23 nt, Artificial Sequence
  Synthetic
cguuuuucuccucaauagcuuaa

SEQ ID NO: 29074 - RNA, 24 nt, Artificial Sequence
  Synthetic
acguuuuucuccucaauagcuuaa

SEQ ID NO: 29075 - RNA, 18 nt, Artificial Sequence
  Synthetic
cuguauuccucugcuuaa

SEQ ID NO: 29076 - RNA, 20 nt, Artificial Sequence
  Synthetic
ugcuguauuccucugcuuaa

SEQ ID NO: 29077 - RNA, 21 nt, Artificial Sequence
  Synthetic
cugcuguauuccucugcuuaa

SEQ ID NO: 29078 - RNA, 22 nt, Artificial Sequence
  Synthetic
ccugcuguauuccucugcuuaa

SEQ ID NO: 29079 - RNA, 24 nt, Artificial Sequence
  Synthetic
agccugcuguauuccucugcuuaa

SEQ ID NO: 29080 - RNA, 18 nt, Artificial Sequence
  Synthetic
caaacaauuucugcuuaa

SEQ ID NO: 29081 - RNA, 19 nt, Artificial Sequence
  Synthetic
ucaaacaauuucugcuuaa

SEQ ID NO: 29082 - RNA, 20 nt, Artificial Sequence
  Synthetic
uucaaacaauuucugcuuaa

SEQ ID NO: 29083 - RNA, 21 nt, Artificial Sequence
  Synthetic
uuucaaacaauuucugcuuaa

SEQ ID NO: 29084 - RNA, 22 nt, Artificial Sequence
  Synthetic
uuuucaaacaauuucugcuuaa

SEQ ID NO: 29085 - RNA, 23 nt, Artificial Sequence
  Synthetic
auuuucaaacaauuucugcuuaa

SEQ ID NO: 29086 - RNA, 24 nt, Artificial Sequence
  Synthetic
cauuuucaaacaauuucugcuuaa

SEQ ID NO: 29087 - RNA, 18 nt, Artificial Sequence
  Synthetic
agaaucuaguuugcuuaa

SEQ ID NO: 29088 - RNA, 20 nt, Artificial Sequence
  Synthetic
agagaaucuaguuugcuuaa

SEQ ID NO: 29089 - RNA, 22 nt, Artificial Sequence
  Synthetic
agagagaaucuaguuugcuuaa

SEQ ID NO: 29090 - RNA, 18 nt, Artificial Sequence
  Synthetic
cuagaguuaucaucuuaa

SEQ ID NO: 29091 - RNA, 20 nt, Artificial Sequence
  Synthetic
cgcuagaguuaucaucuuaa

SEQ ID NO: 29092 - RNA, 21 nt, Artificial Sequence
  Synthetic
ccgcuagaguuaucaucuuaa

SEQ ID NO: 29093 - RNA, 23 nt, Artificial Sequence
  Synthetic
ugccgcuagaguuaucaucuuaa

SEQ ID NO: 29094 - RNA, 24 nt, Artificial Sequence
  Synthetic
cugccgcuagaguuaucaucuuaa

SEQ ID NO: 29095 - RNA, 19 nt, Artificial Sequence
  Synthetic
aggaagaacacacucuuaa

SEQ ID NO: 29096 - RNA, 20 nt, Artificial Sequence
  Synthetic
caggaagaacacacucuuaa

SEQ ID NO: 29097 - RNA, 18 nt, Artificial Sequence
  Synthetic
aaaugccuuccuucuuaa

SEQ ID NO: 29098 - RNA, 19 nt, Artificial Sequence
  Synthetic
aaaaugccuuccuucuuaa

SEQ ID NO: 29099 - RNA, 21 nt, Artificial Sequence
  Synthetic
ugaaaaugccuuccuucuuaa

SEQ ID NO: 29100 - RNA, 18 nt, Artificial Sequence
  Synthetic
uuauauucaauuucuuaa

SEQ ID NO: 29101 - RNA, 19 nt, Artificial Sequence
  Synthetic
auuauauucaauuucuuaa

SEQ ID NO: 29102 - RNA, 20 nt, Artificial Sequence
  Synthetic
aauuauauucaauuucuuaa

SEQ ID NO: 29103 - RNA, 21 nt, Artificial Sequence
  Synthetic
uaauuauauucaauuucuuaa

SEQ ID NO: 29104 - RNA, 22 nt, Artificial Sequence
  Synthetic
cuaauuauauucaauuucuuaa

SEQ ID NO: 29105 - RNA, 23 nt, Artificial Sequence
  Synthetic
ucuaauuauauucaauuucuuaa

SEQ ID NO: 29106 - RNA, 18 nt, Artificial Sequence
  Synthetic
accuauauagaaaguuaa

SEQ ID NO: 29107 - RNA, 19 nt, Artificial Sequence
  Synthetic
uaccuauauagaaaguuaa

SEQ ID NO: 29108 - RNA, 20 nt, Artificial Sequence
  Synthetic
auaccuauauagaaaguuaa

SEQ ID NO: 29109 - RNA, 21 nt, Artificial Sequence
  Synthetic
uauaccuauauagaaaguuaa

SEQ ID NO: 29110 - RNA, 23 nt, Artificial Sequence
  Synthetic
aguauaccuauauagaaaguuaa

SEQ ID NO: 29111 - RNA, 24 nt, Artificial Sequence
  Synthetic
aaguauaccuauauagaaaguuaa

SEQ ID NO: 29112 - RNA, 18 nt, Artificial Sequence
  Synthetic
ucuugaacaagaaguuaa

SEQ ID NO: 29113 - RNA, 19 nt, Artificial Sequence
  Synthetic
aucuugaacaagaaguuaa

SEQ ID NO: 29114 - RNA, 20 nt, Artificial Sequence
  Synthetic
caucuugaacaagaaguuaa

SEQ ID NO: 29115 - RNA, 21 nt, Artificial Sequence
  Synthetic
ucaucuugaacaagaaguuaa

SEQ ID NO: 29116 - RNA, 22 nt, Artificial Sequence
  Synthetic
aucaucuugaacaagaaguuaa

SEQ ID NO: 29117 - RNA, 23 nt, Artificial Sequence
  Synthetic
caucaucuugaacaagaaguuaa

SEQ ID NO: 29118 - RNA, 24 nt, Artificial Sequence
  Synthetic
acaucaucuugaacaagaaguuaa

SEQ ID NO: 29119 - RNA, 18 nt, Artificial Sequence
  Synthetic
auaugcaggagaaguuaa

SEQ ID NO: 29120 - RNA, 19 nt, Artificial Sequence
  Synthetic
aauaugcaggagaaguuaa

SEQ ID NO: 29121 - RNA, 20 nt, Artificial Sequence
  Synthetic
aaauaugcaggagaaguuaa

SEQ ID NO: 29122 - RNA, 21 nt, Artificial Sequence
  Synthetic
uaaauaugcaggagaaguuaa

SEQ ID NO: 29123 - RNA, 22 nt, Artificial Sequence
  Synthetic
auaaauaugcaggagaaguuaa

SEQ ID NO: 29124 - RNA, 23 nt, Artificial Sequence
  Synthetic
aauaaauaugcaggagaaguuaa

SEQ ID NO: 29125 - RNA, 24 nt, Artificial Sequence
  Synthetic
caauaaauaugcaggagaaguuaa

SEQ ID NO: 29126 - RNA, 18 nt, Artificial Sequence
  Synthetic
uauuuucagugaaguuaa

SEQ ID NO: 29127 - RNA, 19 nt, Artificial Sequence
  Synthetic
auauuuucagugaaguuaa

SEQ ID NO: 29128 - RNA, 20 nt, Artificial Sequence
  Synthetic
aauauuuucagugaaguuaa

SEQ ID NO: 29129 - RNA, 22 nt, Artificial Sequence
  Synthetic
agaauauuuucagugaaguuaa

SEQ ID NO: 29130 - RNA, 23 nt, Artificial Sequence
  Synthetic
aagaauauuuucagugaaguuaa

SEQ ID NO: 29131 - RNA, 24 nt, Artificial Sequence
  Synthetic
aaagaauauuuucagugaaguuaa

SEQ ID NO: 29132 - RNA, 18 nt, Artificial Sequence
  Synthetic
uauagaagagccaguuaa

SEQ ID NO: 29133 - RNA, 19 nt, Artificial Sequence
  Synthetic
auauagaagagccaguuaa

SEQ ID NO: 29134 - RNA, 20 nt, Artificial Sequence
  Synthetic
cauauagaagagccaguuaa

SEQ ID NO: 29135 - RNA, 21 nt, Artificial Sequence
  Synthetic
acauauagaagagccaguuaa

SEQ ID NO: 29136 - RNA, 24 nt, Artificial Sequence
  Synthetic
uggacauauagaagagccaguuaa

SEQ ID NO: 29137 - RNA, 18 nt, Artificial Sequence
  Synthetic
aauuucaggaagaguuaa

SEQ ID NO: 29138 - RNA, 20 nt, Artificial Sequence
  Synthetic
ugaauuucaggaagaguuaa

SEQ ID NO: 29139 - RNA, 21 nt, Artificial Sequence
  Synthetic
uugaauuucaggaagaguuaa

SEQ ID NO: 29140 - RNA, 22 nt, Artificial Sequence
  Synthetic
auugaauuucaggaagaguuaa

SEQ ID NO: 29141 - RNA, 24 nt, Artificial Sequence
  Synthetic
cgauugaauuucaggaagaguuaa

SEQ ID NO: 29142 - RNA, 18 nt, Artificial Sequence
  Synthetic
auuaaauaauugaguuaa

SEQ ID NO: 29143 - RNA, 19 nt, Artificial Sequence
  Synthetic
cauuaaauaauugaguuaa

SEQ ID NO: 29144 - RNA, 20 nt, Artificial Sequence
  Synthetic
acauuaaauaauugaguuaa

SEQ ID NO: 29145 - RNA, 21 nt, Artificial Sequence
  Synthetic
uacauuaaauaauugaguuaa

SEQ ID NO: 29146 - RNA, 23 nt, Artificial Sequence
  Synthetic
uguacauuaaauaauugaguuaa

SEQ ID NO: 29147 - RNA, 18 nt, Artificial Sequence
  Synthetic
agagcucacaccgguuaa

SEQ ID NO: 29148 - RNA, 19 nt, Artificial Sequence
  Synthetic
uagagcucacaccgguuaa

SEQ ID NO: 29149 - RNA, 20 nt, Artificial Sequence
  Synthetic
cuagagcucacaccgguuaa

SEQ ID NO: 29150 - RNA, 21 nt, Artificial Sequence
  Synthetic
ucuagagcucacaccgguuaa

SEQ ID NO: 29151 - RNA, 23 nt, Artificial Sequence
  Synthetic
agucuagagcucacaccgguuaa

SEQ ID NO: 29152 - RNA, 24 nt, Artificial Sequence
  Synthetic
aagucuagagcucacaccgguuaa

SEQ ID NO: 29153 - RNA, 20 nt, Artificial Sequence
  Synthetic
aggcuugaauauaggguuaa

SEQ ID NO: 29154 - RNA, 21 nt, Artificial Sequence
  Synthetic
aaggcuugaauauaggguuaa

SEQ ID NO: 29155 - RNA, 23 nt, Artificial Sequence
  Synthetic
ugaaggcuugaauauaggguuaa

SEQ ID NO: 29156 - RNA, 24 nt, Artificial Sequence
  Synthetic
augaaggcuugaauauaggguuaa

SEQ ID NO: 29157 - RNA, 19 nt, Artificial Sequence
  Synthetic
uggaaauaaagcugguuaa

SEQ ID NO: 29158 - RNA, 20 nt, Artificial Sequence
  Synthetic
uuggaaauaaagcugguuaa

SEQ ID NO: 29159 - RNA, 21 nt, Artificial Sequence
  Synthetic
auuggaaauaaagcugguuaa

SEQ ID NO: 29160 - RNA, 22 nt, Artificial Sequence
  Synthetic
uauuggaaauaaagcugguuaa

SEQ ID NO: 29161 - RNA, 23 nt, Artificial Sequence
  Synthetic
auauuggaaauaaagcugguuaa

SEQ ID NO: 29162 - RNA, 24 nt, Artificial Sequence
  Synthetic
cauauuggaaauaaagcugguuaa

SEQ ID NO: 29163 - RNA, 18 nt, Artificial Sequence
  Synthetic
aaauaguacagugguuaa

SEQ ID NO: 29164 - RNA, 19 nt, Artificial Sequence
  Synthetic
aaaauaguacagugguuaa

SEQ ID NO: 29165 - RNA, 20 nt, Artificial Sequence
  Synthetic
uaaaauaguacagugguuaa

SEQ ID NO: 29166 - RNA, 23 nt, Artificial Sequence
  Synthetic
agguaaaauaguacagugguuaa

SEQ ID NO: 29167 - RNA, 19 nt, Artificial Sequence
  Synthetic
ugagaaacucuuugguuaa

SEQ ID NO: 29168 - RNA, 20 nt, Artificial Sequence
  Synthetic
uugagaaacucuuugguuaa

SEQ ID NO: 29169 - RNA, 21 nt, Artificial Sequence
  Synthetic
cuugagaaacucuuugguuaa

SEQ ID NO: 29170 - RNA, 22 nt, Artificial Sequence
  Synthetic
ucuugagaaacucuuugguuaa

SEQ ID NO: 29171 - RNA, 23 nt, Artificial Sequence
  Synthetic
uucuugagaaacucuuugguuaa

SEQ ID NO: 29172 - RNA, 24 nt, Artificial Sequence
  Synthetic
uuucuugagaaacucuuugguuaa

SEQ ID NO: 29173 - RNA, 21 nt, Artificial Sequence
  Synthetic
aaauaauauguaauauguuaa

SEQ ID NO: 29174 - RNA, 22 nt, Artificial Sequence
  Synthetic
caaauaauauguaauauguuaa

SEQ ID NO: 29175 - RNA, 23 nt, Artificial Sequence
  Synthetic
acaaauaauauguaauauguuaa

SEQ ID NO: 29176 - RNA, 24 nt, Artificial Sequence
  Synthetic
cacaaauaauauguaauauguuaa

SEQ ID NO: 29177 - RNA, 18 nt, Artificial Sequence
  Synthetic
aaaaccagaaucuguuaa

SEQ ID NO: 29178 - RNA, 19 nt, Artificial Sequence
  Synthetic
aaaaaccagaaucuguuaa

SEQ ID NO: 29179 - RNA, 20 nt, Artificial Sequence
  Synthetic
aaaaaaccagaaucuguuaa

SEQ ID NO: 29180 - RNA, 22 nt, Artificial Sequence
  Synthetic
ugaauuaucuucaaaguguuaa

SEQ ID NO: 29181 - RNA, 23 nt, Artificial Sequence
  Synthetic
augaauuaucuucaaaguguuaa

SEQ ID NO: 29182 - RNA, 24 nt, Artificial Sequence
  Synthetic
caugaauuaucuucaaaguguuaa

SEQ ID NO: 29183 - RNA, 18 nt, Artificial Sequence
  Synthetic
aaucugaguaauuguuaa

SEQ ID NO: 29184 - RNA, 19 nt, Artificial Sequence
  Synthetic
caaucugaguaauuguuaa

SEQ ID NO: 29185 - RNA, 20 nt, Artificial Sequence
  Synthetic
ucaaucugaguaauuguuaa

SEQ ID NO: 29186 - RNA, 22 nt, Artificial Sequence
  Synthetic
ugucaaucugaguaauuguuaa

SEQ ID NO: 29187 - RNA, 23 nt, Artificial Sequence
  Synthetic
uugucaaucugaguaauuguuaa

SEQ ID NO: 29188 - RNA, 19 nt, Artificial Sequence
  Synthetic
aggguucggggaaauuuaa

SEQ ID NO: 29189 - RNA, 20 nt, Artificial Sequence
  Synthetic
uaggguucggggaaauuuaa

SEQ ID NO: 29190 - RNA, 21 nt, Artificial Sequence
  Synthetic
cuaggguucggggaaauuuaa

SEQ ID NO: 29191 - RNA, 22 nt, Artificial Sequence
  Synthetic
acuaggguucggggaaauuuaa

SEQ ID NO: 29192 - RNA, 23 nt, Artificial Sequence
  Synthetic
cacuaggguucggggaaauuuaa

SEQ ID NO: 29193 - RNA, 19 nt, Artificial Sequence
  Synthetic
agggacacauuaaauuuaa

SEQ ID NO: 29194 - RNA, 21 nt, Artificial Sequence
  Synthetic
agagggacacauuaaauuuaa

SEQ ID NO: 29195 - RNA, 22 nt, Artificial Sequence
  Synthetic
cagagggacacauuaaauuuaa

SEQ ID NO: 29196 - RNA, 23 nt, Artificial Sequence
  Synthetic
acagagggacacauuaaauuuaa

SEQ ID NO: 29197 - RNA, 22 nt, Artificial Sequence
  Synthetic
uguguagaaaauuuaaauuuaa

SEQ ID NO: 29198 - RNA, 23 nt, Artificial Sequence
  Synthetic
uuguguagaaaauuuaaauuuaa

SEQ ID NO: 29199 - RNA, 24 nt, Artificial Sequence
  Synthetic
auuguguagaaaauuuaaauuuaa

SEQ ID NO: 29200 - RNA, 18 nt, Artificial Sequence
  Synthetic
ugcuucagaagcauuuaa

SEQ ID NO: 29201 - RNA, 19 nt, Artificial Sequence
  Synthetic
augcuucagaagcauuuaa

SEQ ID NO: 29202 - RNA, 20 nt, Artificial Sequence
  Synthetic
aaugcuucagaagcauuuaa

SEQ ID NO: 29203 - RNA, 22 nt, Artificial Sequence
  Synthetic
agaaugcuucagaagcauuuaa

SEQ ID NO: 29204 - RNA, 24 nt, Artificial Sequence
  Synthetic
agagaaugcuucagaagcauuuaa

SEQ ID NO: 29205 - RNA, 18 nt, Artificial Sequence
  Synthetic
cucucauuuuauauuuaa

SEQ ID NO: 29206 - RNA, 19 nt, Artificial Sequence
  Synthetic
ccucucauuuuauauuuaa

SEQ ID NO: 29207 - RNA, 20 nt, Artificial Sequence
  Synthetic
uccucucauuuuauauuuaa

SEQ ID NO: 29208 - RNA, 21 nt, Artificial Sequence
  Synthetic
uuccucucauuuuauauuuaa

SEQ ID NO: 29209 - RNA, 22 nt, Artificial Sequence
  Synthetic
uuuccucucauuuuauauuuaa

SEQ ID NO: 29210 - RNA, 23 nt, Artificial Sequence
  Synthetic
auuuccucucauuuuauauuuaa

SEQ ID NO: 29211 - RNA, 24 nt, Artificial Sequence
  Synthetic
uauuuccucucauuuuauauuuaa

SEQ ID NO: 29212 - RNA, 18 nt, Artificial Sequence
  Synthetic
ugagcugagguuauuuaa

SEQ ID NO: 29213 - RNA, 19 nt, Artificial Sequence
  Synthetic
cugagcugagguuauuuaa

SEQ ID NO: 29214 - RNA, 20 nt, Artificial Sequence
  Synthetic
acugagcugagguuauuuaa

SEQ ID NO: 29215 - RNA, 21 nt, Artificial Sequence
  Synthetic
aacugagcugagguuauuuaa

SEQ ID NO: 29216 - RNA, 22 nt, Artificial Sequence
  Synthetic
aaacugagcugagguuauuuaa

SEQ ID NO: 29217 - RNA, 24 nt, Artificial Sequence
  Synthetic
ugaaacugagcugagguuauuuaa

SEQ ID NO: 29218 - RNA, 18 nt, Artificial Sequence
  Synthetic
uaccucccugcacuuuaa

SEQ ID NO: 29219 - RNA, 19 nt, Artificial Sequence
  Synthetic
auaccucccugcacuuuaa

SEQ ID NO: 29220 - RNA, 20 nt, Artificial Sequence
  Synthetic
uauaccucccugcacuuuaa

SEQ ID NO: 29221 - RNA, 21 nt, Artificial Sequence
  Synthetic
uuauaccucccugcacuuuaa

SEQ ID NO: 29222 - RNA, 22 nt, Artificial Sequence
  Synthetic
uuuauaccucccugcacuuuaa

SEQ ID NO: 29223 - RNA, 23 nt, Artificial Sequence
  Synthetic
cuuuauaccucccugcacuuuaa

SEQ ID NO: 29224 - RNA, 24 nt, Artificial Sequence
  Synthetic
ucuuuauaccucccugcacuuuaa

SEQ ID NO: 29225 - RNA, 18 nt, Artificial Sequence
  Synthetic
ccauguuuaagacuuuaa

SEQ ID NO: 29226 - RNA, 19 nt, Artificial Sequence
  Synthetic
uccauguuuaagacuuuaa

SEQ ID NO: 29227 - RNA, 20 nt, Artificial Sequence
  Synthetic
auccauguuuaagacuuuaa

SEQ ID NO: 29228 - RNA, 22 nt, Artificial Sequence
  Synthetic
ugauccauguuuaagacuuuaa

SEQ ID NO: 29229 - RNA, 24 nt, Artificial Sequence
  Synthetic
agugauccauguuuaagacuuuaa

SEQ ID NO: 29230 - RNA, 19 nt, Artificial Sequence
  Synthetic
ugccaaugaauuacuuuaa

SEQ ID NO: 29231 - RNA, 20 nt, Artificial Sequence
  Synthetic
augccaaugaauuacuuuaa

SEQ ID NO: 29232 - RNA, 21 nt, Artificial Sequence
  Synthetic
caugccaaugaauuacuuuaa

SEQ ID NO: 29233 - RNA, 22 nt, Artificial Sequence
  Synthetic
ucaugccaaugaauuacuuuaa

SEQ ID NO: 29234 - RNA, 24 nt, Artificial Sequence
  Synthetic
agucaugccaaugaauuacuuuaa

SEQ ID NO: 29235 - RNA, 18 nt, Artificial Sequence
  Synthetic
aggcuagagaaucuuuaa

SEQ ID NO: 29236 - RNA, 19 nt, Artificial Sequence
  Synthetic
uaggcuagagaaucuuuaa

SEQ ID NO: 29237 - RNA, 20 nt, Artificial Sequence
  Synthetic
cuaggcuagagaaucuuuaa

SEQ ID NO: 29238 - RNA, 21 nt, Artificial Sequence
  Synthetic
ucuaggcuagagaaucuuuaa

SEQ ID NO: 29239 - RNA, 22 nt, Artificial Sequence
  Synthetic
uucuaggcuagagaaucuuuaa

SEQ ID NO: 29240 - RNA, 24 nt, Artificial Sequence
  Synthetic
uguucuaggcuagagaaucuuuaa

SEQ ID NO: 29241 - RNA, 20 nt, Artificial Sequence
  Synthetic
uggaugcauaacuucuuuaa

SEQ ID NO: 29242 - RNA, 21 nt, Artificial Sequence
  Synthetic
auggaugcauaacuucuuuaa

SEQ ID NO: 29243 - RNA, 22 nt, Artificial Sequence
  Synthetic
uauggaugcauaacuucuuuaa

SEQ ID NO: 29244 - RNA, 23 nt, Artificial Sequence
  Synthetic
auauggaugcauaacuucuuuaa

SEQ ID NO: 29245 - RNA, 24 nt, Artificial Sequence
  Synthetic
uauauggaugcauaacuucuuuaa

SEQ ID NO: 29246 - RNA, 21 nt, Artificial Sequence
  Synthetic
auaauauagcuauuucuuuaa

SEQ ID NO: 29247 - RNA, 23 nt, Artificial Sequence
  Synthetic
agauaauauagcuauuucuuuaa

SEQ ID NO: 29248 - RNA, 24 nt, Artificial Sequence
  Synthetic
aagauaauauagcuauuucuuuaa

SEQ ID NO: 29249 - RNA, 18 nt, Artificial Sequence
  Synthetic
cugggaguaccaguuuaa

SEQ ID NO: 29250 - RNA, 19 nt, Artificial Sequence
  Synthetic
ccugggaguaccaguuuaa

SEQ ID NO: 29251 - RNA, 20 nt, Artificial Sequence
  Synthetic
accugggaguaccaguuuaa

SEQ ID NO: 29252 - RNA, 22 nt, Artificial Sequence
  Synthetic
agaccugggaguaccaguuuaa

SEQ ID NO: 29253 - RNA, 23 nt, Artificial Sequence
  Synthetic
aagaccugggaguaccaguuuaa

SEQ ID NO: 29254 - RNA, 24 nt, Artificial Sequence
  Synthetic
caagaccugggaguaccaguuuaa

SEQ ID NO: 29255 - RNA, 21 nt, Artificial Sequence
  Synthetic
aauaauuuuauauauguuuaa

SEQ ID NO: 29256 - RNA, 22 nt, Artificial Sequence
  Synthetic
caauaauuuuauauauguuuaa

SEQ ID NO: 29257 - RNA, 23 nt, Artificial Sequence
  Synthetic
ccaauaauuuuauauauguuuaa

SEQ ID NO: 29258 - RNA, 24 nt, Artificial Sequence
  Synthetic
accaauaauuuuauauauguuuaa

SEQ ID NO: 29259 - RNA, 18 nt, Artificial Sequence
  Synthetic
cuauaugugguuguuuaa

SEQ ID NO: 29260 - RNA, 20 nt, Artificial Sequence
  Synthetic
ugcuauaugugguuguuuaa

SEQ ID NO: 29261 - RNA, 18 nt, Artificial Sequence
  Synthetic
uaaauauugacauuuuaa

SEQ ID NO: 29262 - RNA, 20 nt, Artificial Sequence
  Synthetic
aguaaauauugacauuuuaa

SEQ ID NO: 29263 - RNA, 21 nt, Artificial Sequence
  Synthetic
caguaaauauugacauuuuaa

SEQ ID NO: 29264 - RNA, 22 nt, Artificial Sequence
  Synthetic
acaguaaauauugacauuuuaa

SEQ ID NO: 29265 - RNA, 23 nt, Artificial Sequence
  Synthetic
uacaguaaauauugacauuuuaa

SEQ ID NO: 29266 - RNA, 24 nt, Artificial Sequence
  Synthetic
auacaguaaauauugacauuuuaa

SEQ ID NO: 29267 - RNA, 21 nt, Artificial Sequence
  Synthetic
uuuauuuuaccaugauuuuaa

SEQ ID NO: 29268 - RNA, 22 nt, Artificial Sequence
  Synthetic
uuuuauuuuaccaugauuuuaa

SEQ ID NO: 29269 - RNA, 23 nt, Artificial Sequence
  Synthetic
auuuuauuuuaccaugauuuuaa

SEQ ID NO: 29270 - RNA, 24 nt, Artificial Sequence
  Synthetic
cauuuuauuuuaccaugauuuuaa

SEQ ID NO: 29271 - RNA, 21 nt, Artificial Sequence
  Synthetic
aguaauucuuguauauuuuaa

SEQ ID NO: 29272 - RNA, 22 nt, Artificial Sequence
  Synthetic
caguaauucuuguauauuuuaa

SEQ ID NO: 29273 - RNA, 23 nt, Artificial Sequence
  Synthetic
acaguaauucuuguauauuuuaa

SEQ ID NO: 29274 - RNA, 24 nt, Artificial Sequence
  Synthetic
cacaguaauucuuguauauuuuaa

SEQ ID NO: 29275 - RNA, 18 nt, Artificial Sequence
  Synthetic
uagacuaaucuauuuuaa

SEQ ID NO: 29276 - RNA, 20 nt, Artificial Sequence
  Synthetic
aguagacuaaucuauuuuaa

SEQ ID NO: 29277 - RNA, 21 nt, Artificial Sequence
  Synthetic
aaguagacuaaucuauuuuaa

SEQ ID NO: 29278 - RNA, 22 nt, Artificial Sequence
  Synthetic
aaaguagacuaaucuauuuuaa

SEQ ID NO: 29279 - RNA, 23 nt, Artificial Sequence
  Synthetic
uaaaguagacuaaucuauuuuaa

SEQ ID NO: 29280 - RNA, 24 nt, Artificial Sequence
  Synthetic
auaaaguagacuaaucuauuuuaa

SEQ ID NO: 29281 - RNA, 21 nt, Artificial Sequence
  Synthetic
aucucaacuaauaccuuuuaa

SEQ ID NO: 29282 - RNA, 22 nt, Artificial Sequence
  Synthetic
uaucucaacuaauaccuuuuaa

SEQ ID NO: 29283 - RNA, 24 nt, Artificial Sequence
  Synthetic
uguaucucaacuaauaccuuuuaa

SEQ ID NO: 29284 - RNA, 18 nt, Artificial Sequence
  Synthetic
aggcacagauaguuuuaa

SEQ ID NO: 29285 - RNA, 19 nt, Artificial Sequence
  Synthetic
uaggcacagauaguuuuaa

SEQ ID NO: 29286 - RNA, 21 nt, Artificial Sequence
  Synthetic
aguaggcacagauaguuuuaa

SEQ ID NO: 29287 - RNA, 24 nt, Artificial Sequence
  Synthetic
aggaguaggcacagauaguuuuaa

SEQ ID NO: 29288 - RNA, 18 nt, Artificial Sequence
  Synthetic
aucucaaucauguuuuaa

SEQ ID NO: 29289 - RNA, 20 nt, Artificial Sequence
  Synthetic
ugaucucaaucauguuuuaa

SEQ ID NO: 29290 - RNA, 21 nt, Artificial Sequence
  Synthetic
cauuaguuuuauauguuuuaa

SEQ ID NO: 29291 - RNA, 23 nt, Artificial Sequence
  Synthetic
agcauuaguuuuauauguuuuaa

SEQ ID NO: 29292 - RNA, 24 nt, Artificial Sequence
  Synthetic
aagcauuaguuuuauauguuuuaa

SEQ ID NO: 29293 - RNA, 18 nt, Artificial Sequence
  Synthetic
aucccaauuauguuuuaa

SEQ ID NO: 29294 - RNA, 20 nt, Artificial Sequence
  Synthetic
ugaucccaauuauguuuuaa

SEQ ID NO: 29295 - RNA, 21 nt, Artificial Sequence
  Synthetic
augaucccaauuauguuuuaa

SEQ ID NO: 29296 - RNA, 22 nt, Artificial Sequence
  Synthetic
uaugaucccaauuauguuuuaa

SEQ ID NO: 29297 - RNA, 23 nt, Artificial Sequence
  Synthetic
auaugaucccaauuauguuuuaa

SEQ ID NO: 29298 - RNA, 21 nt, Artificial Sequence
  Synthetic
ugggaggauugaguguuuuaa

SEQ ID NO: 29299 - RNA, 22 nt, Artificial Sequence
  Synthetic
uugggaggauugaguguuuuaa

SEQ ID NO: 29300 - RNA, 23 nt, Artificial Sequence
  Synthetic
cuugggaggauugaguguuuuaa

SEQ ID NO: 29301 - RNA, 24 nt, Artificial Sequence
  Synthetic
ucuugggaggauugaguguuuuaa

SEQ ID NO: 29302 - RNA, 18 nt, Artificial Sequence
  Synthetic
aacuagugauuguuuuaa

SEQ ID NO: 29303 - RNA, 19 nt, Artificial Sequence
  Synthetic
uaacuagugauuguuuuaa

SEQ ID NO: 29304 - RNA, 20 nt, Artificial Sequence
  Synthetic
uuaacuagugauuguuuuaa

SEQ ID NO: 29305 - RNA, 21 nt, Artificial Sequence
  Synthetic
cuuaacuagugauuguuuuaa

SEQ ID NO: 29306 - RNA, 22 nt, Artificial Sequence
  Synthetic
acuuaacuagugauuguuuuaa

SEQ ID NO: 29307 - RNA, 23 nt, Artificial Sequence
  Synthetic
uacuuaacuagugauuguuuuaa

SEQ ID NO: 29308 - RNA, 18 nt, Artificial Sequence
  Synthetic
aguacgguauauuuuuaa

SEQ ID NO: 29309 - RNA, 19 nt, Artificial Sequence
  Synthetic
aaguacgguauauuuuuaa

SEQ ID NO: 29310 - RNA, 20 nt, Artificial Sequence
  Synthetic
uaaguacgguauauuuuuaa

SEQ ID NO: 29311 - RNA, 21 nt, Artificial Sequence
  Synthetic
auaaguacgguauauuuuuaa

SEQ ID NO: 29312 - RNA, 22 nt, Artificial Sequence
  Synthetic
uauaaguacgguauauuuuuaa

SEQ ID NO: 29313 - RNA, 23 nt, Artificial Sequence
  Synthetic
uuauaaguacgguauauuuuuaa

SEQ ID NO: 29314 - RNA, 24 nt, Artificial Sequence
  Synthetic
uuuauaaguacgguauauuuuuaa

SEQ ID NO: 29315 - RNA, 18 nt, Artificial Sequence
  Synthetic
ccucauuauccuuuuuaa

SEQ ID NO: 29316 - RNA, 19 nt, Artificial Sequence
  Synthetic
uccucauuauccuuuuuaa

SEQ ID NO: 29317 - RNA, 20 nt, Artificial Sequence
  Synthetic
uuccucauuauccuuuuuaa

SEQ ID NO: 29318 - RNA, 21 nt, Artificial Sequence
  Synthetic
auuccucauuauccuuuuuaa

SEQ ID NO: 29319 - RNA, 22 nt, Artificial Sequence
  Synthetic
uauuccucauuauccuuuuuaa

SEQ ID NO: 29320 - RNA, 23 nt, Artificial Sequence
  Synthetic
cuauuccucauuauccuuuuuaa

SEQ ID NO: 29321 - RNA, 24 nt, Artificial Sequence
  Synthetic
ucuauuccucauuauccuuuuuaa

SEQ ID NO: 29322 - RNA, 18 nt, Artificial Sequence
  Synthetic
aauucaacaguuuuuuaa

SEQ ID NO: 29323 - RNA, 19 nt, Artificial Sequence
  Synthetic
caauucaacaguuuuuuaa

SEQ ID NO: 29324 - RNA, 20 nt, Artificial Sequence
  Synthetic
ccaauucaacaguuuuuuaa

SEQ ID NO: 29325 - RNA, 21 nt, Artificial Sequence
  Synthetic
accaauucaacaguuuuuuaa

SEQ ID NO: 29326 - RNA, 22 nt, Artificial Sequence
  Synthetic
aaccaauucaacaguuuuuuaa

SEQ ID NO: 29327 - RNA, 23 nt, Artificial Sequence
  Synthetic
uaaccaauucaacaguuuuuuaa

SEQ ID NO: 29328 - RNA, 24 nt, Artificial Sequence
  Synthetic
cuaaccaauucaacaguuuuuuaa

SEQ ID NO: 29329 - RNA, 22 nt, Artificial Sequence
  Synthetic
ugccagagaaggauuuuuuuaa

SEQ ID NO: 29330 - RNA, 23 nt, Artificial Sequence
  Synthetic
uugccagagaaggauuuuuuuaa

SEQ ID NO: 29331 - RNA, 24 nt, Artificial Sequence
  Synthetic
uuugccagagaaggauuuuuuuaa

SEQ ID NO: 29332 - RNA, 21 nt, Artificial Sequence
  Synthetic
uuaucugcagauuuuuuuuaa

SEQ ID NO: 29333 - RNA, 22 nt, Artificial Sequence
  Synthetic
auuaucugcagauuuuuuuuaa

SEQ ID NO: 29334 - RNA, 18 nt, Artificial Sequence
  Synthetic
cauaguauguaaaaaaca

SEQ ID NO: 29335 - RNA, 19 nt, Artificial Sequence
  Synthetic
ucauaguauguaaaaaaca

SEQ ID NO: 29336 - RNA, 21 nt, Artificial Sequence
  Synthetic
ugucauaguauguaaaaaaca

SEQ ID NO: 29337 - RNA, 22 nt, Artificial Sequence
  Synthetic
uugucauaguauguaaaaaaca

SEQ ID NO: 29338 - RNA, 23 nt, Artificial Sequence
  Synthetic
uuugucauaguauguaaaaaaca

SEQ ID NO: 29339 - RNA, 24 nt, Artificial Sequence
  Synthetic
uuuugucauaguauguaaaaaaca

SEQ ID NO: 29340 - RNA, 18 nt, Artificial Sequence
  Synthetic
aauguguccugaaaaaca

SEQ ID NO: 29341 - RNA, 21 nt, Artificial Sequence
  Synthetic
uggaauguguccugaaaaaca

SEQ ID NO: 29342 - RNA, 23 nt, Artificial Sequence
  Synthetic
aguggaauguguccugaaaaaca

SEQ ID NO: 29343 - RNA, 24 nt, Artificial Sequence
  Synthetic
caguggaauguguccugaaaaaca

SEQ ID NO: 29344 - RNA, 21 nt, Artificial Sequence
  Synthetic
uauaggaaacauguaaaaaca

SEQ ID NO: 29345 - RNA, 22 nt, Artificial Sequence
  Synthetic
cuauaggaaacauguaaaaaca

SEQ ID NO: 29346 - RNA, 23 nt, Artificial Sequence
  Synthetic
ccuauaggaaacauguaaaaaca

SEQ ID NO: 29347 - RNA, 24 nt, Artificial Sequence
  Synthetic
accuauaggaaacauguaaaaaca

SEQ ID NO: 29348 - RNA, 19 nt, Artificial Sequence
  Synthetic
agugccaccaaggaaaaca

SEQ ID NO: 29349 - RNA, 20 nt, Artificial Sequence
  Synthetic
cagugccaccaaggaaaaca

SEQ ID NO: 29350 - RNA, 21 nt, Artificial Sequence
  Synthetic
ucagugccaccaaggaaaaca

SEQ ID NO: 29351 - RNA, 24 nt, Artificial Sequence
  Synthetic
uggucagugccaccaaggaaaaca

SEQ ID NO: 29352 - RNA, 18 nt, Artificial Sequence
  Synthetic
agauacaagaugaaaaca

SEQ ID NO: 29353 - RNA, 19 nt, Artificial Sequence
  Synthetic
aagauacaagaugaaaaca

SEQ ID NO: 29354 - RNA, 22 nt, Artificial Sequence
  Synthetic
uggaagauacaagaugaaaaca

SEQ ID NO: 29355 - RNA, 24 nt, Artificial Sequence
  Synthetic
aguggaagauacaagaugaaaaca

SEQ ID NO: 29356 - RNA, 18 nt, Artificial Sequence
  Synthetic
auagcaaguuugaaaaca

SEQ ID NO: 29357 - RNA, 20 nt, Artificial Sequence
  Synthetic
agauagcaaguuugaaaaca

SEQ ID NO: 29358 - RNA, 22 nt, Artificial Sequence
  Synthetic
ugagauagcaaguuugaaaaca

SEQ ID NO: 29359 - RNA, 23 nt, Artificial Sequence
  Synthetic
augagauagcaaguuugaaaaca

SEQ ID NO: 29360 - RNA, 21 nt, Artificial Sequence
  Synthetic
auucauuaaagaaauaaaaca

SEQ ID NO: 29361 - RNA, 22 nt, Artificial Sequence
  Synthetic
aauucauuaaagaaauaaaaca

SEQ ID NO: 29362 - RNA, 23 nt, Artificial Sequence
  Synthetic
uaauucauuaaagaaauaaaaca

SEQ ID NO: 29363 - RNA, 24 nt, Artificial Sequence
  Synthetic
cuaauucauuaaagaaauaaaaca

SEQ ID NO: 29364 - RNA, 21 nt, Artificial Sequence
  Synthetic
aaauauauaaagcauaaaaca

SEQ ID NO: 29365 - RNA, 23 nt, Artificial Sequence
  Synthetic
ugaaauauauaaagcauaaaaca

SEQ ID NO: 29366 - RNA, 18 nt, Artificial Sequence
  Synthetic
agccuccaauguaaaaca

SEQ ID NO: 29367 - RNA, 19 nt, Artificial Sequence
  Synthetic
uagccuccaauguaaaaca

SEQ ID NO: 29368 - RNA, 20 nt, Artificial Sequence
  Synthetic
uuagccuccaauguaaaaca

SEQ ID NO: 29369 - RNA, 21 nt, Artificial Sequence
  Synthetic
uuuagccuccaauguaaaaca

SEQ ID NO: 29370 - RNA, 22 nt, Artificial Sequence
  Synthetic
auuuagccuccaauguaaaaca

SEQ ID NO: 29371 - RNA, 23 nt, Artificial Sequence
  Synthetic
uauuuagccuccaauguaaaaca

SEQ ID NO: 29372 - RNA, 24 nt, Artificial Sequence
  Synthetic
cuauuuagccuccaauguaaaaca

SEQ ID NO: 29373 - RNA, 18 nt, Artificial Sequence
  Synthetic
aacaaacgauuuaaaaca

SEQ ID NO: 29374 - RNA, 19 nt, Artificial Sequence
  Synthetic
aaacaaacgauuuaaaaca

SEQ ID NO: 29375 - RNA, 20 nt, Artificial Sequence
  Synthetic
caaacaaacgauuuaaaaca

SEQ ID NO: 29376 - RNA, 21 nt, Artificial Sequence
  Synthetic
ccaaacaaacgauuuaaaaca

SEQ ID NO: 29377 - RNA, 22 nt, Artificial Sequence
  Synthetic
accaaacaaacgauuuaaaaca

SEQ ID NO: 29378 - RNA, 23 nt, Artificial Sequence
  Synthetic
aaccaaacaaacgauuuaaaaca

SEQ ID NO: 29379 - RNA, 18 nt, Artificial Sequence
  Synthetic
aaaaaaguauagcaaaca

SEQ ID NO: 29380 - RNA, 21 nt, Artificial Sequence
  Synthetic
aggaaaaaaguauagcaaaca

SEQ ID NO: 29381 - RNA, 22 nt, Artificial Sequence
  Synthetic
aaggaaaaaaguauagcaaaca

SEQ ID NO: 29382 - RNA, 24 nt, Artificial Sequence
  Synthetic
agaaggaaaaaaguauagcaaaca

SEQ ID NO: 29383 - RNA, 18 nt, Artificial Sequence
  Synthetic
uuuucuuaacaucaaaca

SEQ ID NO: 29384 - RNA, 19 nt, Artificial Sequence
  Synthetic
auuuucuuaacaucaaaca

SEQ ID NO: 29385 - RNA, 20 nt, Artificial Sequence
  Synthetic
cauuuucuuaacaucaaaca

SEQ ID NO: 29386 - RNA, 21 nt, Artificial Sequence
  Synthetic
ucauuuucuuaacaucaaaca

SEQ ID NO: 29387 - RNA, 22 nt, Artificial Sequence
  Synthetic
aucauuuucuuaacaucaaaca

SEQ ID NO: 29388 - RNA, 24 nt, Artificial Sequence
  Synthetic
agaucauuuucuuaacaucaaaca

SEQ ID NO: 29389 - RNA, 19 nt, Artificial Sequence
  Synthetic
ugucuuuguaugucaaaca

SEQ ID NO: 29390 - RNA, 20 nt, Artificial Sequence
  Synthetic
augucuuuguaugucaaaca

SEQ ID NO: 29391 - RNA, 21 nt, Artificial Sequence
  Synthetic
uaugucuuuguaugucaaaca

SEQ ID NO: 29392 - RNA, 22 nt, Artificial Sequence
  Synthetic
auaugucuuuguaugucaaaca

SEQ ID NO: 29393 - RNA, 23 nt, Artificial Sequence
  Synthetic
uauaugucuuuguaugucaaaca

SEQ ID NO: 29394 - RNA, 24 nt, Artificial Sequence
  Synthetic
uuauaugucuuuguaugucaaaca

SEQ ID NO: 29395 - RNA, 18 nt, Artificial Sequence
  Synthetic
agggaaguuuuucaaaca

SEQ ID NO: 29396 - RNA, 19 nt, Artificial Sequence
  Synthetic
aagggaaguuuuucaaaca

SEQ ID NO: 29397 - RNA, 21 nt, Artificial Sequence
  Synthetic
agaagggaaguuuuucaaaca

SEQ ID NO: 29398 - RNA, 22 nt, Artificial Sequence
  Synthetic
aagaagggaaguuuuucaaaca

SEQ ID NO: 29399 - RNA, 23 nt, Artificial Sequence
  Synthetic
uaagaagggaaguuuuucaaaca

SEQ ID NO: 29400 - RNA, 24 nt, Artificial Sequence
  Synthetic
cuaagaagggaaguuuuucaaaca

SEQ ID NO: 29401 - RNA, 18 nt, Artificial Sequence
  Synthetic
ucacacaaaccagaaaca

SEQ ID NO: 29402 - RNA, 19 nt, Artificial Sequence
  Synthetic
aucacacaaaccagaaaca

SEQ ID NO: 29403 - RNA, 20 nt, Artificial Sequence
  Synthetic
aaucacacaaaccagaaaca

SEQ ID NO: 29404 - RNA, 21 nt, Artificial Sequence
  Synthetic
caaucacacaaaccagaaaca

SEQ ID NO: 29405 - RNA, 22 nt, Artificial Sequence
  Synthetic
ucaaucacacaaaccagaaaca

SEQ ID NO: 29406 - RNA, 23 nt, Artificial Sequence
  Synthetic
aucaaucacacaaaccagaaaca

SEQ ID NO: 29407 - RNA, 24 nt, Artificial Sequence
  Synthetic
aaucaaucacacaaaccagaaaca

SEQ ID NO: 29408 - RNA, 18 nt, Artificial Sequence
  Synthetic
auugaaaauccagaaaca

SEQ ID NO: 29409 - RNA, 19 nt, Artificial Sequence
  Synthetic
aauugaaaauccagaaaca

SEQ ID NO: 29410 - RNA, 20 nt, Artificial Sequence
  Synthetic
uaauugaaaauccagaaaca

SEQ ID NO: 29411 - RNA, 21 nt, Artificial Sequence
  Synthetic
auaauugaaaauccagaaaca

SEQ ID NO: 29412 - RNA, 22 nt, Artificial Sequence
  Synthetic
cauaauugaaaauccagaaaca

SEQ ID NO: 29413 - RNA, 24 nt, Artificial Sequence
  Synthetic
ugcauaauugaaaauccagaaaca

SEQ ID NO: 29414 - RNA, 18 nt, Artificial Sequence
  Synthetic
aaauauaugggagaaaca

SEQ ID NO: 29415 - RNA, 19 nt, Artificial Sequence
  Synthetic
uaaauauaugggagaaaca

SEQ ID NO: 29416 - RNA, 22 nt, Artificial Sequence
  Synthetic
agguaaauauaugggagaaaca

SEQ ID NO: 29417 - RNA, 23 nt, Artificial Sequence
  Synthetic
aagguaaauauaugggagaaaca

SEQ ID NO: 29418 - RNA, 18 nt, Artificial Sequence
  Synthetic
cagggagcaauagaaaca

SEQ ID NO: 29419 - RNA, 19 nt, Artificial Sequence
  Synthetic
acagggagcaauagaaaca

SEQ ID NO: 29420 - RNA, 20 nt, Artificial Sequence
  Synthetic
aacagggagcaauagaaaca

SEQ ID NO: 29421 - RNA, 21 nt, Artificial Sequence
  Synthetic
uaacagggagcaauagaaaca

SEQ ID NO: 29422 - RNA, 22 nt, Artificial Sequence
  Synthetic
auaacagggagcaauagaaaca

SEQ ID NO: 29423 - RNA, 23 nt, Artificial Sequence
  Synthetic
aauaacagggagcaauagaaaca

SEQ ID NO: 29424 - RNA, 24 nt, Artificial Sequence
  Synthetic
caauaacagggagcaauagaaaca

SEQ ID NO: 29425 - RNA, 18 nt, Artificial Sequence
  Synthetic
auagcugccucggaaaca

SEQ ID NO: 29426 - RNA, 19 nt, Artificial Sequence
  Synthetic
cauagcugccucggaaaca

SEQ ID NO: 29427 - RNA, 20 nt, Artificial Sequence
  Synthetic
ccauagcugccucggaaaca

SEQ ID NO: 29428 - RNA, 23 nt, Artificial Sequence
  Synthetic
uggccauagcugccucggaaaca

SEQ ID NO: 29429 - RNA, 19 nt, Artificial Sequence
  Synthetic
ugaauauacacuggaaaca

SEQ ID NO: 29430 - RNA, 20 nt, Artificial Sequence
  Synthetic
augaauauacacuggaaaca

SEQ ID NO: 29431 - RNA, 21 nt, Artificial Sequence
  Synthetic
uaugaauauacacuggaaaca

SEQ ID NO: 29432 - RNA, 22 nt, Artificial Sequence
  Synthetic
auaugaauauacacuggaaaca

SEQ ID NO: 29433 - RNA, 23 nt, Artificial Sequence
  Synthetic
uauaugaauauacacuggaaaca

SEQ ID NO: 29434 - RNA, 24 nt, Artificial Sequence
  Synthetic
auauaugaauauacacuggaaaca

SEQ ID NO: 29435 - RNA, 18 nt, Artificial Sequence
  Synthetic
cagagucuucuggaaaca

SEQ ID NO: 29436 - RNA, 19 nt, Artificial Sequence
  Synthetic
ucagagucuucuggaaaca

SEQ ID NO: 29437 - RNA, 20 nt, Artificial Sequence
  Synthetic
aucagagucuucuggaaaca

SEQ ID NO: 29438 - RNA, 18 nt, Artificial Sequence
  Synthetic
uguugacuaucugaaaca

SEQ ID NO: 29439 - RNA, 19 nt, Artificial Sequence
  Synthetic
uuguugacuaucugaaaca

SEQ ID NO: 29440 - RNA, 21 nt, Artificial Sequence
  Synthetic
uguuguugacuaucugaaaca

SEQ ID NO: 29441 - RNA, 22 nt, Artificial Sequence
  Synthetic
auguuguugacuaucugaaaca

SEQ ID NO: 29442 - RNA, 23 nt, Artificial Sequence
  Synthetic
cauguuguugacuaucugaaaca

SEQ ID NO: 29443 - RNA, 24 nt, Artificial Sequence
  Synthetic
ucauguuguugacuaucugaaaca

SEQ ID NO: 29444 - RNA, 18 nt, Artificial Sequence
  Synthetic
aggcuggccugugaaaca

SEQ ID NO: 29445 - RNA, 19 nt, Artificial Sequence
  Synthetic
uaggcuggccugugaaaca

SEQ ID NO: 29446 - RNA, 20 nt, Artificial Sequence
  Synthetic
uuaggcuggccugugaaaca

SEQ ID NO: 29447 - RNA, 21 nt, Artificial Sequence
  Synthetic
uuuaggcuggccugugaaaca

SEQ ID NO: 29448 - RNA, 22 nt, Artificial Sequence
  Synthetic
auuuaggcuggccugugaaaca

SEQ ID NO: 29449 - RNA, 23 nt, Artificial Sequence
  Synthetic
aauuuaggcuggccugugaaaca

SEQ ID NO: 29450 - RNA, 24 nt, Artificial Sequence
  Synthetic
aaauuuaggcuggccugugaaaca

SEQ ID NO: 29451 - RNA, 18 nt, Artificial Sequence
  Synthetic
uaauguuauugugaaaca

SEQ ID NO: 29452 - RNA, 19 nt, Artificial Sequence
  Synthetic
cuaauguuauugugaaaca

SEQ ID NO: 29453 - RNA, 21 nt, Artificial Sequence
  Synthetic
agcuaauguuauugugaaaca

SEQ ID NO: 29454 - RNA, 22 nt, Artificial Sequence
  Synthetic
cagcuaauguuauugugaaaca

SEQ ID NO: 29455 - RNA, 23 nt, Artificial Sequence
  Synthetic
acagcuaauguuauugugaaaca

SEQ ID NO: 29456 - RNA, 24 nt, Artificial Sequence
  Synthetic
cacagcuaauguuauugugaaaca

SEQ ID NO: 29457 - RNA, 21 nt, Artificial Sequence
  Synthetic
aaaaguaaaguagaauaaaca

SEQ ID NO: 29458 - RNA, 22 nt, Artificial Sequence
  Synthetic
uaaaaguaaaguagaauaaaca

SEQ ID NO: 29459 - RNA, 24 nt, Artificial Sequence
  Synthetic
uguaaaaguaaaguagaauaaaca

SEQ ID NO: 29460 - RNA, 18 nt, Artificial Sequence
  Synthetic
uauauccaauacuaaaca

SEQ ID NO: 29461 - RNA, 19 nt, Artificial Sequence
  Synthetic
uuauauccaauacuaaaca

SEQ ID NO: 29462 - RNA, 20 nt, Artificial Sequence
  Synthetic
uuuauauccaauacuaaaca

SEQ ID NO: 29463 - RNA, 21 nt, Artificial Sequence
  Synthetic
auuuauauccaauacuaaaca

SEQ ID NO: 29464 - RNA, 22 nt, Artificial Sequence
  Synthetic
aauuuauauccaauacuaaaca

SEQ ID NO: 29465 - RNA, 23 nt, Artificial Sequence
  Synthetic
aaauuuauauccaauacuaaaca

SEQ ID NO: 29466 - RNA, 24 nt, Artificial Sequence
  Synthetic
aaaauuuauauccaauacuaaaca

SEQ ID NO: 29467 - RNA, 18 nt, Artificial Sequence
  Synthetic
auaguuagaagcuaaaca

SEQ ID NO: 29468 - RNA, 20 nt, Artificial Sequence
  Synthetic
agauaguuagaagcuaaaca

SEQ ID NO: 29469 - RNA, 21 nt, Artificial Sequence
  Synthetic
aagauaguuagaagcuaaaca

SEQ ID NO: 29470 - RNA, 23 nt, Artificial Sequence
  Synthetic
cgaagauaguuagaagcuaaaca

SEQ ID NO: 29471 - RNA, 24 nt, Artificial Sequence
  Synthetic
ccgaagauaguuagaagcuaaaca

SEQ ID NO: 29472 - RNA, 18 nt, Artificial Sequence
  Synthetic
cuuccaaaaagguaaaca

SEQ ID NO: 29473 - RNA, 20 nt, Artificial Sequence
  Synthetic
agcuuccaaaaagguaaaca

SEQ ID NO: 29474 - RNA, 23 nt, Artificial Sequence
  Synthetic
uggagcuuccaaaaagguaaaca

SEQ ID NO: 29475 - RNA, 24 nt, Artificial Sequence
  Synthetic
auggagcuuccaaaaagguaaaca

SEQ ID NO: 29476 - RNA, 18 nt, Artificial Sequence
  Synthetic
uuauuucuuauguaaaca

SEQ ID NO: 29477 - RNA, 19 nt, Artificial Sequence
  Synthetic
auuauuucuuauguaaaca

SEQ ID NO: 29478 - RNA, 20 nt, Artificial Sequence
  Synthetic
cauuauuucuuauguaaaca

SEQ ID NO: 29479 - RNA, 22 nt, Artificial Sequence
  Synthetic
cgcauuauuucuuauguaaaca

SEQ ID NO: 29480 - RNA, 23 nt, Artificial Sequence
  Synthetic
ccgcauuauuucuuauguaaaca

SEQ ID NO: 29481 - RNA, 24 nt, Artificial Sequence
  Synthetic
uccgcauuauuucuuauguaaaca

SEQ ID NO: 29482 - RNA, 18 nt, Artificial Sequence
  Synthetic
uuuauuguugcuuaaaca

SEQ ID NO: 29483 - RNA, 19 nt, Artificial Sequence
  Synthetic
cuuuauuguugcuuaaaca

SEQ ID NO: 29484 - RNA, 20 nt, Artificial Sequence
  Synthetic
ucuuuauuguugcuuaaaca

SEQ ID NO: 29485 - RNA, 21 nt, Artificial Sequence
  Synthetic
cucuuuauuguugcuuaaaca

SEQ ID NO: 29486 - RNA, 22 nt, Artificial Sequence
  Synthetic
acucuuuauuguugcuuaaaca

SEQ ID NO: 29487 - RNA, 23 nt, Artificial Sequence
  Synthetic
aacucuuuauuguugcuuaaaca

SEQ ID NO: 29488 - RNA, 24 nt, Artificial Sequence
  Synthetic
uaacucuuuauuguugcuuaaaca

SEQ ID NO: 29489 - RNA, 18 nt, Artificial Sequence
  Synthetic
aguccuucuauuuaaaca

SEQ ID NO: 29490 - RNA, 19 nt, Artificial Sequence
  Synthetic
uaguccuucuauuuaaaca

SEQ ID NO: 29491 - RNA, 20 nt, Artificial Sequence
  Synthetic
cuaguccuucuauuuaaaca

SEQ ID NO: 29492 - RNA, 21 nt, Artificial Sequence
  Synthetic
ccuaguccuucuauuuaaaca

SEQ ID NO: 29493 - RNA, 22 nt, Artificial Sequence
  Synthetic
cccuaguccuucuauuuaaaca

SEQ ID NO: 29494 - RNA, 24 nt, Artificial Sequence
  Synthetic
cgcccuaguccuucuauuuaaaca

SEQ ID NO: 29495 - RNA, 18 nt, Artificial Sequence
  Synthetic
cccccccacccaacaaca

SEQ ID NO: 29496 - RNA, 19 nt, Artificial Sequence
  Synthetic
ucccccccacccaacaaca

SEQ ID NO: 29497 - RNA, 20 nt, Artificial Sequence
  Synthetic
uucccccccacccaacaaca

SEQ ID NO: 29498 - RNA, 21 nt, Artificial Sequence
  Synthetic
cuucccccccacccaacaaca

SEQ ID NO: 29499 - RNA, 22 nt, Artificial Sequence
  Synthetic
ucuucccccccacccaacaaca

SEQ ID NO: 29500 - RNA, 23 nt, Artificial Sequence
  Synthetic
uucuucccccccacccaacaaca

SEQ ID NO: 29501 - RNA, 24 nt, Artificial Sequence
  Synthetic
cuucuucccccccacccaacaaca

SEQ ID NO: 29502 - RNA, 18 nt, Artificial Sequence
  Synthetic
ccagucuuucuaacaaca

SEQ ID NO: 29503 - RNA, 19 nt, Artificial Sequence
  Synthetic
uccagucuuucuaacaaca

SEQ ID NO: 29504 - RNA, 20 nt, Artificial Sequence
  Synthetic
cuccagucuuucuaacaaca

SEQ ID NO: 29505 - RNA, 21 nt, Artificial Sequence
  Synthetic
acuccagucuuucuaacaaca

SEQ ID NO: 29506 - RNA, 22 nt, Artificial Sequence
  Synthetic
cacuccagucuuucuaacaaca

SEQ ID NO: 29507 - RNA, 23 nt, Artificial Sequence
  Synthetic
ccacuccagucuuucuaacaaca

SEQ ID NO: 29508 - RNA, 24 nt, Artificial Sequence
  Synthetic
cccacuccagucuuucuaacaaca

SEQ ID NO: 29509 - RNA, 18 nt, Artificial Sequence
  Synthetic
auaucuuuugugacaaca

SEQ ID NO: 29510 - RNA, 19 nt, Artificial Sequence
  Synthetic
uauaucuuuugugacaaca

SEQ ID NO: 29511 - RNA, 20 nt, Artificial Sequence
  Synthetic
auauaucuuuugugacaaca

SEQ ID NO: 29512 - RNA, 21 nt, Artificial Sequence
  Synthetic
aauauaucuuuugugacaaca

SEQ ID NO: 29513 - RNA, 22 nt, Artificial Sequence
  Synthetic
aaauauaucuuuugugacaaca

SEQ ID NO: 29514 - RNA, 24 nt, Artificial Sequence
  Synthetic
agaaauauaucuuuugugacaaca

SEQ ID NO: 29515 - RNA, 24 nt, Artificial Sequence
  Synthetic
ugggaaacauaaaguuguacaaca

SEQ ID NO: 29516 - RNA, 19 nt, Artificial Sequence
  Synthetic
aggaaagucucuuacaaca

SEQ ID NO: 29517 - RNA, 20 nt, Artificial Sequence
  Synthetic
caggaaagucucuuacaaca

SEQ ID NO: 29518 - RNA, 21 nt, Artificial Sequence
  Synthetic
acaggaaagucucuuacaaca

SEQ ID NO: 29519 - RNA, 22 nt, Artificial Sequence
  Synthetic
cacaggaaagucucuuacaaca

SEQ ID NO: 29520 - RNA, 23 nt, Artificial Sequence
  Synthetic
acacaggaaagucucuuacaaca

SEQ ID NO: 29521 - RNA, 18 nt, Artificial Sequence
  Synthetic
ccgaaguauaaagcaaca

SEQ ID NO: 29522 - RNA, 19 nt, Artificial Sequence
  Synthetic
accgaaguauaaagcaaca

SEQ ID NO: 29523 - RNA, 21 nt, Artificial Sequence
  Synthetic
agaccgaaguauaaagcaaca

SEQ ID NO: 29524 - RNA, 22 nt, Artificial Sequence
  Synthetic
cagaccgaaguauaaagcaaca

SEQ ID NO: 29525 - RNA, 23 nt, Artificial Sequence
  Synthetic
ccagaccgaaguauaaagcaaca

SEQ ID NO: 29526 - RNA, 24 nt, Artificial Sequence
  Synthetic
uccagaccgaaguauaaagcaaca

SEQ ID NO: 29527 - RNA, 18 nt, Artificial Sequence
  Synthetic
aaagucucugaggcaaca

SEQ ID NO: 29528 - RNA, 19 nt, Artificial Sequence
  Synthetic
uaaagucucugaggcaaca

SEQ ID NO: 29529 - RNA, 20 nt, Artificial Sequence
  Synthetic
cuaaagucucugaggcaaca

SEQ ID NO: 29530 - RNA, 21 nt, Artificial Sequence
  Synthetic
acuaaagucucugaggcaaca

SEQ ID NO: 29531 - RNA, 22 nt, Artificial Sequence
  Synthetic
cacuaaagucucugaggcaaca

SEQ ID NO: 29532 - RNA, 23 nt, Artificial Sequence
  Synthetic
ccacuaaagucucugaggcaaca

SEQ ID NO: 29533 - RNA, 20 nt, Artificial Sequence
  Synthetic
aggagcuuuauaaugcaaca

SEQ ID NO: 29534 - RNA, 21 nt, Artificial Sequence
  Synthetic
aaggagcuuuauaaugcaaca

SEQ ID NO: 29535 - RNA, 23 nt, Artificial Sequence
  Synthetic
ugaaggagcuuuauaaugcaaca

SEQ ID NO: 29536 - RNA, 24 nt, Artificial Sequence
  Synthetic
uugaaggagcuuuauaaugcaaca

SEQ ID NO: 29537 - RNA, 21 nt, Artificial Sequence
  Synthetic
ccagaaaaauaaaucucaaca

SEQ ID NO: 29538 - RNA, 22 nt, Artificial Sequence
  Synthetic
uccagaaaaauaaaucucaaca

SEQ ID NO: 29539 - RNA, 23 nt, Artificial Sequence
  Synthetic
uuccagaaaaauaaaucucaaca

SEQ ID NO: 29540 - RNA, 24 nt, Artificial Sequence
  Synthetic
cuuccagaaaaauaaaucucaaca

SEQ ID NO: 29541 - RNA, 19 nt, Artificial Sequence
  Synthetic
agaacccagacggucaaca

SEQ ID NO: 29542 - RNA, 20 nt, Artificial Sequence
  Synthetic
aagaacccagacggucaaca

SEQ ID NO: 29543 - RNA, 21 nt, Artificial Sequence
  Synthetic
aaagaacccagacggucaaca

SEQ ID NO: 29544 - RNA, 24 nt, Artificial Sequence
  Synthetic
uggaaagaacccagacggucaaca

SEQ ID NO: 29545 - RNA, 21 nt, Artificial Sequence
  Synthetic
acauaagaaugaaaaagaaca

SEQ ID NO: 29546 - RNA, 22 nt, Artificial Sequence
  Synthetic
uacauaagaaugaaaaagaaca

SEQ ID NO: 29547 - RNA, 24 nt, Artificial Sequence
  Synthetic
uguacauaagaaugaaaaagaaca

SEQ ID NO: 29548 - RNA, 18 nt, Artificial Sequence
  Synthetic
uaaugcuuacucagaaca

SEQ ID NO: 29549 - RNA, 19 nt, Artificial Sequence
  Synthetic
uuaaugcuuacucagaaca

SEQ ID NO: 29550 - RNA, 20 nt, Artificial Sequence
  Synthetic
auuaaugcuuacucagaaca

SEQ ID NO: 29551 - RNA, 21 nt, Artificial Sequence
  Synthetic
uauuaaugcuuacucagaaca

SEQ ID NO: 29552 - RNA, 22 nt, Artificial Sequence
  Synthetic
uuauuaaugcuuacucagaaca

SEQ ID NO: 29553 - RNA, 24 nt, Artificial Sequence
  Synthetic
uguuauuaaugcuuacucagaaca

SEQ ID NO: 29554 - RNA, 18 nt, Artificial Sequence
  Synthetic
caaaguaaaccgagaaca

SEQ ID NO: 29555 - RNA, 19 nt, Artificial Sequence
  Synthetic
acaaaguaaaccgagaaca

SEQ ID NO: 29556 - RNA, 20 nt, Artificial Sequence
  Synthetic
uacaaaguaaaccgagaaca

SEQ ID NO: 29557 - RNA, 21 nt, Artificial Sequence
  Synthetic
uuacaaaguaaaccgagaaca

SEQ ID NO: 29558 - RNA, 22 nt, Artificial Sequence
  Synthetic
uuuacaaaguaaaccgagaaca

SEQ ID NO: 29559 - RNA, 23 nt, Artificial Sequence
  Synthetic
auuuacaaaguaaaccgagaaca

SEQ ID NO: 29560 - RNA, 24 nt, Artificial Sequence
  Synthetic
uauuuacaaaguaaaccgagaaca

SEQ ID NO: 29561 - RNA, 19 nt, Artificial Sequence
  Synthetic
agccacggaguggagaaca

SEQ ID NO: 29562 - RNA, 20 nt, Artificial Sequence
  Synthetic
uagccacggaguggagaaca

SEQ ID NO: 29563 - RNA, 21 nt, Artificial Sequence
  Synthetic
cuagccacggaguggagaaca

SEQ ID NO: 29564 - RNA, 22 nt, Artificial Sequence
  Synthetic
ucuagccacggaguggagaaca

SEQ ID NO: 29565 - RNA, 23 nt, Artificial Sequence
  Synthetic
uucuagccacggaguggagaaca

SEQ ID NO: 29566 - RNA, 21 nt, Artificial Sequence
  Synthetic
caaaaaaaggcauauagaaca

SEQ ID NO: 29567 - RNA, 22 nt, Artificial Sequence
  Synthetic
acaaaaaaaggcauauagaaca

SEQ ID NO: 29568 - RNA, 23 nt, Artificial Sequence
  Synthetic
aacaaaaaaaggcauauagaaca

SEQ ID NO: 29569 - RNA, 24 nt, Artificial Sequence
  Synthetic
caacaaaaaaaggcauauagaaca

SEQ ID NO: 29570 - RNA, 18 nt, Artificial Sequence
  Synthetic
aacagcagcaguagaaca

SEQ ID NO: 29571 - RNA, 19 nt, Artificial Sequence
  Synthetic
aaacagcagcaguagaaca

SEQ ID NO: 29572 - RNA, 20 nt, Artificial Sequence
  Synthetic
aaaacagcagcaguagaaca

SEQ ID NO: 29573 - RNA, 21 nt, Artificial Sequence
  Synthetic
uaaaacagcagcaguagaaca

SEQ ID NO: 29574 - RNA, 23 nt, Artificial Sequence
  Synthetic
uguaaaacagcagcaguagaaca

SEQ ID NO: 29575 - RNA, 18 nt, Artificial Sequence
  Synthetic
uccuuucauuuaggaaca

SEQ ID NO: 29576 - RNA, 19 nt, Artificial Sequence
  Synthetic
auccuuucauuuaggaaca

SEQ ID NO: 29577 - RNA, 20 nt, Artificial Sequence
  Synthetic
uauccuuucauuuaggaaca

SEQ ID NO: 29578 - RNA, 21 nt, Artificial Sequence
  Synthetic
auauccuuucauuuaggaaca

SEQ ID NO: 29579 - RNA, 23 nt, Artificial Sequence
  Synthetic
agauauccuuucauuuaggaaca

SEQ ID NO: 29580 - RNA, 24 nt, Artificial Sequence
  Synthetic
uagauauccuuucauuuaggaaca

SEQ ID NO: 29581 - RNA, 18 nt, Artificial Sequence
  Synthetic
aauaaggaaaacggaaca

SEQ ID NO: 29582 - RNA, 19 nt, Artificial Sequence
  Synthetic
aaauaaggaaaacggaaca

SEQ ID NO: 29583 - RNA, 20 nt, Artificial Sequence
  Synthetic
aaaauaaggaaaacggaaca

SEQ ID NO: 29584 - RNA, 21 nt, Artificial Sequence
  Synthetic
caaaauaaggaaaacggaaca

SEQ ID NO: 29585 - RNA, 23 nt, Artificial Sequence
  Synthetic
agcaaaauaaggaaaacggaaca

SEQ ID NO: 29586 - RNA, 21 nt, Artificial Sequence
  Synthetic
aagauggaagagacuggaaca

SEQ ID NO: 29587 - RNA, 23 nt, Artificial Sequence
  Synthetic
agaagauggaagagacuggaaca

SEQ ID NO: 29588 - RNA, 24 nt, Artificial Sequence
  Synthetic
uagaagauggaagagacuggaaca

SEQ ID NO: 29589 - RNA, 19 nt, Artificial Sequence
  Synthetic
agugucccaggaaugaaca

SEQ ID NO: 29590 - RNA, 20 nt, Artificial Sequence
  Synthetic
cagugucccaggaaugaaca

SEQ ID NO: 29591 - RNA, 21 nt, Artificial Sequence
  Synthetic
ccagugucccaggaaugaaca

(The sequence listing continues in the following parts.)

What is claimed is:

1. A genome-editing system, comprising:
a first gRNA molecule and a second gRNA molecule, each gRNA molecule having a targeting domain of 19 to 24 nucleotides in length and at least one Cas9 molecule that recognizes a Protospacer Adjacent Motif (PAM) of either NNGRRT (SEQ ID NO:204) or NNGRRV (SEQ ID NO:205),
wherein the genome-editing system is configured to form a first and a second double strand break in a first and a second intron flanking exon 51 of the human DMD gene, respectively, thereby deleting a segment of the DMD gene comprising exon 51.

2. The genome-editing system of claim 1, wherein the segment has a length of about 800-900, about 1500-2600, about 5200-5500, about 20,000-30,000, about 35,000-45,000, or about 60,000-72,000 base pairs.

3. The genome-editing system of claim 2, wherein the segment has a length selected from the group consisting of 806 base pairs, 867 base pairs, 1,557 base pairs, 2,527 base pairs, 5,305 base pairs, 5,415 base pairs, 20,768 base pairs, 27,398 base pairs, 36,342 base pairs, 44,269 base pairs, 60,894 base pairs, and 71,832 base pairs.

4. The genome-editing system of claim 1, wherein the at least one Cas9 molecule is an S. aureus Cas9 molecule.

5. The genome-editing system of claim 1, wherein the first gRNA molecule, the at least one Cas9 molecule and the second gRNA molecule are present in the system in a nanoparticle, in a cationic liposome, or in a biological non-viral delivery vehicle selected from the group consisting of: attenuated bacteria, engineered bacteriophages, mammalian virus-like particles, and biological liposomes.

6. The genome-editing system of claim 5, wherein the nanoparticle, cationic liposome, or biological non-viral delivery vehicle comprises a targeting modification capable of increasing target cell uptake of the system.

7. A composition comprising:
(a) a first gRNA molecule comprising a first targeting domain that is complementary with a target domain of the DMD gene, wherein the first targeting domain is 19 to 24 nucleotides in length;
(b) a second gRNA molecule comprising a second targeting domain that is complementary with a target domain of the DMD gene, wherein the second targeting domain is 19 to 24 nucleotides in length; and
(c) at least one Cas9 molecule that recognize's a PAM sequence set forth in NNGRRT (SEQ ID NO: 204) or NNGRRV (SEQ ID NO:205),
wherein the composition is adapted for use in a genome-editing system to form first and second double strand breaks in first and second introns flanking exon 51 of the human DMD gene, respectively, thereby deleting a segment of the DMD gene including exon 51.

8. The composition of claim 7, wherein the segment has a length of about 800-900, about 1500-2600, about 5200-5500, about 20,000-30,000, about 35,000-45,000, or about 60,000-72,000 base pairs.

9. The composition of claim 8, wherein the segment has a length selected from the group consisting of 806 base pairs, 867 base pairs, 1,557 base pairs, 2,527 base pairs, 5,305 base pairs, 5,415 base pairs, 20,768 base pairs, 27,398 base pairs, 36,342 base pairs, 44,269 base pairs, 60,894 base pairs, and 71,832 base pairs.

10. The composition of claim 7, wherein the at least one Cas9 molecule is an S. aureus Cas9 molecule.

11. The composition of claim 10, wherein the at least one Cas9 molecule is a mutant S. aureus Cas9 molecule.

12. A composition comprising at least one of:
(a) a first gRNA molecule comprising a targeting domain that comprises a nucleotide sequence set forth in SEQ ID NO: 1977, and a second gRNA molecule comprising a targeting domain that comprises a nucleotide sequence set forth in SEQ ID NO: 2048;
(b) a first gRNA molecule comprising a targeting domain that comprises a nucleotide sequence set forth in SEQ ID NO: 18458, and a second gRNA molecule comprising a targeting domain that comprises a nucleotide sequence set forth in SEQ ID NO: 2048;
(c) a first gRNA molecule comprising a targeting domain that comprises a nucleotide sequence set forth in SEQ ID NO: 19199, and a second gRNA molecule comprising a targeting domain that comprises a nucleotide sequence set forth in SEQ ID NO: 18720;
(d) a first gRNA molecule comprising a targeting domain that comprises a nucleotide sequence set forth in SEQ ID NO: 4709, and a second gRNA molecule comprising a targeting domain that comprises a nucleotide sequence set forth in SEQ ID NO: 18720;
(e) a first gRNA molecule comprising a targeting domain that comprises a nucleotide sequence set forth in SEQ ID NO: 481, and a second gRNA molecule comprising a targeting domain that comprises a nucleotide sequence set forth in SEQ ID NO: 2048;
(f) a first gRNA molecule comprising a targeting domain that comprises a nucleotide sequence set forth in SEQ ID NO: 4709, and a second gRNA molecule comprising a targeting domain that comprises a nucleotide sequence set forth in SEQ ID NO: 22349;
(g) a first gRNA molecule comprising a targeting domain that comprises a nucleotide sequence set forth in SEQ ID NO: 5869, and a second gRNA molecule comprising a targeting domain that comprises a nucleotide sequence set forth in SEQ ID NO: 3536;
(h) a first gRNA molecule comprising a targeting domain that comprises a nucleotide sequence set forth in SEQ ID NO: 18752, and a second gRNA molecule comprising a targeting domain that comprises a nucleotide sequence set forth in SEQ ID NO: 17253;
(i) a first gRNA molecule comprising a targeting domain that comprises a nucleotide sequence set forth in SEQ ID NO: 20145, and a second gRNA molecule comprising a targeting domain that comprises a nucleotide sequence set forth in SEQ ID NO: 3536;
(j) a first gRNA molecule comprising a targeting domain that comprises a nucleotide sequence set forth in SEQ ID NO: 19187, and a second gRNA molecule comprising a targeting domain that comprises a nucleotide sequence set forth in SEQ ID NO: 7252;
(k) a first gRNA molecule comprising a targeting domain that comprises a nucleotide sequence set forth in SEQ ID NO: 18752, and a second gRNA molecule comprising a targeting domain that comprises a nucleotide sequence set forth in SEQ ID NO: 3536; and
(l) a first gRNA molecule comprising a targeting domain that comprises a nucleotide sequence set forth in SEQ ID NO: 19187; and a second gRNA molecule comprising a targeting domain that comprises a nucleotide sequence set forth in SEQ ID NO: 7419.

13. The composition of claim 12, further comprising at least one Cas9 molecule.

14. The composition of claim 13, wherein the at least one Cas9 molecule is an S. aureus Cas9 molecule.

15. The composition of claim 14, wherein the at least one Cas9 molecule is a mutant S. aureus Cas9 molecule.

16. The composition of claim 13, wherein the at least one Cas9 molecule recognizes a PAM sequence set forth in NNGRRT (SEQ ID NO: 204) or NNGRRV (SEQ ID NO:205).

17. A genome-editing system comprising a gRNA pair selected from the group consisting of:
(a) a first gRNA molecule comprising a targeting domain that comprises a nucleotide sequence set forth in SEQ ID NO: 1977, and a second gRNA molecule comprising a targeting domain that comprises a nucleotide sequence set forth in SEQ ID NO: 2048;
(b) a first gRNA molecule comprising a targeting domain that comprises a nucleotide sequence set forth in SEQ ID NO: 18458, and a second gRNA molecule comprising a targeting domain that comprises a nucleotide sequence set forth in SEQ ID NO: 2048;
(c) a first gRNA molecule comprising a targeting domain that comprises a nucleotide sequence set forth in SEQ ID NO: 19199, and a second gRNA molecule comprising a targeting domain that comprises a nucleotide sequence set forth in SEQ ID NO: 18720;
(d) a first gRNA molecule comprising a targeting domain that comprises a nucleotide sequence set forth in SEQ ID NO: 4709, and a second gRNA molecule comprising a targeting domain that comprises a nucleotide sequence set forth in SEQ ID NO: 18720;
(e) a first gRNA molecule comprising a targeting domain that comprises a nucleotide sequence set forth in SEQ ID NO: 481, and a second gRNA molecule comprising a targeting domain that comprises a nucleotide sequence set forth in SEQ ID NO: 2048;
(f) a first gRNA molecule comprising a targeting domain that comprises a nucleotide sequence set forth in SEQ ID NO: 4709, and a second gRNA molecule comprising a targeting domain that comprises a nucleotide sequence set forth in SEQ ID NO: 22349;
(g) a first gRNA molecule comprising a targeting domain that comprises a nucleotide sequence set forth in SEQ ID NO: 5869, and a second gRNA molecule comprising a targeting domain that comprises a nucleotide sequence set forth in SEQ ID NO: 3536;
(h) a first gRNA molecule comprising a targeting domain that comprises a nucleotide sequence set forth in SEQ ID NO: 18752, and a second gRNA molecule comprising a targeting domain that comprises a nucleotide sequence set forth in SEQ ID NO: 17253;
(i) a first gRNA molecule comprising a targeting domain that comprises a nucleotide sequence set forth in SEQ ID NO: 20145, and a second gRNA molecule comprising a targeting domain that comprises a nucleotide sequence set forth in SEQ ID NO: 3536;
(j) a first gRNA molecule comprising a targeting domain that comprises a nucleotide sequence set forth in SEQ ID NO: 19187, and a second gRNA molecule comprising a targeting domain that comprises a nucleotide sequence set forth in SEQ ID NO: 7252;
(k) a first gRNA molecule comprising a targeting domain that comprises a nucleotide sequence set forth in SEQ ID NO: 18752, and a second gRNA molecule comprising a targeting domain that comprises a nucleotide sequence set forth in SEQ ID NO: 3536; and
(l) a first gRNA molecule comprising a targeting domain that comprises a nucleotide sequence set forth in SEQ ID NO: 19187; and a second gRNA molecule comprising a targeting domain that comprises a nucleotide sequence set forth in SEQ ID NO: 7419.

18. The genome-editing system of claim 17, comprising at least one Cas9 molecule.

19. The genome-editing system of claim 18, wherein the at least one Cas9 molecule is an S. aureus Cas9 molecule.

20. The genome-editing system of claim 17, wherein the first gRNA molecule, the at least one Cas9 molecule and the second gRNA molecule are present in the system in a nanoparticle, in a cationic liposome, or in a biological non-viral delivery vehicle selected from the group consisting of: attenuated bacteria, engineered bacteriophages, mammalian virus-like particles, and biological liposomes.

21. The genome-editing system of claim 20, wherein the nanoparticle, cationic liposome, or biological non-viral delivery vehicle comprises a targeting modification capable of increasing target cell uptake of the system.

22. A vector comprising a polynucleotide encoding a first gRNA molecule and a second gRNA molecule, wherein the first gRNA molecule and the second gRNA molecule are selected from the group consisting of:
(a) a first gRNA molecule comprising a targeting domain that comprises a nucleotide sequence set forth in SEQ ID NO: 1977, and a second gRNA molecule comprising a targeting domain that comprises a nucleotide sequence set forth in SEQ ID NO: 2048;
(b) a first gRNA molecule comprising a targeting domain that comprises a nucleotide sequence set forth in SEQ ID NO: 18458, and a second gRNA molecule comprising a targeting domain that comprises a nucleotide sequence set forth in SEQ ID NO: 2048;
(c) a first gRNA molecule comprising a targeting domain that comprises a nucleotide sequence set forth in SEQ ID NO: 19199, and a second gRNA molecule comprising a targeting domain that comprises a nucleotide sequence set forth in SEQ ID NO: 18720;
(d) a first gRNA molecule comprising a targeting domain that comprises a nucleotide sequence set forth in SEQ ID NO: 4709, and a second gRNA molecule comprising a targeting domain that comprises a nucleotide sequence set forth in SEQ ID NO: 18720;
(e) a first gRNA molecule comprising a targeting domain that comprises a nucleotide sequence set forth in SEQ ID NO: 481, and a second gRNA molecule comprising a targeting domain that comprises a nucleotide sequence set forth in SEQ ID NO: 2048;
(f) a first gRNA molecule comprising a targeting domain that comprises a nucleotide sequence set forth in SEQ ID NO: 4709, and a second gRNA molecule comprising a targeting domain that comprises a nucleotide sequence set forth in SEQ ID NO: 22349;
(g) a first gRNA molecule comprising a targeting domain that comprises a nucleotide sequence set forth in SEQ ID NO: 5869, and a second gRNA molecule comprising a targeting domain that comprises a nucleotide sequence set forth in SEQ ID NO: 3536;
(h) a first gRNA molecule comprising a targeting domain that comprises a nucleotide sequence set forth in SEQ ID NO: 18752, and a second gRNA molecule comprising a targeting domain that comprises a nucleotide sequence set forth in SEQ ID NO: 17253;
(i) a first gRNA molecule comprising a targeting domain that comprises a nucleotide sequence set forth in SEQ ID NO: 20145, and a second gRNA molecule comprising a targeting domain that comprises a nucleotide sequence set forth in SEQ ID NO: 3536;
(j) a first gRNA molecule comprising a targeting domain that comprises a nucleotide sequence set forth in SEQ ID NO: 19187, and a second gRNA molecule comprising a targeting domain that comprises a nucleotide sequence set forth in SEQ ID NO: 7252;
(k) a first gRNA molecule comprising a targeting domain that comprises a nucleotide sequence set forth in SEQ ID NO: 18752, and a second gRNA molecule comprising a targeting domain that comprises a nucleotide sequence set forth in SEQ ID NO: 3536; and
(l) a first gRNA molecule comprising a targeting domain that comprises a nucleotide sequence set forth in SEQ ID NO: 19187; and a second gRNA molecule comprising a targeting domain that comprises a nucleotide sequence set forth in SEQ ID NO: 7419.

23. The vector of claim 22, wherein the vector is a viral vector.

24. The vector of claim 23, wherein the vector is an adeno-associated virus (AAV) vector.

25. A composition comprising one gRNA molecule comprising a targeting domain that is complementary with a target domain of the DMD gene, wherein the targeting domain comprises a nucleotide sequence selected from SEQ ID NOS: 206-826366.

26. The composition of claim 25, comprising one, two, three, or four gRNA molecules.

27. The composition of claim 26, comprising two gRNA molecules selected from the group consisting of:
(a) a first gRNA molecule comprising a targeting domain that comprises a nucleotide sequence set forth in SEQ ID NO: 2048, and a second gRNA molecule comprising a targeting domain that comprises a nucleotide sequence selected from SEQ ID NOs: 1977, 18458, 481, 9997, 1499, 2121, 8709, 21570, 16467, and 23958;
(b) a first gRNA molecule comprising a targeting domain that comprises a nucleotide sequence set forth in SEQ ID NO: 19199, and a second gRNA molecule comprising a targeting domain that comprises a nucleotide sequence set forth in SEQ ID NO: 18720;
(c) a first gRNA molecule comprising a targeting domain that comprises a nucleotide sequence set forth in SEQ ID NO: 18720, SEQ ID NO: 22349 or SEQ ID NO: 10092, and a second gRNA molecule comprising a targeting domain that comprises a nucleotide sequence set forth in SEQ ID NO: 4709 or SEQ ID NO: 20303;
(d) a first gRNA molecule comprising a targeting domain that comprises a nucleotide sequence set forth in SEQ ID NO: 3536, and a second gRNA molecule comprising a targeting domain that comprises a nucleotide sequence selected from SEQ ID NOs: 5869, 20145, 18752, 20870, 9530, 18062, 4134, and 23958;
(e) a first gRNA molecule comprising a targeting domain that comprises a nucleotide sequence set forth in SEQ ID NO: 18458, and a second gRNA molecule comprising a targeting domain that comprises a nucleotide sequence set forth in SEQ ID NO: 9765;
(f) a first gRNA molecule comprising a targeting domain that comprises a nucleotide sequence set forth in SEQ ID NO: 18752, and a second gRNA molecule comprising a targeting domain that comprises a nucleotide sequence selected from SEQ ID NOs: 17253, 14607, 16967, 7419, 1744, and 8569;
(g) a first gRNA molecule comprising a targeting domain that comprises a nucleotide sequence set forth in SEQ ID NO: 19187, and a second gRNA molecule comprising a targeting domain that comprises a nucleotide sequence selected from SEQ ID NOs: 14695, 7252, 17253, 7419, 1744, 8569, and 9358;
(h) a first gRNA molecule comprising a targeting domain that comprises a nucleotide sequence set forth in SEQ ID NO: 20145, and a second gRNA molecule comprising a targeting domain that comprises a nucleotide sequence selected from SEQ ID NOs: 5614, 20764, 14607, 8569, and 7252;
(i) a first gRNA molecule comprising a targeting domain that comprises a nucleotide sequence set forth in SEQ ID NO: 1499, and a second gRNA molecule comprising a targeting domain that comprises a nucleotide sequence set forth in SEQ ID NO: 14296;
(j) a first gRNA molecule comprising a targeting domain that comprises a nucleotide sequence set forth in SEQ ID NO: 4134, and a second gRNA molecule comprising a targeting domain that comprises a nucleotide sequence selected from SEQ ID NOs: 20924, 4072, and 8569;
(k) a first gRNA molecule comprising a targeting domain that comprises a nucleotide sequence set forth in SEQ ID NO: 6209, and a second gRNA molecule comprising a targeting domain that comprises a nucleotide sequence selected from SEQ ID NOs: 14035, 13527, 21873, 14298, 7419, and 20924;
(l) a first gRNA molecule comprising a targeting domain that comprises a nucleotide sequence set forth in SEQ ID NO: 9346, and a second gRNA molecule comprising a targeting domain that comprises a nucleotide sequence selected from SEQ ID NOs: 7419, 20764, and 2769;
(m) a first gRNA molecule comprising a targeting domain that comprises a nucleotide sequence set forth in SEQ ID NO: 7649, and a second gRNA molecule comprising a targeting domain that comprises a nucleotide sequence selected from SEQ ID NOs: 16967, 1484, 20924, 4072, and 9496;
(n) a first gRNA molecule comprising a targeting domain that comprises a nucleotide sequence set forth in SEQ ID NO: 5869, and a second gRNA molecule comprising a targeting domain that comprises a nucleotide sequence selected from SEQ ID NOs: 8569, 13527, 1484, 5614, 4072, and 14695;
(o) a first gRNA molecule comprising a targeting domain that comprises a nucleotide sequence set forth in SEQ ID NO: 4165, and a second gRNA molecule comprising a targeting domain that comprises a nucleotide sequence selected from SEQ ID NOs: 7252, 1484, and 9279;
(p) a first gRNA molecule comprising a targeting domain that comprises a nucleotide sequence set forth in SEQ ID NO: 15622, and a second gRNA molecule comprising a targeting domain that comprises a nucleotide sequence set forth in SEQ ID NO: 17253;
(q) a first gRNA molecule comprising a targeting domain that comprises a nucleotide sequence set forth in SEQ ID NO: 18062, and a second gRNA molecule comprising a targeting domain that comprises a nucleotide sequence set forth in SEQ ID NO: 2769 or SEQ ID NO: 14035;
(r) a first gRNA molecule comprising a targeting domain that comprises a nucleotide sequence set forth in SEQ ID NO: 21131, and a second gRNA molecule comprising a targeting domain that comprises a nucleotide sequence set forth in SEQ ID NO: 13527 or SEQ ID NO: 13285;
(s) a first gRNA molecule comprising a targeting domain that comprises a nucleotide sequence set forth in SEQ ID NO: 20870, and a second gRNA molecule comprising a targeting domain that comprises a nucleotide sequence set forth in SEQ ID NO: 16967 or SEQ ID NO: 7252;
(t) a first gRNA molecule comprising a targeting domain that comprises a nucleotide sequence set forth in SEQ ID NO: 16235, and a second gRNA molecule comprising a targeting domain that comprises a nucleotide sequence set forth in SEQ ID NO: 10140;
(u) a first gRNA molecule comprising a targeting domain that comprises a nucleotide sequence set forth in SEQ ID NO: 15271, and a second gRNA molecule comprising a targeting domain that comprises a nucleotide sequence set forth in SEQ ID NO: 13518;
(v) a first gRNA molecule comprising a targeting domain that comprises a nucleotide sequence set forth in SEQ ID NO: 11675, and a second gRNA molecule comprising a targeting domain that comprises a nucleotide sequence selected from SEQ ID NOs: 2769, 1484, and 4072; and
(w) a first gRNA molecule comprising a targeting domain that comprises a nucleotide sequence set forth in SEQ ID NO: 23958, and a second gRNA molecule comprising a targeting domain that comprises a nucleotide sequence set forth in SEQ ID NO: 14035 or SEQ ID NO: 9496.

28. The composition of claim 26, comprising two gRNA molecules selected from the group consisting of:
(a) a first gRNA molecule comprising a targeting domain that comprises a nucleotide sequence set forth in SEQ ID NO: 692257, and a second gRNA molecule comprising a targeting domain that comprises a nucleotide sequence set forth in SEQ ID NO: 692261, SEQ ID NO: 692262, SEQ ID NO: 692263, SEQ ID NO: 692264, SEQ ID NO: 692270, SEQ ID NO: 692271, or SEQ ID NO: 692272;
(b) a first gRNA molecule comprising a targeting domain that comprises a nucleotide sequence set forth in SEQ ID NO: 692258, and a second gRNA molecule comprising a targeting domain that comprises a nucleotide sequence set forth in SEQ ID NO: 692261, SEQ ID NO: 692262, SEQ ID NO: 692263, SEQ ID NO: 692264, SEQ ID NO: 692270, SEQ ID NO: 692271, or SEQ ID NO: 692272;
(c) a first gRNA molecule comprising a targeting domain that comprises a nucleotide sequence set forth in SEQ ID NO: 692260, and a second gRNA molecule comprising a targeting domain that comprises a nucleotide sequence set forth in SEQ ID NO: 692261, SEQ ID NO: 692262, SEQ ID NO: 692263, SEQ ID NO: 692264, SEQ ID NO: 692270, SEQ ID NO: 692271, or SEQ ID NO: 692272;
(d) a first gRNA molecule comprising a targeting domain that comprises a nucleotide sequence set forth in SEQ ID NO: 692253, and a second gRNA molecule comprising a targeting domain that comprises a nucleotide sequence set forth in SEQ ID NO: 692270, SEQ ID NO: 692271, or SEQ ID NO: 692272;
(e) a first gRNA molecule comprising a targeting domain that comprises a nucleotide sequence set forth in SEQ ID NO: 692254, and a second gRNA molecule comprising a targeting domain that comprises a nucleotide sequence set forth in SEQ ID NO: 692270, SEQ ID NO: 692271, or SEQ ID NO: 692272; and
(f) a first gRNA molecule comprising a targeting domain that comprises a nucleotide sequence set forth in SEQ ID NO: 692256, and a second gRNA molecule comprising a targeting domain that comprises a nucleotide sequence set forth in SEQ ID NO: 692270, SEQ ID NO: 692271, or SEQ ID NO: 692272.

29. The composition of claim 25, further comprising at least one Cas9 molecule.

30. A cell comprising:
(i) a genome-editing system comprising: a first RNA molecule and a second gRNA molecule, each gRNA molecule having a targeting domain of 19 to 24 nucleotides in length and at least one Cas9 molecule that recognizes a Protospacer Adjacent Motif (PAM) of either NNGRRT (SEQ ID NO:204) or NNGRRV (SEQ ID NO:205), wherein the genome-editing system is configured to form a first and a second double strand break in a first and a second intron flanking exon 51 of the human DMD gene, respectively, thereby deleting a segment of the DMD gene comprising exon 51;
(ii) a composition comprising: (a) a first gRNA molecule comprising a first targeting domain that is complementary with a target domain of the DMD gene, wherein the first targeting domain is 19 to 24 nucleotides in length; (b) a second gRNA molecule comprising a second targeting domain that is complementary with a target domain of the DMD gene, wherein the second targeting domain is 19 to 24 nucleotides in length; and (c) at least one Cas9 molecule that recognizes a PAM sequence set forth in NNGRRT (SEQ ID NO: 204) or NNGRRV (SEQ ID NO:205), wherein the composition is adapted for use in a genome-editing system to form first and second double strand breaks in first and second introns flanking exon 51 of the human DMD gene, respectively, thereby deleting a segment of the DMD gene including exon 51;
(iii) a composition comprising one gRNA molecule comprising a targeting domain that is complementary with a target domain of the DMD gene, wherein the targeting domain comprises a nucleotide sequence selected from SEQ ID NOS: 206-826366;
(iii) a composition comprising a gRNA pair;
(iv) a genome-editing system comprising the gRNA pair; or
(v) a vector comprising a polynucleotide encoding the gRNA pair;
wherein the gRNA pair is selected from the group consisting of:
(a) a first gRNA molecule comprising a targeting domain that comprises a nucleotide sequence set forth in SEQ ID NO: 1977, and a second gRNA molecule comprising a targeting domain that comprises a nucleotide sequence set forth in SEQ ID NO: 2048;
(b) a first gRNA molecule comprising a targeting domain that comprises a nucleotide sequence set forth in SEQ ID NO: 18458, and a second gRNA molecule comprising a targeting domain that comprises a nucleotide sequence set forth in SEQ ID NO: 2048;
(c) a first gRNA molecule comprising a targeting domain that comprises a nucleotide sequence set forth in SEQ ID NO: 19199, and a second gRNA molecule comprising a targeting domain that comprises a nucleotide sequence set forth in SEQ ID NO: 18720;
(d) a first gRNA molecule comprising a targeting domain that comprises a nucleotide sequence set forth in SEQ ID NO: 4709, and a second gRNA molecule comprising a targeting domain that comprises a nucleotide sequence set forth in SEQ ID NO: 18720;
(e) a first gRNA molecule comprising a targeting domain that comprises a nucleotide sequence set forth in SEQ ID NO: 481, and a second gRNA molecule comprising a targeting domain that comprises a nucleotide sequence set forth in SEQ ID NO: 2048;
(f) a first gRNA molecule comprising a targeting domain that comprises a nucleotide sequence set forth in SEQ ID NO: 4709, and a second gRNA molecule comprising a targeting domain that comprises a nucleotide sequence set forth in SEQ ID NO: 22349;
(g) a first gRNA molecule comprising a targeting domain that comprises a nucleotide sequence set forth in SEQ ID NO: 5869, and a second gRNA molecule comprising a targeting domain that comprises a nucleotide sequence set forth in SEQ ID NO: 3536;
(h) a first gRNA molecule comprising a targeting domain that comprises a nucleotide sequence set forth in SEQ ID NO: 18752, and a second gRNA molecule comprising a targeting domain that comprises a nucleotide sequence set forth in SEQ ID NO: 17253;
(i) a first gRNA molecule comprising a targeting domain that comprises a nucleotide sequence set forth in SEQ ID NO: 20145, and a second gRNA molecule comprising a targeting domain that comprises a nucleotide sequence set forth in SEQ ID NO: 3536;
(j) a first gRNA molecule comprising a targeting domain that comprises a nucleotide sequence set forth in SEQ ID NO: 19187, and a second gRNA molecule comprising a targeting domain that comprises a nucleotide sequence set forth in SEQ ID NO: 7252;
(k) a first gRNA molecule comprising a targeting domain that comprises a nucleotide sequence set forth in SEQ ID NO: 18752, and a second gRNA molecule comprising a targeting domain that comprises a nucleotide sequence set forth in SEQ ID NO: 3536; and
(l) a first gRNA molecule comprising a targeting domain that comprises a nucleotide sequence set forth in SEQ ID NO: 19187; and a second gRNA molecule comprising a targeting domain that comprises a nucleotide sequence set forth in SEQ ID NO: 7419.

31. A method of modifying a DMD gene in a cell, comprising administering to the cell one of:
(i) a composition comprising one gRNA molecule comprising a targeting domain that is complementary with a target domain of the DMD gene, wherein the targeting domain comprises a nucleotide sequence selected from SEQ ID NOS: 206-826366, and at least one Cas9 molecule;
(ii) a composition comprising a first gRNA molecule, a Cas9 molecule, and a second gRNA molecule;
(iii) a vector comprising a polynucleotide encoding the first gRNA molecule and the second gRNA molecule, and a polynucleotide encoding a Cas9 molecule;
(iv) a genome-editing system comprising a polynucleotide encoding the first gRNA molecule, a polynucleotide encoding a Cas9 molecule, and a polynucleotide encoding the second gRNA molecule; and
(v) a genome-editing system comprising the first gRNA molecule, a Cas9 molecule, and the second gRNA molecule, and
wherein the first gRNA molecule and the second gRNA molecule are selected from the group consisting of:
(a) a first gRNA molecule comprising a targeting domain that comprises a nucleotide sequence set forth in SEQ ID NO: 1977, and a second gRNA molecule comprising a targeting domain that comprises a nucleotide sequence set forth in SEQ ID NO: 2048;
(b) a first gRNA molecule comprising a targeting domain that comprises a nucleotide sequence set forth in SEQ ID NO: 18458, and a second gRNA molecule comprising a targeting domain that comprises a nucleotide sequence set forth in SEQ ID NO: 2048;
(c) a first gRNA molecule comprising a targeting domain that comprises a nucleotide sequence set forth in SEQ ID NO: 19199, and a second gRNA molecule comprising a targeting domain that comprises a nucleotide sequence set forth in SEQ ID NO: 18720;
(d) a first gRNA molecule comprising a targeting domain that comprises a nucleotide sequence set forth in SEQ ID NO: 4709, and a second gRNA molecule comprising a targeting domain that comprises a nucleotide sequence set forth in SEQ ID NO: 18720;
(e) a first gRNA molecule comprising a targeting domain that comprises a nucleotide sequence set forth in SEQ ID NO: 481, and a second gRNA molecule comprising a targeting domain that comprises a nucleotide sequence set forth in SEQ ID NO: 2048;
(f) a first gRNA molecule comprising a targeting domain that comprises a nucleotide sequence set forth in SEQ ID NO: 4709, and a second gRNA molecule comprising a targeting domain that comprises a nucleotide sequence set forth in SEQ ID NO: 22349;
(g) a first gRNA molecule comprising a targeting domain that comprises a nucleotide sequence set forth in SEQ ID NO: 5869, and a second gRNA molecule comprising a targeting domain that comprises a nucleotide sequence set forth in SEQ ID NO: 3536;
(h) a first gRNA molecule comprising a targeting domain that comprises a nucleotide sequence set forth in SEQ ID NO: 18752, and a second gRNA molecule comprising a targeting domain that comprises a nucleotide sequence set forth in SEQ ID NO: 17253;
(i) a first gRNA molecule comprising a targeting domain that comprises a nucleotide sequence set forth in SEQ ID NO: 20145, and a second gRNA molecule comprising a targeting domain that comprises a nucleotide sequence set forth in SEQ ID NO: 3536;
(j) a first gRNA molecule comprising a targeting domain that comprises a nucleotide sequence set forth in SEQ ID NO: 19187, and a second gRNA molecule comprising a targeting domain that comprises a nucleotide sequence set forth in SEQ ID NO: 7252;
(k) a first gRNA molecule comprising a targeting domain that comprises a nucleotide sequence set forth in SEQ ID NO: 18752, and a second gRNA molecule comprising a targeting domain that comprises a nucleotide sequence set forth in SEQ ID NO: 3536; and
(l) a first gRNA molecule comprising a targeting domain that comprises a nucleotide sequence set forth in SEQ ID NO: 19187; and a second gRNA molecule comprising a targeting domain that comprises a nucleotide sequence set forth in SEQ ID NO: 7419.
